United States Patent Application Publication US 2011/0183924 A1 - sequence listing, part 167

SEQ ID NO: 425630 - DNA, 5199 bp, Homo sapiens
cggccccccccggccacggcgcaccgcctccccgcccccgcccgccctcccccaccgcgcgcgctccgcccgccccggagcctcgccctccgccacgatgagcaaatgagcgcgagcgagggcatgaaatttaaattccactcaggggagaaagtgctgtgcttcgagcctgaccccaccaaggcgcgagtgctgtacgatgccaagattgttgatgttattgttgggaaagacgaaaaaggcagaaagatcccagaatatctgatccattttaatggttggaacagaagctgggatagatgggcagcagaagatcatgtgcttcgtgataccgatgaaaatcgtagattacagcgtaaattggcaagaaaagctgtagctcgcctgaggagcacaggaagaaagaagaagcgctgcaggttgcctggtgtggactctgtcttaaaaggcctccccactgaagaaaaagatgaaaatgatgaaaactcattaagcagttcctctgactgtagtgaaaacaaggatgaagaaataagtgaagaaagtgatattgaagaaaagactgaagtgaaagaagaaccagagcttcaaacaagaagggaaatggaagaaagaacaataactatagaaatccctgaagttctgaagaagcagctggaggatgattgttactacattaacaggaggaaacggttagtgaaacttccatgccagaccaacatcataacgattttggaatcctatgtgaagcattttgctatcaatgcagccttttcagccaatgagaggcctcgtcaccatcacgttatgccacatgccaacatgaacgtgcattatatcccagcagaaaagaatgttgacctttgtaaggagatggtggatggattaagaataacctttgattacactctcccgttggttttactctatccatatgaacaagctcagtataaaaaggtgacttcgtctaaattttttcttccaattaaggaaagtgccacaagcactaacaggagccaggaggaactctctcccagtccgcctttgttgaatccatccacgccacagtccacagagagtcagccgaccaccggtgaaccagccacccccaaaaggcgcaaagctgagccagaagcattgcagtctctgaggcggtccacgcgccacagtgccaactgtgacaggctttctgagagcagcgcttcacctcagcccaagcgccggcagcaggacacatccgccagcatgcccaagctcttcctgcacctggaaaagagtaggttcattctcgggtgccccaggccggggagagccagcgtgtactttgtgtttagtcagtgccaggcatggtgctgaggttacatgtgtgtgtgtacagtgcgtgtgattcccatgtccaaagtgctgtcatgctgcctgctttctggagctgtagaaagttgaaacacctggcgcagattgcagcgcagctgtgttggaggcaggactgggctgtttcctcagcctttcttttttgccatcactctaccacttgtgagcaaattgagttatcagaattctatgtattgtgtagctaggcctaatgaagcattcaaaatgagcaatgctaatgggttgtttagctttttgttttctttgtactctgtctctgtagtctctccattctaaagtttaatttggaaaggtctgtcctgaattatcaaagtaagaatactcagatttccataagctcttctcacctcctcttagcccaactcaaactccatcagatcttctcaccttgattttgagctggaatgtttcaatgagcaaaataaattagacaaaagtttactttctttttttccaaaatacacacaggttgatttgctgtaatataaaacttagaagtaaaccactgctaattaatcattttaaactttcaaaaactgctaaaacaggtgccatgaatcaggtacaattactgtagaaactaacattagctattatacactaaccaggcatttttcccaaattaattacaatctggttgtttagcctatgctaattaagccctcttagtagtagtattcactttacattgaagacctcattcacaaatacagggtgctctgtgcttatatccttccacccttgactgccaaaaatgtgtgaaatgggaaagttgatggcagcagggccgacgatgtcacctggtgcctcgcgggctcagtgagttaggaagtcagcagcaggggaggcagcttgcatgcctgtcccccggcacactgtgtggaggtggaaacagagctacgccagcaggcgccaagcacccaactccagagatggaagcctggtggccttcctttcacagagctcagctgctcgcaggctgtgaaatctaagacacccctcataaatatcaaaaacacctccaaagctaacgtcagggtaaaactacttggagtcgaatccccatgccccagtaggtgtatcttgtgtatgacctgtgccctgttcttccctcagcctcgcctgctgtgctgactccttcaggggtccttctaagcatcatcctgttggaactcccaaaagtcatcccagtgccattctgtgttcaggtgcccatttccttgtgtacatcctgtccctgccacatccataagctcctgagagaaaggtctgacttgttgattgtgtcaccccatcacagctcagtgttggtggcatagttccaggtgcgtgaaagtatttgctgattctttgaagattgggaaggctcagaagggcagagttgaagaaggcatacctttaagagaagccctttgaataatcaagtgctaaaacaaaatcaggtgcttttttaaaacagcttgattgagatataatccacataccttaaaattcacacatttaaagtttttagtgtctccagacacagtggttcatgcctgtgagactggggcaggaggatcacttgaggccaggagttcaagatcagcctgggcaatatagtgaaaccccatctcttaaagaaaaagttagccaggtgtgatgatgtgcacctatagtcccagctacttgggaggctgcagctgtggctgtggctgaagctggcggatcgcttgaggcccagagtctaagactgcagtgagctctcattgggccactgcagtcgagcctgggcgacacaaagagaccaccctgtctgatagataactaacaaaatagttttagttgggcaaaattaaagagttgggcaaccatcactgaaatcagtttcagacattttcaccactccaaaaaagaaaccccacatcgactagcagttactcatttgcttctccctatgtcccctgacaaccactaatctatttgtctctatagatttgccagtttggggcatttcatataaatggaatcatctgtatgtaagtggttaataaggattggttgattgaagattgaaaagggtcagctgggaaaatttttaaaaagactgtttttaaaaaggtgctacaaaataaagtgctatctttttctgtttctctttgtactttttattttttatttgtatttattgatgtgaaattcacatataaaattaaccattgtaaagtgaataattcagtggcacttaacagcttcattgacacatccacatatacagttcaatccagtagtttttagtgtattcacagagttgtgcgaccatctgcacagtcaattccagaacattttcagcacccccccacgagaaaccccatacccagtagcaatcactccccacttccccttctgcaagctcctggcaaccactaaagctgctttcggtctctctggatttgcctaccctgggtatttcatataaatgggaacatagtatgtggccctttgtgattggctccattcactaagcatagtcttttaaggttcatccacattgtagcatatgtcagtgctttattccttatttttttaaccaaataaaattcaggtgctatctgttaggaaagtcttatcgttaaaggttggtaatttctgagaaccaagtttagatttatgttctgcagtttttaacagtcttgaggcagtctttaattcagttgctgtgtgaataatttcatctttttctttggaagagacacctgtgcatagcagatcatcttcacctattcctctgactcctagcaaggaagggagtgctgtgtttgctggctttgaagggagaagaactaatgaaataaacgaggtcctctcctggaagcttgtgcctgacaattaccccccaggtgaccagccgcctccaccctcttacatttatggggcacaacatttgctgcgattgtttgtgaaacttccagaaatccttggaaagatgtccttttctgagaagaatctgaaggctttattgaagcactttgatctctttttgaggtttttagcagaataccacgatgacttcttcccagagtcggcttatgtcgctgcctgtgaggcacattacagcaccaagaacccccgggcaatttattaaaatgttgttggttctgtaagagcaactgctctgtctagtttggcgctctgggttccaggtgaataactaacaaggtggtgggtctttacccacagcgcaaacacaatgcccaccttggggctctgttgtttgagttgcccacatactgcagttattctgttaggaatgattccctgggtgcctgaaagtgctctgacacgacacttgttactttgcaggccatctgtgatggcaaggaaaaagcaactatgttcacagtgaaatattcgtggaataggttaggccatttcagtagacattgcagttagttagcaagaaccacattgtctctttatttgttagcattaaacaaatttttttttgcaaattggttttatttttttgatgaagccgagcaactctgtccaaaaaggtttagtttgtactcggaaaccacaaagtagtctcaaagtattttagagggaatcgatattgatggcaaaagaaaatttgcagctatgcatttgcttctaacggttccctctctgtgaaacattatttttggtgatctaaagaaagcattgcctttcttatttgagattttacagctatactttgttgtgtaatgttatggttccctttctgtaaaatgttatttttggtgatctaaataaagcctgtcttgtttgaaagaaaaaaaaaaa

SEQ ID NO: 425631 - DNA, 2337 bp, Homo sapiens
acgcgcggttgggagcctcgcccatgctttgtcgcgttaccggggctaccgtttgcgcccccgactgcaacggtggccgctgagggaggaggcttctcgaatacggtttctgtcttcgcgttaaatgtctccttctgtgcggcctggtgccgggtgggctcctgtgggacgccctggccgtccgatccagattgttgatgttattgttgggaaagacgaaaaaggcagaaagatcccagaatatctgatccattttaatggttggaacagaagctgggatagatgggcagcagaagatcatgtgcttcgtgataccgatgaaaatcgtagattacagcgtaaattggcaagaaaagctgtagctcgcctgaggagcacaggaagaaagaagaagcgctgcaggttgcctggtgtggactctgtcttaaaaggcctccccactgaagaaaaagatgaaaatgatgaaaactcattaagcagttcctctgactgtagtgaaaacaaggatgaagaaataagtgaagaaagtgatattgaagaaaagactgaagtgaaagaagaaccagagcttcaaacaagaagggaaatggaagaaagaacaataactatagaaatccctgaagttctgaagaagcagctggaggatgattgttactacattaacaggaggaaacggttagtgaaacttccatgccagaccaacatcataacgattttggaatcctatgtgaagcattttgctatcaatgcagccttttcagccaatgagaggcctcgtcaccatcacgttatgccacatgccaacatgaacgtgcattatatcccagcagaaaagaatgttgacctttgtaaggagatggtggatggattaagaataacctttgattacactctcccgttggttttactctatccatatgaacaagctcagtataaaaaggtgacttcgtctaaattttttcttccaattaaggaaagtgccacaagcactaacaggagccaggaggaactctctcccagtccgcctttgttgaatccatccacgccacagtccacagagagtcagccgaccaccggtgaaccagccacccccaaaaggcgcaaagctgagccagaagcattgcagtctctgaggcggtccacgcgccacagtgccaactgtgacaggctttctgagagcagcgcttcacctcagcccaagcgccggcagcaggacacatccgccagcatgcccaagctcttcctgcacctggaaaagaagacacctgtgcatagcagatcatcttcacctattcctctgactcctagcaaggaagggagtgctgtgtttgctggctttgaagggagaagaactaatgaaataaacgaggtcctctcctggaagcttgtgcctgacaattaccccccaggtgaccagccgcctccaccctcttacatttatggggcacaacatttgctgcgattgtttgtgaaacttccagaaatccttggaaagatgtccttttctgagaagaatctgaaggctttattgaagcactttgatctctttttgaggtttttagcagaataccacgatgacttcttcccagagtcggcttatgtcgctgcctgtgaggcacattacagcaccaagaacccccgggcaatttattaaaatgttgttggttctgtaagagcaactgctctgtctagtttggcgctctgggttccaggtgaataactaacaaggtggtgggtctttacccacagcgcaaacacaatgcccaccttggggctctgttgtttgagttgcccacatactgcagttattctgttaggaatgattccctgggtgcctgaaagtgctctgacacgacacttgttactttgcaggccatctgtgatggcaaggaaaaagcaactatgttcacagtgaaatattcgtggaataggttaggccatttcagtagacattgcagttagttagcaagaaccacattgtctctttatttgttagcattaaacaaatttttttttgcaaattggttttatttttttgatgaagccgagcaactctgtccaaaaaggtttagtttgtactcggaaaccacaaagtagtctcaaagtattttagagggaatcgatattgatggcaaaagaaaatttgcagctatgcatttgcttctaacggttccctctctgtgaaacattatttttggtgatctaaagaaagcattgcctttcttatttgagattttacagctatactttgttgtgtaatgttatggttccctttctgtaaaatgttatttttggtgatctaaataaagcctgtcttgtttgaaagaaaaaaaaaaa

SEQ ID NO: 425632 - DNA, 5143 bp, Homo sapiens
cggccccccccggccacggcgcaccgcctccccgcccccgcccgccctcccccaccgcgcgcgctccgcccgccccggagcctcgccctccgccacgatgagcaaatgagcgcgagcgagggcatgaaatttaaattccactcaggggagaaagtgctgtgcttcgagcctgaccccaccaaggcgcgagtgctgtacgatgccaagattgttgatgttattgttgggaaagacgaaaaaggcagaaagatcccagaatatctgatccattttaatggttggaacagaagctgggatagatgggcagcagaagatcatgtgcttcgtgataccgatgaaaatcgtagattacagcgtaaattggcaagaaaagctgtagctcgcctgaggagcacaggaagaaagaagaagcgctgcaggttgcctggtgtggactctgtcttaaaaggcctccccactgaagaaaaagatgaaaatgatgaaaactcattaagcagttcctctgactgtagtgaaaacaaggatgaagaaataagtgaagaaagtgatattgaagaaaagactgaagtgaaagaagaaccagagcttcaaacaagaagggaaatggaagaaagaacaataactatagaaatccctgaagttctgaagaagcagctggaggatgattgttactacattaacaggaggaaacggttagtgaaacttccatgccagaccaacatcataacgattttggaatcctatgtgaagcattttgctatcaatgcagccttttcagccaatgagaggcctcgtcaccatcacgttatgccacatgccaacatgaacgtgcattatatcccagcagaaaagaatgttgacctttgtaaggagatggtggatggattaagaataacctttgattacactctcccgttggttttactctatccatatgaacaagctcagtataaaaaggagccaggaggaactctctcccagtccgcctttgttgaatccatccacgccacagtccacagagagtcagccgaccaccggtgaaccagccacccccaaaaggcgcaaagctgagccagaagcattgcagtctctgaggcggtccacgcgccacagtgccaactgtgacaggctttctgagagcagcgcttcacctcagcccaagcgccggcagcaggacacatccgccagcatgcccaagctcttcctgcacctggaaaagagtaggttcattctcgggtgccccaggccggggagagccagcgtgtactttgtgtttagtcagtgccaggcatggtgctgaggttacatgtgtgtgtgtacagtgcgtgtgattcccatgtccaaagtgctgtcatgctgcctgctttctggagctgtagaaagttgaaacacctggcgcagattgcagcgcagctgtgttggaggcaggactgggctgtttcctcagcctttcttttttgccatcactctaccacttgtgagcaaattgagttatcagaattctatgtattgtgtagctaggcctaatgaagcattcaaaatgagcaatgctaatgggttgtttagctttttgttttctttgtactctgtctctgtagtctctccattctaaagtttaatttggaaaggtctgtcctgaattatcaaagtaagaatactcagatttccataagctcttctcacctcctcttagcccaactcaaactccatcagatcttctcaccttgattttgagctggaatgtttcaatgagcaaaataaattagacaaaagtttactttctttttttccaaaatacacacaggttgatttgctgtaatataaaacttagaagtaaaccactgctaattaatcattttaaactttcaaaaactgctaaaacaggtgccatgaatcaggtacaattactgtagaaactaacattagctattatacactaaccaggcatttttcccaaattaattacaatctggttgtttagcctatgctaattaagccctcttagtagtagtattcactttacattgaagacctcattcacaaatacagggtgctctgtgcttatatccttccacccttgactgccaaaaatgtgtgaaatgggaaagttgatggcagcagggccgacgatgtcacctggtgcctcgcgggctcagtgagttaggaagtcagcagcaggggaggcagcttgcatgcctgtcccccggcacactgtgtggaggtggaaacagagctacgccagcaggcgccaagcacccaactccagagatggaagcctggtggccttcctttcacagagctcagctgctcgcaggctgtgaaatctaagacacccctcataaatatcaaaaacacctccaaagctaacgtcagggtaaaactacttggagtcgaatccccatgccccagtaggtgtatcttgtgtatgacctgtgccctgttcttccctcagcctcgcctgctgtgctgactccttcaggggtccttctaagcatcatcctgttggaactcccaaaagtcatcccagtgccattctgtgttcaggtgcccatttccttgtgtacatcctgtccctgccacatccataagctcctgagagaaaggtctgacttgttgattgtgtcaccccatcacagctcagtgttggtggcatagttccaggtgcgtgaaagtatttgctgattctttgaagattgggaaggctcagaagggcagagttgaagaaggcatacctttaagagaagccctttgaataatcaagtgctaaaacaaaatcaggtgcttttttaaaacagcttgattgagatataatccacataccttaaaattcacacatttaaagtttttagtgtctccagacacagtggttcatgcctgtgagactggggcaggaggatcacttgaggccaggagttcaagatcagcctgggcaatatagtgaaaccccatctcttaaagaaaaagttagccaggtgtgatgatgtgcacctatagtcccagctacttgggaggctgcagctgtggctgtggctgaagctggcggatcgcttgaggcccagagtctaagactgcagtgagctctcattgggccactgcagtcgagcctgggcgacacaaagagaccaccctgtctgatagataactaacaaaatagttttagttgggcaaaattaaagagttgggcaaccatcactgaaatcagtttcagacattttcaccactccaaaaaagaaaccccacatcgactagcagttactcatttgcttctccctatgtcccctgacaaccactaatctatttgtctctatagatttgccagtttggggcatttcatataaatggaatcatctgtatgtaagtggttaataaggattggttgattgaagattgaaaagggtcagctgggaaaatttttaaaaagactgtttttaaaaaggtgctacaaaataaagtgctatctttttctgtttctctttgtactttttattttttatttgtatttattgatgtgaaattcacatataaaattaaccattgtaaagtgaataattcagtggcacttaacagcttcattgacacatccacatatacagttcaatccagtagtttttagtgtattcacagagttgtgcgaccatctgcacagtcaattccagaacattttcagcacccccccacgagaaaccccatacccagtagcaatcactccccacttccccttctgcaagctcctggcaaccactaaagctgctttcggtctctctggatttgcctaccctgggtatttcatataaatgggaacatagtatgtggccctttgtgattggctccattcactaagcatagtcttttaaggttcatccacattgtagcatatgtcagtgctttattccttatttttttaaccaaataaaattcaggtgctatctgttaggaaagtcttatcgttaaaggttggtaatttctgagaaccaagtttagatttatgttctgcagtttttaacagtcttgaggcagtctttaattcagttgctgtgtgaataatttcatctttttctttggaagagacacctgtgcatagcagatcatcttcacctattcctctgactcctagcaaggaagggagtgctgtgtttgctggctttgaagggagaagaactaatgaaataaacgaggtcctctcctggaagcttgtgcctgacaattaccccccaggtgaccagccgcctccaccctcttacatttatggggcacaacatttgctgcgattgtttgtgaaacttccagaaatccttggaaagatgtccttttctgagaagaatctgaaggctttattgaagcactttgatctctttttgaggtttttagcagaataccacgatgacttcttcccagagtcggcttatgtcgctgcctgtgaggcacattacagcaccaagaacccccgggcaatttattaaaatgttgttggttctgtaagagcaactgctctgtctagtttggcgctctgggttccaggtgaataactaacaaggtggtgggtctttacccacagcgcaaacacaatgcccaccttggggctctgttgtttgagttgcccacatactgcagttattctgttaggaatgattccctgggtgcctgaaagtgctctgacacgacacttgttactttgcaggccatctgtgatggcaaggaaaaagcaactatgttcacagtgaaatattcgtggaataggttaggccatttcagtagacattgcagttagttagcaagaaccacattgtctctttatttgttagcattaaacaaatttttttttgcaaattggttttatttttttgatgaagccgagcaactctgtccaaaaaggtttagtttgtactcggaaaccacaaagtagtctcaaagtattttagagggaatcgatattgatggcaaaagaaaatttgcagctatgcatttgcttctaacggttccctctctgtgaaacattatttttggtgatctaaagaaagcattgcctttcttatttgagattttacagctatactttgttgtgtaatgttatggttccctttctgtaaaatgttatttttggtgatctaaataaagcctgtcttgtttgaaagaaaaaaaaaaa

SEQ ID NO: 425633 - DNA, 4147 bp, Homo sapiens
gcggccgcccgcgaactagttctagatcgcgagcggccgcccgcgatctacaactagcaaaaggcgcaaagctgagccagaagcattgcagtctctgaggcggtccacgcgccacagtgccaactgtgacaggctttctgagagcagcgcttcacctcagcccaagcgccggcagcaggacacatccgccagcatgcccaagctcttcctgcacctggaaaagagtaggttcattctcgggtgccccaggccggggagagccagcgtgtactttgtgtttagtcagtgccaggcatggtgctgaggttacatgtgtgtgtgtacagtgcgtgtgattcccatgtccaaagtgctgtcatgctgcctgctttctggagctgtagaaagttgaaacacctggcgcagattgcagcgcagctgtgttggaggcaggactgggctgtttcctcagcctttcttttttgccatcactctaccacttgtgagcaaattgagttatcagaattctatgtattgtgtagctaggcctaatgaagcattcaaaatgagcaatgctaatgggttgtttagctttttgttttctttgtactctgtctctgtagtctctccattctaaagtttaatttggaaaggtctgtcctgaattatcaaagtaagaatactcagatttccataagctcttctcacctcctcttagcccaactcaaactccatcagatcttctcaccttgattttgagctggaatgtttcaatgagcaaaataaattagacaaaagtttactttctttttttccaaaatacacacaggttgatttgctgtaatataaaacttagaagtaaaccactgctaattaatcattttaaactttcaaaaactgctaaaacaggtgccatgaatcaggtacaattactgtagaaactaacattagctattatacactaaccaggcatttttcccaaattaattacaatctggttgtttagcctatgctaattaagccctcttagtagtagtattcactttacattgaagacctcattcacaaatacagggtgctctgtgcttatatccttccacccttgactgccaaaaatgtgtgaaatgggaaagttgatggcagcagggccgacgatgtcacctggtgcctcgcgggctcagtgagttaggaagtcagcagcaggggaggcagcttgcatgcctgtcccccggcacactgtgtggaggtggaaacagagctacgccagcaggcgccaagcacccaactccagagatggaagcctggtggccttcctttcacagagctcagctgctcgcaggctgtgaaatctaagacacccctcataaatatcaaaaacacctccaaagctaacgtcagggtaaaactacttggagtcgaatccccatgccccagtaggtgtatcttgtgtatgacctgtgccctgttcttccctcagcctcgcctgctgtgctgactccttcaggggtccttctaagcatcatcctgttggaactcccaaaagtcatcccagtgccattctgtgttcaggtgcccatttccttgtgtacatcctgtccctgccacatccataagctcctgagagaaaggtctgacttgttgattgtgtcaccccatcacagctcagtgttggtggcatagttccaggtgcgtgaaagtatttgctgattctttgaagattgggaaggctcagaagggcagagttgaagaaggcatacctttaagagaagccctttgaataatcaagtgctaaaacaaaatcaggtgcttttttaaaacagcttgattgagatataatccacataccttaaaattcacacatttaaagtttttagtgtctccagacacagtggttcatgcctgtgagactggggcaggaggatcacttgaggccaggagttcaagatcagcctgggcaatatagtgaaaccccatctcttaaagaaaaagttagccaggtgtgatgatgtgcacctatagtcccagctacttgggaggctgcagctgtggctgtggctgaagctggcggatcgcttgaggcccagagtctaagactgcagtgagctctcattgggccactgcagtcgagcctgggcgacacaaagagaccaccctgtctgatagataactaacaaaatagttttagttgggcaaaattaaagagttgggcaaccatcactgaaatcagtttcagacattttcaccactccaaaaaagaaaccccacatcgactagcagttactcatttgcttctccctatgtcccctgacaaccactaatctatttgtctctatagatttgccagtttggggcatttcatataaatggaatcatctgtatgtaagtggttaataaggattggttgattgaagattgaaaagggtcagctgggaaaatttttaaaaagactgtttttaaaaaggtgctacaaaataaagtgctatctttttctgtttctctttgtactttttattttttatttgtatttattgatgtgaaattcacatataaaattaaccattgtaaagtgaataattcagtggcacttaacagcttcattgacacatccacatatacagttcaatccagtagtttttagtgtattcacagagttgtgcgaccatctgcacagtcaattccagaacattttcagcacccccccacgagaaaccccatacccagtagcaatcactccccacttccccttctgcaagctcctggcaaccactaaagctgctttcggtctctctggatttgcctaccctgggtatttcatataaatgggaacatagtatgtggccctttgtgattggctccattcactaagcatagtcttttaaggttcatccacattgtagcatatgtcagtgctttattccttatttttttaaccaaataaaattcaggtgctatctgttaggaaagtcttatcgttaaaggttggtaatttctgagaaccaagtttagatttatgttctgcagtttttaacagtcttgaggcagtctttaattcagttgctgtgtgaataatttcatctttttctttggaagagacacctgtgcatagcagatcatcttcacctattcctctgactcctagcaaggaagggagtgctgtgtttgctggctttgaagggagaagaactaatgaaataaacgaggtcctctcctggaagcttgtgcctgacaattaccccccaggtgaccagccgcctccaccctcttacatttatggggcacaacatttgctgcgattgtttgtgaaacttccagaaatccttggaaagatgtccttttctgagaagaatctgaaggctttattgaagcactttgatctctttttgaggtttttagcagaataccacgatgacttcttcccagagtcggcttatgtcgctgcctgtgaggcacattacagcaccaagaacccccgggcaatttattaaaatgttgttggttctgtaagagcaactgctctgtctagtttggcgctctgggttccaggtgaataactaacaaggtggtgggtctttacccacagcgcaaacacaatgcccaccttggggctctgttgtttgagttgcccacatactgcagttattctgttaggaatgattccctgggtgcctgaaagtgctctgacacgacacttgttactttgcaggccatctgtgatggcaaggaaaaagcaactatgttcacagtgaaatattcgtggaataggttaggccatttcagtagacattgcagttagttagcaagaaccacattgtctctttatttgttagcattaaacaaatttttttttgcaaattggttttatttttttgatgaagccgagcaactctgtccaaaaaggtttagtttgtactcggaaaccacaaagtagtctcaaagtattttagagggaatcgatattgatggcaaaagaaaatttgcagctatgcatttgcttctaacggttccctctctgtgaaacattatttttggtgatctaaagaaagcattgcctttcttatttgagattttacagctatactttgttgtgtaatgttatggttccctttctgtaaaatgttatttttggtgatctaaataaagcctgtcttgtttgaaagaaaaaaaaaaa

SEQ ID NO: 425634 - DNA, 4654 bp, Homo sapiens
cggccccccccggccacggcgcaccgcctccccgcccccgcccgccctcccccaccgcgcgcgctccgcccgccccggagcctcgccctccgccacgatgagcaaatgagcgcgagcgagggcatgaaatttaaattccactcaggggagaaagtgctgtgcttcgagcctgaccccaccaaggcgcgagtgctgtacgatgccaagattgttgatgttattgttgggaaagacgaaaaaggcagaaagatcccagaatatctgatccattttaatggttggaacagaagctgggatagatgggcagcagaagatcatgtgcttcgtgataccgatgaaaatcgtagattacagcgtaaattggcaagaaaagctgtagctcgcctgaggagcacaggaagaaagaagaagcgctgcaggttgcctggtgtggactctgtcttaaaaggcctccccactgaagaaaaagatgaaaatgatgaaaactcattaagcagttcctctgactgtagtgaaaacaaggatgaagaaataagtgaagaaagtgatattgaagaaaagactgaagtgaaagaagaaccagagcttcaaacaagaagggaaatggaagaaagaacaataactatagaaatccctgaagttctgaagaagcagctggaggatgattgttactacattaacaggaggaaacggttagtgaaacttccatgccagaccaacatcataacgattttggaatcctatgtgaagcattttgctatcaatgcagccttttcagccaatgagaggcctcgtcaccatcacgttatgccacatgccaacatgaacgtgcattatatcccagcagaaaagaatgttgacctttgtaaggagatggtggatggattaagaataacctttgattacactctcccgttggttttactctatccatatgaacaagctcagtataaaaaggtgacttcgtctaaattttttcttccaattaaggaaagtgccacaagcactaacaggagccaggaggaactctctcccagtccgcctttgttgaatccatccacgccacagtccacagagagtcagccgaccaccggtgaaccagccacccccaaaaggcgcaaagctgagccagaagcattgcagtctctgaggcggtccacgcgccacagtgccaactgtgacaggctttctgagagcagcgcttcacctcagcccaagcgccggcagcaggacacatccgccagcatgcccaagctcttcctgcacctggaaaagagtaggttcattctcgggtgccccaggccggggagagccagcgtgtactttgtgtttagtcagtgccaggcatggtgctgaggttacatgtgtgtgtgtacagtgcgtgtgattcccatgtccaaagtgctgtcatgctgcctgctttctggagctgtagaaagttgaaacacctggcgcagattgcagcgcagctgtgttggaggcaggactgggctgtttcctcagcctttcttttttgccatcactctaccacttgtgagcaaattgagttatcagaattctatgtattgtgtagctaggcctaatgaagcattcaaaatgagcaatgctaatgggttgtttagctttttgttttctttgtactctgtctctgtagtctctccattctaaagtttaatttggaaaggtctgtcctgaattatcaaagtaagaatactcagatttccataagctcttctcacctcctcttagcccaactcaaactccatcagatcttctcaccttgattttgagctggaatgtttcaatgagcaaaataaattagacaaaagtttactttctttttttccaaaatacacacaggttgatttgctgtaatataaaacttagaagtaaaccactgctaattaatcattttaaactttcaaaaactgctaaaacaggtgccatgaatcaggtacaattactgtagaaactaacattagctattatacactaaccaggcatttttcccaaattaattacaatctggttgtttagcctatgctaattaagccctcttagtagtagtattcactttacattgaagacctcattcacaaatacagggtgctctgtgcttatatccttccacccttgactgccaaaaatgtgtgaaatgggaaagttgatggcagcagggccgacgatgtcacctggtgcctcgcgggctcagtgagttaggaagtcagcagcaggggaggcagcttgcatgcctgtcccccggcacactgtgtggaggtggaaacagagctacgccagcaggcgccaagcacccaactccagagatggaagcctggtggccttcctttcacagagctcagctgctcgcaggctgtgaaatctaagacacccctcataaatatcaaaaacacctccaaagctaacgtcagggtaaaactacttggagtcgaatccccatgccccagtaggtgtatcttgtgtatgacctgtgccctgttcttccctcagcctcgcctgctgtgctgactccttcaggggtccttctaagcatcatcctgttggaactcccaaaagtcatcccagtgccattctgtgttcaggtgcccatttccttgtgtacatcctgtccctgccacatccataagctcctgagagaaaggtctgacttgttgattgtgtcaccccatcacagctcagtgttggtggcatagttccaggtgcgtgaaagtatttgctgattctttgaagattgggaaggctcagaagggcagagttgaagaaggcatacctttaagagaagccctttgaataatcaagtgctaaaacaaaatcaggtgcttttttaaaacagcttgattgagatataatccacataccttaaaattcacacatttaaagtttttagtgtctccagacacagtggttcatgcctgtgagactggggcaggaggatcacttgaggccaggagttcaagatcagcctgggcaatatagtgaaaccccatctcttaaagaaaaagttagccaggtgtgatgatgtgcacctatagtcccagctacttgggaggctgcagctgtggctgtggctgaagctggcggatcgcttgaggcccagagtctaagactgcagtgagctctcattgggccactgcagtcgagcctgggcgacacaaagagaccaccctgtctgatagataactaacaaaatagttttagttgggcaaaattaaagagttgggcaaccatcactgaaatcagtttcagacattttcaccactccaaaaaagaaaccccacatcgactagcagttactcatttgcttctccctatgtcccctgacaaccactaatctatttgtctctatagatttgccagtttggggcatttcatataaatggaatcatctgtatgtaagtggttaataaggattggttgattgaagattgaaaagggtcagctgggaaaatttttaaaaagactgtttttaaaaaggtgctacaaaataaagtgctatctttttctgtttctctttgtactttttattttttatttgtatttattgatgtgaaattcacatataaaattaaccattgtaaagtgaataattcagtggcacttaacagcttcattgacacatccacatatacagttcaatccagtagtttttagtgtattcacagagttgtgcgaccatctgcacagtcaattccagaacattttcagcacccccccacgagaaaccccatacccagtagcaatcactccccacttccccttctgcaagctcctggcaaccactaaagctgctttcggtctctctggatttgcctaccctgggtatttcatataaatgggaacatagtatgtggccctttgtgattggctccattcactaagcatagtcttttaaggttcatccacattgtagcatatgtcagtgctttattccttatttttttaaccaaataaaattcaggtgctatctgttaggaaagtcttatcgttaaaggttggtaatttctgagaaccaagtttagatttatgttctgcagtttttaacagtcttgaggcagtctttaattcagttgctgtgtgaataatttcatctttttctttggaagagacacctgtgcatagcagatcatcttcacctattcctctgactcctagcaaggaagggagtgctgtgtttgctggctttgaagggagaagaactaatgaaataaacgaggtaaagaatgtttgatgtttgttcccaatggttccttcatttgtgattacttcaattctataggtggaagtcaaggttcttaaagcatcatgttgctgctattactgtaaacattatcaaaattgtacgtaattttatgcttaacactgtgggttttggtttctaaagtgagaaaattgttaggattccagccctacactgacaatcatcttttaaataagtgcaattattgaaataccagtatttttactttatagaacagatgtcaatttccacagagggccagagggtaaatactttcggctttgtgggccatatggtgtctgtcaaggctacttaactccaaaagtagccacagatagtatgtaaataaaatgagtgtgctatattccaataaaacttgatttatggacactgaaaaaa

SEQ ID NO: 425635 - DNA, 2018 bp, Homo sapiens
cggccccccccggccacggcgcaccgcctccccgcccccgcccgccctcccccaccgcgcgcgctccgcccgccccggagcctcgccctccgccacgatgagcaaatgagcgcgagcgagggcatgaaatttaaattccactcaggggagaaagtgctgtgcttcgagcctgaccccaccaaggcgcgagtgctgtacgatgccaagattgttgatgttattgttgggaaagacgaaaaaggcagaaagatcccagaatatctgatccattttaatggttggaacagaagctgggatagatgggcagcagaagatcatgtgcttcgtgataccgatgaaaatcgtagattacagcgtaaattggcaagaaaagctgtagctcgcctgaggagcacaggaagaaagaagaagcgctgcaggttgcctggtgtggactctgtcttaaaaggcctccccactgaagaaaaagatgaaaatgatgaaaactcattaagcagttcctctgactgtagtgaaaacaaggatgaagaaataagtgaagaaagtgatattgaagaaaagactgaagtgaaagaagaaccagagcttcaaacaagaagggaaatggaagaaagaacaataactatagaaatccctgaagttctgaagaagcagctggaggatgattgttactacattaacaggaggaaacggttagtgaaacttccatgccagaccaacatcataacgattttggaatcctatgtgaagcattttgctatcaatgcagccttttcagccaatgagaggcctcgtcaccatcacgttatgccacatgccaacatgaacgtgcattatatcccagcagaaaagaatgttgacctttgtaaggagatggtggatggattaagaataacctttgattacactctcccgttggttttactctatccatatgaacaagctcagtataaaaaggtgacttcgtctaaattttttcttccaattaaggaaagtgccacaagcactaacaggagccaggaggaactctctcccagtccgcctttgttgaatccatccacgccacagtccacagagagtcagccgaccaccggtgaaccagccacccccaaaaggcgcaaagctgagccagaagcattgcagtctctgaggcggtccacgcgccacagtgccaactgtgacaggctttctgagagcagcgcttcacctcagcccaagcgccggcagcaggacacatccgccagcatgcccaagctcttcctgcacctggaaaagagtaggttcattctcgggtgccccaggccggggagagccagcgtgtactttgtgtttagtcagtgccaggcatggtgctgaggttacatgtgtgtgtgtacagtgcgtgtgattcccatgtccaaagtgctgtcatgctgcctgctttctggagctgtagaaagttgaaacacctggcgcagattgcagcgcagctgtgttggaggcaggactgggctgtttcctcagcctttcttttttgccatcactctaccacttgtgagcaaattgagttatcagaattctatgtattgtgtagctaggcctaatgaagcattcaaaatgagcaatggcaaaaaaaaaacaaaaaaacaaaacaaaaaacaaactgttttggggcgcgcgccttcggcgccctctggagaacagcgttttctgaacacccattctggtggcggcgcgcgcggggcccccacgagatgagtgtatcggttgaaacagtgtggccaaaagggtgttcccccagggagaacaccccggggccagataggaaaacaggggcgtgggggaattctcttccacaatatttaaaacaagccccgggggggaacaccagggaggcgtcttcggaacaaaatctctccagaagtggggattctcggggagggctcataaacgcgggagcttattatccaacaggggacgttcccagaggagaagcctccgaaattctcaaaatattacccccggcttctgggtggctc

SEQ ID NO: 425636 - DNA, 1112 bp, Homo sapiens
cggccccccccggccacggcgcaccgcctccccgcccccgcccgccctcccccaccgcgcgcgctccgcccgccccggagcctcgccctccgccacgatgagcaaatgagcgcgagcgagggcatgaaatttaaattccactcaggggagaaagtgctgtgcttcgagcctgaccccaccaaggcgcgagtgctgtacgatgccaagattgttgatgttattgttgggaaagacgaaaaaggcagaaagatcccagaatatctgatccattttaatggttggaacagaagctgggatagatgggcagcagaagatcatgtgcttcgtgataccgatgaaaatcgtagattacagcgtaaattggcaagaaaagctgtagctcgcctgaggagcacaggaagaaagaagaagcgctgcaggttgcctggtgtggactctgtcttaaaaggcctccccactgaagaaaaagatgaaaatgatgaaaactcattaagcagttcctctgactgtagtgaaaacaaggatgaagaaataagtgaagaaagtgatattgaagaaaagactgaagtgaaagaagaaccagagcttcaaacaagaagggaaatggaagaaagaacaataactatagaaatccctgaagttctgaagaagcagctggaggatgattgttactacattaacaggaggaaacggttagtgaaacttccatgccagaccaacatcataacgattttggaatcctatgtgaagcattttgctatcaatgcagccttttcagccaatgagaggcctcgtcaccatcacgttatgccacatgccaacatgaacgtgcattatatcccagcagaaaagaagtcaatctttttttcctaagaaaaaatgtccgcgagtattaaatatttagatcaatgtttataaaatgattactttgtatatctcattattcctattttggaataaaaactgaccttctttaatcatatacttgtcttttgtaaatagcagcttttgtgtcattctccctactttattagttaatttaaattggaaaaaaccctcaaactaatattcttgtctgttccagtcttataaataaaacttataatgcatgt

SEQ ID NO: 425637 - DNA, 470 bp, Homo sapiens
atcctaactgacaatacactttccgatcattagctagtgtgatttttgcatccattgaaattggttgtcaaaataaatttctattgtgaaagatacagtatttgtgtttggcatttaaaaatacatggaattgcagtttattatttccagtagcacccacactacacgtgaagatctgtagacataagggttggtgaagtataaaatgcgagtttaccggatgcttttgtttcacctagcattaagcagttcctctgactgtagtgaaaacaaggatgaagaaataagtgaagaaagtgatattgaagaaaagactgaagtggtataaagtttttattgtaaaaactttctctttgttatatattttagtggtaaaaattcacagtgaaatactccagttgtgaattgttttctaaagatacatcttttaaaccaataatgtaaatttttatttgacatttaaagaaaaa

SEQ ID NO: 425638 - DNA, 540 bp, Homo sapiens
gtgttctcatgggatctgttctctttttggcacctcccaggccttggtcccatttatgaatgcaacaggaaactgtaggatcctaactgacaatacactttccgatcattagctagtgtgatttttgcatccattgaaattggttgtcaaaataaatttctattgtgaaagatacagtatttgtgtttggcatttaaaaatacatggaattgcagtttattatttccagtagcacccacactacacgtgaagatctgtagacataagggttggtgaagtataaaatgcgagtttaccggatgcttttgtttcacctagcattaagcagttcctctgactgtagtgaaaacaaggatgaagaaataagtgaagaaagtgatattgaagaaaagactgaagtggtataaagtttttattgtaaaaactttctctttgttatatattttagtggtaaaaattcacagtgaaatactccagttgtgaattgttttctaaagatacatcttttaaaccaataatgtaaatttttatttgacattt

SEQ ID NO: 425639 - DNA, 2318 bp, Homo sapiens
aggcgtccacttgggggaaaaaaatgaaaggaaaaatatttcaacccggctgtcggtctaaaagaggagagaatgctttctttaaaaaagggtctgtgaattagttttcctgatctaacttctaattttctgtatgttctgccatttgtgggaaatatttcttcgtttcagattgttgatgttattgttgggaaagacgaaaaaggcagaaagatcccagaatatctgatccattttaatggttggaacagaagctgggatagatgggcagcagaagatcatgtgcttcgtgataccgatgaaaatcgtagattacagcgtaaattggcaagaaaagctgtagctcgcctgaggagcacaggaagaaagaagaagcgctgcaggttgcctggtgtggactctgtcttaaaaggcctccccactgaagaaaaagatgaaaatgatgaaaactcattaagcagttcctctgactgtagtgaaaacaaggatgaagaaataagtgaagaaagtgatattgaagaaaagactgaagtgaaagaagaaccagagcttcaaacaagaagggaaatggaagaaagaacaataactatagaaatccctgaagttctgaagaagcagctggaggatgattgttactacattaacaggaggaaacggttagtgaaacttccatgccagaccaacatcataacgattttggaatcctatgtgaagcattttgctatcaatgcagccttttcagccaatgagaggcctcgtcaccatcacgttatgccacatgccaacatgaacgtgcattatatcccagcagaaaagaatgttgacctttgtaaggagatggtggatggattaagaataacctttgattacactctcccgttggttttactctatccatatgaacaagctcagtataaaaaggtgacttcgtctaaattttttcttccaattaaggaaagtgccacaagcactaacaggagccaggaggaactctctcccagtccgcctttgttgaatccatccacgccacagtccacagagagtcagccgaccaccggtgaaccagccacccccaaaaggcgcaaagctgagccagaagcattgcagtctctgaggcggtccacgcgccacagtgccaactgtgacaggctttctgagagcagcgcttcacctcagcccaagcgccggcagcaggacacatccgccagcatgcccaagctcttcctgcacctggaaaagaagacacctgtgcatagcagatcatcttcacctattcctctgactcctagcaaggaagggagtgctgtgtttgctggctttgaagggagaagaactaatgaaataaacgaggtcctctcctggaagcttgtgcctgacaattaccccccaggtgaccagccgcctccaccctcttacatttatggggcacaacatttgctgcgattgtttgtgaaacttccagaaatccttggaaagatgtccttttctgagaagaatctgaaggctttattgaagcactttgatctctttttgaggtttttagcagaataccacgatgacttcttcccagagtcggcttatgtcgctgcctgtgaggcacattacagcaccaagaacccccgggcaatttattaaaatgttgttggttctgtaagagcaactgctctgtctagtttggcgctctgggttccaggtgaataactaacaaggtggtgggtctttacccacagcgcaaacacaatgcccaccttggggctctgttgtttgagttgcccacatactgcagttattctgttaggaatgattccctgggtgcctgaaagtgctctgacacgacacttgttactttgcaggccatctgtgatggcaaggaaaaagcaactatgttcacagtgaaatattcgtggaataggttaggccatttcagtagacattgcagttagttagcaagaaccacattgtctctttatttgttagcattaaacaaatttttttttgcaaattggttttatttttttgatgaagccgagcaactctgtccaaaaaggtttagtttgtactcggaaaccacaaagtagtctcaaagtattttagagggaatcgatattgatggcaaaagaaaatttgcagctatgcatttgcttctaacggttccctctctgtgaaacattatttttggtgatctaaagaaagcattgcctttcttatttgagattttacagctatactttgttgtgtaatgttatggttccctttctgtaaaatgttatttttggtgatctaaataaagcctgtcttgtttgaaagaaaaaaaaaaa

SEQ ID NO: 425640 - DNA, 2237 bp, Homo sapiens
tgttaccagaacttgcctattgtgacgaatagttacttttaagtcgattgtatttggattctgtctgggtgattctggaaaccccagttgtttctgtgtctgaatgagttactttttcagtttatttgcctcctctttgtgattttaaaatatttaaatcgttttctaaaaatctgggatagatgggcagcagaagatcatgtgcttcgtgataccgatgaaaatcgtagattacagcgtaaattggcaagaaaagctgtagctcgcctgaggagcacaggaagaaagaagaagcgctgcaggttgcctggtgtggactctgtcttaaaaggcctccccactgaagaaaaagatgaaaatgatgaaaactcattaagcagttcctctgactgtagtgaaaacaaggatgaagaaataagtgaagaaagtgatattgaagaaaagactgaagtgaaagaagaaccagagcttcaaacaagaagggaaatggaagaaagaacaataactatagaaatccctgaagttctgaagaagcagctggaggatgattgttactacattaacaggaggaaacggttagtgaaacttccatgccagaccaacatcataacgattttggaatcctatgtgaagcattttgctatcaatgcagccttttcagccaatgagaggcctcgtcaccatcacgttatgccacatgccaacatgaacgtgcattatatcccagcagaaaagaatgttgacctttgtaaggagatggtggatggattaagaataacctttgattacactctcccgttggttttactctatccatatgaacaagctcagtataaaaaggtgacttcgtctaaattttttcttccaattaaggaaagtgccacaagcactaacaggagccaggaggaactctctcccagtccgcctttgttgaatccatccacgccacagtccacagagagtcagccgaccaccggtgaaccagccacccccaaaaggcgcaaagctgagccagaagcattgcagtctctgaggcggtccacgcgccacagtgccaactgtgacaggctttctgagagcagcgcttcacctcagcccaagcgccggcagcaggacacatccgccagcatgcccaagctcttcctgcacctggaaaagaagacacctgtgcatagcagatcatcttcacctattcctctgactcctagcaaggaagggagtgctgtgtttgctggctttgaagggagaagaactaatgaaataaacgaggtcctctcctggaagcttgtgcctgacaattaccccccaggtgaccagccgcctccaccctcttacatttatggggcacaacatttgctgcgattgtttgtgaaacttccagaaatccttggaaagatgtccttttctgagaagaatctgaaggctttattgaagcactttgatctctttttgaggtttttagcagaataccacgatgacttcttcccagagtcggcttatgtcgctgcctgtgaggcacattacagcaccaagaacccccgggcaatttattaaaatgttgttggttctgtaagagcaactgctctgtctagtttggcgctctgggttccaggtgaataactaacaaggtggtgggtctttacccacagcgcaaacacaatgcccaccttggggctctgttgtttgagttgcccacatactgcagttattctgttaggaatgattccctgggtgcctgaaagtgctctgacacgacacttgttactttgcaggccatctgtgatggcaaggaaaaagcaactatgttcacagtgaaatattcgtggaataggttaggccatttcagtagacattgcagttagttagcaagaaccacattgtctctttatttgttagcattaaacaaatttttttttgcaaattggttttatttttttgatgaagccgagcaactctgtccaaaaaggtttagtttgtactcggaaaccacaaagtagtctcaaagtattttagagggaatcgatattgatggcaaaagaaaatttgcagctatgcatttgcttctaacggttccctctctgtgaaacattatttttggtgatctaaagaaagcattgcctttcttatttgagattttacagctatactttgttgtgtaatgttatggttccctttctgtaaaatgttatttttggtgatctaaataaagcctgtcttgtttgaaagaaaaaaaaaaa

SEQ ID NO: 425641 - DNA, 2057 bp, Homo sapiens
cggccccccccggccacggcgcaccgcctccccgcccccgcccgccctcccccaccgcgcgcgctccgcccgccccggagcctcgccctccgccacgatgagcaaatgagcgcgagcgagggcatgaaatttaaattccactcaggggagaaagtgctgtgcttcgagcctgaccccaccaaggcgcgagtgctgtacgatgccaagattgttgatgttattgttgggaaagacgaaaaaggcagaaagatcccagaatatctgatccattttaatggttggaacagaagctgggatagatgggcagcagaagatcatgtgcttcgtgataccgatgaaaatcgtagattacagcgtaaattggcaagaaaagctgtagctcgcctgaggagcacaggaagaaagaagaagcgctgcaggttgcctggtgtggactctgtcttaaaaggcctccccactgaagaaaaagatgaaaatgatgaaaactcattaagcagttcctctgactgtagtgaaaacaaggatgaagaaataagtgaagaaagtgatattgaagaaaagactgaagtgaaagaagaaccagagcttcaaacaagaagggaaatggaagaaagaacaataactatagaaatccctgaagttctgaagaagcagctggaggatgattgttactacattaacaggaggaaacgggaaagtgccacaagcactaacaggagccaggaggaactctctcccagtccgcctttgttgaatccatccacgccacagtccacagagagtcagccgaccaccggtgaaccagccacccccaaaaggcgcaaagctgagccagaagcattgcagtctctgaggcggtccacgcgccacagtgccaactgtgacaggctttctgagagcagcgcttcacctcagcccaagcgccggcagcaggacacatccgccagcatgcccaagctcttcctgcacctggaaaagaagacacctgtgcatagcagatcatcttcacctattcctctgactcctagcaaggaagggagtgctgtgtttgctggctttgaagggagaagaactaatgaaataaacgaggtcctctcctggaagcttgtgcctgacaattaccccccaggtgaccagccgcctccaccctcttacatttatggggcacaacatttgctgcgattgtttgtgaaacttccagaaatccttggaaagatgtccttttctgagaagaatctgaaggctttattgaagcactttgatctctttttgaggtttttagcagaataccacgatgacttcttcccagagtcggcttatgtcgctgcctgtgaggcacattacagcaccaagaacccccgggcaatttattaaaatgttgttggttctgtaagagcaactgctctgtctagtttggcgctctgggttccaggtgaataactaacaaggtggtgggtctttacccacagcgcaaacacaatgcccaccttggggctctgttgtttgagttgcccacatactgcagttattctgttaggaatgattccctgggtgcctgaaagtgctctgacacgacacttgttactttgcaggccatctgtgatggcaaggaaaaagcaactatgttcacagtgaaatattcgtggaataggttaggccatttcagtagacattgcagttagttagcaagaaccacattgtctctttatttgttagcattaaacaaatttttttttgcaaattggttttatttttttgatgaagccgagcaactctgtccaaaaaggtttagtttgtactcggaaaccacaaagtagtctcaaagtattttagagggaatcgatattgatggcaaaagaaaatttgcagctatgcatttgcttctaacggttccctctctgtgaaacattatttttggtgatctaaagaaagcattgcctttcttatttgagattttacagctatactttgttgtgtaatgttatggttccctttctgtaaaatgttatttttggtgatctaaataaagcctgtcttgtttgaaagaaaaaaaaaaa

SEQ ID NO: 425642 - DNA, 3525 bp, Homo sapiens
cggccccccccggccacggcgcaccgcctccccgcccccgcccgccctcccccaccgcgcgcgctccgcccgccccggagcctcgccctccgccacgatgagcaaatgagcgcgagcgagggcatgaaatttaaattccactcaggggagaaagtgctgtgcttcgagcctgaccccaccaaggcgcgagtgctgtacgatgccaagattgttgatgttattgttgggaaagacgaaaaaggcagaaagatcccagaatatctgatccattttaatggttggaacagaagctgggatagatgggcagcagaagatcatgtgcttcgtgataccgatgaaaatcgtagattacagcgtaaattggcaagaaaagctgtagctcgcctgaggagcacaggaagaaagaagaagcgctgcaggttgcctggtgtggactctgtcttaaaaggcctccccactgaagaaaaagatgaaaatgatgaaaactcattaagcagttcctctgactgtagtgaaaacaaggatgaagaaataagtgaagaaagtgatattgaagaaaagactgaagtgaaagaagaaccagagcttcaaacaagaagggaaatggaagaaagaacaataactatagaaatccctgaagttctgaagaagcagctggaggatgattgttactacattaacaggaggaaacggttagtgaaacttccatgccagaccaacatcataacgattttggaatcctatgtgaagcattttgctatcaatgcagccttttcagccaatgagaggcctcgtcaccatcacgttatgccacatgccaacatgaacgtgcattatatcccagcagaaaagaatgttgacctttgtaaggagatggtggatggattaagaataacctttgattacactctcccgttggttttactctatccatatgaacaagctcagtataaaaaggtgacttcgtctaaattttttcttccaattaaggaaagtgccacaagcactaacaggagccaggaggaactctctcccagtccgcctttgttgaatccatccacgccacagtccacagagagtcagccgaccaccggtgaaccagccacccccaaaaggcgcaaagctgagccagaagcattgcagtctctgaggcggtccacgcgccacagtgccaactgtgacaggctttctgagagcagcgcttcacctcagcccaagcgccggcagcaggacacatccgccagcatgcccaagctcttcctgcacctggaaaagagtaggttcattctcgggtgccccaggccggggagagccagcgtgtactttgtgtttagtcagtgccaggcatggtgctgaggttacatgtgtgtgtgtacagtgcgtgtgattcccatgtccaaagtgctgtcatgctgcctgctttctggagctgtagaaagttgaaacacctggcgcagattgcagcgcagctgtgttggaggcaggactgggctgtttcctcagcctttcttttttgccatcactctaccacttgtgagcaaattgagttatcagaattctatgtattgtgtagctaggcctaatgaagcattcaaaatgagcaatgctaatgggttgtttagctttttgttttctttgtactctgtctctgtagtctctccattctaaagtttaatttggaaaggtctgtcctgaattatcaaagtaagaatactcagatttccataagctcttctcacctcctcttagcccaactcaaactccatcagatcttctcaccttgattttgagctggaatgtttcaatgagcaaaataaattagacaaaagtttactttctttttttccaaaatacacacaggttgatttgctgtaatataaaacttagaagtaaaccactgctaattaatcattttaaactttcaaaaactgctaaaacaggtgccatgaatcaggtacaattactgtagaaactaacattagctattatacactaaccaggcatttttcccaaattaattacaatctggttgtttagcctatgctaattaagccctcttagtagtagtattcactttacattgaagacctcattcacaaatacagggtgctctgtgcttatatccttccacccttgactgccaaaaatgtgtgaaatgggaaagttgatggcagcagggccgacgatgtcacctggtgcctcgcgggctcagtgagttaggaagtcagcagcaggggaggcagcttgcatgcctgtcccccggcacactgtgtggaggtggaaacagagctacgccagcaggcgccaagcacccaactccagagatggaagcctggtggccttcctttcacagagctcagctgctcgcaggctgtgaaatctaagacacccctcataaatatcaaaaacacctccaaagctaacgtcagggtaaaactacttggagtcgaatccccatgccccagtaggtgtatcttgtgtatgacctgtgccctgttcttccctcagcctcgcctgctgtgctgactccttcaggggtccttctaagcatcatcctgttggaactcccaaaagtcatcccagtgccattctgtgttcaggtgcccatttccttgtgtacatcctgtccctgccacatccataagctcctgagagaaaggtctgacttgttgattgtgtcaccccatcacagctcagtgttggtggcatagttccaggtgcgtgaaagtatttgctgattctttgaagattgggaaggctcagaagggcagagttgaagaaggcatacctttaagagaagccctttgaataatcaagtgctaaaacaaaatcaggtgcttttttaaaacagcttgattgagatataatccacataccttaaaattcacacatttaaagtttttagtgtctccagacacagtggttcatgcctgtgagactggggcaggaggatcacttgaggccaggagttcaagatcagcctgggcaatatagtgaaaccccatctcttaaagaaaaagttagccaggtgtgatgatgtgcacctatagtcccagctacttgggaggctgcagctgtggctgtggctgaagctggcggatcgcttgaggcccagagtctaagactgcagtgagctctcattgggccactgcagtcgagcctgggcgacacaaagagaccaccctgtctgatagataactaacaaaatagttttagttgggcaaaattaaagagttgggcaaccatcactgaaatcagtttcagacattttcaccactccaaaaaagaaaccccacatcgactagcagttactcatttgcttctccctatgtcccctgacaaccactaatctatttgtctctatagatttgccagtttggggcatttcatataaatggaatcatctgtatgtaagtggttaataaggattggttgattgaagattgaaaagggtcagctgggaaaatttttaaaaagactgtttttaaaaaggtgctacaaaataaagtgctatctttttctgtt

SEQ ID NO: 425643 - DNA, 1754 bp, Homo sapiens
cggccccccccggccacggcgcaccgcctccccgcccccgcccgccctcccccaccgcgcgcgctccgcccgccccggagcctcgccctccgccacgatgagcaaatgagcgcgagcgagggcatgaaatttaaattccactcaggggagaaagtgctgtgcttcgagcctgaccccaccaaggcgcgagtgctgtacgatgccaagattgttgatgttattgttgggaaagacgaaaaaggcagaaagatcccagaatatctgatccattttaatggttggaacagaagctgggatagatgggcagcagaagatcatgtgcttcgtgataccgatgaaaatcgtagattacagcgtaaattggcaagaaaagctgtagctcgcctgaggagcacaggaagaaagaagaagcgctgcaggttgcctggtgtggactctgtcttaaaaggcctccccactgaagaaaaagatgaaaatgatgaaaactcattaagcagttcctctgactgtagtgaaaacaaggatgaagaaataagtgaagaaagtgatattgaagaaaagactgaagtgaaagaagaaccagagcttcaaacaagaagggaaatggaagaaagaacaataactatagaaatccctgaagttctgaagaagcagctggaggatgattgttactacattaacaggaggaaacggttagtgaaacttccatgccagaccaacatcataacgattttggaatcctatgtgaagcattttgctatcaatgcagccttttcagccaatgagaggcctcgtcaccatcacgttatgccacatgccaacatgaacgtgcattatatcccagcagaaaagaatgttgacctttgtaaggagatggtggatggattaagaataacctttgattacactctcccgttggttttactctatccatatgaacaagctcagtataaaaaggtgacttcgtctaaattttttcttccaattaaggaaagtgccacaagcactaacagtccacagagagtcagccgaccaccggtgaaccagccacccccaaaaggcgcaaagctgagccagaagcattgcagtctctgaggcggtccacgcgccacagtgccaactgtgacaggctttctgagagcagcgcttcacctcagcccaagcgccggcagcaggacacatccgccagcatgcccaagctcttcctgcacctggaaaagaagacacctgtgcatagcagatcatcttcacctattcctctgactcctagcaaggaagggagtgctgtgtttgctggctttgaagggagaagaactaatgaaataaacgaggtaaagaatgtttgatgtttgttcccaatggttccttcatttgtgattacttcaattctataggtggaagtcaaggttcttaaagcatcatgttgctgctattactgtaaacattatcaaaattgtacgtaattttatgcttaacactgtgggttttggtttctaaagtgagaaaattgttaggattccagccctacactgacaatcatcttttaaataagtgcaattattgaaataccagtatttttactttatagaacagatgtcaatttccacagagggccagagggtaaatactttcggctttgtgggccatatggtgtctgtcaaggctacttaactccaaaagtagccacagatagtatgtaaataaaatgagtgtgctatattccaataaaacttgatttatggacactgaaaaaa

SEQ ID NO: 425644 - DNA, 2530 bp, Homo sapiens
  misc_feature (33)..(33): n is a, c, g, or t
ccggcccttccgcctcactcagcggcgccactnagagggacgggcgccggccatggagcgcacagcaggcaaagagctggccctggcaccgctgcaggactggggtgaagagaccgaggacggcgcggtgtacagtgtctccctgcggcggcagcgcagtcagcgcaggagcccggcggagggccccgggggcagccaggctcccagccccattgccaataccttcctccactatcgaaccagcaaggtgagggtgctgagggcagcgcgcctggagcggctggtgggagagttggtgtttggagaccgtgagcaggaccccagcttcatgcccgccttcctggccacctaccggacctttgtacccactgcctgcctgctgggctttctgctgccaccaatgccaccgcccccacctcccggggtagagatcaagaagacagcggtacaagatctgagcttcaacaagaacctgaggtgtgtcagtgctgggctcctggctgcaggaccaccctcaggatttccgagacccccctgcccattcggacctgggcagtgtccgaacctttctgggctgggcggccccagggagtgctgaggctcaaaaagcagagaagcttctggaagattttttggaggaggctgagcgagagcaggaagaggagccgcctcaggtgtggacaggacctcccagagttgcccaaacttctgacccagactcttcagaggcctgcgcggaggaagaggaagggctcatgcctcaaggtccccagctcctggacttcagcgtggacgaggtggccgagcagctgaccctcatagacttggagctcttctccaaggtgaggctctacgagtgcttgggctccgtgtggtcgcagagggaccggccgggggctgcaggcgcctcccccactgtgcgcgccaccgtggcccagttcaacaccgtgaccggctgtgtgctgggttccgtgctcggagcaccgggcttggccgccccgcagagggcgcagcggctggagaagtggatccgcatcgcccagcgctgccgagaactgcggaacttctcctccttgcgcgccatcctgtccgccctgcaatctaaccccatctaccggctcaagcgcagctggggggcagtgagccgggaaccgctatctactttcaggaaactttcgcagattttctccgatgagaacaaccacctcagcagcagagagattcttttccaggaggaggccactgagggatcccaagaagaggacaacaccccaggcagcctgccctcaaaaccacccccaggccctgtcccctaccttggcaccttccttacggacctggttatgctggacacagccctgccggatatgttggagggggatctcattaactttgagaagaggaggaaggagtgggagatcctggcccgcatccagcagctgcagaggcgctgtcagagctacaccctgagcccccacccgcccatcctggctgccctgcatgcccagaaccagctcaccgaggagcagagctaccggctctcccgggtcattgagccaccagctgcctcctgccccagctccccacgcatccgacggcggatcagcctcaccaagcgtctcagtgcgaagcttgcccgagagaaaagctcatcacctagtgggagtcccggggacccctcatcccccacctccagtgtgtccccagggtcacccccctcaagtcctagaagcagagatgctcctgctggcagtcccccggcctctccagggccccagggccccagcaccaagctgcccctgagcctggacctgcccagcccccggcccttcgctttgcctctgggcagccctcgaatccccctcccggcgcagcagagctcggaggcccgtgtcatccgcgtcagcatcgacaatgaccacgggaacctgtatcgaagcatcttgctgaccagtcaggacaaagcccccagcgtggtccggcgagccttgcagaagcacaatgtgccccagccctgggcctgtgactatcagctctttcaagtccttcctggggaccgggtgctcctgattcctgacaatgccaacgtcttctatgccatgagtccagtcgcccccagagacttcatgctgcggcggaaagaggggacccggaacactctgtctgtctccccaagctgaggcagccctgtcctctccacaagacacaagtcccacaggcaagcttgcgactcttctcctggaaagctgccatcccccagtagaggccactgtgctgtgtatcccaggaccaccacccaactgtagcccattggaccccatctctttttctgactctgttggtactagatccatattccaaagacatcagcccatgggtggctggtggagagctcaatcccataaatgtagaaagaggtggggcatggatacgtcaaatccctccccagagaaatcttataaatgttagagacgcatcagaagtgacagatgcggatgaaaatagtgaccagagttatgaaaaaaaaaaa

SEQ ID NO: 425645 - DNA, 2699 bp, Homo sapiens
  misc_feature (33)..(33): n is a, c, g, or t
ccggcccttccgcctcactcagcggcgccactnagagggacgggcgccggccatggagcgcacagcaggcaaagagctggccctggcaccgctgcaggactggggtgaagagaccgaggacggcgcggtgtacagtgtctccctgcggcggcagcgcagtcagcgcaggagcccggcggagggccccgggggcagccaggctcccagccccattgccaataccttcctccactatcgaaccagcaaggtgagggtgctgagggcagcgcgcctggagcggctggtgggagagttggtgtttggagaccgtgagcaggaccccagcttcatgcccgccttcctggccacctaccggacctttgtacccactgcctgcctgctgggctttctgctgccaccaatgccaccgcccccacctcccgggtcagtagcgaaccataacctccgtattctccaccctagaaccccaactgggcacccccctccacctcctcaggtgtggaacctggaaacacctcccagacccagagccctcttcctaagcccccttctaggttcccccttcttcacctgctggggggcctcttcccagggtagagatcaagaagacagcggtacaagatctgagcttcaacaagaacctgaggtgtgtcagtgctgggctcctggctgcaggaccaccctcaggatttccgagacccccctgcccattcggacctgggcagtgtccgaacctttctgggctgggcggccccagggagtgctgaggctcaaaaagcagagaagcttctggaagattttttggaggaggctgagcgagagcaggaagaggagccgcctcaggtgtggacaggacctcccagagttgcccaaacttctgacccagactcttcagaggcctgcgcggaggaagaggaagggctcatgcctcaaggtccccagctcctggacttcagcgtggacgaggtggccgagcagctgaccctcatagacttggagctcttctccaaggtgaggctctacgagtgcttgggctccgtgtggtcgcagagggaccggccgggggctgcaggcgcctcccccactgtgcgcgccaccgtggcccagttcaacaccgtgaccggctgtgtgctgggttccgtgctcggagcaccgggcttggccgccccgcagagggcgcagcggctggagaagtggatccgcatcgcccagcgctgccgagaactgcggaacttctcctccttgcgcgccatcctgtccgccctgcaatctaaccccatctaccggctcaagcgcagctggggggcagtgagccgggaaccgctatctactttcaggaaactttcgcagattttctccgatgagaacaaccacctcagcagcagagagattcttttccaggaggaggccactgagggatcccaagaagaggacaacaccccaggcagcctgccctcaaaaccacccccaggccctgtcccctaccttggcaccttccttacggacctggttatgctggacacagccctgccggatatgttggagggggatctcattaactttgagaagaggaggaaggagtgggagatcctggcccgcatccagcagctgcagaggcgctgtcagagctacaccctgagcccccacccgcccatcctggctgccctgcatgcccagaaccagctcaccgaggagcagagctaccggctctcccgggtcattgagccaccagctgcctcctgccccagctccccacgcatccgacggcggatcagcctcaccaagcgtctcagtgcgaagcttgcccgagagaaaagctcatcacctagtgggagtcccggggacccctcatcccccacctccagtgtgtccccagggtcacccccctcaagtcctagaagcagagatgctcctgctggcagtcccccggcctctccagggccccagggccccagcaccaagctgcccctgagcctggacctgcccagcccccggcccttcgctttgcctctgggcagccctcgaatccccctcccggcgcagcagagctcggaggcccgtgtcatccgcgtcagcatcgacaatgaccacgggaacctgtatcgaagcatcttgctgaccagtcaggacaaagcccccagcgtggtccggcgagccttgcagaagcacaatgtgccccagccctgggcctgtgactatcagctctttcaagtccttcctggggaccgggtgctcctgattcctgacaatgccaacgtcttctatgccatgagtccagtcgcccccagagacttcatgctgcggcggaaagaggggacccggaacactctgtctgtctccccaagctgaggcagccctgtcctctccacaagacacaagtcccacaggcaagcttgcgactcttctcctggaaagctgccatcccccagtagaggccactgtgctgtgtatcccaggaccaccacccaactgtagcccattggaccccatctctttttctgactctgttggtactagatccatattccaaagacatcagcccatgggtggctggtggagagctcaatcccataaatgtagaaagaggtggggcatggatacgtcaaatccctccccagagaaatcttataaatgttagagacgcatcagaagtgacagatgcggatgaaaatagtgaccagagttatgaaaaaaaaaaa

SEQ ID NO: 425646 - DNA, 2426 bp, Homo sapiens
  misc_feature (33)..(33): n is a, c, g, or t
ccggcccttccgcctcactcagcggcgccactnagagggacgggcgccggccatggagcgcacagcaggcaaagagctggccctggcaccgctgcaggactggggtgaagagaccgaggacggcgcggtgtacagtgtctccctgcggcggcagcgcagtcagcgcaggagcccggcggagggccccgggggcagccaggctcccagccccattgccaataccttcctccactatcgaaccagcaaggtgagggtgctgagggcagcgcgcctggagcggctggtgggagagttggtgtttggagaccgtgagcaggaccccagcttcatgcccgccttcctggccacctaccggacctttgtacccactgcctgcctgctgggctttctgctgccaccaatgccaccgcccccacctcccggggtagagatcaagaagacagcggtacaagatctgagcttcaacaagaacctgaggtgtgtcagtgctgggctcctggctgcaggaccaccctcaggatttccgagacccccctgcccattcggacctgggcagtgtccgaacctttctgggctgggcggccccagggagtgctgaggctcaaaaagcagagaagcttctggaagattttttggaggaggctgagcgagagcaggaagaggagccgcctcaggtgtggacaggacctcccagagttgcccaaacttctgacccagactcttcagaggcctgcgcggaggaagaggaagggctcatgcctcaaggtccccagctcctggacttcagcgtggacgaggtggccgagcagctgaccctcatagacttggagctcttctccaaggtgaggctctacgagtgcttgggctccgtgtggtcgcagagggaccggccgggggctgcaggcgcctcccccactgtgcgcgccaccgtggcccagttcaacaccgtgaccggctgtgtgctgggttccgtgctcggagcaccgggcttggccgccccgcagagggcgcagcggctggagaagtggatccgcatcgcccagggaaccgctatctactttcaggaaactttcgcagattttctccgatgagaacaaccacctcagcagcagagagattcttttccaggaggaggccactgagggatcccaagaagaggacaacaccccaggcagcctgccctcaaaaccacccccaggccctgtcccctaccttggcaccttccttacggacctggttatgctggacacagccctgccggatatgttggagggggatctcattaactttgagaagaggaggaaggagtgggagatcctggcccgcatccagcagctgcagaggcgctgtcagagctacaccctgagcccccacccgcccatcctggctgccctgcatgcccagaaccagctcaccgaggagcagagctaccggctctcccgggtcattgagccaccagctgcctcctgccccagctccccacgcatccgacggcggatcagcctcaccaagcgtctcagtgcgaagcttgcccgagagaaaagctcatcacctagtgggagtcccggggacccctcatcccccacctccagtgtgtccccagggtcacccccctcaagtcctagaagcagagatgctcctgctggcagtcccccggcctctccagggccccagggccccagcaccaagctgcccctgagcctggacctgcccagcccccggcccttcgctttgcctctgggcagccctcgaatccccctcccggcgcagcagagctcggaggcccgtgtcatccgcgtcagcatcgacaatgaccacgggaacctgtatcgaagcatcttgctgaccagtcaggacaaagcccccagcgtggtccggcgagccttgcagaagcacaatgtgccccagccctgggcctgtgactatcagctctttcaagtccttcctggggaccgggtgctcctgattcctgacaatgccaacgtcttctatgccatgagtccagtcgcccccagagacttcatgctgcggcggaaagaggggacccggaacactctgtctgtctccccaagctgaggcagccctgtcctctccacaagacacaagtcccacaggcaagcttgcgactcttctcctggaaagctgccatcccccagtagaggccactgtgctgtgtatcccaggaccaccacccaactgtagcccattggaccccatctctttttctgactctgttggtactagatccatattccaaagacatcagcccatgggtggctggtggagagctcaatcccataaatgtagaaagaggtggggcatggatacgtcaaatccctccccagagaaatcttataaatgttagagacgcatcagaagtgacagatgcggatgaaaatagtgaccagagttatgaaaaaaaaaaa

SEQ ID NO: 425647 - DNA, 2603 bp, Homo sapiens
  misc_feature (33)..(33): n is a, c, g, or t
ccggcccttccgcctcactcagcggcgccactnagagggacgggcgccggccatggagcgcacagcaggcaaagagctggccctggcaccgctgcaggactggggtgaagagaccgaggacggcgcggtgtacagtgtctccctgcggcggcagcgcagtcagcgcaggagcccggcggagggccccgggggcagccaggctcccagccccattgccaataccttcctccactatcgaaccagcaaggtgagggtgctgagggcagcgcgcctggagcggctggtgggagagttggtgtttggagaccgtgagcaggaccccagcttcatgcccgccttcctggccacctaccggacctttgtacccactgcctgcctgctgggctttctgctgccaccaatgccaccgcccccacctcccggggtagagatcaagaagacagcggtacaagatctgagcttcaacaagaacctgaggtgtgtcagtgctgggctcctggctgcaggaccaccctcaggatttccgagacccccctgcccattcggacctgggcagtgtccgaacctttctgggctgggcggccccagggagtgctgaggctcaaaaagcagagaagcttctggaagattttttggaggaggctgagcgagagcaggaagaggagccgcctcaggtgtggacaggacctcccagagttgcccaaacttctgacccagactcttcagaggcctgcgcggaggaagaggaagggctcatgcctcaaggtccccagctcctggacttcagcgtggacgaggtggccgagcagctgaccctcatagacttggagctcttctccaaggtgaggctctacgagtgcttgggctccgtgtggtcgcagagggaccggccgggggctgcaggcgcctcccccactgtgcgcgccaccgtggcccagttcaacaccgtgaccggctgtgtgctgggttccgtgctcggagcaccgggcttggccgccccgcagagggcgcagcggctggagaagtggatccgcatcgcccagcgctgccgagaactgcggaacttctcctccttgcgcgccatcctgtccgccctgcaatctaaccccatctaccggctcaagcgcagctggggggcagtgagccgggaaccgctatctactttcaggaaactttcgcagattttctccgatgagaacaaccacctcagcagcagagagattcttttccaggaggaggccactgagggatcccaagaagaggacaacaccccaggcagcctgccctcaaaaccacccccaggccctgtcccctaccttggcaccttccttacggacctggttatgctggacacagccctgccggatatgttggagggggatctcattaactttgagaagaggaggaaggagtgggagatcctggcccgcatccagcagctgcagaggcgctgtcagagctacaccctgagcccccacccgcccatcctggctgccctgcatgcccagaaccagctcaccgaggagcagagctaccggctctcccgggtcattgagccaccagctgcctcctgccccagctccccacgcatccgacggcggatcagcctcaccaagcgtctcagtgcgaagcttgcccgagagaaaagctcatcacctagtgggagtcccggggacccctcatcccccacctccagtgtgtccccagggtcacccccctcaagtcctagaagcagagatgctcctgctggcagtcccccggcctctccagggccccagggccccagcaccaagctgcccctgagcctggacctgcccagcccccggcccttcgctttgcctctgggcagccctcgaatccccctcccggcgcagcagagctcggaggcccgtgtcatccgcgtcagcatcgacaatgaccacgggaacctgtatcgaagcatcttgctgaccagtcaggacaaagcccccagcgtggtccggcgagccttgcagaagcacaatgtgccccagccctgggcctgtgactatcagctctttcaagtccttcctggggaccggggttcccagtgacagcagaatgagcttggcttggcagtagctgcagagggacccatggctgttcaggttcgcggtgctcctgattcctgacaatgccaacgtcttctatgccatgagtccagtcgcccccagagacttcatgctgcggcggaaagaggggacccggaacactctgtctgtctccccaagctgaggcagccctgtcctctccacaagacacaagtcccacaggcaagcttgcgactcttctcctggaaagctgccatcccccagtagaggccactgtgctgtgtatcccaggaccaccacccaactgtagcccattggaccccatctctttttctgactctgttggtactagatccatattccaaagacatcagcccatgggtggctggtggagagctcaatcccataaatgtagaaagaggtggggcatggatacgtcaaatccctccccagagaaatcttataaatgttagagacgcatcagaagtgacagatgcggatgaaaatagtgaccagagttatgaaaaaaaaaaa

SEQ ID NO: 425648 - DNA, 2482 bp, Homo sapiens
  misc_feature (33)..(33): n is a, c, g, or t
ccggcccttccgcctcactcagcggcgccactnagagggacgggcgccggccatggagcgcacagcaggcaaagagctggccctggcaccgctgcaggactggggtgaagagaccgaggacggcgcggtgtacagtgtctccctgcggcggcagcgcagtcagcgcaggagcccggcggagggccccgggggcagccaggctcccagccccattgccaataccttcctccactatcgaaccagcaaggtgagggtgctgagggcagcgcgcctggagcggctggtgggagagttggtgtttggagaccgtgagcaggaccccagcttcatgcccgccttcctggccacctaccggacctttgtacccactgcctgcctgctgggctttctgctgccaccaatgccaccgcccccacctcccggggtagagatcaagaagacagcggtacaagatctgagcttcaacaagaacctgaggtgtgtcagtgctgggctcctggctgcaggaccaccctcaggatttccgagacccccctgcccattcggacctgggcagtgtccgaacctttctgggctgggcggccccagggagtgctgaggctcaaaaagcagagaagcttctggaagattttttggaggaggctgagcgagagcaggaagaggagccgcctcaggtgtggacaggacctcccagagttgcccaaacttctgacccagactcttcagaggcctgcgcggaggaagaggaagggctcatgcctcaaggtccccagctcctggacttcagcgtggacgaggtggccgagcagctgaccctcatagacttggagctcttctccaaggtgaggctctacgagtgcttgggctccgtgtggtcgcagagggaccggccgggggctgcaggcgcctcccccactgtgcgcgccaccgtggcccagttcaacaccgtgaccggctgtgtgctgggttccgtgctcggagcaccgggcttggccgccccgcagagggcgcagcggctggagaagtggatccgcatcgcccagcgctgccgagaactgcggaacttctcctccttgcgcgccatcctgtccgccctgcaatctaaccccatctaccggctcaagcgcagctggggggcagtgagccgggaaccgctatctactttcaggaaactttcgcagattttctccgatgagaacaaccacctcagcagcagagagattcttttccaggaggaggccactgagggatcccaagaagaggacaacaccccaggcagcctgccctcaaaaccacccccaggccctgtcccctaccttggcaccttccttacggacctggttatgctggacacagccctgccggatatgttggagggggatctcattaactttgagaagaggaggaaggagtgggagatcctggcccgcatccagcagctgcagaggcgctgtcagagctacaccctgagcccccacccgcccatcctggctgccctgcatgcccagaaccagctcaccgaggagcagagctaccggctctcccgggtcattgagccaccagctgcctcctgccccagctccccacgcatccgacggcggatcagcctcaccaagcgtctcagtgcgaagcttgcccgagagaaaagctcatcacctagtgggagtcccggggacccctcatcccccacctccagtgtgtccccagggtcacccccctcaagtcctagaagcagagatgctcctgctggcagtcccccggcctctccagggccccagggccccagcaccaagctgcccctgagcctggacctgcccagcccccggcccttcgctttgcctctgggcagccctcgaatccccctcccggcgcagcagagctcggaggcccgtgtcatccgcgtcagcatcgacaatgaccacgggaacctgtatcgaagcatcttgctgaccagtcaggacaaagcccccagcgtggtccggcgagccttgcagaagcacaatgtgccccagccctgggcctgtgactatcagctctttcaagtccttcctggggaccgggtcgcccccagagacttcatgctgcggcggaaagaggggacccggaacactctgtctgtctccccaagctgaggcagccctgtcctctccacaagacacaagtcccacaggcaagcttgcgactcttctcctggaaagctgccatcccccagtagaggccactgtgctgtgtatcccaggaccaccacccaactgtagcccattggaccccatctctttttctgactctgttggtactagatccatattccaaagacatcagcccatgggtggctggtggagagctcaatcccataaatgtagaaagaggtggggcatggatacgtcaaatccctccccagagaaatcttataaatgttagagacgcatcagaagtgacagatgcggatgaaaatagtgaccagagttatgaaaaaaaaaaa

SEQ ID NO: 425649 - DNA, 2195 bp, Homo sapiens
  misc_feature (33)..(33): n is a, c, g, or t
ccggcccttccgcctcactcagcggcgccactnagagggacgggcgccggccatggagcgcacagcaggcaaagagctggccctggcaccgctgcaggactggggtgaagagaccgaggacggcgcggtgtacagtgtctccctgcggcggcagcgcagtcagcgcaggagcccggcggagggccccgggggcagccaggctcccagccccattgccaataccttcctccactatcgaaccagcaaggtgagggtgctgagggcagcgcgcctggagcggctggtgggagagttggtgtttggagaccgtgagcaggaccccagcttcatgcccgccttcctggccacctaccggacctttgtacccactgcctgcctgctgggctttctgctgccaccaatgccaccgcccccacctcccggggtagagatcaagaagacagcggtacaagatctgagcttcaacaagaacctgaggtgtgtcagtgctgggctcctggctgcaggaccaccctcaggatttccgagacccccctgcccattcggacctgggcagtgtccgaacctttctgggctgggcggccccagggagtgctgaggctcaaaaagcagagaagcttctggaagattttttggaggaggctgagcgagagcaggaagaggagccgcctcaggtgtggacaggacctcccagagttgcccaaacttctgacccagactcttcagaggcctgcgcggaggaagaggaagggctcatgcctcaaggtccccagctcctggacttcagcgtggacgaggtggccgagcagctgaccctcatagacttggagctcttctccaaggtgaggctctacgagtgcttgggctccgtgtggtcgcagagggaccggccgggggctgcaggcgcctcccccactgtgcgcgccaccgtggcccagttcaacaccgtgaccggctgtgtgctgggttccgtgctcggagcaccgggcttggccgccccgcagagggcgcagcggctggagaagtggatccgcatcgcccagcgctgccgagaactgcggaacttctcctccttgcgcgccatcctgtccgccctgcaatctaaccccatctaccggctcaagcgcagctggggggcagtgagccgggaaccgctatctactttcaggaaactttcgcagattttctccgatgagaacaaccacctcagcagcagagagattcttttccaggaggaggccactgagggatcccaagaagaggacaacaccccaggcagcctgccctcaaaaccacccccaggccctgtcccctaccttggcaccttccttacggacctggttatgctggacacagccctgccggatatgttggagggggatctcattaactttgagaagaggaggaaggagtgggagatcctggcccgcatccagcagctgcagaggcgctgtcagagctacaccctgagcccccacccgcccatcctggctgccctgcatgcccagaaccagctcaccgaggagcagagctaccggctctcccgggtcattgagccaccagctgcctcctgccccagctccccacgcatccgacggcggatcagcctcaccaagcgtctcagtgcgaagcttgcccgagagaaaagctcatcacctagtgggagtcccggggacccctcatcccccacctccagtgtgtccccagggtcacccccctcaagtcctagaagcagagatgctcctgctggcagtcccccggcctctccagggccccagggccccagcaccaagctgcccctgagcctggacctgcccagcccccggcccttcgctttgcctctgggcagccctcgaatccccctcccggcgcagcagagctcggaggcccgtgtcatccgcgtcagcatcgacaatgaccacgggaacctgtatcgaagcatcttgctgaccagtcaggacaaagcccccagcgtggtccggcgagccttgcagaagcacaatgtgccccagccctgggcctgtgactatcagctctttcaagtccttcctggggaccggggctgggaagagatgctgatttctgcgataaaatcagtaggtacattttttggaatgttcgctatgtgccaggctagattttacagatgagaagtctgaagctcaggtaaggtaagtcacctgtccagggccaca

SEQ ID NO: 425650 - DNA, 2215 bp, Homo sapiens
  misc_feature (33)..(33): n is a, c, g, or t
ccggcccttccgcctcactcagcggcgccactnagagggacgggcgccggccatggagcgcacagcaggcaaagagctggccctggcaccgctgcaggactggggtgaagagaccgaggacggcgcggtgtacagtgtctccctgcggcggcagcgcagtcagcgcaggagcccggcggagggccccgggggcagccaggctcccagccccattgccaataccttcctccactatcgaaccagcaaggtgagggtgctgagggcagcgcgcctggagcggctggtgggagagttggtgtttggagaccgtgagcaggaccccagcttcatgcccgccttcctggccacctaccggacctttgtacccactgcctgcctgctgggctttctgctgccaccaatgccaccgcccccacctcccggggtagagatcaagaagacagcggtacaagatctgagcttcaacaagaacctgaggtgtgtcagtgctgggctcctggctgcaggaccaccctcaggatttccgagacccccctgcccattcggacctgggcagtgtccgaacctttctgggctgggcggccccagggagtgctgaggctcaaaaagcagagaagcttctggaagattttttggaggaggctgagcgagagcaggaagaggagccgcctcaggtgtggacaggacctcccagagttgcccaaacttctgacccagactcttcagaggcctgcgcggaggaagaggaagggctcatgcctcaaggtccccagctcctggacttcagcgtggacgaggtggccgagcagctgaccctcatagacttggagctcttctccaaggtgaggctctacgagtgcttgggctccgtgtggtcgcagagggaccggccgggggctgcaggcgcctcccccactgtgcgcgccaccgtggcccagttcaacaccgtgaccggctgtgtgctgggttccgtgctcggagcaccgggcttggccgccccgcagagggcgcagcggctggagaagtggatccgcatcgcccagcgctgccgagaactgcggaacttctcctccttgcgcgccatcctgtccgccctgcaatctaaccccatctaccggctcaagcgcagctggggggcagtgagccgggaaccgctatctactttcaggaaactttcgcagattttctccgatgagaacaaccacctcagcagcagagagattcttttccaggaggaggccactgagggatcccaagaagaggacaacaccccaggcagcctgccctcaaaaccacccccaggccctgtcccctaccttggcaccttccttacggacctggttatgctggacacagccctgccggatatgttggagggggatctcattaactttgagaagaggaggaaggagtgggagatcctggcccgcatccagcagctgcagaggcgctgtcagagctacaccctgagcccccacccgcccatcctggctgccctgcatgcccagaaccagctcaccgaggagcagagctaccggctctcccgggtcattgagccaccagctgcctcctgccccagctccccacgcatccgacggcggatcagcctcaccaagcgtctcagtgcgaagcttgcccgagagaaaagctcatcacctagtgggagtcccggggacccctcatcccccacctccagtgtgtccccagggtcacccccctcaagtcctagaagcagagatgctcctgctggcagtcccccggcctctccagggccccagggccccagcaccaagctgcccctgagcctggacctgcccagcccccggcccttcgctttgcctctgggcagccctcgaatccccctcccggcgcagcagagctcggaggcccgtgtcatccgcgtcagcatcgacaatgaccacgggaacctgtatcgaagcatcttgctgaccagtcaggacaaagcccccagcgtggtccggcgagccttgcagaagcacaatgtgccccagccctgggcctgtgactatcagctctttcaagtccttcctggggaccggggctgggaagagatgctgatttctgcgataaaatcagtaggtacattttttggaatgttcgctatgtgccaggctagattttacagatgggagaagactgcgcctcttcatgtataaaatccctgttctttctctgccaccctggcgtagattat

SEQ ID NO: 425651 - DNA, 1030 bp, Homo sapiens
  misc_feature (33)..(33): n is a, c, g, or t
ccggcccttccgcctcactcagcggcgccactnagagggacgggcgccggccatggagcgcacagcaggcaaagagctggccctggcaccgctgcaggactggggtgaagagaccgaggacggcgcggtgtacagtgtctccctgcggcggcagcgcagtcagcgcaggagcccggcggagggccccgggggcagccaggctcccagccccattgccaataccttcctccactatcgaaccagcaaggtgagggtgctgagggcagcgcgcctggagcggctggtgggagagttggtgtttggagaccgtgagcaggaccccagcttcatgcccgccttcctggccacctaccggacctttgtacccactgcctgcctgctgggctttctgctgccaccaatgccaccgcccccacctcccgggtcagtagcgaaccataacctccgtattctccaccctagaaccccaactgggcacccccctccacctcctcaggtgtggaacctggaaacacctcccagacccagagccctcttcctaagcccccttctaggttcccccttcttcacctgctggggggcctcttcccagggtagagatcaagaagacagcggtacaagatctgagcttcaacaagaacctgaggtgggtccttcatccagataggggagtgcggggagggaaatccaagaggtcaaaggttagcagtcggactggggttttgaaaattgcaggttgggtaataagagactgggagtcaggtggggcgtggtggctcatgcctgtaatcccaacactttgggaggccgaggcaggtggatcactggaggtcaggagttagagaccatcctggccaatatggcgaaaccctgtctctactaaaaatacaacaacaacaaaaaaaggtagctgggtgtggtggcgcatgcctgtagtcccagctactcgggaggctgaggttgcagtgagtcaagatcaggccattgcactgcagccttggtgacacagtaagactctatctcaaaaaaa

SEQ ID NO: 425652 - DNA, 1418 bp, Homo sapiens
  misc_feature (33)..(33): n is a, c, g, or t
ccggcccttccgcctcactcagcggcgccactnagagggacgggcgccggccatggagcgcacagcaggcaaagagctggccctggcaccgctgcaggactggggtgaagagaccgaggacggcgcggtgtacagtgtctccctgcggcggcagcgcagtcagcgcaggagcccggcggagggccccgggggcagccaggctcccagccccattgccaataccttcctccactatcgaaccagcaaggtgagggtgctgagggcagcgcgcctggagcggctggtgggagagttggtgtttggagaccgtgagcaggaccccagcttcatgcccgccttcctggccacctaccggacctttgtacccactgcctgcctgctgggctttctgctgccaccaatgccaccgcccccacctcccggggtagagatcaagaagacagcggtacaagatctgagcttcaacaagaacctgaggtgtgtcagtgctgggctcctggctgcaggaccaccctcaggatttccgagacccccctgcccattcggacctgggcagtgtccgaacctttctgggctgggcggccccagggagtgctgaggctcaaaaagcagagaagcttctggaagattttttggaggaggctgagcgagagcaggaagaggagccgcctcaggtgtggacaggacctcccagagttgcccaaacttctgacccagactcttcagaggcctgcgcggaggaagaggaagggctcatgcctcaaggtccccagctcctggacttcagcgtggacgaggtggccgagcagctgaccctcatagacttggagctcttctccaaggtgaggctctacgagtgcttgggctccgtgtggtcgcagagggaccggccgggggctgcaggcgcctcccccactgtgcgcgccaccgtggcccagttcaacaccgtgaccggctgtgtgctgggttccgtgctcggagcaccgggcttggccgccccgcagagggcgcagcggctggagaagtggatccgcatcgcccagcgctgccgagaactgcggaacttctcctccttgcgcgccatcctgtccgccctgcaatctaaccccatctaccggctcaagcgcagctggggggcagtgagccgggaaccgctatctactttcaggaaactttcgcagattttctccgatgagaacaaccacctcagcagcagagagattcttttccaggaggaggccactgagggatcccaagaagaggacaacaccccaggcagcctgccctcaaaaccacccccaggccctgtcccctaccttggcaccttccttacggacctggttatgctggacacagccctgccggatatgttggaggtctgacccctgacccttgacccctgaccccagctccacttg

SEQ ID NO: 425653 - DNA, 694 bp, Homo sapiens
  misc_feature (33)..(33): n is a, c, g, or t
ccggcccttccgcctcactcagcggcgccactnagagggacgggcgccggccatggagcgcacagcaggcaaagagctggccctggcaccgctgcaggactggggtgaagagaccgaggacggcgcggtgtacagtgtctccctgcggcggcagcgcagtcagcgcaggagcccggcggagggccccgggggcagccaggctcccagccccattgccaataccttcctccactatcgaaccagcaaggtgagggtgctgagggcagcgcgcctggagcggctggtgggagagttggtgtttggagaccgtgagcaggaccccagcttcatgcccgccttcctggccacctaccggacctttgtacccactgcctgcctgctgggctttctgctgccaccaatgccaccgcccccacctcccgggtcagtagcgaaccataacctccgtattctccaccctagaaccccaactgggcacccccctccacctcctcagggtagagatcaagaagacagcggtacaagatctgagcttcaacaagaacctgaggtggctgtggtgtcagtgctgggctcctggctgcaggaccaccctcaggatttccgagaccaccctgcccattcggacctgggcagtgtccgaacctttctgggctgggcggccccagggagtgctgaggctcaaaaagcagag

SEQ ID NO: 425654 - DNA, 334 bp, Homo sapiens
cgcccatcctggctgccctgcatgcccagaaccagctcaccgaggagcagaggtgaccaccctgtagcctgtcccagccccaccccagctgagcctgggtcaccaactggattccacccactccatacacacctccagctcctcccaagaccccctcttgagccctgatcccccactacaacctgtgaccttgcagtatctccagtcgaatcaaatagactgggcctggtggtttactcgtgtaatcccagcacttgggaggccaaggtgggtggatcacttgagcccaggatttcgagaccagcctgggcaacatggcgaaaccccatatcta

SEQ ID NO: 425655 - DNA, 3440 bp, Homo sapiens
cgaactctgaaaaggcggggcagcgggcctgcagctcctggagttcagggagacccggaaatctcaccctgccctcttcttgtgttgtgtttgtcacagccttgcccctcttgctcgccttgaaaatggaaaagatgctcgcaggctgctttctgctgatcctcggacagatcgtcctcctccctgccgaggccagggagcggtcacgtgggaggtccatctctaggggcagacacgctcggacccacccgcagacggcccttctggagagttcctgtgagaacaagcgggcagacctggttttcatcattgacagctctcgcagtgtcaacacccatgactatgcaaaggtcaaggagttcatcgtggacatcttgcaattcttggacattggtcctgatgtcacccgagtgggcctgctccaatatggcagcactgtcaagaatgagttctccctcaagaccttcaagaggaagtccgaggtggagcgtgctgtcaagaggatgcggcatctgtccacgggcaccatgaccgggctggccatccagtatgccctgaacatcgcattctcagaagcagagggggcccggcccctgagggagaatgtgccacgggtcataatgatcgtgacagatgggagacctcaggactccgtggccgaggtggctgctaaggcacgggacacgggcatcctaatctttgccattggtgtgggccaggtagacttcaacaccttgaagtccattgggagtgagccccatgaggaccatgtcttccttgtggccaatttcagccagattgagacgctgacctccgtgttccagaagaagttgtgcacggcccacatgtgcagcaccctggagcataactgtgcccacttctgcatcaacatccctggctcatacgtctgcaggtgcaaacaaggctacattctcaactcggatcagacgacttgcagaatccaggatctgtgtgccatggaggaccacaactgtgagcagctctgtgtgaatgtgccgggctccttcgtctgccagtgctacagtggctacgccctggctgaggatgggaagaggtgtgtggctgtggactactgtgcctcagaaaaccacggatgtgaacatgagtgtgtaaatgctgatggctcctacctttgccagtgccatgaaggatttgctcttaacccagatgaaaaaacgtgcacaaagatagactactgtgcctcatctaatcacggatgtcagcacgagtgtgttaacacagatgattcctattcctgccactgcctgaaaggctttaccctgaatccagataagaaaacctgcagaaggatcaactactgtgcactgaacaaaccgggctgtgagcatgagtgcgtcaacatggaggagagctactactgccgctgccaccgtggctacactctggaccccaatggcaaaacctgcagccgagtggaccactgtgcacagcaggaccatggctgtgagcagctgtgtctgaacacggaggattccttcgtctgccagtgctcagaaggcttcctcatcaacgaggacctcaagacctgctcccgggtggattactgcctgctgagtgaccatggttgtgaatactcctgtgtcaacatggacagatcctttgcctgtcagtgtcctgagggacacgtgctccgcagcgatgggaagacgtgtgcaaaattggactcttgtgctctgggggaccacggttgtgaacattcgtgtgtaagcagtgaagattcgtttgtgtgccagtgctttgaaggttatatactccgtgaagatggaaaaacctgcagaaggaaagatgtctgccaagctatagaccatggctgtgaacacatttgtgtgaacagtgacgactcatacacgtgcgagtgcttggagggattccggctcgctgaggatgggaaacgctgccgaaggaaggatgtctgcaaatcaacccaccatggctgcgaacacatttgtgttaataatgggaattcctacatctgcaaatgctcagagggatttgttctagctgaggacggaagacggtgcaagaaatgcactgaaggcccaattgacctggtctttgtgatcgatggatccaagagtcttggagaagagaattttgaggtcgtgaagcagtttgtcactggaattatagattccttgacaatttcccccaaagccgctcgagtggggctgctccagtattccacacaggtccacacagagttcactctgagaaacttcaactcagccaaagacatgaaaaaagccgtggcccacatgaaatacatgggaaagggctctatgactgggctggccctgaaacacatgtttgagagaagttttacccaaggagaaggggccaggcccctttccacaagggtgcccagagcagccattgtgttcaccgacggacgggctcaggatgacgtctccgagtgggccagtaaagccaaggccaatggtatcactatgtatgctgttggggtaggaaaagccattgaggaggaactacaagagattgcctctgagcccacaaacaagcatctcttctatgccgaagacttcagcacaatggatgagataagtgaaaaactcaagaaaggcatctgtgaagctctagaagactccgatggaagacaggactctccagcaggggaactgccaaaaacggtccaacagccaacagtgcaacacagatatctgtttgaagaagacaatcttttacggtctacacaaaagctttcccattcaacaaaaccttcaggaagccctttggaagaaaaacacgatcaatgcaaatgtgaaaaccttataatgttccagaaccttgcaaacgaagaagtaagaaaattaacacagcgcttagaagaaatgacacagagaatggaagccctggaaaatcgcctgagatacagatgaagattagaaatcgcgacacatttgtagtcattgtatcacggattacaatgaacgcagtgcagagccccaaagctcaggctattgttaaatcaataatgttgtgaagtaaaacaatcagtactgagaaacctggtttgccacagaacaaagacaagaagtatacactaacttgtataaatttatctaggaaaaaaatccttcagaattctaagatgaatttaccaggtgagaatgaataagctatgcaaggtattttgtaatatactgtggacacaacttgcttctgcctcatcctgccttagtgtgcaatctcatttgactatacgataaagtttgcacagtcttacttctgtagaacactggccataggaaatgctgtttttttgtactggactttaccttgatatatgtatatggatgtatgcataaaatcataggacatatgtacttgtggaacaagttggattttttatacaatattaaaattcaccacttcagaga

SEQ ID NO: 425656 - DNA, 515 bp, Homo sapiens
gataggtgatggctggtgggttcagagtaattaagactgatggataactgcagagaggaaatctagttttcagggcaaacagatgcgtccaagagagagcccacacacgtggttggatgcagctggagatggagaattccagttcaaggaaaaggcctgggcatgtagaagcacgaggctgatgactcatttaccattggaagacttcaaatccaaactgcagttgtcaaaataagattagtgctttcagacatgatgaaagagagggcatggtctcgaaaaggcaagcttgggttttgcctgcatttgtggagccctaactcatagcaagctttcctgtgggagtgggcagagaccccatcgtttacccagttgagtgaaatggcagccctaataacccacttctccttctctcttgctgtgataaacaatttctgatttctacatctcagattaaataacagcaagagctataaaaagtagagggtgtctcctaaaggtgttcatttgcttta

SEQ ID NO: 425657 - DNA, 435 bp, Homo sapiens
gaaaggaggagactaggcacagctggagtttgcctgaaaggataattttctcagtgacattgggtttgttttgtttctttcagtgtagaagcacgaggctgatgactcatttaccattggaagacttcaaatccaaactgcagttgtcaaaataagattagtgctttcagacatgatgaaagagagggcatggtctcgaaaaggcaagcttgggttttgcctgcatttgtggagccctaactcatagcaagctttcctgtgggagtgggcagagaccccatcgtttacccagttgagtgaaatggcagccctaataacccacttctccttctctcttgctgtgataaacaatttctgatttctacatctcagattaaataacagcaagagctataaaaagtagagggtgtctcctaaaggtgttcatttgcttta

SEQ ID NO: 425658 - DNA, 534 bp, Homo sapiens
gataggtgatggctggtgggttcagagtaattaagactgatggataactgcagagaggaaatctagttttcagggcaaacagatgcgtccaagagagagcccacacacgtggttggatgcagctggagatggagaattccagttcaaggaaaaggcctgggcagtatgtgtttggtggtggtcgttgaccctgaaaatagatggaatcttggagggagaaagcgagtgtggaaagtgaaggtcaggttgtgagctctggggcagcccacagtcagagggtgggtcaaagctagaagggcgagcaggccgcacgcacacacacgcaaagcagctgccttcactgacaatcaatggcagccacctgagctgtggctgagctgctgtgagccgaagcagtgggcttgctaaatgccgtcatccagcttccccttgaccctggctgtcaggcctgggtctgggagcttagggatcattttgtgcagtctgctcaccctctggctgtgccagggcacaggattttctacaaaagaagga

SEQ ID NO: 425659 - DNA, 2859 bp, Homo sapiens
cacgcgtcgcccacgcgtcggactagttctagatcgcgagcggccctcgcgcaggcagccagcgagcgaagggagcgctctgggatgggacttggagcaagcggcggcggcggagacagaggcagaggcagaagctggggctccgtcctcgcctcccacgagcgatccccgaggagagccgcggccctcggcgaggcgaagaggccgacgaggaagaccctggagcataactgtgcccacttctgcatcaacatccctggctcatacgtctgcaggtgcaaacaaggctacattctcaactcggatcagacgacttgcagaatccaggatctgtgtgccatggaggaccacaactgtgagcagctctgtgtgaatgtgccgggctccttcgtctgccagtgctacagtggctacgccctggctgaggatgggaagaggtgtgtggctgtggactactgtgcctcagaaaaccacggatgtgaacatgagtgtgtaaatgctgatggctcctacctttgccagtgccatgaaggatttgctcttaacccagatgaaaaaacgtgcacaaagatagactactgtgcctcatctaatcacggatgtcagcacgagtgtgttaacacagatgattcctattcctgccactgcctgaaaggctttaccctgaatccagataagaaaacctgcagaaggatcaactactgtgcactgaacaaaccgggctgtgagcatgagtgcgtcaacatggaggagagctactactgccgctgccaccgtggctacactctggaccccaatggcaaaacctgcagccgagtggaccactgtgcacagcaggaccatggctgtgagcagctgtgtctgaacacggaggattccttcgtctgccagtgctcagaaggcttcctcatcaacgaggacctcaagacctgctcccgggtggattactgcctgctgagtgaccatggttgtgaatactcctgtgtcaacatggacagatcctttgcctgtcagtgtcctgagggacacgtgctccgcagcgatgggaagacgtgtgcaaaattggactcttgtgctctgggggaccacggttgtgaacattcgtgtgtaagcagtgaagattcgtttgtgtgccagtgctttgaaggttatatactccgtgaagatggaaaaacctgcagaaggaaagatgtctgccaagctatagaccatggctgtgaacacatttgtgtgaacagtgacgactcatacacgtgcgagtgcttggagggattccggctcgctgaggatgggaaacgctgccgaaggaaggatgtctgcaaatcaacccaccatggctgcgaacacatttgtgttaataatgggaattcctacatctgcaaatgctcagagggatttgttctagctgaggacggaagacggtgcaagaaatgcactgaaggcccaattgacctggtctttgtgatcgatggatccaagagtcttggagaagagaattttgaggtcgtgaagcagtttgtcactggaattatagattccttgacaatttcccccaaagccgctcgagtggggctgctccagtattccacacaggtccacacagagttcactctgagaaacttcaactcagccaaagacatgaaaaaagccgtggcccacatgaaatacatgggaaagggctctatgactgggctggccctgaaacacatgtttgagagaagttttacccaaggagaaggggccaggcccctttccacaagggtgcccagagcagccattgtgttcaccgacggacgggctcaggatgacgtctccgagtgggccagtaaagccaaggccaatggtatcactatgtatgctgttggggtaggaaaagccattgaggaggaactacaagagattgcctctgagcccacaaacaagcatctcttctatgccgaagacttcagcacaatggatgagataagtgaaaaactcaagaaaggcatctgtgaagctctagaagactccgatggaagacaggactctccagcaggggaactgccaaaaacggtccaacagccaacagaatctgagccagtcaccataaatatccaagacctactttcctgttctaattttgcagtgcaacacagatatctgtttgaagaagacaatcttttacggtctacacaaaagctttcccattcaacaaaaccttcaggaagccctttggaagaaaaacacgatcaatgcaaatgtgaaaaccttataatgttccagaaccttgcaaacgaagaagtaagaaaattaacacagcgcttagaagaaatgacacagagaatggaagccctggaaaatcgcctgagatacagatgaagattagaaatcgcgacacatttgtagtcattgtatcacggattacaatgaacgcagtgcagagccccaaagctcaggctattgttaaatcaataatgttgtgaagtaaaacaatcagtactgagaaacctggtttgccacagaacaaagacaagaagtatacactaacttgtataaatttatctaggaaaaaaatccttcagaattctaagatgaatttaccaggtgagaatgaataagctatgcaaggtattttgtaatatactgtggacacaacttgcttctgcctcatcctgccttagtgtgcaatctcatttgactatacgataaagtttgcacagtcttacttctgtagaacactggccataggaaatgctgtttttttgtactggactttaccttgatatatgtatatggatgtatgcataaaatcataggacatatgtacttgtggaacaagttggattttttatacaatattaaaattcaccacttcagaga

SEQ ID NO: 425660 - DNA, 2777 bp, Homo sapiens
gataggtgatggctggtgggttcagagtaattaagactgatggataactgcagagaggaaatctagttttcagggcaaacagatgcgtccaagagagagcccacacacgtggttggatgcagctggagatggagaattccagttcaaggaaaaggcctgggcagtatgtgtttggtggtggtcgttgaccctgaaaatagatggaatcttggagggagaaagcgagtgtggaaagtgaagtccaggatctgtgtgccatggaggaccacaactgtgagcagctctgtgtgaatgtgccgggctccttcgtctgccagtgctacagtggctacgccctggctgaggatgggaagaggtgtgtggctgtggactactgtgcctcagaaaaccacggatgtgaacatgagtgtgtaaatgctgatggctcctacctttgccagtgccatgaaggatttgctcttaacccagatgaaaaaacgtgcacaaagatagactactgtgcctcatctaatcacggatgtcagcacgagtgtgttaacacagatgattcctattcctgccactgcctgaaaggctttaccctgaatccagataagaaaacctgcagaaggatcaactactgtgcactgaacaaaccgggctgtgagcatgagtgcgtcaacatggaggagagctactactgccgctgccaccgtggctacactctggaccccaatggcaaaacctgcagccgagtggaccactgtgcacagcaggaccatggctgtgagcagctgtgtctgaacacggaggattccttcgtctgccagtgctcagaaggcttcctcatcaacgaggacctcaagacctgctcccgggtggattactgcctgctgagtgaccatggttgtgaatactcctgtgtcaacatggacagatcctttgcctgtcagtgtcctgagggacacgtgctccgcagcgatgggaagacgtgtgcaaaattggactcttgtgctctgggggaccacggttgtgaacattcgtgtgtaagcagtgaagattcgtttgtgtgccagtgctttgaaggttatatactccgtgaagatggaaaaacctgcagaaggaaagatgtctgccaagctatagaccatggctgtgaacacatttgtgtgaacagtgacgactcatacacgtgcgagtgcttggagggattccggctcgctgaggatgggaaacgctgccgaaggaaggatgtctgcaaatcaacccaccatggctgcgaacacatttgtgttaataatgggaattcctacatctgcaaatgctcagagggatttgttctagctgaggacggaagacggtgcaagaaatgcactgaaggcccaattgacctggtctttgtgatcgatggatccaagagtcttggagaagagaattttgaggtcgtgaagcagtttgtcactggaattatagattccttgacaatttcccccaaagccgctcgagtggggctgctccagtattccacacaggtccacacagagttcactctgagaaacttcaactcagccaaagacatgaaaaaagccgtggcccacatgaaatacatgggaaagggctctatgactgggctggccctgaaacacatgtttgagagaagttttacccaaggagaaggggccaggcccctttccacaagggtgcccagagcagccattgtgttcaccgacggacgggctcaggatgacgtctccgagtgggccagtaaagccaaggccaatggtatcactatgtatgctgttggggtaggaaaagccattgaggaggaactacaagagattgcctctgagcccacaaacaagcatctcttctatgccgaagacttcagcacaatggatgagataagtgaaaaactcaagaaaggcatctgtgaagctctagaagactccgatggaagacaggactctccagcaggggaactgccaaaaacggtccaacagccaacagaatctgagccagtcaccataaatatccaagacctactttcctgttctaattttgcagtgcaacacagatatctgtttgaagaagacaatcttttacggtctacacaaaagctttcccattcaacaaaaccttcaggaagccctttggaagaaaaacacgatcaatgcaaatgtgaaaaccttataatgttccagaaccttgcaaacgaagaagtaagaaaattaacacagcgcttagaagaaatgacacagagaatggaagccctggaaaatcgcctgagatacagatgaagattagaaatcgcgacacatttgtagtcattgtatcacggattacaatgaacgcagtgcagagccccaaagctcaggctattgttaaatcaataatgttgtgaagtaaaacaatcagtactgagaaacctggtttgccacagaacaaagacaagaagtatacactaacttgtataaatttatctaggaaaaaaatccttcagaattctaagatgaatttaccaggtgagaatgaataagctatgcaaggtattttgtaatatactgtggacacaacttgcttctgcctcatcctgccttagtgtgcaatctcatttgactatacgataaagtttgcacagtcttacttctgtagaacactggccataggaaatgctgtttttttgtactggactttaccttgatatatgtatatggatgtatgcataaaatcataggacatatgtacttgtggaacaagttggattttttatacaatattaaaattcaccacttcagaga

SEQ ID NO: 425661 - DNA, 4219 bp, Homo sapiens
cacgcgtcgcccacgcgtcggactagttctagatcgcgagcggccctcgcgcaggcagccagcgagcgaagggagcgctctgggatgggacttggagcaagcggcggcggcggagacagaggcagaggcagaagctggggctccgtcctcgcctcccacgagcgatccccgaggagagccgcggccctcggcgaggcgaagaggccgacgaggaagacccgggtggctgcgcccctgcctcgcttcccaggcgccggcggctgcagccttgcccctcttgctcgccttgaaaatggaaaagatgctcgcaggctgctttctgctgatcctcggacagatcgtcctcctccctgccgaggccagggagcggtcacgtgggaggtccatctctaggggcagacacgctcggacccacccgcagacggcccttctggagagttcctgtgagaacaagcgggcagacctggttttcatcattgacagctctcgcagtgtcaacacccatgactatgcaaaggtcaaggagttcatcgtggacatcttgcaattcttggacattggtcctgatgtcacccgagtgggcctgctccaatatggcagcactgtcaagaatgagttctccctcaagaccttcaagaggaagtccgaggtggagcgtgctgtcaagaggatgcggcatctgtccacgggcaccatgaccgggctggccatccagtatgccctgaacatcgcattctcagaagcagagggggcccggcccctgagggagaatgtgccacgggtcataatgatcgtgacagatgggagacctcaggactccgtggccgaggtggctgctaaggcacgggacacgggcatcctaatctttgccattggtgtgggccaggtagacttcaacaccttgaagtccattgggagtgagccccatgaggaccatgtcttccttgtggccaatttcagccagattgagacgctgacctccgtgttccagaagaagttgtgcacggcccacatgtgcagcaccctggagcataactgtgcccacttctgcatcaacatccctggctcatacgtctgcaggtgcaaacaaggctacattctcaactcggatcagacgacttgcagaatccaggatctgtgtgccatggaggaccacaactgtgagcagctctgtgtgaatgtgccgggctccttcgtctgccagtgctacagtggctacgccctggctgaggatgggaagaggtgtgtggctgtggactactgtgcctcagaaaaccacggatgtgaacatgagtgtgtaaatgctgatggctcctacctttgccagtgccatgaaggatttgctcttaacccagatgaaaaaacgtgcacaaagatagactactgtgcctcatctaatcacggatgtcagcacgagtgtgttaacacagatgattcctattcctgccactgcctgaaaggctttaccctgaatccagataagaaaacctgcagaaggatcaactactgtgcactgaacaaaccgggctgtgagcatgagtgcgtcaacatggaggagagctactactgccgctgccaccgtggctacactctggaccccaatggcaaaacctgcagccgagtggaccactgtgcacagcaggaccatggctgtgagcagctgtgtctgaacacggaggattccttcgtctgccagtgctcagaaggcttcctcatcaacgaggacctcaagacctgctcccgggtggattactgcctgctgagtgaccatggttgtgaatactcctgtgtcaacatggacagatcctttgcctgtcagtgtcctgagggacacgtgctccgcagcgatgggaagacgtgtgcaaaattggactcttgtgctctgggggaccacggttgtgaacattcgtgtgtaagcagtgaagattcgtttgtgtgccagtgctttgaaggttatatactccgtgaagatggaaaaacctgcagaaggaaagatgtctgccaagctatagaccatggctgtgaacacatttgtgtgaacagtgacgactcatacacgtgcgagtgcttggagggattccggctcgctgaggatgggaaacgctgccgaaggaaggatgtctgcaaatcaacccaccatggctgcgaacacatttgtgttaataatgggaattcctacatctgcaaatgctcagagggatttgttctagctgaggacggaagacggtgcaagaaatgcactgaaggcccaattgacctggtctttgtgatcgatggatccaagagtcttggagaagagaattttgaggtcgtgaagcagtttgtcactggaattatagattccttgacaatttcccccaaagccgctcgagtggggctgctccagtattccacacaggtccacacagagttcactctgagaaacttcaactcagccaaagacatgaaaaaagccgtggcccacatgaaatacatgggaaagggctctatgactgggctggccctgaaacacatgtttgagagaagttttacccaaggagaaggggccaggcccctttccacaagggtgcccagagcagccattgtgttcaccgacggacgggctcaggatgacgtctccgagtgggccagtaaagccaaggccaatggtatcactatgtatgctgttggggtaggaaaagccattgaggaggaactacaagagattgcctctgagcccacaaacaagcatctcttctatgccgaagacttcagcacaatggatgagataagtgaaaaactcaagaaaggcatctgtgaagctctagaagactccgatggaagacaggactctccagcaggggaactgccaaaaacggtccaacagccaacagaatctgagccagtcaccataaatatccaagacctactttcctgttctaattttgcagtgcaacacagatatctgtttgaagaagacaatcttttacggtctacacaaaagctttcccattcaacaaaaccttcaggaagccctttggaagaaaaacacgatcaatgcaaatgtgaaaaccttataatgttccagaaccttgcaaacgaagaagtaagaaaattaacacagcgcttagaagaaatgacacagagaatggaagccctggaaaatcgcctgagatacagatgaagattagaaatcgcgacacatttgtagtcattgtatcacggattacaatgaacgcagtgcagagccccaaagctcaggctattgttaaatcaataatgttgtgaagtaaaacaatcagtactgagaaacctggtttgccacagaacaaagacaagaagtatacactaacttgtataaatttatctaggaaaaaaatccttcagaattctaagatgaatttaccaggtgagaatgaataagctatgcaaggtattttgtaatatactgtggacacaacttgcttctgcctcatcctgccttagtgtgcaatctcatttgactatacgataaagtttgcacagtcttacttctgtagaacactggccataggaaatgctgtttttttgtactggactttaccttgatatatgtatatggatgtatgcataaaatcataggacatatgtacttgtggaacaagttggattttttatacaatattaaaattcaccacttcagagaatggtattcagtgcaaaaattcttagtttaactttaaatggaagatatgtatgtatgagaaatggccaacatgcctatgaaaaaaatgctgaatctcatcagtaatcaggaaaatgcaggttaaaacaataccatttttcacccatcagcttagcaaaaatgagtatattttttaacaagtgttggtaaggatgtggaaatgtgaggttcttgtagtaagaatgcaaatggcactctttgtagagtaagtctgttgacatctcataaaactgaaaatgcacacaaccctgtaaatctagcaactgcactcagttgatttcagcccatacatacaaagagacctgcataagaatgttactaggctttgtaaaagcaaaaaataaggaacaacttaaacatcatcagaaggggaactgataaactctggtgtaatccataccacagaaatacaacaccgcatgtacaggaatgtgctacatctatacaaataaatggtcaaactcaaaacaaagatgactttaaaaagaatgacaaaatgtttagcataccattcct

SEQ ID NO: 425662 - DNA, 1794 bp, Homo sapiens
cacgcgtcgcccacgcgtcggactagttctagatcgcgagcggccctcgcgcaggcagccagcgagcgaagggagcgctctgggatgggacttggagcaagcggcggcggcggagacagaggcagaggcagaagctggggctccgtcctcgcctcccacgagcgatccccgaggagagccgcggccctcggcgaggcgaagaggccgacgaggaagacccgggtggctgcgcccctgcctcgcttcccaggcgccggcggctgcagccttgcccctcttgctcgccttgaaaatggaaaagatgctcgcaggctgctttctgctgatcctcggacagatcgtcctcctccctgccgaggccagggagcggtcacgtgggaggtccatctctaggggcagacacgctcggacccacccgcagacggcccttctggagagttcctgtgagaacaagcgggcagacctggttttcatcattgacagctctcgcagtgtcaacacccatgactatgcaaaggtcaaggagttcatcgtggacatcttgcaattcttggacattggtcctgatgtcacccgagtgggcctgctccaatatggcagcactgtcaagaatgagttctccctcaagaccttcaagaggaagtccgaggtggagcgtgctgtcaagaggatgcggcatctgtccacgggcaccatgaccgggctggccatccagtatgccctgaacatcgcattctcagaagcagagggggcccggcccctgagggagaatgtgccacgggtcataatgatcgtgacagatgggagacctcaggactccgtggccgaggtggctgctaaggcacgggacacgggcatcctaatctttgccattggtgtgggccaggtagacttcaacaccttgaagtccattgggagtgagccccatgaggaccatgtcttccttgtggccaatttcagccagattgagacgctgacctccgtgttccagaagaagttgtgcacggcccacatgtgcagcaccctggagcataactgtgcccacttctgcatcaacatccctggctcatacgtctgcaggtgcaaacaaggctacattctcaactcggatcagacgacttgcagaatccaggatctgtgtgccatggaggaccacaactgtgagcagctctgtgtgaatgtgccgggctccttcgtctgccagtgctacagtggctacgccctggctgaggatgggaagaggtgtgtggctgtggactactgtgcctcagaaaaccacggatgtgaacatgagtgtgtaaatgctgatggctcctacctttgccagtgccatgaaggatttgctcttaacccagatgaaaaaacgtgcacaaagatagactactgtgcctcatctaatcacggatgtcagcacgagtgtgttaacacagatgattcctattcctgccactgcctgaaaggctttaccctgaatccagataagaaaacctgcagaaggatcaactactgtgcactgaacaaaccgggctgtgagcatgagtgcgtcaacatggaggagagctactactgccgctgccaccgtggctacactctggaccccaatggcaaaacctgcagccgagtggacaatgtgcacaaccggaacatggcttggagcatctgtgttttgacacgggggatccctttgtcgcaattgttaggtttcttaataacgagggccttaagaaccggttcccggtggtttactgtgctgtcgaggtaccatggtgggaccctctggtgttggctcttcct

SEQ ID NO: 425663 - DNA, 441 bp, Homo sapiens
tgtggacaaccatcacttcttttggtcatctttttctgctcagctctagaagactccgatggaagacaggactctccagcaggggaactgccaaaaacggtccaacagccaacaggtacagtttttaaggcagtgtttttagaaattttggtggagggaaccatggtttccctccagataaaagctgtaaagaagtgaatgtaagtatgttcaaattatgataatgaaggccttttttccctcaaaaagatagttaacatttactcttacattaagccatatttggtaactagcatcgtttcaggtgacagtgtttttttgtttttgtttttgttgttgttgtttttttgagacagtttcattctgttgcccaggctggagtgcagtggtacgatttcagctcactgcaacctccacctcctgggctcaagtgattctcct

SEQ ID NO: 425664 - DNA, 3497 bp, Homo sapiens
cgaactctgaaaaggcggggcagcgggcctgcagctcctggagttcagggagacccggaaatctcaccctgccctcttcttgtgttgtgtttgtcacagccttgcccctcttgctcgccttgaaaatggaaaagatgctcgcaggctgctttctgctgatcctcggacagatcgtcctcctccctgccgaggccagggagcggtcacgtgggaggtccatctctaggggcagacacgctcggacccacccgcagacggcccttctggagagttcctgtgagaacaagcgggcagacctggttttcatcattgacagctctcgcagtgtcaacacccatgactatgcaaaggtcaaggagttcatcgtggacatcttgcaattcttggacattggtcctgatgtcacccgagtgggcctgctccaatatggcagcactgtcaagaatgagttctccctcaagaccttcaagaggaagtccgaggtggagcgtgctgtcaagaggatgcggcatctgtccacgggcaccatgaccgggctggccatccagtatgccctgaacatcgcattctcagaagcagagggggcccggcccctgagggagaatgtgccacgggtcataatgatcgtgacagatgggagacctcaggactccgtggccgaggtggctgctaaggcacgggacacgggcatcctaatctttgccattggtgtgggccaggtagacttcaacaccttgaagtccattgggagtgagccccatgaggaccatgtcttccttgtggccaatttcagccagattgagacgctgacctccgtgttccagaagaagttgtgcacggcccacatgtgcagcaccctggagcataactgtgcccacttctgcatcaacatccctggctcatacgtctgcaggtgcaaacaaggctacattctcaactcggatcagacgacttgcagaatccaggatctgtgtgccatggaggaccacaactgtgagcagctctgtgtgaatgtgccgggctccttcgtctgccagtgctacagtggctacgccctggctgaggatgggaagaggtgtgtggctgtggactactgtgcctcagaaaaccacggatgtgaacatgagtgtgtaaatgctgatggctcctacctttgccagtgccatgaaggatttgctcttaacccagatgaaaaaacgtgcacaaagatagactactgtgcctcatctaatcacggatgtcagcacgagtgtgttaacacagatgattcctattcctgccactgcctgaaaggctttaccctgaatccagataagaaaacctgcagaaggatcaactactgtgcactgaacaaaccgggctgtgagcatgagtgcgtcaacatggaggagagctactactgccgctgccaccgtggctacactctggaccccaatggcaaaacctgcagccgagtggaccactgtgcacagcaggaccatggctgtgagcagctgtgtctgaacacggaggattccttcgtctgccagtgctcagaaggcttcctcatcaacgaggacctcaagacctgctcccgggtggattactgcctgctgagtgaccatggttgtgaatactcctgtgtcaacatggacagatcctttgcctgtcagtgtcctgagggacacgtgctccgcagcgatgggaagacgtgtgcaaaattggactcttgtgctctgggggaccacggttgtgaacattcgtgtgtaagcagtgaagattcgtttgtgtgccagtgctttgaaggttatatactccgtgaagatggaaaaacctgcagaaggaaagatgtctgccaagctatagaccatggctgtgaacacatttgtgtgaacagtgacgactcatacacgtgcgagtgcttggagggattccggctcgctgaggatgggaaacgctgccgaaggaaggatgtctgcaaatcaacccaccatggctgcgaacacatttgtgttaataatgggaattcctacatctgcaaatgctcagagggatttgttctagctgaggacggaagacggtgcaagaaatgcactgaaggcccaattgacctggtctttgtgatcgatggatccaagagtcttggagaagagaattttgaggtcgtgaagcagtttgtcactggaattatagattccttgacaatttcccccaaagccgctcgagtggggctgctccagtattccacacaggtccacacagagttcactctgagaaacttcaactcagccaaagacatgaaaaaagccgtggcccacatgaaatacatgggaaagggctctatgactgggctggccctgaaacacatgtttgagagaagttttacccaaggagaaggggccaggcccctttccacaagggtgcccagagcagccattgtgttcaccgacggacgggctcaggatgacgtctccgagtgggccagtaaagccaaggccaatggtatcactatgtatgctgttggggtaggaaaagccattgaggaggaactacaagagattgcctctgagcccacaaacaagcatctcttctatgccgaagacttcagcacaatggatgagataagtgaaaaactcaagaaaggcatctgtgaagctctagaagactccgatggaagacaggactctccagcaggggaactgccaaaaacggtccaacagccaacagaatctgagccagtcaccataaatatccaagacctactttcctgttctaattttgcagtgcaacacagatatctgtttgaagaagacaatcttttacggtctacacaaaagctttcccattcaacaaaaccttcaggaagccctttggaagaaaaacacgatcaatgcaaatgtgaaaaccttataatgttccagaaccttgcaaacgaagaagtaagaaaattaacacagcgcttagaagaaatgacacagagaatggaagccctggaaaatcgcctgagatacagatgaagattagaaatcgcgacacatttgtagtcattgtatcacggattacaatgaacgcagtgcagagccccaaagctcaggctattgttaaatcaataatgttgtgaagtaaaacaatcagtactgagaaacctggtttgccacagaacaaagacaagaagtatacactaacttgtataaatttatctaggaaaaaaatccttcagaattctaagatgaatttaccaggtgagaatgaataagctatgcaaggtattttgtaatatactgtggacacaacttgcttctgcctcatcctgccttagtgtgcaatctcatttgactatacgataaagtttgcacagtcttacttctgtagaacactggccataggaaatgctgtttttttgtactggactttaccttgatatatgtatatggatgtatgcataaaatcataggacatatgtacttgtggaacaagttggattttttatacaatattaaaattcaccacttcagaga

SEQ ID NO: 425665 - DNA, 3607 bp, Homo sapiens
cacgcgtcgcccacgcgtcggactagttctagatcgcgagcggccctcgcgcaggcagccagcgagcgaagggagcgctctgggatgggacttggagcaagcggcggcggcggagacagaggcagaggcagaagctggggctccgtcctcgcctcccacgagcgatccccgaggagagccgcggccctcggcgaggcgaagaggccgacgaggaagacccgggtggctgcgcccctgcctcgcttcccaggcgccggcggctgcagccttgcccctcttgctcgccttgaaaatggaaaagatgctcgcaggctgctttctgctgatcctcggacagatcgtcctcctccctgccgaggccagggagcggtcacgtgggaggtccatctctaggggcagacacgctcggacccacccgcagacggcccttctggagagttcctgtgagaacaagcgggcagacctggttttcatcattgacagctctcgcagtgtcaacacccatgactatgcaaaggtcaaggagttcatcgtggacatcttgcaattcttggacattggtcctgatgtcacccgagtgggcctgctccaatatggcagcactgtcaagaatgagttctccctcaagaccttcaagaggaagtccgaggtggagcgtgctgtcaagaggatgcggcatctgtccacgggcaccatgaccgggctggccatccagtatgccctgaacatcgcattctcagaagcagagggggcccggcccctgagggagaatgtgccacgggtcataatgatcgtgacagatgggagacctcaggactccgtggccgaggtggctgctaaggcacgggacacgggcatcctaatctttgccattggtgtgggccaggtagacttcaacaccttgaagtccattgggagtgagccccatgaggaccatgtcttccttgtggccaatttcagccagattgagacgctgacctccgtgttccagaagaagttgtgcacggcccacatgtgcagcaccctggagcataactgtgcccacttctgcatcaacatccctggctcatacgtctgcaggtgcaaacaaggctacattctcaactcggatcagacgacttgcagaatccaggatctgtgtgccatggaggaccacaactgtgagcagctctgtgtgaatgtgccgggctccttcgtctgccagtgctacagtggctacgccctggctgaggatgggaagaggtgtgtggctgtggactactgtgcctcagaaaaccacggatgtgaacatgagtgtgtaaatgctgatggctcctacctttgccagtgccatgaaggatttgctcttaacccagatgaaaaaacgtgcacaaagatagactactgtgcctcatctaatcacggatgtcagcacgagtgtgttaacacagatgattcctattcctgccactgcctgaaaggctttaccctgaatccagataagaaaacctgcagaaggatcaactactgtgcactgaacaaaccgggctgtgagcatgagtgcgtcaacatggaggagagctactactgccgctgccaccgtggctacactctggaccccaatggcaaaacctgcagccgagtggaccactgtgcacagcaggaccatggctgtgagcagctgtgtctgaacacggaggattccttcgtctgccagtgctcagaaggcttcctcatcaacgaggacctcaagacctgctcccgggtggattactgcctgctgagtgaccatggttgtgaatactcctgtgtcaacatggacagatcctttgcctgtcagtgtcctgagggacacgtgctccgcagcgatgggaagacgtgtgcaaaattggactcttgtgctctgggggaccacggttgtgaacattcgtgtgtaagcagtgaagattcgtttgtgtgccagtgctttgaaggttatatactccgtgaagatggaaaaacctgcagaaggaaagatgtctgccaagctatagaccatggctgtgaacacatttgtgtgaacagtgacgactcatacacgtgcgagtgcttggagggattccggctcgctgaggatgggaaacgctgccgaaggaaggatgtctgcaaatcaacccaccatggctgcgaacacatttgtgttaataatgggaattcctacatctgcaaatgctcagagggatttgttctagctgaggacggaagacggtgcaagaaatgcactgaaggcccaattgacctggtctttgtgatcgatggatccaagagtcttggagaagagaattttgaggtcgtgaagcagtttgtcactggaattatagattccttgacaatttcccccaaagccgctcgagtggggctgctccagtattccacacaggtccacacagagttcactctgagaaacttcaactcagccaaagacatgaaaaaagccgtggcccacatgaaatacatgggaaagggctctatgactgggctggccctgaaacacatgtttgagagaagttttacccaaggagaaggggccaggcccctttccacaagggtgcccagagcagccattgtgttcaccgacggacgggctcaggatgacgtctccgagtgggccagtaaagccaaggccaatggtatcactatgtatgctgttggggtaggaaaagccattgaggaggaactacaagagattgcctctgagcccacaaacaagcatctcttctatgccgaagacttcagcacaatggatgagataagtgaaaaactcaagaaaggcatctgtgaagctctagaagactccgatggaagacaggactctccagcaggggaactgccaaaaacggtccaacagccaacagtgcaacacagatatctgtttgaagaagacaatcttttacggtctacacaaaagctttcccattcaacaaaaccttcaggaagccctttggaagaaaaacacgatcaatgcaaatgtgaaaaccttataatgttccagaaccttgcaaacgaagaagtaagaaaattaacacagcgcttagaagaaatgacacagagaatggaagccctggaaaatcgcctgagatacagatgaagattagaaatcgcgacacatttgtagtcattgtatcacggattacaatgaacgcagtgcagagccccaaagctcaggctattgttaaatcaataatgttgtgaagtaaaacaatcagtactgagaaacctggtttgccacagaacaaagacaagaagtatacactaacttgtataaatttatctaggaaaaaaatccttcagaattctaagatgaatttaccaggtgagaatgaataagctatgcaaggtattttgtaatatactgtggacacaacttgcttctgcctcatcctgccttagtgtgcaatctcatttgactatacgataaagtttgcacagtcttacttctgtagaacactggccataggaaatgctgtttttttgtactggactttaccttgatatatgtatatggatgtatgcataaaatcataggacatatgtacttgtggaacaagttggattttttatacaatattaaaattcaccacttcagaga

SEQ ID NO: 425666 - DNA, 2481 bp, Homo sapiens
agggactggaggagagagttcttgtggtggtggggacagaggctgtaggaagggaagaggtgtgtggctgtggactactgtgcctcagaaaaccacggatgtgaacatgagtgtgtaaatgctgatggctcctacctttgccagtgccatgaaggatttgctcttaacccagatgaaaaaacgtgcacaaagatagactactgtgcctcatctaatcacggatgtcagcacgagtgtgttaacacagatgattcctattcctgccactgcctgaaaggctttaccctgaatccagataagaaaacctgcagaaggatcaactactgtgcactgaacaaaccgggctgtgagcatgagtgcgtcaacatggaggagagctactactgccgctgccaccgtggctacactctggaccccaatggcaaaacctgcagccgagtggaccactgtgcacagcaggaccatggctgtgagcagctgtgtctgaacacggaggattccttcgtctgccagtgctcagaaggcttcctcatcaacgaggacctcaagacctgctcccgggtggattactgcctgctgagtgaccatggttgtgaatactcctgtgtcaacatggacagatcctttgcctgtcagtgtcctgagggacacgtgctccgcagcgatgggaagacgtgtgcaaaattggactcttgtgctctgggggaccacggttgtgaacattcgtgtgtaagcagtgaagattcgtttgtgtgccagtgctttgaaggttatatactccgtgaagatggaaaaacctgcagaaggaaagatgtctgccaagctatagaccatggctgtgaacacatttgtgtgaacagtgacgactcatacacgtgcgagtgcttggagggattccggctcgctgaggatgggaaacgctgccgaaggaaggatgtctgcaaatcaacccaccatggctgcgaacacatttgtgttaataatgggaattcctacatctgcaaatgctcagagggatttgttctagctgaggacggaagacggtgcaagaaatgcactgaaggcccaattgacctggtctttgtgatcgatggatccaagagtcttggagaagagaattttgaggtcgtgaagcagtttgtcactggaattatagattccttgacaatttcccccaaagccgctcgagtggggctgctccagtattccacacaggtccacacagagttcactctgagaaacttcaactcagccaaagacatgaaaaaagccgtggcccacatgaaatacatgggaaagggctctatgactgggctggccctgaaacacatgtttgagagaagttttacccaaggagaaggggccaggcccctttccacaagggtgcccagagcagccattgtgttcaccgacggacgggctcaggatgacgtctccgagtgggccagtaaagccaaggccaatggtatcactatgtatgctgttggggtaggaaaagccattgaggaggaactacaagagattgcctctgagcccacaaacaagcatctcttctatgccgaagacttcagcacaatggatgagataagtgaaaaactcaagaaaggcatctgtgaagctctagaagactccgatggaagacaggactctccagcaggggaactgccaaaaacggtccaacagccaacagaatctgagccagtcaccataaatatccaagacctactttcctgttctaattttgcagtgcaacacagatatctgtttgaagaagacaatcttttacggtctacacaaaagctttcccattcaacaaaaccttcaggaagccctttggaagaaaaacacgatcaatgcaaatgtgaaaaccttataatgttccagaaccttgcaaacgaagaagtaagaaaattaacacagcgcttagaagaaatgacacagagaatggaagccctggaaaatcgcctgagatacagatgaagattagaaatcgcgacacatttgtagtcattgtatcacggattacaatgaacgcagtgcagagccccaaagctcaggctattgttaaatcaataatgttgtgaagtaaaacaatcagtactgagaaacctggtttgccacagaacaaagacaagaagtatacactaacttgtataaatttatctaggaaaaaaatccttcagaattctaagatgaatttaccaggtgagaatgaataagctatgcaaggtattttgtaatatactgtggacacaacttgcttctgcctcatcctgccttagtgtgcaatctcatttgactatacgataaagtttgcacagtcttacttctgtagaacactggccataggaaatgctgtttttttgtactggactttaccttgatatatgtatatggatgtatgcataaaatcataggacatatgtacttgtggaacaagttggattttttatacaatattaaaattcaccacttcagaga

SEQ ID NO: 425667 - DNA, 3076 bp, Homo sapiens
cacgcgtcgcccacgcgtcggactagttctagatcgcgagcggccctcgcgcaggcagccagcgagcgaagggagcgctctgggatgggacttggagcaagcggcggcggcggagacagaggcagaggcagaagctggggctccgtcctcgcctcccacgagcgatccccgaggagagccgcggccctcggcgaggcgaagaggccgacgaggaagacccgggtggctgcgcccctgcctcgcttcccaggcgccggcggctgcagccttgcccctcttgctcgccttgaaaatggaaaagatgctcgcaggctgctttctgctgatcctcggacagatcgtcctcctccctgccgaggccagggagcggtcacgtgggaggtccatctctaggggcagacacgctcggacccacccgcagacggcccttctggagagttcctgtgagaacaagcgggcagacctggttttcatcattgacagctctcgcagtgtcaacacccatgactatgcaaaggtcaaggagttcatcgtggacatcttgcaattcttggacattggtcctgatgtcacccgagtgggcctgctccaatatggcagcactgtcaagaatgagttctccctcaagaccttcaagaggaagtccgaggtggagcgtgctgtcaagaggatgcggcatctgtccacgggcaccatgaccgggctggccatccagtatgccctgaacatcgcattctcagaagcagagggggcccggcccctgagggagaatgtgccacgggtcataatgatcgtgacagatgggagacctcaggactccgtggccgaggtggctgctaaggcacgggacacgggcatcctaatctttgccattggtgtgggccaggtagacttcaacaccttgaagtccattgggagtgagccccatgaggaccatgtcttccttgtggccaatttcagccagattgagacgctgacctccgtgttccagaagaagttgtgcacggcccacatgtgcagcaccctggagcataactgtgcccacttctgcatcaacatccctggctcatacgtctgcaggtgcaaacaaggctacattctcaactcggatcagacgacttgcagaatccaggatctgtgtgccatggaggaccacaactgtgagcagctctgtgtgaatgtgccgggctccttcgtctgccagtgctacagtggctacgccctggctgaggatgggaagaggtgtgtggctgtggactactgtgcctcagaaaaccacggatgtgaacatgagtgtgtaaatgctgatggctcctacctttgccagtgccatgaaggatttgctcttaacccagatgaaaaaacgtgcacaaagatagactactgtgcctcatctaatcacggatgtcagcacgagtgtgttaacacagatgattcctattcctgccactgcctgaaaggctttaccctgaatccagataagaaaacctgcagaaggatcaactactgtgcactgaacaaaccgggctgtgagcatgagtgcgtcaacatggaggagagctactactgccgctgccaccgtggctacactctggaccccaatggcaaaacctgcagccgagtggaccactgtgcacagcaggaccatggctgtgagcagctgtgtctgaacacggaggattccttcgtctgccagtgctcagaaggcttcctcatcaacgaggacctcaagacctgctcccgggtggattactgcctgctgagtgaccatggttgtgaatactcctgtgtcaacatggacagatcctttgcctgtcagtgtcctgagggacacgtgctccgcagcgatgggaagacgtgtgcaaaattggactcttgtgctctgggggaccacggttgtgaacattcgtgtgtaagcagtgaagattcgtttgtgtgccagtgctttgaaggttatatactccgtgaagatggaaaaacctgcagaaggaaagatgtctgccaagctatagaccatggctgtgaacacatttgtgtgaacagtgacgactcatacacgtgcgagtgcttggagggattccggctcgctgaggatgggaaacgctgccgaaggaaggatgtctgcaaatcaacccaccatggctgcgaacacatttgtgttaataatgggaattcctacatctgcaaatgctcagagggatttgttctagctgaggacggaagacggtgcaagaaatgcactgaaggcccaattgacctggtctttgtgatcgatggatccaagagtcttggagaagagaattttgaggtcgtgaagcagtttgtcactggaattatagattccttgacaatttcccccaaagccgctcgagtggggctgctccagtattccacacaggtccacacagagttcactctgagaaacttcaactcagccaaagacatgaaaaaagccgtggcccacatgaaatacatgggaaagggctctatgactgggctggccctgaaacacatgtttgagagaagttttacccaaggagaaggggccaggcccctttccacaagggtgcccagagcagccattgtgttcaccgacggacgggctcaggatgacgtctccgagtgggccagtaaagccaaggccaatggtatcactatgtatgctgttggggtaggaaaagccattgaggaggaactacaagagattgcctctgagcccacaaacaagcatctcttctatgccgaagacttcagcacaatggatgagataagtgaaaaactcaagaaaggcatctgtgaagctctagaagactccgatggaagacaggactctccagcaggggaactgccaaaaacggtccaacagccaacagaatctgagccagtcaccataaatatccaagacctactttcctgttctaattttgcagtgcaacacagatatctgtttgaagaagacaatcttttacggtctacacatttagaatttaaaaaaactggcttggaaaaaaatcactaaaaatttaagtgacacaaatcgtgattaactagtccatccagttggagtgaggtccgc

SEQ ID NO: 425668 - DNA, 542 bp, Homo sapiens
cctgcggaactgtgactcaattaaacctctattcttataaattacccaatctcaggtattttgttacagcaatgtgagaactgcctaacacacccatcctccaggaatagaagagaggctggagactgataaacaatcatgcctacgtgatgaagcctttataaaaataagtgaaactgcagggttcaaagagctcctaggttggtgaacacatccacgtgctgtgagggtggctcacttcaactccacagggacagaagcttctacactcagatcctgccagatctcaccctatgtatctcttcatctggctgtttatcccatattcttcattataaccttttcaatataataaattgataagcataagtgattccctgagttctgtgaacctctctagcaaattaatcaaatgcaaggagggggtcatgggaacctccgatttgtagtcaagtggaacagaagttgggggtaacctattgtgattggcatctgaagctggggggcagtcttgtgggattgagcccctactctgtgatatc

SEQ ID NO: 425669 - DNA, 3531 bp, Homo sapiens
tctctgataaccagatttttcccccataatctgtatctgtattcaagtctctatcctcatccccaaatggatttcaccccgcttgtccatcagtctctgcccatttcttctgtctcccacagacatggtctgtgtagttgttctgcacactacccgtcctcgccccttctcatttccctcactccacggacagctacaggagggcttccatcatttgtcctcttacttccttgttagaactttgtgctgctgaccaccactctgaaccaaaacttctttcttggttcttgaaagttgctgtctttctcctccagagggtctgtgtcttccttccaactcttaaacatttttgtttcccagaatccatcattggccattgctttttcacttgccatgagctctgtgaatgagatggttcctgctgaagacatttactttcaatgatctacagaatttcccaaatctatgtctccagactggatgtttctcacgtctgtggcccactgggcatcttctgcactttctctgcatttgtaaacactgagcctgtatgcgtgtctatgtggccatggccctggccgtggggatgcacccataattataatgagagcaggtgaatgtcatgtggctatgtatgagacattgttgtgaatgttttacatgcatcagctctttcaacatttacagcatctgtgtgtggtaggtaatgttgtttccttcattttgcagagcagaatatagataggctcaggttaagaatttgcccaaggttacacagttatgaagtttggatttaggaatgggaggccacgtagactggcttcagaattcatgtctttaaccactttattgcttctcatgttggggggtttgttttctggtcactatttttactaaagttgattcaacaatgctataatctgttactctcattcgacaatacatcttgactgtttcttcaacttgaggaaggtaaaccaaagccactctttaatgggtgcaaatatctgttgtaactatgtagaagatacagtgtctgggtttgaggacaggggagtgggaaaactgagtagggaagcggtaagacatgcatctggctttaggagtgtttgaagtgcctaaagatcagggtgaatttcccaaatttgaatcttgttgcccaagccacattgcaaccacctctttttctcttacctcgtccccacatccaggcactgccccattctgttcattccacctttttttttagtagaccctccatatatgtgtgtgttttggtgaatggccacacacagcaaagttatttttattgcaattttgttgttgttgtttgagacacagagtctcatactctgccacccagactgaagtgcagtggtgcgatctcagttcactgcaacctccatccccccatgttcaagcaattctcctgcctcagcctcccaagtagctgggattacaggcatgggccaccatgcccggctaatttttgtattttttgtagacacggggtttcaccatgttggccaggctggtctcacactcctgacctcaggtgatccacccgcctcggcctcccgaagtgctggcattacaggcatgagccaccacacccagcctttattgcaatttttggttccctcacagaatgtttaccatgaagctgtgcgtataggtggtaccatgtatgacataccttgacctcaaagataatctacctgggctttttttgtttgtttgttttgagatggagtctcactctgtcacccatgctggtgtgcagtggcgtgatcttggctcacagcagcctctgcctcccgggttcaagcgattctcctgcctcagcctcctgagtagctgggactacaggtgcctgcgaccacacccagctaatttttgtatttttagtagtagtgggatttcaccatgttggccaggatggcctccacctcctgacttcatgatccacccgcctcggcctcccaaagtgctgggattacaggcgtgagccaccgcacctggcctacctgggcttttttggacagatgtacatgattttagaaattgttatgaatgactgtcttgggatcctcaagaacacccccaggtttgacgatttgctgagaagactcaggtctcagcattctgtcatactcaacagctatgatttactgcagcaaaaaaatacaaagcaaatagtaaagggaaaaagccaaaattcagagaaaaccaggcacaatcttctgagtcttgtttcagtgaagtcacaggatgtgccttatttaagttccatctggtacttatgacaacacatgctatatgtccactgggaagcttattagagactcagtgccagggtttttattgggcatgttttctagcacatcccacaattctggacttccagaaggttagcaggggttcagcttttcagctgaaaacgttatccccctttcagctggggggaaaaaaaggcaccgaaaaacagggcactgagctactcctgttttgggtgggtggagcagtagtaagcctcccaaaatctaaggtcccacactccagcaagggtgaaccttgcaaactcaaaaggatagcagtctccaacctgctgttttatacagtgacttaagtggtactaaaatgctatataagtcaaatttacgtaacattaagcaaataattttttttcagcaaaaaaataatggtcatgactttgtggtgaaggcttatgtaatgattgtaataaattcaggtggctcacgcctgtgataccagcacttttgggaggctgaggcgggtggatcacttgaggtcaggagtttgagaccagcctggccaacatggtgaaatcccatctctacaaaaatgaaaaattagccgggcgtagtggtacatgcatttagtcctagctacttgggaggctgaggcaggaaaatcgcttgagcctgggaggcagaggttgcagtgagccgagatcatgccactgcactccagcctgggtgacagagtgagactgtgtctcaaaaaaaaaaaaaaaaaaaatgcctcagttttgttaagaggaaaaagcaaatcctaagttacagtggaacttatgaacaccctagcctagagatttaatttagtgatgaaaaggtacagagagagtctttcaagaaaggacctagtctgctcgcgttctctctctctctctctatatatatatatgtatatgtgtgtgtacatatggaccacttcaagctacacacacacacacacacacatatacacgtgtatgaatatatatatatggctataagtggtgcgacttgcaggtactccctttgttcacctttgtaaagatgttattgccagttcagtgtgtatttctatagtatatatgtaaacaatttgtcatccttttgttgctgcttttgaaactagttcatggcttcagtgggggagagatttaaataatatgggtttataatttctgcattattaaatgcagataacttgtgattaaagagtatgttattggaaaaaaaattg

SEQ ID NO: 425670 - DNA, 2266 bp, Homo sapiens
tctctgataaccagatttttcccccataatctgtatctgtattcaagtctctatcctcatccccaaatggatttcaccccgcttgtccatcagtctctgcccatttcttctgtctcccacagacatggtctgtgtagttgttctgcacactacccgtcctcgccccttctcatttccctcactccacggacagctacaggagggcttccatcatttgtcctcttacttccttgttagaactttgtgctgctgaccaccactctgaaccaaaacttctttcttggttcttgaaagttgctgtctttctcctccagagggtctgtgtcttccttccaactcttaaacatttttgtttcccagaatccatcattggccattgctttttcacttgccatgagctctgtgaatgagatggttcctgctgaagacatttactttcaatgatctacagaatttcccaaatctatgtctccagactggatgtttctcacgtctgtggcccactgggcatcttctgcactttctctgcatttgtaaacactgagcctgtatgcgtgtctatgtggccatggccctggccgtggggatgcacccataattataatgagagcaggtgaatgtcatgtggctatgtatgagacattgttgtgaatgttttacatgcatcagctctttcaacatttacagcatctgtgtgtggtaggtaatgttgtttccttcattttgcagagcagaatatagataggctcaggttaagaatttgcccaaggttacacagttatgaagtttggatttaggaatgggaggccacgtagactggcttcagaattcatgtctttaaccactttattgcttctcatgttggggggtttgttttctggtcactatttttactaaagttgattcaacaatgctataatctgttactctcattcgacaatacatcttgactgtttcttcaacttgaggaaggtaaaccaaagccactctttaatgggtgcaaatatctgttgtaactatgtagaagatacagtgtctgggtttgaggacaggggagtgggaaaactgagtagggaagcggtaagacatgcatctggctttaggagtgtttgaagtgcctaaagatcagggtgaatttcccaaatttgaatcttgttgcccaagccacattgcaaccacctctttttctcttacctcgtccccacatccaggcactgccccattctgttcattccacctttttttttagtagaccctccatatatgtgtgtgttttggtgaatggccacacacagcaaagttatttttattgcaattttgttgttgttgtttgagacacagagtctcatactctgccacccagactgaagtgcagtggtgcgatctcagttcactgcaacctccatccccccatgttcaagcaattctcctgcctcagcctcccaagtagctgggattacaggcatgggccaccatgcccggctaatttttgtattttttgtagacacggggtttcaccatgttggccaggctggtctcacactcctgacctcaggtgatccacccgcctcggcctcccgaagtgctggcattacaggcatgagccaccacacccagcctttattgcaatttttggttccctcacagaatgtttaccatgaagctgtgcgtataggtggtaccatgtatgacataccttgacctcaaagataatctacctgggctttttttgtttgtttgttttgagactgtgtctcaaaaaaaaaaaaaaaaaaaatgcctcagttttgttaagaggaaaaagcaaatcctaagttacagtggaacttatgaacaccctagcctagagatttaatttagtgatgaaaaggtacagagagagtctttcaagaaaggacctagtctgctcgcgttctctctctctctctctatatatatatatgtatatgtgtgtgtacatatggaccacttcaagctacacacacacacacacacacatatacacgtgtatgaatatatatatatggctataagtggtgcgacttgcaggtactccctttgttcacctttgtaaagatgttattgccagttcagtgtgtatttctatagtatatatgtaaacaatttgtcatccttttgttgctgcttttgaaactagttcatggcttcagtgggggagagatttaaataatatgggtttataatttctgcattattaaatgcagataacttgtgattaaagagtatgttattggaaaaaaaattg

SEQ ID NO: 425671 - DNA, 3104 bp, Homo sapiens
tctctgataaccagatttttcccccataatctgtatctgtattcaagtctctatcctcatccccaaatggatttcaccccgcttgtccatcagtctctgcccatttcttctgtctcccacagacatggtctgtgtagttgttctgcacactacccgtcctcgccccttctcatttccctcactccacggacagctacaggagggcttccatcatttgtcctcttacttccttgttagaactttgtgctgctgaccaccactctgaaccaaaacttctttcttggttcttgaaagttgctgtctttctcctccagagggtctgtgtcttccttccaactcttaaacatttttgtttcccagaatccatcattggccattgctttttcacttgccatgagctctgtgaatgagatggttcctgctgaagacatttactttcaatgatctacagaatttcccaaatctatgtctccagactggatgtttctcacgtctgtggcccactgggcatcttctgcactttctctgcatttgtaaacactgagcctgtatgcgtgtctatgtggccatggccctggccgtggggatgcacccataattataatgagagcaggtgaatgtcatgtggctatgtatgagacattgttgtgaatgttttacatgcatcagctctttcaacatttacagcatctgtgtgtggtaggtaatgttgtttccttcattttgcagagcagaatatagataggctcaggttaagaatttgcccaaggttacacagttatgaagtttggatttaggaatgggaggccacgtagactggcttcagaattcatgtctttaaccactttattgcttctcatgttggggggtttgttttctggtcactatttttactaaagttgattcaacaatgctataatctgttactctcattcgacaatacatcttgactgtttcttcaacttgaggaaggtaaaccaaagccactctttaatgggtgcaaatatctgttgtaactatgtagaagatacagtgtctgggtttgaggacaggggagtgggaaaactgagtagggaagcggtaagacatgcatctggctttaggagtgtttgaagtgcctaaagatcagggtgaatttcccaaatttgaatcttgttgcccaagccacattgcaaccacctctttttctcttacctcgtccccacatccaggcactgccccattctgttcattccacctttttttttagtagaccctccatatatgtgtgtgttttggtgaatggccacacacagcaaagttatttttattgcaattttgttgttgttgtttgagacacagagtctcatactctgccacccagactgaagtgcagtggtgcgatctcagttcactgcaacctccatccccccatgttcaagcaattctcctgcctcagcctcccaagtagctgggattacaggcatgggccaccatgcccggctaatttttgtattttttgtagacacggggtttcaccatgttggccaggctggtctcacactcctgacctcaggtgatccacccgcctcggcctcccgaagtgctggcattacaggcatgagccaccacacccagcctttattgcaatttttggttccctcacagaatgtttaccatgaagctgtgcgtataggtggtaccatgtatgacataccttgacctcaaagataatctacctgggctttttttgtttgtttgttttgagatggagtctcactctgtcacccatgctggtgtgcagtggcgtgatcttggctcacagcagcctctgcctcccgggttcaagcgattctcctgcctcagcctcctgagtagctgggactacaggtgcctgcgaccacacccagctaatttttgtatttttagtagtagtgggatttcaccatgttggccaggatggcctccacctcctgacttcatgatccacccgcctcggcctcccaaagtgctgggattacaggcgtgagccaccgcacctggcctacctgggcttttttggacagatgtacatgattttagaaattgttatgaatgactgtcttgggatcctcaagaacacccccaggtttgacgatttgctgagaagactcaggtctcagcattctgtcatactcaacagctatgatttactgcagcaaaaaaatacaaagcaaatagtaaagggaaaaagccaaaattcagagaaaaccaggcacaatcttctgagtcttgtttcagtgaagtcacaggatgtgccttatttaagttccatctggtacttatgacaacacatgctatatgtccactgggaagcttattagagactcagtgccagggtttttattgggcatgttttctagcacatcccacaattctggacttccagaaggttagcaggggttcagcttttcagctgaaaacgttatccccctttcagctggggggaaaaaaaggcaccgaaaaacagggcactgagctactcctgttttgggtgggtggagcagtagtaagcctcccaaaatcgagatcatgccactgcactccagcctgggtgacagagtgagactgtgtctcaaaaaaaaaaaaaaaaaaaatgcctcagttttgttaagaggaaaaagcaaatcctaagttacagtggaacttatgaacaccctagcctagagatttaatttagtgatgaaaaggtacagagagagtctttcaagaaaggacctagtctgctcgcgttctctctctctctctctatatatatatatgtatatgtgtgtgtacatatggaccacttcaagctacacacacacacacacacacatatacacgtgtatgaatatatatatatggctataagtggtgcgacttgcaggtactccctttgttcacctttgtaaagatgttattgccagttcagtgtgtatttctatagtatatatgtaaacaatttgtcatccttttgttgctgcttttgaaactagttcatggcttcagtgggggagagatttaaataatatgggtttataatttctgcattattaaatgcagataacttgtgattaaagagtatgttattggaaaaaaaattg

SEQ ID NO: 425672 - DNA, 3464 bp, Homo sapiens
tctctgataaccagatttttcccccataatctgtatctgtattcaagtctctatcctcatccccaaatggatttcaccccgcttgtccatcagtctctgcccatttcttctgtctcccacagacatggtctgtgtagttgttctgcacactacccgtcctcgccccttctcatttccctcactccacggacagctacaggagggcttccatcatttgtcctcttacttccttgttagaactttgtgctgctgaccaccactctgaaccaaaacttctttcttggttcttgaaagttgctgtctttctcctccagagggtctgtgtcttccttccaactcttaaacatttttgtttcccagaatccatcattggccattgctttttcacttgccatgagctctgtgaatgagatggttcctgctgaagacatttactttcaatgatctacagaatttcccaaatctatgtctccagactggatgtttctcacgtctgtggcccactgggcatcttctgcactttctctgcatttgtaaacactgagcctgtatgcgtgtctatgtggccatggccctggccgtggggatgcacccataattataatgagagcaggtgaatgtcatgtggctatgtatgagacattgttgtgaatgttttacatgcatcagctctttcaacatttacagcatctgtgtgtggtaggtaatgttgtttccttcattttgcagagcagaatatagataggctcaggttaagaatttgcccaaggttacacagttatgaagtttggatttaggaatgggaggccacgtagactggcttcagaattcatgtctttaaccactttattgcttctcatgttggggggtttgttttctggtcactatttttactaaagttgattcaacaatgctataatctgttactctcattcgacaatacatcttgactgtttcttcaacttgaggaaggtaaaccaaagccactctttaatgggtgcaaatatctgttgtaactatgtagaagatacagtgtctgggtttgaggacaggggagtgggaaaactgagtagggaagcggtaagacatgcatctggctttaggagtgtttgaagtgcctaaagatcagggtgaatttcccaaatttgaatcttgttgcccaagccacattgcaaccacctctttttctcttacctcgtccccacatccaggcactgccccattctgttcattccacctttttttttagtagaccctccatatatgtgtgtgttttggtgaatggccacacacagcaaagttatttttattgcaattttgttgttgttgtttgagacacagagtctcatactctgccacccagactgaagtgcagtggtgcgatctcagttcactgcaacctccatccccccatgttcaagcaattctcctgcctcagcctcccaagtagctgggattacaggcatgggccaccatgcccggctaatttttgtattttttgtagacacggggtttcaccatgttggccaggctggtctcacactcctgacctcaggtgatccacccgcctcggcctcccgaagtgctggcattacaggcatgagccaccacacccagcctttattgcaatttttggttccctcacagaatgtttaccatgaagctgtgcgtataggtggtaccatgtatgacataccttgacctcaaagataatctacctgggctttttttgtttgtttgttttgagatggagtctcactctgtcacccatgctggtgtgcagtggcgtgatcttggctcacagcagcctctgcctcccgggttcaagcgattctcctgcctcagcctcctgagtagctgggactacaggtgcctgcgaccacacccagctaatttttgtatttttagtagtagtgggatttcaccatgttggccaggatggcctccacctcctgacttcatgatccacccgcctcggcctcccaaagtgctgggattacaggcgtgagccaccgcacctggcctacctgggcttttttggacagatgtacatgattttagaaattgttatgaatgactgtcttgggatcctcaagaacacccccaggtttgacgatttgctgagaagactcaggtctcagcattctgtcatactcaacagctatgatttactgcagcaaaaaaatacaaagcaaatagtaaagggaaaaagccaaaattcagagaaaaccaggcacaatcttctgagtcttgtttcagtgaagtcacaggatgtgccttatttaagttccatctggtacttatgacaacacatgctatatgtccactgggaagcttattagagactcagtgccagggtttttattgggcatgttttctagcacatcccacaattctggacttccagaaggttagcaggggttcagcttttcagctgaaaacgttatccccctttcagctggggggaaaaaaaggcaccgaaaaacagggcactgagctactcctgttttgggtgggtggagcagtagtaagcctcccaaaatctaaggtcccacactccagcaagggtgaaccttgcaaactcaaaaggatagcagtctccaacctgctgttttatacagtgacttaagtggtactaaaatgctatataagtcaaatttacgtaacattaagcaaataattttttttcagcaaaaaaataatggtcatgactttgtggtgaaggcttatgtaatgattgtaataaattcaggtggctcacgcctgtgataccagcacttttgggaggctgaggcgggtggatcacttgaggtcaggagtttgagaccagcctggccaacatggtgaaatcccatctctacaaaaatgaaaaattagccgggcgtagtggtacatgcatttagtcctagctacttgggaggctgaggcaggaaaatcgcttgagcctgggaggcagaggttgcagtgagccgagatcatgccactgcactccagcctgggtgacagagtgagactgtgtctcaaaaaaaaaaaaaaaaaaaatgcctcagttttgttaagaggaaaaagcaaatcctaagttacagtggaacttatgaacaccctagcctagagatttaatttagtgatgaaaaggtacagagagagtctttcaagaaaggacctagtctgctcgcgttctctctctctctctacatatacacgtgtatgaatatatatatatggctataagtggtgcgacttgcaggtactccctttgttcacctttgtaaagatgttattgccagttcagtgtgtatttctatagtatatatgtaaacaatttgtcatccttttgttgctgcttttgaaactagttcatggcttcagtgggggagagatttaaataatatgggtttataatttctgcattattaaatgcagataacttgtgattaaagagtatgttattggaaaaaaaattg

SEQ ID NO: 425673 - DNA, 2818 bp, Homo sapiens
tctctgataaccagatttttcccccataatctgtatctgtattcaagtctctatcctcatccccaaatggatttcaccccgcttgtccatcagtctctgcccatttcttctgtctcccacagacatggtctgtgtagttgttctgcacactacccgtcctcgccccttctcatttccctcactccacggacagctacaggagggcttccatcatttgtcctcttacttccttgttagaactttgtgctgctgaccaccactctgaaccaaaacttctttcttggttcttgaaagttgctgtctttctcctccagagggtctgtgtcttccttccaactcttaaacatttttgtttcccagaatccatcattggccattgctttttcacttgccatgagctctgtgaatgagatggttcctgctgaagacatttactttcaatgatctacagaatttcccaaatctatgtctccagactggatgtttctcacgtctgtggcccactgggcatcttctgcactttctctgcatttgtaaacactgagcctgtatgcgtgtctatgtggccatggccctggccgtggggatgcacccataattataatgagagcaggtgaatgtcatgtggctatgtatgagacattgttgtgaatgttttacatgcatcagctctttcaacatttacagcatctgtgtgtggtaggtaatgttgtttccttcattttgcagagcagaatatagataggctcaggttaagaatttgcccaaggttacacagttatgaagtttggatttaggaatgggaggccacgtagactggcttcagaattcatgtctttaaccactttattgcttctcatgttggggggtttgttttctggtcactatttttactaaagttgattcaacaatgctataatctgttactctcattcgacaatacatcttgactgtttcttcaacttgaggaaggtaaaccaaagccactctttaatgggtgcaaatatctgttgtaactatgtagaagatacagtgtctgggtttgaggacaggggagtgggaaaactgagtagggaagcggtaagacatgcatctggctttaggagtgtttgaagtgcctaaagatcagggtgaatttcccaaatttgaatcttgttgcccaagccacattgcaaccacctctttttctcttacctcgtccccacatccaggcactgccccattctgttcattccacctttttttttagtagaccctccatatatgtgtgtgttttggtgaatggccacacacagcaaagttatttttattgcaattttgttgttgttgtttgagacacagagtctcatactctgccacccagactgaagtgcagtggtgcgatctcagttcactgcaacctccatccccccatgttcaagcaattctcctgcctcagcctcccaagtagctgggattacaggcatgggccaccatgcccggctaatttttgtattttttgtagacacggggtttcaccatgttggccaggctggtctcacactcctgacctcaggtgatccacccgcctcggcctcccgaagtgctggcattacaggcatgagccaccacacccagcctttattgcaatttttggttccctcacagaatgtttaccatgaagctgtgcgtataggtggtaccatgtatgacataccttgacctcaaagataatctacctgggctttttttgtttgtttgttttgagatggagtctcactctgtcacccatgctggtgtgcagtggcgtgatcttggctcacagcagcctctgcctcccgggttcaagcgattctcctgcctcagcctcctgagtagctgggactacaggtgcctgcgaccacacccagctaatttttgtatttttagtagtagtgggatttcaccatgttggccaggatggcctccacctcctgacttcatgatccacccgcctcggcctcccaaagtgctgggattacaggcgtgagccaccgcacctggcctacctgggcttttttggacagatgtacatgattttagaaattgttatgaatgactgtcttgggatcctcaagaacacccccaggtttgacgatttgctgagaagactcaggtctcagcattctgtcatactcaacagctatgatttactgcagcaaaaaaatacaaaaattagcgcagtggcaggcgcctgtgaggcaggagaattgcttgaatgcgaatggcagaggttgcagtgagtgaaaatcacactactgcactccagcctgggagcataaagtgagactgtctcaaataaataaataaataaataaataaataaaacctgaggttgagcacgatggctcacacctatagtcccagcactttgggaggctgaggtgggtggatcatttgaggccaggagttgaagaccagtctggccaacatggcaaaacccatctctacgaaagaagaaacacaaaaaaaaaacaaaaaacttttggcccccctgggccctgaaaaccttttgtctgaaacactacttcattagtgacaccggaggccccagtgacgcttacgtgcgacactgggtgcaaacagagcgtgcacacacgaagcaaaaacctgcccggggccagagcaacatacagcgcgcggaatattccaccgccattataaaaaacaccgccggggcgggacaccggacgcttttcacaaaacaacctctcagactgagagccgtgagaagcgaccaaaagagggacctcatcaccaccgagggagtcacacacgagccctcagaattaaatttacg

SEQ ID NO: 425674 - DNA, 2266 bp, Homo sapiens
tctctgataaccagatttttcccccataatctgtatctgtattcaagtctctatcctcatccccaaatggatttcaccccgcttgtccatcagtctctgcccatttcttctgtctcccacagacatggtctgtgtagttgttctgcacactacccgtcctcgccccttctcatttccctcactccacggacagctacaggagggcttccatcatttgtcctcttacttccttgttagaactttgtgctgctgaccaccactctgaaccaaaacttctttcttggttcttgaaagttgctgtctttctcctccagagggtctgtgtcttccttccaactcttaaacatttttgtttcccagaatccatcattggccattgctttttcacttgccatgagctctgtgaatgagatggttcctgctgaagacatttactttcaatgatctacagaatttcccaaatctatgtctccagactggatgtttctcacgtctgtggcccactgggcatcttctgcactttctctgcatttgtaaacactgagcctgtatgcgtgtctatgtggccatggccctggccgtggggatgcacccataattataatgagagcaggtgaatgtcatgtggctatgtatgagacattgttgtgaatgttttacatgcatcagctctttcaacatttacagcatctgtgtgtggtaggtaatgttgtttccttcattttgcagagcagaatatagataggctcaggttaagaatttgcccaaggttacacagttatgaagtttggatttaggaatgggaggccacgtagactggcttcagaattcatgtctttaaccactttattgcttctcatgttggggggtttgttttctggtcactatttttactaaagttgattcaacaatgctataatctgttactctcattcgacaatacatcttgactgtttcttcaacttgaggaaggtaaaccaaagccactctttaatgggtgcaaatatctgttgtaactatgtagaagatacagtgtctgggtttgaggacaggggagtgggaaaactgagtagggaagcggtaagacatgcatctggctttaggagtgtttgaagtgcctaaagatcagggtgaatttcccaaatttgaatcttgttgcccaagccacattgcaaccacctctttttctcttacctcgtccccacatccaggcactgccccattctgttcattccacctttttttttagtagaccctccatatatgtgtgtgttttggtgaatggccacacacagcaaagttatttttattgcaattttgttgttgttgtttgagacacagagtctcatactctgccacccagactgaagtgcagtggtgcgatctcagttcactgcaacctccatccccccatgttcaagcaattctcctgcctcagcctcccaagtagctgggattacaggcatgggccaccatgcccggctaatttttgtattttttgtagacacggggtttcaccatgttggccaggctggtctcacactcctgacctcaggtgatccacccgcctcggcctcccgaagtgctggcattacaggcatgagccaccacacccagcctttattgcaatttttggttccctcacagaatgtttaccatgaagctgtgcgtataggtggtaccatgtatgacataccttgacctcaaagataatctacctgggctttttttgtttgtttgttttgagatggagtctcactctgtcacccatgctggtgtgcagtggcgtgatcttggctcacagcagcctctgcctcccgggttcaagcgattctcctgcctcagcctcctgagtagctgggactacaggtgcctgcgaccacacccagctaatttttgtatttttagtagtagtgggatttcaccatgttggccaggatggcctccacctcctgacttcatgatccacccgcctcggcctcccaaagtgctgggattacaggcgtgagccaccgcacctggcctaatggcagtgtttttaaaatttggattgtcagcagttggcctttgttgagaaaatgtgtgactttgcccaagcccagtaacttggagccttgaatttgagatgctggaaagggagtccttcctcctttctgcagtgtttgtctgggttgtcccctagtttaccaaagtccattttgaatgtaccatccccagcccaactccagcctacagatagtgccagaccgcagtaggtggagtagca

SEQ ID NO: 425675 - DNA, 2264 bp, Homo sapiens
gaagaagcgggaattctaacggctgagctcttggaagacttgggtccttgggtcgcacgggccgacgggtgggtagaccgtgggggatatctcagtggcggacgaggacggcggggacaaggggcggctggtcggagtggcggagcgtcaagtcccctgtcggttcctccgtccctgagtgtccttggcgctgccttgtgcccgcccagcgcctttgcatccgctcctgggcaccgaggcgccctgtaggatactgcttgttacttattacagctagaggcatcatggaccgatctaaagaaaactgcatttcaggacctgttaaggctacagctccagttggaggtccaaaacgtgttctcgtgactcagcaatttccttgtcagaatccattacctgtaaatagtggccaggctcagcgggtcttgtgtccttcaaattcttcccagcgcgttcctttgcaagcacaaaagcttgtctccagtcacaagccggttcagaatcagaagcagaagcaattgcaggcaaccagtgtacctcatcctgtctccaggccactgaataacacccaaaagagcaagcagcccctgccatcggcacctgaaaataatcctgaggaggaactggcatcaaaacagaaaaatgaagaatcaaaaaagaggcagtgggctttggaagactttgaaattggtcgccctctgggtaaaggaaagtttggtaatgtttatttggcaagagaaaagcaaagcaagtttattctggctcttaaagtgttatttaaagctcagctggagaaagccggagtggagcatcagctcagaagagaagtagaaatacagtcccaccttcggcatcctaatattcttagactgtatggttatttccatgatgctaccagagtctacctaattctggaatatgcaccacttggaacagtttatagagaacttcagaaactttcaaagtttgatgagcagagaactgctacttatataacagaattggcaaatgccctgtcttactgtcattcgaagagagttattcatagagacattaagccagagaacttacttcttggatcagctggagagcttaaaattgcagattttgggtggtcagtacatgctccatcttccaggaggaccactctctgtggcaccctggactacctgccccctgaaatgattgaaggtcggatgcatgatgagaaggtggatctctggagccttggagttctttgctatgaatttttagttgggaagcctccttttgaggcaaacacataccaagagacctacaaaagaatatcacgggttgaattcacattccctgactttgtaacagagggagccagggacctcatttcaagactgttgaagcataatcccagccagaggccaatgctcagagaagtacttgaacacccctggatcacagcaaattcatcaaaaccatcaaattgccaaaacaaagaatcagctagcaaacagtcttaggaatcgtgcagggggagaaatccttgagccagggctgccatataacctgacaggaacatgctactgaagtttattttaccattgactgctgccctcaatctagaacgctacacaagaaatatttgttttactcagcaggtgtgccttaacctccctattcagaaagctccacatcaataaacatgacactctgaagtgaaagtagccacgagaattgtgctacttatactggttcataatctggaggcaaggttcgactgcagccgccccgtcagcctgtgctaggcatggtgtcttcacaggaggcaaatccagagcctggctgtggggaaagtgaccactctgccctgaccccgatcagttaaggagctgtgcaataaccttcctagtacctgagtgagtgtgtaacttattgggttggcgaagcctggtaaagctgttggaatgagtatgtgattctttttaagtatgaaaataaagatatatgtacagacttgtattttttctctggtggcattcctttaggaatgctgtgtgtctgtccggcaccccggtaggcctgattgggtttctagtcctccttaaccacttatctcccatatgagagtgtgaaaaataggaacacgtgctctacctccatttagggatttgcttgggatacagaagaggccatgtgtctcagagctgttaagggcttatttttttaaaacattggagtcatagcatgtgtgtaaactttaaatatgcaaataaataagtatctatgtc

SEQ ID NO: 425676 - DNA, 2143 bp, Homo sapiens
gaagaagcgggaattctaacggctgagctcttggaagacttgggtccttgggtcgcacgggctggagtgcaatggtgtgatctcagctcactgcaacctctgcttcctgggtttaagtgattctcctgcctcagcctcccgagtagctgggattacaggcatcatggaccgatctaaagaaaactgcatttcaggacctgttaaggctacagctccagttggaggtccaaaacgtgttctcgtgactcagcaatttccttgtcagaatccattacctgtaaatagtggccaggctcagcgggtcttgtgtccttcaaattcttcccagcgcgttcctttgcaagcacaaaagcttgtctccagtcacaagccggttcagaatcagaagcagaagcaattgcaggcaaccagtgtacctcatcctgtctccaggccactgaataacacccaaaagagcaagcagcccctgccatcggcacctgaaaataatcctgaggaggaactggcatcaaaacagaaaaatgaagaatcaaaaaagaggcagtgggctttggaagactttgaaattggtcgccctctgggtaaaggaaagtttggtaatgtttatttggcaagagaaaagcaaagcaagtttattctggctcttaaagtgttatttaaagctcagctggagaaagccggagtggagcatcagctcagaagagaagtagaaatacagtcccaccttcggcatcctaatattcttagactgtatggttatttccatgatgctaccagagtctacctaattctggaatatgcaccacttggaacagtttatagagaacttcagaaactttcaaagtttgatgagcagagaactgctacttatataacagaattggcaaatgccctgtcttactgtcattcgaagagagttattcatagagacattaagccagagaacttacttcttggatcagctggagagcttaaaattgcagattttgggtggtcagtacatgctccatcttccaggaggaccactctctgtggcaccctggactacctgccccctgaaatgattgaaggtcggatgcatgatgagaaggtggatctctggagccttggagttctttgctatgaatttttagttgggaagcctccttttgaggcaaacacataccaagagacctacaaaagaatatcacgggttgaattcacattccctgactttgtaacagagggagccagggacctcatttcaagactgttgaagcataatcccagccagaggccaatgctcagagaagtacttgaacacccctggatcacagcaaattcatcaaaaccatcaaattgccaaaacaaagaatcagctagcaaacagtcttaggaatcgtgcagggggagaaatccttgagccagggctgccatataacctgacaggaacatgctactgaagtttattttaccattgactgctgccctcaatctagaacgctacacaagaaatatttgttttactcagcaggtgtgccttaacctccctattcagaaagctccacatcaataaacatgacactctgaagtgaaagtagccacgagaattgtgctacttatactggttcataatctggaggcaaggttcgactgcagccgccccgtcagcctgtgctaggcatggtgtcttcacaggaggcaaatccagagcctggctgtggggaaagtgaccactctgccctgaccccgatcagttaaggagctgtgcaataaccttcctagtacctgagtgagtgtgtaacttattgggttggcgaagcctggtaaagctgttggaatgagtatgtgattctttttaagtatgaaaataaagatatatgtacagacttgtattttttctctggtggcattcctttaggaatgctgtgtgtctgtccggcaccccggtaggcctgattgggtttctagtcctccttaaccacttatctcccatatgagagtgtgaaaaataggaacacgtgctctacctccatttagggatttgcttgggatacagaagaggccatgtgtctcagagctgttaagggcttatttttttaaaacattggagtcatagcatgtgtgtaaactttaaatatgcaaataaataagtatctatgtc

SEQ ID NO: 425677 - DNA, 2066 bp, Homo sapiens
gaagaagcgggaattctaacggctgagctcttggaagacttgggtccttgggtcgcacggggtctcactccattgcccaggccagagtgcggggatatttgataagaaacttcagtgaaggccgggcgcggtggctcatgcccgtaatcccagcattttcggaggccgaggcatcatggaccgatctaaagaaaactgcatttcaggacctgttaaggctacagctccagttggaggtccaaaacgtgttctcgtgactcagcaatttccttgtcagaatccattacctgtaaatagtggccaggctcagcgggtcttgtgtccttcaaattcttcccagcgcgttcctttgcaagcacaaaagcttgtctccagtcacaagccggttcagaatcagaagcagaagcaattgcaggcaaccagtgtacctcatcctgtctccaggccactgaataacacccaaaagagcaagcagcccctgccatcggcacctgaaaataatcctgaggaggaactggcatcaaaacagaaaaatgaagaatcaaaaaagaggcagtgggctttggaagactttgaaattggtcgccctctgggtaaaggaaagtttggtaatgtttatttggcaagagaaaagcaaagcaagtttattctggctcttaaagtgttatttaaagctcagctggagaaagccggagtggagcatcagctcagaagagaagtagaaatacagtcccaccttcggcatcctaatattcttagactgtatggttatttccatgatgctaccagagtctacctaattctggaatatgcaccacttggaacagtttatagagaacttcagaaactttcaaagtttgatgagcagagaactgctacttatataacagaattggcaaatgccctgtcttactgtcattcgaagagagttattcatagagacattaagccagagaacttacttcttggatcagctggagagcttaaaattgcagattttgggtggtcagtacatgctccatcttccaggaggaccactctctgtggcaccctggactacctgccccctgaaatgattgaaggtcggatgcatgatgagaaggtggatctctggagccttggagttctttgctatgaatttttagttgggaagcctccttttgaggcaaacacataccaagagacctacaaaagaatatcacgggttgaattcacattccctgactttgtaacagagggagccagggacctcatttcaagactgttgaagcataatcccagccagaggccaatgctcagagaagtacttgaacacccctggatcacagcaaattcatcaaaaccatcaaattgccaaaacaaagaatcagctagcaaacagtcttaggaatcgtgcagggggagaaatccttgagccagggctgccatataacctgacaggaacatgctactgaagtttattttaccattgactgctgccctcaatctagaacgctacacaagaaatatttgttttactcagcaggtgtgccttaacctccctattcagaaagctccacatcaataaacatgacactctgaagtgaaagtagccacgagaattgtgctacttatactggttcataatctggaggcaaggttcgactgcagccgccccgtcagcctcgaaccttgcctccagattatgaaccagtataagtagcacaattctcgtggctactttcacttcagagtgtcatgtttattgatgtggagctttctgaatagggaggttaaggcacacctgctgagtaaaacaaatatttcttgtgtagcgttcttaggaatgctgtgtgtctgtccggcaccccggtaggcctgattgggtttctagtcctccttaaccacttatctcccatatgagagtgtgaaaaataggaacacgtgctctacctccatttagggatttgcttgggatacagaagaggccatgtgtctcagagctgttaagggcttatttttttaaaacattggagtcatagcatgtgtgtaaactttaaatatgcaaataaataagtatctatgtc

SEQ ID NO: 425678 - DNA, 2121 bp, Homo sapiens
gaagaagcgggaattctaacggctgagctcttggaagacttgggtccttgggtcgcacggggtctcactccattgcccaggccagagtgcggggatatttgataagaaacttcagtgaaggccgggcgcggtggctcatgcccgtaatcccagcattttcggaggccgaggcatcatggaccgatctaaagaaaactgcatttcaggacctgttaaggctacagctccagttggaggtccaaaacgtgttctcgtgactcagcaatttccttgtcagaatccattacctgtaaatagtggccaggctcagcgggtcttgtgtccttcaaattcttcccagcgcgttcctttgcaagcacaaaagcttgtctccagtcacaagccggttcagaatcagaagcagaagcaattgcaggcaaccagtgtacctcatcctgtctccaggccactgaataacacccaaaagagcaagcagcccctgccatcggcacctgaaaataatcctgaggaggaactggcatcaaaacagaaaaatgaagaatcaaaaaagaggcagtgggctttggaagactttgaaattggtcgccctctgggtaaaggaaagtttggtaatgtttatttggcaagagaaaagcaaagcaagtttattctggctcttaaagtgttatttaaagctcagctggagaaagccggagtggagcatcagctcagaagagaagtagaaatacagtcccaccttcggcatcctaatattcttagactgtatggttatttccatgatgctaccagagtctacctaattctggaatatgcaccacttggaacagtttatagagaacttcagaaactttcaaagtttgatgagcagagaactgctacttatataacagaattggcaaatgccctgtcttactgtcattcgaagagagttattcatagagacattaagccagagaacttacttcttggatcagctggagagcttaaaattgcagattttgggtggtcagtacatgctccatcttccaggaggaccactctctgtggcaccctggactacctgccccctgaaatgattgaaggtcggatgcatgatgagaaggtggatctctggagccttggagttctttgctatgaatttttagttgggaagcctccttttgaggcaaacacataccaagagacctacaaaagaatatcacgggttgaattcacattccctgactttgtaacagagggagccagggacctcatttcaagactgttgaagcataatcccagccagaggccaatgctcagagaagtacttgaacacccctggatcacagcaaattcatcaaaaccatcaaattgccaaaacaaagaatcagctagcaaacagtcttaggaatcgtgcagggggagaaatccttgagccagggctgccatataacctgacaggaacatgctactgaagtttattttaccattgactgctgccctcaatctagaacgctacacaagaaatatttgttttactcagcaggtgtgccttaacctccctattcagaaagctccacatcaataaacatgacactctgaagtgaaagtagccacgagaattgtgctacttatactggttcataatctggaggcaaggttcgactgcagccgccccgtcagccccagagcctggctgtggggaaagtgaccactctgccctgaccccgatcagttaaggagctgtgcaataaccttcctagtacctgagtgagtgtgtaacttattgggttggcgaagcctggtaaagctgttggaatgagtatgtgattctttttaagtatgaaaataaagatatatgtacagacttgtattttttctctggtggcattcctttaggaatgctgtgtgtctgtccggcaccccggtaggcctgattgggtttctagtcctccttaaccacttatctcccatatgagagtgtgaaaaataggaacacgtgctctacctccatttagggatttgcttgggatacagaagaggccatgtgtctcagagctgttaagggcttatttttttaaaacattggagtcatagcatgtgtgtaaactttaaatatgcaaataaataagtatctatgtc

SEQ ID NO: 425679 - DNA, 987 bp, Homo sapiens
ctctacctccatttagggatttgcttgggatacagaagaggccatgtgttcctatttttcacactctcatatgggagataagtggttaaggagctgtgcaataaccttcctagtacctgagtgagtgtgtaacttattgggttggcgaagcctggtaaagctgttggaatgagtatgtgattctttttaagtatgaaaataaagatatatgtacagacttgtattttttctctggtggcattcctttaggaatgctgtgtgtctgtccggcaccccggtaggcctgattgggtttctagtcctccttaaccacttatctcccatatgagagtgtgaaaaataggaacacgtgctctacctccatttagggatttgcttgggatacagaagaggccatgtgtctcagagctgttaagggcttatttttttaaaacattggagtcatagcatgtgtgtaaactttaaatatgcaaataaataagtatctatgtcagaaaaaacacacagaccccacaaaccacacacaacccacccaaccaccacaacacacaaaccaaagcacaccacacccacaccccacacacgcaccacctcccacccaccagacacaccactcccccacacccacacacaccacacaacaccgcccacccccacacaccccaccaccccccgcgagacagtcacaacgccacacactcgaagagcagtcggacagacctagcccgagaagacaacaaacaataagaagactacgatcaagcaaaaaacagcaacccggcgactaacaggcactctggcatcaaccaccctacaacgaggacacaacagccaacacacccacatgcgagaccacgagaaaaagcgaaggaagcaaaagactacccagatagagcaataccacatctacaaaaagccgagcacagacagacgcgcgcaaaagcgagcgcagaaagacagacgaatcgcggcacatgacacacgtgc

SEQ ID NO: 425680 - DNA, 2045 bp, Homo sapiens
gaagaagcgggaattctaacggctgagctcttggaagacttgggtccttgggtcgcacgggcatcatggaccgatctaaagaaaactgcatttcaggacctgttaaggctacagctccagttggaggtccaaaacgtgttctcgtgactcagcaatttccttgtcagaatccattacctgtaaatagtggccaggctcagcgggtcttgtgtccttcaaattcttcccagcgcgttcctttgcaagcacaaaagcttgtctccagtcacaagccggttcagaatcagaagcagaagcaattgcaggcaaccagtgtacctcatcctgtctccaggccactgaataacacccaaaagagcaagcagcccctgccatcggcacctgaaaataatcctgaggaggaactggcatcaaaacagaaaaatgaagaatcaaaaaagaggcagtgggctttggaagactttgaaattggtcgccctctgggtaaaggaaagtttggtaatgtttatttggcaagagaaaagcaaagcaagtttattctggctcttaaagtgttatttaaagctcagctggagaaagccggagtggagcatcagctcagaagagaagtagaaatacagtcccaccttcggcatcctaatattcttagactgtatggttatttccatgatgctaccagagtctacctaattctggaatatgcaccacttggaacagtttatagagaacttcagaaactttcaaagtttgatgagcagagaactgctacttatataacagaattggcaaatgccctgtcttactgtcattcgaagagagttattcatagagacattaagccagagaacttacttcttggatcagctggagagcttaaaattgcagattttgggtggtcagtacatgctccatcttccaggaggaccactctctgtggcaccctggactacctgccccctgaaatgattgaaggtcggatgcatgatgagaaggtggatctctggagccttggagttctttgctatgaatttttagttgggaagcctccttttgaggcaaacacataccaagagacctacaaaagaatatcacgggttgaattcacattccctgactttgtaacagagggagccagggacctcatttcaagactgttgaagcataatcccagccagaggccaatgctcagagaagtacttgaacacccctggatcacagcaaattcatcaaaaccatcaaattgccaaaacaaagaatcagctagcaaacagtcttaggaatcgtgcagggggagaaatccttgagccagggctgccatataacctgacaggaacatgctactgaagtttattttaccattgactgctgccctcaatctagaacgctacacaagaaatatttgttttactcagcaggtgtgccttaacctccctattcagaaagctccacatcaataaacatgacactctgaagtgaaagtagccacgagaattgtgctacttatactggttcataatctggaggcaaggttcgactgcagccgccccgtcagcctgtgctaggcatggtgtcttcacaggaggcaaatccagagcctggctgtggggaaagtgaccactctgccctgaccccgatcagttaaggagctgtgcaataaccttcctagtacctgagtgagtgtgtaacttattgggttggcgaagcctggtaaagctgttggaatgagtatgtgattctttttaagtatgaaaataaagatatatgtacagacttgtattttttctctggtggcattcctttaggaatgctgtgtgtctgtccggcaccccggtaggcctgattgggtttctagtcctccttaaccacttatctcccatatgagagtgtgaaaaataggaacacgtgctctacctccatttagggatttgcttgggatacagaagaggccatgtgtctcagagctgttaagggcttatttttttaaaacattggagtcatagcatgtgtgtaaactttaaatatgcaaataaataagtatctatgtc

SEQ ID NO: 425681 - DNA, 2253 bp, Homo sapiens
gaagaagcgggaattctaacggctgagctcttggaagacttgggtccttgggtcgcacggggtctcactccattgcccaggccagagtgcggggatatttgataagaaacttcagtgaaggccgggcgcggtggctcatgcccgtaatcccagcattttcggaggccgaggctggagtgcaatggtgtgatctcagctcactgcaacctctgcttcctgggtttaagtgattctcctgcctcagcctcccgagtagctgggattacaggcatcatggaccgatctaaagaaaactgcatttcaggacctgttaaggctacagctccagttggaggtccaaaacgtgttctcgtgactcagcaatttccttgtcagaatccattacctgtaaatagtggccaggctcagcgggtcttgtgtccttcaaattcttcccagcgcgttcctttgcaagcacaaaagcttgtctccagtcacaagccggttcagaatcagaagcagaagcaattgcaggcaaccagtgtacctcatcctgtctccaggccactgaataacacccaaaagagcaagcagcccctgccatcggcacctgaaaataatcctgaggaggaactggcatcaaaacagaaaaatgaagaatcaaaaaagaggcagtgggctttggaagactttgaaattggtcgccctctgggtaaaggaaagtttggtaatgtttatttggcaagagaaaagcaaagcaagtttattctggctcttaaagtgttatttaaagctcagctggagaaagccggagtggagcatcagctcagaagagaagtagaaatacagtcccaccttcggcatcctaatattcttagactgtatggttatttccatgatgctaccagagtctacctaattctggaatatgcaccacttggaacagtttatagagaacttcagaaactttcaaagtttgatgagcagagaactgctacttatataacagaattggcaaatgccctgtcttactgtcattcgaagagagttattcatagagacattaagccagagaacttacttcttggatcagctggagagcttaaaattgcagattttgggtggtcagtacatgctccatcttccaggaggaccactctctgtggcaccctggactacctgccccctgaaatgattgaaggtcggatgcatgatgagaaggtggatctctggagccttggagttctttgctatgaatttttagttgggaagcctccttttgaggcaaacacataccaagagacctacaaaagaatatcacgggttgaattcacattccctgactttgtaacagagggagccagggacctcatttcaagactgttgaagcataatcccagccagaggccaatgctcagagaagtacttgaacacccctggatcacagcaaattcatcaaaaccatcaaattgccaaaacaaagaatcagctagcaaacagtcttaggaatcgtgcagggggagaaatccttgagccagggctgccatataacctgacaggaacatgctactgaagtttattttaccattgactgctgccctcaatctagaacgctacacaagaaatatttgttttactcagcaggtgtgccttaacctccctattcagaaagctccacatcaataaacatgacactctgaagtgaaagtagccacgagaattgtgctacttatactggttcataatctggaggcaaggttcgactgcagccgccccgtcagcctgtgctaggcatggtgtcttcacaggaggcaaatccagagcctggctgtggggaaagtgaccactctgccctgaccccgatcagttaaggagctgtgcaataaccttcctagtacctgagtgagtgtgtaacttattgggttggcgaagcctggtaaagctgttggaatgagtatgtgattctttttaagtatgaaaataaagatatatgtacagacttgtattttttctctggtggcattcctttaggaatgctgtgtgtctgtccggcaccccggtaggcctgattgggtttctagtcctccttaaccacttatctcccatatgagagtgtgaaaaataggaacacgtgctctacctccatttagggatttgcttgggatacagaagaggccatgtgtctcagagctgttaagggcttatttttttaaaacattggagtcatagcatgtgtgtaaactttaaatatgcaaataaataagtatctatgtc

SEQ ID NO: 425682 - DNA, 2472 bp, Homo sapiens
gaagaagcgggaattctaacggctgagctcttggaagacttgggtccttgggtcgcacgggccgacgggtgggtagaccgtgggggatatctcagtggcggacgaggacggcggggacaaggggcggctggtcggagtggcggagcgtcaagtcccctgtcggttcctccgtccctgagtgtccttggcgctgccttgtgcccgcccagcgcctttgcatccgctcctgggcaccgaggcgccctgtaggatactgcttgttacttattacagctagagggtctcactccattgcccaggccagagtgcggggatatttgataagaaacttcagtgaaggccgggcgcggtggctcatgcccgtaatcccagcattttcggaggccgaggctggagtgcaatggtgtgatctcagctcactgcaacctctgcttcctgggtttaagtgattctcctgcctcagcctcccgagtagctgggattacaggcatcatggaccgatctaaagaaaactgcatttcaggacctgttaaggctacagctccagttggaggtccaaaacgtgttctcgtgactcagcaatttccttgtcagaatccattacctgtaaatagtggccaggctcagcgggtcttgtgtccttcaaattcttcccagcgcgttcctttgcaagcacaaaagcttgtctccagtcacaagccggttcagaatcagaagcagaagcaattgcaggcaaccagtgtacctcatcctgtctccaggccactgaataacacccaaaagagcaagcagcccctgccatcggcacctgaaaataatcctgaggaggaactggcatcaaaacagaaaaatgaagaatcaaaaaagaggcagtgggctttggaagactttgaaattggtcgccctctgggtaaaggaaagtttggtaatgtttatttggcaagagaaaagcaaagcaagtttattctggctcttaaagtgttatttaaagctcagctggagaaagccggagtggagcatcagctcagaagagaagtagaaatacagtcccaccttcggcatcctaatattcttagactgtatggttatttccatgatgctaccagagtctacctaattctggaatatgcaccacttggaacagtttatagagaacttcagaaactttcaaagtttgatgagcagagaactgctacttatataacagaattggcaaatgccctgtcttactgtcattcgaagagagttattcatagagacattaagccagagaacttacttcttggatcagctggagagcttaaaattgcagattttgggtggtcagtacatgctccatcttccaggaggaccactctctgtggcaccctggactacctgccccctgaaatgattgaaggtcggatgcatgatgagaaggtggatctctggagccttggagttctttgctatgaatttttagttgggaagcctccttttgaggcaaacacataccaagagacctacaaaagaatatcacgggttgaattcacattccctgactttgtaacagagggagccagggacctcatttcaagactgttgaagcataatcccagccagaggccaatgctcagagaagtacttgaacacccctggatcacagcaaattcatcaaaaccatcaaattgccaaaacaaagaatcagctagcaaacagtcttaggaatcgtgcagggggagaaatccttgagccagggctgccatataacctgacaggaacatgctactgaagtttattttaccattgactgctgccctcaatctagaacgctacacaagaaatatttgttttactcagcaggtgtgccttaacctccctattcagaaagctccacatcaataaacatgacactctgaagtgaaagtagccacgagaattgtgctacttatactggttcataatctggaggcaaggttcgactgcagccgccccgtcagcctgtgctaggcatggtgtcttcacaggaggcaaatccagagcctggctgtggggaaagtgaccactctgccctgaccccgatcagttaaggagctgtgcaataaccttcctagtacctgagtgagtgtgtaacttattgggttggcgaagcctggtaaagctgttggaatgagtatgtgattctttttaagtatgaaaataaagatatatgtacagacttgtattttttctctggtggcattcctttaggaatgctgtgtgtctgtccggcaccccggtaggcctgattgggtttctagtcctccttaaccacttatctcccatatgagagtgtgaaaaataggaacacgtgctctacctccatttagggatttgcttgggatacagaagaggccatgtgtctcagagctgttaagggcttatttttttaaaacattggagtcatagcatgtgtgtaaactttaaatatgcaaataaataagtatctatgtc

SEQ ID NO: 425683 - DNA, 2096 bp, Homo sapiens
gaagaagcgggaattctaacggctgagctcttggaagacttgggtccttgggtcgcacgggcatcatggaccgatctaaagaaaactgcatttcaggacctgttaaggctacagctccagttggaggtccaaaacgtgttctcgtgactcagcaatttccttgtcagaatccattacctgtaaatagtggccaggctcagcgggtcttgtgtccttcaaattcttcccagcgcgttcctttgcaagcacaaaagcttgtctccagtcacaagccggttcagaatcagaagcagaagcaattgcaggcaaccagtgtacctcatcctgtctccaggccactgaataacacccaaaagagcaagcagcccctgccatcggcacctgaaaataatcctgaggaggaactggcatcaaaacagaaaaatgaagaatcaaaaaagaggcagtgggctttggaagactttgaaattggtcgccctctgggtaaaggaaagtttggtaatgtttatttggcaagagaaaagcaaagcaagtttattctggctcttaaagtgttatttaaagctcagctggagaaagccggagtggagcatcagctcagaagagaagtagaaatacagtcccaccttcggcatcctaatattcttagactgtatggttatttccatgatgctaccagagtctacctaattctggaatatgcaccacttggaacagtttatagagaacttcagaaactttcaaagtttgatgagcagagaactgctacttatataacagaattggcaaatgccctgtcttactgtcattcgaagagagttattcatagagacattaagccagagaacttacttcttggatcagctggagagcttaaaattgcagattttgggtggtcagtacatgctccatcttccaggaggaccactctctgtggcaccctggactacctgccccctgaaatgattgaaggtcggatgcatgatgagaaggtggatctctggagccttggagttctttgctatgaatttttagttgggaagcctccttttgaggcaaacacataccaagagacctacaaaagaatatcacgggttgaattcacattccctgactttgtaacagagggagccagggacctcatttcaagactgttgaagcataatcccagccagaggccaatgctcagagaagtacttgaacacccctggatcacagcaaattcatcaaaaccatcaaattgccaaaacaaagaatcagctagcaaacagtcttaggaatcgtgcagggggagaaatccttgagccagggctgccatataacctgacaggaacatgctactgaagtttattttaccattgactgctgccctcaatctagaacgctacacaagaaatatttgttttactcagcaggtgtgccttaacctccctattcagaaagctccacatcaataaacatgacactctgaagtgaaagtagccacgagaattgtgctacttatactggttcataatctggaggcaaggttcgactgcagccgccccgtcagcctgtgctaggcatggtgtcttcacaggaggcaaatccagagcctggctgtggggaaagtgaccactctgccctgaccccgatcagttaaggagctgtgcaataaccttcctagtacctgagtgagtgtgtaacttattgggttggcgaagcctggtaaagctgttggaatgagtatgtgattctttttaagtatgaaaataaagatatatgtacagacttgtattttttctctggtggcattcctttaggaatgctgtgtgtctgtccggcaccccggtaggcctgattgggtttctagtcctccttaaccacttatctcccatatgagagtgtgaaaaataggaacacgtgctctacctccatttagggatttgcttgggatacagaagaggccatgtgtctcagagctgttaagggcttatttttttaaaacattggagtcatagcatgtgtgtaaactttaaatatgcaaataaataagtatctatgtcaaaaaaaaaaaacccaccacacacaccgcaacaacaggggggggccccaaa

SEQ ID NO: 425684 - DNA, 2155 bp, Homo sapiens
gaagaagcgggaattctaacggctgagctcttggaagacttgggtccttgggtcgcacggggtctcactccattgcccaggccagagtgcggggatatttgataagaaacttcagtgaaggccgggcgcggtggctcatgcccgtaatcccagcattttcggaggccgaggcatcatggaccgatctaaagaaaactgcatttcaggacctgttaaggctacagctccagttggaggtccaaaacgtgttctcgtgactcagcaatttccttgtcagaatccattacctgtaaatagtggccaggctcagcgggtcttgtgtccttcaaattcttcccagcgcgttcctttgcaagcacaaaagcttgtctccagtcacaagccggttcagaatcagaagcagaagcaattgcaggcaaccagtgtacctcatcctgtctccaggccactgaataacacccaaaagagcaagcagcccctgccatcggcacctgaaaataatcctgaggaggaactggcatcaaaacagaaaaatgaagaatcaaaaaagaggcagtgggctttggaagactttgaaattggtcgccctctgggtaaaggaaagtttggtaatgtttatttggcaagagaaaagcaaagcaagtttattctggctcttaaagtgttatttaaagctcagctggagaaagccggagtggagcatcagctcagaagagaagtagaaatacagtcccaccttcggcatcctaatattcttagactgtatggttatttccatgatgctaccagagtctacctaattctggaatatgcaccacttggaacagtttatagagaacttcagaaactttcaaagtttgatgagcagagaactgctacttatataacagaattggcaaatgccctgtcttactgtcattcgaagagagttattcatagagacattaagccagagaacttacttcttggatcagctggagagcttaaaattgcagattttgggtggtcagtacatgctccatcttccaggaggaccactctctgtggcaccctggactacctgccccctgaaatgattgaaggtcggatgcatgatgagaaggtggatctctggagccttggagttctttgctatgaatttttagttgggaagcctccttttgaggcaaacacataccaagagacctacaaaagaatatcacgggttgaattcacattccctgactttgtaacagagggagccagggacctcatttcaagactgttgaagcataatcccagccagaggccaatgctcagagaagtacttgaacacccctggatcacagcaaattcatcaaaaccatcaaattgccaaaacaaagaatcagctagcaaacagtcttaggaatcgtgcagggggagaaatccttgagccagggctgccatataacctgacaggaacatgctactgaagtttattttaccattgactgctgccctcaatctagaacgctacacaagaaatatttgttttactcagcaggtgtgccttaacctccctattcagaaagctccacatcaataaacatgacactctgaagtgaaagtagccacgagaattgtgctacttatactggttcataatctggaggcaaggttcgactgcagccgccccgtcagcctgtgctaggcatggtgtcttcacaggaggcaaatccagagcctggctgtggggaaagtgaccactctgccctgaccccgatcagttaaggagctgtgcaataaccttcctagtacctgagtgagtgtgtaacttattgggttggcgaagcctggtaaagctgttggaatgagtatgtgattctttttaagtatgaaaataaagatatatgtacagacttgtattttttctctggtggcattcctttaggaatgctgtgtgtctgtccggcaccccggtaggcctgattgggtttctagtcctccttaaccacttatctcccatatgagagtgtgaaaaataggaacacgtgctctacctccatttagggatttgcttgggatacagaagaggccatgtgtctcagagctgttaagggcttatttttttaaaacattggagtcatagcatgtgtgtaaactttaaatatgcaaataaataagtatctatgtc

SEQ ID NO: 425685 - DNA, 2272 bp, Homo sapiens
gaagaagcgggaattctaacggctgagctcttggaagacttgggtccttgggtcgcacgggcatcatggaccgatctaaagaaaactgcatttcaggacctgttaaggctacagctccagttggaggtccaaaacgtgttctcgtgactcagcaatttccttgtcagaatccattacctgtaaatagtggccaggctcagcgggtcttgtgtccttcaaattcttcccagcgcgttcctttgcaagcacaaaagcttgtctccagtcacaagccggttcagaatcagaagcagaagcaattgcaggcaaccagtgtacctcatcctgtctccaggccactgaataacacccaaaagagcaagcagcccctgccatcggcacctgaaaataatcctgaggaggaactggcatcaaaacagaaaaatgaagaatcaaaaaagaggcagtgggctttggaagactttgaaattggtcgccctctgggtaaaggaaagtttggtaatgtttatttggcaagagaaaagcaaagcaagtttattctggctcttaaagtgttatttaaagctcagctggagaaagccggagtggagcatcagctcagaagagaagtagaaatacagtcccaccttcggcatcctaatattcttagactgtatggttatttccatgatgctaccagagtctacctaattctggaatatgcaccacttggaacagtttatagagaacttcagaaactttcaaagtttgatgagcagagaactgctacttatataacagaattggcaaatgccctgtcttactgtcattcgaagagagttattcatagagacattaagccagagaacttacttcttggatcagctggagagcttaaaattgcagattttgggtggtcagtacatgctccatcttccaggaggaccactctctgtggcaccctggactacctgccccctgaaatgattgaaggtcggatgcatgatgagaaggtggatctctggagccttggagttctttgctatgaatttttagttgggaagcctccttttgaggcaaacacataccaagagacctacaaaagaatatcacgggttgaattcacattccctgactttgtaacagagggagccagggacctcatttcaagactgttgaagcataatcccagccagaggccaatgctcagagaagtacttgaacacccctggatcacagcaaattcatcaaaaccatcaaattgccaaaacaaagaatcagctagcaaacagtcttaggaatcgtgcagggggagaaatccttgagccagggctgccatataacctgacaggaacatgctactgaagtttattttaccattgactgctgccctcaatctagaacgctacacaagaaatatttgttttactcagcaggtgtgccttaacctccctattcagaaagctccacatcaataaacatgacactctgaagtgaaagtagccacgagaattgtgctacttatactggttcataatctggaggcaaggttcgactgcagccgccccgtcagcctgtgctaggcatggtgtcttcacaggaggcaaatccagagcctggctgtggggaaagtgaccactctgccctgaccccgatcagttaaggagctgtgcaataaccttcctagtacctgagtgagtgtgtaacttattgggttggcgaagcctggtaaagctgttggaatgagtatgtgattctttttaagtatgaaaataaagatatatgtacagacttgtattttttctctggtggcattcctttaggaatgctgtgtgtctgtccggcaccccggtaggcctgattgggtttctagtcctccttaaccacttatctcccatatgagagtgtgaaaaataggaacacgtgctctacctccatttagggatttgcttgggatacagaagaggccatgtgtctcagagctgttaagggcttatttttttaaaacattggagtcatagcatgtgtgtaaactttaaatatgcaaataaataagtatctatgtcaaaaaaagaaacagcagcaaaaaaaaccgccaggggaattctagtgcacgggctgcgggaacaaagaggctcacgcaatggcccatggggccaatacacggttacctagacccagtttcgcgtgtcaccaacgtgggtacaactccgcggggacaccccaaaaaaggaacggcgaactaaatttgcaataaacccaggagaacccggcttaatggaacgcggcgaaa

SEQ ID NO: 425686 - DNA, 2540 bp, Homo sapiens
gaagaagcgggaattctaacggctgagctcttggaagacttgggtccttgggtcgcacgggcatcatggaccgatctaaagaaaactgcatttcaggacctgttaaggctacagctccagttggaggtccaaaacgtgttctcgtgactcagcaatttccttgtcagaatccattacctgtaaatagtggccaggctcagcgggtcttgtgtccttcaaattcttcccagcgcgttcctttgcaagcacaaaagcttgtctccagtcacaagccggttcagaatcagaagcagaagcaattgcaggcaaccagtgtacctcatcctgtctccaggccactgaataacacccaaaagagcaagcagcccctgccatcggcacctgaaaataatcctgaggaggaactggcatcaaaacagaaaaatgaagaatcaaaaaagaggcagtgggctttggaagactttgaaattggtcgccctctgggtaaaggaaagtttggtaatgtttatttggcaagagaaaagcaaagcaagtttattctggctcttaaagtgttatttaaagctcagctggagaaagccggagtggagcatcagctcagaagagaagtagaaatacagtcccaccttcggcatcctaatattcttagactgtatggttatttccatgatgctaccagagtctacctaattctggaatatgcaccacttggaacagtttatagagaacttcagaaactttcaaagtttgatgagcagagaactgctacttatataacagaattggcaaatgccctgtcttactgtcattcgaagagagttattcatagagacattaagccagagaacttacttcttggatcagctggagagcttaaaattgcagattttgggtggtcagtacatgctccatcttccaggaggaccactctctgtggcaccctggactacctgccccctgaaatgattgaaggtcggatgcatgatgagaaggtggatctctggagccttggagttctttgctatgaatttttagttgggaagcctccttttgaggcaaacacataccaagagacctacaaaagaatatcacgggttgaattcacattccctgactttgtaacagagggagccagggacctcatttcaagactgttgaagcataatcccagccagaggccaatgctcagagaagtacttgaacacccctggatcacagcaaattcatcaaaaccatcaaattgccaaaacaaagaatcagctagcaaacagtcttaggaatcgtgcagggggagaaatccttgagccagggctgccatataacctgacaggaacatgctactgaagtttattttaccattgactgctgccctcaatctagaacgctacacaagaaatatttgttttactcagcaggtgtgccttaacctccctattcagaaagctccacatcaataaacatgacactctgaagtgaaagtagccacgagaattgtgctacttatactggttcataatctggaggcaaggttcgactgcagccgccccgtcagcctgtgctaggcatggtgtcttcacaggaggcaaatccagagcctggctgtggggaaagtgaccactctgccctgaccccgatcagttaaggagctgtgcaataaccttcctagtacctgagtgagtgtgtaacttattgggttggcgaagcctggtaaagctgttggaatgagtatgtgattctttttaagtatgaaaataaagatatatgtacagacttgtattttttctctggtggcattcctttaggaatgctgtgtgtctgtccggcaccccggtaggcctgattgggtttctagtcctccttaaccacttatctcccatatgagagtgtgaaaaataggaacacgtgctctacctccatttagggatttgcttgggatacagaagaggccatgtgtctcagagctgttaagggcttatttttttaaaacattggagtcatagcatgtgtgtaaactttaaatatgcaaataaataagtatctatgtcagaaaaaacacacagaccccacaaaccacacacaacccacccaaccaccacaacacacaaaccaaagcacaccacacccacaccccacacacgcaccacctcccacccaccagacacaccactcccccacacccacacacaccacacaacaccgcccacccccacacaccccaccaccccccgcgagacagtcacaacgccacacactcgaagagcagtcggacagacctagcccgagaagacaacaaacaataagaagactacgatcaagcaaaaaacagcaacccggcgactaacaggcactctggcatcaaccaccctacaacgaggacacaacagccaacacacccacatgcgagaccacgagaaaaagcgaaggaagcaaaagactacccagatagagcaataccacatctacaaaaagccgagcacagacagacgcgcgcaaaagcgagcgcagaaagacagacgaatcgcggcacatgacacacgtgc

SEQ ID NO: 425687 - DNA, 2374 bp, Homo sapiens
gaagaagcgggaattctaacggctgagctcttggaagacttgggtccttgggtcgcacgggccgacgggtgggtagaccgtgggggatatctcagtggcggacgaggacggcggggacaaggggcggctggtcggagtggcggagcgtcaagtcccctgtcggttcctccgtccctgagtgtccttggcgctgccttgtgcccgcccagcgcctttgcatccgctcctgggcaccgaggcgccctgtaggatactgcttgttacttattacagctagagggtctcactccattgcccaggccagagtgcggggatatttgataagaaacttcagtgaaggccgggcgcggtggctcatgcccgtaatcccagcattttcggaggccgaggcatcatggaccgatctaaagaaaactgcatttcaggacctgttaaggctacagctccagttggaggtccaaaacgtgttctcgtgactcagcaatttccttgtcagaatccattacctgtaaatagtggccaggctcagcgggtcttgtgtccttcaaattcttcccagcgcgttcctttgcaagcacaaaagcttgtctccagtcacaagccggttcagaatcagaagcagaagcaattgcaggcaaccagtgtacctcatcctgtctccaggccactgaataacacccaaaagagcaagcagcccctgccatcggcacctgaaaataatcctgaggaggaactggcatcaaaacagaaaaatgaagaatcaaaaaagaggcagtgggctttggaagactttgaaattggtcgccctctgggtaaaggaaagtttggtaatgtttatttggcaagagaaaagcaaagcaagtttattctggctcttaaagtgttatttaaagctcagctggagaaagccggagtggagcatcagctcagaagagaagtagaaatacagtcccaccttcggcatcctaatattcttagactgtatggttatttccatgatgctaccagagtctacctaattctggaatatgcaccacttggaacagtttatagagaacttcagaaactttcaaagtttgatgagcagagaactgctacttatataacagaattggcaaatgccctgtcttactgtcattcgaagagagttattcatagagacattaagccagagaacttacttcttggatcagctggagagcttaaaattgcagattttgggtggtcagtacatgctccatcttccaggaggaccactctctgtggcaccctggactacctgccccctgaaatgattgaaggtcggatgcatgatgagaaggtggatctctggagccttggagttctttgctatgaatttttagttgggaagcctccttttgaggcaaacacataccaagagacctacaaaagaatatcacgggttgaattcacattccctgactttgtaacagagggagccagggacctcatttcaagactgttgaagcataatcccagccagaggccaatgctcagagaagtacttgaacacccctggatcacagcaaattcatcaaaaccatcaaattgccaaaacaaagaatcagctagcaaacagtcttaggaatcgtgcagggggagaaatccttgagccagggctgccatataacctgacaggaacatgctactgaagtttattttaccattgactgctgccctcaatctagaacgctacacaagaaatatttgttttactcagcaggtgtgccttaacctccctattcagaaagctccacatcaataaacatgacactctgaagtgaaagtagccacgagaattgtgctacttatactggttcataatctggaggcaaggttcgactgcagccgccccgtcagcctgtgctaggcatggtgtcttcacaggaggcaaatccagagcctggctgtggggaaagtgaccactctgccctgaccccgatcagttaaggagctgtgcaataaccttcctagtacctgagtgagtgtgtaacttattgggttggcgaagcctggtaaagctgttggaatgagtatgtgattctttttaagtatgaaaataaagatatatgtacagacttgtattttttctctggtggcattcctttaggaatgctgtgtgtctgtccggcaccccggtaggcctgattgggtttctagtcctccttaaccacttatctcccatatgagagtgtgaaaaataggaacacgtgctctacctccatttagggatttgcttgggatacagaagaggccatgtgtctcagagctgttaagggcttatttttttaaaacattggagtcatagcatgtgtgtaaactttaaatatgcaaataaataagtatctatgtc

SEQ ID NO: 425688 - DNA, 1770 bp, Homo sapiens
gaagaagcgggaattctaacggctgagctcttggaagacttgggtccttgggtcgcacgggcatcatggaccgatctaaagaaaactgcatttcaggacctgttaaggctacagctccagttggaggtccaaaacgtgttctcgtgactcagcaatttccttgtcagaatccattacctgtaaatagtggccaggctcagcgggtcttgtgtccttcaaattcttcccagcgcgttcctttgcaagcacaaaagcttgtctccagtcacaagccggttcagaatcagaagcagaagcaattgcaggcaaccagtgtacctcatcctgtctccaggccactgaataacacccaaaagagcaagcagcccctgccatcggcacctgaaaataatcctgaggaggaactggcatcaaaacagaaaaatgaagaatcaaaaaagaggcagtgggctttggaagactttgaaattggtcgccctctgggtaaaggaaagtttggtaatgtttatttggcaagagaaaagcaaagcaagtttattctggctcttaaagtgttatttaaagctcagctggagaaagccggagtggagcatcagctcagaagagaagtagaaatacagtcccaccttcggcatcctaatattcttagactgtatggttatttccatgatgctaccagagtctacctaattctggaatatgcaccacttggaacagtttatagagaacttcagaaactttcaaagtttgatgagcagagaactgctacttatataacagaattggcaaatgccctgtcttactgtcattcgaagagagttattcatagagacattaagccagagaacttacttcttggatcagctggagagcttaaaattgcagattttgggtggtcagtacatgctccatcttccaggaggaccactctctgtggcaccctggactacctgccccctgaaatgattgaaggtcggatgcatgatgagaaggtggatctctggagccttggagttctttgctatgaatttttagttgggaagcctccttttgaggcaaacacataccaagagacctacaaaagaatatcacgggttgaattcacattccctgactttgtaacagagggagccagggacctcatttcaagactgttgaagcataatcccagccagaggccaatgctcagagaagtacttgaacacccctggatcacagcaaattcatcaaaaccatcaaattgccaaaacaaagaatcagctagcaaacagtcttaggaatcgtgcagggggagaaatccttgagccagggctgccatataacctgacaggaacatgctactgaagtttattttaccattgactgctgccctcaatctagaacgctacacaagaaatatttgttttactcagcaggtgtgccttaacctccctattcagaaagctccacatcaataaacatgacactctgaagtgaaagtagccacgagaattgtgctacttatactggttcataatctggaggcaaggttcgactgcagccgccccgtcagcctgtgctaggcatggtgtcttcacaggaggcaaatccagagcctggctgtggggaaagtgaccactctgccctgaccccgatcagttaaggagctgtgcaataaccttcctagtacctgagtgagtgtgtaacttattgggttggcgaagcctggtaaagctgttggaatgagtatgtgattctttttaagtatgaaaataaagatatatgtacaga

SEQ ID NO: 425689 - DNA, 1145 bp, Homo sapiens
agcctccctccgttttcaggaggaccactctctgtggcaccctggactacctgccccctgaaatgattgaaggtcggatgcatgatgagaaggtggatctctggagccttggagttctttgctatgaatttttagttgggaagcctccttttgaggcaaacacataccaagagacctacaaaagaatatcacgggttgaattcacattccctgactttgtaacagagggagccagggacctcatttcaagactgttgaagcataatcccagccagaggccaatgctcagagaagtacttgaacacccctggatcacagcaaattcatcaaaaccatcaaattgccaaaacaaagaatcagctagcaaacagtcttaggaatcgtgcagggggagaaatccttgagccagggctgccatataacctgacaggaacatgctactgaagtttattttaccattgactgctgccctcaatctagaacgctacacaagaaatatttgttttactcagcaggtgtgccttaacctccctattcagaaagctccacatcaataaacatgacactctgaagtgaaagtagccacgagaattgtgctacttatactggttcataatctggaggcaaggttcgactgcagccgccccgtcagcctgtgctaggcatggtgtcttcacaggaggcaaatccagagcctggctgtggggaaagtgaccactctgccctgaccccgatcagttaaggagctgtgcaataaccttcctagtacctgagtgagtgtgtaacttattgggttggcgaagcctggtaaagctgttggaatgagtatgtgattctttttaagtatgaaaataaagatatatgtacagacttgtattttttctctggtggcattcctttaggaatgctgtgtgtctgtccggcaccccggtaggcctgattgggtttctagtcctccttaaccacttatctcccatatgagagtgtgaaaaataggaacacgtgctctacctccatttagggatttgcttgggatacagaagaggccatgtgtctcagagctgttaagggcttatttttttaaaacattggagtcatagcatgtgtgtaaactttaaatatgcaaataaataagtatctatgtc

SEQ ID NO: 425690 - DNA, 1148 bp, Homo sapiens
gaagaagcgggaattctaacggctgagctcttggaagacttgggtccttgggtcgcacgggcatcatggaccgatctaaagaaaactgcatttcaggacctgttaaggctacagctccagttggaggtccaaaacgtgttctcgtgactcagcaatttccttgtcagaatccattacctgtaaatagtggccaggctcagcgggtcttgtgtccttcaaattcttcccagcgcgttcctttgcaagcacaaaagcttgtctccagtcacaagccggttcagaatcagaagcagaagcaattgcaggcaaccagtgtacctcatcctgtctccaggccactgaataacacccaaaagagcaagcagcccctgccatcggcacctgaaaataatcctgaggaggaactggcatcaaaacagaaaaatgaagaatcaaaaaagaggcagtgggctttggaagactttgaaattggtcgccctctgggtaaaggaaagtttggtaatgtttatttggcaagagaaaagcaaagcaagtttattctggctcttaaagtgttatttaaagctcagctggagaaagccggagtggagcatcagctcagaagagaagtagaaatacagtcccaccttcggcatcctaatattcttagactgtatggttatttccatgatgctaccagagtctacctaattctggaatatgcaccacttggaacagtttatagagaacttcagaaactttcaaagtttgatgagcagagaactgctacttatataacagaattggcaaatgccctgtcttactgtcattcgaagagagttattcatagagacattaagccagagaacttacttcttggatcagctggagagcttaaaattgcagattttgggtggtcagtacatgctccatcttccaggaggaccactctctgtggcaccctggactacctgccccctgaaatgattgaaggcgagctgagaaaggggacccgagctgaagagtagcaagaaaaggggagcccttgggacacccccgacacaagatacggggacacacgatggcaaggagagcccaaagggaacccacaagccaaaataccggaaaacacaacaaacgacggagaaggagcgaaacgccacaacgca

SEQ ID NO: 425691 - DNA, 820 bp, Homo sapiens
gaagaagcgggaattctaacggctgagctcttggaagacttgggtccttgggtcgcacgggccgacgggtgggtagaccgtgggggatatctcagtggcggacgaggacggcggggacaaggggcggctggtcggagtggcggagcgtcaagtcccctgtcggttcctccgtccctgagtgtccttggcgctgccttgtgcccgcccagcgcctttgcatccgctcctgggcaccgaggcgccctgtaggatactgcttgttacttattacagctagagggtctcactccattgcccaggccagagtgcggggatatttgataagaaacttcagtgaaggccgggcgcggtggctcatgcccgtaatcccagcattttcggaggccgaggctggagtgcaatggtgtgatctcagctcactgcaacctctgcttcctgggtttaagtgattctcctgcctcagcctcccgagtagctgggattacaggcatcatggaccgatctaaagaaaactgcatttcaggacctgttaaggctacagctccagttggaggtccaaaacgtgttctcgtgactcagcaatttccttgtcagaatccattactgtgctaggcatggtgtcttcacaggaggcaaatccagagcctggctgtggggaaagtgaccactctgccctgaccccgatcagttaaggagctgtgcaataaccttcctagtacctgagtgagtgtgtaacttattgggttggcgaagcctggtaaagctgttggaatgagtatgtgattctttttaagtatgaaaataaagatatatgtacaga

SEQ ID NO: 425692 - DNA, 2796 bp, Homo sapiens
agtatagcagtaaatagcaccgtccttggaaataggcagactgtttttgctagttgtggaaccgtggacaagtttagtctaaaacttagtttatgtaaaaggaggacattgattcctacctcaaagggctgttagatgctcaagaagtgacaatacaaatgcctatgaagaaacaggatcaggatcccgccccaaccagcgccaggccacgccccggcgtgtgacgcaagcacgctccgtgcgcgccgtcgcgtcgcggcgctcactgggggcccggctttcgcccgctgctgccgccgccgccgccggccgcggctgcactcccaagatggcggctcctccgggcgagtacttcagcgttgggagccaggtgtcgtgccggacgtgccaggagcagcggctgcagggcgaggtggtagcctttgactaccaatccaaaatgctggctttaaaatgtccctcttccagtggaaagcccaaccatgcagacatcttgctcataaacttacagtatgtttcagaagtggaaataattaatgaccgaacagaaacccctcctcccctagcttcactcaatgttagtaagcttgccagcaaagcacggacagagaaggaggagaagctgagccaggcctatgcaatcagtgctggtgtctctctagagggccagcagctcttccagaccattcacaagaccattaaagactgtaaatggcaagaaaaaaacatcgtagtcatggaagaagttgttattacacccccatatcaagtggaaaactgtaaaggcaaagaggggagtgcactgagccatgtacgcaaaatagttgaaaaacattttagagacgtggaaagccaaaagatactgcaacgttcacaagcccagcaaccacagaaggaggctgccctgtcatcctgagtccgtacacatggaggactcttccagcatccagccaaggaggcgctggtggtggcttcagcggaggcaggccgggggagggaagggatcctatatgtcctgttggctcttaacaaagggtcagcatttccaaatcttagacttgaacaaacaaaacacccaacaaaaaagaacaagagaataatttaaaagttgaatcattacttgactaacagacttcggtccaccatgtccttttcacagccctcttctggaacagtcaccttgttaattttatttttgaaaattattttcccactctgccctttacttctgactttcctttcctagtttgttcctgccattctgtttttataagtggctacacttgccttctgaatgattgaaagaaacttttacatcttttcttccaaaataaaagtaacaagctgactgtgattcttaaattgagaccagagcagcaaacgtctcactttaaatttttgttttcttttcctttttttttcttttttctttttttttttttttttgcacagggcatggcttgaattagttttatttttcttaactttaaatatatatatgaaaatatatattaaaatgttctctaaatattttctgcttcttgcaggtctctttttactagatcatggctgttcttcccacctcatccctctgaaaataaaaatgtattgccctccccaccatccatcatagccaggccactaacttgacttggtgcaagagattcttgctgcgaactttgtagagccagtgtgcagatagaatttggctttgagggttcctgatggctttttagtctttaactgtgtgtgtaccagtctcacatttggcccaaacctcaggattctccctctgcctgtcttacttcatggtactagaagaccttcctcgccactctctccacatgagagagtcagctgccctttctcctgtgcctctgcaggaagaactctcttgcatggcacatctcagctcctcattgagggatagttttctttgataagaaacctggagtccatttactctgacctctctttaaatctatatccagagccactagcccaggaaaaacttgggtgacccgtaatttctcttctcctgctgtccttttgctcttacgccccaccccaactccccttaaattttacaggcttatgacagtttgtatgtgctcagccaatgagcagaaaacctggaaagaatttctggactttagcccaccagtttgtctggttgactaacctgctgagagctaaaattggcacccattgccccgtgccttcaggcagtctcctggggcagagtatgccaccatccgaatatcaggcactgagtgggatgtgggtgatgctcacatgactggctagagctttgggggtggggtgggggttaactactatttttttggccatgatctctttccccttccttttttttttaattaaataaatggatcaaattaaataattcaagccctgccttcaaaatgaaattttttttttagtattatttagcaaaaacaataaaacccaaatttttttaaccatcactcatgtctcaggtttgtgcgtccttcagaggccccaggggagaggatccaaggtatgtctgtctggtttgacctttctctttagagtctcttcttcctactatttaccctctcttttcacccccgaggactcatccagaaatataatgcagggtataatttaagatgagggtccagggtttggagtggtgtgtaggtggagtgtggggaaaaggctgtagtcacatacatagaaccatttgttacaggactgtttggaggcacaaatggtcggcgagctgagaagtaaactttcagatccacctgc

SEQ ID NO: 425693 - DNA, 1756 bp, Homo sapiens
  misc_feature (1520)..(1520): n is a, c, g, or t
agtatagcagtaaatagcaccgtccttggaaataggcagactgtttttgctagttgtggaaccgtggacaagtttagtctaaaacttagtttatgtaaaaggaggacattgattcctacctcaaagggctgttagatgctcaagaagtgacaatacaaatgcctatgaagaaacaggatcaggatcccgccccaaccagcgccaggccacgccccggcgtgtgacgcaagcacgctccgtgcgcgccgtcgcgtcgcggcgctcactgggggcccggctttcgcccgctgctgccgccgccgccgccggccgcggctgcactcccaagatggcggctcctccgggcgagtacttcagcgttgggagccaggtgtcgtgccggacgtgccaggagcagcggctgcagggcgaggtggtagcctttgactaccaatccaaaatgctggctttaaaatgtccctcttccagtggaaagcccaaccatgcagacatcttgctcataaacttacagtatgtttcagaagtggaaataattaatgaccgaacagaaacccctcctcccctagcttcactcaatgttagtaagcttgccagcaaagcacggacagagaaggaggagaagctgagccaggcctatgcaatcagtgctggtgtctctctagagggccagcagctcttccagaccattcacaagaccattaaagactgtaaatggcaagaaaaaaacatcgtagtcatggaagaagttgttattacacccccatatcaagtggaaaactgtaaaggcaaagaggggagtgcactgagccatgtacgcaaaatagttgaaaaacattttagagacgtggaaagccaaaagatactgcaacgttcacaagcccagcaaccacagaaggaggctgccctgtcatcctgagtccgtacacatggaggactcttccagcatccagccaaggaggcgctggtggtggcttcagcggaggcaggccgggggagggaagggatcctatatgtcctgttggctcttaacaaagggtcagcatttccaaatcttagacttgaacaaacaaaacacccaacaaaaaagaacaagagaataatttaaaagttgaatcattacttgactaacagacttcggtccaccatgtccttttcacagccctcttctggaacagtcaccttgttaattttatttttgaaaattattttcccactctgccctttacttctgactttcctttcctagtttgttcctgccattctgtttttataagtggctacacttgccttctgaatgattgaaagaaacttttacatcttttcttccaaaataaaagtaacaagctgactgtgattcttaaattgagaccagagcagcaaacgtctcactttaaatttttgttttcttttcctttttttttcttttttctttttttttttttttttgcacagggcatggcttgaattagttttatttttcttaactttaaatttttttttgacaccttttttttaacggngttccccaaaaaagaacacaacacactgaacaactaaaccactgtttgtaggggctcctggccccgaaaaaagttagtaacaacacattgtgtgggaccgcgcccgagtagataagagacaccgtgtcagcggtcgcagagaaccgtgtcaaactaggcgtgggtcccccaaaaaagcgcgcggggaccagaggtctgacacaccaagggccggcccagggtacaggtcagacgag

SEQ ID NO: 425694 - DNA, 805 bp, Homo sapiens
ttacttcatggtactagaagacaggcagagggagaatcctgaggtttgggccaaatgtgagactggtacacacacagttaaagactaaaaagcctcaggattctccctctgcctgtcttacttcatggtactagaagaccttcctcgccactctctccacatgagagagtcagctgccctttctcctgtgcctctgcaggaagaactctcttgcatggcacatctcagctcctcattgagggatagttttctttgataagaaacctggagtccatttactctgacctctctttaaatctatatccagagccactagcccaggaaaaacttgggtgacccgtaatttctcttctcctgctgtccttttgctcttacgccccaccccaactccccttaaattttacaggcttatgacagtttgtatgtgctcagccaatgagcagaaaacctggaaagaatttctggactttagcccaccagtttgtctggttgactaacctgctgagagctaaaattggcacccattgccccgtgccttcaggcagtctcctggggcagagtatgccaccatccgaatatcaggcactgagtgggatgtgggtgatgctcacatgactggctagagctttgggggtggggtgggggttaactactatttttttggccatgatctctttccccttccttttttttttaattaaataaatggatcaaattaaataattcaagccctgccttcaaaatgaaattttttttttagtattatttagcaaaaacaataaaacccaaatttttttaaccatca

SEQ ID NO: 425695 - DNA, 850 bp, Homo sapiens
agtatagcagtaaatagcaccgtccttggaaataggcagactgtttttgctagttgtggaaccgtggacaagtttagtctaaaacttagtttatgtaaaaggaggacattgattcctacctcaaagggctgttagatgctcaagaagtgacaatacaaatgcctatgaagaaacaggatcaggatcccgccccaaccagcgccaggccacgccccggcgtgtgacgcaagcacgctccgtgcgcgccgtcgcgtcgcggcgctcactgggggcccggctttcgcccgctgctgccgccgccgccgccggccgcggctgcactcccaagatggcggctcctccgggcgagtacttcagcgttgggagccaggtgtcgtgccggacgtgccaggagcagcggctgcagggcgaggtggtagcctttgactaccaatccaaaatgctggctttaaaatgtccctcttccagtggaaagcccaaccatgcagacatcttgctcataaacttacagtatgtttcagaagtggaaataattaatgaccgaacagaaacccctcctcccctagcttcactcaatgttagtaaggtgctgggaaatgccaggatgattaaaacacccctcttgccctccagaatctcacatttgttgggagtggtgagggacagcagcatttaacttagtgataacaatatggtgagacccgctctgcactagtggtcatatgtccaagagagtttcgctcttgttgcccagcctggagttcaatggcacggtctcagctcactgcaacctccacctcccgggttcaagcgattctcctgcctcagcctcccaagtagctgggattac

SEQ ID NO: 425696 - DNA, 138 bp, Homo sapiens
aaagaggggagtgcactgagccatgtacgcaaaatagtaagtaaaggagccttcagactttaggggagagaggatggttcctcaggccttcagtctttagcaccagaccaggacattgtgctacagtctctgcctcct

SEQ ID NO: 425697 - DNA, 336 bp, Homo sapiens
agctcttccagaccattcacaagacgtgagttgggatcggagaggtcctttgtcctggggtaatgctacctggttgtgctgtctggtggcaggcttttgggtggttgtcttcctaaaagtctactggggaagctgggtagggtattggcaatatgccagcatccagaggtgcaggtgctgtagccccctttccacacagaagaatagtgtaatcacggacaagttgtcttctctggtctttagttgcttgtctgtaaaacttagttttggattagattatccctaaggatcccttctagacctagtagtccataacttagaactagtgatttcttc

SEQ ID NO: 425698 - DNA, 2489 bp, Homo sapiens
agtatagcagtaaatagcaccgtccttggaaataggcagactgtttttgctagttgtggaaccgtggacaagtttagtctaaaacttagtttatgtaaaaggaggacattgattcctacctcaaagggctgttagatgctcaagaagtgacaatacaaatgcctatgaagaaacaggatcaggatcccgccccaaccagcgccaggccacgccccggcgtgtgacgcaagcacgctccgtgcgcgccgtcgcgtcgcggcgctcactgggggcccggctttcgcccgctgctgccgccgccgccgccggccgcggctgcactcccaagatggcggctcctccgggcgagtacttcagcgttgggagccaggtgtcgtgccggacgtgccaggagcagcggctgcagggcgaggtggtagcctttgactaccaatccaaaatgctggctttaaaatgtccctcttccagtggaaagcccaaccatgcagacatcttgctcataaacttacagtatgtttcagaagtggaaataattaatgaccgaacagaaacccctcctcccctagcttcactcaatgttagtaagcttgccagcaaagcacggacagagaaggaggagaagctgagccaggcctatgcaatcagtgctggtgtctctctagagggccagcagctcttccagaccattcacaagaccattaaagactgtaaatggcaagaaaaaaacatcgtagtcatggaagaagttgttattacacccccatatcaagtggaaaactgtaaaggcaaagaggggagtgcactgagccatgtacgcaaaatagttgaaaaacattttagagacgtggaaagccaaaagatactgcaacgttcacaagcccagcaaccacagaaggaggctgccctgtcatcctgagtccgtacacatggaggactcttccagcatccagccaaggaggcgctggtggtggcttcagcggaggcaggccgggggagggaagggatcctatatgtcctgttggctcttaacaaagggtcagcatttccaaatcttagacttgaacaaacaaaacacccaacaaaaaagaacaagagaataatttaaaagttgaatcattacttgactaacagacttcggtccaccatgtccttttcacagccctcttctggaacagtcaccttgttaattttatttttgaaaattattttcccactctgccctttacttctgactttcctttcctagtttgttcctgccattctgtttttataagtggctacacttgccttctgaatgattgaaagaaacttttacatcttttcttccaaaataaaagtaacaagctgactgtgattcttaaattgagaccagagcagcaaacgtctcactttaaatttttgttttcttttcctttttttttcttttttctttttttttttttttttgcacagggcatggcttgaattagttttatttttcttaactttaaatatatatatgaaaatatatattaaaatgttctctaaatattttctgcttcttgcaggtctctttttactagatcatggctgttcttcccacctcatccctctgaaaataaaaatgtattgccctccccaccatccatcatagccaggccactaacttgacttggtgcaagagattcttgctgcgaactttgtagagccagtgtgcagatagaatttggctttgagggttcctgatggctttttagtctttaactgtgtgtgtaccagtctcacatttggcccaaacctcaggattctccctctgcctgtcttacttcatggtactagaagaccttcctcgccactctctccacatgagagagtcagctgccctttctcctgtgcctctgcaggaagaactctcttgcatggcacatctcagctcctcattgagggatagttttctttgataagaaacctggagtccatttactctgacctctctttaaatctatatccagagccactagcccaggaaaaacttgggtgacccgtaatttctcttctcctgctgtccttttgctcttacgccccaccccaactccccttaaattttacaggcttatgacagtttgtatgtgctcagccaatgagcagaaaacctggaaagaatttctggactttagcccaccagtttgtctggttgactaacctgctgagagctaaaattggcacccattgccccgtgccttcaggcagtctcctggggcagagtatgccaccatccgaatatcaggcactgagtgggatgtgggtgatgctcacatgactggctagagctttgggggtggggtgggggttaactactatttttttggccatgatctctttccccttccttttttttttaattaaataaatggatcaaattaaataattcaagccctgccttcaaaatgaaattttttttttagtattatttagcaaaaacaataaaacccaaatttttttaaccatca

SEQ ID NO: 425699 - DNA, 888 bp, Homo sapiens
agtatagcagtaaatagcaccgtccttggaaataggcagactgtttttgctagttgtggaaccgtggacaagtttagtctaaaacttagtttatgtaaaaggaggacattgattcctacctcaaagggctgttagatgctcaagaagtgacaatacaaatgcctatgaagaaacaggatcaggatcccgccccaaccagcgccaggccacgccccggcgtgtgacgcaagcacgctccgtgcgcgccgtcgcgtcgcggcgctcactgggggcccggctttcgcccgctgctgccgccgccgccgccggccgcggctgcactcccaagatggcggctcctccgggcgagtacttcagcgttgggagccaggtgtcgtgccggacgtgccaggagcagcggctgcagggcgaggtggtagcctttgactaccaatccaaaatgctggctttaaaatgtccctcttccagtggaaagcccaaccatgcagacatcttgctcataaacttacagtatgtttcagaagtggaaataattaatgaccgaacagaaacccctcctcccctagcttcactcaatgttagtaagcttgccagcaaagcacggacagagaaggaggagaagctgagccaggcctatgcaatcagtgctggtgtctctctagagggccagcagctcttccagaccattcacaagaccattaaagactgtaaatggcaagaaaaaaacatcgtagtcatggaagaagttgttattacacccccatatcaagtggaaaactgtaaaggcaaagaggggagtgcactgagccatgtacgcaaaatagttgaaagaacattttacgagacgtggaaagccgaagaaatactaaatataactctccagacgct

SEQ ID NO: 425700 - DNA, 3399 bp, Homo sapiens
gccgccactgtcgtcgccacgggcagctgggctacttgctcctcgcagctaaaaggcggtgcctccctattaccccctcgcctcccggcccccttccttaatggatgaaaagtacccctccctctacatctgctgtacctaaggacaggactctgaggagtactcttgctccacagattaaactctcagcagcaacttcaagaatcatttttctataggggtctgggaggaattctggaggagagtaaagtcgaagttcttagaagctctgagaaatcatgggccgtgcggtaggggttgaaatgctcaaaggtccacacttcttgaaataaacagaatggtcttgagtggattgcaactgttttggaaatagctttgtgaaaagagggtggagagctactcaaaattctacgttagagagactgaaaagacatctaatttcattgctcggcagactgctctccagaatgttgagattgcccgagaagtgaccccagcaaaagaaaaatattgctgtacctaaattcaaacgacatcctttgtggtgccacagcacatggatttcagaaccgcctgtgaggagacaaagacaggaatttgtttgctgcaggatggtaaccaggagcctttcaaagtgcggctgcacctagccaaagacattttgatgatccaggaacaggatgtgatatgtgtgtctggtgagcctttctattctggtgaaagaacggtgaccatcagaagacaaacagtaggaggatttggattaagcataaagggaggagcagaacataacattccagttgtcgtttcaaaaatctccaaggaacaaagagcggaactttcaggactactttttattggagatgcaattctacagataaatggcattaatgtgagaaaatgtagacatgaagaagtggttcaggttcttcggaatgctggagaagaagtgactctaacagtgtcatttttaaaaagagcacctgctttcctcaaactcccattgaatgaagattgtgcatgtgctccaagtgaccagagcagtggcacctcctctcctctctgtgacagtggcttacatctcaactaccatcccaacaatacagacacattatcatgctcgtcgtggccgacgtctccaggcttgaggtgggagaagcgatggtgcgacctcagactgatccctctacttcattcgcgcttctctcagtatgtgcccggcacagatttgagtcggcagaatgcctttcaagtcattgctgtggatggggtctgcactgggattattcagtgcctctctgctgaagactgcgttgactggctacaagcaatagcaactaacatttcaaatctcacaaagcacaatattaaaaaaatcaacagaaactttcctgtaaaccagcagattgtctacatgggctggtgtgaagcccgggagcaagaccccctccaggacagagtgtactccccgaccttcctggccctgaggggctcatgtctctacaagtttctggcacctccagtgaccacctgggactggacaagagcagagaaaacattctcagtttatgagattatgtgcaagatcctcaaggacagtgacctgctggaccgacggaaacagtgcttcaccgtgcagtctgagtctggggaggacctgtacttctcagtggagctggaaagtgacctcgcccagtgggaaagagccttccagacagcaacctttctagaagtagaacggatacagtgcaagacctatgcatgtgtgctagaaagtcatctaatgggactcacaattgatttcagcacaggatttatctgctttgatgctgcaacaaaggctgtcctttggaggtataaattctctcagcttaaaggttcttcagatgatggcaagagcaaaatcaaatttttgtttcagaatccagatactaaacagattgaagcaaaggagttggaattttctaatttatttgctgttcttcactgcattcattccttctttgctgccaaggtagcttgtttggaccctctatttttaggcaatcaagctactgcttctactgctgccagctctgctaccacgagcaaagcaaagtatacaacttgacatactgaactcttcattgacacaccccatgactgtataagcaggacacatttactcatcattttagaccctagagaaaccataacatcaccaagtcgacagtggaggcaaatcaaaatttcggcagaaaaagaaggtcatgtggaacctcaaaaacacttctattctggatgacatctgtgaaatatactacatgaacagaacagcttgttctcactcagttgctttgtaccagtaagtgtattgctttcaccaaaagtggagacaaaagaataaattatttgaagaagtatgtaaataacataaaaatagtaagctacctatgaataaaaatacttattaaatgattacttctgtattttagattattttgtatgactagtacatgttgggcagagtcataggaaaacaaatgccctatcttgtattatgagggacataaaagagttaaaaaccataaatcagcaaggagcatgcaaaaaaatctcatcaaagaaggatgcactttaatttgctgatgtaaatttgcccttgtgttctcatcccatgatttgacactggcattccaattgtttttatcttattgtaaatattccgaagaacttccaaaggataattacattgacccatgatagatacaatgtgaaatggactattctcccttggatcactgttattgaaatgtcttattagctgccaaagtcaatcaaatatgccaacagtgtattaatttaattatgagtgatggaaaatttcatgaacctctcatttcttccttggtttgaaagagatttgtattttacctaataagatttattatcaaattaaagtttcataaattttcagtgaacccaaaaccttttgtagagaaaataatataaacaaatatggtgtgagaaacaattctttgtaatccgaagtctactagttaatcatgaactaaaatgtcccccgaaaacagtcccaaagctattatagatgttaattaaatgacattttttcattttagtactattttatgagaaacaaaggtgatatttaaagataaaagttaaaattctttaacctcccttgtcatggaaagtgattaagtaatgccaactatgcaggttgttttaggtattttgtcctaagaatgtaaatgtgaaaggctgggaaatttgaaagccttagaggtgtgcaatttactcagattccaggtattattcaactagttgtataacatggaacacagtctctgtccttcagtacagcttttttgagatattttaaaaagtcagctgtgtatg

SEQ ID NO: 425701 - DNA, 3213 bp, Homo sapiens
gccgccactgtcgtcgccacgggcagctgggctacttgctcctcgcagctaaaaggcggtgcctccctattaccccctcgcctcccggcccccttccttaatggatgaaaagtacccctccctctacatctgctgtacctaaggacaggactctgaggagtactcttgctccacagattaaactctcagcagcaacttcaagaatcatttttctataggggtctgggaggaattctggaggagagtaaagtcgaagttcttagaagctctgagaaatcatgggccgtgcggtaggggttgaaatgctcaaaggtccacacttcttgaaataaacagaatggtcttgagtggattgcaactgttttggaaatagctttgtgaaaagagggtggagagctactcaaaattctacgttagagagactgaaaagacatctaatttcattgctcggcagacgacatcctttgtggtgccacagcacatggatttcagaaccgcctgtgaggagacaaagacaggaatttgtttgctgcaggatggtaaccaggagcctttcaaagtgcggctgcacctagccaaagacattttgatgatccaggaacaggatgtgatatgtgtgtctggtgagcctttctattctggtgaaagaacggtgaccatcagaagacaaacagtaggaggatttggattaagcataaagggaggagcagaacataacattccagttgtcgtttcaaaaatctccaaggaacaaagagcggaactttcaggactactttttattggagatgcaattctacagataaatggcattaatgtgagaaaatgtagacatgaagaagtggttcaggttcttcggaatgctggagaagaagtgactctaacagtgtcatttttaaaaagagcacctgctttcctcaaactcccattgaatgaagattgtgcatgtgctccaagtgaccagagcagtggcacctcctctcctctctgtgacagtggcttacatctcaactaccatcccaacaatacagacacattatcatgctcgtcgtggccgacgtctccaggcttgaggtgggagaagcgatggtgcgacctcagactgatccctctacttcattcgcgcttctctcagtatgtgcccggcacagatttgagtcggcagaatgcctttcaagtcattgctgtggatggggtctgcactgggattattcagtgcctctctgctgaagactgcgttgactggctacaagcaatagcaactaacatttcaaatctcacaaagcacaatattaaaaaaatcaacagaaactttcctgtaaaccagcagattgtctacatgggctggtgtgaagcccgggagcaagaccccctccaggacagagtgtactccccgaccttcctggccctgaggggctcatgtctctacaagtttctggcacctccagtgaccacctgggactggacaagagcagagaaaacattctcagtttatgagattatgtgcaagatcctcaaggacagtgacctgctggaccgacggaaacagtgcttcaccgtgcagtctgagtctggggaggacctgtacttctcagtggagctggaaagtgacctcgcccagtgggaaagagccttccagacagcaacctttctagaagtagaacggatacagtgcaagacctatgcatgtgtgctagaaagtcatctaatgggactcacaattgatttcagcacaggatttatctgctttgatgctgcaacaaaggagttggaattttctaatttatttgctgttcttcactgcattcattccttctttgctgccaaggtagcttgtttggaccctctatttttaggcaatcaagctactgcttctactgctgccagctctgctaccacgagcaaagcaaagtatacaacttgacatactgaactcttcattgacacaccccatgactgtataagcaggacacatttactcatcattttagaccctagagaaaccataacatcaccaagtcgacagtggaggcaaatcaaaatttcggcagaaaaagaaggtcatgtggaacctcaaaaacacttctattctggatgacatctgtgaaatatactacatgaacagaacagcttgttctcactcagttgctttgtaccagtaagtgtattgctttcaccaaaagtggagacaaaagaataaattatttgaagaagtatgtaaataacataaaaatagtaagctacctatgaataaaaatacttattaaatgattacttctgtattttagattattttgtatgactagtacatgttgggcagagtcataggaaaacaaatgccctatcttgtattatgagggacataaaagagttaaaaaccataaatcagcaaggagcatgcaaaaaaatctcatcaaagaaggatgcactttaatttgctgatgtaaatttgcccttgtgttctcatcccatgatttgacactggcattccaattgtttttatcttattgtaaatattccgaagaacttccaaaggataattacattgacccatgatagatacaatgtgaaatggactattctcccttggatcactgttattgaaatgtcttattagctgccaaagtcaatcaaatatgccaacagtgtattaatttaattatgagtgatggaaaatttcatgaacctctcatttcttccttggtttgaaagagatttgtattttacctaataagatttattatcaaattaaagtttcataaattttcagtgaacccaaaaccttttgtagagaaaataatataaacaaatatggtgtgagaaacaattctttgtaatccgaagtctactagttaatcatgaactaaaatgtcccccgaaaacagtcccaaagctattatagatgttaattaaatgacattttttcattttagtactattttatgagaaacaaaggtgatatttaaagataaaagttaaaattctttaacctcccttgtcatggaaagtgattaagtaatgccaactatgcaggttgttttaggtattttgtcctaagaatgtaaatgtgaaaggctgggaaatttgaaagccttagaggtgtgcaatttactcagattccaggtattattcaactagttgtataacatggaacacagtctctgtccttcagtacagcttttttgagatattttaaaaagtcagctgtgtatg

SEQ ID NO: 425702 - DNA, 503 bp, Homo sapiens
  misc_feature (35)..(35): n is a, c, g, or t
gataatgattagtgttccgtttatgtaacaacgtnccttgacggacagtgacctgctggaccgacggaaacagtgcttcaccgtgcagtctgagtctggggaggacctgtacttctcagtggagctggaaagtgacctcgcccagtgggaaagagccttccagacagcaacctttctagaagtagaacggatacagtgcaagacctatgcatgtgtgctagaaagtcatctaatgggactcacaattgatttcagcacaggatttatctgctttgatgctgcaacaaaggtaatgtgttcaggtcagctctgagaaatatgctgcaaacattctaattgaagaatgatttaaatgcctcataactcctttcagcattttaattgtaatcgtgtcaaatttaagatcttcgtttttgttaatggaagataaattatgcttcgatctgaaaaaaagtttgaatttttaataaaacatatgtagtaccacaaaactaaaaaaaaat

SEQ ID NO: 425703 - DNA, 2054 bp, Homo sapiens
gccgccactgtcgtcgccacgggcagctgggctacttgctcctcgcagctaaaaggcggtgcctccctattaccccctcgcctcccggcccccttccttaatggatgaaaagtacccctccctctacatctgctgtacctaaggacaggactctgaggagtactcttgctccacagattaaactctcagcagcaacttcaagaatcatttttctataggggtctgggaggaattctggaggagagtaaagtcgaagttcttagaagctctgagaaatcatgggccgtgcggtaggggttgaaatgctcaaaggtccacacttcttgaaataaacagaatggtcttgagtggattgcaactgttttggaaatagctttgtgaaaagagggtggagagctactcaaaattctacgttagagagactgaaaagacatctaatttcattgctcggcagactgctctccagaatgttgagattgcccgagaagtgaccccagcaaaagaaaaatattgctgtacctaaattcaaacgacatcctttgtggtgccacagcacatggatttcagaaccgcctgtgaggagacaaagacaggaatttgtttgctgcaggatggtaaccaggagcctttcaaagtgcggctgcacctagccaaagacattttgatgatccaggaacaggatgtgatatgtgtgtctggtgagcctttctattctggtgaaagaacggtgaccatcagaagacaaacagtaggaggatttggattaagcataaagggaggagcagaacataacattccagttgtcgtttcaaaaatctccaaggaacaaagagcggaactttcaggactactttttattggagatgcaattctacagataaatggcattaatgtgagaaaatgtagacatgaagaagtggttcaggttcttcggaatgctggagaagaagtgactctaacagtgtcatttttaaaaagagcacctgctttcctcaaactcccattgaatgaagattgtgcatgtgctccaagtgaccagagcagtggcacctcctctcctctctgtgacagtggcttacatctcaactaccatcccaacaatacagacacattatcatgctcgtcgtggccgacgtctccaggcttgaggtgggagaagcgatggtgcgacctcagactgatccctctacttcattcgcgcttctctcagtatgtgcccggcacagatttgagtcggcagaatgcctttcaagtcattgctgtggatggggtctgcactgggattattcagtgcctctctgctgaagactgcgttgactggctacaagcaatagcaactaacatttcaaatctcacaaagcacaatattaaaaaaatcaacagaaactttcctgtaaaccagcagattgtctacatgggctggtgtgaagcccgggagcaagaccccctccaggacagagtgtactccccgaccttcctggccctgaggggctcatgtctctacaagtttctggcacctccagtgaccacctgggactggacaagagcagagaaaacattctcagtttatgagattatgtgcaagatcctcaaggacagtgacctgctggaccgacggaaacagtgcttcaccgtgcagtctgagtctggggaggacctgtacttctcagtggagctggaaagtgacctcgcccagtgggaaagagccttccagacagcaacctttctagaagtagaacggatacagtgcaagacctatgcatgtgtgctagaaagtcatctaatgggactcacaattgatttcagcacaggatttatctgctttgatgctgcaacaaaggtaatgtgttcaggtcagctctgagaaatatgctgcaaacattctaattgaagaatgatttaaatgcctcataactcctttcagcattttaattgtaatcgtgtcaaatttaagatcttcgtttttgttaatggaagataaattatgcttcgatctgaaaaaaagtttgaatttttaataaaacatatgtagtaccacaaaactaaaaaaaaat

SEQ ID NO: 425704 - DNA, 839 bp, Homo sapiens
atttgttctgaacatctgcaggcagaatgcctttcaagtcattgctgtggatggggtctgcactgggattattcagtgcctctctgctgaagactgcgttgactggctacaagcaatagcaactaacatttcaaatctcacaaagcacaatattaaaaaaatcaacagaaactttcctgtaaaccagcagattgtctacatgggctggtgtgaagcccgggagcaagaccccctccaggacagagtgtactccccgaccttcctggccctgaggggctcatgtctctacaagtttctggcacctccagtgaccacctgggactggacaagagcagagaaaacattctcagtttatgagattatgtgcaagatcctcaaggacagtgacctgctggaccgacggaaacagtgcttcaccgtgcagtctgagtctggggaggacctgtacttctcagtggagctggaaagtgacctcgcccagtgggaaagagccttccagacagcaacctttctagaagtagaacggatacagtgcaagacctatgcatgtgtgctagaaagtcatctaatgggactcacaattgatttcagcacaggatttatctgctttgatgctgcaacaaaggtaatgtgttcaggtcagctctgagaaatatgctgcaaacattctaattgaagaatgatttaaatgcctcataactcctttcagcattttaattgtaatcgtgtcaaatttaagatcttcgtttttgttaatggaagataaattatgcttcgatctgaaaaaaagtttgaatttttaataaaacatatgtagtaccacaaaactaaaaaaaaat

SEQ ID NO: 425705 - DNA, 1408 bp, Homo sapiens
caaatattcttaaaagatagatttagttattgtattttggtctacaattttggacttggcagtttgttttactaatgcagaattattctttttgtttcaaacatagtttgccatcatctggctactacctaatcatgttgtactagttattgtggaaagaaaattgtacatacatttccttgtcctttgggagatgtctttgagtcaaacccacaagcatgaactctcacctgaaagaaaactggaaaaggagaaactttaaatcagtatgttttgaaaggaagagatttccagactttttaaagcaaattggaatcgttttatttttttgtttgggccttaggcacaatagaagcaaatgttgcaatattaaatataatagggagagttcactgtttcctgggacattgtggtcatgtccttaatccttcattgtgatgccccttcttggagttggcattttgtgacaattcatagagatcttgcagcaatatttggctattggttttattaacttaaaattcaacagaaatggagtaattaaaaaaaaaaacaaaaaacagagaagaattgcaaaatctgaagtggaatggcacttccttgggtatgtaagggttgtttttagataaaactcccgatttgttcttcctacactttaatagtctcaaattctttctggggaagcaacgtcagtgtctacctccacagtaactatgatataggaaattgtcctttcagtggtttctaggtataacaaacaagccgttaaaaatgagtgaccattttgtaggttacagcctcagcaatctgtgtcatttgaaagcaaatatcctgatatttttaaataaggtgagcagggcaggcaggaaaccaatatttagtacttttgtgattaaacattctagaccaggcttgttgatatgtatgccaatagcctagaatttttggcttagtgtaaaataaaaatgtcttttctattgtggtctgatatccgtttctgtaataagatcagtttgttgtcctctgtgcaccagtggttttgcccttaattttttttggctagcatcaccaagatctgtcatccagagctgctgagaaaaatacatgttgccaaacttttcttaaaattgtgctgccagtggtattttcccagatgtgaaaaataataatctaataaaggattaatatctaataacaataccattgttgaacatgctcatggaatgtccaccttcttctgattcctttttttgtatttgaaaatgcaatggtgtgttccaaattattgttggtgttgttaatgtcatgactctcctttgaatagaataaaataaccccttttgttttgtgttttctactgaattagattttcctctagtcctatgtgaataaaaagctatttgaaata

SEQ ID NO: 425706 - DNA, 3564 bp, Homo sapiens
ccgacccgctaggccccgcgcggctcggatccggcggcgctgtttcggtcgggagtgggtgggagagaagccggggcaggggaggagccgccggagctgtcggagccgtgacacccagggcagctacactcagaagccacaaggaatgctagtggagcccctcatccctcccagcttctcttccaagctgccccgtggggcttgatccaggaagctacttcagaaagtagacaatcattccaagggtacaacaaggtttaccacaatgtgagggactcagccattgcaaattgtacagatgagggcccttggaagaaaatcctcgctgtgtccaggctgaggcggggggctaatgacagtgtgagctctagatggtgtgagaccaccccaaagccaagaaatggctacagccgtggaaccagaggaccaggatctttgggaagaagagggaattctgatggtgaaactggaagatgatttcacctgtcggccagagtctgtcttacagagggatgacccggtgctggaaacctcccaccagaacttccgacgcttccgctaccaggaggcagcaagccctagagaagctctcatcagactccgagaactttgtcaccagtggctgagaccagagaggcggacaaaggagcagatcctagagctgcttgtgctggaacaatttcttaccgtcctacctggagaactacagagctgggtgcggggccaacggccagaaagtggcgaggaggcagtgacgctggtggagggtttgcagaaacaacccaggagaccaaggcggtgggtgactgtccatgttcacggccaggaagtcctgtcagaggagacggtgcatttaggagcggagcctgagtcacctaatgagctgcaggatcctgtgcaaagctcgacccccgagcagtctcctgaggaaaccacacagagcccagatctgggggcaccggcagagcagcgtccacaccaggaagaggagctccagaccctgcaggagagcgaggtcccagtgcccgaggacccagaccttcctgcagagaggagctctggagactcagagatggttgctcttcttactgctctgtcacagggactggtaacgttcaaggatgtggccgtatgcttttcccaggaccagtggagtgatctggacccaacacagaaagagttctatggagaatatgtcttggaagaagactgtggaattgttgtctctctgtcatttccaatccccagacctgatgagatctcccaggttagagaggaagagccttgggtcccagatatccaagagcctcaggagactcaagagccagaaatcctgagttttacctacacaggagataggagtaaagatgaggaagagtgtctggagcaggaagatctgagtttggaggatatacacaggcctgttttgggagaaccagaaattcaccagactccagattgggaaatagtctttgaggacaatccaggtagacttaatgaaagaagatttggtactaatatttctcaagtgaatagttttgtgaaccttcgggaaactacacccgtccaccccctgttagggaggcatcatgactgttctgtgtgtggaaagagcttcacttgtaactcccaccttgttagacacctgaggactcacacaggagagaaaccctataaatgtatggaatgtggaaaaagttacacacgaagctcacatcttgccaggcaccaaaaggttcacaagatgaacgcgccttacaaatatcccctaaaccggaagaatttggaagagacctcccctgtgacacaggctgagagaactccatcagtggagaaaccctatagatgtgatgattgcggaaagcacttccgctggacttcagaccttgtcagacatcagaggacacatactggagaaaaacccttcttttgtactatttgtggcaaaagcttcagccagaaatctgtgttaacaacacaccaaagaatccacctgggaggcaaaccctacttgtgtggagagtgtggtgaggacttcagtgaacacaggcggtacctggcgcaccggaagacgcacgctgctgaggaactctacctctgcagcgagtgcgggcgctgcttcacccacagcgcagcgttcgccaagcacttgagaggacacgcctcagtgaggccctgccgatgcaacgaatgtgggaagagcttcagtcgcagggaccacctcgtcaggcatcagagaacacacactggggagaaaccattcacgtgccctacctgtggaaaaagcttcagcagaggatatcacttaattaggcatcagaggacccactcagaaaagacctcctagctaggtccccatgtgaggagatctgctttcagccctcacctaagggaggtgaggaagaggaaaagccctcttgtcagcctgggaagaccttttcgagggagtctccctgacctgctcagatctgacattacctcttcctgcaactaaacacgagcctgggcagaacctctcagccttcctctacgccttgaggggatgtttcatccaaagtacaacctgaattgaggcttctccttcactggagtgcacctgcctctacctcatgggtataaagtaggagaactaagagacttaagaggtcgtggttcctatatcgtccaaaaaataggctgttacatatcctaaagactgctcaacagcttcaagttgaaagtggccaaggacagccccttaggtttgggaagggacgagcctgaaggattctgtctttactggggtcaaatcttaaagcacacagctctggactcaagacaggaggtttgcgtcctgatggctttgccacacattcacaggataactgcatagatccctcgctgtctgattcacttcttaccatgcactttcctttgatgctgaggagaaatggaagtgggcgaaaaatctcaaggctgcttcatgtggaccttgtcaagctgctccctcccccagcgtcaaattgttatcaggtgccaaacactgctagaaaggagggcctagtcagaagcctctttccatacgagttttggttttgtttttaatatttttttctattaaaatactcatgcatttaaccttcccgttattcaaccagtctcttggttgcatccctagcacttctactacaagtgagatggtagtgtttgagtgcttattgagtaaagcataattcggtcataatgaaatcgttcacattccctcatatgcacaagcccaccaaccccttcacaccccccttcacaggggtcgtatgagtaaggggatttggaaactgtcaacttacaaaggcactataacaattacagaatcatgattgccatgggccactttatttacatgaagacaactggagaacgactaagaccaaattatggaaaataagaaaaagctgttgctggcaagaccatcaagactgttctgacaccctgtccccatcatccctgactgagtactctgacatcacggaaagtgttgaacctgggaccctgaggaattcaccaggagtaaatggctttcatgta

SEQ ID NO: 425707 - DNA, 3368 bp, Homo sapiens
ccgacccgctaggccccgcgcggctcggatccggcggcgctgtttcggtcgggagtgggtgggagagaagccggggcaggggaggagccgccggagctgtcggagccggcccttggaagaaaatcctcgctgtgtccaggctgaggcggggggctaatgacagtgtgagctctagatggtgtgagaccaccccaaagccaagaaatggctacagccgtggaaccagaggaccaggatctttgggaagaagagggaattctgatggtgaaactggaagatgatttcacctgtcggccagagtctgtcttacagagggatgacccggtgctggaaacctcccaccagaacttccgacgcttccgctaccaggaggcagcaagccctagagaagctctcatcagactccgagaactttgtcaccagtggctgagaccagagaggcggacaaaggagcagatcctagagctgcttgtgctggaacaatttcttaccgtcctacctggagaactacagagctgggtgcggggccaacggccagaaagtggcgaggaggcagtgacgctggtggagggtttgcagaaacaacccaggagaccaaggcggtgggtgactgtccatgttcacggccaggaagtcctgtcagaggagacggtgcatttaggagcggagcctgagtcacctaatgagctgcaggatcctgtgcaaagctcgacccccgagcagtctcctgaggaaaccacacagagcccagatctgggggcaccggcagagcagcgtccacaccaggaagaggagctccagaccctgcaggagagcgaggtcccagtgcccgaggacccagaccttcctgcagagaggagctctggagactcagagatggttgctcttcttactgctctgtcacagggactggtaacgttcaaggatgtggccgtatgcttttcccaggaccagtggagtgatctggacccaacacagaaagagttctatggagaatatgtcttggaagaagactgtggaattgttgtctctctgtcatttccaatccccagacctgatgagatctcccaggttagagaggaagagccttgggtcccagatatccaagagcctcaggagactcaagagccagaaatcctgagttttacctacacaggagataggagtaaagatgaggaagagtgtctggagcaggaagatctgagtttggaggatatacacaggcctgttttgggagaaccagaaattcaccagactccagattgggaaatagtctttgaggacaatccaggtagacttaatgaaagaagatttggtactaatatttctcaagtgaatagttttgtgaaccttcgggaaactacacccgtccaccccctgttagggaggcatcatgactgttctgtgtgtggaaagagcttcacttgtaactcccaccttgttagacacctgaggactcacacaggagagaaaccctataaatgtatggaatgtggaaaaagttacacacgaagctcacatcttgccaggcaccaaaaggttcacaagatgaacgcgccttacaaatatcccctaaaccggaagaatttggaagagacctcccctgtgacacaggctgagagaactccatcagtggagaaaccctatagatgtgatgattgcggaaagcacttccgctggacttcagaccttgtcagacatcagaggacacatactggagaaaaacccttcttttgtactatttgtggcaaaagcttcagccagaaatctgtgttaacaacacaccaaagaatccacctgggaggcaaaccctacttgtgtggagagtgtggtgaggacttcagtgaacacaggcggtacctggcgcaccggaagacgcacgctgctgaggaactctacctctgcagcgagtgcgggcgctgcttcacccacagcgcagcgttcgccaagcacttgagaggacacgcctcagtgaggccctgccgatgcaacgaatgtgggaagagcttcagtcgcagggaccacctcgtcaggcatcagagaacacacactggggagaaaccattcacgtgccctacctgtggaaaaagcttcagcagaggatatcacttaattaggcatcagaggacccactcagaaaagacctcctagctaggtccccatgtgaggagatctgctttcagccctcacctaagggaggtgaggaagaggaaaagccctcttgtcagcctgggaagaccttttcgagggagtctccctgacctgctcagatctgacattacctcttcctgcaactaaacacgagcctgggcagaacctctcagccttcctctacgccttgaggggatgtttcatccaaagtacaacctgaattgaggcttctccttcactggagtgcacctgcctctacctcatgggtataaagtaggagaactaagagacttaagaggtcgtggttcctatatcgtccaaaaaataggctgttacatatcctaaagactgctcaacagcttcaagttgaaagtggccaaggacagccccttaggtttgggaagggacgagcctgaaggattctgtctttactggggtcaaatcttaaagcacacagctctggactcaagacaggaggtttgcgtcctgatggctttgccacacattcacaggataactgcatagatccctcgctgtctgattcacttcttaccatgcactttcctttgatgctgaggagaaatggaagtgggcgaaaaatctcaaggctgcttcatgtggaccttgtcaagctgctccctcccccagcgtcaaattgttatcaggtgccaaacactgctagaaaggagggcctagtcagaagcctctttccatacgagttttggttttgtttttaatatttttttctattaaaatactcatgcatttaaccttcccgttattcaaccagtctcttggttgcatccctagcacttctactacaagtgagatggtagtgtttgagtgcttattgagtaaagcataattcggtcataatgaaatcgttcacattccctcatatgcacaagcccaccaaccccttcacaccccccttcacaggggtcgtatgagtaaggggatttggaaactgtcaacttacaaaggcactataacaattacagaatcatgattgccatgggccactttatttacatgaagacaactggagaacgactaagaccaaattatggaaaataagaaaaagctgttgctggcaagaccatcaagactgttctgacaccctgtccccatcatccctgactgagtactctgacatcacggaaagtgttgaacctgggaccctgaggaattcaccaggagtaaatggctttcatgta

SEQ ID NO: 425708 - DNA, 652 bp, Homo sapiens
ccgacccgctaggccccgcgcggctcggatccggcggcgctgtttcggtcgggagtgggtgggagagaagccggggcaggggaggagccgccggagctgtcggagccgtgacacccagggcagctacactcagaagccacaaggaatgctagtggagcccctcatccctcccagcttctcttccaagctgccccgtggggcttgatccaggaagctacttcagaaagctataccctttttgtactctgtgtatatactatattgcagtagacaatcattccaagggtacaacaaggtttaccacaatgtgagggactcagccattgcaaattgtacagatgagtcttcagtggaaacctggtactcctcagattcctctggttcaacaggcggggatcccatcccttatcatctcctcaaatgctaaaggacccttgagcaaagccaggaggaagtcatctagacgtgaaacagggagtatccacacaggctgtgttaatgacaaagctaaaaacatagtaaatgacttttgaatttactgctgttatgaattatctatagcaacacctccggtcagctctgttatatatgttattgcgttatttcccattaaatgatggttcctctgactatctgattggcattgactatg

SEQ ID NO: 425709 - DNA, 515 bp, Homo sapiens
aggagaaatagaaagcttaaactcaatgtgcgtttattgaataccttttctactaagggctcgacaaagtggtaggcactgggaatataaaaatgaataaggagacccttgctctcgagggcagggcccacagtggggagacagacgttaagccatgcccacgacaagaatgacttctgagattccttctttggatcatgatttagtcttcagtggaaacctggtactcctcagattcctctggttcaacaggcggggatcccatcccttatcatctcctcaaatgctaaaggacccttgagcaaagccaggaggaagtcatctagacgtgaaacagggagtatccacacaggctgtgttaatgacaaagctaaaaacatagtaaatgacttttgaatttactgctgttatgaattatctatagcaacacctccggtcagctctgttatatatgttattgcgttatttcccattaaatgatggttcctctgactatctgattggcattgactatg

SEQ ID NO: 425710 - DNA, 4252 bp, Homo sapiens
  misc_feature (3921)..(3921): n is a, c, g, or t
  misc_feature (3939)..(3939): n is a, c, g, or t
  misc_feature (3976)..(3976): n is a, c, g, or t
ccgacccgctaggccccgcgcggctcggatccggcggcgctgtttcggtcgggagtgggtgggagagaagccggggcaggggaggagccgccggagctgtcggagccggcccttggaagaaaatcctcgctgtgtccaggctgaggcggggggctaatgacagtgtgagctctagatggtgtgagaccaccccaaagccaagaaatggctacagccgtggaaccagaggaccaggatctttgggaagaagagggaattctgatggtgaaactggaagatgatttcacctgtcggccagagtctgtcttacagagggatgacccggtgctggaaacctcccaccagaacttccgacgcttccgctaccaggaggcagcaagccctagagaagctctcatcagactccgagaactttgtcaccagtggctgagaccagagaggcggacaaaggagcagatcctagagctgcttgtgctggaacaatttcttaccgtcctacctggagaactacagagctgggtgcggggccaacggccagaaagtggcgaggaggcagtgacgctggtggagggtttgcagaaacaacccaggagaccaaggcggtgggtgactgtccatgttcacggccaggaagtcctgtcagaggagacggtgcatttaggagcggagcctgagtcacctaatgagctgcaggatcctgtgcaaagctcgacccccgagcagtctcctgaggaaaccacacagagcccagatctgggggcaccggcagagcagcgtccacaccaggaagaggagctccagaccctgcaggagagcgaggtcccagtgcccgaggacccagaccttcctgcagagaggagctctggagactcagagatggttgctcttcttactgctctgtcacagggactggtaacgttcaaggatgtggccgtatgcttttcccaggaccagtggagtgatctggacccaacacagaaagagttctatggagaatatgtcttggaagaagactgtggaattgttgtctctctgtcatttccaatccccagacctgatgagatctcccaggttagagaggaagagccttgggtcccagatatccaagagcctcaggagactcaagagccagaaatcctgagttttacctacacaggagataggagtaaagatgaggaagagtgtctggagcaggaagatctgagtttggaggatatacacaggcctgttttgggagaaccagaaattcaccagactccagattgggaaatagtctttgaggacaatccaggtagacttaatgaaagaagatttggtactaatatttctcaagtgaatagttttgtgaaccttcgggaaactacacccgtccaccccctgttagggaggcatcatgactgttctgtgtgtggaaagagcttcacttgtaactcccaccttgttagacacctgaggactcacacaggagagaaaccctataaatgtatggaatgtggaaaaagttacacacgaagctcacatcttgccaggcaccaaaaggttcacaagatgaacgcgccttacaaatatcccctaaaccggaagaatttggaagagacctcccctgtgacacaggctgagagaactccatcagtggagaaaccctatagatgtgatgattgcggaaagcacttccgctggacttcagaccttgtcagacatcagaggacacatactggagaaaaacccttcttttgtactatttgtggcaaaagcttcagccagaaatctgtgttaacaacacaccaaagaatccacctgggaggcaaaccctacttgtgtggagagtgtggtgaggacttcagtgaacacaggcggtacctggcgcaccggaagacgcacgctgctgaggaactctacctctgcagcgagtgcgggcgctgcttcacccacagcgcagcgttcgccaagcacttgagaggacacgcctcagtgaggccctgccgatgcaacgaatgtgggaagagcttcagtcgcagggaccacctcgtcaggcatcagagaacacacactggggagaaaccattcacgtgccctacctgtggaaaaagcttcagcagaggatatcacttaattaggcatcagaggacccactcagaaaagacctcctagctaggtccccatgtgaggagatctgctttcagccctcacctaagggaggtgaggaagaggaaaagccctcttgtcagcctgggaagaccttttcgagggagtctccctgacctgctcagatctgacattacctcttcctgcaactaaacacgagcctgggcagaacctctcagccttcctctacgccttgaggggatgtttcatccaaagtacaacctgaattgaggcttctccttcactggagtgcacctgcctctacctcatgggtataaagtaggagaactaagagacttaagaggtcgtggttcctatatcgtccaaaaaataggctgttacatatcctaaagactgctcaacagcttcaagttgaaagtggccaaggacagccccttaggtttgggaagggacgagcctgaaggattctgtctttactggggtcaaatcttaaagcacacagctctggactcaagacaggaggtttgcgtcctgatggctttgccacacattcacaggataactgcatagatccctcgctgtctgattcacttcttaccatgcactttcctttgatgctgaggagaaatggaagtgggcgaaaaatctcaaggctgcttcatgtggaccttgtcaagctgctccctcccccagcgtcaaattgttatcaggtgccaaacactgctagaaaggagggcctagtcagaagcctctttccatacgagttttggttttgtttttaatatttttttctattaaaatactcatgcatttaaccttcccgttattcaaccagtctcttggttgcatccctagcacttctactacaagtgagatggtagtgtttgagtgcttattgagtaaagcataattcggtcataatgaaatcgttcacattccctcatatgcacaagcccaccaaccccttcacaccccccttcacaggggtcgtatgagtaaggggatttggaaactgtcaacttacaaaggcactataacaattacagaatcatgattgccatgggccactttatttacatgaagacaactggagaacgactaagaccaaattatggaaaataagaaaaagctgttgctggcaagaccatcaagactgttctgacaccctgtccccatcatccctgactgagtactctgacatcacggaaagtgttgaacctgggaccctgaggaattcaccaggagtaaatggctttcatgtatttgtgttgtttgctttttcttacgtgattttatgttcatagagctagaaagtagcatctcatgatggcccaacaatctctgttgccagttaaaggttccttggagatgaggctgaataattatgaacctcaccttctctgattgtgggagtggcaagaactggggagacgtcctccataagtggagcacagggtatggggttaaagcatgacagggagagtcttctgtgcctggtttcttctcctctatctcataatgcattatgggcccgaggaataggggagggttaataagactccaaccctaatggcccaacagggaaattctcattttggtcgatgatattctgatggactggtttggtcttaataccagtcaaccgttgtccttctggaaatatacatatatgaaataaataaaggtaacacttgcagccaagttccctggtttctgggacttcccatcttacccattccttttccagggcttccagtgtcctgatacttctggagggtggttcatactccaaattagattctggggagttacagnagtaattttttccttggnagggaaagggaagggttgggggatggatttaggcagnagttccggtggaaacattatttgcactctgagataagatccaagcctggagtttgcagaagatactgtcctaataagcaggcatttctaaaccaagtatctaagcctaagcacagcttgtcctgggtgaaatgtctgccacaaaagatagtttctcctagctcagacttaaccatttataaaggttggtaaaatactggcagtgacaacaaattgactttttaattttcttatttgcattattccaataaatgaaaatctgtcagagttcgtacat

SEQ ID NO: 425711 - DNA, 4448 bp, Homo sapiens
  misc_feature (4117)..(4117): n is a, c, g, or t
  misc_feature (4135)..(4135): n is a, c, g, or t
  misc_feature (4172)..(4172): n is a, c, g, or t
ccgacccgctaggccccgcgcggctcggatccggcggcgctgtttcggtcgggagtgggtgggagagaagccggggcaggggaggagccgccggagctgtcggagccgtgacacccagggcagctacactcagaagccacaaggaatgctagtggagcccctcatccctcccagcttctcttccaagctgccccgtggggcttgatccaggaagctacttcagaaagtagacaatcattccaagggtacaacaaggtttaccacaatgtgagggactcagccattgcaaattgtacagatgagggcccttggaagaaaatcctcgctgtgtccaggctgaggcggggggctaatgacagtgtgagctctagatggtgtgagaccaccccaaagccaagaaatggctacagccgtggaaccagaggaccaggatctttgggaagaagagggaattctgatggtgaaactggaagatgatttcacctgtcggccagagtctgtcttacagagggatgacccggtgctggaaacctcccaccagaacttccgacgcttccgctaccaggaggcagcaagccctagagaagctctcatcagactccgagaactttgtcaccagtggctgagaccagagaggcggacaaaggagcagatcctagagctgcttgtgctggaacaatttcttaccgtcctacctggagaactacagagctgggtgcggggccaacggccagaaagtggcgaggaggcagtgacgctggtggagggtttgcagaaacaacccaggagaccaaggcggtgggtgactgtccatgttcacggccaggaagtcctgtcagaggagacggtgcatttaggagcggagcctgagtcacctaatgagctgcaggatcctgtgcaaagctcgacccccgagcagtctcctgaggaaaccacacagagcccagatctgggggcaccggcagagcagcgtccacaccaggaagaggagctccagaccctgcaggagagcgaggtcccagtgcccgaggacccagaccttcctgcagagaggagctctggagactcagagatggttgctcttcttactgctctgtcacagggactggtaacgttcaaggatgtggccgtatgcttttcccaggaccagtggagtgatctggacccaacacagaaagagttctatggagaatatgtcttggaagaagactgtggaattgttgtctctctgtcatttccaatccccagacctgatgagatctcccaggttagagaggaagagccttgggtcccagatatccaagagcctcaggagactcaagagccagaaatcctgagttttacctacacaggagataggagtaaagatgaggaagagtgtctggagcaggaagatctgagtttggaggatatacacaggcctgttttgggagaaccagaaattcaccagactccagattgggaaatagtctttgaggacaatccaggtagacttaatgaaagaagatttggtactaatatttctcaagtgaatagttttgtgaaccttcgggaaactacacccgtccaccccctgttagggaggcatcatgactgttctgtgtgtggaaagagcttcacttgtaactcccaccttgttagacacctgaggactcacacaggagagaaaccctataaatgtatggaatgtggaaaaagttacacacgaagctcacatcttgccaggcaccaaaaggttcacaagatgaacgcgccttacaaatatcccctaaaccggaagaatttggaagagacctcccctgtgacacaggctgagagaactccatcagtggagaaaccctatagatgtgatgattgcggaaagcacttccgctggacttcagaccttgtcagacatcagaggacacatactggagaaaaacccttcttttgtactatttgtggcaaaagcttcagccagaaatctgtgttaacaacacaccaaagaatccacctgggaggcaaaccctacttgtgtggagagtgtggtgaggacttcagtgaacacaggcggtacctggcgcaccggaagacgcacgctgctgaggaactctacctctgcagcgagtgcgggcgctgcttcacccacagcgcagcgttcgccaagcacttgagaggacacgcctcagtgaggccctgccgatgcaacgaatgtgggaagagcttcagtcgcagggaccacctcgtcaggcatcagagaacacacactggggagaaaccattcacgtgccctacctgtggaaaaagcttcagcagaggatatcacttaattaggcatcagaggacccactcagaaaagacctcctagctaggtccccatgtgaggagatctgctttcagccctcacctaagggaggtgaggaagaggaaaagccctcttgtcagcctgggaagaccttttcgagggagtctccctgacctgctcagatctgacattacctcttcctgcaactaaacacgagcctgggcagaacctctcagccttcctctacgccttgaggggatgtttcatccaaagtacaacctgaattgaggcttctccttcactggagtgcacctgcctctacctcatgggtataaagtaggagaactaagagacttaagaggtcgtggttcctatatcgtccaaaaaataggctgttacatatcctaaagactgctcaacagcttcaagttgaaagtggccaaggacagccccttaggtttgggaagggacgagcctgaaggattctgtctttactggggtcaaatcttaaagcacacagctctggactcaagacaggaggtttgcgtcctgatggctttgccacacattcacaggataactgcatagatccctcgctgtctgattcacttcttaccatgcactttcctttgatgctgaggagaaatggaagtgggcgaaaaatctcaaggctgcttcatgtggaccttgtcaagctgctccctcccccagcgtcaaattgttatcaggtgccaaacactgctagaaaggagggcctagtcagaagcctctttccatacgagttttggttttgtttttaatatttttttctattaaaatactcatgcatttaaccttcccgttattcaaccagtctcttggttgcatccctagcacttctactacaagtgagatggtagtgtttgagtgcttattgagtaaagcataattcggtcataatgaaatcgttcacattccctcatatgcacaagcccaccaaccccttcacaccccccttcacaggggtcgtatgagtaaggggatttggaaactgtcaacttacaaaggcactataacaattacagaatcatgattgccatgggccactttatttacatgaagacaactggagaacgactaagaccaaattatggaaaataagaaaaagctgttgctggcaagaccatcaagactgttctgacaccctgtccccatcatccctgactgagtactctgacatcacggaaagtgttgaacctgggaccctgaggaattcaccaggagtaaatggctttcatgtatttgtgttgtttgctttttcttacgtgattttatgttcatagagctagaaagtagcatctcatgatggcccaacaatctctgttgccagttaaaggttccttggagatgaggctgaataattatgaacctcaccttctctgattgtgggagtggcaagaactggggagacgtcctccataagtggagcacagggtatggggttaaagcatgacagggagagtcttctgtgcctggtttcttctcctctatctcataatgcattatgggcccgaggaataggggagggttaataagactccaaccctaatggcccaacagggaaattctcattttggtcgatgatattctgatggactggtttggtcttaataccagtcaaccgttgtccttctggaaatatacatatatgaaataaataaaggtaacacttgcagccaagttccctggtttctgggacttcccatcttacccattccttttccagggcttccagtgtcctgatacttctggagggtggttcatactccaaattagattctggggagttacagnagtaattttttccttggnagggaaagggaagggttgggggatggatttaggcagnagttccggtggaaacattatttgcactctgagataagatccaagcctggagtttgcagaagatactgtcctaataagcaggcatttctaaaccaagtatctaagcctaagcacagcttgtcctgggtgaaatgtctgccacaaaagatagtttctcctagctcagacttaaccatttataaaggttggtaaaatactggcagtgacaacaaattgactttttaattttcttatttgcattattccaataaatgaaaatctgtcagagttcgtacat

SEQ ID NO: 425712 - DNA, 3806 bp, Homo sapiens
ccgacccgctaggccccgcgcggctcggatccggcggcgctgtttcggtcgggagtgggtgggagagaagccggggcaggggaggagccgccggagctgtcggagccggcccttggaagaaaatcctcgctgtgtccaggctgaggcggggggctaatgacagtgtgagctctagatggtgtgagaccaccccaaagccaagaaatggctacagccgtggaaccagaggaccaggatctttgggaagaagagggaattctgatggtgaaactggaagatgatttcacctgtcggccagagtctgtcttacagagggatgacccggtgctggaaacctcccaccagaacttccgacgcttccgctaccaggaggcagcaagccctagagaagctctcatcagactccgagaactttgtcaccagtggctgagaccagagaggcggacaaaggagcagatcctagagctgcttgtgctggaacaatttcttaccgtcctacctggagaactacagagctgggtgcggggccaacggccagaaagtggcgaggaggcagtgacgctggtggagggtttgcagaaacaacccaggagaccaaggcggtgggtgactgtccatgttcacggccaggaagtcctgtcagaggagacggtgcatttaggagcggagcctgagtcacctaatgagctgcaggatcctgtgcaaagctcgacccccgagcagtctcctgaggaaaccacacagagcccagatctgggggcaccggcagagcagcgtccacaccaggaagaggagctccagaccctgcaggagagcgaggtcccagtgcccgaggacccagaccttcctgcagagaggagctctggagactcagagatggttgctcttcttactgctctgtcacagggactggtaacgttcaaggatgtggccgtatgcttttcccaggaccagtggagtgatctggacccaacacagaaagagttctatggagaatatgtcttggaagaagactgtggaattgttgtctctctgtcatttccaatccccagacctgatgagatctcccaggttagagaggaagagccttgggtcccagatatccaagagcctcaggagactcaagagccagaaatcctgagttttacctacacaggagataggagtaaagatgaggaagagtgtctggagcaggaagatctgagtttggaggatatacacaggcctgttttgggagaaccagaaattcaccagactccagattgggaaatagtctttgaggacaatccaggtagacttaatgaaagaagatttggtactaatatttctcaagtgaatagttttgtgaaccttcgggaaactacacccgtccaccccctgttagggaggcatcatgactgttctgtgtgtggaaagagcttcacttgtaactcccaccttgttagacacctgaggactcacacaggagagaaaccctataaatgtatggaatgtggaaaaagttacacacgaagctcacatcttgccaggcaccaaaaggttcacaagatgaacgcgccttacaaatatcccctaaaccggaagaatttggaagagacctcccctgtgacacaggctgagagaactccatcagtggagaaaccctatagatgtgatgattgcggaaagcacttccgctggacttcagaccttgtcagacatcagaggacacatactggagaaaaacccttcttttgtactatttgtggcaaaagcttcagccagaaatctgtgttaacaacacaccaaagaatccacctgggaggcaaaccctacttgtgtggagagtgtggtgaggacttcagtgaacacaggcggtacctggcgcaccggaagacgcacgctgctgaggaactctacctctgcagcgagtgcgggcgctgcttcacccacagcgcagcgttcgccaagcacttgagaggacacgcctcagtgaggccctgccgatgcaacgaatgtgggaagagcttcagtcgcagggaccacctcgtcaggcatcagagaacacacactggggagaaaccattcacgtgccctacctgtggaaaaagcttcagcagaggatatcacttaattaggcatcagaggacccactcagaaaagacctcctagctaggtccccatgtgaggagatctgctttcagccctcacctaagggaggtgaggaagaggaaaagccctcttgtcagcctgggaagaccttttcgagggagtctccctgacctgctcagatctgacattacctcttcctgcaactaaacacgagcctgggcagaacctctcagccttcctctacgccttgaggggatgtttcatccaaagtacaacctgaattgaggcttctccttcactggagtgcacctgcctctacctcatgggtataaagtaggagaactaagagacttaagaggtcgtggttcctatatcgtccaaaaaataggctgttacatatcctaaagactgctcaacagcttcaagttgaaagtggccaaggacagccccttaggtttgggaagggacgagcctgaaggattctgtctttactggggtcaaatcttaaagcacacagctctggactcaagacaggaggtttgcgtcctgatggctttgccacacattcacaggataactgcatagatccctcgctgtctgattcacttcttaccatgcactttcctttgatgctgaggagaaatggaagtgggcgaaaaatctcaaggctgcttcatgtggaccttgtcaagctgctccctcccccagcgtcaaattgttatcaggtgccaaacactgctagaaaggagggcctagtcagaagcctctttccatacgagttttggttttgtttttaatatttttttctattaaaatactcatgcatttaaccttcccgttattcaaccagtctcttggttgcatccctagcacttctactacaagtgagatggtagtgtttgagtgcttattgagtaaagcataattcggtcataatgaaatcgttcacattccctcatatgcacaagcccaccaaccccttcacaccccccttcacaggggtcgtatgagtaaggggatttggaaactgtcaacttacaaaggcactataacaattacagaatcatgattgccatgggccactttatttacatgaagacaactggagaacgactaagaccaaattatggaaaataagaaaaagctgttgctggcaagaccatcaagactgttctgacaccctgtccccatcatccctgactgagtactctgacatcacggaaagtgttgaacctgggaccctgaggaattcaccaggagtaaatggctttcatgtatttgtgttgtttgctttttcttacgtgattttatgttcatagagctagaaagtagcatctcatgatggcccaacaatctctgttgccagttaaaggttccttggagatgaggctgaataattatgaacctcaccttctctgattgtgggagtggcaagaactggggagacgtcctccataagtggagcacagggtatggggttaaagcatgacagggagagtcttctgtgcctggtttcttctcctctatctcataatgcattatgggcccgaggaataggggagggttaataagactccaaccctaatggcccaacagggaaattctcattttggtcgatgatattctgatggactggtttggtcttaataccagtcaaccgttgtccttctggaaatatacatatatgaaataaataaaggtaacacttgcagcca

SEQ ID NO: 425713 - DNA, 4488 bp, Homo sapiens
  misc_feature (4157)..(4157): n is a, c, g, or t
  misc_feature (4175)..(4175): n is a, c, g, or t
  misc_feature (4212)..(4212): n is a, c, g, or t
ccgacccgctaggccccgcgcggctcggatccggcggcgctgtttcggtcgggagtgggtgggagagaagccggggcaggggaggagccgccggagctgtcggagccgtgacacccagggcagctacactcagaagccacaaggaatgctagtggagcccctcatccctcccagcttctcttccaagctgccccgtggggcttgatccaggaagctacttcagaaagctataccctttttgtactctgtgtatatactatattgcagtagacaatcattccaagggtacaacaaggtttaccacaatgtgagggactcagccattgcaaattgtacagatgagggcccttggaagaaaatcctcgctgtgtccaggctgaggcggggggctaatgacagtgtgagctctagatggtgtgagaccaccccaaagccaagaaatggctacagccgtggaaccagaggaccaggatctttgggaagaagagggaattctgatggtgaaactggaagatgatttcacctgtcggccagagtctgtcttacagagggatgacccggtgctggaaacctcccaccagaacttccgacgcttccgctaccaggaggcagcaagccctagagaagctctcatcagactccgagaactttgtcaccagtggctgagaccagagaggcggacaaaggagcagatcctagagctgcttgtgctggaacaatttcttaccgtcctacctggagaactacagagctgggtgcggggccaacggccagaaagtggcgaggaggcagtgacgctggtggagggtttgcagaaacaacccaggagaccaaggcggtgggtgactgtccatgttcacggccaggaagtcctgtcagaggagacggtgcatttaggagcggagcctgagtcacctaatgagctgcaggatcctgtgcaaagctcgacccccgagcagtctcctgaggaaaccacacagagcccagatctgggggcaccggcagagcagcgtccacaccaggaagaggagctccagaccctgcaggagagcgaggtcccagtgcccgaggacccagaccttcctgcagagaggagctctggagactcagagatggttgctcttcttactgctctgtcacagggactggtaacgttcaaggatgtggccgtatgcttttcccaggaccagtggagtgatctggacccaacacagaaagagttctatggagaatatgtcttggaagaagactgtggaattgttgtctctctgtcatttccaatccccagacctgatgagatctcccaggttagagaggaagagccttgggtcccagatatccaagagcctcaggagactcaagagccagaaatcctgagttttacctacacaggagataggagtaaagatgaggaagagtgtctggagcaggaagatctgagtttggaggatatacacaggcctgttttgggagaaccagaaattcaccagactccagattgggaaatagtctttgaggacaatccaggtagacttaatgaaagaagatttggtactaatatttctcaagtgaatagttttgtgaaccttcgggaaactacacccgtccaccccctgttagggaggcatcatgactgttctgtgtgtggaaagagcttcacttgtaactcccaccttgttagacacctgaggactcacacaggagagaaaccctataaatgtatggaatgtggaaaaagttacacacgaagctcacatcttgccaggcaccaaaaggttcacaagatgaacgcgccttacaaatatcccctaaaccggaagaatttggaagagacctcccctgtgacacaggctgagagaactccatcagtggagaaaccctatagatgtgatgattgcggaaagcacttccgctggacttcagaccttgtcagacatcagaggacacatactggagaaaaacccttcttttgtactatttgtggcaaaagcttcagccagaaatctgtgttaacaacacaccaaagaatccacctgggaggcaaaccctacttgtgtggagagtgtggtgaggacttcagtgaacacaggcggtacctggcgcaccggaagacgcacgctgctgaggaactctacctctgcagcgagtgcgggcgctgcttcacccacagcgcagcgttcgccaagcacttgagaggacacgcctcagtgaggccctgccgatgcaacgaatgtgggaagagcttcagtcgcagggaccacctcgtcaggcatcagagaacacacactggggagaaaccattcacgtgccctacctgtggaaaaagcttcagcagaggatatcacttaattaggcatcagaggacccactcagaaaagacctcctagctaggtccccatgtgaggagatctgctttcagccctcacctaagggaggtgaggaagaggaaaagccctcttgtcagcctgggaagaccttttcgagggagtctccctgacctgctcagatctgacattacctcttcctgcaactaaacacgagcctgggcagaacctctcagccttcctctacgccttgaggggatgtttcatccaaagtacaacctgaattgaggcttctccttcactggagtgcacctgcctctacctcatgggtataaagtaggagaactaagagacttaagaggtcgtggttcctatatcgtccaaaaaataggctgttacatatcctaaagactgctcaacagcttcaagttgaaagtggccaaggacagccccttaggtttgggaagggacgagcctgaaggattctgtctttactggggtcaaatcttaaagcacacagctctggactcaagacaggaggtttgcgtcctgatggctttgccacacattcacaggataactgcatagatccctcgctgtctgattcacttcttaccatgcactttcctttgatgctgaggagaaatggaagtgggcgaaaaatctcaaggctgcttcatgtggaccttgtcaagctgctccctcccccagcgtcaaattgttatcaggtgccaaacactgctagaaaggagggcctagtcagaagcctctttccatacgagttttggttttgtttttaatatttttttctattaaaatactcatgcatttaaccttcccgttattcaaccagtctcttggttgcatccctagcacttctactacaagtgagatggtagtgtttgagtgcttattgagtaaagcataattcggtcataatgaaatcgttcacattccctcatatgcacaagcccaccaaccccttcacaccccccttcacaggggtcgtatgagtaaggggatttggaaactgtcaacttacaaaggcactataacaattacagaatcatgattgccatgggccactttatttacatgaagacaactggagaacgactaagaccaaattatggaaaataagaaaaagctgttgctggcaagaccatcaagactgttctgacaccctgtccccatcatccctgactgagtactctgacatcacggaaagtgttgaacctgggaccctgaggaattcaccaggagtaaatggctttcatgtatttgtgttgtttgctttttcttacgtgattttatgttcatagagctagaaagtagcatctcatgatggcccaacaatctctgttgccagttaaaggttccttggagatgaggctgaataattatgaacctcaccttctctgattgtgggagtggcaagaactggggagacgtcctccataagtggagcacagggtatggggttaaagcatgacagggagagtcttctgtgcctggtttcttctcctctatctcataatgcattatgggcccgaggaataggggagggttaataagactccaaccctaatggcccaacagggaaattctcattttggtcgatgatattctgatggactggtttggtcttaataccagtcaaccgttgtccttctggaaatatacatatatgaaataaataaaggtaacacttgcagccaagttccctggtttctgggacttcccatcttacccattccttttccagggcttccagtgtcctgatacttctggagggtggttcatactccaaattagattctggggagttacagnagtaattttttccttggnagggaaagggaagggttgggggatggatttaggcagnagttccggtggaaacattatttgcactctgagataagatccaagcctggagtttgcagaagatactgtcctaataagcaggcatttctaaaccaagtatctaagcctaagcacagcttgtcctgggtgaaatgtctgccacaaaagatagtttctcctagctcagacttaaccatttataaaggttggtaaaatactggcagtgacaacaaattgactttttaattttcttatttgcattattccaataaatgaaaatctgtcagagttcgtacat

SEQ ID NO: 425714 - DNA, 4372 bp, Homo sapiens
  misc_feature (4041)..(4041): n is a, c, g, or t
  misc_feature (4059)..(4059): n is a, c, g, or t
  misc_feature (4096)..(4096): n is a, c, g, or t
ccgacccgctaggccccgcgcggctcggatccggcggcgctgtttcggtcgggagtgggtgggagagaagccggggcaggggaggagccgccggagctgtcggagccgtgacacccagggcagctacactcagaagccacaaggaatgctagtggagcccctcatccctcccagcttctcttccaagctgccccgtggggcttgatccaggaagctacttcagaaagggcccttggaagaaaatcctcgctgtgtccaggctgaggcggggggctaatgacagtgtgagctctagatggtgtgagaccaccccaaagccaagaaatggctacagccgtggaaccagaggaccaggatctttgggaagaagagggaattctgatggtgaaactggaagatgatttcacctgtcggccagagtctgtcttacagagggatgacccggtgctggaaacctcccaccagaacttccgacgcttccgctaccaggaggcagcaagccctagagaagctctcatcagactccgagaactttgtcaccagtggctgagaccagagaggcggacaaaggagcagatcctagagctgcttgtgctggaacaatttcttaccgtcctacctggagaactacagagctgggtgcggggccaacggccagaaagtggcgaggaggcagtgacgctggtggagggtttgcagaaacaacccaggagaccaaggcggtgggtgactgtccatgttcacggccaggaagtcctgtcagaggagacggtgcatttaggagcggagcctgagtcacctaatgagctgcaggatcctgtgcaaagctcgacccccgagcagtctcctgaggaaaccacacagagcccagatctgggggcaccggcagagcagcgtccacaccaggaagaggagctccagaccctgcaggagagcgaggtcccagtgcccgaggacccagaccttcctgcagagaggagctctggagactcagagatggttgctcttcttactgctctgtcacagggactggtaacgttcaaggatgtggccgtatgcttttcccaggaccagtggagtgatctggacccaacacagaaagagttctatggagaatatgtcttggaagaagactgtggaattgttgtctctctgtcatttccaatccccagacctgatgagatctcccaggttagagaggaagagccttgggtcccagatatccaagagcctcaggagactcaagagccagaaatcctgagttttacctacacaggagataggagtaaagatgaggaagagtgtctggagcaggaagatctgagtttggaggatatacacaggcctgttttgggagaaccagaaattcaccagactccagattgggaaatagtctttgaggacaatccaggtagacttaatgaaagaagatttggtactaatatttctcaagtgaatagttttgtgaaccttcgggaaactacacccgtccaccccctgttagggaggcatcatgactgttctgtgtgtggaaagagcttcacttgtaactcccaccttgttagacacctgaggactcacacaggagagaaaccctataaatgtatggaatgtggaaaaagttacacacgaagctcacatcttgccaggcaccaaaaggttcacaagatgaacgcgccttacaaatatcccctaaaccggaagaatttggaagagacctcccctgtgacacaggctgagagaactccatcagtggagaaaccctatagatgtgatgattgcggaaagcacttccgctggacttcagaccttgtcagacatcagaggacacatactggagaaaaacccttcttttgtactatttgtggcaaaagcttcagccagaaatctgtgttaacaacacaccaaagaatccacctgggaggcaaaccctacttgtgtggagagtgtggtgaggacttcagtgaacacaggcggtacctggcgcaccggaagacgcacgctgctgaggaactctacctctgcagcgagtgcgggcgctgcttcacccacagcgcagcgttcgccaagcacttgagaggacacgcctcagtgaggccctgccgatgcaacgaatgtgggaagagcttcagtcgcagggaccacctcgtcaggcatcagagaacacacactggggagaaaccattcacgtgccctacctgtggaaaaagcttcagcagaggatatcacttaattaggcatcagaggacccactcagaaaagacctcctagctaggtccccatgtgaggagatctgctttcagccctcacctaagggaggtgaggaagaggaaaagccctcttgtcagcctgggaagaccttttcgagggagtctccctgacctgctcagatctgacattacctcttcctgcaactaaacacgagcctgggcagaacctctcagccttcctctacgccttgaggggatgtttcatccaaagtacaacctgaattgaggcttctccttcactggagtgcacctgcctctacctcatgggtataaagtaggagaactaagagacttaagaggtcgtggttcctatatcgtccaaaaaataggctgttacatatcctaaagactgctcaacagcttcaagttgaaagtggccaaggacagccccttaggtttgggaagggacgagcctgaaggattctgtctttactggggtcaaatcttaaagcacacagctctggactcaagacaggaggtttgcgtcctgatggctttgccacacattcacaggataactgcatagatccctcgctgtctgattcacttcttaccatgcactttcctttgatgctgaggagaaatggaagtgggcgaaaaatctcaaggctgcttcatgtggaccttgtcaagctgctccctcccccagcgtcaaattgttatcaggtgccaaacactgctagaaaggagggcctagtcagaagcctctttccatacgagttttggttttgtttttaatatttttttctattaaaatactcatgcatttaaccttcccgttattcaaccagtctcttggttgcatccctagcacttctactacaagtgagatggtagtgtttgagtgcttattgagtaaagcataattcggtcataatgaaatcgttcacattccctcatatgcacaagcccaccaaccccttcacaccccccttcacaggggtcgtatgagtaaggggatttggaaactgtcaacttacaaaggcactataacaattacagaatcatgattgccatgggccactttatttacatgaagacaactggagaacgactaagaccaaattatggaaaataagaaaaagctgttgctggcaagaccatcaagactgttctgacaccctgtccccatcatccctgactgagtactctgacatcacggaaagtgttgaacctgggaccctgaggaattcaccaggagtaaatggctttcatgtatttgtgttgtttgctttttcttacgtgattttatgttcatagagctagaaagtagcatctcatgatggcccaacaatctctgttgccagttaaaggttccttggagatgaggctgaataattatgaacctcaccttctctgattgtgggagtggcaagaactggggagacgtcctccataagtggagcacagggtatggggttaaagcatgacagggagagtcttctgtgcctggtttcttctcctctatctcataatgcattatgggcccgaggaataggggagggttaataagactccaaccctaatggcccaacagggaaattctcattttggtcgatgatattctgatggactggtttggtcttaataccagtcaaccgttgtccttctggaaatatacatatatgaaataaataaaggtaacacttgcagccaagttccctggtttctgggacttcccatcttacccattccttttccagggcttccagtgtcctgatacttctggagggtggttcatactccaaattagattctggggagttacagnagtaattttttccttggnagggaaagggaagggttgggggatggatttaggcagnagttccggtggaaacattatttgcactctgagataagatccaagcctggagtttgcagaagatactgtcctaataagcaggcatttctaaaccaagtatctaagcctaagcacagcttgtcctgggtgaaatgtctgccacaaaagatagtttctcctagctcagacttaaccatttataaaggttggtaaaatactggcagtgacaacaaattgactttttaattttcttatttgcattattccaataaatgaaaatctgtcagagttcgtacat

SEQ ID NO: 425715 - DNA, 606 bp, Homo sapiens
ccgacccgctaggccccgcgcggctcggatccggcggcgctgtttcggtcgggagtgggtgggagagaagccggggcaggggaggagccgccggagctgtcggagccgtgacacccagggcagctacactcagaagccacaaggaatgctagtggagcccctcatccctcccagcttctcttccaagctgccccgtggggcttgatccaggaagctacttcagaaagctataccctttttgtactctgtgtatatactatattgcagtagacaatcattccaagggtacaacaaggtttaccacaatgtgagggactcagccattgcaaattgtacagatgaggcggggatcccatcccttatcatctcctcaaatgctaaaggacccttgagcaaagccaggaggaagtcatctagacgtgaaacagggagtatccacacaggctgtgttaatgacaaagctaaaaacatagtaaatgacttttgaatttactgctgttatgaattatctatagcaacacctccggtcagctctgttatatatgttattgcgttatttcccattaaatgatggttcctctgactatctgattggcattgactatg

SEQ ID NO: 425716 - DNA, 3527 bp, Homo sapiens
ccgcccctcggcgtgaccccctcgcccccgtcgcacacggcggggcggttcagcacccaggtgcgcaaggagggcctcacccctgcccgcggcctcccacgccctccttgggcctctcctttcgacccccttaccctctccctgggagactctaccagaccttcgaggctgcgtgtcccagtcagctaaaaaggaggccccgcccgcggcacctggtagctcctcgggcgctgcgggttcgacgcggcaacagcagctgttttctctcctggattcgtatgaggagactgtccttcctgtttcgcagatgaggaaactgaggcttagagaagtttggcaaattggctaagttcctacagctaattgtgggattagtgatatgcttttctaaagagtagaaaagtcgaagatgtctagacagaacttagtggctttgacagtgactacccttctgggtgtggctgtaggggggtttgtcctctggaaaggcatccagcgccgccgaaggagtaaaacgagtcctgtgacccaacagccacagcagaaagtgctgggcagtagagagctgccccctccagaagatgatcagctgcactccagtgcccccagatcctcgtggaaggaacggatccttaaagcaaaggtggtgacggtgtctcaggaggcagagtgggatcaaatcgagcccttgcttagaagtgaattagaagattttccagtacttggaattgactgtgagtgggtaaatttggaaggcaaagccagccctctgtcacttctacaaatggcctccccaagtggcctgtgtgtcttggttcgcctgcccaagctaatctgtggaggaaaaacactaccaagaacgttattggatattttggcagatggcaccattttgaaagttggagtgggatgctcagaagatgccagcaagcttctgcaggattatggcctcgttgttagggggtgcctggacctccgatacctagccatgcggcagagaaacaatttgctctgtaatgggcttagcctgaagtccctcgctgagactgttttgaactttccccttgacaagtcccttctacttcgttgcagcaactgggatgctgagactctcacagaggaccaggtaatttatgctgccagggatgcccagatttcagtggctctctttcttcatcttcttggataccctttctctaggaattcacctggagaaaaaaacgatgaccacagtagctggagaaaagtcttggaaaaatgccagggtgtggtcgacatcccatttcgaagcaaaggaatgagcagattgggagaagaggttaatggggaagcaacagaatctcagcagaagccaagaaataagaagtctaagatggatgggatggtgccaggcaaccaccaagggagagaccccagaaaacataaaagaaagcctctgggggtgggctattctgccagaaaatcacctctttatgataactgctttctccatgctcctgatggacagcccctctgcacttgtgatagaagaaaagctcagtggtacctggacaaaggcattggtgagctggtgagtgaagagccctttgtggtgaagctacggtttgaacctgcaggaaggcccgaatctcctggagactattacttgatggttaaagagaacctgtgtgtagtgtgtggcaagagagactcctacattcggaagaacgtgattccacatgagtaccggaagcacttccccatcgagatgaaggaccacaactcccacgatgtgctgctgctctgcacctcctgccatgccatttccaactactatgacaaccatctgaagcagcagctggccaaggagttccaggcccccatcggctctgaggagggcttgcgcctgctggaagatcctgagcgccggcaggtgcgttctggggccagggccctgctcaacgcggagagcctgcctactcagcgaaaggaggagctgctgcaagcactcagagagttttataacacagacgtggtcacagaggagatgcttcaagaggctgccagcctggagaccagccaatgaaaactatgttcctcacgggctgaaggtggtgcagtgtcacagccagggtggcctgcgctccctcatgcagctggagagccgctggcgtcagcacttcctggactccatgcagcccaagcacctgccccagcagtggtcagtggaccacaaccatcagaagctgctccggaaattcggggaagatcttcccatccagctgtcttgatagctgctttcctcccagttaggacaagtgggaagctggagccaaggttgaagagtcacctcttcccattttagtacatcattaattgtcaaagcctgtgtgacacaactcagaatactaacctagactaatcccaggatgcttctgctggagcaaagatattgtttgaaggagagtttatggttttggattttaaacgggcagggtcttttttcctctcatttttgtggacaagagaggccttcgcctttatttttactctccctcttctgctgtccctgtgcagaggaaaaatgaagaattctcccagaagtgacttgtcaagacttaaaaaaaatgtttttaatgcatttcttccttgtctagtgcctcggtttatctctaacaggggctgtccagtatatcggtcctgttaggaggggagaaaaagttcttccaaaggctggagaagtgaacaaggagtcaaatttattttcccaattcaacttcataattatcatttctttggcttcatgctctcccgtaactcatgtggttgggatccatcccatctgggtcacttcagtctacttcacgtacttgaaaaggctttcctttacacttccaggaccaaacagcaacttcctgccacacacttccaccctatcactgggagaaatccttttctggacatgagcctttgacctgggtggggcagaaagaaccacaaactccatctcccaatagaactttgaaattcactcagcttttcctttcatgctgtttgttgcctgcttgttgcactcctcctgccccagaactgcaagatttttagcttcacccctttctgagagtaatgttatcttttatcagaatcagtatcagttcccctgtattctgtgcttcatcgaatttgcaagactgacctcttttaagcatttaattcactcccagagtcatctggtcaggttgcaatatgaggacttctctgtctcctctgaagcctgggacactgagcttacttaatacattagatgttcaaaagaggagcgttgtttcatctttcaaaatgttaggccattactttgagtataaaatcgacttattaatgattagtaatttttctaaagtattgggaaaactttcttattttataagatcttaacaagcttaaaaaagaattttatgaccagaatccaacaagagctctattttggaattgtgcccaagttggtgatgtttactctaaaattaataataaaactacttgtaagcaca

SEQ ID NO: 425717 - DNA, 5184 bp, Homo sapiens
ccgcccctcggcgtgaccccctcgcccccgtcgcacacggcggggcggttcagcacccaggtgcgcaaggagggcctcacccctgcccgcggcctcccacgccctccttgggcctctcctttcgacccccttaccctctccctgggagactctaccagaccttcgaggctgcgtgtcccagtcagctaaaaaggaggccccgcccgcggcacctggtagctcctcgggcgctgcgggttcgacgcggcaacagcagctgttttctctcctggattcgtatgaggagactgtccttcctgtttcgcagatgaggaaactgaggcttagagaagtttggcaaattggctaagttcctacagctaattgtgggattagtgatatgcttttctaaagagtagaaaagtcgaagatgtctagacagaacttagtggctttgacagtgactacccttctgggtgtggctgtaggggggtttgtcctctggaaaggcatccagcgccgccgaaggagtaaaacgagtcctgtgacccaacagccacagcagaaagtgctgggcagtagagagctgccccctccagaagatgatcagctgcactccagtgcccccagatcctcgtggaaggaacggatccttaaagcaaaggtggtgacggtgtctcaggaggcagagtgggatcaaatcgagcccttgcttagaagtgaattagaagattttccagtacttggaattgactgtgagtgggtaaatttggaaggcaaagccagccctctgtcacttctacaaatggcctccccaagtggcctgtgtgtcttggttcgcctgcccaagctaatctgtggaggaaaaacactaccaagaacgttattggatattttggcagatggcaccattttgaaagttggagtgggatgctcagaagatgccagcaagcttctgcaggattatggcctcgttgttagggggtgcctggacctccgatacctagccatgcggcagagaaacaatttgctctgtaatgggcttagcctgaagtccctcgctgagactgttttgaactttccccttgacaagtcccttctacttcgttgcagcaactgggatgctgagactctcacagaggaccaggtaatttatgctgccagggatgcccagatttcagtggctctctttcttcatcttcttggataccctttctctaggaattcacctggagaaaaaaacgatgaccacagtagctggagaaaagtcttggaaaaatgccagggtgtggtcgacatcccatttcgaagcaaaggaatgagcagattgggagaagaggttaatggggaagcaacagaatctcagcagaagccaagaaataagaagtctaagatggatgggatggtgccaggcaaccaccaagggagagaccccagaaaacataaaagaaagcctctgggggtgggctattctgccagaaaatcacctctttatgataactgctttctccatgctcctgatggacagcccctctgcacttgtgatagaagaaaagctcagtggtacctggacaaaggcattggtgagctggtgagtgaagagccctttgtggtgaagctacggtttgaacctgcaggaaggcccgaatctcctggagactattacttgatggttaaagagaacctgtgtgtagtgtgtggcaagagagactcctacattcggaagaacgtgattccacatgagtaccggaagcacttccccatcgagatgaaggaccacaactcccacgatgtgctgctgctctgcacctcctgccatgccatttccaactactatgacaaccatctgaagcagcagctggccaaggagttccaggcccccatcggctctgaggagggcttgcgcctgctggaagatcctgagcgccggcaggtgcgttctggggccagggccctgctcaacgcggagagcctgcctactcagcgaaaggaggagctgctgcaagcactcagagagttttataacacagacgtggtcacagaggagatgcttcaagaggctgccagcctggagaccagccaatgaaaactatgttcctcacgggctgaaggtggtgcagtgtcacagccagggtggcctgcgctccctcatgcagctggagagccgctggcgtcagcacttcctggactccatgcagcccaagcacctgccccagcagtggtcagtggaccacaaccatcagaagctgctccggaaattcggggaagatcttcccatccagctgtcttgatagctgctttcctcccagttaggacaagtgggaagctggagccaaggttgaagagtcacctcttcccattttagtacatcattaattgtcaaagcctgtgtgacacaactcagaatactaacctagactaatcccaggatgcttctgctggagcaaagatattgtttgaaggagagtttatggttttggattttaaacgggcagggtcttttttcctctcatttttgtggacaagagaggccttcgcctttatttttactctccctcttctgctgtccctgtgcagaggaaaaatgaagaattctcccagaagtgacttgtcaagacttaaaaaaaatgtttttaatgcatttcttccttgtctagtgcctcggtttatctctaacaggggctgtccagtatatcggtcctgttaggaggggagaaaaagttcttccaaaggctggagaagtgaacaaggagtcaaatttattttcccaattcaacttcataattatcatttctttggcttcatgctctcccgtaactcatgtggttgggatccatcccatctgggtcacttcagtctacttcacgtacttgaaaaggctttcctttacacttccaggaccaaacagcaacttcctgccacacacttccaccctatcactgggagaaatccttttctggacatgagcctttgacctgggtggggcagaaagaaccacaaactccatctcccaatagaactttgaaattcactcagcttttcctttcatgctgtttgttgcctgcttgttgcactcctcctgccccagaactgcaagatttttagcttcacccctttctgagagtaatgttatcttttatcagaatcagtatcagttcccctgtattctgtgcttcatcgaatttgcaagactgacctcttttaagcatttaattcactcccagagtcatctggtcaggttgcaatatgaggacttctctgtctcctctgaagcctgggacactgagcttacttaatacattagatgttcaaaagaggagcgttgtttcatctttcaaaatgttaggccattactttgagtataaaatcgacttattaatgattagtaatttttctaaagtattgggaaaactttcttattttataagatcttaacaagcttaaaaaagaattttatgaccagaatccaacaagagctctattttggaattgtgcccaagttggtgatgtttactctaaaattaataataaaactacttgtaagcacaaggctcactggatgtaaatgtaaaacttcgcgactttataaaactggcattcctaggggaggggctatttatcctacaggtccctgcctcctggcagtgccatggtatgtgtgcatggatataccagacacagtcaccatcggccatcagtagcagcccatgaacccacgtgcacatcctgcatcttgctcttctgacccttcattcccacttgtcttcaggcaggcatttctgggatctaaactagaaatccttgaaaacaaatagtaccagccactttgaggaatgtgcattcactgtagtgggttattatggggtctctgcctcctggctgtgttatgcggagcccaggagtggaggagagccgtggaaatagacagggagaggctggtacttgggttgtggtaatagtcaggcttgccacaagagggcactcatagatttgtttttatattcattcttgagaaaaaagcaactggttactgaacgtaactcatgacttatgtttcaaattttgcatagctgattttaagtcattttgatagctttgcaagaaaaatttttcctttgaaacaagggagtagggctgtttcattttctttccttctaatcctcatgccaagaggtgagaaacacttaaggtcatttaaggtgctagggaaagggttttcccatggagctttctgtgaggcgcagtaaaatagagccagcagcaaagtagaggaaaaagccagactgcgtcacacaagatttctcatccttttcaggagagagtcactgtgtagatttgaatcttttttctttgagtctgctttgaactttagcaggcttttcctaagactgacaattgtcgtcttaaatcagagatttgagggtagacttattttatggcaaatgtctatttttctgatataaaagtaacaatgctcattacagaagaatctaaacaaagaataaaaattagccatcttctctccatctaaaacagagctaaactttgctgatatgtttatgaatttcctttcagtattaaaaagtgcatataaggtgtatatttacacaaaattgaaggtcatacatagatacaggttggtatcctaactttaccctctcactgattaacatggtatcacgagtaacttcctatgtttttaaatctttgaaaatagatttctagtggttctaccttatccatccccacactgttgaaaattttggttgtttcagatacttttattatcaatgatgatgtgataaagtttcttgtatatatctctttggctctatctttggtaatttcttaagaatggaatcttagaattggactgtgaagagggggattcacattgctggggctaagtacaaattgacatcaccttttaggaatgaaatgcttctctttgaccctttagctccagtgtcccagcatagtcactgggcttcataggagtagcagtgagaggacagtgtcacagcaagggcctctctgcatgctccctgatcattgtgtttgcaggttcagcatttcttcttgagtccttcccttcttccaaccttattgcctcatttcccccttgtagtcaatgttttttggaaacactgtttattttaaaataaaaatgtaaaaaaaaggtaaaaaaataaaattttaaatttt

SEQ ID NO: 425718 - DNA, 4490 bp, Homo sapiens
agcgtgattgctgttgaagataactgtcagtctataccttgattctttgtaaatttggaaggcaaagccagccctctgtcacttctacaaatggcctccccaagtggcctgtgtgtcttggttcgcctgcccaagctaatctgtggaggaaaaacactaccaagaacgttattggatattttggcagatggcaccattttgaaagttggagtgggatgctcagaagatgccagcaagcttctgcaggattatggcctcgttgttagggggtgcctggacctccgatacctagccatgcggcagagaaacaatttgctctgtaatgggcttagcctgaagtccctcgctgagactgttttgaactttccccttgacaagtcccttctacttcgttgcagcaactgggatgctgagactctcacagaggaccaggtaatttatgctgccagggatgcccagatttcagtggctctctttcttcatcttcttggataccctttctctaggaattcacctggagaaaaaaacgatgaccacagtagctggagaaaagtcttggaaaaatgccagggtgtggtcgacatcccatttcgaagcaaaggaatgagcagattgggagaagaggttaatggggaagcaacagaatctcagcagaagccaagaaataagaagtctaagatggatgggatggtgccaggcaaccaccaagggagagaccccagaaaacataaaagaaagcctctgggggtgggctattctgccagaaaatcacctctttatgataactgctttctccatgctcctgatggacagcccctctgcacttgtgatagaagaaaagctcagtggtacctggacaaaggcattggtgagctggtgagtgaagagccctttgtggtgaagctacggtttgaacctgcaggaaggcccgaatctcctggagactattacttgatggttaaagagaacctgtgtgtagtgtgtggcaagagagactcctacattcggaagaacgtgattccacatgagtaccggaagcacttccccatcgagatgaaggaccacaactcccacgatgtgctgctgctctgcacctcctgccatgccatttccaactactatgacaaccatctgaagcagcagctggccaaggagttccaggcccccatcggctctgaggagggcttgcgcctgctggaagatcctgagcgccggcaggtgcgttctggggccagggccctgctcaacgcggagagcctgcctactcagcgaaaggaggagctgctgcaagcactcagagagttttataacacagacgtggtcacagaggagatgcttcaagaggctgccagcctggagaccagccaatgaaaactatgttcctcacgggctgaaggtggtgcagtgtcacagccagggtggcctgcgctccctcatgcagctggagagccgctggcgtcagcacttcctggactccatgcagcccaagcacctgccccagcagtggtcagtggaccacaaccatcagaagctgctccggaaattcggggaagatcttcccatccagctgtcttgatagctgctttcctcccagttaggacaagtgggaagctggagccaaggttgaagagtcacctcttcccattttagtacatcattaattgtcaaagcctgtgtgacacaactcagaatactaacctagactaatcccaggatgcttctgctggagcaaagatattgtttgaaggagagtttatggttttggattttaaacgggcagggtcttttttcctctcatttttgtggacaagagaggccttcgcctttatttttactctccctcttctgctgtccctgtgcagaggaaaaatgaagaattctcccagaagtgacttgtcaagacttaaaaaaaatgtttttaatgcatttcttccttgtctagtgcctcggtttatctctaacaggggctgtccagtatatcggtcctgttaggaggggagaaaaagttcttccaaaggctggagaagtgaacaaggagtcaaatttattttcccaattcaacttcataattatcatttctttggcttcatgctctcccgtaactcatgtggttgggatccatcccatctgggtcacttcagtctacttcacgtacttgaaaaggctttcctttacacttccaggaccaaacagcaacttcctgccacacacttccaccctatcactgggagaaatccttttctggacatgagcctttgacctgggtggggcagaaagaaccacaaactccatctcccaatagaactttgaaattcactcagcttttcctttcatgctgtttgttgcctgcttgttgcactcctcctgccccagaactgcaagatttttagcttcacccctttctgagagtaatgttatcttttatcagaatcagtatcagttcccctgtattctgtgcttcatcgaatttgcaagactgacctcttttaagcatttaattcactcccagagtcatctggtcaggttgcaatatgaggacttctctgtctcctctgaagcctgggacactgagcttacttaatacattagatgttcaaaagaggagcgttgtttcatctttcaaaatgttaggccattactttgagtataaaatcgacttattaatgattagtaatttttctaaagtattgggaaaactttcttattttataagatcttaacaagcttaaaaaagaattttatgaccagaatccaacaagagctctattttggaattgtgcccaagttggtgatgtttactctaaaattaataataaaactacttgtaagcacaaggctcactggatgtaaatgtaaaacttcgcgactttataaaactggcattcctaggggaggggctatttatcctacaggtccctgcctcctggcagtgccatggtatgtgtgcatggatataccagacacagtcaccatcggccatcagtagcagcccatgaacccacgtgcacatcctgcatcttgctcttctgacccttcattcccacttgtcttcaggcaggcatttctgggatctaaactagaaatccttgaaaacaaatagtaccagccactttgaggaatgtgcattcactgtagtgggttattatggggtctctgcctcctggctgtgttatgcggagcccaggagtggaggagagccgtggaaatagacagggagaggctggtacttgggttgtggtaatagtcaggcttgccacaagagggcactcatagatttgtttttatattcattcttgagaaaaaagcaactggttactgaacgtaactcatgacttatgtttcaaattttgcatagctgattttaagtcattttgatagctttgcaagaaaaatttttcctttgaaacaagggagtagggctgtttcattttctttccttctaatcctcatgccaagaggtgagaaacacttaaggtcatttaaggtgctagggaaagggttttcccatggagctttctgtgaggcgcagtaaaatagagccagcagcaaagtagaggaaaaagccagactgcgtcacacaagatttctcatccttttcaggagagagtcactgtgtagatttgaatcttttttctttgagtctgctttgaactttagcaggcttttcctaagactgacaattgtcgtcttaaatcagagatttgagggtagacttattttatggcaaatgtctatttttctgatataaaagtaacaatgctcattacagaagaatctaaacaaagaataaaaattagccatcttctctccatctaaaacagagctaaactttgctgatatgtttatgaatttcctttcagtattaaaaagtgcatataaggtgtatatttacacaaaattgaaggtcatacatagatacaggttggtatcctaactttaccctctcactgattaacatggtatcacgagtaacttcctatgtttttaaatctttgaaaatagatttctagtggttctaccttatccatccccacactgttgaaaattttggttgtttcagatacttttattatcaatgatgatgtgataaagtttcttgtatatatctctttggctctatctttggtaatttcttaagaatggaatcttagaattggactgtgaagagggggattcacattgctggggctaagtacaaattgacatcaccttttaggaatgaaatgcttctctttgaccctttagctccagtgtcccagcatagtcactgggcttcataggagtagcagtgagaggacagtgtcacagcaagggcctctctgcatgctccctgatcattgtgtttgcaggttcagcatttcttcttgagtccttcccttcttccaaccttattgcctcatttcccccttgtagtcaatgttttttggaaacactgtttattttaaaataaaaatgtaaaaaaaaggtaaaaaaataaaattttaaatttt

SEQ ID NO: 425719 - DNA, 3438 bp, Homo sapiens
agcattcttcatccattatcagctggatggtagtgcccctctcgtgggagctgaacattatgaagtggccttcctgtcagtagagctcagaaccctcaaataccttctgttgggattgcgagtcgtatgttcagactataaaaagggcagagataagaaagaggatgtttcgaaaacaccaaagtaactaaccctttaggagtccttcaacctccccagttacccttggcgcgcagcatttgaagctgtctgtgaggccatcctgcgcttgtttccctcagacactttgtttttcatgttttggcagaatctccaatgaaaactatgttcctcacgggctgaaggtggtgcagtgtcacagccagggtggcctgcgctccctcatgcagctggagagccgctggcgtcagcacttcctggactccatgcagcccaagcacctgccccagcagtggtcagtggaccacaaccatcagaagctgctccggaaattcggggaagatcttcccatccagctgtcttgatagctgctttcctcccagttaggacaagtgggaagctggagccaaggttgaagagtcacctcttcccattttagtacatcattaattgtcaaagcctgtgtgacacaactcagaatactaacctagactaatcccaggatgcttctgctggagcaaagatattgtttgaaggagagtttatggttttggattttaaacgggcagggtcttttttcctctcatttttgtggacaagagaggccttcgcctttatttttactctccctcttctgctgtccctgtgcagaggaaaaatgaagaattctcccagaagtgacttgtcaagacttaaaaaaaatgtttttaatgcatttcttccttgtctagtgcctcggtttatctctaacaggggctgtccagtatatcggtcctgttaggaggggagaaaaagttcttccaaaggctggagaagtgaacaaggagtcaaatttattttcccaattcaacttcataattatcatttctttggcttcatgctctcccgtaactcatgtggttgggatccatcccatctgggtcacttcagtctacttcacgtacttgaaaaggctttcctttacacttccaggaccaaacagcaacttcctgccacacacttccaccctatcactgggagaaatccttttctggacatgagcctttgacctgggtggggcagaaagaaccacaaactccatctcccaatagaactttgaaattcactcagcttttcctttcatgctgtttgttgcctgcttgttgcactcctcctgccccagaactgcaagatttttagcttcacccctttctgagagtaatgttatcttttatcagaatcagtatcagttcccctgtattctgtgcttcatcgaatttgcaagactgacctcttttaagcatttaattcactcccagagtcatctggtcaggttgcaatatgaggacttctctgtctcctctgaagcctgggacactgagcttacttaatacattagatgttcaaaagaggagcgttgtttcatctttcaaaatgttaggccattactttgagtataaaatcgacttattaatgattagtaatttttctaaagtattgggaaaactttcttattttataagatcttaacaagcttaaaaaagaattttatgaccagaatccaacaagagctctattttggaattgtgcccaagttggtgatgtttactctaaaattaataataaaactacttgtaagcacaaggctcactggatgtaaatgtaaaacttcgcgactttataaaactggcattcctaggggaggggctatttatcctacaggtccctgcctcctggcagtgccatggtatgtgtgcatggatataccagacacagtcaccatcggccatcagtagcagcccatgaacccacgtgcacatcctgcatcttgctcttctgacccttcattcccacttgtcttcaggcaggcatttctgggatctaaactagaaatccttgaaaacaaatagtaccagccactttgaggaatgtgcattcactgtagtgggttattatggggtctctgcctcctggctgtgttatgcggagcccaggagtggaggagagccgtggaaatagacagggagaggctggtacttgggttgtggtaatagtcaggcttgccacaagagggcactcatagatttgtttttatattcattcttgagaaaaaagcaactggttactgaacgtaactcatgacttatgtttcaaattttgcatagctgattttaagtcattttgatagctttgcaagaaaaatttttcctttgaaacaagggagtagggctgtttcattttctttccttctaatcctcatgccaagaggtgagaaacacttaaggtcatttaaggtgctagggaaagggttttcccatggagctttctgtgaggcgcagtaaaatagagccagcagcaaagtagaggaaaaagccagactgcgtcacacaagatttctcatccttttcaggagagagtcactgtgtagatttgaatcttttttctttgagtctgctttgaactttagcaggcttttcctaagactgacaattgtcgtcttaaatcagagatttgagggtagacttattttatggcaaatgtctatttttctgatataaaagtaacaatgctcattacagaagaatctaaacaaagaataaaaattagccatcttctctccatctaaaacagagctaaactttgctgatatgtttatgaatttcctttcagtattaaaaagtgcatataaggtgtatatttacacaaaattgaaggtcatacatagatacaggttggtatcctaactttaccctctcactgattaacatggtatcacgagtaacttcctatgtttttaaatctttgaaaatagatttctagtggttctaccttatccatccccacactgttgaaaattttggttgtttcagatacttttattatcaatgatgatgtgataaagtttcttgtatatatctctttggctctatctttggtaatttcttaagaatggaatcttagaattggactgtgaagagggggattcacattgctggggctaagtacaaattgacatcaccttttaggaatgaaatgcttctctttgaccctttagctccagtgtcccagcatagtcactgggcttcataggagtagcagtgagaggacagtgtcacagcaagggcctctctgcatgctccctgatcattgtgtttgcaggttcagcatttcttcttgagtccttcccttcttccaaccttattgcctcatttcccccttgtagtcaatgttttttggaaacactgtttattttaaaataaaaatgtaaaaaaaaggtaaaaaaataaaattttaaatttt

SEQ ID NO: 425720 - DNA, 3838 bp, Homo sapiens
aggctttcctttacacttccaggaccaaacagcaacttcctgccacacacttccaccctatcactgggagaaaacataaaagaaagcctctgggggtgggctattctgccagaaaatcacctctttatgataactgctttctccatgctcctgatggacagcccctctgcacttgtgatagaagaaaagctcagtggtacctggacaaaggcattggtgagctggtgagtgaagagccctttgtggtgaagctacggtttgaacctgcaggaaggcccgaatctcctggagactattacttgatggttaaagagaacctgtgtgtagtgtgtggcaagagagactcctacattcggaagaacgtgattccacatgagtaccggaagcacttccccatcgagatgaaggaccacaactcccacgatgtgctgctgctctgcacctcctgccatgccatttccaactactatgacaaccatctgaagcagcagctggccaaggagttccaggcccccatcggctctgaggagggcttgcgcctgctggaagatcctgagcgccggcaggtgcgttctggggccagggccctgctcaacgcggagagcctgcctactcagcgaaaggaggagctgctgcaagcactcagagagttttataacacagacgtggtcacagaggagatgcttcaagaggctgccagcctggagaccagccaatgaaaactatgttcctcacgggctgaaggtggtgcagtgtcacagccagggtggcctgcgctccctcatgcagctggagagccgctggcgtcagcacttcctggactccatgcagcccaagcacctgccccagcagtggtcagtggaccacaaccatcagaagctgctccggaaattcggggaagatcttcccatccagctgtcttgatagctgctttcctcccagttaggacaagtgggaagctggagccaaggttgaagagtcacctcttcccattttagtacatcattaattgtcaaagcctgtgtgacacaactcagaatactaacctagactaatcccaggatgcttctgctggagcaaagatattgtttgaaggagagtttatggttttggattttaaacgggcagggtcttttttcctctcatttttgtggacaagagaggccttcgcctttatttttactctccctcttctgctgtccctgtgcagaggaaaaatgaagaattctcccagaagtgacttgtcaagacttaaaaaaaatgtttttaatgcatttcttccttgtctagtgcctcggtttatctctaacaggggctgtccagtatatcggtcctgttaggaggggagaaaaagttcttccaaaggctggagaagtgaacaaggagtcaaatttattttcccaattcaacttcataattatcatttctttggcttcatgctctcccgtaactcatgtggttgggatccatcccatctgggtcacttcagtctacttcacgtacttgaaaaggctttcctttacacttccaggaccaaacagcaacttcctgccacacacttccaccctatcactgggagaaatccttttctggacatgagcctttgacctgggtggggcagaaagaaccacaaactccatctcccaatagaactttgaaattcactcagcttttcctttcatgctgtttgttgcctgcttgttgcactcctcctgccccagaactgcaagatttttagcttcacccctttctgagagtaatgttatcttttatcagaatcagtatcagttcccctgtattctgtgcttcatcgaatttgcaagactgacctcttttaagcatttaattcactcccagagtcatctggtcaggttgcaatatgaggacttctctgtctcctctgaagcctgggacactgagcttacttaatacattagatgttcaaaagaggagcgttgtttcatctttcaaaatgttaggccattactttgagtataaaatcgacttattaatgattagtaatttttctaaagtattgggaaaactttcttattttataagatcttaacaagcttaaaaaagaattttatgaccagaatccaacaagagctctattttggaattgtgcccaagttggtgatgtttactctaaaattaataataaaactacttgtaagcacaaggctcactggatgtaaatgtaaaacttcgcgactttataaaactggcattcctaggggaggggctatttatcctacaggtccctgcctcctggcagtgccatggtatgtgtgcatggatataccagacacagtcaccatcggccatcagtagcagcccatgaacccacgtgcacatcctgcatcttgctcttctgacccttcattcccacttgtcttcaggcaggcatttctgggatctaaactagaaatccttgaaaacaaatagtaccagccactttgaggaatgtgcattcactgtagtgggttattatggggtctctgcctcctggctgtgttatgcggagcccaggagtggaggagagccgtggaaatagacagggagaggctggtacttgggttgtggtaatagtcaggcttgccacaagagggcactcatagatttgtttttatattcattcttgagaaaaaagcaactggttactgaacgtaactcatgacttatgtttcaaattttgcatagctgattttaagtcattttgatagctttgcaagaaaaatttttcctttgaaacaagggagtagggctgtttcattttctttccttctaatcctcatgccaagaggtgagaaacacttaaggtcatttaaggtgctagggaaagggttttcccatggagctttctgtgaggcgcagtaaaatagagccagcagcaaagtagaggaaaaagccagactgcgtcacacaagatttctcatccttttcaggagagagtcactgtgtagatttgaatcttttttctttgagtctgctttgaactttagcaggcttttcctaagactgacaattgtcgtcttaaatcagagatttgagggtagacttattttatggcaaatgtctatttttctgatataaaagtaacaatgctcattacagaagaatctaaacaaagaataaaaattagccatcttctctccatctaaaacagagctaaactttgctgatatgtttatgaatttcctttcagtattaaaaagtgcatataaggtgtatatttacacaaaattgaaggtcatacatagatacaggttggtatcctaactttaccctctcactgattaacatggtatcacgagtaacttcctatgtttttaaatctttgaaaatagatttctagtggttctaccttatccatccccacactgttgaaaattttggttgtttcagatacttttattatcaatgatgatgtgataaagtttcttgtatatatctctttggctctatctttggtaatttcttaagaatggaatcttagaattggactgtgaagagggggattcacattgctggggctaagtacaaattgacatcaccttttaggaatgaaatgcttctctttgaccctttagctccagtgtcccagcatagtcactgggcttcataggagtagcagtgagaggacagtgtcacagcaagggcctctctgcatgctccctgatcattgtgtttgcaggttcagcatttcttcttgagtccttcccttcttccaaccttattgcctcatttcccccttgtagtcaatgttttttggaaacactgtttattttaaaataaaaatgtaaaaaaaaggtaaaaaaataaaattttaaatttt

SEQ ID NO: 425721 - DNA, 3378 bp, Homo sapiens
agcattcttcatccattatcagctggatggtagtgcccctctcgtgggagctgaacattatgaagtggccttcctgtcagtagagctcagaaccctcaaataccttctgttgggattgcgagtcgtatgttcagactataaaaagggcagagataagaaagaggatgtttcgaaaacaccaaagtaactaaccctttaggagtccttcaacctccccagttacccttggcgcgcagcatttgaagctgtctgtgaggccatcctgcgcttgtttccctcagacactttgtttttcatgttttggcagaatcttgcgctccctcatgcagctggagagccgctggcgtcagcacttcctggactccatgcagcccaagcacctgccccagcagtggtcagtggaccacaaccatcagaagctgctccggaaattcggggaagatcttcccatccagctgtcttgatagctgctttcctcccagttaggacaagtgggaagctggagccaaggttgaagagtcacctcttcccattttagtacatcattaattgtcaaagcctgtgtgacacaactcagaatactaacctagactaatcccaggatgcttctgctggagcaaagatattgtttgaaggagagtttatggttttggattttaaacgggcagggtcttttttcctctcatttttgtggacaagagaggccttcgcctttatttttactctccctcttctgctgtccctgtgcagaggaaaaatgaagaattctcccagaagtgacttgtcaagacttaaaaaaaatgtttttaatgcatttcttccttgtctagtgcctcggtttatctctaacaggggctgtccagtatatcggtcctgttaggaggggagaaaaagttcttccaaaggctggagaagtgaacaaggagtcaaatttattttcccaattcaacttcataattatcatttctttggcttcatgctctcccgtaactcatgtggttgggatccatcccatctgggtcacttcagtctacttcacgtacttgaaaaggctttcctttacacttccaggaccaaacagcaacttcctgccacacacttccaccctatcactgggagaaatccttttctggacatgagcctttgacctgggtggggcagaaagaaccacaaactccatctcccaatagaactttgaaattcactcagcttttcctttcatgctgtttgttgcctgcttgttgcactcctcctgccccagaactgcaagatttttagcttcacccctttctgagagtaatgttatcttttatcagaatcagtatcagttcccctgtattctgtgcttcatcgaatttgcaagactgacctcttttaagcatttaattcactcccagagtcatctggtcaggttgcaatatgaggacttctctgtctcctctgaagcctgggacactgagcttacttaatacattagatgttcaaaagaggagcgttgtttcatctttcaaaatgttaggccattactttgagtataaaatcgacttattaatgattagtaatttttctaaagtattgggaaaactttcttattttataagatcttaacaagcttaaaaaagaattttatgaccagaatccaacaagagctctattttggaattgtgcccaagttggtgatgtttactctaaaattaataataaaactacttgtaagcacaaggctcactggatgtaaatgtaaaacttcgcgactttataaaactggcattcctaggggaggggctatttatcctacaggtccctgcctcctggcagtgccatggtatgtgtgcatggatataccagacacagtcaccatcggccatcagtagcagcccatgaacccacgtgcacatcctgcatcttgctcttctgacccttcattcccacttgtcttcaggcaggcatttctgggatctaaactagaaatccttgaaaacaaatagtaccagccactttgaggaatgtgcattcactgtagtgggttattatggggtctctgcctcctggctgtgttatgcggagcccaggagtggaggagagccgtggaaatagacagggagaggctggtacttgggttgtggtaatagtcaggcttgccacaagagggcactcatagatttgtttttatattcattcttgagaaaaaagcaactggttactgaacgtaactcatgacttatgtttcaaattttgcatagctgattttaagtcattttgatagctttgcaagaaaaatttttcctttgaaacaagggagtagggctgtttcattttctttccttctaatcctcatgccaagaggtgagaaacacttaaggtcatttaaggtgctagggaaagggttttcccatggagctttctgtgaggcgcagtaaaatagagccagcagcaaagtagaggaaaaagccagactgcgtcacacaagatttctcatccttttcaggagagagtcactgtgtagatttgaatcttttttctttgagtctgctttgaactttagcaggcttttcctaagactgacaattgtcgtcttaaatcagagatttgagggtagacttattttatggcaaatgtctatttttctgatataaaagtaacaatgctcattacagaagaatctaaacaaagaataaaaattagccatcttctctccatctaaaacagagctaaactttgctgatatgtttatgaatttcctttcagtattaaaaagtgcatataaggtgtatatttacacaaaattgaaggtcatacatagatacaggttggtatcctaactttaccctctcactgattaacatggtatcacgagtaacttcctatgtttttaaatctttgaaaatagatttctagtggttctaccttatccatccccacactgttgaaaattttggttgtttcagatacttttattatcaatgatgatgtgataaagtttcttgtatatatctctttggctctatctttggtaatttcttaagaatggaatcttagaattggactgtgaagagggggattcacattgctggggctaagtacaaattgacatcaccttttaggaatgaaatgcttctctttgaccctttagctccagtgtcccagcatagtcactgggcttcataggagtagcagtgagaggacagtgtcacagcaagggcctctctgcatgctccctgatcattgtgtttgcaggttcagcatttcttcttgagtccttcccttcttccaaccttattgcctcatttcccccttgtagtcaatgttttttggaaacactgtttattttaaaataaaaatgtaaaaaaaaggtaaaaaaataaaattttaaatttt

SEQ ID NO: 425722 - DNA, 2907 bp, Homo sapiens
ccgcccctcggcgtgaccccctcgcccccgtcgcacacggcggggcggttcagcacccaggtgcgcaaggagggcctcacccctgcccgcggcctcccacgccctccttgggcctctcctttcgacccccttaccctctccctgggagactctaccagaccttcgaggctgcgtgtcccagtcagctaaaaaggaggccccgcccgcggcacctggtagctcctcgggcgctgcgggttcgacgcggcaacagcagctgttttctctcctggattcgtatgaggagactgtccttcctgtttcgcagatgaggaaactgaggcttagagaagtttggcaaattggctaagttcctacagctaattgtgggattagtgatatgcttttctaaagagtagaaaagtcgaagatgtctagacagaacttagtggctttgacagtgactacccttctgggtgtggctgtaggggggtttgtcctctggaaaggcatccagcgccgccgaaggagtaaaacgagtcctgtgacccaacagccacagcagaaagtgctgggcagtagagagctgccccctccagaagatgatcagctgcactccagtgcccccagatcctcgtggaaggaacggatccttaaagcaaaggtggtgacggtgtctcaggaggcagagtgggatcaaatcgagcccttgcttagaagtgaattagaagattttccagtacttggaattgactgtgagtgggtaaatttggaaggcaaagccagccctctgtcacttctacaaatggcctccccaagtggcctgtgtgtcttggttcgcctgcccaagctaatctgtggaggaaaaacactaccaagaacgttattggatattttggcagatggcaccattttgaaagttggagtgggatgctcagaagatgccagcaagcttctgcaggattatggcctcgttgttagggggtgcctggacctccgatacctagccatgcggcagagaaacaatttgctctgtaatgggcttagcctgaagtccctcgctgagactgttttgaactttccccttgacaagtcccttctacttcgttgcagcaactgggatgctgagactctcacagaggaccaggtaatttatgctgccagggatgcccagatttcagtggctctctttcttcatcttcttggataccctttctctaggaattcacctggagaaaaaaacgatgaccacagtagctggagaaaagtcttggaaaaatgccagggtgtggtcgacatcccatttcgaagcaaaggaatgagcagattgggagaagaggttaatggggaagcaacagaatctcagcagaagccaagaaataagaagtctaagatggatgggatggtgccaggcaaccaccaagggagagaccccagaaaacataaaagaaagcctctgggggtgggctattctgccagaaaatcacctctttatgataactgctttctccatgctcctgatggacagcccctctgcacttgtgatagaagaaaagctcagtggtacctggacaaaggcattggtgagctggtgagtgaagagccctttgtggtgaagctacggtttgaacctgcaggaaggcccgaatctcctggagactattacttgatggttaaagagaacctgtgtgtagtgtgtggcaagagagactcctacattcggaagaacgtgattccacatgagtaccggaagcacttccccatcgagatgaaggaccacaactcccacgatgtgctgctgctctgcacctcctgccatgccatttccaactactatgacaaccatctgaagcagcagctggccaaggagttccaggcccccatcggctctgaggagggcttgcgcctgctggaagatcctgagcgccggcaggtgcgttctggggccagggccctgctcaacgcggagagcctgcctactcagcgaaaggaggagctgctgcaagcactcagagagttttataacacagacgtggtcacagaggagatgcttcaagaggctgccagcctggagaccagccaatgaaaactatgttcctcacgggctgaaggtggtgcagtgtcacagccagggtggcctgcgctccctcatgcagctggagagccgctggcgtcagcacttcctggactccatgcagcccaagcacctgccccagcagtggtcagtggaccacaaccatcagaagctgctccggaaattcggggaagatcttcccatccagctgtcttgatagctgctttcctcccagttaggacaagtgggaagctggagccaaggttgaagagtcacctcttcccattttagtacatcattaattgtcaaagcctgtgtgacacaactcagaatactaacctagactaatcccaggatgcttctgctggagcaaagatattgtttgaaggagagtttatggttttggattttaaacgggcagggtcttttttcctctcatttttgtggacaagagaggccttcgcctttatttttactctccctcttctgctgtccctgtgcagaggaaaaatgaagaattctcccagaagtgacttgtcaagacttaaaaaaaatgtttttaatgcatttcttccttgtctagtgccaggcaaccaccaagggagagaccccagaaaacataaaagaaagcctctgggggtgggctattctgccagaaaatcacctctttatgataactgctttctccatgctcctgatggacagcccctctgcacttgtgatagaagaaaagctcagtggtacctggacaaaggcattggtgagctggtgagtgaagagccctttgtggtgaagctacggtttgaacctgcagggaggcccgaatctcctggagactattacttgacggtttc

SEQ ID NO: 425723 - DNA, 689 bp, Homo sapiens
ccgcccctcggcgtgaccccctcgcccccgtcgcacacggcggggcggttcagcacccaggtgcgcaaggagggcctcacccctgcccgcggcctcccacgccctccttgggcctctcctttcgacccccttaccctctccctgggagactctaccagaccttcgaggctgcgtgtcccagtcagctaaaaaggaggccccgcccgcggcacctggtagctcctcgggcgctgcgggttcgacgcggcaacagcagctgttttctctcctggattcgtgtgagccgccaccctcgctaccatccctgtcctcccagaccacaccctgctctgggccttgccgggagccacctctttggcttttcacatccctgggatggatcaaaactaagaaccttaatcattatttattacaaaattgacatctgctccttaaaatacaaacaaaccaatcccccgataagcttttgatatgattccaacattcaaactcctttatataccctctcctcaaaaacacaaaattgaaattatactttattttcttagttctgttccaaggatagaaggaattgaaaggttttgttaatcataggaattaggaagtgcgggttggggcgcagcggggaagatggattaaatttggtcaagttgagcttgttttaaaaatgtatttttaaaatattctag

SEQ ID NO: 425724 - DNA, 3270 bp, Homo sapiens
aatggtattcctatttcacagatgaggagactgtccttcctgtttcgcagatgaggaaactgaggcttagagaagtttggcaaattggctaagttcctacagctaattgtgggattagtgatatgcttttctaaagagtagaaaagtcgaagatgtctagacagaacttagtggctttgacagtgactacccttctgggtgtggctgtaggggggtttgtcctctggaaaggcatccagcgccgccgaaggagtaaaacgagtcctgtgacccaacagccacagcagaaagtgctgggcagtagagagctgccccctccagaagatgatcagctgcactccagtgcccccagatcctcgtggaaggaacggatccttaaagcaaaggtggtgacggtgtctcaggaggcagagtgggatcaaatcgagcccttgcttagaagtgaattagaagattttccagtacttggaattgactgtgagtgggtaaatttggaaggcaaagccagccctctgtcacttctacaaatggcctccccaagtggcctgtgtgtcttggttcgcctgcccaagctaatctgtggaggaaaaacactaccaagaacgttattggatattttggcagatggcaccattttgaaagttggagtgggatgctcagaagatgccagcaagcttctgcaggattatggcctcgttgttagggggtgcctggacctccgatacctagccatgcggcagagaaacaatttgctctgtaatgggcttagcctgaagtccctcgctgagactgttttgaactttccccttgacaagtcccttctacttcgttgcagcaactgggatgctgagactctcacagaggaccaggtaatttatgctgccagggatgcccagatttcagtggctctctttcttcatcttcttggataccctttctctaggaattcacctggagaaaaaaacgatgaccacagtagctggagaaaagtcttggaaaaatgccagggtgtggtcgacatcccatttcgaagcaaaggaatgagcagattgggagaagaggttaatggggaagcaacagaatctcagcagaagccaagaaataagaagtctaagatggatgggatggtgccaggcaaccaccaagggagagaccccagaaaacataaaagaaagcctctgggggtgggctattctgccagaaaatcacctctttatgataactgctttctccatgctcctgatggacagcccctctgcacttgtgatagaagaaaagctcagtggtacctggacaaaggcattggtgagctggtgagtgaagagccctttgtggtgaagctacggtttgaacctgcaggaaggcccgaatctcctggagactattacttgatggttaaagagaacctgtgtgtagtgtgtggcaagagagactcctacattcggaagaacgtgattccacatgagtaccggaagcacttccccatcgagatgaaggaccacaactcccacgatgtgctgctgctctgcacctcctgccatgccatttccaactactatgacaaccatctgaagcagcagctggccaaggagttccaggcccccatcggctctgaggagggcttgcgcctgctggaagatcctgagcgccggcaggtgcgttctggggccagggccctgctcaacgcggagagcctgcctactcagcgaaaggaggagctgctgcaagcactcagagagttttataacacagacgtggtcacagaggagatgcttcaagaggctgccagcctggagaccagccaatgaaaactatgttcctcacgggctgaaggtggtgcagtgtcacagccagggtggcctgcgctccctcatgcagctggagagccgctggcgtcagcacttcctggactccatgcagcccaagcacctgccccagcagtggtcagtggaccacaaccatcagaagctgctccggaaattcggggaagatcttcccatccagctgtcttgatagctgctttcctcccagttaggacaagtgggaagctggagccaaggttgaagagtcacctcttcccattttagtacatcattaattgtcaaagcctgtgtgacacaactcagaatactaacctagactaatcccaggatgcttctgctggagcaaagatattgtttgaaggagagtttatggttttggattttaaacgggcagggtcttttttcctctcatttttgtggacaagagaggccttcgcctttatttttactctccctcttctgctgtccctgtgcagaggaaaaatgaagaattctcccagaagtgacttgtcaagacttaaaaaaaatgtttttaatgcatttcttccttgtctagtgcctcggtttatctctaacaggggctgtccagtatatcggtcctgttaggaggggagaaaaagttcttccaaaggctggagaagtgaacaaggagtcaaatttattttcccaattcaacttcataattatcatttctttggcttcatgctctcccgtaactcatgtggttgggatccatcccatctgggtcacttcagtctacttcacgtacttgaaaaggctttcctttacacttccaggaccaaacagcaacttcctgccacacacttccaccctatcactgggagaaatccttttctggacatgagcctttgacctgggtggggcagaaagaaccacaaactccatctcccaatagaactttgaaattcactcagcttttcctttcatgctgtttgttgcctgcttgttgcactcctcctgccccagaactgcaagatttttagcttcacccctttctgagagtaatgttatcttttatcagaatcagtatcagttcccctgtattctgtgcttcatcgaatttgcaagactgacctcttttaagcatttaattcactcccagagtcatctggtcaggttgcaatatgaggacttctctgtctcctctgaagcctgggacactgagcttacttaatacattagatgttcaaaagaggagcgttgtttcatctttcaaaatgttaggccattactttgagtataaaatcgacttattaatgattagtaatttttctaaagtattgggaaaactttcttattttataagatcttaacaagcttaaaaaagaattttatgaccagaatccaacaagagctctattttggaattgtgcccaagttggtgatgtttactctaaaattaataataaaactacttgtaagcaca

SEQ ID NO: 425725 - DNA, 4520 bp, Homo sapiens
agcgtgattgctgttgaagataactgtcagtctataccttgattctttgtaaatttggaaggcaaagccagccctctgtcacttctacaaatggcctccccaagtggcctgtgtgtcttggttcgcctgcccaagctaatctgtggaggaaaaacactaccaagaacgttattggatattttggcagatggcaccattttgaaagttggagtgggatgctcagaagatgccagcaagcttctgcaggattatggcctcgttgttagggggtgcctggacctccgatacctagccatgcggcagagaaacaatttgctctgtaatgggcttagcctgaagtccctcgctgagactgttttgaactttccccttgacaagtcccttctacttcgttgcagcaactgggatgctgagactctcacagaggaccagattccactgatctctgacttttctcttcaggtaatttatgctgccagggatgcccagatttcagtggctctctttcttcatcttcttggataccctttctctaggaattcacctggagaaaaaaacgatgaccacagtagctggagaaaagtcttggaaaaatgccagggtgtggtcgacatcccatttcgaagcaaaggaatgagcagattgggagaagaggttaatggggaagcaacagaatctcagcagaagccaagaaataagaagtctaagatggatgggatggtgccaggcaaccaccaagggagagaccccagaaaacataaaagaaagcctctgggggtgggctattctgccagaaaatcacctctttatgataactgctttctccatgctcctgatggacagcccctctgcacttgtgatagaagaaaagctcagtggtacctggacaaaggcattggtgagctggtgagtgaagagccctttgtggtgaagctacggtttgaacctgcaggaaggcccgaatctcctggagactattacttgatggttaaagagaacctgtgtgtagtgtgtggcaagagagactcctacattcggaagaacgtgattccacatgagtaccggaagcacttccccatcgagatgaaggaccacaactcccacgatgtgctgctgctctgcacctcctgccatgccatttccaactactatgacaaccatctgaagcagcagctggccaaggagttccaggcccccatcggctctgaggagggcttgcgcctgctggaagatcctgagcgccggcaggtgcgttctggggccagggccctgctcaacgcggagagcctgcctactcagcgaaaggaggagctgctgcaagcactcagagagttttataacacagacgtggtcacagaggagatgcttcaagaggctgccagcctggagaccagccaatgaaaactatgttcctcacgggctgaaggtggtgcagtgtcacagccagggtggcctgcgctccctcatgcagctggagagccgctggcgtcagcacttcctggactccatgcagcccaagcacctgccccagcagtggtcagtggaccacaaccatcagaagctgctccggaaattcggggaagatcttcccatccagctgtcttgatagctgctttcctcccagttaggacaagtgggaagctggagccaaggttgaagagtcacctcttcccattttagtacatcattaattgtcaaagcctgtgtgacacaactcagaatactaacctagactaatcccaggatgcttctgctggagcaaagatattgtttgaaggagagtttatggttttggattttaaacgggcagggtcttttttcctctcatttttgtggacaagagaggccttcgcctttatttttactctccctcttctgctgtccctgtgcagaggaaaaatgaagaattctcccagaagtgacttgtcaagacttaaaaaaaatgtttttaatgcatttcttccttgtctagtgcctcggtttatctctaacaggggctgtccagtatatcggtcctgttaggaggggagaaaaagttcttccaaaggctggagaagtgaacaaggagtcaaatttattttcccaattcaacttcataattatcatttctttggcttcatgctctcccgtaactcatgtggttgggatccatcccatctgggtcacttcagtctacttcacgtacttgaaaaggctttcctttacacttccaggaccaaacagcaacttcctgccacacacttccaccctatcactgggagaaatccttttctggacatgagcctttgacctgggtggggcagaaagaaccacaaactccatctcccaatagaactttgaaattcactcagcttttcctttcatgctgtttgttgcctgcttgttgcactcctcctgccccagaactgcaagatttttagcttcacccctttctgagagtaatgttatcttttatcagaatcagtatcagttcccctgtattctgtgcttcatcgaatttgcaagactgacctcttttaagcatttaattcactcccagagtcatctggtcaggttgcaatatgaggacttctctgtctcctctgaagcctgggacactgagcttacttaatacattagatgttcaaaagaggagcgttgtttcatctttcaaaatgttaggccattactttgagtataaaatcgacttattaatgattagtaatttttctaaagtattgggaaaactttcttattttataagatcttaacaagcttaaaaaagaattttatgaccagaatccaacaagagctctattttggaattgtgcccaagttggtgatgtttactctaaaattaataataaaactacttgtaagcacaaggctcactggatgtaaatgtaaaacttcgcgactttataaaactggcattcctaggggaggggctatttatcctacaggtccctgcctcctggcagtgccatggtatgtgtgcatggatataccagacacagtcaccatcggccatcagtagcagcccatgaacccacgtgcacatcctgcatcttgctcttctgacccttcattcccacttgtcttcaggcaggcatttctgggatctaaactagaaatccttgaaaacaaatagtaccagccactttgaggaatgtgcattcactgtagtgggttattatggggtctctgcctcctggctgtgttatgcggagcccaggagtggaggagagccgtggaaatagacagggagaggctggtacttgggttgtggtaatagtcaggcttgccacaagagggcactcatagatttgtttttatattcattcttgagaaaaaagcaactggttactgaacgtaactcatgacttatgtttcaaattttgcatagctgattttaagtcattttgatagctttgcaagaaaaatttttcctttgaaacaagggagtagggctgtttcattttctttccttctaatcctcatgccaagaggtgagaaacacttaaggtcatttaaggtgctagggaaagggttttcccatggagctttctgtgaggcgcagtaaaatagagccagcagcaaagtagaggaaaaagccagactgcgtcacacaagatttctcatccttttcaggagagagtcactgtgtagatttgaatcttttttctttgagtctgctttgaactttagcaggcttttcctaagactgacaattgtcgtcttaaatcagagatttgagggtagacttattttatggcaaatgtctatttttctgatataaaagtaacaatgctcattacagaagaatctaaacaaagaataaaaattagccatcttctctccatctaaaacagagctaaactttgctgatatgtttatgaatttcctttcagtattaaaaagtgcatataaggtgtatatttacacaaaattgaaggtcatacatagatacaggttggtatcctaactttaccctctcactgattaacatggtatcacgagtaacttcctatgtttttaaatctttgaaaatagatttctagtggttctaccttatccatccccacactgttgaaaattttggttgtttcagatacttttattatcaatgatgatgtgataaagtttcttgtatatatctctttggctctatctttggtaatttcttaagaatggaatcttagaattggactgtgaagagggggattcacattgctggggctaagtacaaattgacatcaccttttaggaatgaaatgcttctctttgaccctttagctccagtgtcccagcatagtcactgggcttcataggagtagcagtgagaggacagtgtcacagcaagggcctctctgcatgctccctgatcattgtgtttgcaggttcagcatttcttcttgagtccttcccttcttccaaccttattgcctcatttcccccttgtagtcaatgttttttggaaacactgtttattttaaaataaaaatgtaaaaaaaaggtaaaaaaataaaattttaaatttt

SEQ ID NO: 425726 - DNA, 2966 bp, Homo sapiens
ccgcccctcggcgtgaccccctcgcccccgtcgcacacggcggggcggttcagcacccaggtgcgcaaggagggcctcacccctgcccgcggcctcccacgccctccttgggcctctcctttcgacccccttaccctctccctgggagactctaccagaccttcgaggctgcgtgtcccagtcagctaaaaaggaggccccgcccgcggcacctggtagctcctcgggcgctgcgggttcgacgcggcaacagcagctgttttctctcctggattcgtatgaggagactgtccttcctgtttcgcagatgaggaaactgaggcttagagaagtttggcaaattggctaagttcctacagctaattgtgggattagtgatatgcttttctaaagagtagaaaagtcgaagatgtctagacagaacttagtggctttgacagtgactacccttctgggtgtggctgtaggggggtttgtcctctggaaaggcatccagcgccgccgaaggagtaaaacgagtcctgtgacccaacagccacagcagaaagtgctgggcagtagagagctgccccctccagaagatgatcagctgcactccagtgcccccagatcctcgtggaaggaacggatccttaaagcaaaggtggtgacggtgtctcaggaggcagagtgggatcaaatcgagcccttgcttagaagtgaattagaagattttccagtacttggaattgactgtgagtgggtaaatttggaaggcaaagccagccctctgtcacttctacaaatggcctccccaagtggcctgtgtgtcttggttcgcctgcccaagctaatctgtggaggaaaaacactaccaagatttttagcttcacccctttctgagagtaatgttatcttttatcagaatcagtatcagttcccctgtattctgtgcttcatcgaatttgcaagactgacctcttttaagcatttaattcactcccagagtcatctggtcaggttgcaatatgaggacttctctgtctcctctgaagcctgggacactgagcttacttaatacattagatgttcaaaagaggagcgttgtttcatctttcaaaatgttaggccattactttgagtataaaatcgacttattaatgattagtaatttttctaaagtattgggaaaactttcttattttataagatcttaacaagcttaaaaaagaattttatgaccagaatccaacaagagctctattttggaattgtgcccaagttggtgatgtttactctaaaattaataataaaactacttgtaagcacaaggctcactggatgtaaatgtaaaacttcgcgactttataaaactggcattcctaggggaggggctatttatcctacaggtccctgcctcctggcagtgccatggtatgtgtgcatggatataccagacacagtcaccatcggccatcagtagcagcccatgaacccacgtgcacatcctgcatcttgctcttctgacccttcattcccacttgtcttcaggcaggcatttctgggatctaaactagaaatccttgaaaacaaatagtaccagccactttgaggaatgtgcattcactgtagtgggttattatggggtctctgcctcctggctgtgttatgcggagcccaggagtggaggagagccgtggaaatagacagggagaggctggtacttgggttgtggtaatagtcaggcttgccacaagagggcactcatagatttgtttttatattcattcttgagaaaaaagcaactggttactgaacgtaactcatgacttatgtttcaaattttgcatagctgattttaagtcattttgatagctttgcaagaaaaatttttcctttgaaacaagggagtagggctgtttcattttctttccttctaatcctcatgccaagaggtgagaaacacttaaggtcatttaaggtgctagggaaagggttttcccatggagctttctgtgaggcgcagtaaaatagagccagcagcaaagtagaggaaaaagccagactgcgtcacacaagatttctcatccttttcaggagagagtcactgtgtagatttgaatcttttttctttgagtctgctttgaactttagcaggcttttcctaagactgacaattgtcgtcttaaatcagagatttgagggtagacttattttatggcaaatgtctatttttctgatataaaagtaacaatgctcattacagaagaatctaaacaaagaataaaaattagccatcttctctccatctaaaacagagctaaactttgctgatatgtttatgaatttcctttcagtattaaaaagtgcatataaggtgtatatttacacaaaattgaaggtcatacatagatacaggttggtatcctaactttaccctctcactgattaacatggtatcacgagtaacttcctatgtttttaaatctttgaaaatagatttctagtggttctaccttatccatccccacactgttgaaaattttggttgtttcagatacttttattatcaatgatgatgtgataaagtttcttgtatatatctctttggctctatctttggtaatttcttaagaatggaatcttagaattggactgtgaagagggggattcacattgctggggctaagtacaaattgacatcaccttttaggaatgaaatgcttctctttgaccctttagctccagtgtcccagcatagtcactgggcttcataggagtagcagtgagaggacagtgtcacagcaagggcctctctgcatgctccctgatcattgtgtttgcaggttcagcatttcttcttgagtccttcccttcttccaaccttattgcctcatttcccccttgtagtcaatgttttttggaaacactgtttattttaaaataaaaatgtaaaaaaaaggtaaaaaaataaaattttaaatttt

SEQ ID NO: 425727 - DNA, 1434 bp, Homo sapiens
ccgcccctcggcgtgaccccctcgcccccgtcgcacacggcggggcggttcagcacccaggtgcgcaaggagggcctcacccctgcccgcggcctcccacgccctccttgggcctctcctttcgacccccttaccctctccctgggagactctaccagaccttcgaggctgcgtgtcccagtcagctaaaaaggaggccccgcccgcggcacctggtagctcctcgggcgctgcgggttcgacgcggcaacagcagctgttttctctcctggattcgtatgaggagactgtccttcctgtttcgcagatgaggaaactgaggcttagagaagtttggcaaattggctaagttcctacagctaattgtgggattagtgatatgcttttctaaagagtagaaaagtcgaagatgtctagacagaacttagtggctttgacagtgactacccttctgggtgtggctgtaggggggtttgtcctctggaaaggcatccagcgccgccgaaggagtaaaacgagtcctgtgacccaacagccacagcagaaagtgctgggcagtagagagctgccccctccagaagatgatcagctgcactccagtgcccccagatcctcgtggaaggaacggatccttaaagcaaaggtggtgacggtgtctcaggaggcagagtgggatcaaatcgagcccttgcttagaagtgaattagaagattttccagtacttggaattgactgtgagtgggtaaatttggaaggcaaagccagccctctgtcacttctacaaatggcctccccaagtggcctgtgtgtcttggttcgcctgcccaagctaatctgtggaggaaaaacactaccaagaacgttattggatattttggcagatggcaccattttgaaagttggagtgggatgctcagaagatgccagcaagcttctgcaggattatggcctcgttgttagggggtgcctggacctccgatacctagccatgcggcagagaaacaatttgctctgtaatgggcttagcctgaagtccctcgctgagactgttttgaactttccccttgacaagtcccttctacttcgttgcagcaactgggatgctgagactctcacagaggaccagatttatgctgccagggatgcccagatttcagtggcatcgataaacatcggtgtttatcgatgccactacaacctctgccacccgggttcaagtgattgtcttgcctcagcctccctagtaactgggaccacaggcgcccaccaccacgcccggctattttcttttttaaattttttatttttagtagagacggggttggtctcaactaaatgttgtccaggctggtctcaaactcctggcctcaagcgatccaccctcctaggcctcccaaagtgcctgggattacaggagtggcattccgataaaca

SEQ ID NO: 425728 - DNA, 612 bp, Homo sapiens
agtttctccacctgtcccgggttggtgctgggctggggggagccccggccaggcagccctgactgttggcctcctcacaggttccactacgctgcccggatctgggatggggtgagaaagtcctctgctctggcagagtacagccgcctgctggcctgaggccaaggagaggaatgtcatgcaggggacctcctgggtccgcagtgtactgcgagggagcacagatgtccatcccccgctggggtggagagcggcagcaggcctgatggatgagggatcgtggcttcccggcccagagacatgaggtgtccagggccaggccccccaccctcagttggggctgttccgggggtgactgtgagcgatcccaccccaaacctgagatggggtagcccgtcctgtgtcctccacagggacaagcagtgggaggagtctgaatggtcaccaggaagcccgggctccatcttgacctcctttttcagggacaggagcaacaggcccctcttccctgactctaagcccttccctgtaaggtgaggcagggtctggagagctctttattggaacagatctggtggttcaaataaacacagtcatgcaagcctgatctta

SEQ ID NO: 425729 - DNA, 2735 bp, Homo sapiens
  misc_feature (255)..(255): n is a, c, g, or t
  misc_feature (2455)..(2455): n is a, c, g, or t
cgaagaggcacaactcgaaccccagatccgggccgctctccctcctgccggctcctcggcgtatccatttccctactcatctccccaccctcaaccccccaaccgcgcgcacgcgcattgagtcagagccgcggcgtcctcccgcctcccgctccggaacccgcatgcgtgctgaagccgaccgcctccatccacgcacgctcagcccggcgagcgcattcagttctcgagctccagccctcagcgcatgcgcangacgagtcgcctgagggaactgatctcagctcgggcccgcgttacatcctcctcctcttcttccttcggcccagctttccttaggggctgcaacccggacgccgaggccggtttcggagtggggagtgcccattttctctccttcccacgttcctggcccccagacgccatttgcaggcgggtggcttgggtcagcctccccgcccccacccgactcccgtcacgggagagcgcacaccgcgccccgagaaccaatcagcagccgcgttaggtaaccatgtctgagtctggacacagtcagcctggactctatgggatagagcggcggcgacggtggaaggagcctggctctggtggcccccagaatctctctgggcctggtggtcgggagagggactacattgcaccatgggaaagagagagaagggatgccagcgaagagacaagcacttccgtcatgcagaaaacccccatcatcctctcaaaacctccagcagagcggtcaaaacagccaccacctccaacagcccctgctgccccgcctgctccagcccctctggagaagcccatcgttctcatgaagccacgggaggaggggaaggggcctgtggccgtgacaggtgcctctacccctgagggcaccgccccaccaccccctgcagcccctgcgccacccaagggggagaaggaggggcagagacccacacagcctgtgtaccagatccagaaccggggcatgggcactgccgcaccagcagccatggaccctgtcgtgggtcaggccaaactactgcccccagagcgcatgaagcacagcatcaagttggtggatgaccagatgaattggtgtgacagtgccatcgagtacctgttggatcagactgatgtgttggtggttggtgtcctgggcctccaggggacaggcaagtccatggtcatgtcattgttgtcagccaacactccagaggaggaccagaggacttatgttttccgggcccagagcgctgaaatgaaggaacgagggggcaaccagaccagtggcatcgacttctttattacccaagaacggattgttttcctggacacacagcccatcctgagcccttctatcctagaccatctcatcaataatgaccgcaaactgcctccagagtacaaccttccccacacttacgttgaaatgcagtcactccagattgctgccttccttttcacggtctgccatgtggtgattgttgtccaggactggttcacagacctcagtctctacaggttcctgcagacagcagagatggtgaagccctccaccccatcccccagccacgagtccagcagctcatcgggctccgatgaaggcaccgagtactacccccacctagtcttcttgcagaacaaagctcgccgagaggacttctgtcctcggaagctgcggcagatgcacctgatgattgaccagctcatggcccactcccacctgcgttacaagggaactctgtccatgttacaatgcaatgtcttcccggggcttccacctgacttcctggactctgaggtcaacttattcctggtacccttcatggacagtgaagcagagagtgaaaacccaccaagagcaggacctggttccagcccactcttctccctgctgcctgggtatcgtggccaccccagtttccagtccttggtgagcaagctccggagccaagtgatgtccatggcccggccacagctgtcacacacgatcctcaccgagaagaactggtaagagctctttgcagagggggtcaatttgaggcaccccaccctggtgtagagagaagggggcgtcccttagatcggcatgaccttgtgaagcccctcctctccagatcccaggttccttttctggaacagtgatgattgctactgtcttgtaagcatctcacccatgtggcaacatgctgtttcctgtgactttgaatcctcctaatcagccagcatcatgtaggtccttgtcaccagttttcctggtggggaaatttaggctcggggaaaagtgttacatagcaaggccacacatctgtggctaggagtcatttgattgctaggagtaggaccagtgaccagatttagcttaaggaagatttattccagggacctgatcacagaaagcagggccctgcagcagatgggaaccaggaagccatcagggtctcattcntcacacttctgcatttgtcttgtttcctgcctctggctttctctccctgctttcacttggcccggcactagctctgtggcccctactttacattacttctttgtccagagctctcagcatatgagtccaggtcttcctcatcttacttcaaagagaaaaattggaaagataaatagcttaactgggtgcagcctctctaacttggctccctacatctgtttgcagttggctgtgcctggaaggggtcaggagtgcagacaaagcagcaggaagcccctca

SEQ ID NO: 425730 - DNA, 2548 bp, Homo sapiens
  misc_feature (255)..(255): n is a, c, g, or t
cgaagaggcacaactcgaaccccagatccgggccgctctccctcctgccggctcctcggcgtatccatttccctactcatctccccaccctcaaccccccaaccgcgcgcacgcgcattgagtcagagccgcggcgtcctcccgcctcccgctccggaacccgcatgcgtgctgaagccgaccgcctccatccacgcacgctcagcccggcgagcgcattcagttctcgagctccagccctcagcgcatgcgcangacgagtcgcctgagggaactgatctcagctcgggcccgcgttacatcctcctcctcttcttccttcggcccagctttccttaggggctgcaacccggacgccgaggccggtttcggagtggggagtgcccattttctctccttcccacgttcctggcccccagacgccatttgcaggcgggtggcttgggtcagcctccccgcccccacccgactcccgtcacgggagagcgcacaccgcgccccgagaaccaatcagcagccgcgttaggtaaccatgtctgagtctggacacagtcagcctggactctatgggatagagcggcggcgacggtggaaggagcctggctctggtggcccccagaatctctctgggcctggtggtcgggagagggactacattgcaccatgggaaagagagagaagggatgccagcgaagagacaagcacttccgtcatgcagaaaacccccatcatcctctcaaaacctccagcagagcggtcaaaacagccaccacctccaacagcccctgctgccccgcctgctccagcccctctggagaagcccatcgttctcatgaagccacgggaggaggggaaggggcctgtggccgtgacaggtgcctctacccctgagggcaccgccccaccaccccctgcagcccctgcgccacccaagggggagaaggaggggcagagacccacacagcctgtgtaccagatccagaaccggggcatgggcactgccgcaccagcagccatggaccctgtcgtgggtcaggccaaactactgcccccagagcgcatgaagcacagcatcaagttggtggatgaccagatgaattggtgtgacagtgccatcgagtacctgttggatcagactgatgtgttggtggttggtgtcctgggcctccaggggacaggcaagtccatggtcatgtcattgttgtcagccaacactccagaggaggaccagaggacttatgttttccgggcccagagcgctgaaatgaaggaacgagggggcaaccagaccagtggcatcgacttctttattacccaagaacggattgttttcctggacacacagcccatcctgagcccttctatcctagaccatctcatcaataatgaccgcaaactgcctccagagtacaaccttccccacacttacgttgaaatgcagtcactccagattgctgccttccttttcacggtctgccatgtggtgattgttgtccaggactggttcacagacctcagtctctacaggttcctgcagacagcagagatggtgaagccctccaccccatcccccagccacgagtccagcagctcatcgggctccgatgaaggcaccgagtactacccccacctagtcttcttgcagaacaaagctcgccgagaggacttctgtcctcggaagctgcggcagatgcacctgatgattgaccagctcatggcccactcccacctgcgttacaagggaactctgtccatgttacaatgcaatgtcttcccggggcttccacctgacttcctggactctgaggtcaacttattcctggtacccttcatggacagtgaagcagagagtgaaaacccaccaagagcaggacctggttccagcccactcttctccctgctgcctgggtatcgtggccaccccagtttccagtccttggtgagcaagctccggagccaagtgatgtccatggcccggccacagctgtcacacacgatcctcaccgagaagaactggttccactacgctgcccggatctgggatggggtgagaaagtcctctgctctggcagagtacagccgcctgctggcctgaggccaaggagaggaatgtcatgcaggggacctcctgggtccgcagtgtactgcgagggagcacagatgtccatcccccgctggggtggagagcggcagcaggcctgatggatgagggatcgtggcttcccggcccagagacatgaggtgtccagggccaggccccccaccctcagttggggctgttccgggggtgactgtgagcgatcccaccccaaacctgagatggggtagcccgtcctgtgtcctccacagggacaagcagtgggaggagtctgaatggtcaccaggaagcccgggctccatcttgacctcctttttcagggacaggagcaacaggcccctcttccctgactctaagcccttccctgtaaggtgaggcagggtctggagagctctttattggaacagatctggtggttcaaataaacacagtcatgcaagcctgatctta

SEQ ID NO: 425731 - DNA, 2296 bp, Homo sapiens
tgcaggctggtacggtcgggagtatgggatagctcgggcccgcgttacatcctcctcctcttcttccttcggcccagctttccttaggggctgcaacccggacgccgaggccggtttcggagtggggagtgcccattttctctccttcccacgttcctggcccccagacgccatttgcaggcgggtggcttgggtcagcctccccgcccccacccgactcccgtcacgggagagcgcacaccgcgccccgagaaccaatcagcagccgcgttaggtaaccatgtctgagtctggacacagtcagcctggactctatgggatagagcggcggcgacggtggaaggagcctggctctggtggcccccagaatctctctgggcctggtggtcgggagagggactacattgcaccatgggaaagagagagaagggatgccagcgaagagacaagcacttccgtcatgcagaaaacccccatcatcctctcaaaacctccagcagagcggtcaaaacagccaccacctccaacagcccctgctgccccgcctgctccagcccctctggagaagcccatcgttctcatgaagccacgggaggaggggaaggggcctgtggccgtgacaggtgcctctacccctgagggcaccgccccaccaccccctgcagcccctgcgccacccaagggggagaaggaggggcagagacccacacagcctgtgtaccagatccagaaccggggcatgggcactgccgcaccagcagccatggaccctgtcgtgggtcaggccaaactactgcccccagagcgcatgaagcacagcatcaagttggtggatgaccagatgaattggtgtgacagtgccatcgagtacctgttggatcagactgatgtgttggtggttggtgtcctgggcctccaggggacaggcaagtccatggtcatgtcattgttgtcagccaacactccagaggaggaccagaggacttatgttttccgggcccagagcgctgaaatgaaggaacgagggggcaaccagaccagtggcatcgacttctttattacccaagaacggattgttttcctggacacacagcccatcctgagcccttctatcctagaccatctcatcaataatgaccgcaaactgcctccagagtacaaccttccccacacttacgttgaaatgcagtcactccagattgctgccttccttttcacggtctgccatgtggtgattgttgtccaggactggttcacagacctcagtctctacaggttcctgcagacagcagagatggtgaagccctccaccccatcccccagccacgagtccagcagctcatcgggctccgatgaaggcaccgagtactacccccacctagtcttcttgcagaacaaagctcgccgagaggacttctgtcctcggaagctgcggcagatgcacctgatgattgaccagctcatggcccactcccacctgcgttacaagggaactctgtccatgttacaatgcaatgtcttcccggggcttccacctgacttcctggactctgaggtcaacttattcctggtacccttcatggacagtgaagcagagagtgaaaacccaccaagagcaggacctggttccagcccactcttctccctgctgcctgggtatcgtggccaccccagtttccagtccttggtgagcaagctccggagccaagtgatgtccatggcccggccacagctgtcacacacgatcctcaccgagaagaactggttccactacgctgcccggatctgggatggggtgagaaagtcctctgctctggcagagtacagccgcctgctggcctgaggccaaggagaggaatgtcatgcaggggacctcctgggtccgcagtgtactgcgagggagcacagatgtccatcccccgctggggtggagagcggcagcaggcctgatggatgagggatcgtggcttcccggcccagagacatgaggtgtccagggccaggccccccaccctcagttggggctgttccgggggtgactgtgagcgatcccaccccaaacctgagatggggtagcccgtcctgtgtcctccacagggacaagcagtgggaggagtctgaatggtcaccaggaagcccgggctccatcttgacctcctttttcagggacaggagcaacaggcccctcttccctgactctaagcccttccctgtaaggtgaggcagggtctggagagctctttattggaacagatctggtggttcaaataaacacagtcatgcaagcctgatctta

SEQ ID NO: 425732 - DNA, 2436 bp, Homo sapiens
caaataggctagtagaggccggtgttaatcggacgagtcgcctgagggaactgatctcagctcgggcccgcgttacatcctcctcctcttcttccttcggcccagctttccttaggggctgcaacccggacgccgaggccggtttcggagtggggagtgcccattttctctccttcccacgttcctggcccccagacgccatttgcaggcgggtggcttgggtcagcctccccgcccccacccgactcccgtcacgggagagcgcacaccgcgccccgagaaccaatcagcagccgcgttaggtaagggggccgcgagcccgcgcgaggctagcgcaccggcggcgggcggggcgctccggcaggccccgcccccgccttggccattgaaaggtcgctgggacgtccggcgggggtaaccatgtctgagtctggacacagtcagcctggactctatgggatagagcggcggcgacggtggaaggagcctggctctggtggcccccagaatctctctgggcctggtggtcgggagagggactacattgcaccatgggaaagagagagaagggatgccagcgaagagacaagcacttccgtcatgcagaaaacccccatcatcctctcaaaacctccagcagagcggtcaaaacagccaccacctccaacagcccctgctgccccgcctgctccagcccctctggagaagcccatcgttctcatgaagccacgggaggaggggaaggggcctgtggccgtgacaggtgcctctacccctgagggcaccgccccaccaccccctgcagcccctgcgccacccaagggggagaaggaggggcagagacccacacagcctgtgtaccagatccagaaccggggcatgggcactgccgcaccagcagccatggaccctgtcgtgggtcaggccaaactactgcccccagagcgcatgaagcacagcatcaagttggtggatgaccagatgaattggtgtgacagtgccatcgagtacctgttggatcagactgatgtgttggtggttggtgtcctgggcctccaggggacaggcaagtccatggtcatgtcattgttgtcagccaacactccagaggaggaccagaggacttatgttttccgggcccagagcgctgaaatgaaggaacgagggggcaaccagaccagtggcatcgacttctttattacccaagaacggattgttttcctggacacacagcccatcctgagcccttctatcctagaccatctcatcaataatgaccgcaaactgcctccagagtacaaccttccccacacttacgttgaaatgcagtcactccagattgctgccttccttttcacggtctgccatgtggtgattgttgtccaggactggttcacagacctcagtctctacaggttcctgcagacagcagagatggtgaagccctccaccccatcccccagccacgagtccagcagctcatcgggctccgatgaaggcaccgagtactacccccacctagtcttcttgcagaacaaagctcgccgagaggacttctgtcctcggaagctgcggcagatgcacctgatgattgaccagctcatggcccactcccacctgcgttacaagggaactctgtccatgttacaatgcaatgtcttcccggggcttccacctgacttcctggactctgaggtcaacttattcctggtacccttcatggacagtgaagcagagagtgaaaacccaccaagagcaggacctggttccagcccactcttctccctgctgcctgggtatcgtggccaccccagtttccagtccttggtgagcaagctccggagccaagtgatgtccatggcccggccacagctgtcacacacgatcctcaccgagaagaactggttccactacgctgcccggatctgggatggggtgagaaagtcctctgctctggcagagtacagccgcctgctggcctgaggccaaggagaggaatgtcatgcaggggacctcctgggtccgcagtgtactgcgagggagcacagatgtccatcccccgctggggtggagagcggcagcaggcctgatggatgagggatcgtggcttcccggcccagagacatgaggtgtccagggccaggccccccaccctcagttggggctgttccgggggtgactgtgagcgatcccaccccaaacctgagatggggtagcccgtcctgtgtcctccacagggacaagcagtgggaggagtctgaatggtcaccaggaagcccgggctccatcttgacctcctttttcagggacaggagcaacaggcccctcttccctgactctaagcccttccctgtaaggtgaggcagggtctggagagctctttattggaacagatctggtggttcaaataaacacagtcatgcaagcctgatctta

SEQ ID NO: 425733 - DNA, 1360 bp, Homo sapiens
  misc_feature (7)..(7): n is a, c, g, or t
  misc_feature (22)..(22): n is a, c, g, or t
  misc_feature (24)..(24): n is a, c, g, or t
ctcgtgnaatttcggcagcganancactccagaggaggaccagaggacttatgttttccgggcccagagcgctgaaatgaaggaacgagggggcaaccagaccagtggcatcgacttctttattacccaagaacggattgttttcctggacacacagcccatcctgagcccttctatcctagaccatctcatcaataatgaccgcaaactgcctccagagtacaaccttccccacacttacgttgaaatgcagtcactccagattgctgccttccttttcacggtctgccatgtggtgattgttgtccaggactggttcacagacctcagtctctacaggttcctgcagacagcagagatggtgaagccctccaccccatcccccagccacgagtccagcagctcatcgggctccgatgaaggcaccgagtactacccccacctagtcttcttgcagaacaaagctcgccgagaggacttctgtcctcggaagctgcggcagatgcacctgatgattgaccagctcatggcccactcccacctgcgttacaagggaactctgtccatgttacaatgcaatgtcttcccggggcttccacctgacttcctggactctgaggtcaacttattcctggtacccttcatggacagtgaagcagagagtgaaaacccaccaagagcaggacctggttccagcccactcttctccctgctgcctgggtatcgtggccaccccagtttccagtccttggtgagcaagctccggagccaagtgatgtccatggcccggccacagctgtcacacacgatcctcaccgagaagaactggttccactacgctgcccggatctgggatggggtgagaaagtcctctgctctggcagagtacagccgcctgctggcctgaggccaaggagaggaatgtcatgcaggggacctcctgggtccgcagtgtactgcgagggagcacagatgtccatcccccgctggggtggagagcggcagcaggcctgatggatgagggatcgtggcttcccggcccagagacatgaggtgtccagggccaggccccccaccctcagttggggctgttccgggggtgactgtgagcgatcccaccccaaacctgagatggggtagcccgtcctgtgtcctccacagggacaagcagtgggaggagtctgaatggtcaccaggaagcccgggctccatcttgacctcctttttcagggacaggagcaacaggcccctcttccctgactctaagcccttccctgtaaggtgaggcagggtctggagagctctttattggaacagatctggtggttcaaataaacacagtcatgcaagcctgatctta

SEQ ID NO: 425734 - DNA, 2038 bp, Homo sapiens
  misc_feature (255)..(255): n is a, c, g, or t
cgaagaggcacaactcgaaccccagatccgggccgctctccctcctgccggctcctcggcgtatccatttccctactcatctccccaccctcaaccccccaaccgcgcgcacgcgcattgagtcagagccgcggcgtcctcccgcctcccgctccggaacccgcatgcgtgctgaagccgaccgcctccatccacgcacgctcagcccggcgagcgcattcagttctcgagctccagccctcagcgcatgcgcangacgagtcgcctgagggaactgatctcagctcgggcccgcgttacatcctcctcctcttcttccttcggcccagctttccttaggggctgcaacccggacgccgaggccggtttcggagtggggagtgcccattttctctccttcccacgttcctggcccccagacgccatttgcaggcgggtggcttgggtcagcctccccgcccccacccgactcccgtcacgggagagcgcacaccgcgccccgagaaccaatcagcagccgcgttaggtaaccatgtctgagtctggacacagtcagcctggactctatgggatagagcggcggcgacggtggaaggagcctggctctggtggcccccagaatctctctgggcctggtggtcgggagagggactacattgcaccatgggaaagagagagaagggatgccagcgaagagacaagcacttccgtcatgcagaaaacccccatcatcctctcaaaacctccagcagagcggtcaaaacagccaccacctccaacagcccctgctgccccgcctgctccagcccctctggagaagcccatcgttctcatgaagccacgggaggaggggaaggggcctgtggccgtgacaggtgcctctacccctgagggcaccgccccaccaccccctgcagcccctgcgccacccaagggggagaaggaggggcagagacccacacagcctgtgtaccagatccagaaccggggcatgggcactgccgcaccagcagccatggaccctgtcgtgggtcaggccaaactactgcccccagagcgcatgaagcacagcatcaagttggtggatgaccagatgaattggtgtgacagtgccatcgagtacctgttggatcagactgatgtgttggtggttggtgtcctgggcctccaggggacaggcaagtccatggtcatgtcattgttgtcagccaacactccagaggaggaccagaggacttatgttttccgggcccagagcgctgaaatgaaggaacgagggggcaaccagaccagtggcatcgacttctttattacccaagaacggattgttttcctggacacacagcccatcctgagcccttctatcctagaccatctcatcaataatgaccgcaaactgcctccagagtacaaccttccccacacttacgttgaaatgcagtcactccagattgctgccttccttttcacggtctgccatgtggtgattgttgtccaggactggttcacagacctcagtctctacaggttcctgcagacagcagagatggtgaagccctccaccccatcccccagccacgagtccagcagctcatcgggctccgatgaaggcaccgagtactacccccacctagtcttcttgcagaacaaagctcgccgagaggacttctgtcctcggaagctgcggcagatgcacctgatgatcgtggcttcccggcccagagacatgaggtgtccagggccaggccccccaccctcagttggggctgttccgggggtgactgtgagcgatcccaccccaaacctgagatggggtagcccgtcctgtgtcctccacagggacaagcagtgggaggagtctgaatggtcaccaggaagcccgggctccatcttgacctcctttttcagggacaggagcaacaggcccctcttccctgactctaagcccttccctgtaaggtgaggcagggtctggagagctctttattggaacagatctggtggttcaaataaacacagtcatgcaagcctgatctta

SEQ ID NO: 425735 - DNA, 786 bp, Homo sapiens
ctcagccggggctgaactctcaggtgctccttgaagcccaggatgctgttaactgggagaaagaccctggcagtctatccctcttaccctccctgccccaactttccaggacctggttccagcccactcttctccctgctgcctgggtatcgtggccaccccagtttccagtccttggtgagcaagctccggagccaagtgatgtccatggcccggccacagctgtcacacacgatcctcaccgagaagaactggttccactacgctgcccggatctgggatggggtgagaaagtcctctgctctggcagagtacagccgcctgctggcctgaggccaaggagaggaatgtcatgcaggggacctcctgggtccgcagtgtactgcgagggagcacagatgtccatcccccgctggggtggagagcggcagcaggcctgatggatgagggatcgtggcttcccggcccagagacatgaggtgtccagggccaggccccccaccctcagttggggctgttccgggggtgactgtgagcgatcccaccccaaacctgagatggggtagcccgtcctgtgtcctccacagggacaagcagtgggaggagtctgaatggtcaccaggaagcccgggctccatcttgacctcctttttcagggacaggagcaacaggcccctcttccctgactctaagcccttccctgtaaggtgaggcagggtctggagagctctttattggaacagatctggtggttcaaataaacacagtcatgcaagcctgatctta

SEQ ID NO: 425736 - DNA, 2324 bp, Homo sapiens
caaataggctagtagaggccggtgttaatcggacgagtcgcctgagggaactgatctcagctcgggcccgcgttacatcctcctcctcttcttccttcggcccagctttccttaggggctgcaacccggacgccgaggccggtttcggagtggggagtgcccattttctctccttcccacgttcctggcccccagacgccatttgcaggcgggtggcttgggtcagcctccccgcccccacccgactcccgtcacgggagagcgcacaccgcgccccgagaaccaatcagcagccgcgttaggtaaccatgtctgagtctggacacagtcagcctggactctatgggatagagcggcggcgacggtggaaggagcctggctctggtggcccccagaatctctctgggcctggtggtcgggagagggactacattgcaccatgggaaagagagagaagggatgccagcgaagagacaagcacttccgtcatgcagaaaacccccatcatcctctcaaaacctccagcagagcggtcaaaacagccaccacctccaacagcccctgctgccccgcctgctccagcccctctggagaagcccatcgttctcatgaagccacgggaggaggggaaggggcctgtggccgtgacaggtgcctctacccctgagggcaccgccccaccaccccctgcagcccctgcgccacccaagggggagaaggaggggcagagacccacacagcctgtgtaccagatccagaaccggggcatgggcactgccgcaccagcagccatggaccctgtcgtgggtcaggccaaactactgcccccagagcgcatgaagcacagcatcaagttggtggatgaccagatgaattggtgtgacagtgccatcgagtacctgttggatcagactgatgtgttggtggttggtgtcctgggcctccaggggacaggcaagtccatggtcatgtcattgttgtcagccaacactccagaggaggaccagaggacttatgttttccgggcccagagcgctgaaatgaaggaacgagggggcaaccagaccagtggcatcgacttctttattacccaagaacggattgttttcctggacacacagcccatcctgagcccttctatcctagaccatctcatcaataatgaccgcaaactgcctccagagtacaaccttccccacacttacgttgaaatgcagtcactccagattgctgccttccttttcacggtctgccatgtggtgattgttgtccaggactggttcacagacctcagtctctacaggttcctgcagacagcagagatggtgaagccctccaccccatcccccagccacgagtccagcagctcatcgggctccgatgaaggcaccgagtactacccccacctagtcttcttgcagaacaaagctcgccgagaggacttctgtcctcggaagctgcggcagatgcacctgatgattgaccagctcatggcccactcccacctgcgttacaagggaactctgtccatgttacaatgcaatgtcttcccggggcttccacctgacttcctggactctgaggtcaacttattcctggtacccttcatggacagtgaagcagagagtgaaaacccaccaagagcaggacctggttccagcccactcttctccctgctgcctgggtatcgtggccaccccagtttccagtccttggtgagcaagctccggagccaagtgatgtccatggcccggccacagctgtcacacacgatcctcaccgagaagaactggttccactacgctgcccggatctgggatggggtgagaaagtcctctgctctggcagagtacagccgcctgctggcctgaggccaaggagaggaatgtcatgcaggggacctcctgggtccgcagtgtactgcgagggagcacagatgtccatcccccgctggggtggagagcggcagcaggcctgatggatgagggatcgtggcttcccggcccagagacatgaggtgtccagggccaggccccccaccctcagttggggctgttccgggggtgactgtgagcgatcccaccccaaacctgagatggggtagcccgtcctgtgtcctccacagggacaagcagtgggaggagtctgaatggtcaccaggaagcccgggctccatcttgacctcctttttcagggacaggagcaacaggcccctcttccctgactctaagcccttccctgtaaggtgaggcagggtctggagagctctttattggaacagatctggtggttcaaataaacacagtcatgcaagcctgatctta

SEQ ID NO: 425737 - DNA, 2628 bp, Homo sapiens
  misc_feature (255)..(255): n is a, c, g, or t
cgaagaggcacaactcgaaccccagatccgggccgctctccctcctgccggctcctcggcgtatccatttccctactcatctccccaccctcaaccccccaaccgcgcgcacgcgcattgagtcagagccgcggcgtcctcccgcctcccgctccggaacccgcatgcgtgctgaagccgaccgcctccatccacgcacgctcagcccggcgagcgcattcagttctcgagctccagccctcagcgcatgcgcangacgagtcgcctgagggaactgatctcagctcgggcccgcgttacatcctcctcctcttcttccttcggcccagctttccttaggggctgcaacccggacgccgaggccggtttcggagtggggagtgcccattttctctccttcccacgttcctggcccccagacgccatttgcaggcgggtggcttgggtcagcctccccgcccccacccgactcccgtcacgggagagcgcacaccgcgccccgagaaccaatcagcagccgcgttaggtaaccatgtctgagtctggacacagtcagcctggactctatgggatagagcggcggcgacggtggaaggagcctggctctggtggcccccagaatctctctgggcctggtggtcgggagagggactacattgcaccatgggaaagagagagaagggatgccagcgaagagacaagcacttccgtcatgcagaaaacccccatcatcctctcaaaacctccagcagagcgggtgagcagagaaggagggaggagggggagccgttagggaagggattgcccccattgatgggattttttttacctccgtagtcaaaacagccaccacctccaacagcccctgctgccccgcctgctccagcccctctggagaagcccatcgttctcatgaagccacgggaggaggggaaggggcctgtggccgtgacaggtgcctctacccctgagggcaccgccccaccaccccctgcagcccctgcgccacccaagggggagaaggaggggcagagacccacacagcctgtgtaccagatccagaaccggggcatgggcactgccgcaccagcagccatggaccctgtcgtgggtcaggccaaactactgcccccagagcgcatgaagcacagcatcaagttggtggatgaccagatgaattggtgtgacagtgccatcgagtacctgttggatcagactgatgtgttggtggttggtgtcctgggcctccaggggacaggcaagtccatggtcatgtcattgttgtcagccaacactccagaggaggaccagaggacttatgttttccgggcccagagcgctgaaatgaaggaacgagggggcaaccagaccagtggcatcgacttctttattacccaagaacggattgttttcctggacacacagcccatcctgagcccttctatcctagaccatctcatcaataatgaccgcaaactgcctccagagtacaaccttccccacacttacgttgaaatgcagtcactccagattgctgccttccttttcacggtctgccatgtggtgattgttgtccaggactggttcacagacctcagtctctacaggttcctgcagacagcagagatggtgaagccctccaccccatcccccagccacgagtccagcagctcatcgggctccgatgaaggcaccgagtactacccccacctagtcttcttgcagaacaaagctcgccgagaggacttctgtcctcggaagctgcggcagatgcacctgatgattgaccagctcatggcccactcccacctgcgttacaagggaactctgtccatgttacaatgcaatgtcttcccggggcttccacctgacttcctggactctgaggtcaacttattcctggtacccttcatggacagtgaagcagagagtgaaaacccaccaagagcaggacctggttccagcccactcttctccctgctgcctgggtatcgtggccaccccagtttccagtccttggtgagcaagctccggagccaagtgatgtccatggcccggccacagctgtcacacacgatcctcaccgagaagaactggttccactacgctgcccggatctgggatggggtgagaaagtcctctgctctggcagagtacagccgcctgctggcctgaggccaaggagaggaatgtcatgcaggggacctcctgggtccgcagtgtactgcgagggagcacagatgtccatcccccgctggggtggagagcggcagcaggcctgatggatgagggatcgtggcttcccggcccagagacatgaggtgtccagggccaggccccccaccctcagttggggctgttccgggggtgactgtgagcgatcccaccccaaacctgagatggggtagcccgtcctgtgtcctccacagggacaagcagtgggaggagtctgaatggtcaccaggaagcccgggctccatcttgacctcctttttcagggacaggagcaacaggcccctcttccctgactctaagcccttccctgtaaggtgaggcagggtctggagagctctttattggaacagatctggtggttcaaataaacacagtcatgcaagcctgatctta

SEQ ID NO: 425738 - DNA, 2040 bp, Homo sapiens
atggctgcaattgatgaggaaggagggagagagataggagatgaagtcaatatattggtgaaggaacagacacagttaggggtcaagactctcatgaggttactcaaggaaccagagaaagaacgggactcagactcagatttctcccctcttcagcagactgagggatgccagcgaagagacaagcacttccgtcatgcagaaaacccccatcatcctctcaaaacctccagcagagcggcccctctggagaagcccatcgttctcatgaagccacgggaggaggggaaggggcctgtggccgtgacaggtgcctctacccctgagggcaccgccccaccaccccctgcagcccctgcgccacccaagggggagaaggaggggcagagacccacacagcctgtgtaccagatccagaaccggggcatgggcactgccgcaccagcagccatggaccctgtcgtgggtcaggccaaactactgcccccagagcgcatgaagcacagcatcaagttggtggatgaccagatgaattggtgtgacagtgccatcgagtacctgttggatcagactgatgtgttggtggttggtgtcctgggcctccaggggacaggcaagtccatggtcatgtcattgttgtcagccaacactccagaggaggaccagaggacttatgttttccgggcccagagcgctgaaatgaaggaacgagggggcaaccagaccagtggcatcgacttctttattacccaagaacggattgttttcctggacacacagcccatcctgagcccttctatcctagaccatctcatcaataatgaccgcaaactgcctccagagtacaaccttccccacacttacgttgaaatgcagtcactccagattgctgccttccttttcacggtctgccatgtggtgattgttgtccaggactggttcacagacctcagtctctacaggctgtgggacctggggtgcaagtgcaagagcaacagccactcaccccaaaccccaaggttcctgcagacagcagagatggtgaagccctccaccccatcccccagccacgagtccagcagctcatcgggctccgatgaaggcaccgagtactacccccacctagtcttcttgcagaacaaagctcgccgagaggacttctgtcctcggaagctgcggcagatgcacctgatgattgaccagctcatggcccactcccacctgcgttacaagggaactctgtccatgttacaatgcaatgtcttcccggggcttccacctgacttcctggactctgaggtcaacttattcctggtacccttcatggacagtgaagcagagagtgaaaacccaccaagagcaggacctggttccagcccactcttctccctgctgcctgggtatcgtggccaccccagtttccagtccttggtgagcaagctccggagccaagtgatgtccatggcccggccacagctgtcacacacgatcctcaccgagaagaactggttccactacgctgcccggatctgggatggggtgagaaagtcctctgctctggcagagtacagccgcctgctggcctgaggccaaggagaggaatgtcatgcaggggacctcctgggtccgcagtgtactgcgagggagcacagatgtccatcccccgctggggtggagagcggcagcaggcctgatggatgagggatcgtggcttcccggcccagagacatgaggtgtccagggccaggccccccaccctcagttggggctgttccgggggtgactgtgagcgatcccaccccaaacctgagatggggtagcccgtcctgtgtcctccacagggacaagcagtgggaggagtctgaatggtcaccaggaagcccgggctccatcttgacctcctttttcagggacaggagcaacaggcccctcttccctgactctaagcccttccctgtaaggtgaggcagggtctggagagctctttattggaacagatctggtggttcaaataaacacagtcatgcaagcctgatctta

SEQ ID NO: 425739 - DNA, 1495 bp, Homo sapiens
  misc_feature (255)..(255): n is a, c, g, or t
cgaagaggcacaactcgaaccccagatccgggccgctctccctcctgccggctcctcggcgtatccatttccctactcatctccccaccctcaaccccccaaccgcgcgcacgcgcattgagtcagagccgcggcgtcctcccgcctcccgctccggaacccgcatgcgtgctgaagccgaccgcctccatccacgcacgctcagcccggcgagcgcattcagttctcgagctccagccctcagcgcatgcgcangacgagtcgcctgagggaactgatctcagctcgggcccgcgttacatcctcctcctcttcttccttcggcccagctttccttaggggctgcaacccggacgccgaggccggtttcggagtggggagtgcccattttctctccttcccacgttcctggcccccagacgccatttgcaggcgggtggcttgggtcagcctccccgcccccacccgactcccgtcacgggagagcgcacaccgcgccccgagaaccaatcagcagccgcgttaggtaaccatgtctgagtctggacacagtcagcctggactctatgggatagagcggcggcgacggtggaaggagcctggctctggtggcccccagaatctctctgggcctggtggtcgggagagggactacattgcaccatgggaaagagagagaagggatgccagcgaagagacaagcacttccgtcatgcagaaaacccccatcatcctctcaaaacctccagcagagcggtcaaaacagccaccacctccaacagcccctgctgccccgcctgctccagcccctctggagaagcccatcgttctcatgaagccacgggaggaggggaaggggcctgtggccgtgacaggtgcctctacccctgagggcaccgccccaccaccccctgcagcccctgcgccacccaagggggagaaggaggggcagagacccacacagcctgtgtaccagatccagaaccggggcatgggcactgccgcaccagcagccatggaccctgtcgtgggtcaggccaaactactgcccccagagcgcatgaagcacagcatcaagttggtggatgaccagatgaattggtgtgacagtgccatcgagtacctgttggatcagactgatgtgttggtggttggtgtcctgggcctccaggggacaggcaagtccatggtcatgtcattgttgtcagccaacactccagaggaggaccagaggacttatgttttccgggcccagagcgctgaaatgaaggaacgagggggcaaccagaccagtggcatcgacttctttattacccaagaacggattgttttcctggacacacaggtgccagccccgcctgcctttgccccaccctgccacatcctgcattgagcctcttcctggaatgtgattaagccagaaccctgcgtggattccatgtgcttccagtcaagccatggacatactggctgccctggggcaaattgtgtcttt

SEQ ID NO: 425740 - DNA, 835 bp, Homo sapiens
taaatttattgaattttacttctcccgctccaggtaatatttacagattttaaggttgttaacgttctggcagtgtgtaacatgccatttgaaatccgtttgccagaattcacaaagaacaatagacctcatgccagttacgaacctgaacttcatcctgctgtgtgctatcggataaaatctctaagagctacattacagattttttcaacaggaagtatcacagtaacagggcccaatgtaaaggctgttgctactgctgtggaacagatttacccatttgtgtttgaaagcaggaaagaaattttataattcaccacttaattggttagaatctctaactgagcaccttttaaacctgctgcacattggactcaaaaggaaaactggaccaacaataattgaggaaatagactcttttattcattcacggctacagtgtaagctccagtccctttggattttattccaaaccttgctgtaatataaaaggaagtttacaagacatgatattgctgcttttacaaaaggacattctatttattttcgcagtaattctcatgtccccataagcagagctgtcacagtgtgcactaccttagattgttttattgtcgtcattgttatttttttccattttgagctaatgtgttttatttgtgaatagtcttttacatttttgtatgctgaatatgggcaccaaagaacctgtaaaagttatctttttcaattgaatgtgcacaaataaaagtgttcggatcgtccccaatccgattctatttcggctgttattgagatctatccctatcttattatttaaacctcgcgcctcttg

SEQ ID NO: 425741 - DNA, 2060 bp, Homo sapiens
ctcgcgcactgtctctatgctccccagcgtctagtctatttattgtcgcggggaagctgcggccgcctcgcacccggaacaacaaagcaaggaagacggagtccgagcctcgggggctcctagcaacgggccggggcgggagttccatggagactggggagcgcgcccgtctcatcctcatccttgtcctccagcttctccttcgcatccgacgcaaccggcagcagcgctgccgccgcgtcctcagccaccgctccctcttcccacggatgtgatcttcgtggtggaaagctaaattttaaaaccaccccaatggatgcagacagtgatgttgcattggacattctaattacaaatgtagtctgtgtttttagaacaagatgtcatttaaacttaaggaagattgctttggaaggagcaaatgtaatttataaacgtgatgttggaaaagtattaatgaagcttagaaaacctagaattacagctacaatttggtcctcaggaaaaattatttgcactggagcaacaagtgaagaagaagctaaatttggtgccagacgcttagcccgtagtctgcagaaactaggttttcaggtaatatttacagattttaaggttgttaacgttctggcagtgtgtaacatgccatttgaaatccgtttgccagaattcacaaagaacaatagacctcatgccagttacgaacctgaacttcatcctgctgtgtgctatcggataaaatctctaagagctacattacagattttttcaacaggaagtatcacagtaacagggcccaatgtaaaggctgttgctactgctgtggaacagatttacccatttgtgtttgaaagcaggaaagaaattttataattcaccacttaattggttagaatctctaactgagcaccttttaaacctgctgcacattggactcaaaaggaaaactggaccaacaataattgaggaaatagactcttttattcattcacggctacagtgtaagctccagtccctttggattttattccaaaccttgctgtaatataaaaggaagtttacaagacatgatattgctgcttttacaaaaggacattctatttattttcgcagtaattctcatgtccccataagcagagctgtcacagtgtgcactaccttagattgttttattgtcgtcattgttatttttttccattttgagctaatgtgttttatttgtgaatagtcttttacatttttgtatgctgaatatgggcaccaaagaacctgtaaaagttatctttttcaattgaatgtgcacaaataaaagtttggaaaagatctctcttcattctataacttttattccccattttctattttaacaaaaattgtattcatacttcttttttttaaaatctatgcaagcttaagactttggctaaagtgtgttggcttctttttgaagtgtattttgtgtgtgtgtgtgtgtgtgtgtgtatatatatatatatatatgcaccacatgtgtatagtatcttttaatgctctgttaccaaataacaaataggaattttttttcttgcagattagaaataaaaacgtgtatataaactctagggaaccagactagaagtttatagataaaggataatgttttatgttgctaatttaatatgatagaaaatgttaaataacttgtaaaggttaagaaattgtagttttaagaagagaaacctcttacccactagatggaaatgagaaagaagctgtgatgaatggtgcctcatttggacctttgtttttctggaaagactcaacacctgtagttgtagagaagtgattgaggttcttgactttaatcttgggttgatgcccaagcctatactaagagtcttgtcagaagttggtaacatggagatgttttaacaagaagtgcccataagctgcctctgtgccacagtgtaattatcaaatagccccacttgaatttgaaagccattttgtgtgatactgtccttccccttgctgtatcttatttaatggagttaaagagtgactattcagtatatgagatt

SEQ ID NO: 425742 - DNA, 2594 bp, Homo sapiens
ggccgttacgcgattttcgctcccgcgggcagcgcctctcaggccactcccgagggaccccgaggacgcactcgggccccagggcgacggttcaaacgggccattgtgcgcccccggggtcccccggcccctgcagggctacttgggcgcagagccgcggagggtctccgttcctagaggtcctcctatcccgggctgcctgagtcctcgccagcatccgccctctcccactcccatccttcctggatccgcctctcggttcccgagggacagtcccgaccgcaaacccacgtagagtaaggaatgtgggacaggcgacagaagtggcatacggtcctgcgttatccctccgtctcgccacaccttgtgtctccatctctccccacttccttccctccgtctgtcatctgtcatccccggtcgctctaagaccaggattccaattcgcctagtgaggaatctcactaggggaatttatcgcgacatcataaattaacgggttcattttgactgaaaaagcgaaggacttttttcaggcagaaaacaagtctcgtctggacgcgtctagtctatttattgtcgcggggaagctgcggccgcctcgcacccggaacaacaaagcaaggaagacggagtccgagcctcgggggctcctagcaacgggccggggcgggagttccatggagactggggagcgcgcccgtctcatcctcatccttgtcctccagcttctccttcgcatccgacgcaaccggcagcagcgctgccgccgcgtcctcagccaccgctccctcttcccacggatgtgatcttcgtggtggaaagctaaattttaaaaccaccccaatggatgcagacagtgatgttgcattggacattctaattacaaatgtagtctgtgtttttagaacaagatgtcatttaaacttaaggaagattgctttggaaggagcaaatgtaatttataaacgtgatgttggaaaagtattaatgaagcttagaaaacctagaattacagctacaatttggtcctcaggaaaaattatttgcactggagcaacaagtgaagaagaagctaaatttggtgccagacgcttagcccgtagtctgcagaaactaggttttcaggtaatatttacagattttaaggttgttaacgttctggcagtgtgtaacatgccatttgaaatccgtttgccagaattcacaaagaacaatagacctcatgccagttacgaacctgaacttcatcctgctgtgtgctatcggataaaatctctaagagctacattacagattttttcaacaggaagtatcacagtaacagggcccaatgtaaaggctgttgctactgctgtggaacagatttacccatttgtgtttgaaagcaggaaagaaattttataattcaccacttaattggttagaatctctaactgagcaccttttaaacctgctgcacattggactcaaaaggaaaactggaccaacaataattgaggaaatagactcttttattcattcacggctacagtgtaagctccagtccctttggattttattccaaaccttgctgtaatataaaaggaagtttacaagacatgatattgctgcttttacaaaaggacattctatttattttcgcagtaattctcatgtccccataagcagagctgtcacagtgtgcactaccttagattgttttattgtcgtcattgttatttttttccattttgagctaatgtgttttatttgtgaatagtcttttacatttttgtatgctgaatatgggcaccaaagaacctgtaaaagttatctttttcaattgaatgtgcacaaataaaagtttggaaaagatctctcttcattctataacttttattccccattttctattttaacaaaaattgtattcatacttcttttttttaaaatctatgcaagcttaagactttggctaaagtgtgttggcttctttttgaagtgtattttgtgtgtgtgtgtgtgtgtgtgtgtatatatatatatatatatgcaccacatgtgtatagtatcttttaatgctctgttaccaaataacaaataggaattttttttcttgcagattagaaataaaaacgtgtatataaactctagggaaccagactagaagtttatagataaaggataatgttttatgttgctaatttaatatgatagaaaatgttaaataacttgtaaaggttaagaaattgtagttttaagaagagaaacctcttacccactagatggaaatgagaaagaagctgtgatgaatggtgcctcatttggacctttgtttttctggaaagactcaacacctgtagttgtagagaagtgattgaggttcttgactttaatcttgggttgatgcccaagcctatactaagagtcttgtcagaagttggtaacatggagatgttttaacaagaagtgcccataagctgcctctgtgccacagtgtaattatcaaatagccccacttgaatttgaaagccattttgtgtgatactgtccttccccttgctgtatcttatttaatggagttaaagagtgactattcagtatatgagatt

SEQ ID NO: 425743 - DNA, 2353 bp, Homo sapiens
ggccgttacgcgattttcgctcccgcgggcagcgcctctcaggccactcccgagggaccccgaggacgcactcgggccccagggcgacggttcaaacgggccattgtgcgcccccggggtcccccggcccctgcagggctacttgggcgcagagccgcggagggtctccgttcctagaggtcctcctatcccgggctgcctgagtcctcgccagcatccgccctctcccactcccatccttcctggatccgcctctcggttcccgagggacagtcccgaccgcaaacccacgtagagtaaggaatgtgggacaggcgacagaagtggcatacggtcctgcgttatccctccgtctcgccacaccttgtgtctccatctctccccacttccttccctccgtctgtcatctgtcatccccggtcgctctaagaccaggattccaattcgcctagtgaggaatctcactaggggaatttatcgcgacatcataaattaacgggttcattttgactgaaaaagcgaaggacttttttcaggcagaaaacaagtctcgtctggacggatgtgatcttcgtggtggaaagctaaattttaaaaccaccccaatggatgcagacagtgatgttgcattggacattctaattacaaatgtagtctgtgtttttagaacaagatgtcatttaaacttaaggaagattgctttggaaggagcaaatgtaatttataaacgtgatgttggaaaagtattaatgaagcttagaaaacctagaattacagctacaatttggtcctcaggaaaaattatttgcactggagcaacaagtgaagaagaagctaaatttggtgccagacgcttagcccgtagtctgcagaaactaggttttcaggtaatatttacagattttaaggttgttaacgttctggcagtgtgtaacatgccatttgaaatccgtttgccagaattcacaaagaacaatagacctcatgccagttacgaacctgaacttcatcctgctgtgtgctatcggataaaatctctaagagctacattacagattttttcaacaggaagtatcacagtaacagggcccaatgtaaaggctgttgctactgctgtggaacagatttacccatttgtgtttgaaagcaggaaagaaattttataattcaccacttaattggttagaatctctaactgagcaccttttaaacctgctgcacattggactcaaaaggaaaactggaccaacaataattgaggaaatagactcttttattcattcacggctacagtgtaagctccagtccctttggattttattccaaaccttgctgtaatataaaaggaagtttacaagacatgatattgctgcttttacaaaaggacattctatttattttcgcagtaattctcatgtccccataagcagagctgtcacagtgtgcactaccttagattgttttattgtcgtcattgttatttttttccattttgagctaatgtgttttatttgtgaatagtcttttacatttttgtatgctgaatatgggcaccaaagaacctgtaaaagttatctttttcaattgaatgtgcacaaataaaagtttggaaaagatctctcttcattctataacttttattccccattttctattttaacaaaaattgtattcatacttcttttttttaaaatctatgcaagcttaagactttggctaaagtgtgttggcttctttttgaagtgtattttgtgtgtgtgtgtgtgtgtgtgtgtatatatatatatatatatgcaccacatgtgtatagtatcttttaatgctctgttaccaaataacaaataggaattttttttcttgcagattagaaataaaaacgtgtatataaactctagggaaccagactagaagtttatagataaaggataatgttttatgttgctaatttaatatgatagaaaatgttaaataacttgtaaaggttaagaaattgtagttttaagaagagaaacctcttacccactagatggaaatgagaaagaagctgtgatgaatggtgcctcatttggacctttgtttttctggaaagactcaacacctgtagttgtagagaagtgattgaggttcttgactttaatcttgggttgatgcccaagcctatactaagagtcttgtcagaagttggtaacatggagatgttttaacaagaagtgcccataagctgcctctgtgccacagtgtaattatcaaatagccccacttgaatttgaaagccattttgtgtgatactgtccttccccttgctgtatcttatttaatggagttaaagagtgactattcagtatatgagatt

SEQ ID NO: 425744 - DNA, 2697 bp, Homo sapiens
ggccgttacgcgattttcgctcccgcgggcagcgcctctcaggccactcccgagggaccccgaggacgcactcgggccccagggcgacggttcaaacgggccattgtgcgcccccggggtcccccggcccctgcagggctacttgggcgcagagccgcggagggtctccgttcctagaggtcctcctatcccgggctgcctgagtcctcgccagcatccgccctctcccactcccatccttcctggatccgcctctcggttcccgagggacagtcccgaccgcaaacccacgtagagtaaggaatgtgggacaggcgacagaagtggcatacggtcctgcgttatccctccgtctcgccacaccttgtgtctccatctctccccacttccttccctccgtctgtcatctgtcatccccggtcgctctaagaccaggattccaattcgcctagtgaggaatctcactaggggaatttatcgcgacatcataaattaacgggttcattttgactgaaaaagcgaaggacttttttcaggcagaaaacaagtctcgtctggacgcgtctagtctatttattgtcgcggggaagctgcggccgcctcgcacccggaacaacaaagcaaggaagacggagtccgagcctcgggggctcctagcaacgggccggggcgggagttccatggagactggggagcgcgcccgtctcatcctcatccttgtcctccagcttctccttcgcatccgacgcaaccggcagcagcgctgccgccgcgtcctcagccaccgctccctcttcccacggagcgaggtttcaccaggctggtctccaactcctgacctcaaatgatccacccatcttggcctcccagagtgctgagattacaggcgtgaggcaccactcctggatgtgatcttcgtggtggaaagctaaattttaaaaccaccccaatggatgcagacagtgatgttgcattggacattctaattacaaatgtagtctgtgtttttagaacaagatgtcatttaaacttaaggaagattgctttggaaggagcaaatgtaatttataaacgtgatgttggaaaagtattaatgaagcttagaaaacctagaattacagctacaatttggtcctcaggaaaaattatttgcactggagcaacaagtgaagaagaagctaaatttggtgccagacgcttagcccgtagtctgcagaaactaggttttcaggtaatatttacagattttaaggttgttaacgttctggcagtgtgtaacatgccatttgaaatccgtttgccagaattcacaaagaacaatagacctcatgccagttacgaacctgaacttcatcctgctgtgtgctatcggataaaatctctaagagctacattacagattttttcaacaggaagtatcacagtaacagggcccaatgtaaaggctgttgctactgctgtggaacagatttacccatttgtgtttgaaagcaggaaagaaattttataattcaccacttaattggttagaatctctaactgagcaccttttaaacctgctgcacattggactcaaaaggaaaactggaccaacaataattgaggaaatagactcttttattcattcacggctacagtgtaagctccagtccctttggattttattccaaaccttgctgtaatataaaaggaagtttacaagacatgatattgctgcttttacaaaaggacattctatttattttcgcagtaattctcatgtccccataagcagagctgtcacagtgtgcactaccttagattgttttattgtcgtcattgttatttttttccattttgagctaatgtgttttatttgtgaatagtcttttacatttttgtatgctgaatatgggcaccaaagaacctgtaaaagttatctttttcaattgaatgtgcacaaataaaagtttggaaaagatctctcttcattctataacttttattccccattttctattttaacaaaaattgtattcatacttcttttttttaaaatctatgcaagcttaagactttggctaaagtgtgttggcttctttttgaagtgtattttgtgtgtgtgtgtgtgtgtgtgtgtatatatatatatatatatgcaccacatgtgtatagtatcttttaatgctctgttaccaaataacaaataggaattttttttcttgcagattagaaataaaaacgtgtatataaactctagggaaccagactagaagtttatagataaaggataatgttttatgttgctaatttaatatgatagaaaatgttaaataacttgtaaaggttaagaaattgtagttttaagaagagaaacctcttacccactagatggaaatgagaaagaagctgtgatgaatggtgcctcatttggacctttgtttttctggaaagactcaacacctgtagttgtagagaagtgattgaggttcttgactttaatcttgggttgatgcccaagcctatactaagagtcttgtcagaagttggtaacatggagatgttttaacaagaagtgcccataagctgcctctgtgccacagtgtaattatcaaatagccccacttgaatttgaaagccattttgtgtgatactgtccttccccttgctgtatcttatttaatggagttaaagagtgactattcagtatatgagatt

SEQ ID NO: 425745 - DNA, 1425 bp, Homo sapiens
ggccgttacgcgattttcgctcccgcgggcagcgcctctcaggccactcccgagggaccccgaggacgcactcgggccccagggcgacggttcaaacgggccattgtgcgcccccggggtcccccggcccctgcagggctacttgggcgcagagccgcggagggtctccgttcctagaggtcctcctatcccgggctgcctgagtcctcgccagcatccgccctctcccactcccatccttcctggatccgcctctcggttcccgagggacagtcccgaccgcaaacccacgtagagtaaggaatgtgggacaggcgacagaagtggcatacggtcctgcgttatccctccgtctcgccacaccttgtgtctccatctctccccacttccttccctccgtctgtcatctgtcatccccggtcgctctaagaccaggattccaattcgcctagtgaggaatctcactaggggaatttatcgcgacatcataaattaacgggttcattttgactgaaaaagcgaaggacttttttcaggcagaaaacaagtctcgtctggacgcgtctagtctatttattgtcgcggggaagctgcggccgcctcgcacccggaacaacaaagcaaggaagacggagtccgagcctcgggggctcctagcaacgggccggggcgggagttccatggagactggggagcgcgcccgtctcatcctcatccttgtcctccagcttctccttcgcatccgacgcaaccggcagcagcgctgccgccgcgtcctcagccaccgctccctcttcccacggatgtgatcttcgtggtggaaagctaaattttaaaaccaccccaatggatgcagacagtgatgttgcattggacattctaattacaaatgtagtctgtgtttttagaacaagatgtcatttaaacttaaggaagattgctttggaaggagcaaatgtaatttataaacgtgatgttggaaaagtattaatgaagcttagaaaacctagaattacagctacaatttggtcctcaggaaaaattatttgcactggagcaacaagtgaagaagaagctaaatttggtgccagacgcttagcccgtagtctgcagaaactaggttttcaggtaatatttacagattttaaggttgttaacgttctggcagtgtgtaacatgccatttgaaatccgtttgccagaattcacaaagaacaatagacctcatgccagttacgaacctgaacttcatcctgctgtgtgctatcggataaaatctctaagagctacattacagattttttcaacaggaagtatcacagtaacagctctctgtttctacactttggagcatggatgtctgagaagccacaaagcctattgaacaatctctactaagtatataataaaacatgatatgtaaaac

SEQ ID NO: 425746 - DNA, 1499 bp, Homo sapiens
taaatttattgaattttacttctcccgctccaggtaatatttacagattttaaggttgttaacgttctggcagtgtgtaacatgccatttgaaatccgtttgccagaattcacaaagaacaatagacctcatgccagttacgaacctgaacttcatcctgctgtgtgctatcggataaaatctctaagagctacattacagattttttcaacaggaagtatcacagtaacagggcccaatgtaaaggctgttgctactgctgtggaacagatttacccatttgtgtttgaaagcaggaaagaaattttataattcaccacttaattggttagaatctctaactgagcaccttttaaacctgctgcacattggactcaaaaggaaaactggaccaacaataattgaggaaatagactcttttattcattcacggctacagtgtaagctccagtccctttggattttattccaaaccttgctgtaatataaaaggaagtttacaagacatgatattgctgcttttacaaaaggacattctatttattttcgcagtaattctcatgtccccataagcagagctgtcacagtgtgcactaccttagattgttttattgtcgtcattgttatttttttccattttgagctaatgtgttttatttgtgaatagtcttttacatttttgtatgctgaatatgggcaccaaagaacctgtaaaagttatctttttcaattgaatgtgcacaaataaaagtttggaaaagatctctcttcattctataacttttattccccattttctattttaacaaaaattgtattcatacttcttttttttaaaatctatgcaagcttaagactttggctaaagtgtgttggcttctttttgaagtgtattttgtgtgtgtgtgtgtgtgtgtgtgtatatatatatatatatatgcaccacatgtgtatagtatcttttaatgctctgttaccaaataacaaataggaattttttttcttgcagattagaaataaaaacgtgtatataaactctagggaaccagactagaagtttatagataaaggataatgttttatgttgctaatttaatatgatagaaaatgttaaataacttgtaaaggttaagaaattgtagttttaagaagagaaacctcttacccactagatggaaatgagaaagaagctgtgatgaatggtgcctcatttggacctttgtttttctggaaagactcaacacctgtagttgtagagaagtgattgaggttcttgactttaatcttgggttgatgcccaagcctatactaagagtcttgtcagaagttggtaacatggagatgttttaacaagaagtgcccataagctgcctctgtgccacagtgtaattatcaaatagccccacttgaatttgaaagccattttgtgtgatactgtccttccccttgctgtatcttatttaatggagttaaagagtgactattcagtatatgagatt

SEQ ID NO: 425747 - DNA, 1319 bp, Homo sapiens
ctcgcgcactgtctctatgctccccagcgtctagtctatttattgtcgcggggaagctgcggccgcctcgcacccggaacaacaaagcaaggaagacggagtccgagcctcgggggctcctagcaacgggccggggcgggagttccatggagactggggagcgcgcccgtctcatcctcatccttgtcctccagcttctccttcgcatccgacgcaaccggcagcagcgctgccgccgcgtcctcagccaccgctccctcttcccacggatgtgatcttcgtggtggaaagctaaattttaaaaccaccccaatggatgcagacagtgatgttgcattggacattctaattacaaatgtagtctgtgtttttagaacaagatgtcatttaaacttaaggaagattgctttggaaggagcaaatgtaatttataaacgtgatgttggaaaagtattaatgaagcttagaaaacctagaattacagctacaatttggtcctcaggaaaaattatttgcactggagcaacaagtgaagaagaagctaaatttggtgccagacgcttagcccgtagtctgcagaaactaggttttcaggtaatatttacagattttaaggttgttaacgttctggcagtgtgtaacatgccatttgaaatccgtttgccagaattcacaaagaacaatagacctcatgccagttacgaacctgaacttcatcctgctgtgtgctatcggataaaatctctaagagctacattacagattttttcaacaggaagtatcacagtaacagggcccaatgtaaaggctgttgctactgctgtggaacagatttacccatttgtgtttgaaagcaggaaagaaattttataattcaccacttaattggttagaatctctaactgagcaccttttaaacctgctgcacaataattgaggaaatagactcttttattcattcacggctacagtgtaagctccagtccctttggattttattccaaaccttgctgtaatataaaaggaagtttacaagacatgatattgctgcttttacaaaaggacattctatttattttcgcagtaattctcatgtccccataagcagagctgtcacagtgtgcactaccttagattgttttattgtcgtcattgttatttttttccattttgagctaatgtgttttatttgtgaatagtcttttacatttttgtatgctgaatatgggcaccaaagaacctgtaaaagttatctttttcaattgaatgtgcacaaataaaagtttggactcaaaaggaaaactggaccaacaaaagat

SEQ ID NO: 425748 - DNA, 1379 bp, Homo sapiens
ggccgttacgcgattttcgctcccgcgggcagcgcctctcaggccactcccgagggaccccgaggacgcactcgggccccagggcgacggttcaaacgggccattgtgcgcccccggggtcccccggcccctgcagggctacttgggcgcagagccgcggagggtctccgttcctagaggtcctcctatcccgggctgcctgagtcctcgccagcatccgccctctcccactcccatccttcctggatccgcctctcggttcccgagggacagtcccgaccgcaaacccacgtagagtaaggaatgtgggacaggcgacagaagtggcatacggtcctgcgttatccctccgtctcgccacaccttgtgtctccatctctccccacttccttccctccgtctgtcatctgtcatccccggtcgctctaagaccaggattccaattcgcctagtgaggaatctcactaggggaatttatcgcgacatcataaattaacgggttcattttgactgaaaaagcgaaggacttttttcaggcagaaaacaagtctcgtctggacgcgtctagtctatttattgtcgcggggaagctgcggccgcctcgcacccggaacaacaaagcaaggaagacggagtccgagcctcgggggctcctagcaacgggccggggcgggagttccatggagactggggagcgcgcccgtctcatcctcatccttgtcctccagcttctccttcgcatccgacgcaaccggcagcagcgctgccgccgcgtcctcagccaccgctccctcttcccacggatgtgatcttcgtggtggaaagctaaattttaaaaccaccccaatggatgcagacagtgatgttgcattggacattctaattacaaatgtagtctgtgtttttagaacaagatgtcatttaaacttaaggaagattgctttggaaggagcaaatgtaatttataaacgtgatgttggaaaagtattaatgaagcttagaaaacctagaattacagctacaatttggtcctcaggaaaaattatttgcactggagcaacaagtgaagaagaagctaaatttggtgccagacgcttagcccgtagtctgcagaaactaggttttcaggtaatatttacagattttaaggttgttaacgttctggcagtgtgtaacatgccatttgaaatccgtttgccagaattcacaaagaacaatagacctcatgccagttacgaacctgaacttcatcctgctgtgtgctatcggataaaatctctaagagctacattacagattttttcaacaggaagtatcacagtaacaggtattctatgatattgaaaccacacttatcaattatggattgaatgatacaa

SEQ ID NO: 425749 - DNA, 1069 bp, Homo sapiens
ggccgttacgcgattttcgctcccgcgggcagcgcctctcaggccactcccgagggaccccgaggacgcactcgggccccagggcgacggttcaaacgggccattgtgcgcccccggggtcccccggcccctgcagggctacttgggcgcagagccgcggagggtctccgttcctagaggtcctcctatcccgggctgcctgagtcctcgccagcatccgccctctcccactcccatccttcctggatccgcctctcggttcccgagggacagtcccgaccgcaaacccacgtagagtaaggaatgtgggacaggcgacagaagtggcatacggtcctgcgttatccctccgtctcgccacaccttgtgtctccatctctccccacttccttccctccgtctgtcatctgtcatccccggtcgctctaagaccaggattccaattcgcctagtgaggaatctcactaggggaatttatcgcgacatcataaattaacgggttcattttgactgaaaaagcgaaggacttttttcaggcagaaaacaagtctcgtctggacgcgtctagtctatttattgtcgcggggaagctgcggccgcctcgcacccggaacaacaaagcaaggaagacggagtccgagcctcgggggctcctagcaacgggccggggcgggagttccatggagactggggagcgcgcccgtctcatcctcatccttgtcctccagcttctccttcgcatccgacgcaaccggcagcagcgctgccgccgcgtcctcagccaccgctccctcttcccacggatgtgatcttcgtggtggaaagctaaattttaaaaccaccccaatggatgcagacagtgatgttgcattggacattctaattacaaatgtagtctgtgtttttagaacaagatgtcatttaaacttaaggaagattgctttggaaggagcaaatgtaatttataaacgtgatgttggaaaagttttaattaaccttaaaaaaccttaaattacagctccaatttgctccttaggatttattccctctggacacccagggaaagatg

SEQ ID NO: 425750 - DNA, 1196 bp, Homo sapiens
gcgtgactccgccatcaggtccccggctccctccccggacctagcccactccgctgcgccagcgccgcgggcagtgagttcggggatcaggggaacccggggctccctcgcaccaaccccaaatcctgccctcctggcgatgaggcttttctagggcacctctacaatccgggtttgagggaggaggaggaaaggactgagggatcccctcatcgccagctgggagcgggctgggaggccgcagggagggcctgaaaaaggagacgggattgccacgaggttgggggcgcggggtggtagcggctttgagcgggtgagaaaagctcaggtggggcccgccgggccgaaggaggtaacccggcgcccggccctagccagccccggggctcggggctggggagatcatggcccgcctcttcagcccccggccgccccccagcgaagacctcttctacgagacctactacagcctgagccagcagtacccgctgctgctgctgctgctggggatcgtgctctgtgcgctcgcggcgctgctcgcagtggcctgggccagcggcagggagctgacctcagacccgagcttcctgaccactgtgctgtgcgcgctgggcggcttctcgctgctgctgggcctcgcttcccgggagcagcgactgcagcgctggacgcgtcccctgtccggcttggtatgggtcgcgctgctagcgctaggccacgccttcctgttcaccgggggcgtggtgagcgcctgggaccaggtgtcctattttctcttcgtcatcttcacggcgtatgccatgctgcccttgggcatgcgggacgccgccgtcgcgggcctcgcctcctcactctcgcatctgctggtcctcgggctgtatcttgggccacagccggactcacggcctgcactgctgccgcaggtgagcacgcaagtagcacaggctgcgctcaggacggctctgccacgtgctagtaggctccttttagggggttgttgagctgtgactccaaggcaaggtgcaacgctgggcgcaggatacccaaccgtgctttcgcagagctggtacaacagtgtgatgcaatgcctgctgttaccagaagagggatccaggccacacggaagggagtcgtgtcgtggtttaccccggggacaacagatgtggttaatgaaaccttgacagagaatgaaaaaa

SEQ ID NO: 425751 - DNA, 1904 bp, Homo sapiens
tataagggaagttgttcagtcaactcggaaaaagggtaacaacccggaaagtagactcaccgtcttggtctagagactgacccctgcacagacagaccccttcccctctctgcgaaaggaccaagccccagaagtcactccatctcctacggctcgcaatttccagaggccccctggcaccttccagcctgatgtcgtgcgtcaagttatggcccagcggtgcccccgcccccttggtgtccatcgaggaactggagaaccaggagctcgtcggcaaaggcgggttcggcacagtgttccgggcgcaacataggaagtggggctacgatgtggcggtcaagatcgtaaactcgaaggcgatatccagggaggtcaaggccatggcaagtctggataacgaattcgtgctgcgcctagaaggggttatcgagaaggtgaactgggaccaagatcccaagccggctctggtgactaaattcatggagaacggctccttgtcggggctgctgcagtcccagtgccctcggccctggccgctcctttgccgcctgctgaaagaagtggtgcttgggatgttttacctgcacgaccagaacccggtgctcctgcaccgggacctcaagccatccaacgtcctgctggacccagagctgcacgtcaagctggcagattttggcctgtccacatttcagggaggctcacagtcagggacagggtccggggagccagggggcaccctgggctacttggccccagaactgtttgttaacgtaaaccggaaggcctccacagccagtgacgtctacagcttcgggatcctaatgtgggcagtgcttgctggaagagaagttgagttgccaaccgaaccatcactcgtgtacgaagcagtgtgcaacaggcagaaccggccttcattggctgagctgccccaagccgggcctgagactcccggcttagaaggactgaaggagctaatgcagctctgctggagcagtgagcccaaggacagaccctccttccaggaatgcctaccaaaaactgatgaagtcttccagatggtggagaacaatatgaatgctgctgtctccacggtaaaggatttcctgtctcagctcaggagcagcaataggagattttctatcccagagtcaggccaaggagggacagaaatggatggctttaggagaaccatagaaaaccagcactctcgtaatgatgtcatggtttctgagtggctaaacaaactgaatctagaggagcctcccagctctgttcctaaaaaatgcccgagccttaccaagaggagcagggcacaagaggagcaggttccacaagcctggacagcaggcacatcttcagattcgatggcccaacctccccagactccagagacctcaactttcagaaaccagatgcccagccctacctcaactggaacaccaagtcctggaccccgagggaatcagggggctgagagacaaggcatgaactggtcctgcaggaccccggagccaaatccagtaacagggcgaccgctcgttaacatatacaactgctctggggtgcaagttggagacaacaactacttgactatgcaacagacaactgccttgcccacatggggcttggcaccttcgggcaaggggaggggcttgcagcaccccccaccagtaggttcgcaagaaggccctaaagatcctgaagcctggagcaggccacagggttggtataatcatagcgggaaataaagcaccttccaagcttgcctccaagagttacgagttaaggaagagtgccaccccttgaggcccctgacttccttctagggcagtctggcctgcccacaaactgactttgtgacctgtcccccaggagtcaataaacatgatggaatgctaaacagt

SEQ ID NO: 425752 - DNA, 2160 bp, Homo sapiens
tataagggaagttgttcagtcaactcggaaaaagggtaacaacccggaaagtagactcaccgtcttggtctagagactgacccctgcacagacagaccccttcccctctctgcgaaaggaccaagccccagaagtcactccatctcctacggctcgcaatttccagaggccccctggcaccttccagcctgatgtcgtgcgtcaagttatggcccagcggtgcccccgcccccttggtgtccatcgaggaactggagaaccaggagctcgtcggcaaaggcgggttcggcacagtgttccgggcgcaacataggaagtggggctacgatgtggcggtcaagatcgtaaactcgaaggcgatatccagggaggtcaaggccatggcaagtctggataacgaattcgtgctgcgcctagaaggggttatcgagaaggtgaactgggaccaagatcccaagccggctctggtgactaaattcatggagaacggctccttgtcggggctgctgcagtcccagtgccctcggccctggccgctcctttgccgcctgctgaaagaagtggtgcttgggatgttttacctgcacgaccagaacccggtgctcctgcaccgggacctcaagccatccaacgtcctgctggacccagagctgcacgtcaagctggcagattttggcctgtccacatttcagggaggctcacagtcagggacagggtccggggagccagggggcaccctgggctacttggccccagaactgtttgttaacgtaaaccggaaggcctccacagccagtgacgtctacagcttcgggatcctaatgtgggcagtgcttgctggaagagaagttgagttgccaaccgaaccatcactcgtgtacgaagcagtgtgcaacaggcagaaccggccttcattggctgagctgccccaagccgggcctgagactcccggcttagaaggactgaaggagctaatgcagctctgctggagcagtgagcccaaggacagaccctccttccaggaatgcctaccaaaaactgatgaagtcttccagatggtggagaacaatatgaatgctgctgtctccacggtaaaggatttcctgtctcagctcaggagcagcaataggagattttctatcccagagtcaggccaaggagggacagaaatggatggctttaggagaaccatagaaaaccagcactctcgtaatgatgtcatggtttctgagtggctaaacaaactgaatctagaggagcctcccagctctgttcctaaaaaatgcccgagccttaccaagaggagcagggcacaagaggagcaggttccacaagcctggacagcaggcacatcttcagattcgatggcccaacctccccagactccagagacctcaactttcagaaaccagatgcccagccctacctcaactggaacaccaagtcctggaccccgagggaatcagggggctgagagacaaggcatgaactggtcctgcaggaccccggagccaaatccagtaacaggagctgacctcagacccgagcttcctgaccactgtgctgtgcgcgctgggcggcttctcgctgctgctgggcctcgcttcccgggagcagcgactgcagcgctggacgcgtcccctgtccggcttggtatgggtcgcgctgctagcgctaggccacgccttcctgttcaccgggggcgtggtgagcgcctgggaccaggtgtcctattttctcttcgtcatcttcacggcgtatgccatgctgcccttgggcatgcgggacgccgccgtcgcgggcctcgcctcctcactctcgcatctgctggtcctcgggctgtatcttgggccacagccggactcacggcctgcactgctgccgcaggtgagcacgcaagtagcacaggctgcgctcaggacggctctgccacgtgctagtaggctccttttagggggttgttgagctgtgactccaaggcaaggtgcaacgctgggcgcaggatacccaaccgtgctttcgcagagctggtacaacagtgtgatgcaatgcctgctgttaccagaagagggatccaggccacacggaagggagtcgtgtcgtggtttaccccggggacaacagatgtggttaatgaaaccttgacagagaatgaaaaaa

SEQ ID NO: 425753 - DNA, 2281 bp, Homo sapiens
tataagggaagttgttcagtcaactcggaaaaagggtaacaacccggaaagtagactcaccgtcttggtctagagactgacccctgcacagacagaccccttcccctctctgcgaaaggaccaagccccagaagtcactccatctcctacggctcgcaatttccagaggccccctggcaccttccagcctgatgtcgtgcgtcaagttatggcccagcggtgcccccgcccccttggtgtccatcgaggaactggagaaccaggagctcgtcggcaaaggcgggttcggcacagtgttccgggcgcaacataggaagtggggctacgatgtggcggtcaagatcgtaaactcgtgagtgaccccggttgaccccagccgcaatctggccaaaaaggaaggcgatatccagggaggtcaaggccatggcaagtctggataacgaattcgtgctgcgcctagaaggggttatcgagaaggtgaactgggaccaagatcccaagccggctctggtgactaaattcatggagaacggctccttgtcggggctgctgcagtcccagtgccctcggccctggccgctcctttgccgcctgctgaaagaagtggtgcttgggatgttttacctgcacgaccagaacccggtgctcctgcaccgggacctcaagccatccaacgtcctgctggacccagagctgcacgtcaagctggcagattttggcctgtccacatttcagggaggctcacagtcagggacagggtccggggagccagggggcaccctgggctacttggccccagaactgtttgttaacgtaaaccggaaggcctccacagccagtgacgtctacaggtaaggatcccggcccaaacacacagccaggattcctacacttctctgggccctcccaggggatgatgtataggaaaggagtcttgccagtgattggaccgatcctcagctttgtgtctcctgcagcttcgggatcctaatgtgggcagtgcttgctggaagagaagttgagtgtaagactctaggaggattctgggatccttaaccccaggtgcccttctcttgaaagccccaaggcttccccttcccgctcacctacttagactgccctcctccctcctcgtgcccccacattacactccctgcctctttccatgatgaagcagataattcccttttaccctgaatgccttctcttctcaccctcctcccctactccagtgccaaccgaaccatcactcgtgtacgaagcagtgtgcaacaggcagaaccggccttcattggctgagctgccccaagccgggcctgagactcccggcttagaaggactgaaggagctaatgcagctctgctggagcagtgagcccaaggacagaccctccttccaggaatgcctaccaaaaactgatgaagtcttccagatggtggagaacaatatgaatgctgctgtctccacggtaaaggatttcctgtctcagctcaggagcagcaataggagattttctatcccagagtcaggccaaggagggacagaaatggatggctttaggagaaccatagaaaaccagcactctcgtaatgatgtcatggtttctgagtggctaaacaaactgaatctagaggagcctcccagctctgttcctaaaaaatgcccgagccttaccaagaggagcagggcacaagaggagcaggttccacaagcctggacagcaggcacatcttcagattcgatggcccaacctccccagactccagagacctcaactttcagaaaccagatgcccagccctacctcaactggaacaccaagtcctggaccccgagggaatcagggggctgagagacaaggcatgaactggtcctgcaggaccccggagccaaatccagtaacagggcgaccgctcgttaacatatacaactgctctggggtgcaagttggagacaacaactacttgactatgcaacagacaactgccttgcccacatggggcttggcaccttcgggcaaggggaggggcttgcagcaccccccaccagtaggttcgcaagaaggccctaaagatcctgaagcctggagcaggccacagggttggtataatcatagcgggaaataaagcaccttccaagcttgcctccaagagttacgagttaaggaagagtgccaccccttgaggcccctgacttccttctagggcagtctggcctgcccacaaactgactttgtgacctgtcccccaggagtcaataaacatgatggaatgctaaacagt

SEQ ID NO: 425754 - DNA, 931 bp, Homo sapiens
accgtccccagcccacccctgagttcccagacaacagattatggaccgagagactactcccttgggtttactctggctcatccaagtcatacccagcaaactcctcccatccctgcaggtaaaggatttcctgtctcagctcaggagcagcaataggagattttctatcccagagtcaggccaaggagggacagaaatggatggctttaggagaaccatagaaaaccagcactctcgtaatgatgtcatggtttctgagtggctaaacaaactgaatctagaggagcctcccagctctgttcctaaaaaatgcccgagccttaccaagaggagcagggcacaagaggagcaggttccacaagcctggacagcaggcacatcttcagattcgatggcccaacctccccagactccagagacctcaactttcagaaaccagatgcccagccctacctcaactggaacaccaagtcctggaccccgagggaatcagggggctgagagacaaggcatgaactggtcctgcaggaccccggagccaaatccagtaacagggcgaccgctcgttaacatatacaactgctctggggtgcaagttggagacaacaactacttgactatgcaacagacaactgccttgcccacatggggcttggcaccttcgggcaaggggaggggcttgcagcaccccccaccagtaggttcgcaagaaggccctaaagatcctgaagcctggagcaggccacagggttggtataatcatagcgggaaataaagcaccttccaagcttgcctccaagagttacgagttaaggaagagtgccaccccttgaggcccctgacttccttctagggcagtctggcctgcccacaaactgactttgtgacctgtcccccaggagtcaataaacatgatggaatgctaaacagt

SEQ ID NO: 425755 - DNA, 858 bp, Homo sapiens
accgtccccagcccacccctgagttcccagacaacagattatggaccgagagactactcccttgggtttactctggctcatccaagtcatacccagcaaactcctcccatccctgcaggtaaaggatttcctgtctcagctcaggagcagcaataggagattttctatcccagagtcaggccaaggagggacagaaatggatggctttaggagaaccatagaaaaccagcactctcgtaatgatgtcatggtttctgagtggctaaacaaactgaatctagaggagcctcccagctctgttcctaaaaaatgcccgagccttaccaagaggagcagggcacaagaggagcaggttccacaagcctggacagcaggcacatcttcagattcgatggcccaacctccccagactccagagacggggctgagagacaaggcatgaactggtcctgcaggaccccggagccaaatccagtaacagggcgaccgctcgttaacatatacaactgctctggggtgcaagttggagacaacaactacttgactatgcaacagacaactgccttgcccacatggggcttggcaccttcgggcaaggggaggggcttgcagcaccccccaccagtaggttcgcaagaaggccctaaagatcctgaagcctggagcaggccacagggttggtataatcatagcgggaaataaagcaccttccaagcttgcctccaagagttacgagttaaggaagagtgccaccccttgaggcccctgacttccttctagggcagtctggcctgcccacaaactgactttgtgacctgtcccccaggagtcaataaacatgatggaatgctaaacagt

SEQ ID NO: 425756 - DNA, 538 bp, Homo sapiens
aaaagctcaggtggggcccgccgggccgaaggaggtaacccggcgcccggccctagccagccccggggctcggggctggggagatcatggcccgcctcttcagcccccggccgccccccagcgaagacctcttctacgagacctactacagcctgagccagcagtacccgctgctgctgctgctgctggggatcgtgctctgtgcgctcgcggcgctgctcgcagtggcctgggccagcggcagggtgagccgagcctctgctgcgggagggtctctacctggggagcattttcggggttggggtttgtggggtcttcttttcgatgtgttttcgttgctgggagcagagaaagaaaggaccattgagcctggctaggaactgcagtgaccctgggcaagtcactctacccttctgggtctgctcagggagaaagctgagtcctggatgcttctcgtttctgtccgggttctgacagactttatgaacatccgtggtctacgggttctacaataaatccatcaccggattttccagtt

SEQ ID NO: 425757 - DNA, 1062 bp, Homo sapiens
tataagggaagttgttcagtcaactcggaaaaagggtaacaacccggaaagtagactcaccgtcttggtctagagactgacccctgcacagacagaccccttcccctctctgcgaaaggaccaagccccagaagtcactccatctcctacggctcgcaatttccagaggccccctggcaccttccagcctgatgtcgtgcgtcaagttatggcccagcggtgcccccgcccccttggtgtccatcgaggaactggagaaccaggagctcgtcggcaaaggcgggttcggcacagtgttccgggcgcaacataggaagtggggctacgatgtggcggtcaagatcgtaaactcgaaggcgatatccagggaggtcaaggccatggcaagtctggataacgaattcgtgctgcgcctagaaggggttatcgagaaggtgaactgggaccaagatcccaagccggctctggtgactaaattcatggagaacggctccttgtcggggctgctgcagtcccagtgccctcggccctggccgctcctttgccgcctgctgaaagaagtggtgcttgggatgttttacctgcacgaccagaacccggtgctcctgcaccgggacctcaagccatccaacgtcctgctggacccagagctgcacgtcaaggtcagctggtctacacccctctcagcctcaagacaaggccccagagctgctccagccaggcccgccggacactagacctccagagccctgtctattgaataggcgtagcctctctctctggacacagggctgccaggggacaaagcccagccaggagttttagctcctgcctaccaggtgatagaggccctgagccacacgagtcatttccaccagctgccccaccagcccctccaaagagtcatggctgacccagccctggagactcagaccttgacctagccctaccacaaggcacctagatctaccatccaagggaacctcttcccttgacctccacactccctttacaaagctgaacctgcaccttctgggggcaggggggttcctggaggctctc

SEQ ID NO: 425758 - DNA, 1744 bp, Homo sapiens
  misc_feature (4)..(4): n is a, c, g, or t
tgancgactctagttgatcccccctaggtatatgtcgtgcgtcaagttatggcccagcggtgcccccgcccccttggtgtccatcgaggaactggagaaccaggagctcgtcggcaaaggcgggttcggcacagtgttccgggcgcaacataggaagtggggctacgatgtggcggtcaagatcgtaaactcgaaggcgatatccagggaggtcaaggccatggcaagtctggataacgaattcgtgctgcgcctagaaggggttatcgagaaggtgaactgggaccaagatcccaagccggctctggtgactaaattcatggagaacggctccttgtcggggctgctgcagtcccagtgccctcggccctggccgctcctttgccgcctgctgaaagaagtggtgcttgggatgttttacctgcacgaccagaacccggtgctcctgcaccgggacctcaagccatccaacgtcctgctggacccagagctgcacgtcaagctggcagattttggcctgtccacatttcagggaggctcacagtcagggacagggtccggggagccagggggcaccctgggctacttggccccagaactgtttgttaacgtaaaccggaaggcctccacagccagtgacgtctacagcttcgggatcctaatgtgggcagtgcttgctggaagagaagttgagttgccaaccgaaccatcactcgtgtacgaagcagtgtgcaacaggcagaaccggccttcattggctgagctgccccaagccgggcctgagactcccggcttagaaggactgaaggagctaatgcagctctgctggagcagtgagcccaaggacagaccctccttccaggaatgcctaccaaaaactgatgaagtcttccagatggtggagaacaatatgaatgctgctgtctccacggtaaaggatttcctgtctcagctcaggagcagcaataggagattttctatcccagagtcaggccaaggagggacagaaatggatggctttaggagaaccatagaaaaccagcactctcgtaatgatgtcatggtttctgagtggctaaacaaactgaatctagaggagcctcccagctctgttcctaaaaaatgcccgagccttaccaagaggagcagggcacaagaggagcaggttccacaagcctggacagcaggcacatcttcagattcgatggcccaacctccccagactccagagacctcaactttcagaaaccagatgcccagccctacctcaactggaacaccaagtcctggaccccgagggaatcagggggctgagagacaaggcatgaactggtcctgcaggaccccggagccaaatccagtaacagggcgaccgctcgttaacatatacaactgctctggggtgcaagttggagacaacaactacttgactatgcaacagacaactgccttgcccacatggggcttggcaccttcgggcaaggggaggggcttgcagcaccccccaccagtaggttcgcaagaaggccctaaagatcctgaagcctggagcaggccacagggttggtataatcatagcgggaaataaagcaccttccaagcttgcctccaagagttacgagttaaggaagagtgccaccccttgaggcccctgacttccttctagggcagtctggcctgcccacaaactgactttgtgacctgtcccccaggagtcaataaacatgatggaatgctaaacagt

SEQ ID NO: 425759 - DNA, 2210 bp, Homo sapiens
  misc_feature (4)..(4): n is a, c, g, or t
tgancgactctagttgatcccccctaggtatatgtcgtgcgtcaagttatggcccagcggtgcccccgcccccttggtgtccatcgaggaactggagaaccaggagctcgtcggcaaaggcgggttcggcacagtgttccgggcgcaacataggaagtggggctacgatgtggcggtcaagatcgtaaactcgtgagtgaccccggttgaccccagccgcaatctggccaaaaaggtggagccactgtgctctggggcctgaatggcgaagggagggattttcccacgaccccggtgcgactccagctctctcctggagtgtaggaaggcgatatccagggaggtcaaggccatggcaagtctggataacgaattcgtgctgcgcctagaaggggttatcgagaaggtgaactgggaccaagatcccaagccggctctggtgactaaattcatggagaacggctccttgtcggggctgctgcagtcccagtgccctcggccctggccgctcctttgccgcctgctgaaagaagtggtgcttgggatgttttacctgcacgaccagaacccggtgctcctgcaccgggacctcaagccatccaacgtcctgctggacccagagctgcacgtcaagctggcagattttggcctgtccacatttcagggaggctcacagtcagggacagggtccggggagccagggggcaccctgggctacttggccccagaactgtttgttaacgtaaaccggaaggcctccacagccagtgacgtctacaggtaaggatcccggcccaaacacacagccaggattcctacacttctctgggccctcccaggggatgatgtataggaaaggagtcttgccagtgattggaccgatcctcagctttgtgtctcctgcagcttcgggatcctaatgtgggcagtgcttgctggaagagaagttgagtgtaagactctaggaggattctgggatccttaaccccaggtgcccttctcttgaaagccccaaggcttccccttcccgctcacctacttagactgccctcctccctcctcgtgcccccacattacactccctgcctctttccatgatgaagcagataattcccttttaccctgaatgccttctcttctcaccctcctcccctactccagtgccaaccgaaccatcactcgtgtacgaagcagtgtgcaacaggcagaaccggccttcattggctgagctgccccaagccgggcctgagactcccggcttagaaggactgaaggagctaatgcagctctgctggagcagtgagcccaaggacagaccctccttccaggaatgcctaccaaaaactgatgaagtcttccagatggtggagaacaatatgaatgctgctgtctccacggtaaaggatttcctgtctcagctcaggagcagcaataggagattttctatcccagagtcaggccaaggagggacagaaatggatggctttaggagaaccatagaaaaccagcactctcgtaatgatgtcatggtttctgagtggctaaacaaactgaatctagaggagcctcccagctctgttcctaaaaaatgcccgagccttaccaagaggagcagggcacaagaggagcaggttccacaagcctggacagcaggcacatcttcagattcgatggcccaacctccccagactccagagacctcaactttcagaaaccagatgcccagccctacctcaactggaacaccaagtcctggaccccgagggaatcagggggctgagagacaaggcatgaactggtcctgcaggaccccggagccaaatccagtaacagggcgaccgctcgttaacatatacaactgctctggggtgcaagttggagacaacaactacttgactatgcaacagacaactgccttgcccacatggggcttggcaccttcgggcaaggggaggggcttgcagcaccccccaccagtaggttcgcaagaaggccctaaagatcctgaagcctggagcaggccacagggttggtataatcatagcgggaaataaagcaccttccaagcttgcctccaagagttacgagttaaggaagagtgccaccccttgaggcccctgacttccttctagggcagtctggcctgcccacaaactgactttgtgacctgtcccccaggagtcaataaacatgatggaatgctaaacagt

SEQ ID NO: 425760 - DNA, 1717 bp, Homo sapiens
tataagggaagttgttcagtcaactcggaaaaagggtaacaacccggaaagtagactcaccgtcttggtctagagactgacccctgcacagacagaccccttcccctctctgcgaaaggaccaagccccagaagtcactccatctcctacggctcgcaatttccagaggccccctggcaccttccagcctgatgtcgtgcgtcaagttatggcaccctgggctacttggccccagaactgtttgttaacgtaaaccggaaggcctccacagccagtgacgtctacaggtaaggatcccggcccaaacacacagccaggattcctacacttctctgggccctcccaggggatgatgtataggaaaggagtcttgccagtgattggaccgatcctcagctttgtgtctcctgcagcttcgggatcctaatgtgggcagtgcttgctggaagagaagttgagtgtaagactctaggaggattctgggatccttaaccccaggtgcccttctcttgaaagccccaaggcttccccttcccgctcacctacttagactgccctcctccctcctcgtgcccccacattacactccctgcctctttccatgatgaagcagataattcccttttaccctgaatgccttctcttctcaccctcctcccctactccagtgccaaccgaaccatcactcgtgtacgaagcagtgtgcaacaggcagaaccggccttcattggctgagctgccccaagccgggcctgagactcccggcttagaaggactgaaggagctaatgcagctctgctggagcagtgagcccaaggacagaccctccttccaggaatgcctaccaaaaactgatgaagtcttccagatggtggagaacaatatgaatgctgctgtctccacggtaaaggatttcctgtctcagctcaggagcagcaataggagattttctatcccagagtcaggccaaggagggacagaaatggatggctttaggagaaccatagaaaaccagcactctcgtaatgatgtcatggtttctgagtggctaaacaaactgaatctagaggagcctcccagctctgttcctaaaaaatgcccgagccttaccaagaggagcagggcacaagaggagcaggttccacaagcctggacagcaggcacatcttcagattcgatggcccaacctccccagactccagagacctcaactttcagaaaccagatgcccagccctacctcaactggaacaccaagtcctggaccccgagggaatcagggggctgagagacaaggcatgaactggtcctgcaggaccccggagccaaatccagtaacagggcgaccgctcgttaacatatacaactgctctggggtgcaagttggagacaacaactacttgactatgcaacagacaactgccttgcccacatggggcttggcaccttcgggcaaggggaggggcttgcagcaccccccaccagtaggttcgcaagaaggccctaaagatcctgaagcctggagcaggccacagggttggtataatcatagcgggaaataaagcaccttccaagcttgcctccaagagttacgagttaaggaagagtgccaccccttgaggcccctgacttccttctagggcagtctggcctgcccacaaactgactttgtgacctgtcccccaggagtcaataaacatgatggaatgctaaacagt

SEQ ID NO: 425761 - DNA, 471 bp, Homo sapiens
tgatgcaagccaagatgaactcagataatggcaatgctggcccagatcaagactcagagctgctttcagataaccacattctcaccaccataggggacatctttggggctggcgtggagaccaccacctctgtggttaaatggaccctggccttcctgctgcacaatcctcagagaagctctacgaggagattgaccagaatgtgggtttcagccgcacaccaactatcagtgaccgtaaccgtctcctcctgctggaggccaccatccgagaggtgcttcgcctcaggcccgtggcccctatgctcatcccccacaaggccaacgttgactccaggagtttgctgtggacaagggcacagaagttatcatcaatctgtgggcgctgcatcacaatgagaaggagtggcaccagccggatcagttcatgcctgagcgtttcttgaatccagcggggacccagctcatctca

SEQ ID NO: 425762 - DNA, 365 bp, Homo sapiens
tgggcttacacacactagtcacctccaacctactctggtcttcaggtgaagaggcggaagaatgagggggcatgaggctgaagcaaggaagggagtacgaagtcccagacccacttttcctcttccactctggagcagcatcggtcgtcagtaagctatttgcccttcggagcaggacctcgctcctgtataggtgagatcctggcccgccaggagctcttcctcatcatggcctggctgctgcagaggttcgacctggaggtgccagatgatgggcagctgccctccctggaaggcatccccaaggtggtctttctgatcgactctttcaaagtgaagatcaaggtgcgccaggcctggaggga

SEQ ID NO: 425763 - DNA, 280 bp, Homo sapiens
tgggcttacacacactagtcacctccaacctactctggtcttcaggtgaagaggcggaagaatgagggggcatgaggctgaagcaaggaagggagtacgaagtcccagacccacttttcctcttccactctggagcagcatcggtgagtttgctgtggacaagggcacagaagttatcatcaatctgtgggcgctgcatcacaatgagaaggagtggcaccagccggatcagttcatgcctgagcgtttcttgaatccagcggggacccagctcatctca

SEQ ID NO: 425764 - DNA, 1768 bp, Homo sapiens
ggggaataatcgagttgtaactcattgtgtagaatatcgatatgtaaacacgtggagattccaggaacaccgccagggatctgcagagcggcctctgaagtttcacgggcttttccattgactccagccactgcttcttcagtggctcttcctccctttcactgtgaccagatgccttttctcttcattctttacttatgaattggacagtaagtctgaattaatttcacaagattcatagcttcttttatgctgcagaaaagcccagggcaaagaataagaagaaagacattcatgtgtttattcattcaacaaacatctttgccggcatagcgtgggaggaggtcaccagacccttctcctgggagtttccctcccttctgagtgccacagatcctccctgaaatgtgtggccgtagagccgccgttgcctccatgacttagcagttctctgcttcctttgcaggggccctggcctccagtctgagtgctgacctcgaagagcccctgagtgaggaggagacagaacaccctctcctgcctctgccccgagccactaaacccagaatctccaggaaatttcgttgctgtactagtgccctcagcaggtcttcccattagtggacttctgaagcccatggtgaatcccactaccgtgtctcagatgggactcaaactaggctgtatcatcttgtcctgaaacctcacaaaccttggacttccaaagaagaaaagaaaaagtcaccaaaaaccagagatgaacccactgacacgtgggcactggtgtggctgctctgggcagatgacagcaggaaaagattctgcgctttcagggagggggcagagggcagcttgcttctgcaccccaagttgtttcttctcatttatgaacccaagcatgattcacaaaggggctggcaaaacaattgtctaattgaggaatctgatctgcattgattttgctagttccttttatgttaggatttatggtttactcaaaaatttcatcatcatggaaattggctttccccggggtcttttgcccaggagaagttttacctcagttgtccagtgttttcccacatggtacctgacgcccgctaactaagcagaggctctcctcaccacgcagaggcgcttcaggtcatgacagtgatgcccctatcttagaacactcagaagattccagaaatacagggtcctgtccttgcataagttcctgcaggacaggaagtgtcccaaggctcaaaacaacacagaccacatccacacaaaaggcgcatgccggcttcaggcgctaggctgagacgggtaccccccgaatggccttgtgcctccaaaagcctcacgctgcaactttgctgctcctgtctgttgcccagagaggcctcacacaggcctcagaaatgtttcttgtcacacaaagcttttggtagccgattccaagcgagggatttaatccttacatttttgcccatttggctccaaggaaggcttattagacctgtttttttgttgttgttgtttttttttcttaaaaacaaaatgaatgaatgaatgaaaagagaagcaatggtgagccctctcctgctggggcgccctgggtgggccttgccggtcctgcagcagagaaatcagtcagcagcgaagagctgttggcgaaggccccaggctgtgtcctggacccttgacctgcctcagagctagaggtttgctccaccccgcacttcacttgggaagtaaatccaagaagcttaccagagtccat

SEQ ID NO: 425765 - DNA, 5935 bp, Homo sapiens
agtatgcctaaaatcatccagactgttggtggtggtgctgtgcaggagagagcgcctgagctggatggtggtgggcccacggagcaggacaaaagccattctaacagcagcaccttgtcggaccgaagactcagcaactccagcctctgtagcattgaagaagagcaccgaatggtgtatgaaatggtacagcggattctcttgtcaacacgaggttatgtcaacttcgtgaatgaagtatttcaccaggcatttttgttgccttcctgtgagatagctgtaacaagaaaagtagttcaagtgtacagaaagtggattctccaggacaaacctgtgttcatggaggagccagatagaaaagatgttgcccaagaagatgctgaaaaattaggattttccgagactgatagcaaggaggcctcatctgaaagttctggtcataaacgatcttccagttggggacgcacatactccttcacaagtgcaatgagcagagggtgtgtgacagaggaggaaaatacaaatgtgaaagccggcgtccaggctttgttgcaggtatttttgacgaactctgcaaacatctttttgttggaaccatgtgctgaagttcctgtgctcttgaaagaacaagttgatgcttgtaaagctgttttgattatttttaggcgcatgataatggagcttacaatgaataaaaagacatgggaacagatgttgcaaatactactcaggataacagaagctgtcatgcagaagccaaaggataaacgaataaaggacttgtttgcccagagcttggcagggttactatttaggacgctcatggtagcttggatccgagcaaacctctgtgtgtacatttctcgagagctctgggatgactttcttggtgtgctgtcctccctcacggaatgggaggaacttataaacgagtgggccaacattatggactccttgacagcagtgcttgcaagaaccgtttatggagttgagatgacaaacctacctctggataaattaagtgaacaaaaggaaaagaagcaacgaggcaaaggctgtgttctagatcctcagaaaggaaccaccgtggggaggtccttttctctcagctggcggagccacccagatgtgaccgaaccgatgcgatttaggagtgccaccacgtctggagcaccgggagtggaaaaggcaagaaatattgttcgccaaaaagcaactgaagtggaggagtgtcaacagtcagaaaatgcacctgcagccggatctggccatctcacagtgggacagcagcagcaggtccttcggagcagcagcacctccgacatccccgagccgctgtgctcagattcttctcagggtcaaaaggcagaaaacacacagaattcgagttcttcagagcctcagcctattcaagagaataaaggacatgtgaagagagaacatgaaggaataacaatcttagttcgaagaagcagcagccctgctgaattggatttgaaagatgatttgcagcagacacaaggaaaatgtagggaaagacagaagagtgaaagtaccaacagtgacacaactctgggctgtaccaatgaggcagagctgtccatgggcccatggcagacctgtgaggaagacccagaactgaatactcccacagatgttgtggctgatgctgatgcccgtcattggttacaactgagtcccaccgatgcttcaaatttaacagatagcagcgagtgcctcacagatgactgtagtataatcgccggggggagcctcactggttggcacccagactctgctgctgtgttatggcgaagggtcttggggatcctcggagatgtgaataacatccagtcacccaagatccatgccagagttttctgctatctctatgaactctggtacaaactagcaaagatacgggataatctagcaataagcctggataaccagtcttctccatctcctccagttttgatcccaccactcagaatgtttgcatcatggctgtttaaggcggcgacactgccaaatgaatataaggaaggcaaactacaagcctacaggctgatctgtgccatgatgaccagacgccaggacgttctgccaaactcagatttcctggtgcatttttaccttgtgatgcacctgggattaaccagcgaggatcaggatatcttaaatacgatcataaggcactgtccaccccgctttttctccctgggttttcctggcttctcaatgctggtgggggacttcatcacggccgctgccagggtccttagcacagacattttgacggcgcctcgttcagaggctgtcactgtcctcggctctctggtctgctttccaaatacctaccaggagattcctttactgcagtcagtgccagaagtaaatgaggccattacaggaactgaagatgtcaagcattacctcataaatattttactgaagaatgccacagaagaaccaaatgaatatgcaagatgcattgctgtttgctcccttggggtctggatatgtgaagagcttgcacagtgtacaagccaccctcaggtgaaagaggccatcaatgtgataggagtaactctgaagtttcccaacaaaatcgtggcccaggtagcttgcgatgtccttcagttgctggtttcctactgggagaagcttcagatgtttgaaacctctctgcctcggaaaatggcagaaatcctcgtggccacagttgcttttcttttaccaagtgcagagtactcctcagtggaaacagacaagaagtttattgtgtccttgctactctgcctcttggactggtgcatggcattgcccgtgagtgtccttctccaccccgtgtccacagcagtcctagaggagcagcattcggccagagcccccttgctggattatatctacagggttttgcactgctgtgtgtgtggctcaagcacgtacacccaacagagtcactacatactgaccctggctgacttgtcatccacggattatgaccccttcctgccactggcaaatgtgaagagctctgagccagtccagtatcattcatcagcagaattgggtaacctgctgactgttgaagaggagaagaagagaagaagtttggagttgatccctttgactgctcgaatggtgatggcccacctggtgaaccacctggggcactaccccctcagtgggggccctgccatactgcacagccttgtcagcgagaaccatgacaatgcccatgtggaaggctccgagctgtcctttgaggtgttcagaagtccaaacctgcagctgtttgtatttaatgatagcaccctcatctcctaccttcagacacccacagaaggaccggtagggggatcaccagtgggctctctctctgatgtgagagtaattgtgagggatatctcagggaagtactcttgggatggtaaggttttatatggacctttggaaggctgcttagcacccaatggaagaaatccttcatttctgatttcgagctggcatcgtgacacatttggacctcagaaagactcttctcaagttgaggagggggatgatgttcttgacaaattacttgaaaacattggccatacaagtcctgaatgccttttaccgtcacagctaaatctaaatgaaccttccctaaccccatgtggcatgaactatgaccaagagaaggaaatcattgaggtcattttgcgccaaaatgctcaagaggatgagtatatccagagtcataacttcgattctgcaatgaaagtcaccagccaagggcagccctccccagtggagccccgaggacccttttatttctgcaggttattgcttgatgacttgggaatgaattcttgggacagaaggaagaattttcatctattgaagaaaaattcaaaattattgagagagctgaaaaatttggactcccgccagtgccgtgagacacacaaaatcgcagtgttttacattgctgaaggtcaagaagacaagtgttcaatcctctctaatgaaagaggaagccaagcatatgaagactttgttgctggacttggatgggaggtggatctctccacccactgtgggttcatgggtggccttcagcgcaatggcagcaccgggcagacggccccttactatgctacctcaactgtggaagtgattttccatgtttccactcgaatgccgtcagactcagatgattccctcaccaaaaagcttcgtcacttggggaatgacgaggtccatatcgtctggtctgaacactccagagactaccgcaggggtattatcccaactgcctttggagatgtttcaatcattatttacccaatgaagaatcacatgttcttcatcgcgataacgaagaaacctgaggttccattttttgggcctctgtttgatggagccatagtgagtgggaagctgctgccaagccttgtatgtgccacgtgcatcaacgccagcagggctgtgaagtgcctcatcccactctaccagagcttctatgaagagcgagctctgtatctcgaagcaataattcagaaccaccgcgaagtaatgacattcgaggatttcgcagcccaagtcttttctccctctcccagctactccctcagcggaacgggggccctggcctccagtctgagtgctgacctcgaagagcccctgagtgaggaggagacagaacaccctctcctgcctctgccccgagccactaaacccagaatctccaggaaatttcgttgctgtactagtgccctcagcaggtcttcccattagtggacttctgaagcccatggtgaatcccactaccgtgtctcagatgggactcaaactaggctgtatcatcttgtcctgaaacctcacaaaccttggacttccaaagaagaaaagaaaaagtcaccaaaaaccagagatgaacccactgacacgtgggcactggtgtggctgctctgggcagatgacagcaggaaaagattctgcgctttcagggagggggcagagggcagcttgcttctgcaccccaagttgtttcttctcatttatgaacccaagcatgattcacaaaggggctggcaaaacaattgtctaattgaggaatctgatctgcattgattttgctagttccttttatgttaggatttatggtttactcaaaaatttcatcatcatggaaattggctttccccggggtcttttgcccaggagaagttttacctcagttgtccagtgttttcccacatggtacctgacgcccgctaactaagcagaggctctcctcaccacgcagaggcgcttcaggtcatgacagtgatgcccctatcttagaacactcagaagattccagaaatacagggtcctgtccttgcataagttcctgcaggacaggaagtgtcccaaggctcaaaacaacacagaccacatccacacaaaaggcgcatgccggcttcaggcgctaggctgagacgggtaccccccgaatggccttgtgcctccaaaagcctcacgctgcaactttgctgctcctgtctgttgcccagagaggcctcacacaggcctcagaaatgtttcttgtcacacaaagcttttggtagccgattccaagcgagggatttaatccttacatttttgcccatttggctccaaggaaggcttattagacctgtttttttgttgttgttgtttttttttcttaaaaacaaaatgaatgaatgaatgaaaagagaagcaatggtgagccctctcctgctggggcgccctgggtgggccttgccggtcctgcagcagagaaatcagtcagcagcgaagagctgttggcgaaggccccaggctgtgtcctggacccttgacctgcctcagagctagaggtttgctccaccccgcacttcacttgggaagtaaatccaagaagcttaccagagtccat

SEQ ID NO: 425766 - DNA, 1607 bp, Homo sapiens
tgacatcagtcagctactctcatatctttgatttgacttttatcagtttttaaaatttgtttttccatttcaaatcaacaggttccattttttgggcctctgtttgatggagccatagtgagtgggaagctgctgccaagccttgtatgtgccacgtgcatcaacgccagcagggctgtgaagtgcctcatcccactctaccagagcttgtatctttttgctttaaatgtgtaacttactaaccatcccagaatcaagattcctggcagtttttcataagaggtaagtattcaaaactgaattgaagagggaagagaatttttttcaacctctgttaaaaataacatagtggtttttcatagcatttgttaatttatattaaatataataattttatgctgcattaaacttagagtttactttcataatttactcacatacgtttgtgtctgagaagctgtgaccattatgagatgctcatatcttcttaggtattttgccccacgttcagtctcatcctgtatccctcttatttgtggcagtccattgtatataaggtgggatgctgagcaaaacgtatcgctcattcagagtgcctaccagaaaccaaagcaaatgaaatgaccctaataaatcaaagaatgtggcaggtaccacctgagaagtgcaagtaggtttctggaagatcagaggagatagaaattgcatttggttgagggtagagggaaagatgtcctgaattaagttgcatttggacttatcaataggaatagctagaaattcttttgtaattttcccaaatcattgatattttctctagttcctgattttgtttccaaaaacagaataaatttcactcctaaaattttttcctcaaacattaattggcctgctgtagtccttaaattcaagcatgatctcaagttataagaaaaagagattaagatgggtgaccttataaaattgatgcaaaaaaagtgacctcctaataaaacttagaatctctttgtttctaattggtattgataataatttgaaacatattgtgtttgacctctatatatacttctcccaacctgatagtaagtgatgtgttgctatagcaagtgagagttgggggtagatgaaaactatcccatgtgaatagatacggttcatgaaaaaatacctttcattaaaatcctggtcacttcattgactgatattctgcctttagattaaaaaaaaatacatatgccatgtggcaacttaaaattatcatagaaatgagtagtagaaaagagctattaggtcccatctggtccctcccctgggggccagggcaggattattcccttcagtgtactctctcgtgctttgtccaggctggtggtgagtgttttggagatggcattctttgcagtgatttccacaacactgtagacgtaatcttgtggctggtgtcaatttggccttcagcatggagtttttatttcacatactattaaaaagagcctcttggcagaaatgagaaagaactattcagcgattagtttgtcagtttgcatgtcaactaggacgagctgggcacgcatcagtcaagtatgttggaccaaggcagcaaaaaa

SEQ ID NO: 425767 - DNA, 395 bp, Homo sapiens
gaaaggaagcaaaaataaaatttgcctaatagcaaagaagatatttaaagagtggtcattccatttccagctaggaccaagcaggagtcctagctgccaagtgctgcagtagtttgacagattgtcaggggacacgcggtgagtagcatccgtggtgcacatggcctctgttttcacaggttttgcactgctgtgtgtgtggctcaagcacgtacacccaacagagtcactacatactgaccctggctgacttgtcatccacggattatgaccccttcctgccactggcaaatgtgaagagctctgagccagtccagtatcattcatcagcagaattgggtaacctgctgactgttgaagagggtgagtattctttcaggtattgaagagctctc

SEQ ID NO: 425768 - DNA, 5354 bp, Homo sapiens
agtatgcctaaaatcatccagactgttggtggtggtgctgtgcaggagagagcgcctgagctggatggtggtgggcccacggagcaggacaaaagccattctaacagcagcaccttgtcggaccgaagactcagcaactccagcctctgtagcattgaagaagagcaccgaatggtgtatgaaatggtacagcggattctcttgtcaacacgaggttatgtcaacttcgtgaatgaagtatttcaccaggcatttttgttgccttcctgtgagatagctgtaacaagaaaagtagttcaagtgtacagaaagtggattctccaggacaaacctgtgttcatggaggagccagatagaaaagatgttgcccaagaagatgctgaaaaattaggattttccgagactgatagcaaggaggcctcatctgaaagttctggtcataaacgatcttccagttggggacgcacatactccttcacaagtgcaatgagcagagggtgtgtgacagaggaggaaaatacaaatgtgaaagccggcgtccaggctttgttgcaggtatttttgacgaactctgcaaacatctttttgttggaaccatgtgctgaagttcctgtgctcttgaaagaacaagttgatgcttgtaaagctgttttgattatttttaggcgcatgataatggagcttacaatgaataaaaagacatgggaacagatgttgcaaatactactcaggataacagaagctgtcatgcagaagccaaaggataaacgaataaaggacttgtttgcccagagcttggcagggttactatttaggacgctcatggtagcttggatccgagcaaacctctgtgtgtacatttctcgagagctctgggatgactttcttggtgtgctgtcctccctcacggaatgggaggaacttataaacgagtgggccaacattatggactccttgacagcagtgcttgcaagaaccgtttatggagttgagatgacaaacctacctctggataaattaagtgaacaaaaggaaaagaagcaacgaggcaaaggctgtgttctagatcctcagaaaggaaccaccgtggggaggtccttttctctcagctggcggagccacccagatgtgaccgaaccgatgcgatttaggagtgccaccacgtctggagcaccgggagtggaaaaggcaagaaatattgttcgccaaaaagcaactgaagtggaggagtgtcaacagtcagaaaatgcacctgcagccggatctggccatctcacagtgggacagcagcagcaggtccttcggagcagcagcacctccgacatccccgagccgctgtgctcagattcttctcagggtcaaaaggcagaaaacacacagaattcgagttcttcagagcctcagcctattcaagagaataaaggacatgtgaagagagaacatgaaggaataacaatcttagttcgaagaagcagcagccctgctgaattggatttgaaagatgatttgcagcagacacaaggaaaatgtagggaaagacagaagagtgaaagtaccaacagtgacacaactctgggctgtaccaatgaggcagagctgtccatgggcccatggcagacctgtgaggaagacccagaactgaatactcccacagatgttgtggctgatgctgatgcccgtcattggttacaactgagtcccaccgatgcttcaaatttaacagatagcagcgagtgcctcacagatgactgtagtataatcgccggggggagcctcactggttggcacccagactctgctgctgtgttatggcgaagggtcttggggatcctcggagatgtgaataacatccagtcacccaagatccatgccagagttttctgctatctctatgaactctggtacaaactagcaaagatacgggataatctagcaataagcctggataaccagtcttctccatctcctccagttttgatcccaccactcagaatgtttgcatcatggctgtttaaggcggcgacactgccaaatgaatataaggaaggcaaactacaagcctacaggctgatctgtgccatgatgaccagacgccaggacgttctgccaaactcagatttcctggtgcatttttaccttgtgatgcacctgggattaaccagcgaggatcaggatatcttaaatacgatcataaggcactgtccaccccgctttttctccctgggttttcctggcttctcaatgctggtgggggacttcatcacggccgctgccagggtccttagcacagacattttgacggcgcctcgttcagaggctgtcactgtcctcggctctctggtctgctttccaaatacctaccaggagattcctttactgcagtcagtgccagaagtaaatgaggccattacaggaactgaagatgtcaagcattacctcataaatattttactgaagaatgccacagaagaaccaaatgaatatgcaagatgcattgctgtttgctcccttggggtctggatatgtgaagagcttgcacagtgtacaagccaccctcaggtgaaagaggccatcaatgtgataggagtaactctgaagtttcccaacaaaatcgtggcccaggtagcttgcgatgtccttcagttgctggtttcctactgggagaagcttcagatgtttgaaacctctctgcctcggaaaatggcagaaatcctcgtggccacagttgcttttcttttaccaagtgcagagtactcctcagtggaaacagacaagaagtttattgtgtccttgctactctgcctcttggactggtgcatggcattgcccgtgagtgtccttctccaccccgtgtccacagcagtcctagaggagcagcattcggccagagcccccttgctggattatatctacagggttttgcactgctgtgtgtgtggctcaagcacgtacacccaacagagtcactacatactgaccctggctgacttgtcatccacggattatgaccccttcctgccactggcaaatgtgaagagctctgagccagtccagtatcattcatcagcagaattgggtaacctgctgactgttgaagaggagaagaagagaagaagtttggagttgatccctttgactgctcgaatggtgatggcccacctggtgaaccacctggggcactaccccctcagtgggggccctgccatactgcacagccttgtcagcgagaaccatgacaatgcccatgtggaaggctccgagctgtcctttgaggtgttcagaagtccaaacctgcagctgtttgtatttaatgatagcaccctcatctcctaccttcagacacccacagaaggaccggtagggggatcaccagtgggctctctctctgatgtgagagtaattgtgagggatatctcagggaagtactcttgggatggtaaggttttatatggacctttggaaggctgcttagcacccaatggaagaaatccttcatttctgatttcgagctggcatcgtgacacatttggacctcagaaagactcttctcaagttgaggagggggatgatgttcttgacaaattacttgaaaacattggccatacaagtcctgaatgccttttaccgtcacagctaaatctaaatgaaccttccctaaccccatgtggcatgaactatgaccaagagaaggaaatcattgaggtcattttgcgccaaaatgctcaagaggatgagtatatccagagtcataacttcgattctgcaatgaaagtcaccagccaagggcagccctccccagtggagccccgaggacccttttatttctgcaggttattgcttgatgacttgggaatgaattcttgggacagaaggaagaattttcatctattgaagaaaaattcaaaattattgagagagctgaaaaatttggactcccgccagtgccgtgagacacacaaaatcgcagtgttttacattgctgaaggtcaagaagacaagtgttcaatcctctctaatgaaagaggaagccaagcatatgaagactttgttgctggacttggatgggaggtggatctctccacccactgtgggttcatgggtggccttcagcgcaatggcagcaccgggcagacggccccttactatgctacctcaactgtggaagtgattttccatgtttccactcgaatgccgtcagactcagatgattccctcaccaaaaagcttcgtcacttggggaatgacgaggtccatatcgtctggtctgaacactccagagactaccgcaggggtattatcccaactgcctttggagatgtttcaatcattatttacccaatgaagaatcacatgttcttcatcgcgataacgaagaaacctgaggttccattttttgggcctctgtttgatggagccatagtgagtgggaagctgctgccaagccttgtatgtgccacgtgcatcaacgccagcagggctgtgaagtgcctcatcccactctaccagagcttacgcgtccggtgatgaggaggtgtatagagggctgaccctccaggaggctgttgccacagtccaggtgtggtatgtaccaaatacctggatgtggaggaggagagacatgggtggatgcttttccacaccaataagtaaaacaactgaccaatctccaagcaaaaaaaaagtgatcatccatcagtattattttctaattgccatcaaatgtctatgaccctcagaaagcatgatggttaacaatacagactttggagtgagattggctatgtccagatcctagcttttgtatttactagttgcatgaacttgtgcagtctggccttcagtgcatatacctgtaacataagctgcatagacatgtctgttttatagggttagtgaaattatccaaatggcgattatccaaatcacgatggtgatttatggaaagacatcacaggcaaagtatacaagtttctttaaagaagttaacaagaactgaactgggtagaaatggttgtacaaagccagaagctttccacattattcctattagaggagcaaatatcccatgccattcaagtatgtcaaatgtgccctagcatttattggaccattaggtttttcttggtgtttctttatcattcttctgtgatgtcttaaacccttttggtttgttttaatatttatgtatttcttaagaggtacatgtaactggtaggcgcactgccaacacattactgaatttttctcaaggttaccataccaagtgtactatcctttagcaggccaaatattaggttttcttgaagtttattcctgcaagtttgtgcaacaatttaatgacacattttaaattt

SEQ ID NO: 425769 - DNA, 5975 bp, Homo sapiens
agtatgcctaaaatcatccagactgttggtggtggtgctgtgcaggagagagcgcctgagctggatggtggtgggcccacggagcaggacaaaagccattctaacagcagcaccttgtcggaccgaagactcagcaactccagcctctgtagcattgaagaagagcaccgaatggtgtatgaaatggtacagcggattctcttgtcaacacgaggttatgtcaacttcgtgaatgaagtatttcaccaggcatttttgttgccttcctgtgagatagctgtaacaagaaaagtagttcaagtgtacagaaagtggattctccaggacaaacctgtgttcatggaggagccagatagaaaagatgttgcccaagaagatgctgaaaaattaggattttccgagactgatagcaaggaggcctcatctgaaagttctggtcataaacgatcttccagttggggacgcacatactccttcacaagtgcaatgagcagagggtgtgtgacagaggaggaaaatacaaatgtgaaagccggcgtccaggctttgttgcaggtatttttgacgaactctgcaaacatctttttgttggaaccatgtgctgaagttcctgtgctcttgaaagaacaagttgatgcttgtaaagctgttttgattatttttaggcgcatgataatggagcttacaatgaataaaaagacatgggaacagatgttgcaaatactactcaggataacagaagctgtcatgcagaagccaaaggataaacgaataaaggacttgtttgcccagagcttggcagggttactatttaggacgctcatggtagcttggatccgagcaaacctctgtgtgtacatttctcgagagctctgggatgactttcttggtgtgctgtcctccctcacggaatgggaggaacttataaacgagtgggccaacattatggactccttgacagcagtgcttgcaagaaccgtttatggagttgagatgacaaacctacctctggataaattaagtgaacaaaaggaaaagaagcaacgaggcaaaggctgtgttctagatcctcagaaaggaaccaccgtggggaggtccttttctctcagctggcggagccacccagatgtgaccgaaccgatgcgatttaggagtgccaccacgtctggagcaccgggagtggaaaaggcaagaaatattgttcgccaaaaagcaactgaagtggaggagtgtcaacagtcagaaaatgcacctgcagccggatctggccatctcacagtgggacagcagcagcaggtccttcggagcagcagcacctccgacatccccgagccgctgtgctcagattcttctcagggtcaaaaggcagaaaacacacagaattcgagttcttcagagcctcagcctattcaagagaataaaggacatgtgaagagagaacatgaaggaataacaatcttagttcgaagaagcagcagccctgctgaattggatttgaaagatgatttgcagcagacacaaggaaaatgtagggaaagacagaagagtgaaagtaccaacagtgacacaactctgggctgtaccaatgaggcagagctgtccatgggcccatggcagacctgtgaggaagacccagaactgaatactcccacagatgttgtggctgatgctgatgcccgtcattggttacaactgagtcccaccgatgcttcaaatttaacagatagcagcgagtgcctcacagatgactgtagtataatcgccggggggagcctcactggttggcacccagactctgctgctgtgttatggcgaagggtcttggggatcctcggagatgtgaataacatccagtcacccaagatccatgccagagttttctgctatctctatgaactctggtacaaactagcaaagatacgggataatctagcaataagcctggataaccagtcttctccatctcctccagttttgatcccaccactcagaatgtttgcatcatggctgtttaaggcggcgacactgccaaatgaatataaggaaggcaaactacaagcctacaggctgatctgtgccatgatgaccagacgccaggacgttctgccaaactcagatttcctggtgcatttttaccttgtgatgcacctgggattaaccagcgaggatcaggatatcttaaatacgatcataaggcactgtccaccccgctttttctccctgggttttcctggcttctcaatgctggtgggggacttcatcacggccgctgccagggtccttagcacagacattttgacggcgcctcgttcagaggctgtcactgtcctcggctctctggtctgctttccaaatacctaccaggagattcctttactgcagtcagtgccagaagtaaatgaggccattacaggaactgaagatgtcaagcattacctcataaatattttactgaagaatgccacagaagaaccaaatgaatatgcaagatgcattgctgtttgctcccttggggtctggatatgtgaagagcttgcacagtgtacaagccaccctcaggtgaaagaggccatcaatgtgataggagtaactctgaagtttcccaacaaaatcgtggcccaggtagcttgcgatgtccttcagttgctggtttcctactgggagaagcttcagatgtttgaaacctctctgcctcggaaaatggcagaaatcctcgtggccacagttgcttttcttttaccaagtgcagagtactcctcagtggaaacagacaagaagtttattgtgtccttgctactctgcctcttggactggtgcatggcattgcccgtgagtgtccttctccaccccgtgtccacagcagtcctagaggagcagcattcggccagagcccccttgctggattatatctacagggttttgcactgctgtgtgtgtggctcaagcacgtacacccaacagagtcactacatactgaccctggctgacttgtcatccacggattatgaccccttcctgccactggcaaatgtgaagagctctgagccagtccagtatcattcatcagcagaattgggtaacctgctgactgttgaagaggagaagaagagaagaagtttggagttgatccctttgactgctcgaatggtgatggcccacctggtgaaccacctggggcactaccccctcagtgggggccctgccatactgcacagccttgtcagcgagaaccatgacaatgcccatgtggaaggctccgagctgtcctttgaggtgttcagaagtccaaacctgcagctgtttgtatttaatgatagcaccctcatctcctaccttcagacacccacagaaggaccggtagggggatcaccagtgggctctctctctgatgtgagagtaattgtgagggatatctcagggaagtactcttgggatggtaaggttttatatggacctttggaaggctgcttagcacccaatggaagaaatccttcatttctgatttcgagctggcatcgtgacacatttggacctcagaaagactcttctcaagttgaggagggggatgatgttcttgacaaattacttgaaaacattggccatacaagtcctgaatgccttttaccgtcacagctaaatctaaatgaaccttccctaaccccatgtggcatgaactatgaccaagagaaggaaatcattgaggtcattttgcgccaaaatgctcaagaggatgagtatatccagagtcataacttcgattctgcaatgaaagtcaccagccaagggcagccctccccagtggagccccgaggacccttttatttctgcaggttattgcttgatgacttgggaatgaattcttgggacagaaggaagaattttcatctattgaagaaaaattcaaaattattgagagagctgaaaaatttggactcccgccagtgccgtgagacacacaaaatcgcagtgttttacattgctgaaggtcaagaagacaagtgttcaatcctctctaatgaaagaggaagccaagcatatgaagactttgttgctggacttggatgggaggtggatctctccacccactgtgggttcatgggtggccttcagcgcaatggcagcaccgggcagacggccccttactatgctacctcaactgtggaagtgattttccatgtttccactcgaatgccgtcagactcagatgattccctcaccaaaaagcttcgtcacttggggaatgacgaggtccatatcgtctggtctgaacactccagagactaccgcaggggtattatcccaactgcctttggagatgtttcaatcattatttacccaatgaagaatcacatgttcttcatcgcgataacgaagaaacctgaggttccattttttgggcctctgtttgatggagccatagtgagtgggaagctgctgccaagccttgtatgtgccacgtgcatcaacgccagcagggctgtgaagtgcctcatcccactctaccagagcttctatgaagagcgagctctgtatctcgaagcaataattcagaaccaccgcgaagtaatgacattcgaggatttcgcagcccaagtcttttctccctctcccagctactccctcagcggaacggattaaaacacgtaaaggtctcatttcaatatttgagcaaggggccctggcctccagtctgagtgctgacctcgaagagcccctgagtgaggaggagacagaacaccctctcctgcctctgccccgagccactaaacccagaatctccaggaaatttcgttgctgtactagtgccctcagcaggtcttcccattagtggacttctgaagcccatggtgaatcccactaccgtgtctcagatgggactcaaactaggctgtatcatcttgtcctgaaacctcacaaaccttggacttccaaagaagaaaagaaaaagtcaccaaaaaccagagatgaacccactgacacgtgggcactggtgtggctgctctgggcagatgacagcaggaaaagattctgcgctttcagggagggggcagagggcagcttgcttctgcaccccaagttgtttcttctcatttatgaacccaagcatgattcacaaaggggctggcaaaacaattgtctaattgaggaatctgatctgcattgattttgctagttccttttatgttaggatttatggtttactcaaaaatttcatcatcatggaaattggctttccccggggtcttttgcccaggagaagttttacctcagttgtccagtgttttcccacatggtacctgacgcccgctaactaagcagaggctctcctcaccacgcagaggcgcttcaggtcatgacagtgatgcccctatcttagaacactcagaagattccagaaatacagggtcctgtccttgcataagttcctgcaggacaggaagtgtcccaaggctcaaaacaacacagaccacatccacacaaaaggcgcatgccggcttcaggcgctaggctgagacgggtaccccccgaatggccttgtgcctccaaaagcctcacgctgcaactttgctgctcctgtctgttgcccagagaggcctcacacaggcctcagaaatgtttcttgtcacacaaagcttttggtagccgattccaagcgagggatttaatccttacatttttgcccatttggctccaaggaaggcttattagacctgtttttttgttgttgttgtttttttttcttaaaaacaaaatgaatgaatgaatgaaaagagaagcaatggtgagccctctcctgctggggcgccctgggtgggccttgccggtcctgcagcagagaaatcagtcagcagcgaagagctgttggcgaaggccccaggctgtgtcctggacccttgacctgcctcagagctagaggtttgctccaccccgcacttcacttgggaagtaaatccaagaagcttaccagagtccat

SEQ ID NO: 425770 - DNA, 5909 bp, Homo sapiens
agtatgcctaaaatcatccagactgttggtggtggtgctgtgcaggagagagcgcctgagctggatggtggtgggcccacggagcaggacaaaagccattctaacagcagcaccttgtcggaccgaagactcagcaactccagcctctgtagcattgaagaagagcaccgaatggtgtatgaaatggtacagcggattctcttgtcaacacgaggttatgtcaacttcgtgaatgaagtatttcaccaggcatttttgttgccttcctgtgagatagctgtaacaagaaaagtagttcaagtgtacagaaagtggattctccaggacaaacctgtgttcatggaggagccagatagaaaagatgttgcccaagaagatgctgaaaaattaggattttccgagactgatagcaaggaggcctcatctgaaagttctggtcataaacgatcttccagttggggacgcacatactccttcacaagtgcaatgagcagagggtgtgtgacagaggaggaaaatacaaatgtgaaagccggcgtccaggctttgttgcaggtatttttgacgaactctgcaaacatctttttgttggaaccatgtgctgaagttcctgtgctcttgaaagaacaagttgatgcttgtaaagctgttttgattatttttaggcgcatgataatggagcttacaatgaataaaaagacatgggaacagatgttgcaaatactactcaggataacagaagctgtcatgcagaagccaaaggataaacgaataaaggacttgtttgcccagagcttggcagggttactatttaggacgctcatggtagcttggatccgagcaaacctctgtgtgtacatttctcgagagctctgggatgactttcttggtgtgctgtcctccctcacggaatgggaggaacttataaacgagtgggccaacattatggactccttgacagcagtgcttgcaagaaccgtttatggagttgagatgacaaacctacctctggataaattaagtgaacaaaaggaaaagaagcaacgaggcaaaggctgtgttctagatcctcagaaaggaaccaccgtggggaggtccttttctctcagctggcggagccacccagatgtgaccgaaccgatgcgatttaggagtgccaccacgtctggagcaccgggagtggaaaaggcaagaaatattgttcgccaaaaagcaactgaagtggaggagtgtcaacagtcagaaaatgcacctgcagccggatctggccatctcacagtgggacagcagcagcaggtccttcggagcagcagcacctccgacatccccgagccgctgtgctcagattcttctcagggtcaaaaggcagaaaacacacagaattcgagttcttcagagcctcagcctattcaagagaataaaggacatgtgaagagagaacatgaaggaataacaatcttagttcgaagaagcagcagccctgctgaattggatttgaaagatgatttgcagcagacacaaggaaaatgtagggaaagacagaagagtgaaagtaccaacagtgacacaactctgggctgtaccaatgaggcagagctgtccatgggcccatggcagacctgtgaggaagacccagaactgaatactcccacagatgttgtggctgatgctgatgcccgtcattggttacaactgagtcccaccgatgcttcaaatttaacagatagcagcgagtgcctcacagatgactgtagtataatcgccggggggagcctcactggttggcacccagactctgctgctgtgttatggcgaagggtcttggggatcctcggagatgtgaataacatccagtcacccaagatccatgccagagttttctgctatctctatgaactctggtacaaactagcaaagatacgggataatctagcaataagcctggataaccagtcttctccatctcctccagttttgatcccaccactcagaatgtttgcatcatggctgtttaaggcggcgacactgccaaatgaatataaggaaggcaaactacaagcctacaggctgatctgtgccatgatgaccagacgccaggacgttctgccaaactcagatttcctggtgcatttttaccttgtgatgcacctgggattaaccagcgaggatcaggatatcttaaatacgatcataaggcactgtccaccccgctttttctccctgggttttcctggcttctcaatgctggtgggggacttcatcacggccgctgccagggtccttagcacagacattttgacggcgcctcgttcagaggctgtcactgtcctcggctctctggtctgctttccaaatacctaccaggagattcctttactgcagtcagtgccagaagtaaatgaggccattacaggaactgaagatgtcaagcattacctcataaatattttactgaagaatgccacagaagaaccaaatgaatatgcaagatgcattgctgtttgctcccttggggtctggatatgtgaagagcttgcacagtgtacaagccaccctcaggtgaaagaggccatcaatgtgataggagtaactctgaagtttcccaacaaaatcgtggcccaggtagcttgcgatgtccttcagttgctggtttcctactgggagaagcttcagatgtttgaaacctctctgcctcggaaaatggcagaaatcctcgtggccacagttgcttttcttttaccaagtgcagagtactcctcagtggaaacagacaagaagtttattgtgtccttgctactctgcctcttggactggtgcatggcattgcccgtgagtgtccttctccaccccgtgtccacagcagtcctagaggagcagcattcggccagagcccccttgctggattatatctacagggttttgcactgctgtgtgtgtggctcaagcacgtacacccaacagagtcactacatactgaccctggctgacttgtcatccacggattatgaccccttcctgccactggcaaatgtgaagagctctgagccagtccagtatcattcatcagcagaattgggtaacctgctgactgttgaagaggagaagaagagaagaagtttggagttgatccctttgactgctcgaatggtgatggcccacctggtgaaccacctggggcactaccccctcagtgggggccctgccatactgcacagccttgtcagcgagaaccatgacaatgcccatgtggaaggctccgagctgtcctttgaggtgttcagaagtccaaacctgcagctgtttgtatttaatgatagcaccctcatctcctaccttcagacacccacagaaggaccggtagggggatcaccagtgggctctctctctgatgtgagagtaattgtgagggatatctcagggaagtactcttgggatggtaaggttttatatggacctttggaaggctgcttagcacccaatggaagaaatccttcatttctgatttcgagctggcatcgtgacacatttggacctcagaaagactcttctcaagttgaggagggggatgatgttcttgacaaattacttgaaaacattggccatacaagtcctgaatgccttttaccgtcacagctaaatctaaatgaaccttccctaaccccatgtggcatgaactatgaccaagagaaggaaatcattgaggtcattttgcgccaaaatgctcaagaggatgagtatatccagagtcataacttcgattctgcaatgaaagtcaccagccaagggcagccctccccagtggagccccgaggacccttttatttctgcaggttattgcttgatgacttgggaatgaattcttgggacagaaggaagaattttcatctattgaagaaaaattcaaaattattgagagagctgaaaaatttggactcccgccagtgccgtgagacacacaaaatcgcagtgttttacattgctgaaggtcaagaagacaagtgttcaatcctctctaatgaaagaggaagccaagcatatgaagactttgttgctggacttggatgggaggtggatctctccacccactgtgggttcatgggtggccttcagcgcaatggcagcaccgggcagacggccccttactatgctacctcaactgtggaagtgattttccatgtttccactcgaatgccgtcagactcagatgattccctcaccaaaaagcttcgtcacttggggaatgacgaggtccatatcgtctggtctgaacactccagagactaccgcaggggtattatcccaactgcctttggagatgtttcaatcattatttacccaatgaagaatcacatgttcttcatcgcgataacgaagaaacctgaggttccattttttgggcctctgtttgatggagccatagtgagtgggaagctgctgccaagccttgtatgtgccacgtgcatcaacgccagcagggctgtgaagtgcctcatcccactctaccagagcttgtatctttttgctttaaatgtgtaacttactaaccatcccagaatcaagattcctggcagtttttcataagaggtaagtattcaaaactgaattgaagagggaagagaatttttttcaacctctgttaaaaataacatagtggtttttcatagcatttgttaatttatattaaatataataattttatgctgcattaaacttagagtttactttcataatttactcacatacgtttgtgtctgagaagctgtgaccattatgagatgctcatatcttcttaggtattttgccccacgttcagtctcatcctgtatccctcttatttgtggcagtccattgtatataaggtgggatgctgagcaaaacgtatcgctcattcagagtgcctaccagaaaccaaagcaaatgaaatgaccctaataaatcaaagaatgtggcaggtaccacctgagaagtgcaagtaggtttctggaagatcagaggagatagaaattgcatttggttgagggtagagggaaagatgtcctgaattaagttgcatttggacttatcaataggaatagctagaaattcttttgtaattttcccaaatcattgatattttctctagttcctgattttgtttccaaaaacagaataaatttcactcctaaaattttttcctcaaacattaattggcctgctgtagtccttaaattcaagcatgatctcaagttataagaaaaagagattaagatgggtgaccttataaaattgatgcaaaaaaagtgacctcctaataaaacttagaatctctttgtttctaattggtattgataataatttgaaacatattgtgtttgacctctatatatacttctcccaacctgatagtaagtgatgtgttgctatagcaagtgagagttgggggtagatgaaaactatcccatgtgaatagatacggttcatgaaaaaatacctttcattaaaatcctggtcacttcattgactgatattctgcctttagattaaaaaaaaatacatatgccatgtggcaacttaaaattatcatagaaatgagtagtagaaaagagctattaggtcccatctggtccctcccctgggggccagggcaggattattcccttcagtgtactctctcgtgctttgtccaggctggtggtgagtgttttggagatggcattctttgcagtgatttccacaacactgtagacgtaatcttgtggctggtgtcaatttggccttcagcatggagtttttatttcacatactattaaaaagagcctcttggcagaaatgagaaagaactattcagcgattagtttgtcagtttgcatgtcaactaggacgagctgggcacgcatcagtcaagtatgttggaccaaggcagcaaaaaa

SEQ ID NO: 425771 - DNA, 4790 bp, Homo sapiens
agtatgcctaaaatcatccagactgttggtggtggtgctgtgcaggagagagcgcctgagctggatggtggtgggcccacggagcaggacaaaagccattctaacagcagcaccttgtcggaccgaagactcagcaactccagcctctgtagcattgaagaagagcaccgaatggtgtatgaaatggtacagcggattctcttgtcaacacgaggttatgtcaacttcgtgaatgaagtatttcaccaggcatttttgttgccttcctgtgagatagctgtaacaagaaaagtagttcaagtgtacagaaagtggattctccaggacaaacctgtgttcatggaggagccagatagaaaagatgttgcccaagaagatgctgaaaaattaggattttccgagactgatagcaaggaggcctcatctgaaagttctggtcataaacgatcttccagttggggacgcacatactccttcacaagtgcaatgagcagagggtgtgtgacagaggaggaaaatacaaatgtgaaagccggcgtccaggctttgttgcaggtatttttgacgaactctgcaaacatctttttgttggaaccatgtgctgaagttcctgtgctcttgaaagaacaagttgatgcttgtaaagctgttttgattatttttaggcgcatgataatggagcttacaatgaataaaaagacatgggaacagatgttgcaaatactactcaggataacagaagctgtcatgcagaagccaaaggataaacgaataaaggacttgtttgcccagagcttggcagggttactatttaggacgctcatggtagcttggatccgagcaaacctctgtgtgtacatttctcgagagctctgggatgactttcttggtgtgctgtcctccctcacggaatgggaggaacttataaacgagtgggccaacattatggactccttgacagcagtgcttgcaagaaccgtttatggagttgagatgacaaacctacctctggataaattaagtgaacaaaaggaaaagaagcaacgaggcaaaggctgtgttctagatcctcagaaaggaaccaccgtggggaggtccttttctctcagctggcggagccacccagatgtgaccgaaccgatgcgatttaggagtgccaccacgtctggagcaccgggagtggaaaaggcaagaaatattgttcgccaaaaagcaactgaagtggaggagtgtcaacagtcagaaaatgcacctgcagccggatctggccatctcacagtgggacagcagcagcaggtccttcggagcagcagcacctccgacatccccgagccgctgtgctcagattcttctcagggtcaaaaggcagaaaacacacagaattcgagttcttcagagcctcagcctattcaagagaataaaggacatgtgaagagagaacatgaaggaataacaatcttagttcgaagaagcagcagccctgctgaattggatttgaaagatgatttgcagcagacacaaggaaaatgtagggaaagacagaagagtgaaagtaccaacagtgacacaactctgggctgtaccaatgaggcagagctgtccatgggcccatggcagacctgtgaggaagacccagaactgaatactcccacagatgttgtggctgatgctgatgcccgtcattggttacaactgagtcccaccgatgcttcaaatttaacagatagcagcgagtgcctcacagatgactgtagtataatcgccggggggagcctcactggttggcacccagactctgctgctgtgttatggcgaagggtcttggggatcctcggagatgtgaataacatccagtcacccaagatccatgccagagttttctgctatctctatgaactctggtacaaactagcaaagatacgggataatctagcaataagcctggataaccagtcttctccatctcctccagttttgatcccaccactcagaatgtttgcatcatggctgtttaaggcggcgacactgccaaatgaatataaggaaggcaaactacaagcctacaggctgatctgtgccatgatgaccagacgccaggacgttctgccaaactcagatttcctggtgcatttttaccttgtgatgcacctgggattaaccagcgaggatcaggatatcttaaatacgatcataaggcactgtccaccccgctttttctccctgggttttcctggcttctcaatgctggtgggggacttcatcacggccgctgccagggtccttagcacagacattttgacggcgcctcgttcagaggctgtcactgtcctcggctctctggtctgctttccaaatacctaccaggagattcctttactgcagtcagtgccagaagtaaatgaggccattacaggaactgaagatgtcaagcattacctcataaatattttactgaagaatgccacagaagaaccaaatgaatatgcaagatgcattgctgtttgctcccttggggtctggatatgtgaagagcttgcacagtgtacaagccaccctcaggtgaaagaggccatcaatgtgataggagtaactctgaagtttcccaacaaaatcgtggcccaggtagcttgcgatgtccttcagttgctggtttcctactgggagaagcttcagatgtttgaaacctctctgcctcggaaaatggcagaaatcctcgtggccacagttgcttttcttttaccaagtgcagagtactcctcagtggaaacagacaagaagtttattgtgtccttgctactctgcctcttggactggtgcatggcattgcccgtgagtgtccttctccaccccgtgtccacagcagtcctagaggagcagcattcggccagagcccccttgctggattatatctacagggttttgcactgctgtgtgtgtggctcaagcacgtacacccaacagagtcactacatactgaccctggctgacttgtcatccacggattatgaccccttcctgccactggcaaatgtgaagagctctgagccagtccagtatcattcatcagcagaattgggtaacctgctgactgttgaagaggagaagaagagaagaagtttggagttgatccctttgactgctcgaatggtgatggcccacctggtgaaccacctggggcactaccccctcagtgggggccctgccatactgcacagccttgtcagcgagaaccatgacaatgcccatgtggaaggctccgagctgtcctttgaggtgttcagaagtccaaacctgcagctgtttgtatttaatgatagcaccctcatctcctaccttcagacacccacagaaggaccggtagggggatcaccagtgggctctctctctgatgtgagagtaattgtgagggatatctcagggaagtactcttgggatggtaaggttttatatggacctttggaaggctgcttagcacccaatggaagaaatccttcatttctgatttcgagctggcatcgtgacacatttggacctcagaaagactcttctcaagttgaggagggggatgatgttcttgacaaattacttgaaaacattggccatacaagtcctgaatgccttttaccgtcacagctaaatctaaatgaaccttccctaaccccatgtggcatgaactatgaccaagagaaggaaatcattgaggtcattttgcgccaaaatgctcaagaggatgagtatatccagagtcataacttcgattctgcaatgaaagtcaccagccaagggcagccctccccagtggagccccgaggacccttttatttctgcaggttattgcttgatgacttgggaatgaattcttgggacagaaggaagaattttcatctattgaagaaaaattcaaaattattgagagagctgaaaaatttggactcccgccagtgccgtgagacacacaaaatcgcagtgttttacattgctgaaggtcaagaagacaagtgttcaatcctctctaatgaaagaggaagccaagcatatgaagactttgttgctggacttggatgggaggtggatctctccacccactgtgggttcatgggtggccttcagcgcaatggcagcaccgggcagacggccccttactatgctacctcaactgtggaagtgattttccatgtttccactcgaatgccgtcagactcagatgattccctcaccaaaaagcttcgtcacttggggaatgacgaggtccatatcgtctggtctgaacactccagagactaccgcaggggtattatcccaactgcctttggagatgtttcaatcattatttacccaatgaagaatcacatgttcttcatcgcgataacgaagaaacctgaggtacgttttcattgcattgttgtactgactcataaagcatttgccatgtgattcattgtcattgaaaatcagtgatacaaatatgttaaaggggactctcatccagttgttgaatgtcttacatatatctgaattatgcatgctttataggaattaaatatgaattgggattttcaaagaatttttcatcatgagcacaaaattgtattattgtattactaggcctctttggaaattataatgtcaaatttattattttgtaaatgttttaagttttctaaattttgtacttttgaaaaattgtatcttgaaattttggttatgttgattaataataagagttgaaggaaccccatatcacatctagcattttgtggagaaccgtgggtatggaatccagccttgcc

SEQ ID NO: 425772 - DNA, 1561 bp, Homo sapiens
agtatgcctaaaatcatccagactgttggtggtggtgctgtgcaggagagagcgcctgagctggatggtggtgggcccacggagcaggacaaaagccattctaacagcagcaccttgtcggaccgaagactcagcaactccagcctctgtagcattgaagaagagcaccgaatggtgtatgaaatggtacagcggattctcttgtcaacacgaggttatgtcaacttcgtgaatgaagtatttcaccaggcatttttgttgccttcctgtgagatagctgtaacaagaaaagtagttcaagtgtacagaaagtggattctccaggacaaacctgtgttcatggaggagccagatagaaaagatgttgcccaagaagatgctgaaaaattaggattttccgagactgatagcaaggaggcctcatctgaaagttctggtcataaacgatcttccagttggggacgcacatactccttcacaagtgcaatgagcagagggtgtgtgacagaggaggaaaatacaaatgtgaaagccggcgtccaggctttgttgcaggtatttttgacgaactctgcaaacatctttttgttggaaccatgtgctgaagttcctgtgctcttgaaagaacaagttgatgcttgtaaagctgttttgattatttttaggcgcatgataatggagcttacaatgaataaaaagacatgggaacagatgttgcaaatactactcaggataacagaagctgtcatgcagaagccaaaggataaacgaataaaggacttgtttgcccagagcttggcagggttactatttaggacgctcatggtagcttggatccgagcaaacctctgtgtgtacatttctcgagagctctgggatgactttcttggtgtgctgtcctccctcacggaatgggaggaacttataaacgagtgggccaacattatggactccttgacagcagtgcttgcaagaaccgtttatggagttgagatgacaaacctacctctggataaattaagtgaacaaaaggaaaagaagcaacgaggcaaaggtatttccactcttccaggttaacaccagatgtctaggactggggacgagtgtgtatttgtatgactaagcaattaatgcgcgaaattttataatgaactgaaccaactacacagtgtcttcttaatagtggcattaatttgtgtctcatatcattctgttcccttaatgagatggtgaatttctgaggaagctatgcaagaaggaagatgcaaggaaggtagtagtaatagtagtgataactaacagtaataataatggctattacattgtacatattatctctttttaccttcataataacctagtgaactgtagatacttgtattatccccatatcacagacaaagaaactgaagtacagagactttgcagggatgtccaatcctttggcttccccaggccacattggaagaattgtcttaggtcacacataaaatacagtaaaactaacgatagctgatgagctaaaacaaaaaaagaaattgcaaaaaaaaaaaagtcgacg

SEQ ID NO: 425773 - DNA, 269 bp, Homo sapiens
gggcagccctccccagtggagccccgaggacccttttatttctgcaggttattgcttgatgacttgggaatgaattcttgggacagaaggtaacaatccaagctagacctccagttattttatcattattttcatgtacttgttctttttatcagtttgtggttggggaagaagaaaagattggggaagagaggagaagggagatttttctttattttaacatttgcagcttattttctgctactaaattaaagctagaaatgaaatta

SEQ ID NO: 425774 - DNA, 603 bp, Homo sapiens
gaatatgggcaagaatgtgagtccatgggcagaggttgaggggagtctcattgaatgggttctgtttcttgtgaagtctgcagtgaatccatctgctcaaagtcagggaggatttggtgggctggcggttttcctgtaggaggtttgaagtagccactgtggatggtaggaaaagagcagtctcaggaagcagagttgtcactgtgcggagggctttgtcttttctctgattatagccagggccagctgcagacactagaacaatattgaatcagtaactttgttcataatgataactaactccccaatagcttaaattttgattatagttggtcaaatgaattttgagaattaaaagaaaaacaacttccaaaagtactttttattttaaaatttgtgttattaatagtaatttaaaacattttgtttaaaagtatgctttttccaaatgaagatgtgtgaattctcttgttggttggttggttttagacgctcatggtagcttggatccgagcaaacctctgtgtgtacatttctcgagagctctgggatgactttcttggtgtgctgtcctccctcacggaatgggaggaacttataaac

SEQ ID NO: 425775 - DNA, 2196 bp, Homo sapiens
cgccggtcggttggtggcgcctttgtcctacggcgggcaggtgggccgacgcggaggcggcagcggcgggcctgaggcgaaggagcggccgggagcccgccgcgctggtagcgatattaataaggcagcggaaagaagaaatatgaatacggctccatcaagacccagccccacacgaagggatccatatggctttggagacagtcgagattcaaggcgtgatcgatccccaattcgaggaagtccaaggagagagcccagggatggcagaaatggccgggatgcccgggacagcagagacattcgagacccccgagacttgcgggaccacagacatagtagagatttgcgggatcacagagacagcaggagtgtgcgcgacgttcgggacgtgagggatcttagagactttcgtgatctaagagactctagggattttcgagatcagcgagaccccatgtacgacagatacagagacatgagagactcccgagatcctatgtacaggagagaaggctcttatgaccgatacctacgaatggatgactattgcaggagaaaggatgactcttattttgaccgttacagagatagctttgatggacggggccctccaggcccagaaagtcagtctcgtgcaaaagagcgtttgaaacgtgaggaacggcgtagagaagagctttatcgtcaatattttgaggaaatccagagacgctttgatgccgaaaggcccgttgattgttctgtgattgtggtcaacaaacagacaaaagactatgctgagtctgtggggcggaaggtgcgagacctgggcatggtagtggacttgatcttccttaacacagaagtgtcactgtcacaagccttggaggatgttagcaggggaggttctccttttgctattgtcatcacccagcaacaccagattcaccgctcctgcacagtcaacatcatgtttggaaccccgcaagagcatcgcaacatgccccaagcagatgccatggtgctggtggccagaaattatgagcgttacaagaatgagtgccgggagaaggaacgtgaggagattgccagacaggcagccaagatggccgatgaagccatcctgcaggaaagagagagaggaggccctgaggagggagtgcgtgggggccaccctccagccatccagagcctcatcaacctgctggcagacaacaggtacctcactgctgaagagactgacaagatcatcaactacctgcgagagcggaaggagcggctgatgaggagcagcaccgactctctgcctggcccgatttcccgccaaccactcggggcgacctcgggtgcctcgctgaagacacagccaagctcccaaccgctccagagcggccaagtgctcccctctgctacacccactccatctgcaccccccacctcccagcaagagcttcaggccaaaatcctcagcctcttcaatagtggcacagtgacggccaatagcagctctgcatccccctcggttgctgccggaaacaccccaaaccagaatttttccacagcagcaaacagccagcctcaacaaagatcacaggcttctggcaatcagcctccaagcattttgggacagggaggatctgctcagaacatgggccccagacctggggctccttcccaagggctttttggccagccttccagtcgcctggcacctgctagcaacatgactagccagaggcctgtgtcttccacaggtatcaactttgacaatccaagtgtacagaaggctctggataccctgatccagagtggccctgctctctcccacctggttagccagaccacagcacagatggggcagccacaggcccccatgggatcttaccagaggcattactgaagctaaatctttcaactctccccagtcccctcatcccctggcctcctcccacttacttgttctaaatagagctgtttggaggatgttctctgcgctcccaggccggcatcgagtgtcatcaatttctaccacctgctctctcttctgcccaaggctgtgttgcttattccttacaaagtttatactgcatttggggctgtatctttttttgtttttttggttttttttttcctctttggaactcttgtgttgttaataaaatgaaatgattactttttaattaaaatgaaaaagtaaaagctttgttcatcttt

SEQ ID NO: 425776 - DNA, 3211 bp, Homo sapiens
cgccggtcggttggtggcgcctttgtcctacggcgggcaggtgggccgacgcggaggcggcagcggcgggcctgaggcgaaggagcggccgggagcccgccgcgctggtagcgatattaataaggcagcggaaagaagaaatatgaatacggctccatcaagacccagccccacacgaagggatccatatggctttggagacagtcgagattcaaggcgtgatcgatccccaattcgaggaagtccaaggagagagcccagggatggcagaaatggccgggatgcccgggacagcagagacattcgagacccccgagacttgcgggaccacagacatagtagagatttgcgggatcacagagacagcaggagtgtgcgcgacgttcgggacgtgagggatcttagagactttcgtgatctaagagactctagggattttcgagatcagcgagaccccatgtacgacagatacagagacatgagagactcccgagatcctatgtacaggagagaaggctcttatgaccgatacctacgaatggatgactattgcaggagaaaggatgactcttattttgaccgttacagagatagctttgatggacggggccctccaggcccagaaagtcagtctcgtgcaaaagagcgtttgaaacgtgaggaacggcgtagagaagagctttatcgtcaatattttgaggaaatccagagacgctttgatgccgaaaggcccgttgattgttctgtgattgtggtcaacaaacagacaaaagactatgctgagtctgtggggcggaaggtgcgagacctgggcatggtagtggacttgatcttccttaacacagaagtgtcactgtcacaagccttggaggatgttagcaggggaggttctccttttgctattgtcatcacccagcaacaccagattcaccgctcctgcacagtcaacatcatgtttggaaccccgcaagagcatcgcaacatgccccaagcagatgccatggtgctggtggccagaaattatgagcgttacaagaatgagtgccgggagaaggaacgtgaggagattgccagacaggcagccaagatggccgatgaagccatcctgcaggaaagagagagaggaggccctgaggagggagtgcgtgggggccaccctccagccatccagagcctcatcaacctgctggcagacaacaggtacctcactgctgaagagactgacaagatcatcaactacctgcgagagcggaaggagcggctgatgaggagcagcaccgactctctgcctggcccgatttcccgccaaccactcggggcgacctcgggtgcctcgctgaagacacagccaagctcccaaccgctccagagcggccaagtgctcccctctgctacacccactccatctgcaccccccacctcccagcaagagcttcaggccaaaatcctcagcctcttcaatagtggcacagtgacggccaatagcagctctgcatccccctcggttgctgccggaaacaccccaaaccagaatttttccacagcagcaaacagccagcctcaacaaagatcacaggcttctggcaatcagcctccaagcattttgggacagggaggatctgctcagaacatgggccccagacctggggctccttcccaagggctttttggccagccttccagtcgcctggcacctgctagcaacatgactagccagaggcctgtgtcttccacaggtatcaactttgacaatccaagtgtacagaaggctctggataccctgatccagagtggccctgctctctcccacctggttagccagaccacagcacagatggggcagccacaggcccccatgggatcttaccagaggcattactgaagctaaatctttcaactctccccagtcccctcatcccctggcctcctcccacttacttgttctaaatagagctgtttggaggatgttctctgcgctcccaggccggcatcgagtgtcatcaatttctaccacctgctctctcttctgcccaaggctgtgttgcttattccttacaaagtttatactgcatttggggctgtatctttttttgttttttgttttgtagaaaataaatatctccgggggcagtacaggtgtctgggcttgtatttgatggggtttctccggtccctgtttctactggatttggagccaggcccagctagccaagtttggaatggcatttgtcatgtcagtagccaccacctttgttcattgtgaacctaccaaggctttccagcttcatacacattgaccagagctcaagctcctgcctgcaactcctgcctagagttgaagaaaagcaaactggccttggcaggcacagtgtcatcataccctcaccccatatgtttggggtctgcttgaggattcataaatcagccactctggattgttgaggaatggccatggcagccacagaaaaaagaatttttctctctgagccaaggttgttttttgtttttttctcttttcttttttgttttcatttcattggaagatctccaatggactgaacagctccagtcagcagcagttaccacaaactgtgaatctgggccccaccactcttccctgttaaccagttctgtcagcatccccctctccagcagcacttccatgaagttggttctgagactctggccgtgaacacccgtttcttcagtgatttgttttgggcttttggctcaaaaccccaggctcttgtttttgtctagactcttattctgtttcctgagcagcaggaggtagggaccactttgatgtcagacttctggtagctggacatgttctcgagatgggtggctgttcgcgacttttgtaccagagtgaaattgttagaaggagggtttctggctgtggttctaaatggagccccaggaagctgccctctccccagggtttgtgctcagtagagccctgtggatcacagtcttgaggtcctctagcaggggtgagggagagcagcgacttcagctgagtccctgccagtggttaagcaaacaatggtttcaaaattcaaggtccccaaatggcagcattttatgttctgacctgtttgtgttatatagtggttttttttttcctctttggaactcttgtgttgttaataaaatgaaatgattactttttaattaaaatgaaaaagtaaaagctttgttcatcttt

SEQ ID NO: 425777 - DNA, 3144 bp, Homo sapiens
cgccggtcggttggtggcgcctttgtcctacggcgggcaggtgggccgacgcggaggcggcagcggcgggcctgaggcgaaggagcggccgggagcccgccgcgctggtagcgggatccatatggctttggagacagtcgagattcaaggcgtgatcgatccccaattcgaggaagtccaaggagagagcccagggatggcagaaatggccgggatgcccgggacagcagagacattcgagacccccgagacttgcgggaccacagacatagtagagatttgcgggatcacagagacagcaggagtgtgcgcgacgttcgggacgtgagggatcttagagactttcgtgatctaagagactctagggattttcgagatcagcgagaccccatgtacgacagatacagagacatgagagactcccgagatcctatgtacaggagagaaggctcttatgaccgatacctacgaatggatgactattgcaggagaaaggatgactcttattttgaccgttacagagatagctttgatggacggggccctccaggcccagaaagtcagtctcgtgcaaaagagcgtttgaaacgtgaggaacggcgtagagaagagctttatcgtcaatattttgaggaaatccagagacgctttgatgccgaaaggcccgttgattgttctgtgattgtggtcaacaaacagacaaaagactatgctgagtctgtggggcggaaggtgcgagacctgggcatggtagtggacttgatcttccttaacacagaagtgtcactgtcacaagccttggaggatgttagcaggggaggttctccttttgctattgtcatcacccagcaacaccagattcaccgctcctgcacagtcaacatcatgtttggaaccccgcaagagcatcgcaacatgccccaagcagatgccatggtgctggtggccagaaattatgagcgttacaagaatgagtgccgggagaaggaacgtgaggagattgccagacaggcagccaagatggccgatgaagccatcctgcaggaaagagagagaggaggccctgaggagggagtgcgtgggggccaccctccagccatccagagcctcatcaacctgctggcagacaacaggtacctcactgctgaagagactgacaagatcatcaactacctgcgagagcggaaggagcggctgatgaggagcagcaccgactctctgcctggcccgatttcccgccaaccactcggggcgacctcgggtgcctcgctgaagacacagccaagctcccaaccgctccagagcggccaagtgctcccctctgctacacccactccatctgcaccccccacctcccagcaagagcttcaggccaaaatcctcagcctcttcaatagtggcacagtgacggccaatagcagctctgcatccccctcggttgctgccggaaacaccccaaaccagaatttttccacagcagcaaacagccagcctcaacaaagatcacaggcttctggcaatcagcctccaagcattttgggacagggaggatctgctcagaacatgggccccagacctggggctccttcccaagggctttttggccagccttccagtcgcctggcacctgctagcaacatgactagccagaggcctgtgtcttccacaggtatcaactttgacaatccaagtgtacagaaggctctggataccctgatccagagtggccctgctctctcccacctggttagccagaccacagcacagatggggcagccacaggcccccatgggatcttaccagaggcattactgaagctaaatctttcaactctccccagtcccctcatcccctggcctcctcccacttacttgttctaaatagagctgtttggaggatgttctctgcgctcccaggccggcatcgagtgtcatcaatttctaccacctgctctctcttctgcccaaggctgtgttgcttattccttacaaagtttatactgcatttggggctgtatctttttttgttttttgttttgtagaaaataaatatctccgggggcagtacaggtgtctgggcttgtatttgatggggtttctccggtccctgtttctactggatttggagccaggcccagctagccaagtttggaatggcatttgtcatgtcagtagccaccacctttgttcattgtgaacctaccaaggctttccagcttcatacacattgaccagagctcaagctcctgcctgcaactcctgcctagagttgaagaaaagcaaactggccttggcaggcacagtgtcatcataccctcaccccatatgtttggggtctgcttgaggattcataaatcagccactctggattgttgaggaatggccatggcagccacagaaaaaagaatttttctctctgagccaaggttgttttttgtttttttctcttttcttttttgttttcatttcattggaagatctccaatggactgaacagctccagtcagcagcagttaccacaaactgtgaatctgggccccaccactcttccctgttaaccagttctgtcagcatccccctctccagcagcacttccatgaagttggttctgagactctggccgtgaacacccgtttcttcagtgatttgttttgggcttttggctcaaaaccccaggctcttgtttttgtctagactcttattctgtttcctgagcagcaggaggtagggaccactttgatgtcagacttctggtagctggacatgttctcgagatgggtggctgttcgcgacttttgtaccagagtgaaattgttagaaggagggtttctggctgtggttctaaatggagccccaggaagctgccctctccccagggtttgtgctcagtagagccctgtggatcacagtcttgaggtcctctagcaggggtgagggagagcagcgacttcagctgagtccctgccagtggttaagcaaacaatggtttcaaaattcaaggtccccaaatggcagcattttatgttctgacctgtttgtgttatatagtggttttttttttcctctttggaactcttgtgttgttaataaaatgaaatgattactttttaattaaaatgaaaaagtaaaagctttgttcatcttt

SEQ ID NO: 425778 - DNA, 3681 bp, Homo sapiens
cgccggtcggttggtggcgcctttgtcctacggcgggcaggtgggccgacgcggaggcggcagcggcgggcctgaggcgaaggagcggccgggagcccgccgcgctggtagcgatattaataaggcagcggaaagaagaaatatgaatacggctccatcaagacccagccccacacgaagggatccatatggctttggagacagtcgagattcaaggcgtgatcgatccccaattcgaggaagtccaaggagagagcccagggatggcagaaatggccgggatgcccgggacagcagagacattcgagacccccgagacttgcgggaccacagacatagtagagatttgcgggatcacagagacagcaggagtgtgcgcgacgttcgggacgtgagggatcttagagactttcgtgatctaagagactctagggattttcgagatcagcgagaccccatgtacgacagatacagagacatgagagactcccgagatcctatgtacaggagagaaggctcttatgaccgatacctacgaatggatgactattgcaggagaaaggatgactcttattttgaccgttacagagatagctttgatggacggggccctccaggcccagaaagtcagtctcgtgcaaaagagcgtttgaaacgtgaggaacggcgtagagaagagctttatcgtcaatattttgaggaaatccagagacgctttgatgccgaaaggcccgttgattgttctgtgattgtggtcaacaaacagacaaaagactatgctgagtctgtggggcggaaggtgcgagacctgggcatggtagtggacttgatcttccttaacacagaagtgtcactgtcacaagccttggaggatgttagcaggggaggttctccttttgctattgtcatcacccagcaacaccagattcaccgctcctgcacagtcaacatcatgtttggaaccccgcaagagcatcgcaacatgccccaagcagatgccatggtgctggtggccagaaattatgagcgttacaagaatgagtgccgggagaaggaacgtgaggagattgccagacaggcagccaagatggccgatgaagccatcctgcaggaaagagagagaggaggccctgaggagggagtgcgtgggggccaccctccagccatccagagcctcatcaacctgctggcagacaacaggtacctcactgctgaagagactgacaagatcatcaactacctgcgagagcggaaggagcggctgatgaggagcagcaccgactctctgcctggtgagctacgtggcagggccgaggtgaagttctgactctgcatttctctaatccccaggctctgttgggagggtgtcaggcccagggctctttggagtgggtaagggaactaagtccatcccttgggttctcccgtgggccacccatgctgatataatgttaataataactttatatttgggtactgaatgctgatccctatagttaatgtggtggattgactagtattgctggctccgtggtagccaggatggatgcccttttgttttttagcagttctctaggggaactagcctattgttttctgtaaacagcacatatcatgaagcggcctctttgggaaattgatgttatcgtctgtgtactgtatgattgatgtgactcagtgattgttgttcttcctttggctgctaggcctcctgcccttggggggtactttgaaccagatacctccctcttctgtcttccaggcccgatttcccgccaaccactcggggcgacctcgggtgcctcgctgaagacacagccaagctcccaaccgctccagagcggccaagtgctcccctctgctacacccactccatctgcaccccccacctcccagcaagagcttcaggccaaaatcctcagcctcttcaatagtggcacagtgacggccaatagcagctctgcatccccctcggttgctgccggaaacaccccaaaccagaatttttccacagcagcaaacagccagcctcaacaaagatcacaggcttctggcaatcagcctccaagcattttgggacagggaggatctgctcagaacatgggccccagacctggggctccttcccaagggctttttggccagccttccagtcgcctggcacctgctagcaacatgactagccagaggcctgtgtcttccacaggtatcaactttgacaatccaagtgtacagaaggctctggataccctgatccagagtggccctgctctctcccacctggttagccagaccacagcacagatggggcagccacaggcccccatgggatcttaccagaggcattactgaagctaaatctttcaactctccccagtcccctcatcccctggcctcctcccacttacttgttctaaatagagctgtttggaggatgttctctgcgctcccaggccggcatcgagtgtcatcaatttctaccacctgctctctcttctgcccaaggctgtgttgcttattccttacaaagtttatactgcatttggggctgtatctttttttgttttttgttttgtagaaaataaatatctccgggggcagtacaggtgtctgggcttgtatttgatggggtttctccggtccctgtttctactggatttggagccaggcccagctagccaagtttggaatggcatttgtcatgtcagtagccaccacctttgttcattgtgaacctaccaaggctttccagcttcatacacattgaccagagctcaagctcctgcctgcaactcctgcctagagttgaagaaaagcaaactggccttggcaggcacagtgtcatcataccctcaccccatatgtttggggtctgcttgaggattcataaatcagccactctggattgttgaggaatggccatggcagccacagaaaaaagaatttttctctctgagccaaggttgttttttgtttttttctcttttcttttttgttttcatttcattggaagatctccaatggactgaacagctccagtcagcagcagttaccacaaactgtgaatctgggccccaccactcttccctgttaaccagttctgtcagcatccccctctccagcagcacttccatgaagttggttctgagactctggccgtgaacacccgtttcttcagtgatttgttttgggcttttggctcaaaaccccaggctcttgtttttgtctagactcttattctgtttcctgagcagcaggaggtagggaccactttgatgtcagacttctggtagctggacatgttctcgagatgggtggctgttcgcgacttttgtaccagagtgaaattgttagaaggagggtttctggctgtggttctaaatggagccccaggaagctgccctctccccagggtttgtgctcagtagagccctgtggatcacagtcttgaggtcctctagcaggggtgagggagagcagcgacttcagctgagtccctgccagtggttaagcaaacaatggtttcaaaattcaaggtccccaaatggcagcattttatgttctgacctgtttgtgttatatagtggttttttttttcctctttggaactcttgtgttgttaataaaatgaaatgattactttttaattaaaatgaaaaagtaaaagctttgttcatcttt

SEQ ID NO: 425779 - DNA, 3105 bp, Homo sapiens
cgccggtcggttggtggcgcctttgtcctacggcgggcaggtgggccgacgcggaggcggcagcggcgggcctgaggcgaaggagcggccgggagcccgccgcgctggtagcgatattaataaggcagcggaaagaagaaatatgaatacggctccatcaagacccagccccacacgaagggatccatatggctttggagacagtcgagattcaaggcgtgatcgatccccaattcgaggaagtccaaggagagagcccagggatggcagaaatggccgggatgcccgggacagcagagacattcgagacccccgagacttgcgggaccacagacatagtagagatttgcgggatcacagagacagcaggagtgtgcgcgacgttcgggacgtgagggatcttagagactttcgtgatctaagagactctagggattttcgagatcagcgagaccccatgtacgacagatacagagacatgagagactcccgagatcctatgtacaggagagaaggctcttatgaccgatacctacgaatggatgactattgcaggagaaaggatgactcttattttgaccgttacagagatagctttgatggacggggccctccaggcccagaaagtcagtctcgtgcaaaagagcgtttgaaacgtgaggaacggcgtagagaagagctttatcgtcaatattttgaggaaatccagagacgctttgatgccgaaaggcccgttgattgttctgtgattgtggtcaacaaacagacaaaagactatgctgagtctgtggggcggaaggtgcgagacctgggcatggtagtggacttgatcttccttaacacagaagtgtcactgtcacaagccttggaggatgttagcaggggaggttctccttttgctattgtcatcacccagcaacaccagattcaccgctcctgcacagtaaggaacgtgaggagattgccagacaggcagccaagatggccgatgaagccatcctgcaggaaagagagagaggaggccctgaggagggagtgcgtgggggccaccctccagccatccagagcctcatcaacctgctggcagacaacaggtacctcactgctgaagagactgacaagatcatcaactacctgcgagagcggaaggagcggctgatgaggagcagcaccgactctctgcctggcccgatttcccgccaaccactcggggcgacctcgggtgcctcgctgaagacacagccaagctcccaaccgctccagagcggccaagtgctcccctctgctacacccactccatctgcaccccccacctcccagcaagagcttcaggccaaaatcctcagcctcttcaatagtggcacagtgacggccaatagcagctctgcatccccctcggttgctgccggaaacaccccaaaccagaatttttccacagcagcaaacagccagcctcaacaaagatcacaggcttctggcaatcagcctccaagcattttgggacagggaggatctgctcagaacatgggccccagacctggggctccttcccaagggctttttggccagccttccagtcgcctggcacctgctagcaacatgactagccagaggcctgtgtcttccacaggtatcaactttgacaatccaagtgtacagaaggctctggataccctgatccagagtggccctgctctctcccacctggttagccagaccacagcacagatggggcagccacaggcccccatgggatcttaccagaggcattactgaagctaaatctttcaactctccccagtcccctcatcccctggcctcctcccacttacttgttctaaatagagctgtttggaggatgttctctgcgctcccaggccggcatcgagtgtcatcaatttctaccacctgctctctcttctgcccaaggctgtgttgcttattccttacaaagtttatactgcatttggggctgtatctttttttgttttttgttttgtagaaaataaatatctccgggggcagtacaggtgtctgggcttgtatttgatggggtttctccggtccctgtttctactggatttggagccaggcccagctagccaagtttggaatggcatttgtcatgtcagtagccaccacctttgttcattgtgaacctaccaaggctttccagcttcatacacattgaccagagctcaagctcctgcctgcaactcctgcctagagttgaagaaaagcaaactggccttggcaggcacagtgtcatcataccctcaccccatatgtttggggtctgcttgaggattcataaatcagccactctggattgttgaggaatggccatggcagccacagaaaaaagaatttttctctctgagccaaggttgttttttgtttttttctcttttcttttttgttttcatttcattggaagatctccaatggactgaacagctccagtcagcagcagttaccacaaactgtgaatctgggccccaccactcttccctgttaaccagttctgtcagcatccccctctccagcagcacttccatgaagttggttctgagactctggccgtgaacacccgtttcttcagtgatttgttttgggcttttggctcaaaaccccaggctcttgtttttgtctagactcttattctgtttcctgagcagcaggaggtagggaccactttgatgtcagacttctggtagctggacatgttctcgagatgggtggctgttcgcgacttttgtaccagagtgaaattgttagaaggagggtttctggctgtggttctaaatggagccccaggaagctgccctctccccagggtttgtgctcagtagagccctgtggatcacagtcttgaggtcctctagcaggggtgagggagagcagcgacttcagctgagtccctgccagtggttaagcaaacaatggtttcaaaattcaaggtccccaaatggcagcattttatgttctgacctgtttgtgttatatagtggttttttttttcctctttggaactcttgtgttgttaataaaatgaaatgattactttttaattaaaatgaaaaagtaaaagctttgttcatcttt

SEQ ID NO: 425780 - DNA, 2549 bp, Homo sapiens
cgccggtcggttggtggcgcctttgtcctacggcgggcaggtgggccgacgcggaggcggcagcggcgggcctgaggcgaaggagcggccgggagcccgccgcgctggtagcgatattaataaggcagcggaaagaagaaatatgaatacggctccatcaagacccagccccacacgaagggatccatatggctttggagacagtcgagattcaaggcgtgatcgatccccaattcgaggaagtccaaggagagagcccagggatggcagaaatggccgggatgcccgggacagcagagacattcgagacccccgagacttgcgggaccacagacatagtagagatttgcgggatcacagagacagcaggagtgtgcgcgacgttcgggacgtgagggatcttagagactttcgtgatctaagagactctagggattttcgagatcagcgagaccccatgtacgacagatacagagacatgagagactcccgagatcctatgtacaggagagaaggctcttatgaccgatacctacgaatggatgactattgcaggagaaaggatgactcttattttgaccgttacagagatagctttgatggacggggccctccaggcccagaaagtcagtctcgtgcaaaagagcgtttgaaacgtgaggaacggcgtagagaagagctttatcgtcaatattttgaggaaatccagagacgctttgatgccgaaaggcccgttgattgttctgtgattgtggtcaacaaacagacaaaagactatgctgagtctgtggggcggaaggtgcgagacctgggcatggtagtggacttgatcttccttaacacagaagtgtcactgtcacaagccttggaggatgttagcaggggaggttctccttttgctattgtcatcacccagcaacaccagattcaccgctcctgcacagtcaacatcatgtttggaaccccgcaagagcatcgcaacatgccccaagcagatgccatggtgctggtggccagaaattatgagcgttacaagaatgagtgccgggagaaggaacgtgaggagattgccagacaggcagccaagatggccgatgaagccatcctgcaggaaagagagagaggaggccctgaggagggagtgcgtgggggccaccctccagccatccagagcctcatcaacctgctggcagacaacaggtacctcactgctgaagagactgacaagatcatcaatctccccagtcccctcatcccctggcctcctcccacttacttgttctaaatagagctgtttggaggatgttctctgcgctcccaggccggcatcgagtgtcatcaatttctaccacctgctctctcttctgcccaaggctgtgttgcttattccttacaaagtttatactgcatttggggctgtatctttttttgttttttgttttgtagaaaataaatatctccgggggcagtacaggtgtctgggcttgtatttgatggggtttctccggtccctgtttctactggatttggagccaggcccagctagccaagtttggaatggcatttgtcatgtcagtagccaccacctttgttcattgtgaacctaccaaggctttccagcttcatacacattgaccagagctcaagctcctgcctgcaactcctgcctagagttgaagaaaagcaaactggccttggcaggcacagtgtcatcataccctcaccccatatgtttggggtctgcttgaggattcataaatcagccactctggattgttgaggaatggccatggcagccacagaaaaaagaatttttctctctgagccaaggttgttttttgtttttttctcttttcttttttgttttcatttcattggaagatctccaatggactgaacagctccagtcagcagcagttaccacaaactgtgaatctgggccccaccactcttccctgttaaccagttctgtcagcatccccctctccagcagcacttccatgaagttggttctgagactctggccgtgaacacccgtttcttcagtgatttgttttgggcttttggctcaaaaccccaggctcttgtttttgtctagactcttattctgtttcctgagcagcaggaggtagggaccactttgatgtcagacttctggtagctggacatgttctcgagatgggtggctgttcgcgacttttgtaccagagtgaaattgttagaaggagggtttctggctgtggttctaaatggagccccaggaagctgccctctccccagggtttgtgctcagtagagccctgtggatcacagtcttgaggtcctctagcaggggtgagggagagcagcgacttcagctgagtccctgccagtggttaagcaaacaatggtttcaaaattcaaggtccccaaatggcagcattttatgttctgacctgtttgtgttatatagtggttttttttttcctctttggaactcttgtgttgttaataaaatgaaatgattactttttaattaaaatgaaaaagtaaaagctttgttcatcttt

SEQ ID NO: 425781 - DNA, 2573 bp, Homo sapiens
gggagtggagagagaatggggaggtatctggttcaaagtaccccccaagggcaggaggctagcagccaaaggaagaacaacaatcactgagtcacatcaatcatacagtacacagacgataacatcaactacctgcgagagcggaaggagcggctgatgaggagcagcaccgactctctgcctggtgagctacgtggcagggccgaggtgaagttctgactctgcatttctctaatccccaggctctgttgggagggtgtcaggcccagggctctttggagtgggtaagggaactaagtccatcccttgggttctcccgtgggccacccatgctgatataatgttaataataactttatatttgggtactgaatgctgatccctatagttaatgtggtggattgactagtattgctggctccgtggtagccaggatggatgcccttttgttttttagcagttctctaggggaactagcctattgttttctgtaaacagcacatatcatgaagcggcctctttgggaaattgatgttatcgtctgtgtactgtatgattgatgtgactcagtgattgttgttcttcctttggctgctaggcctcctgcccttggggggtactttgaaccagatacctccctcttctgtcttccaggcccgatttcccgccaaccactcggggcgacctcgggtgcctcgctgaagacacagccaagctcccaaccgctccagagcggccaagtgctcccctctgctacacccactccatctgcaccccccacctcccagcaagagcttcaggccaaaatcctcagcctcttcaatagtggcacagtgacggccaatagcagctctgcatccccctcggttgctgccggaaacaccccaaaccagaatttttccacagcagcaaacagccagcctcaacaaagatcacaggcttctggcaatcagcctccaagcattttgggacagggaggatctgctcagaacatgggccccagacctggggctccttcccaagggctttttggccagccttccagtcgcctggcacctgctagcaacatgactagccagaggcctgtgtcttccacaggtatcaactttgacaatccaagtgtacagaaggctctggataccctgatccagagtggccctgctctctcccacctggttagccagaccacagcacagatggggcagccacaggcccccatgggatcttaccagaggcattactgaagctaaatctttcaactctccccagtcccctcatcccctggcctcctcccacttacttgttctaaatagagctgtttggaggatgttctctgcgctcccaggccggcatcgagtgtcatcaatttctaccacctgctctctcttctgcccaaggctgtgttgcttattccttacaaagtttatactgcatttggggctgtatctttttttgttttttgttttgtagaaaataaatatctccgggggcagtacaggtgtctgggcttgtatttgatggggtttctccggtccctgtttctactggatttggagccaggcccagctagccaagtttggaatggcatttgtcatgtcagtagccaccacctttgttcattgtgaacctaccaaggctttccagcttcatacacattgaccagagctcaagctcctgcctgcaactcctgcctagagttgaagaaaagcaaactggccttggcaggcacagtgtcatcataccctcaccccatatgtttggggtctgcttgaggattcataaatcagccactctggattgttgaggaatggccatggcagccacagaaaaaagaatttttctctctgagccaaggttgttttttgtttttttctcttttcttttttgttttcatttcattggaagatctccaatggactgaacagctccagtcagcagcagttaccacaaactgtgaatctgggccccaccactcttccctgttaaccagttctgtcagcatccccctctccagcagcacttccatgaagttggttctgagactctggccgtgaacacccgtttcttcagtgatttgttttgggcttttggctcaaaaccccaggctcttgtttttgtctagactcttattctgtttcctgagcagcaggaggtagggaccactttgatgtcagacttctggtagctggacatgttctcgagatgggtggctgttcgcgacttttgtaccagagtgaaattgttagaaggagggtttctggctgtggttctaaatggagccccaggaagctgccctctccccagggtttgtgctcagtagagccctgtggatcacagtcttgaggtcctctagcaggggtgagggagagcagcgacttcagctgagtccctgccagtggttaagcaaacaatggtttcaaaattcaaggtccccaaatggcagcattttatgttctgacctgtttgtgttatatagtggttttttttttcctctttggaactcttgtgttgttaataaaatgaaatgattactttttaattaaaatgaaaaagtaaaagctttgttcatcttt

SEQ ID NO: 425782 - DNA, 1040 bp, Homo sapiens
cgccggtcggttggtggcgcctttgtcctacggcgggcaggtgggccgacgcggaggcggcagcggcgggcctgaggcgaaggagcggccgggagcccgccgcgctggtagcgatattaataaggcagcggaaagaagaaatatgaatacggctccatcaagacccagccccacacgaagggatccatatggctttggagacagtcgagattcaaggcgtgatcgatccccaattcgaggaagtccaaggagagagcccagggatggcagaaatggccgggatgcccgggacagcagagacattcgagacccccgagacttgcgggaccacagacatagtagagatttgcgggatcacagagacagcaggagtgtgcgcgacgttcgggacgtgagggatcttagagactttcgtgatctaagagactctagggattttcgagatcagcgagaccccatgtacgacagatacagagacatgagagactcccgagatcctatgtacaggagagaaggctcttatgaccgatacctacgaatggatgactattgcaggagaaaggatgactcttattttgaccgttacagagatagctttgatggacggggccctccaggcccagaaagtcagtctcgtgcaaaaggtaaagtagctgaaacagtctattcctattattgatagaacactttacaaaagagagaggaaactaataaccagtacccccatctgaaaaagggctagtgccttggccaagcagtgtataaaaagaagaaatataagtagcttattagtgggtaaagagcatttggcttgaaaatgatttttaagatgcaaattagtaccatcatctggtttagtcatccaacaagaagaaataaatatgaaattccagcaataagaaatgaacaaaatgctggtcactgtggccaccacctgtaatcctagcactttggaaggccaaggccggcagatcacttgagcccaggagttcgagaccagcttaagcaacatgataaaaccccatctctacaaaaaaaaa

SEQ ID NO: 425783 - DNA, 271 bp, Homo sapiens
gcagcgtgttaaagcattgacgtaattagtttaagacaaattacgtgttaactagaaaacgaagggacatttcttaccaagccgtgacaatgtactaccttaactcaataataaaaattgcccaagtgacagtgtgtctctgctgaatggcttttcttacaccatctggttgtcattgtagtttttgttgttgttgctttcatttgaaatgtgctgatgatcttgtttttattccgtagcattgaacagatgggttgattattcttttcag

SEQ ID NO: 425784 - DNA, 165 bp, Homo sapiens
tctagggattttcgagatcagcgagaccccatgtacgacagatacagagacatgagagactcccgagatcctatgtacaggtacatacgtagttactctgcttgttttttcctgagttctttttatgtatgttctgctaaactaattgaaagctctgtaagagca

SEQ ID NO: 425785 - DNA, 633 bp, Homo sapiens
cccggcgattggtgtctctggccgctgcgctccaccccagcccgccatggcgtcaggcgccgcggccccggggaggtggctcccactttaagaagtgaagttttgcgcccctccccctccctgcccacctcctgcagcctcctgcgccccgccgagctggcggatggagctgcgcagcgggagcgtgggcagccaggcggtggcgcggaggatggatggggacagccgagatggcggcggcggcaaggacgccaccgggtcggaggactacgagaacctgccgactagcgcctccgtgtccacccacatgacagcaggagcgatggccgggatcctggagcactcggtcatgtacccggtggactcggtgaaggtaatgtggactgtggagctctgtgctggtcactttcaaccctgaacctgatgctacttattttgcagttctaagtgcaaagtcggcctggtggatgcttcccattataatattaaatttgcttcttcgtgaggtcacacctcacatccccagtgtcactttaataactagtgttttttacatggtgggccatgacccattagtggactctgcatttaaaaataaataaataaataaaagaagttattagtgagagtgta

SEQ ID NO: 425786 - DNA, 981 bp, Homo sapiens
cccggcgattggtgtctctggccgctgcgctccaccccagcccgccatggcgtcaggcgccgcggccccggggaggtggctcccactttaagaagtgaagttttgcgcccctccccctccctgcccacctcctgcagcctcctgcgccccgccgagctggcggatggagctgcgcagcgggagcgtgggcagccaggcggtggcgcggaggatggatggggacagccgagatggcggcggcggcaaggacgccaccgggtcggaggactacgagaacctgccgactagcgcctccgtgtccacccacatgacagcaggagcgatggccgggatcctggagcactcggtcatgtacccggtggactcggtgaagacacgaatgcagagtttgagtccagatcccaaagcccagtacacaagtatctacggagccctcaagaaaatcatgcggaccgaaggcttctggaggcccttgcgaggcgtcaacgtcatgatcatgggtgcagggccggcccatgccatgtattttgcctgctatgaaaacatgaaaaggactttaaatgacgttttccaccaccaaggaaacagccacctagccaacggtattttgaaagcgtttgtctggagttagaaagttctcttcttcaacacgtccctccccagggtgttcctccctgtgacccagccgcctcgacttcggcccgcttgctcacgaataaagaactcagagttgtgtgtgcaatgcacacccagacacacgcacgcacacacacgcgcgcgcacacacatgcttttttctgttcccctccgctttctgaagcctggggagaaatcagtgacagaggtgttttggttttattgttatgtgggttttcttttgtattttttttgtttgttttgtttttaaacattcaaaagcaattaatgatcagacataggagaaaccctgaatagaaacaaaacttttgaatgctggattca

SEQ ID NO: 425787 - DNA, 495 bp, Homo sapiens
tcagtccctctccacatttttaacccatgcctcgtttctctgaacacacaacacccatcgtcctcttttatgttacttgaaatatcaaaagaattattacagctgaaaacaaatctatgtaaatcggatcttgaaagagagaaagctttctccagttttgaaaggcgccatttttaactttgatcttgtaatgacaaataagaatgttgaatcggctggcttttttctatcctaggtaatgtggactgtggagctctgtgctggtcactttcaaccctgaacctgatgctacttattttgcagttctaagtgcaaagtcggcctggtggatgcttcccattataatattaaatttgcttcttcgtgaggtcacacctcacatccccagtgtcactttaataactagtgttttttacatggtgggccatgacccattagtggactctgcatttaaaaataaataaataaataaaagaagttattagtgagagtgta

SEQ ID NO: 425788 - DNA, 378 bp, Homo sapiens
tgttttgtttttaaacattcaaaagcaattaatgatcagacataggagaaaccctgaatagaaacaaaacttttgaatgctggattcaaaaaaaaaaaaaaagttatctggacagcttctttgagactatttaaaaactggtacaacaggtctctacaacgcacacacacgcgcgcgcacacacatgcttttttctgttcccctccgctttctgaagcctggggagaaatcagtgacagaggtgttttggttttattgttatgtgggttttcttttgtattttttttgtttgttttgtttttaaacattcaaaagcaattaatgatcagacataggagaaaccctgaatagaaacaaaacttttgaatgctggattca

SEQ ID NO: 425789 - DNA, 4499 bp, Homo sapiens
cccggcgattggtgtctctggccgctgcgctccaccccagcccgccatggcgtcaggcgccgcggccccggggaggtggctcccactttaagaagtgaagttttgcgcccctccccctccctgcccacctcctgcagcctcctgcgccccgccgagctggcggatggagctgcgcagcgggagcgtgggcagccaggcggtggcgcggaggatggatggggacagccgagatggcggcggcggcaaggacgccaccgggtcggaggactacgagaacctgccgactagcgcctccgtgtccacccacatgacagcaggagcgatggccgggatcctggagcactcggtcatgtacccggtggactcggtgaagacacgaatgcagagtttgagtccagatcccaaagcccagtacacaagtatctacggagccctcaagaaaatcatgcggaccgaaggcttctggaggcccttgcgaggcgtcaacgtcatgatcatgggtgcagggccggcccatgccatgtattttgcctgctatgaaaacatgaaaaggactttaaatgacgttttccaccaccaaggaaacagccacctagccaacggtattttgaaagcgtttgtctggagttagaaagttctcttcttcaacacgtccctccccagggtgttcctccctgtgacccagccgcctcgacttcggcccgcttgctcacgaataaagaactcagagttgtgtgtgcaatgcacacccagacacacgcacgcacacacacgcgcgcgcacacacatgcttttttctgttcccctccgctttctgaagcctggggagaaatcagtgacagaggtgttttggttttattgttatgtgggttttcttttgtattttttttgtttgttttgtttttaaacattcaaaagcaattaatgatcagacataggagaaaccctgaatagaaacaaaacttttgaatgctggattcaaaaaaaaaaaaaagttatctggacagcttctttgagactatttaaaaactggtacaacaggtctctacaacgccaagatctaactaagctttaaaaggtcaagaagttttatggctgacaaaggactcgcgcaacgcagaaggcctttcccaccttaagcttccggggatctgggaattttacccccattctcttctgtttgtctgagtctcatctctctgcaagcaagggctgaaatcattttgtttggttgttttgagggagagaggcggggtgggggggtgcaaatctgccagcagctcttacgtaaggcatgttttattggggagggctgagcttttattttctcctctccagtggggttggcttttattgtttcttgtttgggtttggaatggaaatatggatagcagcataaagtacttttattttgacaaaattcatttttttcaacaatggagacatagatttgacccacaataacttctccccctctctttttactctgctcaaaaagcatctctcctcccattacccaaccttggtcataagtgtgcctggctggtttgcagatatttgttctgctttgtaaaaattggccattagtgcatttattgagatgatctctaaagagctatgccctgacctacccctgattctatgacattggggcccttcttttgctgaaactgccttacgtaatggttttactccttgaaagagatttgacggaatccattttatgccaagtgctgccctgcactgtttctgcaatatgtggtgtatgctgtggtgatcttgctgggaatgattataagtgtgtgtgtgatgggggagtgggtattacatgcattgctgaagagtcatcctggtgttcctcattcctcccaccttcccgtggtcattttaattacggggcagtgtcaccgcaaagggaggaaactcaaagccgaaagcaaaattccaggcctgattctggcttttgaggttcctggttcttgaagccaggcctgacccgactctcagatggggtcagtcccgtcgctttgcagactgaccctggaaatctacaaaatgcagattttcctgatttcctcttctcttgcccagtttttttttttttttttttttttttttttaaagcctggattgtaaccagattttcttttttcccccttctcagctgtagatatgatatctcctttcagggccccagcttaagggcaaagtgagttaatgtgtagacaaaggcgagggacaagagagagttaacatctagacagtggaaaaagccatggtgtgtggtttctgggaaccaccaacacttgcaggtttagctttttcccagggttgactacaagaaagaaaaccatgtttttgcaagattaaaatgtggttgagtgtgcctaaattaaccatccccatttttatcatatttccaccatcacttcagggttttaagagtcagtgctcacctgggcggagctgggtagtacattttgcttcttagaaagctaagtcctgggttccgtctgattttaggttccaggaacttcctgagaacacccgatcgcagagggtaattttctggagtttgttttgcagggatagctgggagtatggccaccctgctccacgatgcggtaatgaatccagcagaagtggtgaagcagcgcttgcagatgtacaactcgcagcaccggtcagcaatcagctgcatccggacggtgtggaggaccgaggggttgggggccttctaccggagctacaccacgcagctgaccatgaacatccccttccagtccatccacttcatcacctatgagttcctgcaggagcaggtcaacccccaccggacctacaacccgcagtcccacatcatctcaggcgggctggccggggccctcgccgcggccgccacgacccccctggacgtctgtaagacccttctgaacactcaggagaacgtggccctctcgctggccaacatcagcggccggctgtcgggtatggccaatgccttccggacggtgtaccagctcaacggcctggccggctacttcaaaggcatccaggcgcgtgtcatctaccagatgccctccaccgccatttcttggtctgtctatgagttcttcaagtactttctcaccaagcgccagctggaaaatcgagctccatactaaaggaagggatcatagaatcttttcttaaagtcattctctgcctgcatccagccccttgccctctcctcacacgtagatcatttttttttttgcagggtgctgcctatgggccctctgctccccaatgccttagagagaggaggggacggcacggccgctcaccggaaggctgtgtgcggggacatccgaggtggtggtggacaggaaggacttgggaaggggagcgagaaattgctttttctcttcctccctgggcagaatgtagcttttctgcttcactgtggcagcctcctccctggatccttagatcccagaggagggaagaaaatttgcagtgactgaaaacagtaaaaaaaaaaaaaaaaaaaaaaaaaaaaaaaaatttatgtatataaaagttgcattacacagtacaaaatagatggataatgtttatcctttatttttctatgtagaagtttttgaatttgtgtgtgtgcttgtgcgtgtctacacctagtattacggctgggactctccagctgtttttgttgttgttatgtttttaagagggttgaattcttccatcaggtgaacgaaaaaggcaacaaagtaataaatcagtgaatgtggccggcagctgtgtttagcccctccagatggaagtttcacttgaatgtaaaataataaagtttatattttgaatttctcttttcatgggggaaaaaaggtacgttaaaaaaatcaaaataatgatatgtcacttgcagctacctttttttttcttttaaattcaatcagccaccttcatgtgcctttttcctttgtctttccccaaaattccaggaccagagatctggccctggcctattttctcttgctgtgtacacacacgcacacatgctgggtggcaggatctcgcccgctggagggtggtggagcccagtagaattggggtgactgggcataaacctgctgagactgcttccttccctggttgtgagtgatgtgaatgcctgccttccccggtcagcacttagaagcccttgataggcagcatttggcgacttgtggggcaggtgtttgggataaatcctaccttcatcctaggacttatttctgcatcagccttttaactcaggcacttcaggtaacgtgatctatgtgtgttttgactgaatctcatctcctgtgtttccctgtgcagtctagggaagcatgtctccagtctttgtccctgtcttgtcccaaccattaattctcatgtcacagcttctcactgcatgtgacaagagccaggcctatctgctagggccctgcggctgaggtctgacctggaccctcatgcccgagtcg

SEQ ID NO: 425790 - DNA, 4481 bp, Homo sapiens
cccggcgattggtgtctctggccgctgcgctccaccccagcccgccatggcgtcaggcgccgcggccccggggaggtggctcccactttaagaagtgaagttttgcgcccctccccctccctgcccacctcctgcagcctcctgcgccccgccgagctggcggatggagctgcgcagcgggagcgtgggcagccaggcggtggcgcggaggatggatggggacagccgagatggcggcggcggcaaggacgccaccgggtcggaggactacgagaacctgccgactagcgcctccgtgtccacccacatgacagcaggagcgatggccgggatcctggagcactcggtcatgtacccggtggactcggtgaagacacgaatgcagagtttgagtccagatcccaaagcccagtacacaagtatctacggagccctcaagaaaatcatgcggaccgaaggcttctggaggcccttgcgaggcgtcaacgtcatgatcatgggtgcagggccggcccatgccatgtattttgcctgctatgaaaacatgaaaaggactttaaatgacgttttccaccaccaaggaaacagccacctagccaacggtattttgaaagcgtttgtctggagttagaaagttctcttcttcaacacgtccctccccagggtgttcctccctgtgacccagccgcctcgacttcggcccgcttgctcacgaataaagaactcagagttgtgtgtgcaatgcacacccagacacacgcacgcacacacacgcgcgcgcacacacatgcttttttctgttcccctccgctttctgaagcctggggagaaatcagtgacagaggtgttttggttttattgttatgtgggttttcttttgtattttttttgtttgttttgtttttaaacattcaaaagcaattaatgatcagacataggagaaaccctgaatagaaacaaaacttttgaatgctggattcaaaaaaaaaaaaaagttatctggacagcttctttgagactatttaaaaactggtacaacaggtctctacaacgccaagatctaactaagctttaaaaggtcaagaagttttatggctgacaaaggactcgcgcaacgcagaaggcctttcccaccttaagcttccggggatctgggaattttacccccattctcttctgtttgtctgagtctcatctctctgcaagcaagggctgaaatcattttgtttggttgttttgagggagagaggcggggtgggggggtgcaaatctgccagcagctcttacgtaaggcatgttttattggggagggctgagcttttattttctcctctccagtggggttggcttttattgtttcttgtttgggtttggaatggaaatatggatagcagcataaagtacttttattttgacaaaattcatttttttcaacaatggagacatagatttgacccacaataacttctccccctctctttttactctgctcaaaaagcatctctcctcccattacccaaccttggtcataagtgtgcctggctggtttgcagatatttgttctgctttgtaaaaattggccattagtgcatttattgagatgatctctaaagagctatgccctgacctacccctgattctatgacattggggcccttcttttgctgaaactgccttacgtaatggttttactccttgaaagagatttgacggaatccattttatgccaagtgctgccctgcactgtttctgcaatatgtggtgtatgctgtggtgatcttgctgggaatgattataagtgtgtgtgtgatgggggagtgggtattacatgcattgctgaagagtcatcctggtgttcctcattcctcccaccttcccgtggtcattttaattacggggcagtgtcaccgcaaagggaggaaactcaaagccgaaagcaaaattccaggcctgattctggcttttgaggttcctggttcttgaagccaggcctgacccgactctcagatggggtcagtcccgtcgctttgcagactgaccctggaaatctacaaaatgcagattttcctgatttcctcttctcttgcccagtttttttttttttttttttttttttttttaaagcctggattgtaaccagattttcttttttcccccttctcagctgtagatatgatatctcctttcagggccccagcttaagggcaaagtgagttaatgtgtagacaaaggcgagggacaagagagagttaacatctagacagtggaaaaagccatggtgtgtggtttctgggaaccaccaacacttgcaggtttagctttttcccagggttgactacaagaaagaaaaccatgtttttgcaagattaaaatgtggttgagtgtgcctaaattaaccatccccatttttatcatatttccaccatcacttcagggttttaagagtcagtgctcacctgggcggagctgggtagtacattttgcttcttagaaagctaagtcctgggttccgtctgattttaggttccaggaacttcctgagaacacccgatcgcagagggtaattttctggagtttgttttgcagggatagctgggagtatggccaccctgctccacgatgcggtaatgaatccagcagaagtggtgaagcagcgcttgcagatgtacaactcgcagcaccggtcagcaatcagctgcatccggacggtgtggaggaccgaggggttgggggccttctaccggagctacaccacgcagctgaccatgaacatccccttccagtccatccacttcatcacctatgagttcctgcaggagcaggtcaacccccaccggacctacaacccgcagtcccacatcatctcaggcgggctggccggggccctcgccgcggccgccacgacccccctggacgtctgtaagacccttctgaacactcaggagaacgtggccctctcgctggccaacatcagcggccggctgtcgggtatggccaatgccttccggacggtgtaccagctcaacggcctggccggctacttcaaaggcatccaggcgcgtgtcatctaccagatgccctccaccgccatttcttggtctgtctatgagttcttcaagtactttctcaccaagcgccagctggaaaatcgagctccatactaaaggaagggatcatagaatcttttcttaaagtcattctctgcctgcatccagccccttgccctctcctcacacgtagatcatttttttttttgcagggtgctgcctatgggccctctgctccccaatgccttagagagaggaggggacggcacggccgctcaccggaaggctgtgtgcggggacatccgaggtggtggtggacaggaaggacttgggaaggggagcgagaaattgctttttctcttcctccctgggcagaatgtagcttttctgcttcactgtggcagcctcctccctggatccttagatcccagaggagggaagaaaatttgcagtgactgaaaacagtaaaaaaaaaaaaaaatttatgtatataaaagttgcattacacagtacaaaatagatggataatgtttatcctttatttttctatgtagaagtttttgaatttgtgtgtgtgcttgtgcgtgtctacacctagtattacggctgggactctccagctgtttttgttgttgttatgtttttaagagggttgaattcttccatcaggtgaacgaaaaaggcaacaaagtaataaatcagtgaatgtggccggcagctgtgtttagcccctccagatggaagtttcacttgaatgtaaaataataaagtttatattttgaatttctcttttcatgggggaaaaaaggtacgttaaaaaaatcaaaataatgatatgtcacttgcagctacctttttttttcttttaaattcaatcagccaccttcatgtgcctttttcctttgtctttccccaaaattccaggaccagagatctggccctggcctattttctcttgctgtgtacacacacgcacacatgctgggtggcaggatctcgcccgctggagggtggtggagcccagtagaattggggtgactgggcataaacctgctgagactgcttccttccctggttgtgagtgatgtgaatgcctgccttccccggtcagcacttagaagcccttgataggcagcatttggcgacttgtggggcaggtgtttgggataaatcctaccttcatcctaggacttatttctgcatcagccttttaactcaggcacttcaggtaacgtgatctatgtgtgttttgactgaatctcatctcctgtgtttccctgtgcagtctagggaagcatgtctccagtctttgtccctgtcttgtcccaaccattaattctcatgtcacagcttctcactgcatgtgacaagagccaggcctatctgctagggccctgcggctgaggtctgacctggaccctcatgcccgagtcg

SEQ ID NO: 425791 - DNA, 4337 bp, Homo sapiens
cttttaaattcaatcagccaccttcatgtgcctttttcctttgtctttccccaaaattccaggaccagagatctggccctggctaattttctcttgctgtgtacacacacgcaacctgccgactagcgcctccgtgtccacccacatgacagcaggagcgatggccgggatcctggagcactcggtcatgtacccggtggactcggtgaagacacgaatgcagagtttgagtccagatcccaaagcccagtacacaagtatctacggagccctcaagaaaatcatgcggaccgaaggcttctggaggcccttgcgaggcgtcaacgtcatgatcatgggtgcagggccggcccatgccatgtattttgcctgctatgaaaacatgaaaaggactttaaatgacgttttccaccaccaaggaaacagccacctagccaacggtattttgaaagcgtttgtctggagttagaaagttctcttcttcaacacgtccctccccagggtgttcctccctgtgacccagccgcctcgacttcggcccgcttgctcacgaataaagaactcagagttgtgtgtgcaatgcacacccagacacacgcacgcacacacacgcgcgcgcacacacatgcttttttctgttcccctccgctttctgaagcctggggagaaatcagtgacagaggtgttttggttttattgttatgtgggttttcttttgtattttttttgtttgttttgtttttaaacattcaaaagcaattaatgatcagacataggagaaaccctgaatagaaacaaaacttttgaatgctggattcaaaaaaaaaaaaaagttatctggacagcttctttgagactatttaaaaactggtacaacaggtctctacaacgccaagatctaactaagctttaaaaggtcaagaagttttatggctgacaaaggactcgcgcaacgcagaaggcctttcccaccttaagcttccggggatctgggaattttacccccattctcttctgtttgtctgagtctcatctctctgcaagcaagggctgaaatcattttgtttggttgttttgagggagagaggcggggtgggggggtgcaaatctgccagcagctcttacgtaaggcatgttttattggggagggctgagcttttattttctcctctccagtggggttggcttttattgtttcttgtttgggtttggaatggaaatatggatagcagcataaagtacttttattttgacaaaattcatttttttcaacaatggagacatagatttgacccacaataacttctccccctctctttttactctgctcaaaaagcatctctcctcccattacccaaccttggtcataagtgtgcctggctggtttgcagatatttgttctgctttgtaaaaattggccattagtgcatttattgagatgatctctaaagagctatgccctgacctacccctgattctatgacattggggcccttcttttgctgaaactgccttacgtaatggttttactccttgaaagagatttgacggaatccattttatgccaagtgctgccctgcactgtttctgcaatatgtggtgtatgctgtggtgatcttgctgggaatgattataagtgtgtgtgtgatgggggagtgggtattacatgcattgctgaagagtcatcctggtgttcctcattcctcccaccttcccgtggtcattttaattacggggcagtgtcaccgcaaagggaggaaactcaaagccgaaagcaaaattccaggcctgattctggcttttgaggttcctggttcttgaagccaggcctgacccgactctcagatggggtcagtcccgtcgctttgcagactgaccctggaaatctacaaaatgcagattttcctgatttcctcttctcttgcccagtttttttttttttttttttttttttttttaaagcctggattgtaaccagattttcttttttcccccttctcagctgtagatatgatatctcctttcagggccccagcttaagggcaaagtgagttaatgtgtagacaaaggcgagggacaagagagagttaacatctagacagtggaaaaagccatggtgtgtggtttctgggaaccaccaacacttgcaggtttagctttttcccagggttgactacaagaaagaaaaccatgtttttgcaagattaaaatgtggttgagtgtgcctaaattaaccatccccatttttatcatatttccaccatcacttcagggttttaagagtcagtgctcacctgggcggagctgggtagtacattttgcttcttagaaagctaagtcctgggttccgtctgattttaggttccaggaacttcctgagaacacccgatcgcagagggtaattttctggagtttgttttgcagggatagctgggagtatggccaccctgctccacgatgcggtaatgaatccagcagaagtggtgaagcagcgcttgcagatgtacaactcgcagcaccggtcagcaatcagctgcatccggacggtgtggaggaccgaggggttgggggccttctaccggagctacaccacgcagctgaccatgaacatccccttccagtccatccacttcatcacctatgagttcctgcaggagcaggtcaacccccaccggacctacaacccgcagtcccacatcatctcaggcgggctggccggggccctcgccgcggccgccacgacccccctggacgtctgtaagacccttctgaacactcaggagaacgtggccctctcgctggccaacatcagcggccggctgtcgggtatggccaatgccttccggacggtgtaccagctcaacggcctggccggctacttcaaaggcatccaggcgcgtgtcatctaccagatgccctccaccgccatttcttggtctgtctatgagttcttcaagtactttctcaccaagcgccagctggaaaatcgagctccatactaaaggaagggatcatagaatcttttcttaaagtcattctctgcctgcatccagccccttgccctctcctcacacgtagatcatttttttttttgcagggtgctgcctatgggccctctgctccccaatgccttagagagaggaggggacggcacggccgctcaccggaaggctgtgtgcggggacatccgaggtggtggtggacaggaaggacttgggaaggggagcgagaaattgctttttctcttcctccctgggcagaatgtagcttttctgcttcactgtggcagcctcctccctggatccttagatcccagaggagggaagaaaatttgcagtgactgaaaacagtaaaaaaaaaaaaaaaaaaaaaaaaaaaaaaaaatttatgtatataaaagttgcattacacagtacaaaatagatggataatgtttatcctttatttttctatgtagaagtttttgaatttgtgtgtgtgcttgtgcgtgtctacacctagtattacggctgggactctccagctgtttttgttgttgttatgtttttaagagggttgaattcttccatcaggtgaacgaaaaaggcaacaaagtaataaatcagtgaatgtggccggcagctgtgtttagcccctccagatggaagtttcacttgaatgtaaaataataaagtttatattttgaatttctcttttcatgggggaaaaaaggtacgttaaaaaaatcaaaataatgatatgtcacttgcagctacctttttttttcttttaaattcaatcagccaccttcatgtgcctttttcctttgtctttccccaaaattccaggaccagagatctggccctggcctattttctcttgctgtgtacacacacgcacacatgctgggtggcaggatctcgcccgctggagggtggtggagcccagtagaattggggtgactgggcataaacctgctgagactgcttccttccctggttgtgagtgatgtgaatgcctgccttccccggtcagcacttagaagcccttgataggcagcatttggcgacttgtggggcaggtgtttgggataaatcctaccttcatcctaggacttatttctgcatcagccttttaactcaggcacttcaggtaacgtgatctatgtgtgttttgactgaatctcatctcctgtgtttccctgtgcagtctagggaagcatgtctccagtctttgtccctgtcttgtcccaaccattaattctcatgtcacagcttctcactgcatgtgacaagagccaggcctatctgctagggccctgcggctgaggtctgacctggaccctcatgcccgagtcg

SEQ ID NO: 425792 - DNA, 3226 bp, Homo sapiens
gtttgcctgtcttttgtctttcaaggtgaagctattaaatttgttctcagctaccctccatgtcctagcagatagaggacttggtctgaccttcagggttgtgatggggcaggttgggaggtgggcggggagtctctgtggtctgggtgctgaggttgacccgatgggcaggtgaagaaaatcaccttctccattccccttgatttctttatcgtgtgccgcacgaggcatgctgaagggacacacacctttccccctttttatttacaaagtagagagctgagaaagacagctcatgttctgttttgttttgtacacattatctttctcaagagatgtgatgtccttaagtaaactgacctgccttcatggcttgtcctgtaatgaatgcgttcaagacagtgttttggggacaggaaagaggcattcttaggtaagcggtggtggggggtggggtggggtggagaggaaacccttctaggaagtagttcaatgaaaaacctaaaaatgcccaaataaacattcgcttacatattatatatcttgggcttctttttatgacagttcattcagggacccagtcagtaaacaggtagttaacttcgtgtaaccaagcaagggttttgtttatcttttttaaagtagaaaaaagtgaggctcaaactctctctttctccttgtcataactattggtttacagtctttatttgtttaaaagtaaagcacattgtatgtatttatttggcaatacatgaggccattaaaaccctgagcctaaggtaccacagttagtctcatttgcctcttgtcctgtgaactccacttagaatgtcattgaacttgggcagacataattctagtgtctgttccaaacgcactgtgtcacagaagctagaattaccattagaggcacaaacccctgagaatacacaagggggcacgcttccagtagatgtgttggggaaggaggagggcagaggggacaggggacaggattcagctttgtggtgggtcctgagggttcctaccaggggtagccaggatctgggaaacagatcagcgactctagtctgaagtggctgcctggttcgggggctgccttcagcaagattcaggcaggagagacggaaatagccaccttccaggcgtgagtcctggagataaaaatggattttaacctaggactgccgggagctggccctccgcggctgctcagactagggctgtgtgtgctggctctcgcctgtttccggtgtctaactggcttgtttctctttatggcttggcttcattccgacctggggtggggccacatccaacccactgcccactggctgtccgtctggcctgccccgcggttccaaccacagtggtgaagcagcgcttgcagatgtacaactcgcagcaccggtcagcaatcagctgcatccggacggtgtggaggaccgaggggttgggggccttctaccggagctacaccacgcagctgaccatgaacatccccttccagtccatccacttcatcacctatgagttcctgcaggagcaggtcaacccccaccggacctacaacccgcagtcccacatcatctcaggcgggctggccggggccctcgccgcggccgccacgacccccctggacgtctgtaagacccttctgaacactcaggagaacgtggccctctcgctggccaacatcagcggccggctgtcgggtatggccaatgccttccggacggtgtaccagctcaacggcctggccggctacttcaaaggcatccaggcgcgtgtcatctaccagatgccctccaccgccatttcttggtctgtctatgagttcttcaagtactttctcaccaagcgccagctggaaaatcgagctccatactaaaggaagggatcatagaatcttttcttaaagtcattctctgcctgcatccagccccttgccctctcctcacacgtagatcatttttttttttgcagggtgctgcctatgggccctctgctccccaatgccttagagagaggaggggacggcacggccgctcaccggaaggctgtgtgcggggacatccgaggtggtggtggacaggaaggacttgggaaggggagcgagaaattgctttttctcttcctccctgggcagaatgtagcttttctgcttcactgtggcagcctcctccctggatccttagatcccagaggagggaagaaaatttgcagtgactgaaaacagtaaaaaaaaaaaaaaaaaaaaaaaaaaaaaaaaatttatgtatataaaagttgcattacacagtacaaaatagatggataatgtttatcctttatttttctatgtagaagtttttgaatttgtgtgtgtgcttgtgcgtgtctacacctagtattacggctgggactctccagctgtttttgttgttgttatgtttttaagagggttgaattcttccatcaggtgaacgaaaaaggcaacaaagtaataaatcagtgaatgtggccggcagctgtgtttagcccctccagatggaagtttcacttgaatgtaaaataataaagtttatattttgaatttctcttttcatgggggaaaaaaggtacgttaaaaaaatcaaaataatgatatgtcacttgcagctacctttttttttcttttaaattcaatcagccaccttcatgtgcctttttcctttgtctttccccaaaattccaggaccagagatctggccctggcctattttctcttgctgtgtacacacacgcacacatgctgggtggcaggatctcgcccgctggagggtggtggagcccagtagaattggggtgactgggcataaacctgctgagactgcttccttccctggttgtgagtgatgtgaatgcctgccttccccggtcagcacttagaagcccttgataggcagcatttggcgacttgtggggcaggtgtttgggataaatcctaccttcatcctaggacttatttctgcatcagccttttaactcaggcacttcaggtaacgtgatctatgtgtgttttgactgaatctcatctcctgtgtttccctgtgcagtctagggaagcatgtctccagtctttgtccctgtcttgtcccaaccattaattctcatgtcacagcttctcactgcatgtgacaagagccaggcctatctgctagggccctgcggctgaggtctgacctggaccctcatgcccgagtcg

SEQ ID NO: 425793 - DNA, 4450 bp, Homo sapiens
cccggcgattggtgtctctggccgctgcgctccaccccagcccgccatggcgtcaggcgccgcggccccggggaggtggctcccactttaagaagtgaagttttgcgcccctccccctccctgcccacctcctgcagcctcctgcgccccgccgagctggcggatggagctgcgcagcgggagcgtgggcagccaggcggtggcgcggaggatggatggggacagccgagatggcggcggcggcaaggacgccaccgggtcggaggactacgagaacctgccgactagcgcctccgtgtccacccacatgacagcaggagcgatggccgggatcctggagcactcggtcatgtacccggtggactcggtgaagacacgaatgcagagtttgagtccagatcccaaagcccagtacacaagtatctacggagccctcaagaaaatcatgcggaccgaaggcttctggaggcccttgcgaggcgtcaacgtcatgatcatgggtgcagggccggcccatgccatgtattttgcctgctatgaaaacatgaaaaggactttaaatgacgttttccaccaccaaggaaacagccacctagccaacggtattttgaaagcgtttgtctggagttagaaagttctcttcttcaacacgtccctccccagggtgttcctccctgtgacccagccgcctcgacttcggcccgcttgctcacgaataaagaactcagagttgtgtgtgcaatgcacacccagacacacgcacgcacacacacgcgcgcgcacacacatgcttttttctgttcccctccgctttctgaagcctggggagaaatcagtgacagaggtgttttggttttattgttatgtgggttttcttttgtattttttttgtttgttttgtttttaaacattcaaaagcaattaatgatcagacataggagaaaccctgaatagaaacaaaacttttgaatgctggattcaaaaaaaaaaaaaagttatctggacagcttctttgagactatttaaaaactggtacaacaggtctctacaacgccaagatctaactaagctttaaaaggtcaagaagttttatggctgacaaaggactcgcgcaacgcagaaggcctttcccaccttaagcttccggggatctgggaattttacccccattctcttctgtttgtctgagtctcatctctctgcaagcaagggctgaaatcattttgtttggttgttttgagggagagaggcggggtgggggggtgcaaatctgccagcagctcttacgtaaggcatgttttattggggagggctgagcttttattttctcctctccagtggggttggcttttattgtttcttgtttgggtttggaatggaaatatggatagcagcataaagtacttttattttgacaaaattcatttttttcaacaatggagacatagatttgacccacaataacttctccccctctctttttactctgctcaaaaagcatctctcctcccattacccaaccttggtcataagtgtgcctggctggtttgcagatatttgttctgctttgtaaaaattggccattagtgcatttattgagatgatctctaaagagctatgccctgacctacccctgattctatgacattggggcccttcttttgctgaaactgccttacgtaatggttttactccttgaaagagatttgacggaatccattttatgccaagtgctgccctgcactgtttctgcaatatgtggtgtatgctgtggtgatcttgctgggaatgattataagtgtgtgtgtgatgggggagtgggtattacatgcattgctgaagagtcatcctggtgttcctcattcctcccaccttcccgtggtcattttaattacggggcagtgtcaccgcaaagggaggaaactcaaagccgaaagcaaaattccaggcctgattctggcttttgaggttcctggttcttgaagccaggcctgacccgactctcagatggggtcagtcccgtcgctttgcagactgaccctggaaatctacaaaatgcagattttcctgatttcctcttctcttgcccagtttttttttttttttttttttttttttttaaagcctggattgtaaccagattttcttttttcccccttctcagctgtagatatgatatctcctttcagggccccagcttaagggcaaagtgagttaatgtgtagacaaaggcgagggacaagagagagttaacatctagacagtggaaaaagccatggtgtgtggtttctgggaaccaccaacacttgcaggtttagctttttcccagggttgactacaagaaagaaaaccatgtttttgcaagattaaaatgtggttgagtgtgcctaaattaaccatccccatttttatcatatttccaccatcacttcagggttttaagagtcagtgctcacctgggcggagctgggtagtacattttgcttcttagaaagctaagtcctgggttccgtctgattctggagtttgttttgcagggatagctgggagtatggccaccctgctccacgatgcggtaatgaatccagcagaagtggtgaagcagcgcttgcagatgtacaactcgcagcaccggtcagcaatcagctgcatccggacggtgtggaggaccgaggggttgggggccttctaccggagctacaccacgcagctgaccatgaacatccccttccagtccatccacttcatcacctatgagttcctgcaggagcaggtcaacccccaccggacctacaacccgcagtcccacatcatctcaggcgggctggccggggccctcgccgcggccgccacgacccccctggacgtctgtaagacccttctgaacactcaggagaacgtggccctctcgctggccaacatcagcggccggctgtcgggtatggccaatgccttccggacggtgtaccagctcaacggcctggccggctacttcaaaggcatccaggcgcgtgtcatctaccagatgccctccaccgccatttcttggtctgtctatgagttcttcaagtactttctcaccaagcgccagctggaaaatcgagctccatactaaaggaagggatcatagaatcttttcttaaagtcattctctgcctgcatccagccccttgccctctcctcacacgtagatcatttttttttttgcagggtgctgcctatgggccctctgctccccaatgccttagagagaggaggggacggcacggccgctcaccggaaggctgtgtgcggggacatccgaggtggtggtggacaggaaggacttgggaaggggagcgagaaattgctttttctcttcctccctgggcagaatgtagcttttctgcttcactgtggcagcctcctccctggatccttagatcccagaggagggaagaaaatttgcagtgactgaaaacagtaaaaaaaaaaaaaaaaaaaaaaaaaaaaaaaaatttatgtatataaaagttgcattacacagtacaaaatagatggataatgtttatcctttatttttctatgtagaagtttttgaatttgtgtgtgtgcttgtgcgtgtctacacctagtattacggctgggactctccagctgtttttgttgttgttatgtttttaagagggttgaattcttccatcaggtgaacgaaaaaggcaacaaagtaataaatcagtgaatgtggccggcagctgtgtttagcccctccagatggaagtttcacttgaatgtaaaataataaagtttatattttgaatttctcttttcatgggggaaaaaaggtacgttaaaaaaatcaaaataatgatatgtcacttgcagctacctttttttttcttttaaattcaatcagccaccttcatgtgcctttttcctttgtctttccccaaaattccaggaccagagatctggccctggcctattttctcttgctgtgtacacacacgcacacatgctgggtggcaggatctcgcccgctggagggtggtggagcccagtagaattggggtgactgggcataaacctgctgagactgcttccttccctggttgtgagtgatgtgaatgcctgccttccccggtcagcacttagaagcccttgataggcagcatttggcgacttgtggggcaggtgtttgggataaatcctaccttcatcctaggacttatttctgcatcagccttttaactcaggcacttcaggtaacgtgatctatgtgtgttttgactgaatctcatctcctgtgtttccctgtgcagtctagggaagcatgtctccagtctttgtccctgtcttgtcccaaccattaattctcatgtcacagcttctcactgcatgtgacaagagccaggcctatctgctagggccctgcggctgaggtctgacctggaccctcatgcccgagtcg

SEQ ID NO: 425794 - DNA, 2515 bp, Homo sapiens
cccggcgattggtgtctctggccgctgcgctccaccccagcccgccatggcgtcaggcgccgcggccccggggaggtggctcccactttaagaagtgaagttttgcgcccctccccctccctgcccacctcctgcagcctcctgcgccccgccgagctggcggatggagctgcgcagcgggagcgtgggcagccaggcggtggcgcggaggatggatggggacagccgagatggcggcggcggcaaggacgccaccgggtcggaggactacgagaacctgccgactagcgcctccgtgtccacccacatgacagcaggagcgatggccgggatcctggagcactcggtcatgtacccggtggactcggtgaagacacgaatgcagagtttgagtccagatcccaaagcccagtacacaagtatctacggagccctcaagaaaatcatgcggaccgaaggcttctggaggcccttgcgaggcgtcaacgtcatgatcatgggtgcagggccggcccatgccatgtattttgcctgctatgaaaacatgaaaaggactttaaatgacgttttccaccaccaaggaaacagccacctagccaacgggatagctgggagtatggccaccctgctccacgatgcggtaatgaatccagcagaagtggtgaagcagcgcttgcagatgtacaactcgcagcaccggtcagcaatcagctgcatccggacggtgtggaggaccgaggggttgggggccttctaccggagctacaccacgcagctgaccatgaacatccccttccagtccatccacttcatcacctatgagttcctgcaggagcaggtcaacccccaccggacctacaacccgcagtcccacatcatctcaggcgggctggccggggccctcgccgcggccgccacgacccccctggacgtctgtaagacccttctgaacactcaggagaacgtggccctctcgctggccaacatcagcggccggctgtcgggtatggccaatgccttccggacggtgtaccagctcaacggcctggccggctacttcaaaggcatccaggcgcgtgtcatctaccagatgccctccaccgccatttcttggtctgtctatgagttcttcaagtactttctcaccaagcgccagctggaaaatcgagctccatactaaaggaagggatcatagaatcttttcttaaagtcattctctgcctgcatccagccccttgccctctcctcacacgtagatcatttttttttttgcagggtgctgcctatgggccctctgctccccaatgccttagagagaggaggggacggcacggccgctcaccggaaggctgtgtgcggggacatccgaggtggtggtggacaggaaggacttgggaaggggagcgagaaattgctttttctcttcctccctgggcagaatgtagcttttctgcttcactgtggcagcctcctccctggatccttagatcccagaggagggaagaaaatttgcagtgactgaaaacagtaaaaaaaaaaaaaaaaaaaaaaaaaaaaaaaaatttatgtatataaaagttgcattacacagtacaaaatagatggataatgtttatcctttatttttctatgtagaagtttttgaatttgtgtgtgtgcttgtgcgtgtctacacctagtattacggctgggactctccagctgtttttgttgttgttatgtttttaagagggttgaattcttccatcaggtgaacgaaaaaggcaacaaagtaataaatcagtgaatgtggccggcagctgtgtttagcccctccagatggaagtttcacttgaatgtaaaataataaagtttatattttgaatttctcttttcatgggggaaaaaaggtacgttaaaaaaatcaaaataatgatatgtcacttgcagctacctttttttttcttttaaattcaatcagccaccttcatgtgcctttttcctttgtctttccccaaaattccaggaccagagatctggccctggcctattttctcttgctgtgtacacacacgcacacatgctgggtggcaggatctcgcccgctggagggtggtggagcccagtagaattggggtgactgggcataaacctgctgagactgcttccttccctggttgtgagtgatgtgaatgcctgccttccccggtcagcacttagaagcccttgataggcagcatttggcgacttgtggggcaggtgtttgggataaatcctaccttcatcctaggacttatttctgcatcagccttttaactcaggcacttcaggtaacgtgatctatgtgtgttttgactgaatctcatctcctgtgtttccctgtgcagtctagggaagcatgtctccagtctttgtccctgtcttgtcccaaccattaattctcatgtcacagcttctcactgcatgtgacaagagccaggcctatctgctagggccctgcggctgaggtctgacctggaccctcatgcccgagtcg

SEQ ID NO: 425795 - DNA, 2907 bp, Homo sapiens
gggcaattaaagagatttgaatggggctgtatattcaattttatggaattattgatatttttcttaggtatatttcttaatattgtggcaatgtaaaataatatccttattcttggggagaataagctgaagaatttaagggtggagaggaaacccttctaggaagtagttcaatgaaaaacctaaaaatgcccaaataaacattcgcttacatattatatatcttgggcttctttttatgacagttcattcagggacccagtcagtaaacaggtagttaacttcgtgtaaccaagcaagggttttgtttatcttttttaaagtagaaaaaagtgaggctcaaactctctctttctccttgtcataactattggtttacagtctttatttgtttaaaagtaaagcacattgtatgtatttatttggcaatacatgaggccattaaaaccctgagcctaaggtaccacagttagtctcatttgcctcttgtcctgtgaactccacttagaatgtcattgaacttgggcagacataattctagtgtctgttccaaacgcactgtgtcacagaagctagaattaccattagaggcacaaacccctgagaatacacaagggggcacgcttccagtagatgtgttggggaaggaggagggcagaggggacaggggacaggattcagctttgtggtgggtcctgagggttcctaccaggggtagccaggatctgggaaacagatcagcgactctagtctgaagtggctgcctggttcgggggctgccttcagcaagattcaggcaggagagacggaaatagccaccttccaggcgtgagtcctggagataaaaatggattttaacctaggactgccgggagctggccctccgcggctgctcagactagggctgtgtgtgctggctctcgcctgtttccggtgtctaactggcttgtttctctttatggcttggcttcattccgacctggggtggggccacatccaacccactgcccactggctgtccgtctggcctgccccgcggttccaaccacagtggtgaagcagcgcttgcagatgtacaactcgcagcaccggtcagcaatcagctgcatccggacggtgtggaggaccgaggggttgggggccttctaccggagctacaccacgcagctgaccatgaacatccccttccagtccatccacttcatcacctatgagttcctgcaggagcaggtcaacccccaccggacctacaacccgcagtcccacatcatctcaggcgggctggccggggccctcgccgcggccgccacgacccccctggacgtctgtaagacccttctgaacactcaggagaacgtggccctctcgctggccaacatcagcggccggctgtcgggtatggccaatgccttccggacggtgtaccagctcaacggcctggccggctacttcaaaggcatccaggcgcgtgtcatctaccagatgccctccaccgccatttcttggtctgtctatgagttcttcaagtactttctcaccaagcgccagctggaaaatcgagctccatactaaaggaagggatcatagaatcttttcttaaagtcattctctgcctgcatccagccccttgccctctcctcacacgtagatcatttttttttttgcagggtgctgcctatgggccctctgctccccaatgccttagagagaggaggggacggcacggccgctcaccggaaggctgtgtgcggggacatccgaggtggtggtggacaggaaggacttgggaaggggagcgagaaattgctttttctcttcctccctgggcagaatgtagcttttctgcttcactgtggcagcctcctccctggatccttagatcccagaggagggaagaaaatttgcagtgactgaaaacagtaaaaaaaaaaaaaaaaaaaaaaaaaaaaaaaaatttatgtatataaaagttgcattacacagtacaaaatagatggataatgtttatcctttatttttctatgtagaagtttttgaatttgtgtgtgtgcttgtgcgtgtctacacctagtattacggctgggactctccagctgtttttgttgttgttatgtttttaagagggttgaattcttccatcaggtgaacgaaaaaggcaacaaagtaataaatcagtgaatgtggccggcagctgtgtttagcccctccagatggaagtttcacttgaatgtaaaataataaagtttatattttgaatttctcttttcatgggggaaaaaaggtacgttaaaaaaatcaaaataatgatatgtcacttgcagctacctttttttttcttttaaattcaatcagccaccttcatgtgcctttttcctttgtctttccccaaaattccaggaccagagatctggccctggcctattttctcttgctgtgtacacacacgcacacatgctgggtggcaggatctcgcccgctggagggtggtggagcccagtagaattggggtgactgggcataaacctgctgagactgcttccttccctggttgtgagtgatgtgaatgcctgccttccccggtcagcacttagaagcccttgataggcagcatttggcgacttgtggggcaggtgtttgggataaatcctaccttcatcctaggacttatttctgcatcagccttttaactcaggcacttcaggtaacgtgatctatgtgtgttttgactgaatctcatctcctgtgtttccctgtgcagtctagggaagcatgtctccagtctttgtccctgtcttgtcccaaccattaattctcatgtcacagcttctcactgcatgtgacaagagccaggcctatctgctagggccctgcggctgaggtctgacctggaccctcatgcccgagtcg

SEQ ID NO: 425796 - DNA, 3143 bp, Homo sapiens
cccggcgattggtgtctctggccgctgcgctccaccccagcccgccatggcgtcaggcgccgcggccccggggaggtggctcccactttaagaagtgaagttttgcgcccctccccctccctgcccacctcctgcagcctcctgcgccccgccgagctggcggatggagctgcgcagcgggagcgtgggcagccaggcggtggcgcggaggatggatggggacagccgagatggcggcggcggcaaggacgccaccgggtcggaggactacgagaacctgccgactagcgcctccgtgtccacccacatgacagcaggagcgatggccgggatcctggagcactcggtcatgtacccggtggactcggtgaagacacgaatgcagagtttgagtccagatcccaaagcccagtacacaagtatctacggagccctcaagaaaatcatgcggaccgaaggcttctggaggcccttgcgaggcgtcaacgtcatgatcatgggtgcagggccggcccatgccatgtattttgcctgctatgaaaacatgaaaaggactttaaatgacgttttccaccaccaaggaaacagccacctagccaacggtattttgaaagcgtttgtctggagttagaaagttctcttcttcaacacgtccctccccagggtgttcctccctgtgacccagccgcctcgacttcggcccgcttgctcacgaataaagaactcagagttgtgtgtgcaatgcacacccagacacacgcacgcacacacacgcgcgcgcacacacatgcttttttctgttcccctccgctttctgaagcctggggagaaatcagtgacagaggtgttttggttttattgttatgtgggttttcttttgtattttttttgtttgttttgtttttaaacattcaaaagcaattaatgatcagacataggagaaaccctgaatagaaacaaaacttttgaatgctggattcaaaaaaaaaaaaaagttatctggacagcttctttgagactatttaaaaactggtacaacaggtctctacaacgccaagatctaactaagctttaaaaggtcaagaagttttatggctgacaaaggactcgcgcaacgcagaaggcctttcccaccttaagcttccggggatctgggaattttacccccattctcttctgtttgtctgagtctcatctctctgcaagcaagggctgaaatcattttgtttgggatagctgggagtatggccaccctgctccacgatgcggtaatgaatccagcagaagtggtgaagcagcgcttgcagatgtacaactcgcagcaccggtcagcaatcagctgcatccggacggtgtggaggaccgaggggttgggggccttctaccggagctacaccacgcagctgaccatgaacatccccttccagtccatccacttcatcacctatgagttcctgcaggagcaggtcaacccccaccggacctacaacccgcagtcccacatcatctcaggcgggctggccggggccctcgccgcggccgccacgacccccctggacgtctgtaagacccttctgaacactcaggagaacgtggccctctcgctggccaacatcagcggccggctgtcgggtatggccaatgccttccggacggtgtaccagctcaacggcctggccggctacttcaaaggcatccaggcgcgtgtcatctaccagatgccctccaccgccatttcttggtctgtctatgagttcttcaagtactttctcaccaagcgccagctggaaaatcgagctccatactaaaggaagggatcatagaatcttttcttaaagtcattctctgcctgcatccagccccttgccctctcctcacacgtagatcatttttttttttgcagggtgctgcctatgggccctctgctccccaatgccttagagagaggaggggacggcacggccgctcaccggaaggctgtgtgcggggacatccgaggtggtggtggacaggaaggacttgggaaggggagcgagaaattgctttttctcttcctccctgggcagaatgtagcttttctgcttcactgtggcagcctcctccctggatccttagatcccagaggagggaagaaaatttgcagtgactgaaaacagtaaaaaaaaaaaaaaaaaaaaaaaaaaaaaaaaatttatgtatataaaagttgcattacacagtacaaaatagatggataatgtttatcctttatttttctatgtagaagtttttgaatttgtgtgtgtgcttgtgcgtgtctacacctagtattacggctgggactctccagctgtttttgttgttgttatgtttttaagagggttgaattcttccatcaggtgaacgaaaaaggcaacaaagtaataaatcagtgaatgtggccggcagctgtgtttagcccctccagatggaagtttcacttgaatgtaaaataataaagtttatattttgaatttctcttttcatgggggaaaaaaggtacgttaaaaaaatcaaaataatgatatgtcacttgcagctacctttttttttcttttaaattcaatcagccaccttcatgtgcctttttcctttgtctttccccaaaattccaggaccagagatctggccctggcctattttctcttgctgtgtacacacacgcacacatgctgggtggcaggatctcgcccgctggagggtggtggagcccagtagaattggggtgactgggcataaacctgctgagactgcttccttccctggttgtgagtgatgtgaatgcctgccttccccggtcagcacttagaagcccttgataggcagcatttggcgacttgtggggcaggtgtttgggataaatcctaccttcatcctaggacttatttctgcatcagccttttaactcaggcacttcaggtaacgtgatctatgtgtgttttgactgaatctcatctcctgtgtttccctgtgcagtctagggaagcatgtctccagtctttgtccctgtcttgtcccaaccattaattctcatgtcacagcttctcactgcatgtgacaagagccaggcctatctgctagggccctgcggctgaggtctgacctggaccctcatgcccgagtcg

SEQ ID NO: 425797 - DNA, 3118 bp, Homo sapiens
cccggcgattggtgtctctggccgctgcgctccaccccagcccgccatggcgtcaggcgccgcggccccggggaggtggctcccactttaagaagtgaagttttgcgcccctccccctccctgcccacctcctgcagcctcctgcgccccgccgagctggcggatggagctgcgcagcgggagcgtgggcagccaggcggtggcgcggaggatggatggggacagccgagatggcggcggcggcaaggacgccaccgggtcggaggactacgagaacctgccgactagcgcctccgtgtccacccacatgacagcaggagcgatggccgggatcctggagcactcggtcatgtacccggtggactcggtgaagacacgaatgcagagtttgagtccagatcccaaagcccagtacacaagtatctacggagccctcaagaaaatcatgcggaccgaaggcttctggaggcccttgcgaggcgtcaacgtcatgatcatgggtgcagggccggcccatgccatgtattttgcctgctatgaaaacatgaaaaggactttaaatgacgttttccaccaccaaggaaacagccacctagccaacggtattttgaaagcgtttgtctggagttagaaagttctcttcttcaacacgtccctccccagggtgttcctccctgtgacccagccgcctcgacttcggcccgcttgctcacgaataaagaactcagagttgtgtgtgcaatgcacacccagacacacgcacgcacacacacgcgcgcgcacacacatgcttttttctgttcccctccgctttctgaagcctggggagaaatcagtgacagaggtgttttggttttattgttatgtgggttttcttttgtattttttttgtttgttttgtttttaaacattcaaaagcaattaatgatcagacataggagaaaccctgaatagaaacaaaacttttgaatgctggattcaaaaaaaaaaaaaagttatctggacagcttctttgagactatttaaaaactggtacaacaggtctctacaacgccaagatctaactaagctttaaaaggtcaagaagttttatggctgacaaaggactcgcgcaacgcagaaggcctttcccaccttaagcttccggggatctgggaattttacccccattctcttctgtttgtctgagtctcatctctctgcaaggatagctgggagtatggccaccctgctccacgatgcggtaatgaatccagcagaagtggtgaagcagcgcttgcagatgtacaactcgcagcaccggtcagcaatcagctgcatccggacggtgtggaggaccgaggggttgggggccttctaccggagctacaccacgcagctgaccatgaacatccccttccagtccatccacttcatcacctatgagttcctgcaggagcaggtcaacccccaccggacctacaacccgcagtcccacatcatctcaggcgggctggccggggccctcgccgcggccgccacgacccccctggacgtctgtaagacccttctgaacactcaggagaacgtggccctctcgctggccaacatcagcggccggctgtcgggtatggccaatgccttccggacggtgtaccagctcaacggcctggccggctacttcaaaggcatccaggcgcgtgtcatctaccagatgccctccaccgccatttcttggtctgtctatgagttcttcaagtactttctcaccaagcgccagctggaaaatcgagctccatactaaaggaagggatcatagaatcttttcttaaagtcattctctgcctgcatccagccccttgccctctcctcacacgtagatcatttttttttttgcagggtgctgcctatgggccctctgctccccaatgccttagagagaggaggggacggcacggccgctcaccggaaggctgtgtgcggggacatccgaggtggtggtggacaggaaggacttgggaaggggagcgagaaattgctttttctcttcctccctgggcagaatgtagcttttctgcttcactgtggcagcctcctccctggatccttagatcccagaggagggaagaaaatttgcagtgactgaaaacagtaaaaaaaaaaaaaaaaaaaaaaaaaaaaaaaaatttatgtatataaaagttgcattacacagtacaaaatagatggataatgtttatcctttatttttctatgtagaagtttttgaatttgtgtgtgtgcttgtgcgtgtctacacctagtattacggctgggactctccagctgtttttgttgttgttatgtttttaagagggttgaattcttccatcaggtgaacgaaaaaggcaacaaagtaataaatcagtgaatgtggccggcagctgtgtttagcccctccagatggaagtttcacttgaatgtaaaataataaagtttatattttgaatttctcttttcatgggggaaaaaaggtacgttaaaaaaatcaaaataatgatatgtcacttgcagctacctttttttttcttttaaattcaatcagccaccttcatgtgcctttttcctttgtctttccccaaaattccaggaccagagatctggccctggcctattttctcttgctgtgtacacacacgcacacatgctgggtggcaggatctcgcccgctggagggtggtggagcccagtagaattggggtgactgggcataaacctgctgagactgcttccttccctggttgtgagtgatgtgaatgcctgccttccccggtcagcacttagaagcccttgataggcagcatttggcgacttgtggggcaggtgtttgggataaatcctaccttcatcctaggacttatttctgcatcagccttttaactcaggcacttcaggtaacgtgatctatgtgtgttttgactgaatctcatctcctgtgtttccctgtgcagtctagggaagcatgtctccagtctttgtccctgtcttgtcccaaccattaattctcatgtcacagcttctcactgcatgtgacaagagccaggcctatctgctagggccctgcggctgaggtctgacctggaccctcatgcccgagtcg

SEQ ID NO: 425798 - DNA, 2991 bp, Homo sapiens
cccggcgattggtgtctctggccgctgcgctccaccccagcccgccatggcgtcaggcgccgcggccccggggaggtggctcccactttaagaagtgaagttttgcgcccctccccctccctgcccacctcctgcagcctcctgcgccccgccgagctggcggatggagctgcgcagcgggagcgtgggcagccaggcggtggcgcggaggatggatggggacagccgagatggcggcggcggcaaggacgccaccgggtcggaggactacgagaacctgccgactagcgcctccgtgtccacccacatgacagcaggagcgatggccgggatcctggagcactcggtcatgtacccggtggactcggtgaagacacgaatgcagagtttgagtccagatcccaaagcccagtacacaagtatctacggagccctcaagaaaatcatgcggaccgaaggcttctggaggcccttgcgaggcgtcaacgtcatgatcatgggtgcagggccggcccatgccatgtattttgcctgctatgaaaacatgaaaaggactttaaatgacgttttccaccaccaaggaaacagccacctagccaacggtattttgaaagcgtttgtctggagttagaaagttctcttcttcaacacgtccctccccagggtgttcctccctgtgacccagccgcctcgacttcggcccgcttgctcacgaataaagaactcagagttgtgtgtgcaatgcacacccagacacacgcacgcacacacacgcgcgcgcacacacatgcttttttctgttcccctccgctttctgaagcctggggagaaatcagtgacagaggtgttttggttttattgttatgtgggttttcttttgtattttttttgtttgttttgtttttaaacattcaaaagcaattaatgatcagacataggagaaaccctgaatagaaacaaaacttttgaatgctggattcaaaaaaaaaaaaaagttatctggacagcttctttgagactatttaaaaactggtacaacaggtctctacaacgccaagatctaactaagctttaaaagggatagctgggagtatggccaccctgctccacgatgcggtaatgaatccagcagaagtggtgaagcagcgcttgcagatgtacaactcgcagcaccggtcagcaatcagctgcatccggacggtgtggaggaccgaggggttgggggccttctaccggagctacaccacgcagctgaccatgaacatccccttccagtccatccacttcatcacctatgagttcctgcaggagcaggtcaacccccaccggacctacaacccgcagtcccacatcatctcaggcgggctggccggggccctcgccgcggccgccacgacccccctggacgtctgtaagacccttctgaacactcaggagaacgtggccctctcgctggccaacatcagcggccggctgtcgggtatggccaatgccttccggacggtgtaccagctcaacggcctggccggctacttcaaaggcatccaggcgcgtgtcatctaccagatgccctccaccgccatttcttggtctgtctatgagttcttcaagtactttctcaccaagcgccagctggaaaatcgagctccatactaaaggaagggatcatagaatcttttcttaaagtcattctctgcctgcatccagccccttgccctctcctcacacgtagatcatttttttttttgcagggtgctgcctatgggccctctgctccccaatgccttagagagaggaggggacggcacggccgctcaccggaaggctgtgtgcggggacatccgaggtggtggtggacaggaaggacttgggaaggggagcgagaaattgctttttctcttcctccctgggcagaatgtagcttttctgcttcactgtggcagcctcctccctggatccttagatcccagaggagggaagaaaatttgcagtgactgaaaacagtaaaaaaaaaaaaaaaaaaaaaaaaaaaaaaaaatttatgtatataaaagttgcattacacagtacaaaatagatggataatgtttatcctttatttttctatgtagaagtttttgaatttgtgtgtgtgcttgtgcgtgtctacacctagtattacggctgggactctccagctgtttttgttgttgttatgtttttaagagggttgaattcttccatcaggtgaacgaaaaaggcaacaaagtaataaatcagtgaatgtggccggcagctgtgtttagcccctccagatggaagtttcacttgaatgtaaaataataaagtttatattttgaatttctcttttcatgggggaaaaaaggtacgttaaaaaaatcaaaataatgatatgtcacttgcagctacctttttttttcttttaaattcaatcagccaccttcatgtgcctttttcctttgtctttccccaaaattccaggaccagagatctggccctggcctattttctcttgctgtgtacacacacgcacacatgctgggtggcaggatctcgcccgctggagggtggtggagcccagtagaattggggtgactgggcataaacctgctgagactgcttccttccctggttgtgagtgatgtgaatgcctgccttccccggtcagcacttagaagcccttgataggcagcatttggcgacttgtggggcaggtgtttgggataaatcctaccttcatcctaggacttatttctgcatcagccttttaactcaggcacttcaggtaacgtgatctatgtgtgttttgactgaatctcatctcctgtgtttccctgtgcagtctagggaagcatgtctccagtctttgtccctgtcttgtcccaaccattaattctcatgtcacagcttctcactgcatgtgacaagagccaggcctatctgctagggccctgcggctgaggtctgacctggaccctcatgcccgagtcg

SEQ ID NO: 425799 - DNA, 4445 bp, Homo sapiens
cccggcgattggtgtctctggccgctgcgctccaccccagcccgccatggcgtcaggcgccgcggccccggggaggtggctcccactttaagaagtgaagttttgcgcccctccccctccctgcccacctcctgcagcctcctgcgccccgccgagctggcggatggagctgcgcagcgggagcgtgggcagccaggcggtggcgcggaggatggatggggacagccgagatggcggcggcggcaaggacgccaccgggtcggaggactacgagaacctgccgactagcgcctccgtgtccacccacatgacagcaggagcgatggccgggatcctggagcactcggtcatgtacccggtggactcggtgaagacacgaatgcagagtttgagtccagatcccaaagcccagtacacaagtatctacggagccctcaagaaaatcatgcggaccgaaggcttctggaggcccttgcgaggcgtcaacgtcatgatcatgggtgcagggccggcccatgccatgtattttgcctgctatgaaaacatgaaaaggactttaaatgacgttttccaccaccaaggaaacagccacctagccaacggtattttgaaagcgtttgtctggagttagaaagttctcttcttcaacacgtccctccccagggtgttcctccctgtgacccagccgcctcgacttcggcccgcttgctcacgaataaagaactcagagttgtgtgtgcaatgcacacccagacacacgcacgcacacacacgcgcgcgcacacacatgcttttttctgttcccctccgctttctgaagcctggggagaaatcagtgacagaggtgttttggttttattgttatgtgggttttcttttgtattttttttgtttgttttgtttttaaacattcaaaagcaattaatgatcagacataggagaaaccctgaatagaaacaaaacttttgaatgctggattcaaaaaaaaaaaaaagttatctggacagcttctttgagactatttaaaaactggtacaacaggtctctacaacgccaagatctaactaagctttaaaaggtcaagaagttttatggctgacaaaggactcgcgcaacgcagaaggcctttcccaccttaagcttccggggatctgggaattttacccccattctcttctgtttgtctgagtctcatctctctgcaagcaagggctgaaatcattttgtttggttgttttgagggagagaggcggggtgggggggtgcaaatctgccagcagctcttacgtaaggcatgttttattggggagggctgagcttttattttctcctctccagtggggttggcttttattgtttcttgtttgggtttggaatggaaatatggatagcagcataaagtacttttattttgacaaaattcatttttttcaacaatggagacatagatttgacccacaataacttctccccctctctttttactctgctcaaaaagcatctctcctcccattacccaaccttggtcataagtgtgcctggctggtttgcagatatttgttctgctttgtaaaaattggccattagtgcatttattgagatgatctctaaagagctatgccctgacctacccctgattctatgacattggggcccttcttttgctgaaactgccttacgtaatggttttactccttgaaagagatttgacggaatccattttatgccaagtgctgccctgcactgtttctgcaatatgtggtgtatgctgtggtgatcttgctgggaatgattataagtgtgtgtgtgatgggggagtgggtattacatgcattgctgaagagtcatcctggtgttcctcattcctcccaccttcccgtggtcattttaattacggggcagtgtcaccgcaaagggaggaaactcaaagccgaaagcaaaattccaggcctgattctggcttttgaggttcctggttcttgaagccaggcctgacccgactctcagatggggtcagtcccgtcgctttgcagactgaccctggaaatctacaaaatgcagattttcctgatttcctcttctcttgcccagtttttttttttttttttttttttttttttaaagcctggattgtaaccagattttcttttttcccccttctcagctgtagatatgatatctcctttcagggccccagcttaagggcaaagtgagttaatgtgtagacaaaggcgagggacaagagagagttaacatctagacagtggaaaaagccatggtgtgtggtttctgggaaccaccaacacttgcaggtttagctttttcccagggttgactacaagaaagaaaaccatgtttttgcaagattaaaatgtggttgagtgtgcctaaattaaccatccccatttttatcatatttccaccatcacttcagggttttaagagtcagtgctcacctgggcggagctgggtagtacattttgcttcttagaaagctaagtcctgggttccgtctgattttaggttccaggaacttcctgagaacacccgatcgcagagggtaattttctggagtttgttttgcagggatagctgggagtatggccaccctgctccacgatgcggtaatgaatccagcagaagtggtgaagcagcgcttgcagatgtacaactcgcagcaccggtcagcaatcagctgcatccggacggtgtggaggaccgaggggttgggggccttctaccggagctacaccacgcagctgaccatgaacatccccttccagtccatccacttcatcacctatgagttcctgcaggagcaggtcaacccccaccggacctacaacccgcagtcccacatcatctcaggcgggctggccggggccctcgccgcggccgccacgacccccctggacgtctgtaagacccttctgaacactcaggagaacgtggccctctcgctggccaacatcagcggccggctgtcgggtatggccaatgccttccggacggtgtaccagctcaacggcctggccggctacttcaaaggcatccaggcgcgtgtcatctaccagatgccctccaccgccatttcttggtctgtctatgagttcttcaagtactttctcaccaagcgccagctggtctctgcctgcatccagccccttgccctctcctcacacgtagatcatttttttttttgcagggtgctgcctatgggccctctgctccccaatgccttagagagaggaggggacggcacggccgctcaccggaaggctgtgtgcggggacatccgaggtggtggtggacaggaaggacttgggaaggggagcgagaaattgctttttctcttcctccctgggcagaatgtagcttttctgcttcactgtggcagcctcctccctggatccttagatcccagaggagggaagaaaatttgcagtgactgaaaacagtaaaaaaaaaaaaaaaaaaaaaaaaaaaaaaaaatttatgtatataaaagttgcattacacagtacaaaatagatggataatgtttatcctttatttttctatgtagaagtttttgaatttgtgtgtgtgcttgtgcgtgtctacacctagtattacggctgggactctccagctgtttttgttgttgttatgtttttaagagggttgaattcttccatcaggtgaacgaaaaaggcaacaaagtaataaatcagtgaatgtggccggcagctgtgtttagcccctccagatggaagtttcacttgaatgtaaaataataaagtttatattttgaatttctcttttcatgggggaaaaaaggtacgttaaaaaaatcaaaataatgatatgtcacttgcagctacctttttttttcttttaaattcaatcagccaccttcatgtgcctttttcctttgtctttccccaaaattccaggaccagagatctggccctggcctattttctcttgctgtgtacacacacgcacacatgctgggtggcaggatctcgcccgctggagggtggtggagcccagtagaattggggtgactgggcataaacctgctgagactgcttccttccctggttgtgagtgatgtgaatgcctgccttccccggtcagcacttagaagcccttgataggcagcatttggcgacttgtggggcaggtgtttgggataaatcctaccttcatcctaggacttatttctgcatcagccttttaactcaggcacttcaggtaacgtgatctatgtgtgttttgactgaatctcatctcctgtgtttccctgtgcagtctagggaagcatgtctccagtctttgtccctgtcttgtcccaaccattaattctcatgtcacagcttctcactgcatgtgacaagagccaggcctatctgctagggccctgcggctgaggtctgacctggaccctcatgcccgagtcg

SEQ ID NO: 425800 - DNA, 2639 bp, Homo sapiens
cccggcgattggtgtctctggccgctgcgctccaccccagcccgccatggcgtcaggcgccgcggccccggggaggtggctcccactttaagaagtgaagttttgcgcccctccccctccctgcccacctcctgcagcctcctgcgccccgccgagctggcggatggagctgcgcagcgggagcgtgggcagccaggcggtggcgcggaggatggatggggacagccgagatggcggcggcggcaaggacgccaccgggtcggaggactacgagaacctgccgactagcgcctccgtgtccacccacatgacagcaggagcgatggccgggatcctggagcactcggtcatgtacccggtggactcggtgaagagacagggtcttgccttgtcgcctaggctggagtgcagtgttgagatcatagtttactgcagcctcgaactcctgggtacaaggaatcctccctcctcagcctcctgagtagctgggattacagacacgaatgcagagtttgagtccagatcccaaagcccagtacacaagtatctacggagccctcaagaaaatcatgcggaccgaaggcttctggaggcccttgcgaggcgtcaacgtcatgatcatgggtgcagggccggcccatgccatgtattttgcctgctatgaaaacatgaaaaggactttaaatgacgttttccaccaccaaggaaacagccacctagccaacgggatagctgggagtatggccaccctgctccacgatgcggtaatgaatccagcagaagtggtgaagcagcgcttgcagatgtacaactcgcagcaccggtcagcaatcagctgcatccggacggtgtggaggaccgaggggttgggggccttctaccggagctacaccacgcagctgaccatgaacatccccttccagtccatccacttcatcacctatgagttcctgcaggagcaggtcaacccccaccggacctacaacccgcagtcccacatcatctcaggcgggctggccggggccctcgccgcggccgccacgacccccctggacgtctgtaagacccttctgaacactcaggagaacgtggccctctcgctggccaacatcagcggccggctgtcgggtatggccaatgccttccggacggtgtaccagctcaacggcctggccggctacttcaaaggcatccaggcgcgtgtcatctaccagatgccctccaccgccatttcttggtctgtctatgagttcttcaagtactttctcaccaagcgccagctggaaaatcgagctccatactaaaggaagggatcatagaatcttttcttaaagtcattctctgcctgcatccagccccttgccctctcctcacacgtagatcatttttttttttgcagggtgctgcctatgggccctctgctccccaatgccttagagagaggaggggacggcacggccgctcaccggaaggctgtgtgcggggacatccgaggtggtggtggacaggaaggacttgggaaggggagcgagaaattgctttttctcttcctccctgggcagaatgtagcttttctgcttcactgtggcagcctcctccctggatccttagatcccagaggagggaagaaaatttgcagtgactgaaaacagtaaaaaaaaaaaaaaaaaaaaaaaaaaaaaaaaatttatgtatataaaagttgcattacacagtacaaaatagatggataatgtttatcctttatttttctatgtagaagtttttgaatttgtgtgtgtgcttgtgcgtgtctacacctagtattacggctgggactctccagctgtttttgttgttgttatgtttttaagagggttgaattcttccatcaggtgaacgaaaaaggcaacaaagtaataaatcagtgaatgtggccggcagctgtgtttagcccctccagatggaagtttcacttgaatgtaaaataataaagtttatattttgaatttctcttttcatgggggaaaaaaggtacgttaaaaaaatcaaaataatgatatgtcacttgcagctacctttttttttcttttaaattcaatcagccaccttcatgtgcctttttcctttgtctttccccaaaattccaggaccagagatctggccctggcctattttctcttgctgtgtacacacacgcacacatgctgggtggcaggatctcgcccgctggagggtggtggagcccagtagaattggggtgactgggcataaacctgctgagactgcttccttccctggttgtgagtgatgtgaatgcctgccttccccggtcagcacttagaagcccttgataggcagcatttggcgacttgtggggcaggtgtttgggataaatcctaccttcatcctaggacttatttctgcatcagccttttaactcaggcacttcaggtaacgtgatctatgtgtgttttgactgaatctcatctcctgtgtttccctgtgcagtctagggaagcatgtctccagtctttgtccctgtcttgtcccaaccattaattctcatgtcacagcttctcactgcatgtgacaagagccaggcctatctgctagggccctgcggctgaggtctgacctggaccctcatgcccgagtcg

SEQ ID NO: 425801 - DNA, 2467 bp, Homo sapiens
cccggcgattggtgtctctggccgctgcgctccaccccagcccgccatggcgtcaggcgccgcggccccggggaggtggctcccactttaagaagtgaagttttgcgcccctccccctccctgcccacctcctgcagcctcctgcgccccgccgagctggcggatggagctgcgcagcgggagcgtgggcagccaggcggtggcgcggaggatggatggggacagccgagatggcggcggcggcaaggacgccaccgggtcggaggactacgagaacctgccgactagcgcctccgtgtccacccacatgacagcaggagcgatggccgggatcctggagcactcggtcatgtacccggtggactcggtgaagacacgaatgcagagtttgagtccagatcccaaagcccagtacacaagtatctacggagccctcaagaaaatcatgcggaccgaaggcttctggaggcccttgcgaggcgtcaacgtcatgatcatgggtgcagggccggcccatgccatgtattttgcctgctatgaaaacatgaaaaggactttaaatgacgttttccaccaccaaggaaacagccacctagccaacgggatagctgggagtatggccaccctgctccacgatgcggtaatgaatccagcagaagtggtgaagcagcgcttgcagatgtacaactcgcagcaccggtcagcaatcagctgcatccggacggtgtggaggaccgaggggttgggggccttctaccggagctacaccacgcagttcctgcaggagcaggtcaacccccaccggacctacaacccgcagtcccacatcatctcaggcgggctggccggggccctcgccgcggccgccacgacccccctggacgtctgtaagacccttctgaacactcaggagaacgtggccctctcgctggccaacatcagcggccggctgtcgggtatggccaatgccttccggacggtgtaccagctcaacggcctggccggctacttcaaaggcatccaggcgcgtgtcatctaccagatgccctccaccgccatttcttggtctgtctatgagttcttcaagtactttctcaccaagcgccagctggaaaatcgagctccatactaaaggaagggatcatagaatcttttcttaaagtcattctctgcctgcatccagccccttgccctctcctcacacgtagatcatttttttttttgcagggtgctgcctatgggccctctgctccccaatgccttagagagaggaggggacggcacggccgctcaccggaaggctgtgtgcggggacatccgaggtggtggtggacaggaaggacttgggaaggggagcgagaaattgctttttctcttcctccctgggcagaatgtagcttttctgcttcactgtggcagcctcctccctggatccttagatcccagaggagggaagaaaatttgcagtgactgaaaacagtaaaaaaaaaaaaaaaaaaaaaaaaaaaaaaaaatttatgtatataaaagttgcattacacagtacaaaatagatggataatgtttatcctttatttttctatgtagaagtttttgaatttgtgtgtgtgcttgtgcgtgtctacacctagtattacggctgggactctccagctgtttttgttgttgttatgtttttaagagggttgaattcttccatcaggtgaacgaaaaaggcaacaaagtaataaatcagtgaatgtggccggcagctgtgtttagcccctccagatggaagtttcacttgaatgtaaaataataaagtttatattttgaatttctcttttcatgggggaaaaaaggtacgttaaaaaaatcaaaataatgatatgtcacttgcagctacctttttttttcttttaaattcaatcagccaccttcatgtgcctttttcctttgtctttccccaaaattccaggaccagagatctggccctggcctattttctcttgctgtgtacacacacgcacacatgctgggtggcaggatctcgcccgctggagggtggtggagcccagtagaattggggtgactgggcataaacctgctgagactgcttccttccctggttgtgagtgatgtgaatgcctgccttccccggtcagcacttagaagcccttgataggcagcatttggcgacttgtggggcaggtgtttgggataaatcctaccttcatcctaggacttatttctgcatcagccttttaactcaggcacttcaggtaacgtgatctatgtgtgttttgactgaatctcatctcctgtgtttccctgtgcagtctagggaagcatgtctccagtctttgtccctgtcttgtcccaaccattaattctcatgtcacagcttctcactgcatgtgacaagagccaggcctatctgctagggccctgcggctgaggtctgacctggaccctcatgcccgagtcg

SEQ ID NO: 425802 - DNA, 3214 bp, Homo sapiens
cccggcgattggtgtctctggccgctgcgctccaccccagcccgccatggcgtcaggcgccgcggccccggggaggtggctcccactttaagaagtgaagttttgcgcccctccccctccctgcccacctcctgcagcctcctgcgccccgccgagctggcggatggagctgcgcagcgggagcgtgggcagccaggcggtggcgcggaggatggatggggacagccgagatggcggcggcggcaaggacgccaccgggtcggaggactacgagaacctgccgactagcgcctccgtgtccacccacatgacagcaggagcgatggccgggatcctggagcactcggtcatgtacccggtggactcggtgaagacacgaatgcagagtttgagtccagatcccaaagcccagtacacaagtatctacggagccctcaagaaaatcatgcggaccgaaggcttctggaggcccttgcgaggcgtcaacgtcatgatcatgggtgcagggccggcccatgccatgtattttgcctgctatgaaaacatgaaaaggactttaaatgacgttttccaccaccaaggaaacagccacctagccaacggtattttgaaagcgtttgtctggagttagaaagttctcttcttcaacacgtccctccccagggtgttcctccctgtgacccagccgcctcgacttcggcccgcttgctcacgaataaagaactcagagttgtgtgtgcaatgcacacccagacacacgcacgcacacacacgcgcgcgcacacacatgcttttttctgttcccctccgctttctgaagcctggggagaaatcagtgacagaggtgttttggttttattgttatgtgggttttcttttgtattttttttgtttgttttgtttttaaacattcaaaagcaattaatgatcagacataggagaaaccctgaatagaaacaaaacttttgaatgctggattcaaaaaaaaaaaaaagttatctggacagcttctttgagactatttaaaaactggtacaacaggtctctacaacgccaagatctaactaagctttaaaaggtcaagaagttttatggctgacaaaggactcgcgcaacgcagaaggcctttcccaccttaagcttccggggatctgggaattttacccccattctcttctgtttgtctgagtctcatctctctgcaagcaagggctgaaatcattttgtttggttgttttgagggagagaggcggggtgggggggtgcaaatctgccagcagctcttacgtaaggcatgttttattggggagggctgagcttttattttctcctctccagtggggttggcttttattgtttcttgtttgggtttggaatggaaatatggatagcagcataaagtacttttattttgacaaaattcatttttttcaacaatggagacatagatttgacccacaataacttctccccctctctttttactctgctcaaaaagcatctctcctcccattacccaaccttggtcataagtgtgcctggctggtttgcagatatttgttctgctttgtaaaaattggccattagtgcatttattgagatgatctctaaagagctatgccctgacctacccctgattctatgacattggggcccttcttttgctgaaactgccttacgtaatggttttactccttgaaagagatttgacggaatccattttatgccaagtgctgccctgcactgtttctgcaatatgtggtgtatgctgtggtgatcttgctgggaatgattataagtgtgtgtgtgatgggggagtgggtattacatgcattgctgaagagtcatcctggtgttcctcattcctcccaccttcccgtggtcattttaattacggggcagtgtcaccgcaaagggaggaaactcaaagccgaaagcaaaattccaggcctgattctggcttttgaggttcctggttcttgaagccaggcctgacccgactctcagatggggtcagtcccgtcgctttgcagactgaccctggaaatctacaaaatgcagattttcctgatttcctcttctcttgcccagtttttttttttttttttttttttttttttaaagcctggattgtaaccagattttcttttttcccccttctcagctgtagatatgatatctcctttcagggccccagcttaagggcaaagtgagttaatgtgtagacaaaggcgagggacaagagagagttaacatctagacagtggaaaaagccatggtgtgtggtttctgggaaccaccaacacttgcaggtttagctttttcccagggttgactacaagaaagaaaaccatgtttttgcaagattaaaatgtggttgagtgtgcctaaattaaccatccccatttttatcatatttccaccatcacttcagggttttaagagtcagtgctcacctgggcggagctgggtagtacattttgcttcttagaaagctaagtcctgggttccgtctgattttaggttccaggaacttcctgagaacacccgatcgcagagggtaattttctggagtttgttttgcagggatagctgggagtatggccaccctgctccacgatgcggtaatgaatccagcagaaggtaatgtttcatggtcccagggaggggcagtaggggatgtgcaaaggggcacaaaaaatggttgtgggagagtggagaggactgaaggtgggcagagcggctcctagtctccagtcagagcagacaggagaattgaattttttactacgttatcaaaggcctcaagaaaggacgtgaacataagagtttttggtattcctgtgctcggagctactcaaagtgtgttctacagaccagcagcatcagacatcttgaggggtgttggaaatgctaattctgaggctgggtgcagtggctcatgcctgtaatcccagcattttttgggaggccgaggtgggcagatcacttgaggtcaggagttcgagaccagcctggccaacatggagagacccccatctctactaaaaatacaaaaattagcctagtgcggtgtgtgcacctgtaatcccagctactggggtggccgaggtgggagaatcgcttgaacccagcaggcagaggttgcagtgcaccgagagtacgccactgtactccagcctgggccacagagccagactccatctcaaaagga

SEQ ID NO: 425803 - DNA, 2787 bp, Homo sapiens
gtttgcctgtcttttgtctttcaaggtgaagctattaaatttgttctcagctaccctccatgtcctagcagatagaggacttggtctgaccttcagggttgtgatggggcaggttgggaggtgggcggggagtctctgtggtctgggtgctgaggttgacccgatgggcaggtgaagaaaatcaccttctccattccccttgatttctttatcgtgtgccgcacgaggcatgctgaagggacacacacctttccccctttttatttacaaagtagagagctgagaaagacagctcatgttctgttttgttttgtacacattatctttctcaagagatgtgatgtccttaagtaaactgacctgccttcatggcttgtcctgtaatgaatgcgttcaagacagtgttttggggacaggaaagaggcattcttaggtaagcggtggtggggggtggggtggggtggagaggaaacccttctaggaagtagttcaatgaaaaacctaaaaatgcccaaataaacattcgcttacatattatatatcttgggcttctttttatgacagttcattcagggacccagtcagtaaacaggtagttaacttcgtgtaaccaagcaagggttttgtttatcttttttaaagtagaaaaaagtgaggctcaaactctctctttctccttgtcataactattggtttacagtctttatttgtttaaaagtaaagcacattgtatgtatttatttggcaatacatgaggccattaaaaccctgagcctaaggtaccacagttagtctcatttgcctcttgtcctgtgaactccacttagaatgtcattgaacttgggcagacataattctagtgtctgttccaaacgcactgtgtcacagaagctagaattaccattagaggcacaaacccctgagaatacacaagggggcacgcttccagtagatgtgttggggaaggaggagggcagaggggacaggggacaggattcagctttgtggtgggtcctgagggttcctaccaggggtagccaggatctgggaaacagatcagcgactctagtctgaagtggctgcctggttcgggggctgccttcagcaagattcaggcaggagagacggaaatagccaccttccaggcgtgagtcctggagataaaaatggattttaacctaggactgccgggagctggccctccgcggctgctcagactagggctgtgtgtgctggctctcgcctgtttccggtgtctaactggcttgtttctctttatggcttggcttcattccgacctggggtggggccacatccaacccactgcccactggctgtccgtctggcctgccccgcggttccaaccacagtggtgaagcagcgcttgcagatgtacaactcgcagcaccggtcagcaatcagctgcatccggacggtgtggaggaccgaggggttgggggccttctaccggagctacaccacgcagctgaccatgaacatccccttccagtccatccacttcatcacctatgagtttttttttgcagggtgctgcctatgggccctctgctccccaatgccttagagagaggaggggacggcacggccgctcaccggaaggctgtgtgcggggacatccgaggtggtggtggacaggaaggacttgggaaggggagcgagaaattgctttttctcttcctccctgggcagaatgtagcttttctgcttcactgtggcagcctcctccctggatccttagatcccagaggagggaagaaaatttgcagtgactgaaaacagtaaaaaaaaaaaaaaaaaaaaaaaaaaaaaaaaatttatgtatataaaagttgcattacacagtacaaaatagatggataatgtttatcctttatttttctatgtagaagtttttgaatttgtgtgtgtgcttgtgcgtgtctacacctagtattacggctgggactctccagctgtttttgttgttgttatgtttttaagagggttgaattcttccatcaggtgaacgaaaaaggcaacaaagtaataaatcagtgaatgtggccggcagctgtgtttagcccctccagatggaagtttcacttgaatgtaaaataataaagtttatattttgaatttctcttttcatgggggaaaaaaggtacgttaaaaaaatcaaaataatgatatgtcacttgcagctacctttttttttcttttaaattcaatcagccaccttcatgtgcctttttcctttgtctttccccaaaattccaggaccagagatctggccctggcctattttctcttgctgtgtacacacacgcacacatgctgggtggcaggatctcgcccgctggagggtggtggagcccagtagaattggggtgactgggcataaacctgctgagactgcttccttccctggttgtgagtgatgtgaatgcctgccttccccggtcagcacttagaagcccttgataggcagcatttggcgacttgtggggcaggtgtttgggataaatcctaccttcatcctaggacttatttctgcatcagccttttaactcaggcacttcaggtaacgtgatctatgtgtgttttgactgaatctcatctcctgtgtttccctgtgcagtctagggaagcatgtctccagtctttgtccctgtcttgtcccaaccattaattctcatgtcacagcttctcactgcatgtgacaagagccaggcctatctgctagggccctgcggctgaggtctgacctggaccctcatgcccgagtcg

SEQ ID NO: 425804 - DNA, 1594 bp, Homo sapiens
gtttgcctgtcttttgtctttcaaggtgaagctattaaatttgttctcagctaccctccatgtcctagcagatagaggacttggtctgaccttcagggttgtgatggggcaggttgggaggtgggcggggagtctctgtggtctgggtgctgaggttgacccgatgggcaggtgaagaaaatcaccttctccattccccttgatttctttatcgtgtgccgcacgaggcatgctgaagggacacacacctttccccctttttatttacaaagtagagagctgagaaagacagctcatgttctgttttgttttgtacacattatctttctcaagagatgtgatgtccttaagtaaactgacctgccttcatggcttgtcctgtaatgaatgcgttcaagacagtgttttggggacaggaaagaggcattcttaggtaagcggtggtggggggtggggtggggtggagaggaaacccttctaggaagtagttcaatgaaaaacctaaaaatgcccaaataaacattcgcttacatattatatatcttgggcttctttttatgacagttcattcagggacccagtcagtaaacaggtagttaacttcgtgtaaccaagcaagggttttgtttatcttttttaaagtagaaaaaagtgaggctcaaactctctctttctccttgtcataactattggtttacagtctttatttgtttaaaagtaaagcacattgtatgtatttatttggcaatacatgaggccattaaaaccctgagcctaaggtaccacagttagtctcatttgcctcttgtcctgtgaactccacttagaatgtcattgaacttgggcagacataattctagtgtctgttccaaacgcactgtgtcacagaagctagaattaccattagaggcacaaacccctgagaatacacaagggggcacgcttccagtagatgtgttggggaaggaggagggcagaggggacaggggacaggattcagctttgtggtgggtcctgagggttcctaccaggggtagccaggatctgggaaacagatcagcgactctagtctgaagtggctgcctggttcgggggctgccttcagcaagattcaggcaggagagacggaaatagccaccttccaggcgtgagtcctggagataaaaatggattttaacctaggactgccgggagctggccctccgcggctgctcagactagggctgtgtgtgctggctctcgcctgtttccggtgtctaactggcttgtttctctttatggcttggcttcattccgacctggggtggggccacatccaacccactgcccactggctgtccgtctggcctgccccgcggttccaaccacagtggtgaagcagcgcttgcagatgtacaactcgcagcaccggtcagcaatcagctgcatccggacggtgtggaggaccgaggggttgggggccttctaccggagctacaccacgcagctgaccatgaacatccccttccagtccatccacttcatcacctatgagacactccccccccaactatacacacgccgcgttttcataaattattggttttcaacgaaa

SEQ ID NO: 425805 - DNA, 805 bp, Homo sapiens
cgcgctcgcgcacactacgccagaacaagatggccgacgcggcggccacagctggggccggtggctccggaacgagatcgggaagtaaacagtccactaaccctgccgataactatcatctggcccggaggagaaccctgcaggtggttgtgagctccttgctgacagaggcagggtttgagagtgccgagaaagcatccgtggaaacgctgacagagatgctgcagagctacatttcagaaattgggagaagtgccaagtcttactgtgagcacacagccaggacccagcccacactgtccgatatcgtggtcacacttgttgagatgggtttcaatgtggacactctccctgcttatgcaaaacggtctcagaggatggtcatcactgctcctccggtgaccaatcagccagtgacccccaaggccctcactgcagggcagaaccgaccccacccgccgcacatccccagccattttcctgagttccctgatccccacacctacatcaaaactccggtgagtgatgaagcactgggactgcgcgtggtgtaaagcacggagtcagttcctactgactgtcacgtggcagagtccagtccaaaagcttgttgatgaaagagtggttcaaaactcagaatgtggccgggcacattggctcacacctgtgatcccagcattttaggaggccgaggcaggaggatcacttgagcctgggagttcaagaccagcctgggcagcagagcaagaccctgtctcatttgaaaaataaataaataaagaaaaaaaaaaagaattcagattat

SEQ ID NO: 425806 - DNA, 494 bp, Homo sapiens
cgagtgctacccgtctccgatcgtaacaggcgctcagtcctaacagaggccggggagtgccagaagacctagggagccagcggtcaagtccccaagtttgtcaagtgtccaagttcaccaagggaatggaagactaagagatgggctgggcaccgtggctcacgcctgtattctcaacacttgggaaggccacggcggggggatcacttgaggccaggagttcaagaccagcctcccaaagtgctaggattatacgcgcctggcctcagaggctatactcttataattttgttctgaggggagacagggaaagggttagacaacttgaaacattgaccctgtataaaaatgcaaaattctcaatgtgtatttataaatttctattttttataactttatgggacttcttagaggccaaaagtagtaaacatgcagattaaaaatgtttatgaaaatctcaataaaaattcataataaaaactttgtaaataaat

SEQ ID NO: 425807 - DNA, 1372 bp, Homo sapiens
  misc_feature (1332)..(1332): n is a, c, g, or t
tgctgagattacaggcgtgagccaccgcaccccaccagagactttcttaatcaatcaggctatgtggtggggcatagcagcagccagtgacttcgttcattatcacaggatttgattcctttgaaactcaagagaccagggaaagtgacaggaaggaaagggctctttgctgctgtgcttattacaaagaagactgtttgtccagcgtgtatttcaggatatctggatcccttttattgactcacaatttgtggcaccactttctcatcccagaacttcattcttatttctctcctcatctggcctcccaagtgctccgttgagctgatgaaaagttctttgtactccctcaacgtgtcggaaacaggaggccacacagcacagctttgtttggggtgggcaggagtcaggagtcttgagcagatgcatcactgtgaagaagaacgacatgtcggggctgcacctgtcctcccgtcggcatttgacgaaagctccctgaagcggggcagcactctcctcctgagagatttaccatttattgcccctgtgaggaatgtgtgcttgggaactgccaagtcttaccccttctggaagaagaggttttctctgacaagagcctagagcgtcggctctattatgctgggacttgacagaggagccatggggtttaaacagtaggaaagaggagtgagccacggtgcccagcccatctcttagtcttccattcccttggtgaatttggaaacttgaaaaacttggggacttgacagcaggctccatgttcttctggcctcactgtactgtgtaaggaaagagctgcttgtcaggaacggaagaggggacgctagtaaaaaaaaaaaaattggattccccaactggactaaataggagtttttcaggtttgtagtaacgtgaaactctcctagatcgaagcagttagactggcctatgtggccttctcagggtttgtgattcagttcttagcgattcttggcctgataagtttatgaacacagccccacattcaagccgtggccaatcccagctgttctcactgctcttgggaggtgttgtcccagtcagtgtttctgcagcttccatttgttgtttttatccagtgtaagcacctgttgaatgcagatgtgctgagttagaggtgggatttggaaaagggctgctatttctgctgttgagatttcaggcgtgagccacggtgcccagcccatctcttagtcttccattcccttggtgaatttggaaacttgaaaaacttggggacttgacagcaggctccatgttcttctggcctcactgtactgtgtaaggaaaganctgcttgtcaggaacggaagaggggacgctagtataaaaa

SEQ ID NO: 425808 - DNA, 1007 bp, Homo sapiens
tgctgagattacaggcgtgagccaccgcaccccaccagagactttcttaatcaatcaggctatgtggtggggcatagcagcagccagtgacttcgttcattatcacaggatttgattcctttgaaactcaagagaccagggaaagtgacaggaaggaaagggctctttgctgctgtgcttattacaaagaagactgtttgtccagcgtgtatttcaggatatctggatcccttttattgactcacaatttgtggcaccactttctcatcccagaacttcattcttatttctctcctcatctggcctcccaagtgctccgttgagctgatgaaaagttctttgtactccctcaacgtgtcggaaacaggaggccacacagcacagctttgtttggggtgggcaggagtcaggagtcttgagcagatgcatcactgtgaagaagaacgacatgtcggggctgcacctgtcctcccgtcggcatttgacgaaagctccctgaagcggggcagcactctcctcctgagagatttaccatttattgcccctgtgaggaatgtgtgcttgggaactgccaagtcttaccccttctggaagaagaggttttctctgacaagagcctagagcgtcggctctattatgctgggacttgacagaggagccatggggtttaaacagtaggaaagaggagggtggtctcgaacacctgacctcagatgatccacccacctcggcctcccagtgtgggtgggattacaggcatgagccaccgcgcctggcctcagaggctatactcttataattttgttctgaggggagacagggaaagggttagacaacttgaaacattgaccctgtataaaaatgcaaaattctcaatgtgtatttataaatttctattttttataactttatgggacttcttagaggccaaaagtagtaaacatgcagattaaaaatgtttatgaaaatctcaataaaaattcataataaaaactttgtaaataaat

SEQ ID NO: 425809 - DNA, 1283 bp, Homo sapiens
  misc_feature (1243)..(1243): n is a, c, g, or t
tgctgagattacaggcgtgagccaccgcaccccaccagagactttcttaatcaatcaggctatgtggtggggcatagcagcagccagtgacttcgttcattatcacaggatttgattcctttgaaactcaagagaccagggaaagtgacaggaaggaaagggctctttgctgctgtgcttattacaaagaagactgtttgtccagcgtgtatttcaggatatctggatcccttttattgactcacaatttgtggcaccactttctcatcccagaacttcattcttatttctctcctcatctggcctcccaagtgctccgttgagctgatgaaaagttctttgtactccctcaacgtgtcggaaacaggaggccacacagcacagctttgtttggggtgggcaggagtcaggagtcttgagcagatgcatcactgtgaagaagaacgacatgtcggggctgcacctgtcctcccgtcggcatttgacgaaagctccctgaagcggggcagcactctcctcctgagagatttaccatttattgctcctggcctcaagtgatccacccgccttggccttccaaagtgttgagattacaggcgtgagccacggtgcccagcccatctcttagtcttccattcccttggtgaatttggaaacttgaaaaacttggggacttgacagcaggctccatgttcttctggcctcactgtactgtgtaaggaaagagctgcttgtcaggaacggaagaggggacgctagtaaaaaaaaaaaaattggattccccaactggactaaataggagtttttcaggtttgtagtaacgtgaaactctcctagatcgaagcagttagactggcctatgtggccttctcagggtttgtgattcagttcttagcgattcttggcctgataagtttatgaacacagccccacattcaagccgtggccaatcccagctgttctcactgctcttgggaggtgttgtcccagtcagtgtttctgcagcttccatttgttgtttttatccagtgtaagcacctgttgaatgcagatgtgctgagttagaggtgggatttggaaaagggctgctatttctgctgttgagatttcaggcgtgagccacggtgcccagcccatctcttagtcttccattcccttggtgaatttggaaacttgaaaaacttggggacttgacagcaggctccatgttcttctggcctcactgtactgtgtaaggaaaganctgcttgtcaggaacggaagaggggacgctagtataaaaa

SEQ ID NO: 425810 - DNA, 1555 bp, Homo sapiens
cgcgctcgcgcacactacgccagaacaagatggccgacgcggcggccacagctggggccggtggctccggaacgagatcgggaagtaaacagtccactaaccctgccgataactatcatctggcccggaggagaaccctgcaggtggttgtgagctccttgctgacagaggcagggtttgagagtgccgagaaagcatccgtggaaacgctgacagagatgctgcagagctacatttcagaaattgggagaagtgccaagtcttactgtgagcacacagccaggacccagcccacactgtccgatatcgtggtcacacttgttgagatgggtttcaatgtggacactctccctgcttatgcaaaacggtctcagaggatggtcatcactgctcctccggtgaccaatcagccagtgacccccaaggccctcactgcagggcagaaccgaccccacccgccgcacatccccagccattttcctgagttccctgatccccacacctacatcaaaactccggtacgtaccgtgagcccgtgtcagactaccaggtcctgcgggagaaggctgcatcccagaggcgcgatgtggagcgggcacttacccgtttcatggccaagacaggcgagactcagagtcttttcaaagatgacgtcagcacatttccattgattgctgccagacctttcaccatcccctacctgacagctcttcttccgtctgaactggagatgcaacaaatggaagagacagattcctcggagcaggatgaacagacagacacagagaaccttgctcttcatatcagcatggaggattctggagccgagaaggagaacacctctgtcctgcagcagaacccctccttgtcgggtagccggaatggggaggagaacatcatcgataacccttatctgcggccggtgaagaagcccaagatccgcaggaagaagtccctctcctgagctgagaaggaaacctggcttgtacaggggcgcagattccaccctcccggggagttaaagccactcaagggaagaagagggtgacctcctcatggccaagccgaggctgcagggtgtgatcggacatgattttcatggcaaaccgtcttattaagatgacctattttcactggatgtttgggttgaggaagatatgaacagaataatgagaatttttttttttattttgagatggagtcttactctgtcacccaggctggagtgcagtggtgtgatctcggctcactgcagtctcagcaaccctgggtccaagtgattctcctgccttggcctcccgagtagctgggactagaggcaagcgccaccatgctggctaatttttgtattttgagtagagatagggtttcgccatgttggccaggctggtcttgaactcctgacctcagtgatccacccgcattggcctcccaaagagttgcgattacaggtgtgagccaccacgcccggcctggatataccttttttttttttaaatattgaattattcctttcagaattagggctgggagaccatggctttaaataaagcag

SEQ ID NO: 425811 - DNA, 1677 bp, Homo sapiens
cgcgctcgcgcacactacgccagaacaagatggccgacgcggcggccacagctggggccggtggctccggaacgagatcgggaagtaaacagtccactaaccctgccgataactatcatctggcccggaggagaaccctgcaggtggttgtgagctccttgctgacagaggcagggtttgagagtgccgagaaagcatccgtggaaacgctgacagagatgctgcagagctacatttcagaaattgggagaagtgccaagtcttactgtgagcacacagccaggacccagcccacactgtccgatatcgtggtcacacttgttgagatgggtttcaatgtggacactctccctgcttatgcaaaacggtctcagaggatggtcatcactgctcctccggtgaccaatcagccagtgacccccaaggccctcactgcagggcagaaccgaccccacccgccgcacatccccagccattttcctgagttccctgatccccacacctacatcaaaactccggtacgtaccgtgagcccgtgtcagactaccaggtcctgcgggagaaggctgcatcccagaggcgcgatgtggagcgggcacttacccgtttcatggccaagacaggcgagactcagagtcttttcaaagatgacgtcagcacatttccattgattgctgccagacctttcaccatcccctacctgacagctcttcttccgtctgaactggagatgcaacaaatggaagagacagattcctcggagcaggatgaacagacagacacagagaaccttgctcttcatatcagcatgatagagtctcgctccgtcacccaggctggagtgcagtggcaagatcttggctcactgcaacctccgcctcctgggttcaagcgattctccagcctcagcctcctgagtagctggaattacaggaggattctggagccgagaaggagaacacctctgtcctgcagcagaacccctccttgtcgggtagccggaatggggaggagaacatcatcgataacccttatctgcggccggtgaagaagcccaagatccgcaggaagaagtccctctcctgagctgagaaggaaacctggcttgtacaggggcgcagattccaccctcccggggagttaaagccactcaagggaagaagagggtgacctcctcatggccaagccgaggctgcagggtgtgatcggacatgattttcatggcaaaccgtcttattaagatgacctattttcactggatgtttgggttgaggaagatatgaacagaataatgagaatttttttttttattttgagatggagtcttactctgtcacccaggctggagtgcagtggtgtgatctcggctcactgcagtctcagcaaccctgggtccaagtgattctcctgccttggcctcccgagtagctgggactagaggcaagcgccaccatgctggctaatttttgtattttgagtagagatagggtttcgccatgttggccaggctggtcttgaactcctgacctcagtgatccacccgcattggcctcccaaagagttgcgattacaggtgtgagccaccacgcccggcctggatataccttttttttttttaaatattgaattattcctttcagaattagggctgggagaccatggctttaaataaagcag

SEQ ID NO: 425812 - DNA, 931 bp, Homo sapiens
  misc_feature (891)..(891): n is a, c, g, or t
acgctgtgttaagaattgacttccatcataaatgtagcagcaggaagaccaggcagaaggcaaaaaaatgatagtggcttggactaactgtgtgacagttgaggaggtaagagataatcaggggccaggtgtggtggttcgcgcctgtaatcccagcagtttgggagaccaaagtgggctggtcttgagctcctggcctcaagtgatccacccgccttggccttccaaagtgttgagattacaggcgtgagccacggtgcccagcccatctcttagtcttccattcccttggtgaatttggaaacttgaaaaacttggggacttgacagcaggctccatgttcttctggcctcactgtactgtgtaaggaaagagctgcttgtcaggaacggaagaggggacgctagtaaaaaaaaaaaaattggattccccaactggactaaataggagtttttcaggtttgtagtaacgtgaaactctcctagatcgaagcagttagactggcctatgtggccttctcagggtttgtgattcagttcttagcgattcttggcctgataagtttatgaacacagccccacattcaagccgtggccaatcccagctgttctcactgctcttgggaggtgttgtcccagtcagtgtttctgcagcttccatttgttgtttttatccagtgtaagcacctgttgaatgcagatgtgctgagttagaggtgggatttggaaaagggctgctatttctgctgttgagatttcaggcgtgagccacggtgcccagcccatctcttagtcttccattcccttggtgaatttggaaacttgaaaaacttggggacttgacagcaggctccatgttcttctggcctcactgtactgtgtaaggaaaganctgcttgtcaggaacggaagaggggacgctagtataaaaa

SEQ ID NO: 425813 - DNA, 1204 bp, Homo sapiens
  misc_feature (1164)..(1164): n is a, c, g, or t
cgcgctcgcgcacactacgccagaacaagatggccgacgcggcggccacagctggggccggtggctccggaacgagatcgggaagtaaacagtccactaaccctgccgataactatcatctggcccggaggagaaccctgcaggtggttgtgagctccttgctgacagaggcagggtttgagagtgccgagaaagcatccgtggaaacgctgacagagatgctgcagagctacatttcagaaattgggagaagtgccaagtcttactgtgagcacacagccaggacccagcccacactgtccgatatcgtggtcacacttgttgagatgggtttcaatgtggacactctccctgcttatgcaaaacggtctcagaggatggtcatcactgctcctccggtgaccaatcagccagtgacccccaaggccctcactgcagggcagaaccgaccccacccgccgcacatccccagccattttcctgagttccctgatccccacacctacatcaaaactccggttgagccacggtgcccagcccatctcttagtcttccattcccttggtgaatttggaaacttgaaaaacttggggacttgacagcaggctccatgttcttctggcctcactgtactgtgtaaggaaagagctgcttgtcaggaacggaagaggggacgctagtaaaaaaaaaaaaattggattccccaactggactaaataggagtttttcaggtttgtagtaacgtgaaactctcctagatcgaagcagttagactggcctatgtggccttctcagggtttgtgattcagttcttagcgattcttggcctgataagtttatgaacacagccccacattcaagccgtggccaatcccagctgttctcactgctcttgggaggtgttgtcccagtcagtgtttctgcagcttccatttgttgtttttatccagtgtaagcacctgttgaatgcagatgtgctgagttagaggtgggatttggaaaagggctgctatttctgctgttgagatttcaggcgtgagccacggtgcccagcccatctcttagtcttccattcccttggtgaatttggaaacttgaaaaacttggggacttgacagcaggctccatgttcttctggcctcactgtactgtgtaaggaaaganctgcttgtcaggaacggaagaggggacgctagtataaaaa

SEQ ID NO: 425814 - DNA, 1096 bp, Homo sapiens
cactgatttgttgtgaggctctaggactctaagccagctgcgaggtctctgtgacagtggactcatgcctctcttccaattcgccagtgattgctgccagacctttcaccatcccctacctgacagctcttcttccgtctgaactggagatgcaacaaatggaagagacagattcctcggagcaggatgaacagacagacacagagaaccttgctcttcatatcagcatgatagagtctcgctccgtcacccaggctggagtgcagtggcaagatcttggctcactgcaacctccgcctcctgggttcaagcgattctccagcctcagcctcctgagtagctggaattacaggaggattctggagccgagaaggagaacacctctgtcctgcagcagaacccctccttgtcgggtagccggaatggggaggagaacatcatcgataacccttatctgcggccggtgaagaagcccaagatccgcaggaagaagtccctctcctgagctgagaaggaaacctggcttgtacaggggcgcagattccaccctcccggggagttaaagccactcaagggaagaagagggtgacctcctcatggccaagccgaggctgcagggtgtgatcggacatgattttcatggcaaaccgtcttattaagatgacctattttcactggatgtttgggttgaggaagatatgaacagaataatgagaatttttttttttattttgagatggagtcttactctgtcacccaggctggagtgcagtggtgtgatctcggctcactgcagtctcagcaaccctgggtccaagtgattctcctgccttggcctcccgagtagctgggactagaggcaagcgccaccatgctggctaatttttgtattttgagtagagatagggtttcgccatgttggccaggctggtcttgaactcctgacctcagtgatccacccgcattggcctcccaaagagttgcgattacaggtgtgagccaccacgcccggcctggatataccttttttttttttaaatattgaattattcctttcagaattagggctgggagaccatggctttaaataaagcag

SEQ ID NO: 425815 - DNA, 524 bp, Homo sapiens
tatttttaatagagataaggtttcgccatgttggccaggctggtcttgaactcctgacctcaagtgataacccgcctcggcctcccaaagtgctgagattacaggcgtgagccaccgcaccccaccagagactttcttaatcaatcaggctatgtggtggggcatagcagcagccagtgacttcgttcattatcacaggatttgattcctttgaaactcaagagaccagggaaagtgacaggaaggaaagggctctttgctgctgtgcttattacaaagaagactgtttgtccagcgtgtatttcaggatatctggatcccttttattgactcacaatttgtggcaccactttctcatcccagaacttcattcttatttctctcctcatctggcctcccaagtgctccgttgagctgatgaaaagttctttgtactccctcaacgtgtcggaaacaggaggccacacagcacagctttgtttggggtgggcaggagtcaggagtcttgagcagatgcatcactg

SEQ ID NO: 425816 - DNA, 479 bp, Homo sapiens
tgttcttctggcctcactgtactgtgtaaggaaagagctgcttgtcaggaacggaagaggggacgctagtaaaaaaaaaaaaattggattccccaactggactaaataggagtttttcaggtttgtagtaacgtgaaactctcctagatcgaagcagttagactggcctatgtggccttctcagggtttgtgattcagttcttagcgattcttggcctgataagtttatgaacacagccccacattcaagccgtggccaatcccagctgttctcactgctcttgggaggtgttgtcccagtcagtgtttctgcagcttccatttgttgtttttatccagtgtaagcacctgttgaatgcagatgtgctgagttagaggtgggatttggaaaagggctgctatttctgctgttgagatttcagaggctatactctttttttttcttttcttttttttttttttttgagacggcatctcac

SEQ ID NO: 425817 - DNA, 3555 bp, Homo sapiens
cgcgcctccgcccctcgctcgctcgctccttcccgccctccccgcagcgccggccgagccggcttcccctcagtctctcatgaatattgagcggcccctgttgtatttcccgagctccattgcggaagctgaggctcgccatattgtgcggcggcgccggcgtccgcggcagctgataccagagtcttgctccggccgcggccagcggagccctgggctggggcaggagccgcaatgtctcaggctgtgcagacaaacggaactcaaccattaagcaaaacatgggaactcagtttatatgagttacaacgaacacctcaggaggcaataacagatggcttagaaattgtggtttcacctcgaagtctacacagtgaattaatgtgcccaatttgtttggatatgttgaagaacaccatgactacaaaggagtgtttacatcgtttttgtgcagactgcatcatcacagcccttagaagtggcaacaaagaatgtcctacctgtcggaaaaaactagtttccaaaagatcactaaggccagacccaaactttgatgcactcatcagcaaaatttatccaagtcgtgatgagtatgaagctcatcaagagagagtattagccaggatcaacaagcacaataatcagcaagcactcagtcacagcattgaggaaggactgaagatacaggccatgaacagactgcagcgaggcaagaaacaacagattgaaaatggtagtggagcagaagataatggtgacagttcacactgcagtaatgcatccacacatagcaatcaggaagcaggccctagtaacaaacggaccaaaacatctgatgattctgggctagagcttgataataacaatgcagcaatggcaattgatccagtaatggatggtgctagtgaaattgaattagtattcaggcctcatcccacacttatggaaaaagatgacagtgcacagacgagatacataaagacttctggtaacgccactgttgatcacttatccaagtatctggctgtgaggttagctttagaagaacttcgaagcaaaggtgaatcaaaccagatgaaccttgatacagccagtgagaagcagtataccatttatatagcaacagccagtggccagttcactgtattaaatggctctttttctttggaattggtcagtgagaaatactggaaagtgaacaaacccatggaactttattacgcacctacaaaggagcacaaatgagcctttaaaaaccaattctgagactgaacttttttatagcctatttctttaatattaaagatgtactggcattacttttatggacagatcttggatatgttgttcaattttctttctgagccagactagtttacgctattcaaatcttttcccctttatttaagatttcctttttggaagggactgcaattattcagtatttttttctttcctttaaaaaaatatatctgaagtttcttgtgtttttttttttccccacaaagtgtgtttccacttggagcaccattttgacccaggaatttttcatagtttctgtattcttataagattcagttggctgtccttttcctgctcccctcaaaagatttttagtcatacagaatgttaaatattatgtattctgactttttttttcccccggagtcttgtatatttatagttttctatataaactgtagtatcttcatgaagacccaaggctcaaatttactgtccttaaaaacaattctcataggattattcttttcatggtattttcttccataatatctcattttaaaaagaagttctttatgaacttagtgtccattgtcatgcaatgtttttttttttccattctttttccctgtaattttggaatttctggtcctgggaagaatcaaacaaaatcttaagttctatgagaacttggttcattgacatattctgctgaagaaagaaaaattaaattggtagtaaaatatagtcttcaagtatacgtttgagagtgcttttttttgtattagttctgctgtcacttcatttcctgtattatatgtgatgtttttccccattaaaataccagagataatggagatattttgcactttagccttgatgaaaagtacaagatatgttcaaagcttccctaatttttttcttatttgtagccacataagtttcaagaataacatggcacacagaacaatggaaaaaagtttgtttccattggaaaattatatcattttgggttgccacatcagtttataaatttggcgctcttttaattacactctgtagaaggttaatagagcttgagccctgctttaatatgtagtgaaagataattctgtagaaaaacgtcagccagtagggtaaagtcattctactgttcttaatttttatattgaggaacaatattgggtgtttgggagccagaaagctttgttgacagatcagaaataagattgacttgggtgttatatttcatctctctccagactctaggtatatttccaactttatatatcacagtatttaaaaagacatgtttgcattgagaaattaaccctaaagggttttcaatagggtgtagacctccagtacctttgtaactaaagtctgtctagtcattgtaaatatttatctgtcagttttgacagattggggccagcttgatgttttaaatcttcagcccggtatgaaaacttaaaggtatatattcaattttttaccattttatggaaaatatttaaaatctgtttttacagggtttttttttttttttttttttttttgtaatctgtgccatgaaatttgaaaaccaccaaaaatcaagggaacttttatatattcaattccttttctggtgtaatgttaaagttgtatagattattaatgcatgcccactgaatataaccctggttttgtgataaaactgcttagattttgttgatgacattagattagtagttgcattaaataactaaattcccattgtgattaattgaaattttgtctttaagcagagagttatttgtgactataagctttgtgcttagagaatgtatgtgtttttatctgtcagtatgggaggatataaactgcatcattagtgaaattattggttgtgtaatcctttgtgaaatataattctaggtatttgatagggtattgagtgtattttgtgtgtgtgtggatgtgtgttttggggtacggggagaggcgatgctattggccatcactaccaaccagggtttcaaaaagtattacctaagtaatttcttttatcactatctcaactgaggaagaaaaggctcaccacaagtggtgtgaaggctttgggtacttagttctaaatttttttatggtaacatatacatagccacatttacagttttaaccattttaaggcatgtaattcagtggggttaggtacattcacaatgttgtgtaatgatcaccgctgtctacttgtaaaactttttcatcaccccaaacagaaactctgtgtgcaattaaagtaatgcatttctcttcttcttaacccct

SEQ ID NO: 425818 - DNA, 1999 bp, Homo sapiens
cgcgcctccgcccctcgctcgctcgctccttcccgccctccccgcagcgccggccgagccggcttcccctcagtctctcatgaatattgagcggcccctgttgtatttcccgagctccattgcggaagctgaggctcgccatattgtgcggcggcgccggcgtccgcggcagctgataccagagtcttgctccggccgcggccagcggagccctgggctggggcaggagccgcaatgtctcaggctgtgcagacaaacggaactcaaccattaagcaaaacatgggaactcagtttatatgagttacaacgaacacctcaggaggcaataacagatggcttagaaattgtggtttcacctcgaagtctacacagtgaattaatgtgcccaatttgtttggatatgttgaagaacaccatgactacaaaggagtgtttacatcgtttttgtgcagactgcatcatcacagcccttagaagtggcaacaaagaatgtcctacctgtcggaaaaaactagtttccaaaagatcactaaggccagacccaaactttgatgcactcatcagcaaaatttatccaagtcgtgatgagtatgaagctcatcaagagagagtattagccaggatcaacaagcacaataatcagcaagcactcagtcacagcattgaggaaggactgaagatacaggccatgaacagactgcagcgaggcaagaaacaacagattgaaaatggtagtggagcagaagataatggtgacagttcacactgcagtaatgcatccacacatagcaatcaggaagcaggccctagtaacaaacggaccaaaacatctgatgattctgggctagagcttgataataacaatgcagcaatggcaattgatccagtaatggatggtgctagtgaaattgaattagtattcaggcctcatcccacacttatggaaaaagatgacagtgcacagacgagatacataaagacttctggtaacgccactgttgatcacttatccaagtatctggctgtgaggttagctttagaagaacttcgaagcaaaggtgaatcaaaccagatgaaccttgatacagccagtgagaagcagtataccatttatatagcaacagccagtggccagttcactgtattaaatggctctttttctttggaattggtcagtgagaaatactggaaagtgaacaaacccatggaactttattacgcacctacaaaggagcacaaatgagcctttaaaaaccaattctgagactgaacttttttatagcctatttctttaatattaaagatgtactggcattacttttatggacagatcttggatatgttgttcaattttctttctgagccagactagtttacgctattcaaatcttttcccctttatttaagatttcctttttggaagggactgcaattattcagtatttttttctttcctttaaaaaaatatatctgaagtttcttgtgtttttttttttccccacaaagtgtgtttccacttggagcaccattttgacccaggaatttttcatagtttctgtattcttataagattcagttggctgtccttttcctgctcccctcaaaagatttttagtcatacagaatgttaaatattatgtattctgactttttttttcccccggagtcttgtatatttatagttttctatataaactgtagtatcttcatgaagacccaaggctcaaatttactgtccttaaaaacaattctcataggattattcttttcatggtattttcttccataatatctcattttaaaaagaagttctttatgaacttagtgtccattgtcatgcaatgtttttttttttccattctttttccctgtaattttggaatttctggtcctgggaagaatcaaacaaaatcttaagttctatgagaacttggttcattgacatattctgctgaagaaagaaaaattaaattggtagtaaaatatagtcttcaagt

SEQ ID NO: 425819 - DNA, 388 bp, Homo sapiens
ttgcctgtgagcaagagagattttttagacctttcaggaacatgtgggaaacaatatcatccaactcagagtaaattcagttaccagtattttttggaattctaaagttcagtagcaaacatgcttcagatttgttgctttaaaggcctaaaagtaaattttatgcatccttttttcccccttgactagactgcagcgaggcaagaaacaacagattgaaaatggtagtggagcagaagataatggtgacagttcacactgcagtaatgcatccacacatagcaatcaggaagcaggccctagtaacaaacggaccaaataattcaagcactgcttattacaattttactgggcaggcacggtggttcacacctgtaaacccaacaca

SEQ ID NO: 425820 - DNA, 3516 bp, Homo sapiens
tgtctgcatcgtgggggtggggtagggggcactttgtgcagatatcgctccttccttctggggggtcggagtcggggttccagtgtagaggagctcctcgacctcggggttcctcggggagaccccttcagcttcacacattcctggagtgccgcctcctgctctggagtatctgttgctgctttctaaaacccaatgtctcaggctgtgcagacaaacggaactcaaccattaagcaaaacatgggaactcagtttatatgagttacaacgaacacctcaggaggcaataacagatggcttagaaattgtggtttcacctcgaagtctacacagtgaattaatgtgcccaatttgtttggatatgttgaagaacaccatgactacaaaggagtgtttacatcgtttttgtgcagactgcatcatcacagcccttagaagtggcaacaaagaatgtcctacctgtcggaaaaaactagtttccaaaagatcactaaggccagacccaaactttgatgcactcatcagcaaaatttatccaagtcgtgatgagtatgaagctcatcaagagagagtattagccaggatcaacaagcacaataatcagcaagcactcagtcacagcattgaggaaggactgaagatacaggccatgaacagactgcagcgaggcaagaaacaacagattgaaaatggtagtggagcagaagataatggtgacagttcacactgcagtaatgcatccacacatagcaatcaggaagcaggccctagtaacaaacggaccaaaacatctgatgattctgggctagagcttgataataacaatgcagcaatggcaattgatccagtaatggatggtgctagtgaaattgaattagtattcaggcctcatcccacacttatggaaaaagatgacagtgcacagacgagatacataaagacttctggtaacgccactgttgatcacttatccaagtatctggctgtgaggttagctttagaagaacttcgaagcaaaggtgaatcaaaccagatgaaccttgatacagccagtgagaagcagtataccatttatatagcaacagccagtggccagttcactgtattaaatggctctttttctttggaattggtcagtgagaaatactggaaagtgaacaaacccatggaactttattacgcacctacaaaggagcacaaatgagcctttaaaaaccaattctgagactgaacttttttatagcctatttctttaatattaaagatgtactggcattacttttatggacagatcttggatatgttgttcaattttctttctgagccagactagtttacgctattcaaatcttttcccctttatttaagatttcctttttggaagggactgcaattattcagtatttttttctttcctttaaaaaaatatatctgaagtttcttgtgtttttttttttccccacaaagtgtgtttccacttggagcaccattttgacccaggaatttttcatagtttctgtattcttataagattcagttggctgtccttttcctgctcccctcaaaagatttttagtcatacagaatgttaaatattatgtattctgactttttttttcccccggagtcttgtatatttatagttttctatataaactgtagtatcttcatgaagacccaaggctcaaatttactgtccttaaaaacaattctcataggattattcttttcatggtattttcttccataatatctcattttaaaaagaagttctttatgaacttagtgtccattgtcatgcaatgtttttttttttccattctttttccctgtaattttggaatttctggtcctgggaagaatcaaacaaaatcttaagttctatgagaacttggttcattgacatattctgctgaagaaagaaaaattaaattggtagtaaaatatagtcttcaagtatacgtttgagagtgcttttttttgtattagttctgctgtcacttcatttcctgtattatatgtgatgtttttccccattaaaataccagagataatggagatattttgcactttagccttgatgaaaagtacaagatatgttcaaagcttccctaatttttttcttatttgtagccacataagtttcaagaataacatggcacacagaacaatggaaaaaagtttgtttccattggaaaattatatcattttgggttgccacatcagtttataaatttggcgctcttttaattacactctgtagaaggttaatagagcttgagccctgctttaatatgtagtgaaagataattctgtagaaaaacgtcagccagtagggtaaagtcattctactgttcttaatttttatattgaggaacaatattgggtgtttgggagccagaaagctttgttgacagatcagaaataagattgacttgggtgttatatttcatctctctccagactctaggtatatttccaactttatatatcacagtatttaaaaagacatgtttgcattgagaaattaaccctaaagggttttcaatagggtgtagacctccagtacctttgtaactaaagtctgtctagtcattgtaaatatttatctgtcagttttgacagattggggccagcttgatgttttaaatcttcagcccggtatgaaaacttaaaggtatatattcaattttttaccattttatggaaaatatttaaaatctgtttttacagggtttttttttttttttttttttttttgtaatctgtgccatgaaatttgaaaaccaccaaaaatcaagggaacttttatatattcaattccttttctggtgtaatgttaaagttgtatagattattaatgcatgcccactgaatataaccctggttttgtgataaaactgcttagattttgttgatgacattagattagtagttgcattaaataactaaattcccattgtgattaattgaaattttgtctttaagcagagagttatttgtgactataagctttgtgcttagagaatgtatgtgtttttatctgtcagtatgggaggatataaactgcatcattagtgaaattattggttgtgtaatcctttgtgaaatataattctaggtatttgatagggtattgagtgtattttgtgtgtgtgtggatgtgtgttttggggtacggggagaggcgatgctattggccatcactaccaaccagggtttcaaaaagtattacctaagtaatttcttttatcactatctcaactgaggaagaaaaggctcaccacaagtggtgtgaaggctttgggtacttagttctaaatttttttatggtaacatatacatagccacatttacagttttaaccattttaaggcatgtaattcagtggggttaggtacattcacaatgttgtgtaatgatcaccgctgtctacttgtaaaactttttcatcaccccaaacagaaactctgtgtgcaattaaagtaatgcatttctcttcttcttaacccct

SEQ ID NO: 425821 - DNA, 576 bp, Homo sapiens
actgttgatcacttatccaagtatctggctgtgaggttagctttagaagaacttcgaagcaaaggtgaatcaaaccagatgaaccttgatacagccagtgagaagcagtataccatttatatagcaacagccagtggccagttcactgtgagtatttaaaataatagactgttgaaactgggagcacactgaccaactaactgagtggcaagtggtggggtagaatctaataaataatgtaaaaaaccgtaacagtgttaagtgacaagtagttattcctaagatttgaaaaaaaaagattctgtggacttccattttagtttcatttcattattattgtggtttgtgcagttttcataattttttctttcttttttgttttaggtattaaatggctctttttctttggaattggtcagtgagaaatactggaaagtgaacaaacccatggaactttattacgcacctacaaaggagcacaaatgagcctttaaaaaccaattctgagactgaacttttttatagcctatttctttaatattaaagatgtactggcattacttttatggacagatc

SEQ ID NO: 425822 - DNA, 1833 bp, Homo sapiens
accacaaggggcggtccccggtgtcctgcgcgggggcgcggagggggcgggcgtcagttccgcggggggctgtcggggaaccatggctgccccgagagacaatgtcactttattattcaagttatactgcttggcagtgatgaccctgatggctgcagtctataccatagctttaagatacacaaggacatcagacaaagaactctacttttcaaccacagccgtgtgtatcacagaagttataaagttattgctaagtgtgggaattttagctaaagaaactggtagtctgggtagattcaaagcatctttaagagaaaatgtcttggggagccccaaggaactgttgaagttaagtgtgccatcgttagtgtatgctgttcagaacaacatggctttcctagctcttagcaatctggatgcagcagtgtaccaggtgacctaccagttgaagattccgtgtactgctttatgcactgttttaatgttaaaccggacactcagcaaattacagtgggtttcagtttttatgctgtgtgctggagttacgcttgtacagtggaaaccagcccaagctacaaaagtggtggtggaacaaaatccattattagggtttggcgctatagctattgctgtattgtgctcaggatttgcaggagtatattttgaaaaagttttaaagagttcagatacttctctttgggtgagaaacattcaaatgtatctatcagggattattgtgacattagctggcgtctacttgtcagatggagctgaaattaaagaaaaaggatttttctatggttacacatattatgtctggtttgtcatctttcttgcaagtgttggtggcctctacacttctgttgtggttaagtacacagacaacatcatgaaaggcttttctgcagcagcggccattgtcctttccaccattgcttcagtaatgctgtttggattacagataacactcacctttgccctgggtactcttcttgtatgtgtttccatatatctctatggattacccagacaagacactacatccatccaacaaggagaaacagcttcaaaggagagagttattggtgtgtgattttagcctcacgtgagactccttttaagactaaaccatttgcattaaactagagccttaagtcaatctcagaaggtagcataaacaaataaaaattaactgtatggcatgatcagtgcggttatgtggaaacaacaacaaacaaacgaagctatctgagtgaactgctaatacagaaacttaatgtagacctgtttggggtctactattgttttagaatgaaggaattgtattattgtgtgtatatataatttgtaaataaaaagtatggagatgatacggtgttaaaaaaaatcatggtaaggctacaatactcaagtaacaaggtttgggacaatgtctaagggttaaagtgccaaagccatttctgtactaactgttctcttgttccggtaccggggagaaggatgacccctccttattctccaattcatgtacagtattttgtcctagcagcataaagacctagctcttttcttacaagaggcagaaacaagacaggctagttcataaacaaactgtgtaacttctcaaaatgaatctatttcataactcggacaatttctgggtggtgactgagtacccctttagtgagtacccctttagtgctatatttgtgccattcattatctggttcatatttcttttctgttagatgatacacatttcttcaaaaaaatttctaatgtcacttttgtacttttttaaataaagtatgtttaactgttgggctctca

SEQ ID NO: 425823 - DNA, 1904 bp, Homo sapiens
accacaaggggcggtccccggtgtcctgcgcgggggcgcggagggggcgggcgtcagttccgcggggggctgtcggggaaccatggctgccccgagagacaatgtcactttattattcaagttatactgcttggcagtgatgaccctgatggctgcagtctataccatagctttaagatacacaaggacatcagacaaagaactctacttttcaaccacagccgtgtgtatcacagaagttataaagttattgctaagtgtgggaattttagctaaagaaactggtagtctgggtagattcaaagcatctttaagagaaaatgtcttggggagccccaaggaactgttgaagttaagtgtgccatcgttagtgtatgctgttcagaacaacatggctttcctagctcttagcaatctggatgcagcagtgtaccaggtgacctaccagttgaagattccgtgtactgctttatgcactgttttaatgttaaaccggacactcagcaaattacagtgggtttcagtttttatgctgtgtgctggagttacgcttgtacagtggaaaccagcccaagctacaaaagtggtggtggaacaaaatccattattagggtttggcgctatagctattgctgtattgtgctcaggatttgcaggagtatattttgaaaaagttttaaagagttcagatacttctctttgggtgagaaacattcaaatgtatctatcagggattattgtgacattagctggcgtctacttgtcagatggagctgaaattaaagaaaaaggatttttctatggttacacatattatgtctggtttgtcatctttcttgcaagtgttggtggcctctacacttctgttgtggttaagtacacagacaacatcatgaaaggcttttctgcagcagcggccattgtcctttccaccattgcttcagtaatgctgtttggattacagataacactcacctttgccctgggtactcttcttgtatgtgtttccatatatctctatggattacccagacaagacactacatccatccaacaaggagaaacagcttcaaaggagagagttattggtgtgtgattttagcctcacgtgagactccttttaagactaaaccatttgcattaaactagagccttaagtcaatctcagaaggtagcataaacaaataaaaattaactgtatggcatgatcagtgcggttatgtggaaacaacaacaaacaaacgaagctatctgagtgaactgctaatacagaaacttaatgtagacctgtttggggtctactattgttttagaatgaaggaattgtattattgtgtgtatatataatttgtaaataaaaagtatggagatgatacggtgttaaaaaaaatcatggtaaggctacaatactcaagtaacaaggtttgggacaatgtctaagggttaaagtgccaaagccatttctgtactaactgttctcttgttccggtaccggggagaaggatgacccctccttattctccaattcatgtacagtattttgtcctagcagcataaagacctagctcttttcttacaagaggcagaaacaagacaggctagttcataaacaaactgtgtaacttctcaaaatgaatctatttcataactcggacaatttctgggtggtgactgagtacccctttagtgagtacccctttagtgctatatttgtgccattcattatctggttcatatttcttttctgttagatgatacacatttcttcaaaaaaatttctaatgtcacttttgtacttttttaaataaagtatgtttaactgttgggctctcaataatttgtgaaatttcagtgttttctataatgttaatggggaaattcagcaataaactttatttgtaaga

SEQ ID NO: 425824 - DNA, 1298 bp, Homo sapiens
tcccaccaggccccacctccaacattgaggattacaattcaacatcacatctgggcagggacaaatacccactttatatcagaaggcatcaacaatgtcactttattattcaagttatactgcttggcagtgatgaccctgatggctgcagtctataccatagctttaagatacacaaggacatcagacaaagaactctacttttcaaccacagccgtgtgtatcacagaagttataaagttattgctaagtgtgggaattttagctaaagaaactggtagtctgggtagattcaaagcatctttaagagaaaatgtcttggggagccccaaggaactgttgaagttaagtgtgccatcgttagtgtatgctgttcagaacaacatggctttcctagctcttagcaatctggatgcagcagtgtaccaggtgacctaccagttgaagattccgtgtactgctttatgcactgttttaatgttaaaccggacactcagcaaattacagtgggtttcagtttttatgctgtgtgctggagttacgcttgtacagtggaaaccagcccaagctacaaaagtggtggagtatattttgaaaaagttttaaagagttcagatacttctctttgggtgagaaacattcaaatgtatctatcagggattattgtgacattagctggcgtctacttgtcagatggagctgaaattaaagaaaaaggatttttctatggttacacatattatgtctggtttgtcatctttcttgcaagtgttggtggcctctacacttctgttgtggttaagtacacagacaacatcatgaaaggcttttctgcagcagcggccattgtcctttccaccattgcttcagtaatgctgtttggattacagataacactcacctttgccctgggtactcttcttgtatgtgtttccatatatctctatggattacccagacaagacactacatccatccaacaaggagaaacagcttcaaaggagagagttattggtgtgtgattttagcctcacgtgagactccttttaagactaaaccatttgcattaaactagagccttaagtcaatctcagaaggtagcataaacaaataaaaattaactgtatggcatgatcagtgcggttatgtggaaacaacaacaaacaaacgaagctatctgagtgaactgctaatacagaaacttaatgtagacctgtttggggtctactattgttttagaatgaaggaattgtattattgtgtgtatatataatttgtaaataaaaagtatggagatg

SEQ ID NO: 425825 - DNA, 795 bp, Homo sapiens
accacaaggggcggtccccggtgtcctgcgcgggggcgcggagggggcgggcgtcagttccgcggggggctgtcggggaaccatggctgccccgagagacaatgtcactttattattcaagttatactgcttggcagtgatgaccctgatggctgcagtctataccatagctttaagatacacaaggacatcagacaaagaactctacttttcaaccacagccgtgtgtatcacagaagttataaagttattgctaagtgtgggaattttagctaagtcaaagttcctgtcttattaattaagcattttcttggaggtagaatgttctacagcaaataaataggcacagagaaactggtagtctgggtagattcaaagcatctttaagagaaaatgtcttggggagccccaaggaactgttgaagttaagtgtgccatcgttagtgtatgctgttcagaacaacatggctttcctagctcttagcaatctggatgcagcagtgtaccaggtgacctaccagttgaagattccgtgtactgctttatgcactgttttaatgttaaaccggacactcagcaaattacagtgggtttcagtttttatgctgtgtgctggagttacgcttgtacagtggaaaccagcccaagctacaaaagtggtggtggaacaaaatccattattagggtttggcgctatagctattgctgtattgtgctcaggatttgcaggttaggagctatggagtaggatcatgaggtgggtcgagagtaccttagaaaacataatacataaag

SEQ ID NO: 425826 - DNA, 871 bp, Homo sapiens
accacaaggggcggtccccggtgtcctgcgcgggggcgcggagggggcgggcgtcagttccgcggggggctgtcggggaaccatggctgccccgagagaaaaatttgctgatccctgtttaaccttgagcctaaagatttgaatggagacaatgtcactttattattcaagttatactgcttggcagtgatgaccctgatggctgcagtctataccatagctttaagatacacaaggacatcagacaaagaactctacttttcaaccacagccgtgtgtatcacagaagttataaagttattgctaagtgtgggaattttagctaagtcaaagttcctgtcttattaattaagcattttcttggaggtagaatgttctacagcaaataaataggcacagagaaactggtagtctgggtagattcaaagcatctttaagagaaaatgtcttggggagccccaaggaactgttgaagttaagtgtgccatcgttagtgtatgctgttcagaacaacatggctttcctagctcttagcaatctggatgcagcagtgtaccaggtgacctaccagttgaagattccgtgtactgctttatgcactgttttaatgttaaaccggacactcagcaaattacagtgggtttcagtttttatgctgtgtgctggagttacgcttgtacagtggaaaccagcccaagctacaaaagtggtggtggaacaaaatccattattagggtttggcgctatagctattgctgtattgtgctcaggatttgcagagtatatccgaaaaagttacagagttcagatacttctcttggattgtattctctctggatccaagtcctgtaagtgttcggggctctacact

SEQ ID NO: 425827 - DNA, 2437 bp, Homo sapiens
accacaaggggcggtccccggtgtcctgcgcgggggcgcggagggggcgggcgtcagttccgcggggggctgtcggggaaccatggctgccccgagagacaatgtcactttattattcaagttatactgcttggcagtgatgaccctgatggctgcagtctataccatagctttaagatacacaaggacatcagacaaagaactctacttttcaaccacagccgtgtgtatcacagaagttataaagttattgctaagtgtgggaattttagctaaagaaactggtagtctgggtagattcaaagcatctttaagagaaaatgtcttggggagccccaaggaactgttgaagttaagtgtgccatcgttagtgtatgctgttcagaacaacatggctttcctagctcttagcaatctggatgcagcagtgtaccaggtgacctaccagttgaagattccgtgtactgctttatgcactgttttaatgttaaaccggacactcagcaaattacagtgggtttcagtttttatgctgtgtgctggagttacgcttgtacagtggaaaccagcccaagctacaaaagtggtggtggaacaaaatccattattagggtttggcgctatagctattgctgtattgtgctcaggatttgcaggagtatattttgaaaaagttttaaagagttcagatacttctctttgggtgagaaacattcaaatgtatctatcagggattattgtgacattagctggcgtctacttgtcagatggagctgaaattaaagaaaaaggatttttctatggttacacatattatgtctggtttgtcatctttcttgcaagtgttggtggcctctacacttctgttgtggttaagtacacagacaacatcatgaaaggcttttctgcagcagcggccattgtcctttccaccattgcttcagtaatgctgtttggattacagataacactcacctttgccctgggtactcttcttgtatgtgtttccatatatctctatggattacccagacaagacactacatccatccaacaaggagaaacagcttcaaaggagagagttattggtgtgtgattttagcctcacgtgagactccttttaagactaaaccatttgcattaaactagagccttaagtcaatctcagaaggtagcataaacaaataaaaattaactgtatggcatgatcagtgcggttatgtggaaacaacaacaaacaaacgaagctatctgagtgaactgctaatacagaaacttaatgtagacctgtttggggtctactattgttttagaatgaaggaattgtattattgtgtgtatatataatttgtaaataaaaagtatggagatgatacggtgttaaaaaaaatcatggtaaggctacaatactcaagtaacaaggtttgggacaatgtctaagggttaaagtgccaaagccatttctgtactaactgttctcttgttccggtaccggggagaaggatgacccctccttattctccaattcatgtacagtattttgtcctagcagcataaagacctagctcttttcttacaagaggcagaaacaagacaggctagttcataaacaaactgtgtaacttctcaaaatgaatctatttcataactcggacaatttctgggtggtgactgagtacccctttagtgagtacccctttagtgctatatttgtgccattcattatctggttcatatttcttttctgttagatgatacacatttcttcaaaaaaatttctaatgtcacttttgtacttttttaaataaagtatgtttaactgttgggctctcaataatttgtgaaatttcagtgttttctataatgttaatggggaaattcagcaataaactttatttgtaagaaaaattgtttaatcactttatattatagatatgaccattaagataatgcacttttattttctatatgtagaaatgcacttttattttctatatgtggaagtctatcggttagggttctctggctgcaaatcaactcaactctggcaagccttaagcaaaaaagaaagaatttttaagaaggtccacaatcagggctacaggcgtctaggttctaagaattaatggacagttgtcttttcagcttttgtaaagatctggctttacctattactgttcctgtatggtttcactcacgattcaaatactcgggaagacactactgatcttggaaggggaaagtttcttcaaacaagtagagagggatattggatgtgtaaaacatgtccctactttatatttttatcccatggctggtttatgctaagaaaaatgtgacactactttaagtcgaaaattagctatctgggagctaattcacttaaattggaactgcaaggctgaatcttttctaggactaagaaggtaagccatag

SEQ ID NO: 425828 - DNA, 2000 bp, Homo sapiens
accacaaggggcggtccccggtgtcctgcgcgggggcgcggagggggcgggcgtcagttccgcggggggctgtcggggaaccatggctgccccgagagacaatgtcactttattattcaagttatactgcttggcagtgatgaccctgatggctgcagtctataccatagctttaagatacacaaggacatcagacaaagaactctacttttcaaccacagccgtgtgtatcacagaagttataaagttattgctaagtgtgggaattttagctaaagaaactggtagtctgggtagattcaaagcatctttaagagaaaatgtcttggggagccccaaggaactgttgaagttaagtgtgccatcgttagtgtatgctgttcagaacaacatggctttcctagctcttagcaatctggatgcagcagtgtaccaggtgacctaccagttgaagattccgtgtactgctttatgcactgttttaatgttaaaccggacactcagcaaattacagtgggtttcagtttttatgctgtgtgctggagttacgcttgtacagtggaaaccagcccaagctacaaaagtggtggtggaacaaaatccattattagggtttggcgctatagctattgctgtattgtgctcaggatttgcaggagtatattttgaaaaagttttaaagagttcagatacttctctttgggtgagaaacattcaaatgtatctatcagggattattgtgacattagctggcgtctacttgtcagatggagctgaaattaaagaaaaaggatttttctatggttacacatattatgtctggtttgtcatctgtaaagtatggcatctctggggatgaaaattgcctcaccattatgtaatgtttcatttatttgagtgataagattttatttctctctgtatacaagttcttgcaagtgttggtggcctctacacttctgttgtggttaagtacacagacaacatcatgaaaggcttttctgcagcagcggccattgtcctttccaccattgcttcagtaatgctgtttggattacagataacactcacctttgccctgggtactcttcttgtatgtgtttccatatatctctatggattacccagacaagacactacatccatccaacaaggagaaacagcttcaaaggagagagttattggtgtgtgattttagcctcacgtgagactccttttaagactaaaccatttgcattaaactagagccttaagtcaatctcagaaggtagcataaacaaataaaaattaactgtatggcatgatcagtgcggttatgtggaaacaacaacaaacaaacgaagctatctgagtgaactgctaatacagaaacttaatgtagacctgtttggggtctactattgttttagaatgaaggaattgtattattgtgtgtatatataatttgtaaataaaaagtatggagatgatacggtgttaaaaaaaatcatggtaaggctacaatactcaagtaacaaggtttgggacaatgtctaagggttaaagtgccaaagccatttctgtactaactgttctcttgttccggtaccggggagaaggatgacccctccttattctccaattcatgtacagtattttgtcctagcagcataaagacctagctcttttcttacaagaggcagaaacaagacaggctagttcataaacaaactgtgtaacttctcaaaatgaatctatttcataactcggacaatttctgggtggtgactgagtacccctttagtgagtacccctttagtgctatatttgtgccattcattatctggttcatatttcttttctgttagatgatacacatttcttcaaaaaaatttctaatgtcacttttgtacttttttaaataaagtatgtttaactgttgggctctcaataatttgtgaaatttcagtgttttctataatgttaatggggaaattcagcaataaactttatttgtaaga

SEQ ID NO: 425829 - DNA, 2440 bp, Homo sapiens
atcgttgatgtagcactccagctcccctttccaatgaagctattctgcagagtcctaggttcctactgttgtgatgagagattggtctcgtctacagtgcctttctgtatgtgagccaaatagtagatgagagatgctgacaaacattatataaaaccaattacaaaatgtgaaagtagcacacagacgaatacacacatactgccaccaacgattgtgagatcatatgagtggaatgaatgggaattaagaagaaaagctataaaattggctaatttgcgccagaaagttactcactcagtacaaactgatcttagtcacttgagaagagaaaattgttcccaagtgtaccctccaaaggacactagcacccagtccatgagggaagacagcactggggtgcccaggcctcagatttacttggctggtcttcgtggaggaaagagcgaaatcaccgatgaggtcaaggtgaacttaactagagatgtggatgaaacctaattacagacaacgttttaaaatagatgctactcaattatgaacaatagcaagtacttaaagacaatgtcactttattattcaagttatactgcttggcagtgatgaccctgatggctgcagtctataccatagctttaagatacacaaggacatcagacaaagaactctacttttcaaccacagccgtgtgtatcacagaagttataaagttattgctaagtgtgggaattttagctaagtcaaagttcctgtcttattaattaagcattttcttggaggtagaatgttctacagcaaataaataggcacagagaaactggtagtctgggtagattcaaagcatctttaagagaaaatgtcttggggagccccaaggaactgttgaagttaagtgtgccatcgttagtgtatgctgttcagaacaacatggctttcctagctcttagcaatctggatgcagcagtgtaccaggtgacctaccagttgaagattccgtgtactgctttatgcactgttttaatgttaaaccggacactcagcaaattacagtgggtttcagtttttatgctgtgtgctggagttacgcttgtacagtggaaaccagcccaagctacaaaagtggtggtggaacaaaatccattattagggtttggcgctatagctattgctgtattgtgctcaggatttgcaggagtatattttgaaaaagttttaaagagttcagatacttctctttgggtgagaaacattcaaatgtatctatcagggattattgtgacattagctggcgtctacttgtcagatggagctgaaattaaagaaaaaggatttttctatggttacacatattatgtctggtttgtcatctttcttgcaagtgttggtggcctctacacttctgttgtggttaagtacacagacaacatcatgaaaggcttttctgcagcagcggccattgtcctttccaccattgcttcagtaatgctgtttggattacagataacactcacctttgccctgggtactcttcttgtatgtgtttccatatatctctatggattacccagacaagacactacatccatccaacaaggagaaacagcttcaaaggagagagttattggtgtgtgattttagcctcacgtgagactccttttaagactaaaccatttgcattaaactagagccttaagtcaatctcagaaggtagcataaacaaataaaaattaactgtatggcatgatcagtgcggttatgtggaaacaacaacaaacaaacgaagctatctgagtgaactgctaatacagaaacttaatgtagacctgtttggggtctactattgttttagaatgaaggaattgtattattgtgtgtatatataatttgtaaataaaaagtatggagatgatacggtgttaaaaaaaatcatggtaaggctacaatactcaagtaacaaggtttgggacaatgtctaagggttaaagtgccaaagccatttctgtactaactgttctcttgttccggtaccggggagaaggatgacccctccttattctccaattcatgtacagtattttgtcctagcagcataaagacctagctcttttcttacaagaggcagaaacaagacaggctagttcataaacaaactgtgtaacttctcaaaatgaatctatttcataactcggacaatttctgggtggtgactgagtacccctttagtgagtacccctttagtgctatatttgtgccattcattatctggttcatatttcttttctgttagatgatacacatttcttcaaaaaaatttctaatgtcacttttgtacttttttaaataaagtatgtttaactgttgggctctcaataatttgtgaaatttcagtgttttctataatgttaatggggaaattcagcaataaactttatttgtaaga

SEQ ID NO: 425830 - DNA, 1949 bp, Homo sapiens
accacaaggggcggtccccggtgtcctgcgcgggggcgcggagggggcgggcgtcagttccgcggggggctgtcggggaaccatggctgccccgagagacaatgtcactttattattcaagttatactgcttggcagtgatgaccctgatggctgcagtctataccatagctttaagatacacaaggacatcagacaaagaactctacttttcaaccacagccgtgtgtatcacagaagttataaagttattgctaagtgtgggaattttagctaagaaaaacagatttgggggaaaaagatatcaacagtttgattttggagaaactggtagtctgggtagattcaaagcatctttaagagaaaatgtcttggggagccccaaggaactgttgaagttaagtgtgccatcgttagtgtatgctgttcagaacaacatggctttcctagctcttagcaatctggatgcagcagtgtaccaggtgacctaccagttgaagattccgtgtactgctttatgcactgttttaatgttaaaccggacactcagcaaattacagtgggtttcagtttttatgctgtgtgctggagttacgcttgtacagtggaaaccagcccaagctacaaaagtggtggtggaacaaaatccattattagggtttggcgctatagctattgctgtattgtgctcaggatttgcaggagtatattttgaaaaagttttaaagagttcagatacttctctttgggtgagaaacattcaaatgtatctatcagggattattgtgacattagctggcgtctacttgtcagatggagctgaaattaaagaaaaaggatttttctatggttacacatattatgtctggtttgtcatctttcttgcaagtgttggtggcctctacacttctgttgtggttaagtacacagacaacatcatgaaaggcttttctgcagcagcggccattgtcctttccaccattgcttcagtaatgctgtttggattacagataacactcacctttgccctgggtactcttcttgtatgtgtttccatatatctctatggattacccagacaagacactacatccatccaacaaggagaaacagcttcaaaggagagagttattggtgtgtgattttagcctcacgtgagactccttttaagactaaaccatttgcattaaactagagccttaagtcaatctcagaaggtagcataaacaaataaaaattaactgtatggcatgatcagtgcggttatgtggaaacaacaacaaacaaacgaagctatctgagtgaactgctaatacagaaacttaatgtagacctgtttggggtctactattgttttagaatgaaggaattgtattattgtgtgtatatataatttgtaaataaaaagtatggagatgatacggtgttaaaaaaaatcatggtaaggctacaatactcaagtaacaaggtttgggacaatgtctaagggttaaagtgccaaagccatttctgtactaactgttctcttgttccggtaccggggagaaggatgacccctccttattctccaattcatgtacagtattttgtcctagcagcataaagacctagctcttttcttacaagaggcagaaacaagacaggctagttcataaacaaactgtgtaacttctcaaaatgaatctatttcataactcggacaatttctgggtggtgactgagtacccctttagtgagtacccctttagtgctatatttgtgccattcattatctggttcatatttcttttctgttagatgatacacatttcttcaaaaaaatttctaatgtcacttttgtacttttttaaataaagtatgtttaactgttgggctctcaataatttgtgaaatttcagtgttttctataatgttaatggggaaattcagcaataaactttatttgtaaga

SEQ ID NO: 425831 - DNA, 1372 bp, Homo sapiens
accacaaggggcggtccccggtgtcctgcgcgggggcgcggagggggcgggcgtcagttccgcggggggctgtcggggaaccatggctgccccgagagacaatgtcactttattattcaagttatactgcttggcagtgatgaccctgatggctgcagtctataccatagctttaagatacacaaggacatcagacaaagaactctacttttcaaccacagccgtgtgtatcacagaagttataaagttattgctaagtgtgggaattttagctaaagaaactggtagtctgggtagattcaaagcatctttaagagaaaatgtcttggggagccccaaggaactgttgaagttaagtgtgccatcgttagtgtatgctgttcagaacaacatggctttcctagctcttagcaatctggatgcagcagtgtaccaggtgacctaccagttgaagattccgtgtactgctttatgcactgttttaatgttaaaccggacactcagcaaattacagtgggtttcagtttttatgctgtgtgctggagttacgcttgtacagtggaaaccagcccaagctacaaaagtggtggtggaacaaaatccattattagggtttggcgctatagctattgctgtattgtgctcaggatttgcaggagtatattttgaaaaagttttaaagagttcagatacttctctttgggtgagaaacattcaaatgtatctatcagggattattgtgacattagctggcgtctacttgtcagatggagctgaaattaaagaaaaaggatttttctatggttacacatattatgtctggtttgtcatctttcttgcaagtgttggtggcctctacacttctgttgtggttaagtacacagacaacatcatgaaaggcttttctgcagcagcggccattgtcctttccaccattgcttcagtaatgctgtttggattacagataacactcacctttgccctgggtactcttcttgtatgtgtttccatatatctctatggattacccagacaagacactacatccatccaacaaggagaaacagcttcaaaggagagagttattggtgtgtgattttagcctcacgtgagactccttttaagactaaaccatttgcattaaactagagccttaagtcaatctcagaaggtagcataaacaaataaaaattaactgtatggcatgatcagtgcggttatgtggaaacaacaacaaacaaacgaagctatctgagtgaactgctaatacagaaacttaatgtagacctgtttggggtctactattgttttagaatgaaggaattgtattattgtgtgtatatataatttgtaaataaaaagtatggagatg

SEQ ID NO: 425832 - DNA, 2010 bp, Homo sapiens
accacaaggggcggtccccggtgtcctgcgcgggggcgcggagggggcgggcgtcagttccgcggggggctgtcggggaaccatggctgccccgagaggtgacctaccagttgaagattccgtgtactgctttatgcactgttttaatgttaaaccggacactcagcaaattacagtgggtttcagtttttatgctgtgtgctggagttacgcttgtacagtggaaaccagcccaagctacaaaagtggtggtggaacaaaatccattattagggtttggcgctatagctattgctgtattgtgctcaggatttgcaggagtatattttgaaaaagttttaaagagttcagatacttctctttgggtgagaaacattcaaatgtatctatcagggattattgtgacattagctggcgtctacttgtcagatggagctgaaattaaagaaaaaggatttttctatggttacacatattatgtctggtttgtcatctgtaagtatccaggaattaaaggttcttagtagatcctttattttttttttaagttagatgtccattttaagctgttataacattttgaaattaatcctttgatactgtaaataccagtttgaatataattttcattttgttgacttagttttgattgtgaaggcaaaattgctttgggatagcaatgccccaaaatatctaacattagcaaaaaatgtgtaaaatttaatagaccacatagccctctgggcattgttttggaaaaacagtgttatataggaactaccaattttagtacaaactctcagatggctccttctaaggaaaacagtattttccttttcctaggtaaagtatggcatctctggggatgaaaattgcctcaccattatgtaatgtttcatttatttgagtgataagattttatttctctctgtatacaagttcttgcaagtgttggtggcctctacacttctgttgtggttaagtacacagacaacatcatgaaaggcttttctgcagcagcggccattgtcctttccaccattgcttcagtaatgctgtttggattacagataacactcacctttgccctgggtactcttcttgtatgtgtttccatatatctctatggattacccagacaagacactacatccatccaacaaggagaaacagcttcaaaggagagagttattggtgtgtgattttagcctcacgtgagactccttttaagactaaaccatttgcattaaactagagccttaagtcaatctcagaaggtagcataaacaaataaaaattaactgtatggcatgatcagtgcggttatgtggaaacaacaacaaacaaacgaagctatctgagtgaactgctaatacagaaacttaatgtagacctgtttggggtctactattgttttagaatgaaggaattgtattattgtgtgtatatataatttgtaaataaaaagtatggagatgatacggtgttaaaaaaaatcatggtaaggctacaatactcaagtaacaaggtttgggacaatgtctaagggttaaagtgccaaagccatttctgtactaactgttctcttgttccggtaccggggagaaggatgacccctccttattctccaattcatgtacagtattttgtcctagcagcataaagacctagctcttttcttacaagaggcagaaacaagacaggctagttcataaacaaactgtgtaacttctcaaaatgaatctatttcataactcggacaatttctgggtggtgactgagtacccctttagtgagtacccctttagtgctatatttgtgccattcattatctggttcatatttcttttctgttagatgatacacatttcttcaaaaaaatttctaatgtcacttttgtacttttttaaataaagtatgtttaactgttgggctctcaataatttgtgaaatttcagtgttttctataatgttaatggggaaattcagcaataaactttatttgtaaga

SEQ ID NO: 425833 - DNA, 726 bp, Homo sapiens
atcgttgatgtagcactccagctcccctttccaatgaagctattctgcagagtcctaggttcctactgttgtgatgagagattggtctcgtctacagtgcctttctgtatgtgagccaaatagtagatgagagatgctgacaaacattatataaaaccaattacaaaatgtgaaagtagcacacagacgaatacacacatactgccaccaacgattgtgagatcatatgagtggaatgaatgggaattaagaagaaaagctataaaattggctaatttgcgccagaaagttactcactcagtacaaactgatcttagtcacttgagaagagaaaattgttcccaagtgtaccctccaaaggacactagcacccagtccatgagggaagacagcactggggtgcccaggcctcagatttacttggctggtcttcgtggaggaaagagcgaaatcaccgatgaggtcaaggtgaacttaactagagatgtggatgaaacctaattacagacaacgttttaaaatagatgctactcaattatgaacaatagcaagtacttaaaggtatattaacatctatacaaattaattttgtaggggtggcacattcattggttgtgtgactgtttattgggttcccatattttatcaaactgttttctgtaacacatttttcattctgttgaaattgaaaaataaaactgtccatttatcttttaaaaaaaaaaa

SEQ ID NO: 425834 - DNA, 1397 bp, Homo sapiens
atcgttgatgtagcactccagctcccctttccaatgaagctattctgcagagtcctaggttcctactgttgtgatgagagattggtctcgtctacagtgcctttctgtatgtgagccaaatagtagatgagagatgctgacaaacattatataaaaccaattacaaaatgtgaaagtagcacacagacgaatacacacatactgccaccaacgattgtgagatcatatgagtggaatgaatgggaattaagaagaaaagctataaaattggctaatttgcgccagaaagttactcactcagtacaaactgatcttagtcacttgagaagagaaaattgttcccaagtgtaccctccaaaggacactagcacccagtccatgagggaagacagcactggggtgcccaggcctcagatttacttggctggtcttcgtggaggaaagagcgaaatcaccgatgaggtcaaggtgaacttaactagagatgtggatgaaacctaattacagacaacgttttaaaatagatgctactcaattatgaacaatagcaagtacttaaagacaatgtcactttattattcaagttatactgcttggcagtgatgaccctgatggctgcagtctataccatagctttaagatacacaaggacatcagacaaagaactctacttttcaaccacagccgtgtgtatcacagaagttataaagttattgctaagtgtgggaattttagctaaagaaactggtagtctgggtagattcaaagcatctttaagagaaaatgtcttggggagccccaaggaactgttgaagttaagtgtgccatcgttagtgtatgctgttcagaacaacatggctttcctagctcttagcaatctggatgcagcagtgtaccaggtgacctaccagttgaagattccgtgtactgctttatgcactgttttaatgttaaaccggacactcagcaaattacagtgggtttcagtttttatgctgtgtgctggagttacgcttgtacagtggaaaccagcccaagctacaaaagtggtggtaagaaacaaaatgcacaccataacttcccataaatagaaaacttccttaagtcttatactgttcagttacattgatgcatgcagcatgactacatttctttgatttaaaataacttttgccttatagataggccttttttctttagcatattattagggataataatacttattggttgtttctcagaggagaatatgcataaaatatgttacagatggaacataccttagaaataatgtgttccatcccctccattttatggatgacagtccccaaagaggtgaaggaacttgtcctaaattagttaatagctaacttgtgaccacaactgtgccagtttcc

SEQ ID NO: 425835 - DNA, 1470 bp, Homo sapiens
atcgttgatgtagcactccagctcccctttccaatgaagctattctgcagagtcctaggttcctactgttgtgatgagagattggtctcgtctacagtgcctttctgtatgtgagccaaatagtagatgagagatgctgacaaacattatataaaaccaattacaaaatgtgaaagtagcacacagacgaatacacacatactgccaccaacgattgtgagatcatatgagtggaatgaatgggaattaagaagaaaagctataaaattggctaatttgcgccagaaagttactcactcagtacaaactgatcttagtcacttgagaagagaaaattgttcccaagtgtaccctccaaaggacactagcacccagtccatgagggaagacagcactggggtgcccaggcctcagatttacttggctggtcttcgtggaggaaagagcgaaatcaccgatgaggtcaaggtgaacttaactagagatgtggatgaaacctaattacagacaacgttttaaaatagatgctactcaattatgaacaatagcaagtacttaaagacaatgtcactttattattcaagttatactgcttggcagtgatgaccctgatggctgcagtctataccatagctttaagatacacaaggacatcagacaaagaactctacttttcaaccacagccgtgtgtatcacagaagttataaagttattgctaagtgtgggaattttagctaagtcaaagttcctgtcttattaattaagcattttcttggaggtagaatgttctacagcaaataaataggcacagagaaactggtagtctgggtagattcaaagcatctttaagagaaaatgtcttggggagccccaaggaactgttgaagttaagtgtgccatcgttagtgtatgctgttcagaacaacatggctttcctagctcttagcaatctggatgcagcagtgtaccaggtgacctaccagttgaagattccgtgtactgctttatgcactgttttaatgttaaaccggacactcagcaaattacagtgggtttcagtttttatgctgtgtgctggagttacgcttgtacagtggaaaccagcccaagctacaaaagtggtggtaagaaacaaaatgcacaccataacttcccataaatagaaaacttccttaagtcttatactgttcagttacattgatgcatgcagcatgactacatttctttgatttaaaataacttttgccttatagataggccttttttctttagcatattattagggataataatacttattggttgtttctcagaggagaatatgcataaaatatgttacagatggaacataccttagaaataatgtgttccatcccctccattttatggatgacagtccccaaagaggtgaaggaacttgtcctaaattagttaatagctaacttgtgaccacaactgtgccagtttcc

SEQ ID NO: 425836 - DNA, 503 bp, Homo sapiens
cagctttgacaggagtgaatccccaaggctaaacccaaatccttatttgccgcctactcacgcctttgtgaggactacgattcccagacggcaacgctcccttcactcaacttccttagctggcggggagacgcagtttacagaactacctccccaaccgaatttcacacacctgtcacctaggacgcggccgggaaggcctcccttcgatccgcgttctccccattttggggtgtagcttggattcctgagcccagttttagtgcgtggccgaccgggaggccggcgaggcgctctaggccgagcggcttcgtctctatgaccacaaggggcggtccccggtgtcctgcgcgggggcgcggagggggcgggcgtcagttccgcggggggctgtcggggaaccatggctgccccgagaggtgagaactgggtctgctgggagtggggagtccgcggggggcggcggcgggcgagcatctgcgctggtcagcccctgtcgggca

SEQ ID NO: 425837 - DNA, 756 bp, Homo sapiens
tgatgaaatagttaaagtagcaggggatgaatttttttataggtaatatcaacagttttcctaatctcattattcaatatactcagaatctctcagagctttgactagagatagtggtaaatctagttgttgtcatattttcccaaacagaactataattttttaaagaggatacattattggtatgtttcttttaatctaaaactagttagaaattattagtttgctaaattacagcaagcatagtatgcttgtcctgtgtttgaagaagtcttattaaaataatactctttaattttcttccttaccaccctctcatctcccccttttgttttcaaagagaaactggtagtctgggtagattcaaagcatctttaagagaaaatgtcttggggagccccaaggaactgttgaagttaagtgtgccatcgttagtgtatgctgttcagaacaacatggctttcctagctcttagcaatctggatgcagcagtgtaccaggtaagtggagttaatgataatgaaaagcacagaatcttttatggtaaaaagagtttttattaactctttatcatattatcaattttttttttttttttgagatggagtctcgctctttcgtctaggctggagtgcagtgacgtgatctcagctcactgcaatctccgccgcccaggttcaagcgattctcctgcctcagcctcccgcgtagctgggactataggcacatgccaccacacccagctaattttttgta

SEQ ID NO: 425838 - DNA, 2348 bp, Homo sapiens
accacaaggggcggtccccggtgtcctgcgcgggggcgcggagggggcgggcgtcagttccgcggggggctgtcggggaaccatggctgccccgagagacaatgtcactttattattcaagttatactgcttggcagtgatgaccctgatggctgcagtctataccatagctttaagatacacaaggacatcagacaaagaactctacttttcaaccacagccgtgtgtatcacagaagttataaagttattgctaagtgtgggaattttagctaaagaaactggtagtctgggtagattcaaagcatctttaagagaaaatgtcttggggagccccaaggaactgttgaagttaagtgtgccatcgttagtgtatgctgttcagaacaacatggctttcctagctcttagcaatctggatgcagcagtgtaccaggtgacctaccagttgaagattccgtgtactgctttatgcactgttttaatgttaaaccggacactcagcaaattacagtgggtttcagtttttatgctgtgtgctggagttacgcttgtacagtggaaaccagcccaagctacaaaagtggtggtggaacaaaatccattattagggtttggcgctatagctattgctgtattgtgctcaggatttgcaggagtatattttgaaaaagttttaaagagttcagatacttctctttgggtgagaaacattcaaatgtatctatcagggattattgtgacattagctggcgtctacttgtcagatggagctgaaattaaagaaaaaggatttttctatggttacacatattatgtctggtttgtcatctgtaagtatccaggaattaaaggttcttagtagatcctttattttttttttaagttagatgtccattttaagctgttataacattttgaaattaatcctttgatactgtaaataccagtttgaatataattttcattttgttgacttagttttgattgtgaaggcaaaattgctttgggatagcaatgccccaaaatatctaacattagcaaaaaatgtgtaaaatttaatagaccacatagccctctgggcattgttttggaaaaacagtgttatataggaactaccaattttagtacaaactctcagatggctccttctaaggaaaacagtattttccttttcctaggtaaagtatggcatctctggggatgaaaattgcctcaccattatgtaatgtttcatttatttgagtgataagattttatttctctctgtatacaagttcttgcaagtgttggtggcctctacacttctgttgtggttaagtacacagacaacatcatgaaaggcttttctgcagcagcggccattgtcctttccaccattgcttcagtaatgctgtttggattacagataacactcacctttgccctgggtactcttcttgtatgtgtttccatatatctctatggattacccagacaagacactacatccatccaacaaggagaaacagcttcaaaggagagagttattggtgtgtgattttagcctcacgtgagactccttttaagactaaaccatttgcattaaactagagccttaagtcaatctcagaaggtagcataaacaaataaaaattaactgtatggcatgatcagtgcggttatgtggaaacaacaacaaacaaacgaagctatctgagtgaactgctaatacagaaacttaatgtagacctgtttggggtctactattgttttagaatgaaggaattgtattattgtgtgtatatataatttgtaaataaaaagtatggagatgatacggtgttaaaaaaaatcatggtaaggctacaatactcaagtaacaaggtttgggacaatgtctaagggttaaagtgccaaagccatttctgtactaactgttctcttgttccggtaccggggagaaggatgacccctccttattctccaattcatgtacagtattttgtcctagcagcataaagacctagctcttttcttacaagaggcagaaacaagacaggctagttcataaacaaactgtgtaacttctcaaaatgaatctatttcataactcggacaatttctgggtggtgactgagtacccctttagtgagtacccctttagtgctatatttgtgccattcattatctggttcatatttcttttctgttagatgatacacatttcttcaaaaaaatttctaatgtcacttttgtacttttttaaataaagtatgtttaactgttgggctctcaataatttgtgaaatttcagtgttttctataatgttaatggggaaattcagcaataaactttatttgtaaga

SEQ ID NO: 425839 - DNA, 2367 bp, Homo sapiens
atcgttgatgtagcactccagctcccctttccaatgaagctattctgcagagtcctaggttcctactgttgtgatgagagattggtctcgtctacagtgcctttctgtatgtgagccaaatagtagatgagagatgctgacaaacattatataaaaccaattacaaaatgtgaaagtagcacacagacgaatacacacatactgccaccaacgattgtgagatcatatgagtggaatgaatgggaattaagaagaaaagctataaaattggctaatttgcgccagaaagttactcactcagtacaaactgatcttagtcacttgagaagagaaaattgttcccaagtgtaccctccaaaggacactagcacccagtccatgagggaagacagcactggggtgcccaggcctcagatttacttggctggtcttcgtggaggaaagagcgaaatcaccgatgaggtcaaggtgaacttaactagagatgtggatgaaacctaattacagacaacgttttaaaatagatgctactcaattatgaacaatagcaagtacttaaagacaatgtcactttattattcaagttatactgcttggcagtgatgaccctgatggctgcagtctataccatagctttaagatacacaaggacatcagacaaagaactctacttttcaaccacagccgtgtgtatcacagaagttataaagttattgctaagtgtgggaattttagctaaagaaactggtagtctgggtagattcaaagcatctttaagagaaaatgtcttggggagccccaaggaactgttgaagttaagtgtgccatcgttagtgtatgctgttcagaacaacatggctttcctagctcttagcaatctggatgcagcagtgtaccaggtgacctaccagttgaagattccgtgtactgctttatgcactgttttaatgttaaaccggacactcagcaaattacagtgggtttcagtttttatgctgtgtgctggagttacgcttgtacagtggaaaccagcccaagctacaaaagtggtggtggaacaaaatccattattagggtttggcgctatagctattgctgtattgtgctcaggatttgcaggagtatattttgaaaaagttttaaagagttcagatacttctctttgggtgagaaacattcaaatgtatctatcagggattattgtgacattagctggcgtctacttgtcagatggagctgaaattaaagaaaaaggatttttctatggttacacatattatgtctggtttgtcatctttcttgcaagtgttggtggcctctacacttctgttgtggttaagtacacagacaacatcatgaaaggcttttctgcagcagcggccattgtcctttccaccattgcttcagtaatgctgtttggattacagataacactcacctttgccctgggtactcttcttgtatgtgtttccatatatctctatggattacccagacaagacactacatccatccaacaaggagaaacagcttcaaaggagagagttattggtgtgtgattttagcctcacgtgagactccttttaagactaaaccatttgcattaaactagagccttaagtcaatctcagaaggtagcataaacaaataaaaattaactgtatggcatgatcagtgcggttatgtggaaacaacaacaaacaaacgaagctatctgagtgaactgctaatacagaaacttaatgtagacctgtttggggtctactattgttttagaatgaaggaattgtattattgtgtgtatatataatttgtaaataaaaagtatggagatgatacggtgttaaaaaaaatcatggtaaggctacaatactcaagtaacaaggtttgggacaatgtctaagggttaaagtgccaaagccatttctgtactaactgttctcttgttccggtaccggggagaaggatgacccctccttattctccaattcatgtacagtattttgtcctagcagcataaagacctagctcttttcttacaagaggcagaaacaagacaggctagttcataaacaaactgtgtaacttctcaaaatgaatctatttcataactcggacaatttctgggtggtgactgagtacccctttagtgagtacccctttagtgctatatttgtgccattcattatctggttcatatttcttttctgttagatgatacacatttcttcaaaaaaatttctaatgtcacttttgtacttttttaaataaagtatgtttaactgttgggctctcaataatttgtgaaatttcagtgttttctataatgttaatggggaaattcagcaataaactttatttgtaaga

SEQ ID NO: 425840 - DNA, 2034 bp, Homo sapiens
accacaaggggcggtccccggtgtcctgcgcgggggcgcggagggggcgggcgtcagttccgcggggggctgtcggggaaccatggctgccccgagagacaatgtcactttattattcaagttatactgcttggcagtgatgaccctgatggctgcagtctataccatagctttaagatacacaaggacatcagacaaagaactctacttttcaaccacagccgtgtgtatcacagaagttataaagttattgctaagtgtgggaattttagctaaagacagggtttcaccgtgtaaatcaggatggtctcgatctcctgaccttgtgatccgcccacctcaacctcccagagtgctgggattagaggcgtgagccaccgtgcctggccaatcaaagtctttttagagaaactggtagtctgggtagattcaaagcatctttaagagaaaatgtcttggggagccccaaggaactgttgaagttaagtgtgccatcgttagtgtatgctgttcagaacaacatggctttcctagctcttagcaatctggatgcagcagtgtaccaggtgacctaccagttgaagattccgtgtactgctttatgcactgttttaatgttaaaccggacactcagcaaattacagtgggtttcagtttttatgctgtgtgctggagttacgcttgtacagtggaaaccagcccaagctacaaaagtggtggtggaacaaaatccattattagggtttggcgctatagctattgctgtattgtgctcaggatttgcaggagtatattttgaaaaagttttaaagagttcagatacttctctttgggtgagaaacattcaaatgtatctatcagggattattgtgacattagctggcgtctacttgtcagatggagctgaaattaaagaaaaaggatttttctatggttacacatattatgtctggtttgtcatctttcttgcaagtgttggtggcctctacacttctgttgtggttaagtacacagacaacatcatgaaaggcttttctgcagcagcggccattgtcctttccaccattgcttcagtaatgctgtttggattacagataacactcacctttgccctgggtactcttcttgtatgtgtttccatatatctctatggattacccagacaagacactacatccatccaacaaggagaaacagcttcaaaggagagagttattggtgtgtgattttagcctcacgtgagactccttttaagactaaaccatttgcattaaactagagccttaagtcaatctcagaaggtagcataaacaaataaaaattaactgtatggcatgatcagtgcggttatgtggaaacaacaacaaacaaacgaagctatctgagtgaactgctaatacagaaacttaatgtagacctgtttggggtctactattgttttagaatgaaggaattgtattattgtgtgtatatataatttgtaaataaaaagtatggagatgatacggtgttaaaaaaaatcatggtaaggctacaatactcaagtaacaaggtttgggacaatgtctaagggttaaagtgccaaagccatttctgtactaactgttctcttgttccggtaccggggagaaggatgacccctccttattctccaattcatgtacagtattttgtcctagcagcataaagacctagctcttttcttacaagaggcagaaacaagacaggctagttcataaacaaactgtgtaacttctcaaaatgaatctatttcataactcggacaatttctgggtggtgactgagtacccctttagtgagtacccctttagtgctatatttgtgccattcattatctggttcatatttcttttctgttagatgatacacatttcttcaaaaaaatttctaatgtcacttttgtacttttttaaataaagtatgtttaactgttgggctctcaataatttgtgaaatttcagtgttttctataatgttaatggggaaattcagcaataaactttatttgtaaga

SEQ ID NO: 425841 - DNA, 2237 bp, Homo sapiens
atcgttgatgtagcactccagctcccctttccaatgaagctattctgcagagtcctaggttcctactgttgtgatgagagattggtctcgtctacagtgcctttctgtatgtgagccaaatagtagatgagagatgctgacaaacattatataaaaccaattacaaaatgtgaaagtagcacacagacgaatacacacatactgccaccaacgattgtgagatcatatgagtggaatgaatgggaattaagaagaaaagctataaaattggctaatttgcgccagaaagttactcactcagtacaaactgatcttagtcacttgagaagagaaaattgttcccaagtgtaccctccaaaggacactagcacccagtccatgagggaagacagcactggggtgcccaggcctcagatttacttggctggtcttcgtggaggaaagagcgaaatcaccgatgaggtcaaggtgaacttaactagagatgtggatgaaacctaattacagacaacgttttaaaatagatgctactcaattatgaacaatagcaagtacttaaagacaatgtcactttattattcaagttatactgcttggcagtgatgaccctgatggctgcagtctataccatagctttaagatacacaaggacatcagacaaagaactctacttttcaaccacagccgtgtgtatcacagaagttataaagttattgctaagtgtgggaattttagctaaagaaactggtagtctgggtagattcaaagcatctttaagagaaaatgtcttggggagccccaaggaactgttgaagttaagtgtgccatcgttagtgtatgctgttcagaacaacatggctttcctagctcttagcaatctggatgcagcagtgtaccaggtgacctaccagttgaagattccgtgtactgctttatgcactgttttaatgttaaaccggacactcagcaaattacagtgggtttcagtttttatgctgtgtgctggagttacgcttgtacagtggaaaccagcccaagctacaaaagtggtggtggaacaaaatccattattagggtttggcgctatagctattgctgtattgtgctcaggatttgcaggagtatattttgaaaaagttttaaagagttcagatacttctctttggttcttgcaagtgttggtggcctctacacttctgttgtggttaagtacacagacaacatcatgaaaggcttttctgcagcagcggccattgtcctttccaccattgcttcagtaatgctgtttggattacagataacactcacctttgccctgggtactcttcttgtatgtgtttccatatatctctatggattacccagacaagacactacatccatccaacaaggagaaacagcttcaaaggagagagttattggtgtgtgattttagcctcacgtgagactccttttaagactaaaccatttgcattaaactagagccttaagtcaatctcagaaggtagcataaacaaataaaaattaactgtatggcatgatcagtgcggttatgtggaaacaacaacaaacaaacgaagctatctgagtgaactgctaatacagaaacttaatgtagacctgtttggggtctactattgttttagaatgaaggaattgtattattgtgtgtatatataatttgtaaataaaaagtatggagatgatacggtgttaaaaaaaatcatggtaaggctacaatactcaagtaacaaggtttgggacaatgtctaagggttaaagtgccaaagccatttctgtactaactgttctcttgttccggtaccggggagaaggatgacccctccttattctccaattcatgtacagtattttgtcctagcagcataaagacctagctcttttcttacaagaggcagaaacaagacaggctagttcataaacaaactgtgtaacttctcaaaatgaatctatttcataactcggacaatttctgggtggtgactgagtacccctttagtgagtacccctttagtgctatatttgtgccattcattatctggttcatatttcttttctgttagatgatacacatttcttcaaaaaaatttctaatgtcacttttgtacttttttaaataaagtatgtttaactgttgggctctcaataatttgtgaaatttcagtgttttctataatgttaatggggaaattcagcaataaactttatttgtaaga

SEQ ID NO: 425842 - DNA, 2077 bp, Homo sapiens
atcgttgatgtagcactccagctcccctttccaatgaagctattctgcagagtcctaggttcctactgttgtgatgagagattggtctcgtctacagtgcctttctgtatgtgagccaaatagtagatgagagatgctgacaaacattatataaaaccaattacaaaatgtgaaagtagcacacagacgaatacacacatactgccaccaacgattgtgagatcatatgagtggaatgaatgggaattaagaagaaaagctataaaattggctaatttgcgccagaaagttactcactcagtacaaactgatcttagtcacttgagaagagaaaattgttcccaagtgtaccctccaaaggacactagcacccagtccatgagggaagacagcactggggtgcccaggcctcagatttacttggctggtcttcgtggaggaaagagcgaaatcaccgatgaggtcaaggtgaacttaactagagatgtggatgaaacctaattacagacaacgttttaaaatagatgctactcaattatgaacaatagcaagtacttaaagacaatgtcactttattattcaagttatactgcttggcagtgatgaccctgatggctgcagtctataccatagctttaagatacacaaggacatcagacaaagaactctacttttcaaccacagccgtgtgtatcacagaagttataaagttattgctaagtgtgggaattttagctaagtgacctaccagttgaagattccgtgtactgctttatgcactgttttaatgttaaaccggacactcagcaaattacagtgggtttcagtttttatgctgtgtgctggagttacgcttgtacagtggaaaccagcccaagctacaaaagtggtggtggaacaaaatccattattagggtttggcgctatagctattgctgtattgtgctcaggatttgcaggagtatattttgaaaaagttttaaagagttcagatacttctctttggttcttgcaagtgttggtggcctctacacttctgttgtggttaagtacacagacaacatcatgaaaggcttttctgcagcagcggccattgtcctttccaccattgcttcagtaatgctgtttggattacagataacactcacctttgccctgggtactcttcttgtatgtgtttccatatatctctatggattacccagacaagacactacatccatccaacaaggagaaacagcttcaaaggagagagttattggtgtgtgattttagcctcacgtgagactccttttaagactaaaccatttgcattaaactagagccttaagtcaatctcagaaggtagcataaacaaataaaaattaactgtatggcatgatcagtgcggttatgtggaaacaacaacaaacaaacgaagctatctgagtgaactgctaatacagaaacttaatgtagacctgtttggggtctactattgttttagaatgaaggaattgtattattgtgtgtatatataatttgtaaataaaaagtatggagatgatacggtgttaaaaaaaatcatggtaaggctacaatactcaagtaacaaggtttgggacaatgtctaagggttaaagtgccaaagccatttctgtactaactgttctcttgttccggtaccggggagaaggatgacccctccttattctccaattcatgtacagtattttgtcctagcagcataaagacctagctcttttcttacaagaggcagaaacaagacaggctagttcataaacaaactgtgtaacttctcaaaatgaatctatttcataactcggacaatttctgggtggtgactgagtacccctttagtgagtacccctttagtgctatatttgtgccattcattatctggttcatatttcttttctgttagatgatacacatttcttcaaaaaaatttctaatgtcacttttgtacttttttaaataaagtatgtttaactgttgggctctcaataatttgtgaaatttcagtgttttctataatgttaatggggaaattcagcaataaactttatttgtaaga

SEQ ID NO: 425843 - DNA, 1270 bp, Homo sapiens
accacaaggggcggtccccggtgtcctgcgcgggggcgcggagggggcgggcgtcagttccgcggggggctgtcggggaaccatggctgccccgagagacaatgtcactttattattcaagttatactgcttggcagtgatgaccctgatggctgcagtctataccatagctttaagatacacaaggacatcagacaaagaactctacttttcaaccacagccgtgtgtatcacagaagttataaagttattgctaagtgtgggaattttagctaaagaaactggtagtctgggtagattcaaagcatctttaagagaaaatgtcttggggagccccaaggaactgttgaagttaagtgtgccatcgttagtgtatgctgttcagaacaacatggctttcctagctcttagcaatctggatgcagcagtgtaccaggtgacctaccagttgaagattccgtgtactgctttatgcactgttttaatgttaaaccggacactcagcaaattacagtgggtttcagtttttatgctgtgtgctggagttacgcttgtacagtggaaaccagcccaagctacaaaagtggtggtggaacaaaatccattattagggtttggcgctatagctattgctgtattgtgctcaggatttgcaggttaggagctatggagtaggatcatgaggagtatattttgaaaaagttttaaagagttcagatacttctctttggttcttgcaagtgttggtggcctctacacttctgttgtggttaagtacacagacaacatcatgaaaggcttttctgcagcagcggccattgtcctttccaccattgcttcagtaatgctgtttggattacagataacactcacctttgccctgggtactcttcttgtatgtgtttccatatatctctatggattacccagacaagacactacatccatccaacaaggagaaacagcttcaaaggagagagttattggtgtgtgattttagcctcacgtgagactccttttaagactaaaccatttgcattaaactagagccttaagtcaatctcagaaggtagcataaacaaataaaaattaactgtatggcatgatcagtgcggttatgtggaaacaacaacaaacaaacgaagctatctgagtgaactgctaatacagaaacttaatgtagacctgtttggggtctactattgttttagaatgaaggaattgtattattgtgtgtatatataatttgtaaataaaaagtatggagatg

SEQ ID NO: 425844 - DNA, 1729 bp, Homo sapiens
  misc_feature (4)..(4): n is a, c, g, or t
  misc_feature (7)..(9): n is a, c, g, or t
  misc_feature (11)..(11): n is a, c, g, or t
gatnctnnngnctcagcctcccaagtagctgggattacaggtgcccgccaccacacctggctaatttttgtgtttttagtagagacagggtttcaccatgttgtccaggctggtcttgaattcccgacctcaggcaatccgcccatctcaacctcccaaagtgctgggattacaggcataagccaccgcgcccagtagagatgtgatattattcaagtaaataaaacctgaaacttggcacatttgcctatttaatgtgcatcagtcatctgaactaggttgatcctggaataatgaaaacacttcactagtattaactaatgttttctacatagtagttcccaatagattaaggaaaatttccaacctgagattctttgttttggaatttgaataatgtgtttgtaactattccttgattgtcccaaatccaggctttacgtctgcttttgtcaatgtaacatcctagtgccaggaaattggaaaatccaatgactttttgtgtgtaaagtactggaatttttttgttcgtttgtttttaagacggagtgtcaactctcgcccaggctggggtgcagtggcctgatctcggctcactgcaaccttctcctcccaggctgaagtgattctcctgcctcagcctcgcaagtagctgggactgcaggcatgtgccaccactcctggctaattatttgtatttttagtagagagagggtttcaccgtgttagccatgatggtctcattctcctgaccttgtgatccgcccacctcggcctcccaaagtgctgggattacaggcgtgagccactgtgcccaccctggtatgttttttttaaattggccacttaagagttgtccttcagaaagtggagcagcagtgtgattagtaaaaacgatgggctttcctgcagctctggcttatggtctttgtttttccagttaacagctgttacttcatgctgttatagggggtggggggagaaagagaaagaatatgtctagtggcttaattttggggctcaatttgtttattatgtttttcctgcaaaagagtcaccagtcttgtcatggctcaatgcatattttaaaatgagtcaaagccaatttggaagctgctatcttaggttatttgtagtcaggcttcaaatggagagtgaaactttgactttgaaaactggtgctctatgctcaatgatggtcttacacattcctctagggaaaggtcaagaaataaatttggcttgattgtattctctcatttaccatataggaaatactatggtagaactgaaaatatgtacaatagtaaagtggtggctgagactgggcacttggaaaatagacttggattctaagtgtgaaactaattaaatacttttatgtgactggtagtagtcacagtctccttgattgattctagttccttttcaaagtggagagacctgaatatagattgtaacaggatgtccaaccttgccagacaagcaggcatatatgtctctgggatgcagaagcagttacaagttaatatatttaagcataatgttagccaatcctaggtgataccagagatgtgaatatttgatcatatttgagttcattccttgaaagtccaaacctaactggtcttaattgattacttcttagtattccgaattttagaatttaaaaccctatgaattttcagtttgtgcttacattttctaacattggatgtttgctttggca

SEQ ID NO: 425845 - DNA, 625 bp, Homo sapiens
  misc_feature (4)..(4): n is a, c, g, or t
  misc_feature (7)..(9): n is a, c, g, or t
  misc_feature (11)..(11): n is a, c, g, or t
gatnctnnngnctcagcctcccaagtagctgggattacaggtgcccgccaccacacctggctaatttttgtgtttttagtagagacagggtttcaccatgttgtccaggctggtcttgaattcccgacctcaggcaatccgcccatctcaacctcccaaagtgctgggattacaggcataagccaccgcgcccagtagagatgtgatattattcaagtaaataaaacctgaaacttggcacatttgcctatttaatgtgcatcagtcatctgaactaggttgatcctggaataatgaaaacacttcactagtattaactaatgttttctacatagtagttcccaatagattaaggaaaatttccaacctgagattctttgttttggaatttgaataatgtgtttgtaactattccttgattgtcccaaatccaggctttacgtctgcttttgtcaatgtaacatcctagtgccaggaaattggaaaatccaatgactttttgtgtgtaaagtactggaatttttttgttcgtttgtttttaagacggagtgtcaactctcgcccaggctgggatcacaccgctacactccagcctgggcaaaagagcgagactctgtctcaaaaa

SEQ ID NO: 425846 - DNA, 2137 bp, Homo sapiens
tttttatcattacctaagagctttaggctaattgcctggtaaatagctgtccatctgatggcctttgacagggaacctaatccccaagataggattctttttcttaaaccaatcttgaaatcgcctgcattgaaacataagtggctgtgaccggccagaggagaaggtcctcaggggccaggggctcctcaggcttcctttgttactccattgcttgcttctctgccctcaggagcagctgcagaggacagtcttcattaagctcaagcatatgacaaaggggcagaacagaaaagaaaaacagcttattaggtataggcttttcatgataaattgcttgtattagttttgaaactaagcacctattggataggcattatactatttctatttagatatggtagatcaaggagctatgaaagttcccgttttgctttctaggtttgaaagttttctgtttgattctgactgtgatcttcaacccttccaaaatgtccttgtgttataatttcacttatttcattgccaaaagatgaagggacttgaatcttgttatagttgttccatcctgttaacaagttttcattttgtgtgtggatcaaattctggttagcttggtttctttgaattactggtgccatctcagcaaaggcctgtggttatttttccccttgagtgggagttggtcatattcaagcatcctgttctcttaaaactctccttttaaaaaataaacacttccataacattttgttttggaagtctattaatgcaatcccacttttttccccctagtttctaaatgttaaagagaggggaaaaaaggctcaggatagttttcacctcacagtgttagctgtcttttattttactcttggaaatagagactccattagggttttgacattttgggaacccagttttaccattgtgtcagtaaaacaataagatagtttgagagcatatgatctaaataaagacatttgaagggttagtttgaattctaaaagtaggtaatagccaaatagcattctcatcccttaacagacaaaaacttatttgtcaaaagaattagaaaaggtgaaaatattttttccagatgaaacttgtgccacttccaattgactaatgaaatacaagagacagactgaaaaagtggattatgcatcttaaaaccctttctgtaaatattatgtagctaaagattgatttccagcatctgacatgacagtaggtttcttgttaaccagtttttcttctttctggataattgcatatgaatatttatacatactgaccaaaataaaggcctcaacttggtagtttactgaaagttcttggacaaatagtccataaaagctgttgacctctaaatgcactatggctggttaaatacagtgaccatccttcttccagctgtaaaggatgaagcgtattaagcattagccaggcagtaataaagctaaatagccatacagcagctctgacaatgttgtgctggatattgcagtttgctttcaaggtgcagatgtaaggatttaaaaaaataataatttggcaccaaataaatatgagtagcatccattggcctattaaatcgagtcaggatttgaagggaattgagtttgagaaatgaataaataaaggcaccttggtgcctgaccccctcaatcatgcgtgtgactttgagcactcacaggtgtgtgcagctactcagcccagggcaggtgggttagcctggggttataccttggccctgggaatagacaccattgggcctttggttttgttgggcttccttttgtctttacactccacacaggtggtagaaatctgagttctaaagcacttttgtgaaatacaagctaagtgagaattctaaagaaaatgctttggtttctgctgtctcaaataagtggcatttaaaaacaattattaataaatatttttaatggttttaactcagtatttttttttatttctttgtcactctttacagcttttgaagaccaaactgcaaatacattaccagggatggttttgtgttgtcctatagacttcttaaatttgacaaaaaatttagcagaacttgtaaccaacagctttgtctgaacttgaagtcaaaatgtgttgttaa

SEQ ID NO: 425847 - DNA, 1330 bp, Homo sapiens
  misc_feature (1)..(3): n is a, c, g, or t
  misc_feature (5)..(6): n is a, c, g, or t
nnnannacagactctctggaaagcctgggagctgaattccggaagatccccacatcgatgaaagcaaagcgaagccaccaagccatcatcatgtccacgtcgctacgagtcagcccatccatccatggctaccacttcgacacagcctctcgtaagaaagccgtgggcaacatctttgaaaacacagaccaagaatcactagaaaggctcttcagaaactctggagacaagaaagcagaggagagagccaagatcatttttgccatagatcaagatgtggaggagaaaacgcgtgccctgatggccttgaagaagaggacaaaagacaagcttttccagtttctgaaactgcggaaatattccatcaaagttcactgaagagaagaggatggataaggacgttatccaagaatggacattcaaagaccaagtgagtttgtgagattctaacagatgcagcattttgctgctaccttacaagcttctcttctgtcaggactccagaggctggaaagggaccgggactggaaagggaccaggactgaacagactggttacaaagactccaaacaatttcatgccctgtgctgttacagaggagaacaaaatgctttcagcaaggatttgaaaactcttccgtccctgcaggaaaggattgatgctgatagaagagcctggacagatgtaatgagaactaaagaaaacagatggctggagatgacatttatccagggtcactttgtcaggccctaggacttaaatcgaagttgaacttttttttttttttaaccaaatagataggggaagggaggagggagagggaggacagggagagaaaataccatgcataaattgtttactgaatttttatatctgagtgttcaaaatatttccaagcctgagtattgtctattggtatagatttttagaaatcaataattgattatttatttgcacttattacaatgcctgaaaaagtgcaccacatggatgttaagtagaaattcaagaaagtaagatgtcttcagcaactcagtaaaaccttacgccaccttttggtttgtaaaaggttttttatacatttcaaacaggttgcacaaaagttaaaataatggggtcttttataaatccaaagtactgtgaaaacattttacatattttttaaatcttctgactaatgctaaaacgtaatctaattaaatttcatacagttactgcagtaagcattaggaagtgaatatgatatacaaaatagtttataaagactctatagtttctataatttattttactggcaaatgtcatgcaacaataataaattattgtaaac

SEQ ID NO: 425848 - DNA, 1275 bp, Homo sapiens
  misc_feature (1)..(3): n is a, c, g, or t
  misc_feature (5)..(6): n is a, c, g, or t
nnnannacagactctctggaaagcctgggagctgaattccggaagatccccacatcgatgaaagcaaagcgaagccaccaagccatcatcatgtccacgtcgctacgagtcagcccatccatccatggctaccacttcgacacagcctctcgtaagaaagccgtgggcaacatctttgaaaacacagaccaagaatcactagaaaggctcttcagaaactctggagacaagaaagcagaggagagagccaagatcatttttgccatagatcaagatgtggaggagaaaacgcgtgccctgatggccttgaagaagaggacaaaagacaagcttttccagtttctgaaactgcggaaatattccatcaaagttcactgaagagaagaggatggataaggacgttatccaagaatggacattcaaagaccaagtgagtttgtgagattctaacagatgcagcattttgctgctaccttacaagcttctcttctgtcaggactccagaggctggaaagggaccgggactggaaagggaccaggactgaacagactggttacaaagactccaaacaatttcatgccctgtgctgttacagaggagaacaaaatgctttcagcaaggatttgaaaactcttccgtccctgcaggaaaggattgatgctgatagaagagcctggacagatgtaatgagaactaaagaaaacagatggctggagatgacatttatccagggtcactttgtcaggccctaggacttaaatcgaagttgaacttttttttttttttaaccaaatagataggggaagggaggagggagagggaggacaaaaatatttccaagcctgagtattgtctattggtatagatttttagaaatcaataattgattatttatttgcacttattacaatgcctgaaaaagtgcaccacatggatgttaagtagaaattcaagaaagtaagatgtcttcagcaactcagtaaaaccttacgccaccttttggtttgtaaaaggttttttatacatttcaaacaggttgcacaaaagttaaaataatggggtcttttataaatccaaagtactgtgaaaacattttacatattttttaaatcttctgactaatgctaaaacgtaatctaattaaatttcatacagttactgcagtaagcattaggaagtgaatatgatatacaaaatagtttataaagactctatagtttctataatttattttactggcaaatgtcatgcaacaataataaattattgtaaac

SEQ ID NO: 425849 - DNA, 1839 bp, Homo sapiens
  misc_feature (1)..(3): n is a, c, g, or t
  misc_feature (5)..(6): n is a, c, g, or t
nnnannacagactctctggaaagcctgggagctgaattccggaagatccccacatcgatgaaagcaaagcgaagccaccaagccatcatcatgtccacgtcgctacgagtcagcccatccatccatggctaccacttcgacacagcctctcgtaagaaagccgtgggcaacatctttgaaaacacagaccaagaatcactagaaaggctcttcagaaactctggagacaagaaagcagaggagagagccaagatcatttttgccatagatcaagatgtggaggagaaaacgcgtgccctgatggccttgaagaagaggacaaaagacaagcttttccagtttctgaaactgcggaaatattccatcaaagttcactgaagagaagaggatggataaggacgttatccaagaatggacattcaaagaccaagtgagtttgtgagattctaacagatgcagcattttgctgctaccttacaagcttctcttctgtcaggactccagaggctggaaagggaccgggactggaaagggaccaggactgaacagactggttacaaagactccaaacaatttcatgccctgtgctgttacagaggagaacaaaatgctttcagcaaggatttgaaaactcttccgtccctgcaggaaaggattgatgctgatagaagagcctggacagatgtaatgagaactaaagaaaacagatggctggagatgacatttatccagggtcactttgtcaggccctaggacttaaatcgaagttgaacttttttttttttttaaccaaatagataggggaagggaggagggagagggaggacagggagagaaaataccatgcataaattgtttactgaatttttatatctgagtgttcaaaatatttccaagcctgagtattgtctattggtatagatttttagaaatcaataattgattatttatttgcacttattacaatgcctgaaaaagtgcaccacatggatgttaagtagaaattcaagaaagtaagatgtcttcagcaactcagtaaaaccttacgccaccttttggtttgtaaaaggttttttatacatttcaaacaggttgcacaaaagttaaaataatggggtcttttataaatccaaagtactgtgaaaacattttacatattttttaaatcttctgactaatgctaaaacgtaatctaattaaatttcatacagttactgcagtaagcattaggaagtgaatatgatatacaaaatagtttataaagactctatagtttctataatttattttactggcaaatgtcatgcaacaataataaattattgtaaactttgtggcttttggtctgtgatgcttggtctcaaaggaaaaaataagatggtaaatgttgatatttacaaacttttctaaagatgtgtctctaacaataaaagttaattttagagtagttttatattaattaccaaactttttcaaaacaaattcttacgtcaaatatctgggaagtttctctgtcccaatcttaaaatataaaatatagatatagaagttcatagattgactccttggcatttctatttatgtatccattaaggatgagttttaaaaggctttctcttcatacttttgaaaaatttcttctatgattacagtagctatgtacatgtgtacatctatttttcccaagcaatatgttttgggtttagagtctgagtgatgaccaagattctgtgtgttactactgtttgtttaataggaacaaatatagaaataatattatctctttgcttatttcccgttaaaactataataaaatgtttctaggacagcatacgtaaa

SEQ ID NO: 425850 - DNA, 1277 bp, Homo sapiens
  misc_feature (1)..(3): n is a, c, g, or t
  misc_feature (5)..(6): n is a, c, g, or t
nnnannacagactctctggaaagcctgggagctgaattccggaagatccccacatcgatgaaagcaaagcgaagccaccaagccatcatcatgtccacgtcgctacgagtcagcccatccatccatggctaccacttcgacacagcctctcgtaagaaagccgtgggcaacatctttgaaaacacagaccaagaatcactagaaaggctcttcagaaactctggagacaagaaagcagaggagagagccaagatcatttttgccatagatcaagatgtggaggagaaaacgcgtgccctgatggccttgaagaagaggacaaaagacaagcttttccagtttctgaaactgcggaaatattccatcaaagttcactgaagagaagaggatggataaggacgttatccaagaatggacattcaaagaccaagtgagtttgtgagattctaacagatgcagcattttgctgctaccttacaagcttctcttctgtcaggactccagaggctggaaagggaccgggactggaaagggaccaggactgaacagactggttacaaagactccaaacaatttcatgccctgtgctgttacagaggagaacaaaatgctttcagcaaggatttgaaatgtaatgagaactaaagaaaacagatggctggagatgacatttatccagggtcactttgtcaggccctaggacttaaatcgaagttgaacttttttttttttttaaccaaatagataggggaagggaggagggagagggaggacagggagagaaaataccatgcataaattgtttactgaatttttatatctgagtgttcaaaatatttccaagcctgagtattgtctattggtatagatttttagaaatcaataattgattatttatttgcacttattacaatgcctgaaaaagtgcaccacatggatgttaagtagaaattcaagaaagtaagatgtcttcagcaactcagtaaaaccttacgccaccttttggtttgtaaaaggttttttatacatttcaaacaggttgcacaaaagttaaaataatggggtcttttataaatccaaagtactgtgaaaacattttacatattttttaaatcttctgactaatgctaaaacgtaatctaattaaatttcatacagttactgcagtaagcattaggaagtgaatatgatatacaaaatagtttataaagactctatagtttctataatttattttactggcaaatgtcatgcaacaataataaattattgtaaac

SEQ ID NO: 425851 - DNA, 1274 bp, Homo sapiens
  misc_feature (1)..(3): n is a, c, g, or t
  misc_feature (5)..(6): n is a, c, g, or t
nnnannacagactctctggaaagcctgggagctgaattccggaagatccccacatcgatgaaagcaaagcgaagccaccaagccatcatcatgtccacgtcgctacgagtcagcccatccatccatggctaccacttcgacacagcctctcgtaagaaagccgtgggcaacatctttgaaaacacagaccaagaatcactagaaaggctcttcagaaactctggagacaagaaagcagaggagagagccaagatcatttttgccatagatcaagatgtggaggagaaaacgcgtgccctgatggccttgaagaagaggatgaagagaagaggatggataaggacgttatccaagaatggacattcaaagaccaagtgagtttgtgagattctaacagatgcagcattttgctgctaccttacaagcttctcttctgtcaggactccagaggctggaaagggaccgggactggaaagggaccaggactgaacagactggttacaaagactccaaacaatttcatgccctgtgctgttacagaggagaacaaaatgctttcagcaaggatttgaaaactcttccgtccctgcaggaaaggattgatgctgatagaagagcctggacagatgtaatgagaactaaagaaaacagatggctggagatgacatttatccagggtcactttgtcaggccctaggacttaaatcgaagttgaacttttttttttttttaaccaaatagataggggaagggaggagggagagggaggacagggagagaaaataccatgcataaattgtttactgaatttttatatctgagtgttcaaaatatttccaagcctgagtattgtctattggtatagatttttagaaatcaataattgattatttatttgcacttattacaatgcctgaaaaagtgcaccacatggatgttaagtagaaattcaagaaagtaagatgtcttcagcaactcagtaaaaccttacgccaccttttggtttgtaaaaggttttttatacatttcaaacaggttgcacaaaagttaaaataatggggtcttttataaatccaaagtactgtgaaaacattttacatattttttaaatcttctgactaatgctaaaacgtaatctaattaaatttcatacagttactgcagtaagcattaggaagtgaatatgatatacaaaatagtttataaagactctatagtttctataatttattttactggcaaatgtcatgcaacaataataaattattgtaaac

SEQ ID NO: 425852 - DNA, 1048 bp, Homo sapiens
  misc_feature (1)..(3): n is a, c, g, or t
  misc_feature (5)..(6): n is a, c, g, or t
nnnannacagactctctggaaagcctgggagctgaattccggaagatccccacatcgatgaaagcaaagcgaagccaccaagccatcatcatgtccacgtcgctacgagtcagcccatccatccatggctaccacttcgacacagcctctcgtaagaaagccgtgggcaacatctttgaaaacacagaccaagaatcactagaaaggctcttcagaaactctggagacaagaaagcagaggagagagccaagatcatttttgccatagatcaagatgtggaggagaaaacgcgtgccctgatggccttgaagaagaggaaacaaaatgctttcagcaaggatttgaaaactcttccgtccctgcaggaaaggattgatgctgatagaagagcctggacagatgtaatgagaactaaagaaaacagatggctggagatgacatttatccagggtcactttgtcaggccctaggacttaaatcgaagttgaacttttttttttttttaaccaaatagataggggaagggaggagggagagggaggacagggagagaaaataccatgcataaattgtttactgaatttttatatctgagtgttcaaaatatttccaagcctgagtattgtctattggtatagatttttagaaatcaataattgattatttatttgcacttattacaatgcctgaaaaagtgcaccacatggatgttaagtagaaattcaagaaagtaagatgtcttcagcaactcagtaaaaccttacgccaccttttggtttgtaaaaggttttttatacatttcaaacaggttgcacaaaagttaaaataatggggtcttttataaatccaaagtactgtgaaaacattttacatattttttaaatcttctgactaatgctaaaacgtaatctaattaaatttcatacagttactgcagtaagcattaggaagtgaatatgatatacaaaatagtttataaagactctatagtttctataatttattttactggcaaatgtcatgcaacaataataaattattgtaaac

SEQ ID NO: 425853 - DNA, 3441 bp, Homo sapiens
aaggagcgtccctgcttcacccccaacttggctggagaagaaaggacaagaggcagcagggtgaagaagaagccccccatcccagctggtggagatagttctggaactggaccccgcagctgcgtgggcagccgacacacccaccccagcactggcaccagaccagagccagagccaggacctgggcaaagtgcagccgtgcaccctgcctggtcactgctctcccagccctgcctgggcctacctcctgcccagctctgcttgggaccctctgggcatgcagcagcagtagcctaagggctctggtcacttccagggctctacagggcagcagagcagagcaaaagggtgcatatgctgggagctgtcacctccactcctaggcttttctgcctagagcagaattataggggcagtatacatccaggggtctgtgcggtggggctgggggattccttaagtgactttgggaaggatttgttttcccgagcatcaatttcacacctgggcattgcaccccaggctatgcagtctttcagtgtgaggaaggggcagaacaagaatgaggcggccccgtggcctcaaggaagcttgtggctttggaggatctgactccagcagagtctgtgccaatgtggggtgagcagggcccctgccatggagcagcaggaatttgagggatggagcaggttaaagaatgggaaacatcttcacttgtttttttttcttgcaaactactccctgctactcattgagactggttactggaagcaacttgttaagatttttctttctgggcgggcgcggtggctcacgcctgtaatcccagcactttgggaggccaaggcgggtggatcacctgaggtcaggagttcgagaccagcttagccaatatggtgaaaccccgtctctactaaaaatacaaaaattagccgggtgtggtggcatgtgccagctactcgggaggctgaggcaagagaatcacttgaacctcggaggctgaagttgcagtgagccaagattgagccattgctctccagcctgggtgacacagcaagactctgtctcaaaaaaaattttttatttctttcttttccatggaggcctagagtccctgtgaaggctaggaaggggctgctgatcccaggagtgcccacgaggagtggggggcactgttggcccataatcaggcaaacacccatcatttcatgggggattcatgaaatcatagtcaggcaaacacccgtcatttcatggctaagcatttgcagaaggtggaggattctcccccgagtccccaaatcagcagcctgtgctagggaccagagcaccgggggcaagaagacagaaccaatgtgggagtggggatggtcactaaatctgactgtgccacacaagcccatgatgaccttggcactggtttgggtggcaggatatgaaggaagctgtaggcattattgaaaaaatcattgttcagccaacagggtgaggctcccagcaaggccgtgccatcttcccacctccctgtgcccagagggttagactgtaagctcccggagggcgaggctggggctgagcgtgcctccacgtccccaaggcacagggtgcacagtgggtgctcactgaatatagtggactagtgagcagaggatgagaggactaccctgtaatgagccttggacagtctggcatttgccttaactcccactcccatgccctgggatcactgttggatatttactccatgaggacaaatactggggaggtgtggagaggagggagggcaggttcctcttactttcacccattgctgagaatgagcgcctgttggcactgcctttgtgagcctccgggagcaggtaacctgcggcccaagcccgcctaggactccacatcaggcaggcacaggactggccccttgtcctcataaaaactctcagtacagcttaaactctgtaagatctaaccagccaggaggaccctcgcttcctctccgccatgcttgccacctcttgcttctgagagtccatctcagttcgcagttctgtgacttgcattgacctggctccaatcaagctacaactcaagcagtcacggggagaaggattgtagatgggccagtgactcacagggtcaggcactcgggggagcctgagtcaggaggtcagtgggccctggaagggagggggcaagcctgggtgggtaaggttctgggccccaggcaagaaggcagagtttctccgcaggggtgtgtgcaagagctagctgcgcagaaggtctccgctggctctccaagccgggcttgtgaaataggaacgccaacatcctcctccacaggcagtggcaggcacctcctcctcaggtgccccccaagccctatctgatgggcaaaggtgaacgcagggcggtgggcttttcctgtgcagagggagactgattcaaagggtcatttatgacctttcacaagtcccacatcctgcccaatggccaggtcttgggatgctgttgcaagatggttctgtgactccatgtgactgtctgatgattgccccagctggggaaaaggctcccatgtctctttctcataaaaccagtgggcaaggccgggcgcagtggctcacgtctgtaatgccagcacttcgggagaccaaggtgggcggatcacctgaggtcaggagttcaagaccagcctgaccaacatggtgaaaccccgtctctacaaaaatatggaaattagctgggcatgacggcgggtgcctgtaaccccagctacttgggaggctgaggagggataatcagttgaacccaggaggtggaggttgcagtgagccgagatcgcgccactgcactccagcctgggtgacagagcaagactccatctcaaaaacaaacaaacaaaaaactagcgggtgaaatgattcagtgacctaaggacagccagagcactaagctgctgggaacccatctgtgctgaaatgtagatttcccaggaaactcaggcttgggacaggcgcctacctgctcctcgggcaccaggtgattaggagaggtcgaatctcatttccacgtgagtgaggataaagactgggctgccaaggaggactcctcataaacattgacaaattgctctgccccgcctgtgatcccagacgactcctgcagtctgggatcctgagtgtcctgtgggttcatctcggatgggcgctgcataaacagcctgcagggaacgtctgggagaaccagcttcacaacagatataataaggaagaagtttgaaatattgcaagaattgcgaaagtgtgacacacagatacaaagtgggcacatgctcgtgggaaaatgttgccaatagacttgcttgactctggagttaccccgaaccttcaatttgtttaaaaaaaaaaaggcaatatcttgacgtgcaataaagtgaactgcaat

SEQ ID NO: 425854 - DNA, 3006 bp, Homo sapiens
aaggagcgtccctgcttcacccccaacttggctggagaagaaaggacaagaggcagcagggtgaagaagaagccccccatcccagctggtggagatagttctggaactggaccccgcagctgcgtgggcagccgacacacccaccccagcactggcaccagaccagagccagagccaggacctgggcaaagtgcagccgtgcaccctgcctggtcactgctctcccagccctgcctgggcctacctcctgcccagctctgcttgggaccctctgggcatgcagcagcagtagcctaagggctctggtcacttccagggctctacagggcagcagagcagagcaaaagggtgcatatgctgggagctgtcacctccactcctaggcttttctgcctagagcagaattataggggcagtatacatccaggggtctgtgcggtggggctgggggattccttaagtgactttgggaaggatttgttttcccgagcatcaatttcacacctgggcattgcaccccaggctatgcagtctttcagtgtgaggaaggggcagaacaagaatgaggcggccccgtggcctcaaggaagcttgtggctttggaggatctgactccagcagagtctgtgccaatgtggggtgagcagggcccctgccatggagcagcaggaatttgagggatggagcaggttaaagaatgggaaacatcttcacttgtttttttttcttgcaaactactccctgctactcattgagactggttactggaagcaacttgttaagatttttctttctgggcgggcgcggtggctcacgcctgtaatcccagcactttgggaggccaaggcgggtggatcacctgaggtcaggagttcgagaccagcttagccaatatggtgaaaccccgtctctactaaaaatacaaaaattagccgggtgtggtggcatgtgccagctactcgggaggctgaggcaagagaatcacttgaacctcggaggctgaagttgcagtgagccaagattgagccattgctctccagcctgggtgacacagcaagactctgtctcaaaaaaaattttttatttctttcttttccatggaggcctagagtccctgtgaaggctaggaaggggctgctgatcccaggagtgcccacgaggagtggggggcactgttggcccataatcaggcaaacacccatcatttcatgggggattcatgaaatcatagtcaggcaaacacccgtcatttcatggctaagcatttgcagaaggtggaggattctcccccgagtccccaaatcagcagcctgtgctagggaccagagcaccgggggcaagaagacagaaccaatgtgggagtggggatggtcactaaatctgactgtgccacacaagcccatgatgaccttggcactggtttgggtggcaggatatgaaggaagctgtaggcattattgaaaaaatcattgttcagccaacagggtgaggctcccagcaaggccgtgccatcttcccacctccctgtgcccagagggttagactgtaagctcccggagggcgaggctggggctgagcgtgcctccacgtccccaaggcacagggtgcacagtgggtgctcactgaatatagtggactagtgagcagaggatgagaggactaccctgtaatgagccttggacagtctggcatttgccttaactcccactcccatgccctgggatcactgttggatatttactccatgaggacaaatactggggaggtgtggagaggagggagggcaggttcctcttactttcacccattgctgagaatgagcgcctgttggcactgcctttgtgagcctccgggagcaggtaacctgcggcccaagcccgcctaggactccacatcaggcaggcacaggactggccccttgtcctcataaaaactctcagtacagcttaaactctgtaagatctaaccagccaggaggaccctcgcttcctctccgccatgcttgccacctcttgcttctgagagtccatctcagttcgcagttctgtgacttgcattgacctggctccaatcaagctacaactcaagcagtcacggggagaaggattgtagatgggccagtgactcacagggtcaggcactcgggggagcctgagtcaggaggatgcttctggctggcacacctggcttcccctccatgctcagaactgcttcctactctacatccaggctcctgagcagcccccagcttaagcttcagcagctccagggtaaatccatctccgcccagagctgactccggatctgccccagtgacaataacaagataaatgccttccattctcttcgtacttacaggatgtaatccacatatttacacagtgtttcatttgcggtaatgtttgttttgtttcttgttccttcgtacctatctgggaagcctgtgcaattcagatgtccaggcccacttccagaagttctcattccctgtgcttgagtcaatggccgcagaccatacacctgagagcaagttaatctgctctaacaaagatatcacatctaagaatggtggttggcaggggctggggggtgggaagaatggggagttggtgcttcatgggtacagagattcagttttgcaagaggaaaagagctctggagatggatgctgctgatggctacaccgcaatgtgaatgtgcatgatgcttaaatatggttaagatgggccgggcgcggtggctcacgcctgtaatcccagcactttgggaggccgaggcgggcagatcacgaggtcaggagatcgagaccatcttggctaacacggtgaaaccccatctctactataaatacaaaaaattagccgggcgtgggggcgggcacctgtggtcccagctactcgggaggctgaggcaggagaatggcatgaacctgggaggtggagcttgcagtgagccgagatcacgccactgcactccaggctgggcgacagagcgagactccgtctc

SEQ ID NO: 425855 - DNA, 1202 bp, Homo sapiens
gacgcggggacactcgtgcgactggggcaaggtgcccaggggcttctctcctaatttgcctcacgtaacagttgagaccccagagggcagcaaaactgggttcgaattggagagccgtccaggcacagacaaattcattcatctgcccagtgcccgctaactgcggttccaggcgccggcgacgcaattccagagctgccaccgcttccccgcggagcatggggctgcctcgccgggcaggggacgcggcggagctgcgcaagagcctgaagccgctgctggagaagcgccggcgcgcgcgcatcaaccagagcctgagccagcttaaggggctcatcctgccgctgctgggccgggaggatgcttctggctggcacacctggcttcccctccatgctcagaactgcttcctactctacatccaggctcctgagcagcccccagcttaagcttcagcagctccagggtaaatccatctccgcccagagctgactccggatctgccccagtgacaataacaagataaatgccttccattctcttcgtacttacaggatgtaatccacatatttacacagtgtttcatttgcggtaatgtttgttttgtttcttgttccttcgtacctatctgggaagcctgtgcaattcagatgtccaggcccacttccagaagttctcattccctgtgcttgagtcaatggccgcagaccatacacctgagagcaagttaatctgctctaacaaagatatcacatctaagaatggtggttggcaggggctggggggtgggaagaatggggagttggtgcttcatgggtacagagattcagttttgcaagaggaaaagagctctggagatggatgctgctgatggctacaccgcaatgtgaatgtgcatgatgcttaaatatggttaagatgggccgggcgcggtggctcacgcctgtaatcccagcactttgggaggccgaggcgggcagatcacgaggtcaggagatcgagaccatcttggctaacacggtgaaaccccatctctactataaatacaaaaaattagccgggcgtgggggcgggcacctgtggtcccagctactcgggaggctgaggcaggagaatggcatgaacctgggaggtggagcttgcagtgagccgagatcacgccactgcactccaggctgggcgacagagcgagactccgtctc

SEQ ID NO: 425856 - DNA, 760 bp, Homo sapiens
ctgtagctggactacaagaacatttgtaaggtagtggaaaggggcagcaagatctatagatttaataacttatttctctgcagttggagcagaaaggtactgacctcctggtgatagcaatggaaaattatggctccttgggcagcaaaaagggtgtagaccttcctggtgactgtggacctgcttgccatgtcagaaaaggacatccaggatctgaagtttggggtagaatgggatgtggatatggtgtttgcctctttcatccatgtggcatctaatgtccatgaaattagaaaggcaattattgcaaactggagcaaggtgcccacttgcccaccagagttaggctcttaccttcccagaggaactgagacccacagctatttttatatatcttacagttcagatcagatacaaatatgtaaacctctacattatttctatgtagaaattatgatactctttaagcctgtcacagattttgttatttaatgcaaagaagcacatatattactatgggacacttttggtttgtttaaatattttgatagttgtattttaatgtaaagggtttcatttgtaatcttatacagatggtccccaacttacaatggttcaacttatgatttttcatctttacaacggcatgaaagcaatacattttcagtagaaactgtaggtcaaatactcatacaaccattctgtttttcactttactgcagtatttaataaacatatgagatattcaagattttaactt

SEQ ID NO: 425857 - DNA, 2582 bp, Homo sapiens
caggtgatctacccgcctccacctcccaaagtgttgtgattacaggcgtgagccaccacacccagccctttcactaatttttggcagagttcacaatcccatcctatgtcagaaacttgaacctaacttaagaaattttgagtcatttttttggaggactgaggctttgttctacctactcttgaagaatcctgatgaaatattcaaacacataaagggatggccctggaggtctatcctgcatacctggagagcttctctggtcctgcccaccttgaaagttgcagactttgttgtaacatctatgtgatgagcttccctgtgaagccccatttgacaggtgggccagcagtgttttatcagcactctgatggcccacatttcccaggaaaacttcttgaaacttaccgttgtgggcagtggtcagagcgtgtagttcttatgactgtcttgtttcatctgtggagcacgtgtggagcacgttggtacagcagtttctgtggggtttggcatgggtgattttggttagtaaccatcctccaattgttgcttgtgaaagtcattcataacttgttccttttacttagttttgttgttactgctgttgttgttggtttggttggttttgagaccgggtctggctctgtagcccaagctggaatgcggtggcgcgatcatggctccctgcagcctcaaactcctgggctcaagcaatcctcctgcctcagcctcccaagcagctgggaagataggcacgtgccaccacacccggctaattttttctttattttttttgtagagatgggggtctcactatgttgcccaggctggtctcaaactcctgggctcaagcgatcctttggcctcggcctcccaaagtgcatgagccaccatgcctggcctgtttagttttgtttcaagttgaaatacctttcttgtgttttctaattagaaaagtaatatctactcattgtaaaaactcaaacagtgcagaaatgtagaaagtagaaagtgtaagtccctggttgtcccttctgcctgagacaaccactgctcacagtttgatgtatatccttccagagactctcaaatttaagcaaataatttttattaccatgtctttttatttgaagacgtacatttgcctccaaagttcaacacaagttcaactgaccatatccttccatgacctgaatagatgctatcctttatcacgatgttcaattgcctttgaaagagagtagtccaggtatattcctgatcaaaatttggcatttttgatgatactactctacacagatcagactcatgtgcagaatcgtgcctggagagagaggtttggttaagacagagatttctggaaacattcaaattgcaaatggaaacttgaaacccacaatctaatgaggaatgtactggaaaaataatctgaagagttgacaaattgtgtactagattgaacacatggaatgcaatgcaatgagactttctgcactaaaacttatcctcatatgtacaacaatgatgtgtgtattatataacagtgatgtgtacatttctgacaccccatacataatatacacagtttgtataaatgcatacatttaaaaatatatatgtacaatacagctaacataaaactgtagtacgcctgaaggatattactagtgcctaatattgagtatgagtcactgcgtgttcgcatcaacttggaagtgcagtaattgttataaaattaatcagtgcagccaacattatttatgaatcacatctttgaaactgtgcagtagcatatacatatatatttttaaataacatttttcacagttttccagagttactgttgaaatctgcatcaccaaaaaaaaaaaaagcaagatttttttaacaatgtagacactcttcagacccagtaatctgcgtgtgatttcctatttgtagattcccaagagactttagcagtcaccagccttaatgcatgtacaggatattattgtgacttaatttatctgcagtttttaatccatgtgaaattggaatttataaacggacttggattaaacatgtctgcctttctaaggttgcaaatgttacattaaatgatttatgttgtaaatgagagaagttgagttgtacgtaaaagacatccaccaatttctgtgaatatttttacacggaaacttgagaatcaaaatacgttcaagtcagttgttctggctcccagtttataatctcgaaaagcaatctttttgtttcataaatggcttaaatgtagctcccacagattatcagtatgaagtctgacatttttcatggaaaagaagtatgtttttcttcattataactatagtttactatttgtctttgctatttcctgatacatacacatacgcacacacgcgcgcacatgcatgcacgtatgcacatgcacgctcccagtgtcccagtgaaggctcaacaggaagcttgagaaggtcatctcaatggccacagggttcctgttcaaccagtagccctgggatgccgctttgcttgtcattctttagtgtcacaagttagttccctgacttgtgtgcagtcag

SEQ ID NO: 425858 - DNA, 3217 bp, Homo sapiens
gaaaatgcagatttagcatcaagcacagacctacactcgctctttctctccggtacacacagctccccacattcgcacccctgcccgcgcgccgggccgcctgactgcacggcttcccctccagccagatgctggagaacacacactgattcgctgctttccaagaccctgttcagtctctttctctatacaaagatttttttaaaaactatatataagaattctttatttgcaccctccctccgagtcccctgctccgccagcctgcgcgcctcctagcaccacttttcactcccaaagaaggatgaagggtggttgtgtctcccagtggaaggcggccgccgggttcctcttctgtgtcatggtttttgcatctgctgagcgaccggtcttcacgaatcattttcttgtggagttgcataaagggggagaggacaaagctcgccaagttgcagcagaacacggctttggagtccgaaagcttccctttgctgaaggtctgtaccacttttatcacaatggccttgcaaaggccaagagaagacgcagcctacaccacaagcagcagctggagagagaccccagggtaaagatggctttgcagcaggaaggatttgaccgaaaaaagcgaggttacagagacatcaatgagatcgacatcaacatgaacgatcctctttttacaaagcagtggtatctgatcaatactgggcaagctgatggcactcctggccttgatttgaatgtggctgaagcctgggagctgggatacacagggaaaggtgttaccattggaattatggatgatgggattgactatctccacccggacctggcctccaactataatgccgaagcaagttacgacttcagcagcaacgacccctatccttaccctcggtacacagatgactggtttaacagccacgggacccgatgtgcaggagaagtttctgctgccgccaacaacaatatctgtggagttggagtagcatacaactccaaggttgcaggcatccggatgctggaccagccattcatgacagacatcatcgaggcctcctccatcagtcatatgccacagctgattgacatctacagcgccagctggggccccacagacaacggcaagacagtggatgggccccgggagctcacgctgcaggccatggccgatggcgtgaacaagggccgcggcggcaaaggcagcatctacgtgtgggcctccggggacggcggcagctatgacgactgcaactgcgacggctacgcctccagcatgtggaccatctccatcaactcagccatcaacgacggcaggactgccctgtacgacgagagctgctcttccaccttggcttccaccttcagcaacgggaggaaaaggaaccccgaggccggtgtggcaaccacagatttgtacggcaactgcactctgaggcattctgggacatctgcagctgcccccgaggcagctggtgtgtttgcactggctctggaggctaacctgggtctgacctggcgggacatgcagcatctgactgtgctcacctccaaacggaaccagcttcacgacgaggtccatcagtggcggcgcaatggggtcggcctggaatttaatcacctctttggctacggggtccttgatgcaggtgccatggtgaaaatggctaaagactggaaaaccgtgcctgagagattccactgtgtgggaggctccgtgcaggaccctgagaaaataccatccactggcaagttggtgctgacactcacaaccgacgcctgtgaggggaaggaaaattttgtccgctacctggagcatgtccaggctgtcatcacggtcaacgcaaccagaagaggagacctgaacatcaacatgacttcccctatgggcaccaagtccattttgctgagccggcgtccaagggatgacgactccaaggtgggctttgacaagtggcctttcatgaccactcacacgtggggggaagacgcccgaggcacctggaccctggagctgggatttgtcggcagcgccccgcagaagggggtgctgaaggagtggaccctgatgctgcatggcactcagagtgccccgtacatcgaccaggtggtgcgggattaccagtccaagttggccatgtccaagaaagaggagctggaggaagagctggacgaagccgtggagagaagcctgaaaagcatccttaacaagaactagcgctgcacatccgcctttcccaccgccctccctccccagctccgcctctgtcctcgctccacgtttcaggcaggcacctagcaattccatcacccgtacaggcaattccgtcttcttaatctgaagcttcactcactgtcaatgattattttcattacaatggaaacaatcttttttactctatgccccaaatatagcgttcccaacaacatccatgtcctatgtgtgactctaaattctttatttctgtcattcaaatgggtgatatcctgaaaaaaaaaaaaaaaaaaaactgggacagctttcccctcatttttttttttgtttctgagaaaagaacgtattttaaaagccacatagagtgactccaagaacaattgtccatggtctcaaacaaggggctgttacataacaagaaaatcaaagctgaggacagggtgtgagcgccacatctctgaaagcacaggagacactgtgctataaatcctttggggagcgatgttttgaatttagtgagatttaccagggatgtagattaaggtgatgtgattcaaaagatgccattcatagagagccctagttactgcatggggaaagagatccaggaagcatgagtgctggatattttactaccaatgccaagataattcactctactcagccggcgtggcaaatataaaacttacagagcgtggctgtgctctcaccagctgctgctctgagttatgttaaaatccgctagagcagcccaaatttttctcagtttgtatagagttcatcccagccccaattttctggggctcctcacatagctacccaatcaaacaagaatgtcccttttcctaagtcactttgaggtgtctcaatctgatctgagtgagaggcgacaggagtatttttttttttttacagctttacacacacagatgtgggctttgatttccaagtaatataatggaagagaaatctcatactcccccacagtttgatgtcatt

SEQ ID NO: 425859 - DNA, 3166 bp, Homo sapiens
ccccaactagcaccctcgctgtccttgtgcagtggaacgtccccaggtctgagaatgcacctcccgccgtgtccaccccggccgcgtctctcctgaaggcagatcttggaggtgcagccaggactcctagaggagcctcctccagtcaccatcgcgggtggggcgagccgggtctcctgctgggcttcccagccgcttcgctccggacctgcctggagcctacaaaaaacaagggctcgtccttgcactctcgccccccatggatcacccctagaagtggaaggcggccgccgggttcctcttctgtgtcatggtttttgcatctgctgagcgaccggtcttcacgaatcattttcttgtggagttgcataaagggggagaggacaaagctcgccaagttgcagcagaacacggctttggagtccgaaagcttccctttgctgaaggtctgtaccacttttatcacaatggccttgcaaaggccaagagaagacgcagcctacaccacaagcagcagctggagagagaccccagggtaaagatggctttgcagcaggaaggatttgaccgaaaaaagcgaggttacagagacatcaatgagatcgacatcaacatgaacgatcctctttttacaaagcagtggtatctgatcaatactgggcaagctgatggcactcctggccttgatttgaatgtggctgaagcctgggagctgggatacacagggaaaggtgttaccattggaattatggatgatgggattgactatctccacccggacctggcctccaactataatgccgaagcaagttacgacttcagcagcaacgacccctatccttaccctcggtacacagatgactggtttaacagccacgggacccgatgtgcaggagaagtttctgctgccgccaacaacaatatctgtggagttggagtagcatacaactccaaggttgcaggcatccggatgctggaccagccattcatgacagacatcatcgaggcctcctccatcagtcatatgccacagctgattgacatctacagcgccagctggggccccacagacaacggcaagacagtggatgggccccgggagctcacgctgcaggccatggccgatggcgtgaacaagggccgcggcggcaaaggcagcatctacgtgtgggcctccggggacggcggcagctatgacgactgcaactgcgacggctacgcctccagcatgtggaccatctccatcaactcagccatcaacgacggcaggactgccctgtacgacgagagctgctcttccaccttggcttccaccttcagcaacgggaggaaaaggaaccccgaggccggtgtggcaaccacagatttgtacggcaactgcactctgaggcattctgggacatctgcagctgcccccgaggcagctggtgtgtttgcactggctctggaggctaacctgggtctgacctggcgggacatgcagcatctgactgtgctcacctccaaacggaaccagcttcacgacgaggtccatcagtggcggcgcaatggggtcggcctggaatttaatcacctctttggctacggggtccttgatgcaggtgccatggtgaaaatggctaaagactggaaaaccgtgcctgagagattccactgtgtgggaggctccgtgcaggaccctgagaaaataccatccactggcaagttggtgctgacactcacaaccgacgcctgtgaggggaaggaaaattttgtccgctacctggagcatgtccaggctgtcatcacggtcaacgcaaccagaagaggagacctgaacatcaacatgacttcccctatgggcaccaagtccattttgctgagccggcgtccaagggatgacgactccaaggtgggctttgacaagtggcctttcatgaccactcacacgtggggggaagacgcccgaggcacctggaccctggagctgggatttgtcggcagcgccccgcagaagggggtgctgaaggagtggaccctgatgctgcatggcactcagagtgccccgtacatcgaccaggtggtgcgggattaccagtccaagttggccatgtccaagaaagaggagctggaggaagagctggacgaagccgtggagagaagcctgaaaagcatccttaacaagaactagcgctgcacatccgcctttcccaccgccctccctccccagctccgcctctgtcctcgctccacgtttcaggcaggcacctagcaattccatcacccgtacaggcaattccgtcttcttaatctgaagcttcactcactgtcaatgattattttcattacaatggaaacaatcttttttactctatgccccaaatatagcgttcccaacaacatccatgtcctatgtgtgactctaaattctttatttctgtcattcaaatgggtgatatcctgaaaaaaaaaaaaaaaaaaaactgggacagctttcccctcatttttttttttgtttctgagaaaagaacgtattttaaaagccacatagagtgactccaagaacaattgtccatggtctcaaacaaggggctgttacataacaagaaaatcaaagctgaggacagggtgtgagcgccacatctctgaaagcacaggagacactgtgctataaatcctttggggagcgatgttttgaatttagtgagatttaccagggatgtagattaaggtgatgtgattcaaaagatgccattcatagagagccctagttactgcatggggaaagagatccaggaagcatgagtgctggatattttactaccaatgccaagataattcactctactcagccggcgtggcaaatataaaacttacagagcgtggctgtgctctcaccagctgctgctctgagttatgttaaaatccgctagagcagcccaaatttttctcagtttgtatagagttcatcccagccccaattttctggggctcctcacatagctacccaatcaaacaagaatgtcccttttcctaagtcactttgaggtgtctcaatctgatctgagtgagaggcgacaggagtatttttttttttttacagctttacacacacagatgtgggctttgatttccaagtaatataatggaagagaaatctcatactcccccacagtttgatgtcatt

SEQ ID NO: 425860 - DNA, 2860 bp, Homo sapiens
tctagaggccatctcacttgtgatgtgagaactagaacatctggccatctgtccaaggaaggattaaggaagcttaccctacatcttgggttccaggtgaaatccattaaccacaagggctacatcaacttgaaaggaagacagtcctggagaacacagggcttacatttgctaaccccttgaaggcttgaaataggatgaaatggggaagcctgaaagagaatatcaagagaggatggaaaaccccaaagacatgctttggctccaacacaattttgtgaggtttggtccagtgcagcacactaatccagcactccagggaggactagaaatgtttaaagtctcccagcgctttccctttactgcgcctctggctgtacggacctaatgagatgccttgtgtttttcagaatgccgaagcaagttacgacttcagcagcaacgacccctatccttaccctcggtacacagatgactggtttaacagggactaaagctcccaccttgaaggcttgtactgcggattcaagacaggtatagagtgcttggtacagagcatggcacatgccacgggacccgatgtgcaggagaagtttctgctgccgccaacaacaatatctgtggagttggagtagcatacaactccaaggttgcaggcatccggatgctggaccagccattcatgacagacatcatcgaggcctcctccatcagtcatatgccacagctgattgacatctacagcgccagctggggccccacagacaacggcaagacagtggatgggccccgggagctcacgctgcaggccatggccgatggcgtgaacaagggccgcggcggcaaaggcagcatctacgtgtgggcctccggggacggcggcagctatgacgactgcaactgcgacggctacgcctccagcatgtggaccatctccatcaactcagccatcaacgacggcaggactgccctgtacgacgagagctgctcttccaccttggcttccaccttcagcaacgggaggaaaaggaaccccgaggccggtgtggcaaccacagatttgtacggcaactgcactctgaggcattctgggacatctgcagctgcccccgaggcagctggtgtgtttgcactggctctggaggctaacctgggtctgacctggcgggacatgcagcatctgactgtgctcacctccaaacggaaccagcttcacgacgaggtccatcagtggcggcgcaatggggtcggcctggaatttaatcacctctttggctacggggtccttgatgcaggtgccatggtgaaaatggctaaagactggaaaaccgtgcctgagagattccactgtgtgggaggctccgtgcaggaccctgagaaaataccatccactggcaagttggtgctgacactcacaaccgacgcctgtgaggggaaggaaaattttgtccgctacctggagcatgtccaggctgtcatcacggtcaacgcaaccagaagaggagacctgaacatcaacatgacttcccctatgggcaccaagtccattttgctgagccggcgtccaagggatgacgactccaaggtgggctttgacaagtggcctttcatgaccactcacacgtggggggaagacgcccgaggcacctggaccctggagctgggatttgtcggcagcgccccgcagaagggggtgctgaaggagtggaccctgatgctgcatggcactcagagtgccccgtacatcgaccaggtggtgcgggattaccagtccaagttggccatgtccaagaaagaggagctggaggaagagctggacgaagccgtggagagaagcctgaaaagcatccttaacaagaactagcgctgcacatccgcctttcccaccgccctccctccccagctccgcctctgtcctcgctccacgtttcaggcaggcacctagcaattccatcacccgtacaggcaattccgtcttcttaatctgaagcttcactcactgtcaatgattattttcattacaatggaaacaatcttttttactctatgccccaaatatagcgttcccaacaacatccatgtcctatgtgtgactctaaattctttatttctgtcattcaaatgggtgatatcctgaaaaaaaaaaaaaaaaaaaactgggacagctttcccctcatttttttttttgtttctgagaaaagaacgtattttaaaagccacatagagtgactccaagaacaattgtccatggtctcaaacaaggggctgttacataacaagaaaatcaaagctgaggacagggtgtgagcgccacatctctgaaagcacaggagacactgtgctataaatcctttggggagcgatgttttgaatttagtgagatttaccagggatgtagattaaggtgatgtgattcaaaagatgccattcatagagagccctagttactgcatggggaaagagatccaggaagcatgagtgctggatattttactaccaatgccaagataattcactctactcagccggcgtggcaaatataaaacttacagagcgtggctgtgctctcaccagctgctgctctgagttatgttaaaatccgctagagcagcccaaatttttctcagtttgtatagagttcatcccagccccaattttctggggctcctcacatagctacccaatcaaacaagaatgtcccttttcctaagtcactttgaggtgtctcaatctgatctgagtgagaggcgacaggagtatttttttttttttacagctttacacacacagatgtgggctttgatttccaagtaatataatggaagagaaatctcatactcccccacagtttgatgtcatt

SEQ ID NO: 425861 - DNA, 392 bp, Homo sapiens
gatccaggaagcatgagtgctggatattttactaccaatgccaagataattcactctactcagccggcgtggcaaatataaaacttacagagcgtggctgtgctctcaccagctgctgctctgagttatgttaaaatccgctagagcagcccaaatttttctcagtttgtatagagttcatcccagccccaattttctggggctcctcacatagctacccaaaagagaaaaaaaattaagacaagcctggcaacacacctggtgaagagtagtttactagcttttcaaacaagaatgtcccttttcctaagtcactttgaggtgtctcaatctgatctgagtgagaggcgacaggagtatttttttttttttacagctttacacacacagat

SEQ ID NO: 425862 - DNA, 2431 bp, Homo sapiens
gaaaatgcagatttagcatcaagcacagacctacactcgctctttctctccggtacacacagctccccacattcgcacccctgcccgcgcgccgggccgcctgactgcacggcttcccctccagccagatgctggagaacacacactgattcgctgctttccaagaccctgttcagtctctttctctatacaaagatttttttaaaaactatatataagaattctttatttgcaccctccctccgagtcccctgctccgccagcctgcgcgcctcctagcaccacttttcactcccaaagaaggatgaagggtggttgtgtctcccagtggaaggcggccgccgggttcctcttctgtgtcatggtttttgcatctgctgagcgaccggtcttcacgaatcattttcttgtggagttgcataaagggggagaggacaaagctcgccaagttgcagcagaacacggctttggagtccgaaagcttccctttgctgaaggtctgtaccacttttatcacaatggccttgcaaaggccaagagaagacgcagcctacaccacaagcagcagctggagagagaccccagggtaaagatggctttgcagcaggaaggatttgaccgaaaaaagcgaggttacagagacatcaatgagatcgacatcaacatgaacgatcctctttttacaaagcagtggtatctgatcaatactgggcaagctgatggcactcctggccttgatttgaatgtggctgaagcctgggagctgggatacacagggaaaggtgttaccattggaattatggatgatgggattgactatctccacccggacctggcctccaactataatgccgaagcaagttacgacttcagcagcaacgacccctatccttaccctcggtacacagatgactggtttaacagccacgggacccgatgtgcaggagaagtttctgctgccgccaacaacaatatctgtggagttggagtagcatacaactccaaggttgcaggcatccggatgctggaccagccattcatgacagacatcatcgaggcctcctccatcagtcatatgccacagctgattgacatctacagcgccagctggggccccacagacaacggcaagacagtggatgggccccgggagctcacgctgcaggccatggccgatggcgtgaacaagggccgcggcggcaaaggcagcatctacgtgtgggcctccggggacggcggcagctatgacgactgcaactgcgacggctacgcctccagcatgtggaccatctccatcaactcagccatcaacgacggcaggactgccctgtacgacgagagctgctcttccaccttggcttccaccttcagcaacgggaggaaaaggaaccccgaggccggtgtggcaaccacagatttgtacggcaactgcactctgaggcattctgggacatctgcagctgcccccgaggcagctggtgtgtttgcactggctctggaggctaacctgggtctgacctggcgggacatgcagcatctgactgtgctcacctccaaacggaaccagcttcacgacgaggtccatcagtggcggcgcaatggggtcggcctggaatttaatcacctctttggctacggggtccttgatgcaggtgccatggtgaaaatggctaaagactggaaaaccgtgcctgagagattccactgtgtgggaggctccgtgcaggaccctgagaaaataccatccactggcaagttggtgctgacactcacaaccgacgcctgtgaggggaaggaaaattttgtccgctacctggagcatgtccaggctgtcatcacggtcaacgcaaccagaagaggagacctgaacatcaacatgacttcccctatgggcaccaagtccattttgctgagccggcgtccaagggatgacgactccaaggtgggctttgacaagtggcctttcatgaccactcacacgtggggggaagacgcccgaggcacctggaccctggagctgggatttgtcggcagcgccccgcagaagggggtgctgaaggagtggaccctgatgctgcatggcactcagagtgccccgtacatcgaccaggtggtgcgggattaccagtccaagttggccatgtccaagaaagaggagctggaggaagagctggacgaagccgtggagagaagcctgaaaagcatccttaacaagaactagcgctgcacatccgcctttcccaccgccctccctccccagctccgcctctgtcctcgctccacgtttcaggcaggcacctagcaattccatcacccgtacaggcaattccgtcttcttaatctgaagcttcactcactgtcaatgattattttcattacaatggaaacaatcttttttactctatgccccaaatatagcgttcccaacaac

SEQ ID NO: 425863 - DNA, 3007 bp, Homo sapiens
gaaaatgcagatttagcatcaagcacagacctacactcgctctttctctccggtacacacagctccccacattcgcacccctgcccgcgcgccgggccgcctgactgcacggcttcccctccagccagatgctggagaacacacactgattcgctgctttccaagaccctgttcagtctctttctctatacaaagatttttttaaaaactatatataagaattctttatttgcaccctccctccgagtcccctgctccgccagcctgcgcgcctcctagcaccacttttcactcccaaagaaggatgaagggtggttgtgtctcccagtggaaggcggccgccgggttcctcttctgtgtcatggtttttgcatctgctgagcgaccggtcttcacgaatcattttcttgtggagttgcataaagggggagaggacaaagctcgccaagttgcagcagaacacggctttggagtccgaaagcttccctttgctgaaggtctgtaccacttttatcacaatggccttgatttgaatgtggctgaagcctgggagctgggatacacagggaaaggtgttaccattggaattatggatgatgggattgactatctccacccggacctggcctccaactataatgccgaagcaagttacgacttcagcagcaacgacccctatccttaccctcggtacacagatgactggtttaacagccacgggacccgatgtgcaggagaagtttctgctgccgccaacaacaatatctgtggagttggagtagcatacaactccaaggttgcaggcatccggatgctggaccagccattcatgacagacatcatcgaggcctcctccatcagtcatatgccacagctgattgacatctacagcgccagctggggccccacagacaacggcaagacagtggatgggccccgggagctcacgctgcaggccatggccgatggcgtgaacaagggccgcggcggcaaaggcagcatctacgtgtgggcctccggggacggcggcagctatgacgactgcaactgcgacggctacgcctccagcatgtggaccatctccatcaactcagccatcaacgacggcaggactgccctgtacgacgagagctgctcttccaccttggcttccaccttcagcaacgggaggaaaaggaaccccgaggccggtgtggcaaccacagatttgtacggcaactgcactctgaggcattctgggacatctgcagctgcccccgaggcagctggtgtgtttgcactggctctggaggctaacctgggtctgacctggcgggacatgcagcatctgactgtgctcacctccaaacggaaccagcttcacgacgaggtccatcagtggcggcgcaatggggtcggcctggaatttaatcacctctttggctacggggtccttgatgcaggtgccatggtgaaaatggctaaagactggaaaaccgtgcctgagagattccactgtgtgggaggctccgtgcaggaccctgagaaaataccatccactggcaagttggtgctgacactcacaaccgacgcctgtgaggggaaggaaaattttgtccgctacctggagcatgtccaggctgtcatcacggtcaacgcaaccagaagaggagacctgaacatcaacatgacttcccctatgggcaccaagtccattttgctgagccggcgtccaagggatgacgactccaaggtgggctttgacaagtggcctttcatgaccactcacacgtggggggaagacgcccgaggcacctggaccctggagctgggatttgtcggcagcgccccgcagaagggggtgctgaaggagtggaccctgatgctgcatggcactcagagtgccccgtacatcgaccaggtggtgcgggattaccagtccaagttggccatgtccaagaaagaggagctggaggaagagctggacgaagccgtggagagaagcctgaaaagcatccttaacaagaactagcgctgcacatccgcctttcccaccgccctccctccccagctccgcctctgtcctcgctccacgtttcaggcaggcacctagcaattccatcacccgtacaggcaattccgtcttcttaatctgaagcttcactcactgtcaatgattattttcattacaatggaaacaatcttttttactctatgccccaaatatagcgttcccaacaacatccatgtcctatgtgtgactctaaattctttatttctgtcattcaaatgggtgatatcctgaaaaaaaaaaaaaaaaaaaactgggacagctttcccctcatttttttttttgtttctgagaaaagaacgtattttaaaagccacatagagtgactccaagaacaattgtccatggtctcaaacaaggggctgttacataacaagaaaatcaaagctgaggacagggtgtgagcgccacatctctgaaagcacaggagacactgtgctataaatcctttggggagcgatgttttgaatttagtgagatttaccagggatgtagattaaggtgatgtgattcaaaagatgccattcatagagagccctagttactgcatggggaaagagatccaggaagcatgagtgctggatattttactaccaatgccaagataattcactctactcagccggcgtggcaaatataaaacttacagagcgtggctgtgctctcaccagctgctgctctgagttatgttaaaatccgctagagcagcccaaatttttctcagtttgtatagagttcatcccagccccaattttctggggctcctcacatagctacccaatcaaacaagaatgtcccttttcctaagtcactttgaggtgtctcaatctgatctgagtgagaggcgacaggagtatttttttttttttacagctttacacacacagatgtgggctttgatttccaagtaatataatggaagagaaatctcatactcccccacagtttgatgtcatt

SEQ ID NO: 425864 - DNA, 1730 bp, Homo sapiens
gtggtcaagttggcaaaccgtggtgtcgtcctagcagtagattcatctatagactagttgtcagctccaaacggaaccagcttcacgacgaggtccatcagtggcggcgcaatggggtcggcctggaatttaatcacctctttggctacggggtccttgatgcaggtgccatggtgaaaatggctaaagactggaaaaccgtgcctgagagattccactgtgtgggaggctccgtgcaggaccctgagaaaataccatccactggcaagttggtgctgacactcacaaccgacgcctgtgaggggaaggaaaattttgtccgctacctggagcatgtccaggctgtcatcacggtcaacgcaaccagaagaggagacctgaacatcaacatgacttcccctatgggcaccaagtccattttgctgagccggcgtccaagggatgacgactccaaggtgggctttgacaagtggcctttcatgaccactcacacgtggggggaagacgcccgaggcacctggaccctggagctgggatttgtcggcagcgccccgcagaagggggtgctgaaggagtggaccctgatgctgcatggcactcagagtgccccgtacatcgaccaggtggtgcgggattaccagtccaagttggccatgtccaagaaagaggagctggaggaagagctggacgaagccgtggagagaagcctgaaaagcatccttaacaagaactagcgctgcacatccgcctttcccaccgccctccctccccagctccgcctctgtcctcgctccacgtttcaggcaggcacctagcaattccatcacccgtacaggcaattccgtcttcttaatctgaagcttcactcactgtcaatgattattttcattacaatggaaacaatcttttttactctatgccccaaatatagcgttcccaacaacatccatgtcctatgtgtgactctaaattctttatttctgtcattcaaatgggtgatatcctgaaaaaaaaaaaaaaaaaaaactgggacagctttcccctcatttttttttttgtttctgagaaaagaacgtattttaaaagccacatagagtgactccaagaacaattgtccatggtctcaaacaaggggctgttacataacaagaaaatcaaagctgaggacagggtgtgagcgccacatctctgaaagcacaggagacactgtgctataaatcctttggggagcgatgttttgaatttagtgagatttaccagggatgtagattaaggtgatgtgattcaaaagatgccattcatagagagccctagttactgcatggggaaagagatccaggaagcatgagtgctggatattttactaccaatgccaagataattcactctactcagccggcgtggcaaatataaaacttacagagcgtggctgtgctctcaccagctgctgctctgagttatgttaaaatccgctagagcagcccaaatttttctcagtttgtatagagttcatcccagccccaattttctggggctcctcacatagctacccaatcaaacaagaatgtcccttttcctaagtcactttgaggtgtctcaatctgatctgagtgagaggcgacaggagtatttttttttttttacagctttacacacacagatgtgggctttgatttccaagtaatataatggaagagaaatctcatactcccccacagtttgatgtcatt

SEQ ID NO: 425865 - DNA, 543 bp, Homo sapiens
gcaacgtgttggaccttccggagcttctcagaagacagagggttttcttttgaggtaaatttgatagtacattttgatagtacaggaggcgatacggcatggtgacagaaaagcgccggcttggttagcgggaccacctggcagggctgcaggctgtgccacttaccaggcaggggaccttgggccagctgcttggcctcactcaccctgtttcctcagctgcaattgggatgaacagactgcctgcttcggggttgcctaaaactcacattgcttaatgatgtgaaatgcttagcgcagtgcctggcatagagagaattctcattagatgatacctcagctgggctttaggagctacagaagaagctgcatctccatgagctcagcgtgtttctagctttcctttttgttttctattcaacctttcacccaactcagcttctcaatccctaaatgacaaaggtttgggaaggaagacttggaccgatgcttgcatttgtttctgagaattaaacgttatgttttcttcaatccaaataggtt

SEQ ID NO: 425866 - DNA, 499 bp, Homo sapiens
accatttttaacctacaagaatggcgatttcatatggttcatttggtttataaatacttgctgaataaatgaatgaactgaaattttgagttgatgccaccaggaagagaatagacagttatatttgtgcacagttagaaagagttcgctgtcctgagttcacttgatcactttttatcctaaattgccacccgctaccgtcgtcgtcttccacataataattttctattaggaaaattattcattaaaacagataacatgggtcacttaagtgtaaaacttaaaggtaacacttttttaaggaaatctaccagaagaaaatctttttctaatttttaaagtttaatgaaacataatttacatacaatgtaaatggctaataatttacgtacgatagctaatttttaactcttcatgtttttctgttggcaggcaacgtgttggaccttccggagcttctcagaagacagagggttttcttttgaggtaaatttgatag

SEQ ID NO: 425867 - DNA, 4678 bp, Homo sapiens
catcaataaccttttcagatgaaagcttatagttattcttcaataaaaattcattgactaagaagtttagagctctcttttcaagaggtttgattggctcctgaatttcaggacttgatttgtaatttttattgaagaataactataagcttacatcaataaccttttcagatgaaaacgatgatcaggattttgaattatgggatgatgtaggattaaacattccaaaacctccagacttattgcaactctaccgggattttggaaatcatcaagtaactggaaaagatcttgtagatgtggccagtggagtagaagaagatgaattagaggcccttacaccaattataagcaaccttcctccaactcttgaaactccccagcctgcagagaactccatgttagtacagaaattagaagataaaattagtttgttaaatagtgagaaatggtcattgatggagcaaatcagaagacttaaaagtgaaatggacttcctcaaaaatgaacactttgccatcccagcagtttgtgactctgttcagcctcctttggatcagttgccccacaaagactctgaggacagtggacagcatccagatgtaaatagttcagacaagggaaaaaacacagacatccatctttcaatatcagatgaagctgattccactattcctaaagagaattccccaaattcattccccaggagagaaagagaaggaatgccaccttcttctctatcaagtaaaaagacagttcattttgataaacctaataggaaattgtctcctgcattccatcaagcactactctctttttgtcgaatgtcagcagatagtcgtttaggatacgaggtgtctcgtattgcagacagtgaaaaaagcgttatgttaatgctgggacgctgcctgccacacattgttcccaatgtgctattggcaaagagagaggagttgatccccctcatattgtgtacagcatgtctacatcctgagcctaaagagcgagatcagcttctccacatacttttcaatttgatcaagaggccagatgatgagcaaaggcaaatgatactgacaggttgtgtggcatttgcgcgtcatgttggaccaacacgtgtagaagctgaacttttaccacagtgttgggaacagattaatcacaaatacccagaaagacgactgcttgtggcagaatcctgtggagcactggcaccttaccttcctaaagaaatccgtagctccttggttctttcaatgttgcaacaaatgttaatggaagataaggcagatttggtaagagaagctgttatcaaaagccttggtatcattatgggatacattgatgatccagacaaatatcatcagggttttgaattgttgctgtcagccttgggtgatccctcagaaagagtagttagtgctacacatcaagtatttttaccagcttacgctgcgtggactacagaacttggaaatttacagtctcatcttatacttacactactgaacaagattgaaaaacttctcagggaaggagaacatggactggatgaacacaaactccacatgtatctttctgccttgcagtccttgatcccatctctctttgcattagtgctacagaatgcacctttctccagcaaagccaagcttcatggtgaagtgccacagatagaagtgactaggtttcctcggcctatgtcgcctcttcaagatgtgtccactattatcggaagtcgtgagcaattggcagtgctgctgcaactttatgactaccagctagaacaagagggtacaacaggctgggagagtttactgtgggttgtcaatcaattgttgccacaacttatagaaatagttggcaaaattaatgttacttcaactgcctgtgtccatgaattctccagatttttctggcgcctttgccggacatttggcaaaatttttacaaacactaaggtaaaacctcagttccaggagattttaagactatctgaagaaaacattgattcctcagcaggaaatggggtcctcactaaagctacagtccccatttatgcaacaggagtccttacgtgttatattcagataaaggagtatttgcatatacataatgagatatcttgggaatgggacccaagtctaaacacaaaatgtgtttcatatacacattatacacatagcctgaaggaagaagaccgaaaactgttagttggattcttagaagatgtaatgacgctgctttcattatctcatgctcctcttgatagcctgaaggcttcttttgtggaattgggtgcaaacccagcctaccatgagttactattaactgttttgtggtatggtgttgtccatacttcagcactcgtgaggtgtactgctgctagaatgtttgagctgttggtgaagggggtgaatgaaactctggtagctcagagggttgttcctgctctcattactctctccagtgaccctgaaatctctgtcaggattgccacaattccagcctttggcactattatggaaacagtaattcaaagagagttgctggaaagagtgaaaatgcagttggcttctttcctggaagatcctcagtatcaagaccaacattctttgcatacagagatcataaaaacatttggtagagttggccctaacgcagaacccaggttccgagatgagtttgttataccacatttgcataagttagccttggtgaacaacttacagattgtggattctaaaagactggacattgctacgcatctttttgaagcctacagtgcactttcctgttgtttcatttcagaggatttaatggttaatcactttttacctggtctcagatgtttacggactgacatggaacatctctctccagagcatgaggttattttaagttccatgataaaagaatgtgaacaaaaagttgaaaacaagaccgtccaagagcctcaaggctcaatgtcaattgctgcaagcttagtgagtgaagatacaaagaccaagtttttgaacaaaatgggccagttgacaacatcaggtgccatgttggccaatgtatttcagagaaagaagtagaagcaggaaagaagcccccagtaaacactaagatggacctcaagccgactggttccttgtacttgaagtacttgccttttttgtttcctcagttttatgttcttgcattataattttatcctaacctccaaagatatttgcactgcttttaattactgctgtatatttgttgattttggagttacaactgtggtgatagaaaattgagttgatggtctgtaccaagtcccttgtctatgttcttgtctttcagaataatttttatataaatatatatatagtgaagaagttttttttaatttttggatgggatattcgcaaatatctgtattatacactaagctattacaatggtacttaaaataatgtaaatttgaagtcattgttataaaataataaagtggagattacttaagtatttaaattatgaaagaataatgcagactttttattgtttcttaactgactagaaagagccaccagcattactctgtgccttttggacatcagtttgtgtgttctgtaggaattgtgtgcattccattcacacagtatttctttaggatgctgtgatgatttgaattacaaatcctacagtcaatagctaaagacgaaaccttcatttcagaactctcatgaatattctttaagtgctatttaaacctccccagcacttagatgcatataatggacttacctgaggaaagacagcacataggcatggggagaggtaaccaaggtgaattttacaaactggtgtatagtagatttaaatgctcaaaaataaatgtaactgagaagagttaataattgtgagatttttcccaaattgagatacagaagaaaatatagtttgaatctgaaatttaacacttatttatgtaaaacattttatttaagatattttctaatgattttaattttagagagtaccttttcattctgtgtgttacagagaagtactgaaaagttaaggacacttgggggctacttttttccctctaaactaaaaaagacattggctgaattataactagttagttatcacctcgtcccttaaagtcagtgacctcctgtgtttgatgtatattacatagagtcttaagtcagtgtacagttccactggaatttgacagttgtctctacagtcatgcaactcgaagtagaaaagagtgctggacataggaagggggtgcttggtttgaggggttaatgtgaggcctttttgaaaaatgaatattttgataaaaagaattcttgttttagcacagttgatgcacataagtgattctcatatttgttgtataaactggtttaatacatttggaacatagttggattacattcatttcctgggaaagctagcttaccatacattcaagtttataaaacaatttgccataggcaaagccatttaaaaagttcattctgaaattatttcatttacctacagtgaaataattgtgaactaagtagtctttctgaaaactgttgggttctaggcattcctgagaaattgaaagtggctacctttcatgtcaaaaatgttgatctattataaataaaatgtttttgcatatgtttttgaaaaaatt

SEQ ID NO: 425868 - DNA, 4612 bp, Homo sapiens
ggaaagccaaggagaccattcaggccctccgagccaacctgacaaaggccgcagaacatgaagttcctttacaggaacgaaaaaattacaaatcaagtcctgaaattcaggagccaatcaaacctcttgaaaagagagctctaaacttcttagtcaatgaatttttattgaagaataactataagcttacatcaataaccttttcagatgaaaacgatgatcaggattttgaattatgggatgatgtaggattaaacattccaaaacctccagacttattgcaactctaccgggattttggaaatcatcaagtaactggaaaagatcttgtagatgtggccagtggagtagaagaagatgaattagaggcccttacaccaattataagcaaccttcctccaactcttgaaactccccagcctgcagagaactccatgttagtacagaaattagaagataaaattagtttgttaaatagtgagaaatggtcattgatggagcaaatcagaagacttaaaagtgaaatggacttcctcaaaaatgaacactttgccatcccagcagtttgtgactctgttcagcctcctttggatcagttgccccacaaagactctgaggacagtggacagcatccagatgtaaatagttcagacaagggaaaaaacacagacatccatctttcaatatcagatgaagctgattccactattcctaaagagaattccccaaattcattccccaggagagaaagagaaggaatgccaccttcttctctatcaagtaaaaagacagttcattttgataaacctaataggaaattgtctcctgcattccatcaagcactactctctttttgtcgaatgtcagcagatagtcgtttaggatacgaggtgtctcgtattgcagacagtgaaaaaagcgttatgttaatgctgggacgctgcctgccacacattgttcccaatgtgctattggcaaagagagaggagttgatccccctcatattgtgtacagcatgtctacatcctgagcctaaagagcgagatcagcttctccacatacttttcaatttgatcaagaggccagatgatgagcaaaggcaaatgatactgacaggttgtgtggcatttgcgcgtcatgttggaccaacacgtgtagaagctgaacttttaccacagtgttgggaacagattaatcacaaatacccagaaagacgactgcttgtggcagaatcctgtggagcactggcaccttaccttcctaaagaaatccgtagctccttggttctttcaatgttgcaacaaatgttaatggaagataaggcagatttggtaagagaagctgttatcaaaagccttggtatcattatgggatacattgatgatccagacaaatatcatcagggttttgaattgttgctgtcagccttgggtgatccctcagaaagagtagttagtgctacacatcaagtatttttaccagcttacgctgcgtggactacagaacttggaaatttacagtctcatcttatacttacactactgaacaagattgaaaaacttctcagggaaggagaacatggactggatgaacacaaactccacatgtatctttctgccttgcagtccttgatcccatctctctttgcattagtgctacagaatgcacctttctccagcaaagccaagcttcatggtgaagtgccacagatagaagtgactaggtttcctcggcctatgtcgcctcttcaagatgtgtccactattatcggaagtcgtgagcaattggcagtgctgctgcaactttatgactaccagctagaacaagagggtacaacaggctgggagagtttactgtgggttgtcaatcaattgttgccacaacttatagaaatagttggcaaaattaatgttacttcaactgcctgtgtccatgaattctccagatttttctggcgcctttgccggacatttggcaaaatttttacaaacactaaggtaaaacctcagttccaggagattttaagactatctgaagaaaacattgattcctcagcaggaaatggggtcctcactaaagctacagtccccatttatgcaacaggagtccttacgtgttatattcaggaagaagaccgaaaactgttagttggattcttagaagatgtaatgacgctgctttcattatctcatgctcctcttgatagcctgaaggcttcttttgtggaattgggtgcaaacccagcctaccatgagttactattaactgttttgtggtatggtgttgtccatacttcagcactcgtgaggtgtactgctgctagaatgtttgagctgttggtgaagggggtgaatgaaactctggtagctcagagggttgttcctgctctcattactctctccagtgaccctgaaatctctgtcaggattgccacaattccagcctttggcactattatggaaacagtaattcaaagagagttgctggaaagagtgaaaatgcagttggcttctttcctggaagatcctcagtatcaagaccaacattctttgcatacagagatcataaaaacatttggtagagttggccctaacgcagaacccaggttccgagatgagtttgttataccacatttgcataagttagccttggtgaacaacttacagattgtggattctaaaagactggacattgctacgcatctttttgaagcctacagtgcactttcctgttgtttcatttcagaggatttaatggttaatcactttttacctggtctcagatgtttacggactgacatggaacatctctctccagagcatgaggttattttaagttccatgataaaagaatgtgaacaaaaagttgaaaacaagaccgtccaagagcctcaaggctcaatgtcaattgctgcaagcttagtgagtgaagatacaaagaccaagtttttgaacaaaatgggccagttgacaacatcaggtgccatgttggccaatgtatttcagagaaagaagtagaagcaggaaagaagcccccagtaaacactaagatggacctcaagccgactggttccttgtacttgaagtacttgccttttttgtttcctcagttttatgttcttgcattataattttatcctaacctccaaagatatttgcactgcttttaattactgctgtatatttgttgattttggagttacaactgtggtgatagaaaattgagttgatggtctgtaccaagtcccttgtctatgttcttgtctttcagaataatttttatataaatatatatatagtgaagaagttttttttaatttttggatgggatattcgcaaatatctgtattatacactaagctattacaatggtacttaaaataatgtaaatttgaagtcattgttataaaataataaagtggagattacttaagtatttaaattatgaaagaataatgcagactttttattgtttcttaactgactagaaagagccaccagcattactctgtgccttttggacatcagtttgtgtgttctgtaggaattgtgtgcattccattcacacagtatttctttaggatgctgtgatgatttgaattacaaatcctacagtcaatagctaaagacgaaaccttcatttcagaactctcatgaatattctttaagtgctatttaaacctccccagcacttagatgcatataatggacttacctgaggaaagacagcacataggcatggggagaggtaaccaaggtgaattttacaaactggtgtatagtagatttaaatgctcaaaaataaatgtaactgagaagagttaataattgtgagatttttcccaaattgagatacagaagaaaatatagtttgaatctgaaatttaacacttatttatgtaaaacattttatttaagatattttctaatgattttaattttagagagtaccttttcattctgtgtgttacagagaagtactgaaaagttaaggacacttgggggctacttttttccctctaaactaaaaaagacattggctgaattataactagttagttatcacctcgtcccttaaagtcagtgacctcctgtgtttgatgtatattacatagagtcttaagtcagtgtacagttccactggaatttgacagttgtctctacagtcatgcaactcgaagtagaaaagagtgctggacataggaagggggtgcttggtttgaggggttaatgtgaggcctttttgaaaaatgaatattttgataaaaagaattcttgttttagcacagttgatgcacataagtgattctcatatttgttgtataaactggtttaatacatttggaacatagttggattacattcatttcctgggaaagctagcttaccatacattcaagtttataaaacaatttgccataggcaaagccatttaaaaagttcattctgaaattatttcatttacctacagtgaaataattgtgaactaagtagtctttctgaaaactgttgggttctaggcattcctgagaaattgaaagtggctacctttcatgtcaaaaatgttgatctattataaataaaatgtttttgcatatgtttttgaaaaaatt

SEQ ID NO: 425869 - DNA, 4612 bp, Homo sapiens
ggaaagccaaggagaccattcaggccctccgagccaacctgacaaaggccgcagaacatgaagttcctttacaggaacgaaaaaattacaaatcaagtcctgaaattcaggagccaatcaaacctcttgaaaagagagctctaaacttcttagtcaatgaatttttattgaagaataactataagcttacatcaataaccttttcagatgaaaacgatgatcaggattttgaattatgggatgatgtaggattaaacattccaaaacctccagacttattgcaactctaccgggattttggaaatcatcaagtaactggaaaagatcttgtagatgtggccagtggagtagaagaagatgaattagaggcccttacaccaattataagcaaccttcctccaactcttgaaactccccagcctgcagagaactccatgttagtacagaaattagaagataaaattagtttgttaaatagtgagaaatggtcattgatggagcaaatcagaagacttaaaagtgaaatggacttcctcaaaaatgaacactttgccatcccagcagtttgtgactctgttcagcctcctttggatcagttgccccacaaagactctgaggacagtggacagcatccagatgtaaatagttcagacaagggaaaaaacacagacatccatctttcaatatcagatgaagctgattccactattcctaaagagaattccccaaattcattccccaggagagaaagagaaggaatgccaccttcttctctatcaagtaaaaagacagttcattttgataaacctaataggaaattgtctcctgcattccatcaagcactactctctttttgtcgaatgtcagcagatagtcgtttaggatacgaggtgtctcgtattgcagacagtgaaaaaagcgttatgttaatgctgggacgctgcctgccacacattgttcccaatgtgctattggcaaagagagaggagttgatccccctcatattgtgtacagcatgtctacatcctgagcctaaagagcgagatcagcttctccacatacttttcaatttgatcaagaggccagatgatgagcaaaggcaaatgatactgacaggttgtgtggcatttgcgcgtcatgttggaccaacacgtgtagaagctgaacttttaccacagtgttgggaacagattaatcacaaatacccagaaagacgactgcttgtggcagaatcctgtggagcactggcaccttaccttcctaaagaaatccgtagctccttggttctttcaatgttgcaacaaatgttaatggaagataaggcagatttggtaagagaagctgttatcaaaagccttggtatcattatgggatacattgatgatccagacaaatatcatcagggttttgaattgttgctgtcagccttgggtgatccctcagaaagagtagttagtgctacacatcaagtatttttaccagcttacgctgcgtggactacagaacttggaaatttacagtctcatcttatacttacactactgaacaagattgaaaaacttctcagggaaggagaacatggactggatgaacacaaactccacatgtatctttctgccttgcagtccttgatcccatctctctttgcattagtgctacagaatgcacctttctccagcaaagccaagcttcatggtgaagtgccacagatagaagtgactaggtttcctcggcctatgtcgcctcttcaagatgtgtccactattatcggaagtcgtgagcaattggcagtgctgctgcaactttatgactaccagctagaacaagagggtacaacaggctgggagagtttactgtgggttgtcaatcaattgttgccacaacttatagaaatagttggcaaaattaatgttacttcaactgcctgtgtccatgaattctccagatttttctggcgcctttgccggacatttggcaaaatttttacaaacactaaggtaaaacctcagttccaggagattttaagactatctgaagaaaacattgattcctcagcaggaaatggggtcctcactaaagctacagtccccatttatgcaacaggagtccttacgtgttatattcaggaagaagaccgaaaactgttagttggattcttagaagatgtaatgacgctgctttcattatctcatgctcctcttgatagcctgaaggcttcttttgtggaattgggtgcaaacccagcctaccatgagttactattaactgttttgtggtatggtgttgtccatacttcagcactcgtgaggtgtactgctgctagaatgtttgagctgactcttcgaggcatgagtgaagcgttagttgacaagcgggttgctccggcccttgttaccttgtccagtgatcctgaattctctgtcaggattgccacaattccagcctttggcactattatggaaacagtaattcaaagagagttgctggaaagagtgaaaatgcagttggcttctttcctggaagatcctcagtatcaagaccaacattctttgcatacagagatcataaaaacatttggtagagttggccctaacgcagaacccaggttccgagatgagtttgttataccacatttgcataagttagccttggtgaacaacttacagattgtggattctaaaagactggacattgctacgcatctttttgaagcctacagtgcactttcctgttgtttcatttcagaggatttaatggttaatcactttttacctggtctcagatgtttacggactgacatggaacatctctctccagagcatgaggttattttaagttccatgataaaagaatgtgaacaaaaagttgaaaacaagaccgtccaagagcctcaaggctcaatgtcaattgctgcaagcttagtgagtgaagatacaaagaccaagtttttgaacaaaatgggccagttgacaacatcaggtgccatgttggccaatgtatttcagagaaagaagtagaagcaggaaagaagcccccagtaaacactaagatggacctcaagccgactggttccttgtacttgaagtacttgccttttttgtttcctcagttttatgttcttgcattataattttatcctaacctccaaagatatttgcactgcttttaattactgctgtatatttgttgattttggagttacaactgtggtgatagaaaattgagttgatggtctgtaccaagtcccttgtctatgttcttgtctttcagaataatttttatataaatatatatatagtgaagaagttttttttaatttttggatgggatattcgcaaatatctgtattatacactaagctattacaatggtacttaaaataatgtaaatttgaagtcattgttataaaataataaagtggagattacttaagtatttaaattatgaaagaataatgcagactttttattgtttcttaactgactagaaagagccaccagcattactctgtgccttttggacatcagtttgtgtgttctgtaggaattgtgtgcattccattcacacagtatttctttaggatgctgtgatgatttgaattacaaatcctacagtcaatagctaaagacgaaaccttcatttcagaactctcatgaatattctttaagtgctatttaaacctccccagcacttagatgcatataatggacttacctgaggaaagacagcacataggcatggggagaggtaaccaaggtgaattttacaaactggtgtatagtagatttaaatgctcaaaaataaatgtaactgagaagagttaataattgtgagatttttcccaaattgagatacagaagaaaatatagtttgaatctgaaatttaacacttatttatgtaaaacattttatttaagatattttctaatgattttaattttagagagtaccttttcattctgtgtgttacagagaagtactgaaaagttaaggacacttgggggctacttttttccctctaaactaaaaaagacattggctgaattataactagttagttatcacctcgtcccttaaagtcagtgacctcctgtgtttgatgtatattacatagagtcttaagtcagtgtacagttccactggaatttgacagttgtctctacagtcatgcaactcgaagtagaaaagagtgctggacataggaagggggtgcttggtttgaggggttaatgtgaggcctttttgaaaaatgaatattttgataaaaagaattcttgttttagcacagttgatgcacataagtgattctcatatttgttgtataaactggtttaatacatttggaacatagttggattacattcatttcctgggaaagctagcttaccatacattcaagtttataaaacaatttgccataggcaaagccatttaaaaagttcattctgaaattatttcatttacctacagtgaaataattgtgaactaagtagtctttctgaaaactgttgggttctaggcattcctgagaaattgaaagtggctacctttcatgtcaaaaatgttgatctattataaataaaatgtttttgcatatgtttttgaaaaaatt

SEQ ID NO: 425870 - DNA, 3448 bp, Homo sapiens
ggaaagccaaggagaccattcaggccctccgagccaacctgacaaaggccgcagaacatgaagttcctttacaggaacgaaaaaattacaaatcaagtcctgaaattcaggagccaatcaaacctcttgaaaagagagctctaaacttcttagtcaatgaatttttattgaagaataactataagcttacatcaataaccttttcagatgaaaacgatgatcaggattttgaattatgggatgatgtaggattaaacattccaaaacctccagacttattgcaactctaccgggattttggaaatcatcaagtaactggaaaagatcttgtagatgtggccagtggagtagaagaagatgaattagaggcccttacaccaattataagcaaccttcctccaactcttgaaactccccagcctgcagagaactccatgttagtacagaaattagaagataaaattagtttgttaaatagtgagaaatggtcattgatggagcaaatcagaagacttaaaagtgaaatggacttcctcaaaaatgaacactttgccatcccagcagtttgtgactctgttcagcctcctttggatcagttgccccacaaagactctgaggacagtggacagcatccagatgtaaatagttcagacaagggaaaaaacacagacatccatctttcaatatcagatgaagctgattccactattcctaaagagaattccccaaattcattccccaggagagaaagagaaggaatgccaccttcttctctatcaagtaaaaagacagttcattttgataaacctaataggaaattgtctcctgcattccatcaagcactactctctttttgtcgaatgtcagcagatagtcgtttaggatacgaggtgtctcgtattgcagacagtgaaaaaagcgttatgttaatgctgggacgctgcctgccacacattgttcccaatgtgctattggcaaagagagaggagttgatccccctcatattgtgtacagcatgtctacatcctgagcctaaagagcgagatcagcttctccacatacttttcaatttgatcaagaggccagatgatgagcaaaggcaaatgatactgacaggttgtgtggcatttgcgcgtcatgttggaccaacacgtgtagaagctgaacttttaccacagtgttgggaacagattaatcacaaatacccagaaagacgactgcttgtggcagaatcctgtggagcactggcaccttaccttcctaaagaaatccgtagctccttggttctttcaatgttgcaacaaatgttaatggaagataaggcagatttggtaagagaagctgttatcaaaagccttggtatcattatgggatacattgatgatccagacaaatatcatcagggttttgaattgttgctgtcagccttgggtgatccctcagaaagagtagttagtgctacacatcaagtatttttaccagcttacgctgcgtggactacagaacttggaaatttacagtctcatcttatacttacactactgaacaagattgaaaaacttctcagggaaggagaacatggactggatgaacacaaactccacatgtatctttctgccttgcagtccttgatcccatctctctttgcattagtgctacagaatgcacctttctccagcaaagccaagcttcatggtgaagtgccacagatagaagtgactaggtttcctcggcctatgtcgcctcttcaagatgtgtccactattatcggaagtcgtgagcaattggcagtgctgctgcaactttatgactaccagctagaacaagagggtacaacaggctgggagagtttactgtgggttgtcaatcaattgttgccacaacttatagaaatagttggcaaaattaatgttacttcaactgcctgtgtccatgaattctccagatttttctggcgcctttgccggacatttggcaaaatttttacaaacactaaggtaaaacctcagttccaggagattttaagactatctgaagaaaacattgattcctcagcaggaaatggggtcctcactaaagctacagtccccatttatgcaacaggagtccttacgtgttatattcaggaagaagaccgaaaactgttagttggattcttagaagatgtaatgacgctgctttcattatctcatgctcctcttgatagcctgaaggcttcttttgtggaattgggtgcaaacccagcctaccatgagttactattaactgttttgtggtatggtgttgtccatacttcagcactcgtgaggtgtactgctgctagaatgtttgagctgactcttcgaggcatgagtgaagcgttagttgacaagcgggttgctccggcccttgttaccttgtccagtgatcctgaattctctgtcaggattgccacaattccagcctttggcactattatggaaacagtaattcaaagagagttgctggaaagagtgaaaatgcagttggcttctttcctggaagatcctcagtatcaagaccaacattctttgcatacagagatcataaaaacatttggtagagttggccctaacgcagaacccaggttccgagatgagtttgttataccacatttgcataagttagccttggtgaacaacttacagattgtggattctaaaagactggacattgctacgcatctttttgaagcctacagtgcactttcctgttgtttcatttcagaggatttaatggttaatcactttttacctggtctcagatgtttacggactgacatggaacatctctctccagagcatgaggttattttaagttccatgataaaagaatgtgaacaaaaagttgaaaacaagaccgtccaagagcctcaaggctcaatgtcaattgctgcaagcttagtgagtgaagatacaaagaccaagtttttgaacaaaatgggccagttgacaacatcaggtgccatgttggccaatgtatttcagagaaagaagtagaagcaggaaagaagcccccagtaaacactaagatggacctcaagccgactggttccttgtacttgaagtacttgccttttttgtttcctcagttttatgttcttgcattataattttatcctaacctccaaagatatttgcactgcttttaattactgctgtatatttgttgattttggagttacaactgtggtgatagaaaattgagttgatggtctgtaccaagtcccttgtctatgttcttgtctttcagaataatttttatataaatatatatatagtgaagaagttttttttaatttttggatgggatattcgcaaatatctgtattatacactaagctattacaatggtacttaaaataatgtaaatttgaagtcattgttataaaataataaagtggagattacttaagtatttaaattatgaa

SEQ ID NO: 425871 - DNA, 3528 bp, Homo sapiens
tatgtccactagtgtaggccatctggggatggctgcctggtttcaattttgcagctcagaggagagaatgctacacttcagttatagtatctgccacagctttctggcaggaaattggcaagaggtattctatgtttaccactccctctctttggtttgctcatcagtggatacatggcaaggctaggattatggatggccttctttcttgcttaaaaatatgttcttaatttattgaaatttttattactttttattaagtgttttattttaagtttatccctttaaaaatctacatttgcctttttctcattgacagggttttgaattgttgctgtcagccttgggtgatccctcagaaagagtagttagtgctacacatcaagtatttttaccagcttacgctgcgtggactacagaacttggaaatttacagtctcatcttatacttacactactgaacaagattgaaaaacttctcagggaaggagaacatggactggatgaacacaaactccacatgtatctttctgccttgcagtccttgatcccatctctctttgcattagtgctacagaatgcacctttctccagcaaagccaagcttcatggtgaagtgccacagatagaagtgactaggtttcctcggcctatgtcgcctcttcaagatgtgtccactattatcggaagtcgtgagcaattggcagtgctgctgcaactttatgactaccagctagaacaagagggtacaacaggctgggagagtttactgtgggttgtcaatcaattgttgccacaacttatagaaatagttggcaaaattaatgttacttcaactgcctgtgtccatgaattctccagatttttctggcgcctttgccggacatttggcaaaatttttacaaacactaaggtaaaacctcagttccaggagattttaagactatctgaagaaaacattgattcctcagcaggaaatggggtcctcactaaagctacagtccccatttatgcaacaggagtccttacgtgttatattcaggaagaagaccgaaaactgttagttggattcttagaagatgtaatgacgctgctttcattatctcatgctcctcttgatagcctgaaggcttcttttgtggaattgggtgcaaacccagcctaccatgagttactattaactgttttgtggtatggtgttgtccatacttcagcactcgtgaggtgtactgctgctagaatgtttgagctgttggtgaagggggtgaatgaaactctggtagctcagagggttgttcctgctctcattactctctccagtgaccctgaaatctctgtcaggattgccacaattccagcctttggcactattatggaaacagtaattcaaagagagttgctggaaagagtgaaaatgcagttggcttctttcctggaagatcctcagtatcaagaccaacattctttgcatacagagatcataaaaacatttggtagagttggccctaacgcagaacccaggttccgagatgagtttgttataccacatttgcataagttagccttggtgaacaacttacagattgtggattctaaaagactggacattgctacgcatctttttgaagcctacagtgcactttcctgttgtttcatttcagaggatttaatggttaatcactttttacctggtctcagatgtttacggactgacatggaacatctctctccagagcatgaggttattttaagttccatgataaaagaatgtgaacaaaaagttgaaaacaagaccgtccaagagcctcaaggctcaatgtcaattgctgcaagcttagtgagtgaagatacaaagaccaagtttttgaacaaaatgggccagttgacaacatcaggtgccatgttggccaatgtatttcagagaaagaagtagaagcaggaaagaagcccccagtaaacactaagatggacctcaagccgactggttccttgtacttgaagtacttgccttttttgtttcctcagttttatgttcttgcattataattttatcctaacctccaaagatatttgcactgcttttaattactgctgtatatttgttgattttggagttacaactgtggtgatagaaaattgagttgatggtctgtaccaagtcccttgtctatgttcttgtctttcagaataatttttatataaatatatatatagtgaagaagttttttttaatttttggatgggatattcgcaaatatctgtattatacactaagctattacaatggtacttaaaataatgtaaatttgaagtcattgttataaaataataaagtggagattacttaagtatttaaattatgaaagaataatgcagactttttattgtttcttaactgactagaaagagccaccagcattactctgtgccttttggacatcagtttgtgtgttctgtaggaattgtgtgcattccattcacacagtatttctttaggatgctgtgatgatttgaattacaaatcctacagtcaatagctaaagacgaaaccttcatttcagaactctcatgaatattctttaagtgctatttaaacctccccagcacttagatgcatataatggacttacctgaggaaagacagcacataggcatggggagaggtaaccaaggtgaattttacaaactggtgtatagtagatttaaatgctcaaaaataaatgtaactgagaagagttaataattgtgagatttttcccaaattgagatacagaagaaaatatagtttgaatctgaaatttaacacttatttatgtaaaacattttatttaagatattttctaatgattttaattttagagagtaccttttcattctgtgtgttacagagaagtactgaaaagttaaggacacttgggggctacttttttccctctaaactaaaaaagacattggctgaattataactagttagttatcacctcgtcccttaaagtcagtgacctcctgtgtttgatgtatattacatagagtcttaagtcagtgtacagttccactggaatttgacagttgtctctacagtcatgcaactcgaagtagaaaagagtgctggacataggaagggggtgcttggtttgaggggttaatgtgaggcctttttgaaaaatgaatattttgataaaaagaattcttgttttagcacagttgatgcacataagtgattctcatatttgttgtataaactggtttaatacatttggaacatagttggattacattcatttcctgggaaagctagcttaccatacattcaagtttataaaacaatttgccataggcaaagccatttaaaaagttcattctgaaattatttcatttacctacagtgaaataattgtgaactaagtagtctttctgaaaactgttgggttctaggcattcctgagaaattgaaagtggctacctttcatgtcaaaaatgttgatctattataaataaaatgtttttgcatatgtttttgaaaaaatt

SEQ ID NO: 425872 - DNA, 2313 bp, Homo sapiens
aaccattttttattgcatgttgactggtttacagctgactcttcgaggcatgagtgaagcgttagttgacaagcgggttgctccggcccttgttaccttgtccagtgatcctgaattctctgtcaggattgccacaattccagcctttggcactattatggaaacagtaattcaaagagagttgctggaaagagtgaaaatgcagttggcttctttcctggaagatcctcagtatcaagaccaacattctttgcatacagagatcataaaaacatttggtagagttggccctaacgcagaacccaggttccgagatgagtttgttataccacatttgcataagttagccttggtgaacaacttacagattgtggattctaaaagactggacattgctacgcatctttttgaagcctacagtgcactttcctgttgtttcatttcagaggatttaatggttaatcactttttacctggtctcagatgtttacggactgacatggaacatctctctccagagcatgaggttattttaagttccatgataaaagaatgtgaacaaaaagttgaaaacaagaccgtccaagagcctcaaggctcaatgtcaattgctgcaagcttagtgagtgaagatacaaagaccaagtttttgaacaaaatgggccagttgacaacatcaggtgccatgttggccaatgtatttcagagaaagaagtagaagcaggaaagaagcccccagtaaacactaagatggacctcaagccgactggttccttgtacttgaagtacttgccttttttgtttcctcagttttatgttcttgcattataattttatcctaacctccaaagatatttgcactgcttttaattactgctgtatatttgttgattttggagttacaactgtggtgatagaaaattgagttgatggtctgtaccaagtcccttgtctatgttcttgtctttcagaataatttttatataaatatatatatagtgaagaagttttttttaatttttggatgggatattcgcaaatatctgtattatacactaagctattacaatggtacttaaaataatgtaaatttgaagtcattgttataaaataataaagtggagattacttaagtatttaaattatgaaagaataatgcagactttttattgtttcttaactgactagaaagagccaccagcattactctgtgccttttggacatcagtttgtgtgttctgtaggaattgtgtgcattccattcacacagtatttctttaggatgctgtgatgatttgaattacaaatcctacagtcaatagctaaagacgaaaccttcatttcagaactctcatgaatattctttaagtgctatttaaacctccccagcacttagatgcatataatggacttacctgaggaaagacagcacataggcatggggagaggtaaccaaggtgaattttacaaactggtgtatagtagatttaaatgctcaaaaataaatgtaactgagaagagttaataattgtgagatttttcccaaattgagatacagaagaaaatatagtttgaatctgaaatttaacacttatttatgtaaaacattttatttaagatattttctaatgattttaattttagagagtaccttttcattctgtgtgttacagagaagtactgaaaagttaaggacacttgggggctacttttttccctctaaactaaaaaagacattggctgaattataactagttagttatcacctcgtcccttaaagtcagtgacctcctgtgtttgatgtatattacatagagtcttaagtcagtgtacagttccactggaatttgacagttgtctctacagtcatgcaactcgaagtagaaaagagtgctggacataggaagggggtgcttggtttgaggggttaatgtgaggcctttttgaaaaatgaatattttgataaaaagaattcttgttttagcacagttgatgcacataagtgattctcatatttgttgtataaactggtttaatacatttggaacatagttggattacattcatttcctgggaaagctagcttaccatacattcaagtttataaaacaatttgccataggcaaagccatttaaaaagttcattctgaaattatttcatttacctacagtgaaataattgtgaactaagtagtctttctgaaaactgttgggttctaggcattcctgagaaattgaaagtggctacctttcatgtcaaaaatgttgatctattataaataaaatgtttttgcatatgtttttgaaaaaatt

SEQ ID NO: 425873 - DNA, 2922 bp, Homo sapiens
attttagtaaactgcaaattgaaagcataaaaattttggacaacctgcctatagggacgcttagaagactttcaagaagaaagttctgatttccaattatggaaatcaagagtataccatctcatttgggttattaaaattctttgccatttatcagaaatgtttatgctagtggctcttcaggaaacactaagttgtattttacaaccaccaataaacatatgttttccaaagtaatgataatacttacttgtaacctagtaaacagttgtaattttaaatataatcgcattatgatttttttctttacacttaaaatatacttatgtttttttaaattattttaataattttagattcctcagcaggaaatggggtcctcactaaagctacagtccccatttatgcaacaggagtccttacgtgttatattcaggaagaagaccgaaaactgttagttggattcttagaagatgtaatgacgctgctttcattatctcatgctcctcttgatagcctgaaggcttcttttgtggaattgggtgcaaacccagcctaccatgagttactattaactgttttgtggtatggtgttgtccatacttcagcactcgtgaggtgtactgctgctagaatgtttgagctgttggtgaagggggtgaatgaaactctggtagctcagagggttgttcctgctctcattactctctccagtgaccctgaaatctctgtcaggattgccacaattccagcctttggcactattatggaaacagtaattcaaagagagttgctggaaagagtgaaaatgcagttggcttctttcctggaagatcctcagtatcaagaccaacattctttgcatacagagatcataaaaacatttggtagagttggccctaacgcagaacccaggttccgagatgagtttgttataccacatttgcataagttagccttggtgaacaacttacagattgtggattctaaaagactggacattgctacgcatctttttgaagcctacagtgcactttcctgttgtttcatttcagaggatttaatggttaatcactttttacctggtctcagatgtttacggactgacatggaacatctctctccagagcatgaggttattttaagttccatgataaaagaatgtgaacaaaaagttgaaaacaagaccgtccaagagcctcaaggctcaatgtcaattgctgcaagcttagtgagtgaagatacaaagaccaagtttttgaacaaaatgggccagttgacaacatcaggtgccatgttggccaatgtatttcagagaaagaagtagaagcaggaaagaagcccccagtaaacactaagatggacctcaagccgactggttccttgtacttgaagtacttgccttttttgtttcctcagttttatgttcttgcattataattttatcctaacctccaaagatatttgcactgcttttaattactgctgtatatttgttgattttggagttacaactgtggtgatagaaaattgagttgatggtctgtaccaagtcccttgtctatgttcttgtctttcagaataatttttatataaatatatatatagtgaagaagttttttttaatttttggatgggatattcgcaaatatctgtattatacactaagctattacaatggtacttaaaataatgtaaatttgaagtcattgttataaaataataaagtggagattacttaagtatttaaattatgaaagaataatgcagactttttattgtttcttaactgactagaaagagccaccagcattactctgtgccttttggacatcagtttgtgtgttctgtaggaattgtgtgcattccattcacacagtatttctttaggatgctgtgatgatttgaattacaaatcctacagtcaatagctaaagacgaaaccttcatttcagaactctcatgaatattctttaagtgctatttaaacctccccagcacttagatgcatataatggacttacctgaggaaagacagcacataggcatggggagaggtaaccaaggtgaattttacaaactggtgtatagtagatttaaatgctcaaaaataaatgtaactgagaagagttaataattgtgagatttttcccaaattgagatacagaagaaaatatagtttgaatctgaaatttaacacttatttatgtaaaacattttatttaagatattttctaatgattttaattttagagagtaccttttcattctgtgtgttacagagaagtactgaaaagttaaggacacttgggggctacttttttccctctaaactaaaaaagacattggctgaattataactagttagttatcacctcgtcccttaaagtcagtgacctcctgtgtttgatgtatattacatagagtcttaagtcagtgtacagttccactggaatttgacagttgtctctacagtcatgcaactcgaagtagaaaagagtgctggacataggaagggggtgcttggtttgaggggttaatgtgaggcctttttgaaaaatgaatattttgataaaaagaattcttgttttagcacagttgatgcacataagtgattctcatatttgttgtataaactggtttaatacatttggaacatagttggattacattcatttcctgggaaagctagcttaccatacattcaagtttataaaacaatttgccataggcaaagccatttaaaaagttcattctgaaattatttcatttacctacagtgaaataattgtgaactaagtagtctttctgaaaactgttgggttctaggcattcctgagaaattgaaagtggctacctttcatgtcaaaaatgttgatctattataaataaaatgtttttgcatatgtttttgaaaaaatt

SEQ ID NO: 425874 - DNA, 5008 bp, Homo sapiens
  misc_feature (5005)..(5005): n is a, c, g, or t
ggaaagccaaggagaccattcaggccctccgagccaacctgacaaaggccgcagaacatgaagttcctttacaggaacgaaaaaattacaaatcaagtcctgaaattcaggagccaatcaaacctcttgaaaagagagctctaaacttcttagtcaatgaatttttattgaagaataactataagcttacatcaataaccttttcagatgaaaacgatgatcaggattttgaattatgggatgatgtaggattaaacattccaaaacctccagacttattgcaactctaccgggattttggaaatcatcaagtaactggaaaagatcttgtagatgtggccagtggagtagaagaagatgaattagaggcccttacaccaattataagcaaccttcctccaactcttgaaactccccagcctgcagagaactccatgttagtacagaaattagaagataaaattagtttgttaaatagtgagaaatggtcattgatggagcaaatcagaagacttaaaagtgaaatggacttcctcaaaaatgaacactttgccatcccagcagtttgtgactctgttcagcctcctttggatcagttgccccacaaagactctgaggacagtggacagcatccagatgtaaatagttcagacaagggaaaaaacacagacatccatctttcaatatcagatgaagctgattccactattcctaaagagaattccccaaattcattccccaggagagaaagagaaggaatgccaccttcttctctatcaagtaaaaagacagttcattttgataaacctaataggaaattgtctcctgcattccatcaagcactactctctttttgtcgaatgtcagcagatagtcgtttaggatacgaggtgtctcgtattgcagacagtgaaaaaagcgttatgttaatgctgggacgctgcctgccacacattgttcccaatgtgctattggcaaagagagaggagttgatccccctcatattgtgtacagcatgtctacatcctgagcctaaagagcgagatcagcttctccacatacttttcaatttgatcaagaggccagatgatgagcaaaggcaaatgatactgacaggttgtgtggcatttgcgcgtcatgttggaccaacacgtgtagaagctgaacttttaccacagtgttgggaacagattaatcacaaatacccagaaagacgactgcttgtggcagaatcctgtggagcactggcaccttaccttcctaaagaaatccgtagctccttggttctttcaatgttgcaacaaatgttaatggaagataaggcagatttggtaagagaagctgttatcaaaagccttggtatcattatgggatacattgatgatccagacaaatatcatcagggttttgaattgttgctgtcagccttgggtgatccctcagaaagagtagttagtgctacacatcaagtatttttaccagcttacgctgcgtggactacagaacttggaaatttacagtctcatcttatacttacactactgaacaagattgaaaaacttctcagggaaggagaacatggactggatgaacacaaactccacatgtatctttctgccttgcagtccttgatcccatctctctttgcattagtgctacagaatgcacctttctccagcaaagccaagcttcatggtgaagtgccacagatagaagtgactaggtttcctcggcctatgtcgcctcttcaagatgtgtccactattatcggaagtcgtgagcaattggcagtgctgctgcaactttatgactaccagctagaacaagagggtacaacaggctgggagagtttactgtgggttgtcaatcaattgttgccacaacttatagaaatagttggcaaaattaatgttacttcaactgcctgtgtccatgaattctccagatttttctggcgcctttgccggacatttggcaaaatttttacaaacactaaggtaaaacctcagttccaggagattttaagactatctgaagaaaacattgattcctcagcaggaaatggggtcctcactaaagctacagtccccatttatgcaacaggagtccttacgtgttatattcaggaagaagaccgaaaactgttagttggattcttagaagatgtaatgacgctgctttcattatctcatgctcctcttgatagcctgaaggcttcttttgtggaattgggtgcaaacccagcctaccatgagttactattaactgttttgtggtatggtgttgtccatacttcagcactcgtgaggtgtactgctgctagaatgtttgagctgttggtgaagggggtgaatgaaactctggtagctcagagggttgttcctgctctcattactctctccagtgaccctgaaatctctgtcaggattgccacaattccagcctttggcactattatggaaacagtaattcaaagagagttgctggaaagagtgaaaatgcagttggcttctttcctggaagatcctcagtatcaagaccaacattctttgcatacagagatcataaaaacatttggtagagttggccctaacgcagaacccaggttccgagatgagtttgttataccacatttgcataagttagccttggtgaacaacttacagattgtggattctaaaagactggacattgctacgcatctttttgaagcctacagtgcactttcctgttgtttcatttcagaggatttaatggttaatcactttttacctggtctcagatgtttacggactgacatggaacatctctctccagagcatgaggttattttaagttccatgataaaagaatgtgaacaaaaagttgaaaacaagaccgtccaagagcctcaaggctcaatgtcaattgctgcaagcttagtgagtgaagatacaaagaccaagtttttgaacaaaatgggccagttgacaacatcaggtgccatgttggccaatgtatttcagagaaagaagtagaagcaggaaagaagcccccagtaaacactaagatggacctcaagccgactggttccttgtacttgaagtacttgccttttttgtttcctcagttttatgttcttgcattataattttatcctaacctccaaagatatttgcactgcttttaattactgctgtatatttgttgattttggagttacaactgtggtgatagaaaattgagttgatggtctgtaccaagtcccttgtctatgttcttgtctttcagaataatttttatataaatatatatatagtgaagaagttttttttaatttttggatgggatattcgcaaatatctgtattatacactaagctattacaatggtacttaaaataatgtaaatttgaagtcattgttataaaataataaagtggagattacttaagtatttaaattatgaaagaataatgcagactttttattgtttcttaactgactagaaagagccaccagcattactctgtgccttttggacatcagtttgtgtgttctgtaggaattgtgtgcattccattcacacagtatttctttaggatgctgtgatgatttgaattacaaatcctacagtcaatagctaaagacgaaaccttcatttcagaactctcatgaatattctttaagtgctatttaaacctccccagcacttagatgcatataatggacttacctgaggaaagacagcacataggcatggggagaggtaaccaaggtgaattttacaaactggtgtatagtagatttaaatgctcaaaaataaatgtaactgagaagagttaataattgtgagatttttcccaaattgagatacagaagaaaatatagtttgaatctgaaatttaacacttatttatgtaaaacattttatttaagatattttctaatgattttaattttagagagtaccttttcattctgtgtgttacagagaagtactgaaaagttaaggacacttgggggctacttttttccctctaaactaaaaaagacattggctgaattataactagttagttatcacctcgtcccttaaagtcagtgacctcctgtgtttgatgtatattacatagagtcttaagtcagtgtacagttccactggaatttgacagttgtctctacagtcatgcaactcgaagtagaaaagagtgctggacataggaagggggtgcttggtttgaggggttaatgtgaggcctttttgaaaaatgaatattttgataaaaagaattcttgttttagcacagttgatgcacataagtgattctcatatttgttgtataaactggtttaatacatttggaacatagttggattacattcatttcctgggaaagctagcttaccatacattcaagtttataaaacaatttgccataggcaaagccatttaaaaagttcattctgaaattatttcatttacctacagtgaaataattgtgaactaagtagtctttctgaaaactgttgggttctaggcattcctgagaaattgaaagtggctacctttcatgtcaaaaatgttgatctattataaataaaatgttttggcgaaaaaaaaaaaaaaaaaaaaaaaaacaaaacaatgtgtgtgggcgcgcgcgccctcgggccctctggaaaagagagtttctttaagaaccatatccggtgtggggcgcgcgcggggcgcccagagtaggggaaaggggaaccatgtgggccaataaaggtgggtgtgccccagaggagagagaccccggggcgcaagtgagaaaaggggcgcgtgggagtttctcacaccaacatataaaaaaaggcgccgcgggggggaacacccgaagaggcggtctctggagaaaaattccccaaagagggggaagtcagaggggggcaccatacaggggaggtcatactaaacagggggaggcccaaggaggaacctcagaatatctacaattaaccgccgcgagcccggtggggcnggt

SEQ ID NO: 425875 - DNA, 3469 bp, Homo sapiens
ggaaagccaaggagaccattcaggccctccgagccaacctgacaaaggccgcagaacatgaagttcctttacaggaacgaaaaaattacaaatcaagtcctgaaattcaggagccaatcaaacctcttgaaaagagagctctaaacttcttagtcaatgaatttttattgaagaataactataagcttacatcaataaccttttcagatgaaaacgatgatcaggattttgaattatgggatgatgtaggattaaacattccaaaacctccagacttattgcaactctaccgggattttggaaatcatcaagtaactggaaaagatcttgtagatgtggccagtggagtagaagaagatgaattagaggcccttacaccaattataagcaaccttcctccaactcttgaaactccccagcctgcagagaactccatgttagtacagaaattagaagataaaattagtttgttaaatagtgagaaatggtcattgatggagcaaatcagaagacttaaaagtgaaatggacttcctcaaaaatgaacactttgccatcccagcagtttgtgactctgttcagcctcctttggatcagttgccccacaaagactctgaggacagtggacagcatccagatgtaaatagttcagacaagggaaaaaacacagacatccatctttcaatatcagatgaagctgattccactattcctaaagagaattccccaaattcattccccaggagagaaagagaaggaatgccaccttcttctctatcaagtaaaaagacagttcattttgataaacctaataggaaattgtctcctgcattccatcaagcactactctctttttgtcgaatgtcagcagatagtcgtttaggatacgaggtgtctcgtattgcagacagtgaaaaaagcgttatgttaatgctgggacgctgcctgccacacattgttcccaatgtgctattggcaaagagagaggagttgatccccctcatattgtgtacagcatgtctacatcctgagcctaaagagcgagatcagcttctccacatacttttcaatttgatcaagaggccagatgatgagcaaaggcaaatgatactgacaggttgtgtggcatttgcgcgtcatgttggaccaacacgtgtagaagctgaacttttaccacagtgttgggaacagattaatcacaaatacccagaaagacgactgcttgtggcagaatcctgtggagcactggcaccttaccttcctaaagaaatccgtagctccttggttctttcaatgttgcaacaaatgttaatggaagataaggcagatttggtaagagaagctgttatcaaaagccttggtatcattatgggatacattgatgatccagacaaatatcatcagggttttgaattgttgctgtcagccttgggtgatccctcagaaagagtagttagtgctacacatcaagtatttttaccagcttacgctgcgtggactacagaacttggaaatttacagtctcatcttatacttacactactgaacaagattgaaaaacttctcagggaaggagaacatggactggatgaacacaaactccacatgtatctttctgccttgcagtccttgatcccatctctctttgcattagtgctacagaatgcacctttctccagcaaagccaagcttcatggtgaagtgccacagatagaagtgactaggtttcctcggcctatgtcgcctcttcaagatgtgtccactattatcggaagtcgtgagcaattggcagtgctgctgcaactttatgactaccagctagaacaagagggtacaacaggctgggagagtttactgtgggttgtcaatcaattgttgccacaacttatagaaatagttggcaaaattaatgttacttcaactgcctgtgtccatgaattctccagatttttctggcgcctttgccggacatttggcaaaatttttacaaacactaaggtaaaacctcagttccaggagattttaagactatctgaagaaaacattgattcctcagcaggaaatggggtcctcactaaagctacagtccccatttatgcaacaggagtccttacgtgttatattcaggaagaagaccgaaaactgttagttggattcttagaagatgtaatgacgctgctttcattatctcatgctcctcttgatagcctgaaggcttcttttgtggaattgggtgcaaacccagcctaccatgagttactattaactgttttgtggtatggtgttgtccatacttcagcactcgtgaggtgtactgctgctagaatgtttgagctgttggtgaagggggtgaatgaaactctggtagctcagagggttgttcctgctctcattactctctccagtgaccctgaaatctctgtcaggattgccacaattccagcctttggcactattatggaaacagtaattcaaagagagttgctggaaagagtgaaaatgcagttggcttctttcctggaagatcctcagtatcaagaccaacattctttgcatacagagatcataaaaacatttggtagagttggccctaacgcagaacccaggttccgagatgagtttgttataccacatttgcataagttagccttggtgaacaacttacagattgtggattctaaaagactggacattgctacgcatctttttgaagcctacagtgcactttcctgttgtttcatttcagaggatttaatggttaatcactttttacctggtctcagatgtttacggactgacatggaacatctctctccagagcatgaggttattttaagttccatgataaaagaatgtgaacaaaaagttgaaaacaagaccgtccaagagcctcaaggctcaatgtcaattgctgcaagcttagtgagtgaagatacaaagaccaagtttttgaacaaaatgggccagttgacaacatcaggtgccatgttggccaatgtatttcagagaaagaagtagaagcaggaaagaagcccccagtaaacactaagatggacctcaagccgactggttccttgtacttgaagtacttgccttttttgtttcctcagttttatgttcttgcattataattttatcctaacctccaaagatatttgcactgcttttaattactgctgtatatttgttgattttggagttacaactgtggtgatagaaaattgagttgatggtctgtaccaagtcccttgtctatgttcttgtctttcagaataatttttatataaatatatatatagtgaagaagttttttttaatttttggtttgggtacaattccaaatccttacattaattctctttacaattctctatttggtcctaatactatcttaattttgaagttctatcctttcaatcatccaggccttccttttacttcttctgaatatttagcctactattcctcct

SEQ ID NO: 425876 - DNA, 2842 bp, Homo sapiens
ggaaagccaaggagaccattcaggccctccgagccaacctgacaaaggccgcagaacatgaagttcctttacaggaacgaaaaaattacaaatcaagtcctgaaattcaggagccaatcaaacctcttgaaaagagagctctaaacttcttagtcaatgaatttttattgaagaataactataagcttacatcaataaccttttcagatgaaaacgatgatcaggattttgaattatgggatgatgtaggattaaacattccaaaacctccagacttattgcaactctaccgggattttggaaatcatcaagtaactggaaaagatcttgtagatgtggccagtggagtagaagaagatgaattagaggcccttacaccaattataagcaaccttcctccaactcttgaaactccccagcctgcagagaactccatgttagtacagaaattagaagataaaattagtttgttaaatagtgagaaatggtcattgatggagcaaatcagaagacttaaaagtgaaatggacttcctcaaaaatgaacactttgccatcccagcagtttgtgactctgttcagcctcctttggatcagttgccccacaaagactctgaggacagtggacagcatccagatgtaaatagttcagacaagggaaaaaacacagacatccatctttcaatatcagatgaagctgattccactattcctaaagagaattccccaaattcattccccaggagagaaagagaaggaatgccaccttcttctctatcaagtaaaaagacagttcattttgataaacctaataggaaattgtctcctgcattccatcaagcactactctctttttgtcgaatgtcagcagatagtcgtttaggatacgaggtgtctcgtattgcagacagtgaaaaaagcgttatgttaatgctgggacgctgcctgccacacattgttcccaatgtgctattggcaaagagagaggagttgatccccctcatattgtgtacagcatgtctacatcctgagcctaaagagcgagatcagcttctccacatacttttcaatttgatcaagaggccagatgatgagcaaaggcaaatgatactgacaggttgtgtggcatttgcgcgtcatgttggaccaacacgtgtagaagctgaacttttaccacagtgttgggaacagattaatcacaaatacccagaaagacgactgcttgtggcagaatcctgtggagcactggcaccttaccttcctaaagaaatccgtagctccttggttctttcaatgttgcaacaaatgttaatggaagataaggcagatttggtaagagaagctgttatcaaaagccttggtatcattatgggatacattgatgatccagacaaatatcatcagggttttgaattgttgctgtcagccttgggtgatccctcagaaagagtagttagtgctacacatcaagtatttttaccagcttacgctgcgtggactacagaacttggaaatttacagtctcatcttatacttacactactgaacaagattgaaaaacttctcagggaaggagaacatggactggatgaacacaaactccacatgtatctttctgccttgcagtccttgatcccatctctctttgcattagtgctacagaatgcacctttctccagcaaagccaagcttcatggtgaagtgccacagatagaagtgactaggtttcctcggcctatgtcgcctcttcaagatgtgtccactattatcggaagtcgtgagcaattggcagtgctgctgcaactttatgactaccagctagaacaagagggtacaacaggctgggagagtttactgtgggttgtcaatcaattgttgccacaacttatagaaatagttggcaaaattaatgttacttcaactgcctgtgtccatgaattctccagatttttctggcgcctttgccggacatttggcaaaatttttacaaacactaaggtaaaacctcagttccaggagattttaagactatctgaagaaaacattgattcctcagcaggaaatggggtcctcactaaagctacagtccccatttatgcaacaggagtccttacgtgttatattcaggaagaagaccgaaaactgttagttggattcttagaagatgtaatgacgctgctttcattatctcatgctcctcttgatagcctgaaggcttcttttgtggaattgggtgcaaacccagcctaccatgagttactattaactgttttgtggtatggtgttgtccatacttcagcactcgtgaggtgtactgctgctagaatgtttgagctgttggtgaagggggtgaatgaaactctggtagctcagagggttgttcctgctctcattactctctccagtgaccctgaaatctctgtcaggattgccacaattccagcctttggcactattatggaaacagtaattcaaagagagttgctggaaagagtgaaaatgcagttggcttctttcctggaagatcctcagtatcaagaccaacattctttgcatacagagatcataaaaacatttggtagagttggccctaacgcagaacccaggttccgagatgagtttttattgtagaatagatacctacctatcaaatttgtaggagttgttcaagaggaaaaaatgaattttcttctcataatggcccccaaataacaattaaaggttgttttgggaacagattgaggtcagttttagaattagcctgtctaagtcaggcatggtgccacgtgtctatagtcccacctactcagaagctgaggtgggaggatcacttgaggccagga

SEQ ID NO: 425877 - DNA, 646 bp, Homo sapiens
ggaggctgaggtgggaggctcgcttcagcccaggagtttgaggctacagtgagccatctatgattgtgccactgtactccagcctgcatgacacagcaaaaccgatcttaaaaaaaaaaaagatattagcaataatatgaatttcaaaaatgtaagataaaatttcctcgaagattttttatgttttttttttatcttttaggattttgaattatgggatgatgtaggattaaacattccaaaacctccagacttattgcaactctaccgggattttggaaatcatcaagtaactggaaaagatcttgtagatgtggccagtggagtagaagaagatgaattagaggcccttacaccaattataagcaaccttcctccaactcttgaaactccccagcctgcagaggtgagagatagcaactaattagtcaagtccacagaaagtatttaaactatgtaaaagcgtacagtgagatcttgagtttctgtttttctcctgttttgattttagaactccatgttagtacagaaattagaagataaaattagtttgttaaatagtgagaaatggtcattgatggagcaaatcagaagacttaaaaggttagtacttgatcattattcctaaaaatcctcttaaggtgtt

SEQ ID NO: 425878 - DNA, 298 bp, Homo sapiens
catcctcagtcacagctaacccagttcttattccagtttaccaaaccattttttattgcatgttgactggtttacagctgactcttcgaggcatgagtgaagcgttagttgacaagcgggttgctccggcccttgttaccttgtccagtgatcctgaattgtgagtttcacagactgcgaccttaagttatcctgtctgtctttttgagcattcttcttggtctgctttttttaaatttatttaatttgtcattgctagagactaatacagtatatttaccttgtacttactttaata

SEQ ID NO: 425879 - DNA, 331 bp, Homo sapiens
tctttccgtgcatcacctgtgaataccccctgtgctgaccaatcagctgttggtgaagggggtgaatgaaactctggtagctcagagggttgttcctgctctcattactctctccagtgaccctgaaatgtaagtgtcatccctgccttttatattcagcatccctttcaaaatgtgcctgtcaagaaataaccatcagctcttaaatttattgaagaatctctttaaattaataatactggattatgcttatttgattttaaactttatcacattattctttatatatcatggttctttttaaatcaaccctcaccataagtgtaatttg

SEQ ID NO: 425880 - DNA, 2650 bp, Homo sapiens
gcatccacacctgatggtgtgactcggccgacgcgagcgccgcgcttcgcttcagctgctagctggcccaagggaggcgaccgcggagggtggcgaggggcggccaggacccgcagccccggggccgggccggtccggaccgccagggagggcaggtcagtgggcagatcgcgtccgcgggattcaatctctgcccgctctgataacagtccttttccctggcgctcacttcgtgcctggcacccggctgggcgcctcaagaccgttgtctcttcgatcgcttctttggacttggcgaccatttcagagatgtcttccagaagtaccaaagatttaattaaaagtaagtggggatcgaagcctagtaactccaaatccgaaactacattagaaaaattaaagggagaaattgcacacttaaagacatcagtggatgaaatcacaagtgggaaaggaaagctgactgataaagagagacacagacttttggagaaaattcgagtccttgaggctgagaaggagaagaatgcttatcaactcacagagaaggacaaagaaatacagcgactgagagaccaactgaaggccagatatagtactaccgcattgcttgaacagctggaagagacaacgagagaaggagaaaggagggagcaggtgttgaaagccttatctgaagagaaagacgtattgaaacaacagttgtctgctgcaacctcacgaattgctgaacttgaaagcaaaaccaatacactccgtttatcacagactgtggctccaaactgcttcaactcatcaataaataatattcatgaaatggaaatacagctgaaagatgctctggagaaaaatcagcagtggctcgtgtatgatcagcagcgggaagtctatgtaaaaggacttttagcaaagatctttgagttggaaaagaaaacggaaacagctgctcattcactcccacagcagacaaaaaagcctgaatcagaaggttatcttcaagaagagaagcagaaatgttacaacgatctcttggcaagtgcaaaaaaagatcttgaggttgaacgacaaaccataactcagctgagttttgaactgagtgaatttcgaagaaaatatgaagaaacccaaaaagaagttcacaatttaaatcagctgttgtattcacaaagaagggcagatgtgcaacatctggaagatgataggcataaaacagagaagatacaaaaactcagggaagagaatgatattgctaggggaaaacttgaagaagagaagaagagatccgaagagctcttatctcaggtccagtttctttacacatctctgctaaagcagcaagaagaacaaacaagggtagctctgttggaacaacagatgcaggcatgtactttagactttgaaaatgaaaaactcgaccgtcaacatgtgcagcatcaattgcttgtaattcttaaggagctccgaaaagcaagaaatcaaataacacagttggaatccttgaaacagcttcatgagtttgccatcacagagccattagtcactttccaaggagagactgaaaacagagaaaaagttgccgcctcaccaaaaagtcccactgctgcactcaatgaaagcctggtggaatgtcccaagtgcaatatacagtatccagccactgagcatcgcgatctgcttgtccatgtggaatactgttcaaagtagcaaaataagtatttgttttgatattaaaagattcaatactgtattttctgttagcttgtgggcattttgaattatatatttcacattttgcataaaactgcctatctacctttgacactccagcatgctagtgaatcatgtatcttttaggctgctgtgcatttctcttggcagtgatacctccctgacatggttcatcatcaggctgcaatgacagaatgtggtgagcagcgtctactgagactactaacattttgcactgtcaaaatacttggtgaggaaaagatagctcaggttattgctaatgggttaatgcaccagcaagcaaaatattttatgttttgggggtttgaaaaatcaaagataattaaccaaggatcttaactgtgttcgcattttttatccaagcacttagaaaacctacaatcctaattttgatgtccattgttaagaggtggtgatagatactattttttttttcatattgtatagcggttattagaaaagttggggattttcttgatctttattgctgcttaccattgaaacttaacccagctgtgttccccaactctgttctgcgcacgaaacagtatctgtttgaggcataatcttaagtggccacacacaatgttttctcttatgttatctggcagtaactgtaacttgaattacattagcacattctgcttagctaaaattgttaaaataaactttaataaacccatgtagccctctcatttgattgacagtattttagttatttttggcattcttaaagctgggcaatgtaatgatcagatctttgtttgtctgaacaggtatttttatacatgctttttgtaaaccaaaaacttttaaatttcttcaggttttctaacatgcttaccactgggctactgtaaatgagaaaagaataaaattatttaatgttttaaaaaaacta

SEQ ID NO: 425881 - DNA, 2182 bp, Homo sapiens
gcatccacacctgatggtgtgactcggccgacgcgagcgccgcgcttcgcttcagctgctagctggcccaagggaggcgaccgcggagggtggcgaggggcggccaggacccgcagccccggggccgggccggtccggaccgccagggagggcaggtcagtgggcagatcgcgtccgcgggattcaatctctgcccgctctgataacagtccttttccctggcgctcacttcgtgcctggcacccggctgggcgcctcaagaccgttgtctcttcgatcgcttctttggacttggcgaccatttcagagatgtcttccagaagtaccaaagatttaattaaaagtaagtggggatcgaagcctagtaactccaaatccgaaactacattagaaaaattaaagggagaaattgcacacttaaagacatcagtggatgaaatcacaagtgggaaaggaaagctgactgataaagagagacacagacttttggagaaaattcgagtccttgaggctgagaaggagaagaatgcttatcaactcacagagaaggacaaagaaatacagcgactgagagaccaactgaaggccagatatagtactaccgcattgcttgaacagctggaagagacaacgagagaaggagaaaggagggagcaggtgttgaaagccttatctgaagagaaagacgtattgaaacaacagttgtctgctgcaacctcacgaattgctgaacttgaaagcaaaaccaatacactccgtttatcacagactgtggctccaaactgcttcaactcatcaataaataatattcatgaaatggaaatacagctgaaagatgctctggagaaaaatcagcagtggctcgtgtatgatcagcagcgggaagtctatgtaaaaggacttttagcaaagatctttgagttggaaaagaaaacggaaacagctgctcattcactcccacagcagacaaaaaagcctgaatcagaaggttatcttcaagaagagaagcagaaatgttacaacgatctcttggcaagtgcaaaaaaagatcttgaggttgaacgacaaaccataactcagctgagttttgaactgagtgaatttcgaagaaaatatgaagaaacccaaaaagaagttcacaatttaaatcagctgttgtattcacaaagaagggcagatgtgcaacatctggaagatgataggcataaaacagagaagatacaaaaactcagggaagagaatgatattgctaggggaaaacttgaagaagagaagaagagatccgaagagctcttatctcaggtccagtttctttacacatctctgctaaagcagcaagaagaacaaacaagggtagctctgttggaacaacagatgcaggcatgtactttagactttgaaaatgaaaaactcgaccgtcaacatgtgcagcatcaattgcttgtaattcttaaggagctccgaaaagcaagaaatcaaataacacagttggaatccttggtgagtctggaatgattaaactaaaatttgtcttcgtcttccatttatataccaaatcagttccgaacttaggaggatacagcttaacacacagctagctgtatctcaaatcagtaggtagagcctctgcctcatttgaagcaactgccctttgagcatcaattcagaggacatgaaagagggacatgatcacatctggaaacattcccccaactaccccagctgctgtgatgctggaggcactaaatagtgcctgagctggggtcaaaagggtagaatagagggtagtcacagaatcctgaactgaaattgtgtttatctattaaaaaagaaagaaaggctgggcacgatggcttatacctttaatcccagcgctttgggaggccaaggcaggcggatcatgaggtcaggagttggagaccagcctgaccaacatggtgaaaccctgtctctactaaaaatacaaaaaattagccgggcgtggtggcgggtgcctgtaacctcagctacttgggaggccgaggcaggagaatcacttgaacccgggatgcagaggttgcagtgggctgagactgagccactgcactccagcctgggcagcagagcaagactctgtctcaaaaaaacagcacaacacagaaacacaaacaacaacgccgaaacaaagggaaaacgggcacta

SEQ ID NO: 425882 - DNA, 2501 bp, Homo sapiens
gcatccacacctgatggtgtgactcggccgacgcgagcgccgcgcttcgcttcagctgctagctggcccaagggaggcgaccgcggagggtggcgaggggcggccaggacccgcagccccggggccgggccggtccggaccgccagggagggcaggtcagtgggcagatcgcgtccgcgggattcaatctctgcccgctctgataacagtccttttccctggcgctcacttcgtgcctggcacccggctgggcgcctcaagaccgttgtctcttcgatcgcttctttggacttggcgaccatttcagagatgtcttccagaagtaccaaagatttaattaaaaaaaattcgagtccttgaggctgagaaggagaagaatgcttatcaactcacagagaaggacaaagaaatacagcgactgagagaccaactgaaggccagatatagtactaccgcattgcttgaacagctggaagagacaacgagagaaggagaaaggagggagcaggtgttgaaagccttatctgaagagaaagacgtattgaaacaacagttgtctgctgcaacctcacgaattgctgaacttgaaagcaaaaccaatacactccgtttatcacagactgtggctccaaactgcttcaactcatcaataaataatattcatgaaatggaaatacagctgaaagatgctctggagaaaaatcagcagtggctcgtgtatgatcagcagcgggaagtctatgtaaaaggacttttagcaaagatctttgagttggaaaagaaaacggaaacagctgctcattcactcccacagcagacaaaaaagcctgaatcagaaggttatcttcaagaagagaagcagaaatgttacaacgatctcttggcaagtgcaaaaaaagatcttgaggttgaacgacaaaccataactcagctgagttttgaactgagtgaatttcgaagaaaatatgaagaaacccaaaaagaagttcacaatttaaatcagctgttgtattcacaaagaagggcagatgtgcaacatctggaagatgataggcataaaacagagaagatacaaaaactcagggaagagaatgatattgctaggggaaaacttgaagaagagaagaagagatccgaagagctcttatctcaggtccagtttctttacacatctctgctaaagcagcaagaagaacaaacaagggtagctctgttggaacaacagatgcaggcatgtactttagactttgaaaatgaaaaactcgaccgtcaacatgtgcagcatcaattgcttgtaattcttaaggagctccgaaaagcaagaaatcaaataacacagttggaatccttgaaacagcttcatgagtttgccatcacagagccattagtcactttccaaggagagactgaaaacagagaaaaagttgccgcctcaccaaaaagtcccactgctgcactcaatgaaagcctggtggaatgtcccaagtgcaatatacagtatccagccactgagcatcgcgatctgcttgtccatgtggaatactgttcaaagtagcaaaataagtatttgttttgatattaaaagattcaatactgtattttctgttagcttgtgggcattttgaattatatatttcacattttgcataaaactgcctatctacctttgacactccagcatgctagtgaatcatgtatcttttaggctgctgtgcatttctcttggcagtgatacctccctgacatggttcatcatcaggctgcaatgacagaatgtggtgagcagcgtctactgagactactaacattttgcactgtcaaaatacttggtgaggaaaagatagctcaggttattgctaatgggttaatgcaccagcaagcaaaatattttatgttttgggggtttgaaaaatcaaagataattaaccaaggatcttaactgtgttcgcattttttatccaagcacttagaaaacctacaatcctaattttgatgtccattgttaagaggtggtgatagatactattttttttttcatattgtatagcggttattagaaaagttggggattttcttgatctttattgctgcttaccattgaaacttaacccagctgtgttccccaactctgttctgcgcacgaaacagtatctgtttgaggcataatcttaagtggccacacacaatgttttctcttatgttatctggcagtaactgtaacttgaattacattagcacattctgcttagctaaaattgttaaaataaactttaataaacccatgtagccctctcatttgattgacagtattttagttatttttggcattcttaaagctgggcaatgtaatgatcagatctttgtttgtctgaacaggtatttttatacatgctttttgtaaaccaaaaacttttaaatttcttcaggttttctaacatgcttaccactgggctactgtaaatgagaaaagaataaaattatttaatgttttaaaaaaacta

SEQ ID NO: 425883 - DNA, 815 bp, Homo sapiens
agccacttaggcagcccaagtggactaagaaaggcattaagacaaaactacttaaaaagacaaaggacattatataatgataagagtcaatcaagaacatttaagaattaaaaacatatatgcccctaacaacacagccccaaattctatgaagcaaaaattgacagacttgaaggaagaaatggctcaacaataatagctagagacttcaacaccctactttcaataatgggtggtacaactaagcaaaagatacataaggaaaaagaagacttaaacaacaccgttaggcaactagacctaaaagacatatgcagaacactccaaccaacacgagcagaatacacattcttttcaagtgcactggaacatcctctagggcaacacgttagaccacaaaaaaacttgccgtaaatttcaaaagactgaaatcacacaaagtatcttttccaaccacaatgcaatgaagttagaaatcactaacaggaaaactgaaaaatttgcaaatatgtggaaattaaacaatacattcttaaatagttactcaaaaaagtaactacaggctaggtgtggtggctcacacctgtaatcccagcactatgggaggccgaggcaggtgatcacctgaggtcaggcgttcgcaactagcctggccaacatggtaaaaacctgtctctaactaaaaatacaaaaattagttggacgtggtggcgtgcacctgtaatcccagctactcaggaggctgagacaggagaactgcttgaacctgggaggcagaagttgcagtgaacagaaatgacaccactgcactccag

SEQ ID NO: 425884 - DNA, 5193 bp, Homo sapiens
  misc_feature (838)..(838): n is a, c, g, or t
accttcagttcctccaagtcctggaagactgagacaaggggaagaaagcaagataagtgcgatggatgcatctccacggaatatttctccaggacttcagaatggagaaaaagaggatcgcttcttaacaactttgtccagccagagctccaccagttctactcatctccaattgcctacgccacctgaagtcatgtctgaacagtcagtgggagggccccctgagctagatacagccagcagttccgaagatgtgtttgatgggcatttgctgggatccacagacagccaagtgaaggaaaagtcaaccatgaaagccatctttgcaaatttgcttccaggaaatagctataatcctattccatttccttttgatccagataaacactacttaatgtatgaacatgaacgagtgcccattgcagtctgcgagaaggaacccagctccatcattgcttttgctctcagttgtaaagaataccgaaatgccttagaggaattgtctaaagcgactcagtggaacagtgccgaagaagggcttccaacaaatagtacttcagatagcagaccaaagagtagcagccctatcagattacctgaaatgagtggaggacagacaaatcgtacaacagaaacagaaccacaaccaaccaaaaaggcttctggaatgttgtccttcttcagagggacagcagggaaaagccccgatctctcttcccagaagagagagaccttacgtggagcagatagtgcttactaccaggttgggcagacaggcaaggaggggaccgagaatcaaggcgttgagcctcaagatgaagtagatggaggagatacncaaaagaagcaactcataaatcctcatgtggaacttcaattttcagatgctaatgccaagttttactgtcggctctactatgcgggagagtttcataagatgcgtgaagtgattctggacagcagtgaggaagatttcattcgttccctctcccactcatcaccctggcaggcccggggaggcaaatcaggagctgccttctatgcaactgaggatgatagatttattttgaagcaaatgcctcgtctggaagtccagtccttcctcgactttgcaccacattacttcaattatattacaaatgctgttcaacaaaagaggcccacggcgttggccaaaattcttggagtttacagaattggttataagaactctcagaacaacactgagaagaagttagatctccttgtcatggaaaatcttttctacgggagaaagatggcacaggtttttgatttgaagggctctcttaggaatcggaatgtaaaaactgacactggaaaagagagttgtgatgtggtcctgctagatgaaaatctcctaaagatggttcgagacaaccctctatatattcgttctcattccaaagctgtgctgagaacctcgatccatagtgactcccatttcctttctagccacctcattatagattattctttgctggttgggcgagatgatactagcaatgagctagtagttggaattatagattatattcgaacatttacatgggacaaaaagcttgagatggttgtgaaatcaacaggaattttaggtggacaaggtaaaatgccaacagtggtgtctccggagttgtacaggactaggttttgtgaggcaatggacaagtatttcctaatggtaccagaccactggacaggcttgggtctgaattgctgaaatcaagcacatattttgaaatggactgtgaaggaaaaggggacaggaacaaaggaccaaaaataagctacatgttttatttcttcatcgtgttcaccactgtatgccaaggcttttcagttctgtgtctgtttagactgtccgtaatggaatggtaaaactccatgaatttgcactttggtttttgatacctgtggagctgtctgtacgttgggaagtggcatgaaaattttcttaagctaaaatacagacatgtttcaaagggctaaagttggagatgagtagatagggtgaaaaatgggttaaatttgctagcttaattgttttaagaagaaaacagtgtctcataaattgactatcctggcatcacatttaacatgttatctacttagaaagcatttgtagagctgctgaatttgttttgtgtttttctgtaataatttaatgttacttattatcagaatttctgaaacctttacaaaaattctgatttattccattaatggccagttaaacacgtgggcatttattgttttattgaggaatttgacttaaactgggaatcctgtcatgttgtttatctttccagcttgcctgtttttgagtatgtttgatgtttttaaaattttgtcttctctgtggatgacaggaggctacagcaattaactttaagcctccttttagagatatttttaaagcttgtttaaaatttttgtgcaattcatatattaaattgcacttacttgcatacgctcatattctagggttttttctctatttttagggtatcatagtaaatcattagtaaatgagtctgtagttactaaaccctaatggaataattattaatgaaagatttttgaaatataaaaaataaattaggcccaatccaagaaattgagtgagaaggaaacacttgttttattcacagaggtaaagtgtcttttcaatataaccagcaatttaggtggcatctataaaataaaaaatttctactgtggacatccccttttccaactttctacataatggctagttctgactactaagaaatgttaagaaataggccaagtgcggtggctcacgcctataatcctatcactttgggaggcctaggcaggcagatcacctgaggtcaggagttcaagaccagcctggccaacatgaggaaaccccatctctactaaaaagacaaaaaattagctgggcatggtggcatatacctgtaaccccaactacttgggtggctgaggcaggagaattgtttgaacctgggaggcggaggctgcagtgagctgggattacaccattgcattccagcctgggcaacagagcaagactgtctcaaaaaacaaaacgaaacaaaaaaagaaagttattcttagtaaggaacttcttgtttaatagcatttttgtttattttaaaaagtgatcagaagtagtaaactatctttgaggaaatactgtaaccccagaatatttcctcttgacttctttttgtaacaaggataatttagggatttataaagttgtaaggatttcactgttttcggactgcctataataatagcacattaaccttcacataataagaaatctggacaagttcagttacacagtatgatgaatacttgaattaggaacattgtggaaaatttgctttagagaatcaaggcagtagtttggtatttggtgcttattaaaaatgtggtttgttttgaactggaagcaagttgaccaaggacttatgactaatgtgatgctaagttccacttggccccttttaaaaacgtgtatgtgccttttgaagatacacaaaacactgaggattttagttttgaaatcaaagactattaaaggagctgtacagaggtaaaaaaataaatgtggaacattattaacttattttgtgtctaggaacaatggattttgtatctgatttaaaatgccaacactgttttgtctctgttcattttttctgtgaggatacttaaggttattattcctgtctgtttcctgtactcccctagtcatgagcacttgaagtacaaggtgtctccccctaggtgcaattaggttgtttctttgtttttagtttcaattctatgtgcatagcaggaatgctccacaggaatggcttctgacaataatctgtcctgttgattttgttttccttgcccatgacttgaacaactgtgttttaaagtactgtagtctagtaggtaactttgtggcaaaaattttcaatataatacattctgaaacaatagttgctgccttgcaaaggtaatctctcattttaaaattggacagtattaatgaaggggaaatatacaatttatttctattgagtggtagaactatatgtctggtcccttgctgctcttgtttaggccactatcatagatatatttcaaatattgtactactcagtgttaagtattgaatgactgtttccctttccttcaaggcctagagtatattctgaaaatttaggaatgaggaagaaatcttaatacttccttccttaacatacaacatgagtcccgagaataattgatagtagcaagagaaaactatgtcagtaacatgttgctttgtataaaaatcttatttataaatgtgaagctttttgatgccatcaaaacttattaaaaaataggatttacttttttctaattctgacctaagaaaaataatgagaacaagctgttgcaagctcttttgtagtctattgaatattttatagatattcaaaatttcctacaaactataattttttccatgatttagcagtgagtgattttctagctttggctcttattaggtattgtaaatagtagggttatatcgatatcagcttttgtgatggcattgtggtcatcagcttcatgacattttacccatttgcagtgatcctgtgtaaaactgccaaggaaagtaattacctgtaggagtttgctgagcttgaagagtgaaaactgttgtgaatgagcctgatcataaaacggaccaggccattcattattcctcaagtgttaatatactgacttatgcagtattcaaaccatctagtgcaatgtttttgtttttgttttttttttttttggtaacacaggtgcagtgtattatagaaaaaataaaaactacaatcattagcagttttaatactgctgtgtcagttttgtaaaaaatgtacattatgtcttttgacatgttgaattttaaactagggaaatgacattgtaaatcatagtagcctcttttaatttaatatgaaaaatgccactatattgaaagtacttaatgtattgtatatatttctctactttggttctagctattttatatgattgacatgttatttaaaagataactgccttgaacttttggagacttgtactgtaaataaagaaatcttaacaataaactcagaatctacttactccacttag

SEQ ID NO: 425885 - DNA, 940 bp, Homo sapiens
tgaagttatcatggtttattacgtagtattgggggaaattacatgtcataatgaagtttttgaatttaatcaactgaaggattattccttgggagaatgttaaggatctaatatttttattggcattgctgctgtactcacttctgagattcaagagtttgagtttttttcaaagtcctttggtcatattaatagaaaattatgttcagttattacatggataatccttatattggtattaaattataaataaccctttttgataagaatttattttgaccttctcttgattagaggcccacggcgttggccaaaattcttggagtttacagaattggttataagaactctcagaacaacactgagaagaagttagatctccttgtcatggaaaatcttttctacgggagaaagatggcacaggtaagggtattggactatgtgaagcatttagctactggaaccttttgtacctttggttcttaaatatagtgaatcagagagtaacatcttattttatagtaaatatttaactttggttactaggccatatttaacttttgacttgctcagccttggagaaagaatgaagaggaattattcttgtggagtggtcttaaaatacagcatatccaatattctagaatcacagaattggtagaataagaaggcagatctacttcccgcatcttttttgaagattaagaagctgaggcatacagaaattaagtacttcattaaaatcactcagttattcctagactcaggttagtctagattctaaaacagtactgttcaaagagctagtccttgaactgtttccagtctatgataagataaggaacgtgtgctagaatgtaattcagttcactgctttcttcattgagaacaccttctatgagaaaaatgtcagctgaactaaacaatatacttaataatg

SEQ ID NO: 425886 - DNA, 473 bp, Homo sapiens
gccttcaaaaactttctcttgaaatctttttctttcctaatgattcaggttatcatatctgcatacattttggctttcttaattatattcttaactctagagtacttagttaacttatgtattttaaaaatttgcatagtgatccagataaacactacttaatgtatgaacatgaacgagtgcccattgcagtctgcgagaaggaacccagctccatcattgcttttgctctcagttgtaaagaataccgaaatgccttagaggaattgtctaaagcgactcagtggaacagtgccgaagaagggcttccaacaaatagtacttcagatagcagaccaaagagtagcagccctatcagattacctgaaatgagtggaggacagacaaatcgtacaacagaaacagaaccacaaccaagtaagattacacatggaggaatatttataattagatttacctataattatggtttg

SEQ ID NO: 425887 - DNA, 4764 bp, Homo sapiens
  misc_feature (409)..(409): n is a, c, g, or t
aataggggtttttgttaaaaagggtgcttgattacgcaaaaacaacatgtgaaacaataagtaacaacatgaaggacaatgtgcaaacaaaagtatttgcattactcagattgattagcttcatatagtggttacaactaacaaagaaatgagctgaaaatttttatttttcatctgtagtgacctgtacttaaaattaatatgttacttcttatttttagccaaaaaggcttctggaatgttgtccttcttcagagggacagcagggaaaagccccgatctctcttcccagaagagagagaccttacgtggagcagatagtgcttactaccaggttgggcagacaggcaaggaggggaccgagaatcaaggcgttgagcctcaagatgaagtagatggaggagatacncaaaagaagcaactcataaatcctcatgtggaacttcaattttcagatgctaatgccaagttttactgtcggctctactatgcgggagagtttcataagatgcgtgaagtgattctggacagcagtgaggaagatttcattcgttccctctcccactcatcaccctggcaggcccggggaggcaaatcaggagctgccttctatgcaactgaggatgatagatttattttgaagcaaatgcctcgtctggaagtccagtccttcctcgactttgcaccacattacttcaattatattacaaatgctgttcaacaaaagaggcccacggcgttggccaaaattcttggagtttacagaattggttataagaactctcagaacaacactgagaagaagttagatctccttgtcatggaaaatcttttctacgggagaaagatggcacaggtttttgatttgaagggctctcttaggaatcggaatgtaaaaactgacactggaaaagagagttgtgatgtggtcctgctagatgaaaatctcctaaagatggttcgagacaaccctctatatattcgttctcattccaaagctgtgctgagaacctcgatccatagtgactcccatttcctttctagccacctcattatagattattctttgctggttgggcgagatgatactagcaatgagctagtagttggaattatagattatattcgaacatttacatgggacaaaaagcttgagatggttgtgaaatcaacaggaattttaggtggacaaggtaaaatgccaacagtggtgtctccggagttgtacaggactaggttttgtgaggcaatggacaagtatttcctaatggtaccagaccactggacaggcttgggtctgaattgctgaaatcaagcacatattttgaaatggactgtgaaggaaaaggggacaggaacaaaggaccaaaaataagctacatgttttatttcttcatcgtgttcaccactgtatgccaaggcttttcagttctgtgtctgtttagactgtccgtaatggaatggtaaaactccatgaatttgcactttggtttttgatacctgtggagctgtctgtacgttgggaagtggcatgaaaattttcttaagctaaaatacagacatgtttcaaagggctaaagttggagatgagtagatagggtgaaaaatgggttaaatttgctagcttaattgttttaagaagaaaacagtgtctcataaattgactatcctggcatcacatttaacatgttatctacttagaaagcatttgtagagctgctgaatttgttttgtgtttttctgtaataatttaatgttacttattatcagaatttctgaaacctttacaaaaattctgatttattccattaatggccagttaaacacgtgggcatttattgttttattgaggaatttgacttaaactgggaatcctgtcatgttgtttatctttccagcttgcctgtttttgagtatgtttgatgtttttaaaattttgtcttctctgtggatgacaggaggctacagcaattaactttaagcctccttttagagatatttttaaagcttgtttaaaatttttgtgcaattcatatattaaattgcacttacttgcatacgctcatattctagggttttttctctatttttagggtatcatagtaaatcattagtaaatgagtctgtagttactaaaccctaatggaataattattaatgaaagatttttgaaatataaaaaataaattaggcccaatccaagaaattgagtgagaaggaaacacttgttttattcacagaggtaaagtgtcttttcaatataaccagcaatttaggtggcatctataaaataaaaaatttctactgtggacatccccttttccaactttctacataatggctagttctgactactaagaaatgttaagaaataggccaagtgcggtggctcacgcctataatcctatcactttgggaggcctaggcaggcagatcacctgaggtcaggagttcaagaccagcctggccaacatgaggaaaccccatctctactaaaaagacaaaaaattagctgggcatggtggcatatacctgtaaccccaactacttgggtggctgaggcaggagaattgtttgaacctgggaggcggaggctgcagtgagctgggattacaccattgcattccagcctgggcaacagagcaagactgtctcaaaaaacaaaacgaaacaaaaaaagaaagttattcttagtaaggaacttcttgtttaatagcatttttgtttattttaaaaagtgatcagaagtagtaaactatctttgaggaaatactgtaaccccagaatatttcctcttgacttctttttgtaacaaggataatttagggatttataaagttgtaaggatttcactgttttcggactgcctataataatagcacattaaccttcacataataagaaatctggacaagttcagttacacagtatgatgaatacttgaattaggaacattgtggaaaatttgctttagagaatcaaggcagtagtttggtatttggtgcttattaaaaatgtggtttgttttgaactggaagcaagttgaccaaggacttatgactaatgtgatgctaagttccacttggccccttttaaaaacgtgtatgtgccttttgaagatacacaaaacactgaggattttagttttgaaatcaaagactattaaaggagctgtacagaggtaaaaaaataaatgtggaacattattaacttattttgtgtctaggaacaatggattttgtatctgatttaaaatgccaacactgttttgtctctgttcattttttctgtgaggatacttaaggttattattcctgtctgtttcctgtactcccctagtcatgagcacttgaagtacaaggtgtctccccctaggtgcaattaggttgtttctttgtttttagtttcaattctatgtgcatagcaggaatgctccacaggaatggcttctgacaataatctgtcctgttgattttgttttccttgcccatgacttgaacaactgtgttttaaagtactgtagtctagtaggtaactttgtggcaaaaattttcaatataatacattctgaaacaatagttgctgccttgcaaaggtaatctctcattttaaaattggacagtattaatgaaggggaaatatacaatttatttctattgagtggtagaactatatgtctggtcccttgctgctcttgtttaggccactatcatagatatatttcaaatattgtactactcagtgttaagtattgaatgactgtttccctttccttcaaggcctagagtatattctgaaaatttaggaatgaggaagaaatcttaatacttccttccttaacatacaacatgagtcccgagaataattgatagtagcaagagaaaactatgtcagtaacatgttgctttgtataaaaatcttatttataaatgtgaagctttttgatgccatcaaaacttattaaaaaataggatttacttttttctaattctgacctaagaaaaataatgagaacaagctgttgcaagctcttttgtagtctattgaatattttatagatattcaaaatttcctacaaactataattttttccatgatttagcagtgagtgattttctagctttggctcttattaggtattgtaaatagtagggttatatcgatatcagcttttgtgatggcattgtggtcatcagcttcatgacattttacccatttgcagtgatcctgtgtaaaactgccaaggaaagtaattacctgtaggagtttgctgagcttgaagagtgaaaactgttgtgaatgagcctgatcataaaacggaccaggccattcattattcctcaagtgttaatatactgacttatgcagtattcaaaccatctagtgcaatgtttttgtttttgttttttttttttttggtaacacaggtgcagtgtattatagaaaaaataaaaactacaatcattagcagttttaatactgctgtgtcagttttgtaaaaaatgtacattatgtcttttgacatgttgaattttaaactagggaaatgacattgtaaatcatagtagcctcttttaatttaatatgaaaaatgccactatattgaaagtacttaatgtattgtatatatttctctactttggttctagctattttatatgattgacatgttatttaaaagataactgccttgaacttttggagacttgtactgtaaataaagaaatcttaacaataaactcagaatctacttactccacttag

SEQ ID NO: 425888 - DNA, 3802 bp, Homo sapiens
ttagacatcgctcatctctaggcaggagctagtctttttaaacagaaactcgtaccaggtaggacttgtcccatggcatgtggcacaacagataacctttcctgcccactcagactgcttctgcatgtgtatctttatggcagtttatatgaaagaacatggtcagttgacttcagttgcccaatcaattatataacagctttttcccccttttctctttcataatctcaggtaaaatgccaacagtggtgtctccggagttgtacaggactaggttttgtgaggcaatggacaagtatttcctaatggtaccagaccactggacaggcttgggtctgaattgctgaaatcaagcacatattttgaaatggactgtgaaggaaaaggggacaggaacaaaggaccaaaaataagctacatgttttatttcttcatcgtgttcaccactgtatgccaaggcttttcagttctgtgtctgtttagactgtccgtaatggaatggtaaaactccatgaatttgcactttggtttttgatacctgtggagctgtctgtacgttgggaagtggcatgaaaattttcttaagctaaaatacagacatgtttcaaagggctaaagttggagatgagtagatagggtgaaaaatgggttaaatttgctagcttaattgttttaagaagaaaacagtgtctcataaattgactatcctggcatcacatttaacatgttatctacttagaaagcatttgtagagctgctgaatttgttttgtgtttttctgtaataatttaatgttacttattatcagaatttctgaaacctttacaaaaattctgatttattccattaatggccagttaaacacgtgggcatttattgttttattgaggaatttgacttaaactgggaatcctgtcatgttgtttatctttccagcttgcctgtttttgagtatgtttgatgtttttaaaattttgtcttctctgtggatgacaggaggctacagcaattaactttaagcctccttttagagatatttttaaagcttgtttaaaatttttgtgcaattcatatattaaattgcacttacttgcatacgctcatattctagggttttttctctatttttagggtatcatagtaaatcattagtaaatgagtctgtagttactaaaccctaatggaataattattaatgaaagatttttgaaatataaaaaataaattaggcccaatccaagaaattgagtgagaaggaaacacttgttttattcacagaggtaaagtgtcttttcaatataaccagcaatttaggtggcatctataaaataaaaaatttctactgtggacatccccttttccaactttctacataatggctagttctgactactaagaaatgttaagaaataggccaagtgcggtggctcacgcctataatcctatcactttgggaggcctaggcaggcagatcacctgaggtcaggagttcaagaccagcctggccaacatgaggaaaccccatctctactaaaaagacaaaaaattagctgggcatggtggcatatacctgtaaccccaactacttgggtggctgaggcaggagaattgtttgaacctgggaggcggaggctgcagtgagctgggattacaccattgcattccagcctgggcaacagagcaagactgtctcaaaaaacaaaacgaaacaaaaaaagaaagttattcttagtaaggaacttcttgtttaatagcatttttgtttattttaaaaagtgatcagaagtagtaaactatctttgaggaaatactgtaaccccagaatatttcctcttgacttctttttgtaacaaggataatttagggatttataaagttgtaaggatttcactgttttcggactgcctataataatagcacattaaccttcacataataagaaatctggacaagttcagttacacagtatgatgaatacttgaattaggaacattgtggaaaatttgctttagagaatcaaggcagtagtttggtatttggtgcttattaaaaatgtggtttgttttgaactggaagcaagttgaccaaggacttatgactaatgtgatgctaagttccacttggccccttttaaaaacgtgtatgtgccttttgaagatacacaaaacactgaggattttagttttgaaatcaaagactattaaaggagctgtacagaggtaaaaaaataaatgtggaacattattaacttattttgtgtctaggaacaatggattttgtatctgatttaaaatgccaacactgttttgtctctgttcattttttctgtgaggatacttaaggttattattcctgtctgtttcctgtactcccctagtcatgagcacttgaagtacaaggtgtctccccctaggtgcaattaggttgtttctttgtttttagtttcaattctatgtgcatagcaggaatgctccacaggaatggcttctgacaataatctgtcctgttgattttgttttccttgcccatgacttgaacaactgtgttttaaagtactgtagtctagtaggtaactttgtggcaaaaattttcaatataatacattctgaaacaatagttgctgccttgcaaaggtaatctctcattttaaaattggacagtattaatgaaggggaaatatacaatttatttctattgagtggtagaactatatgtctggtcccttgctgctcttgtttaggccactatcatagatatatttcaaatattgtactactcagtgttaagtattgaatgactgtttccctttccttcaaggcctagagtatattctgaaaatttaggaatgaggaagaaatcttaatacttccttccttaacatacaacatgagtcccgagaataattgatagtagcaagagaaaactatgtcagtaacatgttgctttgtataaaaatcttatttataaatgtgaagctttttgatgccatcaaaacttattaaaaaataggatttacttttttctaattctgacctaagaaaaataatgagaacaagctgttgcaagctcttttgtagtctattgaatattttatagatattcaaaatttcctacaaactataattttttccatgatttagcagtgagtgattttctagctttggctcttattaggtattgtaaatagtagggttatatcgatatcagcttttgtgatggcattgtggtcatcagcttcatgacattttacccatttgcagtgatcctgtgtaaaactgccaaggaaagtaattacctgtaggagtttgctgagcttgaagagtgaaaactgttgtgaatgagcctgatcataaaacggaccaggccattcattattcctcaagtgttaatatactgacttatgcagtattcaaaccatctagtgcaatgtttttgtttttgttttttttttttttggtaacacaggtgcagtgtattatagaaaaaataaaaactacaatcattagcagttttaatactgctgtgtcagttttgtaaaaaatgtacattatgtcttttgacatgttgaattttaaactagggaaatgacattgtaaatcatagtagcctcttttaatttaatatgaaaaatgccactatattgaaagtacttaatgtattgtatatatttctctactttggttctagctattttatatgattgacatgttatttaaaagataactgccttgaacttttggagacttgtactgtaaataaagaaatcttaacaataaactcagaatctacttactccacttag

SEQ ID NO: 425889 - DNA, 2278 bp, Homo sapiens
gccgagtagaggaaaaatccaaagagctgcctttcacacctttgggctggcatcataacaacctggagctctgaggcaggagaattgtttgaacctgggaggcggaggctgcagtgagctgggattacaccattgcattccagcctgggcaacagagcaagactgtctcaaaaaacaaaacgaaacaaaaaaagaaagttattcttagtaaggaacttcttgtttaatagcatttttgtttattttaaaaagtgatcagaagtagtaaactatctttgaggaaatactgtaaccccagaatatttcctcttgacttctttttgtaacaaggataatttagggatttataaagttgtaaggatttcactgttttcggactgcctataataatagcacattaaccttcacataataagaaatctggacaagttcagttacacagtatgatgaatacttgaattaggaacattgtggaaaatttgctttagagaatcaaggcagtagtttggtatttggtgcttattaaaaatgtggtttgttttgaactggaagcaagttgaccaaggacttatgactaatgtgatgctaagttccacttggccccttttaaaaacgtgtatgtgccttttgaagatacacaaaacactgaggattttagttttgaaatcaaagactattaaaggagctgtacagaggtaaaaaaataaatgtggaacattattaacttattttgtgtctaggaacaatggattttgtatctgatttaaaatgccaacactgttttgtctctgttcattttttctgtgaggatacttaaggttattattcctgtctgtttcctgtactcccctagtcatgagcacttgaagtacaaggtgtctccccctaggtgcaattaggttgtttctttgtttttagtttcaattctatgtgcatagcaggaatgctccacaggaatggcttctgacaataatctgtcctgttgattttgttttccttgcccatgacttgaacaactgtgttttaaagtactgtagtctagtaggtaactttgtggcaaaaattttcaatataatacattctgaaacaatagttgctgccttgcaaaggtaatctctcattttaaaattggacagtattaatgaaggggaaatatacaatttatttctattgagtggtagaactatatgtctggtcccttgctgctcttgtttaggccactatcatagatatatttcaaatattgtactactcagtgttaagtattgaatgactgtttccctttccttcaaggcctagagtatattctgaaaatttaggaatgaggaagaaatcttaatacttccttccttaacatacaacatgagtcccgagaataattgatagtagcaagagaaaactatgtcagtaacatgttgctttgtataaaaatcttatttataaatgtgaagctttttgatgccatcaaaacttattaaaaaataggatttacttttttctaattctgacctaagaaaaataatgagaacaagctgttgcaagctcttttgtagtctattgaatattttatagatattcaaaatttcctacaaactataattttttccatgatttagcagtgagtgattttctagctttggctcttattaggtattgtaaatagtagggttatatcgatatcagcttttgtgatggcattgtggtcatcagcttcatgacattttacccatttgcagtgatcctgtgtaaaactgccaaggaaagtaattacctgtaggagtttgctgagcttgaagagtgaaaactgttgtgaatgagcctgatcataaaacggaccaggccattcattattcctcaagtgttaatatactgacttatgcagtattcaaaccatctagtgcaatgtttttgtttttgttttttttttttttggtaacacaggtgcagtgtattatagaaaaaataaaaactacaatcattagcagttttaatactgctgtgtcagttttgtaaaaaatgtacattatgtcttttgacatgttgaattttaaactagggaaatgacattgtaaatcatagtagcctcttttaatttaatatgaaaaatgccactatattgaaagtacttaatgtattgtatatatttctctactttggttctagctattttatatgattgacatgttatttaaaagataactgccttgaacttttggagacttgtactgtaaataaagaaatcttaacaataaactcagaatctacttactccacttag

SEQ ID NO: 425890 - DNA, 3214 bp, Homo sapiens
  misc_feature (409)..(409): n is a, c, g, or t
aataggggtttttgttaaaaagggtgcttgattacgcaaaaacaacatgtgaaacaataagtaacaacatgaaggacaatgtgcaaacaaaagtatttgcattactcagattgattagcttcatatagtggttacaactaacaaagaaatgagctgaaaatttttatttttcatctgtagtgacctgtacttaaaattaatatgttacttcttatttttagccaaaaaggcttctggaatgttgtccttcttcagagggacagcagggaaaagccccgatctctcttcccagaagagagagaccttacgtggagcagatagtgcttactaccaggttgggcagacaggcaaggaggggaccgagaatcaaggcgttgagcctcaagatgaagtagatggaggagatacncaaaagaagcaactcataaatcctcatgtggaacttcaattttcagatgctaatgccaagttttactgtcggctctactatgcgggagagtttcataagatgcgtgaagtgattctggacagcagtgaggaagatttcattcgttccctctcccactcatcaccctggcaggcccggggaggcaaatcaggagctgccttctatgcaactgaggatgatagatttattttgaagcaaatgcctcgtctggaagtccagtccttcctcgactttgcaccacattacttcaattatattacaaatgctgttcaacaaaagaggcccacggcgttggccaaaattcttggagtttacagaattggttataagaactctcagaacaacactgagaagaagttagatctccttgtcatggaaaatcttttctacgggagaaagatggcacaggtttttgatttgaagggctctcttaggaatcggaatgtaaaaactgacactggaaaagagagttgtgatgtggtcctgctagatgaaaatctcctaaagatggttcgagacaaccctctatatattcgttctcattccaaagctgtgctgagaacctcgatccatagtgactcccatttcctttctagccacctcattatagattattctttgctggttgggcgagatgatactagcaatgagctagtagttggaattatagattatattcgaacatttacatgggacaaaaagcttgagatggttgtgaaatcaacaggaattttaggtggacaaggtaaaatgccaacagtggtgtctccggagttgtacaggactaggttttgtgaggcaatggacaagtatttcctaatggtaccagaccactggacaggcttgggtctgaattgctgaaatcaagcacatattttgaaatggactgtgaaggaaaaggggacaggaacaaaggaccaaaaataagctacatgttttatttcttcatcgtgttcaccactgtatgccaaggcttttcagttctgtgtctgtttagactgtccgtaatggaatggtaaaactccatgaatttgcactttggtttttgatacctgtggagctgtctgtacgttgggaagtggcatgaaaattttcttaagctaaaatacagacatgtttcaaagggctaaagttggagatgagtagatagggtgaaaaatgggttaaatttgctagcttaattgttttaagaagaaaacagtgtctcataaattgactatcctggcatcacatttaacatgttatctacttagaaagcatttgtagagctgctgaatttgttttgtgtttttctgtaataatttaatgttacttattatcagaatttctgaaacctttacaaaaattctgatttattccattaatggccagttaaacacgtgggcatttattgttttattgaggaatttgacttaaactgggaatcctgtcatgttgtttatctttccagcttgcctgtttttgagtatgtttgatgtttttaaaattttgtcttctctgtggatgacaggaggctacagcaattaactttaagcctccttttagagatatttttaaagcttgtttaaaatttttgtgcaattcatatattaaattgcacttacttgcatacgctcatattctagggttttttctctatttttagggtatcatagtaaatcattagtaaatgagtctgtagttactaaaccctaatggaataattattaatgaaagatttttgaaatataaaaaataaattaggcccaatccaagaaattgagtgagaaggaaacacttgttttattcacagaggtaaagtgtcttttcaatataaccagcaatttaggtggcatctataaaataaaaaatttctactgtggacatccccttttccaactttctacataatggctagttctgactactaagaaatgttaagaaataggccaagtgcggtggctcacgcctataatcctatcactttgggaggcctaggcaggcagatcacctgaggtcaggagttcaagaccagcctggccaacatgaggaaaccccatctctactaaaaagacaaaaaattagctgggcatggtggcatatacctgtaaccccaactacttgggtggctgaggcaggagaattgtttgaacctgggaggcggaggctgcagtgagctgggattacaccattgcattccagcctgggcaacagagcaagactgtctcaaaaaacaaaacgaaacaaaaaaagaaagttattcttagtaaggaacttcttgtttaatagcatttttgtttattttaaaaagtgatcagaagtagtaaactatctttgaggaaatactgtaaccccagaatatttcctcttgacttctttttgtaacaaggataatttagggatttataaagttgtaaggatttcactgttttcggactgcctataataatagcacattaaccttcacataataagaaatctggacaagttcagttacacagtatgatgaatacttgaattaggaacattgtggaaaatttgctttagagaatcaaggcagtagtttggtatttggtgcttattaaaaatgtggtttgttttgaactggaagcaagttgaccaaggacttatgactaatgtgatgctaagttccacttggccccttttaaaaacgtgtatgtgccttttgaagatacacaaaacactgaggattttagttttgaaatcaaagactattaaaggagctgtacagaggtaaaaaaataaatgtggaacattattaactta

SEQ ID NO: 425891 - DNA, 3151 bp, Homo sapiens
  misc_feature (409)..(409): n is a, c, g, or t
aataggggtttttgttaaaaagggtgcttgattacgcaaaaacaacatgtgaaacaataagtaacaacatgaaggacaatgtgcaaacaaaagtatttgcattactcagattgattagcttcatatagtggttacaactaacaaagaaatgagctgaaaatttttatttttcatctgtagtgacctgtacttaaaattaatatgttacttcttatttttagccaaaaaggcttctggaatgttgtccttcttcagagggacagcagggaaaagccccgatctctcttcccagaagagagagaccttacgtggagcagatagtgcttactaccaggttgggcagacaggcaaggaggggaccgagaatcaaggcgttgagcctcaagatgaagtagatggaggagatacncaaaagaagcaactcataaatcctcatgtggaacttcaattttcagatgctaatgccaagttttactgtcggctctactatgcgggagagtttcataagatgcgtgaagtgattctggacagcagtgaggaagatttcattcgttccctctcccactcatcaccctggcaggcccggggaggcaaatcaggagctgccttctatgcaactgaggatgatagatttattttgaagcaaatgcctcgtctggaagtccagtccttcctcgactttgcaccacattacttcaattatattacaaatgctgttcaacaaaagaggcccacggcgttggccaaaattcttggagtttacagaattggttataagaactctcagaacaacactgagaagaagttagatctccttgtcatggaaaatcttttctacgggagaaagatggcacaggtttttgatttgaagggctctcttaggaatcggaatgtaaaaactgacactggaaaagagagttgtgatgtggtcctgctagatgaaaatctcctaaagatggttcgagacaaccctctatatattcgttctcattccaaagctgtgctgagaacctcgatccatagtgactcccatttcctttctagccacctcattatagattattctttgctggttgggcgagatgatactagcaatgagctagtagttggaattatagattatattcgaacatttacatgggacaaaaagcttgagatggttgtgaaatcaacaggaattttaggtggacaaggtaaaatgccaacagtggtgtctccggagttgtacaggactaggttttgtgaggcaatggacaagtatttcctaatggtaccagaccactggacaggcttgggtctgaattgctgaaatcaagcacatattttgaaatggactgtgaaggaaaaggggacaggaacaaaggaccaaaaataagctacatgttttatttcttcatcgtgttcaccactgtatgccaaggcttttcagttctgtgtctgtttagactgtccgtaatggaatggtaaaactccatgaatttgcactttggtttttgatacctgtggagctgtctgtacgttgggaagtggcatgaaaattttcttaagctaaaatacagacatgtttcaaagggctaaagttggagatgagtagatagggtgaaaaatgggttaaatttgctagcttaattgttttaagaagaaaacagtgtctcataaattgactatcctggcatcacatttaacatgttatctacttagaaagcatttgtagagctgctgaatttgttttgtgtttttctgtaataatttaatgttacttattatcagaatttctgaaacctttacaaaaattctgatttattccattaatggccagttaaacacgtgggcatttattgttttattgaggaatttgacttaaactgggaatcctgtcatgttgtttatctttccagcttgcctgtttttgagtatgtttgatgtttttaaaattttgtcttctctgtggatgacaggaggctacagcaattaactttaagcctccttttagagatatttttaaagcttgtttaaaatttttgtgcaattcatatattaaattgcacttacttgcatacgctcatattctagggttttttctctatttttagggtatcatagtaaatcattagtaaatgagtctgtagttactaaaccctaatggaataattattaatgaaagatttttgaaatataaaaaataaattaggcccaatccaagaaattgagtgagaaggaaacacttgttttattcacagaggtaaagtgtcttttcaatataaccagcaatttaggtggcatctataaaataaaaaatttctactgtggacatccccttttccaactttctacataatggctagttctgactactaagaaatgttaagaaataggccaagtgcggtggctcacgcctataatcctatcactttgggaggcctaggcaggcagatcacctgaggtcaggagttcaagaccagcctggccaacatgaggaaaccccatctctactaaaaagacaaaaaattagctgggcatggtggcatatacctgtaaccccaactacttgggtggctgaggcaggagaattgtttgaacctgggaggcggaggctgcagtgagctgggattacaccattgcattccagcctgggcaacagagcaagactgtctcaaaaaacaaaacgaaacaaaaaaagaaagttattcttagtaaggaacttcttgtttaatagcatttttgtttattttaaaaagtgatcagaagtagtaaactatctttgaggaaatactgtaaccccagaatatttcctcttgacttctttttgtaacaaggataatttagggatttataaagttgtaaggatttcactgttttcggactgcctataataatagcacattaaccttcacataataagaaatctggacaagttcagttacacagtatgatgaatacttgaattaggaacattgtggaaaatttgctttagagaatcaaggcagtagtttggtatttggtgcttattaaaaatgtggtttgttttgaactggaagcaagttgaccaaggacttatgactaatgtgatgctaagttccacttggccccttttaaaatcctcagtgttttgtgtatcttcaaaaggcacatacacgtttttaagtcgacc

SEQ ID NO: 425892 - DNA, 1840 bp, Homo sapiens
  misc_feature (36)..(36): n is a, c, g, or t
  misc_feature (42)..(42): n is a, c, g, or t
  misc_feature (44)..(44): n is a, c, g, or t
cggcacgaggcaggctggccccggctcccggcccangctccncnggcccgggcccgcgcctgggctgcgccgcgcttcgcaacgtgtccggcgcgcagtacatgggctcaggctacaccaaggccgtgtaccgggtccgcctgcccggcggtgccgcggtggcgctcaaggcggtggactttagcggccacgatctgggcagctgcgtgcgcgagttcggggtacggaggggctgctatcggctggcggcccacaagctgcttaaggagatggtgctgctggagcggctgcggcaccccaacgtgctgcagctctatggctactgctaccaggacagcgaggacatcccagacaccctgaccaccatcacggagctgggcgcccctgtagaaatgatccagctgctgcaaacttcctgggaggatcgattccgaatctgcctgagcctgggccgcctcctccaccacctggcccactccccactgggctccgtcactctgctggacttccgccctcggcagtttgtgctggtggatggggagctcaaagtgacggacctggatgacgcacgtgtggaggagacgccgtgtgcaggcagcaccgactgcatactcgagtttccggccaggaacttcaccctgccctgctcagcccagggctggtgcgagggcatgaacgagaagcggaacctctataatgcctacaggtttttcttcacatacctcctgcctcacagtgccccgccttcactgcgtcctctgctggacagcatcgtcaacgccacaggaagactaccgctgctggccatcctaccaccacgggagctgcctcctttcagtgttcaacctggctgaggctgtggatgtctgtgagagccatgcccagtgtcgggcctttgtggtcaccaaccagaccacctggacaggtcggcagctggtctttttcaagactggatggagccaagtggtccctgatcccaacaagaccacatatgtgaaggcctctggctgacctatctgagggctcggctgaccagctgactatcctcagcagctgggcttgcctgtggagggagtgacttgcactggcagcactgcatgtcacctgggaacccctgcagacaaagctaacatcccagacagacagatgtgaccaggacaaacgtgcaataatgccaaatgttaaaatgtgagtttaccagcctagctatgggactgctggctcctagtccaggaatcatgggggtatgactgcctctccaaccctgtgggctgtaagcaagctcaggctagtctccccactgggggctgtgcccctccctgggacggttccgtgggcagccccatcactgtgttcaatagtgtgagaatgtagctaaagcccctgctgctgctgctgcacatgccacagcaggcggtgggggctgcgtggggacaatccatcgtggagtgttctctcagcttaggtctggacaggagacttggcgggagatgctccaggatgtgggtgattctgtacctggggaggctatctctgacctcccgacaggggacactcccaggccagcccaggggtcaggggcagaggtgcacacctcagcatgagccaagactggggtcagggagcaggtgtggtttgagccaggacctggggcgggggtggggccggggcctttctgcctcatttgctttcaatgaaagcctcaaagcagccaaaaccaggctttcccccttcctcgagtttgaatatccagaatcttttgtacttcttgttggttaaattgtttatttttgtaaaaaataaaataaaattagttaataaaatgatgtttcacagcaaa

SEQ ID NO: 425893 - DNA, 1933 bp, Homo sapiens
  misc_feature (36)..(36): n is a, c, g, or t
  misc_feature (42)..(42): n is a, c, g, or t
  misc_feature (44)..(44): n is a, c, g, or t
cggcacgaggcaggctggccccggctcccggcccangctccncnggcccgggcccgcgcctgggctgcgccgcgcttcgcaacgtgtccggcgcgcagtacatgggctcaggctacaccaaggccgtgtaccgggtccgcctgcccggcggtgccgcggtggcgctcaaggcggtggactttagcggccacgatctgggcagctgcgtgcgcgagttcggggtacggaggggctgctatcggctggcggcccacaagctgcttaaggagatggtgctgctggagcggctgcggcaccccaacgtgctgcagctctatggctactgctaccaggacagcgaggacatcccagacaccctgaccaccatcacggagctgggcgcccctgtagaaatgatccagctgctgcaaacttcctgggaggatcgattccgaatctgcctgagcctgggccgcctcctccaccacctggcccactccccactgggctccgtcactctgctggacttccgccctcggcagtttgtgctggtggatggggagctcaaagtgacggacctggatgacgcacgtgtggaggagacgccgtgtgcaggcagcaccgactgcatactcgagtttccggccaggaacttcaccctgccctgctcagcccagggctggtgcgagggcatgaacgagaagcggaacctctataatgcctacaggtttttcttcacatacctcctgcctcacagtgccccgccttcactgcgtcctctgctggacagcatcgtcaacgccacaggagagctcgcctggggggtggacgagaccctggcccagctggagaaggtgctgcacctgtaccggagcgggcagtatctgcagaactccacggcaagcagcagtaccgagtaccagtgtatcccagacagcaccatcccccaggaagactaccgctgctggccatcctaccaccacgggagctgcctcctttcagtgttcaacctggctgaggctgtggatgtctgtgagagccatgcccagtgtcgggcctttgtggtcaccaaccagaccacctggacaggtcggcagctggtctttttcaagactggatggagccaagtggtccctgatcccaacaagaccacatatgtgaaggcctctggctgacctatctgagggctcggctgaccagctgactatcctcagcagctgggcttgcctgtggagggagtgacttgcactggcagcactgcatgtcacctgggaacccctgcagacaaagctaacatcccagacagacagatgtgaccaggacaaacgtgcaataatgccaaatgttaaaatgtgagtttaccagcctagctatgggactgctggctcctagtccaggaatcatgggggtatgactgcctctccaaccctgtgggctgtaagcaagctcaggctagtctccccactgggggctgtgcccctccctgggacggttccgtgggcagccccatcactgtgttcaatagtgtgagaatgtagtgcgtggggacaatccatcgtggagtgttctctcagcttaggtctggacaggagacttggcgggagatgctccaggatgtgggtgattctgtacctggggaggctatctctgacctcccgacaggggacactcccaggccagcccaggggtcaggggcagaggtgcacacctcagcatgagccaagactggggtcagggagcaggtgtggtttgagccaggacctggggcgggggtggggccggggcctttctgcctcatttgctttcaatgaaagcctcaaagcagccaaaaccaggctttcccccttcctcgagtttgaatatccagaatcttttgtacttcttgttggttaaattgtttatttttgtaaaaaataaaataaaattagttaataaaatgatgtttcacagcaaa

SEQ ID NO: 425894 - DNA, 1982 bp, Homo sapiens
  misc_feature (36)..(36): n is a, c, g, or t
  misc_feature (42)..(42): n is a, c, g, or t
  misc_feature (44)..(44): n is a, c, g, or t
cggcacgaggcaggctggccccggctcccggcccangctccncnggcccgggcccgcgcctgggctgcgccgcgcttcgcaacgtgtccggcgcgcagtacatgggctcaggctacaccaaggccgtgtaccgggtccgcctgcccggcggtgccgcggtggcgctcaaggcggtggactttagcggccacgatctgggcagctgcgtgcgcgagttcggggtacggaggggctgctatcggctggcggcccacaagctgcttaaggagatggtgctgctggagcggctgcggcaccccaacgtgctgcagctctatggctactgctaccaggacagcgaggacatcccagacaccctgaccaccatcacggagctgggcgcccctgtagaaatgatccagctgctgcaaacttcctgggaggatcgattccgaatctgcctgagcctgggccgcctcctccaccacctggcccactccccactgggctccgtcactctgctggacttccgccctcggcagtttgtgctggtggatggggagctcaaagtgacggacctggatgacgcacgtgtggaggagacgccgtgtgcaggcagcaccgactgcatactcgagtttccggccaggaacttcaccctgccctgctcagcccagggctggtgcgagggcatgaacgagaagcggaacctctataatgcctacaggtttttcttcacatacctcctgcctcacagtgccccgccttcactgcgtcctctgctggacagcatcgtcaacgccacaggagagctcgcctggggggtggacgagaccctggcccagctggagaaggtgctgcacctgtaccggagcgggcagtatctgcagaactccacggcaagcagcagtaccgagtaccagtgtatcccagacagcaccatcccccaggaagactaccgctgctggccatcctaccaccacgggagctgcctcctttcagtgttcaacctggctgaggctgtggatgtctgtgagagccatgcccagtgtcgggcctttgtggtcaccaaccagaccacctggacaggtcggcagctggtctttttcaagactggatggagccaagtggtccctgatcccaacaagaccacatatgtgaaggcctctggctgacctatctgagggctcggctgaccagctgactatcctcagcagctgggcttgcctgtggagggagtgacttgcactggcagcactgcatgtcacctgggaacccctgcagacaaagctaacatcccagacagacagatgtgaccaggacaaacgtgcaataatgccaaatgttaaaatgtgagtttaccagcctagctatgggactgctggctcctagtccaggaatcatgggggtatgactgcctctccaaccctgtgggctgtaagcaagctcaggctagtctccccactgggggctgtgcccctccctgggacggttccgtgggcagccccatcactgtgttcaatagtgtgagaatgtagctaaagcccctgctgctgctgctgcacatgccacagcaggcggtgggggctgcgtggggacaatccatcgtggagtgttctctcagcttaggtctggacaggagacttggcgggagatgctccaggatgtgggtgattctgtacctggggaggctatctctgacctcccgacaggggacactcccaggccagcccaggggtcaggggcagaggtgcacacctcagcatgagccaagactggggtcagggagcaggtgtggtttgagccaggacctggggcgggggtggggccggggcctttctgcctcatttgctttcaatgaaagcctcaaagcagccaaaaccaggctttcccccttcctcgagtttgaatatccagaatcttttgtacttcttgttggttaaattgtttatttttgtaaataacataggtagtataatgtgtcgtgtcttcttctgctctgc

SEQ ID NO: 425895 - DNA, 617 bp, Homo sapiens
  misc_feature (36)..(36): n is a, c, g, or t
  misc_feature (42)..(42): n is a, c, g, or t
  misc_feature (44)..(44): n is a, c, g, or t
cggcacgaggcaggctggccccggctcccggcccangctccncnggcccgggcccgcgcctgggctgcgccgcgcttcgcaacgtgtccggcgcgcagtacatgggctcaggctacaccaaggccgtgtaccgggtccgcctgcccggcggtgccgcggtggcgctcaaggcggtggactttagcggccacgatctgggcagctgcgtgcgcgagttcggggtacggaggggctgctatcggctggcggcccacaagctgcttaaggagatggtgctgctggagcggctgcggcaccccaacgtgctgcagctctatggctactgctaccaggacagcgaggacatcccagacaccctgaccaccatcacggagctgggcgcccctgtagaaatgatccagctgctgcaaacttcctgggaggatcgattccgaatctgcctgagcctgggccgcctcctccaccacctggcccactccccactgggctccgtcactctgctggacttccgccctcggcagtttgtgctggtggatggggagctcaaagtgacggacctggatgacgcacgtgtgatgcatggattggcctcacccaaacgggatcgtagataccta

SEQ ID NO: 425896 - DNA, 1983 bp, Homo sapiens
  misc_feature (36)..(36): n is a, c, g, or t
  misc_feature (42)..(42): n is a, c, g, or t
  misc_feature (44)..(44): n is a, c, g, or t
cggcacgaggcaggctggccccggctcccggcccangctccncnggcccgggcccgcgcctgggctgcgccgcgcttcgcaacgtgtccggcgcgcagtacatgggctcaggctacaccaaggccgtgtaccgggtccgcctgcccggcggtgccgcggtggcgctcaaggcggtggactttagcggccacgatctgggcagctgcgtgcgcgagttcggggtacggaggggctgctatcggctggcggcccacaagctgcttaaggagatggtgctgctggagcggctgcggcaccccaacgtgctgcagctctatggctactgctaccaggacagcgaggacatcccagacaccctgaccaccatcacggagctgggcgcccctgtagaaatgatccagctgctgcaaacttcctgggaggatcgattccgaatctgcctgagcctgggccgcctcctccaccacctggcccactccccactgggctccgtcactctgctggacttccgccctcggcagtttgtgctggtggatggggagctcaaagtgacggacctggatgacgcacgtgtggaggagacgccgtgtgcaggcagcaccgactgcatactcgagtttccggccaggaacttcaccctgccctgctcagcccagggctggtgcgagggcatgaacgagaagcggaacctctataatgcctacaggtttttcttcacatacctcctgcctcacagtgccccgccttcactgcgtcctctgctggacagcatcgtcaacgccacaggagagctcgcctggggggtggacgagaccctggcccagctggagaaggtgctgcacctgtaccggagcgggcagtatctgcagaactccacggcaagcagcagtaccgagtaccagtgtatcccagacagcaccatcccccaggaagactaccgctgctggccatcctaccaccacgggagctgcctcctttcagtgttcaacctggctgaggctgtggatgtctgtgagagccatgcccagtgtcgggcctttgtggtcaccaaccagaccacctggacaggtcggcagctggtctttttcaagactggatggagccaagtggtccctgatcccaacaagaccacatatgtgaaggcctctggctgacctatctgagggctcggctgaccagctgactatcctcagcagctgggcttgcctgtggagggagtgacttgcactggcagcactgcatgtcacctgggaacccctgcagacaaagctaacatcccagacagacagatgtgaccaggacaaacgtgcaataatgccaaatgttaaaatgtgagtttaccagcctagctatgggactgctggctcctagtccaggaatcatgggggtatgactgcctctccaaccctgtgggctgtaagcaagctcaggctagtctccccactgggggctgtgcccctccctgggacggttccgtgggcagccccatcactgtgttcaatagtgtgagaatgtagctaaagcccctgctgctgctgctgcacatgccacagcaggcggtgggggctgcgtggggacaatccatcgtggagtgttctctcagcttaggtctggacaggagacttggcgggagatgctccaggatgtgggtgattctgtacctggggaggctatctctgacctcccgacaggggacactcccaggccagcccaggggtcaggggcagaggtgcacacctcagcatgagccaagactggggtcagggagcaggtgtggtttgagccaggacctggggcgggggtggggccggggcctttctgcctcatttgctttcaatgaaagcctcaaagcagccaaaaccaggctttcccccttcctcgagtttgaatatccagaatcttttgtacttcttgttggttaaattgtttatttttgtaaaaaataaaataaaattagttaataaaatgatgtttcacagcaaa

SEQ ID NO: 425897 - DNA, 2268 bp, Homo sapiens
  misc_feature (36)..(36): n is a, c, g, or t
  misc_feature (42)..(42): n is a, c, g, or t
  misc_feature (44)..(44): n is a, c, g, or t
cggcacgaggcaggctggccccggctcccggcccangctccncnggcccgggcccgcgcctgggctgcgccgcgcttcgcaacgtgtccggcgcgcagtacatgggctcaggctacaccaaggccgtgtaccgggtccgcctgcccggcggtgccgcggtggcgctcaaggcggtggactttagcggccacgatctgggcagctgcgtgcgcgagttcggggtacggaggggctgctatcggctggcggcccacaagctgcttaaggagatggtgctgctggagcggctgcggcaccccaacgtgctgcagctctatggctactgctaccaggacagcgaggacatcccagacaccctgaccaccatcacggagctgggcgcccctgtagaaatgatccagctgctgcaaacttcctgggaggatcgattccgaatctgcctgagcctgggccgcctcctccaccacctggcccactccccactgggctccgtcactctgctggacttccgccctcggcagtttgtgctggtggatggggagctcaaagtgacggacctggatgacgcacgtgtggaggagacgccgtgtgcaggcagcaccgactgcatactcgagtttccggccaggaacttcaccctgccctgctcagcccagggctggtgcgagggcatgaacgagaagcggaacctctataatgcctacaggtttttcttcacatacctcctgcctcacagtgccccgccttcactgcgtcctctgctggacagcatcgtcaacgccacaggagagctcgcctggggggtggacgagaccctggcccagctggagaaggtgctgcacctgtaccggagcgggcagtatctgcagaactccacggcaagcagcagtaccgagtaccagtgtatcccagacagcaccatcccccaggaagactaccgctgctggccatcctaccaccacgggagctgcctcctttcagtgttcaacctggctgaggctgtggatgtctgtgagagccatgcccagtgtcgggcctttgtggtcaccaaccagaccacctggacaggtcggcagctggtctttttcaagactggatggagccaagtggtccctgatcccaacaagaccacatatgtgaaggcctctggctgacctatctgagggctcggctgaccagctgactatcctcagcagctgggcttgcctgtggagggagtgacttgcactggcagcactgcatgtcacctgggaacccctgcagacaaagctaacatcccagacagacagatgtgaccaggacaaacgtgcaataatgccaaatgttaaaatgtgagtttaccagcctagctatgggactgctggctcctagtccaggaatcatgggggtatgactgcctctccaaccctgtgggctgtaagcaagctcaggctagtctccccactgggggctgtgcccctccctgggacggttccgtgggcagccccatcactgtgttcaatagtgtgagaatgtagctaaagcccctgctgctgctgctgcacatgccacagcaggcggtgggggctgcgtggggacaatccatcgtggagtgttctctcagcttaggtctggacaggagacttggcgggagatgctccaggatgtgggtgattctgtacctggggaggctatctctgacctcccgacaggggacactcccaggccagcccaggggtcaggggcagaggtgcacacctcagcatgagccaagactggggtcagggagcaggtgtggtttgagccaggacctggggcgggggtggggccggggcctttctgcctcatttgctttcaatgaaagcctcaaagcagccaaaaccaggctttcccccttcctcgagtttgaatatccagaatcttttgtacttcttgttggttaaattgtttatttttgtaaaaaataaaataaaattagttaataaaatgatgtttcacagcaaaaaaaaaaaaaaaactcctccaaggcggcggggacttcggggccaataggggcacccgggattccttcccagaggggggggcgcccggagatcccacacgatttaggggtcccccacttataaggcagagagggcgggtagaattatccgaagaggctggggcggataccctcaaggggggatcgattaagcagggggtaccccgggggtgtcgaccaaatcgtgtatctctcccggcctacacacaatctcaacaacacaaaactattaacgagcacaacaagaa

SEQ ID NO: 425898 - DNA, 1624 bp, Homo sapiens
  misc_feature (36)..(36): n is a, c, g, or t
  misc_feature (42)..(42): n is a, c, g, or t
  misc_feature (44)..(44): n is a, c, g, or t
cggcacgaggcaggctggccccggctcccggcccangctccncnggcccgggcccgcgcctgggctgcgccgcgcttcgcaacgtgtccggcgcgcagtacatgggctcaggctacaccaaggccgtgtaccgggtccgcctgcccggcggtgccgcggtggcgctcaaggcggtggactttagcggccacgatctgggcagctgcgtgcgcgagttcggggtacggaggggctgctatcggctggcggcccacaagctgcttaaggagatggtgctgctggagcggctgcggcaccccaacgtgctgcagctctatggctactgctaccaggacagcgaggacatcccagacaccctgaccaccatcacggagctgggcgcccctgtagaaatgatccagctgctgcaaacttcctgggaggatcgattccgaatctgcctgagcctgggccgcctcctccaccacctggcccactccccactgggctccgtcactctgctggacttccgccctcggcagtttgtgctggtggatggggagctcaaagtgacggacctggatgacgcacgtgtggaggagacgccgtgtgcaggcagcaccgactgcatactcgagtttccggccaggaacttcaccctgccctgctcagcccagggctggtgcgagggcatgaacgagaagcggaacctctataatgcctacaggtttttcttcacatacctcctgcctcacagtgccccgccttcactgcgtcctctgctggacagcatcgtcaacgccacaggagagctcgcctggggggtggacgagaccctggcccagctggagaaggtgctgcacctgtaccggagcgggcagtatctgcagaactccacggcaagcagcagtaccgagtaccagtgtatcccagacagcaccatcccccaggaagactaccgctgctggccatcctaccaccacgggagctgcctcctttcagtgttcaacctggctgaggctgtggatgtctgtgagagccatgcccagtgtcgggcctttgtggtcaccaaccagaccacctggacaggtcggcagctggtctttttcaagactggatggagccaagtggtccctgatcccaacaagaccacatatgtgaaggcctctggctgacctatctgagggctcggctgaccagctgactatcctcagcagctgggcttgcctgtggagggagtgacttgcactggcagcactgcatgtcacctgggaacccctgcagacaaagctaacatcccagacagacagatgtgaccaggacaaacgtgcaataatgccaaatgttaaaatgtgagtttaccagcgccagcccaggggtcaggggcagaggtgcacacctcagcatgagccaagactggggtcagggagcaggtgtggtttgagccaggacctggggcgggggtggggccggggcctttctgcctcatttgctttcaatgaaagcctcaaagcagccaaaaccaggctttcccccttcctcgagtttgaatatccagaatcttttgtacttcttgttggttaaattgtttatttttgtaaaaaataaaataaaattagttaataaaatgatgtttcacagcaaa

SEQ ID NO: 425899 - DNA, 446 bp, Homo sapiens
aacccaggagaaaagcagtgagcagtcttttcttgtgcccctcagatctgcctgagcctgggccgcctcctccaccacctggcccactccccactgggctccgtcactctgctggacttccgccctcggcagtttgtgctggtggatggggagctcaaagtgacggacctggatgacgcacgtgtggaggagacgccgtgtgcaggcagcaccgactgcatactcgagtttccggccaggaacttcaccctgccctgctcagcccagggctggtgcgagggcatgaacgagaagcggaacctctataatgcctacaggtgacctccacccctgactcgggaactccatcgaaggagaatgggccaggagggcatggcaggaagagagccaacgtggaggccagctgggcagggagactcagccttgaccagagcaagggaaggctt

SEQ ID NO: 425900 - DNA, 501 bp, Homo sapiens
catttgtattgctgagaaatagtctgtggatatgtcacaatttggataaacagttggatgctttccagttttgggctgttgcaaataatgctactatgaacataggcatataactcttaatatgcagaaatgctttatttctcctgtgtcagtagtacagtgtacgtgaatgcgtcacttttaaagacaaggccagactataacctaactgtaccatttgcattctcatcaacagtatgtgaaccttcttatttctctacattcttgccatacttggtatggttagtctttttaattttagttgttttaatagctgtataatagcatctgtctgtgattttattgcatttttctggtattttatggtattgaacatttgaacatcttgtatctagttgccacctgtatatcctctttggaagaatgtttattaatgtcttttgcttatttttaaatggatgttggtgatactttttcattaataaatagacgtataacaaa

SEQ ID NO: 425901 - DNA, 4449 bp, Homo sapiens
gcagaggaggaggaagccggaagtgcatcggccccgggtctgtccgggcgttgcgggattggggcctgggaacgctcggcccccggcagccgagaagcccgtgactgggctgagcagcaccatcccagccctggggcctgctgactgcgaacccggagcgttgctatcctccaccggactgtcaggctctgcgcgccccgcggaggtcggcggcgaccagcagcgactgcggagcgacggcgggcggccccgggcatgtacgcccccggaggcgcagggctgcccggcgggcgccggcggaggagcccgggaggcagcgctctgcccaagcagccggagcgtagcctggcctcggccctgcctggcgccctgtctatcacggcgctgtgcactgccctcgccgagcccgcctggttgcacatccacggaggcacctgttcgcgccaggagctgggggtctccgacgtgttgggctatgtgcacccggacctgctgaaagatttctgcatgaatccccagacagtgctgctcctgcgggtcatcgccgccttctgtttcctgggcatcctgtgtagtctctccgctttccttctggatgtctttgggccgaagcatcctgctctgaagatcactcgtcgctatgccttcgcccatatcctaacggttctgcagtgtgccaccgtcattggcttttcttattgggcttctgaactcatcttggcccagcagcagcagcataagaagtaccatggatcccaggtctatgtcaccttcgccgttagcttctacctggtggcaggagctggtggagcctcaatcctggccacggcagccaacctcctgcgccactaccccacagaggaagaggagcaggcgctggagctgctctcagagatggaagagaacgagccctacccggcggaatatgaggtcatcaaccagttccagccaccccctgcttacacaccctaatgccagccctgggctctcttcctcggcagcccctccctcaactctgcagctcctctcgcacccagaggagctcctttccccagcaggcctcactggtaggatcctgaccatcttctccaaaccttccccaggagagactctgcctttagggtcatccaagtatccctgctctcagaaccggaggtccactggttttctataatgtactctttccctcctgccacatcctgcccccttcacattcacgagtcattaccagccagggaaggtcatccaagtttcctccagcatgggcgatatctttgggaccgagactttccttggagagctgctgagagcggacagtcccaaaaacaagtgtcaaagggcccaagggaaaggggactgtgccctggaggctcacttcacagggatcagtgtttgctccacagctgtagctctgggctgacgccccccagaccccttccttctcggagtgacccgcccccaggccacctgctccggggagttctgtgcactttactctttggacttctcctcacgtgtgccctggttttatggggagagggaatcgctgttgggaaggcagagcagttgcaaccctctctgcccttgcttcatgtggctggagcccaggcaaggagagcaggagccagcgtgagactgaggccccctggtgcctatcaaggaccagagtgaaggggactacatctcccagcccttcaccttttaaatatgagtggttttaaaaggaaaaaaatgaaaccaggcaacagcaacaatattctgtttttaaaatagggacaagactgttgtcactttttagacatgtatcccattccttttggctctgcaatatttggggctgtagctccttccaagcccatggtagtccctccccgagtctctcccagtagaatgcagcctcccttccctggccccttccctctcagtgacggtgactccctggggccttctcgtggaacccagaggggctgaggactgtggcctggctggcgggccagcgtggtgctcctcaggactgcagcactgagatggaacctggcctcagtttaggaacaggggccacaacagggcaggaacccaccaccctccacataggaatacaaccagtggggccacatcatgtgaggcatcagacccacactgtcagcccagcaggccgggctgtgtccttcagacccagtgctgccctagactctgactcgggactccagcttgccacgtgccctctcccctcttgaatgtactctggtcttgcagtgtgctgctgggactttcttgctcagccatcactctggtcaccttgtttgctctgggtctggctgaattttctgccctgagatctgggcataaagtggatgaaacttgaaagaccttcagtgtagatccagatggccaacctgtccttgttaagttacttgcttcttgggaatcagtgtcccctgctgagctgaaaaggaaatggattccaatctcttccaacctttaaggtgatagatagtttgagcaagactggagaatggacaacactatgaagctgtggctagaaagggactgtcatgtcccatcctttggccagattgactggggatgtccggacagatgcctgcatgggtggtgagggccacatctgcacacgagccagtggctgcttgcagttcactgctgtgatgccagagtgtgttcaaaggtgactctcctgctcttctggactcttctctcaggcaagaaaggctgcaggctgcctgctatgtgatgcctgagcacaaagccaaggaactgaactaagtctttctgttaagtcctgagtttgtcattggcaggtttacttgtggccagctctctctgcccttgggtgtctgagcaggcagaccagaagaccaggcactggacctgcatgccaaagggactggtcatctcctgaggacctgtacatgaccctgtggactgttccgcacgatccggaacccactttttattcactccccatgtctttggccttcctcttctttctctttccctctgccatcctgacactgatagtttgtcatataaattccccgggttgtgtttttttttctagaaaaaaattaaaagggaaaacaaaaccaaaaaaaccagaaaccacgaataagaatggaaatgacaatggctgcctgtcatttttctgtcacgattttcctgatttggtttgttccctttgtctcagagaagcaggagatgttgatgaggctgtatttttttttctttttcttgtttttgagacaagagtctcgctctgtcacccgggctggagtgtaacgtggcatgatctcagctcactgcaacctctgcctcctgggttcaagcgattatcctgcctcagcctcctgagtagctgggattacaggcatgcgccactatgcccagataatttttttgtatttttagtagagacagggtttcaccatgttggccaggctggtctggaactcctaacctcaggttatccacccaccttggcctcccaaagtgctgggattataggcatgaaccaccgtgcctggccaaagatgtaatttaaaatagttagaagggacttggcatgggccagctccgtgcatggcattttcacccccagagcttcctaatcctgttttcacacaggaagtttctaggtctttctagaacagctagaaatagtagctgactcccgcccaaggcccaaccttcaaaccctgagctcttcaggctgcatcctctggtgagctatagaggagaacgtggctcctaaactctagccatcctgtgggaggaaatagacttctttgggctgtggcttgcagaacaaactacactttttttccctctattgtttaaattttatttaataatttgtgtgtttttctgtctttattttctgtatttcacgtgttccttcactccctagaaactgcactttctttgaaaccataggtaatgaatcttactaggagaggcatggggatagagacagttctgggagtgtgacctgtaagcctcctgtagggcagtgccaggccttgattgcccacgttctctccgttccttcttccttcatacatttgatcacacagcctacacccagccccgagtgtgcatcacggtaaaagagctgagggctctcttcagggagcagcccatttaggtctcttttgttgttgttagggagaatacacatctttcttggaagctgggagtgtgttctcatttcatgtccattcagacaaagcaccattaggcaccatgaaatatacagtgacggacaggaccctgtctgcaaggattttatgtccttagttcaggagatggacttgtccacagaaaggcagagtgaagtggccttgccgcacggacatgttgcgatttcattctggaaacaagttagacctatgtgataatgttagggttcctggagcaagctggatgacccac

SEQ ID NO: 425902 - DNA, 4551 bp, Homo sapiens
ccctacctgctggcaaccaccattatattttctgtctctataaactgattattctaggtatctcatatgagtggaattataaaatatttgtcctacatttggttgatttcacttagcatagtatcttcaagttcaacttctttttggaacaaaaagggaatgaatgagtgagtaaatggagaatcagcattaattgacctgtatggtcttagcctctctggctgtctcagctccaaagtcaggcttttcctgccagctcaaaatatcctttagcagaatgcattaacatgtcaggttaactgtcagtgtctttaaaaatggttagaagggcatggcatacacagtgaagtagaatcctgcacttaggctagtcctgttggaaagagaaggacttgaggtacaggagagcagtggcctctgctaatgtggaatttgctccagctaccctgcagaccacccaggagcaggggctaagacagcgtcctccagaactgccctggctcccaggactgtggtggaggggaatcaaactccttctaggtggggacttcctgcaccaagtgttacttggggccgtgaaaatttggttctccctctacagatttctgcatgaatccccagacagtgctgctcctgcgggtcatcgccgccttctgtttcctgggcatcctgtgtagtctctccgctttccttctggatgtctttgggccgaagcatcctgctctgaagatcactcgtcgctatgccttcgcccatatcctaacggttctgcagtgtgccaccgtcattggcttttcttattgggcttctgaactcatcttggcccagcagcagcagcataagaagtaccatggatcccaggtctatgtcaccttcgccgttagcttctacctggtggcaggagctggtggagcctcaatcctggccacggcagccaacctcctgcgccactaccccacagaggaagaggagcaggcgctggagctgctctcagagatggaagagaacgagccctacccggcggaatatgaggtcatcaaccagttccagccaccccctgcttacacaccctaatgccagccctgggctctcttcctcggcagcccctccctcaactctgcagctcctctcgcacccagaggagctcctttccccagcaggcctcactggtaggatcctgaccatcttctccaaaccttccccaggagagactctgcctttagggtcatccaagtatccctgctctcagaaccggaggtccactggttttctataatgtactctttccctcctgccacatcctgcccccttcacattcacgagtcattaccagccagggaaggtcatccaagtttcctccagcatgggcgatatctttgggaccgagactttccttggagagctgctgagagcggacagtcccaaaaacaagtgtcaaagggcccaagggaaaggggactgtgccctggaggctcacttcacagggatcagtgtttgctccacagctgtagctctgggctgacgccccccagaccccttccttctcggagtgacccgcccccaggccacctgctccggggagttctgtgcactttactctttggacttctcctcacgtgtgccctggttttatggggagagggaatcgctgttgggaaggcagagcagttgcaaccctctctgcccttgcttcatgtggctggagcccaggcaaggagagcaggagccagcgtgagactgaggccccctggtgcctatcaaggaccagagtgaaggggactacatctcccagcccttcaccttttaaatatgagtggttttaaaaggaaaaaaatgaaaccaggcaacagcaacaatattctgtttttaaaatagggacaagactgttgtcactttttagacatgtatcccattccttttggctctgcaatatttggggctgtagctccttccaagcccatggtagtccctccccgagtctctcccagtagaatgcagcctcccttccctggccccttccctctcagtgacggtgactccctggggccttctcgtggaacccagaggggctgaggactgtggcctggctggcgggccagcgtggtgctcctcaggactgcagcactgagatggaacctggcctcagtttaggaacaggggccacaacagggcaggaacccaccaccctccacataggaatacaaccagtggggccacatcatgtgaggcatcagacccacactgtcagcccagcaggccgggctgtgtccttcagacccagtgctgccctagactctgactcgggactccagcttgccacgtgccctctcccctcttgaatgtactctggtcttgcagtgtgctgctgggactttcttgctcagccatcactctggtcaccttgtttgctctgggtctggctgaattttctgccctgagatctgggcataaagtggatgaaacttgaaagaccttcagtgtagatccagatggccaacctgtccttgttaagttacttgcttcttgggaatcagtgtcccctgctgagctgaaaaggaaatggattccaatctcttccaacctttaaggtgatagatagtttgagcaagactggagaatggacaacactatgaagctgtggctagaaagggactgtcatgtcccatcctttggccagattgactggggatgtccggacagatgcctgcatgggtggtgagggccacatctgcacacgagccagtggctgcttgcagttcactgctgtgatgccagagtgtgttcaaaggtgactctcctgctcttctggactcttctctcaggcaagaaaggctgcaggctgcctgctatgtgatgcctgagcacaaagccaaggaactgaactaagtctttctgttaagtcctgagtttgtcattggcaggtttacttgtggccagctctctctgcccttgggtgtctgagcaggcagaccagaagaccaggcactggacctgcatgccaaagggactggtcatctcctgaggacctgtacatgaccctgtggactgttccgcacgatccggaacccactttttattcactccccatgtctttggccttcctcttctttctctttccctctgccatcctgacactgatagtttgtcatataaattccccgggttgtgtttttttttctagaaaaaaattaaaagggaaaacaaaaccaaaaaaaccagaaaccacgaataagaatggaaatgacaatggctgcctgtcatttttctgtcacgattttcctgatttggtttgttccctttgtctcagagaagcaggagatgttgatgaggctgtatttttttttctttttcttgtttttgagacaagagtctcgctctgtcacccgggctggagtgtaacgtggcatgatctcagctcactgcaacctctgcctcctgggttcaagcgattatcctgcctcagcctcctgagtagctgggattacaggcatgcgccactatgcccagataatttttttgtatttttagtagagacagggtttcaccatgttggccaggctggtctggaactcctaacctcaggttatccacccaccttggcctcccaaagtgctgggattataggcatgaaccaccgtgcctggccaaagatgtaatttaaaatagttagaagggacttggcatgggccagctccgtgcatggcattttcacccccagagcttcctaatcctgttttcacacaggaagtttctaggtctttctagaacagctagaaatagtagctgactcccgcccaaggcccaaccttcaaaccctgagctcttcaggctgcatcctctggtgagctatagaggagaacgtggctcctaaactctagccatcctgtgggaggaaatagacttctttgggctgtggcttgcagaacaaactacactttttttccctctattgtttaaattttatttaataatttgtgtgtttttctgtctttattttctgtatttcacgtgttccttcactccctagaaactgcactttctttgaaaccataggtaatgaatcttactaggagaggcatggggatagagacagttctgggagtgtgacctgtaagcctcctgtagggcagtgccaggccttgattgcccacgttctctccgttccttcttccttcatacatttgatcacacagcctacacccagccccgagtgtgcatcacggtaaaagagctgagggctctcttcagggagcagcccatttaggtctcttttgttgttgttagggagaatacacatctttcttggaagctgggagtgtgttctcatttcatgtccattcagacaaagcaccattaggcaccatgaaatatacagtgacggacaggaccctgtctgcaaggattttatgtccttagttcaggagatggacttgtccacagaaaggcagagtgaagtggccttgccgcacggacatgttgcgatttcattctggaaacaagttagacctatgtgataatgttagggttcctggagcaagctggatgacccac

SEQ ID NO: 425903 - DNA, 4052 bp, Homo sapiens
cagttccatgggatcctattacagctgcctacttccctgatgactagagggcaccgccaagcagtgtttaccaaaatcaacaggccagagcacagctggaagatttctgcatgaatccccagacagtgctgctcctgcgggtcatcgccgccttctgtttcctgggcatcctgtgtagtctctccgctttccttctggatgtctttgggccgaagcatcctgctctgaagatcactcgtcgctatgccttcgcccatatcctaacggttctgcagtgtgccaccgtcattggcttttcttattgggcttctgaactcatcttggcccagcagcagcagcataagaagtaccatggatcccaggtctatgtcaccttcgccgttagcttctacctggtggcaggagctggtggagcctcaatcctggccacggcagccaacctcctgcgccactaccccacagaggaagaggagcaggcgctggagctgctctcagagatggaagagaacgagccctacccggcggaatatgaggtcatcaaccagttccagccaccccctgcttacacaccctaatgccagccctgggctctcttcctcggcagcccctccctcaactctgcagctcctctcgcacccagaggagctcctttccccagcaggcctcactggtaggatcctgaccatcttctccaaaccttccccaggagagactctgcctttagggtcatccaagtatccctgctctcagaaccggaggtccactggttttctataatgtactctttccctcctgccacatcctgcccccttcacattcacgagtcattaccagccagggaaggtcatccaagtttcctccagcatgggcgatatctttgggaccgagactttccttggagagctgctgagagcggacagtcccaaaaacaagtgtcaaagggcccaagggaaaggggactgtgccctggaggctcacttcacagggatcagtgtttgctccacagctgtagctctgggctgacgccccccagaccccttccttctcggagtgacccgcccccaggccacctgctccggggagttctgtgcactttactctttggacttctcctcacgtgtgccctggttttatggggagagggaatcgctgttgggaaggcagagcagttgcaaccctctctgcccttgcttcatgtggctggagcccaggcaaggagagcaggagccagcgtgagactgaggccccctggtgcctatcaaggaccagagtgaaggggactacatctcccagcccttcaccttttaaatatgagtggttttaaaaggaaaaaaatgaaaccaggcaacagcaacaatattctgtttttaaaatagggacaagactgttgtcactttttagacatgtatcccattccttttggctctgcaatatttggggctgtagctccttccaagcccatggtagtccctccccgagtctctcccagtagaatgcagcctcccttccctggccccttccctctcagtgacggtgactccctggggccttctcgtggaacccagaggggctgaggactgtggcctggctggcgggccagcgtggtgctcctcaggactgcagcactgagatggaacctggcctcagtttaggaacaggggccacaacagggcaggaacccaccaccctccacataggaatacaaccagtggggccacatcatgtgaggcatcagacccacactgtcagcccagcaggccgggctgtgtccttcagacccagtgctgccctagactctgactcgggactccagcttgccacgtgccctctcccctcttgaatgtactctggtcttgcagtgtgctgctgggactttcttgctcagccatcactctggtcaccttgtttgctctgggtctggctgaattttctgccctgagatctgggcataaagtggatgaaacttgaaagaccttcagtgtagatccagatggccaacctgtccttgttaagttacttgcttcttgggaatcagtgtcccctgctgagctgaaaaggaaatggattccaatctcttccaacctttaaggtgatagatagtttgagcaagactggagaatggacaacactatgaagctgtggctagaaagggactgtcatgtcccatcctttggccagattgactggggatgtccggacagatgcctgcatgggtggtgagggccacatctgcacacgagccagtggctgcttgcagttcactgctgtgatgccagagtgtgttcaaaggtgactctcctgctcttctggactcttctctcaggcaagaaaggctgcaggctgcctgctatgtgatgcctgagcacaaagccaaggaactgaactaagtctttctgttaagtcctgagtttgtcattggcaggtttacttgtggccagctctctctgcccttgggtgtctgagcaggcagaccagaagaccaggcactggacctgcatgccaaagggactggtcatctcctgaggacctgtacatgaccctgtggactgttccgcacgatccggaacccactttttattcactccccatgtctttggccttcctcttctttctctttccctctgccatcctgacactgatagtttgtcatataaattccccgggttgtgtttttttttctagaaaaaaattaaaagggaaaacaaaaccaaaaaaaccagaaaccacgaataagaatggaaatgacaatggctgcctgtcatttttctgtcacgattttcctgatttggtttgttccctttgtctcagagaagcaggagatgttgatgaggctgtatttttttttctttttcttgtttttgagacaagagtctcgctctgtcacccgggctggagtgtaacgtggcatgatctcagctcactgcaacctctgcctcctgggttcaagcgattatcctgcctcagcctcctgagtagctgggattacaggcatgcgccactatgcccagataatttttttgtatttttagtagagacagggtttcaccatgttggccaggctggtctggaactcctaacctcaggttatccacccaccttggcctcccaaagtgctgggattataggcatgaaccaccgtgcctggccaaagatgtaatttaaaatagttagaagggacttggcatgggccagctccgtgcatggcattttcacccccagagcttcctaatcctgttttcacacaggaagtttctaggtctttctagaacagctagaaatagtagctgactcccgcccaaggcccaaccttcaaaccctgagctcttcaggctgcatcctctggtgagctatagaggagaacgtggctcctaaactctagccatcctgtgggaggaaatagacttctttgggctgtggcttgcagaacaaactacactttttttccctctattgtttaaattttatttaataatttgtgtgtttttctgtctttattttctgtatttcacgtgttccttcactccctagaaactgcactttctttgaaaccataggtaatgaatcttactaggagaggcatggggatagagacagttctgggagtgtgacctgtaagcctcctgtagggcagtgccaggccttgattgcccacgttctctccgttccttcttccttcatacatttgatcacacagcctacacccagccccgagtgtgcatcacggtaaaagagctgagggctctcttcagggagcagcccatttaggtctcttttgttgttgttagggagaatacacatctttcttggaagctgggagtgtgttctcatttcatgtccattcagacaaagcaccattaggcaccatgaaatatacagtgacggacaggaccctgtctgcaaggattttatgtccttagttcaggagatggacttgtccacagaaaggcagagtgaagtggccttgccgcacggacatgttgcgatttcattctggaaacaagttagacctatgtgataatgttagggttcctggagcaagctggatgacccac

SEQ ID NO: 425904 - DNA, 4224 bp, Homo sapiens
gcagaggaggaggaagccggaagtgcatcggccccgggtctgtccgggcgttgcgggattggggcctgggaacgctcggcccccggcagccgagaagcccgtgactgggctgagcagcaccatcccagccctggggcctgctgactgcgaacccggagcgttgctatcctccaccggactgtcaggctctgcgcgccccgcggaggtcggcggcgaccagcagcgactgcggagcgacggcgggcggccccgggcatgtacgcccccggaggcgcagggctgcccggcgggcgccggcggaggagcccgggaggcagcgctctgcccaagcagccggagcgtagcctggcctcggccctgcctggcgccctgtctatcacggcgctgtgcactgccctcgccgagcccgcctggttgcacatccacggaggcacctgttcgcgccaggagctgggggtctccgacgtgttgggctatgtgcacccggacctgctgaaagatttctgcatgaatccccagacagtgctgctcctgcgggtcatcgccgccttctgtttcctgggcatcctgtgtagtctctccgctttccttctggatgtctttgggccgaagcatcctgctctgaagatcactcgtcgctatgccttcgcccatatcctaacggttctgcagtgtgccaccgtcattggcttttcttattgggcttctgaactcatcttggcccagcagcagcagcataagaagtaccatggatcccaggtctatgtcaccttcgccgttagcttctacctggtggcaggagctggtggagcctcaatcctggccacggcagccaacctcctgcgccactaccccacagaggaagaggagcaggcgctggagctgctctcagagatggaagagaacgagccctacccggcggaatatgaggtcatcaaccagttccagccaccccctgcttacacaccctaatgccagccctgggctctcttcctcggcagcccctccctcaactctgcagctcctctcgcacccagaggagctcctttccccagcaggcctcactggtaggatcctgaccatcttctccaaaccttccccaggagagactctgcctttagggtcatccaagtatccctgctctcagaaccggaggtccactggttttctataatgtactctttccctcctgccacatcctgcccccttcacattcacgagtcattaccagccagggaaggtcatccaagtttcctccagcatgggcgatatctttgggaccgagactttccttggagagctgctgagagcggacagtcccaaaaacaagtgtcaaagggcccaagggaaaggggactgtgccctggaggctcacttcacagggatcagtgtttgctccacagctgtagctctgggctgacgccccccagaccccttccttctcggagtgacccgcccccaggccacctgctccggggagttctgtgcactttactctttggacttctcctcacgtgtgccctggttttatggggagagggaatcgctgttgggaaggcagagcagttgcaaccctctctgcccttgcttcatgtggctggagcccaggcaaggagagcaggagccagcgtgagactgaggccccctggtgcctatcaaggaccagagtgaaggggactacatctcccagcccttcaccttttaaatatgagtggttttaaaaggaaaaaaatgaaaccaggcaacagcaacaatattctgtttttaaaatagggacaagactgttgtcactttttagacatgtatcccattccttttggctctgcaatatttggggctgtagctccttccaagcccatggtagtccctccccgagtctctcccagtagaatgcagcctcccttccctggccccttccctctcagtgacggtgactccctggggccttctcgtggaacccagaggggctgaggactgtggcctggctggcgggccagcgtggtgctcctcaggactgcagcactgagatggaacctggcctcagtttaggaacaggggccacaacagggcaggaacccaccaccctccacataggaatacaaccagtggggccacatcatgtgaggcatcagacccacactgtcagcccagcaggccgggctgtgtccttcagacccagtgctgccctagactctgactcgggactccagcttgccacgtgccctctcccctcttgaatgtactctggtcttgcagtgtgctgctgggactttcttgctcagccatcactctggtcaccttgtttgctctgggtctggctgaattttctgccctgagatctgggcataaagtggatgaaacttgaaagaccttcagtgtagatccagatggccaacctgtccttgttaagttacttgcttcttgggaatcagtgtcccctgctgagctgaaaaggaaatggattccaatctcttccaacctttaaggtgatagatagtttgagcaagactggagaatggacaacactatgaagctgtggctagaaagggactgtcatgtcccatcctttggccagattgactggggatgtccggacagatgcctgcatgggtggtgagggccacatctgcacacgagccagtggctgcttgcagttcactgctgtgatgccagagtgtgttcaaaggtgactctcctgctcttctggactcttctctcaggcaagaaaggctgcaggctgcctgctatgtgatgcctgagcacaaagccaaggaactgaactaagtctttctgttaagtcctgagtttgtcattggcaggtttacttgtggccagctctctctgcccttgggtgtctgagcaggcagaccagaagaccaggcactggacctgcatgccaaagggactggtcatctcctgaggacctgtacatgaccctgtggactgttccgcacgatccggaacccactttttattcactccccatgtctttggccttcctcttctttctctttccctctgccatcctgacactgatagtttgtcatataaattccccgggttgtgtttttttttctagaaaaaaattaaaagggaaaacaaaaccaaaaaaaccagaaaccacgaataagaatggaaatgacaatggctgcctgtcatttttctgtcacgattttcctgatttggtttgttccctttgtctcagagaagcaggagatgttgatgaggctgtatttttttttctttttcttgtttttgagacaagagtctcgctctgtcacccgggctggagtgtaacgtggcatgatctcagctcactgcaacctctgcctcctgggttcaagcgattatcctgcctcagcctcctgagtagctgggattacaggcatgcgccactatgcccagataatttttttgtatttttagtagagacagggtttcaccatgttggccaggctggtctggaactcctaacctcaggttatccacccaccttggcctcccaaagtgctgggattataggcatgaaccaccgtgcctggccaaagatgtaatttaaaatagttagaagggacttggcatgggccagctccgtgcatggcattttcacccccagagcttcctaatcctgttttcacacaggaagtttctaggtctttctagaacagctagaaatagtagctgactcccgcccaaggcccaaccttcaaaccctgagctcttcaggctgcatcctctggtgagctatagaggagaacgtggctcctaaactctagccatcctgtgggaggaaatagacttctttgggctgtggcttgcagaacaaactacactttttttccctctattgtttaaattttatttaataatttgtgtgtttttctgtctttattttctgtatttcacgtgttccttcactccctagaaactgcactttctttgaaaccataggtaatgaatcttactaggagaggcatggggatagagacagttctgggagtgtgacctgtaagcctcctgtagggcagtgccaggccttgattgcccacgttctctccgttccttcttccttcatacatttgatcacacagcctacacccagccccgagtgtgcatcacggtaaaagagctgagggctctcttcagggagcagcccatttaggtctcttttgttgttgttagggagaatacacatacagccatttaggtacggatcctctagag

SEQ ID NO: 425905 - DNA, 4396 bp, Homo sapiens
gcagaggaggaggaagccggaagtgcatcggccccgggtctgtccgggcgttgcgggattggggcctgggaacgctcggcccccggcagccgagaagcccgtgactgggctgagcagcaccatcccagccctggggcctgctgactgcgaacccggagcgttgctatcctccaccggactgtcaggctctgcgcgccccgcggaggtcggcggcgaccagcagcgactgcggagcgacggcgggcggccccgggcatgtacgcccccggaggcgcagggctgcccggcgggcgccggcggaggagcccgggaggcagcgctctgcccaagcagccggagcgtagcctggcctcggccctgcctggcgccctgtctatcacggcgctgtgcactgccctcgccgagcccgcctggttgcacatccacggaggcacctgttcgcgccaggagctgggggtctccgacgtgttgggctatgtgcacccggacctgctgaaagatttctgcatgaatccccagacagtgctgctcctgcgggtcatcgccgccttctgtttcctgggcatcctgtgtagtctctccgctttccttctggatgtctttgggccgaagcatcctgctctgaagatcactcgtcgctatgccttcgcccatatcctaacggttctgcagtgtgccaccgtcattggcttttcttattgggcttctgaactcatcttggcccagcagcagcagcataagaagtaccatggatcccaggtctatgtcaccttcgccgttagcttctacctggtggcaggagctggtggagcctcaatcctggccacggcagccaacctcctgcgccactaccccacagaggaagaggagcaggcgctggagctgctctcagagatggaagagaacgagccctacccggcggaatatgaggtcatcaaccagttccagccaccccctgcttacacaccctaatgccagccctgggctctcttcctcggcagcccctccctcaactctgcagctcctctcgcacccagaggagctcctttccccagcaggcctcactggtaggatcctgaccatcttctccaaaccttccccaggagagactctgcctttagggtcatccaagtatccctgctctcagaaccggaggtccactggttttctataatgtactctttccctcctgccacatcctgcccccttcacattcacgagtcattaccagccagggaaggtcatccaagtttcctccagcatgggcgatatctttgggaccgagactttccttggagagctgctgagagcggacagtcccattcacagggatcagtgtttgctccacagctgtagctctgggctgacgccccccagaccccttccttctcggagtgacccgcccccaggccacctgctccggggagttctgtgcactttactctttggacttctcctcacgtgtgccctggttttatggggagagggaatcgctgttgggaaggcagagcagttgcaaccctctctgcccttgcttcatgtggctggagcccaggcaaggagagcaggagccagcgtgagactgaggccccctggtgcctatcaaggaccagagtgaaggggactacatctcccagcccttcaccttttaaatatgagtggttttaaaaggaaaaaaatgaaaccaggcaacagcaacaatattctgtttttaaaatagggacaagactgttgtcactttttagacatgtatcccattccttttggctctgcaatatttggggctgtagctccttccaagcccatggtagtccctccccgagtctctcccagtagaatgcagcctcccttccctggccccttccctctcagtgacggtgactccctggggccttctcgtggaacccagaggggctgaggactgtggcctggctggcgggccagcgtggtgctcctcaggactgcagcactgagatggaacctggcctcagtttaggaacaggggccacaacagggcaggaacccaccaccctccacataggaatacaaccagtggggccacatcatgtgaggcatcagacccacactgtcagcccagcaggccgggctgtgtccttcagacccagtgctgccctagactctgactcgggactccagcttgccacgtgccctctcccctcttgaatgtactctggtcttgcagtgtgctgctgggactttcttgctcagccatcactctggtcaccttgtttgctctgggtctggctgaattttctgccctgagatctgggcataaagtggatgaaacttgaaagaccttcagtgtagatccagatggccaacctgtccttgttaagttacttgcttcttgggaatcagtgtcccctgctgagctgaaaaggaaatggattccaatctcttccaacctttaaggtgatagatagtttgagcaagactggagaatggacaacactatgaagctgtggctagaaagggactgtcatgtcccatcctttggccagattgactggggatgtccggacagatgcctgcatgggtggtgagggccacatctgcacacgagccagtggctgcttgcagttcactgctgtgatgccagagtgtgttcaaaggtgactctcctgctcttctggactcttctctcaggcaagaaaggctgcaggctgcctgctatgtgatgcctgagcacaaagccaaggaactgaactaagtctttctgttaagtcctgagtttgtcattggcaggtttacttgtggccagctctctctgcccttgggtgtctgagcaggcagaccagaagaccaggcactggacctgcatgccaaagggactggtcatctcctgaggacctgtacatgaccctgtggactgttccgcacgatccggaacccactttttattcactccccatgtctttggccttcctcttctttctctttccctctgccatcctgacactgatagtttgtcatataaattccccgggttgtgtttttttttctagaaaaaaattaaaagggaaaacaaaaccaaaaaaaccagaaaccacgaataagaatggaaatgacaatggctgcctgtcatttttctgtcacgattttcctgatttggtttgttccctttgtctcagagaagcaggagatgttgatgaggctgtatttttttttctttttcttgtttttgagacaagagtctcgctctgtcacccgggctggagtgtaacgtggcatgatctcagctcactgcaacctctgcctcctgggttcaagcgattatcctgcctcagcctcctgagtagctgggattacaggcatgcgccactatgcccagataatttttttgtatttttagtagagacagggtttcaccatgttggccaggctggtctggaactcctaacctcaggttatccacccaccttggcctcccaaagtgctgggattataggcatgaaccaccgtgcctggccaaagatgtaatttaaaatagttagaagggacttggcatgggccagctccgtgcatggcattttcacccccagagcttcctaatcctgttttcacacaggaagtttctaggtctttctagaacagctagaaatagtagctgactcccgcccaaggcccaaccttcaaaccctgagctcttcaggctgcatcctctggtgagctatagaggagaacgtggctcctaaactctagccatcctgtgggaggaaatagacttctttgggctgtggcttgcagaacaaactacactttttttccctctattgtttaaattttatttaataatttgtgtgtttttctgtctttattttctgtatttcacgtgttccttcactccctagaaactgcactttctttgaaaccataggtaatgaatcttactaggagaggcatggggatagagacagttctgggagtgtgacctgtaagcctcctgtagggcagtgccaggccttgattgcccacgttctctccgttccttcttccttcatacatttgatcacacagcctacacccagccccgagtgtgcatcacggtaaaagagctgagggctctcttcagggagcagcccatttaggtctcttttgttgttgttagggagaatacacatctttcttggaagctgggagtgtgttctcatttcatgtccattcagacaaagcaccattaggcaccatgaaatatacagtgacggacaggaccctgtctgcaaggattttatgtccttagttcaggagatggacttgtccacagaaaggcagagtgaagtggccttgccgcacggacatgttgcgatttcattctggaaacaagttagacctatgtgataatgttagggttcctggagcaagctggatgacccac

SEQ ID NO: 425906 - DNA, 3355 bp, Homo sapiens
gcagaggaggaggaagccggaagtgcatcggccccgggtctgtccgggcgttgcgggattggggcctgggaacgctcggcccccggcagccgagaagcccgtgactgggctgagcagcaccatcccagccctggggcctgctgactgcgaacccggagcgttgctatcctccaccggactgtcaggctctgcgcgccccgcggaggtcggcggcgaccagcagcgactgcggagcgacggcgggcggccccgggcatgtacgcccccggaggcgcagggctgcccggcgggcgccggcggaggagcccgggaggcagcgctctgcccaagcagccggagcgtagcctggcctcggccctgcctggcgccctgtctatcacggcgctgtgcactgccctcgccgagcccgcctggttgcacatccacggaggcacctgttcgcgccaggagctgggggtctccgacgtgttgggctatgtgcacccggacctgctgaaagatttctgcatgaatccccagacagtgctgctcctgcgggtcatcgccgccttctgtttcctgggcatcctgtgtagtctctccgctttccttctggatgtctttgggccgaagcatcctgctctgaagatcactcgtcgctatgccttcgcccatatcctaacggttctgcagtgtgccaccgtcattggcttttcttattgggcttctgaactcatcttggcccagcagcagcagcataagaagtaccatggatcccaggtctatgtcaccttcgccgttagcttctacctggtggcaggagctggtggagcctcaatcctggccacggcagccaacctcctgcgccactaccccacagaggaagaggagcaggcgctggagctgctctcagagatggaagagaacgagccctacccggcggaatatgaggtcatcaaccagttccagccaccccctgcttacacaccctaatgccagccctgggctctcttcctcggcagcccctccctcaactctgcagctcctctcgcacccagaggagctcctttccccagcaggcctcactggtaggatcctgaccatcttctccaaaccttccccaggagagactctgcctttagggtcatccaagtatccctgctctcagaaccggaggtccactggttttctataatgtactctttccctcctgccacatcctgcccccttcacattcacgagtcattaccagccagggaaggtcatccaagtttcctccagcatgggcgatatctttgggaccgagactttccttggagagctgctgagagcggacagtcccaaaaacaagtgtcaaagggcccaagggaaaggggactgtgccctggaggctcacttcacagggatcagtgtttgctccacagctgtagctctgggctgacgccccccagaccccttccttctcggagtgacccgcccccaggccacctgctccggggagttctgtgcactttactctttggacttctcctcacgtgtgccctggttttatggggagagggaatcgctgttgggaaggcagagcagttgcaaccctctctgcccttgcttcatgtggctggagcccaggcaaggagagcaggagccagcgtgagactgaggccccctggtgcctatcaaggaccagagtgaaggggactacatctcccagcccttcaccttttaaatatgagtggttttaaaaggaaaaaaatgaaaccaggcaacagcaacaatattctgtttttaaaatagggacaagactgttgtcactttttagacatgtatcccattccttttggctctgcaatatttggggctgtagctccttccaagcccatggtagtccctccccgagtctctcccagtagaatgcagcctcccttccctggccccttccctctcagtgacggtgactccctggggccttctcgtggaacccagaggggctgaggactgtggcctggctggcgggccagcgtggtgctcctcaggactgcagcactgagatggaacctggcctcagtttaggaacaggggccacaacagggcaggaacccaccaccctccacataggaatacaaccagtggggccacatcatgtgaggcatcagacccacactgtcagcccagcaggccgggctgtgtccttcagacccagtgctgccctagactctgactcgggactccagcttgccacgtgccctctcccctcttgaatgtactctggtcttgcagtgtgctgctgggactttcttgctcagccatcactctggtcaccttgtttgctctgggtctggctgaattttctgccctgagatctgggcataaagtggatgaaacttgaaagaccttcagtgtagatccagatggccaacctgtccttgttaagttacttgcttcttgggaatcagtgtcccctgctgagctgaaaaggaaatggattccaatctcttccaacctttaaggtgatagatagtttgagcaagactggagaatggacaacactatgaagctgtggctagaaagggactgtcatgtcccatcctttggccagattgactggggatgtccggacagatgcctgcatgggtggtgagggccacatctgcacacgagccagtggctgcttgcagttcactgctgtgatgccagagtgtgttcaaaggtgactctcctgctcttctggactcttctctcaggcaagaaaggctgcaggctgcctgctatgtgatgcctgagcacaaagccaaggaactgaactaagtctttctgttaagtcctgagtttgtcattggcaggtttacttgtggccagctctctctgcccttgggtgtctgagcaggcagaccagaagaccaggcactggacctgcatgccaaagggactggtcatctcctgaggacctgtacatgaccctgtggactgttccgcacgatccggaacccactttttattcactccccatgtctttggccttcctcttctttctctttccctctgccatcctgacactgatagtttgtcatataaattccccgggttgtgtttttttttctagaaaaaaattaaaagggaaaacaaaaccaaaaaaaccagaaaccacgaataagaatggaaatgacaatggctgcctgtcatttttctgtcacgattttcctgatttggtttgttccctttgtctcagagaagcaggagatgttgatgaggctgtatttttttttctttttcttgttttttttttttttttttttttttttttttttttttttttttttttttggggggggggaaaaagggttaaagggggggaaaggggcgggggggggggaggggg

SEQ ID NO: 425907 - DNA, 1468 bp, Homo sapiens
cacctgtggagtggcggcccgctcaggtctggcatacgagatggctcagaaacggccctgccctacaggtgccccgcccagggagaaggacagatggagtccccagatgcctcccagacaacgtggctgcccaaaggcaaggctggggaggcaccttggtgcccatggtggcgagcaccccaggggtgaagggcttcccaacggaagcagaatgcagaggccttgccgtgagcccacatgggccagggaaggctttctgagaggctcctgccgccccccatacccatctcatacagagccaccctcacctgtggggtgtgtgccttgaggggagcgtgactcagctgggcctgcacttggaggagcttggggaggttccccaacttctctgggcctcattccctcacctgtgaagtgaagctgatgacggacctgtcttgtggggcacgggaggactgaggtagctacgtaagtgtgttcccagcacccagcactcagtcagcactggaaaagagtagccactaaggtgctgggattataggcatgaaccaccgtgcctggccaaagatgtaatttaaaatagttagaagggacttggcatgggccagctccgtgcatggcattttcacccccagagcttcctaatcctgttttcacacaggaagtttctaggtctttctagaacagctagaaatagtagctgactcccgcccaaggcccaaccttcaaaccctgagctcttcaggctgcatcctctggtgagctatagaggagaacgtggctcctaaactctagccatcctgtgggaggaaatagacttctttgggctgtggcttgcagaacaaactacactttttttccctctattgtttaaattttatttaataatttgtgtgtttttctgtctttattttctgtatttcacgtgttccttcactccctagaaactgcactttctttgaaaccataggtaatgaatcttactaggagaggcatggggatagagacagttctgggagtgtgacctgtaagcctcctgtagggcagtgccaggccttgattgcccacgttctctccgttccttcttccttcatacatttgatcacacagcctacacccagccccgagtgtgcatcacggtaaaagagctgagggctctcttcagggagcagcccatttaggtctcttttgttgttgttagggagaatacacatctttcttggaagctgggagtgtgttctcatttcatgtccattcagacaaagcaccattaggcaccatgaaatatacagtgacggacaggaccctgtctgcaaggattttatgtccttagttcaggagatggacttgtccacagaaaggcagagtgaagtggccttgccgcacggacatgttgcgatttcattctggaaacaagttagacctatgtgataatgttagggttcctggagcaagctggatgacccac

SEQ ID NO: 425908 - DNA, 1560 bp, Homo sapiens
gcagaggaggaggaagccggaagtgcatcggccccgggtctgtccgggcgttgcgggattggggcctgggaacgctcggcccccggcagccgagaagcccgtgactgggctgagcagcaccatcccagccctggggcctgctgactgcgaacccggagcgttgctatcctccaccggactgtcaggctctgcgcgccccgcggaggtcggcggcgaccagcagcgactgcggagcgacggcgggcggccccgggcatgtacgcccccggaggcgcagggctgcccggcgggcgccggcggaggagcccgggaggcagcgctctgcccaagcagccggagcgtagcctggcctcggccctgcctggcgccctgtctatcacggcgctgtgcactgccctcgccgagcccgcctggttgcacatccacggaggcacctgttcgcgccaggagctgggggtctccgacgtgttgggctatgtgcacccggacctgctgaaagatttctgcatgaatccccagacagtgctgctcctgcgggtcatcgccgccttctgtttcctgggcatcctgtgtagtctctccgctttccttctggatgtctttgggccgaagcatcctgctctgaagatcactcgtcgctatgccttcgcccatatcctaacggttctgcagtgtgccaccgtcattggcttttcttattgggcttctgaactcatcttggcccagcagcagcagcataagaagtaccatggatcccaggtctatgtcaccttcgccgttagcttctacctggtggcaggagctggtggagcctcaatcctggccacggcagccaacctcctgcgccactaccccacagaggaagaggagcaggcgctggagctgctctcagagatggaagagaacgagccctacccggcggaatatgaggtcatcaaccagttccagccaccccctgcttacacaccctaatgccagccctgggctctcttcctcggcagcccctccctcaactctgcagctcctctcgcacccagaggagctcctttccccagcaggcctcactggtaggatcctgaccatcttctccaaaccttccccaggagagactctgcctttagggtcatccaagtatccctgctctcagaaccggaggtccactggttttctataatgtactctttccctcctgccacatcctgcccccttcacattcacgagtcattaccagccagggaaggtcatccaagtttcctccagcatgggcgatatctttgggaccgagactttccttggagagctttgagacgccggccattcccagacaaggtccacaggtcagtgtaaaggatctcctctcagcaggctcacctcccccggatccgtggtgcctcgcaccgccggagtttttgcctgagcccacagccgagttcctcctgtgttcggagtgttccactcgcagcaacctgctccggcaggttttgtcactctactctggtgggatggcgcgccacgatgtggcctgtccaagctgaagatgcatatctgtgttgggtagca

SEQ ID NO: 425909 - DNA, 520 bp, Homo sapiens
ctctccgttccttcttccttcatacatttgatcacacagcctacacccagccccgagtgtgcatcacggtaaaagagctgagggctctcttcagggagcagcccatttaggtctcttttgttgttgttagggagaatacacatctttcttggaagctgggagtgtgttctcatttcatgtccattcagacaaagcaccattaggcaccatgaaatatacagtgacggacaggaccctgtctgcaaggattttatgtccttagttcaggagatggacttgtccacagaaaggcagagtgaagtgggcggccggctcggaaaagtcctgtgcccagaagggagccagttctgacctgagtgataatgaaaggcttcctggaggacgcagcttgagccacacttgatgtgggagtgaactgggatagggacactcctgctgagagaatggcaagagcaaaagcacactggtggccaggaggtggtaagagccgaggttagaaaggtgaggggtgctcatttaa

SEQ ID NO: 425910 - DNA, 4472 bp, Homo sapiens
gcagaggaggaggaagccggaagtgcatcggccccgggtctgtccgggcgttgcgggattggggcctgggaacgctcggcccccggcagccgagaagcccgtgactgggctgagcagcaccatcccagccctggggcctgctgactgcccagtcccggcttcacctgcagcgaacccggagcgttgctatcctccaccggactgtcaggctctgcgcgccccgcggaggtcggcggcgaccagcagcgactgcggagcgacggcgggcggccccgggcatgtacgcccccggaggcgcagggctgcccggcgggcgccggcggaggagcccgggaggcagcgctctgcccaagcagccggagcgtagcctggcctcggccctgcctggcgccctgtctatcacggcgctgtgcactgccctcgccgagcccgcctggttgcacatccacggaggcacctgttcgcgccaggagctgggggtctccgacgtgttgggctatgtgcacccggacctgctgaaagatttctgcatgaatccccagacagtgctgctcctgcgggtcatcgccgccttctgtttcctgggcatcctgtgtagtctctccgctttccttctggatgtctttgggccgaagcatcctgctctgaagatcactcgtcgctatgccttcgcccatatcctaacggttctgcagtgtgccaccgtcattggcttttcttattgggcttctgaactcatcttggcccagcagcagcagcataagaagtaccatggatcccaggtctatgtcaccttcgccgttagcttctacctggtggcaggagctggtggagcctcaatcctggccacggcagccaacctcctgcgccactaccccacagaggaagaggagcaggcgctggagctgctctcagagatggaagagaacgagccctacccggcggaatatgaggtcatcaaccagttccagccaccccctgcttacacaccctaatgccagccctgggctctcttcctcggcagcccctccctcaactctgcagctcctctcgcacccagaggagctcctttccccagcaggcctcactggtaggatcctgaccatcttctccaaaccttccccaggagagactctgcctttagggtcatccaagtatccctgctctcagaaccggaggtccactggttttctataatgtactctttccctcctgccacatcctgcccccttcacattcacgagtcattaccagccagggaaggtcatccaagtttcctccagcatgggcgatatctttgggaccgagactttccttggagagctgctgagagcggacagtcccaaaaacaagtgtcaaagggcccaagggaaaggggactgtgccctggaggctcacttcacagggatcagtgtttgctccacagctgtagctctgggctgacgccccccagaccccttccttctcggagtgacccgcccccaggccacctgctccggggagttctgtgcactttactctttggacttctcctcacgtgtgccctggttttatggggagagggaatcgctgttgggaaggcagagcagttgcaaccctctctgcccttgcttcatgtggctggagcccaggcaaggagagcaggagccagcgtgagactgaggccccctggtgcctatcaaggaccagagtgaaggggactacatctcccagcccttcaccttttaaatatgagtggttttaaaaggaaaaaaatgaaaccaggcaacagcaacaatattctgtttttaaaatagggacaagactgttgtcactttttagacatgtatcccattccttttggctctgcaatatttggggctgtagctccttccaagcccatggtagtccctccccgagtctctcccagtagaatgcagcctcccttccctggccccttccctctcagtgacggtgactccctggggccttctcgtggaacccagaggggctgaggactgtggcctggctggcgggccagcgtggtgctcctcaggactgcagcactgagatggaacctggcctcagtttaggaacaggggccacaacagggcaggaacccaccaccctccacataggaatacaaccagtggggccacatcatgtgaggcatcagacccacactgtcagcccagcaggccgggctgtgtccttcagacccagtgctgccctagactctgactcgggactccagcttgccacgtgccctctcccctcttgaatgtactctggtcttgcagtgtgctgctgggactttcttgctcagccatcactctggtcaccttgtttgctctgggtctggctgaattttctgccctgagatctgggcataaagtggatgaaacttgaaagaccttcagtgtagatccagatggccaacctgtccttgttaagttacttgcttcttgggaatcagtgtcccctgctgagctgaaaaggaaatggattccaatctcttccaacctttaaggtgatagatagtttgagcaagactggagaatggacaacactatgaagctgtggctagaaagggactgtcatgtcccatcctttggccagattgactggggatgtccggacagatgcctgcatgggtggtgagggccacatctgcacacgagccagtggctgcttgcagttcactgctgtgatgccagagtgtgttcaaaggtgactctcctgctcttctggactcttctctcaggcaagaaaggctgcaggctgcctgctatgtgatgcctgagcacaaagccaaggaactgaactaagtctttctgttaagtcctgagtttgtcattggcaggtttacttgtggccagctctctctgcccttgggtgtctgagcaggcagaccagaagaccaggcactggacctgcatgccaaagggactggtcatctcctgaggacctgtacatgaccctgtggactgttccgcacgatccggaacccactttttattcactccccatgtctttggccttcctcttctttctctttccctctgccatcctgacactgatagtttgtcatataaattccccgggttgtgtttttttttctagaaaaaaattaaaagggaaaacaaaaccaaaaaaaccagaaaccacgaataagaatggaaatgacaatggctgcctgtcatttttctgtcacgattttcctgatttggtttgttccctttgtctcagagaagcaggagatgttgatgaggctgtatttttttttctttttcttgtttttgagacaagagtctcgctctgtcacccgggctggagtgtaacgtggcatgatctcagctcactgcaacctctgcctcctgggttcaagcgattatcctgcctcagcctcctgagtagctgggattacaggcatgcgccactatgcccagataatttttttgtatttttagtagagacagggtttcaccatgttggccaggctggtctggaactcctaacctcaggttatccacccaccttggcctcccaaagtgctgggattataggcatgaaccaccgtgcctggccaaagatgtaatttaaaatagttagaagggacttggcatgggccagctccgtgcatggcattttcacccccagagcttcctaatcctgttttcacacaggaagtttctaggtctttctagaacagctagaaatagtagctgactcccgcccaaggcccaaccttcaaaccctgagctcttcaggctgcatcctctggtgagctatagaggagaacgtggctcctaaactctagccatcctgtgggaggaaatagacttctttgggctgtggcttgcagaacaaactacactttttttccctctattgtttaaattttatttaataatttgtgtgtttttctgtctttattttctgtatttcacgtgttccttcactccctagaaactgcactttctttgaaaccataggtaatgaatcttactaggagaggcatggggatagagacagttctgggagtgtgacctgtaagcctcctgtagggcagtgccaggccttgattgcccacgttctctccgttccttcttccttcatacatttgatcacacagcctacacccagccccgagtgtgcatcacggtaaaagagctgagggctctcttcagggagcagcccatttaggtctcttttgttgttgttagggagaatacacatctttcttggaagctgggagtgtgttctcatttcatgtccattcagacaaagcaccattaggcaccatgaaatatacagtgacggacaggaccctgtctgcaaggattttatgtccttagttcaggagatggacttgtccacagaaaggcagagtgaagtggccttgccgcacggacatgttgcgatttcattctggaaacaagttagacctatgtgataatgttagggttcctggagcaagctggatgacccac

SEQ ID NO: 425911 - DNA, 4437 bp, Homo sapiens
ccgcagtcccattccggagtctcctgtctccgccccccgaattcccgcagccctccccgtctccgtcagccccgggtcccacccccctatcctctggtgtcaaccctgacagcccagtcccggcttcacctgcagcgaacccggagcgttgctatcctccaccggactgtcaggctctgcgcgccccgcggaggtcggcggcgaccagcagcgactgcggagcgacggcgggcggccccgggcatgtacgcccccggaggcgcagggctgcccggcgggcgccggcggaggagcccgggaggcagcgctctgcccaagcagccggagcgtagcctggcctcggccctgcctggcgccctgtctatcacggcgctgtgcactgccctcgccgagcccgcctggttgcacatccacggaggcacctgttcgcgccaggagctgggggtctccgacgtgttgggctatgtgcacccggacctgctgaaagatttctgcatgaatccccagacagtgctgctcctgcgggtcatcgccgccttctgtttcctgggcatcctgtgtagtctctccgctttccttctggatgtctttgggccgaagcatcctgctctgaagatcactcgtcgctatgccttcgcccatatcctaacggttctgcagtgtgccaccgtcattggcttttcttattgggcttctgaactcatcttggcccagcagcagcagcataagaagtaccatggatcccaggtctatgtcaccttcgccgttagcttctacctggtggcaggagctggtggagcctcaatcctggccacggcagccaacctcctgcgccactaccccacagaggaagaggagcaggcgctggagctgctctcagagatggaagagaacgagccctacccggcggaatatgaggtcatcaaccagttccagccaccccctgcttacacaccctaatgccagccctgggctctcttcctcggcagcccctccctcaactctgcagctcctctcgcacccagaggagctcctttccccagcaggcctcactggtaggatcctgaccatcttctccaaaccttccccaggagagactctgcctttagggtcatccaagtatccctgctctcagaaccggaggtccactggttttctataatgtactctttccctcctgccacatcctgcccccttcacattcacgagtcattaccagccagggaaggtcatccaagtttcctccagcatgggcgatatctttgggaccgagactttccttggagagctgctgagagcggacagtcccaaaaacaagtgtcaaagggcccaagggaaaggggactgtgccctggaggctcacttcacagggatcagtgtttgctccacagctgtagctctgggctgacgccccccagaccccttccttctcggagtgacccgcccccaggccacctgctccggggagttctgtgcactttactctttggacttctcctcacgtgtgccctggttttatggggagagggaatcgctgttgggaaggcagagcagttgcaaccctctctgcccttgcttcatgtggctggagcccaggcaaggagagcaggagccagcgtgagactgaggccccctggtgcctatcaaggaccagagtgaaggggactacatctcccagcccttcaccttttaaatatgagtggttttaaaaggaaaaaaatgaaaccaggcaacagcaacaatattctgtttttaaaatagggacaagactgttgtcactttttagacatgtatcccattccttttggctctgcaatatttggggctgtagctccttccaagcccatggtagtccctccccgagtctctcccagtagaatgcagcctcccttccctggccccttccctctcagtgacggtgactccctggggccttctcgtggaacccagaggggctgaggactgtggcctggctggcgggccagcgtggtgctcctcaggactgcagcactgagatggaacctggcctcagtttaggaacaggggccacaacagggcaggaacccaccaccctccacataggaatacaaccagtggggccacatcatgtgaggcatcagacccacactgtcagcccagcaggccgggctgtgtccttcagacccagtgctgccctagactctgactcgggactccagcttgccacgtgccctctcccctcttgaatgtactctggtcttgcagtgtgctgctgggactttcttgctcagccatcactctggtcaccttgtttgctctgggtctggctgaattttctgccctgagatctgggcataaagtggatgaaacttgaaagaccttcagtgtagatccagatggccaacctgtccttgttaagttacttgcttcttgggaatcagtgtcccctgctgagctgaaaaggaaatggattccaatctcttccaacctttaaggtgatagatagtttgagcaagactggagaatggacaacactatgaagctgtggctagaaagggactgtcatgtcccatcctttggccagattgactggggatgtccggacagatgcctgcatgggtggtgagggccacatctgcacacgagccagtggctgcttgcagttcactgctgtgatgccagagtgtgttcaaaggtgactctcctgctcttctggactcttctctcaggcaagaaaggctgcaggctgcctgctatgtgatgcctgagcacaaagccaaggaactgaactaagtctttctgttaagtcctgagtttgtcattggcaggtttacttgtggccagctctctctgcccttgggtgtctgagcaggcagaccagaagaccaggcactggacctgcatgccaaagggactggtcatctcctgaggacctgtacatgaccctgtggactgttccgcacgatccggaacccactttttattcactccccatgtctttggccttcctcttctttctctttccctctgccatcctgacactgatagtttgtcatataaattccccgggttgtgtttttttttctagaaaaaaattaaaagggaaaacaaaaccaaaaaaaccagaaaccacgaataagaatggaaatgacaatggctgcctgtcatttttctgtcacgattttcctgatttggtttgttccctttgtctcagagaagcaggagatgttgatgaggctgtatttttttttctttttcttgtttttgagacaagagtctcgctctgtcacccgggctggagtgtaacgtggcatgatctcagctcactgcaacctctgcctcctgggttcaagcgattatcctgcctcagcctcctgagtagctgggattacaggcatgcgccactatgcccagataatttttttgtatttttagtagagacagggtttcaccatgttggccaggctggtctggaactcctaacctcaggttatccacccaccttggcctcccaaagtgctgggattataggcatgaaccaccgtgcctggccaaagatgtaatttaaaatagttagaagggacttggcatgggccagctccgtgcatggcattttcacccccagagcttcctaatcctgttttcacacaggaagtttctaggtctttctagaacagctagaaatagtagctgactcccgcccaaggcccaaccttcaaaccctgagctcttcaggctgcatcctctggtgagctatagaggagaacgtggctcctaaactctagccatcctgtgggaggaaatagacttctttgggctgtggcttgcagaacaaactacactttttttccctctattgtttaaattttatttaataatttgtgtgtttttctgtctttattttctgtatttcacgtgttccttcactccctagaaactgcactttctttgaaaccataggtaatgaatcttactaggagaggcatggggatagagacagttctgggagtgtgacctgtaagcctcctgtagggcagtgccaggccttgattgcccacgttctctccgttccttcttccttcatacatttgatcacacagcctacacccagccccgagtgtgcatcacggtaaaagagctgagggctctcttcagggagcagcccatttaggtctcttttgttgttgttagggagaatacacatctttcttggaagctgggagtgtgttctcatttcatgtccattcagacaaagcaccattaggcaccatgaaatatacagtgacggacaggaccctgtctgcaaggattttatgtccttagttcaggagatggacttgtccacagaaaggcagagtgaagtggccttgccgcacggacatgttgcgatttcattctggaaacaagttagacctatgtgataatgttagggttcctggagcaagctggatgacccac

SEQ ID NO: 425912 - DNA, 4097 bp, Homo sapiens
gcagaggaggaggaagccggaagtgcatcggccccgggtctgtccgggcgttgcgggattggggcctgggaacgctcggcccccggcagccgagaagcccgtgactgggctgagcagcaccatcccagccctggggcctgctgactgatttctgcatgaatccccagacagtgctgctcctgcgggtcatcgccgccttctgtttcctgggcatcctgtgtagtctctccgctttccttctggatgtctttgggccgaagcatcctgctctgaagatcactcgtcgctatgccttcgcccatatcctaacggttctgcagtgtgccaccgtcattggcttttcttattgggcttctgaactcatcttggcccagcagcagcagcataagaagtaccatggatcccaggtctatgtcaccttcgccgttagcttctacctggtggcaggagctggtggagcctcaatcctggccacggcagccaacctcctgcgccactaccccacagaggaagaggagcaggcgctggagctgctctcagagatggaagagaacgagccctacccggcggaatatgaggtcatcaaccagttccagccaccccctgcttacacaccctaatgccagccctgggctctcttcctcggcagcccctccctcaactctgcagctcctctcgcacccagaggagctcctttccccagcaggcctcactggtaggatcctgaccatcttctccaaaccttccccaggagagactctgcctttagggtcatccaagtatccctgctctcagaaccggaggtccactggttttctataatgtactctttccctcctgccacatcctgcccccttcacattcacgagtcattaccagccagggaaggtcatccaagtttcctccagcatgggcgatatctttgggaccgagactttccttggagagctgctgagagcggacagtcccaaaaacaagtgtcaaagggcccaagggaaaggggactgtgccctggaggctcacttcacagggatcagtgtttgctccacagctgtagctctgggctgacgccccccagaccccttccttctcggagtgacccgcccccaggccacctgctccggggagttctgtgcactttactctttggacttctcctcacgtgtgccctggttttatggggagagggaatcgctgttgggaaggcagagcagttgcaaccctctctgcccttgcttcatgtggctggagcccaggcaaggagagcaggagccagcgtgagactgaggccccctggtgcctatcaaggaccagagtgaaggggactacatctcccagcccttcaccttttaaatatgagtggttttaaaaggaaaaaaatgaaaccaggcaacagcaacaatattctgtttttaaaatagggacaagactgttgtcactttttagacatgtatcccattccttttggctctgcaatatttggggctgtagctccttccaagcccatggtagtccctccccgagtctctcccagtagaatgcagcctcccttccctggccccttccctctcagtgacggtgactccctggggccttctcgtggaacccagaggggctgaggactgtggcctggctggcgggccagcgtggtgctcctcaggactgcagcactgagatggaacctggcctcagtttaggaacaggggccacaacagggcaggaacccaccaccctccacataggaatacaaccagtggggccacatcatgtgaggcatcagacccacactgtcagcccagcaggccgggctgtgtccttcagacccagtgctgccctagactctgactcgggactccagcttgccacgtgccctctcccctcttgaatgtactctggtcttgcagtgtgctgctgggactttcttgctcagccatcactctggtcaccttgtttgctctgggtctggctgaattttctgccctgagatctgggcataaagtggatgaaacttgaaagaccttcagtgtagatccagatggccaacctgtccttgttaagttacttgcttcttgggaatcagtgtcccctgctgagctgaaaaggaaatggattccaatctcttccaacctttaaggtgatagatagtttgagcaagactggagaatggacaacactatgaagctgtggctagaaagggactgtcatgtcccatcctttggccagattgactggggatgtccggacagatgcctgcatgggtggtgagggccacatctgcacacgagccagtggctgcttgcagttcactgctgtgatgccagagtgtgttcaaaggtgactctcctgctcttctggactcttctctcaggcaagaaaggctgcaggctgcctgctatgtgatgcctgagcacaaagccaaggaactgaactaagtctttctgttaagtcctgagtttgtcattggcaggtttacttgtggccagctctctctgcccttgggtgtctgagcaggcagaccagaagaccaggcactggacctgcatgccaaagggactggtcatctcctgaggacctgtacatgaccctgtggactgttccgcacgatccggaacccactttttattcactccccatgtctttggccttcctcttctttctctttccctctgccatcctgacactgatagtttgtcatataaattccccgggttgtgtttttttttctagaaaaaaattaaaagggaaaacaaaaccaaaaaaaccagaaaccacgaataagaatggaaatgacaatggctgcctgtcatttttctgtcacgattttcctgatttggtttgttccctttgtctcagagaagcaggagatgttgatgaggctgtatttttttttctttttcttgtttttgagacaagagtctcgctctgtcacccgggctggagtgtaacgtggcatgatctcagctcactgcaacctctgcctcctgggttcaagcgattatcctgcctcagcctcctgagtagctgggattacaggcatgcgccactatgcccagataatttttttgtatttttagtagagacagggtttcaccatgttggccaggctggtctggaactcctaacctcaggttatccacccaccttggcctcccaaagtgctgggattataggcatgaaccaccgtgcctggccaaagatgtaatttaaaatagttagaagggacttggcatgggccagctccgtgcatggcattttcacccccagagcttcctaatcctgttttcacacaggaagtttctaggtctttctagaacagctagaaatagtagctgactcccgcccaaggcccaaccttcaaaccctgagctcttcaggctgcatcctctggtgagctatagaggagaacgtggctcctaaactctagccatcctgtgggaggaaatagacttctttgggctgtggcttgcagaacaaactacactttttttccctctattgtttaaattttatttaataatttgtgtgtttttctgtctttattttctgtatttcacgtgttccttcactccctagaaactgcactttctttgaaaccataggtaatgaatcttactaggagaggcatggggatagagacagttctgggagtgtgacctgtaagcctcctgtagggcagtgccaggccttgattgcccacgttctctccgttccttcttccttcatacatttgatcacacagcctacacccagccccgagtgtgcatcacggtaaaagagctgagggctctcttcagggagcagcccatttaggtctcttttgttgttgttagggagaatacacatctttcttggaagctgggagtgtgttctcatttcatgtccattcagacaaagcaccattaggcaccatgaaatatacagtgacggacaggaccctgtctgcaaggattttatgtccttagttcaggagatggacttgtccacagaaaggcagagtgaagtggccttgccgcacggacatgttgcgatttcattctggaaacaagttagacctatgtgataatgttagggttcctggagcaagctggatgacccac

SEQ ID NO: 425913 - DNA, 4220 bp, Homo sapiens
gcagaggaggaggaagccggaagtgcatcggccccgggtctgtccgggcgttgcgggattggggcctgggaacgctcggcccccggcagccgagaagcccgtgactgggctgagcagcaccatcccagccctggggcctgctgactgcgaacccggagcgttgctatcctccaccggactgtcaggctctgcgcgccccgcggaggtcggcggcgaccagcagcgactgcggagcgacggcgggcggccccgggcatgtacgcccccggaggcgcagggctgcccggcgggcgccggcggaggagcccgggaggcagcgctctgcccaagcagccggagcgtagcctggcctcggccctgcctggcgccctgtctatcacggcgctgtgcactgccctcgccgagcccgcctggttgcacatccacggaggcacctgttcgcgccaggagctgggggtctccgacgtgttgggctatgtgcacccggacctgctgaaagatttctgcatgaatccccagacagtgctgctcctgcgggtcatcgccgccttctgtttcctgggcatcctgtgtagtctctccgctttccttctggatgtctttgggccgaagcatcctgctctgaagatcactcgtcgctatgccttcgcccatatcctaacggttctgcagtgtgccaccgtcattggcttttcttattgggcttctgaactcatcttggcccagcagcagcagcataagaagtaccatggatcccaggtctatgtcaccttcgccgttagcttctacctggtggcaggagctggtggagcctcaatcctggccacggcagccaacctcctgcgccactaccccacagaggaagaggagcaggcgctggagctgctctcagagatggaagagaacgagccctacccggcggaatatgaggtcatcaaccagttccagccaccccctgcttacacaccctaatgccagccctgggctctcttcctcggcagcccctccctcaactctgcagctcctctcgcacccagaggagctcctttccccagcaggcctcactggtaggatcctgaccatcttctccaaaccttccccaggagagactctgcctttagggtcatccaagtatccctgctctcagaaccggaggtccactggttttctataatgtactctttccctcctgccacatcctgcccccttcacattcacgagtcattaccagccagggaaggtcatccaagtttcctccagcatgggcgatatctttgggaccgagactttccttggagagctgctgagagcggacagtcccaaaaacaagtgtcaaagggcccaagggaaaggggactgtgccctggaggctcacttcacagggatcagtgtttgctccacagctgtagctctgggctgacgccccccagaccccttccttctcggagtgacccgcccccaggccacctgctccggggagttctgtgcactttactctttggacttctcctcacgtgtgccctggttttatggggagagggaatcgctgttgggaaggcagagcagttgcaaccctctctgcccttgcttcatgtggctggagcccaggcaaggagagcaggagccagcgtgagactgaggccccctggtgcctatcaaggaccagagtgaaggggactacatctcccagcccttcaccttttaaatatgagtggttttaaaaggaaaaaaatgaaaccaggcaacagcaacaatattctgtttttaaaatagggacaagactgttgtcactttttagacatgtatcccattccttttggctctgcaatatttggggctgtagctccttccaagcccatggtagtccctccccgagtctctcccagtagaatgcagcctcccttccctggccccttccctctcagtgacggtgactccctggggccttctcgtggaacccagaggggctgaggactgtggcctggctggcgggccagcgtggtgctcctcaggactgcagcactgagatggaacctggcctcagtttaggaacaggggccacaacagggcaggaacccaccaccctccacataggaatacaaccagtggggccacatcatgtgaggcatcagacccacactgtcagcccagcaggccgggctgtgtccttcagacccagtgctgccctagactctgactcgggactccagcttgccacgtgccctctcccctcttgaatgtactctggtcttgcagtgtgctgctgggactttcttgctcagccatcactctggtcaccttgtttgctctgggtctggctgaattttctgccctgagatctgggcataaagtggatgaaacttgaaagaccttcagtgtagatccagatggccaacctgtccttgttaagttacttgcttcttgggaatcagtgtcccctgctgagctgaaaaggaaatggattccaatctcttccaacctttaaggtgatagatagtttgagcaagactggagaatggacaacactatgaagctgtggctagaaagggactgtcatgtcccatcctttggccagattgactggggatgtccggacagatgcctgcatgggtggtgagggccacatctgcacacgagccagtggctgcttgcagttcactgctgtgatgccagagtgtgttcaaaggtgactctcctgctcttctggactcttctctcaggcaagaaaggctgcaggctgcctgctatgtgatgcctgagcacaaagccaaggaactgaactaagtctttctgttaagtcctgagtttgtcattggcaggtttacttgtggccagctctctctgcccttgggtgtctgagcaggcagaccagaagaccaggcactggacctgcatgccaaagggactggtcatctcctgaggacctgtacatgaccctgtggactgttccgcacgatccggaacccactttttattcactccccatgtctttggccttcctcttctttctctttccctctgccatcctgacactgatagtttgtcatataaattccccgggttgtgtttttttttctagaaaaaaattaaaagggaaaacaaaaccaaaaaaaccagaaaccacgaataagaatggaaatgacaatggctgcctgtcatttttctgtcacgattttcctgatttggtttgttccctttgtctcagagaagcaggagatgttgatgaggctgtatttttttttctttttcttgtttttgagacaagagtctcgctctgtcacccgggctggagtgtaacgtggcatgatctcagctcactgcaacctctgcctcctgggttcaagcgattatcctgcctcagcctcctgagtagctgggattacaggcatgcgccactatgcccagataatttttttgtatttttagtagagacagggtttcaccatgttggccaggctggtctggaactcctaacctcaggttatccacccaccttggcctcccaaagtgctgggattataggcatgaaccaccgtgcctggccaaagatgtaatttaaaatagttagaagggacttggcatgggccagctccgtgcatggcattttcacccccagagcttcctaatcctgttttcacacaggaagtttctaggtctttctagaacagctagaaatagtagctgactcccgcccaaggcccaaccttcaaaccctgagctcttcaggctgcatcctctggtgagctatagaggagaacgtggctcctaaactctagccatcctgtgggaggaaatagacttctttgggctgtggcttgcagaacaaactacactttttttccctctattgtttaaattttatttaataatttgtgtgtttttctgtctttattttctgtatttcacgtgttccttcactccctagaaactgcactttctttgaaaccataggtaatgaatcttactaggagaggcatggggatagagacagttctgggagtgtgacctgtaagcctcctgtagggcagtgccaggccttgattgcccacgttctctccgttccttcttccttcatacatttgatcacacagcctacacccagccccgagtgtgcatcacggtaaaagagctgagggctctcttcagggagcagcccatttaggtctcttttgttgttgttagggagaatacacatacagtaaggatccgtagatcacctc

SEQ ID NO: 425914 - DNA, 3542 bp, Homo sapiens
gcagaggaggaggaagccggaagtgcatcggccccgggtctgtccgggcgttgcgggattggggcctgggaacgctcggcccccggcagccgagaagcccgtgactgggctgagcagcaccatcccagccctggggcctgctgactgcgaacccggagcgttgctatcctccaccggactgtcaggctctgcgcgccccgcggaggtcggcggcgaccagcagcgactgcggagcgacggcgggcggccccgggcatgtacgcccccggaggcgcagggctgcccggcgggcgccggcggaggagcccgggaggcagcgctctgcccaagcagccggagcgtagcctggcctcggccctgcctggcgccctgtctatcacggcgctgtgcactgccctcgccgagcccgcctggttgcacatccacggaggcacctgttcgcgccaggagctgggggtctccgacgtgttgggctatgtgcacccggacctgctgaaagatttctgcatgaatccccagacagtgctgctcctgcgggtcatcgccgccttctgtttcctgggcatcctgtgtagtctctccgctttccttctggatgtctttgggccgaagcatcctgctctgaagatcactcgtcgctatgccttcgcccatatcctaacggttctgcagtgtgccaccgtcattggcttttcttattgggcttctgaactcatcttggcccagcagcagcagcataagaagtaccatggatcccaggtctatgtcaccttcgccgttagcttctacctggtggcaggagctggtggagcctcaatcctggccacggcagccaacctcctgcgccactaccccacagaggaagaggagcaggcgctggagctgctctcagagatggaagagaacgagccctacccggcggaatatgaggtcatcaaccagttccagccaccccctgcttacacaccctaatgccagccctgggctctcttcctcggcagcccctccctcaactctgcagctcctctcgcacccagaggagctcctttccccagcaggcctcactggtaggatcctgaccatcttctccaaaccttccccaggagagactctgcctttagggtcatccaagtatccctgctctcagaaccggaggtccactggttttctataatgtactctttccctcctgccacatcctgcccccttcacattcacgagtcattaccagccagggaaggtcatccaagtttcctccagcatgggcgatatctttgggaccgagactttccttggagagctgctgagagcggacagtcccaaaaacaagtgtcaaagggcccaagggaaaggggactgtgccctggaggctcacttcacagggatcagtgtttgctccacagctgtagctctgggctgacgccccccagaccccttccttctcggagtgacccgcccccaggccacctgctccggggagttctgtgcactttactctttggacttctcctcacgtgtgccctggttttatggggagagggaatcgctgttgggaaggcagagcagttgcaaccctctctgcccttgcttcatgtggctggagcccaggcaaggagagcaggagccagcgtgagactgaggccccctggtgcctatcaaggaccagagtgaaggggactacatctcccagcccttcaccttttaaatatgagtggttttaaaaggaaaaaaatgaaaccaggcaacagcaacaatattctgtttttaaaatagggacaagactgttgtcactttttagacatgtatcccattccttttggctctgcaatatttggggctgtagctccttccaagcccatggtagtccctccccgagtctctcccagtagaatgcagcctcccttccctggccccttccctctcagtgacggtgactccctggggccttctcgtggaacccagaggggctgaggactgtggcctggctggcgggccagcgtggtgctcctcaggactgcagcactgagatggaacctggcctcagtttaggaacaggggccacaacagggcaggaacccaccaccctccacataggaatacaaccagtggggccacatcatgtgaggcatcagacccacactgtcagcccagcaggccgggctgtgtccttcagacccagtgctgccctagactctgactcgggactccagcttgccacgtgccctctcccctcttgaatgtactctggtcttgcagtgtgctgctgggactttcttgctcagccatcactctggtcaccttgtttgctctgggtctggctgaattttctgccctgagatctgggcataaagtggatgaaacttgaaagaccttcagtgtagatccagatggccaacctgtccttgttaagttacttgcttcttgggaatcagtgtcccctgctgagctgaaaaggaaatggattccaatctcttccaacctttaaggtgatagatagtttgagcaagactggagaatggacaacactatgaagctgtggctagaaagggactgtcatgtcccatcctttggccagattgactggggatgtccggacagatgcctgcatgggtggtgagggccacatctgcacacgagccagtggctgcttgcagttcactgctgtgatgccagagtgtgttcaaaggtgactctcctgctcttctggactcttctctcaggcaagaaaggctgcaggctgcctgctatgtgatgcctgagcacaaagccaaggaactgaactaagtctttctgttaagtcctgagtttgtcattggcaggtttacttgtggccagctctctctgcccttgggtgtctgagcaggcagaccagaagaccaggcactggacctgcatgccaaagggactggtcatctcctgaggacctgtacatgaccctgtggactgttccgcacgatccggaacccactttttattcactccccatgtctttggccttcctcttctttctctttccctctgccatcctgacactgatagtttgtcatataaattccccgggttgtgtttttttttctagaaaaaaattaaaagggaaaacaaaaccaaaaaaaccagaaaccacgaataagaatggaaatgacaatggctgcctgtcatttttctgtcacgattttcctgatttggtttgttccctttgtctcagagaagcaggagatgttgatgagggctctcttcagggagcagcccatttaggtctcttttgttgttgttagggagaatacacatctttcttggaagctgggagtgtgttctcatttcatgtccattcagacaaagcaccattaggcaccatgaaatatacagtgacggacaggaccctgtctgcaaggattttatgtccttagttcaggagatggacttgtccacagaaaggcagagtgaagtggccttgccgcacggacatgttgcgatttcattctggaaacaagttagacctatgtgataatgttagggttcctggagcaagctggatgacccac

SEQ ID NO: 425915 - DNA, 4408 bp, Homo sapiens
gcagaggaggaggaagccggaagtgcatcggccccgggtctgtccgggcgttgcgggattggggcctgggaacgctcggcccccggcagccgagaagcccgtgactgggctgagcagcaccatcccagccctggggcctgctgactgcgaacccggagcgttgctatcctccaccggactgtcaggctctgcgcgccccgcggaggtcggcggcgaccagcagcgactgcggagcgacggcgggcggccccgggcatgtacgcccccggaggcgcagggctgcccggcgggcgccggcggaggagcccgggaggcagcgctctgcccaagcagccggagcgtagcctggcctcggccctgcctggcgccctgtctatcacggcgctgtgcactgccctcgccgagcccgcctggttgcacatccacggaggcacctgttcgcgccaggagctgggggtctccgacgtgttgggctatgtgcacccggacctgctgaaagatttctgcatgaatccccagacagtgctgctcctgcgggtcatcgccgccttctgtttcctgggcatcctgtgtagtctctccgctttccttctggatgtctttgggccgaagcatcctgctctgaagatcactcgtcgctatgccttcgcccatatcctaacggttctgcagtgtgccaccgtcattggcttttcttattgggcttctgaactcatcttggcccagcagcagcagcataagaagtaccatggatcccaggtctatgtcaccttcgccgttagcttctacctggtggcaggagctggtggagcctcaatcctggccacggcagccaacctcctgcgccactaccccacagaggaagaggagcaggcgctggagctgctctcagagatggaagagaacgagccctacccggcggaatatgaggtcatcaaccagttccagccaccccctgcttacacaccctaatgccagccctgggctctcttcctcggcagcccctccctcaactctgcagctcctctcgcacccagaggagctcctttccccagcaggcctcactggtaggatcctgaccatcttctccaaaccttccccaggagagactctgcctttagggtcatccaagtatccctgctctcagaaccggaggtccactggttttctataatgtactctttccctcctgccacatcctgcccccttcacattcacgagtcattaccagccagggaaggtcatccaagtttcctccagcatgggcgatatctttgggaccgagactttccttggagagctgctgagagcggacagtcccaaaaacaagtgtcaaagggcccaagggaaaggggactgtgccctggaggctcacttcacagggatcagtgtttgctccacagctgtagctctgggctgacgccccccagaccccttccttctcggagtgacccgcccccaggccacctgctccggggagttctgtgcactttactctttggacttctcctcacgtgtgccctggttttatggggagagggaatcgctgttgggaaggcagagcagttgcaaccctctctgcccttgcttcatgtggctggagcccaggcaaggagagcaggagccagcgtgagactgaggccccctggtgcctatcaaggaccagagtgaaggggactacatctcccagcccttcaccttttaaatatgagtggttttaaaaggaaaaaaatgaaaccaggcaacagcaacaatattctgtttttaaaatagggacaagactgttgtcactttttagacatgtatcccattccttttggctctgcaatatttggggctgtagctccttccaagcccatggtagtccctccccgagtctctcccagtagaatgcagcctcccttccctggccccttccctctcagtgacggtgactccctggggccttctcgtggaacccagaggggctgaggactgtggcctggctggcgggccagcgtggtgctcctcaggactgcagcactgagatggaacctggcctcagtttaggaacaggggccacaacagggcaggaacccaccaccctccacataggaatacaaccagtggggccacatcatgtgaggcatcagacccagtgctgccctagactctgactcgggactccagcttgccacgtgccctctcccctcttgaatgtactctggtcttgcagtgtgctgctgggactttcttgctcagccatcactctggtcaccttgtttgctctgggtctggctgaattttctgccctgagatctgggcataaagtggatgaaacttgaaagaccttcagtgtagatccagatggccaacctgtccttgttaagttacttgcttcttgggaatcagtgtcccctgctgagctgaaaaggaaatggattccaatctcttccaacctttaaggtgatagatagtttgagcaagactggagaatggacaacactatgaagctgtggctagaaagggactgtcatgtcccatcctttggccagattgactggggatgtccggacagatgcctgcatgggtggtgagggccacatctgcacacgagccagtggctgcttgcagttcactgctgtgatgccagagtgtgttcaaaggtgactctcctgctcttctggactcttctctcaggcaagaaaggctgcaggctgcctgctatgtgatgcctgagcacaaagccaaggaactgaactaagtctttctgttaagtcctgagtttgtcattggcaggtttacttgtggccagctctctctgcccttgggtgtctgagcaggcagaccagaagaccaggcactggacctgcatgccaaagggactggtcatctcctgaggacctgtacatgaccctgtggactgttccgcacgatccggaacccactttttattcactccccatgtctttggccttcctcttctttctctttccctctgccatcctgacactgatagtttgtcatataaattccccgggttgtgtttttttttctagaaaaaaattaaaagggaaaacaaaaccaaaaaaaccagaaaccacgaataagaatggaaatgacaatggctgcctgtcatttttctgtcacgattttcctgatttggtttgttccctttgtctcagagaagcaggagatgttgatgaggctgtatttttttttctttttcttgtttttgagacaagagtctcgctctgtcacccgggctggagtgtaacgtggcatgatctcagctcactgcaacctctgcctcctgggttcaagcgattatcctgcctcagcctcctgagtagctgggattacaggcatgcgccactatgcccagataatttttttgtatttttagtagagacagggtttcaccatgttggccaggctggtctggaactcctaacctcaggttatccacccaccttggcctcccaaagtgctgggattataggcatgaaccaccgtgcctggccaaagatgtaatttaaaatagttagaagggacttggcatgggccagctccgtgcatggcattttcacccccagagcttcctaatcctgttttcacacaggaagtttctaggtctttctagaacagctagaaatagtagctgactcccgcccaaggcccaaccttcaaaccctgagctcttcaggctgcatcctctggtgagctatagaggagaacgtggctcctaaactctagccatcctgtgggaggaaatagacttctttgggctgtggcttgcagaacaaactacactttttttccctctattgtttaaattttatttaataatttgtgtgtttttctgtctttattttctgtatttcacgtgttccttcactccctagaaactgcactttctttgaaaccataggtaatgaatcttactaggagaggcatggggatagagacagttctgggagtgtgacctgtaagcctcctgtagggcagtgccaggccttgattgcccacgttctctccgttccttcttccttcatacatttgatcacacagcctacacccagccccgagtgtgcatcacggtaaaagagctgagggctctcttcagggagcagcccatttaggtctcttttgttgttgttagggagaatacacatctttcttggaagctgggagtgtgttctcatttcatgtccattcagacaaagcaccattaggcaccatgaaatatacagtgacggacaggaccctgtctgcaaggattttatgtccttagttcaggagatggacttgtccacagaaaggcagagtgaagtggccttgccgcacggacatgttgcgatttcattctggaaacaagttagacctatgtgataatgttagggttcctggagcaagctggatgacccac

SEQ ID NO: 425916 - DNA, 1528 bp, Homo sapiens
gcagaggaggaggaagccggaagtgcatcggccccgggtctgtccgggcgttgcgggattggggcctgggaacgctcggcccccggcagccgagaagcccgtgactgggctgagcagcaccatcccagccctggggcctgctgactgcgaacccggagcgttgctatcctccaccggactgtcaggctctgcgcgccccgcggaggtcggcggcgaccagcagcgactgcggagcgacggcgggcggccccgggcatgtacgcccccggaggcgcagggctgcccggcgggcgccggcggaggagcccgggaggcagcgctctgcccaagcagccggagcgtagcctggcctcggccctgcctggcgccctgtctatcacggcgctgtgcactgccctcgccgagcccgcctggttgcacatccacggaggcacctgttcgcgccaggagctgggggtctccgacgtgttgggctatgtgcacccggacctgctgaaagatttctgcatgaatccccagacagtgctgctcctgcgggtcatcgccgccttctgtttcctgggcatcctgtgtagtctctccgctttccttctggatgtctttgggccgaagcatcctgctctgaagatcactcgtcgctatgccttcgcccatatcctaacggttctgcagtgtgccaccgtcattggcttttcttattgggcttctgaactcatcttggcccagcagcagcagcataagaagtaccatggatcccaggtctatgtcaccttcgccgttagcttctacctggtggcaggagctggtggagcctcaatcctggccacggcagccaacctcctgcgccactaccccacagaggaagaggagcaggcgctggagctgctctcagagatggaagagaacgagccctacccggcggaatatgaggtcatcaaccagttccagccaccccctgcttacacaccctaatgccagccctgggctctcttcctcggcagcccctccctcaactctgcagctcctctcgcacccagaggagctcctttccccagcaggcctcactggtaggatcctgaccatcttctccaaaccttccccaggagagactctgcctttagggtcatccaagtatccctgctctcagaaccggaggtccactggttttctataatgtactctttccctcctgccacatcctgcccccttcacattcacgagtcattaccagccagggaaggtcatccaagtttcctccagcatgggcgatatctttgggaccgagactttccttggagagctgctgagagcggacagtcccaaaaacaagtgtcaaagggcccaagggaaaggggactgtgccctggaggctcacttcacagggatcagtgtttgctccacagctgtagctctgggctgacgccccccagaccccttccttctcggagtgacccgcccccaggccacctgttaaagggtgttatgagctgttcactcattgcgtatttatggtcgtgtgtgttttctg

SEQ ID NO: 425917 - DNA, 1532 bp, Homo sapiens
ctccaggcgggaggcgacgcctgcgcagtgcggtcgcggggctgtcgttgtcccgcgagccgccgaccaggcctcgaacgggatggcagaggaggtgaggagggaggaagcgtccggagtggggcgggcccggactccgacccccggggcgcttcgagccccccagctggtcaccgaggcaccgccgcttcacccaggccagtagccgccccctcgcgcaccccggccccgcctcacacgcgcgcccgagcgagccccgggctcccctcgggcccagcgtggcgcaggggtcagtggttctctcgggtctcgggacaggtgagcaccctgatgaaggccacggtcctgatgcggcagcctgggcgggtgcaggagatcgtgggcgccctccgcaagggcggcggagaccggttacaggtgatttctgattttgacatgaccttgagcaggtttgcatataatggaaagcgatgcccttcttcttacaatattctggataatagcaagatcatcagtgaggagtgtcggaaagagctcacagcgctccttcaccactattacccaattgagatcgacccacaccggaccgtcaaggagaagctacctcatatggtggaatggtggaccaaagcgcacaatctcctatgtcagcagaagattcagaagtttcagatagcccaggtggttagagagtccaatgcaatgctcagggagggatataagaccttcttcaacacactctaccataacaacattccccttttcatcttttctgcgggcattggtgatatcctggaagaaattatccgacagatgaaagtgttccaccccaacatccacatcgtgtctaactacatggattttaatgaagatggttttctccagggatttaagggccagctgatacacacatacaacaagaacagctctgtgtgtgagaactgtggttacttccagcaacttgagggcaaaaccaatgtcatcctgctgggagactctatcggggacctcaccatggccgatggggttcctggtgtgcagaacattctcaaaattggcttcctgaatgacaaggtggaggagcggcgggagcgctacatggactcctatgacatcgtgctggagaaggacgagactctggatgtggtcaacgggctactgcagcacatcctgtgccagggggtccagctggagatgcaaggcccctgaaggcgcaggctccagcccggcctgcaggccgtggtgaggaggggcgcctccccagagtctgctcccccgtgaacacagagcagaggccagggtggccagcagtggctgggtccttccgcgcccctccgtcctcctttccctgagcaccttcatcaccagaggcttgaaggaaccccgccatgtggcagggcacaggcactgttcctggtgaaccttggaccacagcatgtcagtgctctagggattgtctactccagggattttcttcaaaatttttaaacatgggaagttcaaacaaatataatgtgtgaaacagatcaaaa

SEQ ID NO: 425918 - DNA, 2154 bp, Homo sapiens
  misc_feature (1584)..(1584): n is a, c, g, or t
  misc_feature (2151)..(2151): n is a, c, g, or t
ctccaggcgggaggcgacgcctgcgcagtgcggtcgcggggctgtcgttgtcccgcgagccgccgaccaggcctcgaacgggatggcagaggaggtgaggagggaggaagcgtccggagtggggcgggcccggactccgacccccggggcgcttcgagccccccagctggtcaccgaggcaccgccgcttcacccaggccagtagccgccccctcgcgcaccccggccccgcctcacacgcgcgcccgagcgagccccgggctcccctcgggcccagcgtggcgcaggggtcagtggttctctcgggtctcgggacaggtgagcaccctgatgaaggccacggtcctgatgcggcagcctgggcgggtgcaggagatcgtgggcgccctccgcaagggcggcggagaccggttacaggtgatttctgattttgacatgaccttgagcaggtttgcatataatggaaagcgatgcccttcttcttacaatattctggataatagcaagatcatcagtgaggagtgtcggaaagagctcacagcgctccttcaccactattacccaattgagatcgacccacaccggaccgtcaaggagaagctacctcatatggtggaatggtggaccaaagcgcacaatctcctatgtcagcagaagattcagaagtttcagatagcccaggtggttagagagtccaatgcaatgctcagggagggatataagaccttcttcaacacactctaccataacaacattccccttttcatcttttctgcgggcattggtgatatcctggaagaaattatccgacagatgaaagtgttccaccccaacatccacatcgtgtctaactacatggattttaatgaagatggttttctccagggatttaagggccagctgatacacacatacaacaagaacagctctgtgtgtgagaactgtggttacttccagcaacttgagggcaaaaccaatgtcatcctgctgggagactctatcggggacctcaccatggccgatggggttcctggtgtgcagaacattctcaaaattggcttcctgaatgacaaggtggaggagcggcgggagcgctacatggactcctatgacatcgtgctggagaaggacgagactctggatgtggtcaacgggctactgcagcacatcctgtgccagggggtccagctggagatgcaaggcccctgaaggcgcaggctccagcccggcctgcaggccgtggtgaggaggggcgcctccccagagtctgctcccccgtgaacacagagcagaggccagggtggccagcagtggctgggtccttccgcgcccctccgtcctcctttccctgagcaccttcatcaccagaggcttgaaggaaccccgccatgtggcagggcacaggcactgttcctggtgaaccttggaccacagcatgtcagtgctctagggattgtctactccagggattttcttcaaaatttttaaacatgggaagttcaaacaaatataatgtgtgaaacagatcaaaatttttaaaatgaaaaaaaaaaaaaaaacaaaaaaaaaaaaaaaaaaaaaaanaaaaacaaaacaaataataaagaagaaaaaaaaaaataagaaaaaaaacaaagaggaggggcgcgcgcgcgcaacaatgagtagttccccccggggagggccaccaatcagcatcatccccgccgctttttgttgtatcaagaagggggcccccaagaagaggacgagcgcaaataaacaacaaagcagacgcgcagcgggggacagagctattaacaaaaaagcacgccgaggaagggagaaacaaacaggggtccagacaggggagaaataatctgtgagaagagaacaccctccatccttcggggggggaggaagcatcacaaggtggggcaacaaaccacaccccataaaggaagaatgtataaagaagacatctagcgtgggaggagattataacaaaaacatatacgagcgggtatgtataataggggagtaaaaccacagaagcgccgatatatatgtgcgccgcgagatgcataaaagtatttggacgaaaagagacaatataatgtatataaaacaaaatattatttaaacagggggggcggtcagatataataaggntgc

SEQ ID NO: 425919 - DNA, 1702 bp, Homo sapiens
  misc_feature (1565)..(1565): n is a, c, g, or t
ctccaggcgggaggcgacgcctgcgcagtgcggtcgcggggctgtcgttgtcccgcgagccgccgaccaggcctcgaacgggatggcagaggaggtgaggagggaggaagcgtccggagtggggcgggcccggactccgacccccggggcgcttcgagccccccagctggtcaccgaggcaccgccgcttcacccaggccagtagccgccccctcgcgcaccccggccccgcctcacacgcgcgcccgagcgagccccgggctcccctcgggcccagcgtggcgcaggggtcagtggttctctcgggtctcgggacaggtgagcaccctgatgaaggccacggtcctgatgcggcagcctgggcgggtgcaggagatcgtgggcgccctccgcaagggcggcggagaccggttacaggtgatttctgattttgacatgaccttgagcaggtttgcatataatggaaagcgatgcccttcttcttacaatattctggataatagcaagatcatcagtgaggagtgtcggaaagagctcacagcgctccttcaccactattacccaattgagatcgacccacaccggaccgtcaaggagaagctacctcatatggtggaatggtggaccaaagcgcacaatctcctatgtcagcagaagattcagaagtttcagatagcccaggtggttagagagtccaatgcaatgctcagggagggatataagaccttcttcaacacactctaccataacaacattccccttttcatcttttctgcgggcattggtgatatcctggaagaaattatccgacagatgaaagtgttccaccccaacatccacatcgtgtctaactacatggattttaatgaagatggttttctccagggatttaagggccagctgatacacacatacaacaagaacagctctgtgtgtgagaactgtggttacttccagcaacttgagggcaaaaccaatgtcatcctgctgggagactctatcggggacctcaccatggccgatggggttcctggtgtgcagaacattctcaaaattggcttcctgaatgacaaggtggaggagcggcgggagcgctacatggactcctatgacatcgtgctggagaaggacgagactctggatgtggtcaacgggctactgcagcacatcctgtgccagggggtccagctggagatgcaaggcccctgaaggcgcaggctccagcccggcctgcaggccgtggtgaggaggggcgcctccccagagtctgctcccccgtgaacacagagcagaggccagggtggccagcagtggctgggtccttccgcgcccctccgtcctcctttccctgagcaccttcatcaccagaggcttgaaggaaccccgccatgtggcagggcacaggcactgttcctggtgaaccttggaccacagcatgtcagtgctctagggattgtctactccagggattttcttcaaaatttttaaacatgggaagttcaaacaaatataatgtgtgaaacagatcaaaaaaaaaaaacaaaaaaaaaaaaaaaaaaaaaaanaaaaaaacgtggggggctttcttttgtggggggggggaaaaaggggggttttgaaggggccctggtggccccatctggtgtttctcctggcccccttttttttgttcacagggggggaaattctgggggggtcccct

SEQ ID NO: 425920 - DNA, 1926 bp, Homo sapiens
ctccaggcgggaggcgacgcctgcgcagtgcggtcgcggggctgtcgttgtcccgcgagccgccgaccaggcctcgaacgggatggcagaggaggtgaggagggaggaagcgtccggagtggggcgggcccggactccgacccccggggcgcttcgagccccccagctggtcaccgaggcaccgccgcttcacccaggccagtagccgccccctcgcgcaccccggccccgcctcacacgcgcgcccgagcgagccccgggctcccctcgggcccagcgtggcgcaggggtcagtggttctctcgggtctcgggacaggtgagcaccctgatgaaggccacggtcctgatgcggcagcctgggcgggtgcaggagatcgtgggcgccctccgcaagggcggcggagaccggttacaggtgatttctgattttgacatgaccttgagcaggtttgcatataatggaaagcgatgcccttcttcttacaatattctggataatagcaagatcatcagtgaggagtgtcggaaagagctcacagcgctccttcaccactattacccaattgagatcgacccacaccggaccgtcaaggagaagctacctcatatggtggaatggtggaccaaagcgcacaatctcctatgtcagcagaagattcagaagtttcagatagcccaggtggttagagagtccaatgcaatgctcagggagggatataagaccttcttcaacacactctaccataacaacattccccttttcatcttttctgcgggcattggtgatatcctggaagaaattatccgacagatgaaagtgttccaccccaacatccacatcgtgtctaactacatggattttaatgaagatggttttctccagggatttaagggccagctgatacacacatacaacaagaacagctctgtgtgtgagaactgtggttacttccagcaacttgagggcaaaaccaatgtcatcctgctgggagactctatcggggacctcaccatggccgatggggttcctggtgtgcagaacattctcaaaattggcttcctgaatgacaaggtggaggagcggcgggagcgctacatggactcctatgacatcgtgctggagaaggacgagactctggatgtggtcaacgggctactgcagcacatcctgtgccagggggtccagctggagatgcaaggcccctgaaggcgcaggctccagcccggcctgcaggccgtggtgaggaggggcgcctccccagagtctgctcccccgtgaacacagagcagaggccagggtggccagcagtggctgggtccttccgcgcccctccgtcctcctttccctgagcaccttcatcaccagaggcttgaaggaaccccgccatgtggcagggcacaggcactgttcctggtgaaccttggaccacagcatgtcagtgctctagggattgtctactctggttccaaatacctatgttcttttgataaaaacgtaatgcttcgtattatttacacatatacaggtttggccaaataagttgaagattagcttttccctcttgagtcagaggaacactaataactctattctgcagtatacttctatgggccttgagataggcatttctgaaagtatgttgtcccactgagatactatgtttacacatcaggccaggcacaagtgggctcattcctgtaaatacctagcacttttgggaagccaaggtgggaggaaccagttgagtccaggaagttctgaagacccgcctgatcacagtaaaggtgacccctgtggctaaaaaaaaaaaaaagaactagccggtgtggccaagtgccggatctaagaacaagaggagtaaggggaagaaccgaaactgggggggcagtcacaaaaaagggcagagacagcttgttgagaaac

SEQ ID NO: 425921 - DNA, 1348 bp, Homo sapiens
cgaataatggataggtagcgaggcctgggaggtgaggagggaggaagcgtccggagtggggcgggcccggactccgacccccggggcgcttcgagccccccagctggtcaccgaggcaccgccgcttcacccaggtgagcaccctgatgaaggccacggtcctgatgcggcagcctgggcgggtgcaggagatcgtgggcgccctccgcaagggcggcggagaccggttacaggtgatttctgattttgacatgaccttgagcaggtttgcatataatggaaagcgatgcccttcttcttacaatattctggataatagcaagatcatcagtgaggagtgtcggaaagagctcacagcgctccttcaccactattacccaattgagatcgacccacaccggaccgtcaaggagaagctacctcatatggtggaatggtggaccaaagcgcacaatctcctatgtcagcagaagattcagaagtttcagatagcccaggtggttagagagtccaatgcaatgctcagggagggatataagaccttcttcaacacactctaccataacaacattccccttttcatcttttctgcgggcattggtgatatcctggaagaaattatccgacagatgaaagtgttccaccccaacatccacatcgtgtctaactacatggattttaatgaagatggttttctccagggatttaagggccagctgatacacacatacaacaagaacagctctgtgtgtgagaactgtggttacttccagcaacttgagggcaaaaccaatgtcatcctgctgggagactctatcggggacctcaccatggccgatggggttcctggtgtgcagaacattctcaaaattggcttcctgaatgacaaggtggaggagcggcgggagcgctacatggactcctatgacatcgtgctggagaaggacgagactctggatgtggtcaacgggctactgcagcacatcctgtgccagggggtccagctggagatgcaaggcccctgaaggcgcaggctccagcccggcctgcaggccgtggtgaggaggggcgcctccccagagtctgctcccccgtgaacacagagcagaggccagggtggccagcagtggctgggtccttccgcgcccctccgtcctcctttccctgagcaccttcatcaccagaggcttgaaggaaccccgccatgtggcagggcacaggcactgttcctggtgaaccttggaccacagcatgtcagtgctctagggattgtctactccagggattttcttcaaaatttttaaacatgggaagttcaaacaaatataatgtgtgaaacagatcaaaa

SEQ ID NO: 425922 - DNA, 1591 bp, Homo sapiens
ctccaggcgggaggcgacgcctgcgcagtgcggtcgcggggctgtcgttgtcccgcgagccgccgaccaggcctcgaacgggatggcagaggaggtgaggagggaggaagcgtccggagtggggcgggcccggactccgacccccggggcgcttcgagccccccagctggtcaccgaggcaccgccgcttcacccaggccagtagccgccccctcgcgcaccccggccccgcctcacacgcgcgcccgagcgagccccgggctcccctcgggcccagcgtggcgcaggggtcagtggttctctcgggtctcgggacaggtgagcaccctgatgaaggccacggtcctgatgcggcagcctgggcgggtgcaggagatcgtgggcgccctccgcaagggcggcggagaccggttacagaaggcgcccacaccagtacctagggccgatattatcctccccaagccagcggctccccagtgatttctgattttgacatgaccttgagcaggtttgcatataatggaaagcgatgcccttcttcttacaatattctggataatagcaagatcatcagtgaggagtgtcggaaagagctcacagcgctccttcaccactattacccaattgagatcgacccacaccggaccgtcaaggagaagctacctcatatggtggaatggtggaccaaagcgcacaatctcctatgtcagcagaagattcagaagtttcagatagcccaggtggttagagagtccaatgcaatgctcagggagggatataagaccttcttcaacacactctaccataacaacattccccttttcatcttttctgcgggcattggtgatatcctggaagaaattatccgacagatgaaagtgttccaccccaacatccacatcgtgtctaactacatggattttaatgaagatggttttctccagggatttaagggccagctgatacacacatacaacaagaacagctctgtgtgtgagaactgtggttacttccagcaacttgagggcaaaaccaatgtcatcctgctgggagactctatcggggacctcaccatggccgatggggttcctggtgtgcagaacattctcaaaattggcttcctgaatgacaaggtggaggagcggcgggagcgctacatggactcctatgacatcgtgctggagaaggacgagactctggatgtggtcaacgggctactgcagcacatcctgtgccagggggtccagctggagatgcaaggcccctgaaggcgcaggctccagcccggcctgcaggccgtggtgaggaggggcgcctccccagagtctgctcccccgtgaacacagagcagaggccagggtggccagcagtggctgggtccttccgcgcccctccgtcctcctttccctgagcaccttcatcaccagaggcttgaaggaaccccgccatgtggcagggcacaggcactgttcctggtgaaccttggaccacagcatgtcagtgctctagggattgtctactccagggattttcttcaaaatttttaaacatgggaagttcaaacaaatataatgtgtgaaacagatcaaaa

SEQ ID NO: 425923 - DNA, 1686 bp, Homo sapiens
ctccaggcgggaggcgacgcctgcgcagtgcggtcgcggggctgtcgttgtcccgcgagccgccgaccaggcctcgaacgggatggcagaggaggtgaggagggaggaagcgtccggagtggggcgggcccggactccgacccccggggcgcttcgagccccccagctggtcaccgaggcaccgccgcttcacccaggtgagcaccctgatgaaggccacggtcctgatgcggcagcctgggcgggtgcaggagatcgtgggcgccctccgcaagggcggcggagaccggttacaggtacctctggggcgtgcgggggccggccgggctgggggcggctggagaggcttcctgcccattgggccttcccgctttgctctgccgcggacccctcctagctctctgccccaagaaatggctgggagcttgaaggagagcgggttggttcgcctgtcctaaaacccaaatttcagatttctcaatatggtcatgctgcttcctctaattggacagaaggcgcccacaccagtacctagggccgatattatcctccccaagccagcggctccccagtgatttctgattttgacatgaccttgagcaggtttgcatataatggaaagcgatgcccttcttcttacaatattctggataatagcaagatcatcagtgaggagtgtcggaaagagctcacagcgctccttcaccactattacccaattgagatcgacccacaccggaccgtcaaggagaagctacctcatatggtggaatggtggaccaaagcgcacaatctcctatgtcagcagaagattcagaagtttcagatagcccaggtggttagagagtccaatgcaatgctcagggagggatataagaccttcttcaacacactctaccataacaacattccccttttcatcttttctgcgggcattggtgatatcctggaagaaattatccgacagatgaaagtgttccaccccaacatccacatcgtgtctaactacatggattttaatgaagatggttttctccagggatttaagggccagctgatacacacatacaacaagaacagctctgtgtgtgagaactgtggttacttccagcaacttgagggcaaaaccaatgtcatcctgctgggagactctatcggggacctcaccatggccgatggggttcctggtgtgcagaacattctcaaaattggcttcctgaatgacaaggtggaggagcggcgggagcgctacatggactcctatgacatcgtgctggagaaggacgagactctggatgtggtcaacgggctactgcagcacatcctgtgccagggggtccagctggagatgcaaggcccctgaaggcgcaggctccagcccggcctgcaggccgtggtgaggaggggcgcctccccagagtctgctcccccgtgaacacagagcagaggccagggtggccagcagtggctgggtccttccgcgcccctccgtcctcctttccctgagcaccttcatcaccagaggcttgaaggaaccccgccatgtggcagggcacaggcactgttcctggtgaaccttggaccacagcatgtcagtgctctagggattgtctactccagggattttcttcaaaatttttaaacatgggaagttcaaacaaatataatgtgtgaaacagatcaaaa

SEQ ID NO: 425924 - DNA, 1807 bp, Homo sapiens
ctccaggcgggaggcgacgcctgcgcagtgcggtcgcggggctgtcgttgtcccgcgagccgccgaccaggcctcgaacgggatggcagaggaggtgaggagggaggaagcgtccggagtggggcgggcccggactccgacccccggggcgcttcgagccccccagctggtcaccgaggcaccgccgcttcacccaggccagtagccgccccctcgcgcaccccggccccgcctcacacgcgcgcccgagcgagccccgggctcccctcgggcccagcgtggcgcaggggtcagtggttctctcgggtctcgggacaggtgagcaccctgatgaaggccacggtcctgatgcggcagcctgggcgggtgcaggagatcgtgggcgccctccgcaagggcggcggagaccggttacaggtacctctggggcgtgcgggggccggccgggctgggggcggctggagaggcttcctgcccattgggccttcccgctttgctctgccgcggacccctcctagctctctgccccaagaaatggctgggagcttgaaggagagcgggttggttcgcctgtcctaaaacccaaatttcagatttctcaatatggtcatgctgcttcctctaattggacagaaggcgcccacaccagtacctagggccgatattatcctccccaagccagcggctccccagtgatttctgattttgacatgaccttgagcaggtttgcatataatggaaagcgatgcccttcttcttacaatattctggataatagcaagatcatcagtgaggagtgtcggaaagagctcacagcgctccttcaccactattacccaattgagatcgacccacaccggaccgtcaaggagaagctacctcatatggtggaatggtggaccaaagcgcacaatctcctatgtcagcagaagattcagaagtttcagatagcccaggtggttagagagtccaatgcaatgctcagggagggatataagaccttcttcaacacactctaccataacaacattccccttttcatcttttctgcgggcattggtgatatcctggaagaaattatccgacagatgaaagtgttccaccccaacatccacatcgtgtctaactacatggattttaatgaagatggttttctccagggatttaagggccagctgatacacacatacaacaagaacagctctgtgtgtgagaactgtggttacttccagcaacttgagggcaaaaccaatgtcatcctgctgggagactctatcggggacctcaccatggccgatggggttcctggtgtgcagaacattctcaaaattggcttcctgaatgacaaggtggaggagcggcgggagcgctacatggactcctatgacatcgtgctggagaaggacgagactctggatgtggtcaacgggctactgcagcacatcctgtgccagggggtccagctggagatgcaaggcccctgaaggcgcaggctccagcccggcctgcaggccgtggtgaggaggggcgcctccccagagtctgctcccccgtgaacacagagcagaggccagggtggccagcagtggctgggtccttccgcgcccctccgtcctcctttccctgagcaccttcatcaccagaggcttgaaggaaccccgccatgtggcagggcacaggcactgttcctggtgaaccttggaccacagcatgtcagtgctctagggattgtctactccagggattttcttcaaaatttttaaacatgggaagttcaaacaaatataatgtgtgaaacagatcaaaa

SEQ ID NO: 425925 - DNA, 1351 bp, Homo sapiens
cctgagtattcacccttgcccccacactaggagactgcgttttcctcagggttaacgggtactaattaggatcacttcccctctatccctctgtgtcactcggtaactcccctagggctttgcctacatcctggccactgagctgtattgatttccataatcatcccccaggctgaggcagggccacactagaattctggtgcctatttaggcatcatctctcttttgccttataggtgatttctgattttgacatgaccttgagcaggtttgcatataatggaaagcgatgcccttcttcttacaatattctggataatagcaagatcatcagtgaggagtgtcggaaagagctcacagcgctccttcaccactattacccaattgagatcgacccacaccggaccgtcaaggagaagctacctcatatggtggaatggtggaccaaagcgcacaatctcctatgtcagcagaagattcagaagtttcagatagcccaggtggttagagagtccaatgcaatgctcagggagggatataagaccttcttcaacacactctaccataacaacattccccttttcatcttttctgcgggcattggtgatatcctggaagaaattatccgacagatgaaagtgttccaccccaacatccacatcgtgtctaactacatggattttaatgaagatggttttctccagggatttaagggccagctgatacacacatacaacaagaacagctctgtgtgtgagaactgtggttacttccagcaacttgagggcaaaaccaatgtcatcctgctgggagactctatcggggacctcaccatggccgatggggttcctggtgtgcagaacattctcaaaattggcttcctgaatgacaaggtggaggagcggcgggagcgctacatggactcctatgacatcgtgctggagaaggacgagactctggatgtggtcaacgggctactgcagcacatcctgtgccagggggtccagctggagatgcaaggcccctgaaggcgcaggctccagcccggcctgcaggccgtggtgaggaggggcgcctccccagagtctgctcccccgtgaacacagagcagaggccagggtggccagcagtggctgggtccttccgcgcccctccgtcctcctttccctgagcaccttcatcaccagaggcttgaaggaaccccgccatgtggcagggcacaggcactgttcctggtgaaccttggaccacagcatgtcagtgctctagggattgtctactccagggattttcttcaaaatttttaaacatgggaagttcaaacaaatataatgtgtgaaacagatcaaaa

SEQ ID NO: 425926 - DNA, 1676 bp, Homo sapiens
ctccaggcgggaggcgacgcctgcgcagtgcggtcgcggggctgtcgttgtcccgcgagccgccgaccaggcctcgaacgggatggcagaggtgagcaccctgatgaaggccacggtcctgatgcggcagcctgggcgggtgcaggagatcgtgggcgccctccgcaagggcggcggagaccggttacaggtacctctggggcgtgcgggggccggccgggctgggggcggctggagaggcttcctgcccattgggccttcccgctttgctctgccgcggacccctcctagctctctgccccaagaaatggctgggagcttgaaggagagcgggttggttcgcctgtcctaaaacccaaatttcagatttctcaatatggtcatgctgcttcctctaattggacagaaggcgcccacaccagtacctagggccgatattatcctccccaagccagcggctccccagtgatttctgattttgacatgaccttgagcaggtttgcatataatggaaagcgatgcccttcttcttacaatattctggataatagcaagatcatcagtgaggagtgtcggaaagagtagagacagggtttcgccatgttggccaggctggactcgaactcctgacctcaagtgatccacctgcctcagcctcctaaagcactgggattgcagctcacagcgctccttcaccactattacccaattgagatcgacccacaccggaccgtcaaggagaagctacctcatatggtggaatggtggaccaaagcgcacaatctcctatgtcagcagaagattcagaagtttcagatagcccaggtggttagagagtccaatgcaatgctcagggagggatataagaccttcttcaacacactctaccataacaacattccccttttcatcttttctgcgggcattggtgatatcctggaagaaattatccgacagatgaaagtgttccaccccaacatccacatcgtgtctaactacatggattttaatgaagatggttttctccagggatttaagggccagctgatacacacatacaacaagaacagctctgtgtgtgagaactgtggttacttccagcaacttgagggcaaaaccaatgtcatcctgctgggagactctatcggggacctcaccatggccgatggggttcctggtgtgcagaacattctcaaaattggcttcctgaatgacaaggtggaggagcggcgggagcgctacatggactcctatgacatcgtgctggagaaggacgagactctggatgtggtcaacgggctactgcagcacatcctgtgccagggggtccagctggagatgcaaggcccctgaaggcgcaggctccagcccggcctgcaggccgtggtgaggaggggcgcctccccagagtctgctcccccgtgaacacagagcagaggccagggtggccagcagtggctgggtccttccgcgcccctccgtcctcctttccctgagcaccttcatcaccagaggcttgaaggaaccccgccatgtggcagggcacaggcactgttcctggtgaaccttggaccacagcatgtcagtgctctagggattgtctactccagggattttcttcaaaatttttaaacatgggaagttcaaacaaatataatgtgtgaaacagatcaaaa

SEQ ID NO: 425927 - DNA, 1369 bp, Homo sapiens
ctccaggcgggaggcgacgcctgcgcagtgcggtcgcggggctgtcgttgtcccgcgagccgccgaccaggcctcgaacgggatggcagaggaggtgaggagggaggaagcgtccggagtggggcgggcccggactccgacccccggggcgcttcgagccccccagctggtcaccgaggcaccgccgcttcacccaggccagtagccgccccctcgcgcaccccggccccgcctcacacgcgcgcccgagcgagccccgggctcccctcgggcccagcgtggcgcaggggtcagtggttctctcgggtctcgggacaggtgagcaccctgatgaaggccacggtcctgatgcggcagcctgggcgggtgcaggagatcgtgggcgccctccgcaagggcggcggagaccggttacaggtgatttctgattttgacatgaccttgagcaggtttgcatataatggaaagcgatgcccttcttcttacaatattctggataatagcaagatcatcagtgaggagtgtcggaaagagctcacagcgctccttcaccactattacccaattgagatcgacccacaccggaccgtcaaggagaagctacctcatatggtggaatggtggaccaaagcgcacaatctcctatgtcagcagaagattcagaagtttcagatagcccaggtggttagagagtccaatgcaatgctcagggttttctccagggatttaagggccagctgatacacacatacaacaagaacagctctgtgtgtgagaactgtggttacttccagcaacttgagggcaaaaccaatgtcatcctgctgggagactctatcggggacctcaccatggccgatggggttcctggtgtgcagaacattctcaaaattggcttcctgaatgacaaggtggaggagcggcgggagcgctacatggactcctatgacatcgtgctggagaaggacgagactctggatgtggtcaacgggctactgcagcacatcctgtgccagggggtccagctggagatgcaaggcccctgaaggcgcaggctccagcccggcctgcaggccgtggtgaggaggggcgcctccccagagtctgctcccccgtgaacacagagcagaggccagggtggccagcagtggctgggtccttccgcgcccctccgtcctcctttccctgagcaccttcatcaccagaggcttgaaggaaccccgccatgtggcagggcacaggcactgttcctggtgaaccttggaccacagcatgtcagtgctctagggattgtctactccagggattttcttcaaaatttttaaacatgggaagttcaaacaaatataatgtgtgaaacagatcaaaa

SEQ ID NO: 425928 - DNA, 1215 bp, Homo sapiens
ctccaggcgggaggcgacgcctgcgcagtgcggtcgcggggctgtcgttgtcccgcgagccgccgaccaggcctcgaacgggatggcagaggtgagcaccctgatgaaggccacggtcctgatgcggcagcctgggcgggtgcaggagatcgtgggcgccctccgcaagggcggcggagaccggttacaggtgatttctgattttgacatgaccttgagcaggtttgcatataatggaaagcgatgcccttcttcttacaatattctggataatagcaagatcatcagtgaggagtgtcggaaagagctcacagcgctccttcaccactattacccaattgagatcgacccacaccggaccgtcaaggagaagctacctcatatggtggaatgggagggatataagaccttcttcaacacactctaccataacaacattccccttttcatcttttctgcgggcattggtgatatcctggaagaaattatccgacagatgaaagtgttccaccccaacatccacatcgtgtctaactacatggattttaatgaagatggttttctccagggatttaagggccagctgatacacacatacaacaagaacagctctgtgtgtgagaactgtggttacttccagcaacttgagggcaaaaccaatgtcatcctgctgggagactctatcggggacctcaccatggccgatggggttcctggtgtgcagaacattctcaaaattggcttcctgaatgacaaggtggaggagcggcgggagcgctacatggactcctatgacatcgtgctggagaaggacgagactctggatgtggtcaacgggctactgcagcacatcctgtgccagggggtccagctggagatgcaaggcccctgaaggcgcaggctccagcccggcctgcaggccgtggtgaggaggggcgcctccccagagtctgctcccccgtgaacacagagcagaggccagggtggccagcagtggctgggtccttccgcgcccctccgtcctcctttccctgagcaccttcatcaccagaggcttgaaggaaccccgccatgtggcagggcacaggcactgttcctggtgaaccttggaccacagcatgtcagtgctctagggattgtctactccagggattttcttcaaaatttttaaacatgggaagttcaaacaaatataatgtgtgaaacagatcaaaa

SEQ ID NO: 425929 - DNA, 1210 bp, Homo sapiens
ctccaggcgggaggcgacgcctgcgcagtgcggtcgcggggctgtcgttgtcccgcgagccgccgaccaggcctcgaacgggatggcagaggaggtgaggagggaggaagcgtccggagtggggcgggcccggactccgacccccggggcgcttcgagccccccagctggtcaccgaggcaccgccgcttcacccaggtgagcaccctgatgaaggccacggtcctgatgcggcagcctgggcgggtgcaggagatcgtgggcgccctccgcaagggcggcggagaccggttacaggtgatttctgattttgacatgaccttgagcaggtttgcatataatggaaagcgatgcccttcttcttacaatattctggataatagcaagatcatcagtgaggagtgtcggaaagagctcacagcgctccttcaccactattacccaattgagatcgacccacaccggaccgtcaaggagaagctacctcatatggtggaatggtggaccaaagcgcacaatctcctatgtcagcagaagattcagaagtttcagatagcccaggtggttagagagtccaatgcaatgctcagggagggatataagaccttcttcaacacactctaccataacaacattccccttttcatcttttctgcgggcattggtgatatcctggaagaaattatccgacagatgaaagtgttccaccccaacatccacatcgtgtctaactacatggattttaatgaagatgtggaggagcggcgggagcgctacatggactcctatgacatcgtgctggagaaggacgagactctggatgtggtcaacgggctactgcagcacatcctgtgccagggggtccagctggagatgcaaggcccctgaaggcgcaggctccagcccggcctgcaggccgtggtgaggaggggcgcctccccagagtctgctcccccgtgaacacagagcagaggccagggtggccagcagtggctgggtccttccgcgcccctccgtcctcctttccctgagcaccttcatcaccagaggcttgaaggaaccccgccatgtggcagggcacaggcactgttcctggtgaaccttggaccacagcatgtcagtgctctagggattgtctactccagggattttcttcaaaatttttaaacatgggaagttcaaacaaatataatgtgtgaaacagatcaaaa

SEQ ID NO: 425930 - DNA, 370 bp, Homo sapiens
ctgcggtttacagagtctcgtccttctcagcacgatgtcataggagtcatgtagcgctccagcccggcctgcaggccgtggtgaggaggggcgcctccccagagtctgctcccccgtgaacacagagcagaggccagggtggccagcagtggctgggtccttccgcgcccctccgtcctcctttccctgagcaccttcatcaccagaggcttgaaggaaccccgccatgtggcagggcacaggcactgttcctggtgaaccttggaccacagcatgtcagtgctctagggattgtctactccagggattttcttcaaaatttttaaacatgggaagttcaaacaaatataatgtgtgaaacagatcaaaa

SEQ ID NO: 425931 - DNA, 391 bp, Homo sapiens
atgtccccaaaggaaaacttgaagaaaatttcatgtaacactctcttagatgaagttgcatcttctttttatttgagacacagttttactctgtggcccaggctggagtgcagtggtgtgatctcgtcttggctcactgcaacctccgcctcctgggttcaaacgattctcatttttcagcctcctgagtagctgggattaaaggcgcatgccactacaccggctaatttttgtattttttagtagagacagggtttcgccatgttggccaggctggactcgaactcctgacctcaagtgatccacctgcctcagcctcctaaagcactgggattgcaggtgtgagccaccgcccctggccatgaagttgcctcttctaggtgactttttt

SEQ ID NO: 425932 - DNA, 332 bp, Homo sapiens
cctgtgccagggggtccagctggagatgcaaggcccctgaaggcgcaggctccagcccggcctgcaggccgtggtgaggaggggcgcctccccagagtctgctcccccgtgaacacagagcagaggccagggtggccagcagtggctgggtccttccgcgcccctccgtcctcctttccctgagcaccttcatcaccagaggcttgaaggaaccccgccatgtggcagggcacaggcactgttcctggtgaaccttggaccacagcatgtcagtgctctagggattgtctactccagggattttcttcaaaatttttaaacatgggaagttc

SEQ ID NO: 425933 - DNA, 1469 bp, Homo sapiens
cgaataatggataggtagcgaggcctgggaggtgaggagggaggaagcgtccggagtggggcgggcccggactccgacccccggggcgcttcgagccccccagctggtcaccgaggcaccgccgcttcacccaggccagtagccgccccctcgcgcaccccggccccgcctcacacgcgcgcccgagcgagccccgggctcccctcgggcccagcgtggcgcaggggtcagtggttctctcgggtctcgggacaggtgagcaccctgatgaaggccacggtcctgatgcggcagcctgggcgggtgcaggagatcgtgggcgccctccgcaagggcggcggagaccggttacaggtgatttctgattttgacatgaccttgagcaggtttgcatataatggaaagcgatgcccttcttcttacaatattctggataatagcaagatcatcagtgaggagtgtcggaaagagctcacagcgctccttcaccactattacccaattgagatcgacccacaccggaccgtcaaggagaagctacctcatatggtggaatggtggaccaaagcgcacaatctcctatgtcagcagaagattcagaagtttcagatagcccaggtggttagagagtccaatgcaatgctcagggagggatataagaccttcttcaacacactctaccataacaacattccccttttcatcttttctgcgggcattggtgatatcctggaagaaattatccgacagatgaaagtgttccaccccaacatccacatcgtgtctaactacatggattttaatgaagatggttttctccagggatttaagggccagctgatacacacatacaacaagaacagctctgtgtgtgagaactgtggttacttccagcaacttgagggcaaaaccaatgtcatcctgctgggagactctatcggggacctcaccatggccgatggggttcctggtgtgcagaacattctcaaaattggcttcctgaatgacaaggtggaggagcggcgggagcgctacatggactcctatgacatcgtgctggagaaggacgagactctggatgtggtcaacgggctactgcagcacatcctgtgccagggggtccagctggagatgcaaggcccctgaaggcgcaggctccagcccggcctgcaggccgtggtgaggaggggcgcctccccagagtctgctcccccgtgaacacagagcagaggccagggtggccagcagtggctgggtccttccgcgcccctccgtcctcctttccctgagcaccttcatcaccagaggcttgaaggaaccccgccatgtggcagggcacaggcactgttcctggtgaaccttggaccacagcatgtcagtgctctagggattgtctactccagggattttcttcaaaatttttaaacatgggaagttcaaacaaatataatgtgtgaaacagatcaaaa

SEQ ID NO: 425934 - DNA, 1658 bp, Homo sapiens
ctccaggcgggaggcgacgcctgcgcagtgcggtcgcggggctgtcgttgtcccgcgagccgccgaccaggcctcgaacgggatggcagaggaggtgaggagggaggaagcgtccggagtggggcgggcccggactccgacccccggggcgcttcgagccccccagctggtcaccgaggcaccgccgcttcacccaggccagtagccgccccctcgcgcaccccggccccgcctcacacgcgcgcccgagcgagccccgggctcccctcgggcccagcgtggcgcaggggtcagtggttctctcgggtctcgggacaggtgagcaccctgatgaaggccacggtcctgatgcggcagcctgggcgggtgcaggagatcgtgggcgccctccgcaagggcggcggagaccggttacaggtgatttctgattttgacatgaccttgagcaggtttgcatataatggaaagcgatgcccttcttcttacaatattctggataatagcaagatcatcagtgaggagtgtcggaaagagctcacagcgctccttcaccactattacccaattgagatcgacccacaccggaccgtcaaggagaagctacctcatatggtggaatggtggaccaaagcgcacaatctcctatgtcagcagaagattcagaagtttcagatagcccaggtggttagagagtccaatgcaatgctcagggagggatataagaccttcttcaacacactctaccataacaacattccccttttcatcttttctgcgggcattggtgatatcctggaagaaattatccgacagatgaaagtgttccaccccaacatccacatcgtgtctaactacatggattttaatgaagatggttttctccagggatttaagggccagctgatacacacatacaacaagaacagctctgtgtgtgagaactgtggttacttccagcaacttgagggcaaaaccaatgtcatcctgctgggagactctatcggggacctcaccatggccgatggggttcctggtgtgcagaacattctcaaaattggcttcctgaatgacaaggtggaggagcggcgggagcgctacatggactcctatgacatcgtgctggagaaggacgagactctggatgtggtcaacgggctactgcagcacatcctgtgccagggggtccagctggagatgcaaggcccctgaaggcgcaggctccagcccggcctgcaggccgtggtgaggaggggcgcctccccagagtctgctcccccgtgaacacagagcagaggccagggtggccagcagtggctgggtccttccgcgcccctccgtcctcctttccctgagcaccttcatcaccagaggcttgaaggaaccccgccatgtggcagggcacaggcactgttcctggtgaaccttggaccacagcatgtcagtgctctagggattgtctactccagggattttcttcaaaatttttaaacatgggaagttcaaacaaatataatgtgtgaaacagatcaaaatttttaaaatgaaaaaaaagctgctctgattcaggggatgtgggtcggggtagaacctggacctcttggccctgggggcacatgggatgcttctaggaacacagtttgagaaccaccacaaattgg

SEQ ID NO: 425935 - DNA, 1361 bp, Homo sapiens
gggggcacaaaaaacttctggctaggtcgaggctgggtttgaatcggccgaggcggcccgcctcacacgcgcgcccgagcgagccccgggctcccctcgggcccagcgtggcgcaggggtcagtggttctctcgggtctcgggacaggtgagcaccctgatgaaggccacggtcctgatgcggcagcctgggcgggtgcaggagatcgtgggcgccctccgcaagggcggcggagaccggttacaggtgatttctgattttgacatgaccttgagcaggtttgcatataatggaaagcgatgcccttcttcttacaatattctggataatagcaagatcatcagtgaggagtgtcggaaagagctcacagcgctccttcaccactattacccaattgagatcgacccacaccggaccgtcaaggagaagctacctcatatggtggaatggtggaccaaagcgcacaatctcctatgtcagcagaagattcagaagtttcagatagcccaggtggttagagagtccaatgcaatgctcagggagggatataagaccttcttcaacacactctaccataacaacattccccttttcatcttttctgcgggcattggtgatatcctggaagaaattatccgacagatgaaagtgttccaccccaacatccacatcgtgtctaactacatggattttaatgaagatggttttctccagggatttaagggccagctgatacacacatacaacaagaacagctctgtgtgtgagaactgtggttacttccagcaacttgagggcaaaaccaatgtcatcctgctgggagactctatcggggacctcaccatggccgatggggttcctggtgtgcagaacattctcaaaattggcttcctgaatgacaaggtggaggagcggcgggagcgctacatggactcctatgacatcgtgctggagaaggacgagactctggatgtggtcaacgggctactgcagcacatcctgtgccagggggtccagctggagatgcaaggcccctgaaggcgcaggctccagcccggcctgcaggccgtggtgaggaggggcgcctccccagagtctgctcccccgtgaacacagagcagaggccagggtggccagcagtggctgggtccttccgcgcccctccgtcctcctttccctgagcaccttcatcaccagaggcttgaaggaaccccgccatgtggcagggcacaggcactgttcctggtgaaccttggaccacagcatgtcagtgctctagggattgtctactccagggattttcttcaaaatttttaaacatgggaagttcaaacaaatataatgtgtgaaacagatcaaaa

SEQ ID NO: 425936 - DNA, 1631 bp, Homo sapiens
ctccaggcgggaggcgacgcctgcgcagtgcggtcgcggggctgtcgttgtcccgcgagccgccgaccaggcctcgaacgggatggcagaggaggtgaggagggaggaagcgtccggagtggggcgggcccggactccgacccccggggcgcttcgagccccccagctggtcaccgaggcaccgccgcttcacccaggccagtagccgccccctcgcgcaccccggccccgcctcacacgcgcgcccgagcgagccccgggctcccctcgggcccagcgtggcgcaggggtcagtggttctctcgggtctcgggacaggtgagcaccctgatgaaggccacggtcctgatgcggcagcctgggcgggtgcaggagatcgtgggcgccctccgcaagggcggcggagaccggttacagatttctcaatatggtcatgctgcttcctctaattggacagaaggcgcccacaccagtacctagggccgatattatcctccccaagccagcggctccccagtgatttctgattttgacatgaccttgagcaggtttgcatataatggaaagcgatgcccttcttcttacaatattctggataatagcaagatcatcagtgaggagtgtcggaaagagctcacagcgctccttcaccactattacccaattgagatcgacccacaccggaccgtcaaggagaagctacctcatatggtggaatggtggaccaaagcgcacaatctcctatgtcagcagaagattcagaagtttcagatagcccaggtggttagagagtccaatgcaatgctcagggagggatataagaccttcttcaacacactctaccataacaacattccccttttcatcttttctgcgggcattggtgatatcctggaagaaattatccgacagatgaaagtgttccaccccaacatccacatcgtgtctaactacatggattttaatgaagatggttttctccagggatttaagggccagctgatacacacatacaacaagaacagctctgtgtgtgagaactgtggttacttccagcaacttgagggcaaaaccaatgtcatcctgctgggagactctatcggggacctcaccatggccgatggggttcctggtgtgcagaacattctcaaaattggcttcctgaatgacaaggtggaggagcggcgggagcgctacatggactcctatgacatcgtgctggagaaggacgagactctggatgtggtcaacgggctactgcagcacatcctgtgccagggggtccagctggagatgcaaggcccctgaaggcgcaggctccagcccggcctgcaggccgtggtgaggaggggcgcctccccagagtctgctcccccgtgaacacagagcagaggccagggtggccagcagtggctgggtccttccgcgcccctccgtcctcctttccctgagcaccttcatcaccagaggcttgaaggaaccccgccatgtggcagggcacaggcactgttcctggtgaaccttggaccacagcatgtcagtgctctagggattgtctactccagggattttcttcaaaatttttaaacatgggaagttcaaacaaatataatgtgtgaaacagatcaaaa

SEQ ID NO: 425937 - DNA, 1305 bp, Homo sapiens
ctccaggcgggaggcgacgcctgcgcagtgcggtcgcggggctgtcgttgtcccgcgagccgccgaccaggcctcgaacgggatggcagaggtgagcaccctgatgaaggccacggtcctgatgcggcagcctgggcgggtgcaggagatcgtgggcgccctccgcaagggcggcggagaccggttacaggtgatttctgattttgacatgaccttgagcaggtttgcatataatggaaagcgatgcccttcttcttacaatattctggataatagcaagatcatcagtgaggagtgtcggaaagagctcacagcgctccttcaccactattacccaattgagatcgacccacaccggaccgtcaaggagaagctacctcatatggtggaatggtggaccaaagcgcacaatctcctatgtcagcagaagattcagaagtttcagatagcccaggtggttagagagtccaatgcaatgctcagggagggatataagaccttcttcaacacactctaccataacaacattccccttttcatcttttctgcgggcattggtgatatcctggaagaaattatccgacagatgaaagtgttccaccccaacatccacatcgtgtctaactacatggattttaatgaagatggttttctccagggatttaagggccagctgatacacacatacaacaagaacagctctgtgtgtgagaactgtggttacttccagcaacttgagggcaaaaccaatgtcatcctgctgggagactctatcggggacctcaccatggccgatggggttcctggtgtgcagaacattctcaaaattggcttcctgaatgacaaggtggaggagcggcgggagcgctacatggactcctatgacatcgtgctggagaaggacgagactctggatgtggtcaacgggctactgcagcacatcctgtgccagggggtccagctggagatgcaaggcccctgaaggcgcaggctccagcccggcctgcaggccgtggtgaggaggggcgcctccccagagtctgctcccccgtgaacacagagcagaggccagggtggccagcagtggctgggtccttccgcgcccctccgtcctcctttccctgagcaccttcatcaccagaggcttgaaggaaccccgccatgtggcagggcacaggcactgttcctggtgaaccttggaccacagcatgtcagtgctctagggattgtctactccagggattttcttcaaaatttttaaacatgggaagttcaaacaaatataatgtgtgaaacagatcaaaa

SEQ ID NO: 425938 - DNA, 1404 bp, Homo sapiens
ctccaggcgggaggcgacgcctgcgcagtgcggtcgcggggctgtcgttgtcccgcgagccgccgaccaggcctcgaacgggatggcagaggtgagcaccctgatgaaggccacggtcctgatgcggcagcctgggcgggtgcaggagatcgtgggcgccctccgcaagggcggcggagaccggttacagatttctcaatatggtcatgctgcttcctctaattggacagaaggcgcccacaccagtacctagggccgatattatcctccccaagccagcggctccccagtgatttctgattttgacatgaccttgagcaggtttgcatataatggaaagcgatgcccttcttcttacaatattctggataatagcaagatcatcagtgaggagtgtcggaaagagctcacagcgctccttcaccactattacccaattgagatcgacccacaccggaccgtcaaggagaagctacctcatatggtggaatggtggaccaaagcgcacaatctcctatgtcagcagaagattcagaagtttcagatagcccaggtggttagagagtccaatgcaatgctcagggagggatataagaccttcttcaacacactctaccataacaacattccccttttcatcttttctgcgggcattggtgatatcctggaagaaattatccgacagatgaaagtgttccaccccaacatccacatcgtgtctaactacatggattttaatgaagatggttttctccagggatttaagggccagctgatacacacatacaacaagaacagctctgtgtgtgagaactgtggttacttccagcaacttgagggcaaaaccaatgtcatcctgctgggagactctatcggggacctcaccatggccgatggggttcctggtgtgcagaacattctcaaaattggcttcctgaatgacaaggtggaggagcggcgggagcgctacatggactcctatgacatcgtgctggagaaggacgagactctggatgtggtcaacgggctactgcagcacatcctgtgccagggggtccagctggagatgcaaggcccctgaaggcgcaggctccagcccggcctgcaggccgtggtgaggaggggcgcctccccagagtctgctcccccgtgaacacagagcagaggccagggtggccagcagtggctgggtccttccgcgcccctccgtcctcctttccctgagcaccttcatcaccagaggcttgaaggaaccccgccatgtggcagggcacaggcactgttcctggtgaaccttggaccacagcatgtcagtgctctagggattgtctactccagggattttcttcaaaatttttaaacatgggaagttcaaacaaatataatgtgtgaaacagatcaaaa

SEQ ID NO: 425939 - DNA, 1253 bp, Homo sapiens
agccctcctagctctcgccccaagaaaggctgggatgaaggagagcgtggccgttaaccatcagatctcaatggtcatgctgggttcctctagtggacagaaggcgcccacaccagtacctagggccgattatcctccaagccagggtcccaggatctgatttgatacctgagcaggtgcttatggaaaggatgcccttcttcttacaatattctggataatagcaagatcatcagtgaggagtgtcggaaagagctcacagcgctccttcaccactattacccaattgagatcgacccacaccggaccgtcaaggagaagctacctcatatggtggaatggtggaccaaagcgcacaatctcctatgtcagcagaagattcagaagtttcagatagcccaggtggttagagagtccaatgcaatgctcagggagggatataagaccttcttcaacacactctaccataacaacattccccttttcatcttttctgcgggcattggtgatatcctggaagaaattatccgacagatgaaagtgttccaccccaacatccacatcgtgtctaactacatggattttaatgaagatggttttctccagggatttaagggccagctgatacacacatacaacaagaacagctctgtgtgtgagaactgtggttacttccagcaacttgagggcaaaaccaatgtcatcctgctgggagactctatcggggacctcaccatggccgatggggttcctggtgtgcagaacattctcaaaattggcttcctgaatgacaaggtggaggagcggcgggagcgctacatggactcctatgacatcgtgctggagaaggacgagactctggatgtggtcaacgggctactgcagcacatcctgtgccagggggtccagctggagatgcaaggcccctgaaggcgcaggctccagcccggcctgcaggccgtggtgaggaggggcgcctccccagagtctgctcccccgtgaacacagagcagaggccagggtggccagcagtggctgggtccttccgcgcccctccgtcctcctttccctgagcaccttcatcaccagaggcttgaaggaaccccgccatgtggcagggcacaggcactgttcctggtgaaccttggaccacagcatgtcagtgctctagggattgtctactccagggattttcttcaaaatttttaaacatgggaagttcaaacaaatataatgtgtgaaacagatcaaaa

SEQ ID NO: 425940 - DNA, 1118 bp, Homo sapiens
ccgcccctggccatgaagttgcctcttctaggtgacttttttctcatactaagctgtaggacgttgctgggaagaacttgatatggactaatggcctttctccccatttggatatcccagctcacagcgctccttcaccactattacccaattgagatcgacccacaccggaccgtcaaggagaagctacctcatatggtggaatggtggaccaaagcgcacaatctcctatgtcagcagaagattcagaagtttcagatagcccaggtggttagagagtccaatgcaatgctcagggagggatataagaccttcttcaacacactctaccataacaacattccccttttcatcttttctgcgggcattggtgatatcctggaagaaattatccgacagatgaaagtgttccaccccaacatccacatcgtgtctaactacatggattttaatgaagatggttttctccagggatttaagggccagctgatacacacatacaacaagaacagctctgtgtgtgagaactgtggttacttccagcaacttgagggcaaaaccaatgtcatcctgctgggagactctatcggggacctcaccatggccgatggggttcctggtgtgcagaacattctcaaaattggcttcctgaatgacaaggtggaggagcggcgggagcgctacatggactcctatgacatcgtgctggagaaggacgagactctggatgtggtcaacgggctactgcagcacatcctgtgccagggggtccagctggagatgcaaggcccctgaaggcgcaggctccagcccggcctgcaggccgtggtgaggaggggcgcctccccagagtctgctcccccgtgaacacagagcagaggccagggtggccagcagtggctgggtccttccgcgcccctccgtcctcctttccctgagcaccttcatcaccagaggcttgaaggaaccccgccatgtggcagggcacaggcactgttcctggtgaaccttggaccacagcatgtcagtgctctagggattgtctactccagggattttcttcaaaatttttaaacatgggaagttcaaacaaatataatgtgtgaaacagatcaaaa

SEQ ID NO: 425941 - DNA, 1166 bp, Homo sapiens
ctccaggcgggaggcgacgcctgcgcagtgcggtcgcggggctgtcgttgtcccgcgagccgccgaccaggcctcgaacgggatggcagaggaggtgaggagggaggaagcgtccggagtggggcgggcccggactccgacccccggggcgcttcgagccccccagctggtcaccgaggcaccgccgcttcacccaggccagtagccgccccctcgcgcaccccggccccgcctcacacgcgcgcccgagcgagccccgggctcccctcgggcccagcgtggcgcaggggtcagtggttctctcgggtctcgggacaggtgagcaccctgatgaaggccacggtcctgatgcggcagcctgggcgggtgcaggagatcgtgggcgccctccgcaagggcggcggagaccggttacaggtgatttctgattttgacatgaccttgagcaggtttgcatataatggaaagcgatgcccttcttcttacaatattctggataatagcaagatcatcagtgaggagtgtcggaaagagctcacagcgctccttcaccactattacccaattgagatcgacccacaccggaccgtcaaggagaagctacctcatatggtggaatggtggaccaaagcgcacaatctcctatgtcagcagaagattcagaagtttcagatagcccaggtggttagagagtccaatgcaatgctcagggagggatataagaccttcttcaacacactctaccataacaacattccccttttcatcttttctgcgggcattggtgatatcctggaagaaattatccgacagatgaaagtgttccaccccaacatccacatcgtgtctaactacatggattttaatgaagatgtgagccaaatcctgtttgggctgggaaaggacgaggggtggggaccaccagccagggcagttaactctgcatgaaccctaacctggggaagaaggggagggaagccactctagcttcttcaccctcaggcagttgtttatgggttactttttggccaggcgcggtggctcagacctgtaatcctagcactttgggaggccgaggcgggcggatcacttgaggtcaggagttcgagaccagcctggccaacatggtgaaagtccatctgtactaaaaatacagaaataagccg

SEQ ID NO: 425942 - DNA, 1005 bp, Homo sapiens
ctccaggcgggaggcgacgcctgcgcagtgcggtcgcggggctgtcgttgtcccgcgagccgccgaccaggcctcgaacgggatggcagaggtgatttctgattttgacatgaccttgagcaggtttgcatataatggaaagcgatgcccttcttcttacaatattctggataatagcaagatcatcagtgaggagtgtcggaaagagctcacagcgctccttcaccactattacccaattgagatcgacccacaccggaccgtcaaggagaagctacctcatatggtggaatggtggaccaaagcgcacaatctcctatgtcagcagaagattcagaagtttcagatagcccaggtggttagagagtccaatgcaatgctcagggagggatataagaccttcttcaacacactctaccataacaacattccccttttcatcttttctgcgggcattggtgatatcctggaagaaattatccgacagatgaaagtgttccaccccaacatccacatcgtgtctaactacatggattttaatgaagatgtggaggagcggcgggagcgctacatggactcctatgacatcgtgctggagaaggacgagactctggatgtggtcaacgggctactgcagcacatcctgtgccagggggtccagctggagatgcaaggcccctgaaggcgcaggctccagcccggcctgcaggccgtggtgaggaggggcgcctccccagagtctgctcccccgtgaacacagagcagaggccagggtggccagcagtggctgggtccttccgcgcccctccgtcctcctttccctgagcaccttcatcaccagaggcttgaaggaaccccgccatgtggcagggcacaggcactgttcctggtgaaccttggaccacagcatgtcagtgctctagggattgtctactccagggattttcttcaaaatttttaaacatgggaagttcaaacaaatataatgtgtgaaacagatcaaaa

SEQ ID NO: 425943 - DNA, 799 bp, Homo sapiens
aacaagattaaaagacagatgacaaactaggaaaaaatttgtaaaacctgacagagggttttttgtctgatttttgggtatatatcttcatatacaaagcactcttaaaaactattaagaagtaatctctgaagacttccaatttccagtgtagcatgtaaggagctcagtaattgccacttggtcctgacaacaaataaataactgaacaaaatgaagaatagacaacacttcttagattcctcagataagtgaagtcacagggcaaaccacatcctccaaaactggagagacagacagctggatacagagaatcacaactactgaagcagaaaccgaggatcagaaacccctgagggaaccagtacccgggtaggaaaatctgagctgtaattgaggagttgctggaggctcagtgtggacaagtctgagacctaaaagctccagggagagccagtcctaaggaagcccccgtagttttgtgagatttacttcctggagctctaccaggtcctcacagtaaatatttgagaaaaatcctcttacgctgtcagctggagaagggagaagtgaaacattttgaaatacaccaaggtattctgttcttaacaaggcctgccctcaggagaaattatttctcttagaaccaaacctaactggggaatgggaaaaatgcagctccagtcaactctagccctccacatggagaaaaggaaattcctaactccacctccctctagacttccagttgtgggaagggaaataacttcagccctctccagccatccctgttccattt

SEQ ID NO: 425944 - DNA, 1722 bp, Homo sapiens
gaggtccgggatcctgggggtcctgcccgccgcccgccaggggtttggcccttcccctctgcggcgctagcctagaagagggtgggacgttctgggctcagggggtgggggacgtttgccggtcactgctgctggcgccctgactgttgccgtcctccagccccactcaaaggcatcccgaagcaggcgcccttcagaagccccacggcgcccagcgtcttcagccccacagggaaccggacccccatcccgccttccaggacgctgctgcggaaggaacgaggtgtgaagctgctggacatctctgagctggatatggttggcgctggccgagaggcgaagcggagaaggaagactctcgatgcggaggtggtggagaagccggccaaggaggaaacggtggtggagaacgccaccccggactacgcagccggcctggtgtccacgcagaaacttgggtccctgaacaatgagcctgcgctgccctccacgagctaccttccctccacgcccagcgtggttcccgcctcctcctacatccccagctccgagacgcccccagccccatcttcccgggaagccagccgcccaccagaggagcccagcgccccgagccccacgttgccagcgcagttcaagcagcgggcgcccatgtacaacagcggcctgagccctgccacacccacgcctgcggcgcccacctcgcctctgacacccaccacacctccggctgtcgcccctaccactcagacacccccggttgccatggtggccccgcagacccaggcccctgctcagcagcagcctaagaagaacctgtccctcacgagagagcagatgttcgctgcccaggagatgttcaagacggccaacaaagtcacgcggcccgagaaggccctcatcctgggcttcatggccggctcccgagagaacccgtgccaggagcagggggacgtgatccagatcaagctgagcgagcacacggaggacctgcccaaggcggacggccagggtagcacaaccatgctggtggacacagtgtttgagatgaactatgccacgggccagtggacgcgcttcaagaagtacaagcccatgaccaatgtgtcctagaaccacctgcctcacagctggccgtcacttgtgggggtccacgggacgatggctttgccagcttaaagtaaccggatggcggacacctggcccccgaggtcccccggccgccgccctgctgctgacccagcctgttttaagttctggatgcatttctctggggtatttggggcttatttttaaaattttaatatgggttcttttttgtgtgatttaagacactttttggactcaacgttacatttttgaatgtagtaagtaaattaaccaaaaaagttacaacttcctaattttagtgacagctctgcctgtttgttagactcttactttttaaaatcttttctattttccctcgctggggcagtgccctcctacccccagggttgaggggaccaaggtggcacggtggtactgggggtgcggcagggacacccgaccacaccagagcgtgggagacggtgggccttgtcccctgcctgtgcctgcctgggagttttgtattcatcttttgtatagttgtggacatttaagacagtctttgggtacctattttcattgtaaaactatctgaaccattaaagtcgagcttttctaaagaaagccaccata

SEQ ID NO: 425945 - DNA, 426 bp, Homo sapiens
tgggcgcatggcagaggcacaggcacgccatggcctggctctctgcgtttcctcgtgggagggggtttatgtggccgaagcaggccctggtgtggatggatctggcctcccaggtattgagggagcacggggtgcgcctgtttcctccacgcacgtcgcccatggcctccccaaggccctggcctcactccagatcccggggccacctccaggctccacgagcgccaactcccagcgccgtccagacccaggaccacaccagagcgtgggagacggtgggccttgtcccctgcctgtgcctgcctgggagttttgtattcatcttttgtatagttgtggacatttaagacagtctttgggtacctattttcattgtaaaactatctgaaccattaaagtcgagcttttctaaagaaagccaccata

SEQ ID NO: 425946 - DNA, 2235 bp, Homo sapiens
gcaggctggtactggccccgggtgttatggtcccccaagatggcgtccatgcgggagagcgacacgggcctgtggctgcacaacaagctgggggccacggacgagctgtgggcgccgcccagcatcgcgtccctgctcacggccgcggtcatcgacaacatccgtctctgcttccatggcctctcgtcggcagtgaagctcaagttgctactcgggacgctgcacctcccgcgccgcacggtggacgagatgaagggcgccctaatggagatcatccagctcgccagcctcgactcggacccctgggtgctcatggtcgccgacatcttgaagtcctttccggacacaggctcgcttaacctggagctggaggagcagaatcccaacgttcaggatattttgggagaacttagagaaaaggtgggtgagtgtgaagcgtctgccatgctgccactggagtgccagtacttgaacaaaaacgccctgacgaccctcgcgggacccctcactcccccggtgaagcattttcagttaaagcggaaacccaagagcgccacgctgcgggcggagctgctgcagaagtccacggagaccgcccagcagttgaagcggagcgccggggtgcccttccacgccaagggccgggggctgctgcggaagatggacaccaccaccccactcaaaggcatcccgaagcaggcgcccttcagaagccccacggcgcccagcgtcttcagccccacagggaaccggacccccatcccgccttccaggacgctgctgcggaaggaacgaggtgtgaagctgctggacatctctgagctggatatggttggcgctggccgagaggcgaagcggagaaggaagactctcgatgcggaggtggtggagaagccggccaaggaggaaacggtggtggagaacgccaccccggactacgcagccggcctggtgtccacgcagaaacttgggtccctgaacaatgagcctgcgctgccctccacgagctaccttccctccacgcccagcgtggttcccgcctcctcctacatccccagctccgagacgcccccagccccatcttcccgggaagccagccgcccaccagaggagcccagcgccccgagccccacgttgccagcgcagttcaagcagcgggcgcccatgtacaacagcggcctgagccctgccacacccacgcctgcggcgcccacctcgcctctgacacccaccacacctccggctgtcgcccctaccactcagacacccccggttgccatggtggccccgcagacccaggcccctgctcagcagcagcctaagaagaacctgtccctcacgagagagcagatgttcgctgcccaggagatgttcaagacggccaacaaagtcacgcggcccgagaaggccctcatcctgggcttcatggccggctcccgagagaacccgtgccaggagcagggggacgtgatccagatcaagctgagcgagcacacggaggacctgcccaaggcggacggccagggtagcacaaccatgctggtggacacagtgtttgagatgaactatgccacgggccagtggacgcgcttcaagaagtacaagcccatgaccaatgtgtcctagaaccacctgcctcacagctggccgtcacttgtgggggtccacgggacgatggctttgccagcttaaagtaaccggatggcggacacctggcccccgaggtcccccggccgccgccctgctgctgacccagcctgttttaagttctggatgcatttctctggggtatttggggcttatttttaaaattttaatatgggttcttttttgtgtgatttaagacactttttggactcaacgttacatttttgaatgtagtaagtaaattaaccaaaaaagttacaacttcctaattttagtgacagctctgcctgtttgttagactcttactttttaaaatcttttctattttccctcgctggggcagtgccctcctacccccagggttgaggggaccaaggtggcacggtggtactgggggtgcggcagggacacccgaccacaccagagcgtgggagacggtgggccttgtcccctgcctgtgcctgcctgggagttttgtattcatcttttgtatagttgtggacatttaagacagtctttgggtacctattttcattgtaaaactatctgaaccattaaagtcgagcttttctaaagaaagccaccata

SEQ ID NO: 425947 - DNA, 2158 bp, Homo sapiens
tagcgagggacgcgtaggtgtcttcataagatgccggggcagcggcgcgcgctttcccccaagatggcgtccatgcgggagagcgacacgggcctgtggctgcacaacaagctgggggccacggacgagctgtgggcgccgcccagcatcgcgtccctgctcacggccgcggtcatcgacaacatccgtctctgcttccatggcctctcgtcggcagtgaagctcaagttgctactcgggacgctgcacctcccgcgccgcacggtggacgagatgaagggcgccctaatggagatcatccagctcgccagcctcgactcggacccctgggtgctcatggtcgccgacatcttgaagtcctttccggacacaggctcgcttaacctggagctggaggagcagaatcccaacgttcaggatattttgggagaacttagagaaaaggcattttcagttaaagcggaaacccaagagcgccacgctgcgggcggagctgctgcagaagtccacggagaccgcccagcagttgaagcggagcgccggggtgcccttccacgccaagggccgggggctgctgcggaagatggacaccaccaccccactcaaaggcatcccgaagcaggcgcccttcagaagccccacggcgcccagcgtcttcagccccacagggaaccggacccccatcccgccttccaggacgctgctgcggaaggaacgaggtgtgaagctgctggacatctctgagctggatatggttggcgctggccgagaggcgaagcggagaaggaagactctcgatgcggaggtggtggagaagccggccaaggaggaaacggtggtggagaacgccaccccggactacgcagccggcctggtgtccacgcagaaacttgggtccctgaacaatgagcctgcgctgccctccacgagctaccttccctccacgcccagcgtggttcccgcctcctcctacatccccagctccgagacgcccccagccccatcttcccgggaagccagccgcccaccagaggagcccagcgccccgagccccacgttgccagcgcagttcaagcagcgggcgcccatgtacaacagcggcctgagccctgccacacccacgcctgcggcgcccacctcgcctctgacacccaccacacctccggctgtcgcccctaccactcagacacccccggttgccatggtggccccgcagacccaggcccctgctcagcagcagcctaagaagaacctgtccctcacgagagagcagatgttcgctgcccaggagatgttcaagacggccaacaaagtcacgcggcccgagaaggccctcatcctgggcttcatggccggctcccgagagaacccgtgccaggagcagggggacgtgatccagatcaagctgagcgagcacacggaggacctgcccaaggcggacggccagggtagcacaaccatgctggtggacacagtgtttgagatgaactatgccacgggccagtggacgcgcttcaagaagtacaagcccatgaccaatgtgtcctagaaccacctgcctcacagctggccgtcacttgtgggggtccacgggacgatggctttgccagcttaaagtaaccggatggcggacacctggcccccgaggtcccccggccgccgccctgctgctgacccagcctgttttaagttctggatgcatttctctggggtatttggggcttatttttaaaattttaatatgggttcttttttgtgtgatttaagacactttttggactcaacgttacatttttgaatgtagtaagtaaattaaccaaaaaagttacaacttcctaattttagtgacagctctgcctgtttgttagactcttactttttaaaatcttttctattttccctcgctggggcagtgccctcctacccccagggttgaggggaccaaggtggcacggtggtactgggggtgcggcagggacacccgaccacaccagagcgtgggagacggtgggccttgtcccctgcctgtgcctgcctgggagttttgtattcatcttttgtatagttgtggacatttaagacagtctttgggtacctattttcattgtaaaactatctgaaccattaaagtcgagcttttctaaagaaagccaccata

SEQ ID NO: 425948 - DNA, 1898 bp, Homo sapiens
cccgttcgtgtctcaggagtgtcccgcgggcaggaaggctgaggccggtgaactctcatgtgcctgcctgtgctttttctccagtgggtgagtgtgaagcgtctgccatgctgccactggagtgccagtacttgaacaaaaacgccctgacgaccctcgcgggacccctcactcccccggtgaagcattttcagttaaagcggaaacccaagagcgccacgctgcgggcggagctgctgcagaagtccacggagaccgcccagcagttgaagcggagcgccggggtgcccttccacgccaagggccgggggctgctgcggaagatggacaccaccaccccactcaaaggcatcccgaagcaggcgcccttcagaagccccacggcgcccagcgtcttcagccccacagggaaccggacccccatcccgccttccaggacgctgctgcggaaggaacgaggtgtgaagctgctggacatctctgagctggatatggttggcgctggccgagaggcgaagcggagaaggaagactctcgatgcggaggtggtggagaagccggccaaggaggaaacggtggtggagaacgccaccccggactacgcagccggcctggtgtccacgcagaaacttgggtccctgaacaatgagcctgcgctgccctccacgagctaccttccctccacgcccagcgtggttcccgcctcctcctacatccccagctccgagacgcccccagccccatcttcccgggaagccagccgcccaccagaggagcccagcgccccgagccccacgttgccagcgcagttcaagcagcgggcgcccatgtacaacagcggcctgagccctgccacacccacgcctgcggcgcccacctcgcctctgacacccaccacacctccggctgtcgcccctaccactcagacacccccggttgccatggtggccccgcagacccaggcccctgctcagcagcagcctaagaagaacctgtccctcacgagagagcagatgttcgctgcccaggagatgttcaagacggccaacaaagtcacgcggcccgagaaggccctcatcctgggcttcatggccggctcccgagagaacccgtgccaggagcagggggacgtgatccagatcaagctgagcgagcacacggaggacctgcccaaggcggacggccagggtagcacaaccatgctggtggacacagtgtttgagatgaactatgccacgggccagtggacgcgcttcaagaagtacaagcccatgaccaatgtgtcctagaaccacctgcctcacagctggccgtcacttgtgggggtccacgggacgatggctttgccagcttaaagtaaccggatggcggacacctggcccccgaggtcccccggccgccgccctgctgctgacccagcctgttttaagttctggatgcatttctctggggtatttggggcttatttttaaaattttaatatgggttcttttttgtgtgatttaagacactttttggactcaacgttacatttttgaatgtagtaagtaaattaaccaaaaaagttacaacttcctaattttagtgacagctctgcctgtttgttagactcttactttttaaaatcttttctattttccctcgctggggcagtgccctcctacccccagggttgaggggaccaaggtggcacggtggtactgggggtgcggcagggacacccgaccacaccagagcgtgggagacggtgggccttgtcccctgcctgtgcctgcctgggagttttgtattcatcttttgtatagttgtggacatttaagacagtctttgggtacctattttcattgtaaaactatctgaaccattaaagtcgagcttttctaaagaaagccaccata

SEQ ID NO: 425949 - DNA, 1436 bp, Homo sapiens
tagcgagggacgcgtaggtgtcttcataagatgccggggcagcggcgcgcgctttcccccaagatggcgtccatgcgggagagcgacacgggcctgtggctgcacaacaagctgggggccacggacgagctgtgggcgccgcccagcatcgcgtccctgctcacggccgcggtcatcgacaacatccgtctctgcttccatggcctctcgtcggcagtgaagctcaagttgctactcgggacgctgcacctcccgcgccgcacggtggacgagatgaagggcgccctaatggagatcatccagctcgccagcctcgactcggacccctgggtgctcatggtcgccgacatcttgaagtcctttccggacacaggctcgcttaacctggagctggaggagcagaatcccaacgttcaggatattttgggagaacttagagaaaaggtgggtgagtgtgaagcgtctgccatgctgccactggagtgccagtacttgaacaaaaacgccctgacgaccctcgcgggacccctcactcccccggtgaagcattttcagttaaagcggaaacccaagagcgccacgctgcgggcggagctgctgcagaagtccacggagaccgcccagcagttgaagcggagcgccggggtgcccttccacgccaagggccgggggctgctgcggaagatggacaccaccaccccactcaaaggcatcccgaagcaggcgcccttcagaagccccacggcgcccagcgtcttcagccccacagggaaccggacccccatcccgccttccaggacgctgctgcggaaggaacgaggtgtgaagctgctggacatctctgagctggatatggttggcgctggccgagaggcgaagcggagaaggaagactctcgatgcggaggtggtggagaagccggccaaggaggaaacggtggtggagaacgccaccccggactacgcagccggcctggtgtccacgcagaaacttgggtccctgaacaatgagcctgcgctgccctccacgagctaccttccctccacgcccagcgtggttcccgcctcctcctacatccccagctccgagacgcccccagccccatcttcccgggaagccagccgcccaccagaggagcccagcgccccgagccccacgttgccagcgcagttcaagcagcgggcgcccatgtacaacagcggcctgagccctgccacacccacgcctgcggcgcccacctcgcctctgacacccaccacacgaccacaccagagcgtgggagacggtgggccttgtcccctgcctgtgcctgcctgggagttttgtattcatcttttgtatagttgtggacatttaagacagtctttgggtacctattttcattgtaaaactatctgaaccattaaagtcgagcttttctaaagaaagccaccata

SEQ ID NO: 425950 - DNA, 1072 bp, Homo sapiens
  misc_feature (892)..(892): n is a, c, g, or t
  misc_feature (896)..(898): n is a, c, g, or t
  misc_feature (903)..(903): n is a, c, g, or t
  misc_feature (908)..(908): n is a, c, g, or t
  misc_feature (912)..(912): n is a, c, g, or t
  misc_feature (918)..(918): n is a, c, g, or t
  misc_feature (925)..(925): n is a, c, g, or t
  misc_feature (927)..(927): n is a, c, g, or t
  misc_feature (929)..(930): n is a, c, g, or t
  misc_feature (932)..(932): n is a, c, g, or t
  misc_feature (942)..(943): n is a, c, g, or t
  misc_feature (945)..(945): n is a, c, g, or t
  misc_feature (947)..(947): n is a, c, g, or t
tagcgagggacgcgtaggtgtcttcataagatgccggggcagcggcgcgcgctttcccccaagatggcgtccatgcgggagagcgacacgggcctgtggctgcacaacaagctgggggccacggacgagctgtgggcgccgcccagcatcgcgtccctgctcacggccgcggtcatcgacaacatccgtctctgcttccatggcctctcgtcggcagtgaagctcaagttgctactcgggacgctgcacctcccgcgccgcacggtggacgagatgaagggcgccctaatggagatcatccagctcgccagcctcgactcggacccctgggtgctcatggtcgccgacatcttgaagtcctttccggacacaggctcgcttaacctggagctggaggagcagaatcccaacgttcaggatattttgggagaacttagagaaaaggtgggtgagtgtgaagcgtctgccatgctgccactggagtgccagtacttgaacaaaaacgccctgacgaccctcgcgggacccctcactcccccggtgaagcattttcagttaaagcggaaacccaagagcgccacgctgcgggcggagctgctgcagaagtccacggagaccgcccagcagttgaagcggagcgccggggtgcccttccacgccaagggccgggggctgctgcggaagatggacaccaccaccccactcaaaggcatcccgaagcaggcgcccttcagaagccccacggcgcccagcgtcttcagccccacagggaaccggacccccatcccgccttccaggacgctgctgcggaaggaacgaggtgtgaagctgctggacatctctgagctggatatggttggcgctggccgagaggcgaacgggaaagagaccncgannngaggnggggngaancggcangaggaangngnngnaacccccggnngnancggcggcaccaaatggccgaaagacggcggccaagaaacccacccgggcggccccaacaacagaccacgacgggaccaagaccgcccccgccgacggcccacgcacacacaccccacacacaacc

SEQ ID NO: 425951 - DNA, 683 bp, Homo sapiens
gcggccgcctactactactactgctcgaattcaagcttctaacgatgtacgggcccatgaccaatgtgtcctagaaccacctgcctcacagctggccgtcacttgtgggggtccacgggacgatggctttgccagcttaaagtaaccggatggcggacacctggcccccgaggtcccccggccgccgccctgctgctgacccagcctgttttaagttctggatgcatttctctggggtatttggggcttatttttaaaattttaatatgggttcttttttgtgtgatttaagacactttttggactcaacgttacatttttgaatgtagtaagtaaattaaccaaaaaagttacaacttcctaattttagtgacagctctgcctgtttgttagactcttactttttaaaatcttttctattttccctcgctggggcagtgccctcctacccccagggttgaggggaccaaggtggcacggtggtactgggggtgcggcagggacacccgaccacaccagagcgtgggagacggtgggccttgtcccctgcctgtgcctgcctgggagttttgtattcatcttttgtatagttgtggacatttaagacagtctttgggtacctattttcattgtaaaactatctgaaccattaaagtcgagcttttctaaagaaagccaccata

SEQ ID NO: 425952 - DNA, 261 bp, Homo sapiens
ctaactgaggagggtgtggggctgggcagccgccagctcctctcagccgggaggtctgcggcctgggcgcccctaacttcatgtggttcttaccggcagtgggtgagtgtgaagcgtctgccatgctgccactggagtgccagtacttgaacaaaaacgccctgacgaccctcgcgggacccctcactcccccggtgaagcattttcagttaaagcggaaacccaagagcgccacgctgcgggcggagctgctgcagaagt

SEQ ID NO: 425953 - DNA, 2259 bp, Homo sapiens
tagcgagggacgcgtaggtgtcttcataagatgccggggcagcggcgcgcgctttcccccaagatggcgtccatgcgggagagcgacacgggcctgtggctgcacaacaagctgggggccacggacgagctgtgggcgccgcccagcatcgcgtccctgctcacggccgcggtcatcgacaacatccgtctctgcttccatggcctctcgtcggcagtgaagctcaagttgctactcgggacgctgcacctcccgcgccgcacggtggacgagatgaagggcgccctaatggagatcatccagctcgccagcctcgactcggacccctgggtgctcatggtcgccgacatcttgaagtcctttccggacacaggctcgcttaacctggagctggaggagcagaatcccaacgttcaggatattttgggagaacttagagaaaaggtgggtgagtgtgaagcgtctgccatgctgccactggagtgccagtacttgaacaaaaacgccctgacgaccctcgcgggacccctcactcccccggtgaagcattttcagttaaagcggaaacccaagagcgccacgctgcgggcggagctgctgcagaagtccacggagaccgcccagcagttgaagcggagcgccggggtgcccttccacgccaagggccgggggctgctgcggaagatggacaccaccaccccactcaaaggcatcccgaagcaggcgcccttcagaagccccacggcgcccagcgtcttcagccccacagggaaccggacccccatcccgccttccaggacgctgctgcggaaggaacgaggtgtgaagctgctggacatctctgagctggatatggttggcgctggccgagaggcgaagcggagaaggaagactctcgatgcggaggtggtggagaagccggccaaggaggaaacggtggtggagaacgccaccccggactacgcagccggcctggtgtccacgcagaaacttgggtccctgaacaatgagcctgcgctgccctccacgagctaccttccctccacgcccagcgtggttcccgcctcctcctacatccccagctccgagacgcccccagccccatcttcccgggaagccagccgcccaccagaggagcccagcgccccgagccccacgttgccagcgcagttcaagcagcgggcgcccatgtacaacagcggcctgagccctgccacacccacgcctgcggcgcccacctcgcctctgacacccaccacacctccggctgtcgcccctaccactcagacacccccggttgccatggtggccccgcagacccaggcccctgctcagcagcagcctaagaagaacctgtccctcacgagagagcagatgttcgctgcccaggagatgttcaagacggccaacaaagtcacgcggcccgagaaggccctcatcctgggcttcatggccggctcccgagagaacccgtgccaggagcagggggacgtgatccagatcaagctgagcgagcacacggaggacctgcccaaggcggacggccagggtagcacaaccatgctggtggacacagtgtttgagatgaactatgccacgggccagtggacgcgcttcaagaagtacaagcccatgaccaatgtgtcctagaaccacctgcctcacagctggccgtcacttgtgggggtccacgggacgatggctttgccagcttaaagtaaccggatggcggacacctggcccccgaggtcccccggccgccgccctgctgctgacccagcctgttttaagttctggatgcatttctctggggtatttggggcttatttttaaaattttaatatgggttcttttttgtgtgatttaagacactttttggactcaacgttacatttttgaatgtagtaagtaaattaaccaaaaaagttacaacttcctaattttagtgacagctctgcctgtttgttagactcttactttttaaaatcttttctattttccctcgctggggcagtgccctcctacccccagggttgaggggaccaaggtggcacggtggtactgggggtgcggcagggacacccgaccacaccagagcgtgggagacggtgggccttgtcccctgcctgtgcctgcctgggagttttgtattcatcttttgtatagttgtggacatttaagacagtctttgggtacctattttcattgtaaaactatctgaaccattaaagtcgagcttttctaaagaaagccaccata

SEQ ID NO: 425954 - DNA, 2240 bp, Homo sapiens
  misc_feature (18)..(18): n is a, c, g, or t
  misc_feature (24)..(24): n is a, c, g, or t
tcggtctaggtcgaggcnggtgtnaatcggccgagtcccccaagatggcgtccatgcgggagagcgacacgggcctgtggctgcacaacaagctgggggccacggacgagctgtgggcgccgcccagcatcgcgtccctgctcacggccgcggtcatcgacaacatccgtctctgcttccatggcctctcgtcggcagtgaagctcaagttgctactcgggacgctgcacctcccgcgccgcacggtggacgagatgaagggcgccctaatggagatcatccagctcgccagcctcgactcggacccctgggtgctcatggtcgccgacatcttgaagtcctttccggacacaggctcgcttaacctggagctggaggagcagaatcccaacgttcaggatattttgggagaacttagagaaaaggtgggtgagtgtgaagcgtctgccatgctgccactggagtgccagtacttgaacaaaaacgccctgacgaccctcgcgggacccctcactcccccggtgaagcattttcagttaaagcggaaacccaagagcgccacgctgcgggcggagctgctgcagaagtccacggagaccgcccagcagttgaagcggagcgccggggtgcccttccacgccaagggccgggggctgctgcggaagatggacaccaccaccccactcaaaggcatcccgaagcaggcgcccttcagaagccccacggcgcccagcgtcttcagccccacagggaaccggacccccatcccgccttccaggacgctgctgcggaaggaacgaggtgtgaagctgctggacatctctgagctggatatggttggcgctggccgagaggcgaagcggagaaggaagactctcgatgcggaggtggtggagaagccggccaaggaggaaacggtggtggagaacgccaccccggactacgcagccggcctggtgtccacgcagaaacttgggtccctgaacaatgagcctgcgctgccctccacgagctaccttccctccacgcccagcgtggttcccgcctcctcctacatccccagctccgagacgcccccagccccatcttcccgggaagccagccgcccaccagaggagcccagcgccccgagccccacgttgccagcgcagttcaagcagcgggcgcccatgtacaacagcggcctgagccctgccacacccacgcctgcggcgcccacctcgcctctgacacccaccacacctccggctgtcgcccctaccactcagacacccccggttgccatggtggccccgcagacccaggcccctgctcagcagcagcctaagaagaacctgtccctcacgagagagcagatgttcgctgcccaggagatgttcaagacggccaacaaagtcacgcggcccgagaaggccctcatcctgggcttcatggccggctcccgagagaacccgtgccaggagcagggggacgtgatccagatcaagctgagcgagcacacggaggacctgcccaaggcggacggccagggtagcacaaccatgctggtggacacagtgtttgagatgaactatgccacgggccagtggacgcgcttcaagaagtacaagcccatgaccaatgtgtcctagaaccacctgcctcacagctggccgtcacttgtgggggtccacgggacgatggctttgccagcttaaagtaaccggatggcggacacctggcccccgaggtcccccggccgccgccctgctgctgacccagcctgttttaagttctggatgcatttctctggggtatttggggcttatttttaaaattttaatatgggttcttttttgtgtgatttaagacactttttggactcaacgttacatttttgaatgtagtaagtaaattaaccaaaaaagttacaacttcctaattttagtgacagctctgcctgtttgttagactcttactttttaaaatcttttctattttccctcgctggggcagtgccctcctacccccagggttgaggggaccaaggtggcacggtggtactgggggtgcggcagggacacccgaccacaccagagcgtgggagacggtgggccttgtcccctgcctgtgcctgcctgggagttttgtattcatcttttgtatagttgtggacatttaagacagtctttgggtacctattttcattgtaaaactatctgaaccattaaagtcgagcttttctaaagaaagccaccata

SEQ ID NO: 425955 - DNA, 2219 bp, Homo sapiens
tagcgagggacgcgtaggtgtcttcataagatgccggggcagcggcgcgcgctttcccccaagatggcgtccatgcgggagagcgacacgggcctgtggctgcacaacaagctgggggccacggacgagctgtgggcgccgcccagcatcgcgtccctgctcacggccgcggtcatcgacaacatccgtctctgcttccatggcctctcgtcggcagtgaagctcaagttgctactcgggacgctgcacctcccgcgccgcacggtggacgagatgaagggcgccctaatggagatcatccagctcgccagcctcgactcggacccctgggtgctcatggtcgccgacatcttgaagtcctttccggacacaggctcgcttaacctggagctggaggagcagaatcccaacgttcaggatattttgggagaacttagagaaaaggtgggtgagtgtgaagcgtctgccatgctgccactggagtgccagtacttgaacaaaaacgccctgacgaccctcgcgggacccctcactcccccggtgaagcattttcagttaaagcggaaacccaagagcgccacgctgcgggcggagctgctgcagaagtccacggagaccgcccagcagttgaagcggagcgccggggtgcccttccacgccaagggccgggggctgctgcggaagatggacaccaccaccccacggcgcccagcgtcttcagccccacagggaaccggacccccatcccgccttccaggacgctgctgcggaaggaacgaggtgtgaagctgctggacatctctgagctggatatggttggcgctggccgagaggcgaagcggagaaggaagactctcgatgcggaggtggtggagaagccggccaaggaggaaacggtggtggagaacgccaccccggactacgcagccggcctggtgtccacgcagaaacttgggtccctgaacaatgagcctgcgctgccctccacgagctaccttccctccacgcccagcgtggttcccgcctcctcctacatccccagctccgagacgcccccagccccatcttcccgggaagccagccgcccaccagaggagcccagcgccccgagccccacgttgccagcgcagttcaagcagcgggcgcccatgtacaacagcggcctgagccctgccacacccacgcctgcggcgcccacctcgcctctgacacccaccacacctccggctgtcgcccctaccactcagacacccccggttgccatggtggccccgcagacccaggcccctgctcagcagcagcctaagaagaacctgtccctcacgagagagcagatgttcgctgcccaggagatgttcaagacggccaacaaagtcacgcggcccgagaaggccctcatcctgggcttcatggccggctcccgagagaacccgtgccaggagcagggggacgtgatccagatcaagctgagcgagcacacggaggacctgcccaaggcggacggccagggtagcacaaccatgctggtggacacagtgtttgagatgaactatgccacgggccagtggacgcgcttcaagaagtacaagcccatgaccaatgtgtcctagaaccacctgcctcacagctggccgtcacttgtgggggtccacgggacgatggctttgccagcttaaagtaaccggatggcggacacctggcccccgaggtcccccggccgccgccctgctgctgacccagcctgttttaagttctggatgcatttctctggggtatttggggcttatttttaaaattttaatatgggttcttttttgtgtgatttaagacactttttggactcaacgttacatttttgaatgtagtaagtaaattaaccaaaaaagttacaacttcctaattttagtgacagctctgcctgtttgttagactcttactttttaaaatcttttctattttccctcgctggggcagtgccctcctacccccagggttgaggggaccaaggtggcacggtggtactgggggtgcggcagggacacccgaccacaccagagcgtgggagacggtgggccttgtcccctgcctgtgcctgcctgggagttttgtattcatcttttgtatagttgtggacatttaagacagtctttgggtacctattttcattgtaaaactatctgaaccattaaagtcgagcttttctaaagaaagccaccata

SEQ ID NO: 425956 - DNA, 1901 bp, Homo sapiens
gcaggctggtactggccccgggtgttatggtcccccaagatggcgtccatgcgggagagcgacacgggcctgtggctgcacaacaagctgggggccacggacgagctgtgggcgccgcccagcatcgcgtccctgctcacggccgcggtcatcgacaacatccgtctctgcttccatggcctctcgtcggcagtgaagctcaagttgctactcgggacgctgcacctcccgcgccgcacggtggacgagccacggagaccgcccagcagttgaagcggagcgccggggtgcccttccacgccaagggccgggggctgctgcggaagatggacaccaccaccccactcaaaggcatcccgaagcaggcgcccttcagaagccccacggcgcccagcgtcttcagccccacagggaaccggacccccatcccgccttccaggacgctgctgcggaaggaacgaggtgtgaagctgctggacatctctgagctggatatggttggcgctggccgagaggcgaagcggagaaggaagactctcgatgcggaggtggtggagaagccggccaaggaggaaacggtggtggagaacgccaccccggactacgcagccggcctggtgtccacgcagaaacttgggtccctgaacaatgagcctgcgctgccctccacgagctaccttccctccacgcccagcgtggttcccgcctcctcctacatccccagctccgagacgcccccagccccatcttcccgggaagccagccgcccaccagaggagcccagcgccccgagccccacgttgccagcgcagttcaagcagcgggcgcccatgtacaacagcggcctgagccctgccacacccacgcctgcggcgcccacctcgcctctgacacccaccacacctccggctgtcgcccctaccactcagacacccccggttgccatggtggccccgcagacccaggcccctgctcagcagcagcctaagaagaacctgtccctcacgagagagcagatgttcgctgcccaggagatgttcaagacggccaacaaagtcacgcggcccgagaaggccctcatcctgggcttcatggccggctcccgagagaacccgtgccaggagcagggggacgtgatccagatcaagctgagcgagcacacggaggacctgcccaaggcggacggccagggtagcacaaccatgctggtggacacagtgtttgagatgaactatgccacgggccagtggacgcgcttcaagaagtacaagcccatgaccaatgtgtcctagaaccacctgcctcacagctggccgtcacttgtgggggtccacgggacgatggctttgccagcttaaagtaaccggatggcggacacctggcccccgaggtcccccggccgccgccctgctgctgacccagcctgttttaagttctggatgcatttctctggggtatttggggcttatttttaaaattttaatatgggttcttttttgtgtgatttaagacactttttggactcaacgttacatttttgaatgtagtaagtaaattaaccaaaaaagttacaacttcctaattttagtgacagctctgcctgtttgttagactcttactttttaaaatcttttctattttccctcgctggggcagtgccctcctacccccagggttgaggggaccaaggtggcacggtggtactgggggtgcggcagggacacccgaccacaccagagcgtgggagacggtgggccttgtcccctgcctgtgcctgcctgggagttttgtattcatcttttgtatagttgtggacatttaagacagtctttgggtacctattttcattgtaaaactatctgaaccattaaagtcgagcttttctaaagaaagccaccata

SEQ ID NO: 425957 - DNA, 1627 bp, Homo sapiens
tagcgagggacgcgtaggtgtcttcataagatgccggggcagcggcgcgcgctttcccccaagatggcgtccatgcgggagagcgacacgggcctgtggctgcacaacaagctgggggccacggacgagctgtgggcgccgcccagcatcgcgtccctgctcacggccgcggtcatcgacaacatccgtctctgcttccatggcctctcgtcggcagtgaagctcaagttgctactcgggacgctgcacctcccgcgccgcacggtggacgagatgaagggcgccctaatggagatcatccagctcgccagcctcgactcggacccctgggtgctcatggtcgccgacatcttgaagtcctttccggacacaggctcgcttaacctggagctggaggagcagaatcccaacgttcaggatattttgggagaacttagagaaaaggtgggtgagtgtgaagcgtctgccatgctgccactggagtgccagtacttgaacaaaaaagcccagcgccccgagccccacgttgccagcgcagttcaagcagcgggcgcccatgtacaacagcggcctgagccctgccacacccacgcctgcggcgcccacctcgcctctgacacccaccacacctccggctgtcgcccctaccactcagacacccccggttgccatggtggccccgcagacccaggcccctgctcagcagcagcctaagaagaacctgtccctcacgagagagcagatgttcgctgcccaggagatgttcaagacggccaacaaagtcacgcggcccgagaaggccctcatcctgggcttcatggccggctcccgagagaacccgtgccaggagcagggggacgtgatccagatcaagctgagcgagcacacggaggacctgcccaaggcggacggccagggtagcacaaccatgctggtggacacagtgtttgagatgaactatgccacgggccagtggacgcgcttcaagaagtacaagcccatgaccaatgtgtcctagaaccacctgcctcacagctggccgtcacttgtgggggtccacgggacgatggctttgccagcttaaagtaaccggatggcggacacctggcccccgaggtcccccggccgccgccctgctgctgacccagcctgttttaagttctggatgcatttctctggggtatttggggcttatttttaaaattttaatatgggttcttttttgtgtgatttaagacactttttggactcaacgttacatttttgaatgtagtaagtaaattaaccaaaaaagttacaacttcctaattttagtgacagctctgcctgtttgttagactcttactttttaaaatcttttctattttccctcgctggggcagtgccctcctacccccagggttgaggggaccaaggtggcacggtggtactgggggtgcggcagggacacccgaccacaccagagcgtgggagacggtgggccttgtcccctgcctgtgcctgcctgggagttttgtattcatcttttgtatagttgtggacatttaagacagtctttgggtacctattttcattgtaaaactatctgaaccattaaagtcgagcttttctaaagaaagccaccata

SEQ ID NO: 425958 - DNA, 847 bp, Homo sapiens
gcaggctggtactggccccgggtgttatggtcccccaagatggcgtccatgcgggagagcgacacgggcctgtggctgcacaacaagctgggggccacggacgagctgtgggcgccgcccagcatcgcgtccctgctcacggccgcggtcatcgacaacatccgtctctgcttccatggcctctcgtcggcagtgaagctcaagttgctactcgggacgctgcacctcccgcgccgcacggtggacgagaccccggccgtccggagcgctctgtgtccgttttactcttttctacacgccgttttgcgtcattccaataagtgggtgtgtgagggtctggcgctgtcaaccaggctggagtgcagtggcaccatcgtgactcactgcagccttgacctcctcacctcagatcttcccatctcagcctcctgagtagctgggactacagggtttcaccatgctgcccaggctggtcttgaactcctgacctcaagcaatctgcttgcctcagcctcctgaagggctgggattacagagtcttgccctgtcgccaggctggagtgcagtggcgcgatctcggctcaccacaacctgcgcctcccaggttcaagggattctcctgcctcagcctcccgagtagctgggactagagacacgcgccaccatgcccagctaattagctaatttttgtatttttagtggagacgtggtttcaccgtgttggccaggatggtctccatctcttgaccttgtgatccacctgccttggcctcccaaagtgctgggattacaggcatgagccactgctcccggcctttatttcttcttttaaaaaaaaaaaaaaaaa

SEQ ID NO: 425959 - DNA, 1710 bp, Homo sapiens
ctatgttgccgcccaggctggtctcaaattcctatgctcaaatgatcctcctgccttggcctcccaaagtgctgggattataggcatcagccactgtgcttggcctagcctagcattctctaaacaggtggttagaagcggtggataccaggcttctgacgatcaaattgtaaaaaaaggggtcaggtgttatctccagactgtggaattagattgtagtagaatatattttacctacaaacattttgacctcacccaagagtaaggctctcttttttttcttttttaatgaaaaaagaaaggagaatatttgctatcttatcttaaaaaaatagatccttaggtgattacaattttaaaataagaattgagagcccttactatgcacagtcctttaagttcataaagcttgatcccaactctgggagatggggcaggacaggtgttaatgtccctgcctttagcagatgaagaaaccaggctctgagaggagaagctacttgcccaaggcctgaaggcctctgaaagaggagcagagctcagggcacctggccctccttggtcccctctctactccacggtgctgctactcagggtcatctcaaaactatgtaaaggcagatgttgccaatccacaggcttcagggactcttatcaagactcatcccaacttttaaggcacactttcacaccgctcacattgtgcattacattttggagtccttgttggaagtgaactttccgcctgtaagcctgccattccatgtctaatatattgggatggcatcaccttctgtactatgcagcagaaggagactggcctgggattctggaaacatgagatccatttgcatattaatccccggctcgctgtgtgaccctgagcaagtctccttcactttctgtgcctcagtgtccttatttgagtaaaaagggaataaaactagatgagtggttttcaaactttaaaacactggaagctctctttgaaaacaaaagatgagaattgaaatggatggcactggaagctgttcttgtctactggggtttggagctgccaggggacctgctcacatccactcctcactcagcccctcccgcccctcccttctccacgcactgtgactgacttccatgtgtgaaggcctgcagttaattctcctgtgtcttgaatggttgggagatgagttggtcagacccttagtgaaatgatgtgggaaggaacaggaatgctgtggctctgaagaaggtagtagaacatcccacacctgctaataagcacattttgcaaactcagttgactcacctcagatttgcctagtgaaaactgaagggctggatgtagacccagagagcagggtggacagagcccatgctggaagtactgagcatcaggactgtatggggctggctttagcatcatcattctgtgcaaagacaaaataattaatgtcacactgtctgaaattttcaccaaaaccaaaaaggcgcattaacatgattgttccaacctcatggtttttcaagtgtgagcgcccagagacctcttcagaggctaagagagcatgcgctgccacagctgttagcatttggagacgtaattacaatgcccccactccccgcaccaaacctgggtttttctaccgtttttgtagatgtcatgatgtcacgacccctgcaccctgaaaaaaataaatgtttttaaggaca

SEQ ID NO: 425960 - DNA, 3538 bp, Homo sapiens
cctctccccaaaagaaccgacaatcagatgaaaacaacttaaaagaccctgggggctccgagttcgactcgatcagcaaaaacacatgggctcctgctcctgacacatgggctcctgctcctgaccaaactgagcaagaccagaatagactgtcacagaactctgtaaatctgtctcccagcagtcacgcaaacaacttatcagtagtgacttacagtaaggggctccatgggccttaccccttcggccagtcttaaacgggtgtcagcaagaagaaaaattaacaaaagacagaaggcctgactttggggggttagggcaaggggttcctctggattgcagaccacatcgcacagacccctggctctgaccccctctcatcccggaagaagaggaagaagcagaacagactagttttgagtaaactcagtatgcatgtgtgaatgctgaatcacaggaatggtgttgaggctaccaagaagaaatccatgcagccactttgggttttgttataggcatcagtctaacaagtcattaggtcactcgggaagggggaaaaagtttaaaatgggggaaaaaaagccatctttttaaacaaaaattattttgcctacagaaaggttgtagttttgagcacatgttaatttttttccctctttccccacttttatttttttaaataagggataacatattctttatagaatagtgcttgttctggaagagattcaggtgaaaagttggcgtggcatgtttgaggactctgcggatcagtgctacaggagtacatctgccctgccacatgactccagaagtctctgaccccatttgtttttaatggcatcagccaatgagttatcacccttttcctcctcttttctctttaatcttctgttgatttacacctttgacatttgtattcgtcaaccctgtggcttgttagcatcagaacctctctgaagaccaaacttccctgtgtggccagcagaggaagccttgaggatagatctcgggtgacgtgggattttctaagcctgagaggtgtccttctgcacacccttgtaacaattaaaattgcttttcttccatgtttctcttggcagagagaaatgccatcatgcttactgctcttttggattcttcatgcagtggcttcccatttgctctgggaacagtgcctctgtgctggttatatgtatgcaccacatgtgcacacacgggtgtcggtgcaactcaccagcaggtgtgcagtaggcaagcttgaaggtggcccatgcttctctgttgtcacacaacacctttccctgtttctcttcagttgtcctctgatattttcacagcctgttagtggcggctgatctgtagaggtatgaaaatacagccccaaagggggaatttgtcatggggaagggccagccactgactacttgatcttggagaccacatttagatggaaatgagaggacctccacagccccgcctccctgccaggatgctagattattggctgggaggtgggcaagtggcagcccagctgaagcaagaggctgattgactggctgctcactcaggcaggtggcctgccctggcatcctgtagattctgagcaggttgagatgtggatatctccatgggaagcttgaaccaggctagaacagctgtctgccaaagatacaagaatatgcaaagtccctcttacccccctccttccctcaagtcttagttggtttgagagccagggatatggatccagggtgctgttgcagggtcacctgcctgttaccacacccccatccagctgggtggtgggtgagggtgtgagacaggcagggagaccaggtaatgagtggctgcaaggagtcatatagcctgggtgtgggtgagggtctgcctgcctgtttctgtctgggtgtctgagttccaaaaaatgtgtgttgtttgttcctcctcatcctcttctgagactgttgtttttttagagcttgattgtgggagaaaagcttgtgtgaaattccctcttcacctccccaccccccaaaaaataaaagggggcataaactttattccactggagaagccctgggggtggctggagccagcctgctgagaagcgtggtgcagctgggtctgggacttcactagagcttactctggagcacctattttctgtgcacatgggagtgctccactccctagcagagcagagggaagtctctgccaggtacccacgccacaggcctcaggatggctttttgtctgagggcctcattaggcccagactgctgctgctggtaccagtctcctgagacactgcctccctggagcccatgcatgcccagctgttcttactgcttagtagccttgaagcagcacatctccactgtccctggcaggattgtgggaggcttcacaacccctgctttcctgacttcctcttctgcccaacactgggtgccccttcccagtttcccagcaggggcttcatgggccaccgtcagtgggtctgggcctgccagagtcgtcttgctcttcctcttgcttctaggcaaccacacttggcaagttaaatgtcccaagcaccttgtctcccttcccaagaacaaaccatttctgtgcacatccttggaggcgagatgagctccttgcagagggccagagtaagtgcaagtcatggagtgcaggcagaggggtccatggcttccccagcccagggagggtatcagtatcattcattctctctcccctcactggtatgggttcagagcaatgcctagggcccctctctgctcccctgcctagtggggtggtagtggctacctctcagccccaatagtccctgctcctcttagaatcttcaccaagtggcaggccacctctgggcaggaccacctgcgtctggcacccaggaggtgaggcagacaccatggttaggtgatagggtctgaacccagttggggagacagaggggttcagacttgggaagaatctgtcagtgtgcatggagtgaggtgtgtgtgtgtggatggatgtgcacgtgtgcatgctttttttctttttgccgtgaggacagttgaatttggggcatttttctacaagaagcagtcagccttctctcccccataaggactggctgtaaccttaagcccatcaaagttacttccagcctggagagaacctcaccaaacagctggtgtggcctgagggtggccatggtgggaaatgggcatgagaataaatacctccccaaattcaatctgagcccagcaggagaggatggtagggttgccagggctcagaagtgcaagctgattactcaccccaccctgcctcgccgcacctttcctttgtttccttgggtgaatgcaggagcagcagtggctgcccttcccacctggacagtggtgtgtgtagaaagccagctggatgtttgtggtggggcctcatggtgcctaggaggagataaagatgaggaggtttttccttattgtataaatgaatatttgtatgattaaattaacacacacacccaaaaaagctg

SEQ ID NO: 425961 - DNA, 3392 bp, Homo sapiens
  misc_feature (1)..(1): n is a, c, g, or t
nctcaagtgactcgtaagcgatcccggatcagcacgcgctatcaatcttatcagttcttgacttggaataacgctgggctccatgggccttaccccttcggccagtcttaaacgggtgtcagcaagaagaaaaattaacaaaagacagaaggcctgactttggggggttagggcaaggggttcctctggattgcagaccacatcgcacagacccctggctctgaccccctctcatcccggaagaagaggaagaagcagaacagactagttttgagtaaactcagtatgcatgtgtgaatgctgaatcacaggaatggtgttgaggctaccaagaagaaatccatgcagccactttgggttttgttataggcatcagtctaacaagtcattaggtcactcgggaagggggaaaaagtttaaaatgggggaaaaaaagccatctttttaaacaaaaattattttgcctacagaaaggttgtagttttgagcacatgttaatttttttccctctttccccacttttatttttttaaataagggataacatattctttatagaatagtgcttgttctggaagagattcaggtgaaaagttggcgtggcatgtttgaggactctgcggatcagtgctacaggagtacatctgccctgccacatgactccagaagtctctgaccccatttgtttttaatggcatcagccaatgagttatcacccttttcctcctcttttctctttaatcttctgttgatttacacctttgacatttgtattcgtcaaccctgtggcttgttagcatcagaacctctctgaagaccaaacttccctgtgtggccagcagaggaagccttgaggatagatctcgggtgacgtgggattttctaagcctgagaggtgtccttctgcacacccttgtaacaattaaaattgcttttcttccatgtttctcttggcagagagaaatgccatcatgcttactgctcttttggattcttcatgcagtggcttcccatttgctctgggaacagtgcctctgtgctggttatatgtatgcaccacatgtgcacacacgggtgtcggtgcaactcaccagcaggtgtgcagtaggcaagcttgaaggtggcccatgcttctctgttgtcacacaacacctttccctgtttctcttcagttgtcctctgatattttcacagcctgttagtggcggctgatctgtagaggtatgaaaatacagccccaaagggggaatttgtcatggggaagggccagccactgactacttgatcttggagaccacatttagatggaaatgagaggacctccacagccccgcctccctgccaggatgctagattattggctgggaggtgggcaagtggcagcccagctgaagcaagaggctgattgactggctgctcactcaggcaggtggcctgccctggcatcctgtagattctgagcaggttgagatgtggatatctccatgggaagcttgaaccaggctagaacagctgtctgccaaagatacaagaatatgcaaagtccctcttacccccctccttccctcaagtcttagttggtttgagagccagggatatggatccagggtgctgttgcagggtcacctgcctgttaccacacccccatccagctgggtggtgggtgagggtgtgagacaggcagggagaccaggtaatgagtggctgcaaggagtcatatagcctgggtgtgggtgagggtctgcctgcctgtttctgtctgggtgtctgagttccaaaaaatgtgtgttgtttgttcctcctcatcctcttctgagactgttgtttttttagagcttgattgtgggagaaaagcttgtgtgaaattccctcttcacctccccaccccccaaaaaataaaagggggcataaactttattccactggagaagccctgggggtggctggagccagcctgctgagaagcgtggtgcagctgggtctgggacttcactagagcttactctggagcacctattttctgtgcacatgggagtgctccactccctagcagagcagagggaagtctctgccaggtacccacgccacaggcctcaggatggctttttgtctgagggcctcattaggcccagactgctgctgctggtaccagtctcctgagacactgcctccctggagcccatgcatgcccagctgttcttactgcttagtagccttgaagcagcacatctccactgtccctggcaggattgtgggaggcttcacaacccctgctttcctgacttcctcttctgcccaacactgggtgccccttcccagtttcccagcaggggcttcatgggccaccgtcagtgggtctgggcctgccagagtcgtcttgctcttcctcttgcttctaggcaaccacacttggcaagttaaatgtcccaagcaccttgtctcccttcccaagaacaaaccatttctgtgcacatccttggaggcgagatgagctccttgcagagggccagagtaagtgcaagtcatggagtgcaggcagaggggtccatggcttccccagcccagggagggtatcagtatcattcattctctctcccctcactggtatgggttcagagcaatgcctagggcccctctctgctcccctgcctagtggggtggtagtggctacctctcagccccaatagtccctgctcctcttagaatcttcaccaagtggcaggccacctctgggcaggaccacctgcgtctggcacccaggaggtgaggcagacaccatggttaggtgatagggtctgaacccagttggggagacagaggggttcagacttgggaagaatctgtcagtgtgcatggagtgaggtgtgtgtgtgtggatggatgtgcacgtgtgcatgctttttttctttttgccgtgaggacagttgaatttggggcatttttctacaagaagcagtcagccttctctcccccataaggactggctgtaaccttaagcccatcaaagttacttccagcctggagagaacctcaccaaacagctggtgtggcctgagggtggccatggtgggaaatgggcatgagaataaatacctccccaaattcaatctgagcccagcaggagaggatggtagggttgccagggctcagaagtgcaagctgattactcaccccaccctgcctcgccgcacctttcctttgtttccttgggtgaatgcaggagcagcagtggctgcccttcccacctggacagtggtgtgtgtagaaagccagctggatgtttgtggtggggcctcatggtgcctaggaggagataaagatgaggaggtttttccttattgtataaatgaatatttgtatgattaaattaacacacacacccaaaaaagctg

SEQ ID NO: 425962 - DNA, 3474 bp, Homo sapiens
cctctccccaaaagaaccgacaatcagatgaaaacaacttaaaagaccctgggggctccgagttcgactcgatcagcaaaaacacatgggctcctgctcctgacacatgggctcctgctcctgaccaaactgagcaagaccagaatagactgtcacagaactctgtaaatctgtctcccagcagtcacgcaaacaacttatcagtagtgacttacagtaaggggctccatgggccttaccccttcggccagtcttaaacgggtgtcagcaagaagaaaaattaacaaaagacagaaggcctgactttggggggttagggcaaggggttcctctggattgcagaccacatcgcacagacccctggctctgaccccctctcatcccggaagaagaggaagaagcagaacagactagttttgagtaaactcagtatgcatgtgtgaatgctgaatcacaggaatggtgttgaggctaccaagaagaaatccatgcagccactttgggttttgttataggcatcagtctaacaagtcattaggtcactcgggaagggggaaaaagtttaaaatgggggaaaaaaagccatctttttaaacaaaaattattttgcctacagaaaggttgtagttttgagcacatgttaatttttttccctctttccccacttttatttttttaaataagggataacatattctttatagaatagtgcttgttctggaagagattcaggtgaaaagttggcgtggcatgtttgaggactctgcggatcagtgctacaggagtacatctgccctgccacatgactccagaagtctctgaccccatttgtttttaatggcatcagccaatgagttatcacccttttcctcctcttttctctttaatcttctgttgatttacacctttgacatttgtattcgtcaaccctgtggcttgttagcatcagaacctctctgaagaccaaacttccctgtgtggccagcagaggaagccttgaggatagatctcgggtgacgtgggattttctaagcctgagaggtgtccttctgcacacccttgtaacaattaaaattgcttttcttccatgtttctcttggcagagagaaatgccatcatgcttactgctcttttggattcttcatgcagtggcttcccatttgctctgggaacagtgcctctgtgctggttatatgtatgcaccacatgtgcacacacgggtgtcggtgcaactcaccagcaggtgtgcagtaggcaagcttgaaggtggcccatgcttctctgttgtcacacaacacctttccctgtttctcttcagttgtcctctgatattttcacagcctgttagtggcggctgatctgtagaggtatgaaaatacagccccaaagggggaatttgtcatggggaagggccagccactgactacttgatcttggagaccacatttagatggaaatgagaggacctccacagccccgcctccctgccaggatgctagattattggctgggaggtgggcaagtggcagcccagctgaagcaagaggctgattgactggctgctcactcaggcaggtggcctgccctggcatcctgtagattctgagcaggttgagatgtggatatctccatgggaagcttgaaccaggctagaacagctgtctgccaaagatacaagaatatgcaaagtccctcttacccccctccttccctcaagtcttagttggtttgagagccagggatatggatccagggtgctgttgcagggagaccaggtaatgagtggctgcaaggagtcatatagcctgggtgtgggtgagggtctgcctgcctgtttctgtctgggtgtctgagttccaaaaaatgtgtgttgtttgttcctcctcatcctcttctgagactgttgtttttttagagcttgattgtgggagaaaagcttgtgtgaaattccctcttcacctccccaccccccaaaaaataaaagggggcataaactttattccactggagaagccctgggggtggctggagccagcctgctgagaagcgtggtgcagctgggtctgggacttcactagagcttactctggagcacctattttctgtgcacatgggagtgctccactccctagcagagcagagggaagtctctgccaggtacccacgccacaggcctcaggatggctttttgtctgagggcctcattaggcccagactgctgctgctggtaccagtctcctgagacactgcctccctggagcccatgcatgcccagctgttcttactgcttagtagccttgaagcagcacatctccactgtccctggcaggattgtgggaggcttcacaacccctgctttcctgacttcctcttctgcccaacactgggtgccccttcccagtttcccagcaggggcttcatgggccaccgtcagtgggtctgggcctgccagagtcgtcttgctcttcctcttgcttctaggcaaccacacttggcaagttaaatgtcccaagcaccttgtctcccttcccaagaacaaaccatttctgtgcacatccttggaggcgagatgagctccttgcagagggccagagtaagtgcaagtcatggagtgcaggcagaggggtccatggcttccccagcccagggagggtatcagtatcattcattctctctcccctcactggtatgggttcagagcaatgcctagggcccctctctgctcccctgcctagtggggtggtagtggctacctctcagccccaatagtccctgctcctcttagaatcttcaccaagtggcaggccacctctgggcaggaccacctgcgtctggcacccaggaggtgaggcagacaccatggttaggtgatagggtctgaacccagttggggagacagaggggttcagacttgggaagaatctgtcagtgtgcatggagtgaggtgtgtgtgtgtggatggatgtgcacgtgtgcatgctttttttctttttgccgtgaggacagttgaatttggggcatttttctacaagaagcagtcagccttctctcccccataaggactggctgtaaccttaagcccatcaaagttacttccagcctggagagaacctcaccaaacagctggtgtggcctgagggtggccatggtgggaaatgggcatgagaataaatacctccccaaattcaatctgagcccagcaggagaggatggtagggttgccagggctcagaagtgcaagctgattactcaccccaccctgcctcgccgcacctttcctttgtttccttgggtgaatgcaggagcagcagtggctgcccttcccacctggacagtggtgtgtgtagaaagccagctggatgtttgtggtggggcctcatggtgcctaggaggagataaagatgaggaggtttttccttattgtataaatgaatatttgtatgattaaattaacacacacacccaaaaaagctg

SEQ ID NO: 425963 - DNA, 3156 bp, Homo sapiens
cctctccccaaaagaaccgacaatcagatgaaaacaacttaaaagaccctgggggctccgagttcgactcgatcagcaaaaacacatgggctcctgctcctgacacatgggctcctgctcctgaccaaactgagcaagaccagaatagactgtcacagaactctgtaaatctgtctcccagcagtcacgcaaacaacttatcagtagtgacttacagtaaggggctccatgggccttaccccttcggccagtcttaaacgggtgtcagcaagaagaaaaattaacaaaagacagaaggcctgactttggggggttagggcaaggggttcctctggattgcagaccacatcgcacagacccctggctctgaccccctctcatcccggaagaagaggaagaagcagaacagactagttttgagtaaactcagtatgcatgtgtgaatgctgaatcacaggaatggtgttgaggctaccaagaagaaatccatgcagccactttgggttttgttataggcatcagtctaacaagtcattaggtcactcgggaagggggaaaaagtttaaaatgggggaaaaaaagccatctttttaaacaaaaattattttgcctacagaaaggttgtagttttgagcacatgttaatttttttccctctttccccacttttatttttttaaataagggataacatattctttatagaatagtgcttgttctggaagagattcaggtgaaaagttggcgtggcatgtttgaggactctgcggatcagtgctacaggagtacatctgccctgccacatgactccagaagtctctgaccccatttgtttttaatggcatcagccaatgagttatcacccttttcctcctcttttctctttaatcttctgttgatttacacctttgacatttgtattcgtcaaccctgtggcttgttagcatcagaacctctctgaagaccaaacttccctgtgtggccagcagaggaagccttgaggatagatctcgggtgacgtgggattttctaagcctgagaggtgtccttctgcacacccttgtaacaattaaaattgcttttcttccatgtttctcttggcagagagaaatgccatcatgcttactgctcttttggattcttcatgcagtggcttcccatttgctctgggaacagtgcctctgtgctggttatatgtatgcaccacatgtgcacacacgggtgtcggtgcaactcaccagcaggtgtgcagtaggcaagcttgaaggtggcccatgcttctctgttgtcacacaacacctttccctgtttctcttcagttgtcctctgatattttcacagcctgttagtggcggctgatctgtagaggtatgaaaatacagccccaaagggggaatttgtcatggggaagggccagccactgactacttgatcttggagaccacatttagatggaaatgagaggacctccacagccccgcctccctgccaggatgctagattattggctgggaggtgggcaagtggcagcccagctgaagcaagaggctgattgactggctgctcactcaggcaggtggcctgccctggcatcctgtagattctgagcaggttgagatgtggatatctccatgggaagcttgaaccaggctagaacagctgtctgccaaagatacaagaatatgcaaagtccctcttacccccctccttccctcaagtcttagttggtttgagagccagggatatggatccagggtgctgttgcagggtcacctgcctgttaccacacccccatccagctgggtggtgggtgagggtgtgagacaggcagggagaccaggtaatgagtggctgcaaggagtcatatagcctgggtgtgggtgagggtctgcctgcctgtttctgtctgggtgtctgagttccaaaaaatgtgtgttgtttgttcctcctcatcctcttctgagactgttgtttttttagagcttgattgtgggagaaaagcttgtgtgaaattccctcttcacctccccaccccccaaaaaataaaagggggcataaactttattccactggagaagccctgggggtggctggagccagcctgctgagaagcgtggtgcagctgggtctgggacttcactagagcttactctggagcacctattttctgtgcacatgggagtgctccactccctagcagagcagagggaagtctctgccaggtacccacgccacaggcctcaggatggctttttgtctgagggcctcattaggcccagactgctgctgctggtaccagtctcctgagacactgcctccctggagcccatgcatgcccagctgttcttactgcttagtagccttgaagcagcacatctccactgtccctggcaggattgtgggaggcttcacaacccctgctttcctgacttcctcttctgcccaacactgggtgccccttcccagtttcccagcaggggcttcatgggccaccgtcagtgggtctgggcctgccagagtcgtcttgctcttcctcttgcttctaggcaaccacacttggcaagttaaatgtcccaagcaccttgtctcccttcccaagaacaaaccatttctgtgcacatccttggaggcgagatgagctccttgcagagggccagagtaagtgcaagtcatggagtgcaggcagaggggtccatggcttccccagcccagggagggtatcagtatcattcattctctctcccctcactggtatgggttcagagcaatgcctagggcccctctctgctcccctgcctagtggggtggtagtggctacctctcagccccaatagtccctgctcctcttagaatcttcaccaagtggcaggccacctctgggcaggaccacctgcgtctggcacccaggaggtgaggcagacaccatggttaggtgatagggtctgaacccagttggggagacagaggggttcagacttgggaagaatctgtcagtgtgcatggagtgaggtgtgtgtgtgtggatggatgtgcacgtgtgcatgctttttttcgatctaaactcagtgtgtgtgtgtgtgtctgtgtgtgtctgtgtgtgtgtgtgtgtgtgtggtcttcctctcatatccaaagctactagcactgaggaagttgg

SEQ ID NO: 425964 - DNA, 3096 bp, Homo sapiens
cctctccccaaaagaaccgacaatcagatgaaaacaacttaaaagaccctgggggctccgagttcgactcgatcagcaaaaacacatgggctcctgctcctgacacatgggctcctgctcctgaccaaactgagcaagaccagaatagactgtcacagaactctgtaaatctgtctcccagcagtcacgcaaacaacttatcagtagtgacttacagtaaggggctccatgggccttaccccttcggccagtcttaaacgggtgtcagcaagaagaaaaattaacaaaagacagaaggcctgactttggggggttagggcaaggggttcctctggattgcagaccacatcgcacagacccctggctctgaccccctctcatcccggaagaagaggaagaagcagaacagactagttttgagtaaactcagtatgcatgtgtgaatgctgaatcacaggaatggtgttgaggctaccaagaagaaatccatgcagccactttgggttttgttataggcatcagtctaacaagtcattaggtcactcgggaagggggaaaaagtttaaaatgggggaaaaaaagccatctttttaaacaaaaattattttgcctacagaaaggttgtagttttgagcacatgttaatttttttccctctttccccacttttatttttttaaataagggataacatattctttatagaatagtgcttgttctggaagagattcaggtgaaaagttggcgtggcatgtttgaggactctgcggatcagtgctacaggagtacatctgccctgccacatgactccagaagtctctgaccccatttgtttttaatggcatcagccaatgagttatcacccttttcctcctcttttctctttaatcttctgttgatttacacctttgacatttgtattcgtcaaccctgtggcttgttagcatcagaacctctctgaagaccaaacttccctgtgtggccagcagaggaagccttgaggatagatctcgggtgacgtgggattttctaagcctgagaggtgtccttctgcacacccttgtaacaattaaaattgcttttcttccatgtttctcttggcagagagaaatgccatcatgcttactgctcttttggattcttcatgcagtggcttcccatttgctctgggaacagtgcctctgtgctggttatatgtatgcaccacatgtgcacacacgggtgtcggtgcaactcaccagcaggtgtgcagtaggcaagcttgaaggtggcccatgcttctctgttgtcacacaacacctttccctgtttctcttcagttgtcctctgatattttcacagcctgttagtggcggctgatctgtagaggtatgaaaatacagccccaaagggggaatttgtcatggggaagggccagccactgactacttgatcttggagaccacatttagatggaaatgagaggacctccacagccccgcctccctgccaggatgctagattattggctgggaggtgggcaagtggcagcccagctgaagcaagaggctgattgactggctgctcactcaggcaggtggcctgccctggcatcctgtagattctgagcaggttgagatgtggatatctccatgggaagcttgaaccaggctagaacagctgtctgccaaagatacaagaatatgcaaagtccctcttacccccctccttccctcaagtcttagttggtttgagagccagggatatggatccagggtgctgttgcagggtcacctgcctgttaccacacccccatccagctgggtggtgggtgagggtgtgagacaggcagggagaccaggtaatgagtggctgcaaggagtcatatagcctgggtgtgggtgagggtctgcctgcctgtttctgtctgggtgtctgagttccaaaaaatgtgtgttgtttgttcctcctcatcctcttctgagactgttgtttttttagagcttgattgtgggagaaaagcttgtgtgaaattccctcttcacctccccaccccccaaaaaataaaagggggcataaactttattccactggagaagccctgggggtggctggagccagcctgctgagaagcgtggtgcagctgggtctgggacttcactagagcttactctggagcacctattttctgtgcacatgggagtgctccactccctagcagagcagagggaagtctctgccaggtacccacgccacaggcctcaggatggctttttgtctgagggcctcattaggcccagactgctgctgctggtaccagtctcctgagacactgcctccctggagcccatgcatgcccagctgttcttactgcttagtagccttgaagcagcacatctccactgtccctggcaggattgtgggaggcttcacaacccctgctttcctgacttcctcttctgcccaacactgggtgccccttcccagtttcccagcaggggcttcatgggccaccgtcagtgggtctgggcctgccagagtcgtcttgctcttcctcttgcttctaggcaaccacacttggcaagttaaatgtcccaagcaccttgtctcccttcccaagaacaaaccattttttttgccgtgaggacagttgaatttggggcatttttctacaagaagcagtcagccttctctcccccataaggactggctgtaaccttaagcccatcaaagttacttccagcctggagagaacctcaccaaacagctggtgtggcctgagggtggccatggtgggaaatgggcatgagaataaatacctccccaaattcaatctgagcccagcaggagaggatggtagggttgccagggctcagaagtgcaagctgattactcaccccaccctgcctcgccgcacctttcctttgtttccttgggtgaatgcaggagcagcagtggctgcccttcccacctggacagtggtgtgtgtagaaagccagctggatgtttgtggtggggcctcatggtgcctaggaggagataaagatgaggaggtttttccttattgtataaatgaatatttgtatgattaaattaacacacacacccaaaaaagctg

SEQ ID NO: 425965 - DNA, 2200 bp, Homo sapiens
  misc_feature (32)..(32): n is a, c, g, or t
  misc_feature (38)..(39): n is a, c, g, or t
tgcagtactaccgcggttttaggtgcgaggcngggtgnngcagccccaaagggggaatttgtcatggggaagggccagccactgactacttgatcttggagaccacatttagatggaaatgagaggacctccacagccccgcctccctgccaggatgctagattattggctgggaggtgggcaagtggcagcccagctgaagcaagaggctgattgactggctgctcactcaggcaggtggcctgccctggcatcctgtagattctgagcaggttgagatgtggatatctccatgggaagcttgaaccaggctagaacagctgtctgccaaagatacaagaatatgcaaagtccctcttacccccctccttccctcaagtcttagttggtttgagagccagggatatggatccagggtgctgttgcagggtcacctgcctgttaccacacccccatccagctgggtggtgggtgagggtgtgagacaggcagggagaccaggtaatgagtggctgcaaggagtcatatagcctgggtgtgggtgagggtctgcctgcctgtttctgtctgggtgtctgagttccaaaaaatgtgtgttgtttgttcctcctcatcctcttctgagactgttgtttttttagagcttgattgtgggagaaaagcttgtgtgaaattccctcttcacctccccaccccccaaaaaataaaagggggcataaactttattccactggagaagccctgggggtggctggagccagcctgctgagaagcgtggtgcagctgggtctgggacttcactagagcttactctggagcacctattttctgtgcacatgggagtgctccactccctagcagagcagagggaagtctctgccaggtacccacgccacaggcctcaggatggctttttgtctgagggcctcattaggcccagactgctgctgctggtaccagtctcctgagacactgcctccctggagcccatgcatgcccagctgttcttactgcttagtagccttgaagcagcacatctccactgtccctggcaggattgtgggaggcttcacaacccctgctttcctgacttcctcttctgcccaacactgggtgccccttcccagtttcccagcaggggcttcatgggccaccgtcagtgggtctgggcctgccagagtcgtcttgctcttcctcttgcttctaggcaaccacacttggcaagttaaatgtcccaagcaccttgtctcccttcccaagaacaaaccatttctgtgcacatccttggaggcgagatgagctccttgcagagggccagagtaagtgcaagtcatggagtgcaggcagaggggtccatggcttccccagcccagggagggtatcagtatcattcattctctctcccctcactggtatgggttcagagcaatgcctagggcccctctctgctcccctgcctagtggggtggtagtggctacctctcagccccaatagtccctgctcctcttagaatcttcaccaagtggcaggccacctctgggcaggaccacctgcgtctggcacccaggaggtgaggcagacaccatggttaggtgatagggtctgaacccagttggggagacagaggggttcagacttgggaagaatctgtcagtgtgcatggagtgaggtgtgtgtgtgtggatggatgtgcacgtgtgcatgctttttttctttttgccgtgaggacagttgaatttggggcatttttctacaagaagcagtcagccttctctcccccataaggactggctgtaaccttaagcccatcaaagttacttccagcctggagagaacctcaccaaacagctggtgtggcctgagggtggccatggtgggaaatgggcatgagaataaatacctccccaaattcaatctgagcccagcaggagaggatggtagggttgccagggctcagaagtgcaagctgattactcaccccaccctgcctcgccgcacctttcctttgtttccttgggtgaatgcaggagcagcagtggctgcccttcccacctggacagtggtgtgtgtagaaagccagctggatgtttgtggtggggcctcatggtgcctaggaggagataaagatgaggaggtttttccttattgtataaatgaatatttgtatgattaaattaacacacacacccaaaaaagctg

SEQ ID NO: 425966 - DNA, 3351 bp, Homo sapiens
cctctccccaaaagaaccgacaatcagatgaaaacaacttaaaagaccctgggggctccgagttcgactcgatcagcaaaaacacatgggctcctgctcctgacacatgggctcctgctcctgaccaaactgagcaagaccagaatagactgtcacagaactctgtaaatctgtctcccagcagtcacgcaaacaacttatcagtagtgacttacagtaaggggctccatgggccttaccccttcggccagtcttaaacgggtgtcagcaagaagaaaaattaacaaaagacagaaggcctgactttggggggttagggcaaggggttcctctggattgcagaccacatcgcacagacccctggctctgaccccctctcatcccggaagaagaggaagaagcagaacagactagttttgagtaaactcagtatgcatgtgtgaatgctgaatcacaggaatggtgttgaggctaccaagaagaaatccatgcagccactttgggttttgttataggcatcagtctaacaagtcattaggtcactcgggaagggggaaaaagtttaaaatgggggaaaaaaagccatctttttaaacaaaaattattttgcctacagaaaggttgtagttttgagcacatgttaatttttttccctctttccccacttttatttttttaaataagggataacatattctttatagaatagtgcttgttctggaagagattcaggtgaaaagttggcgtggcatgtttgaggactctgcggatcagtgctacaggagtacatctgccctgccacatgactccagaagtctctgaccccatttgtttttaatggcatcagccaatgagttatcacccttttcctcctcttttctctttaatcttctgttgatttacacctttgacatttgtattcgtcaaccctgtggcttgttagcatcagaacctctctgaagaccaaacttccctgtgtggccagcagaggaagccttgaggatagatctcgggtgacgtgggattttctaagcctgagaggtgtccttctgcacacccttgtaacaattaaaattgcttttcttccatgtttctcttggcagagagaaatgccatcatgcttactgctcttttggattcttcatgcagtggcttcccatttgctctgggaacagtgcctctgtgctggttatatgtatgcaccacatgtgcacacacgggtgtcggtgcaactcaccagcaggtgtgcagtaggcaagcttgaaggtggcccatgcttctctgttgtcacacaacacctttccctgtttctcttcagttgtcctctgatattttcacagcctgttagtggcggctgatctgtagaggtatgaaaatacagccccaaagggggaatttgtcatggggaagggccagccactgactacttgatcttggagaccacatttagatggaaatgagaggacctccacagccccgcctccctgccaggatgctagattattggctgggaggtgggcaagtggcagcccagctgaagcaagaggctgattgactggctgctcactcaggcaggtggcctgccctggcatcctgtagattctgagcaggttgagatgtggatatctccatgggaagcttgaaccaggctagaacagctgtctgccaaagatacaagaatatgcaaagtccctcttacccccctccttccctcaagtcttagttggtttgagagccagggatatggatccagggtgctgttgcagggtcacctgcctgttaccacacccccatccagctgggtggtgggtgagggtgtgagacaggcagggagaccaggtaatgagtggctgcaaggagtcatatagcctgggtgtgggtgagggtctgcctgcctgtttctgtctgggtgtctgagttccaaaaaatgtgtgttgtttgttcctcctcatcctcttctgagactgttgtttttttagagcttgattgtgggagaaaagcttgtgtgaaattccctcttcacctccccaccccccaaaaaataaaagggggcataaactttattccactggagaagccctgggggtggctggagccagcctgctgagaagcgtggtgcagctgggtctgggacttcactagagcttactctggagcacctattttctgtgcacatgggagtgctccactccctagcagagcagagggaagtctctgccaggtacccacgccacaggcctcaggatggctttttgtctgagggcctcattaggcccagactgctgctgctggtaccagtctcctgagacactgcctccctggagcccatgcatgcccagctgttcttactgcttagtagccttgaagcagcacatctccactgtccctggcaggattgtgggaggcttcacaacccctgctttcctgacttcctcttctgcccaacactgggtgccccttcccagtttcccagcaggggcttcatgggccaccgtcagtgggtctgggcctgccagagtcgtcttgctcttcctcttgcttctaggcaaccacacttggcaagttaaatgtcccaagcaccttgtctcccttcccaagaacaaaccatttctgtgcacatccttggaggcgagatgagctccttgcagagggccagagtaagtgcaagtcatggagtgcaggcagaggggtccatggcttccccagcccagggagggtatcagtatcattcattctctctcccctcactggtatgggttcagagcaatgcctagggcccctctctgctcccctgcctagtggggtggtagtggctacctctcagccccaatagtccctgctcctcttagaatcttcaccaagtggcaggccacctctgggcaggaccacctgcgtctggcacccaggaggtgaggcagacaccatggttaggtgatagggtctgaacccagttggggagacagaggggttcagacttgggaagaatctgtcagtgtgcatggagtgaggtgtgtgtgtgtggatggatgtgcacgtgtgcatgctttttttcctccccaaattcaatctgagcccagcaggagaggatggtagggttgccagggctcagaagtgcaagctgattactcaccccaccctgcctcgccgcacctttcctttgtttccttgggtgaatgcaggagcagcagtggctgcccttcccacctggacagtggtgtgtgtagaaagccagctggatgtttgtggtggggcctcatggtgcctaggaggagataaagatgaggaggtttttccttattgtataaatgaatatttgtatgattaaattaacacacacacccaaaaaagctg

SEQ ID NO: 425967 - DNA, 954 bp, Homo sapiens
cctctccccaaaagaaccgacaatcagatgaaaacaacttaaaagaccctgggggctccgagttcgactcgatcagcaaaaacacatgggctcctgctcctgacacatgggctcctgctcctgaccaaactgagcaagaccagaatagactgtcacagaactctgtaaatctgtctcccagcagtcacgcaaacaacttatcagtagtgacttacagtaaggggctccatgggccttaccccttcggccagtcttaaacgggtgtcagcaagaagaaaaattaacaaaagacagaaggcctgactttggggggttagggcaaggggttcctctggattgcagaccacatcgcacagacccctggctctgaccccctctcatcccggaagaagaggaagaagcagaacagactagttttgagtaaactcagtatgcatgtgtgaatgctgaatcacaggaatggtgttgaggctaccaagaagaaatccatgcagccactttgggttttgttataggcatcagtctaacaagtcattaggtcactcgggaagggggaaaaagtttaaaatgggggaaaaaaagccatctttttaaacaaaaattattttgcctacagaaaggttgtagttttgagcacatgttaatttttttccctctttccccacttttatttttttaaataagggataacatattctttatagaatagtgcttgttctggaagagattcaggtgaaaagttggcgtggcatgtttgaggactctgcggatcagtgctacaggagtacatctgcctgcccttcccacctggacagtggtgtgtgtagaaagccagctggatgtttgtggtggggcctcatggtgcctaggaggagataaagatgaggaggtttttccttattgtataaatgaatatttgtatgattaaattaacacacacacccaaaaaagctg

SEQ ID NO: 425968 - DNA, 2166 bp, Homo sapiens
acggacggaagctccattgagccaaataagttggccacgtggggcggaacggaaacctcgcagggtcagaccgtagcgacgcgggaagtccggacgcagtagctccctgaagcggaggcgaaggggagtttaagccccagcggcggcaatggcggagaggcccgaggacctaaacctgcccaatgccgtgatcaccaggatcatcaaggaggcgctcccggacggtgtcaacatctccaaggaggcccggagcgccatctcccgcgccgccagcgtcttcgtgctgtacgccacatcctgtgctaacaactttgcaatgaaaggaaagcggaagacgctgaatgccagtgatgtgctctcagccatggaagagatggagttccagcggttcgttaccccattgaaagaagctctggaagcatataggcgggagcagaaaggcaagaaggaggcctcagagcaaaagaagaaggacaaagacaaaaaaacagactcggaagagcaagacaagagcagggatgaggacaatgatgaagacgaagaaaggctggaagaagaagaacagaatgaagaggaagaagtagacaactgaaaagggcgggagactgtggcaccttggaaggtaccacttgaaatgagacgtgctacgtgtttctgtgaagcttttccatgctgggcagagtagtctcaggcaaaagtgcctgaaaagatcagaataaaaactgactagaaataccgtcaaaaccagcacttaccaaactcagagcatctgagtagcagaatcctgtttgcttcatcaatctgaaggttatggccttttgacaagagggattctgaacgactaaattagtcagtttgctcgcttttgtttacttaaatgtatggttagatggttttgatctgcagtcttccctagtcccccaaataagtaataataacttccatgctgcctgctgtgttccagatcacagaggcagccaaggctcaggaaaaactggggctttgcttatggtcagcctatgtttgattgcacagtctttgacaatagtagcttactaagactgctcagaatgagtaagctttaggaaactactaaaatgctgtgggagaataacaaaatccgttctctctcttcacttgacagaagcattaactgaattttgtttttcatagacccacttggcccaaaacctttctatattgcctgtagatgatcggcctgctggtgtggtagtaatctgatcacagatattcttaaatcagcagtgtggaatggtattagtcaaacatggtgccagtgtcttttacaaaaacagatggcatagtgtcagatgtaccttactctctgctactgtacagctttaggatttgtcatcacctcccggaaggtgtaaaaccccaggcttcctcttcttgtagtccatctcccagacttgtgactatggcttttcattcttcaattcatgacgagtgccaaacttgattttctctaggcacagctttctccctctgtgcctcctgcttcctttctctctcctgcctctcctctgctccccatcccactttctcatctgcctccttttctcacttctgtcagtctgtaagctttgataacctgcttaatactccaaagtgtgagttcctctgatctcttgattccttagttctaatctcacgttttgtttttaagagatggagtctctcactctgtggcccaggctggagtgcagtggcatgatcatagctcattgcatccttgaaatcctgggctcaggtgatcctcccgcctgagcctcctgagtatctgggactacagatgcgtgccaccaagcctggctaattttgtctcatgtcttctaaaaattattttgtgaagccccttcacaaaaaaccttaagggaaatctgatggtgctcaggaatctaactctccctaaaccatcctctttaactgcttctaaaatatctctgttggcctttcttagcctttttctgtttccattcagtgctccaagcgctttttgtttctaagttgagtgcttggggtttgacaggtagtgacgtgtagtttgacactgttaacttgttaaatacagtgaaaagtttgtgagtgaagaatgctgagaagattgtaatgctttgtacaaataaaagtcttgttaaaaaa

SEQ ID NO: 425969 - DNA, 2723 bp, Homo sapiens
acggacggaagctccattgagccaaataagttggtgagaaggttcccgacgcggcgatggcgagaagcagagaaatggacctggggaggggcgtgcggggtgcggtagggttggatggaagccttggcgggccaaaaccactgcggcttcaaaatccggatgcgccggtatttgaggcggaggcggggctgtggggggaggagggaggctatggcgctcagagcactgtgggacactgtaggccacgtggggcggaacggaaacctcgcagggtcagaccgtagcgacgcgggaagtccggacgcagtagctccctgaagcggaggcgaaggggagtttaagccccagcggcggcaatggcggagaggcccgaggacctaaacctgcccaatgccgtgatcaccaggatcatcaaggaggcgctcccggacggtgtcaacatctccaaggaggcccggagcgccatctcccgcgccgccagcgtcttcgtgctgtacgccacatcctgtgctaacaactttgcaatgaaaggaaagcggaagacgctgaatgccagtgatgtgctctcagccatggaagagatggagttccagcggttcgttaccccattgaaagaagctctggaagcatataggcgggagcagaaaggcaagaaggaggcctcagagcaaaagaagaaggacaaagacaaaaaaacagactcggaagagcaagacaagagcagggatgaggacaatgatgaagacgaagaaaggctggaagaagaagaacagaatgaagaggaagaagtagacaactgaaaagggcgggagactgtggcaccttggaaggtaccacttgaaatgagacgtgctacgtgtttctgtgaagcttttccatgctgggcagagtagtctcaggcaaaagtgcctgaaaagatcagaataaaaactgactagaaataccgtcaaaaccagcacttaccaaactcagagcatctgagtagcagaatcctgtttgcttcatcaatctgaaggttatggccttttgacaagagggattctgaacgactaaattagtcagtttgctcgcttttgtttacttaaatgtatggttagatggttttgatctgcagtcttccctagtcccccaaataagtaataataacttccatgctgcctgctgtgttccagatcacagaggcagccaaggctcaggaaaaactggggctttgcttatggtcagcctatgtttgattgcacagtctttgacaatagtagcttactaagactgctcagaatgagtaagctttaggaaactactaaaatgctgtgggagaataacaaaatccgttctctctcttcacttgacagaagcattaactgaattttgtttttcatagacccacttggcccaaaacctttctatattgcctgtagatgatcggcctgctggtgtggtagtaatctgatcacagatattcttaaatcagcagtgtggaatggtattagtcaaacatggtgccagtgtcttttacaaaaacagatggcatagtgtcagatgtaccttactctctgctactgtacagctttaggatttgtcatcacctcccggaaggtgtaaaaccccaggcttcctcttcttgtagtccatctcccagacttgtgactatggcttttcattcttcaattcatgacgagtgccaaacttgattttctctaggcacagctttctccctctgtgcctcctgcttcctttctctctcctgcctctcctctgctccccatcccactttctcatctgcctccttttctcacttctgtcagtctgtaagctttgataacctgcttaatactccaaagtgtgagttcctctgatctcttgattccttagttctaatctcacgttttgtttttaagagatggagtctctcactctgtggcccaggctggagtgcagtggcatgatcatagctcattgcatccttgaaatcctgggctcaggtgatcctcccgcctgagcctcctgagtatctgggactacagatgcgtgccaccaagcctggctaattttgtctcatgtcttctaaaaattattttgtgaagccccttcacaaaaaaccttaagggaaatctgatggtgctcaggaatctaactctccctaaaccatcctctttaactgcttctaaaatatctctgttggcctttcttagcctttttctgtttccattcagtgctccaagcgctttttgtttctaagttgagtgcttggggtttgacaggtagtgacgtgtagtttgacactgttaacttgttaaatacagtgaaaagtttgtgagtgaagaatgctgagaagattgtaatgctttgtacaaataaaagtcttgttaaaaaaaaaaaaaaaaaaaaaaaaaaagaaaataaaaaaaaacaaaagataaagaaaaaagaacaaaaaaaaaaggcaaaaagaaacaaaaaagaacaacaacagaaaacaaaccgcgaacaacacgacgcaacaaacacaactacatagaaccacaaaaacaaaaatagaaaaaagagagaaggcagacaaacaaactagaaacaaagactaaacacaaaaagaacaaaaagaagggcgtggagcgcgagcaccaaagtagggctcgagacgaccggagacaaagaagcaggagcacaactctaaccgagaacctacacgagctacgctactagcgagcgaactagccacgaga

SEQ ID NO: 425970 - DNA, 2348 bp, Homo sapiens
acggacggaagctccattgagccaaataagttggtgagaaggttcccgacgcggcgatggcgagaagcagagaaatggacctggggaggggcgtgcggggtgcggtagggttggatggaagccttggcgggccaaaaccactgcggcttcaaaatccggatgcgccggtatttgaggcggaggcggggctgtggggggaggagggaggctatggcgctcagagcactgtgggacactgtaggccacgtggggcggaacggaaacctcgcagggtcagaccgtagcgacgcgggaagtccggacgcagtagctccctgaagcggaggcgaaggggagtttaagccccagcggcggcaatggcggagaggcccgaggacctaaacctgcccaatgccgtgatcaccaggatcatcaaggaggcgctcccggacggtgtcaacatctccaaggaggcccggagcgccatctcccgcgccgccagcgtcttcgtgctgtacgccacatcctgtgctaacaactttgcaatgaaaggaaagcggaagacgctgaatgccagtgatgtgctctcagccatggaagagatggagttccagcggttcgttaccccattgaaagaagctctggaagcatataggcgggagcagaaaggcaagaaggaggcctcagagcaaaagaagaaggacaaagacaaaaaaacagactcggaagagcaagacaagagcagggatgaggacaatgatgaagacgaagaaaggctggaagaagaagaacagaatgaagaggaagaagtagacaactgaaaagggcgggagactgtggcaccttggaaggtaccacttgaaatgagacgtgctacgtgtttctgtgaagcttttccatgctgggcagagtagtctcaggcaaaagtgcctgaaaagatcagaataaaaactgactagaaataccgtcaaaaccagcacttaccaaactcagagcatctgagtagcagaatcctgtttgcttcatcaatctgaaggttatggccttttgacaagagggattctgaacgactaaattagtcagtttgctcgcttttgtttacttaaatgtatggttagatggttttgatctgcagtcttccctagtcccccaaataagtaataataacttccatgctgcctgctgtgttccagatcacagaggcagccaaggctcaggaaaaactggggctttgcttatggtcagcctatgtttgattgcacagtctttgacaatagtagcttactaagactgctcagaatgagtaagctttaggaaactactaaaatgctgtgggagaataacaaaatccgttctctctcttcacttgacagaagcattaactgaattttgtttttcatagacccacttggcccaaaacctttctatattgcctgtagatgatcggcctgctggtgtggtagtaatctgatcacagatattcttaaatcagcagtgtggaatggtattagtcaaacatggtgccagtgtcttttacaaaaacagatggcatagtgtcagatgtaccttactctctgctactgtacagctttaggatttgtcatcacctcccggaaggtgtaaaaccccaggcttcctcttcttgtagtccatctcccagacttgtgactatggcttttcattcttcaattcatgacgagtgccaaacttgattttctctaggcacagctttctctctcctgcctctcctctgctccccatcccactttctcatctgcctccttttctcacttctgtcagtctgtaagctttgataacctgcttaatactccaaagtgtgagttcctctgatctcttgattccttagttctaatctcacgttttgtttttaagagatggagtctctcactctgtggcccaggctggagtgcagtggcatgatcatagctcattgcatccttgaaatcctgggctcaggtgatcctcccgcctgagcctcctgagtatctgggactacagatgcgtgccaccaagcctggctaattttgtctcatgtcttctaaaaattattttgtgaagccccttcacaaaaaaccttaagggaaatctgatggtgctcaggaatctaactctccctaaaccatcctctttaactgcttctaaaatatctctgttggcctttcttagcctttttctgtttccattcagtgctccaagcgctttttgtttctaagttgagtgcttggggtttgacaggtagtgacgtgtagtttgacactgttaacttgttaaatacagtgaaaagtttgtgagtgaagaatgctgagaagattgtaatgctttgtacaaataaaagtcttgttaaaaaa

SEQ ID NO: 425971 - DNA, 2210 bp, Homo sapiens
acggacggaagctccattgagccaaataagttggtgagaaggttcccgacgcggcgatggcgagaagcagagaaatggacctggggaggggcgtgcggggtgcggtagggttggatggaagccttggcgggccaaaaccactgcggcttcaaaatccggatgcgccggtatttgaggcggaggcggggctgtggggggaggagggaggctatggcgctcagagcactgtgggacactgtaggccacgtggggcggaacggaaacctcgcagggtcagaccgtagcgacgcgggaagtccggacgcagtagctccctgaagcggaggcgaaggggagtttaagccccagcggcggcaatggcggagaggcccgaggacctaaacctgcccaatgccgtgatcaccaggatcatcaaggaggcgctcccggacggtgtcaacatctccaaggaggcccggagcgccatctcccgcgccgccagcgtcttcgtgctgtacgccacatcctgtgctaacaactttgcaatgaaaggaaagcggaagacgctgaatgccagtgatgtgctctcagccatggaagagatggagttccagcggttcgttaccccattgaaagaagctctggaagcatataggcgggagcagaaaggcaagaaggaggcctcagagcaaaagaagaaggacaaagacaaaaaaacagactcggaagagcaagacaagagcagggatgaggacaatgatgaagacgaagaaaggctggaagaagaagaacagaatgaagaggaagaagtagacaactgaaaagggcgggagactgtggcaccttggaaggtaccacttgaaatgagacgtgctacgtgtttctgtgaagcttttccatgctgggcagagtagtctcaggcaaaagtgcctgaaaagatcagaataaaaactgactagaaataccgtcaaaaccagcacttaccaaactcagagcatctgagtagcagaatcctgtttgcttcatcaatctgaaggttatggccttttgacaagagggattctgaacgactaaattagtcagtttgctcgcttttgtttacttaaatgtatggttagatggttttgatctgcagtcttccctagtcccccaaataagtaataataacttccatgctgcctgctgtgttccagatcacagaggcagccaaggctcaggaaaaactggggctttgcttatggtcagcctatgtttgattgcacagtctttgacaatagtagcttactaagactgctcagaatgagtaagctttaggaaactactaaaatgctgtgggagaataacaaaatccgttctctctcttcacttgacagaagcattaactgaattttgtttttcatagacccacttggcccaaaacctttctatattgcctgtagatgatcggcctgctggtgtggtagtaatctgatcacagatattcttaaatcagcagtgtggaatggtattagtcaaacatggtgccagtgtcttttacaaaaacagatggcatagtgtcagatgtaccttactctctgctactgtacagctttaggatttgtcatcacctcccggaaggtgtaaaaccccaggcttcctcttcttgtagtccatctcccagacttgtgactatggcttttcattcttcaattcatgacgagtgccaaacttgattttctctaggcacagctttctccctctgtgcctcctgcttcctttctctctcctgcctctcctctgctccccatcccactttctcatctgcctccttttctcacttctgtcagtctgtaagctttgataacctgcttaatactccaaagtgtgagttcctctgatctcttgattccttagttctaatctcacgttttgtttttaagagatggagtctctcactctgtggcccaggctggagtgcagtggcatgatcatagctcattgcatccttgaaatcctgggctcaggtgatcctcccgcctgagcctcctgagtatctgggactacagatgcgtgccaccacacccagcccatccttgtacttttagtagagatgggtttcaccacgttggtctcgaactcctgaccccaagcgatccatcccgcctccacctccctaagtgctgggattacatggcatgagtcaccactcccagcattcatgtctgaagattctatagtggatactttatagt

SEQ ID NO: 425972 - DNA, 1722 bp, Homo sapiens
ggagagaagagtcagtaggcgggcgcgggtggtaattcaggcgacggggcactgactgtaaatgatgactcggaagagcaagacaagagcagggatgaggacaatgatgaagacgaagaaaggctggaagaagaagaacagaatgaagaggaagaagtagactgtggcaccttggaaggtaccacttgaaatgagacgtgctacgtgtttctgtgaagcttttccatgctgggcagagtagtctcaggcaaaagtgcctgaaaagatcagaataaaaactgactagaaataccgtcaaaaccagcacttaccaaactcagagcatctgagtagcagaatcctgtttgcttcatcaatctgaaggttatggccttttgacaagagggattctgaacgactaaattagtcagtttgctcgcttttgtttacttaaatgtatggttagatggttttgatctgcagtcttccctagtcccccaaataagtaataataacttccatgctgcctgctgtgttccagatcacagaggcagccaaggctcaggaaaaactggggctttgcttatggtcagcctatgtttgattgcacagtctttgacaatagtagcttactaagactgctcagaatgagtaagctttaggaaactactaaaatgctgtgggagaataacaaaatccgttctctctcttcacttgacagaagcattaactgaattttgtttttcatagacccacttggcccaaaacctttctatattgcctgtagatgatcggcctgctggtgtggtagtaatctgatcacagatattcttaaatcagcagtgtggaatggtattagtcaaacatggtgccagtgtcttttacaaaaacagatggcatagtgtcagatgtaccttactctctgctactgtacagctttaggatttgtcatcacctcccggaaggtgtaaaaccccaggcttcctcttcttgtagtccatctcccagacttgtgactatggcttttcattcttcaattcatgacgagtgccaaacttgattttctctaggcacagctttctccctctgtgcctcctgcttcctttctctctcctgcctctcctctgctccccatcccactttctcatctgcctccttttctcacttctgtcagtctgtaagctttgataacctgcttaatactccaaagtgtgagttcctctgatctcttgattccttagttctaatctcacgttttgtttttaagagatggagtctctcactctgtggcccaggctggagtgcagtggcatgatcatagctcattgcatccttgaaatcctgggctcaggtgatcctcccgcctgagcctcctgagtatctgggactacagatgcgtgccaccaagcctggctaattttgtctcatgtcttctaaaaattattttgtgaagccccttcacaaaaaaccttaagggaaatctgatggtgctcaggaatctaactctccctaaaccatcctctttaactgcttctaaaatatctctgttggcctttcttagcctttttctgtttccattcagtgctccaagcgctttttgtttctaagttgagtgcttggggtttgacaggtagtgacgtgtagtttgacactgttaacttgttaaatacagtgaaaagtttgtgagtgaagaatgctgagaagattgtaatgctttgtacaaataaaagtcttgttaaaaaa

SEQ ID NO: 425973 - DNA, 1555 bp, Homo sapiens
ccggtctggtaccgcccagcgagtattggatatcgtcgatccacgcgctccggtttccatgctgggcagagtagtctcaggcaaaagtgcctgaaaagatcagaataaaaactgactagaaataccgtcaaaaccagcacttaccaaactcagagcatctgagtagcagaatcctgtttgcttcatcaatctgaaggttatggccttttgacaagagggattctgaacgactaaattagtcagtttgctcgcttttgtttacttaaatgtatggttagatggttttgatctgcagtcttccctagtcccccaaataagtaataataacttccatgctgcctgctgtgttccagatcacagaggcagccaaggctcaggaaaaactggggctttgcttatggtcagcctatgtttgattgcacagtctttgacaatagtagcttactaagactgctcagaatgagtaagctttaggaaactactaaaatgctgtgggagaataacaaaatccgttctctctcttcacttgacagaagcattaactgaattttgtttttcatagacccacttggcccaaaacctttctatattgcctgtagatgatcggcctgctggtgtggtagtaatctgatcacagatattcttaaatcagcagtgtggaatggtattagtcaaacatggtgccagtgtcttttacaaaaacagatggcatagtgtcagatgtaccttactctctgctactgtacagctttaggatttgtcatcacctcccggaaggtgtaaaaccccaggcttcctcttcttgtagtccatctcccagacttgtgactatggcttttcattcttcaattcatgacgagtgccaaacttgattttctctaggcacagctttctccctctgtgcctcctgcttcctttctctctcctgcctctcctctgctccccatcccactttctcatctgcctccttttctcacttctgtcagtctgtaagctttgataacctgcttaatactccaaagtgtgagttcctctgatctcttgattccttagttctaatctcacgttttgtttttaagagatggagtctctcactctgtggcccaggctggagtgcagtggcatgatcatagctcattgcatccttgaaatcctgggctcaggtgatcctcccgcctgagcctcctgagtatctgggactacagatgcgtgccaccaagcctggctaattttgtctcatgtcttctaaaaattattttgtgaagccccttcacaaaaaaccttaagggaaatctgatggtgctcaggaatctaactctccctaaaccatcctctttaactgcttctaaaatatctctgttggcctttcttagcctttttctgtttccattcagtgctccaagcgctttttgtttctaagttgagtgcttggggtttgacaggtagtgacgtgtagtttgacactgttaacttgttaaatacagtgaaaagtttgtgagtgaagaatgctgagaagattgtaatgctttgtacaaataaaagtcttgttaaaaaa

SEQ ID NO: 425974 - DNA, 1861 bp, Homo sapiens
acggacggaagctccattgagccaaataagttggtgagaaggttcccgacgcggcgatggcgagaagcagagaaatggacctggggaggggcgtgcggggtgcggtagggttggatggaagccttggcgggccaaaaccactgcggcttcaaaatccggatgcgccggtatttgaggcggaggcggggctgtggggggaggagggaggctatggcgctcagagcactgtgggacactgtaggccacgtggggcggaacggaaacctcgcagggtcagaccgtagcgacgcgggaagtccggacgcagtagctccctgaagcggaggcgaaggggagtttaagccccagcggcggcaatggcggagaggcccgaggacctaaacctgcccaatgccgtgatcaccaggatcatcaaggaggcgctcccggacggtgtcaacatctccaaggaggcccggagcgccatctcccgcgccgccagcgtcttcgtgctgtacgccacatcctgtgctaacaactttgcaatgaaaggaaagcggaagacgctgaatgccagtgatgtgctctcagccatggaagagatggagttccagcggttcgttaccccattgaaagaagctctggaagcatataggcgggagcagaaaggcaagaaggaggcctcagagcaaaagaagaaggacaaagacaaaaaaacagactcggaagagcaagacaagagcagggatgaggacaatgatgaagacgaagaaaggctggaagaagaagaacagaatgaagaggaagaagtagacaactgaaaagggcgggagactgtggcaccttggaaggtaccacttgaaatgagacgtgctacgtgtttctgtgaagcttttccatgctgggcagagtagtctcaggcaaaagtgcctgaaaagatcagaataaaaactgactagaaataccgtcaaaaccagcacttaccaaactcagagcatctgagtagcagaatcctgtttgcttcatcaatctgaaggttatggccttttgacaagagggattctgaacgactaaattagtcagtttgctcgcttttgtttacttaaatgtatggttagatggttttgatctgcagtcttccctagtcccccaaataagtaataataacttccatgctgcctgctgtgttccagatcacagaggcagccaaggctcaggaaaaactggggctttgcttatggtcagcctatgtttgattgcacagtctttgacaatagtagcttactaagactgctcagaatgagtaagctttaggaaactactaaaatgctgtgggagaataacaaaatccgttctctctcttcacttgacagaagcattaactgaattttgtttttcatagacccacttggcccaaaacctttctatattgcctgtagatgatcggcctgctggtgtggtagtaatctgatcacagatattcttaaatcagcagtgtggaatggtattagtcaaacatggtgccagtgtcttttacaaaaacagatggcatagtgtcagatgtaccttactctctgctactgtacagctttaggatttgtcatcacctcccggaaggtgtaaaaccccaggcttcctcttcttgtagtccatctcccagacttgtgactatggcttttcattcttcaattctttcttagcctttttctgtttccattcagtgctccaagcgctttttgtttctaagttgagtgcttggggtttgacaggtagtgacgtgtagtttgacactgttaacttgttaaatacagtgaaaagtttgtgagtgaagaatgctgagaagattgtaatgctttgtacaaataaaagtcttgttaaaaaa

SEQ ID NO: 425975 - DNA, 1217 bp, Homo sapiens
acggacggaagctccattgagccaaataagttggtgagaaggttcccgacgcggcgatggcgagaagcagagaaatggacctggggaggggcgtgcggggtgcggtagggttggatggaagccttggcgggccaaaaccactgcggcttcaaaatccggatgcgccggtatttgaggcggaggcggggctgtggggggaggagggaggctatggcgctcagagcactgtgggacactgtaggccacgtggggcggaacggaaacctcgcagggtcagaccgtagcgacgcgggaagtccggacgcagtagctccctgaagcggaggcgaaggggagtttaagccccagcggcggcaatggcggagaggcccgaggacctaaacctgcccaatgccgtgatcaccaggatcatcaaggaggcgctcccggacggtgtcaacatctccaaggaggcccggagcgccatctcccgcgccgccagcgtcttcgtgctgtacgccacatcctgtgctaacaactttgcaatgaaaggaaagcggaagacgctgaatgccagtgatgtgctctcagccatggaagagatggagttccagcggttcgttaccccatcccactttctcatctgcctccttttctcacttctgtcagtctgtaagctttgataacctgcttaatactccaaagtgtgagttcctctgatctcttgattccttagttctaatctcacgttttgtttttaagagatggagtctctcactctgtggcccaggctggagtgcagtggcatgatcatagctcattgcatccttgaaatcctgggctcaggtgatcctcccgcctgagcctcctgagtatctgggactacagatgcgtgccaccaagcctggctaattttgtctcatgtcttctaaaaattattttgtgaagccccttcacaaaaaaccttaagggaaatctgatggtgctcaggaatctaactctccctaaaccatcctctttaactgcttctaaaatatctctgttggcctttcttagcctttttctgtttccattcagtgctccaagcgctttttgtttctaagttgagtgcttggggtttgacaggtagtgacgtgtagtttgacactgttaacttgttaaatacagtgaaaagtttgtgagtgaagaatgctgagaagattgtaatgctttgtacaaataaaagtcttgttaaaaaa

SEQ ID NO: 425976 - DNA, 2374 bp, Homo sapiens
acggacggaagctccattgagccaaataagttggtgagaaggttcccgacgcggcgatggcgagaagcagagaaatggacctggggaggggcgtgcggggtgcggtagggttggatggaagccttggcgggccaaaaccactgcggcttcaaaatccggatgcgccggtatttgaggcggaggcggggctgtggggggaggagggaggctatggcgctcagagcactgtgggacactgtaggccacgtggggcggaacggaaacctcgcagggtcagaccgtagcgacgcgggaagtccggacgcagtagctccctgaagcggaggcgaaggggagtttaagccccagcggcggcaatggcggagaggcccgaggacctaaacctgcccaatgccgtgatcaccaggatcatcaaggaggcgctcccggacggtgtcaacatctccaaggaggcccggagcgccatctcccgcgccgccagcgtcttcgtgctgtacgccacatcctgtgctaacaactttgcaatgaaaggaaagcggaagacgctgaatgccagtgatgtgctctcagccatggaagagatggagttccagcggttcgttaccccattgaaagaagctctggaagcatataggcgggagcagaaaggcaagaaggaggcctcagagcaaaagaagaaggacaaagacaaaaaaacagactcggaagagcaagacaagagcagggatgaggacaatgatgaagacgaagaaaggctggaagaagaagaacagaatgaagaggaagaagtagacaactgaaaagggcgggagactgtggcaccttggaaggtaccacttgaaatgagacgtgctacgtgtttctgtgaagcttttccatgctgggcagagtagtctcaggcaaaagtgcctgaaaagatcagaataaaaactgactagaaataccgtcaaaaccagcacttaccaaactcagagcatctgagtagcagaatcctgtttgcttcatcaatctgaaggttatggccttttgacaagagggattctgaacgactaaattagtcagtttgctcgcttttgtttacttaaatgtatggttagatggttttgatctgcagtcttccctagtcccccaaataagtaataataacttccatgctgcctgctgtgttccagatcacagaggcagccaaggctcaggaaaaactggggctttgcttatggtcagcctatgtttgattgcacagtctttgacaatagtagcttactaagactgctcagaatgagtaagctttaggaaactactaaaatgctgtgggagaataacaaaatccgttctctctcttcacttgacagaagcattaactgaattttgtttttcatagacccacttggcccaaaacctttctatattgcctgtagatgatcggcctgctggtgtggtagtaatctgatcacagatattcttaaatcagcagtgtggaatggtattagtcaaacatggtgccagtgtcttttacaaaaacagatggcatagtgtcagatgtaccttactctctgctactgtacagctttaggatttgtcatcacctcccggaaggtgtaaaaccccaggcttcctcttcttgtagtccatctcccagacttgtgactatggcttttcattcttcaattcatgacgagtgccaaacttgattttctctaggcacagctttctccctctgtgcctcctgcttcctttctctctcctgcctctcctctgctccccatcccactttctcatctgcctccttttctcacttctgtcagtctgtaagctttgataacctgcttaatactccaaagtgtgagttcctctgatctcttgattccttagttctaatctcacgttttgtttttaagagatggagtctctcactctgtggcccaggctggagtgcagtggcatgatcatagctcattgcatccttgaaatcctgggctcaggtgatcctcccgcctgagcctcctgagtatctgggactacagatgcgtgccaccaagcctggctaattttgtctcatgtcttctaaaaattattttgtgaagccccttcacaaaaaaccttaagggaaatctgatggtgctcaggaatctaactctccctaaaccatcctctttaactgcttctaaaatatctctgttggcctttcttagcctttttctgtttccattcagtgctccaagcgctttttgtttctaagttgagtgcttggggtttgacaggtagtgacgtgtagtttgacactgttaacttgttaaatacagtgaaaagtttgtgagtgaagaatgctgagaagattgtaatgctttgtacaaataaaagtcttgttaaaaaa

SEQ ID NO: 425977 - DNA, 2088 bp, Homo sapiens
  misc_feature (14)..(14): n is a, c, g, or t
tggcgcggcgccancaaactatgactaggtacgaggccgggtgttgggagtttaagccccagcggcggcaatggcggagaggcccgaggacctaaacctgcccaatgccgtgatcaccaggatcatcaaggaggcgctcccggacggtgtcaacatctccaaggaggcccggagcgccatctcccgcgccgccagcgtcttcgtgctgtacgccacatcctgtgctaacaactttgcaatgaaaggaaagcggaagacgctgaatgccagtgatgtgctctcagccatggaagagatggagttccagcggttcgttaccccattgaaagaagctctggaagcatataggcgggagcagaaaggcaagaaggaggcctcagagcaaaagaagaaggacaaagacaaaaaaacagactcggaagagcaagacaagagcagggatgaggacaatgatgaagacgaagaaaggctggaagaagaagaacagaatgaagaggaagaagtagacaactgaaaagggcgggagactgtggcaccttggaaggtaccacttgaaatgagacgtgctacgtgtttctgtgaagcttttccatgctgggcagagtagtctcaggcaaaagtgcctgaaaagatcagaataaaaactgactagaaataccgtcaaaaccagcacttaccaaactcagagcatctgagtagcagaatcctgtttgcttcatcaatctgaaggttatggccttttgacaagagggattctgaacgactaaattagtcagtttgctcgcttttgtttacttaaatgtatggttagatggttttgatctgcagtcttccctagtcccccaaataagtaataataacttccatgctgcctgctgtgttccagatcacagaggcagccaaggctcaggaaaaactggggctttgcttatggtcagcctatgtttgattgcacagtctttgacaatagtagcttactaagactgctcagaatgagtaagctttaggaaactactaaaatgctgtgggagaataacaaaatccgttctctctcttcacttgacagaagcattaactgaattttgtttttcatagacccacttggcccaaaacctttctatattgcctgtagatgatcggcctgctggtgtggtagtaatctgatcacagatattcttaaatcagcagtgtggaatggtattagtcaaacatggtgccagtgtcttttacaaaaacagatggcatagtgtcagatgtaccttactctctgctactgtacagctttaggatttgtcatcacctcccggaaggtgtaaaaccccaggcttcctcttcttgtagtccatctcccagacttgtgactatggcttttcattcttcaattcatgacgagtgccaaacttgattttctctaggcacagctttctccctctgtgcctcctgcttcctttctctctcctgcctctcctctgctccccatcccactttctcatctgcctccttttctcacttctgtcagtctgtaagctttgataacctgcttaatactccaaagtgtgagttcctctgatctcttgattccttagttctaatctcacgttttgtttttaagagatggagtctctcactctgtggcccaggctggagtgcagtggcatgatcatagctcattgcatccttgaaatcctgggctcaggtgatcctcccgcctgagcctcctgagtatctgggactacagatgcgtgccaccaagcctggctaattttgtctcatgtcttctaaaaattattttgtgaagccccttcacaaaaaaccttaagggaaatctgatggtgctcaggaatctaactctccctaaaccatcctctttaactgcttctaaaatatctctgttggcctttcttagcctttttctgtttccattcagtgctccaagcgctttttgtttctaagttgagtgcttggggtttgacaggtagtgacgtgtagtttgacactgttaacttgttaaatacagtgaaaagtttgtgagtgaagaatgctgagaagattgtaatgctttgtacaaataaaagtcttgttaaaaaa

SEQ ID NO: 425978 - DNA, 2461 bp, Homo sapiens
acggacggaagctccattgagccaaataagttggtgagaaggttcccgacgcggcgatggcgagaagcagagaaatggacctggggaggggcgtgcggggtgcggtagggttggatggaagccttggcgggccaaaaccactgcggcttcaaaatccggatgcgccggtatttgaggcggaggcggggctgtggggggaggagggaggctatggcgctcagagcactgtgggacactgtaggccacgtggggcggaacggaaacctcgcagggtcagaccgtagcgacgcgggaagtccggacgcagtagctccctgaagcggaggcgaaggggagtttaagccccagcggcggcaatggcggagaggcccgaggacctaaacctgcccaatgccgtgatcaccaggatcatcaaggaggcggtgagcagctcggggggggcggacgaacgggcaggagggaagcaggtgctggaacggcagctttgctcacccccggtctcctcgcagctcccggacggtgtcaacatctccaaggaggcccggagcgccatctcccgcgccgccagcgtcttcgtgctgtacgccacatcctgtgctaacaactttgcaatgaaaggaaagcggaagacgctgaatgccagtgatgtgctctcagccatggaagagatggagttccagcggttcgttaccccattgaaagaagctctggaagcatataggcgggagcagaaaggcaagaaggaggcctcagagcaaaagaagaaggacaaagacaaaaaaacagactcggaagagcaagacaagagcagggatgaggacaatgatgaagacgaagaaaggctggaagaagaagaacagaatgaagaggaagaagtagacaactgaaaagggcgggagactgtggcaccttggaaggtaccacttgaaatgagacgtgctacgtgtttctgtgaagcttttccatgctgggcagagtagtctcaggcaaaagtgcctgaaaagatcagaataaaaactgactagaaataccgtcaaaaccagcacttaccaaactcagagcatctgagtagcagaatcctgtttgcttcatcaatctgaaggttatggccttttgacaagagggattctgaacgactaaattagtcagtttgctcgcttttgtttacttaaatgtatggttagatggttttgatctgcagtcttccctagtcccccaaataagtaataataacttccatgctgcctgctgtgttccagatcacagaggcagccaaggctcaggaaaaactggggctttgcttatggtcagcctatgtttgattgcacagtctttgacaatagtagcttactaagactgctcagaatgagtaagctttaggaaactactaaaatgctgtgggagaataacaaaatccgttctctctcttcacttgacagaagcattaactgaattttgtttttcatagacccacttggcccaaaacctttctatattgcctgtagatgatcggcctgctggtgtggtagtaatctgatcacagatattcttaaatcagcagtgtggaatggtattagtcaaacatggtgccagtgtcttttacaaaaacagatggcatagtgtcagatgtaccttactctctgctactgtacagctttaggatttgtcatcacctcccggaaggtgtaaaaccccaggcttcctcttcttgtagtccatctcccagacttgtgactatggcttttcattcttcaattcatgacgagtgccaaacttgattttctctaggcacagctttctccctctgtgcctcctgcttcctttctctctcctgcctctcctctgctccccatcccactttctcatctgcctccttttctcacttctgtcagtctgtaagctttgataacctgcttaatactccaaagtgtgagttcctctgatctcttgattccttagttctaatctcacgttttgtttttaagagatggagtctctcactctgtggcccaggctggagtgcagtggcatgatcatagctcattgcatccttgaaatcctgggctcaggtgatcctcccgcctgagcctcctgagtatctgggactacagatgcgtgccaccaagcctggctaattttgtctcatgtcttctaaaaattattttgtgaagccccttcacaaaaaaccttaagggaaatctgatggtgctcaggaatctaactctccctaaaccatcctctttaactgcttctaaaatatctctgttggcctttcttagcctttttctgtttccattcagtgctccaagcgctttttgtttctaagttgagtgcttggggtttgacaggtagtgacgtgtagtttgacactgttaacttgttaaatacagtgaaaagtttgtgagtgaagaatgctgagaagattgtaatgctttgtacaaataaaagtcttgttaaaaaa

SEQ ID NO: 425979 - DNA, 2111 bp, Homo sapiens
acggacggaagctccattgagccaaataagttggtgagaaggttcccgacgcggcgatggcgagaagcagagaaatggacctggggaggggcgtgcggggtgcggtagggttggatggaagccttggcgggccaaaaccactgcggcttcaaaatccggatgcgccggtatttgaggcggaggcggggctgtggggggaggagggaggctatggcgctcagagcactgtgggacactgtaggccacgtggggcggaacggaaacctcgcagggtcagaccgtagcgacgcgggaagtccggacgcagtagctccctgaagcggaggcgaaggggagtttaagccccagcggcggcaatggcggagaggcccgaggacctaaacctgcccaatgccgtgatcaccaggatcatcaaggaggcgctcccggacggtgtcaacatctccaaggaggcccggagcgccatctcccgcgccgccagcgtcttcgtgctgtacgccacatcctgtgctaacaactttgcaatgaaaggaaagcggaagacgctgaatgccagtgatgtgctctcagccatggaagagatggagttccagcggttcgttaccccattgaaagaagctctggaagcatataggcgggagcagaaaggcaagaaggaggcctcagagcaaaagaagaaggacaaagacaaaaaaacagactcggaagagcaagacaagagcagggatgaggacaatgatgaagacgaagaaaggctggaagaagaagaacagaatgaagaggaagaagtagacaactgaaaagggcgggagactgtggcaccttggaaggtaccacttgaaatgagacgtgctacgtgtttctgtgaagcttttccatgctgggcagagtagtctcaggcaaaagtgcctgaaaagatcagaataaaaactgactagaaataccgtcaaaaccagcacttaccaaactcagagcatctgagtagcagaatcctgtttgcttcatcaatctgaaggttatggccttttgacaagagggattctgaacgactaaattagtcagtttgctcgcttttgtttacttaaatgtatggttagatggttttgatctgcagtcttccctagtcccccaaataagtaataataacttccatgctgcctgctgtgttccagatcacagaggcagccaaggctcaggaaaaactggggctttgcttatggtcagcctatgtttgattgcacagtctttgacaatagtagcttactaagactgctcagaatgagtaagctttaggaaactactaaaatgctgtgggagaataacaaaatccgttctctctcttcacttgacagaagcattaactgaattttgtttttcatagacccacttggcccaaaacctttctatattgcctgtagatgatcggcctgctggtgtggtagtaatctgatcacagatattcttaaatcagcagtgtggaatggtattagtcaaacatggtgccagtgtcttttacaaaaacagatggcatagtgtcagatgtaccttactctctgctactgtacagctttaggatttgtcatcacctcccggaaggtgtaaaaccccaggcttcctcttcttgtagtccatctcccagacttgtgactatggcttttcattcttcaatttgcagtggcatgatcatagctcattgcatccttgaaatcctgggctcaggtgatcctcccgcctgagcctcctgagtatctgggactacagatgcgtgccaccaagcctggctaattttgtctcatgtcttctaaaaattattttgtgaagccccttcacaaaaaaccttaagggaaatctgatggtgctcaggaatctaactctccctaaaccatcctctttaactgcttctaaaatatctctgttggcctttcttagcctttttctgtttccattcagtgctccaagcgctttttgtttctaagttgagtgcttggggtttgacaggtagtgacgtgtagtttgacactgttaacttgttaaatacagtgaaaagtttgtgagtgaagaatgctgagaagattgtaatgctttgtacaaataaaagtcttgttaaaaaa

SEQ ID NO: 425980 - DNA, 1754 bp, Homo sapiens
acggacggaagctccattgagccaaataagttggtgagaaggttcccgacgcggcgatggcgagaagcagagaaatggacctggggaggggcgtgcggggtgcggtagggttggatggaagccttggcgggccaaaaccactgcggcttcaaaatccggatgcgccggtatttgaggcggaggcggggctgtggggggaggagggaggctatggcgctcagagcactgtgggacactgtaggccacgtggggcggaacggaaacctcgcagggtcagaccgtagcgacgcgggaagtccggacgcagtagctccctgaagcggaggcgaaggggagtttaagccccagcggcggcaatggcggagaggcccgaggacctaaacctgcccaatgccgtgatcaccaggatcatcaaggaggcgctcccggacggtgtcaacatctccaaggaggcccggagcgccatctcccgcgccgccagcgtcttcgtgctgtacgccacatcctgtgctaacaactttgcaatgaaaggaaagcggaagacgctgaatgccagtgatgtgctctcagccatggaagagatggagttccagcggttcgttaccccattgaaagaagctctggaagcatataggcgggagcagaaaggcaagaaggaggcctcagagcaaaagaagaaggacaaagacaaaaaaacagactcggaagagcaagacaagagcagggatgaggacaatgatgaagacgaagaaaggctggaagaagaagaacagaatgaagaggaagaagtagacaactgaaaagggcgggagactgtggcaccttggaaggtaccacttgaaatgagacgtgctacgtgtttctgtgaagcttttccatgctgggcagagtagtctcaggcaaaagtgcctgaaaagatcagaataaaaactgactagaaataccgtcaaaaccagcacttaccaaactcagagcatctgagtagcagaatcctgtttgcttcatcaatctgaaggttatggccttttgacaagagggattctgaacgactaaattagtcagtttgctcgcttttgtttacttaaatgtatggttagatggttttgatctgcagtcttccctagtcccccaaataagtaataataacttccatgctgcctgctgtgttccagatcacagaggcagccaaggctcaggaaaaactggggctttgcttatggtcagcctatgtttgattgcacagtctttgacaatagtagcttactaagactgctcagaatgagtaagctttaggaaactactaaaatgctgtgggagaataacaaaatccgttctctctcttcacttgacagaagcattaactgaattttgtttttcatagacccacttggcccaaaacctttctatattgcctgtagatgatcggcctgctggtgtggtagtaatctgatcacagatattcttaaatcagcagtgtggaatggtattagtcaaacatggtgccagtgtcttttacaaaaacagatggcatagtgtcagatgtaccttactctctgctactgtacagctttaggatttgtcatcacctcccggaaggtgtaaaaccccaggcttctaagttgagtgcttggggtttgacaggtagtgacgtgtagtttgacactgttaacttgttaaatacagtgaaaagtttgtgagtgaagaatgctgagaagattgtaatgctttgtacaaataaaagtcttgttaaaaaa

SEQ ID NO: 425981 - DNA, 3392 bp, Homo sapiens
ttttttggcggagtgaccacatagagtaaaaagaatgtaaccctctttggttttatgtgttttggctcaggttggacatacttatataaatgtgattgacattgaagctaatgatcttctacaggaattacctgtgagagaagagccttcaaatgataatgttatcaaacagcaaagcgatcatctagcagttccatcgtctgcagagttacattatatggcagcttcagttactaatgctgttcccccacataattttaagagtcaagaagtaactccagcttgtctggatggaaaaagcttgagagcaggcattacagaagtgaaggagcctagtgtcacctcacctacaccatcagacatacagcagaacaaaggtctgccaaaaccagagttccgattcaaaggacagagcacaaagtcagactctgcagaagattatctattgtggaaacggctgcaaggtgtctctgcagcttgccctgcaccaagctctgcagctcaccaactagagcatctcagtgctaagcttcagaaaattgacgagcagttgctagcaatacagaacattgctgaaaacatagaacaggatttccccaagcctgaaatgctagatctacattgtgataagattggaccagtggatcacattgaattctcttctggccctgaattcaaaaaaacattagcttcaaaaaccattagcatttctgaagaagtgcgttttttgacccatatggatgaagaagatcaaagtgacaaaaaggagacttcagaacctgaattttcaataacagaaaattattctggtcagaaaacctgtgtgtttcctactgccgattcagctgtcagcctttccagttccagtgatcagaatactacttctcctggtatgaatagcagtgatgaattgtgtgagagtgtttcagtacatccgctccagatgactggattgactgatattgcagacattattgatgaccttataattaaagacggagtttccagtgaagaacttggcttaacagaacaagctatgggcacctccagaattcagcattattctggcagacattcacaaagaactgacaaggaaagaagagagattcaagcctggatgaaaagaaaacgaaaagaaagaatggcaaagtacttaaatgagctggcagaaaagagagggcaagaacatgatcctttctgtcccagaagcaatccactttacatgacttcaagggaaataaggctgagacaaaagatgaagcatgaaaaagacagattgctgctctctgaacactatagtcgtcgaatctcacaagcgtacggtctgatgaatgaactgttatctgagtcagtacagctaccaactctaccacagaaaccattgcctaacaaacccagccctactcagtcttccagttgtcaacactgcccttctccaagaggagagaatcaacatggtcacagttttctaataaatcgacctggaaaagtcaaatatatgtccaaaccgagttatatccataagaggaagtcttttgggcaacctcaaggctcaccttggccacatggaactgccactttcaccatacagaaaaaagctggtggagccaaagcagcagtaagaaaggctacgcagtctccagttaccttccaaaaaggctctaatgctccgtgtcatagtctgcagcatacaaaaaaacatggaagtgctgggcttgcacctcaaaccaagcaggtgtgtgtagagtatgaaagagaggagactgtggtgagtccctggacgataccttcagaaatccataagattcttcatgagagtcacaattcccttctacaagacttgtctccaactgaagaggaagagccagagcatccttttggggtgggcggtgtggacagcgtgtctgagagcactggcagcatcctcagcaagctggactggaatgccatcgaagacatggtggccagcgtggaggaccagggcctgtctgtccactgggccctggacctgtaagacctggatatcattgggtttccatgcacaggccagcacctcagtaatgtggttctgaaagattaacaggtttaagggacagaagcaatgaaagaagcaatgtgaattttccatttgctttcatattattacctggattagccattaccagaggaaaaataaacatttctcagtaactttgcctttatggggaaagggttgactattgatgtattatatgtttttgtatttgatgcatcattaggcataatttttaaaatgataagtacctttcaagccaagtttgcataacctactttcaataaaaaccctctatcttgcctcctcctttattaccctctgagttttgagaaacaaccatatacagatgaatctaataggaaaaaaaaaaatcttttcattgagaagaaaatcagtctcacctgagaactcaattatgaaccctattttaaaacacctatgcagggtttagcctaggagtgaaaagaaaaaccaactaccttttaccaaccctgaatctctaaataagcaaagtttcatggaggccaggagatcttctgtcttctgccctgtagcctgaagccttggaggaagaaacaggaatggatgctttgggcaggaaagtaagggaatatgactccggcctctagaaggctcatcttaaatttgtaagaaccatggtacagagacctgattagtttttggtattgtgctccaataatgtcatagttttaagagataatttttatgagaattgactaagaaccagtatccttcaactacttcatcaatgtttggtataatataaaagcacactatcatctgaaaaagctattaaatacccctctttttccaaatatctacctgtgtgaagccaggttttacaacatgtattgcagcaagttgaatgcagaagcaggtatggtaattcagctgccttctatcaagctaaacattaaagagatttgtagaactataaaacaatgctactctccttaccaaattgttttagaaaatagctttataggctaacattattgttaattgtcatttaattgttttgtcatttaaaatattttaaattgttttctgttagtttcttttttgtatattctatgggtattttattgatacatgatagttgtacatttttatggggtgcatgtgatattttgatatgtgcatacaatgtgtagcaatcaaatcagggtaattgggatattcatcacctcaaacatttatcatttatttgtgttggaaacattcaaaccttttcttctagctatttatccattgttggatacttatatcaattctatatcttagctgttgtgaatagagctgcaataaatgtaggagtgcagataaaaaaaaaata

SEQ ID NO: 425982 - DNA, 3549 bp, Homo sapiens
gccaggacacacgaacattgtggttcccatcctttggatgaattcgacgtacctttgaaatgctacaagatgataatacttcagctggattgcatttcatggcctctgtaaaaaagaaagctataggaagtcaagatgcaagtacaaatacagacccagaacatgagcctttgactgctcctcagctcttggtcccagatgtctatctaaatctgaagctttccagtgaaatgtcagagaaaccttggtcaccctcaatacctcatacagtaacaaacttggaattacctgtgagagaagagccttcaaatgataatgttatcaaacagcaaagcgatcatctagcagttccatcgtctgcagagttacattatatggcagcttcagttactaatgctgttcccccacataattttaagagtcaagaagtaactccagcttgtctggatggaaaaagcttgagagcaggcattacagaagtgaaggagcctagtgtcacctcacctacaccatcagacatacagcagaacaaaggtctgccaaaaccagagttccgattcaaaggacagagcacaaagtcagactctgcagaagattatctattgtggaaacggctgcaaggtgtctctgcagcttgccctgcaccaagctctgcagctcaccaactagagcatctcagtgctaagcttcagaaaattgacgagcagttgctagcaatacagaacattgctgaaaacatagaacaggatttccccaagcctgaaatgctagatctacattgtgataagattggaccagtggatcacattgaattctcttctggccctgaattcaaaaaaacattagcttcaaaaaccattagcatttctgaagaagtgcgttttttgacccatatggatgaagaagatcaaagtgacaaaaaggagacttcagaacctgaattttcaataacagaaaattattctggtcagaaaacctgtgtgtttcctactgccgattcagctgtcagcctttccagttccagtgatcagaatactacttctcctggtatgaatagcagtgatgaattgtgtgagagtgtttcagtacatccgctccagatgactggattgactgatattgcagacattattgatgaccttataattaaagacggagtttccagtgaagaacttggcttaacagaacaagctatgggcacctccagaattcagcattattctggcagacattcacaaagaactgacaaggaaagaagagagattcaagcctggatgaaaagaaaacgaaaagaaagaatggcaaagtacttaaatgagctggcagaaaagagagggcaagaacatgatcctttctgtcccagaagcaatccactttacatgacttcaagggaaataaggctgagacaaaagatgaagcatgaaaaagacagattgctgctctctgaacactatagtcgtcgaatctcacaagcgtacggtctgatgaatgaactgttatctgagtcagtacagctaccaactctaccacagaaaccattgcctaacaaacccagccctactcagtcttccagttgtcaacactgcccttctccaagaggagagaatcaacatggtcacagttttctaataaatcgacctggaaaagtcaaatatatgtccaaaccgagttatatccataagaggaagtcttttgggcaacctcaaggctcaccttggccacatggaactgccactttcaccatacagaaaaaagctggtggagccaaagcagcagtaagaaaggctacgcagtctccagttaccttccaaaaaggctctaatgctccgtgtcatagtctgcagcatacaaaaaaacatggaagtgctgggcttgcacctcaaaccaagcaggtgtgtgtagagtatgaaagagaggagactgtggtgagtccctggacgataccttcagaaatccataagattcttcatgagagtcacaattcccttctacaagacttgtctccaactgaagaggaagagccagagcatccttttggggtgggcggtgtggacagcgtgtctgagagcactggcagcatcctcagcaagctggactggaatgccatcgaagacatggtggccagcgtggaggaccagggcctgtctgtccactgggccctggacctgtaagacctggatatcattgggtttccatgcacaggccagcacctcagtaatgtggttctgaaagattaacaggtttaagggacagaagcaatgaaagaagcaatgtgaattttccatttgctttcatattattacctggattagccattaccagaggaaaaataaacatttctcagtaactttgcctttatggggaaagggttgactattgatgtattatatgtttttgtatttgatgcatcattaggcataatttttaaaatgataagtacctttcaagccaagtttgcataacctactttcaataaaaaccctctatcttgcctcctcctttattaccctctgagttttgagaaacaaccatatacagatgaatctaataggaaaaaaaaaaatcttttcattgagaagaaaatcagtctcacctgagaactcaattatgaaccctattttaaaacacctatgcagggtttagcctaggagtgaaaagaaaaaccaactaccttttaccaaccctgaatctctaaataagcaaagtttcatggaggccaggagatcttctgtcttctgccctgtagcctgaagccttggaggaagaaacaggaatggatgctttgggcaggaaagtaagggaatatgactccggcctctagaaggctcatcttaaatttgtaagaaccatggtacagagacctgattagtttttggtattgtgctccaataatgtcatagttttaagagataatttttatgagaattgactaagaaccagtatccttcaactacttcatcaatgtttggtataatataaaagcacactatcatctgaaaaagctattaaatacccctctttttccaaatatctacctgtgtgaagccaggttttacaacatgtattgcagcaagttgaatgcagaagcaggtatggtaattcagctgccttctatcaagctaaacattaaagagatttgtagaactataaaacaatgctactctccttaccaaattgttttagaaaatagctttataggctaacattattgttaattgtcatttaattgttttgtcatttaaaatattttaaattgttttctgttagtttcttttttgtatattctatgggtattttattgatacatgatagttgtacatttttatggggtgcatgtgatattttgatatgtgcatacaatgtgtagcaatcaaatcagggtaattgggatattcatcacctcaaacatttatcatttatttgtgttggaaacattcaaaccttttcttctagctatttatccattgttggatacttatatcaattctatatcttagctgttgtgaatagagctgcaataaatgtaggagtgcagataaaaaaaaaata

SEQ ID NO: 425983 - DNA, 3472 bp, Homo sapiens
cttccattgagttaggtactgtgctgctgggctcctggtaatctgttagcttctcaatgattacttccaatgttttattatatttaagaaatgctacaagatgataatacttcagctggattgcatttcatggcctctgtaaaaaagaaagctataggaagtcaagatgcaagtacaaatacagacccagaacatgagcctttgactgctcctcagctcttggtcccagatgtctatctaaatctgaagctttccagtgaaatgtcagagaaaccttggtcaccctcaatacctcatacagtaacaaacttggaattacctgtgagagaagagccttcaaatgataatgttatcaaacagcaaagcgatcatctagcagttccatcgtctgcagagttacattatatggcagcttcagttactaatgctgttcccccacataattttaagagtcaaggtctgccaaaaccagagttccgattcaaaggacagagcacaaagtcagactctgcagaagattatctattgtggaaacggctgcaaggtgtctctgcagcttgccctgcaccaagctctgcagctcaccaactagagcatctcagtgctaagcttcagaaaattgacgagcagttgctagcaatacagaacattgctgaaaacatagaacaggatttccccaagcctgaaatgctagatctacattgtgataagattggaccagtggatcacattgaattctcttctggccctgaattcaaaaaaacattagcttcaaaaaccattagcatttctgaagaagtgcgttttttgacccatatggatgaagaagatcaaagtgacaaaaaggagacttcagaacctgaattttcaataacagaaaattattctggtcagaaaacctgtgtgtttcctactgccgattcagctgtcagcctttccagttccagtgatcagaatactacttctcctggtatgaatagcagtgatgaattgtgtgagagtgtttcagtacatccgctccagatgactggattgactgatattgcagacattattgatgaccttataattaaagacggagtttccagtgaagaacttggcttaacagaacaagctatgggcacctccagaattcagcattattctggcagacattcacaaagaactgacaaggaaagaagagagattcaagcctggatgaaaagaaaacgaaaagaaagaatggcaaagtacttaaatgagctggcagaaaagagagggcaagaacatgatcctttctgtcccagaagcaatccactttacatgacttcaagggaaataaggctgagacaaaagatgaagcatgaaaaagacagattgctgctctctgaacactatagtcgtcgaatctcacaagcgtacggtctgatgaatgaactgttatctgagtcagtacagctaccaactctaccacagaaaccattgcctaacaaacccagccctactcagtcttccagttgtcaacactgcccttctccaagaggagagaatcaacatggtcacagttttctaataaatcgacctggaaaagtcaaatatatgtccaaaccgagttatatccataagaggaagtcttttgggcaacctcaaggctcaccttggccacatggaactgccactttcaccatacagaaaaaagctggtggagccaaagcagcagtaagaaaggctacgcagtctccagttaccttccaaaaaggctctaatgctccgtgtcatagtctgcagcatacaaaaaaacatggaagtgctgggcttgcacctcaaaccaagcaggtgtgtgtagagtatgaaagagaggagactgtggtgagtccctggacgataccttcagaaatccataagattcttcatgagagtcacaattcccttctacaagacttgtctccaactgaagaggaagagccagagcatccttttggggtgggcggtgtggacagcgtgtctgagagcactggcagcatcctcagcaagctggactggaatgccatcgaagacatggtggccagcgtggaggaccagggcctgtctgtccactgggccctggacctgtaagacctggatatcattgggtttccatgcacaggccagcacctcagtaatgtggttctgaaagattaacaggtttaagggacagaagcaatgaaagaagcaatgtgaattttccatttgctttcatattattacctggattagccattaccagaggaaaaataaacatttctcagtaactttgcctttatggggaaagggttgactattgatgtattatatgtttttgtatttgatgcatcattaggcataatttttaaaatgataagtacctttcaagccaagtttgcataacctactttcaataaaaaccctctatcttgcctcctcctttattaccctctgagttttgagaaacaaccatatacagatgaatctaataggaaaaaaaaaaatcttttcattgagaagaaaatcagtctcacctgagaactcaattatgaaccctattttaaaacacctatgcagggtttagcctaggagtgaaaagaaaaaccaactaccttttaccaaccctgaatctctaaataagcaaagtttcatggaggccaggagatcttctgtcttctgccctgtagcctgaagccttggaggaagaaacaggaatggatgctttgggcaggaaagtaagggaatatgactccggcctctagaaggctcatcttaaatttgtaagaaccatggtacagagacctgattagtttttggtattgtgctccaataatgtcatagttttaagagataatttttatgagaattgactaagaaccagtatccttcaactacttcatcaatgtttggtataatataaaagcacactatcatctgaaaaagctattaaatacccctctttttccaaatatctacctgtgtgaagccaggttttacaacatgtattgcagcaagttgaatgcagaagcaggtatggtaattcagctgccttctatcaagctaaacattaaagagatttgtagaactataaaacaatgctactctccttaccaaattgttttagaaaatagctttataggctaacattattgttaattgtcatttaattgttttgtcatttaaaatattttaaattgttttctgttagtttcttttttgtatattctatgggtattttattgatacatgatagttgtacatttttatggggtgcatgtgatattttgatatgtgcatacaatgtgtagcaatcaaatcagggtaattgggatattcatcacctcaaacatttatcatttatttgtgttggaaacattcaaaccttttcttctagctatttatccattgttggatacttatatcaattctatatcttagctgttgtgaatagagctgcaataaatgtaggagtgcagataaaaaaaaaata

SEQ ID NO: 425984 - DNA, 2146 bp, Homo sapiens
ataaatgatgcttaattctttgtctacagattgctgctctctgaacactatagtcgtcgaatctcacaagcgtacggtctgatgaatgaactgttatctgagtcagtacagctaccaactctaccacagaaaccattgcctaacaaacccagccctactcagtcttccagttgtcaacactgcccttctccaagaggagagaatcaacatggtcacagttttctaataaatcgacctggaaaagtcaaatatatgtccaaaccgagttatatccataagaggaagtcttttgggcaacctcaaggctcaccttggccacatggaactgccactttcaccatacagaaaaaagctggtggagccaaagcagcagtaagaaaggctacgcagtctccagttaccttccaaaaaggctctaatgctccgtgtcatagtctgcagcatacaaaaaaacatggaagtgctgggcttgcacctcaaaccaagcaggtgtgtgtagagtatgaaagagaggagactgtggtgagtccctggacgataccttcagaaatccataagattcttcatgagagtcacaattcccttctacaagacttgtctccaactgaagaggaagagccagagcatccttttggggtgggcggtgtggacagcgtgtctgagagcactggcagcatcctcagcaagctggactggaatgccatcgaagacatggtggccagcgtggaggaccagggcctgtctgtccactgggccctggacctgtaagacctggatatcattgggtttccatgcacaggccagcacctcagtaatgtggttctgaaagattaacaggtttaagggacagaagcaatgaaagaagcaatgtgaattttccatttgctttcatattattacctggattagccattaccagaggaaaaataaacatttctcagtaactttgcctttatggggaaagggttgactattgatgtattatatgtttttgtatttgatgcatcattaggcataatttttaaaatgataagtacctttcaagccaagtttgcataacctactttcaataaaaaccctctatcttgcctcctcctttattaccctctgagttttgagaaacaaccatatacagatgaatctaataggaaaaaaaaaaatcttttcattgagaagaaaatcagtctcacctgagaactcaattatgaaccctattttaaaacacctatgcagggtttagcctaggagtgaaaagaaaaaccaactaccttttaccaaccctgaatctctaaataagcaaagtttcatggaggccaggagatcttctgtcttctgccctgtagcctgaagccttggaggaagaaacaggaatggatgctttgggcaggaaagtaagggaatatgactccggcctctagaaggctcatcttaaatttgtaagaaccatggtacagagacctgattagtttttggtattgtgctccaataatgtcatagttttaagagataatttttatgagaattgactaagaaccagtatccttcaactacttcatcaatgtttggtataatataaaagcacactatcatctgaaaaagctattaaatacccctctttttccaaatatctacctgtgtgaagccaggttttacaacatgtattgcagcaagttgaatgcagaagcaggtatggtaattcagctgccttctatcaagctaaacattaaagagatttgtagaactataaaacaatgctactctccttaccaaattgttttagaaaatagctttataggctaacattattgttaattgtcatttaattgttttgtcatttaaaatattttaaattgttttctgttagtttcttttttgtatattctatgggtattttattgatacatgatagttgtacatttttatggggtgcatgtgatattttgatatgtgcatacaatgtgtagcaatcaaatcagggtaattgggatattcatcacctcaaacatttatcatttatttgtgttggaaacattcaaaccttttcttctagctatttatccattgttggatacttatatcaattctatatcttagctgttgtgaatagagctgcaataaatgtaggagtgcagataaaaaaaaaata

SEQ ID NO: 425985 - DNA, 3361 bp, Homo sapiens
ttttttggcggagtgaccacatagagtaaaaagaatgtaaccctctttggttttatgtgttttggctcaggttggacatacttatataaatgtgattgacattgaagctaatgatcttctacaggaattacctgtgagagaagagccttcaaatgataatgttatcaaacagcaaagcgatcatctagcagttccatcgtctgcagagttacattatatggcagcttcagttactaatgctgttcccccacataattttaagagtcaagaagtaactccagcttgtctggatggaaaaagcttgagagcaggcattacagaagtgaaggagcctagtgtcacctcacctacaccatcagacatacagcagaacaaaggtctgccaaaaccagagttccgattcaaaggacagagcacaaagtcagactctgcagaagattatctattgtggaaacggctgcaaggtgtctctgcagcttgccctgcaccaagctctgcagctcaccaactagagcatctcagtgctaagcttcagaaaattgacgagcagttgctagcaatacagaacattgctgaaaacatagaacaggatttccccaagcctgaaatgctagatctacattgtgataagattggaccagtggatcacattgaattctcttctggccctgaattcaaaaaaacattagcttcaaaaaccattagcatttctgaagaagtgcgttttttgacccatatggatgaagaagatcaaagtgacaaaaaggagacttcagaacctgaattttcaataacagaaaattattctggtcagaaaacctgtgtgtttcctactgccgattcagctgtcagcctttccagttccagtgatcagaatactacttctcctgtgtttcagtacatccgctccagatgactggattgactgatattgcagacattattgatgaccttataattaaagacggagtttccagtgaagaacttggcttaacagaacaagctatgggcacctccagaattcagcattattctggcagacattcacaaagaactgacaaggaaagaagagagattcaagcctggatgaaaagaaaacgaaaagaaagaatggcaaagtacttaaatgagctggcagaaaagagagggcaagaacatgatcctttctgtcccagaagcaatccactttacatgacttcaagggaaataaggctgagacaaaagatgaagcatgaaaaagacagattgctgctctctgaacactatagtcgtcgaatctcacaagcgtacggtctgatgaatgaactgttatctgagtcagtacagctaccaactctaccacagaaaccattgcctaacaaacccagccctactcagtcttccagttgtcaacactgcccttctccaagaggagagaatcaacatggtcacagttttctaataaatcgacctggaaaagtcaaatatatgtccaaaccgagttatatccataagaggaagtcttttgggcaacctcaaggctcaccttggccacatggaactgccactttcaccatacagaaaaaagctggtggagccaaagcagcagtaagaaaggctacgcagtctccagttaccttccaaaaaggctctaatgctccgtgtcatagtctgcagcatacaaaaaaacatggaagtgctgggcttgcacctcaaaccaagcaggtgtgtgtagagtatgaaagagaggagactgtggtgagtccctggacgataccttcagaaatccataagattcttcatgagagtcacaattcccttctacaagacttgtctccaactgaagaggaagagccagagcatccttttggggtgggcggtgtggacagcgtgtctgagagcactggcagcatcctcagcaagctggactggaatgccatcgaagacatggtggccagcgtggaggaccagggcctgtctgtccactgggccctggacctgtaagacctggatatcattgggtttccatgcacaggccagcacctcagtaatgtggttctgaaagattaacaggtttaagggacagaagcaatgaaagaagcaatgtgaattttccatttgctttcatattattacctggattagccattaccagaggaaaaataaacatttctcagtaactttgcctttatggggaaagggttgactattgatgtattatatgtttttgtatttgatgcatcattaggcataatttttaaaatgataagtacctttcaagccaagtttgcataacctactttcaataaaaaccctctatcttgcctcctcctttattaccctctgagttttgagaaacaaccatatacagatgaatctaataggaaaaaaaaaaatcttttcattgagaagaaaatcagtctcacctgagaactcaattatgaaccctattttaaaacacctatgcagggtttagcctaggagtgaaaagaaaaaccaactaccttttaccaaccctgaatctctaaataagcaaagtttcatggaggccaggagatcttctgtcttctgccctgtagcctgaagccttggaggaagaaacaggaatggatgctttgggcaggaaagtaagggaatatgactccggcctctagaaggctcatcttaaatttgtaagaaccatggtacagagacctgattagtttttggtattgtgctccaataatgtcatagttttaagagataatttttatgagaattgactaagaaccagtatccttcaactacttcatcaatgtttggtataatataaaagcacactatcatctgaaaaagctattaaatacccctctttttccaaatatctacctgtgtgaagccaggttttacaacatgtattgcagcaagttgaatgcagaagcaggtatggtaattcagctgccttctatcaagctaaacattaaagagatttgtagaactataaaacaatgctactctccttaccaaattgttttagaaaatagctttataggctaacattattgttaattgtcatttaattgttttgtcatttaaaatattttaaattgttttctgttagtttcttttttgtatattctatgggtattttattgatacatgatagttgtacatttttatggggtgcatgtgatattttgatatgtgcatacaatgtgtagcaatcaaatcagggtaattgggatattcatcacctcaaacatttatcatttatttgtgttggaaacattcaaaccttttcttctagctatttatccattgttggatacttatatcaattctatatcttagctgttgtgaatagagctgcaataaatgtaggagtgcagataaaaaaaaaata

SEQ ID NO: 425986 - DNA, 2334 bp, Homo sapiens
ttttttggcggagtgaccacatagagtaaaaagaatgtaaccctctttggttttatgtgttttggctcaggttggacatacttatataaatgtgattgacattgaagctaatgatcttctacaggaattacctgtgagagaagagccttcaaatgataatgttatcaaacagcaaagcgatcatctagcagttccatcgtctgcagagttacattatatggcagcttcagttactaatgctgttcccccacataattttaagagtcaagaagtaactccagcttgtctggatggaaaaagcttgagagcaggcattacagaagtgaaggagcctagtgtcacctcacctacaccatcagacatacagcagaacaaaggtctgccaaaaccagagttccgattcaaaggacagagcacaaagtcagactctgcagaagattatctattgtggaaacggctgcaaggtgtctctgcagcttgccctgcaccaagctctgcagctcaccaactagagcatctcagtgctaagcttcagaaaattgacgagcagttgctagcaatacagaacattgctgaaaacatagaacaggatttccccaagcctgaaatgctagatctacattgtgataagattggaccagtggatcacattgaattctcttctggccctgaattcaaaaaaacattagcttcaaaaaccattagcatttctgaagaagtgcgttttttgacccatatggatgaagaagatcaaagtgacaaaaaggagacttcagaacctgaattttcaataacagaaaattattctggtcagaaaacctgtgtgtttcctactgccgattcagctgtcagcctttccagttccagtgatcagaatactacttctcctggtatgaatagcagtgatgaattgtgtgagagtgtttcagtacatccgctccagatgactggattgactgatattgcagacattattgatgaccttataattaaagacggagtttccagtgaagaacttggcttaacagaacaagctatgggcacctccagaattcagcattattctggcagacattcacaaagaactgacaaggaaagaagagagattcaagcctggatgaaaagaaaacgaaaagaaagaatggcaaagtacttaaatgagctggcagaaaagagagggcaagaacatgatcctttctgtcccagaagcaatccactttacatgacttcaagggaaataaggctgagacaaaagatgaagcatgaaaaagacagattgctgctctctgaacactatagtcgtcgaatctcacaagcgtacggtctgatgaatgaactgttatctgagtcagtacagctaccaactctaccacagaaaccattgcctaacaaacccagccctactcagtcttccagttgtcaacactgcccttctccaagaggagagaatcaacatggtcacagttttctaataaatcgacctggaaaagtcaaatatatgtccaaaccgagttatatccataagaggaagtcttttgggcaacctcaaggctcaccttggccacatggaactgccactttcaccatacagaaaaaagctggtggagccaaagcagcagtaagaaaggctacgcagtctccagttaccttccaaaaaggctctaatgctccgtgtcatagtctgcagcatacaaaaaaacatggaagtgctgggcttgcacctcaaaccaagcaggtgtgtgtagagtatgaaagagaggagactgtggtgagtccctggacgataccttcagaaatccataagattcttcatgagagtcacaattcccttctacaagacttgtctccaactgaagaggaagagccagagcatccttttggggtgggcggtgtggacagcgtgtctgagagcactggcagcatcctcagcaagctggactggaatgccatcgaagacatggtggccagcgtggaggaccagggcctgtctgtccactgggccctggacctgtaagacctggatatcattgggtttccatgcacaggccagcacctcagtaatgtggttctgaaagattaacaggtttaagggacagaagcaatgaaagaagcaatgtgaattttccatttgctttcatattattacctggattagccattaccagaggaaaaataaacatttctcagtaactttgcctttatggggaaagggttgactattgatgtattatatgtttttgtatttgatgcatcattaggcataatttttaaaatgataagtacctttcaagccaagtttgcataacctactttcaataaaaaccctctatcttg

SEQ ID NO: 425987 - DNA, 1966 bp, Homo sapiens
ttttttggcggagtgaccacatagagtaaaaagaatgtaaccctctttggttttatgtgttttggctcaggttggacatacttatataaatgtgattgacattgaagctaatgatcttctacaggaattacctgtgagagaagagccttcaaatgataatgttatcaaacagcaaagcgatcatctagcagttccatcgtctgcagagttacattatatggcagcttcagttactaatgctgttcccccacataattttaagagtcaagaagtaactccagcttgtctggatggaaaaagcttgagagcaggcattacagaagtgaaggagcctagtgtcacctcacctacaccatcagacatacagcagaacaaaggtctgccaaaaccagagttccgattcaaaggacagagcacaaagtcagactctgcagaagattatctattgtggaaacggctgcaaggtgtctctgcagcttgccctgcaccaagctctgcagctcaccaactagagcatctcagtgctaagcttcagaaaattgacgagcagttgctagcaatacagaacattgctgaaaacatagaacaggatttccccaagcctgaaatgctagatctacattgtgataagattggaccagtggatcacattgaattctcttctggccctgaattcaaaaaaacattagcttcaaaaaccattagcatttctgaagaagtgcgttttttgacccatatggatgaagaagatcaaagtgacaaaaaggagacttcagaacctgaattttcaataacagaaaattattctggtcagaaaacctgtgtgtttcctactgccgattcagctgtcagcctttccagttccagtgatcagaatactacttctcctggtatgaatagcagtgatgaattgtgtgagagtgtttcagtacatccgctccagatgactggattgactgatattgcagacattattgatgaccttataattaaagacggagtttccagtgaagaacttggcttaacagaacaagctatgggcacctccagaattcagcattattctggcagacattcacaaagaactgacaaggaaagaagagagattcaagcctggatgaaaagaaaacgaaaagaaagaatggcaaagtacttaaatgagctggcagaaaagagagggcaagaacatgatcctttctgtcccagaagcaatccactttacatgacttcaagggaaataaggctgagacaaaagatgaagcatgaaaaagacagattgctgctctctgaacactatagtcgtcgaatctcacaagcgtacggtctgatgaatgaactgttatctgagtcagtacagctaccaactctaccacagaaaccattgcctaacaaacccagccctactcagtcttccagttgtcaacactgcccttctccaagaggagagaatcaacatggtcacagttttctaataaatcgacctggaaaagtcaaatatatgtccaaaccgagttatatccataagaggaagtcttttgggcaacctcaaggctcaccttggccacatggaactgccactttcaccatacagaaaaaagctggtggagccaaagcagcagtaagaaaggctacgcagtctccagttaccttccaaaaaggctctaatgctccgtgtcatagtctgcagcatacaaaaaaacatggaagtgctgggcttgcacctcaaaccaagcaggtgtgtgtagagtatgaaagagaggagactgtggtgagtccctggacgataccttcagaaatccataagattcttcatgagagtcacaattcccttctacaagaggagagaatcaacatggtcacagttttctaataaatcgacctggaaaagtcaccatatatgtccaaaccgagttatatccataagaggaagtctctttggcaacctcagctcactttgccttatcga

SEQ ID NO: 425988 - DNA, 1285 bp, Homo sapiens
ttttttggcggagtgaccacatagagtaaaaagaatgtaaccctctttggttttatgtgttttggctcaggttggacatacttatataaatgtgattgacattgaagctaatgatcttctacaggaattacctgtgagagaagagccttcaaatgataatgttatcaaacagcaaagcgatcatctagcagttccatcgtctgcagagttacattatatggcagcttcagttactaatgctgttcccccacataattttaagagtcaagaagtaactccagcttgtctggatggaaaaagcttgagagcaggcattacagaagtgaaggagcctagtgtcacctcacctacaccatcagacatacagcagaacaaaggtctgccaaaaccagagttccgattcaaaggacagagcacaaagtcagactctgcagaagattatctattgtggaaacggctgcaaggtgtctctgcagcttgccctgcaccaagctctgcagctcaccaactagagcatctcagtgctaagcttcagaaaattgacgagcagttgctagcaatacagaacattgctgaaaacatagaacaggatttccccaagcctgaaatgctagatctacattgtgataagattggaccagtggatcacattgaattctcttctggccctgaattcaaaaaaacattagcttcaaaaaccattagcatttctgaagaagtgcgttttttgacccatatggatgaagaagatcaaagtgacaaaaaggagacttcagaacctgaattttcaataacagaaaattattctggtcagaaaacctgtgtgtttcctactgccgattcagctgtcagcctttccagttccagtgatcagaatactacttctcctggtatgaatagcagtgatgaattgtgtgagagtgtttcagtacatccgctccagatgactggattgactgatattgcagacattattgatgaccttataattaaagacggagtttccagtgaagaacttggcttaacagaacaagctatgggcacctccagaattcagcattattctggcagacattcacaaagaactgacaaggaaagaagagagattcaagcctggatgaaaagaaaacgaaaagaaagaatggcaaagtacttaaatgagctggcagaaaagagagggcaagaacatgatcctttctgtcccagaagcaatccagtactttgccattcttccatttcactatcatattcatcggcgttaatctaactttcttcccacaacact

SEQ ID NO: 425989 - DNA, 962 bp, Homo sapiens
  misc_feature (876)..(876): n is a, c, g, or t
  misc_feature (878)..(878): n is a, c, g, or t
  misc_feature (886)..(886): n is a, c, g, or t
  misc_feature (891)..(891): n is a, c, g, or t
  misc_feature (895)..(895): n is a, c, g, or t
  misc_feature (899)..(899): n is a, c, g, or t
tgccgtcgttgttggccacagcgtgggaagcagctctgggggagctcggagctcccgatcacggcttcttgggggtagctacggctgggtgtgtagaacggggccggggctggggctgggtcccctagtggagacccaagtgcgagaggcaagaactctgcagcttcctgccttctgggtcagttccttattcaagttgctactgctggcatcatttacaggccggtgccccgcgggtgagctggagacctcagacgtggtaactgtggtgctgggccaggacgcaaaactgccctgcttctaccgaggggactccggcgagcaagtggggcaagtggcatgggctcgggtggacgcgggcgaaggcgcccaggaactagcgctactgcactccaaatacgggcttcatgtgagcccggcttacgagggccgcgtggagcagccgccgcccccacgcaaccccctggacggctcagtgctcctgcgcaacgcagtgcaggcggatgagggcgagtacgagtgccgggtcagcaccttccccgccggcagcttccaggcgcggctgcggctccgagtgctggtgcctcccctgccctcactgaatcctggtccagcactagaagagggccagggcctgaccctggcagcctcctgcacagctgagggcagcccagcccccagcgtgacctgggacacggaggtcaaaggcacaacgtccagccgttccttcaagcactcccgctctgctgccgtcacctcagagttccacttggtgcctagccgcagcatgaatgggcagccactgacttgtgtggtgtcccatcctggcctgctccaggaccaaaggatcacccacatcctccacgtgtcctcctngngagcctgnagggnttgnaacnaattttgcatggggaagggcttgtcctgcttgatgggcccctctaatggggggttggcttcgg

SEQ ID NO: 425990 - DNA, 3454 bp, Homo sapiens
tgccgtcgttgttggccacagcgtgggaagcagctctgggggagctcggagctcccgatcacggcttcttgggggtagctacggctgggtgtgtagaacggggccggggctggggctgggtcccctagtggagacccaagtgcgagaggcaagaactctgcagcttcctgccttctgggtcagttccttattcaagtctgcagccggctcccagggagatctcggtggaacttcagaaacgctgggcagtctgcctttcaaccatgcccctgtccctgggagccgagatgtgggggcctgaggcctggctgctgctgctgctactgctggcatcatttacaggccggtgccccgcgggtgagctggagacctcagacgtggtaactgtggtgctgggccaggacgcaaaactgccctgcttctaccgaggggactccggcgagcaagtggggcaagtggcatgggctcgggtggacgcgggcgaaggcgcccaggaactagcgctactgcactccaaatacgggcttcatgtgagcccggcttacgagggccgcgtggagcagccgccgcccccacgcaaccccctggacggctcagtgctcctgcgcaacgcagtgcaggcggatgagggcgagtacgagtgccgggtcagcaccttccccgccggcagcttccaggcgcggctgcggctccgagtgctggtgcctcccctgccctcactgaatcctggtccagcactagaagagggccagggcctgaccctggcagcctcctgcacagctgagggcagcccagcccccagcgtgacctgggacacggaggtcaaaggcacaacgtccagccgttccttcaagcactcccgctctgctgccgtcacctcagagttccacttggtgcctagccgcagcatgaatgggcagccactgacttgtgtggtgtcccatcctggcctgctccaggaccaaaggatcacccacatcctccacgtgtccttccttgctgaggcctctgtgaggggccttgaagaccaaaatctgtggcacattggcagagaaggagctatgctcaagtgcctgagtgaagggcagccccctccctcatacaactggacacggctggatgggcctctgcccagtggggtacgagtggatggggacactttgggctttcccccactgaccactgagcacagcggcatctacgtctgccatgtcagcaatgagttctcctcaagggattctcaggtcactgtggatgttcttgacccccaggaagactctgggaagcaggtggacctagtgtcagcctcggtggtggtggtgggtgtgatcgccgcactcttgttctgccttctggtggtggtggtggtgctcatgtcccgataccatcggcgcaaggcccagcagatgacccagaaatatgaggaggagctgaccctgaccagggagaactccatccggaggctgcattcccatcacacggaccccaggagccagccggaggagagtgtagggctgagagccgagggccaccctgatagtctcaaggacaacagtagctgctctgtgatgagtgaagagcccgagggccgcagttactccacgctgaccacggtgagggagatagaaacacagactgaactgctgtctccaggctctgggcgggccgaggaggaggaagatcaggatgaaggcatcaaacaggccatgaaccattttgttcaggagaatgggaccctacgggccaagcccacgggcaatggcatctacatcaatgggcggggacacctggtctgacccaggcctgcctcccttccctaggcctggctccttctgttgacatgggagattttagctcatcttgggggcctccttaaacacccccatttcttgcggaagatgctccccatcccactgactgcttgacctttacctccaacccttctgttcatcgggagggctccaccaattgagtctctcccaccatgcatgcaggtcactgtgtgtgtgcatgtgtgcctgtgtgagtgttgactgactgtgtgtgtgtggaggggtgactgtccgtggaggggtgactgtgtccgtggtgtgtattatgctgtcatatcagagtcaagtgaactgtggtgtatgtgccacgggatttgagtggttgcgtgggcaacactgtcagggtttggcgtgtgtgtcatgtggctgtgtgtgacctctgcctgaaaaagcaggtattttctcagaccccagagcagtattaatgatgcagaggttggaggagagaggtggagactgtggctcagacccaggtgtgcgggcatagctggagctggaatctgcctccggtgtgagggaacctgtctcctaccacttcggagccatgggggcaagtgtgaagcagccagtccctgggtcagccagaggcttgaactgttacagaagccctctgccctctggtggcctctgggcctgctgcatgtacatattttctgtaaatatacatgcgccgggagcttcttgcaggaatactgctccgaatcacttttaatttttttcttttttttttcttgccctttccattagttgtattttttatttatttttatttttatttttttttagagatggagtctcactatgttgctcaggctggccttgaactcctgggctcaagcaatcctcctgcctcagcctccctagtagctgggactttaagtgtacaccactgtgcctgctttgaatcctttacgaagagaaaaaaaaaattaaagaaagcctttagatttatccaatgtttactactgggattgcttaaagtgaggcccctccaacaccagggggttaattcctgtgattgtgaaaggggctacttccaaggcatcttcatgcaggcagccccttgggagggcacctgagagctggtagagtctgaaattagggatgtgagcctcgtggttactgagtaaggtaaaattgcatccaccattgtttgtgataccttagggaattgcttggacctggtgacaagggctcctgttcaatagtggtgttggggagagagagagcagtgattatagaccgagagagtaggagttgaggtgaggtgaaggaggtgctgggggtgagaatgtcgcctttccccctgggttttggatcactaattcaaggctcttctggatgtttctctgggttggggctggagttcaatgaggtttatttttagctggcccacccagatacactcagccagaatacctagatttagtacccaaactcttcttagtctgaaatctgctggatttctggcctaagggagaggctcccatccttcgttccccagccagcctaggacttcgaatgtggagcctgaagatctaagatcctaacatgtacattttatgtaaatatgtgcatatttgtacataaaatgatattctgtttttaaataaacagacaaa

SEQ ID NO: 425991 - DNA, 3138 bp, Homo sapiens
tgccgtcgttgttggccacagcgtgggaagcagctctgggggagctcggagctcccgatcacggcttcttgggggtagctacggctgggtgtgtagaacggggccggggctggggctgggtcccctagtggagacccaagtgcgagaggcaagaactctgcagcttcctgccttctgggtcagttccttattcaagtctgcagccggctcccagggagatctcggtggaacttcagaaacgctgggcagtctgcctttcaaccatgcccctgtccctgggagccgagatgtgggggcctgaggcctggctgctgctgctgctactgctggcatcatttacaggccggtgccccgcgggtgagctggagacctcagacgtggtaactgtggtgctgggccaggacgcaaaactgccctgcttctaccgaggggactccggcgagcaagtggggcaagtggcatgggctcgggtggacgcgggcgaaggcgcccaggaactagcgctactgcactccaaatacgggcttcatgtgagcccggcttacgagggccgcgtggagcagccgccgcccccacgcaaccccctggacggctcagtgctcctgcgcaacgcagtgcaggcggatgagggcgagtacgagtgccgggtcagcaccttccccgccggcagcttccaggcgcggctgcggctccgagtgctggtgcctcccctgccctcactgaatcctggtccagcactagaagagggccagggcctgaccctggcagcctcctgcacagctgagggcagcccagcccccagcgtgacctgggacacggaggtcaaaggcacaacgtccagccgttccttcaagcactcccgctctgctgccgtcacctcagagttccacttggtgcctagccgcagcatgaatgggcagccactgacttgtgtggtgtcccatcctggcctgctccaggaccaaaggatcacccacatcctccacgtgtccttccttgctgaggcctctgtgaggggccttgaagaccaaaatctgtggcacattggcagagaaggagctatgctcaagtgcctgagtgaagggcagccccctccctcatacaactggacacggctggatgggcctctgcccagtggggtacgagtggatggggacactttgggctttcccccactgaccactgagcacagcggcatctacgtctgccatgtcagcaatgagttctcctcaagggattctcaggtcactgtggatgttcttgacccccaggaagactctgggaagcaggtggacctagtgtcagcctcggtggtggtggtgggtgtgatcgccgcactcttgttctgccttctggtggtggtggtggtgctcatgtcccgataccatcggcgcaaggcccagcagatgacccagaaatatgaggaggagctgaccctgaccagggagaactccatccggaggctgcattcccatcacacggaccccaggagccagccggaggagagtgtagggctgagagccgagggccaccctgatagtctcaaggacaacagtagctgctctgtgatgagtgaagagcccgagggccgcagttactccacgctgaccacggtgagggagatagaaacacagactgaactgctgtctccaggctctgggcgggccgaggaggaggaagatcaggatgaaggcatcaaacaggccatgaaccattttgttcaggagaatgggaccctacgggccaagcccacgggcaatggcatctacatcaatgggcggggacacctggtctgacccaggcctgcctcccttccctaggcctggctccttctgttgacatgggagattttagctcatcttgggggcctccttaaacacccccatttcttgcggaagatgctccccatcccactgactgcttgacctttacctccaacccttctgttcatcgggagggctccaccaattgagtctctcccaccatgcatgcaggtcactgtgtgtgtgcatgtgtgcctgtgtgagtgttgactgactgtgtgtgtgtggaggggtgactgtccgtggaggggtgactgtgtccgtggtgtgtattatgctgtcatatcagagtcaagtgaactgtggtgtatgtgccacgggatttgagtggttgcgtgggcaacactgtcagggtttggcgtgtgtgtcatgtggctgtgtgtgacctctgcctgaaaaagcaggtattttctcagaccccagagcagtattaatgatgcagaggttggaggagagaggtggagactgtggctcagacccaggtgtgcgggcatagctggagctggaatctgcctccggtgtgagggaacctgtctcctaccacttcggagccatgggggcaagtgtgaagcagccagtccctgggtcagccagaggcttgaactgttacagaagccctctgccctctggtggcctctgggcctgctgcatgtacatattttctgtaaatatacatgcgccgggagcttcttgcaggaatactgctccgaatcacttttaatttttttcttttttttttcttgccctttccattagttgtattttttatttatttttatttttatttttttttagagatggagtctcactatgttgctcaggctggccttgaactcctgggctcaagcaatcctcctgcctcagcctccctagtagctgggactttaagtgtacaccactgtgcctgctttgaatcctttacgaagagaaaaaaaaaattaaagaaagcctttagatttatccaatgtttactactgggattgcttaaagtgaggcccctccaacaccagggggttaattcctgtgattgtgaaaggggctacttccaaggcatcttcatgcaggcagccccttgggagggcacctgagagctggtagagtctgaaattagggatgtgagcctcgtggttactgagtaaggtaaaattgcatccaccattgtttgtgataccttagggaattgcttggacctggtgacaagggctcctgttcaatagtggtgttgggcgataacatcgccccacacggtagtggtggtggtgatggtgtcacgttgtactctttgtgctggtggtgttggcgatacatagcggga

SEQ ID NO: 425992 - DNA, 1816 bp, Homo sapiens
cgtattgaggatccgatcagagcataccctaggaggaggaagatcaggatgaaggcatcaaacaggccatgaaccattttgttcaggagaatgggaccctacgggccaagcccacgggcaatggcatctacatcaatgggcggggacacctggtctgacccaggcctgcctcccttccctaggcctggctccttctgttgacatgggagattttagctcatcttgggggcctccttaaacacccccatttcttgcggaagatgctccccatcccactgactgcttgacctttacctccaacccttctgttcatcgggagggctccaccaattgagtctctcccaccatgcatgcaggtcactgtgtgtgtgcatgtgtgcctgtgtgagtgttgactgactgtgtgtgtgtggaggggtgactgtccgtggaggggtgactgtgtccgtggtgtgtattatgctgtcatatcagagtcaagtgaactgtggtgtatgtgccacgggatttgagtggttgcgtgggcaacactgtcagggtttggcgtgtgtgtcatgtggctgtgtgtgacctctgcctgaaaaagcaggtattttctcagaccccagagcagtattaatgatgcagaggttggaggagagaggtggagactgtggctcagacccaggtgtgcgggcatagctggagctggaatctgcctccggtgtgagggaacctgtctcctaccacttcggagccatgggggcaagtgtgaagcagccagtccctgggtcagccagaggcttgaactgttacagaagccctctgccctctggtggcctctgggcctgctgcatgtacatattttctgtaaatatacatgcgccgggagcttcttgcaggaatactgctccgaatcacttttaatttttttcttttttttttcttgccctttccattagttgtattttttatttatttttatttttatttttttttagagatggagtctcactatgttgctcaggctggccttgaactcctgggctcaagcaatcctcctgcctcagcctccctagtagctgggactttaagtgtacaccactgtgcctgctttgaatcctttacgaagagaaaaaaaaaattaaagaaagcctttagatttatccaatgtttactactgggattgcttaaagtgaggcccctccaacaccagggggttaattcctgtgattgtgaaaggggctacttccaaggcatcttcatgcaggcagccccttgggagggcacctgagagctggtagagtctgaaattagggatgtgagcctcgtggttactgagtaaggtaaaattgcatccaccattgtttgtgataccttagggaattgcttggacctggtgacaagggctcctgttcaatagtggtgttggggagagagagagcagtgattatagaccgagagagtaggagttgaggtgaggtgaaggaggtgctgggggtgagaatgtcgcctttccccctgggttttggatcactaattcaaggctcttctggatgtttctctgggttggggctggagttcaatgaggtttatttttagctggcccacccagatacactcagccagaatacctagatttagtacccaaactcttcttagtctgaaatctgctggatttctggcctaagggagaggctcccatccttcgttccccagccagcctaggacttcgaatgtggagcctgaagatctaagatcctaacatgtacattttatgtaaatatgtgcatatttgtacataaaatgatattctgtttttaaataaacagacaaa

SEQ ID NO: 425993 - DNA, 431 bp, Homo sapiens
aacagcctgcggctctgggtgacgtcatgggggtggagggtggagagctgtctggacacgttgggtggtggtggcttcagcccttcccggctggcacccttcagcttccctgtcttccaggctggatgggcctctgcccagtggggtacgagtggatggggacactttgggctttcccccactgaccactgagcacagcggcatctacgtctgccatgtcagcaatgagttctcctcaagggattctcaggtcactgtggatgttcttggtaagcactggagcagaagtccttggtaaggacctgggccaagggcttggtgggggcagcaggaagcaagacagagacagtgaattgggaaagtgtttattcagagggggctgggctgtgtgtcttgcagagaatcaaactgaggtgtggttttagatgttt

SEQ ID NO: 425994 - DNA, 2676 bp, Homo sapiens
tgccgtcgttgttggccacagcgtgggaagcagctctgggggagctcggagctcccgatcacggcttcttgggggtagctacggctgggtgtgtagaacggggccggggctggggctgggtcccctagtggagacccaagtgcgagaggcaagaactctgcagcttcctgccttctgggtcagttccttattcaagtctgcagccggctcccagggagatctcggtggaacttcagaaacgctgggcagtctgcctttcaaccatgcccctgtccctgggagccgagatgtgggggcctgaggcctggctgctgctgctgctactgctggcatcatttacaggccggtgccccgcgggtgagctggagacctcagacgtggtaactgtggtgctgggccaggacgcaaaactgccctgcttctaccgaggggactccggcgagcaagtggggcaagtggcatgggctcgggtggacgcgggcgaaggcgcccaggaactagcgctactgcactccaaatacgggcttcatgtgagcccggcttacgagggccgcgtggagcagccgccgcccccacgcaaccccctggacggctcagtgctcctgcgcaacgcagtgcaggcggatgagggcgagtacgagtgccgggtcagcaccttccccgccggcagcttccaggcgcggctgcggctccgagtgctggtgcctcccctgccctcactgaatcctggtccagcactagaagagggccagggcctgaccctggcagcctcctgcacagctgagggcagcccagcccccagcgtgacctgggacacggaggtcaaaggcacaacgtccagccgttccttcaagcactcccgctctgctgccgtcacctcagagttccacttggtgcctagccgcagcatgaatgggcagccactgacttgtgtggtgtcccatcctggcctgctccaggaccaaaggatcacccacatcctccacgtgtccttccttgctgaggcctctgtgaggggccttgaagaccaaaatctgtggcacattggcagagaaggagctatgctcaagtgcctgagtgaagggcagccccctccctcatacaactggacacggctggatgggcctctgcccagtggggtacgagtggatggggacactttgggctttcccccactgaccactgagcacagcggcatctacgtctgccatgtcagcaatgagttctcctcaagggattctcaggtcactgtggatgttcttgacccccaggaagactctgggaagcaggtggacctagtgtcagcctcggtggtggtggtgggtgtgatcgccgcactcttgttctgccttctggtggtggtggtggtgctcatgtcccgataccatcggcgcaaggcccagcagatgacccagaaatatgaggaggagctgaccctgaccagggagaactccatccggaggctgcattcccatcacacggaccccaggagccagccggaggagagtgtagggctgagagccgagggccaccctgatagtctcaaggacaacagtagctgctctgtgatgagtgaagagcccgagggccgcagttactccacgctgaccacggtgagggagatagaaacacagactgaactgctgtctccaggctctgggcgggccgaggaggaggaagatcaggatgaaggcatcaaacaggccatgaaccattttgttcaggagaatgggaccctacgggccaagcccacgggcaatggcatctacatcaatgggcggggacacctggtctgacccaggcctgcctcccttccctaggcctggctccttctgttgacatgggagattttagctcatcttgggggcctccttaaacacccccatttcttgcggaagatgctccccatcccactgactgcttgacctttacctccaacccttctgttcatcgggagggctccaccaattgagtctctcccaccatgcatgcaggtcactgtgtgtgtgcatgtgtgcctgtgtgagtgttgactgactgtgtgtgtgtggaggggtgactgtccgtggaggggtgactgtgtccgtggtgtgtattatgctgtcatatcagagtcaagtgaactgtggtgtatgtgccacgggatttgagtggttgcgtgggcaacactgtcagggtttggcgtgtgtgtcatgtggctgtgtgtgacctctgcctgaaaaagcaggtattttctcagaccccagagcagtattaatgatgcagaggttggaggagagaggtggagactgtggctcagacccaggtgtgcgggcatagctggagctggaatctgcctccggtgtgagggaacctgtctcctaccacttcggagccatgggggcaagtgtgaagcagccagtccctgggtcagccagaggcttgaactgttacagaagccctctgccctctggtggcctctgggcctgctgcatgtacatattttctgtaaatatacatgcgccgggagcttcttgcaggaatactgctccgaatcacttttaatttttttcttttttttttcttgccctttccattagttgtattttttatttatttttatttttatttttttttagagatggagtccagcctggacgatatagccagaccctgtctgtaaaaaaaccaaaaccc

SEQ ID NO: 425995 - DNA, 3565 bp, Homo sapiens
tgccgtcgttgttggccacagcgtgggaagcagctctgggggagctcggagctcccgatcacggcttcttgggggtagctacggctgggtgtgtagaacggggccggggctggggctgggtcccctagtggagacccaagtgcgagaggcaagaactctgcagcttcctgccttctgggtcagttccttattcaagtctgcagccggctcccagggagatctcggtggaacttcagaaacgctgggcagtctgcctttcaaccatgcccctgtccctgggagccgagatgtgggggcctgaggcctggctgctgctgctgctactgctggcatcatttacaggccggtgccccgcgggtgagctggagacctcagacgtggtaactgtggtgctgggccaggacgcaaaactgccctgcttctaccgaggggactccggcgagcaagtggggcaagtggcatgggctcgggtggacgcgggcgaaggcgcccaggaactagcgctactgcactccaaatacgggcttcatgtgagcccggcttacgagggccgcgtggagcagccgccgcccccacgcaaccccctggacggctcagtgctcctgcgcaacgcagtgcaggcggatgagggcgagtacgagtgccgggtcagcaccttccccgccggcagcttccaggcgcggctgcggctccgagtgctggtgcctcccctgccctcactgaatcctggtccagcactagaagagggccagggcctgaccctggcagcctcctgcacagctgagggcagcccagcccccagcgtgacctgggacacggaggtcaaaggcacaacgtccagccgttccttcaagcactcccgctctgctgccgtcacctcagagttccacttggtgcctagccgcagcatgaatgggcagccactgacttgtgtggtgtcccatcctggcctgctccaggaccaaaggatcacccacatcctccacgtgtccttccttgctgaggcctctgtgaggggccttgaagaccaaaatctgtggcacattggcagagaaggagctatgctcaagtgcctgagtgaagggcagccccctccctcatacaactggacacggctggatgggcctctgcccagtggggtacgagtggatggggacactttgggctttcccccactgaccactgagcacagcggcatctacgtctgccatgtcagcaatgagttctcctcaagggattctcaggtcactgtggatgttcttgacccccaggaagactctgggaagcaggtggacctagtgtcagcctcggtggtggtggtgggtgtgatcgccgcactcttgttctgccttctggtggtggtggtggtgctcatgtcccgataccatcggcgcaaggcccagcagatgacccagaaatatgaggaggagctgaccctgaccagggagaactccatccggaggctgcattcccatcacacggaccccaggagccagccggaggagagtgtagggctgagagccgagggccaccctgatagtctcaaggacaacagtagctgctctgtgatgagtgaagagcccgagggccgcagttactccacgctgaccacggtgagggagatagaaacacagactgaactgctgtctccaggctctgggcgggccgaggaggaggaagatcaggatgaaggcatcaaacaggccatgaaccattttgttcaggagaatgggaccctacgggccaagcccacgggcaatggcatctacatcaatgggcggggacacctggtctgacccaggcctgcctcccttccctaggcctggctccttctgttgacatgggagattttagctcatcttgggggcctccttaaacacccccatttcttgcggaagatgctccccatcccactgactgcttgacctttacctccaacccttctgttcatcgggagggctccaccaattgagtctctcccaccatgcatgcaggtcactgtgtgtgtgcatgtgtgcctgtgtgagtgttgactgactgtgtgtgtgtggaggggtgactgtccgtggaggggtgactgtgtccgtggtgtgtattatgctgtcatatcagagtcaagtgaactgtggtgtatgtgccacgggatttgagtggttgcgtgggcaacactgtcagggtttggcgtgtgtgtcatgtggctgtgtgtgacctctgcctgaaaaagcaggtattttctcagaccccagagcagtattaatgatgcagaggttggaggagagaggtggagactgtggctcagacccaggtgtgcgggcatagctggagctggaatctgcctccggtgtgagggaacctgtctcctaccacttcggagccatgggggcaagtgtgaagcagccagtccctgggtcagccagaggcttgaactgttacagaagccctctgccctctggtggcctctgggcctgctgcatgtacatattttctgtaaatatacatgcgccgggagcttcttgcaggaatactgctccgaatcacttttaatttttttcttttttttttcttgccctttccattagttgtattttttatttatttttatttttatttttttttagagatggagtctcactatgttgctcaggctggccttgaactcctgggctcaagcaatcctcctgcctcagcctccctagtagctgggactttaagtgtacaccactgtgcctgctttgaatcctttacgaagagaaaaaaaaaattaaagaaagcctttagatttatccaatgtttactactgggattgcttaaagtgaggcccctccaacaccagggggttaattcctgtgattgtgaaaggggctacttccaaggcatcttcatgcaggcagccccttgggagggcacctgagagctggtagagtctgaaattagggatgtgagcctcgtggttactgagtaaggtaaaattgcatccaccattgtttgtgataccttagggaattgcttggacctggtgacaagggctcctgttcaatagtggtgttggggagagagagagcagtgattatagaccgagagagtaggagttgaggtgaggtgaaggaggtgctgggggtgagaatgtcgcctttccccctgggttttggatcactaattcaaggctcttctggatgtttctctgggttggggctggagttcaatgaggtttatttttagctggcccacccagatacactcagccagaatacctagatttagtacccaaactcttcttagtctgaaatctgctggatttctggcctaagggagaggctcccatccttcgttccccagccagcctaggacttcgaatgtggagcctgaagatctaagatcctaacatgtacattttatgtaaatatgtgcatatttgtacataaaatgatattctgtttttaaataaacagacaaaacttgttctgtctggctcctgtcttgccccttgaactgtgtaagctctgagtcacatactctctgtctcggtaccatccttcctgtagtcccaagtaggggaagacttagg

SEQ ID NO: 425996 - DNA, 219 bp, Homo sapiens
tctcccgtctccctctccccatgcctaacacttgttcctggtccccgatctctgggcccctatgcttctgaggcaaccgttacccctgcttacgcctggcctctgatcccaccatgacccagccatgccccaccatgtgcagctgccctgcctttgttcctgacttgccctttgcccttggtctccagagtgaagagcccgagggccgcagttactcca

SEQ ID NO: 425997 - DNA, 1742 bp, Homo sapiens
agcgtctattctcatcctcttcacttttccactcctccccttacctcccttctcttctgaattctccattctgggctcttgcctgtgaaatctttctttgctttccccatcttttcctcgcattttttcaccatctttccctcaatctccaggagccaatgcgagactttggctccgattaagcgacggcccgagactcggggtgcgcgaggaggatcgacagagtggtgatggagagcaccccttcaaggggactgaaccgagtacacctacaatgcaggaatctgcaggaattcttagggggcctgagccctggggtattggaccgattgtatgggcaccctgccacatgtctggctgtcttcagggagctcccatccttggctaagaactgggtgatgcggatgctctttctggagcagcctttgccacaggctgctgtagctctgtgggtaaagaaggaattcagcaaggctcaggaggaaagtacagggctgctgagcggcctccggatctggcacacacagctgctcccaggcgggctccagggcctcatcctcaaccccattttccgccagaacctccgcattgcccttctgggtggggggaaggcctggtctgatgacacaagtcagctgggaccagacaagcatgcccgggacgttccctcccttgacaagtacgccgaggagcgatgggaggtggtcttgcacttcatggtgggctcccccagtgcagctgtcagccaggacttggctcagctcctcagccaggctgggctcatgaagagtactgaacctggagagccgccctgcattacttccgctggcttccagttcctgttgctggacaccccggctcagctctggtactttatgttgcagtatttgcagacagcccagagccggggcatggacctggtagagattctctccttcctcttccagctcagcttctctactctgggcaaggattactctgtggaaggtatgagtgattctctgttgaacttcctgcaacatctgcgtgagtttgggcttgttttccagaggaagaggaaatctcggcgttactaccccacacgcctggccatcaatctctcatcaggtgtctctggagctgggggcactgtgcatcagccaggtttcattgtcgtggaaaccaattaccgactgtatgcctacacggagtcggagctgcagattgccctcattgccctcttctctgagatgctctatcggttccccaacatggtggtggcgcaggtgacccgggagagtgtgcagcaggcaatcgccagtggcatcacagcccagcagataatccatttcctaaggacaagagcccacccagtgatgctcaaacagacacctgtgctgccccccaccatcaccgaccagatccggctctgggagctggaaagggacagactccggttcactgagggtgtcctgtataaccagttcctgtcgcaagtggactttgagctgctgctggcccacgcgcgggagctgggcgtgctcgtgttcgagaactcggccaagcggctcatggtggtgaccccggccgggcacagcgacgtcaagcgcttttggaagcggcagaaacatagctcctgagagcgcgggacttggacacggacctcggcgggcgggactgggcggggcggggcatcagaactcaggtgttttttatttacgcgtcagggcttttcttgtttaataaagttatgatagctagca

SEQ ID NO: 425998 - DNA, 1988 bp, Homo sapiens
agcgtctattctcatcctcttcacttttccactcctccccttacctcccttctcttctgaattctccattctgggctcttgcctgtgaaatctttctttgctttccccatcttttcctcgcattttttcaccatctttccctcaatctccaggagccaatgcgagactttggctccgattaagcgacggcccgagactcggggtgcgcgaggaggatcgacagagtggtgatggagagcaccccttcaaggggactgaaccgagtacacctacaatgcaggaatctgcaggaattcttagggggcctgagccctggggtattggaccgattgtatgggcaccctgccacatgtctggctgtcttcagggagctcccatccttggctaagaactgggtgatgcggatgctctttctggagcagcctttgccacaggctgctgtagctctgtgggtaaagaaggaattcagcaaggctcaggaggaaagtacagggctgctgagcggcctccggatctggcacacacagctgctcccaggcgggctccagggcctcatcctcaaccccattttccgccagaacctccgcattgcccttctgggtggggggaaggcctggtctgatgacacaagtcagctgggaccagacaagcatgcccgggacgttccctcccttgacaagtacgccgaggagcgatgggaggtggtcttgcacttcatggtgggctcccccagtgcagctgtcagccaggacttggctcagctcctcagccaggctgggctcatgaagagtactgaacctggagagccgccctgcattacttccgctggcttccagttcctgttgctggacaccccggctcagctctggtactttatgttgcagtatttgcagacagcccagagccggggcatggacctggtagagattctctccttcctcttccagctcagcttctctactctgggcaaggattactctgtggaaggtatgagtgattctctgttgaacttcctgcaacatctgcgtgagtttgggcttgttttccagaggaaggtatgagcgcctagataagtggcttccagggaagaaacagggtggtgtgttgcctttgcctttaaaaaggagtggggtcttggggcagtagcaggaagcagttgccagaactgaatacttgggtctctcgggggagagaagttgggggttgaggttctgcatcttgggagggatctgatatttcaggcaggaagatgtaaggcagtgacttctgagacaaggcatctgcctttctattcttttcagaggaaatctcggcgttactaccccacacgcctggccatcaatctctcatcaggtgtctctggagctgggggcactgtgcatcagccaggtttcattgtcgtggaaaccaattaccgactgtatgcctacacggagtcggagctgcagattgccctcattgccctcttctctgagatgctctatcggttccccaacatggtggtggcgcaggtgacccgggagagtgtgcagcaggcaatcgccagtggcatcacagcccagcagataatccatttcctaaggacaagagcccacccagtgatgctcaaacagacacctgtgctgccccccaccatcaccgaccagatccggctctgggagctggaaagggacagactccggttcactgagggtgtcctgtataaccagttcctgtcgcaagtggactttgagctgctgctggcccacgcgcgggagctgggcgtgctcgtgttcgagaactcggccaagcggctcatggtggtgaccccggccgggcacagcgacgtcaagcgcttttggaagcggcagaaacatagctcctgagagcgcgggacttggacacggacctcggcgggcgggactgggcggggcggggcatcagaactcaggtgttttttatttacgcgtcagggcttttcttgtttaataaagttatgatagctagca

SEQ ID NO: 425999 - DNA, 1923 bp, Homo sapiens
agcgtctattctcatcctcttcacttttccactcctccccttacctcccttctcttctgaattctccattctgggctcttgcctgtgaaatctttctttgctttccccatcttttcctcgcattttttcaccatctttccctcaatctccaggagccaatgcgagactttggctccgattaagcgacggcccgagactcggggtgcgcgaggaggatcgacagagtggtgatggagagcaccccttcaaggggactgaaccgagtacacctacaatgcaggaatctgcaggaattcttagggggcctgagccctggggtattggaccgattgtatgggcaccctgccacatgtctggctgtcttcagggagctcccatccttggctaagaactgggtgatgcggatgctctttctggagcagcctttgccacaggctgctgtagctctgtgggtaaagaaggaattcagcaaggctcaggaggaaagtacagggctgctgagcggcctccggatctggcacacacagctgctcccaggcgggctccagggcctcatcctcaaccccattttccgccagaacctccgcattgcccttctgggtggggggaaggcctggtctgatgacacaagtcagctgggaccagacaagcatgcccgggacgttccctcccttgacaagtacgccgaggagcgatgggaggtggtcttgcacttcatggtgggctcccccagtgcagctgtcagccaggacttggctcagctcctcagccaggctgggctcatgaagagtactgaacctggagagccgccctgcattacttccgctggcttccagttcctgttgctggacaccccggctcagctctggtactttatgttgcagtatttgcagacagcccagagccggggcatggacctggtagagattctctccttcctcttccagctcagcttctctactctgggcaaggattactctgtggaaggtatgagtgattctctgttgaacttcctgcaacatctgcgtgagtttgggcttgttttccagaggaagaggaaatctcggcgttactaccccacacgcctggccatcaatctctcatcaggtgtctctggagctgggggcactgtgcatcagccaggtttcattgtcgtggaaaccaattaccgactgtatgcctacacgggtgaggcgggacagagggcccctggaagaggaggttgggggtgagggaatgccagtttatgttcgtgtttacctggcagtctacagagctctctgacatttctcatgacacttgaaagaagggcttgagggagtctgggtgtgggggtggcctcctcatcctctttctatccctggctcagagtcggagctgcagattgccctcattgccctcttctctgagatgctctatcggttccccaacatggtggtggcgcaggtgacccgggagagtgtgcagcaggcaatcgccagtggcatcacagcccagcagataatccatttcctaaggacaagagcccacccagtgatgctcaaacagacacctgtgctgccccccaccatcaccgaccagatccggctctgggagctggaaagggacagactccggttcactgagggtgtcctgtataaccagttcctgtcgcaagtggactttgagctgctgctggcccacgcgcgggagctgggcgtgctcgtgttcgagaactcggccaagcggctcatggtggtgaccccggccgggcacagcgacgtcaagcgcttttggaagcggcagaaacatagctcctgagagcgcgggacttggacacggacctcggcgggcgggactgggcggggcggggcatcagaactcaggtgttttttatttacgcgtcagggcttttcttgtttaataaagttatgatagctagca

SEQ ID NO: 426000 - DNA, 1893 bp, Homo sapiens
agcgtctattctcatcctcttcacttttccactcctccccttacctcccttctcttctgaattctccattctgggctcttgcctgtgaaatctttctttgctttccccatcttttcctcgcattttttcaccatctttccctcaatctccaggagccaatgcgagactttggctccgattaagcgacggcccgagactcggggtgcgcgaggaggatcgacagagtggtgatggagagcaccccttcaaggggactgaaccgagtacacctacaatgcaggaatctgcaggaattcttagggggcctgagccctggggtattggaccgattgtatgggcaccctgccacatgtctggctgtcttcagggagctcccatccttggctaagaactgggtgatgcggatgctctttctggagcagcctttgccacaggctgctgtagctctgtgggtaaagaaggaattcagcaaggctcaggaggaaagtacagggctgctgagcggcctccggatctggcacacacagctgctcccaggcgggctccagggcctcatcctcaaccccattttccgccagaacctccgcattgcccttctgggtggggggaaggcctggtctgatgacacaagtcagctgggaccagacaagcatgcccgggacgttccctcccttgacaagtacgccgaggagcgatgggaggtggtcttgcacttcatggtgggctcccccagtgcagctgtcagccaggacttggctcagctcctcagccaggctgggctcatgaagagtactgaacctggagagccgccctgcattacttccgctggcttccagttcctgttgctggacaccccggctcagctctggtactttatgttgcagtatttgcagacagcccagagccggggcatggacctggtagagattctctccttcctcttccagctcagcttctctactctgggcaaggattactctgtggaaggtatgagtgattctctgttgaacttcctgcaacatctgcgtgagtttgggcttgttttccagaggaagaggaaatctcggcgttactaccccacacgcctggccatcaatctctcatcaggtgtctctggagctgggggcactgtgcatcagccaggtttcattgtcgtggaaaccaattaccgactgtatgcctacacggagtcggagctgcagattgccctcattgccctcttctctgagatgctctatcggttccccaacatggtggtggcgcaggtgacccgggagagtgtgcagcaggcaatcgccagtggcatcacagcccagcagataatccatttcctaaggacaagagcccacccagtgatgctcaaacaggtatagacaggctccaagatgtcagaggctggcagctggtgatgacatgatggaaaagaaaaaggggcatccaaatctggggaagaaacagagggccgggttgtctggggcagtattctgagtccctacagtcaacccttgctccttgcagacacctgtgctgccccccaccatcaccgaccagatccggctctgggagctggaaagggacagactccggttcactgagggtgtcctgtataaccagttcctgtcgcaagtggactttgagctgctgctggcccacgcgcgggagctgggcgtgctcgtgttcgagaactcggccaagcggctcatggtggtgaccccggccgggcacagcgacgtcaagcgcttttggaagcggcagaaacatagctcctgagagcgcgggacttggacacggacctcggcgggcgggactgggcggggcggggcatcagaactcaggtgttttttatttacgcgtcagggcttttcttgtttaataaagttatgatagctagca

SEQ ID NO: 426001 - DNA, 2320 bp, Homo sapiens
agcgtctattctcatcctcttcacttttccactcctccccttacctcccttctcttctgaattctccattctgggctcttgcctgtgaaatctttctttgctttccccatcttttcctcgcattttttcaccatctttccctcaatctccaggagccaatgcgagactttggctccgattaagcgacggcccgagactcggggtgcgcgaggaggatcgacagagtggtgatggagagcaccccttcaaggggactgaaccgagtacacctacaatgcaggaatctgcaggaattcttagggggcctgagccctggggtattggaccgattgtatgggcaccctgccacatgtctggctgtcttcagggagctcccatccttggctaagaactgggtgatgcggatgctctttctggagcagcctttgccacaggctgctgtagctctgtgggtaaagaaggaattcagcaaggctcaggaggaaagtacagggctgctgagcggcctccggatctggcacacacagctgctcccaggcgggctccagggcctcatcctcaaccccattttccgccagaacctccgcattgcccttctgggtggggggaaggcctggtctgatgacacaagtcagctgggaccagacaagcatgcccgggacgttccctcccttgacaagtacgccgaggagcgatgggaggtggtcttgcacttcatggtgggctcccccagtgcagctgtcagccaggacttggctcagctcctcagccaggctgggctcatgaagagtactgaacctggagagccgccctgcattacttccgctggcttccagttcctgttgctggacaccccggctcagctctggtactttatgttgcagtatttgcagacagcccagagccggggcatggacctggtagagattctctccttcctcttccagctcagcttctctactctgggcaaggattactctgtggaaggtatgagtgattctctgttgaacttcctgcaacatctgcgtgagtttgggcttgttttccagaggaaggtatgagcgcctagataagtggcttccagggaagaaacagggtggtgtgttgcctttgcctttaaaaaggagtggggtcttggggcagtagcaggaagcagttgccagaactgaatacttgggtctctcgggggagagaagttgggggttgaggttctgcatcttgggagggatctgatatttcaggcaggaagatgtaaggcagtgacttctgagacaaggcatctgcctttctattcttttcagaggaaatctcggcgttactaccccacacgcctggccatcaatctctcatcaggtgtctctggagctgggggcactgtgcatcagccaggtttcattgtcgtggaaaccaattaccgactgtatgcctacacgggtgaggcgggacagagggcccctggaagaggaggttgggggtgagggaatgccagtttatgttcgtgtttacctggcagtctacagagctctctgacatttctcatgacacttgaaagaagggcttgagggagtctgggtgtgggggtggcctcctcatcctctttctatccctggctcagagtcggagctgcagattgccctcattgccctcttctctgagatgctctatcggttccccaacatggtggtggcgcaggtgacccgggagagtgtgcagcaggcaatcgccagtggcatcacagcccagcagataatccatttcctaaggacaagagcccacccagtgatgctcaaacaggtatagacaggctccaagatgtcagaggctggcagctggtgatgacatgatggaaaagaaaaaggggcatccaaatctggggaagaaacagagggccgggttgtctggggcagtattctgagtccctacagtcaacccttgctccttgcagacacctgtgctgccccccaccatcaccgaccagatccggctctgggagctggaaagggacagactccggttcactgagggtgtcctgtataaccagttcctgtcgcaagtggactttgagctgctgctggcccacgcgcgggagctgggcgtgctcgtgttcgagaactcggccaagcggctcatggtggtgaccccggccgggcacagcgacgtcaagcgcttttggaagcggcagaaacatagctcctgagagcgcgggacttggacacggacctcggcgggcgggactgggcggggcggggcatcagaactcaggtgttttttatttacgcgtcagggcttttcttgtttaataaagttatgatagctagca

SEQ ID NO: 426002 - DNA, 1717 bp, Homo sapiens
agcgtctattctcatcctcttcacttttccactcctccccttacctcccttctcttctgaattctccattctgggctcttgcctgtgaaatctttctttgctttccccatcttttcctcgcattttttcaccatctttccctcaatctccaggagccaatgcgagactttggctccgattaagcgacggcccgagactcggggtgatggagagcaccccttcaaggggactgaaccgagtacacctacaatgcaggaatctgcaggaattcttagggggcctgagccctggggtattggaccgattgtatgggcaccctgccacatgtctggctgtcttcagggagctcccatccttggctaagaactgggtgatgcggatgctctttctggagcagcctttgccacaggctgctgtagctctgtgggtaaagaaggaattcagcaaggctcaggaggaaagtacagggctgctgagcggcctccggatctggcacacacagctgctcccaggcgggctccagggcctcatcctcaaccccattttccgccagaacctccgcattgcccttctgggtggggggaaggcctggtctgatgacacaagtcagctgggaccagacaagcatgcccgggacgttccctcccttgacaagtacgccgaggagcgatgggaggtggtcttgcacttcatggtgggctcccccagtgcagctgtcagccaggacttggctcagctcctcagccaggctgggctcatgaagagtactgaacctggagagccgccctgcattacttccgctggcttccagttcctgttgctggacaccccggctcagctctggtactttatgttgcagtatttgcagacagcccagagccggggcatggacctggtagagattctctccttcctcttccagctcagcttctctactctgggcaaggattactctgtggaaggtatgagtgattctctgttgaacttcctgcaacatctgcgtgagtttgggcttgttttccagaggaagaggaaatctcggcgttactaccccacacgcctggccatcaatctctcatcaggtgtctctggagctgggggcactgtgcatcagccaggtttcattgtcgtggaaaccaattaccgactgtatgcctacacggagtcggagctgcagattgccctcattgccctcttctctgagatgctctatcggttccccaacatggtggtggcgcaggtgacccgggagagtgtgcagcaggcaatcgccagtggcatcacagcccagcagataatccatttcctaaggacaagagcccacccagtgatgctcaaacagacacctgtgctgccccccaccatcaccgaccagatccggctctgggagctggaaagggacagactccggttcactgagggtgtcctgtataaccagttcctgtcgcaagtggactttgagctgctgctggcccacgcgcgggagctgggcgtgctcgtgttcgagaactcggccaagcggctcatggtggtgaccccggccgggcacagcgacgtcaagcgcttttggaagcggcagaaacatagctcctgagagcgcgggacttggacacggacctcggcgggcgggactgggcggggcggggcatcagaactcaggtgttttttatttacgcgtcagggcttttcttgtttaataaagttatgatagctagca

SEQ ID NO: 426003 - DNA, 1272 bp, Homo sapiens
agcgtctattctcatcctcttcacttttccactcctccccttacctcccttctcttctgaattctccattctgggctcttgcctgtgaaatctttctttgctttccccatcttttcctcgcattttttcaccatctttccctcaatctccaggagccaatgcgagactttggctccgattaagcgacggcccgagactcggggtgcgcgaggaggatcgacagagtggtgatggagagcaccccttcaaggggactgaaccgagtacacctacaatgcaggaatctgcaggaattcttagggggcctgagccctggggtattggaccgattgtatgggcaccctgccacatgtctggctgtcttcagggagctcccatccttggctaagaactgggtgatgcggatgctctttctggagcagcctttgccacaggctgctgtagctctgtgggtaaagaaggaattcagcaaggctcaggaggaaagtacagggctgctgagcggcctccggatctggcacacacagctgctcccaggcgggctccagggcctcatcctcaaccccattttccgccagaacctccgcattgcccttctgggtggggggaaggcctggtctgatgacacaagtcagctgggaccagacaactgggggcactgtgcatcagccaggtttcattgtcgtggaaaccaattaccgactgtatgcctacacggagtcggagctgcagattgccctcattgccctcttctctgagatgctctatcggttccccaacatggtggtggcgcaggtgacccgggagagtgtgcagcaggcaatcgccagtggcatcacagcccagcagataatccatttcctaaggacaagagcccacccagtgatgctcaaacagacacctgtgctgccccccaccatcaccgaccagatccggctctgggagctggaaagggacagactccggttcactgagggtgtcctgtataaccagttcctgtcgcaagtggactttgagctgctgctggcccacgcgcgggagctgggcgtgctcgtgttcgagaactcggccaagcggctcatggtggtgaccccggccgggcacagcgacgtcaagcgcttttggaagcggcagaaacatagctcctgagagcgcgggacttggacacggacctcggcgggcgggactgggcggggcggggcatcagaactcaggtgttttttatttacgcgtcagggcttttcttgtttaataaagttatgatagctagca

SEQ ID NO: 426004 - DNA, 964 bp, Homo sapiens
agcgtctattctcatcctcttcacttttccactcctccccttacctcccttctcttctgaattctccattctgggctcttgcctgtgaaatctttctttgctttccccatcttttcctcgcattttttcaccatctttccctcaatctccaggagccaatgcgagactttggctccgattaagcgacggcccgagactcggggtgcgcgaggaggatcgacagagtggtgatggagagcaccccttcaaggggactgaaccgagtacacctacaatgcaggaatctgcaggaattcttagggggcctgagccctggggtattggaccgattgtatgggcaccctgccacatgtctggctgtcttcagggagctcccatccttggctaagaactgggtgatgcggatgctctttctggagcagcctttgccacaggctgctgtagctctgtgggtaaagaaggaattcagcaaggctcaggaggaaagtacagggctgctgagcggcctccggatctggcacacacagctgctcccaggcgggctccagggcctcatcctcaaccccattttccgccagaacctccgcattgcccttctgggtggggggaaggcctggtctgatgacacaagtcagctgggaccagacaaagactccggttcactgagggtgtcctgtataaccagttcctgtcgcaagtggactttgagctgctgctggcccacgcgcgggagctgggcgtgctcgtgttcgagaactcggccaagcggctcatggtggtgaccccggccgggcacagcgacgtcaagcgcttttggaagcggcagaaacatagctcctgagagcgcgggacttggacacggacctcggcgggcgggactgggcggggcggggcatcagaactcaggtgttttttatttacgcgtcagggcttttcttgtttaataaagttatgatagctagca

SEQ ID NO: 426005 - DNA, 805 bp, Homo sapiens
agcgtctattctcatcctcttcacttttccactcctccccttacctcccttctcttctgaattctccattctgggctcttgcctgtgaaatctttctttgctttccccatcttttcctcgcattttttcaccatctttccctcaatctccaggagccaatgcgagactttggctccgattaagcgacggcccgagactcggggtgcgcgaggaggatcgacagagtggtgatggagagcaccccttcaaggggactgaaccgagtacacctacaatgcaggaatctgcaggaattcttagggggcctgagccctggggtattggaccgattgtatgggcaccctgccacatgtctggctgtcttcagggagctcccatccttggctaagaactgggtgatgcggatgctctttctggagcagcctttgccacaggctgctgtagctctgtgggtaaagaaggaattcagcaaggctcaggaggaaagtacagggctgctgagcggcctccggatctggcacacacagctgctcccaggcgggctccagggcctcatcctcaaccccattttccgccagaacctccgcattgcccttctgggtggggggaaggcctggtctgatgacacaagtcagctgggaccagacaacgcttttggaagcggcagaaacatagctcctgagagcgcgggacttggacacggacctcggcgggcgggactgggcggggcggggcatcagaactcaggtgttttttatttacgcgtcagggcttttcttgtttaataaagttatgatagctagca

SEQ ID NO: 426006 - DNA, 609 bp, Homo sapiens
agcgtctattctcatcctcttcacttttccactcctccccttacctcccttctcttctgaattctccattctgggctcttgcctgtgaaatctttctttgctttccccatcttttcctcgcattttttcaccatctttccctcaatctccaggagccaatgcgagactttggctccgattaagcgacggcccgagactcggggtgcgcgaggaggatcgacagagtggtgatggagagcaccccttcaaggggactgaaccgagtacacctacaatgcaggaatctgcaggaattcttagggggcctgagccctggggtattggaccgattgtatgggcaccctgccacatgtctggctgtcttcagggagctcccatccttggctaagaactgggtgatgcggatgctctttctggagcagcctttgccacaggctgctgtagctctgtgggtaaagaaggaattcagcaagtaagtctcagccagatacaaatttctcaacagctacatttcccaaactgctgttccttggagcacttccaggaagtgttaatagatatatcccaaaacttaaaaataaatacatttgggaaactctgaatattgcc

SEQ ID NO: 426007 - DNA, 537 bp, Homo sapiens
agcgtctattctcatcctcttcacttttccactcctccccttacctcccttctcttctgaattctccattctgggctcttgcctgtgaaatctttctttgctttccccatcttttcctcgcattttttcaccatctttccctcaatctccaggagccaatgcgagactttggctccgattaagcgacggcccgagactcggggtgcgcgaggaggatcgacagagtggtgatggagagcaccccttcaaggggactgaaccgagtacaccctgccacatgtctggctgtcttcagggagctcccatccttggctaagaactgggtgatgcggatgctctttctggagcagcctttgccacaggctgctgtagctctgtgggtaaagaaggaattcagcaagtaagtctcagccagatacaaatttctcaacagctacatttcccaaactgctgttccttggagcacttccaggaagtgttaatagatatatcccaaaacttaaaaataaatacatttgggaaactctgaatattgcc

SEQ ID NO: 426008 - DNA, 775 bp, Homo sapiens
attaaaccatgcatgcaaaatgcctagtgcgctgcctgctctgtgcccggcagctgctgttctcaccgtctccttaattcaccttgcccttcacctctgtgtggcacaccctctttcctaggaatggttagactctccgaactcaaatcgacagttcagaattccaggcccatcaaaacggccaccaccttgcccgatgacatgatcacccagcgagaggacgcagagggggtggcagcggaggaggagcaggagggagactccggtgagcaggagaccggggccactgatgcccggcctcggaggcggaagccagccaggctgctggaggctacagcgaagccggagccagaggagaagtccagagccaagcggcagaaggactttgacatagcagaacaaaacgagtccagcgacgaggagagcctgagaaaagagagagctcggtctgcagaggagccgtggactcaaaatcaacagaaacttctggaactggcgttgcagcagtacccaaggggatcctctgaccgctgggacaaaatagccagatgtgtcccgtccaagagcaaggaagactgtatcgctaggtacaagttgctggttgaactggtccaaaagaaaaaacaagctaaaagctgaatattctgggagatgatgttcaccttcattttccaaaatgaatatcttaaaaatcttatgcagaaatttgcattttgtacctcaatatttctacgtcatgtgccttagtaaaaaaaaataataaataaataaaaga

SEQ ID NO: 426009 - DNA, 1004 bp, Homo sapiens
ggcagcccaggcgccgggcgctgcctctacagctgtgtgtaggcctgggggcgagggtcttcggaacgtagcgctggctgcggccccgcccgcctacccacccgcccgtccggcagccggctcccgccgcctccgcgctctgtctggggccagccacctggcgggccgctccggtgcgcctgcccgcgcttttcactgacaggcgctgttccccacagccagcgccgcccgccacgtcccagctctcggccaacggagctgcgcggcgggtgacctttccgagcccagcgcgatgacggctccttgctcccagccggcgcagcttcctggacgccgccagctcgggctggtgccgttcccgccgccgccgccgcggacgccgctgctgtggctgctgctgctgctgctggccgccgtggcgccggcgcgcggctgggagagcggagacctggagttgtttgacttagtggaggaggtgcagctcaacttctaccagttcctcggggtgcagcaggatgcatcatctgcagacatcagaaaagcatatcgtaagctttcactaactttacatccagacaagaataaagatgaaaatgcagaaactcagtttagacaagtatgatgatattctgatcaatggacttccagattggcgacagcctgtattctactacaggcgggtgagaaaaatgagcaatgctgagctggcattactcttgttcattattctcacagtgggtcattatgctgtggtttggtcaatctacctggaaaaacaactgatgaactactaagtaaaacaacaatacactctatctaaaaaactccagggggcactctattggcagggggcggcgaacaacagcgggtcttgaaatgggcgccattgtggcataacggtggtcccttggccccactgtttctgtggtccccatgttggtaactctcgccgggtcccccataaaggagccgatataattcattaagccattgacctggtaagg

SEQ ID NO: 426010 - DNA, 484 bp, Homo sapiens
agacccgattatgatgctagtacgcctcacaaacggccgccccagcccctcactccacgccaagcaccttccctttgggctgggcttgcaggagcccttctcgcactgcccagaccggtctgccttgtgagcgactggactccaggacatcccgggaactctgggcagagggactggacgtgaggctcttcatgagcagaagccagcagaccggccacatgatgaccacactgacttgtgcaagtgactgttctcacctctctttttttcttcctacaggaagactgtatcgctaggtacaagttgctggttgaactggtccaaaagaaaaaacaagctaaaagctgaatattctgggagatgatgttcaccttcattttccaaaatgaatatcttaaaaatcttatgcagaaatttgcattttgtacctcaatatttctacgtcatgtgccttagtaaaaaaaaataataaataaataaaaga

SEQ ID NO: 426011 - DNA, 1928 bp, Homo sapiens
ggcagcccaggcgccgggcgctgcctctacagctgtgtgtaggcctgggggcgagggtcttcggaacgtagcgctggctgcggccccgcccgcctacccacccgcccgtccggcagccggctcccgccgcctccgcgctctgtctggggccagccacctggcgggccgctccggtgcgcctgcccgcgcttttcactgacaggcgctgttccccacagccagcgccgcccgccacgtcccagctctcggccaacggagctgcgcggcgggtgacctttccgagcccagcgcgatgacggctccttgctcccagccggcgcagcttcctggacgccgccagctcgggctggtgccgttcccgccgccgccgccgcggacgccgctgctgtggctgctgctgctgctgctggccgccgtggcgccggcgcgcggctgggagagcggagacctggagttgtttgacttagtggaggaggtgcagctcaacttctaccagttcctcggggtgcagcaggatgcatcatctgcagacatcagaaaagcatatcgtaagctttcactaactttacatccagacaagaataaagatgaaaatgcagaaactcagtttagacaaattggtggccatttatgaagttttaaaggatgatgaacgaaggcagaggatgaactactaagtagaaaaaagagagaaaagaaaaaaaagactggcagcaagagtgtggatgtatcaaaactcggtgcttcagaaaaaaatgaaagattgctgatgaaaccacagtggcatgatttgcttccatgcaaactggggatttggttttgccttacactaaaagcattacctcacctcatccaggatgctgggcagttttatgctaaatataaagaaacaagattgaaggaaaaggaagatgcactgactagaactgaacttgaaacacttcaaaaacagaagaaagttaaaaaaccaaaacctgaatttcctgtatacacacctttagaaactacatatattcagtcttatgatcatggaacttccatagaagaaattgaggaacaaatggatgattggttggaaaacaggaaccgaacacagaaaaaacaggcacctgaatggacagaagaggacctcagccaactgacaagaagtatggttaagttcccaggagggactccaggtcgatgggaaaagattgcccacgaattgggtcgatctgtgacagatgtgacaaccaaagccaagcaactgaaggattcagtgacctgctccccaggaatggttagactctccgaactcaaatcgacagttcagaattccaggcccatcaaaacggccaccaccttgcccgatgacatgatcacccagcgagaggacgcagagggggtggcagcggaggaggagcaggagggagactccggtgagcaggagaccggggccactgatgcccggcctcggaggcggaagccagccaggctgctggaggctacagcgaagccggagccagaggagaagtccagagccaagcggcagaaggactttgacatagcagaacaaaacgagtccagcgacgaggagagcctgagaaaagagagagctcggtctgcagaggagccgtggactcaaaatcaacagaaacttctggaactggcgttgcagcagtacccaaggggatcctctgaccgctgggacaaaatagccagatgtgtcccgtccaagagcaaggaagactgtatcgctaggtacaagttgctggttgaactggtccaaaagaaaaaacaagctaaaagctgaatattctgggagatgatgttcaccttcattttccaaaatgaatatcttaaaaatcttatgcagaaatttgcattttgtacctcaatatttctacgtcatgtgccttagtaaaaaaaaataataaataaataaaaga

SEQ ID NO: 426012 - DNA, 986 bp, Homo sapiens
tgaacttaccatagaaatgtgcacacattagactctcagtaagtacttgttaagttaatcaagcacccaattagtcatggtgacctctgctgagagagcataatcttgggaagagtgggagacaagatcctggtctctaaaggttgggagacttgaattctaggcacctgaatggacagaagaggacctcagccaactgacaagaagtatggttaagttcccaggagggactccaggtcgatgggaaaagattgcccacgaattgggtcgatctgtgacagatgtgacaaccaaagccaagcaactgaaggattcagtgacctgctccccaggaatggttagactctccgaactcaaatcgacagttcagaattccaggcccatcaaaacggccaccaccttgcccgatgacatgatcacccagcgagaggacgcagagggggtggcagcggaggaggagcaggagggagactccggtgagcaggagaccggggccactgatgcccggcctcggaggcggaagccagccaggctgctggaggctacagcgaagccggagccagaggagaagtccagagccaagcggcagaaggactttgacatagcagaacaaaacgagtccagcgacgaggagagcctgagaaaagagagagctcggtctgcagaggagccgtggactcaaaatcaacagaaacttctggaactggcgttgcagcagtacccaaggggatcctctgaccgctgggacaaaatagccagatgtgtcccgtccaagagcaaggaagactgtatcgctaggtacaagttgctggttgaactggtccaaaagaaaaaacaagctaaaagctgaatattctgggagatgatgttcaccttcattttccaaaatgaatatcttaaaaatcttatgcagaaatttgcattttgtacctcaatatttctacgtcatgtgccttagtaaaaaaaaataataaataaataaaaga

SEQ ID NO: 426013 - DNA, 2094 bp, Homo sapiens
ggcagcccaggcgccgggcgctgcctctacagctgtgtgtaggcctgggggcgagggtcttcggaacgtagcgctggctgcggccccgcccgcctacccacccgcccgtccggcagccggctcccgccgcctccgcgctctgtctggggccagccacctggcgggccgctccggtgcgcctgcccgcgcttttcactgacaggcgctgttccccacagccagcgccgcccgccacgtcccagctctcggccaacggagctgcgcggcgggtgacctttccgagcccagcgcgatgacggctccttgctcccagccggcgcagcttcctggacgccgccagctcgggctggtgccgttcccgccgccgccgccgcggacgccgctgctgtggctgctgctgctgctgctggccgccgtggcgccggcgcgcggctgggagagcggagacctggagttgtttgacttagtggaggaggtgcagctcaacttctaccagttcctcggggtgcagcaggatgcatcatctgcagacatcagaaaagcatatcgtaagctttcactaactttacatccagacaagaataaagatgaaaatgcagaaactcagtttagacaaattggtggccatttatgaagttttaaaggatgatgaacgaaggcagaggtatgatgatattctgatcaatggacttccagattggcgacagcctgtattctactacaggcgggtgagaaaaatgagcaatgctgagctggcattactcttgttcattattctcacagtgggtcattatgctgtggtttggtcaatctacctggaaaaacaactggatgaactactaagtagaaaaaagagagaaaagaaaaaaaagactggcagcaagagtgtggatgtatcaaaactcggtgcttcagaaaaaaatgaaagattgctgatgaaaccacagtggcatgatttgcttccatgcaaactggggatttggttttgccttacactaaaagcattacctcacctcatccaggatgctgggcagttttatgctaaatataaagaaacaagattgaaggaaaaggaagatgcactgactagaactgaacttgaaacacttcaaaaacagaagaaagttaaaaaaccaaaacctgaatttcctgtatacacacctttagaaactacatatattcagtcttatgatcatggaacttccatagaagaaattgaggaacaaatggatgattggttggaaaacaggaaccgaacacagaaaaaacaggcacctgaatggacagaagaggacctcagccaactgacaagaagtatggttaagttcccaggagggactccaggtcgatgggaaaagattgcccacgaattgggtcgatctgtgacagatgtgacaaccaaagccaagcaactgaaggattcagtgacctgctccccaggaatggttagactctccgaactcaaatcgacagttcagaattccaggcccatcaaaacggccaccaccttgcccgatgacatgatcacccagcgagaggacgcagagggggtggcagcggaggaggagcaggagggagactccggtgagcaggagaccggggccactgatgcccggcctcggaggcggaagccagccaggctgctggaggctacagcgaagccggagccagaggagaagtccagagccaagcggcagaaggactttgacatagcagaacaaaacgagtccagcgacgaggagagcctgagaaaagagagagctcggtctgcagaggagccgtggactcaaaatcaacagaaacttctggaactggcgttgcagcagtacccaaggggatcctctgaccgctgggacaaaatagccagatgtgtcccgtccaagagcaaggaagactgtatcgctaggtacaagttgctggttgaactggtccaaaagaaaaaacaagctaaaagctgaatattctgggagatgatgttcaccttcattttccaaaatgaatatcttaaaaatcttatgcagaaatttgcattttgtacctcaatatttctacgtcatgtgccttagtaaaaaaaaataataaataaataaaaga

SEQ ID NO: 426014 - DNA, 1615 bp, Homo sapiens
tctgggcgttgattagtagtagttactggttgaacattgtttgttggtgtgtatattgtaattgagattgctcgggggaataggttatgtgattaggagtagggttaggatgagtgggaagaagaaagagaggaagtaaagtttaattatgcctttttgggttgagatgatgaacgaaggcagaggtatgatgatattctgatcaatggacttccagattggcgacagcctgtattctactacaggcgggtgagaaaaatgagcaatgctgagctggcattactcttgttcattattctcacagtgggtcattatgctgtggtttggtcaatctacctggaaaaacaactggatgaactactaagtagaaaaaagagagaaaagaaaaaaaagactggcagcaagagtgtggatgtatcaaaactcggtgcttcagaaaaaaatgaaagattgctgatgaaaccacagtggcatgatttgcttccatgcaaactggggatttggttttgccttacactaaaagcattacctcacctcatccaggatgctgggcagttttatgctaaatataaagaaacaagattgaaggaaaaggaagatgcactgactagaactgaacttgaaacacttcaaaaacagaagaaagttaaaaaaccaaaacctgaatttcctgtatacacacctttagaaactacatatattcagtcttatgatcatggaacttccatagaagaaattgaggaacaaatggatgattggttggaaaacaggaaccgaacacagaaaaaacaggcacctgaatggacagaagaggacctcagccaactgacaagaagtatggttaagttcccaggagggactccaggtcgatgggaaaagattgcccacgaattgggtcgatctgtgacagatgtgacaaccaaagccaagcaactgaaggattcagtgacctgctccccaggaatggttagactctccgaactcaaatcgacagttcagaattccaggcccatcaaaacggccaccaccttgcccgatgacatgatcacccagcgagaggacgcagagggggtggcagcggaggaggagcaggagggagactccggtgagcaggagaccggggccactgatgcccggcctcggaggcggaagccagccaggctgctggaggctacagcgaagccggagccagaggagaagtccagagccaagcggcagaaggactttgacatagcagaacaaaacgagtccagcgacgaggagagcctgagaaaagagagagctcggtctgcagaggagccgtggactcaaaatcaacagaaacttctggaactggcgttgcagcagtacccaaggggatcctctgaccgctgggacaaaatagccagatgtgtcccgtccaagagcaaggaagactgtatcgctaggtacaagttgctggttgaactggtccaaaagaaaaaacaagctaaaagctgaatattctgggagatgatgttcaccttcattttccaaaatgaatatcttaaaaatcttatgcagaaatttgcattttgtacctcaatatttctacgtcatgtgccttagtaaaaaaaaataataaataaataaaaga

SEQ ID NO: 426015 - DNA, 1305 bp, Homo sapiens
tagcggatcttaaacaccgcatctacctggaacaacaacttgatgaactactaagtagaaaaaagagagaaaagaaaaaaaagactggcagcaagagtgtggatgtatcaaaactcggtgcttcagaaaaaaatgaaagattgctgatgaaaccacagtggcatgatttgcttccatgcaaactggggatttggttttgccttacactaaaagcattacctcacctcatccaggatgctgggcagttttatgctaaatataaagaaacaagattgaaggaaaaggaagatgcactgactagaactgaacttgaaacacttcaaaaacagaagaaagttaaaaaaccaaaacctgaatttcctgtatacacacctttagaaactacatatattcagtcttatgatcatggaacttccatagaagaaattgaggaacaaatggatgattggttggaaaacaggaaccgaacacagaaaaaacaggcacctgaatggacagaagaggacctcagccaactgacaagaagtatggttaagttcccaggagggactccaggtcgatgggaaaagattgcccacgaattgggtcgatctgtgacagatgtgacaaccaaagccaagcaactgaaggattcagtgacctgctccccaggaatggttagactctccgaactcaaatcgacagttcagaattccaggcccatcaaaacggccaccaccttgcccgatgacatgatcacccagcgagaggacgcagagggggtggcagcggaggaggagcaggagggagactccggtgagcaggagaccggggccactgatgcccggcctcggaggcggaagccagccaggctgctggaggctacagcgaagccggagccagaggagaagtccagagccaagcggcagaaggactttgacatagcagaacaaaacgagtccagcgacgaggagagcctgagaaaagagagagctcggtctgcagaggagccgtggactcaaaatcaacagaaacttctggaactggcgttgcagcagtacccaaggggatcctctgaccgctgggacaaaatagccagatgtgtcccgtccaagagcaaggaagactgtatcgctaggtacaagttgctggttgaactggtccaaaagaaaaaacaagctaaaagctgaatattctgggagatgatgttcaccttcattttccaaaatgaatatcttaaaaatcttatgcagaaatttgcattttgtacctcaatatttctacgtcatgtgccttagtaaaaaaaaataataaataaataaaaga

SEQ ID NO: 426016 - DNA, 2455 bp, Homo sapiens
ggcacgagagatggcggcgcctgaggggtcttgggggctctaggccggccacctactggtttgcagcggagacgacgcatggggcctgcgcaataggagtacgctgcctgggaggcgtgactagaagcggaagtagttgtgggcgcctttgcaaccgcctgggacgccgccgagtggtctgtgcaggttcgcgggtcgctggcgggggtcgtgagggagtgcgccgggagcggagatatggagggagatggttcagacccagagcctccagatgccggggaggacagcaagtccgagaatggggagaatgcgcccatctactgcatctgccgcaaaccggacatcaactgcttcatgatcgggtgtgacaactgcaatgagtggttccatggggactgcatccggatcactgagaagatggccaaggccatccgggagtggtactgtcgggagtgcagagagaaagaccccaagctagagattcgctatcggcacaagaagtcacgggagcgggatggcaatgagcgggacagcagtgagccccgggatgagggtggagggcgcaagaggcctgtccctgatccagacctgcagcgccgggcagggtcagggacaggggttggggccatgcttgctcggggctctgcttcgccccacaaatcctctccgcagcccttggtggccacacccagccagcatcaccagcagcagcagcagcagatcaaacggtcagcccgcatgtgtggtgagtgtgaggcatgtcggcgcactgaggactgtggtcactgtgatttctgtcgggacatgaagaagttcgggggccccaacaagatccggcagaagtgccggctgcgccagtgccagctgcgggcccgggaatcgtacaagtacttcccttcctcgctctcaccagtgacgccctcagagtccctgccaaggccccgccggccactgcccacccaacagcagccacagccatcacagaagttagggcgcatccgtgaagatgagggggcagtggcgtcatcaacagtcaaggagcctcctgaggctacagccacacctgagccactctcagatgaggacctacctctggatcctgacctgtatcaggacttctgtgcaggggcctttgatgaccatggcctgccctggatgagcgacacagaagagtccccattcctggaccccgcgctgcggaagagggcagtgaaagtgaagcatgtgaagcgtcgggagaagaagtctgagaagaagaaggaggagcgatacaagcggcatcggcagaagcagaagcacaaggataaatggaaacacccagagagggctgatgccaaggaccctgcgtcactgccccagtgcctggggcccggctgtgtgcgccccgcccagcccagctccaagtattgctcagatgactgtggcatgaagctggcagccaaccgcatctacgagatcctcccccagcgcatccagcagtggcagcagagcccttgcattgctgaagagcacggcaagaagctgctcgaacgcattcgccgagagcagcagagtgcccgcacccgccttcaggaaatggaacgccgattccatgagcttgaggccatcattctacgtgccaagcagcaggctgtgcgcgaggatgaggagagcaacgagggtgacagtgatgacacagacctgcagatcttctgtgtttcctgtgggcaccccatcaacccacgtgttgccttgcgccacatggagcgctgctacgccaagtatgagagccagacgtcctttgggtccatgtaccccacacgcattgaaggggccacacgactcttctgtgatgtgtataatcctcagagcaaaacatactgtaagcggctccaggtgctgtgccccgagcactcacgggaccccaaagtgccagctgacgaggtatgcgggtgcccccttgtacgtgatgtctttgagctcacgggtgacttctgccgcctgcccaagcgccagtgcaatcgccattactgctgggagaagctgcggcgtgcggaagtggacttggagcgcgtgcgtgtgtggtacaagctggacgagctgtttgagcaggagcgcaatgtgcgcacagccatgacaaaccgcgcgggattgctggccctgatgctgcaccagacgatccagcacgatcccctcactaccgacctgcgctccagtgccgaccgctgagcctcctggcccggaccccttacaccctgcattccagatgggggagccgcccggtgcccgtgtgtccgttcctccactcatctgtttctccggttctccctgtgcccatccaccggttgaccgcccatctgcctttatcagagggactgtccccgtcgacatgttcagtgcctggtggggctgcggagtccactcatccttgcctcctctccctgggttttgttaataaaattttgaagaaaccaag

SEQ ID NO: 426017 - DNA, 743 bp, Homo sapiens
gggcaaccagccaggacagatggacctcccttccctccctctactgccctctctactccaaatccccagggccacacgactcttctgtgatgtgtataatcctcagagcaaaacatactgtaagcggctccaggtgctgtgccccgagcactcacgggaccccaaagtgccagctgacgaggtatgcgggtgcccccttgtacgtgatgtctttgagctcacgggtgacttctgccgcctgcccaagcgccagtgcaatcgccattactgctgggagaagctgcggcgtgcggaagtggacttggagcgcgtgcgtgtgtggtacaagctggacgagctgtttgagcaggagcgcaatgtgcgcacagccatgacaaaccgcgcgggattgctggccctgatgctgcaccagacgatccagcacgatcccctcactaccgacctgcgctccagtgccgaccgctgagcctcctggcccggaccccttacaccctgcattccagatgggggagccgcccggtgcccgtgtgtccgttcctccactcatctgtttctccggttctccctgtgcccatccaccggttgaccgcccatctgcctttatcagagggactgtccgttcctccactcatctgtttctccggttctcactgtgcccatccaccggttgaccgccacatcctgcctttatcagagggactgtccccgtcgacatgttcaggcatagttacgccgcgtgccac

SEQ ID NO: 426018 - DNA, 2417 bp, Homo sapiens
ggcacgagagatggcggcgcctgaggggtcttgggggctctaggccggccacctactggtttgcagcggagacgacgcatggggcctgcgcaataggagtacgctgcctgggaggcgtgactagaagcggaagtagttgtgggcgcctttgcaaccgcctgggacgccgccgagtggtctgtgcaggttcgcgggtcgctggcgggggtcgtgagggagtgcgccgggagcggagatatggagggagatggttcagacccagagcctccagatgccggggaggacagcaagtccgagaatggggagaatgcgcccatctactgcatctgccgcaaaccggacatcaactgcttcatgatcgggtgtgacaactgcaatgagtggttccatggggactgcatccggatcactgagaagatggccaaggccatccgggagtggtactgtcgggagtgcagagagaaagaccccaagctagagattcgctatcggcacaagaagtcacgggagcgggatggcaatgagcgggacagcagtgagccccgggatgagggtggagggcgcaagaggcctgtccctgatccagacctgcagcgccgggcagggtcagggacaggggttggggccatgcttgctcggggctctgcttcgccccacaaatcctctccgcagcccttggtggccacacccagccagcatcaccagcagcagcagcagcagatcaaacggtcagcccgcatgtgtggtgagtgtgaggcatgtcggcgcactgaggactgtggtcactgtgatttctgtcgggacatgaagaagttcgggggccccaacaagatccggcagaagtgccggctgcgccagtgccagctgcgggcccgggaatcgtacaagtacttcccttcctcgctctcaccagtgacgccctcagagtccctgccaaggccccgccggccactgcccacccaacagcagccacagccatcacagaagttagggcgcatccgtgaagatgagggggcagtggcgtcatcaacagtcaaggagcctcctgaggctacagccacacctgagccactctcagatgaggacctacctctggatcctgacctgtatcaggacttctgtgcaggggcctttgatgaccatggcctgccctggatgagcgacacagaagagtccccattcctggaccccgcgctgcggaagagggcagtgaaagtgaagcatgtgaagcgtcgggagaagaagtctgagaagaagaaggaggagcgatacaagcggcatcggcagaagcagaagcacaaggataaatggaaacacccagagagggctgatgccaaggaccctgcgtcactgccccagtgcctggggcccggctgtgtgcgccccgcccagcccagctccaagtattgctcagatgactgtggcatgaagctggcagccaaccgcatctacgagatcctcccccagcgcatccagcagtggcagcagagcccttgcattgctgaagagcacggcaagaagctgctcgaacgcattcgccgagagcagcagagtgcccgcacccgccttcaggaaatggaacgccgattccatgagcttgaggccatcattctacgtgccaagcagcaggctgtgcgcgaggatgaggagagcaacgagggtgacagtgatgacacagacctgcagatcttctgtgtttcctgtgggcaccccatcaacccacgtgttgccttgcgccacatggagcgctgctacgccaagtatgagagccagacgtcctttgggtccatgtaccccacacgcattgaagggcaaaacatactgtaagcggctccaggtgctgtgccccgagcactcacgggaccccaaagtgccagctgacgaggtatgcgggtgcccccttgtacgtgatgtctttgagctcacgggtgacttctgccgcctgcccaagcgccagtgcaatcgccattactgctgggagaagctgcggcgtgcggaagtggacttggagcgcgtgcgtgtgtggtacaagctggacgagctgtttgagcaggagcgcaatgtgcgcacagccatgacaaaccgcgcgggattgctggccctgatgctgcaccagacgatccagcacgatcccctcactaccgacctgcgctccagtgccgaccgctgagcctcctggcccggaccccttacaccctgcattccagatgggggagccgcccggtgcccgtgtgtccgttcctccactcatctgtttctccggttctccctgtgcccatccaccggttgaccgcccatctgcctttatcagagggactgtccccgtcgacatgttcagtgcctggtggggctgcggagtccactcatccttgcctcctctccctgggttttgttaataaaattttgaagaaaccaag

SEQ ID NO: 426019 - DNA, 2713 bp, Homo sapiens
ggcacgagagatggcggcgcctgaggggtcttgggggctctaggccggccacctactggtttgcagcggagacgacgcatggggcctgcgcaataggagtacgctgcctgggaggcgtgactagaagcggaagtagttgtgggcgcctttgcaaccgcctgggacgccgccgagtggtctgtgcaggttcgcgggtcgctggcgggggtcgtgagggagtgcgccgggagcggagatatggagggagatggttcagacccagagcctccagatgccggggaggacagcaagtccgagaatggggagaatgcgcccatctactgcatctgccgcaaaccggacatcaactgcttcatgatcgggtgtgacaactgcaatgagtggttccatggggactgcatccggatcactgagaagatggccaaggccatccgggagtggtactgtcgggagtgcagagagaaagaccccaagctagagattcgctatcggcacaagaagtcacgggagcgggatggcaatgagcgggacagcagtgagccccgggatgagggtggagggcgcaagaggcctgtccctgatccagacctgcagcgccgggcagggtcagggacaggggttggggccatgcttgctcggggctctgcttcgccccacaaatcctctccgcagcccttggtggccacacccagccagcatcaccagcagcagcagcagcagatcaaacggtcagcccgcatgtgtggtgagtgtgaggcatgtcggcgcactgaggactgtggtcactgtgatttctgtcgggacatgaagaagttcgggggccccaacaagatccggcagaagtgccggctgcgccagtgccagctgcgggcccgggaatcgtacaagtacttcccttcctcgctctcaccagtgacgccctcagagtccctgccaaggccccgccggccactgcccacccaacagcagccacagccatcacagaagttagggcgcatccgtgaagatgagggggcagtggcgtcatcaacagtcaaggagcctcctgaggctacagccacacctgagccactctcagatgaggacctacctctggatcctgacctgtatcaggacttctgtgcaggggcctttgatgaccatggcctgccctggatgagcgacacagaagagtccccattcctggaccccgcgctgcggaagagggcagtgaaagtgaagcatgtgaagcgtcgggagaagaagtctgagaagaagaaggaggagcgatacaagcggcatcggcagaagcagaagcacaaggataaatggaaacacccagagagggctgatgccaaggaccctgcgtcactgccccagtgcctggggcccggctgtgtgcgccccgcccagcccagctccaagtattgctcagatgactgtggcatgaagctggcagccaaccgcatctacgagatcctcccccagcgcatccagcagtggcagcagagcccttgcattgctgaagagcacggcaagaagctgctcgaacgcattcgccgagagcagcagagtgcccgcacccgccttcaggaaatggaacgccgattccatgagcttgaggccatcattctacgtgccaagcagcaggctgtgcgcgaggatgaggagagcaacgagggtgacagtgatgacacagacctgcagatcttctgtgtttcctgtgggcaccccatcaacccacgtgttgccttgcgccacatggagcgctgctacgccaagtatgagagccagacgtcctttgggtccatgtaccccacacgcattgaaggggccacacgactcttctgtgatgtgtataatcctcagagcaaaacatactgtaagcggctccaggtgctgtgccccgagcactcacgggaccccaaagtaaggttttccctcagctcctcccattttgcccctcctccctgcctcgctgtcccacattcatcccttccttcctcacctcacttttccttcactttttcctctcagcttccctgctgcttcaccctccattcctccttttccatgcctcctcaccgttccctgaaccctccattcttttccttctccctccttgagcccccattcctattctcccttatcaccgctattcatccccccaacctggcctccttgcaggtgccagctgacgaggtatgcgggtgcccccttgtacgtgatgtctttgagctcacgggtgacttctgccgcctgcccaagcgccagtgcaatcgccattactgctgggagaagctgcggcgtgcggaagtggacttggagcgcgtgcgtgtgtggtacaagctggacgagctgtttgagcaggagcgcaatgtgcgcacagccatgacaaaccgcgcgggattgctggccctgatgctgcaccagacgatccagcacgatcccctcactaccgacctgcgctccagtgccgaccgctgagcctcctggcccggaccccttacaccctgcattccagatgggggagccgcccggtgcccgtgtgtccgttcctccactcatctgtttctccggttctccctgtgcccatccaccggttgaccgcccatctgcctttatcagagggactgtccccgtcgacatgttcagtgcctggtggggctgcggagtccactcatccttgcctcctctccctgggttttgttaataaaattttgaagaaaccaag

SEQ ID NO: 426020 - DNA, 2595 bp, Homo sapiens
ggcacgagagatggcggcgcctgaggggtcttgggggctctaggccggccacctactggtttgcagcggagacgacgcatggggcctgcgcaataggagtacgctgcctgggaggcgtgactagaagcggaagtagttgtgggcgcctttgcaaccgcctgggacgccgccgagtggtctgtgcaggttcgcgggtcgctggcgggggtcgtgagggagtgcgccgggagcggagatatggagggagatggttcagacccagagcctccagatgccggggaggacagcaagtccgagaatggggagaatgcgcccatctactgcatctgccgcaaaccggacatcaactgcttcatgatcgggtgtgacaactgcaatgagtggttccatggggactgcatccggatcactgagaagatggccaaggccatccgggagtggtactgtcgggagtgcagagagaaagaccccaagctagagattcgctatcggcacaagaagtcacgggagcgggatggcaatgagcgggacagcagtgagccccgggatgagggtggagggcgcaagaggcctgtccctgatccagacctgcagcgccgggcagggtcagggacaggggttggggccatgcttgctcggggctctgcttcgccccacaaatcctctccgcagcccttggtggccacacccagccagcatcaccagcagcagcagcagcagatcaaacggtcagcccgcatgtgtggtgagtgtgaggcatgtcggcgcactgaggactgtggtcactgtgatttctgtcgggacatgaagaagttcgggggccccaacaagatccggcagaagtgccggctgcgccagtgccagctgcgggcccgggaatcgtacaagtacttcccttcctcgctctcaccagtgacgccctcagagtccctgccaaggccccgccggccactgcccacccaacagcagccacagccatcacagaagttagggcgcatccgtgaagatgagggggcagtggcgtcatcaacagtcaaggagcctcctgaggctacagccacacctgagccactctcagatgaggacctacctctggatcctgacctgtatcaggacttctgtgcaggggcctttgatgaccatggcctgccctggatgagcgacacagaagagtccccattcctggaccccgcgctgcggaagagggcagtgaaagtgaagcatgtgaagcgtcgggagaagaagtctgagaagaagaaggaggagcgatacaagcggcatcggcagaagcagaagcacaaggataaatggaaacacccagagagggctgatgccaaggaccctgcgtcactgccccagtgcctggggcccggctgtgtgcgccccgcccagcccagctccaagtattgctcagatgactgtggcatgaagctggcagccaaccgcatctacgagatcctcccccagcgcatccagcagtggcagcagagcccttgcattgctgaagagcacggcaagaagctgctcgaacgcattcgccgagagcagcagagtgcccgcacccgccttcaggaaatggaacgccgattccatgagcttgaggccatcattctacgtgccaagcagcaggctgtgcgcgaggatgaggagagcaacgagggtgacagtgatgacacagacctgcagatcttctgtgtttcctgtgggcaccccatcaacccacgtgttgccttgcgccacatggagcgctgctacgccaaggttggggtgtcagactgagggggcggaccatgtgggaacatcagtgggccagtgggggacagatttgttgtctgggtggtgtcttgggagggcatgcagcgcacatccacagttccctccatttgtgctcatccctccagtatgagagccagacgtcctttgggtccatgtaccccacacgcattgaaggggccacacgactcttctgtgatgtgtataatcctcagagcaaaacatactgtaagcggctccaggtgctgtgccccgagcactcacgggaccccaaagtgccagctgacgaggtatgcgggtgcccccttgtacgtgatgtctttgagctcacgggtgacttctgccgcctgcccaagcgccagtgcaatcgccattactgctgggagaagctgcggcgtgcggaagtggacttggagcgcgtgcgtgtgtggtacaagctggacgagctgtttgagcaggagcgcaatgtgcgcacagccatgacaaaccgcgcgggattgctggccctgatgctgcaccagacgatccagcacgatcccctcactaccgacctgcgctccagtgccgaccgctgagcctcctggcccggaccccttacaccctgcattccagatgggggagccgcccggtgcccgtgtgtccgttcctccactcatctgtttctccggttctccctgtgcccatccaccggttgaccgcccatctgcctttatcagagggactgtccccgtcgacatgttcagtgcctggtggggctgcggagtccactcatccttgcctcctctccctgggttttgttaataaaattttgaagaaaccaag

SEQ ID NO: 426021 - DNA, 2853 bp, Homo sapiens
ggcacgagagatggcggcgcctgaggggtcttgggggctctaggccggccacctactggtttgcagcggagacgacgcatggggcctgcgcaataggagtacgctgcctgggaggcgtgactagaagcggaagtagttgtgggcgcctttgcaaccgcctgggacgccgccgagtggtctgtgcaggttcgcgggtcgctggcgggggtcgtgagggagtgcgccgggagcggagatatggagggagatggttcagacccagagcctccagatgccggggaggacagcaagtccgagaatggggagaatgcgcccatctactgcatctgccgcaaaccggacatcaactgcttcatgatcgggtgtgacaactgcaatgagtggttccatggggactgcatccggatcactgagaagatggccaaggccatccgggagtggtactgtcgggagtgcagagagaaagaccccaagctagagattcgctatcggcacaagaagtcacgggagcgggatggcaatgagcgggacagcagtgagccccgggatgagggtggagggcgcaagaggcctgtccctgatccagacctgcagcgccgggcagggtcagggacaggggttggggccatgcttgctcggggctctgcttcgccccacaaatcctctccgcagcccttggtggccacacccagccagcatcaccagcagcagcagcagcagatcaaacggtcagcccgcatgtgtggtgagtgtgaggcatgtcggcgcactgaggactgtggtcactgtgatttctgtcgggacatgaagaagttcgggggccccaacaagatccggcagaagtgccggctgcgccagtgccagctgcgggcccgggaatcgtacaagtacttcccttcctcgctctcaccagtgacgccctcagagtccctgccaaggccccgccggccactgcccacccaacagcagccacagccatcacagaagttagggcgcatccgtgaagatgagggggcagtggcgtcatcaacagtcaaggagcctcctgaggctacagccacacctgagccactctcagatgaggacctacctctggatcctgacctgtatcaggacttctgtgcaggggcctttgatgaccatggcctgccctggatgagcgacacagaagagtccccattcctggaccccgcgctgcggaagagggcagtgaaagtgaagcatgtgaagcgtcgggagaagaagtctgagaagaagaaggaggagcgatacaagcggcatcggcagaagcagaagcacaaggataaatggaaacacccagagagggctgatgccaaggaccctgcgtcactgccccagtgcctggggcccggctgtgtgcgccccgcccagcccagctccaagtattgctcagatgactgtggcatgaagctggcagccaaccgcatctacgagatcctcccccagcgcatccagcagtggcagcagagcccttgcattgctgaagagcacggcaagaagctgctcgaacgcattcgccgagagcagcagagtgcccgcacccgccttcaggaaatggaacgccgattccatgagcttgaggccatcattctacgtgccaagcagcaggctgtgcgcgaggatgaggagagcaacgagggtgacagtgatgacacagacctgcagatcttctgtgtttcctgtgggcaccccatcaacccacgtgttgccttgcgccacatggagcgctgctacgccaaggttggggtgtcagactgagggggcggaccatgtgggaacatcagtgggccagtgggggacagatttgttgtctgggtggtgtcttgggagggcatgcagcgcacatccacagttccctccatttgtgctcatccctccagtatgagagccagacgtcctttgggtccatgtaccccacacgcattgaaggggccacacgactcttctgtgatgtgtataatcctcagagcaaaacatactgtaagcggctccaggtgctgtgccccgagcactcacgggaccccaaagtaaggttttccctcagctcctcccattttgcccctcctccctgcctcgctgtcccacattcatcccttccttcctcacctcacttttccttcactttttcctctcagcttccctgctgcttcaccctccattcctccttttccatgcctcctcaccgttccctgaaccctccattcttttccttctccctccttgagcccccattcctattctcccttatcaccgctattcatccccccaacctggcctccttgcaggtgccagctgacgaggtatgcgggtgcccccttgtacgtgatgtctttgagctcacgggtgacttctgccgcctgcccaagcgccagtgcaatcgccattactgctgggagaagctgcggcgtgcggaagtggacttggagcgcgtgcgtgtgtggtacaagctggacgagctgtttgagcaggagcgcaatgtgcgcacagccatgacaaaccgcgcgggattgctggccctgatgctgcaccagacgatccagcacgatcccctcactaccgacctgcgctccagtgccgaccgctgagcctcctggcccggaccccttacaccctgcattccagatgggggagccgcccggtgcccgtgtgtccgttcctccactcatctgtttctccggttctccctgtgcccatccaccggttgaccgcccatctgcctttatcagagggactgtccccgtcgacatgttcagtgcctggtggggctgcggagtccactcatccttgcctcctctccctgggttttgttaataaaattttgaagaaaccaag

SEQ ID NO: 426022 - DNA, 2671 bp, Homo sapiens
ggcacgagagatggcggcgcctgaggggtcttgggggctctaggccggccacctactggtttgcagcggagacgacgcatggggcctgcgcaataggagtacgctgcctgggaggcgtgactagaagcggaagtagttgtgggcgcctttgcaaccgcctgggacgccgccgagtggtctgtgcaggttcgcgggtcgctggcgggggtcgtgagggagtgcgccgggagcggagatatggagggagatggttcagacccagagcctccagatgccggggaggacagcaagtccgagaatggggagaatgcgcccatctactgcatctgccgcaaaccggacatcaactgcttcatgatcgggtgtgacaactgcaatgagtggttccatggggactgcatccggatcactgagaagatggccaaggccatccgggagtggtactgtcgggagtgcagagagaaagaccccaagctagagattcgctatcggcacaagaagtcacgggagcgggatggcaatgagcgggacagcagtgagccccgggatgagggtggagggcgcaagaggcctgtccctgatccagacctgcagcgccgggcagggtcagggacaggggttggggccatgcttgctcggggctctgcttcgccccacaaatcctctccgcagcccttggtggccacacccagccagcatcaccagcagcagcagcagcagatcaaacggtcagcccgcatgtgtggtgagtgtgaggcatgtcggcgcactgaggactgtggtcactgtgatttctgtcgggacatgaagaagttcgggggccccaacaagatccggcagaagtgccggctgcgccagtgccagctgcgggcccgggaatcgtacaagtacttcccttcctcgctctcaccagtgacgccctcagagtccctgccaaggccccgccggccactgcccacccaacagcagccacagccatcacagaagttagggcgcatccgtgaagatgagggggcagtggcgtcatcaacagtcaaggagcctcctgaggctacagccacacctgagccactctcagatgaggacctacctctggatcctgacctgtatcaggacttctgtgcaggggcctttgatgaccatggcctgccctggatgagcgacacagaagagtccccattcctggaccccgcgctgcggaagagggcagtgaaagtgaagcatgtgaagcgtcgggagaagaagtctgagaagaagaaggaggagcgatacaagcggcatcggcagaagcagaagcacaaggataaatggaaacacccagagagggctgatgccaaggaccctgcgtcactgccccagtgcctggggcccggctgtgtgcgccccgcccagcccagctccaagtattgctcagatgactgtggcatgaagctggcagccaaccgcatctacgagatcctcccccagcgcatccagcagtggcagcagagcccttgcattgctgaagagcacggcaagaagctgctcgaacgcattcgccgagagcagcagagtgcccgcacccgccttcaggaaatggaacgccgattccatgagcttgaggccatcattctacgtgccaagcagcaggctgtgcgcgaggatgaggaggagcaagcaggggcgcagcagagcagggcctgtactttgtccttcccagccttattgttccttccattccatgcagagcaacgagggtgacagtgatgacacagacctgcagatcttctgtgtttcctgtgggcaccccatcaacccacgtgttgccttgcgccacatggagcgctgctacgccaaggttggggtgtcagactgagggggcggaccatgtgggaacatcagtgggccagtgggggacagatttgttgtctgggtggtgtcttgggagggcatgcagcgcacatccacagttccctccatttgtgctcatccctccagtatgagagccagacgtcctttgggtccatgtaccccacacgcattgaaggggccacacgactcttctgtgatgtgtataatcctcagagcaaaacatactgtaagcggctccaggtgctgtgccccgagcactcacgggaccccaaagtgccagctgacgaggtatgcgggtgcccccttgtacgtgatgtctttgagctcacgggtgacttctgccgcctgcccaagcgccagtgcaatcgccattactgctgggagaagctgcggcgtgcggaagtggacttggagcgcgtgcgtgtgtggtacaagctggacgagctgtttgagcaggagcgcaatgtgcgcacagccatgacaaaccgcgcgggattgctggccctgatgctgcaccagacgatccagcacgatcccctcactaccgacctgcgctccagtgccgaccgctgagcctcctggcccggaccccttacaccctgcattccagatgggggagccgcccggtgcccgtgtgtccgttcctccactcatctgtttctccggttctccctgtgcccatccaccggttgaccgcccatctgcctttatcagagggactgtccccgtcgacatgttcagtgcctggtggggctgcggagtccactcatccttgcctcctctccctgggttttgttaataaaattttgaagaaaccaag

SEQ ID NO: 426023 - DNA, 2363 bp, Homo sapiens
gggaggggttcggcggtggaggtcggtcggttggcaacagtggggtctgtcggccgactcaggggtctgtggtgagccataaccggagtctgtggactgaacggcgggagtctatgggcagaatgatgaaccatctgggagttctatggagggagatggttcagacccagagcctccagatgccggggaggacagcaagtccgagaatggggagaatgcgcccatctactgcatctgccgcaaaccggacatcaactgcttcatgatcgggtgtgacaactgcaatgagtggttccatggggactgcatccggatcactgagaagatggccaaggccatccgggagtggtactgtcgggagtgcagagagaaagaccccaagctagagattcgctatcggcacaagaagtcacgggagcgggatggcaatgagcgggacagcagtgagccccgggatgagggtggagggcgcaagaggcctgtccctgatccagacctgcagcgccgggcagggtcagggacaggggttggggccatgcttgctcggggctctgcttcgccccacaaatcctctccgcagcccttggtggccacacccagccagcatcaccagcagcagcagcagcagatcaaacggtcagcccgcatgtgtggtgagtgtgaggcatgtcggcgcactgaggactgtggtcactgtgatttctgtcgggacatgaagaagttcgggggccccaacaagatccggcagaagtgccggctgcgccagtgccagctgcgggcccgggaatcgtacaagtacttcccttcctcgctctcaccagtgacgccctcagagtccctgccaaggccccgccggccactgcccacccaacagcagccacagccatcacagaagttagggcgcatccgtgaagatgagggggcagtggcgtcatcaacagtcaaggagcctcctgaggctacagccacacctgagccactctcagatgaggacctacctctggatcctgacctgtatcaggacttctgtgcaggggcctttgatgaccatggcctgccctggatgagcgacacagaagagtccccattcctggaccccgcgctgcggaagagggcagtgaaagtgaagcatgtgaagcgtcgggagaagaagtctgagaagaagaaggaggagcgatacaagcggcatcggcagaagcagaagcacaaggataaatggaaacacccagagagggctgatgccaaggaccctgcgtcactgccccagtgcctggggcccggctgtgtgcgccccgcccagcccagctccaagtattgctcagatgactgtggcatgaagctggcagccaaccgcatctacgagatcctcccccagcgcatccagcagtggcagcagagcccttgcattgctgaagagcacggcaagaagctgctcgaacgcattcgccgagagcagcagagtgcccgcacccgccttcaggaaatggaacgccgattccatgagcttgaggccatcattctacgtgccaagcagcaggctgtgcgcgaggatgaggagagcaacgagggtgacagtgatgacacagacctgcagatcttctgtgtttcctgtgggcaccccatcaacccacgtgttgccttgcgccacatggagcgctgctacgccaagtatgagagccagacgtcctttgggtccatgtaccccacacgcattgaaggggccacacgactcttctgtgatgtgtataatcctcagagcaaaacatactgtaagcggctccaggtgctgtgccccgagcactcacgggaccccaaagtgccagctgacgaggtatgcgggtgcccccttgtacgtgatgtctttgagctcacgggtgacttctgccgcctgcccaagcgccagtgcaatcgccattactgctgggagaagctgcggcgtgcggaagtggacttggagcgcgtgcgtgtgtggtacaagctggacgagctgtttgagcaggagcgcaatgtgcgcacagccatgacaaaccgcgcgggattgctggccctgatgctgcaccagacgatccagcacgatcccctcactaccgacctgcgctccagtgccgaccgctgagcctcctggcccggaccccttacaccctgcattccagatgggggagccgcccggtgcccgtgtgtccgttcctccactcatctgtttctccggttctccctgtgcccatccaccggttgaccgcccatctgcctttatcagagggactgtccccgtcgacatgttcagtgcctggtggggctgcggagtccactcatccttgcctcctctccctgggttttgttaataaaattttgaagaaaccaag

SEQ ID NO: 426024 - DNA, 2541 bp, Homo sapiens
ggcacgagagatggcggcgcctgaggggtcttgggggctctaggccggccacctactggtttgcagcggagacgacgcatggggcctgcgcaataggagtacgctgcctgggaggcgtgactagaagcggaagtagttgtgggcgcctttgcaaccgcctgggacgccgccgagtggtctgtgcaggttcgcgggtcgctggcgggggtcgtgagggagtgcgccgggagcggagatatggggtctgtggtgagccataaccggagtctgtggactgaacggcgggagtctatgggcagaatgatgaaccatctgggagttctatggagggagatggttcagacccagagcctccagatgccggggaggacagcaagtccgagaatggggagaatgcgcccatctactgcatctgccgcaaaccggacatcaactgcttcatgatcgggtgtgacaactgcaatgagtggttccatggggactgcatccggatcactgagaagatggccaaggccatccgggagtggtactgtcgggagtgcagagagaaagaccccaagctagagattcgctatcggcacaagaagtcacgggagcgggatggcaatgagcgggacagcagtgagccccgggatgagggtggagggcgcaagaggcctgtccctgatccagacctgcagcgccgggcagggtcagggacaggggttggggccatgcttgctcggggctctgcttcgccccacaaatcctctccgcagcccttggtggccacacccagccagcatcaccagcagcagcagcagcagatcaaacggtcagcccgcatgtgtggtgagtgtgaggcatgtcggcgcactgaggactgtggtcactgtgatttctgtcgggacatgaagaagttcgggggccccaacaagatccggcagaagtgccggctgcgccagtgccagctgcgggcccgggaatcgtacaagtacttcccttcctcgctctcaccagtgacgccctcagagtccctgccaaggccccgccggccactgcccacccaacagcagccacagccatcacagaagttagggcgcatccgtgaagatgagggggcagtggcgtcatcaacagtcaaggagcctcctgaggctacagccacacctgagccactctcagatgaggacctacctctggatcctgacctgtatcaggacttctgtgcaggggcctttgatgaccatggcctgccctggatgagcgacacagaagagtccccattcctggaccccgcgctgcggaagagggcagtgaaagtgaagcatgtgaagcgtcgggagaagaagtctgagaagaagaaggaggagcgatacaagcggcatcggcagaagcagaagcacaaggataaatggaaacacccagagagggctgatgccaaggaccctgcgtcactgccccagtgcctggggcccggctgtgtgcgccccgcccagcccagctccaagtattgctcagatgactgtggcatgaagctggcagccaaccgcatctacgagatcctcccccagcgcatccagcagtggcagcagagcccttgcattgctgaagagcacggcaagaagctgctcgaacgcattcgccgagagcagcagagtgcccgcacccgccttcaggaaatggaacgccgattccatgagcttgaggccatcattctacgtgccaagcagcaggctgtgcgcgaggatgaggagagcaacgagggtgacagtgatgacacagacctgcagatcttctgtgtttcctgtgggcaccccatcaacccacgtgttgccttgcgccacatggagcgctgctacgccaagtatgagagccagacgtcctttgggtccatgtaccccacacgcattgaaggggccacacgactcttctgtgatgtgtataatcctcagagcaaaacatactgtaagcggctccaggtgctgtgccccgagcactcacgggaccccaaagtgccagctgacgaggtatgcgggtgcccccttgtacgtgatgtctttgagctcacgggtgacttctgccgcctgcccaagcgccagtgcaatcgccattactgctgggagaagctgcggcgtgcggaagtggacttggagcgcgtgcgtgtgtggtacaagctggacgagctgtttgagcaggagcgcaatgtgcgcacagccatgacaaaccgcgcgggattgctggccctgatgctgcaccagacgatccagcacgatcccctcactaccgacctgcgctccagtgccgaccgctgagcctcctggcccggaccccttacaccctgcattccagatgggggagccgcccggtgcccgtgtgtccgttcctccactcatctgtttctccggttctccctgtgcccatccaccggttgaccgcccatctgcctttatcagagggactgtccccgtcgacatgttcagtgcctggtggggctgcggagtccactcatccttgcctcctctccctgggttttgttaataaaattttgaagaaaccaag

SEQ ID NO: 426025 - DNA, 1935 bp, Homo sapiens
ggcacgagagatggcggcgcctgaggggtcttgggggctctaggccggccacctactggtttgcagcggagacgacgcatggggcctgcgcaataggagtacgctgcctgggaggcgtgactagaagcggaagtagttgtgggcgcctttgcaaccgcctgggacgccgccgagtggtctgtgcaggttcgcgggtcgctggcgggggtcgtgagggagtgcgccgggagcggagatatggagggagatggttcagacccagagcctccagatgccggggaggacagcaagtccgagaatggggagaatgcgcccatctactgcatctgccgcaaaccggacatcaactgcttcatgatcgggtgtgacaactgcaatgagtggttccatggggactgcatccggatcactgagaagatggccaaggccatccgggagtggtactgtcgggagtgcagagagaaagaccccaagctagagattcgctatcggcacaagaagtcacgggagcgggatggcaatgagcgggacagcagtgagccccgggatgagggtggagggcgcaagaggcctgtccctgatccagacctgcagcgccgggcagggtcagggacaggggttggggccatgcttgctcggggctctgcttcgccccacaaatcctctccgcagcccttggtggccacacccagccagcatcaccagcagcagcagcagcagatcaaacggtcagcccgcatgtgtggtgagtgtgaggcatgtcggcgcactgaggactgtggtcactgtgatttctgtcgggacatgaagaagttcgggggccccaacaagatccggcagaagtgccggctgcgccagtgccagctgcgggcccgggaatcgtacaagtacttcccttcctcgctctcaccagtgacgccctcagagtccctgccaaggccccgccggccactgcccacccaacagcagccacagccatcacagaagttagggcgcatccgtgaagatgagggggcagtggcgtcatcaacagtcaaggagcctcctgaggctacagccacacctgagccactctcagatgaggacctacctctggatcctgacctgtatcaggacttctgtgcaggggcctttgatgaccatggcctgccctggatgagcgacacagaagagtccccattcctggaccccgcgctgcggaagagggcagtgaaagtgaagcatgtgaagcgtcgggagaagaagtctgagaagaagaaggaggagcgatacaagcggcatcggcagaagcagaagcacaaggataaatggaaacacccagagagggctgatgccaaggaccctgcgtcactgccccagtgcctggggcccggctgtgtgcgccccgcccagcccagctccaagtattgctcagatgactgtggcatgaagctggcagccaaccgcatctacgagatcctcccccagcgcatccatgcaatcgccattactgctgggagaagctgcggcgtgcggaagtggacttggagcgcgtgcgtgtgtggtacaagctggacgagctgtttgagcaggagcgcaatgtgcgcacagccatgacaaaccgcgcgggattgctggccctgatgctgcaccagacgatccagcacgatcccctcactaccgacctgcgctccagtgccgaccgctgagcctcctggcccggaccccttacaccctgcattccagatgggggagccgcccggtgcccgtgtgtccgttcctccactcatctgtttctccggttctccctgtgcccatccaccggttgaccgcccatctgcctttatcagagggactgtccccgtcgacatgttcagtgcctggtggggctgcggagtccactcatccttgcctcctctccctgggttttgttaataaaattttgaagaaaccaag

SEQ ID NO: 426026 - DNA, 2003 bp, Homo sapiens
ggcacgagagatggcggcgcctgaggggtcttgggggctctaggccggccacctactggtttgcagcggagacgacgcatggggcctgcgcaataggagtacgctgcctgggaggcgtgactagaagcggaagtagttgtgggcgcctttgcaaccgcctgggacgccgccgagtggtctgtgcaggttcgcgggtcgctggcgggggtcgtgagggagtgcgccgggagcggagatatggagggagatggttcagacccagagcctccagatgccggggaggacagcaagtccgagaatggggagaatgcgcccatctactgcatctgccgcaaaccggacatcaactgcttcatgatcgggtgtgacaactgcaatgagtggttccatggggactgcatccggatcactgagaagatggccaaggccatccgggagtggtactgtcgggagtgcagagagaaagaccccaagctagagattcgctatcggcacaagaagtcacgggagcgggatggcaatgagcgggacagcagtgagccccgggatgagggtggagggcgcaagaggcctgtccctgatccagacctgcagcgccgggcagggtcagggacaggggttggggccatgcttgctcggggctctgcttcgccccacaaatcctctccgcagcccttggtggccacacccagccagcatcaccagcagcagcagcagcagatcaaacggtcagcccgcatgtgtggtgagtgtgaggcatgtcggcgcactgaggactgtggtcactgtgatttctgtcgggacatgaagaagttcgggggccccaacaagatccggcagaagtgccggctgcgccagtgccagctgcgggcccgggaatcgtacaagtacttcccttcctcgctctcaccagtgacgccctcagagtccctgccaaggccccgccggccactgcccacccaacagcagccacagccatcacagaagttagggcgcatccgtgaagatgagggggcagtggcgtcatcaacagtcaaggagcctcctgaggctacagccacacctgagccactctcagatgaggacctacctctggatcctgacctgtatcaggacttctgtgcaggggcctttgatgaccatggcctgccctggatgagcgacacagaagagtccccattcctggaccccgcgctgcggaagagggcagtgaaagtgaagcatgtgaagcgtcgggagaagaagtctgagaagaagaaggaggagcgatacaagcggcatcggcagaagcagaagcacaaggataaatggaaacacccagagagggctgatgccaaggaccctgcgtcactgccccagtgcctggggcccggctgtgtgcgccccgcccagcccagctccaagtattgctcagatgactgtggcatgaagctggcagccaaccgcatctacgagatcctcccccagcgcatccagcagtggcagcagagcccttgcattgctgaagagcacggcaagaagctgctcgaacgcattcgccgagagcagcagagtgcccgcacccgccttcaggaaatggaacgccgattccatgagcttgaggccatcattctacgtgccaagcagcaggctgtgcgcgaggatgaggagagcaacgagggtgacagtgatgacacagacctgcagatcttctgtgtttcctgtgggcaccccatcaacccacgtgttgccttgcgccacatggagcgctgctacgccaagtatgagagccagacgtcctttgggtccatgtaccccacacgcattgaaggggccacacgactcttctgtgatgtgtataatcctcagactcaaacctctaatcacatggtcagtctgtctggtgaccagccccagctctgagtcatcacaccttctagcataagctcaggtgtgatcccatggcctcacaatacaagacactcctattaccctgaaatgtcaaccactgaaagtctccctca

SEQ ID NO: 426027 - DNA, 2548 bp, Homo sapiens
ggcacgagagatggcggcgcctgaggggtcttgggggctctaggccggccacctactggtttgcagcggagacgacgcatggggcctgcgcaataggagtacgctgcctgggaggcgtgactagaagcggaagtagttgtgggcgcctttgcaaccgcctgggacgccgccgagtggtctgtgcaggttcgcgggtcgctggcgggggtcgtgagggagtgcgccgggagcggagatatggagggagatggttcagacccagagcctccagatgccggggaggacagcaagtccgagaatggggagaatgcgcccatctactgcatctgccgcaaaccggacatcaactgcttcatgatcgggtgtgacaactgcaatgagtggttccatggggactgcatccggatcactgagaagatggccaaggccatccgggagtggtactgtcgggagtgcagagagaaagaccccaagctagagattcgctatcggcacaagaagtcacgggagcgggatggcaatgagcgggacagcagtgagccccgggatgagggtggagggcgcaagaggcctgtccctgatccagacctgcagcgccgggcagggtcagggacaggggttggggccatgcttgctcggggctctgcttcgccccacaaatcctctccgcagcccttggtggccacacccagccaggtgagtggctgcataaagtgaatggatgtgtaaagtggttccgtttcagccctgcctgggtccatgatttctgttctgggccccctcctgcagcatcaccagcagcagcagcagcagatcaaacggtcagcccgcatgtgtggtgagtgtgaggcatgtcggcgcactgaggactgtggtcactgtgatttctgtcgggacatgaagaagttcgggggccccaacaagatccggcagaagtgccggctgcgccagtgccagctgcgggcccgggaatcgtacaagtacttcccttcctcgctctcaccagtgacgccctcagagtccctgccaaggccccgccggccactgcccacccaacagcagccacagccatcacagaagttagggcgcatccgtgaagatgagggggcagtggcgtcatcaacagtcaaggagcctcctgaggctacagccacacctgagccactctcagatgaggacctacctctggatcctgacctgtatcaggacttctgtgcaggggcctttgatgaccatggcctgccctggatgagcgacacagaagagtccccattcctggaccccgcgctgcggaagagggcagtgaaagtgaagcatgtgaagcgtcgggagaagaagtctgagaagaagaaggaggagcgatacaagcggcatcggcagaagcagaagcacaaggataaatggaaacacccagagagggctgatgccaaggaccctgcgtcactgccccagtgcctggggcccggctgtgtgcgccccgcccagcccagctccaagtattgctcagatgactgtggcatgaagctggcagccaaccgcatctacgagatcctcccccagcgcatccagcagtggcagcagagcccttgcattgctgaagagcacggcaagaagctgctcgaacgcattcgccgagagcagcagagtgcccgcacccgccttcaggaaatggaacgccgattccatgagcttgaggccatcattctacgtgccaagcagcaggctgtgcgcgaggatgaggagagcaacgagggtgacagtgatgacacagacctgcagatcttctgtgtttcctgtgggcaccccatcaacccacgtgttgccttgcgccacatggagcgctgctacgccaagtatgagagccagacgtcctttgggtccatgtaccccacacgcattgaaggggccacacgactcttctgtgatgtgtataatcctcagagcaaaacatactgtaagcggctccaggtgctgtgccccgagcactcacgggaccccaaagtgccagctgacgaggtatgcgggtgcccccttgtacgtgatgtctttgagctcacgggtgacttctgccgcctgcccaagcgccagtgcaatcgccattactgctgggagaagctgcggcgtgcggaagtggacttggagcgcgtgcgtgtgtggtacaagctggacgagctgtttgagcaggagcgcaatgtgcgcacagccatgacaaaccgcgcgggattgctggccctgatgctgcaccagacgatccagcacgatcccctcactaccgacctgcgctccagtgccgaccgctgagcctcctggcccggaccccttacaccctgcattccagatgggggagccgcccggtgcccgtgtgtccgttcctccactcatctgtttctccggttctccctgtgcccatccaccggttgaccgcccatctgcctttatcagagggactgtccccgtcgacatgttcagtgcctggtggggctgcggagtccactcatccttgcctcctctccctgggttttgttaataaaattttgaagaaaccaag

SEQ ID NO: 426028 - DNA, 1820 bp, Homo sapiens
ggcacgagagatggcggcgcctgaggggtcttgggggctctaggccggccacctactggtttgcagcggagacgacgcatggggcctgcgcaataggagtacgctgcctgggaggcgtgactagaagcggaagtagttgtgggcgcctttgcaaccgcctgggacgccgccgagtggtctgtgcaggttcgcgggtcgctggcgggggtcgtgagggagtgcgccgggagcggagatatggagggagatggttcagacccagagcctccagatgccggggaggacagcaagtccgagaatggggagaatgcgcccatctactgcatctgccgcaaaccggacatcaactgcttcatgatcgggtgtgacaactgcaatgagtggttccatggggactgcatccggatcactgagaagatggccaaggccatccgggagtggtactgtcgggagtgcagagagaaagaccccaagctagagattcgctatcggcacaagaagtcacgggagcgggatggcaatgagcgggacagcagtgagccccgggatgagggtggagggcgcaagaggcctgtccctgatccagacctgcagcgccgggcagggtcagggacaggggttggggccatgcttgctcggggctctgcttcgccccacaaatcctctccgcagcccttggtggccacacccagccagcatcaccagcagcagcagcagcagatcaaacggtcagcccgcatgtgtggtgagtgtgaggcatgtcggcgcactgaggactgtggtcactgtgatttctgtcgggacatgaagaagttcgggggccccaacaagatccggcagaagtgccggctgcgccagtgccagctgcgggcccgggaatcgtacaagtacttcccttcctcgctctcaccagtgacgccctcagagtccctgccaaggccccgccggccactgcccacccaacagcagccacagccatcacagaagttagggcgcatccgtgaagatgagggggcagtggcgtcatcaacagtcaaggagcctcctgaggctacagccacacctgagccactctcagatgaggacctacctctggatcctgacctgtatcaggacttctgtgcaggggcctttgatgaccatggcctgccctggatgagcgacacagaagagtccccattcctggaccccgcgctgcggaagagggcagtgaaagtgaagcatgtgaagcgtcgggagaagaagtctgagaagaagaaggaggagcgatacaagcggcatcggcagaagcagaagcacaaggataaatggaaacacccagagagggctgatgccaaggaccctgcgtcactgccccagtgcctggggcccggctgtgtgcgccccgcccagcccagctccaagtattgctcagatgactgtggcatgaagctggcagccaaccgcatctacgagatcctcccccagcgcatccagcagtggcagcagagcccttgcattgctgaagagcacggcaagaagctgctcgaacgcattcgccgagagcagcagagtgcccgcacccgccttcaggaaatggaacgccgattccatgagcttgaggccatcattctacgtgccaagcagcaggctgtgcgcgaggatgaggagtcatctgtttctccggttctccctgtgcccatccaccggttgaccgcccatctgcctttatcagagggactgtccccgtcgacatgttcagtgcctggtggggctgcggagtccactcatccttgcctcctctccctgggttttgttaataaaattttgaagaaaccaag

SEQ ID NO: 426029 - DNA, 2219 bp, Homo sapiens
ggcacgagagatggcggcgcctgaggggtcttgggggctctaggccggccacctactggtttgcagcggagacgacgcatggggcctgcgcaataggagtacgctgcctgggaggcgtgactagaagcggaagtagttgtgggcgcctttgcaaccgcctgggacgccgccgagtggtctgtgcaggttcgcgggtcgctggcgggggtcgtgagggagtgcgccgggagcggagatatggagggagatggttcagacccagagcctccagatgccggggaggacagcaagtccgagaatggggagaatgcgcccatctactgcatctgccgcaaaccggacatcaactgcttcatgatcgggtgtgacaactgcaatgagtggttccatggggactgcatccggatcactgagaagatggccaaggccatccgggagtggtactgtcgggagtgcagagcatcaccagcagcagcagcagcagatcaaacggtcagcccgcatgtgtggtgagtgtgaggcatgtcggcgcactgaggactgtggtcactgtgatttctgtcgggacatgaagaagttcgggggccccaacaagatccggcagaagtgccggctgcgccagtgccagctgcgggcccgggaatcgtacaagtacttcccttcctcgctctcaccagtgacgccctcagagtccctgccaaggccccgccggccactgcccacccaacagcagccacagccatcacagaagttagggcgcatccgtgaagatgagggggcagtggcgtcatcaacagtcaaggagcctcctgaggctacagccacacctgagccactctcagatgaggacctacctctggatcctgacctgtatcaggacttctgtgcaggggcctttgatgaccatggcctgccctggatgagcgacacagaagagtccccattcctggaccccgcgctgcggaagagggcagtgaaagtgaagcatgtgaagcgtcgggagaagaagtctgagaagaagaaggaggagcgatacaagcggcatcggcagaagcagaagcacaaggataaatggaaacacccagagagggctgatgccaaggaccctgcgtcactgccccagtgcctggggcccggctgtgtgcgccccgcccagcccagctccaagtattgctcagatgactgtggcatgaagctggcagccaaccgcatctacgagatcctcccccagcgcatccagcagtggcagcagagcccttgcattgctgaagagcacggcaagaagctgctcgaacgcattcgccgagagcagcagagtgcccgcacccgccttcaggaaatggaacgccgattccatgagcttgaggccatcattctacgtgccaagcagcaggctgtgcgcgaggatgaggagagcaacgagggtgacagtgatgacacagacctgcagatcttctgtgtttcctgtgggcaccccatcaacccacgtgttgccttgcgccacatggagcgctgctacgccaagtatgagagccagacgtcctttgggtccatgtaccccacacgcattgaaggggccacacgactcttctgtgatgtgtataatcctcagagcaaaacatactgtaagcggctccaggtgctgtgccccgagcactcacgggaccccaaagtgccagctgacgaggtatgcgggtgcccccttgtacgtgatgtctttgagctcacgggtgacttctgccgcctgcccaagcgccagtgcaatcgccattactgctgggagaagctgcggcgtgcggaagtggacttggagcgcgtgcgtgtgtggtacaagctggacgagctgtttgagcaggagcgcaatgtgcgcacagccatgacaaaccgcgcgggattgctggccctgatgctgcaccagacgatccagcacgatcccctcactaccgacctgcgctccagtgccgaccgctgagcctcctggcccggaccccttacaccctgcattccagatgggggagccgcccggtgcccgtgtgtccgttcctccactcatctgtttctccggttctccctgtgcccatccaccggttgaccgcccatctgcctttatcagagggactgtccccgtcgacatgttcagtgcctggtggggctgcggagtccactcatccttgcctcctctccctgggttttgttaataaaattttgaagaaaccaag

SEQ ID NO: 426030 - DNA, 1999 bp, Homo sapiens
ggcacgagagatggcggcgcctgaggggtcttgggggctctaggccggccacctactggtttgcagcggagacgacgcatggggcctgcgcaataggagtacgctgcctgggaggcgtgactagaagcggaagtagttgtgggcgcctttgcaaccgcctgggacgccgccgagtggtctgtgcaggttcgcgggtcgctggcgggggtcgtgagggagtgcgccgggagcggagatatgcatcaccagcagcagcagcagcagatcaaacggtcagcccgcatgtgtggtgagtgtgaggcatgtcggcgcactgaggactgtggtcactgtgatttctgtcgggacatgaagaagttcgggggccccaacaagatccggcagaagtgccggctgcgccagtgccagctgcgggcccgggaatcgtacaagtacttcccttcctcgctctcaccagtgacgccctcagagtccctgccaaggccccgccggccactgcccacccaacagcagccacagccatcacagaagttagggcgcatccgtgaagatgagggggcagtggcgtcatcaacagtcaaggagcctcctgaggctacagccacacctgagccactctcagatgaggacctacctctggatcctgacctgtatcaggacttctgtgcaggggcctttgatgaccatggcctgccctggatgagcgacacagaagagtccccattcctggaccccgcgctgcggaagagggcagtgaaagtgaagcatgtgaagcgtcgggagaagaagtctgagaagaagaaggaggagcgatacaagcggcatcggcagaagcagaagcacaaggataaatggaaacacccagagagggctgatgccaaggaccctgcgtcactgccccagtgcctggggcccggctgtgtgcgccccgcccagcccagctccaagtattgctcagatgactgtggcatgaagctggcagccaaccgcatctacgagatcctcccccagcgcatccagcagtggcagcagagcccttgcattgctgaagagcacggcaagaagctgctcgaacgcattcgccgagagcagcagagtgcccgcacccgccttcaggaaatggaacgccgattccatgagcttgaggccatcattctacgtgccaagcagcaggctgtgcgcgaggatgaggagagcaacgagggtgacagtgatgacacagacctgcagatcttctgtgtttcctgtgggcaccccatcaacccacgtgttgccttgcgccacatggagcgctgctacgccaagtatgagagccagacgtcctttgggtccatgtaccccacacgcattgaaggggccacacgactcttctgtgatgtgtataatcctcagagcaaaacatactgtaagcggctccaggtgctgtgccccgagcactcacgggaccccaaagtgccagctgacgaggtatgcgggtgcccccttgtacgtgatgtctttgagctcacgggtgacttctgccgcctgcccaagcgccagtgcaatcgccattactgctgggagaagctgcggcgtgcggaagtggacttggagcgcgtgcgtgtgtggtacaagctggacgagctgtttgagcaggagcgcaatgtgcgcacagccatgacaaaccgcgcgggattgctggccctgatgctgcaccagacgatccagcacgatcccctcactaccgacctgcgctccagtgccgaccgctgagcctcctggcccggaccccttacaccctgcattccagatgggggagccgcccggtgcccgtgtgtccgttcctccactcatctgtttctccggttctccctgtgcccatccaccggttgaccgcccatctgcctttatcagagggactgtccccgtcgacatgttcagtgcctggtggggctgcggagtccactcatccttgcctcctctccctgggttttgttaataaaattttgaagaaaccaag

SEQ ID NO: 426031 - DNA, 1854 bp, Homo sapiens
ctccccaaaccgaaaaaaaattcccttacctttcccccaggacaaaaagcccccctttttcgtgggtttggggggcccccaaaacacccagccagcatcaccagcagcagcagcagcagatcaaacggtcagcccgcatgtgtggtgagtgtgaggcatgtcggcgcactgaggactgtggtcactgtgatttctgtcgggacatgaagaagttcgggggccccaacaagatccggcagaagtgccggctgcgccagtgccagctgcgggcccgggaatcgtacaagtacttcccttcctcgctctcaccagtgacgccctcagagtccctgccaaggccccgccggccactgcccacccaacagcagccacagccatcacagaagttagggcgcatccgtgaagatgagggggcagtggcgtcatcaacagtcaaggagcctcctgaggctacagccacacctgagccactctcagatgaggacctacctctggatcctgacctgtatcaggacttctgtgcaggggcctttgatgaccatggcctgccctggatgagcgacacagaagagtccccattcctggaccccgcgctgcggaagagggcagtgaaagtgaagcatgtgaagcgtcgggagaagaagtctgagaagaagaaggaggagcgatacaagcggcatcggcagaagcagaagcacaaggataaatggaaacacccagagagggctgatgccaaggaccctgcgtcactgccccagtgcctggggcccggctgtgtgcgccccgcccagcccagctccaagtattgctcagatgactgtggcatgaagctggcagccaaccgcatctacgagatcctcccccagcgcatccagcagtggcagcagagcccttgcattgctgaagagcacggcaagaagctgctcgaacgcattcgccgagagcagcagagtgcccgcacccgccttcaggaaatggaacgccgattccatgagcttgaggccatcattctacgtgccaagcagcaggctgtgcgcgaggatgaggagagcaacgagggtgacagtgatgacacagacctgcagatcttctgtgtttcctgtgggcaccccatcaacccacgtgttgccttgcgccacatggagcgctgctacgccaagtatgagagccagacgtcctttgggtccatgtaccccacacgcattgaaggggccacacgactcttctgtgatgtgtataatcctcagagcaaaacatactgtaagcggctccaggtgctgtgccccgagcactcacgggaccccaaagtgccagctgacgaggtatgcgggtgcccccttgtacgtgatgtctttgagctcacgggtgacttctgccgcctgcccaagcgccagtgcaatcgccattactgctgggagaagctgcggcgtgcggaagtggacttggagcgcgtgcgtgtgtggtacaagctggacgagctgtttgagcaggagcgcaatgtgcgcacagccatgacaaaccgcgcgggattgctggccctgatgctgcaccagacgatccagcacgatcccctcactaccgacctgcgctccagtgccgaccgctgagcctcctggcccggaccccttacaccctgcattccagatgggggagccgcccggtgcccgtgtgtccgttcctccactcatctgtttctccggttctccctgtgcccatccaccggttgaccgcccatctgcctttatcagagggactgtccccgtcgacatgttcagtgcctggtggggctgcggagtccactcatccttgcctcctctccctgggttttgttaataaaattttgaagaaaccaag

SEQ ID NO: 426032 - DNA, 1767 bp, Homo sapiens
tagcggggaggtgtgtctggggaggtaaggccaggccaggtgggtagggctagggcaaggccgccctccatccacctggggctgacctgggccttcctcctgccggcacaggaatcgtacaagtacttcccttcctcggtgagtccagccccccagggtggggtggggcatgcgggcagggcggtcagggccagtcctgagattctgccctgcagctctcaccagtgacgccctcagagtccctgccaaggccccgccggccactgcccacccaacagcagccacagccatcacagaagttagggcgcatccgtgaagatgagggggcagtggcgtcatcaacagtcaaggagcctcctgaggctacagccacacctgagccactctcagatgaggacctacctctggatcctgacctgtatcaggacttctgtgcaggggcctttgatgaccatggcctgccctggatgagcgacacagaagagtccccattcctggaccccgcgctgcggaagagggcagtgaaagtgaagcatgtgaagcgtcgggagaagaagtctgagaagaagaaggaggagcgatacaagcggcatcggcagaagcagaagcacaaggataaatggaaacacccagagagggctgatgccaaggaccctgcgtcactgccccagtgcctggggcccggctgtgtgcgccccgcccagcccagctccaagtattgctcagatgactgtggcatgaagctggcagccaaccgcatctacgagatcctcccccagcgcatccagcagtggcagcagagcccttgcattgctgaagagcacggcaagaagctgctcgaacgcattcgccgagagcagcagagtgcccgcacccgccttcaggaaatggaacgccgattccatgagcttgaggccatcattctacgtgccaagcagcaggctgtgcgcgaggatgaggagagcaacgagggtgacagtgatgacacagacctgcagatcttctgtgtttcctgtgggcaccccatcaacccacgtgttgccttgcgccacatggagcgctgctacgccaagtatgagagccagacgtcctttgggtccatgtaccccacacgcattgaaggggccacacgactcttctgtgatgtgtataatcctcagagcaaaacatactgtaagcggctccaggtgctgtgccccgagcactcacgggaccccaaagtgccagctgacgaggtatgcgggtgcccccttgtacgtgatgtctttgagctcacgggtgacttctgccgcctgcccaagcgccagtgcaatcgccattactgctgggagaagctgcggcgtgcggaagtggacttggagcgcgtgcgtgtgtggtacaagctggacgagctgtttgagcaggagcgcaatgtgcgcacagccatgacaaaccgcgcgggattgctggccctgatgctgcaccagacgatccagcacgatcccctcactaccgacctgcgctccagtgccgaccgctgagcctcctggcccggaccccttacaccctgcattccagatgggggagccgcccggtgcccgtgtgtccgttcctccactcatctgtttctccggttctccctgtgcccatccaccggttgaccgcccatctgcctttatcagagggactgtccccgtcgacatgttcagtgcctggtggggctgcggagtccactcatccttgcctcctctccctgggttttgttaataaaattttgaagaaaccaag

SEQ ID NO: 426033 - DNA, 1347 bp, Homo sapiens
taagaccgagcgaggagggaaatgggaggagggagaagatacaggaggaggaaggagacagagatgagagaagagggagatggagaggaggagggagatgggaggagggagaagatacaggaggaggaaggagctggggaggaagggagaaggaggagcgatacaagcggcatcggcagaagcagaagcacaaggataaatggaaacacccagagagggctgatgccaaggaccctgcgtcactgccccagtgcctggggcccggctgtgtgcgccccgcccagcccagctccaagtattgctcagatgactgtggcatgaagctggcagccaaccgcatctacgagatcctcccccagcgcatccagcagtggcagcagagcccttgcattgctgaagagcacggcaagaagctgctcgaacgcattcgccgagagcagcagagtgcccgcacccgccttcaggaaatggaacgccgattccatgagcttgaggccatcattctacgtgccaagcagcaggctgtgcgcgaggatgaggagagcaacgagggtgacagtgatgacacagacctgcagatcttctgtgtttcctgtgggcaccccatcaacccacgtgttgccttgcgccacatggagcgctgctacgccaagtatgagagccagacgtcctttgggtccatgtaccccacacgcattgaaggggccacacgactcttctgtgatgtgtataatcctcagagcaaaacatactgtaagcggctccaggtgctgtgccccgagcactcacgggaccccaaagtgccagctgacgaggtatgcgggtgcccccttgtacgtgatgtctttgagctcacgggtgacttctgccgcctgcccaagcgccagtgcaatcgccattactgctgggagaagctgcggcgtgcggaagtggacttggagcgcgtgcgtgtgtggtacaagctggacgagctgtttgagcaggagcgcaatgtgcgcacagccatgacaaaccgcgcgggattgctggccctgatgctgcaccagacgatccagcacgatcccctcactaccgacctgcgctccagtgccgaccgctgagcctcctggcccggaccccttacaccctgcattccagatgggggagccgcccggtgcccgtgtgtccgttcctccactcatctgtttctccggttctccctgtgcccatccaccggttgaccgcccatctgcctttatcagagggactgtccccgtcgacatgttcagtgcctggtggggctgcggagtccactcatccttgcctcctctccctgggttttgttaataaaattttgaagaaaccaag

SEQ ID NO: 426034 - DNA, 1179 bp, Homo sapiens
ggcacgagagatggcggcgcctgaggggtcttgggggctctaggccggccacctactggtttgcagcggagacgacgcatggggcctgcgcaataggagtacgctgcctgggaggcgtgactagaagcggaagtagttgtgggcgcctttgcaaccgcctgggacgccgccgagtggtctgtgcaggttcgcgggtcgctggcgggggtcgtgagggagtgcgccgggagcggagatatggagggagatggttcagacccagagcctccagatgccggggaggacagcaagtccgagaatggggagaatgcgcccatctactgcatctgccgcaaaccggacatcaactgcttcatgatcgggtgtgacaactgcaatgagtggttccatggggactgcatccggatcactgagaagatggccaaggccatccgggagtggtactgtcgggagtgcagagagaaagaccccaagctagagattcgctatcggcacaagaagtcacgggagcgggatggcaatgagcgggacagcagtgagccccgggatgagggtggagggcgcaagaggcctgtccctgatccagacctgcagcgccgggcagggtcagggacaggggttggggccatgcttgctcggggctctgcttcgccccacaaatcctctccgcagcccttggtggccacacccagccagcatcaccagcagcagcagcagcagatcaaacggtcagcccgcatgtgtggtgagtgtgaggcatgtcggcgcactgaggactgtggtcactgtgatttctgtcgggacatgaagaagttcgggggccccaacaagatccggcagaagtgccggctgcgccagtgccagctgcgggcccgggaatcgtacaagtacttcccttcctcgctctcaccagtgacgccctcagagtccctgccaaggccccgccggccactgcccacccaacagcagccacagccatcacagaagttagggcgcatccgtgaagatgagggggcagtggcgtcatcaacagtcaaggagcctcctgaggctacagccacacctgagccactctcagatgaggacctacctctggatcctgacctgtatcaggacttctgtgcaggggcctttgatgaccatggcctggtgagcagacaggagcatccactggtggaa

SEQ ID NO: 426035 - DNA, 1111 bp, Homo sapiens
  misc_feature (75)..(75): n is a, c, g, or t
agaagatgaagtagagcccttacacgatggagttaaaaaggcagagaaaaagatgaagaagaaggtgtgagtgtnagtgaaatggagagcaccaccaatacatgtattggtggtgctcgccatcattctacgtgccaagcagcaggctgtgcgcgaggatgaggagagcaacgagggtgacagtgatgacacagacctgcagatcttctgtgtttcctgtgggcaccccatcaacccacgtgttgccttgcgccacatggagcgctgctacgccaaggttggggtgtcagactgagggggcggaccatgtgggaacatcagtgggccagtgggggacagatttgttgtctgggtggtgtcttgggagggcatgcagcgcacatccacagttccctccatttgtgctcatccctccagtatgagagccagacgtcctttgggtccatgtaccccacacgcattgaaggggccacacgactcttctgtgatgtgtataatcctcagagcaaaacatactgtaagcggctccaggtgctgtgccccgagcactcacgggaccccaaagtgccagctgacgaggtatgcgggtgcccccttgtacgtgatgtctttgagctcacgggtgacttctgccgcctgcccaagcgccagtgcaatcgccattactgctgggagaagctgcggcgtgcggaagtggacttggagcgcgtgcgtgtgtggtacaagctggacgagctgtttgagcaggagcgcaatgtgcgcacagccatgacaaaccgcgcgggattgctggccctgatgctgcaccagacgatccagcacgatcccctcactaccgacctgcgctccagtgccgaccgctgagcctcctggcccggaccccttacaccctgcattccagatgggggagccgcccggtgcccgtgtgtccgttcctccactcatctgtttctccggttctccctgtgcccatccaccggttgaccgcccatctgcctttatcagagggactgtccccgtcgacatgttcagtgcctggtggggctgcggagtccactcatccttgcctcctctccctgggttttgttaataaaattttgaagaaaccaag

SEQ ID NO: 426036 - DNA, 713 bp, Homo sapiens
gggcaaccagccaggacagatggacctcccttccctccctctactgccctctctactccaaatccccagggccacacgactcttctgtgatgtgtataatcctcagagcaaaacatactgtaagcggctccaggtgctgtgccccgagcactcacgggaccccaaagtgccagctgacgaggtatgcgggtgcccccttgtacgtgatgtctttgagctcacgggtgacttctgccgcctgcccaagcgccagtgcaatcgccattactgctgggagaagctgcggcgtgcggaagtggacttggagcgcgtgcgtgtgtggtacaagctggacgagctgtttgagcaggagcgcaatgtgcgcacagccatgacaaaccgcgcgggattgctggccctgatgctgcaccagacgatccagcacgatcccctcactaccgacctgcgctccagtgccgaccgctgagcctcctggcccggaccccttacaccctgcattccagatgggggagccgcccggtgcccgtgtgtccgttcctccactcatctgtttctccggttctccctgtgcccatccaccggttgaccgcccatctgcctttatcagagggactgtccccgtcgacatgttcagtgcctggtggggctgcggagtccactcatccttgcctcctctccctgggttttgttaataaaattttgaagaaaccaag

SEQ ID NO: 426037 - DNA, 394 bp, Homo sapiens
accattccgccagtcacctatttacttctccttttgccatttgcgtctattttgccattctcacttactgatcacctcactcattctgttgcttgctaccttccctgcagccgcatctacgagatcctcccccagcgcatccagcagtggcagcagagcccttgcattgctgaagagcacggcaagaagctgctcgaacgcattcgccgagagcagcagagtgcccgcacccgccttcaggaaatggaacgccgattccatgagcttgaggccatcattctacgtgccaagcagcaggctgtgcgcgaggatgaggaggagcaagcaggggcgcagcagagcagggcctgtactttgtccttcccagccttattgttccttccattccatgcag

SEQ ID NO: 426038 - DNA, 2190 bp, Homo sapiens
  misc_feature (957)..(957): n is a, c, g, or t
  misc_feature (1196)..(1196): n is a, c, g, or t
  misc_feature (1239)..(1239): n is a, c, g, or t
gagctcacggtcgtcaggggtcctcaaggattcagagaacccccaaatgtcagggctgctcccttcttgtcctgcctctctgctcacacccttggacaggaggaagcacacgggaggcactcagagaacgtttgtggaatgaataaataaaagcatattttgagggaataaagaagcagaaaaacaaagaagaatctggggaagatgggcataaatctccaccaagtgctgccaaggcttcccaggcgaggctgctgaaaagaccctgtggaggtagagggacaatttgtcatggatgggaatgggcttgagggccgggaagcagggcatgatggggcctcattcatcattttcccgttatcccagcggcgtgcaggggagcaggtacagcacctgccaagtgagtgaccagagggggactgggaatggaaaggacctcaaggaaggacaagctgagctctgggaggccacctcctccaggaagccttccctgattcatccttcacaggcagtctcaatttgcagtcagatatccactgctctgattcttagatcggcaagtatctccctacccagactgcaggctctgctggggccgcggctgtttctgacttgtgcacaatggcatccctgtacctagcacaggactgagtccagagaaagtgctcagtgatgcttgttggccttgtctctcctctgtgggcagcactggacagggcacccggcgggtcctgagggtgtggacatcccacggcagagcctgcggttgatcccgaccatgaaccaaggcctggggcgggggtggccacatcaggccacttctgccaggagagatgtggctgtgagctgggggtctggcctgtccccggaggcattccttgggtttgcatccatcagaagatccactggttgcctctatttgggcctggagcagggatgggatttttccaaggtacntggggtctaggggagacccaggcccattattagggtcggtcttgagaaggcagagatcaggccaccactttatttggtgtagctcctcgctccattggtgtgtgctgagtgaatgaatgcatcagggactcctgcttcctgcccagagccccctccgcaccccacacagccttgctccaaggagaaggggtcagagccaactggacagtgctacagcatggggagcctcgaccaggctnggccctcgacgatgggataggcagacagccccctgtgcaaggnagctagcttgcagggtcccgagaggccaaaggccctggtctttcctggggcaagaggctgctgagaaggtgcacagagcctgggtgcaggaaaccatccagaatgctgcttcccgccatctgtgagatcttcgttttctctaacactcaaaaatagatgtttctgttatgctctctcgttggcaggggagcggcaggacctgccaaggcctgggggagcccgccagcctgctgagttctactgtacaaacagttggggagggggcgctgtctctgttaacttgaaattccccgatcagtaaacatgccaatttaaagtgtaattaactcaggccggaaaaaattcagatttggactgcttttcacagttgagcggctgctctgcctgggataaacacatttcaagagtctcagtccccgctttgccaccatctcctcctctgatctcctttcctgcttcaaaagactccagaatcttctcggttctcagagaaggctgaatccacctatgacctagtgggagcaccctgtgccgaaactgtttaccttctggtccccggagccatgggtcacgacctgggcctcatgtaggcccgctcctcagcagaccccaatctgcggcttctcccacctcactggggaagaaggagagccctggggatgtggagaagccaccccccaccccgccacatcccccacatcttacagaatctcgattgaatccccgggggcacatccctcagcaggacagcaacagtctttgccgcggcctggggagggctgtgctggggatgagcgccgagtggccgtggactaagtgaaggaaatgaccatgctcttctcccagctggatggcgaggccgggcaggaaccgcggaattcctgctcttcgttttcaaacactttgctgtcaagctatttgaataataaatacacattataaaaatgtaaa

SEQ ID NO: 426039 - DNA, 2520 bp, Homo sapiens
  misc_feature (957)..(957): n is a, c, g, or t
  misc_feature (1196)..(1196): n is a, c, g, or t
  misc_feature (1239)..(1239): n is a, c, g, or t
gagctcacggtcgtcaggggtcctcaaggattcagagaacccccaaatgtcagggctgctcccttcttgtcctgcctctctgctcacacccttggacaggaggaagcacacgggaggcactcagagaacgtttgtggaatgaataaataaaagcatattttgagggaataaagaagcagaaaaacaaagaagaatctggggaagatgggcataaatctccaccaagtgctgccaaggcttcccaggcgaggctgctgaaaagaccctgtggaggtagagggacaatttgtcatggatgggaatgggcttgagggccgggaagcagggcatgatggggcctcattcatcattttcccgttatcccagcggcgtgcaggggagcaggtacagcacctgccaagtgagtgaccagagggggactgggaatggaaaggacctcaaggaaggacaagctgagctctgggaggccacctcctccaggaagccttccctgattcatccttcacaggcagtctcaatttgcagtcagatatccactgctctgattcttagatcggcaagtatctccctacccagactgcaggctctgctggggccgcggctgtttctgacttgtgcacaatggcatccctgtacctagcacaggactgagtccagagaaagtgctcagtgatgcttgttggccttgtctctcctctgtgggcagcactggacagggcacccggcgggtcctgagggtgtggacatcccacggcagagcctgcggttgatcccgaccatgaaccaaggcctggggcgggggtggccacatcaggccacttctgccaggagagatgtggctgtgagctgggggtctggcctgtccccggaggcattccttgggtttgcatccatcagaagatccactggttgcctctatttgggcctggagcagggatgggatttttccaaggtacntggggtctaggggagacccaggcccattattagggtcggtcttgagaaggcagagatcaggccaccactttatttggtgtagctcctcgctccattggtgtgtgctgagtgaatgaatgcatcagggactcctgcttcctgcccagagccccctccgcaccccacacagccttgctccaaggagaaggggtcagagccaactggacagtgctacagcatggggagcctcgaccaggctnggccctcgacgatgggataggcagacagccccctgtgcaaggnagctagcttgcagggtcccgagaggccaaaggccctggtctttcctggggcaagaggctgctgagaaggtgcacagagcctgggtgcaggaaaccatccagaatgctgcttcccgccatctgtgagatcttcgttttctctaacactcaaaaatagatgtttctgttatgctctctcgttggcaggggagcggcaggacctgccaaggcctgggggagcccgccagcctgctgagttctactgtacaaacagttggggagggggcgctgtctctgttaacttgaaattccccgatcagtaaacatgccaatttaaagtgtaattaactcaggccggaaaaaattcagatttggactgcttttcacagttgaggttgtttttcttttatttatttatctctttccgggtgtggtggtatctgtggctggttttagccaggaaaaatagaagggggaccgggtggggagggggctggttgggagaggaaaggctggaaggaaaggaagagaaacgggcgggtggcctgacacccagcagccaggtgtctataggttttctgtcctgggagggggctgtcagggtgatgcccgcctgcagagagggggtcattctgcgaggttgggctgcagacccctgtgccagcgggcctggtgattcggaaatgatggggcactgtggagagaccccaggaaaacacccagtgctgcttttgacattctctctccatctcccctttcagcggctgctctgcctgggataaacacatttcaagagtctcagtccccgctttgccaccatctcctcctctgatctcctttcctgcttcaaaagactccagaatcttctcggttctcagagaaggctgaatccacctatgacctagtgggagcaccctgtgccgaaactgtttaccttctggtccccggagccatgggtcacgacctgggcctcatgtaggcccgctcctcagcagaccccaatctgcggcttctcccacctcactggggaagaaggagagccctggggatgtggagaagccaccccccaccccgccacatcccccacatcttacagaatctcgattgaatccccgggggcacatccctcagcaggacagcaacagtctttgccgcggcctggggagggctgtgctggggatgagcgccgagtggccgtggactaagtgaaggagggatgagcataaggagggatgagcataaggggggatgagcataaggagggatgagcataaggagggatgagcataaggatggagtaccg

SEQ ID NO: 426040 - DNA, 2557 bp, Homo sapiens
  misc_feature (957)..(957): n is a, c, g, or t
  misc_feature (1196)..(1196): n is a, c, g, or t
  misc_feature (1239)..(1239): n is a, c, g, or t
gagctcacggtcgtcaggggtcctcaaggattcagagaacccccaaatgtcagggctgctcccttcttgtcctgcctctctgctcacacccttggacaggaggaagcacacgggaggcactcagagaacgtttgtggaatgaataaataaaagcatattttgagggaataaagaagcagaaaaacaaagaagaatctggggaagatgggcataaatctccaccaagtgctgccaaggcttcccaggcgaggctgctgaaaagaccctgtggaggtagagggacaatttgtcatggatgggaatgggcttgagggccgggaagcagggcatgatggggcctcattcatcattttcccgttatcccagcggcgtgcaggggagcaggtacagcacctgccaagtgagtgaccagagggggactgggaatggaaaggacctcaaggaaggacaagctgagctctgggaggccacctcctccaggaagccttccctgattcatccttcacaggcagtctcaatttgcagtcagatatccactgctctgattcttagatcggcaagtatctccctacccagactgcaggctctgctggggccgcggctgtttctgacttgtgcacaatggcatccctgtacctagcacaggactgagtccagagaaagtgctcagtgatgcttgttggccttgtctctcctctgtgggcagcactggacagggcacccggcgggtcctgagggtgtggacatcccacggcagagcctgcggttgatcccgaccatgaaccaaggcctggggcgggggtggccacatcaggccacttctgccaggagagatgtggctgtgagctgggggtctggcctgtccccggaggcattccttgggtttgcatccatcagaagatccactggttgcctctatttgggcctggagcagggatgggatttttccaaggtacntggggtctaggggagacccaggcccattattagggtcggtcttgagaaggcagagatcaggccaccactttatttggtgtagctcctcgctccattggtgtgtgctgagtgaatgaatgcatcagggactcctgcttcctgcccagagccccctccgcaccccacacagccttgctccaaggagaaggggtcagagccaactggacagtgctacagcatggggagcctcgaccaggctnggccctcgacgatgggataggcagacagccccctgtgcaaggnagctagcttgcagggtcccgagaggccaaaggccctggtctttcctggggcaagaggctgctgagaaggtgcacagagcctgggtgcaggaaaccatccagaatgctgcttcccgccatctgtgagatcttcgttttctctaacactcaaaaatagatgtttctgttatgctctctcgttggcaggggagcggcaggacctgccaaggcctgggggagcccgccagcctgctgagttctactgtacaaacagttggggagggggcgctgtctctgttaacttgaaattccccgatcagtaaacatgccaatttaaagtgtaattaactcaggccggaaaaaattcagatttggactgcttttcacagttgaggttgtttttcttttatttatttatctctttccgggtgtggtggtatctgtggctggttttagccaggaaaaatagaagggggaccgggtggggagggggctggttgggagaggaaaggctggaaggaaaggaagagaaacgggcgggtggcctgacacccagcagccaggtgtctataggttttctgtcctgggagggggctgtcagggtgatgcccgcctgcagagagggggtcattctgcgaggttgggctgcagacccctgtgccagcgggcctggtgattcggaaatgatggggcactgtggagagaccccaggaaaacacccagtgctgcttttgacattctctctccatctcccctttcagcggctgctctgcctgggataaacacatttcaagagtctcagtccccgctttgccaccatctcctcctctgatctcctttcctgcttcaaaagactccagaatcttctcggttctcagagaaggctgaatccacctatgacctagtgggagcaccctgtgccgaaactgtttaccttctggtccccggagccatgggtcacgacctgggcctcatgtaggcccgctcctcagcagaccccaatctgcggcttctcccacctcactggggaagaaggagagccctggggatgtggagaagccaccccccaccccgccacatcccccacatcttacagaatctcgattgaatccccgggggcacatccctcagcaggacagcaacagtctttgccgcggcctggggagggctgtgctggggatgagcgccgagtggccgtggactaagtgaaggaaatgaccatgctcttctcccagctggatggcgaggccgggcaggaaccgcggaattcctgctcttcgttttcaaacactttgctgtcaagctatttgaataataaatacacattataaaaatgtaaa

SEQ ID NO: 426041 - DNA, 4049 bp, Homo sapiens
cttgcaatccaggctttccttggaagtggctgtaacatgtatgaaaagaaagaaaggaggaccaagagatgaaagagggctgcacgcgtgggggcccgagtggtgggcggggacagtcgtcttgttacaggggtgctggccttccctggcgcctgcccctgtcggccccgcccgagaacctccctgcgccagggcagggtttactcatcccggcgaggtgatcccatgcgcgagggcgggcgcaagggcggccagagaacccagcaatccgagtatgcggcatcagcccttcccaccaggcacttccttccttttcccgaacgtccagggagggagggccgggcacttataaactcgagccctggccgatccgcatgtcagaggctgcctcgcaggggctgcgcgcagcggcaagaagtgtctgggctgggacggacaggagaggctgtcgccatcggcgtcctgtgcccctctgctccggcacggccctgtcgcagtgcccgcgctttccccggcgcctgcacgcggcgcgcctgggtaacatgcttggggtcctggtccttggcgcgctggccctggccggcctggggttccccgcacccgcagagccgcagccgggtggcagccagtgcgtcgagcacgactgcttcgcgctctacccgggccccgcgaccttcctcaatgccagtcagatctgcgacggactgcggggccacctaatgacagtgcgctcctcggtggctgccgatgtcatttccttgctactgaacggcgacggcggcgttggccgccggcgcctctggatcggcctgcagctgccacccggctgcggcgaccccaagcgcctcgggcccctgcgcggcttccagtgggttacgggagacaacaacaccagctatagcaggtgggcacggctcgacctcaatggggctcccctctgcggcccgttgtgcgtcgctgtctccgctgctgaggccactgtgcccagcgagccgatctgggaggagcagcagtgcgaagtgaaggccgatggcttcctctgcgagttccacttcccagccacctgcaggccactggctgtggagcccggcgccgcggctgccgccgtctcgatcacctacggcaccccgttcgcggcccgcggagcggacttccaggcgctgccggtgggcagctccgccgcggtggctcccctcggcttacagctaatgtgcaccgcgccgcccggagcggtccaggggcactgggccagggaggcgccgggcgcttgggactgcagcgtggagaacggcggctgcgagcacgcgtgcaatgcgatccctggggctccccgctgccagtgcccagccggcgccgccctgcaggcagacgggcgctcctgcaccgcatccgcgacgcagtcctgcaacgacctctgcgagcacttctgcgttcccaaccccgaccagccgggctcctactcgtgcatgtgcgagaccggctaccggctggcggccgaccaacaccggtgcgaggacgtggatgactgcatactggagcccagtccgtgtccgcagcgctgtgtcaacacacagggtggcttcgagtgccactgctaccctaactacgacctggtggacggcgagtgtgtggagcccgtggacccgtgcttcagagccaactgcgagtaccagtgccagcccctgaaccaaactagctacctctgcgtctgcgccgagggcttcgcgcccattccccacgagccgcacaggtgccagatgttttgcaaccagactgcctgtccagccgactgcgaccccaacacccaggctagctgtgagtgccctgaaggctacatcctggacgacggtttcatctgcacggacatcgacgagtgcgaaaacggcggcttctgctccggggtgtgccacaacctccccggtaccttcgagtgcatctgcgggcccgactcggcccttgcccgccacattggcaccgactgtgactccggcaaggtggacggtggcgacagcggctctggcgagcccccgcccagcccgacgcccggctccaccttgactcctccggccgtggggctcgtgcattcgggcttgctcataggcatctccatcgcgagcctgtgcctggtggtggcgcttttggcgctcctctgccacctgcgcaagaagcagggcgccgccagggccaagatggagtacaagtgcgcggccccttccaaggaggtagtgctgcagcacgtgcggaccgagcggacgccgcagagactctgagcggcctccgtccaggagcctggctccgtccaggagcctgtgcctcctcacccccagctttgctaccaaagcaccttagctggcattacagctggagaagaccctccccgcaccccccaagctgttttcttctattccatggctaactggcgagggggtgattagagggaggagaatgagcctcggcctcttccgtgacgtcactggaccactgggcaatgatggcaattttgtaacgaagacacagactgcgatttgtcccaggtcctcactaccgggcgcaggagggtgagcgttattggtcggcagccttctgggcagaccttgacctcgtgggctagggatgactaaaatatttattttttttaagtatttaggtttttgtttgtttcctttgttcttacctgtatgtctccagtatccactttgcacagctctccggtctctctctctctacaaactcccacttgtcatgtgacaggtaaactatcttggtgaatttttttttcctagccctctcacatttatgaagcaagccccacttattccccattcttcctagttttctcctcccaggaactgggccaactcacctgagtcaccctacctgtgcctgaccctacttcttttgctcttagctgtctgctcagacagaacccctacatgaaacagaaacaaaaacactaaaaataaaaatggccatttgctttttcaccagatttgctaatttatcctgaaatttcagattcccagagcaaaataattttaaacaaaggttgagatgtaaaaggtattaaattgatgttgctggactgtcatagaaattacacccaaagaggtatttatctttacttttaaacagtgagcctgaattttgttgctgttttgatttgtactgaaaaatggtaattgttgctaatcttcttatgcaatttccttttttgttattattacttatttttgacagtgttgaaaatgttcagaaggttgctctagattgagagaagagacaaacacctcccaggagacagttcaagaaagcttcaaactgcatgattcatgccaattagcaattgactgtcactgttccttgtcactggtagaccaaaataaaaccagctctactggtcttgtggaattgggagcttgggaatggatcctggaggatgcccaattagggcctagccttaatcaggtcctcagagaatttctaccatttcagagaggccttttggaatgtggcccctgaacaagaattggaagctgccctgcccatgggagctggttagaaatgcagaatcctaggctccaccccatccagttcatgagaatctatatttaacaagatctgcagggggtgtgtctgctcagtaatttgaggacaaccattccagactgcttccaattttctggaatacatgaaatatagatcagttataagtagcaggccaagtcaggcccttattttcaagaaactgaggaattttctttgtgtagctttgctctttggtagaaaaggctaggtacacagctctagacactgccacacagggtctgcaaggtctttggttcagctaagctaggaatgaaatcctgcttcagtgtatggaaataaatgtatcatagaaatgtaacttttgtaagacaaaggttttcctcttctattttgtaaactcaaaatatttgtacatagttatttatttattggagataatctagaacacaggcaaaatccttgcttatgacatcacttgtacaaaataaacaaataacaatgtg

SEQ ID NO: 426042 - DNA, 4188 bp, Homo sapiens
cttgcaatccaggctttccttggaagtggctgtaacatgtatgaaaagaaagaaaggaggaccaagagatgaaagagggctgcacgcgtgggggcccgagtggtgggcggggacagtcgtcttgttacaggggtgctggccttccctggcgcctgcccctgtcggccccgcccgagaacctccctgcgccagggcagggtttactcatcccggcgaggtgatcccatgcgcgagggcgggcgcaagggcggccagagaacccagcaatccgagtatgcggcatcagcccttcccaccaggcacttccttccttttcccgaacgtccagggagggagggccgggcacttataaactcgagccctggccgatccgcatgtcagaggctgcctcgcaggggctgcgcgcagcggcaagaagtgtctgggctgggacggacaggagaggctgtcgccatcggcgtcctgtgcccctctgctccggcacggccctgtcgcagtgcccgcgctttccccggcgcctgcacgcggcgcgcctgggtaacatgcttggggtcctggtccttggcgcgctggccctggccggcctggggttccccgcacccgcagagccgcagccgggtggcagccagtgcgtcgagcacgactgcttcgcgctctacccgggccccgcgaccttcctcaatgccagtcagatctgcgacggactgcggggccacctaatgacagtgcgctcctcggtggctgccgatgtcatttccttgctactgaacggcgacggcggcgttggccgccggcgcctctggatcggcctgcagctgccacccggctgcggcgaccccaagcgcctcgggcccctgcgcggcttccagtgggttacgggagacaacaacaccagctatagcaggtgggcacggctcgacctcaatggggctcccctctgcggcccgttgtgcgtcgctgtctccgctgctgaggccactgtgcccagcgagccgatctgggaggagcagcagtgcgaagtgaaggccgatggcttcctctgcgagttccacttcccagccacctgcaggccactggctgtggagcccggcgccgcggctgccgccgtctcgatcacctacggcaccccgttcgcggcccgcggagcggacttccaggcgctgccggtgggcagctccgccgcggtggctcccctcggcttacagctaatgtgcaccgcgccgcccggagcggtccaggggcactgggccagggaggcgccgggcgcttgggactgcagcgtggagaacggcggctgcgagcacgcgtgcaatgcgatccctggggctccccgctgccagtgcccagccggcgccgccctgcaggcagacgggcgctcctgcaccgcatccgcgacgcagtcctgcaacgacctctgcgagcacttctgcgttcccaaccccgaccagccgggctcctactcgtgcatgtgcgagaccggctaccggctggcggccgaccaacaccggtgcgaggacgtggatgactgcatactggagcccagtccgtgtccgcagcgctgtgtcaacacacagggtggcttcgagtgccactgctaccctaactacgacctggtggacggcgagtgtgtggagcccgtggacccgtgcttcagagccaactgcgagtaccagtgccagcccctgaaccaaactagctacctctgcgtctgcgccgagggcttcgcgcccattccccacgagccgcacaggtgccagatgttttgcaaccagactgcctgtccagccgactgcgaccccaacacccaggctagctgtgagtgccctgaaggctacatcctggacgacggtttcatctgcacggacatcgacgagtgcgaaaacggcggcttctgctccggggtgtgccacaacctccccggtaccttcgagtgcatctgcgggcccgactcggcccttgcccgccacattggcaccgactgtgactccggcaaggtggacggtggcgacagcggctctggcgagcccccgcccagcccgacgcccggctccaccttgactcctccggccgtggggctcgtgcattcgggcttgctcataggcatctccatcgcgagcctgtgcctggtggtggcgcttttggcgctcctctgccacctgcgcaagaagcagggcgccgccagggccaagatggagtacaagtgcgcggccccttccaaggaggtagtgctgcagcacgtgcggaccgagcggacgccgcagagactctgagcggcctccgtccaggagcctggctccgtccaggagcctgtgcctcctcacccccagctttgctaccaaagcaccttagctggcattacagctggagaagaccctccccgcaccccccaagctgttttcttctattccatggctaactggcgagggggtgattagagggaggagaatgagcctcggcctcttccgtgacgtcactggaccactgggcaatgatggcaattttgtaacgaagacacagactgcgatttgtcccaggtcctcactaccgggcgcaggagggtgagcgttattggtcggcagccttctgggcagaccttgacctcgtgggctagggatgactaaaatatttattttttttaagtatttaggtttttgtttgtttcctttgttcttacctgtatgtctccagtatccactttgcacagctctccggtctctctctctctacaaactcccacttgtcatgtgacaggtaaactatcttggtgaatttttttttcctagccctctcacatttatgaagcaagccccacttattccccattcttcctagttttctcctcccaggaactgggccaactcacctgagtcaccctacctgtgcctgaccctacttcttttgctcttagctgtctgctcagacagaacccctacatgaaacagaaacaaaaacactaaaaataaaaatggccatttgctttttcaccagatttgctaatttatcctgaaatttcagattcccagagcaaaataattttaaacaaaggttgagatgtaaaaggtattaaattgatgttgctggactgtcatagaaattacacccaaagaggtatttatctttacttttaaacagtgagcctgaattttgttgctgttttgatttgtactgaaaaatggtaattgttgctaatcttcttatgcaatttccttttttgttattattacttatttttgacagtgttgaaaatgttcagaaggttgctctagattgagagaagagacaaacacctcccaggagacagttcaagaaagcttcaaactgcatgattcatgccaattagcaattgactgtcactgttccttgtcactggtagaccaaaataaaaccagctctactggtcttgtggaattgggagcttgggaatggatcctggaggatgcccaattagggcctagccttaatcaggtcctcagagaatttctaccatttcagagaggccttttggaatgtggcccctgaacaagaattggaagctgccctgcccatgggagctggttagaaatgcagaatcctaggctccaccccatccagttcatgagaatctatatttaacaagatctgcagggggtgtgtctgctcagtaatttgaggacaaccattccagactgcttccaattttctggaatacatgaaatatagatcagttataagtagcaggccaagtcaggcccttattttcaagaaactgaggaattttctttgtgtagctttgctctttggtagaaaaggctaggtacacagctctagacactgccacacagggtctgcaaggtctttggttcagctaagctaggaatgaaatcctgcttcagtgtatggaaataaatgtatcatagaaatgtaacttttgtaagacaaaggttttcctcttctattttgtaaactcaaaatatttgtacatagttatttatttattggagataatctagaacacaggcaaaatccttgcttatgacatcacttgtacaaaataaacaaataacaatgtgaaaaaaaaaaaacacagaaaaaaaacacaacacacaaaaaccaaccccaacccacaaagggggggccgcccaccaaaaaaccccgcggggcacccccaccaaccacccccccccccgtcttggcaacagaggcgccccc

SEQ ID NO: 426043 - DNA, 4418 bp, Homo sapiens
cttgcaatccaggctttccttggaagtggctgtaacatgtatgaaaagaaagaaaggaggaccaagagatgaaagagggctgcacgcgtgggggcccgagtggtgggcggggacagtcgtcttgttacaggggtgctggccttccctggcgcctgcccctgtcggccccgcccgagaacctccctgcgccagggcagggtttactcatcccggcgaggtgatcccatgcgcgagggcgggcgcaagggcggccagagaacccagcaatccgagtatgcggcatcagcccttcccaccaggcacttccttccttttcccgaacgtccagggagggagggccgggcacttataaactcgagccctggccgatccgcatgtcagaggctgcctcgcaggggctgcgcgcagcggcaagaagtgtctgggctgggacggacaggagaggctgtcgccatcggcgtcctgtgcccctctgctccggcacggccctgtcgcagtgcccgcgctttccccggcgcctgcacgcggcgcgcctgggtaacatgcttggggtcctggtccttggcgcgctggccctggccggcctggggttccccgcacccgcagagccgcagccgggtggcagccagtgcgtcgagcacgactgcttcgcgctctacccgggccccgcgaccttcctcaatgccagtcagatctgcgacggactgcggggccacctaatgacagtgcgctcctcggtggctgccgatgtcatttccttgctactgaacggcgacggcggcgttggccgccggcgcctctggatcggcctgcagctgccacccggctgcggcgaccccaagcgcctcgggcccctgcgcggcttccagtgggttacgggagacaacaacaccagctatagcaggtgggcacggctcgacctcaatggggctcccctctgcggcccgttgtgcgtcgctgtctccgctgctgaggccactgtgcccagcgagccgatctgggaggagcagcagtgcgaagtgaaggccgatggcttcctctgcgagttccacttcccagccacctgcaggccactggctgtggagcccggcgccgcggctgccgccgtctcgatcacctacggcaccccgttcgcggcccgcggagcggacttccaggcgctgccggtgggcagctccgccgcggtggctcccctcggcttacagctaatgtgcaccgcgccgcccggagcggtccaggggcactgggccagggaggcgccgggcgcttgggactgcagcgtggagaacggcggctgcgagcacgcgtgcaatgcgatccctggggctccccgctgccagtgcccagccggcgccgccctgcaggcagacgggcgctcctgcaccgcatccgcgacgcagtcctgcaacgacctctgcgagcacttctgcgttcccaaccccgaccagccgggctcctactcgtgcatgtgcgagaccggctaccggctggcggccgaccaacaccggtgcgaggacgtggatgactgcatactggagcccagtccgtgtccgcagcgctgtgtcaacacacagggtggcttcgagtgccactgctaccctaactacgacctggtggacggcgagtgtgtggagcccgtggacccgtgcttcagagccaactgcgagtaccagtgccagcccctgaaccaaactagctacctctgcgtctgcgccgagggcttcgcgcccattccccacgagccgcacaggtgccagatgttttgcaaccagactgcctgtccagccgactgcgaccccaacacccaggctagctgtgagtgccctgaaggctacatcctggacgacggtttcatctgcacggacatcgacgagtgcgaaaacggcggcttctgctccggggtgtgccacaacctccccggtaccttcgagtgcatctgcgggcccgactcggcccttgcccgccacattggcaccgactgtgactccggcaaggtggacggtggcgacagcggctctggcgagcccccgcccagcccgacgcccggctccaccttgactcctccggccgtggggctcgtgcattcgggcttgctcataggcatctccatcgcgagcctgtgcctggtggtggcgcttttggcgctcctctgccacctgcgcaagaagcagggcgccgccagggccaagatggagtacaagtgcgcggccccttccaaggaggtagtgctgcagcacgtgcggaccgagcggacgccgcagagactctgagcggcctccgtccaggagcctggctccgtccaggagcctgtgcctcctcacccccagctttgctaccaaagcaccttagctggcattacagctggagaagaccctccccgcaccccccaagctgttttcttctattccatggctaactggcgagggggtgattagagggaggagaatgagcctcggcctcttccgtgacgtcactggaccactgggcaatgatggcaattttgtaacgaagacacagactgcgatttgtcccaggtcctcactaccgggcgcaggagggtgagcgttattggtcggcagccttctgggcagaccttgacctcgtgggctagggatgactaaaatatttattttttttaagtatttaggtttttgtttgtttcctttgttcttacctgtatgtctccagtatccactttgcacagctctccggtctctctctctctacaaactcccacttgtcatgtgacaggtaaactatcttggtgaatttttttttcctagccctctcacatttatgaagcaagccccacttattccccattcttcctagttttctcctcccaggaactgggccaactcacctgagtcaccctacctgtgcctgaccctacttcttttgctcttagctgtctgctcagacagaacccctacatgaaacagaaacaaaaacactaaaaataaaaatggccatttgctttttcaccagatttgctaatttatcctgaaatttcagattcccagagcaaaataattttaaacaaaggttgagatgtaaaaggtattaaattgatgttgctggactgtcatagaaattacacccaaagaggtatttatctttacttttaaacagtgagcctgaattttgttgctgttttgatttgtactgaaaaatggtaattgttgctaatcttcttatgcaatttccttttttgttattattacttatttttgacagtgttgaaaatgttcagaaggttgctctagattgagagaagagacaaacacctcccaggagacagttcaagaaagcttcaaactgcatgattcatgccaattagcaattgactgtcactgttccttgtcactggtagaccaaaataaaaccagctctactggtcttgtggaattgggagcttgggaatggatcctggaggatgcccaattagggcctagccttaatcaggtcctcagagaatttctaccatttcagagaggccttttggaatgtggcccctgaacaagaattggaagctgccctgcccatgggagctggttagaaatgcagaatcctaggctccaccccatccagttcatgagaatctatatttaacaagatctgcagggggtgtgtctgctcagtaatttgaggacaaccattccagactgcttccaattttctggaatacatgaaatatagatcagttataagtagcaggccaagtcaggcccttattttcaagaaactgaggaattttctttgtgtagctttgctctttggtagaaaaggctaggtacacagctctagacactgccacacagggtctgcaaggtctttggttcagctaagctaggaatgaaatcctgcttcagtgtatggaaataaatgtatcatagaaatgtaacttttgtaagacaaaggttttcctcttctattttgtaaactcaaaatatttgtacatagttatttatttattggagataatctagaacacaggcaaaatccttgcttatgacatcacttgtacaaaataaacaaataacaatgtgctctcgggttgtgtgtctgttcacttttcctccctcagtgccctcattttatgtcattaaatggggctcacaaaccatgcaaatgctatgagatgcatggagggctgccctgtaccccagcacttgtgttgtctggtggtggcaccatctctgattttcaaagctttttccagaggctattattttcactgtagaatgatttcatgctatctctgtgtgcacaaatatttattttctttctgtaaccataacaacttcatatatgaggacttgtgtctctgtgcttttaaatgcataaatgcattataggatcatttgttggaatgaattaaataaacccttcctggggcatctggcgaatcccaaatg

SEQ ID NO: 426044 - DNA, 3966 bp, Homo sapiens
cttgcaatccaggctttccttggaagtggctgtaacatgtatgaaaagaaagaaaggaggaccaagagatgaaagagggctgcacgcgtgggggcccgagtggtgggcggggacagtcgtcttgttacaggggtgctggccttccctggcgcctgcccctgtcggccccgcccgagaacctccctgcgccagggcagggtttactcatcccggcgaggtgatcccatgcgcgagggcgggcgcaagggcggccagagaacccagcaatccgagtatgcggcatcagcccttcccaccaggcacttccttccttttcccgaacgtccagggagggagggccgggcacttataaactcgagccctggccgatccgcatgtcagaggctgcctcgcaggggctgcgcgcagcggcaagaagtgtctgggctgggacggacaggagaggctgtcgccatcggcgtcctgtgcccctctgctccggcacggccctgtcgcagtgcccgcgctttccccggcgcctgcacgcggcgcgcctgggtaacatgcttggggtcctggtccttggcgcgctggccctggccggcctggggttccccgcacccggctgcggcgaccccaagcgcctcgggcccctgcgcggcttccagtgggttacgggagacaacaacaccagctatagcaggtgggcacggctcgacctcaatggggctcccctctgcggcccgttgtgcgtcgctgtctccgctgctgaggccactgtgcccagcgagccgatctgggaggagcagcagtgcgaagtgaaggccgatggcttcctctgcgagttccacttcccagccacctgcaggccactggctgtggagcccggcgccgcggctgccgccgtctcgatcacctacggcaccccgttcgcggcccgcggagcggacttccaggcgctgccggtgggcagctccgccgcggtggctcccctcggcttacagctaatgtgcaccgcgccgcccggagcggtccaggggcactgggccagggaggcgccgggcgcttgggactgcagcgtggagaacggcggctgcgagcacgcgtgcaatgcgatccctggggctccccgctgccagtgcccagccggcgccgccctgcaggcagacgggcgctcctgcaccgcatccgcgacgcagtcctgcaacgacctctgcgagcacttctgcgttcccaaccccgaccagccgggctcctactcgtgcatgtgcgagaccggctaccggctggcggccgaccaacaccggtgcgaggacgtggatgactgcatactggagcccagtccgtgtccgcagcgctgtgtcaacacacagggtggcttcgagtgccactgctaccctaactacgacctggtggacggcgagtgtgtggagcccgtggacccgtgcttcagagccaactgcgagtaccagtgccagcccctgaaccaaactagctacctctgcgtctgcgccgagggcttcgcgcccattccccacgagccgcacaggtgccagatgttttgcaaccagactgcctgtccagccgactgcgaccccaacacccaggctagctgtgagtgccctgaaggctacatcctggacgacggtttcatctgcacggacatcgacgagtgcgaaaacggcggcttctgctccggggtgtgccacaacctccccggtaccttcgagtgcatctgcgggcccgactcggcccttgcccgccacattggcaccgactgtgactccggcaaggtggacggtggcgacagcggctctggcgagcccccgcccagcccgacgcccggctccaccttgactcctccggccgtggggctcgtgcattcgggcttgctcataggcatctccatcgcgagcctgtgcctggtggtggcgcttttggcgctcctctgccacctgcgcaagaagcagggcgccgccagggccaagatggagtacaagtgcgcggccccttccaaggaggtagtgctgcagcacgtgcggaccgagcggacgccgcagagactctgagcggcctccgtccaggagcctggctccgtccaggagcctgtgcctcctcacccccagctttgctaccaaagcaccttagctggcattacagctggagaagaccctccccgcaccccccaagctgttttcttctattccatggctaactggcgagggggtgattagagggaggagaatgagcctcggcctcttccgtgacgtcactggaccactgggcaatgatggcaattttgtaacgaagacacagactgcgatttgtcccaggtcctcactaccgggcgcaggagggtgagcgttattggtcggcagccttctgggcagaccttgacctcgtgggctagggatgactaaaatatttattttttttaagtatttaggtttttgtttgtttcctttgttcttacctgtatgtctccagtatccactttgcacagctctccggtctctctctctctacaaactcccacttgtcatgtgacaggtaaactatcttggtgaatttttttttcctagccctctcacatttatgaagcaagccccacttattccccattcttcctagttttctcctcccaggaactgggccaactcacctgagtcaccctacctgtgcctgaccctacttcttttgctcttagctgtctgctcagacagaacccctacatgaaacagaaacaaaaacactaaaaataaaaatggccatttgctttttcaccagatttgctaatttatcctgaaatttcagattcccagagcaaaataattttaaacaaaggttgagatgtaaaaggtattaaattgatgttgctggactgtcatagaaattacacccaaagaggtatttatctttacttttaaacagtgagcctgaattttgttgctgttttgatttgtactgaaaaatggtaattgttgctaatcttcttatgcaatttccttttttgttattattacttatttttgacagtgttgaaaatgttcagaaggttgctctagattgagagaagagacaaacacctcccaggagacagttcaagaaagcttcaaactgcatgattcatgccaattagcaattgactgtcactgttccttgtcactggtagaccaaaataaaaccagctctactggtcttgtggaattgggagcttgggaatggatcctggaggatgcccaattagggcctagccttaatcaggtcctcagagaatttctaccatttcagagaggccttttggaatgtggcccctgaacaagaattggaagctgccctgcccatgggagctggttagaaatgcagaatcctaggctccaccccatccagttcatgagaatctatatttaacaagatctgcagggggtgtgtctgctcagtaatttgaggacaaccattccagactgcttccaattttctggaatacatgaaatatagatcagttataagtagcaggccaagtcaggcccttattttcaagaaactgaggaattttctttgtgtagctttgctctttggtagaaaaggctaggtacacagctctagacactgccacacagggtctgcaaggtctttggttcagctaagctaggaatgaaatcctgcttcagtgtatggaaataaatgtatcatagaaatgtaacttttgtaagacaaaggttttcctcttctattttgtaaactcaaaatatttgtacatagttatttatttattggagataatctagaacacaggcaaaatccttgcttatgacatcacttgtacaaaataaacaaataacaatgtgaaaaaaaaaaaacacagaaaaaaaacacaacacacaaaaaccaaccccaacccacaaagggggggccgcccaccaaaaaaccccgcggggcacccccaccaaccacccccccccccgtcttggcaacagaggcgccccc

SEQ ID NO: 426045 - DNA, 1731 bp, Homo sapiens
actagaactgccgattctgtctccagtgttctcttcacttgatccggagccgccaggcacggtgtagcacgcgtatattgggtgcgcgcctacgtccattctcgtgcgctagatcgcttgtaccctcgctgggctatggtgcatgatctatatactcatttcacttttttctgtctaccgtcatttcatggtttttgtttgtttcctttgttcttacctgtatgtctccagtatccactttgcacagctctccggtctctctctctctacaaactcccacttgtcatgtgacaggtaaactatcttggtgaatttttttttcctagccctctcacatttatgaagcaagccccacttattccccattcttcctagttttctcctcccaggaactgggccaactcacctgagtcaccctacctgtgcctgaccctacttcttttgctcttagctgtctgctcagacagaacccctacatgaaacagaaacaaaaacactaaaaataaaaatggccatttgctttttcaccagatttgctaatttatcctgaaatttcagattcccagagcaaaataattttaaacaaaggttgagatgtaaaaggtattaaattgatgttgctggactgtcatagaaattacacccaaagaggtatttatctttacttttaaacagtgagcctgaattttgttgctgttttgatttgtactgaaaaatggtaattgttgctaatcttcttatgcaatttccttttttgttattattacttatttttgacagtgttgaaaatgttcagaaggttgctctagattgagagaagagacaaacacctcccaggagacagttcaagaaagcttcaaactgcatgattcatgccaattagcaattgactgtcactgttccttgtcactggtagaccaaaataaaaccagctctactggtcttgtggaattgggagcttgggaatggatcctggaggatgcccaattagggcctagccttaatcaggtcctcagagaatttctaccatttcagagaggccttttggaatgtggcccctgaacaagaattggaagctgccctgcccatgggagctggttagaaatgcagaatcctaggctccaccccatccagttcatgagaatctatatttaacaagatctgcagggggtgtgtctgctcagtaatttgaggacaaccattccagactgcttccaattttctggaatacatgaaatatagatcagttataagtagcaggccaagtcaggcccttattttcaagaaactgaggaattttctttgtgtagctttgctctttggtagaaaaggctaggtacacagctctagacactgccacacagggtctgcaaggtctttggttcagctaagctaggaatgaaatcctgcttcagtgtatggaaataaatgtatcatagaaatgtaacttttgtaagacaaaggttttcctcttctattttgtaaactcaaaatatttgtacatagttatttatttattggagataatctagaacacaggcaaaatccttgcttatgacatcacttgtacaaaataaacaaataacaatgtgaaaaaaaaaaaacacagaaaaaaaacacaacacacaaaaaccaaccccaacccacaaagggggggccgcccaccaaaaaaccccgcggggcacccccaccaaccacccccccccccgtcttggcaacagaggcgccccc

SEQ ID NO: 426046 - DNA, 3989 bp, Homo sapiens
cttgcaatccaggctttccttggaagtggctgtaacatgtatgaaaagaaagaaaggaggaccaagagatgaaagagggctgcacgcgtgggggcccgagtggtgggcggggacagtcgtcttgttacaggggtgctggccttccctggcgcctgcccctgtcggccccgcccgagaacctccctgcgccagggcagggtttactcatcccggcgaggtgatcccatgcgcgagggcgggcgcaagggcggccagagaacccagcaatccgagtatgcggcatcagcccttcccaccaggcacttccttccttttcccgaacgtccagggagggagggccgggcacttataaactcgagccctggccgatccgcatgtcagaggctgcctcgcaggggctgcgcgcagcggcaagaagtgtctgggctgggacggacaggagaggctgtcgccatcggcgtcctgtgcccctctgctccggcacggccctgtcgcagtgcccgcgctttccccggcgcctgcacgcggcgcgcctgggtaacatgcttggggtcctggtccttggcgcgctggccctggccggcctggggttccccgcacccgcagagccgcagccgggtggcagccagtgcgtcgagcacgactgcttcgcgctctacccgggccccgcgaccttcctcaatgccagtcagatctgcgacggactgcggggccacctaatgacagtgcgctcctcggtggctgccgatgtcatttccttgctactgaacggcgacggcggcgttggccgccggcgcctctggatcggcctgcagctgccacccggctgcggcgaccccaagcgcctcgggcccctgcgcggcttccagtgggttacgggagacaacaacaccagctatagcaggtgggcacggctcgacctcaatggggctcccctctgcggcccgttgtgcgtcgctgtctccgctgctgaggccactgtgcccagcgagccgatctgggaggagcagcagtgcgaagtgaaggccgatggcttcctctgcgagttccacttcccagccacctgcaggccactggctgtggagcccggcgccgcggctgccgccgtctcgatcacctacggcaccccgttcgcggcccgcggagcggacttccaggcgctgccggtgggcagctccgccgcggtggctcccctcggcttacagctaatgtgcaccgcgccgcccggagcggtccaggggcactgggccagggaggcgccgggcgcttgggactgcagcgtggagaacggcggctgcgagcacgcgtgcaatgcgatccctggggctccccgctgccagtgcccagccggcgccgccctgcaggcagacgggcgctcctgcaccgcatccgcgacgcagtcctgcaacgacctctgcgagcacttctgcgttcccaaccccgaccagccgggctcctactcgtgcatgtgcgagaccggctaccggctggcggccgaccaacaccggtgcgaggacgtggatgactgcatactggagcccagtccgtgtccgcagcgctgtgtcaacacacagggtggcttcgagtgccactgctaccctaactacgacctggtggacggcgagtgtgtggagcccgtggacccgtgcttcagagccaactgcgagtaccagtgccagcccctgaaccaaactagctacctctgcgtctgcgccgagggcttcgcgcccattccccacgagccgcacaggtgccagatgttttgcaaccagactgcctgtccagccgactgcgaccccaacacccaggctagctgtgagtgccctgaaggctacatcctggacgacggtttcatctgcacggacatcgacgagtgcgaaaacggcggcttctgctccggggtgtgccacaacctccccggtaccttcgagtgcatctgcgggcccgactcggcccttgcccgccacattggcaccgactgtgactccggcaaggtggacggtggcgacagcggctctggcgagcccccgcccagcccgacgcccggctccaccttgactcctccggccgtggggctcgtgcattcgggcttgctcataggcatctccatcgcgagcctgtgcctggtggtggcgcttttggcgctcctctgccacctgcgcaagaagcagggcgccgccagggccaagatggagtacaagtgcgcggccccttccaaggaggtagtgctgcagcacgtgcggaccgagcggacgccgcagagactctgagcggcctccgtccaggagcctggctccgtccaggagcctgtgcctcctcacccccagctttgctaccaaagcaccttagctggcattacagctggagaagaccctccccgcaccccccaagctgttttcttctattccatggctaactggcgagggggtgattagagggaggagaatgagcctcggcctcttccgtgacgtcactggaccactgggcaatgatggcaattttgtaacgaagacacagactgcgatttgtcccaggtcctcactaccgggcgcaggagggtgagcgttattggtcggcagccttctgggcagaccttgacctcgtgggctagggatgactaaaatatttattttttttaagtatttaggtttttgtttgtttcctttgttcttacctgtatgtctccagtatccactttgcacagctctccggtctctctctctctacaaactcccacttgtcatgtgacaggtaaactatcttggtgaatttttttttcctagccctctcacatttatgaagcaagccccacttattccccattcttcctagttttctcctcccaggaactgggccaactcacctgagtcaccctacctgtgcctgaccctacttcttttgctcttagctgtctgctcagacagaacccctacatgaaacagaaacaaaaacactaaaaataaaaatggccatttgctttttcaccagatttgctaatttatcctgaaatttcagattcccagagcaaaataattttaaacaaaggttgagatgtaaaaggtattaaattgatgttgctggactgtcatagaaattacacccaaagaggtatttatctttacttttaaacagtgagcctgaattttgttgctgttttgatttgtactgaaaaatggtaattgttgctaatcttcttatgcaatttccttttttgttattattacttatttttgacagtgttgaaaatgttcagaaggttgctctagattgagagaagagacaaacacctcccaggagacagttcaagaaagcttcaaactgcatgattcatgccaattagcaattgactgtcactgttccttgtcactggtagaccaaaataaaaccagctctactggtcttgtggaattgggagcttgggaatggatcctggaggatgcccaattagggcctagccttaatcaggtcctcagagaatttctaccatttcagagaggccttttggaatgtggcccctgaacaagaattggaagctgccctgcccatgggagctggttagaaatgcagaatcctaggctccaccccatccagttcatgagaatctatatttaacaagatctgcagggggtgtgtctgctcagtaatttgaggacaaccattccagactgcttccaattttctggaatacatgaaatatagatcagttataagtagcaggccaagtcaggcccttattttcaagaaactgaggaattttctttgtgtagctttgtctttggttcagctaagctaggaatgaaatcctgcttcagtgtatggaaataaatgtatcatagaaatgtaacttttgtaagacaaaggttttcctcttctattttgtaaactcaaaatatttgtacatagttatttatttattggagataatctagaacacaggcaaaatccttgcttatgacatcacttgtacaaaataaacaaataacaatgtg

SEQ ID NO: 426047 - DNA, 2569 bp, Homo sapiens
cttgcaatccaggctttccttggaagtggctgtaacatgtatgaaaagaaagaaaggaggaccaagagatgaaagagggctgcacgcgtgggggcccgagtggtgggcggggacagtcgtcttgttacaggggtgctggccttccctggcgcctgcccctgtcggccccgcccgagaacctccctgcgccagggcagggtttactcatcccggcgaggtgatcccatgcgcgagggcgggcgcaagggcggccagagaacccagcaatccgagtatgcggcatcagcccttcccaccaggcacttccttccttttcccgaacgtccagggagggagggccgggcacttataaactcgagccctggccgatccgcatgtcagaggctgcctcgcaggggctgcgcgcagcggcaagaagtgtctgggctgggacggacaggagaggctgtcgccatcggcgtcctgtgcccctctgctccggcacggccctgtcgcagtgcccgcgctttccccggcgcctgcacgcggcgcgcctgggtaacatgcttggggtcctggtccttggcgcgctggccctggccggcctggggttccccgcacccgcagagccgcagccgggtggcagccagtgcgtcgagcacgactgcttcgcgctctacccgggccccgcgaccttcctcaatgccagtcagatctgcgacggactgcggggccacctaatgacagtgcgctcctcggtggctgccgatgtcatttccttgctactgaacggcgacggcggcgttggccgccggcgcctctggatcggcctgcagctgccacccggctgcggcgaccccaagcgcctcgggcccctgcgcggcttccagtgggttacgggagacaacaacaccagctatagcaggtgggcacggctcgacctcaatggggctcccctctgcggcccgttgtgcgtcgctgtctccgctgctgaggccactgtgcccagcgagccgatctgggaggagcagcagtgcgaagtgaaggccgatggcttcctctgcgagttccacttcccagccacctgcaggccactggctgtggagcccggcgccgcggctgccgccgtctcgatcacctacggcaccccgttcgcggcccgcggagcggacttccaggcgctgccggtgggcagctccgccgcggtggctcccctcggcttacagctaatgtgcaccgcgccgcccggagcggtccaggggcactgggccagggaggcgccgggcgcttgggactgcagcgtggagaacggcggctgcgagcacgcgtgcaatgcgatccctggggctccccgctgccagtgcccagccggcgccgccctgcaggcagacgggcgctcctgcaccgcatccgcgacgcagtcctgcaacgacctctgcgagcacttctgcgttcccaaccccgaccagccgggctcctactcgtgcatgtgcgagaccggctaccggctggcggccgaccaacaccggtgcgaggacgtggatgactgcatactggagcccagtccgtgtccgcagcgctgtgtcaacacacagggtggcttcgagtgccactgctaccctaactacgacctggtggacggcgagtgtgtggagcccgtggacccgtgcttcagagccaactgcgagtaccagtgccagcccctgaaccaaactagctacctctgcgtctgcgccgagggcttcgcgcccattccccacgagccgcacaggtgccagatgttttgcaaccagactgcctgtccagccgactgcgaccccaacacccaggctagctgtgagtgccctgaaggctacatcctggacgacggtttcatctgcacggacatcgacgagtgcgaaaacggcggcttctgctccggggtgtgccacaacctccccggtaccttcgagtgcatctgcgggcccgactcggcccttgcccgccacattggcaccgactgtgactccggcaaggtggacggtggcgacagcggctctggcgagcccccgcccagcccgacgcccggctccaccttgactcctccggccgtggggctcgtgcattcgggcttgctcataggcatctccatcgcgagcctgtgcctggtggtggcgcttttggcgctcctctgccacctgcgcaagaagcagggcgccgccagggccaagatggagtacaagtgcgcggccccttccaaggaggtagtgctgcagcacgtgcggaccgagcggacgccgcagagactctgagcggcctccgtccaggagcctggctccgtccaggagcctgtgcctcctcacccccagctttgctaccaaagcaccttagctggcattacagctggagaagaccctccccgcaccccccaagctgttttcttctattccatggctaactggcgagggggtgattagagggaggagaatgagcctcggcctcttccgtgactcgtggaaatgtccacgggccggcatatggcatacagattcataaagtggtgactcgtggaaatgtccaccaacccgggcgacctcgtgctcgaggatcg

SEQ ID NO: 426048 - DNA, 2345 bp, Homo sapiens
gtctcgtttggtattcactttcgcgactcaggtgaactaacctgcgagaagctggttgtgcgctgaggcgaccagcgccggaaggcacggtggcgactcacgctgttctcgccgctcagaggcgggtctgaggctcggtggcggcgcccagggtggcccgggccctttcctcggtcattgtctcccctccagctctactcacaggctccgatggcggcggccgccctgagggaccccgctcaggttcctgtggctgcagacttgcttacagaccatgaggagggctatgtgacctttgaggatgtggctgtctacttctcccaggaggaatggagattgcttgatgacgctcagaggctcctctaccgcaatgtgatgctggagaactttacacttctggcctctctgggacttgcgtcttccaagacccatgaaataacccagctggagtcatgggaggagcccttcatgcctgcttgggaagttgtgacttcagccataccgagaggttgttggcatggagccgaggctgaggaggctcctgagcagattgcttctgtaggactgctcagttcaaacattcagcaacaccagaagcagcactgtggagagaaacccttaaaaagacaacagggcagggtcccagttttgaggagttgcaaagttcacctatcagagaagtccttgcaaagcagggaggttgggaaggccctcctgatcagctcaggtgttctcaagcaccaggtgactcacacaggagagaagtcacataggagctccaaaagtagggaggcctttcatgctggaaaaaggcattacaaatgcagtgaatgtgggaaagcctttggtcagaaatatttacttgttcagcaccagagactacatgctgggaaaaagacgtatgaatgcagtgaatgtgggaagttatttagagatatgtccaacctttttatacaccaaatagttcacactggagaaaggccttacgggtgtagtaactgtggaaaatcctttagccgtaatgctcacctcattgaacaccagagagttcacactggagaaaagccttttacatgcagtgaatgtggaaaagctttcaggcataattccacacttgttcagcatcacaaaatccacactggagtaaggccttatgagtgcagtgaatgtggaaaattgtttagtttcaactccagcctcatgaaacatcagagaattcacactggagaaagaccttataagtgcagtgaatgtggaaaattctatagccacaagtccaaccttatcaaacattggcgtgttcatactggagaaaggccttacaagtgcagcgactgtgggaaattttttacccaatgctcaagcctcatgcaacatcaaaaagttcacactggagaaaagccttttaagtgcaatgaatgtgggagattctttagagagaattccaccctagttagacatcagagggttcacactggagcaaagccttatgagtgcagggaatgtgggaaattttttagccaaagctcaaccctcatgcaacatcgaaaagttcacattggagaaaagccttttaagtgcaatgaatgtgggagattgtttagagagaattccagccttgttaaacatcagagggttcacactggagcaaagccttatgagtgcagggaatgtgggaagttttttcgccacaactccagtctttttaaacatcgaaggattcacactggagaaatgcagtgattgtgtgaaatcctttagccagcgtttcaacctcattcaacaccagaaagttcacagtggaaaaaatcttgaaggtaacagatggaaatccgttagccacacctccagtctcattcaacactggacagtttacaatgtggacaatgtagtgaatatggaaaaaggtttcagccaaaggcctaaccctattcaacaccagaaagtttacactggagaaaggccttagggtgacaggttatgtactgtctctgaatcaatatgacctcacttaaaacagaaactctgaggatggcctttatgagggagctggcaattgaacatcattcatctaaatatgcacactggaggcaagatgagaattcctgacagattgtccttcctgagaagacagccctctgccttggagctccagagagagggagccctgtattcttggctgtacccgtcgaatggagttttgatctcgctgagtttggagttgggggaggaaaggagtggtcttggttcaaatgtgactcacttttgctgttcttgtgaatgttagatcttctttaataaatatttatttcccatacacccttatgaccattacagagactgaa

SEQ ID NO: 426049 - DNA, 811 bp, Homo sapiens
gccctcatggttgcgttacatgggctacctagggatctgttcactgatttagagggtcccagagctctgggtcgggactgaggtgaaagagcggaaaaacgcgagaagcggtgttccttctacacagaggctagagtgcggatcggctgagtcggctgcaggcgcccctgcctccgtcagcgtccaggtgaccgccgttcccgccccgctcttccctgggtggactggaggaggccgcgccgatgaacctgaccgaggccgaaagaatgagggtcgtgatcaactcagtatgccactggaggctatatgagtaaacagcaaaccgtttctcatgaaagcaggatgttggcaaactgacaaactgcgtctgccacccagaaggaatgctgaaggcagtcacgacccaggcacaagtgtttcttgtgattaggcataattgaagcctgttaacaataatgtgaacttgtgatcaattaagcagctgaccagtcgttacctcctcctccctttcatcctacccaataaatgtggagggctgtggaagctcaggggctgcctttgctcactagaagcagggagctctcttcttccccagttcgccttctttaaaacagtttctttcgtcttaagttttcatttctacgttcgtcccccttcattcagtctcgtaatgatggtctcaagtagtaacagtaactgtcgtagtgatggtctcaagtagtaactgtacaagtctgccacatcttcccacagggtccattgcagtggcagcaatgcataaggaccctgcacaggtaagtcaaggatttct

SEQ ID NO: 426050 - DNA, 741 bp, Homo sapiens
gccctcatggttgcgttacatgggctacctagggatctgttcactgatttagagggtcccagagctctgggtcgggactgaggtgaaagagcggaaaaacgcgagaagcggtgttccttctacacagaggctagagtgcggatcggctgagtcggctgcaggcgcccctgcctccgtcagcgtccaggccgaaagaatgagggtcgtgatcaactcagtatgccactggaggctatatgagtaaacagcaaaccgtttctcatgaaagcaggatgttggcaaactgacaaactgcgtctgccacccagaaggaatgctgaaggcagtcacgacccaggcacaagtgtttcttgtgattaggcataattgaagcctgttaacaataatgtgaacttgtgatcaattaagcagctgaccagtcgttacctcctcctccctttcatcctacccaataaatgtggagggctgtggaagctcaggggctgcctttgctcactagaagcagggagctctcttcttccccagttcgccttctttaaaacagtttctttcgtcttaagttttcatttctacgttcgtcccccttcattcagtctcgtaatgatggtctcaagtagtaacagtaactgtcgtagtgatggtctcaagtagtaactgtacaagtctgccacatcttcccacagggtccattgcagtggcagcaatgcataaggaccctgcacaggtaagtcaaggatttct

SEQ ID NO: 426051 - DNA, 2320 bp, Homo sapiens
gccctcatggttgcgttacatgggctacctagggatctgttcactgatttagagggtcccagagctctgggtcgggactgaggtgaaagagcggaaaaacgcgagaagcggtgttccttctacacagaggctagagtgcggatcggctgagtcggctgcaggcgcccctgcctccgtcagcgtccaggtgaccgccgttcccgccccgctcttccctgggtggactggaggaggccgcgccgatgaacctgaccgagggctatgtgacctttgaggatgtggctgtctacttctcccaggaggaatggagattgcttgatgacgctcagaggctcctctaccgcaatgtgatgctggagaactttacacttctggcctctctgggacttgcgtcttccaagacccatgaaataacccagctggagtcatgggaggagcccttcatgcctgcttgggaagttgtgacttcagccataccgagaggttgttggcatggagccgaggctgaggaggctcctgagcagattgcttctgtaggactgctcagttcaaacattcagcaacaccagaagcagcactgtggagagaaacccttaaaaagacaacagggcagggtcccagttttgaggagttgcaaagttcacctatcagagaagtccttgcaaagcagggaggttgggaaggccctcctgatcagctcaggtgttctcaagcaccaggtgactcacacaggagagaagtcacataggagctccaaaagtagggaggcctttcatgctggaaaaaggcattacaaatgcagtgaatgtgggaaagcctttggtcagaaatatttacttgttcagcaccagagactacatgctgggaaaaagacgtatgaatgcagtgaatgtgggaagttatttagagatatgtccaacctttttatacaccaaatagttcacactggagaaaggccttacgggtgtagtaactgtggaaaatcctttagccgtaatgctcacctcattgaacaccagagagttcacactggagaaaagccttttacatgcagtgaatgtggaaaagctttcaggcataattccacacttgttcagcatcacaaaatccacactggagtaaggccttatgagtgcagtgaatgtggaaaattgtttagtttcaactccagcctcatgaaacatcagagaattcacactggagaaagaccttataagtgcagtgaatgtggaaaattctatagccacaagtccaaccttatcaaacattggcgtgttcatactggagaaaggccttacaagtgcagcgactgtgggaaattttttacccaatgctcaagcctcatgcaacatcaaaaagttcacactggagaaaagccttttaagtgcaatgaatgtgggagattctttagagagaattccaccctagttagacatcagagggttcacactggagcaaagccttatgagtgcagggaatgtgggaaattttttagccaaagctcaaccctcatgcaacatcgaaaagttcacattggagaaaagccttttaagtgcaatgaatgtgggagattgtttagagagaattccagccttgttaaacatcagagggttcacactggagcaaagccttatgagtgcagggaatgtgggaagttttttcgccacaactccagtctttttaaacatcgaaggattcacactggagaaatgcagtgattgtgtgaaatcctttagccagcgtttcaacctcattcaacaccagaaagttcacagtggaaaaaatcttgaaggtaacagatggaaatccgttagccacacctccagtctcattcaacactggacagtttacaatgtggacaatgtagtgaatatggaaaaaggtttcagccaaaggcctaaccctattcaacaccagaaagtttacactggagaaaggccttagggtgacaggttatgtactgtctctgaatcaatatgacctcacttaaaacagaaactctgaggatggcctttatgagggagctggcaattgaacatcattcatctaaatatgcacactggaggcaagatgagaattcctgacagattgtccttcctgagaagacagccctctgccttggagctccagagagagggagccctgtattcttggctgtacccgtcgaatggagttttgatctcgctgagtttggagttgggggaggaaaggagtggtcttggttcaaatgtgactcacttttgctgttcttgtgaatgttagatcttctttaataaatatttatttcccatacacccttatgaccattacagagactgaa

SEQ ID NO: 426052 - DNA, 794 bp, Homo sapiens
gtctcgtttggtattcactttcgcgactcaggtgaactaacctgcgagaagctggttgtgcgctgaggcgaccagcgccggaaggcacggtggcgactcacgctgttctcgccgctcagaggcgggtctgaggctcggtggcggcgcccagggtggcccgggccctttcctcggtcattgtctcccctccagctctactcacaggctccgatggcggcggccgccctgagggaccccgctcagggctatgtgacctttgaggatgtggctgtctacttctcccaggaggaatggagattgcttgatgacgctcagaggctcctctaccgcaatgtgatgctggagaactttacacttctggcctctctgggacttgcgtcttccaagacccatgaaataacccagctggagtcatgggaggagcccttcatgcctgcttgggaagttgtgacttcagccataccgagagaaactctgaggatggcctttatgagggagctggcaattgaacatcattcatctaaatatgcacactggaggcaagatgagaattcctgacagattgtccttcctgagaagacagccctctgccttggagctccagagagagggagccctgtattcttggctgtacccgtcgaatggagttttgatctcgctgagtttggagttgggggaggaaaggagtggtcttggttcaaatgtgactcacttttgctgttcttgtgaatgttagatcttctttaataaatatttatttcccatacacccttatgaccattacagagactgaa

SEQ ID NO: 426053 - DNA, 885 bp, Homo sapiens
gccctcatggttgcgttacatgggctacctagggatctgttcactgatttagagggtcccagagctctgggtcgggactgaggtgaaagagcggaaaaacgcgagaagcggtgttccttctacacagaggctagagtgcggatcggctgagtcggctgcaggcgcccctgcctccgtcagcgtccaggtgaccgccgttcccgccccgctcttccctgggtggactggaggaggccgcgccgatgaacctgaccgaggtgcgtgcagcgtcccaggccgccccgcccaacccctcctcccagtgctgaagtcccaaggagccgccctgcaggccgaaagaatgagggtcgtgatcaactcagtatgccactggaggctatatgagtaaacagcaaaccgtttctcatgaaagcaggatgttggcaaactgacaaactgcgtctgccacccagaaggaatgctgaaggcagtcacgacccaggcacaagtgtttcttgtgattaggcataattgaagcctgttaacaataatgtgaacttgtgatcaattaagcagctgaccagtcgttacctcctcctccctttcatcctacccaataaatgtggagggctgtggaagctcaggggctgcctttgctcactagaagcagggagctctcttcttccccagttcgccttctttaaaacagtttctttcgtcttaagttttcatttctacgttcgtcccccttcattcagtctcgtaatgatggtctcaagtagtaacagtaactgtcgtagtgatggtctcaagtagtaactgtacaagtctgccacatcttcccacagggtccattgcagtggcagcaatgcataaggaccctgcacaggtaagtcaaggatttct

SEQ ID NO: 426054 - DNA, 471 bp, Homo sapiens
cggccgccctgagggaccccgctcaggtgagcgccgcgtcctcctggcctcccccgaatcctaaagccctgtgagggccgcctgctcaggtccccgggtgcagaactgtggggcgttcgtgcgcggcgtcccgtttctgacacgcagtgtgatggggtggcaatggagggcaaggggcccggctcgcaaagatgtgaggcgcattcagcgagtcccgaacctgaggcctcctggtgtctgtagtgggcagcttgggaagggacgaggcgcgtgtcgagcgacagcccgagcagctgcgctttcatcctgagggggccacagtggccgcggagggctggagacagaagagtgacaagatctgtttctcaaagtttgccaaaggcccttcaagtcaaaacagactggggtgggggtgaggcgggtgaagacagacctgtgagtaggtaaattcagtagactagtggagagtct

SEQ ID NO: 426055 - DNA, 665 bp, Homo sapiens
ggctacctagggatctgttcactgatttagagggtcccagagctctgggtcgggactgaggtgaaagagcggaaaaacgcgagaagcggtgttccttctacacagaggctagagtgcggatcggctgagtcggctgcaggcgcccctgcctccgtcagcgtccaggtgaccgccgttcccgccccgctcttccctgggtggactggaggaggccgcgccgatgaacctgaccgaggtgcgtgcagcgtcccaggccgccccgcccaacccctcctcccagtgctgaagtcccaaggagccgccctgcaggttaggcccttgtgtctctaagagaggggcgttcttgtgtggggtgcccgggactgggactgcggtgcgatgaggcgggggagctcccgtcggagaccgacacgtctctggggcttggaggcactgcagaacgggcggcactggggagcccgagcgtctttgtctccaaggagcagaggttgaggcggagtctcccctggaagggcagtggagccgcagagagccatagagggctgtgcagggaggacgaatgggagggtcacgcccagagttagaagtttaaagttggggaaaacaggatgttgaacgggggcagggggaccgctgaggagaccccttgagttatggtagggctg

SEQ ID NO: 426056 - DNA, 2246 bp, Homo sapiens
gtctcgtttggtattcactttcgcgactcaggtgaactaacctgcgagaagctggttgtgcgctgaggcgaccagcgccggaaggcacggtggcgactcacgctgttctcgccgctcagaggcgggtctgaggctcggtggcggcgcccagggtggcccgggccctttcctcggtcattgtctcccctccagctctactcacaggctccgatggcggcggccgccctgagggaccccgctcaggttcctgtggctgcagacttgcttacagaccatgaggagggctatgtgacctttgaggatgtggctgtctacttctcccaggaggaatggagattgcttgatgacgctcagaggctcctctaccgcaatgtgatgctggagaactttacacttctggcctctctgggttgttggcatggagccgaggctgaggaggctcctgagcagattgcttctgtaggactgctcagttcaaacattcagcaacaccagaagcagcactgtggagagaaacccttaaaaagacaacagggcagggtcccagttttgaggagttgcaaagttcacctatcagagaagtccttgcaaagcagggaggttgggaaggccctcctgatcagctcaggtgttctcaagcaccaggtgactcacacaggagagaagtcacataggagctccaaaagtagggaggcctttcatgctggaaaaaggcattacaaatgcagtgaatgtgggaaagcctttggtcagaaatatttacttgttcagcaccagagactacatgctgggaaaaagacgtatgaatgcagtgaatgtgggaagttatttagagatatgtccaacctttttatacaccaaatagttcacactggagaaaggccttacgggtgtagtaactgtggaaaatcctttagccgtaatgctcacctcattgaacaccagagagttcacactggagaaaagccttttacatgcagtgaatgtggaaaagctttcaggcataattccacacttgttcagcatcacaaaatccacactggagtaaggccttatgagtgcagtgaatgtggaaaattgtttagtttcaactccagcctcatgaaacatcagagaattcacactggagaaagaccttataagtgcagtgaatgtggaaaattctatagccacaagtccaaccttatcaaacattggcgtgttcatactggagaaaggccttacaagtgcagcgactgtgggaaattttttacccaatgctcaagcctcatgcaacatcaaaaagttcacactggagaaaagccttttaagtgcaatgaatgtgggagattctttagagagaattccaccctagttagacatcagagggttcacactggagcaaagccttatgagtgcagggaatgtgggaaattttttagccaaagctcaaccctcatgcaacatcgaaaagttcacattggagaaaagccttttaagtgcaatgaatgtgggagattgtttagagagaattccagccttgttaaacatcagagggttcacactggagcaaagccttatgagtgcagggaatgtgggaagttttttcgccacaactccagtctttttaaacatcgaaggattcacactggagaaatgcagtgattgtgtgaaatcctttagccagcgtttcaacctcattcaacaccagaaagttcacagtggaaaaaatcttgaaggtaacagatggaaatccgttagccacacctccagtctcattcaacactggacagtttacaatgtggacaatgtagtgaatatggaaaaaggtttcagccaaaggcctaaccctattcaacaccagaaagtttacactggagaaaggccttagggtgacaggttatgtactgtctctgaatcaatatgacctcacttaaaacagaaactctgaggatggcctttatgagggagctggcaattgaacatcattcatctaaatatgcacactggaggcaagatgagaattcctgacagattgtccttcctgagaagacagccctctgccttggagctccagagagagggagccctgtattcttggctgtacccgtcgaatggagttttgatctcgctgagtttggagttgggggaggaaaggagtggtcttggttcaaatgtgactcacttttgctgttcttgtgaatgttagatcttctttaataaatatttatttcccatacacccttatgaccattacagagactgaa

SEQ ID NO: 426057 - DNA, 885 bp, Homo sapiens
gccctcatggttgcgttacatgggctacctagggatctgttcactgatttagagggtcccagagctctgggtcgggactgaggtgaaagagcggaaaaacgcgagaagcggtgttccttctacacagaggctagagtgcggatcggctgagtcggctgcaggcgcccctgcctccgtcagcgtccaggtgaccgccgttcccgccccgctcttccctgggtggactggaggaggccgcgccgatgaacctgaccgaggtgcgtgcagcgtcccaggccgccccgcccaacccctcctcccagtgctgaagtcccaaggagccgccctgcaggattgtatggtctttgaggatgtggccatatatttctcccaagaggaatgggggatccttaatgatgctcagagacacctgcacagcaatgtgatgttggagaactttgcgcttttgtcatcagtaggttgttggcatggagccaaggatgaggaggtaccttccaagcagtgtgtttctgtaagagtgttacaggtcacaattccaaagccagctttgtccaccctgaaggcccagccctgcaagatgtgtagctcaattctgaaggacattctgcacctggctgagcacgatggaacacaccctgagcaagggctgtacacatgtgcagcagagcatgacctgcaccaaaaggagcagattagagagaagctcaccagaagtgatgagtggaggccttcatttgtgaaccacagtgctcacgtgggagagaggaacttcacatgcacgcagggtggcaaggattttactgccagctcagaccttctccagcaacaggtcttaaacagtgggtggaagctgtacagggatacccaggatggggaagcctttca

SEQ ID NO: 426058 - DNA, 2306 bp, Homo sapiens
gtctcgtttggtattcactttcgcgactcaggtgaactaacctgcgagaagctggttgtgcgctgaggcgaccagcgccggaaggcacggtggcgactcacgctgttctcgccgctcagaggcgggtctgaggctcggtggcggcgcccagggtggcccgggccctttcctcggtcattgtctcccctccagctctactcacaggctccgatggcggcggccgccctgagggaccccgctcagggctatgtgacctttgaggatgtggctgtctacttctcccaggaggaatggagattgcttgatgacgctcagaggctcctctaccgcaatgtgatgctggagaactttacacttctggcctctctgggacttgcgtcttccaagacccatgaaataacccagctggagtcatgggaggagcccttcatgcctgcttgggaagttgtgacttcagccataccgagaggttgttggcatggagccgaggctgaggaggctcctgagcagattgcttctgtaggactgctcagttcaaacattcagcaacaccagaagcagcactgtggagagaaacccttaaaaagacaacagggcagggtcccagttttgaggagttgcaaagttcacctatcagagaagtccttgcaaagcagggaggttgggaaggccctcctgatcagctcaggtgttctcaagcaccaggtgactcacacaggagagaagtcacataggagctccaaaagtagggaggcctttcatgctggaaaaaggcattacaaatgcagtgaatgtgggaaagcctttggtcagaaatatttacttgttcagcaccagagactacatgctgggaaaaagacgtatgaatgcagtgaatgtgggaagttatttagagatatgtccaacctttttatacaccaaatagttcacactggagaaaggccttacgggtgtagtaactgtggaaaatcctttagccgtaatgctcacctcattgaacaccagagagttcacactggagaaaagccttttacatgcagtgaatgtggaaaagctttcaggcataattccacacttgttcagcatcacaaaatccacactggagtaaggccttatgagtgcagtgaatgtggaaaattgtttagtttcaactccagcctcatgaaacatcagagaattcacactggagaaagaccttataagtgcagtgaatgtggaaaattctatagccacaagtccaaccttatcaaacattggcgtgttcatactggagaaaggccttacaagtgcagcgactgtgggaaattttttacccaatgctcaagcctcatgcaacatcaaaaagttcacactggagaaaagccttttaagtgcaatgaatgtgggagattctttagagagaattccaccctagttagacatcagagggttcacactggagcaaagccttatgagtgcagggaatgtgggaaattttttagccaaagctcaaccctcatgcaacatcgaaaagttcacattggagaaaagccttttaagtgcaatgaatgtgggagattgtttagagagaattccagccttgttaaacatcagagggttcacactggagcaaagccttatgagtgcagggaatgtgggaagttttttcgccacaactccagtctttttaaacatcgaaggattcacactggagaaatgcagtgattgtgtgaaatcctttagccagcgtttcaacctcattcaacaccagaaagttcacagtggaaaaaatcttgaaggtaacagatggaaatccgttagccacacctccagtctcattcaacactggacagtttacaatgtggacaatgtagtgaatatggaaaaaggtttcagccaaaggcctaaccctattcaacaccagaaagtttacactggagaaaggccttagggtgacaggttatgtactgtctctgaatcaatatgacctcacttaaaacagaaactctgaggatggcctttatgagggagctggcaattgaacatcattcatctaaatatgcacactggaggcaagatgagaattcctgacagattgtccttcctgagaagacagccctctgccttggagctccagagagagggagccctgtattcttggctgtacccgtcgaatggagttttgatctcgctgagtttggagttgggggaggaaaggagtggtcttggttcaaatgtgactcacttttgctgttcttgtgaatgttagatcttctttaataaatatttatttcccatacacccttatgaccattacagagactgaa

SEQ ID NO: 426059 - DNA, 890 bp, Homo sapiens
tatcagagactgtattggggttttggcaggaaaggcatgcagggtgggatgaggagcttaaaactcagtggtttgcataagtctggcagccttagggctaagagattatcccttattgtgtggtgacagggcttgtgttgattaggacaggagaaataatcatgtatgagcattagatagtggttcagcatatgggatctggatcgcaagggaaatgtaaaaacattggctgttagtttggccctccaattcttagattttaagtagataaatacagatctaaggaaacacagaataagaagttgttcatagactgaagtgtcataattttggcaggattgtatggtctttgaggatgtggccatatatttctcccaagaggaatgggggatccttaatgatgctcagagacacctgcacagcaatgtgatgttggagaactttgcgcttttgtcatcagtaggttgttggcatggagccaaggatgaggaggtaccttccaagcagtgtgtttctgtaagagtgttacaggtcacaattccaaagccagctttgtccaccctgaaggcccagccctgcaagatgtgtagctcaattctgaaggacattctgcacctggctgagcacgatggaacacaccctgagcaagggctgtacacatgtgcagcagagcatgacctgcaccaaaaggagcagattagagagaagctcaccagaagtgatgagtggaggccttcatttgtgaaccacagtgctcacgtgggagagaggaacttcacatgcacgcagggtggcaaggattttactgccagctcagaccttctccagcaacaggtcttaaacagtgggtggaagctgtacagggatacccaggatggggaagcctttca

SEQ ID NO: 426060 - DNA, 739 bp, Homo sapiens
tccatttttgatgccacacacagggtttccccttattgtgagttgtcatgtgactccctgaagccatcactgaaggctttcctacagctactgcattacctgggcagctccccagtagatactttttttttggtagggggaaagtttgagctcaaagttttaccatacagattacactcacaagatttctctctagagtgagttaacctgtgggtgattgaatgctactcccatattgatcagtttagaagttggctgggcatggtggttcatgcctgtaatcccagtacttctggaggccaagatgaaaggactgcttgaacctaggagtttgagactagtctgggcaacatggcaaaaccctccctctagtttaaaaaaaaacaaattagccagacatggtgtcatgcacctgtagtcccagctacattggaggctggggcaggagaattacttgatcccaggaagtagaggctgcagtgagctgtgatcacaccactgcgctccagactgggtgacagagtgagacattgtcttaaaaaaaaaaaaatgagggtcagctgaaggctttcctccactgatttcatggcaagttttccagatggttccaaatgtctactgttcatacctcctgtggtgttcttccacattgtatcaggattggtgtgtatgaccaatgtaacagggacatgaaaacatatctcactgaagctaggtcataaaagacattatgctttct

SEQ ID NO: 426061 - DNA, 407 bp, Homo sapiens
ccctgtctcaaaaaataaattgtataaattgttatcttacactgagttaggttcctaaaaatgtggaaaaatgacattctaatactgatggaattcaatggtttttctagtatgaatctcacttcttaaaaatggagagaatattcaaggcttttatagcataccaaactatactgtcttgtgcttggtaatatgactgtttgtgtcacaggcttttcaacactgtgtatactcaacatattcctctgttgtatgatctccgaaatgtgacttaaggaatgagtgtcccctggttttccatttttgatgccacacacagggtttccccttattgtgagttgtcatgtgactccctgaagccatcactgaaggctttcctacagctactgcattacctgggcagctcc

SEQ ID NO: 426062 - DNA, 395 bp, Homo sapiens
  misc_feature (226)..(226): n is a, c, g, or t
  misc_feature (276)..(276): n is a, c, g, or t
  misc_feature (282)..(282): n is a, c, g, or t
  misc_feature (288)..(288): n is a, c, g, or t
  misc_feature (296)..(296): n is a, c, g, or t
  misc_feature (315)..(315): n is a, c, g, or t
  misc_feature (325)..(325): n is a, c, g, or t
  misc_feature (353)..(353): n is a, c, g, or t
  misc_feature (360)..(360): n is a, c, g, or t
  misc_feature (378)..(378): n is a, c, g, or t
gttggaggtttaaggactgaggagcctgtgtgtaacggaggtggacaataggcaaggaatgaaagataactttgagatataaagcctaggtgaatgatccgtccattagcagatacgaagctgtcggaggagctggtttgggaaaacaggtagtgtcagtggctctagaaaaatattaagtaggttggaggttttaaggacttgagtttttgggaagagttagatngaggttccaaaacgttagatccaaggaattagatttttccgtacctttgnaaaatngaaacncttttccnttttgccattaaaatttgntttccacccnttggggagccagcccacctttttttggnaaatttngcccaccttcccccccgnttttttttcctgacccc

SEQ ID NO: 426063 - DNA, 5663 bp, Homo sapiens
gaattcggcacgagcacttccttctcggctagattatctgaaactgttgtcggttcttgagatgatactaccaccgaatgtctgtgtttcattgtctagtccaacctgtattgtggatatctacaacgttccggcaatagttttgcaggtgcatcacatttttgtttttgttttgggaggaaaagggagggcacggcagccaggcttcatattcctacaagtgcatgcttcaagattactgtacttacagtgtttccaacatcttctcataaaaggggaaagcttcatagcctcaaccatgaaggaaaccagtcgcatagggcatggagctggagaactataaacagcccgtggtgctgagagaggacaactgccgaaggcgccggaggatgaagccgcgcagtgctgcggccagcctgtcctccatggagctcatccccatcgagttcgtgctgcccaccagccagcgcaaatgcaagagccccgaaacggcgctgctgcacgtggccggccacggcaacgtggagcagatgaaggcccaggtgtggctgcgagcgctggagaccagcgtggcggcggacttctaccaccggctgggaccgcatcacttcctcctgctctatcagaagaaggggcagtggtacgagatctacgacaagtaccaggtggtgcagactctggactgcctgcgctactggaaggccacgcaccggagcccgggccagatccacctggtgcagcggcacccgccctccgaggagtcccaagccttccagcggcagctcacggcgctgattggctatgacgtcactgacgtcagcaacgtgcacgacgatgagctggagttcacgcgccgtggcttggtgaccccgcgcatggcggaggtggccagccgcgaccccaagctctacgccatgcacccgtgggtgacgtccaagcccctcccggagtacctgtggaagaagattgccaacaactgcatcttcatcgtcattcaccgcagcaccaccagccagaccattaaggtctcacccgacgacacccccggcgccatcctgcagagcttcttcaccaagatggccaagaagaaatctctgatggatattcccgaaagccaaagcgaacaggattttgtgctgcgcgtctgtggccgggatgagtacctggtgggcgaaacgcccatcaaaaacttccagtgggtgaggcactgcctcaagaacggagaagagattcacgtggtactggacacgcctccagacccggccctagacgaggtgaggaaggaagagtggccgctggtggacgactgcacgggagtcaccggctaccatgagcagcttaccatccacggcaaggaccacgagagtgtgttcaccgtgtccctgtgggactgcgaccgcaagttcagggtcaagatcagaggcattgatatccccgtcctgcctcggaacaccgacctcacagtttttgtagaggcaaacatccagcatgggcaacaagtcctttgccaaaggagaaccagccccaaacccttcacagaggaggtgctgtggaatgtgtggcttgagttcagtatcaaaatcaaagacttgcccaaaggggctctactgaacctccagatctactgcggtaaagctccagcactgtccagcaaggcctctgcagagtcccccagttctgagtccaagggcaaagttcggcttctctattatgtgaacctgctgctgatagaccaccgtttcctcctgcgccgtggagaatacgtcctccacatgtggcagatatctgggaagggagaagaccaaggaagcttcaatgctgacaaactcacgtctgcaactaacccagacaaggagaactcaatgtccatctccattcttctggacaattactgccacccgatagccctgcctaagcatcagcccacccctgacccggaaggggaccgggttcgagcagaaatgcccaaccagcttcgcaagcaattggaggcgatcatagccactgatccacttaaccctctcacagcagaggacaaagaattgctctggcattttagatacgaaagccttaagcacccaaaagcatatcctaagctatttagttcagtgaaatggggacagcaagaaattgtggccaaaacataccaattgttggccagaagggaagtctgggatcaaagtgctttggatgttgggttaacaatgcagctcctggactgcaacttctcagatgaaaatgtaagagccattgcagttcagaaactggagagcttggaggacgatgatgttctgcattaccttctacaattggtccaggctgtgaaatttgaaccataccatgatagcgcccttgccagatttctgctgaagcgtggtttaagaaacaaaagaattggtcactttttgttttggttcttgagaagtgagatagcccagtccagacactatcagcagaggttcgctgtgattctggaagcctatctgaggggctgtggcacagccatgctgcacgactttacccaacaagtccaagtaatcgagatgttacaaaaagtcacccttgatattaaatcgctctctgctgaaaagtatgacgtcagttcccaagttatttcacaacttaaacaaaagcttgaaaacctgcagaattctcaactccccgaaagctttagagttccatatgatcctggactgaaagcaggagcgctggcaattgaaaaatgtaaagtaatggcctccaagaaaaaaccactatggcttgagtttaaatgtgccgatcctacagccctatcaaatgaaacaattggaattatctttaaacatggtgatgatctgcgccaagacatgcttattttacagattctacgaatcatggagtctatttgggagactgaatctttggatctatgcctcctgccatatggttgcatttcaactggtgacaaaataggaatgatcgagattgtgaaagacgccacgacaattgccaaaattcagcaaagcacagtgggcaacacgggagcatttaaagatgaagtcctgaatcactggctcaaagaaaaatcccctactgaagaaaagtttcaggcagcagtggagagatttgtttattcctgtgcaggctactgtgtggcaacctttgttcttggaataggcgacagacacaatgacaatattatgatcaccgagacaggaaacctatttcatattgacttcgggcacattcttgggaattacaaaagtttcctgggcattaataaagagagagtgccatttgtgctaacccctgacttcctctttgtgatgggaacttctggaaagaagacaagcccacacttccagaaatttcaggacatctgtgttaaggcttatctagcccttcgtcatcacacaaacctactgatcatcctgttctccatgatgctgatgacaggaatgccccagttaacaagcaaagaagacattgaatatatccgggatgccctcacagtggggaaaaatgaggaggatgctaaaaagtattttcttgatcagatcgaagtttgcagagacaaaggatggactgtgcagtttaattggtttctacatcttgttcttggcatcaaacaaggagagaaacattcagcctaatactttaggctagaatcaaaaacaagttagtgttctatggtttaaattagcatagcaatcatcgaacttggatttcaaatgcaatagacattgtgaaagctggcatttcagaagtatagctcttttcctacctgaactcttccctggagaaaagatgttggcattgctgattgtttggttaagcaatgtccagtgctaggattatttgcaggtttggttttttctcatttgtctgtggcattggagaatattctcggtttaaacagactaatgacttccttattgtccctgatattttgactatcttactattgagtgcttctggaaattctttggaataattgatgacatctattttcatctgggtttagtctcaattttggttatctttgtgttcctcaagctctttaaagaaaaagatgtaatcgttgtaacctttgtctcattccttaaatgatgcttccaaacatctccttagtgtctgcaggtgttagtggtgtgctaaaagcaaggaaagcgagttagtcttttcagtgtcttttgcaattcaattcttttgtcatgtataactgagacacacaaacacagcaggagaaatctaaaccgttgtgccttgaccttcctctgctggtcttgttccagggttatgaatatgaaaaaatagagatgagactttttgtgtcaactctgtccacaagagtgagttatctagtatgattagtatagctttctccagcatggcagcaggaagtaactacagggcctcttttatgcctgacatttcttcccttcctttttccctgcctccctttttcatcaattgcgatgctcccacaactctttacagacttgtgaaatcttcaagaacacctttactctataactcaaaaattagttgaaaaataattacttctcaaggattattagaatcttaggtacttatttgtaaagatgtttagtgacttttttttcaagtatcttattaaaggaggcattctagaaaatatgaattagtttccaaatgccttaattttaaactttggcctgaacagttttttctttttcttaatggaagaagatatttaatatcttaaaaatattccaagttaggaagaacactacttgccttatccatttcccatttaaaggacttttaaactttgacacatccttcagatttcctgaaaataattgaaatatcttactttaaaaatattttcatctctgaaatatctcgttatttattggaggtattgtttaaccttagagagaccattaaattatttataaaatattttgtaattacctgtagctaatacattacatagaaaaaaactatgttaacagtgtctctgtttaagtataatcagatataaatatatacttaattttttaattttaaaaatagatacctgtttgactttgaggtagtccagaccttttctttttttttttttttttaatgtgtgcaaaagcccaaaggttcctaagcctggctgcaaagaagaatcaacagggacactttttaaaaacactcttatcagcctgggcaacacagtgagactccatctcttaaaaaaaaaattagctgggtatagtggtatgtgcctgtagtcccaggtactcaggaggctgaggcaggaggattgcctgagcccaggaggtggaaactgcagagagtcatgatcatgtccttacactccagcctggataacagagcgagaccctgtctcaaaaaaataaaataaaaaataaaaacacccttgcctgcgctccattcccaggttataatttaattactgtgggatgagacccagacatcaatatttttctagattcttcaggtgattctaattcacagccagagttggaagccctgcgtggcctttgaaggtctagatgattcttcttccttgccctttgagcttttccccatctcacaggtatctagaaaaaaactcctcttctttggcaacctgtccttttaaaatcacactctacccacctgtacagaagaccatgccctataat

SEQ ID NO: 426064 - DNA, 1463 bp, Homo sapiens
gaaaaaatagagatgagactttttcatattcataaccctggaacaagaccagcagaggaaggtcaaggcacaacggttatgaatatgaaaaaatagagatgagactttttgtgtcaactctgtccacaagagtgagttatctagtatgattagtatagctttctccagcatggcagcaggaagtaactacagggcctcttttatgcctgacatttcttcccttcctttttccctgcctccctttttcatcaattgcgatgctcccacaactctttacagacttgtgaaatcttcaagaacacctttactctataactcaaaaattagttgaaaaataattacttctcaaggattattagaatcttaggtacttatttgtaaagatgtttagtgacttttttttcaagtatcttattaaaggaggcattctagaaaatatgaattagtttccaaatgccttaattttaaactttggcctgaacagttttttctttttcttaatggaagaagatatttaatatcttaaaaatattccaagttaggaagaacactacttgccttatccatttcccatttaaaggacttttaaactttgacacatccttcagatttcctgaaaataattgaaatatcttactttaaaaatattttcatctctgaaatatctcgttatttattggaggtattgtttaaccttagagagaccattaaattatttataaaatattttgtaattacctgtagctaatacattacatagaaaaaaactatgttaacagtgtctctgtttaagtataatcagatataaatatatacttaattttttaattttaaaaatagatacctgtttgactttgaggtagtccagaccttttctttttttttttttttttaatgtgtgcaaaagcccaaaggttcctaagcctggctgcaaagaagaatcaacagggacactttttaaaaacactcttatcagcctgggcaacacagtgagactccatctcttaaaaaaaaaattagctgggtatagtggtatgtgcctgtagtcccaggtactcaggaggctgaggcaggaggattgcctgagcccaggaggtggaaactgcagagagtcatgatcatgtccttacactccagcctggataacagagcgagaccctgtctcaaaaaaataaaataaaaaataaaaacacccttgcctgcgctccattcccaggttataatttaattactgtgggatgagacccagacatcaatatttttctagattcttcaggtgattctaattcacagccagagttggaagccctgcgtggcctttgaaggtctagatgattcttcttccttgccctttgagcttttccccatctcacaggtatctagaaaaaaactcctcttctttggcaacctgtccttttaaaatcacactctacccacctgtacagaagaccatgccctataat

SEQ ID NO: 426065 - DNA, 3433 bp, Homo sapiens
gacgcacactgggtaggtttgaatttgttttgttttcaaaaattaaacaaatgatccttcagcatcatcgcctccgctgctttatcaggctgtgaaatttgaaccataccatgatagcgcccttgccagatttctgctgaagcgtggtttaagaaacaaaagaattggtcactttttgttttggttcttgagaagtgagatagcccagtccagacactatcagcagaggttcgctgtgattctggaagcctatctgaggggctgtggcacagccatgctgcacgactttacccaacaagtccaagtaatcgagatgttacaaaaagtcacccttgatattaaatcgctctctgctgaaaagtatgacgtcagttcccaagttatttcacaacttaaacaaaagcttgaaaacctgcagaattctcaactccccgaaagctttagagttccatatgatcctggactgaaagcaggagcgctggcaattgaaaaatgtaaagtaatggcctccaagaaaaaaccactatggcttgagtttaaatgtgccgatcctacagccctatcaaatgaaacaattggaattatctttaaacatggtgatgatctgcgccaagacatgcttattttacagattctacgaatcatggagtctatttgggagactgaatctttggatctatgcctcctgccatatggttgcatttcaactggtgacaaaataggaatgatcgagattgtgaaagacgccacgacaattgccaaaattcagcaaagcacagtgggcaacacgggagcatttaaagatgaagtcctgaatcactggctcaaagaaaaatcccctactgaagaaaagtttcaggcagcagtggagagatttgtttattcctgtgcaggctactgtgtggcaacctttgttcttggaataggcgacagacacaatgacaatattatgatcaccgagacaggaaacctatttcatattgacttcgggcacattcttgggaattacaaaagtttcctgggcattaataaagagagagtgccatttgtgctaacccctgacttcctctttgtgatgggaacttctggaaagaagacaagcccacacttccagaaatttcaggacatctgtgttaaggcttatctagcccttcgtcatcacacaaacctactgatcatcctgttctccatgatgctgatgacaggaatgccccagttaacaagcaaagaagacattgaatatatccgggatgccctcacagtggggaaaaatgaggaggatgctaaaaagtattttcttgatcagatcgaagtttgcagagacaaaggatggactgtgcagtttaattggtttctacatcttgttcttggcatcaaacaaggagagaaacattcagcctaatactttaggctagaatcaaaaacaagttagtgttctatggtttaaattagcatagcaatcatcgaacttggatttcaaatgcaatagacattgtgaaagctggcatttcagaagtatagctcttttcctacctgaactcttccctggagaaaagatgttggcattgctgattgtttggttaagcaatgtccagtgctaggattatttgcaggtttggttttttctcatttgtctgtggcattggagaatattctcggtttaaacagactaatgacttccttattgtccctgatattttgactatcttactattgagtgcttctggaaattctttggaataattgatgacatctattttcatctgggtttagtctcaattttggttatctttgtgttcctcaagctctttaaagaaaaagatgtaatcgttgtaacctttgtctcattccttaaatgatgcttccaaacatctccttagtgtctgcaggtgttagtggtgtgctaaaagcaaggaaagcgagttagtcttttcagtgtcttttgcaattcaattcttttgtcatgtataactgagacacacaaacacagcaggagaaatctaaaccgttgtgccttgaccttcctctgctggtcttgttccagggttatgaatatgaaaaaatagagatgagactttttgtgtcaactctgtccacaagagtgagttatctagtatgattagtatagctttctccagcatggcagcaggaagtaactacagggcctcttttatgcctgacatttcttcccttcctttttccctgcctccctttttcatcaattgcgatgctcccacaactctttacagacttgtgaaatcttcaagaacacctttactctataactcaaaaattagttgaaaaataattacttctcaaggattattagaatcttaggtacttatttgtaaagatgtttagtgacttttttttcaagtatcttattaaaggaggcattctagaaaatatgaattagtttccaaatgccttaattttaaactttggcctgaacagttttttctttttcttaatggaagaagatatttaatatcttaaaaatattccaagttaggaagaacactacttgccttatccatttcccatttaaaggacttttaaactttgacacatccttcagatttcctgaaaataattgaaatatcttactttaaaaatattttcatctctgaaatatctcgttatttattggaggtattgtttaaccttagagagaccattaaattatttataaaatattttgtaattacctgtagctaatacattacatagaaaaaaactatgttaacagtgtctctgtttaagtataatcagatataaatatatacttaattttttaattttaaaaatagatacctgtttgactttgaggtagtccagaccttttctttttttttttttttttaatgtgtgcaaaagcccaaaggttcctaagcctggctgcaaagaagaatcaacagggacactttttaaaaacactcttatcagcctgggcaacacagtgagactccatctcttaaaaaaaaaattagctgggtatagtggtatgtgcctgtagtcccaggtactcaggaggctgaggcaggaggattgcctgagcccaggaggtggaaactgcagagagtcatgatcatgtccttacactccagcctggataacagagcgagaccctgtctcaaaaaaataaaataaaaaataaaaacacccttgcctgcgctccattcccaggttataatttaattactgtgggatgagacccagacatcaatatttttctagattcttcaggtgattctaattcacagccagagttggaagccctgcgtggcctttgaaggtctagatgattcttcttccttgccctttgagcttttccccatctcacaggtatctagaaaaaaactcctcttctttggcaacctgtccttttaaaatcacactctacccacctgtacagaagaccatgccctataat

SEQ ID NO: 426066 - DNA, 698 bp, Homo sapiens
ttagttgcataacttaaaaatatgaggaaattttggaatatatctctaaaaccacggaattgtcactgaaatatatatttcttgagacagtgggcaaagttcccatttatgggaaatactttccttttttcacacacatgaaactgagaaaaattatatcaaatgagaaatatttttctctaaaataatcttaagtaccccaataatgcaatactggggaaatgtaaattttcaaaactcagatttgaaacaggttattattaaacaaatatacataaatcttattgtttggcaagatttttcaaaaattagagaactagttaaaccaccatactgtccttaaatcatatttcaaacttacatacctagtgcttttatgttctgaatgtagagtcttcaatttaatgacaatctagactgaatgctgtaatatacaagcaagtcacagttcacttcaaaccaaaagaaataatcagtcttctgtttttatcaaaatcatgatattaagataactatacaatttatctgtgaccagtgatggacccagagagtgttgtgttatggcattctgtggaaagtctttgttccttctttacttttggcttcttcttctgaaacatcttctttatccgcctcttgttcttcctccagttttttcaaaggttgagcagattctgataatttttttgaagggtatg

SEQ ID NO: 426067 - DNA, 330 bp, Homo sapiens
gtgtggattctgtcttcaacttgcttccaaaaactgaggtgtttggccaggcacagaggctcctcccctctcactattcagcacacacctgctcacagtttactacaaaccaagcacctagccagactatttcccaaaatcactgctctcattcaatggcctgctaagctaagttccttaccacaatcttcccacataaaggtgacctctgctttgggggatacagaatttaagcatcacaaaaatctgtatgggataagaaaagcacgttggctaaaagatagctaatgaggactctagtcctaactctgctatcaaactacatatgca

SEQ ID NO: 426068 - DNA, 658 bp, Homo sapiens
tgaaaagaattaacccggcaagtcccgtcccactcccccagctcagaggtcctttttactagagctgccctagagagttagctggagatgtagagtcaccccatcaggtgctgtgccggccgctcggctgtgtctcctgcgtgtcttaacgtcccttgtgtccggatttccatttcagatcaagggaatgaaggaccgcctggagttctggtgcacggatgtgaagagcatggagatgctggtggagcaccaggcccatgacatcctcacctagggccccctggttccccgtcgtgtctcctttgactcacctgagagaggcgtttgcagccaatgaagctggctgctcagacggtcgacattgaatttgggtgggggttgggatcctgtctgaagtacagactgttcttgctctaaaaacaggactgtccctgatgggagccaggccacagggaggaggcttctttgtgggtctctcctgcagagggtgggggtctcagggtcttaggtgatacgggagagaaagaacgtgccaggcaggaggccccctgaagtctgtgtactccgaggtggatctccatccccatccacctgtacggacatcttttccgttgcggtttgagaatgttcctataataaacccctctgctttgttctt

SEQ ID NO: 426069 - DNA, 1601 bp, Homo sapiens
cgccggaagtgggagcatttccggcagccatccccgcggtgctgacatcccggttgttcttctgtgccgggggtcttcctgctgtcatgaaggacgtaccgggcttcctacagcagagccagagctccgggcccgggcagcccgctgtgtggcaccgtctggaggagctctacacgaagaagttgtggcatcagctgacacttcaggtgcttgattttgtgcaggatccgtgctttgcccaaggagatggtctcattaagctttatgaaaactttatcagtgaatttgaacacagggtgaatcctctgtccctcgtggaaatcattcttcacgtagttagacagatgactgatcctaatgtggctcttacttttctggaaaagactcgtgagaaggtgaaaagtagtgatgaggcagtgatcctgtgtaaaacagcaattggagctctaaaattaaacatcggggacctacaggttacaaaggaaacaattgaagatgttgaagaaatgctcaacaaccttcctggtgtgacatcggttcacagtcgtttctatgatctctccagtaaatactatcaaacaatcggaaaccacgcgtcctactacaaagatgctctgcggtttttgggctgtgttgacatcaaggatctaccagtgtctgagcagcaggagagagccttcacgctggggctagcaggacttctcggcgagggagtttttaactttggagaactcctcatgcaccctgtgctggagtccctgaggaatactgaccggcagtggctgattgacaccctctatgccttcaacagtggcaacgtagagcggttccagactctgaagactgcctggggccagcagcctgatttagcagctaatgaagcccagcttctgaggaaaattcagttgttgtgcctcatggagatgactttcacacgacctgccaatcacagacaactcacttttgaagaaattgccaaaagtgctaaaatcacagtgaatgaggtggagcttctggtgatgaaggccctttcggtggggctggtgaaaggcagtatagacgaggtggacaaacgagtccacatgacctgggtgcagccccgagtgttggatttgcaacagatcaagggaatgaaggaccgcctggagttctggtgcacggatgtgaagagcatggagatgctggtggagcaccaggcccatgacatcctcacctagggccccctggttccccgtcgtgtctcctttgactcacctgagagaggcgtttgcagccaatgaagctggctgctcagacggtcgacattgaatttgggtgggggttgggatcctgtctgaagtacagactgttcttgctctaaaaacaggactgtccctgatgggagccaggccacagggaggaggcttctttgtgggtctctcctgcagagggtgggggtctcagggtcttaggtgatacgggagagaaagaacgtgccaggcaggaggccccctgaagtctgtgtactccgaggtggatctccatccccatccacctgtacggacatcttttccgttgcggtttgagaatgttcctataataaacccctctgctttgttctt

SEQ ID NO: 426070 - DNA, 2095 bp, Homo sapiens
  misc_feature (1618)..(1618): n is a, c, g, or t
  misc_feature (2095)..(2095): n is a, c, g, or t
cgccggaagtgggagcatttccggcagccatccccgcggtgctgacatcccggttgttcttctgtgccgggggtcttcctgctgtcatgaaggacgtaccgggcttcctacagcagagccagagctccgggcccgggcagcccgctgtgtggcaccgtctggaggagctctacacgaagaagttgtggcatcagctgacacttcaggtgcttgattttgtgcaggatccgtgctttgcccaaggagatggtctcattaagctttatgaaaactttatcagtgaatttgaacacagggtgaatcctctgtccctcgtggaaatcattcttcacgtagttagacagatgactgatcctaatgtggctcttacttttctggaaaagactcgtgagaaggtgaaaagtagtgatgaggcagtgatcctgtgtaaaacagcaattggagctctaaaattaaacatcggggacctacaggttacaaaggaaacaattgaagatgttgaagaaatgctcaacaaccttcctggtgtgacatcggttcacagtcgtttctatgatctctccagtaaatactatcaaacaatcggaaaccacgcgtcctactacaaagatgctctgcggtttttgggctgtgttgacatcaaggatctaccagtgtctgagcagcaggagagagccttcacgctggggctagcaggacttctcggcgagggagtttttaactttggagaactcctcatgcaccctgtgctggagtccctgaggaatactgaccggcagtggctgattgacaccctctatgccttcaacagtggcaacgtagagcggttccagactctgaagactgcctggggccagcagcctgatttagcagctaatgaagcccagcttctgaggaaaattcagttgttgtgcctcatggagatgactttcacacgacctgccaatcacagacaactcacttttgaagaaattgccaaaagtgctaaaatcacagtgaatgaggtggagcttctggtgatgaaggccctttcggtggggctggtgaaaggcagtatagacgaggtggacaaacgagtccacatgacctgggtgcagccccgagtgttggatttgcaacagatcaagggaatgaaggaccgcctggagttctggtgcacggatgtgaagagcatggagatgctggtggagcaccaggcccatgacatcctcacctagggccccctggttccccgtcgtgtctcctttgactcacctgagagaggcgtttgcagccaatgaagctggctgctcagacggtcgacattgaatttgggtgggggttgggatcctgtctgaagtacagactgttcttgctctaaaaacaggactgtccctgatgggagccaggccacagggaggaggcttctttgtgggtctctcctgcagagggtgggggtctcagggtcttaggtgatacgggagagaaagaacgtgccaggcaggaggccccctgaagtctgtgtactccgaggtggatctccatccccatccacctgtacggacatcttttccgttgcggtttgagaatgttcctataataaacccctctgctttgttcttaaaaaaaaaaaacacanaaaaaaatctggggacataaataaagggggcggaaacaagggcactggacatggcccatgggtcaaagacggataccgagaccaaatttcttggcaccaagggggaaaacacaggagaacccataaagggaagccaaaaaattcggaagaccaggtaactgtgaaaagacaaaacacaaaggcgaaacagacgaacagacagcaagaacggggggggagacaaccgcgcccagagagggaggaagcaaagaggaaaacagacagaggacgagacgaccccgccgcacaacagacaaaagagagagagagaatagaggacaaaagcagagaggaaaagcaagaaaagcaggcgagagacgaggagcggagcggggaagaacaagacgagacaaagaacagagcgaaagaacgagcagaggaggagccgggccagaagacgaggagggagagaagagcgacaggagcaggagcgtggan

SEQ ID NO: 426071 - DNA, 667 bp, Homo sapiens
cgccggaagtgggagcatttccggcagccatccccgcggtgctgacatcccggttgttcttctgtgccgggggtcttcctgctgtcatgaaggacgtaccgggcttcctacagcagagccagagctccgggcccgggcagcccgctgtgtggcaccgtctggaggagctctacacgaagaagttgtggcatcagctgacacttcaggtgcttgattttgtgcaggatccgtgctttgcccaaggagatggtctcattaagctttatgaaaactttatcagtgaatttgaacacagggtgaatcctctgtccctcgtggaaatcattcttcacgtagttagacagatgactgatcctaatgtggctcttacttttctggaaaagactcgtgagaaggtgaaaagtagtgatgaggcagtgatcctgtgtaaaacagcaattggagctctaaaattaaacatcggggacctacaggttacaaaggaaacaattgaagatgttgaagaaatgctcaacaaccttcctggtgtgacatcggttcacagtcgtttctatgatctctccatccccatccacctgtacggacatcttttccgttgcggtttgagaatgttcctataataaacccctctgctttgttctttcttctcgtctctcttttcttgggc

SEQ ID NO: 426072 - DNA, 419 bp, Homo sapiens
  misc_feature (263)..(263): n is a, c, g, or t
  misc_feature (265)..(265): n is a, c, g, or t
  misc_feature (272)..(272): n is a, c, g, or t
  misc_feature (274)..(274): n is a, c, g, or t
  misc_feature (280)..(282): n is a, c, g, or t
  misc_feature (288)..(288): n is a, c, g, or t
cgccggaagtgggagcatttccggcagccatccccgcggtgctgacatcccggttgttcttctgtgccgggggtcttcctgctgtcatgaaggacgtaccgggcttcctacagcagagccagagctccgggcccgggcagcccgctgtgtggcaccgtctggaggagctctacacgaagaagttgtggcatcagctgacacttcaggtgcttgattttgtgcaggatccgtgctttgcccaaggagatggtctcattaagctntntgaaaantntatcannnaatttnaacacagagggagtaccctgtgccccgcgggagatcactcttaacggggagagagaaatgtctcttctcatagtggcgctccctcttctcgagaagactctcgagagaggaaaagagggtgatgcgcagtt

SEQ ID NO: 426073 - DNA, 376 bp, Homo sapiens
ctgatgggagccaggccacagggaggaggcttctttgtgggtctctcctgcagagggtgggggtctcagggtcttaggtgatactggagttctggtgcacggatgtgaagagcatggagatgctggtggagcaccaggcccatgacatcctcacctagggccccctggttccccgtcgtgtctcctttgactcacctgagagaggcgtttgcagccaatgaagctggctgctcagacggtcgacattgaatttgggtgggggttgggatccttctgtgtactccgaggtggatctccatccccatccacctgtacggacatcttttccgttgcggtttgagaatgttcctataataaacccctctgctttgttctt

SEQ ID NO: 426074 - DNA, 279 bp, Homo sapiens
agttcgacggagactctccaaagtaaaacttcttctcggcgagggagtttttaactttggaggactcctcatgcaccctgtgctggagtccctgaggaatactgaccggcagtggctgattgacaccctctatgccttcaacagtggcaacgtagagcggttccagactctgaagactgcctggggccagcagtgaaggctctctcctgctgctcagacactggtagatccttgatgtcaacacagcaggagagagtctccgtcgaactgggtaccgag

SEQ ID NO: 426075 - DNA, 1862 bp, Homo sapiens
cgccggaagtgggagcatttccggcagccatccccgcggtgctgacatcccggttgttcttctgtgccgggggtcttcctgctgtcatgaaggacgtaccgggcttcctacagcagagccagagctccgggcccgggcagcccgctgtgtggcaccgtctggaggagctctacacgaagaagttgtggcatcagctgacacttcaggtgcttgattttgtgcaggatccgtgctttgcccaaggagatggtctcattaagctttatgaaaactttatcagtgaatttgaacacagggtgaatcctctgtccctcgtggaaatcattcttcacgtagttagacagatgactgatcctaatgtggctcttacttttctggaaaagactcgtgagaaggtgaaaagtagtgatgaggcagtgatcctgtgtaaaacagcaattggagctctaaaattaaacatcggggacctacaggttacaaaggaaacaattgaagatgttgaagaaatgctcaacaaccttcctggtgtgacatcggttcacagtcgtttctatgatctctccagtaaatactatcaaacaatcggaaaccacgcgtcctactacaaagatgctctgcggtttttgggctgtgttgacatcaaggatctaccagtgtctgagcagcaggagagagccttcacgctggggctagcaggacttctcggcgagggagtttttaactttggagaactcctcatgcaccctgtgctggagtccctgaggaatactgaccggcagtggctgattgacaccctctatgccttcaacagtggcaacgtagagcggttccagactctgaagactgcctggggccagcagcctgatttagcagctaatgaagcccagcttctgaggaaaattcagttgttgtgcctcatggagatgactttcacacgacctgccaatcacagacaactcacttttgaagaaattgccaaaagtgctaaaatcacagtgaatgaggtggagcttctggtgatgaaggccctttcggtggggctggtgaaaggcagtatagacgaggtggacaaacgagtccacatgacctgggtgcagccccgagtgttggatttgcaacagatcaagggaatgaaggaccgcctggagttctggtgcacggatgtgaagagcatggagatgctggtggagcaccaggcccatgacatcctcacctagggccccctggttccccgtcgtgtctcctttgactcacctgagagaggcgtttgcagccaatgaagctggctgctcagacggtcgacattgaatttgggtgggggttgggatcctgtctgaagtacagactgttcttgctctaaaaacaggactgtccctgatgggagccaggccacagggaggaggcttctttgtgggtctctcctgcagagggtgggggtctcagggtcttaggtgatacgggagagaaagaacgtgccaggcaggaggccccctgaagtctgtgtactccgaggtggatctccatccccatccacctgtacggacatcttttccgttgcggtttgagaatgttcctataataaacccctctgctttgttcttgttaaaaacaacaagcatatatggtgcagggggggggcgctgaaagatgtcgtggggggggcaagatttcggttacccggctttgttggacgaggtggcctatagggggctgatataagacaggccgtgcgcgtttacacggcgagggaaaaggtcggggggatttggggagagaacaattggggggtgacagttggacactacgattaggccagggaaaaacttgggtagggtaacagctttgggaatggcgggcttcat

SEQ ID NO: 426076 - DNA, 1626 bp, Homo sapiens
cgccggaagtgggagcatttccggcagccatccccgcggtgctgacatcccggttgttcttctgtgccgggggtcttcctgctgtcatgaaggacgtaccgggcttcctacagcagagccagagctccgggcccgggcagcccgctgtgtggcaccgtctggaggagctctacacgaagaagttgtggcatcagctgacacttcaggtgcttgattttgtgcaggatccgtgctttgcccaaggagatggtctcattaagctttatgaaaactttatcagtgaatttgaacacagggtgaatcctctgtccctcgtggaaatcattcttcacgtagttagacagatgactgatcctaatgtggctcttacttttctggaaaagactcgtgagaaggtgaaaagtagtgatgaggcagtgatcctgtgtaaaacagcaattggagctctaaaattaaacatcggggacctacaggttacaaaggaaacaattgaagatgttgaagaaatgctcaacaaccttcctggtgtgacatcggttcacagtcgtttctatgatctctccagtaaatactatcaaacaatcggaaaccacgcgtcctactacaaagatgctctgcggtttttgggctgtgttgacatcaaggatctaccagtgtctgagcagcaggagagagccttcacgctggggctagcaggacttctcggcgagggagtttttaactttggagaactcctcatgcaccctgtgctggagtccctgaggaatactgaccggcagtggctgattgacaccctctatgccttcaacagtggcaacgtagagcggttccagactctgaagactgcctggggccagcagcctgatttagcagctaatgaagcccagcttctgaggaaaattcagttgttgtgcctcatggagatgactttcacacgacctgccaatcacagacaactcacttttgaagaaattgccaaaagtgctaaaatcacagtgaatgaggtggagcttctggtgatgaaggccctttcggtggggctggtgaaaggcagtatagacgaggtggacaaacgagtccacatgacctgggtgcagccccgagtgttggatttgcaacagatcaagggaatgaaggaccgcctggagttctggtgcacggatgtgaagagcatggagatgctggtggagcaccaggcccatgacatcctcacctagggccccctggttccccgtcgtgtctcctttgactcacctgagagaggcgtttgcagccaatgaagctggctgctcagacggtcgacattgaatttgggtgggggttgggatcctgtctgaagtacagactgttcttgctctaaaaacaggactgtccctgatgggagccaggccacagggaggaggcttctttgtgggtctctcctgcagagggtgggggtctcagggtcttaggtgatacgggagagaaagaacgtgccaggcaggaggccccctgaagtctgtgtactccgaggtggatctccatccccatccacctgtacggacatcttttccgttgcggtttgagaatgttcctataataaacccctctgctttgttctttcttctcgtctctcttttcttgggc

SEQ ID NO: 426077 - DNA, 1703 bp, Homo sapiens
cgccggaagtgggagcatttccggcagccatccccgcggtgctgacatcccggttgttcttctgtgccgggggtcttcctgctgtcatgaaggacgtaccgggcttcctacagcagagccagagctccgggcccgggcagcccgctgtgtggcaccgtctggaggagctctacacgaagaagttgtggcatcagctgacacttcaggtgcttgattttgtgcaggatccgtgctttgcccaaggagatggtctcattaagctttatgaaaactttatcagtgaatttgaacacagggtgaatcctctgtccctcgtggaaatcattcttcacgtagttagacagatgactgatcctaatgtggctcttacttttctggaaaagactcgtgagaaggtgaaaagtagtgatgaggcagtgatcctgtgtaaaacagcaattggagctctaaaattaaacatcggggacctacaggttacaaaggaaacaattgaagatgttgaagaaatgctcaacaaccttcctggtgtgacatcggttcacagtcgtttctatgatctctccagtaaatactatcaaacaatcggaaaccacgcgtcctactacaaagatgctctgcggtttttgggctgtgttgacatcaaggatctaccagtgtctgagcagcaggagagagccttcacgctggggctagcaggacttctcggcgagggagtttttaactttggagaactcctcatgcaccctgtgctggagtccctgaggaatactgaccggcagtggctgattgacaccctctatgccttcaacagtggcaacgtagagcggttccagactctgaagactgcctggggccagcagcctgatttagcagctaatgaagcccagcttctgaggaaaattcagttgttgtgcctcatggagatgactttcacacgacctgccaatcacagacaactcacttttgaagaaattgccaaaagtgctaaaatcacagtgaatgaggtggagcttctggtgatgaaggccctttcggtggggctggtgaaaggcagtatagacgaggtggacaaacgagtccacatgacctgggtgcagccccgagtgttggatttgcaacagatcaagggaatgaaggaccgcctggagttctggtgcacggatgtgaagagcatggagatgctggtggagcaccaggcccatgacatcctcacctagggccccctggttccccgtcgtgtctcctttgactcacctgagagaggcgtttgcagccaatgaagctggctgctcagacggtcgacattgaatttgggtgggggttgggatcctgtctgaagtacagactgttcttgctctaaaaacaggactgtccctgatgggagccaggccacagggaggaggcttctttgtgggtctctcctgtaaagtgaggtgtacttagggccataggagcttctgcatagacttgaacgttcagtcgtaaggccccctggagcctgtgtattcccaggtggaactaatctccattgaccggtacggacatattatccgttgcgggtctagaaggtgctaatatttaccactgcggtttgcttaacatctacttacttacaaatctccagggtatgactcgatcctcatacccctttgtgccagtctatttacctttacttgacctcatgttagcataagtacattgag

SEQ ID NO: 426078 - DNA, 1435 bp, Homo sapiens
cgccggaagtgggagcatttccggcagccatccccgcggtgctgacatcccggttgttcttctgtgccgggggtcttcctgctgtcatgaaggacgtaccgggcttcctacagcagagccagagctccgggcccgggcagcccgctgtgtggcaccgtctggaggagctctacacgaagaagttgtggcatcagctgacacttcaggtgcttgattttgtgcaggatccgtgctttgcccaaggagatggtctcattaagctttatgaaaactttatcagtgaatttgaacacagggtgaatcctctgtccctcgtggaaatcattcttcacgtagttagacagatgactgatcctaatgtggctcttacttttctggaaaagactcgtgagaaggtgaaaagtagtgatgaggcagtgatcctgtgtaaaacagcaattggagctctaaaattaaacatcggggacctacaggttacaaaggaaacaattgaagatgttgaagaaatgctcaacaaccttcctggtgtgacatcggttcacagtcgtttctatgatctctccagtaaatactatcaaacaatcggaaaccacgcgtcctactacaaagatgctctgcggtttttgggctgtgttgacatcaaggatctaccagtgtctgagcagcaggagagagccttcacgctggggctagcaggacttctcggcgagggagtttttaactttggagaactcctcatgcaccctgtgctggagtccctgaggaatactgaccggcagtggctgattgacaccctctatgccttcaacagtggcaacgtagagcggttccagactctgaagactgcctggggccagcagcctgatttagcagctaatgaagcccagcttctgaggaaaattcagttgttgtgcctcatggagatgactttcacacgacctgccaatcacagacaactcacttttgaagaaattgccaaaagtgctaaaatcacagtgaatgaggtggagcttctggtgatgaaggccctttcggtggggctggtgaaaggcagtatagacgaggtggacaaacgagtccacatgacctgggtgcagccccgagtgttggatttgcaacagatcaagggaatgaaggaccgcctggagttctggtgcacggatgtgaagagcatggagatgctggtggagcaccaggcccatgacatcctcacctagggccccctggttccccgtcgtgtctcctttgactcacctgagagaggcgtttgcagccaatgaagctggctgctcagacggtcgacattgaatttgggtgggggttgggatccttctgtgtactccgaggtggatctccatccccatccacctgtacggacatcttttccgttgcggtttgagaatgttcctataataaacccctctgctttgttctt

SEQ ID NO: 426079 - DNA, 1403 bp, Homo sapiens
cgccggaagtgggagcatttccggcagccatccccgcggtgctgacatcccggttgttcttctgtgccgggggtcttcctgctgtcatgaaggacgtaccgggcttcctacagcagagccagagctccgggcccgggcagcccgctgtgtggcaccgtctggaggagctctacacgaagaagttgtggcatcagctgacacttcaggtgcttgattttgtgcaggatccgtgctttgcccaaggagatggtctcattaagctttatgaaaactttatcagtgaatttgaacacagggtgaatcctctgtccctcgtggaaatcattcttcacgtagttagacagatgactgatcctaatgtggctcttacttttctggaaaagactcgtgagaaggtgaaaagtagtgatgaggcagtgatcctgtgtaaaacagcaattggagctctaaaattaaacatcggggacctacaggttacaaaggaaacaattgaagatgttgaagaaatgctcaacaaccttcctggtgtgacatcggttcacagtcgtttctatgatctctccagtaaatactatcaaacaatcggaaaccacgcgtcctactacaaagatgctctgcggtttttgggctgtgttgacatcaaggatctaccagtgtctgagcagcaggagagagccttcacgctggggctagcaggacttctcggcgagggagtttttaactttggagaactcctcatgcaccctgtgctggagtccctgaggaatactgaccggcagtggctgattgacaccctctatgccttcaacagtggcaacgtagagcggttccagactctgaagactgcctggggccagcagcctgatttagcagctaatgaagcccagcttctgaggaaaattcagttgttgtgcctcatggagatcaagggaatgaaggaccgcctggagttctggtgcacggatgtgaagagcatggagatgctggtggagcaccaggcccatgacatcctcacctagggccccctggttccccgtcgtgtctcctttgactcacctgagagaggcgtttgcagccaatgaagctggctgctcagacggtcgacattgaatttgggtgggggttgggatcctgtctgaagtacagactgttcttgctctaaaaacaggactgtccctgatgggagccaggccacagggaggaggcttctttgtgggtctctcctgcagagggtgggggtctcagggtcttaggtgatacgggagagaaagaacgtgccaggcaggaggccccctgaagtctgtgtactccgaggtggatctccatccccatccacctgtacggacatcttttccgttgcggtttgagaatgttcctataataaacccctctgctttgttctt

SEQ ID NO: 426080 - DNA, 1474 bp, Homo sapiens
cgccggaagtgggagcatttccggcagccatccccgcggtgctgacatcccggttgttcttctgtgccgggggtcttcctgctgtcatgaaggacgtaccgggcttcctacagcagagccagagctccgggcccgggcagcccgctgtgtggcaccgtctggaggagctctacacgaagaagttgtggcatcagctgacacttcaggtgcttgattttgtgcaggatccgtgctttgcccaaggagatggtctcattaagctttatgaaaactttatcagtgaatttgaacacagggtgaatcctctgtccctcgtggaaatcattcttcacgtagttagacagatgactgatcctaatgtggctcttacttttctggaaaagactcgtgagaaggtgaaaagtagtgatgaggcagtgatcctgtgtaaaacagcaattggagctctaaaattaaacatcggggacctacaggttacaaaggaaacaattgaagatgttgaagaaatgctcaacaaccttcctggtgtgacatcggttcacagtcgtttctatgatctctccagtaaatactatcaaacaatcggaaaccacgcgtcctactacaaagatgctctgcggtttttgggctgtgttgacatcaaggatctaccagtgtctgagcagcaggagagagccttcacgctggggctagcaggacttctcggcgagggagtttttaactttggagaactcctcatgcaccctgtgctggagtccctgaggaatactgaccggcagtggctgattgacaccctctatgccttcaacagtggcaacgtagagcggttccagactctgaagactgcctggggccagcagcctgatttagcagctaatgaagcccagcttctgaggaaaattcagttgttgtgcctcatggagatgactttcacacgacctgccaatcacagacaactcacttttgaagaaattgccaaaagtgctaaaatcacagtgaatgaggtggagcttctggtgatgaaggccctttcggtggggctggtgaaaggcagtatagacgaggtggacaaacgagtccacatgacctgggtgcagccccgagtgttggatttgcaacagatcaagggaatgaaggaccgcctggagttctggtgcacggatgtgaagagcatggagatgctggtggagcaccaggcccatgacatctacacggccctgttccgtcggttctgatactgagagaggttgcagcagagtgctgtagacgtacatgattggtggggtgggatcctgttgagacagctgtctgcttaacagacggtctatgagcagccaagagagctctgtgtttctgaagtgagttagtcaggtacgagacgagaacgtcagaagcctatcgatcaggtcctcaatccgcatctccgttagataacttcagcaagggttcatatagaagccttgtcttggtggtc

SEQ ID NO: 426081 - DNA, 1566 bp, Homo sapiens
cgccggaagtgggagcatttccggcagccatccccgcggtgctgacatcccggttgttcttctgtgccgggggtcttcctgctgtcatgaaggacgtaccgggcttcctacagcagagccagagctccgggcccgggcagcccgctgtgtggcaccgtctggaggagctctacacgaagaagttgtggcatcagctgacacttcaggtgcttgattttgtgcaggatccgtgctttgcccaaggagatggtctcattaagggtgaatcctctgtccctcgtggaaatcattcttcacgtagttagacagatgactgatcctaatgtggctcttacttttctggaaaagactcgtgagaaggtgaaaagtagtgatgaggcagtgatcctgtgtaaaacagcaattggagctctaaaattaaacatcggggacctacaggttacaaaggaaacaattgaagatgttgaagaaatgctcaacaaccttcctggtgtgacatcggttcacagtcgtttctatgatctctccagtaaatactatcaaacaatcggaaaccacgcgtcctactacaaagatgctctgcggtttttgggctgtgttgacatcaaggatctaccagtgtctgagcagcaggagagagccttcacgctggggctagcaggacttctcggcgagggagtttttaactttggagaactcctcatgcaccctgtgctggagtccctgaggaatactgaccggcagtggctgattgacaccctctatgccttcaacagtggcaacgtagagcggttccagactctgaagactgcctggggccagcagcctgatttagcagctaatgaagcccagcttctgaggaaaattcagttgttgtgcctcatggagatgactttcacacgacctgccaatcacagacaactcacttttgaagaaattgccaaaagtgctaaaatcacagtgaatgaggtggagcttctggtgatgaaggccctttcggtggggctggtgaaaggcagtatagacgaggtggacaaacgagtccacatgacctgggtgcagccccgagtgttggatttgcaacagatcaagggaatgaaggaccgcctggagttctggtgcacggatgtgaagagcatggagatgctggtggagcaccaggcccatgacatcctcacctagggccccctggttccccgtcgtgtctcctttgactcacctgagagaggcgtttgcagccaatgaagctggctgctcagacggtcgacattgaatttgggtgggggttgggatcctgtctgaagtacagactgttcttgctctaaaaacaggactgtccctgatgggagccaggccacagggaggaggcttctttgtgggtctctcctgcagagggtgggggtctcagggtcttaggtgatacgggagagaaagaacgtgccaggcaggaggccccctgaagtctgtgtactccgaggtggatctccatccccatccacctgtacggacatcttttccgttgcggtttgagaatgttcctataataaacccctctgctttgttctt

SEQ ID NO: 426082 - DNA, 1686 bp, Homo sapiens
cgccggaagtgggagcatttccggcagccatccccgcggtgctgacatcccggttgttcttctgtgccgggggtcttcctgctgtcatgaaggacgtaccgggcttcctacagcagagccagagctccgggcccgggcagcccgctgtgtggcaccgtctggaggagctctacacgaagaagttgtggcatcagctgacacttcaggtgcttgattttgtgcaggatccgtgctttgcccaaggagatggtctcattaagctttatgaaaactttatcagtgaatttgaacacaggtaaaagcctctcatccgtttttcactttggagatgagtacattgatgctcggtggtgctcaaagactggtggcttttatttcagggtgaatcctctgtccctcgtggaaatcattcttcacgtagttagacagatgactgatcctaatgtggctcttacttttctggaaaagactcgtgagaaggtgaaaagtagtgatgaggcagtgatcctgtgtaaaacagcaattggagctctaaaattaaacatcggggacctacaggttacaaaggaaacaattgaagatgttgaagaaatgctcaacaaccttcctggtgtgacatcggttcacagtcgtttctatgatctctccagtaaatactatcaaacaatcggaaaccacgcgtcctactacaaagatgctctgcggtttttgggctgtgttgacatcaaggatctaccagtgtctgagcagcaggagagagccttcacgctggggctagcaggacttctcggcgagggagtttttaactttggagaactcctcatgcaccctgtgctggagtccctgaggaatactgaccggcagtggctgattgacaccctctatgccttcaacagtggcaacgtagagcggttccagactctgaagactgcctggggccagcagcctgatttagcagctaatgaagcccagcttctgaggaaaattcagttgttgtgcctcatggagatgactttcacacgacctgccaatcacagacaactcacttttgaagaaattgccaaaagtgctaaaatcacagtgaatgaggtggagcttctggtgatgaaggccctttcggtggggctggtgaaaggcagtatagacgaggtggacaaacgagtccacatgacctgggtgcagccccgagtgttggatttgcaacagatcaagggaatgaaggaccgcctggagttctggtgcacggatgtgaagagcatggagatgctggtggagcaccaggcccatgacatcctcacctagggccccctggttccccgtcgtgtctcctttgactcacctgagagaggcgtttgcagccaatgaagctggctgctcagacggtcgacattgaatttgggtgggggttgggatcctgtctgaagtacagactgttcttgctctaaaaacaggactgtccctgatgggagccaggccacagggaggaggcttctttgtgggtctctcctgcagagggtgggggtctcagggtcttaggtgatacgggagagaaagaacgtgccaggcaggaggccccctgaagtctgtgtactccgaggtggatctccatccccatccacctgtacggacatcttttccgttgcggtttgagaatgttcctataataaacccctctgctttgttctt

SEQ ID NO: 426083 - DNA, 1625 bp, Homo sapiens
cgccggaagtgggagcatttccggcagccatccccgcggtgctgacatcccggttgttcttctgtgccgggggtcttcctgctgtcatgaaggacgtaccgggcttcctacagcagagccagagctccgggcccgggcagcccgctgtgtggcaccgtctggaggagctctacacgaagaagttgtggcatcagctgacacttcaggtgcttgattttgtgcaggatccgtgctttgcccaaggagatggtctcattaagctttatgaaaactttatcagtgaatttgaacacagggtgaatcctctgtccctcgtggaaatcattcttcacgtagttagacagatgactgatttccacgagggacagaggattcatcctaatgtggctcttacttttctggaaaagactcgtgagaaggtgaaaagtagtgatgaggcagtgatcctgtgtaaaacagcaattggagctctaaaattaaacatcggggacctacaggttacaaaggaaacaattgaagatgttgaagaaatgctcaacaaccttcctggtgtgacatcggttcacagtcgtttctatgatctctccagtaaatactatcaaacaatcggaaaccacgcgtcctactacaaagatgctctgcggtttttgggctgtgttgacatcaaggatctaccagtgtctgagcagcaggagagagccttcacgctggggctagcaggacttctcggcgagggagtttttaactttggagaactcctcatgcaccctgtgctggagtccctgaggaatactgaccggcagtggctgattgacaccctctatgccttcaacagtggcaacgtagagcggttccagactctgaagactgcctggggccagcagcctgatttagcagctaatgaagcccagcttctgaggaaaattcagttgttgtgcctcatggagatgactttcacacgacctgccaatcacagacaactcacttttgaagaaattgccaaaagtgctaaaatcacagtgaatgaggtggagcttctggtgatgaaggccctttcggtggggctggtgaaaggcagtatagacgaggtggacaaacgagtccacatgacctgggtgcagccccgagtgttggatttgcaacagatcaagggaatgaaggaccgcctggagttctggtgcacggatgtgaagagcatggagatgctggtggagcaccaggcccatgacatcctcacctagggccccctggttccccgtcgtgtctcctttgactcacctgagagaggcgtttgcagccaatgaagctggctgctcagacggtcgacattgaatttgggtgggggttgggatcctgtctgaagtacagactgttcttgctctaaaaacaggactgtccctgatgggagccaggccacagggaggaggcttctttgtgggtctctcctgcagagggtgggggtctcagggtcttaggtgatacgggagagaaagaacgtgccaggcaggaggccccctgaagtctgtgtactccgaggtggatctccatccccatccacctgtacggacatcttttccgttgcggtttgagaatgttcctataataaacccctctgctttgttctt

SEQ ID NO: 426084 - DNA, 1013 bp, Homo sapiens
agttcgacggagactctcctgatgctctgcggtttttgggctgtgttgacatcaaggatctaccagtgtctgagcagcaggagagagccttcacgctggggctagcaggacttctcggcgagggagtttttaactttggagaactcctcatgcaccctgtgctggagtccctgaggaatactgaccggcagtggctgattgacaccctctatgccttcaacagtggcaacgtagagcggttccagactctgaagactgcctggggccagcagcctgatttagcagctaatgaagcccagcttctgaggaaaattcagttgttgtgcctcatggagatgactttcacacgacctgccaatcacagacaactcacttttgaagaaattgccaaaagtgctaaaatcacagtgaatgaggtggagcttctggtgatgaaggccctttcggtggggctggtgaaaggcagtatagacgaggtggacaaacgagtccacatgacctgggtgcagccccgagtgttggatttgcaacagatcaagggaatgaaggaccgcctggagttctggtgcacggatgtgaagagcatggagatgctggtggagcaccaggcccatgacatcctcacctagggccccctggttccccgtcgtgtctcctttgactcacctgagagaggcgtttgcagccaatgaagctggctgctcagacggtcgacattgaatttgggtgggggttgggatcctgtctgaagtacagactgttcttgctctaaaaacaggactgtccctgatgggagccaggccacagggaggaggcttctttgtgggtctctcctgcagagggtgggggtctcagggtcttaggtgatacgggagagaaagaacgtgccaggcaggaggccccctgaagtctgtgtactccgaggtggatctccatccccatccacctgtacggacatcttttccgttgcggtttgagaatgttcctataataaacccctctgctttgttctt

SEQ ID NO: 426085 - DNA, 963 bp, Homo sapiens
  misc_feature (900)..(900): n is a, c, g, or t
  misc_feature (904)..(904): n is a, c, g, or t
cgccggaagtgggagcatttccggcagccatccccgcggtgctgacatcccggttgttcttctgtgccgggggtcttcctgctgtcatgaaggacgtaccgggcttcctacagcagagccagagctccgggcccgggcagcccgctgtgtggcaccgtctggaggagctctacacgaagaagttgtggcatcagctgacacttcaggtgcttgattttgtgcaggatccgtgctttgcccaaggagatggtctcattaagctttatgaaaactttatcagtgaatttgaacacagggtgaatcctctgtccctcgtggaaatcattcttcacgtagttagacagatgactgatcctaatgtggctcttacttttctggaaaagactcgtgagaaggtgaaaagtagtgatgaggcagtgatcctgtgtaaaacagcaattggagctctaaaattaaacatcggggacctacaggttacaaaggaaacaattgaagatgttgaagaaatgctcaacaaccttcctggtgtgacatcggttcacagtcgtttctatgatctctccagtaaatactatcaaacaatcggaaaccacgcgtcctactacaaagatgctctgcggtttttgggctgtgttgacatcaaggatctaccagtgtctgagcagcaggagagagccttcacgctggggctagcaggacttctcggcgagggagtttttaactttggagaactcctcatgcaccctgtgctggagtccctgaggaatactgaccggcagtggctgattgacaccctctatgccttcaacagtggcaacgtagagcggttccagactctgaagactgcctggggccagcagcctgaattagcagctaatgaagccaagcttctgaggaaantcangtgatgctcatgggttacttcacacaccccgcccatccagaccccctttgggaatgcca

SEQ ID NO: 426086 - DNA, 1323 bp, Homo sapiens
cgccggaagtgggagcatttccggcagccatccccgcggtgctgacatcccggttgttcttctgtgccgggggtcttcctgctgtcatgaaggacgtaccgggcttcctacagcagagccagagctccgggcccgggcagcccgctgtgtggcaccgtctggaggagctctacacgaagaagttgtggcatcagctgacacttcaggtgcttgattttgtgcaggatccgtgctttgcccaaggagatggtctcattaagctttatgaaaactttatcagtgaatttgaacacagggtgaatcctctgtccctcgtggaaatcattcttcacgtagttagacagatgactgatcctaatgtggctcttacttttctggaaaagactcgtgagaaggtgaaaagtagtgatgaggcagtgatcctgtgtaaaacagcaattggagctctaaaattaaacatcggggacctacaggttacaaaggaaacaattgaagatgttgaagaaatgctcaacaaccttcctggtgtgacatcggttcacagtcgtttctatgatctctccagtaaatactatcaaacaatcggaaaccacgcgtcctactacaaagatgctctgcggtttttgggctgtgttgacatcaaggatctaccagtgtctgagcagcaggagagagccttcacgctggggctagcaggacttctcggcgagggagtttttaactttggagaactcctcatgcaccctgtgctggagtccctgaggaatactgaccggcagtggctgattgacaccctctatgccttcaacagtggcaacgtagagcggttccagactctgaagactgcctggggccagcaggtaggactcccacgatgcccagcccttattcccccatgtgtctactcgctcatacaacagatgttcattgagcgtcttccctaggcacacaggaaagaacagggcaaagaggagaccaagataggctagtccttgctctcatagagcagagagttaagtggttggttagctacagcattactcagtgctgcagacaaagagtgagggtgttctgagaaaacagaatcgaatgtgggccctgcatctacgctgggtggagggggtgtcacagaagatgtagaagtcatagtgacctaaggtctgtgtgaccttaggaatgagtgaagaggtacgggaagagtgcactcagcggagaaaacggaaaagtttagtatctttgctgaactgaaagagggatgtgtgaggctaacatgagtgggtgggagagagcatgggatgaaggaggaacaaatgcctggtgaag

SEQ ID NO: 426087 - DNA, 1109 bp, Homo sapiens
tactttttgttatatgagatttttaaagctaaacaggactgattattatgactggattgtaagtgggcctgtgttgctaccatagttgtctgagcagcaggagagagccttcacgctggggctagcaggacttctcggcgagggagtttttaactttggagaactcgtaagttgaccctgagctcagcttccttaacgagagagactaaagtgttactagctgaccatctccatcctcacagctcatgcaccctgtgctggagtccctgaggaatactgaccggcagtggctgattgacaccctctatgccttcaacagtggcaacgtagagcggttccagactctgaagactgcctggggccagcagcctgatttagcagctaatgaagcccagcttctgaggaaaattcagttgttgtgcctcatggagatgactttcacacgacctgccaatcacagacaactcacttttgaagaaattgccaaaagtgctaaaatcacagtgaatgaggtggagcttctggtgatgaaggccctttcggtggggctggtgaaaggcagtatagacgaggtggacaaacgagtccacatgacctgggtgcagccccgagtgttggatttgcaacagatcaagggaatgaaggaccgcctggagttctggtgcacggatgtgaagagcatggagatgctggtggagcaccaggcccatgacatcctcacctagggccccctggttccccgtcgtgtctcctttgactcacctgagagaggcgtttgcagccaatgaagctggctgctcagacggtcgacattgaatttgggtgggggttgggatcctgtctgaagtacagactgttcttgctctaaaaacaggactgtccctgatgggagccaggccacagggaggaggcttctttgtgggtctctcctgcagagggtgggggtctcagggtcttaggtgatacgggagagaaagaacgtgccaggcaggaggccccctgaagtctgtgtactccgaggtggatctccatccccatccacctgtacggacatcttttccgttgcggtttgagaatgttcctataataaacccctctgctttgttctt

SEQ ID NO: 426088 - DNA, 878 bp, Homo sapiens
ccccgtgatgcagttgttgcctcattgcatgtcgcttcttgtgtacacgcacatctgtctttccccactagaacttaagcttcgtcaggaagtggcccttagatttctggtttgccgtggtcacccctggtcaaccctggcaaattgtggcctcaagtacttgttcggggattgaacaatggctactgtcagaaactcctatgactttcacacgacctgccaatcacagacaactcacttttgaagaaattgccaaaagtgctaaaatcacagtgaatgaggtggagcttctggtgatgaaggccctttcggtggggctggtgaaaggcagtatagacgaggtggacaaacgagtccacatgacctgggtgcagccccgagtgttggatttgcaacagatcaagggaatgaaggaccgcctggagttctggtgcacggatgtgaagagcatggagatgctggtggagcaccaggcccatgacatcctcacctagggccccctggttccccgtcgtgtctcctttgactcacctgagagaggcgtttgcagccaatgaagctggctgctcagacggtcgacattgaatttgggtgggggttgggatcctgtctgaagtacagactgttcttgctctaaaaacaggactgtccctgatgggagccaggccacagggaggaggcttctttgtgggtctctcctgcagagggtgggggtctcagggtcttaggtgatacgggagagaaagaacgtgccaggcaggaggccccctgaagtctgtgtactccgaggtggatctccatccccatccacctgtacggacatcttttccgttgcggtttgagaatgttcctataataaacccctctgctttgttctt

SEQ ID NO: 426089 - DNA, 1083 bp, Homo sapiens
ccccgtgatgcagttgttgcctcattgcatgtcgcttcttgtgtacacgcacatctgtctttccccactagaacttaagcttcgtcaggaagtggcccttagatttctggtttgccgtggtcacccctggtcaaccctggcaaattgtggcctcaagtacttgttcggggattgaacaatggctactgtcagaaactcctgtaaggcattttgctgttatccttcttatctaagcattaaaagcttgttcttaacaagatatatgtctaatattaggaaactttttagtatgtggggtactaataagatctctattttcagagccaatattgacaaaacatccttatcagttctctatttttatttggaaaaatagtttaaaatagttaataaaattttttccagatgactttcacacgacctgccaatcacagacaactcacttttgaagaaattgccaaaagtgctaaaatcacagtgaatgaggtggagcttctggtgatgaaggccctttcggtggggctggtgaaaggcagtatagacgaggtggacaaacgagtccacatgacctgggtgcagccccgagtgttggatttgcaacagatcaagggaatgaaggaccgcctggagttctggtgcacggatgtgaagagcatggagatgctggtggagcaccaggcccatgacatcctcacctagggccccctggttccccgtcgtgtctcctttgactcacctgagagaggcgtttgcagccaatgaagctggctgctcagacggtcgacattgaatttgggtgggggttgggatcctgtctgaagtacagactgttcttgctctaaaaacaggactgtccctgatgggagccaggccacagggaggaggcttctttgtgggtctctcctgcagagggtgggggtctcagggtcttaggtgatacgggagagaaagaacgtgccaggcaggaggccccctgaagtctgtgtactccgaggtggatctccatccccatccacctgtacggacatcttttccgttgcggtttgagaatgttcctataataaacccctctgctttgttctt

SEQ ID NO: 426090 - DNA, 1276 bp, Homo sapiens
ccccgtgatgcagttgttgcctcattgcatgtcgcttcttgtgtacacgcacatctgtctttccccactagaacttaagcttcgtcaggaagtggcccttagatttctggtttgccgtggtcacccctggtcaaccctggcaaattgtggcctcaagtacttgttcggggattgaacaatggctactgtcagaaactcctgtaaggcattttgctgttatccttcttatctaagcattaaaagcttgttcttaacaagatatatgtctaatattaggaaactttttagtatgtggggtactaataagatctctattttcagagccaatattgacaaaacatccttatcagttctctatttttatttggaaaaatagtttaaaatagttaataaaattttttccagatgactttcacacgacctgccaatcacagacaactcacttttgaagaaattgccaaaagtgctaaaatcacagtgaatgaggtacggtccctaggctcagggtgttagagcagcaaagctgccacatggaggagtcaaggctcttgtgtgagcgctgtgctccctagacagtaaaaaatgacgggaggagcggcatctgcttctcacaagccatctgggtccatgggggtgtgtcaggctatcttgtcttacacacgcctccctctctgcacaggtggagcttctggtgatgaaggccctttcggtggggctggtgaaaggcagtatagacgaggtggacaaacgagtccacatgacctgggtgcagccccgagtgttggatttgcaacagatcaagggaatgaaggaccgcctggagttctggtgcacggatgtgaagagcatggagatgctggtggagcaccaggcccatgacatcctcacctagggccccctggttccccgtcgtgtctcctttgactcacctgagagaggcgtttgcagccaatgaagctggctgctcagacggtcgacattgaatttgggtgggggttgggatcctgtctgaagtacagactgttcttgctctaaaaacaggactgtccctgatgggagccaggccacagggaggaggcttctttgtgggtctctcctgcagagggtgggggtctcagggtcttaggtgatacgggagagaaagaacgtgccaggcaggaggccccctgaagtctgtgtactccgaggtggatctccatccccatccacctgtacggacatcttttccgttgcggtttgagaatgttcctataataaacccctctgctttgttctt

SEQ ID NO: 426091 - DNA, 1399 bp, Homo sapiens
cgccggaagtgggagcatttccggcagccatccccgcggtgctgacatcccggttgttcttctgtgccgggggtcttcctgctgtcatgaaggacgtaccgggcttcctacagcagagccagagctccgggcccgggcagcccgctgtgtggcaccgtctggaggagctctacacgaagaagttgtggcatcagctgacacttcaggtgcttgattttgtgcaggatccgtgctttgcccaaggagatggtctcattaagctttatgaaaactttatcagtgaatttgaacacagggtgaatcctctgtccctcgtggaaatcattcttcacgtagttagacagatgactgatcctaatgtggctcttacttttctggaaaagactcgtgagaaggtgaaaagtagtgatgaggcagtgatcctgtgtaaaacagcaattggagctctaaaattaaacatcggggacctacaggttacaaaggaaacaattgaagatgttgaagaaatgctcaacaaccttcctggtgtgacatcggttcacagtcgtttctatgatctctccagtaaatactatcaaacaatcggaaaccacgcgtcctactacaaagatgctctgcggtttttgggctgtgttgacatcaaggatctaccagtgtctgagcagcaggagagagccttcacgctggggctagcaggacttctcggcgagggagtttttaactttggagaactcgtaagttgaccctgagctcagcttccttaacgagagagactaaagtgttactagctgaccatctccatcctcacagctcatgcaccctgtgctggagtccctgaggaatactgaccggcagtggctgattgacaccctctatgccttcaacagtggcaacgtagagcggttccagactctgaagactgcctggggccagcaggtaggactcccacgatgcccagcccttattcccccatgtgtctactcgctcatacaacagatgttcattgagcgtcttccctaggcacacaggaaagaacagggcaaagaggagaccaagataggctagtccttgctctcatagagcagagagttaagtggttggttagctacagcattactcagtgctgcagacaaagagtgagggtgttctgagaaaacagaatcgaatgtgggccctgcatctacgctgggtggagggggtgtcacagaagatgtagaagtcatagtgacctaaggtctgtgtgaccttaggaatgagtgaagaggtacgggaagagtgcactcagcggagaaaacggaaaagtttagtatctttgctgaactgaaagagggatgtgtgaggctaacatgagtgggtgggagagagcatgggatgaaggaggaacaaatgcctggtgaag

SEQ ID NO: 426092 - DNA, 506 bp, Homo sapiens
  misc_feature (470)..(470): n is a, c, g, or t
  misc_feature (488)..(488): n is a, c, g, or t
cgccggaagtgggagcatttccggcagccatccccgcggtgctgacatcccggttgttcttctgtgccgggggtcttcctgctgtcatgaaggacgtaccgggcttcctacagcagagccagagctccgggcccgggcagcccgctgtgtggcaccgtctggaggagctctacacgaagaagttgtggcatcagctgacacttcaggtgcttgattttgtgcaggatccgtgctttgcccaaggagatggtctcattaagctttatgaaaactttatcagtgaatttgaacacagggtgaatcctctgtccctcgtggaaatcattcttcacgtagttagacagatgactgatcctaatgtggctcttacttttctggaaaagactcgtgagaaggtgaaaagtagtgatgaggcagtgatcctgtgtaaaacagcaattggagctctaaaataacatcgggcctcagtncaaggaacattgagtgtnaagaatctcacacctcct

SEQ ID NO: 426093 - DNA, 1476 bp, Homo sapiens
cgccggaagtgggagcatttccggcagccatccccgcggtgctgacatcccggttgttcttctgtgccgggggtcttcctgctgtcatgaaggacgtaccgggcttcctacagcagagccagagctccgggcccgggcagcccgctgtgtggcaccgtctggaggagctctacacgaagaagttgtggcatcagctgacacttcaggtgcttgattttgtgcaggatccgtgctttgcccaaggagatggtctcattaagctttatgaaaactttatcagtgaatttgaacacagggtgaatcctctgtccctcgtggaaatcattcttcacgtagttagacagatgactgatcctaatgtggctcttacttttctggaaaagactcgtgagaaggtgaaaagtagtgatgaggcagtgatcctgtgtaaaacagcaattggagctctaaaattaaacatcggggacctacaggttacaaaggaaacaattgaagatgttgaagaaatgctcaacaaccttcctggtgtgacatcggttcacagtcgtttctatgatctctccagtaaatactatcaaacaatcggaaaccacgcgtcctactacaaagatgctctgcggtttttgggctgtgttgacatcaaggatctaccagtgtctgagcagcaggagagagccttcacgctggggctagcaggacttctcggcgagggagtttttaactttggagaactcctcatgcaccctgtgctggagtccctgaggaatactgaccggcagtggctgattgacaccctctatgccttcaacagtggcaacgtagagcggttccagactctgaagactgcctggggccagcagcctgatttagcagctaatgaagcccagcttctgaggaaaattcagttgttgtgcctcatggagatgactttcacacgacctgccaatcacagacaactcacttttgaagaaattgccaaaagtgctaaaatcacagtgaatgaggtggagcttctggtgatgaaggccctttcggtggggctggtgaaaggcagtatagacgaggtggacaaacgagtccacatgacctgggtgcagccccgagtgttggatttgcaacagtgactcacctgagagaggcgtttgcagccaatgaagctggctgctcagacggtcgacattgaatttgggtgggggttgggatcctgtctgaagtacagactgttcttgctctaaaaacaggactgtccctgatgggagccaggccacagggaggaggcttctttgtgggtctctcctgcagagggtgggggtctcagggtcttaggtgatacgggagagaaagaacgtgccaggcaggaggccccctgaagtctgtgtactccgaggtggatctccatccccatccacctgtacggacatcttttccgttgcggtttgagaatgttcctataataaacccctctgctttgttctt

SEQ ID NO: 426094 - DNA, 1429 bp, Homo sapiens
gtggagatgggcgtcactactgctaccctcatttcacctgcgctgtggacactgagaacatccgccgtgtgttcaacgactgccgtggcatcgataaacaccgaaaagtaagagccacattaggatcagtcatctgtctaactacgtgaagaatgatttccacgagggacagaggattcatcctaatgtggctcttacttttctggaaaagactcgtgagaaggtgaaaagtagtgatgaggcagtgatcctgtgtaaaacagcaattggagctctaaaattaaacatcggggacctacaggttacaaaggaaacaattgaagatgttgaagaaatgctcaacaaccttcctggtgtgacatcggttcacagtcgtttctatgatctctccagtaaatactatcaaacaatcggaaaccacgcgtcctactacaaagatgctctgcggtttttgggctgtgttgacatcaaggatctaccagtgtctgagcagcaggagagagccttcacgctggggctagcaggacttctcggcgagggagtttttaactttggagaactcctcatgcaccctgtgctggagtccctgaggaatactgaccggcagtggctgattgacaccctctatgccttcaacagtggcaacgtagagcggttccagactctgaagactgcctggggccagcagcctgatttagcagctaatgaagcccagcttctgaggaaaattcagttgttgtgcctcatggagatgactttcacacgacctgccaatcacagacaactcacttttgaagaaattgccaaaagtgctaaaatcacagtgaatgaggtggagcttctggtgatgaaggccctttcggtggggctggtgaaaggcagtatagacgaggtggacaaacgagtccacatgacctgggtgcagccccgagtgttggatttgcaacagatcaagggaatgaaggaccgcctggagttctggtgcacggatgtgaagagcatggagatgctggtggagcaccaggcccatgacatcctcacctagggccccctggttccccgtcgtgtctcctttgactcacctgagagaggcgtttgcagccaatgaagctggctgctcagacggtcgacattgaatttgggtgggggttgggatcctgtctgaagtacagactgttcttgctctaaaaacaggactgtccctgatgggagccaggccacagggaggaggcttctttgtgggtctctcctgcagagggtgggggtctcagggtcttaggtgatacgggagagaaagaacgtgccaggcaggaggccccctgaagtctgtgtactccgaggtggatctccatccccatccacctgtacggacatcttttccgttgcggtttgagaatgttcctataataaacccctctgctttgttctt

SEQ ID NO: 426095 - DNA, 1547 bp, Homo sapiens
cgccggaagtgggagcatttccggcagccatccccgcggtgctgacatcccggttgttcttctgtgccgggggtcttcctgctgtcatgaaggacgtaccgggcttcctacagcagagccagagctccgggcccgggcagcccgctgtgtggcaccgtctggaggagctctacacgaagaagttgtggcatcagctgacacttcaggtgcttgattttgtgcaggatccgtgctttgcccaaggagatggtctcattaagctttatgaaaactttatcagtgaatttgaacacagggtgaatcctctgtccctcgtggaaatcattcttcacgtagttagacagatgactgatcctaatgtggctcttacttttctggaaaagactcgtgagaaggtgaaaagtagtgatgaggcagtgatcctgtgtaaaacagcaattggagctctaaaaatgctcaacaaccttcctggtgtgacatcggttcacagtcgtttctatgatctctccagtaaatactatcaaacaatcggaaaccacgcgtcctactacaaagatgctctgcggtttttgggctgtgttgacatcaaggatctaccagtgtctgagcagcaggagagagccttcacgctggggctagcaggacttctcggcgagggagtttttaactttggagaactcctcatgcaccctgtgctggagtccctgaggaatactgaccggcagtggctgattgacaccctctatgccttcaacagtggcaacgtagagcggttccagactctgaagactgcctggggccagcagcctgatttagcagctaatgaagcccagcttctgaggaaaattcagttgttgtgcctcatggagatgactttcacacgacctgccaatcacagacaactcacttttgaagaaattgccaaaagtgctaaaatcacagtgaatgaggtggagcttctggtgatgaaggccctttcggtggggctggtgaaaggcagtatagacgaggtggacaaacgagtccacatgacctgggtgcagccccgagtgttggatttgcaacagatcaagggaatgaaggaccgcctggagttctggtgcacggatgtgaagagcatggagatgctggtggagcaccaggcccatgacatcctcacctagggccccctggttccccgtcgtgtctcctttgactcacctgagagaggcgtttgcagccaatgaagctggctgctcagacggtcgacattgaatttgggtgggggttgggatcctgtctgaagtacagactgttcttgctctaaaaacaggactgtccctgatgggagccaggccacagggaggaggcttctttgtgggtctctcctgcagagggtgggggtctcagggtcttaggtgatacgggagagaaagaacgtgccaggcaggaggccccctgaagtctgtgtactccgaggtggatctccatccccatccacctgtacggacatcttttccgttgcggtttgagaatgttcctataataaacccctctgctttgttctt

SEQ ID NO: 426096 - DNA, 1677 bp, Homo sapiens
cgccggaagtgggagcatttccggcagccatccccgcggtgctgacatcccggttgttcttctgtgccgggggtcttcctgctgtcatgaaggacgtaccgggcttcctacagcagagccagagctccgggcccgggcagcccgctgtgtggcaccgtctggaggagctctacacgaagaagttgtggcatcagctgacacttcaggtgcttgattttgtgcaggatccgtgctttgcccaaggagatggtctcattaagctttatgaaaactttatcagtgaatttgaacacagggtgaatcctctgtccctcgtggaaatcattcttcacgtagttagacagatgactgatcctaatgtggctcttacttttctggaaaagactcgtgagaaggtgaaaagtagtgatgaggcagtgatcctgtgtaaaacagcaattggagctctaaaattaaacatcggggacctacaggttacaaaggaaacaattgaagatgttgaagaaatgctcaacaaccttcctggtgtgacatcggttcacagtcgtttctatgatctctccagtaaatactatcaaacaatcggaaaccacgcgtcctactacaaagatgctctgcggtttttgggctgtgttgacatcaaggatctaccagtgtctgagcagcaggagagagccttcacgctggggctagcaggacttctcggcgagggagtttttaactttggagaactcgtaagttgaccctgagctcagcttccttaacgagagagactaaagtgttactagctgaccatctccatcctcacagctcatgcaccctgtgctggagtccctgaggaatactgaccggcagtggctgattgacaccctctatgccttcaacagtggcaacgtagagcggttccagactctgaagactgcctggggccagcagcctgatttagcagctaatgaagcccagcttctgaggaaaattcagttgttgtgcctcatggagatgactttcacacgacctgccaatcacagacaactcacttttgaagaaattgccaaaagtgctaaaatcacagtgaatgaggtggagcttctggtgatgaaggccctttcggtggggctggtgaaaggcagtatagacgaggtggacaaacgagtccacatgacctgggtgcagccccgagtgttggatttgcaacagatcaagggaatgaaggaccgcctggagttctggtgcacggatgtgaagagcatggagatgctggtggagcaccaggcccatgacatcctcacctagggccccctggttccccgtcgtgtctcctttgactcacctgagagaggcgtttgcagccaatgaagctggctgctcagacggtcgacattgaatttgggtgggggttgggatcctgtctgaagtacagactgttcttgctctaaaaacaggactgtccctgatgggagccaggccacagggaggaggcttctttgtgggtctctcctgcagagggtgggggtctcagggtcttaggtgatacgggagagaaagaacgtgccaggcaggaggccccctgaagtctgtgtactccgaggtggatctccatccccatccacctgtacggacatcttttccgttgcggtttgagaatgttcctataataaacccctctgctttgttctt

SEQ ID NO: 426097 - DNA, 1280 bp, Homo sapiens
cgccggaagtgggagcatttccggcagccatccccgcggtgctgacatcccggttgttcttctgtgccgggggtcttcctgctgtcatgaaggacgtaccgggcttcctacagcagagccagagctccgggcccgggcagcccgctgtgtggcaccgtctggaggagctctacacgaagaagttgtggcatcagctgacacttcaggtgcttgattttgtgcaggatccgtgctttgcccaaggagatggtctcattaagctttatgaaaactttatcagtgaatttgaacacagggtgaatcctctgtccctcgtggaaatcattcttcacgtagttagacagatgactgatcctaatgtggctcttacttttctggaaaagactcgtgagaaggtgaaaagtagtgatgaggcagtgatcctgtgtaaaacagcaattggagctctaaaattaaacatcggggacctacaggttacaaaggaaacaattgaagatgttgaagaaatgctcaacaaccttcctggtgtgacatcggttcacagtcgtttctatgatctctccagtaaatactatcaaacaatcggaaaccacgcgtcctactacaaagatgctctgcggtttttgggctgtgttgacatcaaggatctaccagaattcccagtgaatgaaggtgaagccttctggttgaataaaggccctttacggtgggcgcttggtaaaaggccagtatagcgaagtgggcaaacgagtcccacatgaccctggggtgcaagccccaagtgttggaatttgcaacagatcaagggaatgaaggaccgcctggagttctggtgcacggatgtgaagagcatggagatgctggtggagcaccaggcccatgacatcctcacctagggccccctggttccccgtcgtgtctcctttgactcacctgagagaggcgtttgcagccaatgaagctggctgctcagacggtcgacattgaatttgggtgggggttgggatcctgtctgaagtacagactgttcttgctctaaaaacaggactgtccctgatgggagccaggccacagggaggaggcttctttgtgggtctctcctgcagagggtgggggtctcagggtcttaggtgatacgggagagaaagaacgtgccaggcaggaggccccctgaagtctgtgtactccgaggtggatctccatccccatccacctgtacggacatcttttccgttgcggtttgagaatgttcctataataaacccctctgctttgttctt

SEQ ID NO: 426098 - DNA, 845 bp, Homo sapiens
cgccggaagtgggagcatttccggcagccatccccgcggtgctgacatcccggttgttcttctgtgccgggggtcttcctgctgtcatgaaggacgtaccgggcttcctacagcagagccagagctccgggcccgggcagcccgctgtgtggcaccgtctggaggagctctacacgaagaagttgtggcatcagctgacacttcaggtgcttgattttgtgcaggatccgtgctttgcccaaggagatggtctcattaagctttatgaaaactttatcagtgaatttgaacacagggtgaatcctctgtccctcgtggaaatcattcttcacgtagttagacagatgactgatcctaatgtggctcttacttttctggaaaagactcgtgagaaggtgaaaagtagtgatgaggcagtgatcctgtgtaaaacagcaattggagctctaaaattaaacatcggggacctacaggttacaaaggaaacaattgaagatgttgaagaaatgctcaacaaccttcctggtgtgacatcggttcacagtcgtttctatgatctctccagtaaatactatcaaacaatcggaaaccacgcgtcctactacaaagatgctctgcggtttttgggctgtgttgacatcaaggatctaccagtgtctgagcagcaggagagagccttcacgctggggctagcaggacttctcggcgagggagtttttaactttggagaactcctcatgcaccctgtgctggagtccctgaggaatactgaccggggtgggtggttggacctctttcttacgtggccgtagggtcccactggatgcgggcccgccgttatgata

SEQ ID NO: 426099 - DNA, 964 bp, Homo sapiens
  misc_feature (941)..(941): n is a, c, g, or t
  misc_feature (947)..(947): n is a, c, g, or t
cgccggaagtgggagcatttccggcagccatccccgcggtgctgacatcccggttgttcttctgtgccgggggtcttcctgctgtcatgaaggacgtaccgggcttcctacagcagagccagagctccgggcccgggcagcccgctgtgtggcaccgtctggaggagctctacacgaagaagttgtggcatcagctgacacttcaggtgcttgattttgtgcaggatccgtgctttgcccaaggagatggtctcattaagctttatgaaaactttatcagtgaatttgaacacagggtgaatcctctgtccctcgtggaaatcattcttcacgtagttagacagatgactgatcctaatgtggctcttacttttctggaaaagactcgtgagaaggtgaaaagtagtgatgaggcagtgatcctgtgtaaaacagcaattggagctctaaaattaaacatcggggacctacaggttacaaaggaaacaattgaagatgttgaagaaatgctcaacaaccttcctggtgtgacatcggttcacagtcgtttctatgatctctccagtaaatactatcaaacaatcggaaaccacgcgtcctactacaaagatgctctgcggtttttgggctgtgttgacatcaaggatctaccagggtaacctaggccattaaatccatgtcacacaggagcatattctccaaacttagcatctgtgagttgcttgaggtgacagttctcagaaattactaaggtggggctgggcacggtggctcacgcctgtaatcccagcactttggaaggctgaagtgagtggatccacctgaggtcaggagttcgagaccagcctggccaacatggtgaaaccctgtctctactaaaaatacaaaaaactagccacgtgtgtgttttcaatccttgggagggtgccatccacattttnacagtncctgtgcctgagaattt

SEQ ID NO: 426100 - DNA, 399 bp, Homo sapiens
aaatatagaggactgtccgaggagctcgggagggagccaggagtgaggcaagcagcattccctgacatttctgcctaagcaagggctctgcaggccaggaggagactgtcacccacaacggaatgtccttctttggaagcagctgaggacctggaaaacccagcagttcctctttccagcgttggccaaggacatgagaaagacccctcagtctgccaagctggagaatagctccctctgtgacattgaagcaagaagaaaaggcatggagagatttggctactttgtttgttcttctaaaggaacacctggttttacccgtcaactgaaatggccgtgtgtggtacattaagttcagtaagaatatacactttcagctatctgctaacagaatcaagg

SEQ ID NO: 426101 - DNA, 1277 bp, Homo sapiens
ctctgtctacctctgggcgggactgccgggtgatgagatactcggtcggcgacggtagaacgggcgacggcgacaaccgcaatcacatccacgacggtgatcatggcagagaatcacgcccagaataaagccaagctcatctctgagacccggaggaggttcgaagctgagtatgtgacagataagtcagataaatatgatgcacgtgatgttgaaaggctacaacaagatgataactgggttgaaagttacttatcttggagacataatattgtagatgaaacactgaagatgctcgatgagagttttcagtggaggaaagaaatttctgtcaatggtaagctgttcaatttaaccttgactgtaatatatactgtataaatggtattgttttacatttatctaatcatgtatttgcacatattcctagcagtcatcataaacaccagaatataattatttataaagacccagtaatattttcaaaggaacagcttataagtcttttaagtgggatcattcataaggaaatcagatcaccagagagcagaatcacactcagattcttcattcacagcagagtttcctaatctgtgtttaattcagtaccattaagcaatagcaagacagtatctttgctactaggcctagaaataaggagatactgtccatttttctcagttgttgcctatgcctttctctgtccccacagttccttgtgctaataggttaataggtacgccatatagaattgttaaatgaatgagagtcaccccaaaaatgcaagcttatccccaaggaagcctatcacagtcttctctgtatattgtttttatttttgtgggtacatagtagatgtacatattttggggtacatgcagccttaacttcttaatttctaagtctgctactagatagaatttttttccaaaaatgagagtttcaagtcttggagttttataatggtcttcaagtatatgaagacctgttagttctctccaccaaaaaattgaacaagaagaaactggcataacttctgttttcagttaggcataaagcagaattttctgtccttgaggattataacctctgaagtgacttcaatctgaagacttaacacaaaatagtcaacaataaatccagagcagatactctcctcactcttcatgcttgcagaaggaatccctgaaagggggattagtaaaaaataatgtgattggaaatttaacaaatgtaggtaatttcaacagtgaagcatttattaaccaaagaaagaa

SEQ ID NO: 426102 - DNA, 4572 bp, Homo sapiens
ctctgtctacctctgggcgggactgccgggtgatgagatactcggtcggcgacggtagaacgggcgacggcgacaaccgcaatcacatccacgacggtgatcatggcagagaatcacgcccagaataaagccaagctcatctctgagacccggaggaggttcgaagctgagtatgtgacagataagtcagataaatatgatgcacgtgatgttgaaaggctacaacaagatgataactgggttgaaagttacttatcttggagacataatattgtagatgaaacactgaagatgctcgatgagagttttcagtggaggaaagaaatttctgtcaatgaccttaatgaatcctccattcccagatggttattggaaattggtgttatttatctccatggttatgacaaagaaggtaacaaattgttctggatcagggtgaagtatcatgtaaaagaccagaaaaccatattggacaaaaagaagctcatagcattctggttggaacgttatgctaagagggaaaatgggaaacctgtaacagtgatgtttgacctgtcagaaactggaataaatagcattgacatggactttgtacgctttatcatcaactgctttaaggtttattaccctaaatacctctcaaaaatagtgatctttgatatgccttggttaatgaatgctgctttcaaaattgtgaaaacctggcttggtccagaagcagtgagcttgttgaagtttacaagcaaaaatgaagtccaggactatgtcagtgtagaatacctgcctccccacatgggtggaactgatcctttcaagtatagctatccaccactagtagatgatgacttccagaccccactgtgtgagaatgggcctattaccagtgaggatgaaacttcaagtaaagaagacatagaaagtgatggcaaagaaacattggaaacaatttctaatgaagaacaaacacctcttcttaaaaagattaacccaaccgaatctacttccaaagcagaagaaaatgaaaaagttgattcaaaagtgaaagctttcaagaaaccattgagtgtatttaaaggccccttactacacatcagcccagcagaagaactgtactttggaagtacagaatccggagagaagaaaaccttaatagtgttgacaaatgtaactaaaaatatagtggcatttaaggtgagaacaacagctccagaaaaatacagagtcaagccaagcaatagcagctgtgacccgggtgcatcagtggatatagttgtgtctccccatgggggtttaacagtctctgcccaagaccgttttctgataatggctgcagaaatggaacagtcatctggcacaggcccagcagaattaactcagttttggaaagaagttcccagaaacaaagtgatggaacataggttaagatgccatactgttgaaagcagtaaaccaaacactcttacgttaaaagacaatgctttcaatatgtcagataaaaccagtgaagatatatgtctacaactcagtcgtttactagaaagcaataggaagcttgaagaccaagttcagcgttgtatctggttccagcagctgctgctttccttaacaatgctcttgcttgcttttgtcacctctttcttctatttattgtacagttaaagaagtggtgccgggtaggaaccacggttccttcgtccattagttggaaaaagtaacagacctaaaactctaccaagctactaaaaacattgcacatctgtgcttcctaaaaggaaatatgcagcacgtggaggggaacacatacatgtcttgaaaataaactgctagaataaagaaatgctggagaaattgattataagagactatagctatttagtaaagtaagtaaaggcatatccattgtgtaaattaatagtttaaatataatttattttttccttttgatctgaatacttttaaagcttaagttttatcgtgtaaatacattagctaaactgaaaagtataagtaacatgctttgttgcagccaaaaaatgtaatctgcttttttatgacagaattattatagctgagctgacttactagcttttctatactatgtatatagaagaacatgtatattgagaaagaaaacatacttatatagaggaatttatgtaaccatgactttgtaattttgagaattcctcccagtgatggtcagtattcttttggaatgtaaaccgatttaatgccaaaccaccttaacctttgtttctcagtgttccttaacagcctgccttttattaatctcaggcttttttatgaacactctcatttcagtagaatttggaaaactaagcgtggttggaatttctttgaattctgttagtaatgcccaaaagaaaagtctcaagcagtccccctatccagtcatttttatggagtttcatgttgtccactatagctggacactgaaccttttgcctaatttattataaaggcctgaccctctattgtcccatcttcacccccattccagagcagaggagtctctgtggaccatgaattgcactgtctccctcctcatttctaaatgaaaggtattagatataaatttttttgaaaggttagttgtttgagatgctaagcaggataataaatttagattttaaaatgttccctgtaaaagtcagcccatgacaaggaaatttacaaaatactagagtatctagaagggtgaaaacaaaaaaaaataaaaagaaacacagacgcccaggtgtcagctctccgtttaaagaatgaaaaatgtaactcatgatgatctgtgaaaccttcaaactaggaccaattgacttacttgatattctgcctttgatatggtagtacccacccggtattcctaaaatcctaaaaagatacaccttgcagtagcagaggcaatgacatgagtttgttttctcattaatatgaccagtttgggtctatgttggttcacatgtacatctactttatatgaaagaaaaaacagttgtctgcctgtaaaatgttgagtttcgattgagccatgtttggagattttattactattctgaagggtagtgttgttggttttcatcttcaagaagttgattccaaaactgagttatgaagaatgatataacagttccttcaaaattggcctaggaaataaaaccttaaaaggacactggtgtgctactttgtcttaatttgggcttttctgtttcagtttgccacctccagctgtgaaatggactgcagtccaccctaagtactgtgcacagtatctccctgtgtgtgtgcacagtggcttccccttacatggtagatttttggccttaatataatctaatcccaaagtagttgtgtatgttttctgttccttggcaaataaatgaagaaataattagccaagattgaaaatgtattgtcctaacggtgtccctttaatgtttcatatgaaaaattatgttgacccactaaaatatccttgctcaatgtctggtcagttgaatttaataacatatcttgttaatgtttgtgtgtctattaaatgtgactaagcaggattactgaaaattcactataaaatcaaaggcatctaaacgtttgtacttgtcttgattaatcatatatttacacttgatttttttctgtcttcatttgtttttatttaatcataattgcatgatttttttggtactctaatcagtaattttatttttaatcatgtcattacctattcatgaccaaattaccaaggaaccaacatttagatttagatatttgttttcacttaggaatggaaattaatagattttccatgaaagcattagtgaaatatcattaccttgatctgcaagtagcctaaaaatgcgattgctggtaaacctggcctcaaatttcatactaccataactgtttttatatattgccactaattttgactggatttaatagcactttattgtacaactacaaaaaaaaatatattcctagaattgttgccagtgtaatttctctaatgttctggtgcttttcatatattttcagtatttttattactatattggtattttctttgtataaattgattgattaaaagaacatgttttctattttaatatgttttagaaaaataattacatttatgaaataaatatcatcaggaaaaaaaaaaaaaaaaaactcgagttttttttttttttttttgatagttttaaagctgtggaaaagctttattatagattttagtccagaattaaaaaagttcaaacaataattgtttggaaccccaaataattaaaaggaaacacagcattcccataaacaagcattctggcatctgttagaaattttccctcaaattatgaaaagtacctctcccatgctttcccaaggattgttataatacccacaaatatttggggatttaaggggatactttatccaaaagttttctttttaaggcatgaccctgattaattttttttcaatatctaaccatttcaagaactaccttaaataaaatggaactatttcattaatttgccacttgatcccattaagagg

SEQ ID NO: 426103 - DNA, 4217 bp, Homo sapiens
ggtaatactctagtcagaagcctcaatttgtcatgcacagataaggtatgtcacagaacacaggccttgtctaggtttctcatgggcttcaggtgttgagaaagaaggtggaatcagtctgaaactcaccccaaatcactgtagtgacatgacccttttgacagtcatgatatattttttggtaaaatttttttgaaaaagccattgattgataaactgtcttgaccaactttaaaattactgtaaattgaatgttattttcagaatgtacattctcatttgtgtttgcaaaagtcagttgttacatagaaagcaatagagaaaatcaacaaatccaaaatttggttctttggaaaatgcaacacaattgacaaacctttagctaataaagaagaaaaggaaagactcaaagtattttagtaggctcatgtgaaattattttcttgtaggatcctttcaagtatagctatccaccactagtagatgatgacttccagaccccactgtgtgagaatgggcctattaccagtgaggatgaaacttcaagtaaagaagacatagaaagtgatggcaaagaaacattggaaacaatttctaatgaagaacaaacacctcttcttaaaaagattaacccaaccgaatctacttccaaagcagaagaaaatgaaaaagttgattcaaaagtgaaagctttcaagaaaccattgagtgtatttaaaggccccttactacacatcagcccagcagaagaactgtactttggaagtacagaatccggagagaagaaaaccttaatagtgttgacaaatgtaactaaaaatatagtggcatttaaggtgagaacaacagctccagaaaaatacagagtcaagccaagcaatagcagctgtgacccgggtgcatcagtggatatagttgtgtctccccatgggggtttaacagtctctgcccaagaccgttttctgataatggctgcagaaatggaacagtcatctggcacaggcccagcagaattaactcagttttggaaagaagttcccagaaacaaagtgatggaacataggttaagatgccatactgttgaaagcagtaaaccaaacactcttacgttaaaagacaatgctttcaatatgtcagataaaaccagtgaagatatatgtctacaactcagtcgtttactagaaagcaataggaagcttgaagaccaagttcagcgttgtatctggttccagcagctgctgctttccttaacaatgctcttgcttgcttttgtcacctctttcttctatttattgtacagttaaagaagtggtgccgggtaggaaccacggttccttcgtccattagttggaaaaagtaacagacctaaaactctaccaagctactaaaaacattgcacatctgtgcttcctaaaaggaaatatgcagcacgtggaggggaacacatacatgtcttgaaaataaactgctagaataaagaaatgctggagaaattgattataagagactatagctatttagtaaagtaagtaaaggcatatccattgtgtaaattaatagtttaaatataatttattttttccttttgatctgaatacttttaaagcttaagttttatcgtgtaaatacattagctaaactgaaaagtataagtaacatgctttgttgcagccaaaaaatgtaatctgcttttttatgacagaattattatagctgagctgacttactagcttttctatactatgtatatagaagaacatgtatattgagaaagaaaacatacttatatagaggaatttatgtaaccatgactttgtaattttgagaattcctcccagtgatggtcagtattcttttggaatgtaaaccgatttaatgccaaaccaccttaacctttgtttctcagtgttccttaacagcctgccttttattaatctcaggcttttttatgaacactctcatttcagtagaatttggaaaactaagcgtggttggaatttctttgaattctgttagtaatgcccaaaagaaaagtctcaagcagtccccctatccagtcatttttatggagtttcatgttgtccactatagctggacactgaaccttttgcctaatttattataaaggcctgaccctctattgtcccatcttcacccccattccagagcagaggagtctctgtggaccatgaattgcactgtctccctcctcatttctaaatgaaaggtattagatataaatttttttgaaaggttagttgtttgagatgctaagcaggataataaatttagattttaaaatgttccctgtaaaagtcagcccatgacaaggaaatttacaaaatactagagtatctagaagggtgaaaacaaaaaaaaataaaaagaaacacagacgcccaggtgtcagctctccgtttaaagaatgaaaaatgtaactcatgatgatctgtgaaaccttcaaactaggaccaattgacttacttgatattctgcctttgatatggtagtacccacccggtattcctaaaatcctaaaaagatacaccttgcagtagcagaggcaatgacatgagtttgttttctcattaatatgaccagtttgggtctatgttggttcacatgtacatctactttatatgaaagaaaaaacagttgtctgcctgtaaaatgttgagtttcgattgagccatgtttggagattttattactattctgaagggtagtgttgttggttttcatcttcaagaagttgattccaaaactgagttatgaagaatgatataacagttccttcaaaattggcctaggaaataaaaccttaaaaggacactggtgtgctactttgtcttaatttgggcttttctgtttcagtttgccacctccagctgtgaaatggactgcagtccaccctaagtactgtgcacagtatctccctgtgtgtgtgcacagtggcttccccttacatggtagatttttggccttaatataatctaatcccaaagtagttgtgtatgttttctgttccttggcaaataaatgaagaaataattagccaagattgaaaatgtattgtcctaacggtgtccctttaatgtttcatatgaaaaattatgttgacccactaaaatatccttgctcaatgtctggtcagttgaatttaataacatatcttgttaatgtttgtgtgtctattaaatgtgactaagcaggattactgaaaattcactataaaatcaaaggcatctaaacgtttgtacttgtcttgattaatcatatatttacacttgatttttttctgtcttcatttgtttttatttaatcataattgcatgatttttttggtactctaatcagtaattttatttttaatcatgtcattacctattcatgaccaaattaccaaggaaccaacatttagatttagatatttgttttcacttaggaatggaaattaatagattttccatgaaagcattagtgaaatatcattaccttgatctgcaagtagcctaaaaatgcgattgctggtaaacctggcctcaaatttcatactaccataactgtttttatatattgccactaattttgactggatttaatagcactttattgtacaactacaaaaaaaaatatattcctagaattgttgccagtgtaatttctctaatgttctggtgcttttcatatattttcagtatttttattactatattggtattttctttgtataaattgattgattaaaagaacatgttttctattttaatatgttttagaaaaataattacatttatgaaataaatatcatcaggaaaaaaaaaaaaaaaaaactcgagttttttttttttttttttgatagttttaaagctgtggaaaagctttattatagattttagtccagaattaaaaaagttcaaacaataattgtttggaaccccaaataattaaaaggaaacacagcattcccataaacaagcattctggcatctgttagaaattttccctcaaattatgaaaagtacctctcccatgctttcccaaggattgttataatacccacaaatatttggggatttaaggggatactttatccaaaagttttctttttaaggcatgaccctgattaattttttttcaatatctaaccatttcaagaactaccttaaataaaatggaactatttcattaatttgccacttgatcccattaagagg

SEQ ID NO: 426104 - DNA, 3871 bp, Homo sapiens
ttttatttgtctaaaagtaattaatttaaaactttgatttagttcctttctctaatttttaaaagagcacttagtagttgtcactttttacaagtaatcaggaacttgatagatggataaatacaatgttataatttagaaaaatttaaagactcttaagggaaggaccatattgtattttctagagtaacctatgttatgtataatagtaggcactaaaatagatgttaatggtcatgttaatatatgctaaatagttatcctttttttttgtctttagattaacccaaccgaatctacttccaaagcagaagaaaatgaaaaagttgattcaaaagtgaaagctttcaagaaaccattgagtgtatttaaaggccccttactacacatcagcccagcagaagaactgtactttggaagtacagaatccggagagaagaaaaccttaatagtgttgacaaatgtaactaaaaatatagtggcatttaaggtgagaacaacagctccagaaaaatacagagtcaagccaagcaatagcagctgtgacccgggtgcatcagtggatatagttgtgtctccccatgggggtttaacagtctctgcccaagaccgttttctgataatggctgcagaaatggaacagtcatctggcacaggcccagcagaattaactcagttttggaaagaagttcccagaaacaaagtgatggaacataggttaagatgccatactgttgaaagcagtaaaccaaacactcttacgttaaaagacaatgctttcaatatgtcagataaaaccagtgaagatatatgtctacaactcagtcgtttactagaaagcaataggaagcttgaagaccaagttcagcgttgtatctggttccagcagctgctgctttccttaacaatgctcttgcttgcttttgtcacctctttcttctatttattgtacagttaaagaagtggtgccgggtaggaaccacggttccttcgtccattagttggaaaaagtaacagacctaaaactctaccaagctactaaaaacattgcacatctgtgcttcctaaaaggaaatatgcagcacgtggaggggaacacatacatgtcttgaaaataaactgctagaataaagaaatgctggagaaattgattataagagactatagctatttagtaaagtaagtaaaggcatatccattgtgtaaattaatagtttaaatataatttattttttccttttgatctgaatacttttaaagcttaagttttatcgtgtaaatacattagctaaactgaaaagtataagtaacatgctttgttgcagccaaaaaatgtaatctgcttttttatgacagaattattatagctgagctgacttactagcttttctatactatgtatatagaagaacatgtatattgagaaagaaaacatacttatatagaggaatttatgtaaccatgactttgtaattttgagaattcctcccagtgatggtcagtattcttttggaatgtaaaccgatttaatgccaaaccaccttaacctttgtttctcagtgttccttaacagcctgccttttattaatctcaggcttttttatgaacactctcatttcagtagaatttggaaaactaagcgtggttggaatttctttgaattctgttagtaatgcccaaaagaaaagtctcaagcagtccccctatccagtcatttttatggagtttcatgttgtccactatagctggacactgaaccttttgcctaatttattataaaggcctgaccctctattgtcccatcttcacccccattccagagcagaggagtctctgtggaccatgaattgcactgtctccctcctcatttctaaatgaaaggtattagatataaatttttttgaaaggttagttgtttgagatgctaagcaggataataaatttagattttaaaatgttccctgtaaaagtcagcccatgacaaggaaatttacaaaatactagagtatctagaagggtgaaaacaaaaaaaaataaaaagaaacacagacgcccaggtgtcagctctccgtttaaagaatgaaaaatgtaactcatgatgatctgtgaaaccttcaaactaggaccaattgacttacttgatattctgcctttgatatggtagtacccacccggtattcctaaaatcctaaaaagatacaccttgcagtagcagaggcaatgacatgagtttgttttctcattaatatgaccagtttgggtctatgttggttcacatgtacatctactttatatgaaagaaaaaacagttgtctgcctgtaaaatgttgagtttcgattgagccatgtttggagattttattactattctgaagggtagtgttgttggttttcatcttcaagaagttgattccaaaactgagttatgaagaatgatataacagttccttcaaaattggcctaggaaataaaaccttaaaaggacactggtgtgctactttgtcttaatttgggcttttctgtttcagtttgccacctccagctgtgaaatggactgcagtccaccctaagtactgtgcacagtatctccctgtgtgtgtgcacagtggcttccccttacatggtagatttttggccttaatataatctaatcccaaagtagttgtgtatgttttctgttccttggcaaataaatgaagaaataattagccaagattgaaaatgtattgtcctaacggtgtccctttaatgtttcatatgaaaaattatgttgacccactaaaatatccttgctcaatgtctggtcagttgaatttaataacatatcttgttaatgtttgtgtgtctattaaatgtgactaagcaggattactgaaaattcactataaaatcaaaggcatctaaacgtttgtacttgtcttgattaatcatatatttacacttgatttttttctgtcttcatttgtttttatttaatcataattgcatgatttttttggtactctaatcagtaattttatttttaatcatgtcattacctattcatgaccaaattaccaaggaaccaacatttagatttagatatttgttttcacttaggaatggaaattaatagattttccatgaaagcattagtgaaatatcattaccttgatctgcaagtagcctaaaaatgcgattgctggtaaacctggcctcaaatttcatactaccataactgtttttatatattgccactaattttgactggatttaatagcactttattgtacaactacaaaaaaaaatatattcctagaattgttgccagtgtaatttctctaatgttctggtgcttttcatatattttcagtatttttattactatattggtattttctttgtataaattgattgattaaaagaacatgttttctattttaatatgttttagaaaaataattacatttatgaaataaatatcatcaggaaaaaaaaaaaaaaaaaactcgagttttttttttttttttttgatagttttaaagctgtggaaaagctttattatagattttagtccagaattaaaaaagttcaaacaataattgtttggaaccccaaataattaaaaggaaacacagcattcccataaacaagcattctggcatctgttagaaattttccctcaaattatgaaaagtacctctcccatgctttcccaaggattgttataatacccacaaatatttggggatttaaggggatactttatccaaaagttttctttttaaggcatgaccctgattaattttttttcaatatctaaccatttcaagaactaccttaaataaaatggaactatttcattaatttgccacttgatcccattaagagg

SEQ ID NO: 426105 - DNA, 3301 bp, Homo sapiens
aactgtcttaggtgaacctggggaagaggaatgaggacttttacctctgttacatagacttctgtgtataactgttttcattttatattttacttttataagaaaattaactttttaagaagttatgttttctttggattttaataggttaagatgccatactgttgaaagcagtaaaccaaacactcttacgttaaaagacaatgctttcaatatgtcagataaaaccagtgaagatatatgtctacaactcagtcgtttactagaaagcaataggaagcttgaagaccaagttcagcgttgtatctggttccagcagctgctgctttccttaacaatgctcttgcttgcttttgtcacctctttcttctatttattgtacagttaaagaagtggtgccgggtaggaaccacggttccttcgtccattagttggaaaaagtaacagacctaaaactctaccaagctactaaaaacattgcacatctgtgcttcctaaaaggaaatatgcagcacgtggaggggaacacatacatgtcttgaaaataaactgctagaataaagaaatgctggagaaattgattataagagactatagctatttagtaaagtaagtaaaggcatatccattgtgtaaattaatagtttaaatataatttattttttccttttgatctgaatacttttaaagcttaagttttatcgtgtaaatacattagctaaactgaaaagtataagtaacatgctttgttgcagccaaaaaatgtaatctgcttttttatgacagaattattatagctgagctgacttactagcttttctatactatgtatatagaagaacatgtatattgagaaagaaaacatacttatatagaggaatttatgtaaccatgactttgtaattttgagaattcctcccagtgatggtcagtattcttttggaatgtaaaccgatttaatgccaaaccaccttaacctttgtttctcagtgttccttaacagcctgccttttattaatctcaggcttttttatgaacactctcatttcagtagaatttggaaaactaagcgtggttggaatttctttgaattctgttagtaatgcccaaaagaaaagtctcaagcagtccccctatccagtcatttttatggagtttcatgttgtccactatagctggacactgaaccttttgcctaatttattataaaggcctgaccctctattgtcccatcttcacccccattccagagcagaggagtctctgtggaccatgaattgcactgtctccctcctcatttctaaatgaaaggtattagatataaatttttttgaaaggttagttgtttgagatgctaagcaggataataaatttagattttaaaatgttccctgtaaaagtcagcccatgacaaggaaatttacaaaatactagagtatctagaagggtgaaaacaaaaaaaaataaaaagaaacacagacgcccaggtgtcagctctccgtttaaagaatgaaaaatgtaactcatgatgatctgtgaaaccttcaaactaggaccaattgacttacttgatattctgcctttgatatggtagtacccacccggtattcctaaaatcctaaaaagatacaccttgcagtagcagaggcaatgacatgagtttgttttctcattaatatgaccagtttgggtctatgttggttcacatgtacatctactttatatgaaagaaaaaacagttgtctgcctgtaaaatgttgagtttcgattgagccatgtttggagattttattactattctgaagggtagtgttgttggttttcatcttcaagaagttgattccaaaactgagttatgaagaatgatataacagttccttcaaaattggcctaggaaataaaaccttaaaaggacactggtgtgctactttgtcttaatttgggcttttctgtttcagtttgccacctccagctgtgaaatggactgcagtccaccctaagtactgtgcacagtatctccctgtgtgtgtgcacagtggcttccccttacatggtagatttttggccttaatataatctaatcccaaagtagttgtgtatgttttctgttccttggcaaataaatgaagaaataattagccaagattgaaaatgtattgtcctaacggtgtccctttaatgtttcatatgaaaaattatgttgacccactaaaatatccttgctcaatgtctggtcagttgaatttaataacatatcttgttaatgtttgtgtgtctattaaatgtgactaagcaggattactgaaaattcactataaaatcaaaggcatctaaacgtttgtacttgtcttgattaatcatatatttacacttgatttttttctgtcttcatttgtttttatttaatcataattgcatgatttttttggtactctaatcagtaattttatttttaatcatgtcattacctattcatgaccaaattaccaaggaaccaacatttagatttagatatttgttttcacttaggaatggaaattaatagattttccatgaaagcattagtgaaatatcattaccttgatctgcaagtagcctaaaaatgcgattgctggtaaacctggcctcaaatttcatactaccataactgtttttatatattgccactaattttgactggatttaatagcactttattgtacaactacaaaaaaaaatatattcctagaattgttgccagtgtaatttctctaatgttctggtgcttttcatatattttcagtatttttattactatattggtattttctttgtataaattgattgattaaaagaacatgttttctattttaatatgttttagaaaaataattacatttatgaaataaatatcatcaggaaaaaaaaaaaaaaaaaactcgagttttttttttttttttttgatagttttaaagctgtggaaaagctttattatagattttagtccagaattaaaaaagttcaaacaataattgtttggaaccccaaataattaaaaggaaacacagcattcccataaacaagcattctggcatctgttagaaattttccctcaaattatgaaaagtacctctcccatgctttcccaaggattgttataatacccacaaatatttggggatttaaggggatactttatccaaaagttttctttttaaggcatgaccctgattaattttttttcaatatctaaccatttcaagaactaccttaaataaaatggaactatttcattaatttgccacttgatcccattaagagg

SEQ ID NO: 426106 - DNA, 3543 bp, Homo sapiens
ctctgtctacctctgggcgggactgccgggtgatgagatactcggtcggcgacggtagaacgggcgacggcgacaaccgcaatcacatccacgacggtgatcatggcagagaatcacgcccagaataaagccaagctcatctctgagacccggaggaggttcgaagctgagtatgtgacagataagtcagataaatatgatgcacgtgatgttgaaaggctacaacaagatgataactgggttgaaagttacttatcttggagacataatattgtagatgaaacactgaagatgctcgatgagagttttcagtggaggaaagaaatttctgtcaatgaccttaatgaatcctccattcccagatggttattggaaattggtgttatttatctccatggttatgacaaagaaggtaacaaattgttctggatcagggtgaagtatcatgtaaaagaccagaaaaccatattggacaaaaagaagctcatagcattctggttggaacgttatgctaagagggaaaatgggaaacctgtaacagtgatgtttgacctgtcagaaactggaataaatagcattgacatggactttgtacgctttatcatcaactgctttaaggtttattaccctaaatacctctcaaaaatagtgatctttgatatgccttggttaatgaatgctgctttcaaaattgtgaaaacctggcttggtccagaagcagtgagcttgttgaagtttacaagcaaaaatgaagtccaggactatgtcagtgtagaatacctgcctccccacatgggtggaactgatcctttcaagtatagctatccaccactagtagatgatgacttccagaccccactgtgtgagaatgggcctattaccagtgaggatgaaacttcaagtaaagaagacatagaaagtgatggcaaagaaacattggaaacaatttctaatgaagaacaaacacctcttcttaaaaagattaacccaaccgaatctacttccaaagcagaagaaaatgaaaaagttgattcaaaagtgaaagctttcaagaaaccattgagtgtatttaaaggccccttactacacatcagcccagcagaagaactgtactttggaagtacagaatccggagagaagaaaaccttaatagtgttgacaaatgtaactaaaaatatagtggcatttaaggtgagaacaacagctccagaaaaatacagagtcaagccaagcaatagcagctgtgacccgggtgcatcagtggatatagttgtgtctccccatgggggtttaacagtctctgcccaagaccgttttctgataatggctgcagaaatggaacagtcatctggcacaggcccagcagaattaactcagttttggaaagaagttcccagaaacaaagtgatggaacataggttaagatgccatactgttgaaagcagtaaaccaaacactcttacgttaaaagacaatgctttcaatatgtcagataaaaccagtgaagatatatgtctacaactcagtcgtttactagaaagcaataggaagcttgaagaccaagttcagcgttgtatctggttccagcagctgctgctttccttaacaatgctcttgcttgcttttgtcacctctttcttctatttattgtacagttaaagaagtggtgccgggtaggaaccacggttccttcgtccattagttggaaaaagtaacagacctaaaactctaccaagctactaaaaacattgcacatctgtgcttcctaaaaggaaatatgcagcacgtggaggggaacacatacatgtcttgaaaataaactgctagaataaagaaatgctggagaaattgattataagagactatagctatttagtaaagtaagtaaaggcatatccattgtgtaaattaatagtttaaatataatttattttttccttttgatctgaatacttttaaagcttaagttttatcgtgtaaatacattagctaaactgaaaagtataagtaacatgctttgttgcagccaaaaaatgtaatctgcttttttatgacagaattattatagctgagctgacttactagcttttctatactatgtatatagaagaacatgtatattgagaaagaaaacatacttatatagaggaatttatgtaaccatgactttgtaattttgagaattcctcccagtgatggtcagtattcttttggaatgtaaaccgatttaatgccaaaccaccttaacctttgtttctcagtgttccttaacagcctgccttttattaatctcaggcttttttatgaacactctcatttcagtagaatttggaaaactaagcgtggttggaatttctttgaattctgttagtaatgcccaaaagaaaagtctcaagcagtccccctatccagtcatttttatggagtttcatgttgtccactatagctggacactgaaccttttgcctaatttattataaaggcctgaccctctattgtcccatcttcacccccattccagagcagaggagtctctgtggaccatgaattgcactgtctccctcctcatttctaaatgaaaggtattagatataaatttttttgaaaggttagttgtttgagatgctaagcaggataataaatttagattttaaaatgttccctgtaaaagtcagcccatgacaaggaaatttacaaaatactagagtatctagaagggtgaaaacaaaaaaaaataaaaagaaacacagacgcccaggtgtcagctctccgtttaaagaatgaaaaatgtaactcatgatgatctgtgaaaccttcaaactaggaccaattgacttacttgatattctgcctttgatatggtagtacccacccggtattcctaaaatcctaaaaagatacaccttgcagtagcagaggcaatgacatgagtttgttttctcattaatatgaccagtttgggtctatgttggttcacatgtacatctactttatatgaaagaaaaaacagttgtctgcctgtaaaatgttgagtttcgattgagccatgtttggagattttattactattctgaagggtagtgttgttggttttcatcttcaagaagttgattccaaaactgagttatgaagaatgatataacagttccttcaaaattggcctaggaaataaaaccttaaaaggacacaaaaaaaaaaaaaaaagaaaaaaaaaaaaaaaatagaagggaaaccaaagaacccaaaaagaactaaaaaaaagaatattggcagtgcactggtcaccccttatacaacgtagagggatagaaacattaattgcccagtgtttccaaaacgggcgttcggaaaaaccctggttgacccaaatttaatcaccttggagacaatcccctttttcgcaagttggaatataggaaaagggcctggacagactgccttttcataaaataatagccctcagaatggcaaaatgcaaatttaacgcgtaaaattttgggaaaaatggccggaaaaatttttgttacaacaatatgtttaccg

SEQ ID NO: 426107 - DNA, 4518 bp, Homo sapiens
ctctgtctacctctgggcgggactgccgggtgatgagatactcggtcggcgacggtagaacgggcgacggcgacaaccgcaatcacatccacgacggtgatcatggcagagaatcacgcccagaataaagccaagctcatctctgagacccggaggaggttcgaagctgagtatgtgacagataagtcagataaatatgatgcacgtgatgttgaaaggctacaacaagatgataactgggttgaaagttacttatcttggagacataatattgtagatgaaacactgaagatgctcgatgagagttttcagtggaggaaagaaatttctgtcaatgaccttaatgaatcctccattcccagatggttattggaaattggtgttatttatctccatggttatgacaaagaaggtaacaaattgttctggatcagggtgaagtatcatgtaaaagaccagaaaaccatattggacaaaaagaagctcatagcattctggttggaacgttatgctaagagggaaaatgggaaacctgtaacagtgatgtttgacctgtcagaaactggaataaatagcattgacatggactttgtacgctttatcatcaactgctttaaggtttattaccctaaatacctctcaaaaatagtgatctttgatatgccttggttaatgaatgctgctttcaaaattgtgaaaacctggcttggtccagaagcagtgagcttgttgaagtttacaagcaaaaatgaagtccaggactatgtcagtgtagaatacctgcctccccacatgggtggaactgatcctttcaagtatagctatccaccactagtagatgatgacttccagaccccactgtgtgagaatgggcctattaccagtgaggatgaaacttcaagtaaagaagacatagaaagtgatggcaaagaaacattggaaacaatttctaatgaagaacaaacacctcttcttaaaaagattaacccaaccgaatctacttccaaagcagaagaaaatgaaaaagttgattcaaaagtgaaagctttcaagaaaccattgagtgtatttaaaggccccttactacacatcagcccagcagaagaactgtactttggaagtacagaatccggagagaagaaaaccttaatagtgttgacaaatgtaactaaaaatatagtggcatttaaggtgagaacaacagctccagaaaaatacagagtcaagccaagcaatagcagctgtgacccgggtgcatcagtggatatagttgtgtctccccatgggggtttaacagtctctgcccaagaccgttttctgataatggctgcagaaatggaacagtcatctggcacaggcccagcagaattaactcagttttggaaagaagttcccagaaacaaagtgatggaacataggttaagatgccatactgttgaaagcagtaaaccaaacactcttacgttaaaagacaatgctttcaatatgtcagataaaaccagtgaagatatatgtctacaactcagtcgtttactagaaagcaataggaagcttgaagaccaagttcagcgttgtatctggttccagcagctgctgctttccttaacaatgctcttgcttgcttttgtcacctctttcttctatttattgtacagttaaagaagtggtgccgggtaggaaccacggttccttcgtccattagttggaaaaagtaacagacctaaaactctaccaagctactaaaaacattgcacatctgtgcttcctaaaaggaaatatgcagcacgtggaggggaacacatacatgtcttgaaaataaactgctagaataaagaaatgctggagaaattgattataagagactatagctatttagtaaagtaagtaaaggcatatccattgtgtaaattaatagtttaaatataatttattttttccttttgatctgaatacttttaaagcttaagttttatcgtgtaaatacattagctaaactgaaaagtataagtaacatgctttgttgcagccaaaaaatgtaatctgcttttttatgacagaattattatagctgagctgacttactagcttttctatactatgtatatagaagaacatgtatattgagaaaattcctcccagtgatggtcagtattcttttggaatgtaaaccgatttaatgccaaaccaccttaacctttgtttctcagtgttccttaacagcctgccttttattaatctcaggcttttttatgaacactctcatttcagtagaatttggaaaactaagcgtggttggaatttctttgaattctgttagtaatgcccaaaagaaaagtctcaagcagtccccctatccagtcatttttatggagtttcatgttgtccactatagctggacactgaaccttttgcctaatttattataaaggcctgaccctctattgtcccatcttcacccccattccagagcagaggagtctctgtggaccatgaattgcactgtctccctcctcatttctaaatgaaaggtattagatataaatttttttgaaaggttagttgtttgagatgctaagcaggataataaatttagattttaaaatgttccctgtaaaagtcagcccatgacaaggaaatttacaaaatactagagtatctagaagggtgaaaacaaaaaaaaataaaaagaaacacagacgcccaggtgtcagctctccgtttaaagaatgaaaaatgtaactcatgatgatctgtgaaaccttcaaactaggaccaattgacttacttgatattctgcctttgatatggtagtacccacccggtattcctaaaatcctaaaaagatacaccttgcagtagcagaggcaatgacatgagtttgttttctcattaatatgaccagtttgggtctatgttggttcacatgtacatctactttatatgaaagaaaaaacagttgtctgcctgtaaaatgttgagtttcgattgagccatgtttggagattttattactattctgaagggtagtgttgttggttttcatcttcaagaagttgattccaaaactgagttatgaagaatgatataacagttccttcaaaattggcctaggaaataaaaccttaaaaggacactggtgtgctactttgtcttaatttgggcttttctgtttcagtttgccacctccagctgtgaaatggactgcagtccaccctaagtactgtgcacagtatctccctgtgtgtgtgcacagtggcttccccttacatggtagatttttggccttaatataatctaatcccaaagtagttgtgtatgttttctgttccttggcaaataaatgaagaaataattagccaagattgaaaatgtattgtcctaacggtgtccctttaatgtttcatatgaaaaattatgttgacccactaaaatatccttgctcaatgtctggtcagttgaatttaataacatatcttgttaatgtttgtgtgtctattaaatgtgactaagcaggattactgaaaattcactataaaatcaaaggcatctaaacgtttgtacttgtcttgattaatcatatatttacacttgatttttttctgtcttcatttgtttttatttaatcataattgcatgatttttttggtactctaatcagtaattttatttttaatcatgtcattacctattcatgaccaaattaccaaggaaccaacatttagatttagatatttgttttcacttaggaatggaaattaatagattttccatgaaagcattagtgaaatatcattaccttgatctgcaagtagcctaaaaatgcgattgctggtaaacctggcctcaaatttcatactaccataactgtttttatatattgccactaattttgactggatttaatagcactttattgtacaactacaaaaaaaaatatattcctagaattgttgccagtgtaatttctctaatgttctggtgcttttcatatattttcagtatttttattactatattggtattttctttgtataaattgattgattaaaagaacatgttttctattttaatatgttttagaaaaataattacatttatgaaataaatatcatcaggaaaaaaaaaaaaaaaaaactcgagttttttttttttttttttgatagttttaaagctgtggaaaagctttattatagattttagtccagaattaaaaaagttcaaacaataattgtttggaaccccaaataattaaaaggaaacacagcattcccataaacaagcattctggcatctgttagaaattttccctcaaattatgaaaagtacctctcccatgctttcccaaggattgttataatacccacaaatatttggggatttaaggggatactttatccaaaagttttctttttaaggcatgaccctgattaattttttttcaatatctaaccatttcaagaactaccttaaataaaatggaactatttcattaatttgccacttgatcccattaagagg

SEQ ID NO: 426108 - DNA, 330 bp, Homo sapiens
cagagtcaagccaagcaatagcagctgtgacccgggtgcatcagtggatatagttgtgtctccccatgggggtgagttgtcacttagtagccacagcaggtgttgggtgtggtgggggtaaggggacctggaccttggctctgagtcagcagagatgtcaggctagaatctagaaattagcagagtatcacgagtcacctcacctcgctgtagacatcttttttcccacatgtgaaatggggtggtcaaagaggtctctaaagccctttccagcattaaaatgtattgtttctaacaagtaaaattgtttaaactgacaccaattgaaat

SEQ ID NO: 426109 - DNA, 3188 bp, Homo sapiens
ctctgtctacctctgggcgggactgccgggtgatgagatactcggtcggcgacggtagaacgggcgacggcgacaaccgcaatcacatccacgacggtgatcatggcagagaatcacgcccagaataaagccaagctcatctctgagacccggaggaggttcgaagctgagtatgtgacagataagtcagataaatatgatgcacgtgatgttgaaaggctacaacaagatgataactgggttgaaagttacttatcttggagacataatattgtagatgaaacactgaagatgctcgatgagagttttcagtggaggaaagaaatttctgtcaatgaccttaatgaatcctccattcccagatggttattggaaattggtgttatttatctccatggttatgacaaagaaggtaacaaattgttctggatcagggtgaagtatcatgtaaaagaccagaaaaccatattggacaaaaagaagctcatagcattctggttggaacgttatgctaagagggaaaatgggaaacctgtaacagtgatgtttgacctgtcagaaactggaataaatagcattgacatggactttgtacgctttatcatcaactgctttaaggtttattaccctaaatacctctcaaaaatagtgatctttgatatgccttggttaatgaatgctgctttcaaaattgtgaaaacctggcttggtccagaagcagtgagcttgttgaagtttacaagcaaaaatgaagtccaggactatgtcagtgtagaatacctgcctccccacatgggtggaactgatcctttcaagtatagctatccaccactagtagatgatgacttccagaccccactgtgtgagaatgggcctattaccagtgaggatgaaacttcaagtaaagaagacatagaaagtgatggcaaagaaacattggaaacaatttctaatgaagaacaaacacctcttcttaaaaagattaacccaaccgaatctacttccaaagcagaagaaaatgaaaaagttgattcaaaagtgaaagctttcaagaaaccattgagtgtatttaaaggccccttactacacatcagcccagcagaagaactgtactttggaagtacagaatccggagagaagaaaaccttaatagtgttgacaaatgtaactaaaaatatagtggcatttaaggtgagaacaacagctccagaaaaatacagagtcaagccaagcaatagcagctgtgacccgggtgcatcagtggatatagttgtgtctccccatgggggtttaacagtctctgcccaagaccgttttctgataatggctgcagaaatggaacagtcatctggcacaggcccagcagaattaactcagttttggaaagaagttcccagaaacaaagtgatggaacataggttaagatgccatactgttgaaagcagtaaaccaaacactcttacgttaaaagacaatgctttcaatatgtcagataaaaccagtgaagatatatgtctacaactcagtcgtttactagaaagcaataggaagcttgaagaccaagttcagcgttgtatctggttccagcagctgctgctttccttaacaatgctcttgcttgcttttgtcacctctttcttctatttattgtacagttaaagaagtggtgccgggtaggaaccacggttccttcgtccattagttggaaaaagtaacagacctaaaactctaccaagctactaaaaacattgcacatctgtgcttcctaaaaggaaatatgcagcacgtggaggggaacacatacatgtcttgaaaataaactgctagaataaagaaatgctggagaaattgattataagagactatagctatttagtaaagtaagtaaaggcatatccattgtgtaaattaatagtttaaatataatttattttttccttttgatctgaatacttttaaagcttaagttttatcgtgtaaatacattagctaaactgaaaagtataagtaacatgctttgttgcagccaaaaaatgtaatctgcttttttatgacagaattattatagctgagctgacttactagcttttctatactatgtatatagaagaacatgtatattgagaaagaaaacatacttatatagaggaatttatgtaaccatgactttgtaattttgagaattcctcccagtgatggtcagtattcttttggaatgtaaaccgatttaatgccaaaccaccttaacctttgtttctcagtgttccttaacagcctgccttttattaatctcaggcttttttatgaacactctcatttcagtagaatttggaaaactaagcgtggttggaatttctttgaattctgttagtaatgcccaaaagaaaagtctcaagcagtccccctatccagtcatttttatggagtttcatgttgtccactatagctggacactgaaccttttgcctaatttattataaaggcctgaccctctattgtcccatcttcacccccattccagagcagaggagtctctgtggaccatgaattgcactgtctccctcctcatttctaaatgaaaggtattagatataaatttttttgaaaggttagttgtttgagatgctaagcaggataataaatttagattttaaaatgttccctgtaaaagtcagcccatgacaaggaaatttacaaaatactagagtatctagaagggtgaaaacaaaaaaaaataaaaagaaacacagacgcccaggtgtcagctctccgtttaaagaatgaaaaatgtaactcatgatgatctgtgaaaccttcaaactaggaccaattgacttacttgatattctgcctttgatatggtagtacccacccggtattcctaaaatcctaaaaagatacaccttgcagtagcagaggcaatgacatgagtttgttttctcattaatatgaccagtttgggtctatgttggttcacatgtacatctactttatatgaaagaaaaaacagttgtctgcctgtaaaatgttgagtttcgattgagccatgtttggagattttattactattctgaagggtagtgttgttggttttcatcttcaagaagttgattccaaaactgagttatgaagaatgatataacagttccttcaaaattggcctaggaaataaaaccttaaaaggacac

SEQ ID NO: 426110 - DNA, 748 bp, Homo sapiens
ctctgtctacctctgggcgggactgccgggtgatgagatactcggtcggcgacggtagaacgggcgacggcgacaaccgcaatcacatccacgacggtgatcatggcagagaatcacgcccagaataaagccaagctcatctctgagacccggaggaggttcgaagctgagtatgtgacagataagtcagataaatatgatgcacgtgatgttgaaaggctacaacaagatgataactgggttgaaagttacttatcttggagacataatattgtagatgaaacactgaagatgctcgatgagagttttcagtggaggaaagaaatttctgtcaatgaccttaatgaatcctccattcccagatggttattggaaattggtgttatttatctccatggttatgacaaagaaggtaacaaattgttctggatcagggtgaagtatcatgtaaaagaccagaaaaccatattggacaaaaagaagctcatagcattctggttggaacgttatgctaagagggaaaatgggaaacctgtaacagtgatgtttgacctgtcagaaactggaataaatagcattgacatggactttgtacgctttatcatcaactgctttaaggtttattaccctaaatacctctctcctatagtgatctctgatatgccttgagattaatgaatcctgctttcaacacttgtgctcacctgacttcgtcccgcagcataaccttttcccaattaacaacacc

SEQ ID NO: 426111 - DNA, 3773 bp, Homo sapiens
  misc_feature (825)..(825): n is a, c, g, or t
  misc_feature (956)..(956): n is a, c, g, or t
tttttcaatctgttcccagtttctaaacaattttaaatatttatgagaagcaaaccctatgtgtagggcatctgttggagtgggatgcttttagacatatattaagtatgtacatgtttaatatgtatatttaaaatgcatatatattttattatatctatattatcctatatagatatatgtaacttagctttattgttagctccataagctgccagtgttgcttttctgttggtagagctctcccatttggtgacatggaaaatacctttccattatcacaacaaagcagttgctcagtagaaagtctagatttctgtcttataggtgatttctgtcttataggtgattataatcaagtgtaggcttcctgaattttgacatccttttagaacttgggtctggaattccagaaatgttaattgctgcttgtatttgttcttgtttgttttttagccagtatttgccctttctatccagccttatgaataatagcagtaaaatcacagtatcttggtcagtctttatttttttccttttttcttttttaagagacagtcatccaggccagagtgcagtttgatgatagcttactgaagcttcccactcctgggctcaagttatccttccattttggcctcctgagtagctagaccataggtatgcatcaccacaccctgctaattttttaaatttttttctagagagagggtctcactgtgttgcccaggctggtctcaaactccaggctcaagcaatccttcagctcatgcctgtaatcccagcacgttgggaggccgaggcgggtggatcacctgaagtcangagttcgagaccatcctggctaacactgtgaaaccccgtctctactaaaaatacaaaaaattagcggggcatggtggcacgcgcctgtagtcccagctactcaggaggctgaggcaggagaattacttgancccgggaggcggaggttgcagtaagcagagattgtgccactggactccagcctgggtgacagagcgagactccgtctcaaacaaacaaacaaaaaactgttttcatttgctctcttgaccaaaggataggactttagttctttaagcattattttaaacactatattgatacaaaaatatcttgcttactctaaactttagagtctaaatgaagctttttctcagtacaagattctgagtatcataaaatggttatttaattgaaacgtagtgtggtatactcttgatggttagaactcttacagccttatttatttttaagtttgttacagccaaagggttggagtgtgccagtgcacaggtagactaaggaaaacattatagaggagtgaagagaacagaccattgaaaagactattatctgaccagcggaggcagaaaagagaggaacccagttgaataggatccaatccctggttagcctctacacaataatagggagacaaggattaggagccatacctcccagagcaaggtatctttctagagcaaatttctctttctagaaggggagggtcacagggtcacagattcaccaaagctgaaagggctgaggagctcatggtagcctgggttgacctactctggagcacggtgtcttccttctaaactgagtgactgtagtactatctgtgcctctgatggtaataaaactgacaagatgtctaatttttttttaagtaggaccaaaggaaaacaagatttagatagtctgactttgcttttgaacaacagacattgcaagtcaaaattgttgtcaaatttacatatggtaaatgatgaactttaaaaatgtgtccaggtgttagatgagttcattagactcttttaatgctaatggctagtacgtttaaacaaaacagcagttctctgctgcaatattcccattgaccacttaaatgaccataagtggtcatttaagaacatgttagggttagccctgatctgaatataaaagtgagaaaagggctacagtgcatttcttggtaacttaaactgagtcttgaagttataatgatccattcgagttctgtgatccttattgttcttaattgtgtttctctacgtattgttacagatgagccatacgtttctttgtatcaatgtagacatgacttcagatacctctgaggacctacccagcagtctaggaccctgggccaagtgctgggactatggtactaaatccagtagatgggctgtgtagcaactctcccagggaacacactagggtacttagggaggtgctttgtggagcatgttgaagctttgagatctgagcaggaggcagtgatgtccctggtctattcagggaaagatttcagtgtgaaatggtaaacatccaattgacaggatttagattttgcttagtttttctgctttttaatgtttctatcccccatctcagtgttttctttatccatcccagtgatgccttatttgaaactgggcttaaactgcaaaaagaatgaagttggatttaggaagctgttagatcattgagtggtgttgagagtgaagtttcactagcagggaagtttccttgagcctaaaataaaaagaaaaaattaaaaagaatcagtttttttaattaaaaaaatagaaagctgttaggctcctaattcgtggggttttttttgtaaaaacagtttagataatcctgaatgcaatcattaacttggttgctaattacaagaatgaaaattataatggaaaaggacaaaataatataccagctggtttgttattatagtccgtgtattaaaatactattgaaatacgttaaaggtaaatttttaaggtttaaaaaaaatttagtaacttacagggatggagaatttagatgtcagaggtggggagatttatttttataaggtaatttttatcctgataaggacttaaaaaaaagttttgcaactgaaattttaaagtaaacatgttaagtacagttaaaaagtaagcattgtagtaaatagtggattctctggtgtgtattttttatctcagtgttgaaaattggaaaagaatggactgaagtctaaaaactggaataatgaaggacactaaatgcctttattgtagatactatgtttgtaagtctatagctaagcaacttaagccaaaaaggtctttcaactgaagctttaatcaacttattttggagatgttctcttcccttatctcatgcgtcatccctaaaataataagatacatgggatcaaatagcccttgccttttcaacacaaatcagttggaaaattatggtttgagtcctgttgctgccatggcttctgtttctcagaaatgagtgtgtatgaacataccaatctatgtaataggctacctttttttgtcttctttggaactttgtacacaaaccaagacaatatcagggtgacaggtgaatgaacttaaattctcagtcttgtctattcaccaaaaaagtatactgcctgttttttctttaattattcaaggttgatgacttttaggaacatgttttatactgtattttttaattaaagcaagtgccttgatgtaattccatgtaaatcattgcttaaccctcttatgggatgaggatgagttattaatgtattgcagcctactggaaaggagggggagttggttaatagcagatacttttcttctagaagcttatgttttatgctgtttattatgtaagatcctgtatgtgtgttgagatttagaggtttcatttgttttgtctgctaataaattgttactctaataata

SEQ ID NO: 426112 - DNA, 4006 bp, Homo sapiens
  misc_feature (825)..(825): n is a, c, g, or t
  misc_feature (956)..(956): n is a, c, g, or t
tttttcaatctgttcccagtttctaaacaattttaaatatttatgagaagcaaaccctatgtgtagggcatctgttggagtgggatgcttttagacatatattaagtatgtacatgtttaatatgtatatttaaaatgcatatatattttattatatctatattatcctatatagatatatgtaacttagctttattgttagctccataagctgccagtgttgcttttctgttggtagagctctcccatttggtgacatggaaaatacctttccattatcacaacaaagcagttgctcagtagaaagtctagatttctgtcttataggtgatttctgtcttataggtgattataatcaagtgtaggcttcctgaattttgacatccttttagaacttgggtctggaattccagaaatgttaattgctgcttgtatttgttcttgtttgttttttagccagtatttgccctttctatccagccttatgaataatagcagtaaaatcacagtatcttggtcagtctttatttttttccttttttcttttttaagagacagtcatccaggccagagtgcagtttgatgatagcttactgaagcttcccactcctgggctcaagttatccttccattttggcctcctgagtagctagaccataggtatgcatcaccacaccctgctaattttttaaatttttttctagagagagggtctcactgtgttgcccaggctggtctcaaactccaggctcaagcaatccttcagctcatgcctgtaatcccagcacgttgggaggccgaggcgggtggatcacctgaagtcangagttcgagaccatcctggctaacactgtgaaaccccgtctctactaaaaatacaaaaaattagcggggcatggtggcacgcgcctgtagtcccagctactcaggaggctgaggcaggagaattacttgancccgggaggcggaggttgcagtaagcagagattgtgccactggactccagcctgggtgacagagcgagactccgtctcaaacaaacaaacaaaaaactgttttcatttgctctcttgaccaaaggataggactttagttctttaagcattattttaaacactatattgatacaaaaatatcttgcttactctaaactttagagtctaaatgaagctttttctcagtacaagattctgagtatcataaaatggttatttaattgaaacgtagtgtggtatactcttgatggttagaactcttacagccttatttatttttaagtttgttacagccaaagggttggagtgtgccagtgcacaggtagactaaggaaaacattatagaggagtgaagagaacagaccattgaaaagactattatctgaccagcggaggcagaaaagagaggaacccagttgaataggatccaatccctggttagcctctacacaataatagggagacaaggattaggagccatacctcccagagcaaggtatctttctagagcaaatttctctttctagaaggggagggtcacagggtcacagattcaccaaagctgaaagggctgaggagctcatggtagcctgggttgacctactctggagcacggtgtcttccttctaaactgagtgactgtagtactatctgtgcctctgatggtaataaaactgacaagatgtctaatttttttttaagtaggaccaaaggaaaacaagatttagatagtctgactttgcttttgaacaacagacattgcaagtcaaaattgttgtcaaatttacatatggtaaatgatgaactttaaaaatgtgtccaggtgttagatgagttcattagactcttttaatgctaatggctagtacgtttaaacaaaacagcagttctctgctgcaatattcccattgaccacttaaatgaccataagtggtcatttaagaacatgttagggttagccctgatctgaatataaaagtgagaaaagggctacagtgcatttcttggtaacttaaactgagtcttgaagttataatgatccattcgagttctgtgatccttattgttcttaattgtgtttctctacgtattgttacagatgagccatacgtttctttgtatcaatgtagacatgacttcagatacctctgaggacctacccagcagtctaggaccctgggccaagtgctgggactatggtactaaatccagtagatgggctgtgtagcaactctcccagggaacacactagggtacttagggaggtgctttgtggagcatgttgaagctttgagatctgagcaggaggcagtgatgtccctggtctattcagggaaagatttcagtgtgaaatggtaaacatccaattgacaggatttagattttgcttagtttttctgctttttaatgtttctatcccccatctcagtgttttctttatccatcccagtgatgccttatttgaaactgggcttaaactgcaaaaagaatgaagttggatttaggaagctgttagatcattgagtggtgttgagagtgaagtttcactagcagggaagtttccttgagcctaaaataaaaagaaaaaattaaaaagaatcagtttttttaattaaaaaaatagaaagctgttaggctcctaattcgtggggttttttttgtaaaaacagtttagataatcctgaatgcaatcattaacttggttgctaattacaagaatgaaaattataatggaaaaggacaaaataatataccagctggtttgttattatagtccgtgtattaaaatactattgaaatacgttaaaggtaaatttttaaggtttaaaaaaaatttagtaacttacagggatggagaatttagatgtcagaggtggggagatttatttttataaggtaatttttatcctgataaggacttaaaaaaaagttttgcaactgaaattttaaagtaaacatgttaagtacagttaaaaagtaagcattgtagtaaatagtggattctctggtgtgtattttttatctcagtgttgaaaattggaaaagaatggactgaagtctaaaaactggaataatgaaggacactaaatgcctttattgtagatactatgtttgtaagtctatagctaagcaacttaagccaaaaaggtctttcaactgaagctttaatcaacttattttggagatgttctcttcccttatctcatgcgtcatccctaaaataataagatacatgggatcaaatagcccttgccttttcaacacaaatcagttggaaaattatggtttgagtcctgttgctgccatggcttctgtttctcagaaatgagtgtgtatgaacataccaatctatgtaataggctacctttttttgtcttctttggaactttgtacacaaaccaagacaatatcagggtgacaggtgaatgaacttaaattctcagtcttgtctattcaccaaaaaagtatactgcctgttttttctttaattattcaaggttgatgacttttaggaacatgttttatactgtattttttaattaaagcaagtgccttgatgtaattccatgtaaatcattgcttaaccctcttatgggatgaggatgagttattaatgtattgcagcctactggaaaggagggggagttggttaatagcagatacttttcttctagaagcttatgttttatgctgtttattatgtaagatcctgtatgtgtgttgagatttagaggtttcatttgttttgtctgctaataaattgttactctaataataaaaaaaaaaaaaaaaaaaaaagaaaaaaaaaaaagaatatgagcacaaagaaaacaaaaaaaaaaattgagaacacacacagaggaaagagaaacacaaaaacaaagaaaagacgacaaaaaccacaagaaaacaaagagaaagagaagaaagaaaaacaaaaagaaagggggagaacaacaataaaaaagagcaacaaagagacaaagcacaaaaaaagacaaaggaaaaga

SEQ ID NO: 426113 - DNA, 3571 bp, Homo sapiens
  misc_feature (825)..(825): n is a, c, g, or t
  misc_feature (956)..(956): n is a, c, g, or t
tttttcaatctgttcccagtttctaaacaattttaaatatttatgagaagcaaaccctatgtgtagggcatctgttggagtgggatgcttttagacatatattaagtatgtacatgtttaatatgtatatttaaaatgcatatatattttattatatctatattatcctatatagatatatgtaacttagctttattgttagctccataagctgccagtgttgcttttctgttggtagagctctcccatttggtgacatggaaaatacctttccattatcacaacaaagcagttgctcagtagaaagtctagatttctgtcttataggtgatttctgtcttataggtgattataatcaagtgtaggcttcctgaattttgacatccttttagaacttgggtctggaattccagaaatgttaattgctgcttgtatttgttcttgtttgttttttagccagtatttgccctttctatccagccttatgaataatagcagtaaaatcacagtatcttggtcagtctttatttttttccttttttcttttttaagagacagtcatccaggccagagtgcagtttgatgatagcttactgaagcttcccactcctgggctcaagttatccttccattttggcctcctgagtagctagaccataggtatgcatcaccacaccctgctaattttttaaatttttttctagagagagggtctcactgtgttgcccaggctggtctcaaactccaggctcaagcaatccttcagctcatgcctgtaatcccagcacgttgggaggccgaggcgggtggatcacctgaagtcangagttcgagaccatcctggctaacactgtgaaaccccgtctctactaaaaatacaaaaaattagcggggcatggtggcacgcgcctgtagtcccagctactcaggaggctgaggcaggagaattacttgancccgggaggcggaggttgcagtaagcagagattgtgccactggactccagcctgggtgacagagcgagactccgtctcaaacaaacaaacaaaaaactgttttcatttgctctcttgaccaaaggataggactttagttctttaagcattattttaaacactatattgatacaaaaatatcttgcttactctaaactttagagtctaaatgaagctttttctcagtacaagattctgagtatcataaaatggttatttaattgaaacgtagtgtggtatactcttgatggttagaactcttacagccttatttatttttaagtttgttacagccaaagggttggagtgtgccagtgcacaggtagactaaggaaaacattatagaggagtgaagagaacagaccattgaaaagactattatctgaccagcggaggcagaaaagagaggaacccagttgaataggatccaatccctggttagcctctacacaataatagggagacaaggattaggagccatacctcccagagcaaggtatctttctagagcaaatttctctttctagaaggggagggtcacagggtcacagattcaccaaagctgaaagggctgaggagctcatggtagcctgggttgacctactctggagcacggtgtcttccttctaaactgagtgactgtagtactatctgtgcctctgatggtaataaaactgacaagatgtctaatttttttttaagtaggaccaaaggaaaacaagatttagatagtctgactttgcttttgaacaacagacattgcaagtcaaaattgttgtcaaatttacatatggtaaatgatgaactttaaaaatgtgtccaggtgttagatgagttcattagactcttttaatgctaatggctagtacgtttaaacaaaacagcagttctctgctgcaatattcccattgaccacttaaatgaccataagtggtcatttaagaacatgttagggttagccctgatctgaatataaaagtgagaaaagggctacagtgcatttcttggtaacttaaactgagtcttgaagttataatgatccattcgagttctgtgatccttattgttcttaattgtgtttctctacgtattgttacagatgagccatacgtttctttgtatcaatgtagacatgacttcagatacctctgaggacctacccagcagtctaggaccctgggccaagtgctgggactatggtactaaatccagtagatgggctgtgtagcaactctcccagggaacacactagggtacttagggaggtgctttgtggagcatgttgaagctttgagatctgagcaggaggcagtgatgtccctggtctattcagggaaagatttcagtgtgaaatggtaaacatccaattgacaggatttagattttgcttagtttttctgctttttaatgtttctatcccccatctcagtgttttctttatccatcccagtgatgccttatttgaaactgggcttaaactgcaaaaagaatgaagttggatttaggaagctgttagatcattgagtggtgttgagagtgaagtttcactagcagggaagtttccttgagcctaaaataaaaagaaaaaattaaaaagaatcagtttttttaattaaaaaaatagaaagctgttaggctcctaattcgtggggttttttttgtaaaaacagtttagataatcctgaatgcaatcattaacttggttgctaattacaagaatgaaaattataatggaaaaggacaaaataatataccagctggtttgttattatagtccgtgtattaaaatactattgaaatacgttaaaggtaaatttttaaggtttaaaaaaaatttagtaacttacagggatggagaatttagatgtcagaggtggggagatttatttttataaggtaatttttatcctgataaggacttaaaaaaaagttttgcaactgaaattttaaagtaaacatgttaagtacagttaaaaagtaagcattgtagtaaatagtggattctctggtgtgtattttttatctcagtgttgaaaattggaaaagaatggactgaagtctaaaaactggaataatgaaggacactaaatgcctttattgtagatactatgtttgtaagtctatagctaagcaacttaagccaaaaaggtctttcaactgaagctttaatcaacttattttggagatgttctcttcccttatctcatgcgtcatccctaaaataataagatacatgggatcaaatagcccttgccttttcaacacaaatcagttggaaaattatggtttgagtcctgttgctgccatggcttctgtttctcagaaatgagtgtgtatgaacataccaatctatgtaataggctacctttttttgtcttctttggaactttgtacacaaaccaagacaatatcagggtgacaggtgaatgaacttaaattctcagtcttgtctattcaccaaaaaagtatactgcctgttttttctttaattattcaaggttgatgacttttaggaacatgttttatactgtattttttaattaaagcaagtggcccgccaatcgaagggtaccgag

SEQ ID NO: 426114 - DNA, 2896 bp, Homo sapiens
  misc_feature (825)..(825): n is a, c, g, or t
  misc_feature (956)..(956): n is a, c, g, or t
tttttcaatctgttcccagtttctaaacaattttaaatatttatgagaagcaaaccctatgtgtagggcatctgttggagtgggatgcttttagacatatattaagtatgtacatgtttaatatgtatatttaaaatgcatatatattttattatatctatattatcctatatagatatatgtaacttagctttattgttagctccataagctgccagtgttgcttttctgttggtagagctctcccatttggtgacatggaaaatacctttccattatcacaacaaagcagttgctcagtagaaagtctagatttctgtcttataggtgatttctgtcttataggtgattataatcaagtgtaggcttcctgaattttgacatccttttagaacttgggtctggaattccagaaatgttaattgctgcttgtatttgttcttgtttgttttttagccagtatttgccctttctatccagccttatgaataatagcagtaaaatcacagtatcttggtcagtctttatttttttccttttttcttttttaagagacagtcatccaggccagagtgcagtttgatgatagcttactgaagcttcccactcctgggctcaagttatccttccattttggcctcctgagtagctagaccataggtatgcatcaccacaccctgctaattttttaaatttttttctagagagagggtctcactgtgttgcccaggctggtctcaaactccaggctcaagcaatccttcagctcatgcctgtaatcccagcacgttgggaggccgaggcgggtggatcacctgaagtcangagttcgagaccatcctggctaacactgtgaaaccccgtctctactaaaaatacaaaaaattagcggggcatggtggcacgcgcctgtagtcccagctactcaggaggctgaggcaggagaattacttgancccgggaggcggaggttgcagtaagcagagattgtgccactggactccagcctgggtgacagagcgagactccgtctcaaacaaacaaacaaaaaactgttttcatttgctctcttgaccaaaggataggactttagttctttaagcattattttaaacactatattgatacaaaaatatcttgcttactctaaactttagagtctaaatgaagctttttctcagtacaagattctgagtatcataaaatggttatttaattgaaacgtagtgtggtatactcttgatggttagaactcttacagccttatttatttttaagtttgttacagccaaagggttggagtgtgccagtgcacaggtagactaaggaaaacattatagaggagtgaagagaacagaccattgaaaagactattatctgaccagcggaggcagaaaagagaggaacccagttgaataggatccaatccctggttagcctctacacaataatagggagacaaggattaggagccatacctcccagagcaaggtatctttctagagcaaatttctctttctagaaggggagggtcacagggtcacagattcaccaaagctgaaagggctgaggagctcatggtagcctgggttgacctactctggagcacggtgtcttccttctaaactgagtgactgtagtactatctgtgcctctgatggtaataaaactgacaagatgtctaatttttttttaagtaggaccaaaggaaaacaagatttagatagtctgactttgcttttgaacaacagacattgcaagtcaaaattgttgtcaaatttacatatggtaaatgatgaactttaaaaatgtgtccaggtgttagatgagttcattagactcttttaatgctaatggctagtacgtttaaacaaaacagcagttctctgctgcaatattcccattgaccacttaaatgaccataagtggtcatttaagaacatgttagggttagccctgatctgaatataaaagtgagaaaagggctacagtgcatttcttggtaacttaaactgagtcttgaagttataatgatccattcgagttctgtgatccttattgttcttaattgtgtttctctacgtattgttacagatgagccatacgtttctttgtatcaatgtagacatgacttcagatacctctgaggacctacccagcagtctaggaccctgggccaagtgctgggactatggtactaaatccagtagatgggctgtgtagcaactctcccagggaacacactagggtacttagggaggtgctttgtggagcatgttgaagctttgagatctgagcaggaggcagtgatgtccctggtctattcagggaaagatttcagtgtgaaatggtaaacatccaattgacaggatttagattttgcttagtttttctgctttttaatgtttctatcccccatctcagtgttttctttatccatcccagtgatgccttatttgaaactgggcttaaactgcaaaaagaatgaagttggatttaggaagctgttagatcattgagtggtgttgagagtgaagtttcactagcagggaagtttccttgagcctaaaataaaaagaaaaaattaaaaagaatcagtttttttaattaaaaaaatagaaagctgttaggctcctaattcgtggggttttttttgtaaaaacagtttagataatcctgaatgcaatcattaacttggttgctaattacaagaatgaaaattataatggaaaaggacaaaataatataccagctggtttgttattatagtccgtgtattaaaatactattgaaatacgttaaaggtaaatttttaaggtttaaaaaaaatttagtaacttacagggatggagaatttagatgtcagaggtgtagaaaatgaacgggatcctctaga

SEQ ID NO: 426115 - DNA, 2820 bp, Homo sapiens
  misc_feature (825)..(825): n is a, c, g, or t
  misc_feature (956)..(956): n is a, c, g, or t
  misc_feature (2800)..(2800): n is a, c, g, or t
  misc_feature (2804)..(2804): n is a, c, g, or t
  misc_feature (2808)..(2808): n is a, c, g, or t
tttttcaatctgttcccagtttctaaacaattttaaatatttatgagaagcaaaccctatgtgtagggcatctgttggagtgggatgcttttagacatatattaagtatgtacatgtttaatatgtatatttaaaatgcatatatattttattatatctatattatcctatatagatatatgtaacttagctttattgttagctccataagctgccagtgttgcttttctgttggtagagctctcccatttggtgacatggaaaatacctttccattatcacaacaaagcagttgctcagtagaaagtctagatttctgtcttataggtgatttctgtcttataggtgattataatcaagtgtaggcttcctgaattttgacatccttttagaacttgggtctggaattccagaaatgttaattgctgcttgtatttgttcttgtttgttttttagccagtatttgccctttctatccagccttatgaataatagcagtaaaatcacagtatcttggtcagtctttatttttttccttttttcttttttaagagacagtcatccaggccagagtgcagtttgatgatagcttactgaagcttcccactcctgggctcaagttatccttccattttggcctcctgagtagctagaccataggtatgcatcaccacaccctgctaattttttaaatttttttctagagagagggtctcactgtgttgcccaggctggtctcaaactccaggctcaagcaatccttcagctcatgcctgtaatcccagcacgttgggaggccgaggcgggtggatcacctgaagtcangagttcgagaccatcctggctaacactgtgaaaccccgtctctactaaaaatacaaaaaattagcggggcatggtggcacgcgcctgtagtcccagctactcaggaggctgaggcaggagaattacttgancccgggaggcggaggttgcagtaagcagagattgtgccactggactccagcctgggtgacagagcgagactccgtctcaaacaaacaaacaaaaaactgttttcatttgctctcttgaccaaaggataggactttagttctttaagcattattttaaacactatattgatacaaaaatatcttgcttactctaaactttagagtctaaatgaagctttttctcagtacaagattctgagtatcataaaatggttatttaattgaaacgtagtgtggtatactcttgatggttagaactcttacagccttatttatttttaagtttgttacagccaaagggttggagtgtgccagtgcacaggtagactaaggaaaacattatagaggagtgaagagaacagaccattgaaaagactattatctgaccagcggaggcagaaaagagaggaacccagttgaataggatccaatccctggttagcctctacacaataatagggagacaaggattaggagccatacctcccagagcaaggtatctttctagagcaaatttctctttctagaaggggagggtcacagggtcacagattcaccaaagctgaaagggctgaggagctcatggtagcctgggttgacctactctggagcacggtgtcttccttctaaactgagtgactgtagtactatctgtgcctctgatggtaataaaactgacaagatgtctaatttttttttaagtaggaccaaaggaaaacaagatttagatagtctgactttgcttttgaacaacagacattgcaagtcaaaattgttgtcaaatttacatatggtaaatgatgaactttaaaaatgtgtccaggtgttagatgagttcattagactcttttaatgctaatggctagtacgtttaaacaaaacagcagttctctgctgcaatattcccattgaccacttaaatgaccataagtggtcatttaagaacatgttagggttagccctgatctgaatataaaagtgagaaaagggctacagtgcatttcttggtaacttaaactgagtcttgaagttataatgatccattcgagttctgtgatccttattgttcttaattgtgtttctctacgtattgttacagatgagccatacgtttctttgtatcaatgtagacatgacttcagatacctctgaggacctacccagcagtctaggaccctgggccaagtgctgggactatggtactaaatccagtagatgggctgtgtagcaactctcccagggaacacactagggtacttagggaggtgctttgtggagcatgttgaagctttgagatctgagcaggaggcagtgatgtccctggtctattcagggaaagatttcagtgtgaaatggtaaacatccaattgacaggatttagattttgcttagtttttctgctttttaatgtttctatcccccatctcagtgttttctttatccatcccagtgatgccttatttgaaactgggcttaaactgcaaaaagaatgaagttggatttaggaagctgttagatcattgagtggtgttgagagtgaagtttcactagcagggaagtttccttgagcctaaaataaaaagaaaaaattaaaaagaatcagtttttttaattaaaaaaatagaaagctgttaggctcctaattcgtggggttttttttgtaaaaacagtttagataatcctgaatgcaatcattaacttggttgctaattacaagaatgaaaattataatggaaaaggacaaaataatataccagctggtttgttattatagtccgtgtattaaaatactattgaacttctanactngggnccggctcgatga

SEQ ID NO: 426116 - DNA, 2111 bp, Homo sapiens
  misc_feature (825)..(825): n is a, c, g, or t
  misc_feature (956)..(956): n is a, c, g, or t
tttttcaatctgttcccagtttctaaacaattttaaatatttatgagaagcaaaccctatgtgtagggcatctgttggagtgggatgcttttagacatatattaagtatgtacatgtttaatatgtatatttaaaatgcatatatattttattatatctatattatcctatatagatatatgtaacttagctttattgttagctccataagctgccagtgttgcttttctgttggtagagctctcccatttggtgacatggaaaatacctttccattatcacaacaaagcagttgctcagtagaaagtctagatttctgtcttataggtgatttctgtcttataggtgattataatcaagtgtaggcttcctgaattttgacatccttttagaacttgggtctggaattccagaaatgttaattgctgcttgtatttgttcttgtttgttttttagccagtatttgccctttctatccagccttatgaataatagcagtaaaatcacagtatcttggtcagtctttatttttttccttttttcttttttaagagacagtcatccaggccagagtgcagtttgatgatagcttactgaagcttcccactcctgggctcaagttatccttccattttggcctcctgagtagctagaccataggtatgcatcaccacaccctgctaattttttaaatttttttctagagagagggtctcactgtgttgcccaggctggtctcaaactccaggctcaagcaatccttcagctcatgcctgtaatcccagcacgttgggaggccgaggcgggtggatcacctgaagtcangagttcgagaccatcctggctaacactgtgaaaccccgtctctactaaaaatacaaaaaattagcggggcatggtggcacgcgcctgtagtcccagctactcaggaggctgaggcaggagaattacttgancccgggaggcggaggttgcagtaagcagagattgtgccactggactccagcctgggtgacagagcgagactccgtctcaaacaaacaaacaaaaaactgttttcatttgctctcttgaccaaaggataggactttagttctttaagcattattttaaacactatattgatacaaaaatatcttgcttactctaaactttagagtctaaatgaagctttttctcagtacaagattctgagtatcataaaatggttatttaattgaaacgtagtgtggtatactcttgatggttagaactcttacagccttatttatttttaagtttgttacagccaaagggttggagtgtgccagtgcacaggtagactaaggaaaacattatagaggagtgaagagaacagaccattgaaaagactattatctgaccagcggaggcagaaaagagaggaacccagttgaataggatccaatccctggttagcctctacacaataatagggagacaaggattaggagccatacctcccagagcaaggtatctttctagagcaaatttctctttctagaaggggagggtcacagggtcacagattcaccaaagctgaaagggctgaggagctcatggtagcctgggttgacctactctggagcacggtgtcttccttctaaactgagtgactgtagtactatctgtgcctctgatggtaataaaactgacaagatgtctaatttttttttaagtaggaccaaaggaaaacaagatttagatagtctgactttgcttttgaacaacagacattgcaagtcaaaattgttgtcaaatttacatatggtaaatgatgaactttaaaaatgtgtccaggtgttagatgagttcattagactcttttaatgctaatggctagtacgtttaaacaaaacagcagttctctgctgcaatattcccattgaccacttaaatgaccataagtggtcatttaagaacatgttagggttagccctgatctgaatataaaagtgagaaaagggctacagtgcatttcttggtaacttaaactgagtcttgaagttataatgatccattcgagttcgactagttctagatcgcgagcggccggcccttttttttttttttggggtttttttttttttttt

SEQ ID NO: 426117 - DNA, 1813 bp, Homo sapiens
  misc_feature (825)..(825): n is a, c, g, or t
  misc_feature (956)..(956): n is a, c, g, or t
tttttcaatctgttcccagtttctaaacaattttaaatatttatgagaagcaaaccctatgtgtagggcatctgttggagtgggatgcttttagacatatattaagtatgtacatgtttaatatgtatatttaaaatgcatatatattttattatatctatattatcctatatagatatatgtaacttagctttattgttagctccataagctgccagtgttgcttttctgttggtagagctctcccatttggtgacatggaaaatacctttccattatcacaacaaagcagttgctcagtagaaagtctagatttctgtcttataggtgatttctgtcttataggtgattataatcaagtgtaggcttcctgaattttgacatccttttagaacttgggtctggaattccagaaatgttaattgctgcttgtatttgttcttgtttgttttttagccagtatttgccctttctatccagccttatgaataatagcagtaaaatcacagtatcttggtcagtctttatttttttccttttttcttttttaagagacagtcatccaggccagagtgcagtttgatgatagcttactgaagcttcccactcctgggctcaagttatccttccattttggcctcctgagtagctagaccataggtatgcatcaccacaccctgctaattttttaaatttttttctagagagagggtctcactgtgttgcccaggctggtctcaaactccaggctcaagcaatccttcagctcatgcctgtaatcccagcacgttgggaggccgaggcgggtggatcacctgaagtcangagttcgagaccatcctggctaacactgtgaaaccccgtctctactaaaaatacaaaaaattagcggggcatggtggcacgcgcctgtagtcccagctactcaggaggctgaggcaggagaattacttgancccgggaggcggaggttgcagtaagcagagattgtgccactggactccagcctgggtgacagagcgagactccgtctcaaacaaacaaacaaaaaactgttttcatttgctctcttgaccaaaggataggactttagttctttaagcattattttaaacactatattgatacaaaaatatcttgcttactctaaactttagagtctaaatgaagctttttctcagtacaagattctgagtatcataaaatggttatttaattgaaacgtagtgtggtatactcttgatggttagaactcttacagccttatttatttttaagtttgttacagccaaagggttggagtgtgccagtgcacaggtagactaaggaaaacattatagaggagtgaagagaacagaccattgaaaagactattatctgaccagcggaggcagaaaagagaggaacccagttgaataggatccaatccctggttagcctctacacaataatagggagacaaggattaggagccatacctcccagagcaaggtatctttctagagcaaatttctctttctagaaggggagggtcacagggtcacagattcaccaaagctgaaagggctgaggagctcatggtagcctgggttgacctactctggagcacggtgtcttccttctaaactgagtgactgtagtactatctgtgcctctgatggtaataaaactgacaagatgtctaatttttttttaagtaggaccaaaggaaaacaagatttagatagtctgactttgcttttgaacaacagacattgcaagtcaaaattgttgtcaaaagcaaagtcagactatctaaatcttgttttccttt

SEQ ID NO: 426118 - DNA, 1786 bp, Homo sapiens
gtgtaacctgagattcatcatgggaatgagaaagtaaagtccctttataatggcatgtgaaccagacaatttagtagccagggttgtaaggcaactcttaactgacaatatagttagtatattctgggccttcatcttcaaaattagtaggtagtatttattgagtgcatatcatgtgccaggcctggtgctgagtgcttacaatgatcattttatatatgggaaaattgaggctcagcagggtcaagtgccttgtaagaggtagcactagtaagtaacagtgctcaaattcaactaggtctttcagctttttatacaatactgcctgttatcagaaagtatagtcttaaaatctgctatcaagcatctatcagaagcctgatgagaaatattcagatgatctaacgcagttcccaaacctgcattgtgggccgttttcattacaattacctaaggtgctttaaaaattttcttgggccctactcgttgtggttcagcagctgtgtaatggagcaaaaaggaatagtcactaaacagcgaaggaaagtggtggaattattaaaagacctagcacttacctgctgggatgagtctctaaccccacagaattgatttcaaacacaggatcttattcaagataaggataataacagctatcttcttgggttgtaaaaagtagcattagactgcattttaaacatttggtatgattttgaggacataaccgtaaacagctatttaatactattccaggtagtcaaaggccaatgtataaaagttaaaaatataggtcttgtcagctttttaagcgtctgtcccactgactaccatatctctacaagagaatagatgaggaattgaggttatgtgggaagtacgtgtaagtttacagtattaagaaatgtacaataaaatttgtttctatgtcagcgtatattcttgactcaaggagtttgaaagtgtaaactcaaaggtctttcacatgtaaagaggaacctctccattctgtacttgtatagtcattacctcatatagatttaattttattaaattaaattttacttattttgggtttaaaaaaacttgggctgtgaatctcagttttaagtcatgggcaaatttgataaaaattcctttctgtctacatgtaatactgaaaaaaatgttgataaggtaaagctatctccatttagattgatacccattaaatagcatagtgctcccattaaactagcgacaaattcatttaattgtgagatatctagtacttatgctccatcctgtttatagggattattgatgtgagatttggtcagatgctttgatgtgatcttcattcctctgtatagtgggaaaccatgagacgtgcttagtcttcataaatcgatgctgcctcctagtggccattgctttcttttctacctgtccacaaacttcaaaaaaatagattttggaattttgtcagggacacttatcaagccattaatacatgccaggcagtgtgctcaaagctgtggataggccagggaacagtattcttgtgcttgtgaagcttctatctgtctgtatctacctcaaccaaatcatcttgactcagatttactgtcgaaggtcgtgttatttcatcagattctttcagtattctgggatataatttatgggttctggattcattcaaaacaactagaaacagtctttttaaaataaatataattcaagtcaattattttccccatctattttttttcttttaagattgctaagtctgtaggttgcataattctaa

SEQ ID NO: 426119 - DNA, 581 bp, Homo sapiens
agcgggtgggaggagggactgaggcttctggattcctgggtctgtgggaggagggactggggctcctggattcctgggtctgtgggaagagaggagtgtctgagggaggaggggctggggacaaacttccaggtctctagccttcctggcaacgccccccgaggccggacttccaggatccagcctctattgaggatttgatgcgacggcctcacggggctttggaggtgaaagaggcccagagtagagagagagagagaccgacgtacacgggatggctacgggaacgcgctatgccgggaaggtggtggtcgtgaccgggggcgggcgcggcatcggagctgggatcgtgcgcgccttcgtgaacagcggggcccgagtggttatctgcgacaaggatgagtctgggggccgggccctggagcaggagctccctggagctgtctttatcctctgtgatgtgagactctcccaccccaaactccaacctgtatcagatgcagcccccaagcccttagactctaagcccagttagcaaggtgccgggtcaccctgcaggttcccataaaaacgatttgcag

SEQ ID NO: 426120 - DNA, 469 bp, Homo sapiens
agcgggtgggaggagggactgaggcttctggattcctgggtctgtgggaggagggactggggctcctggattcctgggtctgtgggaagagaggagtgtctgagggaggaggggctggggacaaacttccaggtctctagccttcctggcaacgccccccgaggccggacttccaggatccagcctctattgaggatttgatgcgacggcctcacggggctttggaggtgaaagaggcccagagtagagagagagagagaccgacgtacacgggatggctacgggaacgcgctatgccgggaaggtggtggtcgtgaccgggggcgggcgcggcatcggagctgggatcgtgcgcgccttcgtgaacagcggggcccgagtggttatctgcgacaaggatgcttagactctaagcccagttagcaaggtgccgggtcaccctgcaggttcccataaaaacgatttgcag

SEQ ID NO: 426121 - DNA, 1086 bp, Homo sapiens
agcgggtgggaggagggactgaggcttctggattcctgggtctgtgggaggagggactggggctcctggattcctgggtctgtgggaagagaggagtgtctgagggaggaggggctggggacaaacttccaggtctctagccttcctggcaacgccccccgaggccggacttccaggatccagcctctattgaggatttgatgcgacggcctcacggggctttggaggtgaaagaggcccagagtagagagagagagagaccgacgtacacgggatggctacgggaacgcgctatgccgggaaggtggtggtcgtgaccgggggcgggcgcggcatcggagctgggatcgtgcgcgccttcgtgaacagcggggcccgagtggttatctgcgacaaggatgagtctgggggccgggccctggagcaggagctccctggagctgtctttatcctctgtgatgtgactcaggaagatgatgtgaagaccctggtttctgagaccatccgccgatttggccgcctggattgtgttgtcaacaacgctggccaccccgcctgcctcagcctcccaaagtgctgggattacagctcgccctcccctacctgcggaagagtcaagggaatgtcatcaacatctccagcctggtgggggcaatcggccaggcccaggcagttccctatgtggccaccaagggggcagtaacagccatgaccaaagctttggccctggatgaaagtccatatggtgtccgagtcaactgccactgggccgcatgggccagcccgctgaggtcggggctgcggcagtgttcctggcctccgaagccaacttctgcacgggcattgaactgctcgtgacggggggtgcagagctggggtacgggtgcaaggccagtcggagcacccccgtggacgcccccgatatcccttcctgatttctctcatttctacttggggcccccttcctaggactctcccaccccaaactccaacctgtatcagatgcagcccccaagcccttagactctaagcccagttagcaaggtgccgggtcaccctgcaggttcccataaaaacgatttgcag

SEQ ID NO: 426122 - DNA, 1146 bp, Homo sapiens
agcgggtgggaggagggactgaggcttctggattcctgggtctgtgggaggagggactggggctcctggattcctgggtctgtgggaagagaggagtgtctgagggaggaggggctggggacaaacttccaggtctctagccttcctggcaacgccccccgaggccggacttccaggatccagcctctattgaggatttgatgcgacggcctcacggggctttggaggtgaaagaggcccagagtagagagagagagagaccgacgtacacgggatggctacgggaacgcgctatgccgggaaggtggtggtcgtgaccgggggcgggcgcggcatcggagctgggatcgtgcgcgccttcgtgaacagcggggcccgagtggttatctgcgacaaggatgagtctgggggccgggccctggagcaggagctccctggagctgtctttatcctctgtgatgtgactcaggaagatgatgtgaagaccctggtttctgagaccatccgccgatttggccgcctggattgtgttgtcaacaacgctggccaccctcgccctcccctacctgcggaagagtcaagggaatgtcatcaacatctccagcctggtgggggcaatcggccaggcccaggcagttccctatgtggccaccaagggggcagtaacagccatgaccaaagctttggccctggatgaaagtccatatggtgtccgagtcaactgtatctccccaggaaacatctggaccccgctgtgggaggagctggcagccttaatgccagaccctagggccacaatccgagagggcatgctggcccagccactgggccgcatgggccagcccgctgaggtcggggctgcggcagtgttcctggcctccgaagccaacttctgcacgggcattgaactgctcgtgacggggggtgcagagctggggtacgggtgcaaggccagtcggagcacccccgtggacgcccccgatatcccttcctgatttctctcatttctacttggggcccccttcctaggactctcccaccccaaactccaacctgtatcagatgcagcccccaagcccttagactctaagcccagttagcaaggtgccgggtcaccctgcaggttcccataaaaacgatttgcag

SEQ ID NO: 426123 - DNA, 1049 bp, Homo sapiens
agcgggtgggaggagggactgaggcttctggattcctgggtctgtgggaggagggactggggctcctggattcctgggtctgtgggaagagaggagtgtctgagggaggaggggctggggacaaacttccaggtctctagccttcctggcaacgccccccgaggccggacttccaggatccagcctctattgaggatttgatgcgacggcctcacggggctttggaggtgaaagaggcccagagtagagagagagagagaccgacgtacacgggatggctacgggaacgcgctatgccgggaaggtggtggtcgtgaccgggggcgggcgcggcatcggagctgggatcgtgcgcgccttcgtgaacagcggggcccgagtggttatctgcgacaaggatgagtctgggggccgggccctggagcaggagctccctggagctgtctttatcctctgtgatgtgactcaggaagatgatgtgaagaccctggtttctgagaccatccgccgatttggccgcctggattgtgttgtcaacaacgctggccaccctcgccctcccctacctgcggaagagtcaagggaatgtcatcaacatctccagcctggtgggggcaatcggccaggcccaggcagttccctatgtggccaccaagggggcagtaacagccatgaccaaagctttggccctggatgaaagtccatatggtgtccgagtcaactgccactgggccgcatgggccagcccgctgaggtcggggctgcggcagtgttcctggcctccgaagccaacttctgcacgggcattgaactgctcgtgacggggggtgcagagctggggtacgggtgcaaggccagtcggagcacccccgtggacgcccccgatatcccttcctgatttctctcatttctacttggggcccccttcctaggactctcccaccccaaactccaacctgtatcagatgcagcccccaagcccttagactctaagcccagttagcaaggtgccgggtcaccctgcaggttcccataaaaacgatttgcag

SEQ ID NO: 426124 - DNA, 981 bp, Homo sapiens
agcgggtgggaggagggactgaggcttctggattcctgggtctgtgggaggagggactggggctcctggattcctgggtctgtgggaagagaggagtgtctgagggaggaggggctggggacaaacttccaggtctctagccttcctggcaacgccccccgaggccggacttccaggatccagcctctattgaggatttgatgcgacggcctcacggggctttggaggtgaaagaggcccagagtagagagagagagagaccgacgtacacgggatggctacgggaacgcgctatgccgggaaggtggtggtcgtgaccgggggcgggcgcggcatcggagctgggatcgtgcgcgccttcgtgaacagcggggcccgagtggttatctgcgacaaggatgagtctgggggccgggccctggagcaggagctccctggagctgtctttatcctctgtgatgtgactcaggaagatgatgtgaagaccctggtttctgagaccatccgccgatttggccgcctggattgtgttgtcaacaacgctggccaccctcgccctcccctacctgcggaagagtcaagggaatgtcatcaacatctccagcctggtgggggcaatcggccaggcccaggcagttccctatgtggccaccaagccactgggccgcatgggccagcccgctgaggtcggggctgcggcagtgttcctggcctccgaagccaacttctgcacgggcattgaactgctcgtgacggggggtgcagagctggggtacgggtgcaaggccagtcggagcacccccgtggacgcccccgatatcccttcctgatttctctcatttctacttggggcccccttcctaggactctcccaccccaaactccaacctgtatcagatgcagcccccaagcccttagactctaagcccagttagcaaggtgccgggtcaccctgcaggttcccataaaaacgatttgcag

SEQ ID NO: 426125 - DNA, 861 bp, Homo sapiens
agcgggtgggaggagggactgaggcttctggattcctgggtctgtgggaggagggactggggctcctggattcctgggtctgtgggaagagaggagtgtctgagggaggaggggctggggacaaacttccaggtctctagccttcctggcaacgccccccgaggccggacttccaggatccagcctctattgaggatttgatgcgacggcctcacggggctttggaggtgaaagaggcccagagtagagagagagagagaccgacgtacacgggatggctacgggaacgcgctatgccgggaaggtggtggtcgtgaccgggggcgggcgcggcatcggagctgggatcgtgcgcgccttcgtgaacagcggggcccgagtggttatctgcgacaaggatgagtctgggggccgggccctggagcaggagctccctggagctgtctttatcctctgtgatgtgactcaggaagatgatgtgaagaccactgggttctagtgagagacaattccgctcgcattatggcacagctcgtgggattatgtggttggtcgaatcgaagctgctgggcgcagacaagtccacctcgcgcagtagtatgagcctgacggaggaccatcgtgtcgcgaggggtattcctgccaaagggtggcgttggaagctagaagcctatctggggggaacagtacaccttatgaatcaatgctcgcaccgtccctctacctaggacgggaaagacgtcaaggcgaaagtcgtcactacaacatcttccaagaccttgagtaggaggagcaactccggggagaaagtgcccccaaggccaagatttcccgctattgctgtgcccacccaaaggtggg

SEQ ID NO: 426126 - DNA, 1238 bp, Homo sapiens
agcgggtgggaggagggactgaggcttctggattcctgggtctgtgggaggagggactggggctcctggattcctgggtctgtgggaagagaggagtgtctgagggaggaggggctggggacaaacttccaggtctctagccttcctggcaacgccccccgaggccggacttccaggatccagcctctattgaggatttgatgcgacggcctcacggggctttggaggtgaaagaggcccagagtagagagagagagagaccgacgtacacgggatggctacgggaacgcgctatgccgggaaggtggtggtcgtgaccgggggcgggcgcggcatcggagctgggatcgtgcgcgccttcgtgaacagcggggcccgagtggttatctgcgacaaggatgagtctgggggccgggccctggagcaggagctccctggagctgtctttatcctctgtgatgtgactcaggaagatgatgtgaagaccctggtttctgagaccatccgccgatttggccgcctggattgtgttgtcaacaacgctggccaccacccacccccacagaggcctgaggagacctctgcccagggattccgccagctgctggagctgaacctactggggacgtacaccttgaccaagctcgccctcccctacctgcggaagagtcaagggaatgtcatcaacatctccagcctggtgggggcaatcggccaggcccaggcagttccctatgtggccaccaagggggcagtaacagccatgaccaaagctttggccctggatgaaagtccatatggtgtccgagtcaactgtatctccccaggaaacatctggaccccgctgtgggaggagctggcagccttaatgccagaccctagggccacaatccgagagggcatgctggcccagccactgggccgcatgggccagcccgctgaggtcggggctgcggcagtgttcctggcctccgaagccaacttctgcacgggcattgaactgctcgtgacggggggtgcagagctggggtacgggtgcaaggccagtcggagcacccccgtggacgcccccgatatcccttcctgatttctctcatttctacttggggcccccttcctaggactctcccaccccaaactccaacctgtatcagatgcagcccccaagcccttagactctaagcccagttagcaaggtgccgggtcaccctgcaggttcccataaaaacgatttgcag

SEQ ID NO: 426127 - DNA, 1031 bp, Homo sapiens
agctggtaccggtccggagtcttttggatgcccagagtagagagagagagagaccgacgtacacgggatggctacgggaacgcgctatgccgggaaggtggtggtcgtgaccgggggcgggcgcggcatcggagctgggatcgtgcgcgccttcgtgaacagcggggcccgagtggttatctgcgacaaggatgagtctgggggccgggccctggagcaggagctccctggagctgtctttatcctctgtgatgtgactcaggaagatgatgtgaagaccctggtttctgagaccatccgccgatttggccgcctggattgtgttgtcaacaacgctggccaccacccacccccacagaggcctgaggagacctctgcccagggattccgccagctgctggagctgaacctactggggacgtacaccttgaccaagctcgccctcccctacctgcggaagagtcaagggaatgtcatcaacatctccagcctggtgggggcaatcggccaggcccaggcagttccctatgtggccaccaagggggcagtaacagccatgaccaaagctttggccctggatgaaagtccatatggtgtccgagtcaactgtatctccccaggaaacatctggaccccgctgtgggaggagctggcagccttaatgccagaccctagggccacaatccgagagggcatgctggcccagccactgggccgcatgggccagcccgctgaggtcggggctgcggcagtgttcctggcctccgaagccaacttctgcacgggcattgaactgctcgtgacggggggtgcagagctggggtacgggtgcaaggccagtcggagcacccccgtggacgcccccgatatcccttcctgatttctctcatttctacttggggcccccttcctaggactctcccaccccaaactccaacctgtatcagatgcagcccccaagcccttagactctaagcccagttagcaaggtgccgggtcaccctgcaggttcccataaaaacgatttgcag

SEQ ID NO: 426128 - DNA, 1261 bp, Homo sapiens
agcgggtgggaggagggactgaggcttctggattcctgggtctgtgggaggagggactggggctcctggattcctgggtctgtgggaagagaggagtgtctgagggaggaggggctggggacaaacttccaggtctctagccttcctggcaacgccccccgaggccggacttccaggatccagcctctattgaggatttgatgcgacggcctcacggggctttggaggtgaaagaggcccagagtagagagagagagagaccgacgtacacgggatggctacgggaacgcgctatgccgggaaggtggtggtcgtgaccgggggcgggcgcggcatcggagctgggatcgtgcgcgccttcgtgaacagcggggcccgagtggttatctgcgacaaggatgagtctgggggccgggccctggagcaggagctccctggagctgtctttatcctctgtgatgtgactcaggaagatgatgtgaagaccctggtttctgagaccatccgccgatttggccgcctggattgtgttgtcaacaacgctggccaccacccacccccacagaggcctgaggagacctctgcccagggattccgccagctgctggagctgaacctactggggacgtacaccttgaccaagctcgccctcccctacctgcggaagagtcaagggaatgtcatcaacatctccagcctggtgggggcaatcggccaggcccaggcagttccctatgtggccaccaagggggcagtaacagccatgaccaaagctttggccctggatgaaagtccatatggtgtccgagtcaactgtatctccccaggaaacatctggaccccgctgtgggaggagctggcagccttaatgccagaccctagggccacaatccgagagggcatgctggcccaggtagaagtggggttcagatccagccactgggccgcatgggccagcccgctgaggtcggggctgcggcagtgttcctggcctccgaagccaacttctgcacgggcattgaactgctcgtgacggggggtgcagagctggggtacgggtgcaaggccagtcggagcacccccgtggacgcccccgatatcccttcctgatttctctcatttctacttggggcccccttcctaggactctcccaccccaaactccaacctgtatcagatgcagcccccaagcccttagactctaagcccagttagcaaggtgccgggtcaccctgcaggttcccataaaaacgatttgcag

SEQ ID NO: 426129 - DNA, 1059 bp, Homo sapiens
agcgggtgggaggagggactgaggcttctggattcctgggtctgtgggaggagggactggggctcctggattcctgggtctgtgggaagagaggagtgtctgagggaggaggggctggggacaaacttccaggtctctagccttcctggcaacgccccccgaggccggacttccaggatccagcctctattgaggatttgatgcgacggcctcacggggctttggaggtgaaagaggcccagagtagagagagagagagaccgacgtacacgggatggctacgggaacgcgctatgccgggaaggtggtggtcgtgaccgggggcgggcgcggcatcggagctgggatcgtgcgcgccttcgtgaacagcggggcccgagtggttatctgcgacaaggatgagtctgggggccgggccctggagcaggagctccctggagctgtctttatcctctgtgatgtgactcaggaagatgatgtgaagaccctggtttctgagaccatccgccgatttggccgcctggattgtgttgtcaacaacgctggccaccctcgccctcccctacctgcggaagagtcaagggaatgtcatcaacatctccagcctggtgggggcaatcggccaggcccaggcagttccctatgtggccaccaagtctcatctatagggggcagttacagccagagacgcagaagactaggacagggatggaagtctatatcggttgtaactgactcagagataggcaatagcgacgtgagcttgggccaagagccgatagagacgatcgaaggagcaatgcgggcaaaagtatacgctggactccgaagcagatatgtaggtaagggcaatgcactgctcgtgagcacaggcaagcagaagagggagcaacgacgagcaagaggctacggaggagaacccagctggaaccggactccgatagccctgctggaaagtatcagtcatatgctatcgcgcggcaccatgtaagaggaatgtctacagactaactccaacttgactagaagcaggctcaagacaacaacgtgtagcaagta

SEQ ID NO: 426130 - DNA, 222 bp, Homo sapiens
tgaacagcggggcccgagtggttatctgcgacaaggatgtggtgagtgacggtccctcagccctcaccttggcccttcctccctcagacccagaggtccagacccctagcacctcctccctcagaccccggagtccaggcccccaggccctacttcctcagacccaggagtccagacctcagcccctcctccctcagacctaggagtccaggcccccagccc

SEQ ID NO: 426131 - DNA, 397 bp, Homo sapiens
gcacgagatagtgtcaggatttgaaggagctatatgacataaaaagaacttttggcaaatatttattcagattgcttgtctccagtgccaaaagttctttttatgtcatatagtgtcaggatttgaaggagctatttttttttaatgttgcaactagcaactcatcttcggaagacacagccaggagaatgaagtagaagtgaaaggtttataaatccatttgtaagcatttatcccatatattttaaattcaagaaaaattgtgtttatctttagaattttgtattcaatactttatgtactatgtgactcatgcttctggataaataaagcaccaaatatgtatctgtaaccacaatcacacatattatattaaatatatatctatataacagcc

SEQ ID NO: 426132 - DNA, 355 bp, Homo sapiens
gagatggaatttcgctcttttgcccaggctggagtgcaatggcatgatctcagctcaccgcaacctccacctcccgggatttgaaggagctatttttttttaatgttgcaactagcaactcatcttcggaagacacagccaggagaatgaagtagaagtgaaaggtttataaatccatttgtaagcatttatcccatatattttaaattcaagaaaaattgtgtttatctttagaattttgtattcaatactttatgtactatgtgactcatgcttctggataaataaagcaccaaatatgtatctgtaaccacaatcacacatattatattaaatatatatctatataacagcc

SEQ ID NO: 426133 - DNA, 2338 bp, Homo sapiens
tctccacgttcccttgagtaaatgtctgggaaagcatgaagcttgatgcaagaaccctgttgtactggcgttttcctcccctgtgaaaacgtaactactgttgggagtgaattgaggatgtagaaaggtggtggaaccaaattgtggtcaatggaaataggagaatatggttctcactcttgagaaaaaaacctaagattagcccaggtagttgcctgtaacttcagtttttctgcctgggtttgatatagtttagggttggggttagattaagatctaaattacatcaggacaaagagacagactattaactccacagttaattaaggacgtatgttccatgtttatttgttaaagcagtgtgaatagccttcaagcatgtgaataatcttccatcttccccgccacacatacacacacacactttttgtttctttcaggtagacaccttttaaaatgcagaactaactgaggcatttcagtaactttgctttcaaatcaataaagtcaaatgtatggaaacattttgtgccctactctccataccccgtgtactcaaattctctactgtatgaattatgctttaagtagaattcagtgccaaggagaacttggtgaaataaattattttaattttttttttatcctttacaaagccatggattttatttggttgatgtgtgctctgtacacaagccatttcaataggatggagctgttaattattttccaaagagtaatagacatgcaaaagtttcaataaaaactgggccattaacaaataaattaataaactaataagcattcccttctaggtttttgccaaactgcctatccaataacaaatttgagaatcgttgaaaaagctagttatatttcagagaaatgattttcattattgaaactgttctccctagcaggccattttccctttttcctgggagtttagcaagtttaggagagaatagtcatgaaaagaaagggaagaaaggggagaagggaagaggttaaaaagtaagtgctcagacctatgaacgtaatccctttgctagaaatatttaagagcagctcagcttggttgaaactgagttttgtcatcttccatatttgcaggaaggtattttctgacttgcaatgcagctagatgtaaaattttattttatcatactagaaagccttgactagaaaaatgaataaatattgagggtttcctgtccatatctggcttgcatgtgccagaaagcagagaatagaaaatgtaatctccaacatccaagcatcgaaacccaaggggtaggcaattctatgtaggttttggacatgaagtttggtgcatcttggtttatgctggctcaactgctattaaacctctctggcttatagtctcttcattctattagacaagcacgtatcgaacacttgcttcgcacaaggctctttagttaacaatttagcagctactgtttgtgttaaacacacttttcaccaaataggttctgaggcaaacgagagcaatgactatttaaagaaaggctttcccagcatcacttacacatcccaaaactaaaaagatcaactcttccaactgagaaaagactcctggctttgaatggaaacttacagcagagagtcacaggccacggcaacaacaacgacaacaacaaacatttggaatattattctcaactcacgttttaataatacatcttattatttttctagtagagaaactacaaatcagcctcttcaacatttatatacagtttaataagcctcttgcaagttacttgttctctcacctgaggtatttttttcctccccaccttgcccctgttcctcccttcctcttctccctttgcaagaggaaatatttaacatatttgggtccaacttcaataatgtaataattaatacattaaaagcatttaacttcctttctagaaaaatgcacaggctaaggcatagacaaaacaaagagaaatgctgagaaatttgccactggagacaagcaatctgaataaatatttgccaaaagttctttttatgtcatatagtgtcaggatttgaaggagctatttttttttaatgttgcaactagcaactcatcttcggaagacacagccaggagaatgaagtagaagtgaaaggtttataaatccatttgtaagcatttatcccatatattttaaattcaagaaaaattgtgtttatctttagaattttgtattcaatactttatgtactatgtgactcatgcttctggataaataaagcaccaaatatgtatctgtaaccacaatcacacatattatattaaatatatatctatataacagcc

SEQ ID NO: 426134 - DNA, 1957 bp, Homo sapiens
gagagagagaactagttctctctctccacatacacacacacactttttgtttctttcaggtagacaccttttaaaatgcagaactaactgaggcatttcagtaactttgctttcaaatcaataaagtcaaatgtatggaaacattttgtgccctactctccataccccgtgtactcaaattctctactgtatgaattatgctttaagtagaattcagtgccaaggagaacttggtgaaataaattattttaattttttttttatcctttacaaagccatggattttatttggttgatgtgtgctctgtacacaagccatttcaataggatggagctgttaattattttccaaagagtaatagacatgcaaaagtttcaataaaaactgggccattaacaaataaattaataaactaataagcattcccttctaggtttttgccaaactgcctatccaataacaaatttgagaatcgttgaaaaagctagttatatttcagagaaatgattttcattattgaaactgttctccctagcaggccattttccctttttcctgggagtttagcaagtttaggagagaatagtcatgaaaagaaagggaagaaaggggagaagggaagaggttaaaaagtaagtgctcagacctatgaacgtaatccctttgctagaaatatttaagagcagctcagcttggttgaaactgagttttgtcatcttccatatttgcaggaaggtattttctgacttgcaatgcagctagatgtaaaattttattttatcatactagaaagccttgactagaaaaatgaataaatattgagggtttcctgtccatatctggcttgcatgtgccagaaagcagagaatagaaaatgtaatctccaacatccaagcatcgaaacccaaggggtaggcaattctatgtaggttttggacatgaagtttggtgcatcttggtttatgctggctcaactgctattaaacctctctggcttatagtctcttcattctattagacaagcacgtatcgaacacttgcttcgcacaaggctctttagttaacaatttagcagctactgtttgtgttaaacacacttttcaccaaataggttctgaggcaaacgagagcaatgactatttaaagaaaggctttcccagcatcacttacacatcccaaaactaaaaagatcaactcttccaactgagaaaagactcctggctttgaatggaaacttacagcagagagtcacaggccacggcaacaacaacgacaacaacaaacatttggaatattattctcaactcacgttttaataatacatcttattatttttctagtagagaaactacaaatcagcctcttcaacatttatatacagtttaataagcctcttgcaagttacttgttctctcacctgaggtatttttttcctccccaccttgcccctgttcctcccttcctcttctccctttgcaagaggaaatatttaacatatttgggtccaacttcaataatgtaataattaatacattaaaagcatttaacttcctttctagaaaaatgcacaggctaaggcatagacaaaacaaagagaaatgctgagaaatttgccactggagacaagcaatctgaataaatatttgccaaaagttctttttatgtcatatagtgtcaggatttgaaggagctatttttttttaatgttgcaactagcaactcatcttcggaagacacagccaggagaatgaagtagaagtgaaaggtttataaatccatttgtaagcatttatcccatatattttaaattcaagaaaaattgtgtttatctttagaattttgtattcaatactttatgtactatgtgactcatgcttctggataaataaagcaccaaatatgtatctgtaaccacaatcacacatattatattaaatatatatctatataacagcc

SEQ ID NO: 426135 - DNA, 2280 bp, Homo sapiens
tctccacgttcccttgagtaaatgtctgggaaagcatgaagcttgatgcaagaaccctgttgtactggcgttttcctcccctgtgaaaacgtaactactgttgggagtgaattgaggatgtagaaaggtggtggaaccaaattgtggtcaatggaaataggagaatatggttctcactcttgagaaaaaaacctaagattagcccaggtagttgcctgtaacttcagtttttctgcctgggtttgatatagtttagggttggggttagattaagatctaaattacatcaggacaaagagacagactattaactccacagttaattaaggacgtatgttccatgtttatttgttaaagcagtgtgaatagccttcaagcatgtgaataatcttccatcttccccgccacacatacacacacacactttttgtttctttcaggtagacaccttttaaaatgcagaactaactgaggcatttcagtaactttgctttcaaatcaataaagtcaaatgtatggaaacattttgtgccctactctccataccccgtgtactcaaattctctactgtatgaattatgctttatcctttacaaagccatggattttatttggttgatgtgtgctctgtacacaagccatttcaataggatggagctgttaattattttccaaagagtaatagacatgcaaaagtttcaataaaaactgggccattaacaaataaattaataaactaataagcattcccttctaggtttttgccaaactgcctatccaataacaaatttgagaatcgttgaaaaagctagttatatttcagagaaatgattttcattattgaaactgttctccctagcaggccattttccctttttcctgggagtttagcaagtttaggagagaatagtcatgaaaagaaagggaagaaaggggagaagggaagaggttaaaaagtaagtgctcagacctatgaacgtaatccctttgctagaaatatttaagagcagctcagcttggttgaaactgagttttgtcatcttccatatttgcaggaaggtattttctgacttgcaatgcagctagatgtaaaattttattttatcatactagaaagccttgactagaaaaatgaataaatattgagggtttcctgtccatatctggcttgcatgtgccagaaagcagagaatagaaaatgtaatctccaacatccaagcatcgaaacccaaggggtaggcaattctatgtaggttttggacatgaagtttggtgcatcttggtttatgctggctcaactgctattaaacctctctggcttatagtctcttcattctattagacaagcacgtatcgaacacttgcttcgcacaaggctctttagttaacaatttagcagctactgtttgtgttaaacacacttttcaccaaataggttctgaggcaaacgagagcaatgactatttaaagaaaggctttcccagcatcacttacacatcccaaaactaaaaagatcaactcttccaactgagaaaagactcctggctttgaatggaaacttacagcagagagtcacaggccacggcaacaacaacgacaacaacaaacatttggaatattattctcaactcacgttttaataatacatcttattatttttctagtagagaaactacaaatcagcctcttcaacatttatatacagtttaataagcctcttgcaagttacttgttctctcacctgaggtatttttttcctccccaccttgcccctgttcctcccttcctcttctccctttgcaagaggaaatatttaacatatttgggtccaacttcaataatgtaataattaatacattaaaagcatttaacttcctttctagaaaaatgcacaggctaaggcatagacaaaacaaagagaaatgctgagaaatttgccactggagacaagcaatctgaataaatatttgccaaaagttctttttatgtcatatagtgtcaggatttgaaggagctatttttttttaatgttgcaactagcaactcatcttcggaagacacagccaggagaatgaagtagaagtgaaaggtttataaatccatttgtaagcatttatcccatatattttaaattcaagaaaaattgtgtttatctttagaattttgtattcaatactttatgtactatgtgactcatgcttctggataaataaagcaccaaatatgtatctgtaaccacaatcacacatattatattaaatatatatctatataacagcc

SEQ ID NO: 426136 - DNA, 2284 bp, Homo sapiens
tctccacgttcccttgagtaaatgtctgggaaagcatgaagcttgatgcaagaaccctgttgtactggcgttttcctcccctgtgaaaacgtaactactgttgggagtgaattgaggatgtagaaaggtggtggaaccaaattgtggtcaatggaaataggagaatatggttctcactcttgagaaaaaaacctaagattagcccaggtagttgcctgtaacttcagtttttctgcctgggtttgatatagtttagggttggggttagattaagatctaaattacatcaggacaaagagacagactattaactccacagttaattaaggacgtatgttccatgtttatttgttaaagcagtgtgaatagccttcaagcatgtgaataatcttccatcttccccgccacacatacacacacacactttttgtttctttcaggtagacaccttttaaaatgcagaactaactgaggcatttcagtaactttgctttcaaatcaataaagtcaaatgtatggaaacattttgtgccctactctccataccccgtgtactcaaattctctactgtatgaattatgctttaagtagaattcagtgccaaggagaacttggtgaaataaattattttaattttttttttatcctttacaaagccatggattttatttggttgatgtgtgctctgtacacaagccatttcaataggatggagctgttaattattttccaaagagtaatagacatgcaaaagtttcaataaaaactgggccattaacaaataaattaataaactaataagcattcccttctaggtttttgccaaactgcctatccaataacaaatttgagaatcgttgaaaaagctagttatatttcagagaaatgattttcattattgaaactgttctccctagcaggccattttccctttttcctgggagtttagcaagtttaggagagaatagtcatgaaaagaaagggaagaaaggggagaagggaagaggttaaaaagtaagtgctcagacctatgaacgtaatccctttgctagaaatatttaagagcagctcagcttggttgaaactgagttttgtcatcttccatatttgcaggaaggtattttctgacttgcaatgcagctagatgtaaaattttattttatcatactagaaagccttgactagaaaaatgaataaatattgagggtttcctgtccatatctggcttgcatgtgccagaaagcagagaatagaaaatgtaatctccaacatccaagcatcgaaacccaaggggtaggcaattctatgtaggttttggacatgaagtttggtgcatcttggtttatgctggctcaactgctattaaacctctctggcttatagtctcttcattctattagacaagcacgtatcgaacacttgcttcgcacaaggctctttagttaacaatttagcagctactgtttgtgttaaacacacttttcaccaaataggttctgaggcaaacgagagcaatgactatttaaagaaaggctttcccagcatcacttacacatcccaaaactaaaaagatcaactcttccaactgagaacaacaacgacaacaacaaacatttggaatattattctcaactcacgttttaataatacatcttattatttttctagtagagaaactacaaatcagcctcttcaacatttatatacagtttaataagcctcttgcaagttacttgttctctcacctgaggtatttttttcctccccaccttgcccctgttcctcccttcctcttctccctttgcaagaggaaatatttaacatatttgggtccaacttcaataatgtaataattaatacattaaaagcatttaacttcctttctagaaaaatgcacaggctaaggcatagacaaaacaaagagaaatgctgagaaatttgccactggagacaagcaatctgaataaatatttgccaaaagttctttttatgtcatatagtgtcaggatttgaaggagctatttttttttaatgttgcaactagcaactcatcttcggaagacacagccaggagaatgaagtagaagtgaaaggtttataaatccatttgtaagcatttatcccatatattttaaattcaagaaaaattgtgtttatctttagaattttgtattcaatactttatgtactatgtgactcatgcttctggataaataaagcaccaaatatgtatctgtaaccacaatcacacatattatattaaatatatatctatataacagcc

SEQ ID NO: 426137 - DNA, 969 bp, Homo sapiens
gttgtcgtgcaggtagaggctgattgtagtttctctactagaaaaataataagatgtattattaaaacgtgagttgagaataatattcctactgtttgtgttaaacacacttttcaccaaataggttctgaggcaaacgagagcaatgactatttaaagaaaggctttcccagcatcacttacacatcccaaaactaaaaagatcaactcttccaactgagaaaagactcctggctttgaatggaaacttacagcagagagtcacaggccacggcaacaacaacgacaacaacaaacatttggaatattattctcaactcacgttttaataatacatcttattatttttctagtagagaaactacaaatcagcctcttcaacatttatatacagtttaataagcctcttgcaagttacttgttctctcacctgaggtatttttttcctccccaccttgcccctgttcctcccttcctcttctccctttgcaagaggaaatatttaacatatttgggtccaacttcaataatgtaataattaatacattaaaagcatttaacttcctttctagaaaaatgcacaggctaaggcatagacaaaacaaagagaaatgctgagaaatttgccactggagacaagcaatctgaataaatatttgccaaaagttctttttatgtcatatagtgtcaggatttgaaggagctatttttttttaatgttgcaactagcaactcatcttcggaagacacagccaggagaatgaagtagaagtgaaaggtttataaatccatttgtaagcatttatcccatatattttaaattcaagaaaaattgtgtttatctttagaattttgtattcaatactttatgtactatgtgactcatgcttctggataaataaagcaccaaatatgtatctgtaaccacaatcacacatattatattaaatatatatctatataacagcc

SEQ ID NO: 426138 - DNA, 2484 bp, Homo sapiens
  misc_feature (2340)..(2354): n is a, c, g, or t
  misc_feature (2356)..(2358): n is a, c, g, or t
  misc_feature (2440)..(2440): n is a, c, g, or t
  misc_feature (2452)..(2452): n is a, c, g, or t
  misc_feature (2470)..(2470): n is a, c, g, or t
  misc_feature (2474)..(2474): n is a, c, g, or t
  misc_feature (2477)..(2477): n is a, c, g, or t
  misc_feature (2480)..(2480): n is a, c, g, or t
tctccacgttcccttgagtaaatgtctgggaaagcatgaagcttgatgcaagaaccctgttgtactggcgttttcctcccctgtgaaaacgtaactactgttgggagtgaattgaggatgtagaaaggtggtggaaccaaattgtggtcaatggaaataggagaatatggttctcactcttgagaaaaaaacctaagattagcccaggtagttgcctgtaacttcagtttttctgcctgggtttgatatagtttagggttggggttagattaagatctaaattacatcaggacaaagagacagactattaactccacagttaattaaggacgtatgttccatgtttatttgttaaagcagtgtgaatagccttcaagcatgtgaataatcttccatcttccccgccacacatacacacacacactttttgtttctttcaggtagacaccttttaaaatgcagaactaactgaggcatttcagtaactttgctttcaaatcaataaagtcaaatgtatggaaacattttgtgccctactctccataccccgtgtactcaaattctctactgtatgaattatgctttaagtagaattcagtgccaaggagaacttggtgaaataaattattttaattttttttttatcctttacaaagccatggattttatttggttgatgtgtgctctgtacacaagccatttcaataggatggagctgttaattattttccaaagagtaatagacatgcaaaagtttcaataaaaactgggccattaacaaataaattaataaactaataagcattcccttctaggtttttgccaaactgcctatccaataacaaatttgagaatcgttgaaaaagctagttatatttcagagaaatgattttcattattgaaactgttctccctagcaggccattttccctttttcctgggagtttagcaagtttaggagagaatagtcatgaaaagaaagggaagaaaggggagaagggaagaggttaaaaagtaagtgctcagacctatgaacgtaatccctttgctagaaatatttaagagcagctcagcttggttgaaactgagttttgtcatcttccatatttgcaggaaggtattttctgacttgcaatgcagctagatgtaaaattttattttatcatactagaaagccttgactagaaaaatgaataaatattgagggtttcctgtccatatctggcttgcatgtgccagaaagcagagaatagaaaatgtaatctccaacatccaagcatcgaaacccaaggggtaggcaattctatgtaggttttggacatgaagtttggtgcatcttggtttatgctggctcaactgctattaaacctctctggcttatagtctcttcattctattagacaagcacgtatcgaacacttgcttcgcacaaggctctttagttaacaatttagcagctactgtttgtgttaaacacacttttcaccaaataggttctgaggcaaacgagagcaatgactatttaaagaaaggctttcccagcatcacttacacatcccaaaactaaaaagatcaactcttccaactgagaaaagactcctggctttgaatggaaacttacagcagagagtcacaggccacggcaacaacaacgacaacaacaaacatttggaatattattctcaactcacgttttaataatacatcttattatttttctagtagagaaactacaaatcagcctcttcaacatttatatacagtttaataagcctcttgcaagttacttgttctctcacctgaggtatttttttcctccccaccttgcccctgttcctcccttcctcttctccctttgcaagaggaaatatttaacatatttgggtccaacttcaataatgtaataattaatacattaaaagcatttaacttcctttctagaaaaatgcacaggctaaggcatagacaaaacaaagagaaatgctgagaaatttgccactggagacaagcaatctgaataaatatttgccaaaagttctttttatgtcatatagtgtcaggatttgaaggagctatttttttttaatgttgcaactagcaactcatcttcggaagacacagccaggagaatgaagtagaagtgaaaggtttataaatccatttgtaagcatttatcccatatattttaaattcaagaaaaattgtgtttatctttagaattttgtattcaatactttatgtactatgtgactcatgcttctggataaataaagcaccaaatatgtatctgtaaccacaatcacacatattatattaaatatatatctatataacagcccnnnnnnnnnnnnnnngnnnactcgcattcttggtcagagtttagagagatgtaagactttcaattaatgcctaattaactccttaatgtgattagcttggntacatgtctgantcagaacctaattaaggnattnttnaantgta

SEQ ID NO: 426139 - DNA, 2283 bp, Homo sapiens
tctccacgttcccttgagtaaatgtctgggaaagcatgaagcttgatgcaagaaccctgttgtactggcgttttcctcccctgtgaaaacgtaactactgttgggagtgaattgaggatgtagaaaggtggtggaaccaaattgtggtcaatggaaataggagaatatggttctcactcttgagaaaaaaacctaagattagcccaggtagttgcctgtaacttcagtttttctgcctgggtttgatatagtttagggttggggttagattaagatctaaattacatcaggacaaagagacagactattaactccacagttaattaaggacgtatgttccatgtttatttgttaaagcagtgtgaatagccttcaagcatgtgaataatcttccatcttccccgccacacatacacacacacactttttgtttctttcaggtagacaccttttaaaatgcagaactaactgaggcatttcagtaactttgctttcaaatcaataaagtcaaatgtatggaaacattttgtgccctactctccataccccgtgtactcaaattctctactgtatgaattatgctttaagtagaattcagtgccaaggagaacttggtgaaataaattattttaattttttttttatcctttacaaagccatggattttatttggttgatgtgtgctctgtacacaagccatttcaataggatggagctgttaattattttccaaagagtaatagacatgcaaaagtttcaataaaaactgggccattaacaaataaattaataaactaataagcattcccttctaggtttttgccaaactgcctatccaataacaaatttgagaatcgttgaaaaagctagttatatttcagagaaatgattttcattattgaaactgttctccctagcaggccattttccctttttcctgggagtttagcaagtttaggagagaatagtcatgaaaagaaagggaagaaaggggagaagggaagaggttaaaaagtaagtgctcagacctatgaacgtaatccctttgctagaaatatttaagagcagctcagcttggttgaaactgagttttgtcatcttccatatttgcaggaaggtattttctgacttgcaatgcagctagatgtaaaattttattttatcatactagaaagccttgactagaaaaatgaataaatattgagggtttcctgtccatatctggcttgcatgtgccagaaagcagagaatagaaaatgtaatctccaacatccaagcatcgaaacccaaggggtaggcaattctatgtaggttttggacatgaagtttggtgcatcttggtttatgctggctcaactgctattaaacctctctggcttatagtctcttcattctattagacaagcacgtatcgaacacttgcttcgcacaaggctctttagttaacaatttagcagctactgtttgtgttaaacacacttttcaccaaataggttctgaggcaaacgagagcaatgactatttaaagaaaggctttcccagcatcacttacacatcccaaaactaaaaagatcaactcttccaactgagaaaagactcctggctttgaatggaaacttacagcagagagtcacaggccacggcaacaacaacgacaacaacaaacatttggaatattattctcaactcacgttttaataatacatcttattatttttctagtagagaaactacaaatcagcctcttcaacatttatatacagtttaataagcctcttgcaagttacttgttctctcacctgaggtatttttttcctccccaccttgcccctgttcctcccttcctcttctccctttgcaagaggaaatatttaacatatttgggtccaacttcaataatgtaataattaatacattaaaagcatttaacttcctttctagaaaaatgcacaggctaaggcatagacaaaacaaagagaaatgctgagaaatttgccactggagacaagcaatctgaataaatatttgccatgttgcaactagcaactcatcttcggaagacacagccaggagaatgaagtagaagtgaaaggtttataaatccatttgtaagcatttatcccatatattttaaattcaagaaaaattgtgtttatctttagaattttgtattcaatactttatgtactatgtgactcatgcttctggataaataaagcaccaaatatgtatctgtaaccacaatcacacatattatattaaatatatatctatataacagcc

SEQ ID NO: 426140 - DNA, 2419 bp, Homo sapiens
tctccacgttcccttgagtaaatgtctgggaaagcatgaagcttgatgcaagaaccctgttgtactggcgttttcctcccctgtgaaaacgtaactactgttgggagtgaattgaggatgtagaaaggtggtggaaccaaattgtggtcaatggaaataggagaatatggttctcactcttgagaaaaaaacctaagattagcccaggtagttgcctgtaacttcagtttttctgcctgggtttgatatagtttagggttggggttagattaagatctaaattacatcaggacaaagagacagactattaactccacagttaattaaggacgtatgttccatgtttatttgttaaagcagtgtgaatagccttcaagcatgtgaataatcttccatcttccccgccacacatacacacacacactttttgtttctttcaggtagacaccttttaaaatgcagaactaactgaggcatttcagtaactttgctttcaaatcaataaagtcaaatgtatggaaacattttgtgccctactctccataccccgtgtactcaaattctctactgtatgaattatgctttaagtagaattcagtgccaaggagaacttggtgaaataaattattttaattttttttttatcctttacaaagccatggattttatttggttgatgtgtgctctgtacacaagccatttcaataggatggagctgttaattattttccaaagagtaatagacatgcaaaagtttcaataaaaactgggccattaacaaataaattaataaactaataagcattcccttctaggtttttgccaaactgcctatccaataacaaatttgagaatcgttgaaaaagctagttatatttcagagaaatgattttcattattgaaactgttctccctagcaggccattttccctttttcctgggagtttagcaagtttaggagagaatagtcatgaaaagaaagggaagaaaggggagaagggaagaggttaaaaagtaagtgctcagacctatgaacgtaatccctttgctagaaatatttaagagcagctcagcttggttgaaactgagttttgtcatcttccatatttgcaggaaggtattttctgacttgcaatgcagctagatgtaaaattttattttatcatactagaaagccttgactagaaaaatgaataaatattgagggtttcctgtccatatctggcttgcatgtgccagaaagcagagaatagaaaatgtaatctccaacatccaagcatcgaaacccaaggggtaggcaattctatgtaggttttggacatgaagtttggtgcatcttggtttatgctggctcaactgctattaaacctctctggcttatagtctcttcattctattagacaagcacgtatcgaacacttgcttcgcacaaggctctttagttaacaatttagcagctactgtttgtgttaaacacacttttcaccaaataggttctgaggcaaacgagagcaatgactatttaaagaaaggctttcccagcatcacttacacatcccaaaactaaaaagatcaactcttccaactgagaaaagactcctggctttgaatggaaacttacagcagagagtcacaggccacggcaacaacaacgacaacaacaaacatttggaatattattctcaactcacgttttaataatacatcttattatttttctagtagagaaactacaaatcagcctcttcaacatttatatacagtttaataagcctcttgcaagttacttgttctctcacctgaggtatttttttcctccccaccttgcccctgttcctcccttcctcttctccctttgcaagaggaaatatttaacatatttgggtccaacttcaataatgtaataattaatacattaaaagcatttaacttcctttctagaaaaatgcacaggctaaggcatagacaaaacaaagagaaatgctgagaaatttgccactggagacaagcaatctgaataaatatttgccaaaagttctttttatgtcatatagtgtcaggatttgaaggagctatttttttttaatgttgcaactagcaactcatcttcggaagacacagccaggagaatgaagtagaagtgaaaggtttataaatccatttgtaagcatttatcccatatattttaaattcaagaaaaattgtgtttatctttagaattttgtattcaatactttatgtactatgtgactcatgcttctggataaataaagcaccaaatatgtatctgtaaccacaatcacacatattatattaaatatatatctatataacagccaaataaaaaaaaaatggcaacaaccaagcacgaatacaaacaaaagagcacaagagaagaggggagcgggaataaaaacgc

SEQ ID NO: 426141 - DNA, 2255 bp, Homo sapiens
atcgaagagaaatctagaggatcccgggagagagatgtagaaaggtggtggaaccaaattgtggtcaatggaaataggagaatatggttctcactcttgagaaaaaaacctaagattagcccaggtagttgcctgtaacttcagtttttctgcctgggtttgatatagtttagggttggggttagattaagatctaaattacatcaggacaaagagacagactattaactccacagttaattaaggacgtatgttccatgtttatttgttaaagcagtgtgaatagccttcaagcatgtgaataatcttccatcttccccgccacacatacacacacacactttttgtttctttcaggtagacaccttttaaaatgcagaactaactgaggcatttcagtaactttgctttcaaatcaataaagtcaaatgtatggaaacattttgtgccctactctccataccccgtgtactcaaattctctactgtatgaattatgctttaagtagaattcagtgccaaggagaacttggtgaaataaattattttaattttttttttatcctttacaaagccatggattttatttggttgatgtgtgctctgtacacaagccatttcaataggatggagctgttaattattttccaaagagtaatagacatgcaaaagtttcaataaaaactgggccattaacaaataaattaataaactaataagcattcccttctaggtttttgccaaactgcctatccaataacaaatttgagaatcgttgaaaaagctagttatatttcagagaaatgattttcattattgaaactgttctccctagcaggccattttccctttttcctgggagtttagcaagtttaggagagaatagtcatgaaaagaaagggaagaaaggggagaagggaagaggttaaaaagtaagtgctcagacctatgaacgtaatccctttgctagaaatatttaagagcagctcagcttggttgaaactgagttttgtcatcttccatatttgcaggaaggtattttctgacttgcaatgcagctagatgtaaaattttattttatcatactagaaagccttgactagaaaaatgaataaatattgagggtttcctgtccatatctggcttgcatgtgccagaaagcagagaatagaaaatgtaatctccaacatccaagcatcgaaacccaaggggtaggcaattctatgtaggttttggacatgaagtttggtgcatcttggtttatgctggctcaactgctattaaacctctctggcttatagtctcttcattctattagacaagcacgtatcgaacacttgcttcgcacaaggctctttagttaacaatttagcagctactgtttgtgttaaacacacttttcaccaaataggttctgaggcaaacgagagcaatgactatttaaagaaaggctttcccagcatcacttacacatcccaaaactaaaaagatcaactcttccaactgagaaaagactcctggctttgaatggaaacttacagcagagagtcacaggccacggcaacaacaacgacaacaacaaacatttggaatattattctcaactcacgttttaataatacatcttattatttttctagtagagaaactacaaatcagcctcttcaacatttatatacagtttaataagcctcttgcaagttacttgttctctcacctgaggtatttttttcctccccaccttgcccctgttcctcccttcctcttctccctttgcaagaggaaatatttaacatatttgggtccaacttcaataatgtaataattaatacattaaaagcatttaacttcctttctagaaaaatgcacaggctaaggcatagacaaaacaaagagaaatgctgagaaatttgccactggagacaagcaatctgaataaatatttgccaaaagttctttttatgtcatatagtgtcaggatttgaaggagctatttttttttaatgttgcaactagcaactcatcttcggaagacacagccaggagaatgaagtagaagtgaaaggtttataaatccatttgtaagcatttatcccatatattttaaattcaagaaaaattgtgtttatctttagaattttgtattcaatactttatgtactatgtgactcatgcttctggataaataaagcaccaaatatgtatctgtaaccacaatcacacatattatattaaatatatatctatataacagcc

SEQ ID NO: 426142 - DNA, 878 bp, Homo sapiens
agcgggataacagccacacgtgatcggccaacactgagtcttacctcgttgtggcgtcagaaccgccgtcgctcgctcccttctcggcagtggtacctgttcccggtgtccctgaggacgtgcgggccaggtacggccccgaaagtaggaagcggagggggagcaggtttgcggggccaagtgttgcggcgacgcacctcacgtcgagaatcgggaggaggagactgcaaggataggcccaggagtaatggagtccaaagaggaacgagcgttaaacaatctcatcgtggaaaatgtcaaccaggaaaatgatgaaaaagatgaaaaggagcaagttgctaataaaggggagcccttggccctacctttgaatgttagtgaatactgtgtgcctagaggaaaccgtaggcggttccgcgttaggcagcccatcctgcagtatagatgggacataatgcataggcttggagagccacaggcaaggatgagagaggagaatatggaaaggattggggaggaggtgagacagctgatggaaaagctgagggaaaagcagttgagtcatagtctgcgggcagtcagcactgatccccctcaccatgaccatcacgatgagttttgccttatgccctgaatcctgatggtttccctgaagttaatagggagacccctgcttcctaaacttacacatttgtggtgtacctttgtcgtaaacgttttgatgttacctatttcttgtgggtctcctattaccagcttctaaatgaatgttgtttttgacccagtttgtaagtttctgtcagcaggagagttttacctattgcatggaaagatgctcattatatattgtgaagttaataaaacagttttaaaaagca

SEQ ID NO: 426143 - DNA, 904 bp, Homo sapiens
  misc_feature (886)..(886): n is a, c, g, or t
  misc_feature (897)..(897): n is a, c, g, or t
agcgggataacagccacacgtgatcggccaacactgagtcttacctcgttgtggcgtcagaaccgccgtcgctcgctcccttctcggcagtggtacctgttcccggtgtccctgaggacgtgcgggccaggtacggccccgaaagtaggaagcggagggggagcaggtttgcggggccaagtgttgcggcgacgcacctcacgtcgagaatcgggaggaggagactgcaaggataggcccaggagtaatggagtccaaagaggaacgagcgttaaacaatctcatcgtggaaaatgtcaaccaggaaaatgatgaaaaagatgaaaaggagcaagttgctaataaaggggagcccttggccctacctttgaatgttagtgaatactgtgtgcctagaggaaaccgtaggcggttccgcgttaggcagcccatcctgcagtatagatgggacataatgcataggcttggagagccacaggcaaggatgagagaggagaatatggaaaggattggggaggaggtgagacagctgatggaaaagctgagggaaaagcagttgagtcatagtctgcgggcagtcagcactgatccccctcaccatgaccatcacgatgagttttgccttatgccctgaatcctgatggtttccctgaagttaatagggagacccctgcttcctaaacttacacatttgtggtgtacctttgtcgtaaacgttttgatgttacctatttcttgtgggtctcctattaccagcttctaaatgaatgttgtttttgacccagtttgtaagtttctgtcagcaggagagttttacctattgcatggaaagatgctcattatatattgtgaagttaataaaacagttttaaaaagcaaaaaaaanagaaaaatccncagcgcc

SEQ ID NO: 426144 - DNA, 300 bp, Homo sapiens
agcgggataacagccacacgtgatcggccaacactgagtcttacctcgttgtggcgtcagaaccgccgtcgctcgctcccttctcggcagtggtacctgttcccggtgtccctgaggacgtgcgggccaggtacggccccgaaagtaggaagcggagggggagcaggtttgcggggccaagtgttgcggcgacgcacctcacgtcgagaatcgggaggaggagactgcaaggataggcccaggagtaatggagtccaagaggaacgagcgatctacagtgcagggatcctctataatccc

SEQ ID NO: 426145 - DNA, 842 bp, Homo sapiens
agcgggataacagccacacgtgatcggccaacactgagtcttacctcgttgtggcgtcagaaccgccgtcgctcgctcccttctcggcagtggtacctgttcccggtgtccctgaggacgtgcgggccaggtttgcggggccaagtgttgcggcgacgcacctcacgtcgagaatcgggaggaggagactgcaaggataggcccaggagtaatggagtccaaagaggaacgagcgttaaacaatctcatcgtggaaaatgtcaaccaggaaaatgatgaaaaagatgaaaaggagcaagttgctaataaaggggagcccttggccctacctttgaatgttagtgaatactgtgtgcctagaggaaaccgtaggcggttccgcgttaggcagcccatcctgcagtatagatgggacataatgcataggcttggagagccacaggcaaggatgagagaggagaatatggaaaggattggggaggaggtgagacagctgatggaaaagctgagggaaaagcagttgagtcatagtctgcgggcagtcagcactgatccccctcaccatgaccatcacgatgagttttgccttatgccctgaatcctgatggtttccctgaagttaatagggagacccctgcttcctaaacttacacatttgtggtgtacctttgtcgtaaacgttttgatgttacctatttcttgtgggtctcctattaccagcttctaaatgaatgttgtttttgacccagtttgtaagtttctgtcagcaggagagttttacctattgcatggaaagatgctcattatatattgtgaagttaataaaacagttttaaaaagca

SEQ ID NO: 426146 - DNA, 1169 bp, Homo sapiens
agcgggataacagccacacgtgatcggccaacactgagtcttacctcgttgtggcgtcagaaccgccgtcgctcgctcccttctcggcagtggtacctgttcccggtgtccctgaggacgtgcgggccaggtttgcggggccaagtgttgcggcgacgcacctcacgtcgagaatcgggaggaggagactgcaaggataggcccaggagtaatggagtccaaagaggaacgagcgttaaacaatctcatcgtggaaaatgtcaaccaggaaaatgatgaaaaagatgaaaaggagcaagttgctaataaaggggagcccttggccctacctttgaatgttagtgaatactgtgtgcctagaggaaaccgtaggcggttccgcgttaggcagcccatcctgcagtatagatgggacataatgcataggcttggagagccacaggcaaggatgagagaggagaatatggaaaggattggggaggaggtgagacagctgatggaaaagctgagggaaaagcagttgagtcatagtctgcgggcagtcagcactgatccccctcaccatgaccatcacgatgagttttgccttatgccctgaatcctgatggtttccctgaagttaatagggagacccctgcttcctaaacttacacatttgtggtgtacctttgtcgtaaacgttttgatgttacctatttcttgtgggtctcctattaccagcttctaaatgaatgttgtttttgacccagtttgtaagtttctgtcagcaggagagttttacctattgcatggaaagatgctcattatatattgtgaagttaataaaacagttttaaaaagcaaaaaaaaaaaaaagggggggggcataagagtttcttcggggggccaactaacgcgtacccagcgtttcgtgtcacaacggtggcccaatataggtgatcggaatataaatacgctagagacgggccgcgcgctttaaaaagctctggtaggtggcaaacgtgccacgtgggaacattgggtgacgaaaccatgctcgtcggcgggaacaactgggcaaacacctctgagacatccagccgccaggtcaaactatcaagttaaggctacatagtgtgaacacggcatatatagcgggagacaatgtgatcggatatatataggtatag

SEQ ID NO: 426147 - DNA, 1681 bp, Homo sapiens
agcgggataacagccacacgtgatcggccaacactgagtcttacctcgttgtggcgtcagaaccgccgtcgctcgctcccttctcggcagtggtacctgttcccggtgtccctgaggacgtgcgggccaggtacggccccgaaagtaggaagcggagggggagcaggtaagggacccggagggggtccctggggttggtgtgggggagcagccccggcctgcggatgccccatccccgggcagcagcgcggagacgcagccggtccacgatgcagccccggggccccgccgcgggaccgcgagccttgtgtgagcggaggggtgcccggccccgcgggagccggcgatcctgaggctacgacctttcggaagcacctgcctccgtcaccagcgcaagcttttccaacacccctgctccgcccttcttgatgcagaaaatggtggtcagcttggggggctgggcggctgaggcggggggcgagagcggctaggagggcccgggcccggcgtggggaaggggccgggtggcggcgggtcctctctagcgttccgctgcagcagcccccactcttcccaccccggcgtctgcaggtttgcggggccaagtgttgcggcgacgcacctcacgtcgagaatcgggaggaggagactgcaaggataggcccaggtcagtgcgagggacggtggtggggagggggtcagaacatgaggaaagcccagtctgagaccccaatccgtgccttccaccccgcacacttagcaatcccccacccccaccccttcttcgtcctccattttggtgcctgcagaggcctggagatggatctgcagagaagatggtgggctttgcgggagagaagggcacagactggctcccctcgcccccccgagggtacatggggcctctctggtggaaaaaaaatgaaatttaaaaaaggcctttgaaatccagggctctgaattttgaaaggtgggtagtcgggcctctgtcctcggtgctgatcagttcaccaagaattgagtccattttctctctgtctcctaggagtaatggagtccaaagaggaacgagcgttaaacaatctcatcgtggaaaatgtcaaccaggaaaatgatgaaaaagatgaaaaggagcaagttgctaataaaggggagcccttggccctacctttgaatgttagtgaatactgtgtgcctagaggaaaccgtaggcggttccgcgttaggcagcccatcctgcagtatagatgggacataatgcataggcttggagagccacaggcaaggatgagagaggagaatatggaaaggattggggaggaggtgagacagctgatggaaaagctgagggaaaagcagttgagtcatagtctgcgggcagtcagcactgatccccctcaccatgaccatcacgatgagttttgccttatgccctgaatcctgatggtttccctgaagttaatagggagacccctgcttcctaaacttacacatttgtggtgtacctttgtcgtaaacgttttgatgttacctatttcttgtgggtctcctattaccagcttctaaatgaatgttgtttttgacccagtttgtaagtttctgtcagcaggagagttttacctattgcatggaaagatgctcattatatattgtgaagttaataaaacagttttaaaaagca

SEQ ID NO: 426148 - DNA, 1814 bp, Homo sapiens
aagtggttctagggcaggcgggcgggtttgagagggcggggattgcgactctcacaccctgagctccggtgctcctttcctaactccactggctgcggcatctgtgggaaaagtgtggctgggtcttcgaggagccgcaccaatggcttccgtgctgtcctacgaaagcctggtccacgccgtggccggagccgtgggaagcgtgacagcaatgacagtgttttttcccctggatacagctagacttcgacttcaggttgatgagaaaagaaaatccaaaactacacacatggtgctcctggagatcattaaagaagaaggactcctggcaccatatcgagggtggtttccagtgatttccagtctctgctgctccaattttgtctatttctacacttttaatagcctcaaagcactctgggtcaaaggtcaacattctaccactggaaaagatctggtagttgggtttgttgcaggagtggttaatgtgttgctaacaactccactctgggtggtaaacaccagactgaagcttcaaggagcaaaatttaggaatgaagacattgtaccaacaaactacaaaggtatcattgatgcttttcatcagatcattcgcgatgaaggaatctcggctttatggaatggcacatttccctcattgctgttggtcttcaatcctgccatccagttcatgttttatgaaggtttaaaacggcagcttttaaagaaacggatgaagctttcttccttggatgtgttcatcattggtgcagtagccaaagcgattgccaccacggtgacctatcccctgcagacggtacagtcaattctgaggtttgggcgtcatagactaaacccagaaaacagaacattgggaagtcttcggaatattctctatcttcttcaccaacgagtaagacgttttggaataatgggactctacaaaggccttgaagccaaactgctgcagacagtcctcactgctgctctcatgttccttgtttatgagaaactgacagctgccaccttcacagttatggggctgaagcgtgcacaccaacactgagacgccttcccatgaaaaattccgaagatgctcaagagggaggtttcctcctgagtgaagagaagtgattctcccttgactctggctcctgccaccacaaatgttaccctcattggcttgaaaagcatccaagggtgcacagggagtatggccaactggacctgttgtcaccttaattgtcatgctggctggttggattttggggtggcagttggactaatgtgaaaaaaacattgctgaaaacctaaaaatgaaagtttgtgagtgtttattggttttcttaagagaaatggactattttgctctcatgtgtaatgttttctatttaaatctttcttaaatataccagctgttctctttccctgaactctcccccaggttctaggacaaatttaataacatgtaattctcctcaaatacttttgtatgtctcagtgttggtgttttcctccctaaaactaacattagggctgtgccacgggcatgactttatttttgttgggcttttttttccctgcttaaggagaggtgtcttttttggatatgagctatttattttgtgaaatgaaaattgttcacccaaatgattctcttataaactatttgtaaatgtcacttattcattagtgtttgacataatttttagaatatttattttgaatcaatcctttcattacgaaagacttgaagttttgtgtccattcttacaagccctggtcagtcaagtcccaataaatggtcagcacaa

SEQ ID NO: 426149 - DNA, 2272 bp, Homo sapiens
aagtggttctagggcaggcgggcgggtttgagagggcggggattgcgactctcacaccctgagctccggtgctcctttcctaactccactggctgcggcatctgtgggaaaagtgtggctgggtcttcgaggagccgcaccaatggcttccgtgctgtcctacgaaagcctggtccacgccgtggccggagccgtgggaagcgtgacagcaatgacagtgttttttcccctggatacagctagacttcgacttcaggttgatgagaaaagaaaatccaaaactacacacatggtgctcctggagatcattaaagaagaaggactcctggcaccatatcgagggtggtttccagtgatttccagtctctgctgctccaattttgtctatttctacacttttaatagcctcaaagcactctgggtcaaaggtcaacattctaccactggaaaagatctggtagttgggtttgttgcaggagtggttaatgtgttgctaacaactccactctgggtggtaaacaccagactgaagcttcaaggagcaaaatttaggaatgaagacattgtaccaacaaactacaaaggtatcattgatgcttttcatcagatcattcgcgatgaaggaatctcggctttatggaatggcacatttccctcattgctgttggtcttcaatcctgccatccagttcatgttttatgaaggtttaaaacggcagcttttaaagaaacggatgaagctttcttccttggatgtgttcatcattggtgcagtagccaaagcgattgccaccacggtgacctatcccctgcagacggtacagtcaattctgaggtttgggcgtcatagactaaacccagaaaacagaacattgggaagtcttcggaatattctctatcttcttcaccaacgagtaagacgttttggaataatgggactctacaaaggccttgaagccaaactgctgcagacagtcctcactgctgctctcatgttccttgtttatgagaaactgacagctgccaccttcacagttatggggctgaagcgtgcacaccaacactgagacgccttcccatgaaaaattccgaagatgctcaagagggaggtttcctcctgagtgaagagaagtgattctcccttgactctggctcctgccaccacaaatgttaccctcattggcttgaaaagcatccaagggtgcacagggagtatggccaactggacctgttgtcaccttaattgtcatgctggctggttggattttggggtggcagttggactaatgtgaaaaaaacattgctgaaaacctaaaaatgaaagtttgtgagtgtttattggttttcttaagagaaatggactattttgctctcatgtgtaatgttttctatttaaatctttcttaaatataccagctgttctctttccctgaactctcccccaggttctaggacaaatttaataacatgtaattctcctcaaatacttttgtatgtctcagtgttggtgttttcctccctaaaactaacattagggctgtgccacgggcatgactttatttttgttgggcttttttttccctgcttaaggagaggtgtcttttttggatatgagctatttattttgtgaaatgaaaattgttcacccaaatgattctcttataaactatttgtaaatgtcacttattcattagtgtttgacataatttttagaatatttattttgaatcaatcctttcattacgaaagacttgaagttttgtgtccattcttacaagccctggtcagtcaagtcccaataaatggtcagcacaaaaaagatattcttgaaaattgctctttattaaggtattacgttgagtttgcaaccagatgggaaaaatcacaaaaatgagaaggggagcagatatcttgttgaggtctggatattatctccctttataaacttggtgtaggccgtatattttgaaaataaacatctggttgaggttatttcatttggaaaccttccttagagtcctgttgctcagtgtggtccatcagacggtagtactgccacaagctgagagcttgctgggcacgcaacccagagtttctgaatcctgttccgtattttaacattcccaggtgattcacagccacattaaagttcaggagaccataggacccctgacccatgagaagaagtgattggtttcgattatagacatcaagataaagatttttctcaaaggaaagagattaatgtattaaaacaacctctgaaaaatcta

SEQ ID NO: 426150 - DNA, 2189 bp, Homo sapiens
aagtggttctagggcaggcgggcgggtttgagagggcggggattgcgactctcacaccctgagctccggtgctcctttcctaactccactggctgcggcatctgtgggaaaagtgtggctgggtcttcgaggagccgcaccaatggcttccgtgctgtcctacgaaagcctggtccacgccgtggccggagccgtgggaagcgtgacagcaatgacagtgttttttcccctggatacagctagacttcgacttcaggttgatgagaaaagaaaatccaaaactacacacatggtgctcctggagatcattaaagaagaaggactcctggcaccatatcgagggtggtttccagtgatttccagtctctgctgctccaattttgtctatttctacacttttaatagcctcaaagcactctgggtcaaaggtcaacattctaccactggaaaagatctggtagttgggtttgttgcaggagtggttaatgtgttgctaacaactccactctgggtggtaaacaccagactgaagcttcaaggagcaaaatttaggaatgaagacattgtaccaacaaactacaaaggtatcattgatgcttttcatcagatcattcgcgatgaaggaatctcggctttatggaatggcacatttccctcattgctgttggtcttcaatcctgccatccagttcatgttttatgaaggtttaaaacggcagcttttaaagaaacggatgaagctttcttccttggatgtgttcatcattggtgcagtagccaaagcgattgccaccacggtgacctatcccctgcagacggtacagtcaattctgaggacgttttggaataatgggactctacaaaggccttgaagccaaactgctgcagacagtcctcactgctgctctcatgttccttgtttatgagaaactgacagctgccaccttcacagttatggggctgaagcgtgcacaccaacactgagacgccttcccatgaaaaattccgaagatgctcaagagggaggtttcctcctgagtgaagagaagtgattctcccttgactctggctcctgccaccacaaatgttaccctcattggcttgaaaagcatccaagggtgcacagggagtatggccaactggacctgttgtcaccttaattgtcatgctggctggttggattttggggtggcagttggactaatgtgaaaaaaacattgctgaaaacctaaaaatgaaagtttgtgagtgtttattggttttcttaagagaaatggactattttgctctcatgtgtaatgttttctatttaaatctttcttaaatataccagctgttctctttccctgaactctcccccaggttctaggacaaatttaataacatgtaattctcctcaaatacttttgtatgtctcagtgttggtgttttcctccctaaaactaacattagggctgtgccacgggcatgactttatttttgttgggcttttttttccctgcttaaggagaggtgtcttttttggatatgagctatttattttgtgaaatgaaaattgttcacccaaatgattctcttataaactatttgtaaatgtcacttattcattagtgtttgacataatttttagaatatttattttgaatcaatcctttcattacgaaagacttgaagttttgtgtccattcttacaagccctggtcagtcaagtcccaataaatggtcagcacaaaaaagatattcttgaaaattgctctttattaaggtattacgttgagtttgcaaccagatgggaaaaatcacaaaaatgagaaggggagcagatatcttgttgaggtctggatattatctccctttataaacttggtgtaggccgtatattttgaaaataaacatctggttgaggttatttcatttggaaaccttccttagagtcctgttgctcagtgtggtccatcagacggtagtactgccacaagctgagagcttgctgggcacgcaacccagagtttctgaatcctgttccgtattttaacattcccaggtgattcacagccacattaaagttcaggagaccataggacccctgacccatgagaagaagtgattggtttcgattatagacatcaagataaagatttttctcaaaggaaagagattaatgtattaaaacaacctctgaaaaatcta

SEQ ID NO: 426151 - DNA, 2229 bp, Homo sapiens
aagtggttctagggcaggcgggcgggtttgagagggcggggattgcgactctcacaccctgagctccggtgctcctttcctaactccactggctgcggcatctgtgggaaaagtgtggctgggtcttcgaggagccgcaccaatggcttccgtgctgtcctacgaaagcctggtccacgccgtggccggagccgtgctagacttcgacttcaggttgatgagaaaagaaaatccaaaactacacacatggtgctcctggagatcattaaagaagaaggactcctggcaccatatcgagggtggtttccagtgatttccagtctctgctgctccaattttgtctatttctacacttttaatagcctcaaagcactctgggtcaaaggtcaacattctaccactggaaaagatctggtagttgggtttgttgcaggagtggttaatgtgttgctaacaactccactctgggtggtaaacaccagactgaagcttcaaggagcaaaatttaggaatgaagacattgtaccaacaaactacaaaggtatcattgatgcttttcatcagatcattcgcgatgaaggaatctcggctttatggaatggcacatttccctcattgctgttggtcttcaatcctgccatccagttcatgttttatgaaggtttaaaacggcagcttttaaagaaacggatgaagctttcttccttggatgtgttcatcattggtgcagtagccaaagcgattgccaccacggtgacctatcccctgcagacggtacagtcaattctgaggtttgggcgtcatagactaaacccagaaaacagaacattgggaagtcttcggaatattctctatcttcttcaccaacgagtaagacgttttggaataatgggactctacaaaggccttgaagccaaactgctgcagacagtcctcactgctgctctcatgttccttgtttatgagaaactgacagctgccaccttcacagttatggggctgaagcgtgcacaccaacactgagacgccttcccatgaaaaattccgaagatgctcaagagggaggtttcctcctgagtgaagagaagtgattctcccttgactctggctcctgccaccacaaatgttaccctcattggcttgaaaagcatccaagggtgcacagggagtatggccaactggacctgttgtcaccttaattgtcatgctggctggttggattttggggtggcagttggactaatgtgaaaaaaacattgctgaaaacctaaaaatgaaagtttgtgagtgtttattggttttcttaagagaaatggactattttgctctcatgtgtaatgttttctatttaaatctttcttaaatataccagctgttctctttccctgaactctcccccaggttctaggacaaatttaataacatgtaattctcctcaaatacttttgtatgtctcagtgttggtgttttcctccctaaaactaacattagggctgtgccacgggcatgactttatttttgttgggcttttttttccctgcttaaggagaggtgtcttttttggatatgagctatttattttgtgaaatgaaaattgttcacccaaatgattctcttataaactatttgtaaatgtcacttattcattagtgtttgacataatttttagaatatttattttgaatcaatcctttcattacgaaagacttgaagttttgtgtccattcttacaagccctggtcagtcaagtcccaataaatggtcagcacaaaaaagatattcttgaaaattgctctttattaaggtattacgttgagtttgcaaccagatgggaaaaatcacaaaaatgagaaggggagcagatatcttgttgaggtctggatattatctccctttataaacttggtgtaggccgtatattttgaaaataaacatctggttgaggttatttcatttggaaaccttccttagagtcctgttgctcagtgtggtccatcagacggtagtactgccacaagctgagagcttgctgggcacgcaacccagagtttctgaatcctgttccgtattttaacattcccaggtgattcacagccacattaaagttcaggagaccataggacccctgacccatgagaagaagtgattggtttcgattatagacatcaagataaagatttttctcaaaggaaagagattaatgtattaaaacaacctctgaaaaatcta

SEQ ID NO: 426152 - DNA, 2053 bp, Homo sapiens
aagtggttctagggcaggcgggcgggtttgagagggcggggattgcgactctcacaccctgagctccggtgctcctttcctaactccactggctgcggcatctgtgggaaaagtgtggctgggtcttcgaggagccgcaccaatggcttccgtgctgtcctacgaaagcctggtccacgccgtggccggagccgtgggaagcgtgacagcaatgacagtgttttttcccctggatacagctagacttcgacttcagggagtggttaatgtgttgctaacaactccactctgggtggtaaacaccagactgaagcttcaaggagcaaaatttaggaatgaagacattgtaccaacaaactacaaaggtatcattgatgcttttcatcagatcattcgcgatgaaggaatctcggctttatggaatggcacatttccctcattgctgttggtcttcaatcctgccatccagttcatgttttatgaaggtttaaaacggcagcttttaaagaaacggatgaagctttcttccttggatgtgttcatcattggtgcagtagccaaagcgattgccaccacggtgacctatcccctgcagacggtacagtcaattctgaggtttgggcgtcatagactaaacccagaaaacagaacattgggaagtcttcggaatattctctatcttcttcaccaacgagtaagacgttttggaataatgggactctacaaaggccttgaagccaaactgctgcagacagtcctcactgctgctctcatgttccttgtttatgagaaactgacagctgccaccttcacagttatggggctgaagcgtgcacaccaacactgagacgccttcccatgaaaaattccgaagatgctcaagagggaggtttcctcctgagtgaagagaagtgattctcccttgactctggctcctgccaccacaaatgttaccctcattggcttgaaaagcatccaagggtgcacagggagtatggccaactggacctgttgtcaccttaattgtcatgctggctggttggattttggggtggcagttggactaatgtgaaaaaaacattgctgaaaacctaaaaatgaaagtttgtgagtgtttattggttttcttaagagaaatggactattttgctctcatgtgtaatgttttctatttaaatctttcttaaatataccagctgttctctttccctgaactctcccccaggttctaggacaaatttaataacatgtaattctcctcaaatacttttgtatgtctcagtgttggtgttttcctccctaaaactaacattagggctgtgccacgggcatgactttatttttgttgggcttttttttccctgcttaaggagaggtgtcttttttggatatgagctatttattttgtgaaatgaaaattgttcacccaaatgattctcttataaactatttgtaaatgtcacttattcattagtgtttgacataatttttagaatatttattttgaatcaatcctttcattacgaaagacttgaagttttgtgtccattcttacaagccctggtcagtcaagtcccaataaatggtcagcacaaaaaagatattcttgaaaattgctctttattaaggtattacgttgagtttgcaaccagatgggaaaaatcacaaaaatgagaaggggagcagatatcttgttgaggtctggatattatctccctttataaacttggtgtaggccgtatattttgaaaataaacatctggttgaggttatttcatttggaaaccttccttagagtcctgttgctcagtgtggtccatcagacggtagtactgccacaagctgagagcttgctgggcacgcaacccagagtttctgaatcctgttccgtattttaacattcccaggtgattcacagccacattaaagttcaggagaccataggacccctgacccatgagaagaagtgattggtttcgattatagacatcaagataaagatttttctcaaaggaaagagattaatgtattaaaacaacctctgaaaaatcta

SEQ ID NO: 426153 - DNA, 1992 bp, Homo sapiens
aagtggttctagggcaggcgggcgggtttgagagggcggggattgcgactctcacaccctgagctccggtgctcctttcctaactccactggctgcggcatctgtgggaaaagtgtggctgggtcttcgaggagccgcaccaatggcttccgtgctgtcctacgaaagcctggtccacgccgtggccggagccgtggagtggttaatgtgttgctaacaactccactctgggtggtaaacaccagactgaagcttcaaggagcaaaatttaggaatgaagacattgtaccaacaaactacaaaggtatcattgatgcttttcatcagatcattcgcgatgaaggaatctcggctttatggaatggcacatttccctcattgctgttggtcttcaatcctgccatccagttcatgttttatgaaggtttaaaacggcagcttttaaagaaacggatgaagctttcttccttggatgtgttcatcattggtgcagtagccaaagcgattgccaccacggtgacctatcccctgcagacggtacagtcaattctgaggtttgggcgtcatagactaaacccagaaaacagaacattgggaagtcttcggaatattctctatcttcttcaccaacgagtaagacgttttggaataatgggactctacaaaggccttgaagccaaactgctgcagacagtcctcactgctgctctcatgttccttgtttatgagaaactgacagctgccaccttcacagttatggggctgaagcgtgcacaccaacactgagacgccttcccatgaaaaattccgaagatgctcaagagggaggtttcctcctgagtgaagagaagtgattctcccttgactctggctcctgccaccacaaatgttaccctcattggcttgaaaagcatccaagggtgcacagggagtatggccaactggacctgttgtcaccttaattgtcatgctggctggttggattttggggtggcagttggactaatgtgaaaaaaacattgctgaaaacctaaaaatgaaagtttgtgagtgtttattggttttcttaagagaaatggactattttgctctcatgtgtaatgttttctatttaaatctttcttaaatataccagctgttctctttccctgaactctcccccaggttctaggacaaatttaataacatgtaattctcctcaaatacttttgtatgtctcagtgttggtgttttcctccctaaaactaacattagggctgtgccacgggcatgactttatttttgttgggcttttttttccctgcttaaggagaggtgtcttttttggatatgagctatttattttgtgaaatgaaaattgttcacccaaatgattctcttataaactatttgtaaatgtcacttattcattagtgtttgacataatttttagaatatttattttgaatcaatcctttcattacgaaagacttgaagttttgtgtccattcttacaagccctggtcagtcaagtcccaataaatggtcagcacaaaaaagatattcttgaaaattgctctttattaaggtattacgttgagtttgcaaccagatgggaaaaatcacaaaaatgagaaggggagcagatatcttgttgaggtctggatattatctccctttataaacttggtgtaggccgtatattttgaaaataaacatctggttgaggttatttcatttggaaaccttccttagagtcctgttgctcagtgtggtccatcagacggtagtactgccacaagctgagagcttgctgggcacgcaacccagagtttctgaatcctgttccgtattttaacattcccaggtgattcacagccacattaaagttcaggagaccataggacccctgacccatgagaagaagtgattggtttcgattatagacatcaagataaagatttttctcaaaggaaagagattaatgtattaaaacaacctctgaaaaatcta

SEQ ID NO: 426154 - DNA, 1794 bp, Homo sapiens
aagtggttctagggcaggcgggcgggtttgagagggcggggattgcgactctcacaccctgagctccggtgctcctttcctaactccactggctgcggcatctgtgggaaaagtgtggctgggtcttcgaggagccgcaccaatggcttccgtgctgtcctacgaaagcctggtccacgccgtggccggagccgtgggaagcgtgacagcaatgacagtgttttttcccctggatacagctagacttcgacttcagggagtggttaatgtgttgctaacaactccactctgggtggtaaacaccagactgaagcttcaaggagcaaaatttaggaatgaagacattgtaccaacaaactacaaaggtatcattgatgcttttcatcagatcattcgcgatgaaggaatctcggctttatggaatggcacatttccctcattgctgttggtcttcaatcctgccatccagttcatgttttatgaaggtttaaaacggcagcttttaaagaaacggatgaagctttcttccttggatgtgttcatcattggtgcagtagccaaagcgattgccaccacggtgacctatcccctgcagacggtacagtcaattctgaggtttgggcgtcatagactaaacccagaaaacagaacattgggaagtcttcggaatattctctatcttcttcaccaacgagtaagacgttttggaataatgggactctacaaaggccttgaagccaaactgctgcagacagtcctcactgctgctctcatgttccttgtttatgagaaactgacattggactaatgtgaaaaaaacattgctgaaaacctaaaaatgaaagtttgtgagtgtttattggttttcttaagagaaatggactattttgctctcatgtgtaatgttttctatttaaatctttcttaaatataccagctgttctctttccctgaactctcccccaggttctaggacaaatttaataacatgtaattctcctcaaatacttttgtatgtctcagtgttggtgttttcctccctaaaactaacattagggctgtgccacgggcatgactttatttttgttgggcttttttttccctgcttaaggagaggtgtcttttttggatatgagctatttattttgtgaaatgaaaattgttcacccaaatgattctcttataaactatttgtaaatgtcacttattcattagtgtttgacataatttttagaatatttattttgaatcaatcctttcattacgaaagacttgaagttttgtgtccattcttacaagccctggtcagtcaagtcccaataaatggtcagcacaaaaaagatattcttgaaaattgctctttattaaggtattacgttgagtttgcaaccagatgggaaaaatcacaaaaatgagaaggggagcagatatcttgttgaggtctggatattatctccctttataaacttggtgtaggccgtatattttgaaaataaacatctggttgaggttatttcatttggaaaccttccttagagtcctgttgctcagtgtggtccatcagacggtagtactgccacaagctgagagcttgctgggcacgcaacccagagtttctgaatcctgttccgtattttaacattcccaggtgattcacagccacattaaagttcaggagaccataggacccctgacccatgagaagaagtgattggtttcgattatagacatcaagataaagatttttctcaaaggaaagagattaatgtattaaaacaacctctgaaaaatcta

SEQ ID NO: 426155 - DNA, 878 bp, Homo sapiens
aagtggttctagggcaggcgggcgggtttgagagggcggggattgcgactctcacaccctgagctccggtgctcctttcctaactccactggctgcggcatctgtgggaaaagtgtggctgggtcttcgaggagccgcaccaatggcttccgtgctgtcctacgaaagcctggtccacgccgtggccggagccgtggctaaccattaagaggccgagaaaataagattgcaccagcaaaggagacaaacgaaggatggatcagtactgcaggagggaagctaagaactaagagtgaaagccacgtgaagaaagtgtttctggggaaggaagtagaccagctgggtcagatgctgctgatgggctcctgggttcaagcgattctcctgcctcagcctctcgccgagtggctgggtttacaggcatgtgccaccacgcctggctaattttgtattttcagtagagacggggtttctccatgttggtcagcctggtcttgagctcccgccctcaggtgatccgcctgccttggcctcccaaagtgctgggattacaggcgtgagccactgcgcctggcctggaattacttttctaactttgtttatgcctgaatcaaaaacgattaatgaaattatatcgtcatacatagtattgtataacttaattttttaagaagcaaatatggcataatagctgaaaaaaaaggttctgtagtaaagcttaactatgaatgccatcatcaatcgaactataaaacagggacaataacaatgcctcacttaactgggttcttgtgggaagtaaatgtgattatatttgtggagcatctagcataatggaacgttgtagtaagaccataattattcatttctgtctcaag

SEQ ID NO: 426156 - DNA, 418 bp, Homo sapiens
aagtggttctagggcaggcgggcgggtttgagagggcggggattgcgactctcacaccctgagctccggtgctcctttcctaactccactggctgcggcatctgtgggaaaagtgtggctgggtcttcgaggagccgcaccaatggcttccgtgctgtcctacgaaagcctggtccacgccgtggccggagccgtggaagcgtgacagtgtgttgtacccatatttataattaggctttattatcttcctaaatcaaggaaaggaaatcatccccagaccatttatgctgagctttggaatactattttaaactggattgtacttaaataatgaagctctgcatagaggaactagtcagaagtggggaaaacactgtctaatttttatcagtctggtataaagtattgatctaagaga

SEQ ID NO: 426157 - DNA, 2013 bp, Homo sapiens
aagtggttctagggcaggcgggcgggtttgagagggcggggattgcgactctcacaccctgagctccggtgctcctttcctaactccactggctgcggcatctgtgggaaaagtgtggctgggtcttcgaggagccgcaccaatggcttccgtgctgtcctacgaaagcctggtccacgccgtggccggagccgtgggaagcgtgacagcaatgacagtgttttttcccctggatacagctagacttcgacttcaggttgatgagaaaagaaaatccaaaactacacacatggtgctcctggagatcattaaagaagaaggactcctggcaccatatcgagggtggtttccagtgatttccagtctctgctgctccaattttgtctatttctacacttttaatagcctcaaagcactctgggtcaaaggtcaacattctaccactggaaaagatctggtagttgggtttgttgcaggagtggttaatgtgttgctaacaactccactctgggtggtaaacaccagactgaagcttcaaggagcaaaatttaggaatgaagacattgtaccaacaaactacaaaggtatcattgatgcttttcatcagatcattcgcgatgaaggaatctcggctttatggaatggcacatttccctcattgctgttggtcttcaatcctgccatccagttcatgttttatgaaggtttaaaacggcagcttttaaagaaacggatgaagctttcttccttggatgtgttcatcattggtgcagtagccaaagcgattgccaccacggtgacctatcccctgcagacggtacagtcaattctgaggtttgggcgtcatagactaaacccagaaaacagaacattgggaagtcttcggaatattctctatcttcttcaccaacgagtaagacgttttggaataatgggactctacaaaggccttgaagccaaactgctgcagacagtcctcactgctgctctcatgttccttgtttatgagaaactgacattggactaatgtgaaaaaaacattgctgaaaacctaaaaatgaaagtttgtgagtgtttattggttttcttaagagaaatggactattttgctctcatgtgtaatgttttctatttaaatctttcttaaatataccagctgttctctttccctgaactctcccccaggttctaggacaaatttaataacatgtaattctcctcaaatacttttgtatgtctcagtgttggtgttttcctccctaaaactaacattagggctgtgccacgggcatgactttatttttgttgggcttttttttccctgcttaaggagaggtgtcttttttggatatgagctatttattttgtgaaatgaaaattgttcacccaaatgattctcttataaactatttgtaaatgtcacttattcattagtgtttgacataatttttagaatatttattttgaatcaatcctttcattacgaaagacttgaagttttgtgtccattcttacaagccctggtcagtcaagtcccaataaatggtcagcacaaaaaagatattcttgaaaattgctctttattaaggtattacgttgagtttgcaaccagatgggaaaaatcacaaaaatgagaaggggagcagatatcttgttgaggtctggatattatctccctttataaacttggtgtaggccgtatattttgaaaataaacatctggttgaggttatttcatttggaaaccttccttagagtcctgttgctcagtgtggtccatcagacggtagtactgccacaagctgagagcttgctgggcacgcaacccagagtttctgaatcctgttccgtattttaacattcccaggtgattcacagccacattaaagttcaggagaccataggacccctgacccatgagaagaagtgattggtttcgattatagacatcaagataaagatttttctcaaaggaaagagattaatgtattaaaacaacctctgaaaaatcta

SEQ ID NO: 426158 - DNA, 2162 bp, Homo sapiens
aagtggttctagggcaggcgggcgggtttgagagggcggggattgcgactctcacaccctgagctccggtgctcctttcctaactccactggctgcggcatctgtgggaaaagtgtggctgggtcttcgaggagccgcaccaatggcttccgtgctgtcctacgaaagcctggtccacgccgtggccggagccgtgctagacttcgacttcaggcctggcaccatatcgagggtggtttccagtgatttccagtctctgctgctccaattttgtctatttctacacttttaatagcctcaaagcactctgggtcaaaggtcaacattctaccactggaaaagatctggtagttgggtttgttgcaggagtggttaatgtgttgctaacaactccactctgggtggtaaacaccagactgaagcttcaaggagcaaaatttaggaatgaagacattgtaccaacaaactacaaaggtatcattgatgcttttcatcagatcattcgcgatgaaggaatctcggctttatggaatggcacatttccctcattgctgttggtcttcaatcctgccatccagttcatgttttatgaaggtttaaaacggcagcttttaaagaaacggatgaagctttcttccttggatgtgttcatcattggtgcagtagccaaagcgattgccaccacggtgacctatcccctgcagacggtacagtcaattctgaggtttgggcgtcatagactaaacccagaaaacagaacattgggaagtcttcggaatattctctatcttcttcaccaacgagtaagacgttttggaataatgggactctacaaaggccttgaagccaaactgctgcagacagtcctcactgctgctctcatgttccttgtttatgagaaactgacagctgccaccttcacagttatggggctgaagcgtgcacaccaacactgagacgccttcccatgaaaaattccgaagatgctcaagagggaggtttcctcctgagtgaagagaagtgattctcccttgactctggctcctgccaccacaaatgttaccctcattggcttgaaaagcatccaagggtgcacagggagtatggccaactggacctgttgtcaccttaattgtcatgctggctggttggattttggggtggcagttggactaatgtgaaaaaaacattgctgaaaacctaaaaatgaaagtttgtgagtgtttattggttttcttaagagaaatggactattttgctctcatgtgtaatgttttctatttaaatctttcttaaatataccagctgttctctttccctgaactctcccccaggttctaggacaaatttaataacatgtaattctcctcaaatacttttgtatgtctcagtgttggtgttttcctccctaaaactaacattagggctgtgccacgggcatgactttatttttgttgggcttttttttccctgcttaaggagaggtgtcttttttggatatgagctatttattttgtgaaatgaaaattgttcacccaaatgattctcttataaactatttgtaaatgtcacttattcattagtgtttgacataatttttagaatatttattttgaatcaatcctttcattacgaaagacttgaagttttgtgtccattcttacaagccctggtcagtcaagtcccaataaatggtcagcacaaaaaagatattcttgaaaattgctctttattaaggtattacgttgagtttgcaaccagatgggaaaaatcacaaaaatgagaaggggagcagatatcttgttgaggtctggatattatctccctttataaacttggtgtaggccgtatattttgaaaataaacatctggttgaggttatttcatttggaaaccttccttagagtcctgttgctcagtgtggtccatcagacggtagtactgccacaagctgagagcttgctgggcacgcaacccagagtttctgaatcctgttccgtattttaacattcccaggtgattcacagccacattaaagttcaggagaccataggacccctgacccatgagaagaagtgattggtttcgattatagacatcaagataaagatttttctcaaaggaaagagattaatgtattaaaacaacctctgaaaaatcta

SEQ ID NO: 426159 - DNA, 2207 bp, Homo sapiens
aagtggttctagggcaggcgggcgggtttgagagggcggggattgcgactctcacaccctgagctccggtgctcctttcctaactccactggctgcggcatctgtgggaaaagtgtggctgggtcttcgaggagccgcaccaatggcttccgtgctgtcctacgaaagcctggtccacgccgtggccggagccgtgggaagcgtgacagcaatgacagtgttttttcccctggatacagctagacttcgacttcaggatttgttcaagttgaaattgtaaacctatgccagaacttgcatgaagagatgagtaagattagctttcaatagtaattcaaagcctcaaagcactctgggtcaaaggtcaacattctaccactggaaaagatctggtagttgggtttgttgcaggagtggttaatgtgttgctaacaactccactctgggtggtaaacaccagactgaagcttcaaggagcaaaatttaggaatgaagacattgtaccaacaaactacaaaggtatcattgatgcttttcatcagatcattcgcgatgaaggaatctcggctttatggaatggcacatttccctcattgctgttggtcttcaatcctgccatccagttcatgttttatgaaggtttaaaacggcagcttttaaagaaacggatgaagctttcttccttggatgtgttcatcattggtgcagtagccaaagcgattgccaccacggtgacctatcccctgcagacggtacagtcaattctgaggtttgggcgtcatagactaaacccagaaaacagaacattgggaagtcttcggaatattctctatcttcttcaccaacgagtaagacgttttggaataatgggactctacaaaggccttgaagccaaactgctgcagacagtcctcactgctgctctcatgttccttgtttatgagaaactgacagctgccaccttcacagttatggggctgaagcgtgcacaccaacactgagacgccttcccatgaaaaattccgaagatgctcaagagggaggtttcctcctgagtgaagagaagtgattctcccttgactctggctcctgccaccacaaatgttaccctcattggcttgaaaagcatccaagggtgcacagggagtatggccaactggacctgttgtcaccttaattgtcatgctggctggttggattttggggtggcagttggactaatgtgaaaaaaacattgctgaaaacctaaaaatgaaagtttgtgagtgtttattggttttcttaagagaaatggactattttgctctcatgtgtaatgttttctatttaaatctttcttaaatataccagctgttctctttccctgaactctcccccaggttctaggacaaatttaataacatgtaattctcctcaaatacttttgtatgtctcagtgttggtgttttcctccctaaaactaacattagggctgtgccacgggcatgactttatttttgttgggcttttttttccctgcttaaggagaggtgtcttttttggatatgagctatttattttgtgaaatgaaaattgttcacccaaatgattctcttataaactatttgtaaatgtcacttattcattagtgtttgacataatttttagaatatttattttgaatcaatcctttcattacgaaagacttgaagttttgtgtccattcttacaagccctggtcagtcaagtcccaataaatggtcagcacaaaaaagatattcttgaaaattgctctttattaaggtattacgttgagtttgcaaccagatgggaaaaatcacaaaaatgagaaggggagcagatatcttgttgaggtctggatattatctccctttataaacttggtgtaggccgtatattttgaaaataaacatctggttgaggttatttcatttggaaaccttccttagagtcctgttgctcagtgtggtccatcagacggtagtactgccacaagctgagagcttgctgggcacgcaacccagagtttctgaatcctgttccgtattttaacattcccaggtgattcacagccacattaaagttcaggagaccataggacccctgacccatgagaagaagtgattggtttcgattatagacatcaagataaagatttttctcaaaggaaagagattaatgtattaaaacaacctctgaaaaatcta

SEQ ID NO: 426160 - DNA, 854 bp, Homo sapiens
aagtggttctagggcaggcgggcgggtttgagagggcggggattgcgactctcacaccctgagctccggtgctcctttcctaactccactggctgcggcatctgtgggaaaagtgtggctgggtcttcgaggagccgcaccaatggcttccgtgctgtcctacgaaagcctggtccacgccgtggccggagccgtgggaagcgtgacagcaatgacagtgttttttcccctggatacagctagacttcgacttcaggttgatgagaaaagaaaatccaaaactacacacatggtgctcctggagatcattaaagaagaaggactcctggcaccatatcgagggtggtttccagtgatttccagtctctgctgctccaattttgtctatttctacacttttaatagcctcaaagcactctgggtcaaaggtcaacattctaccactggaaaagatctggtagttgggtttgttgcaggagtggttaatgtgttgctaacaactccactctgggtggtaaacaccagactgaagcttcaaggagcaaaatttaggaatgaagacattgtaccaacaaactacaaaggtatcattgatgcttttcatcagatcattcgcgatgaaggaatctcggctttatggaatggcacatttccctcattgctgttggtcttcaatcctgccatccagttcatgttttatgaaggtttaaaacggcagcttttaaagaaacggatgaagctttcttccttggatgtgttcatcattggtgcagtagccaaagcgattgccaccacggtgacctatcccctgcagacggtacagtcaattctgagggtgagtgctggagttctct

SEQ ID NO: 426161 - DNA, 774 bp, Homo sapiens
aagtggttctagggcaggcgggcgggtttgagagggcggggattgcgactctcacaccctgagctccggtgctcctttcctaactccactggctgcggcatctgtgggaaaagtgtggctgggtcttcgaggagccgcaccaatggcttccgtgctgtcctacgaaagcctggtccacgccgtggccggagccgtggctaaccattaagaggccgagaaaataagattgcaccagcaaaggagacaaacgaaggatggatcagtactgcaggagggaagctaagaactaagagtgaaagccacgtgaagaaagtgtttctggggaaggaagtagaccagctgggtcagatgctgctgatgggggaagcgtgacagcaatgacagtgttttttcccctggatacagctagacttcgacttcaggttgatgagaaaagaaaatccaaaactacacacatggtgctcctggagatcattaaagaagaaggactcctggcaccatatcgagggtggtttccagtgatttccagtctctgctgctccaattttgtctatttctacacttttaatagcctcaaagcactctgggtcaaaggtcaacattctaccactggaaaagatctggtagttgggtttgttgcaggactggtgaggaatattttaatatctcaagatggtgttaaattgggatcatatgttttcaaaaaagaagcacctggctcattgtattgttctactctgaggcaaccttggggggccaagatccccatcctta

SEQ ID NO: 426162 - DNA, 1598 bp, Homo sapiens
aacattcctgcaaatggtttcaatatatgcagatgtctcgatataggaatgaaattacgtctttggaacaacttaaataagtcaaatatacttggagctttaaaaattaaaaggagagagattcgagcaccttttctgctgccatgacaaccatgcaaggaatggaacaggccatgccaggggctggccctggtgtgccccagctgggaaacatggctgtcatacattcacatctgtggaaaggattgcaagagaagttcttgaagggagaacccaaagtccttggggttgtgcagattctgactgccctgatgagccttagcatgggaataacaatgatgtgtatggcatctaatacttatggaagtaaccctatttccgtgtatatcgggtacacaatttgggggtcagtaatgtttattatttcaggatccttgtcaattgcagcaggaattagaactacaaaaggcctggtccgaggtagtctaggaatgaatatcaccagctctgtactggctgcatcagggatcttaatcaacacatttagcttggcgttttattcattccatcacccttactgtaactactatggcaactcaaataattgtcatgggactatgtccatcttaatgggtctggatggcatggtgctcctcttaagtgtgctggaattctgcattgctgtgtccctctctgcctttggatgtaaagtgctctgttgtacccctggtggggttgtgttaattctgccatcacattctcacatggcagaaacagcatctcccacaccacttaatgaggtttgaggccaccaaaagatcaacagacaaatgctccagaaatctatgctgactgtgacacaagagcctcacatgagaaattaccagtatccaacttcgatactgatagacttgttgatattattattatatgtaatccaattatgaactgtgtgtgtatagagagataataaattcaaaattatgttctcatttttttccctggaactcaataactcatttcactggctctttatcgagagtactagaagttaaattaataaataatgcatttaatgaggcaacagcacttgaaagtttttcattcatcataagaactttatataaaggcattacattggcaaataaggtttggaagcagaagagcaaaaaaaagatattgttaaaatgaggcctccatgcaaaacacatacttccctcccatttatttaactttttttttctcctacctatggggaccaaagtgctttttccttcaggaagtggagatgcatggccatctccccctccctttttccttctcctgcttttctttccccatagaaagtaccttgaagtagcacagtccgtccttgcatgtgcacgagctatcatttgagtaaaagtatacatggagtaaaaatcatattaagcatcagattcaacttatattttctatttcatcttcttcctttcccttctcccaccttctactgggcataattatatcttaatcatatatggaaatgtgcaacatatggtatttgttaaatacgtttgtttttattgcagagcaaaaataaatcaaattagaagcaa

SEQ ID NO: 426163 - DNA, 1131 bp, Homo sapiens
aattctcagcacagcctttaaggttccaaacatctgctagaagaggaatgcagatttaaactgagtgaggtgtggagtgggggaagttgattgggtctagaccaaagaactttgaggaacttgcccagagccctgcatgcatcagacctacagcagacattgcaggcctgaagaaagcaccttttctgctgccatgacaaccatgcaaggaatggaacaggccatgccaggggctggccctggtgtgccccagctgggaaacatggctgtcatacattcacatctgtggaaaggattgcaagagaagttcttgaagggagaacccaaagtccttggggttgtgcagattctgactgccctgatgagccttagcatgggaataacaatgatgtgtatggcatctaatacttatggaagtaaccctatttccgtgtatatcgggtacacaatttgggggtcagtaatgtttattatttcaggatccttgtcaattgcagcaggaattagaactacaaaaggcctggtccgaggtagtctaggaatgaatatcaccagctctgtactggctgcatcagggatcttaatcaacacatttagcttggcgttttattcattccatcacccttactgtaactactatggcaactcaaataattgtcatgggactatgtccatcttaatgggtctggatggcatggtgctcctcttaagtgtgctggaattctgcattgctgtgtccctctctgcctttggatgtaaagtgctctgttgtacccctggtggggttgtgttaattctgccatcacattctcacatggcagaaacagcatctcccacaccacttaatgaggtttgaggccaccaaaagatcaacagacaaatgctccagaaatctatgctgactgtgacacaagagcctcacatgagaaattaccagtatccaacttcgatactgatagacttgttgatattattattatatgtaatccaattatgaactgtgtgtgtatagagagataataaattcaaaattatgttctcatttttttccctggaactcaataactcatttcactggctctttatcgagagtactagaagttaaattaataaataatgcatttaatgagg

SEQ ID NO: 426164 - DNA, 1648 bp, Homo sapiens
aattctcagcacagcctttaaggttccaaacatctgctagaagaggaatgcagatttaaactgagtgaggtgtggagtgggggaagttgattgggtctagaccaaagaactttgaggaacttgcccagagccctgcatgcatcagacctacagcagacattgcaggcctgaagaaagcaccttttctgctgccatgacaaccatgcaaggaatggaacaggccatgccaggggctggccctggtgtgccccagctgggaaacatggctgtcatacattcacatctgtggaaaggattgcaagagaagttcttgaagggagaacccaaagtccttggggttgtgcagattctgactgccctgatgagccttagcatgggaataacaatgatgtgtatggcatctaatacttatggaagtaaccctatttccgtgtatatcgggtacacaatttgggggtcagtaatgtttattatttcaggatccttgtcaattgcagcaggaattagaactacaaaaggcctggtccgaggtagtctaggaatgaatatcaccagctctgtactggctgcatcagggatcttaatcaacacatttagcttggcgttttattcattccatcacccttactgtaactactatggcaactcaaataattgtcatgggactatgtccatcttaatgggtctggatggcatggtgctcctcttaagtgtgctggaattctgcattgctgtgtccctctctgcctttggatgtaaagtgctctgttgtacccctggtggggttgtgttaattctgccatcacattctcacatggcagaaacagcatctcccacaccacttaatgaggtttgaggccaccaaaagatcaacagacaaatgctccagaaatctatgctgactgtgacacaagagcctcacatgagaaattaccagtatccaacttcgatactgatagacttgttgatattattattatatgtaatccaattatgaactgtgtgtgtatagagagataataaattcaaaattatgttctcatttttttccctggaactcaataactcatttcactggctctttatcgagagtactagaagttaaattaataaataatgcatttaatgaggcaacagcacttgaaagtttttcattcatcataagaactttatataaaggcattacattggcaaataaggtttggaagcagaagagcaaaaaaaagatattgttaaaatgaggcctccatgcaaaacacatacttccctcccatttatttaactttttttttctcctacctatggggaccaaagtgctttttccttcaggaagtggagatgcatggccatctccccctccctttttccttctcctgcttttctttccccatagaaagtaccttgaagtagcacagtccgtccttgcatgtgcacgagctatcatttgagtaaaagtatacatggagtaaaaatcatattaagcatcagattcaacttatattttctatttcatcttcttcctttcccttctcccaccttctactgggcataattatatcttaatcatatatggaaatgtgcaacatatggtatttgttaaatacgtttgtttttattgcagagcaaaaataaatcaaattagaagcaa

SEQ ID NO: 426165 - DNA, 1557 bp, Homo sapiens
aacattcctgcaaatggtttcaatatatgcagatgtctcgatataggaatgaaattacgtctttggaacaacttaaataagtcaaatatacttggagctttaaaaattaaaaggagagagattcgagcaccttttctgctgccatgacaaccatgcaaggaatggaacaggccatgccaggggctggccctggtgtgccccagctgggaaacatggctgtcatacattcacatctgtggaaaggattgcaagagaagttcttgaagggagaacccaaagtccttggggttgtgcagattctgactgccctgatgagccttagcatgggaataacaatgatgtgtatggcatctaatacttatggaagtaaccctatttccgtgtatatcgggtacacaatttgggggtcagtaatgtttattatttcaggatccttgtcaattgcagcaggaattagaactacaaaaggcctggtccgaggtagtctaggaatgaatatcaccagctctgtactggctgcatcagggatcttaatcaacacatttagcttggcgttttattcattccatcacccttactgtaactactatggcaactcaaataattgtcatgggactatgtccatcttaatgggtctggatggcatggtgctcctcttaagtgtgctggaattctgcattgctgtgtccctctctgcctttggatgtaaagtgctctgttgtacccctggtggggttgtgttaattctgccatcacattctcacatggcagaaacagcatctcccacaccacttaatgaggtttgaggccaccaaaagatcaacagacaaatgctccagaaatctatgctgactgtgacacaagagcctcacatgagaaattaccagtatccaacttcgatactgatagacttgttgatattattattatatgtaatccaattatgaactgtgtgtgtatagagagataataaattcaaaattatgttctcatttttttccctggaactcaataactcatttcactggctctttatcgagagtactagaagttaaattaataaataatgcatttaatgagggcaaaccagcaaaaaaaaaaaaaaacaaaacatcaaaaaaaacacacacaaaaatgattttccacaaaacacaacaaacacaaaagaaccaacaaaaacactgtgtgtgtgcggcgcgcgcgccagccccccccccagaagaaacttttctccacacaccaagacgtgtgggcggcggcgcggcggggagcacccaaattatgagttgaagaagcaacatcgtgcgacaaatcggggtgctcaccgcaaggaagaagagccatccgtggggagcaacacaacgtcgggggtgggtgcgtcctccccccaaaaaaaaaaaaaaagccggcgggcggggaagacgaaaccaggtgttttgatgacgaacaaacacacccaaggaggtggcgtacgacaggaggacagaaaagcagggaggcgttcaacacacgaacgagggtgctcccaagccggcggcctgaatcaaaaattacccg

SEQ ID NO: 426166 - DNA, 1081 bp, Homo sapiens
aacattcctgcaaatggtttcaatatatgcagatgtctcgatataggaatgaaattacgtctttggaacaacttaaataagtcaaatatacttggagctttaaaaattaaaaggagagagattcgagcaccttttctgctgccatgacaaccatgcaaggaatggaacaggccatgccaggggctggccctggtgtgccccagctgggaaacatggctgtcatacattcacatctgtggaaaggattgcaagagaagttcttgaagggagaacccaaagtccttggggttgtgcagattctgactgccctgatgagccttagcatgggaataacaatgatgtgtatggcatctaatacttatggaagtaaccctatttccgtgtatatcgggtacacaatttgggggtcagtaatgtttattatttcaggatccttgtcaattgcagcaggaattagaactacaaaaggcctggtccgaggtagtctaggaatgaatatcaccagctctgtactggctgcatcagggatcttaatcaacacatttagcttggcgttttattcattccatcacccttactgtaactactatggcaactcaaataattgtcatgggactatgtccatcttaatgggtctggatggcatggtgctcctcttaagtgtgctggaattctgcattgctgtgtccctctctgcctttggatgtaaagtgctctgttgtacccctggtggggttgtgttaattctgccatcacattctcacatggcagaaacagcatctcccacaccacttaatgaggtttgaggccaccaaaagatcaacagacaaatgctccagaaatctatgctgactgtgacacaagagcctcacatgagaaattaccagtatccaacttcgatactgatagacttgttgatattattattatatgtaatccaattatgaactgtgtgtgtatagagagataataaattcaaaattatgttctcatttttttccctggaactcaataactcatttcactggctctttatcgagagtactagaagttaaattaataaataatgcatttaatgagg

SEQ ID NO: 426167 - DNA, 514 bp, Homo sapiens
  misc_feature (503)..(503): n is a, c, g, or t
aattctcagcacagcctttaaggttccaaacatctgctagaagaggaatgcagatttaaactgagtgaggtgtggagtgggggaagttgattgggtctagaccaaagaactttgaggaacttgcccagagccctgcatgcatcagacctacagcagacattgcaggcctgaagaaagcaccttttctgctgccatgacaaccatgcaaggaatggaacaggccatgccaggggctggccctggtgtgccccagctgggaaacatggctgtcatacattcacatctgtggaaaggattgcaagagaagttcttgaagggagaacccaaagtccttggggttgtgcagattctgactgccctgatgagccttagcatgggaataacaatgatgtgtatggcatctaatacttatggaagtaaccctatttccgtgtatatcgggtacacaatttgggggtcagtaatgtttatatttttccggctccttgttccttaggccgcangaattagcaat

SEQ ID NO: 426168 - DNA, 1439 bp, Homo sapiens
aacattcctgcaaatggtttcaatatatgcagatgtctcgatataggaatgaaattacgtctttggaacaacttaaataagtcaaatatacttggagctttaaaaattaaaaggagagagattcgagcaccttttctgctgccatgacaaccatgcaaggaatggaacaggccatgccaggggctggccctggtgtgccccagctgggaaacatggctgtcatacattcacatctgtggaaaggattgcaagagaagttcttgaagggagaacccaaagtccttggggttgtgcagattctgactgccctgatgagccttagcatgggaataacaatgatgtgtatggcatctaatacttatggaagtaaccctatttccgtgtatatcgggtacacaatttgggggtcagtaatgtttattatttcaggatccttgtcaattgcagcaggaattagaactacaaaaggcctgggtctggatggcatggtgctcctcttaagtgtgctggaattctgcattgctgtgtccctctctgcctttggatgtaaagtgctctgttgtacccctggtggggttgtgttaattctgccatcacattctcacatggcagaaacagcatctcccacaccacttaatgaggtttgaggccaccaaaagatcaacagacaaatgctccagaaatctatgctgactgtgacacaagagcctcacatgagaaattaccagtatccaacttcgatactgatagacttgttgatattattattatatgtaatccaattatgaactgtgtgtgtatagagagataataaattcaaaattatgttctcatttttttccctggaactcaataactcatttcactggctctttatcgagagtactagaagttaaattaataaataatgcatttaatgaggcaacagcacttgaaagtttttcattcatcataagaactttatataaaggcattacattggcaaataaggtttggaagcagaagagcaaaaaaaagatattgttaaaatgaggcctccatgcaaaacacatacttccctcccatttatttaactttttttttctcctacctatggggaccaaagtgctttttccttcaggaagtggagatgcatggccatctccccctccctttttccttctcctgcttttctttccccatagaaagtaccttgaagtagcacagtccgtccttgcatgtgcacgagctatcatttgagtaaaagtatacatggagtaaaaatcatattaagcatcagattcaacttatattttctatttcatcttcttcctttcccttctcccaccttctactgggcataattatatcttaatcatatatggaaatgtgcaacatatggtatttgttaaatacgtttgtttttattgcagagcaaaaataaatcaaattagaagcaa

SEQ ID NO: 426169 - DNA, 9003 bp, Homo sapiens
cccaggggctcaagccgcacgtgagaaagtctgggcatctgggattcggagagtatagcctgtgagccgctttcccctccttactgtcggttgcatcccttcgacactcccgaggccgtcgcgggccactggccctctgcagccatgaagacaaagcccgtttcccacaagaccgagaacacctaccggtttcttacatttgctgaacgactggggaatgttaatattgatattattcaccggattgatagaactgcaagctatgaggaggaggttgaaacctacttttttgagggtctgctgaaatggagagaattaaacctcacagaacacttcggaaaattttacaaagaagttattgacaaatgccaatcattcaatcagttggtgtatcaccaaaacgagatagttcagagtttgaagactcacctgcaagttaagaacagttttgcctatcaaccccttttggatttggttgtacagttggcacgagatctgcagatggatttctacccacactttccagagttttttttgactatcacctcgatcctggagactcaggacacagagttgttagaatgggctttcacctcgttatcatatctttataagtacctgtggagactgatggtgaaggacatgtccagtatatacagcatgtacagcacactcctggctcataaaaaactacatataagaaattttgctgctgaaagttttacttttttgatgagaaaggtctctgataaaaacgcacttttcaatttaatgtttcttgatcttgataaacatccagaaaaagttgaaggtgttggacagttgctctttgaaatgtgcaaaggagttagaaatatgtttcactcctgtacaggccaggcagtgaagctaattttgcgaaagctaggaccagtcactgaaacagaaactcaactaccatggatgttaattggagaaacactcaaaaacatggtcaaatccactgtatcctacatctccaaggaacattttggtacattttttgaatgtttgcaagaatcgctcttggatctacacacaaaagtaacaaaaactaactgttgtgaaagttctgaacagattaaaaggttgttggaaacataccttatacttgtaaaacatggaagtgggacaaagatacccacgcctgctgatgtctgtaaggtgttatctcaaacactgcaagtagccagtctctccacatcttgctgggagaccctcttggatgtaatttctgctttgatcctgggtgaaaatgtttccttgccggagaccctcatcaaagaaaccatagaaaaaatatttgagagcagatttgaaaaacgtttaattttcagtttttctgaagtcatgtttgccatgaagcagtttgagcagctttttctaccaagctttctgtcatatattgtgaattgcttcttaattgatgatgctgtagtcaaagatgaagctctggccattctggccaagctcattctgaacaaagcagcacctcccactgctggctcgatggcaattgaaaagtaccctctggttttctcaccgcagatggtgggattctatataaagcagaagaagactagatccaagggaagaaacgaacagtttccagtattggaccatcttttatctataattaagttacccccaaataaagatactacttacctttcacaatcttgggcagccctcgtggtgttacctcatattagacctcttgagaaagagaaggtgataccactcgtcaccggcttcatagaggcactcttcatgactgttgacaaaggaagctttgggaaaggaaacttatttgttctttgtcaagctgtaaatactctactaagtttggaagaatcttctgaacttcttcatttggttcctgtggaacgtgtgaagaatttagtattaacctttcccctggagccatctgtgttgctgttgactgatctctattatcagagattagccttgtgtggctgcaaagggccactttcccaggaggctttaatggaattatttcccaagttacaagcaaacatttcaactggtgtatccaagattcggcttttgacaataaggatcctaaaccattttgatgtccagcttccagaatcaatggaggatgatgggctctcagagcggcagtctgtctttgctatattacgccaggcagaacttgttccagcaactgtgaatgattatagagagaagcttcttcatttgagaaaactaagacatgatgtggtacagactgctgtccctgatgggccgttacaggaggtgccgcttcgttatttgttaggcatgctatatattaatttcagtgcactctgggatcctgttattgaactcataagttctcatgcacacgaaatggaaaataagcaattttggaaagtctactatgagcatctagaaaaagcagctacgcatgctgagaaggaactacagaatgatatgacagatgagaagtccgttggagatgaaagttgggagcagacccaggaaggagatgttggagctctttatcatgagcagttagcattgaaaactgactgtcaggaaagacttgaccacaccaacttcagattcctgctctggagagctctgaccaaattcccagaaagagtagagccacggtccagggagctttccccgcttttcttgagatttatcaacaatgagtattacccagcagatctgcaagttgctccaacccaggatctacggagaaaaggcaaagggatggtggcagaggaaatcgaagaggaacctgccgcaggagatgatgaagagttggaggaagaggcagtgccccaagatgaatcctcacagaagaaaaagacgaggagagctgcagcaaagcaattaattgctcatttgcaagttttctctaaattttcaaatccacgggccttatatctggaatccaaactatatgagttatatcttcagttgttgctacaccaagatcaaatggtgcaaaaaataaccttggattgcataatgacatataaacatcctcatgtcctcccttacagggaaaacttacaaaggttgcttgaagacagaagctttaaggaagagatagtgcattttagcatttcagaagataatgctgtagtgaaaacagcccaccgagcagatctatttcctattctgatgagaattttgtatgggcgaatgaagaataagactgggagtaaaactcaggggaaatctgcttcaggcacccgcatggccattgtcctgcggttcctggccgggacccaacctgaggagatccagatattcttagacctgctgtttgaacctgtgaggcatttcaagaatggagagtgccattctgcagtcattcaagcagtagaagacttggatttgtctaaagttcttcctttaggtcgtcagcacggtatcttaaacagccttgagatagtattgaaaaacattagtcatctgatcagcgcatacctgccgaagattttgcagatactgctctgtatgacagcaaccgtatcacacatccttgaccaacgagaaaagatacagctgagatttattaatccattgaaaaatttaagacgtcttggaatcaaaatggtaactgatatctttttggactgggaatcatatcagtttagaacagaagaaattgatgctgtgtttcatggtgcagtttggccccagatcagcaggcttggatctgagagtcaatattctcctactcctctgctgaaactgatcagtatctggagcagaaacgcaagatatttccctttgctggctaaacagaagcctgggcacccagaatgtgatatcctgaccaatgtttttgcaattctctcagcgaagaatctttctgatgccacagccagtattgtaatggacatagttgatgaccttcttaaccttccagatttcgagcctacagaaacagttttgaacttgctggtaactggatgtgtataccctggcatagcagaaaacatcggtgagtctatcacaataggaggaagattaattctacctcatgtacctgcaattcttcagtatctcagcaaaaccacaataagcgcagaaaaggtgaaaaagaaaaagaatagagcacaagtcagtaaagagcttggcattctttcaaagatcagcaagtttatgaaagacaaagaacaaagttctgtactcattacgcttctccttccattcctccaccgtggcaatattgctgaggatacagaggttgatattctggtgacagtacaaaacttgttaaagcattgtgtggaccctacaagcttcctcaagcctatagcaaaacttttctcagttattaagaacaaattgtcaagaaaattgctttgtacggtttttgagactctttctgattttgagagtgggttaaaatatattactgatgttgtcaagcttaacgccttcgatcaaagacatcttgatgatatcaacttcgacgttcgctttgagactttccagaccatcacctcttacattaaagaaatgcaaattgtggatgttaactacctaattccagttatgcataattgtttctataatctagagttaggagatatgagtttaagtgataatgccagcatgtgcctgatgagtatcatcaaaaagctagctgccttgaatgtcacagagaaagactatagagaaatcatccaccgttcactcctggagaaattgagaaaaggtctgaagagccagacagagagtattcagcaggattataccacaatactttcctgtttaattcaaacctttccaaaccaactggaattcaaagacttggtacaacttactcattaccatgacccagaaatggacttctttgagaacatgaagcacattcagatccacagaagagcaagagccttgaagaaacttgcaaaacaactaatggaaggcaaagttgttctgtcttctaaatctcttcagaattacatcatgccttatgccatgactccaatttttgatgagaaaatgctcaagcatgaaaatataaccactgctgccacagagattattggagccatttgcaaacatctctcttggtcagcgtatatgtattacttgaaacatttcattcatgtcttacaaacgggacagatcaatcaaaaactgggtgtcagtttgctagtaatagtgttagaagcattccactttgaccacaaaactcttgaagaacaaatgggaaaaattgagaatgaagaaaacgcaattgaagcaattgagttaccagagcctgaggccatggaattagagcgtgtggatgaggaagagaaggaatatacatgcaagagtttgtcagacaacggacaaccgggaacccctgatccagctgactctggaggaacatcagctaaagaatccgagtgtatcacaaagcctgtctctttccttcctcaaaacaaggaagaaatagagagaacaattaaaaatatccaaggaaccataaccggggatattctccccaggctacataaatgccttgcatctacgactaaaagggaagaagaacacaagcttgtcaagtcaaaggttgtgaatgatgaggaagtcgttcgagttccattagcttttgccatggttaaactaatgcagtcccttccacaagaagttatggaagctaatctgccaagtattttgctgaaagtgtgtgccctactcaagaacagagcccaagaaatcagagacattgcacgcagcactcttgcgaaaataatagaggatcttggtgtgcacttcctccaatatgttttaaaagaattacagactactcttgtccgtggataccaggtccatgtgctgactttcaccgttcacatgctgctgcaaggcctcaccaataagctgcaggtcggagatttggactcttgtttagatataatgattgagatttttaaccatgagttgtttggtgctgttgctgaagagaaggaagtaaagcagatcctctccaaagtcatggaagcacgaagaagcaaaagttacgactcttatgaaatcctcggcaagtttgtaggaaaagatcaggttacaaaactcatccttccattaaaagagatcttacaaaataccacgagtttgaaactggcccggaaagttcatgaaactttacgccgaatcacagtgggattaattgtaaatcaggaaatgacagctgaatccattctattactcagttatggtttgatcagtgaaaatcttcccctgttaacagagaaagaaaaaaatccagtagccccagcaccagatccacgtctaccaccccagagctgccttctgcttcccccaactccagttcgaggtggacagaaagctgttgtgagcaggaaaaccaacatgcacatatttattgagtccgggcttcggctgctgcatctgagtctgaagacttccaagatcaagtcttcaggtgaatgtgtcctggaaatgctggatccttttgtgtctctcctcatagactgcctgggctccatggatgtgaaggtgatcacaggtgctttacagtgcctcatctgggtcttgaggttcccgctaccttccatagaaacaaaagcagagcagctgacaaaacacctcttccttctgctgaaggactatgcaaagctcggggccgccaggggccagaacttccaccttgtggtcaattgtttcaagtgtgtgaccatacttgtcaagaaagtcaagtcttaccagataactgaaaaacagctccaagttctactggcctatgctgaggaggacatttatgatacttcaagacaagccactgcctttggtcttctgaaggcaattttatcaagaaagctgttggtcccagaaatcgatgaggtcatgcggaaagtatccaagttggcagtctctgcacaaagcgaacctgccagggtccagtgtagacaggtttttctgaaatatattcttgactatcccctgggtgacaaattgagaccaaacttggaattcatgctcgctcaactgaattacgaacatgagaccgggagagagtccaccttggaaatgatcgcctatctctttgacacgttccctcaggggctgctccatgagaactgcggaatgttctttatccctctttgtctaatgacgatcaatgatgactctgccacgtgcaaaaagatggcatccatgacaatcaagtccctacttggtaaaatcagcctcgagaaaaaagattggctgtttgatatggttaccacttggtttggagcaaaaaagcgcttaaatagacaacttgctgccctgatctgtggcttgtttgtggaaagtgaaggagttgattttgagaaaagacttggaactgtccttcctgtgattgaaaaggaaattgatcctgaaaactttaaagatatcatggaagaaactgaagaaaaagctgcagatcgccttctgtttagttttcttacactgataactaaacttatcaaggaatgtaatattattcagtttaccaaacccgctgagactttgagtaaaatctggagtcatgtgcattctcacctgagacatccacacaactgggtgtggctcacagcagcccagatttttggattactctttgcctcttgccagccagaggagcttattcaaaaatggaataccaaaaagaccaaaaaacacctcccagaacctgtagcaatcaagttcctagccagtgaccttgaccaaaagatgaaaagtatctctctcgcctcttgccatcaattgcattccaaattcttggatcagtctctaggagaacaggttgttaagaatttgttgttcgcagccaaagtcttgtatttactggaactttattgtgaggataagcaaagtaagataaaagaagacctggaagaacaagaagctttagaagatggtgtggcctgtgcagatgagaaggcggagtctgacggagaagagaaggaagaggtgaaggaagagctcggcaggccggccacgctgctgtggttgatccagaagctgtcccggattgcaaaactggaagctgcttattcgccgagaaaccccttaaagagaacatgcatctttaagttcctcggcgccgtagcaatggatcttgggatagacaaggtaaagccgtatctcccaatgatcatagctcctttgtttcgggaactcaacagcacctattcagagcaagatcctttgctgaagaatctatcccaggaaatcatagaattactcaaaaagctggttgggcttgagagcttctcattagcctttgcctctgtacagaaacaggctaatgagaaaagggcactccggaaaaagaggaaggccctggagtttgtaactaatcctgatattgctgccaagaaaaaaatgaagaaacacaaaaataaaagtgaagcaaagaagagaaagatagagttcctgcgtccaggatataaggccaagagacaaaaaagccatagcctgaaagatttagcaatggtggagtaatgtctccctgtgctgatacaagcatgaactttctggaatattctgctagtctgaaattacagcaggttgtctggggtaggggggaggcgtttttttttttttttgagacaaggtctcactctgtcacccaaggtggagtgcagtgacgacatcacagctcactgcagcctcaacctgggttcaagtgatcctctcacctcagcctcccaagtagttgtgcctcctaggcacacaacactatgcccggcaaattttttgtattttgtattttttgtagaaacaggatttcgccatgttggccaggctggtctcgaacacctgggctcaactgatccgcctgcctcggcctcccaaagtgctgggattacaggtgtgagccaccctgctcaaccaggttttattatttaagttagttaaactttggatagattgtataatatatagtttaatgtaatcatgctcatattttttaaataaataaaacactatactactgaaaag

SEQ ID NO: 426170 - DNA, 763 bp, Homo sapiens
agagttgtcatgtagagaggcatttaatttagaagttcaaagctcaagggaaaggtttgatctggagataacaaattggaaattatcaatatatggatggtattttaaatgatcagatacggaataaagtcatctagagtgtgactgtagagagaaaagactttcagggactgataccaatatttagaagttgggagataaggaaccagcaaaggaagccaggaaagagtgataaaagaagaaagaccacttgctatcctggaaatcaagtgaagagactaaaggcggcagtaaacagttgactcagatgtgtctgaaaagtccatcaggtgaggaataaagtgaccgttggctttggagtgaccttagtcagagtgacccacatgaaggtgaccttaatgagttgttttgattaatctgatagggatgacagcctaattaaaataagcttggctgggtgcagtggctcatgcctgtaatcccagcactttgggaggccgaggctggtggatcacaaggtcaggagatcgagaccatcctggctaacacggtgaaaccctgtctgtactaaaaatacaaaaaattagctaggcgtggtggtgggtgcctgtagtcccagctactcgggaggctgaggcaggagaatggcgtgaacccgggaggtggaggttgcagtgagccaaaattgtgtcactgcactccagcctgggcgacagagcgagactctgtctcaaaaaaaaaaaagaagctcaagaaagaggaa

SEQ ID NO: 426171 - DNA, 592 bp, Homo sapiens
agagttgtcatgtagagaggcatttaatttagaagttcaaagctcaagggaaaggtttgatctggagataacaaattggaaattatcaatatatggatggtattttaaatgatcagatacggaataaagtcatctagagtgtgactgtagagagaaaagactttcagggactgataccaatatttagaagttgggagataaggaaccagcaaaggaagccaggaaagagtgataaaagaagaaagaccacttgctatcctggaaatcaagtgaagagactaaaggcggcagtaaacagttgactcagatgtgtctgaaaagtccatcaggtgaggaataaagtgaccgttggctttggagtgaccttagtcagagtgacccacatgaaggtgaccttaatgagttgttttgattaatctgatagggatgacagcctaattaaaataagcttggctggacaggtgtgagccaccctgctcaaccaggttttattatttaagttagttaaactttggatagattgtataatatatagtttaatgtaatcatgctcatattttttaaataaataaaacactatactactgaaaag

SEQ ID NO: 426172 - DNA, 564 bp, Homo sapiens
aattcactcttttgtgtgacattccaagtgagaacacactattagagtagtttgaaatcattacaaatgtctgttcttttcacaattttttcctaagtatatttaaataacaatatatagaatagcaaatgagagttcttcatttggatatgtttatgtttgtgaatataattttccatttctactttatattttaggtctctgataaaaacgcacttttcaatttaatgtttcttgatcttgataaacatccagaaaaagttgaaggtgttggacagttgctctttgaaatgtgcaaaggagttagaaatatgtttcactcctgtacaggccaggcagtgaagctaattttgcgaaagctaggaccagtcactgaaacagaaactcaactaccatggatgttaattggagaaacactcaaaaacatggtcaaatccactgtatcctacatctccaaggaacattttggtacattttttgaatgtttgcaagtgagttctaatctttaaggatgggtttttgataaggagtctaagaatttactgtttctgctctcagttttgc

SEQ ID NO: 426173 - DNA, 402 bp, Homo sapiens
tgcgcctcagcttcctcatctaaaaactgctgatgatgtagtacctactccatagattggatgagtgaggcttaaatgatttaatacatgtaaggtattaatatagtacctaccctgtagtaagctctcagaaaacatcagcttgatttttgttgggtgcaaaaacttgtttccttcataatattttatttacaagctttgattacattcaacatgggcaagctccttaattcacaggttggtcttctttctttaaagttcaggactacaggtgtgagccaccctgctcaaccaggttttattatttaagttagttaaactttggatagattgtataatatatagtttaatgtaatcatgctcatattttttaaataaataaaacactatactactgaaaag

SEQ ID NO: 426174 - DNA, 4833 bp, Homo sapiens
tagacccaactggattagataccccatatcttagccctaacctcgacagttaaatcaacaaaactgctcgccagagatacagaggttgatattctggtgacagtacaaaacttgttaaagcattgtgtggaccctacaagcttcctcaagcctatagcaaaacttttctcagttattaagaacaaattgtcaagaaaattgctttgtacggtttttgagactctttctgattttgagagtgggttaaaatatattactgatgttgtcaagcttaacgccttcgatcaaagacatcttgatgatatcaacttcgacgttcgctttgagactttccagaccatcacctcttacattaaagaaatgcaaattgtggatgttaactacctaattccagttatgcataattgtttctataatctagagttaggagatatgagtttaagtgataatgccagcatgtgcctgatgagtatcatcaaaaagctagctgccttgaatgtcacagagaaagactatagagaaatcatccaccgttcactcctggagaaattgagaaaaggtctgaagagccagacagagagtattcagcaggattataccacaatactttcctgtttaattcaaacctttccaaaccaactggaattcaaagacttggtacaacttactcattaccatgacccagaaatggacttctttgagaacatgaagcacattcagatccacagaagagcaagagccttgaagaaacttgcaaaacaactaatggaaggcaaagttgttctgtcttctaaatctcttcagaattacatcatgccttatgccatgactccaatttttgatgagaaaatgctcaagcatgaaaatataaccactgctgccacagagattattggagccatttgcaaacatctctcttggtcagcgtatatgtattacttgaaacatttcattcatgtcttacaaacgggacagatcaatcaaaaactgggtgtcagtttgctagtaatagtgttagaagcattccactttgaccacaaaactcttgaagaacaaatgggaaaaattgagaatgaagaaaacgcaattgaagcaattgagttaccagagcctgaggccatggaattagagcgtgtggatgaggaagagaaggaatatacatgcaagagtttgtcagacaacggacaaccgggaacccctgatccagctgactctggaggaacatcagctaaagaatccgagtgtatcacaaagcctgtctctttccttcctcaaaacaaggaagaaatagagagaacaattaaaaatatccaaggaaccataaccggggatattctccccaggctacataaatgccttgcatctacgactaaaagggaagaagaacacaagcttgtcaagtcaaaggttgtgaatgatgaggaagtcgttcgagttccattagcttttgccatggttaaactaatgcagtcccttccacaagaagttatggaagctaatctgccaagtattttgctgaaagtgtgtgccctactcaagaacagagcccaagaaatcagagacattgcacgcagcactcttgcgaaaataatagaggatcttggtgtgcacttcctccaatatgttttaaaagaattacagactactcttgtccgtggataccaggtccatgtgctgactttcaccgttcacatgctgctgcaaggcctcaccaataagctgcaggtcggagatttggactcttgtttagatataatgattgagatttttaaccatgagttgtttggtgctgttgctgaagagaaggaagtaaagcagatcctctccaaagtcatggaagcacgaagaagcaaaagttacgactcttatgaaatcctcggcaagtttgtaggaaaagatcaggttacaaaactcatccttccattaaaagagatcttacaaaataccacgagtttgaaactggcccggaaagttcatgaaactttacgccgaatcacagtgggattaattgtaaatcaggaaatgacagctgaatccattctattactcagttatggtttgatcagtgaaaatcttcccctgttaacagagaaagaaaaaaatccagtagccccagcaccagatccacgtctaccaccccagagctgccttctgcttcccccaactccagttcgaggtggacagaaagctgttgtgagcaggaaaaccaacatgcacatatttattgagtccgggcttcggctgctgcatctgagtctgaagacttccaagatcaagtcttcaggtgaatgtgtcctggaaatgctggatccttttgtgtctctcctcatagactgcctgggctccatggatgtgaaggtgatcacaggtgctttacagtgcctcatctgggtcttgaggttcccgctaccttccatagaaacaaaagcagagcagctgacaaaacacctcttccttctgctgaaggactatgcaaagctcggggccgccaggggccagaacttccaccttgtggtcaattgtttcaagtgtgtgaccatacttgtcaagaaagtcaagtcttaccagataactgaaaaacagctccaagttctactggcctatgctgaggaggacatttatgatacttcaagacaagccactgcctttggtcttctgaaggcaattttatcaagaaagctgttggtcccagaaatcgatgaggtcatgcggaaagtatccaagttggcagtctctgcacaaagcgaacctgccagggtccagtgtagacaggtttttctgaaatatattcttgactatcccctgggtgacaaattgagaccaaacttggaattcatgctcgctcaactgaattacgaacatgagaccgggagagagtccaccttggaaatgatcgcctatctctttgacacgttccctcaggggctgctccatgagaactgcggaatgttctttatccctctttgtctaatgacgatcaatgatgactctgccacgtgcaaaaagatggcatccatgacaatcaagtccctacttggtaaaatcagcctcgagaaaaaagattggctgtttgatatggttaccacttggtttggagcaaaaaagcgcttaaatagacaacttgctgccctgatctgtggcttgtttgtggaaagtgaaggagttgattttgagaaaagacttggaactgtccttcctgtgattgaaaaggaaattgatcctgaaaactttaaagatatcatggaagaaactgaagaaaaagctgcagatcgccttctgtttagttttcttacactgataactaaacttatcaaggaatgtaatattattcagtttaccaaacccgctgagactttgagtaaaatctggagtcatgtgcattctcacctgagacatccacacaactgggtgtggctcacagcagcccagatttttggattactctttgcctcttgccagccagaggagcttattcaaaaatggaataccaaaaagaccaaaaaacacctcccagaacctgtagcaatcaagttcctagccagtgaccttgaccaaaagatgaaaagtatctctctcgcctcttgccatcaattgcattccaaattcttggatcagtctctaggagaacaggttgttaagaatttgttgttcgcagccaaagtcttgtatttactggaactttattgtgaggataagcaaagtaagataaaagaagacctggaagaacaagaagctttagaagatggtgtggcctgtgcagatgagaaggcggagtctgacggagaagagaaggaagaggtgaaggaagagctcggcaggccggccacgctgctgtggttgatccagaagctgtcccggattgcaaaactggaagctgcttattcgccgagaaaccccttaaagagaacatgcatctttaagttcctcggcgccgtagcaatggatcttgggatagacaaggtaaagccgtatctcccaatgatcatagctcctttgtttcgggaactcaacagcacctattcagagcaagatcctttgctgaagaatctatcccaggaaatcatagaattactcaaaaagctggttgggcttgagagcttctcattagcctttgcctctgtacagaaacaggctaatgagaaaagggcactccggaaaaagaggaaggccctggagtttgtaactaatcctgatattgctgccaagaaaaaaatgaagaaacacaaaaataaaagtgaagcaaagaagagaaagatagagttcctgcgtccaggatataaggccaagagacaaaaaagccatagcctgaaagatttagcaatggtggagtaatgtctccctgtgctgatacaagcatgaactttctggaatattctgctagtctgaaattacagcaggttgtctggggtaggggggaggcgtttttttttttttttgagacaaggtctcactctgtcacccaaggtggagtgcagtgacgacatcacagctcactgcagcctcaacctgggttcaagtgatcctctcacctcagcctcccaagtagttgtgcctcctaggcacacaacactatgcccggcaaattttttgtattttgtattttttgtagaaacaggatttcgccatgttggccaggctggtctcgaacacctgggctcaactgatccgcctgcctcggcctcccaaagtgctgggattacaggtgtgagccaccctgctcaaccaggttttattatttaagttagttaaactttggatagattgtataatatatagtttaatgtaatcatgctcatattttttaaataaataaaacactatactactgaaaag

SEQ ID NO: 426175 - DNA, 9232 bp, Homo sapiens
cccaggggctcaagccgcacgtgagaaagtctgggcatctgggattcggagagtatagcctgtgagccgctttcccctccttactgtcggttgcatcccttcgacactcccgaggccgtcgcgggccactggccctctgcagccatgaagacaaagcccgtttcccacaagaccgagaacacctaccggtttcttacatttgctgaacgactggggaatgttaatattgatattattcaccggattgatagaactgcaagctatgaggaggaggttgaaacctacttttttgagggtctgctgaaatggagagaattaaacctcacagaacacttcggaaaattttacaaagaagttattgacaaatgccaatcattcaatcagttggtgtatcaccaaaacgagatagttcagagtttgaagactcacctgcaagttaagaacagttttgcctatcaaccccttttggatttggttgtacagttggcacgagatctgcagatggatttctacccacactttccagagttttttttgactatcacctcgatcctggagactcaggacacagagttgttagaatgggctttcacctcgttatcatatctttataagtacctgtggagactgatggtgaaggacatgtccagtatatacagcatgtacagcacactcctggctcataaaaaactacatataagaaattttgctgctgaaagttttacttttttgatgagaaaggtctctgataaaaacgcacttttcaatttaatgtttcttgatcttgataaacatccagaaaaagttgaaggtgttggacagttgctctttgaaatgtgcaaaggagttagaaatatgtttcactcctgtacaggccaggcagtgaagctaattttgcgaaagctaggaccagtcactgaaacagaaactcaactaccatggatgttaattggagaaacactcaaaaacatggtcaaatccactgtatcctacatctccaaggaacattttggtacattttttgaatgtttgcaagaatcgctcttggatctacacacaaaagtaacaaaaactaactgttgtgaaagttctgaacagattaaaaggttgttggaaacataccttatacttgtaaaacatggaagtgggacaaagatacccacgcctgctgatgtctgtaaggtgttatctcaaacactgcaagtagccagtctctccacatcttgctgggagaccctcttggatgtaatttctgctttgatcctgggtgaaaatgtttccttgccggagaccctcatcaaagaaaccatagaaaaaatatttgagagcagatttgaaaaacgtttaattttcagtttttctgaagtcatgtttgccatgaagcagtttgagcagctttttctaccaagctttctgtcatatattgtgaattgcttcttaattgatgatgctgtagtcaaagatgaagctctggccattctggccaagctcattctgaacaaagcagcacctcccactgctggctcgatggcaattgaaaagtaccctctggttttctcaccgcagatggtgggattctatataaagcagaagaagactagatccaagggaagaaacgaacagtttccagtattggaccatcttttatctataattaagttacccccaaataaagatactacttacctttcacaatcttgggcagccctcgtggtgttacctcatattagacctcttgagaaagagaaggtgataccactcgtcaccggcttcatagaggcactcttcatgactgttgacaaaggaagctttgggaaaggaaacttatttgttctttgtcaagctgtaaatactctactaagtttggaagaatcttctgaacttcttcatttggttcctgtggaacgtgtgaagaatttagtattaacctttcccctggagccatctgtgttgctgttgactgatctctattatcagagattagccttgtgtggctgcaaagggccactttcccaggaggctttaatggaattatttcccaagttacaagcaaacatttcaactggtgtatccaagattcggcttttgacaataaggatcctaaaccattttgatgtccagcttccagaatcaatggaggatgatgggctctcagagcggcagtctgtctttgctatattacgccaggcagaacttgttccagcaactgtgaatgattatagagagaagcttcttcatttgagaaaactaagacatgatgtggtacagactgctgtccctgatgggccgttacaggaggtgccgcttcgttatttgttaggcatgctatatattaatttcagtgcactctgggatcctgttattgaactcataagttctcatgcacacgaaatggaaaataagcaattttggaaagtctactatgagcatctagaaaaagcagctacgcatgctgagaaggaactacagaatgatatgacagatgagaagtccgttggagatgaaagttgggagcagacccaggaaggagatgttggagctctttatcatgagcagttagcattgaaaactgactgtcaggaaagacttgaccacaccaacttcagattcctgctctggagagctctgaccaaattcccagaaagagtagagccacggtccagggagctttccccgcttttcttgagatttatcaacaatgagtattacccagcagatctgcaagttgctccaacccaggatctacggagaaaaggcaaagggatggtggcagaggaaatcgaagaggaacctgccgcaggagatgatgaagagttggaggaagaggcagtgccccaagatgaatcctcacagaagaaaaagacgaggagagctgcagcaaagcaattaattgctcatttgcaagttttctctaaattttcaaatccacgggccttatatctggaatccaaactatatgagttatatcttcagttgttgctacaccaagatcaaatggtgcaaaaaataaccttggattgcataatgacatataaacatcctcatgtcctcccttacagggaaaacttacaaaggttgcttgaagacagaagctttaaggaagagatagtgcattttagcatttcagaagataatgctgtagtgaaaacagcccaccgagcagatctatttcctattctgatgagaattttgtatgggcgaatgaagaataagactgggagtaaaactcaggggaaatctgcttcaggcacccgcatggccattgtcctgcggttcctggccgggacccaacctgaggagatccagatattcttagacctgctgtttgaacctgtgaggcatttcaagaatggagagtgccattctgcagtcattcaagcagtagaagacttggatttgtctaaagttcttcctttaggtcgtcagcacggtatcttaaacagccttgagatagtattgaaaaacattagtcatctgatcagcgcatacctgccgaagattttgcagatactgctctgtatgacagcaaccgtatcacacatccttgaccaacgagaaaagatacagctgagatttattaatccattgaaaaatttaagacgtcttggaatcaaaatggtaactgatatctttttggactgggaatcatatcagtttagaacagaagaaattgatgctgtgtttcatggtgcagtttggccccagatcagcaggcttggatctgagagtcaatattctcctactcctctgctgaaactgatcagtatctggagcagaaacgcaagatatttccctttgctggctaaacagaagcctgggcacccagaatgtgatatcctgaccaatgtttttgcaattctctcagcgaagaatctttctgatgccacagccagtattgtaatggacatagttgatgaccttcttaaccttccagatttcgagcctacagaaacagttttgaacttgctggtaactggatgtgtataccctggcatagcagaaaacatcggtgagtctatcacaataggaggaagattaattctacctcatgtacctgcaattcttcagtatctcagcaaaaccacaataagcgcagaaaaggtgaaaaagaaaaagaatagagcacaagtcagtaaagagcttggcattctttcaaagatcagcaagtttatgaaagacaaagaacaaagttctgtactcattacgcttctccttccattcctccaccgtggcaatattgctgaggatacagaggttgatattctggtgacagtacaaaacttgttaaagcattgtgtggaccctacaagcttcctcaagcctatagcaaaacttttctcagttattaagaacaaattgtcaagaaaattgctttgtacggtttttgagactctttctgattttgagagtgggttaaaatatattactgatgttgtcaagcttaacgccttcgatcaaagacatcttgatgatatcaacttcgacgttcgctttgagactttccagaccatcacctcttacattaaagaaatgcaaattgtggatgttaactacctaattccagttatgcataattgtttctataatctagagttaggagatatgagtttaagtgataatgccagcatgtgcctgatgagtatcatcaaaaagctagctgccttgaatgtcacagagaaagactatagagaaatcatccaccgttcactcctggagaaattgagaaaaggtctgaagagccagacagagagtattcagcaggattataccacaatactttcctgtttaattcaaacctttccaaaccaactggaattcaaagacttggtacaacttactcattaccatgacccagaaatggacttctttgagaacatgaagcacattcagatccacagaagagcaagagccttgaagaaacttgcaaaacaactaatggaaggcaaagttgttctgtcttctaaatctcttcagaattacatcatgccttatgccatgactccaatttttgatgagaaaatgctcaagcatgaaaatataaccactgctgccacagagattattggagccatttgcaaacatctctcttggtcagcgtatatgtattacttgaaacatttcattcatgtcttacaaacgggacagatcaatcaaaaactgggtgtcagtttgctagtaatagtgttagaagcattccactttgaccacaaaactcttgaagaacaaatgggaaaaattgagaatgaagaaaacgcaattgaagcaattgagttaccagagcctgaggccatggaattagagcgtgtggatgaggaagagaaggaatatacatgcaagagtttgtcagacaacggacaaccgggaacccctgatccagctgactctggaggaacatcagctaaagaatccgagtgtatcacaaagcctgtctctttccttcctcaaaacaaggaagaaatagagagaacaattaaaaatatccaaggaaccataaccggggatattctccccaggctacataaatgccttgcatctacgactaaaagggaagaagaacacaagcttgtcaagtcaaaggttgtgaatgatgaggaagtcgttcgagttccattagcttttgccatggttaaactaatgcagtcccttccacaagaagttatggaagctaatctgccaagtattttgctgaaagtgtgtgccctactcaagaacagagcccaagaaatcagagacattgcacgcagcactcttgcgaaaataatagaggatcttggtgtgcacttcctccaatatgttttaaaagaattacagactactcttgtccgtggataccaggtccatgtgctgactttcaccgttcacatgctgctgcaaggcctcaccaataagctgcaggtcggagatttggactcttgtttagatataatgattgagatttttaaccatgagttgtttggtgctgttgctgaagagaaggaagtaaagcagatcctctccaaagtcatggaagcacgaagaagcaaaagttacgactcttatgaaatcctcggcaagtttgtaggaaaagatcaggttacaaaactcatccttccattaaaagagatcttacaaaataccacgagtttgaaactggcccggaaagttcatgaaactttacgccgaatcacagtgggattaattgtaaatcaggaaatgacagctgaatccattctattactcagttatggtttgatcagtgaaaatcttcccctgttaacagagaaagaaaaaaatccagtagccccagcaccagatccacgtctaccaccccagagctgccttctgcttcccccaactccagttcgaggtggacagaaagctgttgtgagcaggaaaaccaacatgcacatatttattgagtccgggcttcggctgctgcatctgagtctgaagacttccaagatcaagtcttcaggtgaatgtgtcctggaaatgctggatccttttgtgtctctcctcatagactgcctgggctccatggatgtgaaggtgatcacaggtgctttacagtgcctcatctgggtcttgaggttcccgctaccttccatagaaacaaaagcagagcagctgacaaaacacctcttccttctgctgaaggactatgcaaagctcggggccgccaggggccagaacttccaccttgtggtcaattgtttcaagtgtgtgaccatacttgtcaagaaagtcaagtcttaccagataactgaaaaacagctccaagttctactggcctatgctgaggaggacatttatgatacttcaagacaagccactgcctttggtcttctgaaggcaattttatcaagaaagctgttggtcccagaaatcgatgaggtcatgcggaaagtatccaagttggcagtctctgcacaaagcgaacctgccagggtccagtgtagacaggtttttctgaaatatattcttgactatcccctgggtgacaaattgagaccaaacttggaattcatgctcgctcaactgaattacgaacatgagaccgggagagagtccaccttggaaatgatcgcctatctctttgacacgttccctcaggggctgctccatgagaactgcggaatgttctttatccctctttgtctaatgacgatcaatgatgactctgccacgtgcaaaaagatggcatccatgacaatcaagtccctacttggtaaaatcagcctcgagaaaaaagattggctgtttgatatggttaccacttggtttggagcaaaaaagcgcttaaatagacaacttgctgccctgatctgtggcttgtttgtggaaagtgaaggagttgattttgagaaaagacttggaactgtccttcctgtgattgaaaaggaaattgatcctgaaaactttaaagatatcatggaagaaactgaagaaaaagctgcagatcgccttctgtttagttttcttacactgataactaaacttatcaaggaatgtaatattattcagtttaccaaacccgctgagactttgagtaaaatctggagtcatgtgcattctcacctgagacatccacacaactgggtgtggctcacagcagcccagatttttggattactctttgcctcttgccagccagaggagcttattcaaaaatggaataccaaaaagaccaaaaaacacctcccagaacctgtagcaatcaagttcctagccagtgaccttgaccaaaagatgaaaagtatctctctcgcctcttgccatcaattgcattccaaattcttggatcagtctctaggagaacaggttgttaagaatttgttgttcgcagccaaagtcttgtatttactggaactttattgtgaggataagcaaagtaagataaaagaagacctggaagaacaagaagctttagaagatggtgtggcctgtgcagatgagaaggcggagtctgacggagaagagaaggaagaggtgaaggaagagctcggcaggccggccacgctgctgtggttgatccagaagctgtcccggattgcaaaactggaagctgcttattcgccgagaaaccccttaaaggtgcgatgaatgcacagaatgactgacagtagtcatttctctttaaaaagtattttaatgatattagtgatcctcctaagtccctagaaactttatctttgaaccccaaactgcagcaataacatccgtcccaaaatagactgagccctgttttctcaattaatgctgtgtctatgattgagtgctaaagagaagtctttcaaatgaaaaaaatgatctgtactttcagagaacatgcatctttaagttcctcggcgccgtagcaatggatcttgggatagacaaggtaaagccgtatctcccaatgatcatagctcctttgtttcgggaactcaacagcacctattcagagcaagatcctttgctgaagaatctatcccaggaaatcatagaattactcaaaaagctggttgggcttgagagcttctcattagcctttgcctctgtacagaaacaggctaatgagaaaagggcactccggaaaaagaggaaggccctggagtttgtaactaatcctgatattgctgccaagaaaaaaatgaagaaacacaaaaataaaagtgaagcaaagaagagaaagatagagttcctgcgtccaggatataaggccaagagacaaaaaagccatagcctgaaagatttagcaatggtggagtaatgtctccctgtgctgatacaagcatgaactttctggaatattctgctagtctgaaattacagcaggttgtctggggtaggggggaggcgtttttttttttttttgagacaaggtctcactctgtcacccaaggtggagtgcagtgacgacatcacagctcactgcagcctcaacctgggttcaagtgatcctctcacctcagcctcccaagtagttgtgcctcctaggcacacaacactatgcccggcaaattttttgtattttgtattttttgtagaaacaggatttcgccatgttggccaggctggtctcgaacacctgggctcaactgatccgcctgcctcggcctcccaaagtgctgggattacaggtgtgagccaccctgctcaaccaggttttattatttaagttagttaaactttggatagattgtataatatatagtttaatgtaatcatgctcatattttttaaataaataaaacactatactactgaaaag

SEQ ID NO: 426176 - DNA, 8482 bp, Homo sapiens
cccaggggctcaagccgcacgtgagaaagtctgggcatctgggattcggagagtatagcctgtgagccgctttcccctccttactgtcggttgcatcccttcgacactcccgaggccgtcgcgggccactggccctctgcagccatgaagacaaagcccgtttcccacaagaccgagaacacctaccggtttcttacatttgctgaacgactggggaatgttaatattgatattattcaccggattgatagaactgcaagctatgaggaggaggttgaaacctacttttttgagggtctgctgaaatggagagaattaaacctcacagaacacttcggaaaattttacaaagaagttattgacaaatgccaatcattcaatcagttggtgtatcaccaaaacgagatagttcagagtttgaagactcacctgcaagttaagaacagttttgcctatcaaccccttttggatttggttgtacagttggcacgagatctgcagatggatttctacccacactttccagagttttttttgactatcacctcgatcctggagactcaggacacagagttgttagaatgggctttcacctcgttatcatatctttataagtacctgtggagactgatggtgaaggacatgtccagtatatacagcatgtacagcacactcctggctcataaaaaactacatataagaaattttgctgctgaaagttttacttttttgatgagaaaggtctctgataaaaacgcacttttcaatttaatgtttcttgatcttgataaacatccagaaaaagttgaaggtgttggacagttgctctttgaaatgtgcaaaggagttagaaatatgtttcactcctgtacaggccaggcagtgaagctaattttgcgaaagctaggaccagtcactgaaacagaaactcaactaccatggatgttaattggagaaacactcaaaaacatggtcaaatccactgtatcctacatctccaaggaacattttggtacattttttgaatgtttgcaagaatcgctcttggatctacacacaaaagtaacaaaaactaactgttgtgaaagttctgaacagattaaaaggttgttggaaacataccttatacttgtaaaacatggaagtgggacaaagatacccacgcctgctgatgtctgtaaggtgttatctcaaacactgcaagtagccagtctctccacatcttgctgggagaccctcttggatgtaatttctgctttgatcctgggtgaaaatgtttccttgccggagaccctcatcaaagaaaccatagaaaaaatatttgagagcagatttgaaaaacgtttaattttcagtttttctgaagtcatgtttgccatgaagcagtttgagcagctttttctaccaagctttctgtcatatattgtgaattgcttcttaattgatgatgctgtagtcaaagatgaagctctggccattctggccaagctcattctgaacaaagcagcacctcccactgctggctcgatggcaattgaaaagtaccctctggttttctcaccgcagatggtgggattctatataaagcagaagaagactagatccaagggaagaaacgaacagtttccagtattggaccatcttttatctataattaagttacccccaaataaagatactacttacctttcacaatcttgggcagccctcgtggtgttacctcatattagacctcttgagaaagagaaggtgataccactcgtcaccggcttcatagaggcactcttcatgactgttgacaaaggaagctttgggaaaggaaacttatttgttctttgtcaagctgtaaatactctactaagtttggaagaatcttctgaacttcttcatttggttcctgtggaacgtgtgaagaatttagtattaacctttcccctggagccatctgtgttgctgttgactgatctctattatcagagattagccttgtgtggctgcaaagggccactttcccaggaggctttaatggaattatttcccaagttacaagcaaacatttcaactggtgtatccaagattcggcttttgacaataaggatcctaaaccattttgatgtccagcttccagaatcaatggaggatgatgggctctcagagcggcagtctgtctttgctatattacgccaggcagaacttgttccagcaactgtgaatgattatagagagaagcttcttcatttgagaaaactaagacatgatgtggtacagactgctgtccctgatgggccgttacaggaggtgccgcttcgttatttgttaggcatgctatatattaatttcagtgcactctgggatcctgttattgaactcataagttctcatgcacacgaaatggaaaataagcaattttggaaagtctactatgagcatctagaaaaagcagctacgcatgctgagaaggaactacagaatgatatgacagatgagaagtccgttggagatgaaagttgggagcagacccaggaaggagatgttggagctctttatcatgagcagttagcattgaaaactgactgtcaggaaagacttgaccacaccaacttcagattcctgctctggagagctctgaccaaattcccagaaagagtagagccacggtccagggagctttccccgcttttcttgagatttatcaacaatgagtattacccagcagatctgcaagttgctccaacccaggatctacggagaaaaggcaaagggatggtggcagaggaaatcgaagaggaacctgccgcaggagatgatgaagagttggaggaagaggcagtgccccaagatgaatcctcacagaagaaaaagacgaggagagctgcagcaaagcaattaattgctcatttgcaagttttctctaaattttcaaatccacgggccttatatctggaatccaaactatatgagttatatcttcagttgttgctacaccaagatcaaatggtgcaaaaaataaccttggattgcataatgacatataaacatcctcatgtcctcccttacagggaaaacttacaaaggttgcttgaagacagaagctttaaggaagagatagtgcattttagcatttcagaagataatgctgtagtgaaaacagcccaccgagcagatctatttcctattctgatgagaattttgtatgggcgaatgaagaataagactgggagtaaaactcaggggaaatctgcttcaggcacccgcatggccattgtcctgcggttcctggccgggacccaacctgaggagatccagatattcttagacctgctgtttgaacctgtgaggcatttcaagaatggagagtgccattctgcagtcattcaagcagtagaagacttggatttgtctaaagttcttcctttaggtcgtcagcacggtatcttaaacagccttgagatagtattgaaaaacattagtcatctgatcagcgcatacctgccgaagattttgcagatactgctctgtatgacagcaaccgtatcacacatccttgaccaacgagaaaagatacagctgagatttattaatccattgaaaaatttaagacgtcttggaatcaaaatggtaactgatatctttttggactgggaatcatatcagtttagaacagaagaaattgatgctgtgtttcatggtgcagtttggccccagatcagcaggcttggatctgagagtcaatattctcctactcctctgctgaaactgatcagtatctggagcagaaacgcaagatatttccctttgctggctaaacagaagcctgggcacccagaatgtgatatcctgaccaatgtttttgcaattctctcagcgaagaatctttctgatgccacagccagtattgtaatggacatagttgatgaccttcttaaccttccagatttcgagcctacagaaacagttttgaacttgctggtaactggatgtgtataccctggcatagcagaaaacatcggtgagtctatcacaataggaggaagattaattctacctcatgtacctgcaattcttcagtatctcagcaaaaccacaataagcgcagaaaaggtgaaaaagaaaaagaatagagcacaagtcagtaaagagcttggcattctttcaaagatcagcaagtttatgaaagacaaagaacaaagttctgtactcattacgcttctccttccattcctccaccgtggcaatattgctgaggatacagaggttgatattctggtgacagtacaaaacttgttaaagcattgtgtggaccctacaagcttcctcaagcctatagcaaaacttttctcagttattaagaacaaattgtcaagaaaattgctttgtacggtttttgagactctttctgattttgagagtgggttaaaatatattactgatgttgtcaagcttaacgccttcgatcaaagacatcttgatgatatcaacttcgacgttcgctttgagactttccagaccatcacctcttacattaaagaaatgcaaattgtggatgttaactacctaattccagttatgcataattgtttctataatctagagttaggagatatgagtttaagtgataatgccagcatgtgcctgatgagtatcatcaaaaagctagctgccttgaatgtcacagagaaagactatagagaaatcatccaccgttcactcctggagaaattgagaaaaggtctgaagagccagacagagagtattcagcaggattataccacaatactttcctgtttaattcaaacctttccaaaccaactggaattcaaagacttggtacaacttactcattaccatgacccagaaatggacttctttgagaacatgaagcacattcagatccacagaagagcaagagccttgaagaaacttgcaaaacaactaatggaaggcaaagttgttctgtcttctaaatctcttcagaattacatcatgccttatgccatgactccaatttttgatgagaaaatgctcaagcatgaaaatataaccactgctgccacagagattattggagccatttgcaaacatctctcttggtcagcgtatatgtattacttgaaacatttcattcatgtcttacaaacgggacagatcaatcaaaaactgggtgtcagtttgctagtaatagtgttagaagcattccactttgaccacaaaactcttgaagaacaaatgggaaaaattgagaatgaagaaaacgcaattgaagcaattgagttaccagagcctgaggccatggaattagagcgtgtggatgaggaagagaaggaatatacatgcaagagtttgtcagacaacggacaaccgggaacccctgatccagctgactctggaggaacatcagctaaagaatccgagtgtatcacaaagcctgtctctttccttcctcaaaacaaggaagaaatagagagaacaattaaaaatatccaaggaaccataaccggggatattctccccaggctacataaatgccttgcatctacgactaaaagggaagaagaacacaagcttgtcaagtcaaaggttgtgaatgatgaggaagtcgttcgagttccattagcttttgccatggttaaactaatgcagtcccttccacaagaagttatggaagctaatctgccaagtattttgctgaaagtgtgtgccctactcaagaacagagcccaagaaatcagagacattgcacgcagcactcttgcgaaaataatagaggatcttggtgtgcacttcctccaatatgttttaaaagaattacagactactcttgtccgtggataccaggtccatgtgctgactttcaccgttcacatgctgctgcaaggcctcaccaataagctgcaggtcggagatttggactcttgtttagatataatgattgagatttttaaccatgagttgtttggtgctgttgctgaagagaaggaagtaaagcagatcctctccaaagtcatggaagcacgaagaagcaaaagttacgactcttatgaaatcctcggcaagtttgtaggaaaagatcaggttacaaaactcatccttccattaaaagagatcttacaaaataccacgagtttgaaactggcccggaaagttcatgaaactttacgccgaatcacagtgggattaattgtaaatcaggaaatgacagctgaatccattctattactcagttatggtttgatcagtgaaaatcttcccctgttaacagagaaagaaaaaaatccagtagccccagcaccagatccacgtctaccaccccagagctgccttctgcttcccccaactccagttcgaggtggacagaaagctgttgtgagcaggaaaaccaacatgcacatatttattgagtccgggcttcggctgctgcatctgagtctgaagacttccaagatcaagtcttcaggtgaatgtgtcctggaaatgctggatccttttgtgtctctcctcatagactgcctgggctccatggatgtgaaggtgatcacaggtgctttacagtgcctcatctgggtcttgaggttcccgctaccttccatagaaacaaaagcagagcagctgacaaaacacctcttccttctgctgaaggactatgcaaagctcggggccgccaggggccagaacttccaccttgtggtcaattgtttcaagtgtgtgaccatacttgtcaagaaagtcaagtcttaccagataactgaaaaacagctccaagttctactggcctatgctgaggaggacatttatgatacttcaagacaagccactgcctttggtcttctgaaggcaattttatcaagaaagctgttggtcccagaaatcgatgaggtcatgcggaaagtatccaagttggcagtctctgcacaaagcgaacctgccagggtccagtgtagacaggtttttctgaaatatattcttgactatcccctgggtgacaaattgagaccaaacttggaattcatgctcgctcaactgaattacgaacatgagaccgggagagagtccaccttggaaatgatcgcctatctctttgacacgttccctcaggggctgctccatgagaactgcggaatgttctttatccctctttgtctaatgacgatcaatgatgactctgccacgtgcaaaaagatggcatccatgacaatcaagtccctacttggtaaaatcagcctcgagaaaaaagattggctgtttgatatggttaccacttggtttggagcaaaaaagcgcttaaatagacaacttgctgccctgatctgtggcttgtttgtggaaagtgaaggagttgattttgagaaaagacttggaactgtccttcctgtgattgaaaaggaaattgatcctgaaaactttaaagatatcatggaagaaactgaagaaaaagctgcagatcgccttctgtttagttttcttacactgataactaaacttatcaaggaatgtaatattattcagtttaccaaacccgctgagactttgagtaaaatctggagtcatgtgcattctcacctgagacatccacacaactgggtgtggctcacagcagcccagatttttggattactctttgcctcttgccagccagaggagcttattcaaaaatggaataccaaaaagaccaaaaaacacctcccagaacctgtagcaatcaagttcctagccagtgaccttgaccaaaagatgaaaagtatctctctcgcctcttgccatcaattgcattccaaattcttggatcagtctctaggagaacaggttgttaagaatttgttgttcgcagccaaagtcttgtatttactggaactttattgtgaggataagcaaagtaagataaaagaagacctggaagaacaagaagctttagaagatggtgtggcctgtgcagatgagaaggcggagtctgacggagaagagaaggaagaggtgaaggaagagctcggcaggccggccacgctgctgtggttgatccagaagctgtcccggattgcaaaactggaagctgcttattcgccgagaaaccccttaaaggtgcgatgaatgcacagaatgactgacagtagtcatttctctttaaaaagtattttaatgatattagtgatcctcctaagtccctagaaactttatctttgaaccccaaactgcagcaataacatccgtcccaaaatagactgagccctgttttctcaattaatgctgtgtctatgattgagtgctaaagagaagtctttcaaatgaaaaaaatgatctgtactttcagagaacatgcatctttaagttcctcggcgccgtagcaatggatcttgggatagacaaggtaaagccgtatctcccaatgatcatagctcctttgtttcgggaactcaacagcacctattcagagcaaggtaaccctgcctcgtctgttctcctgccttttgcacatgaggatttctaactt

SEQ ID NO: 426177 - DNA, 7757 bp, Homo sapiens
  misc_feature (7659)..(7659): n is a, c, g, or t
cccaggggctcaagccgcacgtgagaaagtctgggcatctgggattcggagagtatagcctgtgagccgctttcccctccttactgtcggttgcatcccttcgacactcccgaggccgtcgcgggccactggccctctgcagccatgaagacaaagcccgtttcccacaagaccgagaacacctaccggtttcttacatttgctgaacgactggggaatgttaatattgatattattcaccggattgatagaactgcaagctatgaggaggaggttgaaacctacttttttgagggtctgctgaaatggagagaattaaacctcacagaacacttcggaaaattttacaaagaagttattgacaaatgccaatcattcaatcagttggtgtatcaccaaaacgagatagttcagagtttgaagactcacctgcaagttaagaacagttttgcctatcaaccccttttggatttggttgtacagttggcacgagatctgcagatggatttctacccacactttccagagttttttttgactatcacctcgatcctggagactcaggacacagagttgttagaatgggctttcacctcgttatcatatctttataagtacctgtggagactgatggtgaaggacatgtccagtatatacagcatgtacagcacactcctggctcataaaaaactacatataagaaattttgctgctgaaagttttacttttttgatgagaaaggtctctgataaaaacgcacttttcaatttaatgtttcttgatcttgataaacatccagaaaaagttgaaggtgttggacagttgctctttgaaatgtgcaaaggagttagaaatatgtttcactcctgtacaggccaggcagtgaagctaattttgcgaaagctaggaccagtcactgaaacagaaactcaactaccatggatgttaattggagaaacactcaaaaacatggtcaaatccactgtatcctacatctccaaggaacattttggtacattttttgaatgtttgcaagaatcgctcttggatctacacacaaaagtaacaaaaactaactgttgtgaaagttctgaacagattaaaaggttgttggaaacataccttatacttgtaaaacatggaagtgggacaaagatacccacgcctgctgatgtctgtaaggtgttatctcaaacactgcaagtagccagtctctccacatcttgctgggagaccctcttggatgtaatttctgctttgatcctgggtgaaaatgtttccttgccggagaccctcatcaaagaaaccatagaaaaaatatttgagagcagatttgaaaaacgtttaattttcagtttttctgaagtcatgtttgccatgaagcagtttgagcagctttttctaccaagctttctgtcatatattgtgaattgcttcttaattgatgatgctgtagtcaaagatgaagctctggccattctggccaagctcattctgaacaaagcagcacctcccactgctggctcgatggcaattgaaaagtaccctctggttttctcaccgcagatggtgggattctatataaagcagaagaagactagatccaagggaagaaacgaacagtttccagtattggaccatcttttatctataattaagttacccccaaataaagatactacttacctttcacaatcttgggcagccctcgtggtgttacctcatattagacctcttgagaaagagaaggtgataccactcgtcaccggcttcatagaggcactcttcatgactgttgacaaaggaagctttgggaaaggaaacttatttgttctttgtcaagctgtaaatactctactaagtttggaagaatcttctgaacttcttcatttggttcctgtggaacgtgtgaagaatttagtattaacctttcccctggagccatctgtgttgctgttgactgatctctattatcagagattagccttgtgtggctgcaaagggccactttcccaggaggctttaatggaattatttcccaagttacaagcaaacatttcaactggtgtatccaagattcggcttttgacaataaggatcctaaaccattttgatgtccagcttccagaatcaatggaggatgatgggctctcagagcggcagtctgtctttgctatattacgccaggcagaacttgttccagcaactgtgaatgattatagagagaagcttcttcatttgagaaaactaagacatgatgtggtacagactgctgtccctgatgggccgttacaggaggtgccgcttcgttatttgttaggcatgctatatattaatttcagtgcactctgggatcctgttattgaactcataagttctcatgcacacgaaatggaaaataagcaattttggaaagtctactatgagcatctagaaaaagcagctacgcatgctgagaaggaactacagaatgatatgacagatgagaagtccgttggagatgaaagttgggagcagacccaggaaggagatgttggagctctttatcatgagcagttagcattgaaaactgactgtcaggaaagacttgaccacaccaacttcagattcctgctctggagagctctgaccaaattcccagaaagagtagagccacggtccagggagctttccccgcttttcttgagatttatcaacaatgagtattacccagcagatctgcaagttgctccaacccaggatctacggagaaaaggcaaagggatggtggcagaggaaatcgaagaggaacctgccgcaggagatgatgaagagttggaggaagaggcagtgccccaagatgaatcctcacagaagaaaaagacgaggagagctgcagcaaagcaattaattgctcatttgcaagttttctctaaattttcaaatccacgggccttatatctggaatccaaactatatgagttatatcttcagttgttgctacaccaagatcaaatggtgcaaaaaataaccttggattgcataatgacatataaacatcctcatgtcctcccttacagggaaaacttacaaaggttgcttgaagacagaagctttaaggaagagatagtgcattttagcatttcagaagataatgctgtagtgaaaacagcccaccgagcagatctatttcctattctgatgagaattttgtatgggcgaatgaagaataagactgggagtaaaactcaggggaaatctgcttcaggcacccgcatggccattgtcctgcggttcctggccgggacccaacctgaggagatccagatattcttagacctgctgtttgaacctgtgaggcatttcaagaatggagagtgccattctgcagtcattcaagcagtagaagacttggatttgtctaaagttcttcctttaggtcgtcagcacggtatcttaaacagccttgagatagtattgaaaaacattagtcatctgatcagcgcatacctgccgaagattttgcagatactgctctgtatgacagcaaccgtatcacacatccttgaccaacgagaaaagatacagctgagatttattaatccattgaaaaatttaagacgtcttggaatcaaaatggtaactgatatctttttggactgggaatcatatcagtttagaacagaagaaattgatgctgtgtttcatggtgcagtttggccccagatcagcaggcttggatctgagagtcaatattctcctactcctctgctgaaactgatcagtatctggagcagaaacgcaagatatttccctttgctggctaaacagaagcctgggcacccagaatgtgatatcctgaccaatgtttttgcaattctctcagcgaagaatctttctgatgccacagccagtattgtaatggacatagttgatgaccttcttaaccttccagatttcgagcctacagaaacagttttgaacttgctggtaactggatgtgtataccctggcatagcagaaaacatcggtgagtctatcacaataggaggaagattaattctacctcatgtacctgcaattcttcagtatctcagcaaaaccacaataagcgcagaaaaggtgaaaaagaaaaagaatagagcacaagtcagtaaagagcttggcattctttcaaagatcagcaagtttatgaaagacaaagaacaaagttctgtactcattacgcttctccttccattcctccaccgtggcaatattgctgaggatacagaggttgatattctggtgacagtacaaaacttgttaaagcattgtgtggaccctacaagcttcctcaagcctatagcaaaacttttctcagttattaagaacaaattgtcaagaaaattgctttgtacggtttttgagactctttctgattttgagagtgggttaaaatatattactgatgttgtcaagcttaacgccttcgatcaaagacatcttgatgatatcaacttcgacgttcgctttgagactttccagaccatcacctcttacattaaagaaatgcaaattgtggatgttaactacctaattccagttatgcataattgtttctataatctagagttaggagatatgagtttaagtgataatgccagcatgtgcctgatgagtatcatcaaaaagctagctgccttgaatgtcacagagaaagactatagagaaatcatccaccgttcactcctggagaaattgagaaaaggtctgaagagccagacagagagtattcagcaggattataccacaatactttcctgtttaattcaaacctttccaaaccaactggaattcaaagacttggtacaacttactcattaccatgacccagaaatggacttctttgagaacatgaagcacattcagatccacagaagagcaagagccttgaagaaacttgcaaaacaactaatggaaggcaaagttgttctgtcttctaaatctcttcagaattacatcatgccttatgccatgactccaatttttgatgagaaaatgctcaagcatgaaaatataaccactgctgccacagagattattggagccatttgcaaacatctctcttggtcagcgtatatgtattacttgaaacatttcattcatgtcttacaaacgggacagatcaatcaaaaactgggtgtcagtttgctagtaatagtgttagaagcattccactttgaccacaaaactcttgaagaacaaatgggaaaaattgagaatgaagaaaacgcaattgaagcaattgagttaccagagcctgaggccatggaattagagcgtgtggatgaggaagagaaggaatatacatgcaagagtttgtcagacaacggacaaccgggaacccctgatccagctgactctggaggaacatcagctaaagaatccgagtgtatcacaaagcctgtctctttccttcctcaaaacaaggaagaaatagagagaacaattaaaaatatccaaggaaccataaccggggatattctccccaggctacataaatgccttgcatctacgactaaaagggaagaagaacacaagcttgtcaagtcaaaggttgtgaatgatgaggaagtcgttcgagttccattagcttttgccatggttaaactaatgcagtcccttccacaagaagttatggaagctaatctgccaagtattttgctgaaagtgtgtgccctactcaagaacagagcccaagaaatcagagacattgcacgcagcactcttgcgaaaataatagaggatcttggtgtgcacttcctccaatatgttttaaaagaattacagactactcttgtccgtggataccaggtccatgtgctgactttcaccgttcacatgctgctgcaaggcctcaccaataagctgcaggtcggagatttggactcttgtttagatataatgattgagatttttaaccatgagttgtttggtgctgttgctgaagagaaggaagtaaagcagatcctctccaaagtcatggaagcacgaagaagcaaaagttacgactcttatgaaatcctcggcaagtttgtaggaaaagatcaggttacaaaactcatccttccattaaaagagatcttacaaaataccacgagtttgaaactggcccggaaagttcatgaaactttacgccgaatcacagtgggattaattgtaaatcaggaaatgacagctgaatccattctattactcagttatggtttgatcagtgaaaatcttcccctgttaacagagaaagaaaaaaatccagtagccccagcaccagatccacgtctaccaccccagagctgccttctgcttcccccaactccagttcgaggtggacagaaagctgttgtgagcaggaaaaccaacatgcacatatttattgagtccgggcttcggctgctgcatctgagtctgaagacttccaagatcaagtcttcaggtgaatgtgtcctggaaatgctggatccttttgtgtctctcctcatagactgcctgggctccatggatgtgaaggtgatcacaggtgctttacagtgcctcatctgggtcttgaggttcccgctaccttccatagaaacaaaagcagagcagctgacaaaacacctcttccttctgctgaaggactatgcaaagctcggggccgccaggggccagaacttccaccttgtggtcaattgtttcaagtgtgtgaccatacttgtcaagaaagtcaagtcttaccagataactgaaaaacagctccaagttctactggcctatgctgaggaggacatttatgatacttcaagacaagccactgcctttggtcttctgaaggcaattttatcaagaaagctgttggtcccagaaatcgatgaggtcatgcggaaagtatccaagttggcagtctctgcacaaagcgaacctgccagggtccagtgtagacaggtttttctgaaatatattcttgactatcccctgggtgacaaattgagaccaaacttggaattcatgctcgctcaactgaattacgaacatgagaccgggagagagtccaccttggaaatgatcgcctatctctttgacacgttccctcaggggctgctccatgagaactgcggaatgttctttatccctctttgtctaatgacgatcaatgatgactctgccacgtgcaaaaagatggcatccatgacaatcaagtccctacttggtaaaatcagcctcgagaaaaaagattggctgtttgatatggttaccacttggtttggagcaaaaaaggtgtgcgttgcttttagtcacagttcagtgacaagtcttagctttggggatcatagtttaagtaagaatatatgtcatacactgttgaattggtttttttcccaaatagtgttatttttgtctgattatgcaaatagtatattcttaaagttttccaaagtgtaagaagttataaaaagtaatataggccgggttcaagtgattcttctgcctcagcctcctgagtagctgggactacaggcgtgtgccaccatgcccagctaatttttgtattttttagtagagacaggttttcaccgtgttggccaggatggtctccatctcttgacctcatgatccgcctgcctcggcctcccaaagtgctgggattacaggtgtgagccnccgtgcctggcctagatcattcttaagttcttcctcatagggcatcgaaacccatttccatgtaactttgatctatctgactagttctacctaactta

SEQ ID NO: 426178 - DNA, 925 bp, Homo sapiens
atttggggtttcttgccagatcagtagctggatataaatgttgtacatattgttgattttgttgatgttcaaatgtgtcctttcctacctgtctctgatcattactctttgtgtgtgattagatcctttgctgaagaatctatcccaggaaatcatagaattactcaaaaagctggttgggcttgagagcttctcattagcctttgcctctgtacagaaacaggctaatgagaaaagggcactccggaaaaagaggaaggccctggagtttgtaactaatcctgatattgctgccaagaaaaaaatgaagaaacacaaaaataaaagtgaagcaaagaagagaaagatagagttcctgcgtccaggatataaggccaagagacaaaaaagccatagcctgaaagatttagcaatggtggagtaatgtctccctgtgctgatacaagcatgaactttctggaatattctgctagtctgaaattacagcaggttgtctggggtaggggggaggcgtttttttttttttttgagacaaggtctcactctgtcacccaaggtggagtgcagtgacgacatcacagctcactgcagcctcaacctgggttcaagtgatcctctcacctcagcctcccaagtagttgtgcctcctaggcacacaacactatgcccggcaaattttttgtattttgtattttttgtagaaacaggatttcgccatgttggccaggctggtctcgaacacctgggctcaactgatccgcctgcctcggcctcccaaagtgctgggattacaggtgtgagccaccctgctcaaccaggttttattatttaagttagttaaactttggatagattgtataatatatagtttaatgtaatcatgctcatattttttaaataaataaaacactatactactgaaaag

SEQ ID NO: 426179 - DNA, 1164 bp, Homo sapiens
atttggggtttcttgccagatcagtagctggatataaatgttgtacatattgttgattttgttgatgttcaaatgtgtcctttcctacctgtctctgatcattactctttgtgtgtgattagatcctttgctgaagaatctatcccaggaaatcatagaattactcaaaaagctggttgggcttgagagcttctcattagcctttgcctctgtacagaaacaggctaatgagaaaagggcactccggaaaaagaggaaggccctggaggtaagtttgctctttgaaaatatggcatgttcactggacttgataactactaagtgtgcatgtttgtgtcacacttacacttagggaggatcaagggtttgagcggttggggactttatagctgggacttcagattttctttaatgagcatgtgttttttacatttatttctgtatttgattcttattggtttaacatttactttaaaagtaatataaaatttctattctcttttccagtttgtaactaatcctgatattgctgccaagaaaaaaatgaagaaacacaaaaataaaagtgaagcaaagaagagaaagatagagttcctgcgtccaggatataaggccaagagacaaaaaagccatagcctgaaagatttagcaatggtggagtaatgtctccctgtgctgatacaagcatgaactttctggaatattctgctagtctgaaattacagcaggttgtctggggtaggggggaggcgtttttttttttttttgagacaaggtctcactctgtcacccaaggtggagtgcagtgacgacatcacagctcactgcagcctcaacctgggttcaagtgatcctctcacctcagcctcccaagtagttgtgcctcctaggcacacaacactatgcccggcaaattttttgtattttgtattttttgtagaaacaggatttcgccatgttggccaggctggtctcgaacacctgggctcaactgatccgcctgcctcggcctcccaaagtgctgggattacaggtgtgagccaccctgctcaaccaggttttattatttaagttagttaaactttggatagattgtataatatatagtttaatgtaatcatgctcatattttttaaataaataaaacactatactactgaaaag

SEQ ID NO: 426180 - DNA, 378 bp, Homo sapiens
caaacaaataatgtgcttttgccttttcagaattttgtatgggcgaatgaagaataagactgggagtaaaactcaggggaaatctgcttcaggcacccgcatggccattgtcctgcggttcctggccgggacccaacctgaggagatccagatattcttagacctgctgtttgaacctgtgaggcatttcaagaatggtaactatcagctacctctcactctaatacctgttgtctgcggtggacttctcacatctcaggctacatttcccatgctcctgggcgtctttctaacagggttgttcctcccaatcttgatggcaatctttttgctgaagtgcaactcattttaaacttcaattaaattgcgtgaaactga

SEQ ID NO: 426181 - DNA, 498 bp, Homo sapiens
ctgggctctcgtcactttagaagggccactctaacttcttggaatgcagctgacagtgttctttaccctcttctcatgccacgtgattgacagaaatccagtagccccagcaccagatccacgtctaccaccccagagctgccttctgcttcccccaactccagttcgaggtggacagaaagctgttgtgagcaggaaaaccaacatgcacatatttattgagtccgggcttcgggtaagaattaaccttaaaatgagacttgctactttcagggagtctgcaccttttagtcttctgttgaatttctagtactgctcacttccattggaaatgccttactgtaaatacattttagattttttttttttacaggtgcattggtccatttactatttatctcttgcagcacttacattgaagatgtaactgtcccagaattaatgattctgctctaatatgtattaaggtcttactgatgctttgcccatgagtccctc

SEQ ID NO: 426182 - DNA, 6044 bp, Homo sapiens
ctgggactacaggcacgtagcactgcacccagctctcttagccttattttgttgttgacttttttcattgtctgtgttaaatatctaatttctattttcatgtttctgtgttttataatatatccatttaaatctattgagttgctcttctagccttttaggcaaataaaacaactcatattttagaattaatgtgcaaacaaataatgtgcttttgccttttcagaattttgtatgggcgaatgaagaataagactgggagtaaaactcaggggaaatctgcttcaggcacccgcatggccattgtcctgcggttcctggccgggacccaacctgaggagatccagatattcttagacctgctgtttgaacctgtgaggcatttcaagaatggagagtgccattctgcagtcattcaagcagtagaagacttggatttgtctaaagttcttcctttaggtcgtcagcacggtatcttaaacagccttgagatagtattgaaaaacattagtcatctgatcagcgcatacctgccgaagattttgcagatactgctctgtatgacagcaaccgtatcacacatccttgaccaacgagaaaagatacagctgagatttattaatccattgaaaaatttaagacgtcttggaatcaaaatggtaactgatatctttttggactgggaatcatatcagtttagaacagaagaaattgatgctgtgtttcatggtgcagtttggccccagatcagcaggcttggatctgagagtcaatattctcctactcctctgctgaaactgatcagtatctggagcagaaacgcaagatatttccctttgctggctaaacagaagcctgggcacccagaatgtgatatcctgaccaatgtttttgcaattctctcagcgaagaatctttctgatgccacagccagtattgtaatggacatagttgatgaccttcttaaccttccagatttcgagcctacagaaacagttttgaacttgctggtaactggatgtgtataccctggcatagcagaaaacatcggtgagtctatcacaataggaggaagattaattctacctcatgtacctgcaattcttcagtatctcagcaaaaccacaataagcgcagaaaaggtgaaaaagaaaaagaatagagcacaagtcagtaaagagcttggcattctttcaaagatcagcaagtttatgaaagacaaagaacaaagttctgtactcattacgcttctccttccattcctccaccgtggcaatattgctgaggatacagaggttgatattctggtgacagtacaaaacttgttaaagcattgtgtggaccctacaagcttcctcaagcctatagcaaaacttttctcagttattaagaacaaattgtcaagaaaattgctttgtacggtttttgagactctttctgattttgagagtgggttaaaatatattactgatgttgtcaagcttaacgccttcgatcaaagacatcttgatgatatcaacttcgacgttcgctttgagactttccagaccatcacctcttacattaaagaaatgcaaattgtggatgttaactacctaattccagttatgcataattgtttctataatctagagttaggagatatgagtttaagtgataatgccagcatgtgcctgatgagtatcatcaaaaagctagctgccttgaatgtcacagagaaagactatagagaaatcatccaccgttcactcctggagaaattgagaaaaggtctgaagagccagacagagagtattcagcaggattataccacaatactttcctgtttaattcaaacctttccaaaccaactggaattcaaagacttggtacaacttactcattaccatgacccagaaatggacttctttgagaacatgaagcacattcagatccacagaagagcaagagccttgaagaaacttgcaaaacaactaatggaaggcaaagttgttctgtcttctaaatctcttcagaattacatcatgccttatgccatgactccaatttttgatgagaaaatgctcaagcatgaaaatataaccactgctgccacagagattattggagccatttgcaaacatctctcttggtcagcgtatatgtattacttgaaacatttcattcatgtcttacaaacgggacagatcaatcaaaaactgggtgtcagtttgctagtaatagtgttagaagcattccactttgaccacaaaactcttgaagaacaaatgggaaaaattgagaatgaagaaaacgcaattgaagcaattgagttaccagagcctgaggccatggaattagagcgtgtggatgaggaagagaaggaatatacatgcaagagtttgtcagacaacggacaaccgggaacccctgatccagctgactctggaggaacatcagctaaagaatccgagtgtatcacaaagcctgtctctttccttcctcaaaacaaggaagaaatagagagaacaattaaaaatatccaaggaaccataaccggggatattctccccaggctacataaatgccttgcatctacgactaaaagggaagaagaacacaagcttgtcaagtcaaaggttgtgaatgatgaggaagtcgttcgagttccattagcttttgccatggttaaactaatgcagtcccttccacaagaagttatggaagctaatctgccaagtattttgctgaaagtgtgtgccctactcaagaacagagcccaagaaatcagagacattgcacgcagcactcttgcgaaaataatagaggatcttggtgtgcacttcctccaatatgttttaaaagaattacagactactcttgtccgtggataccaggtccatgtgctgactttcaccgttcacatgctgctgcaaggcctcaccaataagctgcaggtcggagatttggactcttgtttagatataatgattgagatttttaaccatgagttgtttggtgctgttgctgaagagaaggaagtaaagcagatcctctccaaagtcatggaagcacgaagaagcaaaagttacgactcttatgaaatcctcggcaagtttgtaggaaaagatcaggttacaaaactcatccttccattaaaagagatcttacaaaataccacgagtttgaaactggcccggaaagttcatgaaactttacgccgaatcacagtgggattaattgtaaatcaggaaatgacagctgaatccattctattactcagttatggtttgatcagtgaaaatcttcccctgttaacagagaaagaaaaaaatccagtagccccagcaccagatccacgtctaccaccccagagctgccttctgcttcccccaactccagttcgaggtggacagaaagctgttgtgagcaggaaaaccaacatgcacatatttattgagtccgggcttcggctgctgcatctgagtctgaagacttccaagatcaagtcttcaggtgaatgtgtcctggaaatgctggatccttttgtgtctctcctcatagactgcctgggctccatggatgtgaaggtgatcacaggtgctttacagtgcctcatctgggtcttgaggttcccgctaccttccatagaaacaaaagcagagcagctgacaaaacacctcttccttctgctgaaggactatgcaaagctcggggccgccaggggccagaacttccaccttgtggtcaattgtttcaagtgtgtgaccatacttgtcaagaaagtcaagtcttaccagataactgaaaaacagctccaagttctactggcctatgctgaggaggacatttatgatacttcaagacaagccactgcctttggtcttctgaaggcaattttatcaagaaagctgttggtcccagaaatcgatgaggtcatgcggaaagtatccaagttggcagtctctgcacaaagcgaacctgccagggtccagtgtagacaggtttttctgaaatatattcttgactatcccctgggtgacaaattgagaccaaacttggaattcatgctcgctcaactgaattacgaacatgagaccgggagagagtccaccttggaaatgatcgcctatctctttgacacgttccctcaggggctgctccatgagaactgcggaatgttctttatccctctttgtctaatgacgatcaatgatgactctgccacgtgcaaaaagatggcatccatgacaatcaagtccctacttggtaaaatcagcctcgagaaaaaagattggctgtttgatatggttaccacttggtttggagcaaaaaagcgcttaaatagacaacttgctgccctgatctgtggcttgtttgtggaaagtgaaggagttgattttgagaaaagacttggaactgtccttcctgtgattgaaaaggaaattgatcctgaaaactttaaagatatcatggaagaaactgaagaaaaagctgcagatcgccttctgtttagttttcttacactgataactaaacttatcaaggaatgtaatattattcagtttaccaaacccgctgagactttgagtaaaatctggagtcatgtgcattctcacctgagacatccacacaactgggtgtggctcacagcagcccagatttttggattactctttgcctcttgccagccagaggagcttattcaaaaatggaataccaaaaagaccaaaaaacacctcccagaacctgtagcaatcaagttcctagccagtgaccttgaccaaaagatgaaaagtatctctctcgcctcttgccatcaattgcattccaaattcttggatcagtctctaggagaacaggttgttaagaatttgttgttcgcagccaaagtcttgtatttactggaactttattgtgaggataagcaaagtaagataaaagaagacctggaagaacaagaagctttagaagatggtgtggcctgtgcagatgagaaggcggagtctgacggagaagagaaggaagaggtgaaggaagagctcggcaggccggccacgctgctgtggttgatccagaagctgtcccggattgcaaaactggaagctgcttattcgccgagaaaccccttaaagagaacatgcatctttaagttcctcggcgccgtagcaatggatcttgggatagacaaggtaaagccgtatctcccaatgatcatagctcctttgtttcgggaactcaacagcacctattcagagcaagatcctttgctgaagaatctatcccaggaaatcatagaattactcaaaaagctggttgggcttgagagcttctcattagcctttgcctctgtacagaaacaggctaatgagaaaagggcactccggaaaaagaggaaggccctggagtttgtaactaatcctgatattgctgccaagaaaaaaatgaagaaacacaaaaataaaagtgaagcaaagaagagaaagatagagttcctgcgtccaggatataaggccaagagacaaaaaagccatagcctgaaagatttagcaatggtggagtaatgtctccctgtgctgatacaagcatgaactttctggaatattctgctagtctgaaattacagcaggttgtctggggtaggggggaggcgtttttttttttttttgagacaaggtctcactctgtcacccaaggtggagtgcagtgacgacatcacagctcactgcagcctcaacctgggttcaagtgatcctctcacctcagcctcccaagtagttgtgcctcctaggcacacaacactatgcccggcaaattttttgtattttgtattttttgtagaaacaggatttcgccatgttggccaggctggtctcgaacacctgggctcaactgatccgcctgcctcggcctcccaaagtgctgggattacaggtgtgagccaccctgctcaaccaggttttattatttaagttagttaaactttggatagattgtataatatatagtttaatgtaatcatgctcatattttttaaataaataaaacactatactactgaaaag

SEQ ID NO: 426183 - DNA, 8422 bp, Homo sapiens
cccaggggctcaagccgcacgtgagaaagtctgggcatctgggattcggagagtatagcctgtgagccgctttcccctccttactgtcggttgcatcccttcgacactcccgaggccgtcgcgggccactggccctctgcagccatgaagacaaagcccgtttcccacaagaccgagaacacctaccggtttcttacatttgctgaacgactggggaatgttaatattgatattattcaccggattgatagaactgcaagctatgaggaggaggttgaaacctacttttttgagggtctgctgaaatggagagaattaaacctcacagaacacttcggaaaattttacaaagaagttattgacaaatgccaatcattcaatcagttggtgtatcaccaaaacgagatagttcagagtttgaagactcacctgcaagttaagaacagttttgcctatcaaccccttttggatttggttgtacagttggcacgagatctgcagatggatttctacccacactttccagagttttttttgactatcacctcgatcctggagactcaggacacagagttgttagaatgggctttcacctcgttatcatatctttataagtacctgtggagactgatggtgaaggacatgtccagtatatacagcatgtacagcacactcctggctcataaaaaactacatataagaaattttgctgctgaaagttttacttttttgatgagaaaggtctctgataaaaacgcacttttcaatttaatgtttcttgatcttgataaacatccagaaaaagttgaaggtgttggacagttgctctttgaaatgtgcaaaggagttagaaatatgtttcactcctgtacaggccaggcagtgaagctaattttgcgaaagctaggaccagtcactgaaacagaaactcaactaccatggatgttaattggagaaacactcaaaaacatggtcaaatccactgtatcctacatctccaaggaacattttggtacattttttgaatgtttgcaagaatcgctcttggatctacacacaaaagtaacaaaaactaactgttgtgaaagttctgaacagattaaaaggttgttggaaacataccttatacttgtaaaacatggaagtgggacaaagatacccacgcctgctgatgtctgtaaggtgttatctcaaacactgcaagtagccagtctctccacatcttgctgggagaccctcttggatgtaatttctgctttgatcctgggtgaaaatgtttccttgccggagaccctcatcaaagaaaccatagaaaaaatatttgagagcagatttgaaaaacgtttaattttcagtttttctgaagtcatgtttgccatgaagcagtttgagcagctttttctaccaagctttctgtcatatattgtgaattgcttcttaattgatgatgctgtagtcaaagatgaagctctggccattctggccaagctcattctgaacaaagcagcacctcccactgctggctcgatggcaattgaaaagtaccctctggttttctcaccgcagatggtgggattctatataaagcagaagaagactagatccaagggaagaaacgaacagtttccagtattggaccatcttttatctataattaagttacccccaaataaagatactacttacctttcacaatcttgggcagccctcgtggtgttacctcatattagacctcttgagaaagagaaggtgataccactcgtcaccggcttcatagaggcactcttcatgactgttgacaaaggaagctttgggaaaggaaacttatttgttctttgtcaagctgtaaatactctactaagtttggaagaatcttctgaacttcttcatttggttcctgtggaacgtgtgaagaatttagtattaacctttcccctggagccatctgtgttgctgttgactgatctctattatcagagattagccttgtgtggctgcaaagggccactttcccaggaggctttaatggaattatttcccaagttacaagcaaacatttcaactggtgtatccaagattcggcttttgacaataaggatcctaaaccattttgatgtccagcttccagaatcaatggaggatgatgggctctcagagcggcagtctgtctttgctatattacgccaggcagaacttgttccagcaactgtgaatgattatagagagaagcttcttcatttgagaaaactaagacatgatgtggtacagactgctgtccctgatgggccgttacaggaggtgccgcttcgttatttgttaggcatgctatatattaatttcagtgcactctgggatcctgttattgaactcataagttctcatgcacacgaaatggaaaataagcaattttggaaagtctactatgagcatctagaaaaagcagctacgcatgctgagaaggaactacagaatgatatgacagatgagaagtccgttggagatgaaagttgggagcagacccaggaaggagatgttggagctctttatcatgagcagttagcattgaaaactgactgtcaggaaagacttgaccacaccaacttcagattcctgctctggagagctctgaccaaattcccagaaagagtagagccacggtccagggagctttccccgcttttcttgagatttatcaacaatgagtattacccagcagatctgcaagttgctccaacccaggatctacggagaaaaggcaaagggatggtggcagaggaaatcgaagaggaacctgccgcaggagatgatgaagagttggaggaagaggcagtgccccaagatgaatcctcacagaagaaaaagacgaggagagctgcagcaaagcaattaattgctcatttgcaagttttctctaaattttcaaatccacgggccttatatctggaatccaaactatatgagttatatcttcagttgttgctacaccaagatcaaatggtgcaaaaaataaccttggattgcataatgacatataaacatcctcatgtcctcccttacagggaaaacttacaaaggttgcttgaagacagaagctttaaggaagagatagtgcattttagcatttcagaagataatgctgtagtgaaaacagcccaccgagcagatctatttcctattctgatgagaattttgtatgggcgaatgaagaataagactgggagtaaaactcaggggaaatctgcttcaggcacccgcatggccattgtcctgcggttcctggccgggacccaacctgaggagatccagatattcttagacctgctgtttgaacctgtgaggcatttcaagaatggagagtgccattctgcagtcattcaagcagtagaagacttggatttgtctaaagttcttcctttaggtcgtcagcacggtatcttaaacagccttgagatagtattgaaaaacattagtcatctgatcagcgcatacctgccgaagattttgcagatactgctctgtatgacagcaaccgtatcacacatccttgaccaacgagaaaagatacagctgagatttattaatccattgaaaaatttaagacgtcttggaatcaaaatggtaactgatatctttttggactgggaatcatatcagtttagaacagaagaaattgatgctgtgtttcatggtgcagtttggccccagatcagcaggcttggatctgagagtcaatattctcctactcctctgctgaaactgatcagtatctggagcagaaacgcaagatatttccctttgctggctaaacagaagcctgggcacccagaatgtgatatcctgaccaatgtttttgcaattctctcagcgaagaatctttctgatgccacagccagtattgtaatggacatagttgatgaccttcttaaccttccagatttcgagcctacagaaacagttttgaacttgctggtaactggatgtgtataccctggcatagcagaaaacatcggtgagtctatcacaataggaggaagattaattctacctcatgtacctgcaattcttcagtatctcagcaaaaccacaataagcgcagaaaaggtgaaaaagaaaaagaatagagcacaagtcagtaaagagcttggcattctttcaaagatcagcaagtttatgaaagacaaagaacaaagttctgtactcattacgcttctccttccattcctccaccgtggcaatattgctgaggatacagaggttgatattctggtgacagtacaaaacttgttaaagcattgtgtggaccctacaagcttcctcaagcctatagcaaaacttttctcagttattaagaacaaattgtcaagaaaattgctttgtacggtttttgagactctttctgattttgagagtgggttaaaatatattactgatgttgtcaagcttaacgccttcgatcaaagacatcttgatgatatcaacttcgacgttcgctttgagactttccagaccatcacctcttacattaaagaaatgcaaattgtggatgttaactacctaattccagttatgcataattgtttctataatctagagttaggagatatgagtttaagtgataatgccagcatgtgcctgatgagtatcatcaaaaagctagctgccttgaatgtcacagagaaagactatagagaaatcatccaccgttcactcctggagaaattgagaaaaggtctgaagagccagacagagagtattcagcaggattataccacaatactttcctgtttaattcaaacctttccaaaccaactggaattcaaagacttggtacaacttactcattaccatgacccagaaatggacttctttgagaacatgaagcacattcagatccacagaagagcaagagccttgaagaaacttgcaaaacaactaatggaaggcaaagttgttctgtcttctaaatctcttcagaattacatcatgccttatgccatgactccaatttttgatgagaaaatgctcaagcatgaaaatataaccactgctgccacagagattattggagccatttgcaaacatctctcttggtcagcgtatatgtattacttgaaacatttcattcatgtcttacaaacgggacagatcaatcaaaaactgggtgtcagtttgctagtaatagtgttagaagcattccactttgaccacaaaactcttgaagaacaaatgggaaaaattgagaatgaagaaaacgcaattgaagcaattgagttaccagagcctgaggccatggaattagagcgtgtggatgaggaagagaaggaatatacatgcaagagtttgtcagacaacggacaaccgggaacccctgatccagctgactctggaggaacatcagctaaagaatccgagtgtatcacaaagcctgtctctttccttcctcaaaacaaggaagaaatagagagaacaattaaaaatatccaaggaaccataaccggggatattctccccaggctacataaatgccttgcatctacgactaaaagggaagaagaacacaagcttgtcaagtcaaaggttgtgaatgatgaggaagtcgttcgagttccattagcttttgccatggttaaactaatgcagtcccttccacaagaagttatggaagctaatctgccaagtattttgctgaaagtgtgtgccctactcaagaacagagcccaagaaatcagagacattgcacgcagcactcttgcgaaaataatagaggatcttggtgtgcacttcctccaatatgttttaaaagaattacagactactcttgtccgtggataccaggtccatgtgctgactttcaccgttcacatgctgctgcaaggcctcaccaataagctgcaggtcggagatttggactcttgtttagatataatgattgagatttttaaccatgagttgtttggtgctgttgctgaagagaaggaagtaaagcagatcctctccaaagtcatggaagcacgaagaagcaaaagttacgactcttatgaaatcctcggcaagtttgtaggaaaagatcaggttacaaaactcatccttccattaaaagagatcttacaaaataccacgagtttgaaactggcccggaaagttcatgaaactttacgccgaatcacagtgggattaattgtaaatcaggaaatgacagctgaatccattctattactcagttatggtttgatcagtgaaaatcttcccctgttaacagagaaagaaaaaaatccagtagccccagcaccagatccacgtctaccaccccagagctgccttctgcttcccccaactccagttcgaggtggacagaaagctgttgtgagcaggaaaaccaacatgcacatatttattgagtccgggcttcggctgctgcatctgagtctgaagacttccaagatcaagtcttcaggtgaatgtgtcctggaaatgctggatccttttgtgtctctcctcatagactgcctgggctccatggatgtgaaggtgatcacaggtgctttacagtgcctcatctgggtcttgaggttcccgctaccttccatagaaacaaaagcagagcagctgacaaaacacctcttccttctgctgaaggactatgcaaagctcggggccgccaggggccagaacttccaccttgtggtcaattgtttcaagtgtgtgaccatacttgtcaagaaagtcaagtcttaccagataactgaaaaacagctccaagttctactggcctatgctgaggaggacatttatgatacttcaagacaagccactgcctttggtcttctgaaggcaattttatcaagaaagctgttggtcccagaaatcgatgaggtcatgcggaaagtatccaagttggcagtctctgcacaaagcgaacctgccagggtccagtgtagacaggtttttctgaaatatattcttgactatcccctgggtgacaaattgagaccaaacttggaattcatgctcgctcaactgaattacgaacatgagaccgggagagagtccaccttggaaatgatcgcctatctctttgacacgttccctcaggggctgctccatgagaactgcggaatgttctttatccctctttgtctaatgacgatcaatgatgactctgccacgtgcaaaaagatggcatccatgacaatcaagtccctacttggtaaaatcagcctcgagaaaaaagattggctgtttgatatggttaccacttggtttggagcaaaaaagcgcttaaatagacaacttgctgccctgatctgtggcttgtttgtggaaagtgaaggagttgattttgagaaaagacttggaactgtccttcctgtgattgaaaaggaaattgatcctgaaaactttaaagatatcatggaagaaactgaagaaaaagctgcagatcgccttctgtttagttttcttacactgataactaaacttatcaaggaatgtaatattattcagtttaccaaacccgctgagactttgagtaaaatctggagtcatgtgcattctcacctgagacatccacacaactgggtgtggctcacagcagcccagatttttggattactctttgcctcttgccagccagaggagcttattcaaaaatggaataccaaaaagaccaaaaaacacctcccagaacctgtagcaatcaagttcctagccagtgaccttgaccaaaagatgaaaagtatctctctcgcctcttgccatcaattgcattccaaattcttggatcagtctctaggagaacaggttgttaagaatttgttgttcgcagccaaagtcttgtatttactggaactttattgtgaggataagcaaagtaagataaaagaagacctggaagaacaagaagctttagaagatggtgtggcctgtgcagatgagaaggcggagtctgacggagaagagaaggaagaggtgaaggaagagctcggcaggccggccacgctgctgtggttgatccagaagctgtcccggattgcaaaactggaagctgcttattcgccgagaaaccccttaaagagaacatgcatctttaagttcctcggcgccgtagcaatggatcttgggatagacaaggtaaagccgtatctcccaatgatcatagctcctttgtttcgggaactcaacagcacctattcagagcaagatcctttgctgaagaatctatcccaggaaatcatagaattactcaaaaagctggttgggcttgagagcttctcattagcctttgcctctgtacagaaacaaaggagctatgatcattgggagatacggctttaccttgtctatcccaagatccattgctacggcgccgaggaacttaaagatgcatgttctctttaaggggtttctcgtcgacgcggccgca

SEQ ID NO: 426184 - DNA, 1272 bp, Homo sapiens
ataggctaggtacgaggctgggtggtgatcacttgcatccaaattcttggatcagtctctaggagaacagttgttaagaatttgttgttcgcagccaaagtcttgtatttactggaactttattgtgaggataagcaaagtaagataaaagaagacctggaagaacaagaagctttagaagatggtgtggcctgtgcagatgagaaggcggagtctgacggagaagagaaggaagaggtgaaggaagagctcggcaggccggccacgctgctgtggttgatccagaagctgtcccggattgcaaaactggaagctgcttattcgccgagaaaccccttaaagagaacatgcatctttaagttcctcggcgccgtagcaatggatcttgggatagacaaggtaaagccgtatctcccaatgatcatagctcctttgtttcgggaactcaacagcacctattcagagcaagatcctttgctgaagaatctatcccaggaaatcatagaattactcaaaaagctggttgggcttgagagcttctcattagcctttgcctctgtacagaaacaggctaatgagaaaagggcactccggaaaaagaggaaggccctggagtttgtaactaatcctgatattgctgccaagaaaaaaatgaagaaacacaaaaataaaagtgaagcaaagaagagaaagatagagttcctgcgtccaggatataaggccaagagacaaaaaagccatagcctgaaagatttagcaatggtggagtaatgtctccctgtgctgatacaagcatgaactttctggaatattctgctagtctgaaattacagcaggttgtctggggtaggggggaggcgtttttttttttttttgagacaaggtctcactctgtcacccaaggtggagtgcagtgacgacatcacagctcactgcagcctcaacctgggttcaagtgatcctctcacctcagcctcccaagtagttgtgcctcctaggcacacaacactatgcccggcaaattttttgtattttgtattttttgtagaaacaggatttcgccatgttggccaggctggtctcgaacacctgggctcaactgatccgcctgcctcggcctcccaaagtgctgggattacaggtgtgagccaccctgctcaaccaggttttattatttaagttagttaaactttggatagattgtataatatatagtttaatgtaatcatgctcatattttttaaataaataaaacactatactactgaaaag

SEQ ID NO: 426185 - DNA, 5827 bp, Homo sapiens
cccaggggctcaagccgcacgtgagaaagtctgggcatctgggattcggagagtatagcctgtgagccgctttcccctccttactgtcggttgcatcccttcgacactcccgaggccgtcgcgggccactggccctctgcagccatgaagacaaagcccgtttcccacaagaccgagaacacctaccggtttcttacatttgctgaacgactggggaatgttaatattgatattattcaccggattgatagaactgcaagctatgaggaggaggttgaaacctacttttttgagggtctgctgaaatggagagaattaaacctcacagaacacttcggaaaattttacaaagaagttattgacaaatgccaatcattcaatcagttggtgtatcaccaaaacgagatagttcagagtttgaagactcacctgcaagttaagaacagttttgcctatcaaccccttttggatttggttgtacagttggcacgagatctgcagatggatttctacccacactttccagagttttttttgactatcacctcgatcctggagactcaggacacagagttgttagaatgggctttcacctcgttatcatatctttataagtacctgtggagactgatggtgaaggacatgtccagtatatacagcatgtacagcacactcctggctcataaaaaactacatataagaaattttgctgctgaaagttttacttttttgatgagaaaggtctctgataaaaacgcacttttcaatttaatgtttcttgatcttgataaacatccagaaaaagttgaaggtgttggacagttgctctttgaaatgtgcaaaggagttagaaatatgtttcactcctgtacaggccaggcagtgaagctaattttgcgaaagctaggaccagtcactgaaacagaaactcaactaccatggatgttaattggagaaacactcaaaaacatggtcaaatccactgtatcctacatctccaaggaacattttggtacattttttgaatgtttgcaagaatcgctcttggatctacacacaaaagtaacaaaaactaactgttgtgaaagttctgaacagattaaaaggttgttggaaacataccttatacttgtaaaacatggaagtgggacaaagatacccacgcctgctgatgtctgtaaggtgttatctcaaacactgcaagtagccagtctctccacatcttgctgggagaccctcttggatgtaatttctgctttgatcctgggtgaaaatgtttccttgccggagaccctcatcaaagaaaccatagaaaaaatatttgagagcagatttgaaaaacgtttaattttcagtttttctgaagtcatgtttgccatgaagcagtttgagcagctttttctaccaagctttctgtcatatattgtgaattgcttcttaattgatgatgctgtagtcaaagatgaagctctggccattctggccaagctcattctgaacaaagcagcacctcccactgctggctcgatggcaattgaaaagtaccctctggttttctcaccgcagatggtgggattctatataaagcagaagaagactagatccaagggaagaaacgaacagtttccagtattggaccatcttttatctataattaagttacccccaaataaagatactacttacctttcacaatcttgggcagccctcgtggtgttacctcatattagacctcttgagaaagagaaggtgataccactcgtcaccggcttcatagaggcactcttcatgactgttgacaaaggaagctttgggaaaggaaacttatttgttctttgtcaagctgtaaatactctactaagtttggaagaatcttctgaacttcttcatttggttcctgtggaacgtgtgaagaatttagtattaacctttcccctggagccatctgtgttgctgttgactgatctctattatcagagattagccttgtgtggctgcaaagggccactttcccaggaggctttaatggaattatttcccaagttacaagcaaacatttcaactggtgtatccaagattcggcttttgacaataaggatcctaaaccattttgatgtccagcttccagaatcaatggaggatgatgggctctcagagcggcagtctgtctttgctatattacgccaggcagaacttgttccagcaactgtgaatgattatagagagaagcttcttcatttgagaaaactaagacatgatgtggtacagactgctgtccctgatgggccgttacaggaggtgccgcttcgttatttgttaggcatgctatatattaatttcagtgcactctgggatcctgttattgaactcataagttctcatgcacacgaaatggaaaataagcaattttggaaagtctactatgagcatctagaaaaagcagctacgcatgctgagaaggaactacagaatgatatgacagatgagaagtccgttggagatgaaagttgggagcagacccaggaaggagatgttggagctctttatcatgagcagttagcattgaaaactgactgtcaggaaagacttgaccacaccaacttcagattcctgctctggagagctctgaccaaattcccagaaagagtagagccacggtccagggagctttccccgcttttcttgagatttatcaacaatgagtattacccagcagatctgcaagttgctccaacccaggatctacggagaaaaggcaaagggatggtggcagaggaaatcgaagaggaacctgccgcaggagatgatgaagagttggaggaagaggcagtgccccaagatgaatcctcacagaagaaaaagacgaggagagctgcagcaaagcaattaattgctcatttgcaagttttctctaaattttcaaatccacgggccttatatctggaatccaaactatatgagttatatcttcagttgttgctacaccaagatcaaatggtgcaaaaaataaccttggattgcataatgacatataaacatcctcatgtcctcccttacagggaaaacttacaaaggttgcttgaagacagaagctttaaggaagagatagtgcattttagcatttcagaagataatgctgtagtgaaaacagcccaccgagcagatctatttcctattctgatgagaattttgtatgggcgaatgaagaataagactgggagtaaaactcaggggaaatctgcttcaggcacccgcatggccattgtcctgcggttcctggccgggacccaacctgaggagatccagatattcttagacctgctgtttgaacctgtgaggcatttcaagaatggagagtgccattctgcagtcattcaagcagtagaagacttggatttgtctaaagttcttcctttaggtcgtcagcacggtatcttaaacagccttgagatagtattgaaaaacattagtcatctgatcagcgcatacctgccgaagattttgcagatactgctctgtatgacagcaaccgtatcacacatccttgaccaacgagaaaagatacagctgagatttattaatccattgaaaaatttaagacgtcttggaatcaaaatggtaactgatatctttttggactgggaatcatatcagtttagaacagaagaaattgatgctgtgtttcatggtgcagtttggccccagatcagcaggcttggatctgagagtcaatattctcctactcctctgctgaaactgatcagtatctggagcagaaacgcaagatatttccctttgctggctaaacagaagcctgggcacccagaatgtgatatcctgaccaatgtttttgcaattctctcagcgaagaatctttctgatgccacagccagtattgtaatggacatagttgatgaccttcttaaccttccagatttcgagcctacagaaacagttttgaacttgctggtaactggatgtgtataccctggcatagcagaaaacatcggtgagtctatcacaataggaggaagattaattctacctcatgtacctgcaattcttcagtatctcagcaaaaccacaataagcgcagaaaaggtgaaaaagaaaaagaatagagcacaagtcagtaaagagcttggcattctttcaaagatcagcaagtttatgaaagacaaagaacaaagttctgtactcattacgcttctccttccattcctccaccgtggcaatattgctgaggatacagaggttgatattctggtgacagtacaaaacttgttaaagcattgtgtggaccctacaagcttcctcaagcctatagcaaaacttttctcagttattaagaacaaattgtcaagaaaattgctttgtacggtttttgagactctttctgattttgagagtgggttaaaatatattactgatgttgtcaagcttaacgccttcgatcaaagacatcttgatgatatcaacttcgacgttcgctttgagactttccagaccatcacctcttacattaaagaaatgcaaattgtggatgttaactacctaattccagttatgcataattgtttctataatctagagttaggagatatgagtttaagtgataatgccagcatgtgcctgatgagtatcatcaaaaagctagctgccttgaatgtcacagagaaagactatagagaaatcatccaccgttcactcctggagaaattgagaaaaggtctgaagagccagacagagagtattcagcaggattataccacaatactttcctgtttaattcaaacctttccaaaccaactggaattcaaagacttggtacaacttactcattaccatgacccagaaatggacttctttgagaacatgaagcacattcagatccacagaagagcaagagccttgaagaaacttgcaaaacaactaatggaaggcaaagttgttctgtcttctaaatctcttcagaattacatcatgccttatgccatgactccaatttttgatgagaaaatgctcaagcatgaaaatataaccactgctgccacagagattattggagccatttgcaaacatctctcttggtcagcgtatatgtattacttgaaacatttcattcatgtcttacaaacgggacagatcaatcaaaaactgggtgtcagtttgctagtaatagtgttagaagcattccactttgaccacaaaactcttgaagaacaaatgggaaaaattgagaatgaagaaaacgcaattgaagcaattgagttaccagagcctgaggccatggaattagagcgtgtggatgaggaagagaaggaatatacatgcaagagtttgtcagacaacggacaaccgggaacccctgatccagctgactctggaggaacatcagctaaagaatccgagtgtatcacaaagcctgtctctttccttcctcaaaacaaggaagaaatagagagaacaattaaaaatatccaaggaaccataaccggggatattctccccaggctacataaatgccttgcatctacgactaaaagggaagaagaacacaagcttgtcaagtcaaaggttgtgaatgatgaggaagtcgttcgagttccattagcttttgccatggttaaactaatgcagtcccttccacaagaagttatggaagctaatctgccaagtattttgctgaaagtgtgtgccctactcaagaacagagcccaagaaatcagagacattgcacgcagcactcttgcgaaaataatagaggatcttggtgtgcacttcctccaatatgttttaaaaatctcaatcattatatctaaacgtc

SEQ ID NO: 426186 - DNA, 4215 bp, Homo sapiens
gaggcagagatggtgattaaactgtagtccttgttttttaaaatgttctttcatgttaggcaccaccacatagttaataactaccaacttctaaagagaagatccccttgatttatttatatcatgaaaatactaaaaatcaattctcaagtctaattaactattacattatcttgctaggtccttttccctaaatttttaattcagaaaattaaccagaattggccagatgcagtggttcacgcctataatcccagcactttgggagtccaaggcagatggatcacttgaggtcagtagttcaagaccagcctggccaacagaggaagaaagagtgaaaacaaaagaagaaagagggaaaccctgtctttactaaaaatacaaaaattagtcgggcgtggtggcgcacacctgtaattccagctacttgagaggctgaggcaggagaatcccttgaaactgcaggcagaggttgcagtgagccaagatttcactgctgcacctggggtgagactaccattaaggaaggaaatttcctttaaacagaaaaaaacaaaggtgctcatctatttcttctgaattctctctacatccttgacttaagaggccagcactcaagaaacagctttagccccagtgaatttgccattgaaagattaccctcccctttgccctcatctgcctgagctagaggccaggctgttgttaatgttttttcagttccaaagcccctgatgggacattcttgtttctgtgctactgctttctctctcttaaattaaggtgcaaggggataaatattactataactgggatgtaaggctcagtcagtgtggctattccctcccttcgggggaaatattccatctgtctgaacggttttaggtgatcatgaggagagcggcttagtcacacagccagccacgctcatcacaaaagatttgttcagactcactgtaaagaatgacaaggcagatagctaatcctttcactgtgcctcaaagcccgccgtgcaagtcaccaaccctaccggtcctctccacgtgcgaggctaatagagtgatcagaaccaggaatgtgagctgggttccaccttaggaggggacaatgaggacagagcaagagggctccatgtttaattactccaggctctgacttctgcccacaattacagagcatgaaagcagaattggcctttagtaagtgaaaaggaagtggctcctgcagcatataattgttataatttcgtatttatggaaagagaaaaggacttcagtccactcatgttgttaagcacttgtccctcactccactggagcccccttcctatgttttgggcacagatggctgggaccgagaggaaagaggaagagcggctgccagagtgtgaatatacccctcagggatatacagcggagtttcatgataaactacccatactttcccaaaaaaggttgaggagcaatacataactttgcagattacaaacccttgttttactttttaaaccttttttccatactctgcttattggaaatcgatggctgtgatgtgaccaacacctgtgatgatagcaaagcccctcctttcacagtctcctgactgttcggggaacctccttggtcattggtagaaagctttagaaaagacttagctttttagggaagaactaaaaaatctccaaaacatactagtcccatgacttcgataactgaaaatgtcctgggtgtaaactaacccaggaatgtggatcatacatgttttttttaaaaaaaatccctgaatcaatattttcctacaacacaccctaaaattcctatttttgtaattaatggttggacagtgatcagccatttaaacataggctttctggaataaccagacactagaatagtttccaaagtgttttgcgtatcaaaatcctatatacttagaagaagaactcaggataagaaaaaatcgctaggtcccaaagggttcatgactatcatcagatgcaactgcgagtggcctacggtcattttttcaaatgagaagactggagagagagaacaacagtaatcacaaaacctctgttgcccttagtccatgacaatgtttaaggaaactttaaaaaattaagccatcttctgaattgttttctacaccaaatctaaaatattaaaatgaaattattaaatatttaaaatggggtatttagtggaaatgcaatcagtagaaaacattgctttttagtgcctgctaaacaagtaaaggagaaagaatgaagagaaaacagcagtccttcctgtgtgacactcgtgtggaaatgacaggcattcacatgtcattgagtgctaactcaaaagctaggtggcaatgctgtccaatgtttagagatcttttgaaatataattttaccaccattcagaggtaagtacttgcttaacagaagtctttaatgttagtgaatgaatgtataaaattataaactatgcattttcaaagagtagcatgtattttgtatcgaatccaagtaaatttttttcatagctacctaccacaactgcaaattattcaaaataaacttggatacatatccttatggggatatgggaagcccatctatattctcctacttgatgtttttaaagattgaaactttattctgaaacatcaggctctaaaaaattccatcattaagatgaataaatgggaaatggtttatttgttacttcgtaagcataaatgggaaatgttggctgttagaaaatgtgcccagttctttaaaggtggatgttctagtaacactggattaacaagcaaacaaaactgcatgaagtgaacgaatatttcattggataaagttagcataggttttatctgctgggtttaattctcaatcccagaaaaaaatattcttcaaggggtatcagttatagtttcaaagaacaaaatatgaaaatattgtccagcaaagcaaatcattgatcttttttcaaaattacttatattttggaaagtctatatagaatatccacaaatttcttcagccctcttgttgatttcatattttcatgaaactttttcccctaataatttgtcttcgctctttaatcagtgctttactacattactcagcctgaaaaaatatcttttccttcatctgacaatgtggaaataaagaactccatttctgtcattctggttctcttcagtgtccattgagaaagtttctcaactgtttgtaaaatacggggggaaaaaaacacgcatttctaaacctggtacttaaggttatactggattgtttgctacctaattagaagttattggggaaggggcattgtgtctttttatatgatttttagccaaatccagatgttctgatacacatttctgaatacctgtctgactgtaaatacagcctgtggaggttcaggttgataaacctttcacctgactgctccacagccatgctccttgccagcttctggcacattgtacatagatttgttgaatgtttaaatgatgttgtttttctaaatgctgttctctaaaacaattttttgaatttcttttgctttccattgttttggactttgtgtgttcgttttttaaaaaaaaaaatgtttcctaaatatttaacaccaggaaaaatatttttaaatacactggtgctaattgaaacagaaggaaattttcagatcgaagatgtacaatgttaaatgttcataccagttaaactgcactttcccaaggggacagctggcatctacttgaaatgggcatcaagagaccaccaaatgtttacagtttctgtggcccgtttaagtgtaaaatgcagaagtggctctgtccccccagagttaaggatttgctacactggtcctctggaagcatttaagtagaagaaaaggcttatagtcagaatcactttagtaatcgtcttctggtccttggacttttctgttctgtaatgcttgtaacaatgaatatggtgttgccaatctagtctgatatcattgttgacctgtacttactttgtggatggttctacctggggttgcactggcacaaacagagccagaacactggactttcaaaagaccattttgacttctacagtgtccacacacatgaatttaaatgcacttgtaactggttaattaccatgaagtaagtctaacttccacttaataaaagtttttgtgtatctgcttctaaaaaaaaaaa

SEQ ID NO: 426187 - DNA, 7137 bp, Homo sapiens
atggaccaaggcccttggcggtgcgttgcgcacccccggggcgccgccgactgaagtagcaatggacgcgctggagtcgttgttggacgaagtcgctctggaggggctcgatggcctgtgtctgccagcgctgtggagccggctggagacgcgagtgccgcccttcccgctgcctttggaaccctgcacgcaggagtttctctggcgggccctcgccacgcacccgggcatcagcttctatgaggagcctcgggagcgacccgacctacagctccaggaccggtatgaagaaattgatttggaaactggaattttggagtctaggagggacccggtggctttggaggatgtctaccccattcatatgatcttagagaataaggatggcatccagggctcatgccgctactttaaggagaggaaaaacattaccaatgacatcagaaccaagtccttgcagcctcgctgtacaatggtggaagcctttgacaggtgggggaagaaactgatcatcgttgcctcccaggccatgcggtacagggccttgataggccaggagggggatcccgacctgaagctgcccgacttctcctactgcatcctggaacggctaggccggtccaggtggcaaggggagctccagcgagaccttcacaccactgctttcaaggttgatgctgggaagctgcactatcacagaaaaattttgaacaaaaacgggctgattacaatgcagtcccatgtgatccgattacccactggagcccagcaacactcaatcctcctcctactgaaccggtttcatgtggacaggaggagcaaatacgacatcctcatggagaagctttcggtcatgctgagcacacggactaaccacatagagacgctgggaaagctgagggaagagctggggctgtgcgaaaggacgtttaagcgtctgtaccagtatatgctgaacgccgggctagccaaggtggtgtctcttcgcttgcaagagatccaccctgaatgtggaccttgtaagacaaagaaagggaccgacgtcatggttcggtgcctcaagctgctgaaggaatttaaacggaatgaccatgatgatgacgaggacgaggaggtcatctccaagacagtgcctccagtggacattgtgttcgagcgggatatgctcacacagacctacgacctcattgagcgcagaggcacgaaaggaatttcccaagctgaaatccgagtggctatgaatgtgggaaaactagaagcaagaatgctgtgccgacttcttcaaagattcaaagttgtcaagggattcatggaagacgaaggtcggcagcgaaccaccaagtacatttcctgcgtgtttgcagaggagagcgacctaagccggcagtaccaaagagagaaggcccgcagcgagctcttgaccaccgtgagcctggcgtctatgcaggaggagtcgcttctgcctgaaggcgaggacaccttcctctctgagtcggacagtgaggaggagaggagcagcagcaagcggagaggcagagggtcccagaaagacacaagagcctctgcaaacctccggcccaagacccagcctcatcactccaccccaaccaagggtgggtggaaagttgtaaacctacacccattgaaaaagcagccgccctccttcccaggagctgctgaagagagagcctgccagagccttgccagcagggacagcctcttagataccagcagcgtctcagaacccaacgtgtcctttgtctcccactgtgcggacagcaacagtggtgacatagctgtgatcgaggaggtccggatggaaaacccaaaggagagtagcagttccctgaagactgggaggcacagctcaggccaagacaaaccacacgaaacttaccgactgctgaaacgcaggaatctgatcatagaagctgtcaccaatcttcgcttaatcgagagtttattcacgattcagaagatgatcatggatcaggagaagcaggaaggcgtgtccaccaagtgctgcaagaagtccattgtccgcttggtgcggaacctgtctgaggaaggtctcttgcgattgtatcggaccactgtcattcaagatggcatcaagaagaaggtggatctggtggtgcacccgtccatggaccagaacgaccctctagtgagaagtgccatcgagcaggtccgcttccggatctccaattcaagcacagccaacagggttaaaacttcccagcctccagtgccccaaggggaggcagaagaagacagtcaaggaaaagagggcccaagtggatcaggggactctcagctgagtgcttcctctagatcagaaagtggacggatgaaaaaaagtgataataaaatgggcataaccccgcttagaaattatcaccccattgtagttcccggactggggcgttctctaggatttctgcccaaaatgcctcgcctgcgggtggtccacatgtttctgtggtacctcatctacgggcaccctgccagcaacaccgtggagaagccaagcttcatcagtgaacggagaacgataaagcaggagtcaggcagggcaggcgtccggccgtcctcctctggaagtgcctgggaggcctgctctgaagccccatctaaaggcagccaagatggtgtcacctgggaggctgaagtggagcttgccacggagacagtgtatgtcgacgatgcctcgtggatgcgctacatccccccaatcccagtccacagggacttcggctttggctgggctctcgtcagcgacatcctcctctgccttcccctctccatcttcatccagattgtgcaagtcagctacaaggtggacaacctggaggaatttctgaacgacccgctgaagaagcacacgctgatccgctttctccccaggcccattcggcagcagcttctgtacaagaggcgttacattttttcggtggtggagaaccttcagaggctgtgctacatggggctgctacagtttggtcccacggaaaagtttcaggataaagatcaggtctttatcttcttgaagaagaatgcagtcattgttgacactaccatctgcgacccacattacaacctggcccgcagcagccggcccttcgagaggcgcctctatgtcctgaactcaatgcaggatgtggaaaactactggtttgacctgcagtgcgtctgcctcaacaccccactaggcgtggtgcgctgcccgcgcgtcaggaagaacagcagcacagaccagggcagcgacgaggagggcagcctgcagaaggagcaggagagcgccatggacaagcacaacctggagcgcaagtgcgccatgctggagtacaccactggaagccgtgaggtggtggatgaaggcttgatccctggagatgggctgggtgccgcagggctcgattccagcttctacggacacctcaagcgcaactggatctggaccagctacatcatcaaccaggccaaaaaggagaacactgccgcagagaatggactcacagtgaggctccagacatttctgtccaagcgcccaatgcccctcagtgccagaggcaacagcaggttgaatatttggggggaagcaagagtaggctccgagctctgtgctggctgggaagagcagtttgaggtggaccgagagccctcgctggaccgaaaccggagagtgaggggtgggaaaagccagaagcggaagcggctgaagaaggaccctgggaagaagatcaagagaaagaagaaaggagagttcccaggagaaaaaagcaaaaggctgcgctaccatgatgaagccgaccagagtgccctgcagcggatgacgcggcttcgtgtcacctggtctatgcaggaggatgggctgcttgtgctgtgccgcattgccagcaatgtcctcaacaccaaggtgaagggcccatttgtcacctggcaggtggtacgggacattttgcatgccacgtttgaagagtctttggataaaacatctcattccgttggacgaagagctcgctacatagtcaaaaacccacaggcctatctcaactataaagtgtgcctggccgaggtgtaccaggataaagcacttgttggagatttcatgaatcgaagaggtgactatgatgacccaaaggtttgtgccaacgagtttaaagaatttgtggagaagcttaaagaaaagttcagttcagccctaaggaattctaaccttgaaatcccagacacactccaggagctgttcgccaggtaccgagttttggcaattggggatgaaaaagatcaaaccaggaaagaggatgaacttaacagcgtggatgacatccactttctggtgcttcagaacctgatccagagcacgctggccctctcagacagtcagatgaagtcctaccagtcattccagactttccgcctctatcgggagtacaaggaccacgttcttgtgaaggccttcatggagtgccagaagaggagcttggtcaaccggcgccgggtcaaccacacgctgggccccaagaagaaccgggccctccccttcgtgccaatgtcctaccagctatcccagacctactacaggatttttacgtggcgatttccaagcaccatctgcacggagtcattccagtttttggacagaatgcgggctgccggcaagttggaccagcctgatcgtttctctttcaaagaccaggataataacgagcccacaaacgacatggtggccttttcactggacggccctggaggaaattgtgtggccgtcctgaccctcttctctctgggcctcatttctgtggatgtcaggatcccggagcagatcatcgtggtagacagctcaatggtggagaatgaggtcatcaaaagcttggggaaggacggcagcctggaggatgacgaggatgaagaggatgacttggacgaaggtgtagggggcaagcgccggagcatggaggtgaaacctgcgcaagcctcccacaccaactacctgctgatgaggggctactactcccccggcatcgtcagcacccgcaacctcaaccccaacgacagcattgtggtcaactcctgccagatgaagttccagctccgctgcacccctgtgcccgcccggctcaggcccgctgccgctcctctggaagagctaacaatgggaacctcctgcctccctgatacgttcaccaagctgataaacccccaggaaaacacctgcagcttggaggagtttgtcctccagctggagctgtctgggtatagtcccgaagacctgactgctgccttggagatcttggaagccattatagccacgggttgttttgggattgacaaggaggagctgcgcagacggttctcggccttggagaaggcaggtggtgggcgcaccaggacattcgcagattgcatccaggccctcctggagcagcatcaggtgctggaggtcggtggcaacactgcgcgcctggtagccatgggctctgcctggccttggctcctgcactccgtgcggctgaaagacagagaagacgccgacatccagagagaagacccccaggccagacccctggaggggtcttccagtgaggacagcccccccgaggggcaggcacctccttctcacagcccccggggcaccaagaggcgcgccagctgggccagtgagaatggggagaccgacgccgagggcacccagatgacccctgccaagaggccagcgctccaggactcaaatttggcccccagccttgggcccggagctgaagatggggcagaagcccaggccccatctccacccccagctcttgaagacaccgctgcagcgggagcagcacaggaagaccaagagggtgtcggtgagttcagttccccaggccaagagcagctgagcggccaggcgcagcctccagagggctctgaagaccccagagggttcacagagagtttcggagctgccaacatctcccaggcagcacgggaaagggactgtgagagtgtctgcttcatcggccggccgtggcgtgtcgtggatggccacctgaaccttcctgtatgcaagggtatgatggaggccatgctgtaccacatcatgaccaggcctggcatccccgagagctccctgctgcgccactaccagggggtcctgcagcccgtcgccgtgctggagttgctccagggcctggagtccctcggctgcatccggaagcgctggctgagaaagccaaggcctgtctcgctcttctctacacccgtggtggaagaggtggaagtgccctccagcctggacgagagccccatggctttctatgagcccaccttggactgtaccctccggctgggccgtgtgttcccccacgaggtcaactggaacaagtggatccacctctaggacccctgtgggcgtcccctccctcccagccaccgcctgccacaccactcctgcctggtgctcggcagaccccactgtgccctggccttgggtctgccgagcctcctgcagcaggggacgggtgctttggccagagtcacagactgacacgtttcccactgtactggaactctggaaagaggggctccccgacctgcccatcccccaggctcttctgggccttccccttgggaactggcctcatcacactgggagttggtgcttcttgtctctgggtctccagagtttgccccgcctgtgcacacctcacattccagactctagccatctcggcaggatctcctggctccttgagtgcccaggtgccaccaagaggaagggccttgtgggatacaccttgcagaatagggatcggtgtgccccgctgcgaggggccccccatgggggctgtggcccctccgcaggcaggacatcccaacccctggctgggactgaaccacccagagcggagcggctcccttttcagccttgtgagtcacctggcaggccccagctgggctggctgtccgtgtccctcagcctggctggtgattccttgcaggccagaaatgaagagtccctgtaggttttggttttgtttgttttattttgttctttcaccttttttcctcattaaaaaaaaaaagtccctgtggagtgtacttatttattttttgattaaagggaagtaaaatgcaaaaaaattt

SEQ ID NO: 426188 - DNA, 7018 bp, Homo sapiens
atggaccaaggcccttggcggtgcgttgcgcacccccggggcgccgccgactgaagtagcaatggacgcgctggagtcgttgttggacgaagtcgctctggaggggctcgatggcctgtgtctgccagcgctgtggagccggctggagacgcgagtgccgcccttcccgctgcctttggaaccctgcacgcaggagtttctctggcgggccctcgccacgcacccgggcatcagcttctatgaggagcctcgggagcgacccgacctacagctccaggaccggtatgaagaaattgatttggaaactggaattttggagtctaggagggacccggtggctttggaggatgtctaccccattcatatgatcttagagaataaggatggcatccagggctcatgccgctactttaaggagaggaaaaacattaccaatgacatcagaaccaagtccttgcagcctcgctgtacaatggtggaagcctttgacaggtgggggaagaaactgatcatcgttgcctcccaggccatgcggtacagggccttgataggccaggagggggatcccgacctgaagctgcccgacttctcctactgcatcctggaacggctaggccggtccaggtggcaaggggagctccagcgagaccttcacaccactgctttcaaggttgatgctgggaagctgcactatcacagaaaaattttgaacaaaaacgggctgattacaatgcagtcccatgtgatccgattacccactggagcccagcaacactcaatcctcctcctactgaaccggtttcatgtggacaggaggagcaaatacgacatcctcatggagaagctttcggtcatgctgagcacacggactaaccacatagagacgctgggaaagctgagggaagagctggggctgtgcgaaaggacgtttaagcgtctgtaccagtatatgctgaacgccgggctagccaaggtggtgtctcttcgcttgcaagagatccaccctgaatgtggaccttgtaagacaaagaaagggaccgacgtcatggttcggtgcctcaagctgctgaaggaatttaaacggaatgaccatgatgatgacgaggacgaggaggtcatctccaagacagtgcctccagtggacattgtgttcgagcgggatatgctcacacagacctacgacctcattgagcgcagaggcacgaaaggaatttcccaagctgaaatccgagtggctatgaatgtgggaaaactagaagcaagaatgctgtgccgacttcttcaaagattcaaagttgtcaagggattcatggaagacgaaggtcggcagcgaaccaccaagtacatttcctgcgtgtttgcagaggagagcgacctaagccggcagtaccaaagagagaaggcccgcagcgagctcttgaccaccgtgagcctggcgtctatgcaggaggagtcgcttctgcctgaaggcgaggacaccttcctctctgagtcggacagtgaggaggagaggagcagcagcaagcggagaggcagagggtcccagaaagacacaagagcctctgcaaacctccggcccaagacccagcctcatcactccaccccaaccaagggtgggtggaaagttgtaaacctacacccattgaaaaagcagccgccctccttcccaggagctgctgaagagagagcctgccagagccttgccagcagggacagcctcttagataccagcagcgtctcagaacccaacgtgtcctttgtctcccactgtgcggacagcaacagtggtgacatagctgtgatcgaggaggtccggatggaaaacccaaaggagagtagcagttccctgaagactgggaggcacagctcaggccaagacaaaccacacgaaacttaccgactgctgaaacgcaggaatctgatcatagaagctgtcaccaatcttcgcttaatcgagagtttattcacgattcagaagatgatcatggatcaggagaagcaggaaggcgtgtccaccaagtgctgcaagaagtccattgtccgcttggtgcggaacctgtctgaggaaggtctcttgcgattgtatcggaccactgtcattcaagatggcatcaagaagaaggtggatctggtggtgcacccgtccatggaccagaacgaccctctagtgagaagtgccatcgagcaggtccgcttccggatctccaattcaagcacagccaacagggttaaaacttcccagcctccagtgccccaaggggaggcagaagaagacagtcaaggaaaagagggcccaagtggatcaggggactctcagctgagtgcttcctctagatcagaaagtggacggatgaaaaaaagtgataataaaatgggcataaccccgcttagaaattatcaccccattgtagttcccggactggggcgttctctaggatttctgcccaaaatgcctcgcctgcgggtggtccacatgtttctgtggtacctcatctacgggcaccctgccagcaacaccgtggagaagccaagcttcatcagtgaacggagaacgataaagcaggagtcaggcagggcaggcgtccggccgtcctcctctggaagtgcctgggaggcctgctctgaagccccatctaaaggcagccaagatggtgtcacctgggaggctgaagtggagcttgccacggagacagtgtatgtcgacgatgcctcgtggatgcgctacatccccccaatcccagtccacagggacttcggctttggctgggctctcgtcagcgacatcctcctctgccttcccctctccatcttcatccagattgtgcaagtcagctacaaggtggacaacctggaggaatttctgaacgacccgctgaagaagcacacgctgatccgctttctccccaggcccattcggcagcagcttctgtacaagaggcgttacattttttcggtggtggagaaccttcagaggctgtgctacatggggctgctacagtttggtcccacggaaaagtttcaggataaagatcaggtctttatcttcttgaagaagaatgcagtcattgttgacactaccatctgcgacccacattacaacctggcccgcagcagccggcccttcgagaggcgcctctatgtcctgaactcaatgcaggatgtggaaaactactggtttgacctgcagtgcgtctgcctcaacaccccactaggcgtggtgcgctgcccgcgcgtcaggaagaacagcagcacagaccagggcagcgacgaggagggcagcctgcagaaggagcaggagagcgccatggacaagcacaacctggagcgcaagtgcgccatgctggagtacaccactggaagccgtgaggtggtggatgaaggcttgatccctggagatgggctgggtgccgcagggctcgattccagcttctacggacacctcaagcgcaactggatctggaccagctacatcatcaaccaggccaaaaaggagaacactgccgcagagaatggactcacagtgaggctccagacatttctgtccaagcgcccaatgcccctcagtgccagaggcaacagcaggttgaatatttggggggaagcaagagtaggctccgagctctgtgctggctgggaagagcagtttgaggtggaccgagagccctcgctggaccgaaaccggagagtgaggggtgggaaaagccagaagcggaagcggctgaagaaggaccctgggaagaagatcaagagaaagaagaaaggagagttcccaggagaaaaaagcaaaaggctgcgctaccatgatgaagccgaccagagtgccctgcagcggatgacgcggcttcgtgtcacctggtctatgcaggaggatgggctgcttgtgctgtgccgcattgccagcaatgtcctcaacaccaaggtgaagggcccatttgtcacctggcaggtggtacgggacattttgcatgccacgtttgaagagtctttggataaaacatctcattccgttggacgaagagctcgctacatagtcaaaaacccacaggcctatctcaactataaagtgtgcctggccgaggtgtaccaggataaagcacttgttggagatttcatgaatcgaagaggtgactatgatgacccaaaggtttgtgccaacgagtttaaagaatttgtggagaagcttaaagaaaagttcagttcagccctaaggaattctaaccttgaaatcccagacacactccaggagctgttcgccaggtaccgagttttggcaattggggatgaaaaagatcaaaccaggaaagaggatgaacttaacagcgtggatgacatccactttctggtgcttcagaacctgatccagagcacgctggccctctcagacagtcagatgaagtcctaccagtcattccagactttccgcctctatcgggagtacaaggaccacgttcttgtgaaggccttcatggagtgccagaagaggagcttggtcaaccggcgccgggtcaaccacacgctgggccccaagaagaaccgggccctccccttcgtgccaatgtcctaccagctatcccagacctactacaggatttttacgtggcgatttccaagcaccatctgcacggagtcattccagtttttggacagaatgcgggctgccggcaagttggaccagcctgatcgtttctctttcaaagaccaggataataacgagcccacaaacgacatggtggccttttcactggacggccctggaggaaattgtgtggccgtcctgaccctcttctctctgggcctcatttctgtggatgtcaggatcccggagcagatcatcgtggtagacagctcaatggtggagaatgaggtcatcaaaagcttggggaaggacggcagcctggaggatgacgaggatgaagaggatgacttggacgaaggtgtagggggcaagcgccggagcatggaggtgaaacctgcgcaagcctcccacaccaactacctgctgatgaggggctactactcccccggcatcgtcagcacccgcaacctcaaccccaacgacagcattgtggtcaactcctgccagatgaagttccagctccgctgcacccctgtgcccgcccggctcaggcccgctgccgctcctctggaagagctaacaatgggaacctcctgcctccctgatacgttcaccaagctgataaacccccaggaaaacacctgcagcttggaggagtttgtcctccagctggagctgtctgggtatagtcccgaagacctgactgctgccttggagatcttggaagccattatagccacgggttgttttgggattgacaaggaggagctgcgcagacggttctcggccttggagaaggcaggtggtgggcgcaccaggacattcgcagattgcatccaggccctcctggagcagcatcaggtgctggaggtcggtggcaacactgcgcgcctggtagccatgggctctgcctggccttggctcctgcactccgtgcggctgaaagacagagaagacgccgacatccagagagaagacccccaggccagacccctggaggggtcttccagtgaggacagcccccccgaggggcaggcacctccttctcacagcccccggggcaccaagaggcgcgccagctgggccagtgagaatggggagaccgacgccgagggcacccagatgacccctgccaagaggccagcgctccaggactcaaatttggcccccagccttgggcccggagctgaagatggggcagaagcccaggccccatctccacccccagctcttgaagacaccgctgcagcgggagcagcacaggaagaccaagagggtgggttcacagagagtttcggagctgccaacatctcccaggcagcacgggaaagggactgtgagagtgtctgcttcatcggccggccgtggcgtgtcgtggatggccacctgaaccttcctgtatgcaagggtatgatggaggccatgctgtaccacatcatgaccaggcctggcatccccgagagctccctgctgcgccactaccagggggtcctgcagcccgtcgccgtgctggagttgctccagggcctggagtccctcggctgcatccggaagcgctggctgagaaagccaaggcctgtctcgctcttctctacacccgtggtggaagaggtggaagtgccctccagcctggacgagagccccatggctttctatgagcccaccttggactgtaccctccggctgggccgtgtgttcccccacgaggtcaactggaacaagtggatccacctctaggacccctgtgggcgtcccctccctcccagccaccgcctgccacaccactcctgcctggtgctcggcagaccccactgtgccctggccttgggtctgccgagcctcctgcagcaggggacgggtgctttggccagagtcacagactgacacgtttcccactgtactggaactctggaaagaggggctccccgacctgcccatcccccaggctcttctgggccttccccttgggaactggcctcatcacactgggagttggtgcttcttgtctctgggtctccagagtttgccccgcctgtgcacacctcacattccagactctagccatctcggcaggatctcctggctccttgagtgcccaggtgccaccaagaggaagggccttgtgggatacaccttgcagaatagggatcggtgtgccccgctgcgaggggccccccatgggggctgtggcccctccgcaggcaggacatcccaacccctggctgggactgaaccacccagagcggagcggctcccttttcagccttgtgagtcacctggctggtgattccttgcaggccagaaatgaagagtccctgtaggttttggttttgtttgttttattttgttctttcaccttttttcctcattaaaaaaaaaaagtccctgtggagtgtacttatttattttttgattaaagggaagtaaaatgcaaaaaaattt

SEQ ID NO: 426189 - DNA, 3473 bp, Homo sapiens
aacgggtgatgcggttgggactaagccaagggattcaggtgtggtgccggtgggaactgaggaagcgcccaaggttttcaagatggcagcatctatgcatggtcagcccagtccttctctagaagatgcaaaactcagaagaccaatggtcatagaaatcatagaaaaaagaaaggagagttcccaggagaaaaaagcaaaaggctgcgctaccatgatgaagccgaccagagtgccctgcagcggatgacgcggcttcgtgtcacctggtctatgcaggaggatgggctgcttgtgctgtgccgcattgccagcaatgtcctcaacaccaaggtgaagggcccatttgtcacctggcaggtggtacgggacattttgcatgccacgtttgaagagtctttggataaaacatctcattccgttggacgaagagctcgctacatagtcaaaaacccacaggcctatctcaactataaagtgtgcctggccgaggtgtaccaggataaagcacttgttggagatttcatgaatcgaagaggtgactatgatgacccaaaggtttgtgccaacgagtttaaagaatttgtggagaagcttaaagaaaagttcagttcagccctaaggaattctaaccttgaaatcccagacacactccaggagctgttcgccaggtaccgagttttggcaattggggatgaaaaagatcaaaccaggaaagaggatgaacttaacagcgtggatgacatccactttctggtgcttcagaacctgatccagagcacgctggccctctcagacagtcagatgaagtcctaccagtcattccagactttccgcctctatcgggagtacaaggaccacgttcttgtgaaggccttcatggagtgccagaagaggagcttggtcaaccggcgccgggtcaaccacacgctgggccccaagaagaaccgggccctccccttcgtgccaatgtcctaccagctatcccagacctactacaggatttttacgtggcgatttccaagcaccatctgcacggagtcattccagtttttggacagaatgcgggctgccggcaagttggaccagcctgatcgtttctctttcaaagaccaggataataacgagcccacaaacgacatggtggccttttcactggacggccctggaggaaattgtgtggccgtcctgaccctcttctctctgggcctcatttctgtggatgtcaggatcccggagcagatcatcgtggtagacagctcaatggtggagaatgaggtcatcaaaagcttggggaaggacggcagcctggaggatgacgaggatgaagaggatgacttggacgaaggtgtagggggcaagcgccggagcatggaggtgaaacctgcgcaagcctcccacaccaactacctgctgatgaggggctactactcccccggcatcgtcagcacccgcaacctcaaccccaacgacagcattgtggtcaactcctgccagatgaagttccagctccgctgcacccctgtgcccgcccggctcaggcccgctgccgctcctctggaagagctaacaatgggaacctcctgcctccctgatacgttcaccaagctgataaacccccaggaaaacacctgcagcttggaggagtttgtcctccagctggagctgtctgggtatagtcccgaagacctgactgctgccttggagatcttggaagccattatagccacgggttgttttgggattgacaaggaggagctgcgcagacggttctcggccttggagaaggcaggtggtgggcgcaccaggacattcgcagattgcatccaggccctcctggagcagcatcaggtgctggaggtcggtggcaacactgcgcgcctggtagccatgggctctgcctggccttggctcctgcactccgtgcggctgaaagacagagaagacgccgacatccagagagaagacccccaggccagacccctggaggggtcttccagtgaggacagcccccccgaggggcaggcacctccttctcacagcccccggggcaccaagaggcgcgccagctgggccagtgagaatggggagaccgacgccgagggcacccagatgacccctgccaagaggccagcgctccaggactcaaatttggcccccagccttgggcccggagctgaagatggggcagaagcccaggccccatctccacccccagctcttgaagacaccgctgcagcgggagcagcacaggaagaccaagagggtgggttcacagagagtttcggagctgccaacatctcccaggcagcacgggaaagggactgtgagagtgtctgcttcatcggccggccgtggcgtgtcgtggatggccacctgaaccttcctgtatgcaagggtatgatggaggccatgctgtaccacatcatgaccaggcctggcatccccgagagctccctgctgcgccactaccagggggtcctgcagcccgtcgccgtgctggagttgctccagggcctggagtccctcggctgcatccggaagcgctggctgagaaagccaaggcctgtctcgctcttctctacacccgtggtggaagaggtggaagtgccctccagcctggacgagagccccatggctttctatgagcccaccttggactgtaccctccggctgggccgtgtgttcccccacgaggtcaactggaacaagtggatccacctctaggacccctgtgggcgtcccctccctcccagccaccgcctgccacaccactcctgcctggtgctcggcagaccccactgtgccctggccttgggtctgccgagcctcctgcagcaggggacgggtgctttggccagagtcacagactgacacgtttcccactgtactggaactctggaaagaggggctccccgacctgcccatcccccaggctcttctgggccttccccttgggaactggcctcatcacactgggagttggtgcttcttgtctctgggtctccagagtttgccccgcctgtgcacacctcacattccagactctagccatctcggcaggatctcctggctccttgagtgcccaggtgccaccaagaggaagggccttgtgggatacaccttgcagaatagggatcggtgtgccccgctgcgaggggccccccatgggggctgtggcccctccgcaggcaggacatcccaacccctggctgggactgaaccacccagagcggagcggctcccttttcagccttgtgagtcacctggcaggccccagctgggctggctgtccgtgtccctcagcctggctggtgattccttgcaggccagaaatgaagagtccctgtaggttttggttttgtttgttttattttgttctttcaccttttttcctcattaaaaaaaaaaagtccctgtggagtgtacttatttattttttgattaaagggaagtaaaatgcaaaaaaattt

SEQ ID NO: 426190 - DNA, 2509 bp, Homo sapiens
cctagttcagcagctgtgtacagtgagcccctgtaaggatttttacgtggcgatttccaagcaccatctgcacggagtcattccagtttttggacagaatgcgggctgccggcaagttggaccagcctgatcgtttctctttcaaagaccaggataataacgagcccacaaacgacatggtggccttttcactggacggccctggaggaaattgtgtggccgtcctgaccctcttctctctgggcctcatttctgtggatgtcaggatcccggagcagatcatcgtggtagacagctcaatggtggagaatgaggtcatcaaaagcttggggaaggacggcagcctggaggatgacgaggatgaagaggatgacttggacgaaggtgtagggggcaagcgccggagcatggaggtgaaacctgcgcaagcctcccacaccaactacctgctgatgaggggctactactcccccggcatcgtcagcacccgcaacctcaaccccaacgacagcattgtggtcaactcctgccagatgaagttccagctccgctgcacccctgtgcccgcccggctcaggcccgctgccgctcctctggaagagctaacaatgggaacctcctgcctccctgatacgttcaccaagctgataaacccccaggaaaacacctgcagcttggaggagtttgtcctccagctggagctgtctgggtatagtcccgaagacctgactgctgccttggagatcttggaagccattatagccacgggttgttttgggattgacaaggaggagctgcgcagacggttctcggccttggagaaggcaggtggtgggcgcaccaggacattcgcagattgcatccaggccctcctggagcagcatcaggtgctggaggtcggtggcaacactgcgcgcctggtagccatgggctctgcctggccttggctcctgcactccgtgcggctgaaagacagagaagacgccgacatccagagagaagacccccaggccagacccctggaggggtcttccagtgaggacagcccccccgaggggcaggcacctccttctcacagcccccggggcaccaagaggcgcgccagctgggccagtgagaatggggagaccgacgccgagggcacccagatgacccctgccaagaggccagcgctccaggactcaaatttggcccccagccttgggcccggagctgaagatggggcagaagcccaggccccatctccacccccagctcttgaagacaccgctgcagcgggagcagcacaggaagaccaagagggtgggttcacagagagtttcggagctgccaacatctcccaggcagcacgggaaagggactgtgagagtgtctgcttcatcggccggccgtggcgtgtcgtggatggccacctgaaccttcctgtatgcaagggtatgatggaggccatgctgtaccacatcatgaccaggcctggcatccccgagagctccctgctgcgccactaccagggggtcctgcagcccgtcgccgtgctggagttgctccagggcctggagtccctcggctgcatccggaagcgctggctgagaaagccaaggcctgtctcgctcttctctacacccgtggtggaagaggtggaagtgccctccagcctggacgagagccccatggctttctatgagcccaccttggactgtaccctccggctgggccgtgtgttcccccacgaggtcaactggaacaagtggatccacctctaggacccctgtgggcgtcccctccctcccagccaccgcctgccacaccactcctgcctggtgctcggcagaccccactgtgccctggccttgggtctgccgagcctcctgcagcaggggacgggtgctttggccagagtcacagactgacacgtttcccactgtactggaactctggaaagaggggctccccgacctgcccatcccccaggctcttctgggccttccccttgggaactggcctcatcacactgggagttggtgcttcttgtctctgggtctccagagtttgccccgcctgtgcacacctcacattccagactctagccatctcggcaggatctcctggctccttgagtgcccaggtgccaccaagaggaagggccttgtgggatacaccttgcagaatagggatcggtgtgccccgctgcgaggggccccccatgggggctgtggcccctccgcaggcaggacatcccaacccctggctgggactgaaccacccagagcggagcggctcccttttcagccttgtgagtcacctggcaggccccagctgggctggctgtccgtgtccctcagcctggctggtgattccttgcaggccagaaatgaagagtccctgtaggttttggttttgtttgttttattttgttctttcaccttttttcctcattaaaaaaaaaaagtccctgtggagtgtacttatttattttttgattaaagggaagtaaaatgcaaaaaaattt

SEQ ID NO: 426191 - DNA, 5481 bp, Homo sapiens
atggaccaaggcccttggcggtgcgttgcgcacccccggggcgccgccgactgaagtagcaatggacgcgctggagtcgttgttggacgaagtcgctctggaggggctcgatggcctgtgtctgccagcgctgtggagccggctggagacgcgagtgccgcccttcccgctgcctttggaaccctgcacgcaggagtttctctggcgggccctcgccacgcacccgggcatcagcttctatgaggagcctcgggagcgacccgacctacagctccaggaccggtatgaagaaattgatttggaaactggaattttggagtctaggagggacccggtggctttggaggatgtctaccccattcatatgatcttagagaataaggatggcatccagggctcatgccgctactttaaggagaggaaaaacattaccaatgacatcagaaccaagtccttgcagcctcgctgtacaatggtggaagcctttgacaggtgggggaagaaactgatcatcgttgcctcccaggccatgcggtacagggccttgataggccaggagggggatcccgacctgaagctgcccgacttctcctactgcatcctggaacggctaggccggtccaggtggcaaggggagctccagcgagaccttcacaccactgctttcaaggttgatgctgggaagctgcactatcacagaaaaattttgaacaaaaacgggctgattacaatgcagtcccatgtgatccgattacccactggagcccagcaacactcaatcctcctcctactgaaccggtttcatgtggacaggaggagcaaatacgacatcctcatggagaagctttcggtcatgctgagcacacggactaaccacatagagacgctgggaaagctgagggaagagctggggctgtgcgaaaggacgtttaagcgtctgtaccagtatatgctgaacgccgggctagccaaggtggtgtctcttcgcttgcaagagatccaccctgaatgtggaccttgtaagacaaagaaagggaccgacgtcatggttcggtgcctcaagctgctgaaggaatttaaacggaatgaccatgatgatgacgaggacgaggaggtcatctccaagacagtgcctccagtggacattgtgttcgagcgggatatgctcacacagacctacgacctcattgagcgcagaggcacgaaaggaatttcccaagctgaaatccgagtggctatgaatgtgggaaaactagaagcaagaatgctgtgccgacttcttcaaagattcaaagttgtcaagggattcatggaagacgaaggtcggcagcgaaccaccaagtacatttcctgcgtgtttgcagaggagagcgacctaagccggcagtaccaaagagagaaggcccgcagcgagctcttgaccaccgtgagcctggcgtctatgcaggaggagtcgcttctgcctgaaggcgaggacaccttcctctctgagtcggacagtgaggaggagaggagcagcagcaagcggagaggcagagggtcccagaaagacacaagagcctctgcaaacctccggcccaagacccagcctcatcactccaccccaaccaagggtgggtggaaagttgtaaacctacacccattgaaaaagcagccgccctccttcccaggagctgctgaagagagagcctgccagagccttgccagcagggacagcctcttagataccagcagcgtctcagaacccaacgtgtcctttgtctcccactgtgcggacagcaacagtggtgacatagctgtgatcgaggaggtccggatggaaaacccaaaggagagtagcagttccctgaagactgggaggcacagctcaggccaagacaaaccacacgaaacttaccgactgctgaaacgcaggaatctgatcatagaagctgtcaccaatcttcgcttaatcgagagtttattcacgattcagaagatgatcatggatcaggagaagcaggaaggcgtgtccaccaagtgctgcaagaagtccattgtccgcttggtgcggaacctgtctgaggaaggtctcttgcgattgtatcggaccactgtcattcaagatggcatcaagaagaaggtggatctggtggtgcacccgtccatggaccagaacgaccctctagtgagaagtgccatcgagcaggtccgcttccggatctccaattcaagcacagccaacagggttaaaacttcccagcctccagtgccccaaggggaggcagaagaagacagtcaaggaaaagagggcccaagtggatcaggggactctcagctgagtgcttcctctagatcagaaagtggacggatgaaaaaaagtgataataaaatgggcataaccccgcttagaaattatcaccccattgtagttcccggactggggcgttctctaggatttctgcccaaaatgcctcgcctgcgggtggtccacatgtttctgtggtacctcatctacgggcaccctgccagcaacaccgtggagaagccaagcttcatcagtgaacggagaacgataaagcaggagtcaggcagggcaggcgtccggccgtcctcctctggaagtgcctgggaggcctgctctgaagccccatctaaaggcagccaagatggtgtcacctgggaggctgaagtggagcttgccacggagacagtgtatgtcgacgatgcctcgtggatgcgctacatccccccaatcccagtccacagggacttcggctttggctgggctctcgtcagcgacatcctcctctgccttcccctctccatcttcatccagattgtgcaagtcagctacaaggtggacaacctggaggaatttctgaacgacccgctgaagaagcacacgctgatccgctttctccccaggcccattcggcagcagcttctgtacaagaggcgttacattttttcggtggtggagaaccttcagaggctgtgctacatggggctgctacagtttggtcccacggaaaagtttcaggataaagatcaggtctttatcttcttgaagaagaatgcagtcattgttgacactaccatctgcgacccacattacaacctggcccgcagcagccggcccttcgagaggcgcctctatgtcctgaactcaatgcaggatgtggaaaactactggtttgacctgcagtgcgtctgcctcaacaccccactaggcgtggtgcgctgcccgcgcgtcaggaagaacagcagcacagaccagggcagcgacgaggagggcagcctgcagaaggagcaggagagcgccatggacaagcacaacctggagcgcaagtgcgccatgctggagtacaccactggaagccgtgaggtggtggatgaaggcttgatccctggagatgggctgggtgccgcagggctcgattccagcttctacggacacctcaagcgcaactggatctggaccagctacatcatcaaccaggccaaaaaggagaacactgccgcagagaatggactcacagtgaggctccagacatttctgtccaagcgcccaatgcccctcagtgccagaggcaacagcaggttgaatatttggggggaagcaagagtaggctccgagctctgtgctggctgggaagagcagtttgaggtggaccgagagccctcgctggaccgaaaccggagagtgaggggtgggaaaagccagaagcggaagcggctgaagaaggaccctgggaagaagatcaagagaaagaagaaaggagagttcccaggagaaaaaagcaaaaggctgcgctaccatgatgaagccgaccagagtgccctgcagcggatgacgcggcttcgtgtcacctggtctatgcaggaggatgggctgcttgtgctgtgccgcattgccagcaatgtcctcaacaccaaggtgaagggcccatttgtcacctggcaggtggtacgggacattttgcatgccacgtttgaagagtctttggataaaacatctcattccgttggacgaagagctcgctacatagtcaaaaacccacaggcctatctcaactataaagtgtgcctggccgaggtgtaccaggataaagcacttgttggagatttcatgaatcgaagaggtgactatgatgacccaaaggtttgtgccaacgagtttaaagaatttgtggagaagcttaaagaaaagttcagttcagccctaaggaattctaaccttgaaatcccagacacactccaggagctgttcgccaggtaccgagttttggcaattggggatgaaaaagatcaaaccaggaaagaggatgaacttaacagcgtggatgacatccactttctggtgcttcagaacctgatccagagcacgctggccctctcagacagtcagatgaagtcctaccagtcattccagactttccgcctctatcgggagtacaaggaccacgttcttgtgaaggccttcatggagtgccagaagaggagcttggtcaaccggcgccgggtcaaccacacgctgggccccaagaagaaccgggccctccccttcgtgccaatgtcctaccagctatcccagacctactacaggatttttacgtggcgatttccaagcaccatctgcacggagtcattccagtttttggacagaatgcgggctgccggcaagttggaccagcctgatcgtttctctttcaaagaccaggataataacgagcccacaaacgacatggtggccttttcactggacggccctggaggaaattgtgtggccgtcctgaccctcttctctctgggcctcatttctgtggatgtcaggatcccggagcagatcatcgtggtagacagctcaatggtggagaatgaggtcatcaaaagcttggggaaggacggcagcctggaggatgacgaggatgaagaggatgacttggacgaaggtgtagggggcaagcgccggagcatggaggtgaaacctgcgcaagcctcccacaccaactacctgctgatgaggggctactactcccccggcatcgtcagcacccgcaacctcaaccccaacgacagcattgtggtcaactcctgccagatgaagttccagctccgctgcacccctgtgcccgcccggctcaggcccgctgccgctcctctggaagagctaacaatgggaacctcctgcctccctgatacgttcaccaagctgataaacccccaggaaaacacctgcagcttggaggagtttgtcctccagctggagctgtctgggtatagtcccgaagacctgactgctgccttggagatcttggaagccattatagccacgggttgttttgggattgacaaggaggagctgcgcagacggttctcggccttggagaaggcaggtggtgggcgcaccaggacattcgcagattgcatccaggccctcctggagcagcatcaggtgctggaggccacggagctgctataatgcttatctcggtccac

SEQ ID NO: 426192 - DNA, 4964 bp, Homo sapiens
atggaccaaggcccttggcggtgcgttgcgcacccccggggcgccgccgactgaagtagcaatggacgcgctggagtcgttgttggacgaagtcgctctggaggggctcgatggcctgtgtctgccagcgctgtggagccggctggagacgcgagtgccgcccttcccgctgcctttggaaccctgcacgcaggagtttctctggcgggccctcgccacgcacccgggcatcagcttctatgaggagcctcgggagcgacccgacctacagctccaggaccggtatgaagaaattgatttggaaactggaattttggagtctaggagggacccggtggctttggaggatgtctaccccattcatatgatcttagagaataaggatggcatccagggctcatgccgctactttaaggagaggaaaaacattaccaatgacatcagaaccaagtccttgcagcctcgctgtacaatggtggaagcctttgacaggtgggggaagaaactgatcatcgttgcctcccaggccatgcggtacagggccttgataggccaggagggggatcccgacctgaagctgcccgacttctcctactgcatcctggaacggctaggccggtccaggtggcaaggggagctccagcgagaccttcacaccactgctttcaaggttgatgctgggaagctgcactatcacagaaaaattttgaacaaaaacgggctgattacaatgcagtcccatgtgatccgattacccactggagcccagcaacactcaatcctcctcctactgaaccggtttcatgtggacaggaggagcaaatacgacatcctcatggagaagctttcggtcatgctgagcacacggactaaccacatagagacgctgggaaagctgagggaagagctggggctgtgcgaaaggacgtttaagcgtctgtaccagtatatgctgaacgccgggctagccaaggtggtgtctcttcgcttgcaagagatccaccctgaatgtggaccttgtaagacaaagaaagggaccgacgtcatggttcggtgcctcaagctgctgaaggaatttaaacggaatgaccatgatgatgacgaggacgaggaggtcatctccaagacagtgcctccagtggacattgtgttcgagcgggatatgctcacacagacctacgacctcattgagcgcagaggcacgaaaggaatttcccaagctgaaatccgagtggctatgaatgtgggaaaactagaagcaagaatgctgtgccgacttcttcaaagattcaaagttgtcaagggattcatggaagacgaaggtcggcagcgaaccaccaagtacatttcctgcgtgtttgcagaggagagcgacctaagccggcagtaccaaagagagaaggcccgcagcgagctcttgaccaccgtgagcctggcgtctatgcaggaggagtcgcttctgcctgaaggcgaggacaccttcctctctgagtcggacagtgaggaggagaggagcagcagcaagcggagaggcagagggtcccagaaagacacaagagcctctgcaaacctccggcccaagacccagcctcatcactccaccccaaccaagggtgggtggaaagttgtaaacctacacccattgaaaaagcagccgccctccttcccaggagctgctgaagagagagcctgccagagccttgccagcagggacagcctcttagataccagcagcgtctcagaacccaacgtgtcctttgtctcccactgtgcggacagcaacagtggtgacatagctgtgatcgaggaggtccggatggaaaacccaaaggagagtagcagttccctgaagactgggaggcacagctcaggccaagacaaaccacacgaaacttaccgactgctgaaacgcaggaatctgatcatagaagctgtcaccaatcttcgcttaatcgagagtttattcacgattcagaagatgatcatggatcaggagaagcaggaaggcgtgtccaccaagtgctgcaagaagtccattgtccgcttggtgcggaacctgtctgaggaaggtctcttgcgattgtatcggaccactgtcattcaagatggcatcaagaagaaggtggatctggtggtgcacccgtccatggaccagaacgaccctctagtgagaagtgccatcgagcaggtccgcttccggatctccaattcaagcacagccaacagggttaaaacttcccagcctccagtgccccaaggggaggcagaagaagacagtcaaggaaaagagggcccaagtggatcaggggactctcagctgagtgcttcctctagatcagaaagtggacggatgaaaaaaagtgataataaaatgggcataaccccgcttagaaattatcaccccattgtagttcccggactggggcgttctctaggatttctgcccaaaatgcctcgcctgcgggtggtccacatgtttctgtggtacctcatctacgggcaccctgccagcaacaccgtggagaagccaagcttcatcagtgaacggagaacgataaagcaggagtcaggcagggcaggcgtccggccgtcctcctctggaagtgcctgggaggcctgctctgaagccccatctaaaggcagccaagatggtgtcacctgggaggctgaagtggagcttgccacggagacagtgtatgtcgacgatgcctcgtggatgcgctacatccccccaatcccagtccacagggacttcggctttggctgggctctcgtcagcgacatcctcctctgccttcccctctccatcttcatccagattgtgcaagtcagctacaaggtggacaacctggaggaatttctgaacgacccgctgaagaagcacacgctgatccgctttctccccaggcccattcggcagcagcttctgtacaagaggcgttacattttttcggtggtggagaaccttcagaggctgtgctacatggggctgctacagtttggtcccacggaaaagtttcaggataaagatcaggtctttatcttcttgaagaagaatgcagtcattgttgacactaccatctgcgacccacattacaacctggcccgcagcagccggcccttcgagaggcgcctctatgtcctgaactcaatgcaggatgtggaaaactactggtttgacctgcagtgcgtctgcctcaacaccccactaggcgtggtgcgctgcccgcgcgtcaggaagaacagcagcacagaccagggcagcgacgaggagggcagcctgcagaaggagcaggagagcgccatggacaagcacaacctggagcgcaagtgcgccatgctggagtacaccactggaagccgtgaggtggtggatgaaggcttgatccctggagatgggctgggtgccgcagggctcgattccagcttctacggacacctcaagcgcaactggatctggaccagctacatcatcaaccaggccaaaaaggagaacactgccgcagagaatggactcacagtgaggctccagacatttctgtccaagcgcccaatgcccctcagtgccagaggcaacagcaggttgaatatttggggggaagcaagagtaggctccgagctctgtgctggctgggaagagcagtttgaggtggaccgagagccctcgctggaccgaaaccggagagtgaggggtgggaaaagccagaagcggaagcggctgaagaaggaccctgggaagaagatcaagagaaagaagaaaggagagttcccaggagaaaaaagcaaaaggctgcgctaccatgatgaagccgaccagagtgccctgcagcggatgacgcggcttcgtgtcacctggtctatgcaggaggatgggctgcttgtgctgtgccgcattgccagcaatgtcctcaacaccaaggtgaagggcccatttgtcacctggcaggtggtacgggacattttgcatgccacgtttgaagagtctttggataaaacatctcattccgttggacgaagagctcgctacatagtcaaaaacccacaggcctatctcaactataaagtgtgcctggccgaggtgtaccaggataaagcacttgttggagatttcatgaatcgaagaggtgactatgatgacccaaaggtttgtgccaacgagtttaaagaatttgtggagaagcttaaagaaaagttcagttcagccctaaggaattctaaccttgaaatcccagacacactccaggagctgttcgccaggtaccgagttttggcaattggggatgaaaaagatcaaaccaggaaagaggatgaacttaacagcgtggatgacatccactttctggtgcttcagaacctgatccagagcacgctggccctctcagacagtcagatgaagtcctaccagtcattccagactttccgcctctatcgggagtacaaggaccacgttcttgtgaaggccttcatggagtgccagaagaggagcttggtcaaccggcgccgggtcaaccacacgctgggccccaagaagaaccgggccctccccttcgtgccaatgtcctaccagctatcccagacctactacaggatttttacgtggcgatttccaagcaccatctgcacggagtcattccagtttttggacagaatgcgggctgccggcaagttggaccagcctgatcgtttctctttcaaagaccaggataataacgagcccacaaacgacatggtggccttttcactggacggccctggaggaaattgtgtggccgtcctgaccctcttctctctgggcctcatttctgtggatgtcaggatcccggagcagatcatcgtgggcagccacttcgtgggcagcgctgcccacgaagtggagagtttagcaacacagtgtgcttagtcagcgtaggaatcctcactaaagcaggagaagttccattcaaagtgccaatgatagagtcaac

SEQ ID NO: 426193 - DNA, 4356 bp, Homo sapiens
atggaccaaggcccttggcggtgcgttgcgcacccccggggcgccgccgactgaagtagcaatggacgcgctggagtcgttgttggacgaagtcgctctggaggggctcgatggcctgtgtctgccagcgctgtggagccggctggagacgcgagtgccgcccttcccgctgcctttggaaccctgcacgcaggagtttctctggcgggccctcgccacgcacccgggcatcagcttctatgaggagcctcgggagcgacccgacctacagctccaggaccggtatgaagaaattgatttggaaactggaattttggagtctaggagggacccggtggctttggaggatgtctaccccattcatatgatcttagagaataaggatggcatccagggctcatgccgctactttaaggagaggaaaaacattaccaatgacatcagaaccaagtccttgcagcctcgctgtacaatggtggaagcctttgacaggtgggggaagaaactgatcatcgttgcctcccaggccatgcggtacagggccttgataggccaggagggggatcccgacctgaagctgcccgacttctcctactgcatcctggaacggctaggccggtccaggtggcaaggggagctccagcgagaccttcacaccactgctttcaaggttgatgctgggaagctgcactatcacagaaaaattttgaacaaaaacgggctgattacaatgcagtcccatgtgatccgattacccactggagcccagcaacactcaatcctcctcctactgaaccggtttcatgtggacaggaggagcaaatacgacatcctcatggagaagctttcggtcatgctgagcacacggactaaccacatagagacgctgggaaagctgagggaagagctggggctgtgcgaaaggacgtttaagcgtctgtaccagtatatgctgaacgccgggctagccaaggtggtgtctcttcgcttgcaagagatccaccctgaatgtggaccttgtaagacaaagaaagggaccgacgtcatggttcggtgcctcaagctgctgaaggaatttaaacggaatgaccatgatgatgacgaggacgaggaggtcatctccaagacagtgcctccagtggacattgtgttcgagcgggatatgctcacacagacctacgacctcattgagcgcagaggcacgaaaggaatttcccaagctgaaatccgagtggctatgaatgtgggaaaactagaagcaagaatgctgtgccgacttcttcaaagattcaaagttgtcaagggattcatggaagacgaaggtcggcagcgaaccaccaagtacatttcctgcgtgtttgcagaggagagcgacctaagccggcagtaccaaagagagaaggcccgcagcgagctcttgaccaccgtgagcctggcgtctatgcaggaggagtcgcttctgcctgaaggcgaggacaccttcctctctgagtcggacagtgaggaggagaggagcagcagcaagcggagaggcagagggtcccagaaagacacaagagcctctgcaaacctccggcccaagacccagcctcatcactccaccccaaccaagggtgggtggaaagttgtaaacctacacccattgaaaaagcagccgccctccttcccaggagctgctgaagagagagcctgccagagccttgccagcagggacagcctcttagataccagcagcgtctcagaacccaacgtgtcctttgtctcccactgtgcggacagcaacagtggtgacatagctgtgatcgaggaggtccggatggaaaacccaaaggagagtagcagttccctgaagactgggaggcacagctcaggccaagacaaaccacacgaaacttaccgactgctgaaacgcaggaatctgatcatagaagctgtcaccaatcttcgcttaatcgagagtttattcacgattcagaagatgatcatggatcaggagaagcaggaaggcgtgtccaccaagtgctgcaagaagtccattgtccgcttggtgcggaacctgtctgaggaaggtctcttgcgattgtatcggaccactgtcattcaagatggcatcaagaagaaggtggatctggtggtgcacccgtccatggaccagaacgaccctctagtgagaagtgccatcgagcaggtccgcttccggatctccaattcaagcacagccaacagggttaaaacttcccagcctccagtgccccaaggggaggcagaagaagacagtcaaggaaaagagggcccaagtggatcaggggactctcagctgagtgcttcctctagatcagaaagtggacggatgaaaaaaagtgataataaaatgggcataaccccgcttagaaattatcaccccattgtagttcccggactggggcgttctctaggatttctgcccaaaatgcctcgcctgcgggtggtccacatgtttctgtggtacctcatctacgggcaccctgccagcaacaccgtggagaagccaagcttcatcagtgaacggagaacgataaagcaggagtcaggcagggcaggcgtccggccgtcctcctctggaagtgcctgggaggcctgctctgaagccccatctaaaggcagccaagatggtgtcacctgggaggctgaagtggagcttgccacggagacagtgtatgtcgacgatgcctcgtggatgcgctacatccccccaatcccagtccacagggacttcggctttggctgggctctcgtcagcgacatcctcctctgccttcccctctccatcttcatccagattgtgcaagtcagctacaaggtggacaacctggaggaatttctgaacgacccgctgaagaagcacacgctgatccgctttctccccaggcccattcggcagcagcttctgtacaagaggcgttacattttttcggtggtggagaaccttcagaggctgtgctacatggggctgctacagtttggtcccacggaaaagtttcaggataaagatcaggtctttatcttcttgaagaagaatgcagtcattgttgacactaccatctgcgacccacattacaacctggcccgcagcagccggcccttcgagaggcgcctctatgtcctgaactcaatgcaggatgtggaaaactactggtttgacctgcagtgcgtctgcctcaacaccccactaggcgtggtgcgctgcccgcgcgtcaggaagaacagcagcacagaccagggcagcgacgaggagggcagcctgcagaaggagcaggagagcgccatggacaagcacaacctggagcgcaagtgcgccatgctggagtacaccactggaagccgtgaggtggtggatgaaggcttgatccctggagatgggctgggtgccgcagggctcgattccagcttctacggacacctcaagcgcaactggatctggaccagctacatcatcaaccaggccaaaaaggagaacactgccgcagagaatggactcacagtgaggctccagacatttctgtccaagcgcccaatgcccctcagtgccagaggcaacagcaggttgaatatttggggggaagcaagagtaggctccgagctctgtgctggctgggaagagcagtttgaggtggaccgagagccctcgctggaccgaaaccggagagtgaggggtgggaaaagccagaagcggaagcggctgaagaaggaccctgggaagaagatcaagagaaagaagaaaggagagttcccaggagaaaaaagcaaaaggctgcgctaccatgatgaagccgaccagagtgccctgcagcggatgacgcggcttcgtgtcacctggtctatgcaggaggatgggctgcttgtgctgtgccgcattgccagcaatgtcctcaacaccaaggtgaagggcccatttgtcacctggcaggtggtacgggacattttgcatgccacgtttgaagagtctttggataaaacatctcattccgttggacgaagagctcgctacatagtcaaaaacccacaggcctatctcaactataagtcagcccatatggtcctggacaaacccctgtgagagacagtttgggactcagtgttctcggttacctatgaaggacggaagttcagagaagccaaggtgtaaagtgtgaacagacctgactgaggtcaggcttggctgaccccaaatccttcattcgtaaaagctgcagttgtgcaacaggcatataagtaactcatgcttcaaggtcggccaaggccagaaacatgagaatggagctctctgaaggttctgaacatgggcatcattgcaattcccagacttcagctttgtct

SEQ ID NO: 426194 - DNA, 1937 bp, Homo sapiens
gtggttcacgagcagccagagagaaagagatgctgctccagggcacagggctagcaaggggcagccccggggctaggagccaggcctgcctcgtgggcctgggctgctcagggcactcaacccgccagtcaggggaggccactccactcgtcccccgtcaccagcgtggaggatcccgagctccccacagaccccgcgtgtctcctgcctccccaggccctcctggagcagcatcaggtgctggaggtcggtggcaacactgcgcgcctggtagccatgggctctgcctggccttggctcctgcactccgtgcggctgaaagacagagaagacgccgacatccagagagaagacccccaggccagacccctggaggggtcttccagtgaggacagcccccccgaggggcaggcacctccttctcacagcccccggggcaccaagaggcgcgccagctgggccagtgagaatggggagaccgacgccgagggcacccagatgacccctgccaagaggccagcgctccaggactcaaatttggcccccagccttgggcccggagctgaagatggggcagaagcccaggccccatctccacccccagctcttgaagacaccgctgcagcgggagcagcacaggaagaccaagagggtgtcggtgagttcagttccccaggccaagagcagctgagcggccaggcgcagcctccagagggctctgaagaccccagagggttcacagagagtttcggagctgccaacatctcccaggcagcacgggaaagggactgtgagagtgtctgcttcatcggccggccgtggcgtgtcgtggatggccacctgaaccttcctgtatgcaagggtatgatggaggccatgctgtaccacatcatgaccaggcctggcatccccgagagctccctgctgcgccactaccagggggtcctgcagcccgtcgccgtgctggagttgctccagggcctggagtccctcggctgcatccggaagcgctggctgagaaagccaaggcctgtctcgctcttctctacacccgtggtggaagaggtggaagtgccctccagcctggacgagagccccatggctttctatgagcccaccttggactgtaccctccggctgggccgtgtgttcccccacgaggtcaactggaacaagtggatccacctctaggacccctgtgggcgtcccctccctcccagccaccgcctgccacaccactcctgcctggtgctcggcagaccccactgtgccctggccttgggtctgccgagcctcctgcagcaggggacgggtgctttggccagagtcacagactgacacgtttcccactgtactggaactctggaaagaggggctccccgacctgcccatcccccaggctcttctgggccttccccttgggaactggcctcatcacactgggagttggtgcttcttgtctctgggtctccagagtttgccccgcctgtgcacacctcacattccagactctagccatctcggcaggatctcctggctccttgagtgcccaggtgccaccaagaggaagggccttgtgggatacaccttgcagaatagggatcggtgtgccccgctgcgaggggccccccatgggggctgtggcccctccgcaggcaggacatcccaacccctggctgggactgaaccacccagagcggagcggctcccttttcagccttgtgagtcacctggcaggccccagctgggctggctgtccgtgtccctcagcctggctggtgattccttgcaggccagaaatgaagagtccctgtaggttttggttttgtttgttttattttgttctttcaccttttttcctcattaaaaaaaaaaagtccctgtggagtgtacttatttattttttgattaaagggaagtaaaatgcaaaaaaattt

SEQ ID NO: 426195 - DNA, 1829 bp, Homo sapiens
  misc_feature (52)..(52): n is a, c, g, or t
gacacaaccacaaaacgaaagcagcacacagaaccttacagtcagtaagagntccgtgttaatacggacacgagggggcgcaccaggacattcgcagattgcatccaggccctcctggagcagcatcaggtgctggaggtcggtggcaacactgcgcgcctggtagccatgggctctgcctggccttggctcctgcactccgtgcggctgaaagacagagaagacgccgacatccagagagaagacccccaggccagacccctggaggggtcttccagtgaggacagcccccccgaggggcaggcacctccttctcacagcccccggggcaccaagaggcgcgccagctgggccagtgagaatggggagaccgacgccgagggcacccagatgacccctgccaagaggccagcgctccaggactcaaatttggcccccagccttgggcccggagctgaagatggggcagaagcccaggccccatctccacccccagctcttgaagacaccgctgcagcgggagcagcacaggaagaccaagagggtgtcggtgagttcagttccccaggccaagagcagctgagcggccaggcgcagcctccagagggctctgaagaccccagagggttcacagagagtttcggagctgccaacatctcccaggcagcacgggaaagggactgtgagagtgtctgcttcatcggccggccgtggcgtgtcgtggatggccacctgaaccttcctgtatgcaagggtatgatggaggccatgctgtaccacatcatgaccaggcctggcatccccgagagctccctgctgcgccactaccagggggtcctgcagcccgtcgccgtgctggagttgctccagggcctggagtccctcggctgcatccggaagcgctggctgagaaagccaaggcctgtctcgctcttctctacacccgtggtggaagaggtggaagtgccctccagcctggacgagagccccatggctttctatgagcccaccttggactgtaccctccggctgggccgtgtgttcccccacgaggtcaactggaacaagtggatccacctctaggacccctgtgggcgtcccctccctcccagccaccgcctgccacaccactcctgcctggtgctcggcagaccccactgtgccctggccttgggtctgccgagcctcctgcagcaggggacgggtgctttggccagagtcacagactgacacgtttcccactgtactggaactctggaaagaggggctccccgacctgcccatcccccaggctcttctgggccttccccttgggaactggcctcatcacactgggagttggtgcttcttgtctctgggtctccagagtttgccccgcctgtgcacacctcacattccagactctagccatctcggcaggatctcctggctccttgagtgcccaggtgccaccaagaggaagggccttgtgggatacaccttgcagaatagggatcggtgtgccccgctgcgaggggccccccatgggggctgtggcccctccgcaggcaggacatcccaacccctggctgggactgaaccacccagagcggagcggctcccttttcagccttgtgagtcacctggcaggccccagctgggctggctgtccgtgtccctcagcctggctggtgattccttgcaggccagaaatgaagagtccctgtaggttttggttttgtttgttttattttgttctttcaccttttttcctcattaaaaaaaaaaagtccctgtggagtgtacttatttattttttgattaaagggaagtaaaatgcaaaaaaattt

SEQ ID NO: 426196 - DNA, 1022 bp, Homo sapiens
aaggctaggtacgaggctgggtgtgtccaggggcctgcgcccgtcgccggctgggttgctccaggcctggagtccctcggctgcatccggaagcgctggctgagaaagccaaggcctgtctcgctcttctctacacccgtggtggaagaggtggaagtgccctccagcctggacgagagccccatggctttctatgagcccaccttggactgtaccctccggctgggccgtgtgttcccccacgaggtcaactggaacaagtggatccacctctaggacccctgtgggcgtcccctccctcccagccaccgcctgccacaccactcctgcctggtgctcggcagaccccactgtgccctggccttgggtctgccgagcctcctgcagcaggggacgggtgctttggccagagtcacagactgacacgtttcccactgtactggaactctggaaagaggggctccccgacctgcccatcccccaggctcttctgggccttccccttgggaactggcctcatcacactgggagttggtgcttcttgtctctgggtctccagagtttgccccgcctgtgcacacctcacattccagactctagccatctcggcaggatctcctggctccttgagtgcccaggtgccaccaagaggaagggccttgtgggatacaccttgcagaatagggatcggtgtgccccgctgcgaggggccccccatgggggctgtggcccctccgcaggcaggacatcccaacccctggctgggactgaaccacccagagcggagcggctcccttttcagccttgtgagtcacctggcaggccccagctgggctggctgtccgtgtccctcagcctggctggtgattccttgcaggccagaaatgaagagtccctgtaggttttggttttgtttgttttattttgttctttcaccttttttcctcattaaaaaaaaaaagtccctgtggagtgtacttatttattttttgattaaagggaagtaaaatgcaaaaaaattt

SEQ ID NO: 426197 - DNA, 423 bp, Homo sapiens
ttgttggagatttcatgaatcgaagaggtgactatgatgacccaaaggtaggtcctgtgtgagtgtagggcttggtatgcttgggagattggggcagctagacttcagtcagctcctctcatcccacagtgcccctgccagccttaggaacgtggactttgtttcctgctcacttgagaaatcaccgagtcagctctctggtgttggccttcacttgatctggcttcaaacacctgtttttaaagatgattagaatctgacaggccactttgaagggctgctgtgccttgggcctgttttgttaagaaaatagaacatttcttcagaaattacaggcttcctagaaagctcgcagactgggtgtgggttttctttccgagttttctgtccagaggggccaaggcggtggctgacaaggaggga

SEQ ID NO: 426198 - DNA, 802 bp, Homo sapiens
ctgggtccgccccactcgtgggccccgggtggctgttcagtctctggtttagtaacagaaacgtctgtttcgaggaaagtgtgcctggaactctgcacatggcgtggagcagagcttcagggtcacgctcccgtgagttttgccacagcctggaggtggtttctgcctgggctgccagtagagctggcaagtccaggagtcacaacccttgtccctctcctgccaatgtgggtgggcccactgaggcctcagttacagctacatcagagcggacaccacgtcctggttccacccagctggcggtcaagggcccctctgtccagacaggagagaagcagggagtttggaaagcagagagcaagaggtggctggtctcagccctgtgacctgggccaggcctaggacgcccctgagcctcagtgttctgtctggacgagctgccctcctgcccccaccaagccctgatgtcaagccctctccctgcagggactgtgagagtgtctgcttcatcggccggccgtggcgtgtcgtggatggccacctgaaccttcctgtatgcaagggtatgatggaggccatgctgtaccacatcatgaccaggcctggcatccccgagagctccctgctgcgccactaccagggggtcctgcagcccgtcgccgtgctggagttgctccaggtgtggggccttcctgggttcagcagggtgtggaggcggctgggtgcactcagtggcccggctgtgatgttcaggccccaggcaacatgcagtaccaccatactgcttgcctgcacctcctcc

SEQ ID NO: 426199 - DNA, 209 bp, Homo sapiens
tctcccactcccaacactttagccaataaatggccatcttgagccagcatccgcttgcttagtgaggagctgttttgtttcactgacatgctgttatgtttcttttgcaggtaccgagttttggcaattggggatgaaaaagatcaaaccaggaaagaggatgaacttaacaggtaagtactgatatatagagtagcttttcctcagct

SEQ ID NO: 426200 - DNA, 7059 bp, Homo sapiens
atggaccaaggcccttggcggtgcgttgcgcacccccggggcgccgccgactgaagtagcaatggacgcgctggagtcgttgttggacgaagtcgctctggaggggctcgatggcctgtgtctgccagcgctgtggagccggctggagacgcgagtgccgcccttcccgctgcctttggaaccctgcacgcaggagtttctctggcgggccctcgccacgcacccgggcatcagcttctatgaggagcctcgggagcgacccgacctacagctccaggaccggtatgaagaaattgatttggaaactggaattttggagtctaggagggacccggtggctttggaggatgtctaccccattcatatgatcttagagaataaggatggcatccagggctcatgccgctactttaaggagaggaaaaacattaccaatgacatcagaaccaagtccttgcagcctcgctgtacaatggtggaagcctttgacaggtgggggaagaaactgatcatcgttgcctcccaggccatgcggtacagggccttgataggccaggagggggatcccgacctgaagctgcccgacttctcctactgcatcctggaacggctaggccggtccaggtggcaaggggagctccagcgagaccttcacaccactgctttcaaggttgatgctgggaagctgcactatcacagaaaaattttgaacaaaaacgggctgattacaatgcagtcccatgtgatccgattacccactggagcccagcaacactcaatcctcctcctactgaaccggtttcatgtggacaggaggagcaaatacgacatcctcatggagaagctttcggtcatgctgagcacacggactaaccacatagagacgctgggaaagctgagggaagagctggggctgtgcgaaaggacgtttaagcgtctgtaccagtatatgctgaacgccgggctagccaaggtggtgtctcttcgcttgcaagagatccaccctgaatgtggaccttgtaagacaaagaaagggaccgacgtcatggttcggtgcctcaagctgctgaaggaatttaaacggaatgaccatgatgatgacgaggacgaggaggtcatctccaagacagtgcctccagtggacattgtgttcgagcgggatatgctcacacagacctacgacctcattgagcgcagaggcacgaaaggaatttcccaagctgaaatccgagtggctatgaatgtgggaaaactagaagcaagaatgctgtgccgacttcttcaaagattcaaagttgtcaagggattcatggaagacgaaggtcggcagcgaaccaccaagtacatttcctgcgtgtttgcagaggagagcgacctaagccggcagtaccaaagagagaaggcccgcagcgagctcttgaccaccgtgagcctggcgtctatgcaggaggagtcgcttctgcctgaaggcgaggacaccttcctctctgagtcggacagtgaggaggagaggagcagcagcaagcggagaggcagagggtcccagaaagacacaagagcctctgcaaacctccggcccaagacccagcctcatcactccaccccaaccaagggtgggtggaaagttgtaaacctacacccattgaaaaagcagccgccctccttcccaggagctgctgaagagagagcctgccagagccttgccagcagggacagcctcttagataccagcagcgtctcagaacccaacgtgtcctttgtctcccactgtgcggacagcaacagtggtgacatagctgtgatcgaggaggtccggatggaaaacccaaaggagagtagcagttccctgaagactgggaggcacagctcaggccaagacaaaccacacgaaacttaccgactgctgaaacgcaggaatctgatcatagaagctgtcaccaatcttcgcttaatcgagagtttattcacgattcagaagatgatcatggatcaggagaagcaggaaggcgtgtccaccaagtgctgcaagaagtccattgtccgcttggtgcggaacctgtctgaggaaggtctcttgcgattgtatcggaccactgtcattcaagatggcatcaagaagaaggtggatctggtggtgcacccgtccatggaccagaacgaccctctagtgagaagtgccatcgagcaggtccgcttccggatctccaattcaagcacagccaacagggttaaaacttcccagcctccagtgccccaaggggaggcagaagaagacagtcaaggaaaagagggcccaagtggatcaggggactctcagctgagtgcttcctctagatcagaaagtggacggatgaaaaaaagtgataataaaatgggcataaccccgcttagaaattatcaccccattgtagttcccggactggggcgttctctaggatttctgcccaaaatgcctcgcctgcgggtggtccacatgtttctgtggtacctcatctacgggcaccctgccagcaacaccgtggagaagccaagcttcatcagtgaacggagaacgataaagcaggagtcaggcagggcaggcgtccggccgtcctcctctggaagtgcctgggaggcctgctctgaagccccatctaaaggcagccaagatggtgtcacctgggaggctgaagtggagcttgccacggagacagtgtatgtcgacgatgcctcgtggatgcgctacatccccccaatcccagtccacagggacttcggctttggctgggctctcgtcagcgacatcctcctctgccttcccctctccatcttcatccagattgtgcaagtcagctacaaggtggacaacctggaggaatttctgaacgacccgctgaagaagcacacgctgatccgctttctccccaggcccattcggcagcagcttctgtacaagaggcgttacattttttcggtggtggagaaccttcagaggctgtgctacatggggctgctacagtttggtcccacggaaaagtttcaggataaagatcaggtctttatcttcttgaagaagaatgcagtcattgttgacactaccatctgcgacccacattacaacctggcccgcagcagccggcccttcgagaggcgcctctatgtcctgaactcaatgcaggatgtggaaaactactggtttgacctgcagtgcgtctgcctcaacaccccactaggcgtggtgcgctgcccgcgcgtcaggaagaacagcagcacagaccagggcagcgacgaggagggcagcctgcagaaggagcaggagagcgccatggacaagcacaacctggagcgcaagtgcgccatgctggagtacaccactggaagccgtgaggtggtggatgaaggcttgatccctggagatgggctgggtgccgcagggctcgattccagcttctacggacacctcaagcgcaactggatctggaccagctacatcatcaaccaggccaaaaaggagaacactgccgcagagaatggactcacagtgaggctccagacatttctgtccaagcgcccaatgcccctcagtgccagaggcaacagcaggttgaatatttggggggaagcaagagtaggctccgagctctgtgctggctgggaagagcagtttgaggtggaccgagagccctcgctggaccgaaaccggagagtgaggggtgggaaaagccagaagcggaagcggctgaagaaggaccctgggaagaagatcaagagaaagaagaaaggagagttcccaggagaaaaaagcaaaaggctgcgctaccatgatgaagccgaccagagtgccctgcagcggatgacgcggcttcgtgtcacctggtctatgcaggaggatgggctgcttgtgctgtgccgcattgccagcaatgtcctcaacaccaaggtgaagggcccatttgtcacctggcaggtggtacgggacattttgcatgccacgtttgaagagtctttggataaaacatctcattccgttggacgaagagctcgctacatagtcaaaaacccacaggcctatctcaactataaagtgtgcctggccgaggtgtaccaggataaagcacttgttggagatttcatgaatcgaagaggtgactatgatgacccaaaggtttgtgccaacgagtttaaagaatttgtggagaagcttaaagaaaagttcagttcagccctaaggaattctaaccttgaaatcccagacacactccaggagctgttcgccaggtaccgagttttggcaattggggatgaaaaagatcaaaccaggaaagaggatgaacttaacagcgtggatgacatccactttctggtgcttcagaacctgatccagagcacgctggccctctcagacagtcagatgaagtcctaccagtcattccagactttccgcctctatcgggagtacaaggaccacgttcttgtgaaggccttcatggagtgccagaagaggagcttggtcaaccggcgccgggtcaaccacacgctgggccccaagaagaaccgggccctccccttcgtgccaatgtcctaccagctatcccagacctactacaggatttttacgtggcgatttccaagcaccatctgcacggagtcattccagtttttggacagaatgcgggctgccggcaagttggaccagcctgatcgtttctctttcaaagaccaggataataacgagcccacaaacgacatggtggccttttcactggacggccctggaggaaattgtgtggccgtcctgaccctcttctctctgggcctcatttctgtggatgtcaggatcccggagcagatcatcgtggtagacagctcaatggtggagaatgaggtcatcaaaagcttggggaaggacggcagcctggaggatgacgaggatgaagaggatgacttggacgaaggtgtagggggcaagcgccggagcatggaggtgaaacctgcgcaagcctcccacaccaactacctgctgatgaggggctactactcccccggcatcgtcagcacccgcaacctcaaccccaacgacagcattgtggtcaactcctgccagatgaagttccagctccgctgcacccctgtgcccgcccggctcaggcccgctgccgctcctctggaagagctaacaatgggaacctcctgcctccctgatacgttcaccaagctgataaacccccaggaaaacacctgcagcttggaggagtttgtcctccagctggagctgtctgggtatagtcccgaagacctgactgctgccttggagatcttggaagccattatagccacgggttgttttgggattgacaaggaggagctgcgcagacggttctcggccttggagaaggcaggtggtgggcgcaccaggacattcgcagattgcatccaggccctcctggagcagcatcaggtgctggaggtcggtggcaacactgcgcgcctggtagccatgggctctgcctggccttggctcctgcactccgtgcggctgaaagacagagaagacgccgacatccagagagaagacccccaggccagacccctggaggggtcttccagtgaggacagcccccccgaggggcaggcacctccttctcacagcccccggggcaccaagaggcgcgccagctgggccagtgagaatggggagaccgacgccgagggcacccagatgacccctgccaagaggccagcgctccaggactcaaatttggcccccagccttgggcccggagctgaagatggggcagaagcccaggccccatctccacccccagctcttgaagacaccgctgcagcgggagcagcacaggaagaccaagagggtgggttcacagagagtttcggagctgccaacatctcccaggcagcacgggaaagggactgtgagagtgtctgcttcatcggccggccgtggcgtgtcgtggatggccacctgaaccttcctgtatgcaagggtatgatggaggccatgctgtaccacatcatgaccaggcctggcatccccgagagctccctgctgcgccactaccagggggtcctgcagcccgtcgccgtgctggagttgctccagggcctggagtccctcggctgcatccggaagcgctggctgagaaagccaaggcctgtctcgctcttctctacacccgtggtggaagaggtggaagtgccctccagcctggacgagagccccatggctttctatgagcccaccttggactgtaccctccggctgggccgtgtgttcccccacgaggtcaactggaacaagtggatccacctctaggacccctgtgggcgtcccctccctcccagccaccgcctgccacaccactcctgcctggtgctcggcagaccccactgtgccctggccttgggtctgccgagcctcctgcagcaggggacgggtgctttggccagagtcacagactgacacgtttcccactgtactggaactctggaaagaggggctccccgacctgcccatcccccaggctcttctgggccttccccttgggaactggcctcatcacactgggagttggtgcttcttgtctctgggtctccagagtttgccccgcctgtgcacacctcacattccagactctagccatctcggcaggatctcctggctccttgagtgcccaggtgccaccaagaggaagggccttgtgggatacaccttgcagaatagggatcggtgtgccccgctgcgaggggccccccatgggggctgtggcccctccgcaggcaggacatcccaacccctggctgggactgaaccacccagagcggagcggctcccttttcagccttgtgagtcacctggcaggccccagctgggctggctgtccgtgtccctcagcctggctggtgattccttgcaggccagaaatgaagagtccctgtaggttttggttttgtttgttttattttgttctttcaccttttttcctcattaaaaaaaaaaagtccctgtggagtgtacttatttattttttgattaaagggaagtaaaatgcaaaaaaattt

SEQ ID NO: 426201 - DNA, 4959 bp, Homo sapiens
atgctccaacctctctctccaggtggatctggtggtgcacccgtccatggaccagaacgaccctctagtgagaagtgccatcgagcaggtccgcttccggatctccaattcaagcacagccaacagggttaaaacttcccagcctccagtgccccaaggggaggcagaagaagacagtcaaggaaaagagggcccaagtggatcaggggactctcagctgagtgcttcctctagatcagaaagtggacggatgaaaaaaagtgataataaaatgggcataaccccgcttagaaattatcaccccattgtagttcccggactggggcgttctctaggatttctgcccaaaatgcctcgcctgcgggtggtccacatgtttctgtggtacctcatctacgggcaccctgccagcaacaccgtggagaagccaagcttcatcagtgaacggagaacgataaagcaggagtcaggcagggcaggcgtccggccgtcctcctctggaagtgcctgggaggcctgctctgaagccccatctaaaggcagccaagatggtgtcacctgggaggctgaagtggagcttgccacggagacagtgtatgtcgacgatgcctcgtggatgcgctacatccccccaatcccagtccacagggacttcggctttggctgggctctcgtcagcgacatcctcctctgccttcccctctccatcttcatccagattgtgcaagtcagctacaaggtggacaacctggaggaatttctgaacgacccgctgaagaagcacacgctgatccgctttctccccaggcccattcggcagcagcttctgtacaagaggcgttacattttttcggtggtggagaaccttcagaggctgtgctacatggggctgctacagtttggtcccacggaaaagtttcaggataaagatcaggtctttatcttcttgaagaagaatgcagtcattgttgacactaccatctgcgacccacattacaacctggcccgcagcagccggcccttcgagaggcgcctctatgtcctgaactcaatgcaggatgtggaaaactactggtttgacctgcagtgcgtctgcctcaacaccccactaggcgtggtgcgctgcccgcgcgtcaggaagaacagcagcacagaccagggcagcgacgaggagggcagcctgcagaaggagcaggagagcgccatggacaagcacaacctggagcgcaagtgcgccatgctggagtacaccactggaagccgtgaggtggtggatgaaggcttgatccctggagatgggctgggtgccgcagggctcgattccagcttctacggacacctcaagcgcaactggatctggaccagctacatcatcaaccaggccaaaaaggagaacactgccgcagagaatggactcacagtgaggctccagacatttctgtccaagcgcccaatgcccctcagtgccagaggcaacagcaggttgaatatttggggggaagcaagagtaggctccgagctctgtgctggctgggaagagcagtttgaggtggaccgagagccctcgctggaccgaaaccggagagtgaggggtgggaaaagccagaagcggaagcggctgaagaaggaccctgggaagaagatcaagagaaagaagaaaggagagttcccaggagaaaaaagcaaaaggctgcgctaccatgatgaagccgaccagagtgccctgcagcggatgacgcggcttcgtgtcacctggtctatgcaggaggatgggctgcttgtgctgtgccgcattgccagcaatgtcctcaacaccaaggtgaagggcccatttgtcacctggcaggtggtacgggacattttgcatgccacgtttgaagagtctttggataaaacatctcattccgttggacgaagagctcgctacatagtcaaaaacccacaggcctatctcaactataaagtgtgcctggccgaggtgtaccaggataaagcacttgttggagatttcatgaatcgaagaggtgactatgatgacccaaaggtttgtgccaacgagtttaaagaatttgtggagaagcttaaagaaaagttcagttcagccctaaggaattctaaccttgaaatcccagacacactccaggagctgttcgccaggtaccgagttttggcaattggggatgaaaaagatcaaaccaggaaagaggatgaacttaacagcgtggatgacatccactttctggtgcttcagaacctgatccagagcacgctggccctctcagacagtcagatgaagtcctaccagtcattccagactttccgcctctatcgggagtacaaggaccacgttcttgtgaaggccttcatggagtgccagaagaggagcttggtcaaccggcgccgggtcaaccacacgctgggccccaagaagaaccgggccctccccttcgtgccaatgtcctaccagctatcccagacctactacaggatttttacgtggcgatttccaagcaccatctgcacggagtcattccagtttttggacagaatgcgggctgccggcaagttggaccagcctgatcgtttctctttcaaagaccaggataataacgagcccacaaacgacatggtggccttttcactggacggccctggaggaaattgtgtggccgtcctgaccctcttctctctgggcctcatttctgtggatgtcaggatcccggagcagatcatcgtggtagacagctcaatggtggagaatgaggtcatcaaaagcttggggaaggacggcagcctggaggatgacgaggatgaagaggatgacttggacgaaggtgtagggggcaagcgccggagcatggaggtgaaacctgcgcaagcctcccacaccaactacctgctgatgaggggctactactcccccggcatcgtcagcacccgcaacctcaaccccaacgacagcattgtggtcaactcctgccagatgaagttccagctccgctgcacccctgtgcccgcccggctcaggcccgctgccgctcctctggaagagctaacaatgggaacctcctgcctccctgatacgttcaccaagctgataaacccccaggaaaacacctgcagcttggaggagtttgtcctccagctggagctgtctgggtatagtcccgaagacctgactgctgccttggagatcttggaagccattatagccacgggttgttttgggattgacaaggaggagctgcgcagacggttctcggccttggagaaggcaggtggtgggcgcaccaggacattcgcagattgcatccaggccctcctggagcagcatcaggtgctggaggtcggtggcaacactgcgcgcctggtagccatgggctctgcctggccttggctcctgcactccgtgcggctgaaagacagagaagacgccgacatccagagagaagacccccaggccagacccctggaggggtcttccagtgaggacagcccccccgaggggcaggcacctccttctcacagcccccggggcaccaagaggcgcgccagctgggccagtgagaatggggagaccgacgccgagggcacccagatgacccctgccaagaggccagcgctccaggactcaaatttggcccccagccttgggcccggagctgaagatggggcagaagcccaggccccatctccacccccagctcttgaagacaccgctgcagcgggagcagcacaggaagaccaagagggtgggttcacagagagtttcggagctgccaacatctcccaggcagcacgggaaagggactgtgagagtgtctgcttcatcggccggccgtggcgtgtcgtggatggccacctgaaccttcctgtatgcaagggtatgatggaggccatgctgtaccacatcatgaccaggcctggcatccccgagagctccctgctgcgccactaccagggggtcctgcagcccgtcgccgtgctggagttgctccagggcctggagtccctcggctgcatccggaagcgctggctgagaaagccaaggcctgtctcgctcttctctacacccgtggtggaagaggtggaagtgccctccagcctggacgagagccccatggctttctatgagcccaccttggactgtaccctccggctgggccgtgtgttcccccacgaggtcaactggaacaagtggatccacctctaggacccctgtgggcgtcccctccctcccagccaccgcctgccacaccactcctgcctggtgctcggcagaccccactgtgccctggccttgggtctgccgagcctcctgcagcaggggacgggtgctttggccagagtcacagactgacacgtttcccactgtactggaactctggaaagaggggctccccgacctgcccatcccccaggctcttctgggccttccccttgggaactggcctcatcacactgggagttggtgcttcttgtctctgggtctccagagtttgccccgcctgtgcacacctcacattccagactctagccatctcggcaggatctcctggctccttgagtgcccaggtgccaccaagaggaagggccttgtgggatacaccttgcagaatagggatcggtgtgccccgctgcgaggggccccccatgggggctgtggcccctccgcaggcaggacatcccaacccctggctgggactgaaccacccagagcggagcggctcccttttcagccttgtgagtcacctggcaggccccagctgggctggctgtccgtgtccctcagcctggctggtgattccttgcaggccagaaatgaagagtccctgtaggttttggttttgtttgttttattttgttctttcaccttttttcctcattaaaaaaaaaaagtccctgtggagtgtacttatttattttttgattaaagggaagtaaaatgcaaaaaaattt

SEQ ID NO: 426202 - DNA, 2757 bp, Homo sapiens
  misc_feature (9)..(11): n is a, c, g, or t
gggggtatnnntatcgtcgatccaggcgctcgtgtcttcagatagcgtgagtccagagcatctactggctcctctacagagagtcatgatgaagtcctaccagtcattccagactttccgcctctatcgggagtacaaggaccacgttcttgtgaaggccttcatggagtgccagaagaggagcttggtcaaccggcgccgggtcaaccacacgctgggccccaagaagaaccgggccctccccttcgtgccaatgtcctaccagctatcccagacctactacaggatttttacgtggcgatttccaagcaccatctgcacggagtcattccagtttttggacagaatgcgggctgccggcaagttggaccagcctgatcgtttctctttcaaagaccaggataataacgagcccacaaacgacatggtggccttttcactggacggccctggaggaaattgtgtggccgtcctgaccctcttctctctgggcctcatttctgtggatgtcaggatcccggagcagatcatcgtggtagacagctcaatggtggagaatgaggtcatcaaaagcttggggaaggacggcagcctggaggatgacgaggatgaagaggatgacttggacgaaggtgtagggggcaagcgccggagcatggaggtgaaacctgcgcaagcctcccacaccaactacctgctgatgaggggctactactcccccggcatcgtcagcacccgcaacctcaaccccaacgacagcattgtggtcaactcctgccagatgaagttccagctccgctgcacccctgtgcccgcccggctcaggcccgctgccgctcctctggaagagctaacaatgggaacctcctgcctccctgatacgttcaccaagctgataaacccccaggaaaacacctgcagcttggaggagtttgtcctccagctggagctgtctgggtatagtcccgaagacctgactgctgccttggagatcttggaagccattatagccacgggttgttttgggattgacaaggaggagctgcgcagacggttctcggccttggagaaggcaggtggtgggcgcaccaggacattcgcagattgcatccaggccctcctggagcagcatcaggtgctggaggtcggtggcaacactgcgcgcctggtagccatgggctctgcctggccttggctcctgcactccgtgcggctgaaagacagagaagacgccgacatccagagagaagacccccaggccagacccctggaggggtcttccagtgaggacagcccccccgaggggcaggcacctccttctcacagcccccggggcaccaagaggcgcgccagctgggccagtgagaatggggagaccgacgccgagggcacccagatgacccctgccaagaggccagcgctccaggactcaaatttggcccccagccttgggcccggagctgaagatggggcagaagcccaggccccatctccacccccagctcttgaagacaccgctgcagcgggagcagcacaggaagaccaagagggtgggttcacagagagtttcggagctgccaacatctcccaggcagcacgggaaagggactgtgagagtgtctgcttcatcggccggccgtggcgtgtcgtggatggccacctgaaccttcctgtatgcaagggtatgatggaggccatgctgtaccacatcatgaccaggcctggcatccccgagagctccctgctgcgccactaccagggggtcctgcagcccgtcgccgtgctggagttgctccagggcctggagtccctcggctgcatccggaagcgctggctgagaaagccaaggcctgtctcgctcttctctacacccgtggtggaagaggtggaagtgccctccagcctggacgagagccccatggctttctatgagcccaccttggactgtaccctccggctgggccgtgtgttcccccacgaggtcaactggaacaagtggatccacctctaggacccctgtgggcgtcccctccctcccagccaccgcctgccacaccactcctgcctggtgctcggcagaccccactgtgccctggccttgggtctgccgagcctcctgcagcaggggacgggtgctttggccagagtcacagactgacacgtttcccactgtactggaactctggaaagaggggctccccgacctgcccatcccccaggctcttctgggccttccccttgggaactggcctcatcacactgggagttggtgcttcttgtctctgggtctccagagtttgccccgcctgtgcacacctcacattccagactctagccatctcggcaggatctcctggctccttgagtgcccaggtgccaccaagaggaagggccttgtgggatacaccttgcagaatagggatcggtgtgccccgctgcgaggggccccccatgggggctgtggcccctccgcaggcaggacatcccaacccctggctgggactgaaccacccagagcggagcggctcccttttcagccttgtgagtcacctggcaggccccagctgggctggctgtccgtgtccctcagcctggctggtgattccttgcaggccagaaatgaagagtccctgtaggttttggttttgtttgttttattttgttctttcaccttttttcctcattaaaaaaaaaaagtccctgtggagtgtacttatttattttttgattaaagggaagtaaaatgcaaaaaaattt

SEQ ID NO: 426203 - DNA, 3288 bp, Homo sapiens
atggaccaaggcccttggcggtgcgttgcgcacccccggggcgccgccgactgaagtagcaatggacgcgctggagtcgttgttggacgaagtcgctctggaggggctcgatggcctgtgtctgccagcgctgtggagccggctggagacgcgagtgccgcccttcccgctgcctttggaaccctgcacgcaggagtttctctggcgggccctcgccacgcacccgggcatcagcttctatgaggagcctcgggagcgacccgacctacagctccaggaccggtatgaagaaattgatttggaaactggaattttggagtctaggagggacccggtggctttggaggatgtctaccccattcatatgatcttagagaataaggatggcatccagggctcatgccgctactttaaggagaggaaaaacattaccaatgacatcagaaccaagtccttgcagcctcgctgtacaatggtggaagcctttgacaggtgggggaagaaactgatcatcgttgcctcccaggccatgcggtacagggccttgataggccaggagggggatcccgacctgaagctgcccgacttctcctactgcatcctggaacggctaggccggtccaggtggcaaggggagctccagcgagaccttcacaccactgctttcaaggttgatgctgggaagctgcactatcacagaaaaattttgaacaaaaacgggctgattacaatgcagtcccatgtgatccgattacccactggagcccagcaacactcaatcctcctcctactgaaccggtttcatgtggacaggaggagcaaatacgacatcctcatggagaagctttcggtcatgctgagcacacggactaaccacatagagacgctgggaaagctgagggaagagctggggctgtgcgaaaggacgtttaagcgtctgtaccagtatatgctgaacgccgggctagccaaggtggtgtctcttcgcttgcaagagatccaccctgaatgtggaccttgtaagacaaagaaagggaccgacgtcatggttcggtgcctcaagctgctgaaggaatttaaacggaatgaccatgatgatgacgaggacgaggaggtcatctccaagacagtgcctccagtggacattgtgttcgagcgggatatgctcacacagacctacgacctcattgagcgcagaggcacgaaaggaatttcccaagctgaaatccgagtggctatgaatgtgggaaaactagaagcaagaatgctgtgccgacttcttcaaagattcaaagttgtcaagggattcatggaagacgaaggtcggcagcgaaccaccaagtacatttcctgcgtgtttgcagaggagagcgacctaagccggcagtaccaaagagagaaggcccgcagcgagctcttgaccaccgtgagcctggcgtctatgcaggaggagtcgcttctgcctgaaggcgaggacaccttcctctctgagtcggacagtgaggaggagaggagcagcagcaagcggagaggcagagggtcccagaaagacacaagagcctctgcaaacctccggcccaagacccagcctcatcactccaccccaaccaagggtgggtggaaagttgtaaacctacacccattgaaaaagcagccgccctccttcccaggagctgctgaagagagagcctgccagagccttgccagcagggacagcctcttagataccagcagcgtctcagaacccaacgtgtcctttgtctcccactgtgcggacagcaacagtggtgacatagctgtgatcgaggaggtccggatggaaaacccaaaggagagtagcagttccctgaagactgggaggcacagctcaggccaagacaaaccacacgaaacttaccgactgctgaaacgcaggaatctgatcatagaagctgtcaccaatcttcgcttaatcgagagtttattcacgattcagaagatgatcatggatcaggagaagcaggaagtcggtgagttcagttccccaggccaagagcagctgagcggccaggcgcagcctccagagggctctgaagaccccagagggttcacagagagtttcggagctgccaacatctcccaggcagcacgggaaagggactgtgagagtgtctgcttcatcggccggccgtggcgtgtcgtggatggccacctgaaccttcctgtatgcaagggtatgatggaggccatgctgtaccacatcatgaccaggcctggcatccccgagagctccctgctgcgccactaccagggggtcctgcagcccgtcgccgtgctggagttgctccagggcctggagtccctcggctgcatccggaagcgctggctgagaaagccaaggcctgtctcgctcttctctacacccgtggtggaagaggtggaagtgccctccagcctggacgagagccccatggctttctatgagcccaccttggactgtaccctccggctgggccgtgtgttcccccacgaggtcaactggaacaagtggatccacctctaggacccctgtgggcgtcccctccctcccagccaccgcctgccacaccactcctgcctggtgctcggcagaccccactgtgccctggccttgggtctgccgagcctcctgcagcaggggacgggtgctttggccagagtcacagactgacacgtttcccactgtactggaactctggaaagaggggctccccgacctgcccatcccccaggctcttctgggccttccccttgggaactggcctcatcacactgggagttggtgcttcttgtctctgggtctccagagtttgccccgcctgtgcacacctcacattccagactctagccatctcggcaggatctcctggctccttgagtgcccaggtgccaccaagaggaagggccttgtgggatacaccttgcagaatagggatcggtgtgccccgctgcgaggggccccccatgggggctgtggcccctccgcaggcaggacatcccaacccctggctgggactgaaccacccagagcggagcggctcccttttcagccttgtgagtcacctggcaggccccagctgggctggctgtccgtgtccctcagcctggctggtgattccttgcaggccagaaatgaagagtccctgtaggttttggttttgtttgttttattttgttctttcaccttttttcctcattaaaaaaaaaaagtccctgtggagtgtacttatttattttttgattaaagggaagtaaaatgcaaaaaaattt

SEQ ID NO: 426204 - DNA, 4622 bp, Homo sapiens
atggaccaaggcccttggcggtgcgttgcgcacccccggggcgccgccgactgaagtagcaatggacgcgctggagtcgttgttggacgaagtcgctctggaggggctcgatggcctgtgtctgccagcgctgtggagccggctggagacgcgagtgccgcccttcccgctgcctttggaaccctgcacgcaggagtttctctggcgggccctcgccacgcacccgggcatcagcttctatgaggagcctcgggagcgacccgacctacagctccaggaccggtatgaagaaattgatttggaaactggaattttggagtctaggagggacccggtggctttggaggatgtctaccccattcatatgatcttagagaataaggatggcatccagggctcatgccgctactttaaggagaggaaaaacattaccaatgacatcagaaccaagtccttgcagcctcgctgtacaatggtggaagcctttgacaggtgggggaagaaactgatcatcgttgcctcccaggccatgcggtacagggccttgataggccaggagggggatcccgacctgaagctgcccgacttctcctactgcatcctggaacggctaggccggtccaggtggcaaggggagctccagcgagaccttcacaccactgctttcaaggttgatgctgggaagctgcactatcacagaaaaattttgaacaaaaacgggctgattacaatgcagtcccatgtgatccgattacccactggagcccagcaacactcaatcctcctcctactgaaccggtttcatgtggacaggaggagcaaatacgacatcctcatggagaagctttcggtcatgctgagcacacggactaaccacatagagacgctgggaaagctgagggaagagctggggctgtgcgaaaggacgtttaagcgtctgtaccagtatatgctgaacgccgggctagccaaggtggtgtctcttcgcttgcaagagatccaccctgaatgtggaccttgtaagacaaagaaagggaccgacgtcatggttcggtgcctcaagctgctgaaggaatttaaacggaatgaccatgatgatgacgaggacgaggaggtcatctccaagacagtgcctccagtggacattgtgttcgagcgggatatgctcacacagacctacgacctcattgagcgcagaggcacgaaaggaatttcccaagctgaaatccgagtggctatgaatgtgggaaaactagaagcaagaatgctgtgccgacttcttcaaagattcaaagttgtcaagggattcatggaagacgaaggtcggcagcgaaccaccaagtacatttcctgcgtgtttgcagaggagagcgacctaagccggcagtaccaaagagagaaggcccgcagcgagctcttgaccaccgtgagcctggcgtctatgcaggaggagtcgcttctgcctgaaggcgaggacaccttcctctctgagtcggacagtgaggaggagaggagcagcagcaagcggagaggcagagggtcccagaaagacacaagagcctctgcaaacctccggcccaagacccagcctcatcactccaccccaaccaagggtgggtggaaagttgtaaacctacacccattgaaaaagcagccgccctccttcccaggagctgctgaagagagagcctgccagagccttgccagcagggacagcctcttagataccagcagcgtctcagaacccaacgtgtcctttgtctcccactgtgcggacagcaacagtggtgacatagctgtgatcgaggaggtccggatggaaaacccaaaggagagtagcagttccctgaagactgggaggcacagctcaggccaagacaaaccacacgaaacttaccgactgctgaaacgcaggaatctgatcatagaagctgtcaccaatcttcgcttaatcgagagtttattcacgattcagaagatgatcatggatcaggagaagcaggaaggcgtgtccaccaagtgctgcaagaagtccattgtccgcttggtgcggaacctgtctgaggaaggtctcttgcgattgtatcggaccactgtcattcaagatggcatcaagaagaaggtggatctggtggtgcacccgtccatggaccagaacgaccctctagtgagaagtgccatcgagcaggtccgcttccggatctccaattcaagcacagccaacagggttaaaacttcccagcctccagtgccccaaggggaggcagaagaagacagtcaaggaaaagagggcccaagtggatcaggggactctcagctgagtgcttcctctagatcagaaagtggacggatgaaaaaaagtgataataaaatgggcataaccccgcttagaaattatcaccccattgtagttcccggactggggcgttctctaggatttctgcccaaaatgcctcgcctgcgggtggtccacatgtttctgtggtacctcatctacgggcaccctgccagcaacaccgtggagaagccaagcttcatcagtgaacggagaacgataaagcaggagtcaggcagggcaggcgtccggccgtcctcctctggaagtgcctgggaggcctgctctgaagccccatctaaaggcagccaagatggtgtcacctgggaggctgaagtggagcttgccacggagacagtgtatgtcgacgatgcctcgtggatgcgctacatccccccaatcccagtccacagggacttcggctttggctgggctctcgtcagcgacatcctcctctgccttcccctctccatcttcatccagattgtgcaagtcagctacaaggtggacaacctggaggaatttctgaacgacccgctgaagaagcacacgctgatccgctttctccccaggcccattcggcagcagcttctgtacaagaggcgttacattttttcggtggtggagaaccttcagaggctgtgctacatggggctgctacagtttggtcccacggaaaagtttcaggataaagatcaggtctttatcttcttgaagaagaatgcagtcattgttgacactaccatctgcgacccacattacaacctggcccgcagcagccggcccttcgagaggcgcctctatgtcctgaactcaatgcaggatgtggaaaactactggtttgacctgcagtgcgtctgcctcaacaccccactaggcgtggtgcgctgcccgcgcgtcaggaagaacagcagcacagaccagggcagcgacgaggagggcagcctgcagaaggagcaggagagcgccatggacaagcacaacctggagcgcaagtgcgccatgctggagtacaccactggaagccgtgaggtggtggatgaaggcttgatccctggagatgggctgggtgccgcagggctcgattccagcttctacggacacctcaagcgcaactggatctggaccagctacatcatcaaccaggccaaaaaggagaacactgccgcagagaatggactcacagtgaggctccagacatttctgtccaagcgcccaatgcccctcagtgccagaggcaacagcaggttgaatatttggggggaagcaagagtaggctccgagctctgtgctggctgggaagagcagtttgaggtggaccgagagccctcgctggaccgaaaccggagagtgaggggtgggaaaagccagaagcggaagcggctgaagaaggaccctgggaagaagatcaagagaaagaagaaaggagagttcccaggagaaaaaagcaaaaggctgcgctaccatgatgaagccgaccagagtgccctgcagcggatgacgcggcttcgtgtcacctggtctatgcaggaggatgggctgcttgtgctgtgccgcattgccagcaatgtcctcaacaccaaggtgaagggcccatttgtcacctggcaggtggtacgggacattttgcatgccacgtttgaagagtctttggataaaacatctcattccgttggacgaagagctcgctacatagtcaaaaacccacaggcctatctcaactataaagtgtgcctggccgaggtgtaccaggataaagcacttgttggagatttcatgaatcgaagaggtgactatgatgacccaaaggtttgtgccaacgagtttaaagaatttgtggagaagcttaaagaaaagttcagttcagccctaaggaattctaaccttgaaatcccagacacactccaggagctgttcgccaggtaagccgtttctgggatggttccatgtggccctcgcagggcaagaagaaaaggccagccctgtctcccttatcagcaggtccgggaagcgcacagcacctgcctggctgcatttggccttgcagtggccctcctgtctctcctctcatgggtgacttgaacacagaatgggacctagcaccctgccgggcatttatgttcattctcccattggtccttcaggcttccttgtttggttggtgtactttttgctaggtttgcttactttacctttgaggaaattcctatgtaagtaacgtgcccaaggtcacagtgcttgtaagtaccagggccaggatttgaacataggagggtctgtaaccact

SEQ ID NO: 426205 - DNA, 1859 bp, Homo sapiens
gtggttcacgagcagccagagagaaagagatgctgctccagggcacagggctagcaaggggcagccccggggctaggagccaggcctgcctcgtgggcctgggctgctcagggcactcaacccgccagtcaggggaggccactccactcgtcccccgtcaccagcgtggaggatcccgagctccccacagaccccgcgtgtctcctgcctccccaggccctcctggagcagcatcaggtgctggaggtcggtggcaacactgcgcgcctggtagccatgggctctgcctggccttggctcctgcactccgtgcggctgaaagacagagaagacgccgacatccagagagaagacccccaggccagacccctggaggggtcttccagtgaggacagcccccccgaggggcaggcacctccttctcacagcccccggggcaccaagaggcgcgccagctgggccagtgagaatggggagaccgacgccgagggcacccagatgacccctgccaagaggccagcgctccaggactcaaatttggcccccagccttgggcccggagctgaagatggggcagaagcccaggccccatctccacccccagctcttgaagacaccgctgcagcgggagcagcacaggaagaccaagagggtgggttcacagagagtttcggagctgccaacatctcccaggcagcacgggaaagggactgtgagagtgtctgcttcatcggccggccgtggcgtgtcgtggatggccacctgaaccttcctgtatgcaagggtatgatggaggccatgctgtaccacatcatgaccaggcctggcatccccgagagctccctgctgcgccactaccagggggtcctgcagcccgtcgccgtgctggagttgctccagggcctggagtccctcggctgcatccggaagcgctggctgagaaagccaaggcctgtctcgctcttctctacacccgtggtggaagaggtggaagtgccctccagcctggacgagagccccatggctttctatgagcccaccttggactgtaccctccggctgggccgtgtgttcccccacgaggtcaactggaacaagtggatccacctctaggacccctgtgggcgtcccctccctcccagccaccgcctgccacaccactcctgcctggtgctcggcagaccccactgtgccctggccttgggtctgccgagcctcctgcagcaggggacgggtgctttggccagagtcacagactgacacgtttcccactgtactggaactctggaaagaggggctccccgacctgcccatcccccaggctcttctgggccttccccttgggaactggcctcatcacactgggagttggtgcttcttgtctctgggtctccagagtttgccccgcctgtgcacacctcacattccagactctagccatctcggcaggatctcctggctccttgagtgcccaggtgccaccaagaggaagggccttgtgggatacaccttgcagaatagggatcggtgtgccccgctgcgaggggccccccatgggggctgtggcccctccgcaggcaggacatcccaacccctggctgggactgaaccacccagagcggagcggctcccttttcagccttgtgagtcacctggcaggccccagctgggctggctgtccgtgtccctcagcctggctggtgattccttgcaggccagaaatgaagagtccctgtaggttttggttttgtttgttttattttgttctttcaccttttttcctcattaaaaaaaaaaagtccctgtggagtgtacttatttattttttgattaaagggaagtaaaatgcaaaaaaattt

SEQ ID NO: 426206 - DNA, 3288 bp, Homo sapiens
atggaccaaggcccttggcggtgcgttgcgcacccccggggcgccgccgactgaagtagcaatggacgcgctggagtcgttgttggacgaagtcgctctggaggggctcgatggcctgtgtctgccagcgctgtggagccggctggagacgcgagtgccgcccttcccgctgcctttggaaccctgcacgcaggagtttctctggcgggccctcgccacgcacccgggcatcagcttctatgaggagcctcgggagcgacccgacctacagctccaggaccggtatgaagaaattgatttggaaactggaattttggagtctaggagggacccggtggctttggaggatgtctaccccattcatatgatcttagagaataaggatggcatccagggctcatgccgctactttaaggagaggaaaaacattaccaatgacatcagaaccaagtccttgcagcctcgctgtacaatggtggaagcctttgacaggtgggggaagaaactgatcatcgttgcctcccaggccatgcggtacagggccttgataggccaggagggggatcccgacctgaagctgcccgacttctcctactgcatcctggaacggctaggccggtccaggtggcaaggggagctccagcgagaccttcacaccactgctttcaaggttgatgctgggaagctgcactatcacagaaaaattttgaacaaaaacgggctgattacaatgcagtcccatgtgatccgattacccactggagcccagcaacactcaatcctcctcctactgaaccggtttcatgtggacaggaggagcaaatacgacatcctcatggagaagctttcggtcatgctgagcacacggactaaccacatagagacgctgggaaagctgagggaagagctggggctgtgcgaaaggacgtttaagcgtctgtaccagtatatgctgaacgccgggctagccaaggtggtgtctcttcgcttgcaagagatccaccctgaatgtggaccttgtaagacaaagaaagggaccgacgtcatggttcggtgcctcaagctgctgaaggaatttaaacggaatgaccatgatgatgacgaggacgaggaggtcatctccaagacagtgcctccagtggacattgtgttcgagcgggatatgctcacacagacctacgacctcattgagcgcagaggcacgaaaggaatttcccaagctgaaatccgagtggctatgaatgtgggaaaactagaagcaagaatgctgtgccgacttcttcaaagattcaaagttgtcaagggattcatggaagacgaaggtcggcagcgaaccaccaagtacatttcctgcgtgtttgcagaggagagcgacctaagccggcagtaccaaagagagaaggcccgcagcgagctcttgaccaccgtgagcctggcgtctatgcaggaggagtcgcttctgcctgaaggcgaggacaccttcctctctgagtcggacagtgaggaggagaggagcagcagcaagcggagaggcagagggtcccagaaagacacaagagcctctgcaaacctccggcccaagacccagcctcatcactccaccccaaccaagggtgggtggaaagttgtaaacctacacccattgaaaaagcagccgccctccttcccaggagctgctgaagagagagcctgccagagccttgccagcagggacagcctcttagataccagcagcgtctcagaacccaacgtgtcctttgtctcccactgtgcggacagcaacagtggtgacatagctgtgatcgaggaggtccggatggaaaacccaaaggagagtagcagttccctgaagactgggaggcacagctcaggccaagacaaaccacacgaaacttaccgactgctgaaacgcaggaatctgatcatagaagctgtcaccaatcttcgcttaatcgagagtttattcacgattcagaagatgatcatggatcaggagaagcaggaaggcgtgtccaccaagtgctgcaagaagtccattgtccgcttggtgcggaacctgtctgaggaaggtctcttgcgattgtatcggaccactgtcattcaagatggcatcaagaagaaggtggatctggtggtgcacccgtccatggaccagaacgaccctctagtgagaagtgccatcgagcaggtccgcttccggatctccaattcaagcacagccaacagggttaaaacttcccagcctccagtgccccaaggggaggcagaagaagacagtcaaggaaaagagggcccaagtggatcaggggactctcagctgagtgcttcctctagatcagaaagtggacggatgaaaaaaagtgataataaaatgggcataaccccgcttagaaattatcaccccattgtagttcccggactggggcgttctctaggatttctgcccaaaatgcctcgcctgcgggtggtccacatgtttctgtggtacctcatctacgggcaccctgccagcaacaccgtggagaagccaagcttcatcagtgaacggagaacgataaagcaggagtcaggcagggcaggcgtccggccgtcctcctctggaagtgcctgggaggcctgctctgaagccccatctaaaggcagccaagatggtgtcacctgggaggctgaagtggagcttgccacggagacagtgtatgtcgacgatgcctcgtggatgcgctacatccccccaatcccagtccacagggacttcggctttggctgggctctcgtcagcgacatcctcctctgccttcccctctccatcttcatccagattgtgcaagtcagctacaaggtggacaacctggaggaatttctgaacgacccgctgaagaagcacacgctgatccgctttctccccaggcccattcggcagcagcttctgtacaagaggcgttacattttttcggtggtggagaaccttcagaggctgtgctacatggggctgctacagtttggtcccacggaaaagtttcaggataaagatcaggtctttatcttcttgaagaagaatgcagtcattgttgacactaccatctgcgacccacattacaacctggcccgcagcagccggcccttcgagaggcgcctctatgtcctgaactcaatgcaggatgtggaaaactactggtttgacctgcagtgcgtctgcctcaacaccccactaggcgtggtgcctgcccgcgcgtcaggaagaacagcagcaccacgacgacgaattccgcaccacaacggatacgccac

SEQ ID NO: 426207 - DNA, 2840 bp, Homo sapiens
atggaccaaggcccttggcggtgcgttgcgcacccccggggcgccgccgactgaagtagcaatggacgcgctggagtcgttgttggacgaagtcgctctggaggggctcgatggcctgtgtctgccagcgctgtggagccggctggagacgcgagtgccgcccttcccgctgcctttggaaccctgcacgcaggagtttctctggcgggccctcgccacgcacccgggcatcagcttctatgaggagcctcgggagcgacccgacctacagctccaggaccggtatgaagaaattgatttggaaactggaattttggagtctaggagggacccggtggctttggaggatgtctaccccattcatatgatcttagagaataaggatggcatccagggctcatgccgctactttaaggagaggaaaaacattaccaatgacatcagaaccaagtccttgcagcctcgctgtacaatggtggaagcctttgacaggtgggggaagaaactgatcatcgttgcctcccaggccatgcggtacagggccttgataggccaggagggggatcccgacctgaagctgcccgacttctcctactgcatcctggaacggctaggccggtccaggtggcaaggggagctccagcgagaccttcacaccactgctttcaaggttgatgctgggaagctgcactatcacagaaaaattttgaacaaaaacgggctgattacaatgcagtcccatgtgatccgattacccactggagcccagcaacactcaatcctcctcctactgaaccggtttcatgtggacaggaggagcaaatacgacatcctcatggagaagctttcggtcatgctgagcacacggactaaccacatagagacgctgggaaagctgagggaagagctggggctgtgcgaaaggacgtttaagcgtctgtaccagtatatgctgaacgccgggctagccaaggtggtgtctcttcgcttgcaagagatccaccctgaatgtggaccttgtaagacaaagaaagggaccgacgtcatggttcggtgcctcaagctgctgaaggaatttaaacggaatgaccatgatgatgacgaggacgaggaggtcatctccaagacagtgcctccagtggacattgtgttcgagcgggatatgctcacacagacctacgacctcattgagcgcagaggcacgaaaggaatttcccaagctgaaatccgagtggctatgaatgtgggaaaactagaagcaagaatgctgtgccgacttcttcaaagattcaaagttgtcaagggattcatggaagacgaaggtcggcagcgaaccaccaagtacatttcctgcgtgtttgcagaggagagcgacctaagccggcagtaccaaagagagaaggcccgcagcgagctcttgaccaccgtgagcctggcgtctatgcaggaggagtcgcttctgcctgaaggcgaggacaccttcctctctgagtcggacagtgaggaggagaggagcagcagcaagcggagaggcagagggtcccagaaagacacaagagcctctgcaaacctccggcccaagacccagcctcatcactccaccccaaccaagggtgggtggaaagttgtaaacctacacccattgaaaaagcagccgccctccttcccaggagctgctgaagagagagcctgccagagccttgccagcagggacagcctcttagataccagcagcgtctcagaacccaacgtgtcctttgtctcccactgtgcggacagcaacagtggtgacatagctgtgatcgaggaggtccggatggaaaacccaaaggagagtagcagttccctgaagactgggaggcacagctcaggccaagacaaaccacacgaaacttaccgactgctgaaacgcaggaatctgatcatagaagctgtcaccaatcttcgcttaatcgagagtttattcacgattcagaagatgatcatggatcaggagaagcaggaagtcggtgagttcagttccccaggccaagagcagctgagcggccaggcgcagcctccagagggctctgaagaccccagagggttcacagagagtttcggagctgccaacatctcccaggcagcacgggaaagggactgtgagagtgtctgcttcatcggccggccgtggcgtgtcgtggatggccacctgaaccttcctgtatgcaagggtatgatggaggccatgctgtaccacatcatgaccaggcctggcatccccgagagctccctgctgcgccactaccagggggtcctgcagcccgtcgccgtgctggagttgctccagggcctggagtccctcggctgcatccggaagcgctggctgagaaagccaaggcctgtctcgctcttctctacacccgtggtggaagaggtggaagtgccctccagcctggacgagagccccatggctttctatgagcccaccttggactgtaccctccggctgggccgtgtgttcccccacgaggtcaactggaacaagtggatccacctctaggacccctgtgggcgtcccctccctcccagccaccgcctgccacaccactcctgcctggtgctcggcagaccccactgtgccctggccttgggtctgccgagcctcctgcagcaggggacgggtgctggcgagtccgatgcccgtccctgctggacctggaggggccccctgcctcccgctttggctcctggaagcctcccggtggggttggccggcccggcgcggcccctctcccggctgccttcgcccaagggggcccaaggcccgccgggcgcccgcactccgcggtcgtgtttaa

SEQ ID NO: 426208 - DNA, 512 bp, Homo sapiens
aaaaagtagttagaaagaataaagaagacctagtatttgacagcacaacagggtgaatataatcataatgactgcacattttaaaataatgaaaagagtagaattggattgtaacacaaaggagaaatgtttgaggggatggataccccgtttaccctgatgtggttattgcatgttgcatgcctgtaccaaagtatctcatgtaccctgatatggtgtggttctgcatctccacccaaatctcacctcgaattgtaataatccccacatgtcaaaagtgggaccaggtggtgataattgaatcatgggggcagtttcccatatactgttttcatgacagtgagtcctcatgagatcagatggttttataagaggcttcccccttcgctcagcattcattctctctcctgacaccatgtgaagaggtgccttctgccatgattgtaagtttcctgaggcctccccagccatgtggaactgtgagtcaattaaatatctttcctttataaatt

SEQ ID NO: 426209 - DNA, 2580 bp, Homo sapiens
tcccccctcttaaaacacgatgcctcccaggatgctagtggcaccactgccactgcatttcctgttggcagcagtgagcagtgaaaaccgaagcggcagaaggcagtggcagcaggcagtggcccaggcagaaatagctcccgcgcgattcactggagccttccccgggccctggtcccggctaccgggactcgcgcgtccggatctcaaaagcggcagaggccaccgaagggacaggaagcactttggtccagaccacactcccggcacagtgcggaaagagccggcgggagccactctgatcccggacgcctcagcgcccccttgggcttgggcttgccctcgggccggggaaggctgaccgcgatgccaggacgcgctcccctccgcaccgtcccgggcgccctgggtgcctggctgctgggcggcctctgggcctggaccctgtgcggcctgtgcagcctgggggcggtgggagccccgcgcccgtgccaggcgccgcagcagtgggaggggcgccaggttatgtaccagcaaagtagcgggcgcaacagccgcgccctgctctcctacgacgggctcaaccagcgcgtgcgggtgctggacgagaggaaggcgctgatcccctgcaagagattatttgaatatattttgctgtataaggatggagtgatgtttcagattgaccaagccaccaagcagtgctcaaagatgaccctgacacagccctgggatcctcttgacattcctcaaaactccacctttgaagaccagtactccattggggggcctcaggagcagatcaccgtccaggagtggtcggacagaaagtcagctagatcctatgaaacctggattggcatctatacagtcaaggattgctatcctgtccaggaaacctttaccataaactacagtgtgatattgtctacgcggttttttgacatccagctgggtattaaagacccctcggtgtttacccctccaagcacgtgccagatggcccaactggagaagatgagcgaagactgctcctggtgagcctgtgcatagggaagcggcagcatcggatgtcagccccctgcggccccagctggagatggatatgagactagtcaagatgtgaatgctaattggagagaaatataattttaggaagatgcacattgatgtggggttttgatgtgtctgattttgactactcaagctctgtttacagaagaaaattgaatggcgagggtgtggccatatgaactgactagatggctaatatggacactttgggtatttctaatgcctgttcagggctggttttctgcatgcacgggtatacacataatgcagtgccatgcacatagggaagggtcagtaagagaagtttgccttggcagcaagtatttattgttgacattattcagaattagtgataataaaaagcagagtgattttggtcaattttattattaattcttaaattccctgcagagaatgccccctttattgctgcaccagggtgggcattgctcccactgagccctactccaccctgtccctgcactcccttggttgccaaaaaaatgataacttaaatcccttccagacttaagaattttatggcatggcccaattgatataaacatttagaaggaaatgaaaagctaaaataggaagtaattattcctctaaagaaacattttgagcaaggcagtttagagaatcctaatgtctacactggcatagcacgagccatgtaagcttcttttttttctatgcaagagtattgatgtatgtgctgaatcttcacagacttgtcaatacacaggcagtattctaaaatagcactgaacagggagtcaggagactattgtctcctaaacccaggactagagttccctcgtactgtcactcctttggtcattaaatgcactgggcttgcccgcactttggccttcctagaacgctgcttcataacctctctgtctgacttctgcatctccttccaggtcagctcattcacaagagttgctcccaagcctggatgagttgcaccttgcatcttgagcatgcatttctcacaataattattaagctgtgtgataatttctgctttcaggacactcatccattatcttggctgtgagctccttgggtacgggtaccttgtatgtttaattttatatccctagcacaaagcaagtgcctggcacatagtcagtgccctaagtatttgtagagtgaagaatgccagcctctcttgtccctggtttccttatgtgttgaatgtggttgagtttgtccattgctagggagagacttccagtaataaaatttactattctagatgcttctactgttatgttttatctgcccatttatctttcttagttaccaggagaaatgtgtgacacctatattataatgaaaacaatcttattacttatagtttatctatattaaacaaatttaattgcatttaaagcattctttgatattgttgcttttgcaataaatatggataatcttggttataagggagttaaaacaatgctgtaataaataaagtgtttcatgtgatcaaaa

SEQ ID NO: 426210 - DNA, 2593 bp, Homo sapiens
tcccccctcttaaaacacgatgcctcccaggatgctagtggcaccactgccactgcatttcctgttggcagcagtgagcagtgaaaaccgaagcggcagaaggcagtggcagcaggcagtggcagcaggcagtggcccaggcagaaatagctcccgcgcgattcactggagccttccccgggccctggtcccggctaccgggactcgcgcgtccggatctcaaaagcggcagaggccaccgaagggacaggaagcactttggtccagaccacactcccggcacagtgcggaaagagccggcgggagccactctgatcccggacgcctcagcgcccccttgggcttgggcttgccctcgggccggggaaggctgaccgcgatgccaggacgcgctcccctccgcaccgtcccgggcgccctgggtgcctggctgctgggcggcctctgggcctggaccctgtgcggcctgtgcagcctgggggcggtgggagccccgcgcccgtgccaggcgccgcagcagtgggaggggcgccaggttatgtaccagcaaagtagcgggcgcaacagccgcgccctgctctcctacgacgggctcaaccagcgcgtgcgggtgctggacgagaggaaggcgctgatcccctgcaagagattatttgaatatattttgctgtataaggatggagtgatgtttcagattgaccaagccaccaagcagtgctcaaagatgaccctgacacagccctgggatcctcttgacattcctcaaaactccacctttgaagaccagtactccattggggggcctcaggagcagatcaccgtccaggagtggtcggacagaaagtcagctagatcctatgaaacctggattggcatctatacagtcaaggattgctatcctgtccaggaaacctttaccataaactacagtgtgatattgtctacgcggttttttgacatccagctgggtattaaagacccctcggtgtttacccctccaagcacgtgccagatggcccaactggagaagatgagcgaagactgctcctggtgagcctgtgcatagggaagcggcagcatcggatgtcagccccctgcggccccagctggagatggatatgagactagtcaagatgtgaatgctaattggagagaaatataattttaggaagatgcacattgatgtggggttttgatgtgtctgattttgactactcaagctctgtttacagaagaaaattgaatggcgagggtgtggccatatgaactgactagatggctaatatggacactttgggtatttctaatgcctgttcagggctggttttctgcatgcacgggtatacacataatgcagtgccatgcacatagggaagggtcagtaagagaagtttgccttggcagcaagtatttattgttgacattattcagaattagtgataataaaaagcagagtgattttggtcaattttattattaattcttaaattccctgcagagaatgccccctttattgctgcaccagggtgggcattgctcccactgagccctactccaccctgtccctgcactcccttggttgccaaaaaaatgataacttaaatcccttccagacttaagaattttatggcatggcccaattgatataaacatttagaaggaaatgaaaagctaaaataggaagtaattattcctctaaagaaacattttgagcaaggcagtttagagaatcctaatgtctacactggcatagcacgagccatgtaagcttcttttttttctatgcaagagtattgatgtatgtgctgaatcttcacagacttgtcaatacacaggcagtattctaaaatagcactgaacagggagtcaggagactattgtctcctaaacccaggactagagttccctcgtactgtcactcctttggtcattaaatgcactgggcttgcccgcactttggccttcctagaacgctgcttcataacctctctgtctgacttctgcatctccttccaggtcagctcattcacaagagttgctcccaagcctggatgagttgcaccttgcatcttgagcatgcatttctcacaataattattaagctgtgtgataatttctgctttcaggacactcatccattatcttggctgtgagctccttgggtacgggtaccttgtatgtttaattttatatccctagcacaaagcaagtgcctggcacatagtcagtgccctaagtatttgtagagtgaagaatgccagcctctcttgtccctggtttccttatgtgttgaatgtggttgagtttgtccattgctagggagagacttccagtaataaaatttactattctagatgcttctactgttatgttttatctgcccatttatctttcttagttaccaggagaaatgtgtgacacctatattataatgaaaacaatcttattacttatagtttatctatattaaacaaatttaattgcatttaaagcattctttgatattgttgcttttgcaataaatatggataatcttggttataagggagttaaaacaatgctgtaataaataaagtgtttcatgtgatcaaaa

SEQ ID NO: 426211 - DNA, 752 bp, Homo sapiens
tcccccctcttaaaacacgatgcctcccaggatgctagtggcaccactgccactgcatttcctgttggcagcagtgagcagtgaaaaccgaagcggcagaaggcagtggcagcaggcagtggcagcaggcagtggcccaggcagaaatagctcccgcgcgattcactggagccttccccgggccctggtcccggctaccgggactcgcgcgtccggatctcaaaagcggcagaggccaccgaagggacaggaagcactttggtccagaccacactcccggcacagtgcggaaagagccggcgggagccactctgatcccggacgcctcagcgcccccttgggcttgggcttgccctcgggccggggaaggctgaccgcgatgccaggacgcgctcccctccgcaccgtcccgggcgccctgggtgcctggctgctgggcggcctctgggcctggaccctgtgcggcctgtgcagcctgggggcggtgggagccccgcgcccgtgccaggcgccgcagcagtgggaggggcgccaggttatgtaccagcaaagtagcgggcgcaacagccgcgccctgctctcctacgacgggctcaaccagcgcgtgcgggtgctggacgagaggaaggcgctgatcccctgcaagagtgcacctggagaatgatgccatttcaaggactcagtgctggttgctactgctggcagattgggcatccatcagcggctgtggccaggctgaccttgttgtgagt

SEQ ID NO: 426212 - DNA, 414 bp, Homo sapiens
ctcttgtccctggtttccttatgtgttgaatgtggttgagtttgtccattgctagggagagacttccagtaataaaatttactattctagatgcttctactgttatgttttatctgcccatttatctttcttagttaccaggagaaatgtgtgacacctatattataatgaaaacaatcttattacttatagtttatctatattaaacaaatttaattgcatttaaagcattctttgatattgttgcttttgcaataaatatggataatcttggttataagggagttaaaacaatgctgtaataaataaagtgtttcatgtgatcaaaatcaaatttgttatcctctctcaaaagcctgctctccctcttaccttccctaaactccagtgtccatttgccaaggccagaagctt

SEQ ID NO: 426213 - DNA, 2693 bp, Homo sapiens
  misc_feature (2602)..(2603): n is a, c, g, or t
tcccccctcttaaaacacgatgcctcccaggatgctagtggcaccactgccactgcatttcctgttggcagcagtgagcagtgaaaaccgaagcggcagaaggcagtggcagcaggcagtggcagcaggcagtggcccaggcagaaatagctcccgcgcgattcactggagccttccccgggccctggtcccggctaccgggactcgcgcgtccggatctcaaaagcggcagaggccaccgaagggacaggaagcactttggtccagaccacactcccggcacagtgcggaaagagccggcgggagccactctgatcccggacgcctcagcgcccccttgggcttgggcttgccctcgggccggggaaggctgaccgcgatgccaggacgcgctcccctccgcaccgtcccgggcgccctgggtgcctggctgctgggcggcctctgggcctggaccctgtgcggcctgtgcagcctgggggcggtgggagccccgcgcccgtgccaggcgccgcagcagtgggaggggcgccaggttatgtaccagcaaagtagcgggcgcaacagccgcgccctgctctcctacgacgggctcaaccagcgcgtgcgggtgctggacgagaggaaggcgctgatcccctgcaagagattatttgaatatattttgctgtataaggatggagtgatgtttcagattgaccaagccaccaagcagtgctcaaagatgaccctgacacagccctgggatcctcttgacattcctcaaaactccacctttgaagaccagtactccattggggggcctcaggagcagatcaccgtccaggagtggtcggacagaaagtcagctagatcctatgaaacctggattggcatctatacagtcaaggattgctatcctgtccaggaaacctttaccataaactacagtgtgatattgtctacgcggttttttgacatccagctgggtattaaagacccctcggtgtttacccctccaagcacgtgccagatggcccaactggagaagatgagcgaagactgctcctggtgagcctgtgcatagggaagcggcagcatcggatgtcagccccctgcggccccagctggagatggatatgagactagtcaagatgtgaatgctaattggagagaaatataattttaggaagatgcacattgatgtggggttttgatgtgtctgattttgactactcaagctctgtttacagaagaaaattgaatggcgagggtgtggccatatgaactgactagatggctaatatggacactttgggtatttctaatgcctgttcagggctggttttctgcatgcacgggtatacacataatgcagtgccatgcacatagggaagggtcagtaagagaagtttgccttggcagcaagtatttattgttgacattattcagaattagtgataataaaaagcagagtgattttggtcaattttattattaattcttaaattccctgcagagaatgccccctttattgctgcaccagggtgggcattgctcccactgagccctactccaccctgtccctgcactcccttggttgccaaaaaaatgataacttaaatcccttccagacttaagaattttatggcatggcccaattgatataaacatttagaaggaaatgaaaagctaaaataggaagtaattattcctctaaagaaacattttgagcaaggcagtttagagaatcctaatgtctacactggcatagcacgagccatgtaagcttcttttttttctatgcaagagtattgatgtatgtgctgaatcttcacagacttgtcaatacacaggcagtattctaaaatagcactgaacagggagtcaggagactattgtctcctaaacccaggactagagttccctcgtactgtcactcctttggtcattaaatgcactgggcttgcccgcactttggccttcctagaacgctgcttcataacctctctgtctgacttctgcatctccttccaggtcagctcattcacaagagttgctcccaagcctggatgagttgcaccttgcatcttgagcatgcatttctcacaataattattaagctgtgtgataatttctgctttcaggacactcatccattatcttggctgtgagctccttgggtacgggtaccttgtatgtttaattttatatccctagcacaaagcaagtgcctggcacatagtcagtgccctaagtatttgtagagtgaagaatgccagcctctcttgtccctggtttccttatgtgttgaatgtggttgagtttgtccattgctagggagagacttccagtaataaaatttactattctagatgcttctactgttatgttttatctgcccatttatctttcttagttaccaggagaaatgtgtgacacctatattataatgaaaacaatcttattacttatagtttatctatattaaacaaatttaattgcatttaaagcattctttgatattgttgcttttgcaataaatatggataatcttggttataagggagttaaaacaatgctgtaataaataaagtgtttcatgtgatcaaaaaaaaaaaannttaacctatttaccctctctcttcccaaattatattctattaaaaaacctttgtggccgctttggccaatcattttccttaccttttttc

SEQ ID NO: 426214 - DNA, 2384 bp, Homo sapiens
tcccccctcttaaaacacgatgcctcccaggatgctagtggcaccactgccactgcatttcctgttggcagcagtgagcagtgaaaaccgaagcggcagaaggcagtggcagcaggcagtggcagcaggcagtggcccaggcagaaatagctcccgcgcgattcactggagccttccccgggccctggtcccggctaccgggactcgcgcgtccggatctcaaaagcggcagaggccaccgaagggacaggaagcactttggtccagaccacactcccggcacagtgcggaaagagccggcgggagccactctgatcccggacgcctcagcgcccccttgggcttgggcttgccctcgggccggggaaggctgaccgcgatgccaggacgcgctcccctccgcaccgtcccgggcgccctgggtgcctggctgctgggcggcctctgggcctggaccctgtgcggcctgtgcagcctgggggcggtgggagccccgcgcccgtgccaggcgccgcagcagtgggaggggcgccaggttatgtaccagcaaagtagcgggcgcaacagccgcgccctgctctcctacgacgggctcaaccagcgcgtgcgggtgctggacgagaggaaggcgctgatcccctgcaagagatgaaacctggattggcatctatacagtcaaggattgctatcctgtccaggaaacctttaccataaactacagtgtgatattgtctacgcggttttttgacatccagctgggtattaaagacccctcggtgtttacccctccaagcacgtgccagatggcccaactggagaagatgagcgaagactgctcctggtgagcctgtgcatagggaagcggcagcatcggatgtcagccccctgcggccccagctggagatggatatgagactagtcaagatgtgaatgctaattggagagaaatataattttaggaagatgcacattgatgtggggttttgatgtgtctgattttgactactcaagctctgtttacagaagaaaattgaatggcgagggtgtggccatatgaactgactagatggctaatatggacactttgggtatttctaatgcctgttcagggctggttttctgcatgcacgggtatacacataatgcagtgccatgcacatagggaagggtcagtaagagaagtttgccttggcagcaagtatttattgttgacattattcagaattagtgataataaaaagcagagtgattttggtcaattttattattaattcttaaattccctgcagagaatgccccctttattgctgcaccagggtgggcattgctcccactgagccctactccaccctgtccctgcactcccttggttgccaaaaaaatgataacttaaatcccttccagacttaagaattttatggcatggcccaattgatataaacatttagaaggaaatgaaaagctaaaataggaagtaattattcctctaaagaaacattttgagcaaggcagtttagagaatcctaatgtctacactggcatagcacgagccatgtaagcttcttttttttctatgcaagagtattgatgtatgtgctgaatcttcacagacttgtcaatacacaggcagtattctaaaatagcactgaacagggagtcaggagactattgtctcctaaacccaggactagagttccctcgtactgtcactcctttggtcattaaatgcactgggcttgcccgcactttggccttcctagaacgctgcttcataacctctctgtctgacttctgcatctccttccaggtcagctcattcacaagagttgctcccaagcctggatgagttgcaccttgcatcttgagcatgcatttctcacaataattattaagctgtgtgataatttctgctttcaggacactcatccattatcttggctgtgagctccttgggtacgggtaccttgtatgtttaattttatatccctagcacaaagcaagtgcctggcacatagtcagtgccctaagtatttgtagagtgaagaatgccagcctctcttgtccctggtttccttatgtgttgaatgtggttgagtttgtccattgctagggagagacttccagtaataaaatttactattctagatgcttctactgttatgttttatctgcccatttatctttcttagttaccaggagaaatgtgtgacacctatattataatgaaaacaatcttattacttatagtttatctatattaaacaaatttaattgcatttaaagcattctttgatattgttgcttttgcaataaatatggataatcttggttataagggagttaaaacaatgctgtaataaataaagtgtttcatgtgatcaaaa

SEQ ID NO: 426215 - DNA, 108 bp, Homo sapiens
ctgcagccaagacactgattttctgctcctacagcctggtaaccttgtagtaaataggactacgtcctttaaactactcaggagcaaagttagacttccacgaaaaag

SEQ ID NO: 426216 - DNA, 3402 bp, Homo sapiens
cgggaaccgccgccggtatccgcgtccgcagcgccgccagccaggcgagagccgtgtgggatcccagcgcccgcactcccgcccccgccaaggagccaggaatggcacaactagagaggagcgccatctctggcttcagctctaagtccaggcgaaactcattcgcatatgatgttaagcgtgaagtatacaatgaggagacctttcaacaggaacacaaaaggaaggcctcctcttctgggaacatgaacatcaacatcaccaccttcagacaccacgtccagtgccgctgctcatggcacaggttcctacgatgcgtgcttacaatctttcccttcctagaatggatgtgtatgtatcgattaaaggattggcttctgggagacttacttgctggtataagtgttggccttgtgcaagttccccaaggcctgacacttagtttgctggcaaggcaactgattcctcctctcaacatcgcttatgcagctttctgttcttcggtaatctatgtaatttttggatcgtgtcatcaaatgtccattggttccttcttcctggtgagtgctctgctgatcaacgttctgaaagtgagcccattcaacaacggtcaactggtcatgggatctttcgtcaagaatgagttttcggccccctcctaccttatgggctataataaatccttgagtgtggtggcaaccacaacttttctgactgggattattcagctaataatgggcgtattgggtttgggcttcattgccacttaccttccggagtctgcaatgagtgcttacctggctgctgtggcacttcatatcatgctgtcccagctgactttcatctttgggattatgattagtttccatgccggtcccatctccttcttctatgacataattaattactgtgtagctctcccaaaagcgaattccaccagcattctagtatttctaactgttgttgttgctctgcgaatcaacaaatgtatcagaatttctttcaatcagtatcccattgagtttcccatggaattatttctgattattggcttcactgtgattgcaaacaagataagcatggccacagaaaccagccagacgcttattgacatgattccttatagctttctgcttcctgtaacaccagatttcagccttcttcccaagataattttacaagccttctccttatctttggtgagctcctttctgctcatatttctgggcaagaagattgccagtcttcacaattacagtgtcaattccaaccaggatttaatagccatcggcctttgcaatgtcgtcagttcatttttcagatcttgtgtgtttactggtgctattgctaggactattatccaggataaatctggaggaagacaacagtttgcatctctggtaggcgcaggtgtgatgctgctcctgatggtgaagatgggacactttttctacacactgccaaatgctgtgctggctggtattattctgagcaacgtcattccctaccttgaaaccatttctaacctacccagcctgtggaggcaggaccaatatgactgtgctctttggatgatgacattctcatcttcaattttcctgggactggacattggactaattatctcagtagtttctgctttcttcatcaccactgttcgttcacacagagctaagattcttctcctgggtcaaatccctaacaccaacatttatagaagcatcaatgattatcgggagatcatcaccattcctggggtgaaaatcttccagtgctgcagctcaattacatttgtaaatgtttactacctaaagcataagctgttaaaagaggttgatatggtaaaggtgcctcttaaagaagaagaaattttcagcttgtttaattcaagtgacaccaatctacaaggaggaaagatttgcaggtgtttctgcaactgtgatgatctggagccgctgcccaggattctttacacagagcgatttgaaaataaactggatcccgaagcatcctccattaacctgattcactgctcacattttgagagcatgaacacaagccaaactgcatccgaagaccaagtgccatacacagtatcgtccgtgtctcagaaaaatcaagggcaacagtatgaggaggtggaggaagtttggcttcctaataactcatcaagaaacagctcaccaggactgcctgatgtggcggaaagccaggggaggagatcactcatcccttactcagatgcgtctctactgcccagtgtccacaccatcatcctggatttctccatggtacactacgtggattcacgggggttagtcgtattaagacagatatgcaatgcctttcaaaacgccaacattttgatactcattgcagggtgtcactcttccatagtcagggcatttgagaggaatgatttctttgacgctggcatcaccaagacccagctgttcctcagcgttcacgacgccgtgctgtttgccttgtcaaggaaggtcataggctcctctgagttaagcatcgatgaatccgagacagtgatacgggaaacctactcagaaacagacaagaatgacaattcaagatataaaatgagcagcagttttctaggaagccaaaaaaatgtaagtccaggcttcatcaagatccaacagcctgtagaagaggagtcggagttggatttggagctggaatcagaacaagaggctgggctgggtctggacctagacctggatcgggagctggagcctgaaatggagcccaaggctgagaccgagaccaagacccagaccgagatggagccccagcctgagactgagcctgagatggagcccaaccccaaatctaggccaagagctcacacttttcctcagcagcgttactggcctatgtatcatccgtctatggcttccacccagtctcagactcagactcggacatggtcagtggagaggagacgccatcctatggattcatactcaccagagggcaacagcaatgaagatgtctaggagatgaactagaaataaggggtcagataatgctggcaaatcctcctacccaaaaaggggtcaattgtccagagacctagactggatacgaactagcagtacttccttcctgactgtgactcctactacctgccagccttcttccttgctctgcgctgggatcatactcccaaatcacattactaaatgccaacaattatctctgaattccctatccaggctcccctcatttcaccttcagcatatattctagtcatgaatttccttcttcacacaccccacatctctgggctttgtgccagaccatctctaacttaatcctctcatccctgttcccctttctccaaagagatgaagctcaaataaaatgtataactctagtaacaaa

SEQ ID NO: 426217 - DNA, 3474 bp, Homo sapiens
agccgctgctgggagacgcctgggcgccgggggctgcaggtcccagggcgggggctgcgtccgtcaccggcaggtacccaggtatgccgcagagccaggcacgccgtgggcactcagtcagtatctgtggaatgaatgaatgatggtcgtccctgggagcttatctctgaggaatggcacaactagagaggagcgccatctctggcttcagctctaagtccaggcgaaactcattcgcatatgatgttaagcgtgaagtatacaatgaggagacctttcaacaggaacacaaaaggaaggcctcctcttctgggaacatgaacatcaacatcaccaccttcagacaccacgtccagtgccgctgctcatggcacaggttcctacgatgcgtgcttacaatctttcccttcctagaatggatgtgtatgtatcgattaaaggattggcttctgggagacttacttgctggtataagtgttggccttgtgcaagttccccaaggcctgacacttagtttgctggcaaggcaactgattcctcctctcaacatcgcttatgcagctttctgttcttcggtaatctatgtaatttttggatcgtgtcatcaaatgtccattggttccttcttcctggtgagtgctctgctgatcaacgttctgaaagtgagcccattcaacaacggtcaactggtcatgggatctttcgtcaagaatgagttttcggccccctcctaccttatgggctataataaatccttgagtgtggtggcaaccacaacttttctgactgggattattcagctaataatgggcgtattgggtttgggcttcattgccacttaccttccggagtctgcaatgagtgcttacctggctgctgtggcacttcatatcatgctgtcccagctgactttcatctttgggattatgattagtttccatgccggtcccatctccttcttctatgacataattaattactgtgtagctctcccaaaagcgaattccaccagcattctagtatttctaactgttgttgttgctctgcgaatcaacaaatgtatcagaatttctttcaatcagtatcccattgagtttcccatggaattatttctgattattggcttcactgtgattgcaaacaagataagcatggccacagaaaccagccagacgcttattgacatgattccttatagctttctgcttcctgtaacaccagatttcagccttcttcccaagataattttacaagccttctccttatctttggtgagctcctttctgctcatatttctgggcaagaagattgccagtcttcacaattacagtgtcaattccaaccaggatttaatagccatcggcctttgcaatgtcgtcagttcatttttcagatcttgtgtgtttactggtgctattgctaggactattatccaggataaatctggaggaagacaacagtttgcatctctggtaggcgcaggtgtgatgctgctcctgatggtgaagatgggacactttttctacacactgccaaatgctgtgctggctggtattattctgagcaacgtcattccctaccttgaaaccatttctaacctacccagcctgtggaggcaggaccaatatgactgtgctctttggatgatgacattctcatcttcaattttcctgggactggacattggactaattatctcagtagtttctgctttcttcatcaccactgttcgttcacacagagctaagattcttctcctgggtcaaatccctaacaccaacatttatagaagcatcaatgattatcgggagatcatcaccattcctggggtgaaaatcttccagtgctgcagctcaattacatttgtaaatgtttactacctaaagcataagctgttaaaagaggttgatatggtaaaggtgcctcttaaagaagaagaaattttcagcttgtttaattcaagtgacaccaatctacaaggaggaaagatttgcaggtgtttctgcaactgtgatgatctggagccgctgcccaggattctttacacagagcgatttgaaaataaactggatcccgaagcatcctccattaacctgattcactgctcacattttgagagcatgaacacaagccaaactgcatccgaagaccaagtgccatacacagtatcgtccgtgtctcagaaaaatcaagggcaacagtatgaggaggtggaggaagtttggcttcctaataactcatcaagaaacagctcaccaggactgcctgatgtggcggaaagccaggggaggagatcactcatcccttactcagatgcgtctctactgcccagtgtccacaccatcatcctggatttctccatggtacactacgtggattcacgggggttagtcgtattaagacagatatgcaatgcctttcaaaacgccaacattttgatactcattgcagggtgtcactcttccatagtcagggcatttgagaggaatgatttctttgacgctggcatcaccaagacccagctgttcctcagcgttcacgacgccgtgctgtttgccttgtcaaggaaggtcataggctcctctgagttaagcatcgatgaatccgagacagtgatacgggaaacctactcagaaacagacaagaatgacaattcaagatataaaatgagcagcagttttctaggaagccaaaaaaatgtaagtccaggcttcatcaagatccaacagcctgtagaagaggagtcggagttggatttggagctggaatcagaacaagaggctgggctgggtctggacctagacctggatcgggagctggagcctgaaatggagcccaaggctgagaccgagaccaagacccagaccgagatggagccccagcctgagactgagcctgagatggagcccaaccccaaatctaggccaagagctcacacttttcctcagcagcgttactggcctatgtatcatccgtctatggcttccacccagtctcagactcagactcggacatggtcagtggagaggagacgccatcctatggattcatactcaccagagggcaacagcaatgaagatgtctaggagatgaactagaaataaggggtcagataatgctggcaaatcctcctacccaaaaaggggtcaattgtccagagacctagactggatacgaactagcagtacttccttcctgactgtgactcctactacctgccagccttcttccttgctctgcgctgggatcatactcccaaatcacattactaaatgccaacaattatctctgaattccctatccaggctcccctcatttcaccttcagcatatattctagtcatgaatttccttcttcacacaccccacatctctgggctttgtgccagaccatctctaacttaatcctctcatccctgttcccctttctccaaagagatgaagctcaaataaaatgtataactctagtaacaaa

SEQ ID NO: 426218 - DNA, 1562 bp, Homo sapiens
tttgagatggagcctcactctgttgcccaggctggagtgcagtggcaagaaatagcatcgttgcaagtccttccggcccttgttggtgtcttaccacagccctcccttaactctgtcgtcccagattctttacacagagcgatttgaaaataaactggatcccgaagcatcctccattaacctgattcactgctcacattttgagagcatgaacacaagccaaactgcatccgaagaccaagtgccatacacagtatcgtccgtgtctcagaaaaatcaagggcaacagtatgaggaggtggaggaagtttggcttcctaataactcatcaagaaacagctcaccaggactgcctgatgtggcggaaagccaggggaggagatcactcatcccttactcagatgcgtctctactgcccagtgtccacaccatcatcctggatttctccatggtacactacgtggattcacgggggttagtcgtattaagacagatatgcaatgcctttcaaaacgccaacattttgatactcattgcagggtgtcactcttccatagtcagggcatttgagaggaatgatttctttgacgctggcatcaccaagacccagctgttcctcagcgttcacgacgccgtgctgtttgccttgtcaaggaaggtcataggctcctctgagttaagcatcgatgaatccgagacagtgatacgggaaacctactcagaaacagacaagaatgacaattcaagatataaaatgagcagcagttttctaggaagccaaaaaaatgtaagtccaggcttcatcaagatccaacagcctgtagaagaggagtcggagttggatttggagctggaatcagaacaagaggctgggctgggtctggacctagacctggatcgggagctggagcctgaaatggagcccaaggctgagaccgagaccaagacccagaccgagatggagccccagcctgagactgagcctgagatggagcccaaccccaaatctaggccaagagctcacacttttcctcagcagcgttactggcctatgtatcatccgtctatggcttccacccagtctcagactcagactcggacatggtcagtggagaggagacgccatcctatggattcatactcaccagagggcaacagcaatgaagatgtctaggagatgaactagaaataaggggtcagataatgctggcaaatcctcctacccaaaaaggggtcaattgtccagagacctagactggatacgaactagcagtacttccttcctgactgtgactcctactacctgccagccttcttccttgctctgcgctgggatcatactcccaaatcacattactaaatgccaacaattatctctgaattccctatccaggctcccctcatttcaccttcagcatatattctagtcatgaatttccttcttcacacaccccacatctctgggctttgtgccagaccatctctaacttaatcctctcatccctgttcccctttctccaaagagatgaagctcaaataaaatgtataactctagtaacaaa

SEQ ID NO: 426219 - DNA, 353 bp, Homo sapiens
agaaacattgaactgcaaaacacaacaacatgttctctcaatggctttcataacttggcttggtttgctggcagttttggcaggctgctgcctcaatcactccgcttgtccctattgttattaaaaaaaaaaaaaaaagaatcaggacagcccagtgttagaatagagtggcggaggtaccaagaaaggattcctgctatccagaaataattccactattctattccagctttctgcttcctgtaacaccagatttcagccttcttcccaagataattttacaagccttctccttatctttggtgagctcctttctgctcatatttctgggcaagaagattgccagtcttcac

SEQ ID NO: 426220 - DNA, 476 bp, Homo sapiens
ggtcggtacctctgtgcgcatttaggtgtggcagagaagacacagcttctgaaattgagtgtacctgctacttttatgcttgtgtctttagatgaaggtccaggtcctccaatcaaataccagtatgctgaattaggcaaattatactcagtagtgtcacagctgatccgctgttgcaatgtctcttcaagaatgcagtcttcaatcaatggtaatcctcctcttcccaatccttttggtgatcctaatttatcacaacctataatgccaattcagcagaatgtggcagacattttatttgtgagaacaagttatgtgaagaaaatcattgaagactgcagtaattcagaggaaaccgtcaaattgcttcgtttttgctgctgggagaatcctcagttctcatctactgtcctcagtgaacttctctggcaggttgcatattcctatacctaaatgcggcacagagtaccgaccga

SEQ ID NO: 426221 - DNA, 723 bp, Homo sapiens
ccggatccgccatattgacgaggacgggcatccgcggctgcggacgctagtctccgccgccgccggagccgcaacctctccgcacccggccccgtcagggcctctgtcgcgcctagcccctccccgccttacacagctcccgggcctcgcgggagcccgccgccgccgcctctctctcacgggaggcggccgccttagcgcccggtgcttgggtcggcgccgggagcgaggagcgagctacttcaaagccaccaggcctggagcggggacagaggcggcgactaggggaaggtgaagccgtcgctgcaggaggaggagcaggaggaggtgacgcaggagaaacgcaccgcccggagcccgtctgagctcagcgagagccccagcctgaggggagaaggggaagagggccgtcgccggccaaggaggaggaggaggcgggcgcggcgaggagcgagttccggcgccggtgtgcagccttttggttgagacgcccgcagccccgagcccggccgccgcagcctttcgatacactttgttgccggtcacccccgggcctgggatgcacccagggtaggtctcgtcccgggaccgagccccaccgtcgcctggtgcctcccgcctccgtgtgccctggttgtgagaagacgtctgtgtcgtgcggttatgcaatggtctctgcaagatggtttattcttgaattggacctttttaagactgacaaat

SEQ ID NO: 426222 - DNA, 697 bp, Homo sapiens
ctcttatttcctgtcaactaatttgaatttcttcttgagtgtctcacttggttatcaagatattaaattatagggttaaataatagtggtcaaagcgtattttatttttacaaaaatgtacctttcattcttaaattattcagagactttcattttgcatttattaccctttcttttggtctgtgcttctcacttaattttacttgattatcaaagtcaacttaccattaaatcattgaatagtgtgtttaagataactgaggatatggtttgaatttaaatgcccaacaaaaatatatgttgaaagggatgaatacttttatcattttgaaaccaggtcgtgattcagagtaatgatgatattgccagcagagctatagatctcctcaaagagatatacacgaaccttggtccaagactacaagtcaatcaggtggtgatccatgaagacttcattcagtcttgttttgatcgtctgaaggcttcctatgacacattgtgtgttttggatggtgacaaagacagtgttaattgtgcaagacaggaagctgttcgaatggttcgagtattaactgttttaagggaatatataaatgaatgtgacagtgattatcatgaggaaagaacaattctccctatgtcgaggtttgtgaataactaatctattggtgctaattcttaattatttgatattttc

SEQ ID NO: 426223 - DNA, 9600 bp, Homo sapiens
cttttctcaagacaactacataagcagacaaaattgcaaagatctgccctgtgtcgagtatgacagccacgactcgtggctctccggtcggagggaatgacaaccagggccaggctcctgatggacagtctctgccccccctccaacagaatcagacttcatcgcctgattcttccaatgaaaattccccggcaactcccccagatgagcaaggtcaaggtgatgccccaccacagcttgaagatgaggaacctgcatttccacatactgacttggccaagttggatgacatgatcaacaggcctcgatgggtggttccagttttgccgaaaggggaattagaagtgcttttagaagctgctattgatcttagtaaaaagggccttgatgttaaaagtgaagcatgtcagcgatttttccgtgatgggctaacaatatcattcactaaaattcttacagatgaagcagtgagtggctggaagtttgaaattcattcatcgtctggtggagctatgtgtggccaagttgtcccaagactggtttccacttttagaacttcttgccatggccttaaatcctcattgcaaattccatatctacaatggtacacgtccatgtgaatcagtttcctcaagtgttcagttgcctgaagatgaactctttgctcgttctccagatcctcgatcaccaaagggttggctagtggatcttctcaacaaatttggcactttaaatgggttccagattttgcatgatcgttttattaatggatcagcattaaacgttcaaataattgcagcccttattaaaccatttgggcaatgctatgagtttctcactcttcatacagtgaaaaagtactttcttccaataatagaaatggttccacagtttttagaaaacttaactgatgaagaactgaaaaaagaagcaaagaatgaagccaaaaatgatgctctttcaatgattattaaatctttgaagaatttagcttcaagggttccaggacaagaagaaactgttaaaaacttagaaatatttaggttaaaaatgatacttagattattgcaaatttcttctttcaatggaaagatgaatgcactgaatgaagttaataaggtgatatctagtgtatcatactatactcatcgacatggtaatcctgaggaggaagagtggctcacagctgaacgaatggcagaatggatacagcagaacaatatcttatccatagtgttgcgagatagtcttcatcagccacagtatgtagaaaagttagagaagattcttcgttttgtcatcaaagaaaaagctctgaccttacaggatcttgataatatctgggcagcacaggcagggaaacatgaagccattgtgaagaatgtacatgatctcctggcaaaattggcatgggatttttctcctgaacaacttgatcatccttttgattgttttaaggccagtcggacaaatgcgagtaaaaagcaacgtgaaaagctacttgagctgatacgtcgtcttgcagaagatgataaagatggtgtgatggcacacagagtgttgaaccttctgtggaatctggctcacagtgatgatgtgcctgtagatatcatggacctggctctcagtgcccacataaaaatactagattacagttgctcccaggaccgtgatacacaaaagatccaatggatagatcgctttatagaagaacttcgcacaaatgacaaatgggttattcccgcactgaaacaaattagagaaatttgtagtttgtttggtgaagcgcctcaaaatttgagtcaaactcagcgaagtccccatgtgttttatcgccatgacttaatcaatcaacttcaacacaatcatgccctagttactttggtagcagaaaaccttgcaacttacatggaaagcatgagactatatgctagagaccatgaagattatgacccacaaactgtgaggctgggaagtagatatagtcatgttcaagaagttcaagaacggcttaacttccttagatttttattgaaggatggtcagctgtggctatgtgctcctcaggcaaaacaaatatggaaatgcttagctgagaatgcagtttacctttgtgatcgtgaagcctgttttaagtggtattccaagttgatgggggatgaaccagacttagatcctgatattaataaggacttctttgaaagtaatgtgcttcagcttgatccttctctgttaactgaaaatggaatgaagtgttttgagcgattcttcaaagctgtgaattgtcgagaaggaaaactagtagcaaaaaggagagcctatatgatggatgacttggagttaataggattagattacctttggagggtcgtgattcagagtaatgatgatattgccagcagagctatagatctcctcaaagagatatacacgaaccttggtccaagactacaagtcaatcaggtggtgatccatgaagacttcattcagtcttgttttgatcgtctgaaggcttcctatgacacattgtgtgttttggatggtgacaaagacagtgttaattgtgcaagacaggaagctgttcgaatggttcgagtattaactgttttaagggaatatataaatgaatgtgacagtgattatcatgaggaaagaacaattctccctatgtcgagagcattccgcggtaaacacctctcttttgtagttcgatttccaaaccagggcagacaggttgatgacttggaggtatggtctcatacaaatgatacaattggttcagtacgacgatgtattctcaatcgtattaaagccaacgtagcccatacaaaaattgagctctttgtgggcggtgagctgatagatcctgcagatgatagaaagttgattggacaattaaacttaaaagataaatcgcttattacagccaaacttacacagataagttccaatatgccttcaagccctgatagctcttctgattcctccactggatctcctggaaaccatggtaatcattacagtgatggtcccaatccagaagtggaaagctgtttgcctggagtgataatgtcactgcatcccagatacatctcttttctttggcaagttgcagacttaggtagcagcctaaatatgccaccccttagagatggagcaagagtacttatgaaacttatgccgccagatagcacaacgatagaaaaattaagagctatttgtttagaccatgccaaacttggagaaagcagccttagtccatctcttgactcacttttctttggtccttcagcctcacaagtgctatatctaacagaggtagtctatgccttgttaatgcctgctggtgcacctctggctgatgattcctctgattttcagtttcacttcttgaaaagtggtggcctaccccttgtactgagtatgctaaccagaaataacttcctaccgaatgcagatatggaaactcgaaggggtgcctacctcaatgctcttaaaatagccaagcttttgctaactgccattggctatggtcatgttcgagctgtggcagaagcttgtcagccaggtgtagaaggtgtgaatcccatgacacagatcaaccaagttacccatgatcaagcagtggtgctacaaagtgcccttcagagcattcctaatccatcatccgagtgcatgcttagaaatgtgtcagttcgtcttgctcagcagatatctgatgaggcttcaagatatatgcctgatatttgtgtaattagagctatacaaaaaattatctgggcatcaggatgtgggtcgttacagctagtatttagcccaaatgaagaaatcactaaaatttatgagaagaccaatgcaggcaatgagccagacttggaagacgaacaggtttgctgtgaagcattggaagtgatgaccttatgttttgccttgattccaacagccttagatgctcttagtaaagaaaaggcttggcagacattcatcattgacttactattgcactgtcacagcaaaactgttcgtcaggtggcacaggagcagttctttttaatgtgcaccagatgttgcatgggacaccggcctctacttttcttcattactctactctttactgttttggggagcacagcaagagagagagctaaacactcaggcgactactttactcttttaagacaccttcttaattacgcttacaatagtaatattaatgtacccaatgctgaagttcttctcaataatgaaattgattggcttaaaagaattagggatgatgttaaaagaacaggagaaacgggtattgaagagacgatcttagagggccaccttggagtgacaaaggagttactggcctttcaaacttctgagaaaaaatttcatattggttgtgaaaaaggaggtgctaatctcattaaagaattaattgatgatttcatatttcctgcatccaatgtttacctacagtatatgagaaatggagagcttccagctgaacaggctattccggtctgtggttcaccacctacaattaatgctggttttgaattacttgtagcattagctgttggctgtgtgaggaatctcaaacaaatagtagattctttgactgaaatgtattacattggcacagcaataactacttgtgaagcacttactgagtgggaatatctgccacctgttggaccccgcccacccaaaggattcgtggggctgaaaaatgccggtgctacttgttacatgaattctgtgattcagcaactctacatgattccttccattaggaacggtattcttgccattgaaggcacaggtagtgatgtagatgatgatatgtctggggatgagaagcaggacaatgagagcaatgttgatcccagggatgatgtatttggatatcctcaacaatttgaagataaaccagcattaagtaaaactgaagatagaaaagagtacaacattggtgtcctaagacaccttcaggtcatctttggtcatttagctgcttctcgactgcaatactatgtgcccagaggattttggaaacagttcaggctttggggtgagcctgttaatctgcgtgaacaacacgatgctttagaattttttaattcattggtggatagtttagatgaagctttaaaagctttaggacatccagctatgctaagtaaagtcttaggaggttcctttgctgatcagaagatctgccaaggctgcccacataggtacgaatgtgaagaatcttttacgaccctaaacgtagacattagaaatcaccaaaatcttcttgattctttggaacagtatgtcaaaggagatttactagaaggtgcaaatgcatatcattgtgaaaaatgcaataaaaaggttgataccgtaaagcgcttgctgattaaaaaattacctcctgttcttgctatacaactaaagcgatttgactatgactgggaaagagaatgtgcaatcaagttcaatgattattttgaatttcctcgagagctggacatggaaccttacacagttgcaggtgtcgcaaagctggaaggggataatgtaaacccagagagtcagttgatacaacagagtgagcagtctgaaagtgagacagcaggaagcacaaaatacagacttgtgggtgtgctcgtacacagtggtcaagcgagtggggggcattattattcttacatcatccaaaggaatggtggagatggtgagagaaatcgctggtataaatttgatgatggtgatgtaacagaatgtaaaatggatgatgacgaagaaatgaaaaaccagtgttttggtggagagtacatgggagaagtgtttgatcacatgatgaagcgtatgtcatacaggcgccagaaaaggtggtggaatgcttatatacttttttatgaacgaatggacacaatagaccaagatgatgagttgataagatatatatcagagcttgctatcaccaccagacctcatcagattattatgccatcagccattgagagaagtgtacggaaacagaacgtacaattcatgcataaccgaatgcagtacagtatggagtattttcagtttatgaaaaaactgcttacatgtaatggcgtttacttaaaccctcctcccgggcaagatcacctgttgcctgaagcagaagaaatcactatgatcagtattcaacttgctgctaggttcctctttactacaggatttcacacaaagaaagtagtccgtggctctgccagtgattggtatgatgcattgtgtattctccttcgtcacagcaagaatgtacgtttttggtttgctcataacgtcctttttaatgtttcaaatcgcttctccgaataccttctggagtgccctagtgcagaagtgaggggtgcgtttgcaaaacttatagtctttattgcacatttttccttgcaagatgggccatgtccttcaccttttgcctctcctggaccttctagtcaggcttatgacaacttaagcttgagtgatcacttactaagagcagtactaaatctcttgagaagggaagtttcagagcatgggcgtcatttacagcagtatttcaacctgtttgtaatgtatgccaatttaggtgtggcagagaagacacagcttctgaaattgagtgtacctgctacttttatgcttgtgtctttagatgaaggtccaggtcctccaatcaaataccagtatgctgaattaggcaaattatactcagtagtgtcacagctgatccgctgttgcaatgtctcttcaagaatgcagtcttcaatcaatggtaatcctcctcttcccaatccttttggtgatcctaatttatcacaacctataatgccaattcagcagaatgtggcagacattttatttgtgagaacaagttatgtgaagaaaatcattgaagactgcagtaattcagaggaaaccgtcaaattgcttcgtttttgctgctgggagaatcctcagttctcatctactgtcctcagtgaacttctctggcaggttgcatattcctatacctatgaactgcggccctatttggatctgcttttgcaaatcttactgattgaggactcctggcaaactcacagaattcataatgcactgaaaggaattccagatgaccgagatgggctgtttgacacaatccagcgctctaagaatcactatcaaaaaagagcataccagtgtataaaatgtatggtagctctatttagtaactgtcctgttgcttaccaaatcctgcagggcaatggagatcttaaaagaaagtggacctgggcagtggaatggcttggagatgaacttgaaagaagaccatatactggcaatcctcagtacacttacaacaattggtctcccccagtgcaaagcaatgaaacgtccaatggttatttcttggagagatcacatagtgctaggatgacacttgcaaaagcttgtgaactctgtccagaggaggagccagatgaccaagatgctccagatgaacatgagtcgcctccacctgaagatgccccattgtacccccattcacctggatctcagtatcaacagaataaccatgtgcatggacagccatatacaggcccagcagcacatcacatgaacaaccctcagagaactggccaacgagcacaagaaaattatgaaggcagtgaagaagtatccccacctcaaaccaaggatcaatgaaatgcacataattaactggttccatcaagactgtgcacccaggccttacagtccaacctttttctgtgtctggctaatatttaaaactagaaaaactattcctaatcaacatggagtggagagtttattcactgtcttatctgcagaaatttgctgtcaatatataacccgcctgcagtggaaagtgtatagtgttttgtaataaatggcctgatgctaatgtgtaaatggcaaaggtgtatatagtatattaatgttgactgttaattcttaagcaagaaacttttttcttgatgagactcacagatctacacaaactacaaaagttaattttcttgttacacccactgcactctgcaaccagtgttgcctgcctcatggcagttggatcagctcctttacaaaaaagaaaaaaaaaaaaccaacagcaacaaaacagagcccatccatgtcagccacaccaatagtttcatgttaattctttgccactggagtcaattttgctatgagcaatgtaaggctggtaacctttaaattatttggttgatgtggaaaattggtgatgtaacactgtttctagatttttttcattgcctttttattctgatattaggttaatcactttgaagctatagttatgctgtaacatttagcatggcttcacaccaagttagtgtagccaatgaggaaaaagttaccataatgacagcagttgtccgagaagtgacagctgtattactcagagcttttacttcttacacctagaatattaaaatataaaacaaggggagaaatgtgacagtctattttcagttgcacatatgttccttatatataatgtttgacagttcaatctctgggtggaataaagaacacttacgtatcagtaatgggaatttttaaagatttaaaacaaatatgcaaaaatttgctatgccaagatgctggagcataatataagactgtatttggtgtgcttgttttgtttctttggtagagtttattaggtgaatcttctaaaactttccttctgttggatcccagtgacgtggaagtcatcagaaccccacggtacttggagtacctctctgcaccaagatagctggctgattttctgctcagtcacaattttacttgaaagcaagaattgtcctagctccttttccattattccaaaacgtttaacgttcaaagcagggtctcattaaaaaagaaactactggttgatataattgagatattacaatttcagaataaacatttgattaaaaataaggaaatcctcagttcatactgtatttaaaagagaattggtaacttgaatgtgtgtaattttttggaacctgtctaaaaaccaaatacccctgcaaacagatacagcccaccctattctatttaaatattttgctgttttattttatagaaattattttgctgaattcacaaatagaatttgatttaagaagaactttttgtcctgtggtgtgtttttggttttttttttggttactttttttgtcctttttttttttttttaaaaagaggactgcatattaaaattcattctgtgcatagcatgcctaggcatgacactgattcaggatttcagtcacatcaagtttttgtgcacagaaagttttgacctttggccctctactgaagattttgagaaatcaggatgttgacactgtaaaagtttcctaacataatcttgtactttttgtatgttttttatatacatgtatatttaatgagcacaagcttggttgtattttttacaattcagttaatagggaaatgttttgtcaaaaggctacacttggaactgaacaaagcagaaacaaaattgagcattgcattattttgtgattaaaaggggcaggtatttaagataaa

SEQ ID NO: 426224 - DNA, 8972 bp, Homo sapiens
cttttctcaagacaactacataagcagacaaaattgcaaagatctgccctgtgtcgagtatgacagccacgactcgtggctctccggtcggagggaatgacaaccagggccaggctcctgatggacagtctctgccccccctccaacagaatcagacttcatcgcctgattcttccaatgaaaattccccggcaactcccccagatgagcaaggtcaaggtgatgccccaccacagcttgaagatgaggaacctgcatttccacatactgacttggccaagttggatgacatgatcaacaggcctcgatgggtggttccagttttgccgaaaggggaattagaagtgcttttagaagctgctattgatcttagtaaaaagggccttgatgttaaaagtgaagcatgtcagcgatttttccgtgatgggctaacaatatcattcactaaaattcttacagatgaagcagtgagtggctggaagtttgaaattcattcatcgtctggtggagctatgtgtggccaagttgtcccaagactggtttccacttttagaacttcttgccatggccttaaatcctcattgcaaattccatatctacaatggtacacgtccatgtgaatcagtttcctcaagtgttcagttgcctgaagatgaactctttgctcgttctccagatcctcgatcaccaaagggttggctagtggatcttctcaacaaatttggcactttaaatgggttccagattttgcatgatcgttttattaatggatcagcattaaacgttcaaataattgcagcccttattaaaccatttgggcaatgctatgagtttctcactcttcatacagtgaaaaagtactttcttccaataatagaaatggttccacagtttttagaaaacttaactgatgaagaactgaaaaaagaagcaaagaatgaagccaaaaatgatgctctttcaatgattattaaatctttgaagaatttagcttcaagggttccaggacaagaagaaactgttaaaaacttagaaatatttaggttaaaaatgatacttagattattgcaaatttcttctttcaatggaaagatgaatgcactgaatgaagttaataaggtgatatctagtgtatcatactatactcatcgacatggtaatcctgaggaggaagagtggctcacagctgaacgaatggcagaatggatacagcagaacaatatcttatccatagtgttgcgagatagtcttcatcagccacagtatgtagaaaagttagagaagattcttcgttttgtcatcaaagaaaaagctctgaccttacaggatcttgataatatctgggcagcacaggcagggaaacatgaagccattgtgaagaatgtacatgatctcctggcaaaattggcatgggatttttctcctgaacaacttgatcatccttttgattgttttaaggccagtcggacaaatgcgagtaaaaagcaacgtgaaaagctacttgagctgatacgtcgtcttgcagaagatgataaagatggtgtgatggcacacagagtgttgaaccttctgtggaatctggctcacagtgatgatgtgcctgtagatatcatggacctggctctcagtgcccacataaaaatactagattacagttgctcccaggaccgtgatacacaaaagatccaatggatagatcgctttatagaagaacttcgcacaaatgacaaatgggttattcccgcactgaaacaaattagagaaatttgtagtttgtttggtgaagcgcctcaaaatttgagtcaaactcagcgaagtccccatgtgttttatcgccatgacttaatcaatcaacttcaacacaatcatgccctagttactttggtagcagaaaaccttgcaacttacatggaaagcatgagactatatgctagagaccatgaagattatgacccacaaactgtgaggctgggaagtagatatagtcatgttcaagaagttcaagaacggcttaacttccttagatttttattgaaggatggtcagctgtggctatgtgctcctcaggcaaaacaaatatggaaatgcttagctgagaatgcagtttacctttgtgatcgtgaagcctgttttaagtggtattccaagttgatgggggatgaaccagacttagatcctgatattaataaggacttctttgaaagtaatgtgcttcagcttgatccttctctgttaactgaaaatggaatgaagtgttttgagcgattcttcaaagctgtgaattgtcgagaaggaaaactagtagcaaaaaggagagcctatatgatggatgacttggagttaataggattagattacctttggagggtcgtgattcagagtaatgatgatattgccagcagagctatagatctcctcaaagagatatacacgaaccttggtccaagactacaagtcaatcaggtggtgatccatgaagacttcattcagtcttgttttgatcgtctgaaggcttcctatgacacattgtgtgttttggatggtgacaaagacagtgttaattgtgcaagacaggaagctgttcgaatggttcgagtattaactgttttaagggaatatataaatgaatgtgacagtgattatcatgaggaaagaacaattctccctatgtcgagagcattccgcggtaaacacctctcttttgtagttcgatttccaaaccagggcagacaggttgatgacttggaggtatggtctcatacaaatgatacaattggttcagtacgacgatgtattctcaatcgtattaaagccaacgtagcccatacaaaaattgagctctttgtgggcggtgagctgatagatcctgcagatgatagaaagttgattggacaattaaacttaaaagataaatcgcttattacagccaaacttacacagataagttccaatatgccttcaagccctgatagctcttctgattcctccactggatctcctggaaaccatggtaatcattacagtgatggtcccaatccagaagtggaaagctgtttgcctggagtgataatgtcactgcatcccagatacatctcttttctttggcaagttgcagacttaggtagcagcctaaatatgccaccccttagagatggagcaagagtacttatgaaacttatgccgccagatagcacaacgatagaaaaattaagagctatttgtttagaccatgccaaacttggagaaagcagccttagtccatctcttgactcacttttctttggtccttcagcctcacaagtgctatatctaacagaggtagtctatgccttgttaatgcctgctggtgcacctctggctgatgattcctctgattttcagtttcacttcttgaaaagtggtggcctaccccttgtactgagtatgctaaccagaaataacttcctaccgaatgcagatatggaaactcgaaggggtgcctacctcaatgctcttaaaatagccaagcttttgctaactgccattggctatggtcatgttcgagctgtggcagaagcttgtcagccaggtgtagaaggtgtgaatcccatgacacagatcaaccaagttacccatgatcaagcagtggtgctacaaagtgcccttcagagcattcctaatccatcatccgagtgcatgcttagaaatgtgtcagttcgtcttgctcagcagatatctgatgaggcttcaagatatatgcctgatatttgtgtaattagagctatacaaaaaattatctgggcatcaggatgtgggtcgttacagctagtatttagcccaaatgaagaaatcactaaaatttatgagaagaccaatgcaggcaatgagccagacttggaagacgaacaggtttgctgtgaagcattggaagtgatgaccttatgttttgccttgattccaacagccttagatgctcttagtaaagaaaaggcttggcagacattcatcattgacttactattgcactgtcacagcaaaactgttcgtcaggtggcacaggagcagttctttttaatgtgcaccagatgttgcatgggacaccggcctctacttttcttcattactctactctttactgttttggggagcacagcaagagagagagctaaacactcaggcgactactttactcttttaagacaccttcttaattacgcttacaatagtaatattaatgtacccaatgctgaagttcttctcaataatgaaattgattggcttaaaagaattagggatgatgttaaaagaacaggagaaacgggtattgaagagacgatcttagagggccaccttggagtgacaaaggagttactggcctttcaaacttctgagaaaaaatttcatattggttgtgaaaaaggaggtgctaatctcattaaagaattaattgatgatttcatatttcctgcatccaatgtttacctacagtatatgagaaatggagagcttccagctgaacaggctattccggtctgtggttcaccacctacaattaatgctggttttgaattacttgtagcattagctgttggctgtgtgaggaatctcaaacaaatagtagattctttgactgaaatgtattacattggcacagcaataactacttgtgaagcacttactgagtgggaatatctgccacctgttggaccccgcccacccaaaggattcgtggggctgaaaaatgccggtgctacttgttacatgaattctgtgattcagcaactctacatgattccttccattaggaacggtattcttgccattgaaggcacaggtagtgatgtagatgatgatatgtctggggatgagaagcaggacaatgagagcaatgttgatcccagggatgatgtatttggatatcctcaacaatttgaagataaaccagcattaagtaaaactgaagatagaaaagagtacaacattggtgtcctaagacaccttcaggtcatctttggtcatttagctgcttctcgactgcaatactatgtgcccagaggattttggaaacagttcaggctttggggtgagcctgttaatctgcgtgaacaacacgatgctttagaattttttaattcattggtggatagtttagatgaagctttaaaagctttaggacatccagctatgctaagtaaagtcttaggaggttcctttgctgatcagaagatctgccaaggctgcccacataggtacgaatgtgaagaatcttttacgaccctaaacgtagacattagaaatcaccaaaatcttcttgattctttggaacagtatgtcaaaggagatttactagaaggtgcaaatgcatatcattgtgaaaaatgcaataaaaaggttgataccgtaaagcgcttgctgattaaaaaattacctcctgttcttgctatacaactaaagcgatttgactatgactgggaaagagaatgtgcaatcaagttcaatgattattttgaatttcctcgagagctggacatggaaccttacacagttgcaggtgtcgcaaagctggaaggggataatgtaaacccagagagtcagttgatacaacagagtgagcagtctgaaagtgagacagcaggaagcacaaaatacagacttgtgggtgtgctcgtacacagtggtcaagcgagtggggggcattattattcttacatcatccaaaggaatggtggagatggtgagagaaatcgctggtataaatttgatgatggtgatgtaacagaatgtaaaatggatgatgacgaagaaatgaaaaaccagtgttttggtggagagtacatgggagaagtgtttgatcacatgatgaagcgtatgtcatacaggcgccagaaaaggtggtggaatgcttatatacttttttatgaacgaatggacacaatagaccaagatgatgagttgataagatatatatcagagcttgctatcaccaccagacctcatcagattattatgccatcagccattgagagaagtgtacggaaacagaacgtacaattcatgcataaccgaatgcagtacagtatggagtattttcagtttatgaaaaaactgcttacatgtaatggcgtttacttaaaccctcctcccgggcaagatcacctgttgcctgaagcagaagaaatcactatgatcagtattcaacttgctgctaggttcctctttactacaggatttcacacaaagaaagtagtccgtggctctgccagtgattggtatgatgcattgtgtattctccttcgtcacagcaagaatgtacgtttttggtttgctcataacgtcctttttaatgtttcaaatcgcttctccgaataccttctggagtgccctagtgcagaagtgaggggtgcgtttgcaaaacttatagtctttattgcacatttttccttgcaagatgggccatgtccttcaccttttgcctctcctggaccttctagtcaggcttatgacaacttaagcttgagtgatcacttactaagagcagtactaaatctcttgagaagggaagtttcagagcatgggcgtcatttacagcagtatttcaacctgtttgtaatgtatgccaatttaggtgtggcagagaagacacagcttctgaaattgagtgtacctgctacttttatgcttgtgtctttagatgaaggtccaggtcctccaatcaaataccagtatgctgaattaggcaaattatactcagtagtgtcacagctgatccgctgttgcaatgtctcttcaagaatgcagtcttcaatcaatggtaatcctcctcttcccaatccttttggtgatcctaatttatcacaacctataatgccaattcagcagaatgtggcagacattttatttgtgagaacaagttatgtgaagaaaatcattgaagactgcagtaattcagaggaaaccgtcaaattgcttcgtttttgctgctgggagaatcctcagttctcatctactgtcctcagtgaacttctctggcaggttgcatattcctatacctatgaactgcggccctatttggatctgcttttgcaaatcttactgattgaggactcctggcaaactcacagaattcataatgcactgaaaggaattccagatgaccgagatgggctgtttgacacaatccagcgctctaagaatcactatcaaaaaagagcataccagtgtataaaatgtatggtagctctatttagtaactgtcctgttgcttaccaaatcctgcagggcaatggagatcttaaaagaaagtggacctgggcagtggaatggcttggagatgaacttgaaagaagaccatatactggcaatcctcagtacacttacaacaattggtctcccccagtgcaaagcaatgaaacgtccaatggttatttcttggagagatcacatagtgctaggatgacacttgcaaaagcttgtgaactctgtccagaggaggagccagatgaccaagatgctccagatgaacatgagtcgcctccacctgaagatgccccattgtacccccattcacctggatctcagtatcaacagaataaccatgtgcatggacagccatatacaggcccagcagcacatcacatgaacaaccctcagagaactggccaacgagcacaagaaaattatgaaggcagtgaagaagtatccccacctcaaaccaaggatcaatgaaatgcacataattaactggttccatcaagactgtgcacccaggccttacagtccaacctttttctgtgtctggctaatatttaaaactagaaaaactattcctaatcaacatggagtggagagtttattcactgtcttatctgcagaaatttgctgtcaatatataacccgcctgcagtggaaagtgtatagtgttttgtaataaatggcctgatgctaatgtgtaaatggcaaaggtgtatatagtatattaatgttgactgttaattcttaagcaagaaacttttttcttgatgagactcacagatctacacaaactacaaaagttaattttcttgttacacccactgcactctgcaaccagtgttgcctgcctcatggcagttggatcagctcctttacaaaaaagaaaaaaaaaaaaccaacagcaacaaaacagagcccatccatgtcagccacaccaatagtttcatgttaattctttgccactggagtcaattttgctatgagcaatgtaaggctggtaacctttaaattatttggttgatgtggaaaattggtgatgtaacactgtttctagatttttttcattgcctttttattctgatattaggttaatcactttgaagctatagttatgctgtaacatttagcatggcttcacaccaagttagtgtagccaatgaggaaaaagttaccataatgacagcagttgtccgagaagtgacagctgtattactcagagcttttacttcttacacctagaatattaaaatataaaacaaggggagaaatgtgacagtctattttcagttgcacatatgttccttatatataatgtttgacagttcaatctctgggtggaataaagaacacttacgtatcagtaatgggaatttttaaagatttaaaacaaatatgcaaaaatttgctatgccaagatgctggagcataatataagactgtatttggtgtgcttgttttgtttctttggtagagtttattaggtgaatcttctaaaactttccttctgttggatcccagtgacgtggaagtcatcagaaccccacggtacttggagtacctctctgcaccaagatagctggctgattttctgctcagtcacaattttacttgaaagcaagaattgtcctagctccttttccattattccaaaacgtttaacgttcaaagcagggtctcattaaaaaagaaactactggttgatataattgagatattacaatttcagaataaacatttgatta

SEQ ID NO: 426225 - DNA, 8650 bp, Homo sapiens
cttttctcaagacaactacataagcagacaaaattgcaaagatctgccctgtgtcgagtatgacagccacgactcgtggctctccggtcggagggaatgacaaccagggccaggctcctgatggacagtctctgccccccctccaacagaatcagacttcatcgcctgattcttccaatgaaaattccccggcaactcccccagatgagcaaggtcaaggtgatgccccaccacagcttgaagatgaggaacctgcatttccacatactgacttggccaagttggatgacatgatcaacaggcctcgatgggtggttccagttttgccgaaaggggaattagaagtgcttttagaagctgctattgatcttagtaaaaagggccttgatgttaaaagtgaagcatgtcagcgatttttccgtgatgggctaacaatatcattcactaaaattcttacagatgaagcagtgagtggctggaagtttgaaattcattcatcgtctggtggagctatgtgtggccaagttgtcccaagactggtttccacttttagaacttcttgccatggccttaaatcctcattgcaaattccatatctacaatggtacacgtccatgtgaatcagtttcctcaagtgttcagttgcctgaagatgaactctttgctcgttctccagatcctcgatcaccaaagggttggctagtggatcttctcaacaaatttggcactttaaatgggttccagattttgcatgatcgttttattaatggatcagcattaaacgttcaaataattgcagcccttattaaaccatttgggcaatgctatgagtttctcactcttcatacagtgaaaaagtactttcttccaataatagaaatggttccacagtttttagaaaacttaactgatgaagaactgaaaaaagaagcaaagaatgaagccaaaaatgatgctctttcaatgattattaaatctttgaagaatttagcttcaagggttccaggacaagaagaaactgttaaaaacttagaaatatttaggttaaaaatgatacttagattattgcaaatttcttctttcaatggaaagatgaatgcactgaatgaagttaataaggtgatatctagtgtatcatactatactcatcgacatggtaatcctgaggaggaagagtggctcacagctgaacgaatggcagaatggatacagcagaacaatatcttatccatagtgttgcgagatagtcttcatcagccacagtatgtagaaaagttagagaagattcttcgttttgtcatcaaagaaaaagctctgaccttacaggatcttgataatatctgggcagcacaggcagggaaacatgaagccattgtgaagaatgtacatgatctcctggcaaaattggcatgggatttttctcctgaacaacttgatcatccttttgattgttttaaggccagtcggacaaatgcgagtaaaaagcaacgtgaaaagctacttgagctgatacgtcgtcttgcagaagatgataaagatggtgtgatggcacacagagtgttgaaccttctgtggaatctggctcacagtgatgatgtgcctgtagatatcatggacctggctctcagtgcccacataaaaatactagattacagttgctcccaggaccgtgatacacaaaagatccaatggatagatcgctttatagaagaacttcgcacaaatgacaaatgggttattcccgcactgaaacaaattagagaaatttgtagtttgtttggtgaagcgcctcaaaatttgagtcaaactcagcgaagtccccatgtgttttatcgccatgacttaatcaatcaacttcaacacaatcatgccctagttactttggtagcagaaaaccttgcaacttacatggaaagcatgagactatatgctagagaccatgaagattatgacccacaaactgtgaggctgggaagtagatatagtcatgttcaagaagttcaagaacggcttaacttccttagatttttattgaaggatggtcagctgtggctatgtgctcctcaggcaaaacaaatatggaaatgcttagctgagaatgcagtttacctttgtgatcgtgaagcctgttttaagtggtattccaagttgatgggggatgaaccagacttagatcctgatattaataaggacttctttgaaagtaatgtgcttcagcttgatccttctctgttaactgaaaatggaatgaagtgttttgagcgattcttcaaagctgtgaattgtcgagaaggaaaactagtagcaaaaaggagagcctatatgatggatgacttggagttaataggattagattacctttggagggtcgtgattcagagtaatgatgatattgccagcagagctatagatctcctcaaagagatatacacgaaccttggtccaagactacaagtcaatcaggtggtgatccatgaagacttcattcagtcttgttttgatcgtctgaaggcttcctatgacacattgtgtgttttggatggtgacaaagacagtgttaattgtgcaagacaggaagctgttcgaatggttcgagtattaactgttttaagggaatatataaatgaatgtgacagtgattatcatgaggaaagaacaattctccctatgtcgagagcattccgcggtaaacacctctcttttgtagttcgatttccaaaccagggcagacaggttgatgacttggaggtatggtctcatacaaatgatacaattggttcagtacgacgatgtattctcaatcgtattaaagccaacgtagcccatacaaaaattgagctctttgtgggcggtgagctgatagatcctgcagatgatagaaagttgattggacaattaaacttaaaagataaatcgcttattacagccaaacttacacagataagttccaatatgccttcaagccctgatagctcttctgattcctccactggatctcctggaaaccatggtaatcattacagtgatggtcccaatccagaagtggaaagctgtttgcctggagtgataatgtcactgcatcccagatacatctcttttctttggcaagttgcagacttaggtagcagcctaaatatgccaccccttagagatggagcaagagtacttatgaaacttatgccgccagatagcacaacgatagaaaaattaagagctatttgtttagaccatgccaaacttggagaaagcagccttagtccatctcttgactcacttttctttggtccttcagcctcacaagtgctatatctaacagaggtagtctatgccttgttaatgcctgctggtgcacctctggctgatgattcctctgattttcagtttcacttcttgaaaagtggtggcctaccccttgtactgagtatgctaaccagaaataacttcctaccgaatgcagatatggaaactcgaaggggtgcctacctcaatgctcttaaaatagccaagcttttgctaactgccattggctatggtcatgttcgagctgtggcagaagcttgtcagccaggtgtagaaggtgtgaatcccatgacacagatcaaccaagttacccatgatcaagcagtggtgctacaaagtgcccttcagagcattcctaatccatcatccgagtgcatgcttagaaatgtgtcagttcgtcttgctcagcagatatctgatgaggcttcaagatatatgcctgatatttgtgtaattagagctatacaaaaaattatctgggcatcaggatgtgggtcgttacagctagtatttagcccaaatgaagaaatcactaaaatttatgagaagaccaatgcaggcaatgagccagacttggaagacgaacaggtttgctgtgaagcattggaagtgatgaccttatgttttgccttgattccaacagccttagatgctcttagtaaagaaaaggcttggcagacattcatcattgacttactattgcactgtcacagcaaaactgttcgtcaggtggcacaggagcagttctttttaatgtgcaccagatgttgcatgggacaccggcctctacttttcttcattactctactctttactgttttggggagcacagcaagagagagagctaaacactcaggcgactactttactcttttaagacaccttcttaattacgcttacaatagtaatattaatgtacccaatgctgaagttcttctcaataatgaaattgattggcttaaaagaattagggatgatgttaaaagaacaggagaaacgggtattgaagagacgatcttagagggccaccttggagtgacaaaggagttactggcctttcaaacttctgagaaaaaatttcatattggttgtgaaaaaggaggtgctaatctcattaaagaattaattgatgatttcatatttcctgcatccaatgtttacctacagtatatgagaaatggagagcttccagctgaacaggctattccggtctgtggttcaccacctacaattaatgctggttttgaattacttgtagcattagctgttggctgtgtgaggaatctcaaacaaatagtagattctttgactgaaatgtattacattggcacagcaataactacttgtgaagcacttactgagtgggaatatctgccacctgttggaccccgcccacccaaaggattcgtggggctgaaaaatgccggtgctacttgttacatgaattctgtgattcagcaactctacatgattccttccattaggaacggtattcttgccattgaaggcacaggtagtgatgtagatgatgatatgtctggggatgagaagcaggacaatgagagcaatgttgatcccagggatgatgtatttggatatcctcaacaatttgaagataaaccagcattaagtaaaactgaagatagaaaagagtacaacattggtgtcctaagacaccttcaggtcatctttggtcatttagctgcttctcgactgcaatactatgtgcccagaggattttggaaacagttcaggctttggggtgagcctgttaatctgcgtgaacaacacgatgctttagaattttttaattcattggtggatagtttagatgaagctttaaaagctttaggacatccagctatgctaagtaaagtcttaggaggttcctttgctgatcagaagatctgccaaggctgcccacataggtacgaatgtgaagaatcttttacgaccctaaacgtagacattagaaatcaccaaaatcttcttgattctttggaacagtatgtcaaaggagatttactagaaggtgcaaatgcatatcattgtgaaaaatgcaataaaaaggttgataccgtaaagcgcttgctgattaaaaaattacctcctgttcttgctatacaactaaagcgatttgactatgactgggaaagagaatgtgcaatcaagttcaatgattattttgaatttcctcgagagctggacatggaaccttacacagttgcaggtgtcgcaaagctggaaggggataatgtaaacccagagagtcagttgatacaacagagtgagcagtctgaaagtgagacagcaggaagcacaaaatacagacttgtgggtgtgctcgtacacagtggtcaagcgagtggggggcattattattcttacatcatccaaaggaatggtggagatggtgagagaaatcgctggtataaatttgatgatggtgatgtaacagaatgtaaaatggatgatgacgaagaaatgaaaaaccagtgttttggtggagagtacatgggagaagtgtttgatcacatgatgaagcgtatgtcatacaggcgccagaaaaggtggtggaatgcttatatacttttttatgaacgaatggacacaatagaccaagatgatgagttgataagatatatatcagagcttgctatcaccaccagacctcatcagattattatgccatcagccattgagagaagtgtacggaaacagaacgtacaattcatgcataaccgaatgcagtacagtatggagtattttcagtttatgaaaaaactgcttacatgtaatggcgtttacttaaaccctcctcccgggcaagatcacctgttgcctgaagcagaagaaatcactatgatcagtattcaacttgctgctaggttcctctttactacaggatttcacacaaagaaagtagtccgtggctctgccagtgattggtatgatgcattgtgtattctccttcgtcacagcaagaatgtacgtttttggtttgctcataacgtcctttttaatgtttcaaatcgcttctccgaataccttctggagtgccctagtgcagaagtgaggggtgcgtttgcaaaacttatagtctttattgcacatttttccttgcaagatgggccatgtccttcaccttttgcctctcctggaccttctagtcaggcttatgacaacttaagcttgagtgatcacttactaagagcagtactaaatctcttgagaagggaagtttcagagcatgggcgtcatttacagcagtatttcaacctgtttgtaatgtatgccaatttaggtgtggcagagaagacacagcttctgaaattgagtgtacctgctacttttatgcttgtgtctttagatgaaggtccaggtcctccaatcaaataccagtatgctgaattaggcaaattatactcagtagtgtcacagctgatccgctgttgcaatgtctcttcaagaatgcagtcttcaatcaatggtaatcctcctcttcccaatccttttggtgatcctaatttatcacaacctataatgccaattcagcagaatgtggcagacattttatttgtgagaacaagttatgtgaagaaaatcattgaagactgcagtaattcagaggaaaccgtcaaattgcttcgtttttgctgctgggagaatcctcagttctcatctactgtcctcagtgaacttctctggcaggttgcatattcctatacctatgaactgcggccctatttggatctgcttttgcaaatcttactgattgaggactcctggcaaactcacagaattcataatgcactgaaaggaattccagatgaccgagatgggctgtttgacacaatccagcgctctaagaatcactatcaaaaaagagcataccagtgtataaaatgtatggtagctctatttagtaactgtcctgttgcttaccaaatcctgcagggcaatggagatcttaaaagaaagtggacctgggcagtggaatggcttggagatgaacttgaaagaagaccatatactggcaatcctcagtacacttacaacaattggtctcccccagtgcaaagcaatgaaacgtccaatggttatttcttggagagatcacatagtgctaggatgacacttgcaaaagcttgtgaactctgtccagaggaggagccagatgaccaagatgctccagatgaacatgagtcgcctccacctgaagatgccccattgtacccccattcacctggatctcagtatcaacagaataaccatgtgcatggacagccatatacaggcccagcagcacatcacatgaacaaccctcagagaactggccaacgagcacaagaaaattatgaaggcagtgaagaagtatccccacctcaaaccaaggatcaatgaaatgcacataattaactggttccatcaagactgtgcacccaggccttacagtccaacctttttctgtgtctggctaatatttaaaactagaaaaactattcctaatcaacatggagtggagagtttattcactgtcttatctgcagaaatttgctgtcaatatataacccgcctgcagtggaaagtgtatagtgttttgtaataaatggcctgatgctaatgtgtaaatggcaaaggtgtatatagtatattaatgttgactgttaattcttaagcaagaaacttttttcttgatgagactcacagatctacacaaactacaaaagttaattttcttgttacacccactgcactctgcaaccagtgttgcctgcctcatggcagttggatcagctcctttacaaaaaagaaaaaaaaaaaaccaacagcaacaaaacagagcccatccatgtcagccacaccaatagtttcatgttaattctttgccactggagtcaattttgctatgagcaatgtaaggctggtaacctttaaattatttggttgatgtggaaaattggtgatgtaacactgtttctagatttttttcattgcctttttattctgatattaggttaatcactttgaagctatagttatgctgtaacatttagcatggcttcacaccaagttagtgtagccaatgaggaaaaagttaccataatgacagcagttgtccgagaagtgacagctgtattactcagagcttttacttcttacacctagaatattaaaatataaaacaaggggagaaatgtgacagtctcactgcattgcccaggctggattgtatgtggctattcaccggaaagagcatagtatgttacagcctccacctcctgtaccaagatgtccgcctgcccagcctcctgataagctggtcagacataacggtgtcctctagatc

SEQ ID NO: 426226 - DNA, 9648 bp, Homo sapiens
cttttctcaagacaactacataagcagacaaaattgcaaagatctgccctgtgtcgagtatgacagccacgactcgtggctctccggtcggagggaatgacaaccagggccaggctcctgatggacagtctctgccccccctccaacagaatcagacttcatcgcctgattcttccaatgaaaattccccggcaactcccccagatgagcaaggtcaaggtgatgccccaccacagcttgaagatgaggaacctgcatttccacatactgacttggccaagttggatgacatgatcaacaggcctcgatgggtggttccagttttgccgaaaggggaattagaagtgcttttagaagctgctattgatcttagtaaaaagggccttgatgttaaaagtgaagcatgtcagcgatttttccgtgatgggctaacaatatcattcactaaaattcttacagatgaagcagtgagtggctggaagtttgaaattcattcatcgtctggtggagctatgtgtggccaagttgtcccaagactggtttccacttttagaacttcttgccatggccttaaatcctcattgcaaattccatatctacaatggtacacgtccatgtgaatcagtttcctcaagtgttcagttgcctgaagatgaactctttgctcgttctccagatcctcgatcaccaaagggttggctagtggatcttctcaacaaatttggcactttaaatgggttccagattttgcatgatcgttttattaatggatcagcattaaacgttcaaataattgcagcccttattaaaccatttgggcaatgctatgagtttctcactcttcatacagtgaaaaagtactttcttccaataatagaaatggttccacagtttttagaaaacttaactgatgaagaactgaaaaaagaagcaaagaatgaagccaaaaatgatgctctttcaatgattattaaatctttgaagaatttagcttcaagggttccaggacaagaagaaactgttaaaaacttagaaatatttaggttaaaaatgatacttagattattgcaaatttcttctttcaatggaaagatgaatgcactgaatgaagttaataaggtgatatctagtgtatcatactatactcatcgacatggtaatcctgaggaggaagagtggctcacagctgaacgaatggcagaatggatacagcagaacaatatcttatccatagtgttgcgagatagtcttcatcagccacagtatgtagaaaagttagagaagattcttcgttttgtcatcaaagaaaaagctctgaccttacaggatcttgataatatctgggcagcacaggcagggaaacatgaagccattgtgaagaatgtacatgatctcctggcaaaattggcatgggatttttctcctgaacaacttgatcatccttttgattgttttaaggccagtcggacaaatgcgagtaaaaagcaacgtgaaaagctacttgagctgatacgtcgtcttgcagaagatgataaagatggtgtgatggcacacagagtgttgaaccttctgtggaatctggctcacagtgatgatgtgcctgtagatatcatggacctggctctcagtgcccacataaaaatactagattacagttgctcccaggaccgtgatacacaaaagatccaatggatagatcgctttatagaagaacttcgcacaaatgacaaatgggttattcccgcactgaaacaaattagagaaatttgtagtttgtttggtgaagcgcctcaaaatttgagtcaaactcagcgaagtccccatgtgttttatcgccatgacttaatcaatcaacttcaacacaatcatgccctagttactttggtagcagaaaaccttgcaacttacatggaaagcatgagactatatgctagagaccatgaagattatgacccacaaactgtgaggctgggaagtagatatagtcatgttcaagaagttcaagaacggcttaacttccttagatttttattgaaggatggtcagctgtggctatgtgctcctcaggcaaaacaaatatggaaatgcttagctgagaatgcagtttacctttgtgatcgtgaagcctgttttaagtggtattccaagttgatgggggatgaaccagacttagatcctgatattaataaggacttctttgaaagtaatgtgcttcagcttgatccttctctgttaactgaaaatggaatgaagtgttttgagcgattcttcaaagctgtgaattgtcgagaaggaaaactagtagcaaaaaggagagcctatatgatggatgacttggagttaataggattagattacctttggagggtcgtgattcagagtaatgatgatattgccagcagagctatagatctcctcaaagagatatacacgaaccttggtccaagactacaagtcaatcaggtggtgatccatgaagacttcattcagtcttgttttgatcgtctgaaggcttcctatgacacattgtgtgttttggatggtgacaaagacagtgttaattgtgcaagacaggaagctgttcgaatggttcgagtattaactgttttaagggaatatataaatgaatgtgacagtgattatcatgaggaaagaacaattctccctatgtcgagagcattccgcggtaaacacctctcttttgtagttcgatttccaaaccagggcagacaggttgatgacttggaggtatggtctcatacaaatgatacaattggttcagtacgacgatgtattctcaatcgtattaaagccaacgtagcccatacaaaaattgagctctttgtgggcggtgagctgatagatcctgcagatgatagaaagttgattggacaattaaacttaaaagataaatcgcttattacagccaaacttacacagataagttccaatatgccttcaagccctgatagctcttctgattcctccactggatctcctggaaaccatggtaatcattacagtgatggtcccaatccagaagtggaaagctgtttgcctggagtgataatgtcactgcatcccagatacatctcttttctttggcaagttgcagacttaggtagcagcctaaatatgccaccccttagagatggagcaagagtacttatgaaacttatgccgccagatagcacaacgatagaaaaattaagagctatttgtttagaccatgccaaacttggagaaagcagccttagtccatctcttgactcacttttctttggtccttcagcctcacaagtgctatatctaacagaggtagtctatgccttgttaatgcctgctggtgcacctctggctgatgattcctctgattttcagtttcacttcttgaaaagtggtggcctaccccttgtactgagtatgctaaccagaaataacttcctaccgaatgcagatatggaaactcgaaggggtgcctacctcaatgctcttaaaatagccaagcttttgctaactgccattggctatggtcatgttcgagctgtggcagaagcttgtcagccaggtgtagaaggtgtgaatcccatgacacagatcaaccaagttacccatgatcaagcagtggtgctacaaagtgcccttcagagcattcctaatccatcatccgagtgcatgcttagaaatgtgtcagttcgtcttgctcagcagatatctgatgaggcttcaagatatatgcctgatatttgtgtaattagagctatacaaaaaattatctgggcatcaggatgtgggtcgttacagctagtatttagcccaaatgaagaaatcactaaaatttatgagaagaccaatgcaggcaatgagccagacttggaagacgaacaggtttgctgtgaagcattggaagtgatgaccttatgttttgccttgattccaacagccttagatgctcttagtaaagaaaaggcttggcagacattcatcattgacttactattgcactgtcacagcaaaactgttcgtcaggtggcacaggagcagttctttttaatgtgcaccagatgttgcatgggacaccggcctctacttttcttcattactctactctttactgttttggggagcacagcaagagagagagctaaacactcaggcgactactttactcttttaagacaccttcttaattacgcttacaatagtaatattaatgtacccaatgctgaagttcttctcaataatgaaattgattggcttaaaagaattagggatgatgttaaaagaacaggagaaacgggtattgaagagacgatcttagagggccaccttggagtgacaaaggagttactggcctttcaaacttctgagaaaaaatttcatattggttgtgaaaaaggaggtgctaatctcattaaagaattaattgatgatttcatatttcctgcatccaatgtttacctacagtatatgagaaatggagagcttccagctgaacaggctattccggtctgtggttcaccacctacaattaatgctggttttgaattacttgtagcattagctgttggctgtgtgaggaatctcaaacaaatagtagattctttgactgaaatgtattacattggcacagcaataactacttgtgaagcacttactgagtgggaatatctgccacctgttggaccccgcccacccaaaggattcgtggggctgaaaaatgccggtgctacttgttacatgaattctgtgattcagcaactctacatgattccttccattaggaacggtattcttgccattgaaggcacaggtagtgatgtagatgatgatatgtctggggatgagaagcaggacaatgagagcaatgttgatcccagggatgatgtatttggatatcctcaacaatttgaagataaaccagcattaagtaaaactgaagatagaaaagagtacaacattggtgtcctaagacaccttcaggtcatctttggtcatttagctgcttctcgactgcaatactatgtgcccagaggattttggaaacagttcaggctttggggtgagcctgttaatctgcgtgaacaacacgatgctttagaattttttaattcattggtggatagtttagatgaagctttaaaagctttaggacatccagctatgctaagtaaagtcttaggaggttcctttgctgatcagaagatctgccaaggctgcccacataggtacgaatgtgaagaatcttttacgaccctaaacgtagacattagaaatcaccaaaatcttcttgattctttggaacagtatgtcaaaggagatttactagaaggtgcaaatgcatatcattgtgaaaaatgcaataaaaaggttgataccgtaaagcgcttgctgattaaaaaattacctcctgttcttgctatacaactaaagcgatttgactatgactgggaaagagaatgtgcaatcaagttcaatgattattttgaatttcctcgagagctggacatggaaccttacacagttgcaggtgtcgcaaagctggaaggggataatgtaaacccagagagtcagttgatacaacagagtgagcagtctgaaagtgagacagcaggaagcacaaaatacagacttgtgggtgtgctcgtacacagtggtcaagcgagtggggggcattattattcttacatcatccaaaggaatggtggagatggtgagagaaatcgctggtataaatttgatgatggtgatgtaacagaatgtaaaatggatgatgacgaagaaatgaaaaaccagtgttttggtggagagtacatgggagaagtgtttgatcacatgatgaagcgtatgtcatacaggcgccagaaaaggtggtggaatgcttatatacttttttatgaacgaatggacacaatagaccaagatgatgagttgataagatatatatcagagcttgctatcaccaccagacctcatcagattattatgccatcagccattgagagaagtgtacggaaacagaacgtacaattcatgcataaccgaatgcagtacagtatggagtattttcagtttatgaaaaaactgcttacatgtaatggcgtttacttaaaccctcctcccgggcaagatcacctgttgcctgaagcagaagaaatcactatgatcagtattcaacttgctgctaggttcctctttactacaggatttcacacaaagaaagtagtccgtggctctgccagtgattggtatgatgcattgtgtattctccttcgtcacagcaagaatgtacgtttttggtttgctcataacgtcctttttaatgtttcaaatcgcttctccgaataccttctggagtgccctagtgcagaagtgaggggtgcgtttgcaaaacttatagtctttattgcacatttttccttgcaagatgggccatgtccttcaccttttgcctctcctggaccttctagtcaggcttatgacaacttaagcttgagtgatcacttactaagagcagtactaaatctcttgagaagggaagtttcagagcatgggcgtcatttacagcagtatttcaacctgtttgtaatgtatgccaatttaggtgtggcagagaagacacagcttctgaaattgagtgtacctgctacttttatgcttgtgtctttagatgaaggtccaggtcctccaatcaaataccagtatgctgaattaggcaaattatactcagtagtgtcacagctgatccgctgttgcaatgtctcttcaagaatgcagtcttcaatcaatggtaatcctcctcttcccaatccttttggtgatcctaatttatcacaacctataatgccaattcagcagaatgtggcagacattttatttgtgagaacaagttatgtgaagaaaatcattgaagactgcagtaattcagaggaaaccgtcaaattgcttcgtttttgctgctgggagaatcctcagttctcatctactgtcctcagtgaacttctctggcaggttgcatattcctatacctatgaactgcggccctatttggatctgcttttgcaaatcttactgattgaggactcctggcaaactcacagaattcataatgcactgaaaggaattccagatgaccgagatgggctgtttgacacaatccagcgctctaagaatcactatcaaaaaagagcataccagtgtataaaatgtatggtagctctatttagtaactgtcctgttgcttaccaaatcctgcagggcaatggagatcttaaaagaaagtggacctgggcagtggaatggcttggagatgaacttgaaagaagaccatatactggcaatcctcagtacacttacaacaattggtctcccccagtgcaaagcaatgaaacgtccaatggttatttcttggagagatcacatagtgctaggatgacacttgcaaaagcttgtgaactctgtccagaggaggtaaaaaaagccaccagtgtgcagcagatagaaatggaagagagcaaagagccagatgaccaagatgctccagatgaacatgagtcgcctccacctgaagatgccccattgtacccccattcacctggatctcagtatcaacagaataaccatgtgcatggacagccatatacaggcccagcagcacatcacatgaacaaccctcagagaactggccaacgagcacaagaaaattatgaaggcagtgaagaagtatccccacctcaaaccaaggatcaatgaaatgcacataattaactggttccatcaagactgtgcacccaggccttacagtccaacctttttctgtgtctggctaatatttaaaactagaaaaactattcctaatcaacatggagtggagagtttattcactgtcttatctgcagaaatttgctgtcaatatataacccgcctgcagtggaaagtgtatagtgttttgtaataaatggcctgatgctaatgtgtaaatggcaaaggtgtatatagtatattaatgttgactgttaattcttaagcaagaaacttttttcttgatgagactcacagatctacacaaactacaaaagttaattttcttgttacacccactgcactctgcaaccagtgttgcctgcctcatggcagttggatcagctcctttacaaaaaagaaaaaaaaaaaaccaacagcaacaaaacagagcccatccatgtcagccacaccaatagtttcatgttaattctttgccactggagtcaattttgctatgagcaatgtaaggctggtaacctttaaattatttggttgatgtggaaaattggtgatgtaacactgtttctagatttttttcattgcctttttattctgatattaggttaatcactttgaagctatagttatgctgtaacatttagcatggcttcacaccaagttagtgtagccaatgaggaaaaagttaccataatgacagcagttgtccgagaagtgacagctgtattactcagagcttttacttcttacacctagaatattaaaatataaaacaaggggagaaatgtgacagtctattttcagttgcacatatgttccttatatataatgtttgacagttcaatctctgggtggaataaagaacacttacgtatcagtaatgggaatttttaaagatttaaaacaaatatgcaaaaatttgctatgccaagatgctggagcataatataagactgtatttggtgtgcttgttttgtttctttggtagagtttattaggtgaatcttctaaaactttccttctgttggatcccagtgacgtggaagtcatcagaaccccacggtacttggagtacctctctgcaccaagatagctggctgattttctgctcagtcacaattttacttgaaagcaagaattgtcctagctccttttccattattccaaaacgtttaacgttcaaagcagggtctcattaaaaaagaaactactggttgatataattgagatattacaatttcagaataaacatttgattaaaaataaggaaatcctcagttcatactgtatttaaaagagaattggtaacttgaatgtgtgtaattttttggaacctgtctaaaaaccaaatacccctgcaaacagatacagcccaccctattctatttaaatattttgctgttttattttatagaaattattttgctgaattcacaaatagaatttgatttaagaagaactttttgtcctgtggtgtgtttttggttttttttttggttactttttttgtcctttttttttttttttaaaaagaggactgcatattaaaattcattctgtgcatagcatgcctaggcatgacactgattcaggatttcagtcacatcaagtttttgtgcacagaaagttttgacctttggccctctactgaagattttgagaaatcaggatgttgacactgtaaaagtttcctaacataatcttgtactttttgtatgttttttatatacatgtatatttaatgagcacaagcttggttgtattttttacaattcagttaatagggaaatgttttgtcaaaaggctacacttggaactgaacaaagcagaaacaaaattgagcattgcattattttgtgattaaaaggggcaggtatttaagataaa

SEQ ID NO: 426227 - DNA, 9800 bp, Homo sapiens
ccggatccgccatattgacgaggacgggcatccgcggctgcggacgctagtctccgccgccgccggagccgcaacctctccgcacccggccccgtcagggcctctgtcgcgcctagcccctccccgccttacacagctcccgggcctcgcgggagcccgccgccgccgcctctctctcacgggaggcggccgccttagcgcccggtgcttgggtcggcgccgggagcgaggagcgagctacttcaaagccaccaggcctggagcggggacagaggcggcgactaggggaaggtgaagccgtcgctgcaggaggaggagcaggaggaggtgacgcaggagaaacgcaccgcccggagcccgtctgagctcagcgagagccccagcatgagcaaggtcaaggtgatgccccaccacagcttgaagatgaggaacctgcatttccacatactgacttggccaagttggatgacatgatcaacaggcctcgatgggtggttccagttttgccgaaaggggaattagaagtgcttttagaagctgctattgatcttagtaaaaagggccttgatgttaaaagtgaagcatgtcagcgatttttccgtgatgggctaacaatatcattcactaaaattcttacagatgaagcagtgagtggctggaagtttgaaattcataggtgtattattaacaatactcatcgtctggtggagctatgtgtggccaagttgtcccaagactggtttccacttttagaacttcttgccatggccttaaatcctcattgcaaattccatatctacaatggtacacgtccatgtgaatcagtttcctcaagtgttcagttgcctgaagatgaactctttgctcgttctccagatcctcgatcaccaaagggttggctagtggatcttctcaacaaatttggcactttaaatgggttccagattttgcatgatcgttttattaatggatcagcattaaacgttcaaataattgcagcccttattaaaccatttgggcaatgctatgagtttctcactcttcatacagtgaaaaagtactttcttccaataatagaaatggttccacagtttttagaaaacttaactgatgaagaactgaaaaaagaagcaaagaatgaagccaaaaatgatgctctttcaatgattattaaatctttgaagaatttagcttcaagggttccaggacaagaagaaactgttaaaaacttagaaatatttaggttaaaaatgatacttagattattgcaaatttcttctttcaatggaaagatgaatgcactgaatgaagttaataaggtgatatctagtgtatcatactatactcatcgacatggtaatcctgaggaggaagagtggctcacagctgaacgaatggcagaatggatacagcagaacaatatcttatccatagtgttgcgagatagtcttcatcagccacagtatgtagaaaagttagagaagattcttcgttttgtcatcaaagaaaaagctctgaccttacaggatcttgataatatctgggcagcacaggcagggaaacatgaagccattgtgaagaatgtacatgatctcctggcaaaattggcatgggatttttctcctgaacaacttgatcatccttttgattgttttaaggccagtcggacaaatgcgagtaaaaagcaacgtgaaaagctacttgagctgatacgtcgtcttgcagaagatgataaagatggtgtgatggcacacagagtgttgaaccttctgtggaatctggctcacagtgatgatgtgcctgtagatatcatggacctggctctcagtgcccacataaaaatactagattacagttgctcccaggaccgtgatacacaaaagatccaatggatagatcgctttatagaagaacttcgcacaaatgacaaatgggttattcccgcactgaaacaaattagagaaatttgtagtttgtttggtgaagcgcctcaaaatttgagtcaaactcagcgaagtccccatgtgttttatcgccatgacttaatcaatcaacttcaacacaatcatgccctagttactttggtagcagaaaaccttgcaacttacatggaaagcatgagactatatgctagagaccatgaagattatgacccacaaactgtgaggctgggaagtagatatagtcatgttcaagaagttcaagaacggcttaacttccttagatttttattgaaggatggtcagctgtggctatgtgctcctcaggcaaaacaaatatggaaatgcttagctgagaatgcagtttacctttgtgatcgtgaagcctgttttaagtggtattccaagttgatgggggatgaaccagacttagatcctgatattaataaggacttctttgaaagtaatgtgcttcagcttgatccttctctgttaactgaaaatggaatgaagtgttttgagcgattcttcaaagctgtgaattgtcgagaaggaaaactagtagcaaaaaggagagcctatatgatggatgacttggagttaataggattagattacctttggagggtcgtgattcagagtaatgatgatattgccagcagagctatagatctcctcaaagagatatacacgaaccttggtccaagactacaagtcaatcaggtggtgatccatgaagacttcattcagtcttgttttgatcgtctgaaggcttcctatgacacattgtgtgttttggatggtgacaaagacagtgttaattgtgcaagacaggaagctgttcgaatggttcgagtattaactgttttaagggaatatataaatgaatgtgacagtgattatcatgaggaaagaacaattctccctatgtcgagagcattccgcggtaaacacctctcttttgtagttcgatttccaaaccagggcagacaggttgatgacttggaggtatggtctcatacaaatgatacaattggttcagtacgacgatgtattctcaatcgtattaaagccaacgtagcccatacaaaaattgagctctttgtgggcggtgagctgatagatcctgcagatgatagaaagttgattggacaattaaacttaaaagataaatcgcttattacagccaaacttacacagataagttccaatatgccttcaagccctgatagctcttctgattcctccactggatctcctggaaaccatggtaatcattacagtgatggtcccaatccagaagtggaaagctgtttgcctggagtgataatgtcactgcatcccagatacatctcttttctttggcaagttgcagacttaggtagcagcctaaatatgccaccccttagagatggagcaagagtacttatgaaacttatgccgccagatagcacaacgatagaaaaattaagagctatttgtttagaccatgccaaacttggagaaagcagccttagtccatctcttgactcacttttctttggtccttcagcctcacaagtgctatatctaacagaggtagtctatgccttgttaatgcctgctggtgcacctctggctgatgattcctctgattttcagtttcacttcttgaaaagtggtggcctaccccttgtactgagtatgctaaccagaaataacttcctaccgaatgcagatatggaaactcgaaggggtgcctacctcaatgctcttaaaatagccaagcttttgctaactgccattggctatggtcatgttcgagctgtggcagaagcttgtcagccaggtgtagaaggtgtgaatcccatgacacagatcaaccaagttacccatgatcaagcagtggtgctacaaagtgcccttcagagcattcctaatccatcatccgagtgcatgcttagaaatgtgtcagttcgtcttgctcagcagatatctgatgaggcttcaagatatatgcctgatatttgtgtaattagagctatacaaaaaattatctgggcatcaggatgtgggtcgttacagctagtatttagcccaaatgaagaaatcactaaaatttatgagaagaccaatgcaggcaatgagccagacttggaagacgaacaggtttgctgtgaagcattggaagtgatgaccttatgttttgccttgattccaacagccttagatgctcttagtaaagaaaaggcttggcagacattcatcattgacttactattgcactgtcacagcaaaactgttcgtcaggtggcacaggagcagttctttttaatgtgcaccagatgttgcatgggacaccggcctctacttttcttcattactctactctttactgttttggggagcacagcaagagagagagctaaacactcaggcgactactttactcttttaagacaccttcttaattacgcttacaatagtaatattaatgtacccaatgctgaagttcttctcaataatgaaattgattggcttaaaagaattagggatgatgttaaaagaacaggagaaacgggtattgaagagacgatcttagagggccaccttggagtgacaaaggagttactggcctttcaaacttctgagaaaaaatttcatattggttgtgaaaaaggaggtgctaatctcattaaagaattaattgatgatttcatatttcctgcatccaatgtttacctacagtatatgagaaatggagagcttccagctgaacaggctattccggtctgtggttcaccacctacaattaatgctggttttgaattacttgtagcattagctgttggctgtgtgaggaatctcaaacaaatagtagattctttgactgaaatgtattacattggcacagcaataactacttgtgaagcacttactgagtgggaatatctgccacctgttggaccccgcccacccaaaggattcgtggggctgaaaaatgccggtgctacttgttacatgaattctgtgattcagcaactctacatgattccttccattaggaacggtattcttgccattgaaggcacaggtagtgatgtagatgatgatatgtctggggatgagaagcaggacaatgagagcaatgttgatcccagggatgatgtatttggatatcctcaacaatttgaagataaaccagcattaagtaaaactgaagatagaaaagagtacaacattggtgtcctaagacaccttcaggtcatctttggtcatttagctgcttctcgactgcaatactatgtgcccagaggattttggaaacagttcaggctttggggtgagcctgttaatctgcgtgaacaacacgatgctttagaattttttaattcattggtggatagtttagatgaagctttaaaagctttaggacatccagctatgctaagtaaagtcttaggaggttcctttgctgatcagaagatctgccaaggctgcccacataggtacgaatgtgaagaatcttttacgaccctaaacgtagacattagaaatcaccaaaatcttcttgattctttggaacagtatgtcaaaggagatttactagaaggtgcaaatgcatatcattgtgaaaaatgcaataaaaaggttgataccgtaaagcgcttgctgattaaaaaattacctcctgttcttgctatacaactaaagcgatttgactatgactgggaaagagaatgtgcaatcaagttcaatgattattttgaatttcctcgagagctggacatggaaccttacacagttgcaggtgtcgcaaagctggaaggggataatgtaaacccagagagtcagttgatacaacagagtgagcagtctgaaagtgagacagcaggaagcacaaaatacagacttgtgggtgtgctcgtacacagtggtcaagcgagtggggggcattattattcttacatcatccaaaggaatggtggagatggtgagagaaatcgctggtataaatttgatgatggtgatgtaacagaatgtaaaatggatgatgacgaagaaatgaaaaaccagtgttttggtggagagtacatgggagaagtgtttgatcacatgatgaagcgtatgtcatacaggcgccagaaaaggtggtggaatgcttatatacttttttatgaacgaatggacacaatagaccaagatgatgagttgataagatatatatcagagcttgctatcaccaccagacctcatcagattattatgccatcagccattgagagaagtgtacggaaacagaacgtacaattcatgcataaccgaatgcagtacagtatggagtattttcagtttatgaaaaaactgcttacatgtaatggcgtttacttaaaccctcctcccgggcaagatcacctgttgcctgaagcagaagaaatcactatgatcagtattcaacttgctgctaggttcctctttactacaggatttcacacaaagaaagtagtccgtggctctgccagtgattggtatgatgcattgtgtattctccttcgtcacagcaagaatgtacgtttttggtttgctcataacgtcctttttaatgtttcaaatcgcttctccgaataccttctggagtgccctagtgcagaagtgaggggtgcgtttgcaaaacttatagtctttattgcacatttttccttgcaagatgggccatgtccttcaccttttgcctctcctggaccttctagtcaggcttatgacaacttaagcttgagtgatcacttactaagagcagtactaaatctcttgagaagggaagtttcagagcatgggcgtcatttacagcagtatttcaacctgtttgtaatgtatgccaatttaggtgtggcagagaagacacagcttctgaaattgagtgtacctgctacttttatgcttgtgtctttagatgaaggtccaggtcctccaatcaaataccagtatgctgaattaggcaaattatactcagtagtgtcacagctgatccgctgttgcaatgtctcttcaagaatgcagtcttcaatcaatggtaatcctcctcttcccaatccttttggtgatcctaatttatcacaacctataatgccaattcagcagaatgtggcagacattttatttgtgagaacaagttatgtgaagaaaatcattgaagactgcagtaattcagaggaaaccgtcaaattgcttcgtttttgctgctgggagaatcctcagttctcatctactgtcctcagtgaacttctctggcaggttgcatattcctatacctatgaactgcggccctatttggatctgcttttgcaaatcttactgattgaggactcctggcaaactcacagaattcataatgcactgaaaggaattccagatgaccgagatgggctgtttgacacaatccagcgctctaagaatcactatcaaaaaagagcataccagtgtataaaatgtatggtagctctatttagtaactgtcctgttgcttaccaaatcctgcagggcaatggagatcttaaaagaaagtggacctgggcagtggaatggcttggagatgaacttgaaagaagaccatatactggcaatcctcagtacacttacaacaattggtctcccccagtgcaaagcaatgaaacgtccaatggttatttcttggagagatcacatagtgctaggatgacacttgcaaaagcttgtgaactctgtccagaggaggagccagatgaccaagatgctccagatgaacatgagtcgcctccacctgaagatgccccattgtacccccattcacctggatctcagtatcaacagaataaccatgtgcatggacagccatatacaggcccagcagcacatcacatgaacaaccctcagagaactggccaacgagcacaagaaaattatgaaggcagtgaagaagtatccccacctcaaaccaaggatcaatgaaatgcacataattaactggttccatcaagactgtgcacccaggccttacagtccaacctttttctgtgtctggctaatatttaaaactagaaaaactattcctaatcaacatggagtggagagtttattcactgtcttatctgcagaaatttgctgtcaatatataacccgcctgcagtggaaagtgtatagtgttttgtaataaatggcctgatgctaatgtgtaaatggcaaaggtgtatatagtatattaatgttgactgttaattcttaagcaagaaacttttttcttgatgagactcacagatctacacaaactacaaaagttaattttcttgttacacccactgcactctgcaaccagtgttgcctgcctcatggcagttggatcagctcctttacaaaaaagaaaaaaaaaaaaccaacagcaacaaaacagagcccatccatgtcagccacaccaatagtttcatgttaattctttgccactggagtcaattttgctatgagcaatgtaaggctggtaacctttaaattatttggttgatgtggaaaattggtgatgtaacactgtttctagatttttttcattgcctttttattctgatattaggttaatcactttgaagctatagttatgctgtaacatttagcatggcttcacaccaagttagtgtagccaatgaggaaaaagttaccataatgacagcagttgtccgagaagtgacagctgtattactcagagcttttacttcttacacctagaatattaaaatataaaacaaggggagaaatgtgacagtctattttcagttgcacatatgttccttatatataatgtttgacagttcaatctctgggtggaataaagaacacttacgtatcagtaatgggaatttttaaagatttaaaacaaatatgcaaaaatttgctatgccaagatgctggagcataatataagactgtatttggtgtgcttgttttgtttctttggtagagtttattaggtgaatcttctaaaactttccttctgttggatcccagtgacgtggaagtcatcagaaccccacggtacttggagtacctctctgcaccaagatagctggctgattttctgctcagtcacaattttacttgaaagcaagaattgtcctagctccttttccattattccaaaacgtttaacgttcaaagcagggtctcattaaaaaagaaactactggttgatataattgagatattacaatttcagaataaacatttgattaaaaataaggaaatcctcagttcatactgtatttaaaagagaattggtaacttgaatgtgtgtaattttttggaacctgtctaaaaaccaaatacccctgcaaacagatacagcccaccctattctatttaaatattttgctgttttattttatagaaattattttgctgaattcacaaatagaatttgatttaagaagaactttttgtcctgtggtgtgtttttggttttttttttggttactttttttgtcctttttttttttttttaaaaagaggactgcatattaaaattcattctgtgcatagcatgcctaggcatgacactgattcaggatttcagtcacatcaagtttttgtgcacagaaagttttgacctttggccctctactgaagattttgagaaatcaggatgttgacactgtaaaagtttcctaacataatcttgtactttttgtatgttttttatatacatgtatatttaatgagcacaagcttggttgtattttttacaattcagttaatagggaaatgttttgtcaaaaggctacacttggaactgaacaaagcagaaacaaaattgagcattgcattattttgtgattaaaaggggcaggtatttaagataaa

SEQ ID NO: 426228 - DNA, 9620 bp, Homo sapiens
cttttctcaagacaactacataagcagacaaaattgcaaagatctgccctgtgtcgagtatgacagccacgactcgtggctctccggtcggagggaatgacaaccagggccaggctcctgatggacagtctctgccccccctccaacagaatcagacttcatcgcctgattcttccaatgaaaattccccggcaactcccccagatgagcaaggtcaaggtgatgccccaccacagcttgaagatgaggaacctgcatttccacatactgacttggccaagttggatgacatgatcaacaggcctcgatgggtggttccagttttgccgaaaggggaattagaagtgcttttagaagctgctattgatcttagtaaaaagggccttgatgttaaaagtgaagcatgtcagcgatttttccgtgatgggctaacaatatcattcactaaaattcttacagatgaagcagtgagtggctggaagtttgaaattcataggtgtattattaacaatactcatcgtctggtggagctatgtgtggccaagttgtcccaagactggtttccacttttagaacttcttgccatggccttaaatcctcattgcaaattccatatctacaatggtacacgtccatgtgaatcagtttcctcaagtgttcagttgcctgaagatgaactctttgctcgttctccagatcctcgatcaccaaagggttggctagtggatcttctcaacaaatttggcactttaaatgggttccagattttgcatgatcgttttattaatggatcagcattaaacgttcaaataattgcagcccttattaaaccatttgggcaatgctatgagtttctcactcttcatacagtgaaaaagtactttcttccaataatagaaatggttccacagtttttagaaaacttaactgatgaagaactgaaaaaagaagcaaagaatgaagccaaaaatgatgctctttcaatgattattaaatctttgaagaatttagcttcaagggttccaggacaagaagaaactgttaaaaacttagaaatatttaggttaaaaatgatacttagattattgcaaatttcttctttcaatggaaagatgaatgcactgaatgaagttaataaggtgatatctagtgtatcatactatactcatcgacatggtaatcctgaggaggaagagtggctcacagctgaacgaatggcagaatggatacagcagaacaatatcttatccatagtgttgcgagatagtcttcatcagccacagtatgtagaaaagttagagaagattcttcgttttgtcatcaaagaaaaagctctgaccttacaggatcttgataatatctgggcagcacaggcagggaaacatgaagccattgtgaagaatgtacatgatctcctggcaaaattggcatgggatttttctcctgaacaacttgatcatccttttgattgttttaaggccagtcggacaaatgcgagtaaaaagcaacgtgaaaagctacttgagctgatacgtcgtcttgcagaagatgataaagatggtgtgatggcacacagagtgttgaaccttctgtggaatctggctcacagtgatgatgtgcctgtagatatcatggacctggctctcagtgcccacataaaaatactagattacagttgctcccaggaccgtgatacacaaaagatccaatggatagatcgctttatagaagaacttcgcacaaatgacaaatgggttattcccgcactgaaacaaattagagaaatttgtagtttgtttggtgaagcgcctcaaaatttgagtcaaactcagcgaagtccccatgtgttttatcgccatgacttaatcaatcaacttcaacacaatcatgccctagttactttggtagcagaaaaccttgcaacttacatggaaagcatgagactatatgctagagaccatgaagattatgacccacaaactgtgaggctgggaagtagatatagtcatgttcaagaagttcaagaacggcttaacttccttagatttttattgaaggatggtcagctgtggctatgtgctcctcaggcaaaacaaatatggaaatgcttagctgagaatgcagtttacctttgtgatcgtgaagcctgttttaagtggtattccaagttgatgggggatgaaccagacttagatcctgatattaataaggacttctttgaaagtaatgtgcttcagcttgatccttctctgttaactgaaaatggaatgaagtgttttgagcgattcttcaaagctgtgaattgtcgagaaggaaaactagtagcaaaaaggagagcctatatgatggatgacttggagttaataggattagattacctttggagggtcgtgattcagagtaatgatgatattgccagcagagctatagatctcctcaaagagatatacacgaaccttggtccaagactacaagtcaatcaggtggtgatccatgaagacttcattcagtcttgttttgatcgtctgaaggcttcctatgacacattgtgtgttttggatggtgacaaagacagtgttaattgtgcaagacaggaagctgttcgaatggttcgagtattaactgttttaagggaatatataaatgaatgtgacagtgattatcatgaggaaagaacaattctccctatgtcgagagcattccgcggtaaacacctctcttttgtagttcgatttccaaaccagggcagacaggttgatgacttggaggtatggtctcatacaaatgatacaattggttcagtacgacgatgtattctcaatcgtattaaagccaacgtagcccatacaaaaattgagctctttgtgggcggtgagctgatagatcctgcagatgatagaaagttgattggacaattaaacttaaaagataaatcgcttattacagccaaacttacacagataagttccaatatgccttcaagccctgatagctcttctgattcctccactggatctcctggaaaccatggtaatcattacagtgatggtcccaatccagaagtggaaagctgtttgcctggagtgataatgtcactgcatcccagatacatctcttttctttggcaagttgcagacttaggtagcagcctaaatatgccaccccttagagatggagcaagagtacttatgaaacttatgccgccagatagcacaacgatagaaaaattaagagctatttgtttagaccatgccaaacttggagaaagcagccttagtccatctcttgactcacttttctttggtccttcagcctcacaagtgctatatctaacagaggtagtctatgccttgttaatgcctgctggtgcacctctggctgatgattcctctgattttcagtttcacttcttgaaaagtggtggcctaccccttgtactgagtatgctaaccagaaataacttcctaccgaatgcagatatggaaactcgaaggggtgcctacctcaatgctcttaaaatagccaagcttttgctaactgccattggctatggtcatgttcgagctgtggcagaagcttgtcagccaggtgtagaaggtgtgaatcccatgacacagatcaaccaagttacccatgatcaagcagtggtgctacaaagtgcccttcagagcattcctaatccatcatccgagtgcatgcttagaaatgtgtcagttcgtcttgctcagcagatatctgatgaggcttcaagatatatgcctgatatttgtgtaattagagctatacaaaaaattatctgggcatcaggatgtgggtcgttacagctagtatttagcccaaatgaagaaatcactaaaatttatgagaagaccaatgcaggcaatgagccagacttggaagacgaacaggtttgctgtgaagcattggaagtgatgaccttatgttttgccttgattccaacagccttagatgctcttagtaaagaaaaggcttggcagacattcatcattgacttactattgcactgtcacagcaaaactgttcgtcaggtggcacaggagcagttctttttaatgtgcaccagatgttgcatgggacaccggcctctacttttcttcattactctactctttactgttttggggagcacagcaagagagagagctaaacactcaggcgactactttactcttttaagacaccttcttaattacgcttacaatagtaatattaatgtacccaatgctgaagttcttctcaataatgaaattgattggcttaaaagaattagggatgatgttaaaagaacaggagaaacgggtattgaagagacgatcttagagggccaccttggagtgacaaaggagttactggcctttcaaacttctgagaaaaaatttcatattggttgtgaaaaaggaggtgctaatctcattaaagaattaattgatgatttcatatttcctgcatccaatgtttacctacagtatatgagaaatggagagcttccagctgaacaggctattccggtctgtggttcaccacctacaattaatgctggttttgaattacttgtagcattagctgttggctgtgtgaggaatctcaaacaaatagtagattctttgactgaaatgtattacattggcacagcaataactacttgtgaagcacttactgagtgggaatatctgccacctgttggaccccgcccacccaaaggattcgtggggctgaaaaatgccggtgctacttgttacatgaattctgtgattcagcaactctacatgattccttccattaggaacggtattcttgccattgaaggcacaggtagtgatgtagatgatgatatgtctggggatgagaagcaggacaatgagagcaatgttgatcccagggatgatgtatttggatatcctcaacaatttgaagataaaccagcattaagtaaaactgaagatagaaaagagtacaacattggtgtcctaagacaccttcaggtcatctttggtcatttagctgcttctcgactgcaatactatgtgcccagaggattttggaaacagttcaggctttggggtgagcctgttaatctgcgtgaacaacacgatgctttagaattttttaattcattggtggatagtttagatgaagctttaaaagctttaggacatccagctatgctaagtaaagtcttaggaggttcctttgctgatcagaagatctgccaaggctgcccacataggtacgaatgtgaagaatcttttacgaccctaaacgtagacattagaaatcaccaaaatcttcttgattctttggaacagtatgtcaaaggagatttactagaaggtgcaaatgcatatcattgtgaaaaatgcaataaaaaggttgataccgtaaagcgcttgctgattaaaaaattacctcctgttcttgctatacaactaaagcgatttgactatgactgggaaagagaatgtgcaatcaagttcaatgattattttgaatttcctcgagagctggacatggaaccttacacagttgcaggtgtcgcaaagctggaaggggataatgtaaacccagagagtcagttgatacaacagagtgagcagtctgaaagtgagacagcaggaagcacaaaatacagacttgtgggtgtgctcgtacacagtggtcaagcgagtggggggcattattattcttacatcatccaaaggaatggtggagatggtgagagaaatcgctggtataaatttgatgatggtgatgtaacagaatgtaaaatggatgatgacgaagaaatgaaaaaccagtgttttggtggagagtacatgggagaagtgtttgatcacatgatgaagcgtatgtcatacaggcgccagaaaaggtggtggaatgcttatatacttttttatgaacgaatggacacaatagaccaagatgatgagttgataagatatatatcagagcttgctatcaccaccagacctcatcagattattatgccatcagccattgagagaagtgtacggaaacagaacgtacaattcatgcataaccgaatgcagtacagtatggagtattttcagtttatgaaaaaactgcttacatgtaatggcgtttacttaaaccctcctcccgggcaagatcacctgttgcctgaagcagaagaaatcactatgatcagtattcaacttgctgctaggttcctctttactacaggatttcacacaaagaaagtagtccgtggctctgccagtgattggtatgatgcattgtgtattctccttcgtcacagcaagaatgtacgtttttggtttgctcataacgtcctttttaatgtttcaaatcgcttctccgaataccttctggagtgccctagtgcagaagtgaggggtgcgtttgcaaaacttatagtctttattgcacatttttccttgcaagatgggccatgtccttcaccttttgcctctcctggaccttctagtcaggcttatgacaacttaagcttgagtgatcacttactaagagcagtactaaatctcttgagaagggaagtttcagagcatgggcgtcatttacagcagtatttcaacctgtttgtaatgtatgccaatttaggtgtggcagagaagacacagcttctgaaattgagtgtacctgctacttttatgcttgtgtctttagatgaaggtccaggtcctccaatcaaataccagtatgctgaattaggcaaattatactcagtagtgtcacagctgatccgctgttgcaatgtctcttcaagaatgcagtcttcaatcaatggtaatcctcctcttcccaatccttttggtgatcctaatttatcacaacctataatgccaattcagcagaatgtggcagacattttatttgtgagaacaagttatgtgaagaaaatcattgaagactgcagtaattcagaggaaaccgtcaaattgcttcgtttttgctgctgggagaatcctcagttctcatctactgtcctcagtgaacttctctggcaggttgcatattcctatacctatgaactgcggccctatttggatctgcttttgcaaatcttactgattgaggactcctggcaaactcacagaattcataatgcactgaaaggaattccagatgaccgagatgggctgtttgacacaatccagcgctctaagaatcactatcaaaaaagagcataccagtgtataaaatgtatggtagctctatttagtaactgtcctgttgcttaccaaatcctgcagggcaatggagatcttaaaagaaagtggacctgggcagtggaatggcttggagatgaacttgaaagaagaccatatactggcaatcctcagtacacttacaacaattggtctcccccagtgcaaagcaatgaaacgtccaatggttatttcttggagagatcacatagtgctaggatgacacttgcaaaagcttgtgaactctgtccagaggaggagccagatgaccaagatgctccagatgaacatgagtcgcctccacctgaagatgccccattgtacccccattcacctggatctcagtatcaacagaataaccatgtgcatggacagccatatacaggcccagcagcacatcacatgaacaaccctcagagaactggccaacgagcacaagaaaattatgaaggcagtgaagaagtatccccacctcaaaccaaggatcaatgaaatgcacataattaactggttccatcaagactgtgcacccaggccttacagtccaacctttttctgtgtctggctaatatttaaaactagaaaaactattcctaatcaacatggagtggagagtttattcactgtcttatctgcagaaatttgctgtcaatatataacccgcctgcagtggaaagtgtatagtgttttgtaataaatggcctgatgctaatgtgtaaatggcaaaggtgtatatagtatattaatgttgactgttaattcttaagcaagaaacttttttcttgatgagactcacagatctacacaaactacaaaagttaattttcttgttacacccactgcactctgcaaccagtgttgcctgcctcatggcagttggatcagctcctttacaaaaaagaaaaaaaaaaaaccaacagcaacaaaacagagcccatccatgtcagccacaccaatagtttcatgttaattctttgccactggagtcaattttgctatgagcaatgtaaggctggtaacctttaaattatttggttgatgtggaaaattggtgatgtaacactgtttctagatttttttcattgcctttttattctgatattaggttaatcactttgaagctatagttatgctgtaacatttagcatggcttcacaccaagttagtgtagccaatgaggaaaaagttaccataatgacagcagttgtccgagaagtgacagctgtattactcagagcttttacttcttacacctagaatattaaaatataaaacaaggggagaaatgtgacagtctattttcagttgcacatatgttccttatatataatgtttgacagttcaatctctgggtggaataaagaacacttacgtatcagtaatgggaatttttaaagatttaaaacaaatatgcaaaaatttgctatgccaagatgctggagcataatataagactgtatttggtgtgcttgttttgtttctttggtagagtttattaggtgaatcttctaaaactttccttctgttggatcccagtgacgtggaagtcatcagaaccccacggtacttggagtacctctctgcaccaagatagctggctgattttctgctcagtcacaattttacttgaaagcaagaattgtcctagctccttttccattattccaaaacgtttaacgttcaaagcagggtctcattaaaaaagaaactactggttgatataattgagatattacaatttcagaataaacatttgattaaaaataaggaaatcctcagttcatactgtatttaaaagagaattggtaacttgaatgtgtgtaattttttggaacctgtctaaaaaccaaatacccctgcaaacagatacagcccaccctattctatttaaatattttgctgttttattttatagaaattattttgctgaattcacaaatagaatttgatttaagaagaactttttgtcctgtggtgtgtttttggttttttttttggttactttttttgtcctttttttttttttttaaaaagaggactgcatattaaaattcattctgtgcatagcatgcctaggcatgacactgattcaggatttcagtcacatcaagtttttgtgcacagaaagttttgacctttggccctctactgaagattttgagaaatcaggatgttgacactgtaaaagtttcctaacataatcttgtactttttgtatgttttttatatacatgtatatttaatgagcacaagcttggttgtattttttacaattcagttaatagggaaatgttttgtcaaaaggctacacttggaactgaacaaagcagaaacaaaattgagcattgcattattttgtgattaaaaggggcaggtatttaagataaa

SEQ ID NO: 426229 - DNA, 6126 bp, Homo sapiens
tcggtacccactagtccacggttggctgacaagcttttgctaactgccattggctatggtcatgttcgagctgtggcagaagcttgtcagccaggtgtagaaggtgtgaatcccatgacacagatcaaccaagttacccatgatcaagcagtggtgctacaaagtgcccttcagagcattcctaatccatcatccgagtgcatgcttagaaatgtgtcagttcgtcttgctcagcagatatctgatgaggcttcaagatatatgcctgatatttgtgtaattagagctatacaaaaaattatctgggcatcaggatgtgggtcgttacagctagtatttagcccaaatgaagaaatcactaaaatttatgagaagaccaatgcaggcaatgagccagacttggaagacgaacaggtttgctgtgaagcattggaagtgatgaccttatgttttgccttgattccaacagccttagatgctcttagtaaagaaaaggcttggcagacattcatcattgacttactattgcactgtcacagcaaaactgttcgtcaggtggcacaggagcagttctttttaatgtgcaccagatgttgcatgggacaccggcctctacttttcttcattactctactctttactgttttggggagcacagcaagagagagagctaaacactcaggcgactactttactcttttaagacaccttcttaattacgcttacaatagtaatattaatgtacccaatgctgaagttcttctcaataatgaaattgattggcttaaaagaattagggatgatgttaaaagaacaggagaaacgggtattgaagagacgatcttagagggccaccttggagtgacaaaggagttactggcctttcaaacttctgagaaaaaatttcatattggttgtgaaaaaggaggtgctaatctcattaaagaattaattgatgatttcatatttcctgcatccaatgtttacctacagtatatgagaaatggagagcttccagctgaacaggctattccggtctgtggttcaccacctacaattaatgctggttttgaattacttgtagcattagctgttggctgtgtgaggaatctcaaacaaatagtagattctttgactgaaatgtattacattggcacagcaataactacttgtgaagcacttactgagtgggaatatctgccacctgttggaccccgcccacccaaaggattcgtggggctgaaaaatgccggtgctacttgttacatgaattctgtgattcagcaactctacatgattccttccattaggaacggtattcttgccattgaaggcacaggtagtgatgtagatgatgatatgtctggggatgagaagcaggacaatgagagcaatgttgatcccagggatgatgtatttggatatcctcaacaatttgaagataaaccagcattaagtaaaactgaagatagaaaagagtacaacattggtgtcctaagacaccttcaggtcatctttggtcatttagctgcttctcgactgcaatactatgtgcccagaggattttggaaacagttcaggctttggggtgagcctgttaatctgcgtgaacaacacgatgctttagaattttttaattcattggtggatagtttagatgaagctttaaaagctttaggacatccagctatgctaagtaaagtcttaggaggttcctttgctgatcagaagatctgccaaggctgcccacataggtacgaatgtgaagaatcttttacgaccctaaacgtagacattagaaatcaccaaaatcttcttgattctttggaacagtatgtcaaaggagatttactagaaggtgcaaatgcatatcattgtgaaaaatgcaataaaaaggttgataccgtaaagcgcttgctgattaaaaaattacctcctgttcttgctatacaactaaagcgatttgactatgactgggaaagagaatgtgcaatcaagttcaatgattattttgaatttcctcgagagctggacatggaaccttacacagttgcaggtgtcgcaaagctggaaggggataatgtaaacccagagagtcagttgatacaacagagtgagcagtctgaaagtgagacagcaggaagcacaaaatacagacttgtgggtgtgctcgtacacagtggtcaagcgagtggggggcattattattcttacatcatccaaaggaatggtggagatggtgagagaaatcgctggtataaatttgatgatggtgatgtaacagaatgtaaaatggatgatgacgaagaaatgaaaaaccagtgttttggtggagagtacatgggagaagtgtttgatcacatgatgaagcgtatgtcatacaggcgccagaaaaggtggtggaatgcttatatacttttttatgaacgaatggacacaatagaccaagatgatgagttgataagatatatatcagagcttgctatcaccaccagacctcatcagattattatgccatcagccattgagagaagtgtacggaaacagaacgtacaattcatgcataaccgaatgcagtacagtatggagtattttcagtttatgaaaaaactgcttacatgtaatggcgtttacttaaaccctcctcccgggcaagatcacctgttgcctgaagcagaagaaatcactatgatcagtattcaacttgctgctaggttcctctttactacaggatttcacacaaagaaagtagtccgtggctctgccagtgattggtatgatgcattgtgtattctccttcgtcacagcaagaatgtacgtttttggtttgctcataacgtcctttttaatgtttcaaatcgcttctccgaataccttctggagtgccctagtgcagaagtgaggggtgcgtttgcaaaacttatagtctttattgcacatttttccttgcaagatgggccatgtccttcaccttttgcctctcctggaccttctagtcaggcttatgacaacttaagcttgagtgatcacttactaagagcagtactaaatctcttgagaagggaagtttcagagcatgggcgtcatttacagcagtatttcaacctgtttgtaatgtatgccaatttaggtgtggcagagaagacacagcttctgaaattgagtgtacctgctacttttatgcttgtgtctttagatgaaggtccaggtcctccaatcaaataccagtatgctgaattaggcaaattatactcagtagtgtcacagctgatccgctgttgcaatgtctcttcaagaatgcagtcttcaatcaatggtaatcctcctcttcccaatccttttggtgatcctaatttatcacaacctataatgccaattcagcagaatgtggcagacattttatttgtgagaacaagttatgtgaagaaaatcattgaagactgcagtaattcagaggaaaccgtcaaattgcttcgtttttgctgctgggagaatcctcagttctcatctactgtcctcagtgaacttctctggcaggttgcatattcctatacctatgaactgcggccctatttggatctgcttttgcaaatcttactgattgaggactcctggcaaactcacagaattcataatgcactgaaaggaattccagatgaccgagatgggctgtttgacacaatccagcgctctaagaatcactatcaaaaaagagcataccagtgtataaaatgtatggtagctctatttagtaactgtcctgttgcttaccaaatcctgcagggcaatggagatcttaaaagaaagtggacctgggcagtggaatggcttggagatgaacttgaaagaagaccatatactggcaatcctcagtacacttacaacaattggtctcccccagtgcaaagcaatgaaacgtccaatggttatttcttggagagatcacatagtgctaggatgacacttgcaaaagcttgtgaactctgtccagaggaggagccagatgaccaagatgctccagatgaacatgagtcgcctccacctgaagatgccccattgtacccccattcacctggatctcagtatcaacagaataaccatgtgcatggacagccatatacaggcccagcagcacatcacatgaacaaccctcagagaactggccaacgagcacaagaaaattatgaaggcagtgaagaagtatccccacctcaaaccaaggatcaatgaaatgcacataattaactggttccatcaagactgtgcacccaggccttacagtccaacctttttctgtgtctggctaatatttaaaactagaaaaactattcctaatcaacatggagtggagagtttattcactgtcttatctgcagaaatttgctgtcaatatataacccgcctgcagtggaaagtgtatagtgttttgtaataaatggcctgatgctaatgtgtaaatggcaaaggtgtatatagtatattaatgttgactgttaattcttaagcaagaaacttttttcttgatgagactcacagatctacacaaactacaaaagttaattttcttgttacacccactgcactctgcaaccagtgttgcctgcctcatggcagttggatcagctcctttacaaaaaagaaaaaaaaaaaaccaacagcaacaaaacagagcccatccatgtcagccacaccaatagtttcatgttaattctttgccactggagtcaattttgctatgagcaatgtaaggctggtaacctttaaattatttggttgatgtggaaaattggtgatgtaacactgtttctagatttttttcattgcctttttattctgatattaggttaatcactttgaagctatagttatgctgtaacatttagcatggcttcacaccaagttagtgtagccaatgaggaaaaagttaccataatgacagcagttgtccgagaagtgacagctgtattactcagagcttttacttcttacacctagaatattaaaatataaaacaaggggagaaatgtgacagtctattttcagttgcacatatgttccttatatataatgtttgacagttcaatctctgggtggaataaagaacacttacgtatcagtaatgggaatttttaaagatttaaaacaaatatgcaaaaatttgctatgccaagatgctggagcataatataagactgtatttggtgtgcttgttttgtttctttggtagagtttattaggtgaatcttctaaaactttccttctgttggatcccagtgacgtggaagtcatcagaaccccacggtacttggagtacctctctgcaccaagatagctggctgattttctgctcagtcacaattttacttgaaagcaagaattgtcctagctccttttccattattccaaaacgtttaacgttcaaagcagggtctcattaaaaaagaaactactggttgatataattgagatattacaatttcagaataaacatttgattaaaaataaggaaatcctcagttcatactgtatttaaaagagaattggtaacttgaatgtgtgtaattttttggaacctgtctaaaaaccaaatacccctgcaaacagatacagcccaccctattctatttaaatattttgctgttttattttatagaaattattttgctgaattcacaaatagaatttgatttaagaagaactttttgtcctgtggtgtgtttttggttttttttttggttactttttttgtcctttttttttttttttaaaaagaggactgcatattaaaattcattctgtgcatagcatgcctaggcatgacactgattcaggatttcagtcacatcaagtttttgtgcacagaaagttttgacctttggccctctactgaagattttgagaaatcaggatgttgacactgtaaaagtttcctaacataatcttgtactttttgtatgttttttatatacatgtatatttaatgagcacaagcttggttgtattttttacaattcagttaatagggaaatgttttgtcaaaaggctacacttggaactgaacaaagcagaaacaaaattgagcattgcattattttgtgattaaaaggggcaggtatttaagataaa

SEQ ID NO: 426230 - DNA, 5186 bp, Homo sapiens
tcacaaaactcattcttatggtgcacattctagttagctgatagacggcttcaaaaccctgattaacagactgagccagaagagcagcaaattcctggttgttgaagatcttcagattacagcctggtggaattttacacactgttgcagggtgccagccatatctctgattacaattggggctctgcacaaagattgcactatcacttaggcacacagcaataactacttgtgaagcacttactgagtgggaatatctgccacctgttggaccccgcccacccaaaggattcgtggggctgaaaaatgccggtgctacttgttacatgaattctgtgattcagcaactctacatgattccttccattaggaacggtattcttgccattgaaggcacaggtagtgatgtagatgatgatatgtctggggatgagaagcaggacaatgagagcaatgttgatcccagggatgatgtatttggatatcctcaacaatttgaagataaaccagcattaagtaaaactgaagatagaaaagagtacaacattggtgtcctaagacaccttcaggtcatctttggtcatttagctgcttctcgactgcaatactatgtgcccagaggattttggaaacagttcaggctttggggtgagcctgttaatctgcgtgaacaacacgatgctttagaattttttaattcattggtggatagtttagatgaagctttaaaagctttaggacatccagctatgctaagtaaagtcttaggaggttcctttgctgatcagaagatctgccaaggctgcccacataggtacgaatgtgaagaatcttttacgaccctaaacgtagacattagaaatcaccaaaatcttcttgattctttggaacagtatgtcaaaggagatttactagaaggtgcaaatgcatatcattgtgaaaaatgcaataaaaaggttgataccgtaaagcgcttgctgattaaaaaattacctcctgttcttgctatacaactaaagcgatttgactatgactgggaaagagaatgtgcaatcaagttcaatgattattttgaatttcctcgagagctggacatggaaccttacacagttgcaggtgtcgcaaagctggaaggggataatgtaaacccagagagtcagttgatacaacagagtgagcagtctgaaagtgagacagcaggaagcacaaaatacagacttgtgggtgtgctcgtacacagtggtcaagcgagtggggggcattattattcttacatcatccaaaggaatggtggagatggtgagagaaatcgctggtataaatttgatgatggtgatgtaacagaatgtaaaatggatgatgacgaagaaatgaaaaaccagtgttttggtggagagtacatgggagaagtgtttgatcacatgatgaagcgtatgtcatacaggcgccagaaaaggtggtggaatgcttatatacttttttatgaacgaatggacacaatagaccaagatgatgagttgataagatatatatcagagcttgctatcaccaccagacctcatcagattattatgccatcagccattgagagaagtgtacggaaacagaacgtacaattcatgcataaccgaatgcagtacagtatggagtattttcagtttatgaaaaaactgcttacatgtaatggcgtttacttaaaccctcctcccgggcaagatcacctgttgcctgaagcagaagaaatcactatgatcagtattcaacttgctgctaggttcctctttactacaggatttcacacaaagaaagtagtccgtggctctgccagtgattggtatgatgcattgtgtattctccttcgtcacagcaagaatgtacgtttttggtttgctcataacgtcctttttaatgtttcaaatcgcttctccgaataccttctggagtgccctagtgcagaagtgaggggtgcgtttgcaaaacttatagtctttattgcacatttttccttgcaagatgggccatgtccttcaccttttgcctctcctggaccttctagtcaggcttatgacaacttaagcttgagtgatcacttactaagagcagtactaaatctcttgagaagggaagtttcagagcatgggcgtcatttacagcagtatttcaacctgtttgtaatgtatgccaatttaggtgtggcagagaagacacagcttctgaaattgagtgtacctgctacttttatgcttgtgtctttagatgaaggtccaggtcctccaatcaaataccagtatgctgaattaggcaaattatactcagtagtgtcacagctgatccgctgttgcaatgtctcttcaagaatgcagtcttcaatcaatggtaatcctcctcttcccaatccttttggtgatcctaatttatcacaacctataatgccaattcagcagaatgtggcagacattttatttgtgagaacaagttatgtgaagaaaatcattgaagactgcagtaattcagaggaaaccgtcaaattgcttcgtttttgctgctgggagaatcctcagttctcatctactgtcctcagtgaacttctctggcaggttgcatattcctatacctatgaactgcggccctatttggatctgcttttgcaaatcttactgattgaggactcctggcaaactcacagaattcataatgcactgaaaggaattccagatgaccgagatgggctgtttgacacaatccagcgctctaagaatcactatcaaaaaagagcataccagtgtataaaatgtatggtagctctatttagtaactgtcctgttgcttaccaaatcctgcagggcaatggagatcttaaaagaaagtggacctgggcagtggaatggcttggagatgaacttgaaagaagaccatatactggcaatcctcagtacacttacaacaattggtctcccccagtgcaaagcaatgaaacgtccaatggttatttcttggagagatcacatagtgctaggatgacacttgcaaaagcttgtgaactctgtccagaggaggagccagatgaccaagatgctccagatgaacatgagtcgcctccacctgaagatgccccattgtacccccattcacctggatctcagtatcaacagaataaccatgtgcatggacagccatatacaggcccagcagcacatcacatgaacaaccctcagagaactggccaacgagcacaagaaaattatgaaggcagtgaagaagtatccccacctcaaaccaaggatcaatgaaatgcacataattaactggttccatcaagactgtgcacccaggccttacagtccaacctttttctgtgtctggctaatatttaaaactagaaaaactattcctaatcaacatggagtggagagtttattcactgtcttatctgcagaaatttgctgtcaatatataacccgcctgcagtggaaagtgtatagtgttttgtaataaatggcctgatgctaatgtgtaaatggcaaaggtgtatatagtatattaatgttgactgttaattcttaagcaagaaacttttttcttgatgagactcacagatctacacaaactacaaaagttaattttcttgttacacccactgcactctgcaaccagtgttgcctgcctcatggcagttggatcagctcctttacaaaaaagaaaaaaaaaaaaccaacagcaacaaaacagagcccatccatgtcagccacaccaatagtttcatgttaattctttgccactggagtcaattttgctatgagcaatgtaaggctggtaacctttaaattatttggttgatgtggaaaattggtgatgtaacactgtttctagatttttttcattgcctttttattctgatattaggttaatcactttgaagctatagttatgctgtaacatttagcatggcttcacaccaagttagtgtagccaatgaggaaaaagttaccataatgacagcagttgtccgagaagtgacagctgtattactcagagcttttacttcttacacctagaatattaaaatataaaacaaggggagaaatgtgacagtctattttcagttgcacatatgttccttatatataatgtttgacagttcaatctctgggtggaataaagaacacttacgtatcagtaatgggaatttttaaagatttaaaacaaatatgcaaaaatttgctatgccaagatgctggagcataatataagactgtatttggtgtgcttgttttgtttctttggtagagtttattaggtgaatcttctaaaactttccttctgttggatcccagtgacgtggaagtcatcagaaccccacggtacttggagtacctctctgcaccaagatagctggctgattttctgctcagtcacaattttacttgaaagcaagaattgtcctagctccttttccattattccaaaacgtttaacgttcaaagcagggtctcattaaaaaagaaactactggttgatataattgagatattacaatttcagaataaacatttgattaaaaataaggaaatcctcagttcatactgtatttaaaagagaattggtaacttgaatgtgtgtaattttttggaacctgtctaaaaaccaaatacccctgcaaacagatacagcccaccctattctatttaaatattttgctgttttattttatagaaattattttgctgaattcacaaatagaatttgatttaagaagaactttttgtcctgtggtgtgtttttggttttttttttggttactttttttgtcctttttttttttttttaaaaagaggactgcatattaaaattcattctgtgcatagcatgcctaggcatgacactgattcaggatttcagtcacatcaagtttttgtgcacagaaagttttgacctttggccctctactgaagattttgagaaatcaggatgttgacactgtaaaagtttcctaacataatcttgtactttttgtatgttttttatatacatgtatatttaatgagcacaagcttggttgtattttttacaattcagttaatagggaaatgttttgtcaaaaggctacacttggaactgaacaaagcagaaacaaaattgagcattgcattattttgtgattaaaaggggcaggtatttaagataaa

SEQ ID NO: 426231 - DNA, 3165 bp, Homo sapiens
cgctctagaggctcccggttacctggaccttctagtcaggcttatgacaacttaagcttgagtgatcacttactaagagcagtactaaatctcttgagaagggaagtttcagagcatgggcgtcatttacagcagtatttcaacctgtttgtaatgtatgccaatttaggtgtggcagagaagacacagcttctgaaattgagtgtacctgctacttttatgcttgtgtctttagatgaaggtccaggtcctccaatcaaataccagtatgctgaattaggcaaattatactcagtagtgtcacagctgatccgctgttgcaatgtctcttcaagaatgcagtcttcaatcaatggtaatcctcctcttcccaatccttttggtgatcctaatttatcacaacctataatgccaattcagcagaatgtggcagacattttatttgtgagaacaagttatgtgaagaaaatcattgaagactgcagtaattcagaggaaaccgtcaaattgcttcgtttttgctgctgggagaatcctcagttctcatctactgtcctcagtgaacttctctggcaggttgcatattcctatacctatgaactgcggccctatttggatctgcttttgcaaatcttactgattgaggactcctggcaaactcacagaattcataatgcactgaaaggaattccagatgaccgagatgggctgtttgacacaatccagcgctctaagaatcactatcaaaaaagagcataccagtgtataaaatgtatggtagctctatttagtaactgtcctgttgcttaccaaatcctgcagggcaatggagatcttaaaagaaagtggacctgggcagtggaatggcttggagatgaacttgaaagaagaccatatactggcaatcctcagtacacttacaacaattggtctcccccagtgcaaagcaatgaaacgtccaatggttatttcttggagagatcacatagtgctaggatgacacttgcaaaagcttgtgaactctgtccagaggaggagccagatgaccaagatgctccagatgaacatgagtcgcctccacctgaagatgccccattgtacccccattcacctggatctcagtatcaacagaataaccatgtgcatggacagccatatacaggcccagcagcacatcacatgaacaaccctcagagaactggccaacgagcacaagaaaattatgaaggcagtgaagaagtatccccacctcaaaccaaggatcaatgaaatgcacataattaactggttccatcaagactgtgcacccaggccttacagtccaacctttttctgtgtctggctaatatttaaaactagaaaaactattcctaatcaacatggagtggagagtttattcactgtcttatctgcagaaatttgctgtcaatatataacccgcctgcagtggaaagtgtatagtgttttgtaataaatggcctgatgctaatgtgtaaatggcaaaggtgtatatagtatattaatgttgactgttaattcttaagcaagaaacttttttcttgatgagactcacagatctacacaaactacaaaagttaattttcttgttacacccactgcactctgcaaccagtgttgcctgcctcatggcagttggatcagctcctttacaaaaaagaaaaaaaaaaaaccaacagcaacaaaacagagcccatccatgtcagccacaccaatagtttcatgttaattctttgccactggagtcaattttgctatgagcaatgtaaggctggtaacctttaaattatttggttgatgtggaaaattggtgatgtaacactgtttctagatttttttcattgcctttttattctgatattaggttaatcactttgaagctatagttatgctgtaacatttagcatggcttcacaccaagttagtgtagccaatgaggaaaaagttaccataatgacagcagttgtccgagaagtgacagctgtattactcagagcttttacttcttacacctagaatattaaaatataaaacaaggggagaaatgtgacagtctattttcagttgcacatatgttccttatatataatgtttgacagttcaatctctgggtggaataaagaacacttacgtatcagtaatgggaatttttaaagatttaaaacaaatatgcaaaaatttgctatgccaagatgctggagcataatataagactgtatttggtgtgcttgttttgtttctttggtagagtttattaggtgaatcttctaaaactttccttctgttggatcccagtgacgtggaagtcatcagaaccccacggtacttggagtacctctctgcaccaagatagctggctgattttctgctcagtcacaattttacttgaaagcaagaattgtcctagctccttttccattattccaaaacgtttaacgttcaaagcagggtctcattaaaaaagaaactactggttgatataattgagatattacaatttcagaataaacatttgattaaaaataaggaaatcctcagttcatactgtatttaaaagagaattggtaacttgaatgtgtgtaattttttggaacctgtctaaaaaccaaatacccctgcaaacagatacagcccaccctattctatttaaatattttgctgttttattttatagaaattattttgctgaattcacaaatagaatttgatttaagaagaactttttgtcctgtggtgtgtttttggttttttttttggttactttttttgtcctttttttttttttttaaaaagaggactgcatattaaaattcattctgtgcatagcatgcctaggcatgacactgattcaggatttcagtcacatcaagtttttgtgcacagaaagttttgacctttggccctctactgaagattttgagaaatcaggatgttgacactgtaaaagtttcctaacataatcttgtactttttgtatgttttttatatacatgtatatttaatgagcacaagcttggttgtattttttacaattcagttaatagggaaatgttttgtcaaaaggctacacttggaactgaacaaagcagaaacaaaattgagcattgcattattttgtgattaaaaggggcaggtatttaagataaa

SEQ ID NO: 426232 - DNA, 9708 bp, Homo sapiens
  misc_feature (8208)..(8210): n is a, c, g, or t
ccggatccgccatattgacgaggacgggcatccgcggctgcggacgctagtctccgccgccgccggagccgcaacctctccgcacccggccccgtcagggcctctgtcgcgcctagcccctccccgccttacacagctcccgggcctcgcgggagcccgccgccgccgcctctctctcacgggaggcggccgccttagcgcccggtgcttgggtcggcgccgggagcgaggagcgagctacttcaaagccaccaggcctggagcggggacagaggcggcgactaggggaaggtgaagccgtcgctgcaggaggaggagcaggaggaggtgacgcaggagaaacgcaccgcccggagcccgtctgagctcagcgagagccccagcatgagcaaggtcaaggtgatgccccaccacagcttgaagatgaggaacctgcatttccacatactgacttggccaagttggatgacatgatcaacaggcctcgatgggtggttccagttttgccgaaaggggaattagaagtgcttttagaagctgctattgatcttagtaaaaagggccttgatgttaaaagtgaagcatgtcagcgatttttccgtgatgggctaacaatatcattcactaaaattcttacagatgaagcagtgagtggctggaagtttgaaattcataggtgtattattaacaatactcatcgtctggtggagctatgtgtggccaagttgtcccaagactggtttccacttttagaacttcttgccatggccttaaatcctcattgcaaattccatatctacaatggtacacgtccatgtgaatcagtttcctcaagtgttcagttgcctgaagatgaactctttgctcgttctccagatcctcgatcaccaaagggttggctagtggatcttctcaacaaatttggcactttaaatgggttccagattttgcatgatcgttttattaatggatcagcattaaacgttcaaataattgcagcccttattaaaccatttgggcaatgctatgagtttctcactcttcatacagtgaaaaagtactttcttccaataatagaaatggttccacagtttttagaaaacttaactgatgaagaactgaaaaaagaagcaaagaatgaagccaaaaatgatgctctttcaatgattattaaatctttgaagaatttagcttcaagggttccaggacaagaagaaactgttaaaaacttagaaatatttaggttaaaaatgatacttagattattgcaaatttcttctttcaatggaaagatgaatgcactgaatgaagttaataaggtgatatctagtgtatcatactatactcatcgacatggtaatcctgaggaggaagagtggctcacagctgaacgaatggcagaatggatacagcagaacaatatcttatccatagtgttgcgagatagtcttcatcagccacagtatgtagaaaagttagagaagattcttcgttttgtcatcaaagaaaaagctctgaccttacaggatcttgataatatctgggcagcacaggcagggaaacatgaagccattgtgaagaatgtacatgatctcctggcaaaattggcatgggatttttctcctgaacaacttgatcatccttttgattgttttaaggccagtcggacaaatgcgagtaaaaagcaacgtgaaaagctacttgagctgatacgtcgtcttgcagaagatgataaagatggtgtgatggcacacagagtgttgaaccttctgtggaatctggctcacagtgatgatgtgcctgtagatatcatggacctggctctcagtgcccacataaaaatactagattacagttgctcccaggaccgtgatacacaaaagatccaatggatagatcgctttatagaagaacttcgcacaaatgacaaatgggttattcccgcactgaaacaaattagagaaatttgtagtttgtttggtgaagcgcctcaaaatttgagtcaaactcagcgaagtccccatgtgttttatcgccatgacttaatcaatcaacttcaacacaatcatgccctagttactttggtagcagaaaaccttgcaacttacatggaaagcatgagactatatgctagagaccatgaagattatgacccacaaactgtgaggctgggaagtagatatagtcatgttcaagaagttcaagaacggcttaacttccttagatttttattgaaggatggtcagctgtggctatgtgctcctcaggcaaaacaaatatggaaatgcttagctgagaatgcagtttacctttgtgatcgtgaagcctgttttaagtggtattccaagttgatgggggatgaaccagacttagatcctgatattaataaggacttctttgaaagtaatgtgcttcagcttgatccttctctgttaactgaaaatggaatgaagtgttttgagcgattcttcaaagctgtgaattgtcgagaaggaaaactagtagcaaaaaggagagcctatatgatggatgacttggagttaataggattagattacctttggagggtcgtgattcagagtaatgatgatattgccagcagagctatagatctcctcaaagagatatacacgaaccttggtccaagactacaagtcaatcaggtggtgatccatgaagacttcattcagtcttgttttgatcgtctgaaggcttcctatgacacattgtgtgttttggatggtgacaaagacagtgttaattgtgcaagacaggaagctgttcgaatggttcgagtattaactgttttaagggaatatataaatgaatgtgacagtgattatcatgaggaaagaacaattctccctatgtcgagagcattccgcggtaaacacctctcttttgtagttcgatttccaaaccagggcagacaggttgatgacttggaggtatggtctcatacaaatgatacaattggttcagtacgacgatgtattctcaatcgtattaaagccaacgtagcccatacaaaaattgagctctttgtgggcggtgagctgatagatcctgcagatgatagaaagttgattggacaattaaacttaaaagataaatcgcttattacagccaaacttacacagataagttccaatatgccttcaagccctgatagctcttctgattcctccactggatctcctggaaaccatggtaatcattacagtgatggtcccaatccagaagtggaaagctgtttgcctggagtgataatgtcactgcatcccagatacatctcttttctttggcaagttgcagacttaggtagcagcctaaatatgccaccccttagagatggagcaagagtacttatgaaacttatgccgccagatagcacaacgatagaaaaattaagagctatttgtttagaccatgccaaacttggagaaagcagccttagtccatctcttgactcacttttctttggtccttcagcctcacaagtgctatatctaacagaggtagtctatgccttgttaatgcctgctggtgcacctctggctgatgattcctctgattttcagtttcacttcttgaaaagtggtggcctaccccttgtactgagtatgctaaccagaaataacttcctaccgaatgcagatatggaaactcgaaggggtgcctacctcaatgctcttaaaatagccaagcttttgctaactgccattggctatggtcatgttcgagctgtggcagaagcttgtcagccaggtgtagaaggtgtgaatcccatgacacagatcaaccaagttacccatgatcaagcagtggtgctacaaagtgcccttcagagcattcctaatccatcatccgagtgcatgcttagaaatgtgtcagttcgtcttgctcagcagatatctgatgaggcttcaagatatatgcctgatatttgtgtaattagagctatacaaaaaattatctgggcatcaggatgtgggtcgttacagctagtatttagcccaaatgaagaaatcactaaaatttatgagaagaccaatgcaggcaatgagccagacttggaagacgaacaggtttgctgtgaagcattggaagtgatgaccttatgttttgccttgattccaacagccttagatgctcttagtaaagaaaaggcttggcagacattcatcattgacttactattgcactgtcacagcaaaactgttcgtcaggtggcacaggagcagttctttttaatgtgcaccagatgttgcatgggacaccggcctctacttttcttcattactctactctttactgttttggggagcacagcaagagagagagctaaacactcaggcgactactttactcttttaagacaccttcttaattacgcttacaatagtaatattaatgtacccaatgctgaagttcttctcaataatgaaattgattggcttaaaagaattagggatgatgttaaaagaacaggagaaacgggtattgaagagacgatcttagagggccaccttggagtgacaaaggagttactggcctttcaaacttctgagaaaaaatttcatattggttgtgaaaaaggaggtgctaatctcattaaagaattaattgatgatttcatatttcctgcatccaatgtttacctacagtatatgagaaatggagagcttccagctgaacaggctattccggtctgtggttcaccacctacaattaatgctggttttgaattacttgtagcattagctgttggctgtgtgaggaatctcaaacaaatagtagattctttgactgaaatgtattacattggcacagcaataactacttgtgaagcacttactgagtgggaatatctgccacctgttggaccccgcccacccaaaggattcgtggggctgaaaaatgccggtgctacttgttacatgaattctgtgattcagcaactctacatgattccttccattaggaacggtattcttgccattgaaggcacaggtagtgatgtagatgatgatatgtctggggatgagaagcaggacaatgagagcaatgttgatcccagggatgatgtatttggatatcctcaacaatttgaagataaaccagcattaagtaaaactgaagatagaaaagagtacaacattggtgtcctaagacaccttcaggtcatctttggtcatttagctgcttctcgactgcaatactatgtgcccagaggattttggaaacagttcaggctttggggtgagcctgttaatctgcgtgaacaacacgatgctttagaattttttaattcattggtggatagtttagatgaagctttaaaagctttaggacatccagctatgctaagtaaagtcttaggaggttcctttgctgatcagaagatctgccaaggctgcccacataggtacgaatgtgaagaatcttttacgaccctaaacgtagacattagaaatcaccaaaatcttcttgattctttggaacagtatgtcaaaggagatttactagaaggtgcaaatgcatatcattgtgaaaaatgcaataaaaaggttgataccgtaaagcgcttgctgattaaaaaattacctcctgttcttgctatacaactaaagcgatttgactatgactgggaaagagaatgtgcaatcaagttcaatgattattttgaatttcctcgagagctggacatggaaccttacacagttgcaggtgtcgcaaagctggaaggggataatgtaaacccagagagtcagttgatacaacagagtgagcagtctgaaagtgagacagcaggaagcacaaaatacagacttgtgggtgtgctcgtacacagtggtcaagcgagtggggggcattattattcttacatcatccaaaggaatggtggagatggtgagagaaatcgctggtataaatttgatgatggtgatgtaacagaatgtaaaatggatgatgacgaagaaatgaaaaaccagtgttttggtggagagtacatgggagaagtgtttgatcacatgatgaagcgtatgtcatacaggcgccagaaaaggtggtggaatgcttatatacttttttatgaacgaatggacacaatagaccaagatgatgagttgataagatatatatcagagcttgctatcaccaccagacctcatcagattattatgccatcagccattgagagaagtgtacggaaacagaacgtacaattcatgcataaccgaatgcagtacagtatggagtattttcagtttatgaaaaaactgcttacatgtaatggcgtttacttaaaccctcctcccgggcaagatcacctgttgcctgaagcagaagaaatcactatgatcagtattcaacttgctgctaggttcctctttactacaggatttcacacaaagaaagtagtccgtggctctgccagtgattggtatgatgcattgtgtattctccttcgtcacagcaagaatgtacgtttttggtttgctcataacgtcctttttaatgtttcaaatcgcttctccgaataccttctggagtgccctagtgcagaagtgaggggtgcgtttgcaaaacttatagtctttattgcacatttttccttgcaagatgggccatgtccttcaccttttgcctctcctggaccttctagtcaggcttatgacaacttaagcttgagtgatcacttactaagagcagtactaaatctcttgagaagggaagtttcagagcatgggcgtcatttacagcagtatttcaacctgtttgtaatgtatgccaatttaggtgtggcagagaagacacagcttctgaaattgagtgtacctgctacttttatgcttgtgtctttagatgaaggtccaggtcctccaatcaaataccagtatgctgaattaggcaaattatactcagtagtgtcacagctgatccgctgttgcaatgtctcttcaagaatgcagtcttcaatcaatggtaatcctcctcttcccaatccttttggtgatcctaatttatcacaacctataatgccaattcagcagaatgtggcagacattttatttgtgagaacaagttatgtgaagaaaatcattgaagactgcagtaattcagaggaaaccgtcaaattgcttcgtttttgctgctgggagaatcctcagttctcatctactgtcctcagtgaacttctctggcaggttgcatattcctatacctatgaactgcggccctatttggatctgcttttgcaaatcttactgattgaggactcctggcaaactcacagaattcataatgcactgaaaggaattccagatgaccgagatgggctgtttgacacaatccagcgctctaagaatcactatcaaaaaagagcataccagtgtataaaatgtatggtagctctatttagtaactgtcctgttgcttaccaaatcctgcagggcaatggagatcttaaaagaaagtggacctgggcagtggaatggcttggagatgaacttgaaagaagaccatatactggcaatcctcagtacacttacaacaattggtctcccccagtgcaaagcaatgaaacgtccaatggttatttcttggagagatcacatagtgctaggatgacacttgcaaaagcttgtgaactctgtccagaggaggagccagatgaccaagatgctccagatgaacatgagtcgcctccacctgaagatgccccattgtacccccattcacctggatctcagtatcaacagaataaccatgtgcatggacagccatatacaggcccagcagcacatcacatgaacaaccctcagagaactggccaacgagcacaagaaaattatgaaggcagtgaagaagtatccccacctcaaaccaaggatcaatgaaatgcacataattaactggttccatcaagactgtgcacccaggccttacagtccaacctttttctgtgtctggctaatatttaaaactagaaaaactattcctaatcaacatggagtggagagtttattcactgtcttatctgcagaaatttgctgtcaatatataacccgcctgcagtggaaagtgtatagtgttttgtaataaatggcctgatgctaatgtgtaaatggcaaaggtgtataaaaaaaaaaaaaaaaaaaaaaaaaaaaaaaaaaaaaaaaaaaaaaaaaaaaaaaaaaaaannnaaaaaaaaaagaaaaaaaaaaaaccaacagcaacaaaacagagcccatccatgtcagccacaccaatagtttcatgttaattctttgccactggagtcaattttgctatgagcaatgtaaggctggtaacctttaaattatttggttgatgtggaaaattggtgatgtaacactgtttctagatttttttcattgcctttttattctgatattaggttaatcactttgaagctatagttatgctgtaacatttagcatggcttcacaccaagttagtgtagccaatgaggaaaaagttaccataatgacagcagttgtccgagaagtgacagctgtattactcagagcttttacttcttacacctagaatattaaaatataaaacaaggggagaaatgtgacagtctattttcagttgcacatatgttccttatatataatgtttgacagttcaatctctgggtggaataaagaacacttacgtatcagtaatgggaatttttaaagatttaaaacaaatatgcaaaaatttgctatgccaagatgctggagcataatataagactgtatttggtgtgcttgttttgtttctttggtagagtttattaggtgaatcttctaaaactttccttctgttggatcccagtgacgtggaagtcatcagaaccccacggtacttggagtacctctctgcaccaagatagctggctgattttctgctcagtcacaattttacttgaaagcaagaattgtcctagctccttttccattattccaaaacgtttaacgttcaaagcagggtctcattaaaaaagaaactactggttgatataattgagatattacaatttcagaataaacatttgattaaaaataaggaaatcctcagttcatactgtatttaaaagagaattggtaacttgaatgtgtgtaattttttggaacctgtctaaaaaccaaatacccctgcaaacagatacagcccaccctattctatttaaatattttgctgttttattttatagaaattattttgctgaattcacaaatagaatttgatttaagaagaactttttgtcctgtggtgtgtttttggttttttttttggttactttttttgtcctttttttttttttttaaaaagaggactgcatattaaaattcattctgtgcatagcatgcctaggcatgacactgattcaggatttcagtcacatcaagtttttgtgcacagaaagttttgacctttggccctctactgaagattttgagaaatcaggatgttgacactgtaaaagtttcctaacataatcttgtactttttgtatgttttttatatacatgtatatttaatgagcacaagcttggttgtattttttacaattcagttaatagggaaatgttttgtcaaaaggctacacttggaactgaacaaagcagaaacaaaattgagcattgcattattttgtgattaaaaggggcaggtatttaagataaa

SEQ ID NO: 426233 - DNA, 8413 bp, Homo sapiens
  misc_feature (8203)..(8203): n is a, c, g, or t
ccggatccgccatattgacgaggacgggcatccgcggctgcggacgctagtctccgccgccgccggagccgcaacctctccgcacccggccccgtcagggcctctgtcgcgcctagcccctccccgccttacacagctcccgggcctcgcgggagcccgccgccgccgcctctctctcacgggaggcggccgccttagcgcccggtgcttgggtcggcgccgggagcgaggagcgagctacttcaaagccaccaggcctggagcggggacagaggcggcgactaggggaaggtgaagccgtcgctgcaggaggaggagcaggaggaggtgacgcaggagaaacgcaccgcccggagcccgtctgagctcagcgagagccccagcatgagcaaggtcaaggtgatgccccaccacagcttgaagatgaggaacctgcatttccacatactgacttggccaagttggatgacatgatcaacaggcctcgatgggtggttccagttttgccgaaaggggaattagaagtgcttttagaagctgctattgatcttagtaaaaagggccttgatgttaaaagtgaagcatgtcagcgatttttccgtgatgggctaacaatatcattcactaaaattcttacagatgaagcagtgagtggctggaagtttgaaattcataggtgtattattaacaatactcatcgtctggtggagctatgtgtggccaagttgtcccaagactggtttccacttttagaacttcttgccatggccttaaatcctcattgcaaattccatatctacaatggtacacgtccatgtgaatcagtttcctcaagtgttcagttgcctgaagatgaactctttgctcgttctccagatcctcgatcaccaaagggttggctagtggatcttctcaacaaatttggcactttaaatgggttccagattttgcatgatcgttttattaatggatcagcattaaacgttcaaataattgcagcccttattaaaccatttgggcaatgctatgagtttctcactcttcatacagtgaaaaagtactttcttccaataatagaaatggttccacagtttttagaaaacttaactgatgaagaactgaaaaaagaagcaaagaatgaagccaaaaatgatgctctttcaatgattattaaatctttgaagaatttagcttcaagggttccaggacaagaagaaactgttaaaaacttagaaatatttaggttaaaaatgatacttagattattgcaaatttcttctttcaatggaaagatgaatgcactgaatgaagttaataaggtgatatctagtgtatcatactatactcatcgacatggtaatcctgaggaggaagagtggctcacagctgaacgaatggcagaatggatacagcagaacaatatcttatccatagtgttgcgagatagtcttcatcagccacagtatgtagaaaagttagagaagattcttcgttttgtcatcaaagaaaaagctctgaccttacaggatcttgataatatctgggcagcacaggcagggaaacatgaagccattgtgaagaatgtacatgatctcctggcaaaattggcatgggatttttctcctgaacaacttgatcatccttttgattgttttaaggccagtcggacaaatgcgagtaaaaagcaacgtgaaaagctacttgagctgatacgtcgtcttgcagaagatgataaagatggtgtgatggcacacagagtgttgaaccttctgtggaatctggctcacagtgatgatgtgcctgtagatatcatggacctggctctcagtgcccacataaaaatactagattacagttgctcccaggaccgtgatacacaaaagatccaatggatagatcgctttatagaagaacttcgcacaaatgacaaatgggttattcccgcactgaaacaaattagagaaatttgtagtttgtttggtgaagcgcctcaaaatttgagtcaaactcagcgaagtccccatgtgttttatcgccatgacttaatcaatcaacttcaacacaatcatgccctagttactttggtagcagaaaaccttgcaacttacatggaaagcatgagactatatgctagagaccatgaagattatgacccacaaactgtgaggctgggaagtagatatagtcatgttcaagaagttcaagaacggcttaacttccttagatttttattgaaggatggtcagctgtggctatgtgctcctcaggcaaaacaaatatggaaatgcttagctgagaatgcagtttacctttgtgatcgtgaagcctgttttaagtggtattccaagttgatgggggatgaaccagacttagatcctgatattaataaggacttctttgaaagtaatgtgcttcagcttgatccttctctgttaactgaaaatggaatgaagtgttttgagcgattcttcaaagctgtgaattgtcgagaaggaaaactagtagcaaaaaggagagcctatatgatggatgacttggagttaataggattagattacctttggagggtcgtgattcagagtaatgatgatattgccagcagagctatagatctcctcaaagagatatacacgaaccttggtccaagactacaagtcaatcaggtggtgatccatgaagacttcattcagtcttgttttgatcgtctgaaggcttcctatgacacattgtgtgttttggatggtgacaaagacagtgttaattgtgcaagacaggaagctgttcgaatggttcgagtattaactgttttaagggaatatataaatgaatgtgacagtgattatcatgaggaaagaacaattctccctatgtcgagagcattccgcggtaaacacctctcttttgtagttcgatttccaaaccagggcagacaggttgatgacttggaggtatggtctcatacaaatgatacaattggttcagtacgacgatgtattctcaatcgtattaaagccaacgtagcccatacaaaaattgagctctttgtgggcggtgagctgatagatcctgcagatgatagaaagttgattggacaattaaacttaaaagataaatcgcttattacagccaaacttacacagataagttccaatatgccttcaagccctgatagctcttctgattcctccactggatctcctggaaaccatggtaatcattacagtgatggtcccaatccagaagtggaaagctgtttgcctggagtgataatgtcactgcatcccagatacatctcttttctttggcaagttgcagacttaggtagcagcctaaatatgccaccccttagagatggagcaagagtacttatgaaacttatgccgccagatagcacaacgatagaaaaattaagagctatttgtttagaccatgccaaacttggagaaagcagccttagtccatctcttgactcacttttctttggtccttcagcctcacaagtgctatatctaacagaggtagtctatgccttgttaatgcctgctggtgcacctctggctgatgattcctctgattttcagtttcacttcttgaaaagtggtggcctaccccttgtactgagtatgctaaccagaaataacttcctaccgaatgcagatatggaaactcgaaggggtgcctacctcaatgctcttaaaatagccaagcttttgctaactgccattggctatggtcatgttcgagctgtggcagaagcttgtcagccaggtgtagaaggtgtgaatcccatgacacagatcaaccaagttacccatgatcaagcagtggtgctacaaagtgcccttcagagcattcctaatccatcatccgagtgcatgcttagaaatgtgtcagttcgtcttgctcagcagatatctgatgaggcttcaagatatatgcctgatatttgtgtaattagagctatacaaaaaattatctgggcatcaggatgtgggtcgttacagctagtatttagcccaaatgaagaaatcactaaaatttatgagaagaccaatgcaggcaatgagccagacttggaagacgaacaggtttgctgtgaagcattggaagtgatgaccttatgttttgccttgattccaacagccttagatgctcttagtaaagaaaaggcttggcagacattcatcattgacttactattgcactgtcacagcaaaactgttcgtcaggtggcacaggagcagttctttttaatgtgcaccagatgttgcatgggacaccggcctctacttttcttcattactctactctttactgttttggggagcacagcaagagagagagctaaacactcaggcgactactttactcttttaagacaccttcttaattacgcttacaatagtaatattaatgtacccaatgctgaagttcttctcaataatgaaattgattggcttaaaagaattagggatgatgttaaaagaacaggagaaacgggtattgaagagacgatcttagagggccaccttggagtgacaaaggagttactggcctttcaaacttctgagaaaaaatttcatattggttgtgaaaaaggaggtgctaatctcattaaagaattaattgatgatttcatatttcctgcatccaatgtttacctacagtatatgagaaatggagagcttccagctgaacaggctattccggtctgtggttcaccacctacaattaatgctggttttgaattacttgtagcattagctgttggctgtgtgaggaatctcaaacaaatagtagattctttgactgaaatgtattacattggcacagcaataactacttgtgaagcacttactgagtgggaatatctgccacctgttggaccccgcccacccaaaggattcgtggggctgaaaaatgccggtgctacttgttacatgaattctgtgattcagcaactctacatgattccttccattaggaacggtattcttgccattgaaggcacaggtagtgatgtagatgatgatatgtctggggatgagaagcaggacaatgagagcaatgttgatcccagggatgatgtatttggatatcctcaacaatttgaagataaaccagcattaagtaaaactgaagatagaaaagagtacaacattggtgtcctaagacaccttcaggtcatctttggtcatttagctgcttctcgactgcaatactatgtgcccagaggattttggaaacagttcaggctttggggtgagcctgttaatctgcgtgaacaacacgatgctttagaattttttaattcattggtggatagtttagatgaagctttaaaagctttaggacatccagctatgctaagtaaagtcttaggaggttcctttgctgatcagaagatctgccaaggctgcccacataggtacgaatgtgaagaatcttttacgaccctaaacgtagacattagaaatcaccaaaatcttcttgattctttggaacagtatgtcaaaggagatttactagaaggtgcaaatgcatatcattgtgaaaaatgcaataaaaaggttgataccgtaaagcgcttgctgattaaaaaattacctcctgttcttgctatacaactaaagcgatttgactatgactgggaaagagaatgtgcaatcaagttcaatgattattttgaatttcctcgagagctggacatggaaccttacacagttgcaggtgtcgcaaagctggaaggggataatgtaaacccagagagtcagttgatacaacagagtgagcagtctgaaagtgagacagcaggaagcacaaaatacagacttgtgggtgtgctcgtacacagtggtcaagcgagtggggggcattattattcttacatcatccaaaggaatggtggagatggtgagagaaatcgctggtataaatttgatgatggtgatgtaacagaatgtaaaatggatgatgacgaagaaatgaaaaaccagtgttttggtggagagtacatgggagaagtgtttgatcacatgatgaagcgtatgtcatacaggcgccagaaaaggtggtggaatgcttatatacttttttatgaacgaatggacacaatagaccaagatgatgagttgataagatatatatcagagcttgctatcaccaccagacctcatcagattattatgccatcagccattgagagaagtgtacggaaacagaacgtacaattcatgcataaccgaatgcagtacagtatggagtattttcagtttatgaaaaaactgcttacatgtaatggcgtttacttaaaccctcctcccgggcaagatcacctgttgcctgaagcagaagaaatcactatgatcagtattcaacttgctgctaggttcctctttactacaggatttcacacaaagaaagtagtccgtggctctgccagtgattggtatgatgcattgtgtattctccttcgtcacagcaagaatgtacgtttttggtttgctcataacgtcctttttaatgtttcaaatcgcttctccgaataccttctggagtgccctagtgcagaagtgaggggtgcgtttgcaaaacttatagtctttattgcacatttttccttgcaagatgggccatgtccttcaccttttgcctctcctggaccttctagtcaggcttatgacaacttaagcttgagtgatcacttactaagagcagtactaaatctcttgagaagggaagtttcagagcatgggcgtcatttacagcagtatttcaacctgtttgtaatgtatgccaatttaggtgtggcagagaagacacagcttctgaaattgagtgtacctgctacttttatgcttgtgtctttagatgaaggtccaggtcctccaatcaaataccagtatgctgaattaggcaaattatactcagtagtgtcacagctgatccgctgttgcaatgtctcttcaagaatgcagtcttcaatcaatggtaatcctcctcttcccaatccttttggtgatcctaatttatcacaacctataatgccaattcagcagaatgtggcagacattttatttgtgagaacaagttatgtgaagaaaatcattgaagactgcagtaattcagaggaaaccgtcaaattgcttcgtttttgctgctgggagaatcctcagttctcatctactgtcctcagtgaacttctctggcaggttgcatattcctatacctatgaactgcggccctatttggatctgcttttgcaaatcttactgattgaggactcctggcaaactcacagaattcataatgcactgaaaggaattccagatgaccgagatgggctgtttgacacaatccagcgctctaagaatcactatcaaaaaagagcataccagtgtataaaatgtatggtagctctatttagtaactgtcctgttgcttaccaaatcctgcagggcaatggagatcttaaaagaaagtggacctgggcagtggaatggcttggagatgaacttgaaagaagaccatatactggcaatcctcagtacacttacaacaattggtctcccccagtgcaaagcaatgaaacgtccaatggttatttcttggagagatcacatagtgctaggatgacacttgcaaaagcttgtgaactctgtccagaggaggagccagatgaccaagatgctccagatgaacatgagtcgcctccacctgaagatgccccattgtacccccattcacctggatctcagtatcaacagaataaccatgtgcatggacagccatatacaggcccagcagcacatcacatgaacaaccctcagagaactggccaacgagcacaagaaaattatgaaggcagtgaagaagtatccccacctcaaaccaaggatcaatgaaatgcacataattaactggttccatcaagactgtgcacccaggccttacagtccaacctttttctgtgtctggctaatatttaaaactagaaaaactattcctaatcaacatggagtggagagtttattcactgtcttatctgcagaaatttgctgtcaatatataacccgcctgcagtggaaagtgtatagtgttttgtaataaatggcctgatgctaatgtgtaaatggcaaaggtgtataaaaaaaaaaaaaacctcgggttttttttttttttttttttttttcaattggaaaanggttaatttcttaaggggggttaccggctttaaaaaccaccccggatttcggtttaatttaaaaaaacccccccggatggggggttcattttatttacccccccccaaaatttctttgacccttaagggccgttgggaaactttaaacctaaccccacaattactccttgaaagccccttaattaattttttcccaattgaacacaaaca

SEQ ID NO: 426234 - DNA, 8163 bp, Homo sapiens
ccggatccgccatattgacgaggacgggcatccgcggctgcggacgctagtctccgccgccgccggagccgcaacctctccgcacccggccccgtcagggcctctgtcgcgcctagcccctccccgccttacacagctcccgggcctcgcgggagcccgccgccgccgcctctctctcacgggaggcggccgccttagcgcccggtgcttgggtcggcgccgggagcgaggagcgagctacttcaaagccaccaggcctggagcggggacagaggcggcgactaggggaaggtgaagccgtcgctgcaggaggaggagcaggaggaggtgacgcaggagaaacgcaccgcccggagcccgtctgagctcagcgagagccccagcatgagcaaggtcaaggtgatgccccaccacagcttgaagatgaggaacctgcatttccacatactgacttggccaagttggatgacatgatcaacaggcctcgatgggtggttccagttttgccgaaaggggaattagaagtgcttttagaagctgctattgatcttagtaaaaagggccttgatgttaaaagtgaagcatgtcagcgatttttccgtgatgggctaacaatatcattcactaaaattcttacagatgaagcagtgagtggctggaagtttgaaattcataggtgtattattaacaatactcatcgtctggtggagctatgtgtggccaagttgtcccaagactggtttccacttttagaacttcttgccatggccttaaatcctcattgcaaattccatatctacaatggtacacgtccatgtgaatcagtttcctcaagtgttcagttgcctgaagatgaactctttgctcgttctccagatcctcgatcaccaaagggttggctagtggatcttctcaacaaatttggcactttaaatgggttccagattttgcatgatcgttttattaatggatcagcattaaacgttcaaataattgcagcccttattaaaccatttgggcaatgctatgagtttctcactcttcatacagtgaaaaagtactttcttccaataatagaaatggttccacagtttttagaaaacttaactgatgaagaactgaaaaaagaagcaaagaatgaagccaaaaatgatgctctttcaatgattattaaatctttgaagaatttagcttcaagggttccaggacaagaagaaactgttaaaaacttagaaatatttaggttaaaaatgatacttagattattgcaaatttcttctttcaatggaaagatgaatgcactgaatgaagttaataaggtgatatctagtgtatcatactatactcatcgacatggtaatcctgaggaggaagagtggctcacagctgaacgaatggcagaatggatacagcagaacaatatcttatccatagtgttgcgagatagtcttcatcagccacagtatgtagaaaagttagagaagattcttcgttttgtcatcaaagaaaaagctctgaccttacaggatcttgataatatctgggcagcacaggcagggaaacatgaagccattgtgaagaatgtacatgatctcctggcaaaattggcatgggatttttctcctgaacaacttgatcatccttttgattgttttaaggccagtcggacaaatgcgagtaaaaagcaacgtgaaaagctacttgagctgatacgtcgtcttgcagaagatgataaagatggtgtgatggcacacagagtgttgaaccttctgtggaatctggctcacagtgatgatgtgcctgtagatatcatggacctggctctcagtgcccacataaaaatactagattacagttgctcccaggaccgtgatacacaaaagatccaatggatagatcgctttatagaagaacttcgcacaaatgacaaatgggttattcccgcactgaaacaaattagagaaatttgtagtttgtttggtgaagcgcctcaaaatttgagtcaaactcagcgaagtccccatgtgttttatcgccatgacttaatcaatcaacttcaacacaatcatgccctagttactttggtagcagaaaaccttgcaacttacatggaaagcatgagactatatgctagagaccatgaagattatgacccacaaactgtgaggctgggaagtagatatagtcatgttcaagaagttcaagaacggcttaacttccttagatttttattgaaggatggtcagctgtggctatgtgctcctcaggcaaaacaaatatggaaatgcttagctgagaatgcagtttacctttgtgatcgtgaagcctgttttaagtggtattccaagttgatgggggatgaaccagacttagatcctgatattaataaggacttctttgaaagtaatgtgcttcagcttgatccttctctgttaactgaaaatggaatgaagtgttttgagcgattcttcaaagctgtgaattgtcgagaaggaaaactagtagcaaaaaggagagcctatatgatggatgacttggagttaataggattagattacctttggagggtcgtgattcagagtaatgatgatattgccagcagagctatagatctcctcaaagagatatacacgaaccttggtccaagactacaagtcaatcaggtggtgatccatgaagacttcattcagtcttgttttgatcgtctgaaggcttcctatgacacattgtgtgttttggatggtgacaaagacagtgttaattgtgcaagacaggaagctgttcgaatggttcgagtattaactgttttaagggaatatataaatgaatgtgacagtgattatcatgaggaaagaacaattctccctatgtcgagagcattccgcggtaaacacctctcttttgtagttcgatttccaaaccagggcagacaggttgatgacttggaggtatggtctcatacaaatgatacaattggttcagtacgacgatgtattctcaatcgtattaaagccaacgtagcccatacaaaaattgagctctttgtgggcggtgagctgatagatcctgcagatgatagaaagttgattggacaattaaacttaaaagataaatcgcttattacagccaaacttacacagataagttccaatatgccttcaagccctgatagctcttctgattcctccactggatctcctggaaaccatggtaatcattacagtgatggtcccaatccagaagtggaaagctgtttgcctggagtgataatgtcactgcatcccagatacatctcttttctttggcaagttgcagacttaggtagcagcctaaatatgccaccccttagagatggagcaagagtacttatgaaacttatgccgccagatagcacaacgatagaaaaattaagagctatttgtttagaccatgccaaacttggagaaagcagccttagtccatctcttgactcacttttctttggtccttcagcctcacaagtgctatatctaacagaggtagtctatgccttgttaatgcctgctggtgcacctctggctgatgattcctctgattttcagtttcacttcttgaaaagtggtggcctaccccttgtactgagtatgctaaccagaaataacttcctaccgaatgcagatatggaaactcgaaggggtgcctacctcaatgctcttaaaatagccaagcttttgctaactgccattggctatggtcatgttcgagctgtggcagaagcttgtcagccaggtgtagaaggtgtgaatcccatgacacagatcaaccaagttacccatgatcaagcagtggtgctacaaagtgcccttcagagcattcctaatccatcatccgagtgcatgcttagaaatgtgtcagttcgtcttgctcagcagatatctgatgaggcttcaagatatatgcctgatatttgtgtaattagagctatacaaaaaattatctgggcatcaggatgtgggtcgttacagctagtatttagcccaaatgaagaaatcactaaaatttatgagaagaccaatgcaggcaatgagccagacttggaagacgaacaggtttgctgtgaagcattggaagtgatgaccttatgttttgccttgattccaacagccttagatgctcttagtaaagaaaaggcttggcagacattcatcattgacttactattgcactgtcacagcaaaactgttcgtcaggtggcacaggagcagttctttttaatgtgcaccagatgttgcatgggacaccggcctctacttttcttcattactctactctttactgttttggggagcacagcaagagagagagctaaacactcaggcgactactttactcttttaagacaccttcttaattacgcttacaatagtaatattaatgtacccaatgctgaagttcttctcaataatgaaattgattggcttaaaagaattagggatgatgttaaaagaacaggagaaacgggtattgaagagacgatcttagagggccaccttggagtgacaaaggagttactggcctttcaaacttctgagaaaaaatttcatattggttgtgaaaaaggaggtgctaatctcattaaagaattaattgatgatttcatatttcctgcatccaatgtttacctacagtatatgagaaatggagagcttccagctgaacaggctattccggtctgtggttcaccacctacaattaatgctggttttgaattacttgtagcattagctgttggctgtgtgaggaatctcaaacaaatagtagattctttgactgaaatgtattacattggcacagcaataactacttgtgaagcacttactgagtgggaatatctgccacctgttggaccccgcccacccaaaggattcgtggggctgaaaaatgccggtgctacttgttacatgaattctgtgattcagcaactctacatgattccttccattaggaacggtattcttgccattgaaggcacaggtagtgatgtagatgatgatatgtctggggatgagaagcaggacaatgagagcaatgttgatcccagggatgatgtatttggatatcctcaacaatttgaagataaaccagcattaagtaaaactgaagatagaaaagagtacaacattggtgtcctaagacaccttcaggtcatctttggtcatttagctgcttctcgactgcaatactatgtgcccagaggattttggaaacagttcaggctttggggtgagcctgttaatctgcgtgaacaacacgatgctttagaattttttaattcattggtggatagtttagatgaagctttaaaagctttaggacatccagctatgctaagtaaagtcttaggaggttcctttgctgatcagaagatctgccaaggctgcccacataggtacgaatgtgaagaatcttttacgaccctaaacgtagacattagaaatcaccaaaatcttcttgattctttggaacagtatgtcaaaggagatttactagaaggtgcaaatgcatatcattgtgaaaaatgcaataaaaaggttgataccgtaaagcgcttgctgattaaaaaattacctcctgttcttgctatacaactaaagcgatttgactatgactgggaaagagaatgtgcaatcaagttcaatgattattttgaatttcctcgagagctggacatggaaccttacacagttgcaggtgtcgcaaagctggaaggggataatgtaaacccagagagtcagttgatacaacagagtgagcagtctgaaagtgagacagcaggaagcacaaaatacagacttgtgggtgtgctcgtacacagtggtcaagcgagtggggggcattattattcttacatcatccaaaggaatggtggagatggtgagagaaatcgctggtataaatttgatgatggtgatgtaacagaatgtaaaatggatgatgacgaagaaatgaaaaaccagtgttttggtggagagtacatgggagaagtgtttgatcacatgatgaagcgtatgtcatacaggcgccagaaaaggtggtggaatgcttatatacttttttatgaacgaatggacacaatagaccaagatgatgagttgataagatatatatcagagcttgctatcaccaccagacctcatcagattattatgccatcagccattgagagaagtgtacggaaacagaacgtacaattcatgcataaccgaatgcagtacagtatggagtattttcagtttatgaaaaaactgcttacatgtaatggcgtttacttaaaccctcctcccgggcaagatcacctgttgcctgaagcagaagaaatcactatgatcagtattcaacttgctgctaggttcctctttactacaggatttcacacaaagaaagtagtccgtggctctgccagtgattggtatgatgcattgtgtattctccttcgtcacagcaagaatgtacgtttttggtttgctcataacgtcctttttaatgtttcaaatcgcttctccgaataccttctggagtgccctagtgcagaagtgaggggtgcgtttgcaaaacttatagtctttattgcacatttttccttgcaagatgggccatgtccttcaccttttgcctctcctggaccttctagtcaggcttatgacaacttaagcttgagtgatcacttactaagagcagtactaaatctcttgagaagggaagtttcagagcatgggcgtcatttacagcagtatttcaacctgtttgtaatgtatgccaatttaggtgtggcagagaagacacagcttctgaaattgagtgtacctgctacttttatgcttgtgtctttagatgaaggtccaggtcctccaatcaaataccagtatgctgaattaggcaaattatactcagtagtgtcacagctgatccgctgttgcaatgtctcttcaagaatgcagtcttcaatcaatggtaatcctcctcttcccaatccttttggtgatcctaatttatcacaacctataatgccaattcagcagaatgtggcagacattttatttgtgagaacaagttatgtgaagaaaatcattgaagactgcagtaattcagaggaaaccgtcaaattgcttcgtttttgctgctgggagaatcctcagttctcatctactgtcctcagtgaacttctctggcaggttgcatattcctatacctatgaactgcggccctatttggatctgcttttgcaaatcttactgattgaggactcctggcaaactcacagaattcataatgcactgaaaggaattccagatgaccgagatgggctgtttgacacaatccagcgctctaagaatcactatcaaaaaagagcataccagtgtataaaatgtatggtagctctatttagtaactgtcctgttgcttaccaaatcctgcagggcaatggagatcttaaaagaaagtggacctgggcagtggaatggcttggagatgaacttgaaagaagaccatatactggcaatcctcagtacacttacaacaattggtctcccccagtgcaaagcaatgaaacgtccaatggttatttcttggagagatcacatagtgctaggatgacacttgcaaaagcttgtgaactctgtccagaggaggagccagatgaccaagatgctccagatgaacatgagtcgcctccacctgaagatgccccattgtacccccattcacctggatctcagtatcaacagaataaccatgtgcatggacagccatatacaggcccagcagcacatcacatgaacaaccctcagagaactggccaacgagcacaagaaaattatgaaggcagtgaagaagtatccccacctcaaaccaaggatcaatgaaatgcacataattaactggttccatcaagactgtgcacccaggccttacagtccaacctttttctgtgtctggctaatatttaaaactagaaaaactattcctaatcaacatggagtggagagtttattcactgtcttatctgcagaaatttgctgtcaatatataacccgcctgcagtggaaagtgtatagtgttttgtaataaaccccgatgcggcagatatacgaatatggccacaatcgccgcgtcactgcaaac

SEQ ID NO: 426235 - DNA, 2605 bp, Homo sapiens
tctcacatttacctctgaggactttcatcgtccattcaccttctccactcttcatgattaccgtcatctcattccttattatccataatctttgtcgtatgtccggctatgcaagaataggccgaaaggggccttcggaagtggtttgctagcggcggagctcggcggcgcggtcctgggtggcgggcggcgtgcgggcaggcgagcggagcccccggagccaagttactcacgggagcggagagaaaaccaaatcctgcagggcaatggagatcttaaaagaaagtggacctgggcagtggaatggcttggagatgaacttgaaagaagaccatatactggcaatcctcagtacacttacaacaattggtctcccccagtgcaaagcaatgaaacgtccaatggttatttcttggagagatcacatagtgctaggatgacacttgcaaaagcttgtgaactctgtccagaggaggagccagatgaccaagatgctccagatgaacatgagtcgcctccacctgaagatgccccattgtacccccattcacctggatctcagtatcaacagaataaccatgtgcatggacagccatatacaggcccagcagcacatcacatgaacaaccctcagagaactggccaacgagcacaagaaaattatgaaggcagtgaagaagtatccccacctcaaaccaaggatcaatgaaatgcacataattaactggttccatcaagactgtgcacccaggccttacagtccaacctttttctgtgtctggctaatatttaaaactagaaaaactattcctaatcaacatggagtggagagtttattcactgtcttatctgcagaaatttgctgtcaatatataacccgcctgcagtggaaagtgtatagtgttttgtaataaatggcctgatgctaatgtgtaaatggcaaaggtgtatatagtatattaatgttgactgttaattcttaagcaagaaacttttttcttgatgagactcacagatctacacaaactacaaaagttaattttcttgttacacccactgcactctgcaaccagtgttgcctgcctcatggcagttggatcagctcctttacaaaaaagaaaaaaaaaaaaccaacagcaacaaaacagagcccatccatgtcagccacaccaatagtttcatgttaattctttgccactggagtcaattttgctatgagcaatgtaaggctggtaacctttaaattatttggttgatgtggaaaattggtgatgtaacactgtttctagatttttttcattgcctttttattctgatattaggttaatcactttgaagctatagttatgctgtaacatttagcatggcttcacaccaagttagtgtagccaatgaggaaaaagttaccataatgacagcagttgtccgagaagtgacagctgtattactcagagcttttacttcttacacctagaatattaaaatataaaacaaggggagaaatgtgacagtctattttcagttgcacatatgttccttatatataatgtttgacagttcaatctctgggtggaataaagaacacttacgtatcagtaatgggaatttttaaagatttaaaacaaatatgcaaaaatttgctatgccaagatgctggagcataatataagactgtatttggtgtgcttgttttgtttctttggtagagtttattaggtgaatcttctaaaactttccttctgttggatcccagtgacgtggaagtcatcagaaccccacggtacttggagtacctctctgcaccaagatagctggctgattttctgctcagtcacaattttacttgaaagcaagaattgtcctagctccttttccattattccaaaacgtttaacgttcaaagcagggtctcattaaaaaagaaactactggttgatataattgagatattacaatttcagaataaacatttgattaaaaataaggaaatcctcagttcatactgtatttaaaagagaattggtaacttgaatgtgtgtaattttttggaacctgtctaaaaaccaaatacccctgcaaacagatacagcccaccctattctatttaaatattttgctgttttattttatagaaattattttgctgaattcacaaatagaatttgatttaagaagaactttttgtcctgtggtgtgtttttggttttttttttggttactttttttgtcctttttttttttttttaaaaagaggactgcatattaaaattcattctgtgcatagcatgcctaggcatgacactgattcaggatttcagtcacatcaagtttttgtgcacagaaagttttgacctttggccctctactgaagattttgagaaatcaggatgttgacactgtaaaagtttcctaacataatcttgtactttttgtatgttttttatatacatgtatatttaatgagcacaagcttggttgtattttttacaattcagttaatagggaaatgttttgtcaaaaggctacacttggaactgaacaaagcagaaacaaaattgagcattgcattattttgtgattaaaaggggcaggtatttaagataaa

SEQ ID NO: 426236 - DNA, 2608 bp, Homo sapiens
gaaatcccatctccactaaaaatagaaaaattagtcgggcgtggtggcaggcgcctgtaatctcagctacttgggaggctgaggctggagaatgacttgaacccaggaggcacagattgcagtgagcggagatcgtgccagtgggctccagcttgggtgacaagagtgaaactccatctcaaaaaaagaaaagaaaagaatgtttattctatgtcattttaagctaatgaagggagctttcttttggagaaatttctgtgaaattgcctgaaatgtagtagttctgagagaatgcaaatcaggttttttgttttgtttttttttttttgttttttccccaagttctttatctgcagtaaaagaaaagttgctaatgggtcagttttgtagatttttaaaatttatttcaaatagaaaaagttaaaagtaaacttgagtttgcctacgtaattttttatcttgaaatattcaaaattaggagccagatgaccaagatgctccagatgaacatgagtcgcctccacctgaagatgccccattgtacccccattcacctggatctcagtatcaacagaataaccatgtgcatggacagccatatacaggcccagcagcacatcacatgaacaaccctcagagaactggccaacgagcacaagaaaattatgaaggcagtgaagaagtatccccacctcaaaccaaggatcaatgaaatgcacataattaactggttccatcaagactgtgcacccaggccttacagtccaacctttttctgtgtctggctaatatttaaaactagaaaaactattcctaatcaacatggagtggagagtttattcactgtcttatctgcagaaatttgctgtcaatatataacccgcctgcagtggaaagtgtatagtgttttgtaataaatggcctgatgctaatgtgtaaatggcaaaggtgtatatagtatattaatgttgactgttaattcttaagcaagaaacttttttcttgatgagactcacagatctacacaaactacaaaagttaattttcttgttacacccactgcactctgcaaccagtgttgcctgcctcatggcagttggatcagctcctttacaaaaaagaaaaaaaaaaaaccaacagcaacaaaacagagcccatccatgtcagccacaccaatagtttcatgttaattctttgccactggagtcaattttgctatgagcaatgtaaggctggtaacctttaaattatttggttgatgtggaaaattggtgatgtaacactgtttctagatttttttcattgcctttttattctgatattaggttaatcactttgaagctatagttatgctgtaacatttagcatggcttcacaccaagttagtgtagccaatgaggaaaaagttaccataatgacagcagttgtccgagaagtgacagctgtattactcagagcttttacttcttacacctagaatattaaaatataaaacaaggggagaaatgtgacagtctattttcagttgcacatatgttccttatatataatgtttgacagttcaatctctgggtggaataaagaacacttacgtatcagtaatgggaatttttaaagatttaaaacaaatatgcaaaaatttgctatgccaagatgctggagcataatataagactgtatttggtgtgcttgttttgtttctttggtagagtttattaggtgaatcttctaaaactttccttctgttggatcccagtgacgtggaagtcatcagaaccccacggtacttggagtacctctctgcaccaagatagctggctgattttctgctcagtcacaattttacttgaaagcaagaattgtcctagctccttttccattattccaaaacgtttaacgttcaaagcagggtctcattaaaaaagaaactactggttgatataattgagatattacaatttcagaataaacatttgattaaaaataaggaaatcctcagttcatactgtatttaaaagagaattggtaacttgaatgtgtgtaattttttggaacctgtctaaaaaccaaatacccctgcaaacagatacagcccaccctattctatttaaatattttgctgttttattttatagaaattattttgctgaattcacaaatagaatttgatttaagaagaactttttgtcctgtggtgtgtttttggttttttttttggttactttttttgtcctttttttttttttttaaaaagaggactgcatattaaaattcattctgtgcatagcatgcctaggcatgacactgattcaggatttcagtcacatcaagtttttgtgcacagaaagttttgacctttggccctctactgaagattttgagaaatcaggatgttgacactgtaaaagtttcctaacataatcttgtactttttgtatgttttttatatacatgtatatttaatgagcacaagcttggttgtattttttacaattcagttaatagggaaatgttttgtcaaaaggctacacttggaactgaacaaagcagaaacaaaattgagcattgcattattttgtgattaaaaggggcaggtatttaagataaa

SEQ ID NO: 426237 - DNA, 7658 bp, Homo sapiens
ccggatccgccatattgacgaggacgggcatccgcggctgcggacgctagtctccgccgccgccggagccgcaacctctccgcacccggccccgtcagggcctctgtcgcgcctagcccctccccgccttacacagctcccgggcctcgcgggagcccgccgccgccgcctctctctcacgggaggcggccgccttagcgcccggtgcttgggtcggcgccgggagcgaggagcgagctacttcaaagccaccaggcctggagcggggacagaggcggcgactaggggaaggtgaagccgtcgctgcaggaggaggagcaggaggaggtgacgcaggagaaacgcaccgcccggagcccgtctgagctcagcgagagccccagcatgagcaaggtcaaggtgatgccccaccacagcttgaagatgaggaacctgcatttccacatactgacttggccaagttggatgacatgatcaacaggcctcgatgggtggttccagttttgccgaaaggggaattagaagtgcttttagaagctgctattgatcttagtaaaaagggccttgatgttaaaagtgaagcatgtcagcgatttttccgtgatgggctaacaatatcattcactaaaattcttacagatgaagcagtgagtggctggaagtttgaaattcataggtgtattattaacaatactcatcgtctggtggagctatgtgtggccaagttgtcccaagactggtttccacttttagaacttcttgccatggccttaaatcctcattgcaaattccatatctacaatggtacacgtccatgtgaatcagtttcctcaagtgttcagttgcctgaagatgaactctttgctcgttctccagatcctcgatcaccaaagggttggctagtggatcttctcaacaaatttggcactttaaatgggttccagattttgcatgatcgttttattaatggatcagcattaaacgttcaaataattgcagcccttattaaaccatttgggcaatgctatgagtttctcactcttcatacagtgaaaaagtactttcttccaataatagaaatggttccacagtttttagaaaacttaactgatgaagaactgaaaaaagaagcaaagaatgaagccaaaaatgatgctctttcaatgattattaaatctttgaagaatttagcttcaagggttccaggacaagaagaaactgttaaaaacttagaaatatttaggttaaaaatgatacttagattattgcaaatttcttctttcaatggaaagatgaatgcactgaatgaagttaataaggtgatatctagtgtatcatactatactcatcgacatggtaatcctgaggaggaagagtggctcacagctgaacgaatggcagaatggatacagcagaacaatatcttatccatagtgttgcgagatagtcttcatcagccacagtatgtagaaaagttagagaagattcttcgttttgtcatcaaagaaaaagctctgaccttacaggatcttgataatatctgggcagcacaggcagggaaacatgaagccattgtgaagaatgtacatgatctcctggcaaaattggcatgggatttttctcctgaacaacttgatcatccttttgattgttttaaggccagtcggacaaatgcgagtaaaaagcaacgtgaaaagctacttgagctgatacgtcgtcttgcagaagatgataaagatggtgtgatggcacacagagtgttgaaccttctgtggaatctggctcacagtgatgatgtgcctgtagatatcatggacctggctctcagtgcccacataaaaatactagattacagttgctcccaggaccgtgatacacaaaagatccaatggatagatcgctttatagaagaacttcgcacaaatgacaaatgggttattcccgcactgaaacaaattagagaaatttgtagtttgtttggtgaagcgcctcaaaatttgagtcaaactcagcgaagtccccatgtgttttatcgccatgacttaatcaatcaacttcaacacaatcatgccctagttactttggtagcagaaaaccttgcaacttacatggaaagcatgagactatatgctagagaccatgaagattatgacccacaaactgtgaggctgggaagtagatatagtcatgttcaagaagttcaagaacggcttaacttccttagatttttattgaaggatggtcagctgtggctatgtgctcctcaggcaaaacaaatatggaaatgcttagctgagaatgcagtttacctttgtgatcgtgaagcctgttttaagtggtattccaagttgatgggggatgaaccagacttagatcctgatattaataaggacttctttgaaagtaatgtgcttcagcttgatccttctctgttaactgaaaatggaatgaagtgttttgagcgattcttcaaagctgtgaattgtcgagaaggaaaactagtagcaaaaaggagagcctatatgatggatgacttggagttaataggattagattacctttggagggtcgtgattcagagtaatgatgatattgccagcagagctatagatctcctcaaagagatatacacgaaccttggtccaagactacaagtcaatcaggtggtgatccatgaagacttcattcagtcttgttttgatcgtctgaaggcttcctatgacacattgtgtgttttggatggtgacaaagacagtgttaattgtgcaagacaggaagctgttcgaatggttcgagtattaactgttttaagggaatatataaatgaatgtgacagtgattatcatgaggaaagaacaattctccctatgtcgagagcattccgcggtaaacacctctcttttgtagttcgatttccaaaccagggcagacaggttgatgacttggaggtatggtctcatacaaatgatacaattggttcagtacgacgatgtattctcaatcgtattaaagccaacgtagcccatacaaaaattgagctctttgtgggcggtgagctgatagatcctgcagatgatagaaagttgattggacaattaaacttaaaagataaatcgcttattacagccaaacttacacagataagttccaatatgccttcaagccctgatagctcttctgattcctccactggatctcctggaaaccatggtaatcattacagtgatggtcccaatccagaagtggaaagctgtttgcctggagtgataatgtcactgcatcccagatacatctcttttctttggcaagttgcagacttaggtagcagcctaaatatgccaccccttagagatggagcaagagtacttatgaaacttatgccgccagatagcacaacgatagaaaaattaagagctatttgtttagaccatgccaaacttggagaaagcagccttagtccatctcttgactcacttttctttggtccttcagcctcacaagtgctatatctaacagaggtagtctatgccttgttaatgcctgctggtgcacctctggctgatgattcctctgattttcagtttcacttcttgaaaagtggtggcctaccccttgtactgagtatgctaaccagaaataacttcctaccgaatgcagatatggaaactcgaaggggtgcctacctcaatgctcttaaaatagccaagcttttgctaactgccattggctatggtcatgttcgagctgtggcagaagcttgtcagccaggtgtagaaggtgtgaatcccatgacacagatcaaccaagttacccatgatcaagcagtggtgctacaaagtgcccttcagagcattcctaatccatcatccgagtgcatgcttagaaatgtgtcagttcgtcttgctcagcagatatctgatgaggcttcaagatatatgcctgatatttgtgtaattagagctatacaaaaaattatctgggcatcaggatgtgggtcgttacagctagtatttagcccaaatgaagaaatcactaaaatttatgagaagaccaatgcaggcaatgagccagacttggaagacgaacaggtttgctgtgaagcattggaagtgatgaccttatgttttgccttgattccaacagccttagatgctcttagtaaagaaaaggcttggcagacattcatcattgacttactattgcactgtcacagcaaaactgttcgtcaggtggcacaggagcagttctttttaatgtgcaccagatgttgcatgggacaccggcctctacttttcttcattactctactctttactgttttggggagcacagcaagagagagagctaaacactcaggcgactactttactcttttaagacaccttcttaattacgcttacaatagtaatattaatgtacccaatgctgaagttcttctcaataatgaaattgattggcttaaaagaattagggatgatgttaaaagaacaggagaaacgggtattgaagagacgatcttagagggccaccttggagtgacaaaggagttactggcctttcaaacttctgagaaaaaatttcatattggttgtgaaaaaggaggtgctaatctcattaaagaattaattgatgatttcatatttcctgcatccaatgtttacctacagtatatgagaaatggagagcttccagctgaacaggctattccggtctgtggttcaccacctacaattaatgctggttttgaattacttgtagcattagctgttggctgtgtgaggaatctcaaacaaatagtagattctttgactgaaatgtattacattggcacagcaataactacttgtgaagcacttactgagtgggaatatctgccacctgttggaccccgcccacccaaaggattcgtggggctgaaaaatgccggtgctacttgttacatgaattctgtgattcagcaactctacatgattccttccattaggaacggtattcttgccattgaaggcacaggtagtgatgtagatgatgatatgtctggggatgagaagcaggacaatgagagcaatgttgatcccagggatgatgtatttggatatcctcaacaatttgaagataaaccagcattaagtaaaactgaagatagaaaagagtacaacattggtgtcctaagacaccttcaggtcatctttggtcatttagctgcttctcgactgcaatactatgtgcccagaggattttggaaacagttcaggctttggggtgagcctgttaatctgcgtgaacaacacgatgctttagaattttttaattcattggtggatagtttagatgaagctttaaaagctttaggacatccagctatgctaagtaaagtcttaggaggttcctttgctgatcagaagatctgccaaggctgcccacataggtacgaatgtgaagaatcttttacgaccctaaacgtagacattagaaatcaccaaaatcttcttgattctttggaacagtatgtcaaaggagatttactagaaggtgcaaatgcatatcattgtgaaaaatgcaataaaaaggttgataccgtaaagcgcttgctgattaaaaaattacctcctgttcttgctatacaactaaagcgatttgactatgactgggaaagagaatgtgcaatcaagttcaatgattattttgaatttcctcgagagctggacatggaaccttacacagttgcaggtgtcgcaaagctggaaggggataatgtaaacccagagagtcagttgatacaacagagtgagcagtctgaaagtgagacagcaggaagcacaaaatacagacttgtgggtgtgctcgtacacagtggtcaagcgagtggggggcattattattcttacatcatccaaaggaatggtggagatggtgagagaaatcgctggtataaatttgatgatggtgatgtaacagaatgtaaaatggatgatgacgaagaaatgaaaaaccagtgttttggtggagagtacatgggagaagtgtttgatcacatgatgaagcgtatgtcatacaggcgccagaaaaggtggtggaatgcttatatacttttttatgaacgaatggacacaatagaccaagatgatgagttgataagatatatatcagagcttgctatcaccaccagacctcatcagattattatgccatcagccattgagagaagtgtacggaaacagaacgtacaattcatgcataaccgaatgcagtacagtatggagtattttcagtttatgaaaaaactgcttacatgtaatggcgtttacttaaaccctcctcccgggcaagatcacctgttgcctgaagcagaagaaatcactatgatcagtattcaacttgctgctaggttcctctttactacaggatttcacacaaagaaagtagtccgtggctctgccagtgattggtatgatgcattgtgtattctccttcgtcacagcaagaatgtacgtttttggtttgctcataacgtcctttttaatgtttcaaatcgcttctccgaataccttctggagtgccctagtgcagaagtgaggggtgcgtttgcaaaacttatagtctttattgcacatttttccttgcaagatgggccatgtccttcaccttttgcctctcctggaccttctagtcaggcttatgacaacttaagcttgagtgatcacttactaagagcagtactaaatctcttgagaagggaagtttcagagcatgggcgtcatttacagcagtatttcaacctgtttgtaatgtatgccaatttaggtgtggcagagaagacacagcttctgaaattgagtgtacctgctacttttatgcttgtgtctttagatgaaggtccaggtcctccaatcaaataccagtatgctgaattaggcaaattatactcagtagtgtcacagctgatccgctgttgcaatgtctcttcaagaatgcagtcttcaatcaatggtaatcctcctcttcccaatccttttggtgatcctaatttatcacaacctataatgccaattcagcagaatgtggcagacattttatttgtgagaacaagttatgtgaagaaaatcattgaagactgcagtaattcagaggaaaccgtcaaattgcttcgtttttgctgctgggagaatcctcagttctcatctactgtcctcagtgaacttctctggcaggttgcatattcctatacctatgaactgcggccctatttggatctgcttttgcaaatcttactgattgaggactcctggcaaactcacagaattcataatgcactgaaaggaattccagatgaccgagatgggctgtttgacacaatccagcgctctaagaatcactatcaaaaaagagcataccagtgtataaaatgtatggtagctctatttagtaactgtcctgttgcttaccaaatcctgcagggcaatggagatcttaaaagaaagtggtgaaaattacatctgaaataccacagactgagagaatgcagaagagggctgaacgattcaatgtacctgtgagcttggagagtaagaaagctgctcgggcagctaggttagggatttcttcagttccaacaaaaggtctgtcatctgataacaaacctatggttaacttggatc

SEQ ID NO: 426238 - DNA, 7772 bp, Homo sapiens
ccggatccgccatattgacgaggacgggcatccgcggctgcggacgctagtctccgccgccgccggagccgcaacctctccgcacccggccccgtcagggcctctgtcgcgcctagcccctccccgccttacacagctcccgggcctcgcgggagcccgccgccgccgcctctctctcacgggaggcggccgccttagcgcccggtgcttgggtcggcgccgggagcgaggagcgagctacttcaaagccaccaggcctggagcggggacagaggcggcgactaggggaaggtgaagccgtcgctgcaggaggaggagcaggaggaggtgacgcaggagaaacgcaccgcccggagcccgtctgagctcagcgagagccccagcatgagcaaggtcaaggtgatgccccaccacagcttgaagatgaggaacctgcatttccacatactgacttggccaagttggatgacatgatcaacaggcctcgatgggtggttccagttttgccgaaaggggaattagaagtgcttttagaagctgctattgatcttagtaaaaagggccttgatgttaaaagtgaagcatgtcagcgatttttccgtgatgggctaacaatatcattcactaaaattcttacagatgaagcagtgagtggctggaagtttgaaattcataggtgtattattaacaatactcatcgtctggtggagctatgtgtggccaagttgtcccaagactggtttccacttttagaacttcttgccatggccttaaatcctcattgcaaattccatatctacaatggtacacgtccatgtgaatcagtttcctcaagtgttcagttgcctgaagatgaactctttgctcgttctccagatcctcgatcaccaaagggttggctagtggatcttctcaacaaatttggcactttaaatgggttccagattttgcatgatcgttttattaatggatcagcattaaacgttcaaataattgcagcccttattaaaccatttgggcaatgctatgagtttctcactcttcatacagtgaaaaagtactttcttccaataatagaaatggttccacagtttttagaaaacttaactgatgaagaactgaaaaaagaagcaaagaatgaagccaaaaatgatgctctttcaatgattattaaatctttgaagaatttagcttcaagggttccaggacaagaagaaactgttaaaaacttagaaatatttaggttaaaaatgatacttagattattgcaaatttcttctttcaatggaaagatgaatgcactgaatgaagttaataaggtgatatctagtgtatcatactatactcatcgacatggtaatcctgaggaggaagagtggctcacagctgaacgaatggcagaatggatacagcagaacaatatcttatccatagtgttgcgagatagtcttcatcagccacagtatgtagaaaagttagagaagattcttcgttttgtcatcaaagaaaaagctctgaccttacaggatcttgataatatctgggcagcacaggcagggaaacatgaagccattgtgaagaatgtacatgatctcctggcaaaattggcatgggatttttctcctgaacaacttgatcatccttttgattgttttaaggccagtcggacaaatgcgagtaaaaagcaacgtgaaaagctacttgagctgatacgtcgtcttgcagaagatgataaagatggtgtgatggcacacagagtgttgaaccttctgtggaatctggctcacagtgatgatgtgcctgtagatatcatggacctggctctcagtgcccacataaaaatactagattacagttgctcccaggaccgtgatacacaaaagatccaatggatagatcgctttatagaagaacttcgcacaaatgacaaatgggttattcccgcactgaaacaaattagagaaatttgtagtttgtttggtgaagcgcctcaaaatttgagtcaaactcagcgaagtccccatgtgttttatcgccatgacttaatcaatcaacttcaacacaatcatgccctagttactttggtagcagaaaaccttgcaacttacatggaaagcatgagactatatgctagagaccatgaagattatgacccacaaactgtgaggctgggaagtagatatagtcatgttcaagaagttcaagaacggcttaacttccttagatttttattgaaggatggtcagctgtggctatgtgctcctcaggcaaaacaaatatggaaatgcttagctgagaatgcagtttacctttgtgatcgtgaagcctgttttaagtggtattccaagttgatgggggatgaaccagacttagatcctgatattaataaggacttctttgaaagtaatgtgcttcagcttgatccttctctgttaactgaaaatggaatgaagtgttttgagcgattcttcaaagctgtgaattgtcgagaaggaaaactagtagcaaaaaggagagcctatatgatggatgacttggagttaataggattagattacctttggagggtcgtgattcagagtaatgatgatattgccagcagagctatagatctcctcaaagagatatacacgaaccttggtccaagactacaagtcaatcaggtggtgatccatgaagacttcattcagtcttgttttgatcgtctgaaggcttcctatgacacattgtgtgttttggatggtgacaaagacagtgttaattgtgcaagacaggaagctgttcgaatggttcgagtattaactgttttaagggaatatataaatgaatgtgacagtgattatcatgaggaaagaacaattctccctatgtcgagagcattccgcggtaaacacctctcttttgtagttcgatttccaaaccagggcagacaggttgatgacttggaggtatggtctcatacaaatgatacaattggttcagtacgacgatgtattctcaatcgtattaaagccaacgtagcccatacaaaaattgagctctttgtgggcggtgagctgatagatcctgcagatgatagaaagttgattggacaattaaacttaaaagataaatcgcttattacagccaaacttacacagataagttccaatatgccttcaagccctgatagctcttctgattcctccactggatctcctggaaaccatggtaatcattacagtgatggtcccaatccagaagtggaaagctgtttgcctggagtgataatgtcactgcatcccagatacatctcttttctttggcaagttgcagacttaggtagcagcctaaatatgccaccccttagagatggagcaagagtacttatgaaacttatgccgccagatagcacaacgatagaaaaattaagagctatttgtttagaccatgccaaacttggagaaagcagccttagtccatctcttgactcacttttctttggtccttcagcctcacaagtgctatatctaacagaggtagtctatgccttgttaatgcctgctggtgcacctctggctgatgattcctctgattttcagtttcacttcttgaaaagtggtggcctaccccttgtactgagtatgctaaccagaaataacttcctaccgaatgcagatatggaaactcgaaggggtgcctacctcaatgctcttaaaatagccaagcttttgctaactgccattggctatggtcatgttcgagctgtggcagaagcttgtcagccaggtgtagaaggtgtgaatcccatgacacagatcaaccaagttacccatgatcaagcagtggtgctacaaagtgcccttcagagcattcctaatccatcatccgagtgcatgcttagaaatgtgtcagttcgtcttgctcagcagatatctgatgaggcttcaagatatatgcctgatatttgtgtaattagagctatacaaaaaattatctgggcatcaggatgtgggtcgttacagctagtatttagcccaaatgaagaaatcactaaaatttatgagaagaccaatgcaggcaatgagccagacttggaagacgaacaggtttgctgtgaagcattggaagtgatgaccttatgttttgccttgattccaacagccttagatgctcttagtaaagaaaaggcttggcagacattcatcattgacttactattgcactgtcacagcaaaactgttcgtcaggtggcacaggagcagttctttttaatgtgcaccagatgttgcatgggacaccggcctctacttttcttcattactctactctttactgttttggggagcacagcaagagagagagctaaacactcaggcgactactttactcttttaagacaccttcttaattacgcttacaatagtaatattaatgtacccaatgctgaagttcttctcaataatgaaattgattggcttaaaagaattagggatgatgttaaaagaacaggagaaacgggtattgaagagacgatcttagagggccaccttggagtgacaaaggagttactggcctttcaaacttctgagaaaaaatttcatattggttgtgaaaaaggaggtgctaatctcattaaagaattaattgatgatttcatatttcctgcatccaatgtttacctacagtatatgagaaatggagagcttccagctgaacaggctattccggtctgtggttcaccacctacaattaatgctggttttgaattacttgtagcattagctgttggctgtgtgaggaatctcaaacaaatagtagattctttgactgaaatgtattacattggcacagcaataactacttgtgaagcacttactgagtgggaatatctgccacctgttggaccccgcccacccaaaggattcgtggggctgaaaaatgccggtgctacttgttacatgaattctgtgattcagcaactctacatgattccttccattaggaacggtattcttgccattgaaggcacaggtagtgatgtagatgatgatatgtctggggatgagaagcaggacaatgagagcaatgttgatcccagggatgatgtatttggatatcctcaacaatttgaagataaaccagcattaagtaaaactgaagatagaaaagagtacaacattggtgtcctaagacaccttcaggtcatctttggtcatttagctgcttctcgactgcaatactatgtgcccagaggattttggaaacagttcaggctttggggtgagcctgttaatctgcgtgaacaacacgatgctttagaattttttaattcattggtggatagtttagatgaagctttaaaagctttaggacatccagctatgctaagtaaagtcttaggaggttcctttgctgatcagaagatctgccaaggctgcccacataggtacgaatgtgaagaatcttttacgaccctaaacgtagacattagaaatcaccaaaatcttcttgattctttggaacagtatgtcaaaggagatttactagaaggtgcaaatgcatatcattgtgaaaaatgcaataaaaaggttgataccgtaaagcgcttgctgattaaaaaattacctcctgttcttgctatacaactaaagcgatttgactatgactgggaaagagaatgtgcaatcaagttcaatgattattttgaatttcctcgagagctggacatggaaccttacacagttgcaggtgtcgcaaagctggaaggggataatgtaaacccagagagtcagttgatacaacagagtgagcagtctgaaagtgagacagcaggaacacaagaaaattatgaaggcagtgaagaagtatccccacctcaaaccaaggatcaatgaaatgcacataattaactggttccatcaagactgtgcacccaggccttacagtccaacctttttctgtgtctggctaatatttaaaactagaaaaactattcctaatcaacatggagtggagagtttattcactgtcttatctgcagaaatttgctgtcaatatataacccgcctgcagtggaaagtgtatagtgttttgtaataaatggcctgatgctaatgtgtaaatggcaaaggtgtatatagtatattaatgttgactgttaattcttaagcaagaaacttttttcttgatgagactcacagatctacacaaactacaaaagttaattttcttgttacacccactgcactctgcaaccagtgttgcctgcctcatggcagttggatcagctcctttacaaaaaagaaaaaaaaaaaaccaacagcaacaaaacagagcccatccatgtcagccacaccaatagtttcatgttaattctttgccactggagtcaattttgctatgagcaatgtaaggctggtaacctttaaattatttggttgatgtggaaaattggtgatgtaacactgtttctagatttttttcattgcctttttattctgatattaggttaatcactttgaagctatagttatgctgtaacatttagcatggcttcacaccaagttagtgtagccaatgaggaaaaagttaccataatgacagcagttgtccgagaagtgacagctgtattactcagagcttttacttcttacacctagaatattaaaatataaaacaaggggagaaatgtgacagtctattttcagttgcacatatgttccttatatataatgtttgacagttcaatctctgggtggaataaagaacacttacgtatcagtaatgggaatttttaaagatttaaaacaaatatgcaaaaatttgctatgccaagatgctggagcataatataagactgtatttggtgtgcttgttttgtttctttggtagagtttattaggtgaatcttctaaaactttccttctgttggatcccagtgacgtggaagtcatcagaaccccacggtacttggagtacctctctgcaccaagatagctggctgattttctgctcagtcacaattttacttgaaagcaagaattgtcctagctccttttccattattccaaaacgtttaacgttcaaagcagggtctcattaaaaaagaaactactggttgatataattgagatattacaatttcagaataaacatttgattaaaaataaggaaatcctcagttcatactgtatttaaaagagaattggtaacttgaatgtgtgtaattttttggaacctgtctaaaaaccaaatacccctgcaaacagatacagcccaccctattctatttaaatattttgctgttttattttatagaaattattttgctgaattcacaaatagaatttgatttaagaagaactttttgtcctgtggtgtgtttttggttttttttttggttactttttttgtcctttttttttttttttaaaaagaggactgcatattaaaattcattctgtgcatagcatgcctaggcatgacactgattcaggatttcagtcacatcaagtttttgtgcacagaaagttttgacctttggccctctactgaagattttgagaaatcaggatgttgacactgtaaaagtttcctaacataatcttgtactttttgtatgttttttatatacatgtatatttaatgagcacaagcttggttgtattttttacaattcagttaatagggaaatgttttgtcaaaaggctacacttggaactgaacaaagcagaaacaaaattgagcattgcattattttgtgattaaaaggggcaggtatttaagataaa

SEQ ID NO: 426239 - DNA, 7255 bp, Homo sapiens
ccggatccgccatattgacgaggacgggcatccgcggctgcggacgctagtctccgccgccgccggagccgcaacctctccgcacccggccccgtcagggcctctgtcgcgcctagcccctccccgccttacacagctcccgggcctcgcgggagcccgccgccgccgcctctctctcacgggaggcggccgccttagcgcccggtgcttgggtcggcgccgggagcgaggagcgagctacttcaaagccaccaggcctggagcggggacagaggcggcgactaggggaaggtgaagccgtcgctgcaggaggaggagcaggaggaggtgacgcaggagaaacgcaccgcccggagcccgtctgagctcagcgagagccccagcatgagcaaggtcaaggtgatgccccaccacagcttgaagatgaggaacctgcatttccacatactgacttggccaagttggatgacatgatcaacaggcctcgatgggtggttccagttttgccgaaaggggaattagaagtgcttttagaagctgctattgatcttagtaaaaagggccttgatgttaaaagtgaagcatgtcagcgatttttccgtgatgggctaacaatatcattcactaaaattcttacagatgaagcagtgagtggctggaagtttgaaattcataggtgtattattaacaatactcatcgtctggtggagctatgtgtggccaagttgtcccaagactggtttccacttttagaacttcttgccatggccttaaatcctcattgcaaattccatatctacaatggtacacgtccatgtgaatcagtttcctcaagtgttcagttgcctgaagatgaactctttgctcgttctccagatcctcgatcaccaaagggttggctagtggatcttctcaacaaatttggcactttaaatgggttccagattttgcatgatcgttttattaatggatcagcattaaacgttcaaataattgcagcccttattaaaccatttgggcaatgctatgagtttctcactcttcatacagtgaaaaagtactttcttccaataatagaaatggttccacagtttttagaaaacttaactgatgaagaactgaaaaaagaagcaaagaatgaagccaaaaatgatgctctttcaatgattattaaatctttgaagaatttagcttcaagggttccaggacaagaagaaactgttaaaaacttagaaatatttaggttaaaaatgatacttagattattgcaaatttcttctttcaatggaaagatgaatgcactgaatgaagttaataaggtgatatctagtgtatcatactatactcatcgacatggtaatcctgaggaggaagagtggctcacagctgaacgaatggcagaatggatacagcagaacaatatcttatccatagtgttgcgagatagtcttcatcagccacagtatgtagaaaagttagagaagattcttcgttttgtcatcaaagaaaaagctctgaccttacaggatcttgataatatctgggcagcacaggcagggaaacatgaagccattgtgaagaatgtacatgatctcctggcaaaattggcatgggatttttctcctgaacaacttgatcatccttttgattgttttaaggccagtcggacaaatgcgagtaaaaagcaacgtgaaaagctacttgagctgatacgtcgtcttgcagaagatgataaagatggtgtgatggcacacagagtgttgaaccttctgtggaatctggctcacagtgatgatgtgcctgtagatatcatggacctggctctcagtgcccacataaaaatactagattacagttgctcccaggaccgtgatacacaaaagatccaatggatagatcgctttatagaagaacttcgcacaaatgacaaatgggttattcccgcactgaaacaaattagagaaatttgtagtttgtttggtgaagcgcctcaaaatttgagtcaaactcagcgaagtccccatgtgttttatcgccatgacttaatcaatcaacttcaacacaatcatgccctagttactttggtagcagaaaaccttgcaacttacatggaaagcatgagactatatgctagagaccatgaagattatgacccacaaactgtgaggctgggaagtagatatagtcatgttcaagaagttcaagaacggcttaacttccttagatttttattgaaggatggtcagctgtggctatgtgctcctcaggcaaaacaaatatggaaatgcttagctgagaatgcagtttacctttgtgatcgtgaagcctgttttaagtggtattccaagttgatgggggatgaaccagacttagatcctgatattaataaggacttctttgaaagtaatgtgcttcagcttgatccttctctgttaactgaaaatggaatgaagtgttttgagcgattcttcaaagctgtgaattgtcgagaaggaaaactagtagcaaaaaggagagcctatatgatggatgacttggagttaataggattagattacctttggagggtcgtgattcagagtaatgatgatattgccagcagagctatagatctcctcaaagagatatacacgaaccttggtccaagactacaagtcaatcaggtggtgatccatgaagacttcattcagtcttgttttgatcgtctgaaggcttcctatgacacattgtgtgttttggatggtgacaaagacagtgttaattgtgcaagacaggaagctgttcgaatggttcgagtattaactgttttaagggaatatataaatgaatgtgacagtgattatcatgaggaaagaacaattctccctatgtcgagagcattccgcggtaaacacctctcttttgtagttcgatttccaaaccagggcagacaggttgatgacttggaggtatggtctcatacaaatgatacaattggttcagtacgacgatgtattctcaatcgtattaaagccaacgtagcccatacaaaaattgagctctttgtgggcggtgagctgatagatcctgcagatgatagaaagttgattggacaattaaacttaaaagataaatcgcttattacagccaaacttacacagataagttccaatatgccttcaagccctgatagctcttctgattcctccactggatctcctggaaaccatggtaatcattacagtgatggtcccaatccagaagtggaaagctgtttgcctggagtgataatgtcactgcatcccagatacatctcttttctttggcaagttgcagacttaggtagcagcctaaatatgccaccccttagagatggagcaagagtacttatgaaacttatgccgccagatagcacaacgatagaaaaattaagagctatttgtttagaccatgccaaacttggagaaagcagccttagtccatctcttgactcacttttctttggtccttcagcctcacaagtgctatatctaacagaggtagtctatgccttgttaatgcctgctggtgcacctctggctgatgattcctctgattttcagtttcacttcttgaaaagtggtggcctaccccttgtactgagtatgctaaccagaaataacttcctaccgaatgcagatatggaaactcgaaggggtgcctacctcaatgctcttaaaatagccaagcttttgctaactgccattggctatggtcatgttcgagctgtggcagaagcttgtcagccaggtgtagaaggtgtgaatcccatgacacagatcaaccaagttacccatgatcaagcagtggtgctacaaagtgcccttcagagcattcctaatccatcatccgagtgcatgcttagaaatgtgtcagttcgtcttgctcagcagatatctgatgaggcttcaagatatatgcctgatatttgtgtaattagagctatacaaaaaattatctgggcatcaggatgtgggtcgttacagctagtatttagcccaaatgaagaaatcactaaaatttatgagaagaccaatgcaggcaatgagccagacttggaagacgaacaggtttgctgtgaagcattggaagtgatgaccttatgttttgccttgattccaacagccttagatgctcttagtaaagaaaaggcttggcagacattcatcattgacttactattgcactgtcacagcaaaactgttcgtcaggtggcacaggagcagttctttttaatgtgcaccagatgttgcatgggacaccggcctctacttttcttcattactctactctttactgttttggggagcacagcaagagagagagctaaacactcaggcgactactttactcttttaagacaccttcttaattacgcttacaatagtaatattaatgtacccaatgctgaagttcttctcaataatgaaattgattggcttaaaagaattagggatgatgttaaaagaacaggagaaacgggtattgaagagacgatcttagagggccaccttggagtgacaaaggagttactggcctttcaaacttctgagaaaaaatttcatattggttgtgaaaaaggaggtgctaatctcattaaagaattaattgatgatttcatatttcctgcatccaatgtttacctacagtatatgagaaatggagagcttccagctgaacaggctattccggtctgtggttcaccacctacaattaatgctggttttgaattacttgtagcattagctgttggctgtgtgaggaatctcaaacaaatagtagattctttgactgaaatgtattacattggcacagcaataactacttgtgaagcacttactgagtgggaatatctgccacctgttggaccccgcccacccaaaggattcgtggggctgaaaaatgccggtgctacttgttacatgaattctgtgattcagcaactctacatgattccttccattaggaacggtattcttgccattgaaggcacaggtagtgatgtagatgatgatatgtctggggatgagaagcaggacaatgagagcaatgttgatcccagggatgatgtatttggatatcctcaacaatttgaagataaaccagcattaagtaaaactgaagatagaaaagagtacaacattggtgtcctaagacaccttcaggtcatctttggtcatttagctgcttctcgactgcaatactatgtgcccagaggattttggaaacagttcaggctttggggtgagcctgttaatctgcgtgaacaacacgatgctttagaattttttaattcattggtggatagtttagatgaagctttaaaagctttaggacatccagctatgctaagtaaagtcttaggaggttcctttgctgatcagaagatctgccaaggctgcccacataggtacgaatgtgaagaatcttttacgaccctaaacgtagacattagaaatcaccaaaatcttcttgattctttggaacagtatgtcaaaggagatttactagaaggtgcaaatgcatatcattgtgaaaaatgcaataaaaaggttgataccgtaaagcgcttgctgattaaaaaattacctcctgttcttgctatacaactaaagcgatttgactatgactgggaaagagaatgtgcaatcaagttcaatgattattttgaatttcctcgagagctggacatggaaccttacacagttgcaggtgtcgcaaagctggaaggggataatgtaaacccagagagtcagttgatacaacagagtgagcagtctgaaagtgagacagcaggaagcacaaaatacagacttgtgggtgtgctcgtacacagtggtcaagcgagtggggggcattattattcttacatcatccaaaggaatggtggagatggtgagagaaatcgctggtataaatttgatgatggtgatgtaacagaatgtaaaatggatgatgacgaagaaatgaaaaaccagtgttttggtggagagtacatgggagaagtgtttgatcacatgatgaagcgtatgtcatacaggcgccagaaaaggtggtggaatgcttatatacttttttatgaacgaatggacacaatagaccaagatgatgagttgataagatatatatcagagcttgctatcaccaccagacctcatcagattattatgccatcagccattgagagaagtgtacggaaacagaacgtacaattcatgcataaccgaatgcagtacagtatggagtattttcagtttatgaaaaaactgcttacatgtaatggcgtttacttaaaccctcctcccgggcaagatcacctgttgcctgaagcagaagaaatcactatgatcagtattcaacttgctgctaggttcctctttactacaggatttcacacaaagaaagtagtccgtggctctgccagtgattggtatgatgcattgtgtattctccttcgtcacagcaagaatgtacgtttttggtttgctcataacgtcctttttaatgtttcaaatcgcttctccgaataccttctggagtgccctagtgcagaagtgaggggtgcgtttgcaaaacttatagtctttattgcacatttttccttgcaagatgggccatgtccttcaccttttgcctctcctggaccttctagtcaggcttatgacaacttaagcttgagtgatcacttactaagagcagtactaaatctcttgagaagggaagtttcagagcatgggcgtcatttacagcagtatttcaacctgtttgtaatgtatgccaatttaggtgtggcagagaagacacagcttctgaaattgagtgtacctgctacttttatgcttgtgtctttagatgaaggtccaggtcctccaatcaaataccagtatgctgaattaggcaaattatactcagtagtgtcacagctgatccgctgttgcaatgtctcttcaagaatgcagtcttcaatcaatggtaatcctcctcttcccaatccttttggtgatcctaatttatcacaacctataatgccaattcagcagaatgtggcagacattttatttgtgagaacaagttatgtgaagaaaatcattgaagactgcagtaattcagaggaaaccgtcaaattgcttcgtttttgctgctgggagaatcctcagttctcatctactgtcctcagtgaacttctctggcaggttgcatattcctatacctaaatgcggcacagagtaccgaccga

SEQ ID NO: 426240 - DNA, 5451 bp, Homo sapiens
ccggatccgccatattgacgaggacgggcatccgcggctgcggacgctagtctccgccgccgccggagccgcaacctctccgcacccggccccgtcagggcctctgtcgcgcctagcccctccccgccttacacagctcccgggcctcgcgggagcccgccgccgccgcctctctctcacgggaggcggccgccttagcgcccggtgcttgggtcggcgccgggagcgaggagcgagctacttcaaagccaccaggcctggagcggggacagaggcggcgactaggggaaggtgaagccgtcgctgcaggaggaggagcaggaggaggtgacgcaggagaaacgcaccgcccggagcccgtctgagctcagcgagagccccagcatgagcaaggtcaaggtgatgccccaccacagcttgaagatgaggaacctgcatttccacatactgacttggccaagttggatgacatgatcaacaggcctcgatgggtggttccagttttgccgaaaggggaattagaagtgcttttagaagctgctattgatcttagtaaaaagggccttgatgttaaaagtgaagcatgtcagcgatttttccgtgatgggctaacaatatcattcactaaaattcttacagatgaagcagtgagtggctggaagtttgaaattcataggtgtattattaacaatactcatcgtctggtggagctatgtgtggccaagttgtcccaagactggtttccacttttagaacttcttgccatggccttaaatcctcattgcaaattccatatctacaatggtacacgtccatgtgaatcagtttcctcaagtgttcagttgcctgaagatgaactctttgctcgttctccagatcctcgatcaccaaagggttggctagtggatcttctcaacaaatttggcactttaaatgggttccagattttgcatgatcgttttattaatggatcagcattaaacgttcaaataattgcagcccttattaaaccatttgggcaatgctatgagtttctcactcttcatacagtgaaaaagtactttcttccaataatagaaatggttccacagtttttagaaaacttaactgatgaagaactgaaaaaagaagcaaagaatgaagccaaaaatgatgctctttcaatgattattaaatctttgaagaatttagcttcaagggttccaggacaagaagaaactgttaaaaacttagaaatatttaggttaaaaatgatacttagattattgcaaatttcttctttcaatggaaagatgaatgcactgaatgaagttaataaggtgatatctagtgtatcatactatactcatcgacatggtaatcctgaggaggaagagtggctcacagctgaacgaatggcagaatggatacagcagaacaatatcttatccatagtgttgcgagatagtcttcatcagccacagtatgtagaaaagttagagaagattcttcgttttgtcatcaaagaaaaagctctgaccttacaggatcttgataatatctgggcagcacaggcagggaaacatgaagccattgtgaagaatgtacatgatctcctggcaaaattggcatgggatttttctcctgaacaacttgatcatccttttgattgttttaaggccagtcggacaaatgcgagtaaaaagcaacgtgaaaagctacttgagctgatacgtcgtcttgcagaagatgataaagatggtgtgatggcacacagagtgttgaaccttctgtggaatctggctcacagtgatgatgtgcctgtagatatcatggacctggctctcagtgcccacataaaaatactagattacagttgctcccaggaccgtgatacacaaaagatccaatggatagatcgctttatagaagaacttcgcacaaatgacaaatgggttattcccgcactgaaacaaattagagaaatttgtagtttgtttggtgaagcgcctcaaaatttgagtcaaactcagcgaagtccccatgtgttttatcgccatgacttaatcaatcaacttcaacacaatcatgccctagttactttggtagcagaaaaccttgcaacttacatggaaagcatgagactatatgctagagaccatgaagattatgacccacaaactgtgaggctgggaagtagatatagtcatgttcaagaagttcaagaacggcttaacttccttagatttttattgaaggatggtcagctgtggctatgtgctcctcaggcaaaacaaatatggaaatgcttagctgagaatgcagtttacctttgtgatcgtgaagcctgttttaagtggtattccaagttgatgggggatgaaccagacttagatcctgatattaataaggacttctttgaaagtaatgtgcttcagcttgatccttctctgttaactgaaaatggaatgaagtgttttgagcgattcttcaaagctgtgaattgtcgagaaggaaaactagtagcaaaaaggagagcctatatgatggatgacttggagttaataggattagattacctttggagggtcgtgattcagagtaatgatgatattgccagcagagctatagatctcctcaaagagatatacacgaaccttggtccaagactacaagtcaatcaggtggtgatccatgaagacttcattcagtcttgttttgatcgtctgaaggcttcctatgacacattgtgtgttttggatggtgacaaagacagtgttaattgtgcaagacaggaagctgttcgaatggttcgagtattaactgttttaagggaatatataaatgaatgtgacagtgattatcatgaggaaagaacaattctccctatgtcgagagcattccgcggtaaacacctctcttttgtagttcgatttccaaaccagggcagacaggttgatgacttggaggtatggtctcatacaaatgatacaattggttcagtacgacgatgtattctcaatcgtattaaagccaacgtagcccatacaaaaattgagctctttgtgggcggtgagctgatagatcctgcagatgatagaaagttgattggacaattaaacttaaaagataaatcgcttattacagccaaacttacacagataagttccaatatgccttcaagccctgatagctcttctgattcctccactggatctcctggaaaccatggtaatcattacagtgatggtcccaatccagaagtggaaagctgtttgcctggagtgataatgtcactgcatcccagatacatctcttttctttggcaagttgcagacttaggtagcagcctaaatatgccaccccttagagatggagcaagagtacttatgaaacttatgccgccagatagcacaacgatagaaaaattaagagctatttgtttagaccatgccaaacttggagaaagcagccttagtccatctcttgactcacttttctttggtccttcagcctcacaagtgctatatctaacagaggtagtctatgccttgttaatgcctgctggtgcacctctggctgatgattcctctgattttcagtttcacttcttgaaaagtggtggcctaccccttgtactgagtatgctaaccagaaataacttcctaccgaatgcagatatggaaactcgaaggggtgcctacctcaatgctcttaaaatagccaagcttttgctaactgccattggctatggtcatgttcgagctgtggcagaagcttgtcagccaggtgtagaaggtgtgaatcccatgacacagatcaaccaagttacccatgatcaagcagtggtgctacaaagtgcccttcagagcattcctaatccatcatccgagtgcatgcttagaaatgtgtcagttcgtcttgctcagcagatatctgatgaggcttcaagatatatgcctgatatttgtgtaattagagctatacaaaaaattatctgggcatcaggatgtgggtcgttacagctagtatttagcccaaatgaagaaatcactaaaatttatgagaagaccaatgcaggcaatgagccagacttggaagacgaacaggtttgctgtgaagcattggaagtgatgaccttatgttttgccttgattccaacagccttagatgctcttagtaaagaaaaggcttggcagacattcatcattgacttactattgcactgtcacagcaaaactgttcgtcaggtggcacaggagcagttctttttaatgtgcaccagatgttgcatgggacaccggcctctacttttcttcattactctactctttactgttttggggagcacagcaagagagagagctaaacactcaggcgactactttactcttttaagacaccttcttaattacgcttacaatagtaatattaatgtacccaatgctgaagttcttctcaataatgaaattgattggcttaaaagaattagggatgatgttaaaagaacaggagaaacgggtattgaagagacgatcttagagggccaccttggagtgacaaaggagttactggcctttcaaacttctgagaaaaaatttcatattggttgtgaaaaaggaggtgctaatctcattaaagaattaattgatgatttcatatttcctgcatccaatgtttacctacagtatatgagaaatggagagcttccagctgaacaggctattccggtctgtggttcaccacctacaattaatgctggttttgaattacttgtagcattagctgttggctgtgtgaggaatctcaaacaaatagtagattctttgactgaaatgtattacattggcacagcaataactacttgtgaagcacttactgagtgggaatatctgccacctgttggaccccgcccacccaaaggattcgtggggctgaaaaatgccggtgctacttgttacatgaattctgtgattcagcaactctacatgattccttccattaggaacggtattcttgccattgaaggcacaggtagtgatgtagatgatgatatgtctggggatgagaagcaggacaatgagagcaatgttgatcccagggatgatgtatttggatatcctcaacaatttgaagataaaccagcattaagtaaaactgaagatagaaaagagtacaacattggtgtcctaagacaccttcaggtcatctttggtcatttagctgcttctcgactgcaatactatgtgcccagaggattttggaaacagttcaggctttggggtgagcctgttaatctgcgtgaacaacacgatgctttagaattttttaattcattggtggatagtttagatgaagctttaaaagctttaggacatccagctatgctaagtaaagtcttaggaggttcctttgctgatcagaagatctgccaaggctgcccacatagttcagcgtctgacggtaccggct

SEQ ID NO: 426241 - DNA, 5317 bp, Homo sapiens
  misc_feature (5225)..(5225): n is a, c, g, or t
  misc_feature (5254)..(5254): n is a, c, g, or t
  misc_feature (5262)..(5262): n is a, c, g, or t
  misc_feature (5310)..(5310): n is a, c, g, or t
ccggatccgccatattgacgaggacgggcatccgcggctgcggacgctagtctccgccgccgccggagccgcaacctctccgcacccggccccgtcagggcctctgtcgcgcctagcccctccccgccttacacagctcccgggcctcgcgggagcccgccgccgccgcctctctctcacgggaggcggccgccttagcgcccggtgcttgggtcggcgccgggagcgaggagcgagctacttcaaagccaccaggcctggagcggggacagaggcggcgactaggggaaggtgaagccgtcgctgcaggaggaggagcaggaggaggtgacgcaggagaaacgcaccgcccggagcccgtctgagctcagcgagagccccagcatgagcaaggtcaaggtgatgccccaccacagcttgaagatgaggaacctgcatttccacatactgacttggccaagttggatgacatgatcaacaggcctcgatgggtggttccagttttgccgaaaggggaattagaagtgcttttagaagctgctattgatcttagtaaaaagggccttgatgttaaaagtgaagcatgtcagcgatttttccgtgatgggctaacaatatcattcactaaaattcttacagatgaagcagtgagtggctggaagtttgaaattcataggtgtattattaacaatactcatcgtctggtggagctatgtgtggccaagttgtcccaagactggtttccacttttagaacttcttgccatggccttaaatcctcattgcaaattccatatctacaatggtacacgtccatgtgaatcagtttcctcaagtgttcagttgcctgaagatgaactctttgctcgttctccagatcctcgatcaccaaagggttggctagtggatcttctcaacaaatttggcactttaaatgggttccagattttgcatgatcgttttattaatggatcagcattaaacgttcaaataattgcagcccttattaaaccatttgggcaatgctatgagtttctcactcttcatacagtgaaaaagtactttcttccaataatagaaatggttccacagtttttagaaaacttaactgatgaagaactgaaaaaagaagcaaagaatgaagccaaaaatgatgctctttcaatgattattaaatctttgaagaatttagcttcaagggttccaggacaagaagaaactgttaaaaacttagaaatatttaggttaaaaatgatacttagattattgcaaatttcttctttcaatggaaagatgaatgcactgaatgaagttaataaggtgatatctagtgtatcatactatactcatcgacatggtaatcctgaggaggaagagtggctcacagctgaacgaatggcagaatggatacagcagaacaatatcttatccatagtgttgcgagatagtcttcatcagccacagtatgtagaaaagttagagaagattcttcgttttgtcatcaaagaaaaagctctgaccttacaggatcttgataatatctgggcagcacaggcagggaaacatgaagccattgtgaagaatgtacatgatctcctggcaaaattggcatgggatttttctcctgaacaacttgatcatccttttgattgttttaaggccagtcggacaaatgcgagtaaaaagcaacgtgaaaagctacttgagctgatacgtcgtcttgcagaagatgataaagatggtgtgatggcacacagagtgttgaaccttctgtggaatctggctcacagtgatgatgtgcctgtagatatcatggacctggctctcagtgcccacataaaaatactagattacagttgctcccaggaccgtgatacacaaaagatccaatggatagatcgctttatagaagaacttcgcacaaatgacaaatgggttattcccgcactgaaacaaattagagaaatttgtagtttgtttggtgaagcgcctcaaaatttgagtcaaactcagcgaagtccccatgtgttttatcgccatgacttaatcaatcaacttcaacacaatcatgccctagttactttggtagcagaaaaccttgcaacttacatggaaagcatgagactatatgctagagaccatgaagattatgacccacaaactgtgaggctgggaagtagatatagtcatgttcaagaagttcaagaacggcttaacttccttagatttttattgaaggatggtcagctgtggctatgtgctcctcaggcaaaacaaatatggaaatgcttagctgagaatgcagtttacctttgtgatcgtgaagcctgttttaagtggtattccaagttgatgggggatgaaccagacttagatcctgatattaataaggacttctttgaaagtaatgtgcttcagcttgatccttctctgttaactgaaaatggaatgaagtgttttgagcgattcttcaaagctgtgaattgtcgagaaggaaaactagtagcaaaaaggagagcctatatgatggatgacttggagttaataggattagattacctttggagggtcgtgattcagagtaatgatgatattgccagcagagctatagatctcctcaaagagatatacacgaaccttggtccaagactacaagtcaatcaggtggtgatccatgaagacttcattcagtcttgttttgatcgtctgaaggcttcctatgacacattgtgtgttttggatggtgacaaagacagtgttaattgtgcaagacaggaagctgttcgaatggttcgagtattaactgttttaagggaatatataaatgaatgtgacagtgattatcatgaggaaagaacaattctccctatgtcgagagcattccgcggtaaacacctctcttttgtagttcgatttccaaaccagggcagacaggttgatgacttggaggtatggtctcatacaaatgatacaattggttcagtacgacgatgtattctcaatcgtattaaagccaacgtagcccatacaaaaattgagctctttgtgggcggtgagctgatagatcctgcagatgatagaaagttgattggacaattaaacttaaaagataaatcgcttattacagccaaacttacacagataagttccaatatgccttcaagccctgatagctcttctgattcctccactggatctcctggaaaccatggtaatcattacagtgatggtcccaatccagaagtggaaagctgtttgcctggagtgataatgtcactgcatcccagatacatctcttttctttggcaagttgcagacttaggtagcagcctaaatatgccaccccttagagatggagcaagagtacttatgaaacttatgccgccagatagcacaacgatagaaaaattaagagctatttgtttagaccatgccaaacttggagaaagcagccttagtccatctcttgactcacttttctttggtccttcagcctcacaagtgctatatctaacagaggtagtctatgccttgttaatgcctgctggtgcacctctggctgatgattcctctgattttcagtttcacttcttgaaaagtggtggcctaccccttgtactgagtatgctaaccagaaataacttcctaccgaatgcagatatggaaactcgaaggggtgcctacctcaatgctcttaaaatagccaagcttttgctaactgccattggctatggtcatgttcgagctgtggcagaagcttgtcagccaggtgtagaaggtgtgaatcccatgacacagatcaaccaagttacccatgatcaagcagtggtgctacaaagtgcccttcagagcattcctaatccatcatccgagtgcatgcttagaaatgtgtcagttcgtcttgctcagcagatatctgatgaggcttcaagatatatgcctgatatttgtgtaattagagctatacaaaaaattatctgggcatcaggatgtgggtcgttacagctagtatttagcccaaatgaagaaatcactaaaatttatgagaagaccaatgcaggcaatgagccagacttggaagacgaacaggtttgctgtgaagcattggaagtgatgaccttatgttttgccttgattccaacagccttagatgctcttagtaaagaaaaggcttggcagacattcatcattgacttactattgcactgtcacagcaaaactgttcgtcaggtggcacaggagcagttctttttaatgtgcaccagatgttgcatgggacaccggcctctacttttcttcattactctactctttactgttttggggagcacagcaagagagagagctaaacactcaggcgactactttactcttttaagacaccttcttaattacgcttacaatagtaatattaatgtacccaatgctgaagttcttctcaataatgaaattgattggcttaaaagaattagggatgatgttaaaagaacaggagaaacgggtattgaagagacgatcttagagggccaccttggagtgacaaaggagttactggcctttcaaacttctgagaaaaaatttcatattggttgtgaaaaaggaggtgctaatctcattaaagaattaattgatgatttcatatttcctgcatccaatgtttacctacagtatatgagaaatggagagcttccagctgaacaggctattccggtctgtggttcaccacctacaattaatgctggttttgaattacttgtagcattagctgttggctgtgtgaggaatctcaaacaaatagtagattctttgactgaaatgtattacattggcacagcaataactacttgtgaagcacttactgagtgggaatatctgccacctgttggaccccgcccacccaaaggattcgtggggctgaaaaatgccggtgctacttgttacatgaattctgtgattcagcaactctacatgattccttccattaggaacggtattcttgccattgaaggcacaggtagtgatgtagatgatgatatgtctggggatgagaagcaggacaatgagagcaatgttgatcccagggatgatgtatttggatatcctcaacaatttgaagataaaccagcattaagtaaaactgaagatagaaaagagtacaacattggtgtcctaagacaccttcaggtcatctttggtcatttagctgcttcctccgaactggccaantacctaatgttgcccaagaaaggattttngggaaaancaagtttccaaggcttttggggggttaagccccgtttaaatcctggcnttgaaac

SEQ ID NO: 426242 - DNA, 5526 bp, Homo sapiens
ccggatccgccatattgacgaggacgggcatccgcggctgcggacgctagtctccgccgccgccggagccgcaacctctccgcacccggccccgtcagggcctctgtcgcgcctagcccctccccgccttacacagctcccgggcctcgcgggagcccgccgccgccgcctctctctcacgggaggcggccgccttagcgcccggtgcttgggtcggcgccgggagcgaggagcgagctacttcaaagccaccaggcctggagcggggacagaggcggcgactaggggaaggtgaagccgtcgctgcaggaggaggagcaggaggaggtgacgcaggagaaacgcaccgcccggagcccgtctgagctcagcgagagccccagcatgagcaaggtcaaggtgatgccccaccacagcttgaagatgaggaacctgcatttccacatactgacttggccaagttggatgacatgatcaacaggcctcgatgggtggttccagttttgccgaaaggggaattagaagtgcttttagaagctgctattgatcttagtaaaaagggccttgatgttaaaagtgaagcatgtcagcgatttttccgtgatgggctaacaatatcattcactaaaattcttacagatgaagcagtgagtggctggaagtttgaaattcataggtgtattattaacaatactcatcgtctggtggagctatgtgtggccaagttgtcccaagactggtttccacttttagaacttcttgccatggccttaaatcctcattgcaaattccatatctacaatggtacacgtccatgtgaatcagtttcctcaagtgttcagttgcctgaagatgaactctttgctcgttctccagatcctcgatcaccaaagggttggctagtggatcttctcaacaaatttggcactttaaatgggttccagattttgcatgatcgttttattaatggatcagcattaaacgttcaaataattgcagcccttattaaaccatttgggcaatgctatgagtttctcactcttcatacagtgaaaaagtactttcttccaataatagaaatggttccacagtttttagaaaacttaactgatgaagaactgaaaaaagaagcaaagaatgaagccaaaaatgatgctctttcaatgattattaaatctttgaagaatttagcttcaagggttccaggacaagaagaaactgttaaaaacttagaaatatttaggttaaaaatgatacttagattattgcaaatttcttctttcaatggaaagatgaatgcactgaatgaagttaataaggtgatatctagtgtatcatactatactcatcgacatggtaatcctgaggaggaagagtggctcacagctgaacgaatggcagaatggatacagcagaacaatatcttatccatagtgttgcgagatagtcttcatcagccacagtatgtagaaaagttagagaagattcttcgttttgtcatcaaagaaaaagctctgaccttacaggatcttgataatatctgggcagcacaggcagggaaacatgaagccattgtgaagaatgtacatgatctcctggcaaaattggcatgggatttttctcctgaacaacttgatcatccttttgattgttttaaggccagtcggacaaatgcgagtaaaaagcaacgtgaaaagctacttgagctgatacgtcgtcttgcagaagatgataaagatggtgtgatggcacacagagtgttgaaccttctgtggaatctggctcacagtgatgatgtgcctgtagatatcatggacctggctctcagtgcccacataaaaatactagattacagttgctcccaggaccgtgatacacaaaagatccaatggatagatcgctttatagaagaacttcgcacaaatgacaaatgggttattcccgcactgaaacaaattagagaaatttgtagtttgtttggtgaagcgcctcaaaatttgagtcaaactcagcgaagtccccatgtgttttatcgccatgacttaatcaatcaacttcaacacaatcatgccctagttactttggtagcagaaaaccttgcaacttacatggaaagcatgagactatatgctagagaccatgaagattatgacccacaaactgtgaggctgggaagtagatatagtcatgttcaagaagttcaagaacggcttaacttccttagatttttattgaaggatggtcagctgtggctatgtgctcctcaggcaaaacaaatatggaaatgcttagctgagaatgcagtttacctttgtgatcgtgaagcctgttttaagtggtattccaagttgatgggggatgaaccagacttagatcctgatattaataaggacttctttgaaagtaatgtgcttcagcttgatccttctctgttaactgaaaatggaatgaagtgttttgagcgattcttcaaagctgtgaattgtcgagaaggaaaactagtagcaaaaaggagagcctatatgatggatgacttggagttaataggattagattacctttggagggtcgtgattcagagtaatgatgatattgccagcagagctatagatctcctcaaagagatatacacgaaccttggtccaagactacaagtcaatcaggtggtgatccatgaagacttcattcagtcttgttttgatcgtctgaaggcttcctatgacacattgtgtgttttggatggtgacaaagacagtgttaattgtgcaagacaggaagctgttcgaatggttcgagtattaactgttttaagggaatatataaatgaatgtgacagtgattatcatgaggaaagaacaattctccctatgtcgagagcattccgcggtaaacacctctcttttgtagttcgatttccaaaccagggcagacaggttgatgacttggaggtatggtctcatacaaatgatacaattggttcagtacgacgatgtattctcaatcgtattaaagccaacgtagcccatacaaaaattgagctctttgtgggcggtgagctgatagatcctgcagatgatagaaagttgattggacaattaaacttaaaagataaatcgcttattacagccaaacttacacagataagttccaatatgccttcaagccctgatagctcttctgattcctccactggatctcctggaaaccatggtaatcattacagtgatggtcccaatccagaagtggaaagctgtttgcctggagtgataatgtcactgcatcccagatacatctcttttctttggcaagttgcagacttaggtagcagcctaaatatgccaccccttagagatggagcaagagtacttatgaaacttatgccgccagatagcacaacgatagaaaaattaagagctatttgtttagaccatgccaaacttggagaaagcagccttagtccatctcttgactcacttttctttggtccttcagcctcacaagtgctatatctaacagaggtagtctatgccttgttaatgcctgctggtgcacctctggctgatgattcctctgattttcagtttcacttcttgaaaagtggtggcctaccccttgtactgagtatgctaaccagaaataacttcctaccgaatgcagatatggaaactcgaaggggtgcctacctcaatgctcttaaaatagccaagcttttgctaactgccattggctatggtcatgttcgagctgtggcagaagcttgtcagccaggtgtagaaggtgtgaatcccatgacacagatcaaccaagttacccatgatcaagcagtggtgctacaaagtgcccttcagagcattcctaatccatcatccgagtgcatgcttagaaatgtgtcagttcgtcttgctcagcagatatctgatgaggcttcaagatatatgcctgatatttgtgtaattagagctatacaaaaaattatctgggcatcaggatgtgggtcgttacagctagtatttagcccaaatgaagaaatcactaaaatttatgagaagaccaatgcaggcaatgagccagacttggaagacgaacaggtttgctgtgaagcattggaagtgatgaccttatgttttgccttgattccaacagccttagatgctcttagtaaagaaaaggcttggcagacattcatcattgacttactattgcactgtcacagcaaaactgttcgtcaggtggcacaggagcagttctttttaatgtgcaccagatgttgcatgggacaccggcctctacttttcttcattactctactctttactgttttggggagcacagcaagagagagagctaaacactcaggcgactactttactcttttaagacaccttcttaattacgcttacaatagtaatattaatgtacccaatgctgaagttcttctcaataatgaaattgattggcttaaaagaattagggatgatgttaaaagaacaggagaaacgggtattgaagagacgatcttagagggccaccttggagtgacaaaggagttactggcctttcaaacttctgagaaaaaatttcatattggttgtgaaaaaggaggtgctaatctcattaaagaattaattgatgatttcatatttcctgcatccaatgtttacctacagtatatgagaaatggagagcttccagctgaacaggctattccggtctgtggttcaccacctacaattaatgctggttttgaattacttgtagcattagctgttggctgtgtgaggaatctcaaacaaatagtagattctttgactgaaatgtattacattggcacagcaataactacttgtgaagcacttactgagtgggaatatctgccacctgttggaccccgcccacccaaaggattcgtggggctgaaaaatgccggtgctacttgttacatgaattctgtgattcagcaactctacatgattccttccattaggaacggtattcttgccattgaaggcacaggtagtgatgtagatgatgatatgtctggggatgagaagcaggacaatgagagcaatgttgatcccagggatgatgtatttggatatcctcaacaatttgaagataaaccagcattaagtaaaactgaagatagaaaagagtacaacattggtgtcctaagacaccttcaggtcatctttggtcatttagctgcttctcgactgcaatactatgtgcccagaggattttggaaacagttcaggtaaactatggatggacagtaatagagatacttcttaaaatgaacatctcaatacactaacattaaacctctaaaagacatgttggaaggcatctttttttaagcactggtaatattcaaactgtccttaattgggtgggtttttttttttttttttaggtccccttaggaagaagtagaaactgccatagtaagtaagggcaacatcctttagtctcttaaccatattattaactttttattaggaaaacatctaataaatacagaagtag

SEQ ID NO: 426243 - DNA, 4250 bp, Homo sapiens
ccggatccgccatattgacgaggacgggcatccgcggctgcggacgctagtctccgccgccgccggagccgcaacctctccgcacccggccccgtcagggcctctgtcgcgcctagcccctccccgccttacacagctcccgggcctcgcgggagcccgccgccgccgcctctctctcacgggaggcggccgccttagcgcccggtgcttgggtcggcgccgggagcgaggagcgagctacttcaaagccaccaggcctggagcggggacagaggcggcgactaggggaaggtgaagccgtcgctgcaggaggaggagcaggaggaggtgacgcaggagaaacgcaccgcccggagcccgtctgagctcagcgagagccccagcatgagcaaggtcaaggtgatgccccaccacagcttgaagatgaggaacctgcatttccacatactgacttggccaagttggatgacatgatcaacaggcctcgatgggtggttccagttttgccgaaaggggaattagaagtgcttttagaagctgctattgatcttagtaaaaagggccttgatgttaaaagtgaagcatgtcagcgatttttccgtgatgggctaacaatatcattcactaaaattcttacagatgaagcagtgagtggctggaagtttgaaattcataggtgtattattaacaatactcatcgtctggtggagctatgtgtggccaagttgtcccaagactggtttccacttttagaacttcttgccatggccttaaatcctcattgcaaattccatatctacaatggtacacgtccatgtgaatcagtttcctcaagtgttcagttgcctgaagatgaactctttgctcgttctccagatcctcgatcaccaaagggttggctagtggatcttctcaacaaatttggcactttaaatgggttccagattttgcatgatcgttttattaatggatcagcattaaacgttcaaataattgcagcccttattaaaccatttgggcaatgctatgagtttctcactcttcatacagtgaaaaagtactttcttccaataatagaaatggttccacagtttttagaaaacttaactgatgaagaactgaaaaaagaagcaaagaatgaagccaaaaatgatgctctttcaatgattattaaatctttgaagaatttagcttcaagggttccaggacaagaagaaactgttaaaaacttagaaatatttaggttaaaaatgatacttagattattgcaaatttcttctttcaatggaaagatgaatgcactgaatgaagttaataaggtgatatctagtgtatcatactatactcatcgacatggtaatcctgaggaggaagagtggctcacagctgaacgaatggcagaatggatacagcagaacaatatcttatccatagtgttgcgagatagtcttcatcagccacagtatgtagaaaagttagagaagattcttcgttttgtcatcaaagaaaaagctctgaccttacaggatcttgataatatctgggcagcacaggcagggaaacatgaagccattgtgaagaatgtacatgatctcctggcaaaattggcatgggatttttctcctgaacaacttgatcatccttttgattgttttaaggccagtcggacaaatgcgagtaaaaagcaacgtgaaaagctacttgagctgatacgtcgtcttgcagaagatgataaagatggtgtgatggcacacagagtgttgaaccttctgtggaatctggctcacagtgatgatgtgcctgtagatatcatggacctggctctcagtgcccacataaaaatactagattacagttgctcccaggaccgtgatacacaaaagatccaatggatagatcgctttatagaagaacttcgcacaaatgacaaatgggttattcccgcactgaaacaaattagagaaatttgtagtttgtttggtgaagcgcctcaaaatttgagtcaaactcagcgaagtccccatgtgttttatcgccatgacttaatcaatcaacttcaacacaatcatgccctagttactttggtagcagaaaaccttgcaacttacatggaaagcatgagactatatgctagagaccatgaagattatgacccacaaactgtgaggctgggaagtagatatagtcatgttcaagaagttcaagaacggcttaacttccttagatttttattgaaggatggtcagctgtggctatgtgctcctcaggcaaaacaaatatggaaatgcttagctgagaatgcagtttacctttgtgatcgtgaagcctgttttaagtggtattccaagttgatgggggatgaaccagacttagatcctgatattaataaggacttctttgaaagtaatgtgcttcagcttgatccttctctgttaactgaaaatggaatgaagtgttttgagcgattcttcaaagctgtgaattgtcgagaaggaaaactagtagcaaaaaggagagcctatatgatggatgacttggagttaataggattagattacctttggagggtcgtgattcagagtaatgatgatattgccagcagagctatagatctcctcaaagagatatacacgaaccttggtccaagactacaagtcaatcaggtggtgatccatgaagacttcattcagtcttgttttgatcgtctgaaggcttcctatgacacattgtgtgttttggatggtgacaaagacagtgttaattgtgcaagacaggaagctgttcgaatggttcgagtattaactgttttaagggaatatataaatgaatgtgacagtgattatcatgaggaaagaacaattctccctatgtcgagagcattccgcggtaaacacctctcttttgtagttcgatttccaaaccagggcagacaggttgatgacttggaggtatggtctcatacaaatgatacaattggttcagtacgacgatgtattctcaatcgtattaaagccaacgtagcccatacaaaaattgagctctttgtgggcggtgagctgatagatcctgcagatgatagaaagttgattggacaattaaacttaaaagataaatcgcttattacagccaaacttacacagataagttccaatatgccttcaagccctgatagctcttctgattcctccactggatctcctggaaaccatggtaatcattacagtgatggtcccaatccagaagtggaaagctgtttgcctggagtgataatgtcactgcatcccagatacatctcttttctttggcaagttgcagacttaggtagcagcctaaatatgccaccccttagagatggagcaagagtacttatgaaacttatgccgccagatagcacaacgatagaaaaattaagagctatttgtttagaccatgccaaacttggagaaagcagccttagtccatctcttgactcacttttctttggtccttcagcctcacaagtgctatatctaacagaggtagtctatgccttgttaatgcctgctggtgcacctctggctgatgattcctctgattttcagtttcacttcttgaaaagtggtggcctaccccttgtactgagtatgctaaccagaaataacttcctaccgaatgcagatatggaaactcgaaggggtgcctacctcaatgctcttaaaatagccaagcttttgctaactgccattggctatggtcatgttcgagctgtggcagaagcttgtcagccaggtgtagaaggtgtgaatcccatgacacaggtaatacagacttttcaaaaatccttttataatagtagatagcaatttttaaagtaaaactaattagtattttaagtgtagagttcaaggttgactcaatgttcaaagtgccttatttcagaggttttctttatgatgtttgtattaaaagtgcaaatacttttcgctgacagctgataatctgagggtagtttctccctgcccacttaaatcttgcttgactttcatttattttaaacctaacaaaaactccatatgaatctcttattaacttgtgcctggtagatatataaagacacagattgtaataagagatataattggtttatcttgttgcttgtttcccttcccaccttgggcttaaacccaagttctgagcttattctgactcggtttctgccttggtggcattcttgatccatgtcacaaaaaattctcaagacatgccagaat

SEQ ID NO: 426244 - DNA, 4664 bp, Homo sapiens
ccggatccgccatattgacgaggacgggcatccgcggctgcggacgctagtctccgccgccgccggagccgcaacctctccgcacccggccccgtcagggcctctgtcgcgcctagcccctccccgccttacacagctcccgggcctcgcgggagcccgccgccgccgcctctctctcacgggaggcggccgccttagcgcccggtgcttgggtcggcgccgggagcgaggagcgagctacttcaaagccaccaggcctggagcggggacagaggcggcgactaggggaaggtgaagccgtcgctgcaggaggaggagcaggaggaggtgacgcaggagaaacgcaccgcccggagcccgtctgagctcagcgagagccccagcatgagcaaggtcaaggtgatgccccaccacagcttgaagatgaggaacctgcatttccacatactgacttggccaagttggatgacatgatcaacaggcctcgatgggtggttccagttttgccgaaaggggaattagaagtgcttttagaagctgctattgatcttagtaaaaagggccttgatgttaaaagtgaagcatgtcagcgatttttccgtgatgggctaacaatatcattcactaaaattcttacagatgaagcagtgagtggctggaagtttgaaattcataggtgtattattaacaatactcatcgtctggtggagctatgtgtggccaagttgtcccaagactggtttccacttttagaacttcttgccatggccttaaatcctcattgcaaattccatatctacaatggtacacgtccatgtgaatcagtttcctcaagtgttcagttgcctgaagatgaactctttgctcgttctccagatcctcgatcaccaaagggttggctagtggatcttctcaacaaatttggcactttaaatgggttccagattttgcatgatcgttttattaatggatcagcattaaacgttcaaataattgcagcccttattaaaccatttgggcaatgctatgagtttctcactcttcatacagtgaaaaagtactttcttccaataatagaaatggttccacagtttttagaaaacttaactgatgaagaactgaaaaaagaagcaaagaatgaagccaaaaatgatgctctttcaatgattattaaatctttgaagaatttagcttcaagggttccaggacaagaagaaactgttaaaaacttagaaatatttaggttaaaaatgatacttagattattgcaaatttcttctttcaatggaaagatgaatgcactgaatgaagttaataaggtgatatctagtgtatcatactatactcatcgacatggtaatcctgaggaggaagagtggctcacagctgaacgaatggcagaatggatacagcagaacaatatcttatccatagtgttgcgagatagtcttcatcagccacagtatgtagaaaagttagagaagattcttcgttttgtcatcaaagaaaaagctctgaccttacaggatcttgataatatctgggcagcacaggcagggaaacatgaagccattgtgaagaatgtacatgatctcctggcaaaattggcatgggatttttctcctgaacaacttgatcatccttttgattgttttaaggccagtcggacaaatgcgagtaaaaagcaacgtgaaaagctacttgagctgatacgtcgtcttgcagaagatgataaagatggtgtgatggcacacagagtgttgaaccttctgtggaatctggctcacagtgatgatgtgcctgtagatatcatggacctggctctcagtgcccacataaaaatactagattacagttgctcccaggaccgtgatacacaaaagatccaatggatagatcgctttatagaagaacttcgcacaaatgacaaatgggttattcccgcactgaaacaaattagagaaatttgtagtttgtttggtgaagcgcctcaaaatttgagtcaaactcagcgaagtccccatgtgttttatcgccatgacttaatcaatcaacttcaacacaatcatgccctagttactttggtagcagaaaaccttgcaacttacatggaaagcatgagactatatgctagagaccatgaagattatgacccacaaactgtgaggctgggaagtagatatagtcatgttcaagaagttcaagaacggcttaacttccttagatttttattgaaggatggtcagctgtggctatgtgctcctcaggcaaaacaaatatggaaatgcttagctgagaatgcagtttacctttgtgatcgtgaagcctgttttaagtggtattccaagttgatgggggatgaaccagacttagatcctgatattaataaggacttctttgaaagtaatgtgcttcagcttgatccttctctgttaactgaaaatggaatgaagtgttttgagcgattcttcaaagctgtgaattgtcgagaaggaaaactagtagcaaaaaggagagcctatatgatggatgacttggagttaataggattagattacctttggagggtcgtgattcagagtaatgatgatattgccagcagagctatagatctcctcaaagagatatacacgaaccttggtccaagactacaagtcaatcaggtggtgatccatgaagacttcattcagtcttgttttgatcgtctgaaggcttcctatgacacattgtgtgttttggatggtgacaaagacagtgttaattgtgcaagacaggaagctgttcgaatggttcgagtattaactgttttaagggaatatataaatgaatgtgacagtgattatcatgaggaaagaacaattctccctatgtcgagagcattccgcggtaaacacctctcttttgtagttcgatttccaaaccagggcagacaggttgatgacttggaggtatggtctcatacaaatgatacaattggttcagtacgacgatgtattctcaatcgtattaaagccaacgtagcccatacaaaaattgagctctttgtgggcggtgagctgatagatcctgcagatgatagaaagttgattggacaattaaacttaaaagataaatcgcttattacagccaaacttacacagataagttccaatatgccttcaagccctgatagctcttctgattcctccactggatctcctggaaaccatggtaatcattacagtgatggtcccaatccagaagtggaaagctgtttgcctggagtgataatgtcactgcatcccagatacatctcttttctttggcaagttgcagacttaggtagcagcctaaatatgccaccccttagagatggagcaagagtacttatgaaacttatgccgccagatagcacaacgatagaaaaattaagagctatttgtttagaccatgccaaacttggagaaagcagccttagtccatctcttgactcacttttctttggtccttcagcctcacaagtgctatatctaacagaggtagtctatgccttgttaatgcctgctggtgcacctctggctgatgattcctctgattttcagtttcacttcttgaaaagtggtggcctaccccttgtactgagtatgctaaccagaaataacttcctaccgaatgcagatatggaaactcgaaggggtgcctacctcaatgctcttaaaatagccaagcttttgctaactgccattggctatggtcatgttcgagctgtggcagaagcttgtcagccaggtgtagaaggtgtgaatcccatgacacagatcaaccaagttacccatgatcaagcagtggtgctacaaagtgcccttcagagcattcctaatccatcatccgagtgcatgcttagaaatgtgtcagttcgtcttgctcagcagatatctgatgaggcttcaagatatatgcctgatatttgtgtaattagagctatacaaaaaattatctgggcatcaggatgtgggtcgttacagctagtatttagcccaaatgaagaaatcactaaaatttatgagaagaccaatgcaggcaatgagccagacttggaagacgaacaggtttgctgtgaagcattggaagtgatgaccttatgttttgccttgattccaacagccttagatgctcttagtaaagaaaaggcttggcagacattcatcattgacttactattgcactgtcacagcaagtaagtatcttttttaattgtaagaaacttactttttgtaaatggagtgaattaatttaggctggcaaaatgtgtccccaaaattaaatatttattgtctctatggcatattggtattgaggaaaattttattatttaagagtgttttgcttaacctaaatgtttggttttagtctctgcaaatgccaatattaattgtcaaagcatgatttttttctaatcttagaatttagttttacctgggaggtatatagattagcctatttctaaaaatctagtttgcaagatttaaatcatataggacattagcctcctatcttagattcctagatgccaggttttttttaaagccaaacagaatttgatatgaaatttgtaagacagggtcattgtaagaacttttgcagtttacactgataataaagatcagttataaagctcatgtttt

SEQ ID NO: 426245 - DNA, 605 bp, Homo sapiens
acaagttatgtgaagaaaatcattgaagactgcagtaattcagaggaaaccgtcaaattgcttcgtttttgctgctgggagaatcctcagttctcatctactgtcctcagtgaacttctctggcaggtaaaaggaaaataacatttgtatgtttataatttgatttgttattcctttcattaagttactcaccatgtcttacttgtttttaggttgcatattcctatacctatgaactgcggccctatttggatctgcttttgcaaatcttactgattgaggactcctggcaaactcacaggtggatactctttttgtgactggaaacaattaggcttgcccaggtgttagagttaactgaaattgacagtcaccacattttttttaacctattggagttctagtgaatgttttatcttaaacctaggacaagggtaaataacaggttctccccttttcctcagaattttatttccttttttattcttttttctcactgcctaagtttcatacttaataagcctgtttctttagaatgacttttttaattaaggaggagctagcttgggcatttggtaaatatttgaatttcattaatgatgccc

SEQ ID NO: 426246 - DNA, 4095 bp, Homo sapiens
cagggctggctttggtcagctgagagcactgagtaaataggttggtggggtccatgttgggaagaggggtgagcacatttccctggtatcttggctgaagaatccaggctggagatgacagaggaggccatggtggagagttgattgcatccttatgttgaaatggagatcatgttcagctggggggcctctgtggtctccccagctgtcaagggctgcctccctctgttctgacctcatcgttattctggcagagtatactctgaagcgctggcttattttggaggggatgcaaagttttctcccacctaccctgtggggcagactcaaacataattctttgcttttttcttccccctttgcctgacttgcagttcgtctaatgattgaaaatccttacgagacccgctctgacagcttctactttgttgacaacaagctgataatgcacaacaaggctgattatgcctataatggaggccagtaagtgctgcaagagtaggtaggggaggtgctttgccgcggccacaagatcctggcacacggagatgatcgaagctgcagtttgtcaacacacatctggaacctggccccaggaagccaaggctggggtggcagtttcctgcgcgccaaaggagctgccaaacagtgctgtgttttcttccccagtattttttcttccctttttttcctgccccgtaggttgcagaggtactatagtaaagtaaaaggttaggataagggtcctggaatccagataaaaaagtttattttccgtagttctggctgcctgttggttgtcttgacgaccaggcatagctgtgcctggtgagaaggctctggccaggcccaccagcaggtcagcagctcttaaggttcctgggtgctgtgggaagctgaaaggtaggcctcttccaggtagctcctcctctcacctccggcattgccatcagcgcagtctgccctcggtctgtgtgaagtcttaaaccaactggaagacacttgaaagggtggggagggagggaggtgccaagagtggaggcaccaaggaatgggtgatgctgccaagctgaagggtctgctttgtggagaggctgctgctctgtctgacttccagggtctcagccagccctcctgggaatagaccaagttttcagcctggcagtgccttctgttcccattttggaggacagacaagcttgctccacatctcctggctcctcccttctgagtctcatgaaatagaatgagtcagctctgctcatggaacagtagtatctcttgaggccagagcaggtcttgtattttgtttttttatttccagacttctttcggggaggttttataaaatgacagtggtgttcccagcatatgtgatatgtggttagacttctgatagtatcagcttccaggggctaatctggcttatgttgggaggatatgcttacgaatcagcagcagctttctaaaggagagatttgacttttctctgcactgcacagcctggaggattggcttttgatggggatttgcctccgaagctctttgtacatttcttgtttaggagggttttcctatctacctttctactgaagtagtttctggaactttcctggtggatcagagttacgtaatgcagtctgagccttcagactgctagttagaattgttttaggtgttcagaaagggcaaaataggctgatgtggcctgtcagagtgatgtgttctcaaaaaagttcacttgcacatctgtgggctgcttttgtcctcagacccttagtggacagactccacaaaccctctgatgagacgattgatgtggccagggtccagttagcatcagtagaaggatgtcactaggaaaggcccaggtatctggtaagtgactgtgaggtgtcacagtacctgtgacaggagagtgtcctgatgtgcttgggagaaaggccgtatgggggccagggatggaagagacagtgtgtggccacagaaattcctgtccatccaccaccagtgctgctccctgtgtgggctttagggcgagtggccccgaaccttggcccagtgctttgtcccaggccagagtcttggcaatgccacatgctggcagctttctcactgagaaggtcctagcttacccctgtgtgctggccttggattcagccccgagagaggggagagaccattcctcctgtggagtgggttccttatcaccagaccggccactctcagaactggcgtccactgtaaatccaggtgccttacgtgtggctctgtcccttatgctgcaggggaaagctgcattgccattgttcccacctcctcactggcagaaagatgccagggctgttagcactgtctcctcaccttctgtttctcattgtggctcctcaaatgggatttgcatgttcctgtcaagcgtaacaacaatcccttctctctttgacagaggcccaggtgggacagtttctactatttgatatttgagtattatctgggatgtggttctggagctgcccagagctgtgcttagtagagtgtgtcttggaaacatgcccctgggcacactgtatctgctacattagtgggctatctcttatctgcagtgttcgcttttgctagaaagaggatgtggaggaaggaggaggtgggcaatctggcttgagttgtgctgtatcctcttccttgttagcttgccttagtctcactggagaccatttgcggatagtgcttggtccatgcccagcaggacagggctttgctgcttctgaaagtctggtgttctgtatctggggctgtgggttcctgtgtctagctgctcaggaaatcttgagaagcattccactctggggtgtaaaccagtatgagtttgaaattcaagcgtttgtacctgagttggggagagaattgcaaggcatactttctctgaaagtaacagaaccattcaggctgccatgttattaaggaatctgaactgttgatagcagttaccttgtgggtgatacaatgggaggcggcaaaaaaactacctgcataggagaccctgccctttgtcaagagctgggagcacatttcatcagagtagcaggcccacctggtgccagagggcctgcccctcctgcttctgttcctttgccttgcagtctcctggagagagcctctcttttcctgtacagcctttgggccaaaatgcccttctagcttctccaaagaagatccgagtttatttcattctatgttttaagaggtaaaaggacataacaagtgaaagaagttttgggctaaagtaggctatgtctccttatgtattactcaatactgttttgcagagaaaacatttttcaagcatgtgcttcctgaagacacctcagtctttgggccatttgatttccaatacatagggtggaagaatgtgattttggggctgaccataaactggaaatttgtgaaatggcagtgattgggcaatcttcagtttattttttcagttgaagtggaactcatttctggaatggatttaataggctgtgtctaatgtacaaactgggtgagtcctgccttagtgtgtcctgccccaccggtacgcttccaggatactcttttcccctctgtaaagtcactttcttctgatggccagtgtcactatgatgtcagtgaggtctggggatgaggacagtgtgtcctgaaattcacaggactgactcctcaccccagtgcacgaggattcctgtggcatcaggtgctgctgtacctggtgtaggagcctaatcattgaaccattgtgttactcacattccatgtcacagaacatatcagcctcaagaaggatttggtggaggtggatttaccactggttttacaaaggaccgtgtaaagtcattgaagttgtgaaagtctattttttttcctgtaaatctattttttacagaatataagaaacatcaatgacctgatctgtccttcctcctccttcccgcttcccccaaaatcacattccagtttttattgtctttgtgtccaaagtaaactaggtgacttatttgtataaaatgttattttgccacatgagacagtaataaaagaaagattttcacagta

SEQ ID NO: 426247 - DNA, 2007 bp, Homo sapiens
ggtaagctaggaccttctcagtgagaaagctgccagcatgtggcattgccaagactctggccttggattcagccccgagagaggggagagaccattcctcctgtggagtgggttccttatcaccagaccggccactctcagaactggcgtccactgtaaatccaggtgccttacgtgtggctctgtcccttatgctgcaggggaaagctgcattgccattgttcccacctcctcactggcagaaagatgccagggctgttagcactgtctcctcaccttctgtttctcattgtggctcctcaaatgggatttgcatgttcctgtcaagcgtaacaacaatcccttctctctttgacagaggcccaggtgggacagtttctactatttgatatttgagtattatctgggatgtggttctggagctgcccagagctgtgcttagtagagtgtgtcttggaaacatgcccctgggcacactgtatctgctacattagtgggctatctcttatctgcagtgttcgcttttgctagaaagaggatgtggaggaaggaggaggtgggcaatctggcttgagttgtgctgtatcctcttccttgttagcttgccttagtctcactggagaccatttgcggatagtgcttggtccatgcccagcaggacagggctttgctgcttctgaaagtctggtgttctgtatctggggctgtgggttcctgtgtctagctgctcaggaaatcttgagaagcattccactctggggtgtaaaccagtatgagtttgaaattcaagcgtttgtacctgagttggggagagaattgcaaggcatactttctctgaaagtaacagaaccattcaggctgccatgttattaaggaatctgaactgttgatagcagttaccttgtgggtgatacaatgggaggcggcaaaaaaactacctgcataggagaccctgccctttgtcaagagctgggagcacatttcatcagagtagcaggcccacctggtgccagagggcctgcccctcctgcttctgttcctttgccttgcagtctcctggagagagcctctcttttcctgtacagcctttgggccaaaatgcccttctagcttctccaaagaagatccgagtttatttcattctatgttttaagaggtaaaaggacataacaagtgaaagaagttttgggctaaagtaggctatgtctccttatgtattactcaatactgttttgcagagaaaacatttttcaagcatgtgcttcctgaagacacctcagtctttgggccatttgatttccaatacatagggtggaagaatgtgattttggggctgaccataaactggaaatttgtgaaatggcagtgattgggcaatcttcagtttattttttcagttgaagtggaactcatttctggaatggatttaataggctgtgtctaatgtacaaactgggtgagtcctgccttagtgtgtcctgccccaccggtacgcttccaggatactcttttcccctctgtaaagtcactttcttctgatggccagtgtcactatgatgtcagtgaggtctggggatgaggacagtgtgtcctgaaattcacaggactgactcctcaccccagtgcacgaggattcctgtggcatcaggtgctgctgtacctggtgtaggagcctaatcattgaaccattgtgttactcacattccatgtcacagaacatatcagcctcaagaaggatttggtggaggtggatttaccactggttttacaaaggaccgtgtaaagtcattgaagttgtgaaagtctattttttttcctgtaaatctattttttacagaatataagaaacatcaatgacctgatctgtccttcctcctccttcccgcttcccccaaaatcacattccagtttttattgtctttgtgtccaaagtaaactaggtgacttatttgtataaaatgttattttgccacatgagacagtaataaaagaaagattttcacagta

SEQ ID NO: 426248 - DNA, 4867 bp, Homo sapiens
gctgggcccggggggctggtggctggcaaggaggagaagaagaaggcgggcggcggcgtcctgaaccgcctgaaggcgcggcggcaggcgccccaccacgcggccgacgacggcgtcggggcagcggtcacggagcaggagctgctggcgatggacaccatccggcccgagcacgtcctgcgcctcagccgggtcaccgagagagtgtgcactcacctagttaggcctatcttggcctgcccatcactcctggcgtgcagtctcctaaccctgtggcagcagcaacattccctggatggatcgaaggctgccatggtgtctgctgagctgctatagcaggcagcccagggctgttcagattatttatgtaaacccgaagacaacatctacagtattgatttcacccgcttcaaaattcgagatttggagacagggacagtactttttgagattgccaaaccttgcgtttcagaccaggaggaggatgaggaggagggaggtggagacgtggacatcagcgcaggacgttttgtccgctatcagttcacaccggcatttctccgcctccggacagtcggggctacggtggagttcacagtgggagacaaacctgtttcaaacttccggatgatcgaacggcactatttccgggaacacttgctgaaaaactttgactttgattttggcttctgcatccccagcagtaggaacacttgtgaacatatctatgagtttccccagctttcggaggatgtcattcgtctaatgattgaaaatccttacgagacccgctctgacagcttctactttgttgacaacaagctgataatgcacaacaaggctgattatgcctataatggaggccagtaagtgctgcaagagtaggtaggggaggtgctttgccgcggccacaagatcctggcacacggagatgatcgaagctgcagtttgtcaacacacatctggaacctggccccaggaagccaaggctggggtggcagtttcctgcgcgccaaaggagctgccaaacagtgctgtgttttcttccccagtattttttcttccctttttttcctgccccgtaggttgcagaggtactatagtaaagtaaaaggttaggataagggtcctggaatccagataaaaaagtttattttccgtagttctggctgcctgttggttgtcttgacgaccaggcatagctgtgcctggtgagaaggctctggccaggcccaccagcaggtcagcagctcttaaggttcctgggtgctgtgggaagctgaaaggtaggcctcttccaggtagctcctcctctcacctccggcattgccatcagcgcagtctgccctcggtctgtgtgaagtcttaaaccaactggaagacacttgaaagggtggggagggagggaggtgccaagagtggaggcaccaaggaatgggtgatgctgccaagctgaagggtctgctttgtggagaggctgctgctctgtctgacttccagggtctcagccagccctcctgggaatagaccaagttttcagcctggcagtgccttctgttcccattttggaggacagacaagcttgctccacatctcctggctcctcccttctgagtctcatgaaatagaatgagtcagctctgctcatggaacagtagtatctcttgaggccagagcaggtcttgtattttgtttttttatttccagacttctttcggggaggttttataaaatgacagtggtgttcccagcatatgtgatatgtggttagacttctgatagtatcagcttccaggggctaatctggcttatgttgggaggatatgcttacgaatcagcagcagctttctaaaggagagatttgacttttctctgcactgcacagcctggaggattggcttttgatggggatttgcctccgaagctctttgtacatttcttgtttaggagggttttcctatctacctttctactgaagtagtttctggaactttcctggtggatcagagttacgtaatgcagtctgagccttcagactgctagttagaattgttttaggtgttcagaaagggcaaaataggctgatgtggcctgtcagagtgatgtgttctcaaaaaagttcacttgcacatctgtgggctgcttttgtcctcagacccttagtggacagactccacaaaccctctgatgagacgattgatgtggccagggtccagttagcatcagtagaaggatgtcactaggaaaggcccaggtatctggtaagtgactgtgaggtgtcacagtacctgtgacaggagagtgtcctgatgtgcttgggagaaaggccgtatgggggccagggatggaagagacagtgtgtggccacagaaattcctgtccatccaccaccagtgctgctccctgtgtgggctttagggcgagtggccccgaaccttggcccagtgctttgtcccaggccagagtcttggcaatgccacatgctggcagctttctcactgagaaggtcctagcttacccctgtgtgctggccttggattcagccccgagagaggggagagaccattcctcctgtggagtgggttccttatcaccagaccggccactctcagaactggcgtccactgtaaatccaggtgccttacgtgtggctctgtcccttatgctgcaggggaaagctgcattgccattgttcccacctcctcactggcagaaagatgccagggctgttagcactgtctcctcaccttctgtttctcattgtggctcctcaaatgggatttgcatgttcctgtcaagcgtaacaacaatcccttctctctttgacagaggcccaggtgggacagtttctactatttgatatttgagtattatctgggatgtggttctggagctgcccagagctgtgcttagtagagtgtgtcttggaaacatgcccctgggcacactgtatctgctacattagtgggctatctcttatctgcagtgttcgcttttgctagaaagaggatgtggaggaaggaggaggtgggcaatctggcttgagttgtgctgtatcctcttccttgttagcttgccttagtctcactggagaccatttgcggatagtgcttggtccatgcccagcaggacagggctttgctgcttctgaaagtctggtgttctgtatctggggctgtgggttcctgtgtctagctgctcaggaaatcttgagaagcattccactctggggtgtaaaccagtatgagtttgaaattcaagcgtttgtacctgagttggggagagaattgcaaggcatactttctctgaaagtaacagaaccattcaggctgccatgttattaaggaatctgaactgttgatagcagttaccttgtgggtgatacaatgggaggcggcaaaaaaactacctgcataggagaccctgccctttgtcaagagctgggagcacatttcatcagagtagcaggcccacctggtgccagagggcctgcccctcctgcttctgttcctttgccttgcagtctcctggagagagcctctcttttcctgtacagcctttgggccaaaatgcccttctagcttctccaaagaagatccgagtttatttcattctatgttttaagaggtaaaaggacataacaagtgaaagaagttttgggctaaagtaggctatgtctccttatgtattactcaatactgttttgcagagaaaacatttttcaagcatgtgcttcctgaagacacctcagtctttgggccatttgatttccaatacatagggtggaagaatgtgattttggggctgaccataaactggaaatttgtgaaatggcagtgattgggcaatcttcagtttattttttcagttgaagtggaactcatttctggaatggatttaataggctgtgtctaatgtacaaactgggtgagtcctgccttagtgtgtcctgccccaccggtacgcttccaggatactcttttcccctctgtaaagtcactttcttctgatggccagtgtcactatgatgtcagtgaggtctggggatgaggacagtgtgtcctgaaattcacaggactgactcctcaccccagtgcacgaggattcctgtggcatcaggtgctgctgtacctggtgtaggagcctaatcattgaaccattgtgttactcacattccatgtcacagaacatatcagcctcaagaaggatttggtggaggtggatttaccactggttttacaaaggaccgtgtaaagtcattgaagttgtgaaagtctattttttttcctgtaaatctattttttacagaatataagaaacatcaatgacctgatctgtccttcctcctccttcccgcttcccccaaaatcacattccagtttttattgtctttgtgtccaaagtaaactaggtgacttatttgtataaaatgttattttgccacatgagacagtaataaaagaaagattttcacagtaaaaaaaaaaaaaaaaaaaaaaaaaaaaaaaaaaaaaaaaaacaaaaaaaacaaacacaaaaaaaaaaaaaaaaaaaaaaaaaaaacatgcggttgggggggggcccccgccccccagaaaagaggttgctgctacacaccaccaacgtggtggggggccggccgcccccacagtatataatgagaccaacgcacgagcaggagaggtgcgttcaccggagaaacagacccggggggcaaacagacaggcgggggcgcgggccgccccccgaaaaaaaaagacgcgcgcggggggagacacagcaggtgtgggtaacacccccacccaggaggggtgcgtcagaagcctagcgggggactacaagaggcgccagggggccggaaaaaacg

SEQ ID NO: 426249 - DNA, 3682 bp, Homo sapiens
  misc_feature (3488)..(3488): n is a, c, g, or t
gctgggcccggggggctggtggctggcaaggaggagaagaagaaggcgggcggcggcgtcctgaaccgcctgaaggcgcggcggcaggcgccccaccacgcggccgacgacggcgtcggggcagcggtcacggagcaggagctgctggcgatggacaccatccggcccgagcacgtcctgcgcctcagccgggtcaccgagagagtgtgcactcacctagttaggcctatcttggcctgcccatcactcctggcgtgcagtctcctaaccctgtggcagcagcaacattccctggatggatcgaaggctgccatggtgtctgctgagctgctatagcaggcagcccagggctgttcagattatttatgtaaacccgaagacaacatctacagtattgatttcacccgcttcaaaattcgagatttggagacagggacagtactttttgagattgccaaaccttgcgtttcagaccaggaggaggatgaggaggagggaggtggagacgtggacatcagcgcaggacgttttgtccgctatcagttcacaccggcatttctccgcctccggacagtcggggctacggtggagttcacagtgggagacaaacctgtttcaaacttccggatgatcgaacggcactatttccgggaacacttgctgaaaaactttgactttgattttggcttctgcatccccagcagtaggaacacttgtgaacatatctatgagtttccccagctttcggaggatgtcattcgtctaatgattgaaaatccttacgagacccgctctgacagcttctactttgttgacaacaagctgataatgcacaacaaggctgattatgcctataatggaggccagtaagtgctgcaagagtaggtaggggaggtgctttgccgcggccacaagatcctggcacacggagatgatcgaagctgcagtttgtcaacacacatctggaacctggccccaggaagccaaggctggggtggcagtttcctgcgcgccaaaggagctgccaaacagtgctgtgttttcttccccagtattttttcttccctttttttcctgccccgtaggttgcagaggtactatagtaaagtaaaaggttaggataagggtcctggaatccagataaaaaagtttattttccgtagttctggctgcctgttggttgtcttgacgaccaggcatagctgtgcctggtgagaaggctctggccaggcccaccagcaggtcagcagctcttaaggttcctgggtgctgtgggaagctgaaaggtaggcctcttccaggtagctcctcctctcacctccggcattgccatcagcgcagtctgccctcggtctgtgtgaagtcttaaaccaactggaagacacttgaaagggtggggagggagggaggtgccaagagtggaggcaccaaggaatgggtgatgctgccaagctgaagggtctgctttgtggagaggctgctgctctgtctgacttccagggtctcagccagccctcctgggaatagaccaagttttcagcctggcagtgccttctgttcccattttggaggacagacaagcttgctccacatctcctggctcctcccttctgagtctcatgaaatagaatgagtcagctctgctcatggaacagtagtatctcttgaggccagagcaggtcttgtattttgtttttttatttccagacttctttcggggaggttttataaaatgacagtggtgttcccagcatatgtgatatgtggttagacttctgatagtatcagcttccaggggctaatctggcttatgttgggaggatatgcttacgaatcagcagcagctttctaaaggagagatttgacttttctctgcactgcacagcctggaggattggcttttgatggggatttgcctccgaagctctttgtacatttcttgtttaggagggttttcctatctacctttctactgaagtagtttctggaactttcctggtggatcagagttacgtaatgcagtctgagccttcagactgctagttagaattgttttaggtgttcagaaagggcaaaataggctgatgtggcctgtcagagtgatgtgttctcaaaaaagttcacttgcacatctgtgggctgcttttgtcctcagacccttagtggacagactccacaaaccctctgatgagacgattgatgtggccagggtccagttagcatcagtagaaggatgtcactaggaaaggcccaggtatctggtaagtgactgtgaggtgtcacagtacctgtgacaggagagtgtcctgatgtgcttgggagaaaggccgtatgggggccagggatggaagagacagtgtgtggccacagaaattcctgtccatccaccaccagtgctgctccctgtgtgggctttagggcgagtggccccgaaccttggcccagtgctttgtcccaggccagagtcttggcaatgccacatgctggcagctttctcactgagaaggtcctagcttacccctgtgtgctggccttggattcagccccgagagaggggagagaccattcctcctgtggagtgggttccttatcaccagaccggccactctcagaactggcgtccactgtaaatccaggtgccttacgtgtggctctgtcccttatgctgcaggggaaagctgcattgccattgttcccacctcctcactggcagaaagatgccagggctgttagcactgtctcctcaccttctgtttctcattgtggctcctcaaatgggatttgcatgttcctgtcaagcgtaacaacaatcccttctctctttgacagaggcccaggtgggacagtttctactatttgatatttgagtattatctgggatgtggttctggagctgcccagagctgtgcttagtagagtgtgtcttggaaacatgcccctgggcacactgtatctgctacattagtgggctatctcttatctgcagtgttcgcttttgctagaaagaggatgtggaggaaggaggaggtgggcaatctggcttgagttgtgctgtatcctcttccttgttagcttgccttagtctcactggagaccatttgcggatagtgcttggtccatgcccagcaggacagggctttgctgcttctgaaagtctggtgttctgtatctggggctgtgggttcctgtgtctagctgctcaggaaatcttgagaagcattccactctggggtgtaaaccagtatgagtttgaaattcaagcgtttgtacctgagttggggagagaattgcaaggcatactttctctgaaagtaacagaaccattcaggctgccatgttattaaggaatctgaactgttgatagcagttaccttgtgggtgatacaatgggaggcggcaaaaaaactacctgcataggagaccctgccctttgtcaagagctgggagcacatttcatcagagtagcaggcccacctggtgccaaggcngccctctggtgattgtccttggctgcagctcaggagaagcccactttcggaagctgggcaaaagccttaagtctccaagagaccggattcactggtcacagacggaccacggggcggcggcaaggaggcatgtacaagggggagactaaggttgcggccctgtgcggcacagggacgtcgggcacgatgagtga

SEQ ID NO: 426250 - DNA, 3039 bp, Homo sapiens
gctgggcccggggggctggtggctggcaaggaggagaagaagaaggcgggcggcggcgtcctgaaccgcctgaaggcgcggcggcaggcgccccaccacgcggccgacgacggcgtcggggcagcggtcacggagcaggagctgctggcgatggacaccatccggcccgagcacgtcctgcgcctcagccgggtcaccgagagagtgtgcactcacctagttaggcctatcttggcctgcccatcactcctggcgtgcagtctcctaaccctgtggcagcagcaacattccctggatggatcgaaggctgccatggtgtctgctgagctgctatagcaggcagcccagggctgttcagattatttatgtaaacccgaagacaacatctacagtattgatttcacccgcttcaaaattcgagatttggagacagggacagtactttttgagattgccaaaccttgcgtttcagaccaggaggaggatgaggaggagggaggtggagacgtggacatcagcgcaggacgttttgtccgctatcagttcacaccggcatttctccgcctccggacagtcggggctacggtggagttcacagtgggagacaaacctgtttcaaacttccggatgatcgaacggcactatttccgggaacacttgctgaaaaactttgactttgattttggcttctgcatccccagcagtaggaacacttgtgaacatatctatgagtttccccagctttcggaggatgtcattcgtctaatgattgaaaatccttacgagacccgctctgacagcttctactttgttgacaacaagctgataatgcacaacaaggctgattatgcctataatggaggccagtaagtgctgcaagagtaggtaggggaggtgctttgccgcggccacaagatcctggcacacggagatgatcgaagctgcagtttgtcaacacacatctggaacctggccccaggaagccaaggctggggtggcagtttcctgcgcgccaaaggagctgccaaacagtgctgtgttttcttccccagtattttttcttccctttttttcctgccccgtaggttgcagaggtactatagtaaagtaaaaggttaggataagggtcctggaatccagataaaaaagtttattttccgtagttctggctgcctgttggttgtcttgacgaccaggcatagctgtgcctggtgagaaggctctggccaggcccaccagcaggtcagcagctcttaaggttcctgggtgctgtgggaagctgaaaggtaggcctcttccaggtagctcctcctctcacctccggcattgccatcagcgcagtctgccctcggtctgtgtgaagtcttaaaccaactggaagacacttgaaagggtggggagggagggaggtgccaagagtggaggcaccaaggaatgggtgatgctgccaagctgaagggtctgctttgtggagaggctgctgctctgtctgacttccagggtctcagccagccctcctgggaatagaccaagttttcagcctggcagtgccttctgttcccattttggaggacagacaagcttgctccacatctcctggctcctcccttctgagtctcatgaaatagaatgagtcagctctgctcatggaacagtagtatctcttgaggccagagcaggtcttgtattttgtttttttatttccagacttctttcggggaggttttataaaatgacagtggtgttcccagcatatgtgatatgtggttagacttctgatagtatcagcttccaggggctaatctggcttatgttgggaggatatgcttacgaatcagcagcagctttctaaaggagagatttgacttttctctgcactgcacagcctggaggattggcttttgatggggatttgcctccgaagctctttgtacatttcttgtttaggagggttttcctatctacctttctactgaagtagtttctggaactttcctggtggatcagagttacgtaatgcagtctgagccttcagactgctagttagaattgttttaggtgttcagaaagggcaaaataggctgatgtggcctgtcagagtgatgtgttctcaaaaaagttcacttgcacatctgtgggctgcttttgtcctcagacccttagtggacagactccacaaaccctctgatgagacgattgatgtggccagggtccagttagcatcagtagaaggatgtcactaggaaaggcccaggtatctggtaagtgactgtgaggtgtcacagtacctgtgacaggagagtgtcctgatgtgcttgggagaaaggccgtatgggggccagggatggaagagacagtgtgtggccacagaaattcctgtccatccaccaccagtgctgctccctgtgtgggctttagggcgagtggccccgaaccttggcccagtgctttgtcccaggccagagtcttggcaatgccacatgctggcagctttctcactgagaaggtcctagcttacccctgtgtgctggccttggattcagccccgagagaggggagagaccattcctcctgtggagtgggttccttatcaccagaccggccactctcagaactggcgtccactgtaaatccaggtgccttacgtgtggctctgtcccttatgctgcaggggaaagctgcattgccattgttcccacctcctcactggcagaaagatgccagggctgttagcactgtctcctcaccttctgtttctcattgtggctcctcaaatgggatttgcatgttcctgtcaagcgtaacaacaatcccttctctctttgacagaggcccaggtgggacagtttctactatttgatatttgagtattatctgagaattatttatgtaaacccgaagacaacatctacagtattgatttcacccgcttcaaaattcgagatttggagacagggacagtacttttttgagattgccaaaccttgcggtttcagaccaggaggaggatgaggaggaggggaggtggagacgtggaca

SEQ ID NO: 426251 - DNA, 4478 bp, Homo sapiens
gctgggcccggggggctggtggctggcaaggaggagaagaagaaggcgggcggcggcgtcctgaaccgcctgaaggcgcggcggcaggcgccccaccacgcggccgacgacggcgtcggggcagcggtcacggagcaggagctgctggcgatggacaccatccggcccgagcacgtcctgcgcctcagccgggtcaccgagagagtgtgcactcacctagttaggcctatcttggcctgcccatcactcctggcgtgcagtctcctaaccctgtggcagcagcaacattccctggatggatcgaaggctgccatggtgtctgctgagctgctatagcaggcagcccagggctgttcagattatttatgtaaacccgaagacaacatctacagtattgatttcacccgcttcaaaattcgagatttggagacagggacagtactttttgagattgccaaaccttgcgtttcagaccaggaggaggatgaggaggagggaggtggagacgtggacatcagcgcaggacgttttgtccgctatcagttcacaccggcatttctccgcctccggacagtcggggctacggtggagttcacagtgggagacaaacctgtttcaaacttccggatgatcgaacggcactatttccgggaacacttgctgaaaaactttgactttgattttggcttctgcatccccagcagtaggaacacttgtgaacatatctatgagtttccccagctttcggaggatgtcattcgtctaatgattgaaaatccttacgagacccgctctgacagcttctactttgttgacaacaagctgataatgcacaacaaggctgattatgcctataatggaggccagtaagtgctgcaagagtaggtaggggaggtgctttgccgcggccacaagatcctggcacacggagatgatcgaagctgcagtttgtcaacacacatctggaacctggccccaggaagccaaggctggggtggcagtttcctgcgcgccaaaggagctgccaaacagtgctgtgttttcttccccagtattttttcttccctttttttcctgccccgtaggttgcagaggtactatagtaaagtaaaaggttaggataagggtcctggaatccagataaaaaagtttattttccgtagttctggctgcctgttggttgtcttgacgaccaggcatagctgtgcctggtgagaaggctctggccaggcccaccagcaggtcagcagctcttaaggttcctgggtgctgtgggaagctgaaaggtaggcctcttccaggtagctcctcctctcacctccggcattgccatcagcgcagtctgccctcggtctgtgtgaagtcttaaaccaactggaagacacttgaaagggtggggagggagggaggtgccaagagtggaggcaccaaggaatgggtgatgctgccaagctgaagggtctgctttgtggagaggctgctgctctgtctgacttccagggtctcagccagccctcctgggaatagaccaagttttcagcctggcagtgccttctgttcccattttggaggacagacaagcttgctccacatctcctggctcctcccttctgagtctcatgaaatagaatgagtcagctctgctcatggaacagtagtatctcttgaggccagagcaggtcttgtattttgtttttttatttccagacttctttcggggaggttttataaaatgacagtggtgttcccagcatatgtgatatgtggttagacttctgatagtatcagcttccaggggctaatctggcttatgttgggaggatatgcttacgaatcagcagcagctttctaaaggagagatttgacttttctctgcactgcacagcctggaggattggcttttgatggggatttgcctccgaagctctttgtacatttcttgtttaggagggttttcctatctacctttctactgaagtagtttctggaactttcctggtggatcagagttacgtaatgcagtctgagccttcagactgctagttagaattgttttaggtgttcagaaagggcaaaataggctgatgtggcctgtcagagtgatgtgttctcaaaaaagttcacttgcacatctgtgggctgcttttgtcctcagacccttagtggacagactccacaaaccctctgatgagacgattgatgtggccagggtccagttagcatcagtagaaggatgtcactaggaaaggcccaggtatctggtaagtgactgtgaggtgtcacagtacctgtgacaggagagtgtcctgatgtgcttgggagaaaggccgtatgggggccagggatggaagagacagtgtgtggccacagaaattcctgtccatccaccaccagtgctgctccctgtgtgggctttagggcgagtggccccgaaccttggcccagtgctttgtcccaggccagagtcttggcaatgccacatgctggcagctttctcactgagaaggtcctagcttacccctgtgtgctggccttggattcagccccgagagaggggagagaccattcctcctgtggagtgggttccttatcaccagaccggccactctcagaactggcgtccactgtaaatccaggtgccttacgtgtggctctgtcccttatgctgcaggggaaagctgcattgccattgttcccacctcctcactggcagaaagatgccagggctgttagcactgtctcctcaccttctgtttctcattgtggctcctcaaatgggatttgcatgttcctgtcaagcgtaacaacaatcccttctctctttgacagaggcccaggtgggacagtttctactatttgatatttgagtattatctgggatgtggttctggagctgcccagagctgtgcttagtagagtgtgtcttggaaacatgcccctgggcacactgtatctgctacattagtgggctatctcttatctgcagtgttcgcttttgctagaaagaggatgtggaggaaggaggaggtgggcaatctggcttgagttgtgctgtatcctcttccttgttagcttgccttagtctcactggagaccatttgcggatagtgcttggtccatgcccagcaggacagggctttgctgcttctgaaagtctggtgttctgtatctggggctgtgggttcctgtgtctagctgctcaggaaatcttgagaagcattccactctggggtgtaaaccagtatgagtttgaaattcaagcgtttgtacctgagttggggagagaattgcaaggcatactttctctgaaagtaacagaaccattcaggctgccatgttattaaggaatctgaactgttgatagcagttaccttgtgggtgatacaatgggaggcggcaaaaaaactacctgcataggagaccctgccctttgtcaagagctgggagcacatttcatcagagtagcaggcccacctggtgccagagggcctgcccctcctgcttctgttcctttgccttgcagtctcctggagagagcctctcttttcctgtacagcctttgggccaaaatgcccttctagcttctccaaagaagatccgagtttatttcattctatgttttaagaggtaaaaggacataacaagtgaaagaagttttgggctaaagtaggctatgtctccttatgtattactcaatactgttttgcagagaaaacatttttcaagcatgtgcttcctgaagacacctcagtctttgggccatttgatttccaatacatagggtggaagaatgtgattttggggctgaccataaactggaaatttgtgaaatggcagtgattgggcaatcttcagtttattttttcagttgaagtggaactcatttctggaatggatttaataggctgtgtctaatgtacaaactgggtgagtcctgccttagtgtgtcctgccccaccggtacgcttccaggatactcttttcccctctgtaaagtcactttcttctgatggccagtgtcactatgatgtcagtgaggtctggggatgaggacagtgtgtcctgaaattcacaggactgactcctcaccccagtgcacgaggattcctgtggcatcaggtgctgctgtacctggtgtaggagcctaatcattgaaccattgtgttactcacattccatgtcacagaacatatcagcctcaagaaggatttggtggaggtggatttaccactggttttacaaaggaccgtgtaaagtcattgaagttgtgaaagtctattttttttcctgtaaatctattttttacagaatataagaaacatcaatgacctgatctgtccttcctcctccttcccgcttcccccaaaatcacattccagtttttattgtctttgtgtccaaagtaaactaggtgacttatttgtataaaatgttattttgccacatgagacagtaataaaagaaagattttcacagta

SEQ ID NO: 426252 - DNA, 3402 bp, Homo sapiens
gctgggcccggggggctggtggctggcaaggaggagaagaagaaggcgggcggcggcgtcctgaaccgcctgaaggcgcggcggcaggcgccccaccacgcggccgacgacggcgtcggggcagcggtcacggagcaggagctgctggcgatggacaccatccggcccgagcacgtcctgcgcctcagccgggtcaccgagagagtgtgcactcacctagttaggcctatcttggcctgcccatcactcctggcgtgcagtctcctaaccctgtggcagcagcaacattccctggatggatcgaaggctgccatggtgtctgctgagctgctatagcaggcagcccagggctgttcagattatttatgtaaacccgaagacaacatctacagtattgatttcacccgcttcaaaattcgagatttggagacagggacagtactttttgagattgccaaaccttgcgtttcagaccaggaggaggatgaggaggagggaggtggagacgtggacatcagcgcaggacgttttgtccgctatcagttcacaccggcatttctccgcctccggacagtcggggctacggtggagttcacagtgggagacaaacctgtttcaaacttccggatgatcgaacggcactatttccgggaacacttgctgaaaaactttgactttgattttggcttctgcatccccagcagtaggaacacttgtgaacatatctatgagtttccccagctttcggaggatgtcattcgtctaatgattgaaaatccttacgagacccgctctgacagcttctactttgttgacaacaagctgataatgcacaacaaggctgattatgcctataatggaggccagtaagtgctgcaagagtaggtaggggaggtgctttgccgcggccacaagatcctggcacacggagatgatcgaagctgcagtttgtcaacacacatctggaacctggccccaggaagccaaggctggggtggcagtttcctgcgcgccaaaggagctgccaaacagtgctgtgttttcttccccagtattttttcttccctttttttcctgccccgtaggttgcagaggtactatagtaaagtaaaaggttaggataagggtcctggaatccagataaaaaagtttattttccgtagttctggctgcctgttggttgtcttgacgaccaggcatagctgtgcctggtgagaaggctctggccaggcccaccagcaggtcagcagctcttaaggttcctgggtgctgtgggaagctgaaaggtaggcctcttccaggtagctcctcctctcacctccggcattgccatcagcgcagtctgccctcggtctgtgtgaagtcttaaaccaactggaagacacttgaaagggtggggagggagggaggtgccaagagtggaggcaccaaggaatgggtgatgctgccaagctgaagggtctgctttgtggagaggctgctgctctgtctgacttccagggtctcagccagccctcctgggaatagaccaagttttcagcctggcagtgccttctgttcccattttggaggacagacaagcttgctccacatctcctggctcctcccttctgagtctcatgaaatagaatgagtcagctctgctcatggaacagtagtatctcttgaggccagagcaggtcttgtattttgtttttttatttccagacttctttcggggaggttttataaaatgacagtggtgttcccagcatatgtgatatgtggttagacttctgatagtatcagcttccaggggctaatctggcttatgttgggaggatatgcttacgaatcagcagcagctttctaaaggagagatttgacttttctctgcactgcacagcctggaggattggcttttgatggggatttgcctccgaagctctttgtacatttcttgtttaggagggttttcctatctacctttctactgaagtagtttctggaactttcctggtggatcagagttacgtaatgcagtctgagccttcagactgctagttagaattgttttaggtgttcagaaagggcaaaataggctgatgtggcctgtcagagtgatgtgttctcaaaaaagttcacttgcacatctgtgggctgcttttgtcctcagacccttagtggacagactccacaaaccctctgatgagacgattgatgtggccagggtccagttagcatcagtagaaggatgtcactaggaaaggcccaggtatctggtaagtgactgtgaggtgtcacagtacctgtgacaggagagtgtcctgatgtgcttgggagaaaggccgtatgggggccagggatggaagagacagtgtgtggccacagaaattcctgtccatccaccaccagtgctgctccctgtgtgggctttagggcgagtggccccgaaccttggcccagtgctttgtcccaggccagagtcttggcaatgccacatgctggcagctttctcactgagaaggtcctagcttacccctgtgtgctggccttggattcagccccgagagaggggagagaccattcctcctgtggagtgggttccttatcaccagaccggccactctcagaactggcgtccactgtaaatccaggtgccttacgtgtggctctgtcccttatgctgcaggggaaagctgcattgccattgttcccacctcctcactggcagaaagatgccagggctgttagcactgtctcctcaccttctgtttctcattgtggctcctcaaatgggatttgcatgttcctgtcaagcgtaacaacaatcccttctctctttgacagaggcccaggtgggacagtttctactatttgatatttgagtattatctgggatgtggttctggagctgcccagagctgtgcttagtagagtgtgtcttggaaacatgcccctgggcacactgtatctgctacattagtgggctatctcttatctgcagtgttcgcttttgctagaaagaggatgtggaggaaggaggaggtgggcaatctggcttgagttgtgctgtatcctcttccttgttagcttgccttagtctcactggagaccatttgcggatagtgcttggtccatgcccagcaggacagggctttgctgcttctgaaagtctggtgttctgtatctggggctgtgggttcctgtgtctagctgctcaggaaatcttgagaagcattccactctggggtgtaaaccagtatgagtttgaaattcaagcgtttgtacctgagttggggagagaatttggcagaggtcattactttggcttcgtggaagacgttatagcaggagagccaatgtctacgggcctgggccagtggtcttatttcccccgcgaaatcctggaaaacttggttt

SEQ ID NO: 426253 - DNA, 854 bp, Homo sapiens
gctgggcccggggggctggtggctggcaaggaggagaagaagaaggcgggcggcggcgtcctgaaccgcctgaaggcgcggcggcaggcgccccaccacgcggccgacgacggcgtcggggcagcggtcacggagcaggagctgctggcgatggacaccatccggcccgagcacgtcctgcgcctcagccgggtcaccgagagagtgtgcactcacctagttaggcctatcttggcctgcccatcactcctggcgtgcagtctcctaaccctgtggcagcagcaacattccctggatggatcgaaggctgccatggtgtctgctgagctgctatagcaggcagcccagggctgttcagattatttatgtaaacccgaagacaacatctacagtattgatttcacccgcttcaaaattcgagatttggagacagggacagtactttttgagattgccaaaccttgcgtttcaggtaggcctctacgttgtggtgaccactagacagttttgagccaaaggtctttgaaactcaaatctttgtgtgccactgcatcctgtttcttggactccagtgtgtcccacttctgtgacctcttcccgtggcctggtctgccaggcatggtggtttgaagctgcgttcagaggctgatgtttgttggatgtctattctgtgctggtcactgtgttccacgtctttgtgcacatcagtgtatgtaatcctcacacctctttgaggaattactgttatctctgttttacagcgaaggatctgaggcctacaattcccaggcggctctttcctaaggccctgtgctggttcatcttaccatgttgcctttcagagaagaaatcct

SEQ ID NO: 426254 - DNA, 918 bp, Homo sapiens
ggcggatgacgccggtgcagcgggggggcccgggggccctggtggccctgggatggggaaccgcggtggcttccgcggaggtttcggcagtggcatccggggccggggtcgcggccgtggacggggccggggccgaggccgcggagctcgcggaggcaaggccgaggataaggagtggatgcccgtcaccaagttgggccgcttggtcaaggacatgaagatcaagtccctggaggagatctatctcttctccctgcccattaaggaatcagagatcattgatttcttcctgggggcctctctcaaggatgaggttttgaagattatgccagtgcagaagcagacccgtgccggccagcgcaccaggttcaaggcatttgttgctatcggggactacaatggccacgtcggtctgggtgttaagtgctccaaggaggtggccaccgccatccgtggggccatcatcctggccaagctctccatcgtccccgtgcgcagaggctactgggggaacaagatcggcaagccccacactgtcccttgcaaggtgacaggccgctgcggctctgtgctggtacgcctcatccctgcacccaggggcactggcatcgtctccgcacctgtgcctaagaagctgctcatgatggctggtatcgatgactgctacacctcagcccggggctgcactgccaccctgggcaacttcgccaaggccacctttgatgccatttctaagacctacagctacctgacccccgacctctggaaggagactgtattcaccaagtctccctatcaggagttcactgaccacctcgtcaagacccacaccagagtctccgtgcagcggactcaggctccagctgtggctacaacatagggtttttatacaagaaaaataaagtgaattaagcgtga

SEQ ID NO: 426255 - DNA, 1219 bp, Homo sapiens
ggcggatgacgccggtgcagcgggggggcccgggggccctggtggccctgggatggggaaccgcggtggcttccgcggaggtttcggcagtggcatccggggccggggtcgcggccgtggacggggccggggccgaggccgcggagctcgcggaggcaaggccgaggataaggagtggatgcccgtcaccaagttgggccgcttggtcaaggacatgaagatcaagtccctggaggagatctatctcttctccctgcccattaaggaatcagagatcattgatttcttcctgggggcctctctcaaggatgaggttttgaagattatgccagtgcagaagcagacccgtgccggccagcgcaccaggttcaaggcatttgttgctatcggggactacaatggccacgtcggtctgggtgttaagtgctccaaggaggtggccaccgccatccgtggggccatcatcctggccaagctctccatcgtccccgtgcgcagaggctactgggggaacaagatcggcaagccccacactgtcccttgcaaggtgacaggccgctgcggctctgtgctggtacgcctcatccctgcacccaggggcactggcatcgtctccgcacctgtgcctaagaagctgctcatgatggctggtatcgatgactgctacacctcagcccggggctgcactgccaccctgggcaacttcgccaaggccacctttgatgccatttctaagacctacagctacctgacccccgacctctggaaggagactgtattcaccaagtctccctatcaggagttcactgaccacctcgtcaagacccacaccagagtctccgtgcagcggactcaggctccagctgtggctacaacatagggtttttatacaagaaaaataaagtgaattaagcgtgaaaaaaaaacaacaaaaaaaaaaacaaaacaaaaaaaaaaacaccccgggggccttcttttgcgcggggcgccgggaaacgcggggttaggaagggcgcccgggcgccaggggtttcctctggccccgcggttttttcttgttcaccaaagcggtgggacaactctcggcgcgcgggcccccccccttatggggggcgcgcgcggtatataatttccgaaagaccccgggtgtactctgttttattgtctctctgcgaaagacatgcccctttccccgccacccgctctttttgcactcagt

SEQ ID NO: 426256 - DNA, 883 bp, Homo sapiens
gatggtagccggtgcagcgggggcctgggccctggtggccctgatggaaccgcggtccgcgggtcggtggtggccggtcgcgtggacggggccggggccgaggccgcggagctcgcggaggcaaggccgaggataaggagtggatgcccgtcaccaagttgggccgcttggtcaaggacatgaagatcaagtccctggaggagatctatctcttctccctgcccattaaggaatcagagatcattgatttcttcctgggggcctctctcaaggatgaggttttgaagattatgccagtgcagaagcagacccgtgccggccagcgcaccaggttcaaggcatttgttgctatcggggactacaatggccacgtcggtctgggtgttaagtgctccaaggaggtggccaccgccatccgtggggccatcatcctggccaagctctccatcgtccccgtgcgcagaggctactgggggaacaagatcggcaagccccacactgtcccttgcaaggtgacaggccgctgcggctctgtgctggtacgcctcatccctgcacccaggggcactggcatcgtctccgcacctgtgcctaagaagctgctcatgatggctggtatcgatgactgctacacctcagcccggggctgcactgccaccctgggcaacttcgccaaggccacctttgatgccatttctaagacctacagctacctgacccccgacctctggaaggagactgtattcaccaagtctccctatcaggagttcactgaccacctcgtcaagacccacaccagagtctccgtgcagcggactcaggctccagctgtggctacaacatagggtttttatacaagaaaaataaagtgaattaagcgtga

SEQ ID NO: 426257 - DNA, 1287 bp, Homo sapiens
ggcggatgacgccggtgcagcgggggggcccgggggccctggtggccctgggatggggaaccgcggtggcttccgcggaggtttcggcagtggcatccggggccggggtcgcggccgtggacggggccggggccgaggccgcggagctcgcggaggcaaggccgaggataaggagtggatgcccgtcaccaagttgggccgcttggtcaaggacatgaagatcaagtccctggaggagatctatctcttctccctgcccattaaggaatcagagatcattgatttcttcctgggggcctctctcaaggatgaggttttgaagattatgccagtgcagaagcagacccgtgccggccagcgcaccaggttcaaggcatttgttgctatcggggactacaatggccacgtcggtctgggtgttaagtgctccaaggaggtggccaccgccatccgtggggccatcatcctggccaagctctccatcgtccccgtgcgcagaggctactgggggaacaagatcggcaagccccacactgtcccttgcaaggtgacaggccgctgcggctctgtgctggtacgcctcatccctgcacccaggggcactggcatcgtctccgcacctgtgcctaagaagctgctcatgatggctggtatcgatgactgctacacctcagcccggggctgcactgccaccctgggcaacttcgccaaggccacctttgatgccatttctaagacctacagctacctgacccccgacctctggaaggagactgtattcaccaagtctccctatcaggagttcactgaccacctcgtcaagacccacaccagagtctccgtgcagcggactcaggctccagctgtggctacaacataagctttaatcaggaaaatagtgattagccgtaaaaaaaaaaacaaaggggtactgccattgccttaatggccataaataaatgcgcggttaacgtcgattggaacctggttcccactaaggcttggaataccttttcaatgggaaaatgagggcccactggcttccaaattgcactcaggcatggaattggctaattttgtaaccgcaaatttaaaaatcttttacaatggccaagcaacctttaaaaaataccccctatgtggtttccttaaaagcctttagaggttcaccatggcaaccttttgggggcccgtgcacctataattttgcgggtacaattctctagtccctaaattttctcaccccttccgacagcttctgtcgacgctttacacctgttatctgcc

SEQ ID NO: 426258 - DNA, 735 bp, Homo sapiens
gatggtagccggtgcagcgggggcctgggccctggtggccctgatggaaccgcggtccgcgggtcggtggtggccggtcgcgtggacggggccggggccgaggccgcggagctcgcggaggcaaggccgaggataaggagtggatgcccgtcaccaagttgggccgcttggtcaaggacatgaagatcaagtccctggaggagatctatctcttctccctgcccattaaggaatcagagatcattgatttcttcctgggggcctctctcaaggatgaggttttgaagattatgccagtgcagaagcagacccgtgccggccagcgcaccaggttcaaggcatttgttgctatcggggactacaatggccacgtcggtctgggtgttaagtgctccaaggaggtggccaccgccatccgtggggccatcatcctggccaagctctccatcgtccccgtgcgcagaggctactgggggaacaagatcggcaagccccacactgtcccttgcaaggtgacaggccgctgcggctctgtgctggtacgcctcatccctgcacccaggggcactggcatcgtctccgcacctgtgcctaagaagctgctcatgatggctggtatcgatgaatagcgaggtgccgatgaatagcgaggtgccgatgaatagcgaggtgccgatgaatagcgtggcgccgaaaaatagcgctgtgcctattaatagcgtggcgcctatgtat

SEQ ID NO: 426259 - DNA, 1687 bp, Homo sapiens
tcagtcagtcgagactcccccagacctggaactggtgctcccacagaggtgggcccggtggtttggtccggcctggcctactggaccagcctgtgctcggtcggccacggctctgctgggctcctggcgccgcctcctcccagcccgccgcgggctgcgcgcttctgtgggtgggggaaggcaggactgacgcagaagagtacccagagaaggagaagccagcaaaggagacgacacagacaagacctcagagatcaaaggaagaggccccttaatatcctggaataatgggacccatccccgtaatcagtgaatctcatccacccgcttgccagcttctacccgcagcaagtagaagctaagtcctggctcaaatctcttccctccctccctctcccagctgtcagtgcttttggacttgtgctcagatgacaacggcaacacgacaagaagtccttggcctctaccgcagcattttcaggcttgcgaggaaatggcaggcgacatcagggcagatggaagacaccatcaaagaaaaacagtacatactaaatgaagccagaacgctgttccggaaaaacaaaaatctcacggacacagacctaattaaacagtgtatagatgaatgcacagccaggattgaaattggactgcattacaagattccttacccaaggccaattcatctgcctccaatgggccttaccccactccgaggccggggacttcgaagccaagagaaactgaggaaactttccaaaccagtatatctcagatctcatgatgaagtttcctaatctagaggaaagtttatttctgcaaatgatgagccaactagttattgaatgtaaaccagatggcaaaacacttcttgattaggggcaaaaattcaaatgtcttcttaaaacctccacaattgattctccccctgtgatgtaaacttagatatccctagagtttctcagcatctttcttcctgagtggatggcattatccctagaggtcatggaccttacatcctcactgcagtcacctttggaaacaagaccgaggcctgtagaaggaaagcggaaggatgtaagagctgttcatgggaattccattcaccacacatgccagctgatgcaaagaaatttgccagtcactggaagttactgtggctactataaaactatgtaccactctcagaatattcttaggctttttttttttcaagttatagatttgcttaaagtgaggttttttggtgtgtgcttttttgttgtcttttgacccttccagtttccagacaaacttgtcttaaaaagtgcatcattggattgaccatggtttttcatgaaattttatgagatttctgccttaacaaaatgcatatattccttatcttaaagcctgtcattacttaggatgcacttataggatctgaaaagctcactttaaactcatactacattcgttacgagtattttacgttaacataattgaaaagtacaaggtccaagctggctttcaaattatgtctaaacagaaatgggacaaatagacttgaaaatagaagggatttattccacccctgcaagggtagagtcaggtgagagtcccttggtgagtcatttgtacatcagtgtcatttcttcttaacctctgaagaagatgggcatcagaaataaagacaaagcactatcaa

SEQ ID NO: 426260 - DNA, 1455 bp, Homo sapiens
tcagtcagtcgagactcccccagacctggaactggtgctcccacagaggtgggcccggtggtttggtccggcctggcctactggaccagcctgtgctcggtcggccacggctctgctgggctcctggcgccgcctcctcccagcccgccgcgggctgcgcgcttctgtgggtgggggaaggcaggactgacgcagaatgacaacggcaacacgacaagaagtccttggcctctaccgcagcattttcaggcttgcgaggaaatggcaggcgacatcagggcagatggaagacaccatcaaagaaaaacagtacatactaaatgaagccagaacgctgttccggaaaaacaaaaatctcacggacacagacctaattaaacagtgtatagatgaatgcacagccaggattgaaattggactgcattacaagattccttacccaaggccaattcatctgcctccaatgggccttaccccactccgaggccggggacttcgaagccaagagaaactgaggaaactttccaaaccagtatatctcagatctcatgatgaagtttcctaatctagaggaaagtttatttctgcaaatgatgagccaactagttattgaatgtaaaccagatggcaaaacacttcttgattaggggcaaaaattcaaatgtcttcttaaaacctccacaattgattctccccctgtgatgtaaacttagatatccctagagtttctcagcatctttcttcctgagtggatggcattatccctagaggtcatggaccttacatcctcactgcagtcacctttggaaacaagaccgaggcctgtagaaggaaagcggaaggatgtaagagctgttcatgggaattccattcaccacacatgccagctgatgcaaagaaatttgccagtcactggaagttactgtggctactataaaactatgtaccactctcagaatattcttaggctttttttttttcaagttatagatttgcttaaagtgaggttttttggtgtgtgcttttttgttgtcttttgacccttccagtttccagacaaacttgtcttaaaaagtgcatcattggattgaccatggtttttcatgaaattttatgagatttctgccttaacaaaatgcatatattccttatcttaaagcctgtcattacttaggatgcacttataggatctgaaaagctcactttaaactcatactacattcgttacgagtattttacgttaacataattgaaaagtacaaggtccaagctggctttcaaattatgtctaaacagaaatgggacaaatagacttgaaaatagaagggatttattccacccctgcaagggtagagtcaggtgagagtcccttggtgagtcatttgtacatcagtgtcatttcttcttaacctctgaagaagatgggcatcagaaataaagacaaagcactatcaa

SEQ ID NO: 426261 - DNA, 1637 bp, Homo sapiens
cctccccctagggctcctacctcacagcgctcacccaggacagaggaccagagtctgcaccccctccagggcagctccaaccccatatccccaggccctgggttgaggggtgctggcggtggggaggcagggacagtaggctccctacccccgccgccgccgcctcttcttccaccactgccaccgcctcctcttcatctgcggcccaccggcgtgcggccgccccgaagccccgccccctccatcgcctcctgcatcatcacttccggtaaccccgccggccgccagctccaggagggagaatgggagaggggcaaggagggaacgagtggaagattgcgtcacgacgcacataaagacgtacgaagccgtcgccaaatgacaacggcaacacgacaagaagtccttggcctctaccgcagcattttcaggcttgcgaggaaatggcaggcgacatcagggcagatggaagacaccatcaaagaaaaacagtacatactaaatgaagccagaacgctgttccggaaaaacaaaaatctcacggacacagacctaattaaacagtgtatagatgaatgcacagccaggattgaaattggactgcattacaagattccttacccaaggccaattcatctgcctccaatgggccttaccccactccgaggccggggacttcgaagccaagagaaactgaggaaactttccaaaccagtatatctcagatctcatgatgaagtttcctaatctagaggaaagtttatttctgcaaatgatgagccaactagttattgaatgtaaaccagatggcaaaacacttcttgattaggggcaaaaattcaaatgtcttcttaaaacctccacaattgattctccccctgtgatgtaaacttagatatccctagagtttctcagcatctttcttcctgagtggatggcattatccctagaggtcatggaccttacatcctcactgcagtcacctttggaaacaagaccgaggcctgtagaaggaaagcggaaggatgtaagagctgttcatgggaattccattcaccacacatgccagctgatgcaaagaaatttgccagtcactggaagttactgtggctactataaaactatgtaccactctcagaatattcttaggctttttttttttcaagttatagatttgcttaaagtgaggttttttggtgtgtgcttttttgttgtcttttgacccttccagtttccagacaaacttgtcttaaaaagtgcatcattggattgaccatggtttttcatgaaattttatgagatttctgccttaacaaaatgcatatattccttatcttaaagcctgtcattacttaggatgcacttataggatctgaaaagctcactttaaactcatactacattcgttacgagtattttacgttaacataattgaaaagtacaaggtccaagctggctttcaaattatgtctaaacagaaatgggacaaatagacttgaaaatagaagggatttattccacccctgcaagggtagagtcaggtgagagtcccttggtgagtcatttgtacatcagtgtcatttcttcttaacctctgaagaagatgggcatcagaaataaagacaaagcactatcaa

SEQ ID NO: 426262 - DNA, 1951 bp, Homo sapiens
cctccccctagggctcctacctcacagcgctcacccaggacagaggaccagagtctgcaccccctccagggcagctccaaccccatatccccaggccctgggttgaggggtgctggcggtggggaggcagggacagtaggctccctacccccgccgccgccgcctcttcttccaccactgccaccgcctcctcttcatctgcggcccaccggcgtgcggccgccccgaagccccgccccctccatcgcctcctgcatcatcacttccggtaaccccgccggccgccagctccaggagggagaatgggagaggggcaaggagggaacgagtggaagattgcgtcacgacgcacataaagacgtacgaagccgtcgccaaagagtacccagagaaggagaagccagcaaaggagacgacacagacaagacctcagagatcaaaggaagaggccccttaatatcctggaataatgggacccatccccgtaatcagtgaatctcatccacccgcttgccagcttctacccgcagcaagtagaagctaagtcctggctcaaatctcttccctccctccctctcccagctgtcagtgcttttggacttgtgctcaggtgaagtagtatttgaagcttttcatcagttggctcattctttactcaagaataaacctcaagaaacgtcatcagggtcagaatgacaacggcaacacgacaagaagtccttggcctctaccgcagcattttcaggcttgcgaggaaatggcaggcgacatcagggcagatggaagacaccatcaaagaaaaacagtacatactaaatgaagccagaacgctgttccggaaaaacaaaaatctcacggacacagacctaattaaacagtgtatagatgaatgcacagccaggattgaaattggactgcattacaagattccttacccaaggccaattcatctgcctccaatgggccttaccccactccgaggccggggacttcgaagccaagagaaactgaggaaactttccaaaccagtatatctcagatctcatgatgaagtttcctaatctagaggaaagtttatttctgcaaatgatgagccaactagttattgaatgtaaaccagatggcaaaacacttcttgattaggggcaaaaattcaaatgtcttcttaaaacctccacaattgattctccccctgtgatgtaaacttagatatccctagagtttctcagcatctttcttcctgagtggatggcattatccctagaggtcatggaccttacatcctcactgcagtcacctttggaaacaagaccgaggcctgtagaaggaaagcggaaggatgtaagagctgttcatgggaattccattcaccacacatgccagctgatgcaaagaaatttgccagtcactggaagttactgtggctactataaaactatgtaccactctcagaatattcttaggctttttttttttcaagttatagatttgcttaaagtgaggttttttggtgtgtgcttttttgttgtcttttgacccttccagtttccagacaaacttgtcttaaaaagtgcatcattggattgaccatggtttttcatgaaattttatgagatttctgccttaacaaaatgcatatattccttatcttaaagcctgtcattacttaggatgcacttataggatctgaaaagctcactttaaactcatactacattcgttacgagtattttacgttaacataattgaaaagtacaaggtccaagctggctttcaaattatgtctaaacagaaatgggacaaatagacttgaaaatagaagggatttattccacccctgcaagggtagagtcaggtgagagtcccttggtgagtcatttgtacatcagtgtcatttcttcttaacctctgaagaagatgggcatcagaaataaagacaaagcactatcaa

SEQ ID NO: 426263 - DNA, 1398 bp, Homo sapiens
cctccccctagggctcctacctcacagcgctcacccaggacagaggaccagagtctgcaccccctccagggcagctccaaccccatatccccaggccctgggttgaggggtgctggcggtggggaggcagggacagtagatgacaacggcaacacgacaagaagtccttggcctctaccgcagcattttcaggcttgcgaggaaatggcaggcgacatcagggcagatggaagacaccatcaaagaaaaacagtacatactaaatgaagccagaacgctgttccggaaaaacaaaaatctcacggacacagacctaattaaacagtgtatagatgaatgcacagccaggattgaaattggactgcattacaagattccttacccaaggccaattcatctgcctccaatgggccttaccccactccgaggccggggacttcgaagccaagagaaactgaggaaactttccaaaccagtatatctcagatctcatgatgaagtttcctaatctagaggaaagtttatttctgcaaatgatgagccaactagttattgaatgtaaaccagatggcaaaacacttcttgattaggggcaaaaattcaaatgtcttcttaaaacctccacaattgattctccccctgtgatgtaaacttagatatccctagagtttctcagcatctttcttcctgagtggatggcattatccctagaggtcatggaccttacatcctcactgcagtcacctttggaaacaagaccgaggcctgtagaaggaaagcggaaggatgtaagagctgttcatgggaattccattcaccacacatgccagctgatgcaaagaaatttgccagtcactggaagttactgtggctactataaaactatgtaccactctcagaatattcttaggctttttttttttcaagttatagatttgcttaaagtgaggttttttggtgtgtgcttttttgttgtcttttgacccttccagtttccagacaaacttgtcttaaaaagtgcatcattggattgaccatggtttttcatgaaattttatgagatttctgccttaacaaaatgcatatattccttatcttaaagcctgtcattacttaggatgcacttataggatctgaaaagctcactttaaactcatactacattcgttacgagtattttacgttaacataattgaaaagtacaaggtccaagctggctttcaaattatgtctaaacagaaatgggacaaatagacttgaaaatagaagggatttattccacccctgcaagggtagagtcaggtgagagtcccttggtgagtcatttgtacatcagtgtcatttcttcttaacctctgaagaagatgggcatcagaaataaagacaaagcactatcaa

SEQ ID NO: 426264 - DNA, 1478 bp, Homo sapiens
cctccccctagggctcctacctcacagcgctcacccaggacagaggaccagagtctgcaccccctccagggcagctccaaccccatatccccaggccctgggttgaggggtgctggcggtggggaggcagggacagtaggctccctacccccgccgccgccgcctcttcttccaccactgccaccgcctcctcttcatctgcggcccaccggcgtgcggccgccccgaagccccgccccctccatcgcctcctgcatcatcacttccggtaaccccgccggccgccagctccaggagggagaatgggagaggggcaaggagggaacgagtggaagattgcgtcacgacgcacataaagacgtacgaagccgtcgccaactcacggacacagacctaattaaacagtgtatagatgaatgcacagccaggattgaaattggactgcattacaagattccttacccaaggccaattcatctgcctccaatgggccttaccccactccgaggccggggacttcgaagccaagagaaactgaggaaactttccaaaccagtatatctcagatctcatgatgaagtttcctaatctagaggaaagtttatttctgcaaatgatgagccaactagttattgaatgtaaaccagatggcaaaacacttcttgattaggggcaaaaattcaaatgtcttcttaaaacctccacaattgattctccccctgtgatgtaaacttagatatccctagagtttctcagcatctttcttcctgagtggatggcattatccctagaggtcatggaccttacatcctcactgcagtcacctttggaaacaagaccgaggcctgtagaaggaaagcggaaggatgtaagagctgttcatgggaattccattcaccacacatgccagctgatgcaaagaaatttgccagtcactggaagttactgtggctactataaaactatgtaccactctcagaatattcttaggctttttttttttcaagttatagatttgcttaaagtgaggttttttggtgtgtgcttttttgttgtcttttgacccttccagtttccagacaaacttgtcttaaaaagtgcatcattggattgaccatggtttttcatgaaattttatgagatttctgccttaacaaaatgcatatattccttatcttaaagcctgtcattacttaggatgcacttataggatctgaaaagctcactttaaactcatactacattcgttacgagtattttacgttaacataattgaaaagtacaaggtccaagctggctttcaaattatgtctaaacagaaatgggacaaatagacttgaaaatagaagggatttattccacccctgcaagggtagagtcaggtgagagtcccttggtgagtcatttgtacatcagtgtcatttcttcttaacctctgaagaagatgggcatcagaaataaagacaaagcactatcaa

SEQ ID NO: 426265 - DNA, 1710 bp, Homo sapiens
cctccccctagggctcctacctcacagcgctcacccaggacagaggaccagagtctgcaccccctccagggcagctccaaccccatatccccaggccctgggttgaggggtgctggcggtggggaggcagggacagtaggctccctacccccgccgccgccgcctcttcttccaccactgccaccgcctcctcttcatctgcggcccaccggcgtgcggccgccccgaagccccgccccctccatcgcctcctgcatcatcacttccggtaaccccgccggccgccagctccaggagggagaatgggagaggggcaaggagggaacgagtggaagattgcgtcacgacgcacataaagacgtacgaagccgtcgccaaagagtacccagagaaggagaagccagcaaaggagacgacacagacaagacctcagagatcaaaggaagaggccccttaatatcctggaataatgggacccatccccgtaatcagtgaatctcatccacccgcttgccagcttctacccgcagcaagtagaagctaagtcctggctcaaatctcttccctccctccctctcccagctgtcagtgcttttggacttgtgctcagctcacggacacagacctaattaaacagtgtatagatgaatgcacagccaggattgaaattggactgcattacaagattccttacccaaggccaattcatctgcctccaatgggccttaccccactccgaggccggggacttcgaagccaagagaaactgaggaaactttccaaaccagtatatctcagatctcatgatgaagtttcctaatctagaggaaagtttatttctgcaaatgatgagccaactagttattgaatgtaaaccagatggcaaaacacttcttgattaggggcaaaaattcaaatgtcttcttaaaacctccacaattgattctccccctgtgatgtaaacttagatatccctagagtttctcagcatctttcttcctgagtggatggcattatccctagaggtcatggaccttacatcctcactgcagtcacctttggaaacaagaccgaggcctgtagaaggaaagcggaaggatgtaagagctgttcatgggaattccattcaccacacatgccagctgatgcaaagaaatttgccagtcactggaagttactgtggctactataaaactatgtaccactctcagaatattcttaggctttttttttttcaagttatagatttgcttaaagtgaggttttttggtgtgtgcttttttgttgtcttttgacccttccagtttccagacaaacttgtcttaaaaagtgcatcattggattgaccatggtttttcatgaaattttatgagatttctgccttaacaaaatgcatatattccttatcttaaagcctgtcattacttaggatgcacttataggatctgaaaagctcactttaaactcatactacattcgttacgagtattttacgttaacataattgaaaagtacaaggtccaagctggctttcaaattatgtctaaacagaaatgggacaaatagacttgaaaatagaagggatttattccacccctgcaagggtagagtcaggtgagagtcccttggtgagtcatttgtacatcagtgtcatttcttcttaacctctgaagaagatgggcatcagaaataaagacaaagcactatcaa

SEQ ID NO: 426266 - DNA, 1157 bp, Homo sapiens
gcctcacggaagtggctcgcgcgtccaagaggggaggcctggtgtggggacgctcagctcacggacacagacctaattaaacagtgtatagatgaatgcacagccaggattgaaattggactgcattacaagattccttacccaaggccaattcatctgcctccaatgggccttaccccactccgaggccggggacttcgaagccaagagaaactgaggaaactttccaaaccagtatatctcagatctcatgatgaagtttcctaatctagaggaaagtttatttctgcaaatgatgagccaactagttattgaatgtaaaccagatggcaaaacacttcttgattaggggcaaaaattcaaatgtcttcttaaaacctccacaattgattctccccctgtgatgtaaacttagatatccctagagtttctcagcatctttcttcctgagtggatggcattatccctagaggtcatggaccttacatcctcactgcagtcacctttggaaacaagaccgaggcctgtagaaggaaagcggaaggatgtaagagctgttcatgggaattccattcaccacacatgccagctgatgcaaagaaatttgccagtcactggaagttactgtggctactataaaactatgtaccactctcagaatattcttaggctttttttttttcaagttatagatttgcttaaagtgaggttttttggtgtgtgcttttttgttgtcttttgacccttccagtttccagacaaacttgtcttaaaaagtgcatcattggattgaccatggtttttcatgaaattttatgagatttctgccttaacaaaatgcatatattccttatcttaaagcctgtcattacttaggatgcacttataggatctgaaaagctcactttaaactcatactacattcgttacgagtattttacgttaacataattgaaaagtacaaggtccaagctggctttcaaattatgtctaaacagaaatgggacaaatagacttgaaaatagaagggatttattccacccctgcaagggtagagtcaggtgagagtcccttggtgagtcatttgtacatcagtgtcatttcttcttaacctctgaagaagatgggcatcagaaataaagacaaagcactatcaa

SEQ ID NO: 426267 - DNA, 1735 bp, Homo sapiens
tcagtcagtcgagactcccccagacctggaactggtgctcccacagaggtgggcccggtggtttggtccggcctggcctactggaccagcctgtgctcggtcggccacggctctgctgggctcctggcgccgcctcctcccagcccgccgcgggctgcgcgcttctgtgggtgggggaaggcaggactgacgcagaagagtacccagagaaggagaagccagcaaaggagacgacacagacaagacctcagagatcaaaggaagaggccccttaatatcctggaataatgggacccatccccgtaatcagtgaatctcatccacccgcttgccagcttctacccgcagcaagtagaagctaagtcctggctcaaatctcttccctccctccctctcccagctgtcagtgcttttggacttgtgctcagatgacaacggcaacacgacaagaagtccttggcctctaccgcagcattttcaggcttgcgaggaaatggcaggcgacatcagggcagatggaagacaccatcaaagaaaaacagtacatactaaatgaagccagaacgctgttccggaaaaacaaaaatctcacggacacagacctaattaaacagtgtatagatgaatgcacagccaggattgaaattggactgcattacaagattccttacccaaggccaattcatctgcctccaatgggccttaccccactccgaggccggggacttcgaagccaagagaaactgaggaaactttccaaaccagtatatctcagatctcatgatgaagtttcctaatctagaggaaagtttatttctgcaaatgatgagccaactagttattgaatgtaaaccagatggcaaaacacttcttgattaggggcaaaaattcaaatgtcttcttaaaacctccacaattgattctccccctgtgatgtaaacttagatatccctagagtttctcagcatctttcttcctgagtggatggcattatccctagaggtcatggaccttacatcctcactgcagtcacctttggaaacaagaccgaggcctgtagaaggaaagcggaaggatgtaagagctgttcatgggaattccattcaccacacatgccagctgatgcaaagaaatttgccagtcactggaagttactgtggctactataaaactatgtaccactctcagaatattcttaggctttttttttttcaagttatagatttgcttaaagtgaggttttttggtgtgtgcttttttgttgtcttttgacccttccagtttccagacaaacttgtcttaaaaagtgcatcattggattgaccatggtttttcatgaaattttatgagatttctgccttaacaaaatgcatatattccttatcttaaagcctgtcattacttaggatgcacttataggatctgaaaagctcactttaaactcatactacattcgttacgagtattttacgttaacataattgaaaagtacaaggtccaagctggctttcaaattatgtctaaacagaaatgggacaaatagacttgaaaatagaagggatttattccacccctgcaagggtagagtcaggtgagagtcccttggtgagtcatttgtacatcagtgtcatttcttcttaacctctgaagaagatgggcatcagaaataaagacaaagcactatcaaacaaaaaaaaagtcgacgcggccgcgaatttagtagtagtagtcgacc

SEQ ID NO: 426268 - DNA, 1403 bp, Homo sapiens
tcagtcagtcgagactcccccagacctggaactggtgctcccacagaggtgggcccggtggtttggtccggcctggcctactggaccagcctgtgctcggtcggccacggctctgctgggctcctggcgccgcctcctcccagcccgccgcgggctgcgcgcttctgtgggtgggggaaggcaggactgacgcagaatgacaacggcaacacgacaagaagtccttggcctctaccgcagcattttcaggcttgcgaggaaatggcaggcgacatcagggcagatggaagacaccatcaaagaaaaacagtacatactaaatgaagccagaacgctgttccggaaaaacaaaaatctcacggacacagacctaattaaacagtgtatagatgaatgcacagccaggattgaaattggactgcattacaagattccttacccaaggccaattcatctgcctccaatgggccttaccccactccgaggccggggacttcgaagccaagagaaactgaggaaactttccaaaccagtatatctcagatctcatgatgaagtttcctaatctagaggaaagtttatttctgcaaatgatgagccaactagttattgaatgtaaaccagatggcaaaacacttcttgattaggggcaaaaattcaaatgtcttcttagtttctcagcatctttcttcctgagtggatggcattatccctagaggtcatggaccttacatcctcactgcagtcacctttggaaacaagaccgaggcctgtagaaggaaagcggaaggatgtaagagctgttcatgggaattccattcaccacacatgccagctgatgcaaagaaatttgccagtcactggaagttactgtggctactataaaactatgtaccactctcagaatattcttaggctttttttttttcaagttatagatttgcttaaagtgaggttttttggtgtgtgcttttttgttgtcttttgacccttccagtttccagacaaacttgtcttaaaaagtgcatcattggattgaccatggtttttcatgaaattttatgagatttctgccttaacaaaatgcatatattccttatcttaaagcctgtcattacttaggatgcacttataggatctgaaaagctcactttaaactcatactacattcgttacgagtattttacgttaacataattgaaaagtacaaggtccaagctggctttcaaattatgtctaaacagaaatgggacaaatagacttgaaaatagaagggatttattccacccctgcaagggtagagtcaggtgagagtcccttggtgagtcatttgtacatcagtgtcatttcttcttaacctctgaagaagatgggcatcagaaataaagacaaagcactatcaa

SEQ ID NO: 426269 - DNA, 1677 bp, Homo sapiens
  misc_feature (1074)..(1074): n is a, c, g, or t
  misc_feature (1076)..(1076): n is a, c, g, or t
  misc_feature (1089)..(1089): n is a, c, g, or t
  misc_feature (1110)..(1110): n is a, c, g, or t
  misc_feature (1150)..(1150): n is a, c, g, or t
  misc_feature (1154)..(1154): n is a, c, g, or t
  misc_feature (1159)..(1159): n is a, c, g, or t
  misc_feature (1166)..(1167): n is a, c, g, or t
  misc_feature (1173)..(1173): n is a, c, g, or t
tcagtcagtcgagactcccccagacctggaactggtgctcccacagaggtgggcccggtggtttggtccggcctggcctactggaccagcctgtgctcggtcggccacggctctgctgggctcctggcgccgcctcctcccagcccgccgcgggctgcgcgcttctgtgggtgggggaaggcaggactgacgcagaagagtacccagagaaggagaagccagcaaaggagacgacacagacaagacctcagagatcaaaggaagaggccccttaatatcctggaataatgggacccatccccgtaatcagtgaatctcatccacccgcttgccagcttctacccgcagcaagtagaagctaagtcctggctcaaatctcttccctccctccctctcccagctgtcagtgcttttggacttgtgctcagatgacaacggcaacacgacaagaagtccttggcctctaccgcagcattttcaggcttgcgaggaaatggcaggcgacatcagggcagatggaagacaccatcaaagaaaaacagtacatactaaatgaagccagaacgctgttccggaaaaacaaaaatctcacggacacagacctaattaaacagtgtatagatgaatgcacagccaggattgaaattggactgcattacaagattccttacccaaggccaattcatctgcctccaatgggccttaccccactccgaggccggggacttcgaagccaagagaaactgaggaaactttccaaaccagtatatctcagatctcatgatgaagtttcctaatctagaggaaagtttatttctgcaaatgatgagccaactagttattgaatgtaaaccagatggcaaaacacttcttgattaggggcaaaaattcaaatgtcttcttaaaacctccacaattgattctccccctgtgatgtaaacttagatatccctagagtttctcagcatctttcttcctgagtggatggcattatccctagaggtcatggaccttacatcctcactgcagtcacctttggaaacaagaccgaggcctgtagaaggaaagcggacncnagcgccgcccccnccaaccccccccccccccccnccccgccgacccccccccccccccccgcccccggcagccnccgnggccnccccaannccatgnccccccccccgcttaggctttttttttttcaagttatagatttgcttaaagtgaggttttttggtgtgtgcttttttgttgtcttttgacccttccagtttccagacaaacttgtcttaaaaagtgcatcattggattgaccatggtttttcatgaaattttatgagatttctgccttaacaaaatgcatatattccttatcttaaagcctgtcattacttaggatgcacttataggatctgaaaagctcactttaaactcatactacattcgttacgagtattttacgttaacataattgaaaagtacaaggtccaagctggctttcaaattatgtctaaacagaaatgggacaaatagacttgaaaatagaagggatttattccacccctgcaagggtagagtcaggtgagagtcccttggtgagtcatttgtacatcagtgtcatttcttcttaacctctgaagaagatgggcatcagaaataaagacaaagcactatcaa

SEQ ID NO: 426270 - DNA, 1625 bp, Homo sapiens
agcggggctggctggggaacgttgacccacaccaggtcccgtacaggaacggagactccctaggaccgtgagagccagcttcgtaattctcttgctcttcaaacctgagagtagggtgttgctccgttaccttccattcgtgtgcaggagagaagagtacccagagaaggagaagccagcaaaggagacgacacagacaagacctcagagatcaaaggaagaggccccttaatatcctggaataatgggacccatccccgtaatcagtgaatctcatccacccgcttgccagcttctacccgcagcaagtagaagctaagtcctggctcaaatctcttccctccctccctctcccagctgtcagtgcttttggacttgtgctcaggtgaagtagtatttgaagcttttcatcagttggctcattctttactcaagaataaacctcaagaaacgtcatcagggtcagaatgacaacggcaacacgacaagaagtccttggcctctaccgcagcattttcaggcttgcgaggaaatggcaggcgacatcagggcagatgaaaaacagtacatactaaatgaagccagaacgctgttccggaaaaacaaaaatctcacggacacagacctaattaaacagtgccaggattgaaattggactgcattacaagattccttacccaaggccaattcatctgcctccaatgggccttaccccactccgagccaagagaaactgaggaaactttccaaaccagtatatctcagatctcatgatgaagtttcctaatctagaggaaagtttatttctgcaattgaatgtaaaccagatggcaaaacacttcttgattaggggcaaaaattcaaatgtcttcttaaaacctccacaattgattctccccctgtgatagtttctcagcatctttcttcctgagtggatggcattatccctagaggtcatggaccttacatcctcactgcagtcacctttggaaacaagaccgaggcctgtagaaggaaagcggatgttcatgggaattccattcaccacacatgccagctgatgcaaagaaatttgccagtcactggaagttactgtggctactataaaactatgtaccactctcagaatattcttaggctttttttttttcaagttatagatttgcttaaagtgaggttttttggtgtgtgcttttttgttgtcttttgacccttccagtttccagacaaacttgtcttaaaaagtgcatcattggattgaccatggtttttcatgaaattttatgagatttctgccttaacaaaatgcatatattccttatcttaaagcctgtcattacttaggatgcacttataggatctgaaaagctcactttaaactcatactacattcgttacgagtattttacgttaacataattgaaaagtacaaggtccaagctggctttcaaattatgtctaaacagaaatgggacaaatagacttgaaaatagaagggatttattccacccctgcaagggtagagtcaggtgagagtcccttggtgagtcatttgtacatcagtgtcatttcttcttaacctctgaagaagatgggcatcagaaataaagacaaagcactatcaa

SEQ ID NO: 426271 - DNA, 1869 bp, Homo sapiens
cctccccctagggctcctacctcacagcgctcacccaggacagaggaccagagtctgcaccccctccagggcagctccaaccccatatccccaggccctgggttgaggggtgctggcggtggggaggcagggacagtaggctccctacccccgccgccgccgcctcttcttccaccactgccaccgcctcctcttcatctgcggcccaccggcgtgcggccgccccgaagccccgccccctccatcgcctcctgcatcatcacttccggtaaccccgccggccgccagctccaggagggagaatgggagaggggcaaggagggaacgagtggaagattgcgtcacgacgcacataaagacgtacgaagccgtcgccaaagagtacccagagaaggagaagccagcaaaggagacgacacagacaagacctcagagatcaaaggaagaggccccttaatatcctggaataatgggacccatccccgtaatcagtgaatctcatccacccgcttgccagcttctacccgcagcaagtagaagctaagtcctggctcaaatctcttccctccctccctctcccagctgtcagtgcttttggacttgtgctcagatgacaacggcaacacgacaagaagtccttggcctctaccgcagcattttcaggcttgcgaggaaatggcaggcgacatcagggcagatggaagacaccatcaaagaaaaacagtacatactaaatgaagccagaacgctgttccggaaaaacaaaaatctcacggacacagacctaattaaacagtgtatagatgaatgcacagccaggattgaaattggactgcattacaagattccttacccaaggccaattcatctgcctccaatgggccttaccccactccgaggccggggacttcgaagccaagagaaactgaggaaactttccaaaccagtatatctcagatctcatgatgaagtttcctaatctagaggaaagtttatttctgcaaatgatgagccaactagttattgaatgtaaaccagatggcaaaacacttcttgattaggggcaaaaattcaaatgtcttcttaaaacctccacaattgattctccccctgtgatgtaaacttagatatccctagagtttctcagcatctttcttcctgagtggatggcattatccctagaggtcatggaccttacatcctcactgcagtcacctttggaaacaagaccgaggcctgtagaaggaaagcggaaggatgtaagagctgttcatgggaattccattcaccacacatgccagctgatgcaaagaaatttgccagtcactggaagttactgtggctactataaaactatgtaccactctcagaatattcttaggctttttttttttcaagttatagatttgcttaaagtgaggttttttggtgtgtgcttttttgttgtcttttgacccttccagtttccagacaaacttgtcttaaaaagtgcatcattggattgaccatggtttttcatgaaattttatgagatttctgccttaacaaaatgcatatattccttatcttaaagcctgtcattacttaggatgcacttataggatctgaaaagctcactttaaactcatactacattcgttacgagtattttacgttaacataattgaaaagtacaaggtccaagctggctttcaaattatgtctaaacagaaatgggacaaatagacttgaaaatagaagggatttattccacccctgcaagggtagagtcaggtgagagtcccttggtgagtcatttgtacatcagtgtcatttcttcttaacctctgaagaagatgggcatcagaaataaagacaaagcactatcaa

SEQ ID NO: 426272 - DNA, 1726 bp, Homo sapiens
agcggggctggctggggaacgttgacccacaccaggtcccgtacaggaacggagactccctaggaccgtgagagccagcttcgtaattctcttgctcttcaaacctgagagtagggtgttgctccgttaccttccattcgtgtgcaggagagaagagtacccagagaaggagaagccagcaaaggagacgacacagacaagacctcagagatcaaaggaagaggccccttaatatcctggaataatgggacccatccccgtaatcagtgaatctcatccacccgcttgccagcttctacccgcagcaagtagaagctaagtcctggctcaaatctcttccctccctccctctcccagctgtcagtgcttttggacttgtgctcaggtgaagtagtatttgaagcttttcatcagttggctcattctttactcaagaataaacctcaagaaacgtcatcagggtcagaatgacaacggcaacacgacaagaagtccttggcctctaccgcagcattttcaggcttgcgaggaaatggcaggcgacatcagggcagatggaagacaccatcaaagaaaaacagtacatactaaatgaagccagaacgctgttccggaaaaacaaaaatctcacggacacagacctaattaaacagtgtatagatgaatgcacagccaggattgaaattggactgcattacaagattccttacccaaggccaattcatctgcctccaatgggccttaccccactccgaggccggggacttcgaagccaagagaaactgaggaaactttccaaaccagtatatctcagatctcatgatgaagtttcctaatctagaggaaagtttatttctgcaaatgatgagccaactagttattgaatgtaaaccagatggcaaaacacttcttgattaggggcaaaaattcaaatgtcttcttaaaacctccacaattgattctccccctgtgatgtaaacttagatatccctagagtttctcagcatctttcttcctgagtggatggcattatccctagaggtcatggaccttacatcctcactgcagtcacctttggaaacaagaccgaggcctgtagaaggaaagcggaaggatgtaagagctgttcatgggaattccattcaccacacatgccagctgatgcaaagaaatttgccagtcactggaagttactgtggctactataaaactatgtaccactctcagaatattcttaggctttttttttttcaagttatagatttgcttaaagtgaggttttttggtgtgtgcttttttgttgtcttttgacccttccagtttccagacaaacttgtcttaaaaagtgcatcattggattgaccatggtttttcatgaaattttatgagatttctgccttaacaaaatgcatatattccttatcttaaagcctgtcattacttaggatgcacttataggatctgaaaagctcactttaaactcatactacattcgttacgagtattttacgttaacataattgaaaagtacaaggtccaagctggctttcaaattatgtctaaacagaaatgggacaaatagacttgaaaatagaagggatttattccacccctgcaagggtagagtcaggtgagagtcccttggtgagtcatttgtacatcagtgtcatttcttcttaacctctgaagaagatgggcatcagaaataaagacaaagcactatcaa

SEQ ID NO: 426273 - DNA, 1695 bp, Homo sapiens
gcctcacggaagtggctcgcgcgtccaagaggggaggcctggtgtggggacgctcaggtgccggcgtggggccccctcggaggctgtgaatcttttggacccccgaatgtaaatgggagatgagagtacccagagaaggagaagccagcaaaggagacgacacagacaagacctcagagatcaaaggaagaggccccttaatatcctggaataatgggacccatccccgtaatcagtgaatctcatccacccgcttgccagcttctacccgcagcaagtagaagctaagtcctggctcaaatctcttccctccctccctctcccagctgtcagtgcttttggacttgtgctcaggtgaagtagtatttgaagcttttcatcagttggctcattctttactcaagaataaacctcaagaaacgtcatcagggtcagaatgacaacggcaacacgacaagaagtccttggcctctaccgcagcattttcaggcttgcgaggaaatggcaggcgacatcagggcagatggaagacaccatcaaagaaaaacagtacatactaaatgaagccagaacgctgttccggaaaaacaaaaatctcacggacacagacctaattaaacagtgtatagatgaatgcacagccaggattgaaattggactgcattacaagattccttacccaaggccaattcatctgcctccaatgggccttaccccactccgaggccggggacttcgaagccaagagaaactgaggaaactttccaaaccagtatatctcagatctcatgatgaagtttcctaatctagaggaaagtttatttctgcaaatgatgagccaactagttattgaatgtaaaccagatggcaaaacacttcttgattaggggcaaaaattcaaatgtcttcttaaaacctccacaattgattctccccctgtgatgtaaacttagatatccctagagtttctcagcatctttcttcctgagtggatggcattatccctagaggtcatggaccttacatcctcactgcagtcacctttggaaacaagaccgaggcctgtagaaggaaagcggaaggatgtaagagctgttcatgggaattccattcaccacacatgccagctgatgcaaagaaatttgccagtcactggaagttactgtggctactataaaactatgtaccactctcagaatattcttaggctttttttttttcaagttatagatttgcttaaagtgaggttttttggtgtgtgcttttttgttgtcttttgacccttccagtttccagacaaacttgtcttaaaaagtgcatcattggattgaccatggtttttcatgaaattttatgagatttctgccttaacaaaatgcatatattccttatcttaaagcctgtcattacttaggatgcacttataggatctgaaaagctcactttaaactcatactacattcgttacgagtattttacgttaacataattgaaaagtacaaggtccaagctggctttcaaattatgtctaaacagaaatgggacaaatagacttgaaaatagaagggatttattccacccctgcaagggtagagtcaggtgagagtcccttggtgagtcatttgtacatcagtgtcatttcttcttaacctctgaagaagatgggcatcagaaataaagacaaagcactatcaa

SEQ ID NO: 426274 - DNA, 2342 bp, Homo sapiens
tcagtcagtcgagactcccccagacctggaactggtgctcccacagaggtgggcccggtggtttggtccggcctggcctactggaccagcctgtgctcggtcggccacggctctgctgggctcctggcgccgcctcctcccagcccgccgcgggctgcgcgcttctgtgggtgggggaaggcaggactgacgcagaagagtacccagagaaggagaagccagcaaaggagacgacacagacaagacctcagagatcaaaggaagaggccccttaatatcctggaataatgggacccatccccgtaatcagtgaatctcatccacccgcttgccagcttctacccgcagcaagtagaagctaagtcctggctcaaatctcttccctccctccctctcccagctgtcagtgcttttggacttgtgctcagatgacaacggcaacacgacaagaagtccttggcctctaccgcagcattttcaggcttgcgaggaaatggcaggcgacatcagggcagatggaagacaccatcaaagaaaaacagtacatactaaatgaagccagaacgctgttccggaaaaacaaaaatctcacggacacagacctaattaaacagtgtatagatgaatgcacagccaggattgaaattggactgcattacaagattccttacccaaggccaattcatctgcctccaatgggccttaccccactccgaggccggggacttcgaagccaagagaaactgaggaaactttccaaaccagtatatctcagatctcatgatgaagtttcctaatctagaggaaagtttatttctgcaaatgatgagccaactagttattgaatgtaaaccagatggcaaaacacttcttgattaggggcaaaaattcaaatgtcttcttaaaacctccacaattgattctccccctgtgatgtaaacttagatatccctagagtttctcagcatctttcttcctgagtggatggcattatccctagaggtcatggaccttacatcctcactgcagtcacctttggaaacaagaccgaggcctgtagaaggaaagcggaaggatgtaagagctgttcatgggaattccattcaccacacatgccagctgatgcaaagaaatttgccagtcactggaagttactgtggctactataaaactatgtaccactctcagaatattcttaggctttttttttttcaagttatagatttgcttaaagtgaggttttttggtgtgtgcttttttgttgtcttttgacccttccagtttccagacaaacttgtcttaaaaagtgcatcattggattgaccatggtttttcatgaaattttatgagatttctgccttaacaaaatgcatatattccttatcttaaagcctgtcattacttaggatgcacttataggatctgaaaagctcactttaaactcatactacattcgttacgagtattttacgttaacataattgaaaagtacaaggtccaagctggctttcaaattatgtctaaacagaaatgggacaaatagacttgaaaatagaagggatttattccacccctgcaagggtagagtcaggtgagagtcccttggtgagtcatttgtacatcagtgtcatttcttcttaacctctgaagaagatgggcatcagaaataaagacaaagcactatcaaaaaaaaaaaaaaaaaaaaaaaaaaaaaaaaaaaaaaaaaaaaaaaaaaaaaaaaaagaaaagagaaaaaaaaacaagagaagaaagaacaaaagaaaacataaaaaaaaaaggaacagacaagaggaatacagcaaacaggacaagaagaagccgacacgcgggcgggcggcgcccgacgacgcgccacgacggccagaggaggagggggagggcgagtgagaaggagagcagctaaagttctagggtggagcgaagaagaagaggagaacgcgcgtcagcgcgagggagtgggggaatgatgaggcggtgaggaccggggcgcagacaggggtggggaggtacagagaggagggaagagcaagaaccacagacgaggagaatgtgtgatgcacggacgcacgggagcgcgagtaaacacaatatcagtagtctgcctgaggggggacgagacgagatgagacggcggagggaggagctaaaagcagcgaaaccggccgacagcaggagcagcgctaccagtggccgccaagcgcacccagaaagaagggggagagatcacaaggcggagcggatgacagagagcatgggatgatcgtagaaagcgagagcgggcaagcaagacaaacggcgatgaggtaaagaacgacgcggac

SEQ ID NO: 426275 - DNA, 1296 bp, Homo sapiens
tcagtcagtcgagactcccccagacctggaactggtgctcccacagaggtgggcccggtggtttggtccggcctggcctactggaccagcctgtgctcggtcggccacggctctgctgggctcctggcgccgcctcctcccagcccgccgcgggctgcgcgcttctgtgggtgggggaaggcaggactgacgcagactcacggacacagacctaattaaacagtgtatagatgaatgcacagccaggattgaaattggactgcattacaagattccttacccaaggccaattcatctgcctccaatgggccttaccccactccgaggccggggacttcgaagccaagagaaactgaggaaactttccaaaccagtatatctcagatctcatgatgaagtttcctaatctagaggaaagtttatttctgcaaatgatgagccaactagttattgaatgtaaaccagatggcaaaacacttcttgattaggggcaaaaattcaaatgtcttcttaaaacctccacaattgattctccccctgtgatgtaaacttagatatccctagagtttctcagcatctttcttcctgagtggatggcattatccctagaggtcatggaccttacatcctcactgcagtcacctttggaaacaagaccgaggcctgtagaaggaaagcggaaggatgtaagagctgttcatgggaattccattcaccacacatgccagctgatgcaaagaaatttgccagtcactggaagttactgtggctactataaaactatgtaccactctcagaatattcttaggctttttttttttcaagttatagatttgcttaaagtgaggttttttggtgtgtgcttttttgttgtcttttgacccttccagtttccagacaaacttgtcttaaaaagtgcatcattggattgaccatggtttttcatgaaattttatgagatttctgccttaacaaaatgcatatattccttatcttaaagcctgtcattacttaggatgcacttataggatctgaaaagctcactttaaactcatactacattcgttacgagtattttacgttaacataattgaaaagtacaaggtccaagctggctttcaaattatgtctaaacagaaatgggacaaatagacttgaaaatagaagggatttattccacccctgcaagggtagagtcaggtgagagtcccttggtgagtcatttgtacatcagtgtcatttcttcttaacctctgaagaagatgggcatcagaaataaagacaaagcactatcaa

SEQ ID NO: 426276 - DNA, 1681 bp, Homo sapiens
agcggggctggctggggaacgttgacccacaccaggtcccgtacaggaacggagactccctaggaccgtgagagccagcttcgtaattctcttgctcttcaaacctgagagtagggtgttgctccgttaccttccattcgtgtgcaggagagaagagtacccagagaaggagaagccagcaaaggagacgacacagacaagacctcagagatcaaaggaagaggccccttaatatcctggaataatgggacccatccccgtaatcagtgaatctcatccacccgcttgccagcttctacccgcagcaagtagaagctaagtcctggctcaaatctcttccctccctccctctcccagctgtcagtgcttttggacttgtgctcaggtgaagtagtatttgaagcttttcatcagttggctcattctttactcaagaataaacctcaagaaacgtcatcagggtcagaatgacaacggcaacacgacaagaagtccttggcctctaccgcagcattttcaggcttgcgaggaaatggcaggcgacatcagggcagatggaagacaccatcaaagaaaaacagtacatactaaatgaagccagaacgctgttccggaaaaacaaaaatgccaggattgaaattggactgcattacaagattccttacccaaggccaattcatctgcctccaatgggccttaccccactccgaggccggggacttcgaagccaagagaaactgaggaaactttccaaaccagtatatctcagatctcatgatgaagtttcctaatctagaggaaagtttatttctgcaaatgatgagccaactagttattgaatgtaaaccagatggcaaaacacttcttgattaggggcaaaaattcaaatgtcttcttaaaacctccacaattgattctccccctgtgatgtaaacttagatatccctagagtttctcagcatctttcttcctgagtggatggcattatccctagaggtcatggaccttacatcctcactgcagtcacctttggaaacaagaccgaggcctgtagaaggaaagcggaaggatgtaagagctgttcatgggaattccattcaccacacatgccagctgatgcaaagaaatttgccagtcactggaagttactgtggctactataaaactatgtaccactctcagaatattcttaggctttttttttttcaagttatagatttgcttaaagtgaggttttttggtgtgtgcttttttgttgtcttttgacccttccagtttccagacaaacttgtcttaaaaagtgcatcattggattgaccatggtttttcatgaaattttatgagatttctgccttaacaaaatgcatatattccttatcttaaagcctgtcattacttaggatgcacttataggatctgaaaagctcactttaaactcatactacattcgttacgagtattttacgttaacataattgaaaagtacaaggtccaagctggctttcaaattatgtctaaacagaaatgggacaaatagacttgaaaatagaagggatttattccacccctgcaagggtagagtcaggtgagagtcccttggtgagtcatttgtacatcagtgtcatttcttcttaacctctgaagaagatgggcatcagaaataaagacaaagcactatcaa

SEQ ID NO: 426277 - DNA, 1585 bp, Homo sapiens
cctccccctagggctcctacctcacagcgctcacccaggacagaggaccagagtctgcaccccctccagggcagctccaaccccatatccccaggccctgggttgaggggtgctggcggtggggaggcagggacagtaggctccctacccccgccgccgccgcctcttcttccaccactgccaccgcctcctcttcatctgcggcccaccggcgtgcggccgccccgaagccccgccccctccatcgcctcctgcatcatcacttccggtaaccccgccggccgccagctccaggagggagaatgggagaggggcaaggagggaacgagtggaagattgcgtcacgacgcacataaagacgtacgaagccgtcgccaaatgacaacggcaacacgacaagaagtccttggcctctaccgcagcattttcaggcttgcgaggaaatggcaggcgacatcagggcagatggaagacaccatcaaagaaaaacagtacatactaaatgaagccagaacgctgttccggaaaaacaaaaatctcacggacacagacctaattaaacagtgtatagatgaatgcacagccaggattgaaattggactgcattacaagattccttacccaaggccaattcatctgcctccaatgggccttaccccactccgaggccggggacttcgaagccaagagaaactgaggaaactttccaaaccagtatatctcagatctcatgatgaagtttcctaatctagaggaaagtttatttctgcaaatgatgagccaactagttattgaatgtaaaccagatggcaaaacacttcttgattaggggcaaaaattcaaatgtcttcttagtttctcagcatctttcttcctgagtggatggcattatccctagaggtcatggaccttacatcctcactgcagtcacctttggaaacaagaccgaggcctgtagaaggaaagcggaaggatgtaagagctgttcatgggaattccattcaccacacatgccagctgatgcaaagaaatttgccagtcactggaagttactgtggctactataaaactatgtaccactctcagaatattcttaggctttttttttttcaagttatagatttgcttaaagtgaggttttttggtgtgtgcttttttgttgtcttttgacccttccagtttccagacaaacttgtcttaaaaagtgcatcattggattgaccatggtttttcatgaaattttatgagatttctgccttaacaaaatgcatatattccttatcttaaagcctgtcattacttaggatgcacttataggatctgaaaagctcactttaaactcatactacattcgttacgagtattttacgttaacataattgaaaagtacaaggtccaagctggctttcaaattatgtctaaacagaaatgggacaaatagacttgaaaatagaagggatttattccacccctgcaagggtagagtcaggtgagagtcccttggtgagtcatttgtacatcagtgtcatttcttcttaacctctgaagaagatgggcatcagaaataaagacaaagcactatcaa

SEQ ID NO: 426278 - DNA, 1069 bp, Homo sapiens
cctccccctagggctcctacctcacagcgctcacccaggacagaggaccagagtctgcaccccctccagggcagctccaaccccatatccccaggccctgggttgaggggtgctggcggtggggaggcagggacagtaggctccctacccccgccgccgccgcctcttcttccaccactgccaccgcctcctcttcatctgcggcccaccggcgtgcggccgccccgaagccccgccccctccatcgcctcctgcatcatcacttccggtaaccccgccggccgccagctccaggagggagaatgggagaggggcaaggagggaacgagtggaagattgcgtcacgacgcacataaagacgtacgaagccgtcgccaaatgacaacggcaacacgacaagaagtccttggcctctaccgcagcattttcaggcttgcgaggaaatggcaggcgacatcagggcagatggaagacaccatcaaagaaaaacagtacatactaaatgaagccagaacgctgttccggaaaaacaaaaatctcacggacacagacctaattaaacagtgtatagatgaatgcacagccaggattgaaattggactgcattacaagattccttacccaaggccaattcatctgcctccaatgggccttaccccactccgaggccggggacttcgaagccaagagaaactgaggaaactttccaaaccagtatatctcagatctcatgatgaagtttcctaatctagaggaaagtttatttctgcaaatgatgagccaactagttattgaatgtaaaccagatggcaaaacacttcttgattaggggcaaaaattcaaatgtcttcttaaaacctccacaattgattctccccctgtgatgtaaacttagatatccctagagtttctcagcatctttcttcctgagtggatggcattatccctagaggtcatggaccttacatcctcactgcagtcacctttggaaacaagaccgaggcctgtagaaggaaagcggaactgttattggttcatcaccaccattgcactgttcattgcctcctgg

SEQ ID NO: 426279 - DNA, 3443 bp, Homo sapiens
agggagggagaatccggccggacagatctgcgcgtatcctggagccggcccagttgtgaactaggagagctttgggacctctgtcccaagcaagagagatgaatggagagtatagaggcagaggatttggacgaggaagatttcaaagctggaaaaggggaagaggtggtgggaacttctcaggaaaatggagagaaagagaacacagacctgatctgagtaaaaccacaggaaaacgtacttctgaacaaaccccacagtttttgctttcaacaaagaccccacagtcaatgcagtcaacattggatcgattcataccatataaaggctggaagctttatttctctgaagtttacagcgatagctctcctttgattgagaagattcaagcatttgaaaaatttttcacaaggcatattgatttgtatgacaaggatgaaatagaaagaaagggaagtattttggtagattttaaagaactgacagaaggtggtgaagtaactaacttgataccagatatagcaactgaactaagagatgcacctgagaaaaccttggcttgcatgggtttggcaatacatcaggtgttaactaaggaccttgaaaggcatgcagctgagttacaagcccaggaaggattgtctaatgatggagaaacaatggtaaatgtgccacatattcatgcaagggtgtacaactatgagcctttgacacagctcaagaatgtcagagcaaattactatggaaaatacattgctctaagagggacagtggttcgtgtcagtaatataaagcctctttgcaccaagatggcttttctttgtgctgcatgtggagaaattcagagctttcctcttccagatggaaaatacagtcttcccacaaagtgtcctgtgcctgtgtgtcgaggcaggtcatttactgctctccgcagctctcctctcacagttacgatggactggcagtcaatcaaaatccaggaattgatgtctgatgatcagagagaagcaggtcggattccacgaacaatagaatgtgagcttgttcatgatcttgtggatagctgtgtcccgggagacacagtgactattactggaattgtcaaagtctcaaatgcggaagaaggttctcgaaataagaatgacaagtgtatgttccttttgtatattgaagcaaattctattagtaatagcaaaggacagaaaacaaagagttctgaggatgggtgtaagcatggaatgttgatggagttctcacttaaagacctttatgccatccaagagattcaagctgaagaaaacctgtttaaactcattgtcaactcgctttgccctgtcatttttggtcatgaacttgttaaagcaggtttggcattagcactctttggaggaagccagaaatacgcagatgacaaaaacagaattccaattcggggagacccccacatccttgttgttggagatccaggcctaggaaaaagtcaaatgctacaggcagcgtgcaatgttgccccacgtggcgtgtatgtttgtggtaacaccacgaccacctctggtctgacggtaactctttcaaaagatagttcctctggagattttgctttggaagctggtgccctggtacttggtgatcaaggtatttgtggaatcgatgaatttgataagatggggaatcaacatcaagccttgttggaagccatggagcagcaaagtattagtcttgctaaggctggtgtggtttgtagccttcctgcaagaacttccattattgctgctgcaaatccagttggaggacattacaataaagccaaaacagtttctgagaatttaaaaatggggagtgcactactatccagatttgatttggtctttatcctgttagatactccaaatgagcatcatgatcacttactctctgaacatgtgattgcaataagagctggaaagcagagaaccattagcagtgccacagtagctcgtatgaatagtcaagattcaaatacttccgtacttgaagtagtttctgagaagccattatcagaaagactaaaggtggttcctggagaaacaatagatcccattccccaccagctattgagaaagtacattggctatgctcggcagtatgtgtacccaaggctatccacagaagctgctcgagttcttcaagatttttaccttgagctccggaaacagagccagaggttaaatagctcaccaatcactaccaggcagctggaatctttgattcgtctgacagaggcacgagcaaggttggaattgagagaggaagcaaccaaagaagacgctgaggatatagtggaaattatgaaatatagcatgctaggaacttactctgatgaatttgggaacctagattttgagcgatcccagcatggttctggaatgagcaacaggtcaacagcgaaaagatttatttctgctctcaacaacgttgctgaaagaacttataataatatatttcaatttcatcaacttcggcagattgccaaagaactaaacattcaggttgctgattttgaaaattttattggatcactaaatgaccagggttacctcttgaaaaaaggcccaaaagtttaccagcttcaaactatgtaaaaggacttcaccaagttagggcctcctgggtttattgcagattaaagccatctcagtgaagatatgcgtgcacgcacagacagacagacacacacacacacacacacacacacacacacacacacacacacagtcaaatactgttctctgaaaaatgatgtcccaaaagtattataataggaaaaaagcattaaatataataaactaatttaagaagtgataaagtctccagatgcagtagctcacactgtaatcacagtgactcaggaggctgaggtgagaggattccttgaggccagggttcgagaccaaccttgggcaacatagcaagaccccatttcttaaaaaaaaaaaaaaaaaatttaaacttagctgggtatggtggcacatgccctatagtctcagctacttgtgaggctgaggcaggaggattctttgagccccaggagtttgaggttacagtgagccacaatcacacccaatcactgcactccagcctgggcaataaagtaactcttgactcaaaaaaataaaaaaaattgtagtggtagccatgtgttaattgttaaataaattctccaaagggctaaaagtaaattacttataaattttttatagttgtatttttgacctgccttttatatgtatgaatatttcatagttttgcatatcagatgtaggcatacagacaaatacataaaccaatgaatatattacatattctgtgttccaataaaactttatttatggacactaaaatttgaatttcataaaattttcccatgtcaagaatacaaaatacttgagttttgtttttagcta

SEQ ID NO: 426280 - DNA, 3449 bp, Homo sapiens
agggagggagaatccggccggacagatctgcgcgtatcctggagccggcccagttgtgaactaggagagctttgggacctctgtcccaagcaagtaagaactttagccttaggagatgtaaataaagtagtatttgaagaagcacaggagagatgaatggagagtatagaggcagaggatttggacgaggaagatttcaaagctggaaaaggggaagaggtggtgggaacttctcaggaaaatggagagaaagagaacacagacctgatctgagtaaaaccacaggaaaacgtacttctgaacaaaccccacagtttttgctttcaacaaagaccccacagtcaatgcagtcaacattggatcgattcataccatataaaggctggaagctttatttctctgaagtttacagcgatagctctcctttgattgagaagattcaagcatttgaaaaatttttcacaaggcatattgatttgtatgacaaggatgaaatagaaagaaagggaagtattttggtagattttaaagaactgacagaaggtggtgaagtaactaacttgataccagatatagcaactgaactaagagatgcacctgagaaaaccttggcttgcatgggtttggcaatacatcaggtgttaactaaggaccttgaaaggcatgcagctgagttacaagcccaggaaggattgtctaatgatggagaaacaatggtaaatgtgccacatattcatgcaagggtgtacaactatgagcctttgacacagctcaagaatgtcagagcaaattactatggaaaatacattgctctaagagggacagtggttcgtgtcagtaatataaagcctctttgcaccaagatggcttttctttgtgctgcatgtggagaaattcagagctttcctcttccagatggaaaatacagtcttcccacaaagtgtcctgtgcctgtgtgtcgaggcaggtcatttactgctctccgcagctctcctctcacagttacgatggactggcagtcaatcaaaatccaggaattgatgtctgatgatcagagagaagcaggtcggattccacgaacaatagaatgtgagcttgttcatgatcttgtggatagctgtgtcccgggagacacagtgactattactggaattgtcaaagtctcaaatgcggaagaagcaaattctattagtaatagcaaaggacagaaaacaaagagttctgaggatgggtgtaagcatggaatgttgatggagttctcacttaaagacctttatgccatccaagagattcaagctgaagaaaacctgtttaaactcattgtcaactcgctttgccctgtcatttttggtcatgaacttgttaaagcaggtttggcattagcactctttggaggaagccagaaatacgcagatgacaaaaacagaattccaattcggggagacccccacatccttgttgttggagatccaggcctaggaaaaagtcaaatgctacaggcagcgtgcaatgttgccccacgtggcgtgtatgtttgtggtaacaccacgaccacctctggtctgacggtaactctttcaaaagatagttcctctggagattttgctttggaagctggtgccctggtacttggtgatcaaggtatttgtggaatcgatgaatttgataagatggggaatcaacatcaagccttgttggaagccatggagcagcaaagtattagtcttgctaaggctggtgtggtttgtagccttcctgcaagaacttccattattgctgctgcaaatccagttggaggacattacaataaagccaaaacagtttctgagaatttaaaaatggggagtgcactactatccagatttgatttggtctttatcctgttagatactccaaatgagcatcatgatcacttactctctgaacatgtgattgcaataagagctggaaagcagagaaccattagcagtgccacagtagctcgtatgaatagtcaagattcaaatacttccgtacttgaagtagtttctgagaagccattatcagaaagactaaaggtggttcctggagaaacaatagatcccattccccaccagctattgagaaagtacattggctatgctcggcagtatgtgtacccaaggctatccacagaagctgctcgagttcttcaagatttttaccttgagctccggaaacagagccagaggttaaatagctcaccaatcactaccaggcagctggaatctttgattcgtctgacagaggcacgagcaaggttggaattgagagaggaagcaaccaaagaagacgctgaggatatagtggaaattatgaaatatagcatgctaggaacttactctgatgaatttgggaacctagattttgagcgatcccagcatggttctggaatgagcaacaggtcaacagcgaaaagatttatttctgctctcaacaacgttgctgaaagaacttataataatatatttcaatttcatcaacttcggcagattgccaaagaactaaacattcaggttgctgattttgaaaattttattggatcactaaatgaccagggttacctcttgaaaaaaggcccaaaagtttaccagcttcaaactatgtaaaaggacttcaccaagttagggcctcctgggtttattgcagattaaagccatctcagtgaagatatgcgtgcacgcacagacagacagacacacacacacacacacacacacacacacacacacacacacacagtcaaatactgttctctgaaaaatgatgtcccaaaagtattataataggaaaaaagcattaaatataataaactaatttaagaagtgataaagtctccagatgcagtagctcacactgtaatcacagtgactcaggaggctgaggtgagaggattccttgaggccagggttcgagaccaaccttgggcaacatagcaagaccccatttcttaaaaaaaaaaaaaaaaaatttaaacttagctgggtatggtggcacatgccctatagtctcagctacttgtgaggctgaggcaggaggattctttgagccccaggagtttgaggttacagtgagccacaatcacacccaatcactgcactccagcctgggcaataaagtaactcttgactcaaaaaaataaaaaaaattgtagtggtagccatgtgttaattgttaaataaattctccaaagggctaaaagtaaattacttataaattttttatagttgtatttttgacctgccttttatatgtatgaatatttcatagttttgcatatcagatgtaggcatacagacaaatacataaaccaatgaatatattacatattctgtgttccaataaaactttatttatggacactaaaatttgaatttcataaaattttcccatgtcaagaatacaaaatacttgagttttgtttttagcta

SEQ ID NO: 426281 - DNA, 3096 bp, Homo sapiens
  misc_feature (2991)..(2991): n is a, c, g, or t
  misc_feature (2993)..(2993): n is a, c, g, or t
  misc_feature (3020)..(3020): n is a, c, g, or t
  misc_feature (3022)..(3022): n is a, c, g, or t
agggagggagaatccggccggacagatctgcgcgtatcctggagccggcccagttgtgaactaggagagctttgggacctctgtcccaagcaagagagatgaatggagagtatagaggcagaggatttggacgaggaagatttcaaagctggaaaaggggaagaggtggtgggaacttctcaggaaaatggagagaaagagaacacagacctgatctgagtaaaaccacaggaaaacgtacttctgaacaaaccccacagtttttgctttcaacaaagaccccacagtcaatgcagtcaacattggatcgattcataccatataaaggctggaagctttatttctctgaagtttacagcgatagctctcctttgattgagaagattcaagcatttgaaaaatttttcacaaggcatattgatttgtatgacaaggatgaaatagaaagaaagggaagtattttggtagattttaaagaactgacagaaggtggtgaagtaactaacttgataccagatatagcaactgaactaagagatgcacctgagaaaaccttggcttgcatgggtttggcaatacatcaggtgttaactaaggaccttgaaaggcatgcagctgagttacaagcccaggaaggattgtctaatgatggagaaacaatggtaaatgtgccacatattcatgcaagggtgtacaactatgagcctttgacacagctcaagaatgtcagagcaaattactatggaaaatacattgctctaagagggacagtggttcgtgtcagtaatataaagcctctttgcaccaagatggcttttctttgtgctgcatgtggagaaattcagagctttcctcttccagatggaaaatacagtcttcccacaaagtgtcctgtgcctgtgtgtcgaggcaggtcatttactgctctccgcagctctcctctcacagttacgatggactggcagtcaatcaaaatccaggaattgatgtctgatgatcagagagaagcaggtcggattccacgaacaatagaatgtgagcttgttcatgatcttgtggatagctgtgtcccgggagacacagtgactattactggaattgtcaaagtctcaaatgcggaagaaggttctcgaaataagaatgacaagtgtatgttccttttgtatattgaagcaaattctattagtaatagcaaaggacagaaaacaaagagttctgaggatgggtgtaagcatggaatgttgatggagttctcacttaaagacctttatgccatccaagagattcaagctgaagaaaacctgtttaaactcattgtcaactcgctttgccctgtcatttttggtcatgaacttgttaaagcaggtttggcattagcactctttggaggaagccagaaatacgcagatgacaaaaacagaattccaattcggggagacccccacatccttgttgttggagatccaggcctaggaaaaagtcaaatgctacaggcagcgtgcaatgttgccccacgtggcgtgtatgtttgtggtaacaccacgaccacctctggtctgacggtaactctttcaaaagatagttcctctggagattttgctttggaagctggtgccctggtacttggtgatcaaggtatttgtggaatcgatgaatttgataagatggggaatcaacatcaagccttgttggaagccatggagcagcaaagtattagtcttgctaaggctggtgtggtttgtagccttcctgcaagaacttccattattgctgctgcaaatccagttggaggacattacaataaagccaaaacagtttctgagaatttaaaaatggggagtgcactactatccagatttgatttggtctttatcctgttagatactccaaatgagcatcatgatcacttactctctgaacatgtgattgcaataagagctggaaagcagagaaccattagcagtgccacagtagctcgtatgaatagtcaagattcaaatacttccgtacttgaagtagtttctgagaagccattatcagaaagactaaaggtggttcctggagaaacaatagatcccattccccaccagctattgagaaagtacattggctatgctcggcagtatgtgtacccaaggctatccacagaagctgctcgagttcttcaagatttttaccttgagctccggaaacagagccagaggttaaatagctcaccaatcactaccaggcagctggaatctttgattcgtctgacagaggcacgagcaaggttggaattgagagaggaagcaaccaaagaagacgctgaggatatagtggaaattatgaaatatagcatgctaggaacttactctgatgaatttgggaacctagattttgagcgatcccagcatggttctggaatgagcaacaggtcaacagcgaaaagatttatttctgctctcaacaacgttgctgaaagaacttataataatatatttcaatttcatcaacttcggcagattgccaaagaactaaacattcaggttgctgattttgaaaattttattggatcactaaatgaccagggttacctcttgaaaaaaggcccaaaagtttaccagcttcaaactatgtaaaaggacttcaccaagttagggcctcctgggtttattgcagattaaagccatctcagtgaagatatgcgtgcacgcacagacagacagacacacacacacacacacacacacacacacacacacacacacacagtcaaatactgttctctgaaaaatgatgtcccaaaagtattataataggaaaaaagcattaaatataataaactaatttaagaagtgataaagtctccagatgcagtagctcacactgtaatcacagtgactcaggaggctgaggtgagaggattccttgaggccagggttcgagaccaaccttgggcaacatagcaagaccccatttcttaaattagtttattatatttaatgcttntntcctattataatacttttgggacatcntntttcagagaacagtatttgactgtgtgtgtgtgtgtgtgtgtgtgtgtgtgtgtgtctgtctgtctgtgcgtgc

SEQ ID NO: 426282 - DNA, 3096 bp, Homo sapiens
  misc_feature (2991)..(2991): n is a, c, g, or t
  misc_feature (2993)..(2993): n is a, c, g, or t
  misc_feature (3020)..(3020): n is a, c, g, or t
  misc_feature (3022)..(3022): n is a, c, g, or t
agggagggagaatccggccggacagatctgcgcgtatcctggagccggcccagttgtgaactaggagagctttgggacctctgtcccaagcaagagagatgaatggagagtatagaggcagaggatttggacgaggaagatttcaaagctggaaaaggggaagaggtggtgggaacttctcaggaaaatggagagaaagagaacacagacctgatctgagtaaaaccacaggaaaacgtacttctgaacaaaccccacagtttttgctttcaacaaagaccccacagtcaatgcagtcaacattggatcgattcataccatataaaggctggaagctttatttctctgaagtttacagcgatagctctcctttgattgagaagattcaagcatttgaaaaatttttcacaaggcatattgatttgtatgacaaggatgaaatagaaagaaagggaagtattttggtagattttaaagaactgacagaaggtggtgaagtaactaacttgataccagatatagcaactgaactaagagatgcacctgagaaaaccttggcttgcatgggtttggcaatacatcaggtgttaactaaggaccttgaaaggcatgcagctgagttacaagcccaggaaggattgtctaatgatggagaaacaatggtaaatgtgccacatattcatgcaagggtgtacaactatgagcctttgacacagctcaagaatgtcagagcaaattactatggaaaatacattgctctaagagggacagtggttcgtgtcagtaatataaagcctctttgcaccaagatggcttttctttgtgctgcatgtggagaaattcagagctttcctcttccagatggaaaatacagtcttcccacaaagtgtcctgtgcctgtgtgtcgaggcaggtcatttactgctctccgcagctctcctctcacagttacgatggactggcagtcaatcaaaatccaggaattgatgtctgatgatcagagagaagcaggtcggattccacgaacaatagaatgtgagcttgttcatgatcttgtggatagctgtgtcccgggagacacagtgactattactggaattgtcaaagtctcaaatgcggaagaaggttctcgaaataagaatgacaagtgtatgttccttttgtatattgaagcaaattctattagtaatagcaaaggacagaaaacaaagagttctgaggatgggtgtaagcatggaatgttgatggagttctcacttaaagacctttatgccatccaagagattcaagctgaagaaaacctgtttaaactcattgtcaactcgctttgccctgtcatttttggtcatgaacttgttaaagcaggtttggcattagcactctttggaggaagccagaaatacgcagatgacaaaaacagaattccaattcggggagacccccacatccttgttgttggagatccaggcctaggaaaaagtcaaatgctacaggcagcgtgcaatgttgccccacgtggcgtgtatgtttgtggtaacaccacgaccacctctggtctgacggtaactctttcaaaagatagttcctctggagattttgctttggaagctggtgccctggtacttggtgatcaaggtatttgtggaatcgatgaatttgataagatggggaatcaacatcaagccttgttggaagccatggagcagcaaagtattagtcttgctaaggctggtgtggtttgtagccttcctgcaagaacttccattattgctgctgcaaatccagttggaggacattacaataaagccaaaacagtttctgagaatttaaaaatggggagtgcactactatccagatttgatttggtctttatcctgttagatactccaaatgagcatcatgatcacttactctctgaacatgtgattgcaataagagctggaaagcagagaaccattagcagtgccacagtagctcgtatgaatagtcaagattcaaatacttccgtacttgaagtagtttctgagaagccattatcagaaagactaaaggtggttcctggagaaacaatagatcccattccccaccagctattgagaaagtacattggctatgctcggcagtatgtgtacccaaggctatccacagaagctgctcgagttcttcaagatttttaccttgagctccggaaacagagccagaggttaaatagctcaccaatcactaccaggcagctggaatctttgattcgtctgacagaggcacgagcaaggttggaattgagagaggaagcaaccaaagaagacgctgaggatatagtggaaattatgaaatatagcatgctaggaacttactctgatgaatttgggaacctagattttgagcgatcccagcatggttctggaatgagcaacaggtcaacagcgaaaagatttatttctgctctcaacaacgttgctgaaagaacttataataatatatttcaatttcatcaacttcggcagattgccaaagaactaaacattcaggttgctgattttgaaaattttattggatcactaaatgaccagggttacctcttgaaaaaaggcccaaaagtttaccagcttcaaactatgtaaaaggacttcaccaagttagggcctcctgggtttattgcagattaaagccatctcagtgaagatatgcgtgcacgcacagacagacagacacacacacacacacacacacacacacacacacacacacacacagtcaaatactgttctctgaaaaatgatgtcccaaaagtattataataggaaaaaagcattaaatataataaactaatttaagaaatggggtcttgctatgttgcccaaggttggtctcgaaccctggcctcaaggaatcctctcacctcagcctcctgagtcactgtgattacagtgtgagctactgcatctggagactttatcacttcttaaattagtttattatatttaatgcttntntcctattataatacttttgggacatcntntttcagagaacagtatttgactgtgtgtgtgtgtgtgtgtgtgtgtgtgtgtgtgtctgtctgtctgtgcgtgc

SEQ ID NO: 426283 - DNA, 3421 bp, Homo sapiens
agggagggagaatccggccggacagatctgcgcgtatcctggagccggcccagttgtgaactaggagagctttgggacctctgtcccaagcaagagagatgaatggagagtatagaggcagaggatttggacgaggaagatttcaaagctggaaaaggggaagaggtggtgggaacttctcaggaaaatggagagaaagagaacacagacctgatctgagtaaaaccacaggaaaacgtacttctgaacaaaccccacagtttttgctttcaacaaagaccccacagtcaatgcagtcaacattggatcgattcataccatataaaggctggaagctttatttctctgaagtttacagcgatagctctcctttgattgagaagattcaagcatttgaaaaatttttcacaaggcatattgatttgtatgacaaggatgaaatagaaagaaagggaagtattttggtagattttaaagaactgacagaaggtggtgaagtaactaacttgataccagatatagcaactgaactaagagatgcacctgagaaaaccttggcttgcatgggtttggcaatacatcaggtgttaactaaggaccttgaaaggcatgcagctgagttacaagcccaggaaggattgtctaatgatggagaaacaatggtaaatgtgccacatattcatgcaagggtgtacaactatgagcctttgacacagctcaagaatgtcagagcaaattactatggaaaatacattgctctaagagggacagtggttcgtgtcagtaatataaagcctctttgcaccaagatggcttttctttgtgctgcatgtggagaaattcagagctttcctcttccagatggaaaatacagtcttcccacaaagtgtcctgtgcctgtgtgtcgaggcaggtcatttactgctctccgcagctctcctctcacagttacgatggactggcagtcaatcaaaatccaggaattgatgtctgatgatcagagagaagcaggtcggattccacgaacaatagaatgtgagcttgttcatgatcttgtggatagctgtgtcccgggagacacagtgactattactggaattgtcaaagtctcaaatgcggaagaaggttctcgaaataagaatgacaagtgtatgttccttttgtatattgaagcaaattctattagtaatagcaaaggacagaaaacaaagagttctgaggatgggtgtaagcatggaatgttgatggagttctcacttaaagacctttatgccatccaagagattcaagctgaagaaaacctgtttaaactcattgtcaactcgctttgccctgtcatttttggtcatgaacttgttaaagcaggtttggcattagcactctttggaggaagccagaaatacgcagatgacaaaaacagaattccaattcggggagacccccacatccttgttgttggagatccaggcctaggaaaaagtcaaatgctacaggcagcgtgcaatgttgccccacgtggcgtgtatgtttgtggtaacaccacgaccacctctggtctgacggtaactctttcaaaagatagttcctctggagattttgctttggaagctggtgccctggtacttggtgatcaaggtatttgtggaatcgatgaatttgataagatggggaatcaacatcaagccttgttggaagccatggagcagcaaagtattagtcttgctaaggctggtgtggtttgtagccttcctgcaagaacttccattattgctgctgcaaatccagttggaggacattacaataaagccaaaacagtttctgagaatttaaaaatggggagtgcactactatccagatttgatttggtctttatcctgttagatactccaaatgagcatcatgatcacttactctctgaacatgtgattgcaataagagctggaaagcagagaaccattagcagtgccacagtagctcgtatgaatagtcaagattcaaatacttccgtacttgaagtagtttctgagaagccattatcagaaagactaaaggtggttcctggagaaacaatagatcccattccccaccagctattgagaaagtacattggctatgctcggcagtatgtgtacccaaggctatccacagaagctgctcgagttcttcaagatttttaccttgagctccggaaacagagccagaggttaaatagctcaccaatcactaccaggcagctggaatctttgattcgtctgacagaggcacgagcaaggttggaattgagagaggaagcaaccaaagaagacgctgaggatatagtggaaattatgaaatatagcatgctaggaacttactctgatgaatttgggaacctagattttgagcgatcccagcatggttctggaatgagcaacaggtcaacagcgaaaagatttatttctgctctcaacaacgttgctgaaagaacttataataatatatttcaatttcatcaacttcggcagattgccaaagaactaaacattcaggttgctgattttgaaaattttattggatcactaaatgaccagggttacctcttgaaaaaaggcccaaaagtttaccagcttcaaactatgtaaaaggacttcaccaagttagggcctcctgggtttattgcagattaaagccatctcagtgaagatatgcgtgcacgcacagacagacagacacacacacacacacacacacagtcaaatactgttctctgaaaaatgatgtcccaaaagtattataataggaaaaaagcattaaatataataaactaatttaagaagtgataaagtctccagatgcagtagctcacactgtaatcacagtgactcaggaggctgaggtgagaggattccttgaggccagggttcgagaccaaccttgggcaacatagcaagaccccatttcttaaaaaaaaaaaaaaaaaatttaaacttagctgggtatggtggcacatgccctatagtctcagctacttgtgaggctgaggcaggaggattctttgagccccaggagtttgaggttacagtgagccacaatcacacccaatcactgcactccagcctgggcaataaagtaactcttgactcaaaaaaataaaaaaaattgtagtggtagccatgtgttaattgttaaataaattctccaaagggctaaaagtaaattacttataaattttttatagttgtatttttgacctgccttttatatgtatgaatatttcatagttttgcatatcagatgtaggcatacagacaaatacataaaccaatgaatatattacatattctgtgttccaataaaactttatttatggacactaaaatttgaatttcataaaattttcccatgtcaagaatacaaaatacttgagttttgtttttagcta

SEQ ID NO: 426284 - DNA, 2013 bp, Homo sapiens
ctgaggctcagagaggtctgagagccacacagctggtgcatggtggagccacgatttaaacaggcagcgtgcaatgttgccccacgtggcgtgtatgtttgtggtaacaccacgaccacctctggtctgacggtaactctttcaaaagatagttcctctggagattttgctttggaagctggtgccctggtacttggtgatcaaggtatttgtggaatcgatgaatttgataagatggggaatcaacatcaagccttgttggaagccatggagcagcaaagtattagtcttgctaaggctggtgtggtttgtagccttcctgcaagaacttccattattgctgctgcaaatccagttggaggacattacaataaagccaaaacagtttctgagaatttaaaaatggggagtgcactactatccagatttgatttggtctttatcctgttagatactccaaatgagcatcatgatcacttactctctgaacatgtgattgcaataagagctggaaagcagagaaccattagcagtgccacagtagctcgtatgaatagtcaagattcaaatacttccgtacttgaagtagtttctgagaagccattatcagaaagactaaaggtggttcctggagaaacaatagatcccattccccaccagctattgagaaagtacattggctatgctcggcagtatgtgtacccaaggctatccacagaagctgctcgagttcttcaagatttttaccttgagctccggaaacagagccagaggttaaatagctcaccaatcactaccaggcagctggaatctttgattcgtctgacagaggcacgagcaaggttggaattgagagaggaagcaaccaaagaagacgctgaggatatagtggaaattatgaaatatagcatgctaggaacttactctgatgaatttgggaacctagattttgagcgatcccagcatggttctggaatgagcaacaggtcaacagcgaaaagatttatttctgctctcaacaacgttgctgaaagaacttataataatatatttcaatttcatcaacttcggcagattgccaaagaactaaacattcaggttgctgattttgaaaattttattggatcactaaatgaccagggttacctcttgaaaaaaggcccaaaagtttaccagcttcaaactatgtaaaaggacttcaccaagttagggcctcctgggtttattgcagattaaagccatctcagtgaagatatgcgtgcacgcacagacagacagacacacacacacacacacacacacacacacacacacacacacacagtcaaatactgttctctgaaaaatgatgtcccaaaagtattataataggaaaaaagcattaaatataataaactaatttaagaagtgataaagtctccagatgcagtagctcacactgtaatcacagtgactcaggaggctgaggtgagaggattccttgaggccagggttcgagaccaaccttgggcaacatagcaagaccccatttcttaaaaaaaaaaaaaaaaaatttaaacttagctgggtatggtggcacatgccctatagtctcagctacttgtgaggctgaggcaggaggattctttgagccccaggagtttgaggttacagtgagccacaatcacacccaatcactgcactccagcctgggcaataaagtaactcttgactcaaaaaaataaaaaaaattgtagtggtagccatgtgttaattgttaaataaattctccaaagggctaaaagtaaattacttataaattttttatagttgtatttttgacctgccttttatatgtatgaatatttcatagttttgcatatcagatgtaggcatacagacaaatacataaaccaatgaatatattacatattctgtgttccaataaaactttatttatggacactaaaatttgaatttcataaaattttcccatgtcaagaatacaaaatacttgagttttgtttttagcta

SEQ ID NO: 426285 - DNA, 987 bp, Homo sapiens
taccattctgatgttggcgcggactgtctgggctgctgcgcgccgcctaggtgtctgggcgatctatgggcaagagcaagggccacgatgacagattacggcgaggagcagcgcaacgagctggaggccctggagtccatctaccctgactccttcacagtattatcagaaaatccacccagcttcaccattactgtgacgtctgaggctggagaaaatgatgaaactgtccagactaccctcaagtttacatacagtgaaaaatacccagatgaagctcccctttatgaaatattctcccaggaaaatctagaagataatgatgtctcagacattttaaaattactagcattacaggctgaagaaaatcttggtatggtgatgatttttactctagtgacagctgtgcaagaaaaattaaatgaaatagtagatcagataaaaactagaagagaagaagaaaagaaacaaaaagaaaaagaagcagaagaagctgaaaagcaattattccatggtactccagttacaattgagaatttcttaaattggaaagccaagtttgatgcagaactcttggaaattaaaaagaaaaggatgaaagaagaagaacaagcaggaaaaaataaattaagtgggaaacaactatttgaaacagatcataatcttgacacatctgatatccagttcttggaggatgctggaaacaacgtggaggtagatgagtctttgttccaagaaatggatgacttggagctggaggatgatgaagatgatccagactataatcctgctgacccagagagtgactcagctgactaatggactgtccccatctgcagagaggcttgactgccacagcatctgtggctatgctcagagggttatgattttcctttctttttttctaagaaaaaattattttcaggagaatattcttctgatagctttcatcattgaacttaataaactgaccttaaaatttcaaat

SEQ ID NO: 426286 - DNA, 1073 bp, Homo sapiens
tccctgtatagctccagtcctgttcatgttctctctcaccagcagtacatctgtgctgtgaggatgttaaggggatgagtgaagaggggtttaccctgactccttcacagcttgattgcacattgatccaaccctcctaacaactagatctatgggcaagagcaagggccacgatgacagattacggcgaggagcagcgcaacgagctggaggccctggagtccatctaccctgactccttcacagtattatcagaaaatccacccagcttcaccattactgtgacgtctgaggctggagaaaatgatgaaactgtccagactaccctcaagtttacatacagtgaaaaatacccagatgaagctcccctttatgaaatattctcccaggaaaatctagaagataatgatgtctcagacattttaaaattactagcattacaggctgaagaaaatcttggtatggtgatgatttttactctagtgacagctgtgcaagaaaaattaaatgaaatagtagatcagataaaaactagaagagaagaagaaaagaaacaaaaagaaaaagaagcagaagaagctgaaaagcaattattccatggtactccagttacaattgagaatttcttaaattggaaagccaagtttgatgcagaactcttggaaattaaaaagaaaaggatgaaagaagaagaacaagcaggaaaaaataaattaagtgggaaacaactatttgaaacagatcataatcttgacacatctgatatccagttcttggaggatgctggaaacaacgtggaggtagatgagtctttgttccaagaaatggatgacttggagctggaggatgatgaagatgatccagactataatcctgctgacccagagagtgactcagctgactaatggactgtccccatctgcagagaggcttgactgccacagcatctgtggctatgctcagagggttatgattttcctttctttttttctaagaaaaaattattttcaggagaatattcttctgatagctttcatcattgaacttaataaactgaccttaaaatttcaaat

SEQ ID NO: 426287 - DNA, 564 bp, Homo sapiens
gcggaggccggcgcggagctgcagttaagcaagccgggtctggctttgggccctgggccttccagccggggactctgcgcctgcgcccgcctggccgccgcccgctctcccggcgcggcagctgtctgggctgctgcgcgccgcctaggtgtctgggcgatctatgggcaagagcaagggccacgatgacagattacggcgaggagcagcgcaacgagctggaggccctggagtccatctaccctgactccttcacagtattatcagaaaatccacccagcttcaccattactgtgacgtctgaggctggagaaaatgatgaaactgtccagactaccctcaagtttacatacagtgaaaaatacccagatgaagctcccctttatgaaatattctcccaggaaaatctagaagataatgatgtctcagacattttaaaattactagcattacaggctgaagaaaatcttggtatggtgatgatttttactctagtgacagctgtgcaagaaaaattaaatgaaatagtagatcagataaaaactagaagagaagaagaaaaga

SEQ ID NO: 426288 - DNA, 1229 bp, Homo sapiens
taccattctgatgttggcgcggactgtctgggctgctgcgcgccgcctaggtgtctgggcgatctatgggcaagagcaagggccacgatgacagattacggcgaggagcagcgcaacgagctggaggccctggagtccatctaccctgactccttcacaggcagatgtctctcagctatccctgtatagctccagtcctgttcatgttctctctcaccagcagtacatctgtgctgtgaggatgttaaggggatgagtgaagaggggtttgagagtgtcattaactggcttgattgcacattgatccaaccctcctaacaactagtcttccaaaatataaatggactctcctgataccacattctccttcagtagtgcttcacttgacaaggtcctgctaagtattatcagaaaatccacccagcttcaccattactgtgacgtctgaggctggagaaaatgatgaaactgtccagactaccctcaagtttacatacagtgaaaaatacccagatgaagctcccctttatgaaatattctcccaggaaaatctagaagataatgatgtctcagacattttaaaattactagcattacaggctgaagaaaatcttggtatggtgatgatttttactctagtgacagctgtgcaagaaaaattaaatgaaatagtagatcagataaaaactagaagagaagaagaaaagaaacaaaaagaaaaagaagcagaagaagctgaaaagcaattattccatggtactccagttacaattgagaatttcttaaattggaaagccaagtttgatgcagaactcttggaaattaaaaagaaaaggatgaaagaagaagaacaagcaggaaaaaataaattaagtgggaaacaactatttgaaacagatcataatcttgacacatctgatatccagttcttggaggatgctggaaacaacgtggaggtagatgagtctttgttccaagaaatggatgacttggagctggaggatgatgaagatgatccagactataatcctgctgacccagagagtgactcagctgactaatggactgtccccatctgcagagaggcttgactgccacagcatctgtggctatgctcagagggttatgattttcctttctttttttctaagaaaaaattattttcaggagaatattcttctgatagctttcatcattgaacttaataaactgaccttaaaatttcaaat

SEQ ID NO: 426289 - DNA, 1213 bp, Homo sapiens
gcggaggccggcgcggagctgcagttaagcaagccgggtctggctttgggccctgggccttccagccggggactctgcgcctgcgcccgcctggccgccgcccgctctcccggcgcggcagctgtctgggctgctgcgcgccgcctaggtgtctgggcgatctatgggcaagagcaagggccacgatgacagattacggcgaggagcagcgcaacgagctggaggccctggagtccatctaccctgactccttcacaggcagatgtctctcagctatccctgtatagctccagtcctgttcatgttctctctcaccagcagtacatctgtgctgtgaggatgttaaggggatgagtgaagaggggtttgagagtgtcattaactggtattatcagaaaatccacccagcttcaccattactgtgacgtctgaggctggagaaaatgatgaaactgtccagactaccctcaagtttacatacagtgaaaaatacccagatgaagctcccctttatgaaatattctcccaggaaaatctagaagataatgatgtctcagacattttaaaattactagcattacaggctgaagaaaatcttggtatggtgatgatttttactctagtgacagctgtgcaagaaaaattaaatgaaatagtagatcagataaaaactagaagagaagaagaaaagaaacaaaaagaaaaagaagcagaagaagctgaaaagcaattattccatggtactccagttacaattgagaatttcttaaattggaaagccaagtttgatgcagaactcttggaaattaaaaagaaaaggatgaaagaagaagaacaagcaggaaaaaataaattaagtgggaaacaactatttgaaacagatcataatcttgacacatctgatatccagttcttggaggatgctggaaacaacgtggaggtagatgagtctttgttccaagaaatggatgacttggagctggaggatgatgaagatgatccagactataatcctgctgacccagagagtgactcagctgactaatggactgtccccatctgcagagaggcttgactgccacagcatctgtggctatgctcagagggttatgattttcctttctttttttctaagaaaaaattattttcaggagaatattcttctgatagctttcatcattgaacttaataaactgaccttaaaatttcaaat

SEQ ID NO: 426290 - DNA, 898 bp, Homo sapiens
tagaggatcgcgcgtactccgtacagatcataatcttgcagatctgatatcagttcttggaggatgtggaaacaacgtggaggtagatgagtctttgtaccaagaaatggatgacttggagctagaaaatgatgaaactgtccagactaccctcaagtttacatacagtgaaaaatacccagatgaagctcccctttatgaaatattctcccaggaaaatctagaagataatgatgtctcagacattttaaaattactagcattacaggctgaagaaaatcttggtatggtgatgatttttactctagtgacagctgtgcaagaaaaattaaatgaaatagtagatcagataaaaactagaagagaagaagaaaagaaacaaaaagaaaaagaagcagaagaagctgaaaagcaattattccatggtactccagttacaattgagaatttcttaaattggaaagccaagtttgatgcagaactcttggaaattaaaaagaaaaggatgaaagaagaagaacaagcaggaaaaaataaattaagtgggaaacaactatttgaaacagatcataatcttgacacatctgatatccagttcttggaggatgctggaaacaacgtggaggtagatgagtctttgttccaagaaatggatgacttggagctggaggatgatgaagatgatccagactataatcctgctgacccagagagtgactcagctgactaatggactgtccccatctgcagagaggcttgactgccacagcatctgtggctatgctcagagggttatgattttcctttctttttttctaagaaaaaattattttcaggagaatattcttctgatagctttcatcattgaacttaataaactgaccttaaaatttcaaat

SEQ ID NO: 426291 - DNA, 820 bp, Homo sapiens
gcggaggccggcgcggagctgcagttaagcaagccgggtctggctttgggccctgggccttccagccggggactctgcgcctgcgcccgcctggccgccgcccgctctcccggcgcggcagctgtctgggctgctgcgcgccgcctaggtgtctgggcgatctatgggcaagagcaagggccacgatgacagattacggcgaggagcagcgcaacgagctggaggccctggagtccatctaccctgactccttcacagtattatcagaaaatccacccagcttcaccattactgtgacgtctgaggctggagaaaatgatgaaactgtccagactaccctcaagtttacatacagtgaaaaatacccagatgaagctcccctttatgaaatattctcccaggaaaatctagaagataatgatgtctcagacattttaaaattactagcattacaggctgaagaaaatcttggtatggtgatgatttttactctagtgacagctgtgcaagaaaaattaaatgaaatagtagatcagataaaaactagaagagaagaagaaaagaaacaaaaagaaaaagaagcagaagaagctgaaaagcaattattccatggtactccagttacaattgagaatttcttaaattggaaagccaagtttgatgcagaactcttggaaattaaaaagaaaaggatgaaagaagaagaacaagcaggaaaaaataaattaagtgggaaacaactatttgaaacagatcataatcttgacacatctgatatccagttcttggaggatggtaagataatagtagaattccacat

SEQ ID NO: 426292 - DNA, 876 bp, Homo sapiens
  misc_feature (772)..(772): n is a, c, g, or t
  misc_feature (785)..(785): n is a, c, g, or t
  misc_feature (802)..(802): n is a, c, g, or t
  misc_feature (855)..(855): n is a, c, g, or t
  misc_feature (869)..(869): n is a, c, g, or t
taccattctgatgttggcgcggactgtctgggctgctgcgcgccgcctaggtgtctgggcgatctatgggcaagagcaagggccacgatgacagattacggcgaggagcagcgcaacgagctggaggccctggagtccatctaccctgactccttcacagcttgattgcacattgatccaaccctcctaacaactagtcttccaaaatataaatggactctcctgataccacattctccttcagtagtgcttcacttgacaaggtcctgctaagtattatcagaaaatccacccagcttcaccattactgtgacgtctgaggctggagaaaatgatgaaactgtccagactaccctcaagtttacatacagtgaaaaatacccagatgaagctcccctttatgaaatattctcccaggaaaatctagaagataatgatgtctcagacattttaaaattactagcattacaggctgaagaaaatcttggtatggtgatgatttttactctagtgacagctgtgcaagaaaaattaaatgaaatagtagatcagataaaaactagaagagaagaagaaaagaaacaaaaagaaaaagaagcagaagaagctgaaaagcaattattccatggtactccagttacaattgagaatttcttaaattggaaagccaagtttgatgcagaactcttggaaattaaaaagaaaaaggggtgaaaaaaaaaaaaaaaaccaccgccccggaaaaaaaaataaaaattaaaaggtggggggnaaaacaaaccttntttttggaaaaccaagnaatccaattaaattccttggggaccaccaatccttggaattatttcccccccnttcttttggggaangggaatg

SEQ ID NO: 426293 - DNA, 735 bp, Homo sapiens
taccattctgatgttggcgcggactgtctgggctgctgcgcgccgcctaggtgtctgggcgatctatgggcaagagcaagggccacgatgacagattacggcgaggagcagcgcaacgagctggaggccctggagtccatctaccctgactccttcacagcttgattgcacattgatccaaccctcctaacaactagtcttccaaaatataaatggactctcctgataccacattctccttcagtagtgcttcacttgacaaggtcctgctaagtattatcagaaaatccacccagcttcaccattactgtgacgtctgaggctggagaaaatgatgaaactgtccagactaccctcaagtttacatacagtgaaaaatacccagatgaagctcccctttatgaaatattctcccaggaaaatctagaagataatgatgtctcagacattttaaaattactagcattacaggctgaagaaaatcttggtatggtgatgatttttactctagtgacagctgtgcaagaaaaattaaatgaaatagtagatcagataaaaactagaagagaagaagaaaagatataataaaaaataacctcgaattagaatcaaatatttttaatcctgtacctttgggaactttggaaactttcaatttctgagaagaaccattcccaagaggataacctggcctcaatgtttaaggtagaattaaatcaatttcatctcctttaa

SEQ ID NO: 426294 - DNA, 580 bp, Homo sapiens
taccattctgatgttggcgcggactgtctgggctgctgcgcgccgcctaggtgtctgggcgatctatgggcaagagcaagggccacgatgacagattacggcgaggagcagcgcaacgagctggaggccctggagtccatctaccctgactccttcacagcttgattgcacattgatccaaccctcctaacaactagtcttccaaaatataaatggactctcctgataccacattctccttcagtagtgcttcacttgacaaggtcctgctaagtattatcagaaaatccacccagcttcaccattactgtgacgtctgaggctggagaaaatgatgaaactgtccagactaccctcaagtttacatacagtgaaaaatacccagatgaagctcccctttatgaaatattctcccaggaaaatctagaagataatgatgtctcagacattttaaaattactagcattacaggctgaagaaaatcttggtatggtgatgatttttactctagtgacagctgtgcaagaaaaattaaatgaaatagtagatcagataaaaactagaagagaagaagaaaaga

SEQ ID NO: 426295 - DNA, 701 bp, Homo sapiens
taccattctgatgttggcgcggactgtctgggctgctgcgcgccgcctaggtgtctgggcgatctatgggcaagagcaagggccacgatgacagattacggcgaggagcagcgcaacgagctggaggccctggagtccatctaccctgactccttcacaggcagatgtctctcagctatccctgtatagctccagtcctgttcatgttctctctcaccagcagtacatctgtgctgtgaggatgttaaggggatgagtgaagaggggtttgagagtgtcattaactggcttgattgcacattgatccaaccctcctaacaactagtcttccaaaatataaatggactctcctgataccacattctccttcagtagtgcttcacttgacaaggtcctgctaagtattatcagaaaatccacccagcttcaccattactgtgacgtctgaggctggagaaaatgatgaaactgtccagactaccctcaagtttacatacagtgaaaaatacccagatgaagctcccctttatgaaatattctcccaggaaaatctagaagataatgatgtctcagacattttaaaattactagcattacaggcctcatcccccggcgggttcacagcccttggtctggaaaaaaaaggggctgctggcatggacagttgaagattagccctcccgcccctcctgcagccctgc

SEQ ID NO: 426296 - DNA, 1085 bp, Homo sapiens
gcggaggccggcgcggagctgcagttaagcaagccgggtctggctttgggccctgggccttccagccggggactctgcgcctgcgcccgcctggccgccgcccgctctcccggcgcggcagctgtctgggctgctgcgcgccgcctaggtgtctgggcgatctatgggcaagagcaagggccacgatgacagattacggcgaggagcagcgcaacgagctggaggccctggagtccatctaccctgactccttcacagtattatcagaaaatccacccagcttcaccattactgtgacgtctgaggctggagaaaatgatgaaactgtccagactaccctcaagtttacatacagtgaaaaatacccagatgaagctcccctttatgaaatattctcccaggaaaatctagaagataatgatgtctcagacattttaaaattactagcattacaggctgaagaaaatcttggtatggtgatgatttttactctagtgacagctgtgcaagaaaaattaaatgaaatagtagatcagataaaaactagaagagaagaagaaaagaaacaaaaagaaaaagaagcagaagaagctgaaaagcaattattccatggtactccagttacaattgagaatttcttaaattggaaagccaagtttgatgcagaactcttggaaattaaaaagaaaaggatgaaagaagaagaacaagcaggaaaaaataaattaagtgggaaacaactatttgaaacagatcataatcttgacacatctgatatccagttcttggaggatgctggaaacaacgtggaggtagatgagtctttgttccaagaaatggatgacttggagctggaggatgatgaagatgatccagactataatcctgctgacccagagagtgactcagctgactaatggactgtccccatctgcagagaggcttgactgccacagcatctgtggctatgctcagagggttatgattttcctttctttttttctaagaaaaaattattttcaggagaatattcttctgatagctttcatcattgaacttaataaactgaccttaaaatttcaaat

SEQ ID NO: 426297 - DNA, 1101 bp, Homo sapiens
taccattctgatgttggcgcggactgtctgggctgctgcgcgccgcctaggtgtctgggcgatctatgggcaagagcaagggccacgatgacagattacggcgaggagcagcgcaacgagctggaggccctggagtccatctaccctgactccttcacagcttgattgcacattgatccaaccctcctaacaactagtcttccaaaatataaatggactctcctgataccacattctccttcagtagtgcttcacttgacaaggtcctgctaagtattatcagaaaatccacccagcttcaccattactgtgacgtctgaggctggagaaaatgatgaaactgtccagactaccctcaagtttacatacagtgaaaaatacccagatgaagctcccctttatgaaatattctcccaggaaaatctagaagataatgatgtctcagacattttaaaattactagcattacaggctgaagaaaatcttggtatggtgatgatttttactctagtgacagctgtgcaagaaaaattaaatgaaatagtagatcagataaaaactagaagagaagaagaaaagaaacaaaaagaaaaagaagcagaagaagctgaaaagcaattattccatggtactccagttacaattgagaatttcttaaattggaaagccaagtttgatgcagaactcttggaaattaaaaagaaaaggatgaaagaagaagaacaagcaggaaaaaataaattaagtgggaaacaactatttgaaacagatcataatcttgacacatctgatatccagttcttggaggatgctggaaacaacgtggaggtagatgagtctttgttccaagaaatggatgacttggagctggaggatgatgaagatgatccagactataatcctgctgacccagagagtgactcagctgactaatggactgtccccatctgcagagaggcttgactgccacagcatctgtggctatgctcagagggttatgattttcctttctttttttctaagaaaaaattattttcaggagaatattcttctgatagctttcatcattgaacttaataaactgaccttaaaatttcaaat

SEQ ID NO: 426298 - DNA, 886 bp, Homo sapiens
  misc_feature (44)..(44): n is a, c, g, or t
cacccccacccagcacaacgccgccggaaggagaaacgaaccangtgaggggttacaggtattatcagaaaatccacccagcttcaccattactgtgacgtctgaggctggagaaaatgatgaaactgtccagactaccctcaagtttacatacagtgaaaaatacccagatgaagctcccctttatgaaatattctcccaggaaaatctagaagataatgatgtctcagacattttaaaattactagcattacaggctgaagaaaatcttggtatggtgatgatttttactctagtgacagctgtgcaagaaaaattaaatgaaatagtagatcagataaaaactagaagagaagaagaaaagaaacaaaaagaaaaagaagcagaagaagctgaaaagcaattattccatggtactccagttacaattgagaatttcttaaattggaaagccaagtttgatgcagaactcttggaaattaaaaagaaaaggatgaaagaagaagaacaagcaggaaaaaataaattaagtgggaaacaactatttgaaacagatcataatcttgacacatctgatatccagttcttggaggatgctggaaacaacgtggaggtagatgagtctttgttccaagaaatggatgacttggagctggaggatgatgaagatgatccagactataatcctgctgacccagagagtgactcagctgactaatggactgtccccatctgcagagaggcttgactgccacagcatctgtggctatgctcagagggttatgattttcctttctttttttctaagaaaaaattattttcaggagaatattcttctgatagctttcatcattgaacttaataaactgaccttaaaatttcaaat

SEQ ID NO: 426299 - DNA, 1405 bp, Homo sapiens
gcggaggccggcgcggagctgcagttaagcaagccgggtctggctttgggccctgggccttccagccggggactctgcgcctgcgcccgcctggccgccgcccgctctcccggcgcggcagctgtctgggctgctgcgcgccgcctaggtgtctgggcgatctatgggcaagagcaagggccacgatgacagattacggcgaggagcagcgcaacgagctggaggccctggagtccatctaccctgactccttcacagtattatcagaaaatccacccagcttcaccattactgtgacgtctgaggctggagaaaatgatgaaactgtccagactaccctcaagtttacatacagtgaaaaatacccagatgaagctcccctttatgaaatattctcccaggaaaatctagaagataatgatgtctcagacattttaaaattactagcattacaggctgaagaaaatcttggtatggtgatgatttttactctagtgacagctgtgcaagaaaaattaaatgaaatagtagatcagataaaaactagaagagaagaagaaaagaaacaaaaagaaaaagaagcagaagaagctgaaaagcaattattccatggtactccagttacaattgagaatttcttaaattggaaagccaagtttgatgcagaactcttggaaattaaaaagaaaaggatgaaagaagaagaacaagcaggaaaaaataaattaagtgggaaacaactatttgaaacagatcataatcttgacacatctgatatccagttcttggaggatgctggaaacaacgtggaggtagatgagtctttgttccaagaaatggatgacttggagctggaggatgatgaagatgatccagactataatcctgctgacccagagagtgactcagctgactaatggactgtccccatctgcagagaggcttgactgccacagcatctgtggctatgctcagagggttatgattttcctttctttttttctaagaaaaaattattttcaggagaatattcttctgatagctttcatcattgaacttaataaactgaccttaaaatttcaaattaaaaacacacaaacaacacgcaaccagacacaacattgtgcgagcgcccacaattggccccatcaaaaaagctttttaagaaaccaatactggtatggaacccgcctggcccccagccaggatgctcgacacatgcggccataagcagggccccaaagaagaaacccgggtgcaagaacaaccggcgtgggattccccaacagatatataaaacgcccggggggaaaccaagcagtgcttggaaacaaacccgaagcgggcgcagaggacaaaagaggatctatccacagcggcaccagcgactacgatcaaattagcc

SEQ ID NO: 426300 - DNA, 415 bp, Homo sapiens
taccattctgatgttggcgcggactgtctgggctgctgcgcgccgcctaggtgtctgggcgatctatgggcaagagcaagggccacgatgacagattacggcgaggagcagcgcaacgagctggaggccctggagtccatctaccctgactccttcacagtattatcagaaaatccacccagcttcaccattactgtgacgtctgaggctggagaaaatgatgaaactgtccagactaccctcaagtttacatacagtgaaaaatacccagatgaagctcccctttatgaaatattctcccaggaaaatctagaagataatgatgtctcagacaatgtatatacattgtctgatgacaaggagtaactcatcttcaaagtgcaagtaagtctatttacaaccacaaaaaaggcaa

SEQ ID NO: 426301 - DNA, 686 bp, Homo sapiens
taatgtttttaaatagaaaagacctgtcaaaaactatcaaatgtgaatcaaatctccatttagtggtacatctttaaaaaatactttgtcagccgggcgcagttgttcacacctgtaatcccagcactttgggaggcccagatgggaggacagcttgaggccaagagctcaagcactcctgccacacttgtgcccctgcacccagcttgcaatagattttattctatattcaactgtgggggaagactgtattggaattgactgattccaatcgattggtgaagaatccactgataagactaaaatgtaacctcagtccaagaacagtaattttacaatgaattctaagtcttgcaggcactcaaaatatagtgctggtactcagtagagaatatactgcaataacttttaataaaaagtgacaaaataaaaatacacctactttatttaattcaagttttagattatttgtcattcatagtattttattttctatctccatatcaagaccacttacagcttaagaggcaggctaagggttgggtgcgggggctcacgcctgtaatcccagcacttagggaggccgaggcaggagaatggcatgaacccgggaggcggagcttgcagtgagctgagatcgcgccactgcactccagcctggacaacagagtgagactccgcctaaa

SEQ ID NO: 426302 - DNA, 5156 bp, Homo sapiens
  misc_feature (4213)..(4213): n is a, c, g, or t
agagaaaactcaacaaaagttgtatttctcatcactgatggatattccaatgggggagaccctagaccaattgcagcgtcactgcgagattcaggagtggagatcttcacttttggcatatggcaagggaacattcgagagctgaatgacatggcttccaccccaaaggaggagcactgttacctgctacacagttttgaagaatttgaggctttagctcgccgggcattgcatgaagatctaccttctgggagttttattcaagatgatatggtccactgctcatatctttgtgatgaaggcaaggactgctgtgaccgaatgggaagctgcaaatgtgggacacacacaggccattttgagtgcatctgtgaaaaggggtattacgggaaaggtctgcagtatgaatgcacagcttgcccatcggggacatacaaacctgaaggctcaccaggaggaatcagcagttgcattccatgtcctgatgaaaatcacacctctccacctggaagcacatcccctgaagactgtgtctgcagagagggatacagggcatctggccagacctgtgaacttgtccactgccctgccctgaagcctcccgaaaatggttactttatccaaaacacttgcaacaaccacttcaatgcagcctgtggggtccgatgtcaccctggatttgatcttgtgggaagcagcatcatcttatgtctacccaatggtttgtggtccggttcagagagctactgcagagtaagaacatgtcctcatctccgccagccgaaacatggccacatcagctgttctacaagggaaatgttatataagacaacatgtttggttgcctgtgatgaagggtacagactagaaggcagtgataagcttacttgtcaaggaaacagccagtgggatgggccagaaccccggtgtgtggagcgccactgttccacctttcagatgcccaaagatgtcatcatatccccccacaactgtggcaagcagccagccaaatttgggacgatctgctatgtaagttgccgccaagggttcattttatctggagtcaaagaaatgctgagatgtaccacttctggaaaatggaatgtcggagttcaggcagctgtgtgtaaagacgtggaggctcctcaaatcaactgtcctaaggacatagaggctaagactctggaacagcaagattctgccaatgttacctggcagattccaacagctaaagacaactctggtgaaaaggtgtcagtccacgttcatccagctttcaccccaccttaccttttcccaattggagatgttgctatcgtatacacggcaactgacctatccggcaaccaggccagctgcattttccatatcaaggttattgatgcagaaccacctgtcatagactggtgcagatctccacctcccgtccaggtctcggagaaggtacatgccgcaagctgggatgagcctcagttctcagacaactcaggggctgaattggtcattaccagaagtcatacacaaggagaccttttccctcaaggggagactatagtacagtatacagccactgacccctcaggcaataacaggacatgtgatatccatattgtcataaaaggttctccctgtgaaattccattcacacctgtaaatggggattttatatgcactccagataatactggagtcaactgtacattaacttgcttggagggctatgatttcacagaagggtctactgacaagtattattgtgcttatgaagatggcgtctggaaaccaacatataccactgaatggccagactgtgccaaaaaacgttttgcaaaccacgggttcaagtcctttgagatgttctacaaagcagctcgttgtgatgacacagatctgatgaagaagttttctgaagcatttgagacgaccctgggaaaaatggtcccatcattttgtagtgatgcagaggacattgactgcagactggaggagaacctgaccaaaaaatattgcctagaatataattatgactatgaaaatggctttgcaattggaccaggtggctggggtgcagctaataggctggattactcttacgatgacttcctggacactgtgcaagaaacagccacaagcatcggcaatgccaagtcctcacggattaaaagaagtgccccattatctgactataaaattaagttaatttttaacatcacagctagtgtgccattacccgatgaaagaaatgatacccttgaatgggaaaatcagcaacgactccttcagacattggaaactatcacaaataaactgaaaaggactctcaacaaagaccccatgtattcctttcagcttgcatcagaaatacttatagccgacagcaattcattagaaacaaaaaaggcttcccccttctgcagaccaggctcagtgctgagagggcgtatgtgtgtcaattgccctttgggaacctattataatctggaacatttcacctgtgaaagctgccggatcggatcctatcaagatgaagaagggcaacttgagtgcaagctttgcccctctgggatgtacacggaatatatccattcaagaaacatctctgattgtaaagctcagtgtaaacaaggcacctactcatacagtggacttgagacttgtgaatcgtgtccactgggcacttatcagccaaaatttggttcccggagctgcctctcgtgtccagaaaacacctcaactgtgaaaagaggagccgtgaacatttctgcatgtggagttccttgtccagaaggaaaattctcgcgttctgggttaatgccctgtcacccatgtcctcgtgactattaccaacctaatgcagggaaggccttctgcctggcctgtcccttttatggaactaccccattcgctggttccagatccatcacagaatgttcaagttttagttcaactttctcagcggcagaggaaagtgtggtgccccctgcctctcttggacatattaaaaagaggcatgaaatcagcagtcaggttttccatgaatgcttctttaacccttgccacaatagtggaacctgccagcaacttgggcgtggttatgtttgtctctgtccacttggatatacaggcttaaagtgtgaaacagacatcgatgagtgcagcccactgccttgcctcaacaatggagtttgtaaagacctagttggggaattcatttgtgagtgcccatcaggttacacaggtcagcggtgtgaagaaaatataaatgagtgtagctccagtccttgtttaaataaaggaatctgtgttgatggtgtggctggctatcgttgcacatgtgtgaaaggatttgtaggcctgcattgtgaaacagaagtcaatgaatgccagtcaaacccatgcttaaataatgcagtctgtgaagaccaggttgggggattcttgtgcaaatgcccacctggatttttgggtacccgatgtggaaagaacgtcgatgagtgtctcagtcagccatgcaaaaatggagctacctgtaaagacggtgccaatagcttcagatgcctgtgtgcagctggcttcacaggatcacactgtgaattgaacatcaatgaatgtcagtctaatccatgtagaaatcaggccacctgtgtggatgaattaaattcatacagttgtaaatgtcagccaggattttcaggcaaaaggtgtgaaacagaacagtctacaggctttaacctggattttgaagtttctggcatctatggatatgtcatgctagatggcatgctcccatctctccatgctctaacctgtaccttctggatgaaatcctctgacgacatgaactatggaacaccaatctcctatgcagttgataacggcagcgacaataccttgctcctgactgattataacggctgggttctttatgtgaatggcagggaaaagataacaaactgtccctcggtgaatgatggcagatggcatcatattgcaatcacttggacaagtgccaatggcatctggaaagtctatatcgatgggaaattatctgacggtggtgctggcctctctgttggtttgcccatacctggtatgttttaacaaaatgagtataattctgttggactctagaggtgatgctgcttaaatggacatcaggtttgctagcattgttgttcttggtttcaaacaaagattaacagctatctctctnatttcctactccctgattatcctaactgtgggttattagaagcttttttcctaagtaagctgtttgcctctctgtgtgagaaatgcctttgaagatctacattaagactaccaagaagcatgctgaattagcagctggttgctaaactgtcttctaaggagattaattactggtattttttgtttattttaaggattgttttgttttgtaatcagtatataagcaggaccactgctatccatcttttatggcccttttcaaatagatcttggcttgtcttctaaaaaatactttttaataaatatcccaggagttttagtttgaagaattgcaaactaaatttcattaggtgacccaggttctcagcattgtacatggcaataagcttgttctatctggatacatctatagaagtatatgcatatgacattattttttactttgctcatttgtttcaggtatactaaaagaaaattaaatagacaaaaatgaattaaagtattagaaactgactaatacattctagaagtaagttgtatgaaactaggatacgtatactaataaatatagcacaaaaatactaaacttcataaaaatgcggtgagatgacccttgcgaagcctcaaatacaatacttattttatttattagaaattattggccaggtacggtggctcacgcctgtaatcccagcactttggaaggctgaggagggtggatcacgaggtcaggagttggagaccgccctggacaatatggtgaagccctatctctactaaaaacgcacagaaaaattagccaggcatggtggtagatgcctgtaattccagctactcaggaggctgaggcaggagaatcgcttgaacccaggaggcgaagattgccgtgagccgagatcatgccactgcactccagcctgggcaatggagagaggctctgtctc

SEQ ID NO: 426303 - DNA, 2372 bp, Homo sapiens
agagaaaactcaacaaaagttgtatttctcatcactgatggatattccaatgggggagaccctagaccaattgcagcgtcactgcgagattcaggagtggagatcttcacttttggcatatggcaagggaacattcgagagctgaatgacatggcttccaccccaaaggaggagcactgttacctgctacacagttttgaagaatttgaggctttagctcgccgggcattgcatgaagatctaccttctgggagttttattcaagatgatatggtccactgctcatatctttgtgatgaaggcaaggactgctgtgaccgaatgggaagctgcaaatgtgggacacacacaggccattttgagtgcatctgtgaaaaggggtattacgggaaaggtctgcagtatgaatgcacagcttgcccatcggggacatacaaacctgaaggctcaccaggaggaatcagcagttgcattccatgtcctgatgaaaatcacacctctccacctggaagcacatcccctgaagactgtgtctgcagagagggatacagggcatctggccagacctgtgaacttgtccactgccctgccctgaagcctcccgaaaatggttactttatccaaaacacttgcaacaaccacttcaatgcagcctgtggggtccgatgtcaccctggatttgatcttgtgggaagcagcatcatcttatgtctacccaatggtttgtggtccggttcagagagctactgcagagtaagaacatgtcctcatctccgccagccgaaacatggccacatcagctgttctacaagggaaatgttatataagacaacatgtttggttgcctgtgatgaagggtacagactagaaggcagtgataagcttacttgtcaaggaaacagccagtgggatgggccagaaccccggtgtgtggagcgccactgttccacctttcagatgcccaaagatgtcatcatatccccccacaactgtggcaagcagccagccaaatttgggacgatctgctatgtaagttgccgccaagggttcattttatctggagtcaaagaaatgctgagatgtaccacttctggaaaatggaatgtcggagttcaggcagctgtgtgtaaagacgtggaggctcctcaaatcaactgtcctaaggacatagaggctaagactctggaacagcaagattctgccaatgttacctggcagattccaacagctaaagacaactctggtgaaaaggtgtcagtccacgttcatccagctttcaccccaccttaccttttcccaattggagatgttgctatcgtatacacggcaactgacctatccggcaaccaggccagctgcattttccatatcaaggttattgatgcagaaccacctgtcatagactggtgcagatctccacctcccgtccaggtctcggagaaggtacatgccgcaagctgggatgagcctcagttctcagacaactcaggggctgaattggtcattaccagaagtcatacacaaggagaccttttccctcaaggggagactatagtacagtatacagccactgacccctcaggcaataacaggacatgtgatatccatattgtcataaaaggttctccctgtgaaattccattcacacctgtaaatggggattttatatgcactccagataatactggagtcaactgtacattaacttgcttggagggctatgatttcacagaagggtctactgacaagtattattgtgcttatgaagatggcgtctggaaaccaacatataccactgaatggccagactgtgccaaaaaacgttttgcaaaccacgggttcaagtcctttgagatgttctacaaagcagctcgttgtgatgacacagatctgatgaagaagttttctgaagcatttgagacgaccctgggaaaaatggtcccatcattttgtagtgatgcagaggacattgactgcagactggaggagaacctgaccaaaaaatattgcctagaatataattatgactatgaaaatggctttgcaattggtaattaaattctgtggcatcggtagttggcaagactaatctgcaaaataagaataattccagaaaagtgaggcaaactagaaacattaacttctattaatttattcatcaagtattttaggatggctaaataatttgataatgtgctgaaagatcattaaggttatatcaaattttagtaacaaataaattatttaaaattatttgccaggattcttaaaaatgacaaaaactaagaaaactaagtcacatatgctggtaaaattcaaatgttgatgtatcctaaaagagaatagtaataaagtcctaacagcaactttta

SEQ ID NO: 426304 - DNA, 4809 bp, Homo sapiens
agagaaaactcaacaaaagttgtatttctcatcactgatggatattccaatgggggagaccctagaccaattgcagcgtcactgcgagattcaggagtggagatcttcacttttggcatatggcaagggaacattcgagagctgaatgacatggcttccaccccaaaggaggagcactgttacctgctacacagttttgaagaatttgaggctttagctcgccgggcattgcatgaagatctaccttctgggagttttattcaagatgatatggtccactgctcatatctttgtgatgaaggcaaggactgctgtgaccgaatgggaagctgcaaatgtgggacacacacaggccattttgagtgcatctgtgaaaaggggtattacgggaaaggtctgcagtatgaatgcacagcttgcccatcggggacatacaaacctgaaggctcaccaggaggaatcagcagttgcattccatgtcctgatgaaaatcacacctctccacctggaagcacatcccctgaagactgtgtctgcagagagggatacagggcatctggccagacctgtgaacttgtccactgccctgccctgaagcctcccgaaaatggttactttatccaaaacacttgcaacaaccacttcaatgcagcctgtggggtccgatgtcaccctggatttgatcttgtgggaagcagcatcatcttatgtctacccaatggtttgtggtccggttcagagagctactgcagagtaagaacatgtcctcatctccgccagccgaaacatggccacatcagctgttctacaagggaaatgttatataagacaacatgtttggttgcctgtgatgaagggtacagactagaaggcagtgataagcttacttgtcaaggaaacagccagtgggatgggccagaaccccggtgtgtggagcgccactgttccacctttcagatgcccaaagatgtcatcatatccccccacaactgtggcaagcagccagccaaatttgggacgatctgctatgtaagttgccgccaagggttcattttatctggagtcaaagaaatgctgagatgtaccacttctggaaaatggaatgtcggagttcaggcagctgtgtgtaaagacgtggaggctcctcaaatcaactgtcctaaggacatagaggctaagactctggaacagcaagattctgccaatgttacctggcagattccaacagctaaagacaactctggtgaaaaggtgtcagtccacgttcatccagctttcaccccaccttaccttttcccaattggagatgttgctatcgtatacacggcaactgacctatccggcaaccaggccagctgcattttccatatcaaggttattgatgcagaaccacctgtcatagactggtgcagatctccacctcccgtccaggtctcggagaaggtacatgccgcaagctgggatgagcctcagttctcagacaactcaggggctgaattggtcattaccagaagtcatacacaaggagaccttttccctcaaggggagactatagtacagtatacagccactgacccctcaggcaataacaggacatgtgatatccatattgtcataaaaggttctccctgtgaaattccattcacacctgtaaatggggattttatatgcactccagataatactggagtcaactgtacattaacttgcttggagggctatgatttcacagaagggtctactgacaagtattattgtgcttatgaagatggcgtctggaaaccaacatataccactgaatggccagactgtgccaaaaaacgttttgcaaaccacgggttcaagtcctttgagatgttctacaaagcagctcgttgtgatgacacagatctgatgaagaagttttctgaagcatttgagacgaccctgggaaaaatggtcccatcattttgtagtgatgcagaggacattgactgcagactggaggagaacctgaccaaaaaatattgcctagaatataattatgactatgaaaatggctttgcaattggaccaggtggctggggtgcagctaataggctggattactcttacgatgacttcctggacactgtgcaagaaacagccacaagcatcggcaatgccaagtcctcacggattaaaagaagtgccccattatctgactataaaattaagttaatttttaacatcacagctagtgtgccattacccgatgaaagaaatgatacccttgaatgggaaaatcagcaacgactccttcagacattggaaactatcacaaataaactgaaaaggactctcaacaaagaccccatgtattcctttcagcttgcatcagaaatacttatagccgacagcaattcattagaaacaaaaaaggcttcccccttctgcagaccaggctcagtgctgagagggcgtatgtgtgtcaattgccctttgggaacctattataatctggaacatttcacctgtgaaagctgccggatcggatcctatcaagatgaagaagggcaacttgagtgcaagctttgcccctctgggatgtacacggaatatatccattcaagaaacatctctgattgtaaagctcagtgtaaacaaggcacctactcatacagtggacttgagacttgtgaatcgtgtccactgggcacttatcagccaaaatttggttcccggagctgcctctcgtgtccagaaaacacctcaactgtgaaaagaggagccgtgaacatttctgcatgtggagttccttgtccagaaggaaaattctcgcgttctgggttaatgccctgtcacccatgtcctcgtgactattaccaacctaatgcagggaaggccttctgcctggcctgtcccttttatggaactaccccattcgctggttccagatccatcacagaatgttcaagttttagttcaactttctcagcggcagaggaaagtgtggtgccccctgcctctcttggacatattaaaaagaggcatgaaatcagcagtcaggttttccatgaatgcttctttaacccttgccacaatagtggaacctgccagcaacttgggcgtggttatgtttgtctctgtccacttggatatacaggcttaaagtgtgaaacagacatcgatgagtgcagcccactgccttgcctcaacaatggagtttgtaaagacctagttggggaattcatttgtgagtgcccatcaggttacacaggtcagcggtgtgaagaaaatataaatgagtgtagctccagtccttgtttaaataaaggaatctgtgttgatggtgtggctggctatcgttgcacatgtgtgaaaggatttgtaggcctgcattgtgaaacagaagtcaatgaatgccagtcaaacccatgcttaaataatgcagtctgtgaagaccaggttgggggattcttgtgcaaatgcccacctggatttttgggtacccgatgtggaaagaacgtcgatgagtgtctcagtcagccatgcaaaaatggagctacctgtaaagacggtgccaatagcttcagatgcctgtgtgcagctggcttcacaggatcacactgtgaattgaacatcaatgaatgtcagtctaatccatgtagaaatcaggccacctgtgtggatgaattaaattcatacagttgtaaatgtcagccaggattttcaggcaaaaggtgtgaaacagaacagtctacaggctttaacctggattttgaagtttctggcatctatggatatgtcatgctagatggcatgctcccatctctccatgctctaacctgtaccttctggatgaaatcctctgacgacatgaactatggaacaccaatctcctatgcagttgataacggcagcgacaataccttgctcctgactgattataacggctgggttctttatgtgaatggcagggaaaagataacaaactgtccctcggtgaatgatggcagatggcatcatattgcaatcacttggacaagtgccaatggcatctggaaagtctatatcgatgggaaattatctgacggtggtgctggcctctctgttggtttgcccatacctggtggtggtgcgttagttctggggcaagagcaagacaaaaaaggagagggattcagcccagctgagtcttttgtgggctccataagccagctcaacctctgggactatgtcctgtctccacagcaggtgaagtcactggctacctcctgcccagaggaactcagtaaaggaaacgtgttagcatggcctgatttcttgtcaggaattgtggggaaagtgaagatcgattctaagagcatattttgttctgattgcccacgcttaggagggtcagtgcctcatctgagaactgcatctgaagatttaaagccaggttccaaagtcaatctgttctgtgatccaggcttccagctggtcgggaaccctgtgcagtactgtctgaatcaaggacagtggacacaaccacttcctcactgtgaacgcattagctgtggggtgccacctcctttggagaatggcttccattcagccgatgacttctatgctggcagcacagtaacctaccagtgcaacaatggctactatctattgggtgactcaaggatgttctgtacagataatgggagctggaacggcgtttcaccatcctgccttgatgtcgatgagtgtgcagttggatcagattgtagtgagcatgcttcttgcctgaacgtagatggatcctacatatgttcatgtgtcccaccgtacacaggagatgggaaaaactgtgcaggtaac

SEQ ID NO: 426305 - DNA, 3242 bp, Homo sapiens
agagaaaactcaacaaaagttgtatttctcatcactgatggatattccaatgggggagaccctagaccaattgcagcgtcactgcgagattcaggagtggagatcttcacttttggcatatggcaagggaacattcgagagctgaatgacatggcttccaccccaaaggaggagcactgttacctgctacacagttttgaagaatttgaggctttagctcgccgggcattgcatgaagatctaccttctgggagttttattcaagatgatatggtccactgctcatatctttgtgatgaaggcaaggactgctgtgaccgaatgggaagctgcaaatgtgggacacacacaggccattttgagtgcatctgtgaaaaggggtattacgggaaaggtctgcagtatgaatgcacagcttgcccatcggggacatacaaacctgaaggctcaccaggaggaatcagcagttgcattccatgtcctgatgaaaatcacacctctccacctggaagcacatcccctgaagactgtgtctgcagagagggatacagggcatctggccagacctgtgaacttgtccactgccctgccctgaagcctcccgaaaatggttactttatccaaaacacttgcaacaaccacttcaatgcagcctgtggggtccgatgtcaccctggatttgatcttgtgggaagcagcatcatcttatgtctacccaatggtttgtggtccggttcagagagctactgcagagtaagaacatgtcctcatctccgccagccgaaacatggccacatcagctgttctacaagggaaatgttatataagacaacatgtttggttgcctgtgatgaagggtacagactagaaggcagtgataagcttacttgtcaaggaaacagccagtgggatgggccagaaccccggtgtgtggagcgccactgttccacctttcagatgcccaaagatgtcatcatatccccccacaactgtggcaagcagccagccaaatttgggacgatctgctatgtaagttgccgccaagggttcattttatctggagtcaaagaaatgctgagatgtaccacttctggaaaatggaatgtcggagttcaggcagctgtgtgtaaagacgtggaggctcctcaaatcaactgtcctaaggacatagaggctaagactctggaacagcaagattctgccaatgttacctggcagattccaacagctaaagacaactctggtgaaaaggtgtcagtccacgttcatccagctttcaccccaccttaccttttcccaattggagatgttgctatcgtatacacggcaactgacctatccggcaaccaggccagctgcattttccatatcaaggttattgatgcagaaccacctgtcatagactggtgcagatctccacctcccgtccaggtctcggagaaggtacatgccgcaagctgggatgagcctcagttctcagacaactcaggggctgaattggtcattaccagaagtcatacacaaggagaccttttccctcaaggggagactatagtacagtatacagccactgacccctcaggcaataacaggacatgtgatatccatattgtcataaaaggttctccctgtgaaattccattcacacctgtaaatggggattttatatgcactccagataatactggagtcaactgtacattaacttgcttggagggctatgatttcacagaagggtctactgacaagtattattgtgcttatgaagatggcgtctggaaaccaacatataccactgaatggccagactgtgccaaaaaacgttttgcaaaccacgggttcaagtcctttgagatgttctacaaagcagctcgttgtgatgacacagatctgatgaagaagttttctgaagcatttgagacgaccctgggaaaaatggtcccatcattttgtagtgatgcagaggacattgactgcagactggaggagaacctgaccaaaaaatattgcctagaatataattatgactatgaaaatggctttgcaattggaccaggtggctggggtgcagctaataggctggattactcttacgatgacttcctggacactgtgcaagaaacagccacaagcatcggcaatgccaagtcctcacggattaaaagaagtgccccattatctgactataaaattaagttaatttttaacatcacagctagtgtgccattacccgatgaaagaaatgatacccttgaatgggaaaatcagcaacgactccttcagacattggaaactatcacaaataaactgaaaaggactctcaacaaagaccccatgtattcctttcagcttgcatcagaaatacttatagccgacagcaattcattagaaacaaaaaaggcttcccccttctgcagaccaggctcagtgctgagagggcgtatgtgtgtcaattgccctttgggaacctattataatctggaacatttcacctgtgaaagctgccggatcggatcctatcaagatgaagaagggcaacttgagtgcaagctttgcccctctgggatgtacacggaatatatccattcaagaaacatctctgattgtaaaggtagaggcttactggacatttcaactagaagcagcccaatttttgtttcccttttgggggaaagaaagatttattttcttcacccaacactcggctcttgtctgaggcccctgtggcaaaagatagatttgcaagagaaaagcatacacatttattcaatataagttttaggtgacataggagcctccagaaatgaatcagggaaacctgtatatttttatgctaaattggataaagaagaggatagttgtggagtagaatgacctattgggaataagctaggtggagcttagcaagtcttgtttgttcagattcttcaatgtatccctgtatcttcagggctaagaatattcttttcctctgagtatagggtgggcatttctcacatgagggttttacagtctgcttcaaaggggaaggtccaagaattatttctaggttttatgatctcctaaaggaaagaaaggcagaagttcagagacactttcctgcttctatggttttctcaaatttccttcggcttgaaatattcagtatgccaaggcaaggtatgatatttaggggtagggtgttctaagccccatcacagtcctgaaatctaaatggcaaataaaatgaaacaatagtatac

SEQ ID NO: 426306 - DNA, 2545 bp, Homo sapiens
agagaaaactcaacaaaagttgtatttctcatcactgatggatattccaatgggggagaccctagaccaattgcagcgtcactgcgagattcaggagtggagatcttcacttttggcatatggcaagggaacattcgagagctgaatgacatggcttccaccccaaaggaggagcactgttacctgctacacagttttgaagaatttgaggctttagctcgccgggcattgcatgaagatctaccttctgggagttttattcaagatgatatggtccactgctcatatctttgtgatgaaggcaaggactgctgtgaccgaatgggaagctgcaaatgtgggacacacacaggccattttgagtgcatctgtgaaaaggggtattacgggaaaggtctgcagtatgaatgcacagcttgcccatcggggacatacaaacctgaaggctcaccaggaggaatcagcagttgcattccatgtcctgatgaaaatcacacctctccacctggaagcacatcccctgaagactgtgtctgcagagagggatacagggcatctggccagacctgtgaacttgtccactgccctgccctgaagcctcccgaaaatggttactttatccaaaacacttgcaacaaccacttcaatgcagcctgtggggtccgatgtcaccctggatttgatcttgtgggaagcagcatcatcttatgtctacccaatggtttgtggtccggttcagagagctactgcagagtaagaacatgtcctcatctccgccagccgaaacatggccacatcagctgttctacaagggaaatgttatataagacaacatgtttggttgcctgtgatgaagggtacagactagaaggcagtgataagcttacttgtcaaggaaacagccagtgggatgggccagaaccccggtgtgtggagcgccactgttccacctttcagatgcccaaagatgtcatcatatccccccacaactgtggcaagcagccagccaaatttgggacgatctgctatgtaagttgccgccaagggttcattttatctggagtcaaagaaatgctgagatgtaccacttctggaaaatggaatgtcggagttcaggcagctgtgtgtaaagacgtggaggctcctcaaatcaactgtcctaaggacatagaggctaagactctggaacagcaagattctgccaatgttacctggcagattccaacagctaaagacaactctggtgaaaaggtgtcagtccacgttcatccagctttcaccccaccttaccttttcccaattggagatgttgctatcgtatacacggcaactgacctatccggcaaccaggccagctgcattttccatatcaaggttattgatgcagaaccacctgtcatagactggtgcagatctccacctcccgtccaggtctcggagaaggtacatgccgcaagctgggatgagcctcagttctcagacaactcaggggctgaattggtcattaccagaagtcatacacaaggagaccttttccctcaaggggagactatagtacagtatacagccactgacccctcaggcaataacaggacatgtgatatccatattgtcataaaaggttctccctgtgaaattccattcacacctgtaaatggggattttatatgcactccagataatactggagtcaactgtacattaacttgcttggagggctatgatttcacagaagggtctactgacaagtattattgtgcttatgaagatggcgtctggaaaccaacatataccactgaatggccagactgtgccaaaaaacgttttgcaaaccacgggttcaagtcctttgagatgttctacaaagcagctcgttgtgatgacacagatctgatgaagaagttttctgaagcatttgagacgaccctgggaaaaatggtcccatcattttgtagtgatgcagaggacattgactgcagactggaggagaacctgaccaaaaaatattgcctagaatataattatgactatgaaaatggctttgcaattggaccaggtggctggggtgcagctaataggctggattactcttacgatgacttcctggacactgtgcaagaaacagccacaagcatcggcaatgccaagtcctcacggattaaaagaagtgccccattatctgactataaaattaagttaatttttaacatcacagctagtgtgccattacccgatgaaagaaatgatacccttgaatgggaaaatcagcaacgactccttcagacattggaaactatcacaaataaactgaaaaggactctcaacaaagaccccatgtattcctttcagcttgcatcagaaatacttatagccgacagcaattcattagaaacaaaaaaggcttcccccttctgcagaccaggctcagtgctgagagggcgtatgtgtggtaaggactgttccctgtgatccaaaaatatttggtgcatactgggtcaaatgagatgggtgtagccattttacaactataaagggatattgaaat

SEQ ID NO: 426307 - DNA, 809 bp, Homo sapiens
cggagttcaggcagctgtgtgtaaaggtaggtctctacactagtcaggctaaaaatcaaattttttaatattgccatatgggtgcagtataggacaatccttctttgcaacttttgctgcaaacccatgataatatggttaggtgctaccccaatatcctctatgaggatttctggttgaaagtggtgaatttacaaaatctgattacaaaatgccagacaatgacagaagaaatacacaaataaggaaaatagtagagctgaaaatcaggtaagttttccataagactaaaatctttagggaagtcttggtctatataaagcaggtgagactgaattgattttcaaaaagaagctatcagcactttgaaacctggcatcacattccattcacaagaggacattgccattttctctgcaacaagagcagaccgctatgaaaaaggagttactgaaaacagaaaagagttcttagaagtaaaaaatgtcctatctctaagagaaggacaagggcagatgaatggaaggaatgctgttgaaaactatattagtaatttaaaagaccaaactgagagtttcctcacaatggagaactgaatgagtaaacaaagaaagtgcttgaatttcccaattgatcaaaccaaaaagatggaagttgagggatgccagtggcagaaggaaaaaccccaatgtccatttaataaggagttccagaaggagagaggagaggagatggagaaaaatttctctaccaagagaagaaaatttctctgagctagagaatggcttaatcctttagaccacaaataa

SEQ ID NO: 426308 - DNA, 599 bp, Homo sapiens
atcttatgtctacccaatggtttgtggtccggttcagagagctactgcagaggtatgcaaactgccaatttacattgtttatttactgtcttgcctgatttccttgatttaaactctagtaaaccagtcagttcttcatttctttttggatttcatagaccccatactacagaaagagaaaaattataggaaatttgaaatcagaattaccaagttcaattgaccacataattgtaaactacgccttttatagcccttttatgaacaagcaaagaaaaagtttgcctgggaagtaaatggacaggttaccccaaacctcaaatttcaagcctctaagacatgatataaaggagagtttagaataatcagagtggagactgatgcctcttggaattgtaggacttaaggaatcacacaagtatcctgcaacaagagcagttagccaacttgtaatctccagcctttacttcggctagtcgacccgttatagaaagtagagaatttgtcaaagcgagagtccaaggagcctattcaggccaatagaaagtgggcaccaccaatggaatctgaggctcccatgtcaaatacagagaagcaat

SEQ ID NO: 426309 - DNA, 326 bp, Homo sapiens
tggatctcaaaccagtttgatgggctccacagcctccattccaatcctctagaagcagcatcctccagggagtcaacactttagttacagtgttcccagggagttaatcatttgggctgtttctcttccttctccatcctcaggcctgcattgtgaaacagaagtcaatgaatgccagtcaaacccatgcttaaataatgcagtctgtgaagaccaggttgggggattcttgtgcaaatgcccacctggatttttgggtacccgatgtggaaagaacgtcgatgagtgtctcagtcagccatgcaaaaatggagctacctgtaaag

SEQ ID NO: 426310 - DNA, 422 bp, Homo sapiens
taatgatgtatgccatccatctctgttttcttttttaaaatataagtgaaacaaaatatatgtggctttacccactctgacaaccagaatcttgaccatagtgttagatatagtccacttactggcatatttgccacactgacatgtttttctattaattgattaggttttagttcaactttctcagcggcagaggaaagtgtggtgccccctgcctctcttggacatattaaaaagaggcatgaaatcagcagtcaggcaagttcattttgcataaactgttctctagtggaatgcttggaaagcaatttgtcattttacacatcacacacaggaaaaggaccaggattgaaactttaagtaatcaagatgtatgaattttataaatgaataattgtatttacaatgactcctgtttagaa

SEQ ID NO: 426311 - DNA, 1434 bp, Homo sapiens
tcaggctttcatcttgcctcttttaaaataattataaatgacactggtaaaggtacatatatcaagagtaggcattaattttcaagggctaaaatgtcattaacttcggtataaaccaaactgtactagagaggaagactgtgtccctgaatgatggcagtttaagtctgagttttactgtgagttaaaaccctctgaatttccagatgataattccatttttaatccatttggaatgctgaaagctacaaaaatgtatttcctgtcagtaaacatttgttgttttatttttgtgtttaattaaaagtttatttttcccctttaaatctttgaaggaaagaaggtttttttgtttttttgtttgtttttgtcagaatagttcatggtaaactttgcaattacagatgatagtgaaaaaaaaccccagcgacgcaatcgtagccgcaggcgtcgcttcaggggtcaggcagaagatagacagccaggtaacttgagtggacctgtggacaccatcaggtcacaagcatgaaaaaaatgtcatatgtctgctttctaaatatattatacttacatgtacacatgtgtgcatatacattcaaaatttgcattgcataaattgtttattcaactaataagactactactattaagaaaatgcattcttccttcacagtgtgttagtaacttgtctaattgaactaatgttgtgtcctaattgtttacatggaaatactgttgagaagaccattttgttcacttggcagtttcttcacacttgagatggggcctgccatccgagggactgtgttgtagattgtgatcaaggttgattggcaaaactgggcagcttttgcatggtgcctgcttactatatctgaattcagcacctcatttttgtgggagttgtaatacccacaattaaaaaaaaagtataaaagagaaaaatatttgaaggtgtctttaacctaatgcgaggaatgcatgttgtttttgtttgtttattgtagtgtgatgccttttcccttacacctactaactattcaaattaataatacttacttagttttagaatgtttattttatgtagtcattaatttttagtaacttcaaagaaacttgtttgctgtgtctattattttgaacataattccatttcctgtgtacagagaatcacatgtatattcacaatgaagcaattgtgtgcaccagaaataaacccctttcaaactaatcaatttttgcattctttccaaaaccagttctttcatgtgttttccccaaataaagaatgtaaattctggcatctttactattttaaatttagtggttgtagagacatttgggaaaactggttaagagaattagttcccatccctaaaagttcatgttttaaagatagttggaaatttttagagcaattaaatattgtcaaaa

SEQ ID NO: 426312 - DNA, 978 bp, Homo sapiens
  misc_feature (934)..(934): n is a, c, g, or t
  misc_feature (944)..(945): n is a, c, g, or t
  misc_feature (953)..(953): n is a, c, g, or t
  misc_feature (966)..(966): n is a, c, g, or t
tcaggctttcatcttgcctcttttaaaataattataaatgacactggtaaaggtacatatatcaagagtaggcattaattttcaagggctaaaatgtcattaacttcggtataaaccaaactgtactagagaggaagactgtgtccctgaatgatggcagtttaagtctgagttttactgtgagttaaaaccctctgaatttccagatgataattccatttttaatccatttggaatgctgaaagctacaaaaatgtatttcctgtcagtaaacatttgttgttttatttttgtgtttaattaaaagtttatttttcccctttaaatctttgaaggaaagaaggtttttttgtttttttgtttgtttttgtcagaatagttcatggtaaactttgcaattacagatgatagtgaaaaaaaaccccagcgacgcaatcgtagccgcaggcgtcgcttcaggggtcaggcagaagatagacagccaggtaacttgagtggacctgtggacaccatcaggtcacaagcatgaaaaaaatgtcatatgtctgctttctaaatatattatacttacatgtacacatgtgtgcatatacattcaaaatttgcattgcataaattgtttattcaactaataagactactactattaagaaaatgcattcttccttcacagtgtgttagtaacttgtctaattgaactaatgttgtgtcctaattgtttacatggaaatactgttgagaagaccattttgttcacttggcagtttcttcacacttgagatggggcctgccatccgagggactgtgttgtagattgtgatcaaggttgattggcaaaactgggcagcttttgcatggtgcctgcttactatatctgaattcagcacctcatttttgtgggagttgtaatacccacaattaaaaaaaaaacctngtgcccaatnnttggcctngagggcccaattnccttatatgagt

SEQ ID NO: 426313 - DNA, 244 bp, Homo sapiens
  misc_feature (53)..(53): n is a, c, g, or t
gcccctcccccctcctcccctctggttggaaagtttctagaatctcttcccgnggggcctttgcggttccaacatggcggagctgacggtggaggttcgcggctctaacggggctttctacaagggatttatcaaagatgttcatgaagactcccttacagttgtttttgaaaataattggcaaccagaacgccaggttccatttaatgaagttagattaccaccaccacctgatataaaaaaa

SEQ ID NO: 426314 - DNA, 973 bp, Homo sapiens
gcctatctaaaggaagtagaactagcgaagaaaggaacgcctacagattaagaaacagcgacgacaaataatcatataatatcgaacgagacaaccaccaaagaagtcgcatgagagttaggatagaatataagatccatctaaataaaaaatgaccaactactatactgatacaaggttctaggtcttatagcggaagaaacagaaaaacgtacaaaaacctaataaacacctccagattatggtacaaattctgagctgtctaacccctctgaaacggaatctgagcgtaaagacgagctgagtgattggtcattggcaggagaagatgatcgagacagccgacatcagcgtgacagcaggagacgcccaggaggaagaggcagaagtgtttcagggggtcgaggtcgtggtggaccacgtggtggcaaatcctccatcagttctgtgctcaatagatccagacagcaagatccatagcagcgtaacgtatgataaaaactgaaatcagaggcatactactagatctgagaagcctgctaggtcactgatactgtacaatccagctaatacaagatgcaaggagtaaaaatcaaaatattaaatctaacaggagtaagaagaacaatggacatatacatgtacaggtatttattaagttttattcttctacaaataatgagctggacttctaacatgacaaatggcttcccatgagtatcgtgaacattactgactaaacacaacaacacgggtctaaaaaatagaatctggggaaattcgggtaaacacgcctggattaagcggacaggggagcgcaaacgcgcacttgtcggccgtgttgttgtgtccgctgtttgttcctttgccgtccccggacggggggccatgacaccgcaaactgtttttttggggtttgcttgtgttgtttgttttgttgtgttgttcttggtgtttgtgttgtgtgtttgtg

SEQ ID NO: 426315 - DNA, 487 bp, Homo sapiens
gtaaagacccctggtgattggtcattggcaggagaagatgatcgagatcagccgacatcagcgtgacagcaggagacgcccaggaggaagaggcagaagtgtttcagggggtcgaggtcgtggtggaccacgttggtggcaaatcctccatcagttatggtacaaattctgagctgtctaacccctctgaaacggaatctgagcgtaaagacgagctgagtgattggtcattggcaggagaagatgatcgagacagccgacatcagcgtgacagcaggagacgcccaggaggaagaggcagaagtgtttcagggggtcgaggtcgtggtggaccacgtggtggcaaatcctccatcagttctggtacaaattctgagctgtctaacccctctgaaacggaatctgagcgtaaagacgagctgagtgataggtcattggcaggagaagatgatcgagacagccgacatcagcgtgacagcaggagacg

SEQ ID NO: 426316 - DNA, 553 bp, Homo sapiens
catatactggaacattcagaatctacggagagagtgctgatgctgtaaaaaaaggctagaggtttcttggaatttgttgtgagagaagatttaatgggcctggcaataggaacacatggtagtaacatccagcaagctaggaaggttcctggagttaccgccattgagctagatgaagatactggaacattcagaatctacggagagagtgctgatgctgtaaaaaaggctagaggtttcttggaatttgtggaggattttattcaggttcctaggaatctcgttggtaggtacttttactaaatgttaaataagttaataaacattatttagttacatatagcgacttaattgaaaactagtcttgtagtctgataaccttattccagttatgtgtagatttatttagatagcaatacttcttttctttttttggtgataacattttgtgtaacttgttattgtcatatgttaaaaagtaaagatgtttcttctgtacaggatgactcactaataaggcccagggtttttataagtttgtcattacagtttt

SEQ ID NO: 426317 - DNA, 418 bp, Homo sapiens
tcacaatactaaataactgccttgctgaactaatacctgaggtgttccagggatgtacatttacttttgctaattcccaggtagatgacaccgggtgaaaaatgaggttcagagaggttaagtaacttaaaagatcatgtgtctcataaatagaatagatggaaatcaaactcacatctgcctaattccaaaccttgtgttcttttagtactccctattatctttgaactaatacaaccttttagagttacgaagtgctttaatatctatgcttttataatgtttttgtgtcttgcagggatttatcaaagatgttcatgaagactcccttacagttgtttttgaaaataattggcaaccagaacgccaggttccatttaatgaagttagattaccaccaccacctgatataaaaaaa

SEQ ID NO: 426318 - DNA, 293 bp, Homo sapiens
  misc_feature (53)..(53): n is a, c, g, or t
gcccctcccccctcctcccctctggttggaaagtttctagaatctcttcccgnggggcctttgcggttccaacatggcggagctgacggtggaggttcgcggctctaacggggctttctacaaggccatttaagcacccgtctaaaaaaaaatgagtagatcttcatagtaaggtaggatctacaagacacaaactgaagagaaaagcgaagttcagaacaaattgtagcaaatgtttaacaatttaaaggagatttgtatattattaaaattacattttttcctgtgaatta

SEQ ID NO: 426319 - DNA, 2790 bp, Homo sapiens
ctcaaggatccttatttttttaatccccccccccccccccccccgggcctttgcggttccaacatggcggagctgacggtggaggttcgcggctctaacggggctttctacaagggatttatcaaagatgttcatgaagactcccttacagttgtttttgaaaataattggcaaccagaacgccaggttccatttaatgaagttagattaccaccaccacctgatataaaaaaagaaattagtgaaggagatgaagtagaggtatattcaagagcaaatgaccaagagccatgtgggtggtggttggctaaagttcggatgatgaaaggagaattttatgtcattgaatatgctgcttgtgacgctacttacaatgaaatagtcacatttgaacgacttcggcctgtcaatcaaaataaaactgtcaaaaaaaataccttctttaaatgcacagtggatgttcctgaggatttgagagaggcgtgtgctaatgaaaatgcacataaagattttaagaaagcagtaggagcatgcagaattttttaccatccagaaacaacacagctaatgatactgtctgccagtgaagcaactgtgaagagagtaaacatcttaagtgacatgcatttgcgaagtattcgtacgaagttgatgcttatgtccagaaatgaagaggccactaagcatttagaatgcacaaaacaacttgcagcagcttttcatgaggaatttgttgtgagagaagatttaatgggcctggcaataggaacacatggtagtaacatccagcaagctaggaaggttcctggagttaccgccattgagctagatgaagatactggaacattcagaatctacggagagagtgctgatgctgtaaaaaaggctagaggtttcttggaatttgtggaggattttattcaggttcctaggaatctcgttggaaaagtaattggaaaaaatggcaaagttattcaagaaatagtggacaaatctggtgtggttcgagtgagaattgaaggggacaatgaaaataaattacccagagaagacggtatggttccatttgtatttgttggcactaaagaaagcattggaaatgtgcaggttcttctagagtatcatattgcctatctaaaggaagtagaacagctaagaatggaacgcctacagattgatgaacagctgcgacagattggttctaggtcttatagcggaagaggcagaggtcgtcggggacctaattacacctccggttatggtacaaattctgagctgtctaacccctctgaaacggaatctgagcgtaaagacgagctgagtgattggtcattggcaggagaagatgatcgagacagccgacatcagcgtgacagcaggagacgcccaggaggaagaggcagaagtgtttcagggggtcgaggtcgtggtggaccacgtggtggcaaatcctccatcagttctgtgctcaaagatccagacagcaatccatacagcttacttgataatacagaatcagatcagactgcagacactgatgccagcgaatctcatcacagtactaaccgtcgtaggcggtctcgtagacgaaggactgatgaagatgctgttctgatggatggaatgactgaatctgatacagcttcagttaatgaaaatgggctagtcacagttgcagattatatttctagagctgagtctcagagcagacaaagaaacctcccaagggaaactttggctaaaaacaagaaagaaatggcaaaagatgtgattgaagagcatggtccttcagaaaaggcaataaacggcccaactagtgcttctggcgatgacatttctaagctacagcgtactccaggagaagaaaagattaataccttaaaagaagaaaacactcaagaagcagcagtcctgaatggtgtttcataaactgaagaagttcctagtttacagttcttttacattacatttacaatagtgcttgtacaagcttgccaaagatagaatatggatcgccagtctttacatcgcactttcagttcctccatttggaattcaaaaaggggagggatcctgaagaaatcatatgttaaacatactttgacacctactgtgttataaaatatatcatcagatgtgccttgagaatagtatatgtaacattaaaaaaaagttgctggctataggaaatgttattttgttttcaaaatatggcagagatggggggtggtgggtggggtgggatccctaacgtaatattctttatgaaagcattagctgcttttgttacatttttaatatgcaaccacttcttcacctgaggaaaactagaatgaaatgcagtctaaaatattttgcactgaattgtaatttcttcattagtttagtctggaaactggtctgttttaatgtgttttttaaatgctgtatgtagaggaaaatctgcagaccactggaatacatttgttaaactctcatctgcagggacactgggcgatacttggcagtgactgttctaccttgaggctttgtttggtttatttattaaagtgtacagtatttaaaaatcaaacatagctttagttaaaacactaagctgaattagtcatgtccattcagacataacctgaactactgaaaagatcaatttccagaaggtttattctgtataaactacatgttagtcttcagtagagtatcttttttttttccttttttttttttttatttcggttgtttgatgtgcaatatgtttttgtatgcaggtagtaaataaactttgatcttcca

SEQ ID NO: 426320 - DNA, 2525 bp, Homo sapiens
  misc_feature (53)..(53): n is a, c, g, or t
gcccctcccccctcctcccctctggttggaaagtttctagaatctcttcccgnggggcctttgcggttccaacatggcggagctgacggtggaggttcgcggctctaacggggctttctacaagggatttatcaaagatgttcatgaagactcccttacagttgtttttgaaaataattggcaaccagaacgccaggttccatttaatgaagttagattaccaccaccacctgatataaaaaaagaaattagtgaaggagatgaagtagaggtatattcaagagcaaatgaccaagagccatgtgggtggtggttggctaaagttcggatgatgaaaggagaattttatgtcattgaatatgctgcttgtgacgctacttacaatgaaatagtcacatttgaacgacttcggcctgtcaatcaaaataaaactgtcaaaaaaaataccttctttaaatgcacagtggatgttcctgaggatttgagagaggcgtgtgctaatgaaaatgcacataaagattttaagaaagcagtaggagcatgcagaattttttaccatccagaaacaacacagctaatgatactgtctgccagtgaagcaactgtgaagagagtaaacatcttaagtgacatgcatttgcgaagtattcgtacgaagttgatgcttatgtccagaaatgaagaggccactaagcatttagaatgcacaaaacaacttgcagcagcttttcatgaggaatttgttgtgagagaagatttaatgggcctggcaataggaacacatggtagtaacatccagcaagctaggaaggttcctggagttaccgccattgagctagatgaagatactggaacattcagaatctacggagagagtgctgatgctgtaaaaaaggctagaggtttcttggaatttgtggaggattttattcaggttcctaggaatctcgttggaaaagtaattggaaaaaatggcaaagttattcaagaaatagtggacaaatctggtgtggttcgagtgagaattgaaggggacaatgaaaataaattacccagagaagacggtatggttccatttgtatttgttggcactaaagaaagcattggaaatgtgcaggttcttctagagtatcatattgcctatctaaaggaagtagaacagctaagaatggaacgcctacagattgatgaacagctgcgacagattggttctaggtcttatagcggaagaggcagaggtcgtcggggacctaattacacctccggttatggtacaaattctgagctgtctaacccctctgaaacggaatctgagcgtaaagacgagctgagtgattggtcattggcaggagaagatgatcgagacagccgacatcagcgtgacagcaggagacgcccaggaggaagaggcagaagtgtttcagggggtcgaggtcgtggtggaccacgtggtggcaaatcctccatcagttctgtgctcaaagatccagacagcaatccatacagcttacttgataatacagaatcagatcagactgcagacactgatgccagcgaatctcatcacagtactaaccgtcgtaggcggtctcgtagacgaaggactgatgaagatgctgttctgatggatggaatgactgaatctgatacagcttcagttaatgaaaatgggctagtcacagttgcagattatatttctagagctgagtctcagagcagacaaagaaacctcccaagggaaactttggctaaaaacaagaaagaaatggcaaaagatgtgattgaagagcatggtccttcagaaaaggcaataaacggcccaactagtgcttctggcgatgacatttctaagctacagcgtactccaggagaagaaaagattaataccttaaaagaagaaaacactcaagaagcagcagtcctgaatggtgtttcataaactgaagaagttcctagtttacagttcttttacattacatttacaatagtgcttgtacaagcttgccaaagatagaatatggatcgccagtctttacatcgcactttcagttcctccatttggaattcaaaaaggggagggatcctgaagaaatcatatgttaaacatactttgacacctactgtgttataaaatatatcatcagatgtgccttgagaatagtatatgtaacattaaaaaaaagttgctggctaaaaaaaaaaaaacaaaaagatattcgataactacagtacatcgcagctacaaaacgggggggctgtcataatgataattaccgccaggatggaaactatatcaatgcctacccccctatcttgtgttcgaaaaaagtggtccatatgttagacgtaactatcaactacaatctatcagtgttattacaatcatgcgtgatagaaaaagttgttatgactacttgttggagacccatccgtgtggtgggaataatggagaccacacagctatataacccgggaataaatacgacttatgagcaacctgtttgttgaaaaattattacataata

SEQ ID NO: 426321 - DNA, 2708 bp, Homo sapiens
  misc_feature (53)..(53): n is a, c, g, or t
gcccctcccccctcctcccctctggttggaaagtttctagaatctcttcccgnggggcctttgcggttccaacatggcggagctgacggtggaggttcgcggctctaacggggctttctacaagggatttatcaaagatgttcatgaagactcccttacagttgtttttgaaaataattggcaaccagaacgccaggttccatttaatgaagttagattaccaccaccacctgatataaaaaaagaaattagtgaaggagatgaagtagaggtatattcaagagcaaatgaccaagagccatgtgggtggtggttggctaaagttcggatgatgaaaggagaattttatgtcattgaatatgctgcttgtgacgctacttacaatgaaatagtcacatttgaacgacttcggcctgtcaatcaaaataaaactgtcaaaaaaaataccttctttaaatgcacagtggatgttcctgaggatttgagagaggcgtgtgctaatgaaaatgcacataaagattttaagaaagcagtaggagcatgcagaattttttaccatccagaaacaacacagctaatgatactgtctgccagtgaagcaactgtgaagagagtaaacatcttaagtgacatgcatttgcgaagtattcgtacgaagttgatgcttatgtccagaaatgaagaggccactaagcatttagaatgcacaaaacaacttgcagcagcttttcatgaggaatttgttgtgagagaagatttaatgggcctggcaataggaacacatggtagtaacatccagcaagctaggaaggttcctggagttaccgccattgagctagatgaagatactggaacattcagaatctacggagagagtgctgatgctgtaaaaaaggctagaggtttcttggaatttgtggaggattttattcaggttcctaggaatctcgttggaaaagtaattggaaaaaatggcaaagttattcaagaaatagtggacaaatctggtgtggttcgagtgagaattgaaggggacaatgaaaataaattacccagagaagacggtatggttccatttgtatttgttggcactaaagaaagcattggaaatgtgcaggttcttctagagtatcatattgcctatctaaaggaagtagaacagctaagaatggaacgcctacagattgatgaacagctgcgacagattggttctaggtcttatagcggaagaggcagaggtcgtcggggacctaattacacctccggttatggtacaaattctgagctgtctaacccctctgaaacggaatctgagcgtaaagacgagctgagtgattggtcattggcaggagaagatgatcgagacagccgacatcagcgtgacagcaggagacgcccaggaggaagaggcagaagtgtttcagggggtcgaggtcgtggtggaccacgtggtggcaaatcctccatcagttctgtgctcaaagatccagacagcaatccatacagcttacttgataatacagaatcagatcagactgcagacactgatgccagcgaatctcatcacagtactaaccgtcgtaggcggtctcgtagacgaaggactgatgaagatgctgttctgatggatggaatgactgaatctgatacagcttcagttaatgaaaatgggctaggcaaaagatgtgattgaagagcatggtccttcagaaaaggcaataaacggcccaactagtgcttctggcgatgacatttctaagctacagcgtactccaggagaagaaaagattaataccttaaaagaagaaaacactcaagaagcagcagtcctgaatggtgtttcataaactgaagaagttcctagtttacagttcttttacattacatttacaatagtgcttgtacaagcttgccaaagatagaatatggatcgccagtctttacatcgcactttcagttcctccatttggaattcaaaaaggggagggatcctgaagaaatcatatgttaaacatactttgacacctactgtgttataaaatatatcatcagatgtgccttgagaatagtatatgtaacattaaaaaaaagttgctggctataggaaatgttattttgttttcaaaatatggcagagatggggggtggtgggtggggtgggatccctaacgtaatattctttatgaaagcattagctgcttttgttacatttttaatatgcaaccacttcttcacctgaggaaaactagaatgaaatgcagtctaaaatattttgcactgaattgtaatttcttcattagtttagtctggaaactggtctgttttaatgtgttttttaaatgctgtatgtagaggaaaatctgcagaccactggaatacatttgttaaactctcatctgcagggacactgggcgatacttggcagtgactgttctaccttgaggctttgtttggtttatttattaaagtgtacagtatttaaaaatcaaacatagctttagttaaaacactaagctgaattagtcatgtccattcagacataacctgaactactgaaaagatcaatttccagaaggtttattctgtataaactacatgttagtcttcagtagagtatcttttttttttccttttttttttttttatttcggttgtttgatgtgcaatatgtttttgtatgcaggtagtaaataaactttgatcttcca

SEQ ID NO: 426322 - DNA, 2881 bp, Homo sapiens
  misc_feature (53)..(53): n is a, c, g, or t
gcccctcccccctcctcccctctggttggaaagtttctagaatctcttcccgnggggcctttgcggttccaacatggcggagctgacggtggaggttcgcggctctaacggggctttctacaagggatttatcaaagatgttcatgaagactcccttacagttgtttttgaaaataattggcaaccagaacgccaggttccatttaatgaagttagattaccaccaccacctgatataaaaaaagaaattagtgaaggagatgaagtagaggtatattcaagagcaaatgaccaagagccatgtgggtggtggttggctaaagttcggatgatgaaaggagaattttatgtcattgaatatgctgcttgtgacgctacttacaatgaaatagtcacatttgaacgacttcggcctgtcaatcaaaataaaactgtcaaaaaaaataccttctttaaatgcacagtggatgttcctgaggatttgagagaggcgtgtgctaatgaaaatgcacataaagattttaagaaagcagtaggagcatgcagaattttttaccatccagaaacaacacagctaatgatactgtctgccagtgaagcaactgtgaagagagtaaacatcttaagtgacatgcatttgcgaagtattcgtacgaagttgatgcttatgtccagaaatgaagaggccactaagcatttagaatgcacaaaacaacttgcagcagcttttcatgaggaatttgttgtgagagaagatttaatgggcctggcaataggaacacatggtagtaacatccagcaagctaggaaggttcctggagttaccgccattgagctagatgaagatactggaacattcagaatctacggagagagtgctgatgctgtaaaaaaggctagaggtttcttggaatttgtggaggattttattcaggttcctaggaatctcgttggaaaagtaattggaaaaaatggcaaagttattcaagaaatagtggacaaatctggtgtggttcgagtgagaattgaaggggacaatgaaaataaattacccagagaagacggtatggttccatttgtatttgttggcactaaagaaagcattggaaatgtgcaggttcttctagagtatcatattgcctatctaaaggaagtagaacagctaagaatggaacgcctacagattgatgaacagctgcgacagattggttctaggtcttatagcggaagaggcagaggtcgtcggggacctaattacacctccggttatggtacaaattctgagctgtctaacccctctgaaacggaatctgagcgtaaagacgagctgagtgattggtcattggcaggagaagatgatcgagacagccgacatcagcgtgacagcaggagacgcccaggaggaagaggcagaagtgtttcagggggtcgaggtcgtggtggaccacgtggtggcaaatcctccatcagttctgtgctcaaagatccagacagcaatccatacagcttacttgataatacagaatcagatcagactgcagacactgatgccagcgaatctcatcacagtactaaccgtcgtaggcggtctcgtagacgaaggactgatgaagatgctgttctgatggatggaatgactgaatctgatacagcttcagttaatgaaaatgggctagatgatagtgaaaaaaaaccccagcgacgcaatcgtagccgcaggcgtcgcttcaggggtcaggcagaagatagacagccagtcacagttgcagattatatttctagagctgagtctcagagcagacaaagaaacctcccaagggaaactttggctaaaaacaagaaagaaatggcaaaagatgtgattgaagagcatggtccttcagaaaaggcaataaacggcccaactagtgcttctggcgatgacatttctaagctacagcgtactccaggagaagaaaagattaataccttaaaagaagaaaacactcaagaagcagcagtcctgaatggtgtttcataaactgaagaagttcctagtttacagttcttttacattacatttacaatagtgcttgtacaagcttgccaaagatagaatatggatcgccagtctttacatcgcactttcagttcctccatttggaattcaaaaaggggagggatcctgaagaaatcatatgttaaacatactttgacacctactgtgttataaaatatatcatcagatgtgccttgagaatagtatatgtaacattaaaaaaaagttgctggctataggaaatgttattttgttttcaaaatatggcagagatggggggtggtgggtggggtgggatccctaacgtaatattctttatgaaagcattagctgcttttgttacatttttaatatgcaaccacttcttcacctgaggaaaactagaatgaaatgcagtctaaaatattttgcactgaattgtaatttcttcattagtttagtctggaaactggtctgttttaatgtgttttttaaatgctgtatgtagaggaaaatctgcagaccactggaatacatttgttaaactctcatctgcagggacactgggcgatacttggcagtgactgttctaccttgaggctttgtttggtttatttattaaagtgtacagtatttaaaaatcaaacatagctttagttaaaacactaagctgaattagtcatgtccattcagacataacctgaactactgaaaagatcaatttccagaaggtttattctgtataaactacatgttagtcttcagtagagtatcttttttttttccttttttttttttttatttcggttgtttgatgtgcaatatgtttttgtatgcaggtagtaaataaactttgatcttcca

SEQ ID NO: 426323 - DNA, 2545 bp, Homo sapiens
  misc_feature (53)..(53): n is a, c, g, or t
gcccctcccccctcctcccctctggttggaaagtttctagaatctcttcccgnggggcctttgcggttccaacatggcggagctgacggtggaggttcgcggctctaacggggctttctacaagggatttatcaaagatgttcatgaagactcccttacagttgtttttgaaaataattggcaaccagaacgccaggttccatttaatgaagttagattaccaccaccacctgatataaaaaaagaaattagtgaaggagatgaagtagaggtatattcaagagcaaatgaccaagagccatgtgggtggtggttggctaaagttcggatgatgaaaggagaattttatgtcattgaatatgctgcttgtgacgctacttacaatgaaatagtcacatttgaacgacttcggcctgtcaatcaaaataaaactgtcaaaaaaaataccttctttaaatgcacagtggatgttcctgaggatttgagagaggcgtgtgctaatgaaaatgcacataaagattttaagaaagcagtaggagcatgcagaattttttaccatccagaaacaacacagctaatgatactgtctgccagtgaagcaactgtgaagagagtaaacatcttaagtgacatgcatttgcgaagtattcgtacgaagttgatgcttatgtccagaaatgaagaggccactaagcatttagaatgcacaaaacaacttgcagcagcttttcatgaggaatttgttgtgagagaagatttaatgggcctggcaataggaacacatggtagtaacatccagcaagctaggaaggttcctggagttaccgccattgagctagatgaagatactggaacattcagaatctacggagagagtgctgatgctgtaaaaaaggctagaggtttcttggaatttgtggaggattttattcaggttcctaggaatctcgttggaaaagtaattggaaaaaatggcaaagttattcaagaaatagtggacaaatctggtgtggttcgagtgagaattgaaggggacaatgaaaataaattacccagagaagacggtatggttccatttgtatttgttggcactaaagaaagcattggaaatgtgcaggttcttctagagtatcatattgcctatctaaaggaagtagaacagctaagaatggaacgcctacagattgatgaacagctgcgacagattggttctaggtcttatagcggaagaggcagaggtcgtcggggacctaattacacctccggttatggtacaaattctgagctgtctaacccctctgaaacggaatctgagcgtaaagacgagctgagtgattggtcattggcaggagaagatgatcgagacagccgacatcagcgtgacagcaggagacgcccaggaggaagaggcagaagtgtttcagggggtcgaggtcgtggtggaccacgtggtggcaaatcctccatcagttctgtgctcaaagatccagacagcaatccatacagcttacttgataatacagaatcagatcagactgcagacactgatgccagcgaatctcatcacagtactaaccgtcgtaggcggtctcgtagacgaaggactgatgaagatgctgttctgatggatggaatgactgaatctgatacagcttcagttaatgaaaatgggctagatgatagtgaaaaaaaaccccagcgacgcaatcgtagccgcaggcgtcgcttcaggggtcaggcagaagatagacagccagtcacagttgcagattatatttctagagctgagtctcagagcagacaaagaaacctcccaagggaaactttggctaaaaacaagaaagaaatggcaaaagatgtgattgaagagcatggtccttcagaaaaggcaataaacggcccaactagtgcttctggcgatgacatttctaagctacagcgtactccaggagaagaaaagattaataccttaaaagaagaaaacactcaagaagcagcagtcctgaatggtgtttcataaactgaagaagttcctagtttacagttcttttacattacatttacaatagtgcttgtacaagcttgccaaagatagaatatggatcgccagtctttacatcgcactttcagttcctccatttggaattcaaaaaggggagggatcctgaagaaatcatatgttaaacatactttgacacctactgtgttataaaatatatcatcagatgtgccttgagaatagtatatgtaacattaaaaaaaagttgctggctaaaaaaaaaaaaacaaaaaaaaaaaaacaccaaacaagaataaaaaaaacaaaacacacaacaaaacagaaaaaaacaaaacaggggggaccccacagagaaatacacaggggagccacagaaagatgcaccacaacttggacacaggggcccgcgggggggcggaaaaaaaaaccgcgcggcgaccgcattacaaagcgggtgcgacgaaaaacgcggacagggaaaatcggggagcaccccaccggggggacacacacggcaaacccagg

SEQ ID NO: 426324 - DNA, 2706 bp, Homo sapiens
gcggaccgacggctcacggaacttctacagggatttatcaaagatgttcatgaagactcccttacagttgtttttgaaaataattggcaaccagaacgccaggttccatttaatgaagttagattaccaccaccacctgatataaaaaaagaaattagtgaaggagatgaagtagaggtatattcaagagcaaatgaccaagagccatgtgggtggtggttggctaaagttcggatgatgaaaggagaattttatgtcattgaatatgctgcttgtgacgctacttacaatgaaatagtcacatttgaacgacttcggcctgtcaatcaaaataaaactgtcaaaaaaaataccttctttaaatgcacagtggatgttcctgaggatttgagagaggcgtgtgctaatgaaaatgcacataaagattttaagaaagcagtaggagcatgcagaattttttaccatccagaaacaacacagctaatgatactgtctgccagtgaagcaactgtgaagagagtaaacatcttaagtgacatgcatttgcgaagtattcgtacgaagttgatgcttatgtccagaaatgaagaggccactaagcatttagaatgcacaaaacaacttgcagcagcttttcatgaggaatttgttgtgagagaagatttaatgggcctggcaataggaacacatggtagtaacatccagcaagctaggaaggttcctggagttaccgccattgagctagatgaagatactggaacattcagaatctacggagagagtgctgatgctgtaaaaaaggctagaggtttcttggaatttgtggaggattttattcaggttcctaggaatctcgttggaaaagtaattggaaaaaatggcaaagttattcaagaaatagtggacaaatctggtgtggttcgagtgagaattgaaggggacaatgaaaataaattacccagagaagacggtatggttccatttgtatttgttggcactaaagaaagcattggaaatgtgcaggttcttctagagtatcatattgcctatctaaaggaagtagaacagctaagaatggaacgcctacagattgatgaacagctgcgacagattggttctaggtcttatagcggaagaggcagaggtcgtcggggacctaattacacctccggttatggtacaaattctgagctgtctaacccctctgaaacggaatctgagcgtaaagacgagctgagtgattggtcattggcaggagaagatgatcgagacagccgacatcagcgtgacagcaggagacgcccaggaggaagaggcagaagtgtttcagggggtcgaggtcgtggtggaccacgtggtggcaaatcctccatcagttctgtgctcaaagatccagacagcaatccatacagcttacttgataatacagaatcagatcagactgcagacactgatgccagcgaatctcatcacagtactaaccgtcgtaggcggtctcgtagacgaaggactgatgaagatgctgttctgatggatggaatgactgaatctgatacagcttcagttaatgaaaatgggctagtcacagttgcagattatatttctagagctgagtctcagagcagacaaagaaacctcccaagggaaactttggctaaaaacaagaaagaaatggcaaaagatgtgattgaagagcatggtccttcagaaaaggcaataaacggcccaactagtgcttctggcgatgacatttctaagctacagcgtactccaggagaagaaaagattaataccttaaaagaagaaaacactcaagaagcagcagtcctgaatggtgtttcataaactgaagaagttcctagtttacagttcttttacattacatttacaatagtgcttgtacaagcttgccaaagatagaatatggatcgccagtctttacatcgcactttcagttcctccatttggaattcaaaaaggggagggatcctgaagaaatcatatgttaaacatactttgacacctactgtgttataaaatatatcatcagatgtgccttgagaatagtatatgtaacattaaaaaaaagttgctggctataggaaatgttattttgttttcaaaatatggcagagatggggggtggtgggtggggtgggatccctaacgtaatattctttatgaaagcattagctgcttttgttacatttttaatatgcaaccacttcttcacctgaggaaaactagaatgaaatgcagtctaaaatattttgcactgaattgtaatttcttcattagtttagtctggaaactggtctgttttaatgtgttttttaaatgctgtatgtagaggaaaatctgcagaccactggaatacatttgttaaactctcatctgcagggacactgggcgatacttggcagtgactgttctaccttgaggctttgtttggtttatttattaaagtgtacagtatttaaaaatcaaacatagctttagttaaaacactaagctgaattagtcatgtccattcagacataacctgaactactgaaaagatcaatttccagaaggtttattctgtataaactacatgttagtcttcagtagagtatcttttttttttccttttttttttttttatttcggttgtttgatgtgcaatatgtttttgtatgcaggtagtaaataaactttgatcttcca

SEQ ID NO: 426325 - DNA, 2502 bp, Homo sapiens
  misc_feature (53)..(53): n is a, c, g, or t
gcccctcccccctcctcccctctggttggaaagtttctagaatctcttcccgnggggcctttgcggttccaacatggcggagctgacggtggaggttcgcggctctaacggggctttctacaagggatttatcaaagatgttcatgaagactcccttacagttgtttttgaaaataattggcaaccagaacgccaggttccatttaatgaagttagattaccaccaccacctgatataaaaaaagaaattagtgaaggagatgaagtagaggtatattcaagagcaaatgaccaagagccatgtgggtggtggttggctaaagttcggatgatgaaaggagaattttatgtcattgaatatgctgcttgtgacgctacttacaatgaaatagtcacatttgaacgacttcggcctgtcaatcaaaataaaactgtcaaaaaaaataccttctttaaatgcacagtggatgttcctgaggatttgagagaggcgtgtgctaatgaaaatgcacataaagattttaagaaagcagtaggagcatgcagaattttttaccatccagaaacaacacagctaatgatactgtctgccagtgaagcaactgtgaagagagtaaacatcttaagtgacatgcatttgcgaagtattcgtacgaagttgatgcttatgtccagaaatgaagaggccactaagcatttagaatgcacaaaacaacttgcagcagcttttcatgaggaatttgttgtgagagaagatttaatgggcctggcaataggaacacatggtagtaacatccagcaagctaggaaggttcctggagttaccgccattgagctagatgaagatactggaacattcagaatctacggagagagtgctgatgctgtaaaaaaggctagaggtttcttggaatttgtggaggattttattcaggttcctaggaatctcgttggaaaagtaattggaaaaaatggcaaagttattcaagaaatagtggacaaatctggtgtggttcgagtgagaattgaaggggacaatgaaaataaattacccagagaagacggtatggttccatttgtatttgttggcactaaagaaagcattggaaatgtgcaggttcttctagagtatcatattgcctatctaaaggaagtagaacagctaagaatggaacgcctacagattgatgaacagctgcgacagattggttctaggtcttatagcggaagaggcagaggtcgtcggggacctaattacacctccggttatggtacaaattctgagctgtctaacccctctgaaacggaatctgagcgtaaagacgagctgagtgattggtcattggcaggagaagatgatcgagacagccgacatcagcgtgacagcaggagacgcccaggaggaagaggcagaagtgtttcagggggtcgaggtcgtggtggaccacgtggtggcaaatcctccatcagttctgtgctcaaagatccagacagcaatccatacagcttacttgataatacagaatcagatcagactgcagacactgatgccagcgaatctcatcacagtactaaccgtcgtaggcggtctcgtagacgaaggactgatgaagatgctgttctgatggatggaatgactgaatctgatacagcttcagttaatgaaaatgggctagatgatagtgaaaaaaaaccccagcgacgcaatcgtagccgcaggcgtcgcttcaggggtcaggcagaagatagacagccaggtaacttgagtggacctgtggacaccatcaggtcacaagcatgaaaaaaatgtcatatgtctgctttctaaatatattatacttacatgtacacatgtgtgcatatacattcaaaatttgcattgcataaattgtttattcaactaataagactactactattaagaaaatgcattcttccttcacagtgtgttagtaacttgtctaattgaactaatgttgtgtcctaattgtttacatggaaatactgttgagaagaccattttgttcacttggcagtttcttcacacttgagatggggcctgccatccgagggactgtgttgtagattgtgatcaaggttgattggcaaaactgggcagcttttgcatggtgcctgcttactatatctgaattcagcacctcatttttgtgggagttgtaatacccacaattaaaaaaaaagtataaaagagaaaaatatttgaaggtgtctttaacctaatgcgaggaatgcatgttgtttttgtttgtttattgtagtgtgatgccttttcccttacacctactaactattcaaattaataatacttacttagttttagaatgtttattttatgtagtcattaatttttagtaacttcaaagaaacttgtttgctgtgtctattattttgaacataattccatttcctgtgtacagagaatcacatgtatattcacaatgaagcaattgtgtgcaccagaaataaacccctttcaaacta

SEQ ID NO: 426326 - DNA, 2706 bp, Homo sapiens
  misc_feature (53)..(53): n is a, c, g, or t
gcccctcccccctcctcccctctggttggaaagtttctagaatctcttcccgnggggcctttgcggttccaacatggcggagctgacggtggaggttcgcggctctaacggggctttctacaagggatttatcaaagatgttcatgaagactcccttacagttgtttttgaaaataattggcaaccagaacgccaggttccatttaatgaagttagattaccaccaccacctgatataaaaaaagaaattagtgaaggagatgaagtagaggtatattcaagagcaaatgaccaagagccatgtgggtggtggttggctaaagttcggatgatgaaaggagaattttatgtcattgaatatgctgcttgtgacgctacttacaatgaaatagtcacatttgaacgacttcggcctgtcaatcaaaataaaactgtcaaaaaaaataccttctttaaatgcacagtggatgttcctgaggatttgagagaggcgtgtgctaatgaaaatgcacataaagattttaagaaagcagtaggagcatgcagaattttttaccatccagaaacaacacagctaatgatactgtctgccagtgaagcaactgtgaagagagtaaacatcttaagtgacatgcatttgcgaagtattcgtacgaagttgatgcttatgtccagaaatgaagaggccactaagcatttagaatgcacaaaacaacttgcagcagcttttcatgaggaatttgttgtgagagaagatttaatgggcctggcaataggaacacatggtagtaacatccagcaagctaggaaggttcctggagttaccgccattgagctagatgaagatactggaacattcagaatctacggagagagtgctgatgctgtaaaaaaggctagaggtttcttggaatttgtggaggattttattcaggttcctaggaatctcgttggaaaagtaattggaaaaaatggcaaagttattcaagaaatagtggacaaatctggtgtggttcgagtgagaattgaaggggacaatgaaaataaattacccagagaagacggtatggttccatttgtatttgttggcactaaagaaagcattggaaatgtgcaggttcttctagagtatcatattgcctatctaaaggaagtagaacagctaagaatggaacgcctacagattgatgaacagctgcgacagattggttctaggtcttatagcggaagaggcagaggtcgtcggggacctaattacacctccggttatggtacaaattctgagctgtctaacccctctgaaacggaatctgagcgtaaagacgagctgagtgattggtcattggcaggagaagatgatcgagacagccgacatcagcgtgacagcaggagacgcccaggaggaagaggcagaagtgtttcagggggtcgaggtcgtggtggaccacgtggtggcaaatcctccatcagttctgtgctcaaagatccagacagcaatccatacagcttacttgataatacagaatcagatcagactgcagacactgatgccagcgaatctcatcacagtactaaccgtcgtaggcggtctcgtagacgaaggactgatgaagatgctgttctgatggatggaatgactgaatctgatacagcttcagttaatgaaaatgggctagatgatagtgaaaaaaaaccccagcgacgcaatcgtagccgcaggcgtcgcttcaggggtcaggcagaagatagacagccaggtaacttgagtggacctgtggacaccatcaggtcacaagcatgaaaaaaatgtcatatgtctgctttctaaatatattatacttacatgtacacatgtgtgcatatacattcaaaatttgcattgcataaattgtttattcaactaataagactactactattaagaaaatgcattcttccttcacagtgtgttagtaacttgtctaattgaactaatgttgtgtcctaattgtttacatggaaatactgttgagaagaccattttgttcacttggcagtttcttcacacttgagatggggcctgccatccgagggactgtgttgtagattgtgatcaaggttgattggcaaaactgggcagcttttgcatggtgcctgcttactatatctgaattcagcacctcatttttgtgggagttgtaatacccacaattaaaaaaaaagtataaaagagaaaaatatttgaaggtgtctttaacctaatgcgaggaatgcatgttgtttttgtttgtttattgtagtgtgatgccttttcccttacacctactaactattcaaattaataatacttacttagttttagaatgtttattttatgtagtcattaatttttagtaacttcaaagaaacttgtttgctgtgtctattattttgaacataattccatttcctgtgtacagagaatcacatgtatattcacaatgaagcaattgtgtgcaccagaaataaacccctttcaaactaatcaatttttgcattctttccaaaaccagttctttcatgtgttttccccaaataaagaatgtaaattctggcatctttactattttaaatttagtggttgtagagacatttgggaaaactggttaagagaattagttcccatccctaaaagttcatgttttaaagatagttggaaatttttagagcaattaaatattgtcaaaa

SEQ ID NO: 426327 - DNA, 1640 bp, Homo sapiens
  misc_feature (47)..(47): n is a, c, g, or t
gtctagaggatcccgccagtagagatgatgaacagctgcgacagatnggttctaggtcttatagcggaagaggcagaggtcgtcggggacctaattacacctccggttatggtacaaattctgagctgtctaacccctctgaaacggaatctgagcgtaaagacgagctgagtgattggtcattggcaggagaagatgatcgagacagccgacatcagcgtgacagcaggagacgcccaggaggaagaggcagaagtgtttcagggggtcgaggtcgtggtggaccacgtggtggcaaatcctccatcagttctgtgctcaaagatccagacagcaatccatacagcttacttgataatacagaatcagatcagactgcagacactgatgccagcgaatctcatcacagtactaaccgtcgtaggcggtctcgtagacgaaggactgatgaagatgctgttctgatggatggaatgactgaatctgatacagcttcagttaatgaaaatgggctagtcacagttgcagattatatttctagagctgagtctcagagcagacaaagaaacctcccaagggaaactttggctaaaaacaagaaagaaatggcaaaagatgtgattgaagagcatggtccttcagaaaaggcaataaacggcccaactagtgcttctggcgatgacatttctaagctacagcgtactccaggagaagaaaagattaataccttaaaagaagaaaacactcaagaagcagcagtcctgaatggtgtttcataaactgaagaagttcctagtttacagttcttttacattacatttacaatagtgcttgtacaagcttgccaaagatagaatatggatcgccagtctttacatcgcactttcagttcctccatttggaattcaaaaaggggagggatcctgaagaaatcatatgttaaacatactttgacacctactgtgttataaaatatatcatcagatgtgccttgagaatagtatatgtaacattaaaaaaaagttgctggctataggaaatgttattttgttttcaaaatatggcagagatggggggtggtgggtggggtgggatccctaacgtaatattctttatgaaagcattagctgcttttgttacatttttaatatgcaaccacttcttcacctgaggaaaactagaatgaaatgcagtctaaaatattttgcactgaattgtaatttcttcattagtttagtctggaaactggtctgttttaatgtgttttttaaatgctgtatgtagaggaaaatctgcagaccactggaatacatttgttaaactctcatctgcagggacactgggcgatacttggcagtgactgttctaccttgaggctttgtttggtttatttattaaagtgtacagtatttaaaaatcaaacatagctttagttaaaacactaagctgaattagtcatgtccattcagacataacctgaactactgaaaagatcaatttccagaaggtttattctgtataaactacatgttagtcttcagtagagtatcttttttttttccttttttttttttttatttcggttgtttgatgtgcaatatgtttttgtatgcaggtagtaaataaactttgatcttcca

SEQ ID NO: 426328 - DNA, 1688 bp, Homo sapiens
gtaaagacccctggtgattggtcattggcaggagaagatgatcgagatcagccgacatcagcgtgacagcaggagacgcccaggaggaagaggcagaagtgtttcagggggtcgaggtcgtggtggaccacgttggtggcaaatcctccatcagttatggtacaaattctgagctgtctaacccctctgaaacggaatctgagcgtaaagacgagctgagtgattggtcattggcaggagaagatgatcgagacagccgacatcagcgtgacagcaggagacgcccaggaggaagaggcagaagtgtttcagggggtcgaggtcgtggtggaccacgtggtggcaaatcctccatcagttctgtgctcaaagatccagacagcaatccatacagcttacttgataatacagaatcagatcagactgcagacactgatgccagcgaatctcatcacagtactaaccgtcgtaggcggtctcgtagacgaaggactgatgaagatgctgttctgatggatggaatgactgaatctgatacagcttcagttaatgaaaatgggctagtcacagttgcagattatatttctagagctgagtctcagagcagacaaagaaacctcccaagggaaactttggctaaaaacaagaaagaaatggcaaaagatgtgattgaagagcatggtccttcagaaaaggcaataaacggcccaactagtgcttctggcgatgacatttctaagctacagcgtactccaggagaagaaaagattaataccttaaaagaagaaaacactcaagaagcagcagtcctgaatggtgtttcataaactgaagaagttcctagtttacagttcttttacattacatttacaatagtgcttgtacaagcttgccaaagatagaatatggatcgccagtctttacatcgcactttcagttcctccatttggaattcaaaaaggggagggatcctgaagaaatcatatgttaaacatactttgacacctactgtgttataaaatatatcatcagatgtgccttgagaatagtatatgtaacattaaaaaaaagttgctggctataggaaatgttattttgttttcaaaatatggcagagatggggggtggtgggtggggtgggatccctaacgtaatattctttatgaaagcattagctgcttttgttacatttttaatatgcaaccacttcttcacctgaggaaaactagaatgaaatgcagtctaaaatattttgcactgaattgtaatttcttcattagtttagtctggaaactggtctgttttaatgtgttttttaaatgctgtatgtagaggaaaatctgcagaccactggaatacatttgttaaactctcatctgcagggacactgggcgatacttggcagtgactgttctaccttgaggctttgtttggtttatttattaaagtgtacagtatttaaaaatcaaacatagctttagttaaaacactaagctgaattagtcatgtccattcagacataacctgaactactgaaaagatcaatttccagaaggtttattctgtataaactacatgttagtcttcagtagagtatcttttttttttccttttttttttttttatttcggttgtttgatgtgcaatatgtttttgtatgcaggtagtaaataaactttgatcttcca

SEQ ID NO: 426329 - DNA, 1520 bp, Homo sapiens
  misc_feature (32)..(32): n is a, c, g, or t
ctgttctagaggatccctcataggttcgcagngagcgtaaagacgagctgagtgattggtcattggcaggagaagatgatcgagacagccgacatcagcgtgacagcaggagacgcccaggaggaagaggcagaagtgtttcagggggtcgaggtcgtggtggaccacgtggtggcaaatcctccatcagttctgtgctcaaagatccagacagcaatccatacagcttacttgataatacagaatcagatcagactgcagacactgatgccagcgaatctcatcacagtactaaccgtcgtaggcggtctcgtagacgaaggactgatgaagatgctgttctgatggatggaatgactgaatctgatacagcttcagttaatgaaaatgggctagtcacagttgcagattatatttctagagctgagtctcagagcagacaaagaaacctcccaagggaaactttggctaaaaacaagaaagaaatggcaaaagatgtgattgaagagcatggtccttcagaaaaggcaataaacggcccaactagtgcttctggcgatgacatttctaagctacagcgtactccaggagaagaaaagattaataccttaaaagaagaaaacactcaagaagcagcagtcctgaatggtgtttcataaactgaagaagttcctagtttacagttcttttacattacatttacaatagtgcttgtacaagcttgccaaagatagaatatggatcgccagtctttacatcgcactttcagttcctccatttggaattcaaaaaggggagggatcctgaagaaatcatatgttaaacatactttgacacctactgtgttataaaatatatcatcagatgtgccttgagaatagtatatgtaacattaaaaaaaagttgctggctataggaaatgttattttgttttcaaaatatggcagagatggggggtggtgggtggggtgggatccctaacgtaatattctttatgaaagcattagctgcttttgttacatttttaatatgcaaccacttcttcacctgaggaaaactagaatgaaatgcagtctaaaatattttgcactgaattgtaatttcttcattagtttagtctggaaactggtctgttttaatgtgttttttaaatgctgtatgtagaggaaaatctgcagaccactggaatacatttgttaaactctcatctgcagggacactgggcgatacttggcagtgactgttctaccttgaggctttgtttggtttatttattaaagtgtacagtatttaaaaatcaaacatagctttagttaaaacactaagctgaattagtcatgtccattcagacataacctgaactactgaaaagatcaatttccagaaggtttattctgtataaactacatgttagtcttcagtagagtatcttttttttttccttttttttttttttatttcggttgtttgatgtgcaatatgtttttgtatgcaggtagtaaataaactttgatcttcca

SEQ ID NO: 426330 - DNA, 1175 bp, Homo sapiens
  misc_feature (3)..(3): n is a, c, g, or t
ggnccactctagagtatcccccgttgacacttcagttaatgaaaatgggcttcacagttgcagattatatttctagagctgagtctcagagcagacaaagaaacctcccaagggaaactttggctaaaaacaagaaagaaatggcaaaagatgtgattgaagagcatggtccttcagaaaaggcaataaacggcccaactagtgcttctggcgatgacatttctaagctacagcgtactccaggagaagaaaagattaataccttaaaagaagaaaacactcaagaagcagcagtcctgaatggtgtttcataaactgaagaagttcctagtttacagttcttttacattacatttacaatagtgcttgtacaagcttgccaaagatagaatatggatcgccagtctttacatcgcactttcagttcctccatttggaattcaaaaaggggagggatcctgaagaaatcatatgttaaacatactttgacacctactgtgttataaaatatatcatcagatgtgccttgagaatagtatatgtaacattaaaaaaaagttgctggctataggaaatgttattttgttttcaaaatatggcagagatggggggtggtgggtggggtgggatccctaacgtaatattctttatgaaagcattagctgcttttgttacatttttaatatgcaaccacttcttcacctgaggaaaactagaatgaaatgcagtctaaaatattttgcactgaattgtaatttcttcattagtttagtctggaaactggtctgttttaatgtgttttttaaatgctgtatgtagaggaaaatctgcagaccactggaatacatttgttaaactctcatctgcagggacactgggcgatacttggcagtgactgttctaccttgaggctttgtttggtttatttattaaagtgtacagtatttaaaaatcaaacatagctttagttaaaacactaagctgaattagtcatgtccattcagacataacctgaactactgaaaagatcaatttccagaaggtttattctgtataaactacatgttagtcttcagtagagtatcttttttttttccttttttttttttttatttcggttgtttgatgtgcaatatgtttttgtatgcaggtagtaaataaactttgatcttcca

SEQ ID NO: 426331 - DNA, 1393 bp, Homo sapiens
  misc_feature (357)..(357): n is a, c, g, or t
  misc_feature (385)..(385): n is a, c, g, or t
  misc_feature (391)..(391): n is a, c, g, or t
ctcaaggatccttatttttttaatccccccccccccccccccccgggcctttgcggttccaacatggcggagctgacggtggaggttcgcggctctaacggggctttctacaagggatttatcaaagatgttcatgaagactcccttacagttgtttttgaaaataattggcaaccagaacgccaggttccatttaatgaagttagattaccaccaccacctgatataaaaaaaaaacaaacaacaaaaaaaaaaaaaagtgggtggggcgcgccccgggaccccgcgaaaaagcctttaagaaaacacattcgcgggtggggcgcgcgggggccccagggaggagtaagtttgganggcgctccgatgcaaaacatgtttgggnacaggncctcaaaaggcaataaacggcccaactagtgcttctggcgatgacatttctaagctacagcgtactccaggagaagaaaagattaataccttaaaagaagaaaacactcaagaagcagcagtcctgaatggtgtttcataaactgaagaagttcctagtttacagttcttttacattacatttacaatagtgcttgtacaagcttgccaaagatagaatatggatcgccagtctttacatcgcactttcagttcctccatttggaattcaaaaaggggagggatcctgaagaaatcatatgttaaacatactttgacacctactgtgttataaaatatatcatcagatgtgccttgagaatagtatatgtaacattaaaaaaaagttgctggctataggaaatgttattttgttttcaaaatatggcagagatggggggtggtgggtggggtgggatccctaacgtaatattctttatgaaagcattagctgcttttgttacatttttaatatgcaaccacttcttcacctgaggaaaactagaatgaaatgcagtctaaaatattttgcactgaattgtaatttcttcattagtttagtctggaaactggtctgttttaatgtgttttttaaatgctgtatgtagaggaaaatctgcagaccactggaatacatttgttaaactctcatctgcagggacactgggcgatacttggcagtgactgttctaccttgaggctttgtttggtttatttattaaagtgtacagtatttaaaaatcaaacatagctttagttaaaacactaagctgaattagtcatgtccattcagacataacctgaactactgaaaagatcaatttccagaaggtttattctgtataaactacatgttagtcttcagtagagtatcttttttttttccttttttttttttttatttcggttgtttgatgtgcaatatgtttttgtatgcaggtagtaaataaactttgatcttcca

SEQ ID NO: 426332 - DNA, 1230 bp, Homo sapiens
tcaggctttcatcttgcctcttttaaaataattataaatgacactggtaaaggtacatatatcaagagtaggcattaattttcaagggctaaaatgtcattaacttcggtataaaccaaactgtactagagaggaagactgtgtccctgaatgatggcagtttaagtctgagttttactgtgagttaaaaccctctgaatttccagatgataattccatttttaatccatttggaatgctgaaagctacaaaaatgtatttcctgtcagtaaacatttgttgttttatttttgtgtttaattaaaagtttatttttcccctttaaatctttgaaggaaagaaggtttttttgtttttttgtttgtttttgtcagaatagttcatggtaaactttgcaattacagatgatagtgaaaaaaaaccccagcgacgcaatcgtagccgcaggcgtcgcttcaggggtcaggcagaagatagacagccaggtaacttgagtggacctgtggacaccatcaggtcacaagcatgaaaaaaatgtcatatgtctgctttctaaatatattatacttacatgtacacatgtgtgcatatacattcaaaatttgcattgcataaattgtttattcaactaataagactactactattaagaaaatgcattcttccttcacagtgtgttagtaacttgtctaattgaactaatgttgtgtcctaattgtttacatggaaatactgttgagaagaccattttgttcacttggcagtttcttcacacttgagatggggcctgccatccgagggactgtgttgtagattgtgatcaaggttgattggcaaaactgggcagcttttgcatggtgcctgcttactatatctgaattcagcacctcatttttgtgggagttgtaatacccacaattaaaaaaaaagtataaaagagaaaaatatttgaaggtgtctttaacctaatgcgaggaatgcatgttgtttttgtttgtttattgtagtgtgatgccttttcccttacacctactaactattcaaattaataatacttacttagttttagaatgtttattttatgtagtcattaatttttagtaacttcaaagaaacttgtttgctgtgtctattattttgaacataattccatttcctgtgtacagagaatcacatgtatattcacaatgaagcaattgtgtgcaccagaaataaacccctttcaaacta

SEQ ID NO: 426333 - DNA, 1176 bp, Homo sapiens
tcaggctttcatcttgcctcttttaaaataattataaatgacactggtaaaggtacatatatcaagagtaggcattaattttcaagggctaaaatgtcattaacttcggtataaaccaaactgtactagagaggaagactgtgtccctgaatgatggcagtttaagtctgagttttactgtgagttaaaaccctctgaatttccagatgataattccatttttaatccatttggaatgctgaaagctacaaaaatgtatttcctgtcagtaaacatttgttgttttatttttgtgtttaattaaaagtttatttttcccctttaaatctttgaaggaaagaaggtttttttgtttttttgtttgtttttgtcagaatagttcatggtaaactttgcaattacagatgatagtgaaaaaaaaccccagcgacgcaatcgtagccgcaggcgtcgcttcaggggtcaggcagaagatagacagccaggtaacttgagtggacctgtggacaccatcaggtcacaagcatgaaaaaaatgtcatatgtctgctttctaaatatattatacttacatgtacacatgtgtgcatatacattcaaaatttgcattgcataaattgtttattcaactaataagactactactattaagtgtgtcctaattgtttacatggaaatactgttgagaagaccattttgttcacttggcagtttcttcacacttgagatggggcctgccatccgagggactgtgttgtagattgtgatcaaggttgattggcaaaactgggcagcttttgcatggtgcctgcttactatatctgaattcagcacctcatttttgtgggagttgtaatacccacaattaaaaaaaaagtataaaagagaaaaatatttgaaggtgtctttaacctaatgcgaggaatgcatgttgtttttgtttgtttattgtagtgtgatgccttttcccttacacctactaactattcaaattaataatacttacttagttttagaatgtttattttatgtagtcattaatttttagtaacttcaaagaaacttgtttgctgtgtctattattttgaacataattccatttcctgtgtacagagaatcacatgtatattcacaatgaagcaattgtgtgcaccagaaataaacccctttcaaacta

SEQ ID NO: 426334 - DNA, 599 bp, Homo sapiens
ctcaaggatccttatttttttaatccccccccccccccccccccgggcctttgcggttccaacatggcggagctgacggtggaggttcgcggctctaacggggctttctacaagtcaattcacaatgaatcaaatgtccccattttggaactctgaagtatttataattgatctctatacatatctacaatctactgcttgtttctacttagactttgactccattactcattttgcctcacaaagtgagttggtactttgacaaaggttggaaaggacactagccacctgtgtgtgcactgaaatcatgtacgcttgaacatttggaattttatgtccagccataatccacttgcatatgcactttgtggaaactgtggtcttcagaactctggaagaatgagaatggcggagtggaaaagagtcctggatttgaagtaaacagatgagaattctaggtctgtacttcaccttaccattatctaacaatggacccctgaacaaatctctctgtctaacatgaggggcttgaagtagttctgtgatccccagtatatttttatcctattaaactgctgacttgaaaaccattggcttat

SEQ ID NO: 426335 - DNA, 315 bp, Homo sapiens
ttgctgaatttttttaactttctactttttacaccaattgttgcaaaatagttggagctattaataggcttaggatagtatactttgctttttaaaaagcatttatacttgctcataaatagcattaaaatgtcagttggccatttaatcattttgtaatgaatcatctgaaatctttacacaagtttaggctgttagatgcataggtaattaataatacatgtgataattagcaaaaaaacctaacaaaattctaatcaaaggcaactttggaagacaatgggggatagaagggatgacaagcaatttttaaat

SEQ ID NO: 426336 - DNA, 451 bp, Homo sapiens
taaatgctttacagtatttgatatgtaaatgtgatttctcaaaataaggtgagtaaagtaggtgattatttgtttaatattaactgtttatgtcattttcatggtgagctttccagtgttttaaaattaggtacagttttcattagtttagatgttttctgtggtttgggcactgctaggtactagagatacaaagttgaaagacccatagagtggaatactttgttatttgttttgaattttaaagatgttttaatactttgatccattgtggtatataaaactgaaatttttaattagctaattagtgtttatgtagctgttttcctcctcagctatagatttcatttataaagaagttgaaaaagttgtctccctttggcaggcaaaagatgtgattgaagagcatggtccttcagaaaaggcaataaacggcccaactagtgcttct

SEQ ID NO: 426337 - DNA, 409 bp, Homo sapiens
cttttgttacatttttaatatgcaaccacttcttcacctgaggaaaactagaatgaaatgcagtctaaaatattttgcactgaattgtaatttcttcattagtttagtctggaaactggtctgttttaatgtgttttttaaatgctgtatgtagaggaaaatctgcagaccactggaatacatttgttaaactctcatctgcagggacactgggcgatacttggcagtgactgttctaccttgaggctttgtttggtttatttattaaagtgtacagtatttaaaaatcaaacatagctttagttaaaacactaagctgaattagtcatgtccattcagacataacctgaactactgaaaagatcaatttccagaaggtttattctgtataaactacatgttagtcttc

SEQ ID NO: 426338 - DNA, 2800 bp, Homo sapiens
  misc_feature (53)..(53): n is a, c, g, or t
gcccctcccccctcctcccctctggttggaaagtttctagaatctcttcccgnggggcctttgcggttccaacatggcggagctgacggtggaggttcgcggctctaacggggctttctacaagggatttatcaaagatgttcatgaagactcccttacagttgtttttgaaaataattggcaaccagaacgccaggttccatttaatgaagttagattaccaccaccacctgatataaaaaaagaaattagtgaaggagatgaagtagaggtatattcaagagcaaatgaccaagagccatgtgggtggtggttggctaaagttcggatgatgaaaggagaattttatgtcattgaatatgctgcttgtgacgctacttacaatgaaatagtcacatttgaacgacttcggcctgtcaatcaaaataaaactgtcaaaaaaaataccttctttaaatgcacagtggatgttcctgaggatttgagagaggcgtgtgctaatgaaaatgcacataaagattttaagaaagcagtaggagcatgcagaattttttaccatccagaaacaacacagctaatgatactgtctgccagtgaagcaactgtgaagagagtaaacatcttaagtgacatgcatttgcgaagtattcgtacgaagttgatgcttatgtccagaaatgaagaggccactaagcatttagaatgcacaaaacaacttgcagcagcttttcatgaggaatttgttgtgagagaagatttaatgggcctggcaataggaacacatggtagtaacatccagcaagctaggaaggttcctggagttaccgccattgagctagatgaagatactggaacattcagaatctacggagagagtgctgatgctgtaaaaaaggctagaggtttcttggaatttgtggaggattttattcaggttcctaggaatctcgttggaaaagtaattggaaaaaatggcaaagttattcaagaaatagtggacaaatctggtgtggttcgagtgagaattgaaggggacaatgaaaataaattacccagagaagacggtatggttccatttgtatttgttggcactaaagaaagcattggaaatgtgcaggttcttctagagtatcatattgcctatctaaaggaagtagaacagctaagaatggaacgcctacagattgatgaacagctgcgacagattggttctaggtcttatagcggaagaggcagaggtcgtcggggacctaattacacctccggttatggtacaaattctgagctgtctaacccctctgaaacggaatctgagcgtaaagacgagctgagtgattggtcattggcaggagaagatgatcgagacagccgacatcagcgtgacagcaggagacgcccaggaggaagaggcagaagtgtttcagggggtcgaggtcgtggtggaccacgtggtggcaaatcctccatcagttctgtgctcaaagatccagacagcaatccatacagcttacttgataatacagaatcagatcagactgcagacactgatgccagcgaatctcatcacagtactaaccgtcgtaggcggtctcgtagacgaaggactgatgaagatgctgttctgatggatggaatgactgaatctgatacagcttcagttaatgaaaatgggctagtcacagttgcagattatatttctagagctgagtctcagagcagacaaagaaacctcccaagggaaactttggctaaaaacaagaaagaaatggcaaaagatgtgattgaagagcatggtccttcagaaaaggcaataaacggcccaactagtgcttctggcgatgacatttctaagctacagcgtactccaggagaagaaaagattaataccttaaaagaagaaaacactcaagaagcagcagtcctgaatggtgtttcataaactgaagaagttcctagtttacagttcttttacattacatttacaatagtgcttgtacaagcttgccaaagatagaatatggatcgccagtctttacatcgcactttcagttcctccatttggaattcaaaaaggggagggatcctgaagaaatcatatgttaaacatactttgacacctactgtgttataaaatatatcatcagatgtgccttgagaatagtatatgtaacattaaaaaaaagttgctggctataggaaatgttattttgttttcaaaatatggcagagatggggggtggtgggtggggtgggatccctaacgtaatattctttatgaaagcattagctgcttttgttacatttttaatatgcaaccacttcttcacctgaggaaaactagaatgaaatgcagtctaaaatattttgcactgaattgtaatttcttcattagtttagtctggaaactggtctgttttaatgtgttttttaaatgctgtatgtagaggaaaatctgcagaccactggaatacatttgttaaactctcatctgcagggacactgggcgatacttggcagtgactgttctaccttgaggctttgtttggtttatttattaaagtgtacagtatttaaaaatcaaacatagctttagttaaaacactaagctgaattagtcatgtccattcagacataacctgaactactgaaaagatcaatttccagaaggtttattctgtataaactacatgttagtcttcagtagagtatcttttttttttccttttttttttttttatttcggttgtttgatgtgcaatatgtttttgtatgcaggtagtaaataaactttgatcttcca

SEQ ID NO: 426339 - DNA, 3132 bp, Homo sapiens
  misc_feature (53)..(53): n is a, c, g, or t
gcccctcccccctcctcccctctggttggaaagtttctagaatctcttcccgnggggcctttgcggttccaacatggcggagctgacggtggaggttcgcggctctaacggggctttctacaagggatttatcaaagatgttcatgaagactcccttacagttgtttttgaaaataattggcaaccagaacgccaggttccatttaatgaagttagattaccaccaccacctgatataaaaaaagaaattagtgaaggagatgaagtagaggtatattcaagagcaaatgaccaagagccatgtgggtggtggttggctaaagttcggatgatgaaaggagaattttatgtcattgaatatgctgcttgtgacgctacttacaatgaaatagtcacatttgaacgacttcggcctgtcaatcaaaataaaactgtcaaaaaaaataccttctttaaatgcacagtggatgttcctgaggatttgagagaggcgtgtgctaatgaaaatgcacataaagattttaagaaagcagtaggagcatgcagaattttttaccatccagaaacaacacagctaatgatactgtctgccagtgaagcaactgtgaagagagtaaacatcttaagtgacatgcatttgcgaagtattcgtacgaagttgatgcttatgtccagaaatgaagaggccactaagcatttagaatgcacaaaacaacttgcagcagcttttcatgaggaatttgttgtgagagaagatttaatgggcctggcaataggaacacatggtagtaacatccagcaagctaggaaggttcctggagttaccgccattgagctagatgaagatactggaacattcagaatctacggagagagtgctgatgctgtaaaaaaggctagaggtttcttggaatttgtggaggattttattcaggttcctaggaatctcgttggaaaagtaattggaaaaaatggcaaagttattcaagaaatagtggacaaatctggtgtggttcgagtgagaattgaaggggacaatgaaaataaattacccagagaagacggtatggttccatttgtatttgttggcactaaagaaagcattggaaatgtgcaggttcttctagagtatcatattgcctatctaaaggaagtagaacagctaagaatggaacgcctacagattgatgaacagctgcgacagattggttctaggtcttatagcggaagaggcagaggtcgtcggggacctaattacacctccggttatggtacaaattctgagctgtctaacccctctgaaacggaatctgagcgtaaagacgagctgagtgattggtcattggcaggagaagatgatcgagacagccgacatcagcgtgacagcaggagacgcccaggaggaagaggcagaagtgtttcagggggtcgaggtcgtggtggaccacgtggtggcaaatcctccatcagttctgtgctcaaagatccagacagcaatccatacagcttacttgataatacagaatcagatcagactgcagacactgatgccagcgaatctcatcacagtactaaccgtcgtaggcggtctcgtagacgaaggactgatgaagatgctgttctgatggatggaatgactgaatctgatacagcttcagttaatgaaaatgggctagtcacagttgcagattatatttctagagctgagtctcagagcagacaaagaaacctcccaagggaaactttggctaaaaacaagaaagaaatggcaaaagatgtgattgaagagcatggtccttcagaaaaggcaataaacggcccaactagtgcttctggcgatgacatttctaagctacagcgtactccaggagaagaaaagattaataccttaaaagaagaaaacactcaagaagcagcagtcctgaatggtgtttcataaactgaagaagttcctagtttacagttcttttacattacatttacaatagtgcttgtacaagcttgccaaagatagaatatggatcgccagtctttacatcgcactttcagttcctccatttggaattcaaaaaggggagggatcctgaagaaatcatatgttaaacatactttgacacctactgtgttataaaatatatcatcagatgtgccttgagaatagtatatgtaacattaaaaaaaagttgctggctataggaaatgttattttgttttcaaaatatggcagagatggggggtggtgggtggggtgggatccctaacgtaatattctttatgaaagcattagctgcttttgttacatttttaatatgcaaccacttcttcacctgaggaaaactagaatgaaatgcagtctaaaatattttgcactgaattgtaatttcttcattagtttagtctggaaactggtctgttttaatgtgttttttaaatgctgtatgtagaggaaaatctgcagaccactggaatacatttgttaaactctcatctgcagggacactgggcgatacttggcagtgactgttctaccttgaggctttgtttggtttatttattaaagtgtacagtatttaaaaatcaaacatagctttagttaaaacactaagctgaattagtcatgtccattcagacataacctgaactactgaaaagatcaatttccagaaggtttattctgtataaactacatgttagtcttcagtagagtatcttttttttttccttttttttttttttatttcggttgtttgatgtgcaatatgtttttgtatgcaggtagtaaataaactttgatcttccaaaaaaaaaaaaacaaaaagatattcgataactacagtacatcgcagctacaaaacgggggggctgtcataatgataattaccgccaggatggaaactatatcaatgcctacccccctatcttgtgttcgaaaaaagtggtccatatgttagacgtaactatcaactacaatctatcagtgttattacaatcatgcgtgatagaaaaagttgttatgactacttgttggagacccatccgtgtggtgggaataatggagaccacacagctatataacccgggaataaatacgacttatgagcaacctgtttgttgaaaaattattacataata

SEQ ID NO: 426340 - DNA, 2887 bp, Homo sapiens
  misc_feature (53)..(53): n is a, c, g, or t
gcccctcccccctcctcccctctggttggaaagtttctagaatctcttcccgnggggcctttgcggttccaacatggcggagctgacggtggaggttcgcggctctaacggggctttctacaagggatttatcaaagatgttcatgaagactcccttacagttgtttttgaaaataattggcaaccagaacgccaggttccatttaatgaagttagattaccaccaccacctgatataaaaaaagaaattagtgaaggagatgaagtagaggtatattcaagagcaaatgaccaagagccatgtgggtggtggttggctaaagttcggatgatgaaaggagaattttatgtcattgaatatgctgcttgtgacgctacttacaatgaaatagtcacatttgaacgacttcggcctgtcaatcaaaataaaactgtcaaaaaaaataccttctttaaatgcacagtggatgttcctgaggatttgagagaggcgtgtgctaatgaaaatgcacataaagattttaagaaagcagtaggagcatgcagaattttttaccatccagaaacaacacagctaatgatactgtctgccagtgaagcaactgtgaagagagtaaacatcttaagtgacatgcatttgcgaagtattcgtacgaagttgatgcttatgtccagaaatgaagaggccactaagcatttagaatgcacaaaacaacttgcagcagcttttcatgaggaatttgttgtgagagaagatttaatgggcctggcaataggaacacatggtagtaacatccagcaagctaggaaggttcctggagttaccgccattgagctagatgaagatactggaacattcagaatctacggagagagtgctgatgctgtaaaaaaggctagaggtttcttggaatttgtggaggattttattcaggttcctaggaatctcgttggaaaagtaattggaaaaaatggcaaagttattcaagaaatagtggacaaatctggtgtggttcgagtgagaattgaaggggacaatgaaaataaattacccagagaagacggtatggttccatttgtatttgttggcactaaagaaagcattggaaatgtgcaggttcttctagagtatcatattgcctatctaaaggaagtagaacagctaagaatggaacgcctacagattgatgaacagctgcgacagattggtatgggtttcagaccttcttccaccagagggcctgaaaaagagaaaggatatgccactgatgaaagtaccgtctcttctgtacaaggttctaggtcttatagcggaagaggcagaggtcgtcggggacctaattacacctccggttatggtacaaattctgagctgtctaacccctctgaaacggaatctgagcgtaaagacgagctgagtgattggtcattggcaggagaagatgatcgagacagccgacatcagcgtgacagcaggagacgcccaggaggaagaggcagaagtgtttcagggggtcgaggtcgtggtggaccacgtggtggcaaatcctccatcagttctgtgctcaaagatccagacagcaatccatacagcttacttgataatacagaatcagatcagactgcagacactgatgccagcgaatctcatcacagtactaaccgtcgtaggcggtctcgtagacgaaggactgatgaagatgctgttctgatggatggaatgactgaatctgatacagcttcagttaatgaaaatgggctagtcacagttgcagattatatttctagagctgagtctcagagcagacaaagaaacctcccaagggaaactttggctaaaaacaagaaagaaatggcaaaagatgtgattgaagagcatggtccttcagaaaaggcaataaacggcccaactagtgcttctggcgatgacatttctaagctacagcgtactccaggagaagaaaagattaataccttaaaagaagaaaacactcaagaagcagcagtcctgaatggtgtttcataaactgaagaagttcctagtttacagttcttttacattacatttacaatagtgcttgtacaagcttgccaaagatagaatatggatcgccagtctttacatcgcactttcagttcctccatttggaattcaaaaaggggagggatcctgaagaaatcatatgttaaacatactttgacacctactgtgttataaaatatatcatcagatgtgccttgagaatagtatatgtaacattaaaaaaaagttgctggctataggaaatgttattttgttttcaaaatatggcagagatggggggtggtgggtggggtgggatccctaacgtaatattctttatgaaagcattagctgcttttgttacatttttaatatgcaaccacttcttcacctgaggaaaactagaatgaaatgcagtctaaaatattttgcactgaattgtaatttcttcattagtttagtctggaaactggtctgttttaatgtgttttttaaatgctgtatgtagaggaaaatctgcagaccactggaatacatttgttaaactctcatctgcagggacactgggcgatacttggcagtgactgttctaccttgaggctttgtttggtttatttattaaagtgtacagtatttaaaaatcaaacatagctttagttaaaacactaagctgaattagtcatgtccattcagacataacctgaactactgaaaagatcaatttccagaaggtttattctgtataaactacatgttagtcttcagtagagtatcttttttttttccttttttttttttttatttcggttgtttgatgtgcaatatgtttttgtatgcaggtagtaaataaactttgatcttcca

SEQ ID NO: 426341 - DNA, 2178 bp, Homo sapiens
  misc_feature (53)..(53): n is a, c, g, or t
gcccctcccccctcctcccctctggttggaaagtttctagaatctcttcccgnggggcctttgcggttccaacatggcggagctgacggtggaggttcgcggctctaacggggctttctacaagggatttatcaaagatgttcatgaagactcccttacagttgtttttgaaaataattggcaaccagaacgccaggttccatttaatgaagttagattaccaccaccacctgatataaaaaaagaaattagtgaaggagatgaagtagaggtatattcaagagcaaatgaccaagagccatgtgggtggtggttggctaaagttcggatgatgaaaggagaattttatgtcattgaatatgctgcttgtgacgctacttacaatgaaatagtcacatttgaacgacttcggcctgtcaatcaaaataaaactgtcaaaaaaaataccttctttaaatgcacagtggatgttcctgaggatttgagagaggcgtgtgctaatgaaaatgcacataaagattttaagaaagcagtaggagcatgcagaattttttaccatccagaaacaacacagctaatgatactgtctgccagtgaagcaactgtgaagagagtaaacatcttaagtgacatgcatttgcgaagtattcgtacgaagttgatgcttatgtccagaaatgaagaggccactaagcatttagaatgcacaaaacaacttgcagcagcttttcatgaggaatttgttgtgagagaagatttaatgggcctggcaataggaacacatggtagtaacatccagcaagctaggaaggttcctggagttaccgccattgagctagatgaagatactggaacattcagaatctacggagagagtgctgatgctgtaaaaaaggctagaggtttcttggaatttgtggaggattttattcaggttcctaggaatctcgttggaaaagtaattggaaaaaatggcaaagttattcaagaaatagtggacaaatctggtgtggttcgagtgagaattgaaggggacaatgaaaataaattacccagagaagacggtatggttccatttgtatttgttggcactaaagaaagcattggaaatgtgcaggttcttctagagtatcatattgcctatctaaaggaagtagaacagctaagaatggaacgcctacagattgatgaacagctgcgacagattggttctaggtcttatagcggaagaggcagaggtcgtcggggacctaattacacctccggttatggtacaaattctgagctgtctaacccctctgaaacggaatctgagcgtaaagacgagctgagtgattggtcattggcaggagaagatgatcgagacagccgacatcagcgtgacagcaggagacgcccaggaggaagaggcagaagtgtttcagggggtcgaggtcgtggtggaccacgtggtggcaaatcctccatcagttctgtgctcaaagatccagacagcaatccatacagcttacttgataatacagaatcagatcagactgcagacactgatgccagcgaatctcatcacagtactaaccgtcgtaggcggtctcgtagacgaaggactgatgaagatgctgttctgatggatggaatgactgaatctgatacagcttcagttaatgaaaatgggctaggcaaaagatgtgattgaagagcatggtccttcagaaaaggcaataaacggcccaactagtgcttctggcgatgacatttctaagctacagcgtactccaggagaagaaaagattaataccttaaaagaagaaaacactcaagaagcagcagtcctgaatggtgtttcataaactgaagaagttcctagtttacagttcttttacattacatttacaatagtgcttgtacaagcttgccaaagatagaatatggatcgccagtctttacatcgcactttcagttcctccatttggaattcaaaaaggggagggatcctgaagaaatcatatgttaaacatactttgacacctactgtgttataaaatatatcatcagatgtgccttgagaatagtatatgtaacattaaaaaaaagttgctggctaaaaaaaaaagaacaaacacaaaagacacaaacacacgacagaccccagcaccccaacacaccacaaaacacacaccg

SEQ ID NO: 426342 - DNA, 2747 bp, Homo sapiens
ttagctagtacgaggctgggtgttcgaatcggccgaggggaggtcgcggctctaacggggctttctacaagggatttatcaaagatgttcatgaagactcccttacagttgtttttgaaaataattggcaaccagaacgccaggttccatttaatgaagttagattaccaccaccacctgatataaaaaaagaaattagtgaaggagatgaagtagaggtatattcaagagcaaatgaccaagagccatgtgggtggtggttggctaaagttcggatgatgaaaggagaattttatgtcattgaatatgctgcttgtgacgctacttacaatgaaatagtcacatttgaacgacttcggcctgtcaatcaaaataaaactgtcaaaaaaaataccttctttaaatgcacagtggatgttcctgaggatttgagagaggcgtgtgctaatgaaaatgcacataaagattttaagaaagcagtaggagcatgcagaattttttaccatccagaaacaacacagctaatgatactgtctgccagtgaagcaactgtgaagagagtaaacatcttaagtgacatgcatttgcgaagtattcgtacgaagttgatgcttatgtccagaaatgaagaggccactaagcatttagaatgcacaaaacaacttgcagcagcttttcatgaggaatttgttgtgagagaagatttaatgggcctggcaataggaacacatggtagtaacatccagcaagctaggaaggttcctggagttaccgccattgagctagatgaagatactggaacattcagaatctacggagagagtgctgatgctgtaaaaaaggctagaggtttcttggaatttgtggaggattttattcaggttcctaggaatctcgttggaaaagtaattggaaaaaatggcaaagttattcaagaaatagtggacaaatctggtgtggttcgagtgagaattgaaggggacaatgaaaataaattacccagagaagacggtatggttccatttgtatttgttggcactaaagaaagcattggaaatgtgcaggttcttctagagtatcatattgcctatctaaaggaagtagaacagctaagaatggaacgcctacagattgatgaacagctgcgacagattggttctaggtcttatagcggaagaggcagaggtcgtcggggacctaattacacctccggttatggtacaaattctgagctgtctaacccctctgaaacggaatctgagcgtaaagacgagctgagtgattggtcattggcaggagaagatgatcgagacagccgacatcagcgtgacagcaggagacgcccaggaggaagaggcagaagtgtttcagggggtcgaggtcgtggtggaccacgtggtggcaaatcctccatcagttctgtgctcaaagatccagacagcaatccatacagcttacttgataatacagaatcagatcagactgcagacactgatgccagcgaatctcatcacagtactaaccgtcgtaggcggtctcgtagacgaaggactgatgaagatgctgttctgatggatggaatgactgaatctgatacagcttcagttaatgaaaatgggctagtcacagttgcagattatatttctagagctgagtctcagagcagacaaagaaacctcccaagggaaactttggctaaaaacaagaaagaaatggcaaaagatgtgattgaagagcatggtccttcagaaaaggcaataaacggcccaactagtgcttctggcgatgacatttctaagctacagcgtactccaggagaagaaaagattaataccttaaaagaagaaaacactcaagaagcagcagtcctgaatggtgtttcataaactgaagaagttcctagtttacagttcttttacattacatttacaatagtgcttgtacaagcttgccaaagatagaatatggatcgccagtctttacatcgcactttcagttcctccatttggaattcaaaaaggggagggatcctgaagaaatcatatgttaaacatactttgacacctactgtgttataaaatatatcatcagatgtgccttgagaatagtatatgtaacattaaaaaaaagttgctggctataggaaatgttattttgttttcaaaatatggcagagatggggggtggtgggtggggtgggatccctaacgtaatattctttatgaaagcattagctgcttttgttacatttttaatatgcaaccacttcttcacctgaggaaaactagaatgaaatgcagtctaaaatattttgcactgaattgtaatttcttcattagtttagtctggaaactggtctgttttaatgtgttttttaaatgctgtatgtagaggaaaatctgcagaccactggaatacatttgttaaactctcatctgcagggacactgggcgatacttggcagtgactgttctaccttgaggctttgtttggtttatttattaaagtgtacagtatttaaaaatcaaacatagctttagttaaaacactaagctgaattagtcatgtccattcagacataacctgaactactgaaaagatcaatttccagaaggtttattctgtataaactacatgttagtcttcagtagagtatcttttttttttccttttttttttttttatttcggttgtttgatgtgcaatatgtttttgtatgcaggtagtaaataaactttgatcttcca

SEQ ID NO: 426343 - DNA, 2987 bp, Homo sapiens
ctcaaggatccttatttttttaatccccccccccccccccccccgggcctttgcggttccaacatggcggagctgacggtggaggttcgcggctctaacggggctttctacaagtcaattcacaatgaatcaaatgtccccattttggaactctgaagtatttataattgatctctatacatatctacaatctactgcttgtttctacttagactttgactccattactcattttgcctcacaaagtgagttggtactttgacaaaggttggaaaggacactagccacctgtgtgtgcactgaaatcatgtacgcttgaacatttggaattttatgtccagccataatccacttgcatatgcactttgtggaaactgtggtcttcagaactctggaagaatgagaatggcggagtggaaaagagtcctggatttgaagtaaacagatgagaattctaggtatattcaagagcaaatgaccaagagccatgtgggtggtggttggctaaagttcggatgatgaaaggagaattttatgtcattgaatatgctgcttgtgacgctacttacaatgaaatagtcacatttgaacgacttcggcctgtcaatcaaaataaaactgtcaaaaaaaataccttctttaaatgcacagtggatgttcctgaggatttgagagaggcgtgtgctaatgaaaatgcacataaagattttaagaaagcagtaggagcatgcagaattttttaccatccagaaacaacacagctaatgatactgtctgccagtgaagcaactgtgaagagagtaaacatcttaagtgacatgcatttgcgaagtattcgtacgaagttgatgcttatgtccagaaatgaagaggccactaagcatttagaatgcacaaaacaacttgcagcagcttttcatgaggaatttgttgtgagagaagatttaatgggcctggcaataggaacacatggtagtaacatccagcaagctaggaaggttcctggagttaccgccattgagctagatgaagatactggaacattcagaatctacggagagagtgctgatgctgtaaaaaaggctagaggtttcttggaatttgtggaggattttattcaggttcctaggaatctcgttggaaaagtaattggaaaaaatggcaaagttattcaagaaatagtggacaaatctggtgtggttcgagtgagaattgaaggggacaatgaaaataaattacccagagaagacggtatggttccatttgtatttgttggcactaaagaaagcattggaaatgtgcaggttcttctagagtatcatattgcctatctaaaggaagtagaacagctaagaatggaacgcctacagattgatgaacagctgcgacagattggttctaggtcttatagcggaagaggcagaggtcgtcggggacctaattacacctccggttatggtacaaattctgagctgtctaacccctctgaaacggaatctgagcgtaaagacgagctgagtgattggtcattggcaggagaagatgatcgagacagccgacatcagcgtgacagcaggagacgcccaggaggaagaggcagaagtgtttcagggggtcgaggtcgtggtggaccacgtggtggcaaatcctccatcagttctgtgctcaaagatccagacagcaatccatacagcttacttgataatacagaatcagatcagactgcagacactgatgccagcgaatctcatcacagtactaaccgtcgtaggcggtctcgtagacgaaggactgatgaagatgctgttctgatggatggaatgactgaatctgatacagcttcagttaatgaaaatgggctagtcacagttgcagattatatttctagagctgagtctcagagcagacaaagaaacctcccaagggaaactttggctaaaaacaagaaagaaatggcaaaagatgtgattgaagagcatggtccttcagaaaaggcaataaacggcccaactagtgcttctggcgatgacatttctaagctacagcgtactccaggagaagaaaagattaataccttaaaagaagaaaacactcaagaagcagcagtcctgaatggtgtttcataaactgaagaagttcctagtttacagttcttttacattacatttacaatagtgcttgtacaagcttgccaaagatagaatatggatcgccagtctttacatcgcactttcagttcctccatttggaattcaaaaaggggagggatcctgaagaaatcatatgttaaacatactttgacacctactgtgttataaaatatatcatcagatgtgccttgagaatagtatatgtaacattaaaaaaaagttgctggctataggaaatgttattttgttttcaaaatatggcagagatggggggtggtgggtggggtgggatccctaacgtaatattctttatgaaagcattagctgcttttgttacatttttaatatgcaaccacttcttcacctgaggaaaactagaatgaaatgcagtctaaaatattttgcactgaattgtaatttcttcattagtttagtctggaaactggtctgttttaatgtgttttttaaatgctgtatgtagaggaaaatctgcagaccactggaatacatttgttaaactctcatctgcagggacactgggcgatacttggcagtgactgttctaccttgaggctttgtttggtttatttattaaagtgtacagtatttaaaaatcaaacatagctttagttaaaacactaagctgaattagtcatgtccattcagacataacctgaactactgaaaagatcaatttccagaaggtttattctgtataaactacatgttagtcttcagtagagtatcttttttttttccttttttttttttttatttcggttgtttgatgtgcaatatgtttttgtatgcaggtagtaaataaactttgatcttcca

SEQ ID NO: 426344 - DNA, 1760 bp, Homo sapiens
ctatcagctcggtaccgacgacaggtatggttccatttgtatttgttggcactaaagaaagcattggaaatgtgcaggttcttctagagtatcatattgcctatctaaaggaagtagaacagctaagaatggaacgcctacagattgatgaacagctgcgacagattggttctaggtcttatagcggaagaggcagaggtcgtcggggacctaattacacctccggttatggtacaaattctgagctgtctaacccctctgaaacggaatctgagcgtaaagacgagctgagtgattggtcattggcaggagaagatgatcgagacagccgacatcagcgtgacagcaggagacgcccaggaggaagaggcagaagtgtttcagggggtcgaggtcgtggtggaccacgtggtggcaaatcctccatcagttctgtgctcaaagatccagacagcaatccatacagcttacttgataatacagaatcagatcagactgcagacactgatgccagcgaatctcatcacagtactaaccgtcgtaggcggtctcgtagacgaaggactgatgaagatgctgttctgatggatggaatgactgaatctgatacagcttcagttaatgaaaatgggctagtcacagttgcagattatatttctagagctgagtctcagagcagacaaagaaacctcccaagggaaactttggctaaaaacaagaaagaaatggcaaaagatgtgattgaagagcatggtccttcagaaaaggcaataaacggcccaactagtgcttctggcgatgacatttctaagctacagcgtactccaggagaagaaaagattaataccttaaaagaagaaaacactcaagaagcagcagtcctgaatggtgtttcataaactgaagaagttcctagtttacagttcttttacattacatttacaatagtgcttgtacaagcttgccaaagatagaatatggatcgccagtctttacatcgcactttcagttcctccatttggaattcaaaaaggggagggatcctgaagaaatcatatgttaaacatactttgacacctactgtgttataaaatatatcatcagatgtgccttgagaatagtatatgtaacattaaaaaaaagttgctggctataggaaatgttattttgttttcaaaatatggcagagatggggggtggtgggtggggtgggatccctaacgtaatattctttatgaaagcattagctgcttttgttacatttttaatatgcaaccacttcttcacctgaggaaaactagaatgaaatgcagtctaaaatattttgcactgaattgtaatttcttcattagtttagtctggaaactggtctgttttaatgtgttttttaaatgctgtatgtagaggaaaatctgcagaccactggaatacatttgttaaactctcatctgcagggacactgggcgatacttggcagtgactgttctaccttgaggctttgtttggtttatttattaaagtgtacagtatttaaaaatcaaacatagctttagttaaaacactaagctgaattagtcatgtccattcagacataacctgaactactgaaaagatcaatttccagaaggtttattctgtataaactacatgttagtcttcagtagagtatcttttttttttccttttttttttttttatttcggttgtttgatgtgcaatatgtttttgtatgcaggtagtaaataaactttgatcttcca

SEQ ID NO: 426345 - DNA, 2124 bp, Homo sapiens
  misc_feature (53)..(53): n is a, c, g, or t
gcccctcccccctcctcccctctggttggaaagtttctagaatctcttcccgnggggcctttgcggttccaacatggcggagctgacggtggaggttcgcggctctaacggggctttctacaagggatttatcaaagatgttcatgaagactcccttacagttgtttttgaaaataattggcaaccagaacgccaggttccatttaatgaagttagattaccaccaccacctgatataaaaaaagaaattagtgaaggagatgaagtagaggtatattcaagagcaaatgaccaagagccatgtgggtggtggttggctaaagttcggatgatgaaaggagaattttatgtcattgaatatgctgcttgtgacgctacttacaatgaaatagtcacatttgaacgacttcggcctgtcaatcaaaataaaactgtcaaaaaaaataccttctttaaatgcacagtggatgttcctgaggatttgagagaggcgtgtgctaatgaaaatgcacataaagattttaagaaagcagtaggagcatgcagaattttttaccatccagaaacaacacagctaatgatactgtctgccagtgaagcaactgtgaagagagtaaacatcttaagtgacatgcatttgcgaagtattcgtacgaagttgatgcttatgtccagaaatgaagaggccactaagcatttagaatgcacaaaacaacttgcagcagcttttcatgaggaatttgttgtgagagaagatttaatgggcctggcaataggaacacatggtagtaacatccagcaagctaggaaggttcctggagttaccgccattgagctagatgaagatactggaacattcagaatctacggagagagtgctgatgctgtaaaaaaggctagaggtttcttggaatttgtggaggattttattcaggttcctaggaatctcgttggaaaagtaattggaaaaaatggcaaagttattcaagaaatagtggacaaatctggtgtggttcgagtgagaattgaaggggacaatgaaaataaattacccagagaagacggtatggttccatttgtatttgttggcactaaagaaagcattggaaatgtgcaggttcttctagagtatcatattgcctatctaaaggaagtagaacagctaagaatggaacgcctacagattgatgaacagctgcgacagattggttctaggtcttatagcggaagaggcagaggtcgtcggggacctaattacacctccggttatggtacaaattctgagctgtctaacccctctgaaacggaatctgagcgtaaagacgagctgagtgattggtcattggcaggagaagatgatcgagacagccgacatcagcgtgacagcaggagacgcccaggaggaagaggcagaagtgtttcagggggtcgaggtcgtggtggaccacgtggtggcaaatcctccatcagttctggtagtcttttctatactctgtcagcatccattatttgtaaacagtttaattttacaaaagttaattcatctcccagggccacccatttttggaagtttctcttgctactcattgtcttagagaaagtagtggaccatatagcagtatcaggaaaagccctcgtagagtgtttctcagtgaaggtttacttagaatatactggtcagaactttagttggcagcttttctttatatgatgagggtcagatgtttctctcttcaggttttggaggcttatttaattagaattttttttgttttccctagaattttggggttatgtttttttgtttgccagacagacccagagatttctaatgcacagagagatgtcagtacttttctatacttaatattgaaaacgaagtgaagagcattcttagctacactatgtagtactttgggaacagggaaaaattgtggaattaactaagttttttaattgttggaggaactgtgctgtaaagaggagtgtttggatgactaaagatttgagggtgtaggaaacgttttacttaattacttctgtcttctaaaatttttttatgctttacattaagttgtaggagtttccagaatatccttggttaccataacgggctagggagtt

SEQ ID NO: 426346 - DNA, 1473 bp, Homo sapiens
  misc_feature (6)..(6): n is a, c, g, or t
gtgcgnccttgcattagtgcagttcgagcatagtattatcgggatcattgaatgaaacgccaggatgcaagacgtgcagaactgtctcgatcgtgtgtacgagggttctgtgctgtggaaaaccctgtggggtcctccatcagttctgtgctcaaagatccagacagcaatccatacagcttacttgataatacagaatcagatcagactgcagacactgatgccagcgaatctcatcacagtactaaccgtcgtaggcggtctcgtagacgaaggactgatgaagatgctgttctgatggatggaatgactgaatctgatacagcttcagttaatgaaaatgggctagtcacagttgcagattatatttctagagctgagtctcagagcagacaaagaaacctcccaagggaaactttggctaaaaacaagaaagaaatggcaaaagatgtgattgaagagcatggtccttcagaaaaggcaataaacggcccaactagtgcttctggcgatgacatttctaagctacagcgtactccaggagaagaaaagattaataccttaaaagaagaaaacactcaagaagcagcagtcctgaatggtgtttcataaactgaagaagttcctagtttacagttcttttacattacatttacaatagtgcttgtacaagcttgccaaagatagaatatggatcgccagtctttacatcgcactttcagttcctccatttggaattcaaaaaggggagggatcctgaagaaatcatatgttaaacatactttgacacctactgtgttataaaatatatcatcagatgtgccttgagaatagtatatgtaacattaaaaaaaagttgctggctataggaaatgttattttgttttcaaaatatggcagagatggggggtggtgggtggggtgggatccctaacgtaatattctttatgaaagcattagctgcttttgttacatttttaatatgcaaccacttcttcacctgaggaaaactagaatgaaatgcagtctaaaatattttgcactgaattgtaatttcttcattagtttagtctggaaactggtctgttttaatgtgttttttaaatgctgtatgtagaggaaaatctgcagaccactggaatacatttgttaaactctcatctgcagggacactgggcgatacttggcagtgactgttctaccttgaggctttgtttggtttatttattaaagtgtacagtatttaaaaatcaaacatagctttagttaaaacactaagctgaattagtcatgtccattcagacataacctgaactactgaaaagatcaatttccagaaggtttattctgtataaactacatgttagtcttcagtagagtatcttttttttttccttttttttttttttatttcggttgtttgatgtgcaatatgtttttgtatgcaggtagtaaataaactttgatcttcca

SEQ ID NO: 426347 - DNA, 1609 bp, Homo sapiens
tcaggctttcatcttgcctcttttaaaataattataaatgacactggtaaaggtacatatatcaagagtaggcattaattttcaagggctaaaatgtcattaacttcggtataaaccaaactgtactagagaggaagactgtgtccctgaatgatggcagtttaagtctgagttttactgtgagttaaaaccctctgaatttccagatgataattccatttttaatccatttggaatgctgaaagctacaaaaatgtatttcctgtcagtaaacatttgttgttttatttttgtgtttaattaaaagtttatttttcccctttaaatctttgaaggaaagaaggtttttttgtttttttgtttgtttttgtcagaatagttcatggtaaactttgcaattacagatgatagtgaaaaaaaaccccagcgacgcaatcgtagccgcaggcgtcgcttcaggggtcaggcagaagatagacagccagtcacagttgcagattatatttctagagctgagtctcagagcagacaaagaaacctcccaagggaaactttggctaaaaacaagaaagaaatggcaaaagatgtgattgaagagcatggtccttcagaaaaggcaataaacggcccaactagtgcttctggcgatgacatttctaagctacagcgtactccaggagaagaaaagattaataccttaaaagaagaaaacactcaagaagcagcagtcctgaatggtgtttcataaactgaagaagttcctagtttacagttcttttacattacatttacaatagtgcttgtacaagcttgccaaagatagaatatggatcgccagtctttacatcgcactttcagttcctccatttggaattcaaaaaggggagggatcctgaagaaatcatatgttaaacatactttgacacctactgtgttataaaatatatcatcagatgtgccttgagaatagtatatgtaacattaaaaaaaagttgctggctataggaaatgttattttgttttcaaaatatggcagagatggggggtggtgggtggggtgggatccctaacgtaatattctttatgaaagcattagctgcttttgttacatttttaatatgcaaccacttcttcacctgaggaaaactagaatgaaatgcagtctaaaatattttgcactgaattgtaatttcttcattagtttagtctggaaactggtctgttttaatgtgttttttaaatgctgtatgtagaggaaaatctgcagaccactggaatacatttgttaaactctcatctgcagggacactgggcgatacttggcagtgactgttctaccttgaggctttgtttggtttatttattaaagtgtacagtatttaaaaatcaaacatagctttagttaaaacactaagctgaattagtcatgtccattcagacataacctgaactactgaaaagatcaatttccagaaggtttattctgtataaactacatgttagtcttcagtagagtatcttttttttttccttttttttttttttatttcggttgtttgatgtgcaatatgtttttgtatgcaggtagtaaataaactttgatcttcca

SEQ ID NO: 426348 - DNA, 1332 bp, Homo sapiens
gaggaaagcaaagtgtcaagggggccagtcgtgtggccagtgggtgcaaatccccatcaggtgctcaaagatccagacagcaatccatacagcttacttgataatacagaatcagatcagactgcagacactgatgccagcgaatctcatcacagtactaaccgtcgtaggcggtctcgtagacgaaggactgatgaagatgctgttctgatggatggaatgactgaatctgatacagcttcagttaatgaaaatgggctagtcacagttgcagattatatttctagagctgagtctcagagcagacaaagaaacctcccaagggaaactttggctaaaaacaagaaagaaatggcaaaagatgtgattgaagagcatggtccttcagaaaaggcaataaacggcccaactagtgcttctggcgatgacatttctaagctacagcgtactccaggagaagaaaagattaataccttaaaagaagaaaacactcaagaagcagcaattacatttacaatagtgcttgtacaagcttgccaaagatagaatatggatcgccagtctttacatcgcactttcagttcctccatttggaattcaaaaaggggagggatcctgaagaaatcatatgttaaacatactttgacacctactgtgttataaaatatatcatcagatgtgccttgagaatagtatatgtaacattaaaaaaaagttgctggctataggaaatgttattttgttttcaaaatatggcagagatggggggtggtgggtggggtgggatccctaacgtaatattctttatgaaagcattagctgcttttgttacatttttaatatgcaaccacttcttcacctgaggaaaactagaatgaaatgcagtctaaaatattttgcactgaattgtaatttcttcattagtttagtctggaaactggtctgttttaatgtgttttttaaatgctgtatgtagaggaaaatctgcagaccactggaatacatttgttaaactctcatctgcagggacactgggcgatacttggcagtgactgttctaccttgaggctttgtttggtttatttattaaagtgtacagtatttaaaaatcaaacatagctttagttaaaacactaagctgaattagtcatgtccattcagacataacctgaactactgaaaagatcaatttccagaaggtttattctgtataaactacatgttagtcttcagtagagtatcttttttttttccttttttttttttttatttcggttgtttgatgtgcaatatgtttttgtatgcaggtagtaaataaactttgatcttcca

SEQ ID NO: 426349 - DNA, 1042 bp, Homo sapiens
ccgcacgggcaagacgcggaggagcggccccagccagaagacagggcacccgcggccttgctgcgcatgctcgcgctgtgaccccggcttgaggtaacagcgcgagctgaggctggggcccttggcgcggaggctgagggacccgccgcggcgctgtcgccggagagggagggcaccgctgtcgtcggccagaagccaaggagtcctcagtgacggtgggatccacaacatctccacatcgctgtccccacccagccagggcagcgccagcactagctcagacgcaaggacggaaccgctggactccaggttccttgcctgggagtaggagaaatccacctgctgggggctgagtgtggcctgagggacaggccctgggtcccgggatgcccctgcccgagcccagcgagcaggagggtgagagtgtgaaggccagccaggagccatcccccaagccaggcacagaagtcatcccggcagcccccaggaagcccagaaagttctccaaactggtcctgctcacagcctccaaagacagcaccaaggtggcgggggccaagcgcaagggtgtgcactgtgtcatgtccctgggggtgcccggccccgccacccttgccaaggccctcctccagacccaccccgaggcccagcgggccattgaggcagcccctcaggagcctgagcagaaacggagcaggcaggacccaggcacagacagaacagaagacagtggattagcagcggggcctcctgaggctgctggggagaactttgccccctgctctgtggcgcccggcaagtccctgtaaccttgacaacaggcgcatcctcccaggccaccaacccagccataggctcttctctgtccgcagggcttctggggccaaatgggtgaatctttgctttcaacattgtgtgatttcttttctttttttttttttttttagatcaagtataagttacttttgtaagcagaaaaatactttcaaacaagaataaaagaagctgttcgctagaccccaaaaaaaaaaggttttaaaca

SEQ ID NO: 426350 - DNA, 1174 bp, Homo sapiens
  misc_feature (36)..(36): n is a, c, g, or t
  misc_feature (90)..(90): n is a, c, g, or t
  misc_feature (92)..(92): n is a, c, g, or t
  misc_feature (108)..(109): n is a, c, g, or t
  misc_feature (124)..(124): n is a, c, g, or t
  misc_feature (167)..(167): n is a, c, g, or t
ctaatccacttgtcttctgttcttgtcttgtccctnggtcctgccttgctccgtttcttgcttcaggcttccttgaggggcttgccttcnanattcgcttgggcctcnnggtgggtcttggagnagggccttggcaagggttgcggggccgggcacccccagggacnttgacacagggcacccgcggccttgctgcgcatgctcgcgctgtgaccccggcttgaggtaacagcgcgagctgaggctggggcccttggcgcggaggctgagggacccgccgcggcgctgtcgccggagagggagggcaccgctgtcgtcggccagaagccaaggagtcctcagtgacggtgggatccacaacatctccacatcgctgtccccacccagccagggcagcgccagcactagctcagacgcaaggacggaaccgctggactccaggttccttgcctgggagtaggagaaatccacctgctgggggctgagtgtggcctgagggacaggccctgggtcccgggatgcccctgcccgagcccagcgagcaggagggtgagagtgtgaaggccagccaggagccatcccccaagccaggcacagaagtcatcccggcagcccccaggaagcccagaaagttctccaaactggtcctgctcacagcctccaaagacagcaccaaggtggcgggggccaagcgcaagggtgtgcactgtgtcatgtccctgggggtgcccggccccgccacccttgccaaggccctcctccagacccaccccgaggcccagcgggccattgaggcagcccctcaggagcctgagcagaaacggagcaggcaggacccaggcacagacagaacagaagacagtggattagcagcggggcctcctgaggctgctggggagaactttgccccctgctctgtggcgcccggcaagtccctgtaaccttgacaacaggcgcatcctcccaggccaccaacccagccataggctcttctctgtccgcagggcttctggggccaaatgggtgaatctttgctttcaacattgtgtgatttcttttctttttttttttttttttagatcaagtataagttacttttgtaagcagaaaaatactttcaaacaagaataaaagaagctgttcgctagaccccaaaaaaaaaaggttttaaaca

SEQ ID NO: 426351 - DNA, 1104 bp, Homo sapiens
  misc_feature (36)..(36): n is a, c, g, or t
  misc_feature (90)..(90): n is a, c, g, or t
  misc_feature (92)..(92): n is a, c, g, or t
  misc_feature (108)..(109): n is a, c, g, or t
  misc_feature (124)..(124): n is a, c, g, or t
  misc_feature (167)..(167): n is a, c, g, or t
ctaatccacttgtcttctgttcttgtcttgtccctnggtcctgccttgctccgtttcttgcttcaggcttccttgaggggcttgccttcnanattcgcttgggcctcnnggtgggtcttggagnagggccttggcaagggttgcggggccgggcacccccagggacnttgacacagggcacccgcggccttgctgcgcatgctcgcgctgtgaccccggcttgaggtaacagcgcgagctgaggctggggcccttggcgcggaggctgagggacccgccgcggcgctgtcgccggagagggagggcaccgctgtcgtcggccagaagccaaggagtcctcagtgacggtgggatccacaacatctccacatcgctgtccccacccagccagggcagcgccagcactagctcagacgcaaggacggaaccgctggactccaggttccttgcctgggagtaggagaaatccacctgctgggggctgagtgtggcctgagggacaggccctgggtcccgggatgcccctgcccgagcccagcgagcaggagggtgagagtgtgaaggccagccaggagccatcccccaagccaggcacagaagtcatcccggcagcccccaggaagcccagaaagttctccaaactggtcctgctcacagcctccaaagacagcaccttgccaaggccctcctccagacccaccccgaggcccagcgggccattgaggcagcccctcaggagcctgagcagaaacggagcaggcaggacccaggcacagacagaacagaagacagtggattagcagcggggcctcctgaggctgctggggagaactttgccccctgctctgtggcgcccggcaagtccctgtaaccttgacaacaggcgcatcctcccaggccaccaacccagccataggctcttctctgtccgcagggcttctggggccaaatgggtgaatctttgctttcaacattgtgtgatttcttttctttttttttttttttttagatcaagtataagttacttttgtaagcagaaaaatactttcaaacaagaataaaagaagctgttcgctagaccccaaaaaaaaaaggttttaaaca

SEQ ID NO: 426352 - DNA, 908 bp, Homo sapiens
ccgcacgggcaagacgcggaggagcggccccagccagaagacagggcacccgcggccttgctgcgcatgctcgcgctgtgaccccggcttgaggtaacagcgcgagctgaggctggggcccttggcgcggaggctgagggacccgccgcggcgctgtcgccggagagggagggcaccgctgtcgtcggccagaagccaaggagtcctcagtgacggtgggatccacaacatctccacatcgctgtccccacccagccagggcagcgccagcactagctcagacgcaaggacggaaccgctggactccaggttccttgcctgggagtaggagaaatccacctgctgggggctgagtgtggcctgagggacaggccctgggtcccgggatgcccctgcccgagcccagcgagcaggagggtgagagtgtgaaggccagccaggagccatcccccaagccaggcacagaagtcatcccggcagcccccaggaagcccagaaagttctccaaactggtcctgctcacagcctccaaagacagcaccaaggtggcgggggccaagcgcaagggtgtgcactgtgtcatgtccctgggggtgcccggccccgccacccttgccaaggccctcctccagacccaccccgaggcccagcgggccattgaggcagcccctgtaaccttgacaacaggcgcatcctcccaggccaccaacccagccataggctcttctctgtccgcagggcttctggggccaaatgggtgaatctttgctttcaacattgtgtgatttcttttctttttttttttttttttagatcaagtataagttacttttgtaagcagaaaaatactttcaaacaagaataaaagaagctgttcgctagaccccaaaaaaaaaaggttttaaaca

SEQ ID NO: 426353 - DNA, 880 bp, Homo sapiens
  misc_feature (36)..(36): n is a, c, g, or t
  misc_feature (90)..(90): n is a, c, g, or t
  misc_feature (92)..(92): n is a, c, g, or t
  misc_feature (108)..(109): n is a, c, g, or t
  misc_feature (124)..(124): n is a, c, g, or t
  misc_feature (167)..(167): n is a, c, g, or t
ctaatccacttgtcttctgttcttgtcttgtccctnggtcctgccttgctccgtttcttgcttcaggcttccttgaggggcttgccttcnanattcgcttgggcctcnnggtgggtcttggagnagggccttggcaagggttgcggggccgggcacccccagggacnttgacacagggcacccgcggccttgctgcgcatgctcgcgctgtgaccccggcttgaggtaacagcgcgagctgaggctggggcccttggcgcggaggctgagggacccgccgcggcgctgtcgccggagagggagggcaccgctgtcgtcggccagaagccaaggagtcctcagtgacggtgggatccacaacatctccacatcgctgtccccacccagccagggcagcgccagcactagctcagacgcaaggacggaaccgctggactccaggttccttgcctgggagtaggagaaatccacctgctgggggctgagtgtggcctgagggacaggccctgggtcccgggatgcccctgcccgagcccagcgagcaggagggtgagagtgtgaaggccagccaggagccatcccccaagcctgaggctgctggggagaactttgccccctgctctgtggcgcccggcaagtccctgtaaccttgacaacaggcgcatcctcccaggccaccaacccagccataggctcttctctgtccgcagggcttctggggccaaatgggtgaatctttgctttcaacattgtgtgatttcttttctttttttttttttttttagatcaagtataagttacttttgtaagcagaaaaatactttcaaacaagaataaaagaagctgttcgctagaccccaaaaaaaaaaggttttaaaca

SEQ ID NO: 426354 - DNA, 1080 bp, Homo sapiens
  misc_feature (36)..(36): n is a, c, g, or t
  misc_feature (90)..(90): n is a, c, g, or t
  misc_feature (92)..(92): n is a, c, g, or t
  misc_feature (108)..(109): n is a, c, g, or t
  misc_feature (124)..(124): n is a, c, g, or t
  misc_feature (167)..(167): n is a, c, g, or t
ctaatccacttgtcttctgttcttgtcttgtccctnggtcctgccttgctccgtttcttgcttcaggcttccttgaggggcttgccttcnanattcgcttgggcctcnnggtgggtcttggagnagggccttggcaagggttgcggggccgggcacccccagggacnttgacacagggcacccgcggccttgctgcgcatgctcgcgctgtgaccccggcttgaggccagaagccaaggagtcctcagtgacggtgggatccacaacatctccacatcgctgtccccacccagccagggcagcgccagcactagctcagacgcaaggacggaaccgctggactccaggttccttgcctgggagtaggagaaatccacctgctgggggctgagtgtggcctgagggacaggccctgggtcccgggatgcccctgcccgagcccagcgagcaggagggtgagagtgtgaaggccagccaggagccatcccccaagccaggcacagaagtcatcccggcagcccccaggaagcccagaaagttctccaaactggtcctgctcacagcctccaaagacagcaccaaggtggcgggggccaagcgcaagggtgtgcactgtgtcatgtccctgggggtgcccggccccgccacccttgccaaggccctcctccagacccaccccgaggcccagcgggccattgaggcagcccctcaggagcctgagcagaaacggagcaggcaggacccaggcacagacagaacagaagacagtggattagcagcggggcctcctgaggctgctggggagaactttgccccctgctctgtggcgcccggcaagtccctgtaaccttgacaacaggcgcatcctcccaggccaccaacccagccataggctcttctctgtccgcagggcttctggggccaaatgggtgaatctttgctttcaacattgtgtgatttcttttctttttttttttttttttagatcaagtataagttacttttgtaagcagaaaaatactttcaaacaagaataaaagaagctgttcgctagaccccaaaaaaaaaaggttttaaaca

SEQ ID NO: 426355 - DNA, 6584 bp, Homo sapiens
gcgccggccgctctagcaacccctggctgtcacgctttggtttccgggtcggttctggcaggtctgagcgctccgacttccagaggagcgctgtgcacgtggagaagagcggggactcggcgaccctgccctcccgaccctcatgttcgaagagcctgagtgggccgaggcggccccagtagccgcgggccttgggcccgtaatctcacgacctccgcctgcggcctcctcgcaaaacaagggctccaagcgccgccagctcttggccacattacgggccctagaggcagcatctctttcccagcatccccccagcctatgtataagtgactctgaggaggaggaggaggaaaggaagaagaaatgccccaaaaaggcatcatttgccagtgcctctgctgaagtagggaagaaagggaagaagaaatgtcaaaaacagggcccaccttgcagtgactctgaggaagaagtagaaaggaagaagaaatgccacaaacaggctcttgttggcagtgactctgctgaagatgagaaaagaaagaggaaatgccagaaacatgcccctataaattcagcccagcacctggacaatgttgaccaaacaggtcccaaagcctggaagggtagtactacaaatgatccaccaaagcaaagccctgggtccacttcccctaaaccccctcatacattaagccgcaagcagtggcggaaccggcaaaagaataagagaagatgtaagaacaagtttcagccacctcaggtgccagaccaggccccagctgaggcccccacagagaagacagaggtgtctcctgttcccaggacagacagccatgaggctcgggcaggggctttgcgagcccgcatggcacagcggctggatggggcccgatttcgctacctcaatgaacagttgtactcagggcccagcagtgctgcacagcgtctcttccaggaagaccctgaggcttttcttctctaccaccgcggcttccagagccaagtgaagaagtggccactgcagccagtggaccgcatcgccagggatcttcgccagcggcctgcatccctagtggtggctgacttcggctgtggggattgccgcttggcttcaagtatccggaaccctgtgcattgctttgacttggcttctctggaccctagggtcactgtgtgtgacatggcccaggttcctctggaggatgagtctgtggatgtggctgtgttttgcctttcactgatgggaaccaacatcagggacttcctagaggaggcaaatagagtactgaagccagggggtctcctgaaagtggctgaggtcagcagccgctttgaggatgttcgaacctttctgcgggctgtgaccaagctaggcttcaagattgtctccaaggacctgaccaacagccatttcttcttgtttgatttccaaaagactgggccccctctggtagggcccaaggctcagctttcaggcctgcagcttcagccatgtctctacaagcgcaggtgacctctggatcttccttgaaaggggaggcagatctcaaactccaggctcagaactgtgaagactgtttccagcctggctgtgagccaagacctggttcctggtggaccctgaggacaaagtgtgataaaacctctggctcagacttgctctactgaaggcttcttggttataagatgcataaagtcactggggctagctaaacaataaagagtttattgtgagaacatggggatatctgtctcatgacacttcaggtgttatgaaaactagatggtttggaattcaaggcatctttaggttttgctcttctttccaactaagaagccacatggccttcctgtcctgccatctccactctgctgtcatctgatctgtctacagatcagcttcctctgctcacccatagcttctgctccttcagcttcagtttgcccaggccttcaaggttgcagacaggcagctgttgctgtttgactctgaggcaactggttgtccaccaacatcttggctcaagacatcagtctgagccaccaacttgagactgtttggttgtccccataccgagcatttctagtggtttatctttcccctctcccctcatctccatttttggaaccatatagcatcaagccactcccaacacctattgtcctgtgggactttgggatgtatatagctgagagcacagattttggaatcaggtagacctggatttaattcttggcctgctacccagaggcacttaaagtcatttaatctctgtatatcacattcctcatttggaaaatggtagaatttttgtcttgcagggtggttgtgtgggttaactggagaaatctgtagccagggctgggaacataggaggtgctcagtaaactagctatgactattatgtgttgtaagccttattgttttttgaagatcttccctaggctggttggaggctgaggggtaaagaatggatttgttgactaaggaagcctctgggagaggctagacctttcaacaggcctgcttcataggctatttaatgacttttaatagattctgagcttctgtccttggaggggtagtgagggagctgggtctctgttcataaacaacttgttgatgccatgtgggcttgggggcattgggctgttcattggcggaagagtctgtccactatctctgccttgcagtggactcagatcagcatgtcctgggaaagctataggcaaggtgctgagggaaggtgagtttgaatgatagattctaggcctcccccaaaaggtatctgccatgtgcccaggtataaagatatggcctcttgtacttgtttccaggaatacctgacagtacccattgggagatcataggttctatgccctgagccagttggatgcctctaataaggggatggaggttttgaaacaggctgtagtccagagggcatgtttggaggctgggctgtgaatcattaggcaggcactacacagtgcctctacacgtactgttctttctgctggatattcatcggactggcagtttgctcatctttccgaacagcctagttgtttcctattctactcccaaagcaaaatcagttcttcatctgtactctcaaagtactatgtgaagagtgctacttcagcttctaaatattgcattgtgattcctttgtgcatttggctgctgttttctcaagccatgtttatctttgtattcccggagcttgtcatttgagatatagccagtgtacttattcacctagggagagataaggaatgacagggtccagttgagtgggatagatgagaacaggggtgttatagaaacccaggtactagggcacaagatgagggcactgttgactagtcatgatggaagaagtaggcagacaggagaacttcattaggtagaattggtgggatgttgaggttggtaagagaggaatctgaagtaagttccaggttgctcaactgtgggtaggctggtgatgccattcaaagtgttggattttaggaagtgggacatgcgtgaaatctgtgctgggggtctgggaatcagcagcctagaggtggtaattaaagtcagaatagatgagatattcagggtaagataatgagaagagaaaatggctcagaatagaactgaggagcatgtcatggatgggtaaaggaaaatgaagcagtgaaggtgatggaagaggagaaggttcacccagagatgtaggagtaaaaccaggagagttaatttttttttttttttttttttaagacagagtcttgctctgtggcccaggctggaatgcggtggcgtgatctcaggtcactgaaacctctgcctgctggttcaagcacttctcctgcctcagactcccgagtagctgggaatacaggcacatgccaccacgcccagctaatttttgtatttttagtagtgacggggtttcaccatgttggccaggctggtctcgaactcctgacctcgagtgatcggcctgcctcggcctcccaaagtgctgggattacaggcatgagccactgtgcccagccagtgttttttttttttttttttttatgggaggatgggcaggttgttagctgtcgagtgctattgagatgagagagaactcagaatgcagtggggtaaggattgctgagtaatgtggagggcctgtttgaggtaaatggcagtggtaagaggttgctccattatgaaagccctcttccagagttcctgatagggccccagaagttcatttctgattgctttgattttttttcaggggagcaggaagccagtttatcatttgagagtgagaataggggagaggaaatatcttccaggcccacagtgcatagaaatacccagtcagggcaaaatgatttatctgtttacctctcctcatcacttgggcccagagcaatcagcagtgattaggtagagaggagccgaggagagggaagagcataccaatcactcctccctttcccagtgcaggctcctagacttagctggggcagagctgggagaggaaaaagggatttaaaactgcaacaggtgcagattattgttacacaggattagacattctaattaattgagattatgtttgttccttaaactgatcacaggactatctattaagaacatcacaacctcgctgcagcttttctccatagcagggagagtacctcccagtgaataaaatttggagggtggtaagagacaagaataaaattgggtttggttatccgtgcctcatgcttgttcagcatccctttgagagttctccaaataaatagttactgcttctgcagttattggtgtgctccagcttctgttcccataatatagtccagtcctaagggaacacagttctaaaagaaacaacatgatcttggcagagacaccgctcagctccaaacccaaccatttatgtaactgcacaaaactctctacagcttttcacagagaccagtaattagaacctttcatcccctggtcatcctccttcccaggtgaattctctgaccagccatctggttttaggatacccaactcctgcagtaactgccttactggtggtctaattgcttctactcgtgtccctaaagcaattaattttccacacagccatgtgatctttttaaaatgtaaatcagcttatgtcacttctctgcttaaaatccttcaatggattctcactgcctcgagaacaaaagacaaacttttcaggccccgtgtgatcttgcccaggcctccgtcaccatcaccatctgcatcttaacccactcctcccctttcacaaaactccagccacacagacttgctttttattcctcaagctttccaaactgtttctactgagagtctttgcacatgctccatcttccttgaatactctttccccagtgagctcattttcatcttcctgaattcataccactattacctttgcttctgtggaagaaactggccagatgctcacccaaatgtcctctttctggacacaggtaaactgcatttcccagctccatgcatctaggcctatgtgagtagttctcaacagtggaaaatgagtggaagtgatgtttcaatactagaccaaggcagttaaagggtggctgagccatttccattattctcttcctccttcctcttcaaggtaaccttgaagcacatgttttgacggtgatggagtcatagcatagaagaagtctgaatacctgagttactatttagggcataatagctacttgaccaaaaacatccatattggactttgaacaagaaaataaacttgattacattctgctagtgagttttgagggtgttttagcagttatcattatatacactggatatatcttctatggtatcctgtccaccttactcttgaccacagtaccctctttgtttccttcagggtgtttcagatatttaattatcttgccagatgccagtcaacactttctttttgtcccatgagtttaaaatcaggggaaaacatgtactcccaataggaagttgagatactcttttttttttaaatccgtcattgtgactgtgaccagaaaaacaaatcccactaaagaatgtcctaaacagatgtttttttttgtcatataacctggagttaggtgatttggcattggttctggagctgaaggatgttagggatgaggtctctgtagttttcttgtctcatggtcacgaaatgaagtgttattgattaagcagggatgccctacttagtattagacttcttggaagtctccttaattgccacagcccctatctttttggcttcgtttcaagggtccttctacattgttaatactctggtataaatacgttccattattccctataacatgactgaaaccaatctaaagtattaacattttaaatatgtttttgggccaagtgcagtggctcttatctgtgatcccagctactaggaaggctgaggtgggaggattgcttgagcccaggaatttcaggctgtagtgagctatgattgtgccactgtactccggcctggataactgagatcctgtctcaataaataaataaaacaatt

SEQ ID NO: 426356 - DNA, 1736 bp, Homo sapiens
gcgccggccgctctagcaacccctggctgtcacgctttggtttccgggtcggttctggcaggtctgagcgctccgacttccagaggagcgctgtgcacgtggagaagagcggggactcggcgaccctgccctcccgaccctcatgttcgaagagcctgagtgggccgaggcggccccagtagccgcgggccttgggcccgtaatctcacgacctccgcctgcggcctcctcgcaaaacaagggctccaagcgccgccagctcttggccacattacgggccctagaggcagcatctctttcccagcatccccccagcctatgtataagtgactctgaggaggaggaggaggaaaggaagaagaaatgccccaaaaaggcatcatttgccagtgcctctgctgaagtagggaagaaagggaagaagaaatgtcaaaaacagggcccaccttgcagtgactctgaggaagaagtagaaaggaagaagaaatgccacaaacaggctcttgttggcagtgactctgctgaagatgagaaaagaaagaggaaatgccagaaacatgcccctataaattcagcccagcacctggacaatgttgaccaaacaggtcccaaagcctggaagggtagtactacaaatgatccaccaaagcaaagccctgggtccacttcccctaaaccccctcatacattaagccgcaagcagtggcggaaccggcaaaagaataagagaagatgtaagaacaagtttcagccacctcaggtgccagaccaggccccagctgaggcccccacagagaagacagaggtgtctcctgttcccaggacagacagccatgaggctcgggcaggggctttgcgagcccgcatggcacagcggctggatggggcccgatttcgctacctcaatgaacagttgtactcagggcccagcagtgctgcacagcgtctcttccaggaagaccctgaggcttttcttctctaccaccgcggcttccagagccaagtgaagaagtggccactgcagccagtggaccgcatcgccagggatcttcgccagcggcctgcatccctagtggtggctgacttcggctgtggggattgccgcttggcttcaagtatccggaaccctgtgcattgctttgacttggcttctctggaccctagggtcactgtgtgtgacatggcccaggttcctctggaggatgagtctgtggatgtggctgtgttttgcctttcactgatgggaaccaacatcagggacttcctagaggaggcaaatagagtactgaagccagggggtctcctgaaagtggctgaggtcagcagccgctttgaggatgttcgaacctttctgcgggctgtgaccaagctaggcttcaagattgtctccaaggacctgaccaacagccatttcttcttgtttgatttccaaaagactgggccccctctggtagggcccaaggctcagctttcaggcctgcagcttcagccatgtctctacaagcgcaggtgacctctggatcttccttgaaaggggaggcagatctcaaactccaggctcagaactgtgaagactgtttccagcctggctgtgagccaagacctggttcctggtggaccctgaggacaaagtgtgataaaacctctggctcagacttgctctactgaaggcttcttggttataagatgcataaagtcactggggctagctaaacaataaagagtttattgtgaga

SEQ ID NO: 426357 - DNA, 1159 bp, Homo sapiens
gcgccggccgctctagcaacccctggctgtcacgctttggtttccgggtcggttctggcaggtctgagcgctccgacttccagaggagcgctgtgcacgtggagaagagcggggactcggcgaccctgccctcccgaccctcatgttcgaagagcctgagtgggccgaggcggccccagtagccgcgggccttgggcccgtaatctcacgacctccgcctgcggcctcctcgcaaaacaagttgggcaagacctgaagctcacagcatgcacatgaggaaagcagcgtcgtacccatagctgggcttcgcatgattccagtcgagcagccagcagggctaccagctcactgtcactaaggaagaagaggcgggggaagtgagcacacaccccatagagcacgctctccagactcatgatgatgccctccagctccaccgatcctgcttgcagcagttgttgcagctgctggccttggaagtaagggctcctctcggcactgggcactacaagtgacagaaccatggggtcagctacagagatgcgcatcagggttcgatactggtcatccatgaccttgaaacgagagttctgtggtgagggagaggataaaagtgagggccaatatgaagtggcagctcccctttcccacgctgagccctgctattcaggaacccttcttgccctctctgcctcaacccccttccctaccaggtcagcattaggaaactggatcttcatctcatgcagaactttattcagaaaaatccacttctgctggaaagtcagccacacctccagcagggcacctgtgtaagcagccagaggaatgctggtgggaaacactagggttctaccttctgcaggggagtccaccctgctcctgacctctcaggtaccccaccagcccaagcaaaatactctgcccagcaggactcagggaacttgcttgagggagaaaaaactttcactgtgaataaaaacctgatctcttcatcccaagaaacagcctgaaggaggtcctcactgtgttcttcatatcttctcccacccaacctccacctctcacccccatccctctgggacatcctgcctcaggtctcacccatcagcctggctagaggcctgcacttacccaggccatgcatgatggccaccca

SEQ ID NO: 426358 - DNA, 582 bp, Homo sapiens
gcgccggccgctctagcaacccctggctgtcacgctttggtttccgggtcggttctggcaggtctgagcgctccgacttccagaggagcgctgtgcacgtggagaagagcggggactcggcgaccctgccctcccgaccctcatgttcgaagagcctgagtgggccgaggcggccccagtagccgcgggccttgggcccgtaatctcacgacctccgcctgcggcctcctcgcaaaacaagttgggcaagacctgaagctcacagcatgcacatgaggaaagcagcgtcgtacccatagctgggcttcgcatgattccagtcgagcagccagcagggctaccagctcactgtcactaaggaagaagaggcgggggaagtgagcacacaccccatagagcacgctctccagactcatgatgatgccctccagctccaccgatcctgcttgcagcagttgttgcagctgctggccttggaatatgtgataccctccaccatgggatgagactctcgccagatgctcttggacttcccagcctccagaaccatgaaccaaataaacttttattctttataaatta

SEQ ID NO: 426359 - DNA, 1829 bp, Homo sapiens
gcgccggccgctctagcaacccctggctgtcacgctttggtttccgggtcggttctggcaggtctgagcgctccgacttccagaggagcgctgtgcacgtggagaagagcggggactcggcgaccctgccctcccgaccctcatgttcgaagagcctgagtgggccgaggcggccccagtagccgcgggccttgggcccgtaatctcacgacctccgcctgcggcctcctcgcaaaacaagggctccaagcgccgccagctcttggccacattacgggccctagaggcagcatctctttcccagcatccccccagcctatgtataagtgactctgaggaggaggaggaggaaaggaagaagaaatgccccaaaaaggcatcatttgccagtgcctctgctgaagtagggaagaaagggaagaagaaatgtcaaaaacagggcccaccttgcagtgactctgaggaagaagtagaaaggaagaagaaatgccacaaacaggctcttgttggcagtgactctgctgaagatgagaaaagaaagaggaaatgccagaaacatgcccctataaattcagcccagcacctggacaatgttgaccaaacaggtcccaaagcctggaagggtagtactacaaatgatccaccaaagcaaagccctgggtccacttcccctaaaccccctcatacattaagccgcaagcagtggcggaaccggcaaaagaataagagaagatgtaagaacaagtttcagccacctcaggtgccagaccaggccccagctgaggcccccacagagaagacagaggtgtctcctgttcccaggacagacagccatgaggctcgggcaggggctttgcgagcccgcatggcacagcggctggatggggcccgatttcgctacctcaatgaacagttgtactcagggcccagcagtgctgcacagcgtctcttccaggaagaccctgaggcttttcttctctaccaccgcggcttccagagccaagtgaagaagtggccactgcagccagtggaccgcatcgccagggatcttcgccagcggtgaatgggggtcagggactgtgagaagccatgtggtgggtcagtcataggctcagatcagaccaatatgtgacccttgccttccactctcaggcctgcatccctagtggtggctgacttcggctgtggggattgccgcttggcttcaagtatccggaaccctgtgcattgctttgacttggcttctctggaccctagggtcactgtgtgtgacatggcccaggttcctctggaggatgagtctgtggatgtggctgtgttttgcctttcactgatgggaaccaacatcagggacttcctagaggaggcaaatagagtactgaagccagggggtctcctgaaagtggctgaggtcagcagccgctttgaggatgttcgaacctttctgcgggctgtgaccaagctaggcttcaagattgtctccaaggacctgaccaacagccatttcttcttgtttgatttccaaaagactgggccccctctggtagggcccaaggctcagctttcaggcctgcagcttcagccatgtctctacaagcgcaggtgacctctggatcttccttgaaaggggaggcagatctcaaactccaggctcagaactgtgaagactgtttccagcctggctgtgagccaagacctggttcctggtggaccctgaggacaaagtgtgataaaacctctggctcagacttgctctactgaaggcttcttggttataagatgcataaagtcactggggctagctaaacaataaagagtttattgtgaga

SEQ ID NO: 426360 - DNA, 6900 bp, Homo sapiens
gcgccggccgctctagcaacccctggctgtcacgctttggtttccgggtcggttctggcaggtctgagcgctccgacttccagaggagcgctgtgcacgtggagaagagcggggactcggcgaccctgccctcccgaccctcatgttcgaagagcctgagtgggccgaggcggccccagtagccgcgggccttgggcccgtaatctcacgacctccgcctgcggcctcctcgcaaaacaagggctccaagcgccgccagctcttggccacattacgggccctagaggcagcatctctttcccagcatccccccagcctatgtataagtgactctgaggaggaggaggaggaaaggaagaagaaatgccccaaaaaggcatcatttgccagtgcctctgctgaagtagggaagaaagggaagaagaaatgtcaaaaacagggcccaccttgcagtgactctgaggaagaagtagaaaggaagaagaaatgccacaaacaggctcttgttggcagtgactctgctgaagatgagaaaagaaagaggaaatgccagaaacatgcccctataaattcagcccagcacctggacaatgttgaccaaacaggtcccaaagcctggaagggtagtactacaaatgatccaccaaagcaaagccctgggtccacttcccctaaaccccctcatacattaagccgcaagcagtggcggaaccggcaaaagaataagagaagatgtaagaacaagtttcagccacctcaggtgccagaccaggccccagctgaggcccccacagagaagacagaggtgtctcctgttcccaggacagacagccatgaggctcgggcaggggctttgcgagcccgcatggcacagcggctggatggggcccgatttcgctacctcaatgaacagttgtactcagggcccagcagtgctgcacagcgtctcttccaggaagaccctgaggcttttcttctctaccaccgcggcttccagagccaagtgaagaagtggccactgcagccagtggaccgcatcgccagggatcttcgccagcggtgaatgggggtcagggactgtgagaagccatgtggtgggtcagtcataggctcagatcagaccaatatgtgacccttgccttccactctcaggcctgcatccctagtggtggctgacttcggctgtggggattgccgcttggcttcaagtatccggaaccctgtgcattgctttgacttggcttctctggaccctagggtcactgtgtgtgacatggcccaggttcctctggaggatgagtctgtggatgtggctgtgttttgcctttcactgatgggaaccaacatcagggacttcctagaggaggcaaatagagtactgaagccagggggtctcctgaaagtggctgaggtcagcagccgctttgaggatgttcgaacctttctgcgggctgtgaccaagctaggcttcaagattgtctccaaggtgagggccccaagacatctgtacctgtttttgtctcatgtggccctattcagggtactggtgttcaggaaggaggctttaggcacaggaacagacattttgctccccaacggaagtgggagccctgggaagctttgtgagcagaggcagtacatagagggaggtgttttaaggagttgggatgaggatttggttctcactgggtcttttctgcccctaggacgacctgaccaacagccatttcttcttgtttgatttccaaaagactgggccccctctggtagggcccaaggctcagctttcaggcctgcagcttcagccatgtctctacaagcgcaggtgacctctggatcttccttgaaaggggaggcagatctcaaactccaggctcagaactgtgaagactgtttccagcctggctgtgagccaagacctggttcctggtggaccctgaggacaaagtgtgataaaacctctggctcagacttgctctactgaaggcttcttggttataagatgcataaagtcactggggctagctaaacaataaagagtttattgtgagaacatggggatatctgtctcatgacacttcaggtgttatgaaaactagatggtttggaattcaaggcatctttaggttttgctcttctttccaactaagaagccacatggccttcctgtcctgccatctccactctgctgtcatctgatctgtctacagatcagcttcctctgctcacccatagcttctgctccttcagcttcagtttgcccaggccttcaaggttgcagacaggcagctgttgctgtttgactctgaggcaactggttgtccaccaacatcttggctcaagacatcagtctgagccaccaacttgagactgtttggttgtccccataccgagcatttctagtggtttatctttcccctctcccctcatctccatttttggaaccatatagcatcaagccactcccaacacctattgtcctgtgggactttgggatgtatatagctgagagcacagattttggaatcaggtagacctggatttaattcttggcctgctacccagaggcacttaaagtcatttaatctctgtatatcacattcctcatttggaaaatggtagaatttttgtcttgcagggtggttgtgtgggttaactggagaaatctgtagccagggctgggaacataggaggtgctcagtaaactagctatgactattatgtgttgtaagccttattgttttttgaagatcttccctaggctggttggaggctgaggggtaaagaatggatttgttgactaaggaagcctctgggagaggctagacctttcaacaggcctgcttcataggctatttaatgacttttaatagattctgagcttctgtccttggaggggtagtgagggagctgggtctctgttcataaacaacttgttgatgccatgtgggcttgggggcattgggctgttcattggcggaagagtctgtccactatctctgccttgcagtggactcagatcagcatgtcctgggaaagctataggcaaggtgctgagggaaggtgagtttgaatgatagattctaggcctcccccaaaaggtatctgccatgtgcccaggtataaagatatggcctcttgtacttgtttccaggaatacctgacagtacccattgggagatcataggttctatgccctgagccagttggatgcctctaataaggggatggaggttttgaaacaggctgtagtccagagggcatgtttggaggctgggctgtgaatcattaggcaggcactacacagtgcctctacacgtactgttctttctgctggatattcatcggactggcagtttgctcatctttccgaacagcctagttgtttcctattctactcccaaagcaaaatcagttcttcatctgtactctcaaagtactatgtgaagagtgctacttcagcttctaaatattgcattgtgattcctttgtgcatttggctgctgttttctcaagccatgtttatctttgtattcccggagcttgtcatttgagatatagccagtgtacttattcacctagggagagataaggaatgacagggtccagttgagtgggatagatgagaacaggggtgttatagaaacccaggtactagggcacaagatgagggcactgttgactagtcatgatggaagaagtaggcagacaggagaacttcattaggtagaattggtgggatgttgaggttggtaagagaggaatctgaagtaagttccaggttgctcaactgtgggtaggctggtgatgccattcaaagtgttggattttaggaagtgggacatgcgtgaaatctgtgctgggggtctgggaatcagcagcctagaggtggtaattaaagtcagaatagatgagatattcagggtaagataatgagaagagaaaatggctcagaatagaactgaggagcatgtcatggatgggtaaaggaaaatgaagcagtgaaggtgatggaagaggagaaggttcacccagagatgtaggagtaaaaccaggagagttaatttttttttttttttttttttaagacagagtcttgctctgtggcccaggctggaatgcggtggcgtgatctcaggtcactgaaacctctgcctgctggttcaagcacttctcctgcctcagactcccgagtagctgggaatacaggcacatgccaccacgcccagctaatttttgtatttttagtagtgacggggtttcaccatgttggccaggctggtctcgaactcctgacctcgagtgatcggcctgcctcggcctcccaaagtgctgggattacaggcatgagccactgtgcccagccagtgttttttttttttttttttttatgggaggatgggcaggttgttagctgtcgagtgctattgagatgagagagaactcagaatgcagtggggtaaggattgctgagtaatgtggagggcctgtttgaggtaaatggcagtggtaagaggttgctccattatgaaagccctcttccagagttcctgatagggccccagaagttcatttctgattgctttgattttttttcaggggagcaggaagccagtttatcatttgagagtgagaataggggagaggaaatatcttccaggcccacagtgcatagaaatacccagtcagggcaaaatgatttatctgtttacctctcctcatcacttgggcccagagcaatcagcagtgattaggtagagaggagccgaggagagggaagagcataccaatcactcctccctttcccagtgcaggctcctagacttagctggggcagagctgggagaggaaaaagggatttaaaactgcaacaggtgcagattattgttacacaggattagacattctaattaattgagattatgtttgttccttaaactgatcacaggactatctattaagaacatcacaacctcgctgcagcttttctccatagcagggagagtacctcccagtgaataaaatttggagggtggtaagagacaagaataaaattgggtttggttatccgtgcctcatgcttgttcagcatccctttgagagttctccaaataaatagttactgcttctgcagttattggtgtgctccagcttctgttcccataatatagtccagtcctaagggaacacagttctaaaagaaacaacatgatcttggcagagacaccgctcagctccaaacccaaccatttatgtaactgcacaaaactctctacagcttttcacagagaccagtaattagaacctttcatcccctggtcatcctccttcccaggtgaattctctgaccagccatctggttttaggatacccaactcctgcagtaactgccttactggtggtctaattgcttctactcgtgtccctaaagcaattaattttccacacagccatgtgatctttttaaaatgtaaatcagcttatgtcacttctctgcttaaaatccttcaatggattctcactgcctcgagaacaaaagacaaacttttcaggccccgtgtgatcttgcccaggcctccgtcaccatcaccatctgcatcttaacccactcctcccctttcacaaaactccagccacacagacttgctttttattcctcaagctttccaaactgtttctactgagagtctttgcacatgctccatcttccttgaatactctttccccagtgagctcattttcatcttcctgaattcataccactattacctttgcttctgtggaagaaactggccagatgctcacccaaatgtcctctttctggacacaggtaaactgcatttcccagctccatgcatctaggcctatgtgagtagttctcaacagtggaaaatgagtggaagtgatgtttcaatactagaccaaggcagttaaagggtggctgagccatttccattattctcttcctccttcctcttcaaggtaaccttgaagcacatgttttgacggtgatggagtcatagcatagaagaagtctgaatacctgagttactatttagggcataatagctacttgaccaaaaacatccatattggactttgaacaagaaaataaacttgattacattctgctagtgagttttgagggtgttttagcagttatcattatatacactggatatatcttctatggtatcctgtccaccttactcttgaccacagtaccctctttgtttccttcagggtgtttcagatatttaattatcttgccagatgccagtcaacactttctttttgtcccatgagtttaaaatcaggggaaaacatgtactcccaataggaagttgagatactcttttttttttaaatccgtcattgtgactgtgaccagaaaaacaaatcccactaaagaatgtcctaaacagatgtttttttttgtcatataacctggagttaggtgatttggcattggttctggagctgaaggatgttagggatgaggtctctgtagttttcttgtctcatggtcacgaaatgaagtgttattgattaagcagggatgccctacttagtattagacttcttggaagtctccttaattgccacagcccctatctttttggcttcgtttcaagggtccttctacattgttaatactctggtataaatacgttccattattccctataacatgactgaaaccaatctaaagtattaacattttaaatatgtttttgggccaagtgcagtggctcttatctgtgatcccagctactaggaaggctgaggtgggaggattgcttgagcccaggaatttcaggctgtagtgagctatgattgtgccactgtactccggcctggataactgagatcctgtctcaataaataaataaaacaatt

SEQ ID NO: 426361 - DNA, 1307 bp, Homo sapiens
gcgccggccgctctagcaacccctggctgtcacgctttggtttccgggtcggttctggcaggtctgagcgctccgacttccagaggagcgctgtgcacgtggagaagagcggggactcggcgaccctgccctcccgaccctcatgttcgaagagcctgagtgggccgaggcggccccagtagccgcgggccttgggcccgtaatctcacgacctccgcctgcggcctcctcgcaaaacaagggctccaagcgccgccagctcttggccacattacgggccctagaggcagcatctctttcccagcatccccccagcctatgtataagtgactctgaggaggaggaggaggaaaggaagaagaaatgccccaaaaaggcatcatttgccagtgcctctgctgaagtagggaagaaagggaagaagaaatgtcaaaaacagggcccaccttgcagtgactctgaggaagaagtagaaaggaagaagaaatgccacaaacaggctcttgttggcagtgactctgctgaagatgagaaaagaaagaggaaatgccagaaacatgcccctataaattcagcccagcacctggacaatgttgaccaaacaggtcccaaagcctggaagggtagtactacaaatgatccaccaaagcaaagccctgggtccacttcccctaaaccccctcatacattaagccgcaagcagtggcggaaccggcaaaagaataagagaagatgtaagaacaagtttcagccacctcaggtgccagaccaggccccagctgaggcccccacagagaagacagaggtgtctcctgttcccaggacagacagccatgaggctcgggcaggggctttgcgagcccgcatggcacagcggctggatggggcccgatttcgctacctcaatgaacagttgtactcagggcccagcagtgctgcacagcgtctcttccaggaagaccctgaggcttttcttctctaccaccgcggcttccagagccaagtgaagaagtggccactgcagccagtggaccgcatcgccagggatcttcgccagcggcctgcatccctagtggtggctgacttcggctgtggggattgccgcttggcttcaagtatccggaaccctgtgcattgctttgacttggcttctctggaccctagggtcactgtgtgtgacatggcccaggtaaacccctatgttatctggcttgtgctctagggccaacctccgtatgctaatctctaacccttccttcccctttcccatcctggtatctcactgctggctgatgaatcttctgcac

SEQ ID NO: 426362 - DNA, 1785 bp, Homo sapiens
gcgccggccgctctagcaacccctggctgtcacgctttggtttccgggtcggttctggcaggtctgagcgctccgacttccagaggagcgctgtgcacgtggagaagagcggggactcggcgaccctgccctcccgaccctcatgttcgaagagcctgagtgggccgaggcggccccagtagccgcgggccttgggcccgtaatctcacgacctccgcctgcggcctcctcgcaaaacaaggcctcatccattctctttaggcccactgtcatcccctgttttcctccagggctccaagcgccgccagctcttggccacattacgggccctagaggcagcatctctttcccagcatccccccagcctatgtataagtgactctgaggaggaggaggaggaaaggaagaagaaatgccccaaaaaggcatcatttgccagtgcctctgctgaagtagggaagaaagggaagaagaaatgtcaaaaacagggcccaccttgcagtgactctgaggaagaagtagaaaggaagaagaaatgccacaaacaggctcttgttggcagtgactctgctgaagatgagaaaagaaagaggaaatgccagaaacatgcccctataaattcagcccagcacctggacaatgttgaccaaacaggtcccaaagcctggaagggtagtactacaaatgatccaccaaagcaaagccctgggtccacttcccctaaaccccctcatacattaagccgcaagcagtggcggaaccggcaaaagaataagagaagatgtaagaacaagtttcagccacctcaggtgccagaccaggccccagctgaggcccccacagagaagacagaggtgtctcctgttcccaggacagacagccatgaggctcgggcaggggctttgcgagcccgcatggcacagcggctggatggggcccgatttcgctacctcaatgaacagttgtactcagggcccagcagtgctgcacagcgtctcttccaggaagaccctgaggcttttcttctctaccaccgcggcttccagagccaagtgaagaagtggccactgcagccagtggaccgcatcgccagggatcttcgccagcggcctgcatccctagtggtggctgacttcggctgtggggattgccgcttggcttcaagtatccggaaccctgtgcattgctttgacttggcttctctggaccctagggtcactgtgtgtgacatggcccaggttcctctggaggatgagtctgtggatgtggctgtgttttgcctttcactgatgggaaccaacatcagggacttcctagaggaggcaaatagagtactgaagccagggggtctcctgaaagtggctgaggtcagcagccgctttgaggatgttcgaacctttctgcgggctgtgaccaagctaggcttcaagattgtctccaaggacctgaccaacagccatttcttcttgtttgatttccaaaagactgggccccctctggtagggcccaaggctcagctttcaggcctgcagcttcagccatgtctctacaagcgcaggtgacctctggatcttccttgaaaggggaggcagatctcaaactccaggctcagaactgtgaagactgtttccagcctggctgtgagccaagacctggttcctggtggaccctgaggacaaagtgtgataaaacctctggctcagacttgctctactgaaggcttcttggttataagatgcataaagtcactggggctagctaaacaataaagagtttattgtgaga

SEQ ID NO: 426363 - DNA, 5815 bp, Homo sapiens
gcgccggccgctctagcaacccctggctgtcacgctttggtttccgggtcggttctggcaggtctgagcgctccgacttccagaggagcgctgtgcacgtggagaagagcggggactcggcgaccctgccctcccgaccctcatgttcgaagagcctgagtgggccgaggcggccccagtagccgcgggccttgggcccgtaatctcacgacctccgcctgcggcctcctcgcaaaacaaggcctcatccattctctttaggcccactgtcatcccctgttttcctccagggctccaagcgccgccagctcttggccacattacgggccctagaggcagcatctctttcccagcatccccccagcctatgtataagtgactctgaggaggaggaggaggaaaggaagaagaaatgccccaaaaaggcatcatttgccagtgcctctgctgaagtagggaagaaagggaagaagaaatgtcaaaaacagggcccaccttgcagtgactctgaggaagaagtagaaaggaagaagaaatgccacaaacaggctcttgttggcagtgactctgctgaagatgagaaaagaaagaggaaatgccagaaacatgcccctataaattcaggacctgaccaacagccatttcttcttgtttgatttccaaaagactgggccccctctggtagggcccaaggctcagctttcaggcctgcagcttcagccatgtctctacaagcgcaggtgacctctggatcttccttgaaaggggaggcagatctcaaactccaggctcagaactgtgaagactgtttccagcctggctgtgagccaagacctggttcctggtggaccctgaggacaaagtgtgataaaacctctggctcagacttgctctactgaaggcttcttggttataagatgcataaagtcactggggctagctaaacaataaagagtttattgtgagaacatggggatatctgtctcatgacacttcaggtgttatgaaaactagatggtttggaattcaaggcatctttaggttttgctcttctttccaactaagaagccacatggccttcctgtcctgccatctccactctgctgtcatctgatctgtctacagatcagcttcctctgctcacccatagcttctgctccttcagcttcagtttgcccaggccttcaaggttgcagacaggcagctgttgctgtttgactctgaggcaactggttgtccaccaacatcttggctcaagacatcagtctgagccaccaacttgagactgtttggttgtccccataccgagcatttctagtggtttatctttcccctctcccctcatctccatttttggaaccatatagcatcaagccactcccaacacctattgtcctgtgggactttgggatgtatatagctgagagcacagattttggaatcaggtagacctggatttaattcttggcctgctacccagaggcacttaaagtcatttaatctctgtatatcacattcctcatttggaaaatggtagaatttttgtcttgcagggtggttgtgtgggttaactggagaaatctgtagccagggctgggaacataggaggtgctcagtaaactagctatgactattatgtgttgtaagccttattgttttttgaagatcttccctaggctggttggaggctgaggggtaaagaatggatttgttgactaaggaagcctctgggagaggctagacctttcaacaggcctgcttcataggctatttaatgacttttaatagattctgagcttctgtccttggaggggtagtgagggagctgggtctctgttcataaacaacttgttgatgccatgtgggcttgggggcattgggctgttcattggcggaagagtctgtccactatctctgccttgcagtggactcagatcagcatgtcctgggaaagctataggcaaggtgctgagggaaggtgagtttgaatgatagattctaggcctcccccaaaaggtatctgccatgtgcccaggtataaagatatggcctcttgtacttgtttccaggaatacctgacagtacccattgggagatcataggttctatgccctgagccagttggatgcctctaataaggggatggaggttttgaaacaggctgtagtccagagggcatgtttggaggctgggctgtgaatcattaggcaggcactacacagtgcctctacacgtactgttctttctgctggatattcatcggactggcagtttgctcatctttccgaacagcctagttgtttcctattctactcccaaagcaaaatcagttcttcatctgtactctcaaagtactatgtgaagagtgctacttcagcttctaaatattgcattgtgattcctttgtgcatttggctgctgttttctcaagccatgtttatctttgtattcccggagcttgtcatttgagatatagccagtgtacttattcacctagggagagataaggaatgacagggtccagttgagtgggatagatgagaacaggggtgttatagaaacccaggtactagggcacaagatgagggcactgttgactagtcatgatggaagaagtaggcagacaggagaacttcattaggtagaattggtgggatgttgaggttggtaagagaggaatctgaagtaagttccaggttgctcaactgtgggtaggctggtgatgccattcaaagtgttggattttaggaagtgggacatgcgtgaaatctgtgctgggggtctgggaatcagcagcctagaggtggtaattaaagtcagaatagatgagatattcagggtaagataatgagaagagaaaatggctcagaatagaactgaggagcatgtcatggatgggtaaaggaaaatgaagcagtgaaggtgatggaagaggagaaggttcacccagagatgtaggagtaaaaccaggagagttaatttttttttttttttttttttaagacagagtcttgctctgtggcccaggctggaatgcggtggcgtgatctcaggtcactgaaacctctgcctgctggttcaagcacttctcctgcctcagactcccgagtagctgggaatacaggcacatgccaccacgcccagctaatttttgtatttttagtagtgacggggtttcaccatgttggccaggctggtctcgaactcctgacctcgagtgatcggcctgcctcggcctcccaaagtgctgggattacaggcatgagccactgtgcccagccagtgttttttttttttttttttttatgggaggatgggcaggttgttagctgtcgagtgctattgagatgagagagaactcagaatgcagtggggtaaggattgctgagtaatgtggagggcctgtttgaggtaaatggcagtggtaagaggttgctccattatgaaagccctcttccagagttcctgatagggccccagaagttcatttctgattgctttgattttttttcaggggagcaggaagccagtttatcatttgagagtgagaataggggagaggaaatatcttccaggcccacagtgcatagaaatacccagtcagggcaaaatgatttatctgtttacctctcctcatcacttgggcccagagcaatcagcagtgattaggtagagaggagccgaggagagggaagagcataccaatcactcctccctttcccagtgcaggctcctagacttagctggggcagagctgggagaggaaaaagggatttaaaactgcaacaggtgcagattattgttacacaggattagacattctaattaattgagattatgtttgttccttaaactgatcacaggactatctattaagaacatcacaacctcgctgcagcttttctccatagcagggagagtacctcccagtgaataaaatttggagggtggtaagagacaagaataaaattgggtttggttatccgtgcctcatgcttgttcagcatccctttgagagttctccaaataaatagttactgcttctgcagttattggtgtgctccagcttctgttcccataatatagtccagtcctaagggaacacagttctaaaagaaacaacatgatcttggcagagacaccgctcagctccaaacccaaccatttatgtaactgcacaaaactctctacagcttttcacagagaccagtaattagaacctttcatcccctggtcatcctccttcccaggtgaattctctgaccagccatctggttttaggatacccaactcctgcagtaactgccttactggtggtctaattgcttctactcgtgtccctaaagcaattaattttccacacagccatgtgatctttttaaaatgtaaatcagcttatgtcacttctctgcttaaaatccttcaatggattctcactgcctcgagaacaaaagacaaacttttcaggccccgtgtgatcttgcccaggcctccgtcaccatcaccatctgcatcttaacccactcctcccctttcacaaaactccagccacacagacttgctttttattcctcaagctttccaaactgtttctactgagagtctttgcacatgctccatcttccttgaatactctttccccagtgagctcattttcatcttcctgaattcataccactattacctttgcttctgtggaagaaactggccagatgctcacccaaatgtcctctttctggacacaggtaaactgcatttcccagctccatgcatctaggcctatgtgagtagttctcaacagtggaaaatgagtggaagtgatgtttcaatactagaccaaggcagttaaagggtggctgagccatttccattattctcttcctccttcctcttcaaggtaaccttgaagcacatgttttgacggtgatggagtcatagcatagaagaagtctgaatacctgagttactatttagggcataatagctacttgaccaaaaacatccatattggactttgaacaagaaaataaacttgattacattctgctagtgagttttgagggtgttttagcagttatcattatatacactggatatatcttctatggtatcctgtccaccttactcttgaccacagtaccctctttgtttccttcagggtgtttcagatatttaattatcttgccagatgccagtcaacactttctttttgtcccatgagtttaaaatcaggggaaaacatgtactcccaataggaagttgagatactcttttttttttaaatccgtcattgtgactgtgaccagaaaaacaaatcccactaaagaatgtcctaaacagatgtttttttttgtcatataacctggagttaggtgatttggcattggttctggagctgaaggatgttagggatgaggtctctgtagttttcttgtctcatggtcacgaaatgaagtgttattgattaagcagggatgccctacttagtattagacttcttggaagtctccttaattgccacagcccctatctttttggcttcgtttcaagggtccttctacattgttaatactctggtataaatacgttccattattccctataacatgactgaaaccaatctaaagtattaacattttaaatatgtttttgggccaagtgcagtggctcttatctgtgatcccagctactaggaaggctgaggtgggaggattgcttgagcccaggaatttcaggctgtagtgagctatgattgtgccactgtactccggcctggataactgagatcctgtctcaataaataaataaaacaatt

SEQ ID NO: 426364 - DNA, 5636 bp, Homo sapiens
gcgccggccgctctagcaacccctggctgtcacgctttggtttccgggtcggttctggcaggtctgagcgctccgacttccagaggagcgctgtgcacgtggagaagagcggggactcggcgaccctgccctcccgaccctcatgttcgaagagcctgagtgggccgaggcggccccagtagccgcgggccttgggcccgtaatctcacgacctccgcctgcggcctcctcgcaaaacaaggttcctctggaggatgagtctgtggatgtggctgtgttttgcctttcactgatgggaaccaacatcagggacttcctagaggaggcaaatagagtactgaagccagggggtctcctgaaagtggctgaggtcagcagccgctttgaggatgttcgaacctttctgcgggctgtgaccaagctaggcttcaagattgtctccaaggacctgaccaacagccatttcttcttgtttgatttccaaaagactgggccccctctggtagggcccaaggctcagctttcaggcctgcagcttcagccatgtctctacaagcgcaggtgacctctggatcttccttgaaaggggaggcagatctcaaactccaggctcagaactgtgaagactgtttccagcctggctgtgagccaagacctggttcctggtggaccctgaggacaaagtgtgataaaacctctggctcagacttgctctactgaaggcttcttggttataagatgcataaagtcactggggctagctaaacaataaagagtttattgtgagaacatggggatatctgtctcatgacacttcaggtgttatgaaaactagatggtttggaattcaaggcatctttaggttttgctcttctttccaactaagaagccacatggccttcctgtcctgccatctccactctgctgtcatctgatctgtctacagatcagcttcctctgctcacccatagcttctgctccttcagcttcagtttgcccaggccttcaaggttgcagacaggcagctgttgctgtttgactctgaggcaactggttgtccaccaacatcttggctcaagacatcagtctgagccaccaacttgagactgtttggttgtccccataccgagcatttctagtggtttatctttcccctctcccctcatctccatttttggaaccatatagcatcaagccactcccaacacctattgtcctgtgggactttgggatgtatatagctgagagcacagattttggaatcaggtagacctggatttaattcttggcctgctacccagaggcacttaaagtcatttaatctctgtatatcacattcctcatttggaaaatggtagaatttttgtcttgcagggtggttgtgtgggttaactggagaaatctgtagccagggctgggaacataggaggtgctcagtaaactagctatgactattatgtgttgtaagccttattgttttttgaagatcttccctaggctggttggaggctgaggggtaaagaatggatttgttgactaaggaagcctctgggagaggctagacctttcaacaggcctgcttcataggctatttaatgacttttaatagattctgagcttctgtccttggaggggtagtgagggagctgggtctctgttcataaacaacttgttgatgccatgtgggcttgggggcattgggctgttcattggcggaagagtctgtccactatctctgccttgcagtggactcagatcagcatgtcctgggaaagctataggcaaggtgctgagggaaggtgagtttgaatgatagattctaggcctcccccaaaaggtatctgccatgtgcccaggtataaagatatggcctcttgtacttgtttccaggaatacctgacagtacccattgggagatcataggttctatgccctgagccagttggatgcctctaataaggggatggaggttttgaaacaggctgtagtccagagggcatgtttggaggctgggctgtgaatcattaggcaggcactacacagtgcctctacacgtactgttctttctgctggatattcatcggactggcagtttgctcatctttccgaacagcctagttgtttcctattctactcccaaagcaaaatcagttcttcatctgtactctcaaagtactatgtgaagagtgctacttcagcttctaaatattgcattgtgattcctttgtgcatttggctgctgttttctcaagccatgtttatctttgtattcccggagcttgtcatttgagatatagccagtgtacttattcacctagggagagataaggaatgacagggtccagttgagtgggatagatgagaacaggggtgttatagaaacccaggtactagggcacaagatgagggcactgttgactagtcatgatggaagaagtaggcagacaggagaacttcattaggtagaattggtgggatgttgaggttggtaagagaggaatctgaagtaagttccaggttgctcaactgtgggtaggctggtgatgccattcaaagtgttggattttaggaagtgggacatgcgtgaaatctgtgctgggggtctgggaatcagcagcctagaggtggtaattaaagtcagaatagatgagatattcagggtaagataatgagaagagaaaatggctcagaatagaactgaggagcatgtcatggatgggtaaaggaaaatgaagcagtgaaggtgatggaagaggagaaggttcacccagagatgtaggagtaaaaccaggagagttaatttttttttttttttttttttaagacagagtcttgctctgtggcccaggctggaatgcggtggcgtgatctcaggtcactgaaacctctgcctgctggttcaagcacttctcctgcctcagactcccgagtagctgggaatacaggcacatgccaccacgcccagctaatttttgtatttttagtagtgacggggtttcaccatgttggccaggctggtctcgaactcctgacctcgagtgatcggcctgcctcggcctcccaaagtgctgggattacaggcatgagccactgtgcccagccagtgttttttttttttttttttttatgggaggatgggcaggttgttagctgtcgagtgctattgagatgagagagaactcagaatgcagtggggtaaggattgctgagtaatgtggagggcctgtttgaggtaaatggcagtggtaagaggttgctccattatgaaagccctcttccagagttcctgatagggccccagaagttcatttctgattgctttgattttttttcaggggagcaggaagccagtttatcatttgagagtgagaataggggagaggaaatatcttccaggcccacagtgcatagaaatacccagtcagggcaaaatgatttatctgtttacctctcctcatcacttgggcccagagcaatcagcagtgattaggtagagaggagccgaggagagggaagagcataccaatcactcctccctttcccagtgcaggctcctagacttagctggggcagagctgggagaggaaaaagggatttaaaactgcaacaggtgcagattattgttacacaggattagacattctaattaattgagattatgtttgttccttaaactgatcacaggactatctattaagaacatcacaacctcgctgcagcttttctccatagcagggagagtacctcccagtgaataaaatttggagggtggtaagagacaagaataaaattgggtttggttatccgtgcctcatgcttgttcagcatccctttgagagttctccaaataaatagttactgcttctgcagttattggtgtgctccagcttctgttcccataatatagtccagtcctaagggaacacagttctaaaagaaacaacatgatcttggcagagacaccgctcagctccaaacccaaccatttatgtaactgcacaaaactctctacagcttttcacagagaccagtaattagaacctttcatcccctggtcatcctccttcccaggtgaattctctgaccagccatctggttttaggatacccaactcctgcagtaactgccttactggtggtctaattgcttctactcgtgtccctaaagcaattaattttccacacagccatgtgatctttttaaaatgtaaatcagcttatgtcacttctctgcttaaaatccttcaatggattctcactgcctcgagaacaaaagacaaacttttcaggccccgtgtgatcttgcccaggcctccgtcaccatcaccatctgcatcttaacccactcctcccctttcacaaaactccagccacacagacttgctttttattcctcaagctttccaaactgtttctactgagagtctttgcacatgctccatcttccttgaatactctttccccagtgagctcattttcatcttcctgaattcataccactattacctttgcttctgtggaagaaactggccagatgctcacccaaatgtcctctttctggacacaggtaaactgcatttcccagctccatgcatctaggcctatgtgagtagttctcaacagtggaaaatgagtggaagtgatgtttcaatactagaccaaggcagttaaagggtggctgagccatttccattattctcttcctccttcctcttcaaggtaaccttgaagcacatgttttgacggtgatggagtcatagcatagaagaagtctgaatacctgagttactatttagggcataatagctacttgaccaaaaacatccatattggactttgaacaagaaaataaacttgattacattctgctagtgagttttgagggtgttttagcagttatcattatatacactggatatatcttctatggtatcctgtccaccttactcttgaccacagtaccctctttgtttccttcagggtgtttcagatatttaattatcttgccagatgccagtcaacactttctttttgtcccatgagtttaaaatcaggggaaaacatgtactcccaataggaagttgagatactcttttttttttaaatccgtcattgtgactgtgaccagaaaaacaaatcccactaaagaatgtcctaaacagatgtttttttttgtcatataacctggagttaggtgatttggcattggttctggagctgaaggatgttagggatgaggtctctgtagttttcttgtctcatggtcacgaaatgaagtgttattgattaagcagggatgccctacttagtattagacttcttggaagtctccttaattgccacagcccctatctttttggcttcgtttcaagggtccttctacattgttaatactctggtataaatacgttccattattccctataacatgactgaaaccaatctaaagtattaacattttaaatatgtttttgggccaagtgcagtggctcttatctgtgatcccagctactaggaaggctgaggtgggaggattgcttgagcccaggaatttcaggctgtagtgagctatgattgtgccactgtactccggcctggataactgagatcctgtctcaataaataaataaaacaatt

SEQ ID NO: 426365 - DNA, 526 bp, Homo sapiens
ctagcaacccctggctgtcacgctttggtttccgggtcggttctggcaggtctgagcgctccgacttccagaggagcgctgtgcacgtggagaagagcggggactcggcgaccctgccctcccgaccctcatgttcgaagagcctgagtgggccgaggcggccccagtagccgcgggccttgggcccgtaatctcacgacctccgcctgcggcctcctcgcaaaacaaggtgagtgactcgcgggagcaatgggagctgtttcaggccgcgaagcggacattggtggatcccagcgctgtgtgtattgcggggagggacacctgtggcaccgttaagggcgagtcctgatctgaagatccgagaacttccaaaagaaactgacgttgggtcagagagagttgttgagtagaagttggtgaagcgaagagggttcttcagacaggaaaaagtacgtacaagggccctgggacaagagagcatgttctgtcagagtcacaaacacaagtggtccttgtggttgaaata

SEQ ID NO: 426366 - DNA, 351 bp, Homo sapiens
cctatgtataagtgactctgaggaggaggaggaggaaaggaagaagaaatgccccaaaaaggcatcatttgccagtgcctctgctgaagtagggaagaaagggaagaagaaatgtcaaaaacagggcccaccttgcagtgactctgaggaagaagtagaaaggaagaagaaatgccacaaacaggctcttgttggcagtgactctgctgaagatgagaaaagaaagaggaaatgccagaaacatgcccctataaattcagcccagcacctggacaatgttgaccaaacaggtaccattggatgtgtatatgtgtgtgtgttggtgtgtgtgtgtcggggggtcagctggtt

SEQ ID NO: 426367 - DNA, 3394 bp, Homo sapiens
gacgggtggccccggtcccccggcagggccttctccccccttcggcaccgcagcagcagcgagatcaccctcagcgagtgtgacgcggaggacgcgggggagccgcggggggcccggcacacgggggcgctgcccctcttccgcgagtacgggagcacctcgtccatcgacgtgcagggcatgcccgagcagagcttcttcgacatcctgaacgagttccgcagcgagcagcccgacgcccgagggtgccaggccctcaccgagctcctccgggcagatcctggcccacacctcatggggggcggcggcggagccaagggggactcccacaacgggcagcccgccaaggacagcctcctgccactgcagcccacgaaggagaaggagaaggcccggaagaaacctgcgcggggcctcggcggcggggacacggtggactcgtccatctttcggaagctaaggagcagcaaacccgagggggaggctgggcgttccccgggggaggccgacgagggccggagccccccggaagccagcaggccgtgggtgtgtcagaagagcttcgcccacttcgacgtgcagagcatgctgttcgacctcaacgaggcggccgccaacagggtgtcggtgtcgcagcggcggaacaccaccacgggtgcttcggccgcttccgccgcctcggccatggcctccctcacggcctcgcgggcccacagcctcggaggcctggacccggccttcaccagcacagaggacctaaactgcaaggagaacttggagcaggacctcggcgatgacaacagcaacgacctgctgctcagctgcccgcacttccgcaatgagatcgggggcgagtgtgagcgcaacgtgagcttctcccgggcttccgtgggctccccgagcagcggcgagggccacctggcagagcccgccctgagcgcctaccgcaccaacgccagcatctcggtgttggaagttcccaaggagcagcagcggacgcagagtcggccccggcagtacagcatcgagcatgtggacctgggcgcccgctactaccaggattacttcgtgggcaaagaacatgccaattacttcggcgtggatgagaagctggggccagtggctgtgagcattaagcgggagaagctggaagaccacaaggagcacggacctcagtaccagtacaggatcatcttccggacccgcgagctcatcaccctgcggggctccatcctggaagatgctacgcccacagccaccaagcatgggaccgggcggggcctgcccttgaaggatgccctggagtatgtcatccccgagctcaacatccactgcctgcggctggccctcaacacccccaaggtgacggagcaactgctgaagctcgatgagcaagggctctgccggaagcacaaggtgggcatcctctattgcaaggccggccagagctccgaggaggagatgtacaacaatgaggaggccggccccgcctttgaggagttcctctccctcatcggcgagaaggtctgcctgaagggcttcaccaagtacgctgcccagctggacgtcaagaccgactccacgggaacccactccctctacacgatgtaccaggactacgagatcatgttccatgtctccaccctgctcccttacacccccaacaacaggcagcagctgctacggaagaggcacataggaaatgacatcgtgacgatcatcttccaggagcctggcgcgctaccgttcacccccaagaacatccgctcccacttccagcacgtcttcatcattgtccgagtccacaacccctgcactgataacgtctgttacagtatggctgtgacccgatccaaagacgctcctcctttcggcccccccatccccagtggaaccacattccgcaaatccgacgtcttcagagacttcttgctggccaaggtgattaacgctgagaacgccgcgcacaagtccgacaagttccacaccatggccaccaggacccgccaggagtatctcaaggacctggccgaaaactgtgtctccaacacccccatcgactccaccggcaaattcaacctcatctccctgacctccaagaagaaggaaaagacaaaagcacgggctggcgctgagcagcacagtgcaggggccatcgcctggagggtggtggcccaggactacgcccagggggtggaaatcgactgcattttgggaatttccaatgagtttgtggtgctcctggacttacgcaccaaggaggtggtgttcaactgctactgcggggatgtcattggctggactccagactcctccacactcaaaatcttctatggacgaggagaccacatcttcctacaggcgacagagggttctgtggaggacataagggagatagtgcagagactgaaggtgatgaccagtggctgggagacggtggacatgacgcttcggcggaacgggctcgggcagctgggcttccacgtgaagtacgacggcacggtggccgaggttgaggactatgggttcgcctggcaggccggcctccggcagggcagccgactagtggagatctgcaaggtggccgtggtcacactgacccacgaccagatgatcgacctgctgcgcacctctgtcactgtgaaggtggtcatcatcccgccttttgaggacggcactccccggaggggttggccggagacctacgacatgaatacctcggagcccaagacggagcaggaaagcatcactcctgggggccggcccccctaccgcagcaatgctccctggcagtggagcgggcccgcatcccataactctctaccagcctccaagtgggccactccaaccactcccggccatgcccagtccctgagccggcccctgaagcagacccccatagtccccttccgggagtcccagccactgcacagcaagaggcctgtcagcttcccagaaaccccttacacagtatcaccagcaggggccgacagagtccctccctaccgacagccttctgggagcttctccacccccggttcggccacctacgtgagatacaagccatccccagaaaggtacacggctgccccacaccccctgctatctcttgatccccacttcagccacgatgggacgtccagcggcgactcctcttccggcggcctgaccagccaggagagcaccatggaacgccagaagccagagcctttgtggcatgtgcctgcccaggccaggctctcagccatagccggaagcagcgggaacaagcacccgtccaggcaggatgcagcaggcaaagattcccccaacaggcattccaaaggagaacctcaatactcaagtcattccagcaggtcgagcggctgttaatttagtagtagtaggcggcagc

SEQ ID NO: 426368 - DNA, 2831 bp, Homo sapiens
gacgggtggccccggtcccccggcagggccttctccccccttcggcaccgcagcagcagcgagatcaccctcagcgagtgtgacgcggaggacgcgggggagccgcggggggcccggcacacgggggcgctgcccctcttccgcgagtacgggagcacctcgtccatcgacgtgcagggcatgcccgagcagagcttcttcgacatcctgaacgagttccgcagcgagcagcccgacgcccgagggtgccaggccctcaccgagctcctccgggcagatcctggcccacacctcatggggggcggcggcggagccaagggggactcccacaacgggcagcccgccaaggacagcctcctgccactgcagcccacgaaggagaaggagaaggcccggaagaaacctgcgcggggcctcggcggcggggacacggtggactcgtccatctttcggaagctaaggagcagcaaacccgagggggaggctgggcgttccccgggggaggccgacgagggccggagccccccggaagccagcaggccgtgggtgtgtcagaagagcttcgcccacttcgacgtgcagagcatgctgttcgacctcaacgaggcggccgccaacagggtgtcggtgtcgcagcggcggaacaccaccacgggtgcttcggccgcttccgccgcctcggccatggcctccctcacggcctcgcgggcccacagcctcggaggcctggacccggccttcaccagcacagaggacctaaactgcaaggagaacttggagcaggacctcggcgatgacaacagcaacgacctgctgctcagctgcccgcacttccgcaatgagatcgggggcgagtgtgagcgcaacgtgagcttctcccgggcttccgtgggctccccgagcagcggcgagggccacctggcagagcccgccctgagcgcctaccgcaccaacgccagcatctcggtgttggaagttcccaaggagcagcagcggacgcagagtcggccccggcagtacagcatcgagcatgtggacctgggcgcccgctactaccaggattacttcgtgggcaaagaacatgccaattacttcggcgtggatgagaagctggggccagtggctgtgagcattaagcgggagaagctggaagaccacaaggagcacggacctcagtaccagtacaggatcatcttccggacccgcgagctcatcaccctgcggggctccatcctggaagatgctacgcccacagccaccaagcatgggaccgggcggggcctgcccttgaaggatgccctggagtatgtcatccccgagctcaacatccactgcctgcggctggccctcaacacccccaaggtgacggagcaactgctgaagctcgatgagcaagggctctgccggaagcacaaggtgggcatcctctattgcaaggccggccagagctccgaggaggagatgtacaacaatgaggaggccggccccgcctttgaggagttcctctccctcatcggcgagaaggtctgcctgaagggcttcaccaagtacgctgcccagctggacgtcaagaccgactccacgggaacccactccctctacacgatgtaccaggactacgagatcatgttccatgtctccaccctgctcccttacacccccaacaacaggcagcagctgctacggaagaggcacataggaaatgacatcgtgacgatcatcttccaggagcctggcgcgctaccgttcacccccaagaacatccgctcccacttccagcacgtcttcatcattgtccgagtccacaacccctgcactgataacgtctgttacagtatggctgtgacccgatccaaagacgctcctcctttcggcccccccatccccagtggaaccacattccgcaaatccgacgtcttcagagacttcttgctggccaaggtgattaacgctgagaacgccgcgcacaagtccgacaagttccacaccatggccaccaggacccgccaggagtatctcaaggacctggccgaaaactgtgtctccaacacccccatcgactccaccggcaaattcaacctcatctccctgacctccaagaagaaggaaaagacaaaagcacgggctggcgctgagcagcacagtgcaggggccatcgcctggagggtggtggcccaggactacgcccagggggtggaaatcgactgcattttgggaatttccaatgagtttgtggtgctcctggacttacgcaccaaggaggtggtgttcaactgctactgcggggatgtcattggctggactccagactcctccacactcaaaatcttctatggacgaggagaccacatcttcctacaggcgacagagggttctgtggaggacataagggagatagtgcagagactgaaggtaagggagagagcccggcgatagggcggcgatttgtatggtttcggcctcaggaaccactgaaatacttccctagcccagtcagttaggctaagacacgcactggcccggagagaatcacagttgtcacttacaaactagacatcttgtgggttctgtagctaggttcttcctctggaaggtttgtgccagagatctgtggatcttcatgctattaccttggaaagacaagagatacttattaaccttggacactgatagaaagtataaatttaagcttaggttaaaaatgtaggccaggcgccatggctcatacctgtaatctatctcagcactttaggaggctgaggtggtggatcgcttgagcccaggaatttccagaccaacctgggtaaccatagtgagactctgcctacaaa

SEQ ID NO: 426369 - DNA, 2769 bp, Homo sapiens
gacgggtggccccggtcccccggcagggccttctccccccttcggcaccgcagcagcagcgagatcaccctcagcgagtgtgacgcggaggacgcgggggagccgcggggggcccggcacacgggggcgctgcccctcttccgcgagtacgggagcacctcgtccatcgacgtgcagggcatgcccgagcagagcttcttcgacatcctgaacgagttccgcagcgagcagcccgacgcccgagggtgccaggccctcaccgagctcctccgggcagatcctggcccacacctcatggggggcggcggcggagccaagggggactcccacaacgggcagcccgccaaggacagcctcctgccactgcagcccacgaaggagaaggagaaggcccggaagaaacctgcgcggggcctcggcggcggggacacggtggactcgtccatctttcggaagctaaggagcagcaaacccgagggggaggctgggcgttccccgggggaggccgacgagggccggagccccccggaagccagcaggccgtgggtgtgtcagaagagcttcgcccacttcgacgtgcagagcatgctgttcgacctcaacgaggcggccgccaacagggtgtcggtgtcgcagcggcggaacaccaccacgggtgcttcggccgcttccgccgcctcggccatggcctccctcacggcctcgcgggcccacagcctcggaggcctggacccggccttcaccagcacagaggacctaaactgcaaggagaacttggagcaggacctcggcgatgacaacagcaacgacctgctgctcagctgcccgcacttccgcaatgagatcgggggcgagtgtgagcgcaacgtgagcttctcccgggcttccgtgggctccccgagcagcggcgagggccacctggcagagcccgccctgagcgcctaccgcaccaacgccagcatctcggtgttggaagttcccaaggagcagcagcggacgcagagtcggccccggcagtacagcatcgagcatgtggacctgggcgcccgctactaccaggattacttcgtgggcaaagaacatgccaattacttcggcgtggatgagaagctggggccagtggctgtgagcattaagcgggagaagctggaagaccacaaggagcacggacctcagtaccagtacaggatcatcttccggacccgcgagctcatcaccctgcggggctccatcctggaagatgctacgcccacagccaccaagcatgggaccgggcggggcctgcccttgaaggatgccctggagtatgtcatccccgagctcaacatccactgcctgcggctggccctcaacacccccaaggtgacggagcaactgctgaagctcgatgagcaagggctctgccggaagcacaaggtgggcatcctctattgcaaggccggccagagctccgaggaggagatgtacaacaatgaggaggccggccccgcctttgaggagttcctctccctcatcggcgagaaggtctgcctgaagggcttcaccaagtacgctgcccagctggacgtcaagaccgactccacgggaacccactccctctacacgatgtaccaggactacgagatcatgttccatgtctccaccctgctcccttacacccccaacaacaggcagcagctgctacggaagaggcacataggaaatgacatcgtgacgatcatcttccaggagcctggcgcgctaccgttcacccccaagaacatccgctcccacttccagcacgtcttcatcattgtccgagtccacaacccctgcactgataacgtctgttacagtatggctgtgacccgatccaaagacgctcctcctttcggcccccccatccccagtggaaccacattccgcaaatccgacgtcttcagagacttcttgctggccaaggtgattaacgctgagaacgccgcgcacaagtccgacaagttccacaccatggccaccaggacccgccaggagtatctcaaggacctggccgaaaactgtgtctccaacacccccatcgactccaccggcaaattcaacctcatctccctgacctccaagaagaaggaaaagacaaaagcacgggctggcgctgagcagcacagtgcaggggccatcgcctggagggtggtggcccaggactacgcccagggggtggaaatcgactgcattttgggaatttccaatgagtttgtggtgctcctggacttacgcaccaaggaggtggtgttcaactgctactgcggggatgtcattggctggactccagactcctccacactcaaaatcttctatggacgaggagaccacatcttcctacaggcgacagagggttctgtggaggacataagggagatagtgcagagactgaaggtgatgaccagtggctgggagacggtggacatgacgcttcggcggaacgggctcgggcagctgggcttccacgtgaagtacgacggcacggtggccgaggttgaggactatgggttcgcctggcaggccggcctccggcagggcagccgactagtggagatctgcaaggtggccgtggtcacactgacccacgaccagatgatcgacctgctgcgcacctctgtcactgtgaaggtggtcatcatcccgccttttgaggacggcactccccggagatggagtctcgctctgtcgcccaggctgaagtgcagtggcgtgatctcaactcactgcaacctccacctcccgggttcaagc

SEQ ID NO: 426370 - DNA, 5377 bp, Homo sapiens
  misc_feature (4621)..(4621): n is a, c, g, or t
cctgtccccctctgttgccctttcccagctgctacggaagaggcacataggaaatgacatcgtgacgatcatcttccaggagcctggcgcgctaccgttcacccccaagaacatccgctcccacttccagcacgtcttcatcattgtccgagtccacaacccctgcactgataacgtctgttacagtatggctgtgacccgatccaaagacgctcctcctttcggcccccccatccccagtggaaccacattccgcaaatccgacgtcttcagagacttcttgctggccaaggtgattaacgctgagaacgccgcgcacaagtccgacaagttccacaccatggccaccaggacccgccaggagtatctcaaggacctggccgaaaactgtgtctccaacacccccatcgactccaccggcaaattcaacctcatctccctgacctccaagaagaaggaaaagacaaaagcacgggctggcgctgagcagcacagtgcaggggccatcgcctggagggtggtggcccaggactacgcccagggggtggaaatcgactgcattttgggaatttccaatgagtttgtggtgctcctggacttacgcaccaaggaggtggtgttcaactgctactgcggggatgtcattggctggactccagactcctccacactcaaaatcttctatggacgaggagaccacatcttcctacaggcgacagagggttctgtggaggacataagggagatagtgcagagactgaaggtgatgaccagtggctgggagacggtggacatgacgcttcggcggaacgggctcgggcagctgggcttccacgtgaagtacgacggcacggtggccgaggttgaggactatgggttcgcctggcaggccggcctccggcagggcagccgactagtggagatctgcaaggtggccgtggtcacactgacccacgaccagatgatcgacctgctgcgcacctctgtcactgtgaaggtggtcatcatcccgccttttgaggacggcactccccggaggggttggccggagacctacgacatgaatacctcggagcccaagacggagcaggaaagcatcactcctgggggccggcccccctaccgcagcaatgctccctggcagtggagcgggcccgcatcccataactctctaccagcctccaagtgggccactccaaccactcccggccatgcccagtccctgagccggcccctgaagcagacccccatagtccccttccgggagtcccagccactgcacagcaagaggcctgtcagcttcccagaaaccccttacacagtatcaccagcaggggccgacagagtccctccctaccgacagccttctgggagcttctccacccccggttcggccacctacgtgagatacaagccatccccagaaaggtacacggctgccccacaccccctgctatctcttgatccccacttcagccacgatgggacgtccagcggcgactcctcttccggcggcctgaccagccaggagagcaccatggaacgccagaagccagagcctttgtggcatgtgcctgcccaggccaggctctcagccatagccggaagcagcgggaacaagcacccgtccaggcaggatgcagcaggcaaagattcccccaacaggcattccaaaggagaacctcaatactcaagtcattccagcagcaacaccctctccagcaacgcatccagcagccacagcgacgaccgctggttcgaccccctggaccccctggagccagagcaagaccccctctccaagggtggctctagtgacagcggcatcgacaccaccctctacacctccagccctagctgcatgtccctggccaaggctccacggcccgccaagccacacaagccccctggaagtatgggcctttgtggcgggggtcgcgaggccgctgggaggtcccaccacgcagacaggcggcgggaggtctcccctgcccccgcagttgccggccaaagcaagggctaccgaccgaagctgtactcctccggctccagcacccccacgggactggcggggggcagccgagacccaccgaggcagcccagtgacatgggctcgagggttggctaccccgctcaggtttacaaaactgccagtgcagagactcctcggccctcccagctggcccagcccagcccctttcagctctccgcctccgtccccaagtccttcttctccaagcagcctgtacgcaataagcacccaacagggtggaagagaacggaggagcccccaccacggccactccccttcagtgacccaaagaagcaggtggacacgaacaccaaaaatgtctttgggcaaccgaggttgagggcatccctccgagacctccggtcaccacggaagaactacaaatccaccatcgaggatgacctgaagaaactcatcatcatggacaacctggggccagagcaggagagagacacgggacagtcaccgcagaagggcctgcagcggacgctgtcggacgagagcctgtgcagcgggcgccgggagcccagcttcgccagccccgctggcctagagccagggctgcccagcgacgtgctcttcaccagcacctgcgccttcccgtccagcacgctgcctgcacgccgccagcaccagcacccccacccgcccgtcggccccggtgccacccctgccgccggcagcggctttcccgagaagaaatccaccatctcagcctcggagctctcgctggctgatgggcgggaccgccccctgcggcgcctggaccctgggctgatgcccctgcctgacacagctgctggcctcgagtggtccagcctggtgaacgcagccaaggcatacgaagtgcaaagagccgtctcactcttctctctgaacgacccggccctgagcccggacatcccgcctgcacacagtcctgtccacagccacctgagcctggagaggggacccccgacccccaggaccacccctaccatgagcgaggagccacccctggatctgacaggcaaggtgtaccagctggaggtgatgctgaaacagctgcacactgacctgcagaaggagaagcaggacaaggtggtgctccagtcagaggtggccagcctgcggcagaacaaccagcggctgcaggaggagtcgcaggccgccagcgagcagctgcgcaagtttgcggagatcttctgcagggagaagaaggagctctgaggtgggaggccgccgcccgccttcgctccttcccctcaggccgtggccctgctgcctctctccctccactcagctcccagctgccggtgtgaccaagatgacccatccagggccctccccatggacacggaaactccgatggcctcactagggctgtgagtcagggtcagcgcacacagccctcatgccccagagggcgaagtggtctcaggcctccctccaagctgcccagctgtggtcccggtgagctgggctgtgcttacaccgctcccgggcctgccccgctgtccccatctagcctcttcctgggaccagcccttcgaagctgatggggacggagagaggagccagtctccagacgcctcggctccaggaggtcacacagcaggtttctgcaccacgcacaacaaagttgcggcttgtggggccgaggcccctgcatgaaaagtacagcgtgaaagcaaccctttcttccccacacccagagaggtgaggcccgcgtggacacagaccagggcgcctcggtccctagcacgtgagctccaaaaagcacgaacatgatcccctccctaaccccctcctcccaaaaagcagccaggagcactttcttagagtttaaattattttcttgggggcctgaggatagagagaggcaaggctagcctccagagccgatttatttgagagagaaactctatttggatctccaggacggtttatacgatctttttctatcagctcctcttccgccagaggccactgcacctgggctaggggtccacaggcccctccaccttccagctaaccaggccaggccggggcggtggagccaccacacagccgactctctcctcctcctcccggcacgacctggccctgaccagcagcctcggcctcttctgggttccaggaggggctcccgaagccctcaggacagggctggaggagaacagccttcatctcctcctctggtttttttttcctttgcaagtctcccagcccatctctccgagcagcggccaccagaccccctcaccatgctccccggggagcactgcaccccgcgaaccccactggacgctggttctctaaaggcaataaggggcggccatgccggtgtggtaccacgctgttcctccaggaaaccgtttctttttttccttctttaaaagcaaacagaaaaagatatatatatatatatatatatatttattttttcatgtagagttggcgccagaacaagcctgtatggccacagtctgtggattcatccccccaacctcaagctgaggaccaaggcgtgtcccctgtgggctgggggtcagtgggaggaccagagggatgaagtcagggcaggccggtgccctttttgggaggcancaggcggggaggagttggcggagcaggtctggctgtgagccagcaccaggcaacccggcccttgtccagggacctctgctgccttctctctggggtcaggaacctcagaggagggggctctggggactgcataggacgcaggcactcggaggtgccggtgtggatgggtgggggtgagagaagagggttcttatcgcgtctcctgtgatcagcctctggccccctggaggaggaaacctcagcgctgcccctgcccccaccctcacccccaacaccaagagtgaggtgggcgtgccccaggcagcgtcctcagccctggccagctactgtgatgccatcttctcccccatccccttctctggggggcccacccgtcccccacccccaccccttagaccctcatcgggtccctttttttttttttttttcagttgtctcctcccatcttcagatcattcgaatcattttggggacttaatcatgtacatggacaagtgtaaattatgatttttggttttgttttctgttattttttaaggatttctgcaaaaacagatctatttaatttgaggttgatgttctatccaatggccgaagatagcagcaggttttttttttcatatgttgatttgtttcatttggattttttttttattattctttattgtcttttttttttccccatccctgtcttgagattttctggcatgtttctggaggtttcaaaggaaataaatgtttcatagaaatggcttg

SEQ ID NO: 426371 - DNA, 3700 bp, Homo sapiens
  misc_feature (2944)..(2944): n is a, c, g, or t
tagcacctcgctagatgaatgtgcgtcagaacagccgcagttctcacccatgccaggaatgtacgccggcccggcactctcagagcctcctcggcccctggagccagagcaagaccccctctccaagggtggctctagtgacagcggcatcgacaccaccctctacacctccagccctagctgcatgtccctggccaaggctccacggcccgccaagccacacaagccccctggaagtatgggcctttgtggcgggggtcgcgaggccgctgggaggtcccaccacgcagacaggcggcgggaggtctcccctgcccccgcagttgccggccaaagcaagggctaccgaccgaagctgtactcctccggctccagcacccccacgggactggcggggggcagccgagacccaccgaggcagcccagtgacatgggctcgagggttggctaccccgctcaggtttacaaaactgccagtgcagagactcctcggccctcccagctggcccagcccagcccctttcagctctccgcctccgtccccaagtccttcttctccaagcagcctgtacgcaataagcacccaacagggtggaagagaacggaggagcccccaccacggccactccccttcagtgacccaaagaagcaggtggacacgaacaccaaaaatgtctttgggcaaccgaggttgagggcatccctccgagacctccggtcaccacggaagaactacaaatccaccatcgaggatgacctgaagaaactcatcatcatggacaacctggggccagagcaggagagagacacgggacagtcaccgcagaagggcctgcagcggacgctgtcggacgagagcctgtgcagcgggcgccgggagcccagcttcgccagccccgctggcctagagccagggctgcccagcgacgtgctcttcaccagcacctgcgccttcccgtccagcacgctgcctgcacgccgccagcaccagcacccccacccgcccgtcggccccggtgccacccctgccgccggcagcggctttcccgagaagaaatccaccatctcagcctcggagctctcgctggctgatgggcgggaccgccccctgcggcgcctggaccctgggctgatgcccctgcctgacacagctgctggcctcgagtggtccagcctggtgaacgcagccaaggcatacgaagtgcaaagagccgtctcactcttctctctgaacgacccggccctgagcccggacatcccgcctgcacacagtcctgtccacagccacctgagcctggagaggggacccccgacccccaggaccacccctaccatgagcgaggagccacccctggatctgacaggcaaggtgtaccagctggaggtgatgctgaaacagctgcacactgacctgcagaaggagaagcaggacaaggtggtgctccagtcagaggtggccagcctgcggcagaacaaccagcggctgcaggaggagtcgcaggccgccagcgagcagctgcgcaagtttgcggagatcttctgcagggagaagaaggagctctgaggtgggaggccgccgcccgccttcgctccttcccctcaggccgtggccctgctgcctctctccctccactcagctcccagctgccggtgtgaccaagatgacccatccagggccctccccatggacacggaaactccgatggcctcactagggctgtgagtcagggtcagcgcacacagccctcatgccccagagggcgaagtggtctcaggcctccctccaagctgcccagctgtggtcccggtgagctgggctgtgcttacaccgctcccgggcctgccccgctgtccccatctagcctcttcctgggaccagcccttcgaagctgatggggacggagagaggagccagtctccagacgcctcggctccaggaggtcacacagcaggtttctgcaccacgcacaacaaagttgcggcttgtggggccgaggcccctgcatgaaaagtacagcgtgaaagcaaccctttcttccccacacccagagaggtgaggcccgcgtggacacagaccagggcgcctcggtccctagcacgtgagctccaaaaagcacgaacatgatcccctccctaaccccctcctcccaaaaagcagccaggagcactttcttagagtttaaattattttcttgggggcctgaggatagagagaggcaaggctagcctccagagccgatttatttgagagagaaactctatttggatctccaggacggtttatacgatctttttctatcagctcctcttccgccagaggccactgcacctgggctaggggtccacaggcccctccaccttccagctaaccaggccaggccggggcggtggagccaccacacagccgactctctcctcctcctcccggcacgacctggccctgaccagcagcctcggcctcttctgggttccaggaggggctcccgaagccctcaggacagggctggaggagaacagccttcatctcctcctctggtttttttttcctttgcaagtctcccagcccatctctccgagcagcggccaccagaccccctcaccatgctccccggggagcactgcaccccgcgaaccccactggacgctggttctctaaaggcaataaggggcggccatgccggtgtggtaccacgctgttcctccaggaaaccgtttctttttttccttctttaaaagcaaacagaaaaagatatatatatatatatatatatatttattttttcatgtagagttggcgccagaacaagcctgtatggccacagtctgtggattcatccccccaacctcaagctgaggaccaaggcgtgtcccctgtgggctgggggtcagtgggaggaccagagggatgaagtcagggcaggccggtgccctttttgggaggcancaggcggggaggagttggcggagcaggtctggctgtgagccagcaccaggcaacccggcccttgtccagggacctctgctgccttctctctggggtcaggaacctcagaggagggggctctggggactgcataggacgcaggcactcggaggtgccggtgtggatgggtgggggtgagagaagagggttcttatcgcgtctcctgtgatcagcctctggccccctggaggaggaaacctcagcgctgcccctgcccccaccctcacccccaacaccaagagtgaggtgggcgtgccccaggcagcgtcctcagccctggccagctactgtgatgccatcttctcccccatccccttctctggggggcccacccgtcccccacccccaccccttagaccctcatcgggtccctttttttttttttttttcagttgtctcctcccatcttcagatcattcgaatcattttggggacttaatcatgtacatggacaagtgtaaattatgatttttggttttgttttctgttattttttaaggatttctgcaaaaacagatctatttaatttgaggttgatgttctatccaatggccgaagatagcagcaggttttttttttcatatgttgatttgtttcatttggattttttttttattattctttattgtcttttttttttccccatccctgtcttgagattttctggcatgtttctggaggtttcaaaggaaataaatgtttcatagaaatggcttg

SEQ ID NO: 426372 - DNA, 7026 bp, Homo sapiens
  misc_feature (6270)..(6270): n is a, c, g, or t
gacgggtggccccggtcccccggcagggccttctccccccttcggcaccgcagcagcagcgagatcaccctcagcgagtgtgacgcggaggacgcgggggagccgcggggggcccggcacacgggggcgctgcccctcttccgcgagtacgggagcacctcgtccatcgacgtgcagggcatgcccgagcagagcttcttcgacatcctgaacgagttccgcagcgagcagcccgacgcccgagggtgccaggccctcaccgagctcctccgggcagatcctggcccacacctcatggggggcggcggcggagccaagggggactcccacaacgggcagcccgccaaggacagcctcctgccactgcagcccacgaaggagaaggagaaggcccggaagaaacctgcgcggggcctcggcggcggggacacggtggactcgtccatctttcggaagctaaggagcagcaaacccgagggggaggctgggcgttccccgggggaggccgacgagggccggagccccccggaagccagcaggccgtgggtgtgtcagaagagcttcgcccacttcgacgtgcagagcatgctgttcgacctcaacgaggcggccgccaacagggtgtcggtgtcgcagcggcggaacaccaccacgggtgcttcggccgcttccgccgcctcggccatggcctccctcacggcctcgcgggcccacagcctcggaggcctggacccggccttcaccagcacagaggacctaaactgcaaggagaacttggagcaggacctcggcgatgacaacagcaacgacctgctgctcagctgcccgcacttccgcaatgagatcgggggcgagtgtgagcgcaacgtgagcttctcccgggcttccgtgggctccccgagcagcggcgagggccacctggcagagcccgccctgagcgcctaccgcaccaacgccagcatctcggtgttggaagttcccaaggagcagcagcggacgcagagtcggccccggcagtacagcatcgagcatgtggacctgggcgcccgctactaccaggattacttcgtgggcaaagaacatgccaattacttcggcgtggatgagaagctggggccagtggctgtgagcattaagcgggagaagctggaagaccacaaggagcacggacctcagtaccagtacaggatcatcttccggacccgcgagctcatcaccctgcggggctccatcctggaagatgctacgcccacagccaccaagcatgggaccgggcggggcctgcccttgaaggatgccctggagtatgtcatccccgagctcaacatccactgcctgcggctggccctcaacacccccaaggtgacggagcaactgctgaagctcgatgagcaagggctctgccggaagcacaaggtgggcatcctctattgcaaggccggccagagctccgaggaggagatgtacaacaatgaggaggccggccccgcctttgaggagttcctctccctcatcggcgagaaggtctgcctgaagggcttcaccaagtacgctgcccagctggacgtcaagaccgactccacgggaacccactccctctacacgatgtaccaggactacgagatcatgttccatgtctccaccctgctcccttacacccccaacaacaggcagcagctgctacggaagaggcacataggaaatgacatcgtgacgatcatcttccaggagcctggcgcgctaccgttcacccccaagaacatccgctcccacttccagcacgtcttcatcattgtccgagtccacaacccctgcactgataacgtctgttacagtatggctgtgacccgatccaaagacgctcctcctttcggcccccccatccccagtggaaccacattccgcaaatccgacgtcttcagagacttcttgctggccaaggtgattaacgctgagaacgccgcgcacaagtccgacaagttccacaccatggccaccaggacccgccaggagtatctcaaggacctggccgaaaactgtgtctccaacacccccatcgactccaccggcaaattcaacctcatctccctgacctccaagaagaaggaaaagacaaaagcacgggctggcgctgagcagcacagtgcaggggccatcgcctggagggtggtggcccaggactacgcccagggggtggaaatcgactgcattttgggaatttccaatgagtttgtggtgctcctggacttacgcaccaaggaggtggtgttcaactgctactgcggggatgtcattggctggactccagactcctccacactcaaaatcttctatggacgaggagaccacatcttcctacaggcgacagagggttctgtggaggacataagggagatagtgcagagactgaaggtgatgaccagtggctgggagacggtggacatgacgcttcggcggaacgggctcgggcagctgggcttccacgtgaagtacgacggcacggtggccgaggttgaggactatgggttcgcctggcaggccggcctccggcagggcagccgactagtggagatctgcaaggtggccgtggtcacactgacccacgaccagatgatcgacctgctgcgcacctctgtcactgtgaaggtggtcatcatcccgccttttgaggacggcactccccggaggggttggccggagacctacgacatgaatacctcggagcccaagacggagcaggaaagcatcactcctgggggccggcccccctaccgcagcaatgctccctggcagtggagcgggcccgcatcccataactctctaccagcctccaagtgggccactccaaccactcccggccatgcccagtccctgagccggcccctgaagcagacccccatagtccccttccgggagtcccagccactgcacagcaagaggcctgtcagcttcccagaaaccccttacacagtatcaccagcaggggccgacagagtccctccctaccgacagccttctgggagcttctccacccccggttcggccacctacgtgagatacaagccatccccagaaaggtacacggctgccccacaccccctgctatctcttgatccccacttcagccacgatgggacgtccagcggcgactcctcttccggcggcctgaccagccaggagagcaccatggaacgccagaagccagagcctttgtggcatgtgcctgcccaggccaggctctcagccatagccggaagcagcgggaacaagcacccgtccaggcaggatgcagcaggcaaagattcccccaacaggcattccaaaggagaacctcaatactcaagtcattccagcagcaacaccctctccagcaacgcatccagcagccacagcgacgaccgctggttcgaccccctggaccccctggagccagagcaagaccccctctccaagggtggctctagtgacagcggcatcgacaccaccctctacacctccagccctagctgcatgtccctggccaaggctccacggcccgccaagccacacaagccccctggaagtatgggcctttgtggcgggggtcgcgaggccgctgggaggtcccaccacgcagacaggcggcgggaggtctcccctgcccccgcagttgccggccaaagcaagggctaccgaccgaagctgtactcctccggctccagcacccccacgggactggcggggggcagccgagacccaccgaggcagcccagtgacatgggctcgagggttggctaccccgctcaggtttacaaaactgccagtgcagagactcctcggccctcccagctggcccagcccagcccctttcagctctccgcctccgtccccaagtccttcttctccaagcagcctgtacgcaataagcacccaacagggtggaagagaacggaggagcccccaccacggccactccccttcagtgacccaaagaagcaggtggacacgaacaccaaaaatgtctttgggcaaccgaggttgagggcatccctccgagacctccggtcaccacggaagaactacaaatccaccatcgaggatgacctgaagaaactcatcatcatggacaacctggggccagagcaggagagagacacgggacagtcaccgcagaagggcctgcagcggacgctgtcggacgagagcctgtgcagcgggcgccgggagcccagcttcgccagccccgctggcctagagccagggctgcccagcgacgtgctcttcaccagcacctgcgccttcccgtccagcacgctgcctgcacgccgccagcaccagcacccccacccgcccgtcggccccggtgccacccctgccgccggcagcggctttcccgagaagaaatccaccatctcagcctcggagctctcgctggctgatgggcgggaccgccccctgcggcgcctggaccctgggctgatgcccctgcctgacacagctgctggcctcgagtggtccagcctggtgaacgcagccaaggcatacgaagtgcaaagagccgtctcactcttctctctgaacgacccggccctgagcccggacatcccgcctgcacacagtcctgtccacagccacctgagcctggagaggggacccccgacccccaggaccacccctaccatgagcgaggagccacccctggatctgacaggcaaggtgtaccagctggaggtgatgctgaaacagctgcacactgacctgcagaaggagaagcaggacaaggtggtgctccagtcagaggtggccagcctgcggcagaacaaccagcggctgcaggaggagtcgcaggccgccagcgagcagctgcgcaagtttgcggagatcttctgcagggagaagaaggagctctgaggtgggaggccgccgcccgccttcgctccttcccctcaggccgtggccctgctgcctctctccctccactcagctcccagctgccggtgtgaccaagatgacccatccagggccctccccatggacacggaaactccgatggcctcactagggctgtgagtcagggtcagcgcacacagccctcatgccccagagggcgaagtggtctcaggcctccctccaagctgcccagctgtggtcccggtgagctgggctgtgcttacaccgctcccgggcctgccccgctgtccccatctagcctcttcctgggaccagcccttcgaagctgatggggacggagagaggagccagtctccagacgcctcggctccaggaggtcacacagcaggtttctgcaccacgcacaacaaagttgcggcttgtggggccgaggcccctgcatgaaaagtacagcgtgaaagcaaccctttcttccccacacccagagaggtgaggcccgcgtggacacagaccagggcgcctcggtccctagcacgtgagctccaaaaagcacgaacatgatcccctccctaaccccctcctcccaaaaagcagccaggagcactttcttagagtttaaattattttcttgggggcctgaggatagagagaggcaaggctagcctccagagccgatttatttgagagagaaactctatttggatctccaggacggtttatacgatctttttctatcagctcctcttccgccagaggccactgcacctgggctaggggtccacaggcccctccaccttccagctaaccaggccaggccggggcggtggagccaccacacagccgactctctcctcctcctcccggcacgacctggccctgaccagcagcctcggcctcttctgggttccaggaggggctcccgaagccctcaggacagggctggaggagaacagccttcatctcctcctctggtttttttttcctttgcaagtctcccagcccatctctccgagcagcggccaccagaccccctcaccatgctccccggggagcactgcaccccgcgaaccccactggacgctggttctctaaaggcaataaggggcggccatgccggtgtggtaccacgctgttcctccaggaaaccgtttctttttttccttctttaaaagcaaacagaaaaagatatatatatatatatatatatatttattttttcatgtagagttggcgccagaacaagcctgtatggccacagtctgtggattcatccccccaacctcaagctgaggaccaaggcgtgtcccctgtgggctgggggtcagtgggaggaccagagggatgaagtcagggcaggccggtgccctttttgggaggcancaggcggggaggagttggcggagcaggtctggctgtgagccagcaccaggcaacccggcccttgtccagggacctctgctgccttctctctggggtcaggaacctcagaggagggggctctggggactgcataggacgcaggcactcggaggtgccggtgtggatgggtgggggtgagagaagagggttcttatcgcgtctcctgtgatcagcctctggccccctggaggaggaaacctcagcgctgcccctgcccccaccctcacccccaacaccaagagtgaggtgggcgtgccccaggcagcgtcctcagccctggccagctactgtgatgccatcttctcccccatccccttctctggggggcccacccgtcccccacccccaccccttagaccctcatcgggtccctttttttttttttttttcagttgtctcctcccatcttcagatcattcgaatcattttggggacttaatcatgtacatggacaagtgtaaattatgatttttggttttgttttctgttattttttaaggatttctgcaaaaacagatctatttaatttgaggttgatgttctatccaatggccgaagatagcagcaggttttttttttcatatgttgatttgtttcatttggattttttttttattattctttattgtcttttttttttccccatccctgtcttgagattttctggcatgtttctggaggtttcaaaggaaataaatgtttcatagaaatggcttg

SEQ ID NO: 426373 - DNA, 3417 bp, Homo sapiens
gacgggtggccccggtcccccggcagggccttctccccccttcggcaccgcagcagcagcgagatcaccctcagcgagtgtgacgcggaggacgcgggggagccgcggggggcccggcacacgggggcgctgcccctcttccgcgagtacgggagcacctcgtccatcgacgtgcagggcatgcccgagcagagcttcttcgacatcctgaacgagttccgcagcgagcagcccgacgcccgagggtgccaggccctcaccgagctcctccgggcagatcctggcccacacctcatggggggcggcggcggagccaagggggactcccacaacgggcagcccgccaaggacagcctcctgccactgcagcccacgaaggagaaggagaaggcccggaagaaacctgcgcggggcctcggcggcggggacacggtggactcgtccatctttcggaagctaaggagcagcaaacccgagggggaggctgggcgttccccgggggaggccgacgagggccggagccccccggaagccagcaggccgtgggtgtgtcagaagagcttcgcccacttcgacgtgcagagcatgctgttcgacctcaacgaggcggccgccaacagggtgtcggtgtcgcagcggcggaacaccaccacgggtgcttcggccgcttccgccgcctcggccatggcctccctcacggcctcgcgggcccacagcctcggaggcctggacccggccttcaccagcacagaggacctaaactgcaaggagaacttggagcaggacctcggcgatgacaacagcaacgacctgctgctcagctgcccgcacttccgcaatgagatcgggggcgagtgtgagcgcaacgtgagcttctcccgggcttccgtgggctccccgagcagcggcgagggccacctggcagagcccgccctgagcgcctaccgcaccaacgccagcatctcggtgttggaagttcccaaggagcagcagcggacgcagagtcggccccggcagtacagcatcgagcatgtggacctgggcgcccgctactaccaggattacttcgtgggcaaagaacatgccaattacttcggcgtggatgagaagctggggccagtggctgtgagcattaagcgggagaagctggaagaccacaaggagcacggacctcagtaccagtacaggatcatcttccggacccgcgagctcatcaccctgcggggctccatcctggaagatgctacgcccacagccaccaagcatgggaccgggcggggcctgcccttgaaggatgccctggagtatgtcatccccgagctcaacatccactgcctgcggctggccctcaacacccccaaggtgacggagcaactgctgaagctcgatgagcaagggctctgccggaagcacaaggtgggcatcctctattgcaaggccggccagagctccgaggaggagatgtacaacaatgaggaggccggccccgcctttgaggagttcctctccctcatcggcgagaaggtctgcctgaagggcttcaccaagtacgctgcccagctggacgtcaagaccgactccacgggaacccactccctctacacgatgtaccaggactacgagatcatgttccatgtctccaccctgctcccttacacccccaacaacaggcagcagctgctacggaagaggcacataggaaatgacatcgtgacgatcatcttccaggagcctggcgcgctaccgttcacccccaagaacatccgctcccacttccagcacgtcttcatcattgtccgagtccacaacccctgcactgataacgtctgttacagtatggctgtgacccgatccaaagacgctcctcctttcggcccccccatccccagtggaaccacattccgcaaatccgacgtcttcagagacttcttgctggccaaggtgattaacgctgagaacgccgcgcacaagtccgacaagttccacaccatggccaccaggacccgccaggagtatctcaaggacctggccgaaaactgtgtctccaacacccccatcgactccaccggcaaattcaacctcatctccctgacctccaagaagaaggaaaagacaaaagcacgggctggcgctgagcagcacagtgcaggggccatcgcctggagggtggtggcccaggactacgcccagggggtggaaatcgactgcattttgggaatttccaatgagtttgtggtgctcctggacttacgcaccaaggaggtggtgttcaactgctactgcggggatgtcattggctggactccagactcctccacactcaaaatcttctatggacgaggagaccacatcttcctacaggcgacagagggttctgtggaggacataagggagatagtgcagagactgaaggtgatgaccagtggctgggagacggtggacatgacgcttcggcggaacgggctcgggcagctgggcttccacgtgaagtacgacggcacggtggccgaggttgaggactatgggttcgcctggcaggccggcctccggcagggcagccgactagtggagatctgcaaggtggccgtggtcacactgacccacgaccagatgatcgacctgctgcgcacctctgtcactgtgaaggtggtcatcatcccgccttttgaggacggcactccccggaggtaagggcctccacctttcagccaggtggtgggtggcagctcccagatcgctggcatgaggcctccctggcactgtcacttgaggtcccaatagaggggggataggcaggcccttctaggcaggaatagtggcaacagtgacaggacggggagggcacatctacagagcgcttactgtatgccagttattggtttagcccttcatacgtgcatgatcgcatttaatctccacagttgccctgtgaggggagagcctcattcttcccatttcctacatgaagcacaggatgttaatagttgcttgcctgtgggccccccacacttcattcatttgttcaaaatgtgtttattgagcccctactgtgtgcaagctctgttcaaagtgaccacaacaaagtgcctgctcccttgcggtttgtgttctacagggaaagacaggccgtgaagaaataggtgtgtcataccggatcaggtagtactaagtctcagaaggaaattaaagcagggtaatgaaggggctgcagcacgatgggagagctgcttacaaggcgggcagagaaggctccacgaggctccacagggaggcagccatgtggttttctggccagcgggctccagacaggagctggccagggcacagcctccccagtgtacatgggtgatgtgttcctggagtacggggaggcccatgtggctggagcagagcgagcaggagtgagagctgagagca

SEQ ID NO: 426374 - DNA, 1534 bp, Homo sapiens
gacgggtggccccggtcccccggcagggccttctccccccttcggcaccgcagcagcagcgagatcaccctcagcgagtgtgacgcggaggacgcgggggagccgcggggggcccggcacacgggggcgctgcccctcttccgcgagtacgggagcacctcgtccatcgacgtgcagggcatgcccgagcagagcttcttcgacatcctgaacgagttccgcagcgagcagcccgacgcccgagggtgccaggccctcaccgagctcctccgggcagatcctggcccacacctcatggggggcggcggcggagccaagggggactcccacaacgggcagcccgccaaggacagcctcctgccactgcagcccacgaaggagaaggagaaggcccggaagaaacctgcgcggggcctcggcggcggggacacggtggactcgtccatctttcggaagctaaggagcagcaaacccgagggggaggctgggcgttccccgggggaggccgacgagggccggagccccccggaagccagcaggccgtgggtgtgtcagaagagcttcgcccacttcgacgtgcagagcatgctgttcgacctcaacgaggcggccgccaacagggtgtcggtgtcgcagcggcggaacaccaccacgggtgcttcggccgcttccgccgcctcggccatggcctccctcacggcctcgcgggcccacagcctcggaggcctggacccggccttcaccagcacagaggacctaaactgcaaggagaacttggagcaggacctcggcgatgacaacagcaacgacctgctgctcagctgcccgcacttccgcaatgagatcgggggcgagtgtgagcgcaacgtgagcttctcccgggcttccgtgggctccccgagcagcggcgagggccacctggcagagcccgccctgagcgcctaccgcaccaacgccagcatctcggtgttggaagttcccaaggagcagcagcggacgcagagtcggccccggcagtacagcatcgagcatgtggacctgggcgcccgctactaccaggattacttcgtgggcaaagaacatgccaattacttcggcgtggatgagaagctggggccagtggctgtgagcattaagcgggagaagctggaagaccacaaggagcacggacctcagtaccagtacaggatcatcttccggacccgcgagctcatcaccctgcggggctccatcctggaagatgctacgcccacagccaccaagcatgggaccgggcggggcctgcccttgaaggatgccctggagtatgtcatccccgagctcaacatccactgcctgcggctggccctcaacacccccaaggtgacggagcaactgctgaagctcgatgagcaaggggtgagtcaggggctggaggtgggggtgctgctggggcagtaccttgcaaccccactcctggtagctttttctatcttggtcactttcttttttctttgcaagtaacagaaacctacttaagctggtttcagcaaaa

SEQ ID NO: 426375 - DNA, 4731 bp, Homo sapiens
  misc_feature (3975)..(3975): n is a, c, g, or t
ctgggacccactggaggcatcagcccggaagcaggtggctaaattgaagaacacatcttcctacaggcgacagagggttctgtggaggacataagggagatagtgcagagactgaaggtgatgaccagtggctgggagacggtggacatgacgcttcggcggaacgggctcgggcagctgggcttccacgtgaagtacgacggcacggtggccgaggttgaggactatgggttcgcctggcaggccggcctccggcagggcagccgactagtggagatctgcaaggtggccgtggtcacactgacccacgaccagatgatcgacctgctgcgcacctctgtcactgtgaaggtggtcatcatcccgccttttgaggacggcactccccggaggggttggccggagacctacgacatgaatacctcggagcccaagacggagcaggaaagcatcactcctgggggccggcccccctaccgcagcaatgctccctggcagtggagcgggcccgcatcccataactctctaccagcctccaagtgggccactccaaccactcccggccatgcccagtccctgagccggcccctgaagcagacccccatagtccccttccgggagtcccagccactgcacagcaagaggcctgtcagcttcccagaaaccccttacacagtatcaccagcaggggccgacagagtccctccctaccgacagccttctgggagcttctccacccccggttcggccacctacgtgagatacaagccatccccagaaaggtacacggctgccccacaccccctgctatctcttgatccccacttcagccacgatgggacgtccagcggcgactcctcttccggcggcctgaccagccaggagagcaccatggaacgccagaagccagagcctttgtggcatgtgcctgcccaggccaggctctcagccatagccggaagcagcgggaacaagcacccgtccaggcaggatgcagcaggcaaagattcccccaacaggcattccaaaggagaacctcaatactcaagtcattccagcagcaacaccctctccagcaacgcatccagcagccacagcgacgaccgctggttcgaccccctggaccccctggagccagagcaagaccccctctccaagggtggctctagtgacagcggcatcgacaccaccctctacacctccagccctagctgcatgtccctggccaaggctccacggcccgccaagccacacaagccccctggaagtatgggcctttgtggcgggggtcgcgaggccgctgggaggtcccaccacgcagacaggcggcgggaggtctcccctgcccccgcagttgccggccaaagcaagggctaccgaccgaagctgtactcctccggctccagcacccccacgggactggcggggggcagccgagacccaccgaggcagcccagtgacatgggctcgagggttggctaccccgctcaggtttacaaaactgccagtgcagagactcctcggccctcccagctggcccagcccagcccctttcagctctccgcctccgtccccaagtccttcttctccaagcagcctgtacgcaataagcacccaacagggtggaagagaacggaggagcccccaccacggccactccccttcagtgacccaaagaagcaggtggacacgaacaccaaaaatgtctttgggcaaccgaggttgagggcatccctccgagacctccggtcaccacggaagaactacaaatccaccatcgaggatgacctgaagaaactcatcatcatggacaacctggggccagagcaggagagagacacgggacagtcaccgcagaagggcctgcagcggacgctgtcggacgagagcctgtgcagcgggcgccgggagcccagcttcgccagccccgctggcctagagccagggctgcccagcgacgtgctcttcaccagcacctgcgccttcccgtccagcacgctgcctgcacgccgccagcaccagcacccccacccgcccgtcggccccggtgccacccctgccgccggcagcggctttcccgagaagaaatccaccatctcagcctcggagctctcgctggctgatgggcgggaccgccccctgcggcgcctggaccctgggctgatgcccctgcctgacacagctgctggcctcgagtggtccagcctggtgaacgcagccaaggcatacgaagtgcaaagagccgtctcactcttctctctgaacgacccggccctgagcccggacatcccgcctgcacacagtcctgtccacagccacctgagcctggagaggggacccccgacccccaggaccacccctaccatgagcgaggagccacccctggatctgacaggcaaggtgtaccagctggaggtgatgctgaaacagctgcacactgacctgcagaaggagaagcaggacaaggtggtgctccagtcagaggtggccagcctgcggcagaacaaccagcggctgcaggaggagtcgcaggccgccagcgagcagctgcgcaagtttgcggagatcttctgcagggagaagaaggagctctgaggtgggaggccgccgcccgccttcgctccttcccctcaggccgtggccctgctgcctctctccctccactcagctcccagctgccggtgtgaccaagatgacccatccagggccctccccatggacacggaaactccgatggcctcactagggctgtgagtcagggtcagcgcacacagccctcatgccccagagggcgaagtggtctcaggcctccctccaagctgcccagctgtggtcccggtgagctgggctgtgcttacaccgctcccgggcctgccccgctgtccccatctagcctcttcctgggaccagcccttcgaagctgatggggacggagagaggagccagtctccagacgcctcggctccaggaggtcacacagcaggtttctgcaccacgcacaacaaagttgcggcttgtggggccgaggcccctgcatgaaaagtacagcgtgaaagcaaccctttcttccccacacccagagaggtgaggcccgcgtggacacagaccagggcgcctcggtccctagcacgtgagctccaaaaagcacgaacatgatcccctccctaaccccctcctcccaaaaagcagccaggagcactttcttagagtttaaattattttcttgggggcctgaggatagagagaggcaaggctagcctccagagccgatttatttgagagagaaactctatttggatctccaggacggtttatacgatctttttctatcagctcctcttccgccagaggccactgcacctgggctaggggtccacaggcccctccaccttccagctaaccaggccaggccggggcggtggagccaccacacagccgactctctcctcctcctcccggcacgacctggccctgaccagcagcctcggcctcttctgggttccaggaggggctcccgaagccctcaggacagggctggaggagaacagccttcatctcctcctctggtttttttttcctttgcaagtctcccagcccatctctccgagcagcggccaccagaccccctcaccatgctccccggggagcactgcaccccgcgaaccccactggacgctggttctctaaaggcaataaggggcggccatgccggtgtggtaccacgctgttcctccaggaaaccgtttctttttttccttctttaaaagcaaacagaaaaagatatatatatatatatatatatatttattttttcatgtagagttggcgccagaacaagcctgtatggccacagtctgtggattcatccccccaacctcaagctgaggaccaaggcgtgtcccctgtgggctgggggtcagtgggaggaccagagggatgaagtcagggcaggccggtgccctttttgggaggcancaggcggggaggagttggcggagcaggtctggctgtgagccagcaccaggcaacccggcccttgtccagggacctctgctgccttctctctggggtcaggaacctcagaggagggggctctggggactgcataggacgcaggcactcggaggtgccggtgtggatgggtgggggtgagagaagagggttcttatcgcgtctcctgtgatcagcctctggccccctggaggaggaaacctcagcgctgcccctgcccccaccctcacccccaacaccaagagtgaggtgggcgtgccccaggcagcgtcctcagccctggccagctactgtgatgccatcttctcccccatccccttctctggggggcccacccgtcccccacccccaccccttagaccctcatcgggtccctttttttttttttttttcagttgtctcctcccatcttcagatcattcgaatcattttggggacttaatcatgtacatggacaagtgtaaattatgatttttggttttgttttctgttattttttaaggatttctgcaaaaacagatctatttaatttgaggttgatgttctatccaatggccgaagatagcagcaggttttttttttcatatgttgatttgtttcatttggattttttttttattattctttattgtcttttttttttccccatccctgtcttgagattttctggcatgtttctggaggtttcaaaggaaataaatgtttcatagaaatggcttg

SEQ ID NO: 426376 - DNA, 375 bp, Homo sapiens
cttagtgcctttcttcccaccatctaaataatctctccctccacagtatggctgtgacccgatccaaagacgctcctcctttcggcccccccatccccagtggaaccacattccgcaaatccgacgtcttcagagacttcttgctggccaaggtgattaacgctgagaacgccgcgcacaagtccgacaagttccacaccatggccaccaggacccgccaggagtatctcaaggacctggccgaaaactgtgtctccaacacccccatcgactccaccggcaaattcaacctcatctccctgacctccaagaagaaggaaaagacaaaagcacgggctggcgctgagcagcacagtgcaggggccatcgcctgga

SEQ ID NO: 426377 - DNA, 6804 bp, Homo sapiens
  misc_feature (620)..(620): n is a, c, g, or t
cagctccgaggggagtcggaccggagcaaacagccacccccggcttcgtcccccacgaagaggaagggcaggagccgtgccctcgaggccgtgcccgccccgcccgccagcggcccccgggctcccgccaaggagtccccacccaagagggtgcccgatcccagcccagtcaccaagggcactgcggccgagagcggggaggaggcggcgcgggccatcccccgcgagctcccggtcaagagcagctcgctgctgccggagatcaagcccgagcacaagaggggcccgctccccaaccacttcaacggccgggcagagggaggtcgaagcagagagctgggcagagcggccggagcgcctggagcttctgacgccgacggcttgaagcccaggaaccatttcggcgtgggcaggtcgacagtgaccactaaagtgaccctccctgccaagcccaaacatgtggaactaaatcttaaaacccctaagaatcttgacagtttgggaaatgagcacaatccatttagccagccagttcacaaaggcaacactgccaccaaaatctccttatttgaaaacaaacggacaaacagtagcccaagacacactgacattcgaggccnaaggaatactcctgcctctagtaaaacgtttgttgggagggcaaagctgaatttagccaaaaaagccaaagaaatggagcaacctgaaaagaaagtaatgccaaacagtccccagaatggtgtgctggttaaggaaactgctatagaaaccaaagttaccgtctcggaagaagagattctgccagcaaccagaggaatgaatggagactcttctgagaatcaagctcttggtcctcagcctaaccaagatgataaagcagatgtacaaacagatgctggctgcctttcagaaccagtggcttctgctctgattcctgtcaaggatcataagctcttagagaaggaggactcagaggctgcagacagcaaaagccttgtacttgaaaatgtaaccgatacagcacaagacatccccaccactgtggataccaaagatttacctccaacggccatgccaaagccacagcatacattttctgactcacagtcccctgctgagtcatctcctgggccttctctttcactgtctgcacccgctcctggggatgttcccaaagacacatgtgttcaatcacccataagcagtttcccatgcactgatctaaaagtgtcagaaaaccataaaggatgtgttttgcctgtgtctcgtcagaacaatgagaaaatgccacttttagaacttggaggagaaacaacccctcctttgtccacagagcgtagtccagaagctgtgggaagtgagtgtccatccagagtcctcgtccaggtcaggtccttcgtgctccccgtggagagcacccaggatgtgagctcccaggtcatcccagagagctctgaagttagagaagtgcagttgccaacttgtcacagtaatgaacctgaagtggtttccgttgcaagttgtgctcccccacaagaggaagtactgggcaatgaacactctcattgcacagcagagctcgcggcaaaatctggcccacaagtcataccgccagcatcagagaaaactctgcctattcaggctcaaagtcagggcagcagaacacccctgatggctgaatccagtcccaccaactctcccagcagcggaaatcacttagccactcctcaaaggccagatcagactgttacaaatggccaggatagccctgccagccttttgaacatttctgctggtagtgatgatagtgtatttgattcttcttctgatatggaaaaattcactgaaattataaaacagatggatagcgcagtttgtatgcccatgaaaagaaagaaggccaggatgccaaactctcctgctcctcactttgccatgcctcctattcacgaagaccatttagaaaaggtgtttgatcccaaagtgtttacctttggtttggggaagaagaaggaaagtcagccagaaatgtcaccggctttacatttgatgcagaaccttgacacaaaatccaaactgagacccaaacgtgcatctgctgaacagagcgtcctcttcaagtccctgcacaccaacactaatgggaacagtgagcctctggtgatgccggaaatcaatgacaaagagaacagggacgtcacaaatggtggcattaagagatcgagactagaaaaaagtgcacttttctcaagcttgttatcttctttaccacaagacaaaatcttttctccttctgtgacatcagtcaacactatgaccacggctttcagtacttctcagaacggttccctatctcagtcttcagtgtcacagcccacgactgagggtgccccgccctgtggtttgaacaaagaacagtcaaatcttctgcccgacaactccttaaaggtcttcaatttcaactcgtcaagtacatcacactccagtttgaaaagtccaagccacatggaaaaatacccgcaaaaagagaaaaccaaagaagatctggattcacgaagcaacctacacttgccagaaactaaattttctgaattgtcaaaactgaagaatgatgatatggaaaaggctaatcatattgaaagtgttattaaatcaaacttgccaaactgtgcaaacagtgacaccgacttcatgggtcttttcaaatcaagccggtatgacccaagcatttctttttctggaatgtcattatcagacacaatgacacttagaggaagtgtccaaaataaactcaatccccgacctggaaaggtagtgatatatagtgaacccgacgtctctgagaagtgcattgaagttttcagtgacattcaggattgcagttcttggagcctctctccagtgatactcataaaagttgttagaggatgttggattttgtatgagcaaccaaattttgaagggcactccatccccttagaagaaggagaattggaactctctggtctctggggtatagaagacattttggaaaggcacgaagaagcagagtctgataagccagtggtgattggttccatcagacatgtggttcaggattacagagttagtcacattgacttatttactgaaccagaagggttaggaatcctaagttcctactttgatgatactgaagaaatgcagggatttggtgtaatgcagaagacttgttccatgaaagtacattggggcacgtggctgatttatgaagaacctggatttcagggtgttcctttcatcctggaacctggtgaataccctgacttgtccttctgggatacagaagcagcgtacattggatccatgcggcctctgaaaatgggtggccgtaaagttgaattccctacagatccaaaggtagttgtttatgaaaagcctttctttgaaggaaaatgtgtggaactagaaacaggaatgtgtagttttgtcatggagggaggtgaaacagaagaggcgactggagacgatcatttgccgtttacgtcagtggggtctatgaaagttctaagaggcatttgggttgcatatgagaagcctggatttaccggtcatcagtatttgctagaagaaggagaatacagggactggaaagcctggggaggttacaatggagagcttcagtctttacgacctatattaggtgatttttcaaatgctcacatgataatgtacagtgaaaaaaactttggatccaaaggttccagtattgatgtattgggaattgttgctaatttaaaggagactggatatggagtgaagacacagtctattaatgtactgagtggagtatgggtagcctatgaaaatcctgacttcacaggagaacagtatatactggataaaggattttataccagttttgaggactggggaggcaaaaattgtaagatctcttctgttcaacctatatgtttggattctttcactggcccaaggagacgaaatcagattcacttgttttcagaaccacagtttcaaggtcacagtcaaagttttgaagaaacaacaagtcaaattgatgattcattttctaccaagtcttgcagagtttcaggaggcagctgggttgtatatgatggagaaaatttcactggtaatcaatacgtgttggaagaaggccattatccttgtctgtctgcaatgggatgcccgcctggagcaactttcaagtctcttcgttttatagatgttgaattttctgaaccaacaattattctctttgaaagagaagacttcaaaggaaaaaagattgaacttaatgcagaaactgtcaatctccgatccctgggattcaacacacaaatacgctctgttcaggttattggtggcatatgggttacttatgaatatggcagttacagagggcgacagttcctattgtcacctgcagaagtacctaattggtatgaattcagtggctgtcgccaaataggttctctacgaccttttgttcagaagcgaatttatttcagacttcgaaacaaagcaacagggttattcatgtcaaccaatggaaacttagaggatctgaagcttctgaggatacaggtcatggaggatgtcggggccgatgatcagatttggatctatcaagaaggatgtatcaaatgcaggatagcagaagactgctgcctgacgattgtgggcagcctggtaacatctggctccaagctaggcctggccctggaccagaatgctgacagccagttctggagcttgaagtccgatggcaggatttacagcaagttgaagccaaatttagttttagacattaaagggggcacacagtatgatcaaaatcacattatcctcaacactgtcagcaaagagaagtttacacaagtgtgggaagccatggtcctatatacctgaacaaagaaggaagaagaatcttctggaggtccttccagccaccttatttcttaaaaaggacaatgctgatggaagaccagactggaaagtggatcgactcctccttcattgattctaaattcaaccttaaatcatgctgccatgactcagagaacttactcatcgtttcaaaagactatcatagctttaaaccaataatttgtcctcctttcatttcttgcctttcatttttggtagctgcttaaacaggttgcctaattagcagcttttgggtgattttgtaaaatgttatatcaagatttcaagactgtgtacattttaaattatttccaaagatagtgacaggagagaactggaacaaatttaccaactttgtggacctacaaagcccttacactttaaagggtaagacaaaggcttaagtttgaaaggtagagaactgtttagcatctgagaagaaatactttattaggcctgtaattttggttcttggccttaaacactttctggaacctttaaatatgctgcatagcacaatgggaaagccttaggtattcacacatttaaggaactctaaacaaaatactattttcctttagttcatattaaaaattaatacattttaaaaatttaatgtcaaagtctggtaacatttgttagtaggatttgagttattattttttgagacaggatctcaggctggagtgcagtggcacaatcacggctcactgcagcctctacctccccaggctcaggtgatcctcccacctcagcctcccaagtagctgggactataggcacacatcaccaagcccagccaaattttgttttttttttgtagagatggggtttcatcacgttgcccaggctgatctcgaacctctgggctcaagcaattcactcgcctcggcctcccaaaatgctgggattacaggcctgagccactgcgcccagccaggatttgaattattttaactcatccatgggctgccctagaatgtcacaaatgagggttgtttaatgcctttcttatagctgctactggaacactattatgacctaatttatgagccatccttactcatctacaagtgctgaagcaatgttacatacttttttgctaaactcagattttttagcctaatttcttgtcctcctatccacctgcatccacacatggcctgcatggggctgccttccctgcagtgttctgcagccatgcttcagggtatagctgttggtggacagcctcaggtcttgggggcactatagccactaaacgaggtgtgaaaggctcaagaggatgaccagcaattaattatccccagaaagtgaaggaaaagagacctttagggatgttgctggtcaagtcttgatttgaccggagtcaaatcaatcttcaagcaatcttggaatcctcaactgcagtaagcatttcaaaatgcaaacaaactgcttaacaactgacaagacaccagcccatacgctgctcttccaacagtgggttctagctttgaacaaaagtgctaaacatttccttgaatatattcttcctctttttgtcctcatcactcaatactggtgctcttgtcacaggtagaacagcttgtttcttttccatctattcaagtgtgtttctaattctaaaatgctgatcttctctggagtctatggtaggcaattatggtcactggaatagtttgtcttgttttaaaatattattggtgcatgtacaacagcatccaacatatctgtcttgttcctagatatatagctctgattttaggccttttgtgcataccattacaatatggtggggtaagacattctacagtagcctgtgctgaactgatctcttaaataaacttgcttctggttaactatgttgat

SEQ ID NO: 426378 - DNA, 825 bp, Homo sapiens
  misc_feature (760)..(760): n is a, c, g, or t
  misc_feature (771)..(771): n is a, c, g, or t
tgagagttaaaccgaagggaatggtagagacggcaaccccgggcctgtgcccagctgaaggatgaactgagggcaggatcgttaaatgcagaagccgaagacagtggcctgggagaatctgggtccagagatgtcagctcttggaactgctttttcaagagaaggtggccgtaaagttgaattccctacagatccaaaggtagttgtttatgaaaagcctttctttgaaggaaaatgtgtggaactagaaacaggaatgtgtagttttgtcatggagggaggtgaaacagaagaggcgactggagacgatcatttgccgtttacgtcagtggggtctatgaaagttctaagaggcatttgggttgcatatgagaagcctggatttaccggtcatcagtatttgctagaagaaggagaatacagggactggaaagcctggggaggttacaatggagagcttcagtctttacgacctatattaggtgatttttcaaatgctcacatgataatgtacagtgaaaaaaactttggatccaaaggttccagtattgatgtattgggaattgttgctaatttaaaggagactggatatggagtgaagacacagtctattaatgtactgagtggagtatgggtagcctatgaaaatcctgacttcacaggagaacagtatatactggataaaggattttataccagttttgaggactggggaggcaaaaattgtaagatctcttctgttcaacctatatgtttgggnttccttcactnggccccaagggagaacgaaatcaggttcacttgttttcagaaaccacaagtttc

SEQ ID NO: 426379 - DNA, 677 bp, Homo sapiens
actgacccatgtctaaataattcttataaaatgcttattgtataaagctgaattttatatcattacattgactcagtttatattaatacattgagattaatatttcaaacaatagcatctagttattgtgatggtaaaatgaattttcatatttgctgtgtcgacactagacattttttatggtctcactcaagctttctgaatgctgattcttaacatcaactggggtgtacatttgttatttcggccttttaatggaagtgttcacagagccataattatagaggaacaaacaccactatagcctcctttattggcattcacaggattccgataagtcagcaagtgtcttccattgagaaggaaggaaactacactatgtctttccaaaatactgtttgtcgttaatgtcagaactgatgaacaatgatttctgaccacaataaagctttaaaatacctcacagcttcacaacagggtgttctatagaaagttacctttgttgttgcattttactttgatgtctctgaattaaataaatagtcacgaatggtgcagctaacatgtttctaattgatcatgaatgtagacatggaaaattaaaggatttctaaaattcgtaccagtttactgtaacaaaagtcagcaggtcatgtttaggtcatcatttcaaaggc

SEQ ID NO: 426380 - DNA, 6732 bp, Homo sapiens
  misc_feature (620)..(620): n is a, c, g, or t
cagctccgaggggagtcggaccggagcaaacagccacccccggcttcgtcccccacgaagaggaagggcaggagccgtgccctcgaggccgtgcccgccccgcccgccagcggcccccgggctcccgccaaggagtccccacccaagagggtgcccgatcccagcccagtcaccaagggcactgcggccgagagcggggaggaggcggcgcgggccatcccccgcgagctcccggtcaagagcagctcgctgctgccggagatcaagcccgagcacaagaggggcccgctccccaaccacttcaacggccgggcagagggaggtcgaagcagagagctgggcagagcggccggagcgcctggagcttctgacgccgacggcttgaagcccaggaaccatttcggcgtgggcaggtcgacagtgaccactaaagtgaccctccctgccaagcccaaacatgtggaactaaatcttaaaacccctaagaatcttgacagtttgggaaatgagcacaatccatttagccagccagttcacaaaggcaacactgccaccaaaatctccttatttgaaaacaaacggacaaacagtagcccaagacacactgacattcgaggccnaaggaatactcctgcctctagtaaaacgtttgttgggagggcaaagctgaatttagccaaaaaagccaaagaaatggagcaacctgaaaagaaagtaatgccaaacagtccccagaatggtgtgctggttaaggaaactgctatagaaaccaaagttaccgtctcggaagaagagattctgccagcaaccagaggaatgaatggagactcttctgagaatcaagctcttggtcctcagcctaaccaagatgataaagcagatgtacaaacagatgctggctgcctttcagaaccagtggcttctgctctgattcctgtcaaggatcataagctcttagagaaggaggactcagaggctgcagacagcaaaagccttgtacttgaaaatgtaaccgatacagcacaagacatccccaccactgtggataccaaagatttacctccaacggccatgccaaagccacagcatacattttctgactcacagtcccctgctgagtcatctcctgggccttctctttcactgtctgcacccgctcctggggatgttcccaaagacacatgtgttcaatcacccataagcagtttcccatgcactgatctaaaagtgtcagaaaaccataaaggatgtgttttgcctgtgtctcgtcagaacaatgagaaaatgccacttttagaacttggaggagaaacaacccctcctttgtccacagagcgtagtccagaagctgtgggaagtgagtgtccatccagagtcctcgtccaggtcaggtccttcgtgctccccgtggagagcacccaggatgtgagctcccaggtcatcccagagagctctgaagttagagaagtgcagttgccaacttgtcacagtaatgaacctgaagtggtttccgttgcaagttgtgctcccccacaagaggaagtactgggcaatgaacactctcattgcacagcagagctcgcggcaaaatctggcccacaagtcataccgccagcatcagagaaaactctgcctattcaggctcaaagtcagggcagcagaacacccctgatggctgaatccagtcccaccaactctcccagcagcggaaatcacttagccactcctcaaaggccagatcagactgttacaaatggccaggatagccctgccagccttttgaacatttctgctggtagtgatgatagtgtatttgattcttcttctgatatggaaaaattcactgaaattataaaacagatggatagcgcagtttgtatgcccatgaaaagaaagaaggccaggatgccaaactctcctgctcctcactttgccatgcctcctattcacgaagaccatttagaaaaggtgtttgatcccaaagtgtttacctttggtttggggaagaagaaggaaagtcagccagaaatgtcaccggctttacatttgatgcagaaccttgacacaaaatccaaactgagacccaaacgtgcatctgctgaacagagcgtcctcttcaagtccctgcacaccaacactaatgggaacagtgagcctctggtgatgccggaaatcaatgacaaagagaacagggacgtcacaaatggtggcattaagagatcgagactagaaaaaagtgcacttttctcaagcttgttatcttctttaccacaagacaaaatcttttctccttctgtgacatcagtcaacactatgaccacggctttcagtacttctcagaacggttccctatctcagtcttcagtgtcacagcccacgactgagggtgccccgccctgtggtttgaacaaagaacagtcaaatcttctgcccgacaactccttaaaggtcttcaatttcaactcgtcaagtacatcacactccagtttgaaaagtccaagccacatggaaaaatacccgcaaaaagagaaaaccaaagaagatctggattcacgaagcaacctacacttgccagaaactaaattttctgaattgtcaaaactgaagaatgatgatatggaaaaggctaatcatattgaaagtgttattaaatcaaacttgccaaactgtgcaaacagtgacaccgacttcatgggtcttttcaaatcaagccggtatgacccaagcatttctttttctggaatgtcattatcagacacaatggtctctgagaagtgcattgaagttttcagtgacattcaggattgcagttcttggagcctctctccagtgatactcataaaagttgttagaggatgttggattttgtatgagcaaccaaattttgaagggcactccatccccttagaagaaggagaattggaactctctggtctctggggtatagaagacattttggaaaggcacgaagaagcagagtctgataagccagtggtgattggttccatcagacatgtggttcaggattacagagttagtcacattgacttatttactgaaccagaagggttaggaatcctaagttcctactttgatgatactgaagaaatgcagggatttggtgtaatgcagaagacttgttccatgaaagtacattggggcacgtggctgatttatgaagaacctggatttcagggtgttcctttcatcctggaacctggtgaataccctgacttgtccttctgggatacagaagcagcgtacattggatccatgcggcctctgaaaatgggtggccgtaaagttgaattccctacagatccaaaggtagttgtttatgaaaagcctttctttgaaggaaaatgtgtggaactagaaacaggaatgtgtagttttgtcatggagggaggtgaaacagaagaggcgactggagacgatcatttgccgtttacgtcagtggggtctatgaaagttctaagaggcatttgggttgcatatgagaagcctggatttaccggtcatcagtatttgctagaagaaggagaatacagggactggaaagcctggggaggttacaatggagagcttcagtctttacgacctatattaggtgatttttcaaatgctcacatgataatgtacagtgaaaaaaactttggatccaaaggttccagtattgatgtattgggaattgttgctaatttaaaggagactggatatggagtgaagacacagtctattaatgtactgagtggagtatgggtagcctatgaaaatcctgacttcacaggagaacagtatatactggataaaggattttataccagttttgaggactggggaggcaaaaattgtaagatctcttctgttcaacctatatgtttggattctttcactggcccaaggagacgaaatcagattcacttgttttcagaaccacagtttcaaggtcacagtcaaagttttgaagaaacaacaagtcaaattgatgattcattttctaccaagtcttgcagagtttcaggaggcagctgggttgtatatgatggagaaaatttcactggtaatcaatacgtgttggaagaaggccattatccttgtctgtctgcaatgggatgcccgcctggagcaactttcaagtctcttcgttttatagatgttgaattttctgaaccaacaattattctctttgaaagagaagacttcaaaggaaaaaagattgaacttaatgcagaaactgtcaatctccgatccctgggattcaacacacaaatacgctctgttcaggttattggtggcatatgggttacttatgaatatggcagttacagagggcgacagttcctattgtcacctgcagaagtacctaattggtatgaattcagtggctgtcgccaaataggttctctacgaccttttgttcagaagcgaatttatttcagacttcgaaacaaagcaacagggttattcatgtcaaccaatggaaacttagaggatctgaagcttctgaggatacaggtcatggaggatgtcggggccgatgatcagatttggatctatcaagaaggatgtatcaaatgcaggatagcagaagactgctgcctgacgattgtgggcagcctggtaacatctggctccaagctaggcctggccctggaccagaatgctgacagccagttctggagcttgaagtccgatggcaggatttacagcaagttgaagccaaatttagttttagacattaaagggggcacacagtatgatcaaaatcacattatcctcaacactgtcagcaaagagaagtttacacaagtgtgggaagccatggtcctatatacctgaacaaagaaggaagaagaatcttctggaggtccttccagccaccttatttcttaaaaaggacaatgctgatggaagaccagactggaaagtggatcgactcctccttcattgattctaaattcaaccttaaatcatgctgccatgactcagagaacttactcatcgtttcaaaagactatcatagctttaaaccaataatttgtcctcctttcatttcttgcctttcatttttggtagctgcttaaacaggttgcctaattagcagcttttgggtgattttgtaaaatgttatatcaagatttcaagactgtgtacattttaaattatttccaaagatagtgacaggagagaactggaacaaatttaccaactttgtggacctacaaagcccttacactttaaagggtaagacaaaggcttaagtttgaaaggtagagaactgtttagcatctgagaagaaatactttattaggcctgtaattttggttcttggccttaaacactttctggaacctttaaatatgctgcatagcacaatgggaaagccttaggtattcacacatttaaggaactctaaacaaaatactattttcctttagttcatattaaaaattaatacattttaaaaatttaatgtcaaagtctggtaacatttgttagtaggatttgagttattattttttgagacaggatctcaggctggagtgcagtggcacaatcacggctcactgcagcctctacctccccaggctcaggtgatcctcccacctcagcctcccaagtagctgggactataggcacacatcaccaagcccagccaaattttgttttttttttgtagagatggggtttcatcacgttgcccaggctgatctcgaacctctgggctcaagcaattcactcgcctcggcctcccaaaatgctgggattacaggcctgagccactgcgcccagccaggatttgaattattttaactcatccatgggctgccctagaatgtcacaaatgagggttgtttaatgcctttcttatagctgctactggaacactattatgacctaatttatgagccatccttactcatctacaagtgctgaagcaatgttacatacttttttgctaaactcagattttttagcctaatttcttgtcctcctatccacctgcatccacacatggcctgcatggggctgccttccctgcagtgttctgcagccatgcttcagggtatagctgttggtggacagcctcaggtcttgggggcactatagccactaaacgaggtgtgaaaggctcaagaggatgaccagcaattaattatccccagaaagtgaaggaaaagagacctttagggatgttgctggtcaagtcttgatttgaccggagtcaaatcaatcttcaagcaatcttggaatcctcaactgcagtaagcatttcaaaatgcaaacaaactgcttaacaactgacaagacaccagcccatacgctgctcttccaacagtgggttctagctttgaacaaaagtgctaaacatttccttgaatatattcttcctctttttgtcctcatcactcaatactggtgctcttgtcacaggtagaacagcttgtttcttttccatctattcaagtgtgtttctaattctaaaatgctgatcttctctggagtctatggtaggcaattatggtcactggaatagtttgtcttgttttaaaatattattggtgcatgtacaacagcatccaacatatctgtcttgttcctagatatatagctctgattttaggccttttgtgcataccattacaatatggtggggtaagacattctacagtagcctgtgctgaactgatctcttaaataaacttgcttctggttaactatgttgat

SEQ ID NO: 426381 - DNA, 6750 bp, Homo sapiens
  misc_feature (620)..(620): n is a, c, g, or t
cagctccgaggggagtcggaccggagcaaacagccacccccggcttcgtcccccacgaagaggaagggcaggagccgtgccctcgaggccgtgcccgccccgcccgccagcggcccccgggctcccgccaaggagtccccacccaagagggtgcccgatcccagcccagtcaccaagggcactgcggccgagagcggggaggaggcggcgcgggccatcccccgcgagctcccggtcaagagcagctcgctgctgccggagatcaagcccgagcacaagaggggcccgctccccaaccacttcaacggccgggcagagggaggtcgaagcagagagctgggcagagcggccggagcgcctggagcttctgacgccgacggcttgaagcccaggaaccatttcggcgtgggcaggtcgacagtgaccactaaagtgaccctccctgccaagcccaaacatgtggaactaaatcttaaaacccctaagaatcttgacagtttgggaaatgagcacaatccatttagccagccagttcacaaaggcaacactgccaccaaaatctccttatttgaaaacaaacggacaaacagtagcccaagacacactgacattcgaggccnaaggaatactcctgcctctagtaaaacgtttgttgggagggcaaagctgaatttagccaaaaaagccaaagaaatggagcaacctgaaaagaaagtaatgccaaacagtccccagaatggtgtgctggttaaggaaactgctatagaaaccaaagttaccgtctcggaagaagagattctgccagcaaccagaggaatgaatggagactcttctgagaatcaagctcttggtcctcagcctaaccaagatgataaagcagatgtacaaacagatgctggctgcctttcagaaccagtggcttctgctctgattcctgtcaaggatcataagctcttagagaaggaggactcagaggctgcagacagcaaaagccttgtacttgaaaatgtaaccgatacagcacaagacatccccaccactgtggataccaaagatttacctccaacggccatgccaaagccacagcatacattttctgactcacagtcccctgctgagtcatctcctgggccttctctttcactgtctgcacccgctcctggggatgttcccaaagacacatgtgttcaatcacccataagcagtttcccatgcactgatctaaaagtgtcagaaaaccataaaggatgtgttttgcctgtgtctcgtcagaacaatgagaaaatgccacttttagaacttggaggagaaacaacccctcctttgtccacagagcgtagtccagaagctgtgggaagtgagtgtccatccagagtcctcgtccaggtcaggtccttcgtgctccccgtggagagcacccaggatgtgagctcccaggtcatcccagagagctctgaagttagagaagtgcagttgccaacttgtcacagtaatgaacctgaagtggtttccgttgcaagttgtgctcccccacaagaggaagtactgggcaatgaacactctcattgcacagcagagctcgcggcaaaatctggcccacaagtcataccgccagcatcagagaaaactctgcctattcaggctcaaagtcagggcagcagaacacccctgatggctgaatccagtcccaccaactctcccagcagcggaaatcacttagccactcctcaaaggccagatcagactgttacaaatggccaggatagccctgccagccttttgaacatttctgctggtagtgatgatagtgtatttgattcttcttctgatatggaaaaattcactgaaattataaaacagatggatagcgcagtttgtatgcccatgaaaagaaagaaggccaggatgccaaactctcctgctcctcactttgccatgcctcctattcacgaagaccatttagaaaaggtgtttgatcccaaagtgtttacctttggtttggggaagaagaaggaaagtcagccagaaatgtcaccggctttacatttgatgcagaaccttgacacaaaatccaaactgagacccaaacgtgcatctgctgaacagagcgtcctcttcaagtccctgcacaccaacactaatgggaacagtgagcctctggtgatgccggaaatcaatgacaaagagaacagggacgtcacaaatggtggcattaagagatcgagactagaaaaaagtgcacttttctcaagcttgttatcttctttaccacaagacaaaatcttttctccttctgtgacatcagtcaacactatgaccacggctttcagtacttctcagaacggttccctatctcagtcttcagtgtcacagcccacgactgagggtgccccgccctgtggtttgaacaaagaacagtcaaatcttctgcccgacaactccttaaaggtcttcaatttcaactcgtcaagtacatcacactccagtttgaaaagtccaagccacatggaaaaatacccgcaaaaagagaaaaccaaagaagatctggattcacgaagcaacctacacttgccagaaactaaattttctgaattgtcaaaactgaagaatgatgatatggaaagtgacaccgacttcatgggtcttttcaaatcaagccggtatgacccaagcatttctttttctggaatgtcattatcagacacaatgacacttagaggaagtgtccaaaataaactcaatccccgacctggaaaggtagtgatatatagtgaacccgacgtctctgagaagtgcattgaagttttcagtgacattcaggattgcagttcttggagcctctctccagtgatactcataaaagttgttagaggatgttggattttgtatgagcaaccaaattttgaagggcactccatccccttagaagaaggagaattggaactctctggtctctggggtatagaagacattttggaaaggcacgaagaagcagagtctgataagccagtggtgattggttccatcagacatgtggttcaggattacagagttagtcacattgacttatttactgaaccagaagggttaggaatcctaagttcctactttgatgatactgaagaaatgcagggatttggtgtaatgcagaagacttgttccatgaaagtacattggggcacgtggctgatttatgaagaacctggatttcagggtgttcctttcatcctggaacctggtgaataccctgacttgtccttctgggatacagaagcagcgtacattggatccatgcggcctctgaaaatgggtggccgtaaagttgaattccctacagatccaaaggtagttgtttatgaaaagcctttctttgaaggaaaatgtgtggaactagaaacaggaatgtgtagttttgtcatggagggaggtgaaacagaagaggcgactggagacgatcatttgccgtttacgtcagtggggtctatgaaagttctaagaggcatttgggttgcatatgagaagcctggatttaccggtcatcagtatttgctagaagaaggagaatacagggactggaaagcctggggaggttacaatggagagcttcagtctttacgacctatattaggtgatttttcaaatgctcacatgataatgtacagtgaaaaaaactttggatccaaaggttccagtattgatgtattgggaattgttgctaatttaaaggagactggatatggagtgaagacacagtctattaatgtactgagtggagtatgggtagcctatgaaaatcctgacttcacaggagaacagtatatactggataaaggattttataccagttttgaggactggggaggcaaaaattgtaagatctcttctgttcaacctatatgtttggattctttcactggcccaaggagacgaaatcagattcacttgttttcagaaccacagtttcaaggtcacagtcaaagttttgaagaaacaacaagtcaaattgatgattcattttctaccaagtcttgcagagtttcaggaggcagctgggttgtatatgatggagaaaatttcactggtaatcaatacgtgttggaagaaggccattatccttgtctgtctgcaatgggatgcccgcctggagcaactttcaagtctcttcgttttatagatgttgaattttctgaaccaacaattattctctttgaaagagaagacttcaaaggaaaaaagattgaacttaatgcagaaactgtcaatctccgatccctgggattcaacacacaaatacgctctgttcaggttattggtggcatatgggttacttatgaatatggcagttacagagggcgacagttcctattgtcacctgcagaagtacctaattggtatgaattcagtggctgtcgccaaataggttctctacgaccttttgttcagaagcgaatttatttcagacttcgaaacaaagcaacagggttattcatgtcaaccaatggaaacttagaggatctgaagcttctgaggatacaggtcatggaggatgtcggggccgatgatcagatttggatctatcaagaaggatgtatcaaatgcaggatagcagaagactgctgcctgacgattgtgggcagcctggtaacatctggctccaagctaggcctggccctggaccagaatgctgacagccagttctggagcttgaagtccgatggcaggatttacagcaagttgaagccaaatttagttttagacattaaagggggcacacagtatgatcaaaatcacattatcctcaacactgtcagcaaagagaagtttacacaagtgtgggaagccatggtcctatatacctgaacaaagaaggaagaagaatcttctggaggtccttccagccaccttatttcttaaaaaggacaatgctgatggaagaccagactggaaagtggatcgactcctccttcattgattctaaattcaaccttaaatcatgctgccatgactcagagaacttactcatcgtttcaaaagactatcatagctttaaaccaataatttgtcctcctttcatttcttgcctttcatttttggtagctgcttaaacaggttgcctaattagcagcttttgggtgattttgtaaaatgttatatcaagatttcaagactgtgtacattttaaattatttccaaagatagtgacaggagagaactggaacaaatttaccaactttgtggacctacaaagcccttacactttaaagggtaagacaaaggcttaagtttgaaaggtagagaactgtttagcatctgagaagaaatactttattaggcctgtaattttggttcttggccttaaacactttctggaacctttaaatatgctgcatagcacaatgggaaagccttaggtattcacacatttaaggaactctaaacaaaatactattttcctttagttcatattaaaaattaatacattttaaaaatttaatgtcaaagtctggtaacatttgttagtaggatttgagttattattttttgagacaggatctcaggctggagtgcagtggcacaatcacggctcactgcagcctctacctccccaggctcaggtgatcctcccacctcagcctcccaagtagctgggactataggcacacatcaccaagcccagccaaattttgttttttttttgtagagatggggtttcatcacgttgcccaggctgatctcgaacctctgggctcaagcaattcactcgcctcggcctcccaaaatgctgggattacaggcctgagccactgcgcccagccaggatttgaattattttaactcatccatgggctgccctagaatgtcacaaatgagggttgtttaatgcctttcttatagctgctactggaacactattatgacctaatttatgagccatccttactcatctacaagtgctgaagcaatgttacatacttttttgctaaactcagattttttagcctaatttcttgtcctcctatccacctgcatccacacatggcctgcatggggctgccttccctgcagtgttctgcagccatgcttcagggtatagctgttggtggacagcctcaggtcttgggggcactatagccactaaacgaggtgtgaaaggctcaagaggatgaccagcaattaattatccccagaaagtgaaggaaaagagacctttagggatgttgctggtcaagtcttgatttgaccggagtcaaatcaatcttcaagcaatcttggaatcctcaactgcagtaagcatttcaaaatgcaaacaaactgcttaacaactgacaagacaccagcccatacgctgctcttccaacagtgggttctagctttgaacaaaagtgctaaacatttccttgaatatattcttcctctttttgtcctcatcactcaatactggtgctcttgtcacaggtagaacagcttgtttcttttccatctattcaagtgtgtttctaattctaaaatgctgatcttctctggagtctatggtaggcaattatggtcactggaatagtttgtcttgttttaaaatattattggtgcatgtacaacagcatccaacatatctgtcttgttcctagatatatagctctgattttaggccttttgtgcataccattacaatatggtggggtaagacattctacagtagcctgtgctgaactgatctcttaaataaacttgcttctggttaactatgttgat

SEQ ID NO: 426382 - DNA, 3604 bp, Homo sapiens
tgagagttaaaccgaagggaatggtagagacggcaaccccgggcctgtgcccagctgaaggatgaactgagggcaggatcgttaaatgcagaagccgaagacagtggcctgggagaatctgggtccagagatgtcagctcttggaactgctttttcaagagaaggtggccgtaaagttgaattccctacagatccaaaggtagttgtttatgaaaagcctttctttgaaggaaaatgtgtggaactagaaacaggaatgtgtagttttgtcatggagggaggtgaaacagaagaggcgactggagacgatcatttgccgtttacgtcagtggggtctatgaaagttctaagaggcatttgggttgcatatgagaagcctggatttaccggtcatcagtatttgctagaagaaggagaatacagggactggaaagcctggggaggttacaatggagagcttcagtctttacgacctatattaggtgatttttcaaatgctcacatgataatgtacagtgaaaaaaactttggatccaaaggttccagtattgatgtattgggaattgttgctaatttaaaggagactggatatggagtgaagacacagtctattaatgtactgagtggagtatgggtagcctatgaaaatcctgacttcacaggagaacagtatatactggataaaggattttataccagttttgaggactggggaggcaaaaattgtaagatctcttctgttcaacctatatgtttggattctttcactggcccaaggagacgaaatcagattcacttgttttcagaaccacagtttcaaggtcacagtcaaagttttgaagaaacaacaagtcaaattgatgattcattttctaccaagtcttgcagagtttcaggaggcagctgggttgtatatgatggagaaaatttcactggtaatcaatacgtgttggaagaaggccattatccttgtctgtctgcaatgggatgcccgcctggagcaactttcaagtctcttcgttttatagatgttgaattttctgaaccaacaattattctctttgaaagagaagacttcaaaggaaaaaagattgaacttaatgcagaaactgtcaatctccgatccctgggattcaacacacaaatacgctctgttcaggttattggtggcatatgggttacttatgaatatggcagttacagagggcgacagttcctattgtcacctgcagaagtacctaattggtatgaattcagtggctgtcgccaaataggttctctacgaccttttgttcagaagcgaatttatttcagacttcgaaacaaagcaacagggttattcatgtcaaccaatggaaacttagaggatctgaagcttctgaggatacaggtcatggaggatgtcggggccgatgatcagatttggatctatcaagaaggatgtatcaaatgcaggatagcagaagactgctgcctgacgattgtgggcagcctggtaacatctggctccaagctaggcctggccctggaccagaatgctgacagccagttctggagcttgaagtccgatggcaggatttacagcaagttgaagccaaatttagttttagacattaaagggggcacacagtatgatcaaaatcacattatcctcaacactgtcagcaaagagaagtttacacaagtgtgggaagccatggtcctatatacctgaacaaagaaggaagaagaatcttctggaggtccttccagccaccttatttcttaaaaaggacaatgctgatggaagaccagactggaaagtggatcgactcctccttcattgattctaaattcaaccttaaatcatgctgccatgactcagagaacttactcatcgtttcaaaagactatcatagctttaaaccaataatttgtcctcctttcatttcttgcctttcatttttggtagctgcttaaacaggttgcctaattagcagcttttgggtgattttgtaaaatgttatatcaagatttcaagactgtgtacattttaaattatttccaaagatagtgacaggagagaactggaacaaatttaccaactttgtggacctacaaagcccttacactttaaagggtaagacaaaggcttaagtttgaaaggtagagaactgtttagcatctgagaagaaatactttattaggcctgtaattttggttcttggccttaaacactttctggaacctttaaatatgctgcatagcacaatgggaaagccttaggtattcacacatttaaggaactctaaacaaaatactattttcctttagttcatattaaaaattaatacattttaaaaatttaatgtcaaagtctggtaacatttgttagtaggatttgagttattattttttgagacaggatctcaggctggagtgcagtggcacaatcacggctcactgcagcctctacctccccaggctcaggtgatcctcccacctcagcctcccaagtagctgggactataggcacacatcaccaagcccagccaaattttgttttttttttgtagagatggggtttcatcacgttgcccaggctgatctcgaacctctgggctcaagcaattcactcgcctcggcctcccaaaatgctgggattacaggcctgagccactgcgcccagccaggatttgaattattttaactcatccatgggctgccctagaatgtcacaaatgagggttgtttaatgcctttcttatagctgctactggaacactattatgacctaatttatgagccatccttactcatctacaagtgctgaagcaatgttacatacttttttgctaaactcagattttttagcctaatttcttgtcctcctatccacctgcatccacacatggcctgcatggggctgccttccctgcagtgttctgcagccatgcttcagggtatagctgttggtggacagcctcaggtcttgggggcactatagccactaaacgaggtgtgaaaggctcaagaggatgaccagcaattaattatccccagaaagtgaaggaaaagagacctttagggatgttgctggtcaagtcttgatttgaccggagtcaaatcaatcttcaagcaatcttggaatcctcaactgcagtaagcatttcaaaatgcaaacaaactgcttaacaactgacaagacaccagcccatacgctgctcttccaacagtgggttctagctttgaacaaaagtgctaaacatttccttgaatatattcttcctctttttgtcctcatcactcaatactggtgctcttgtcacaggtagaacagcttgtttcttttccatctattcaagtgtgtttctaattctaaaatgctgatcttctctggagtctatggtaggcaattatggtcactggaatagtttgtcttgttttaaaatattattggtgcatgtacaacagcatccaacatatctgtcttgttcctagatatatagctctgattttaggccttttgtgcataccattacaatatggtggggtaagacattctacagtagcctgtgctgaactgatctcttaaataaacttgcttctggttaactatgttgat

SEQ ID NO: 426383 - DNA, 4367 bp, Homo sapiens
  misc_feature (620)..(620): n is a, c, g, or t
cagctccgaggggagtcggaccggagcaaacagccacccccggcttcgtcccccacgaagaggaagggcaggagccgtgccctcgaggccgtgcccgccccgcccgccagcggcccccgggctcccgccaaggagtccccacccaagagggtgcccgatcccagcccagtcaccaagggcactgcggccgagagcggggaggaggcggcgcgggccatcccccgcgagctcccggtcaagagcagctcgctgctgccggagatcaagcccgagcacaagaggggcccgctccccaaccacttcaacggccgggcagagggaggtcgaagcagagagctgggcagagcggccggagcgcctggagcttctgacgccgacggcttgaagcccaggaaccatttcggcgtgggcaggtcgacagtgaccactaaagtgaccctccctgccaagcccaaacatgtggaactaaatcttaaaacccctaagaatcttgacagtttgggaaatgagcacaatccatttagccagccagttcacaaaggcaacactgccaccaaaatctccttatttgaaaacaaacggacaaacagtagcccaagacacactgacattcgaggccnaaggaatactcctgcctctagtaaaacgtttgttgggagggcaaagctgaatttagccaaaaaagccaaagaaatggagcaacctgaaaagaaagtaatgccaaacagtccccagaatggtgtgctggttaaggaaactgctatagaaaccaaagttaccgtctcggaagaagagattctgccagcaaccagaggaatgaatggagactcttctgagaatcaagctcttggtcctcagcctaaccaagatgataaagcagatgtacaaacagatgctggctgcctttcagaaccagtggcttctgctctgattcctgtcaaggatcataagctcttagagaaggaggactcagaggctgcagacagcaaaagccttgtacttgaaaatgtaaccgatacagcacaagacatccccaccactgtggataccaaagatttacctccaacggccatgccaaagccacagcatacattttctgactcacagtcccctgctgagtcatctcctgggccttctctttcactgtctgcacccgctcctggggatgttcccaaagacacatgtgttcaatcacccataagcagtttcccatgcactgatctaaaagtgtcagaaaaccataaaggatgtgttttgcctgtgtctcgtcagaacaatgagaaaatgccacttttagaacttggaggagaaacaacccctcctttgtccacagagcgtagtccagaagctgtgggaagtgagtgtccatccagagtcctcgtccaggtcaggtccttcgtgctccccgtggagagcacccaggatgtgagctcccaggtcatcccagagagctctgaagttagagaagtgcagttgccaacttgtcacagtaatgaacctgaagtggtttccgttgcaagttgtgctcccccacaagaggaagtactgggcaatgaacactctcattgcacagcagagctcgcggcaaaatctggcccacaagtcataccgccagcatcagagaaaactctgcctattcaggctcaaagtcagggcagcagaacacccctgatggctgaatccagtcccaccaactctcccagcagcggaaatcacttagccactcctcaaaggccagatcagactgttacaaatggccaggatagccctgccagccttttgaacatttctgctggtagtgatgatagtgtatttgattcttcttctgatatggaaaaattcactgaaattataaaacagatggatagcgcagtttgtatgcccatgaaaagaaagaaggccaggatgccaaactctcctgctcctcactttgccatgcctcctattcacgaagaccatttagaaaaggtgtttgatcccaaagtgtttacctttggtttggggaagaagaaggaaagtcagccagaaatgtcaccggctttacatttgatgcagaaccttgacacaaaatccaaactgagacccaaacgtgcatctgctgaacagagcgtcctcttcaagtccctgcacaccaacactaatgggaacagtgagcctctggtgatgccggaaatcaatgacaaagagaacagggacgtcacaaatggtggcattaagagatcgagactagaaaaaagtgcacttttctcaagcttgttatcttctttaccacaagacaaaatcttttctccttctgtgacatcagtcaacactatgaccacggctttcagtacttctcagaacggttccctatctcagtcttcagtgtcacagcccacgactgagggtgccccgccctgtggtttgaacaaagaacagtcaaatcttctgcccgacaactccttaaaggtcttcaatttcaactcgtcaagtacatcacactccagtttgaaaagtccaagccacatggaaaaatacccgcaaaaagagaaaaccaaagaagatctggattcacgaagcaacctacacttgccagaaactaaattttctgaattgtcaaaactgaagaatgatgatatggaaaaggctaatcatattgaaagtgttattaaatcaaacttgccaaactgtgcaaacagtgacaccgacttcatgggtcttttcaaatcaagccggtatgacccaagcatttctttttctggaatgtcattatcagacacaatgacacttagaggaagtgtccaaaataaactcaatccccgacctggaaaggtagtgatatatagtgaacccgacgtctctgagaagtgcattgaagttttcagtgacattcaggattgcagttcttggagcctctctccagtgatactcataaaagttgttagaggatgttggattttgtatgagcaaccaaattttgaagggcactccatccccttagaagaaggagaattggaactctctggtctctggggtatagaagacattttggaaaggcacgaagaagcagagtctgataagccagtggtgattggttccatcagacatgtggttcaggattacagagttagtcacattgacttatttactgaaccagaagggttaggaatcctaagttcctactttgatgatactgaagaaatgcagggatttggtgtaatgcagaagacttgttccatgaaagtacattggggcacgtggctgatttatgaagaacctggatttcagggtgttcctttcatcctggaacctggtgaataccctgacttgtccttctgggatacagaagcagcgtacattggatccatgcggcctctgaaaatgggtggccgtaaagttgaattccctacagatccaaaggtagttgtttatgaaaagcctttctttgaaggaaaatgtgtggaactagaaacaggaatgtgtagttttgtcatggagggaggtgaaacagaagaggcgactggagacgatcatttgccgtttacgtcagtggggtctatgaaagttctaagaggcatttgggttgcatatgagaagcctggatttaccggtcatcagtatttgctagaagaaggagaatacagggactggaaagcctggggaggttacaatggagagcttcagtctttacgacctatattaggtgatttttcaaatgctcacatgataatgtacagtgaaaaaaactttggatccaaaggttccagtattgatgtattgggaattgttgctaatttaaaggagactggatatggagtgaagacacagtctattaatgtactgagtggagtatgggtagcctatgaaaatcctgacttcacaggagaacagtatatactggataaaggattttataccagttttgaggactggggaggcaaaaattgtaagatctcttctgttcaacctatatgtttggattctttcactggcccaaggagacgaaatcaggtaactttaaaaatattcttttatattaatatataaagggccttccattgaaaagctgaacttatgtttcaaatgtcagacatttggggccgggtgtggtggctcacgcctgtaatcccagcactttgggaggtcaaggcaggtggatcacttgagctcaggagttcaagaccagcctgaccaacatggggaaaccccgtctttactaaaaagacaaaaattagctgggtgtggtggcttgtgtctataagctcagctactcaggaagctgaggcaggagaattgcttgaaccccaagaggcagatgttggagtgagccgagatcgcaccactgcactccagcctgagtgacagagactctgtctcaaaaaaaaaaa

SEQ ID NO: 426384 - DNA, 3537 bp, Homo sapiens
  misc_feature (620)..(620): n is a, c, g, or t
cagctccgaggggagtcggaccggagcaaacagccacccccggcttcgtcccccacgaagaggaagggcaggagccgtgccctcgaggccgtgcccgccccgcccgccagcggcccccgggctcccgccaaggagtccccacccaagagggtgcccgatcccagcccagtcaccaagggcactgcggccgagagcggggaggaggcggcgcgggccatcccccgcgagctcccggtcaagagcagctcgctgctgccggagatcaagcccgagcacaagaggggcccgctccccaaccacttcaacggccgggcagagggaggtcgaagcagagagctgggcagagcggccggagcgcctggagcttctgacgccgacggcttgaagcccaggaaccatttcggcgtgggcaggtcgacagtgaccactaaagtgaccctccctgccaagcccaaacatgtggaactaaatcttaaaacccctaagaatcttgacagtttgggaaatgagcacaatccatttagccagccagttcacaaaggcaacactgccaccaaaatctccttatttgaaaacaaacggacaaacagtagcccaagacacactgacattcgaggccnaaggaatactcctgcctctagtaaaacgtttgttgggagggcaaagctgaatttagccaaaaaagccaaagaaatggagcaacctgaaaagaaagtaatgccaaacagtccccagaatggtgtgctggttaaggaaactgctatagaaaccaaagttaccgtctcggaagaagagattctgccagcaaccagaggaatgaatggagactcttctgagaatcaagctcttggtcctcagcctaaccaagatgataaagcagatgtacaaacagatgctggctgcctttcagaaccagtggcttctgctctgattcctgtcaaggatcataagctcttagagaaggaggactcagaggctgcagacagcaaaagccttgtacttgaaaatgtaaccgatacagcacaagacatccccaccactgtggataccaaagatttacctccaacggccatgccaaagccacagcatacattttctgactcacagtcccctgctgagtcatctcctgggccttctctttcactgtctgcacccgctcctggggatgttcccaaagacacatgtgttcaatcacccataagcagtttcccatgcactgatctaaaagtgtcagaaaaccataaaggatgtgttttgcctgtgtctcgtcagaacaatgagaaaatgccacttttagaacttggaggagaaacaacccctcctttgtccacagagcgtagtccagaagctgtgggaagtgagtgtccatccagagtcctcgtccaggtcaggtccttcgtgctccccgtggagagcacccaggatgtgagctcccaggtcatcccagagagctctgaagttagagaagtgcagttgccaacttgtcacagtaatgaacctgaagtggtttccgttgcaagttgtgctcccccacaagaggaagtactgggcaatgaacactctcattgcacagcagagctcgcggcaaaatctggcccacaagtcataccgccagcatcagagaaaactctgcctattcaggctcaaagtcagggcagcagaacacccctgatggctgaatccagtcccaccaactctcccagcagcggaaatcacttagccactcctcaaaggccagatcagactgttacaaatggccaggatagccctgccagccttttgaacatttctgctggtagtgatgatagtgtatttgattcttcttctgatatggaaaaattcactgaaattataaaacagatggatagcgcagtttgtatgcccatgaaaagaaagaaggccaggatgccaaactctcctgctcctcactttgccatgcctcctattcacgaagaccatttagaaaaggtgtttgatcccaaagtgtttacctttggtttggggaagaagaaggaaagtcagccagaaatgtcaccggctttacatttgatgcagaaccttgacacaaaatccaaactgagacccaaacgtgcatctgctgaacagagcgtcctcttcaagtccctgcacaccaacactaatgggaacagtgagcctctggtgatgccggaaatcaatgacaaagagaacagggacgtcacaaatggtggcattaagagatcgagactagaaaaaagtgcacttttctcaagcttgttatcttctttaccacaagacaaaatcttttctccttctgtgacatcagtcaacactatgaccacggctttcagtacttctcagaacggttccctatctcagtcttcagtgtcacagcccacgactgagggtgccccgccctgtggtttgaacaaagaacagtcaaatcttctgcccgacaactccttaaaggtcttcaatttcaactcgtcaagtacatcacactccagtttgaaaagtccaagccacatggaaaaatacccgcaaaaagagaaaaccaaagaagatctggattcacgaagcaacctacacttgccagaaactaaattttctgaattgtcaaaactgaagaatgatgatatggaaaaggctaatcatattgaaagtgttattaaatcaaacttgccaaactgtgcaaacagtgacaccgacttcatgggtcttttcaaatcaagccggtatgacccaagcatttctttttctggaatgtcattatcagacacaatgacacttagaggaagtgtccaaaataaactcaatccccgacctggaaaggtagtgatatatagtgaacccgacgtctctgagaagtgcattgaagttttcagtgacattcaggattgcagttcttggagcctctctccagtgatactcataaaagttgttagaggatgttggattttgtatgagcaaccaaattttgaagggcactccatccccttagaagaaggagaattggaactctctggtctctggggtatagaagacattttggaaaggcacgaagaagcagagtctgataagccagtggtgattggttccatcagacatgtggttcaggattacagagttagtcacattgacttatttactgaaccagaagggttaggaatcctaagttcctactttgatgatactgaagaaatgcagggatttggtgtaatgcagaagacttgttccatgaaagtacattggggcacgtggctgatttatgaagaacctggatttcagggtgttcctttcatcctggaacctggtgaataccctgacttgtccttctgggatacagaagcagcgtacattggatccatgcggcctctgaaaatggtaaaaatgaaatccaaatgtccttgtggtgattctttgtcagcttgacgtggtaattcacagggtgtgactttgaagcaataaagctgacttttaagaaacaaatttgtagtagattggacctattgctcaatagaaatcatggaaagaataacttgctagatgctatagatt

SEQ ID NO: 426385 - DNA, 3313 bp, Homo sapiens
  misc_feature (620)..(620): n is a, c, g, or t
  misc_feature (3309)..(3309): n is a, c, g, or t
cagctccgaggggagtcggaccggagcaaacagccacccccggcttcgtcccccacgaagaggaagggcaggagccgtgccctcgaggccgtgcccgccccgcccgccagcggcccccgggctcccgccaaggagtccccacccaagagggtgcccgatcccagcccagtcaccaagggcactgcggccgagagcggggaggaggcggcgcgggccatcccccgcgagctcccggtcaagagcagctcgctgctgccggagatcaagcccgagcacaagaggggcccgctccccaaccacttcaacggccgggcagagggaggtcgaagcagagagctgggcagagcggccggagcgcctggagcttctgacgccgacggcttgaagcccaggaaccatttcggcgtgggcaggtcgacagtgaccactaaagtgaccctccctgccaagcccaaacatgtggaactaaatcttaaaacccctaagaatcttgacagtttgggaaatgagcacaatccatttagccagccagttcacaaaggcaacactgccaccaaaatctccttatttgaaaacaaacggacaaacagtagcccaagacacactgacattcgaggccnaaggaatactcctgcctctagtaaaacgtttgttgggagggcaaagctgaatttagccaaaaaagccaaagaaatggagcaacctgaaaagaaagtaatgccaaacagtccccagaatggtgtgctggttaaggaaactgctatagaaaccaaagttaccgtctcggaagaagagattctgccagcaaccagaggaatgaatggagactcttctgagaatcaagctcttggtcctcagcctaaccaagatgataaagcagatgtacaaacagatgctggctgcctttcagaaccagtggcttctgctctgattcctgtcaaggatcataagctcttagagaaggaggactcagaggctgcagacagcaaaagccttgtacttgaaaatgtaaccgatacagcacaagacatccccaccactgtggataccaaagatttacctccaacggccatgccaaagccacagcatacattttctgactcacagtcccctgctgagtcatctcctgggccttctctttcactgtctgcacccgctcctggggatgttcccaaagacacatgtgttcaatcacccataagcagtttcccatgcactgatctaaaagtgtcagaaaaccataaaggatgtgttttgcctgtgtctcgtcagaacaatgagaaaatgccacttttagaacttggaggagaaacaacccctcctttgtccacagagcgtagtccagaagctgtgggaagtgagtgtccatccagagtcctcgtccaggtcaggtccttcgtgctccccgtggagagcacccaggatgtgagctcccaggtcatcccagagagctctgaagttagagaagtgcagttgccaacttgtcacagtaatgaacctgaagtggtttccgttgcaagttgtgctcccccacaagaggaagtactgggcaatgaacactctcattgcacagcagagctcgcggcaaaatctggcccacaagtcataccgccagcatcagagaaaactctgcctattcaggctcaaagtcagggcagcagaacacccctgatggctgaatccagtcccaccaactctcccagcagcggaaatcacttagccactcctcaaaggccagatcagactgttacaaatggccaggatagccctgccagccttttgaacatttctgctggtagtgatgatagtgtatttgattcttcttctgatatggaaaaattcactgaaattataaaacagatggatagcgcagtttgtatgcccatgaaaagaaagaaggccaggatgccaaactctcctgctcctcactttgccatgcctcctattcacgaagaccatttagaaaaggtgtttgatcccaaagtgtttacctttggtttggggaagaagaaggaaagtcagccagaaatgtcaccggctttacatttgatgcagaaccttgacacaaaatccaaactgagacccaaacgtgcatctgctgaacagagcgtcctcttcaagtccctgcacaccaacactaatgggaacagtgagcctctggtgatgccggaaatcaatgacaaagagaacagggacgtcacaaatggtggcattaagagatcgagactagaaaaaagtgcacttttctcaagcttgttatcttctttaccacaagacaaaatcttttctccttctgtgacatcagtcaacactatgaccacggctttcagtacttctcagaacggttccctatctcagtcttcagtgtcacagcccacgactgagggtgccccgccctgtggtttgaacaaagaacagtcaaatcttctgcccgacaactccttaaaggtcttcaatttcaactcgtcaagtacatcacactccagtttgaaaagtccaagccacatggaaaaatacccgcaaaaagagaaaaccaaagaagatctggattcacgaagcaacctacacttgccagaaactaaattttctgaattgtcaaaactgaagaatgatgatatggaaaaggctaatcatattgaaagtgttattaaatcaaacttgccaaactgtgcaaacagtgacaccgacttcatgggtcttttcaaatcaagccggtatgacccaagcatttctttttctggaatgtcattatcagacacaatgacacttagaggaagtgtccaaaataaactcaatccccgacctggaaaggtagtgatatatagtgaacccgacgtctctgagaagtgcattgaagttttcagtgacattcaggattgcagttcttggagcctctctccagtgatactcataaaagttgttagaggatgttggattttgtatgagcaaccaaattttgaagggcactccatccccttagaagaaggagaattggaactctctggtctctggggtatagaagacattttggaaaggcacgaagaagcagagtctgataagccagtggtgattggttccatcagacatgtggttcaggattacagagttagtcacattgacttatttactgaaccagaagggttaggaatcctaagttcctactttgatgatactgaagaaatgcagggatttggtgtaatgcagaagacttgttccatgaaagtacattggggcacattttaacacctttcttattgagaagactgaagtctgatgttgctcttgaagttcctcctaaacgagaagtancgtt

SEQ ID NO: 426386 - DNA, 398 bp, Homo sapiens
ctgggattcaacacacaaatacgctctgttcaggttattggtggcatgtgagttacctacttgttgactcaataaaatagatcattttaaaaatcaagtttgggctgggcacagtggctcacgcctgtattcccaacactttaggaggccgaggtagaaggatcatttgaatccagggattcaagaaaagcctgggcaacaaagtgagaccccatctctaccaaaaatttaaaaattagccaggtgtcgtggcacatgcctgtggccccagctacgtaggaggctgaggccgaaggatcacttgagcacagtaggttgaggctgcagtgagccgtgttcacgccactgtactccagtctgagtgacaaagcaagaccctatcttaatttaaaaaaaaa

SEQ ID NO: 426387 - DNA, 652 bp, Homo sapiens
ggaccagaatgctgacagccagttctggagcttgaagtccgatggcaggatttacagcaagttgaagccaaatttagttttagacattaaaggtaagggtcacttcctttattttctttattgtaatgtgtatgtcttttagttaaggaaaaatctattcataacttttgaaaatgatgaatgtattattagtagtaacagtaagagagcccctactgtgtgccagctgctgtgctagccactttcagtacaccatgtcccgtcatcttcacagccgccctatgaggcctacattatcccctctccctcttttctccccagttttacagacaaaacaacaacaacaacaacaacaaaaccccggaagctcaaaggggttggccagtttggccacaatctcacagctgtaactgctgaaccagaatctggccataggctgacttcaaacatttattttattataatagtgttaggctaaaaatcacaagctgaaaggccgtgattgcacttagttcggtagagttgatgattctcatgtatacacgtgacctttcattgaaaagatctaagatctcaaaggaattaacacagcctacaggatttcaatgcaacatgtgttcaatgaagctaatagggagtgaactgatggtgc

SEQ ID NO: 426388 - DNA, 343 bp, Homo sapiens
atttaacagtttatctaattattccatgagtcccccagatcttattatgtgaacttcaacacataatagtttcgtaagccctggttgcaaaatcaaataccttcaggggccaggcagcaaatacaaatggctgagagttaaaccgaagggaatggtagagacggcaaccccgggcctgtgcccagctgaaggatgaactgagggcaggatcgttaaatgcagaagccgaagacagtggcctgggagaatctgggtccagagatgtcagctcttggaactgctttttcaagagaagtatggatttttatgataaattttccaagttaaaaaaacttgctaggtc

SEQ ID NO: 426389 - DNA, 490 bp, Homo sapiens
ctaaaattcgtaccagtttactgtaacaaaagtcagcaggtcatgtttaggtcatcatttcaaaggctaaattagttaatgtgtttaggaaaataattttatgtgtttctgtttactttttcaaagattcacttgttttcagaaccacagtttcaaggtcacagtcaaagttttgaagaaacaacaagtcaaattgatgattcattttctaccaagtcttgcagagtttcaggaggcaggtaagtgaaacaaaggcctggcagagctgaatcactggagtaaaacagaattcacacatcagcaagtatatagtgatgcctgttaggtgcttggcactatgcgaaaccaccatcttagtccaatggcgtgcttcgtgatatctgagtaccagacgccagaggacacgggcttcaggttggttggagaagctgaagatcatctcattgtgtaatggaattcagagcaggttctttactctgtatgtcttccc

SEQ ID NO: 426390 - DNA, 3742 bp, Homo sapiens
aattcttactatctatgcatctatattttttcaggattacagagttagtcacattgacttatttactgaaccagaagggttaggaatcctaagttcctactttgatgatactgaagaaatgcagggatttggtgtaatgcagaagacttgttccatgaaagtacattggggcacgtggctgatttatgaagaacctggatttcagggtgttcctttcatcctggaacctggtgaataccctgacttgtccttctgggatacagaagcagcgtacattggatccatgcggcctctgaaaatgggtggccgtaaagttgaattccctacagatccaaaggtagttgtttatgaaaagcctttctttgaaggaaaatgtgtggaactagaaacaggaatgtgtagttttgtcatggagggaggtgaaacagaagaggcgactggagacgatcatttgccgtttacgtcagtggggtctatgaaagttctaagaggcatttgggttgcatatgagaagcctggatttaccggtcatcagtatttgctagaagaaggagaatacagggactggaaagcctggggaggttacaatggagagcttcagtctttacgacctatattaggtgatttttcaaatgctcacatgataatgtacagtgaaaaaaactttggatccaaaggttccagtattgatgtattgggaattgttgctaatttaaaggagactggatatggagtgaagacacagtctattaatgtactgagtggagtatgggtagcctatgaaaatcctgacttcacaggagaacagtatatactggataaaggattttataccagttttgaggactggggaggcaaaaattgtaagatctcttctgttcaacctatatgtttggattctttcactggcccaaggagacgaaatcagattcacttgttttcagaaccacagtttcaaggtcacagtcaaagttttgaagaaacaacaagtcaaattgatgattcattttctaccaagtcttgcagagtttcaggaggcagctgggttgtatatgatggagaaaatttcactggtaatcaatacgtgttggaagaaggccattatccttgtctgtctgcaatgggatgcccgcctggagcaactttcaagtctcttcgttttatagatgttgaattttctgaaccaacaattattctctttgaaagagaagacttcaaaggaaaaaagattgaacttaatgcagaaactgtcaatctccgatccctgggattcaacacacaaatacgctctgttcaggttattggtggcatatgggttacttatgaatatggcagttacagagggcgacagttcctattgtcacctgcagaagtacctaattggtatgaattcagtggctgtcgccaaataggttctctacgaccttttgttcagaagcgaatttatttcagacttcgaaacaaagcaacagggttattcatgtcaaccaatggaaacttagaggatctgaagcttctgaggatacaggtcatggaggatgtcggggccgatgatcagatttggatctatcaagaaggatgtatcaaatgcaggatagcagaagactgctgcctgacgattgtgggcagcctggtaacatctggctccaagctaggcctggccctggaccagaatgctgacagccagttctggagcttgaagtccgatggcaggatttacagcaagttgaagccaaatttagttttagacattaaagggggcacacagtatgatcaaaatcacattatcctcaacactgtcagcaaagagaagtttacacaagtgtgggaagccatggtcctatatacctgaacaaagaaggaagaagaatcttctggaggtccttccagccaccttatttcttaaaaaggacaatgctgatggaagaccagactggaaagtggatcgactcctccttcattgattctaaattcaaccttaaatcatgctgccatgactcagagaacttactcatcgtttcaaaagactatcatagctttaaaccaataatttgtcctcctttcatttcttgcctttcatttttggtagctgcttaaacaggttgcctaattagcagcttttgggtgattttgtaaaatgttatatcaagatttcaagactgtgtacattttaaattatttccaaagatagtgacaggagagaactggaacaaatttaccaactttgtggacctacaaagcccttacactttaaagggtaagacaaaggcttaagtttgaaaggtagagaactgtttagcatctgagaagaaatactttattaggcctgtaattttggttcttggccttaaacactttctggaacctttaaatatgctgcatagcacaatgggaaagccttaggtattcacacatttaaggaactctaaacaaaatactattttcctttagttcatattaaaaattaatacattttaaaaatttaatgtcaaagtctggtaacatttgttagtaggatttgagttattattttttgagacaggatctcaggctggagtgcagtggcacaatcacggctcactgcagcctctacctccccaggctcaggtgatcctcccacctcagcctcccaagtagctgggactataggcacacatcaccaagcccagccaaattttgttttttttttgtagagatggggtttcatcacgttgcccaggctgatctcgaacctctgggctcaagcaattcactcgcctcggcctcccaaaatgctgggattacaggcctgagccactgcgcccagccaggatttgaattattttaactcatccatgggctgccctagaatgtcacaaatgagggttgtttaatgcctttcttatagctgctactggaacactattatgacctaatttatgagccatccttactcatctacaagtgctgaagcaatgttacatacttttttgctaaactcagattttttagcctaatttcttgtcctcctatccacctgcatccacacatggcctgcatggggctgccttccctgcagtgttctgcagccatgcttcagggtatagctgttggtggacagcctcaggtcttgggggcactatagccactaaacgaggtgtgaaaggctcaagaggatgaccagcaattaattatccccagaaagtgaaggaaaagagacctttagggatgttgctggtcaagtcttgatttgaccggagtcaaatcaatcttcaagcaatcttggaatcctcaactgcagtaagcatttcaaaatgcaaacaaactgcttaacaactgacaagacaccagcccatacgctgctcttccaacagtgggttctagctttgaacaaaagtgctaaacatttccttgaatatattcttcctctttttgtcctcatcactcaatactggtgctcttgtcacaggtagaacagcttgtttcttttccatctattcaagtgtgtttctaattctaaaatgctgatcttctctggagtctatggtaggcaattatggtcactggaatagtttgtcttgttttaaaatattattggtgcatgtacaacagcatccaacatatctgtcttgttcctagatatatagctctgattttaggccttttgtgcataccattacaatatggtggggtaagacattctacagtagcctgtgctgaactgatctcttaaataaacttgcttctggttaactatgttgat

SEQ ID NO: 426391 - DNA, 2399 bp, Homo sapiens
atctcactttggattcttcctgatattcatgcttgttcagtgcttccagcagcacatctggtataacaactgctgggggttttgtcttctagaagcgaatttatttcagacttcgaaacaaagcaacagggttattcatgtcaaccaatggaaacttagaggatctgaagcttctgaggatacaggtcatggaggatgtcggggccgatgatcagatttggatctatcaagaaggatgtatcaaatgcaggatagcagaagactgctgcctgacgattgtgggcagcctggtaacatctggctccaagctaggcctggccctggaccagaatgctgacagccagttctggagcttgaagtccgatggcaggatttacagcaagttgaagccaaatttagttttagacattaaagggggcacacagtatgatcaaaatcacattatcctcaacactgtcagcaaagagaagtttacacaagtgtgggaagccatggtcctatatacctgaacaaagaaggaagaagaatcttctggaggtccttccagccaccttatttcttaaaaaggacaatgctgatggaagaccagactggaaagtggatcgactcctccttcattgattctaaattcaaccttaaatcatgctgccatgactcagagaacttactcatcgtttcaaaagactatcatagctttaaaccaataatttgtcctcctttcatttcttgcctttcatttttggtagctgcttaaacaggttgcctaattagcagcttttgggtgattttgtaaaatgttatatcaagatttcaagactgtgtacattttaaattatttccaaagatagtgacaggagagaactggaacaaatttaccaactttgtggacctacaaagcccttacactttaaagggtaagacaaaggcttaagtttgaaaggtagagaactgtttagcatctgagaagaaatactttattaggcctgtaattttggttcttggccttaaacactttctggaacctttaaatatgctgcatagcacaatgggaaagccttaggtattcacacatttaaggaactctaaacaaaatactattttcctttagttcatattaaaaattaatacattttaaaaatttaatgtcaaagtctggtaacatttgttagtaggatttgagttattattttttgagacaggatctcaggctggagtgcagtggcacaatcacggctcactgcagcctctacctccccaggctcaggtgatcctcccacctcagcctcccaagtagctgggactataggcacacatcaccaagcccagccaaattttgttttttttttgtagagatggggtttcatcacgttgcccaggctgatctcgaacctctgggctcaagcaattcactcgcctcggcctcccaaaatgctgggattacaggcctgagccactgcgcccagccaggatttgaattattttaactcatccatgggctgccctagaatgtcacaaatgagggttgtttaatgcctttcttatagctgctactggaacactattatgacctaatttatgagccatccttactcatctacaagtgctgaagcaatgttacatacttttttgctaaactcagattttttagcctaatttcttgtcctcctatccacctgcatccacacatggcctgcatggggctgccttccctgcagtgttctgcagccatgcttcagggtatagctgttggtggacagcctcaggtcttgggggcactatagccactaaacgaggtgtgaaaggctcaagaggatgaccagcaattaattatccccagaaagtgaaggaaaagagacctttagggatgttgctggtcaagtcttgatttgaccggagtcaaatcaatcttcaagcaatcttggaatcctcaactgcagtaagcatttcaaaatgcaaacaaactgcttaacaactgacaagacaccagcccatacgctgctcttccaacagtgggttctagctttgaacaaaagtgctaaacatttccttgaatatattcttcctctttttgtcctcatcactcaatactggtgctcttgtcacaggtagaacagcttgtttcttttccatctattcaagtgtgtttctaattctaaaatgctgatcttctctggagtctatggtaggcaattatggtcactggaatagtttgtcttgttttaaaatattattggtgcatgtacaacagcatccaacatatctgtcttgttcctagatatatagctctgattttaggccttttgtgcataccattacaatatggtggggtaagacattctacagtagcctgtgctgaactgatctcttaaataaacttgcttctggttaactatgttgat

SEQ ID NO: 426392 - DNA, 4572 bp, Homo sapiens
  misc_feature (620)..(620): n is a, c, g, or t
cagctccgaggggagtcggaccggagcaaacagccacccccggcttcgtcccccacgaagaggaagggcaggagccgtgccctcgaggccgtgcccgccccgcccgccagcggcccccgggctcccgccaaggagtccccacccaagagggtgcccgatcccagcccagtcaccaagggcactgcggccgagagcggggaggaggcggcgcgggccatcccccgcgagctcccggtcaagagcagctcgctgctgccggagatcaagcccgagcacaagaggggcccgctccccaaccacttcaacggccgggcagagggaggtcgaagcagagagctgggcagagcggccggagcgcctggagcttctgacgccgacggcttgaagcccaggaaccatttcggcgtgggcaggtcgacagtgaccactaaagtgaccctccctgccaagcccaaacatgtggaactaaatcttaaaacccctaagaatcttgacagtttgggaaatgagcacaatccatttagccagccagttcacaaaggcaacactgccaccaaaatctccttatttgaaaacaaacggacaaacagtagcccaagacacactgacattcgaggccnaaggaatactcctgcctctagtaaaacgtttgttgggagggcaaagctgaatttagccaaaaaagccaaagaaatggagcaacctgaaaagaaagtaatgccaaacagtccccagaatggtgtgctggttaaggaaactgctatagaaaccaaagttaccgtctcggaagaagagattctgccagcaaccagaggaatgaatggagactcttctgagaatcaagctcttggtcctcagcctaaccaagatgataaagcagatgtacaaacagatgctggctgcctttcagaaccagtggcttctgctctgattcctgtcaaggatcataagctcttagagaaggaggactcagaggctgcagacagcaaaagccttgtacttgaaaatgtaaccgatacagcacaagacatccccaccactgtggataccaaagatttacctccaacggccatgccaaagccacagcatacattttctgactcacagtcccctgctgagtcatctcctgggccttctctttcactgtctgcacccgctcctggggatgttcccaaagacacatgtgttcaatcacccataagcagtttcccatgcactgatctaaaagtgtcagaaaaccataaaggatgtgttttgcctgtgtctcgtcagaacaatgagaaaatgccacttttagaacttggaggagaaacaacccctcctttgtccacagagcgtagtccagaagctgtgggaagtgagtgtccatccagagtcctcgtccaggtcaggtccttcgtgctccccgtggagagcacccaggatgtgagctcccaggtcatcccagagagctctgaagttagagaagtgcagttgccaacttgtcacagtaatgaacctgaagtggtttccgttgcaagttgtgctcccccacaagaggaagtactgggcaatgaacactctcattgcacagcagagctcgcggcaaaatctggcccacaagtcataccgccagcatcagagaaaactctgcctattcaggctcaaagtcagggcagcagaacacccctgatggctgaatccagtcccaccaactctcccagcagcggaaatcacttagccactcctcaaaggccagatcagactgttacaaatggccaggatagccctgccagccttttgaacatttctgctggtagtgatgatagtgtatttgattcttcttctgatatggaaaaattcactgaaattataaaacagatggatagcgcagtttgtatgcccatgaaaagaaagaaggccaggatgccaaactctcctgctcctcactttgccatgcctcctattcacgaagaccatttagaaaaggtgtttgatcccaaagtgtttacctttggtttggggaagaagaaggaaagtcagccagaaatgtcaccggctttacatttgatgcagaaccttgacacaaaatccaaactgagacccaaacgtgcatctgctgaacagagcgtcctcttcaagtccctgcacaccaacactaatgggaacagtgagcctctggtgatgccggaaatcaatgacaaagagaacagggacgtcacaaatggtggcattaagagatcgagactagaaaaaagtgcacttttctcaagcttgttatcttctttaccacaagacaaaatcttttctccttctgtgacatcagtcaacactatgaccacggctttcagtacttctcagaacggttccctatctcagtcttcagtgtcacagcccacgactgagggtgccccgccctgtggtttgaacaaagaacagtcaaatcttctgcccgacaactccttaaaggtcttcaatttcaactcgtcaagtacatcacactccagtttgaaaagtccaagccacatggaaaaatacccgcaaaaagagaaaaccaaagaagatctggattcacgaagcaacctacacttgccagaaactaaattttctgaattgtcaaaactgaagaatgatgatatggaaaaggctaatcatattgaaagtgttattaaatcaaacttgccaaactgtgcaaacagtgacaccgacttcatgggtcttttcaaatcaagccggtatgacccaagcatttctttttctggaatgtcattatcagacacaatgacacttagaggaagtgtccaaaataaactcaatccccgacctggaaaggtagtgatatatagtgaacccgacgtctctgagaagtgcattgaagttttcagtgacattcaggattgcagttcttggagcctctctccagtgatactcataaaagttgttagaggatgttggattttgtatgagcaaccaaattttgaagggcactccatccccttagaagaaggagaattggaactctctggtctctggggtatagaagacattttggaaaggcacgaagaagcagagtctgataagccagtggtgattggttccatcagacatgtggttcaggattacagagttagtcacattgacttatttactgaaccagaagggttaggaatcctaagttcctactttgatgatactgaagaaatgcagggatttggtgtaatgcagaagacttgttccatgaaagtacattggggcacgtggctgatttatgaagaacctggatttcagggtgttcctttcatcctggaacctggtgaataccctgacttgtccttctgggatacagaagcagcgtacattggatccatgcggcctctgaaaatgggtggccgtaaagttgaattccctacagatccaaaggtagttgtttatgaaaagcctttctttgaaggaaaatgtgtggaactagaaacaggaatgtgtagttttgtcatggagggaggtgaaacagaagaggcgactggagacgatcatttgccgtttacgtcagtggggtctatgaaagttctaagaggcatttgggttgcatatgagaagcctggatttaccggtcatcagtatttgctagaagaaggagaatacagggactggaaagcctggggaggttacaatggagagcttcagtctttacgacctatattaggtgatttttcaaatgctcacatgataatgtacagtgaaaaaaactttggatccaaaggttccagtattgatgtattgggaattgttgctaatttaaaggagactggatatggagtgaagacacagtctattaatgtactgagtggagtatgggtagcctatgaaaatcctgacttcacaggagaacagtatatactggataaaggattttataccagttttgaggactggggaggcaaaaattgtaagatctcttctgttcaacctatatgtttggtaaggagttatatttttgtatgagaatatttaactgaattctggatttccttaatgtgtgttcctggttcatgtaatagtaattgctatggaaaatattctgagtttatttttagcagtaattgctaataatctagaagaaaaaaactttttcaatgtgtttgttctattcatttccttttctccttcctttaaaaatttttaggattctttcactggcccaaggagacgaaatcaggtaactttaaaaatattcttttatattaatatataaagggccttccattgaaaagctgaacttatgtttcaaatgtcagacatttggggccgggtgtggtggctcacgcctgtaatcccagcactttgggaggtcaaggcaggtggatcacttgagctcaggagttcaagaccagcctgaccaacatggggaaaccccgtctttactaaaaagacaaaaattagctgggtgtggtggcttgtgtctataagctcagctactcaggaagctgaggcaggagaattgcttgaaccccaagaggcagatgttggagtgagccgagatcgcaccactgcactccagcctgagtgacagagactctgtctcaaaaaaaaaaa

SEQ ID NO: 426393 - DNA, 3328 bp, Homo sapiens
  misc_feature (1)..(1): n is a, c, g, or t
  misc_feature (6)..(6): n is a, c, g, or t
  misc_feature (8)..(8): n is a, c, g, or t
  misc_feature (15)..(15): n is a, c, g, or t
  misc_feature (17)..(17): n is a, c, g, or t
  misc_feature (2011)..(2011): n is a, c, g, or t
ntgggngngggcccncncccaccacacaattcagacaagagctttgtggccctgtgcaagaaaggacctcattattctttttaccttacaatgttgctgaggcacagtgcatcgccaaccaagttcagctcttctacgctactgatcggaaagagacctacgggttagtggagacctttaacctcagaccaaatgagttcaaatatatgtctgtcatcgctgaattggagcaaagcggacttggagcagaactgaaatgtgcccagaaccaaaataagacttagaactgtacaggttggcccttcacctagttgactcagccctcgatagtctagagcccaccccctcctcaggaactcaagagctcagcatttataatgagcagttggtaatgagttgccctatgtgcttgtcgcaagcagtcacagagatgagccctattacttgatattcaggaacaaaggtacctgaacattctgataattatctcagcatacttgaggtttccttttttaagtgttcgaggttataacaagagacagccaaggacctacaagacagttgacttgattttgcacagtgtaacagcgcagttgcattctggccactttgaccttatagctcccaaatgatgagtttgtcatctttatgaactcatgacaggataataagcttgaagacctgctgtagttagatatgggctttaatccttcccatgcaccagtcagctgaacaaaagcataagccaaacatcctgtttaaactgtagaataaccagatattcccatcaggttaaagacttcatctagatgatgccccccagagatgcctttagtgtaagtagctggcttggggtatcagcaaatttcaggtatagttagataaacaggtacagggcctgcatactattaaaccatagtttgtggcacccgcttttctaactccacctgttagaagctatgtgtttgaaggaatgaatcagtgcagtataaataaaattcttttgtaaggagaagattaatcctggtttgcatgatttttttaaaaacaactctaaacatgatacgaaaaagtggatgaaagcaaatgttcccagattggatgtggggaaaatatagcaataattttttttttaagtctggcttacaatgtttgttatacaaaataatgaaatctgagttatgtactgtccattgtgtcagggctatgggctgattttatcaaaactcatcttgggactgaaaaattgtttggaatgccagaaataagaaagttgttctccagagctggaaacccatctttcgtttgtagtgtcactgttgtggctccaagctcagtgataggaaaggacggtggttacacaccagccttctgaacccaaggcccccagtattgttgtcagctgcctttaccatggcatttctttctctttctttttttcctgagatgaagtcttgctctgtcttgcccaggctggagtacagtagcgtgatctcagctcgctgcaacctctacctccctggttcaagtgattctgctgcgtcagcctcctgaggagctaggattacaggcgcatgccaccatacctggcttatttttgtattgttgtagagacagggtttcactttgttggccaggctggctggtctcgaactcctggcctcaagtgatccaccaccttgacctcccaaagtgctgggattacaggtgtgagccaccgtgcctggcctgacatttctttattgatctaacatgctccactctgctgctcctgcctaagatctggttatatgacactgaatgtggtgagtgggaatttaagcagtattcgcagtttgtgtgtgtgtgttttcttccttccagaagaatttttataggttgggcctgtccctaagctctttaaatagggtggacatcccactattctctgagccgtgtctattttgttgcacctttgagtctatgtattgagagagacagatagtatttttttaaactggggaagctgctntcctttcactatttctctaaaggttgagctgttaactaatgtaaattctggacctgcttctggtcctggcagtttatcttttgagaaacttgagtcttatctgccctgccattttcattaaatgccttctgaccttctgaatgttttgggtcccaagaatttttgacatcagatggggttgtttttattggtatccagttatgtttgcttgtctttccagatgggcccagttattagccatacatagtacattgatacacctccaccagcgggtgaggaaatgatggaaaaaggagtaagaagtggccattcgttttaatcattcctcctggatttgtcctcagtccccaactgccaagtaggatgtgtccatgtataaatgtgtggggcatgactaaagtaccacgtagctgttctttatatttatttacctagaaagatctggcaaagaactcaaagaaaattgtaccatttaatcagtaaatttgtcccctggtgctagcatggtgttatagaaagtggacaggctttagagttaagtgaatctgggttcatatgttagtgttgctattcattagctctatactgttgaacaaattgcttaaactatctaattttggggtttttttttccatctaaaatagggataataatatctacctcataggattattgtgagaattaaattaacttcactatagtagaaaatatcaactaccatccttttctctacttcccttgcccctcattaaagactaatacaagttagcatttcagatgtgtagatcattctttattccagttaaaagaacaaactttatctcatcagttctgaaactttaagatgcagtagcatcacctaaagtgcttttaaaatgcagattctcaggcctcaaccgtacaccacccccccacacacgtactaaatcaagaatatgtgcagaaggtactgggaatctacttgttaatatgtgctccaaatgattctgatgtaggtaattagccagccacactttgagaaccactgccttatctattctttacaaaaatgtacattgccaggtctttctttcctgtggatgctaactataggatatttaggttcctctgttctttgtctcccatagtggccccctttgcaaactccaaatacattatatttatttattcttgtgtcttttttcccccactagactgtgagctccttgagggccaggacttatctctgttcgcagtgccaaggacatggcctggaccatagaagatactcagttttttgttgaataaataggtaatatggatttcaaaaaaaaaatt

SEQ ID NO: 426394 - DNA, 4134 bp, Homo sapiens
  misc_feature (9)..(10): n is a, c, g, or t
  misc_feature (40)..(40): n is a, c, g, or t
  misc_feature (77)..(77): n is a, c, g, or t
  misc_feature (2817)..(2817): n is a, c, g, or t
ccccccgcnntatccccaccctcaaatcaccgtcacgcanattacatatctaccttccctgcctcccccctcctctnccagctgccaggaggcgggggcggccatggctgctgtggtggtggcggctgcgggtggcgcgggaccggcggtcctgcaggtggccggtctctaccggggcctgtgcgcggtgcgcagccgcgccctgggcctggggctcgtgtcacccgcgcagctgcgcgtcttcccagtgcgccccggctcgggccggcccgaggggggcgccgacggcagcggggtcggggccgaggccgagctccaggccaaccctttctacgaccgctaccgcgacaagatccagctgctgcgcaggtcagacccagctgcttttgagtcccgcctggagaaacgcagtgaatttcggaagcagccagtggggcattccaggcaaggtgattttatcaaatgtgtggaacagaagacagatgccttggggaaacagtctgtgaacagaggattcactaaggacaagactctcagttcaatctttaacattgagatggtaaaagaaaaaactgcagaagaaataaaacagatttggcagcaatattttgcagcaaaagatacagtctacgcagttattcctgcagaaaagtttgatttgatctggaaccgggctcagtcctgtccaacatttctatgtgctctgccaagaagggaaggttatgagttttttgtaggacaatggacaggtactgaactccacttcactgcacttataaatattcagacccgaggggaagctgcagccagccagctgattttatatcactatcctgaacttaaggaagaaaagggcatagtgctgatgactgcagaaatggattccacatttctgaatgttgctgaggcacagtgcatcgccaaccaagttcagctcttctacgctactgatcggaaagagacctacgggttagtggagacctttaacctcagaccaaatgagttcaaatatatgtctgtcatcgctgaattggagcaaagcggacttggagcagaactgaaatgtgcccagaaccaaaataagacttagaactgtacaggttggcccttcacctagttgactcagccctcgatagtctagagcccaccccctcctcaggaactcaagagctcagcatttataatgagcagttggtaatgagttgccctatgtgcttgtcgcaagcagtcacagagatgagccctattacttgatattcaggaacaaaggtacctgaacattctgataattatctcagcatacttgaggtttccttttttaagtgttcgaggttataacaagagacagccaaggacctacaagacagttgacttgattttgcacagtgtaacagcgcagttgcattctggccactttgaccttatagctcccaaatgatgagtttgtcatctttatgaactcatgacaggataataagcttgaagacctgctgtagttagatatgggctttaatccttcccatgcaccagtcagctgaacaaaagcataagccaaacatcctgtttaaactgtagaataaccagatattcccatcaggttaaagacttcatctagatgatgccccccagagatgcctttagtgtaagtagctggcttggggtatcagcaaatttcaggtatagttagataaacaggtacagggcctgcatactattaaaccatagtttgtggcacccgcttttctaactccacctgttagaagctatgtgtttgaaggaatgaatcagtgcagtataaataaaattcttttgtaaggagaagattaatcctggtttgcatgatttttttaaaaacaactctaaacatgatacgaaaaagtggatgaaagcaaatgttcccagattggatgtggggaaaatatagcaataattttttttttaagtctggcttacaatgtttgttatacaaaataatgaaatctgagttatgtactgtccattgtgtcagggctatgggctgattttatcaaaactcatcttgggactgaaaaattgtttggaatgccagaaataagaaagttgttctccagagctggaaacccatctttcgtttgtagtgtcactgttgtggctccaagctcagtgataggaaaggacggtggttacacaccagccttctgaacccaaggcccccagtattgttgtcagctgcctttaccatggcatttctttctctttctttttttcctgagatgaagtcttgctctgtcttgcccaggctggagtacagtagcgtgatctcagctcgctgcaacctctacctccctggttcaagtgattctgctgcgtcagcctcctgaggagctaggattacaggcgcatgccaccatacctggcttatttttgtattgttgtagagacagggtttcactttgttggccaggctggctggtctcgaactcctggcctcaagtgatccaccaccttgacctcccaaagtgctgggattacaggtgtgagccaccgtgcctggcctgacatttctttattgatctaacatgctccactctgctgctcctgcctaagatctggttatatgacactgaatgtggtgagtgggaatttaagcagtattcgcagtttgtgtgtgtgtgttttcttccttccagaagaatttttataggttgggcctgtccctaagctctttaaatagggtggacatcccactattctctgagccgtgtctattttgttgcacctttgagtctatgtattgagagagacagatagtatttttttaaactggggaagctgctntcctttcactatttctctaaaggttgagctgttaactaatgtaaattctggacctgcttctggtcctggcagtttatcttttgagaaacttgagtcttatctgccctgccattttcattaaatgccttctgaccttctgaatgttttgggtcccaagaatttttgacatcagatggggttgtttttattggtatccagttatgtttgcttgtctttccagatgggcccagttattagccatacatagtacattgatacacctccaccagcgggtgaggaaatgatggaaaaaggagtaagaagtggccattcgttttaatcattcctcctggatttgtcctcagtccccaactgccaagtaggatgtgtccatgtataaatgtgtggggcatgactaaagtaccacgtagctgttctttatatttatttacctagaaagatctggcaaagaactcaaagaaaattgtaccatttaatcagtaaatttgtcccctggtgctagcatggtgttatagaaagtggacaggctttagagttaagtgaatctgggttcatatgttagtgttgctattcattagctctatactgttgaacaaattgcttaaactatctaattttggggtttttttttccatctaaaatagggataataatatctacctcataggattattgtgagaattaaattaacttcactatagtagaaaatatcaactaccatccttttctctacttcccttgcccctcattaaagactaatacaagttagcatttcagatgtgtagatcattctttattccagttaaaagaacaaactttatctcatcagttctgaaactttaagatgcagtagcatcacctaaagtgcttttaaaatgcagattctcaggcctcaaccgtacaccacccccccacacacgtactaaatcaagaatatgtgcagaaggtactgggaatctacttgttaatatgtgctccaaatgattctgatgtaggtaattagccagccacactttgagaaccactgccttatctattctttacaaaaatgtacattgccaggtctttctttcctgtggatgctaactataggatatttaggttcctctgttctttgtctcccatagtggccccctttgcaaactccaaatacattatatttatttattcttgtgtcttttttcccccactagactgtgagctccttgagggccaggacttatctctgttcgcagtgccaaggacatggcctggaccatagaagatactcagttttttgttgaataaataggtaatatggatttcaaaaaaaaaatt

SEQ ID NO: 426395 - DNA, 4045 bp, Homo sapiens
  misc_feature (2728)..(2728): n is a, c, g, or t
gggcgcgcgggccgcgggccgaggccgacgcgcctgaggaggaggaggaggcgggggcggccatggctgctgtggtggtggcggctgcgggtggcgcgggaccggcggtcctgcaggtggccggtctctaccggggcctgtgcgcggtgcgcagccgcgccctgggcctggggctcgtgtcacccgcgcagctgcgcgtcttcccagtgcgccccggctcgggccggcccgaggggggcgccgacggcagcggggtcggggccgaggccgagctccaggccaaccctttctacgaccgctaccgcgacaagatccagctgctgcgcaggtcagacccagctgcttttgagtcccgcctggagaaacgcagtgaatttcggaagcagccagtggggcattccaggcaaggtgattttatcaaatgtgtggaacagaagacagatgccttggggaaacagtctgtgaacagaggattcactaaggacaagactctcagttcaatctttaacattgagatggtaaaagaaaaaactgcagaagaaataaaacagatttggcagcaatattttgcagcaaaagatacagtctacgcagttattcctgcagaaaagtttgatttgatctggaaccgggctcagtcctgtccaacatttctatgtgctctgccaagaagggaaggttatgagttttttgtaggacaatggacaggtactgaactccacttcactgcacttataaatattcagacccgaggggaagctgcagccagccagctgattttatatcactatcctgaacttaaggaaaatgttgctgaggcacagtgcatcgccaaccaagttcagctcttctacgctactgatcggaaagagacctacgggttagtggagacctttaacctcagaccaaatgagttcaaatatatgtctgtcatcgctgaattggagcaaagcggacttggagcagaactgaaatgtgcccagaaccaaaataagacttagaactgtacaggttggcccttcacctagttgactcagccctcgatagtctagagcccaccccctcctcaggaactcaagagctcagcatttataatgagcagttggtaatgagttgccctatgtgcttgtcgcaagcagtcacagagatgagccctattacttgatattcaggaacaaaggtacctgaacattctgataattatctcagcatacttgaggtttccttttttaagtgttcgaggttataacaagagacagccaaggacctacaagacagttgacttgattttgcacagtgtaacagcgcagttgcattctggccactttgaccttatagctcccaaatgatgagtttgtcatctttatgaactcatgacaggataataagcttgaagacctgctgtagttagatatgggctttaatccttcccatgcaccagtcagctgaacaaaagcataagccaaacatcctgtttaaactgtagaataaccagatattcccatcaggttaaagacttcatctagatgatgccccccagagatgcctttagtgtaagtagctggcttggggtatcagcaaatttcaggtatagttagataaacaggtacagggcctgcatactattaaaccatagtttgtggcacccgcttttctaactccacctgttagaagctatgtgtttgaaggaatgaatcagtgcagtataaataaaattcttttgtaaggagaagattaatcctggtttgcatgatttttttaaaaacaactctaaacatgatacgaaaaagtggatgaaagcaaatgttcccagattggatgtggggaaaatatagcaataattttttttttaagtctggcttacaatgtttgttatacaaaataatgaaatctgagttatgtactgtccattgtgtcagggctatgggctgattttatcaaaactcatcttgggactgaaaaattgtttggaatgccagaaataagaaagttgttctccagagctggaaacccatctttcgtttgtagtgtcactgttgtggctccaagctcagtgataggaaaggacggtggttacacaccagccttctgaacccaaggcccccagtattgttgtcagctgcctttaccatggcatttctttctctttctttttttcctgagatgaagtcttgctctgtcttgcccaggctggagtacagtagcgtgatctcagctcgctgcaacctctacctccctggttcaagtgattctgctgcgtcagcctcctgaggagctaggattacaggcgcatgccaccatacctggcttatttttgtattgttgtagagacagggtttcactttgttggccaggctggctggtctcgaactcctggcctcaagtgatccaccaccttgacctcccaaagtgctgggattacaggtgtgagccaccgtgcctggcctgacatttctttattgatctaacatgctccactctgctgctcctgcctaagatctggttatatgacactgaatgtggtgagtgggaatttaagcagtattcgcagtttgtgtgtgtgtgttttcttccttccagaagaatttttataggttgggcctgtccctaagctctttaaatagggtggacatcccactattctctgagccgtgtctattttgttgcacctttgagtctatgtattgagagagacagatagtatttttttaaactggggaagctgctntcctttcactatttctctaaaggttgagctgttaactaatgtaaattctggacctgcttctggtcctggcagtttatcttttgagaaacttgagtcttatctgccctgccattttcattaaatgccttctgaccttctgaatgttttgggtcccaagaatttttgacatcagatggggttgtttttattggtatccagttatgtttgcttgtctttccagatgggcccagttattagccatacatagtacattgatacacctccaccagcgggtgaggaaatgatggaaaaaggagtaagaagtggccattcgttttaatcattcctcctggatttgtcctcagtccccaactgccaagtaggatgtgtccatgtataaatgtgtggggcatgactaaagtaccacgtagctgttctttatatttatttacctagaaagatctggcaaagaactcaaagaaaattgtaccatttaatcagtaaatttgtcccctggtgctagcatggtgttatagaaagtggacaggctttagagttaagtgaatctgggttcatatgttagtgttgctattcattagctctatactgttgaacaaattgcttaaactatctaattttggggtttttttttccatctaaaatagggataataatatctacctcataggattattgtgagaattaaattaacttcactatagtagaaaatatcaactaccatccttttctctacttcccttgcccctcattaaagactaatacaagttagcatttcagatgtgtagatcattctttattccagttaaaagaacaaactttatctcatcagttctgaaactttaagatgcagtagcatcacctaaagtgcttttaaaatgcagattctcaggcctcaaccgtacaccacccccccacacacgtactaaatcaagaatatgtgcagaaggtactgggaatctacttgttaatatgtgctccaaatgattctgatgtaggtaattagccagccacactttgagaaccactgccttatctattctttacaaaaatgtacattgccaggtctttctttcctgtggatgctaactataggatatttaggttcctctgttctttgtctcccatagtggccccctttgcaaactccaaatacattatatttatttattcttgtgtcttttttcccccactagactgtgagctccttgagggccaggacttatctctgttcgcagtgccaaggacatggcctggaccatagaagatactcagttttttgttgaataaataggtaatatggatttcaaaaaaaaaatt

SEQ ID NO: 426396 - DNA, 4184 bp, Homo sapiens
  misc_feature (2867)..(2867): n is a, c, g, or t
gggcgcgcgggccgcgggccgaggccgacgcgcctgaggaggaggaggaggcgggggcggccatggctgctgtggtggtggcggctgcgggtggcgcgggaccggcggtcctgcaggtggccggtctctaccggggcctgtgcgcggtgcgcagccgcgccctgggcctggggctcgtgtcacccgcgcagctgcgcgtcttcccagtgcgccccggctcgggccggcccgaggggggcgccgacggcagcggggtcggggccgaggccgagctccaggccaaccctttctacgaccgctaccgcgacaagatccagctgctgcgcaggtcagacccagctgcttttgagtcccgcctggagaaacgcagtgaatttcggaagcagccagtggggcattccaggcaaggtgattttatcaaatgtgtggaacagaaggatggtgcacagaacaaactggtgtaggagaggccagcgccagggagaatatggagtaatccaggtgtgggctgcagaagcctgaattaagacagatgccttggggaaacagtctgtgaacagaggattcactaaggacaagactctcagttcaatctttaacattgagatggtaaaagaaaaaactgcagaagaaataaaacagatttggcagcaatattttgcagcaaaagatacagtctacgcagttattcctgcagaaaagtttgatttgatctggaaccgggctcagtcctgtccaacatttctatgtgctctgccaagaagggaaggttatgagttttttgtaggacaatggacaggtactgaactccacttcactgcacttataaatattcagacccgaggggaagctgcagccagccagctgattttatatcactatcctgaacttaaggaagaaaagggcatagtgctgatgactgcagaaatggattccacatttctgaatgttgctgaggcacagtgcatcgccaaccaagttcagctcttctacgctactgatcggaaagagacctacgggttagtggagacctttaacctcagaccaaatgagttcaaatatatgtctgtcatcgctgaattggagcaaagcggacttggagcagaactgaaatgtgcccagaaccaaaataagacttagaactgtacaggttggcccttcacctagttgactcagccctcgatagtctagagcccaccccctcctcaggaactcaagagctcagcatttataatgagcagttggtaatgagttgccctatgtgcttgtcgcaagcagtcacagagatgagccctattacttgatattcaggaacaaaggtacctgaacattctgataattatctcagcatacttgaggtttccttttttaagtgttcgaggttataacaagagacagccaaggacctacaagacagttgacttgattttgcacagtgtaacagcgcagttgcattctggccactttgaccttatagctcccaaatgatgagtttgtcatctttatgaactcatgacaggataataagcttgaagacctgctgtagttagatatgggctttaatccttcccatgcaccagtcagctgaacaaaagcataagccaaacatcctgtttaaactgtagaataaccagatattcccatcaggttaaagacttcatctagatgatgccccccagagatgcctttagtgtaagtagctggcttggggtatcagcaaatttcaggtatagttagataaacaggtacagggcctgcatactattaaaccatagtttgtggcacccgcttttctaactccacctgttagaagctatgtgtttgaaggaatgaatcagtgcagtataaataaaattcttttgtaaggagaagattaatcctggtttgcatgatttttttaaaaacaactctaaacatgatacgaaaaagtggatgaaagcaaatgttcccagattggatgtggggaaaatatagcaataattttttttttaagtctggcttacaatgtttgttatacaaaataatgaaatctgagttatgtactgtccattgtgtcagggctatgggctgattttatcaaaactcatcttgggactgaaaaattgtttggaatgccagaaataagaaagttgttctccagagctggaaacccatctttcgtttgtagtgtcactgttgtggctccaagctcagtgataggaaaggacggtggttacacaccagccttctgaacccaaggcccccagtattgttgtcagctgcctttaccatggcatttctttctctttctttttttcctgagatgaagtcttgctctgtcttgcccaggctggagtacagtagcgtgatctcagctcgctgcaacctctacctccctggttcaagtgattctgctgcgtcagcctcctgaggagctaggattacaggcgcatgccaccatacctggcttatttttgtattgttgtagagacagggtttcactttgttggccaggctggctggtctcgaactcctggcctcaagtgatccaccaccttgacctcccaaagtgctgggattacaggtgtgagccaccgtgcctggcctgacatttctttattgatctaacatgctccactctgctgctcctgcctaagatctggttatatgacactgaatgtggtgagtgggaatttaagcagtattcgcagtttgtgtgtgtgtgttttcttccttccagaagaatttttataggttgggcctgtccctaagctctttaaatagggtggacatcccactattctctgagccgtgtctattttgttgcacctttgagtctatgtattgagagagacagatagtatttttttaaactggggaagctgctntcctttcactatttctctaaaggttgagctgttaactaatgtaaattctggacctgcttctggtcctggcagtttatcttttgagaaacttgagtcttatctgccctgccattttcattaaatgccttctgaccttctgaatgttttgggtcccaagaatttttgacatcagatggggttgtttttattggtatccagttatgtttgcttgtctttccagatgggcccagttattagccatacatagtacattgatacacctccaccagcgggtgaggaaatgatggaaaaaggagtaagaagtggccattcgttttaatcattcctcctggatttgtcctcagtccccaactgccaagtaggatgtgtccatgtataaatgtgtggggcatgactaaagtaccacgtagctgttctttatatttatttacctagaaagatctggcaaagaactcaaagaaaattgtaccatttaatcagtaaatttgtcccctggtgctagcatggtgttatagaaagtggacaggctttagagttaagtgaatctgggttcatatgttagtgttgctattcattagctctatactgttgaacaaattgcttaaactatctaattttggggtttttttttccatctaaaatagggataataatatctacctcataggattattgtgagaattaaattaacttcactatagtagaaaatatcaactaccatccttttctctacttcccttgcccctcattaaagactaatacaagttagcatttcagatgtgtagatcattctttattccagttaaaagaacaaactttatctcatcagttctgaaactttaagatgcagtagcatcacctaaagtgcttttaaaatgcagattctcaggcctcaaccgtacaccacccccccacacacgtactaaatcaagaatatgtgcagaaggtactgggaatctacttgttaatatgtgctccaaatgattctgatgtaggtaattagccagccacactttgagaaccactgccttatctattctttacaaaaatgtacattgccaggtctttctttcctgtggatgctaactataggatatttaggttcctctgttctttgtctcccatagtggccccctttgcaaactccaaatacattatatttatttattcttgtgtcttttttcccccactagactgtgagctccttgagggccaggacttatctctgttcgcagtgccaaggacatggcctggaccatagaagatactcagttttttgttgaataaataggtaatatggatttcaaaaaaaaaatt

SEQ ID NO: 426397 - DNA, 2025 bp, Homo sapiens
gggcgcgcgggccgcgggccgaggccgacgcgcctgaggaggaggaggaggcgggggcggccatggctgctgtggtggtggcggctgcgggtggcgcgggaccggcggtcctgcaggtggccggtctctaccggggcctgtgcgcggtgcgcagccgcgccctgggcctggggctcgtgtcacccgcgcagctgcgcgtcttcccagtgcgccccggctcgggccggcccgaggggggcgccgacggcagcggggtcggggccgaggccgagctccaggccaaccctttctacgaccgctaccgcgacaagatccagctgctgcgcaggtcagacccagctgcttttgagtcccgcctggagaaacgcagtgaatttcggaagcagccagtggggcattccaggcaaggtgattttatcaaatgtgtggaacagaagacagatgccttggggaaacagtctgtgaacagaggattcactaaggacaagactctcagttcaatctttaacattgagatggtaaaagaaaaaactgcagaagaaataaaacagatttggcagcaatattttgcagcaaaagatacagtctacgcagttattcctgcagaaaagtttgatttgatctggaaccgggctcagtcctgtccaacatttctatgtgctctgccaagaagggaaggttatgagttttttgtaggacaatggacaggtactgaactccacttcactgcacttataaatattcagacccgaggggaagctgcagccagccagctgattttatatcactatcctgaacttaaggaagaaaagggcatagtgctgatgactgcagaaatggattccacatttctgaatgttgctgaggcacagtgcatcgccaaccaagttcagctcttctacgctactgatcggaaagagacctacggatgggcccagttattagccatacatagtacattgatacacctccaccagcgggtgaggaaatgatggaaaaaggagtaagaagtggccattcgttttaatcattcctcctggatttgtcctcagtccccaactgccaagtaggatgtgtccatgtataaatgtgtggggcatgactaaagtaccacgtagctgttctttatatttatttacctagaaagatctggcaaagaactcaaagaaaattgtaccatttaatcagtaaatttgtcccctggtgctagcatggtgttatagaaagtggacaggctttagagttaagtgaatctgggttcatatgttagtgttgctattcattagctctatactgttgaacaaattgcttaaactatctaattttggggtttttttttccatctaaaatagggataataatatctacctcataggattattgtgagaattaaattaacttcactatagtagaaaatatcaactaccatccttttctctacttcccttgcccctcattaaagactaatacaagttagcatttcagatgtgtagatcattctttattccagttaaaagaacaaactttatctcatcagttctgaaactttaagatgcagtagcatcacctaaagtgcttttaaaatgcagattctcaggcctcaaccgtacaccacccccccacacacgtactaaatcaagaatatgtgcagaaggtactgggaatctacttgttaatatgtgctccaaatgattctgatgtaggtaattagccagccacactttgagaaccactgccttatctattctttacaaaaatgtacattgccaggtctttctttcctgtggatgctaactataggatatttaggttcctctgttctttgtctcccatagtggccccctttgcaaactccaaatacattatatttatttattcttgtgtcttttttcccccactagactgtgagctccttgagggccaggacttatctctgttcgcagtgccaaggacatggcctggaccatagaagatactcagttttttgttgaataaataggtaatatggatttcaaaaaaaaaatt

SEQ ID NO: 426398 - DNA, 3889 bp, Homo sapiens
  misc_feature (2572)..(2572): n is a, c, g, or t
gggcgcgcgggccgcgggccgaggccgacgcgcctgaggaggaggaggaggcgggggcggccatggctgctgtggtggtggcggctgcgggtggcgcgggaccggcggtcctgcaggtggccggtctctaccggggcctgtgcgcggtgcgcagccgcgccctgggcctggggctcgtgtcacccgcgcagctgcgcgtcttcccagtgcgccccggctcgggccggcccgaggggggcgccgacggcagcggggtcggggccgaggccgagctccaggccaaccctttctacgaccgctaccgcgacaagatccagctgctgcgcaggtcagacccagctgcttttgagtcccgcctggagaaacgcagtgaatttcggaagcagccagtggggcattccaggcaaggtgattttatcaaatgtgtggaacagaagacagatgccttggggaaacagtctgtgaacagaggattcactaaggacaagactctcagttcaatctttaacattgagatggtaaaagaaaaaactgcagaagaaataaaacagatttggcagcaatattttgcagcaaaagatacagtctacgcagttattcctgcagaaaagtttgatttgatctggaaccgggctcagtcctgtccaacaaatgttgctgaggcacagtgcatcgccaaccaagttcagctcttctacgctactgatcggaaagagacctacgggttagtggagacctttaacctcagaccaaatgagttcaaatatatgtctgtcatcgctgaattggagcaaagcggacttggagcagaactgaaatgtgcccagaaccaaaataagacttagaactgtacaggttggcccttcacctagttgactcagccctcgatagtctagagcccaccccctcctcaggaactcaagagctcagcatttataatgagcagttggtaatgagttgccctatgtgcttgtcgcaagcagtcacagagatgagccctattacttgatattcaggaacaaaggtacctgaacattctgataattatctcagcatacttgaggtttccttttttaagtgttcgaggttataacaagagacagccaaggacctacaagacagttgacttgattttgcacagtgtaacagcgcagttgcattctggccactttgaccttatagctcccaaatgatgagtttgtcatctttatgaactcatgacaggataataagcttgaagacctgctgtagttagatatgggctttaatccttcccatgcaccagtcagctgaacaaaagcataagccaaacatcctgtttaaactgtagaataaccagatattcccatcaggttaaagacttcatctagatgatgccccccagagatgcctttagtgtaagtagctggcttggggtatcagcaaatttcaggtatagttagataaacaggtacagggcctgcatactattaaaccatagtttgtggcacccgcttttctaactccacctgttagaagctatgtgtttgaaggaatgaatcagtgcagtataaataaaattcttttgtaaggagaagattaatcctggtttgcatgatttttttaaaaacaactctaaacatgatacgaaaaagtggatgaaagcaaatgttcccagattggatgtggggaaaatatagcaataattttttttttaagtctggcttacaatgtttgttatacaaaataatgaaatctgagttatgtactgtccattgtgtcagggctatgggctgattttatcaaaactcatcttgggactgaaaaattgtttggaatgccagaaataagaaagttgttctccagagctggaaacccatctttcgtttgtagtgtcactgttgtggctccaagctcagtgataggaaaggacggtggttacacaccagccttctgaacccaaggcccccagtattgttgtcagctgcctttaccatggcatttctttctctttctttttttcctgagatgaagtcttgctctgtcttgcccaggctggagtacagtagcgtgatctcagctcgctgcaacctctacctccctggttcaagtgattctgctgcgtcagcctcctgaggagctaggattacaggcgcatgccaccatacctggcttatttttgtattgttgtagagacagggtttcactttgttggccaggctggctggtctcgaactcctggcctcaagtgatccaccaccttgacctcccaaagtgctgggattacaggtgtgagccaccgtgcctggcctgacatttctttattgatctaacatgctccactctgctgctcctgcctaagatctggttatatgacactgaatgtggtgagtgggaatttaagcagtattcgcagtttgtgtgtgtgtgttttcttccttccagaagaatttttataggttgggcctgtccctaagctctttaaatagggtggacatcccactattctctgagccgtgtctattttgttgcacctttgagtctatgtattgagagagacagatagtatttttttaaactggggaagctgctntcctttcactatttctctaaaggttgagctgttaactaatgtaaattctggacctgcttctggtcctggcagtttatcttttgagaaacttgagtcttatctgccctgccattttcattaaatgccttctgaccttctgaatgttttgggtcccaagaatttttgacatcagatggggttgtttttattggtatccagttatgtttgcttgtctttccagatgggcccagttattagccatacatagtacattgatacacctccaccagcgggtgaggaaatgatggaaaaaggagtaagaagtggccattcgttttaatcattcctcctggatttgtcctcagtccccaactgccaagtaggatgtgtccatgtataaatgtgtggggcatgactaaagtaccacgtagctgttctttatatttatttacctagaaagatctggcaaagaactcaaagaaaattgtaccatttaatcagtaaatttgtcccctggtgctagcatggtgttatagaaagtggacaggctttagagttaagtgaatctgggttcatatgttagtgttgctattcattagctctatactgttgaacaaattgcttaaactatctaattttggggtttttttttccatctaaaatagggataataatatctacctcataggattattgtgagaattaaattaacttcactatagtagaaaatatcaactaccatccttttctctacttcccttgcccctcattaaagactaatacaagttagcatttcagatgtgtagatcattctttattccagttaaaagaacaaactttatctcatcagttctgaaactttaagatgcagtagcatcacctaaagtgcttttaaaatgcagattctcaggcctcaaccgtacaccacccccccacacacgtactaaatcaagaatatgtgcagaaggtactgggaatctacttgttaatatgtgctccaaatgattctgatgtaggtaattagccagccacactttgagaaccactgccttatctattctttacaaaaatgtacattgccaggtctttctttcctgtggatgctaactataggatatttaggttcctctgttctttgtctcccatagtggccccctttgcaaactccaaatacattatatttatttattcttgtgtcttttttcccccactagactgtgagctccttgagggccaggacttatctctgttcgcagtgccaaggacatggcctggaccatagaagatactcagttttttgttgaataaataggtaatatggatttcaaaaaaaaaatt

SEQ ID NO: 426399 - DNA, 3213 bp, Homo sapiens
  misc_feature (1896)..(1896): n is a, c, g, or t
ttagagtgcagaagtagtctcgaggtatgatcggaaagagacctacgggttagtggagacctttaacctcagaccaaatgagttcaaatatatgtctgtcatcgctgaattggagcaaagcggacttggagcagaactgaaatgtgcccagaaccaaaataagacttagaactgtacaggttggcccttcacctagttgactcagccctcgatagtctagagcccaccccctcctcaggaactcaagagctcagcatttataatgagcagttggtaatgagttgccctatgtgcttgtcgcaagcagtcacagagatgagccctattacttgatattcaggaacaaaggtacctgaacattctgataattatctcagcatacttgaggtttccttttttaagtgttcgaggttataacaagagacagccaaggacctacaagacagttgacttgattttgcacagtgtaacagcgcagttgcattctggccactttgaccttatagctcccaaatgatgagtttgtcatctttatgaactcatgacaggataataagcttgaagacctgctgtagttagatatgggctttaatccttcccatgcaccagtcagctgaacaaaagcataagccaaacatcctgtttaaactgtagaataaccagatattcccatcaggttaaagacttcatctagatgatgccccccagagatgcctttagtgtaagtagctggcttggggtatcagcaaatttcaggtatagttagataaacaggtacagggcctgcatactattaaaccatagtttgtggcacccgcttttctaactccacctgttagaagctatgtgtttgaaggaatgaatcagtgcagtataaataaaattcttttgtaaggagaagattaatcctggtttgcatgatttttttaaaaacaactctaaacatgatacgaaaaagtggatgaaagcaaatgttcccagattggatgtggggaaaatatagcaataattttttttttaagtctggcttacaatgtttgttatacaaaataatgaaatctgagttatgtactgtccattgtgtcagggctatgggctgattttatcaaaactcatcttgggactgaaaaattgtttggaatgccagaaataagaaagttgttctccagagctggaaacccatctttcgtttgtagtgtcactgttgtggctccaagctcagtgataggaaaggacggtggttacacaccagccttctgaacccaaggcccccagtattgttgtcagctgcctttaccatggcatttctttctctttctttttttcctgagatgaagtcttgctctgtcttgcccaggctggagtacagtagcgtgatctcagctcgctgcaacctctacctccctggttcaagtgattctgctgcgtcagcctcctgaggagctaggattacaggcgcatgccaccatacctggcttatttttgtattgttgtagagacagggtttcactttgttggccaggctggctggtctcgaactcctggcctcaagtgatccaccaccttgacctcccaaagtgctgggattacaggtgtgagccaccgtgcctggcctgacatttctttattgatctaacatgctccactctgctgctcctgcctaagatctggttatatgacactgaatgtggtgagtgggaatttaagcagtattcgcagtttgtgtgtgtgtgttttcttccttccagaagaatttttataggttgggcctgtccctaagctctttaaatagggtggacatcccactattctctgagccgtgtctattttgttgcacctttgagtctatgtattgagagagacagatagtatttttttaaactggggaagctgctntcctttcactatttctctaaaggttgagctgttaactaatgtaaattctggacctgcttctggtcctggcagtttatcttttgagaaacttgagtcttatctgccctgccattttcattaaatgccttctgaccttctgaatgttttgggtcccaagaatttttgacatcagatggggttgtttttattggtatccagttatgtttgcttgtctttccagatgggcccagttattagccatacatagtacattgatacacctccaccagcgggtgaggaaatgatggaaaaaggagtaagaagtggccattcgttttaatcattcctcctggatttgtcctcagtccccaactgccaagtaggatgtgtccatgtataaatgtgtggggcatgactaaagtaccacgtagctgttctttatatttatttacctagaaagatctggcaaagaactcaaagaaaattgtaccatttaatcagtaaatttgtcccctggtgctagcatggtgttatagaaagtggacaggctttagagttaagtgaatctgggttcatatgttagtgttgctattcattagctctatactgttgaacaaattgcttaaactatctaattttggggtttttttttccatctaaaatagggataataatatctacctcataggattattgtgagaattaaattaacttcactatagtagaaaatatcaactaccatccttttctctacttcccttgcccctcattaaagactaatacaagttagcatttcagatgtgtagatcattctttattccagttaaaagaacaaactttatctcatcagttctgaaactttaagatgcagtagcatcacctaaagtgcttttaaaatgcagattctcaggcctcaaccgtacaccacccccccacacacgtactaaatcaagaatatgtgcagaaggtactgggaatctacttgttaatatgtgctccaaatgattctgatgtaggtaattagccagccacactttgagaaccactgccttatctattctttacaaaaatgtacattgccaggtctttctttcctgtggatgctaactataggatatttaggttcctctgttctttgtctcccatagtggccccctttgcaaactccaaatacattatatttatttattcttgtgtcttttttcccccactagactgtgagctccttgagggccaggacttatctctgttcgcagtgccaaggacatggcctggaccatagaagatactcagttttttgttgaataaataggtaatatggatttcaaaaaaaaaatt

SEQ ID NO: 426400 - DNA, 3278 bp, Homo sapiens
  misc_feature (1961)..(1961): n is a, c, g, or t
gacccacgcgtccgtgcgctgttacactgtgcagttgcattctggccactttgaccttatagctcccaaatgatgagtttgtcatctttatgaactcatgacaggataataagcttgaagacctgctgtagttagatatgggctttaatccttcccatgcaccagtcagctgaattggagcaaagcggacttggagcagaactgaaatgtgcccagaaccaaaataagacttagaactgtacaggttggcccttcacctagttgactcagccctcgatagtctagagcccaccccctcctcaggaactcaagagctcagcatttataatgagcagttggtaatgagttgccctatgtgcttgtcgcaagcagtcacagagatgagccctattacttgatattcaggaacaaaggtacctgaacattctgataattatctcagcatacttgaggtttccttttttaagtgttcgaggttataacaagagacagccaaggacctacaagacagttgacttgattttgcacagtgtaacagcgcagttgcattctggccactttgaccttatagctcccaaatgatgagtttgtcatctttatgaactcatgacaggataataagcttgaagacctgctgtagttagatatgggctttaatccttcccatgcaccagtcagctgaacaaaagcataagccaaacatcctgtttaaactgtagaataaccagatattcccatcaggttaaagacttcatctagatgatgccccccagagatgcctttagtgtaagtagctggcttggggtatcagcaaatttcaggtatagttagataaacaggtacagggcctgcatactattaaaccatagtttgtggcacccgcttttctaactccacctgttagaagctatgtgtttgaaggaatgaatcagtgcagtataaataaaattcttttgtaaggagaagattaatcctggtttgcatgatttttttaaaaacaactctaaacatgatacgaaaaagtggatgaaagcaaatgttcccagattggatgtggggaaaatatagcaataattttttttttaagtctggcttacaatgtttgttatacaaaataatgaaatctgagttatgtactgtccattgtgtcagggctatgggctgattttatcaaaactcatcttgggactgaaaaattgtttggaatgccagaaataagaaagttgttctccagagctggaaacccatctttcgtttgtagtgtcactgttgtggctccaagctcagtgataggaaaggacggtggttacacaccagccttctgaacccaaggcccccagtattgttgtcagctgcctttaccatggcatttctttctctttctttttttcctgagatgaagtcttgctctgtcttgcccaggctggagtacagtagcgtgatctcagctcgctgcaacctctacctccctggttcaagtgattctgctgcgtcagcctcctgaggagctaggattacaggcgcatgccaccatacctggcttatttttgtattgttgtagagacagggtttcactttgttggccaggctggctggtctcgaactcctggcctcaagtgatccaccaccttgacctcccaaagtgctgggattacaggtgtgagccaccgtgcctggcctgacatttctttattgatctaacatgctccactctgctgctcctgcctaagatctggttatatgacactgaatgtggtgagtgggaatttaagcagtattcgcagtttgtgtgtgtgtgttttcttccttccagaagaatttttataggttgggcctgtccctaagctctttaaatagggtggacatcccactattctctgagccgtgtctattttgttgcacctttgagtctatgtattgagagagacagatagtatttttttaaactggggaagctgctntcctttcactatttctctaaaggttgagctgttaactaatgtaaattctggacctgcttctggtcctggcagtttatcttttgagaaacttgagtcttatctgccctgccattttcattaaatgccttctgaccttctgaatgttttgggtcccaagaatttttgacatcagatggggttgtttttattggtatccagttatgtttgcttgtctttccagatgggcccagttattagccatacatagtacattgatacacctccaccagcgggtgaggaaatgatggaaaaaggagtaagaagtggccattcgttttaatcattcctcctggatttgtcctcagtccccaactgccaagtaggatgtgtccatgtataaatgtgtggggcatgactaaagtaccacgtagctgttctttatatttatttacctagaaagatctggcaaagaactcaaagaaaattgtaccatttaatcagtaaatttgtcccctggtgctagcatggtgttatagaaagtggacaggctttagagttaagtgaatctgggttcatatgttagtgttgctattcattagctctatactgttgaacaaattgcttaaactatctaattttggggtttttttttccatctaaaatagggataataatatctacctcataggattattgtgagaattaaattaacttcactatagtagaaaatatcaactaccatccttttctctacttcccttgcccctcattaaagactaatacaagttagcatttcagatgtgtagatcattctttattccagttaaaagaacaaactttatctcatcagttctgaaactttaagatgcagtagcatcacctaaagtgcttttaaaatgcagattctcaggcctcaaccgtacaccacccccccacacacgtactaaatcaagaatatgtgcagaaggtactgggaatctacttgttaatatgtgctccaaatgattctgatgtaggtaattagccagccacactttgagaaccactgccttatctattctttacaaaaatgtacattgccaggtctttctttcctgtggatgctaactataggatatttaggttcctctgttctttgtctcccatagtggccccctttgcaaactccaaatacattatatttatttattcttgtgtcttttttcccccactagactgtgagctccttgagggccaggacttatctctgttcgcagtgccaaggacatggcctggaccatagaagatactcagttttttgttgaataaataggtaatatggatttcaaaaaaaaaatt

SEQ ID NO: 426401 - DNA, 3327 bp, Homo sapiens
  misc_feature (16)..(16): n is a, c, g, or t
  misc_feature (47)..(47): n is a, c, g, or t
  misc_feature (76)..(76): n is a, c, g, or t
  misc_feature (105)..(105): n is a, c, g, or t
  misc_feature (135)..(135): n is a, c, g, or t
  misc_feature (154)..(154): n is a, c, g, or t
  misc_feature (167)..(167): n is a, c, g, or t
  misc_feature (202)..(202): n is a, c, g, or t
  misc_feature (209)..(209): n is a, c, g, or t
  misc_feature (219)..(219): n is a, c, g, or t
  misc_feature (2010)..(2010): n is a, c, g, or t
cccaaagtatggtccnactttgtggaatgtaaagatttttaaggttngttggcccagaaaaaaaaaatacttccanaaaccccatagggttggaacccaggcggnttgtgcttttttctgaagcctatgggagtngacagagtgggaacccaanatgtttttaagantgctggacttaagaatcacgacttatagccaactnctttccncctaatgtgnctgaagggattcataatgatcacaattagcattaggtgtcatcagcgccatctgatggcgctgatgacaccagggttggcccttcacctagttgactcagccctcgatagtctagagcccaccccctcctcaggaactcaagagctcagcatttataatgagcagttggtaatgagttgccctatgtgcttgtcgcaagcagtcacagagatgagccctattacttgatattcaggaacaaaggtacctgaacattctgataattatctcagcatacttgaggtttccttttttaagtgttcgaggttataacaagagacagccaaggacctacaagacagttgacttgattttgcacagtgtaacagcgcagttgcattctggccactttgaccttatagctcccaaatgatgagtttgtcatctttatgaactcatgacaggataataagcttgaagacctgctgtagttagatatgggctttaatccttcccatgcaccagtcagctgaacaaaagcataagccaaacatcctgtttaaactgtagaataaccagatattcccatcaggttaaagacttcatctagatgatgccccccagagatgcctttagtgtaagtagctggcttggggtatcagcaaatttcaggtatagttagataaacaggtacagggcctgcatactattaaaccatagtttgtggcacccgcttttctaactccacctgttagaagctatgtgtttgaaggaatgaatcagtgcagtataaataaaattcttttgtaaggagaagattaatcctggtttgcatgatttttttaaaaacaactctaaacatgatacgaaaaagtggatgaaagcaaatgttcccagattggatgtggggaaaatatagcaataattttttttttaagtctggcttacaatgtttgttatacaaaataatgaaatctgagttatgtactgtccattgtgtcagggctatgggctgattttatcaaaactcatcttgggactgaaaaattgtttggaatgccagaaataagaaagttgttctccagagctggaaacccatctttcgtttgtagtgtcactgttgtggctccaagctcagtgataggaaaggacggtggttacacaccagccttctgaacccaaggcccccagtattgttgtcagctgcctttaccatggcatttctttctctttctttttttcctgagatgaagtcttgctctgtcttgcccaggctggagtacagtagcgtgatctcagctcgctgcaacctctacctccctggttcaagtgattctgctgcgtcagcctcctgaggagctaggattacaggcgcatgccaccatacctggcttatttttgtattgttgtagagacagggtttcactttgttggccaggctggctggtctcgaactcctggcctcaagtgatccaccaccttgacctcccaaagtgctgggattacaggtgtgagccaccgtgcctggcctgacatttctttattgatctaacatgctccactctgctgctcctgcctaagatctggttatatgacactgaatgtggtgagtgggaatttaagcagtattcgcagtttgtgtgtgtgtgttttcttccttccagaagaatttttataggttgggcctgtccctaagctctttaaatagggtggacatcccactattctctgagccgtgtctattttgttgcacctttgagtctatgtattgagagagacagatagtatttttttaaactggggaagctgctntcctttcactatttctctaaaggttgagctgttaactaatgtaaattctggacctgcttctggtcctggcagtttatcttttgagaaacttgagtcttatctgccctgccattttcattaaatgccttctgaccttctgaatgttttgggtcccaagaatttttgacatcagatggggttgtttttattggtatccagttatgtttgcttgtctttccagatgggcccagttattagccatacatagtacattgatacacctccaccagcgggtgaggaaatgatggaaaaaggagtaagaagtggccattcgttttaatcattcctcctggatttgtcctcagtccccaactgccaagtaggatgtgtccatgtataaatgtgtggggcatgactaaagtaccacgtagctgttctttatatttatttacctagaaagatctggcaaagaactcaaagaaaattgtaccatttaatcagtaaatttgtcccctggtgctagcatggtgttatagaaagtggacaggctttagagttaagtgaatctgggttcatatgttagtgttgctattcattagctctatactgttgaacaaattgcttaaactatctaattttggggtttttttttccatctaaaatagggataataatatctacctcataggattattgtgagaattaaattaacttcactatagtagaaaatatcaactaccatccttttctctacttcccttgcccctcattaaagactaatacaagttagcatttcagatgtgtagatcattctttattccagttaaaagaacaaactttatctcatcagttctgaaactttaagatgcagtagcatcacctaaagtgcttttaaaatgcagattctcaggcctcaaccgtacaccacccccccacacacgtactaaatcaagaatatgtgcagaaggtactgggaatctacttgttaatatgtgctccaaatgattctgatgtaggtaattagccagccacactttgagaaccactgccttatctattctttacaaaaatgtacattgccaggtctttctttcctgtggatgctaactataggatatttaggttcctctgttctttgtctcccatagtggccccctttgcaaactccaaatacattatatttatttattcttgtgtcttttttcccccactagactgtgagctccttgagggccaggacttatctctgttcgcagtgccaaggacatggcctggaccatagaagatactcagttttttgttgaataaataggtaatatggatttcaaaaaaaaaatt

SEQ ID NO: 426402 - DNA, 3034 bp, Homo sapiens
  misc_feature (1717)..(1717): n is a, c, g, or t
aggaactcaagagggggtgggctctagactatcgagggctgagcccaccccctcctcaggaactcaagagctcagcatttataatgagcagttggtaatgagttgccctatgtgcttgtcgcaagcagtcacagagatgagccctattacttgatattcaggaacaaaggtacctgaacattctgataattatctcagcatacttgaggtttccttttttaagtgttcgaggttataacaagagacagccaaggacctacaagacagttgacttgattttgcacagtgtaacagcgcagttgcattctggccactttgaccttatagctcccaaatgatgagtttgtcatctttatgaactcatgacaggataataagcttgaagacctgctgtagttagatatgggctttaatccttcccatgcaccagtcagctgaacaaaagcataagccaaacatcctgtttaaactgtagaataaccagatattcccatcaggttaaagacttcatctagatgatgccccccagagatgcctttagtgtaagtagctggcttggggtatcagcaaatttcaggtatagttagataaacaggtacagggcctgcatactattaaaccatagtttgtggcacccgcttttctaactccacctgttagaagctatgtgtttgaaggaatgaatcagtgcagtataaataaaattcttttgtaaggagaagattaatcctggtttgcatgatttttttaaaaacaactctaaacatgatacgaaaaagtggatgaaagcaaatgttcccagattggatgtggggaaaatatagcaataattttttttttaagtctggcttacaatgtttgttatacaaaataatgaaatctgagttatgtactgtccattgtgtcagggctatgggctgattttatcaaaactcatcttgggactgaaaaattgtttggaatgccagaaataagaaagttgttctccagagctggaaacccatctttcgtttgtagtgtcactgttgtggctccaagctcagtgataggaaaggacggtggttacacaccagccttctgaacccaaggcccccagtattgttgtcagctgcctttaccatggcatttctttctctttctttttttcctgagatgaagtcttgctctgtcttgcccaggctggagtacagtagcgtgatctcagctcgctgcaacctctacctccctggttcaagtgattctgctgcgtcagcctcctgaggagctaggattacaggcgcatgccaccatacctggcttatttttgtattgttgtagagacagggtttcactttgttggccaggctggctggtctcgaactcctggcctcaagtgatccaccaccttgacctcccaaagtgctgggattacaggtgtgagccaccgtgcctggcctgacatttctttattgatctaacatgctccactctgctgctcctgcctaagatctggttatatgacactgaatgtggtgagtgggaatttaagcagtattcgcagtttgtgtgtgtgtgttttcttccttccagaagaatttttataggttgggcctgtccctaagctctttaaatagggtggacatcccactattctctgagccgtgtctattttgttgcacctttgagtctatgtattgagagagacagatagtatttttttaaactggggaagctgctntcctttcactatttctctaaaggttgagctgttaactaatgtaaattctggacctgcttctggtcctggcagtttatcttttgagaaacttgagtcttatctgccctgccattttcattaaatgccttctgaccttctgaatgttttgggtcccaagaatttttgacatcagatggggttgtttttattggtatccagttatgtttgcttgtctttccagatgggcccagttattagccatacatagtacattgatacacctccaccagcgggtgaggaaatgatggaaaaaggagtaagaagtggccattcgttttaatcattcctcctggatttgtcctcagtccccaactgccaagtaggatgtgtccatgtataaatgtgtggggcatgactaaagtaccacgtagctgttctttatatttatttacctagaaagatctggcaaagaactcaaagaaaattgtaccatttaatcagtaaatttgtcccctggtgctagcatggtgttatagaaagtggacaggctttagagttaagtgaatctgggttcatatgttagtgttgctattcattagctctatactgttgaacaaattgcttaaactatctaattttggggtttttttttccatctaaaatagggataataatatctacctcataggattattgtgagaattaaattaacttcactatagtagaaaatatcaactaccatccttttctctacttcccttgcccctcattaaagactaatacaagttagcatttcagatgtgtagatcattctttattccagttaaaagaacaaactttatctcatcagttctgaaactttaagatgcagtagcatcacctaaagtgcttttaaaatgcagattctcaggcctcaaccgtacaccacccccccacacacgtactaaatcaagaatatgtgcagaaggtactgggaatctacttgttaatatgtgctccaaatgattctgatgtaggtaattagccagccacactttgagaaccactgccttatctattctttacaaaaatgtacattgccaggtctttctttcctgtggatgctaactataggatatttaggttcctctgttctttgtctcccatagtggccccctttgcaaactccaaatacattatatttatttattcttgtgtcttttttcccccactagactgtgagctccttgagggccaggacttatctctgttcgcagtgccaaggacatggcctggaccatagaagatactcagttttttgttgaataaataggtaatatggatttcaaaaaaaaaatt

SEQ ID NO: 426403 - DNA, 2863 bp, Homo sapiens
  misc_feature (1546)..(1546): n is a, c, g, or t
gcagccgctactactactaaatttgcgcccgtgcgacgtttccttttttaagtgttcgaggttataacaagagacagccaaggacctacaagacagttgacttgattttgcacagtgtaacagcgcagttgcattctggccactttgaccttatagctcccaaatgatgagtttgtcatctttatgaactcatgacaggataataagcttgaagacctgctgtagttagatatgggctttaatccttcccatgcaccagtcagctgaacaaaagcataagccaaacatcctgtttaaactgtagaataaccagatattcccatcaggttaaagacttcatctagatgatgccccccagagatgcctttagtgtaagtagctggcttggggtatcagcaaatttcaggtatagttagataaacaggtacagggcctgcatactattaaaccatagtttgtggcacccgcttttctaactccacctgttagaagctatgtgtttgaaggaatgaatcagtgcagtataaataaaattcttttgtaaggagaagattaatcctggtttgcatgatttttttaaaaacaactctaaacatgatacgaaaaagtggatgaaagcaaatgttcccagattggatgtggggaaaatatagcaataattttttttttaagtctggcttacaatgtttgttatacaaaataatgaaatctgagttatgtactgtccattgtgtcagggctatgggctgattttatcaaaactcatcttgggactgaaaaattgtttggaatgccagaaataagaaagttgttctccagagctggaaacccatctttcgtttgtagtgtcactgttgtggctccaagctcagtgataggaaaggacggtggttacacaccagccttctgaacccaaggcccccagtattgttgtcagctgcctttaccatggcatttctttctctttctttttttcctgagatgaagtcttgctctgtcttgcccaggctggagtacagtagcgtgatctcagctcgctgcaacctctacctccctggttcaagtgattctgctgcgtcagcctcctgaggagctaggattacaggcgcatgccaccatacctggcttatttttgtattgttgtagagacagggtttcactttgttggccaggctggctggtctcgaactcctggcctcaagtgatccaccaccttgacctcccaaagtgctgggattacaggtgtgagccaccgtgcctggcctgacatttctttattgatctaacatgctccactctgctgctcctgcctaagatctggttatatgacactgaatgtggtgagtgggaatttaagcagtattcgcagtttgtgtgtgtgtgttttcttccttccagaagaatttttataggttgggcctgtccctaagctctttaaatagggtggacatcccactattctctgagccgtgtctattttgttgcacctttgagtctatgtattgagagagacagatagtatttttttaaactggggaagctgctntcctttcactatttctctaaaggttgagctgttaactaatgtaaattctggacctgcttctggtcctggcagtttatcttttgagaaacttgagtcttatctgccctgccattttcattaaatgccttctgaccttctgaatgttttgggtcccaagaatttttgacatcagatggggttgtttttattggtatccagttatgtttgcttgtctttccagatgggcccagttattagccatacatagtacattgatacacctccaccagcgggtgaggaaatgatggaaaaaggagtaagaagtggccattcgttttaatcattcctcctggatttgtcctcagtccccaactgccaagtaggatgtgtccatgtataaatgtgtggggcatgactaaagtaccacgtagctgttctttatatttatttacctagaaagatctggcaaagaactcaaagaaaattgtaccatttaatcagtaaatttgtcccctggtgctagcatggtgttatagaaagtggacaggctttagagttaagtgaatctgggttcatatgttagtgttgctattcattagctctatactgttgaacaaattgcttaaactatctaattttggggtttttttttccatctaaaatagggataataatatctacctcataggattattgtgagaattaaattaacttcactatagtagaaaatatcaactaccatccttttctctacttcccttgcccctcattaaagactaatacaagttagcatttcagatgtgtagatcattctttattccagttaaaagaacaaactttatctcatcagttctgaaactttaagatgcagtagcatcacctaaagtgcttttaaaatgcagattctcaggcctcaaccgtacaccacccccccacacacgtactaaatcaagaatatgtgcagaaggtactgggaatctacttgttaatatgtgctccaaatgattctgatgtaggtaattagccagccacactttgagaaccactgccttatctattctttacaaaaatgtacattgccaggtctttctttcctgtggatgctaactataggatatttaggttcctctgttctttgtctcccatagtggccccctttgcaaactccaaatacattatatttatttattcttgtgtcttttttcccccactagactgtgagctccttgagggccaggacttatctctgttcgcagtgccaaggacatggcctggaccatagaagatactcagttttttgttgaataaataggtaatatggatttcaaaaaaaaaatt

SEQ ID NO: 426404 - DNA, 1640 bp, Homo sapiens
  misc_feature (323)..(323): n is a, c, g, or t
ccacgcgtcgcccacgcgtcgcccacgcgtcgtgcctggcctgacatttctttattgatctaacatgctccactctgctgctcctgcctaagatctggttatatgacactgaatgtggtgagtgggaatttaagcagtattcgcagtttgtgtgtgtgtgttttcttccttccagaagaatttttataggttgggcctgtccctaagctctttaaatagggtggacatcccactattctctgagccgtgtctattttgttgcacctttgagtctatgtattgagagagacagatagtatttttttaaactggggaagctgctntcctttcactatttctctaaaggttgagctgttaactaatgtaaattctggacctgcttctggtcctggcagtttatcttttgagaaacttgagtcttatctgccctgccattttcattaaatgccttctgaccttctgaatgttttgggtcccaagaatttttgacatcagatggggttgtttttattggtatccagttatgtttgcttgtctttccagatgggcccagttattagccatacatagtacattgatacacctccaccagcgggtgaggaaatgatggaaaaaggagtaagaagtggccattcgttttaatcattcctcctggatttgtcctcagtccccaactgccaagtaggatgtgtccatgtataaatgtgtggggcatgactaaagtaccacgtagctgttctttatatttatttacctagaaagatctggcaaagaactcaaagaaaattgtaccatttaatcagtaaatttgtcccctggtgctagcatggtgttatagaaagtggacaggctttagagttaagtgaatctgggttcatatgttagtgttgctattcattagctctatactgttgaacaaattgcttaaactatctaattttggggtttttttttccatctaaaatagggataataatatctacctcataggattattgtgagaattaaattaacttcactatagtagaaaatatcaactaccatccttttctctacttcccttgcccctcattaaagactaatacaagttagcatttcagatgtgtagatcattctttattccagttaaaagaacaaactttatctcatcagttctgaaactttaagatgcagtagcatcacctaaagtgcttttaaaatgcagattctcaggcctcaaccgtacaccacccccccacacacgtactaaatcaagaatatgtgcagaaggtactgggaatctacttgttaatatgtgctccaaatgattctgatgtaggtaattagccagccacactttgagaaccactgccttatctattctttacaaaaatgtacattgccaggtctttctttcctgtggatgctaactataggatatttaggttcctctgttctttgtctcccatagtggccccctttgcaaactccaaatacattatatttatttattcttgtgtcttttttcccccactagactgtgagctccttgagggccaggacttatctctgttcgcagtgccaaggacatggcctggaccatagaagatactcagttttttgttgaataaataggtaatatggatttcaaaaaaaaaatt

SEQ ID NO: 426405 - DNA, 851 bp, Homo sapiens
gggcgcgcgggccgcgggccgaggccgacgcgcctgaggaggaggaggaggcgggggcggccatggctgctgtggtggtggcggctgcgggtggcgcgggaccggcggtcctgcaggtggccggtctctaccggggcctgtgcgcggtgcgcagccgcgccctgggcctggggctcgtgtcacccgcgcagctgcgcgtcttcccagtgcgccccggctcgggccggcccgaggggggcgccgacggcagcggggtcggggccgaggccgagctccaggccaaccctttctacgaccgctaccgcgacaagatccagctgctgcgcaggtcagacccagctgcttttgagtcccgcctggagaaacgcagtgaatttcggaagcagccagtggggcattccaggcaaggtgattttatcaaatgtgtggaacagaagacagatgccttggggaaacagtctgtgaacagaggattcactaaggacaagactctcagttcaatctttaacattgagatggtaaaagaaaaaactgcagaagaaataaaacagatttggcagcaatattttgcagcaaaagatacagtctacgcagttattcctgcagaaaagtttgatttgatctggaaccgggctcagtcctgtccaacagtaagtttctggtgatcacgtaagggttgcttatcaatgttgccaaacaagtattttccagcccatcacgtcatattccatactgtctcacatgttatagtgctctgtttacttaataaagatgctcacatgttgattgtactaataagttatagtgctctgtttacttaataaagatgctcacacgttgattgtactaat

SEQ ID NO: 426406 - DNA, 849 bp, Homo sapiens
gggcgcgcgggccgcgggccgaggccgacgcgcctgaggaggaggaggaggcgggggcggccatggctgctgtggtggtggcggctgcgggtggcgcgggaccggcggtcctgcaggtggccggtctctaccggggcctgtgcgcggtgcgcagccgcgccctgggcctggggctcgtgtcacccgcgcagctgcgcgtcttcccagtgcgccccggctcgggccggcccgaggggggcgccgacggcagcggggtcggggccgaggccgagctccaggccaaccctttctacgaccgctaccgcgacaagatccagctgctgcgcaggtcagacccagctgcttttgagtcccgcctggagaaacgcagtgaatttcggaagcagccagtggggcattccaggcaaggtgattttatcaaatgtgtggaacagaagacagatgccttggggaaacagtctgtgaacagaggattcactaaggacaagactctcagttcaatctttaacattgagatggtaaaagaaaaaactgcagaagaaataaaacagatttggcagcaatattttgcagcaaaagatacagtctacgcagttattcctcagaaaagtttgatttgatctggaaacgggctcagcctggtcaacatactatgtgctcgccaaaagggaggtaatagattatgaggaaatggaaggactgagacacttactgagtataaaatagacgggggaagtgaccgcagtgataataatacgaataggagaaggtagttgactggaatgtcaatctagagaggcggtcacaattttatgtgaaatgtgggtccgtttttgagagttgttttcc

SEQ ID NO: 426407 - DNA, 1785 bp, Homo sapiens
gggcgcgcgggccgcgggccgaggccgacgcgcctgaggaggaggaggaggcgggggcggccatggctgctgtggtggtggcggctgcgggtggcgcgggaccggcggtcctgcaggtggccggtctctaccggggcctgtgcgcggtgcgcagccgcgccctgggcctggggctcgtgtcacccgcgcagctgcgcgtcttcccagtgcgccccggctcgggccggcccgaggggggcgccgacggcagcggggtcggggccgaggccgagctccaggccaaccctttctacgaccgctaccgcgacaagatccagctgctgcgcaggtcagacccagctgcttttgagtcccgcctggagaaacgcagtgaatttcggaagcagccagtggggcattccaggcaaggtgattttatcaaatgtgtggaacagaagacagatgccttggggaaacagtctgtgaacagaggattcactaaggacaagactctcagttcaatctttaacattgagatggtaaaagaaaaaactgcagaagaaataaaacagatttggcagcaatattttgcagcaaaagatacagtctacgcagttattcctgcagaaaagtttgatttgatctggaaccgggctcagtcctgtccaacatttctatgtgctctgccaagaagggaaggttatgagttttttgtaggacaatggacaggtactgaactccacttcactgcacttataaatattcagacccgaggggaagctgcagccagccagctgattttatatcactatcctgaacttaaggaagaaaagggcatagtgctgatgactgcagaaatggattccacatttctgaatgttgctgaggcacagtgcatcgccaaccaagttcagctcttctacgctactgatcggaaagagacctacgggttagtggagacctttaacctcagaccaaatgagttcaaatatatgtctgtcatcgctgaattggagcaaagcggacttggagcagaactgaaatgtgcccagaaccaaaataagacttagaactgtacaggttggcccttcacctagttgactcagccctcgatagtctagagcccaccccctcctcaggaactcaagagctcagcatttataatgagcagttggtaatgagttgccctatgtgcttgtcgcaagcagtcacagagatgagccctattacttgatattcaggaacaaaggtacctgaacattctgataattatctcagcatacttgaggtttccttttttaagtgttcgaggttataacaagagacagccaaggacctacaagacagttgacttgattttgcacagtgtaacagcgcagttgcattctggccactttgaccttatagctcccaaatgatgagtttgtcatctttatgaactcatgacaggataataagcttgaagacctgctgtagttagatatgggctttaatccttcccatgcaccagtcagctgaacaaaagcataagccaaacatcctgtttaaactgtagaataaccagatattcccatcaggttaaagacttcatctagatgatgccccccagagatgcctttagtgtaagtagctggcttggggtatcagcaaatttcaggtatagttagataaacaggtacagggcctgcatactattaaaccatagtttgtggcacccgcttttctaactccacctgttagaagctatgtgtttgaaggaatgaatcagtgcagtataaataaaattcttttgtaaggagaagatta

SEQ ID NO: 426408 - DNA, 4093 bp, Homo sapiens
  misc_feature (2776)..(2776): n is a, c, g, or t
gggcgcgcgggccgcgggccgaggccgacgcgcctgaggaggaggaggaggcgggggcggccatggctgctgtggtggtggcggctgcgggtggcgcgggaccggcggtcctgcaggtggccggtctctaccggggcctgtgcgcggtgcgcagccgcgccctgggcctggggctcgtgtcacccgcgcagctgcgcgtcttcccagtgcgccccggctcgggccggcccgaggggggcgccgacggcagcggggtcggggccgaggccgagctccaggccaaccctttctacgaccgctaccgcgacaagatccagctgctgcgcaggtcagacccagctgcttttgagtcccgcctggagaaacgcagtgaatttcggaagcagccagtggggcattccaggcaaggtgattttatcaaatgtgtggaacagaagacagatgccttggggaaacagtctgtgaacagaggattcactaaggacaagactctcagttcaatctttaacattgagatggtaaaagaaaaaactgcagaagaaataaaacagatttggcagcaatattttgcagcaaaagatacagtctacgcagttattcctgcagaaaagtttgatttgatctggaaccgggctcagtcctgtccaacatttctatgtgctctgccaagaagggaaggttatgagttttttgtaggacaatggacaggtactgaactccacttcactgcacttataaatattcagacccgaggggaagctgcagccagccagctgattttatatcactatcctgaacttaaggaagaaaagggcatagtgctgatgactgcagaaatggattccacatttctgaatgttgctgaggcacagtgcatcgccaaccaagttcagctcttctacgctactgatcggaaagagacctacgggttagtggagacctttaacctcagaccaaatgagttcaaatatatgtctgtcatcgctgaattggagcaaagcggacttggagcagaactgaaatgtgcccagaaccaaaataagacttagaactgtacaggttggcccttcacctagttgactcagccctcgatagtctagagcccaccccctcctcaggaactcaagagctcagcatttataatgagcagttggtaatgagttgccctatgtgcttgtcgcaagcagtcacagagatgagccctattacttgatattcaggaacaaaggtacctgaacattctgataattatctcagcatacttgaggtttccttttttaagtgttcgaggttataacaagagacagccaaggacctacaagacagttgacttgattttgcacagtgtaacagcgcagttgcattctggccactttgaccttatagctcccaaatgatgagtttgtcatctttatgaactcatgacaggataataagcttgaagacctgctgtagttagatatgggctttaatccttcccatgcaccagtcagctgaacaaaagcataagccaaacatcctgtttaaactgtagaataaccagatattcccatcaggttaaagacttcatctagatgatgccccccagagatgcctttagtgtaagtagctggcttggggtatcagcaaatttcaggtatagttagataaacaggtacagggcctgcatactattaaaccatagtttgtggcacccgcttttctaactccacctgttagaagctatgtgtttgaaggaatgaatcagtgcagtataaataaaattcttttgtaaggagaagattaatcctggtttgcatgatttttttaaaaacaactctaaacatgatacgaaaaagtggatgaaagcaaatgttcccagattggatgtggggaaaatatagcaataattttttttttaagtctggcttacaatgtttgttatacaaaataatgaaatctgagttatgtactgtccattgtgtcagggctatgggctgattttatcaaaactcatcttgggactgaaaaattgtttggaatgccagaaataagaaagttgttctccagagctggaaacccatctttcgtttgtagtgtcactgttgtggctccaagctcagtgataggaaaggacggtggttacacaccagccttctgaacccaaggcccccagtattgttgtcagctgcctttaccatggcatttctttctctttctttttttcctgagatgaagtcttgctctgtcttgcccaggctggagtacagtagcgtgatctcagctcgctgcaacctctacctccctggttcaagtgattctgctgcgtcagcctcctgaggagctaggattacaggcgcatgccaccatacctggcttatttttgtattgttgtagagacagggtttcactttgttggccaggctggctggtctcgaactcctggcctcaagtgatccaccaccttgacctcccaaagtgctgggattacaggtgtgagccaccgtgcctggcctgacatttctttattgatctaacatgctccactctgctgctcctgcctaagatctggttatatgacactgaatgtggtgagtgggaatttaagcagtattcgcagtttgtgtgtgtgtgttttcttccttccagaagaatttttataggttgggcctgtccctaagctctttaaatagggtggacatcccactattctctgagccgtgtctattttgttgcacctttgagtctatgtattgagagagacagatagtatttttttaaactggggaagctgctntcctttcactatttctctaaaggttgagctgttaactaatgtaaattctggacctgcttctggtcctggcagtttatcttttgagaaacttgagtcttatctgccctgccattttcattaaatgccttctgaccttctgaatgttttgggtcccaagaatttttgacatcagatggggttgtttttattggtatccagttatgtttgcttgtctttccagatgggcccagttattagccatacatagtacattgatacacctccaccagcgggtgaggaaatgatggaaaaaggagtaagaagtggccattcgttttaatcattcctcctggatttgtcctcagtccccaactgccaagtaggatgtgtccatgtataaatgtgtggggcatgactaaagtaccacgtagctgttctttatatttatttacctagaaagatctggcaaagaactcaaagaaaattgtaccatttaatcagtaaatttgtcccctggtgctagcatggtgttatagaaagtggacaggctttagagttaagtgaatctgggttcatatgttagtgttgctattcattagctctatactgttgaacaaattgcttaaactatctaattttggggtttttttttccatctaaaatagggataataatatctacctcataggattattgtgagaattaaattaacttcactatagtagaaaatatcaactaccatccttttctctacttcccttgcccctcattaaagactaatacaagttagcatttcagatgtgtagatcattctttattccagttaaaagaacaaactttatctcatcagttctgaaactttaagatgcagtagcatcacctaaagtgcttttaaaatgcagattctcaggcctcaaccgtacaccacccccccacacacgtactaaatcaagaatatgtgcagaaggtactgggaatctacttgttaatatgtgctccaaatgattctgatgtaggtaattagccagccacactttgagaaccactgccttatctattctttacaaaaatgtacattgccaggtctttctttcctgtggatgctaactataggatatttaggttcctctgttctttgtctcccatagtggccccctttgcaaactccaaatacattatatttatttattcttgtgtcttttttcccccactagactgtgagctccttgagggccaggacttatctctgttcgcagtgccaaggacatggcctggaccatagaagatactcagttttttgttgaataaataggtaatatggatttcaaaaaaaaaatt

SEQ ID NO: 426409 - DNA, 3877 bp, Homo sapiens
  misc_feature (2560)..(2560): n is a, c, g, or t
ttctcaggtatccaagctaagagagaaactccagctgatcagtgctcttacaaacaaacctgagagcaacaggcctccagagaccgccgatgaagagcaagtagagagtttcacatcaaagccatcagcattgccaaaattttcacagtttcttggagacccagttgagaaagctgcccaactaagacctatctccctaccaggagtttctagcactgaagacagatgccttggggaaacagtctgtgaacagaggattcactaaggacaagactctcagttcaatctttaacattgagatggtaaaagaaaaaactgcagaagaaataaaacagatttggcagcaatattttgcagcaaaagatacagtctacgcagttattcctgcagaaaagtttgatttgatctggaaccgggctcagtcctgtccaacatttctatgtgctctgccaagaagggaaggttatgagttttttgtaggacaatggacaggtactgaactccacttcactgcacttataaatattcagacccgaggggaagctgcagccagccagctgattttatatcactatcctgaacttaaggaagaaaagggcatagtgctgatgactgcagaaatggattccacatttctgaatgttgctgaggcacagtgcatcgccaaccaagttcagctcttctacgctactgatcggaaagagacctacgggttagtggagacctttaacctcagaccaaatgagttcaaatatatgtctgtcatcgctgaattggagcaaagcggacttggagcagaactgaaatgtgcccagaaccaaaataagacttagaactgtacaggttggcccttcacctagttgactcagccctcgatagtctagagcccaccccctcctcaggaactcaagagctcagcatttataatgagcagttggtaatgagttgccctatgtgcttgtcgcaagcagtcacagagatgagccctattacttgatattcaggaacaaaggtacctgaacattctgataattatctcagcatacttgaggtttccttttttaagtgttcgaggttataacaagagacagccaaggacctacaagacagttgacttgattttgcacagtgtaacagcgcagttgcattctggccactttgaccttatagctcccaaatgatgagtttgtcatctttatgaactcatgacaggataataagcttgaagacctgctgtagttagatatgggctttaatccttcccatgcaccagtcagctgaacaaaagcataagccaaacatcctgtttaaactgtagaataaccagatattcccatcaggttaaagacttcatctagatgatgccccccagagatgcctttagtgtaagtagctggcttggggtatcagcaaatttcaggtatagttagataaacaggtacagggcctgcatactattaaaccatagtttgtggcacccgcttttctaactccacctgttagaagctatgtgtttgaaggaatgaatcagtgcagtataaataaaattcttttgtaaggagaagattaatcctggtttgcatgatttttttaaaaacaactctaaacatgatacgaaaaagtggatgaaagcaaatgttcccagattggatgtggggaaaatatagcaataattttttttttaagtctggcttacaatgtttgttatacaaaataatgaaatctgagttatgtactgtccattgtgtcagggctatgggctgattttatcaaaactcatcttgggactgaaaaattgtttggaatgccagaaataagaaagttgttctccagagctggaaacccatctttcgtttgtagtgtcactgttgtggctccaagctcagtgataggaaaggacggtggttacacaccagccttctgaacccaaggcccccagtattgttgtcagctgcctttaccatggcatttctttctctttctttttttcctgagatgaagtcttgctctgtcttgcccaggctggagtacagtagcgtgatctcagctcgctgcaacctctacctccctggttcaagtgattctgctgcgtcagcctcctgaggagctaggattacaggcgcatgccaccatacctggcttatttttgtattgttgtagagacagggtttcactttgttggccaggctggctggtctcgaactcctggcctcaagtgatccaccaccttgacctcccaaagtgctgggattacaggtgtgagccaccgtgcctggcctgacatttctttattgatctaacatgctccactctgctgctcctgcctaagatctggttatatgacactgaatgtggtgagtgggaatttaagcagtattcgcagtttgtgtgtgtgtgttttcttccttccagaagaatttttataggttgggcctgtccctaagctctttaaatagggtggacatcccactattctctgagccgtgtctattttgttgcacctttgagtctatgtattgagagagacagatagtatttttttaaactggggaagctgctntcctttcactatttctctaaaggttgagctgttaactaatgtaaattctggacctgcttctggtcctggcagtttatcttttgagaaacttgagtcttatctgccctgccattttcattaaatgccttctgaccttctgaatgttttgggtcccaagaatttttgacatcagatggggttgtttttattggtatccagttatgtttgcttgtctttccagatgggcccagttattagccatacatagtacattgatacacctccaccagcgggtgaggaaatgatggaaaaaggagtaagaagtggccattcgttttaatcattcctcctggatttgtcctcagtccccaactgccaagtaggatgtgtccatgtataaatgtgtggggcatgactaaagtaccacgtagctgttctttatatttatttacctagaaagatctggcaaagaactcaaagaaaattgtaccatttaatcagtaaatttgtcccctggtgctagcatggtgttatagaaagtggacaggctttagagttaagtgaatctgggttcatatgttagtgttgctattcattagctctatactgttgaacaaattgcttaaactatctaattttggggtttttttttccatctaaaatagggataataatatctacctcataggattattgtgagaattaaattaacttcactatagtagaaaatatcaactaccatccttttctctacttcccttgcccctcattaaagactaatacaagttagcatttcagatgtgtagatcattctttattccagttaaaagaacaaactttatctcatcagttctgaaactttaagatgcagtagcatcacctaaagtgcttttaaaatgcagattctcaggcctcaaccgtacaccacccccccacacacgtactaaatcaagaatatgtgcagaaggtactgggaatctacttgttaatatgtgctccaaatgattctgatgtaggtaattagccagccacactttgagaaccactgccttatctattctttacaaaaatgtacattgccaggtctttctttcctgtggatgctaactataggatatttaggttcctctgttctttgtctcccatagtggccccctttgcaaactccaaatacattatatttatttattcttgtgtcttttttcccccactagactgtgagctccttgagggccaggacttatctctgttcgcagtgccaaggacatggcctggaccatagaagatactcagttttttgttgaataaataggtaatatggatttcaaaaaaaaaatt

SEQ ID NO: 426410 - DNA, 4042 bp, Homo sapiens
  misc_feature (2725)..(2725): n is a, c, g, or t
gggcgcgcgggccgcgggccgaggccgacgcgcctgaggaggaggaggaggcgggggcggccatggctgctgtggtggtggcggctgcgggtggcgcgggaccggcggtcctgcaggtggccggtctctaccggggcctgtgcgcggtgcgcagccgcgccctgggcctggggctcgtgtcacccgcgcagctgcgcgtcttcccagtgcgccccggctcgggccggcccgaggggggcgccgacggcagcggggtcggggccgaggccgagctccaggccaaccctttctacgaccgctaccgcgacaagatccagctgctgcgcaggtcagacccagctgcttttgagtcccgcctggagaaacgcagtgaatttcggaagcagccagtggggcattccaggcaaggtgattttatcaaatgtgtggaacagaagacagatgccttggggaaacagtctgtgaacagaggattcactaaggacaagactctcagttcaatctttaacattgagatggtaaaagaaaaaactgcagaagaaataaaacaggcagaaaagtttgatttgatctggaaccgggctcagtcctgtccaacatttctatgtgctctgccaagaagggaaggttatgagttttttgtaggacaatggacaggtactgaactccacttcactgcacttataaatattcagacccgaggggaagctgcagccagccagctgattttatatcactatcctgaacttaaggaagaaaagggcatagtgctgatgactgcagaaatggattccacatttctgaatgttgctgaggcacagtgcatcgccaaccaagttcagctcttctacgctactgatcggaaagagacctacgggttagtggagacctttaacctcagaccaaatgagttcaaatatatgtctgtcatcgctgaattggagcaaagcggacttggagcagaactgaaatgtgcccagaaccaaaataagacttagaactgtacaggttggcccttcacctagttgactcagccctcgatagtctagagcccaccccctcctcaggaactcaagagctcagcatttataatgagcagttggtaatgagttgccctatgtgcttgtcgcaagcagtcacagagatgagccctattacttgatattcaggaacaaaggtacctgaacattctgataattatctcagcatacttgaggtttccttttttaagtgttcgaggttataacaagagacagccaaggacctacaagacagttgacttgattttgcacagtgtaacagcgcagttgcattctggccactttgaccttatagctcccaaatgatgagtttgtcatctttatgaactcatgacaggataataagcttgaagacctgctgtagttagatatgggctttaatccttcccatgcaccagtcagctgaacaaaagcataagccaaacatcctgtttaaactgtagaataaccagatattcccatcaggttaaagacttcatctagatgatgccccccagagatgcctttagtgtaagtagctggcttggggtatcagcaaatttcaggtatagttagataaacaggtacagggcctgcatactattaaaccatagtttgtggcacccgcttttctaactccacctgttagaagctatgtgtttgaaggaatgaatcagtgcagtataaataaaattcttttgtaaggagaagattaatcctggtttgcatgatttttttaaaaacaactctaaacatgatacgaaaaagtggatgaaagcaaatgttcccagattggatgtggggaaaatatagcaataattttttttttaagtctggcttacaatgtttgttatacaaaataatgaaatctgagttatgtactgtccattgtgtcagggctatgggctgattttatcaaaactcatcttgggactgaaaaattgtttggaatgccagaaataagaaagttgttctccagagctggaaacccatctttcgtttgtagtgtcactgttgtggctccaagctcagtgataggaaaggacggtggttacacaccagccttctgaacccaaggcccccagtattgttgtcagctgcctttaccatggcatttctttctctttctttttttcctgagatgaagtcttgctctgtcttgcccaggctggagtacagtagcgtgatctcagctcgctgcaacctctacctccctggttcaagtgattctgctgcgtcagcctcctgaggagctaggattacaggcgcatgccaccatacctggcttatttttgtattgttgtagagacagggtttcactttgttggccaggctggctggtctcgaactcctggcctcaagtgatccaccaccttgacctcccaaagtgctgggattacaggtgtgagccaccgtgcctggcctgacatttctttattgatctaacatgctccactctgctgctcctgcctaagatctggttatatgacactgaatgtggtgagtgggaatttaagcagtattcgcagtttgtgtgtgtgtgttttcttccttccagaagaatttttataggttgggcctgtccctaagctctttaaatagggtggacatcccactattctctgagccgtgtctattttgttgcacctttgagtctatgtattgagagagacagatagtatttttttaaactggggaagctgctntcctttcactatttctctaaaggttgagctgttaactaatgtaaattctggacctgcttctggtcctggcagtttatcttttgagaaacttgagtcttatctgccctgccattttcattaaatgccttctgaccttctgaatgttttgggtcccaagaatttttgacatcagatggggttgtttttattggtatccagttatgtttgcttgtctttccagatgggcccagttattagccatacatagtacattgatacacctccaccagcgggtgaggaaatgatggaaaaaggagtaagaagtggccattcgttttaatcattcctcctggatttgtcctcagtccccaactgccaagtaggatgtgtccatgtataaatgtgtggggcatgactaaagtaccacgtagctgttctttatatttatttacctagaaagatctggcaaagaactcaaagaaaattgtaccatttaatcagtaaatttgtcccctggtgctagcatggtgttatagaaagtggacaggctttagagttaagtgaatctgggttcatatgttagtgttgctattcattagctctatactgttgaacaaattgcttaaactatctaattttggggtttttttttccatctaaaatagggataataatatctacctcataggattattgtgagaattaaattaacttcactatagtagaaaatatcaactaccatccttttctctacttcccttgcccctcattaaagactaatacaagttagcatttcagatgtgtagatcattctttattccagttaaaagaacaaactttatctcatcagttctgaaactttaagatgcagtagcatcacctaaagtgcttttaaaatgcagattctcaggcctcaaccgtacaccacccccccacacacgtactaaatcaagaatatgtgcagaaggtactgggaatctacttgttaatatgtgctccaaatgattctgatgtaggtaattagccagccacactttgagaaccactgccttatctattctttacaaaaatgtacattgccaggtctttctttcctgtggatgctaactataggatatttaggttcctctgttctttgtctcccatagtggccccctttgcaaactccaaatacattatatttatttattcttgtgtcttttttcccccactagactgtgagctccttgagggccaggacttatctctgttcgcagtgccaaggacatggcctggaccatagaagatactcagttttttgttgaataaataggtaatatggatttcaaaaaaaaaatt

SEQ ID NO: 426411 - DNA, 3553 bp, Homo sapiens
  misc_feature (2236)..(2236): n is a, c, g, or t
gtgatagtggccttttgtgttttactatgtgtaggttaactttattcttttccaacctacaggcagaaaagtttgatttgatctggaaccgggctcagtcctgtccaacatttctatgtgctctgccaagaagggaaggttatgagttttttgtaggacaatggacaggtactgaactccacttcactgcacttataaatattcagacccgaggggaagctgcagccagccagctgattttatatcactatcctgaacttaaggaagaaaagggcatagtgctgatgactgcagaaatggattccacatttctgaatgttgctgaggcacagtgcatcgccaaccaagttcagctcttctacgctactgatcggaaagagacctacgggttagtggagacctttaacctcagaccaaatgagttcaaatatatgtctgtcatcgctgaattggagcaaagcggacttggagcagaactgaaatgtgcccagaaccaaaataagacttagaactgtacaggttggcccttcacctagttgactcagccctcgatagtctagagcccaccccctcctcaggaactcaagagctcagcatttataatgagcagttggtaatgagttgccctatgtgcttgtcgcaagcagtcacagagatgagccctattacttgatattcaggaacaaaggtacctgaacattctgataattatctcagcatacttgaggtttccttttttaagtgttcgaggttataacaagagacagccaaggacctacaagacagttgacttgattttgcacagtgtaacagcgcagttgcattctggccactttgaccttatagctcccaaatgatgagtttgtcatctttatgaactcatgacaggataataagcttgaagacctgctgtagttagatatgggctttaatccttcccatgcaccagtcagctgaacaaaagcataagccaaacatcctgtttaaactgtagaataaccagatattcccatcaggttaaagacttcatctagatgatgccccccagagatgcctttagtgtaagtagctggcttggggtatcagcaaatttcaggtatagttagataaacaggtacagggcctgcatactattaaaccatagtttgtggcacccgcttttctaactccacctgttagaagctatgtgtttgaaggaatgaatcagtgcagtataaataaaattcttttgtaaggagaagattaatcctggtttgcatgatttttttaaaaacaactctaaacatgatacgaaaaagtggatgaaagcaaatgttcccagattggatgtggggaaaatatagcaataattttttttttaagtctggcttacaatgtttgttatacaaaataatgaaatctgagttatgtactgtccattgtgtcagggctatgggctgattttatcaaaactcatcttgggactgaaaaattgtttggaatgccagaaataagaaagttgttctccagagctggaaacccatctttcgtttgtagtgtcactgttgtggctccaagctcagtgataggaaaggacggtggttacacaccagccttctgaacccaaggcccccagtattgttgtcagctgcctttaccatggcatttctttctctttctttttttcctgagatgaagtcttgctctgtcttgcccaggctggagtacagtagcgtgatctcagctcgctgcaacctctacctccctggttcaagtgattctgctgcgtcagcctcctgaggagctaggattacaggcgcatgccaccatacctggcttatttttgtattgttgtagagacagggtttcactttgttggccaggctggctggtctcgaactcctggcctcaagtgatccaccaccttgacctcccaaagtgctgggattacaggtgtgagccaccgtgcctggcctgacatttctttattgatctaacatgctccactctgctgctcctgcctaagatctggttatatgacactgaatgtggtgagtgggaatttaagcagtattcgcagtttgtgtgtgtgtgttttcttccttccagaagaatttttataggttgggcctgtccctaagctctttaaatagggtggacatcccactattctctgagccgtgtctattttgttgcacctttgagtctatgtattgagagagacagatagtatttttttaaactggggaagctgctntcctttcactatttctctaaaggttgagctgttaactaatgtaaattctggacctgcttctggtcctggcagtttatcttttgagaaacttgagtcttatctgccctgccattttcattaaatgccttctgaccttctgaatgttttgggtcccaagaatttttgacatcagatggggttgtttttattggtatccagttatgtttgcttgtctttccagatgggcccagttattagccatacatagtacattgatacacctccaccagcgggtgaggaaatgatggaaaaaggagtaagaagtggccattcgttttaatcattcctcctggatttgtcctcagtccccaactgccaagtaggatgtgtccatgtataaatgtgtggggcatgactaaagtaccacgtagctgttctttatatttatttacctagaaagatctggcaaagaactcaaagaaaattgtaccatttaatcagtaaatttgtcccctggtgctagcatggtgttatagaaagtggacaggctttagagttaagtgaatctgggttcatatgttagtgttgctattcattagctctatactgttgaacaaattgcttaaactatctaattttggggtttttttttccatctaaaatagggataataatatctacctcataggattattgtgagaattaaattaacttcactatagtagaaaatatcaactaccatccttttctctacttcccttgcccctcattaaagactaatacaagttagcatttcagatgtgtagatcattctttattccagttaaaagaacaaactttatctcatcagttctgaaactttaagatgcagtagcatcacctaaagtgcttttaaaatgcagattctcaggcctcaaccgtacaccacccccccacacacgtactaaatcaagaatatgtgcagaaggtactgggaatctacttgttaatatgtgctccaaatgattctgatgtaggtaattagccagccacactttgagaaccactgccttatctattctttacaaaaatgtacattgccaggtctttctttcctgtggatgctaactataggatatttaggttcctctgttctttgtctcccatagtggccccctttgcaaactccaaatacattatatttatttattcttgtgtcttttttcccccactagactgtgagctccttgagggccaggacttatctctgttcgcagtgccaaggacatggcctggaccatagaagatactcagttttttgttgaataaataggtaatatggatttcaaaaaaaaaatt

SEQ ID NO: 426412 - DNA, 3770 bp, Homo sapiens
  misc_feature (2453)..(2453): n is a, c, g, or t
gggcgcgcgggccgcgggccgaggccgacgcgcctgaggaggaggaggaggcgggggcggccatggctgctgtggtggtggcggctgcgggtggcgcgggaccggcggtcctgcaggtggccggtctctaccggggcctgtgcgcggtgcgcagccgcgccctgggcctggggctcgtgtcacccgcgcagctgcgcgtcttcccagtgcgccccggctcgggccggcccgaggggggcgccgacggcagcggggtcggggccgaggccgagctccaggccaaccctttctacgaccgctaccgcgacaagatccagctgctgcgcaggtcagacccagctgcttttgagtcccgcctggagaaacgcagtgaatttcggaagcagccagtggggcattccaggcaaggtgattttatcaaatgtgtggaacagaagacagatgccttggggaaacagtctgtgaacagaggattcactaaggacaagactctcagttcaatctttaacattgagatggtaaaagaaaaaaaatgttgctgaggcacagtgcatcgccaaccaagttcagctcttctacgctactgatcggaaagagacctacgggttagtggagacctttaacctcagaccaaatgagttcaaatatatgtctgtcatcgctgaattggagcaaagcggacttggagcagaactgaaatgtgcccagaaccaaaataagacttagaactgtacaggttggcccttcacctagttgactcagccctcgatagtctagagcccaccccctcctcaggaactcaagagctcagcatttataatgagcagttggtaatgagttgccctatgtgcttgtcgcaagcagtcacagagatgagccctattacttgatattcaggaacaaaggtacctgaacattctgataattatctcagcatacttgaggtttccttttttaagtgttcgaggttataacaagagacagccaaggacctacaagacagttgacttgattttgcacagtgtaacagcgcagttgcattctggccactttgaccttatagctcccaaatgatgagtttgtcatctttatgaactcatgacaggataataagcttgaagacctgctgtagttagatatgggctttaatccttcccatgcaccagtcagctgaacaaaagcataagccaaacatcctgtttaaactgtagaataaccagatattcccatcaggttaaagacttcatctagatgatgccccccagagatgcctttagtgtaagtagctggcttggggtatcagcaaatttcaggtatagttagataaacaggtacagggcctgcatactattaaaccatagtttgtggcacccgcttttctaactccacctgttagaagctatgtgtttgaaggaatgaatcagtgcagtataaataaaattcttttgtaaggagaagattaatcctggtttgcatgatttttttaaaaacaactctaaacatgatacgaaaaagtggatgaaagcaaatgttcccagattggatgtggggaaaatatagcaataattttttttttaagtctggcttacaatgtttgttatacaaaataatgaaatctgagttatgtactgtccattgtgtcagggctatgggctgattttatcaaaactcatcttgggactgaaaaattgtttggaatgccagaaataagaaagttgttctccagagctggaaacccatctttcgtttgtagtgtcactgttgtggctccaagctcagtgataggaaaggacggtggttacacaccagccttctgaacccaaggcccccagtattgttgtcagctgcctttaccatggcatttctttctctttctttttttcctgagatgaagtcttgctctgtcttgcccaggctggagtacagtagcgtgatctcagctcgctgcaacctctacctccctggttcaagtgattctgctgcgtcagcctcctgaggagctaggattacaggcgcatgccaccatacctggcttatttttgtattgttgtagagacagggtttcactttgttggccaggctggctggtctcgaactcctggcctcaagtgatccaccaccttgacctcccaaagtgctgggattacaggtgtgagccaccgtgcctggcctgacatttctttattgatctaacatgctccactctgctgctcctgcctaagatctggttatatgacactgaatgtggtgagtgggaatttaagcagtattcgcagtttgtgtgtgtgtgttttcttccttccagaagaatttttataggttgggcctgtccctaagctctttaaatagggtggacatcccactattctctgagccgtgtctattttgttgcacctttgagtctatgtattgagagagacagatagtatttttttaaactggggaagctgctntcctttcactatttctctaaaggttgagctgttaactaatgtaaattctggacctgcttctggtcctggcagtttatcttttgagaaacttgagtcttatctgccctgccattttcattaaatgccttctgaccttctgaatgttttgggtcccaagaatttttgacatcagatggggttgtttttattggtatccagttatgtttgcttgtctttccagatgggcccagttattagccatacatagtacattgatacacctccaccagcgggtgaggaaatgatggaaaaaggagtaagaagtggccattcgttttaatcattcctcctggatttgtcctcagtccccaactgccaagtaggatgtgtccatgtataaatgtgtggggcatgactaaagtaccacgtagctgttctttatatttatttacctagaaagatctggcaaagaactcaaagaaaattgtaccatttaatcagtaaatttgtcccctggtgctagcatggtgttatagaaagtggacaggctttagagttaagtgaatctgggttcatatgttagtgttgctattcattagctctatactgttgaacaaattgcttaaactatctaattttggggtttttttttccatctaaaatagggataataatatctacctcataggattattgtgagaattaaattaacttcactatagtagaaaatatcaactaccatccttttctctacttcccttgcccctcattaaagactaatacaagttagcatttcagatgtgtagatcattctttattccagttaaaagaacaaactttatctcatcagttctgaaactttaagatgcagtagcatcacctaaagtgcttttaaaatgcagattctcaggcctcaaccgtacaccacccccccacacacgtactaaatcaagaatatgtgcagaaggtactgggaatctacttgttaatatgtgctccaaatgattctgatgtaggtaattagccagccacactttgagaaccactgccttatctattctttacaaaaatgtacattgccaggtctttctttcctgtggatgctaactataggatatttaggttcctctgttctttgtctcccatagtggccccctttgcaaactccaaatacattatatttatttattcttgtgtcttttttcccccactagactgtgagctccttgagggccaggacttatctctgttcgcagtgccaaggacatggcctggaccatagaagatactcagttttttgttgaataaataggtaatatggatttcaaaaaaaaaatt

SEQ ID NO: 426413 - DNA, 2872 bp, Homo sapiens
ccctgacagacccgtgcggtagcaacagcggcggcggccgcggcggctggccggactcaggtgtttcggacgctattgcccttcgcgccagccgtcgagtgggcagcagcgggactcagccgggcgccaggttcctgccaggcagcgccgggaagcgcgggcggccgagaactccttcctgctacttcgcccagcgccgctgcttcggcttcccagcgaagtgggagaccttcctccctgtttgcagacgtccgtgggagacccttattttttccaccgctaaggttaagagattctggaatagaagcgtcgaaggagatcaagtgaaccttctacaactcctcggatgtcgccagtctccctttcggggcggaagactacgtttgagcatctcactgaggtgcaggaatggaagaacccaccttgcagcttttctgcagtgtggcttgcctgatctacccctaggaatgaagaggaggcttgtaataatccgatgaagtacagatgttgaagaggatatcgcaggacctaaacttgtgatcgtttgggggaggtcacacacgtttctgagtgggaatggatgggcgtgaatgacgtgccctcttaaaaagcacaacaatcctttaagaggagcaaaattgagttttcccattttggccaagattttgaagacagttcaatgtattctacatttgacataagatgagaactttctaaagtattctctccaagagcgtaaacgatgactaccccagccctgctgcccctctctggacgtaggataccacctctgaacctggggccgccttccttcccacatcacagggctaccttgagactttctgagaagtttattcttctccttattcttagtgccttcatcactctgtgttttggggcattctttttccttccagactcttcaaaacacaaacgctttgatttgggtttagaagatgtgttaattccacatgtagatgccggtaaaggggctaaaaaccccggagtcttcctgatccatggacccgatgaacatagacacaggaagttcacaaatgggtgctaccatagtagatgctttggataccctttatatcatgggacttcatgatgaattcctagatgggcaaagatggattgaagacaaccttgatttcagtgtgaattcagaggtgtctgtgtttgaagtcaacattcgatttattggaggcctacttgcagcatattacctatcaggagaggagatattcaagattaaagcagtgcaattggctgagaaactccttcctgcctttaacacacctactgggattccttgggcaatggtgaatttgaaaagtggagtagggcgaaactggggctgggcatctgcaggtagcagcattctggctgaatttggtacactacatatggagttcatccacctcagctacttgacaggggacctgacttactacaaaaaggttatgcacattcggaaactacttcagaaaatggatcgtccaaatggtctttatccaaattatttgaaccccagaacagggcgctggggtcagtatcatacatctgtcggtggcctgggagacagtttttatgaatacttactgaaagcatggttgatgtcagataaaacagaccatgaggcaagaaagatgtatgatgatgctattgaggctatagaaaaacatcttattaagaagtctcgtggaggtcttacctttattggagaatggaagaatgggcacttggaaaaaaagatggggcatttggcctgctttgctgggggaatgtttgcactaggagcagatggttccagagcagataaagctggtcattatttagagctaggggcagaaattgcacgtacttgtcatgagtcatatgacagaactgcattaaagctaggtcctgaatcattgcggagtatgcagtcccaggcttttcgaattagtcaaaacactggccccccaccaattgaccgtcaaaagagattatcttacccaccagttcagagcatcccaacaggaaatggtattccatcaagggacagtgaaaatacttgtcaccaaagtttcatgcagagcttacttgcccctcacctcagtgatcaggtcattgggagccagaggtcactctcagaacatcagaggaatacacagtgtggtccatcctctgcaattgaatataattgtcccccaactcatgaaaatgtccatattagaagagagagtgagagtcagaatagggaaagttgtgacatgtcgttaggtgcaattaacaccaggaacagcaccttgaatattcctttttcaagttcctcttcctcaggagatattcaaggtcgaaacacaagccccaatgtttctgtacagaaatccaatcccatgaggattactgagagtcatgccaccaagggccacatgaaccctccagtcacaaccaacatgcatggggttgcaaggccagcgttgccacatccatctgtgtctcatggaaatggcgatcaaggccctgctgtacgtcaagctaattcttcagttccccagagatcaaggcatcccctgcaagacagcagtggttccaaaattcgtcagcctgaaaggaatcgttctggaaaccaaaggcaaagtactgtctttgatccaagtcttccccatctttctctctctactggtggcagtatgattcttggacgtcaacaacctgccacagagaagagaggaagtattgttcgtttcatgcctgatagcccacaagtacctaatgataattcaggtcctgaccagcatacactatcacaaaattttggtttttcttttattcctgagggtggcatgaatccaccaataaatgctaatgcttctttcattcc

SEQ ID NO: 426414 - DNA, 8578 bp, Homo sapiens
ccctgacagacccgtgcggtagcaacagcggcggcggccgcggcggctggccggactcaggtgtttcggacgctattgcccttcgcgccagccgtcgagtgggcagcagcgggactcagccgggcgccaggttcctgccaggcagcgccgggaagcgcgggcggccgagaactccttcctgctacttcgcccagcgccgctgcttcggcttcccagcgaagtgggagaccttcctccctgtttgcagacgtccgtgggagacccttattttttccaccgctaaggttaagagattctggaatagaagcgtcgaaggagatcaagtgaaccttctacaactcctcggatgtcgccagtctccctttcggggcggaagactacgtttgagcatctcactgaggtgcaggaatggaagaacccaccttgcagcttttctgcagtgtggcttgcctgatctacccctaggaatgaagaggaggcttgtaataatccgatgaagtacagatgttgaagaggatatcgcaggacctaaacttgtgatcgtttgggggaggtcacacacgtttctgagtgggaatggatgggcgtgaatgacgtgccctcttaaaaagcacaacaatcctttaagaggagcaaaattgagttttcccattttggccaagattttgaagacagttcaatgtattctacatttgacataagatgagaactttctaaagtattctctccaagagcgtaaacgatgactaccccagccctgctgcccctctctggacgtaggataccacctctgaacctggggccgccttccttcccacatcacagggctaccttgagactttctgagaagtttattcttctccttattcttagtgccttcatcactctgtgttttggggcattctttttccttccagactcttcaaaacacaaacgctttgatttgggtttagaagatgtgttaattccacatgtagatgccggtaaaggggctaaaaaccccggagtcttcctgatccatggacccgatgaacatagacacagggaagaggaagaacgtctgagaaataaaattcgagctgatcatgagaaggccttggaagaagcaaaagaaaaattaagaaagtcaagagaggaaattcgagcagaaattcagacagagaaaaataaggtagtccaagaaatgaagataaaagagaacaagccactgccaccagtccctattcccaaccttgtaggaatacgtggtggagacccagaagataatgacataagagagaaaagggaaaaaattaaagagatgatgaaacatgcttgggataactataggacatatgggtggggacataatgaactcagacctattgcaaggaaaggacactcccctaacatatttggaagttcacaaatgggtgctaccatagtagatgctttggataccctttatatcatgggacttcatgatgaattcctagatgggcaaagatggattgaagacaaccttgatttcagtgtgaattcagaggtgtctgtgtttgaagtcaacattcgatttattggaggcctacttgcagcatattacctatcaggagaggagatattcaagattaaagcagtgcaattggctgagaaactccttcctgcctttaacacacctactgggattccttgggcaatggtgaatttgaaaagtggagtagggcgaaactggggctgggcatctgcaggtagcagcattctggctgaatttggtacactacatatggagttcatccacctcagctacttgacaggggacctgacttactacaaaaaggttatgcacattcggaaactacttcagaaaatggatcgtccaaatggtctttatccaaattatttgaaccccagaacagggcgctggggtcagtatcatacatctgtcggtggcctgggagacagtttttatgaatacttactgaaagcatggttgatgtcagataaaacagaccatgaggcaagaaagatgtatgatgatgctattgaggctatagaaaaacatcttattaagaagtctcgtggaggtcttacctttattggagaatggaagaatgggcacttggaaaaaaagatggggcatttggcctgctttgctgggggaatgtttgcactaggagcagatggttccagagcagataaagctggtcattatttagagctaggggcagaaattgcacgtacttgtcatgagtcatatgacagaactgcattaaagctaggtcctgaatcattcaagtttgatggtgcagtggaggctgtggctgtccggcaggctgaaaagtattatatcctccgtccagaagtaattgaaacctattggtacctatggcgattcactcacgatccaagatacaggcagtggggctgggaagcagcactggccattgaaaagtattgccgagttaatggtgggttttctggagtcaaagatgtatattcctctactcctacacatgatgatgtacagcagagcttttttcttgctgaaacattaaaatatttgtatctgctgttctccggtgatgaccttttacctttagaccactgggtgtttaatacagaggctcaccctctgcctgtgttacatttagccaacaccacactttcaggtaatcctgctgttcgatgaaagcagttccagaaggaccattctcacctgtgttttgtttacatggaccactacagaaattagtttgaaggggcggcttttgaaaacctggacctctatgtcaacatgacagggtgaaactattccccctaagactgttcaacttgtagatacatcaactttgaaattattccattttatacctgaccaaaacatgttctgatatgtgtaggacagagacctggatgtgctttgatcgttaatgaggtggtcacatgagaagtgatacctgttactactgtattgtttttagagtcctgaagtctggaggctagacttcctgaaagcaagtcaagaatatagagcaccttgcaggagttcaagatggcctttggaaccaattatgtatttgtttcctcctacagtggagcagcattcaaatcaaatatttacatattgcttatcactttttctccattttaataatggaatgaactaaaataaacaagaacaaaagaatagtataattatatcagtaacaagaagactcaaaaaagaaacaggagtacctatccctatctgaattttcaagttccccattggatgaccagactggcaaccatttcaaatcccagtctatttcattgaaatttcttggttaagtttaattttctctgggggcatgatctcacaaagaatactcaagtctttttcttcttatggaatcatcgaaactgctatttatcataatcaccacttatgagcctgggtttgggattttgtgcatgtagttcagtctagtgttggtagcatgacagaaagtggggaaaatgccgcagtttgttgccttgaaacctaagagcaatccttggttttgttgctacattatttttccagaccaacacatctaccaagtaaattttattcactttaatttcataataaagttagtagagtcactcaacttacaactttatttatgtgggcttggcaaaaatcactataaggcagctctaaatttgccttgataagctaaataaattacttttataacttactaaagcagaacaaacagtgaaactttctaaaatattctatctggaatagggacaggggatcttttatttataatctcatcagatgagtgagttgttcacagatattttatgtttttttaattttctccaagaatatttatagaattccaaagaatcagaatagtttcaaaataattttcagtgataaaagagtgttgtaattaatcatattacactaaaattgggatacatctaaggaactttatcttactatcagtaggttttgcattgatatttctttttaaataaactactagttctttatattttgacaaaaagaacttaaattttatcaggaactgtaagataaatatctagtgcttataaattttctgtccttaaatttatgtgacagtgcaagatacttttgctcttttcatttaatataggcatcttccattgacattaataaaacttagaaacagtataattagtataacatttactctgaatttgaagatttcctgaaacaaagtttgtacaagaagcccaccttggaattctgaaggcttattttcttgtttgataagcttttcttttaaacttaggttttaagttggggaaagacttaattaactaatatagtattttctaaggttgatcatcttataccacgaatcgttaattttgacagttctactgatccgtaaaagataaccactgcaaattttttcagtataaaatttttcactgcaaaaaaatttcagtagaaaataaggatgcagggccagttacaatagtccttaagagagttaaattatagcacatgttttgacattgtaatatcttttactacttgaacatttaaatttctaaatgagaaaggtatatatattactgtaactgtagaagggaaaagggaaagtatttggttctaaaaaatgttagccttcctcgtaaaagtagcacaagcccacttatgaatcactgagaaaaagtgaaaaacttgagttggcaaagatgcagagcagcagtgcagatggcaatgaactctctgaattctcttttaccttatttagaagaatgcagagtaaagggaccttcttggttctgcaggaacttctcaagggatgaggagacagaacccctacttccaagtgctctatttgtattacccagatgactgaagcttaagagaaggcagggaagtatacaagcagagccagttctggtacaaacaaagaatttgacagggacaatggaagggtcttcttcaccactccttaccttctatgtgatggaaagactagagcttataaaagtacttccatttttttattctcctgaataccaaaggcaattaaagtcagctacaaatgacttgccagtgtcatgttttatttttgttatagatttttaaattatttccttcaagatcaattcttatcccatataatgcttagcttccaagaatattctttactttcttctgtcttttacagctctttgcattttgtagaccttaatactcaggttaaatattcattgcatttataagatcttctgcaaaaagcccagaaatggtccttttcaggtgcctcttcaaagagctgacaccttaccttgtgcctttggcacaaatgtgcagaatagatacatcagttggtgcataatcgaaaaaaataggaattttgaacactgttcttccttctacatttatttctcttcattttagaatcacactttttatgttaaaccagattattattattattattattcaaccagtattaagttgttaaaaccaagggaatggggccctaaccaaaaagaagtctcaactcagaaaaataagtccccagtcaggtggttcttactttcttgtgggttgcacattttgtatctctctaacatcagcgtattcctgactttaagcaggtgtttatatgtaaaataaaacctgagtatcgaagggaaatgcattctttttatggagtattgaccctgatcctctatgatgtcatatagagcaactcagggctatacttgctagattttaaccaagcagtttgaaatattaatcatcatcctctcatcttctccagtctccattgccaaagtctttgtcaaaactccaaatttgttgataaaagattgtgtttgccattctcatttataatgcagtttctccttaagcctggagttttttgaatgagtgcatgagtaaatgagagaatgtgtgaacgaacatttatgaagtatctaacatgtgccaagcattgtgcctggcactttcaatcattagaatgttttatgtgattccacagcattttctgtataagagtagctcacaacattttaaatgtttccaatatgaatcgtgttacaaaattcttaattttatatttcatataaattaaagaggaaaaagaaaaggtttataatatattttaaaacaatgtgttactatataatacaactataattgtagttaataactaaaacctcttgaaaatgtcaaagaaatacttgatttctgatgcaactttgactaaaatatttactttagaaataaaaacgttcttattttgctatatcactttaattgcataattaaaaagcagtgttttatagaaatgctggttattttatattcaaaaagattttgtcacataattcatgggtaaaacttgcagttgtaaattgtgtctgctctggtatgggccctattaatagtcccatgctgttaaatataaagaaaaatatactaaaatattcaaagttccaaataacagttcctagtaatagtattttgagttatttttctttaggtttccttatactcaaattggctaggtcctatcttttcctctctctctctctctctctctctctatatatatatatatatatatatatatatgagagatatatgagatatatgagagatcaagatctatatatgtatataaatacaattatacacagataatttttaatactctttgttaacaaacacagttgaaaactggtttcggctgcacaaataagcagaatatttgagtaactatatatgatatggagatattttaatccatttatcctggctcaagaacactgataaagatgattttctgttactttagctcattcagatcaggatggacatgctctttttgatctataactgttcagccagcttccagataatattttaggctatgagagctatacagtctctcttattactcatttctgctgttgaagtatcgaaaacagatagagatactatgtaaagaatgggcgtagctatgttccaggaaaactttatttacaaaagcagatggagggctggatttggtccatgggtcatagttagtgaccctgatcccaagtttattttgtgttagaccctctaacctttgatctgcgtcttttctgttttgatttacataattcatttttaaatcaaaaagatgtgcgtatatatggttgtgtgtatctgtataacctaaagctataatattttgttgtcttgaaagcagatacactcttcctggagtctgttcaggtttcaggacgattgactataatgaaagagacagaatagggtaagggaagatgggtatgctatcagccattttctttgccttgtcatttaatgccataatttcagattctctatgtaaaaagaaggtctgtgtattgtcaaaataatatactctccaagttctcctgctcattgacccttgaaccaggattctggattgctagagctgcagaaattcacccacttgggtactcttagagctctacagcaagaatatgatagaatgtctgatctttgtgctgcagaaagcaaacttttgaagaattctaagcaacagaaaatgggttatgtgactcatctgctatttggcagccactattccttttttagactgcagaacggtactgcccctgttacctctagaatagcctgagtctgaggagtgcagagaaaagatatatccaaaaggagaatccctttctcttgcataactctcaatcctttacaagtaagtagcattatttcagaatgtctatatgcatcattttcaactaaagcatacctcatccttaaacttccactatttaacagctaatccatttcaaacttggtttgagcctagcaattgcagaactcataaaattgcttgtgaaattacacaccatattactagcatatacattgcagtgctccaatcatgctaacagataatagatttttctttaagaattttatcaaatatttcactatttggggaaattttagaggaggggaagcctgtattcaggatgatagagggagcagagacttactgtctctcttccacattataaatgaactgcctttccaggtccaacatgctgtcaggttgcttcagctcggtgtgaatgtaagtgtggggatcaaacacacacacctatacacatacatattaatatgcagaggattttaaataattgcaaatgtcttgtggctgttttatttctacaaaattctgtaagatgtataccagaaaacataataaagataagctcagttcttcattgggaaaaaatatttttaaagaaaatttagaagtttttgctgaattaaagtatcttcaattttaattactggatttggaagttgaaatgccatccttcaatatcactggtctcaaattcattgatagaattttttcttaaactaataagtggggtaagtataatctcctaaattggtacccactggctgctcctaaactggtttccagtcatgtcctccagtatgtgatttttataaattaaaggtaatattgtatattaaagttcaaataaagatgttctttaagtgaaaaaaaaaaaa

SEQ ID NO: 426415 - DNA, 8613 bp, Homo sapiens
ccctgacagacccgtgcggtagcaacagcggcggcggccgcggcggctggccggactcaggtgtttcggacgctattgcccttcgcgccagccgtcgagtgggcagcagcgggactcagccgggcgccaggttcctgccaggcagcgccgggaagcgcgggcggccgagaactccttcctgctacttcgcccagcgccgctgcttcggcttcccagcgaagtgggagaccttcctccctgtttgcagacgtccgtgggagacccttattttttccaccgctaaggttaagagattctggaatagaagcgtcgaaggagatcaagtgaaccttctacaactcctcggatgtcgccagtctccctttcggggcggaagactacgtttgagcatctcactgaggtgcaggaatggaagaacccaccttgcagcttttctgcagtgtggcttgcctgatctacccctaggaatgaagaggaggcttgtaataatccgatgaagtacagatgttgaagaggatatcgcaggacctaaacttgtgatcgtttgggggaggtcacacacgtttctgagtgggaatggatgggcgtgaatgacgtgccctcttaaaaagcacaacaatcctttaagaggagcaaaattgagttttcccattttggccaagattttgaagacagttcaatgtattctacatttgacataagatgagaactttctaaagtattctctccaagagcgtaaacgatgactaccccagccctgctgcccctctctggacgtaggataccacctctgaacctggggccgccttccttcccacatcacagggctaccttgagactttctgagaagtttattcttctccttattcttagtgccttcatcactctgtgttttggggcattctttttccttccagactcttcaaaacacaaacgctttgatttgggtttagaagatgtgttaattccacatgtagatgccggtaaaggggctaaaaaccccggagtcttcctgatccatggacccgatgaacatagacacagggaagaggaagaacgtctgagaaataaaattcgagctgatcatgagaaggccttggaagaagcaaaagaaaaattaagaaagtcaagagaggaaattcgagcagaaattcagacagagaaaaataaggtagtccaagaaatgaagataaaagagaacaagccactgccaccagtccctattcccaaccttgtaggaatacgtggtggagacccagaagataatgacataagagagaaaagggaaaaaattaaagagatgatgaaacatgcttgggataactataggacatatgggtggggacataatgaactcagacctattgcaaggaaaggacactcccctaacatatttggaagttcacaaatgggtgctaccatagtagatgctttggataccctttatatcatgggacttcatgatgaattcctagatgggcaaagatggattgaagacaaccttgatttcagtgtgaattcagaggtgtctgtgtttgaagtcaacattcgatttattggaggcctacttgcagcatattacctatcaggagaggagatattcaagattaaagcagtgcaattggctgagaaactccttcctgcctttaacacacctactgggattccttgggcaatggtgaatttgaaaagtggagtagggcgaaactggggctgggcatctgcaggtagcagcattctggctgaatttggtacactacatatggagttcatccacctcagctacttgacaggggacctgacttactacaaaaaggttatgcacattcggaaactacttcagaaaatggatcgtccaaatggtctttatccaaattatttgaaccccagaacagggcgctggggtcagtatcatacatctgtcggtggcctgggagacagtttttatgaatacttactgaaagcatggttgatgtcagataaaacagaccatgaggcaagaaagatgtatgatgatgctattgaggctatagaaaaacatcttattaagaagtctcgtggaggtcttacctttattggagaatggaagaatgggcacttggaaaaaaagatggggcatttggcctgctttgctgggggaatgtttgcactaggagcagatggttccagagcagataaagctggtcattatttagagctaggggcagaaattgcacgtacttgtcatgagtcatatgacagaactgcattaaagctaggtcctgaatcattcaagtttgatggtgcagtggaggctgtggctgtccggcaggctgaaaagtattatatcctccgtccagaagtaattgaaacctattggtacctatggcgattcactcacgatccaagatacaggcagtggggctgggaagcagcactggccattgaaaagtattgccgagttaatggtgggttttctggagtcaaagatgtatattcctctactcctacacatgatgatgtacagcagagcttttttcttgctgaaacattaaaatatttgtatctgctgttctccggtgatgaccttttacctttagaccactgggtgtttaatacagaggctcaccctctgcctgtgttacatttagccaacaccacactttcaggtaatcctgctgttcgatgaaagcagttccagaaggaccattctcacctgtgttttgtttacatggaccactacagaaattagtttgaaggggcggcttttgaaaacctggacctctatgtcaacatgacagggtgaaactattccccctaagactgttcaacttgtagatacatcaactttgaaattattccattttatacctgaccaaaacatgttctgatatgtgtaggacagagacctggatgtgctttgatcgttaatgaggtggtcacatgagaagtgatacctgttactactgtattgtttttagagtcctgaagtctggaggctagacttcctgaaagcaagtcaagaatatagagcaccttgcaggagttcaagatggcctttggaaccaattatgtatttgtttcctcctacagtggagcagcattcaaatcaaatatttacatattgcttatcactttttctccattttaataatggaatgaactaaaataaacaagaacaaaagaatagtataattatatcagtaacaagaagactcaaaaaagaaacaggagtacctatccctatctgaattttcaagttccccattggatgaccagactggcaaccatttcaaatcccagtctatttcattgaaatttcttggttaagtttaattttctctgggggcatgatctcacaaagaatactcaagtctttttcttcttatggaatcatcgaaactgctatttatcataatcaccacttatgagcctgggtttgggattttgtgcatgtagttcagtctagtgttggtagcatgacagaaagtggggaaaatgccgcagtttgttgccttgaaacctaagagcaatccttggttttgttgctacattatttttccagaccaacacatctaccaagtaaattttattcactttaatttcataataaagttagtagagtcactcaacttacaactttatttatgtgggcttggcaaaaatcactataaggcagctctaaatttgccttgataagctaaataaattacttttataacttactaaagcagaacaaacagtgaaactttctaaaatattctatctggaatagggacaggggatcttttatttataatctcatcagatgagtgagttgttcacagatattttatgtttttttaattttctccaagaatatttatagaattccaaagaatcagaatagtttcaaaataattttcagtgataaaagagtgttgtaattaatcatattacactaaaattgggatacatctaaggaactttatcttactatcagtaggttttgcattgatatttctttttaaataaactactagttctttatattttgacaaaaagaacttaaattttatcaggaactgtaagataaatatctagtgcttataaattttctgtccttaaatttatgtgacagtgcaagatacttttgctcttttcatttaatataggcatcttccattgacattaataaaacttagaaacagtataattagtataacatttactctgaatttgaagatttcctgaaacaaagtttgtacaagaagcccaccttggaattctgaaggcttattttcttgtttgataagcttttcttttaaacttaggttttaagttggggaaagacttaattaactaatatagtattttctaaggttgatcatcttataccacgaatcgttaattttgacagttctactgatccgtaaaagataaccactgcaaattttttcagtataaaatttttcactgcaaaaaaatttcagtagaaaataaggatgcagggccagttacaatagtccttaagagagttaaattatagcacatgttttgacattgtaatatcttttactacttgaacatttaaatttctaaatgagaaaggtatatatattactgtaactgtagaagggaaaagggaaagtatttggttctaaaaaatgttagccttcctcgtaaaagtagcacaagcccacttatgaatcactgagaaaaagtgaaaaacttgagttggcaaagatgcagagcagcagtgcagatggcaatgaactctctgaattctcttttaccttatttagaagaatgcagagtaaagggaccttcttggttctgcaggaacttctcaagggatgaggagacagaacccctacttccaagtgctctatttgtattacccagatgactgaagcttaagagaaggcagggaagtatacaagcagagccagttctggtacaaacaaagaatttgacagggacaatggaagggtcttcttcaccactccttaccttctatgtgatggaaagactagagcttataaaagtacttccatttttttattctcctgaataccaaaggcaattaaagtcagctacaaatgacttgccagtgtcatgttttatttttgttatagatttttaaattatttccttcaagatcaattcttatcccatataatgcttagcttccaagaatattctttactttcttctgtcttttacagctctttgcattttgtagaccttaatactcaggttaaatattcattgcatttataagatcttctgcaaaaagcccagaaatggtccttttcaggtgcctcttcaaagagctgacaccttaccttgtgcctttggcacaaatgtgcagaatagatacatcagttggtgcataatcgaaaaaaataggaattttgaacactgttcttccttctacatttatttctcttcattttagaatcacactttttatgttaaaccagattattattattattattattcaaccagtattaagttgttaaaaccaagggaatggggccctaaccaaaaagaagtctcaactcagaaaaataagtccccagtcaggtggttcttactttcttgtgggttgcacattttgtatctctctaacatcagcgtattcctgactttaagcaggtgtttatatgtaaaataaaacctgagtatcgaagggaaatgcattctttttatggagtattgaccctgatcctctatgatgtcatatagagcaactcagggctatacttgctagattttaaccaagcagtttgaaatattaatcatcatcctctcatcttctccagtctccattgccaaagtctttgtcaaaactccaaatttgttgataaaagattgtgtttgccattctcatttataatgcagtttctccttaagcctggagttttttgaatgagtgcatgagtaaatgagagaatgtgtgaacgaacatttatgaagtatctaacatgtgccaagcattgtgcctggcactttcaatcattagaatgttttatgtgattccacagcattttctgtataagagtagctcacaacattttaaatgtttccaatatgaatcgtgttacaaaattcttaattttatatttcatataaattaaagaggaaaaagaaaaggtttataatatattttaaaacaatgtgttactatataatacaactataattgtagttaataactaaaacctcttgaaaatgtcaaagaaatacttgatttctgatgcaactttgactaaaatatttactttagaaataaaaacgttcttattttgctatatcactttaattgcataattaaaaagcagtgttttatagaaatgctggttattttatattcaaaaagattttgtcacataattcatgggtaaaacttgcagttgtaaattgtgtctgctctggtatgggccctattaatagtcccatgctgttaaatataaagaaaaatatactaaaatattcaaagttccaaataacagttcctagtaatagtattttgagttatttttctttaggtttccttatactcaaattggctaggtcctatcttttcctctctctctctctctctctctctctatatatatatatatatatatatatatatgagagatatatgagatatatgagagatcaagatctatatatgtatataaatacaattatacacagataatttttaatactctttgttaacaaacacagttgaaaactggtttcggctgcacaaataagcagaatatttgagtaactatatatgatatggagatattttaatccatttatcctggctcaagaacactgataaagatgattttctgttactttagctcattcagatcaggatggacatgctctttttgatctataactgttcagccagcttccagataatattttaggctatgagagctatacagtctctcttattactcatttctgctgttgaagtatcgaaaacagatagagatactatgtaaagaatgggcgtagctatgttccaggaaaactttatttacaaaagcagatggagggctggatttggtccatgggtcatagttagtgaccctgatcccaagtttattttgtgttagaccctctaacctttgatctgcgtcttttctgttttgatttacataattcatttttaaatcaaaaagatgtgcgtatatatggttgtgtgtatctgtataacctaaagctataatattttgttgtcttgaaagcagatacactcttcctggagtctgttcaggtttcaggacgattgactataatgaaagagacagaatagggtaagggaagatgggtatgctatcagccattttctttgccttgtcatttaatgccataatttcagattctctatgtaaaaagaaggtctgtgtattgtcaaaataatatactctccaagttctcctgctcattgacccttgaaccaggattctggattgctagagctgcagaaattcacccacttgggtactcttagagctctacagcaagaatatgatagaatgtctgatctttgtgctgcagaaagcaaacttttgaagaattctaagcaacagaaaatgggttatgtgactcatctgctatttggcagccactattccttttttagactgcagaacggtactgcccctgttacctctagaatagcctgagtctgaggagtgcagagaaaagatatatccaaaaggagaatccctttctcttgcataactctcaatcctttacaagtaagtagcattatttcagaatgtctatatgcatcattttcaactaaagcatacctcatccttaaacttccactatttaacagctaatccatttcaaacttggtttgagcctagcaattgcagaactcataaaattgcttgtgaaattacacaccatattactagcatatacattgcagtgctccaatcatgctaacagataatagatttttctttaagaattttatcaaatatttcactatttggggaaattttagaggaggggaagcctgtattcaggatgatagagggagcagagacttactgtctctcttccacattataaatgaactgcctttccaggtccaacatgctgtcaggttgcttcagctcggtgtgaatgtaagtgtggggatcaaacacacacacctatacacatacatattaatatgcagaggattttaaataattgcaaatgtcttgtggctgttttatttctacaaaattctgtaagatgtataccagaaaacataataaagataagctcagttcttcattgggaaaaaatatttttaaagaaaatttagaagtttttgctgaattaaagtatcttcaattttaattactggatttggaagttgaaatgccatccttcaatatcactggtctcaaattcattgatagaattttttcttaaactaataagtggggtaagtataatctcctaaattggtacccactggctgctcctaaactggtttccagtcatgtcctccatagggattgtataattcagggattggctctgaggtccataagaagtctagtgaaaccgggcccaaacggggagccccccggggggggacccccaagcgggacgttagtagccccc

SEQ ID NO: 426416 - DNA, 8225 bp, Homo sapiens
ccctgacagacccgtgcggtagcaacagcggcggcggccgcggcggctggccggactcaggtgtttcggacgctattgcccttcgcgccagccgtcgagtgggcagcagcgggactcagccgggcgccaggttcctgccaggcagcgccgggaagcgcgggcggccgagaactccttcctgctacttcgcccagcgccgctgcttcggcttcccagcgaagtgggagaccttcctccctgtttgcagacgtccgtgggagacccttattttttccaccgctaaggttaagagattctggaatagaagcgtcgaaggagatcaagtgaaccttctacaactcctcggatgtcgccagtctccctttcggggcggaagactacgtttgagcatctcactgaggtgcaggaatggaagaacccaccttgcagcttttctgcagtgtggcttgcctgatctacccctaggaatgaagaggaggcttgtaataatccgatgaagtacagatgttgaagaggatatcgcaggacctaaacttgtgatcgtttgggggaggtcacacacgtttctgagtgggaatggatgggcgtgaatgacgtgccctcttaaaaagcacaacaatcctttaagaggagcaaaattgagttttcccattttggccaagattttgaagacagttcaatgtattctacatttgacataagatgagaactttctaaagtattctctccaagagcgtaaacgatgactaccccagccctgctgcccctctctggacgtaggataccacctctgaacctggggccgccttccttcccacatcacagggctaccttgagactttctgagaagtttattcttctccttattcttagtgccttcatcactctgtgttttggggcattctttttccttccagactcttcaaaacacaaacgctttgatttgggtttagaagatgtgttaattccacatgtagatgccggtaaaggggctaaaaaccccggagtcttcctgatccatggacccgatgaacatagacacaggaagttcacaaatgggtgctaccatagtagatgctttggataccctttatatcatgggacttcatgatgaattcctagatgggcaaagatggattgaagacaaccttgatttcagtgtgaattcagaggtgtctgtgtttgaagtcaacattcgatttattggaggcctacttgcagcatattacctatcaggagaggagatattcaagattaaagcagtgcaattggctgagaaactccttcctgcctttaacacacctactgggattccttgggcaatggtgaatttgaaaagtggagtagggcgaaactggggctgggcatctgcaggtagcagcattctggctgaatttggtacactacatatggagttcatccacctcagctacttgacaggggacctgacttactacaaaaaggttatgcacattcggaaactacttcagaaaatggatcgtccaaatggtctttatccaaattatttgaaccccagaacagggcgctggggtcagtatcatacatctgtcggtggcctgggagacagtttttatgaatacttactgaaagcatggttgatgtcagataaaacagaccatgaggcaagaaagatgtatgatgatgctattgaggctatagaaaaacatcttattaagaagtctcgtggaggtcttacctttattggagaatggaagaatgggcacttggaaaaaaagatggggcatttggcctgctttgctgggggaatgtttgcactaggagcagatggttccagagcagataaagctggtcattatttagagctaggggcagaaattgcacgtacttgtcatgagtcatatgacagaactgcattaaagctaggtcctgaatcattcaagtttgatggtgcagtggaggctgtggctgtccggcaggctgaaaagtattatatcctccgtccagaagtaattgaaacctattggtacctatggcgattcactcacgatccaagatacaggcagtggggctgggaagcagcactggccattgaaaagtattgccgagttaatggtgggttttctggagtcaaagatgtatattcctctactcctacacatgatgatgtacagcagagcttttttcttgctgaaacattaaaatatttgtatctgctgttctccggtgatgaccttttacctttagaccactgggtgtttaatacagaggctcaccctctgcctgtgttacatttagccaacaccacactttcaggtaatcctgctgttcgatgaaagcagttccagaaggaccattctcacctgtgttttgtttacatggaccactacagaaattagtttgaaggggcggcttttgaaaacctggacctctatgtcaacatgacagggtgaaactattccccctaagactgttcaacttgtagatacatcaactttgaaattattccattttatacctgaccaaaacatgttctgatatgtgtaggacagagacctggatgtgctttgatcgttaatgaggtggtcacatgagaagtgatacctgttactactgtattgtttttagagtcctgaagtctggaggctagacttcctgaaagcaagtcaagaatatagagcaccttgcaggagttcaagatggcctttggaaccaattatgtatttgtttcctcctacagtggagcagcattcaaatcaaatatttacatattgcttatcactttttctccattttaataatggaatgaactaaaataaacaagaacaaaagaatagtataattatatcagtaacaagaagactcaaaaaagaaacaggagtacctatccctatctgaattttcaagttccccattggatgaccagactggcaaccatttcaaatcccagtctatttcattgaaatttcttggttaagtttaattttctctgggggcatgatctcacaaagaatactcaagtctttttcttcttatggaatcatcgaaactgctatttatcataatcaccacttatgagcctgggtttgggattttgtgcatgtagttcagtctagtgttggtagcatgacagaaagtggggaaaatgccgcagtttgttgccttgaaacctaagagcaatccttggttttgttgctacattatttttccagaccaacacatctaccaagtaaattttattcactttaatttcataataaagttagtagagtcactcaacttacaactttatttatgtgggcttggcaaaaatcactataaggcagctctaaatttgccttgataagctaaataaattacttttataacttactaaagcagaacaaacagtgaaactttctaaaatattctatctggaatagggacaggggatcttttatttataatctcatcagatgagtgagttgttcacagatattttatgtttttttaattttctccaagaatatttatagaattccaaagaatcagaatagtttcaaaataattttcagtgataaaagagtgttgtaattaatcatattacactaaaattgggatacatctaaggaactttatcttactatcagtaggttttgcattgatatttctttttaaataaactactagttctttatattttgacaaaaagaacttaaattttatcaggaactgtaagataaatatctagtgcttataaattttctgtccttaaatttatgtgacagtgcaagatacttttgctcttttcatttaatataggcatcttccattgacattaataaaacttagaaacagtataattagtataacatttactctgaatttgaagatttcctgaaacaaagtttgtacaagaagcccaccttggaattctgaaggcttattttcttgtttgataagcttttcttttaaacttaggttttaagttggggaaagacttaattaactaatatagtattttctaaggttgatcatcttataccacgaatcgttaattttgacagttctactgatccgtaaaagataaccactgcaaattttttcagtataaaatttttcactgcaaaaaaatttcagtagaaaataaggatgcagggccagttacaatagtccttaagagagttaaattatagcacatgttttgacattgtaatatcttttactacttgaacatttaaatttctaaatgagaaaggtatatatattactgtaactgtagaagggaaaagggaaagtatttggttctaaaaaatgttagccttcctcgtaaaagtagcacaagcccacttatgaatcactgagaaaaagtgaaaaacttgagttggcaaagatgcagagcagcagtgcagatggcaatgaactctctgaattctcttttaccttatttagaagaatgcagagtaaagggaccttcttggttctgcaggaacttctcaagggatgaggagacagaacccctacttccaagtgctctatttgtattacccagatgactgaagcttaagagaaggcagggaagtatacaagcagagccagttctggtacaaacaaagaatttgacagggacaatggaagggtcttcttcaccactccttaccttctatgtgatggaaagactagagcttataaaagtacttccatttttttattctcctgaataccaaaggcaattaaagtcagctacaaatgacttgccagtgtcatgttttatttttgttatagatttttaaattatttccttcaagatcaattcttatcccatataatgcttagcttccaagaatattctttactttcttctgtcttttacagctctttgcattttgtagaccttaatactcaggttaaatattcattgcatttataagatcttctgcaaaaagcccagaaatggtccttttcaggtgcctcttcaaagagctgacaccttaccttgtgcctttggcacaaatgtgcagaatagatacatcagttggtgcataatcgaaaaaaataggaattttgaacactgttcttccttctacatttatttctcttcattttagaatcacactttttatgttaaaccagattattattattattattattcaaccagtattaagttgttaaaaccaagggaatggggccctaaccaaaaagaagtctcaactcagaaaaataagtccccagtcaggtggttcttactttcttgtgggttgcacattttgtatctctctaacatcagcgtattcctgactttaagcaggtgtttatatgtaaaataaaacctgagtatcgaagggaaatgcattctttttatggagtattgaccctgatcctctatgatgtcatatagagcaactcagggctatacttgctagattttaaccaagcagtttgaaatattaatcatcatcctctcatcttctccagtctccattgccaaagtctttgtcaaaactccaaatttgttgataaaagattgtgtttgccattctcatttataatgcagtttctccttaagcctggagttttttgaatgagtgcatgagtaaatgagagaatgtgtgaacgaacatttatgaagtatctaacatgtgccaagcattgtgcctggcactttcaatcattagaatgttttatgtgattccacagcattttctgtataagagtagctcacaacattttaaatgtttccaatatgaatcgtgttacaaaattcttaattttatatttcatataaattaaagaggaaaaagaaaaggtttataatatattttaaaacaatgtgttactatataatacaactataattgtagttaataactaaaacctcttgaaaatgtcaaagaaatacttgatttctgatgcaactttgactaaaatatttactttagaaataaaaacgttcttattttgctatatcactttaattgcataattaaaaagcagtgttttatagaaatgctggttattttatattcaaaaagattttgtcacataattcatgggtaaaacttgcagttgtaaattgtgtctgctctggtatgggccctattaatagtcccatgctgttaaatataaagaaaaatatactaaaatattcaaagttccaaataacagttcctagtaatagtattttgagttatttttctttaggtttccttatactcaaattggctaggtcctatcttttcctctctctctctctctctctctctctatatatatatatatatatatatatatatgagagatatatgagatatatgagagatcaagatctatatatgtatataaatacaattatacacagataatttttaatactctttgttaacaaacacagttgaaaactggtttcggctgcacaaataagcagaatatttgagtaactatatatgatatggagatattttaatccatttatcctggctcaagaacactgataaagatgattttctgttactttagctcattcagatcaggatggacatgctctttttgatctataactgttcagccagcttccagataatattttaggctatgagagctatacagtctctcttattactcatttctgctgttgaagtatcgaaaacagatagagatactatgtaaagaatgggcgtagctatgttccaggaaaactttatttacaaaagcagatggagggctggatttggtccatgggtcatagttagtgaccctgatcccaagtttattttgtgttagaccctctaacctttgatctgcgtcttttctgttttgatttacataattcatttttaaatcaaaaagatgtgcgtatatatggttgtgtgtatctgtataacctaaagctataatattttgttgtcttgaaagcagatacactcttcctggagtctgttcaggtttcaggacgattgactataatgaaagagacagaatagggtaagggaagatgggtatgctatcagccattttctttgccttgtcatttaatgccataatttcagattctctatgtaaaaagaaggtctgtgtattgtcaaaataatatactctccaagttctcctgctcattgacccttgaaccaggattctggattgctagagctgcagaaattcacccacttgggtactcttagagctctacagcaagaatatgatagaatgtctgatctttgtgctgcagaaagcaaacttttgaagaattctaagcaacagaaaatgggttatgtgactcatctgctatttggcagccactattccttttttagactgcagaacggtactgcccctgttacctctagaatagcctgagtctgaggagtgcagagaaaagatatatccaaaaggagaatccctttctcttgcataactctcaatcctttacaagtaagtagcattatttcagaatgtctatatgcatcattttcaactaaagcatacctcatccttaaacttccactatttaacagctaatccatttcaaacttggtttgagcctagcaattgcagaactcataaaattgcttgtgaaattacacaccatattactagcatatacattgcagtgctccaatcatgctaacagataatagatttttctttaagaattttatcaaatatttcactatttggggaaattttagaggaggggaagcctgtattcaggatgatagagggagcagagacttactgtctctcttccacattataaatgaactgcctttccaggtccaacatgctgtcaggttgcttcagctcggtgtgaatgtaagtgtggggatcaaacacacacacctatacacatacatattaatatgcagaggattttaaataattgcaaatgtcttgtggctgttttatttctacaaaattctgtaagatgtataccagaaaacataataaagataagctcagttcttcattgggaaaaaatatttttaaagaaaatttagaagtttttgctgaattaaagtatcttcaattttaattactggatttggaagttgaaatgccatccttcaatatcactggtctcaaattcattgatagaattttttcttaaactaataagtggggtaagtataatctcctaaattggtacccactggctgctcctaaactggtttccagtcatgtcctccagtatgtgatttttataaattaaaggtaatattgtatattaaagttcaaataaagatgttctttaagtgaaaaaaaaaaaa

SEQ ID NO: 426417 - DNA, 6283 bp, Homo sapiens
ccctgacagacccgtgcggtagcaacagcggcggcggccgcggcggctggccggactcaggtgtttcggacgctattgcccttcgcgccagccgtcgagtgggcagcagcgggactcagccgggcgccaggttcctgccaggcagcgccgggaagcgcgggcggccgagaactccttcctgctacttcgcccagcgccgctgcttcggcttcccagcgaagtgggagaccttcctccctgtttgcagacgtccgtgggagacccttattttttccaccgctaaggttaagagattctggaatagaagcgtcgaaggagatcaagtgaaccttctacaactcctcggatgtcgccagtctccctttcggggcggaagactacgtttgagcatctcactgaggtgcaggaatggaagaacccaccttgcagcttttctgcagtgtggcttgcctgatctacccctaggaatgaagaggaggcttgtaataatccgatgaagtacagatgttgaagaggatatcgcaggacctaaacttgtgatcgtttgggggaggtcacacacgtttctgagtgggaatggatgggcgtgaatgacgtgccctcttaaaaagcacaacaatcctttaagaggagcaaaattgagttttcccattttggccaagattttgaagacagttcaatgtattctacatttgacataagatgagaactttctaaagtattctctccaagagcgtaaacgatgactaccccagccctgctgcccctctctggacgtaggataccacctctgaacctggggccgccttccttcccacatcacagggctaccttgagactttctgagaagtttattcttctccttattcttagtgccttcatcactctgtgttttggggcattctttttccttccagactcttcaaaacacaaacgctttgatttgggtttagaagatgtgttaattccacatgtagatgccggtaaaggggctaaaaaccccggagtcttcctgatccatggacccgatgaacatagacacagggaagaggaagaacgtctgagaaataaaattcgagctgatcatgagaaggccttggaagaagcaaaagaaaaattaagaaagtcaagagaggaaattcgagcagaaattcagacagagaaaaataaggtagtccaagaaatgaagataaaagagaacaagccactgccaccagtccctattcccaaccttgtaggaatacgtggtggagacccagaagataatgacataagagagaaaagggaaaaaattaaagagatgatgaaacatgcttgggataactataggacatatgggtggggacataatgaactcagacctattgcaaggaaaggacactcccctaacatatttggaagttcacaaatgggtgctaccatagtagatgctttggataccctttatatcatgggacttcatgatgaattcctagatgggcaaagatggattgaagacaaccttgatttcagtgtgaattcagaggtgtctgtgtttgaagtcaacattcgatttattggaggcctacttgcagcatattacctatcaggagaggagatattcaagattaaagcagtgcaattggctgagaaactccttcctgcctttaacacacctactgggattccttgggcaatggtgaatttgaaaagtggagtagggcgaaactggggctgggcatctgcaggtagcagcattctggctgaatttggtacactacatatggagttcatccacctcagctacttgacaggggacctgacttactacaaaaaggttatgcacattcggaaactacttcagaaaatggatcgtccaaatggtctttatccaaattatttgaaccccagaacagggcgctggggtcagtatcatacatctgtcggtggcctgggagacagtttttatgaatacttactgaaagcatggttgatgtcagataaaacagaccatgaggcaagaaagatgtatgatgatgctattgaggctatagaaaaacatcttattaagaagtctcgtggaggtcttacctttattggagaatggaagaatgggcacttggaaaaaaagatggggcatttggcctgctttgctgggggaatgtttgcactaggagcagatggttccagagcagataaagctggtcattatttagagctaggggcagaaattgcacgtacttgtcatgagtcatatgacagaactgcattaaagctaggtcctgaatcattcaagtttgatggtgcagtggaggctgtggctgtccggcaggctgaaaagtattatatcctccgtccagaagtaattgaaacctattggtacctatggcgattcactcacgatccaagatacaggcagtggggctgggaagcagcactggccattgaaaagtattgccgagttaatggtgggttttctggagtcaaagatgtatattcctctactcctacacatgatgatgtacagcagagcttttttcttgctgaaacattaaaatatttgtatctgctgttctccggtgatgaccttttacctttagaccactgggtgtttaatacagaggctcaccctctgcctgtgttacatttagccaacaccacactttcaggtaatcctgctgttcgatgaaagcagttccagaaggaccattctcacctgtgttttgtttacatggaccactacagaaattagtttgaaggggcggcttttgaaaacctggacctctatgtcaacatgacagggtgaaactattccccctaagactgttcaacttgtagatacatcaactttgaaattattccattttatacctgaccaaaacatgttctgatatgtgtaggacagagacctggatgtgctttgatcgttaatgaggtggtcacatgagaagtgatacctgttactactgtattgtttttagagtcctgaagtctggaggctagacttcctgaaagcaagtcaagaatatagagcaccttgcaggagttcaagatggcctttggaaccaattatgtatttgtttcctcctacagtggagcagcattcaaatcaaatatttacatattgcttatcactttttctccattttaataatggaatgaactaaaataaacaagaacaaaagaatagtataattatatcagtaacaagaagactcaaaaaagaaacaggagtacctatccctatctgaattttcaagttccccattggatgaccagactggcaaccatttcaaatcccagtctatttcattgaaatttcttggttaagtttaattttctctgggggcatgatctcacaaagaatactcaagtctttttcttcttatggaatcatcgaaactgctatttatcataatcaccacttatgagcctgggtttgggattttgtgcatgtagttcagtctagtgttggtagcatgacagaaagtggggaaaatgccgcagtttgttgccttgaaacctaagagcaatccttggttttgttgctacattatttttccagaccaacacatctaccaagtaaattttattcactttaatttcataataaagttagtagagtcactcaacttacaactttatttatgtgggcttggcaaaaatcactataaggcagctctaaatttgccttgataagctaaataaattacttttataacttactaaagcagaacaaacagtgaaactttctaaaatattctatctggaatagggacaggggatcttttatttataatctcatcagatgagtgagttgttcacagatattttatgtttttttaattttctccaagaatatttatagaattccaaagaatcagaatagtttcaaaataattttcagtgataaaagagtgttgtaattaatcatattacactaaaattgggatacatctaaggaactttatcttactatcagtaggttttgcattgatatttctttttaaataaactactagttctttatattttgacaaaaagaacttaaattttatcaggaactgtaagataaatatctagtgcttataaattttctgtccttaaatttatgtgacagtgcaagatacttttgctcttttcatttaatataggcatcttccattgacattaataaaacttagaaacagtataattagtataacatttactctgaatttgaagatttcctgaaacaaagtttgtacaagaagcccaccttggaattctgaaggcttattttcttgtttgataagcttttcttttaaacttaggttttaagttggggaaagacttaattaactaatatagtattttctaaggttgatcatcttataccacgaatcgttaattttgacagttctactgatccgtaaaagataaccactgcaaattttttcagtataaaatttttcactgcaaaaaaatttcagtagaaaataaggatgcagggccagttacaatagtccttaagagagttaaattatagcacatgttttgacattgtaatatcttttactacttgaacatttaaatttctaaatgagaaaggtatatatattactgtaactgtagaagggaaaagggaaagtatttggttctaaaaaatgttagccttcctcgtaaaagtagcacaagcccacttatgaatcactgagaaaaagtgaaaaacttgagttggcaaagatgcagagcagcagtgcagatggcaatgaactctctgaattctcttttaccttatttagaagaatgcagagtaaagggaccttcttggttctgcaggaacttctcaagggatgaggagacagaacccctacttccaagtgctctatttgtattacccagatgactgaagcttaagagaaggcagggaagtatacaagcagagccagttctggtacaaacaaagaatttgacagggacaatggaagggtcttcttcaccactccttaccttctatgtgatggaaagactagagcttataaaagtacttccatttttttattctcctgaataccaaaggcaattaaagtcagctacaaatgacttgccagtgtcatgttttatttttgttatagatttttaaattatttccttcaagatcaattcttatcccatataatgcttagcttccaagaatattctttactttcttctgtcttttacagctctttgcattttgtagaccttaatactcaggttaaatattcattgcatttataagatcttctgcaaaaagcccagaaatggtccttttcaggtgcctcttcaaagagctgacaccttaccttgtgcctttggcacaaatgtgcagaatagatacatcagttggtgcataatcgaaaaaaataggaattttgaacactgttcttccttctacatttatttctcttcattttagaatcacactttttatgttaaaccagattattattattattattattcaaccagtattaagttgttaaaaccaagggaatggggccctaaccaaaaagaagtctcaactcagaaaaataagtccccagtcaggtggttcttactttcttgtgggttgcacattttgtatctctctaacatcagcgtattcctgactttaagcaggtgtttatatgtaaaataaaacctgagtatcgaagggaaatgcattctttttatggagtattgaccctgatcctctatgatgtcatatagagcaactcagggctatacttgctagattttaaccaagcagtttgaaatattaatcatcatcctctcatcttctccagtctccattgccaaagtctttgtcaaaactccaaatttgttgataaaagattgtgtttgccattctcatttataatgcagtttctccttaagcctggagttttttgaatgagtgcatgagtaaatgagagaatgtgtgaacgaacatttatgaagtatctaacatgtgccaagcattgtgcctggcactttcaatcattagaatgttttatgtgattccacagcattttctgtataagagtagctcacaacattttaaatgtttccaatatgaatcgtgttacaaaattcttaattttatatttcatataaattaaagaggaaaaagaaaaggtttataatatattttaaaacaatgtgttactatataatacaactataattgtagttaataactaaaacctcttgaaaatgtcaaagaaatacttgatttctgatgcaactttgactaaaatatttactttagaaataaaaacgttcttattttgctatatca

SEQ ID NO: 426418 - DNA, 7709 bp, Homo sapiens
attctggctgaatttggtacactacatatggagttcatccacctcagctacttgacaggggacctgacttactacaaaaaggttatgcacattcggaaactacttcagaaaatggatcgtccaaatggtctttatccaaattatttgaaccccagaacagggcgctggggtcagtggaagaggaagaacgtctgagaaataaaattcgagctgatcatgagaaggccttggaagaagcaaaagaaaaattaagaaagtcaagagaggaaattcgagcagaaattcagacagagaaaaataaggtagtccaagaaatgaagataaaagagaacaagccactgccaccagtccctattcccaaccttgtaggaatacgtggtggagacccagaagataatgacataagagagaaaagggaaaaaattaaagagatgatgaaacatgcttgggataactataggacatatgggtggggacataatgaactcagacctattgcaaggaaaggacactcccctaacatatttggaagttcacaaatgggtgctaccatagtagatgctttggataccctttatatcatgggacttcatgatgaattcctagatgggcaaagatggattgaagacaaccttgatttcagtgtgaattcagaggtgtctgtgtttgaagtcaacattcgatttattggaggcctacttgcagcatattacctatcaggagaggagatattcaagattaaagcagtgcaattggctgagaaactccttcctgcctttaacacacctactgggattccttgggcaatggtgaatttgaaaagtggagtagggcgaaactggggctgggcatctgcaggtagcagcattctggctgaatttggtacactacatatggagttcatccacctcagctacttgacaggggacctgacttactacaaaaaggttatgcacattcggaaactacttcagaaaatggatcgtccaaatggtctttatccaaattatttgaaccccagaacagggcgctggggtcagtatcatacatctgtcggtggcctgggagacagtttttatgaatacttactgaaagcatggttgatgtcagataaaacagaccatgaggcaagaaagatgtatgatgatgctattgaggctatagaaaaacatcttattaagaagtctcgtggaggtcttacctttattggagaatggaagaatgggcacttggaaaaaaagatggggcatttggcctgctttgctgggggaatgtttgcactaggagcagatggttccagagcagataaagctggtcattatttagagctaggggcagaaattgcacgtacttgtcatgagtcatatgacagaactgcattaaagctaggtcctgaatcattcaagtttgatggtgcagtggaggctgtggctgtccggcaggctgaaaagtattatatcctccgtccagaagtaattgaaacctattggtacctatggcgattcactcacgatccaagatacaggcagtggggctgggaagcagcactggccattgaaaagtattgccgagttaatggtgggttttctggagtcaaagatgtatattcctctactcctacacatgatgatgtacagcagagcttttttcttgctgaaacattaaaatatttgtatctgctgttctccggtgatgaccttttacctttagaccactgggtgtttaatacagaggctcaccctctgcctgtgttacatttagccaacaccacactttcaggtaatcctgctgttcgatgaaagcagttccagaaggaccattctcacctgtgttttgtttacatggaccactacagaaattagtttgaaggggcggcttttgaaaacctggacctctatgtcaacatgacagggtgaaactattccccctaagactgttcaacttgtagatacatcaactttgaaattattccattttatacctgaccaaaacatgttctgatatgtgtaggacagagacctggatgtgctttgatcgttaatgaggtggtcacatgagaagtgatacctgttactactgtattgtttttagagtcctgaagtctggaggctagacttcctgaaagcaagtcaagaatatagagcaccttgcaggagttcaagatggcctttggaaccaattatgtatttgtttcctcctacagtggagcagcattcaaatcaaatatttacatattgcttatcactttttctccattttaataatggaatgaactaaaataaacaagaacaaaagaatagtataattatatcagtaacaagaagactcaaaaaagaaacaggagtacctatccctatctgaattttcaagttccccattggatgaccagactggcaaccatttcaaatcccagtctatttcattgaaatttcttggttaagtttaattttctctgggggcatgatctcacaaagaatactcaagtctttttcttcttatggaatcatcgaaactgctatttatcataatcaccacttatgagcctgggtttgggattttgtgcatgtagttcagtctagtgttggtagcatgacagaaagtggggaaaatgccgcagtttgttgccttgaaacctaagagcaatccttggttttgttgctacattatttttccagaccaacacatctaccaagtaaattttattcactttaatttcataataaagttagtagagtcactcaacttacaactttatttatgtgggcttggcaaaaatcactataaggcagctctaaatttgccttgataagctaaataaattacttttataacttactaaagcagaacaaacagtgaaactttctaaaatattctatctggaatagggacaggggatcttttatttataatctcatcagatgagtgagttgttcacagatattttatgtttttttaattttctccaagaatatttatagaattccaaagaatcagaatagtttcaaaataattttcagtgataaaagagtgttgtaattaatcatattacactaaaattgggatacatctaaggaactttatcttactatcagtaggttttgcattgatatttctttttaaataaactactagttctttatattttgacaaaaagaacttaaattttatcaggaactgtaagataaatatctagtgcttataaattttctgtccttaaatttatgtgacagtgcaagatacttttgctcttttcatttaatataggcatcttccattgacattaataaaacttagaaacagtataattagtataacatttactctgaatttgaagatttcctgaaacaaagtttgtacaagaagcccaccttggaattctgaaggcttattttcttgtttgataagcttttcttttaaacttaggttttaagttggggaaagacttaattaactaatatagtattttctaaggttgatcatcttataccacgaatcgttaattttgacagttctactgatccgtaaaagataaccactgcaaattttttcagtataaaatttttcactgcaaaaaaatttcagtagaaaataaggatgcagggccagttacaatagtccttaagagagttaaattatagcacatgttttgacattgtaatatcttttactacttgaacatttaaatttctaaatgagaaaggtatatatattactgtaactgtagaagggaaaagggaaagtatttggttctaaaaaatgttagccttcctcgtaaaagtagcacaagcccacttatgaatcactgagaaaaagtgaaaaacttgagttggcaaagatgcagagcagcagtgcagatggcaatgaactctctgaattctcttttaccttatttagaagaatgcagagtaaagggaccttcttggttctgcaggaacttctcaagggatgaggagacagaacccctacttccaagtgctctatttgtattacccagatgactgaagcttaagagaaggcagggaagtatacaagcagagccagttctggtacaaacaaagaatttgacagggacaatggaagggtcttcttcaccactccttaccttctatgtgatggaaagactagagcttataaaagtacttccatttttttattctcctgaataccaaaggcaattaaagtcagctacaaatgacttgccagtgtcatgttttatttttgttatagatttttaaattatttccttcaagatcaattcttatcccatataatgcttagcttccaagaatattctttactttcttctgtcttttacagctctttgcattttgtagaccttaatactcaggttaaatattcattgcatttataagatcttctgcaaaaagcccagaaatggtccttttcaggtgcctcttcaaagagctgacaccttaccttgtgcctttggcacaaatgtgcagaatagatacatcagttggtgcataatcgaaaaaaataggaattttgaacactgttcttccttctacatttatttctcttcattttagaatcacactttttatgttaaaccagattattattattattattattcaaccagtattaagttgttaaaaccaagggaatggggccctaaccaaaaagaagtctcaactcagaaaaataagtccccagtcaggtggttcttactttcttgtgggttgcacattttgtatctctctaacatcagcgtattcctgactttaagcaggtgtttatatgtaaaataaaacctgagtatcgaagggaaatgcattctttttatggagtattgaccctgatcctctatgatgtcatatagagcaactcagggctatacttgctagattttaaccaagcagtttgaaatattaatcatcatcctctcatcttctccagtctccattgccaaagtctttgtcaaaactccaaatttgttgataaaagattgtgtttgccattctcatttataatgcagtttctccttaagcctggagttttttgaatgagtgcatgagtaaatgagagaatgtgtgaacgaacatttatgaagtatctaacatgtgccaagcattgtgcctggcactttcaatcattagaatgttttatgtgattccacagcattttctgtataagagtagctcacaacattttaaatgtttccaatatgaatcgtgttacaaaattcttaattttatatttcatataaattaaagaggaaaaagaaaaggtttataatatattttaaaacaatgtgttactatataatacaactataattgtagttaataactaaaacctcttgaaaatgtcaaagaaatacttgatttctgatgcaactttgactaaaatatttactttagaaataaaaacgttcttattttgctatatcactttaattgcataattaaaaagcagtgttttatagaaatgctggttattttatattcaaaaagattttgtcacataattcatgggtaaaacttgcagttgtaaattgtgtctgctctggtatgggccctattaatagtcccatgctgttaaatataaagaaaaatatactaaaatattcaaagttccaaataacagttcctagtaatagtattttgagttatttttctttaggtttccttatactcaaattggctaggtcctatcttttcctctctctctctctctctctctctctatatatatatatatatatatatatatatgagagatatatgagatatatgagagatcaagatctatatatgtatataaatacaattatacacagataatttttaatactctttgttaacaaacacagttgaaaactggtttcggctgcacaaataagcagaatatttgagtaactatatatgatatggagatattttaatccatttatcctggctcaagaacactgataaagatgattttctgttactttagctcattcagatcaggatggacatgctctttttgatctataactgttcagccagcttccagataatattttaggctatgagagctatacagtctctcttattactcatttctgctgttgaagtatcgaaaacagatagagatactatgtaaagaatgggcgtagctatgttccaggaaaactttatttacaaaagcagatggagggctggatttggtccatgggtcatagttagtgaccctgatcccaagtttattttgtgttagaccctctaacctttgatctgcgtcttttctgttttgatttacataattcatttttaaatcaaaaagatgtgcgtatatatggttgtgtgtatctgtataacctaaagctataatattttgttgtcttgaaagcagatacactcttcctggagtctgttcaggtttcaggacgattgactataatgaaagagacagaatagggtaagggaagatgggtatgctatcagccattttctttgccttgtcatttaatgccataatttcagattctctatgtaaaaagaaggtctgtgtattgtcaaaataatatactctccaagttctcctgctcattgacccttgaaccaggattctggattgctagagctgcagaaattcacccacttgggtactcttagagctctacagcaagaatatgatagaatgtctgatctttgtgctgcagaaagcaaacttttgaagaattctaagcaacagaaaatgggttatgtgactcatctgctatttggcagccactattccttttttagactgcagaacggtactgcccctgttacctctagaatagcctgagtctgaggagtgcagagaaaagatatatccaaaaggagaatccctttctcttgcataactctcaatcctttacaagtaagtagcattatttcagaatgtctatatgcatcattttcaactaaagcatacctcatccttaaacttccactatttaacagctaatccatttcaaacttggtttgagcctagcaattgcagaactcataaaattgcttgtgaaattacacaccatattactagcatatacattgcagtgctccaatcatgctaacagataatagatttttctttaagaattttatcaaatatttcactatttggggaaattttagaggaggggaagcctgtattcaggatgatagagggagcagagacttactgtctctcttccacattataaatgaactgcctttccaggtccaacatgctgtcaggttgcttcagctcggtgtgaatgtaagtgtggggatcaaacacacacacctatacacatacatattaatatgcagaggattttaaataattgcaaatgtcttgtggctgttttatttctacaaaattctgtaagatgtataccagaaaacataataaagataagctcagttcttcattgggaaaaaatatttttaaagaaaatttagaagtttttgctgaattaaagtatcttcaattttaattactggatttggaagttgaaatgccatccttcaatatcactggtctcaaattcattgatagaattttttcttaaactaataagtggggtaagtataatctcctaaattggtacccactggctgctcctaaactggtttccagtcatgtcctccagtatgtgatttttataaattaaaggtaatattgtatattaaagttcaaataaagatgttctttaagtgaaaaaaaaaaaa

SEQ ID NO: 426419 - DNA, 7340 bp, Homo sapiens
cttctgctgcttcctgcttctgccgcttcctgcttctgcccctgcttcctgcttctgccgtcatgatgaaacatgcttgggataactataggacatatgggtggggacataatgaactcagacctattgcaaggaaaggacactcccctaacatatttggaagttcacaaatgggtgctaccatagtagatgctttggataccctttatatcatgggacttcatgatgaattcctagatgggcaaagatggattgaagacaaccttgatttcagtgtgaattcagaggtgtctgtgtttgaagtcaacattcgatttattggaggcctacttgcagcatattacctatcaggagaggagatattcaagattaaagcagtgcaattggctgagaaactccttcctgcctttaacacacctactgggattccttgggcaatggtgaatttgaaaagtggagtagggcgaaactggggctgggcatctgcaggtagcagcattctggctgaatttggtacactacatatggagttcatccacctcagctacttgacaggggacctgacttactacaaaaaggttatgcacattcggaaactacttcagaaaatggatcgtccaaatggtctttatccaaattatttgaaccccagaacagggcgctggggtcagtatcatacatctgtcggtggcctgggagacagtttttatgaatacttactgaaagcatggttgatgtcagataaaacagaccatgaggcaagaaagatgtatgatgatgctattgaggctatagaaaaacatcttattaagaagtctcgtggaggtcttacctttattggagaatggaagaatgggcacttggaaaaaaagatggggcatttggcctgctttgctgggggaatgtttgcactaggagcagatggttccagagcagataaagctggtcattatttagagctaggggcagaaattgcacgtacttgtcatgagtcatatgacagaactgcattaaagctaggtcctgaatcattcaagtttgatggtgcagtggaggctgtggctgtccggcaggctgaaaagtattatatcctccgtccagaagtaattgaaacctattggtacctatggcgattcactcacgatccaagatacaggcagtggggctgggaagcagcactggccattgaaaagtattgccgagttaatggtgggttttctggagtcaaagatgtatattcctctactcctacacatgatgatgtacagcagagcttttttcttgctgaaacattaaaatatttgtatctgctgttctccggtgatgaccttttacctttagaccactgggtgtttaatacagaggctcaccctctgcctgtgttacatttagccaacaccacactttcaggtaatcctgctgttcgatgaaagcagttccagaaggaccattctcacctgtgttttgtttacatggaccactacagaaattagtttgaaggggcggcttttgaaaacctggacctctatgtcaacatgacagggtgaaactattccccctaagactgttcaacttgtagatacatcaactttgaaattattccattttatacctgaccaaaacatgttctgatatgtgtaggacagagacctggatgtgctttgatcgttaatgaggtggtcacatgagaagtgatacctgttactactgtattgtttttagagtcctgaagtctggaggctagacttcctgaaagcaagtcaagaatatagagcaccttgcaggagttcaagatggcctttggaaccaattatgtatttgtttcctcctacagtggagcagcattcaaatcaaatatttacatattgcttatcactttttctccattttaataatggaatgaactaaaataaacaagaacaaaagaatagtataattatatcagtaacaagaagactcaaaaaagaaacaggagtacctatccctatctgaattttcaagttccccattggatgaccagactggcaaccatttcaaatcccagtctatttcattgaaatttcttggttaagtttaattttctctgggggcatgatctcacaaagaatactcaagtctttttcttcttatggaatcatcgaaactgctatttatcataatcaccacttatgagcctgggtttgggattttgtgcatgtagttcagtctagtgttggtagcatgacagaaagtggggaaaatgccgcagtttgttgccttgaaacctaagagcaatccttggttttgttgctacattatttttccagaccaacacatctaccaagtaaattttattcactttaatttcataataaagttagtagagtcactcaacttacaactttatttatgtgggcttggcaaaaatcactataaggcagctctaaatttgccttgataagctaaataaattacttttataacttactaaagcagaacaaacagtgaaactttctaaaatattctatctggaatagggacaggggatcttttatttataatctcatcagatgagtgagttgttcacagatattttatgtttttttaattttctccaagaatatttatagaattccaaagaatcagaatagtttcaaaataattttcagtgataaaagagtgttgtaattaatcatattacactaaaattgggatacatctaaggaactttatcttactatcagtaggttttgcattgatatttctttttaaataaactactagttctttatattttgacaaaaagaacttaaattttatcaggaactgtaagataaatatctagtgcttataaattttctgtccttaaatttatgtgacagtgcaagatacttttgctcttttcatttaatataggcatcttccattgacattaataaaacttagaaacagtataattagtataacatttactctgaatttgaagatttcctgaaacaaagtttgtacaagaagcccaccttggaattctgaaggcttattttcttgtttgataagcttttcttttaaacttaggttttaagttggggaaagacttaattaactaatatagtattttctaaggttgatcatcttataccacgaatcgttaattttgacagttctactgatccgtaaaagataaccactgcaaattttttcagtataaaatttttcactgcaaaaaaatttcagtagaaaataaggatgcagggccagttacaatagtccttaagagagttaaattatagcacatgttttgacattgtaatatcttttactacttgaacatttaaatttctaaatgagaaaggtatatatattactgtaactgtagaagggaaaagggaaagtatttggttctaaaaaatgttagccttcctcgtaaaagtagcacaagcccacttatgaatcactgagaaaaagtgaaaaacttgagttggcaaagatgcagagcagcagtgcagatggcaatgaactctctgaattctcttttaccttatttagaagaatgcagagtaaagggaccttcttggttctgcaggaacttctcaagggatgaggagacagaacccctacttccaagtgctctatttgtattacccagatgactgaagcttaagagaaggcagggaagtatacaagcagagccagttctggtacaaacaaagaatttgacagggacaatggaagggtcttcttcaccactccttaccttctatgtgatggaaagactagagcttataaaagtacttccatttttttattctcctgaataccaaaggcaattaaagtcagctacaaatgacttgccagtgtcatgttttatttttgttatagatttttaaattatttccttcaagatcaattcttatcccatataatgcttagcttccaagaatattctttactttcttctgtcttttacagctctttgcattttgtagaccttaatactcaggttaaatattcattgcatttataagatcttctgcaaaaagcccagaaatggtccttttcaggtgcctcttcaaagagctgacaccttaccttgtgcctttggcacaaatgtgcagaatagatacatcagttggtgcataatcgaaaaaaataggaattttgaacactgttcttccttctacatttatttctcttcattttagaatcacactttttatgttaaaccagattattattattattattattcaaccagtattaagttgttaaaaccaagggaatggggccctaaccaaaaagaagtctcaactcagaaaaataagtccccagtcaggtggttcttactttcttgtgggttgcacattttgtatctctctaacatcagcgtattcctgactttaagcaggtgtttatatgtaaaataaaacctgagtatcgaagggaaatgcattctttttatggagtattgaccctgatcctctatgatgtcatatagagcaactcagggctatacttgctagattttaaccaagcagtttgaaatattaatcatcatcctctcatcttctccagtctccattgccaaagtctttgtcaaaactccaaatttgttgataaaagattgtgtttgccattctcatttataatgcagtttctccttaagcctggagttttttgaatgagtgcatgagtaaatgagagaatgtgtgaacgaacatttatgaagtatctaacatgtgccaagcattgtgcctggcactttcaatcattagaatgttttatgtgattccacagcattttctgtataagagtagctcacaacattttaaatgtttccaatatgaatcgtgttacaaaattcttaattttatatttcatataaattaaagaggaaaaagaaaaggtttataatatattttaaaacaatgtgttactatataatacaactataattgtagttaataactaaaacctcttgaaaatgtcaaagaaatacttgatttctgatgcaactttgactaaaatatttactttagaaataaaaacgttcttattttgctatatcactttaattgcataattaaaaagcagtgttttatagaaatgctggttattttatattcaaaaagattttgtcacataattcatgggtaaaacttgcagttgtaaattgtgtctgctctggtatgggccctattaatagtcccatgctgttaaatataaagaaaaatatactaaaatattcaaagttccaaataacagttcctagtaatagtattttgagttatttttctttaggtttccttatactcaaattggctaggtcctatcttttcctctctctctctctctctctctctctatatatatatatatatatatatatatatgagagatatatgagatatatgagagatcaagatctatatatgtatataaatacaattatacacagataatttttaatactctttgttaacaaacacagttgaaaactggtttcggctgcacaaataagcagaatatttgagtaactatatatgatatggagatattttaatccatttatcctggctcaagaacactgataaagatgattttctgttactttagctcattcagatcaggatggacatgctctttttgatctataactgttcagccagcttccagataatattttaggctatgagagctatacagtctctcttattactcatttctgctgttgaagtatcgaaaacagatagagatactatgtaaagaatgggcgtagctatgttccaggaaaactttatttacaaaagcagatggagggctggatttggtccatgggtcatagttagtgaccctgatcccaagtttattttgtgttagaccctctaacctttgatctgcgtcttttctgttttgatttacataattcatttttaaatcaaaaagatgtgcgtatatatggttgtgtgtatctgtataacctaaagctataatattttgttgtcttgaaagcagatacactcttcctggagtctgttcaggtttcaggacgattgactataatgaaagagacagaatagggtaagggaagatgggtatgctatcagccattttctttgccttgtcatttaatgccataatttcagattctctatgtaaaaagaaggtctgtgtattgtcaaaataatatactctccaagttctcctgctcattgacccttgaaccaggattctggattgctagagctgcagaaattcacccacttgggtactcttagagctctacagcaagaatatgatagaatgtctgatctttgtgctgcagaaagcaaacttttgaagaattctaagcaacagaaaatgggttatgtgactcatctgctatttggcagccactattccttttttagactgcagaacggtactgcccctgttacctctagaatagcctgagtctgaggagtgcagagaaaagatatatccaaaaggagaatccctttctcttgcataactctcaatcctttacaagtaagtagcattatttcagaatgtctatatgcatcattttcaactaaagcatacctcatccttaaacttccactatttaacagctaatccatttcaaacttggtttgagcctagcaattgcagaactcataaaattgcttgtgaaattacacaccatattactagcatatacattgcagtgctccaatcatgctaacagataatagatttttctttaagaattttatcaaatatttcactatttggggaaattttagaggaggggaagcctgtattcaggatgatagagggagcagagacttactgtctctcttccacattataaatgaactgcctttccaggtccaacatgctgtcaggttgcttcagctcggtgtgaatgtaagtgtggggatcaaacacacacacctatacacatacatattaatatgcagaggattttaaataattgcaaatgtcttgtggctgttttatttctacaaaattctgtaagatgtataccagaaaacataataaagataagctcagttcttcattgggaaaaaatatttttaaagaaaatttagaagtttttgctgaattaaagtatcttcaattttaattactggatttggaagttgaaatgccatccttcaatatcactggtctcaaattcattgatagaattttttcttaaactaataagtggggtaagtataatctcctaaattggtacccactggctgctcctaaactggtttccagtcatgtcctccagtatgtgatttttataaattaaaggtaatattgtatattaaagttcaaataaagatgttctttaagtgaaaaaaaaaaaa

SEQ ID NO: 426420 - DNA, 6792 bp, Homo sapiens
gcagtatgtactgcttaggttatgggtgcaccaaaatctctcaaatcactgctaaagaacttactcatgtaaccaaataccacctgtaccccagtaacttatggaaaaaaatgaatgacagcagagtcctcatcagaaccaatattcctcctgaacatagatagaactaaacaagattttgacaaatcaactctaacaacaaattacatagataatatgttatgactaaatgggtttatcccaggtgtggagggttgatttaatgtttgaaaatcaatgaactaaaatagaccacctcagtagacagaaaaattatttggcaaaatccaacacccatttctgataaaaactctcagcaaactgggaatagaaggaaacttcttaccctgataagggcatatatgaaaaacctacagctaacatcatattgaaaaactgaatgtgttgctcttaagattaggaacaagacaaaggtgtctgctctcttcaccacacctggccggatttttttttaaactgttttatttcagtaggtctagttgttcatcttactggatttcttatacactattctgaaacctcttgtctttgtgtttagatcatttgggtgtctgaggtttatttctttgatgtttttcatcaaagctgctcaaaatacgttattggttttctgtgccattaaaagtgagctcacttcatgttcttgttgaattctaactgaagctcatttctcccctttttattttcagatatttgtatctgctgttctccggtgatgaccttttacctttagaccactgggtgtttaatacagaggctcaccctctgcctgtgttacatttagccaacaccacactttcaggtaatcctgctgttcgatgaaagcagttccagaaggaccattctcacctgtgttttgtttacatggaccactacagaaattagtttgaaggggcggcttttgaaaacctggacctctatgtcaacatgacagggtgaaactattccccctaagactgttcaacttgtagatacatcaactttgaaattattccattttatacctgaccaaaacatgttctgatatgtgtaggacagagacctggatgtgctttgatcgttaatgaggtggtcacatgagaagtgatacctgttactactgtattgtttttagagtcctgaagtctggaggctagacttcctgaaagcaagtcaagaatatagagcaccttgcaggagttcaagatggcctttggaaccaattatgtatttgtttcctcctacagtggagcagcattcaaatcaaatatttacatattgcttatcactttttctccattttaataatggaatgaactaaaataaacaagaacaaaagaatagtataattatatcagtaacaagaagactcaaaaaagaaacaggagtacctatccctatctgaattttcaagttccccattggatgaccagactggcaaccatttcaaatcccagtctatttcattgaaatttcttggttaagtttaattttctctgggggcatgatctcacaaagaatactcaagtctttttcttcttatggaatcatcgaaactgctatttatcataatcaccacttatgagcctgggtttgggattttgtgcatgtagttcagtctagtgttggtagcatgacagaaagtggggaaaatgccgcagtttgttgccttgaaacctaagagcaatccttggttttgttgctacattatttttccagaccaacacatctaccaagtaaattttattcactttaatttcataataaagttagtagagtcactcaacttacaactttatttatgtgggcttggcaaaaatcactataaggcagctctaaatttgccttgataagctaaataaattacttttataacttactaaagcagaacaaacagtgaaactttctaaaatattctatctggaatagggacaggggatcttttatttataatctcatcagatgagtgagttgttcacagatattttatgtttttttaattttctccaagaatatttatagaattccaaagaatcagaatagtttcaaaataattttcagtgataaaagagtgttgtaattaatcatattacactaaaattgggatacatctaaggaactttatcttactatcagtaggttttgcattgatatttctttttaaataaactactagttctttatattttgacaaaaagaacttaaattttatcaggaactgtaagataaatatctagtgcttataaattttctgtccttaaatttatgtgacagtgcaagatacttttgctcttttcatttaatataggcatcttccattgacattaataaaacttagaaacagtataattagtataacatttactctgaatttgaagatttcctgaaacaaagtttgtacaagaagcccaccttggaattctgaaggcttattttcttgtttgataagcttttcttttaaacttaggttttaagttggggaaagacttaattaactaatatagtattttctaaggttgatcatcttataccacgaatcgttaattttgacagttctactgatccgtaaaagataaccactgcaaattttttcagtataaaatttttcactgcaaaaaaatttcagtagaaaataaggatgcagggccagttacaatagtccttaagagagttaaattatagcacatgttttgacattgtaatatcttttactacttgaacatttaaatttctaaatgagaaaggtatatatattactgtaactgtagaagggaaaagggaaagtatttggttctaaaaaatgttagccttcctcgtaaaagtagcacaagcccacttatgaatcactgagaaaaagtgaaaaacttgagttggcaaagatgcagagcagcagtgcagatggcaatgaactctctgaattctcttttaccttatttagaagaatgcagagtaaagggaccttcttggttctgcaggaacttctcaagggatgaggagacagaacccctacttccaagtgctctatttgtattacccagatgactgaagcttaagagaaggcagggaagtatacaagcagagccagttctggtacaaacaaagaatttgacagggacaatggaagggtcttcttcaccactccttaccttctatgtgatggaaagactagagcttataaaagtacttccatttttttattctcctgaataccaaaggcaattaaagtcagctacaaatgacttgccagtgtcatgttttatttttgttatagatttttaaattatttccttcaagatcaattcttatcccatataatgcttagcttccaagaatattctttactttcttctgtcttttacagctctttgcattttgtagaccttaatactcaggttaaatattcattgcatttataagatcttctgcaaaaagcccagaaatggtccttttcaggtgcctcttcaaagagctgacaccttaccttgtgcctttggcacaaatgtgcagaatagatacatcagttggtgcataatcgaaaaaaataggaattttgaacactgttcttccttctacatttatttctcttcattttagaatcacactttttatgttaaaccagattattattattattattattcaaccagtattaagttgttaaaaccaagggaatggggccctaaccaaaaagaagtctcaactcagaaaaataagtccccagtcaggtggttcttactttcttgtgggttgcacattttgtatctctctaacatcagcgtattcctgactttaagcaggtgtttatatgtaaaataaaacctgagtatcgaagggaaatgcattctttttatggagtattgaccctgatcctctatgatgtcatatagagcaactcagggctatacttgctagattttaaccaagcagtttgaaatattaatcatcatcctctcatcttctccagtctccattgccaaagtctttgtcaaaactccaaatttgttgataaaagattgtgtttgccattctcatttataatgcagtttctccttaagcctggagttttttgaatgagtgcatgagtaaatgagagaatgtgtgaacgaacatttatgaagtatctaacatgtgccaagcattgtgcctggcactttcaatcattagaatgttttatgtgattccacagcattttctgtataagagtagctcacaacattttaaatgtttccaatatgaatcgtgttacaaaattcttaattttatatttcatataaattaaagaggaaaaagaaaaggtttataatatattttaaaacaatgtgttactatataatacaactataattgtagttaataactaaaacctcttgaaaatgtcaaagaaatacttgatttctgatgcaactttgactaaaatatttactttagaaataaaaacgttcttattttgctatatcactttaattgcataattaaaaagcagtgttttatagaaatgctggttattttatattcaaaaagattttgtcacataattcatgggtaaaacttgcagttgtaaattgtgtctgctctggtatgggccctattaatagtcccatgctgttaaatataaagaaaaatatactaaaatattcaaagttccaaataacagttcctagtaatagtattttgagttatttttctttaggtttccttatactcaaattggctaggtcctatcttttcctctctctctctctctctctctctctatatatatatatatatatatatatatatgagagatatatgagatatatgagagatcaagatctatatatgtatataaatacaattatacacagataatttttaatactctttgttaacaaacacagttgaaaactggtttcggctgcacaaataagcagaatatttgagtaactatatatgatatggagatattttaatccatttatcctggctcaagaacactgataaagatgattttctgttactttagctcattcagatcaggatggacatgctctttttgatctataactgttcagccagcttccagataatattttaggctatgagagctatacagtctctcttattactcatttctgctgttgaagtatcgaaaacagatagagatactatgtaaagaatgggcgtagctatgttccaggaaaactttatttacaaaagcagatggagggctggatttggtccatgggtcatagttagtgaccctgatcccaagtttattttgtgttagaccctctaacctttgatctgcgtcttttctgttttgatttacataattcatttttaaatcaaaaagatgtgcgtatatatggttgtgtgtatctgtataacctaaagctataatattttgttgtcttgaaagcagatacactcttcctggagtctgttcaggtttcaggacgattgactataatgaaagagacagaatagggtaagggaagatgggtatgctatcagccattttctttgccttgtcatttaatgccataatttcagattctctatgtaaaaagaaggtctgtgtattgtcaaaataatatactctccaagttctcctgctcattgacccttgaaccaggattctggattgctagagctgcagaaattcacccacttgggtactcttagagctctacagcaagaatatgatagaatgtctgatctttgtgctgcagaaagcaaacttttgaagaattctaagcaacagaaaatgggttatgtgactcatctgctatttggcagccactattccttttttagactgcagaacggtactgcccctgttacctctagaatagcctgagtctgaggagtgcagagaaaagatatatccaaaaggagaatccctttctcttgcataactctcaatcctttacaagtaagtagcattatttcagaatgtctatatgcatcattttcaactaaagcatacctcatccttaaacttccactatttaacagctaatccatttcaaacttggtttgagcctagcaattgcagaactcataaaattgcttgtgaaattacacaccatattactagcatatacattgcagtgctccaatcatgctaacagataatagatttttctttaagaattttatcaaatatttcactatttggggaaattttagaggaggggaagcctgtattcaggatgatagagggagcagagacttactgtctctcttccacattataaatgaactgcctttccaggtccaacatgctgtcaggttgcttcagctcggtgtgaatgtaagtgtggggatcaaacacacacacctatacacatacatattaatatgcagaggattttaaataattgcaaatgtcttgtggctgttttatttctacaaaattctgtaagatgtataccagaaaacataataaagataagctcagttcttcattgggaaaaaatatttttaaagaaaatttagaagtttttgctgaattaaagtatcttcaattttaattactggatttggaagttgaaatgccatccttcaatatcactggtctcaaattcattgatagaattttttcttaaactaataagtggggtaagtataatctcctaaattggtacccactggctgctcctaaactggtttccagtcatgtcctccagtatgtgatttttataaattaaaggtaatattgtatattaaagttcaaataaagatgttctttaagtgaaaaaaaaaaaa

SEQ ID NO: 426421 - DNA, 6426 bp, Homo sapiens
ccctgacagacccgtgcggtagcaacagcggcggcggccgcggcggctggccggactcaggtgtttcggacgctattgcccttcgcgccagccgtcgagtgggcagcagcgggactcagccgggcgccaggttcctgccaggcagcgccgggaagcgcgggcggccgagaactccttcctgctacttcgcccagcgccgctgcttcggcttcccagcgaagtgggagaccttcctccctgtttgcagacgtccgtgggagacccttattttttccaccgctaaggttaagagattctggaatagaagcgtcgaaggagatcaagtgaaccttctacaactcctcggatgtcgccagtctccctttcggggcggaagactacgtttgagcatctcactgaggtgcaggaatggaagaacccaccttgcagcttttctgcagtgtggcttgcctgatctacccctaggaatgaagaggaggcttgtaataatccgatgaagtacagatgttgaagaggatatcgcaggacctaaacttgtgatcgtttgggggaggtcacacacgtttctgagtgggaatggatgggcgtgaatgacgtgccctcttaaaaagcacaacaatcctttaagaggagcaaaattgagttttcccattttggccaagattttgaagacagttcaatgtattctacatttgacataagatgagaactttctaaagtattctctccaagagcgtaaacgatgactaccccagccctgctgcccctctctggacgtaggataccacctctgaacctggggccgccttccttcccacatcacagggctaccttgagactttctgagaagtttattcttctccttattcttagtgccttcatcactctgtgttttggggcattctttttccttccagactcttcaaaacacaaacgctttgatttgggtttagaagatgtgttaattccacatgtagatgccggtaaaggggctaaaaaccccggagtcttcctgatccatggacccgatgaacatagacacagggaagaggaagaacgtctgagaaataaaattcgagctgatcatgagaaggccttggaagaagcaaaagaaaaattaagaaagtcaagagaggaaattcgagcagaaattcagacagagaaaaataaggtagtccaagaaatgaagataaaagagaacaagccactgccaccagtccctattcccaaccttgtaggaatacgtggtggagacccagaagataatgacataagagagaaaagggaaaaaattaaagagatgatgaaacatgcttgggataactataggacatatgggtggggacataatgaactcagacctattgcaaggaaaggacactcccctaacatatttggaagttcacaaatgggtgctaccatagtagatgctttggataccctttatatcatgggacttcatgatgaattcctagatgggcaaagatggattgaagacaaccttgatttcagtgtgaattcagaggtgtctgtgtttgaagtcaacattcgatttattggaggcctacttgcagcatattacctatcaggagaggagatattcaagattaaagcagtgcaattggctgagaaactccttcctgcctttaacacacctactgggattccttgggcaatggtgaatttgaaaagtggagtagggcgaaactggggctgggcatctgcaggtagcagcattctggctgaatttggtacactacatatggagttcatccacctcagctacttgacaggggacctgacttactacaaaaaggttatgcacattcggaaactacttcagaaaatggatcgtccaaatggtctttatccaaattatttgaaccccagaacagggcgctggggtcagtatcatacatctgtcggtggcctgggagacagtttttatgaatacttactgaaagcatggttgatgtcagataaaacagaccatgaggcaagaaagatgtatgatgatgctattgaggctatagaaaaacatcttattaagaagtctcgtggaggtcttacctttattggagaatggaagaatgggcacttggaaaaaaagatggggcatttggcctgctttgctgggggaatgtttgcactaggagcagatggttccagagcagataaagctggtcattatttagagctaggggcagaaattgcacgtacttgtcatgagtcatatgacagaactgcattaaagctaggtcctgaatcattcaagtttgatggtgcagtggaggctgtggctgtccggcaggctgaaaagtattatatcctccgtccagaagtaattgaaacctattggtacctatggcgattcactcacgatccaagatacaggcagtggggctgggaagcagcactggccattgaaaagtattgccgagttaatggtgggttttctggagtcaaagatgtatattcctctactcctacacatgatgatgtacagcagagcttttttcttgctgaaacattaaaatatttgtatctgctgttctccggtgatgaccttttacctttagaccactgggtgtttaatacagaggctcaccctctgcctgtgttacatttagccaacaccacactttcaggaacttctcaagggatgaggagacagaacccctacttccaagtgctctatttgtattacccagatgactgaagcttaagagaaggcagggaagtatacaagcagagccagttctggtacaaacaaagaatttgacagggacaatggaagggtcttcttcaccactccttaccttctatgtgatggaaagactagagcttataaaagtacttccatttttttattctcctgaataccaaaggcaattaaagtcagctacaaatgacttgccagtgtcatgttttatttttgttatagatttttaaattatttccttcaagatcaattcttatcccatataatgcttagcttccaagaatattctttactttcttctgtcttttacagctctttgcattttgtagaccttaatactcaggttaaatattcattgcatttataagatcttctgcaaaaagcccagaaatggtccttttcaggtgcctcttcaaagagctgacaccttaccttgtgcctttggcacaaatgtgcagaatagatacatcagttggtgcataatcgaaaaaaataggaattttgaacactgttcttccttctacatttatttctcttcattttagaatcacactttttatgttaaaccagattattattattattattattcaaccagtattaagttgttaaaaccaagggaatggggccctaaccaaaaagaagtctcaactcagaaaaataagtccccagtcaggtggttcttactttcttgtgggttgcacattttgtatctctctaacatcagcgtattcctgactttaagcaggtgtttatatgtaaaataaaacctgagtatcgaagggaaatgcattctttttatggagtattgaccctgatcctctatgatgtcatatagagcaactcagggctatacttgctagattttaaccaagcagtttgaaatattaatcatcatcctctcatcttctccagtctccattgccaaagtctttgtcaaaactccaaatttgttgataaaagattgtgtttgccattctcatttataatgcagtttctccttaagcctggagttttttgaatgagtgcatgagtaaatgagagaatgtgtgaacgaacatttatgaagtatctaacatgtgccaagcattgtgcctggcactttcaatcattagaatgttttatgtgattccacagcattttctgtataagagtagctcacaacattttaaatgtttccaatatgaatcgtgttacaaaattcttaattttatatttcatataaattaaagaggaaaaagaaaaggtttataatatattttaaaacaatgtgttactatataatacaactataattgtagttaataactaaaacctcttgaaaatgtcaaagaaatacttgatttctgatgcaactttgactaaaatatttactttagaaataaaaacgttcttattttgctatatcactttaattgcataattaaaaagcagtgttttatagaaatgctggttattttatattcaaaaagattttgtcacataattcatgggtaaaacttgcagttgtaaattgtgtctgctctggtatgggccctattaatagtcccatgctgttaaatataaagaaaaatatactaaaatattcaaagttccaaataacagttcctagtaatagtattttgagttatttttctttaggtttccttatactcaaattggctaggtcctatcttttcctctctctctctctctctctctctctatatatatatatatatatatatatatatgagagatatatgagatatatgagagatcaagatctatatatgtatataaatacaattatacacagataatttttaatactctttgttaacaaacacagttgaaaactggtttcggctgcacaaataagcagaatatttgagtaactatatatgatatggagatattttaatccatttatcctggctcaagaacactgataaagatgattttctgttactttagctcattcagatcaggatggacatgctctttttgatctataactgttcagccagcttccagataatattttaggctatgagagctatacagtctctcttattactcatttctgctgttgaagtatcgaaaacagatagagatactatgtaaagaatgggcgtagctatgttccaggaaaactttatttacaaaagcagatggagggctggatttggtccatgggtcatagttagtgaccctgatcccaagtttattttgtgttagaccctctaacctttgatctgcgtcttttctgttttgatttacataattcatttttaaatcaaaaagatgtgcgtatatatggttgtgtgtatctgtataacctaaagctataatattttgttgtcttgaaagcagatacactcttcctggagtctgttcaggtttcaggacgattgactataatgaaagagacagaatagggtaagggaagatgggtatgctatcagccattttctttgccttgtcatttaatgccataatttcagattctctatgtaaaaagaaggtctgtgtattgtcaaaataatatactctccaagttctcctgctcattgacccttgaaccaggattctggattgctagagctgcagaaattcacccacttgggtactcttagagctctacagcaagaatatgatagaatgtctgatctttgtgctgcagaaagcaaacttttgaagaattctaagcaacagaaaatgggttatgtgactcatctgctatttggcagccactattccttttttagactgcagaacggtactgcccctgttacctctagaatagcctgagtctgaggagtgcagagaaaagatatatccaaaaggagaatccctttctcttgcataactctcaatcctttacaagtaagtagcattatttcagaatgtctatatgcatcattttcaactaaagcatacctcatccttaaacttccactatttaacagctaatccatttcaaacttggtttgagcctagcaattgcagaactcataaaattgcttgtgaaattacacaccatattactagcatatacattgcagtgctccaatcatgctaacagataatagatttttctttaagaattttatcaaatatttcactatttggggaaattttagaggaggggaagcctgtattcaggatgatagagggagcagagacttactgtctctcttccacattataaatgaactgcctttccaggtccaacatgctgtcaggttgcttcagctcggtgtgaatgtaagtgtggggatcaaacacacacacctatacacatacatattaatatgcagaggattttaaataattgcaaatgtcttgtggctgttttatttctacaaaattctgtaagatgtataccagaaaacataataaagataagctcagttcttcattgggaaaaaatatttttaaagaaaatttagaagtttttgctgaattaaagtatcttcaattttaattactggatttggaagttgaaatgccatccttcaatatcactggtctcaaattcattgatagaattttttcttaaactaataagtggggtaagtataatctcctaaattggtacccactggctgctcctaaactggtttccagtcatgtcctccagtatgtgatttttataaattaaaggtaatattgtatattaaagttcaaataaagatgttctttaagtgaaaaaaaaaaaa

SEQ ID NO: 426422 - DNA, 3045 bp, Homo sapiens
  misc_feature (30)..(30): n is a, c, g, or t
attcctagagtctccccacgtaatatgtanccttgtgggttgcacattttgtatctctctaacatcagcgtattcctgactttaagcaggtgtttatatgtaaaataaaacctgagtatcgaagggaaatgcattctttttatggagtattgaccctgatcctctatgatgtcatatagagcaactcagggctatacttgctagattttaaccaagcagtttgaaatattaatcatcatcctctcatcttctccagtctccattgccaaagtctttgtcaaaactccaaatttgttgataaaagattgtgtttgccattctcatttataatgcagtttctccttaagcctggagttttttgaatgagtgcatgagtaaatgagagaatgtgtgaacgaacatttatgaagtatctaacatgtgccaagcattgtgcctggcactttcaatcattagaatgttttatgtgattccacagcattttctgtataagagtagctcacaacattttaaatgtttccaatatgaatcgtgttacaaaattcttaattttatatttcatataaattaaagaggaaaaagaaaaggtttataatatattttaaaacaatgtgttactatataatacaactataattgtagttaataactaaaacctcttgaaaatgtcaaagaaatacttgatttctgatgcaactttgactaaaatatttactttagaaataaaaacgttcttattttgctatatcactttaattgcataattaaaaagcagtgttttatagaaatgctggttattttatattcaaaaagattttgtcacataattcatgggtaaaacttgcagttgtaaattgtgtctgctctggtatgggccctattaatagtcccatgctgttaaatataaagaaaaatatactaaaatattcaaagttccaaataacagttcctagtaatagtattttgagttatttttctttaggtttccttatactcaaattggctaggtcctatcttttcctctctctctctctctctctctctctatatatatatatatatatatatatatatgagagatatatgagatatatgagagatcaagatctatatatgtatataaatacaattatacacagataatttttaatactctttgttaacaaacacagttgaaaactggtttcggctgcacaaataagcagaatatttgagtaactatatatgatatggagatattttaatccatttatcctggctcaagaacactgataaagatgattttctgttactttagctcattcagatcaggatggacatgctctttttgatctataactgttcagccagcttccagataatattttaggctatgagagctatacagtctctcttattactcatttctgctgttgaagtatcgaaaacagatagagatactatgtaaagaatgggcgtagctatgttccaggaaaactttatttacaaaagcagatggagggctggatttggtccatgggtcatagttagtgaccctgatcccaagtttattttgtgttagaccctctaacctttgatctgcgtcttttctgttttgatttacataattcatttttaaatcaaaaagatgtgcgtatatatggttgtgtgtatctgtataacctaaagctataatattttgttgtcttgaaagcagatacactcttcctggagtctgttcaggtttcaggacgattgactataatgaaagagacagaatagggtaagggaagatgggtatgctatcagccattttctttgccttgtcatttaatgccataatttcagattctctatgtaaaaagaaggtctgtgtattgtcaaaataatatactctccaagttctcctgctcattgacccttgaaccaggattctggattgctagagctgcagaaattcacccacttgggtactcttagagctctacagcaagaatatgatagaatgtctgatctttgtgctgcagaaagcaaacttttgaagaattctaagcaacagaaaatgggttatgtgactcatctgctatttggcagccactattccttttttagactgcagaacggtactgcccctgttacctctagaatagcctgagtctgaggagtgcagagaaaagatatatccaaaaggagaatccctttctcttgcataactctcaatcctttacaagtaagtagcattatttcagaatgtctatatgcatcattttcaactaaagcatacctcatccttaaacttccactatttaacagctaatccatttcaaacttggtttgagcctagcaattgcagaactcataaaattgcttgtgaaattacacaccatattactagcatatacattgcagtgctccaatcatgctaacagataatagatttttctttaagaattttatcaaatatttcactatttggggaaattttagaggaggggaagcctgtattcaggatgatagagggagcagagacttactgtctctcttccacattataaatgaactgcctttccaggtccaacatgctgtcaggttgcttcagctcggtgtgaatgtaagtgtggggatcaaacacacacacctatacacatacatattaatatgcagaggattttaaataattgcaaatgtcttgtggctgttttatttctacaaaattctgtaagatgtataccagaaaacataataaagataagctcagttcttcattgggaaaaaatatttttaaagaaaatttagaagtttttgctgaattaaagtatcttcaattttaattactggatttggaagttgaaatgccatccttcaatatcactggtctcaaattcattgatagaattttttcttaaactaataagtggggtaagtataatctcctaaattggtacccactggctgctcctaaactggtttccagtcatgtcctccagtatgtgatttttataaattaaaggtaatattgtatattaaagttcaaataaagatgttctttaagtgaaaaaaaaaaaa

SEQ ID NO: 426423 - DNA, 3626 bp, Homo sapiens
  misc_feature (3410)..(3410): n is a, c, g, or t
  misc_feature (3497)..(3497): n is a, c, g, or t
ccctgacagacccgtgcggtagcaacagcggcggcggccgcggcggctggccggactcaggtgtttcggacgctattgcccttcgcgccagccgtcgagtgggcagcagcgggactcagccgggcgccaggttcctgccaggcagcgccgggaagcgcgggcggccgagaactccttcctgctacttcgcccagcgccgctgcttcggcttcccagcgaagtgggagaccttcctccctgtttgcagacgtccgtgggagacccttattttttccaccgctaaggttaagagattctggaatagaagcgtcgaaggagatcaagtgaaccttctacaactcctcggatgtcgccagtctccctttcggggcggaagactacgtttgagcatctcactgaggtgcaggaatggaagaacccaccttgcagcttttctgcagtgtggcttgcctgatctacccctaggaatgaagaggaggcttgtaataatccgatgaagtacagatgttgaagaggatatcgcaggacctaaacttgtgatcgtttgggggaggtcacacacgtttctgagtgggaatggatgggcgtgaatgacgtgccctcttaaaaagcacaacaatcctttaagaggagcaaaattgagttttcccattttggccaagattttgaagacagttcaatgtattctacatttgacataagatgagaactttctaaagtattctctccaagagcgtaaacgatgactaccccagccctgctgcccctctctggacgtaggataccacctctgaacctggggccgccttccttcccacatcacagggctaccttgagactttctgagaagtttattcttctccttattcttagtgccttcatcactctgtgttttggggcattctttttccttccagactcttcaaaacacaaacgctttgatttgggtttagaagatgtgttaattccacatgtagatgccggtaaaggggctaaaaaccccggagtcttcctgatccatggacccgatgaacatagacacagggaagaggaagaacgtctgagaaataaaattcgagctgatcatgagaaggccttggaagaagcaaaagaaaaattaagaaagtcaagagaggaaattcgagcagaaattcagacagagaaaaataaggtagtccaagaaatgaagataaaagagaacaagccactgccaccagtccctattcccaaccttgtaggaatacgtggtggagacccagaagataatgacataagagagaaaagggaaaaaattaaagagatgatgaaacatgcttgggataactataggacatatgggtggggacataatgaactcagacctattgcaaggaaaggacactcccctaacatatttggaagttcacaaatgggtgctaccatagtagatgctttggataccctttatatcatgggacttcatgatgaattcctagatgggcaaagatggattgaagacaaccttgatttcagtgtgaattcagaggtgtctgtgtttgaagtcaacattcgatttattggaggcctacttgcagcatattacctatcaggagaggagatattcaagattaaagcagtgcaattggctgagaaactccttcctgcctttaacacacctactgggattccttgggcaatggtgaatttgaaaagtggagtagggcgaaactggggctgggcatctgcaggtagcagcattctggctgaatttggtacactacatatggagttcatccacctcagctacttgacaggggacctgacttactacaaaaaggttatgcacattcggaaactacttcagaaaatggatcgtccaaatggtctttatccaaattatttgaaccccagaacagggcgctggggtcagtatcatacatctgtcggtggcctgggagacagtttttatgaatacttactgaaagcatggttgatgtcagataaaacagaccatgaggcaagaaagatgtatgatgatgctattgaggctatagaaaaacatcttattaagaagtctcgtggaggtcttacctttattggagaatggaagaatgggcacttggaaaaaaagatggggcatttggcctgctttgctgggggaatgtttgcactaggagcagatggttccagagcagataaagctggtcattatttagagctaggggcagaaattgcacgtacttgtcatgagtcatatgacagaactgcattaaagctaggtcctgaatcattcaagtttgatggtgcagtggaggctgtggctgtccggcaggctgaaaagtattatatcctccgtccagaagtaattgaaacctattggtacctatggcgattcactcacgatccaagatacaggcagtggggctgggaagcagcactggccattgaaaagtattgccgagttaatggtgggttttctggagtcaaagatgtatattcctctactcctacacatgatgatgtacagcagagcttttttcttgctgaaacattaaattagcctcctaccatgagagaactgtttttccagctggatgaaaagagtagcatcaagtcccctattctgctgttttctgctcacttactcctggagacaagctaagtcaaatcaatatgtacttataagtacctgctttctcagagttgtatttgagaattaaagtatatgaaatgtatactctacccataaatagcttggagtctggtttagaaatctcttacctttaggcatggacaaatttaataaaagtacaaagtatatatgcagttggccctccatgtcaatgggttcatggattcaaccaaacatggattgaagatatagttttttaaaaattacatctgttttgagcatgtatatacctttttcttgtcattattccctaggcaatataacaactatttacatagatttaaagtatgtgggagcatatgcattggttatatgaatatactataccattttatatcaaggatttgagcattcaaggatttttgtatctgcgagaggtcctggaaccaatcccccatagatactgagggacaactgtattcagtgctaaatagaaaataaatgttttagaaattcagagaagggaattttggtgcaggccagagtagtcatgaagaaagactaaaatgatgctgaattagtaagatgttaataggtggggtaaaacagaaagtagctttgtgaaaagaaggattcagcctgaaaaaatacctttaaaaaaacactaaagaaactagaccgactaaagtacattcactaggagaagtagtaggaaataagagctctagaatcaaaatcagggaagcagcatggatgacccttgaggacattatgctaagtgaaataagtcagccataanaagacaaatatggggtgattccacttctatgaggtctctaaagtagtcacatttatggaaacaaagtagaatgttggttaccagggncctggggaggggaatggaaatgagttttagttttgcaaagaacagtgtgaatatacttaatactactgaactatacgctgaaaaatggtgaagatggtaaactttatgtcatgtgtttattaccacaat

SEQ ID NO: 426424 - DNA, 2050 bp, Homo sapiens
ccctgacagacccgtgcggtagcaacagcggcggcggccgcggcggctggccggactcaggtgtttcggacgctattgcccttcgcgccagccgtcgagtgggcagcagcgggactcagccgggcgccaggttcctgccaggcagcgccgggaagcgcgggcggccgagaactccttcctgctacttcgcccagcgccgctgcttcggcttcccagcgaagtgggagaccttcctccctgtttgcagacgtccgtgggagacccttattttttccaccgctaaggttaagagattctggaatagaagcgtcgaaggagatcaagtgaaccttctacaactcctcggatgtcgccagtctccctttcggggcggaagactacgtttgagcatctcactgaggtgcaggaatggaagaacccaccttgcagcttttctgcagtgtggcttgcctgatctacccctaggaatgaagaggaggcttgtaataatccgatgaagtacagatgttgaagaggatatcgcaggacctaaacttgtgatcgtttgggggaggtcacacacgtttctgagtgggaatggatgggcgtgaatgacgtgccctcttaaaaagcacaacaatcctttaagaggagcaaaattgagttttcccattttggccaagattttgaagacagttcaatgtattctacatttgacataagatgagaactttctaaagtattctctccaagagcgtaaacgatgactaccccagccctgctgcccctctctggacgtaggataccacctctgaacctggggccgccttccttcccacatcacagggctaccttgagactttctgagaagtttattcttctccttattcttagtgccttcatcactctgtgttttggggcattctttttccttccagactcttcaaaacacaaacgctttgatttgggtttagaagatgtgttaattccacatgtagatgccggtaaaggggctaaaaaccccggagtcttcctgatccatggacccgatgaacatagacacagggaagaggaagaacgtctgagaaataaaattcgagctgatcatgagaaggccttggaagaagcaaaagaaaaattaagaaagtcaagagaggaaattcgagcagaaattcagacagagaaaaataaggtagtccaagaaatgaagataaaagagaacaagccactgccaccagtccctattcccaaccttgtaggaatacgtggtggagacccagaagataatgacataagagagaaaagggaaaaaattaaagagatgatgaaacatgcttgggataactataggacatatgggtggggacataatgaactcagacctattgcaaggaaaggacactcccctaacatatttggaagttcacaaatgggtgctaccatagtagatgctttggataccctttatatcatgggacttcatgatgaattcctagatgggcaaagatggattgaagacaaccttgatttcagtgtgaattcagaggtgtctgtgtttgaagtcaacattcgatttattggaggcctacttgcagcatattacctatcaggagaggagatattcaagattaaagcagtgcaattggctgagaaactccttcctgcctttaacacacctactgggattccttgggcaatggtgaatttgaaaagtggagtagggcgaaactggggctgggcatctgcaggtagcagcattctggctgaatttggtacactacatatggagttcatccacctcagctacttgacaggggacctgacttactacaaaaaggttatgcacattcggaaactacttcagaaaatggatcgtccaaatggtctttatccaaattatttgaaccccagaacagggcgctggggtcagtgtaagtattctagtatacctgaggctttcttaaaaaattatttgtctgaaaactctttgcttgatgttgtaaaaagtacactacgtggagttagaaaccctcagtgtctaaccttgtggtctgctggtgctgttcttagg

SEQ ID NO: 426425 - DNA, 5443 bp, Homo sapiens
ccctgacagacccgtgcggtagcaacagcggcggcggccgcggcggctggccggactcaggtgtttcggacgctattgcccttcgcgccagccgtcgagtgggcagcagcgggactcagccgggcgccaggttcctgccaggcagcgccgggaagcgcgggcggccgagaactccttcctgctacttcgcccagcgccgctgcttcggcttcccagcgaagtgggagaccttcctccctgtttgcagacgtccgtgggagacccttattttttccaccgctaaggttaagagattctggaatagaagcgtcgaaggagatcaagtgaaccttctacaactcctcggatgtcgccagtctccctttcggggcggaagactacgtttgagcatctcactgaggtgcaggaatggaagaacccaccttgcagcttttctgcagtgtggcttgcctgatctacccctaggaatgaagaggaggcttgtaataatccgatgaagtacagatgttgaagaggatatcgcaggacctaaacttgtgatcgtttgggggaggtcacacacgtttctgagtgggaatggatgggcgtgaatgacgtgccctcttaaaaagcacaacaatcctttaagaggagcaaaattgagttttcccattttggccaagattttgaagacagttcaatgtattctacatttgacataagatgagaactttctaaagtattctctccaagagcgtaaacgatgactaccccagccctgctgcccctctctggacgtaggataccacctctgaacctggggccgccttccttcccacatcacagggctaccttgagactttctgagaagtttattcttctccttattcttagtgccttcatcactctgtgttttggggcattctttttccttccagactcttcaaaacacaaacgctttgatttgggtttagaagatgtgttaattccacatgtagatgccggtaaaggggctaaaaaccccggagtcttcctgatccatggacccgatgaacatagacacagggaagaggaagaacgtctgagaaataaaattcgagctgatcatgagaaggccttggaagaagcaaaagaaaaattaagaaagtcaagagaggaaattcgagcagaaattcagacagagaaaaataaggtagtccaagaaatgaagataaaagagaacaagccactgccaccagtccctattcccaaccttgtaggaatacgtggtggagacccagaagataatgacataagagagaaaagggaaaaaattaaagagatgatgaaacatgcttgggataactataggacatatgggtggggacataatgaactcagacctattgcaaggaaaggacactcccctaacatatttggaagttcacaaatgggtgctaccatagtagatgctttggataccctttatatcatgggacttcatgatgaattcctagatgggcaaagatggattgaagacaaccttgatttcagtgtgaattcagaggtgtctgtgtttgaagtcaacattcgatttattggaggcctacttgcagcatattacctatcaggagaggagatattcaagattaaagcagtgcaattggctgagaaactccttcctgcctttaacacacctactgggattccttgggcaatggtgaatttgaaaagtggagtagggcgaaactggggctgggcatctgcaggtagcagcattctggctgaatttggtacactacatatggagttcatccacctcagctacttgacaggggacctgacttactacaaaaaggttatgcacattcggaaactacttcagaaaatggatcgtccaaatggtctttatccaaattatttgaaccccagaacagggcgctggggtcagtatcatacatctgtcggtggcctgggagacagtttttatgaatacttactgaaagcatggttgatgtcagataaaacagaccatgaggcaagaaagatgtatgatgatgctattgaggctatagaaaaacatcttattaagaagtctcgtggaggtcttacctttattggagaatggaagaatgggcacttggaaaaaaagatggggcatttggcctgctttgctgggggaatgtttgcactaggagcagatggttccagagcagataaagctggtcattatttagagctaggggcagaaattgcacgtacttgtcatgagtcatatgacagaactgcattaaagctaggtcctgaatcattcaagtttgatggtgcagtggaggctgtggctgtccggcaggctgaaaagtattatatcctccgtccagaagtaattgaaacctattggtacctatggcgattcactcacgatccaagatacaggcagtggggctgggaagcagcactggccattgaaaagtattgccgagttaatggtgggttttctggagtcaaagatgtatattcctctactcctacacatgatgatgtacagcagagcttttttcttgctgaaacattaaaatatttgtatctgctgttctccggtgatgaccttttacctttagaccactgggtgtttaatacagaggctcaccctctgcctgtgttacatttagccaacaccacactttcaggtaatcctgctgttcgatgaaagcagttccagaaggaccattctcacctgtgttttgtttacatggaccactacagaaattagtttgaaggggcggcttttgaaaacctggacctctatgtcaacatgacagggtgaaactattccccctaagactgttcaacttgtagatacatcaactttgaaattattccattttatacctgaccaaaacatgttctgatatgtgtaggacagagacctggatgtgctttgatcgttaatgaggtggtcacatgagaagtgatacctgttactactgtattgtttttagagtcctgaagtctggaggctagacttcctgaaagcaagtcaagaatatagagcaccttgcaggagttcaagatggcctttggaaccaattatgtatttgtttcctcctacagtggagcagcattcaaatcaaatatttacatattgcttatcactttttctccattttaataatggaatgaactaaaataaacaagaacaaaagaatagtataattatatcagtaacaagaagactcaaaaaagaaacaggagtacctatccctatctgaattttcaagttccccattggatgaccagactggcaaccatttcaaatcccagtctatttcattgaaatttcttggttaagtttaattttctctgggggcatgatctcacaaagaatactcaagtctttttcttcttatggaatcatcgaaactgctatttatcataatcaccacttatgagcctgggtttgggattttgtgcatgtagttcagtctagtgttggtagcatgacagaaagtggggaaaatgccgcagtttgttgccttgaaacctaagagcaatccttggttttgttgctacattatttttccagaccaacacatctaccaagtaaattttattcactttaatttcataataaagttagtagagtcactcaacttacaactttatttatgtgggcttggcaaaaatcactataaggcagctctaaatttgccttgataagctaaataaattacttttataacttactaaagcagaacaaacagtgaaactttctaaaatattctatctggaatagggacaggggatcttttatttataatctcatcagatgagtgagttgttcacagatattttatgtttttttaattttctccaagaatatttatagaattccaaagaatcagaatagtttcaaaataattttcagtgataaaagagtgttgtaattaatcatattacactaaaattgggatacatctaaggaactttatcttactatcagtaggttttgcattgatatttctttttaaataaactactagttctttatattttgacaaaaagaacttaaattttatcaggaactgtaagataaatatctagtgcttataaattttctgtccttaaatttatgtgacagtgcaagatacttttgctcttttcatttaatataggcatcttccattgacattaataaaacttagaaacagtataattagtataacatttactctgaatttgaagatttcctgaaacaaagtttgtacaagaagcccaccttggaattctgaaggcttattttcttgtttgataagcttttcttttaaacttaggttttaagttggggaaagacttaattaactaatatagtattttctaaggttgatcatcttataccacgaatcgttaattttgacagttctactgatccgtaaaagataaccactgcaaattttttcagtataaaatttttcactgcaaaaaaatttcagtagaaaataaggatgcagggccagttacaatagtccttaagagagttaaattatagcacatgttttgacattgtaatatcttttactacttgaacatttaaatttctaaatgagaaaggtatatatattactgtaactgtagaagggaaaagggaaagtatttggttctaaaaaatgttagccttcctcgtaaaagtagcacaagcccacttatgaatcactgagaaaaagtgaaaaacttgagttggcaaagatgcagagcagcagtgcagatggcaatgaactctctgaattctcttttaccttatttagaagaatgcagagtaaagggaccttcttggttctgcaggaacttctcaagggatgaggagacagaacccctacttccaagtgctctatttgtattacccagatgactgaagcttaagagaaggcagggaagtatacaagcagagccagttctggtacaaacaaagaatttgacagggacaatggaagggtcttcttcaccactccttaccttctatgtgatggaaagactagagcttataaaagtacttccatttttttattctcctgaataccaaaggcaattaaagtcagctacaaatgaacacaaaaaaaaacacacacaacacacaccccaacccacccaaccactatacatattcctcacgatccaccattactacaaacaaaaataataatagataaacaaatcacaaaacatacttaacaccacactcatatctttcctagcaatctctgccttacacaacatatgaaaaaagacaagaacatgagtgggacggggcgcgacgacgaggcagatagcactaacgagggagcagatgatgccgtctagacgacagaggtaggaagagaagcagaagctaggtggggcccgcacggagaatgacacgaccagggggcagcaaagggttggtgtgaaacaagcctaggcaggggcacaagagagaaccagcgggagc

SEQ ID NO: 426426 - DNA, 3609 bp, Homo sapiens
ccctgacagacccgtgcggtagcaacagcggcggcggccgcggcggctggccggactcaggtgtttcggacgctattgcccttcgcgccagccgtcgagtgggcagcagcgggactcagccgggcgccaggttcctgccaggcagcgccgggaagcgcgggcggccgagaactccttcctgctacttcgcccagcgccgctgcttcggcttcccagcgaagtgggagaccttcctccctgtttgcagacgtccgtgggagacccttattttttccaccgctaaggttaagagattctggaatagaagcgtcgaaggagatcaagtgaaccttctacaactcctcggatgtcgccagtctccctttcggggcggaagactacgtttgagcatctcactgaggtgcaggaatggaagaacccaccttgcagcttttctgcagtgtggcttgcctgatctacccctaggaatgaagaggaggcttgtaataatccgatgaagtacagatgttgaagaggatatcgcaggacctaaacttgtgatcgtttgggggaggtcacacacgtttctgagtgggaatggatgggcgtgaatgacgtgccctcttaaaaagcacaacaatcctttaagaggagcaaaattgagttttcccattttggccaagattttgaagacagttcaatgtattctacatttgacataagatgagaactttctaaagtattctctccaagagcgtaaacgatgactaccccagccctgctgcccctctctggacgtaggataccacctctgaacctggggccgccttccttcccacatcacagggctaccttgagactttctgagaagtttattcttctccttattcttagtgccttcatcactctgtgttttggggcattctttttccttccagactcttcaaaacacaaacgctttgatttgggtttagaagatgtgttaattccacatgtagatgccggtaaaggggctaaaaaccccggagtcttcctgatccatggacccgatgaacatagacacagggaagaggaagaacgtctgagaaataaaattcgagctgatcatgagaaggccttggaagaagcaaaagaaaaattaagaaagtcaagagaggaaattcgagcagaaattcagacagagaaaaataaggtagtccaagaaatgaagataaaagagaacaagccactgccaccagtccctattcccaaccttgtaggaatacgtggtggagacccagaagataatgacataagagagaaaagggaaaaaattaaagagatgatgaaacatgcttgggataactataggacatatgggtggggacataatgaactcagacctattgcaaggaaaggacactcccctaacatatttggaagttcacaaatgggtgctaccatagtagatgctttggataccctttatatcatgggacttcatgatgaattcctagatgggcaaagatggattgaagacaaccttgatttcagtgtgaattcagaggtgtctgtgtttgaagtcaacattcgatttattggaggcctacttgcagcatattacctatcaggagaggagatattcaagattaaagcagtgcaattggctgagaaactccttcctgcctttaacacacctactgggattccttgggcaatggtgaatttgaaaagtggagtagggcgaaactggggctgggcatctgcaggtagcagcattctggctgaatttggtacactacatatggagttcatccacctcagctacttgacaggggacctgacttactacaaaaaggttatgcacattcggaaactacttcagaaaatggatcgtccaaatggtctttatccaaattatttgaaccccagaacagggcgctggggtcagtatcatacatctgtcggtggcctgggagacagtttttatgaatacttactgaaagcatggttgatgtcagataaaacagaccatgaggcaagaaagatgtatgatgatgctattgaggctatagaaaaacatcttattaagaagtctcgtggaggtcttacctttattggagaatggaagaatgggcacttggaaaaaaagatggggcatttggcctgctttgctgggggaatgtttgcactaggagcagatggttccagagcagataaagctggtcattatttagagctaggggcagaaattgcacgtacttgtcatgagtcatatgacagaactgcattaaagctaggtcctgaatcattcaagtttgatggtgcagtggaggctgtggctgtccggcaggctgaaaagtattatatcctccgtccagaagtaattgaaacctattggtacctatggcgattcactcacgatccaagatacaggcagtggggctgggaagcagcactggccattgaaaagtattgccgagttaatggtgggttttctggagtcaaagatgtatattcctctactcctacacatgatgatgtacagcagagcttttttcttgctgaaacattaaaatatttgtatctgctgttctccggtgatgaccttttacctttagaccactgggtgtttaatacagaggctcaccctctgcctgtgttacatttagccaacaccacactttcaggtaatcctgctgttcgatgaaagcagttccagaaggaccattctcacctgtgttttgtttacatggaccactacagaaattagtttgaaggggcggcttttgaaaacctggacctctatgtcaacatgacagggtgaaactattccccctaagactgttcaacttgtagatacatcaactttgaaattattccattttatacctgaccaaaacatgttctgatatgtgtaggacagagacctggatgtgctttgatcgttaatgaggtggtcacatgagaagtgatacctgttactactgtattgtttttagagtcctgaagtctggaggctagacttcctgaaagcaagtcaagaatatagagcaccttgcaggagttcaagatggcctttggaaccaattatgtatttgtttcctcctacagtggagcagcattcaaatcaaatatttacatattgcttatcactttttctccattttaataatggaatgaactaaaataaacaagaacaaaagaatagtataattatatcagtaacaagaagactcaaaaaagaaacaggagtacctatccctatctgaattttcaagttccccattggatgaccagactggcaaccatttcaaatcccagtctatttcattgaaatttcttggttaagtttaattttctctgggggcatgatctcacaaagaatactcaagtctttttcttcttatggaatcatcgaaactgctatttatcataatcaccacttatgagcctgggtttgggattttgtgcatgtagttcagtctagtgttggtagcatgacagaaagtggggaaaatgccgcagtttgttgccttgaaacctaagagcaatccttggttttgttgctacattatttttccagaccaacacatctaccaagtaaattttattcactttaatttcataataaagttagtagagtcactc

SEQ ID NO: 426427 - DNA, 1800 bp, Homo sapiens
  misc_feature (1736)..(1736): n is a, c, g, or t
  misc_feature (1777)..(1777): n is a, c, g, or t
  misc_feature (1779)..(1779): n is a, c, g, or t
ccctgacagacccgtgcggtagcaacagcggcggcggccgcggcggctggccggactcaggtgtttcggacgctattgcccttcgcgccagccgtcgagtgggcagcagcgggactcagccgggcgccaggttcctgccaggcagcgccgggaagcgcgggcggccgagaactccttcctgctacttcgcccagcgccgctgcttcggcttcccagcgaagtgggagaccttcctccctgtttgcagacgtccgtgggagacccttattttttccaccgctaaggttaagagattctggaatagaagcgtcgaaggagatcaagtgaaccttctacaactcctcggatgtcgccagtctccctttcggggcggaagactacgtttgagcatctcactgaggtgcaggaatggaagaacccaccttgcagcttttctgcagtgtggcttgcctgatctacccctaggaatgaagaggaggcttgtaataatccgatgaagtacagatgttgaagaggatatcgcaggacctaaacttgtgatcgtttgggggaggtcacacacgtttctgagtgggaatggatgggcgtgaatgacgtgccctcttaaaaagcacaacaatcctttaagaggagcaaaattgagttttcccattttggccaagattttgaagacagttcaatgtattctacatttgacataagatgagaactttctaaagtattctctccaagagcgtaaacgatgactaccccagccctgctgcccctctctggacgtaggataccacctctgaacctggggccgccttccttcccacatcacagggctaccttgagactttctgagaagtttattcttctccttattcttagtgccttcatcactctgtgttttggggcattctttttccttccagactcttcaaaacacaaacgctttgatttgggtttagaagatgtgttaattccacatgtagatgccggtaaaggggctaaaaaccccggagtcttcctgatccatggacccgatgaacatagacacagggaagaggaagaacgtctgagaaataaaattcgagctgatcatgagaaggccttggaagaagcaaaagaaaaattaagaaagtcaagagaggaaattcgagcagaaattcagacagagaaaaataaggtagtccaagaaatgaagataaaagagaacaagccactgccaccagtccctattcccaaccttgtaggaatacgtggtggagacccagaagataatgacataagagagaaaagggaaaaaattaaagagatgatgaaacatgcttgggataactataggacatatgggtggggacataatgaactcagacctattgcaaggaaaggacactcccctaacatatttggaagttcacaaatgggtgctaccatagtagatgctttggataccctttatatcatgggacttcatgatgaattcctagatgggcaaagatggattgaagacaaccttgatttcagtgtgaattcagaggtgtctgtgtttgaagtcaacattcgatttattggaggcctacttgcagcatattacctatcaggagaggagggaagaggaagaacgtctgagaaataaaattcgagctgatcatgagaaggccttggaagaagcaaaagaaaaattaagaaagtcaagagaggaaattcgagcagaaattcagacagagaaaaataaggtagtccaaganatgaagataaaagagacaagccactgccaccagtccctatncncaaccttgtaggaatacgtgg

SEQ ID NO: 426428 - DNA, 1649 bp, Homo sapiens
  misc_feature (39)..(39): n is a, c, g, or t
  misc_feature (43)..(43): n is a, c, g, or t
  misc_feature (47)..(48): n is a, c, g, or t
  misc_feature (52)..(52): n is a, c, g, or t
cctccctctctaagaagcattgctggtcgaggctggttnaatnggcnnaggncggccccctggcccggccacctgggaccgtgctggggagtctgccacttccctctctcccctggcccgcaaagttttggcggagccatcgctggggctgagcgcgcccccggggggagatcggggagcgcccgatgccgggcggccggagccattgacccgggacgccgccgtccgctgagcagccgaccaccccgccgcctccggtgcatggggactggctgaggagccagcatgggcaactgcgtggggagacagcgccgggagaggccggcagccccgggacacccccgcaagcgagcaggacgcaatgagcccctgaagaaagagcggcttaagtggaagagcgactaccccatgactgacgggcagctgcggagcaaacgggatgagttctgggacacagcgcctgccttcgagggccgcaaggagatctgggatgccctcaaggctgccgcctatgctgctgaagccaacgaccacgagctggcccaggccatcctggatggagccagcatcaccctgcctcatggcaccctctgtgaatgctacgatgagctgggcaatcgctaccagctgcccatctactgcctgtcaccgccggtgaacctgctgctggagcacacggaggaggagagcctggagccccccgagcctccacccagcgtgcgccgtgagttcccgctgaaggtgcgcctgtccacgggcaaggacgtgaggctcagcgccagcctgcccgacacagtggggcagctcaagaggcagctgcacgcccaggagggcatcgagccatcgtggcagcggtggttcttctccgggaagctgctcacagaccgcacacggctccaggagaccaagatccagaaagattttgtcatccaggtcatcatcaaccagcccccaccaccccaggactgatgggcccacggacccctgggaagaggccccgcctggagcactaggcccccaccctgctgctgccttccagtgctgtcattttcttcaggggccctcccctcggtgtggctggtgggtgagccgtgaagggaccctgcctttcagggcactacgcgccaccagttcccggtacccagggagcaggcagccacacacgggccttgcaaccttgtcagagaaaaggcgaacagggccctcaccctgcctgtctcccgaagcaggttcgagccacaagggccaaccaggaggcccctggagcccagatctgtcatctggtgctgccagctgtgctcactctggttttctgctcagggtctgaagcagctgctgtctccctcctctgcccccatcccctggctctcccctgggcacagtgccactcccttggaagggagggaaccacccgtgagccccagggcttgggaagcctgaggcgggcctctgcctctccctgcccccagcacaattggcagagatgaggcgggtggtggacggctgggctgtcgtggcagggtctgcacagggccatgtcctggctgtaacccaggcagtgggaggtctgcagcctggtcatggcctccacagcaggtccctgtggacagacatatctgcatatttatcaataaagccttttgctcctt

SEQ ID NO: 426429 - DNA, 1108 bp, Homo sapiens
tctctccgcccctccagcggagctggtctccggccgggcaccgtcgcgggcccccctggcccggccacctgggaccgtgctggggagtctgccacttccctctctcccctggcccgcaaagttttggcggagccatcgctggggctgagcgcgcccccggggggagatcggggagcgcccgatgccgggcggccggagccattgacccgggacgccgccgtccgctgagcagccgaccaccccgccgcctccggtgcatggggactggctgaggagccagcatgggcaactgcgtggggagacagcgccgggagaggccggcagccccgggacacccccgcaagcgagcaggacgcaatgagcccctgaagaaagagcggcttaagtggaagagcgactaccccatgactgacgggcagctgcggagcaaacgggatgagttctgggacacagcgcctgccttcgagggccgcaaggagatctgggatgccctcaaggctgccgcctatgctgctgaagccaacgaccacgagctggcccaggccatcctggatggagccagcatcaccctgcctcatggcaccctctgtgaatgctacgatgagctgggcaatcgctaccagctgcccatctactgcctgtcaccgccggtgaacctgctgctggagcacacggaggaggagagcctggagccccccgagcctccacccagcgtgcgccgtgagttcccgctgaaggtgcgcctgtccacgggcaaggacgtgaggctcagcgccagcctgcccgacacagtggggcagctcaagaggcagctgcacgcccaggagggcatcgagccatcgtggcagcggtggttcttctccgggaagctgctcacagaccgcacacggctccaggagaccaagatccagaaagattttgtcatccaggtcatcatcaaccagcccccaccaccccaggactgatgggcccacggacccctgggaagaggccccgcctggagcactaggcccccaccccatggcttccatcttttgcatcacgaccactcctgaacccccagtttctgatttgtcagaatttttttttaacaaaactaaaaatgaaa

SEQ ID NO: 426430 - DNA, 1645 bp, Homo sapiens
tctctccgcccctccagcggagctggtctccggccgggcaccgtcgcgggcccccctggcccggccacctgggaccgtgctggggagtctgccacttccctctctcccctggcccgcaaagttttggcggagccatcgctggggctgagcgcgcccccggggggagatcggggagcgcccgatgccgggcggccggagccattgacccgggacgccgccgtccgctgagcagccgaccaccccgccgcctccggtgcatggggactggctgaggagccagcatgggcaactgcgtggggagacagcgccgggagaggccggcagccccgggacacccccgcaagcgagcaggacgcaatgagcccctgaagaaagagcggcttaagtggaagagcgactaccccatgactgacgggcagctgcggagcaaacgggatgagttctgggacacagcgcctgccttcgagggccgcaaggagatctgggatgccctcaaggctgccgcctatgctgctgaagccaacgaccacgagctggcccaggccatcctggatggagccagcatcaccctgcctcatggcaccctctgtgaatgctacgatgagctgggcaatcgctaccagctgcccatctactgcctgtcaccgccggtgaacctgctgctggagcacacggaggaggagagcctggagccccccgagcctccacccagcgtgcgccgtgagttcccgctgaaggtgcgcctgtccacgggcaaggacgtgaggctcagcgccagcctgcccgacacagtggggcagctcaagaggcagctgcacgcccaggagggcatcgagccatcgtggcagcggtggttcttctccgggaagctgctcacagaccgcacacggctccaggagaccaagatccagaaagattttgtcatccaggtcatcatcaaccagcccccaccaccccaggactgatgggcccacggacccctgggaagaggccccgcctggagcactaggcccccaccctgctgctgccttccagtgctgtcattttcttcaggggccctcccctcggtgtggctggtgggtgagccgtgaagggaccctgcctttcagggcactacgcgccaccagttcccggtacccagggagcaggcagccacacacgggccttgcaaccttgtcagagaaaaggcgaacagggccctcaccctgcctgtctcccgaagcaggttcgagccacaagggccaaccaggaggcccctggagcccagatctgtcatctggtgctgccagctgtgctcactctggttttctgctcagggtctgaagcagctgctgtctccctcctctgcccccatcccctggctctcccctgggcacagtgccactcccttggaagggagggaaccacccgtgagccccagggcttgggaagcctgaggcgggcctctgcctctccctgcccccagcacaattggcagagatgaggcgggtggtggacggctgggctgtcgtggcagggtctgcacagggccatgtcctggctgtaacccaggcagtgggaggtctgcagcctggtcatggcctccacagcaggtccctgtggacagacatatctgcatatttatcaataaagccttttgctcctt

SEQ ID NO: 426431 - DNA, 1591 bp, Homo sapiens
aggcatagtacgagccgggtgggcaatcggccgaggctgccttccctctctcccctggcccgcaaagttttggcggagccatcgctggggctgagcgcgcccccggggggagatcggggagcgcccgatgccgggcggccggagccattgacccgggacgccgccgtccgctgagcagccgaccaccccgccgcctccggtgcatggggactggctgaggagccagcatgggcaactgcgtggggagacagcgccgggagaggccggcagccccgggacacccccgcaagcgagcaggacgcaatgagcccctgaagaaagagcggcttaagtggaagagcgactaccccatgactgacgggcagctgcggagcaaacgggatgagttctgggacacagcgcctgccttcgagggccgcaaggagatctgggatgccctcaaggctgccgcctatgctgctgaagccaacgaccacgagctggcccaggccatcctggatggagccagcatcaccctgcctcatggcaccctctgtgaatgctacgatgagctgggcaatcgctaccagctgcccatctactgcctgtcaccgccggtgaacctgctgctggagcacacggaggaggagagcctggagccccccgagcctccacccagcgtgcgccgtgagttcccgctgaaggtgcgcctgtccacgggcaaggacgtgaggctcagcgccagcctgcccgacacagtggggcagctcaagaggcagctgcacgcccaggagggcatcgagccatcgtggcagcggtggttcttctccgggaagctgctcacagaccgcacacggctccaggagaccaagatccagaaagattttgtcatccaggtcatcatcaaccagcccccaccaccccaggactgatgggcccacggacccctgggaagaggccccgcctggagcactaggcccccaccctgctgctgccttccagtgctgtcattttcttcaggggccctcccctcggtgtggctggtgggtgagccgtgaagggaccctgcctttcagggcactacgcgccaccagttcccggtacccagggagcaggcagccacacacgggccttgcaaccttgtcagagaaaaggcgaacagggccctcaccctgcctgtctcccgaagcaggttcgagccacaagggccaaccaggaggcccctggagcccagatctgtcatctggtgctgccagctgtgctcactctggttttctgctcagggtctgaagcagctgctgtctccctcctctgcccccatcccctggctctcccctgggcacagtgccactcccttggaagggagggaaccacccgtgagccccagggcttgggaagcctgaggcgggcctctgcctctccctgcccccagcacaattggcagagatgaggcgggtggtggacggctgggctgtcgtggcagggtctgcacagggccatgtcctggctgtaacccaggcagtgggaggtctgcagcctggtcatggcctccacagcaggtccctgtggacagacatatctgcatatttatcaataaagccttttgctcctt

SEQ ID NO: 426432 - DNA, 1660 bp, Homo sapiens
agtaaatctggtctcataaaatgaattcagaaatatttttgcaatgctcattttatgccttgcagaactttgagaaatattacgcataaagtgtaacatgacgggtgtcattcaaatatatgtctcaaatataaaataatcagtttttgccttgttctttcttttcctaatttccgtaacaaacatgtcctattcgtcttcacatctagtttgaagttagctgaattagtgagtgatttataatcacagatttcagaaaattagagctaagtgattttagggactgttgtcactatatatctagggggggaaactgaggcctttagaagttgccacgctcttccagtacagagtaccttcccacgctttacagattcccaccatgtaacattcattaaaagcctttatgggtaggaaatgaataaggtacctgctgtgtatatatttacattataaagtttacgtattcattcttactctttttccttcctatgaagacacacactgttcttattcttacaatctcaaagagagagcagcgaaacaatgaaacttcaggattgtgtggcctggaggctactagttgaactgggcatgctcagtcgccaggcagatttttttcggtgaagtggaaactacaacagcgcgtaccgcgcgcggaggtgggcgtgccctcgtggaatttagaacgttgcctcagccaatggggcctcgcggccggctggcggggctcctcattggagcagcagggaggcgagcagagggcccccagagggagccgcggaggtgcaggtcgaagaggccgggctacgtcgtgccctgcgcgtgagcagctgcagcggcagaggcagcatccagcggcggcgccagcagttccagtccgttgctttactttttgcttcaccgacatagtcattatgccgaagagaaagtctccagagaatacagagggcaaagatggatccaaagtaactaaacaggagcccacaagacggtctgccagattgtcagcgaaacctgctccaccaaaacctgaacccaaaccaagaaaaacatctgctaagaaagaacctggagcaaagattagcagaggtgctaaagggaagaaggaggaaaagcaggaagctggaaaggaaggtactgcaccatctgaaaatggtgaaactaaagctgaagaggcacagaaaactgaatctgtagataacgagggagaatgaattgtcatgaaaaattggggttgattttatgtatctcttgggacaacttttaaaagctatttttaccaagtattttgtaaatgctaattttttaggactctactagttggcatacgaaaatatataaggatggacattttatcgtctcatagtcatgctttttggaaatttacatcatcctcaagtaaaataaatatcagttaaatattggaagctgtgtgtaagattgattcagcattccatgcacttgctttaaaatttagtcctgtgcatactgtggtgtttttactgtgcatatttgaatttttcatgcagtttttctagagcaataatcagtggtgcttttgtacctaggttttatgtgattttaatgaaacatggatagttgtggccacctgctgactatttgtggtttaaaataaaaggtttacttgtctgcagaa

SEQ ID NO: 426433 - DNA, 1609 bp, Homo sapiens
agtaaatctggtctcataaaatgaattcagaaatatttttgcaatgctcattttatgccttgcagaactttgagaaatattacgcataaagtgtaacatgacgggtgtcattcaaatatatgtctcaaatataaaataatcagtttttgccttgttctttcttttcctaatttccgtaacaaacatgtcctattcgtcttcacatctagtttgaagttagctgaattagtgagtgatttataatcacagatttcagaaaattagagctaagtgattttagggactgttgtcactatatatctagggggggaaactgaggcctttagaagttgccacgctcttccagtacagagtaccttcccacgctttacagattcccaccatgtaacattcattaaaagcctttatgggtaggaaatgaataaggtacctgctgtgtatatatttacattataaagtttacgtattcattcttactctttttccttcctatgaagacacacactgttcttattcttacaatctcaaagagagagcagcgaaacaatgaaacttcaggattgtgtggcctggaggctactagttgaactgggcatgctcagtcgccaggcagatttttttcggtgaagtggaaactacaacagcgcgtaccgcgcgcggaggtgggcgtgccctcgtggaatttagaacgttgcctcagccaatggggcctcgcggccggctggcggggctcctcattggagcagcagggaggcgagcagagggcccccagagggagccgcggaggtgcaggtcgaagaggccgggctacgtcgtgccctgcgcgtgagcagctgcagcggcagaggcagcatccagcggcggcgccagcagttccagtccgttgctttactttttgcttcaccgacatagtcattatgccgaagagaaagcccacaagacggtctgccagattgtcagcgaaacctgctccaccaaaacctgaacccaaaccaagaaaaacatctgctaagaaagaacctggagcaaagattagcagaggtgctaaagggaagaaggaggaaaagcaggaagctggaaaggaaggtactgcaccatctgaaaatggtgaaactaaagctgaagaggcacagaaaactgaatctgtagataacgagggagaatgaattgtcatgaaaaattggggttgattttatgtatctcttgggacaacttttaaaagctatttttaccaagtattttgtaaatgctaattttttaggactctactagttggcatacgaaaatatataaggatggacattttatcgtctcatagtcatgctttttggaaatttacatcatcctcaagtaaaataaatatcagttaaatattggaagctgtgtgtaagattgattcagcattccatgcacttgctttaaaatttagtcctgtgcatactgtggtgtttttactgtgcatatttgaatttttcatgcagtttttctagagcaataatcagtggtgcttttgtacctaggttttatgtgattttaatgaaacatggatagttgtggccacctgctgactatttgtggtttaaaataaaaggtttacttgtctgcagaa

SEQ ID NO: 426434 - DNA, 1699 bp, Homo sapiens
agtaaatctggtctcataaaatgaattcagaaatatttttgcaatgctcattttatgccttgcagaactttgagaaatattacgcataaagtgtaacatgacgggtgtcattcaaatatatgtctcaaatataaaataatcagtttttgccttgttctttcttttcctaatttccgtaacaaacatgtcctattcgtcttcacatctagtttgaagttagctgaattagtgagtgatttataatcacagatttcagaaaattagagctaagtgattttagggactgttgtcactatatatctagggggggaaactgaggcctttagaagttgccacgctcttccagtacagagtaccttcccacgctttacagattcccaccatgtaacattcattaaaagcctttatgggtaggaaatgaataaggtacctgctgtgtatatatttacattataaagtttacgtattcattcttactctttttccttcctatgaagacacacactgttcttattcttacaatctcaaagagagagcagcgaaacaatgaaacttcaggattgtgtggcctggaggctactagttgaactgggcatgctcagtcgccaggcagatttttttcggtgaagtggaaactacaacagcgcgtaccgcgcgcggaggtgggcgtgccctcgtggaatttagaacgttgcctcagccaatggggcctcgcggccggctggcggggctcctcattggagcagcagggaggcgagcagagggcccccagagggagccgcggaggtgcaggtcgaagaggccgggctacgtcgtgccctgcgcgtgagcagctgcagcggcagaggcagcatccagcggcggcgccagcagttccagtccgttgctttactttttgcttcaccgacatagtcattatgccgaagagaaagtctccagagaatacagagggcaaagatggatccaaagtaactaaacaggagcccacaagacggtctgccagattgtcagcgaaacctgctccaccaaaacctgaacccaaaccaagaaaaacatctgctaagaaagaacctggagcaaagattagcagaggtgctaaagggaagaaggaggaaaagcaggaagctggaaaggaaggcacagaaaactgaatctgtagataacgagggagaatgaattgtcatgaaaaattggggttgattttatgtatctcttgggacaacttttaaaagctatttttaccaagtattttgtaaatgctaattttttaggactctactagttggcatacgaaaatatataaggatggacattttatcgtctcatagtcatgctttttggaaatttacatcatcctcaagtaaaataaatatcagttaaatattggaagctgtgtgtaagattgattcagcattccatgcacttgctttaaaatttagtcctgtgcatactgtggtgtttttactgtgcatatttgaatttttcatgcagtttttctagagcaataatcagtggtgcttttgtacctaggttttatgtgattttaatgaaacatggatagttgtggccacctgctgactatttgtggtttaaaataaaaggtttacttgtctgcagaaaaacaccacaaagcagcaaacacagccataagacctcaacacacaaggtgttgccgcctcgtggccgagaagttttcacc

SEQ ID NO: 426435 - DNA, 1751 bp, Homo sapiens
  misc_feature (1638)..(1638): n is a, c, g, or t
  misc_feature (1642)..(1643): n is a, c, g, or t
  misc_feature (1646)..(1647): n is a, c, g, or t
  misc_feature (1653)..(1653): n is a, c, g, or t
  misc_feature (1655)..(1655): n is a, c, g, or t
  misc_feature (1658)..(1658): n is a, c, g, or t
  misc_feature (1662)..(1662): n is a, c, g, or t
  misc_feature (1664)..(1665): n is a, c, g, or t
  misc_feature (1678)..(1678): n is a, c, g, or t
  misc_feature (1680)..(1680): n is a, c, g, or t
agtaaatctggtctcataaaatgaattcagaaatatttttgcaatgctcattttatgccttgcagaactttgagaaatattacgcataaagtgtaacatgacgggtgtcattcaaatatatgtctcaaatataaaataatcagtttttgccttgttctttcttttcctaatttccgtaacaaacatgtcctattcgtcttcacatctagtttgaagttagctgaattagtgagtgatttataatcacagatttcagaaaattagagctaagtgattttagggactgttgtcactatatatctagggggggaaactgaggcctttagaagttgccacgctcttccagtacagagtaccttcccacgctttacagattcccaccatgtaacattcattaaaagcctttatgggtaggaaatgaataaggtacctgctgtgtatatatttacattataaagtttacgtattcattcttactctttttccttcctatgaagacacacactgttcttattcttacaatctcaaagagagagcagcgaaacaatgaaacttcaggattgtgtggcctggaggctactagttgaactgggcatgctcagtcgccaggcagatttttttcggtgaagtggaaactacaacagcgcgtaccgcgcgcggaggtgggcgtgccctcgtggaatttagaacgttgcctcagccaatggggcctcgcggccggctggcggggctcctcattggagcagcagggaggcgagcagagggcccccagagggagccgcggaggtgcaggtcgaagaggccgggctacgtcgtgccctgcgcgtgagcagctgcagcggcagaggcagcatccagcggcggcgccagcagttccagtccgttgctttactttttgcttcaccgacatagtcattatgccgaagagaaagtctccagagaatacagagggcaaagatggatccaaagtaactaaacaggagcccacaagacggtctgccagattgtcagcgaaacctgctccaccaaaacctgaacccaaaccaagaaaaacatctgctaagaaagaacctggagcaaagattagcagaggtgctaaagggaagaaggaggaaaagcaggaagctggaaaggaaggcacagaaaactgaatctgtagataacgagggagaatgaattgtcatgaaaaattggggttgattttatgtatctcttgggacaacttttaaaagctatttttaccaagtattttgtaaatgctaattttttaggactctactagttggcatacgaaaatatataaggatggacattttatcgtctcatagtcatgctttttggaaatttacatcatcctcaagtaaaataaatatcagttaaatattggaagctgtgtgtaagattgattcagcattccatgcacttgctttaaaatttagtcctgtgcatactgtggtgtttttactgtgcatatttgaatttttcatgcagtttttctagagcaataatcagtggtgcttttgtacctaggttttatgtgattttaatgaaacatggatagttgtggccacctgctgactatttgtggtttaaaataaaaggtttacttgtctgcagaaaaaaaaaaaggggggggcnaaannccnnggggcnanttnggtncnntttgtaaagggcnanagggggttaaaagggggggtaaggggggaaggcgggctggggaccttgggtaggacacgaagggaaaaggg

SEQ ID NO: 426436 - DNA, 1393 bp, Homo sapiens
agtaaatctggtctcataaaatgaattcagaaatatttttgcaatgctcattttatgccttgcagaactttgagaaatattacgcataaagtgtaacatgacgggtgtcattcaaatatatgtctcaaatataaaataatcagtttttgccttgttctttcttttcctaatttccgtaacaaacatgtcctattcgtcttcacatctagtttgaagttagctgaattagtgagtgatttataatcacagatttcagaaaattagagctaagtgattttagggactgttgtcactatatatctagggggggaaactgaggcctttagaagttgccacgctcttccagtacagagtaccttcccacgctttacagattcccaccatgtaacattcattaaaagcctttatgggtaggaaatgaataaggtacctgctgtgtatatatttacattataaagtttacgtattcattcttactctttttccttcctatgaagacacacactgttcttattcttacaatctcaaagagagagcagcgaaacaatgaaacttcaggattgtgtggcctggaggctactagttgaactgggcatgctcagtcgccaggcagatttttttcggtgaagtggaaactacaacagcgcgtaccgcgcgcggaggtgggcgtgccctcgtggaatttagaacgttgcctcagccaatggggcctcgcggccggctggcggggctcctcattggagcagcagggaggcgagcagagggcccccagagggagccgcggaggtgcaggtcgaagaggccgggctacgtcgtgccctgcgcgtgagcagctgcagcggcagaggcagcatccagcggcggcgccagcagttccagtccgttgctttactttttgcttcaccgacatagtcattatgccgaagagaaagtctccagagaatacagagggcaaagatggatccaaagtaactaaacaggagcccacaagacggtctgccagattgtcagcgaaacctgctccaccaaaacctgaacccaaaccaagaaaaacatctgctaagaaagaacctggagcaaagattagcagaggtgctaaagggaagaaggaggaaaagcaggaagctggaaaggaaggcacagaaaactgaatctgtagataacgagggagaatgaattgtcatgaaaaattggggttgattttatgtatctcttgggacaacttttaaaagctatttttaccaagtattttgtaaatgctaattttttaggactctactagttggcatacgaaaatatataaggatggacattttatcgtctcatagtcatgctttttggaaatttacatcatcctcaagtaaaataaatatcagttaaatattggaagctg

SEQ ID NO: 426437 - DNA, 1538 bp, Homo sapiens
agtaaatctggtctcataaaatgaattcagaaatatttttgcaatgctcattttatgccttgcagaactttgagaaatattacgcataaagtgtaacatgacgggtgtcattcaaatatatgtctcaaatataaaataatcagtttttgccttgttctttcttttcctaatttccgtaacaaacatgtcctattcgtcttcacatctagtttgaagttagctgaattagtgagtgatttataatcacagatttcagaaaattagagctaagtgattttagggactgttgtcactatatatctagggggggaaactgaggcctttagaagttgccacgctcttccagtacagagtaccttcccacgctttacagattcccaccatgtaacattcattaaaagcctttatgggtaggaaatgaataaggtacctgctgtgtatatatttacattataaagtttacgtattcattcttactctttttccttcctatgaagacacacactgttcttattcttacaatctcaaagagagagcagcgaaacaatgaaacttcaggattgtgtggcctggaggctactagttgaactgggcatgctcagtcgccaggcagatttttttcggtgaagtggaaactacaacagcgcgtaccgcgcgcggaggtgggcgtgccctcgtggaatttagaacgttgcctcagccaatggggcctcgcggccggctggcggggctcctcattggagcagcagggaggcgagcagagggcccccagagggagccgcggaggtgcaggtcgaagaggccgggctacgtcgtgccctgcgcgtgagcagctgcagcggcagaggcagcatccagcggcggcgccagcagttccagtccgttgctttactttttgcttcaccgacatagtcattatgccgaagagaaagtctccagagaatacagagggcaaagatggatccaaagtaactaaacaggagcccacaagacggtctgccagattgtcagcgaaacctgctccaccaaaacctgaacccaaaccaagaaaaacatctgctaagaaagaacctggagcaaagattagcagaggtgctaaagggaagaaggaggaaaagcaggaagctggaaaggaaggtactgcaccatctgaaaatggtgaaactaaagctgaagagatccacatctctcgctcaactgttaatgtctcaacctccagaggcaccccacccagcacactgtcagtaaaggggcagattgaaacagtgagagttaagggtacgcacagaaaactgaatctgtagataacgagggagaatgaattgtcatgaaaaattggggttgattttatgtatctcttgggacaacttttaaaagctatttttaccaagtattttgtaaatgctaattttttaggactctactagttggcatacgaaaatatataaggatggacattttatcgtctcatagtcatgctttttggaaatttacatcatcctcaagtaaaataaatatcagttaaatattggaagctg

SEQ ID NO: 426438 - DNA, 1676 bp, Homo sapiens
agtaaatctggtctcataaaatgaattcagaaatatttttgcaatgctcattttatgccttgcagaactttgagaaatattacgcataaagtgtaacatgacgggtgtcattcaaatatatgtctcaaatataaaataatcagtttttgccttgttctttcttttcctaatttccgtaacaaacatgtcctattcgtcttcacatctagtttgaagttagctgaattagtgagtgatttataatcacagatttcagaaaattagagctaagtgattttagggactgttgtcactatatatctagggggggaaactgaggcctttagaagttgccacgctcttccagtacagagtaccttcccacgctttacagattcccaccatgtaacattcattaaaagcctttatgggtaggaaatgaataaggtacctgctgtgtatatatttacattataaagtttacgtattcattcttactctttttccttcctatgaagacacacactgttcttattcttacaatctcaaagagagagcagcgaaacaatgaaacttcaggattgtgtggcctggaggctactagttgaactgggcatgctcagtcgccaggcagatttttttcggtgaagtggaaactacaacagcgcgtaccgcgcgcggaggtgggcgtgccctcgtggaatttagaacgttgcctcagccaatggggcctcgcggccggctggcggggctcctcattggagcagcagggaggcgagcagagggcccccagagggagccgcggaggtgcaggtcgaagaggccgggctacgtcgtgccctgcgcgtgagcagctgcagcggcagaggcagcatccagcggcggcgccagcagttccagtccgttgctttactttttgcttcaccgacatagtcattatgccgaagagaaagtctccagagaatacagagggcaaagatggatccaaagtaactaaacaggagcccacaagacggtctgccagattgtcagcgaaacctgctccaccaaaacctgaacccaaaccaagaaaaacatctgctaaggtaagaagtgctgtttcccacttttggctttttaaacaatgaataaattataattccctacctcagaatcattcaaagaaaggccgtatttaatgatccaaactgaaaccattaccactgttacgggcttgcttaaaggcataaagcacagttttctgcgttaataggagtgtgttttccatttggtcagtgaggcacgggaagtcagagatgttgctctgagaagcctcatgtccgaagggggtttggcagcagcctcgtgaacatgcggttcatgcggcacacagcggggatgagtttgggccctggcagcactgccccactatgggaggaatttgggaaggggcttctgacttcatctaactggatttcgcaggccagtctgaggtctaataataataatataataatgccagcaggtaatattagcatttataaggcccttatagtatggcagataaggttgattgctttactcatatgaccttcacatcaactctgttgaagtagatacaaatatcctgttttgcagatgaggaaactgaggtacagaattcttagggaacttacccaaaatggcttttctgcactctgccctttggtattgtccca

SEQ ID NO: 426439 - DNA, 1247 bp, Homo sapiens
  misc_feature (1234)..(1234): n is a, c, g, or t
  misc_feature (1240)..(1240): n is a, c, g, or t
agtaaatctggtctcataaaatgaattcagaaatatttttgcaatgctcattttatgccttgcagaactttgagaaatattacgcataaagtgtaacatgacgggtgtcattcaaatatatgtctcaaatataaaataatcagtttttgccttgttctttcttttcctaatttccgtaacaaacatgtcctattcgtcttcacatctagtttgaagttagctgaattagtgagtgatttataatcacagatttcagaaaattagagctaagtgattttagggactgttgtcactatatatctagggggggaaactgaggcctttagaagttgccacgctcttccagtacagagtaccttcccacgctttacagattcccaccatgtaacattcattaaaagcctttatgggtaggaaatgaataaggtacctgctgtgtatatatttacattataaagtttacgtattcattcttactctttttccttcctatgaagacacacactgttcttattcttacaatctcaaagagagagcagcgaaacaatgaaacttcaggattgtgtggcctggaggctactagttgaactgggcatgctcagtcgccaggcagatttttttcggtgaagtggaaactacaacagcgcgtaccgcgcgcggaggtgggcgtgccctcgtggaatttagaacgttgcctcagccaatggggcctcgcggccggctggcggggctcctcattggagcagcagggaggcgagcagagggcccccagagggagccgcggaggtgcaggtcgaagaggccgggctacgtcgtgccctgcgcgtgagcagctgcagcggcagaggcagcatccagcggcggcgccagcagttccagtccgttgctttactttttgcttcaccgacatagtcattatgccgaagagaaagtctccagagaatacagagggcaaagatggatccaaagtaactaaacaggagcccacaagacggtctgccagattgtcagcgaaacctgctccaccaaaacctgaacccaaaccaagaaaaacatctgctaagaaagaacctggagcaaagattagcagaggtgctaaagggaagaaggaggaaaagcaggaagctggaaaggaaggtactgcaccatctgaaaatggtgaaactaaagctgaagagcacagctgaatctgtagatcggggagatgatttctgttggggtgatttatgtatcncttggncactttt

SEQ ID NO: 426440 - DNA, 1506 bp, Homo sapiens
agtaaatctggtctcataaaatgaattcagaaatatttttgcaatgctcattttatgccttgcagaactttgagaaatattacgcataaagtgtaacatgacgggtgtcattcaaatatatgtctcaaatataaaataatcagtttttgccttgttctttcttttcctaatttccgtaacaaacatgtcctattcgtcttcacatctagtttgaagttagctgaattagtgagtgatttataatcacagatttcagaaaattagagctaagtgattttagggactgttgtcactatatatctagggggggaaactgaggcctttagaagttgccacgctcttccagtacagagtaccttcccacgctttacagattcccaccatgtaacattcattaaaagcctttatgggtaggaaatgaataaggtacctgctgtgtatatatttacattataaagtttacgtattcattcttactctttttccttcctatgaagacacacactgttcttattcttacaatctcaaagagagagcagcgaaacaatgaaacttcaggattgtgtggcctggaggctactagttgaactgggcatgctcagtcgccaggcagatttttttcggtgaagtggaaactacaacagcgcgtaccgcgcgcggaggtgggcgtgccctcgtggaatttagaacgttgcctcagccaatggggcctcgcggccggctggcggggctcctcattggagcagcagggaggcgagcagagggcccccagagggagccgcggaggtgcaggtcgaagaggccgggctacgtcgtgccctgcgcgtgagcagctgcagcggcagaggcagcatccagcggcggcgccagcagttccagtccgttgctttactttttgcttcaccgacatagtcattatgccgaagagaaaggtaagtcttaccaaaaaaagatttcaaaagccttcaaattctgcttacagtaaatgctggcattgcaatggctcgcgcagaacgcgcgcggtagtaacccggggattgggaatctttgctcctccacgcttgtttttagatgcctgttgcagacgttcctctctctctgtcccccctacccactccgtcctcatcgatctcttaatgttactttctctccagtgacgcggtttcccttctttttgaactcattctcgctggaatgttttccacccccaacaacaagaagcaaaagcggctttccattccgaaagggagtttcctctttgcaaactgccaggttgcgaattagtgtgaagggaaaacagcgagaggagaaaaacaagtacaagcgtaaggagagggaagaaaataaatcaggcaaatgttgggattattcccatgcggctgtactcgcgggctgggtgcgctgcggtggctcctaggctaagggaaagagaaagccatgtttaaaatagcgctcaccctcctgctcgcctccgctgcagacccgtatgtaccaactccagtgtca

SEQ ID NO: 426441 - DNA, 1705 bp, Homo sapiens
agtaaatctggtctcataaaatgaattcagaaatatttttgcaatgctcattttatgccttgcagaactttgagaaatattacgcataaagtgtaacatgacgggtgtcattcaaatatatgtctcaaatataaaataatcagtttttgccttgttctttcttttcctaatttccgtaacaaacatgtcctattcgtcttcacatctagtttgaagttagctgaattagtgagtgatttataatcacagatttcagaaaattagagctaagtgattttagggactgttgtcactatatatctagggggggaaactgaggcctttagaagttgccacgctcttccagtacagagtaccttcccacgctttacagattcccaccatgtaacattcattaaaagcctttatgggtaggaaatgaataaggtacctgctgtgtatatatttacattataaagtttacgtattcattcttactctttttccttcctatgaagacacacactgttcttattcttacaatctcaaagagagagcagcgaaacaatgaaacttcaggattgtgtggcctggaggctactagttgaactgggcatgctcagtcgccaggcagatttttttcggtgaagtggaaactacaacagcgcgtaccgcgcgcggaggtgggcgtgccctcgtggaatttagaacgttgcctcagccaatggggcctcgcggccggctggcggggctcctcattggagcagcagggaggcgagcagagggcccccagagggagccgcggaggtgcaggtcgaagaggccgggctacgtcgtgccctgcgcgtgagcagctgcagcggcagaggcagcatccagcggcggcgccagcagttccagtccgttgctttactttttgcttcaccgacatagtcattatgccgaagagaaagtctccagagaatacagagggcaaagatggatccaaagtaactaaacaggagcccacaagacggtctgccagattgtcagcgtatttgtgtaatttaaattatctttgcagaaacctgctccaccaaaacctgaacccaaaccaagaaaaacatctgctaaggtaagaagtgctgtttcccacttttggctttttaaacaatgaataaattataattccctacctcagaatcattcaaagaaaggccgtatttaatgatccaaactgaaaccattaccactgttacgggcttgcttaaaggcataaagcacagttttctgcgttaataggagtgtgttttccatttggtcagtgaggcacgggaagtcagagatgttgctctgagaagcctcatgtccgaagggggtttggcagcagcctcgtgaacatgcggttcatgcggcacacagcggggatgagtttgggccctggcagcactgccccactatgggaggaatttgggaaggggcttctgacttcatctaactggatttcgcaggccagtctgaggtctaataataataatataataatgccagcaggtaatattagcatttataaggcccttatagtatggcagataaggttgattgctttactcatatgaccttcacatcaactctgttgaagtagatacaaatatcctgttttgcagatgaggaaactgaggtacagaattcttagggaacttacccaaaatggcttttctgcactctgccctttggtattgtccca

SEQ ID NO: 426442 - DNA, 2208 bp, Homo sapiens
agtaaatctggtctcataaaatgaattcagaaatatttttgcaatgctcattttatgccttgcagaactttgagaaatattacgcataaagtgtaacatgacgggtgtcattcaaatatatgtctcaaatataaaataatcagtttttgccttgttctttcttttcctaatttccgtaacaaacatgtcctattcgtcttcacatctagtttgaagttagctgaattagtgagtgatttataatcacagatttcagaaaattagagctaagtgattttagggactgttgtcactatatatctagggggggaaactgaggcctttagaagttgccacgctcttccagtacagagtaccttcccacgctttacagattcccaccatgtaacattcattaaaagcctttatgggtaggaaatgaataaggtacctgctgtgtatatatttacattataaagtttacgtattcattcttactctttttccttcctatgaagacacacactgttcttattcttacaatctcaaagagagagcagcgaaacaatgaaacttcaggattgtgtggcctggaggctactagttgaactgggcatgctcagtcgccaggcagatttttttcggtgaagtggaaactacaacagcgcgtaccgcgcgcggaggtgggcgtgccctcgtggaatttagaacgttgcctcagccaatggggcctcgcggccggctggcggggctcctcattggagcagcagggaggcgagcagagggcccccagagggagccgcggaggtgcaggtcgaagaggccgggctacgtcgtgccctgcgcgtgagcagctgcagcggcagaggcagcatccagcggcggcgccagcagttccagtccgttgctttactttttgcttcaccgacatagtcattatgccgaagagaaagtctccagagaatacagagggcaaagatggatccaaagtaactaaacaggagcccacaagacggtctgccagattgtcagcgaaacctgctccaccaaaacctgaacccaaaccaagaaaaacatctgctaagaaagaacctggagcaaagattagcagaggtgctaaagggaagaaggaggaaaagcaggaagctggaaaggaaggtactgcaccatctgaaaatggtgaaactaaagctgaagaggtactttccataaatacctcccactgattgaatcagtgtctttaaagaaatttctcaatccttcagccggtgatagcacgttcttaatgtctctttttattgcctgtaatgttattgcagatccacatctctcgctcaactgttaatgtctcaacctccagaggcaccccacccagcacactgtcagtaaaggggcagattgaaacagtgagagttaagggtacagtagaaaattctgcatgtttgcagtgactagaatcagatagtagtgtggtggtttttttttttaatcattatgaagagtgggagcttgcaggtaaggcttctgtggtggtttgaaaagcagaaagcaataaatgaaacaaagtgtttgtgtaatatattcctgccttgtcttcttcactcagagttgaaataggttttgcagtaaagctggaaaaaaaaaagaaaacaaatgttcaaaactgtgtgtgttggtgggtggaatttcctttgcttatagtagtttcagtagtaactatatgtttttttttcctttctttttcacagcacagaaaactgaatctgtagataacgagggagaatgaattgtcatgaaaaattggggttgattttatgtatctcttgggacaacttttaaaagctatttttaccaagtattttgtaaatgctaattttttaggactctactagttggcatacgaaaatatataaggatggacattttatcgtctcatagtcatgctttttggaaatttacatcatcctcaagtaaaataaatatcagttaaatattggaagctgtgtgtaagattgattcagcattccatgcacttgctttaaaatttagtcctgtgcatactgtggtgtttttactgtgcatatttgaatttttcatgcagtttttctagagcaataatcagtggtgcttttgtacctaggttttatgtgattttaatgaaacatggatagttgtggccacctgctgactatttgtggtttaaaataaaaggtttacttgtctgcagaa

SEQ ID NO: 426443 - DNA, 2382 bp, Homo sapiens
agtaaatctggtctcataaaatgaattcagaaatatttttgcaatgctcattttatgccttgcagaactttgagaaatattacgcataaagtgtaacatgacgggtgtcattcaaatatatgtctcaaatataaaataatcagtttttgccttgttctttcttttcctaatttccgtaacaaacatgtcctattcgtcttcacatctagtttgaagttagctgaattagtgagtgatttataatcacagatttcagaaaattagagctaagtgattttagggactgttgtcactatatatctagggggggaaactgaggcctttagaagttgccacgctcttccagtacagagtaccttcccacgctttacagattcccaccatgtaacattcattaaaagcctttatgggtaggaaatgaataaggtacctgctgtgtatatatttacattataaagtttacgtattcattcttactctttttccttcctatgaagacacacactgttcttattcttacaatctcaaagagagagcagcgaaacaatgaaacttcaggattgtgtggcctggaggctactagttgaactgggcatgctcagtcgccaggcagatttttttcggtgaagtggaaactacaacagcgcgtaccgcgcgcggaggtgggcgtgccctcgtggaatttagaacgttgcctcagccaatggggcctcgcggccggctggcggggctcctcattggagcagcagggaggcgagcagagggcccccagagggagccgcggaggtgcaggtcgaagaggccgggctacgtcgtgccctgcgcgtgagcagctgcagcggcagaggcagcatccagcggcggcgccagcagttccagtccgttgctttactttttgcttcaccgacatagtcattatgccgaagagaaagtctccagagaatacagagggcaaagatggatccaaagtaactaaacaggagcccacaagacggtctgccagattgtcagcgaaacctgctccaccaaaacctgaacccaaaccaagaaaaacatctgctaagaaagaacctggagcaaagattagcagaggtgctaaagggaagaaggaggaaaagcaggaagctggaaaggaaggtactgcaccatctgaaaatggtgaaactaaagctgaagaggtactttccataaatacctcccactgattgaatcagtgtctttaaagaaatttctcaatccttcagccggtgatagcacgttcttaatgtctctttttattgcctgtaatgttattgcagatccacatctctcgctcaactgttaatgtctcaacctccagaggcaccccacccagcacactgtcagtaaaggggcagattgaaacagtgagagttaagggtacagtagaaaattctgcatgtttgcagtgactagaatcagatagtagtgtggtggtttttttttttaatcattatgaagagtgggagcttgcaggtaaggcttctgtggtggtttgaaaagcagaaagcaataaatgaaacaaagtgtttgtgtaatatattcctgccttgtcttcttcactcagagttgaaataggttttgcagtaaagctggaaaaaaaaaagaaaacaaatgttcaaaactgtgtgtgttggtgggtggaatttcctttgcttatagtagtttcagtagtaactatatgtttttttttcctttctttttcacagcacagaaaactgaatctgtagataacgagggagaatgaattgtcatgaaaaattggggttgattttatgtatctcttgggacaacttttaaaagctatttttaccaagtattttgtaaatgctaattttttaggactctactagttggcatacgaaaatatataaggatggacattttatcgtctcatagtcatgctttttggaaatttacatcatcctcaagtaaaataaatatcagttaaatattggaagctgtgtgtaagattgattcagcattccatgcacttgctttaaaatttagtcctgtgcatactgtggtgtttttactgtgcatatttgaatttttcatgcagtttttctagagcaataatcagtggtgcttttgtacctaggttttatgtgattttaatgaaacatggatagttgtggccacctgctgactatttgtggtttaaaataaaaggtttacttgtctgcagaaaaaaaaaaaaaaaaaaaacttgagggggggccccgtacccaaatcggcctatagtgaagtcgtttacaatttacttgccggccgtttacaacgttctgacttgggaaaccctgcggtacccaatttaatgccttgaagacaatcccccttttgcaagttggcgtaataactgca

SEQ ID NO: 426444 - DNA, 2697 bp, Homo sapiens
agtaaatctggtctcataaaatgaattcagaaatatttttgcaatgctcattttatgccttgcagaactttgagaaatattacgcataaagtgtaacatgacgggtgtcattcaaatatatgtctcaaatataaaataatcagtttttgccttgttctttcttttcctaatttccgtaacaaacatgtcctattcgtcttcacatctagtttgaagttagctgaattagtgagtgatttataatcacagatttcagaaaattagagctaagtgattttagggactgttgtcactatatatctagggggggaaactgaggcctttagaagttgccacgctcttccagtacagagtaccttcccacgctttacagattcccaccatgtaacattcattaaaagcctttatgggtaggaaatgaataaggtacctgctgtgtatatatttacattataaagtttacgtattcattcttactctttttccttcctatgaagacacacactgttcttattcttacaatctcaaagagagagcagcgaaacaatgaaacttcaggattgtgtggcctggaggctactagttgaactgggcatgctcagtcgccaggcagatttttttcggtgaagtggaaactacaacagcgcgtaccgcgcgcggaggtgggcgtgccctcgtggaatttagaacgttgcctcagccaatggggcctcgcggccggctggcggggctcctcattggagcagcagggaggcgagcagagggcccccagagggagccgcggaggtgcaggtcgaagaggccgggctacgtcgtgccctgcgcgtgagcagctgcagcggcagaggcagcatccagcggcggcgccagcagttccagtccgttgctttactttttgcttcaccgacatagtcattatgccgaagagaaagtctccagagaatacagagggcaaagatggatccaaagtaactaaacaggagcccacaagacggtctgccagattgtcagcgaaacctgctccaccaaaacctgaacccaaaccaagaaaaacatctgctaaggaacttttcttcatctgggcttcatttccctgcaccttcccagctttctagtcatgcaagccacatgtctccacgtgaggggttcattggaaagcagccacagagccaccccctggctgggttcttccccagctctgcttcctccttccccaagtcctgcagctgctctctccatggcagaaccacttctccccttactggaggggaggtccactgaacaaatccaggagaggaatcattgtgttttccacagaagagaaagtacactggactttctgtgcaacctgttactacattttcacagagactcatatttgtgcagtgtaactcagttgaaacccagcaaaattaggctcccgtgtctccataaaggccaccatgatggtaacggttgtacttcaccttgtgtttggacagaggctgattgattttagccatcatcacaccgtgtctaacattctctttcactgtgctttgatcctctgttagaaagaacctggagcaaagattagcagaggtgctaaagggaagaaggaggaaaagcaggaagctggaaaggaaggtactgcaccatctgaaaatggtgaaactaaagctgaagaggtactttccataaatacctcccactgattgaatcagtgtctttaaagaaatttctcaatccttcagccggtgatagcacgttcttaatgtctctttttattgcctgtaatgttattgcagatccacatctctcgctcaactgttaatgtctcaacctccagaggcaccccacccagcacactgtcagtaaaggggcagattgaaacagtgagagttaagggtacagtagaaaattctgcatgtttgcagtgactagaatcagatagtagtgtggtggtttttttttttaatcattatgaagagtgggagcttgcaggtaaggcttctgtggtggtttgaaaagcagaaagcaataaatgaaacaaagtgtttgtgtaatatattcctgccttgtcttcttcactcagagttgaaataggttttgcagtaaagctggaaaaaaaaaagaaaacaaatgttcaaaactgtgtgtgttggtgggtggaatttcctttgcttatagtagtttcagtagtaactatatgtttttttttcctttctttttcacagcacagaaaactgaatctgtagataacgagggagaatgaattgtcatgaaaaattggggttgattttatgtatctcttgggacaacttttaaaagctatttttaccaagtattttgtaaatgctaattttttaggactctactagttggcatacgaaaatatataaggatggacattttatcgtctcatagtcatgctttttggaaatttacatcatcctcaagtaaaataaatatcagttaaatattggaagctgtgtgtaagattgattcagcattccatgcacttgctttaaaatttagtcctgtgcatactgtggtgtttttactgtgcatatttgaatttttcatgcagtttttctagagcaataatcagtggtgcttttgtacctaggttttatgtgattttaatgaaacatggatagttgtggccacctgctgactatttgtggtttaaaataaaaggtttacttgtctgcagaa

SEQ ID NO: 426445 - DNA, 2264 bp, Homo sapiens
agtaaatctggtctcataaaatgaattcagaaatatttttgcaatgctcattttatgccttgcagaactttgagaaatattacgcataaagtgtaacatgacgggtgtcattcaaatatatgtctcaaatataaaataatcagtttttgccttgttctttcttttcctaatttccgtaacaaacatgtcctattcgtcttcacatctagtttgaagttagctgaattagtgagtgatttataatcacagatttcagaaaattagagctaagtgattttagggactgttgtcactatatatctagggggggaaactgaggcctttagaagttgccacgctcttccagtacagagtaccttcccacgctttacagattcccaccatgtaacattcattaaaagcctttatgggtaggaaatgaataaggtacctgctgtgtatatatttacattataaagtttacgtattcattcttactctttttccttcctatgaagacacacactgttcttattcttacaatctcaaagagagagcagcgaaacaatgaaacttcaggattgtgtggcctggaggctactagttgaactgggcatgctcagtcgccaggcagatttttttcggtgaagtggaaactacaacagcgcgtaccgcgcgcggaggtgggcgtgccctcgtggaatttagaacgttgcctcagccaatggggcctcgcggccggctggcggggctcctcattggagcagcagggaggcgagcagagggcccccagagggagccgcggaggtgcaggtcgaagaggccgggctacgtcgtgccctgcgcgtgagcagctgcagcggcagaggcagcatccagcggcggcgccagcagttccagtccgttgctttactttttgcttcaccgacatagtcattatgccgaagagaaagtctccagagaatacagagggcaaagatggatccaaagtaactaaacaggagcccacaagacggtctgccagattgtcagcgaaacctgctccaccaaaacctgaacccaaaccaagaaaaacatctgctaagaaagaacctggagcaaagattagcagaggtgctaaagggaagaaggaggaaaagcaggaagctggaaaggaaggtactgcaccatctgaaaatggtgaaactaaagctgaagaggtactttccataaatacctcccactgattgaatcagtgtctttaaagaaatttctcaatccttcagccggtgatagcacgttcttaatgtctctttttattgcctgtaatgttattgcagatccacatctctcgctcaactgttaatgtctcaacctccagaggcaccccacccagcacactgtcagtaaaggggcagattgaaacagtgagagttaagggtacagtagaaaattctgcatgtttgcagtgactagaatcagatagtagtgtggtggtttttttttttaatcattatgaagagtgggagcttgcaggtaaggcttctgtggtggtttgaaaagcagaaagcaataaatgaaacaaagtgtttgtgtaatatattcctgccttgtcttcttcactcagagttgaaataggttttgcagtaaagctggaaaaaaaaaagaaaacaaatgttcaaaactgtgtgtgttggtgggtggaatttcctttgcttatagtagtttcagtagtaactatatgtttttttttcctttctttttcacagcacagaaaactgaatctgtagataacgagggagaatgaattgtcatgaaaaattggggttgattttatgtatctcttgggacaacttttaaaagctatttttaccaagtattttgtaaatgctaattttttaggactctactagttggcatacgaaaatatataaggatggacattttatcgtctcatagtcatgctttttggaaatttacatcatcctcaagtaaaataaatatcagttaaatattggaagctgtgtgtaagattgattcagcattccatgcacttgctttaaaatttagtcctgtgcatactgtggtgtttttactgtgcatatttgaatttttcatgcagtttttctagagcaataatcagtggtgcttttgtacctaggttttatgtgattttaatgaaacatggatagttgtggccacctgctgactatttgtggtttaaaataaaaggtttacttgtctgcagaaactgatgcggccggaacactcatatattttaaatatttccataatataccaactaa

SEQ ID NO: 426446 - DNA, 2149 bp, Homo sapiens
agtaaatctggtctcataaaatgaattcagaaatatttttgcaatgctcattttatgccttgcagaactttgagaaatattacgcataaagtgtaacatgacgggtgtcattcaaatatatgtctcaaatataaaataatcagtttttgccttgttctttcttttcctaatttccgtaacaaacatgtcctattcgtcttcacatctagtttgaagttagctgaattagtgagtgatttataatcacagatttcagaaaattagagctaagtgattttagggactgttgtcactatatatctagggggggaaactgaggcctttagaagttgccacgctcttccagtacagagtaccttcccacgctttacagattcccaccatgtaacattcattaaaagcctttatgggtaggaaatgaataaggtacctgctgtgtatatatttacattataaagtttacgtattcattcttactctttttccttcctatgaagacacacactgttcttattcttacaatctcaaagagagagcagcgaaacaatgaaacttcaggattgtgtggcctggaggctactagttgaactgggcatgctcagtcgccaggcagatttttttcggtgaagtggaaactacaacagcgcgtaccgcgcgcggaggtgggcgtgccctcgtggaatttagaacgttgcctcagccaatggggcctcgcggccggctggcggggctcctcattggagcagcagggaggcgagcagagggcccccagagggagccgcggaggtgcaggtcgaagaggccgggctacgtcgtgccctgcgcgtgagcagctgcagcggcagaggcagcatccagcggcggcgccagcagttccagtccgttgctttactttttgcttcaccgacatagtcattatgccgaagagaaagtctccagagaatacagagggcaaagatggatccaaagtaactaaacaggagcccacaagacggtctgccagattgtcagcgaaacctgctccaccaaaacctgaacccaaaccaagaaaaacatctgctaagaaagaacctggagcaaagattagcagaggtgctaaagggaagaaggaggaaaagcaggaagctggaaaggaaggtactgcaccatctgaaaatggtgaaactaaagctgaagaggtactttccataaatacctcccactgattgaatcagtgtctttaaagaaatttctcaatccttcagccggtgatagcacgttcttaatgtctctttttattgcctgtaatgttattgcagatccacatctctcgctcaactgttaatgtctcaacctccagaggcaccccacccagcacactgtcagtaaaggggcagattgaaacagtgagagttaagggtactttttaatcattatgaagagtgggagcttgcaggtaaggcttctgtggtggtttgaaaagcagaaagcaataaatgaaacaaagtgtttgtgtaatatattcctgccttgtcttcttcactcagagttgaaataggttttgcagtaaagctggaaaaaaaaaagaaaacaaatgttcaaaactgtgtgtgttggtgggtggaatttcctttgcttatagtagtttcagtagtaactatatgtttttttttcctttctttttcacagcacagaaaactgaatctgtagataacgagggagaatgaattgtcatgaaaaattggggttgattttatgtatctcttgggacaacttttaaaagctatttttaccaagtattttgtaaatgctaattttttaggactctactagttggcatacgaaaatatataaggatggacattttatcgtctcatagtcatgctttttggaaatttacatcatcctcaagtaaaataaatatcagttaaatattggaagctgtgtgtaagattgattcagcattccatgcacttgctttaaaatttagtcctgtgcatactgtggtgtttttactgtgcatatttgaatttttcatgcagtttttctagagcaataatcagtggtgcttttgtacctaggttttatgtgattttaatgaaacatggatagttgtggccacctgctgactatttgtggtttaaaataaaaggtttacttgtctgcagaa

SEQ ID NO: 426447 - DNA, 2196 bp, Homo sapiens
agtaaatctggtctcataaaatgaattcagaaatatttttgcaatgctcattttatgccttgcagaactttgagaaatattacgcataaagtgtaacatgacgggtgtcattcaaatatatgtctcaaatataaaataatcagtttttgccttgttctttcttttcctaatttccgtaacaaacatgtcctattcgtcttcacatctagtttgaagttagctgaattagtgagtgatttataatcacagatttcagaaaattagagctaagtgattttagggactgttgtcactatatatctagggggggaaactgaggcctttagaagttgccacgctcttccagtacagagtaccttcccacgctttacagattcccaccatgtaacattcattaaaagcctttatgggtaggaaatgaataaggtacctgctgtgtatatatttacattataaagtttacgtattcattcttactctttttccttcctatgaagacacacactgttcttattcttacaatctcaaagagagagcagcgaaacaatgaaacttcaggattgtgtggcctggaggctactagttgaactgggcatgctcagtcgccaggcagatttttttcggtgaagtggaaactacaacagcgcgtaccgcgcgcggaggtgggcgtgccctcgtggaatttagaacgttgcctcagccaatggggcctcgcggccggctggcggggctcctcattggagcagcagggaggcgagcagagggcccccagagggagccgcggaggtgcaggtcgaagaggccgggctacgtcgtgccctgcgcgtgagcagctgcagcggcagaggcagcatccagcggcggcgccagcagttccagtccgttgctttactttttgcttcaccgacatagtcattatgccgaagagaaagtctccagagaatacagagggcaaagatggatccaaagtaactaaacaggagcccacaagacggtctgccagattgtcagcgaaacctgctccaccaaaacctgaacccaaaccaagaaaaacatctgctaagaaagaacctggagcaaagattagcagaggtgctaaagggaagaaggaggaaaagcaggaagctggaaaggaaggtactgcaccatctgaaaatggtgaaactaaagctgaagaggtactttccataaatacctcccactgattgaatcagtgtctttaaagaaatttctcaatccttcagccggtgatagcacgttcttaatgtctctttttattgcctgtaatgttattgcagatccacatctctcgctcaactgttaatgtctcaacctccagaggcaccccacccagcacactgtcagtaaaggggcagattgaaacagtgagagttaagggtacagtagaaaattctgcatgtttgcagtgactagaatcagatagtagtgtggtggtttttttttttaatcattatgaagagtgggagcttgcaggtaaggcttctgtggtggtttgaaaagcagaaagcaataaatgaaacaaagtgtttgtgtaatatattcctgccttgtcttcttcactcagagttgaaataggttttgcagtaaagctggaaaaaaaaaagaaaacaaatgttcaaaactgtgtgtgttggtgggtggaatttcctttgcttatagtagtttcagtagtaactatatgtttttttttcctttctttttcacagcacagaaaactgaatctgtagataacgagggagaatgaattgtcatgaaaaattggggttgattttatgtatctcttgggacaacttttaaaagctatttttaccaagtattttgtaaatgctaattttttaggactctactagttggcatacgaaaatatataaggatggacattttatcgtctcatagtcatgctttttggaaatttacatcatcctcaagtaaaataaatatcagttaaatattggaagctgtgtgtaagattgattcagcattccatgcacttgctttaaaatttagtcctgtgcatactgtggtgtttttactgtgcatatttgaatttttcatgcagtttttctagagcaataatcagtggtgcttttgtacctaggttttatgtgattttaatgaaaaaggatgcggccgaaaccccctcttctcacttgttaattctacgcattcttcaat

SEQ ID NO: 426448 - DNA, 1324 bp, Homo sapiens
attcaacaaagtaaggtatattaagaatagatttttaaaaatcaacttcgttttatataatcaccaaaaaatatgtatattttcccattccctttgtagcccacaagacggtctgccagattgtcagcgaaacctgctccaccaaaacctgaacccaaaccaagaaaaacatctgctaagaaagaacctggagcaaagattagcagaggtgctaaagggaagaaggaggaaaagcaggaagctggaaaggaaggtactgcaccatctgaaaatggtgaaactaaagctgaagaggtactttccataaatacctcccactgattgaatcagtgtctttaaagaaatttctcaatccttcagccggtgatagcacgttcttaatgtctctttttattgcctgtaatgttattgcagatccacatctctcgctcaactgttaatgtctcaacctccagaggcaccccacccagcacactgtcagtaaaggggcagattgaaacagtgagagttaagggtacagtagaaaattctgcatgtttgcagtgactagaatcagatagtagtgtggtggtttttttttttaatcattatgaagagtgggagcttgcaggtaaggcttctgtggtggtttgaaaagcagaaagcaataaatgaaacaaagtgtttgtgtaatatattcctgccttgtcttcttcactcagagttgaaataggttttgcagtaaagctggaaaaaaaaaagaaaacaaatgttcaaaactgtgtgtgttggtgggtggaatttcctttgcttatagtagtttcagtagtaactatatgtttttttttcctttctttttcacagcacagaaaactgaatctgtagataacgagggagaatgaattgtcatgaaaaattggggttgattttatgtatctcttgggacaacttttaaaagctatttttaccaagtattttgtaaatgctaattttttaggactctactagttggcatacgaaaatatataaggatggacattttatcgtctcatagtcatgctttttggaaatttacatcatcctcaagtaaaataaatatcagttaaatattggaagctgtgtgtaagattgattcagcattccatgcacttgctttaaaatttagtcctgtgcatactgtggtgtttttactgtgcatatttgaatttttcatgcagtttttctagagcaataatcagtggtgcttttgtacctaggttttatgtgattttaatgaaacatggatagttgtggccacctgctgactatttgtggtttaaaataaaaggtttacttgtctgcagaa

SEQ ID NO: 426449 - DNA, 2218 bp, Homo sapiens
agtaaatctggtctcataaaatgaattcagaaatatttttgcaatgctcattttatgccttgcagaactttgagaaatattacgcataaagtgtaacatgacgggtgtcattcaaatatatgtctcaaatataaaataatcagtttttgccttgttctttcttttcctaatttccgtaacaaacatgtcctattcgtcttcacatctagtttgaagttagctgaattagtgagtgatttataatcacagatttcagaaaattagagctaagtgattttagggactgttgtcactatatatctagggggggaaactgaggcctttagaagttgccacgctcttccagtacagagtaccttcccacgctttacagattcccaccatgtaacattcattaaaagcctttatgggtaggaaatgaataaggtacctgctgtgtatatatttacattataaagtttacgtattcattcttactctttttccttcctatgaagacacacactgttcttattcttacaatctcaaagagagagcagcgaaacaatgaaacttcaggattgtgtggcctggaggctactagttgaactgggcatgctcagtcgccaggcagatttttttcggtgaagtggaaactacaacagcgcgtaccgcgcgcggaggtgggcgtgccctcgtggaatttagaacgttgcctcagccaatggggcctcgcggccggctggcggggctcctcattggagcagcagggaggcgagcagagggcccccagagggagccgcggaggtgcaggtcgaagaggccgggctacgtcgtgccctgcgcgtgagcagctgcagcggcagaggcagcatccagcggcggcgccagcagttccagtccgttgctttactttttgcttcaccgacatagtcattatgccgaagagaaagtctccagagaatacagagggcaaagatggatccaaagtaactaaacaggagcccacaagacggtctgccagattgtcagcgaaacctgctccaccaaaacctgaacccaaaccaagaaaaacatctgctaagaaagaacctggagcaaagattagcagaggtgctaaagggaagaaggaggaaaagcaggaagctggaaaggaaggtactgcaccatctgaaaatggtgaaactaaagctgaagaggtactttccataaatacctcccactgattgaatcagtgtctttaaagaaatttctcaatccttcagccggtgatagcacgttcttaatgtctctttttattgcctgtaatgttattgcagatccacatctctcgctcaactgttaatgtctcaacctccagaggcaccccacccagcacactgtcagtaaaggggcagattgaaacagtgagagttaagggtacagtagaaaattctgcatgtttgcagtgactagaatcagatagtagtgtggtggtttttttttttaatcattatgaagagtgggagcttgcaggtaaggcttctgtggtggtttgaaaagcagaaagcaataaatgaaacaaagtgtttgtgtaatatattcctgccttgtcttcttcactcagagttgaaataggttttgcagtaaagctggaaaaaaaaaagaaaacaaatgttcaaaactgtgtgtgttggtgggtggaatttcctttgcttatagtagtttcagtagtaactatatgtttttttttcctttctttttcacagcacagaaaactgaatctgtagataacgagggagaatgaattgtcatgaaaaattggggttgattttatgtatctcttgggacaacttttaaaagctatttttaccaagtattttgtaaatgctaattttttaggactctactagttggcatacgaaaatatataaggatggacattttatcgtctcatagtcatgctttttggaaatttacatcatcctcaagtaaaataaatatcagttaaatattggaagctgtgtgtaagattgattcagcattccatgcacttgctttaaaatttagtcctgtgcatactgtggtgtttttactgtgcatatttgaatttttcatgcagacaagtaaaccttttattttaaaccacaaatagtcagcaggtggccacaactatccatgtttcattaaaatcacataaaacctaggtacaaaagcaccactgattattgctctagaaaaactgcatgaaaagtcgacg

SEQ ID NO: 426450 - DNA, 1982 bp, Homo sapiens
agtaaatctggtctcataaaatgaattcagaaatatttttgcaatgctcattttatgccttgcagaactttgagaaatattacgcataaagtgtaacatgacgggtgtcattcaaatatatgtctcaaatataaaataatcagtttttgccttgttctttcttttcctaatttccgtaacaaacatgtcctattcgtcttcacatctagtttgaagttagctgaattagtgagtgatttataatcacagatttcagaaaattagagctaagtgattttagggactgttgtcactatatatctagggggggaaactgaggcctttagaagttgccacgctcttccagtacagagtaccttcccacgctttacagattcccaccatgtaacattcattaaaagcctttatgggtaggaaatgaataaggtacctgctgtgtatatatttacattataaagtttacgtattcattcttactctttttccttcctatgaagacacacactgttcttattcttacaatctcaaagagagagcagcgaaacaatgaaacttcaggattgtgtggcctggaggctactagttgaactgggcatgctcagtcgccaggcagatttttttcggtgaagtggaaactacaacagcgcgtaccgcgcgcggaggtgggcgtgccctcgtggaatttagaacgttgcctcagccaatggggcctcgcggccggctggcggggctcctcattggagcagcagggaggcgagcagagggcccccagagggagccgcggaggtgcaggtcgaagaggccgggctacgtcgtgccctgcgcgtgagcagctgcagcggcagaggcagcatccagcggcggcgccagcagttccagtccgttgctttactttttgcttcaccgacatagtcattatgccgaagagaaagtctccagagaatacagagggcaaagatggatccaaagtaactaaacaggagcccacaagacggtctgccagattgtcagcgaaacctgctccaccaaaacctgaacccaaaccaagaaaaacatctgctaagaaagaacctggagcaaagattagcagaggtgctaaagggaagaaggaggaaaagcaggaagctggaaaggaaggtactgcaccatctgaaaatggtgaaactaaagctgaagaggtactttccataaatacctcccactgattgaatcagtgtctttaaagaaatttctcaatccttcagccggtgatagcacgttcttaatgtctctttttattgcctgtaatgttattgcagatccacatctctcgctcaactgttaatgtctcaacctccagaggcaccccacccagcacactgtcagtaaaggggcagattgaaacagtgagagttaagggtacagtagaaaattctgcatgtttgcagtgactagaatcagatagtagtgtggtggtttttttttttaatcattatgaagagtgggagcttgcaggtaaggcttctgtggtggtttgaaaagcagaaagcaataaatgaaacaaagtgtttgtgtaatatattcctgccttgtcttcttcactcagagttgaaataggttttgcagtaaagctggaaaaaaaaaagaaaacaaatgttcaaaactgtgtgtgttggtgggtggaatttcctttgcttatagtagtttcagtagtaactatatgtttttttttcctttctttttcacagcacagaaaactgaatctgtagataacgagggagaatgaattgtcatgaaaaattggggttgattttatgtatctcttgggacaacttttaaaagctatttttaccaagtattttgtaaatgctaattttttaggactctactagttggcatacgaaaatatataaggatggacattttatcgtctcatagtcatgctttttggaaatttacatcatcctcaagtaaaataaatatcagttaaatattggaagctg

SEQ ID NO: 426451 - DNA, 654 bp, Homo sapiens
ttagagggctccaagctcccaacaagacggtctgccagattgtcagcgaaacctgctccaccaaaacctgaacccaaaccaagaaaaacatctgctaagaaagaacctggagcaaagattagcagaggtgctaaagggaagaaggaggaaaagcaggaagctggaaaggaaggcacagaaaactgaatctgtagataacgagggagaatgaattgtcatgaaaaattggggttgattttatgtatctcttgggacaacttttaaaagctatttttaccaagtattttgtaaatgctaattttttaggactctactagttggcatacgaaaatatataaggatggacattttatcgtctcatagtcatgctttttggaaatttacatcatcctcaagtaaaataaatatcagttaaatattggaagctgtgtgtaagattgattcagcattccatgcacttgctttaaaatttagtcctgtgcatactgtggtgtttttactgtgcatatttgaatttttcatgcagtttttctagagcaataatcagtggtgcttttgtacctaggttttatgtgattttaatgaaacatggatagttgtggccacctgctgactatttgtggtttaaaataaaaggtttacttgtctgcagaa

SEQ ID NO: 426452 - DNA, 1434 bp, Homo sapiens
agtaaatctggtctcataaaatgaattcagaaatatttttgcaatgctcattttatgccttgcagaactttgagaaatattacgcataaagtgtaacatgacgggtgtcattcaaatatatgtctcaaatataaaataatcagtttttgccttgttctttcttttcctaatttccgtaacaaacatgtcctattcgtcttcacatctagtttgaagttagctgaattagtgagtgatttataatcacagatttcagaaaattagagctaagtgattttagggactgttgtcactatatatctagggggggaaactgaggcctttagaagttgccacgctcttccagtacagagtaccttcccacgctttacagattcccaccatgtaacattcattaaaagcctttatgggtaggaaatgaataaggtacctgctgtgtatatatttacattataaagtttacgtattcattcttactctttttccttcctatgaagacacacactgttcttattcttacaatctcaaagagagagcagcgaaacaatgaaacttcaggattgtgtggcctggaggctactagttgaactgggcatgctcagtcgccaggcagatttttttcggtgaagtggaaactacaacagcgcgtaccgcgcgcggaggtgggcgtgccctcgtggaatttagaacgttgcctcagccaatggggcctcgcggccggctggcggggctcctcattggagcagcagggaggcgagcagagggcccccagagggagccgcggaggtgcaggtcgaagaggccgggctacgtcgtgccctgcgcgtgagcagctgcagcggcagaggcagcatccagcggcggcgccagcagttccagtccgttgctttactttttgcttcaccgacatagtcattatgccgaagagaaagtctccagagaatacagagggcaaagatggatccaaagtaactaaacaggagcccacaagacggtctgccagattgtcagcgaaacctgctccaccaaaacctgaacccaaaccaagaaaaacatctgctaagaaagaacctggagcaaagattagcagaggtgctaaagggaagaaggaggaaaagcaggaagctggaaaggaaggtactgcaccatctgaaaatggtgaaactaaagctgaagaggcacagaaaactgaatctgtagataacgagggagaatgaattgtcatgaaaaattggggttgattttatgtatctcttgggacaacttttaaaagctatttttaccaagtattttgtaaatgctaattttttaggactctactagttggcatacgaaaatatataaggatggacattttatcgtctcatagtcatgctttttggaaatttacatcatcctcaagtaaaataaatatcagttaaatattggaagctg

SEQ ID NO: 426453 - DNA, 1764 bp, Homo sapiens
agtaaatctggtctcataaaatgaattcagaaatatttttgcaatgctcattttatgccttgcagaactttgagaaatattacgcataaagtgtaacatgacgggtgtcattcaaatatatgtctcaaatataaaataatcagtttttgccttgttctttcttttcctaatttccgtaacaaacatgtcctattcgtcttcacatctagtttgaagttagctgaattagtgagtgatttataatcacagatttcagaaaattagagctaagtgattttagggactgttgtcactatatatctagggggggaaactgaggcctttagaagttgccacgctcttccagtacagagtaccttcccacgctttacagattcccaccatgtaacattcattaaaagcctttatgggtaggaaatgaataaggtacctgctgtgtatatatttacattataaagtttacgtattcattcttactctttttccttcctatgaagacacacactgttcttattcttacaatctcaaagagagagcagcgaaacaatgaaacttcaggattgtgtggcctggaggctactagttgaactgggcatgctcagtcgccaggcagatttttttcggtgaagtggaaactacaacagcgcgtaccgcgcgcggaggtgggcgtgccctcgtggaatttagaacgttgcctcagccaatggggcctcgcggccggctggcggggctcctcattggagcagcagggaggcgagcagagggcccccagagggagccgcggaggtgcaggtcgaagaggccgggctacgtcgtgccctgcgcgtgagcagctgcagcggcagaggcagcatccagcggcggcgccagcagttccagtccgttgctttactttttgcttcaccgacatagtcattatgccgaagagaaagtctccagagaatacagagggcaaagatggatccaaagtaactaaacaggagcccacaagacggtctgccagattgtcagcgaaacctgctccaccaaaacctgaacccaaaccaagaaaaacatctgctaagaaagaacctggagcaaagattagcagaggtgctaaagggaagaaggaggaaaagcaggaagctggaaaggaaggtactgcaccatctgaaaatggtgaaactaaagctgaagagatccacatctctcgctcaactgttaatgtctcaacctccagaggcaccccacccagcacactgtcagtaaaggggcagattgaaacagtgagagttaagggtacgcacagaaaactgaatctgtagataacgagggagaatgaattgtcatgaaaaattggggttgattttatgtatctcttgggacaacttttaaaagctatttttaccaagtattttgtaaatgctaattttttaggactctactagttggcatacgaaaatatataaggatggacattttatcgtctcatagtcatgctttttggaaatttacatcatcctcaagtaaaataaatatcagttaaatattggaagctgtgtgtaagattgattcagcattccatgcacttgctttaaaatttagtcctgtgcatactgtggtgtttttactgtgcatatttgaatttttcatgcagtttttctagagcaataatcagtggtgcttttgtacctaggttttatgtgattttaatgaaacatggatagttgtggccacctgctgactatttgtggtttaaaataaaaggtttacttgtctgcagaa

SEQ ID NO: 426454 - DNA, 2088 bp, Homo sapiens
agtaaatctggtctcataaaatgaattcagaaatatttttgcaatgctcattttatgccttgcagaactttgagaaatattacgcataaagtgtaacatgacgggtgtcattcaaatatatgtctcaaatataaaataatcagtttttgccttgttctttcttttcctaatttccgtaacaaacatgtcctattcgtcttcacatctagtttgaagttagctgaattagtgagtgatttataatcacagatttcagaaaattagagctaagtgattttagggactgttgtcactatatatctagggggggaaactgaggcctttagaagttgccacgctcttccagtacagagtaccttcccacgctttacagattcccaccatgtaacattcattaaaagcctttatgggtaggaaatgaataaggtacctgctgtgtatatatttacattataaagtttacgtattcattcttactctttttccttcctatgaagacacacactgttcttattcttacaatctcaaagagagagcagcgaaacaatgaaacttcaggattgtgtggcctggaggctactagttgaactgggcatgctcagtcgccaggcagatttttttcggtgaagtggaaactacaacagcgcgtaccgcgcgcggaggtgggcgtgccctcgtggaatttagaacgttgcctcagccaatggggcctcgcggccggctggcggggctcctcattggagcagcagggaggcgagcagagggcccccagagggagccgcggaggtgcaggtcgaagaggccgggctacgtcgtgccctgcgcgtgagcagctgcagcggcagaggcagcatccagcggcggcgccagcagttccagtccgttgctttactttttgcttcaccgacatagtcattatgccgaagagaaagtctccagagaatacagagggcaaagatggatccaaagtaactaaacaggagcccacaagacggtctgccagattgtcagcgaaacctgctccaccaaaacctgaacccaaaccaagaaaaacatctgctaagaaagaacctggagcaaagattagcagaggtgctaaagggaagaaggaggaaaagcaggaagctggaaaggaaggtactgcaccatctgaaaatggtgaaactaaagctgaagagatccacatctctcgctcaactgttaatgtctcaacctccagaggcaccccacccagcacactgtcagtaaaggggcagattgaaacagtgagagttaagggtacagtagaaaattctgcatgtttgcagtgactagaatcagatagtagtgtggtggtttttttttttaatcattatgaagagtgggagcttgcaggtaaggcttctgtggtggtttgaaaagcagaaagcaataaatgaaacaaagtgtttgtgtaatatattcctgccttgtcttcttcactcagagttgaaataggttttgcagtaaagctggaaaaaaaaaagaaaacaaatgttcaaaactgtgtgtgttggtgggtggaatttcctttgcttatagtagtttcagtagtaactatatgtttttttttcctttctttttcacagcacagaaaactgaatctgtagataacgagggagaatgaattgtcatgaaaaattggggttgattttatgtatctcttgggacaacttttaaaagctatttttaccaagtattttgtaaatgctaattttttaggactctactagttggcatacgaaaatatataaggatggacattttatcgtctcatagtcatgctttttggaaatttacatcatcctcaagtaaaataaatatcagttaaatattggaagctgtgtgtaagattgattcagcattccatgcacttgctttaaaatttagtcctgtgcatactgtggtgtttttactgtgcatatttgaatttttcatgcagtttttctagagcaataatcagtggtgcttttgtacctaggttttatgtgattttaatgaaacatggatagttgtggccacctgctgactatttgtggtttaaaataaaaggtttacttgtctgcagaa

SEQ ID NO: 426455 - DNA, 1301 bp, Homo sapiens
aaccggcgagagccttgtcttgaagcagagcttcctgcatggcatcaccctgctaagtgagatcgcagagctggagcccacaagacggtctgccagattgtcagcgaaacctgctccaccaaaacctgaacccaaaccaagaaaaacatctgctaagaaagaacctggagcaaagattagcagaggtgctaaagggaagaaggaggaaaagcaggaagctggaaaggaaggtactgcaccatctgaaaatggtgaaactaaagctgaagaggtactttccataaatacctcccactgattgaatcagtgtctttaaagaaatttctcaatccttcagccggtgatagcacgttcttaatgtctctttttattgcctgtaatgttattgcagatccacatctctcgctcaactgttaatgtctcaacctccagaggcaccccacccagcacactgtcagtaaaggggcagattgaaacagtgagagttaagggtacagtagaaaattctgcatgtttgcagtgactagaatcagatagtagtgtggtggtttttttttttaatcattatgaagagtgggagcttgcaggtaaggcttctgtggtggtttgaaaagcagaaagcaataaatgaaacaaagtgtttgtgtaatatattcctgccttgtcttcttcactcagagttgaaataggttttgcagtaaagctggaaaaaaaaaagaaaacaaatgttcaaaactgtgtgtgttggtgggtggaatttcctttgcttatagtagtttcagtagtaactatatgtttttttttcctttctttttcacagcacagaaaactgaatctgtagataacgagggagaatgaattgtcatgaaaaattggggttgattttatgtatctcttgggacaacttttaaaagctatttttaccaagtattttgtaaatgctaattttttaggactctactagttggcatacgaaaatatataaggatggacattttatcgtctcatagtcatgctttttggaaatttacatcatcctcaagtaaaataaatatcagttaaatattggaagctgtgtgtaagattgattcagcattccatgcacttgctttaaaatttagtcctgtgcatactgtggtgtttttactgtgcatatttgaatttttcatgcagtttttctagagcaataatcagtggtgcttttgtacctaggttttatgtgattttaatgaaacatggatagttgtggccacctgctgactatttgtggtttaaaataaaaggtttacttgtctgcagaa

SEQ ID NO: 426456 - DNA, 1619 bp, Homo sapiens
agtaaatctggtctcataaaatgaattcagaaatatttttgcaatgctcattttatgccttgcagaactttgagaaatattacgcataaagtgtaacatgacgggtgtcattcaaatatatgtctcaaatataaaataatcagtttttgccttgttctttcttttcctaatttccgtaacaaacatgtcctattcgtcttcacatctagtttgaagttagctgaattagtgagtgatttataatcacagatttcagaaaattagagctaagtgattttagggactgttgtcactatatatctagggggggaaactgaggcctttagaagttgccacgctcttccagtacagagtaccttcccacgctttacagattcccaccatgtaacattcattaaaagcctttatgggtaggaaatgaataaggtacctgctgtgtatatatttacattataaagtttacgtattcattcttactctttttccttcctatgaagacacacactgttcttattcttacaatctcaaagagagagcagcgaaacaatgaaacttcaggattgtgtggcctggaggctactagttgaactgggcatgctcagtcgccaggcagatttttttcggtgaagtggaaactacaacagcgcgtaccgcgcgcggaggtgggcgtgccctcgtggaatttagaacgttgcctcagccaatggggcctcgcggccggctggcggggctcctcattggagcagcagggaggcgagcagagggcccccagagggagccgcggaggtgcaggtcgaagaggccgggctacgtcgtgccctgcgcgtgagcagctgcagcggcagaggcagcatccagcggcggcgccagcagttccagtccgttgctttactttttgcttcaccgacatagtcattatgccgaagagaaagtctccagagaatacagagggcaaagatggatccaaagtaactaaacaggagcccacaagacggtctgccagattgtcagcgaaacctgctccaccaaaacctgaacccaaaccaagaaaaacatctgctaagaaagaacctggagcaaagattagcagaggtgctaaagggaagaaggaggaaaagcaggaagctggaaaggaaggcacagaaaactgaatctgtagataacgagggagaatgaattgtcatgaaaaattggggttgattttatgtatctcttgggacaacttttaaaagctatttttaccaagtattttgtaaatgctaattttttaggactctactagttggcatacgaaaatatataaggatggacattttatcgtctcatagtcatgctttttggaaatttacatcatcctcaagtaaaataaatatcagttaaatattggaagctgtgtgtaagattgattcagcattccatgcacttgctttaaaatttagtcctgtgcatactgtggtgtttttactgtgcatatttgaatttttcatgcagtttttctagagcaataatcagtggtgcttttgtacctaggttttatgtgattttaatgaaacatggatagttgtggccacctgctgactatttgtggtttaaaataaaaggtttacttgtctgcagaa

SEQ ID NO: 426457 - DNA, 602 bp, Homo sapiens
taattaccatgatgtaattgtaaaaaaaattggtttagatattttagagattataaaaacatggttgggctaaagaagaccttccattctgtttcttgggaagttacaacatttaccgcttactcattttaaatgttaacaacatgcactttataaactgataaaagaaatttaggtttgaataagatttcctaagtttatgaaatcctttttttctaaattattacaatatcaaaaattttaaattctgttgaattacatcaagctatgcattttcaggttttccgaacctcaaggcatttacttttagaggatgtgaatttacaacttactttgtggaaatgtgccacttactgatatacagatttaaaattaacagtatatcatttcattatctcctaacatatcaacatggataatgtagtttcaccgcgtgttaataagcttgaactccttaatagtttcagggtatattaagaacttaagtttctatcttgttgaaaattagcttacaaaacattgtagcatgacatgtctctaaaggtaattgtatgtgcatccccatttctgttgttgaataaagaaaaactaaacatcaaaaa

SEQ ID NO: 426458 - DNA, 910 bp, Homo sapiens
  misc_feature (505)..(505): n is a, c, g, or t
  misc_feature (509)..(509): n is a, c, g, or t
gttagaatgttaattttacccatgtatatatattcattgaaacctgtttcccaaaatgaaatcactcatttaaaagcaaacaactggttagaatgttaattggataatgtatatataagaagttaaagtatgtaaagtataacttcagccacatttttagaacactgtttaacatttttgcaaaaccttcttgtaggaaaagagagctctctacatgaagatgacttgttttatatttcagattttattttaaaagccatgtctgttaaacaagaaaaaacacaaaagaactccagattcctggttcatcattctgtattcttactcactttttcaagttatctattttgttgcataaactaattgttaactattcatggaacagcaaacgcctgtttaataaagaactttgaccaaggctataaatgccacgtacattattttcagtattgttggttatatttaaattttccttacaataaagcacacttttataataaaaaanaaanaaaaaaaaaaaaaacaatgtgtgtgggggcggcccttgcggcccctgcgagagaagagttttagagagaacccttgcggcgtgggcgccgccggggccccaggtgaggtacacgagtggaacagtgggggcaataaagggtgttcacaccagagaagagaacccgcgggaccaaggaaaaataaggagcagggagaattatctgtcgacacccattatcaacagaaccggcccccgcggaggggcaaacacgcgaaagcggattttcgtcaacaaacatctccacgagaagtggaatttctcgagagggacaacagtaaggcgagactacaccatacaacgacggagtcttcccgaggaggaatctcgccgcatatctagttttaggcccgcctctcgtga

SEQ ID NO: 426459 - DNA, 3734 bp, Homo sapiens
tggagcgggaggagcaggagatgctgccagccctcccggggccgcgctcgctcagccgccgccaccacacggagcagacgcgcgccgggagccgcgggccgggccagccgggccgccggggcccagtgcgccgcgctcgcagccggtagcgcgccagccgtaggcgctcgctcggcagccgcggggccctaggccgtgccggggagggggcgagggcggcgcccaggcgcctgccgccccggaggcaggatgagcatcgagatcccggcgggactgacggagctgctgcagggcttcacggtggaggtgctgaggcaccagcccgcggacctgctggagttcgcgctgcagcacttcacccgcctgcagcaggagaacgagcgcaaaggcaccgcgcgcttcggccatgagggcaggacctggggggacctgggcgccgctgccgggggcggcacccccagcaagggggtcaacttcgccgaggagcccatgcagtccgactccgaggacggggaggaggaggaggcggcgcccgcggacgcaggggcgttcaatgctccagtaataaaccgattcacaaggcgtgcctcagtatgtgcagaagcttataatcctgatgaagaagaagatgatgcagagtccaggattatacatccaaaaactgatgatcaaagaaataggttgcaagaggcttgcaaagacatcctgctgtttaagaatctggatccggagcagatgtctcaagtattagatgccatgtttgaaaaattggtcaaagatggggagcatgtaattgatcaaggtgacgatggtgacaacttttatgtaattgatagaggcacatttgatatttatgtgaaatgtgatggtgttggaagatgtgttggtaactatgataatcgtgggagtttcggcgaactggccttaatgtacaatacacccagagcagctacaatcactgctacctctcctggtgctctgtggggtttggacagggtaaccttcaggagaataattgtgaaaaacaatgccaaaaagagaaaaatgtatgaaagctttattgagtcactgccattccttaaatctttggagttttctgaacgcctgaaagtagtagatgtgataggcaccaaagtatacaacgatggagaacaaatcattgctcagggagattcggctgattcttttttcattgtagaatctggagaagtgaaaattactatgaaaagaaagggtaaatcagaagtggaagagaatggtgcagtagaaatcgctcgatgctcgcggggacagtactttggagagcttgccctggtaactaacaaacctcgagcagcttctgcccacgccattgggactgtcaaatgtttagcaatggatgtgcaagcatttgaaaggcttctgggaccttgcatggaaattatgaaaaggaacatcgctacctatgaagaacagttagttgccctgtttggaacgaacatggatattgttgaacccactgcatgaagcaaaagtatggagcaagacctgtagtgacaaaattacacagtagtggttagtccactgagaatgtgtttgtgtagatgccaagcattttctgtgatttcaggttttttcctttttttacatttacaacgtatcaataaacagtagtgatttaatagtcaataggctttaacatcactttctaaagagtagttcataaaaaaatcaacatactgataaaatgactttgtactccacaaaattatgactgaaaggtttattaaaatgattgtaatatatagaaagtatctgtgtttaagaagataattaaaggatgttatcataggctatatgtgttttacttattcagactgataatcatattagtgactatccccatgtaagagggcacttggcaattaaacatgctacacagcatggcatcacttttttttataactcattaaacacagtaaaattttaatcatttttgttttaaagttttctagcttgataagttatgtgctggccttggcctattggtgaaatggtataaaatatcatatgcagttttaaaactttttatatttttgcaataaagtacattttgactttgttggcataatgtcagtaacatacatattccagtggttttatggacaggcaatttagtcattatgataataaggaaaacagtgttttagatgagagatcattaatgcatttttccctcatcaagcatatatctgcttttttttattttgcaattctctgtattctatgtctttaaaaatttgatcttgacatttaatgtcacaaagttttgtttttttaaaaagtgatttaaacttaagatccgacattttttgtattctttaagattttacacctaaaaaatctctcctatcccaaaaataatgtgggatccttatcagcatgcccacagtttatttctttgttcttcactaggcctgcataatacagtcctatgtagacatctgttcccttgggtttccgttctttcttaggatggttgccaacccacaatctcattgatcagcagccaatatgggtttgtttggtttttttaattcttaaaaacatcctctagaggaatagaaacaaatttttatgagcataaccctatataaagacaaaatgaatttctgaccttaccatatataccattaggccttgccattgctttaatgtagactcatagttgaaattagtgcagaaagaactcagatgtactagattttcattgttcattgatatgctcagtatgctgccacataagatgaatttaattatattcaaccaaagcaatatactcttacatgatttctaggccccatgacccagtgtctagagacattaattctaaccagttgtttgcttttaaatgagtgatttcattttgggaaacaggtttcaaatgaatatatatacatgggtaaaattactctgtgctagtgtagtcttactagagaatgtttatggtcccacttgtatatgaaaatgtggttagaatgttaattggataatgtatatataagaagttaaagtatgtaaagtataacttcagccacatttttagaacactgtttaacatttttgcaaaaccttcttgtaggaaaagagagctctctacatgaagatgacttgttttatatttcagattttattttaaaagccatgtctgttaaacaagaaaaaacacaaaagaactccagattcctggttcatcattctgtattcttactcactttttcaagttatctattttgttgcataaactaattgttaactattcatggaacagcaaacgcctgtttaataaagaactttgaccaaggctataaatgccacgtacattattttcagtattgttggttatatttaaattttccttacaataaagcacacttttataataaaatacatgaattattgtttttcatacttttttgcttgtttctttaaagttttctgacgtgcataatgcataattcattgaaaagcatgatagcaatgtggcatgtggaagcgaacccccagggcataacatagtaagaaagtatggttctgtatggcaataggtttttaaaattattagctattcatcatgtgtgggagaaataattgtggtgtgttgcagatttatttggccatttagaataaccaaatcaatctggctaactaggaatttatgtgtaaaattatctgattaaaacagctcaagtttg

SEQ ID NO: 426460 - DNA, 3369 bp, Homo sapiens
caagtcagcagtaacttctagtgcttacaaggaaaaggcaatcagttttaatggtggaaatgccactattttggacttcttgtagggctatgtgacagtctccagcagtggcttcctatgggattttcaagaataacctggacgatagaagatttttgcctcatatgttgtttagaatttatcacccatgtaagatgtgaatctactgaaacagaaacataaataagtatgtgcagaagcttataatcctgatgaagaagaagatgatgcagagtccaggattatacatccaaaaactgatgatcaaagaaataggttgcaagaggcttgcaaagacatcctgctgtttaagaatctggatccggagcagatgtctcaagtattagatgccatgtttgaaaaattggtcaaagatggggagcatgtaattgatcaaggtgacgatggtgacaacttttatgtaattgatagaggcacatttgatatttatgtgaaatgtgatggtgttggaagatgtgttggtaactatgataatcgtgggagtttcggcgaactggccttaatgtacaatacacccagagcagctacaatcactgctacctctcctggtgctctgtggggtttggacagggtaaccttcaggagaataattgtgaaaaacaatgccaaaaagagaaaaatgtatgaaagctttattgagtcactgccattccttaaatctttggagttttctgaacgcctgaaagtagtagatgtgataggcaccaaagtatacaacgatggagaacaaatcattgctcagggagattcggctgattcttttttcattgtagaatctggagaagtgaaaattactatgaaaagaaagggtaaatcagaagtggaagagaatggtgcagtagaaatcgctcgatgctcgcggggacagtactttggagagcttgccctggtaactaacaaacctcgagcagcttctgcccacgccattgggactgtcaaatgtttagcaatggatgtgcaagcatttgaaaggcttctgggaccttgcatggaaattatgaaaaggaacatcgctacctatgaagaacagttagttgccctgtttggaacgaacatggatattgttgaacccactgcatgaagcaaaagtatggagcaagacctgtagtgacaaaattacacagtagtggttagtccactgagaatgtgtttgtgtagatgccaagcattttctgtgatttcaggttttttcctttttttacatttacaacgtatcaataaacagtagtgatttaatagtcaataggctttaacatcactttctaaagagtagttcataaaaaaatcaacatactgataaaatgactttgtactccacaaaattatgactgaaaggtttattaaaatgattgtaatatatagaaagtatctgtgtttaagaagataattaaaggatgttatcataggctatatgtgttttacttattcagactgataatcatattagtgactatccccatgtaagagggcacttggcaattaaacatgctacacagcatggcatcacttttttttataactcattaaacacagtaaaattttaatcatttttgttttaaagttttctagcttgataagttatgtgctggccttggcctattggtgaaatggtataaaatatcatatgcagttttaaaactttttatatttttgcaataaagtacattttgactttgttggcataatgtcagtaacatacatattccagtggttttatggacaggcaatttagtcattatgataataaggaaaacagtgttttagatgagagatcattaatgcatttttccctcatcaagcatatatctgcttttttttattttgcaattctctgtattctatgtctttaaaaatttgatcttgacatttaatgtcacaaagttttgtttttttaaaaagtgatttaaacttaagatccgacattttttgtattctttaagattttacacctaaaaaatctctcctatcccaaaaataatgtgggatccttatcagcatgcccacagtttatttctttgttcttcactaggcctgcataatacagtcctatgtagacatctgttcccttgggtttccgttctttcttaggatggttgccaacccacaatctcattgatcagcagccaatatgggtttgtttggtttttttaattcttaaaaacatcctctagaggaatagaaacaaatttttatgagcataaccctatataaagacaaaatgaatttctgaccttaccatatataccattaggccttgccattgctttaatgtagactcatagttgaaattagtgcagaaagaactcagatgtactagattttcattgttcattgatatgctcagtatgctgccacataagatgaatttaattatattcaaccaaagcaatatactcttacatgatttctaggccccatgacccagtgtctagagacattaattctaaccagttgtttgcttttaaatgagtgatttcattttgggaaacaggtttcaaatgaatatatatacatgggtaaaattactctgtgctagtgtagtcttactagagaatgtttatggtcccacttgtatatgaaaatgtggttagaatgttaattggataatgtatatataagaagttaaagtatgtaaagtataacttcagccacatttttagaacactgtttaacatttttgcaaaaccttcttgtaggaaaagagagctctctacatgaagatgacttgttttatatttcagattttattttaaaagccatgtctgttaaacaagaaaaaacacaaaagaactccagattcctggttcatcattctgtattcttactcactttttcaagttatctattttgttgcataaactaattgttaactattcatggaacagcaaacgcctgtttaataaagaactttgaccaaggctataaatgccacgtacattattttcagtattgttggttatatttaaattttccttacaataaagcacacttttataataaaatacatgaattattgtttttcatacttttttgcttgtttctttaaagttttctgacgtgcataatgcataattcattgaaaagcatgatagcaatgtggcatgtggaagcgaacccccagggcataacatagtaagaaagtatggttctgtatggcaataggtttttaaaattattagctattcatcatgtgtgggagaaataattgtggtgtgttgcagatttatttggccatttagaataaccaaatcaatctggctaactaggaatttatgtgtaaaattatctgattaaaacagctcaagtttg

SEQ ID NO: 426461 - DNA, 3595 bp, Homo sapiens
tggagcgggaggagcaggagatgctgccagccctcccggggccgcgctcgctcagccgccgccaccacacggagcagacgcgcgccgggagccgcgggccgggccagccgggccgccggggcccagtgcgccgcgctcgcagccggtagcgcgccagccgtaggcgctcgctcggcagccgcggggccctaggccgtgccggggagggggcgagggcggcgcccaggcgcctgccgccccggaggcaggatgagcatcgagatcccggcgggactgacggagctgctgcagggcttcacggtggaggtgctgaggcaccagcccgcggacctgctggagttcgcgctgcagcacttcacccgcctgcagcaggagaacgagcgcaaaggcaccgcgcgcttcggccatgagggcaggacctggggggacctgggcgccgctgccgggggcggcacccccagcaagggggtcaacttcgccgaggagcccatgcagtccgactccgaggacggggaggaggaggaggcggcgcccgcggacgcaggggcgttcaatgctccagtaataaaccgattcacaaggcgtgcctcagtatgtgcagaagcttataatcctgatgaagaagaagatgatgcagagtccaggattatacatccaaaaactgatgatcaaagaaataggttgcaagaggcttgcaaagacatcctgctgtttaagaatctggatccggagcagatgtctcaagtattagatgccatgtttgaaaaattggtcaaagatggggagcatgtaattgatcaaggtgacgatggtgacaacttttatgtaattgatagaggcacatttgatatttatgtgaaatgtgatggtgttggaagatgtgttggtaactatgataatcgtgggagtttcggcgaactggccttaatgtacaatacacccagagcagctacaatcactgctacctctcctggtgctctgtggggtttggacagggtaaccttcaggagaataattgtgaaaaacaatgccaaaaagagaaaaatgtatgaaagctttattgagtcactgccattccttaaatctttggagttttctgaacgcctgaaagtagtagatgtgataggcaccaaagtatacaacgatggagaacaaatcattgctcagggagattcggctgattcttttttcattgtagaatctggagaagtgaaaattactatgaaaagaaagcaatggatgtgcaagcatttgaaaggcttctgggaccttgcatggaaattatgaaaaggaacatcgctacctatgaagaacagttagttgccctgtttggaacgaacatggatattgttgaacccactgcatgaagcaaaagtatggagcaagacctgtagtgacaaaattacacagtagtggttagtccactgagaatgtgtttgtgtagatgccaagcattttctgtgatttcaggttttttcctttttttacatttacaacgtatcaataaacagtagtgatttaatagtcaataggctttaacatcactttctaaagagtagttcataaaaaaatcaacatactgataaaatgactttgtactccacaaaattatgactgaaaggtttattaaaatgattgtaatatatagaaagtatctgtgtttaagaagataattaaaggatgttatcataggctatatgtgttttacttattcagactgataatcatattagtgactatccccatgtaagagggcacttggcaattaaacatgctacacagcatggcatcacttttttttataactcattaaacacagtaaaattttaatcatttttgttttaaagttttctagcttgataagttatgtgctggccttggcctattggtgaaatggtataaaatatcatatgcagttttaaaactttttatatttttgcaataaagtacattttgactttgttggcataatgtcagtaacatacatattccagtggttttatggacaggcaatttagtcattatgataataaggaaaacagtgttttagatgagagatcattaatgcatttttccctcatcaagcatatatctgcttttttttattttgcaattctctgtattctatgtctttaaaaatttgatcttgacatttaatgtcacaaagttttgtttttttaaaaagtgatttaaacttaagatccgacattttttgtattctttaagattttacacctaaaaaatctctcctatcccaaaaataatgtgggatccttatcagcatgcccacagtttatttctttgttcttcactaggcctgcataatacagtcctatgtagacatctgttcccttgggtttccgttctttcttaggatggttgccaacccacaatctcattgatcagcagccaatatgggtttgtttggtttttttaattcttaaaaacatcctctagaggaatagaaacaaatttttatgagcataaccctatataaagacaaaatgaatttctgaccttaccatatataccattaggccttgccattgctttaatgtagactcatagttgaaattagtgcagaaagaactcagatgtactagattttcattgttcattgatatgctcagtatgctgccacataagatgaatttaattatattcaaccaaagcaatatactcttacatgatttctaggccccatgacccagtgtctagagacattaattctaaccagttgtttgcttttaaatgagtgatttcattttgggaaacaggtttcaaatgaatatatatacatgggtaaaattactctgtgctagtgtagtcttactagagaatgtttatggtcccacttgtatatgaaaatgtggttagaatgttaattggataatgtatatataagaagttaaagtatgtaaagtataacttcagccacatttttagaacactgtttaacatttttgcaaaaccttcttgtaggaaaagagagctctctacatgaagatgacttgttttatatttcagattttattttaaaagccatgtctgttaaacaagaaaaaacacaaaagaactccagattcctggttcatcattctgtattcttactcactttttcaagttatctattttgttgcataaactaattgttaactattcatggaacagcaaacgcctgtttaataaagaactttgaccaaggctataaatgccacgtacattattttcagtattgttggttatatttaaattttccttacaataaagcacacttttataataaaatacatgaattattgtttttcatacttttttgcttgtttctttaaagttttctgacgtgcataatgcataattcattgaaaagcatgatagcaatgtggcatgtggaagcgaacccccagggcataacatagtaagaaagtatggttctgtatggcaataggtttttaaaattattagctattcatcatgtgtgggagaaataattgtggtgtgttgcagatttatttggccatttagaataaccaaatcaatctggctaactaggaatttatgtgtaaaattatctgattaaaacagctcaagtttg

SEQ ID NO: 426462 - DNA, 1882 bp, Homo sapiens
tggagcgggaggagcaggagatgctgccagccctcccggggccgcgctcgctcagccgccgccaccacacggagcagacgcgcgccgggagccgcgggccgggccagccgggccgccggggcccagtgcgccgcgctcgcagccggtagcgcgccagccgtaggcgctcgctcggcagccgcggggccctaggccgtgccggggagggggcgagggcggcgcccaggcgcctgccgccccggaggcaggatgagcatcgagatcccggcgggactgacggagctgctgcagggcttcacggtggaggtgctgaggcaccagcccgcggacctgctggagttcgcgctgcagcacttcacccgcctgcagcaggagaacgagcgcaaaggcaccgcgcgcttcggccatgagggcaggacctggggggacctgggcgccgctgccgggggcggcacccccagcaagggggtcaacttcgccgaggagcccatgcagtccgactccgaggacggggaggaggaggaggcggcgcccgcggacgcaggggcgttcaatgctccagtaataaaccgattcacaaggcgtgcctcagtatgtgcagaagcttataatcctgatgaagaagaagatgatgcagagtccaggattatacatccaaaaactgatgatcaaagaaataggttgcaagaggcttgcaaagacatcctgctgtttaagaatctggatccggagcagatgtctcaagtattagatgccatgtttgaaaaattggtcaaagatggggagcatgtaattgatcaaggtgacgatggtgacaacttttatgtaattgatagaggcacatttgatatttatgtgaaatgtgatggtgttggaagatgtgttggtaactatgataatcgtgggagtttcggcgaactggccttaatgtacaatacacccagagcagctacaatcactgctacctctcctggtgctctgtggggtttggacagggtaaccttcaggagaataattgtgaaaaacaatgccaaaaagagaaaaatgtatgaaagctttattgagtcactgccattccttaaatctttggagttttctgaacgcctgaaagtagtagatgtgataggcaccaaagtatacaacgatggagaacaaatcattgctcagggagattcggctgattcttttttcattgtagaatctggagaagtgaaaattactatgaaaagaaagggtaaatcagaagtggaagagaatggtgcagtagaaatcgctcgatgctcgcggggacagtactttggagagcttgccctggtaactaacaaacctcgagcagcttctgcccacgccattgggactgtcaaatgtttagcaatggatgtgcaagcatttgaaaggcttctgggaccttgcatggaaattatgaaaaggaacatcgctacctatgaagaacagttagttgccctgtttggaacgaacatggatattgttgaacccactgcatgaagcaaaagtatggagcaagacctgtagtgacaaaattacacagtagtggttagtccactgagaatgtgtttgtgtagatgccaagcattttctgtgatttcaggttttttcctttttttacatttacaacgtatcaataaacagtagtgatttaatagtcaataggctttaacatcactttctaaagagtagttcataaaaaaatcaacatactgataaaatgactttgtactccacaaaattatgactgaaaggtttattaaaatgattgtaatatatagaaagtatcgggttacaagatataaaggaggtttcaaggtaaagtgttacttatcgacggtatctattatgatatccattaagggcatgtgtcttg

SEQ ID NO: 426463 - DNA, 809 bp, Homo sapiens
gttagaatgttaattttacccatgtatatatattcattgaaacctgtttcccaaaatgaaatcactcatttaaaagcaaacaactggttagaatgttaattggataatgtatatataagaagttaaagtatgtaaagtataacttcagccacatttttagaacactgtttaacatttttgcaaaaccttcttgtaggaaaagagagctctctacatgaagatgacttgttttatatttcagattttattttaaaagccatgtctgttaaacaagaaaaaacacaaaagaactccagattcctggttcatcattctgtattcttactcactttttcaagttatctattttgttgcataaactaattgttaactattcatggaacagcaaacgcctgtttaataaagaactttgaccaaggctataaatgccacgtacattattttcagtattgttggttatatttaaattttccttacaataaagcacacttttataataaaatacatgaattattgtttttcatacttttttgcttgtttctttaaagttttctgacgtgcataatgcataattcattgaaaagcatgatagcaatgtggcatgtggaagcgaacccccagggcataacatagtaagaaagtatggttctgtatggcaataggtttttaaaattattagctattcatcatgtgtgggagaaataattgtggtgtgttgcagatttatttggccatttagaataaccaaatcaatctggctaactaggaatttatgtgtaaaattatctgattaaaacagctcaagtttg

SEQ ID NO: 426464 - DNA, 408 bp, Homo sapiens
gatcaaagaaataggttgcaagaggcttgcaaagacatcctgctgtttaagaatctggatccggtaagataaatcttaataatagaaatggctttgttttttcccccagtgacagtgtcaagaactgtacagggtcttgagttttgccctctttgtaagctgatcaccctggggtgatggtaaaggcccccttgcggatgcttgaatgcacagtaggttgaactgcaggagaggaatattgagtttgggggaatatactgctgttggagcaagaagtaaagaagcctgaggtgtttgtcctgtggaagatattctctcatctctcaagatgttatctcagggctacaaaaacagccctgagaaatggcacaggtaaaaagatggtaggaacttgccctcttcgtaccc

SEQ ID NO: 426465 - DNA, 3835 bp, Homo sapiens
  misc_feature (3430)..(3430): n is a, c, g, or t
  misc_feature (3434)..(3434): n is a, c, g, or t
tggagcgggaggagcaggagatgctgccagccctcccggggccgcgctcgctcagccgccgccaccacacggagcagacgcgcgccgggagccgcgggccgggccagccgggccgccggggcccagtgcgccgcgctcgcagccggtagcgcgccagccgtaggcgctcgctcggcagccgcggggccctaggccgtgccggggagggggcgagggcggcgcccaggcgcctgccgccccggaggcaggatgagcatcgagatcccggcgggactgacggagctgctgcagggcttcacggtggaggtgctgaggcaccagcccgcggacctgctggagttcgcgctgcagcacttcacccgcctgcagcaggagaacgagcgcaaaggcaccgcgcgcttcggccatgagggcaggacctggggggacctgggcgccgctgccgggggcggcacccccagcaagggggtcaacttcgccgaggagcccatgcagtccgactccgaggacggggaggaggaggaggcggcgcccgcggacgcaggggcgttcaatgctccagtaataaaccgattcacaaggcgtgcctcagtatgtgcagaagcttataatcctgatgaagaagaagatgatgcagagtccaggattatacatccaaaaactgatgatcaaagaaataggttgcaagaggcttgcaaagacatcctgctgtttaagaatctggatccggagcagatgtctcaagtattagatgccatgtttgaaaaattggtcaaagatggggagcatgtaattgatcaaggtgacgatggtgacaacttttatgtaattgatagaggcacatttgatatttatgtgaaatgtgatggtgttggaagatgtgttggtaactatgataatcgtgggagtttcggcgaactggccttaatgtacaatacacccagagcagctacaatcactgctacctctcctggtgctctgtggggtttggacagggtaaccttcaggagaataattgtgaaaaacaatgccaaaaagagaaaaatgtatgaaagctttattgagtcactgccattccttaaatctttggagttttctgaacgcctgaaagtagtagatgtgataggcaccaaagtatacaacgatggagaacaaatcattgctcagggagattcggctgattcttttttcattgtagaatctggagaagtgaaaattactatgaaaagaaagggtaaatcagaagtggaagagaatggtgcagtagaaatcgctcgatgctcgcggggacagtactttggagagcttgccctggtaactaacaaacctcgagcagcttctgcccacgccattgggactgtcaaatgtttagcaatggatgtgcaagcatttgaaaggcttctgggaccttgcatggaaattatgaaaaggaacatcgctacctatgaagaacagttagttgccctgtttggaacgaacatggatattgttgaacccactgcatgaagcaaaagtatggagcaagacctgtagtgacaaaattacacagtagtggttagtccactgagaatgtgtttgtgtagatgccaagcattttctgtgatttcaggttttttcctttttttacatttacaacgtatcaataaacagtagtgatttaatagtcaataggctttaacatcactttctaaagagtagttcataaaaaaatcaacatactgataaaatgactttgtactccacaaaattatgactgaaaggtttattaaaatgattgtaatatatagaaagtatctgtgtttaagaagataattaaaggatgttatcataggctatatgtgttttacttattcagactgataatcatattagtgactatccccatgtaagagggcacttggcaattaaacatgctacacagcatggcatcacttttttttataactcattaaacacagtaaaattttaatcatttttgttttaaagttttctagcttgataagttatgtgctggccttggcctattggtgaaatggtataaaatatcatatgcagttttaaaactttttatatttttgcaataaagtacattttgactttgttggcataatgtcagtaacatacatattccagtggttttatggacaggcaatttagtcattatgataataaggaaaacagtgttttagatgagagatcattaatgcatttttccctcatcaagcatatatctgcttttttttattttgcaattctctgtattctatgtctttaaaaatttgatcttgacatttaatgtcacaaagttttgtttttttaaaaagtgatttaaacttaagatccgacattttttgtattctttaagattttacacctaaaaaatctctcctatcccaaaaataatgtgggatccttatcagcatgcccacagtttatttctttgttcttcactaggcctgcataatacagtcctatgtagacatctgttcccttgggtttccgttctttcttaggatggttgccaacccacaatctcattgatcagcagccaatatgggtttgtttggtttttttaattcttaaaaacatcctctagaggaatagaaacaaatttttatgagcataaccctatataaagacaaaatgaatttctgaccttaccatatataccattaggccttgccattgctttaatgtagactcatagttgaaattagtgcagaaagaactcagatgtactagattttcattgttcattgatatgctcagtatgctgccacataagatgaatttaattatattcaaccaaagcaatatactcttacatgatttctaggccccatgacccagtgtctagagacattaattctaaccagttgtttgcttttaaatgagtgatttcattttgggaaacaggtttcaaatgaatatatatacatgggtaaaattactctgtgctagtgtagtcttactagagaatgtttatggtcccacttgtatatgaaaatgtggttagaatgttaattggataatgtatatataagaagttaaagtatgtaaagtataacttcagccacatttttagaacactgtttaacatttttgcaaaaccttcttgtaggaaaagagagctctctacatgaagatgacttgttttatatttcagattttattttaaaagccatgtctgttaaacaagaaaaaacacaaaagaactccagattcctggttcatcattctgtattcttactcactttttcaagttatctattttgttgcataaactaattgttaactattcatggaacagcaaacgcctgtttaataaagaactttgaccaaggctataaatgccacgtacattattttcagtattgttggttatatttaaattttccttacaataaagcacacttttataataaaaaanaaanaaaaaaaaaaaaaacaatgtgtgtgggggcggcccttgcggcccctgcgagagaagagttttagagagaacccttgcggcgtgggcgccgccggggccccaggtgaggtacacgagtggaacagtgggggcaataaagggtgttcacaccagagaagagaacccgcgggaccaaggaaaaataaggagcagggagaattatctgtcgacacccattatcaacagaaccggcccccgcggaggggcaaacacgcgaaagcggattttcgtcaacaaacatctccacgagaagtggaatttctcgagagggacaacagtaaggcgagactacaccatacaacgacggagtcttcccgaggaggaatctcgccgcatatctagttttaggcccgcctctcgtga

SEQ ID NO: 426466 - DNA, 3650 bp, Homo sapiens
tggagcgggaggagcaggagatgctgccagccctcccggggccgcgctcgctcagccgccgccaccacacggagcagacgcgcgccgggagccgcgggccgggccagccgggccgccggggcccagtgcgccgcgctcgcagccggtagcgcgccagccgtaggcgctcgctcggcagccgcggggccctaggccgtgccggggagggggcgagggcggcgcccaggcgcctgccgccccggaggcaggatgagcatcgagatcccggcgggactgacggagctgctgcagggcttcacggtggaggtgctgaggcaccagcccgcggacctgctggagttcgcgctgcagcacttcacccgcctgcagcaggagaacgagcgcaaaggcaccgcgcgcttcggccatgagggcaggacctggggggacctgggcgccgctgccgggggcggcacccccagcaagggggtcaacttcgccgaggagcccatgcagtccgactccgaggacggggaggaggaggaggcggcgcccgcggacgcaggggcgttcaatgctccagtaataaaccgattcacaaggcgtgcctcagtatgtgcagaagcttataatcctgatgaagaagaagatgatgcagagtccagggagcagatgtctcaagtattagatgccatgtttgaaaaattggtcaaagatggggagcatgtaattgatcaaggtgacgatggtgacaacttttatgtaattgatagaggcacatttgatatttatgtgaaatgtgatggtgttggaagatgtgttggtaactatgataatcgtgggagtttcggcgaactggccttaatgtacaatacacccagagcagctacaatcactgctacctctcctggtgctctgtggggtttggacagggtaaccttcaggagaataattgtgaaaaacaatgccaaaaagagaaaaatgtatgaaagctttattgagtcactgccattccttaaatctttggagttttctgaacgcctgaaagtagtagatgtgataggcaccaaagtatacaacgatggagaacaaatcattgctcagggagattcggctgattcttttttcattgtagaatctggagaagtgaaaattactatgaaaagaaagggtaaatcagaagtggaagagaatggtgcagtagaaatcgctcgatgctcgcggggacagtactttggagagcttgccctggtaactaacaaacctcgagcagcttctgcccacgccattgggactgtcaaatgtttagcaatggatgtgcaagcatttgaaaggcttctgggaccttgcatggaaattatgaaaaggaacatcgctacctatgaagaacagttagttgccctgtttggaacgaacatggatattgttgaacccactgcatgaagcaaaagtatggagcaagacctgtagtgacaaaattacacagtagtggttagtccactgagaatgtgtttgtgtagatgccaagcattttctgtgatttcaggttttttcctttttttacatttacaacgtatcaataaacagtagtgatttaatagtcaataggctttaacatcactttctaaagagtagttcataaaaaaatcaacatactgataaaatgactttgtactccacaaaattatgactgaaaggtttattaaaatgattgtaatatatagaaagtatctgtgtttaagaagataattaaaggatgttatcataggctatatgtgttttacttattcagactgataatcatattagtgactatccccatgtaagagggcacttggcaattaaacatgctacacagcatggcatcacttttttttataactcattaaacacagtaaaattttaatcatttttgttttaaagttttctagcttgataagttatgtgctggccttggcctattggtgaaatggtataaaatatcatatgcagttttaaaactttttatatttttgcaataaagtacattttgactttgttggcataatgtcagtaacatacatattccagtggttttatggacaggcaatttagtcattatgataataaggaaaacagtgttttagatgagagatcattaatgcatttttccctcatcaagcatatatctgcttttttttattttgcaattctctgtattctatgtctttaaaaatttgatcttgacatttaatgtcacaaagttttgtttttttaaaaagtgatttaaacttaagatccgacattttttgtattctttaagattttacacctaaaaaatctctcctatcccaaaaataatgtgggatccttatcagcatgcccacagtttatttctttgttcttcactaggcctgcataatacagtcctatgtagacatctgttcccttgggtttccgttctttcttaggatggttgccaacccacaatctcattgatcagcagccaatatgggtttgtttggtttttttaattcttaaaaacatcctctagaggaatagaaacaaatttttatgagcataaccctatataaagacaaaatgaatttctgaccttaccatatataccattaggccttgccattgctttaatgtagactcatagttgaaattagtgcagaaagaactcagatgtactagattttcattgttcattgatatgctcagtatgctgccacataagatgaatttaattatattcaaccaaagcaatatactcttacatgatttctaggccccatgacccagtgtctagagacattaattctaaccagttgtttgcttttaaatgagtgatttcattttgggaaacaggtttcaaatgaatatatatacatgggtaaaattactctgtgctagtgtagtcttactagagaatgtttatggtcccacttgtatatgaaaatgtggttagaatgttaattggataatgtatatataagaagttaaagtatgtaaagtataacttcagccacatttttagaacactgtttaacatttttgcaaaaccttcttgtaggaaaagagagctctctacatgaagatgacttgttttatatttcagattttattttaaaagccatgtctgttaaacaagaaaaaacacaaaagaactccagattcctggttcatcattctgtattcttactcactttttcaagttatctattttgttgcataaactaattgttaactattcatggaacagcaaacgcctgtttaataaagaactttgaccaaggctataaatgccacgtacattattttcagtattgttggttatatttaaattttccttacaataaagcacacttttataataaaatacatgaattattgtttttcatacttttttgcttgtttctttaaagttttctgacgtgcataatgcataattcattgaaaagcatgatagcaatgtggcatgtggaagcgaacccccagggcataacatagtaagaaagtatggttctgtatggcaataggtttttaaaattattagctattcatcatgtgtgggagaaataattgtggtgtgttgcagatttatttggccatttagaataaccaaatcaatctggctaactaggaatttatgtgtaaaattatctgattaaaacagctcaagtttg

SEQ ID NO: 426467 - DNA, 286 bp, Homo sapiens
gcggccgcctactactactactgctcgaattcaagcttctaacgatgtacggggcaccgggtaggtttccgcggtgaccccgcggcggcctgagggacgctccctgccccatcccggctgttgggctgggccgctttgcctctgcttcgccctgtgctgtgttctccagctttgtagcagcagccttgacaaacccaggcgcactgtaccaaggcaatgtaacttttgattttcggtcaatttaagttcttttgtcaccaaatattaataaacagttttgacttca

SEQ ID NO: 426468 - DNA, 5663 bp, Homo sapiens
gcacggcgacggcggcggtggcggcagttcctgctctaggctgcgagcggctggcggcttcgaggggagctgaggcgcggaggggctcggcggcagcggcggcggctcggcactgttacctctcggtccggctggcgccggggcgggcggtttggtcctttccgggcgcgcgggggcgacagcggcagcgacccgaggcctgcggcctaggcctcagcgcggcggcgggctcgagtgcagcgcggaaccggcccgagggccctacccggaggcaccatgagcgtggaggcgtacgggcccagctcgcagactctcactttcctggacacggaggaggccgagctgcttggcgccgacacacagggctccgagttcgagttcaccgactttactcttcctagccagacgcagacgccccccggcggccccggcggcccgggcggtggcggcgcgggaggcccgggcggcgcgggcgcgggcgctgcggcgggacagctcgacgcgcaggttgggcccgaaggcatcctgcagaacggggctgtggacgacagtgtagccaagaccagccagttgttggctgagttgaacttcgaggaagatgaagaagacacctattacacgaaggacctccccatacacgcctgcagttactgtggaatacacgatcctgcctgcgtggtttactgtaataccagcaagaagtggttctgcaacggacgtggaaatacttctggcagccacattgtaaatcaccttgtgagggcaaaatgcaaagaggtgaccctgcacaaggacgggcccctgggggagacagtcctggagtgctacaactgcggctgtcgcaacgtcttcctcctcggcttcatcccggccaaagctgactcagtggtggtgctgctgtgcaggcagccctgtgccagccagagcagcctcaaggacatcaactgggacagctcgcagtggcagccgctgatccaggaccgctgcttcctgtcctggctggtcaagatcccctccgagcaggagcagctgcgggcacgccagatcacggcacagcagatcaacaagctggaggagctgtggaaggaaaacccttctgccacgctggaggacctggagaagccgggggtggacgaggagccgcagcatgtcctcctgcggtacgaggacgcctaccagtaccagaacatattcgggcccctggtcaagctggaggccgactacgacaagaagctgaaggagtcccagactcaagataacatcactgtcaggtgggacctgggccttaacaagaagagaatcgcctacttcactttgcccaagactgactctgacatgcggctcatgcagggggatgagatatgcctgcggtacaaaggggaccttgcgcccctgtggaaagggatcggccacgtcatcaaggtccctgataattatggcgatgagatcgccattgagctgcggagcagcgtgggtgcacctgtggaggtgactcacaacttccaggtggattttgtgtggaagtcgacctcctttgacaggatgcagagcgcattgaaaacgtttgccgtggatgagacctcggtgtctggctacatctaccacaagctgttgggccacgaggtggaggacgtaatcatcaagtgccagctgcccaagcgcttcacggcgcagggcctccccgacctcaaccactcccaggtttatgccgtgaagactgtgctgcaaagaccactgagcctgatccagggcccgccaggcacggggaagacggtgacgtcggccaccatcgtctaccacctggcccggcaaggcaacgggccggtgctggtgtgtgctccgagcaacatcgccgtggaccagctaacggagaagatccaccagacggggctaaaggtcgtgcgcctctgcgccaagagccgtgaggccatcgactccccggtgtcttttctggccctgcacaaccagatcaggaacatggacagcatgcctgagctgcagaagctgcagcagctgaaagacgagactggggagctgtcgtctgccgacgagaagcggtaccgggccttgaagcgcaccgcagagagagagctgctgatgaacgcagatgtcatctgctgcacatgtgtgggcgccggtgacccgaggctggccaagatgcagttccgctccattttaatcgacgaaagcacccaggccaccgagccggagtgcatggttcccgtggtcctcggggccaagcagctgatccttgtaggcgaccactgccagctgggcccagtggtgatgtgcaagaaggcggccaaggccgggctgtcacagtcgctcttcgagcgcctggtggtgctgggcatccggcccatccgcctgcaggtccagtaccggatgcaccctgcactcagcgccttcccatccaacatcttctacgagggctccctccagaatggtgtcactgcagcggatcgtgtgaagaagggatttgacttccagtggccccaacccgataaaccgatgttcttctacgtgacccagggccaagaggagattgccagctcgggcacctcctacctgaacaggaccgaggctgcgaacgtggagaagatcaccacgaagttgctgaaggcaggcgccaagccggaccagattggcatcatcacgccctacgagggccagcgctcctacctggtgcagtacatgcagttcagcggctccctgcacaccaagctctaccaggaggtggagatcgccagtgtggacgcctttcagggacgcgagaaggacttcatcatcctgtcctgtgtgcgggccaacgagcaccaaggcattggctttttaaatgaccccaggcgtctgaacgtggccctgaccagagcaaggtatggcgtcatcattgtgggcaacccgaaggcactatcaaagcagccgctctggaaccacctgctgaactactataaggagcagaaggtgctggtggaggggccgctcaacaacctgcgtgagagcctcatgcagttcagcaagccacggaagctggtcaacactatcaacccgggagcccgcttcatgaccacagccatgtatgatgcccgggaggccatcatcccaggctccgtctatgatcggagcagccagggccggccttccagcatgtacttccagacccatgaccagattggcatgatcagtgccggccctagccacgtggctgccatgaacattcccatccccttcaacctggtcatgccacccatgccaccgcctggctattttggacaagccaacgggcctgctgcagggcgaggcaccccgaaaggcaagactggtcgtgggggacgccagaagaaccgctttgggcttcctggacccagccagactaacctccccaacagccaagccagccaggatgtggcgtcacagcccttctctcagggcgccctgacgcagggctacatctccatgagccagccttcccagatgagccagcccggcctctcccagccggagctgtcccaggacagttaccttggtgacgagtttaaatcacaaatcgacgtggcgctctcacaggactccacgtaccagggagagcgggcttaccagcatggcggggtgacggggctgtcccagtattaaaaggtggcggcggaagagctaagcaacgtggcttagtccatcagcatcttattctgggtaataaaaaataaaaataaacggatacctgttttccactgctaaaactgaagcaccactgtgtgagcaacaggaagggagagcgcacgagggagaggagccgaggccgagcgccccctgctggcccgcggcggcgaggagcagagggagcggaggaggggccggcccgcgggagccgcggccaccaggaggccccgctccgtcccatcggggctgcggccagggcggagggaggaagaccctcatctcagagtagccctttcctctgttcttttatttctttttctctttgattgaaaggggactacgtcttagcaggaaaaaaaacttcgcatttctgtgcccgagcaggctccttgcaaagacagcagcgtgcggggcagagccccgggagggcgcgtctgtccacgcctaccggacgcgccgaggtcgcgctgcctgtgttctccgagggccttcatttaaagaaaataagggtgttttgggtttttctctttgtttttttcaagattcttttaaaggagtactgaagaatactttcctaagtttgtctctaaaatcttagcggtggacctgggagatttgagaagcttccagaaacagtttaaacaagccagcgctactggagaagaggagcaacacctgtgccgcggccggaggagttttgttgttggttttagcttccagtggcttctttctgcggggcatcaggctgctggggtagccgcccgccgagcctggaagctgctcgttctccgctggactcagaagccaagctgcttcccgcctagactcggcgcagggccccgcaccggtgaggaaggtgcttttggccccattgcgaggggccttggccaggactggccctgtggccaggaggcgagaaggtggctgttcccggattgacggctttttcccgggggcctttggaagatttggtggaaggacaagagggcctgtccctgtccccgtccccaggaggtaccgacagtccctgtgctggttagacacggagcgctgcacaccgaaagcccaaattgggagctctgcctgccggcaactttgctgatggggtgattgctgcttctggggggtaaggaaacaagttacagaaattaccgcgttctgtgtgaagggactgagggtgtggtgtcattggcagagggtcattttaggagagctgccccagcccctcgaacgcctggcttggggtgtcattctgcctggcggccaggcctccagcttcccctgccccgggcctggggctgtcactggccctgatccgaacacctccagattccggcttctacatgggacagacggggacgcacaggccaccttccttctggcagggactcttatttattcccattgctctagggctttcggtttccccttcttccggtaggccgcgtagaggcatgcaccgggtaggtttccgcggtgaccccgcggcggcctgagggacgctccctgccccatcccggctgttgggctgggccgctttgcctctgcttcgccctgtgctgtgttctccagctttgtagcagcagccttgacaaacccaggcgcactgtaccaaggcaatgtaacttttgattttcggtcaatttaagttcttttgtcaccaaatattaataaacagttttgacttcaaaaaaaaaaaaaaaaaaaaaaaaaaaaaaaaaaaaaaaaaaaaaaaaaaaaaaaaaaaaaaaaaaaaaaaaaaaaaaaaacagaacaaaacagaaaaaacaaaagggaaaaaaaagaaaaaaaaaaacaacaagaacaaaaaaaagaaaaaaaaaagaaagtcaacagcaaaaagaagcacacagacatacaaaaaatctagaacgaacacgcggcagagcacataaagcacagggaaacagacaacaagagaccacagaaaaagacagaaaagaccaccaaaacagggaagaagaaaaaacagaaacaaaaaaaat

SEQ ID NO: 426469 - DNA, 3734 bp, Homo sapiens
gcacggcgacggcggcggtggcggcagttcctgctctaggctgcgagcggctggcggcttcgaggggagctgaggcgcggaggggctcggcggcagcggcggcggctcggcactgttacctctcggtccggctggcgccggggcgggcggtttggtcctttccgggcgcgcgggggcgacagcggcagcgacccgaggcctgcggcctaggcctcagcgcggcggcgggctcgagtgcagcgcggaaccggcccgagggccctacccggaggcaccatgagcgtggaggcgtacgggcccagctcgcagactctcactttcctggacacggaggaggccgagctgcttggcgccgacacacagggctccgagttcgagttcaccgactttactcttcctagccagacgcagacgccccccggcggccccggcggcccgggcggtggcggcgcgggaggcccgggcggcgcgggcgcgggcgctgcggcgggacagctcgacgcgcaggttgggcccgaaggcatcctgcagaacggggctgtggacgacagtgtagccaagaccagccagttgttggctgagttgaacttcgaggaagatgaagaagacacctattacacgaaggacctccccatacacgcctgcagttactgtggaatacacgatcctgcctgcgtggtttactgtaataccagcaagaagtggttctgcaacggacgtggaaatacttctggcagccacattgtaaatcaccttgtgagggcaaaatgcaaagaggtgaccctgcacaaggacgggcccctgggggagacagtcctggagtgctacaactgcggctgtcgcaacgtcttcctcctcggcttcatcccggccaaagctgactcagtggtggtgctgctgtgcaggcagccctgtgccagccagagcagcctcaaggacatcaactgggacagctcgcagtggcagccgctgatccaggaccgctgcttcctgtcctggctggtcaagatcccctccgagcaggagcagctgcgggcacgccagatcacggcacagcagatcaacaagctggaggagctgtggaaggaaaacccttctgccacgctggaggacctggagaagccgggggtggacgaggagccgcagcatgtcctcctgcggtacgaggacgcctaccagtaccagaacatattcgggcccctggtcaagctggaggccgactacgacaagaagctgaaggagtcccagactcaagataacatcactgtcaggtgggacctgggccttaacaagaagagaatcgcctacttcactttgcccaagactgactctgacatgcggctcatgcagggggatgagatatgcctgcggtacaaaggggaccttgcgcccctgtggaaagggatcggccacgtcatcaaggtccctgataattatggcgatgagatcgccattgagctgcggagcagcgtgggtgcacctgtggaggtgactcacaacttccaggtggattttgtgtggaagtcgacctcctttgacaggatgcagagcgcattgaaaacgtttgccgtggatgagacctcggtgtctggctacatctaccacaagctgttgggccacgaggtggaggacgtaatcatcaagtgccagctgcccaagcgcttcacggcgcagggcctccccgacctcaaccactcccaggtttatgccgtgaagactgtgctgcaaagaccactgagcctgatccagggcccgccaggcacggggaagacggtgacgtcggccaccatcgtctaccacctggcccggcaaggcaacgggccggtgctggtgtgtgctccgagcaacatcgccgtggaccagctaacggagaagatccaccagacggggctaaaggtcgtgcgcctctgcgccaagagccgtgaggccatcgactccccggtgtcttttctggccctgcacaaccagatcaggaacatggacagcatgcctgagctgcagaagctgcagcagctgaaagacgagactggggagctgtcgtctgccgacgagaagcggtaccgggccttgaagcgcaccgcagagagagagctgctgatgaacgcagatgtcatctgctgcacatgtgtgggcgccggtgacccgaggctggccaagatgcagttccgctccattttaatcgacgaaagcacccaggccaccgagccggagtgcatggttcccgtggtcctcggggccaagcagctgatccttgtaggcgaccactgccagctgggcccagtggtgatgtgcaagaaggcggccaaggccgggctgtcacagtcgctcttcgagcgcctggtggtgctgggcatccggcccatccgcctgcaggtccagtaccggatgcaccctgcactcagcgccttcccatccaacatcttctacgagggctccctccagaatggtgtcactgcagcggatcgtgtgaagaagggatttgacttccagtggccccaacccgataaaccgatgttcttctacgtgacccagggccaagaggagattgccagctcgggcacctcctacctgaacaggaccgaggctgcgaacgtggagaagatcaccacgaagttgctgaaggcaggcgccaagccggaccagattggcatcatcacgccctacgagggccagcgctcctacctggtgcagtacatgcagttcagcggctccctgcacaccaagctctaccaggaggtggagatcgccagtgtggacgcctttcagggacgcgagaaggacttcatcatcctgtcctgtgtgcgggccaacgagcaccaaggcattggctttttaaatgaccccaggcgtctgaacgtggccctgaccagagcaaggtatggcgtcatcattgtgggcaacccgaaggcactatcaaagcagccgctctggaaccacctgctgaactactataaggagcagaaggtgctggtggaggggccgctcaacaacctgcgtgagagcctcatgcagttcagcaagccacggaagctggtcaacactatcaacccgggagcccgcttcatgaccacagccatgtatgatgcccgggaggccatcatcccaggctccgtctatgatcggagcagccagggccggccttccagcatgtacttccagacccatgaccagattggcatgatcagtgccggccctagccacgtggctgccatgaacattcccatccccttcaacctggtcatgccacccatgccaccgcctggctattttggacaagccaacgggcctgctgcagggcgaggcaccccgaaaggcaagactggtcgtgggggacgccagaagaaccgctttgggcttcctggacccagccagactaacctccccaacagccaagccagccaggatgtggcgtcacagcccttctctcagggcgccctgacgcagggctacatctccatgagccagccttcccagatgagccagcccggcctctcccagccggagctgtcccaggacagttaccttggtgacgagtttaaatcacaaatcgacgtggcgctctcacaggactccacgtaccagggagagcgggcttaccagcatggcggggtgacggggctgtcccagtattaaaaggtggcggcggaagagctaagcaacgtggcttagtccatcagcatcttattctgggtaataaaaaataaaaataaacggatacctgttttccactgcta

SEQ ID NO: 426470 - DNA, 3850 bp, Homo sapiens
gggaagatgtacgagtgcgatcagccggtgttatttgcgtcacgagggagcggtttgataaatgttatgtcagtgggtcgatagctcggtgtctggctacatctaccacaagctgttgggccacgaggtggaggacgtaatcatcaagtgccagctgcccaagcgcttcacggcgcagggcctccccgacctcaaccactcccaggtttatgccgtgaagactgtgctgcaaagaccactgagcctgatccagggcccgccaggcacggggaagacggtgacgtcggccaccatcgtctaccacctggcccggcaaggcaacgggccggtgctggtgtgtgctccgagcaacatcgccgtggaccagctaacggagaagatccaccagacggggctaaaggtcgtgcgcctctgcgccaagagccgtgaggccatcgactccccggtgtcttttctggccctgcacaaccagatcaggaacatggacagcatgcctgagctgcagaagctgcagcagctgaaagacgagactggggagctgtcgtctgccgacgagaagcggtaccgggccttgaagcgcaccgcagagagagagctgctgatgaacgcagatgtcatctgctgcacatgtgtgggcgccggtgacccgaggctggccaagatgcagttccgctccattttaatcgacgaaagcacccaggccaccgagccggagtgcatggttcccgtggtcctcggggccaagcagctgatccttgtaggcgaccactgccagctgggcccagtggtgatgtgcaagaaggcggccaaggccgggctgtcacagtcgctcttcgagcgcctggtggtgctgggcatccggcccatccgcctgcaggtccagtaccggatgcaccctgcactcagcgccttcccatccaacatcttctacgagggctccctccagaatggtgtcactgcagcggatcgtgtgaagaagggatttgacttccagtggccccaacccgataaaccgatgttcttctacgtgacccagggccaagaggagattgccagctcgggcacctcctacctgaacaggaccgaggctgcgaacgtggagaagatcaccacgaagttgctgaaggcaggcgccaagccggaccagattggcatcatcacgccctacgagggccagcgctcctacctggtgcagtacatgcagttcagcggctccctgcacaccaagctctaccaggaggtggagatcgccagtgtggacgcctttcagggacgcgagaaggacttcatcatcctgtcctgtgtgcgggccaacgagcaccaaggcattggctttttaaatgaccccaggcgtctgaacgtggccctgaccagagcaaggtatggcgtcatcattgtgggcaacccgaaggcactatcaaagcagccgctctggaaccacctgctgaactactataaggagcagaaggtgctggtggaggggccgctcaacaacctgcgtgagagcctcatgcagttcagcaagccacggaagctggtcaacactatcaacccgggagcccgcttcatgaccacagccatgtatgatgcccgggaggccatcatcccaggctccgtctatgatcggagcagccagggccggccttccagcatgtacttccagacccatgaccagattggcatgatcagtgccggccctagccacgtggctgccatgaacattcccatccccttcaacctggtcatgccacccatgccaccgcctggctattttggacaagccaacgggcctgctgcagggcgaggcaccccgaaaggcaagactggtcgtgggggacgccagaagaaccgctttgggcttcctggacccagccagactaacctccccaacagccaagccagccaggatgtggcgtcacagcccttctctcagggcgccctgacgcagggctacatctccatgagccagccttcccagatgagccagcccggcctctcccagccggagctgtcccaggacagttaccttggtgacgagtttaaatcacaaatcgacgtggcgctctcacaggactccacgtaccagggagagcgggcttaccagcatggcggggtgacggggctgtcccagtattaaaaggtggcggcggaagagctaagcaacgtggcttagtccatcagcatcttattctgggtaataaaaaataaaaataaacggatacctgttttccactgctaaaactgaagcaccactgtgtgagcaacaggaagggagagcgcacgagggagaggagccgaggccgagcgccccctgctggcccgcggcggcgaggagcagagggagcggaggaggggccggcccgcgggagccgcggccaccaggaggccccgctccgtcccatcggggctgcggccagggcggagggaggaagaccctcatctcagagtagccctttcctctgttcttttatttctttttctctttgattgaaaggggactacgtcttagcaggaaaaaaaacttcgcatttctgtgcccgagcaggctccttgcaaagacagcagcgtgcggggcagagccccgggagggcgcgtctgtccacgcctaccggacgcgccgaggtcgcgctgcctgtgttctccgagggccttcatttaaagaaaataagggtgttttgggtttttctctttgtttttttcaagattcttttaaaggagtactgaagaatactttcctaagtttgtctctaaaatcttagcggtggacctgggagatttgagaagcttccagaaacagtttaaacaagccagcgctactggagaagaggagcaacacctgtgccgcggccggaggagttttgttgttggttttagcttccagtggcttctttctgcggggcatcaggctgctggggtagccgcccgccgagcctggaagctgctcgttctccgctggactcagaagccaagctgcttcccgcctagactcggcgcagggccccgcaccggtgaggaaggtgcttttggccccattgcgaggggccttggccaggactggccctgtggccaggaggcgagaaggtggctgttcccggattgacggctttttcccgggggcctttggaagatttggtggaaggacaagagggcctgtccctgtccccgtccccaggaggtaccgacagtccctgtgctggttagacacggagcgctgcacaccgaaagcccaaattgggagctctgcctgccggcaactttgctgatggggtgattgctgcttctggggggtaaggaaacaagttacagaaattaccgcgttctgtgtgaagggactgagggtgtggtgtcattggcagagggtcattttaggagagctgccccagcccctcgaacgcctggcttggggtgtcattctgcctggcggccaggcctccagcttcccctgccccgggcctggggctgtcactggccctgatccgaacacctccagattccggcttctacatgggacagacggggacgcacaggccaccttccttctggcagggactcttatttattcccattgctctagggctttcggtttccccttcttccggtaggccgcgtagaggcatgcaccgggtaggtttccgcggtgaccccgcggcggcctgagggacgctccctgccccatcccggctgttgggctgggccgctttgcctctgcttcgccctgtgctgtgttctccagctttgtagcagcagccttgacaaacccaggcgcactgtaccaaggcaatgtaacttttgattttcggtcaatttaagttcttttgtcaccaaatattaataaacagttttgacttca

SEQ ID NO: 426471 - DNA, 5347 bp, Homo sapiens
gcacggcgacggcggcggtggcggcagttcctgctctaggctgcgagcggctggcggcttcgaggggagctgaggcgcggaggggctcggcggcagcggcggcggctcggcactgttacctctcggtccggctggcgccggggcgggcggtttggtcctttccgggcgcgcgggggcgacagcggcagcgacccgaggcctgcggcctaggcctcagcgcggcggcgggctcgagtgcagcgcggaaccggcccgagggccctacccggaggcaccatgagcgtggaggcgtacgggcccagctcgcagactctcactttcctggacacggaggaggccgagctgcttggcgccgacacacagggctccgagttcgagttcaccgactttactcttcctagccagacgcagacgccccccggcggccccggcggcccgggcggtggcggcgcgggaggcccgggcggcgcgggcgcgggcgctgcggcgggacagctcgacgcgcaggttgggcccgaaggcatcctgcagaacggggctgtggacgacagtgtagccaagaccagccagttgttggctgagttgaacttcgaggaagatgaagaagacacctattacacgaaggacctccccatacacgcctgcagttactgtggaatacacgatcctgcctgcgtggtttactgtaataccagcaagaagtggttctgcaacggacgtggaaatacttctggcagccacattgtaaatcaccttgtgagggcaaaatgcaaagaggtgaccctgcacaaggacgggcccctgggggagacagtcctggagtgctacaactgcggctgtcgcaacgtcttcctcctcggcttcatcccggccaaagctgactcagtggtggtgctgctgtgcaggcagccctgtgccagccagagcagcctcaaggacatcaactgggacagctcgcagtggcagccgctgatccaggaccgctgcttcctgtcctggctggtcaagatcccctccgagcaggagcagctgcgggcacgccagatcacggcacagcagatcaacaagctggaggagctgtggaaggaaaacccttctgccacgctggaggacctggagaagccgggggtggacgaggagccgcagcatgtcctcctgcggtacgaggacgcctaccagtaccagaacatattcgggcccctggtcaagctggaggccgactacgacaagaagctgaaggagtcccagactcaagataacatcactgtcaggtgggacctgggccttaacaagaagagaatcgcctacttcactttgcccaagactgactctgacatgcggctcatgcagggggatgagatatgcctgcggtacaaaggggaccttgcgcccctgtggaaagggatcggccacgtcatcaaggtccctgataattatggcgatgagatcgccattgagctgcggagcagcgtgggtgcacctgtggaggtgactcacaacttccaggtggattttgtgtggaagtcgacctcctttgacaggatgcagagcgcattgaaaacgtttgccgtggatgagacctcggtgtctggctacatctaccacaagctgttgggccacgaggtggaggacgtaatcatcaagtgccagctgcccaagcgcttcacggcgcagggcctccccgacctcaaccactcccaggtttatgccgtgaagactgtgctgcaaagaccactgagcctgatccagggcccgccaggcacggggaagacggtgacgtcggccaccatcgtctaccacctggcccggcaaggcaacgggccggtgctggtgtgtgctccgagcaacatcgccgtggaccagctaacggagaagatccaccagacggggctaaaggtcgtgcgcctctgcgccaagagccgtgaggccatcgactccccggtgtcttttctggccctgcacaaccagatcaggaacatggacagcatgcctgagctgcagaagctgcagcagctgaaagacgagactggggagctgtcgtctgccgacgagaagcggtaccgggccttgaagcgcaccgcagagagagagctgctgatgaacgcagatgtcatctgctgcacatgtgtgggcgccggtgacccgaggctggccaagatgcagttccgctccattttaatcgacgaaagcacccaggccaccgagccggagtgcatggttcccgtggtcctcggggccaagcagctgatccttgtaggcgaccactgccagctgggcccagtggtgatgtgcaagaaggcggccaaggccgggctgtcacagtcgctcttcgagcgcctggtggtgctgggcatccggcccatccgcctgcaggtccagtaccggatgcaccctgcactcagcgccttcccatccaacatcttctacgagggctccctccagaatggtgtcactgcagcggatcgtgtgaagaagggatttgacttccagtggccccaacccgataaaccgatgttcttctacgtgacccagggccaagaggagattgccagctcgggcacctcctacctgaacaggaccgaggctgcgaacgtggagaagatcaccacgaagttgctgaaggcaggcgccaagccggaccagattggcatcatcacgccctacgagggccagcgctcctacctggtgcagtacatgcagttcagcggctccctgcacaccaagctctaccaggaggtggagatcgccagtgtggacgcctttcagggacgcgagaaggacttcatcatcctgtcctgtgtgcgggccaacgagcaccaaggcattggctttttaaatgaccccaggcgtctgaacgtggccctgaccagagcaaggtatggcgtcatcattgtgggcaacccgaaggcactatcaaagcagccgctctggaaccacctgctgaactactataaggagcagaaggtgctggtggaggggccgctcaacaacctgcgtgagagcctcatgcagttcagcaagccacggaagctggtcaacactatcaacccgggagcccgcttcatgaccacagccatgtatgatgcccgggaggccatcatcccaggctccgtctatgatcggagcagccagggccggccttccagcatgtacttccagacccatgaccagattggcatgatcagtgccggccctagccacgtggctgccatgaacattcccatccccttcaacctggtcatgccacccatgccaccgcctggctattttggacaagccaacgggcctgctgcagggcgaggcaccccgaaaggcaagactggtcgtgggggacgccagaagaaccgctttgggcttcctggacccagccagactaacctccccaacagccaagccagccaggatgtggcgtcacagcccttctctcagggcgccctgacgcagggctacatctccatgagccagccttcccagatgagccagcccggcctctcccagccggagctgtcccaggacagttaccttggtgacgagtttaaatcacaaatcgacgtggcgctctcacaggactccacgtaccagggagagcgggcttaccagcatggcggggtgacggggctgtcccagtattaaaaggtggcggcggaagagctaagcaacgtggcttagtccatcagcatcttattctgggtaataaaaaataaaaataaacggatacctgttttccactgctaaaactgaagcaccactgtgtgagcaacaggaagggagagcgcacgagggagaggagccgaggccgagcgccccctgctggcccgcggcggcgaggagcagagggagcggaggaggggccggcccgcgggagccgcggccaccaggaggccccgctccgtcccatcggggctgcggccagggcggagggaggaagaccctcatctcagagtagccctttcctctgttcttttatttctttttctctttgattgaaaggggactacgtcttagcaggaaaaaaaacttcgcatttctgtgcccgagcaggctccttgcaaagacagcagcgtgcggggcagagccccgggagggcgcgtctgtccacgcctaccggacgcgccgaggtcgcgctgcctgtgttctccgagggccttcatttaaagaaaataagggtgttttgggtttttctctttgtttttttcaagattcttttaaaggagtactgaagaatactttcctaagtttgtctctaaaatcttagcggtggacctgggagatttgagaagcttccagaaacagtttaaacaagccagcgctactggagaagaggagcaacacctgtgccgcggccggaggagttttgttgttggttttagcttccagtggcttctttctgcggggcatcaggctgctggggtagccgcccgccgagcctggaagctgctcgttctccgctggactcagaagccaagctgcttcccgcctagactcggcgcagggccccgcaccggtgaggaaggtgcttttggccccattgcgaggggccttggccaggactggccctgtggccaggaggcgagaaggtggctgttcccggattgacggctttttcccgggggcctttggaagatttggtggaaggacaagagggcctgtccctgtccccgtccccaggaggtaccgacagtccctgtgctggttagacacggagcgctgcacaccgaaagcccaaattgggagctctgcctgccggcaactttgctgatggggtgattgctgcttctggggggtaaggaaacaagttacagaaattaccgcgttctgtgtgaagggactgagggtgtggtgtcattggcagagggtcattttaggagagctgccccagcccctcgaacgcctggcttggggtgtcattctgcctggcggccaggcctccagcttcccctgccccgggcctggggctgtcactggccctgatccgaacacctccagattccggcttctacatgggacagacggggacgcacaggccaccttccttctggcagggactcttatttattcccattgctctagggctttcggtttccccttcttccggtaggccgcgtagaggcatgcaccgggtaggtttccgcggtgaccccgcggcggcctgagggacgctccctgccccatcccggctgttgggctgggccgctttgcctctgcttcgccctgtgctgtgttctccagctttgtagcagcagccttgacaaacccaggcgcactgtaccaaggcaatgtaacttttgattttaatatttggtgacaaaagaacttaaattgaccgaaaatcaaaagttagtcgacc

SEQ ID NO: 426472 - DNA, 5545 bp, Homo sapiens
gcacggcgacggcggcggtggcggcagttcctgctctaggctgcgagcggctggcggcttcgaggggagctgaggcgcggaggggctcggcggcagcggcggcggctcggcactgttacctctcggtccggctggcgccggggcgggcggtttggtcctttccgggcgcgcgggggcgacagcggcagcgacccgaggcctgcggcctaggcctcagcgcggcggcgggctcgagtgcagcgcggaaccggcccgagggccctacccggaggcaccatgagcgtggaggcgtacgggcccagctcgcagactctcactttcctggacacggaggaggccgagctgcttggcgccgacacacagggctccgagttcgagttcaccgactttactcttcctagccagacgcagacgccccccggcggccccggcggcccgggcggtggcggcgcgggaggcccgggcggcgcgggcgcgggcgctgcggcgggacagctcgacgcgcaggttgggcccgaaggcatcctgcagaacggggctgtggacgacagtgtagccaagaccagccagttgttggctgagttgaacttcgaggaagatgaagaagacacctattacacgaaggacctccccatacacgcctgcagttactgtggaatacacgatcctgcctgcgtggtttactgtaataccagcaagaagtggttctgcaacggacgtggaaatacttctggcagccacattgtaaatcaccttgtgagggcaaaatgcaaagaggtgaccctgcacaaggacgggcccctgggggagacagtcctggagtgctacaactgcggctgtcgcaacgtcttcctcctcggcttcatcccggccaaagctgactcagtggtggtgctgctgtgcaggcagccctgtgccagccagagcagcctcaaggacatcaactgggacagctcgcagtggcagccgctgatccaggaccgctgcttcctgtcctggctggtcaagatcccctccgagcaggagcagctgcgggcacgccagatcacggcacagcagatcaacaagctggaggagctgtggaaggaaaacccttctgccacgctggaggacctggagaagccgggggtggacgaggagccgcagcatgtcctcctgcggtacgaggacgcctaccagtaccagaacatattcgggcccctggtcaagctggaggccgactacgacaagaagctgaaggagtcccagactcaagataacatcactgtcaggtgggacctgggccttaacaagaagagaatcgcctacttcactttgcccaagactgactctgacatgcggctcatgcagggggatgagatatgcctgcggtacaaaggggaccttgcgcccctgtggaaagggatcggccacgtcatcaaggtccctgataattatggcgatgagatcgccattgagctgcggagcagcgtgggtgcacctgtggaggtgactcacaacttccaggtggattttgtgtggaagtcgacctcctttgacaggatgcagagcgcattgaaaacgtttgccgtggatgagacctcggtgtctggctacatctaccacaagctgttgggccacgaggtggaggacgtaatcatcaagtgccagctgcccaagcgcttcacggcgcagggcctccccgacctcaaccactcccaggtttatgccgtgaagactgtgctgcaaagaccactgagcctgatccagggcccgccaggcacggggaagacggtgacgtcggccaccatcgtctaccacctggcccggcaaggcaacgggccggtgctggtgtgtgctccgagcaacatcgccgtggaccagctaacggagaagatccaccagacggggctaaaggtcgtgcgcctctgcgccaagagccgtgaggccatcgactccccggtgtcttttctggccctgcacaaccagatcaggaacatggacagcatgcctgagctgcagaagctgcagcagctgaaagacgagactggggagctgtcgtctgccgacgagaagcggtaccgggccttgaagcgcaccgcagagagagagctgctgatgaacgcagatgtcatctgctgcacatgtgtgggcgccggtgacccgaggctggccaagatgcagttccgctccattttaatcgacgaaagcacccaggccaccgagccggagtgcatggttcccgtggtcctcggggccaagcagctgatccttgtaggcgaccactgccagctgggcccagtggtgatgtgcaagaaggcggccaaggccgggctgtcacagtcgctcttcgagcgcctggtggtgctgggcatccggcccatccgcctgcaggtccagtaccggatgcaccctgcactcagcgccttcccatccaacatcttctacgagggctccctccagaatggtgtcactgcagcggatcgtgtgaagaagggatttgacttccagtggccccaacccgataaaccgatgttcttctacgtgacccagggccaagaggagattgccagctcgggcacctcctacctgaacagatacttgctaatcccacatggcagccgtttctgcccctcgagactcccctggtgaaggctggggaagctcagctgtgcaaacgccagtgatggcagctgccttcccgcagggtgttgtgtctgcacccctcacggcctccagcctcagggctcgggatcccacaggtggagcccagcactgacagcctgggtttcttaggaccgaggctgcgaacgtggagaagatcaccacgaagttgctgaaggcaggcgccaagccggaccagattggcatcatcacgccctacgagggccagcgctcctacctggtgcagtacatgcagttcagcggctccctgcacaccaagctctaccaggaggtggagatcgccagtgtggacgcctttcagggacgcgagaaggacttcatcatcctgtcctgtgtgcgggccaacgagcaccaaggcattggctttttaaatgaccccaggcgtctgaacgtggccctgaccagagcaaggtatggcgtcatcattgtgggcaacccgaaggcactatcaaagcagccgctctggaaccacctgctgaactactataaggagcagaaggtgctggtggaggggccgctcaacaacctgcgtgagagcctcatgcagttcagcaagccacggaagctggtcaacactatcaacccgggagcccgcttcatgaccacagccatgtatgatgcccgggaggccatcatcccaggctccgtctatgatcggagcagccagggccggccttccagcatgtacttccagacccatgaccagattggcatgatcagtgccggccctagccacgtggctgccatgaacattcccatccccttcaacctggtcatgccacccatgccaccgcctggctattttggacaagccaacgggcctgctgcagggcgaggcaccccgaaaggcaagactggtcgtgggggacgccagaagaaccgctttgggcttcctggacccagccagactaacctccccaacagccaagccagccaggatgtggcgtcacagcccttctctcagggcgccctgacgcagggctacatctccatgagccagccttcccagatgagccagcccggcctctcccagccggagctgtcccaggacagttaccttggtgacgagtttaaatcacaaatcgacgtggcgctctcacaggactccacgtaccagggagagcgggcttaccagcatggcggggtgacggggctgtcccagtattaaaaggtggcggcggaagagctaagcaacgtggcttagtccatcagcatcttattctgggtaataaaaaataaaaataaacggatacctgttttccactgctaaaactgaagcaccactgtgtgagcaacaggaagggagagcgcacgagggagaggagccgaggccgagcgccccctgctggcccgcggcggcgaggagcagagggagcggaggaggggccggcccgcgggagccgcggccaccaggaggccccgctccgtcccatcggggctgcggccagggcggagggaggaagaccctcatctcagagtagccctttcctctgttcttttatttctttttctctttgattgaaaggggactacgtcttagcaggaaaaaaaacttcgcatttctgtgcccgagcaggctccttgcaaagacagcagcgtgcggggcagagccccgggagggcgcgtctgtccacgcctaccggacgcgccgaggtcgcgctgcctgtgttctccgagggccttcatttaaagaaaataagggtgttttgggtttttctctttgtttttttcaagattcttttaaaggagtactgaagaatactttcctaagtttgtctctaaaatcttagcggtggacctgggagatttgagaagcttccagaaacagtttaaacaagccagcgctactggagaagaggagcaacacctgtgccgcggccggaggagttttgttgttggttttagcttccagtggcttctttctgcggggcatcaggctgctggggtagccgcccgccgagcctggaagctgctcgttctccgctggactcagaagccaagctgcttcccgcctagactcggcgcagggccccgcaccggtgaggaaggtgcttttggccccattgcgaggggccttggccaggactggccctgtggccaggaggcgagaaggtggctgttcccggattgacggctttttcccgggggcctttggaagatttggtggaaggacaagagggcctgtccctgtccccgtccccaggaggtaccgacagtccctgtgctggttagacacggagcgctgcacaccgaaagcccaaattgggagctctgcctgccggcaactttgctgatggggtgattgctgcttctggggggtaaggaaacaagttacagaaattaccgcgttctgtgtgaagggactgagggtgtggtgtcattggcagagggtcattttaggagagctgccccagcccctcgaacgcctggcttggggtgtcattctgcctggcggccaggcctccagcttcccctgccccgggcctggggctgtcactggccctgatccgaacacctccagattccggcttctacatgggacagacggggacgcacaggccaccttccttctggcagggactcttatttattcccattgctctagggctttcggtttccccttcttccggtaggccgcgtagaggcatgcaccgggtaggtttccgcggtgaccccgcggcggcctgagggacgctccctgccccatcccggctgttgggctgggccgctttgcctctgcttcgccctgtgctgtgttctccagctttgtagcagcagccttgacaaacccaggcgcactgtaccaaggcaatgtaacttttgattttcggtcaatttaagttcttttgtcaccaaatattaataaacagttttgacttca

SEQ ID NO: 426473 - DNA, 3595 bp, Homo sapiens
ggcagtggatctagaacactcctgctctttcataaccaaccagcctgaactggaatcagcctgagtgcaggttccagcagctcagcactgccccttggaggctgtcgtgaggcgcagagctcttggtgtggagaggttgccttctgtgaaacatgaccgtttaaggatcttaaaagtttgtaatcaccacagcctggaccatgtatcttgtctgggagggacagcttgttttttatagtgtcagggagggtgagaaacaggagagcttctgtgttctgtcccacctgccctccggggtctggtggcgtttacagtgcaggtgccctgatgcctctgcacccttccccagaacgcagatgtcatctgctgcacatgtgtgggcgccggtgacccgaggctggccaagatgcagttccgctccattttaatcgacgaaagcacccaggccaccgagccggagtgcatggttcccgtggtcctcggggccaagcagctgatccttgtaggcgaccactgccagctgggcccagtggtgatgtgcaagaaggcggccaaggccgggctgtcacagtcgctcttcgagcgcctggtggtgctgggcatccggcccatccgcctgcaggtccagtaccggatgcaccctgcactcagcgccttcccatccaacatcttctacgagggctccctccagaatggtgtcactgcagcggatcgtgtgaagaagggatttgacttccagtggccccaacccgataaaccgatgttcttctacgtgacccagggccaagaggagattgccagctcgggcacctcctacctgaacaggaccgaggctgcgaacgtggagaagatcaccacgaagttgctgaaggcaggcgccaagccggaccagattggcatcatcacgccctacgagggccagcgctcctacctggtgcagtacatgcagttcagcggctccctgcacaccaagctctaccaggaggtggagatcgccagtgtggacgcctttcagggacgcgagaaggacttcatcatcctgtcctgtgtgcgggccaacgagcaccaaggcattggctttttaaatgaccccaggcgtctgaacgtggccctgaccagagcaaggtatggcgtcatcattgtgggcaacccgaaggcactatcaaagcagccgctctggaaccacctgctgaactactataaggagcagaaggtgctggtggaggggccgctcaacaacctgcgtgagagcctcatgcagttcagcaagccacggaagctggtcaacactatcaacccgggagcccgcttcatgaccacagccatgtatgatgcccgggaggccatcatcccaggctccgtctatgatcggagcagccagggccggccttccagcatgtacttccagacccatgaccagattggcatgatcagtgccggccctagccacgtggctgccatgaacattcccatccccttcaacctggtcatgccacccatgccaccgcctggctattttggacaagccaacgggcctgctgcagggcgaggcaccccgaaaggcaagactggtcgtgggggacgccagaagaaccgctttgggcttcctggacccagccagactaacctccccaacagccaagccagccaggatgtggcgtcacagcccttctctcagggcgccctgacgcagggctacatctccatgagccagccttcccagatgagccagcccggcctctcccagccggagctgtcccaggacagttaccttggtgacgagtttaaatcacaaatcgacgtggcgctctcacaggactccacgtaccagggagagcgggcttaccagcatggcggggtgacggggctgtcccagtattaaaaggtggcggcggaagagctaagcaacgtggcttagtccatcagcatcttattctgggtaataaaaaataaaaataaacggatacctgttttccactgctaaaactgaagcaccactgtgtgagcaacaggaagggagagcgcacgagggagaggagccgaggccgagcgccccctgctggcccgcggcggcgaggagcagagggagcggaggaggggccggcccgcgggagccgcggccaccaggaggccccgctccgtcccatcggggctgcggccagggcggagggaggaagaccctcatctcagagtagccctttcctctgttcttttatttctttttctctttgattgaaaggggactacgtcttagcaggaaaaaaaacttcgcatttctgtgcccgagcaggctccttgcaaagacagcagcgtgcggggcagagccccgggagggcgcgtctgtccacgcctaccggacgcgccgaggtcgcgctgcctgtgttctccgagggccttcatttaaagaaaataagggtgttttgggtttttctctttgtttttttcaagattcttttaaaggagtactgaagaatactttcctaagtttgtctctaaaatcttagcggtggacctgggagatttgagaagcttccagaaacagtttaaacaagccagcgctactggagaagaggagcaacacctgtgccgcggccggaggagttttgttgttggttttagcttccagtggcttctttctgcggggcatcaggctgctggggtagccgcccgccgagcctggaagctgctcgttctccgctggactcagaagccaagctgcttcccgcctagactcggcgcagggccccgcaccggtgaggaaggtgcttttggccccattgcgaggggccttggccaggactggccctgtggccaggaggcgagaaggtggctgttcccggattgacggctttttcccgggggcctttggaagatttggtggaaggacaagagggcctgtccctgtccccgtccccaggaggtaccgacagtccctgtgctggttagacacggagcgctgcacaccgaaagcccaaattgggagctctgcctgccggcaactttgctgatggggtgattgctgcttctggggggtaaggaaacaagttacagaaattaccgcgttctgtgtgaagggactgagggtgtggtgtcattggcagagggtcattttaggagagctgccccagcccctcgaacgcctggcttggggtgtcattctgcctggcggccaggcctccagcttcccctgccccgggcctggggctgtcactggccctgatccgaacacctccagattccggcttctacatgggacagacggggacgcacaggccaccttccttctggcagggactcttatttattcccattgctctagggctttcggtttccccttcttccggtaggccgcgtagaggcatgcaccgggtaggtttccgcggtgaccccgcggcggcctgagggacgctccctgccccatcccggctgttgggctgggccgctttgcctctgcttcgccctgtgctgtgttctccagctttgtagcagcagccttgacaaacccaggcgcactgtaccaaggcaatgtaacttttgattttcggtcaatttaagttcttttgtcaccaaatattaataaacagttttgacttca

SEQ ID NO: 426474 - DNA, 3526 bp, Homo sapiens
ggcagtggatctagaacactcctgctctttcataaccaaccagcctgaactggaatcagcctgagtgcaggttccagcagctcagcactgccccttggaggctgtcgtgaggcgcagagctcttggtgtggagaggttgccttctgtgaaacatgaccgtttaaggatcttaaaagtttgtaatcaccacagcctggaccatgtatcttgtctgggagggacagcttgttttttatagtgtcagggagggtgagaaacaggagagcttctgtgttctgtcccacctgccctccggggtctggtggcgtttacagtgcaggtgccctgatgcctctgcacccttccccagaacgcagatgtcatctgctgcacatgtgtgggcgccggtgacccgaggctggccaagatgcagttccgctccattttaatcgacgaaagcacccaggccaccgagccggagtgcatggttcccgtggtcctcggggccaagcagctgatccttgtaggcgaccactgccagctgggcccagtggtgatgtgcaagaaggcggccaaggccgggctgtcacagtcgctcttcgagcgcctggtggtgctgggcatccggcccatccgcctgcaggtccagtaccggatgcaccctgcactcagcgccttcccatccaacatcttctacgagggctccctccagaatggtgtcactgcagcggatcgtgtgaagaagggatttgacttccagtggccccaacccgataaaccgatgttcttctacgtgacccagggccaagaggagattgccagctcgggcacctcctacctgaacaggaccgaggctgcgaacgtggagaagatcaccacgaagttgctgaagtacatgcagttcagcggctccctgcacaccaagctctaccaggaggtggagatcgccagtgtggacgcctttcagggacgcgagaaggacttcatcatcctgtcctgtgtgcgggccaacgagcaccaaggcattggctttttaaatgaccccaggcgtctgaacgtggccctgaccagagcaaggtatggcgtcatcattgtgggcaacccgaaggcactatcaaagcagccgctctggaaccacctgctgaactactataaggagcagaaggtgctggtggaggggccgctcaacaacctgcgtgagagcctcatgcagttcagcaagccacggaagctggtcaacactatcaacccgggagcccgcttcatgaccacagccatgtatgatgcccgggaggccatcatcccaggctccgtctatgatcggagcagccagggccggccttccagcatgtacttccagacccatgaccagattggcatgatcagtgccggccctagccacgtggctgccatgaacattcccatccccttcaacctggtcatgccacccatgccaccgcctggctattttggacaagccaacgggcctgctgcagggcgaggcaccccgaaaggcaagactggtcgtgggggacgccagaagaaccgctttgggcttcctggacccagccagactaacctccccaacagccaagccagccaggatgtggcgtcacagcccttctctcagggcgccctgacgcagggctacatctccatgagccagccttcccagatgagccagcccggcctctcccagccggagctgtcccaggacagttaccttggtgacgagtttaaatcacaaatcgacgtggcgctctcacaggactccacgtaccagggagagcgggcttaccagcatggcggggtgacggggctgtcccagtattaaaaggtggcggcggaagagctaagcaacgtggcttagtccatcagcatcttattctgggtaataaaaaataaaaataaacggatacctgttttccactgctaaaactgaagcaccactgtgtgagcaacaggaagggagagcgcacgagggagaggagccgaggccgagcgccccctgctggcccgcggcggcgaggagcagagggagcggaggaggggccggcccgcgggagccgcggccaccaggaggccccgctccgtcccatcggggctgcggccagggcggagggaggaagaccctcatctcagagtagccctttcctctgttcttttatttctttttctctttgattgaaaggggactacgtcttagcaggaaaaaaaacttcgcatttctgtgcccgagcaggctccttgcaaagacagcagcgtgcggggcagagccccgggagggcgcgtctgtccacgcctaccggacgcgccgaggtcgcgctgcctgtgttctccgagggccttcatttaaagaaaataagggtgttttgggtttttctctttgtttttttcaagattcttttaaaggagtactgaagaatactttcctaagtttgtctctaaaatcttagcggtggacctgggagatttgagaagcttccagaaacagtttaaacaagccagcgctactggagaagaggagcaacacctgtgccgcggccggaggagttttgttgttggttttagcttccagtggcttctttctgcggggcatcaggctgctggggtagccgcccgccgagcctggaagctgctcgttctccgctggactcagaagccaagctgcttcccgcctagactcggcgcagggccccgcaccggtgaggaaggtgcttttggccccattgcgaggggccttggccaggactggccctgtggccaggaggcgagaaggtggctgttcccggattgacggctttttcccgggggcctttggaagatttggtggaaggacaagagggcctgtccctgtccccgtccccaggaggtaccgacagtccctgtgctggttagacacggagcgctgcacaccgaaagcccaaattgggagctctgcctgccggcaactttgctgatggggtgattgctgcttctggggggtaaggaaacaagttacagaaattaccgcgttctgtgtgaagggactgagggtgtggtgtcattggcagagggtcattttaggagagctgccccagcccctcgaacgcctggcttggggtgtcattctgcctggcggccaggcctccagcttcccctgccccgggcctggggctgtcactggccctgatccgaacacctccagattccggcttctacatgggacagacggggacgcacaggccaccttccttctggcagggactcttatttattcccattgctctagggctttcggtttccccttcttccggtaggccgcgtagaggcatgcaccgggtaggtttccgcggtgaccccgcggcggcctgagggacgctccctgccccatcccggctgttgggctgggccgctttgcctctgcttcgccctgtgctgtgttctccagctttgtagcagcagccttgacaaacccaggcgcactgtaccaaggcaatgtaacttttgattttcggtcaatttaagttcttttgtcaccaaatattaataaacagttttgacttca

SEQ ID NO: 426475 - DNA, 5177 bp, Homo sapiens
gcacggcgacggcggcggtggcggcagttcctgctctaggctgcgagcggctggcggcttcgaggggagctgaggcgcggaggggctcggcggcagcggcggcggctcggcactgttacctctcggtccggctggcgccggggcgggcggtttggtcctttccgggcgcgcgggggcgacagcggcagcgacccgaggcctgcggcctaggcctcagcgcggcggcgggctcgagtgcagcgcggaaccggcccgagggccctacccggaggcaccatgagcgtggaggcgtacgggcccagctcgcagactctcactttcctggacacggaggaggccgagctgcttggcgccgacacacagggctccgagttcgagttcaccgactttactcttcctagccagacgcagacgccccccggcggccccggcggcccgggcggtggcggcgcgggaggcccgggcggcgcgggcgcgggcgctgcggcgggacagctcgacgcgcaggttgggcccgaaggcatcctgcagaacggggctgtggacgacagtgtagccaagaccagccagttgttggctgagttgaacttcgaggaagatgaagaagacacctattacacgaaggacctccccatacacgcctgcagttactgtggaatacacgatcctgcctgcgtggtttactgtaataccagcaagaagtggttctgcaacggacgtggaaatacttctggcagccacattgtaaatcaccttgtgagggcaaaatgcaaagaggtgaccctgcacaaggacgggcccctgggggagacagtcctggagtgctacaactgcggctgtcgcaacgtcttcctcctcggcttcatcccggccaaagctgactcagtggtggtgctgctgtgcaggcagccctgtgccagccagagcagcctcaaggacatcaactgggacagctcgcagtggcagccgctgatccaggaccgctgcttcctgtcctggctggtcaagatcccctccgagcaggagcagctgcgggcacgccagatcacggcacagcagatcaacaagctggaggagctgtggaaggaaaacccttctgccacgctggaggacctggagaagccgggggtggacgaggagccgcagcatgtcctcctgcggtacgaggacgcctaccagtaccagaacatattcgggcccctggtcaagctggaggccgactacgacaagaagctgaaggagtcccagactcaagataacatcactgtcaggtgggacctgggccttaacaagaagagaatcgcctacttcactttgcccaagactgactctgacatgcggctcatgcagggggatgagatatgcctgcggtacaaaggggaccttgcgcccctgtggaaagggatcggccacgtcatcaaggtccctgataattatggcgatgagatcgccattgagctgcggagcagcgtgggtgcacctgtggaggtgactcacaacttccaggtggattttgtgtggaagtcgacctcctttgacaggatgcagagcgcattgaaaacgtttgccgtggatgagacctcggtgtctggctacatctaccacaagctgttgggccacgaggtggaggacgtaatcatcaagtgccagctgcccaagcgcttcacggcgcagggcctccccgacctcaaccactcccaggtttatgccgtgaagactgtgctgcaaagaccactgagcctgatccagggcccgccaggcacggggaagacggtgacgtcggccaccatcgtctaccacctggcccggcaaggcaacgggccggtgctggtgtgtgctccgagcaacatcgccgtggaccagctaacggagaagatccaccagacggggctaaaggtcgtgcgcctctgcgccaagagccgtgaggccatcgactccccggtgtcttttctggccctgcacaaccagatcaggaacatggacagcatgcctgagctgcagaagctgcagcagctgaaagacgagactggggagctgtcgtctgccgacgagaagcggtaccgggccttgaagcgcaccgcagagagagagctgctgatgaacgcagatgtcatctgctgcacatgtgtgggcgccggtgacccgaggctggccaagatgcagttccgctccattttaatcgacgaaagcacccaggccaccgagccggagtgcatggttcccgtggtcctcggggccaagcagctgatccttgtaggcgaccactgccagctgggcccagtggtgatgtgcaagaaggcggccaaggccgggctgtcacagtcgctcttcgagcgcctggtggtgctgggcatccggcccatccgcctgcaggtccagtaccggatgcaccctgcactcagcgccttcccatccaacatcttctacgagggctccctccagaatggtgtcactgcagcggatcgtgtgaagaagggatttgacttccagtggccccaacccgataaaccgatgttcttctacgtgacccagggccaagaggagattgccagctcgggcacctcctacctgaacaggaccgaggctgcgaacgtggagaagatcaccacgaagttgctgaaggcaggcgccaagccggaccagattggcatcatcacgccctacgagggccagcgctcctacctggtgcagtacatgcagttcagcggctccctgcacaccaagctctaccaggaggtggagatcgccagtgtggacgcctttcagggacgcgagaaggacttcatcatcctgtcctgtgtgcgggccaacgagcaccaaggcattggctttttaaatgaccccaggcgtctgaacgtggccctgaccagagcaaggtatggcgtcatcattgtgggcaacccgaaggcactatcaaagcagccgctctggaaccacctgctgaactactataaggagcagaaggtgctggtggaggggccgctcaacaacctgcgtgagagcctcatgcagttcagcaagccacggaagctggtcaacactatcaacccgggagcccgcttcatgaccacagccatgtatgatgcccgggaggccatcatcccaggctccgtctatgatcggagcagccagggccggccttccagcatgtacttccagacccatgaccagattggcatgatcagtgccggccctagccacgtggctgccatgaacattcccatccccttcaacctggtcatgccacccatgccaccgcctggctattttggacaagccaacgggcctgctgcagggcgaggcaccccgaaaggcaagactggtcgtgggggacgccagaagaaccgctttgggcttcctggacccagccagactaacctccccaacagccaagccagccaggatgtggcgtcacagcccttctctcagggcgccctgacgcagggctacatctccatgagccagccttcccagatgagccagcccggcctctcccagccggagctgtcccaggacagttaccttggtgacgagtttaaatcacaaatcgacgtggcgctctcacaggactccacgtaccagggagagcgggcttaccagcatggcggggtgacggggctgtcccagtattaaaaggtggcggcggaagagctaagcaacgtggcttagtccatcagcatcttattctgggtaataaaaaataaaaataaacggatacctgttttccactgctaaaactgaagcaccactgtgtgagcaacaggaagggagagcgcacgagggagaggagccgaggccgagcgccccctgctggcccgcggcggcgaggagcagagggagcggaggaggggccggcccgcgggagccgcggccaccaggaggccccgctccgtcccatcggggctgcggccagggcggagggaggaagaccctcatctcagagtagccctttcctctgttcttttatttctttttctctttgattgaaaggggactacgtcttagcaggaaaaaaaacttcgcatttctgtgcccgagcaggctccttgcaaagacagcagcgtgcggggcagagccccgggagggcgcgtctgtccacgcctaccggacgcgccgaggtcgcgctgcctgtgttctccgagggccttcatttaaagaaaataagggtgttttgggtttttctctttgtttttttcaagattcttttaaaggagtactgaagaatactttcctaagtttgtctctaaaatcttagcggtggacctgggagatttgagaagcttccagaaacagtttaaacaagccagcgctactggagaagaggagcaacacctgtgccgcggccggaggagttttgttgttggttttagcttccagtggcttctttctgcggggcatcaggctgctggggtagccgcccgccgagcctggaagctgctcgttctccgctggactcagaagccaagctgcttcccgcctagactcggcgcagggccccgcaccggtgaggaaggtgcttttggccccattgcgaggggccttggccaggactggccctgtggccaggaggcgagaaggtggctgttcccggattgacggctttttcccgggggcctttggaagatttggtggaaggacaagagggcctgtccctgtccccgtccccaggaggtaccgacagtccctgtgctggttagacacggagcgctgcacaccgaaagcccaaattgggagctctgcctgccggcaactttgctgatggggtgattgctgcttctggggggtaaggaaacaagttacagaaattaccgcgttctgtgtgaagggactgagggtgtggtgtcattggcagagggtcattttaggagagctgccccagcccctcgaacgcctggcttggggtgtcattctgcctggcggccaggcctccagcttcccctgcccgcaccgggtaggtttccgcggtgaccccgcggcggcctgagggacgctccctgccccatcccggctgttgggctgggccgctttgcctctgcttcgccctgtgctgtgttctccagctttgtagcagcagccttgacaaacccaggcgcactgtaccaaggcaatgtaacttttgattttcggtcaatttaagttcttttgtcaccaaatattaataaacagttttgacttca

SEQ ID NO: 426476 - DNA, 5012 bp, Homo sapiens
gcacggcgacggcggcggtggcggcagttcctgctctaggctgcgagcggctggcggcttcgaggggagctgaggcgcggaggggctcggcggcagcggcggcggctcggcactgttacctctcggtccggctggcgccggggcgggcggtttggtcctttccgggcgcgcgggggcgacagcggcagcgacccgaggcctgcggcctaggcctcagcgcggcggcgggctcgagtgcagcgcggaaccggcccgagggccctacccggaggcaccatgagcgtggaggcgtacgggcccagctcgcagactctcactttcctggacacggaggaggccgagctgcttggcgccgacacacagggctccgagttcgagttcaccgactttactcttcctagccagacgcagacgccccccggcggccccggcggcccgggcggtggcggcgcgggaggcccgggcggcgcgggcgcgggcgctgcggcgggacagctcgacgcgcaggttgggcccgaaggcatcctgcagaacggggctgtggacgacagtgtagccaagaccagccagttgttggctgagttgaacttcgaggaagatgaagaagacacctattacacgaaggacctccccatacacgcctgcagttactgtggaatacacgatcctgcctgcgtggtttactgtaataccagcaagaagtggttctgcaacggacgtggaaatacttctggcagccacattgtaaatcaccttgtgagggcaaaatgcaaagaggtgaccctgcacaaggacgggcccctgggggagacagtcctggagtgctacaactgcggctgtcgcaacgtcttcctcctcggcttcatcccggccaaagctgactcagtggtggtgctgctgtgcaggcagccctgtgccagccagagcagcctcaaggacatcaactgggacagctcgcagtggcagccgctgatccaggaccgctgcttcctgtcctggctggtcaagatcccctccgagcaggagcagctgcgggcacgccagatcacggcacagcagatcaacaagctggaggagctgtggaaggaaaacccttctgccacgctggaggacctggagaagccgggggtggacgaggagccgcagcatgtcctcctgcggtacgaggacgcctaccagtaccagaacatattcgggcccctggtcaagctggaggccgactacgacaagaagctgaaggagtcccagactcaagataacatcactgtcaggtgggacctgggccttaacaagaagagaatcgcctacttcactttgcccaagactgactctgacatgcggctcatgcagggggatgagatatgcctgcggtacaaaggggaccttgcgcccctgtggaaagggatcggccacgtcatcaaggtccctgataattatggcgatgagatcgccattgagctgcggagcagcgtgggtgcacctgtggaggtgactcacaacttccaggtggattttgtgtggaagtcgacctcctttgacaggatgcagagcgcattgaaaacgtttgccgtggatgagacctcggtgtctggctacatctaccacaagctgttgggccacgaggtggaggacgtaatcatcaagtgccagctgcccaagcgcttcacggcgcagggcctccccgacctcaaccactcccaggtttatgccgtgaagactgtgctgcaaagaccactgagcctgatccagggcccgccaggcacggggaagacggtgacgtcggccaccatcgtctaccacctggcccggcaaggcaacgggccggtgctggtgtgtgctccgagcaacatcgccgtggaccagctaacggagaagatccaccagacggggctaaaggtcgtgcgcctctgcgccaagagccgtgaggccatcgactccccggtgtcttttctggccctgcacaaccagatcaggaacatggacagcatgcctgagctgcagaagctgcagcagctgaaagacgagactggggagctgtcgtctgccgacgagaagcggtaccgggccttgaagcgcaccgcagagagagagctgctgatgaacgcagatgtcatctgctgcacatgtgtgggcgccggtgacccgaggctggccaagatgcagttccgctccattttaatcgacgaaagcacccaggccaccgagccggagtgcatggttcccgtggtcctcggggccaagcagctgatccttgtaggcgaccactgccagctgggcccagtggtgatgtgcaagaaggcggccaaggccgggctgtcacagtcgctcttcgagcgcctggtggtgctgggcatccggcccatccgcctgcaggtccagtaccggatgcaccctgcactcagcgccttcccatccaacatcttctacgagggctccctccagaatggtgtcactgcagcggatcgtgtgaagaagggatttgacttccagtggccccaacccgataaaccgatgttcttctacgtgacccagggccaagaggagattgccagctcgggcacctcctacctgaacaggaccgaggctgcgaacgtggagaagatcaccacgaagttgctgaaggcaggcgccaagccggaccagattggcatcatcacgccctacgagggccagcgctcctacctggtgcagtacatgcagttcagcggctccctgcacaccaagctctaccaggaggtggagatcgccagtgtggacgcctttcagggacgcgagaaggacttcatcatcctgtcctgtgtgcgggccaacgagcaccaaggcattggctttttaaatgaccccaggcgtctgaacgtggccctgaccagagcaaggtatggcgtcatcattgtgggcaacccgaaggcactatcaaagcagccgctctggaaccacctgctgaactactataaggagcagaaggtgctggtggaggggccgctcaacaacctgcgtgagagcctcatgcagttcagcaagccacggaagctggtcaacactatcaacccgggagcccgcttcatgaccacagccatgtatgatgcccgggaggccatcatcccaggctccgtctatgatcggagcagccagggccggccttccagcatgtacttccagacccatgaccagattggcatgatcagtgccggccctagccacgtggctgccatgaacattcccatccccttcaacctggtcatgccacccatgccaccgcctggctattttggacaagccaacgggcctgctgcagggcgaggcaccccgaaaggcaagactggtcgtgggggacgccagaagaaccgctttgggcttcctggacccagccagactaacctccccaacagccaagccagccaggatgtggcgtcacagcccttctctcagggcgccctgacgcagggctacatctccatgagccagccttcccagatgagccagcccggcctctcccagccggagctgtcccaggacagttaccttggtgacgagtttaaatcacaaatcgacgtggcgctctcacaggactccacgtaccagggagagcgggcttaccagcatggcggggtgacggggctgtcccagtattaaaaggtggcggcggaagagctaagcaacgtggcttagtccatcagcatcttattctgggtaataaaaaataaaaataaacggatacctgttttccactgctaaaactgaagcaccactgtgtgagcaacaggaagggagagcgcacgagggagaggagccgaggccgagcgccccctgctggcccgcggcggcgaggagcagagggagcggaggaggggccggcccgcgggagccgcggccaccaggaggccccgctccgtcccatcggggctgcggccagggcggagggaggaagaccctcatctcagagtagccctttcctctgttcttttatttctttttctctttgattgaaaggggactacgtcttagcaggaaaaaaaacttcgcatttctgtgcccgagcaggctccttgcaaagacagcagcgtgcggggcagagccccgggagggcgcgtctgtccacgcctaccggacgcgccgaggtcgcgctgcctgtgttctccgagggccttcatttaaagaaaataagggtgttttgggtttttctctttgtttttttcaagattcttttaaaggagtactgaagaatactttcctaagtttgtctctaaaatcttagcggtggacctgggagatttgagaagcttccagaaacagtttaaacaagccagcgctactggagaagaggagcaacacctgtgccgcggccggaggagttttgttgttggttttagcttccagtggcttctttctgcggggcatcaggctgctggggtagccgcccgccgagcctggaagctgctcgttctccgctggactcagaagccaagctgcttcccgcctagactcggcgcagggccccgcaccggtgaggaaggtgcttttggccccattgcgaggggccttggccaggactggccctgtggccaggaggcgagaaggtggctgttcccggattgacggctttttcccgggggcctttggaagatttggtggaaggacaagagggcctgtccctgtccccgtccccaggaggtaccgacagtccctgtgctggttagacacggagcgctgcacaccgaaagcccaaattgggagctctgcctgccggcaactttgctgatggggtgattgctgcttctggggggtaaggaaacaagttacagaaattaccgcgttctgtgtgaagggactgagggtgtggtgtcattggcagagggccgctttgcctctgcttcgccctgtgctgtgttctccagctttgtagcagcagccttgacaaacccaggcgcactgtaccaaggcaatgtaacttttgattttcggtcaatttaagttcttttgtcaccaaatattaataaacagttttgacttca

SEQ ID NO: 426477 - DNA, 4941 bp, Homo sapiens
gcacggcgacggcggcggtggcggcagttcctgctctaggctgcgagcggctggcggcttcgaggggagctgaggcgcggaggggctcggcggcagcggcggcggctcggcactgttacctctcggtccggctggcgccggggcgggcggtttggtcctttccgggcgcgcgggggcgacagcggcagcgacccgaggcctgcggcctaggcctcagcgcggcggcgggctcgagtgcagcgcggaaccggcccgagggccctacccggaggcaccatgagcgtggaggcgtacgggcccagctcgcagactctcactttcctggacacggaggaggccgagctgcttggcgccgacacacagggctccgagttcgagttcaccgactttactcttcctagccagacgcagacgccccccggcggccccggcggcccgggcggtggcggcgcgggaggcccgggcggcgcgggcgcgggcgctgcggcgggacagctcgacgcgcaggttgggcccgaaggcatcctgcagaacggggctgtggacgacagtgtagccaagaccagccagttgttggctgagttgaacttcgaggaagatgaagaagacacctattacacgaaggacctccccatacacgcctgcagttactgtggaatacacgatcctgcctgcgtggtttactgtaataccagcaagaagtggttctgcaacggacgtggaaatacttctggcagccacattgtaaatcaccttgtgagggcaaaatgcaaagaggtgaccctgcacaaggacgggcccctgggggagacagtcctggagtgctacaactgcggctgtcgcaacgtcttcctcctcggcttcatcccggccaaagctgactcagtggtggtgctgctgtgcaggcagccctgtgccagccagagcagcctcaaggacatcaactgggacagctcgcagtggcagccgctgatccaggaccgctgcttcctgtcctggctggtcaagatcccctccgagcaggagcagctgcgggcacgccagatcacggcacagcagatcaacaagctggaggagctgtggaaggaaaacccttctgccacgctggaggacctggagaagccgggggtggacgaggagccgcagcatgtcctcctgcggtacgaggacgcctaccagtaccagaacatattcgggcccctggtcaagctggaggccgactacgacaagaagctgaaggagtcccagactcaagataacatcactgtcaggtgggacctgggccttaacaagaagagaatcgcctacttcactttgcccaagactgactctgacatgcggctcatgcagggggatgagatatgcctgcggtacaaaggggaccttgcgcccctgtggaaagggatcggccacgtcatcaaggtccctgataattatggcgatgagatcgccattgagctgcggagcagcgtgggtgcacctgtggaggtgactcacaacttccaggtggattttgtgtggaagtcgacctcctttgacaggatgcagagcgcattgaaaacgtttgccgtggatgagacctcggtgtctggctacatctaccacaagctgttgggccacgaggtggaggacgtaatcatcaagtgccagctgcccaagcgcttcacggcgcagggcctccccgacctcaaccactcccaggtttatgccgtgaagactgtgctgcaaagaccactgagcctgatccagggcccgccaggcacggggaagacggtgacgtcggccaccatcgtctaccacctggcccggcaaggcaacgggccggtgctggtgtgtgctccgagcaacatcgccgtggaccagctaacggagaagatccaccagacggggctaaaggtcgtgcgcctctgcgccaagagccgtgaggccatcgactccccggtgtcttttctggccctgcacaaccagatcaggaacatggacagcatgcctgagctgcagaagctgcagcagctgaaagacgagactggggagctgtcgtctgccgacgagaagcggtaccgggccttgaagcgcaccgcagagagagagctgctgatgaacgcagatgtcatctgctgcacatgtgtgggcgccggtgacccgaggctggccaagatgcagttccgctccattttaatcgacgaaagcacccaggccaccgagccggagtgcatggttcccgtggtcctcggggccaagcagctgatccttgtaggcgaccactgccagctgggcccagtggtgatgtgcaagaaggcggccaaggccgggctgtcacagtcgctcttcgagcgcctggtggtgctgggcatccggcccatccgcctgcaggtccagtaccggatgcaccctgcactcagcgccttcccatccaacatcttctacgagggctccctccagaatggtgtcactgcagcggatcgtgtgaagaagggatttgacttccagtggccccaacccgataaaccgatgttcttctacgtgacccagggccaagaggagattgccagctcgggcacctcctacctgaacaggaccgaggctgcgaacgtggagaagatcaccacgaagttgctgaaggcaggcgccaagccggaccagattggcatcatcacgccctacgagggccagcgctcctacctggtgcagtacatgcagttcagcggctccctgcacaccaagctctaccaggaggtggagatcgccagtgtggacgcctttcagggacgcgagaaggacttcatcatcctgtcctgtgtgcgggccaacgagcaccaaggcattggctttttaaatgaccccaggcgtctgaacgtggccctgaccagagcaaggtatggcgtcatcattgtgggcaacccgaaggcactatcaaagcagccgctctggaaccacctgctgaactactataaggagcagaaggtgctggtggaggggccgctcaacaacctgcgtgagagcctcatgcagttcagcaagccacggaagctggtcaacactatcaacccgggagcccgcttcatgaccacagccatgtatgatgcccgggaggccatcatcccaggctccgtctatgatcggagcagccagggccggccttccagcatgtacttccagacccatgaccagattggcatgatcagtgccggccctagccacgtggctgccatgaacattcccatccccttcaacctggtcatgccacccatgccaccgcctggctattttggacaagccaacgggcctgctgcagggcgaggcaccccgaaaggcaagactggtcgtgggggacgccagaagaaccgctttgggcttcctggacccagccagactaacctccccaacagccaagccagccaggatgtggcgtcacagcccttctctcagggcgccctgacgcagggctacatctccatgagccagccttcccagatgagccagcccggcctctcccagccggagctgtcccaggacagttaccttggtgacgagtttaaatcacaaatcgacgtggcgctctcacaggactccacgtaccagggagagcgggcttaccagcatggcggggtgacggggctgtcccagtattaaaaggtggcggcggaagagctaagcaacgtggcttagtccatcagcatcttattctgggtaataaaaaataaaaataaacggatacctgttttccactgctaaaactgaagcaccactgtgtgagcaacaggaagggagagcgcacgagggagaggagccgaggccgagcgccccctgctggcccgcggcggcgaggagcagagggagcggaggaggggccggcccgcgggagccgcggccaccaggaggccccgctccgtcccatcggggctgcggccagggcggagggaggaagaccctcatctcagagtagccctttcctctgttcttttatttctttttctctttgattgaaaggggactacgtcttagcaggaaaaaaaacttcgcatttctgtgcccgagcaggctccttgcaaagacagcagcgtgcggggcagagccccgggagggcgcgtctgtccacgcctaccggacgcgccgaggtcgcgctgcctgtgttctccgagggccttcatttaaagaaaataagggtgttttgggtttttctctttgtttttttcaagattcttttaaaggagtactgaagaatactttcctaagtttgtctctaaaatcttagcggtggacctgggagatttgagaagcttccagaaacagtttaaacaagccagcgctactggagaagaggagcaacacctgtgccgcggccggaggagttttgttgttggttttagcttccagtggcttctttctgcggggcatcaggctgctggggtagccgcccgccgagcctggaagctgctcgttctccgctggactcagaagccaagctgcttcccgcctagactcggcgcagggccccgcaccggtgaggaaggtgcttttggccccattgcgaggggccttggccaggactggccctgtggccaggaggcgagaaggtggctgttcccggattgacggctttttcccgggggcctttggaagatttgttctggcagggactcttatttattcccattgctctagggctttcggtttccccttcttccggtaggccgcgtagaggcatgcaccgggtaggtttccgcggtgaccccgcggcggcctgagggacgctccctgccccatcccggctgttgggctgggccgctttgcctctgcttcgccctgtgctgtgttctccagctttgtagcagcagccttgacaaacccaggcgcactgtaccaaggcaatgtaacttttgattttcggtcaatttaagttcttttgtcaccaaatattaataaacagttttgacttca

SEQ ID NO: 426478 - DNA, 2880 bp, Homo sapiens
gcacggcgacggcggcggtggcggcagttcctgctctaggctgcgagcggctggcggcttcgaggggagctgaggcgcggaggggctcggcggcagcggcggcggctcggcactgttacctctcggtccggctggcgccggggcgggcggtttggtcctttccgggcgcgcgggggcgacagcggcagcgacccgaggcctgcggcctaggcctcagcgcggcggcgggctcgagtgcagcgcggaaccggcccgagggccctacccggaggcaccatgagcgtggaggcgtacgggcccagctcgcagactctcactttcctggacacggaggaggccgagctgcttggcgccgacacacagggctccgagttcgagttcaccgactttactcttcctagccagacgcagacgccccccggcggccccggcggcccgggcggtggcggcgcgggaggcccgggcggcgcgggcgcgggcgctgcggcgggacagctcgacgcgcaggttgggcccgaaggcatcctgcagaacggggctgtggacgacagtgtagccaagaccagccagttgttggctgagttgaacttcgaggaagatgaagaagacacctattacacgaaggacctccccatacacgcctgcagttactgtggaatacacgatcctgcctgcgtggtttactgtaataccagcaagaagtggttctgcaacggacgtggaaatacttctggcagccacattgtaaatcaccttgtgagggcaaaatgcaaagaggtgaccctgcacaaggacgggcccctgggggagacagtcctggagtgctacaactgcggctgtcgcaacgtcttcctcctcggcttcatcccggccaaagctgactcagtggtggtgctgctgtgcaggcagccctgtgccagccagagcagcctcaaggacatcaactgggacagctcgcagtggcagccgctgatccaggaccgctgcttcctgtcctggctggtcaagatcccctccgagcaggagcagctgcgggcacgccagatcacggcacagcagatcaacaagctggaggagctgtggaaggaaaacccttctgccacgctggaggacctggagaagccgggggtggacgaggagccgcagcatgtcctcctgcggtacgaggacgcctaccagtaccagaacatattcgggcccctggtcaagctggaggccgactacgacaagaagctgaaggagtcccagactcaagataacatcactgtcaggtgggacctgggccttaacaagaagagaatcgcctacttcactttgcccaagactgactctgacatgcggctcatgcagggggatgagatatgcctgcggtacaaaggggaccttgcgcccctgtggaaagggatcggccacgtcatcaaggtccctgataattatggcgatgagatcgccattgagctgcggagcagcgtgggtgcacctgtggaggtgactcacaacttccaggtggattttgtgtggaagtcgacctcctttgacaggatgcagagcgcattgaaaacgtttgccgtggatgagacctcggtgtctggctacatctaccacaagctgttgggccacgaggtggaggacgtaatcatcaagtgccagctgcccaagcgcttcacggcgcagggcctccccgacctcaaccactcccaggtttatgccgtgaagactgtgctgcaaagaccactgagcctgatccagggcccgccaggcacggggaagacggtgacgtcggccaccatcgtctaccacctggcccggcaaggcaacgggccggtgctggtgtgtgctccgagcaacatcgccgtggaccagctaacggagaagatccaccagacggggctaaaggtcgtgcgcctctgcgccaagagccgtgaggccatcgactccccggtgtcttttctggccctgcacaaccagatcaggaacatggacagcatgcctgagctgcagaagctgcagcagctgaaagacgagactggggagctgtcgtctgccgacgagaagcggtaccgggccttgaagcgcaccgcagagagagagctgctgatgaacgcagatgtcatctgctgcacatgtgtgggcgccggtgacccgaggctggccaagatgcagttccgctccattttaatcgacgaaagcacccaggccaccgagccggagtgcatggttcccgtggtcctcggggccaagcagctgatccttgtaggcgaccactgccagctgggcccagtggtgatgtgcaagaaggcggccaaggccgggctgtcacagtcgctcttcgagcgcctggtggtgctgggcatccggcccatccgcctgcaggtccagtaccggatgcaccctgcactcagcgccttcccatccaacatcttctacgagggctccctccagaatggtgtcactgcagcggatcgtgtgaagaagggatttgacttccagtggccccaacccgataaaccgatgttcttctacgtgacccagggccaagaggagattgccagctcgggcacctcctacctgaacaggaccgaggctgcgaacgtggagaagatcaccacgaagttgctgaaggcaggcgccaagccggaccagattggcaccgggtaggtttccgcggtgaccccgcggcggcctgagggacgctccctgccccatcccggctgttgggctgggccgctttgcctctgcttcgccctgtgctgtgttctccagctttgtagcagcagccttgacaaacccaggcgcactgtaccaaggcaatgtaacttttgattttcggtcaatttaagttcttttgtcaccaaatattaataaacagttttgacttca

SEQ ID NO: 426479 - DNA, 2258 bp, Homo sapiens
gcacggcgacggcggcggtggcggcagttcctgctctaggctgcgagcggctggcggcttcgaggggagctgaggcgcggaggggctcggcggcagcggcggcggctcggcactgttacctctcggtccggctggcgccggggcgggcggtttggtcctttccgggcgcgcgggggcgacagcggcagcgacccgaggcctgcggcctaggcctcagcgcggcggcgggctcgagtgcagcgcggaaccggcccgagggccctacccggaggcaccatgagcgtggaggcgtacgggcccagctcgcagactctcactttcctggacacggaggaggccgagctgcttggcgccgacacacagggctccgagttcgagttcaccgactttactcttcctagccagacgcagacgccccccggcggccccggcggcccgggcggtggcggcgcgggaggcccgggcggcgcgggcgcgggcgctgcggcgggacagctcgacgcgcaggttgggcccgaaggcatcctgcagaacggggctgtggacgacagtgtagccaagaccagccagttgttggctgagttgaacttcgaggaagatgaagaagacacctattacacgaaggacctccccatacacgcctgcagttactgtggaatacacgatcctgcctgcgtggtttactgtaataccagcaagaagtggttctgcaacggacgtggaaatacttctggcagccacattgtaaatcaccttgtgagggcaaaatgcaaagaggtgaccctgcacaaggacgggcccctgggggagacagtcctggagtgctacaactgcggctgtcgcaacgtcttcctcctcggcttcatcccggccaaagctgactcagtggtggtgctgctgtgcaggcagccctgtgccagccagagcagcctcaaggacatcaactgggacagctcgcagtggcagccgctgatccaggaccgctgcttcctgtcctggctggtcaagatcccctccgagcaggagcagctgcgggcacgccagatcacggcacagcagatcaacaagctggaggagctgtggaaggaaaacccttctgccacgctggaggacctggagaagccgggggtggacgaggagccgcagcatgtcctcctgcggtacgaggacgcctaccagtaccagaacatattcgggcccctggtcaagctggaggccgactacgacaagaagctgaaggagtcccagactcaagataacatcactgtcaggtgggacctgggccttaacaagaagagaatcgcctacttcactttgcccaagactgactctgacatgcggctcatgcagggggatgagatatgcctgcggtacaaaggggaccttgcgcccctgtggaaagggatcggccacgtcatcaaggtccctgataattatggcgatgagatcgccattgagctgcggagcagcgtgggtgcacctgtggaggtgactcacaacttccaggtggattttgtgtggaagtcgacctcctttgacaggatgcagagcgcattgaaaacgtttgccgtggatgagacctcggtgtctggctacatctaccacaagctgttgggccacgaggtggaggacgtaatcatcaagtgccagctgcccaagcgcttcacggcgcagggcctccccgacctcaaccactcccaggtttatgccgtgaagactgtgctgcaaagaccactgagcctgatccagggcccgccaggcacggggaagacggtgacgtcggccaccatcgtctaccacctggcccggcaaggcaacgggtagggctgacacggcccttgcgggcaagacccgggagggctttagggtggccagatggaaggcctggtgctgggagccttgggctctgtcacaccgaagagagcacgtggcgggtagtgtcgccatggtgcctaccgctctctatgtgacattattcgtgtcagctccaaccttaggattgcattttagtaaccaggtctgctactggtttagaaaactgggggcagggggggcatggctgcagcagcgtgagttccgtgtgcggcactttatagtgtggcgggatggtgcaagttccagccttggcattgcttgcggtgggtagagctgtgaagcctgggctgtctggatctgagctccttcggcatcgtgtcattactgcctgttaaaaatgtcaggagtttaaggccagcctgaacagggtgagacgtctctac

SEQ ID NO: 426480 - DNA, 485 bp, Homo sapiens
ccaggatgtggctgctccctgctggtgagcgctgctggcttcgctgccgccctctgcgtctctgaaaggggcctagatgggtggctgggagtggcaaggaggaactccaggctggctgggggtgggacaccggctcatggtgaggtagagtctttcttcaaggatgctgtccttctggtctctggtctggtgttggctgcacgtttttagcgtttggtgcagagccagcggtgtcttaagtaactaaattttaaaaacgctgtttaaagagcgtgtaccaagggtggcccagaaaggtcagcccggcttttgacaaggatgcaaacttaactcagcacacagattatggcgatgagatcgccattgagctgcggagcagcgtgggtgcacctgtggaggtgactcacaacttccaggtggattttgtgtggaagtcgacctcctttgacaggtacgtcttctcccatcactgccccctgttccct

SEQ ID NO: 426481 - DNA, 5379 bp, Homo sapiens
gcacggcgacggcggcggtggcggcagttcctgctctaggctgcgagcggctggcggcttcgaggggagctgaggcgcggaggggctcggcggcagcggcggcggctcggcactgttacctctcggtccggctggcgccggggcgggcggtttggtcctttccgggcgcgcgggggcgacagcggcagcgacccgaggcctgcggcctaggcctcagcgcggcggcgggctcgagtgcagcgcggaaccggcccgagggccctacccggaggcaccatgagcgtggaggcgtacgggcccagctcgcagactctcactttcctggacacggaggaggccgagctgcttggcgccgacacacagggctccgagttcgagttcaccgactttactcttcctagccagacgcagacgccccccggcggccccggcggcccgggcggtggcggcgcgggaggcccgggcggcgcgggcgcgggcgctgcggcgggacagctcgacgcgcaggttgggcccgaaggcatcctgcagaacggggctgtggacgacagtgtagccaagaccagccagttgttggctgagttgaacttcgaggaagatgaagaagacacctattacacgaaggacctccccatacacgcctgcagttactgtggaatacacgatcctgcctgcgtggtttactgtaataccagcaagaagtggttctgcaacggacgtggaaatacttctggcagccacattgtaaatcaccttgtgagggcaaaatgcaaagaggtgaccctgcacaaggacgggcccctgggggagacagtcctggagtgctacaactgcggctgtcgcaacgtcttcctcctcggcttcatcccggccaaagctgactcagtggtggtgctgctgtgcaggcagccctgtgccagccagagcagcctcaaggacatcaactgggacagctcgcagtggcagccgctgatccaggaccgctgcttcctgtcctggctggtcaagatcccctccgagcaggagcagctgcgggcacgccagatcacggcacagcagatcaacaagctggaggagctgtggaaggaaaacccttctgccacgctggaggacctggagaagccgggggtggacgaggagccgcagcatgtcctcctgcggtacgaggacgcctaccagtaccagaacatattcgggcccctggtcaagctggaggccgactacgacaagaagctgaaggagtcccagactcaagataacatcactgtcaggtgggacctgggccttaacaagaagagaatcgcctacttcactttgcccaagactgactctggtaatgaggatttagtcataatttggttaagagacatgcggctcatgcagggggatgagatatgcctgcggtacaaaggggaccttgcgcccctgtggaaagggatcggccacgtcatcaaggtccctgataattatggcgatgagatcgccattgagctgcggagcagcgtgggtgcacctgtggaggtgactcacaacttccaggtggattttgtgtggaagtcgacctcctttgacaggatgcagagcgcattgaaaacgtttgccgtggatgagacctcggtgtctggctacatctaccacaagctgttgggccacgaggtggaggacgtaatcatcaagtgccagctgcccaagcgcttcacggcgcagggcctccccgacctcaaccactcccaggtttatgccgtgaagactgtgctgcaaagaccactgagcctgatccagggcccgccaggcacggggaagacggtgacgtcggccaccatcgtctaccacctggcccggcaaggcaacgggccggtgctggtgtgtgctccgagcaacatcgccgtggaccagctaacggagaagatccaccagacggggctaaaggtcgtgcgcctctgcgccaagagccgtgaggccatcgactccccggtgtcttttctggccctgcacaaccagatcaggaacatggacagcatgcctgagctgcagaagctgcagcagctgaaagacgagactggggagctgtcgtctgccgacgagaagcggtaccgggccttgaagcgcaccgcagagagagagctgctgatgaacgcagatgtcatctgctgcacatgtgtgggcgccggtgacccgaggctggccaagatgcagttccgctccattttaatcgacgaaagcacccaggccaccgagccggagtgcatggttcccgtggtcctcggggccaagcagctgatccttgtaggcgaccactgccagctgggcccagtggtgatgtgcaagaaggcggccaaggccgggctgtcacagtcgctcttcgagcgcctggtggtgctgggcatccggcccatccgcctgcaggtccagtaccggatgcaccctgcactcagcgccttcccatccaacatcttctacgagggctccctccagaatggtgtcactgcagcggatcgtgtgaagaagggatttgacttccagtggccccaacccgataaaccgatgttcttctacgtgacccagggccaagaggagattgccagctcgggcacctcctacctgaacaggaccgaggctgcgaacgtggagaagatcaccacgaagttgctgaaggcaggcgccaagccggaccagattggcatcatcacgccctacgagggccagcgctcctacctggtgcagtacatgcagttcagcggctccctgcacaccaagctctaccaggaggtggagatcgccagtgtggacgcctttcagggacgcgagaaggacttcatcatcctgtcctgtgtgcgggccaacgagcaccaaggcattggctttttaaatgaccccaggcgtctgaacgtggccctgaccagagcaaggtatggcgtcatcattgtgggcaacccgaaggcactatcaaagcagccgctctggaaccacctgctgaactactataaggagcagaaggtgctggtggaggggccgctcaacaacctgcgtgagagcctcatgcagttcagcaagccacggaagctggtcaacactatcaacccgggagcccgcttcatgaccacagccatgtatgatgcccgggaggccatcatcccaggctccgtctatgatcggagcagccagggccggccttccagcatgtacttccagacccatgaccagattggcatgatcagtgccggccctagccacgtggctgccatgaacattcccatccccttcaacctggtcatgccacccatgccaccgcctggctattttggacaagccaacgggcctgctgcagggcgaggcaccccgaaaggcaagactggtcgtgggggacgccagaagaaccgctttgggcttcctggacccagccagactaacctccccaacagccaagccagccaggatgtggcgtcacagcccttctctcagggcgccctgacgcagggctacatctccatgagccagccttcccagatgagccagcccggcctctcccagccggagctgtcccaggacagttaccttggtgacgagtttaaatcacaaatcgacgtggcgctctcacaggactccacgtaccagggagagcgggcttaccagcatggcggggtgacggggctgtcccagtattaaaaggtggcggcggaagagctaagcaacgtggcttagtccatcagcatcttattctgggtaataaaaaataaaaataaacggatacctgttttccactgctaaaactgaagcaccactgtgtgagcaacaggaagggagagcgcacgagggagaggagccgaggccgagcgccccctgctggcccgcggcggcgaggagcagagggagcggaggaggggccggcccgcgggagccgcggccaccaggaggccccgctccgtcccatcggggctgcggccagggcggagggaggaagaccctcatctcagagtagccctttcctctgttcttttatttctttttctctttgattgaaaggggactacgtcttagcaggaaaaaaaacttcgcatttctgtgcccgagcaggctccttgcaaagacagcagcgtgcggggcagagccccgggagggcgcgtctgtccacgcctaccggacgcgccgaggtcgcgctgcctgtgttctccgagggccttcatttaaagaaaataagggtgttttgggtttttctctttgtttttttcaagattcttttaaaggagtactgaagaatactttcctaagtttgtctctaaaatcttagcggtggacctgggagatttgagaagcttccagaaacagtttaaacaagccagcgctactggagaagaggagcaacacctgtgccgcggccggaggagttttgttgttggttttagcttccagtggcttctttctgcggggcatcaggctgctggggtagccgcccgccgagcctggaagctgctcgttctccgctggactcagaagccaagctgcttcccgcctagactcggcgcagggccccgcaccggtgaggaaggtgcttttggccccattgcgaggggccttggccaggactggccctgtggccaggaggcgagaaggtggctgttcccggattgacggctttttcccgggggcctttggaagatttggtggaaggacaagagggcctgtccctgtccccgtccccaggaggtaccgacagtccctgtgctggttagacacggagcgctgcacaccgaaagcccaaattgggagctctgcctgccggcaactttgctgatggggtgattgctgcttctggggggtaaggaaacaagttacagaaattaccgcgttctgtgtgaagggactgagggtgtggtgtcattggcagagggtcattttaggagagctgccccagcccctcgaacgcctggcttggggtgtcattctgcctggcggccaggcctccagcttcccctgccccgggcctggggctgtcactggccctgatccgaacacctccagattccggcttctacatgggacagacggggacgcacaggccaccttccttctggcagggactcttatttattcccattgctctagggctttcggtttccccttcttccggtaggccgcgtagaggcatgcaccgggtaggtttccgcggtgaccccgcggcggcctgagggacgctccctgccccatcccggctgttgggctgggccgctttgcctctgcttcgccctgtgctgtgttctccagctttgtagcagcagccttgacaaacccaggcgcactgtaccaaggcaatgtaacttttgattttcggtcaatttaagttcttttgtcaccaaatattaataaacagttttgacttca

SEQ ID NO: 426482 - DNA, 2643 bp, Homo sapiens
cgcggcgtgcacctgatgcctgttggtctgtctctagagtatccccaccgctataagcgtcatggacgcgagaaggacttcatcatcctgtcctgtgtgcgggccaacgagcaccaaggcattggctttttaaatgaccccaggcgtctgaacgtggccctgaccagagcaaggtatggcgtcatcattgtgggcaacccgaaggcactatcaaagcagccgctctggaaccacctgctgaactactataaggagcagaaggtgctggtggaggggccgctcaacaacctgcgtgagagcctcatgcagttcagcaagccacggaagctggtcaacactatcaacccgggagcccgcttcatgaccacagccatgtatgatgcccgggaggccatcatcccaggctccgtctatgatcggagcagccagggccggccttccagcatgtacttccagacccatgaccagattggcatgatcagtgccggccctagccacgtggctgccatgaacattcccatccccttcaacctggtcatgccacccatgccaccgcctggctattttggacaagccaacgggcctgctgcagggcgaggcaccccgaaaggcaagactggtcgtgggggacgccagaagaaccgctttgggcttcctggacccagccagactaacctccccaacagccaagccagccaggatgtggcgtcacagcccttctctcagggcgccctgacgcagggctacatctccatgagccagccttcccagatgagccagcccggcctctcccagccggagctgtcccaggacagttaccttggtgacgagtttaaatcacaaatcgacgtggcgctctcacaggactccacgtaccagggagagcgggcttaccagcatggcggggtgacggggctgtcccagtattaaaaggtggcggcggaagagctaagcaacgtggcttagtccatcagcatcttattctgggtaataaaaaataaaaataaacggatacctgttttccactgctaaaactgaagcaccactgtgtgagcaacaggaagggagagcgcacgagggagaggagccgaggccgagcgccccctgctggcccgcggcggcgaggagcagagggagcggaggaggggccggcccgcgggagccgcggccaccaggaggccccgctccgtcccatcggggctgcggccagggcggagggaggaagaccctcatctcagagtagccctttcctctgttcttttatttctttttctctttgattgaaaggggactacgtcttagcaggaaaaaaaacttcgcatttctgtgcccgagcaggctccttgcaaagacagcagcgtgcggggcagagccccgggagggcgcgtctgtccacgcctaccggacgcgccgaggtcgcgctgcctgtgttctccgagggccttcatttaaagaaaataagggtgttttgggtttttctctttgtttttttcaagattcttttaaaggagtactgaagaatactttcctaagtttgtctctaaaatcttagcggtggacctgggagatttgagaagcttccagaaacagtttaaacaagccagcgctactggagaagaggagcaacacctgtgccgcggccggaggagttttgttgttggttttagcttccagtggcttctttctgcggggcatcaggctgctggggtagccgcccgccgagcctggaagctgctcgttctccgctggactcagaagccaagctgcttcccgcctagactcggcgcagggccccgcaccggtgaggaaggtgcttttggccccattgcgaggggccttggccaggactggccctgtggccaggaggcgagaaggtggctgttcccggattgacggctttttcccgggggcctttggaagatttggtggaaggacaagagggcctgtccctgtccccgtccccaggaggtaccgacagtccctgtgctggttagacacggagcgctgcacaccgaaagcccaaattgggagctctgcctgccggcaactttgctgatggggtgattgctgcttctggggggtaaggaaacaagttacagaaattaccgcgttctgtgtgaagggactgagggtgtggtgtcattggcagagggtcattttaggagagctgccccagcccctcgaacgcctggcttggggtgtcattctgcctggcggccaggcctccagcttcccctgccccgggcctggggctgtcactggccctgatccgaacacctccagattccggcttctacatgggacagacggggacgcacaggccaccttccttctggcagggactcttatttattcccattgctctagggctttcggtttccccttcttccggtaggccgcgtagaggcatgcaccgggtaggtttccgcggtgaccccgcggcggcctgagggacgctccctgccccatcccggctgttgggctgggccgctttgcctctgcttcgccctgtgctgtgttctccagctttgtagcagcagccttgacaaacccaggcgcactgtaccaaggcaatgtaacttttgattttcggtcaatttaagttcttttgtcaccaaatattaataaacagttttgacttca

SEQ ID NO: 426483 - DNA, 5080 bp, Homo sapiens
gcacggcgacggcggcggtggcggcagttcctgctctaggctgcgagcggctggcggcttcgaggggagctgaggcgcggaggggctcggcggcagcggcggcggctcggcactgttacctctcggtccggctggcgccggggcgggcggtttggtcctttccgggcgcgcgggggcgacagcggcagcgacccgaggcctgcggcctaggcctcagcgcggcggcgggctcgagtgcagcgcggaaccggcccgagggccctacccggaggcaccatgagcgtggaggcgtacgggcccagctcgcagactctcactttcctggacacggaggaggccgagctgcttggcgccgacacacagggctccgagttcgagttcaccgactttactcttcctagccagacgcagacgccccccggcggccccggcggcccgggcggtggcggcgcgggaggcccgggcggcgcgggcgcgggcgctgcggcgggacagctcgacgcgcaggttgggcccgaaggcatcctgcagaacggggctgtggacgacagtgtagccaagaccagccagttgttggctgagttgaacttcgaggaagatgaagaagacacctattacacgaaggacctccccatacacgcctgcagttactgtggaatacacgatcctgcctgcgtggtttactgtaataccagcaagaagtggttctgcaacggacgtggaaatacttctggcagccacattgtaaatcaccttgtgagggcaaaatgcaaagaggtgaccctgcacaaggacgggcccctgggggagacagtcctggagtgctacaactgcggctgtcgcaacgtcttcctcctcggcttcatcccggccaaagctgactcagtggtggtgctgctgtgcaggcagccctgtgccagccagagcagcctcaaggacatcaactgggacagctcgcagtggcagccgctgatccaggaccgctgcttcctgtcctggctggtcaagatcccctccgagcaggagcagctgcgggcacgccagatcacggcacagcagatcaacaagctggaggagctgtggaaggaaaacccttctgccacgctggaggacctggagaagccgggggtggacgaggagccgcagcatgtcctcctgcggtacgaggacgcctaccagtaccagaacatattcgggcccctggtcaagctggaggccgactacgacaagaagctgaaggagtcccagactcaagataacatcactgtcaggtgggacctgggccttaacaagaagagaatcgcctacttcactttgcccaagactgactctgacatgcggctcatgcagggggatgagatatgcctgcggtacaaaggggaccttgcgcccctgtggaaagggatcggccacgtcatcaaggtccctgataattatggcgatgagatcgccattgagctgcggagcagcgtgggtgcacctgtggaggtgactcacaacttccaggtggattttgtgtggaagtcgacctcctttgacaggatgcagagcgcattgaaaacgtttgccgtggatgagacctcggtgtctggctacatctaccacaagctgttgggccacgaggtggaggacgtaatcatcaagtgccagctgcccaagcgcttcacggcgcagggcctccccgacctcaaccactcccaggtttatgccgtgaagactgtgctgcaaagaccactgagcctgatccagggcccgccaggcacggggaagacggtgacgtcggccaccatcgtctaccacctggcccggcaaggcaacgggccggtgctggtgtgtgctccgagcaacatcgccgtggaccagctaacggagaagatccaccagacggggctaaaggtcgtgcgcctctgcgccaagagccgtgaggccatcgactccccggtgtcttttctggccctgcacaaccagatcaggaacatggacagcatgcctgagctgcagaagctgcagcagctgaaagacgagactggggagctgtcgtctgccgacgagaagcggtaccgggccttgaagcgcaccgcagagagagagctgctgatgaacgcagatgtcatctgctgcacatgtgtgggcgccggtgacccgaggctggccaagatgcagttccgctccattttaatcgacgaaagcacccaggccaccgagccggagtgcatggttcccgtggtcctcggggccaagcagctgatccttgtaggcgaccactgccagctgggcccagtggtgatgtgcaagaaggcggccaaggccgggctgtcacagtcgctcttcgagcgcctggtggtgctgggcatccggcccatccgcctgcaggtccagtaccggatgcaccctgcactcagcgccttcccatccaacatcttctacgagggctccctccagaatggtgtcactgcagcggatcgtgtgaagaagggatttgacttccagtggccccaacccgataaaccgatgttcttctacgtgacccagggccaagaggagattgccagctcgggcacctcctacctgaacaggaccgaggctgcgaacgtggagaagatcaccacgaagttgctgaaggcaggcgccaagccggaccagattggcatcatcacgccctacgagggccagcgctcctacctggtgcagtacatgcagttcagcggctccctgcacaccaagctctaccaggaggtggagatcgccagtgtggacgcctttcagggacgcgagaaggacttcatcatcctgtcctgtgtgcgggccaacgagcaccaaggcattggctttttaaatgaccccaggcgtctgaacgtggccctgaccagagcaaggtatggcgtcatcattgtgggcaacccgaaggcactatcaaagcagccgctctggaaccacctgctgaactactataaggagcagaaggtgctggtggaggggccgctcaacaacctgcgtgagagcctcatgcagttcagcaagccacggaagctggtcaacactatcaacccgggagcccgcttcatgaccacagccatgtatgatgcccgggaggccatcatcccaggctccgtctatgatcggagcagccagggccggccttccagcatgtacttccagacccatgaccagattggcatgatcagtgccggccctagccacgtggctgccatgaacattcccatccccttcaacctggtcatgccacccatgccaccgcctggctattttggacaagccaacgggcctgctgcagggcgaggcaccccgaaaggcaagactggtcgtgggggacgccagaagaaccgctttgggcttcctggacccagccagactaacctccccaacagccaagccagccaggatgtggcgtcacagcccttctctcagggcgccctgacgcagggctacatctccatgagccagccttcccagatgagccagcccggcctctcccagccggagctgtcccaggacagttaccttggtgacgagtttaaatcacaaatcgacgtggcgctctcacaggactccacgtaccagggagagcgggcttaccagcatggcggggtgacggggctgtcccagtattaaaaggtggcggcggaagagctaagcaacgtggcttagtccatcagcatcttattctgggtaataaaaaataaaaataaacggatacctgttttccactgctaaaactgaagcaccactgtgtgagcaacaggaagggagagcgcacgagggagaggagccgaggccgagcgccccctgctggcccgcggcggcgaggagcagagggagcggaggaggggccggcccgcgggagccgcggccaccaggaggccccgctccgtcccatcggggctgcggccagggcggagggaggaagaccctcatctcagagtagccctttcctctgttcttttatttctttttctctttgattgaaaggggactacgtcttagcaggaaaaaaaacttcgcatttctgtgcccgagcaggctccttgcaaagacagcagcgtgcggggcagagccccgggagggcgcgtctgtccacgcctaccggacgcgccgaggtcgcgctgcctgtgttctccgagggccttcatttaaagaaaataagggtgttttgggtttttctctttgtttttttcaagattcttttaaaggagtactgaagaatactttcctaagtttgtctctaaaatcttagcggtggacctgggagatttgagaagcttccagaaacagtttaaacaagccagcgctactggagaagaggagcaacacctgtgccgcggccggaggagttttgttgttggttttagcttccagtggcttctttctgcggggcatcaggctgctggggtagccgcccgccgagcctggaagctgctcgttctccgctggactcagaagccaagctgcttcccgcctagactcggcgcagggccccgcaccggtgaggaaggtgcttttggccccattgcgaggggccttggccaggactggccctgtggccaggaggcgagaaggtggctgttcccggattgacggctttttcccgggggcctttggaagatttggtggaaggacaagagggcctgtccctgtccccgtccccaggaggtaccgacagtccctgtgctggttagacacggagcgctgcacaccgaaagcccaaattgggagctctgcctgccggcaactttgctgatggggtgattctggcagggactcttatttattcccattgctctagggctttcggtttccccttcttccggtaggccgcgtagaggcatgcaccgggtaggtttccgcggtgaccccgcggcggcctgagggacgctccctgccccatcccggctgttgggctgggccgctttgcctctgcttcgccctgtgctgtgttctccagctttgtagcagcagccttgacaaacccaggcgcactgtaccaaggcaatgtaacttttgattttcggtcaatttaagttcttttgtcaccaaatattaataaacagttttgacttca

SEQ ID NO: 426484 - DNA, 3210 bp, Homo sapiens
gcacggcgacggcggcggtggcggcagttcctgctctaggctgcgagcggctggcggcttcgaggggagctgaggcgcggaggggctcggcggcagcggcggcggctcggcactgttacctctcggtccggctggcgccggggcgggcggtttggtcctttccgggcgcgcgggggcgacagcggcagcgacccgaggcctgcggcctaggcctcagcgcggcggcgggctcgagtgcagcgcggaaccggcccgagggccctacccggaggcaccatgagcgtggaggcgtacgggcccagctcgcagactctcactttcctggacacggaggaggccgagctgcttggcgccgacacacagggctccgagttcgagttcaccgactttactcttcctagccagacgcagacgccccccggcggccccggcggcccgggcggtggcggcgcgggaggcccgggcggcgcgggcgcgggcgctgcggcgggacagctcgacgcgcaggttgggcccgaaggcatcctgcagaacggggctgtggacgacagtgtagccaagaccagccagttgttggctgagttgaacttcgaggaagatgaagaagacacctattacacgaaggacctccccatacacgcctgcagttactgtggaatacacgatcctgcctgcgtggtttactgtaataccagcaagaagtggttctgcaacggacgtggaaatacttctggcagccacattgtaaatcaccttgtgagggcaaaatgcaaagaggtgaccctgcacaaggacgggcccctgggggagacagtcctggagtgctacaactgcggctgtcgcaacgtcttcctcctcggcttcatcccggccaaagctgactcagtggtggtgctgctgtgcaggcagccctgtgccagccagagcagcctcaaggacatcaactgggacagctcgcagtggcagccgctgatccaggaccgctgcttcctgtcctggctggtcaagatcccctccgagcaggagcagctgcgggcacgccagatcacggcacagcagatcaacaagctggaggagctgtggaaggaaaacccttctgccacgctggaggacctggagaagccgggggtggacgaggagccgcagcatgtcctcctgcggtacgaggacgcctaccagtaccagaacatattcgggcccctggtcaagctggaggccgactacgacaagaagctgaaggagtcccagactcaagataacatcactgtcaggtgggacctgggccttaacaagaagagaatcgcctacttcactttgcccaagactgactctgacatgcggctcatgcagggggatgagatatgcctgcggtacaaaggggaccttgcgcccctgtggaaagggatcggccacgtcatcaaggtccctgataattatggcgatgagatcgccattgagctgcggagcagcgtgggtgcacctgtggaggtgactcacaacttccaggtggattttgtgtggaagtcgacctcctttgacaggatgcagagcgcattgaaaacgtttgccgtggatgagacctcggtgtctggctacatctaccacaagctgttgggccacgaggtggaggacgtaatcatcaagtgccagctgcccaagcgcttcacggcgcagggcctccccgacctcaaccactcccaggtttatgccgtgaagactgtgctgcaaagaccactgagcctgatccagggcccgccaggcacggggaagacggtgacgtcggccaccatcgtctaccacctggcccggcaaggcaacgggccggtgctggtgtgtgctccgagcaacatcgccgtggaccagctaacggagaagatccaccagacggggctaaaggtcgtgcgcctctgcgccaagagccgtgaggccatcgactccccggtgtcttttctggccctgcacaaccagatcaggaacatggacagcatgcctgagctgcagaagctgcagcagctgaaagacgagactggggagctgtcgtctgccgacgagaagcggtaccgggccttgaagcgcaccgcagagagagagctgctgatgaacgcagatgtcatctgctgcacatgtgtgggcgccggtgacccgaggctggccaagatgcagttccgctccattttaatcgacgaaagcacccaggccaccgagccggagtgcatggttcccgtggtcctcggggccaagcagctgatccttgtaggcgaccactgccagctgggcccagtggtgatgtgcaagaaggcggccaaggccgggctgtcacagtcgctcttcgagcgcctggtggtgctgggcatccggcccatccgcctgcaggtccagtaccggatgcaccctgcactcagcgccttcccatccaacatcttctacgagggctccctccagaatggtgtcactgcagcggatcgtgtgaagaagggatttgacttccagtggccccaacccgataaaccgatgttcttctacgtgacccagggccaagaggagattgccagctcgggcacctcctacctgaacaggaccgaggctgcgaacgtggagaagatcaccacgaagttgctgaaggcaggcgccaagccggaccagattggcatcatcacgccctacgagggccagcgctcctacctggtgcagtacatgcagttcagcggctccctgcacaccaagctctaccaggaggtggagatcgccagtgtggacgcctttcagggacgcgagaaggacttcatcatcctgtcctgtgtgcgggccaacgagcaccaaggcattggctttttaaatgaccccaggcgtctgaacgtggccctgaccagagcaaggtatggcgtcatcattgtgggcaacccgaaggcactatcaaagcagccgctctggaaccacctgctgaactactataaggagcagaaggtgctggtggaggggccgctcaacaacctgcgtgagagcctcatgcagttcagcaagccacggaagctggtcaacactatcaacccgggagcccgcttcatgaccacagccatgtatgatgcccgggaggccatcatcccaggctccgtctatgatcggagcagccaggccaggctctttccccagtcaggctccagacgcattgacaacaacagaaacagcatgacacgtaggaattcgacggcc

SEQ ID NO: 426485 - DNA, 556 bp, Homo sapiens
gatggcagctgccttcccgcagggtgttgtgtctgcacccctcacggcctccagcctcagggctcgggatcccacaggtggagcccagcactgacagcctgggtttcttaggaccgaggctgcgaacgtggagaagatcaccacgaagttgctgaaggcaggcgccaagccggaccagattggcatcatcacgccctacgagggccagcgctcctacctggtgcagtacatgcagttcagcggctccctgcacaccaagctctaccaggtgcgctgcgccctcgggcacacttggtctcctgggccatgcaagggtattgacccttgacctttaagttaccccccaagaggggcccgtcctggctggagctcagaatggcccaggaagcaccagctggcccaccctctggggagggcacagacagcacatccccacagaccctgcgaaattccacatgatcaggacagagactttgagaaatacatcacagggatcagaaacatgggctgagattggcacatcaaggtgttttctcgggatggttgaaacaagtcc

SEQ ID NO: 426486 - DNA, 211 bp, Homo sapiens
tcacggcgcctgctctcacggcagaggcttgctgtagggcccgcctcatggggcctcgggcatgtggaggccaggcccgggcctgtgctggaggctaaccggggctcttgtttttcatgtgctcagactcaagataacatcactgtcaggtgggacctgggccttaacaagaagagaatcgcctacttcactttgcccaagactgactctg

SEQ ID NO: 426487 - DNA, 489 bp, Homo sapiens
ccgaaggcactatcaaagcagccgctctggaaccacctgctgaactactataaggagcagaaggtgctggtggaggggccgctcaacaacctgcgtgagagcctcatgcagttcagcaagccacggaagctggtcaacactatcaacccggtgagcgcctgcacaggacagcagggcagcacggagaaacccgggcccaaaacactgctgggaacgtgccagcttggcccgtgtgcccgtgagctgagggagggctctcctaggggagggtgggctctcctaggggagggtgggccagcccacttcttgtctcccgagccgtgtgtggcatttttggcttggggccgctaagtcctgggtggcctctgggaattgggctcagggctgctgtgctgcatgcagcagcctgggaccttggacacgggcagttggaagctttgcaagcccggggtgatctggtagtgagggggtgtgaagcttcctgagctg

SEQ ID NO: 426488 - DNA, 3649 bp, Homo sapiens
  misc_feature (2201)..(2201): n is a, c, g, or t
agcttgaagttaaagactcctgctaaaaaccagtacgtttcattttgcagttactgggagggggcttgctgtggccctgtcaggaagagtagagctctggtccagctccgcgcagggagggaggctgtcaccatgccggcctgctgcagctgcagtgatgttttccagtatgagacgaacaaagtcactcggatccagagcatgaattatggcaccattaagtggttcttccacgtgatcatcttttcctacgtttgctttgctctggtgagtgacaagctgtaccagcggaaagagcctgtcatcagttctgtgcacaccaaggtgaaggggatagcagaggtgaaagaggagatcgtggagaatggagtgaagaagttggtgcacagtgtctttgacaccgcagactacaccttccctttgcaggggaactctttcttcgtgatgacaaactttctcaaaacagaaggccaagagcagcggttgtgtcccgagtatcccacccgcaggacgctctgttcctctgaccgaggttgtaaaaagggatggatggacccgcagagcaaaggaattcagaccggaaggtgtgtagtgcatgaagggaaccagaagacctgtgaagtctctgcctggtgccccatcgaggcagtggaagaggccccccggcctgctctcttgaacagtgccgaaaacttcactgtgctcatcaagaacaatatcgacttccccggccacaactacaccacgagaaacatcctgccaggtttaaacatcacttgtaccttccacaagactcagaatccacagtgtcccattttccgactaggagacatcttccgagaaacaggcgataatttttcagatgtggcaattcagggcggaataatgggcattgagatctactgggactgcaacctagaccgttggttccatcactgccatcccaaatacagtttccgtcgccttgacgacaagaccaccaacgtgtccttgtaccctggctacaacttcagatacgccaagtactacaaggaaaacaatgttgagaaacggactctgataaaagtcttcgggatccgttttgacatcctggtttttggcaccggaggaaaatttgacattatccagctggttgtgtacatcggctcaaccctctcctacttcggtctggccgctgtgttcatcgacttcctcatcgacacttactccagtaactgctgtcgctcccatatttatccctggtgcaagtgctgtcagccctgtgtggtcaacgaatactactacaggaagaagtgcgagtccattgtggagccaaagccgacattaaagtatgtgtcctttgtggatgaatcccacattaggatggtgaaccagcagctactagggagaagtctgcaagatgtcaagggccaagaagtcccaagacctgcgatggacttcacagatttgtccaggctgcccctggccctccatgacacacccccgattcctggacaaccagaggagatacagctgcttagaaaggaggcgactcctagatccagggatagccccgtctggtgccagtgtggaagctgcctcccatctcaactccctgagagccacaggtgcctggaggagctgtgctgccggaaaaagccgggggcctgcatcaccacctcagagctgttcaggaagctggtcctgtccagacacgtcctgcagttcctcctgctctaccaggagcccttgctggcgctggatgtggattccaccaacagccggctgcggcactgtgcctacaggtgctacgccacctggcgcttcggctcccaggacatggctgactttgccatcctgcccagctgctgccgctggaggatccggaaagagtttccgaagagtgaagggcagtacagtggcttcaagagtccttactgaagccaggcaccgtggctcacgtctgtaatcccagcgctttgggaggccgaggcaggcagatcacctgaggtcgggagttggagacccgcctggctaacaaggcgaaatcctgtctgtactaaaaatacaaaaatcagccagacatggtggcatgcacctgcaatcccagctactcgggaggctgaggcacaagaatcacttgaacccgggaggcagaggttgtagtgagcccagattgtgccactgctctccagcctgggaggcacagcaaactgtccccnaaaaaaaaaaaagagtccttaccaatagcaggggctgcagtagccatgttaacatgacatttaccagcaacttgaacttcacctgcaaagctctgtggccacattttcagccaaagggaaatatgctttcatcttctgttgctctctgtgtctgagagcaaagtgacctggttaaacaaaccagaatccctctacatggactcagagaaaagagattgagatgtaagtctcaactctgtccccaggaagttgtgtgaccctaggcctctcacctctgtgcctctgtctccttgttgcccaactactatctcagagatattgtgaggacaaattgagacagtgcacatgaactgtcttttaatgtgtaaagatctacatgaatgcaaaacatttcattatgaggtcagactaggataatgtccaactaaaaacaaacccttttcatcctggctggagaatgtggagaactaaaggtggccacaaattctttgacactcaagtcccccaagacctaagggttttatctcctccccttgaatatgggtggctctgattgctttatccaaaagtggaagtgacattgtgtcagtttcagatcctgatcttaagaggctgacagcttctacttgctgtcccttggaactcttgctatcggggaagccagacgccatttaaaagtctgcctatcctggccaggtgtggtggctcacacctgtaatcccagcactttgggagaccaaggcgggcggatcacttaaagtcaggagtccaagaccagactcgccaacatggtgaaaccgtatctctaataaaaatacaaaaattagctgggcatggtgcgggcacctgtagtcctagctatcaagaggctgagacaggagaaacacttgaacctgggaggtggaggttgcattgagctgagatcgtgccactgcactccaggctgggtgacagagcgagactccatctcaaaaaaaaaaaaaagaaaaaaaaaaatgtctgcctatcctgagactgccctgctgtgaggaagcccaagcagtcacgtggacagtgcctgaccagccccagctttcaagccatccaagcccagtcaccaaacatgagagagaagaagccttcaggtgattctggactccactaacatatgactgataccgcatgatacatcccaagtgagaactgccccataaatccagaacaggtaactggaacagagggcaagcctgatgaatgggcacacagactcagcccataccttccctggttctaatgttctcagggagcccggaccaaccctgggagcctcaggaacttaggtttccactggacagttctagaagggctatagaccaaatcaggtaactcaccagaccagccttggaatctatcaaatctaactgctgagctacccaatgcattccgatcctcatcacaattctttgact

SEQ ID NO: 426489 - DNA, 3703 bp, Homo sapiens
  misc_feature (2201)..(2201): n is a, c, g, or t
agcttgaagttaaagactcctgctaaaaaccagtacgtttcattttgcagttactgggagggggcttgctgtggccctgtcaggaagagtagagctctggtccagctccgcgcagggagggaggctgtcaccatgccggcctgctgcagctgcagtgatgttttccagtatgagacgaacaaagtcactcggatccagagcatgaattatggcaccattaagtggttcttccacgtgatcatcttttcctacgtttgctttgctctggtgagtgacaagctgtaccagcggaaagagcctgtcatcagttctgtgcacaccaaggtgaaggggatagcagaggtgaaagaggagatcgtggagaatggagtgaagaagttggtgcacagtgtctttgacaccgcagactacaccttccctttgcaggggaactctttcttcgtgatgacaaactttctcaaaacagaaggccaagagcagcggttgtgtcccgagtatcccacccgcaggacgctctgttcctctgaccgaggttgtaaaaagggatggatggacccgcagagcaaaggaattcagaccggaaggtgtgtagtgcatgaagggaaccagaagacctgtgaagtctctgcctggtgccccatcgaggcagtggaagaggccccccggcctgctctcttgaacagtgccgaaaacttcactgtgctcatcaagaacaatatcgacttccccggccacaactacaccacgagaaacatcctgccaggtttaaacatcacttgtaccttccacaagactcagaatccacagtgtcccattttccgactaggagacatcttccgagaaacaggcgataatttttcagatgtggcaattcagggcggaataatgggcattgagatctactgggactgcaacctagaccgttggttccatcactgccatcccaaatacagtttccgtcgccttgacgacaagaccaccaacgtgtccttgtaccctggctacaacttcagatacgccaagtactacaaggaaaacaatgttgagaaacggactctgataaaagtcttcgggatccgttttgacatcctggtttttggcaccggaggaaaatttgacattatccagctggttgtgtacatcggctcaaccctctcctacttcggtctggccgctgtgttcatcgacttcctcatcgacacttactccagtaactgctgtcgctcccatatttatccctggtgcaagtgctgtcagccctgtgtggtcaacgaatactactacaggaagaagtgcgagtccattgtggagccaaagccgacattaaagtatgtgtcctttgtggatgaatcccacattaggatggtgaaccagcagctactagggagaagtctgcaagatgtcaagggccaagaagtcccaagacctgcgatggacttcacagatttgtccaggctgcccctggccctccatgacacacccccgattcctggacaaccagaggagatacagctgcttagaaaggaggcgactcctagatccagggatagccccgtctggtgccagtgtggaagctgcctcccatctcaactccctgagagccacaggtgcctggaggagctgtgctgccggaaaaagccgggggcctgcatcaccacctcagagctgttcaggaagctggtcctgtccagacacgtcctgcagttcctcctgctctaccaggagcccttgctggcgctggatgtggattccaccaacagccggctgcggcactgtgcctacaggtgctacgccacctggcgcttcggctcccaggacatggctgactttgccatcctgcccagctgctgccgctggaggatccggaaagagtttccgaagagtgaagggcagtacagtggcttcaagagtccttactgaagccaggcaccgtggctcacgtctgtaatcccagcgctttgggaggccgaggcaggcagatcacctgaggtcgggagttggagacccgcctggctaacaaggcgaaatcctgtctgtactaaaaatacaaaaatcagccagacatggtggcatgcacctgcaatcccagctactcgggaggctgaggcacaagaatcacttgaacccgggaggcagaggttgtagtgagcccagattgtgccactgctctccagcctgggaggcacagcaaactgtccccnaaaaaaaaaaaagagtccttaccaatagcaggggctgcagtagccatgttaacatgacatttaccagcaacttgaacttcacctgcaaagctctgtggccacattttcagccaaagggaaatatgctttcatcttctgttgctctctgtgtctgagagcaaagtgacctggttaaacaaaccagaatccctctacatggactcagagaaaagagattgagatgtaagtctcaactctgtccccaggaagttgtgtgaccctaggcctctcacctctgtgcctctgtctccttgttgcccaactactatctcagagatattgtgaggacaaattgagacagtgcacatgaactgtcttttaatgtgtaaagatctacatgaatgcaaaacatttcattatgaggtcagactaggataatgtccaactaaaaacaaacccttttcatcctggctggagaatgtggagaactaaaggtggccacaaattctttgacactcaagtcccccaagacctaagggttttatctcctccccttgaatatgggtggctctgattgctttatccaaaagtggaagtgacattgtgtcagtttcagatcctgatcttaagaggctgacagcttctacttgctgtcccttggaactcttgctatcggggaagccagacgccatttaaaagtctgcctatcctggccaggtgtggtggctcacacctgtaatcccagcactttgggagaccaaggcgggcggatcacttaaagtcaggagtccaagaccagactcgccaacatggtgaaaccgtatctctaataaaaatacaaaaattagctgggcatggtgcgggcacctgtagtcctagctatcaagaggctgagacaggagaaacacttgaacctgggaggtggaggttgcattgagctgagatcgtgccactgcactccaggctgggtgacagagcgagactccatctcaaaaaaaaaaaaaagaaaaaaaaaaatgtctgcctatcctgagactgccctgctgtgaggaagcccaagcagtcacgtggacagtgcctgaccagccccagctttcaagccatccaagcccagtcaccaaacatgagagagaagaagccttcaggtgattctggactccactaacatatgactgataccgcatgatacatcccaagtgagaactgccccataaatccagaaaaccacattgctatcttaagtccctaagtttggggcttatttgttccacagcaacaggtaactggaacagagggcaagcctgatgaatgggcacacagactcagcccataccttccctggttctaatgttctcagggagcccggaccaaccctgggagcctcaggaacttaggtttccactggacagttctagaagggctatagaccaaatcaggtaactcaccagaccagccttggaatctatcaaatctaactgctgagctacccaatgcattccgatcctcatcacaattctttgact

SEQ ID NO: 426490 - DNA, 2734 bp, Homo sapiens
agcttgaagttaaagactcctgctaaaaaccagtacgtttcattttgcagttactgggagggggcttgctgtggccctgtcaggaagagtagagctctggtccagctccgcgcagggagggaggctgtcaccatgccggcctgctgcagctgcagtgatgttttccagtatgagacgaacaaagtcactcggatccagagcatgaattatggcaccattaagtggttcttccacgtgatcatcttttcctacgtttgctttgctctggtgagtgacaagctgtaccagcggaaagagcctgtcatcagttctgtgcacaccaaggtgaaggggatagcagaggtgaaagaggagatcgtggagaatggagtgaagaagttggtgcacagtgtctttgacaccgcagactacaccttccctttgcaggggaactctttcttcgtgatgacaaactttctcaaaacagaaggccaagagcagcggttgtgtcccgagtatcccacccgcaggacgctctgttcctctgaccgaggttgtaaaaagggatggatggacccgcagagcaaaggaattcagaccggaaggtgtgtagtgcatgaagggaaccagaagacctgtgaagtctctgcctggtgccccatcgaggcagtggaagaggccccccggcctgctctcttgaacagtgccgaaaacttcactgtgctcatcaagaacaatatcgacttccccggccacaactacaccacgagaaacatcctgccaggtttaaacatcacttgtaccttccacaagactcagaatccacagtgtcccattttccgactaggagacatcttccgagaaacaggcgataatttttcagatgtggcaattcagggcggaataatgggcattgagatctactgggactgcaacctagaccgttggttccatcactgccatcccaaatacagtttccgtcgccttgacgacaagaccaccaacgtgtccttgtaccctggctacaacttcagatacgccaagtactacaaggaaaacaatgttgagaaacggactctgataaaagtcttcgggatccgttttgacatcctggtttttggcaccggaggaaaatttgacattatccagctggttgtgtacatcggctcaaccctctcctacttcggtctggccgctgtgttcatcgacttcctcatcgacacttactccagtaactgctgtcgctcccatatttatccctggtgcaagtgctgtcagccctgtgtggtcaacgaatactactacaggaagaagtgcgagtccattgtggagccaaagccgacattaaagtatgtgtcctttgtggatgaatcccacattaggatggtgaaccagcagctactagggagaagtctgcaagatgtcaagggccaagaagtcccaagacctgcgatggacttcacagatttgtccaggctgcccctggccctccatgacacacccccgattcctggacaaccagaggagatacagctgcttagaaaggaggcgactcctagatccagggatagccccgtctggtgccagtgtggaagctgcctcccatctcaactccctgagagccacaggtgcctggaggagctgtgctgccggaaaaagccgggggcctgcatcaccacctcagagctgttcaggaagctggtcctgtccagacacgtcctgcagttcctcctgctctaccaggagcccttgctggcgctggatgtggattccaccaacagccggctgcggcactgtgcctacaggtgctacgccacctggcgcttcggctcccaggacatggctgactttgccatcctgcccagctgctgccgctggaggatccggaaagagtttccgaagagtgaagggcagtacagtggcttcaagagtccttactgaagccaggcaccgtggctcacgtctgtaatcccagcgctttgggaggccgaggcaggcagatcacctgaggtcgggagttggagacccgcctggctaacaaggcgaaatcctgtctgtactaaaaatacaaaaatcagccagacatggtggcatgcacctgcaatcccagctactcgggaggctgaggcacaagaatcacttgaacccgggaggcagaggttgcattgagctgagatcgtgccactgcactccaggctgggtgacagagcgagactccatctcaaaaaaaaaaaaaagaaaaaaaaaaatgtctgcctatcctgagactgccctgctgtgaggaagcccaagcagtcacgtggacagtgcctgaccagccccagctttcaagccatccaagcccagtcaccaaacatgagagagaagaagccttcaggtgattctggactccactaacatatgactgataccgcatgatacatcccaagtgagaactgccccataaatccagaaaaccacattgctatcttaagtccctaagtttggggcttatttgttccacagcaacaggtaactggaacagagggcaagcctgatgaatgggcacacagactcagcccataccttccctggttctaatgttctcagggagcccggaccaaccctgggagcctcaggaacttaggtttccactggacagttctagaagggctatagaccaaatcaggtaactcaccagaccagccttggaatctatcaaatctaactgctgagctacccaatgcattccgatcctcatcacaattctttgact

SEQ ID NO: 426491 - DNA, 3552 bp, Homo sapiens
  misc_feature (2104)..(2104): n is a, c, g, or t
agcttgaagttaaagactcctgctaaaaaccagtacgtttcattttgcagttactgggagggggcttgctgtggccctgtcaggaagagtagagctctggtccagctccgcgcagggagggaggctgtcaccatgccggcctgctgcagctgcagtgatgttttccagtatgagacgaacaaagtcactcggatccagagcatgaattatggcaccattaagtggttcttccacgtgatcatcttttcctacgtttgctttgctctggtgagtgacaagctgtaccagcggaaagagcctgtcatcagttctgtgcacaccaaggtgaaggggatagcagaggtgaaagaggagatcgtggagaatggagtgaagaagttggtgcacagtgtctttgacaccgcagactacaccttccctttgcaggggaactctttcttcgtgatgacaaactttctcaaaacagaaggccaagagcagcggttgtgtcccgagtatcccacccgcaggacgctctgttcctctgaccgaggttgtaaaaagggatggatggacccgcagagcaaaggcctgctctcttgaacagtgccgaaaacttcactgtgctcatcaagaacaatatcgacttccccggccacaactacaccacgagaaacatcctgccaggtttaaacatcacttgtaccttccacaagactcagaatccacagtgtcccattttccgactaggagacatcttccgagaaacaggcgataatttttcagatgtggcaattcagggcggaataatgggcattgagatctactgggactgcaacctagaccgttggttccatcactgccatcccaaatacagtttccgtcgccttgacgacaagaccaccaacgtgtccttgtaccctggctacaacttcagatacgccaagtactacaaggaaaacaatgttgagaaacggactctgataaaagtcttcgggatccgttttgacatcctggtttttggcaccggaggaaaatttgacattatccagctggttgtgtacatcggctcaaccctctcctacttcggtctggccgctgtgttcatcgacttcctcatcgacacttactccagtaactgctgtcgctcccatatttatccctggtgcaagtgctgtcagccctgtgtggtcaacgaatactactacaggaagaagtgcgagtccattgtggagccaaagccgacattaaagtatgtgtcctttgtggatgaatcccacattaggatggtgaaccagcagctactagggagaagtctgcaagatgtcaagggccaagaagtcccaagacctgcgatggacttcacagatttgtccaggctgcccctggccctccatgacacacccccgattcctggacaaccagaggagatacagctgcttagaaaggaggcgactcctagatccagggatagccccgtctggtgccagtgtggaagctgcctcccatctcaactccctgagagccacaggtgcctggaggagctgtgctgccggaaaaagccgggggcctgcatcaccacctcagagctgttcaggaagctggtcctgtccagacacgtcctgcagttcctcctgctctaccaggagcccttgctggcgctggatgtggattccaccaacagccggctgcggcactgtgcctacaggtgctacgccacctggcgcttcggctcccaggacatggctgactttgccatcctgcccagctgctgccgctggaggatccggaaagagtttccgaagagtgaagggcagtacagtggcttcaagagtccttactgaagccaggcaccgtggctcacgtctgtaatcccagcgctttgggaggccgaggcaggcagatcacctgaggtcgggagttggagacccgcctggctaacaaggcgaaatcctgtctgtactaaaaatacaaaaatcagccagacatggtggcatgcacctgcaatcccagctactcgggaggctgaggcacaagaatcacttgaacccgggaggcagaggttgtagtgagcccagattgtgccactgctctccagcctgggaggcacagcaaactgtccccnaaaaaaaaaaaagagtccttaccaatagcaggggctgcagtagccatgttaacatgacatttaccagcaacttgaacttcacctgcaaagctctgtggccacattttcagccaaagggaaatatgctttcatcttctgttgctctctgtgtctgagagcaaagtgacctggttaaacaaaccagaatccctctacatggactcagagaaaagagattgagatgtaagtctcaactctgtccccaggaagttgtgtgaccctaggcctctcacctctgtgcctctgtctccttgttgcccaactactatctcagagatattgtgaggacaaattgagacagtgcacatgaactgtcttttaatgtgtaaagatctacatgaatgcaaaacatttcattatgaggtcagactaggataatgtccaactaaaaacaaacccttttcatcctggctggagaatgtggagaactaaaggtggccacaaattctttgacactcaagtcccccaagacctaagggttttatctcctccccttgaatatgggtggctctgattgctttatccaaaagtggaagtgacattgtgtcagtttcagatcctgatcttaagaggctgacagcttctacttgctgtcccttggaactcttgctatcggggaagccagacgccatttaaaagtctgcctatcctggccaggtgtggtggctcacacctgtaatcccagcactttgggagaccaaggcgggcggatcacttaaagtcaggagtccaagaccagactcgccaacatggtgaaaccgtatctctaataaaaatacaaaaattagctgggcatggtgcgggcacctgtagtcctagctatcaagaggctgagacaggagaaacacttgaacctgggaggtggaggttgcattgagctgagatcgtgccactgcactccaggctgggtgacagagcgagactccatctcaaaaaaaaaaaaaagaaaaaaaaaaatgtctgcctatcctgagactgccctgctgtgaggaagcccaagcagtcacgtggacagtgcctgaccagccccagctttcaagccatccaagcccagtcaccaaacatgagagagaagaagccttcaggtgattctggactccactaacatatgactgataccgcatgatacatcccaagtgagaactgccccataaatccagaacaggtaactggaacagagggcaagcctgatgaatgggcacacagactcagcccataccttccctggttctaatgttctcagggagcccggaccaaccctgggagcctcaggaacttaggtttccactggacagttctagaagggctatagaccaaatcaggtaactcaccagaccagccttggaatctatcaaatctaactgctgagctacccaatgcattccgatcctcatcacaattctttgact

SEQ ID NO: 426492 - DNA, 3733 bp, Homo sapiens
  misc_feature (2285)..(2285): n is a, c, g, or t
agcttgaagttaaagactcctgctaaaaaccagtacgtttcattttgcagttactgggagggggcttgctgtggccctgtcaggaagagtagagctctggtccagctccgcgcagggagggaggctgtcaccatgccggcctgctgcagctgcagtgatgttttccagtatgagacgaacaaagtcactcggatccagagcatgaattatggcaccattaagtggttcttccacgtgatcatcttttcctacgtttgctttgctctggtgagtgacaagctgtaccagcggaaagagcctgtcatcagttctgtgcacaccaaggtgaaggggatagcagaggtgaaagaggagatcgtggagaatggagtgaagaagttggtgcacagtgtctttgacaccgcagactacaccttccctttgcaggggaactctttcttcgtgatgacaaactttctcaaaacagaaggccaagagcagcggttgtgtcccgagtatcccacccgcaggacgctctgttcctctgaccgaggttgtaaaaagggatggatggacccgcagagcaaaggaattcagaccggaaggtgtgtagtgcatgaagggaaccagaagacctgtgaagtctctgcctggtgccccatcgaggcagtggaagaggccccccggcctgctctcttgaacagtgccgaaaacttcactgtgctcatcaagaacaatatcgacttccccggccacaactacaccacgagaaacatcctgccaggtttaaacatcacttgtaccttccacaagactcagaatccacagtgtcccattttccgactaggagacatcttccgagaaacaggcgataatttttcagatgtggcaattcagggcggaataatgggcattgagatctactgggactgcaacctagaccgttggttccatcactgccatcccaaatacagtttccgtcgccttgacgacaagaccaccaacgtgtccttgtaccctggctacaacttcagatacgccaagtactacaaggaaaacaatgttgagaaacggactctgataaaagtcttcgggatccgttttgacatcctggtttttggcaccggaggaaaatttgacattatccagctggttgtgtacatcggctcaaccctctcctacttcggtctggtaagagattctcttttccatgctttaggaaaatggtttggagaaggaagtgactaacgcagcgcttgtctgcattctccccaggccgctgtgttcatcgacttcctcatcgacacttactccagtaactgctgtcgctcccatatttatccctggtgcaagtgctgtcagccctgtgtggtcaacgaatactactacaggaagaagtgcgagtccattgtggagccaaagccgacattaaagtatgtgtcctttgtggatgaatcccacattaggatggtgaaccagcagctactagggagaagtctgcaagatgtcaagggccaagaagtcccaagacctgcgatggacttcacagatttgtccaggctgcccctggccctccatgacacacccccgattcctggacaaccagaggagatacagctgcttagaaaggaggcgactcctagatccagggatagccccgtctggtgccagtgtggaagctgcctcccatctcaactccctgagagccacaggtgcctggaggagctgtgctgccggaaaaagccgggggcctgcatcaccacctcagagctgttcaggaagctggtcctgtccagacacgtcctgcagttcctcctgctctaccaggagcccttgctggcgctggatgtggattccaccaacagccggctgcggcactgtgcctacaggtgctacgccacctggcgcttcggctcccaggacatggctgactttgccatcctgcccagctgctgccgctggaggatccggaaagagtttccgaagagtgaagggcagtacagtggcttcaagagtccttactgaagccaggcaccgtggctcacgtctgtaatcccagcgctttgggaggccgaggcaggcagatcacctgaggtcgggagttggagacccgcctggctaacaaggcgaaatcctgtctgtactaaaaatacaaaaatcagccagacatggtggcatgcacctgcaatcccagctactcgggaggctgaggcacaagaatcacttgaacccgggaggcagaggttgtagtgagcccagattgtgccactgctctccagcctgggaggcacagcaaactgtccccnaaaaaaaaaaaagagtccttaccaatagcaggggctgcagtagccatgttaacatgacatttaccagcaacttgaacttcacctgcaaagctctgtggccacattttcagccaaagggaaatatgctttcatcttctgttgctctctgtgtctgagagcaaagtgacctggttaaacaaaccagaatccctctacatggactcagagaaaagagattgagatgtaagtctcaactctgtccccaggaagttgtgtgaccctaggcctctcacctctgtgcctctgtctccttgttgcccaactactatctcagagatattgtgaggacaaattgagacagtgcacatgaactgtcttttaatgtgtaaagatctacatgaatgcaaaacatttcattatgaggtcagactaggataatgtccaactaaaaacaaacccttttcatcctggctggagaatgtggagaactaaaggtggccacaaattctttgacactcaagtcccccaagacctaagggttttatctcctccccttgaatatgggtggctctgattgctttatccaaaagtggaagtgacattgtgtcagtttcagatcctgatcttaagaggctgacagcttctacttgctgtcccttggaactcttgctatcggggaagccagacgccatttaaaagtctgcctatcctggccaggtgtggtggctcacacctgtaatcccagcactttgggagaccaaggcgggcggatcacttaaagtcaggagtccaagaccagactcgccaacatggtgaaaccgtatctctaataaaaatacaaaaattagctgggcatggtgcgggcacctgtagtcctagctatcaagaggctgagacaggagaaacacttgaacctgggaggtggaggttgcattgagctgagatcgtgccactgcactccaggctgggtgacagagcgagactccatctcaaaaaaaaaaaaaagaaaaaaaaaaatgtctgcctatcctgagactgccctgctgtgaggaagcccaagcagtcacgtggacagtgcctgaccagccccagctttcaagccatccaagcccagtcaccaaacatgagagagaagaagccttcaggtgattctggactccactaacatatgactgataccgcatgatacatcccaagtgagaactgccccataaatccagaacaggtaactggaacagagggcaagcctgatgaatgggcacacagactcagcccataccttccctggttctaatgttctcagggagcccggaccaaccctgggagcctcaggaacttaggtttccactggacagttctagaagggctatagaccaaatcaggtaactcaccagaccagccttggaatctatcaaatctaactgctgagctacccaatgcattccgatcctcatcacaattctttgact

SEQ ID NO: 426493 - DNA, 762 bp, Homo sapiens
agcttgaagttaaagactcctgctaaaaaccagtacgtttcattttgcagttactgggagggggcttgctgtggccctgtcaggaagagtagagctctggtccagctccgcgcagggagggaggctgtcaccatgccggcctgctgcagctgcagtgatgttttccagtatgagacgaacaaagtcactcggatccagagcatgaattatggcaccattaagtggttcttccacgtgatcatcttttcctacgtttgctttgctctggtgagtgacaagctgtaccagcggaaagagcctgtcatcagttctagtgcctgaccagccccagctttcaagccatccaagcccagtcaccaaacatgagagagaagaagccttcaggtgattctggactccactaacatatgactgataccgcatgatacatcccaagtgagaactgccccataaatccagaaaaccacattgctatcttaagtccctaagtttggggcttatttgttccacagcaacaggtaactggaacagagggcaagcctgatgaatgggcacacagactcagcccataccttccctggttctaatgttctcagggagcccggaccaaccctgggagcctcaggaacttaggtttccactggacagttctagaagggctatagaccaaatcaggtaactcaccagaccagccttggaatctatcaaatctaactgctgagctacccaatgcattccgatcctcatcacaattctttgact

SEQ ID NO: 426494 - DNA, 494 bp, Homo sapiens
ggcgagactttatgacttgagaagctgtcctatctatgagggtccatgttagggaatattaaagaataggattgggggcagtagctttcctgtagcaagtgctagctatgtgccagatactgggcaaaggagtctgcagacgtctctcatttcatcctcacaatccatgaggcaggtatgactattcttcccattatccagagagggaaaacaagtcacacggaagcaagtcacgcagcagagctaggattggaacagaagtgcctgcatcctccaacgcctgcatcccaacccgctgtgctatgcctcccgttgatgctttcccatgtctgccatttagctttgctctggtgagtgacaagctgtaccagcggaaagagcctgtcatcagttctgtgcacaccaaggtgaaggggatagcagaggtgaaagaggagatcgtggagaatggagtgaagaagttggtgcacagtgtctttgacaccgcagactac

SEQ ID NO: 426495 - DNA, 517 bp, Homo sapiens
gactggggctggagaacacttttccaagctctcacacagttgctcgtgggagagctcagttcctcaccacgtgaacctcgccctagaccacttgagtatccttggtatatggtggctggcttctcccagagcaagtgacccaagagagacagagcaagcaaccaagagtataaccaagatggaagccacagtctttggggggagaccccaacacttctgccatatgccattggtcacacagatcaaccctggtccagtgtgagaggccactgcccaggggtcccaggaggcagtgatcatttggggctttcatggaacctctccaccacactggctcactcctgggaaagagacagatctgttttcaatcgagatgtttgtttgtttgtttgcttttaattatgcacaggagaaacatcctgccaggtttaaacatcacttgtaccttccacaagactcagaatccacagtgtcccattttccgactaggagacatcttccgagaaacaggcgataa

SEQ ID NO: 426496 - DNA, 1510 bp, Homo sapiens
tggatttactgaggacctcccctgaggagggaccgttgggaccgcagattctgcagctggtgtggggttcaggtcagtttgtcaggatgctttaaggtgattagtaaatatacctcagcttagacttgggctgctccttctagcaaagcaggctccagtggggcctcatcatacaggatgacaagactggggccctgttcaccttgaacatgcccctgggccaagatggggcttcacccctccccagagtaagagctggggctgacagtcccaccctgtcattcctaatagcccaaacgcagaagcactgagcaagagagccctttcttgccaagccagtgctcttttggtatatggcatacagctccattggaggggacacatcactggctttatctggtggaaatgtacctttcccttaagttcctccttagtgccatcacagcaggtgaatgggtgccctacggggccctccttcccccaccaggaacagatggaacctgccacccaggatcctgatctgccctgcactgagcactcagtggataaacactcctccagcccagacacactcctcctcttgggcaggagcaatccagagttgttatttttcttagaaggagcctcttttccctctattttttaaattgaaatataatagctgcatcagccctgaaaagccaaattcaaccacatggctggagaatcatttgtcatggccccgccttctcttctgatactaatggagcttcatgacccacggtcagcccccaaaccaaagttgtcccaacagaggaggccagtgaggcagagacagagctctcccactctcagaccctcttttgtcttcattttcctctcccacttagcacatgtgtgcttgagggtggctgggaatgtgatatacagcaccctgatcctaacaggtgtgattgttacgtaagacgctgatactgggccttgtattgcttttaaagtttcctctgctcagcatcatttcatgccaaagtgctgctatgggctgctttgtgtgcacaaaattgctttttccacctcggaaatgcagctttccctagggggaggcctacaacaggacgaccattctgagccagtgagtctattgcatggtgttttgagaaagggaattttagtgacaccttatgccatttcaagaggagaaatgcaggctggcagagcaatttccagaaatggaatttgcctgcaaatagtataaacaacactaaatttactgtgccaggaaatcttcctgaactccttgaactcatacacacaggtatttgagtcctgaataaagtgttggaaagcactgcagatgcggtcacctgactgaccacctgggttttctattaccagtgaatttcttttattcaccttcccttgaccaagaaattgggtttcttttccctcagcctgcacttactcttctattaagaccagaaaataaaataattttccgttgagtcacaaactcatcatcttgtttggtttt

SEQ ID NO: 426497 - DNA, 546 bp, Homo sapiens
agtttttattttgcttaaaacatattttgcctaaaaatcattcttgaaattgtatttcttcacagatgaattttgataagaggcaacatgaagcaagaatccagcaaatggagaatgaaattcactatttgcaagaaaatctaaaaagtatggaggaaatccaaggccttacagatctccaacttcaggaagctgatgaagagaaggagagaattctggcccaactccgagagttagagaaaaaggtaggggagacttagaaaatgagacacataagtacctgctgccagtgtcctgcccactggcaactaggtcagctgagatgggtgtgatctgtagtcacctctggctgcattgctggcacagtgctgaacctgacctaggtgggacctggatgcatgtcattgaatcaagaagctaagaccatgtgttgtggtagatggaaacgagaattgagaatgtaaggagtgactttcaagttaattaggtggtacttaacaaatgatattgggaggagtttgactcctttgaaacctcttgtccagt

SEQ ID NO: 426498 - DNA, 4325 bp, Homo sapiens
cacttttatacttcccttcgtttgcatgtgttacttcttcagcctaggtctttccccttccgttcgttcttcaaaacccaggcaaaacacctcttcctctgagcagccttctcagaacttttctcccatgtggccagaggaaggagagacttctgtctatctcttctgctagaccccgaactctttggaggcagaggttatccacaagaggcttggcaaatgtttctcagtcatagttggactgtttgaaaaattaaaggttctatttgtccgtcagtttcatccgtgacatttaactttttataccaaagtcttagaatctaccatcattttttgggccattgataccactttaaccacagttaatttcagcttttggcaggaaagagaggaaacatcctgtgatgtttcagcactgcatttttttccccatctcattcaggagaatgaagtttctagattagaagacataatgcagcatttaaaatcaaagaagcgggaagaaaggtggatgagagcatccaagcggcagtcggagaaagaaatggaagaactgcatcataatattgatgatcttttgcaagagaagaaaagcttagagtgtgaagtagaagaattacatagaactgtccagaaacgtcaacagcaaaaggacttcattgatggaaatgttgagagtcttatgactgaactagaaatagaaaaatcactcaaacatcatgaagatattgtagatgaaattgagtgcattgagaagactcttctgaaacgtcgctcagagctcagggaagctgaccgactcctggcagaggctgagagtgaactttcatgcactaaagaaaagacaaaaaatgctgttgaaaagttcactgatgccaagagaagtttattgcaaactgagtcagatgctgaggaattagaaaggagagctcaggaaactgctgttaacctcgtcaaagctgatcagcagctaagatcgctccaggctgatgcaaaggatttggagcagcacaaaatcaagcaagaagaaatcttgaaagaaataaacaaaattgtagcagcaaaagactcagacttccaatgtttaagcaagaagaaggaaaaactgacagaagagcttcagaaactacagaaagacatagagatggcagaacgcaatgaggatcaccacctgcaggtccttaaagaatctgaggtgcttcttcaggccaaaagagccgagctggaaaagctgaaaagccaggtgacaagtcagcagcaggagatggctgtcttggacaggcagttagggcataaaaaggaggagctgcatctactccaaggaagcatggtccaggcaaaagctgacctccaggaagctctgagactgggagagactgaagtaactgagaagtgcaatcacattagggaagtaaaatctcttctggaagaactgagttttcagaaaggagaactaaatgttcagattagtgaaagaaaaactcaacttacacttataaagcaggaaattgaaaaagaggaagaaaatcttcaggttgttttaaggcagatgtctaaacataaaaccgaactaaagaatattctggacatgttgcaacttgaaaaccatgagctacaaggtttgaagctacaacatgaccaaagggtatctgaattagagaagactcaggtggcagtgctagaggagaaactggagttagagaatttgcagcagatatcccagcagcagaaaggggaaatagagtggcagaagcagctccttgagagggataaacgagaaatagaacgaatgactgctgagtcccgagctttacaatcgtgtgttgagtgtttgagcaaagaaaaggaagatctccaagagaaatgtgacatttgggaaaaaaagttggcacaaaccaaaagggttttagcagcagcagaagaaaatagcaaaatggagcaatcaaacttagaaaagttggaattgaatgtcagaaaactgcagcaggaactagaccaactaaacagagacaagttgtcactgcataacgacatttcagcaatgcaacagcagctccaggtataagaaaaacgagaagcagtaaactcactgcaggaggaactagctaatgtccaagaccatttgaacctagcaaaacaggacctgcttcacaccaccaagcatcaggatgtgttgctcagtgagcagacccgactccagaaggacatcagtgaatgggcaaataggtttgaagactgtcagaaagaagaggagacaaaacaacaacaacttcaagtgcttcagaatgagattgaagaaaacaagctcaaactagtccaacaagaaatgatgtttcagagactccagaaagagagagaaagtgaagaaagcaaattagaaaccagtaaagtgacactgaaggagcaacagcaccagctggaaaaggaattaacagaccagaaaagcaaactggaccaagtgctctcaaaggtgctggcagctgaagagcgtgttaggactctgcaggaagaggagaggtggtgtgagagcctggagaagacactctcccaaactaaacggcagctttcagaaagggagcagcaattggtggagaaatcaggtgagctgttggccctccagaaagaggcagattctatgagggcagacttcagccttctgcggaaccagttcttgacagaaagaaagaaagctgagaagcaggtggccagcctgaaggaagcacttaagatccagcggagccagctggagaaaaaccttcttgagcaaaaacaggagaacagctgcatacaaaaggaaatggcaacaattgaactggtagcccaggacaaccatgagcgggccaggcgcctgatgaaggagctcaaccagatgcagtatgagtacacggagctcaagaaacagatggcaaaccaaaaagatttggagagaagacaaatggaaatcagtgatgcaatgaggacacttaaatctgaggtgaaggatgaaatcagaaccagcttgaagaatcttaatcagtttcttccagaactaccagcagatctagaagctattttggaaagaaacgaaaacctagaaggagaattggaaagcttgaaagagaaccttccatttaccatgaatgagggaccttttgaagaaaaactgaacttttcccaagttcacataatggatgaacactggcgtggagaagcactccgggagaaactgcgtcaccgggaagaccgactcaaggcccaactccgacactgtatgtccaagcaagcagaagtattaattaaaggaaagcggcagacagagggcactttacacagtttgaggagacaagtagatgctttaggggaattggtcaccagcacctctgcagattcagcgtcatcacccagtctgtctcagctggagtcttccctcacagaggactctcaacttggacaaaatcaggaaaagaatgcctcagccagatgaggaatactgtcttgtgtaaatatattcaaggaaaacacctccactacctcactgacttcataattggaatgtcacatggtttttttaatcaagatgcagtgaactgagattctgaaactccactgtagtttactttgcctgtaccattaatgccaatgtttttataaatcacttgtacatagtacatatgggaatagttgcatatgggaatttaaaccaacatgtggctgagcctttttttttttaatcttcgtaacatgtttaaaaaaaaacagtgattttaactgcatatttgaacctacaaactggtaaatcttattaacaaaaagaatgtacttaaggccctctttatttatagtgtcgagttatttttgaattttgcttaaaatctatttttcatatgaaaataaaagataacaatcaaaaaaagcaacaaaaaaaaaaaacaacgaacacacaaaaccgaaaaacacaaacaaaaaaaacgaaaaaaggcacaccaaaggaaggggggggcccaaaaaacccccagcgggagccacacaacaagagacacccaccgatgttgtgaaaaaaggagacccacataaagagagagatcaaaaaaaaaagaagcagacgggcgccacagaaaaagacaggccgcgacgaaggaacaaaaagacgcgccacaccagagaaacttgggaagaggaacacaccactcgggggggggggcaacaacaggcgacacaacacccccgcagagaagaatgaggagcgcccgaggatataacaccacgatagggagatgaagggacgaacacacgactgtaagagccgcgcacgaaagaatagcgcgagggaatacgggaggcaatga

SEQ ID NO: 426499 - DNA, 1370 bp, Homo sapiens
gcctgggaaacatgccgagaccccgtctctactaaaaatacaaaaagtagctaggtgtggtggtgtacacctgtagtcccagctattcgggaggctgaggggggaggattgcttgagcctgggaggttgagactgcagtgagccaagattgtgccaccgccctccagcctgggtgacagagcaagaccctgtctttaaaaaaacaaaacaaaacaaaaatgtatattgccaagccaccagattcttcacttataaaattccagcattagcatttataatccagatcacttatgacttatttcagtaaatggcccttttctcatttgtggcttatttactctagttgccagttgggtgccactgaggtgcttcatgtaaattctcacttagtttttacatttctgagcagaaggtatttatctccatgtataaatgaggtaatggaggatcagatgttagccaacttgccctgtcatactggtaatactggaaatcagattggtaactagctttgtctgactccaaagagattgtcttctatagagtaattcaccttcaaggaactttatgcacatggcttttctaaatgaaagttgttccagttaaaatgccaataaaataatttattcagtagcttatagagtcttgagtatctgaaaaatcacaagtttttacagttctagtaatcatagtagttgatatttatagatctttaaatacatggcacatcatacagctcaattccaagtaagtctgaaattttatacaatgatatttgacaccaactcactgtttagatggcaaaccaaaaagatttggagagaagacaaatggaaatcagtgatgcaatgaggacacttaaatctgaggtgaaggatgaaatcagaaccagcttgaagaatcttaatcagtttcttccagaactaccagcagatctagaagctattttggaaagaaacgaaaacctagaaggagaattggaaagcttgaaagagaaccttccatttaccatgaatgagggaccttttgaagaaaaactgaacttttcccaagttcacataatggtaagggtttatcctgctattctctgggttcgtaggattgaccacctcccccagctaagctaaaacacagatgtgggggtgctggggtaggggagggaaaggctggttggcttccatttgtagcagcagatgattcatgatatctctattttccctctgagaaaggatgaacactggcgtggagaagcactccgggagaaactgcgtcaccgggaagaccgactcaaggttgccctttaaaacaaacaaaaaatcagtatgagatactgggcacattggggaggggaggggaaagttacatttacc

SEQ ID NO: 426500 - DNA, 814 bp, Homo sapiens
aaagttcttggaaaactgtaacctgagggatgatcatgattatcatattgttgttcttactgtgatcactgtgatttgagtggttttaagtatgtgagctcaaggttttcattaggcatttcacccttgcactccttgcctggcttttctgactcttgggggctaggatattagctcctgattttacctcacaactaaattatctccaggttagcactgagggctgtatggcctttgtcaaacttactcttcccttttctttaatacaggtgacaagtcagcagcaggagatggctgtcttggacaggcagttagggcataaaaaggaggagctgcatctactccaaggaagcatggtccaggcaaaagctgacctccaggaagctctgagactgggagagactgaagtaactgagaagtgcaatcacattagggaagtaaaatctcttctggaagaactgagttttcagaaaggagaactaaatgttcagattagtgaaagaaaaactcaacttacacttataaagcaggaaattgaaaaagaggaagaaaatcttcaggttgttttaaggcagatgtctaaacataaaaccgcttttctacagtaagcaagtatctctatgatcagaaaaaaagttaatatttaaatatctgtatttcaaaggccaaaaaattgttatataaatctcagtctgtatttcaaagtatttttaatttattttgatcaattttatataaaatgcttttagttgattcttttatgtagaagcaaatgctttggaaccagatctttgttaattaaatgtttttgtta

SEQ ID NO: 426501 - DNA, 970 bp, Homo sapiens
agcactcacagtctatcaattgaggtataaactggaacaatctcccagtgtttcaaggctcttaaaattcacacctgttgaactagtcagcccatttctactcctccagaaagggcaagtatgtacatcgcagcaatatttataatgacaaaatttggaaacaggctgggtgtggtggttcatgcctataatcccagctctttgggaggctgaggcaagaggattgcttgagcccaggagttcaaaactacctgggcaatgtatgagaccccatctctacaaaaatattcaaaaattagcgatgcacattgatgtgcacctatagtcccagctattcagaaggccaagcagggaggatcccttgagctcaggagatcaaggctgcagtgagctatgattatgccactatgcttcagcctgggaaacagaggaagaccctgttccaccacaccccccaaaaaattggaaacagatgaccaatttaaaagccatatttttaacctttaatgacatgcaaacatgaccatgagaagaatgaaaaaaagtaggtaaaaaatgaatatggagtatagtcccagtttattttaaaatgtgtgagagtgtgtgtgtgtgtgcgcgcgtgctcacgcgcacacacatgcattcttagaaggaaatacatcaaaatgctattgtaaaagtgatttggggtggtgaaataatggtgggttttcatttttttctcttatgctttttttttgtattttccagcttttctacagtaagcaagtatctctatgatcagaaaaaaagttaatatttaaatatctgtatttcaaaggccaaaaaattgttatataaatctcagtctgtatttcaaagtatttttaatttattttgatcaattttatataaaatgcttttagttgattcttttatgtagaagcaaatgctttggaaccagatctttgttaattaaatgtttttgtta

SEQ ID NO: 426502 - DNA, 393 bp, Homo sapiens
atttcttatttcatgagaatgtcatttctttagaaaaacgagaagcagtaaactcactgcaggaggaactagctaatgtccaagaccatttgaacctagcaaaacaggacctgcttcacaccaccaagcatcaggatgtgttgctcagtgagcagacccgactccagaaggacatcagtgaatgggcaaataggtttgaagactgtcagaaagaagaggagacaaaacaacaacaacttcaagtgcttcagaatgagattgaagaaaacaagctcaaactagtccaacaagaaatgatgtttcagagactccagaaagagagagaaagcaaagaccccaaaagagcaaagaccccaaaagagcaaagaccccaaaagagcaaagacccaaaag

SEQ ID NO: 426503 - DNA, 5903 bp, Homo sapiens
  misc_feature (2)..(3): n is a, c, g, or t
gnnacgaggctcggaggcgcttgcaaaaatgtggctgtcagagagggaagtgcacatgaatttgaagacagcattagaaagcgttccgcccacagtttctctgttctcaacggctcagttttaacaggataaattttaagttaagtcccatatgaaggctcaaaagagcggtaaagaacaacagcttgacattatgaacaagcagtaccaacaacttgaaagtcgtttggatgagatactttctagaattgctaaggaaacggaagagattaaggaccttgaagaacagcttactgaaggccagatagcagcaaatgaagccctgaagaaggatttagaaggtgttatcagtgggttgcaagaatacctggggaccattaaaggccaggcaactcaggcccagaatgagtgcaggaagctgcgggatgagaaagagacattgttgcagagattgacagaagtcgagcaggagagagaccagctggaaatagttgccatggatgcagaaaatatgaggaaggagcttgcagagctagaaagtgccctccaagagcagcatgaggtgaatgcatctttgcagcagacccagggagatctcagtgcctatgaagctgagctagaggctcggctaaacctaagggatgctgaagccaaccagctcaaggaagagttggaaaaagtaacaagacttacccagttagaacaatcagcccttcaagcagaacttgagaaggaaaggcaagccctcaagaatgcccttggaaaagcccagttctcagaagaaaaggagcaagagaacagtgagctccatgcaaaacttaaacacttgcaggatgacaataatctgttaaaacagcaacttaaagatttccagaatcaccttaaccatgtggttgatggtttggttcgtccagaagaagtggcagctcgtgtggatgagctaagaagaaaactgaaattaggaactggggaaatgaacatccatagtccttcagatgtcttagggaaaagtcttgctgatttacagaaacaattcagtgaaattcttgcacgctccaagtgggaaagagatgaagcacaagttagagagagaaaactccaagaagaaatggctctgcagcaagagaaactggcaactggacaagaagagttcaggcaggcctgtgagagagccctggaagcaagaatgaattttgataagaggcaacatgaagcaagaatccagcaaatggagaatgaaattcactatttgcaagaaaatctaaaaagtatggaggaaatccaaggccttacagatctccaacttcaggaagctgatgaagagaaggagagaattctggcccaactccgagagttagagaaaaagaagaaacttgaagatgccaaatctcaggagcaagtttttggtttagataaagaactgaagaaactaaagaaagccgtggccacctctgataagctagccacagctgagctcaccattgccaaagaccagctgaagtcccttcatggaactgttatgaaaattaaccaggagcgagcagaggagttgcaggaagcagagaggttcagcagaaaggcagcacaagcagccagagatctcacccgagcagaagctgagatcgaactcctgcagaatctcctcaggcagaagggggagcagtttcgacttgagatggagaaaacaggtgtaggtactggagcaaactcacaggtcctagaaattgagaaactgaatgagacaatggaacgacaaaggacagagattgcaaggctgcagaatgtactagacctcactggaagtgacaacaaaggaggctttgaaaatgttttagaagaaattgctgaacttcgacgtgaagtttcttatcagaatgattacataagcagcatggcagatcctttcaaaagacgaggctattggtactttatgccaccaccaccatcatcaaaagtttccagccatagttcccaggccaccaaggactctggtgttggccttaagtactcagcctcaactcctgttagaaaaccacgccctgggcagcaggatgggaaggaaggcagtcaacctccccctgcctcaggatactgggtttattctcccatcaggagtgggttacataaactgtttccaagtagagatgcagacagtggaggagatagtcaggaagagagtgagctggatgaccaagaagaacccccatttgtgcctcctcctggatacatgatgtatactgtgcttcctgatggttctcctgtaccccagggcatggccctgtatgcaccacctcctcccttgccaaacaatagccgacctctcacccctggcactgttgtttatggcccacctcctgctggggcccccatggtgtatgggcctccaccccccaacttctccatccccttcatccctatgggtgtgctgcattgcaacgtccctgaacaccataacttagagaatgaagtttctagattagaagacataatgcagcatttaaaatcaaagaagcgggaagaaaggtggatgagagcatccaagcggcagtcggagaaagaaatggaagaactgcatcataatattgatgatcttttgcaagagaagaaaagcttagagtgtgaagtagaagaattacatagaactgtccagaaacgtcaacagcaaaaggacttcattgatggaaatgttgagagtcttatgactgaactagaaatagaaaaatcactcaaacatcatgaagatattgtagatgaaattgagtgcattgagaagactcttctgaaacgtcgctcagagctcagggaagctgaccgactcctggcagaggctgagagtgaactttcatgcactaaagaaaagacaaaaaatgctgttgaaaagttcactgatgccaagagaagtttattgcaaactgagtcagatgctgaggaattagaaaggagagctcaggaaactgctgttaacctcgtcaaagctgatcagcagctaagatcgctccaggctgatgcaaaggatttggagcagcacaaaatcaagcaagaagaaatcttgaaagaaataaacaaaattgtagcagcaaaagactcagacttccaatgtttaagcaagaagaaggaaaaactgacagaagagcttcagaaactacagaaagacatagagatggcagaacgcaatgaggatcaccacctgcaggtccttaaagaatctgaggtgcttcttcaggccaaaagagccgagctggaaaagctgaaaagccaggtgacaagtcagcagcaggagatggctgtcttggacaggcagttagggcataaaaaggaggagctgcatctactccaaggaagcatggtccaggcaaaagctgacctccaggaagctctgagactgggagagactgaagtaactgagaagtgcaatcacattagggaagtaaaatctcttctggaagaactgagttttcagaaaggagaactaaatgttcagattagtgaaagaaaaactcaacttacacttataaagcaggaaattgaaaaagaggaagaaaatcttcaggttgttttaaggcagatgtctaaacataaaaccgaactaaagaatattctggacatgttgcaacttgaaaaccatgagctacaaggtttgaagctacaacatgaccaaagggtatctgaattagagaagactcaggtggcagtgctagaggagaaactggagttagagaatttgcagcagatatcccagcagcagaaaggggaaatagagtggcagaagcagctccttgagagggataaacgagaaatagaacgaatgactgctgagtcccgagctttacaatcgtgtgttgagtgtttgagcaaagaaaaggaagatctccaagagaaatgtgacatttgggaaaaaaagttggcacaaaccaaaagggttttagcagcagcagaagaaaatagcaaaatggagcaatcaaacttagaaaagttggaattgaatgtcagaaaactgcagcaggaactagaccaactaaacagagacaagttgtcactgcataacgacatttcagcaatgcaacagcagctccaggtataagaaaaacgagaagcagtaaactcactgcaggaggaactagctaatgtccaagaccatttgaacctagcaaaacaggacctgcttcacaccaccaagcatcaggatgtgttgctcagtgagcagacccgactccagaaggacatcagtgaatgggcaaataggtttgaagactgtcagaaagaagaggagacaaaacaacaacaacttcaagtgcttcagaatgagattgaagaaaacaagctcaaactagtccaacaagaaatgatgtttcagagactccagaaagagagagaaagtgaagaaagcaaattagaaaccagtaaagtgacactgaaggagcaacagcaccagctggaaaaggaattaacagaccagaaaagcaaactggaccaagtgctctcaaaggtgctggcagctgaagagcgtgttaggactctgcaggaagaggagaggtggtgtgagagcctggagaagacactctcccaaactaaacggcagctttcagaaagggagcagcaattggtggagaaatcaggtgagctgttggccctccagaaagaggcagattctatgagggcagacttcagccttctgcggaaccagttcttgacagaaagaaagaaagctgagaagcaggtggccagcctgaaggaagcacttaagatccagcggagccagctggagaaaaaccttcttgagcaaaaacaggagaacagctgcatacaaaaggaaatggcaacaattgaactggtagcccaggacaaccatgagcgggccaggcgcctgatgaaggagctcaaccagatgcagtatgagtacacggagctcaagaaacagatggcaaaccaaaaagatttggagagaagacaaatggaaatcagtgatgcaatgaggacacttaaatctgaggtgaaggatgaaatcagaaccagcttgaagaatcttaatcagtttcttccagaactaccagcagatctagaagctattttggaaagaaacgaaaacctagaaggagaattggaaagcttgaaagagaaccttccatttaccatgaatgagggaccttttgaagaaaaactgaacttttcccaagttcacataatggatgaacactggcgtggagaagcactccgggagaaactgcgtcaccgggaagaccgactcaaggcccaactccgacactgtatgtccaagcaagcagaagtattaattaaaggaaagcggcagacagagggcactttacacagtttgaggagacaagtagatgctttaggggaattggtcaccagcacctctgcagattcagcgtcatcacccagtctgtctcagctggagtcttccctcacagaggactctcaacttggacaaaatcaggaaaagaatgcctcagccagatgaggaatactgtcttgtgtaaatatattcaaggaaaacacctccactacctcactgacttcataattggaatgtcacatggtttttttaatcaagatgcagtgaactgagattctgaaactccactgtagtttactttgcctgtaccattaatgccaatgtttttataaatcacttgtacatagtacatatgggaatagttgcatatgggaatttaaaccaacatgtggctgagcctttttttttttaatcttcgtaacatgtttaaaaaaaaacagtgattttaactgcatatttgaacctacaaactggtaaatcttattaacaaaaagaatgtacttaaggccctctttatttatagtgtcgagttatttttgaattttgcttaaaatctatttttcatatgaaaataaaagataacaatcaa

SEQ ID NO: 426504 - DNA, 5491 bp, Homo sapiens
  misc_feature (2)..(3): n is a, c, g, or t
gnnacgaggctcggaggcgcttgcaaaaatgtggctgtcagagagggaagtgcacatgaatttgaagacagcattagaaagcgttccgcccacagtttctctgttctcaacggctcagttttaacaggataaattttaagttaagtcccatatgaaggctcaaaagagcggtaaagaacaacagcttgacattatgaacaagcagtaccaacaacttgaaagtcgtttggatgagatactttctagaattgctaaggaaacggaagagattaaggaccttgaagaacagcttactgaaggccagatagcagcaaatgaagccctgaagaaggatttagaaggtgttatcagtgggttgcaagaatacctggggaccattaaaggccaggcaactcaggcccagaatgagtgcaggaagctgcgggatgagaaagagacattgttgcagagattgacagaagtcgagcaggagagagaccagctggaaatagttgccatggatgcagaaaatatgaggaaggagcttgcagagctagaaagtgccctccaagagcagcatgaggtgaatgcatctttgcagcagacccagggagatctcagtgcctatgaagctgagctagaggctcggctaaacctaagggatgctgaagccaaccagctcaaggaagagttggaaaaagtaacaagacttacccagttagaacaatcagcccttcaagcagaacttgagaaggaaaggcaagccctcaagaatgcccttggaaaagcccagttctcagaagaaaaggagcaagagaacagtgagctccatgcaaaacttaaacacttgcaggatgacaataatctgttaaaacagcaacttaaagatttccagaatcaccttaaccatgtggttgatggtttggttcgtccagaagaagtggcagctcgtgtggatgagctaagaagaaaactgaaattaggaactggggaaatgaacatccatagtccttcagatgtcttagggaaaagtcttgctgatttacagaaacaattcagtgaaattcttgcacgctccaagtgggaaagagatgaagcacaagttagagagagaaaactccaagaagaaatggctctgcagcaagagaaactggcaactggacaagaagagttcaggcaggcctgtgagagagccctggaagcaagaatgaattttgataagaggcaacatgaagcaagaatccagcaaatggagaatgaaattcactatttgcaagaaaatctaaaaagtatggaggaaatccaaggccttacagatctccaacttcaggaagctgatgaagagaaggagagaattctggcccaactccgagagttagagaaaaagaagaaacttgaagatgccaaatctcaggagcaagtttttggtttagataaagaactgaagaaactaaagaaagccgtggccacctctgataagctagccacagctgagctcaccattgccaaagaccagctgaagtcccttcatggaactgttatgaaaattaaccaggagcgagcagaggagttgcaggaagcagagaggttcagcagaaaggcagcacaagcagccagagatctcacccgagcagaagctgagatcgaactcctgcagaatctcctcaggcagaagggggagcagtttcgacttgagatggagaaaacaggtgtaggtactggagcaaactcacaggtcctagaaattgagaaactgaatgagacaatggaacgacaaaggacagagattgcaaggctgcagaatgtactagacctcactggaagtgacaacaaaggaggctttgaaaatgttttagaagaaattgctgaacttcgacgtgaagtttcttatcagaatgattacataagcagcatggcagatcctttcaaaagacgaggctattggtactttatgccaccaccaccatcatcaaaagtttccagccatagttcccaggccaccaaggactctggtgttggccttaagtactcagcctcaactcctgttagaaaaccacgccctgggcagcaggatgggaaggaaggcagtcaacctccccctgcctcaggatactgggtttattctcccatcaggagtgggttacataaactgtttccaagtagagatgcagacagtggaggagatagtcaggaagagagtgagctggatgaccaagaagaacccccatttgtgcctcctcctggatacatgatgtatactgtgcttcctgatggttctcctgtaccccagggcatggccctgtatgcaccacctcctcccttgccaaacaatagccgacctctcacccctggcactgttgtttatggcccacctcctgctggggcccccatggtgtatgggcctccaccccccaacttctccatccccttcatccctatgggtgtgctgcattgcaacgtccctgaacaccataacttagagaatgaagtttctagattagaagacataatgcagcatttaaaatcaaagaagcgggaagaaaggtggatgagagcatccaagcggcagtcggagaaagaaatggaagaactgcatcataatattgatgatcttttgcaagagaagaaaagcttagagtgtgaagtagaagaattacatagaactgtccagaaacgtcaacagcaaaaggacttcattgatggaaatgttgagagtcttatgactgaactagaaatagaaaaatcactcaaacatcatgaagatattgtagatgaaattgagtgcattgagaagactcttctgaaacgtcgctcagagctcagggaagctgaccgactcctggcagaggctgagagtgaactttcatgcactaaagaaaagacaaaaaatgctgttgaaaagttcactgatgccaagagaagtttattgcaaactgagtcagatgctgaggaattagaaaggagagctcaggaaactgctgttaacctcgtcaaagctgatcagcagctaagatcgctccaggctgatgcaaaggatttggagcagcacaaaatcaagcaagaagaaatcttgaaagaaataaacaaaattgtagcagcaaaagactcagacttccaatgtttaagcaagaagaaggaaaaactgacagaagagcttcagaaactacagaaagacatagagatggcagaacgcaatgaggatcaccacctgcaggtccttaaagaatctgaggtgcttcttcaggccaaaagagccgagctggaaaagctgaaaagccaggtgacaagtcagcagcaggagatggctgtcttggacaggcagttagggcataaaaaggaggagctgcatctactccaaggaagcatggtccaggcaaaagctgacctccaggaagctctgagactgggagagactgaagtaactgagaagtgcaatcacattagggaagtaaaatctcttctggaagaactgagttttcagaaaggagaactaaatgttcagattagtgaaagaaaaactcaacttacacttataaagcaggaaattgaaaaagaggaagaaaatcttcaggttgttttaaggcagatgtctaaacataaaaccgaactaaagaatattctggacatgttgcaacttgaaaaccatgagctacaaggtttgaagctacaacatgaccaaagggtatctgaattagagaagactcaggtggcagtgctagaggagaaactggagttagagaatttgcagcagatatcccagcagcagaaaggggaaatagagtggcagaagcagctccttgagagggataaacgagaaatagaacgaatgactgctgagtcccgagctttacaatcgtgtgttgagtgtttgagcaaagaaaaggaagatctccaagagaaatgtgacatttgggaaaaaaagttggcacaaaccaaaagggttttagcagcagcagaagaaaatagcaaaatggagcaatcaaacttagaaaagttggaattgaatgtcagaaaactgcagcaggaactagaccaactaaacagagacaagttgtcactgcataacgacatttcagcaatgcaacagcagctccaggtataagaaaaacgagaagcagtaaactcactgcaggaggaactagctaatgtccaagaccatttgaacctagcaaaacaggacctgcttcacaccaccaagcatcaggatgtgttgctcagtgagcagacccgactccagaaggacatcagtgaatgggcaaataggtttgaagactgtcagaaagaagaggagacaaaacaacaacaacttcaagtgcttcagaatgagattgaagaaaacaagctcaaactagtccaacaagaaatgatgtttcagagactccagaaagagagagaaagtgaagaaagcaaattagaaaccagtaaagtgacactgaaggagcaacagcaccagctggaaaaggaattaacagaccagaaaagcaaactggaccaagtgctctcaaaggtgctggcagctgaagagcgtgttaggactctgcaggaagaggagaggtggtgtgagagcctggagaagacactctcccaaactaaacggcagctttcagaaagggagcagcaattggtggagaaatcaggtgagctgttggccctccagaaagaggcagattctatgagggcagacttcagccttctgcggaaccagttcttgacagaaagaaagaaagctgagaagcaggtggccagcctgaaggaagcacttaagatccagcggagccagctggagaaaaaccttcttgagcaaaaacaggagaacagctgcatacaaaaggaaatggcaacaattgaactggtagcccaggacaaccatgagcgggccaggcgcctgatgaaggagctcaaccagatgcagtatgagtacacggagctcaagaaacagatggcaaaccaaaaagatttggagagaagacaaatggaaatcagtgatgcaatgaggacacttaaatctgaggtgaaggatgaaatcagaaccagcttgaagaatcttaatcagtttcttccagaactaccagcagatctagaagctattttggaaagaaacgaaaacctagaaggagaattggaaagcttgaaagagaaccttccatttaccatgaatgagggaccttttgaagaaaaactgaacttttcccaagttcacataatggtaagggtttatcctgctattctctgggttcgtaggattgaccacctcccccagctaagctaaaacacagatgtgggggtgctggggtaggggagggaaaggctggttggcttccatttgtagcagcagatgattcatgatatctctattttccctctgagaaaggatgaacactggcgtggagaagcactccgggagaaactgcgtcaccgggaagaccgactcaaggttgccctttaaaacaaacaaaaaatcagtatgagatactgggcacattggggaggggaggggaaagttacatttacc

SEQ ID NO: 426505 - DNA, 4458 bp, Homo sapiens
  misc_feature (2)..(3): n is a, c, g, or t
gnnacgaggctcggaggcgcttgcaaaaatgtggctgtcagagagggaagtgcacatgaatttgaagacagcattagaaagcgttccgcccacagtttctctgttctcaacggctcagttttaacaggataaattttaagttaagtcccatatgaaggctcaaaagagcggtaaagaacaacagcttgacattatgaacaagcagtaccaacaacttgaaagtcgtttggatgagatactttctagaattgctaaggaaacggaagagattaaggaccttgaagaacagcttactgaaggccagatagcagcaaatgaagccctgaagaaggatttagaaggtgttatcagtgggttgcaagaatacctggggaccattaaaggccaggcaactcaggcccagaatgagtgcaggaagctgcgggatgagaaagagacattgttgcagagattgacagaagtcgagcaggagagagaccagctggaaatagttgccatggatgcagaaaatatgaggaaggagcttgcagagctagaaagtgccctccaagagcagcatgaggtgaatgcatctttgcagcagacccagggagatctcagtgcctatgaagctgagctagaggctcggctaaacctaagggatgctgaagccaaccagctcaaggaagagttggaaaaagtaacaagacttacccagttagaacaatcagcccttcaagcagaacttgagaaggaaaggcaagccctcaagaatgcccttggaaaagcccagttctcagaagaaaaggagcaagagaacagtgagctccatgcaaaacttaaacacttgcaggatgacaataatctgttaaaacagcaacttaaagatttccagaatcaccttaaccatgtggttgatggtttggttcgtccagaagaagtggcagctcgtgtggatgagctaagaagaaaactgaaattaggaactggggaaatgaacatccatagtccttcagatgtcttagggaaaagtcttgctgatttacagaaacaattcagtgaaattcttgcacgctccaagtgggaaagagatgaagcacaagttagagagagaaaactccaagaagaaatggctctgcagcaagagaaactggcaactggacaagaagagttcaggcaggcctgtgagagagccctggaagcaagaatgaattttgataagaggcaacatgaagcaagaatccagcaaatggagaatgaaattcactatttgcaagaaaatctaaaaagtatggaggaaatccaaggccttacagatctccaacttcaggaagctgatgaagagaaggagagaattctggcccaactccgagagttagagaaaaagaagaaacttgaagatgccaaatctcaggagcaagtttttggtttagataaagaactgaagaaactaaagaaagccgtggccacctctgataagctagccacagctgagctcaccattgccaaagaccagctgaagtcccttcatggaactgttatgaaaattaaccaggagcgagcagaggagttgcaggaagcagagaggttcagcagaaaggcagcacaagcagccagagatctcacccgagcagaagctgagatcgaactcctgcagaatctcctcaggcagaagggggagcagtttcgacttgagatggagaaaacaggtgtaggtactggagcaaactcacaggtcctagaaattgagaaactgaatgagacaatggaacgacaaaggacagagattgcaaggctgcagaatgtactagacctcactggaagtgacaacaaaggaggctttgaaaatgttttagaagaaattgctgaacttcgacgtgaagtttcttatcagaatgattacataagcagcatggcagatcctttcaaaagacgaggctattggtactttatgccaccaccaccatcatcaaaagtttccagccatagttcccaggccaccaaggactctggtgttggccttaagtactcagcctcaactcctgttagaaaaccacgccctgggcagcaggatgggaaggaaggcagtcaacctccccctgcctcaggatactgggtttattctcccatcaggagtgggttacataaactgtttccaagtagagatgcagacagtggaggagatagtcaggaagagagtgagctggatgaccaagaagaacccccatttgtgcctcctcctggatacatgatgtatactgtgcttcctgatggttctcctgtaccccagggcatggccctgtatgcaccacctcctcccttgccaaacaatagccgacctctcacccctggcactgttgtttatggcccacctcctgctggggcccccatggtgtatgggcctccaccccccaacttctccatccccttcatccctatgggtgtgctgcattgcaacgtccctgaacaccataacttagagaatgaagtttctagattagaagacataatgcagcatttaaaatcaaagaagcgggaagaaaggtggatgagagcatccaagcggcagtcggagaaagaaatggaagaactgcatcataatattgatgatcttttgcaagagaagaaaagcttagagtgtgaagtagaagaattacatagaactgtccagaaacgtcaacagcaaaaggacttcattgatggaaatgttgagagtcttatgactgaactagaaatagaaaaatcactcaaacatcatgaagatattgtagatgaaattgagtgcattgagaagactcttctgaaacgtcgctcagagctcagggaagctgaccgactcctggcagaggctgagagtgaactttcatgcactaaagaaaagacaaaaaatgctgttgaaaagttcactgatgccaagagaagtttattgcaaactgagtcagatgctgaggaattagaaaggagagctcaggaaactgctgttaacctcgtcaaagctgatcagcagctaagatcgctccaggctgatgcaaaggatttggagcagcacaaaatcaagcaagaagaaatcttgaaagaaataaacaaaattgtagcagcaaaagactcagacttccaatgtttaagcaagaagaaggaaaaactgacagaagagcttcagaaactacagaaagacatagagatggcagaacgcaatgaggatcaccacctgcaggtccttaaagaatctgaggtgcttcttcaggccaaaagagccgagctggaaaagctgaaaagccaggtgacaagtcagcagcaggagatggctgtcttggacaggcagttagggcataaaaaggaggagctgcatctactccaaggaagcatggtccaggcaaaagctgacctccaggaagctctgagactgggagagactgaagtaactgagaagtgcaatcacattagggaagtaaaatctcttctggaagaactgagttttcagaaaggagaactaaatgttcagattagtgaaagaaaaactcaacttacacttataaagcaggaaattgaaaaagaggaagaaaatcttcaggttgttttaaggcagatgtctaaacataaaaccgaactaaagaatattctggacatgttgcaacttgaaaaccatgagctacaaggtttgaagctacaacatgaccaaagggtatctgaattagagaagactcaggtggcagtgctagaggagaaactggagttagagaatttgcagcagatatcccagcagcagaaaggggaaatagagtggcagaagcagctccttgagagggataaacgagaaatagaacgaatgactgctgagtcccgagctttacaatcgtgtgttgagtgtttgagcaaagaaaaggaagatctccaagagaaatgtgacatttgggaaaaaaagttggcacaaaccaaaagggttttagcagcagcagaagaaaatagcaaaatggagcaatcaaacttagaaaagttggaattgaatgtcagaaaactgcagcaggaactagaccaactaaacagagacaagttgtcactgcataacgacatttcagcaatgcaacagcagctccaggtataaggcagcaaaacagtgaaagtgtgtgatttccttgcccttcgttagattctttgatttttcttacgacaagtaattcctgctaatgagcatggtgtttctttctaaaattagattgtggtaatgtttgcacaacttggaatatactaaaagcctttgaattgtacactttaaataggacatgatatgtgaattttatctcaataaagtcagttaaaaaaaaaaacctaattcatgttccttagagaacaattttaaaacagcaaaaagaaataaaaattgctgttgacctcactcctcatagattcctagtaacagtttggtgaatatccttccagatttttcctaggggtgtgtctagtttgaaaaacaaaaacaaa

SEQ ID NO: 426506 - DNA, 3804 bp, Homo sapiens
  misc_feature (2)..(3): n is a, c, g, or t
gnnacgaggctcggaggcgcttgcaaaaatgtggctgtcagagagggaagtgcacatgaatttgaagacagcattagaaagcgttccgcccacagtttctctgttctcaacggctcagttttaacaggataaattttaagttaagtcccatatgaaggctcaaaagagcggtaaagaacaacagcttgacattatgaacaagcagtaccaacaacttgaaagtcgtttggatgagatactttctagaattgctaaggaaacggaagagattaaggaccttgaagaacagcttactgaaggccagatagcagcaaatgaagccctgaagaaggatttagaaggtgttatcagtgggttgcaagaatacctggggaccattaaaggccaggcaactcaggcccagaatgagtgcaggaagctgcgggatgagaaagagacattgttgcagagattgacagaagtcgagcaggagagagaccagctggaaatagttgccatggatgcagaaaatatgaggaaggagcttgcagagctagaaagtgccctccaagagcagcatgaggtgaatgcatctttgcagcagacccagggagatctcagtgcctatgaagctgagctagaggctcggctaaacctaagggatgctgaagccaaccagctcaaggaagagttggaaaaagtaacaagacttacccagttagaacaatcagcccttcaagcagaacttgagaaggaaaggcaagccctcaagaatgcccttggaaaagcccagttctcagaagaaaaggagcaagagaacagtgagctccatgcaaaacttaaacacttgcaggatgacaataatctgttaaaacagcaacttaaagatttccagaatcaccttaaccatgtggttgatggtttggttcgtccagaagaagtggcagctcgtgtggatgagctaagaagaaaactgaaattaggaactggggaaatgaacatccatagtccttcagatgtcttagggaaaagtcttgctgatttacagaaacaattcagtgaaattcttgcacgctccaagtgggaaagagatgaagcacaagttagagagagaaaactccaagaagaaatggctctgcagcaagagaaactggcaactggacaagaagagttcaggcaggcctgtgagagagccctggaagcaagaatgaattttgataagaggcaacatgaagcaagaatccagcaaatggagaatgaaattcactatttgcaagaaaatctaaaaagtatggaggaaatccaaggccttacagatctccaacttcaggaagctgatgaagagaaggagagaattctggcccaactccgagagttagagaaaaagaagaaacttgaagatgccaaatctcaggagcaagtttttggtttagataaagaactgaagaaactaaagaaagccgtggccacctctgataagctagccacagctgagctcaccattgccaaagaccagctgaagtcccttcatggaactgttatgaaaattaaccaggagcgagcagaggagttgcaggaagcagagaggttcagcagaaaggcagcacaagcagccagagatctcacccgagcagaagctgagatcgaactcctgcagaatctcctcaggcagaagggggagcagtttcgacttgagatggagaaaacaggtgtaggtactggagcaaactcacaggtcctagaaattgagaaactgaatgagacaatggaacgacaaaggacagagattgcaaggctgcagaatgtactagacctcactggaagtgacaacaaaggaggctttgaaaatgttttagaagaaattgctgaacttcgacgtgaagtttcttatcagaatgattacataagcagcatggcagatcctttcaaaagacgaggctattggtactttatgccaccaccaccatcatcaaaagtttccagccatagttcccaggccaccaaggactctggtgttggccttaagtactcagcctcaactcctgttagaaaaccacgccctgggcagcaggatgggaaggaaggcagtcaacctccccctgcctcaggatactgggtttattctcccatcaggagtgggttacataaactgtttccaagtagagatgcagacagtggaggagatagtcaggaagagagtgagctggatgaccaagaagaacccccatttgtgcctcctcctggatacatgatgtatactgtgcttcctgatggttctcctgtaccccagggcatggccctgtatgcaccacctcctcccttgccaaacaatagccgacctctcacccctggcactgttgtttatggcccacctcctgctggggcccccatggtgtatgggcctccaccccccaacttctccatccccttcatccctatgggtgtgctgcattgcaacgtccctgaacaccataacttagagaatgaagtttctagattagaagacataatgcagcatttaaaatcaaagaagcgggaagaaaggtggatgagagcatccaagcggcagtcggagaaagaaatggaagaactgcatcataatattgatgatcttttgcaagagaagaaaagcttagagtgtgaagtagaagaattacatagaactgtccagaaacgtcaacagcaaaaggacttcattgatggaaatgttgagagtcttatgactgaactagaaatagaaaaatcactcaaacatcatgaagatattgtagatgaaattgagtgcattgagaagactcttctgaaacgtcgctcagagctcagggaagctgaccgactcctggcagaggctgagagtgaactttcatgcactaaagaaaagacaaaaaatgctgttgaaaagttcactgatgccaagagaagtttattgcaaactgagtcagatgctgaggaattagaaaggagagctcaggaaactgctgttaacctcgtcaaagctgatcagcagctaagatcgctccaggctgatgcaaaggatttggagcagcacaaaatcaagcaagaagaaatcttgaaagaaataaacaaaattgtagcagcaaaagactcagacttccaatgtttaagcaagaagaaggaaaaactgacagaagagcttcagaaactacagaaagacatagagatggcagaacgcaatgaggatcaccacctgcaggtccttaaagaatctgaggtgcttcttcaggccaaaagagccgagctggaaaagctgaaaagccaggtgacaagtcagcagcaggagatggctgtcttggacaggcagttagggcataaaaaggaggagctgcatctactccaaggaagcatggtccaggcaaaagctgacctccaggaagctctgagactgggagagactgaagtaactgagaagtgcaatcacattagggaagtaaaatctcttctggaagaactgagttttcagaaaggagaactaaatgttcagattagtgaaagaaaaactcaacttacacttataaagcaggaaattgaaaaagaggaagaaaatcttcaggttgttttaaggcagatgtctaaacataaaaccgcttttctacagtaagcaagtatctctatgatcagaaaaaaagttaatatttaaatatctgtatttcaaaggccaaaaaattgttatataaatctcagtctgtatttcaaagtatttttaatttattttgatcaattttatataaaatgcttttagttgattcttttatgtagaagcaaatgctttggaaccagatctttgttaattaaatgtttttgtta

SEQ ID NO: 426507 - DNA, 6005 bp, Homo sapiens
  misc_feature (2)..(3): n is a, c, g, or t
gnnacgaggctcggaggcgcttgcaaaaatgtggctgtcagagagggaagtgcacatgaatttgaagacagcattagaaagcgttccgcccacagtttctctgttctcaacggctcagttttaacaggataaattttaagttaagtcccatatgaaggctcaaaagagcggtaaagaacaacagcttgacattatgaacaagcagtaccaacaacttgaaagtcgtttggatgagatactttctagaattgctaaggaaacggaagagattaaggaccttgaagaacagcttactgaaggccagatagcagcaaatgaagccctgaagaaggatttagaaggtgttatcagtgggttgcaagaatacctggggaccattaaaggccaggcaactcaggcccagaatgagtgcaggaagctgcgggatgagaaagagacattgttgcagagattgacagaagtcgagcaggagagagaccagctggaaatagttgccatggatgcagaaaatatgaggaaggagcttgcagagctagaaagtgccctccaagagcagcatgaggtgaatgcatctttgcagcagacccagggagatctcagtgcctatgaagctgagctagaggctcggctaaacctaagggatgctgaagccaaccagctcaaggaagagttggaaaaagtaacaagacttacccagttagaacaatcagcccttcaagcagaacttgagaaggaaaggcaagccctcaagaatgcccttggaaaagcccagttctcagaagaaaaggagcaagagaacagtgagctccatgcaaaacttaaacacttgcaggatgacaataatctgttaaaacagcaacttaaagatttccagaatcaccttaaccatgtggttgatggtttggttcgtccagaagaagtggcagctcgtgtggatgagctaagaagaaaactgaaattaggaactggggaaatgaacatccatagtccttcagatgtcttagggaaaagtcttgctgatttacagaaacaattcagtgaaattcttgcacgctccaagtgggaaagagatgaagcacaagttagagagagaaaactccaagaagaaatggctctgcagcaagagaaactggcaactggacaagaagagttcaggcaggcctgtgagagagccctggaagcaagaatgaattttgataagaggcaacatgaagcaagaatccagcaaatggagaatgaaattcactatttgcaagaaaatctaaaaagtatggaggaaatccaaggccttacagatctccaacttcaggaagctgatgaagagaaggagagaattctggcccaactccgagagttagagaaaaagaagaaacttgaagatgccaaatctcaggagcaagtttttggtttagataaagaactgaagaaactaaagaaagccgtggccacctctgataagctagccacagctgagctcaccattgccaaagaccagctgaagtcccttcatggaactgttatgaaaattaaccaggagcgagcagaggagttgcaggaagcagagaggttcagcagaaaggcagcacaagcagccagagatctcacccgagcagaagctgagatcgaactcctgcagaatctcctcaggcagaagggggagcagtttcgacttgagatggagaaaacaggtgtaggtactggagcaaactcacaggtcctagaaattgagaaactgaatgagacaatggaacgacaaaggacagagattgcaaggctgcagaatgtactagacctcactggaagtgacaacaaaggaggctttgaaaatgttttagaagaaattgctgaacttcgacgtgaagtttcttatcagaatgattacataagcagcatggcagatcctttcaaaagacgaggctattggtactttatgccaccaccaccatcatcaaaagtttccagccatagttcccaggccaccaaggactctggtgttggccttaagtactcagcctcaactcctgttagaaaaccacgccctgggcagcaggatgggaaggaaggcagtcaacctccccctgcctcaggatactgggtttattctcccatcaggagtgggttacataaactgtttccaagtagagatgcagacagtggaggagatagtcaggaagagagtgagctggatgaccaagaagaacccccatttgtgcctcctcctggatacatgatgtatactgtgcttcctgatggttctcctgtaccccagggcatggccctgtatgcaccacctcctcccttgccaaacaatagccgacctctcacccctggcactgttgtttatggcccacctcctgctggggcccccatggtgtatgggcctccaccccccaacttctccatccccttcatccctatgggtgtgctgcattgcaacgtccctgaacaccataacttagagaatgaagtttctagattagaagacataatgcagcatttaaaatcaaagaagcgggaagaaaggtggatgagagcatccaagcggcagtcggagaaagaaatggaagaactgcatcataatattgatgatcttttgcaagagaagaaaagcttagagtgtgaagtagaagaattacatagaactgtccagaaacgtcaacagcaaaaggacttcattgatggaaatgttgagagtcttatgactgaactagaaatagaaaaatcactcaaacatcatgaagatattgtagatgaaattgagtgcattgagaagactcttctgaaacgtcgctcagagctcagggaagctgaccgactcctggcagaggctgagagtgaactttcatgcactaaagaaaagacaaaaaatgctgttgaaaagttcactgatgccaagagaagtttattgcaaactgagtcagatgctgaggaattagaaaggagagctcaggaaactgctgttaacctcgtcaaagctgatcagcagctaagatcgctccaggctgatgcaaaggatttggagcagcacaaaatcaagcaagaagaaatcttgaaagaaataaacaaaattgtagcagcaaaagactcagacttccaatgtttaagcaagaagaaggaaaaactgacagaagagtaagtaaggcctctgtagggctacaaggggtttgtgctggaagacagctctggggttccgagtcccttaggatctgctctagtgttgctggtgctttgtaggcttcagaaactacagaaagacatagagatggcagaacgcaatgaggatcaccacctgcaggtccttaaagaatctgaggtgcttcttcaggccaaaagagccgagctggaaaagctgaaaagccaggtgacaagtcagcagcaggagatggctgtcttggacaggcagttagggcataaaaaggaggagctgcatctactccaaggaagcatggtccaggcaaaagctgacctccaggaagctctgagactgggagagactgaagtaactgagaagtgcaatcacattagggaagtaaaatctcttctggaagaactgagttttcagaaaggagaactaaatgttcagattagtgaaagaaaaactcaacttacacttataaagcaggaaattgaaaaagaggaagaaaatcttcaggttgttttaaggcagatgtctaaacataaaaccgaactaaagaatattctggacatgttgcaacttgaaaaccatgagctacaaggtttgaagctacaacatgaccaaagggtatctgaattagagaagactcaggtggcagtgctagaggagaaactggagttagagaatttgcagcagatatcccagcagcagaaaggggaaatagagtggcagaagcagctccttgagagggataaacgagaaatagaacgaatgactgctgagtcccgagctttacaatcgtgtgttgagtgtttgagcaaagaaaaggaagatctccaagagaaatgtgacatttgggaaaaaaagttggcacaaaccaaaagggttttagcagcagcagaagaaaatagcaaaatggagcaatcaaacttagaaaagttggaattgaatgtcagaaaactgcagcaggaactagaccaactaaacagagacaagttgtcactgcataacgacatttcagcaatgcaacagcagctccaggtataagaaaaacgagaagcagtaaactcactgcaggaggaactagctaatgtccaagaccatttgaacctagcaaaacaggacctgcttcacaccaccaagcatcaggatgtgttgctcagtgagcagacccgactccagaaggacatcagtgaatgggcaaataggtttgaagactgtcagaaagaagaggagacaaaacaacaacaacttcaagtgcttcagaatgagattgaagaaaacaagctcaaactagtccaacaagaaatgatgtttcagagactccagaaagagagagaaagtgaagaaagcaaattagaaaccagtaaagtgacactgaaggagcaacagcaccagctggaaaaggaattaacagaccagaaaagcaaactggaccaagtgctctcaaaggtgctggcagctgaagagcgtgttaggactctgcaggaagaggagaggtggtgtgagagcctggagaagacactctcccaaactaaacggcagctttcagaaagggagcagcaattggtggagaaatcaggtgagctgttggccctccagaaagaggcagattctatgagggcagacttcagccttctgcggaaccagttcttgacagaaagaaagaaagctgagaagcaggtggccagcctgaaggaagcacttaagatccagcggagccagctggagaaaaaccttcttgagcaaaaacaggagaacagctgcatacaaaaggaaatggcaacaattgaactggtagcccaggacaaccatgagcgggccaggcgcctgatgaaggagctcaaccagatgcagtatgagtacacggagctcaagaaacagatggcaaaccaaaaagatttggagagaagacaaatggaaatcagtgatgcaatgaggacacttaaatctgaggtgaaggatgaaatcagaaccagcttgaagaatcttaatcagtttcttccagaactaccagcagatctagaagctattttggaaagaaacgaaaacctagaaggagaattggaaagcttgaaagagaaccttccatttaccatgaatgagggaccttttgaagaaaaactgaacttttcccaagttcacataatggatgaacactggcgtggagaagcactccgggagaaactgcgtcaccgggaagaccgactcaaggcccaactccgacactgtatgtccaagcaagcagaagtattaattaaaggaaagcggcagacagagggcactttacacagtttgaggagacaagtagatgctttaggggaattggtcaccagcacctctgcagattcagcgtcatcacccagtctgtctcagctggagtcttccctcacagaggactctcaacttggacaaaatcaggaaaagaatgcctcagccagatgaggaatactgtcttgtgtaaatatattcaaggaaaacacctccactacctcactgacttcataattggaatgtcacatggtttttttaatcaagatgcagtgaactgagattctgaaactccactgtagtttactttgcctgtaccattaatgccaatgtttttataaatcacttgtacatagtacatatgggaatagttgcatatgggaatttaaaccaacatgtggctgagcctttttttttttaatcttcgtaacatgtttaaaaaaaaacagtgattttaactgcatatttgaacctacaaactggtaaatcttattaacaaaaagaatgtacttaaggccctctttatttatagtgtcgagttatttttgaattttgcttaaaatctatttttcatatgaaaataaaagataacaatcaa

SEQ ID NO: 426508 - DNA, 5774 bp, Homo sapiens
  misc_feature (2)..(3): n is a, c, g, or t
gnnacgaggctcggaggcgcttgcaaaaatgtggctgtcagagagggaagtgcacatgaatttgaagacagcattagaaagcgttccgcccacagtttctctgttctcaacggctcagttttaacaggataaattttaagttaagtcccatatgaaggctcaaaagagcggtaaagaacaacagcttgacattatgaacaagcagtaccaacaacttgaaagtcgtttggatgagatactttctagaattgctaaggaaacggaagagattaaggaccttgaagaacagcttactgaaggccagatagcagcaaatgaagccctgaagaaggatttagaaggtgttatcagtgggttgcaagaatacctggggaccattaaaggccaggcaactcaggcccagaatgagtgcaggaagctgcgggatgagaaagagacattgttgcagagattgacagaagtcgagcaggagagagaccagctggaaatagttgccatggatgcagaaaatatgaggaaggagcttgcagagctagaaagtgccctccaagagcagcatgaggtgaatgcatctttgcagcagacccagggagatctcagtgcctatgaagctgagctagaggctcggctaaacctaagggatgctgaagccaaccagctcaaggaagagttggaaaaagtaacaagacttacccagttagaacaatcagcccttcaagcagaacttgagaaggaaaggcaagccctcaagaatgcccttggaaaagcccagttctcagaagaaaaggagcaagagaacagtgagctccatgcaaaacttaaacacttgcaggatgacaataatctgttaaaacagcaacttaaagatttccagaatcaccttaaccatgtggttgatggtttggttcgtccagaagaagtggcagctcgtgtggatgagctaagaagaaaactgaaattaggaactggggaaatgaacatccatagtccttcagatgtcttagggaaaagtcttgctgatttacagaaacaattcagtgaaattcttgcacgctccaagtgggaaagagatgaagcacaagttagagagagaaaactccaagaagaaatggctctgcagcaagagaaactggcaactggacaagaagagttcaggcaggcctgtgagagagccctggaagcaagaatgaattttgataagaggcaacatgaagcaagaatccagcaaatggagaatgaaattcactatttgcaagaaaatctaaaaagtatggaggaaatccaaggccttacagatctccaacttcaggaagctgatgaagagaaggagagaattctggcccaactccgagagttagagaaaaagaagaaacttgaagatgccaaatctcaggagcaagtttttggtttagataaagaactgaagaaactaaagaaagccgtggccacctctgataagctagccacagctgagctcaccattgccaaagaccagctgaagtcccttcatggaactgttatgaaaattaaccaggagcgagcagaggagttgcaggaagcagagaggttcagcagaaaggcagcacaagcagccagagatctcacccgagcagaagctgagatcgaactcctgcagaatctcctcaggcagaagggggagcagtttcgacttgagatggagaaaacaggtgtaggtactggagcaaactcacaggtcctagaaattgagaaactgaatgagacaatggaacgacaaaggacagagattgcaaggctgcagaatgtactagacctcactggaagtgacaacaaaggaggctttgaaaatgttttagaagaaattgctgaacttcgacgtgaagtttcttatcagaatgattacataagcagcatggcagatcctttcaaaagacgaggctattggtactttatgccaccaccaccatcatcaaaagtttccagccatagttcccaggccaccaaggactctggtgttggccttaagtactcagcctcaactcctgttagaaaaccacgccctgggcagcaggatgggaaggaaggcagtcaacctccccctgcctcaggatactgggtttattctcccatcaggagtgggttacataaactgtttccaagtagagatgcagacagtggaggagatagtcaggaagagagtgagctggatgaccaagaagaacccccatttgtgcctcctcctggatacatgatgtatactgtgcttcctgatggttctcctgtaccccagggcatggccctgtatgcaccacctcctcccttgccaaacaatagccgacctctcacccctggcactgttgtttatggcccacctcctgctggggcccccatggtgtatgggcctccaccccccaacttctccatccccttcatccctatgggtgtgctgcattgcaacgtccctgaacaccataacttagagaatgaagtttctagattagaagacataatgcagcatttaaaatcaaagaagcgggaagaaaggtggatgagagcatccaagcggcagtcggagaaagaaatggaagaactgcatcataatattgatgatcttttgcaagagaagaaaagcttagagtgtgaagtagaagaattacatagaactgtccagaaacgtcaacagcaaaaggacttcattgatggaaatgttgagagtcttatgactgaactagaaatagaaaaatcactcaaacatcatgaagatattgtagatgaaattgagtgcattgagaagactcttctgaaacgtcgctcagagctcagggaagctgaccgactcctggcagaggctgagagtgaactttcatgcactaaagaaaagacaaaaaatgctgttgaaaagttcactgatgccaagagaagtttattgcaaactgagtcagatgctgaggaattagaaaggagagctcaggaaactgctgttaacctcgtcaaagctgatcagcagctaagatcgctccaggctgatgcaaaggatttggagcagcacaaaatcaagcaagaagaaatcttgaaagaaataaacaaaattgtagcagcaaaagactcagacttccaatgtttaagcaagaagaaggaaaaactgacagaagagcttcagaaactacagaaagacatagagatggcagaacgcaatgaggatcaccacctgcaggtccttaaagaatctgaggtgcttcttcaggcaaaagctgacctccaggaagctctgagactgggagagactgaagtaactgagaagtgcaatcacattagggaagtaaaatctcttctggaagaactgagttttcagaaaggagaactaaatgttcagattagtgaaagaaaaactcaacttacacttataaagcaggaaattgaaaaagaggaagaaaatcttcaggttgttttaaggcagatgtctaaacataaaaccgaactaaagaatattctggacatgttgcaacttgaaaaccatgagctacaaggtttgaagctacaacatgaccaaagggtatctgaattagagaagactcaggtggcagtgctagaggagaaactggagttagagaatttgcagcagatatcccagcagcagaaaggggaaatagagtggcagaagcagctccttgagagggataaacgagaaatagaacgaatgactgctgagtcccgagctttacaatcgtgtgttgagtgtttgagcaaagaaaaggaagatctccaagagaaatgtgacatttgggaaaaaaagttggcacaaaccaaaagggttttagcagcagcagaagaaaatagcaaaatggagcaatcaaacttagaaaagttggaattgaatgtcagaaaactgcagcaggaactagaccaactaaacagagacaagttgtcactgcataacgacatttcagcaatgcaacagcagctccaggtataagaaaaacgagaagcagtaaactcactgcaggaggaactagctaatgtccaagaccatttgaacctagcaaaacaggacctgcttcacaccaccaagcatcaggatgtgttgctcagtgagcagacccgactccagaaggacatcagtgaatgggcaaataggtttgaagactgtcagaaagaagaggagacaaaacaacaacaacttcaagtgcttcagaatgagattgaagaaaacaagctcaaactagtccaacaagaaatgatgtttcagagactccagaaagagagagaaagtgaagaaagcaaattagaaaccagtaaagtgacactgaaggagcaacagcaccagctggaaaaggaattaacagaccagaaaagcaaactggaccaagtgctctcaaaggtgctggcagctgaagagcgtgttaggactctgcaggaagaggagaggtggtgtgagagcctggagaagacactctcccaaactaaacggcagctttcagaaagggagcagcaattggtggagaaatcaggtgagctgttggccctccagaaagaggcagattctatgagggcagacttcagccttctgcggaaccagttcttgacagaaagaaagaaagctgagaagcaggtggccagcctgaaggaagcacttaagatccagcggagccagctggagaaaaaccttcttgagcaaaaacaggagaacagctgcatacaaaaggaaatggcaacaattgaactggtagcccaggacaaccatgagcgggccaggcgcctgatgaaggagctcaaccagatgcagtatgagtacacggagctcaagaaacagatggcaaaccaaaaagatttggagagaagacaaatggaaatcagtgatgcaatgaggacacttaaatctgaggtgaaggatgaaatcagaaccagcttgaagaatcttaatcagtttcttccagaactaccagcagatctagaagctattttggaaagaaacgaaaacctagaaggagaattggaaagcttgaaagagaaccttccatttaccatgaatgagggaccttttgaagaaaaactgaacttttcccaagttcacataatggatgaacactggcgtggagaagcactccgggagaaactgcgtcaccgggaagaccgactcaaggcccaactccgacactgtatgtccaagcaagcagaagtattaattaaaggaaagcggcagacagagggcactttacacagtttgaggagacaagtagatgctttaggggaattggtcaccagcacctctgcagattcagcgtcatcacccagtctgtctcagctggagtcttccctcacagaggactctcaacttggacaaaatcaggaaaagaatgcctcagccagatgaggaatactgtcttgtgtaaatatattcaaggaaaacacctccactacctcactgacttcataattggaatgtcacatggtttttttaatcaagatgcagtgaactgagattctgaaactccactgtagtttactttgcctgtaccattaatgccaatgtttttataaatcacttgtacatagtacatatgggaatagttgcatatgggaatttaaaccaacatgtggctgagcctttttttttttaatcttcgtaacatgtttaaaaaaaaacagtgattttaactgcatatttgaacctacaaactggtaaatcttattaacaaaaagaatgtacttaaggccctctttatttatagtgtcgagttatttttgaattttgcttaaaatctatttttcatatgaaaataaaagataacaatcaa

SEQ ID NO: 426509 - DNA, 5695 bp, Homo sapiens
  misc_feature (2)..(3): n is a, c, g, or t
gnnacgaggctcggaggcgcttgcaaaaatgtggctgtcagagagggaagtgcacatgaatttgaagacagcattagaaagcgttccgcccacagtttctctgttctcaacggctcagttttaacaggataaattttaagttaagtcccatatgaaggctcaaaagagcggtaaagaacaacagcttgacattatgaacaagcagtaccaacaacttgaaagtcgtttggatgagatactttctagaattgctaaggaaacggaagagattaaggaccttgaagaacagcttactgaaggccagatagcagcaaatgaagccctgaagaaggatttagaaggtgttatcagtgggttgcaagaatacctggggaccattaaaggccaggcaactcaggcccagaatgagtgcaggaagctgcgggatgagaaagagacattgttgcagagattgacagaagtcgagcaggagagagaccagctggaaatagttgccatggatgcagaaaatatgaggaaggagcttgcagagctagaaagtgccctccaagagcagcatgaggtgaatgcatctttgcagcagacccagggagatctcagtgcctatgaagctgagctagaggctcggctaaacctaagggatgctgaagccaaccagctcaaggaagagttggaaaaagtaacaagacttacccagttagaacaatcagcccttcaagcagaacttgagaaggaaaggcaagccctcaagaatgcccttggaaaagcccagttctcagaagaaaaggagcaagagaacagtgagctccatgcaaaacttaaacacttgcaggatgacaataatctgttaaaacagcaacttaaagatttccagaatcaccttaaccatgtggttgatggtttggttcgtccagaagaagtggcagctcgtgtggatgagctaagaagaaaactgaaattaggaactggggaaatgaaatgaattttgataagaggcaacatgaagcaagaatccagcaaatggagaatgaaattcactatttgcaagaaaatctaaaaagtatggaggaaatccaaggccttacagatctccaacttcaggaagctgatgaagagaaggagagaattctggcccaactccgagagttagagaaaaagaagaaacttgaagatgccaaatctcaggagcaagtttttggtttagataaagaactgaagaaactaaagaaagccgtggccacctctgataagctagccacagctgagctcaccattgccaaagaccagctgaagtcccttcatggaactgttatgaaaattaaccaggagcgagcagaggagttgcaggaagcagagaggttcagcagaaaggcagcacaagcagccagagatctcacccgagcagaagctgagatcgaactcctgcagaatctcctcaggcagaagggggagcagtttcgacttgagatggagaaaacaggtgtaggtactggagcaaactcacaggtcctagaaattgagaaactgaatgagacaatggaacgacaaaggacagagattgcaaggctgcagaatgtactagacctcactggaagtgacaacaaaggaggctttgaaaatgttttagaagaaattgctgaacttcgacgtgaagtttcttatcagaatgattacataagcagcatggcagatcctttcaaaagacgaggctattggtactttatgccaccaccaccatcatcaaaagtttccagccatagttcccaggccaccaaggactctggtgttggccttaagtactcagcctcaactcctgttagaaaaccacgccctgggcagcaggatgggaaggaaggcagtcaacctccccctgcctcaggatactgggtttattctcccatcaggagtgggttacataaactgtttccaagtagagatgcagacagtggaggagatagtcaggaagagagtgagctggatgaccaagaagaacccccatttgtgcctcctcctggatacatgatgtatactgtgcttcctgatggttctcctgtaccccagggcatggccctgtatgcaccacctcctcccttgccaaacaatagccgacctctcacccctggcactgttgtttatggcccacctcctgctggggcccccatggtgtatgggcctccaccccccaacttctccatccccttcatccctatgggtgtgctgcattgcaacgtccctgaacaccataacttagagaatgaagtttctagattagaagacataatgcagcatttaaaatcaaagaagcgggaagaaaggtggatgagagcatccaagcggcagtcggagaaagaaatggaagaactgcatcataatattgatgatcttttgcaagagaagaaaagcttagagtgtgaagtagaagaattacatagaactgtccagaaacgtcaacagcaaaaggacttcattgatggaaatgttgagagtcttatgactgaactagaaatagaaaaatcactcaaacatcatgaagatattgtagatgaaattgagtgcattgagaagactcttctgaaacgtcgctcagagctcagggaagctgaccgactcctggcagaggctgagagtgaactttcatgcactaaagaaaagacaaaaaatgctgttgaaaagttcactgatgccaagagaagtttattgcaaactgagtcagatgctgaggaattagaaaggagagctcaggaaactgctgttaacctcgtcaaagctgatcagcagctaagatcgctccaggctgatgcaaaggatttggagcagcacaaaatcaagcaagaagaaatcttgaaagaaataaacaaaattgtagcagcaaaagactcagacttccaatgtttaagcaagaagaaggaaaaactgacagaagagcttcagaaactacagaaagacatagagatggcagaacgcaatgaggatcaccacctgcaggtccttaaagaatctgaggtgcttcttcaggccaaaagagccgagctggaaaagctgaaaagccaggtgacaagtcagcagcaggagatggctgtcttggacaggcagttagggcataaaaaggaggagctgcatctactccaaggaagcatggtccaggcaaaagctgacctccaggaagctctgagactgggagagactgaagtaactgagaagtgcaatcacattagggaagtaaaatctcttctggaagaactgagttttcagaaaggagaactaaatgttcagattagtgaaagaaaaactcaacttacacttataaagcaggaaattgaaaaagaggaagaaaatcttcaggttgttttaaggcagatgtctaaacataaaaccgaactaaagaatattctggacatgttgcaacttgaaaaccatgagctacaaggtttgaagctacaacatgaccaaagggtatctgaattagagaagactcaggtggcagtgctagaggagaaactggagttagagaatttgcagcagatatcccagcagcagaaaggggaaatagagtggcagaagcagctccttgagagggataaacgagaaatagaacgaatgactgctgagtcccgagctttacaatcgtgtgttgagtgtttgagcaaagaaaaggaagatctccaagagaaatgtgacatttgggaaaaaaagttggcacaaaccaaaagggttttagcagcagcagaagaaaatagcaaaatggagcaatcaaacttagaaaagttggaattgaatgtcagaaaactgcagcaggaactagaccaactaaacagagacaagttgtcactgcataacgacatttcagcaatgcaacagcagctccaggtataagaaaaacgagaagcagtaaactcactgcaggaggaactagctaatgtccaagaccatttgaacctagcaaaacaggacctgcttcacaccaccaagcatcaggatgtgttgctcagtgagcagacccgactccagaaggacatcagtgaatgggcaaataggtttgaagactgtcagaaagaagaggagacaaaacaacaacaacttcaagtgcttcagaatgagattgaagaaaacaagctcaaactagtccaacaagaaatgatgtttcagagactccagaaagagagagaaagtgaagaaagcaaattagaaaccagtaaagtgacactgaaggagcaacagcaccagctggaaaaggaattaacagaccagaaaagcaaactggaccaagtgctctcaaaggtgctggcagctgaagagcgtgttaggactctgcaggaagaggagaggtggtgtgagagcctggagaagacactctcccaaactaaacggcagctttcagaaagggagcagcaattggtggagaaatcaggtgagctgttggccctccagaaagaggcagattctatgagggcagacttcagccttctgcggaaccagttcttgacagaaagaaagaaagctgagaagcaggtggccagcctgaaggaagcacttaagatccagcggagccagctggagaaaaaccttcttgagcaaaaacaggagaacagctgcatacaaaaggaaatggcaacaattgaactggtagcccaggacaaccatgagcgggccaggcgcctgatgaaggagctcaaccagatgcagtatgagtacacggagctcaagaaacagatggcaaaccaaaaagatttggagagaagacaaatggaaatcagtgatgcaatgaggacacttaaatctgaggtgaaggatgaaatcagaaccagcttgaagaatcttaatcagtttcttccagaactaccagcagatctagaagctattttggaaagaaacgaaaacctagaaggagaattggaaagcttgaaagagaaccttccatttaccatgaatgagggaccttttgaagaaaaactgaacttttcccaagttcacataatggatgaacactggcgtggagaagcactccgggagaaactgcgtcaccgggaagaccgactcaaggcccaactccgacactgtatgtccaagcaagcagaagtattaattaaaggaaagcggcagacagagggcactttacacagtttgaggagacaagtagatgctttaggggaattggtcaccagcacctctgcagattcagcgtcatcacccagtctgtctcagctggagtcttccctcacagaggactctcaacttggacaaaatcaggaaaagaatgcctcagccagatgaggaatactgtcttgtgtaaatatattcaaggaaaacacctccactacctcactgacttcataattggaatgtcacatggtttttttaatcaagatgcagtgaactgagattctgaaactccactgtagtttactttgcctgtaccattaatgccaatgtttttataaatcacttgtacatagtacatatgggaatagttgcatatgggaatttaaaccaacatgtggctgagcctttttttttttaatcttcgtaacatgtttaaaaaaaaacagtgattttaactgcatatttgaacctacaaactggtaaatcttattaacaaaaagaatgtacttaaggccctctttatttatagtgtcgagttatttttgaattttgcttaaaatctatttttcatatgaaaataaaagataacaatcaa

SEQ ID NO: 426510 - DNA, 4782 bp, Homo sapiens
agtttttattttgcttaaaacatattttgcctaaaaatcattcttgaaattgtatttcttcacagatgaattttgataagaggcaacatgaagcaagaatccagcaaatggagaatgaaattcactatttgcaagaaaatctaaaaagtatggaggaaatccaaggccttacagatctccaacttcaggaagctgatgaagagaaggagagaattctggcccaactccgagagttagagaaaaagaagaaacttgaagatgccaaatctcaggagcaagtttttggtttagataaagaactgaagaaactaaagaaagccgtggccacctctgataagctagccacagctgagctcaccattgccaaagaccagctgaagtcccttcatggaactgttatgaaaattaaccaggagcgagcagaggagttgcaggaagcagagaggttcagcagaaaggcagcacaagcagccagagatctcacccgagcagaagctgagatcgaactcctgcagaatctcctcaggcagaagggggagcagtttcgacttgagatggagaaaacaggtgtaggtactggagcaaactcacaggtcctagaaattgagaaactgaatgagacaatggaacgacaaaggacagagattgcaaggctgcagaatgtactagacctcactggaagtgacaacaaaggaggctttgaaaatgttttagaagaaattgctgaacttcgacgtgaagtttcttatcagaatgattacataagcagcatggcagatcctttcaaaagacgaggctattggtactttatgccaccaccaccatcatcaaaagtttccagccatagttcccaggccaccaaggactctggtgttggccttaagtactcagcctcaactcctgttagaaaaccacgccctgggcagcaggatgggaaggaaggcagtcaacctccccctgcctcaggatactgggtttattctcccatcaggagtgggttacataaactgtttccaagtagagatgcagacagtggaggagatagtcaggaagagagtgagctggatgaccaagaagaacccccatttgtgcctcctcctggatacatgatgtatactgtgcttcctgatggttctcctgtaccccagggcatggccctgtatgcaccacctcctcccttgccaaacaatagccgacctctcacccctggcactgttgtttatggcccacctcctgctggggcccccatggtgtatgggcctccaccccccaacttctccatccccttcatccctatgggtgtgctgcattgcaacgtccctgaacaccataacttagagaatgaagtttctagattagaagacataatgcagcatttaaaatcaaagaagcgggaagaaaggtggatgagagcatccaagcggcagtcggagaaagaaatggaagaactgcatcataatattgatgatcttttgcaagagaagaaaagcttagagtgtgaagtagaagaattacatagaactgtccagaaacgtcaacagcaaaaggacttcattgatggaaatgttgagagtcttatgactgaactagaaatagaaaaatcactcaaacatcatgaagatattgtagatgaaattgagtgcattgagaagactcttctgaaacgtcgctcagagctcagggaagctgaccgactcctggcagaggctgagagtgaactttcatgcactaaagaaaagacaaaaaatgctgttgaaaagttcactgatgccaagagaagtttattgcaaactgagtcagatgctgaggaattagaaaggagagctcaggaaactgctgttaacctcgtcaaagctgatcagcagctaagatcgctccaggctgatgcaaaggatttggagcagcacaaaatcaagcaagaagaaatcttgaaagaaataaacaaaattgtagcagcaaaagactcagacttccaatgtttaagcaagaagaaggaaaaactgacagaagagcttcagaaactacagaaagacatagagatggcagaacgcaatgaggatcaccacctgcaggtccttaaagaatctgaggtgcttcttcaggccaaaagagccgagctggaaaagctgaaaagccaggtgacaagtcagcagcaggagatggctgtcttggacaggcagttagggcataaaaaggaggagctgcatctactccaaggaagcatggtccaggcaaaagctgacctccaggaagctctgagactgggagagactgaagtaactgagaagtgcaatcacattagggaagtaaaatctcttctggaagaactgagttttcagaaaggagaactaaatgttcagattagtgaaagaaaaactcaacttacacttataaagcaggaaattgaaaaagaggaagaaaatcttcaggttgttttaaggcagatgtctaaacataaaaccgaactaaagaatattctggacatgttgcaacttgaaaaccatgagctacaaggtttgaagctacaacatgaccaaagggtatctgaattagagaagactcaggtggcagtgctagaggagaaactggagttagagaatttgcagcagatatcccagcagcagaaaggggaaatagagtggcagaagcagctccttgagagggataaacgagaaatagaacgaatgactgctgagtcccgagctttacaatcgtgtgttgagtgtttgagcaaagaaaaggaagatctccaagagaaatgtgacatttgggaaaaaaagttggcacaaaccaaaagggttttagcagcagcagaagaaaatagcaaaatggagcaatcaaacttagaaaagttggaattgaatgtcagaaaactgcagcaggaactagaccaactaaacagagacaagttgtcactgcataacgacatttcagcaatgcaacagcagctccaggtataagaaaaacgagaagcagtaaactcactgcaggaggaactagctaatgtccaagaccatttgaacctagcaaaacaggacctgcttcacaccaccaagcatcaggatgtgttgctcagtgagcagacccgactccagaaggacatcagtgaatgggcaaataggtttgaagactgtcagaaagaagaggagacaaaacaacaacaacttcaagtgcttcagaatgagattgaagaaaacaagctcaaactagtccaacaagaaatgatgtttcagagactccagaaagagagagaaagtgaagaaagcaaattagaaaccagtaaagtgacactgaaggagcaacagcaccagctggaaaaggaattaacagaccagaaaagcaaactggaccaagtgctctcaaaggtgctggcagctgaagagcgtgttaggactctgcaggaagaggagaggtggtgtgagagcctggagaagacactctcccaaactaaacggcagctttcagaaagggagcagcaattggtggagaaatcaggtgagctgttggccctccagaaagaggcagattctatgagggcagacttcagccttctgcggaaccagttcttgacagaaagaaagaaagctgagaagcaggtggccagcctgaaggaagcacttaagatccagcggagccagctggagaaaaaccttcttgagcaaaaacaggagaacagctgcatacaaaaggaaatggcaacaattgaactggtagcccaggacaaccatgagcgggccaggcgcctgatgaaggagctcaaccagatgcagtatgagtacacggagctcaagaaacagatggcaaaccaaaaagatttggagagaagacaaatggaaatcagtgatgcaatgaggacacttaaatctgaggtgaaggatgaaatcagaaccagcttgaagaatcttaatcagtttcttccagaactaccagcagatctagaagctattttggaaagaaacgaaaacctagaaggagaattggaaagcttgaaagagaaccttccatttaccatgaatgagggaccttttgaagaaaaactgaacttttcccaagttcacataatggatgaacactggcgtggagaagcactccgggagaaactgcgtcaccgggaagaccgactcaaggcccaactccgacactgtatgtccaagcaagcagaagtattaattaaaggaaagcggcagacagagggcactttacacagtttgaggagacaagtagatgctttaggggaattggtcaccagcacctctgcagattcagcgtcatcacccagtctgtctcagctggagtcttccctcacagaggactctcaacttggacaaaatcaggaaaagaatgcctcagccagatgaggaatactgtcttgtgtaaatatattcaaggaaaacacctccactacctcactgacttcataattggaatgtcacatggtttttttaatcaagatgcagtgaactgagattctgaaactccactgtagtttactttgcctgtaccattaatgccaatgtttttataaatcacttgtacatagtacatatgggaatagttgcatatgggaatttaaaccaacatgtggctgagcctttttttttttaatcttcgtaacatgtttaaaaaaaaacagtgattttaactgcatatttgaacctacaaactggtaaatcttattaacaaaaagaatgtacttaaggccctctttatttatagtgtcgagttatttttgaattttgcttaaaatctatttttcatatgaaaataaaagataacaatcaa

SEQ ID NO: 426511 - DNA, 3025 bp, Homo sapiens
gtatacattgagatgaatgaaaagtttgcttctaaggggataataattggtttatgataaataatgcatggtaagtctacaggacctggggggaataaagcaatgtgctttagatcgctccaggctgatgcaaaggatttggagcagcacaaaatcaagcaagaagaaatcttgaaagaaataaacaaaattgtagcagcaaaagactcagacttccaatgtttaagcaagaagaaggaaaaactgacagaagagcttcagaaactacagaaagacatagagatggcagaacgcaatgaggatcaccacctgcaggtccttaaagaatctgaggtgcttcttcaggccaaaagagccgagctggaaaagctgaaaagccaggtgacaagtcagcagcaggagatggctgtcttggacaggcagttagggcataaaaaggaggagctgcatctactccaaggaagcatggtccaggcaaaagctgacctccaggaagctctgagactgggagagactgaagtaactgagaagtgcaatcacattagggaagtaaaatctcttctggaagaactgagttttcagaaaggagaactaaatgttcagattagtgaaagaaaaactcaacttacacttataaagcaggaaattgaaaaagaggaagaaaatcttcaggttgttttaaggcagatgtctaaacataaaaccgaactaaagaatattctggacatgttgcaacttgaaaaccatgagctacaaggtttgaagctacaacatgaccaaagggtatctgaattagagaagactcaggtggcagtgctagaggagaaactggagttagagaatttgcagcagatatcccagcagcagaaaggggaaatagagtggcagaagcagctccttgagagggataaacgagaaatagaacgaatgactgctgagtcccgagctttacaatcgtgtgttgagtgtttgagcaaagaaaaggaagatctccaagagaaatgtgacatttgggaaaaaaagttggcacaaaccaaaagggttttagcagcagcagaagaaaatagcaaaatggagcaatcaaacttagaaaagttggaattgaatgtcagaaaactgcagcaggaactagaccaactaaacagagacaagttgtcactgcataacgacatttcagcaatgcaacagcagctccaggtataagaaaaacgagaagcagtaaactcactgcaggaggaactagctaatgtccaagaccatttgaacctagcaaaacaggacctgcttcacaccaccaagcatcaggatgtgttgctcagtgagcagacccgactccagaaggacatcagtgaatgggcaaataggtttgaagactgtcagaaagaagaggagacaaaacaacaacaacttcaagtgcttcagaatgagattgaagaaaacaagctcaaactagtccaacaagaaatgatgtttcagagactccagaaagagagagaaagtgaagaaagcaaattagaaaccagtaaagtgacactgaaggagcaacagcaccagctggaaaaggaattaacagaccagaaaagcaaactggaccaagtgctctcaaaggtgctggcagctgaagagcgtgttaggactctgcaggaagaggagaggtggtgtgagagcctggagaagacactctcccaaactaaacggcagctttcagaaagggagcagcaattggtggagaaatcaggtgagctgttggccctccagaaagaggcagattctatgagggcagacttcagccttctgcggaaccagttcttgacagaaagaaagaaagctgagaagcaggtggccagcctgaaggaagcacttaagatccagcggagccagctggagaaaaaccttcttgagcaaaaacaggagaacagctgcatacaaaaggaaatggcaacaattgaactggtagcccaggacaaccatgagcgggccaggcgcctgatgaaggagctcaaccagatgcagtatgagtacacggagctcaagaaacagatggcaaaccaaaaagatttggagagaagacaaatggaaatcagtgatgcaatgaggacacttaaatctgaggtgaaggatgaaatcagaaccagcttgaagaatcttaatcagtttcttccagaactaccagcagatctagaagctattttggaaagaaacgaaaacctagaaggagaattggaaagcttgaaagagaaccttccatttaccatgaatgagggaccttttgaagaaaaactgaacttttcccaagttcacataatggatgaacactggcgtggagaagcactccgggagaaactgcgtcaccgggaagaccgactcaaggcccaactccgacactgtatgtccaagcaagcagaagtattaattaaaggaaagcggcagacagagggcactttacacagtttgaggagacaagtagatgctttaggggaattggtcaccagcacctctgcagattcagcgtcatcacccagtctgtctcagctggagtcttccctcacagaggactctcaacttggacaaaatcaggaaaagaatgcctcagccagatgaggaatactgtcttgtgtaaatatattcaaggaaaacacctccactacctcactgacttcataattggaatgtcacatggtttttttaatcaagatgcagtgaactgagattctgaaactccactgtagtttactttgcctgtaccattaatgccaatgtttttataaatcacttgtacatagtacatatgggaatagttgcatatgggaatttaaaccaacatgtggctgagcctttttttttttaatcttcgtaacatgtttaaaaaaaaacagtgattttaactgcatatttgaacctacaaactggtaaatcttattaacaaaaagaatgtacttaaggccctctttatttatagtgtcgagttatttttgaattttgcttaaaatctatttttcatatgaaaataaaagataacaatcaa

SEQ ID NO: 426512 - DNA, 2913 bp, Homo sapiens
aaagttcttggaaaactgtaacctgagggatgatcatgattatcatattgttgttcttactgtgatcactgtgatttgagtggttttaagtatgtgagctcaaggttttcattaggcatttcacccttgcactccttgcctggcttttctgactcttgggggctaggatattagctcctgattttacctcacaactaaattatctccaggttagcactgagggctgtatggcctttgtcaaacttactcttcccttttctttaatacaggtgacaagtcagcagcaggagatggctgtcttggacaggcagttagggcataaaaaggaggagctgcatctactccaaggaagcatggtccaggcaaaagctgacctccaggaagctctgagactgggagagactgaagtaactgagaagtgcaatcacattagggaagtaaaatctcttctggaagaactgagttttcagaaaggagaactaaatgttcagattagtgaaagaaaaactcaacttacacttataaagcaggaaattgaaaaagaggaagaaaatcttcaggttgttttaaggcagatgtctaaacataaaaccgaactaaagaatattctggacatgttgcaacttgaaaaccatgagctacaaggtttgaagctacaacatgaccaaagggtatctgaattagagaagactcaggtggcagtgctagaggagaaactggagttagagaatttgcagcagatatcccagcagcagaaaggggaaatagagtggcagaagcagctccttgagagggataaacgagaaatagaacgaatgactgctgagtcccgagctttacaatcgtgtgttgagtgtttgagcaaagaaaaggaagatctccaagagaaatgtgacatttgggaaaaaaagttggcacaaaccaaaagggttttagcagcagcagaagaaaatagcaaaatggagcaatcaaacttagaaaagttggaattgaatgtcagaaaactgcagcaggaactagaccaactaaacagagacaagttgtcactgcataacgacatttcagcaatgcaacagcagctccaggtataagaaaaacgagaagcagtaaactcactgcaggaggaactagctaatgtccaagaccatttgaacctagcaaaacaggacctgcttcacaccaccaagcatcaggatgtgttgctcagtgagcagacccgactccagaaggacatcagtgaatgggcaaataggtttgaagactgtcagaaagaagaggagacaaaacaacaacaacttcaagtgcttcagaatgagattgaagaaaacaagctcaaactagtccaacaagaaatgatgtttcagagactccagaaagagagagaaagtgaagaaagcaaattagaaaccagtaaagtgacactgaaggagcaacagcaccagctggaaaaggaattaacagaccagaaaagcaaactggaccaagtgctctcaaaggtgctggcagctgaagagcgtgttaggactctgcaggaagaggagaggtggtgtgagagcctggagaagacactctcccaaactaaacggcagctttcagaaagggagcagcaattggtggagaaatcaggtgagctgttggccctccagaaagaggcagattctatgagggcagacttcagccttctgcggaaccagttcttgacagaaagaaagaaagctgagaagcaggtggccagcctgaaggaagcacttaagatccagcggagccagctggagaaaaaccttcttgagcaaaaacaggagaacagctgcatacaaaaggaaatggcaacaattgaactggtagcccaggacaaccatgagcgggccaggcgcctgatgaaggagctcaaccagatgcagtatgagtacacggagctcaagaaacagatggcaaaccaaaaagatttggagagaagacaaatggaaatcagtgatgcaatgaggacacttaaatctgaggtgaaggatgaaatcagaaccagcttgaagaatcttaatcagtttcttccagaactaccagcagatctagaagctattttggaaagaaacgaaaacctagaaggagaattggaaagcttgaaagagaaccttccatttaccatgaatgagggaccttttgaagaaaaactgaacttttcccaagttcacataatggatgaacactggcgtggagaagcactccgggagaaactgcgtcaccgggaagaccgactcaaggcccaactccgacactgtatgtccaagcaagcagaagtattaattaaaggaaagcggcagacagagggcactttacacagtttgaggagacaagtagatgctttaggggaattggtcaccagcacctctgcagattcagcgtcatcacccagtctgtctcagctggagtcttccctcacagaggactctcaacttggacaaaatcaggaaaagaatgcctcagccagatgaggaatactgtcttgtgtaaatatattcaaggaaaacacctccactacctcactgacttcataattggaatgtcacatggtttttttaatcaagatgcagtgaactgagattctgaaactccactgtagtttactttgcctgtaccattaatgccaatgtttttataaatcacttgtacatagtacatatgggaatagttgcatatgggaatttaaaccaacatgtggctgagcctttttttttttaatcttcgtaacatgtttaaaaaaaaacagtgattttaactgcatatttgaacctacaaactggtaaatcttattaacaaaaagaatgtacttaaggccctctttatttatagtgtcgagttatttttgaattttgcttaaaatctatttttcatatgaaaataaaagataacaatcaa

SEQ ID NO: 426513 - DNA, 3127 bp, Homo sapiens
gtatacattgagatgaatgaaaagtttgcttctaaggggataataattggtttatgataaataatgcatggtaagtctacaggacctggggggaataaagcaatgtgctttagatcgctccaggctgatgcaaaggatttggagcagcacaaaatcaagcaagaagaaatcttgaaagaaataaacaaaattgtagcagcaaaagactcagacttccaatgtttaagcaagaagaaggaaaaactgacagaagagtaagtaaggcctctgtagggctacaaggggtttgtgctggaagacagctctggggttccgagtcccttaggatctgctctagtgttgctggtgctttgtaggcttcagaaactacagaaagacatagagatggcagaacgcaatgaggatcaccacctgcaggtccttaaagaatctgaggtgcttcttcaggccaaaagagccgagctggaaaagctgaaaagccaggtgacaagtcagcagcaggagatggctgtcttggacaggcagttagggcataaaaaggaggagctgcatctactccaaggaagcatggtccaggcaaaagctgacctccaggaagctctgagactgggagagactgaagtaactgagaagtgcaatcacattagggaagtaaaatctcttctggaagaactgagttttcagaaaggagaactaaatgttcagattagtgaaagaaaaactcaacttacacttataaagcaggaaattgaaaaagaggaagaaaatcttcaggttgttttaaggcagatgtctaaacataaaaccgaactaaagaatattctggacatgttgcaacttgaaaaccatgagctacaaggtttgaagctacaacatgaccaaagggtatctgaattagagaagactcaggtggcagtgctagaggagaaactggagttagagaatttgcagcagatatcccagcagcagaaaggggaaatagagtggcagaagcagctccttgagagggataaacgagaaatagaacgaatgactgctgagtcccgagctttacaatcgtgtgttgagtgtttgagcaaagaaaaggaagatctccaagagaaatgtgacatttgggaaaaaaagttggcacaaaccaaaagggttttagcagcagcagaagaaaatagcaaaatggagcaatcaaacttagaaaagttggaattgaatgtcagaaaactgcagcaggaactagaccaactaaacagagacaagttgtcactgcataacgacatttcagcaatgcaacagcagctccaggtataagaaaaacgagaagcagtaaactcactgcaggaggaactagctaatgtccaagaccatttgaacctagcaaaacaggacctgcttcacaccaccaagcatcaggatgtgttgctcagtgagcagacccgactccagaaggacatcagtgaatgggcaaataggtttgaagactgtcagaaagaagaggagacaaaacaacaacaacttcaagtgcttcagaatgagattgaagaaaacaagctcaaactagtccaacaagaaatgatgtttcagagactccagaaagagagagaaagtgaagaaagcaaattagaaaccagtaaagtgacactgaaggagcaacagcaccagctggaaaaggaattaacagaccagaaaagcaaactggaccaagtgctctcaaaggtgctggcagctgaagagcgtgttaggactctgcaggaagaggagaggtggtgtgagagcctggagaagacactctcccaaactaaacggcagctttcagaaagggagcagcaattggtggagaaatcaggtgagctgttggccctccagaaagaggcagattctatgagggcagacttcagccttctgcggaaccagttcttgacagaaagaaagaaagctgagaagcaggtggccagcctgaaggaagcacttaagatccagcggagccagctggagaaaaaccttcttgagcaaaaacaggagaacagctgcatacaaaaggaaatggcaacaattgaactggtagcccaggacaaccatgagcgggccaggcgcctgatgaaggagctcaaccagatgcagtatgagtacacggagctcaagaaacagatggcaaaccaaaaagatttggagagaagacaaatggaaatcagtgatgcaatgaggacacttaaatctgaggtgaaggatgaaatcagaaccagcttgaagaatcttaatcagtttcttccagaactaccagcagatctagaagctattttggaaagaaacgaaaacctagaaggagaattggaaagcttgaaagagaaccttccatttaccatgaatgagggaccttttgaagaaaaactgaacttttcccaagttcacataatggatgaacactggcgtggagaagcactccgggagaaactgcgtcaccgggaagaccgactcaaggcccaactccgacactgtatgtccaagcaagcagaagtattaattaaaggaaagcggcagacagagggcactttacacagtttgaggagacaagtagatgctttaggggaattggtcaccagcacctctgcagattcagcgtcatcacccagtctgtctcagctggagtcttccctcacagaggactctcaacttggacaaaatcaggaaaagaatgcctcagccagatgaggaatactgtcttgtgtaaatatattcaaggaaaacacctccactacctcactgacttcataattggaatgtcacatggtttttttaatcaagatgcagtgaactgagattctgaaactccactgtagtttactttgcctgtaccattaatgccaatgtttttataaatcacttgtacatagtacatatgggaatagttgcatatgggaatttaaaccaacatgtggctgagcctttttttttttaatcttcgtaacatgtttaaaaaaaaacagtgattttaactgcatatttgaacctacaaactggtaaatcttattaacaaaaagaatgtacttaaggccctctttatttatagtgtcgagttatttttgaattttgcttaaaatctatttttcatatgaaaataaaagataacaatcaa

SEQ ID NO: 426514 - DNA, 2807 bp, Homo sapiens
atgggatactgacatgaccagaaaggcgaactggaccaagtgctctcaaaggtgctgacagctgaagagcgtgttaggactctgcaggaagaggagaggtggtgtgagagcctggagaagacactctcccaaaagagccgagctggaaaagctgaaaagccaggtgacaagtcagcagcaggagatggctgtcttggacaggcagttagggcataaaaaggaggagctgcatctactccaaggaagcatggtccaggcaaaagctgacctccaggaagctctgagactgggagagactgaagtaactgagaagtgcaatcacattagggaagtaaaatctcttctggaagaactgagttttcagaaaggagaactaaatgttcagattagtgaaagaaaaactcaacttacacttataaagcaggaaattgaaaaagaggaagaaaatcttcaggttgttttaaggcagatgtctaaacataaaaccgaactaaagaatattctggacatgttgcaacttgaaaaccatgagctacaaggtttgaagctacaacatgaccaaagggtatctgaattagagaagactcaggtggcagtgctagaggagaaactggagttagagaatttgcagcagatatcccagcagcagaaaggggaaatagagtggcagaagcagctccttgagagggataaacgagaaatagaacgaatgactgctgagtcccgagctttacaatcgtgtgttgagtgtttgagcaaagaaaaggaagatctccaagagaaatgtgacatttgggaaaaaaagttggcacaaaccaaaagggttttagcagcagcagaagaaaatagcaaaatggagcaatcaaacttagaaaagttggaattgaatgtcagaaaactgcagcaggaactagaccaactaaacagagacaagttgtcactgcataacgacatttcagcaatgcaacagcagctccaggtataagaaaaacgagaagcagtaaactcactgcaggaggaactagctaatgtccaagaccatttgaacctagcaaaacaggacctgcttcacaccaccaagcatcaggatgtgttgctcagtgagcagacccgactccagaaggacatcagtgaatgggcaaataggtttgaagactgtcagaaagaagaggagacaaaacaacaacaacttcaagtgcttcagaatgagattgaagaaaacaagctcaaactagtccaacaagaaatgatgtttcagagactccagaaagagagagaaagtgaagaaagcaaattagaaaccagtaaagtgacactgaaggagcaacagcaccagctggaaaaggaattaacagaccagaaaagcaaactggaccaagtgctctcaaaggtgctggcagctgaagagcgtgttaggactctgcaggaagaggagaggtggtgtgagagcctggagaagacactctcccaaactaaacggcagctttcagaaagggagcagcaattggtggagaaatcaggtgagctgttggccctccagaaagaggcagattctatgagggcagacttcagccttctgcggaaccagttcttgacagaaagaaagaaagctgagaagcaggtggccagcctgaaggaagcacttaagatccagcggagccagctggagaaaaaccttcttgagcaaaaacaggagaacagctgcatacaaaaggaaatggcaacaattgaactggtagcccaggacaaccatgagcgggccaggcgcctgatgaaggagctcaaccagatgcagtatgagtacacggagctcaagaaacagatggcaaaccaaaaagatttggagagaagacaaatggaaatcagtgatgcaatgaggacacttaaatctgaggtgaaggatgaaatcagaaccagcttgaagaatcttaatcagtttcttccagaactaccagcagatctagaagctattttggaaagaaacgaaaacctagaaggagaattggaaagcttgaaagagaaccttccatttaccatgaatgagggaccttttgaagaaaaactgaacttttcccaagttcacataatggatgaacactggcgtggagaagcactccgggagaaactgcgtcaccgggaagaccgactcaaggcccaactccgacactgtatgtccaagcaagcagaagtattaattaaaggaaagcggcagacagagggcactttacacagtttgaggagacaagtagatgctttaggggaattggtcaccagcacctctgcagattcagcgtcatcacccagtctgtctcagctggagtcttccctcacagaggactctcaacttggacaaaatcaggaaaagaatgcctcagccagatgaggaatactgtcttgtgtaaatatattcaaggaaaacacctccactacctcactgacttcataattggaatgtcacatggtttttttaatcaagatgcagtgaactgagattctgaaactccactgtagtttactttgcctgtaccattaatgccaatgtttttataaatcacttgtacatagtacatatgggaatagttgcatatgggaatttaaaccaacatgtggctgagcctttttttttttaatcttcgtaacatgtttaaaaaaaaacagtgattttaactgcatatttgaacctacaaactggtaaatcttattaacaaaaagaatgtacttaaggccctctttatttatagtgtcgagttatttttgaattttgcttaaaatctatttttcatatgaaaataaaagataacaatcaa

SEQ ID NO: 426515 - DNA, 2828 bp, Homo sapiens
  misc_feature (2)..(3): n is a, c, g, or t
gnnacgaggctcggaggcgcttgcaaaaatgtggctgtcagagagggaagtgcacatgaatttgaagacagcattagaaagcgttccgcccacagtttctctgttctcaacggctcagttttaacaggataaattttaagttaagtcccatatgaaggctcaaaagagcggtaaagaacaacagcttgacattatgaacaagcagtaccaacaacttgaaagtcgtttggatgagatactttctagaattgctaaggaaacggaagagattaaggaccttgaagaacagcttactgaaggccagatagcagcaaatgaagccctgaagaaggatttagaaggtgttatcagtgggttgcaagaatacctggggaccattaaaggccaggcaactcaggcccagaatgagtgcaggaagctgcgggatgagaaagagacattgttgcagagattgacagaagtcgagcaggagagagaccagctggaaatagttgccatggatgcagaaaatatgaggaaggagcttgcagagctagaaagtgccctccaagagcagcatgaggtgaatgcatctttgcagcagacccagggagatctcagtgcctatgaagctgagctagaggctcggctaaacctaagggatgctgaagccaaccagctcaaggaagagttggaaaaagtaacaagacttacccagttagaacaatcagcccttcaagcagaacttgagaaggaaaggcaagccctcaagaatgcccttggaaaagcccagttctcagaagaaaaggagcaagagaacagtgagctccatgcaaaacttaaacacttgcaggatgacaataatctgttaaaacagcaacttaaagatttccagaatcaccttaaccatgtggttgatggtttggttcgtccagaagaagtggcagctcgtgtggatgagctaagaagaaaactgaaattaggaactggggaaatgaacatccatagtccttcagatgtcttagggaaaagtcttgctgatttacagaaacaattcagtgaaattcttgcacgctccaagtgggaaagagatgaagcacaagttagagagagaaaactccaagaagaaatggctctgcagcaagagaaactggcaactggacaagaagagttcaggcaggcctgtgagagagccctggaagcaagaatgaattttgataagaggcaacatgaagcaagaatccagcaaatggagaatgaaattcactatttgcaagaaaatctaaaaagtatggaggaaatccaaggccttacagatctccaacttcaggaagctgatgaagagaaggagagaattctggcccaactccgagagttagagaaaaaggaattaacagaccagaaaagcaaactggaccaagtgctctcaaaggtgctggcagctgaagagcgtgttaggactctgcaggaagaggagaggtggtgtgagagcctggagaagacactctcccaaactaaacggcagctttcagaaagggagcagcaattggtggagaaatcaggtgagctgttggccctccagaaagaggcagattctatgagggcagacttcagccttctgcggaaccagttcttgacagaaagaaagaaagctgagaagcaggtggccagcctgaaggaagcacttaagatccagcggagccagctggagaaaaaccttcttgagcaaaaacaggagaacagctgcatacaaaaggaaatggcaacaattgaactggtagcccaggacaaccatgagcgggccaggcgcctgatgaaggagctcaaccagatgcagtatgagtacacggagctcaagaaacagatggcaaaccaaaaagatttggagagaagacaaatggaaatcagtgatgcaatgaggacacttaaatctgaggtgaaggatgaaatcagaaccagcttgaagaatcttaatcagtttcttccagaactaccagcagatctagaagctattttggaaagaaacgaaaacctagaaggagaattggaaagcttgaaagagaaccttccatttaccatgaatgagggaccttttgaagaaaaactgaacttttcccaagttcacataatggatgaacactggcgtggagaagcactccgggagaaactgcgtcaccgggaagaccgactcaaggcccaactccgacactgtatgtccaagcaagcagaagtattaattaaaggaaagcggcagacagagggcactttacacagtttgaggagacaagtagatgctttaggggaattggtcaccagcacctctgcagattcagcgtcatcacccagtctgtctcagctggagtcttccctcacagaggactctcaacttggacaaaatcaggaaaagaatgcctcagccagatgaggaatactgtcttgtgtaaatatattcaaggaaaacacctccactacctcactgacttcataattggaatgtcacatggtttttttaatcaagatgcagtgaactgagattctgaaactccactgtagtttactttgcctgtaccattaatgccaatgtttttataaatcacttgtacatagtacatatgggaatagttgcatatgggaatttaaaccaacatgtggctgagcctttttttttttaatcttcgtaacatgtttaaaaaaaaacagtgattttaactgcatatttgaacctacaaactggtaaatcttattaacaaaaagaatgtacttaaggccctctttatttatagtgtcgagttatttttgaattttgcttaaaatctatttttcatatgaaaataaaagataacaatcaa

SEQ ID NO: 426516 - DNA, 2486 bp, Homo sapiens
caatagcattgttttctgtttcattttgtaaatgttttccaagttcatttaatatcatggaccatgctttgtttctatcccttagaactaaagaatattctggacatgttgcaacttgaaaaccatgagctacaaggtttgaagctacaacatgaccaaagggtatctgaattagagaagactcaggtggcagtgctagaggtaatgaacaaagccagtgtacccttaagaaactgaagtctttctcatttaagatgtttgagtcctcttttatctgatttaggagaaactggagttagagaatttgcagcagatatcccagcagcagaaaggggaaatagagtggcagaagcagctccttgagagggataaacgagaaatagaacgaatgactgctgagtcccgagctttacaatcgtgtgttgagtgtttgagcaaagaaaaggaagatctccaagagaaatgtgacatttgggaaaaaaagttggcacaaaccaaaagggttttagcagcagcagaagaaaatagcaaaatggagcaatcaaacttagaaaagttggaattgaatgtcagaaaactgcagcaggaactagaccaactaaacagagacaagttgtcactgcataacgacatttcagcaatgcaacagcagctccaggtataagaaaaacgagaagcagtaaactcactgcaggaggaactagctaatgtccaagaccatttgaacctagcaaaacaggacctgcttcacaccaccaagcatcaggatgtgttgctcagtgagcagacccgactccagaaggacatcagtgaatgggcaaataggtttgaagactgtcagaaagaagaggagacaaaacaacaacaacttcaagtgcttcagaatgagattgaagaaaacaagctcaaactagtccaacaagaaatgatgtttcagagactccagaaagagagagaaagtgaagaaagcaaattagaaaccagtaaagtgacactgaaggagcaacagcaccagctggaaaaggaattaacagaccagaaaagcaaactggaccaagtgctctcaaaggtgctggcagctgaagagcgtgttaggactctgcaggaagaggagaggtggtgtgagagcctggagaagacactctcccaaactaaacggcagctttcagaaagggagcagcaattggtggagaaatcaggtgagctgttggccctccagaaagaggcagattctatgagggcagacttcagccttctgcggaaccagttcttgacagaaagaaagaaagctgagaagcaggtggccagcctgaaggaagcacttaagatccagcggagccagctggagaaaaaccttcttgagcaaaaacaggagaacagctgcatacaaaaggaaatggcaacaattgaactggtagcccaggacaaccatgagcgggccaggcgcctgatgaaggagctcaaccagatgcagtatgagtacacggagctcaagaaacagatggcaaaccaaaaagatttggagagaagacaaatggaaatcagtgatgcaatgaggacacttaaatctgaggtgaaggatgaaatcagaaccagcttgaagaatcttaatcagtttcttccagaactaccagcagatctagaagctattttggaaagaaacgaaaacctagaaggagaattggaaagcttgaaagagaaccttccatttaccatgaatgagggaccttttgaagaaaaactgaacttttcccaagttcacataatggatgaacactggcgtggagaagcactccgggagaaactgcgtcaccgggaagaccgactcaaggcccaactccgacactgtatgtccaagcaagcagaagtattaattaaaggaaagcggcagacagagggcactttacacagtttgaggagacaagtagatgctttaggggaattggtcaccagcacctctgcagattcagcgtcatcacccagtctgtctcagctggagtcttccctcacagaggactctcaacttggacaaaatcaggaaaagaatgcctcagccagatgaggaatactgtcttgtgtaaatatattcaaggaaaacacctccactacctcactgacttcataattggaatgtcacatggtttttttaatcaagatgcagtgaactgagattctgaaactccactgtagtttactttgcctgtaccattaatgccaatgtttttataaatcacttgtacatagtacatatgggaatagttgcatatgggaatttaaaccaacatgtggctgagcctttttttttttaatcttcgtaacatgtttaaaaaaaaacagtgattttaactgcatatttgaacctacaaactggtaaatcttattaacaaaaagaatgtacttaaggccctctttatttatagtgtcgagttatttttgaattttgcttaaaatctatttttcatatgaaaataaaagataacaatcaa

SEQ ID NO: 426517 - DNA, 1947 bp, Homo sapiens
gcctgggaaacatgccgagaccccgtctctactaaaaatacaaaaagtagctaggtgtggtggtgtacacctgtagtcccagctattcgggaggctgaggggggaggattgcttgagcctgggaggttgagactgcagtgagccaagattgtgccaccgccctccagcctgggtgacagagcaagaccctgtctttaaaaaaacaaaacaaaacaaaaatgtatattgccaagccaccagattcttcacttataaaattccagcattagcatttataatccagatcacttatgacttatttcagtaaatggcccttttctcatttgtggcttatttactctagttgccagttgggtgccactgaggtgcttcatgtaaattctcacttagtttttacatttctgagcagaaggtatttatctccatgtataaatgaggtaatggaggatcagatgttagccaacttgccctgtcatactggtaatactggaaatcagattggtaactagctttgtctgactccaaagagattgtcttctatagagtaattcaccttcaaggaactttatgcacatggcttttctaaatgaaagttgttccagttaaaatgccaataaaataatttattcagtagcttatagagtcttgagtatctgaaaaatcacaagtttttacagttctagtaatcatagtagttgatatttatagatctttaaatacatggcacatcatacagctcaattccaagtaagtctgaaattttatacaatgatatttgacaccaactcactgtttagatggcaaaccaaaaagatttggagagaagacaaatggaaatcagtgatgcaatgaggacacttaaatctgaggtgaaggatgaaatcagaaccagcttgaagaatcttaatcagtttcttccagaactaccagcagatctagaagctattttggaaagaaacgaaaacctagaaggagaattggaaagcttgaaagagaaccttccatttaccatgaatgagggaccttttgaagaaaaactgaacttttcccaagttcacataatggtaagggtttatcctgctattctctgggttcgtaggattgaccacctcccccagctaagctaaaacacagatgtgggggtgctggggtaggggagggaaaggctggttggcttccatttgtagcagcagatgattcatgatatctctattttccctctgagaaaggatgaacactggcgtggagaagcactccgggagaaactgcgtcaccgggaagaccgactcaaggcccaactccgacactgtatgtccaagcaagcagaagtattaattaaaggaaagcggcagacagagggcactttacacagtttgaggagacaagtagatgctttaggggaattggtcaccagcacctctgcagattcagcgtcatcacccagtctgtctcagctggagtcttccctcacagaggactctcaacttggacaaaatcaggaaaagaatgcctcagccagatgaggaatactgtcttgtgtaaatatattcaaggaaaacacctccactacctcactgacttcataattggaatgtcacatggtttttttaatcaagatgcagtgaactgagattctgaaactccactgtagtttactttgcctgtaccattaatgccaatgtttttataaatcacttgtacatagtacatatgggaatagttgcatatgggaatttaaaccaacatgtggctgagcctttttttttttaatcttcgtaacatgtttaaaaaaaaacagtgattttaactgcatatttgaacctacaaactggtaaatcttattaacaaaaagaatgtacttaaggccctctttatttatagtgtcgagttatttttgaattttgcttaaaatctatttttcatatgaaaataaaagataacaatcaa

SEQ ID NO: 426518 - DNA, 925 bp, Homo sapiens
gaagcaagggatacagaaatcctaagcactgctagcatggaaaaactgggccaagtgaaagaccccgttaatgacaacacagaaaagtaaaggtttatgcacactaagtatccacctggcacctcctacaattctttttaaagatgagcatttttgacagccattcctactgttagccagatttgcctatcaaatgtatgtgaggaagctgagcggcagttctggtacatttcttctgtgtaaaaccctaagtcttatcacacttttcaggcccaactccgacactgtatgtccaagcaagcagaagtattaattaaaggaaagcggcagacagagggcactttacacagtttgaggagacaagtagatgctttaggggaattggtcaccagcacctctgcagattcagcgtcatcacccagtctgtctcagctggagtcttccctcacagaggactctcaacttggacaaaatcaggaaaagaatgcctcagccagatgaggaatactgtcttgtgtaaatatattcaaggaaaacacctccactacctcactgacttcataattggaatgtcacatggtttttttaatcaagatgcagtgaactgagattctgaaactccactgtagtttactttgcctgtaccattaatgccaatgtttttataaatcacttgtacatagtacatatgggaatagttgcatatgggaatttaaaccaacatgtggctgagcctttttttttttaatcttcgtaacatgtttaaaaaaaaacagtgattttaactgcatatttgaacctacaaactggtaaatcttattaacaaaaagaatgtacttaaggccctctttatttatagtgtcgagttatttttgaattttgcttaaaatctatttttcatatgaaaataaaagataacaatcaa

SEQ ID NO: 426519 - DNA, 2722 bp, Homo sapiens
  misc_feature (2)..(3): n is a, c, g, or t
gnnacgaggctcggaggcgcttgcaaaaatgtggctgtcagagagggaagtgcacatgaatttgaagacagcattagaaagcgttccgcccacagtttctctgttctcaacggctcagttttaacaggataaattttaagttaagtcccatatgaaggctcaaaagagcggtaaagaacaacagcttgacattatgaacaagcagtaccaacaacttgaaagtcgtttggatgagatactttctagaattgctaaggaaacggaagagattaaggaccttgaagaacagcttactgaaggccagatagcagcaaatgaagccctgaagaaggatttagaaggtgttatcagtgggttgcaagaatacctggggaccattaaaggccaggcaactcaggcccagaatgagtgcaggaagctgcgggatgagaaagagacattgttgcagagattgacagaagtcgagcaggagagagaccagctggaaatagttgccatggatgcagaaaatatgaggaaggagcttgcagagctagaaagtgccctccaagagcagcatgaggtgaatgcatctttgcagcagacccagggagatctcagtgcctatgaagctgagctagaggctcggctaaacctaagggatgctgaagccaaccagctcaaggaagagttggaaaaagtaacaagacttacccagttagaacaatcagcccttcaagcagaacttgagaaggaaaggcaagccctcaagaatgcccttggaaaagcccagttctcagaagaaaaggagcaagagaacagtgagctccatgcaaaacttaaacacttgcaggatgacaataatctgttaaaacagcaacttaaagatttccagaatcaccttaaccatgtggttgatggtttggttcgtccagaagaagtggcagctcgtgtggatgagctaagaagaaaactgaaattaggaactggggaaatgaacatccatagtccttcagatgtcttagggaaaagtcttgctgatttacagaaacaattcagtgaaattcttgcacgctccaagtgggaaagagatgaagcacaagttagagagagaaaactccaagaagaaatggctctgcagcaagagaaactggcaactggacaagaagagttcaggcaggcctgtgagagagccctggaagcaagaatgaattttgataagaggcaacatgaagcaagaatccagcaaatggagaatgaaattcactatttgcaagaaaatctaaaaagtatggaggaaatccaaggccttacagatctccaacttcaggaagctgatgaagagaaggagagaattctggcccaactccgagagttagagaaaaagaagaaacttgaagatgccaaatctcaggagcaagtttttggtttagataaagaactgaagaaactaaagaaagccgtggccacctctgataagctagccacagctgagctcaccattgccaaagaccagctgaagtcccttcatggaactgttatgaaaattaaccaggagcgagcagaggagttgcaggaagcagagaggttcagcagaaaggcagcacaagcagccagagatctcacccgagcagaagctgagatcgaactcctgcagaatctcctcaggcagaagggggagcagtttcgacttgagatggagaaaacaggtgtaggtactggagcaaactcacaggtcctagaaattgagaaactgaatgagacaatggaacgacaaaggacagagattgcaaggctgcagaatgtactagacctcactggaagtgacaacaaaggaggctttgaaaatgttttagaagaaattgctgaacttcgacgtgaagtttcttatcagaatgattacataagcagcatggcagatcctttcaaaagacgaggctattggtactttatgccaccaccaccatcatcaaaagtttccagccatagttcccaggccaccaaggactctggtgttggccttaagtactcagcctcaactcctgttagaaaaccacgccctgggcagcaggatgggaaggaaggcagtcaacctccccctgcctcaggatactgggtttattctcccatcaggagtgggttacataaactgtttccaagtagagatgcagacagtggaggagatagtcaggaagagagtgagctggatgaccaagaagaacccccatttgtgcctcctcctggatacatgatgtatactgtgcttcctgatggttctcctgtaccccagggcatggccctgtatgcaccacctcctcccttgccaaacaatagccgacctctcacccctggcactgttgtttatggcccacctcctgctggggcccccatggtgtatgggcctccaccccccaacttctccatccccttcatccctatgggtgtgctgcattgcaacgtccctgaacaccataacttagtaagtggaaagacatacaactctctttccacactgcttccatgggtgactgataaggttatatacttaatgagttgacctatttatgactggattatatggcaaagtgtgtttgtaaggctgatgtttagaactgtgcaagcattctcttattaaaattctcttataaaagcagtggcatgtgcctataatccgagctactcaggagactgagacaagaggattgcttgagcctaggaattcaaggccagccccggtaacagc

SEQ ID NO: 426520 - DNA, 2072 bp, Homo sapiens
  misc_feature (2)..(3): n is a, c, g, or t
gnnacgaggctcggaggcgcttgcaaaaatgtggctgtcagagagggaagtgcacatgaatttgaagacagcattagaaagcgttccgcccacagtttctctgttctcaacggctcagttttaacaggataaattttaagttaagtcccatatgaaggctcaaaagagcggtaaagaacaacagcttgacattatgaacaagcagtaccaacaacttgaaagtcgtttggatgagatactttctagaattgctaaggaaacggaagagattaaggaccttgaagaacagcttactgaaggccagatagcagcaaatgaagccctgaagaaggatttagaaggtgttatcagtgggttgcaagaatacctggggaccattaaaggccaggcaactcaggcccagaatgagtgcaggaagctgcgggatgagaaagagacattgttgcagagattgacagaagtcgagcaggagagagaccagctggaaatagttgccatggatgcagaaaatatgaggaaggagcttgcagagctagaaagtgccctccaagagcagcatgaggtgaatgcatctttgcagcagacccagggagatctcagtgcctatgaagctgagctagaggctcggctaaacctaagggatgctgaagccaaccagctcaaggaagagttggaaaaagtaacaagacttacccagttagaacaatcagcccttcaagcagaacttgagaaggaaaggcaagccctcaagaatgcccttggaaaagcccagttctcagaagaaaaggagcaagagaacagtgagctccatgcaaaacttaaacacttgcaggatgacaataatctgttaaaacagcaacttaaagatttccagaatcaccttaaccatgtggttgatggtttggttcgtccagaagaagtggcagctcgtgtggatgagctaagaagaaaactgaaattaggaactggggaaatgaacatccatagtccttcagatgtcttagggaaaagtcttgctgatttacagaaacaattcagtgaaattcttgcacgctccaagtgggaaagagatgaagcacaagttagagagagaaaactccaagaagaaatggctctgcagcaagagaaactggcaactggacaagaagagttcaggcaggcctgtgagagagccctggaagcaagaatgaattttgataagaggcaacatgaagcaagaatccagcaaatggagaatgaaattcactatttgcaagaaaatctaaaaagtatggaggaaatccaaggccttacagatctccaacttcaggaagctgatgaagagaaggagagaattctggcccaactccgagagttagagaaaaagaagaaacttgaagatgccaaatctcaggagcaagtttttggtttagataaagaactgaagaaactaaagaaagccgtggccacctctgataagctagccacagctgagctcaccattgccaaagaccagctgaagtcccttcatggaactgttatgaaaattaaccaggagcgagcagaggtgagttcacatgtacagaacaggtttccatcaatgatgctgctgtcaaaaaacatggcaacttgtattattgatcttgctatagacattggttattttataaaccactgtaaagttgtctgtttttcttaagacctaaagattatattccccccatcacaacccccaataatttattttgtgctgccatggatactgcgttctactgagccctgaaaggaatcatcaaataaacatgctatccctacctttaagtgtaaggatgcttagggaggtagctgtcaatatctacctggacaagggttcctgaaggattgttatataatccctctgaatctcaaatttttcatctcgtgcagtcatgtgaaaatgttacttcatagtatgactccttactgagctaatgtctgttactgtgctttataggatgcaaatgctaatgagattaagatagcagatcataggagacaaaaatctaatgatgagagcccagagagacataatcatggaagacggtagtaaaagt

SEQ ID NO: 426521 - DNA, 1667 bp, Homo sapiens
  misc_feature (2)..(3): n is a, c, g, or t
gnnacgaggctcggaggcgcttgcaaaaatgtggctgtcagagagggaagtgcacatgaatttgaagacagcattagaaagcgttccgcccacagtttctctgttctcaacggctcagttttaacaggataaattttaagttaagtcccatatgaaggctcaaaagagcggtaaagaacaacagcttgacattatgaacaagcagtaccaacaacttgaaagtcgtttggatgagatactttctagaattgctaaggaaacggaagagattaaggaccttgaagaacagcttactgaaggccagatagcagcaaatgaagccctgaagaaggatttagaaggtgttatcagtgggttgcaagaatacctggggaccattaaaggccaggcaactcaggcccagaatgagtgcaggaagctgcgggatgagaaagagacattgttgcagagattgacagaagtcgagcaggagagagaccagctggaaatagttgccatggatgcagaaaatatgaggaaggagcttgcagagctagaaagtgccctccaagagcagcatgaggtgaatgcatctttgcagcagacccagggagatctcagtgcctatgaagctgagctagaggctcggctaaacctaagggatgctgaagccaaccagctcaaggaagagttggaaaaagtaacaagacttacccagttagaacaatcagcccttcaagcagaacttgagaaggaaaggcaagccctcaagaatgcccttggaaaagcccagttctcagaagaaaaggagcaagagaacagtgagctccatgcaaaacttaaacacttgcaggatgacaataatctgttaaaacagcaacttaaagatttccagaatcaccttaaccatgtggttgatggtttggttcgtccagaagaagtggcagctcgtgtggatgagctaagaagaaaactgaaattaggaactggggaaatgaacatccatagtccttcagatgtcttagggaaaagtcttgctgatttacagaaacaattcagtgaaattcttgcacgctccaagtgggaaagagatgaagcacaagttagagagagaaaactccaagaagaaatggctctgcagcaagagaaactggcaactggacaagaagagttcaggcaggcctgtgagagagccctggaagcaagaatgaattttgataagaggcaacatgaagcaagaatccagcaaatggagaatgaaattcactatttgcaagaaaatctaaaaagtatggaggaaatccaaggccttacagatctccaacttcaggaagctgatgaagagaaggagagaattctggcccaactccgagagttagagaaaaaggtaggggagacttagaaaatgagacacataagtacctgctgccagtgtcctgcccactggcaactaggtcagctgagatgggtgtgatctgtagtcacctctggctgcattgctggcacagtgctgaacctgacctaggtgggacctggatgcatgtcattgaatcaagaagctaagaccatgtgttgtggtagatggaaacgagaattgagaatgtaaggagtgactttcaagttaattaggtggtacttaacaaatgatattgggaggagtttgactcctttgaaacctcttgtccagt

SEQ ID NO: 426522 - DNA, 436 bp, Homo sapiens
tcaaaagagcggtaaagaacaacagcttgacattatgaacaagcagtaccaacaacttgaaagtcgtttggatgagatactttctagaattgctaaggaaacggaagagattaaggaccttgaagaacagcttactgaaggtaagactttcagtatgatttaaggtaaatcagtgttattgctggtaaaagaaacattataaagacaagcattaatccagatagtagctaaatacagttcacctattagtactagtatttgatagggaaatatttacaggatacccaaaagtagttaatgcaattttaagagttttgtttttgttttgttttgtggcattgatgcctagtgagtcaggtcattccagtcagtaggccagaagtcaatacgtgatcatgataagctctggcatgtgattgtctatgacataaaatcc

SEQ ID NO: 426523 - DNA, 738 bp, Homo sapiens
tatgggaatagttgcatatgggaatttaaaccaacatgtggctgagcctttttttttttaatcttcgtaacatgtttaaaaaaaaacagtgattttaactgcatatttgaacctacaaactggtaaatcttattaacaaaaagaatgtacttaaggccctctttatttatagtgtcgagttatttttgaattttgcttaaaatctatttttcatatgaaaataaaagataacaatcaacttgggtctgtcctctgactttacacttcacaggtcattctatggaaaagccgtcaaatttttaccttattccaagtaagtaatctttcaggtggttttcttttacctggaggctgaagtacattatacttatcaatgaagatttcatcatttggaaatacatcaattataaaactattatgcttcagatgcctttccttagccaacatattctttggtggaaaatcaggaaaactttgtaccttggagaatgtgacccagtgataaattcaaattgtgttgcctttcagattttgaactaccataattaacagctcaactccatgatgtatacatttctttaaaaactagaatagcaactgctctcacagtctggcataattattcccaagggggaaatatgtaataagaagttttaaaatattctcgggaactcttttctagatcactactagacagcttttgagtcacaacaggtatgttaccctgttactaataat

SEQ ID NO: 426524 - DNA, 723 bp, Homo sapiens
tactgacactgatgccatccctgctcacaggatagatgttacagatttttttttaaactagaacttttaattggaggatcttgaattttagcagttttaagaataaccgtttaattttttctctcagaattttgtacactggttcatcttaaaacatttttccaaagaggtactcaaatatgtcatttacctataagccatcatgccatcacttagttaagactgtttttactgtttcaagaatttgatttatccttccttttgtcttactgtaggaaaagaatgcctcagccagatgaggaatactgtcttgtgtaaatatattcaaggaaaacacctccactacctcactgacttcataattggaatgtcacatggtttttttaatcaagatgcagtgaactgagattctgaaactccactgtagtttactttgcctgtaccattaatgccaatgtttttataaatcacttgtacatagtacatatgggaatagttgcatatgggaatttaaaccaacatgtggctgagcctttttttttttaatcttcgtaacatgtttaaaaaaaaacagtgattttaactgcatatttgaacctacaaactggtaaatcttattaacaaaaagaatgtacttaaggccctctttatttatagtgtcgagttatttttgaattttgcttaaaatctatttttcatatgaaaataaaagataacaatcaa

SEQ ID NO: 426525 - DNA, 453 bp, Homo sapiens
gagtgagactctgtctcaaaaaaagaaaaaaagagttttgtatttgtaatttcaaaataaataatgtttacaaatcagtttgcctttttttgacttaccaaagggcagactgaaagtcagctttgaggaactgataaaattaattggctctcttagaatctcttttatattttgagaaaggaagtaagtgatttcatatcaatttcatagaatgacttttctttacagacaacaaaggaggctttgaaaatgttttagaagaaattgctgaacttcgacgtgaagtttcttatcagaatgattacataagcagcatggcagatcctttcaaaagacgaggctattggtactttatgccaccaccaccatcatcaaaagtaggaattctgtggtgttgggaatgtatactgaattttcttgaagaaagtgtgacattgtccccttccccaaatt

SEQ ID NO: 426526 - DNA, 383 bp, Homo sapiens
tagaggtaatgaacaaagccagtgtacccttaagaaactgaagtctttctcatttaagatgtttgagtcctcttttatctgatttaggagaaactggagttagagaatttgcagcagatatcccagcagcagaaaggggaaatagagtggcagaagcagctccttgagagggataaacgagaaatagaacgaatgactgctgagtcccgagctttacaatcgtgtgttgagtgtttgagcaaagaaaaggaagatctccaagagaaatgtgacatttgggaaaaaaagttggcacaaaccaaaaggtgagagcaagaacaaataagcttgcaggatcacttcttcaggccaaagcattataaacacactataaaaaatttgga

SEQ ID NO: 426527 - DNA, 1926 bp, Homo sapiens
aaaaaaagctcaccaaatcaaaagagaggaagtgctaagcaaatacaggaaccaaaaaggtttatagaggctgccttatgctgtctcatccagttcctttgcggtcctcttcttcagcacatgccaaagctgttcctcacggcctgtgagacaagagcatcttggatgtaggacaatggaagagttagatgccttattggaggaactggaacgctccacccttcaggacagtgatgaatattccaacccagctcctcttcccctggatcagcattccagaaaggagactaaccttgatgagacttcggagatcctttctattcaggataacacaagtcccttgccggcgcagctcgtgtatactaccaatatccaggagctcaatgtctacagtgaagcccaagagccaaaggaatcaccaccaccttctaaaacgtcagcagctgctcagttggatgagctcatggctcacctgactgagatgcaggccaaggttgcagtgagagcagatgctggcaagaagcacttaccagacaagcaggatcacaaggcctccctggactcaatgcttgggggtctcgagcaggaattgcaggaccttggcattgccacagtgcccaagggccattgtgcatcctgccagaaaccgattgctgggaaggtgatccatgctctagggcaatcatggcatcctgagcattttgtctgtactcattgcaaagaagagattggctccagtcccttctttgagcggagtggcttggcctactgccccaacgactaccaccaacttttttctccacgctgtgcttactgcgctgctcccatcctggataaagtgctgacagcaatgaaccagacctggcacccagagcacttcttctgctctcactgcggagaggtgtttggtgcagaaggctttcatgagaaggacaagaagccatattgccgaaaggatttcttagccatgttctcacccaagtgtggtggctgcaatcgcccagtgttggaaaactacctttcagccatggacactgtctggcacccagagtgctttgtttgtggggactgcttcaccagtttttctactggctccttctttgaactggatggacgtccattctgtgagctccattaccatcaccgccggggaacgctctgccatgggtgtgggcagcccatcactggccgttgtatcagtgccatggggtacaagttccatcctgagcactttgtgtgtgctttctgcctgacacagttgtcgaagggcattttcagggagcagaatgacaagacctattgtcaaccttgcttcaataagctcttcccactgtaatgccaactgatccatagcctcttcagattccttataaaatttaaaccaagagaggagaggaaagggtaaattttctgttactgaccttctgcttaatagtcttatagaaaaaggaaaggtgatgagcaaataaaggaacttctagactttacatgactaggctgataatcttattttttaggcttctatacagttaattctataaattctctttctccctctcttctccaatcaagcacttggagttagatctaggtccttctatctcgtccctctacagatgtattttccacttgcataattcatgccaacactggttttcttaggtttctccattttcacctctagtgatggccctactcatatcttctctaatttggtcctgatacttgtttcttttcacgttttcccatttccctgtggctcactgtcttacaatcactgctgtggaatcatgataccacttttagctctttgcatcttccttcagtgtatttttgtttttcaagaggaagtagattttaactggacaactttgagtactgacatcattgataaataaactggcttgtggtttcaataaaaaaatg

SEQ ID NO: 426528 - DNA, 1352 bp, Homo sapiens
tatctgggcgttggcgtacctttctcggggtgtctgcgtaactgcccagacttgccttggtttggtcagatgacacctcctctgggactggctagccagcgttcatgtctacattattgatctcgtcttccggtgtgtgagtcactcacctgtgagctcctagaggtcagcgactaaatctggttccatggggtccttgggccctcggagccctagcacaaggcccactactcagttggctcttaatcaaatctgtgaaacgaattataaagttgcttttctactagaccttgttgggacaccaaggagccggcgtcggttgcttaacttggatgcggtgcctgacctagagggaggcgaaagggttgtgagcgtgacatgactggtgacctacaccgagaagctgaagggtctcttaagctctgcggccggaagccatctgcttctgcggtttatacaatagcaactttatcagaggttacttttctgcacgctagcgtatgacattaatttgtcttcctgattcatcaaagggaatttccgttgcagttggtgatgcagtgggcctctcccatttcttttttcttttcatccattacaatcaaggaacgatttgcaagaacatcctttacccctggaaaataaggcatccagggctaaaagtcccaaaagaaagaagctggaaacaagatctggggatccaattttaaatttcacattaatcattcagttaaactgtagacaagtgctgaagtacatttttccttccagtactttgactcagataccacttcatattagacaaatgttttatattctctactgagtattttccattttcatagggctaatgtcattttcagttgtaataatcgattggcatagtgtcaatggaaattttttaagattgagtttgtagtgagcagacttttggaaggaacagtgctgacatccaatggatgctcaaagtaatacagaggaggaatctcctttcaaaaaaaaatgtacagacagtggaatggagaatgaattattccctaaaaaaaaaaagccactgtgggctggatgtggtagctcacccccggaatcccagcgcttttggatgccaaagtgggaggatcccttgagcccagaacttccagaccagcctgggcaacatagggagaccaccctctacataaaaaataaaaataaagcttttaagctaacctggtggcgtgatgggatgcacctctggtcccagctactccagaagctgagaagggcaaatcgcttgagttcaggagttcgagttggaggttacactgaactatgatagtacctttgcacgccagcctgggtgacagagagct

SEQ ID NO: 426529 - DNA, 1870 bp, Homo sapiens
tatctgggcgttggcgtacctttctcggggtgtctgcgtaactgcccagacttgccttggtttggtcagatgacacctcctctgggactggctagccagcgttcatgtctacattattgatctcgtcttccgatgccttattggaggaactggaacgctccacccttcaggacagtgatgaatattccaacccagctcctcttcccctggatcagcattccagaaaggagactaaccttgatgagacttcggagatcctttctattcaggataacacaagtcccttgccggcgcagctcgtgtatactaccaatatccaggagctcaatgtctacagtgaagcccaagagccaaaggaatcaccaccaccttctaaaacgtcagcagctgctcagttggatgagctcatggctcacctgactgagatgcaggccaaggttgcagtgagagcagatgctggcaagaagcacttaccagacaagcaggatcacaaggcctccctggactcaatgcttgggggtctcgagcaggaattgcaggaccttggcattgccacagtgcccaagggccattgtgcatcctgccagaaaccgattgctgggaaggtgatccatgctctagggcaatcatggcatcctgagcattttgtctgtactcattgcaaagaagagattggctccagtcccttctttgagcggagtggcttggcctactgccccaacgactaccaccaacttttttctccacgctgtgcttactgcgctgctcccatcctggataaagtgctgacagcaatgaaccagacctggcacccagagcacttcttctgctctcactgcggagaggtgtttggtgcagaaggctttcatgagaaggacaagaagccatattgccgaaaggatttcttagccatgttctcacccaagtgtggtggctgcaatcgcccagtgttggaaaactacctttcagccatggacactgtctggcacccagagtgctttgtttgtggggactgcttcaccagtttttctactggctccttctttgaactggatggacgtccattctgtgagctccattaccatcaccgccggggaacgctctgccatgggtgtgggcagcccatcactggccgttgtatcagtgccatggggtacaagttccatcctgagcactttgtgtgtgctttctgcctgacacagttgtcgaagggcattttcagggagcagaatgacaagacctattgtcaaccttgcttcaataagctcttcccactgtaatgccaactgatccatagcctcttcagattccttataaaatttaaaccaagagaggagaggaaagggtaaattttctgttactgaccttctgcttaatagtcttatagaaaaaggaaaggtgatgagcaaataaaggaacttctagactttacatgactaggctgataatcttattttttaggcttctatacagttaattctataaattctctttctccctctcttctccaatcaagcacttggagttagatctaggtccttctatctcgtccctctacagatgtattttccacttgcataattcatgccaacactggttttcttaggtttctccattttcacctctagtgatggccctactcatatcttctctaatttggtcctgatacttgtttcttttcacgttttcccatttccctgtggctcactgtcttacaatcactgctgtggaatcatgataccacttttagctctttgcatcttccttcagtgtatttttgtttttcaagaggaagtagattttaactggacaactttgagtactgacatcattgataaataaactggcttgtggtttcaataaaaaaatg

SEQ ID NO: 426530 - DNA, 1649 bp, Homo sapiens
aatacatctatttttaattcaaatatatggtatgagtcattgtgtttagatcttgcatccatctggaaattattatttagtagtattttattttaaaatatcagatgctttttttcttcccagatgctgttttagatattagagatataatggtgacaagatcaacaatatctagtttctctcagagctaatgttcctgtaaggggagacagcccacaaagatgattttaaataaaggtaaatgccataaagacggtgaaagaagatgatgtgacaaggagggactgaagagatgcctctctgataagatgatatttgagtgattcttgcatcacatgaagaggacaactatatcaggctctgggacagaactatccaagccaagggaatacttagtacaaaggcactgaggagcaatagcccctaacacttattaaatgtttactatgaaccagacacaatgccaaaacacttcctctgcattatctcatttatttcttacaactaccctttgaattaggtaacagtaatcatcctattttgaatatgaggacacagattgaaagggcctcctctcagtctccagtgtagctttcagggctcaacctgcaacagtgaattcctgattttatctctccaggctttcatgagaaggacaagaagccatattgccgaaaggatttcttagccatgttctcacccaagtgtggtggctgcaatcgcccagtgttggaaaactacctttcagccatggacactgtctggcacccagagtgctttgtttgtggggactgcttcaccagtttttctactggctccttctttgaactggatggacgtccattctgtgagctccattaccatcaccgccggggaacgctctgccatgggtgtgggcagcccatcactggccgttgtatcagtgccatggggtacaagttccatcctgagcactttgtgtgtgctttctgcctgacacagttgtcgaagggcattttcagggagcagaatgacaagacctattgtcaaccttgcttcaataagctcttcccactgtaatgccaactgatccatagcctcttcagattccttataaaatttaaaccaagagaggagaggaaagggtaaattttctgttactgaccttctgcttaatagtcttatagaaaaaggaaaggtgatgagcaaataaaggaacttctagactttacatgactaggctgataatcttattttttaggcttctatacagttaattctataaattctctttctccctctcttctccaatcaagcacttggagttagatctaggtccttctatctcgtccctctacagatgtattttccacttgcataattcatgccaacactggttttcttaggtttctccattttcacctctagtgatggccctactcatatcttctctaatttggtcctgatacttgtttcttttcacgttttcccatttccctgtggctcactgtcttacaatcactgctgtggaatcatgataccacttttagctctttgcatcttccttcagtgtatttttgtttttcaagaggaagtagattttaactggacaactttgagtactgacatcattgataaataaactggcttgtggtttcaataaaaaaatg

SEQ ID NO: 426531 - DNA, 1051 bp, Homo sapiens
aaacgagatacagatccatttgcttgtctgttttgcaagcgggaaatctagtctccatttgtcaagaacctgagggaaattcctgtagctggcaggtaactgtcaggaatttcaaggctgaaaattttactttgctgacattttacctcttgacatttgcattctttttctctctcttctctctaccccaggactgcttcaccagtttttctactggctccttctttgaactggatggacgtccattctgtgagctccattaccatcaccgccggggaacgctctgccatgggtgtgggcagcccatcactggccgttgtatcagtgccatggggtacaagttccatcctgagcactttgtgtgtgctttctgcctgacacagttgtcgaagggcattttcagggagcagaatgacaagacctattgtcaaccttgcttcaataagctcttcccactgtaatgccaactgatccatagcctcttcagattccttataaaatttaaaccaagagaggagaggaaagggtaaattttctgttactgaccttctgcttaatagtcttatagaaaaaggaaaggtgatgagcaaataaaggaacttctagactttacatgactaggctgataatcttattttttaggcttctatacagttaattctataaattctctttctccctctcttctccaatcaagcacttggagttagatctaggtccttctatctcgtccctctacagatgtattttccacttgcataattcatgccaacactggttttcttaggtttctccattttcacctctagtgatggccctactcatatcttctctaatttggtcctgatacttgtttcttttcacgttttcccatttccctgtggctcactgtcttacaatcactgctgtggaatcatgataccacttttagctctttgcatcttccttcagtgtatttttgtttttcaagaggaagtagattttaactggacaactttgagtactgacatcattgataaataaactggcttgtggtttcaataaaaaaatg

SEQ ID NO: 426532 - DNA, 379 bp, Homo sapiens
tagaggctgccttatgctgtctcatccagttcctttgcggtcctcttcttcagcacatgccaaagctgttcctcacggcctgtgagacaagagcatcttggatgtaggacaatggaagagttaggtgagtgaggagcctgaggagaaactctgagggagtgaagacttggctgccatctccttgtgtggtggggtatacttctggctagactgagggtagtaatggaagattttattttcacttctttcctgtcctcagccctgccaagagtgaagcatgaggaactatgattgttttggggaactatgggttcactgtttgcagtggcaaaatagatggagagtttggtgctaaccgcggaataaactcttggcaaat

SEQ ID NO: 426533 - DNA, 1879 bp, Homo sapiens
aaaaaaagctcaccaaatcaaaagagaggaagtgctaagcaaatacaggaaccaaaaaggtttatagaggctgccttatgctgtctcatccagttcctttgcggtcctcttcttcagcacatgccaaagctgttcctcacggcctgtgagacaagagcatcttggatgtaggacaatggaagagttagatgccttattggaggaactggaacgctccacccttcaggacagtgatgaatattccaacccagctcctcttcccctggatcagcattccagaaaggagactaaccttgatgagacttcggagatcctttctattcaggataacacaagtcccttgccgtgaagcccaagagccaaaggaatcaccaccaccttctaaaacgtcagcagctgctcagttggatgagctcatggctcacctgactgagatgcaggccaaggttgcagtgagagcagatgctggcaagaagcacttaccagacaagcaggatcacaaggcctccctggactcaatgcttgggggtctcgagcaggaattgcaggaccttggcattgccacagtgcccaagggccattgtgcatcctgccagaaaccgattgctgggaaggtgatccatgctctagggcaatcatggcatcctgagcattttgtctgtactcattgcaaagaagagattggctccagtcccttctttgagcggagtggcttggcctactgccccaacgactaccaccaacttttttctccacgctgtgcttactgcgctgctcccatcctggataaagtgctgacagcaatgaaccagacctggcacccagagcacttcttctgctctcactgcggagaggtgtttggtgcagaaggctttcatgagaaggacaagaagccatattgccgaaaggatttcttagccatgttctcacccaagtgtggtggctgcaatcgcccagtgttggaaaactacctttcagccatggacactgtctggcacccagagtgctttgtttgtggggactgcttcaccagtttttctactggctccttctttgaactggatggacgtccattctgtgagctccattaccatcaccgccggggaacgctctgccatgggtgtgggcagcccatcactggccgttgtatcagtgccatggggtacaagttccatcctgagcactttgtgtgtgctttctgcctgacacagttgtcgaagggcattttcagggagcagaatgacaagacctattgtcaaccttgcttcaataagctcttcccactgtaatgccaactgatccatagcctcttcagattccttataaaatttaaaccaagagaggagaggaaagggtaaattttctgttactgaccttctgcttaatagtcttatagaaaaaggaaaggtgatgagcaaataaaggaacttctagactttacatgactaggctgataatcttattttttaggcttctatacagttaattctataaattctctttctccctctcttctccaatcaagcacttggagttagatctaggtccttctatctcgtccctctacagatgtattttccacttgcataattcatgccaacactggttttcttaggtttctccattttcacctctagtgatggccctactcatatcttctctaatttggtcctgatacttgtttcttttcacgttttcccatttccctgtggctcactgtcttacaatcactgctgtggaatcatgataccacttttagctctttgcatcttccttcagtgtatttttgtttttcaagaggaagtagattttaactggacaactttgagtactgacatcattgataaataaactggcttgtggtttcaataaaaaaatg

SEQ ID NO: 426534 - DNA, 2214 bp, Homo sapiens
aaaaaaagctcaccaaatcaaaagagaggaagtgctaagcaaatacaggaaccaaaaaggtttatagaggctgccttatgctgtctcatccagttcctttgcggtcctcttcttcagcacatgccaaagctgttcctcacggcctgtgagacaagagcatcttggatgtaggacaatggaagagttagatgccttattggaggaactggaacgctccacccttcaggacagtgatgaatattccaacccagctcctcttcccctggatcagcattccagaaaggagactaaccttgatgagacttcggagatcctttctattcaggataacacaagtcccttgccggcgcagctcgtgtatactaccaatatccaggagctcaatgtctacagtgaagcccaagagccaaaggaatcaccaccaccttctaaaacgtcagcagctgctcagttggatgagctcatggctcacctgactgagatgcaggccaagtagagacggagtttcaccatcttggccaggctggtctcgaactcctgacttcgtgatccacctgcctcggcctcccaaagtgctgggattacaggcgtgagccactgcgcccggccaaaaggactgttaaagagacctgactaagcaggacagaggagaccagtgagcaagctgagacacagcaagggagatcaaagtatggctctgacagtaggaaggatgagaagtcccaagcccatattgagataaaatctgcctctttgttctagcctctagaacacctctaaagttgcagtgagagcagatgctggcaagaagcacttaccagacaagcaggatcacaaggcctccctggactcaatgcttgggggtctcgagcaggaattgcaggaccttggcattgccacagtgcccaagggccattgtgcatcctgccagaaaccgattgctgggaaggtgatccatgctctagggcaatcatggcatcctgagcattttgtctgtactcattgcaaagaagagattggctccagtcccttctttgagcggagtggcttggcctactgccccaacgactaccaccaacttttttctccacgctgtgcttactgcgctgctcccatcctggataaagtgctgacagcaatgaaccagacctggcacccagagcacttcttctgctctcactgcggagaggtgtttggtgcagaaggctttcatgagaaggacaagaagccatattgccgaaaggatttcttagccatgttctcacccaagtgtggtggctgcaatcgcccagtgttggaaaactacctttcagccatggacactgtctggcacccagagtgctttgtttgtggggactgcttcaccagtttttctactggctccttctttgaactggatggacgtccattctgtgagctccattaccatcaccgccggggaacgctctgccatgggtgtgggcagcccatcactggccgttgtatcagtgccatggggtacaagttccatcctgagcactttgtgtgtgctttctgcctgacacagttgtcgaagggcattttcagggagcagaatgacaagacctattgtcaaccttgcttcaataagctcttcccactgtaatgccaactgatccatagcctcttcagattccttataaaatttaaaccaagagaggagaggaaagggtaaattttctgttactgaccttctgcttaatagtcttatagaaaaaggaaaggtgatgagcaaataaaggaacttctagactttacatgactaggctgataatcttattttttaggcttctatacagttaattctataaattctctttctccctctcttctccaatcaagcacttggagttagatctaggtccttctatctcgtccctctacagatgtattttccacttgcataattcatgccaacactggttttcttaggtttctccattttcacctctagtgatggccctactcatatcttctctaatttggtcctgatacttgtttcttttcacgttttcccatttccctgtggctcactgtcttacaatcactgctgtggaatcatgataccacttttagctctttgcatcttccttcagtgtatttttgtttttcaagaggaagtagattttaactggacaactttgagtactgacatcattgataaataaactggcttgtggtttcaataaaaaaatg

SEQ ID NO: 426535 - DNA, 3129 bp, Homo sapiens
ttctccgctccccaagccggagcccgagctggaggaagcccccaggtgccaggatctgcccggatccgcgcccgctccggccggcaccatggacagcgaggcattccagagcgcgcgggactttctggacatgaacttccagtcgctggccatgaaacacatggatctgaagcagatggagctggacacggcggcggccaaggtggatgaactgaccaagcagctggagtcgctgtggtcagactctcccgcgcctcctggcccgcaggccggacccccttctaggccgccccggtacagctccagctcgatccctgagcccttcggcagccgagggtcccccccggaaggcggccaccgacggcgcagacaccccgttcggacgatcagagagtgccccaaccctacacccctacagcccgctgtcccccaagggacggccgtcgtcgccgcgcaccccgctctacctgcagccggacgcctacggcagcctggaccgcgcgacctcgccccggccccgcgccttcgatggcgcaggcagctccctcggccgtgcgccctccccgcggacccgggccaggcccgctccgccagcagggtccccccacgcctttcgacttcctgggccgcgcaggctccccccgcggcagccccctggcggaggggccccaggccttcttccccgagcgtgggccgtcaccgcgcccccctgccacagcctacgacgcgccagcgtccgccttcgggagctccctgctaggctccggcggcagcgcattcgccccgcctctgcgcgcgcaagacgacctgacgctgcgccggcggcctccgaaagcctggaacgagtctgacctggacgtggcgtacgagaagaagccttcgcagacagcgagctatgaacgcctggacgtcttcgcaaggcctgcctcgccgagcctgcagctgttgccttggagggagagcagcctggatggactggggggcaccggcaaggacaacctcactagcgccaccctgccgcgcaattacaaggtctctcctctggccagcgaccggcgttcagacgcgggcagctaccggcgctcgctgggctccgcggggccgtcgggcactttgcctcgcagctggcagcccgtcagccgcatccccatgcccccctccagcccccagccccgcggggccccgcgccagcgtcccatccccctcagcatgatcttcaagctgcagaacgccttctgggagcacggggccagccgcgccatgctccctgggtcccccctcttcacccgagcacccccgcctaagctgcagccccaaccacaaccacagccccagccacaatcacaaccacagccccagctgcccccacagccccagacccaaccccaaacccctaccccagccccccagcatccccaacagacatggccccctgtgaacgaaggaccccccaaaccccccaccgagctggagcctgagccggagatagaggggctgctgacaccagtgctggaggctggcgatgtggatgaaggccctgtagcaaggcctctcagccccacgaggctgcagccagcactgccaccggaggcacagtcggtgcccgagctggaggaggtggcacgggtgttggcggaaattccccggcccctcaaacgcaggggctccatggagcaggcccctgctgtggccctgccccctacccacaagaaacagtaccagcagatcatcagccgcctcttccatcgtcatggggggccagggcccggggggccggagccagagctgtcccccatcactgagggatctgaggccagggcagggccccctgctcctgccccaccagctcccattccacccccggccccgtcccagagcagcccaccagagcagccgcagagcatggagatgcgctctgtgctgcggaaggcgggctccccgcgcaaggcccgccgcgcgcgcctcaaccctctggtgctcctcctggacgcggcgctgaccggggagctggaggtggtgcagcaggcggtgaaggagatgaacgacccgagccagcccaacgaggagggcatcactgccttgcacaacgccatctgcggcgccaactactctatcgtggatttcctcatcaccgcgggtgccaatgtcaactcccccgacagccacggctggacacccttgcactgcgcggcgtcgtgcaacgacacagtcatctgcatggcgctggtgcagcacggcgctgcaatcttcgccaccacgctcagcgacggcgccaccgccttcgagaagtgcgacccttaccgcgagggttatgctgactgcgccacctacctggcagacgtcgagcagagtatggggctgatgaacagcggggcagtgtacgctctctgggactacagcgccgagttcggggacgagctgtccttccgcgagggcgagtcggtcaccgtgctgcggagggacgggccggaggagaccgactggtggtgggccgcgctgcacggccaggagggctacgtgccgcggaactacttcgggctgttccccagggtgaagcctcaaaggagtaaagtctagcaggatagaaggaggtttctgaggctgacagaaacaagcattcctgccttccctccagacctctccctctgttttttgctgcctttatctgcacccctcaccctgctggtggtggtccttgccaccggttctctgttctcctggaagtccagggaagaaggagggccccagccttaaatttagtaatctgccttagccttgggaggtctgggaagggctggaaatcactggggacaggaaaccacttccttttgccaaatcagatcccgtccaaagtgcctcccatgcctaccaccatcatcacatcccccagcaagccagccacctgcccagccgggcctgggatgggccaccacaccactggatattcctgggagtcactgctgacaccatctctcccagcagtcttggggtctgggtgggaaacattggtctctaccaggatccctgccccacctctccccaattaagtgccttcacacagcactggtttaatgtttataaacaaaatagagaaactttccttataaataaaagtagtttgcacagaaa

SEQ ID NO: 426536 - DNA, 2589 bp, Homo sapiens
gcggccgcgtcgacaaacaagtgagtctcggctggagtgcagtggtgcagtggtgcaatctcggctcactgcaacctccgcctcctgggttcaagcgattcctgtgcctcggccttccgagtagctgggattgcaggcgtgtgccaccacgcccggctaatttttttttttttttttttttttttgtatttttagtagagacagggttttaccatgttggccaggctggtctcaaactcctgatctcaagagatctgcctgcctcggcctcccaaagttctgggattacaggtgtgagccactcgactcagccaataatgcatatttttatttccacctgctttactgtcagaatgagtaagacagagaagaaatcattaaacaccaggattctacttcctgctggagttttctgcctgagatgttaggagaggaaactctcaggatctcagaaaatcacatctatcacggttggtagaagtagattctagagtcagccagaactgagttcaagtcccaactgcatggctttgggcaactgacttgtcctctctgaggcccagattccctttcggtaatgtggagatggcagtgtatctacctcacaaagcagtggtgagattacaataaggtaggcatgtaaagcgccaggcacatactaactgctcaataaatgggaggcatcataattgtatattattcacagcccaaggaaagtgtagcccagagagggcaaggaacttgaccctgaggtcaacacagaaaatcatgtgctggttgtatgccctggaagttgtggagagggagtgttgggtgtcttcctggggacctgtcctctgatgggctcttgttccggctaggaccccccaaaccccccaccgagctggagcctgagccggagatagaggggctgctgacaccagtgctggaggctggcgatgtggatgaaggccctgtagcaaggcctctcagccccacgaggctgcagccagcactgccaccggaggcacagtcggtgcccgagctggaggaggtggcacgggtgttggcggaaattccccggcccctcaaacgcaggggctccatggagcaggcccctgctgtggccctgccccctacccacaagaaacagtaccagcagatcatcagccgcctcttccatcgtcatggggggccagggcccggggggccggagccagagctgtcccccatcactgagggatctgaggccagggcagggccccctgctcctgccccaccagctcccattccacccccggccccgtcccagagcagcccaccagagcagccgcagagcatggagatgcgctctgtgctgcggaaggcgggctccccgcgcaaggcccgccgcgcgcgcctcaaccctctggtgctcctcctggacgcggcgctgaccggggagctggaggtggtgcagcaggcggtgaaggagatgaacgacccgagccagcccaacgaggagggcatcactgccttgcacaacgccatctgcggcgccaactactctatcgtggatttcctcatcaccgcgggtgccaatgtcaactcccccgacagccacggctggacacccttgcactgcgcggcgtcgtgcaacgacacagtcatctgcatggcgctggtgcagcacggcgctgcaatcttcgccaccacgctcagcgacggcgccaccgccttcgagaagtgcgacccttaccgcgagggttatgctgactgcgccacctacctggcagacgtcgagcagagtatggggctgatgaacagcggggcagtgtacgctctctgggactacagcgccgagttcggggacgagctgtccttccgcgagggcgagtcggtcaccgtgctgcggagggacgggccggaggagaccgactggtggtgggccgcgctgcacggccaggagggctacgtgccgcggaactacttcgggctgttccccagggtgaagcctcaaaggagtaaagtctagcaggatagaaggaggtttctgaggctgacagaaacaagcattcctgccttccctccagacctctccctctgttttttgctgcctttatctgcacccctcaccctgctggtggtggtccttgccaccggttctctgttctcctggaagtccagggaagaaggagggccccagccttaaatttagtaatctgccttagccttgggaggtctgggaagggctggaaatcactggggacaggaaaccacttccttttgccaaatcagatcccgtccaaagtgcctcccatgcctaccaccatcatcacatcccccagcaagccagccacctgcccagccgggcctgggatgggccaccacaccactggatattcctgggagtcactgctgacaccatctctcccagcagtcttggggtctgggtgggaaacattggtctctaccaggatccctgccccacctctccccaattaagtgccttcacacagcactggtttaatgtttataaacaaaatagagaaactttccttataaataaaagtagtttgcacagaaaaaaaaaaaacacaaccttcggccgccccaccaagctctgtctcc

SEQ ID NO: 426537 - DNA, 342 bp, Homo sapiens
actgaaaaaaaatcactggtgtctgaaaaactggttcactttacaaaaaaagaatccaggcatcagtgcctcccatgcctaccaccatcatcacatcccccagcaagccagccacctgcccagccgggcctgggatgggccaccacaccactggatattcctgggagtcactgctgacaccatctctcccagcagtcttggggtctgggtgggaaacattggtctctaccaggatccctgccccacctctccccaattaagtgccttcacacagcactggtttaatgtttataaacaaaatagagaaactttccttataaataaaagtagtttgcacagaaa

SEQ ID NO: 426538 - DNA, 511 bp, Homo sapiens
gacctggattactccggtctgaactcagatcacgtaggactttaatcgttgaacaaacgaacctttaatagcggctgcaccatcgggatgtcctgatccaacatcgaggtcgtaaaccctattgttgatatggactctagaataggattgcgctgttatccctagggtaacttgttccgttggtcaagttattggatcaattgagtatagggtttcgatgagtcatcaaacccttaaggtaggcatgtaaagcgccaggcacatactaactgctcaataaatgggaggcatcataattgtatattattcacagcccaaggaaagtgtagcccagagagggcaaggaacttgaccctgaggtcaacacagaaaatcatgtgctggttgtatgccctggaagttgtggagagggtttcgatgaggtcatcaaacccttcatcaaacccttcataaaaccctaaaccctatacaagtagaccactacagccagggtttcgagtgacggggatcc

SEQ ID NO: 426539 - DNA, 3161 bp, Homo sapiens
ttctccgctccccaagccggagcccgagctggaggaagcccccaggtgccaggatctgcccggatccgcgcccgctccggccggcaccatggacagcgaggcattccagagcgcgcgggactttctggacatgaacttccagtcgctggccatgaaacacatggatctgaagcagatggagctggacacggcggcggccaaggtggatgaactgaccaagcagctggagtcgctgtggtcagactctcccgcgcctcctggcccgcaggccggacccccttctaggccgccccggtacagctccagctcgatccctgagcccttcggcagccgagggtcccccccggaaggcggccaccgacggcgcagacaccccgttcggacgatcagagagtgccccaaccctacacccctacagcccgctgtcccccaagggacggccgtcgtcgccgcgcaccccgctctacctgcagccggacgcctacggcagcctggaccgcgcgacctcgccccggccccgcgccttcgatggcgcaggcagctccctcggccgtgcgccctccccgcggacccgggccaggcccgctccgccagcagggtccccccacgcctttcgacttcctgggccgcgcaggctccccccgcggcagccccctggcggaggggccccaggccttcttccccgagcgtgggccgtcaccgcgcccccctgccacagcctacgacgcgccagcgtccgccttcgggagctccctgctaggctccggcggcagcgcattcgccccgcctctgcgcgcgcaagacgacctgacgctgcgccggcggcctccgaaagcctggaacgagtctgacctggacgtggcgtacgagaagaagccttcgcagacagcgagctatgaacgcctggacgtcttcgcaaggcctgcctcgccgagcctgcagctgttgccttggagggagagcagcctggatggactggggggcaccggcaaggacaacctcactagcgccaccctgccgcgcaattacaaggtctctcctctggccagcgaccggcgttcagacgcgggcagctaccggcgctcgctgggctccgcggggccgtcgggcactttgcctcgcagctggcagcccgtcagccgcatccccatgcccccctccagcccccagccccgcggggccccgcgccagcgtcccatccccctcagcatgatcttcaagctgcagaacgccttctgggagcacggggccagccgcgccatgctccctgggtcccccctcttcacccgagcacccccgcctaagctgcagccccaaccacaaccacagccccagccacaatcacaaccacagccccagctgcccccacagccccagacccaaccccaaacccctaccccagccccccagcatccccaacagacatggccccctgtgaacgaaggaccccccaaaccccccaccgagctggagcctgagccggagatagaggggctgctgacaccagtgctggaggctggcgatgtggatgaaggccctgtagcaaggcctctcagccccacgaggctgcagccagcactgccaccggaggcacagtcggtgcccgagctggaggaggtggcacgggtgttggcggaaattccccggcccctcaaacgcaggggctccatggagcaggcccctgctgtggccctgccccctacccacaagaaacagtaccagcagatcatcagccgcctcttccatcgtcatggggggccagggcccggggggccggagccagagctgtcccccatcactgagggatctgaggccagggcagggccccctgctcctgccccaccagctcccattccacccccggccccgtcccagagcagcccaccagagcagccgcagagcatggagatgcgctctgtgctgcggaaggcgggctccccgcgcaaggcccgccgcgcgcgcctcaaccctctggtgctcctcctggacgcggcgctgaccggggagctggaggtggtgcagcaggcggtgaaggagatgaacgacccgagccagcccaacgaggagggcatcactgccttgcacaacgccatctgcggcgccaactactctatcgtggatttcctcatcaccgcgggtgccaatgtcaactcccccgacagccacggctggacacccttgcactgcgcggcgtcgtgcaacgacacagtcatctgcatggcgctggtgcagcacggcgctgcaatcttcgccaccacgctcagcgacggcgccaccgccttcgagaagtgcgacccttaccgcgagggttatgctgactgcgccacctacctggcagacgtcgagcagagtatggggctgatgaacagcggggcagtgtacgctctctgggactacagcgccgagttcggggacgagctgtccttccgcgagggcgagtcggtcaccgtgctgcggagggacgggccggaggagaccgactggtggtgggccgcgctgcacggccaggagggctacgtgccgcggaactacttcgggctgttccccagggtgaagcctcaaaggagtaaagtctagcaggatagaaggaggtttctgaggctgacagaaacaagcattcctgccttccctccagacctctccctctgttttttgctgcctttatctgcacccctcaccctgctggtggtggtccttgccaccggttctctgttctcctggaagtccagggaagaaggagggccccagccttaaatttagtaatctgccttagccttgggaggtctgggaagggctggaaatcactggggacaggaaaccacttccttttgccaaatcagatcccgtccaaagtgcctcccatgcctaccaccatcatcacatcccccagcaagccagccacctgcccagccgggcctgggatgggccaccacaccactggatattcctgggagtcactgctgacaccatctctcccagcagtcttggggtctgggtgggaaacattggtctctaccaggatccctgccccacctctccccaattaagtgccttcacacagcactggtttaatgtttataaacaaaatagagaaactggtttaatgtttataaacaaaatagagaaactttccttataaataaaagtagtttgcacagaaa

SEQ ID NO: 426540 - DNA, 1144 bp, Homo sapiens
tcgaaagaggaggtgacagcacatggacagacatggacagcacgaggagggtatgaacgacccgagccagcccaacgaggagggcatcactgccttgcacaacgccatctgcggcgccaactactctatcgtggatttcctcatcaccgcgggtgccaatgtcaactcccccgacagccacggctggacacccttgcactgcgcggcgtcgtgcaacgacacagtcatctgcatggcgctggtgcagcacggcgctgcaatcttcgccaccacgctcagcgacggcgccaccgccttcgagaagtgcgacccttaccgcgagggttatgctgactgcgccacctacctggcagacgtcgagcagagtatggggctgatgaacagcggggcagtgtacgctctctgggactacagcgccgagttcggggacgagctgtccttccgcgagggcgagtcggtcaccgtgctgcggagggacgggccggaggagaccgactggtggtgggccgcgctgcacggccaggagggctacgtgccgcggaactacttcgggctgttccccagggtgaagcctcaaaggagtaaagtctagcaggatagaaggaggtttctgaggctgacagaaacaagcattcctgccttccctccagacctctccctctgttttttgctgcctttatctgcacccctcaccctgctggtggtggtccttgccaccggttctctgttctcctggaagtccagggaagaaggagggccccagccttaaatttagtaatctgccttagccttgggaggtctgggaagggctggaaatcactggggacaggaaaccacttccttttgccaaatcagatcccgtccaaagtgcctcccatgcctaccaccatcatcacatcccccagcaagccagccacctgcccagccgggcctgggatgggccaccacaccactggatattcctgggagtcactgctgacaccatctctcccagcagtcttggggtctgggtgggaaacattggtctctaccaggatccctgccccacctctccccaattaagtgccttcacacagcactggtttaatgtttataaacaaaatagagaaactttccttataaataaaagtagtttgcacagaaa

SEQ ID NO: 426541 - DNA, 1023 bp, Homo sapiens
tttttagtagagacagggtctcgtcatgttgaccaggcttgtcttgaactcctgagctcaggtcatccacccacctcggcctcccaaactgctgggattataggtgtgacccactgctcccggccctgagagaggagattttttaaatatggaggtgggacccaaaaagacaaccaaggtgttagagagaggtgggcttctccttatggcagttaggagacactggaaatattccatttcatcagtggaggctctgattggaaggttccatctggttcttggaggtgacacagaacttggattctggagcagtttgggaggtgctgagaggtccccttaggaaggggtgggaggatagagacaggcagcggatttgcatgtgggatgaggaggtgggagctcctgatgtctgaagatcctgtctctccccagctgttccccagggtgaagcctcaaaggagtaaagtctagcaggatagaaggaggtttctgaggctgacagaaacaagcattcctgccttccctccagacctctccctctgttttttgctgcctttatctgcacccctcaccctgctggtggtggtccttgccaccggttctctgttctcctggaagtccagggaagaaggagggccccagccttaaatttagtaatctgccttagccttgggaggtctgggaagggctggaaatcactggggacaggaaaccacttccttttgccaaatcagatcccgtccaaagtgcctcccatgcctaccaccatcatcacatcccccagcaagccagccacctgcccagccgggcctgggatgggccaccacaccactggatattcctgggagtcactgctgacaccatctctcccagcagtcttggggtctgggtgggaaacattggtctctaccaggatccctgccccacctctccccaattaagtgccttcacacagcactggtttaatgtttataaacaaaatagagaaactttccttataaataaaagtagtttgcacagaaa

SEQ ID NO: 426542 - DNA, 223 bp, Homo sapiens
ttcccagctggggaggtgaaagggtaaagggcttccaggggaaggaactgagttgaggcgttgtcccgctcctgacggcgtctgactccctgagggcggggtctagaggggcggggtcttagccagctccctccctccccaccatgcaggcgcccgctccggccggcaccatggacagcgaggcattccagagcgcgcgggactttctggacatgaacttcca

SEQ ID NO: 426543 - DNA, 1268 bp, Homo sapiens
gtatgtttgtagccagtggggaattattttaactaggcaataatttgatctattttgggaagcctcttgtaatcaaatcatatatcaacattaatcacatggtgagtcctccatggttttcattcctagagattctaggatgtttgacatttctctgcttagcttatagcagaaaggtattggatatcaagaatgtttgaacagtttctcctttttgggaatgaagatgaaattgggctagaatgagatgtgtgattgagagaatgtccctgaggcctgagcagtgtgtccttttgggtatgggcattggaagcatgtagtgaattcttataattttatgttgcctcggcatccatcttgagtataagtttaactttgttataccagaagcaaggcttactcacttttgcacagtttccagttctacacctccttctcgttcctcagtgtgattggtccagatagctgccttatccaactgcctcctttggaccacttcatcatgggacagcttgatgcaatctacttgacaagaccctggaaccccacacccctcatggaaccagtgtccacctcccagtcacagtgtgaccccagggaactcttgcctgcttgctttaaacccaccacttaaaagtctccacagaaaacctgtttgaatagtacccttgacccaataagggcattggcccctgggtgtctctctctctctctctctctctctccctctctctccctctctctctctcgctccctgacctctgcgtgtggactccaggcatgccatatacccctcaggacctgtaagtaatactatctttatttttattttatatctctcctaatcattgaaaaggtgctctctatcttgaagatactatattaaataaaatgagaacttgtccctaacacagttagtgataggctgaaacacgctgattgcactctttacccatttagtgatttttctcaagttactctacaccatgtattatcaacataattgatattacagaatagaattataagacacttcttttgccacagaaagttctattggactcagattatctagagctactacatgtatgctattctatgataaaagatgtagatgtgataaaaacatttataaaatatctgtcttagaaaagttagctaaaattattttgggaaaagtatgtttgaaaatagaatcgtaagctaccacattgtgataaatatttctaaatgtgtctattaacttgtcaggagacaacagagtgaat

SEQ ID NO: 426544 - DNA, 798 bp, Homo sapiens
atcgatgatgactataaaaaaaatggatctcatcggaatctgaacaaaatgagtgaccaaatcatttctgtgccacttctgtgagctgaggtccagcactgggaccatgccaggcaaacatgaggagggagtttacagggactagggtattggaaaactaacctacccatatatattagagcaaatgaattgttctcagttctgtaaatatccagctgtggtttgacatagcaactctctttgtatttgcttggcagcatttatagaaacagctggtagaccctggggaaccagggcatagtgagattcatgggacgttatttcacctactcttgagccattcacacatttgagctcgcagaattatctggtcaatgagcagtctcttgagggtaatgagatggtcaacatccaaatccaaagataactaatgtctcagattttttttaaaaaagtttatattctatagtgatcaaagatgtaagaataatttttcttgtcattcattggatagtccagtgagtgtctactgtgaattcttatattcacttgtaactaaacattccatttggcaaatttcgtttcataacttccctaatttcctctacactttgtagattgggtgagatacaattccatggaattttaccactgaaccagtggagggctaattttgtcatttgtaccagttaactaacttgggaggaaacagaacaacacactcctgaggtagtatccaatttttagtaaatttatttttattatttttcaaactgtcagtgatttggtttggtgaac

SEQ ID NO: 426545 - DNA, 179 bp, Homo sapiens
  misc_feature (1)..(1): n is a, c, g, or t
ncgacgatagatcgagctcggtacctcatcttcaagaatccgtaggaattctcccatgtggactttacggttaacctgaacaggtcttggaaaaaggactttaaacattctcctgttctgtggaataagtatactttttttctggacatacaccttgtcagtgagtatgtatcataatt

SEQ ID NO: 426546 - DNA, 3872 bp, Homo sapiens
ccaaatcatagatcaagatattttatttatgtatgtcttttaaatgaagagtggttaggatagtcctgattattgcacataaatattgcctttcactagattattgttttgggccaaattttagactattattttaaaaaagagtaccttagtttaatccaacctttccagatacttagaaattattgaaatgtatattttgtgaagatggtcttatgaaagttgttgagctagaaacatgtccttcaccagtggaattcttagaagctttccttgggcttcactgggtgctaatagaccatgatcgtattgctctgtatataatggtacaaattttgttttataacactcagtcttaatagaatgggaatattttatcttactaacgtagtcattagctggccactctctgtgtccattggaccttatagggtaaagggagggcagtgcgtatttgaagcctgtgcacgtgacacacaaagggcttagcaacctccgtgttttcccagcacaggatacccattcttcctgaatgtttcattgttaaattagattgtgtgtgtgtgtgtgtgtgtgtgtgtgtattttatattaacatacagatgtatgtattttagttgcattttttttcttaaaatgttattttttctctttttcttttatgtcaggtgatgatagagcccctagggaagcaaaactgtccatgcccttgccttaactttcagatacgataaaaacaacatttataaaatacctgtcttagaaatattagctaaaattatgttggggaaagtatgtttgaaaatagaattgtaagctaccacattgtgataaatattactaaatttgtttattgacttgtcaggaagcaaaagaatgaattaaagaaaactccagagaatgagctgacaacctactccctggtcagtggctctccatgcctacctgtggtctcttggacacccttgcagaagatgacttcctgggaactcttctgggagtgaatgttatcagcaaattcccaaaacaacaccccttagacaaaaagcctcctcacctatgcattgcctagaccacccactaaaggtgatggccacaaagaggtggatttgttgagttggtgccattccttctactgccagcttcaccaaaacaatgacacagtcttccttccgcatggagactcttctctttcctgtgttgcagtggatgcctcctgcagataagaaatgcttaactgagaaatgctcatgttgggatatcatcgatgagactttaatttgggcatggtgactgtttcccttgctgccacttgactcaatcccaggagcctcagtagaggatataatattacacaagatgctcaaaatggtggaattgctcagtgctcccataaatatacatttataattttcatttgccacacggtaaactgaaaaatacagactatattaaaaagaaactgcatgattttttttcaaaaattcaaagcatatttaaataatatataaattaaatgccctcctctcttccaattctgtccctatagttttcctctattaagtgaactacatgcattcttttagtggatagatgcacacaaacacacaagccattatggggaaggatccacgtgtgtggccatattgtaacacatttttctgcaaatcacctctttcatttaacagcccttattcaatggcctttttctttttcagtagtacatacacatctgtgtcatttgttgaatgacgacatgaatgttttgtagataaaatataattaaatgttttaagcatttctcactcatagatatttatgttagcaccaaatttctgtgcaatgaacctccctatatatcagtaattttgcatttgtctataatatcataataaattacttataagttgaattactgggattaagtatgtgcacactttatatttatattttgaaaattattgcaagattgccttcaaaaatgtggttaacaactttatcttcaaatggcaatgaatgagattgccagctttcctacagcctcacaatggattttataaatatttaacatttttgccaatgtgatcacccaaactattgtcttaaattgtatctcttttgtttttgagtttggtcattttttcatgtttattagccatctgtattttttaatttcttctttatgtccaattttgtgggtgggaggaggatttagtctcttcctgatttcgaagagctcatttactatttcgggaaataagatttggattgtcaaccattatagctattttttacacacttttcaactttgtttttgttataagaatgtgtatgattgttacatgtccaagtataaccatgttcgcttttatggcttctgagtttcatgtcatttttggaaagatatatatattgagtccataaaacccttcacctatgttaaattctaattcttttgtgtttttttaattcaaattcttaaatcatgagaaatttttttgttttgaaatcttaaagttgccaagttacttgccattacttgcgattatttgccaataattgcccatttatctgtaccgccatcttgcgcatatgctgtactctcatctgtgactggctccatttttgttctgtggatttgtgtgtctcttcttctgcctcctgtctcgtgtctgctcgttggaagaaattacagtttagactgcaatttcatcaactttaataaatcaattgaggggagaattggtttttaaaaatattaagtaagtcttcgtatccaaggacaaggtatgtcttttcttattcaataattttaattactgttaatattttcactgtggtgatgggagtttttcttttaatttattttcttgttcattttttgtatctaaagtttttgttttgttttgttttgggggtaagttgtcaccttactgtttcttgttgcttttcagattttttcaaagtatagactaaatccttcacaaatatttaaagtttttattttcccccttcatattgatcctgattttagttatgttgacaaagtccacagactgttactatcagaacacttgaacagttatggaaatattacctacccttgatttaatcagagtttaatggtatgcttctttggtttgactggcacattgtcgctggtcatttcctcccaaagaccaccagaaagagctatgatcaagcaaagctgagtttgttaaacttacctgcagcaagggaaaacaccaccttgatagggtttaataatgtttcaaaatcaagaaatgaggctttggggtctgggcagggaactaattagaaatgggcaaaatttgtcatgcaataccttgtgggaaagtgagatgaggttcttaatgtgagtattgatggtgaaatcattttctaggtgagctgtttgcctatataaagatgttatcaatgacagaagaactatttgcctagataaacaaactgaatttatttattggtttacagttttatcttgctgggcaggactctgctgggggtggtatcaggtcttattcccaataggtaagttatttggatatgggtggtcttaatcatcaatgtgtaaaatgctgattttaagtgcgaaatactttgtctaccatgttaggaaagtctgccaccttttatcttttttaaggaattttaatcaaaaccaggtggtagatataatcaaattgttttgcagaatcaattttcctgttctctttaaagacttttatcactgtgaattaatttactattattgcaacttcctttaattccttgaatgaacagaccctactggttttatttacaagtttcaactaatgaaattgactgtgattttcttttgggctattttg

SEQ ID NO: 426547 - DNA, 4829 bp, Homo sapiens
ccctgtactctgtagattgggtgagatagaattccatggaatttcattgccaaaccagtgaagtgctaattttgacatttgtaccagctaacgtagctgtgaagaaacacaccaatacacttctaaggacagcatagaccaagatctaggtttcatatggatgaatttattcttccctttgaggcaagacaagaaggaaagaaagtattgggaataatgctgccctcccatcctcaagggccagtgggaactctaatattgattgggtgagatacaattccatggaattttaccactgaaccagtggagggctaattttgtcatttgtaccagttaactaacttgggaggaaacagaacaacacactcctgagattggttttcacagaattccatggactttaactgctgaaccaatgatgcactgattttgtcacttgtaccagctaacgcatctgggaggcaacaaaacaatactctcctgaggttaatgtggaccaaaaactagatttcatataaaagagtttattccttctacttgaggtgtgacatgaaggaaagtaatggaaataattctgccctcccattctcaagggccagggggaattcaaatattgaacggaagtgattttggaattgcatggaattctcactgccatcccaaagaaatgctgatcttgtcactcttacctgtttcattccctgggggcagaacaaaaggacgcactccaaagatcggcatgaaccaagaactgggtttcatataaaatattttattctgtcctcttgagatgtgacatgagaaaagtattgagaatacttctatcacctcatcttcaagaatccgtaggaattctcccatggtggactttacggttaacctgaacaggtcttggaaaaaggactttaaacattctcctgttctgtggaataagtatactttttttctggacatacaccttgtcagtgagttccatgtgatactagagttgcatagaatttttaacctttacgccaatgaagatctgaggcaaacattgccccttttttagaagtttgcatttgtcactgataactgtaataattgatctgttgaaaagcctgggaaatgaagatctgatatgtcacttttaccggcttcctcaactgaaaaagaatacaatgaaacacgctgagaatttttgtgctttctcagtcttgctgatgatctttctatgggcctgaagcgtggagagtgccagagaggctgatcctcagcagtgtggcagaggaaagttgggtgcgactaaggggtatgcggtgcccacatgccactgggtcctcagcagtaccacctgattggaagtgatattggtggaagacaacattttgccgcttggaattctcacctccacaccaaagaagtactgtttttgtcatttgcaccagcttctttctccaggaaagatcaaaacgatgcactgcaagtgtgattggtccagatagctgccttatccaactgcctcctttggaccacttcatcatgggacagcttgatgcaatctacttgacaagaccctggaaccccacacccctcatggaaccagtgtccacctcccagtcacagtgtgaccccagggaactcttgcctgcttgctttaaacccaccacttaaaagtctccacagaaaacctgtttgaatagtacccttgacccaataagggcattggcccctgggtgtctctctctctctctctctctctctccctctctctccctctctctctctcgctccctgacctctgcgtgtggactccaggcatgccatatacccctcaggacctgaagcaaaagaatgaattaaagaaaactccagagaatgagctgacaacctactccctggtcagtggctctccatgcctacctgtggtctcttggacacccttgcagaagatgacttcctgggaactcttctgggagtgaatgttatcagcaaattcccaaaacaacaccccttagacaaaaagcctcctcacctatgcattgcctagaccacccactaaaggtgatggccacaaagaggtggatttgttgagttggtgccattccttctactgccagcttcaccaaaacaatgacacagtcttccttccgcatggagactcttctctttcctgtgttgcagtggatgcctcctgcagataagaaatgcttaactgagaaatgctcatgttgggatatcatcgatgagactttaatttgggcatggtgactgtttcccttgctgccacttgactcaatcccaggagcctcagtagaggatataatattacacaagatgctcaaaatggtggaattgctcagtgctcccataaatatacatttataattttcatttgccacacggtaaactgaaaaatacagactatattaaaaagaaactgcatgattttttttcaaaaattcaaagcatatttaaataatatataaattaaatgccctcctctcttccaattctgtccctatagttttcctctattaagtgaactacatgcattcttttagtggatagatgcacacaaacacacaagccattatggggaaggatccacgtgtgtggccatattgtaacacatttttctgcaaatcacctctttcatttaacagcccttattcaatggcctttttctttttcagtagtacatacacatctgtgtcatttgttgaatgacgacatgaatgttttgtagataaaatataattaaatgttttaagcatttctcactcatagatatttatgttagcaccaaatttctgtgcaatgaacctccctatatatcagtaattttgcatttgtctataatatcataataaattacttataagttgaattactgggattaagtatgtgcacactttatatttatattttgaaaattattgcaagattgccttcaaaaatgtggttaacaactttatcttcaaatggcaatgaatgagattgccagctttcctacagcctcacaatggattttataaatatttaacatttttgccaatgtgatcacccaaactattgtcttaaattgtatctcttttgtttttgagtttggtcattttttcatgtttattagccatctgtattttttaatttcttctttatgtccaattttgtgggtgggaggaggatttagtctcttcctgatttcgaagagctcatttactatttcgggaaataagatttggattgtcaaccattatagctattttttacacacttttcaactttgtttttgttataagaatgtgtatgattgttacatgtccaagtataaccatgttcgcttttatggcttctgagtttcatgtcatttttggaaagatatatatattgagtccataaaacccttcacctatgttaaattctaattcttttgtgtttttttaattcaaattcttaaatcatgagaaatttttttgttttgaaatcttaaagttgccaagttacttgccattacttgcgattatttgccaataattgcccatttatctgtaccgccatcttgcgcatatgctgtactctcatctgtgactggctccatttttgttctgtggatttgtgtgtctcttcttctgcctcctgtctcgtgtctgctcgttggaagaaattacagtttagactgcaatttcatcaactttaataaatcaattgaggggagaattggtttttaaaaatattaagtaagtcttcgtatccaaggacaaggtatgtcttttcttattcaataattttaattactgttaatattttcactgtggtgatgggagtttttcttttaatttattttcttgttcattttttgtatctaaagtttttgttttgttttgttttgggggtaagttgtcaccttactgtttcttgttgcttttcagattttttcaaagtatagactaaatccttcacaaatatttaaagtttttattttcccccttcatattgatcctgattttagttatgttgacaaagtccacagactgttactatcagaacacttgaacagttatggaaatattacctacccttgatttaatcagagtttaatggtatgcttctttggtttgactggcacattgtcgctggtcatttcctcccaaagaccaccagaaagagctatgatcaagcaaagctgagtttgttaaacttacctgcagcaagggaaaacaccaccttgatagggtttaataatgtttcaaaatcaagaaatgaggctttggggtctgggcagggaactaattagaaatgggcaaaatttgtcatgcaataccttgtgggaaagtgagatgaggttcttaatgtgagtattgatggtgaaatcattttctaggtgagctgtttgcctatataaagatgttatcaatgacagaagaactatttgcctagataaacaaactgaatttatttattggtttacagttttatcttgctgggcaggactctgctgggggtggtatcaggtcttattcccaataggtaagttatttggatatgggtggtcttaatcatcaatgtgtaaaatgctgattttaagtgcgaaatactttgtctaccatgttaggaaagtctgccaccttttatcttttttaaggaattttaatcaaaaccaggtggtagatataatcaaattgttttgcagaatcaattttcctgttctctttaaagacttttatcactgtgaattaatttactattattgcaacttcctttaattccttgaatgaacagaccctactggttttatttacaagtttcaactaatgaaattgactgtgattttcttttgggctattttg

SEQ ID NO: 426548 - DNA, 4987 bp, Homo sapiens
ctgaaaatggagcgtagaagacatgcttcgatttccaggatggttgtgttttccagagaggcggaggtaaaccactggcgcagccctgcctcccacagataattccgggtgcagtgtttcatatctagacttggacttctatcctaccatacttctttgtgtgcagttcattgtggaaccagcacagattttcatacgaaagttatttctttttaacctcaaaaagtgacagaatggagtgtatcatgaaaaagtctgacatcaaaacctcaaaatgtgatattgattgggtgagatagaattccatggaatttcattgccaaaccagtgaagtgctaattttgacatttgtaccagctaacgtagctgtgaagaaacacaccaatacacttctaaggacagcatagaccaagatctaggtttcatatggatgaatttattcttccctttgaggcaagacaagaaggaaagaaagtattgggaataatgctgccctcccatcctcaagggccagtgggaactctaatattgattggttttcacagaattccatggactttaactgctgaaccaatgatgcactgattttgtcacttgtaccagctaacgcatctgggaggcaacaaaacaatactctcctgaggttaatgtggaccaaaaactagatttcatataaaagagtttattccttctacttgaggtgtgacatgaaggaaagtaatggaaataattctgccctcccattctcaagggccagggggaattcaaatattgaacggaagtgattttggaattgcatggaattctcactgccatcccaaagaaatgctgatcttgtcactcttacctgtttcattccctgggggcagaacaaaaggacgcactccaaagatcggcatgaaccaagaactgggtttcatataaaatattttattctgtcctcttgagatgtgacatgagaaaagtattgagaatacttctatcacctcatcttcaagaatccgtaggaattctcccatggtggactttacggttaacctgaacaggtcttggaaaaaggactttaaacattctcctgttctgtggaataagtatactttttttctggacatacaccttgtcagtgagttccatgtgatactagagttgcatagaatttttaacctttacgccaatgaagatctgaggcaaacattgccccttttttagaagtttgcatttgtcactgataactgtaataattgatctgttgaaaagcctgggaaatgaagatctgatatgtcacttttaccggcttcctcaactgaaaaagaatacaatgaaacacgctgagaatttttgtgctttctcagtcttgctgatgatctttctatgggcctgaagcgtggagagtgccagagaggctgatcctcagcagtgtggcagaggaaagttgggtgcgactaaggggtatgcggtgcccacatgccactgggtcctcagcagtaccacctgattggaagtgatattggtggaagacaacattttgccgcttggaattctcacctccacaccaaagaagtactgtttttgtcatttgcaccagcttctttctccaggaaagatcaaaacgatgcactgcaagtgtgattggtccagatagctgccttatccaactgcctcctttggaccacttcatcatgggacagcttgatgcaatctacttgacaagaccctggaaccccacacccctcatggaaccagtgtccacctcccagtcacagtgtgaccccagggaactcttgcctgcttgctttaaacccaccacttaaaagtctccacagaaaacctgtttgaatagtacccttgacccaataagggcattggcccctgggtgtctctctctctctctctctctctctccctctctctccctctctctctctcgctccctgacctctgcgtgtggactccaggcatgccatatacccctcaggacctgaagcaaaagaatgaattaaagaaaactccagagaatgagctgacaacctactccctggtcagtggctctccatgcctacctgtggtctcttggacacccttgcagaagatgacttcctgggaactcttctgggagtgaatgttatcagcaaattcccaaaacaacaccccttagacaaaaagcctcctcacctatgcattgcctagaccacccactaaaggtgatggccacaaagaggtggatttgttgagttggtgccattccttctactgccagcttcaccaaaacaatgacacagtcttccttccgcatggagactcttctctttcctgtgttgcagtggatgcctcctgcagataagaaatgcttaactgagaaatgctcatgttgggatatcatcgatgagactttaatttgggcatggtgactgtttcccttgctgccacttgactcaatcccaggagcctcagtagaggatataatattacacaagatgctcaaaatggtggaattgctcagtgctcccataaatatacatttataattttcatttgccacacggtaaactgaaaaatacagactatattaaaaagaaactgcatgattttttttcaaaaattcaaagcatatttaaataatatataaattaaatgccctcctctcttccaattctgtccctatagttttcctctattaagtgaactacatgcattcttttagtggatagatgcacacaaacacacaagccattatggggaaggatccacgtgtgtggccatattgtaacacatttttctgcaaatcacctctttcatttaacagcccttattcaatggcctttttctttttcagtagtacatacacatctgtgtcatttgttgaatgacgacatgaatgttttgtagataaaatataattaaatgttttaagcatttctcactcatagatatttatgttagcaccaaatttctgtgcaatgaacctccctatatatcagtaattttgcatttgtctataatatcataataaattacttataagttgaattactgggattaagtatgtgcacactttatatttatattttgaaaattattgcaagattgccttcaaaaatgtggttaacaactttatcttcaaatggcaatgaatgagattgccagctttcctacagcctcacaatggattttataaatatttaacatttttgccaatgtgatcacccaaactattgtcttaaattgtatctcttttgtttttgagtttggtcattttttcatgtttattagccatctgtattttttaatttcttctttatgtccaattttgtgggtgggaggaggatttagtctcttcctgatttcgaagagctcatttactatttcgggaaataagatttggattgtcaaccattatagctattttttacacacttttcaactttgtttttgttataagaatgtgtatgattgttacatgtccaagtataaccatgttcgcttttatggcttctgagtttcatgtcatttttggaaagatatatatattgagtccataaaacccttcacctatgttaaattctaattcttttgtgtttttttaattcaaattcttaaatcatgagaaatttttttgttttgaaatcttaaagttgccaagttacttgccattacttgcgattatttgccaataattgcccatttatctgtaccgccatcttgcgcatatgctgtactctcatctgtgactggctccatttttgttctgtggatttgtgtgtctcttcttctgcctcctgtctcgtgtctgctcgttggaagaaattacagtttagactgcaatttcatcaactttaataaatcaattgaggggagaattggtttttaaaaatattaagtaagtcttcgtatccaaggacaaggtatgtcttttcttattcaataattttaattactgttaatattttcactgtggtgatgggagtttttcttttaatttattttcttgttcattttttgtatctaaagtttttgttttgttttgttttgggggtaagttgtcaccttactgtttcttgttgcttttcagattttttcaaagtatagactaaatccttcacaaatatttaaagtttttattttcccccttcatattgatcctgattttagttatgttgacaaagtccacagactgttactatcagaacacttgaacagttatggaaatattacctacccttgatttaatcagagtttaatggtatgcttctttggtttgactggcacattgtcgctggtcatttcctcccaaagaccaccagaaagagctatgatcaagcaaagctgagtttgttaaacttacctgcagcaagggaaaacaccaccttgatagggtttaataatgtttcaaaatcaagaaatgaggctttggggtctgggcagggaactaattagaaatgggcaaaatttgtcatgcaataccttgtgggaaagtgagatgaggttcttaatgtgagtattgatggtgaaatcattttctaggtgagctgtttgcctatataaagatgttatcaatgacagaagaactatttgcctagataaacaaactgaatttatttattggtttacagttttatcttgctgggcaggactctgctgggggtggtatcaggtcttattcccaataggtaagttatttggatatgggtggtcttaatcatcaatgtgtaaaatgctgattttaagtgcgaaatactttgtctaccatgttaggaaagtctgccaccttttatcttttttaaggaattttaatcaaaaccaggtggtagatataatcaaattgttttgcagaatcaattttcctgttctctttaaagacttttatcactgtgaattaatttactattattgcaacttcctttaattccttgaatgaacagaccctactggttttatttacaagtttcaactaatgaaattgactgtgattttcttttgggctattttg

SEQ ID NO: 426549 - DNA, 4521 bp, Homo sapiens
gaggaaatgaattggacagtcatctataaatatcgtattttttaataaaatggctattcctttggtgcttggctggtagcatccatccactggtagtaaatagaccctggaaaaccagcacatatgtagtgagaccccatgagacatgattgtgcctacctttgagccatccataagttatctgggacatgacagtcttttgagtgagagcagtttactaaggtcatttagatcatcagttccaaagatggtgtggatcttatcgattatttttttaggcagaggtaatatctggaaaattaagagtgatttctaaccatgagaatattttagtttgtttaaatttgcttgctaacccagtaccaagaattcagaccttttttctgtctgtataaagcaatattctagacatttgagtgattcaagtagatgttgtgagatgattacatttccagtccttggaatgttatgtggattttattggctaatcttcatatttcatcagtggattttcctatgcatgttaagggagatccttgttaattgatgtctaggtggactttacggttaacctgaacaggtcttggaaaaaggactttaaacattctcctgttctgtggaataagtatactttttttctggacatacaccttgtcagtgagttccatgtgatactagagttgcatagaatttttaacctttacgccaatgaagatctgaggcaaacattgccccttttttagaagtttgcatttgtcactgataactgtaataattgatctgttgaaaagcctgggaaatgaagatctgatatgtcacttttaccggcttcctcaactgaaaaagaatacaatgaaacacgctgagaatttttgtgctttctcagtcttgctgatgatctttctatgggcctgaagcgtggagagtgccagagaggctgatcctcagcagtgtggcagaggaaagttgggtgcgactaaggggtatgcggtgcccacatgccactgggtcctcagcagtaccacctgattggaagtgatattggtggaagacaacattttgccgcttggaattctcacctccacaccaaagaagtactgtttttgtcatttgcaccagcttctttctccaggaaagatcaaaacgatgcactgcaagtgtgattggtccagatagctgccttatccaactgcctcctttggaccacttcatcatgggacagcttgatgcaatctacttgacaagaccctggaaccccacacccctcatggaaccagtgtccacctcccagtcacagtgtgaccccagggaactcttgcctgcttgctttaaacccaccacttaaaagtctccacagaaaacctgtttgaatagtacccttgacccaataagggcattggcccctgggtgtctctctctctctctctctctctctccctctctctccctctctctctctcgctccctgacctctgcgtgtggactccaggcatgccatatacccctcaggacctgaagcaaaagaatgaattaaagaaaactccagagaatgagctgacaacctactccctggtcagtggctctccatgcctacctgtggtctcttggacacccttgcagaagatgacttcctgggaactcttctgggagtgaatgttatcagcaaattcccaaaacaacaccccttagacaaaaagcctcctcacctatgcattgcctagaccacccactaaaggtgatggccacaaagaggtggatttgttgagttggtgccattccttctactgccagcttcaccaaaacaatgacacagtcttccttccgcatggagactcttctctttcctgtgttgcagtggatgcctcctgcagataagaaatgcttaactgagaaatgctcatgttgggatatcatcgatgagactttaatttgggcatggtgactgtttcccttgctgccacttgactcaatcccaggagcctcagtagaggatataatattacacaagatgctcaaaatggtggaattgctcagtgctcccataaatatacatttataattttcatttgccacacggtaaactgaaaaatacagactatattaaaaagaaactgcatgattttttttcaaaaattcaaagcatatttaaataatatataaattaaatgccctcctctcttccaattctgtccctatagttttcctctattaagtgaactacatgcattcttttagtggatagatgcacacaaacacacaagccattatggggaaggatccacgtgtgtggccatattgtaacacatttttctgcaaatcacctctttcatttaacagcccttattcaatggcctttttctttttcagtagtacatacacatctgtgtcatttgttgaatgacgacatgaatgttttgtagataaaatataattaaatgttttaagcatttctcactcatagatatttatgttagcaccaaatttctgtgcaatgaacctccctatatatcagtaattttgcatttgtctataatatcataataaattacttataagttgaattactgggattaagtatgtgcacactttatatttatattttgaaaattattgcaagattgccttcaaaaatgtggttaacaactttatcttcaaatggcaatgaatgagattgccagctttcctacagcctcacaatggattttataaatatttaacatttttgccaatgtgatcacccaaactattgtcttaaattgtatctcttttgtttttgagtttggtcattttttcatgtttattagccatctgtattttttaatttcttctttatgtccaattttgtgggtgggaggaggatttagtctcttcctgatttcgaagagctcatttactatttcgggaaataagatttggattgtcaaccattatagctattttttacacacttttcaactttgtttttgttataagaatgtgtatgattgttacatgtccaagtataaccatgttcgcttttatggcttctgagtttcatgtcatttttggaaagatatatatattgagtccataaaacccttcacctatgttaaattctaattcttttgtgtttttttaattcaaattcttaaatcatgagaaatttttttgttttgaaatcttaaagttgccaagttacttgccattacttgcgattatttgccaataattgcccatttatctgtaccgccatcttgcgcatatgctgtactctcatctgtgactggctccatttttgttctgtggatttgtgtgtctcttcttctgcctcctgtctcgtgtctgctcgttggaagaaattacagtttagactgcaatttcatcaactttaataaatcaattgaggggagaattggtttttaaaaatattaagtaagtcttcgtatccaaggacaaggtatgtcttttcttattcaataattttaattactgttaatattttcactgtggtgatgggagtttttcttttaatttattttcttgttcattttttgtatctaaagtttttgttttgttttgttttgggggtaagttgtcaccttactgtttcttgttgcttttcagattttttcaaagtatagactaaatccttcacaaatatttaaagtttttattttcccccttcatattgatcctgattttagttatgttgacaaagtccacagactgttactatcagaacacttgaacagttatggaaatattacctacccttgatttaatcagagtttaatggtatgcttctttggtttgactggcacattgtcgctggtcatttcctcccaaagaccaccagaaagagctatgatcaagcaaagctgagtttgttaaacttacctgcagcaagggaaaacaccaccttgatagggtttaataatgtttcaaaatcaagaaatgaggctttggggtctgggcagggaactaattagaaatgggcaaaatttgtcatgcaataccttgtgggaaagtgagatgaggttcttaatgtgagtattgatggtgaaatcattttctaggtgagctgtttgcctatataaagatgttatcaatgacagaagaactatttgcctagataaacaaactgaatttatttattggtttacagttttatcttgctgggcaggactctgctgggggtggtatcaggtcttattcccaataggtaagttatttggatatgggtggtcttaatcatcaatgtgtaaaatgctgattttaagtgcgaaatactttgtctaccatgttaggaaagtctgccaccttttatcttttttaaggaattttaatcaaaaccaggtggtagatataatcaaattgttttgcagaatcaattttcctgttctctttaaagacttttatcactgtgaattaatttactattattgcaacttcctttaattccttgaatgaacagaccctactggttttatttacaagtttcaactaatgaaattgactgtgattttcttttgggctattttg

SEQ ID NO: 426550 - DNA, 4781 bp, Homo sapiens
ccctgtactctgtagattgggtgagatagaattccatggaatttcattgccaaaccagtgaagtgctaattttgacatttgtaccagctaacgtagctgtgaagaaacacaccaatacacttctaaggacagcatagaccaagatctaggtttcatatggatgaatttattcttccctttgaggcaagacaagaaggaaagaaagtattgggaataatgctgccctcccatcctcaagggccagtgggaactctaatattgattgggtgagatacaattccatggaattttaccactgaaccagtggagggctaattttgtcatttgtaccagttaactaacttgggaggaaacagaacaacacactcctgagattggttttcacagaattccatggactttaactgctgaaccaatgatgcactgattttgtcacttgtaccagctaacgcatctgggaggcaacaaaacaatactctcctgaggttaatgtggaccaaaaactagatttcatataaaagagtttattccttctacttgaggtgtgacatgaaggaaagtaatggaaataattctgccctcccattctcaagggccagggggaattcaaatattgaacggaagtgattttggaattgcatggaattctcactgccatcccaaagaaatgctgatcttgtcactcttacctgtttcattccctgggggcagaacaaaaggacgcactccaaagatcggcatgaaccaagaactgggtttcatataaaatattttattctgtcctcttgagatgtgacatgagaaaagtattgagaatacttctatcacctcatcttcaagaatccgtaggaattctcccatggtggactttacggttaacctgaacaggtcttggaaaaaggactttaaacattctcctgttctgtggaataagtatactttttttctggacatacaccttgtcagtgagttccatgtgatactagagttgcatagaatttttaacctttacgccaatgaagatctgaggcaaacattgccccttttttagaagtttgcatttgtcactgataactgtaataattgatctgttgaaaagcctgggaaatgaagatctgatatgtcacttttaccggcttcctcaactgaaaaagaatacaatgaaacacgctgagaatttttgtgctttctcagtcttgctgatgatctttctatgggcctgaagcgtggagagtgccagagaggctgatcctcagcagtgtggcagaggaaagttgggtgcgactaaggggtatgcggtgcccacatgccactgggtcctcagcagtaccacctgattggaagtgatattggtggaagacaacattttgccgcttggaattctcacctccacaccaaagaagtactgtttttgtcatttgcaccagcttctttctccaggaaagatcaaaacgatgcactgcaagtgtgattggtccagatagctgccttatccaactgcctcctttggaccacttcatcatgggacagcttgatgcaatctacttgacaagaccctggaaccccagggaactcttgcctgcttgctttaaacccaccacttaaaagtctccacagaaaacctgtttgaatagtacccttgacccaataagggcattggcccctgggtgtctctctctctctctctctctctctccctctctctccctctctctctctcgctccctgacctctgcgtgtggactccaggcatgccatatacccctcaggacctgaagcaaaagaatgaattaaagaaaactccagagaatgagctgacaacctactccctggtcagtggctctccatgcctacctgtggtctcttggacacccttgcagaagatgacttcctgggaactcttctgggagtgaatgttatcagcaaattcccaaaacaacaccccttagacaaaaagcctcctcacctatgcattgcctagaccacccactaaaggtgatggccacaaagaggtggatttgttgagttggtgccattccttctactgccagcttcaccaaaacaatgacacagtcttccttccgcatggagactcttctctttcctgtgttgcagtggatgcctcctgcagataagaaatgcttaactgagaaatgctcatgttgggatatcatcgatgagactttaatttgggcatggtgactgtttcccttgctgccacttgactcaatcccaggagcctcagtagaggatataatattacacaagatgctcaaaatggtggaattgctcagtgctcccataaatatacatttataattttcatttgccacacggtaaactgaaaaatacagactatattaaaaagaaactgcatgattttttttcaaaaattcaaagcatatttaaataatatataaattaaatgccctcctctcttccaattctgtccctatagttttcctctattaagtgaactacatgcattcttttagtggatagatgcacacaaacacacaagccattatggggaaggatccacgtgtgtggccatattgtaacacatttttctgcaaatcacctctttcatttaacagcccttattcaatggcctttttctttttcagtagtacatacacatctgtgtcatttgttgaatgacgacatgaatgttttgtagataaaatataattaaatgttttaagcatttctcactcatagatatttatgttagcaccaaatttctgtgcaatgaacctccctatatatcagtaattttgcatttgtctataatatcataataaattacttataagttgaattactgggattaagtatgtgcacactttatatttatattttgaaaattattgcaagattgccttcaaaaatgtggttaacaactttatcttcaaatggcaatgaatgagattgccagctttcctacagcctcacaatggattttataaatatttaacatttttgccaatgtgatcacccaaactattgtcttaaattgtatctcttttgtttttgagtttggtcattttttcatgtttattagccatctgtattttttaatttcttctttatgtccaattttgtgggtgggaggaggatttagtctcttcctgatttcgaagagctcatttactatttcgggaaataagatttggattgtcaaccattatagctattttttacacacttttcaactttgtttttgttataagaatgtgtatgattgttacatgtccaagtataaccatgttcgcttttatggcttctgagtttcatgtcatttttggaaagatatatatattgagtccataaaacccttcacctatgttaaattctaattcttttgtgtttttttaattcaaattcttaaatcatgagaaatttttttgttttgaaatcttaaagttgccaagttacttgccattacttgcgattatttgccaataattgcccatttatctgtaccgccatcttgcgcatatgctgtactctcatctgtgactggctccatttttgttctgtggatttgtgtgtctcttcttctgcctcctgtctcgtgtctgctcgttggaagaaattacagtttagactgcaatttcatcaactttaataaatcaattgaggggagaattggtttttaaaaatattaagtaagtcttcgtatccaaggacaaggtatgtcttttcttattcaataattttaattactgttaatattttcactgtggtgatgggagtttttcttttaatttattttcttgttcattttttgtatctaaagtttttgttttgttttgttttgggggtaagttgtcaccttactgtttcttgttgcttttcagattttttcaaagtatagactaaatccttcacaaatatttaaagtttttattttcccccttcatattgatcctgattttagttatgttgacaaagtccacagactgttactatcagaacacttgaacagttatggaaatattacctacccttgatttaatcagagtttaatggtatgcttctttggtttgactggcacattgtcgctggtcatttcctcccaaagaccaccagaaagagctatgatcaagcaaagctgagtttgttaaacttacctgcagcaagggaaaacaccaccttgatagggtttaataatgtttcaaaatcaagaaatgaggctttggggtctgggcagggaactaattagaaatgggcaaaatttgtcatgcaataccttgtgggaaagtgagatgaggttcttaatgtgagtattgatggtgaaatcattttctaggtgagctgtttgcctatataaagatgttatcaatgacagaagaactatttgcctagataaacaaactgaatttatttattggtttacagttttatcttgctgggcaggactctgctgggggtggtatcaggtcttattcccaataggtaagttatttggatatgggtggtcttaatcatcaatgtgtaaaatgctgattttaagtgcgaaatactttgtctaccatgttaggaaagtctgccaccttttatcttttttaaggaattttaatcaaaaccaggtggtagatataatcaaattgttttgcagaatcaattttcctgttctctttaaagacttttatcactgtgaattaatttactattattgcaacttcctttaattccttgaatgaacagaccctactggttttatttacaagtttcaactaatgaaattgactgtgattttcttttgggctattttg

SEQ ID NO: 426551 - DNA, 4228 bp, Homo sapiens
agtgtgctttgtgtattggaggtaatactggaattgcatggaattcctactgctgctccagtaacctgctgattttgtcacgtgtaccagattcgttgtctggcaatgagaacaatacacttcagaggtaatatcggcatgaaccaagaactgggtttcatataaaatattttattctgtcctcttgagatgtgacatgagaaaagtattgagaatacttctatcacctcatcttcaagaatccgtaggaattctcccatggtggactttacggttaacctgaacaggtcttggaaaaaggactttaaacattctcctgttctgtggaataagtatactttttttctggacatacaccttgtcagtgagttccatgtgatactagagttgcatagaatttttaacctttacgccaatgaagatctgaggcaaacattgccccttttttagaagtttgcatttgtcactgataactgtaataattgatctgttgaaaagcctgggaaatgaagatctgatatgtcacttttaccggcttcctcaactgaaaaagaatacaatgaaacacgctgagaatttttgtgctttctcagtcttgctgatgatctttctatgggcctgaagcgtggagagtgccagagaggctgatcctcagcagtgtggcagaggaaagttgggtgcgactaaggggtatgcggtgcccacatgccactgggtcctcagcagtaccacctgattggaagtgatattggtggaagacaacattttgccgcttggaattctcacctccacaccaaagaagtactgtttttgtcatttgcaccagcttctttctccaggaaagatcaaaacgatgcactgcaagtgtgattggtccagatagctgccttatccaactgcctcctttggaccacttcatcatgggacagcttgatgcaatctacttgacaagaccctggaaccccacacccctcatggaaccagtgtccacctcccagtcacagtgtgaccccagggaactcttgcctgcttgctttaaacccaccacttaaaagtctccacagaaaacctgtttgaatagtacccttgacccaataagggcattggcccctgggtgtctctctctctctctctctctctctccctctctctccctctctctctctcgctccctgacctctgcgtgtggactccaggcatgccatatacccctcaggacctgaagcaaaagaatgaattaaagaaaactccagagaatgagctgacaacctactccctggtcagtggctctccatgcctacctgtggtctcttggacacccttgcagaagatgacttcctgggaactcttctgggagtgaatgttatcagcaaattcccaaaacaacaccccttagacaaaaagcctcctcacctatgcattgcctagaccacccactaaaggtgatggccacaaagaggtggatttgttgagttggtgccattccttctactgccagcttcaccaaaacaatgacacagtcttccttccgcatggagactcttctctttcctgtgttgcagtggatgcctcctgcagataagaaatgcttaactgagaaatgctcatgttgggatatcatcgatgagactttaatttgggcatggtgactgtttcccttgctgccacttgactcaatcccaggagcctcagtagaggatataatattacacaagatgctcaaaatggtggaattgctcagtgctcccataaatatacatttataattttcatttgccacacggtaaactgaaaaatacagactatattaaaaagaaactgcatgattttttttcaaaaattcaaagcatatttaaataatatataaattaaatgccctcctctcttccaattctgtccctatagttttcctctattaagtgaactacatgcattcttttagtggatagatgcacacaaacacacaagccattatggggaaggatccacgtgtgtggccatattgtaacacatttttctgcaaatcacctctttcatttaacagcccttattcaatggcctttttctttttcagtagtacatacacatctgtgtcatttgttgaatgacgacatgaatgttttgtagataaaatataattaaatgttttaagcatttctcactcatagatatttatgttagcaccaaatttctgtgcaatgaacctccctatatatcagtaattttgcatttgtctataatatcataataaattacttataagttgaattactgggattaagtatgtgcacactttatatttatattttgaaaattattgcaagattgccttcaaaaatgtggttaacaactttatcttcaaatggcaatgaatgagattgccagctttcctacagcctcacaatggattttataaatatttaacatttttgccaatgtgatcacccaaactattgtcttaaattgtatctcttttgtttttgagtttggtcattttttcatgtttattagccatctgtattttttaatttcttctttatgtccaattttgtgggtgggaggaggatttagtctcttcctgatttcgaagagctcatttactatttcgggaaataagatttggattgtcaaccattatagctattttttacacacttttcaactttgtttttgttataagaatgtgtatgattgttacatgtccaagtataaccatgttcgcttttatggcttctgagtttcatgtcatttttggaaagatatatatattgagtccataaaacccttcacctatgttaaattctaattcttttgtgtttttttaattcaaattcttaaatcatgagaaatttttttgttttgaaatcttaaagttgccaagttacttgccattacttgcgattatttgccaataattgcccatttatctgtaccgccatcttgcgcatatgctgtactctcatctgtgactggctccatttttgttctgtggatttgtgtgtctcttcttctgcctcctgtctcgtgtctgctcgttggaagaaattacagtttagactgcaatttcatcaactttaataaatcaattgaggggagaattggtttttaaaaatattaagtaagtcttcgtatccaaggacaaggtatgtcttttcttattcaataattttaattactgttaatattttcactgtggtgatgggagtttttcttttaatttattttcttgttcattttttgtatctaaagtttttgttttgttttgttttgggggtaagttgtcaccttactgtttcttgttgcttttcagattttttcaaagtatagactaaatccttcacaaatatttaaagtttttattttcccccttcatattgatcctgattttagttatgttgacaaagtccacagactgttactatcagaacacttgaacagttatggaaatattacctacccttgatttaatcagagtttaatggtatgcttctttggtttgactggcacattgtcgctggtcatttcctcccaaagaccaccagaaagagctatgatcaagcaaagctgagtttgttaaacttacctgcagcaagggaaaacaccaccttgatagggtttaataatgtttcaaaatcaagaaatgaggctttggggtctgggcagggaactaattagaaatgggcaaaatttgtcatgcaataccttgtgggaaagtgagatgaggttcttaatgtgagtattgatggtgaaatcattttctaggtgagctgtttgcctatataaagatgttatcaatgacagaagaactatttgcctagataaacaaactgaatttatttattggtttacagttttatcttgctgggcaggactctgctgggggtggtatcaggtcttattcccaataggtaagttatttggatatgggtggtcttaatcatcaatgtgtaaaatgctgattttaagtgcgaaatactttgtctaccatgttaggaaagtctgccaccttttatcttttttaaggaattttaatcaaaaccaggtggtagatataatcaaattgttttgcagaatcaattttcctgttctctttaaagacttttatcactgtgaattaatttactattattgcaacttcctttaattccttgaatgaacagaccctactggttttatttacaagtttcaactaatgaaattgactgtgattttcttttgggctattttg

SEQ ID NO: 426552 - DNA, 3810 bp, Homo sapiens
gtatgtttgtagccagtggggaattattttaactaggcaataatttgatctattttgggaagcctcttgtaatcaaatcatatatcaacattaatcacatggtgagtcctccatggttttcattcctagagattctaggatgtttgacatttctctgcttagcttatagcagaaaggtattggatatcaagaatgtttgaacagtttctcctttttgggaatgaagatgaaattgggctagaatgagatgtgtgattgagagaatgtccctgaggcctgagcagtgtgtccttttgggtatgggcattggaagcatgtagtgaattcttataattttatgttgcctcggcatccatcttgagtataagtttaactttgttataccagaagcaaggcttactcacttttgcacagtttccagttctacacctccttctcgttcctcagtgtgattggtccagatagctgccttatccaactgcctcctttggaccacttcatcatgggacagcttgatgcaatctacttgacaagaccctggaaccccacacccctcatggaaccagtgtccacctcccagtcacagtgtgaccccagggaactcttgcctgcttgctttaaacccaccacttaaaagtctccacagaaaacctgtttgaatagtacccttgacccaataagggcattggcccctgggtgtctctctctctctctctctctctctccctctctctccctctctctctctcgctccctgacctctgcgtgtggactccaggcatgccatatacccctcaggacctgaagcaaaagaatgaattaaagaaaactccagagaatgagctgacaacctactccctggtcagtggctctccatgcctacctgtggtctcttggacacccttgcagaagatgacttcctgggaactcttctgggagtgaatgttatcagcaaattcccaaaacaacaccccttagacaaaaagcctcctcacctatgcattgcctagaccacccactaaaggtgatggccacaaagaggtggatttgttgagttggtgccattccttctactgccagcttcaccaaaacaatgacacagtcttccttccgcatggagactcttctctttcctgtgttgcagtggatgcctcctgcagataagaaatgcttaactgagaaatgctcatgttgggatatcatcgatgagactttaatttgggcatggtgactgtttcccttgctgccacttgactcaatcccaggagcctcagtagaggatataatattacacaagatgctcaaaatggtggaattgctcagtgctcccataaatatacatttataattttcatttgccacacggtaaactgaaaaatacagactatattaaaaagaaactgcatgattttttttcaaaaattcaaagcatatttaaataatatataaattaaatgccctcctctcttccaattctgtccctatagttttcctctattaagtgaactacatgcattcttttagtggatagatgcacacaaacacacaagccattatggggaaggatccacgtgtgtggccatattgtaacacatttttctgcaaatcacctctttcatttaacagcccttattcaatggcctttttctttttcagtagtacatacacatctgtgtcatttgttgaatgacgacatgaatgttttgtagataaaatataattaaatgttttaagcatttctcactcatagatatttatgttagcaccaaatttctgtgcaatgaacctccctatatatcagtaattttgcatttgtctataatatcataataaattacttataagttgaattactgggattaagtatgtgcacactttatatttatattttgaaaattattgcaagattgccttcaaaaatgtggttaacaactttatcttcaaatggcaatgaatgagattgccagctttcctacagcctcacaatggattttataaatatttaacatttttgccaatgtgatcacccaaactattgtcttaaattgtatctcttttgtttttgagtttggtcattttttcatgtttattagccatctgtattttttaatttcttctttatgtccaattttgtgggtgggaggaggatttagtctcttcctgatttcgaagagctcatttactatttcgggaaataagatttggattgtcaaccattatagctattttttacacacttttcaactttgtttttgttataagaatgtgtatgattgttacatgtccaagtataaccatgttcgcttttatggcttctgagtttcatgtcatttttggaaagatatatatattgagtccataaaacccttcacctatgttaaattctaattcttttgtgtttttttaattcaaattcttaaatcatgagaaatttttttgttttgaaatcttaaagttgccaagttacttgccattacttgcgattatttgccaataattgcccatttatctgtaccgccatcttgcgcatatgctgtactctcatctgtgactggctccatttttgttctgtggatttgtgtgtctcttcttctgcctcctgtctcgtgtctgctcgttggaagaaattacagtttagactgcaatttcatcaactttaataaatcaattgaggggagaattggtttttaaaaatattaagtaagtcttcgtatccaaggacaaggtatgtcttttcttattcaataattttaattactgttaatattttcactgtggtgatgggagtttttcttttaatttattttcttgttcattttttgtatctaaagtttttgttttgttttgttttgggggtaagttgtcaccttactgtttcttgttgcttttcagattttttcaaagtatagactaaatccttcacaaatatttaaagtttttattttcccccttcatattgatcctgattttagttatgttgacaaagtccacagactgttactatcagaacacttgaacagttatggaaatattacctacccttgatttaatcagagtttaatggtatgcttctttggtttgactggcacattgtcgctggtcatttcctcccaaagaccaccagaaagagctatgatcaagcaaagctgagtttgttaaacttacctgcagcaagggaaaacaccaccttgatagggtttaataatgtttcaaaatcaagaaatgaggctttggggtctgggcagggaactaattagaaatgggcaaaatttgtcatgcaataccttgtgggaaagtgagatgaggttcttaatgtgagtattgatggtgaaatcattttctaggtgagctgtttgcctatataaagatgttatcaatgacagaagaactatttgcctagataaacaaactgaatttatttattggtttacagttttatcttgctgggcaggactctgctgggggtggtatcaggtcttattcccaataggtaagttatttggatatgggtggtcttaatcatcaatgtgtaaaatgctgattttaagtgcgaaatactttgtctaccatgttaggaaagtctgccaccttttatcttttttaaggaattttaatcaaaaccaggtggtagatataatcaaattgttttgcagaatcaattttcctgttctctttaaagacttttatcactgtgaattaatttactattattgcaacttcctttaattccttgaatgaacagaccctactggttttatttacaagtttcaactaatgaaattgactgtgattttcttttgggctattttg

SEQ ID NO: 426553 - DNA, 4771 bp, Homo sapiens
ccctgtactctgtagattgggtgagatagaattccatggaatttcattgccaaaccagtgaagtgctaattttgacatttgtaccagctaacgtagctgtgaagaaacacaccaatacacttctaaggacagcatagaccaagatctaggtttcatatggatgaatttattcttccctttgaggcaagacaagaaggaaagaaagtattgggaataatgctgccctcccatcctcaagggccagtgggaactctaatattgattgggtgagatacaattccatggaattttaccactgaaccagtggagggctaattttgtcatttgtaccagttaactaacttgggaggaaacagaacaacacactcctgagattggttttcacagaattccatggactttaactgctgaaccaatgatgcactgattttgtcacttgtaccagctaacgcatctgggaggcaacaaaacaatactctcctgaggttaatgtggaccaaaaactagatttcatataaaagagtttattccttctacttgaggtgtgacatgaaggaaagtaatggaaataattctgccctcccattctcaagggccagggggaattcaaatattgaacggaagtgattttggaattgcatggaattctcactgccatcccaaagaaatgctgatcttgtcactcttacctgtttcattccctgggggcagaacaaaaggacgcactccaaagatcggcatgaaccaagaactgggtttcatataaaatattttattctgtcctcttgagatgtgacatgagaaaagtattgagaatacttctatcacctcatcttcaagaatccgtaggaattctcccatggtggactttacggttaacctgaacaggtcttggaaaaaggactttaaacattctcctgttctgtggaataagtatactttttttctggacatacaccttgtcagtgagttccatgtgatactagagttgcatagaatttttaacctttacgccaatgaagatctgaggcaaacattgccccttttttagaagtttgcatttgtcactgataactgtaataattgatctgttgaaaagcctgggaaatgaagatctgatatgtcacttttaccggcttcctcaactgaaaaagaatacaatgaaacacgctgagaatttttgtgctttctcagtcttgctgatgatctttctatgggcctgaagcgtggagagtgccagagaggctgatcctcagcagtgtggcagaggaaagttgggtgcgactaaggggtatgcggtgcccacatgccactgggtcctcagcagtaccacctgattggaagtgatattggtggaagacaacattttgccgcttggaattctcacctccacaccaaagaagtactgtttttgtcatttgcaccagcttctttctccaggaaagatcaaaacgatgcactgcaagtgtgattggtccagatagctgccttatccaactgcctcctttggaccacttcatcatgggacagcttgatgcaatctacttgacaagaccctggaaccccacacccctcatggaaccagtgtccacctcccagtcacagtgtgaccccagggaactcttgcctgcttgctttaaacccaccacttaaaagtctccacagaaaacctgtttgaatagtacccttgacccaataagggcattggcccctgggtgtctctctctctctctctctctctctccctctctctccctctctctctctcgctccctgacctctgcgtgtggactccaggcatgccatatacccctcaggacctgaagcaaaagaatgaattaaagaaaactccagagaatgagctgacaacctactccctggtcagtggctctccatgcctacctgtggtctcttggacacccttgcagaagatgacttcctgggaactcttctgggagtgaatgttatcagcaaattcccaaaacaacaccccttagacaaaaagcctcctcacctatgcattgcctagaccacccactaaaggtgatggccacaaagaggtggatttgttgagttggtgccattccttctactgccagcttcaccggatgcctcctgcagataagaaatgcttaactgagaaatgctcatgttgggatatcatcgatgagactttaatttgggcatggtgactgtttcccttgctgccacttgactcaatcccaggagcctcagtagaggatataatattacacaagatgctcaaaatggtggaattgctcagtgctcccataaatatacatttataattttcatttgccacacggtaaactgaaaaatacagactatattaaaaagaaactgcatgattttttttcaaaaattcaaagcatatttaaataatatataaattaaatgccctcctctcttccaattctgtccctatagttttcctctattaagtgaactacatgcattcttttagtggatagatgcacacaaacacacaagccattatggggaaggatccacgtgtgtggccatattgtaacacatttttctgcaaatcacctctttcatttaacagcccttattcaatggcctttttctttttcagtagtacatacacatctgtgtcatttgttgaatgacgacatgaatgttttgtagataaaatataattaaatgttttaagcatttctcactcatagatatttatgttagcaccaaatttctgtgcaatgaacctccctatatatcagtaattttgcatttgtctataatatcataataaattacttataagttgaattactgggattaagtatgtgcacactttatatttatattttgaaaattattgcaagattgccttcaaaaatgtggttaacaactttatcttcaaatggcaatgaatgagattgccagctttcctacagcctcacaatggattttataaatatttaacatttttgccaatgtgatcacccaaactattgtcttaaattgtatctcttttgtttttgagtttggtcattttttcatgtttattagccatctgtattttttaatttcttctttatgtccaattttgtgggtgggaggaggatttagtctcttcctgatttcgaagagctcatttactatttcgggaaataagatttggattgtcaaccattatagctattttttacacacttttcaactttgtttttgttataagaatgtgtatgattgttacatgtccaagtataaccatgttcgcttttatggcttctgagtttcatgtcatttttggaaagatatatatattgagtccataaaacccttcacctatgttaaattctaattcttttgtgtttttttaattcaaattcttaaatcatgagaaatttttttgttttgaaatcttaaagttgccaagttacttgccattacttgcgattatttgccaataattgcccatttatctgtaccgccatcttgcgcatatgctgtactctcatctgtgactggctccatttttgttctgtggatttgtgtgtctcttcttctgcctcctgtctcgtgtctgctcgttggaagaaattacagtttagactgcaatttcatcaactttaataaatcaattgaggggagaattggtttttaaaaatattaagtaagtcttcgtatccaaggacaaggtatgtcttttcttattcaataattttaattactgttaatattttcactgtggtgatgggagtttttcttttaatttattttcttgttcattttttgtatctaaagtttttgttttgttttgttttgggggtaagttgtcaccttactgtttcttgttgcttttcagattttttcaaagtatagactaaatccttcacaaatatttaaagtttttattttcccccttcatattgatcctgattttagttatgttgacaaagtccacagactgttactatcagaacacttgaacagttatggaaatattacctacccttgatttaatcagagtttaatggtatgcttctttggtttgactggcacattgtcgctggtcatttcctcccaaagaccaccagaaagagctatgatcaagcaaagctgagtttgttaaacttacctgcagcaagggaaaacaccaccttgatagggtttaataatgtttcaaaatcaagaaatgaggctttggggtctgggcagggaactaattagaaatgggcaaaatttgtcatgcaataccttgtgggaaagtgagatgaggttcttaatgtgagtattgatggtgaaatcattttctaggtgagctgtttgcctatataaagatgttatcaatgacagaagaactatttgcctagataaacaaactgaatttatttattggtttacagttttatcttgctgggcaggactctgctgggggtggtatcaggtcttattcccaataggtaagttatttggatatgggtggtcttaatcatcaatgtgtaaaatgctgattttaagtgcgaaatactttgtctaccatgttaggaaagtctgccaccttttatcttttttaaggaattttaatcaaaaccaggtggtagatataatcaaattgttttgcagaatcaattttcctgttctctttaaagacttttatcactgtgaattaatttactattattgcaacttcctttaattccttgaatgaacagaccctactggttttatttacaagtttcaactaatgaaattgactgtgattttcttttgggctattttg

SEQ ID NO: 426554 - DNA, 4775 bp, Homo sapiens
ccctgtactctgtagattgggtgagatagaattccatggaatttcattgccaaaccagtgaagtgctaattttgacatttgtaccagctaacgtagctgtgaagaaacacaccaatacacttctaaggacagcatagaccaagatctaggtttcatatggatgaatttattcttccctttgaggcaagacaagaaggaaagaaagtattgggaataatgctgccctcccatcctcaagggccagtgggaactctaatattgattgggtgagatacaattccatggaattttaccactgaaccagtggagggctaattttgtcatttgtaccagttaactaacttgggaggaaacagaacaacacactcctgagattggttttcacagaattccatggactttaactgctgaaccaatgatgcactgattttgtcacttgtaccagctaacgcatctgggaggcaacaaaacaatactctcctgaggttaatgtggaccaaaaactagatttcatataaaagagtttattccttctacttgaggtgtgacatgaaggaaagtaatggaaataattctgccctcccattctcaagggccagggggaattcaaatattgaacggaagtgattttggaattgcatggaattctcactgccatcccaaagaaatgctgatcttgtcactcttacctgtttcattccctgggggcagaacaaaaggacgcactccaaagatcggcatgaaccaagaactgggtttcatataaaatattttattctgtcctcttgagatgtgacatgagaaaagtattgagaatacttctatcacctcatcttcaagaatccgtaggaattctcccatggtggactttacggttaacctgaacaggtcttggaaaaaggactttaaacattctcctgttctgtggaataagtatactttttttctggacatacaccttgtcagtgagttccatgtgatactagagttgcatagaatttttaacctttacgccaatgaagatctgaggcaaacattgccccttttttagaagtttgcatttgtcactgataactgtaataattgatctgttgaaaagcctgggaaatgaagatctgatatgtcacttttaccggcttcctcaactgaaaaagaatacaatgaaacacgctgagaatttttgtgctttctcagtcttgctgatgatctttctatgggcctgaagcgtggagagtgccagagaggctgatcctcagcagtgtggcagaggaaagttgggtgcgactaaggggtatgcggtgcccacatgccactgggtcctcagcagtaccacctgattggaagtgatattggtggaagacaacattttgccgcttggaattctcacctccacaccaaagaagtactgtttttgtcatttgcaccagcttctttctccaggaaagatcaaaacgatgcactgcaagtgtgattggtccagatagctgccttatccaactgcctcctttggaccacttcatcatgggacagcttgatgcaatctacttgacaagaccctggaaccccacacccctcatggaaccagtgtccacctcccagtcacagtgtgaccccagggaactcttgcctgcttgctttaaacccaccacttaaaagtctccacagaaaacctgtttgaatagtacccttgacccaataagggcattggcccctgggtgtctctctctctctctctctctctctccctctctctccctctctctctctcgctccctgacctctgcgtgtggactccaggcatgccatatacccctcaggacctgaagcaaaagaatgaattaaagaaaactccagagaatgagctgacaacctactccctggtcagtggctctccatgcctacctgtggtctcttggacacccttgcagaagatgacttcctgggaactcttctgggagtgaatgttatcagcaaattcccaaaacaacaccccttagacaaaaagcctcctcacctatgcattgcctagaccacccactaaaggtgatggccacaaagaggtggatttgttgagttggtgccattccttctactgccagcttcaccaaaacaatgacacagtcttccttccgcatggagactcttctctttcctgtgttgcagtggatgcctcctgcagataagaaatgcttaactgagaaatgctcatgttgggatatcatcgatgagactttaatttgggcatggtgactgtttcccttgctgccacttgactcaatcccaggagcctcagtagaggatataatattacacaagatgctcaaaatggtggaattgctcagtgctcccataaatatacatttataattttcatttgccacacggtaaactgaaaaatacagactatattaaaaagaaactgcatgattttttttcaattctgtccctatagttttcctctattaagtgaactacatgcattcttttagtggatagatgcacacaaacacacaagccattatggggaaggatccacgtgtgtggccatattgtaacacatttttctgcaaatcacctctttcatttaacagcccttattcaatggcctttttctttttcagtagtacatacacatctgtgtcatttgttgaatgacgacatgaatgttttgtagataaaatataattaaatgttttaagcatttctcactcatagatatttatgttagcaccaaatttctgtgcaatgaacctccctatatatcagtaattttgcatttgtctataatatcataataaattacttataagttgaattactgggattaagtatgtgcacactttatatttatattttgaaaattattgcaagattgccttcaaaaatgtggttaacaactttatcttcaaatggcaatgaatgagattgccagctttcctacagcctcacaatggattttataaatatttaacatttttgccaatgtgatcacccaaactattgtcttaaattgtatctcttttgtttttgagtttggtcattttttcatgtttattagccatctgtattttttaatttcttctttatgtccaattttgtgggtgggaggaggatttagtctcttcctgatttcgaagagctcatttactatttcgggaaataagatttggattgtcaaccattatagctattttttacacacttttcaactttgtttttgttataagaatgtgtatgattgttacatgtccaagtataaccatgttcgcttttatggcttctgagtttcatgtcatttttggaaagatatatatattgagtccataaaacccttcacctatgttaaattctaattcttttgtgtttttttaattcaaattcttaaatcatgagaaatttttttgttttgaaatcttaaagttgccaagttacttgccattacttgcgattatttgccaataattgcccatttatctgtaccgccatcttgcgcatatgctgtactctcatctgtgactggctccatttttgttctgtggatttgtgtgtctcttcttctgcctcctgtctcgtgtctgctcgttggaagaaattacagtttagactgcaatttcatcaactttaataaatcaattgaggggagaattggtttttaaaaatattaagtaagtcttcgtatccaaggacaaggtatgtcttttcttattcaataattttaattactgttaatattttcactgtggtgatgggagtttttcttttaatttattttcttgttcattttttgtatctaaagtttttgttttgttttgttttgggggtaagttgtcaccttactgtttcttgttgcttttcagattttttcaaagtatagactaaatccttcacaaatatttaaagtttttattttcccccttcatattgatcctgattttagttatgttgacaaagtccacagactgttactatcagaacacttgaacagttatggaaatattacctacccttgatttaatcagagtttaatggtatgcttctttggtttgactggcacattgtcgctggtcatttcctcccaaagaccaccagaaagagctatgatcaagcaaagctgagtttgttaaacttacctgcagcaagggaaaacaccaccttgatagggtttaataatgtttcaaaatcaagaaatgaggctttggggtctgggcagggaactaattagaaatgggcaaaatttgtcatgcaataccttgtgggaaagtgagatgaggttcttaatgtgagtattgatggtgaaatcattttctaggtgagctgtttgcctatataaagatgttatcaatgacagaagaactatttgcctagataaacaaactgaatttatttattggtttacagttttatcttgctgggcaggactctgctgggggtggtatcaggtcttattcccaataggtaagttatttggatatgggtggtcttaatcatcaatgtgtaaaatgctgattttaagtgcgaaatactttgtctaccatgttaggaaagtctgccaccttttatcttttttaaggaattttaatcaaaaccaggtggtagatataatcaaattgttttgcagaatcaattttcctgttctctttaaagacttttatcactgtgaattaatttactattattgcaacttcctttaattccttgaatgaacagaccctactggttttatttacaagtttcaactaatgaaattgactgtgattttcttttgggctattttg

SEQ ID NO: 426555 - DNA, 3305 bp, Homo sapiens
ctgaaaatggagcgtagaagacatgcttcgatttccaggatggttgtgttttccagagaggcggaggtaaaccactggcgcagccctgcctcccacagataattccgggtgcagtgtttcatatctagacttggacttctatcctaccatacttctttgtgtgcagttcattgtggaaccagcacagattttcatacgaaagttatttctttttaacctcaaaaagtgacagaatggagtgtatcatgaaaaagtctgacatcaaaacctcaaaatgtgatattgattgggtgagatagaattccatggaatttcattgccaaaccagtgaagtgctaattttgacatttgtaccagctaacgtagctgtgaagaaacacaccaatacacttctaaggacagcatagaccaagatctaggtttcatatggatgaatttattcttccctttgaggcaagacaagaaggaaagaaagtattgggaataatgctgccctcccatcctcaagggccagtgggaactctaatattgattggttttcacagaattccatggactttaactgctgaaccaatgatgcactgattttgtcacttgtaccagctaacgcatctgggaggcaacaaaacaatactctcctgaggttaatgtggaccaaaaactagatttcatataaaagagtttattccttctacttgaggtgagactttaatttgggcatggtgactgtttcccttgctgccacttgactcaatcccaggagcctcagtagaggatataatattacacaagatgctcaaaatggtggaattgctcagtgctcccataaatatacatttataattttcatttgccacacggtaaactgaaaaatacagactatattaaaaagaaactgcatgattttttttcaaaaattcaaagcatatttaaataatatataaattaaatgccctcctctcttccaattctgtccctatagttttcctctattaagtgaactacatgcattcttttagtggatagatgcacacaaacacacaagccattatggggaaggatccacgtgtgtggccatattgtaacacatttttctgcaaatcacctctttcatttaacagcccttattcaatggcctttttctttttcagtagtacatacacatctgtgtcatttgttgaatgacgacatgaatgttttgtagataaaatataattaaatgttttaagcatttctcactcatagatatttatgttagcaccaaatttctgtgcaatgaacctccctatatatcagtaattttgcatttgtctataatatcataataaattacttataagttgaattactgggattaagtatgtgcacactttatatttatattttgaaaattattgcaagattgccttcaaaaatgtggttaacaactttatcttcaaatggcaatgaatgagattgccagctttcctacagcctcacaatggattttataaatatttaacatttttgccaatgtgatcacccaaactattgtcttaaattgtatctcttttgtttttgagtttggtcattttttcatgtttattagccatctgtattttttaatttcttctttatgtccaattttgtgggtgggaggaggatttagtctcttcctgatttcgaagagctcatttactatttcgggaaataagatttggattgtcaaccattatagctattttttacacacttttcaactttgtttttgttataagaatgtgtatgattgttacatgtccaagtataaccatgttcgcttttatggcttctgagtttcatgtcatttttggaaagatatatatattgagtccataaaacccttcacctatgttaaattctaattcttttgtgtttttttaattcaaattcttaaatcatgagaaatttttttgttttgaaatcttaaagttgccaagttacttgccattacttgcgattatttgccaataattgcccatttatctgtaccgccatcttgcgcatatgctgtactctcatctgtgactggctccatttttgttctgtggatttgtgtgtctcttcttctgcctcctgtctcgtgtctgctcgttggaagaaattacagtttagactgcaatttcatcaactttaataaatcaattgaggggagaattggtttttaaaaatattaagtaagtcttcgtatccaaggacaaggtatgtcttttcttattcaataattttaattactgttaatattttcactgtggtgatgggagtttttcttttaatttattttcttgttcattttttgtatctaaagtttttgttttgttttgttttgggggtaagttgtcaccttactgtttcttgttgcttttcagattttttcaaagtatagactaaatccttcacaaatatttaaagtttttattttcccccttcatattgatcctgattttagttatgttgacaaagtccacagactgttactatcagaacacttgaacagttatggaaatattacctacccttgatttaatcagagtttaatggtatgcttctttggtttgactggcacattgtcgctggtcatttcctcccaaagaccaccagaaagagctatgatcaagcaaagctgagtttgttaaacttacctgcagcaagggaaaacaccaccttgatagggtttaataatgtttcaaaatcaagaaatgaggctttggggtctgggcagggaactaattagaaatgggcaaaatttgtcatgcaataccttgtgggaaagtgagatgaggttcttaatgtgagtattgatggtgaaatcattttctaggtgagctgtttgcctatataaagatgttatcaatgacagaagaactatttgcctagataaacaaactgaatttatttattggtttacagttttatcttgctgggcaggactctgctgggggtggtatcaggtcttattcccaataggtaagttatttggatatgggtggtcttaatcatcaatgtgtaaaatgctgattttaagtgcgaaatactttgtctaccatgttaggaaagtctgccaccttttatcttttttaaggaattttaatcaaaaccaggtggtagatataatcaaattgttttgcagaatcaattttcctgttctctttaaagacttttatcactgtgaattaatttactattattgcaacttcctttaattccttgaatgaacagaccctactggttttatttacaagtttcaactaatgaaattgactgtgattttcttttgggctattttg

SEQ ID NO: 426556 - DNA, 2287 bp, Homo sapiens
ccctgtactctgtagattgggtgagatagaattccatggaatttcattgccaaaccagtgaagtgctaattttgacatttgtaccagctaacgtagctgtgaagaaacacaccaatacacttctaaggacagcatagaccaagatctaggtttcatatggatgaatttattcttccctttgaggcaagacaagaaggaaagaaagtattgggaataatgctgccctcccatcctcaagggccagtgggaactctaatattgattgggtgagatacaattccatggaattttaccactgaaccagtggagggctaattttgtcatttgtaccagttaactaacttgggaggaaacagaacaacacactcctgagattggttttcacagaattccatggactttaactgctgaaccaatgatgcactgattttgtcacttgtaccagctaacgcatctgggaggcaacaaaacaatactctcctgaggttaatgtggaccaaaaactagatttcatataaaagagtttattccttctacttgaggtgtgacatgaaggaaagtaatggaaataattctgccctcccattctcaagggccagggggaattcaaatattgaacggaagtgattttggaattgcatggaattctcactgccatcccaaagaaatgctgatcttgtcactcttacctgtttcattccctgggggcagaacaaaaggacgcactccaaagatcggcatgaaccaagaactgggtttcatataaaatattttattctgtcctcttgagatgtgacatgagaaaagtattgagaatacttctatcacctcatcttcaagaatccgtaggaattctcccatggtggactttacggttaacctgaacaggtcttggaaaaaggactttaaacattctcctgttctgtggaataagtatactttttttctggacatacaccttgtcagtgagttccatgtgatactagagttgcatagaatttttaacctttacgccaatgaagatctgaggcaaacattgccccttttttagaagtttgcatttgtcactgataactgtaataattgatctgttgaaaagcctgggaaatgaagatctgatatgtcacttttaccggcttcctcaactgaaaaagaatacaatgaaacacgctgagaatttttgtgctttctcagtcttgctgatgatctttctatgggcctgaagcgtggagagtgccagagaggctgatcctcagcagtgtggcagaggaaagttgggtgcgactaaggggtatgcggtgcccacatgccactgggtcctcagcagtaccacctgattggaagtgatattggtggaagacaacattttgccgcttggaattctcacctccacaccaaagaagtactgtttttgtcatttgcaccagcttctttctccaggaaagatcaaaacgatgcactgcaagtgtgattggtccagatagctgccttatccaactgcctcctttggaccacttcatcatgggacagcttgatgcaatctacttgacaagaccctggaaccccacacccctcatggaaccagtgtccacctcccagtcacagtgtgaccccagggaactcttgcctgcttgctttaaacccaccacttaaaagtctccacagaaaacctgtttgaatagtacccttgacccaataagggcattggcccctgggtgtctctctctctctctctctctctctccctctctctccctctctctctctcgctccctgacctctgcgtgtggactccaggcatgccatatacccctcaggacctgtaagtaatactatctttatttttattttatatctctcctaatcattgaaaaggtgctctctatcttgaagatactatattaaataaaatgagaacttgtccctaacacagttagtgataggctgaaacacgctgattgcactctttacccatttagtgatttttctcaagttactctacaccatgtattatcaacataattgatattacagaatagaattataagacacttcttttgccacagaaagttctattggactcagattatctagagctactacatgtatgctattctatgataaaagatgtagatgtgataaaaacatttataaaatatctgtcttagaaaagttagctaaaattattttgggaaaagtatgtttgaaaatagaatcgtaagctaccacattgtgataaatatttctaaatgtgtctattaacttgtcaggagacaacagagtgaat

SEQ ID NO: 426557 - DNA, 1862 bp, Homo sapiens
cgatatagaggatccccaagcagttatacagactccaatggattttataaatatttaacatttttgccaatgtgatcacccaaactattgtcttaaattgtatctcttttgtttttgagtttggtcattttttcatgtttattagccatctgtattttttaatttcttctttatgtccaattttgtgggtgggaggaggatttagtctcttcctgatttcgaagagctcatttactatttcgggaaataagatttggattgtcaaccattatagctattttttacacacttttcaactttgtttttgttataagaatgtgtatgattgttacatgtccaagtataaccatgttcgcttttatggcttctgagtttcatgtcatttttggaaagatatatatattgagtccataaaacccttcacctatgttaaattctaattcttttgtgtttttttaattcaaattcttaaatcatgagaaatttttttgttttgaaatcttaaagttgccaagttacttgccattacttgcgattatttgccaataattgcccatttatctgtaccgccatcttgcgcatatgctgtactctcatctgtgactggctccatttttgttctgtggatttgtgtgtctcttcttctgcctcctgtctcgtgtctgctcgttggaagaaattacagtttagactgcaatttcatcaactttaataaatcaattgaggggagaattggtttttaaaaatattaagtaagtcttcgtatccaaggacaaggtatgtcttttcttattcaataattttaattactgttaatattttcactgtggtgatgggagtttttcttttaatttattttcttgttcattttttgtatctaaagtttttgttttgttttgttttgggggtaagttgtcaccttactgtttcttgttgcttttcagattttttcaaagtatagactaaatccttcacaaatatttaaagtttttattttcccccttcatattgatcctgattttagttatgttgacaaagtccacagactgttactatcagaacacttgaacagttatggaaatattacctacccttgatttaatcagagtttaatggtatgcttctttggtttgactggcacattgtcgctggtcatttcctcccaaagaccaccagaaagagctatgatcaagcaaagctgagtttgttaaacttacctgcagcaagggaaaacaccaccttgatagggtttaataatgtttcaaaatcaagaaatgaggctttggggtctgggcagggaactaattagaaatgggcaaaatttgtcatgcaataccttgtgggaaagtgagatgaggttcttaatgtgagtattgatggtgaaatcattttctaggtgagctgtttgcctatataaagatgttatcaatgacagaagaactatttgcctagataaacaaactgaatttatttattggtttacagttttatcttgctgggcaggactctgctgggggtggtatcaggtcttattcccaataggtaagttatttggatatgggtggtcttaatcatcaatgtgtaaaatgctgattttaagtgcgaaatactttgtctaccatgttaggaaagtctgccaccttttatcttttttaaggaattttaatcaaaaccaggtggtagatataatcaaattgttttgcagaatcaattttcctgttctctttaaagacttttatcactgtgaattaatttactattattgcaacttcctttaattccttgaatgaacagaccctactggttttatttacaagtttcaactaatgaaattgactgtgattttcttttgggctattttg

SEQ ID NO: 426558 - DNA, 2141 bp, Homo sapiens
ccctgtactctgtagattgggtgagatagaattccatggaatttcattgccaaaccagtgaagtgctaattttgacatttgtaccagctaacgtagctgtgaagaaacacaccaatacacttctaaggacagcatagaccaagatctaggtttcatatggatgaatttattcttccctttgaggcaagacaagaaggaaagaaagtattgggaataatgctgccctcccatcctcaagggccagtgggaactctaatattgattgggtgagatacaattccatggaattttaccactgaaccagtggagggctaattttgtcatttgtaccagttaactaacttgggaggaaacagaacaacacactcctgagattggttttcacagaattccatggactttaactgctgaaccaatgatgcactgattttgtcacttgtaccagctaacgcatctgggaggcaacaaaacaatactctcctgaggttaatgtggaccaaaaactagatttcatataaaagagtttattccttctacttgaggtgtgacatgaaggaaagtaatggaaataattctgccctcccattctcaagggccagggggaattcaaatattgaacggaagtgattttggaattgcatggaattctcactgccatcccaaagaaatgctgatcttgtcactcttacctgtttcattccctgggggcagaacaaaaggacgcactccaaagatcggcatgaaccaagaactgggtttcatataaaatattttattctgtcctcttgagatgtgacatgagaaaagtattgagaatacttctatcacctcatcttcaagaatccgtaggaattctcccatggtggactttacggttaacctgaacaggtcttggaaaaaggactttaaacattctcctgttctgtggaataagtatactttttttctggacatacaccttgtcagtgagttccatgtgatactagagttgcatagaatttttaacctttacgccaatgaagatctgaggcaaacattgccccttttttagaagtttgcatttgtcactgataactgtaataattgatctgttgaaaagcctgggaaatgaagatctgatatgtcacttttaccggcttcctcaactgaaaaagaatacaatgaaacacgctgagaatttttgtgctttctcagtcttgctgatgatctttctatgggcctgaagcgtggagagtgccagagaggctgatcctcagcagtgtggcagaggaaagttgggtgcgactaaggggtatgcggtgcccacatgccactgggtcctcagcagtaccacctgattggaagtgatattggtggaagacaacattttgccgcttggaattctcacctccacaccaaagaagtactgtttttgtcatttgcaccagcttctttctccaggaaagatcaaaacgatgcactgcaagtgtgattggtccagatagctgccttatccaactgcctcctttggaccacttcatcatgggacagcttgatgcaatctacttgacaagaccctggaaccccacacccctcatggaaccagtgtccacctcccagtcacagtgtgaccccagggaactcttgcctgcttgctttaaacccaccacttaaaagtctccacagaaaacctgtttgaatagtacccttgacccaataagggcattggcccctgggtgtctctctctctctctctctctctctccctctctctccctctctctctctcgctccctgacctctgcgtgtggactccaggcatgccatatacccctcaggacctgaagcaaaagaatgaattaaagaaaactccagagaatgagctgacaacctactccctggtcagtggctctccatgcctacctgtggtctcttggacacccttgcagaagatgacttcctgggaactcttctgggagtgaatgttatcagcaaattcccaaaacaacaccccttagacaaaaagcctcctcacctatgcattgcctagaccacccactaaaggtaagatgttagttaaaatagtccttgctttctgggagaagccatgtcttagtagaaattgagctgttaattttccgaatattgatgatgtttgatta

SEQ ID NO: 426559 - DNA, 1109 bp, Homo sapiens
ccctgtactctgtagattgggtgagatagaattccatggaatttcattgccaaaccagtgaagtgctaattttgacatttgtaccagctaacgtagctgtgaagaaacacaccaatacacttctaaggacagcatagaccaagatctaggtttcatatggatgaatttattcttccctttgaggcaagacaagaaggaaagaaagtattgggaataatgctgccctcccatcctcaagggccagtgggaactctaatattgattgggtgagatacaattccatggaattttaccactgaaccagtggagggctaattttgtcatttgtaccagttaactaacttgggaggaaacagaacaacacactcctgagattggttttcacagaattccatggactttaactgctgaaccaatgatgcactgattttgtcacttgtaccagctaacgcatctgggaggcaacaaaacaatactctcctgaggttaatgtggaccaaaaactagatttcatataaaagagtttattccttctacttgaggtgtgacatgaaggaaagtaatggaaataattctgccctcccattctcaagggccagggggaattcaaatattgaacggaagtgattttggaattgcatggaattctcactgccatcccaaagaaatgctgatcttgtcactcttacctgtttcattccctgggggcagaacaaaaggacgcactccaaagatcggcatgaaccaagaactgggtttcatataaaatattttattctgtcctcttgagatgtgacatgagaaaagtattgagaatacttctatcacctcatcttcaagaatccgtaggaattctcccatggtaagcattttgtcctgaaaatactggcattcctcttaggagatcgtgacactccaatgaccatgagaccctggccatgctagtcagccattggccagtcattgactgtgatgccagtctccataattgaatgaatagtgtgggtcagtgtaccccaagctgatggaaagctgtgtgctcagtgtctgtcacatatcccaggcttaaggtaccttttataaatgtacctggattgacgatgacttta

SEQ ID NO: 426560 - DNA, 242 bp, Homo sapiens
tcccacagataattccgggtgcagtgtttcatatctagacttggacttctatcctaccatacttctttgtgtgcaggtatttttggggataaaatccttgttttcagctgtatagatgtcttgcacatactcttttgatggtttgatttatccattgtgttcagcacgtttcagtgagcaagatatgggatttaatttccaatataaaatccatgactgctggccgggcgcagtggcttatg

SEQ ID NO: 426561 - DNA, 419 bp, Homo sapiens
tacctgtggtctcttggacacccttgcaggtatgtgggcagggaactgcatgtttataggaaacaggcctaggatggaaggagttaatagatcttgctcttcttgagtttgatgacatttgtttccagttaaatagcatgaaaacccatctgagagccagctgagggtggatacagttctggggagttaaagacgagtggtcacaacaggtcttcctcggcaatccgagcccaaaactgaatctgcctccataagaccattatgtgtcagctctttatttatatgattgattcatccagtggacttttaatttcttatgtccagatattttttcagttctttttttcgtgatacaagcaccttgtggattgcctgtcatagaacaggttctcaataaacttttattgaaaaaagatgta

SEQ ID NO: 426562 - DNA, 203 bp, Homo sapiens
agtgtggcctggtatccacagtgcaccccgtgctggtgggtggctcaggacggtaagcattcctctgcccttcgtgctgagtgagggtgtctttgggattcccaagacccacaatgaacagtttttcagtaggccactaatggcatgctgagttcctctcctagagtggatggtctgtaccttttgctcagtggcacagctct

SEQ ID NO: 426563 - DNA, 792 bp, Homo sapiens
gttggggttttcacttttcatttctctattaagtgaaaaaagtatatgaaaattgaaaaatagatattacttatgtaatcttcacagtataatttgcttgccaagcagtcactgggatttaatcagtttctttgtctttcgtttttctcataagctgagagagtaattttgtgtgcacagaagtactgtcttcagctacatgctgcattaaacattcctagatgtgaaatgattaaatttccaagtttttaaaatgtggatttttctggccacttttatatctcttcaatgggtttctaatggatttaaggagagagcctagtcatgatgaatggtgttgtgttgggtatgctgaggaaactttgagaccaatgtttcagaaaaaattatttctatactgtcatgtttcaagtaccgagtattgttcttgtcatacagatggtccagtgaacatctctggtgaattccttacaaccaacctcttgttactaaatattccattaggaatgttttgtttctcaactccctgatttcccctttatagattggaagtgatattggtggaagacaacattttgccgcttggaattctcacctccacaccaaagaagtactgtttttgtcatttgcaccagcttctttctccaggaaagatcaaaacgatgcactgcaaggttaacatccaatttttaatacatgtaattccctggattatttttgttgtgttattaaataacttagaattttttttacaaagtctgttgaaccaaacactgtaaggcattaataacc

SEQ ID NO: 426564 - DNA, 3351 bp, Homo sapiens
agtgggtggaaatgcagacctaggggagtgtgcggctggccttggcttggggcagttgccgtgggaggcccgctgcctgctggaaggaagatggtcagttcttctgaaccacaaaggccctgcagagtcctggagtctgtgtggcctggcttccagggttcacctcatgctggtggattgctcaggatgggtgccgaaggtctttaaggtcgtcagctcacctactgcccagcctgtggtgtcaaatgtcctgcctcttcaaatgtgtttggatcgatgatgagtccccccaaaaaaacattccttggaaaagctgaacaaaatgagtgaaaactcataccgtcgttctcagcggaactgagatccagcgcgttgcctccagcagggactgttggagtgagggagagcttccactagtccctataggttccaccacccagggcatccgcaggggcagttgccatgggaggcgcaggcctgctggaaggaagatggtcgattctcccaagcaacaaaggccacgtagagtcctggtttcagtgtggcctggtatccacagtgcaccccgtgctggtgggtggctcaggacgcacactcatttcctctgcaccttcctggtgtcattggcatggaaggaaggcccttgtccaagaaggatggtcttcgtcttgtgtgatctttgagatggatgcctcctgcagataagaaatgcttaactgagaaatgctcatgttgggatatcatcgatgagactttaatttgggcatggtgactgtttcccttgctgccacttgactcaatcccaggagcctcagtagaggatataatattacacaagatgctcaaaatggtggaattgctcagtgctcccataaatatacatttataattttcatttgccacacggtaaactgaaaaatacagactatattaaaaagaaactgcatgattttttttcaaaaattcaaagcatatttaaataatatataaattaaatgccctcctctcttccaattctgtccctatagttttcctctattaagtgaactacatgcattcttttagtggatagatgcacacaaacacacaagccattatggggaaggatccacgtgtgtggccatattgtaacacatttttctgcaaatcacctctttcatttaacagcccttattcaatggcctttttctttttcagtagtacatacacatctgtgtcatttgttgaatgacgacatgaatgttttgtagataaaatataattaaatgttttaagcatttctcactcatagatatttatgttagcaccaaatttctgtgcaatgaacctccctatatatcagtaattttgcatttgtctataatatcataataaattacttataagttgaattactgggattaagtatgtgcacactttatatttatattttgaaaattattgcaagattgccttcaaaaatgtggttaacaactttatcttcaaatggcaatgaatgagattgccagctttcctacagcctcacaatggattttataaatatttaacatttttgccaatgtgatcacccaaactattgtcttaaattgtatctcttttgtttttgagtttggtcattttttcatgtttattagccatctgtattttttaatttcttctttatgtccaattttgtgggtgggaggaggatttagtctcttcctgatttcgaagagctcatttactatttcgggaaataagatttggattgtcaaccattatagctattttttacacacttttcaactttgtttttgttataagaatgtgtatgattgttacatgtccaagtataaccatgttcgcttttatggcttctgagtttcatgtcatttttggaaagatatatatattgagtccataaaacccttcacctatgttaaattctaattcttttgtgtttttttaattcaaattcttaaatcatgagaaatttttttgttttgaaatcttaaagttgccaagttacttgccattacttgcgattatttgccaataattgcccatttatctgtaccgccatcttgcgcatatgctgtactctcatctgtgactggctccatttttgttctgtggatttgtgtgtctcttcttctgcctcctgtctcgtgtctgctcgttggaagaaattacagtttagactgcaatttcatcaactttaataaatcaattgaggggagaattggtttttaaaaatattaagtaagtcttcgtatccaaggacaaggtatgtcttttcttattcaataattttaattactgttaatattttcactgtggtgatgggagtttttcttttaatttattttcttgttcattttttgtatctaaagtttttgttttgttttgttttgggggtaagttgtcaccttactgtttcttgttgcttttcagattttttcaaagtatagactaaatccttcacaaatatttaaagtttttattttcccccttcatattgatcctgattttagttatgttgacaaagtccacagactgttactatcagaacacttgaacagttatggaaatattacctacccttgatttaatcagagtttaatggtatgcttctttggtttgactggcacattgtcgctggtcatttcctcccaaagaccaccagaaagagctatgatcaagcaaagctgagtttgttaaacttacctgcagcaagggaaaacaccaccttgatagggtttaataatgtttcaaaatcaagaaatgaggctttggggtctgggcagggaactaattagaaatgggcaaaatttgtcatgcaataccttgtgggaaagtgagatgaggttcttaatgtgagtattgatggtgaaatcattttctaggtgagctgtttgcctatataaagatgttatcaatgacagaagaactatttgcctagataaacaaactgaatttatttattggtttacagttttatcttgctgggcaggactctgctgggggtggtatcaggtcttattcccaataggtaagttatttggatatgggtggtcttaatcatcaatgtgtaaaatgctgattttaagtgcgaaatactttgtctaccatgttaggaaagtctgccaccttttatcttttttaaggaattttaatcaaaaccaggtggtagatataatcaaattgttttgcagaatcaattttcctgttctctttaaagacttttatcactgtgaattaatttactattattgcaacttcctttaattccttgaatgaacagaccctactggttttatttacaagtttcaactaatgaaattgactgtgattttcttttgggctattttg

SEQ ID NO: 426565 - DNA, 666 bp, Homo sapiens
ccgtaaagagtttgtagaggcagttcgggtgcggtacgttgcattccggtaccggacgccgagagcggtttgtctccgtctctggagttgtaggcgagaggtgatcatgtccggtcgcgggaaacagggcggcaaagtgcgagcaaaggccaaatcccgctcctcccgcgcgggcctgcagttcccggtgggccgagtgcacagactgctgcgcaaagggaactacgcggagcgagtgggcgccggggcgccggtgtacctggcggcggtgttggagtaccttacggcggagatcctggagctggctggcaacgccgcgcgtgacaacaagaagaccaggataattccccgccacctgcagctcgccatccgcaacgacgaggagttaaacaagctgctgggcaaagtgaccatcgctcagggcggcgtcctgcccaacatccaggccgtgctgctgcccaagaagacggagagtcagaagacgaagagcaaatgaccctgacgccgccctcagggagctggctcccccagcaaaggcccttttcatggtcgtcccgcaatgcttttgaatgtgctggatgtcatggagggccggtgacatctagcggggaggtgggcggcgagggtcccggcgggagccaataaagttggtgaaaatcgttgtaa

SEQ ID NO: 426566 - DNA, 3323 bp, Homo sapiens
ccgtaaagagtttgtagaggcagttcgggtgcggtacgttgcattccggtaccggacgccgagagcggtttgtctccgtctctggagttgtaggcgagaggtgatcatgtccggtcgcgggaaacagggcggcaaagtgcgagcaaaggccaaatcccgctcctcccgcgcgggcctgcagttcccggtgggccgagtgcacagactgctgcgcaaagggaactacgcggagcgagtgggcgccggggcgccggtgtacctggcggcggtgttggagtaccttacggcggagatcctggagctggctggcaacgccgcgcgtgacaacaagaagaccaggataattccccgccacctgcagctcgccatccgcaacgacgaggagttaaacaagctgctgggcaaagtgaccatcgctcagggcggcgtcctgcccaacatccaggccgtgctgctgcccaagaagacggagagtcagaagacgaagagcaaatgaccctgacgccgccctcagggagctggctcccccagcaaaggcccttttcatggtcgtcccgcaatgcttttgaatgtgctggatgtcatggagggccggtgacatctagcggggagccttcgctctcctgccagtttgtgagcactcaggaccaagttctgggaagataccgtcggatcgagctgagctcggggcaggaagtgtctgcggccatatttttcaaaaagtggagtaactttccgtcttggaagggtggctctgatggcacgatgtcaacttgagattcttcctagcctagtagctgctgtgctttcatgctttggatatcagatatctttatatagcacttttatgttcatattttttttttaatgaaggaaacgttcaataagtgagtcatgaggttggaaattcgttcccctgacagtcatattgcataacattgcagcgcctttagtcgtgggttacatatgcttgagcttttaaagtgatgttgtcaagtttctagcttcataatgatcctgtcttcatcatatcatattcactttgagaatcggtttgactttgctttcaaacaaaacaaaaacctcttgcttttaggggttcttacccaacaaataacctgtttgaactctcttatattctcccactagcctgaagcaatgacctcattccagtaatgtctttgggagttgcattgcctaatggcacaatattgctttaataaacatgtaaggaaagataggaccaaatatgtaagtgcagggggaaacacatttcagaccaggaatccacattgaaaagttaacactagtaatcatcttctgcccttaattgacactcctatttatttcatcctcagcaaatttcatcctggctcacagaccccacaaaaaagatcccagtacagatttcacatctttggattcatctttcctgtgagtcggaattgaagtcttccccaaaaatatatgtatatattgtatgtcttcatccttggtagcggctggcccattttcccacatggactttattttgtccccagtatttattgaacagctgtctatgccaggctctgtacaaagtgataggagtagagctgtgaatgaggccaaccagatttccactctctcggagctcactttatttttattggttcctgaagacgggacaaggaacaaatacatacgttaatatgagagatcagcttctgttagtacttgtacctctctgctgtgtgtggatgaatgatggaattacttctcccatgttgccatttttgaggtgtacaaaggtcaggccgtacacacctctgttaggaggcaaattattgggcaggttcgagatgttctgctatttactctgtggttttgtcatatgtaaaagtcataacacctgttttaaggattgagattgttcatttactgtgtgccacatattagacaataaatggaaaaaagtaccatgttcaatgggggtatgggtttatccttataggttaaattataggtaaacattaataggactttttaaaaaatgcctcattgttagaactactactcacagttaccacttggggtcagtggaacaaaatgcatatatggttttgacatttgagtctaaatttcttaaagggatgaggcatctgagggattgttaccaaaatgatgaagaaataaggacaagggacatcaagacattcataagaaaaagcacctttgccttcccctgggaagattcacaggaatctgtccagctcttgttacatgatgagcaacatagacaagatacgaggcattgtaactgccctgtcgccacccgcctctcccaccactacccaaaggattcttagcatcccctcacatactctgcctgcctcaacgttcagtcagcccctcaccatttttgtttttgagagttttttttttaacccgaatagtttactggctgtttaaaatgcatactcctacaaaatcagctcagcccatgatccatgatgaacaaacagtagttcttgctgatgtgtgattatgaatttaaaaggccagtatttctttaagcataagaccatatggaaaaaggcctaagacaaaatctgatgggaactgaattccagtttttaatagagttataatccatagttttatttacacacaaacacacacacacacactctttcctgcagagataagcaagccgttcagtgtggctgtggcttggccaggatttgtttgatctttgtttttcctgcagggccagtcttgtctttgtgtccccgaggactggtctgtttagttgtgcctgcctggaatcaaaaggcttagtcaggccccataattggtgatgactggcatactatatgcaaacttcacaatgccccttccagtggttgaaaggtcgcataccatgctgtgtaagaactttagctctctggcaatgagacttaaattcagattcactctactccttattagttatctgatttttggaaacttaatctctttaaacctcagtttcatctctaaaatgggcataatagtttacctcatagagtttggggagaattgagtgaattaatgtgtgtgaggacactaagattcccatatagaaataggctcaatgaatagtagctgtttttatttctatgtaaagtgagtagcggtagttgatgggagctgttgaaacaggtaaacagcattctagcaatccttcgacttttgtgatagcaaaccataaaaacaattttagtggctgttttactaattaaaggacatccacaattcaatgtataacagaaaaagtaatgattaaagcttgtgaatctgaa

SEQ ID NO: 426567 - DNA, 2265 bp, Homo sapiens
ccgtaaagagtttgtagaggcagttcgggtgcggtacgttgcattccggtaccggacgccgagagcggtttgtctccgtctctggagttgtaggcgagaggtgatcatgtccggtcgcgggaaacagggcggcaaagtgcgagcaaaggccaaatcccgctcctcccgcgcgggcctgcagttcccggtgggccgagtgcacagactgctgcgcaaagggaactacgcggagcgagtgggcgccggggcgccggtgtacctggcggcggtgttggagtaccttacggcggagatcctggagctggctggcaacgccgcgcgtgacaacaagaagaccaggataattccccgccacctgcagctcgccatccgcaacgacgaggagttaaacaagctgctgggcaaagtgaccatcgctcagggcggcgtcctgcccaacatccaggccgtgctgagccttcgctctcctgccagtttgtgagcactcaggaccaagttctgggaagataccgtcggatcgagctgagctcggggcaggaagtgtctgcggccatatttttcaaaaagtggagtaactttccgtcttggaagggtggctctgatggcacgatgtcaacttgagattcttcctagcctagtagctgctgtgctttcatgctttggatatcagatatctttatatagcacttttatgttcatattttttttttaatgaaggaaacgttcaataagtgagtcatgaggttggaaattcgttcccctgacagtcatattgcataacattgcagcgcctttagtcgtgggttacatatgcttgagcttttaaagtgatgttgtcaagtttctagcttcataatgatcctgtcttcatcatatcatattcactttgagaatcggtttgactttgctttcaaacaaaacaaaaacctcttgcttttaggggttcttacccaacaaataacctgtttgaactctcttatattctcccactagcctgaagcaatgacctcattccagtaatgtctttgggagttgcattgcctaatggcacaatattgctttaataaacatgtaaggaaagataggaccaaatatgtaagtgcagggggaaacacatttcagaccaggaatccacattgaaaagttaacactagtaatcatcttctgcccttaattgacactcctatttatttcatcctcagcaaatttcatcctggctcacagaccccacaaaaaagatcccagtacagatttcacatctttggattcatctttcctgtgagtcggaattgaagtcttccccaaaaatatatgtatatattgtatgtcttcatccttggtagcggctggcccattttcccacatggactttattttgtccccagtatttattgaacagctgtctatgccaggctctgtacaaagtgataggagtagagctgtgaatgaggccaaccagatttccactctctcggagctcactttatttttattggttcctgaagacgggacaaggaacaaatacatacgttaatatgagagatcagcttctgttagtacttgtacctctctgctgtgtgtggatgaatgatggaattacttctcccatgttgccatttttgaggtgtacaaaggtcaggccgtacacacctctgttaggaggcaaattattgggcaggttcgagatgttctgctatttactctgtggttttgtcatatgtaaaagtcataacacctgttttaaggattgagattgttcatttactgtgtgccacatattagacaataaatggaaaaaagtaccatgttcaatgggggtatgggtttatccttataggttaaattataggtaaacattaataggactttttaaaaaatgcctcattgttagaactactactcacagttaccacttggggtcagtggaacaaaatgcatatatggttttgacatttgagtctaaaatgggcataatagtttacctcatagagtttggggagaattgagtgaattaatgtgtgtgaggacactaagattcccatatagaaataggctcaatgaatagtagctgtttttatttctatgtaaagtgagtagcggtagttgatgggagctgttgaaacaggtaaacagcattctagcaatccttcgacttttgtgatagcaaaccataaaaacaattttagtggctgttttactaattaaaggacatccacaattcaatgtataacagaaaaagtaatgattaaagcttgtgaatctgaa

SEQ ID NO: 426568 - DNA, 3261 bp, Homo sapiens
ccgtaaagagtttgtagaggcagttcgggtgcggtacgttgcattccggtaccggacgccgagagcggtttgtctccgtctctggagttgtaggcgagaggtgatcatgtccggtcgcgggaaacagggcggcaaagtgcgagcaaaggccaaatcccgctcctcccgcgcgggcctgcagttcccggtgggccgagtgcacagactgctgcgcaaagggaactacgcggagcgagtgggcgccggggcgccggtgtacctggcggcggtgttggagtaccttacggcggagatcctggagctggctggcaacgccgcgcgtgacaacaagaagaccaggataattccccgccacctgcagctcgccatccgcaacgacgaggagttaaacaagctgctgggcaaagtgaccatcgctcagggcggcgtcctgcccaacatccaggccgtgctgctgcccaagaagacggagagtcagaagacgaagagcaaatgaccctgacgccgccctcagggagctggctcccccagcaaaggcccttttcatgagccttcgctctcctgccagtttgtgagcactcaggaccaagttctgggaagataccgtcggatcgagctgagctcggggcaggaagtgtctgcggccatatttttcaaaaagtggagtaactttccgtcttggaagggtggctctgatggcacgatgtcaacttgagattcttcctagcctagtagctgctgtgctttcatgctttggatatcagatatctttatatagcacttttatgttcatattttttttttaatgaaggaaacgttcaataagtgagtcatgaggttggaaattcgttcccctgacagtcatattgcataacattgcagcgcctttagtcgtgggttacatatgcttgagcttttaaagtgatgttgtcaagtttctagcttcataatgatcctgtcttcatcatatcatattcactttgagaatcggtttgactttgctttcaaacaaaacaaaaacctcttgcttttaggggttcttacccaacaaataacctgtttgaactctcttatattctcccactagcctgaagcaatgacctcattccagtaatgtctttgggagttgcattgcctaatggcacaatattgctttaataaacatgtaaggaaagataggaccaaatatgtaagtgcagggggaaacacatttcagaccaggaatccacattgaaaagttaacactagtaatcatcttctgcccttaattgacactcctatttatttcatcctcagcaaatttcatcctggctcacagaccccacaaaaaagatcccagtacagatttcacatctttggattcatctttcctgtgagtcggaattgaagtcttccccaaaaatatatgtatatattgtatgtcttcatccttggtagcggctggcccattttcccacatggactttattttgtccccagtatttattgaacagctgtctatgccaggctctgtacaaagtgataggagtagagctgtgaatgaggccaaccagatttccactctctcggagctcactttatttttattggttcctgaagacgggacaaggaacaaatacatacgttaatatgagagatcagcttctgttagtacttgtacctctctgctgtgtgtggatgaatgatggaattacttctcccatgttgccatttttgaggtgtacaaaggtcaggccgtacacacctctgttaggaggcaaattattgggcaggttcgagatgttctgctatttactctgtggttttgtcatatgtaaaagtcataacacctgttttaaggattgagattgttcatttactgtgtgccacatattagacaataaatggaaaaaagtaccatgttcaatgggggtatgggtttatccttataggttaaattataggtaaacattaataggactttttaaaaaatgcctcattgttagaactactactcacagttaccacttggggtcagtggaacaaaatgcatatatggttttgacatttgagtctaaatttcttaaagggatgaggcatctgagggattgttaccaaaatgatgaagaaataaggacaagggacatcaagacattcataagaaaaagcacctttgccttcccctgggaagattcacaggaatctgtccagctcttgttacatgatgagcaacatagacaagatacgaggcattgtaactgccctgtcgccacccgcctctcccaccactacccaaaggattcttagcatcccctcacatactctgcctgcctcaacgttcagtcagcccctcaccatttttgtttttgagagttttttttttaacccgaatagtttactggctgtttaaaatgcatactcctacaaaatcagctcagcccatgatccatgatgaacaaacagtagttcttgctgatgtgtgattatgaatttaaaaggccagtatttctttaagcataagaccatatggaaaaaggcctaagacaaaatctgatgggaactgaattccagtttttaatagagttataatccatagttttatttacacacaaacacacacacacacactctttcctgcagagataagcaagccgttcagtgtggctgtggcttggccaggatttgtttgatctttgtttttcctgcagggccagtcttgtctttgtgtccccgaggactggtctgtttagttgtgcctgcctggaatcaaaaggcttagtcaggccccataattggtgatgactggcatactatatgcaaacttcacaatgccccttccagtggttgaaaggtcgcataccatgctgtgtaagaactttagctctctggcaatgagacttaaattcagattcactctactccttattagttatctgatttttggaaacttaatctctttaaacctcagtttcatctctaaaatgggcataatagtttacctcatagagtttggggagaattgagtgaattaatgtgtgtgaggacactaagattcccatatagaaataggctcaatgaatagtagctgtttttatttctatgtaaagtgagtagcggtagttgatgggagctgttgaaacaggtaaacagcattctagcaatccttcgacttttgtgatagcaaaccataaaaacaattttagtggctgttttactaattaaaggacatccacaattcaatgtataacagaaaaagtaatgattaaagcttgtgaatctgaa

SEQ ID NO: 426569 - DNA, 878 bp, Homo sapiens
ccgtaaagagtttgtagaggcagttcgggtgcggtacgttgcattccggtaccggacgccgagagcggtttgtctccgtctctggagttgtaggcgagaggtgatcatgtccggtcgcgggaaacagggcggcaaagtgcgagcaaaggccaaatcccgctcctcccgcgcgggcctgcagttcccggtgggccgagtgcacagactgctgcgcaaagggaactacgcggagcgagtgggcgccggggcgccggtgtacctggcggcggtgttggagtaccttacggcggagatcctggagctggctggcaacgccgcgcgtgacaacaagaagaccaggataattccccgccacctgcagctcgccatccgcaacgacgaggagttaaacaagctgctgggcaaagtgaccatcgctcagggcggcgtcctgcccaacatccaggccgtgctgctgcccaagaagacggagagtcagaagacgaagagcaaatgaccctgacgccgccctcagggagctggctcccccagcaaaggcccttttcatggtcgtcccgcaatgcttttgaatgtgctggatgtcatggagggccggtgacatctagcggggaggtgggcggcgagggtcccggcgggagccaataaagttggtgaaaatcgttgtaaggtcgagagagctgtgtagtcgcggggacatgtcggatggccccaggggaggggggcgaccgggaaacccctggagcaggcactggtgggtgggcttgagccactctggacggctttagtccgcaggtcaccctcgaggcgtcaggggagggtggcctggaggtgggcagggtggaagccacctcgctgtcagtagggcaaaggggaggcag

SEQ ID NO: 426570 - DNA, 2883 bp, Homo sapiens
gaatcagtttgtttctcttggatcgatgtgtttcccagaggcagtgcttcttagtgatgaaagaaatattttatcaaatgtagatgatatcttagcagctacagcagcagcttgtggagttacacctactgatttttccaagtcaacttcaaatgaaaccatgcaggctgttgaagatggtgattctaaatctcattttcagcagtcattagatgtcaggcatgtgacttcagattttaactctatgacagctacagtaggaaagccacagaatataaatgatacttccttaaatggaaatcaggttactgtgaacctttcaccagtacctgcccttcagtcaaaaatgactcttgatcaacagcacattgaaacacctggtcaaaatataccaactaaagtaacttcagcagtggttggaccaagtcatgaagtccaggagcaaagttctggcccattcaagaaacagtctgctaccaatcttgaatctgaagaagacagtgaagctcctgttgatagtacattaaataataacagaaaccaagagtttgtttctagtagtagaagtataagtggagagagtgctacatcagagagtgaatttaccttagggggtgacgacagtggtgtgtcaatgaacccagctaggagtgcacttgcactgttggccatggcccaatctggggatgcagtcagtgtcaagattgaagaagaaaaccaagatttaatgcattttaaccttcaaaagaaaagagctaaaggaaaagggcaagttaaagaggaagacaacagtaatcagaaacagctgaaaagacctgcccaaggcaaacgccagaatccaaggggaacagatatttacttaccgtatactcctccttcctcagaaagctgccatgatggttatcagcatcaagaaaaaatgagacagaagatcaaagaggtggaggaaaaacaaccagaagtcaaaacaggatttattgcttctttcttagattttctgaaatccgggcccaagcagcagttttccactcttgctgtacgaatgcctaacaggactagacggccagggacccagatggttcgtacattttgtcccccaccacttcccaagccttcatctacaacacccacacctttagtgtctgaaactggcggtaacagtccatcagataaagttgataatgaacttaaaaacttggaacatttatcttcattttcttctgatgaagatgatcctggatatagtcaagatgcttataaaagcgtctctactcccttaactactttggatgctacttctgataaaaagaagaaaacagaagccctacaggtggcaactactagcccaactgccaatactactggtactgctactacttcctcaaccactgtgggtgcagttaagcaagaacctctccactctacttcatatgcagtaaatattctggaaaatataagctcttcagaatcctcaaagcccattgaacttgatggtcttccttcagaccagtttgcaaaaggacaggacactgttgccatagaaggttttacagatgaggaggacacagaaagcggaggagaaggccaatacagagagcgtgatgaatttgtggtaaagatagaagacatagagacttttaaggaggctttaaaaacaggaaaagaacctccagctatttggaaagtacaaaaagctttattacagaaatttgttcctgaaattcgagatggtcaaagagaatttgctgctacaaatagttatcttggatattttggagatgcaaagagtaaatacaaaagaatatatgtgaagttcattgaaaatgcaaacaagaaggaatatgtcagagtgtgttctaaaaagccaagaaataaaccttcacaaactatcagaactgttcaagctaagccaagtagtagcagtaaaacttctgatcctctagcatcaaaaactacaactacaaaagccccttccgtgaaacccaaagttaaacagccaaaagtaaaggctgagccaccaccaaagaaacggaaaaaatggaaagaagaattttcatcatcccaatctgactcatctcctgagatccatactagtagtagtgacgatgaggaatttgaacctcccgctccctttgtcactcgctttttgaacacaagagcaatgaaggaaacctttaagagctacatggaattgcttgttagcattgccttggaccctgacacaatgcaagccttagagaagagcaatgatgagctacttttacctcatatgaaaaaaatagatggcatgctaaatgataaccgaaagagacttcttttgaatcttcatttggatcaatcattcaagaatgctttggaaagttttcctgaactaacaataattactcgagattctaaagcaaagagtggaggaactgctatttctaaaatcaaaatgaatggcaaagcctataataagaaaactctaaggacttctaaaacaaccaccaaatctgcacaagagtttgctgtcgatccagagaaaatacagttgtattctttgtatcattcactccatcattataagtaccatgtttatctgatatgtaaggatgaggtactttcttctcatttacttaaaaaaaatgtttttcagaatgttaaggagactctagccatagtattttggagtgttttaaagagagttgtgaaatacatgtgtgtatgtattttgtctatgtattctgtaaataatgacttgatttattgttctgagtctctctgctatgttttgtgctcagatttacccgagcctcaccacctcttgtaggagctataattggtaatgttttgaagctgttggtgcttgctttacatcgccataataaatgatgttttattgca

SEQ ID NO: 426571 - DNA, 2966 bp, Homo sapiens
taatgtgaattctatcttgaggtaaccatttttttcatacagatttgcttcagtgttatccagaatatgcattcagtactagaattagtttagctttataaatagggctgtgttagacactgcagtaattttctaattcataaaataaacttcttactaaactagcacttgattaacttgttgaggtaaaaatctaactacatttacattttgaagaataaaactgataattagactatttgcagtgttaaacacagcttccttaactcttagaactggaagttgtagagctctccttttggtgcctttccagcctttatacacactattgtagctttcttaggtttgataggtagcgtttcaagtagtttagctgagacagtgaatgtattaggttcaacatgaccttgtgttttatttgtgtttgccaacaggatgccttatttgtttgagaaaaagatgtactagtgtcattctaaactatctccttttttaggattctaaagaagttaatcatcatccttttgtttattttaccaccatttagtgccttaaatcctatcaagaaagcagtgttactgctcaatgcccaaataagacacgcggatattgctattgtcttgcttttgagttaacaggccaactttttatacttaaaacctcagtaaactggcaaagaattgaaggtaatgtgatttgatttgagaataaaacattgtagcattgggtgaaaaatgagtatttgagttaagcttacatatttatttctgatggttatcttattaaaagcaataatccttaatactgtacttgccattagactaggtactcagtaatggaagtttctctcaagggttaaatgttccatttttgaaagttttaaaaaacctgtttgggtggtttattttgaaaacaaaagtaacctattagattcattttgcctaactcatatggagagcatgcagagtatcaacagtgggagcatcataaaatgaattttccaagtggagaggagtaggaagcagccatatgatagtattgactctggacagaattgatgtctttcgtttccaaagtgcagagtagggaactacatttcctaatgtggcattgtaaatatacatctttatattactcttccagcctacgttcctaaatcattgataatttaaatattttttaaagccaccttaatttaggtagctcttggaatcgatgtttgaattcactagccacattttcttcatgatatgcctcgtggcaaacaaagatgtttccttaagatgaatcttacatttcccatagaaaataacccatttcctttggcactgcagttgccctcaaactgcttgcagttgtattcattttagtacaacaaaggttttcataatatgggaggccaagtctatgatactgcctcaaagagaccctattgtgtagatgcatcatcttctctcatttgatccatagagcataggcaaagatgtcaacctcaggccttagagaaaagtggaaatgttattatgacagccgtccatgagttatcgctttgtatgaagttaaatacagtcatgcgttgcttaacagcagggatacattctgagaaatgcattgttaggcaattccgttgtgcgaacatcctagtgtacttacacaaacctaggtggcatagcccacaacgtacccaggctatatggtaaacctgtacagcatgttactgtactgaatactgtaggcagttgtaacacaatggtatttgtgtatctagacatagaaaacatacagtaagaatatggtattataatcttacgggaccactgtcaaatacgcggtctgtctttgaaaagttgtaatgcggcgcatgactataaatacctagctggttagcatttacattccttgccagggagtttgaaatttatactatagaaataactttaggttttaggtagagttaaagaggtaaagcacatgttgccacaacccaggaaagtatttttaagaaagattggattttcctacctttagagatctaaaaaaaatttaatataaaaaatcattttgtgttggtgtttattactagttcagatgagtggctgctgaaggggcccccttgtcattttcattataacccaatttccacttatttgaactcttaagtcataaatgtataatgacttatgaattagcacagttaagttgacactagaaactgcccatttctgtattacactatcaaataggaaacattggaaagatggggaaaaaaatcttattttaaaatggcttagaaagttttcagattactttgaaaattctaaacttctttctgtttccaaaacttgaaaatatgtagatggactcatgcattaagactgttttcaaagctttcctcacatttttaaagtgtgattttccttttaatatacatatttattttctttaaagcagctatatcccaacccatgactttggagatatacctataaaaccaatataacagcagggttattgaagcagctttctcaaatgttgcttcagatgtgcaagttgcaaattttattgtatttgtagaatacaatttttgttttaaactgtatttcaatctatttctccaagatgcttttcatatagagtgaaatatcccaggataactgcttctgtgtcagtcgcatttgacgcataactgcacaaatgaacagtgtatactcttggttgtgcattaacttacatgtataatttttggcatctgtgttcacaaatgcatgtgttagcaaatcacctttatttataagtgacaataattgaagttaaggatataaagaaacctgcatttgtagtccagcgttttcatttggtccataacacaatgtatggaaatgtgaaagacaattttgtacatttgtttgttactaactcagatcattaaaatgaaaacaatttttttaaacaagaaaaaaaaaatg

SEQ ID NO: 426572 - DNA, 2712 bp, Homo sapiens
tagtttagctgagacagtgaatgtattaggttcaactacttgaaacgctacctatcaaacctaagaaagctacaatagtgtgtataaaggctggaaaggtagcgtttcaagtagtttagctgagacagtgaatgtattaggttcaacatgaccttgtgttttatttgtgtttgccaacaggatgccttatttgtttgagaaaaagatgtactagtgtcattctaaactatctccttttttaggattctaaagaagttaatcatcatccttttgtttattttaccaccatttagtgccttaaatcctatcaagaaagcagtgttactgctcaatgcccaaataagacacgcggatattgctattgtcttgcttttgagttaacaggccaactttttatacttaaaacctcagtaaactggcaaagaattgaaggtaatgtgatttgatttgagaataaaacattgtagcattgggtgaaaaatgagtatttgagttaagcttacatatttatttctgatggttatcttattaaaagcaataatccttaatactgtacttgccattagactaggtactcagtaatggaagtttctctcaagggttaaatgttccatttttgaaagttttaaaaaacctgtttgggtggtttattttgaaaacaaaagtaacctattagattcattttgcctaactcatatggagagcatgcagagtatcaacagtgggagcatcataaaatgaattttccaagtggagaggagtaggaagcagccatatgatagtattgactctggacagaattgatgtctttcgtttccaaagtgcagagtagggaactacatttcctaatgtggcattgtaaatatacatctttatattactcttccagcctacgttcctaaatcattgataatttaaatattttttaaagccaccttaatttaggtagctcttggaatcgatgtttgaattcactagccacattttcttcatgatatgcctcgtggcaaacaaagatgtttccttaagatgaatcttacatttcccatagaaaataacccatttcctttggcactgcagttgccctcaaactgcttgcagttgtattcattttagtacaacaaaggttttcataatatgggaggccaagtctatgatactgcctcaaagagaccctattgtgtagatgcatcatcttctctcatttgatccatagagcataggcaaagatgtcaacctcaggccttagagaaaagtggaaatgttattatgacagccgtccatgagttatcgctttgtatgaagttaaatacagtcatgcgttgcttaacagcagggatacattctgagaaatgcattgttaggcaattccgttgtgcgaacatcctagtgtacttacacaaacctaggtggcatagcccacaacgtacccaggctatatggtaaacctgtacagcatgttactgtactgaatactgtaggcagttgtaacacaatggtatttgtgtatctagacatagaaaacatacagtaagaatatggtattataatcttacgggaccactgtcaaatacgcggtctgtctttgaaaagttgtaatgcggcgcatgactataaatacctagctggttagcatttacattccttgccagggagtttgaaatttatactatagaaataactttaggttttaggtagagttaaagaggtaaagcacatgttgccacaacccaggaaagtatttttaagaaagattggattttcctacctttagagatctaaaaaaaatttaatataaaaaatcattttgtgttggtgtttattactagttcagatgagtggctgctgaaggggcccccttgtcattttcattataacccaatttccacttatttgaactcttaagtcataaatgtataatgacttatgaattagcacagttaagttgacactagaaactgcccatttctgtattacactatcaaataggaaacattggaaagatggggaaaaaaatcttattttaaaatggcttagaaagttttcagattactttgaaaattctaaacttctttctgtttccaaaacttgaaaatatgtagatggactcatgcattaagactgttttcaaagctttcctcacatttttaaagtgtgattttccttttaatatacatatttattttctttaaagcagctatatcccaacccatgactttggagatatacctataaaaccaatataacagcagggttattgaagcagctttctcaaatgttgcttcagatgtgcaagttgcaaattttattgtatttgtagaatacaatttttgttttaaactgtatttcaatctatttctccaagatgcttttcatatagagtgaaatatcccaggataactgcttctgtgtcagtcgcatttgacgcataactgcacaaatgaacagtgtatactcttggttgtgcattaacttacatgtataatttttggcatctgtgttcacaaatgcatgtgttagcaaatcacctttatttataagtgacaataattgaagttaaggatataaagaaacctgcatttgtagtccagcgttttcatttggtccataacacaatgtatggaaatgtgaaagacaattttgtacatttgtttgttactaactcagatcattaaaatgaaaacaatttttttaaacaagaaaaaaaaaatg

SEQ ID NO: 426573 - DNA, 300 bp, Homo sapiens
tctattttattttagtttaacaagatttcagtgtgttaatgaagtttgtttataacattgcagaactgttcaagctaagccaagtagtagcagtaaaacttctgatcctctagcatcaaaaactacaactacaaaagccccttccgtgaaacccaaagttaaacagccaaaagtaaaggctgagccaccaccaaagaaacggaaaaaatggaaagaagaattttcatcatcccaatctgactcatctcctgagatccatactagtagtagtgacgatgagggtgagttttccgtgaaatg

SEQ ID NO: 426574 - DNA, 3609 bp, Homo sapiens
gaatcagtttgtttctcttggatcgatgtgtttcccagaggcagtgcttcttagtgatgaaagaaatattttatcaaatgtagatgatatcttagcagctacagcagcagcttgtggagttacacctactgatttttccaagtcaacttcaaatgaaaccatgcaggctgttgaagatggtgattctaaatctcattttcagcagtcattagatgtcaggcatgtgacttcagattttaactctatgacagctacagtaggaaagccacagaatataaatgatacttccttaaatggaaatcaggttactgtgaacctttcaccagtacctgcccttcagtcaaaaatgactcttgatcaacagcacattgaaacacctggtcaaaatataccaactaaagtaacttcagcagtggttggaccaagtcatgaagtccaggagcaaagttctggcccattcaagaaacagtctgctaccaatcttgaatctgaagaagacagtgaagctcctgttgatagtacattaaataataacagaaaccaagagtttgtttctagtagtagaagtataagtggagagagtgctacatcagagagtgaatttaccttagggggtgacgacagtggtgtgtcaatgaacccagctaggagtgcacttgcactgttggccatggcccaatctggggatgcagtcagtgtcaagattgaagaagaaaaccaagatttaatgcattttaaccttcaaaagaaaagagctaaaggaaaagggcaagttaaagaggaagacaacagtaatcagaaacagctgaaaagacctgcccaaggcaaacgccagaatccaaggggaacagatatttacttaccgtatactcctccttcctcagaaagctgccatgatggttatcagcatcaagaaaaaatgagacagaagatcaaagaggtggaggaaaaacaaccagaagtcaaaacaggatttattgcttctttcttagattttctgaaatccgggcccaagcagcagttttccactcttgctgtacgaatgcctaacaggactagacggccagggacccagatggttcgtacattttgtcccccaccacttcccaagccttcatctacaacacccacacctttagtgtctgaaactggcggtaacagtccatcagataaagttgataatgaacttaaaaacttggaacatttatcttcattttcttctgatgaagatgatcctggatatagtcaagatgcttataaaagcgtctctactcccttaactactttggatgctacttctgataaaaagaagaaaacagaagccctacaggtggcaactactagcccaactgccaatactactggtactgctactacttcctcaaccactgtgggtgcagttaagcaagaacctctccactctacttcatatgcagtaaatattctggaaaatataagctcttcagaatcctcaaagcccattgaacttgatggtcttccttcagaccagtttgcaaaaggacaggacactgttgccatagaaggttttacagatgaggaggacacagaaagcggaggagaaggccaatacagagagcgtgatgaatttgtggtaaagatagaagacatagagacttttaaggaggctttaaaaacaggaaaagaacctccagctatttggaaagtacaaaaagctttattacagaaatttgttcctgaaattcgagatggtcaaagagaatttgctgctacaaatagttatcttggatattttggagatgcaaagagtaaatacaaaagaatatatgtgaagttcattgaaaatgcaaacaagaaggaatatgtcagagtgtgttctaaaaagccaagaaataaaccttcacaaactatcagaactgttcaagctaagccaagtagtagcagtaaaacttctgatcctctagcatcaaaaactacaactacaaaagccccttccgtgaaacccaaagttaaacagccaaaagtaaaggctgagccaccaccaaagaaacggaaaaaatggaaagaagaattttcatcatcccaatctgactcatctcctgagatccatactagtagtagtgacgatgaggaatttgaacctcccgctccctttgtcactcgctttttgaacacaagagcaatgaaggaaacctttaagagctacatggaattgcttgttagcattgccttggaccctgacacaatgcaagccttagagaagagcaatgatgagctacttttacctcatatgaaaaaaatagatggcatgctaaatgataaccgaaagagacttcttttgaatcttcatttggatcaatcattcaagaatgctttggaaagttttcctgaactaacaataattactcgagattctaaagcaaagagtggaggaactgctatttctaaaatcaaaatgaatggcaaagcctataataagaaaactctaaggacttctaaaacaaccaccaaatctgcacaagagtttgctgtcgatccagagaaaatacagttgtattctttgtatcattcactccatcattataagtaccatgtttatctgatatgtaaggatgagatttcttcggtgcagaaaaaaaatgaagatttaggacaggaggaaattgttcaactttgtatgaaaaatgtaaaatgggtggaggacctctttgaaaaatttggagaacttctaaatcatgtacagcagaaatgttcctgacttttccacaaaaatcccatctttttatagcactaatgaaatggcagatatggggtggtcaaagataatcagatgtcaagtagtggccttctgcaggccggccgcttccatcatggaactgtcattaccacctctgctgaaggacagtggtgcggcctttaggaacgaagttagtcctctggaaatggacctaaatcccaccacatttttaccctaatgaatgatttttctattttgtaaaccattgggtaacttgagtcatattttcagaaacattttttgacaaatgatgaagcatgcactaagtataatttttttttattgctagagaagtaacacttaaagtaacgattttttttttctgactccggctaaacaccagaatgacagagaagtggcagaaaccatatgtttgtactcacatctggccacaaaaccagaaatactgtacattatgtaaagaggtctggtgtggtgtgacatcctgtataagaatatcatcaatttaaaatataaaatttggaaactattctgctttacagactccttttactcttaacatgttcaggaaactggatgtggaattggtgcaattctctgactgctttttgtgtcaaattatattgtgataaaaaaacaatgacatactattttccctatcgcaaagaaaagtattttcgtttatactgttttttcctttggaaaattttcaattgtacattttatttcactgatagttgtatttttcacaaggaaaatgttgtggttataattacgtttgatatatctctacaacaccttttgttattttcagtaaatcttacctcaagatagaattcacattagaaattcaacatataactaaggtcgac

SEQ ID NO: 426575 - DNA, 3694 bp, Homo sapiens
gagacctgcctgcctcagccacctaaagtgctgggattacaggcgtgagccaccgtgcctggcctagacttcacttttaattagtagtgactagccaggcatttccaaatgatttgatttccaaaattttgaattattttgtattttaaggtaattagctgtatacttggatatttttcaggttcaaggtaaagacccatcagtggaagtcacacaggacctcattgatgaatctgaagaagaacgatttgaagaaatgcctgaaactagtcatctgattgacctgcccacatgtgaactcaataaacttgaagagattgctgacttagttacctcagtgctctcctcacctatccgtagggaaaagctggctctcgccttggaaaatgaaggctatattaaaaaactattgcagctgttccaagcttgcgagaacctagaaaacactgaaggcttacaccatttgtatgaaattattagaggaatcttattcctaaataaggcaactctttttgaggtaatgttttctgatgagtgtatcatggatgtcgtgggatgccttgaatatgaccctgctttggctcagccaaaaagacatagagaattcttgaccaaaactgcaaagttcaaggaagttataccaataacagactctgaactaaggcaaaaaatacatcagacttacagggtacagtacattcaggacatcattttgcccacaccatctgtttttgaagagaattttctttctactcttacgtcttttattttcttcaacaaagttgagatagtcagcatgttgcaggaagatgagaagtttttgtctgaagtttttgcacaattaacagatgaggctacagatgatgataaacggcgtgaattggttaattttttcaaggagttttgtgcattttctcagacattacaacctcaaaacagggatgcatttttcaaaacattggcaaaattgggaattcttcctgctcttgaaattgtaatgggcatggatgatttgcaagtcagatcagctgctacagatatattttcttatctagtagaatttagtccatctatggtccgagagtttgtaatgcaagaagctcagcagagtgatgacgatattcttcttattaatgtggtaattgaacaaatgatctgtgatactgatcctgagctaggaggcgctgttcagttaatgggacttcttcgtactctaattgatccagagaacatgctggctacaactaataaaaccgaaaaaagtgaatttctaaattttttctacaaccattgtatgcatgttctcacagcaccacttttgaccaatacttcagaagacaaatgtgaaaaggataatatagttggatcaaacaaaaacaacacaatttgtcccggtgcccttcgctttatgaggcggataattggacttaaagatgaattttataatcgttacatcaccaagggaaatctttttgagccagttataaatgcacttctggataatggaactcggtataatctgttgaattcagctgttattgagttgtttgaatttataagagtggaagatatcaagtctcttactgcccatatagttgaaaacttttataaagcacttgaatcgattgaatatgttcagacattcaaaggattgaagactaaatatgagcaagaaaaagacagacaaaatcagaaactgaacagtaacagatttcgcagagatgcaaaagccttggaagaggatgaagaaatgtggtttaatgaagatgaagaagaggaaggaaaagcagttgtggcaccagtggaaaaacctaagccagaagatgattttccagataattatgaaaagtttatggagactaaaaaagcaaaagaaagtgaagacaaggaaaaccttcccaaaaggacatctcctggtggcttcaaatttactttctcccactctgccagtgctgctaatggaacaaacagtaaatctgtagtggctcagataccaccagcaacttctaatggatcctcttccaaaaccacaaacttgcctacgtcagtaacagccaccaagggaagtttggttggcttagtggattatccagatgatgaagaggaagatgaagaagaagaatcgtcccccaggaaaagacctcgtcttggctcataaaatatttattaggggaccctcaacatgtggtcttacaatgctgcaactgttcagtgagctgaaaatctgaatcagaaagctttctcaattgaacttataaaatatacaaggagtagcaaaagacagtatatcagctaagagagtttagttctaataaaaatcaggcttcccaggaacttgattgcttgctagtaattaaggggtttgccttttaggctgtcaaaacaaacattagtaaccagaacctgggagatagcttctcagcaaggaaaagtcacaggtttggggacggtttaggggaggggaaaaggttgatataataatgcagggttgctcctcggggtgtcgatctagaaacaattttacagaacttcagttgtaaactcaataacattacttgtataatggtgctggccatgttgttgttttaatcagttgcctctttttaaaagaaatttttatggaaaacacattcaactatcattaaaaaaatgaagttaagctgttgggaccatttctttaagatttaacaaaagttcagccttttaggtagttgaagggaagtacaccccgtattcagcacatgttgagttttctacaccaggaattttcaatatgtatattgatgaaaacaagctcaattcaaactggacagttttaagataatgttaaaatcagcacttttagagacaacgaaggccaagaatcagtacagtagtattccaaaatgattttctctagaaatttgaaagtagatcgaacagaatgttgtcaaccgcctaccagtacaatcttttgtggaagatactttgaaatcactttctactttgttagtaaagttctgtctttccagagctgcaagttttaaagtgttacttatacagaccaaccaagaatagtgctgaattaagtggcatttagtatctagaagccattttgatccaagaagctacttaagtgtcaaagtcagcatgcagcacatgtagcttttctgtaaacaagggtgtgatatgaaagctgcttttttaagaagagtaaaagcacattccatatacgtaagtgaattttaaaaataaattgaggcaaacagttaagttttatttttagagcaacaagttaactgtaaatattttaatgttagtttgctcatctatgatctgagatcatgccgaagtgagaaaaatctccccaaaatacaatttaatgcattgggaaaaaaaaactttaacagtaattccagccacaatctttagatcacccttgtaatgtgttacgggtccatttttcctggaatcgtttaatctaaagcagtttcccctgttttggagattttgtagttaattttaattttggctattgtttggaaaagatgagctgtctgtgtagatatgaagtatagttttttccataaaacagatgtttattttgtattaaaaaataccactgtacttgttttacaccatttgtatacatgtggtgatattaatgctaaactgtaaaattcaggaattaaaatgtgaccctgtaattccataa

SEQ ID NO: 426576 - DNA, 1644 bp, Homo sapiens
aggaagtctcggccaaagtactcccgccccagtcgggtacccctcctcgcgagagcgccgagcattccggcctgggaagcgcgtgcagaagcggaggtgctgctcatgggacttgtcggccgccgtagcccctgctaggacagcccgtgcgagcctgctggaggaggaagagaaaggcagagagagtcgggttacaagatggcggatctgtagtagttaccgcggcggcgggagagcaagcgagccctggggggcaaagagacgggagagtgggtgtatgcgcgggtgaagtgagaggtaacggggcctccgggcggagaggcctcagtggctcttgtcaccccttctcgcggctgaacctttggagccatggtgaattcgggcctctccgaagccgccgccgccgccaccgccactactgcctttaccgtctcctaagagtgaggagcgcggacgaggtaagcgaggaggcggcggctagagcggtggagacagcagccaccatgtcggatacgcggcggcgagtgaaggtctataccctgaacgaagaccggcaatgggacgaccgaggcaccgggcacgtctcctccacttacgtggaggagctcaaggggatgtcgctgctggttcgggcagagtccgacggtaaggttatcggaactgtagaataggggatagtgcctctggttggggcacagcttgggtttagggccctgggcccgttaccgttgctactccttcgggacagcgcgttggttctgaactggctcttgtgtacggcaaaaacaaagtactgtacttttgactggacttatcctcggagaccgagactctctgtccttctcccatctctcttaaggattggactccttcctttccagtccctcctcttttgaagaggggagagtgtgagagagaagggaggaagtagtgagagactaggtactgatgtcgccctaggagctgacaccttcctccccctttatttacttatccattatacgtctagtacaaacggtttagggaaacttttctttccgagtgtttttaaaaaaaaaaaattgtaccaacgggccccaggtgccacagtcgacaggtgctggggaaaaccgaaaggcacgttttcctggctgtattgctgactgttgccacgatacatggacacacaagcacatacatctgtagtctgcatttcttcgggctgcctttgtagaaggcgctatgagaaagtgaatgccttacaatctaagcaagttgggacaccaaagcaggttgtaaactgctgtgttctttggtttattgtagtcatgtgaagtattttaaattacaaaatgtagagccgtaattaaaatgccttttatagtataatctggacttgatttgaacaactgatataggcagttagaaaaataatcttaggtttagtcttgacatattttgtattcttgcttgttcccttttattttaaatagtcatcacttctacagaaggtgttcttttgttcttaatgaggaaaggataaatgcagcactgtaatttctatactaagtatttaatccctgtcatgatgtttttgttttgtaatttgcattatttgttaaactgggaatgcaataaaacaacttttgttaaaacgaatggctt

SEQ ID NO: 426577 - DNA, 560 bp, Homo sapiens
ttttcaagttttctgtgcagtcctgactcatgtgtaaagaaaccaggacattacattttggaaggtgattttgaaaaaccttttttgatcagctttagaactacaaaacaaaattttaaagtttttcttctaacaagcattgtattatattttaaatgtaaattttgtgcttatacaggaagatatcaagtctcttactgcccatatagttgaaaacttttataaagcacttgaatcgattgaatatgttcagacattcaaaggattgaagactaaatatgagcaagaaaaagacagacaaaatcagaaactgaacaggtattgtttaagtatactgcttttatagcctacaaaactgtgtccaaaattgtttgtagttcagattttccatgtgaaatttactgaggaattttctttccatcactggatagcatagagttgaataggagggtaaggcgtcccccctaccccatatcatttatatgttgaattactactccatgttgtaacttacgaagaatatttagtttaatttacaacatcctaaaatattttggagt

SEQ ID NO: 426578 - DNA, 716 bp, Homo sapiens
cctcttgatttctatttgtactttgtagatacctcttttctagtgtgatgatatggaaatatttatttttaaacaggatacattaattgtttggtcagaagcagagaactatgatttggctctgagttttcaggagaaagctggctgtgatgagatctgggaaaaaatttgtcaggtaagtttctttttataatatttaacttaatgtttgcttcttttctggaatttttgtttcctttttacttcaaacatattaggatgtggcgagatagtgtcttaatgtgagacttgataatctaacttgaaattttttatattctacggcaaattattttactttaagttttttaaaaacaactttgtcatacttttgttttaccactttagattttgatagcatatgctcataattaataccttatattgtaaaatggcaagtactttaagcaaaccaaaagaagattaagtaattaaatcaagcttttagattaaaaacataaatatttggtcatatgtttgcctaatgtttatgcatactgtaccaggcactaatgctcaacagtattcatgacttcagtttatgtggaacttagagtgtagcaggatatatagaatatgtggtaactcttaagtaactagaatttttttaaaagaaaccttttgttttaggacagttttagatttacagaaaatataactataatgcagaagacaaa

SEQ ID NO: 426579 - DNA, 355 bp, Homo sapiens
gagacctgcctgcctcagccacctaaagtgctgggattacaggcgtgagccaccgtgcctggcctagacttcacttttaattagtagtgactagccaggcatttccaaatgatttgatttccaaaattttgaattattttgtattttaaggtaattagctgtatacttggatatttttcaggttcaaggtaaagacccatcagtggaagtcacacaggacctcattgatgaatctgaagaagaacgatttgaagaaatgcctgaaactagtcatctgattgacctgcccacatgtgaactcaataaacttgaagagaataaaagacgtaagagtagaaagaaaattctcttcaaa

SEQ ID NO: 426580 - DNA, 4492 bp, Homo sapiens
gtgaaaagtatatggggtggtggttgtaggtaaaatttaatagtagtaggaagctgaataatatatgaagaagagaaaggcagagagagtcgggttacaagatggcggatctgtagtagttaccgcggcggcgggagagcaagcgagccctggggggcaaagagacgggagagtgggtgtatgcgcgggtgaagtgagaggtaacggggcctccgggcggagaggcctcagtggctcttgtcaccccttctcgcggctgaacctttggagccatggtgaattcgggcctctccgaagccgccgccgccgccaccgccactactgcctttaccgtctcctaagagtgaggagcgcggacgaggtaagcgaggaggcggcggctagagcggtggagacagcagccaccatgtcggatacgcggcggcgagtgaaggtctataccctgaacgaagaccggcaatgggacgaccgaggcaccgggcacgtctcctccacttacgtggaggagctcaaggggatgtcgctgctggttcgggcagagtccgacggatcactactcttggaatcaaagataaatccaaatactgcatatcagaaacaacaggatacattaattgtttggtcagaagcagagaactatgatttggctctgagttttcaggagaaagctggctgtgatgagatctgggaaaaaatttgtcaggttcaaggtaaagacccatcagtggaagtcacacaggacctcattgatgaatctgaagaagaacgatttgaagaaatgcctgaaactagtcatctgattgacctgcccacatgtgaactcaataaacttgaagagattgctgacttagttacctcagtgctctcctcacctatccgtagggaaaagctggctctcgccttggaaaatgaaggctatattaaaaaactattgcagctgttccaagcttgcgagaacctagaaaacactgaaggcttacaccatttgtatgaaattattagaggaatcttattcctaaataaggcaactctttttgaggtaatgttttctgatgagtgtatcatggatgtcgtgggatgccttgaatatgaccctgctttggctcagccaaaaagacatagagaattcttgaccaaaactgcaaagttcaaggaagttataccaataacagactctgaactaaggcaaaaaatacatcagacttacagggtacagtacattcaggacatcattttgcccacaccatctgtttttgaagagaattttctttctactcttacgtcttttattttcttcaacaaagttgagatagtcagcatgttgcaggaagatgagaagtttttgtctgaagtttttgcacaattaacagatgaggctacagatgatgataaacggcgtgaattggttaattttttcaaggagttttgtgcattttctcagacattacaacctcaaaacagggatgcatttttcaaaacattggcaaaattgggaattcttcctgctcttgaaattgtaatgggcatggatgatttgcaagtcagatcagctgctacagatatattttcttatctagtagaatttagtccatctatggtccgagagtttgtaatgcaagaagctcagcagagtgatgacgatattcttcttattaatgtggtaattgaacaaatgatctgtgatactgatcctgagctaggaggcgctgttcagttaatgggacttcttcgtactctaattgatccagagaacatgctggctacaactaataaaaccgaaaaaagtgaatttctaaattttttctacaaccattgtatgcatgttctcacagcaccacttttgaccaatacttcagaagacaaatgtgaaaaggatttttttttaaaacattacagatatagttggagtttcgtatgtaccccttcacattcccattcccattctaccccctcttcctccatctctcaagataatatagttggatcaaacaaaaacaacacaatttgtcccgataattatcaaacagcacagctacttgccttaattttagagttactcacattttgtgtggaacatcacacatatcacataaaaaactatattatgaacaaggacttgctaagaagagtcttggtcttgatgaattcaaagcacacttttctggccttgtgtgcccttcgctttatgaggcggataattggacttaaagatgaattttataatcgttacatcaccaagggaaatctttttgagccagttataaatgcacttctggataatggaactcggtataatctgttgaattcagctgttattgagttgtttgaatttataagagtggaagatatcaagtctcttactgcccatatagttgaaaacttttataaagcacttgaatcgattgaatatgttcagacattcaaaggattgaagactaaatatgagcaagaaaaagacagacaaaatcagaaactgaacagtgtaccatctatattgcgtagtaacagatttcgcagagatgcaaaagccttggaagaggatgaagaaatgtggtttaatgaagatgaagaagaggaaggaaaagcagttgtggcaccagtggaaaaacctaagccagaagatgattttccagataattatgaaaagtttatggagactaaaaaagcaaaagaaagtgaagacaaggaaaaccttcccaaaaggacatctcctggtggcttcaaatttactttctcccactctgccagtgctgctaatggaacaaacagtaaatctgtagtggctcagataccaccagcaacttctaatggatcctcttccaaaaccacaaacttgcctacgtcagtaacagccaccaagggaagtttggttggcttagtggattatccagatgatgaagaggaagatgaagaagaagaatcgtcccccaggaaaagacctcgtcttggctcataaaatatttattaggggaccctcaacatgtggtcttacaatgctgcaactgttcagtgagctgaaaatctgaatcagaaagctttctcaattgaacttataaaatatacaaggagtagcaaaagacagtatatcagctaagagagtttagttctaataaaaatcaggcttcccaggaacttgattgcttgctagtaattaaggggtttgccttttaggctgtcaaaacaaacattagtaaccagaacctgggagatagcttctcagcaaggaaaagtcacaggtttggggacggtttaggggaggggaaaaggttgatataataatgcagggttgctcctcggggtgtcgatctagaaacaattttacagaacttcagttgtaaactcaataacattacttgtataatggtgctggccatgttgttgttttaatcagttgcctctttttaaaagaaatttttatggaaaacacattcaactatcattaaaaaaatgaagttaagctgttgggaccatttctttaagatttaacaaaagttcagccttttaggtagttgaagggaagtacaccccgtattcagcacatgttgagttttctacaccaggaattttcaatatgtatattgatgaaaacaagctcaattcaaactggacagttttaagataatgttaaaatcagcacttttagagacaacgaaggccaagaatcagtacagtagtattccaaaatgattttctctagaaatttgaaagtagatcgaacagaatgttgtcaaccgcctaccagtacaatcttttgtggaagatactttgaaatcactttctactttgttagtaaagttctgtctttccagagctgcaagttttaaagtgttacttatacagaccaaccaagaatagtgctgaattaagtggcatttagtatctagaagccattttgatccaagaagctacttaagtgtcaaagtcagcatgcagcacatgtagcttttctgtaaacaagggtgtgatatgaaagctgcttttttaagaagagtaaaagcacattccatatacgtaagtgaattttaaaaataaattgaggcaaacagttaagttttatttttagagcaacaagttaactgtaaatattttaatgttagtttgctcatctatgatctgagatcatgccgaagtgagaaaaatctccccaaaatacaatttaatgcattgggaaaaaaaaactttaacagtaattccagccacaatctttagatcacccttgtaatgtgttacgggtccatttttcctggaatcgtttaatctaaagcagtttcccctgttttggagattttgtagttaattttaattttggctattgtttggaaaagatgagctgtctgtgtagatatgaagtatagttttttccataaaacagatgtttattttgtattaaaaaataccactgtacttgttttacaccatttgtatacatgtggtgatattaatgctaaactgtaaaattcaggaattaaaatgtgaccctgtaattccataa

SEQ ID NO: 426581 - DNA, 4471 bp, Homo sapiens
gtgaaaagtatatggggtggtggttgtaggtaaaatttaatagtagtaggaagctgaataatatatgaagaagagaaaggcagagagagtcgggttacaagatggcggatctgtagtagttaccgcggcggcgggagagcaagcgagccctggggggcaaagagacgggagagtgggtgtatgcgcgggtgaagtgagaggtaacggggcctccgggcggagaggcctcagtggctcttgtcaccccttctcgcggctgaacctttggagccatggtgaattcgggcctctccgaagccgccgccgccgccaccgccactactgcctttaccgtctcctaagagtgaggagcgcggacgaggtaagcgaggaggcggcggctagagcggtggagacagcagccaccatgtcggatacgcggcggcgagtgaaggtctataccctgaacgaagaccggcaatgggacgaccgaggcaccgggcacgtctcctccacttacgtggaggagctcaaggggatgtcgctgctggttcgggcagagtccgacggatcactactcttggaatcaaagataaatccaaatactgcatatcagaaacaacaggatacattaattgtttggtcagaagcagagaactatgatttggctctgagttttcaggagaaagctggctgtgatgagatctgggaaaaaatttgtcaggttcaaggtaaagacccatcagtggaagtcacacaggacctcattgatgaatctgaagaagaacgatttgaagaaatgcctgaaactagtcatctgattgacctgcccacatgtgaactcaataaacttgaagagattgctgacttagttacctcagtgctctcctcacctatccgtagggaaaagctggctctcgccttggaaaatgaaggctatattaaaaaactattgcagctgttccaagcttgcgagaacctagaaaacactgaaggcttacaccatttgtatgaaattattagaggaatcttattcctaaataaggcaactctttttgaggtaatgttttctgatgagtgtatcatggatgtcgtgggatgccttgaatatgaccctgctttggctcagccaaaaagacatagagaattcttgaccaaaactgcaaagttcaaggaagttataccaataacagactctgaactaaggcaaaaaatacatcagacttacagggtacagtacattcaggacatcattttgcccacaccatctgtttttgaagagaattttctttctactcttacgtcttttattttcttcaacaaagttgagatagtcagcatgttgcaggaagatgagaagtttttgtctgaagtttttgcacaattaacagatgaggctacagatgatgataaacggcgtgaattggttaattttttcaaggagttttgtgcattttctcagacattacaacctcaaaacagggatgcatttttcaaaacattggcaaaattgggaattcttcctgctcttgaaattgtaatgggcatggatgatttgcaagtcagatcagctgctacagatatattttcttatctagtagaatttagtccatctatggtccgagagtttgtaatgcaagaagctcagcagagtgatgacgatattcttcttattaatgtggtaattgaacaaatgatctgtgatactgatcctgagctaggaggcgctgttcagttaatgggacttcttcgtactctaattgatccagagaacatgctggctacaactaataaaaccgaaaaaagtgaatttctaaattttttctacaaccattgtatgcatgttctcacagcaccacttttgaccaatacttcagaagacaaatgtgaaaaggatttttttttaaaacattacagatatagttggagtttcgtatgtaccccttcacattcccattcccattctaccccctcttcctccatctctcaagataatatagttggatcaaacaaaaacaacacaatttgtcccgataattatcaaacagcacagctacttgccttaattttagagttactcacattttgtgtggaacatcacacatatcacataaaaaactatattatgaacaaggacttgctaagaagagtcttggtcttgatgaattcaaagcacacttttctggccttgtgtgcccttcgctttatgaggcggataattggacttaaagatgaattttataatcgttacatcaccaagggaaatctttttgagccagttataaatgcacttctggataatggaactcggtataatctgttgaattcagctgttattgagttgtttgaatttataagagtggaagatatcaagtctcttactgcccatatagttgaaaacttttataaagcacttgaatcgattgaatatgttcagacattcaaaggattgaagactaaatatgagcaagaaaaagacagacaaaatcagaaactgaacagtaacagatttcgcagagatgcaaaagccttggaagaggatgaagaaatgtggtttaatgaagatgaagaagaggaaggaaaagcagttgtggcaccagtggaaaaacctaagccagaagatgattttccagataattatgaaaagtttatggagactaaaaaagcaaaagaaagtgaagacaaggaaaaccttcccaaaaggacatctcctggtggcttcaaatttactttctcccactctgccagtgctgctaatggaacaaacagtaaatctgtagtggctcagataccaccagcaacttctaatggatcctcttccaaaaccacaaacttgcctacgtcagtaacagccaccaagggaagtttggttggcttagtggattatccagatgatgaagaggaagatgaagaagaagaatcgtcccccaggaaaagacctcgtcttggctcataaaatatttattaggggaccctcaacatgtggtcttacaatgctgcaactgttcagtgagctgaaaatctgaatcagaaagctttctcaattgaacttataaaatatacaaggagtagcaaaagacagtatatcagctaagagagtttagttctaataaaaatcaggcttcccaggaacttgattgcttgctagtaattaaggggtttgccttttaggctgtcaaaacaaacattagtaaccagaacctgggagatagcttctcagcaaggaaaagtcacaggtttggggacggtttaggggaggggaaaaggttgatataataatgcagggttgctcctcggggtgtcgatctagaaacaattttacagaacttcagttgtaaactcaataacattacttgtataatggtgctggccatgttgttgttttaatcagttgcctctttttaaaagaaatttttatggaaaacacattcaactatcattaaaaaaatgaagttaagctgttgggaccatttctttaagatttaacaaaagttcagccttttaggtagttgaagggaagtacaccccgtattcagcacatgttgagttttctacaccaggaattttcaatatgtatattgatgaaaacaagctcaattcaaactggacagttttaagataatgttaaaatcagcacttttagagacaacgaaggccaagaatcagtacagtagtattccaaaatgattttctctagaaatttgaaagtagatcgaacagaatgttgtcaaccgcctaccagtacaatcttttgtggaagatactttgaaatcactttctactttgttagtaaagttctgtctttccagagctgcaagttttaaagtgttacttatacagaccaaccaagaatagtgctgaattaagtggcatttagtatctagaagccattttgatccaagaagctacttaagtgtcaaagtcagcatgcagcacatgtagcttttctgtaaacaagggtgtgatatgaaagctgcttttttaagaagagtaaaagcacattccatatacgtaagtgaattttaaaaataaattgaggcaaacagttaagttttatttttagagcaacaagttaactgtaaatattttaatgttagtttgctcatctatgatctgagatcatgccgaagtgagaaaaatctccccaaaatacaatttaatgcattgggaaaaaaaaactttaacagtaattccagccacaatctttagatcacccttgtaatgtgttacgggtccatttttcctggaatcgtttaatctaaagcagtttcccctgttttggagattttgtagttaattttaattttggctattgtttggaaaagatgagctgtctgtgtagatatgaagtatagttttttccataaaacagatgtttattttgtattaaaaaataccactgtacttgttttacaccatttgtatacatgtggtgatattaatgctaaactgtaaaattcaggaattaaaatgtgaccctgtaattccataa

SEQ ID NO: 426582 - DNA, 4396 bp, Homo sapiens
gtgaaaagtatatggggtggtggttgtaggtaaaatttaatagtagtaggaagctgaataatatatgaagaagagaaaggcagagagagtcgggttacaagatggcggatctgtagtagttaccgcggcggcgggagagcaagcgagccctggggggcaaagagacgggagagtgggtgtatgcgcgggtgaagtgagaggtaacggggcctccgggcggagaggcctcagtggctcttgtcaccccttctcgcggctgaacctttggagccatggtgaattcgggcctctccgaagccgccgccgccgccaccgccactactgcctttaccgtctcctaagagtgaggagcgcggacgaggtaagcgaggaggcggcggctagagcggtggagacagcagccaccatgtcggatacgcggcggcgagtgaaggtctataccctgaacgaagaccggcaatgggacgaccgaggcaccgggcacgtctcctccacttacgtggaggagctcaaggggatgtcgctgctggttcgggcagagtccgacggatcactactcttggaatcaaagataaatccaaatactgcatatcagaaacaacaggatacattaattgtttggtcagaagcagagaactatgatttggctctgagttttcaggagaaagctggctgtgatgagatctgggaaaaaatttgtcaggttcaaggtaaagacccatcagtggaagtcacacaggacctcattgatgaatctgaagaagaacgatttgaagaaatgcctgaaactagtcatctgattgacctgcccacatgtgaactcaataaacttgaagagattgctgacttagttacctcagtgctctcctcacctatccgtagggaaaagctggctctcgccttggaaaatgaaggctatattaaaaaactattgcagctgttccaagcttgcgagaacctagaaaacactgaaggcttacaccatttgtatgaaattattagaggaatcttattcctaaataaggcaactctttttgaggtaatgttttctgatgagtgtatcatggatgtcgtgggatgccttgaatatgaccctgctttggctcagccaaaaagacatagagaattcttgaccaaaactgcaaagttcaaggaagttataccaataacagactctgaactaaggcaaaaaatacatcagacttacagggtacagtacattcaggacatcattttgcccacaccatctgtttttgaagagaattttctttctactcttacgtcttttattttcttcaacaaagttgagatagtcagcatgttgcaggaagatgagaagtttttgtctgaagtttttgcacaattaacagatgaggctacagatgatgataaacggcgtgaattggttaattttttcaaggagttttgtgcattttctcagacattacaacctcaaaacagggatgcatttttcaaaacattggcaaaattgggaattcttcctgctcttgaaattgtaatgggcatggatgatttgcaagtcagatcagctgctacagatatattttcttatctagtagaatttagtccatctatggtccgagagtttgtaatgcaagaagctcagcagagtgatgacgatattcttcttattaatgtggtaattgaacaaatgatctgtgatactgatcctgagctaggaggcgctgttcagttaatgggacttcttcgtactctaattgatccagagaacatgctggctacaactaataaaaccgaaaaaagtgaatttctaaattttttctacaaccattgtatgcatgttctcacagcaccacttttgaccaatacttcagaagacaaatgtgaaaaggataatatagttggatcaaacaaaaacaacacaatttgtcccgataattatcaaacagcacagctacttgccttaattttagagttactcacattttgtgtggaacatcacacatatcacataaaaaactatattatgaacaaggacttgctaagaagagtcttggtcttgatgaattcaaagcacacttttctggccttgtgtgcccttcgctttatgaggcggataattggacttaaagatgaattttataatcgttacatcaccaagggaaatctttttgagccagttataaatgcacttctggataatggaactcggtataatctgttgaattcagctgttattgagttgtttgaatttataagagtggaagatatcaagtctcttactgcccatatagttgaaaacttttataaagcacttgaatcgattgaatatgttcagacattcaaaggattgaagactaaatatgagcaagaaaaagacagacaaaatcagaaactgaacagtgtaccatctatattgcgtagtaacagatttcgcagagatgcaaaagccttggaagaggatgaagaaatgtggtttaatgaagatgaagaagaggaaggaaaagcagttgtggcaccagtggaaaaacctaagccagaagatgattttccagataattatgaaaagtttatggagactaaaaaagcaaaagaaagtgaagacaaggaaaaccttcccaaaaggacatctcctggtggcttcaaatttactttctcccactctgccagtgctgctaatggaacaaacagtaaatctgtagtggctcagataccaccagcaacttctaatggatcctcttccaaaaccacaaacttgcctacgtcagtaacagccaccaagggaagtttggttggcttagtggattatccagatgatgaagaggaagatgaagaagaagaatcgtcccccaggaaaagacctcgtcttggctcataaaatatttattaggggaccctcaacatgtggtcttacaatgctgcaactgttcagtgagctgaaaatctgaatcagaaagctttctcaattgaacttataaaatatacaaggagtagcaaaagacagtatatcagctaagagagtttagttctaataaaaatcaggcttcccaggaacttgattgcttgctagtaattaaggggtttgccttttaggctgtcaaaacaaacattagtaaccagaacctgggagatagcttctcagcaaggaaaagtcacaggtttggggacggtttaggggaggggaaaaggttgatataataatgcagggttgctcctcggggtgtcgatctagaaacaattttacagaacttcagttgtaaactcaataacattacttgtataatggtgctggccatgttgttgttttaatcagttgcctctttttaaaagaaatttttatggaaaacacattcaactatcattaaaaaaatgaagttaagctgttgggaccatttctttaagatttaacaaaagttcagccttttaggtagttgaagggaagtacaccccgtattcagcacatgttgagttttctacaccaggaattttcaatatgtatattgatgaaaacaagctcaattcaaactggacagttttaagataatgttaaaatcagcacttttagagacaacgaaggccaagaatcagtacagtagtattccaaaatgattttctctagaaatttgaaagtagatcgaacagaatgttgtcaaccgcctaccagtacaatcttttgtggaagatactttgaaatcactttctactttgttagtaaagttctgtctttccagagctgcaagttttaaagtgttacttatacagaccaaccaagaatagtgctgaattaagtggcatttagtatctagaagccattttgatccaagaagctacttaagtgtcaaagtcagcatgcagcacatgtagcttttctgtaaacaagggtgtgatatgaaagctgcttttttaagaagagtaaaagcacattccatatacgtaagtgaattttaaaaataaattgaggcaaacagttaagttttatttttagagcaacaagttaactgtaaatattttaatgttagtttgctcatctatgatctgagatcatgccgaagtgagaaaaatctccccaaaatacaatttaatgcattgggaaaaaaaaactttaacagtaattccagccacaatctttagatcacccttgtaatgtgttacgggtccatttttcctggaatcgtttaatctaaagcagtttcccctgttttggagattttgtagttaattttaattttggctattgtttggaaaagatgagctgtctgtgtagatatgaagtatagttttttccataaaacagatgtttattttgtattaaaaaataccactgtacttgttttacaccatttgtatacatgtggtgatattaatgctaaactgtaaaattcaggaattaaaatgtgaccctgtaattccataa

SEQ ID NO: 426583 - DNA, 4482 bp, Homo sapiens
tctaggtaacattatggcggatctgtagtacttaacgtaagtgaagatagatcaatacgatgctcctgcgtagggacataccatgatcgatagacttgggtgtgttgtgactgcctgcatgcaagtagaaaagagtgacaccggggggcgctacacgcggacgcggattacgtgcacatcaagattgcgcatcattggtacgatcctcgtatgcgttcgactgtgactggagaatcttatgcgaagcacgataggtgcaattcgaggctctcatcactcaagactctgacgccgcgcgccctgcgccactactgcctttaccgtctcctaagagtgaggagcgcggacgaggtaagcgaggaggcggcggctagagcggtggagacagcagccaccatgtcggatacgcggcggcgagtgaaggtctataccctgaacgaagaccggcaatgggacgaccgaggcaccgggcacgtctcctccacttacgtggaggagctcaaggggatgtcgctgctggttcgggcagagtccgacggatcactactcttggaatcaaagataaatccaaatactgcatatcagaaacaacaggatacattaattgtttggtcagaagcagagaactatgatttggctctgagttttcaggagaaagctggctgtgatgagatctgggaaaaaatttgtcaggttcaaggtaaagacccatcagtggaagtcacacaggacctcattgatgaatctgaagaagaacgatttgaagaaatgcctgaaactagtcatctgattgacctgcccacatgtgaactcaataaacttgaagagattgctgacttagttacctcagtgctctcctcacctatccgtagggaaaagctggctctcgccttggaaaatgaaggctatattaaaaaactattgcagctgttccaagcttgcgagaacctagaaaacactgaaggcttacaccatttgtatgaaattattagaggaatcttattcctaaataaggcaactctttttgaggtaatgttttctgatgagtgtatcatggatgtcgtgggatgccttgaatatgaccctgctttggctcagccaaaaagacatagagaattcttgaccaaaactgcaaagttcaaggaagttataccaataacagactctgaactaaggcaaaaaatacatcagacttacagggtacagtacattcaggacatcattttgcccacaccatctgtttttgaagagaattttctttctactcttacgtcttttattttcttcaacaaagttgagatagtcagcatgttgcaggaagatgagaagtttttgtctgaagtttttgcacaattaacagatgaggctacagatgatgataaacggcgtgaattggttaattttttcaaggagttttgtgcattttctcagacattacaacctcaaaacagggatgcatttttcaaaacattggcaaaattgggaattcttcctgctcttgaaattgtaatgggcatggatgatttgcaagtcagatcagctgctacagatatattttcttatctagtagaatttagtccatctatggtccgagagtttgtaatgcaagaagctcagcagagtgatgacgatattcttcttattaatgtggtaattgaacaaatgatctgtgatactgatcctgagctaggaggcgctgttcagttaatgggacttcttcgtactctaattgatccagagaacatgctggctacaactaataaaaccgaaaaaagtgaatttctaaattttttctacaaccattgtatgcatgttctcacagcaccacttttgaccaatacttcagaagacaaatgtgaaaaggatttttttttaaaacattacagatatagttggagtttcgtatgtaccccttcacattcccattcccattctaccccctcttcctccatctctcaagataatatagttggatcaaacaaaaacaacacaatttgtcccgataattatcaaacagcacagctacttgccttaattttagagttactcacattttgtgtggaacatcacacatatcacataaaaaactatattatgaacaaggacttgctaagaagagtcttggtcttgatgaattcaaagcacacttttctggccttgtgtgcccttcgctttatgaggcggataattggacttaaagatgaattttataatcgttacatcaccaagggaaatctttttgagccagttataaatgcacttctggataatggaactcggtataatctgttgaattcagctgttattgagttgtttgaatttataagagtggaagatatcaagtctcttactgcccatatagttgaaaacttttataaagcacttgaatcgattgaatatgttcagacattcaaaggattgaagactaaatatgagcaagaaaaagacagacaaaatcagaaactgaacagtgtaccatctatattgcgtagtaacagatttcgcagagatgcaaaagccttggaagaggatgaagaaatgtggtttaatgaagatgaagaagaggaaggaaaagcagttgtggcaccagtggaaaaacctaagccagaagatgattttccagataattatgaaaagtttatggagactaaaaaagcaaaagaaagtgaagacaaggaaaaccttcccaaaaggacatctcctggtggcttcaaatttactttctcccactctgccagtgctgctaatggaacaaacagtaaatctgtagtggctcagataccaccagcaacttctaatggatcctcttccaaaaccacaaacttgcctacgtcagtaacagccaccaagggaagtttggttggcttagtggattatccagatgatgaagaggaagatgaagaagaagaatcgtcccccaggaaaagacctcgtcttggctcataaaatatttattaggggaccctcaacatgtggtcttacaatgctgcaactgttcagtgagctgaaaatctgaatcagaaagctttctcaattgaacttataaaatatacaaggagtagcaaaagacagtatatcagctaagagagtttagttctaataaaaatcaggcttcccaggaacttgattgcttgctagtaattaaggggtttgccttttaggctgtcaaaacaaacattagtaaccagaacctgggagatagcttctcagcaaggaaaagtcacaggtttggggacggtttaggggaggggaaaaggttgatataataatgcagggttgctcctcggggtgtcgatctagaaacaattttacagaacttcagttgtaaactcaataacattacttgtataatggtgctggccatgttgttgttttaatcagttgcctctttttaaaagaaatttttatggaaaacacattcaactatcattaaaaaaatgaagttaagctgttgggaccatttctttaagatttaacaaaagttcagccttttaggtagttgaagggaagtacaccccgtattcagcacatgttgagttttctacaccaggaattttcaatatgtatattgatgaaaacaagctcaattcaaactggacagttttaagataatgttaaaatcagcacttttagagacaacgaaggccaagaatcagtacagtagtattccaaaatgattttctctagaaatttgaaagtagatcgaacagaatgttgtcaaccgcctaccagtacaatcttttgtggaagatactttgaaatcactttctactttgttagtaaagttctgtctttccagagctgcaagttttaaagtgttacttatacagaccaaccaagaatagtgctgaattaagtggcatttagtatctagaagccattttgatccaagaagctacttaagtgtcaaagtcagcatgcagcacatgtagcttttctgtaaacaagggtgtgatatgaaagctgcttttttaagaagagtaaaagcacattccatatacgtaagtgaattttaaaaataaattgaggcaaacagttaagttttatttttagagcaacaagttaactgtaaatattttaatgttagtttgctcatctatgatctgagatcatgccgaagtgagaaaaatctccccaaaatacaatttaatgcattgggaaaaaaaaactttaacagtaattccagccacaatctttagatcacccttgtaatgtgttacgggtccatttttcctggaatcgtttaatctaaagcagtttcccctgttttggagattttgtagttaattttaattttggctattgtttggaaaagatgagctgtctgtgtagatatgaagtatagttttttccataaaacagatgtttattttgtattaaaaaataccactgtacttgttttacaccatttgtatacatgtggtgatattaatgctaaactgtaaaattcaggaattaaaatgtgaccctgtaattccataa

SEQ ID NO: 426584 - DNA, 3772 bp, Homo sapiens
gtgaaaagtatatggggtggtggttgtaggtaaaatttaatagtagtaggaagctgaataatatatgaagaagagaaaggcagagagagtcgggttacaagatggcggatctgtagtagttaccgcggcggcgggagagcaagcgagccctggggggcaaagagacgggagagtgggtgtatgcgcgggtgaagtgagaggtaacggggcctccgggcggagaggcctcagtggctcttgtcaccccttctcgcggctgaacctttggagccatggtgaattcgggcctctccgaagccgccgccgccgccaccgccactactgcctttaccgtctcctaagagtgaggagcgcggacgaggtaagcgaggaggcggcggctagagcggtggagacagcagccaccatgtcggatacgcggcggcgagtgaaggtctataccctgaacgaagaccggcaatgggacgaccgaggcaccgggcacgtctcctccacttacgtggaggagctcaaggggatgtcgctgctggttcgggcagagtccgacggatcactactcttggaatcaaagataaatccaaatactgcatatcagaaacaacaggatacattaattgtttggtcagaagcagagaactatgatttggctctgagttttcaggagaaagctggctgtgatgagatctgggaaaaaatttgtcaggaagatgagaagtttttgtctgaagtttttgcacaattaacagatgaggctacagatgatgataaacggcgtgaattggttaattttttcaaggagttttgtgcattttctcagacattacaacctcaaaacagggatgcatttttcaaaacattggcaaaattgggaattcttcctgctcttgaaattgtaatgggcatggatgatttgcaagtcagatcagctgctacagatatattttcttatctagtagaatttagtccatctatggtccgagagtttgtaatgcaagaagctcagcagagtgatgacgatattcttcttattaatgtggtaattgaacaaatgatctgtgatactgatcctgagctaggaggcgctgttcagttaatgggacttcttcgtactctaattgatccagagaacatgctggctacaactaataaaaccgaaaaaagtgaatttctaaattttttctacaaccattgtatgcatgttctcacagcaccacttttgaccaatacttcagaagacaaatgtgaaaaggataatatagttggatcaaacaaaaacaacacaatttgtcccgataattatcaaacagcacagctacttgccttaattttagagttactcacattttgtgtggaacatcacacatatcacataaaaaactatattatgaacaaggacttgctaagaagagtcttggtcttgatgaattcaaagcacacttttctggccttgtgtgcccttcgctttatgaggcggataattggacttaaagatgaattttataatcgttacatcaccaagggaaatctttttgagccagttataaatgcacttctggataatggaactcggtataatctgttgaattcagctgttattgagttgtttgaatttataagagtggaagatatcaagtctcttactgcccatatagttgaaaacttttataaagcacttgaatcgattgaatatgttcagacattcaaaggattgaagactaaatatgagcaagaaaaagacagacaaaatcagaaactgaacagtgtaccatctatattgcgtagtaacagatttcgcagagatgcaaaagccttggaagaggatgaagaaatgtggtttaatgaagatgaagaagaggaaggaaaagcagttgtggcaccagtggaaaaacctaagccagaagatgattttccagataattatgaaaagtttatggagactaaaaaagcaaaagaaagtgaagacaaggaaaaccttcccaaaaggacatctcctggtggcttcaaatttactttctcccactctgccagtgctgctaatggaacaaacagtaaatctgtagtggctcagataccaccagcaacttctaatggatcctcttccaaaaccacaaacttgcctacgtcagtaacagccaccaagggaagtttggttggcttagtggattatccagatgatgaagaggaagatgaagaagaagaatcgtcccccaggaaaagacctcgtcttggctcataaaatatttattaggggaccctcaacatgtggtcttacaatgctgcaactgttcagtgagctgaaaatctgaatcagaaagctttctcaattgaacttataaaatatacaaggagtagcaaaagacagtatatcagctaagagagtttagttctaataaaaatcaggcttcccaggaacttgattgcttgctagtaattaaggggtttgccttttaggctgtcaaaacaaacattagtaaccagaacctgggagatagcttctcagcaaggaaaagtcacaggtttggggacggtttaggggaggggaaaaggttgatataataatgcagggttgctcctcggggtgtcgatctagaaacaattttacagaacttcagttgtaaactcaataacattacttgtataatggtgctggccatgttgttgttttaatcagttgcctctttttaaaagaaatttttatggaaaacacattcaactatcattaaaaaaatgaagttaagctgttgggaccatttctttaagatttaacaaaagttcagccttttaggtagttgaagggaagtacaccccgtattcagcacatgttgagttttctacaccaggaattttcaatatgtatattgatgaaaacaagctcaattcaaactggacagttttaagataatgttaaaatcagcacttttagagacaacgaaggccaagaatcagtacagtagtattccaaaatgattttctctagaaatttgaaagtagatcgaacagaatgttgtcaaccgcctaccagtacaatcttttgtggaagatactttgaaatcactttctactttgttagtaaagttctgtctttccagagctgcaagttttaaagtgttacttatacagaccaaccaagaatagtgctgaattaagtggcatttagtatctagaagccattttgatccaagaagctacttaagtgtcaaagtcagcatgcagcacatgtagcttttctgtaaacaagggtgtgatatgaaagctgcttttttaagaagagtaaaagcacattccatatacgtaagtgaattttaaaaataaattgaggcaaacagttaagttttatttttagagcaacaagttaactgtaaatattttaatgttagtttgctcatctatgatctgagatcatgccgaagtgagaaaaatctccccaaaatacaatttaatgcattgggaaaaaaaaactttaacagtaattccagccacaatctttagatcacccttgtaatgtgttacgggtccatttttcctggaatcgtttaatctaaagcagtttcccctgttttggagattttgtagttaattttaattttggctattgtttggaaaagatgagctgtctgtgtagatatgaagtatagttttttccataaaacagatgtttattttgtattaaaaaataccactgtacttgttttacaccatttgtatacatgtggtgatattaatgctaaactgtaaaattcaggaattaaaatgtgaccctgtaattccataa

SEQ ID NO: 426585 - DNA, 3573 bp, Homo sapiens
aggttgttgtattttatgagttattgtattttaaatagctttgtaactttatctactgtcggaattcagcctcctttactgttttccttgttccttgtcttacaattcttcttgtttttctaatctgttataaactgacaataagatccttaggcttgtttgaattatgtttaaattaagagtaagtagaccctgaaagggggctagagaatctaagttaagtgagttttcacgtaacacctctagaacaaatatttttgttttccagagagttatttgtagttgaggtttttagttaaactagatattgatgtatttataacaagaattgaatggtgtagtcaaattttagaaaattgtaacacagaaatacaccccagaatattaggtttcatgatgaaaatactacttgtcaactattttttataatttgtgtaagtcatataaatgagtataactttattcttttgttaatatttcatagtaattatttttctcatgcaggaagatgagaagtttttgtctgaagtttttgcacaattaacagatgaggctacagatgatgataaacggcgtgaattggttaattttttcaaggagttttgtgcattttctcagacattacaacctcaaaacagggatgcatttttcaaaacattggcaaaattgggaattcttcctgctcttgaaattgtaatgggcatggatgatttgcaagtcagatcagctgctacagatatattttcttatctagtagaatttagtccatctatggtccgagagtttgtaatgcaagaagctcagcagagtgatgacgatattcttcttattaatgtggtaattgaacaaatgatctgtgatactgatcctgagctaggaggcgctgttcagttaatgggacttcttcgtactctaattgatccagagaacatgctggctacaactaataaaaccgaaaaaagtgaatttctaaattttttctacaaccattgtatgcatgttctcacagcaccacttttgaccaatacttcagaagacaaatgtgaaaaggataatatagttggatcaaacaaaaacaacacaatttgtcccgataattatcaaacagcacagctacttgccttaattttagagttactcacattttgtgtggaacatcacacatatcacataaaaaactatattatgaacaaggacttgctaagaagagtcttggtcttgatgaattcaaagcacacttttctggccttgtgtgcccttcgctttatgaggcggataattggacttaaagatgaattttataatcgttacatcaccaagggaaatctttttgagccagttataaatgcacttctggataatggaactcggtataatctgttgaattcagctgttattgagttgtttgaatttataagagtggaagatatcaagtctcttactgcccatatagttgaaaacttttataaagcacttgaatcgattgaatatgttcagacattcaaaggattgaagactaaatatgagcaagaaaaagacagacaaaatcagaaactgaacagtgtaccatctatattgcgtagtaacagatttcgcagagatgcaaaagccttggaagaggatgaagaaatgtggtttaatgaagatgaagaagaggaaggaaaagcagttgtggcaccagtggaaaaacctaagccagaagatgattttccagataattatgaaaagtttatggagactaaaaaagcaaaagaaagtgaagacaaggaaaaccttcccaaaaggacatctcctggtggcttcaaatttactttctcccactctgccagtgctgctaatggaacaaacagtaaatctgtagtggctcagataccaccagcaacttctaatggatcctcttccaaaaccacaaacttgcctacgtcagtaacagccaccaagggaagtttggttggcttagtggattatccagatgatgaagaggaagatgaagaagaagaatcgtcccccaggaaaagacctcgtcttggctcataaaatatttattaggggaccctcaacatgtggtcttacaatgctgcaactgttcagtgagctgaaaatctgaatcagaaagctttctcaattgaacttataaaatatacaaggagtagcaaaagacagtatatcagctaagagagtttagttctaataaaaatcaggcttcccaggaacttgattgcttgctagtaattaaggggtttgccttttaggctgtcaaaacaaacattagtaaccagaacctgggagatagcttctcagcaaggaaaagtcacaggtttggggacggtttaggggaggggaaaaggttgatataataatgcagggttgctcctcggggtgtcgatctagaaacaattttacagaacttcagttgtaaactcaataacattacttgtataatggtgctggccatgttgttgttttaatcagttgcctctttttaaaagaaatttttatggaaaacacattcaactatcattaaaaaaatgaagttaagctgttgggaccatttctttaagatttaacaaaagttcagccttttaggtagttgaagggaagtacaccccgtattcagcacatgttgagttttctacaccaggaattttcaatatgtatattgatgaaaacaagctcaattcaaactggacagttttaagataatgttaaaatcagcacttttagagacaacgaaggccaagaatcagtacagtagtattccaaaatgattttctctagaaatttgaaagtagatcgaacagaatgttgtcaaccgcctaccagtacaatcttttgtggaagatactttgaaatcactttctactttgttagtaaagttctgtctttccagagctgcaagttttaaagtgttacttatacagaccaaccaagaatagtgctgaattaagtggcatttagtatctagaagccattttgatccaagaagctacttaagtgtcaaagtcagcatgcagcacatgtagcttttctgtaaacaagggtgtgatatgaaagctgcttttttaagaagagtaaaagcacattccatatacgtaagtgaattttaaaaataaattgaggcaaacagttaagttttatttttagagcaacaagttaactgtaaatattttaatgttagtttgctcatctatgatctgagatcatgccgaagtgagaaaaatctccccaaaatacaatttaatgcattgggaaaaaaaaactttaacagtaattccagccacaatctttagatcacccttgtaatgtgttacgggtccatttttcctggaatcgtttaatctaaagcagtttcccctgttttggagattttgtagttaattttaattttggctattgtttggaaaagatgagctgtctgtgtagatatgaagtatagttttttccataaaacagatgtttattttgtattaaaaaataccactgtacttgttttacaccatttgtatacatgtggtgatattaatgctaaactgtaaaattcaggaattaaaatgtgaccctgtaattccataa

SEQ ID NO: 426586 - DNA, 4237 bp, Homo sapiens
gtgaaaagtatatggggtggtggttgtaggtaaaatttaatagtagtaggaagctgaataatatatgaagaagagaaaggcagagagagtcgggttacaagatggcggatctgtagtagttaccgcggcggcgggagagcaagcgagccctggggggcaaagagacgggagagtgggtgtatgcgcgggtgaagtgagaggtaacggggcctccgggcggagaggcctcagtggctcttgtcaccccttctcgcggctgaacctttggagccatggtgaattcgggcctctccgaagccgccgccgccgccaccgccactactgcctttaccgtctcctaagagtgaggagcgcggacgaggtaagcgaggaggcggcggctagagcggtggagacagcagccaccatgtcggatacgcggcggcgagtgaaggtctataccctgaacgaagaccggcaatgggacgaccgaggcaccgggcacgtctcctccacttacgtggaggagctcaaggggatgtcgctgctggttcgggcagagtccgacggatcactactcttggaatcaaagataaatccaaatactgcatatcagaaacaacaggatacattaattgtttggtcagaagcagagaactatgatttggctctgagttttcaggagaaagctggctgtgatgagatctgggaaaaaatttgtcaggttcaaggtaaagacccatcagtggaagtcacacaggacctcattgatgaatctgaagaagaacgatttgaagaaatgcctgaaactagtcatctgattgacctgcccacatgtgaactcaataaacttgaagagattgctgacttagttacctcagtgctctcctcacctatccgtagggaaaagctggctctcgccttggaaaatgaaggctatattaaaaaactattgcagctgttccaagcttgcgagaacctagaaaacactgaaggcttacaccatttgtatgaaattattagaggaatcttattcctaaataaggcaactctttttgaggtaatgttttctgatgagtgtatcatggatgtcgtgggatgccttgaatatgaccctgctttggctcagccaaaaagacatagagaattcttgaccaaaactgcaaagttcaaggaagttataccaataacagactctgaactaaggcaaaaaatacatcagacttacagggtacagtacattcaggacatcattttgcccacaccatctgtttttgaagagaattttctttctactcttacgtcttttattttcttcaacaaagttgagatagtcagcatgttgcaggaagatgagaagtttttgtctgaagtttttgcacaattaacagatgaggctacagatgatgataaacggcgtgaattggttaattttttcaaggagttttgtgcattttctcagacattacaacctcaaaacagggatgcatttttcaaaacattggcaaaattgggaattcttcctgctcttgaaattgtaatgggcatggatgatttgcaagtcagatcagctgctacagatatattttcttatctagtagaatttagtccatctatggtccgagagtttgtaatgcaagaagctcagcagagtgatgacgatattcttcttattaatgtggtaattgaacaaatgatctgtgatactgatcctgagctaggaggcgctgttcagttaatgggacttcttcgtactctaattgatccagagaacatgctggctacaactaataaaaccgaaaaaagtgaatttctaaattttttctacaaccattgtatgcatgttctcacagcaccacttttgaccaatacttcagaagacaaatgtgaaaaggataatatagttggatcaaacaaaaacaacacaatttgtcccggtgcccttcgctttatgaggcggataattggacttaaagatgaattttataatcgttacatcaccaagggaaatctttttgagccagttataaatgcacttctggataatggaactcggtataatctgttgaattcagctgttattgagttgtttgaatttataagagtggaagatatcaagtctcttactgcccatatagttgaaaacttttataaagcacttgaatcgattgaatatgttcagacattcaaaggattgaagactaaatatgagcaagaaaaagacagacaaaatcagaaactgaacagtgtaccatctatattgcgtagtaacagatttcgcagagatgcaaaagccttggaagaggatgaagaaatgtggtttaatgaagatgaagaagaggaaggaaaagcagttgtggcaccagtggaaaaacctaagccagaagatgattttccagataattatgaaaagtttatggagactaaaaaagcaaaagaaagtgaagacaaggaaaaccttcccaaaaggacatctcctggtggcttcaaatttactttctcccactctgccagtgctgctaatggaacaaacagtaaatctgtagtggctcagataccaccagcaacttctaatggatcctcttccaaaaccacaaacttgcctacgtcagtaacagccaccaagggaagtttggttggcttagtggattatccagatgatgaagaggaagatgaagaagaagaatcgtcccccaggaaaagacctcgtcttggctcataaaatatttattaggggaccctcaacatgtggtcttacaatgctgcaactgttcagtgagctgaaaatctgaatcagaaagctttctcaattgaacttataaaatatacaaggagtagcaaaagacagtatatcagctaagagagtttagttctaataaaaatcaggcttcccaggaacttgattgcttgctagtaattaaggggtttgccttttaggctgtcaaaacaaacattagtaaccagaacctgggagatagcttctcagcaaggaaaagtcacaggtttggggacggtttaggggaggggaaaaggttgatataataatgcagggttgctcctcggggtgtcgatctagaaacaattttacagaacttcagttgtaaactcaataacattacttgtataatggtgctggccatgttgttgttttaatcagttgcctctttttaaaagaaatttttatggaaaacacattcaactatcattaaaaaaatgaagttaagctgttgggaccatttctttaagatttaacaaaagttcagccttttaggtagttgaagggaagtacaccccgtattcagcacatgttgagttttctacaccaggaattttcaatatgtatattgatgaaaacaagctcaattcaaactggacagttttaagataatgttaaaatcagcacttttagagacaacgaaggccaagaatcagtacagtagtattccaaaatgattttctctagaaatttgaaagtagatcgaacagaatgttgtcaaccgcctaccagtacaatcttttgtggaagatactttgaaatcactttctactttgttagtaaagttctgtctttccagagctgcaagttttaaagtgttacttatacagaccaaccaagaatagtgctgaattaagtggcatttagtatctagaagccattttgatccaagaagctacttaagtgtcaaagtcagcatgcagcacatgtagcttttctgtaaacaagggtgtgatatgaaagctgcttttttaagaagagtaaaagcacattccatatacgtaagtgaattttaaaaataaattgaggcaaacagttaagttttatttttagagcaacaagttaactgtaaatattttaatgttagtttgctcatctatgatctgagatcatgccgaagtgagaaaaatctccccaaaatacaatttaatgcattgggaaaaaaaaactttaacagtaattccagccacaatctttagatcacccttgtaatgtgttacgggtccatttttcctggaatcgtttaatctaaagcagtttcccctgttttggagattttgtagttaattttaattttggctattgtttggaaaagatgagctgtctgtgtagatatgaagtatagttttttccataaaacagatgtttattttgtattaaaaaataccactgtacttgttttacaccatttgtatacatgtggtgatattaatgctaaactgtaaaattcaggaattaaaatgtgaccctgtaattccataa

SEQ ID NO: 426587 - DNA, 5554 bp, Homo sapiens
gtgaaaagtatatggggtggtggttgtaggtaaaatttaatagtagtaggaagctgaataatatatgaagaagagaaaggcagagagagtcgggttacaagatggcggatctgtagtagttaccgcggcggcgggagagcaagcgagccctggggggcaaagagacgggagagtgggtgtatgcgcgggtgaagtgagaggtaacggggcctccgggcggagaggcctcagtggctcttgtcaccccttctcgcggctgaacctttggagccatggtgaattcgggcctctccgaagccgccgccgccgccaccgccactactgcctttaccgtctcctaagagtgaggagcgcggacgaggtaagcgaggaggcggcggctagagcggtggagacagcagccaccatgtcggatacgcggcggcgagtgaaggtctataccctgaacgaagaccggcaatgggacgaccgaggcaccgggcacgtctcctccacttacgtggaggagctcaaggggatgtcgctgctggttcgggcagagtccgacggatcactactcttggaatcaaagataaatccaaatactgcatatcagaaacaacaggatacattaattgtttggtcagaagcagagaactatgatttggctctgagttttcaggagaaagctggctgtgatgagatctgggaaaaaatttgtcaggttcaaggtaaagacccatcagtggaagtcacacaggacctcattgatgaatctgaagaagaacgatttgaagaaatgcctgaaactagtcatctgattgacctgcccacatgtgaactcaataaacttgaagagattgctgacttagttacctcagtgctctcctcacctatccgtagggaaaagctggctctcgccttggaaaatgaaggctatattaaaaaactattgcagctgttccaagcttgcgagaacctagaaaacactgaaggcttacaccatttgtatgaaattattagaggaatcttattcctaaataaggcaactctttttgaggtaatgttttctgatgagtgtatcatggatgtcgtgggatgccttgaatatgaccctgctttggctcagccaaaaagacatagagaattcttgaccaaaactgcaaagttcaaggaagttataccaataacagactctgaactaaggcaaaaaatacatcagacttacagggtacagtacattcaggacatcattttgcccacaccatctgtttttgaagagaattttctttctactcttacgtcttttattttcttcaacaaagttgagatagtcagcatgttgcaggaagatgagaagtttttgtctgaagtttttgcacaattaacagatgaggctacagatgatgataaacggcgtgaattggttaattttttcaaggagttttgtgcattttctcagacattacaacctcaaaacagggatgcatttttcaaaacattggcaaaattgggaattcttcctgctcttgaaattgtaatgggcatggatgatttgcaagtcagatcagctgctacagatatattttcttatctagtagaatttagtccatctatggtccgagagtttgtaatgcaagaagctcagcagagtgatgacgatattcttcttattaatgtggtaattgaacaaatgatctgtgatactgatcctgagctaggaggcgctgttcagttaatgggacttcttcgtactctaattgatccagagaacatgctggctacaactaataaaaccgaaaaaagtgaatttctaaattttttctacaaccattgtatgcatgttctcacagcaccacttttgaccaatacttcagaagacaaatgtgaaaaggatttttttttaaaacattacagatatagttggagtttcgtatgtaccccttcacattcccattcccattctaccccctcttcctccatctctcaagataatatagttggatcaaacaaaaacaacacaatttgtcccgataattatcaaacagcacagctacttgccttaattttagagttactcacattttgtgtggaacatcacacatatcacataaaaaactatattatgaacaaggacttgctaagaagagtcttggtcttgatgaattcaaagcacacttttctggccttgtgtgcccttcgctttatgaggcggataattggacttaaagatgaattttataatcgttacatcaccaagggaaatctttttgagccagttataaatgcacttctggataatggaactcggtataatctgttgaattcagctgttattgagttgtttgaatttataagagtggaagatatcaagtctcttactgcccatatagttgaaaacttttataaagcacttgaatcgattgaatatgttcagacattcaaaggattgaagactaaatatgagcaagaaaaagacagacaaaatcagaaactgaacagtaacagatttcgcagagatgcaaaagccttggaagaggatgaagaaatgtggtttaatgaagatgaagaagaggaaggaaaagcagttgtggcaccagtggaaaaacctaagccagaagatgattttccagataattatgaaaagtttatggagactaaaaaagcaaaagaaagtgaagacaaggaaaaccttcccaaaaggacatctcctggtggcttcaaatttactttctcccactctgccagtgctgctaatggaacaaacagtaaatctgtagtggctcagataccaccagcaacttctaatggatcctcttccaaaaccacaaacttgcctacgtcagtaacagccaccaagggaagtttggttggcttagtggattatccagatgatgaagaggaagatgaagaagaagaatcgtcccccaggaaaagacctcgtcttggctcataaaatatttattaggggaccctcaacatgtggtcttacaatgctgcaactgttcagtgagctgaaaatctgaatcagaaagctttctcaattgaacttataaaatatacaaggagtagcaaaagacagtatatcagctaagagagtttagttctaataaaaatcaggcttcccaggaacttgattgcttgctagtaattaaggggtttgccttttaggctgtcaaaacaaacattagtaaccagaacctgggagatagcttctcagcaaggaaaagtcacaggtttggggacggtttaggggaggggaaaaggttgatataataatgcagggttgctcctcggggtgtcgatctagaaacaattttacagaacttcagttgtaaactcaataacattacttgtataatggtgctggccatgttgttgttttaatcagttgcctctttttaaaagaaatttttatggaaaacacattcaactatcattaaaaaaatgaagttaagctgttgggaccatttctttaagatttaacaaaagttcagccttttaggtagttgaagggaagtacaccccgtattcagcacatgttgagttttctacaccaggaattttcaatatgtatattgatgaaaacaagctcaattcaaactggacagttttaagataatgttaaaatcagcacttttagagacaacgaaggccaagaatcagtacagtagtattccaaaatgattttctctagaaatttgaaagtagatcgaacagaatgttgtcaaccgcctaccagtacaatcttttgtggaagatactttgaaatcactttctactttgttagtaaagttctgtctttccagagctgcaagttttaaagtgttacttatacagaccaaccaagaatagtgctgaattaagtggcatttagtatctagaagccattttgatccaagaagctacttaagtgtcaaagtcagcatgcagcacatgtagcttttctgtaaacaagggtgtgatatgaaagctgcttttttaagaagagtaaaagcacattccatatacgtaagtgaattttaaaaataaattgaggcaaacagttaagttttatttttagagcaacaagttaactgtaaatattttaatgttagtttgctcatctatgatctgagatcatgccgaagtgagaaaaatctccccaaaatacaatttaatgcattgggaaaaaaaaactttaacagtaattccagccacaatctttagatcacccttgtaatgtgttacgggtccatttttcctggaatcgtttaatctaaagcagtttcccctgttttggagattttgtagttaattttaattttggctattgtttggaaaagatgagctgtctgtgtagatatgaagtatagttttttccataaaacagatgtttattttgtattaaaaaataccactgtacttgttttacaccatttgtatacatgtggtgatattaatgctaaactgtaaaattcaggaattaaaatgtgaccctgtaattccataattgatgtttgtgtttggtttgttgtaaatataaattaactccattttgagatatgtcaattttacagtatcttttaaaagccaataaaattatccataaatatttattataaactgctagatcataccccaattttaatgaaataattctaaacaaatgcgggtcaatggcactttatcagtgactacttatagaaggtaagccttggggaaatcatagcatcacagtatggagcttttctcaccttttcaattaaaggtgtacatatagtaagaaagaaagaccttccacctcataaggcaggtgactcaggatattttaaactaagatcagtaaagttcccatccactttctttgaatcatcaaattttatcgagacccatctctcagcttttagtaaatttcttcttaaaataagcccacatgtaaaacactttcctagttactttttgtttgtttgtttgagtctcgctctgttgcccaggctggagtgtagttgcacgatttcggcttattgcaacatccgccacctgggttcaagcaattctctgcctcagcctgagtagctgggattacaggtgcccgtcaccatgccaggctaatttttgtattttcagtagagacggggtttcaccatcttggccaggctggtcttaaactcctgacctcacaatccacccgcctcagcctccctatctctgtatcttatgaagacttcctttttctttctgaagagctgccataagtcttaaacatttaaatcatcagaaccttttcttgtagcagaaatgtgaatgttttcttgaagtacaggttacggttttcatggtacaagtgcttacctacgacgataagagaacaaggcttaaaatatccctcaaaagaacaattgtgagaattccatgttagcggctgtctttaaacgactaccctcaggcagatctgggtttttatatctttatcttcattcagtgaagcaagccaaaagcccacatttgtatgccttaggtcttcttaaaatggtatctgtaaacatgtgtccaatataaaaactatttttaataaaaagttacatgaaacaga

SEQ ID NO: 426588 - DNA, 2153 bp, Homo sapiens
  misc_feature (52)..(52): n is a, c, g, or t
tatgttcagacatcaaaggatttgtctgtctttttcttgctcatatttagtncttccaatcctttgaatgtctgaacatattcaaaggattgaagactaaatatgagcaagaaaaagacagacaaaatcagaaactgaacagtgtaccatctatattgcgtagtaacagatttcgcagagatgcaaaagccttggaagaggatgaagaaatgtggtttaatgaagatgaagaagaggaaggaaaagcagttgtggcaccagtggaaaaacctaagccagaagatgattttccagataattatgaaaagtttatggagactaaaaaagcaaaagaaagtgaagacaaggaaaaccttcccaaaaggacatctcctggtggcttcaaatttactttctcccactctgccagtgctgctaatggaacaaacagtaaatctgtagtggctcagataccaccagcaacttctaatggatcctcttccaaaaccacaaacttgcctacgtcagtaacagccaccaagggaagtttggttggcttagtggattatccagatgatgaagaggaagatgaagaagaagaatcgtcccccaggaaaagacctcgtcttggctcataaaatatttattaggggaccctcaacatgtggtcttacaatgctgcaactgttcagtgagctgaaaatctgaatcagaaagctttctcaattgaacttataaaatatacaaggagtagcaaaagacagtatatcagctaagagagtttagttctaataaaaatcaggcttcccaggaacttgattgcttgctagtaattaaggggtttgccttttaggctgtcaaaacaaacattagtaaccagaacctgggagatagcttctcagcaaggaaaagtcacaggtttggggacggtttaggggaggggaaaaggttgatataataatgcagggttgctcctcggggtgtcgatctagaaacaattttacagaacttcagttgtaaactcaataacattacttgtataatggtgctggccatgttgttgttttaatcagttgcctctttttaaaagaaatttttatggaaaacacattcaactatcattaaaaaaatgaagttaagctgttgggaccatttctttaagatttaacaaaagttcagccttttaggtagttgaagggaagtacaccccgtattcagcacatgttgagttttctacaccaggaattttcaatatgtatattgatgaaaacaagctcaattcaaactggacagttttaagataatgttaaaatcagcacttttagagacaacgaaggccaagaatcagtacagtagtattccaaaatgattttctctagaaatttgaaagtagatcgaacagaatgttgtcaaccgcctaccagtacaatcttttgtggaagatactttgaaatcactttctactttgttagtaaagttctgtctttccagagctgcaagttttaaagtgttacttatacagaccaaccaagaatagtgctgaattaagtggcatttagtatctagaagccattttgatccaagaagctacttaagtgtcaaagtcagcatgcagcacatgtagcttttctgtaaacaagggtgtgatatgaaagctgcttttttaagaagagtaaaagcacattccatatacgtaagtgaattttaaaaataaattgaggcaaacagttaagttttatttttagagcaacaagttaactgtaaatattttaatgttagtttgctcatctatgatctgagatcatgccgaagtgagaaaaatctccccaaaatacaatttaatgcattgggaaaaaaaaactttaacagtaattccagccacaatctttagatcacccttgtaatgtgttacgggtccatttttcctggaatcgtttaatctaaagcagtttcccctgttttggagattttgtagttaattttaattttggctattgtttggaaaagatgagctgtctgtgtagatatgaagtatagttttttccataaaacagatgtttattttgtattaaaaaataccactgtacttgttttacaccatttgtatacatgtggtgatattaatgctaaactgtaaaattcaggaattaaaatgtgaccctgtaattccataa

SEQ ID NO: 426589 - DNA, 5501 bp, Homo sapiens
gtgaaaagtatatggggtggtggttgtaggtaaaatttaatagtagtaggaagctgaataatatatgaagaagagaaaggcagagagagtcgggttacaagatggcggatctgtagtagttaccgcggcggcgggagagcaagcgagccctggggggcaaagagacgggagagtgggtgtatgcgcgggtgaagtgagaggtaacggggcctccgggcggagaggcctcagtggctcttgtcaccccttctcgcggctgaacctttggagccatggtgaattcgggcctctccgaagccgccgccgccgccaccgccactactgcctttaccgtctcctaagagtgaggagcgcggacgaggtaagcgaggaggcggcggctagagcggtggagacagcagccaccatgtcggatacgcggcggcgagtgaaggtctataccctgaacgaagaccggcaatgggacgaccgaggcaccgggcacgtctcctccacttacgtggaggagctcaaggggatgtcgctgctggttcgggcagagtccgacggatcactactcttggaatcaaagataaatccaaatactgcatatcagaaacaacaggatacattaattgtttggtcagaagcagagaactatgatttggctctgagttttcaggagaaagctggctgtgatgagatctgggaaaaaatttgtcaggttcaaggtaaagacccatcagtggaagtcacacaggacctcattgatgaatctgaagaagaacgatttgaagaaatgcctgaaactagtcatctgattgacctgcccacatgtgaactcaataaacttgaagagattgctgacttagttacctcagtgctctcctcacctatccgtagggaaaagctggctctcgccttggaaaatgaaggctatattaaaaaactattgcagctgttccaagcttgcgagaacctagaaaacactgaaggcttacaccatttgtatgaaattattagaggaatcttattcctaaataaggcaactctttttgaggtaatgttttctgatgagtgtatcatggatgtcgtgggatgccttgaatatgaccctgctttggctcagccaaaaagacatagagaattcttgaccaaaactgcaaagttcaaggaagttataccaataacagactctgaactaaggcaaaaaatacatcagacttacagggtacagtacattcaggacatcattttgcccacaccatctgtttttgaagagaattttctttctactcttacgtcttttattttcttcaacaaagttgagatagtcagcatgttgcaggaagatgagaagtttttgtctgaagtttttgcacaattaacagatgaggctacagatgatgataaacggcgtgaattggttaattttttcaaggagttttgtgcattttctcagacattacaacctcaaaacagggatgcatttttcaaaacattggcaaaattgggaattcttcctgctcttgaaattgtaatgggcatggatgatttgcaagtcagatcagctgctacagatatattttcttatctagtagaatttagtccatctatggtccgagagtttgtaatgcaagaagctcagcagagtgatgacgatattcttcttattaatgtggtaattgaacaaatgatctgtgatactgatcctgagctaggaggcgctgttcagttaatgggacttcttcgtactctaattgatccagagaacatgctggctacaactaataaaaccgaaaaaagtgaatttctaaattttttctacaaccattgtatgcatgttctcacagcaccacttttgaccaatacttcagaagacaaatgtgaaaaggatttttttttaaaacattacagatatagttggagtttcgtatgtaccccttcacattcccattcccattctaccccctcttcctccatctctcaagataatatagttggatcaaacaaaaacaacacaatttgtcccgataattatcaaacagcacagctacttgccttaattttagagttactcacattttgtgtggaacatcacacatatcacataaaaaactatattatgaacaaggacttgctaagaagagtcttggtcttgatgaattcaaagcacacttttctggccttgtgtgcccttcgctttatgaggcggataattggacttaaagatgaattttataatcgttacatcaccaagggaaatctttttgagccagttataaatgcacttctggataatggaactcggtataatctgttgaattcagctgttattgagttgtttgaatttataagagtggaagatatcaagtctcttactgcccatatagttgaaaacttttataaagcacttgaatcgattgaatatgttcagacattcaaaggattgaagactaaatatgagcaagaaaaagacagacaaaatcagaaactgaacagtaacagatttcgcagagatgcaaaagccttggaagaggatgaagaaatgtggtttaatgaagatgaagaagaggaaggaaaagcagttgtggcaccagtggaaaaacctaagccagaagatgattttccagataattatgaaaagtttatggagactaaaaaagcaaaagaaagtgaagacaaggaaaaccttcccaaaaggacatctcctggtggcttcaaatttactttctcccactctgccagtgctgctaatggaacaaacagtaaatctgtagtggctcagataccaccagcaacttctaatggatcctcttccaaaaccacaaacttgcctacgtcagtaacagccaccaagggaagtttggttggcttagtggattatccagatgatgaagaggaagatgaagaagaagaatcgtcccccaggaaaagacctcgtcttggctcataaaatatttattaggggaccctcaacatgtggtcttacaatgctgcaactgttcagtgagctgaaaatctgaatcagaaagctttctcaattgaacttataaaatatacaaggagtagcaaaagacagtatatcagctaagagagtttagttctaataaaaatcaggcttcccaggaacttgattgcttgctagtaattaaggggtttgccttttaggctgtcaaaacaaacattagtaaccagaacctgggagatagcttctcagcaaggaaaagtcacaggtttggggacggtttaggggaggggaaaaggttgatataataatgcagggttgctcctcggggtgtcgatctagaaacaattttacagaacttcagttgtaaactcaataacattacttgtataatggtgctggccatgttgttgttttaatcagttgcctctttttaaaagaaatttttatggaaaacacattcaactatcattaaaaaaatgaagttaagctgttgggaccatttctttaagatttaacaaaagttcagccttttaggtagttgaagggaagtacaccccgtattcagcacatgttgagttttctacaccaggaattttcaatatgtatattgatgaaaacaagctcaattcaaactggacagttttaagataatgttaaaatcagcacttttagagacaacgaaggccaagaatcagtacagtagtattccgcctaccagtacaatcttttgtggaagatactttgaaatcactttctactttgttagtaaagttctgtctttccagagctgcaagttttaaagtgttacttatacagaccaaccaagaatagtgctgaattaagtggcatttagtatctagaagccattttgatccaagaagctacttaagtgtcaaagtcagcatgcagcacatgtagcttttctgtaaacaagggtgtgatatgaaagctgcttttttaagaagagtaaaagcacattccatatacgtaagtgaattttaaaaataaattgaggcaaacagttaagttttatttttagagcaacaagttaactgtaaatattttaatgttagtttgctcatctatgatctgagatcatgccgaagtgagaaaaatctccccaaaatacaatttaatgcattgggaaaaaaaaactttaacagtaattccagccacaatctttagatcacccttgtaatgtgttacgggtccatttttcctggaatcgtttaatctaaagcagtttcccctgttttggagattttgtagttaattttaattttggctattgtttggaaaagatgagctgtctgtgtagatatgaagtatagttttttccataaaacagatgtttattttgtattaaaaaataccactgtacttgttttacaccatttgtatacatgtggtgatattaatgctaaactgtaaaattcaggaattaaaatgtgaccctgtaattccataattgatgtttgtgtttggtttgttgtaaatataaattaactccattttgagatatgtcaattttacagtatcttttaaaagccaataaaattatccataaatatttattataaactgctagatcataccccaattttaatgaaataattctaaacaaatgcgggtcaatggcactttatcagtgactacttatagaaggtaagccttggggaaatcatagcatcacagtatggagcttttctcaccttttcaattaaaggtgtacatatagtaagaaagaaagaccttccacctcataaggcaggtgactcaggatattttaaactaagatcagtaaagttcccatccactttctttgaatcatcaaattttatcgagacccatctctcagcttttagtaaatttcttcttaaaataagcccacatgtaaaacactttcctagttactttttgtttgtttgtttgagtctcgctctgttgcccaggctggagtgtagttgcacgatttcggcttattgcaacatccgccacctgggttcaagcaattctctgcctcagcctgagtagctgggattacaggtgcccgtcaccatgccaggctaatttttgtattttcagtagagacggggtttcaccatcttggccaggctggtcttaaactcctgacctcacaatccacccgcctcagcctccctatctctgtatcttatgaagacttcctttttctttctgaagagctgccataagtcttaaacatttaaatcatcagaaccttttcttgtagcagaaatgtgaatgttttcttgaagtacaggttacggttttcatggtacaagtgcttacctacgacgataagagaacaaggcttaaaatatccctcaaaagaacaattgtgagaattccatgttagcggctgtctttaaacgactaccctcaggcagatctgggtttttatatctttatcttcattcagtgaagcaagccaaaagcccacatttgtatgccttaggtcttcttaaaatggtatctgtaaacatgtgtccaatataaaaactatttttaataaaaagttacatgaaacaga

SEQ ID NO: 426590 - DNA, 4615 bp, Homo sapiens
gtgaaaagtatatggggtggtggttgtaggtaaaatttaatagtagtaggaagctgaataatatatgaagaagagaaaggcagagagagtcgggttacaagatggcggatctgtagtagttaccgcggcggcgggagagcaagcgagccctggggggcaaagagacgggagagtgggtgtatgcgcgggtgaagtgagaggtaacggggcctccgggcggagaggcctcagtggctcttgtcaccccttctcgcggctgaacctttggagccatggtgaattcgggcctctccgaagccgccgccgccgccaccgccactactgcctttaccgtctcctaagagtgaggagcgcggacgaggtaagcgaggaggcggcggctagagcggtggagacagcagccaccatgtcggatacgcggcggcgagtgaaggtctataccctgaacgaagaccggcaatgggacgaccgaggcaccgggcacgtctcctccacttacgtggaggagctcaaggggatgtcgctgctggttcgggcagagtccgacggatcactactcttggaatcaaagataaatccaaatactgcatatcagaaacaacaggatacattaattgtttggtcagaagcagagaactatgatttggctctgagttttcaggagaaagctggctgtgatgagatctgggaaaaaatttgtcaggttcaaggtaaagacccatcagtggaagtcacacaggacctcattgatgaatctgaagaagaacgatttgaagaaatgcctgaaactagtcatctgattgacctgcccacatgtgaactcaataaacttgaagagattgctgacttagttacctcagtgctctcctcacctatccgtagggaaaagctggctctcgccttggaaaatgaaggctatattaaaaaactattgcagctgttccaagcttgcgagaacctagaaaacactgaaggcttacaccatttgtatgaaattattagaggaatcttattcctaaataaggcaactctttttgaggtaatgttttctgatgagtgtatcatggatgtcgtgggatgccttgaatatgaccctgctttggctcagccaaaaagacatagagaattcttgaccaaaactgcaaagttcaaggaagttataccaataacagactctgaactaaggcaaaaaatacatcagacttacagggtacagtacattcaggacatcattttgcccacaccatctgtttttgaagagaattttctttctactcttacgtcttttattttcttcaacaaagttgagatagtcagcatgttgcaggaagatgagaagtttttgtctgaagtttttgcacaattaacagatgaggctacagatgatgataaacggcgtgaattggttaattttttcaaggagttttgtgcattttctcagacattacaacctcaaaacagggatgcatttttcaaaacattggcaaaattgggaattcttcctgctcttgaaattgtaatgggcatggatgatttgcaagtcagatcagctgctacagatatattttcttatctagtagaatttagtccatctatggtccgagagtttgtaatgcaagaagctcagcagagtgatgacgatattcttcttattaatgtggtaattgaacaaatgatctgtgatactgatcctgagctaggaggcgctgttcagttaatgggacttcttcgtactctaattgatccagagaacatgctggctacaactaataaaaccgaaaaaagtgaatttctaaattttttctacaaccattgtatgcatgttctcacagcaccacttttgaccaatacttcagaagacaaatgtgaaaaggatttttttttaaaacattacagatatagttggagtttcgtatgtaccccttcacattcccattcccattctaccccctcttcctccatctctcaagataatatagttggatcaaacaaaaacaacacaatttgtcccgataattatcaaacagcacagctacttgccttaattttagagttactcacattttgtgtggaacatcacacatatcacataaaaaactatattatgaacaaggacttgctaagaagagtcttggtcttgatgaattcaaagcacacttttctggccttgtgtgcccttcgctttatgaggcggataattggacttaaagatgaattttataatcgttacatcaccaagggaaatctttttgagccagttataaatgcacttctggataatggaactcggtataatctgttgaattcagctgttattgagttgtttgaatttataagagtggaagatatcaagtctcttactgcccatatagttgaaaacttttataaagcacttgaatcgattgaatatgttcagacattcaaaggattgaagactaaatatgagcaagaaaaagacagacaaaatcagaaactgaacagtaacagatttcgcagagatgcaaaagccttggaagaggatgaagaaatgtggtttaatgaagatgaagaagaggaaggaaaagcagttgtggcaccagtggaaaaacctaagccagaagatgattttccagataattatgaaaagtttatggagactaaaaaagcaaaagaaagtgaagacaaggaaaaccttcccaaaaggacatctcctggtggcttcaaatttactttctcccactctgccagtgctgctaatggaacaaacagtaaatctgtagtggctcagataccaccagcaacttctaatggatcctcttccaaaaccacaaacttgcctacgtcagtaacagccaccaagggaagtttggttggcttagtggattatccagatgatgaagaggaagatgaagaagaagaatcgtcccccaggaaaagacctcgtcttggctcataaaatatttattaggggaccctcaacatgtggtcttacaatgctgcaactgttcagtgagctgaaaatctgaatcagaaagctttctcaattgaacttataaaatatacaaggagtagcaaaagacagtatatcagctaagagagtttagttctaataaaaatcaggcttcccaggaacttgattgcttgctagtaattaaggggtttgccttttaggctgtcaaaacaaacattagtaaccagaacctgggagatagcttctcagcaaggaaaagtcacaggtttggggacggtttaggggaggggaaaaggttgatataataatgcagggttgctcctcggggtgtcgatctagaaacaattttacagaacttcagttgtaaactcaataacattacttgtataatggtgctggccatgttgttgttttaatcagttgcctctttttaaaagaaatttttatggaaaacacattcaactatcattaaaaaaatgaagttaagctgttgggaccatttctttaagatttaacaaaagttcagccttttaggtagttgaagggaagtacaccccgtattcagcacatgttgagttttctacaccaggaattttcaatatgtatattgatgaaaacaagctcaattcaaactggacagttttaagataatgttaaaatcagcacttttagagacaacgaaggccaagaatcagtacagtagtattccaaaatgattttctctagaaatttgaaagtagatcgaacagaatgttgtcaaccgcctaccagtacaatcttttgtggaagatactttgaaatcactttctactttgttagtaaagttctgtctttccagagctgcaagttttaaagtgttacttatacagaccaaccaagaatagtgctgaattaagtggcatttagtatctagaagccattttgatccaagaagctacttaagtgtcaaagtcagcatgcagcacatgtagcttttctgtaaacaagggtgtgatatgaaagctgcttttttaagaagagtaaaagcacattccatatacgtaagtgaattttaaaaataaattgaggcaaacagttaagttttatttttagagcaacaagttaactgtaaatattttaatgttagtttgctcatctatgatctgagatcatgccgaagtgagaaaaatctccccaaaatacaatttaatgcattgggaaaaaaaaactttaacagtaattccagccacaatctttagatcacccttgtaatgtgttacgggtccatttttcctggaatcgtttaatctaaagcagtttcccctgttttggagattttgtagttaattttaattttggctattgtttggaaaagatgagctgtctgtgtagatatgaagtatagttttttccataaaacagatgtttattttgtattaaaaaataccactgtacttgttttacaccatttgtatacatgtggtgatattaatgctaaactgtaaaattcaggaattaaaatgtgaccctgtaattccataaaaaaaaaacggggggcgcaaaagtatcccgagggccacttaccgttaccgctcctgtcaacgcggccctagggggcggattaaaccaagccggccgcctcacacccggctgcgacgccccgggcttggacgacccccggggcag

SEQ ID NO: 426591 - DNA, 3359 bp, Homo sapiens
gtgaaaagtatatggggtggtggttgtaggtaaaatttaatagtagtaggaagctgaataatatatgaagaagagaaaggcagagagagtcgggttacaagatggcggatctgtagtagttaccgcggcggcgggagagcaagcgagccctggggggcaaagagacgggagagtgggtgtatgcgcgggtgaagtgagaggtaacggggcctccgggcggagaggcctcagtggctcttgtcaccccttctcgcggctgaacctttggagccatggtgaattcgggcctctccgaagccgccgccgccgccaccgccactactgcctttaccgtctcctaagagtgaggagcgcggacgaggtaagcgaggaggcggcggctagagcggtggagacagcagccaccatgtcggatacgcggcggcgagtgaaggtctataccctgaacgaagaccggcaatgggacgaccgaggcaccgggcacgtctcctccacttacgtggaggagctcaaggggatgtcgctgctggttcgggcagagtccgacggatcactactcttggaatcaaagataaatccaaatactgcatatcagaaacaacaggatacattaattgtttggtcagaagcagagaactatgatttggctctgagttttcaggagaaagctggctgtgatgagatctgggaaaaaatttgtcaggttcaaggtaaagacccatcagtggaagtcacacaggacctcattgatgaatctgaagaagaacgatttgaagaaatgcctgaaactagtcatctgattgacctgcccacatgtgaactcaataaacttgaagagattgctgacttagttacctcagtgctctcctcacctatccgtagggaaaagctggctctcgccttggaaaatgaaggctatattaaaaaactattgcagctgttccaagcttgcgagaacctagaaaacactgaaggcttacaccatttgtatgaaattattagaggaatcttattcctaaataaggcaactctttttgaggtaatgttttctgatgagtgtatcatggatgtcgtgggatgccttgaatatgaccctgctttggctcagccaaaaagacatagagaattcttgaccaaaactgcaaagttcaaggaagttataccaataacagactctgaactaaggcaaaaaatacatcagacttacagggtacagtacattcaggacatcattttgcccacaccatctgtttttgaagagaattttctttctactcttacgtcttttattttcttcaacaaagttgagatagtcagcatgttgcaggaagatgagaagtttttgtctgaagtttttgcacaattaacagatgaggctacagatgatgataaacggcgtgaattggttaattttttcaaggagttttgtgcattttctcagacattacaacctcaaaacagggatgcatttttcaaaacattggcaaaattgggaattcttcctgctcttgaaattgtaatgggcatggatgatttgcaagtcagatcagctgctacagatatattttcttatctagtagaatttagtccatctatggtccgagagtttgtaatgcaagaagctcagcagagtgatgacgatattcttcttattaatgtggtaattgaacaaatgatctgtgatactgatcctgagctaggaggcgctgttcagttaatgggacttcttcgtactctaattgatccagagaacatgctggctacaactaataaaaccgaaaaaagtgaatttctaaattttttctacaaccattgtatgcatgttctcacagcaccacttttgaccaatacttcagaagacaaatgtgaaaaggataatatagttggatcaaacaaaaacaacacaatttgtcccgataattatcaaacagcacagctacttgccttaattttagagttactcacattttgtgtggaacatcacacatatcacataaaaaactatattatgaacaaggacttgctaagaagagtcttggtcttgatgaattcaaagcacacttttctggccttgtgtgcccttcgctttatgaggcggataattggacttaaagatgaattttataatcgttacatcaccaagggaaatctttttgagccagttataaatgcacttctggataatggaactcggtataatctgttgaattcagctgttattgagttgtttgaatttataagagtggaagatatcaagtctcttactgcccatatagttgaaaacttttataaagcacttgaatcgattgaatatgttcagacattcaaaggattgaagactaaatatgagcaagaaaaagacagacaaaatcagaaactgaacagtgtaccatctatattgcgtagtaacagatttcgcagagatgcaaaagccttggaagaggatgaagaaatgtggtttaatgaagatgaagaagaggaaggaaaagcagttgtggcaccagtggaaaaacctaagccagaagatgattttccagataattatgaaaagtttatggagactaaaaaagcaaaagaaagtgaagacaaggaaaaccttcccaaaaggacatctcctggtggcttcaaatttactttctcccactctgccagtgctgctaatggaacaaacagtaaatctgtagtggctcagataccaccagcaacttctaatggatcctcttccaaaaccacaaacttgcctacgtcagtaacagccaccaagggaagtttggttggcttagtggattatccagatgatgaagaggaagatgaagaagaagaatcgtcccccaggaaaagacctcgtcttggctcataaaatatttattaggggaccctcaacatgtggtcttacaatgctgcaactgttcagtgagctgaaaatctgaatcagaaagctttctcaattgaacttataaaatatacaaggagtagcaaaagacagtatatcagctaagagagtttagttctaataaaaatcaggcttcccaggaacttgattgcttgctagtaattaaggggtttgccttttaggctgtcaaaacaaacattagtaaccagaacctgggagatagcttctcagcaaggaaaagtcacaggtttggggacggtttaggggaggggaaaaggttgatataataatgcagggttgctcctcggggtgtcgatctagaaacaattttacagaacttcagttgtaaactcaataacattacttgtataatggtgctggccatgttgttgttttaatcagttgcctctttttaaaagaaatttttatggaaaacacattcaactatcattaaaaaaatgaagtt

SEQ ID NO: 426592 - DNA, 1524 bp, Homo sapiens
cctttttttttccccccccataaaaaaaaaaaaaaaaaaaaaaaaataaaaaaaaaaaaaaaaaaaaaaaaaaaaaaaaaaaaaaaaaaaaaaaaaaaaaaaaaaaaaaaaaaaaaaaaaaaaaaaactttaacagtaattccagccacaatctttagatcacccttgtaatgtgttacgggtccatttttcctggaatcgtttaatctaaagcagtttcccctgttttggagattttgtagttaattttaattttggctattgtttggaaaagatgagctgtctgtgtagatatgaagtatagttttttccataaaacagatgtttattttgtattaaaaaataccactgtacttgttttacaccatttgtatacatgtggtgatattaatgctaaactgtaaaattcaggaattaaaatgtgaccctgtaattccataattgatgtttgtgtttggtttgttgtaaatataaattaactccattttgagatatgtcaattttacagtatcttttaaaagccaataaaattatccataaatatttattataaactgctagatcataccccaattttaatgaaataattctaaacaaatgcgggtcaatggcactttatcagtgactacttatagaaggtaagccttggggaaatcatagcatcacagtatggagcttttctcaccttttcaattaaaggtgtacatatagtaagaaagaaagaccttccacctcataaggcaggtgactcaggatattttaaactaagatcagtaaagttcccatccactttctttgaatcatcaaattttatcgagacccatctctcagcttttagtaaatttcttcttaaaataagcccacatgtaaaacactttcctagttactttttgtttgtttgtttgagtctcgctctgttgcccaggctggagtgtagttgcacgatttcggcttattgcaacatccgccacctgggttcaagcaattctctgcctcagcctgagtagctgggattacaggtgcccgtcaccatgccaggctaatttttgtattttcagtagagacggggtttcaccatcttggccaggctggtcttaaactcctgacctcacaatccacccgcctcagcctccctatctctgtatcttatgaagacttcctttttctttctgaagagctgccataagtcttaaacatttaaatcatcagaaccttttcttgtagcagaaatgtgaatgttttcttgaagtacaggttacggttttcatggtacaagtgcttacctacgacgataagagaacaaggcttaaaatatccctcaaaagaacaattgtgagaattccatgttagcggctgtctttaaacgactaccctcaggcagatctgggtttttatatctttatcttcattcagtgaagcaagccaaaagcccacatttgtatgccttaggtcttcttaaaatggtatctgtaaacatgtgtccaatataaaaactatttttaataaaaagttacatgaaacaga

SEQ ID NO: 426593 - DNA, 2659 bp, Homo sapiens
  misc_feature (2649)..(2649): n is a, c, g, or t
gtgaaaagtatatggggtggtggttgtaggtaaaatttaatagtagtaggaagctgaataatatatgaagaagagaaaggcagagagagtcgggttacaagatggcggatctgtagtagttaccgcggcggcgggagagcaagcgagccctggggggcaaagagacgggagagtgggtgtatgcgcgggtgaagtgagaggtaacggggcctccgggcggagaggcctcagtggctcttgtcaccccttctcgcggctgaacctttggagccatggtgaattcgggcctctccgaagccgccgccgccgccaccgccactactgcctttaccgtctcctaagagtgaggagcgcggacgaggtaagcgaggaggcggcggctagagcggtggagacagcagccaccatgtcggatacgcggcggcgagtgaaggtctataccctgaacgaagaccggcaatgggacgaccgaggcaccgggcacgtctcctccacttacgtggaggagctcaaggggatgtcgctgctggttcgggcagagtccgacggatcactactcttggaatcaaagataaatccaaatactgcatatcagaaacaacaggatacattaattgtttggtcagaagcagagaactatgatttggctctgagttttcaggagaaagctggctgtgatgagatctgggaaaaaatttgtcaggttcaaggtaaagacccatcagtggaagtcacacaggacctcattgatgaatctgaagaagaacgatttgaagaaatgcctgaaactagtcatctgattgacctgcccacatgtgaactcaataaacttgaagagattgctgacttagttacctcagtgctctcctcacctatccgtagggaaaagctggctctcgccttggaaaatgaaggctatattaaaaaactattgcagctgttccaagcttgcgagaacctagaaaacactgaaggcttacaccatttgtatgaaattattagaggaatcttattcctaaataaggcaactctttttgaggtaatgttttctgatgagtgtatcatggatgtcgtgggatgccttgaatatgaccctgctttggctcagccaaaaagacatagagaattcttgaccaaaactgcaaagttcaaggaagttataccaataacagactctgaactaaggcaaaaaatacatcagacttacagggtacagtacattcaggacatcattttgcccacaccatctgtttttgaagagaattttctttctactcttacgtcttttattttcttcaacaaagttgagatagtcagcatgttgcaggaagatgagaagtttttgtctgaagtttttgcacaattaacagatgaggctacagatgatgataaacggcgtgaattggttaattttttcaaggagttttgtgcattttctcagacattacaacctcaaaacagggatgcatttttcaaaacattggcaaaattgggaattcttcctgctcttgaaattgtaatgggcatggatgatttgcaagtcagatcagctgctacagatatattttcttatctagtagaatttagtccatctatggtccgagagtttgtaatgcaagaagctcagcagagtgatgacgatattcttcttattaatgtggtaattgaacaaatgatctgtgatactgatcctgagctaggaggcgctgttcagttaatgggacttcttcgtactctaattgatccagagaacatgctggctacaactaataaaaccgaaaaaagtgaatttctaaattttttctacaaccattgtatgcatgttctcacagcaccacttttgaccaatacttcagaagacaaatgtgaaaaggatttttttttaaaacattacagatatagttggagtttcgtatgtaccccttcacattcccattcccattctaccccctcttcctccatctctcaagataatatagttggatcaaacaaaaacaacacaatttgtcccgataattatcaaacagcacagctacttgccttaattttagagttactcacattttgtgtggaacatcacacatatcacataaaaaactatattatgaacaaggacttgctaagaagagtcttggtcttgatgaattcaaagcacacttttctggccttgtgtgcccttcgctttatgaggcggataattggacttaaagatgaattttataatcgttacatcaccaagggaaatctttttgagccagttataaatgcacttctggataatggaactcggtataatctgttgaattcagctgttattgagttgtttgaatttataagagtggaagatatcaagtctcttactgcccatatagttgaaaacttttataaagcacttgaatcgattgaatatgttcagacattcaaaggattgaagactaaatatgagcaagaaaaagacagacaaaatcagaaactgaacagtgtaccatctatattgcgtagtaacagatttcgcagagatgcaaaagccttggaagaggatgaagaaatgtggtttaatgaagatgaagaagaggaaggaaaatcgatcttctggcttaggtttttccactggtgccacaactgcttttccttccctctacctgcacngacaacacat

SEQ ID NO: 426594 - DNA, 2258 bp, Homo sapiens
gtgaaaagtatatggggtggtggttgtaggtaaaatttaatagtagtaggaagctgaataatatatgaagaagagaaaggcagagagagtcgggttacaagatggcggatctgtagtagttaccgcggcggcgggagagcaagcgagccctggggggcaaagagacgggagagtgggtgtatgcgcgggtgaagtgagaggtaacggggcctccgggcggagaggcctcagtggctcttgtcaccccttctcgcggctgaacctttggagccatggtgaattcgggcctctccgaagccgccgccgccgccaccgccactactgcctttaccgtctcctaagagtgaggagcgcggacgaggtaagcgaggaggcggcggctagagcggtggagacagcagccaccatgtcggatacgcggcggcgagtgaaggtctataccctgaacgaagaccggcaatgggacgaccgaggcaccgggcacgtctcctccacttacgtggaggagctcaaggggatgtcgctgctggttcgggcagagtccgacggatcactactcttggaatcaaagataaatccaaatactgcatatcagaaacaacaggatacattaattgtttggtcagaagcagagaactatgatttggctctgagttttcaggagaaagctggctgtgatgagatctgggaaaaaatttgtcaggttcaaggtaaagacccatcagtggaagtcacacaggacctcattgatgaatctgaagaagaacgatttgaagaaatgcctgaaactagtcatctgattgacctgcccacatgtgaactcaataaacttgaagagattgctgacttagttacctcagtgctctcctcacctatccgtagggaaaagctggctctcgccttggaaaatgaaggctatattaaaaaactattgcagctgttccaagcttgcgagaacctagaaaacactgaaggcttacaccatttgtatgaaattattagaggaatcttattcctaaataaggcaactctttttgaggtaatgttttctgatgagtgtatcatggatgtcgtgggatgccttgaatatgaccctgctttggctcagccaaaaagacatagagaattcttgaccaaaactgcaaagttcaaggaagttataccaataacagactctgaactaaggcaaaaaatacatcagacttacagggtacagtacattcaggacatcattttgcccacaccatctgtttttgaagagaattttctttctactcttacgtcttttattttcttcaacaaagttgagatagtcagcatgttgcaggaagatgagaagtttttgtctgaagtttttgcacaattaacagatgaggctacagatgatgataaacggcgtgaattggttaattttttcaaggagttttgtgcattttctcagacattacaacctcaaaacagggatgcatttttcaaaacattggcaaaattgggaattcttcctgctcttgaaattgtaatgggcatggatgatttgcaagtcagatcagctgctacagatatattttcttatctagtagaatttagtccatctatggtccgagagtttgtaatgcaagaagctcagcagagtgatgacgatattcttcttattaatgtggtaattgaacaaatgatctgtgatactgatcctgagctaggaggcgctgttcagttaatgggacttcttcgtactctaattgatccagagaacatgctggctacaactaataaaaccgaaaaaagtgaatttctaaattttttctacaaccattgtatgcatgttctcacagcaccacttttgaccaatacttcagaagacaaatgtgaaaaggataatatagttggatcaaacaaaaacaacacaatttgtcccgataattatcaaacagcacagctacttgccttaattttagagttactcacattttgtgtggaacatcacacatatcacataaaaaactatattatgaacaaggacttgctaagaagagtcttggtcttgatgaattcaaagcacacttttctggccttgtgtaagtataaaatgttttaaggagcaacatttttaatagagataaaactgaagttacccatttgaagttatttattagcagtgtatattctatgaatgagatgattgtgagaagtcctattcttttgttcttatttaaagggcaagaggactaggttgtagtgattttcccacccacatattg

SEQ ID NO: 426595 - DNA, 1020 bp, Homo sapiens
gtgaaaagtatatggggtggtggttgtaggtaaaatttaatagtagtaggaagctgaataatatatgaagaagagaaaggcagagagagtcgggttacaagatggcggatctgtagtagttaccgcggcggcgggagagcaagcgagccctggggggcaaagagacgggagagtgggtgtatgcgcgggtgaagtgagaggtaacggggcctccgggcggagaggcctcagtggctcttgtcaccccttctcgcggctgaacctttggagccatggtgaattcgggcctctccgaagccgccgccgccgccaccgccactactgcctttaccgtctcctaagagtgaggagcgcggacgaggtaagcgaggaggcggcggctagagcggtggagacagcagccaccatgtcggatacgcggcggcgagtgaaggtctataccctgaacgaagaccggcaatgggacgaccgaggcaccgggcacgtctcctccacttacgtggaggagctcaaggggatgtcgctgctggttcgggcagagtccgacggatcactactcttggaatcaaagataaatccaaatactgcatatcagaaacaacaggcaagtagttgtttatctttaatttgaaagacttcatctgtgatcaaggaagtattaatctgacaaaggtgggaaagctttcctgacaagaaaaaaacatgtttggtaaacaaagatcatgtgtatttctcttgcaggttaaaagtttcagactgaaaaaaagtttttgtactggtgataattatcatttttggattgagccactgtcggtttattctaagatgtatttattagtattatttaactgtagttagccaagtctcttctataccttgtacatgaaaccttttattctgagtcacgtttaaaggaaatgacatagaacaaaattcaaagggatactcttaaagcaaggaaagcctgtttgtggtgtgaaattaaatcctttgactcaagtaaaggtagaggttttgaag

SEQ ID NO: 426596 - DNA, 1244 bp, Homo sapiens
gtgaaaagtatatggggtggtggttgtaggtaaaatttaatagtagtaggaagctgaataatatatgaagaagagaaaggcagagagagtcgggttacaagatggcggatctgtagtagttaccgcggcggcgggagagcaagcgagccctggggggcaaagagacgggagagtgggtgtatgcgcgggtgaagtgagaggtaacggggcctccgggcggagaggcctcagtggctcttgtcaccccttctcgcggctgaacctttggagccatggtgaattcgggcctctccgaagccgccgccgccgccaccgccactactgcctttaccgtctcctaagagtgaggagcgcggacgaggtaagcgaggaggcggcggctagagcggtggagacagcagccaccatgtcggatacgcggcggcgagtgaaggtctataccctgaacgaagaccggcaatgggacgaccgaggcaccgggcacgtctcctccacttacgtggaggagctcaaggggatgtcgctgctggttcgggcagagtccgacggatcactactcttggaatcaaagataaatccaaatactgcatatcagaaacaacaggatacattaattgtttggtcagaagcagagaactatgatttggctctgagttttcaggagaaagctggctgtgatgagatctgggaaaaaatttgtcaggtaagtttctttttataatatttaacttaatgtttgcttcttttctggaatttttgtttcctttttacttcaaacatattaggatgtggcgagatagtgtcttaatgtgagacttgataatctaacttgaaattttttatattctacggcaaattattttactttaagttttttaaaaacaactttgtcatacttttgttttaccactttagattttgatagcatatgctcataattaataccttatattgtaaaatggcaagtactttaagcaaaccaaaagaagattaagtaattaaatcaagcttttagattaaaaacataaatatttggtcatatgtttgcctaatgtttatgcatactgtaccaggcactaatgctcaacagtattcatgacttcagtttatgtggaacttagagtgtagcaggatatatagaatatgtggtaactcttaagtaactagaatttttttaaaagaaaccttttgttttaggacagttttagatttacagaaaatataactataatgcagaagacaaa

SEQ ID NO: 426597 - DNA, 711 bp, Homo sapiens
ctttctttgttactttcttgggaaaaactcaatacactgcagagagagagagacaaatgggatcaatagtgattatggtgcttgctgttctgacttacatgttgtttattttgtgtctgttttacctcaagtatttatttgtgttgagaacacttaaaatctactgtcttagcagtttgcaagtgtaatacattgttagtaatatgttgttattatatatgttgtacaatagattggttcttcactgcgtttcatattcgtatcacaggcatctttttaaaaaattattttgaataattttcctcagaaaaacattttgtgatgctctctgatctttatcttgccttcatttttacttagtacataatatgaagtagacttaattttcagttccacagaaataagattaaagtgaatatagttagtttttggttctttgacaacgtataaccaagtgtttgatttttttcacagtattttaaagtatctgcttatatatgatctgtactgctaattctttttgttttggtttggttctggaaaaggtatgtactgctaatcttgaagatgtttttatttacataagtaacagtattgtttaaaaaattctatgtttcagaaaaccgaaaaaagtgaatttctaaattttttctacaaccattgtatgcatgttctcacagcaccacttttgaccaatacttcagaagacaa

SEQ ID NO: 426598 - DNA, 283 bp, Homo sapiens
tattctttatttagatatattcaatatttattttcatgagattactttcttttgtagataattatcaaacagcacagctacttgccttaattttagagttactcacattttgtgtggaacatcacacatatcacataaaaaactatattatgaacaaggacttgctaagaagagtcttggtcttgatgaattcaaagcacacttttctggccttgtgtaagtataaaatgttttaaggagcaacatttttaatagagataaaactgaagttacccatttgaag

SEQ ID NO: 426599 - DNA, 1819 bp, Homo sapiens
tcggtgcgacgcaagtctcagctcagcgcgcttatcctgggtccaccggcgctaccgccccccgacgtgagagagcgaagttcttgggccgcgctccctccctacctgggtgccctccccctccgggagcctgggtccccggggcggtcgcggcggctgcatcctcaggccaggccgcggggggagggggcggcacgggcctccgaaagcggggccatggagcccagagagtcggggaaggtaggactggaaggcccgggggccgcccgctccctcccgaggatccccgagccgggctcgggcgaggcggggcggctcgggcggaggccccgcagatgagccaggcttgcagggaaggactcgccggcccgccctctcttcccgcacttcggcgcccgaccccgggagggtggcggagaggagcggacgcttccgttcggtgtccgcgcatcctccccgagctgccgagcgtccgctgggtcgatgctgggttgggtgacccccgagtggagcgatgcgaaggtgcttcctgttttccccaccaccttcggcgttttgaagaggccctgctaaggcttggagtctggatcggacgccagtgggagctgcagggtgggacgcttgagggcttgaccctgcctagatcctccttaccaagaaagggctgaaaagagagggcatctggcatgctttttgccacttctgtttctaggttatgtacttcatggaatatctgggcattgcttagaaacctgtgtcataaattggctttgggcaagaggctttgagttggaagaaaaggtggaaagaaagtgcttgggggcggagttcagggatttgacgggattgccagcgcttccaggccgtgtcatccaagaccagtgtggttgtgggcacattagcttggagacagtggcagcctcttgggactaacatctttctggatgttgtttgctgccagttcttgagtattgtttcttatttggcacagaggagaattctctcaacaaacgttttcgactgtttattgagtcccttaaaaaactgtccatttaataaacatttgtgatctgtgatttgcattgaacgagatgctggaagtatgaggataaataggaaatgatcacctttctcaaggagctctcctgcagttttcacttcaataacttggacacgcctgaaagggttgtcccacacgaaaagagagaaaaggataatgaggttcttttgatgctgtagtttttcctgggaagactaggaaggactctgaatttcaaaagaggtgatttctcgcatgagcatctcttccatcctccctccctccacaagctacagtgatgcatgtagcagacacggcacctacagagtacgtggtccaagccaataaagctcaacaaaacccaagcaaagatggagcttatggcccttaccctttggaaatatccccagattggtttagattgaacctgaatttgaataaagagaagcaaaatgtagggggaagaaggattataaaatattgggattgatattggtatcagtgatttgaagttgatttccaagctattctgttcagtcagaggctttcttagcctttaacgggagaagagaaatacggtcatgcgctgtataacaaggtttccatcaacaccgctctcacgtacaatcccctgagactacagtggggctgagaaattcctatcacctggtgacatcttcatgatcctgaccctgtgtaggcttaggctaatgtgtgtgtttgtgtcttaggttttaagaaagcttaaaaagttgttaccattctgatttggagcggccg

SEQ ID NO: 426600 - DNA, 2479 bp, Homo sapiens
gctaaaggaaaccaacagcggcctaggggtgaaaggacagccagggttagatgttctgaggaggcgggagcaaccgagagagcacgtgagcatctgtcctttctacccgttcctctttatctttagtgttcagtagcagcggggatagcccggggcccggtgtatggccacggagttacagtgtccggactccatgccctgtcacaaccagcaagtaaactctgcctcaaccccaagtcccgagcagctgcgacctggcgatctgatcctggaccacgcagggggaaacagagcctccagggccaaggtgattctcctcacggggtacgcccattctagcctgccggccgagctggactctggggcctgcggcggctccagcctcaactcagagggcaacagtggtagtggtgacagtagcagctatgacgcaccagctggcaactccttcctagaggactgcgaactctcccggcagatcggggcgcagcttaagctgctgcctatgaatgatcagatacgggagctacagaccatcatccgggacaagacagccagtagaggtgacttcatgttttctgcggatcgtttgatcagacttgttgtggaagagggattgaatcagctgccatataaagaatgcatggtgaccactccaacagggtacaagtatgaaggagtgaaatttgagaagggaaattgtggggtcagcataatgagaagcggtgaggcaatggaacaaggtttacgagactgctgtcgatccatacgaattggaaagatcctgattcagagtgatgaggagacacaaagagccaaagtatattatgccaaattccccccagacatttaccggagaaaagtccttctgatgtatccaattctcagcactggaaatactgtaattgaagctgtaaaggttcttatagaacatggagttcaacccagtgttatcatcctactcagtctgttctccactcctcatggtgccaaatcaatcattcaggagtttccagagatcacaattttaactactgaagttcatcctgttgcacctacacattttggacagaaatactttggaacagactaagttatttaagtaaaataattgtcttatgtaatattacaatcatgttttgattttctatttgttttactgattcacttgagggtggcagagaaaaatgtgttaaaatgctttttagttttggaagtgggtatatttgaggttatatctcatttagttatttgtttactgttggcaccgaattcaacaatgaagtatatgcaactcttacaaaacataaattttaataatattctaatgcaaattactgaaccctcagtgcattaaaattatttcctaatttatgagcctcttagtttggaggttgcttgaagccacaaataaaactcaaatgagagtcagttctttgtcccactgtagtttgcattttgtttagtttggttttagctctactaaggtttcacatatgtggctattgccacattcctctactgttttctttctgatactggacatgctagtaacttggagaggagaataaaagaatgtctcctggaattttacattcccattaatgtcctcattcaattggcagacctaggatgtatggttaactctcaggccattatgtttttcatggctcatttcccaaactgcattgttggtaggtgccttgctaagctgtaatgcagtgaagaagatggtggggcatttttagtaattggaactgtaacattaatttacaagattgaaccggggatgtctggatgctgacaagggagagccaagtactgttaatgccatcaatcctctaggaaggaattggtggtttttctgaagtgtgggggaaagggtggtttcttgctggatttcatggccagtaagtaaatttaaatgcttcatttttaatttggatgtttctgctagagacctttgatttggaaattagttattttgcatgtttgtcaactgtatatgtatgaaaatagaaaaaaaacatgctttttgtaaaaacccctaagatttgtatatgttcatctttaggcttctgaaagggagagaaatcatattggaaatcagtgttggtgttctgaaatctgcttgtaaaactctcatctcattttacattgatattaaaacattttaacagtgttggctagctgattacttgattaattatactcccatggccccataggaagctgttgtgggcctctgttcaaaagcacagaaaagagcagaaggaaatgtcttagaaagaatcaaagctgatgaaatcagcaaagattgggggaaaggaaggaagcctggtgtagattggattatatttttcctttggggactagaatactagaagaacttcagtatatttttccctttatttttgaatactgtcatataataaattgagattaataaattactcatattacagttcttccatggcaa

SEQ ID NO: 426601 - DNA, 704 bp, Homo sapiens
actcccaggttaccgtgagacgaccttgacaagggagagccaagtactgttaatgccatcaatcctctaggaaggaattggtggtttttctgaagtgtgggggaaagggtggtttcttgctggatttcatggccagtaagtaaatttaaatgcttcatttttaatttggatgtttctgctagagacctttgatttggaaattagttattttgcatgtttgtcaactgtatatgtatgaaaatagaaaaaaaacatgctttttgtaaaaacccctaagatttgtatatgttcatctttaggcttctgaaagggagagaaatcatattggaaatcagtgttggtgttctgaaatctgcttgtaaaactctcatctcattttacattgatattaaaacattttaacagtgttggctagctgattacttgattaattatactcccatggccccataggaagctgttgtgggcctctgttcaaaagcacagaaaagagcagaaggaaatgtcttagaaagaatcaaagctgatgaaatcagcaaagattgggggaaaggaaggaagcctggtgtagattggattatatttttcctttggggactagaatactagaagaacttcagtatatttttccctttatttttgaatactgtcatataataaattgagattaataaattactcatattacagttcttccatggcaa

SEQ ID NO: 426602 - DNA, 2537 bp, Homo sapiens
gctaaaggaaaccaacagcggcctaggggtgaaaggacagccagggttagatgttctgaggaggcgggagcaaccgagagagcacgtgagcatctgtcctttctacccgttcctctttatctttagtgttcagtagcagcggggatagcccggggcccggtgtatggccacggagttacagtgtccggactccatgccctgtcacaaccagcaagtaaactctgcctcaaccccaagtcccgagcagctgcgacctggcgatctgatcctggaccacgcagggggaaacagagcctccagggccaaggtgattctcctcacggggtacgcccattctagcctgccggccgagctggactctggggcctgcggcggctccagcctcaactcagagggcaacagtggtagtggtgacagtagcagctatgacgcaccagctggcaactccttcctagaggactgcgaactctcccggcagatcggggcgcagcttaagctgctgcctatgaatgatcagatacgggagctacagaccatcatccgggacaagacagccagtagaggtgacttcatgttttctgcggatcgtttggttttgcctgaggatttattccaaaagagcatagacaactcctgttctgcttttcatcatcagacttgttgtggaagagggattgaatcagctgccatataaagaatgcatggtgaccactccaacagggtacaagtatgaaggagtgaaatttgagaagggaaattgtggggtcagcataatgagaagcggtgaggcaatggaacaaggtttacgagactgctgtcgatccatacgaattggaaagatcctgattcagagtgatgaggagacacaaagagccaaagtatattatgccaaattccccccagacatttaccggagaaaagtccttctgatgtatccaattctcagcactggaaatactgtaattgaagctgtaaaggttcttatagaacatggagttcaacccagtgttatcatcctactcagtctgttctccactcctcatggtgccaaatcaatcattcaggagtttccagagatcacaattttaactactgaagttcatcctgttgcacctacacattttggacagaaatactttggaacagactaagttatttaagtaaaataattgtcttatgtaatattacaatcatgttttgattttctatttgttttactgattcacttgagggtggcagagaaaaatgtgttaaaatgctttttagttttggaagtgggtatatttgaggttatatctcatttagttatttgtttactgttggcaccgaattcaacaatgaagtatatgcaactcttacaaaacataaattttaataatattctaatgcaaattactgaaccctcagtgcattaaaattatttcctaatttatgagcctcttagtttggaggttgcttgaagccacaaataaaactcaaatgagagtcagttctttgtcccactgtagtttgcattttgtttagtttggttttagctctactaaggtttcacatatgtggctattgccacattcctctactgttttctttctgatactggacatgctagtaacttggagaggagaataaaagaatgtctcctggaattttacattcccattaatgtcctcattcaattggcagacctaggatgtatggttaactctcaggccattatgtttttcatggctcatttcccaaactgcattgttggtaggtgccttgctaagctgtaatgcagtgaagaagatggtggggcatttttagtaattggaactgtaacattaatttacaagattgaaccggggatgtctggatgctgacaagggagagccaagtactgttaatgccatcaatcctctaggaaggaattggtggtttttctgaagtgtgggggaaagggtggtttcttgctggatttcatggccagtaagtaaatttaaatgcttcatttttaatttggatgtttctgctagagacctttgatttggaaattagttattttgcatgtttgtcaactgtatatgtatgaaaatagaaaaaaaacatgctttttgtaaaaacccctaagatttgtatatgttcatctttaggcttctgaaagggagagaaatcatattggaaatcagtgttggtgttctgaaatctgcttgtaaaactctcatctcattttacattgatattaaaacattttaacagtgttggctagctgattacttgattaattatactcccatggccccataggaagctgttgtgggcctctgttcaaaagcacagaaaagagcagaaggaaatgtcttagaaagaatcaaagctgatgaaatcagcaaagattgggggaaaggaaggaagcctggtgtagattggattatatttttcctttggggactagaatactagaagaacttcagtatatttttccctttatttttgaatactgtcatataataaattgagattaataaattactcatattacagttcttccatggcaa

SEQ ID NO: 426603 - DNA, 1984 bp, Homo sapiens
agtaaaagggctaagagacagtgttcttggccttggcaaactttggagattggggacagccagtagaggtgacttcatgttttctgcggatcgtttgatcagacttgttgtggaagagggattgaatcagctgccatataaagaatgcatggtgaccactccaacagggtacaagtatgaaggagtgaaatttgagaagggaaattgtggggtcagcataatgagaagcggtgaggcaatggaacaaggtttacgagactgctgtcgatccatacgaattggaaagatcctgattcagagtgatgaggagacacaaagagccaaagtatattatgccaaattccccccagacatttaccggagaaaagtccttctgatgtatccaattctcagcactggaaatactgtaattgaagctgtaaaggttcttatagaacatggagttcaacccagtgttatcatcctactcagtctgttctccactcctcatggtgccaaatcaatcattcaggagtttccagagatcacaattttaactactgaagttcatcctgttgcacctacacattttggacagaaatactttggaacagactaagttatttaagtaaaataattgtcttatgtaatattacaatcatgttttgattttctatttgttttactgattcacttgagggtggcagagaaaaatgtgttaaaatgctttttagttttggaagtgggtatatttgaggttatatctcatttagttatttgtttactgttggcaccgaattcaacaatgaagtatatgcaactcttacaaaacataaattttaataatattctaatgcaaattactgaaccctcagtgcattaaaattatttcctaatttatgagcctcttagtttggaggttgcttgaagccacaaataaaactcaaatgagagtcagttctttgtcccactgtagtttgcattttgtttagtttggttttagctctactaaggtttcacatatgtggctattgccacattcctctactgttttctttctgatactggacatgctagtaacttggagaggagaataaaagaatgtctcctggaattttacattcccattaatgtcctcattcaattggcagacctaggatgtatggttaactctcaggccattatgtttttcatggctcatttcccaaactgcattgttggtaggtgccttgctaagctgtaatgcagtgaagaagatggtggggcatttttagtaattggaactgtaacattaatttacaagattgaaccggggatgtctggatgctgacaagggagagccaagtactgttaatgccatcaatcctctaggaaggaattggtggtttttctgaagtgtgggggaaagggtggtttcttgctggatttcatggccagtaagtaaatttaaatgcttcatttttaatttggatgtttctgctagagacctttgatttggaaattagttattttgcatgtttgtcaactgtatatgtatgaaaatagaaaaaaaacatgctttttgtaaaaacccctaagatttgtatatgttcatctttaggcttctgaaagggagagaaatcatattggaaatcagtgttggtgttctgaaatctgcttgtaaaactctcatctcattttacattgatattaaaacattttaacagtgttggctagctgattacttgattaattatactcccatggccccataggaagctgttgtgggcctctgttcaaaagcacagaaaagagcagaaggaaatgtcttagaaagaatcaaagctgatgaaatcagcaaagattgggggaaaggaaggaagcctggtgtagattggattatatttttcctttggggactagaatactagaagaacttcagtatatttttccctttatttttgaatactgtcatataataaattgagattaataaattactcatattacagttcttccatggcaa

SEQ ID NO: 426604 - DNA, 1805 bp, Homo sapiens
aaattaaacaaaataaaaaatactctttagggggaaagtttctataactgaacaattatatttttcaacttgagtataaaataataattctaagaatgtattagtgagatggagggggcataatctgactactgtcaaagcttttcagactttatacaaaggaagagattaaccaagtctgattaggtatccaaagatcattgctctctgtcttctctcaattttagacctagtggcaataactacaaaattcctgaattacaactggtgttaccaaaacatcctaccataataacttttgtttttttgaaggtgccaaatcaatcattcaggagtttccagagatcacaattttaactactgaagttcatcctgttgcacctacacattttggacagaaatactttggaacagactaagttatttaagtaaaataattgtcttatgtaatattacaatcatgttttgattttctatttgttttactgattcacttgagggtggcagagaaaaatgtgttaaaatgctttttagttttggaagtgggtatatttgaggttatatctcatttagttatttgtttactgttggcaccgaattcaacaatgaagtatatgcaactcttacaaaacataaattttaataatattctaatgcaaattactgaaccctcagtgcattaaaattatttcctaatttatgagcctcttagtttggaggttgcttgaagccacaaataaaactcaaatgagagtcagttctttgtcccactgtagtttgcattttgtttagtttggttttagctctactaaggtttcacatatgtggctattgccacattcctctactgttttctttctgatactggacatgctagtaacttggagaggagaataaaagaatgtctcctggaattttacattcccattaatgtcctcattcaattggcagacctaggatgtatggttaactctcaggccattatgtttttcatggctcatttcccaaactgcattgttggtaggtgccttgctaagctgtaatgcagtgaagaagatggtggggcatttttagtaattggaactgtaacattaatttacaagattgaaccggggatgtctggatgctgacaagggagagccaagtactgttaatgccatcaatcctctaggaaggaattggtggtttttctgaagtgtgggggaaagggtggtttcttgctggatttcatggccagtaagtaaatttaaatgcttcatttttaatttggatgtttctgctagagacctttgatttggaaattagttattttgcatgtttgtcaactgtatatgtatgaaaatagaaaaaaaacatgctttttgtaaaaacccctaagatttgtatatgttcatctttaggcttctgaaagggagagaaatcatattggaaatcagtgttggtgttctgaaatctgcttgtaaaactctcatctcattttacattgatattaaaacattttaacagtgttggctagctgattacttgattaattatactcccatggccccataggaagctgttgtgggcctctgttcaaaagcacagaaaagagcagaaggaaatgtcttagaaagaatcaaagctgatgaaatcagcaaagattgggggaaaggaaggaagcctggtgtagattggattatatttttcctttggggactagaatactagaagaacttcagtatatttttccctttatttttgaatactgtcatataataaattgagattaataaattactcatattacagttcttccatggcaa

SEQ ID NO: 426605 - DNA, 2529 bp, Homo sapiens
gctaaaggaaaccaacagcggcctaggggtgaaaggacagccagggttagatgttctgaggaggcgggagcaaccgagagagcacgtgagcatctgtcctttctacccgttcctctttatctttagtgttcagtagcagcggggatagcccggggcccggtgtatggccacggagttacagtgtccggactccatgccctgtcacaaccagcaagtaaactctgcctcaaccccaagtcccgagcagctgcgacctggcgatctgatcctggaccacgcagggggaaacagagcctccagggccaaggtgattctcctcacggggtacgcccattctagcctgccggccgagctggactctggggcctgcggcggctccagcctcaactcagagggcaacagtggtagtggtgacagtagcagctatgacgcaccagctggcaactccttcctagaggactgcgaactctcccggcagatcggggcgcagcttaagctgctgcctatgaatgatcagatacgggagctacagaccatcatccgggacaagacagccagtagaggtgacttcatgttttctgcggatcgtttgatcagacttgttgtggaagagggattgaatcagctgccatataaagaatgcatggtgaccactccaacagggtacaagtatgaaggagtgaaatttgagaagggaaattgtggggtcagcataatgagaagcggtgaggcaatggaacaaggtttacgagactgctgtcgatccatacgaattggaaagatcctgattcagagtgatgaggagacacaaagagccaaagtatattatgccaaattccccccagacatttaccggagaaaagtccttctgatgtatccaattctcagcactggaaatactgtaattgaagctgtaaaggttcttatagaacatggagttcaacccagtgttatcatcctactcagtctgttctccactcctcatggtgagttcagcatgaggcagtaactagggctccatatagtcctgaggtgggtgccaaatcaatcattcaggagtttccagagatcacaattttaactactgaagttcatcctgttgcacctacacattttggacagaaatactttggaacagactaagttatttaagtaaaataattgtcttatgtaatattacaatcatgttttgattttctatttgttttactgattcacttgagggtggcagagaaaaatgtgttaaaatgctttttagttttggaagtgggtatatttgaggttatatctcatttagttatttgtttactgttggcaccgaattcaacaatgaagtatatgcaactcttacaaaacataaattttaataatattctaatgcaaattactgaaccctcagtgcattaaaattatttcctaatttatgagcctcttagtttggaggttgcttgaagccacaaataaaactcaaatgagagtcagttctttgtcccactgtagtttgcattttgtttagtttggttttagctctactaaggtttcacatatgtggctattgccacattcctctactgttttctttctgatactggacatgctagtaacttggagaggagaataaaagaatgtctcctggaattttacattcccattaatgtcctcattcaattggcagacctaggatgtatggttaactctcaggccattatgtttttcatggctcatttcccaaactgcattgttggtaggtgccttgctaagctgtaatgcagtgaagaagatggtggggcatttttagtaattggaactgtaacattaatttacaagattgaaccggggatgtctggatgctgacaagggagagccaagtactgttaatgccatcaatcctctaggaaggaattggtggtttttctgaagtgtgggggaaagggtggtttcttgctggatttcatggccagtaagtaaatttaaatgcttcatttttaatttggatgtttctgctagagacctttgatttggaaattagttattttgcatgtttgtcaactgtatatgtatgaaaatagaaaaaaaacatgctttttgtaaaaacccctaagatttgtatatgttcatctttaggcttctgaaagggagagaaatcatattggaaatcagtgttggtgttctgaaatctgcttgtaaaactctcatctcattttacattgatattaaaacattttaacagtgttggctagctgattacttgattaattatactcccatggccccataggaagctgttgtgggcctctgttcaaaagcacagaaaagagcagaaggaaatgtcttagaaagaatcaaagctgatgaaatcagcaaagattgggggaaaggaaggaagcctggtgtagattggattatatttttcctttggggactagaatactagaagaacttcagtatatttttccctttatttttgaatactgtcatataataaattgagattaataaattactcatattacagttcttccatggcaa

SEQ ID NO: 426606 - DNA, 2409 bp, Homo sapiens
gctaaaggaaaccaacagcggcctaggggtgaaaggacagccagggttagatgttctgaggaggcgggagcaaccgagagagcacgtgagcatctgtcctttctacccgttcctctttatctttagtgttcagtagcagcggggatagcccggggcccggtgtatggccacggagttacagtgtccggactccatgccctgtcacaaccagcaagtaaactctgcctcaaccccaagtcccgagcagctgcgacctggcgatctgatcctggaccacgcagggggaaacagagcctccagggccaaggtgattctcctcacggggtacgcccattctagcctgccggccgagctggactctggggcctgcggcggctccagcctcaactcagagggcaacagtggtagtggtgacagtagcagctatgacgcaccagctggcaactccttcctagaggactgcgaactctcccggcagatcggggcgcagcttaagctgctgcctatgaatgatcagatacgggagctacagaccatcatccgggacaagacagccagtagaggtgacttcatgttttctgcggatcgtttgggtacaagtatgaaggagtgaaatttgagaagggaaattgtggggtcagcataatgagaagcggtgaggcaatggaacaaggtttacgagactgctgtcgatccatacgaattggaaagatcctgattcagagtgatgaggagacacaaagagccaaagtatattatgccaaattccccccagacatttaccggagaaaagtccttctgatgtatccaattctcagcactggaaatactgtaattgaagctgtaaaggttcttatagaacatggagttcaacccagtgttatcatcctactcagtctgttctccactcctcatggtgccaaatcaatcattcaggagtttccagagatcacaattttaactactgaagttcatcctgttgcacctacacattttggacagaaatactttggaacagactaagttatttaagtaaaataattgtcttatgtaatattacaatcatgttttgattttctatttgttttactgattcacttgagggtggcagagaaaaatgtgttaaaatgctttttagttttggaagtgggtatatttgaggttatatctcatttagttatttgtttactgttggcaccgaattcaacaatgaagtatatgcaactcttacaaaacataaattttaataatattctaatgcaaattactgaaccctcagtgcattaaaattatttcctaatttatgagcctcttagtttggaggttgcttgaagccacaaataaaactcaaatgagagtcagttctttgtcccactgtagtttgcattttgtttagtttggttttagctctactaaggtttcacatatgtggctattgccacattcctctactgttttctttctgatactggacatgctagtaacttggagaggagaataaaagaatgtctcctggaattttacattcccattaatgtcctcattcaattggcagacctaggatgtatggttaactctcaggccattatgtttttcatggctcatttcccaaactgcattgttggtaggtgccttgctaagctgtaatgcagtgaagaagatggtggggcatttttagtaattggaactgtaacattaatttacaagattgaaccggggatgtctggatgctgacaagggagagccaagtactgttaatgccatcaatcctctaggaaggaattggtggtttttctgaagtgtgggggaaagggtggtttcttgctggatttcatggccagtaagtaaatttaaatgcttcatttttaatttggatgtttctgctagagacctttgatttggaaattagttattttgcatgtttgtcaactgtatatgtatgaaaatagaaaaaaaacatgctttttgtaaaaacccctaagatttgtatatgttcatctttaggcttctgaaagggagagaaatcatattggaaatcagtgttggtgttctgaaatctgcttgtaaaactctcatctcattttacattgatattaaaacattttaacagtgttggctagctgattacttgattaattatactcccatggccccataggaagctgttgtgggcctctgttcaaaagcacagaaaagagcagaaggaaatgtcttagaaagaatcaaagctgatgaaatcagcaaagattgggggaaaggaaggaagcctggtgtagattggattatatttttcctttggggactagaatactagaagaacttcagtatatttttccctttatttttgaatactgtcatataataaattgagattaataaattactcatattacagttcttccatggcaa

SEQ ID NO: 426607 - DNA, 453 bp, Homo sapiens
  misc_feature (79)..(79): n is a, c, g, or t
  misc_feature (100)..(100): n is a, c, g, or t
  misc_feature (116)..(116): n is a, c, g, or t
gcaaattcttgtgtgtgtttgcataggaaggtagatgccatctactaaaagaggggggtttgaagggccccttcaaaanaataaccagaaaattctcttntgtgtggggggggggnggtgtttttaaaaaaactcaacctatctggtgttttattttaatggataaaaatgtaatttttctaaggtagcaacttatttccaaattaatatagatgaaaaatagataccaattagactaaattgaaagctttttgttctatatttgcatagcctttgaaatatttcttagtgcctaggaggtctggggattcctctttcgtggtggtcactaaccttacttgatgcagataaaatcacttgtcaatgcaaaatgtgttagaacttgataaagctttgagtttgagaaataaaggtatatttaaaatttaaaaaaacttgtcatttatgctcatt

SEQ ID NO: 426608 - DNA, 3208 bp, Homo sapiens
aactgagtgacctgtggaactgctttagaatctaacctgctgtcttcgtgctctgtgtgaaggggaagctggggggttagcatgaagtctggccttgtgtgcattggagcttccaaggcactttgaaatcattccagtatatttgggaagaattgagtgaatgagaatgctcttccttattctggtagatttgacttgtttataattctgcactttagaagaaaaacagtgttaatctgtagttgaaagaaagcttagtagatgagagagttctaggctactgtggctttttccagtagatttagatgagattatgtgttttgaaatgttttgtgggatcccttagaaagcatcacttcagggcagagacactcaatattgccagccagcttgggttctaaagtgatttaatcaaattcatgctcctgatcttttttttcccccttcctttggctatgaaaacccaaagcccggagtgattgttttctccttgctttaagcagtgaagttatcctaatgcaaaagagcttagtagaaaatgagtggtttacctttttttctaaaagtatattttcaagtttattctggaatgtgatgtcttggtcctcttaaaagcagatcagccatgactgaaactcaaggcttagctggtatctatgttgtgctacattaggtgactagaagccacttcttagtgtaatcagctcctgtttccctgtgagccttagttatattttaattcagtggctttgagtcaaggccggttctaattgaggggacccagtgtgcttcagtgttaagagtggggcaatgaagagtgaaccccaatgaagagtgatcccaactttggaaactatctggtcattcatgaccttaaaaagctgccatggtggtcaaatggcatgtgtttgcacaaaaatgaccgatgtgtttaaccaaagctttgaaatgtgatgaagccaccaacataagcacttgcctaacagaaatcagtatttcttctacttagaaggcttggggcccagggtaatgaggcaccagatgaagataagatctgcatcaaggaattaaatttccagtttgtccttggggttctttctgcttatgttttttcccccccatctggtaatagtcctcttctgagaatgaaaggggcacagaaattgcgagaaagacccagtccccagtctttgccaccattgcaccatggttgtctcggtgtcccttcacctgacctttttagtcagctcagatctttttgtagtttgagaatagacctattcaagagctatcagggttaaaagctgcactgaccaaagctgtacttttaaaacacaacccctgggctagtgatgtctctacttgctctatgagccttttgccagcctcagaataggcgaggtaaccttgaatttcagggccctggaaactctagctgaaacctgcctttcctaatgctcacacaagcaccaggtaccctgagcttatactgagtccagtggttcctattttatgtgtgtgtgtatgtgtgtgtgttgagtaacatgaaacttggcagtagcagagagcactgaagttcacatgcaagttctaatctaaagttaagcagtctcttatttgtttcgggactctgatttgactctttttctgatgctttcggcatgtctgcagcctgttctcctagcctgctgcttggagtcaggttgagcatcagtgagatgaagacagtaccttttcctctcacattggcagaatagcacgcactagatgcctgaccttgagctctagtctcccctttaaatcttaccttggcagtaacacattattcctcattcaataatttcaatgctgaaactgaactctattactaatgccttccaatcagagttcctgatggggatgcctgtgggatggcccacacctgggggacctggcagatggggtgagttgggtaaggaagatgatgcttagttcctgatagatgctacagatgtagtttggcatttcagtttttgtccagtttgattttcactggggtttgagtcacagcaagctgtgtatgaacttgtgttttgtggtgacacattaataatcaaattgctaaaaccctgaatctgcttattcttcagcttcacctctgcactaaccccttacccttatggtacgtcaggattttaactagtactgctttgttgactttgggaaatggtgccactcaaaagcaacttcctaacttgaggaataactcctttgtagtttactttctggtactggttggtgccttgtattgggatacagctatattcttagctcaaatgtcctctttttgagagcaaagtagttatccaatggtgagacgagaccctgacgctcatagaggccattccttcctgggtgtcggaccagggctctgtgtcagggaaaaccttctgggtggactttgtaagaatccagtttccaaggttagattcacatccttaatcttgcagagactagaatttcacagctcgctttggaacatattccaattcaaccagttaaaatcagaggaccaagtcgtgggggaggggggcggtgttgaggagaggtatttttaaagatctggcaacttttcaggattatttgtggagaactctaaggttaagatcaggaaataaaagactgtgtgtgtgtgtgtgtgtgcgtgtgtgtgttcaagtgcctaaatcttgtttacctatcactttaaaaaaataattgaagtgtaagctaaataaaatgcttggagttttgcctgggctagtgagagttggtgcaaattcttgtgtgtgtttgcataggaaggtgagatgaccatctactaaagaggaagtagctaaatacagatctgtgggtgtttttaaaaaaactcaacctatctggtgttttattttaatggataaaaatgtaatttttctaaggtagcaacttatttccaaattaatatagatgaaaaatagataccaattagactaaattgaaagctttttgttctatatttgcatagcctttgaaatatttcttagtgcctaggaggtctggggattcctctttcgtggtggtcactaaccttacttgatgcagataaaatcacttgtcaatgcaaaatgtgttagaacttgataaagctttgagtttgagaaataaaggtatatttaaaatttaaaaaaacttgtcatttatgctcatt

SEQ ID NO: 426609 - DNA, 2308 bp, Homo sapiens
ttcgtggtgatgcaagtcggctctctcctccagcagttggatccctcccatctcacagtacctcacaggtctcttcccccgagcagtgcattgctggagcgaggagaagctcacgaatcagctgcaggtctctgttttgaaaaagcagagatacagaggcagaggaaaagggtggactcctatgtgacctgttcttagagcaagacaatcaccatctgaattccagaagccctgttcatggttggggatattttctcgactgcatggaatcagaaagaagcaaaaggatgggaaatgcctgcattcccctgaaaagaattgcttatttcctatgtctcttatctgcgcttttgctgactgaggggaagaaaccagcgaagccaaaatgccctgccgtgtgtacttgtaccaaagataatgctttatgtgagaatgccagatccattccacgcaccgttcctcctgatgttatctcattatcctttgtgagatctggttttactgaaatctcagaagggagttttttattcacgccatcgctgcagctcttgttattcacatcgaactcctttgatgtgatcagtgatgatgcttttattggtcttccacatctagagtatttattcatagaaaacaacaacatcaagtcaatttcaagacatactttccggggactaaagtcattaattcacttgagccttgcaaacaacaatctccagacactcccaaaagatattttcaaaggcctggattctttaacaaatgtggacctgaggggtaattcatttaattgtgactgtaaactgaaatggctagtggaatggcttggccacaccaatgcaactgttgaagacatctactgcgaaggccccccagaatacaagaagcgcaaaatcaatagtctctcctcgaaggatttcgattgcatcattacagaatttgcaaagtctcaagacctgccttatcaatcattgtccatagacactttttcttatttgaatgatgagtatgtagtcatcgctcagccttttactggaaaatgcattttccttgaatgggaccatgtggaaaagaccttccggaattatgacaacattacaggcacatccactgtagtatgcaagcctatagtcattgaaactcagctctatgttattgtggcccagctgtttggtggctctcacatctataagcgagacagttttgcaaataaattcataaaaatccaggatattgaaattctcaaaatccgaaaacccaatgacattgaaacattcaagattgaaaacaactggtactttgttgttgctgacagttcaaaagctggttttactaccatttacaaatggaacggaaacggattctactcccatcaatccttacacgcgtggtacagggacactgatgtggaatatctagaaatagtcagaacacctcagacactcagaacgcctcatttaattctgtctagtagttcccagcgtcctgtaatttatcagtggaacaaagcaacacaattattcactaaccaaactgacattcctaacatggaggatgtgtacgcagtgaagcacttctcagtgaaaggggacgtgtacatttgcttgacaagattcattggtgattccaaagtcatgaaatggggaggctcctcgttccaggatattcagaggatgccatcgcgaggatccatggtgttccagcctcttcaaataaataattaccaatatgcaattcttggaagtgattactcctttactcaagtgtataactgggatgcagagaaagccaaatttgtgaaatttcaggaattaaatgttcaggcaccaagatcattcacacatgtgtccattaataagcgtaattttctttttgcttccagttttaagggaaatacacagatttacaaacatgtcatagttgacttaagcgcatgagacaccaaattctgtggctgccatcagaaattttctacagtacatgacccggatgaactcaatgcatgatgactcttcttatcacacttgcaaatgaatgcctttcaaacattgagactgctagaaccaagcactaccagtatctccatccttaactgtccagtccagtgatgtgggaagttaccttttataagacaaaatttaattgtgtaactgttctttgcagtgaagatgtgtaaataagcgtttaatggtatctgttactccaaaaagaaatattaatatgtacttttccatttatttattcatgtgtacagaaacaactgccaaataaaatgtttacattttctttcatatcccagaggtaatta

SEQ ID NO: 426610 - DNA, 631 bp, Homo sapiens
ttcgtggtgatgcaagtcggctctctcctccagcagttggatccctcccatctcacagtacctcacaggtctcttcccccgagcagtgcattgctggagcgaggagaagctcacgaatcagctgcaggtctctgttttgaaaaagcagagatacagaggcagaggaaaagggtggactcctatgtgacctgttcttagagcaagacaatcaccatctgaattccagaagccctgttcatggttggggatattttctcgactgcatggaatcagaaagaagcaaaaggatgggaaatgcctgcattcccctgaaaagaattgcttatttcctatgtctcttatctgcgcttttgctgactgaggggaagaaaccagcgaagccaaaatgccctgccgtgtgtacttgtaccaaagataatgctttatgtgagaatgccagatccattccacgcaccgttcctcctgatgttatctcattatcctttgtgagatctggttttactgaaatctcagaagggagttttttattcacgccatcgctgcagctcttgtgagaaatatttatatcatgactatttttaatatggcatatatttggataagccttctagtaaaatgatctcaatattaa

SEQ ID NO: 426611 - DNA, 1960 bp, Homo sapiens
accccttgatgagcctttgatgaggagatgattaggagtaaaaaaatgctgcatagattatctgcataactaacactgtagcagacagccatgcagacatttttctgtatacaactcccactcatttttctgagagataaaagcagccaagattgacaatctgtcagtttcaccattttcattgtgtactttttctgggcaggttattcacatcgaactcctttgatgtgatcagtgatgatgcttttattggtcttccacatctagagtatttattcatagaaaacaacaacatcaagtcaatttcaagacatactttccggggactaaagtcattaattcacttgagccttgcaaacaacaatctccagacactcccaaaagatattttcaaaggcctggattctttaacaaatgtggacctgaggggtaattcatttaattgtgactgtaaactgaaatggctagtggaatggcttggccacaccaatgcaactgttgaagacatctactgcgaaggccccccagaatacaagaagcgcaaaatcaatagtctctcctcgaaggatttcgattgcatcattacagaatttgcaaagtctcaagacctgccttatcaatcattgtccatagacactttttcttatttgaatgatgagtatgtagtcatcgctcagccttttactggaaaatgcattttccttgaatgggaccatgtggaaaagaccttccggaattatgacaacattacaggcacatccactgtagtatgcaagcctatagtcattgaaactcagctctatgttattgtggcccagctgtttggtggctctcacatctataagcgagacagttttgcaaataaattcataaaaatccaggatattgaaattctcaaaatccgaaaacccaatgacattgaaacattcaagattgaaaacaactggtactttgttgttgctgacagttcaaaagctggttttactaccatttacaaatggaacggaaacggattctactcccatcaatccttacacgcgtggtacagggacactgatgtggaatatctagaaatagtcagaacacctcagacactcagaacgcctcatttaattctgtctagtagttcccagcgtcctgtaatttatcagtggaacaaagcaacacaattattcactaaccaaactgacattcctaacatggaggatgtgtacgcagtgaagcacttctcagtgaaaggggacgtgtacatttgcttgacaagattcattggtgattccaaagtcatgaaatggggaggctcctcgttccaggatattcagaggatgccatcgcgaggatccatggtgttccagcctcttcaaataaataattaccaatatgcaattcttggaagtgattactcctttactcaagtgtataactgggatgcagagaaagccaaatttgtgaaatttcaggaattaaatgttcaggcaccaagatcattcacacatgtgtccattaataagcgtaattttctttttgcttccagttttaagggaaatacacagatttacaaacatgtcatagttgacttaagcgcatgagacaccaaattctgtggctgccatcagaaattttctacagtacatgacccggatgaactcaatgcatgatgactcttcttatcacacttgcaaatgaatgcctttcaaacattgagactgctagaaccaagcactaccagtatctccatccttaactgtccagtccagtgatgtgggaagttaccttttataagacaaaatttaattgtgtaactgttctttgcagtgaagatgtgtaaataagcgtttaatggtatctgttactccaaaaagaaatattaatatgtacttttccatttatttattcatgtgtacagaaacaactgccaaataaaatgtttacattttctttcatatcccagaggtaatta

SEQ ID NO: 426612 - DNA, 898 bp, Homo sapiens
ttcgtggtgatgcaagtcggctctctcctccagcagttggatccctcccatctcacagtacctcacaggtctcttcccccgagcagtgcattgctggagcgaggagaagctcacgaatcagctgcaggtctctgttttgaaaaagcagagatacagaggcagaggaaaagggtggactcctatgtgacctgttcttagagcaagacaatcaccatctgaattccagaagccctgttcatggttggggatattttctcgactgcatggaatcagaaagaagcaaaaggatgggaaatgcctgcattcccctgaaaagaattgcttatttcctatgtctcttatctgcgcttttgctgactgaggggaagaaaccagcgaagccaaaatgccctgccgtgtgtacttgtaccaaagataatgctttatgtgagaatgccagatccattccacgcaccgttcctcctgatgttatctcattatcctttgtgagatctggttttactgaaatctcagaagggagttttttattcacgccatcgctgcagctcttgttattcacatcgaactcctttgatgtgatcagtgatgatgcttttattggtcttccacatctagagtatttattcatagaaaacaacaacatcaagtcaatttcaagacatactttccggggactaaagtcattaattcacttctctgctctaggccctaggatgcagcagggaacaaaggagacaaaaatgcctgtccttggactgagcctgatttccagtgtgtccacgcggttgtcactctgcctccaccaggcccctttctctcctgttgcttgttttgtagcaaagagaagctaatagccagatatattttacaaaatcatgcctttcaaggcttctgtata

SEQ ID NO: 426613 - DNA, 427 bp, Homo sapiens
ttgacagcacagccctagactaagccgctttggaattcaagagggagtaagtgatgaggttccattgactgggtagtcttcaagtgtgcatggtgctaactctctgagcccaaagtgaatgagtggtcagtcaggttccaggcaggttatagggcaggatgcaacgccgggtaaggtcattctgcacatgttaattgttgatgtagaactctttcctgcgtgggtagggcccttgtacagcaaaagcagctgaagtttgtctttcagggacctgaggggtaattcatttaattgtgactgtaaactgaaatggctagtggaatggcttggccacaccaatgcaactgttgaagacatctactgcgaaggccccccagaatacaagaagcgcaaaatcaatagtctctcctcgaaggatttcgattgc

SEQ ID NO: 426614 - DNA, 469 bp, Homo sapiens
aaggcacggaactttaggacactgctgccattgggctttggagaccagccttgcctaatcaaccaaggagatctcttgtttcaggctgatttgggtggaagttgtatggccccagcccgcatgtttacatgctccaaaagaggatggccacacaactaatctctcctttgtcttttcccaggcacatccactgtagtatgcaagcctatagtcattgaaactcagctctatgttattgtggcccagctgtttggtggctctcacatctataagcgagacagttttgcaaataaattcataaaaatccaggatattgaaattctcaaaatccgaaaacccaatgacattgaaacattcaagattgaaaacaactggtactttgttgttgctgacagttcaaaagctggttttactaccatttacaaatggaacggaaacggattctactcccatcaatccttacacgcgt

SEQ ID NO: 426615 - DNA, 414 bp, Homo sapiens
tccagttttaagggaaatacacagatttacaaacatgtcatagttgacttaagcgcatgagacaccaaattctgtggctgccatcagaaattttctacagtacatgacccggatgaactcaatgcatgatgactcttcttatcacacttgcaaatgaatgcctttcaaacattgagactgctagaaccaagcactaccagtatctccatccttaactgtccagtccagtgatgtgggaagttaccttttataagacaaaatttaattgtgtaactgttctttgcagtgaagatgtgtaaataagcgtttaatggtatctgttactccaaaaagaaatattaatatgtacttttccatttatttattcatgtgtacagaaacaactgccaaataaaatgtttacattttctttca

SEQ ID NO: 426616 - DNA, 1527 bp, Homo sapiens
ttcgtggtgatgcaagtcggctctctcctccagcagttggatccctcccatctcacagtacctcacaggtctcttcccccgagcagtgcattgctggagcgaggagaagctcacgaatcagctgcaggtctctgttttgaaaaagcagagatacagaggcagaggaaaagggtggactcctatgtgacctgttcttagagcaagacaatcaccatctgaattccagaagccctgttcatggttggggatattttctcgactgcatggaatcagaaagaagcaaaaggatgggaaatgcctgcattcccctgaaaagaattgcttatttcctatgtctcttatctgcgcttttgctgactgaggggaagaaaccagcgaagccaaaatgccctgccgtgtgtacttgtaccaaagataatgctttatgtgagaatgccagatccattccacgcaccgttcctcctgatgttatctcattatcctttgtgagatctggttttactgaaatctcagaagggagttttttattcacgccatcgctgcagctcttgttattcacatcgaactcctttgatgtgatcagtgatgatgcttttattggtcttccacatctagagtatttattcatagaaaacaacaacatcaagtcaatttcaagacatactttccggggactaaagtcattaattcacttgagccttgcaaacaacaatctccagacactcccaaaagatattttcaaaggcctggattctttaacaaatgtggacctgaggggtaattcatttaattgtgactgtaaactgaaatggctagtggaatggcttggccacaccaatgcaactgttgaagacatctactgcgaaggccccccagaatacaagaagcgcaaaatcaatagtctctcctcgaaggatttcgattgcatcattacagaatttgcaaagtctcaagacctgccttatcaatcattgtccatagacactttttcttatttgaatgatgagtatgtagtcatcgctcagccttttactggaaaatgcattttccttgaatgggaccatgtggaaaagaccttccggaattatgacaacattacagttttaagggaaatacacagatttacaaacatgtcatagttgacttaagcgcatgagacaccaaattctgtggctgccatcagaaattttctacagtacatgacccggatgaactcaatgcatgatgactcttcttatcacacttgcaaatgaatgcctttcaaacattgagactgctagaaccaagcactaccagtatctccatccttaactgtccagtccagtgatgtgggaagttaccttttataagacaaaatttaattgtgtaactgttctttgcagtgaagatgtgtaaataagcgtttaatggtatctgttactccaaaaagaaatattaatatgtacttttccatttatttattcatgtgtacagaaacaactgccaaataaaatgtttacattttctttcatatcccagaggtaatta

SEQ ID NO: 426617 - DNA, 2090 bp, Homo sapiens
taaatccaaaatcttatctgagtctcaccaactcaaaagtctcaaatctcacattgaagccatctaaattaagtttgggagaggatctgtgtgtgatttctgggacataattccaactgtgcacttgtgaacctagaaaacaagttatctgttcccaagtatgatggcatgacaggcagacaataatagttacacacgttcctgttcaaaaagcagaaacagatggaaaaaggagccatcagcaccaatcaatttacaaaaccagcgaggcacccttctttaagtttcaaggcctgggagtaatcttcagctcactgctgttctctgggcttgttgactgtctcagagtcatctttactttttcacaaaaggtagcacacgtttgcagctgagtatcaacttatcagttgttcttcttttatattctctaaagctttctgttaaaaatggtggtgcttctgctgctataacgttgtcaagaaacttgtgggtcttttacatatgtcacagggatgcactcatttagataggaggctcctcacgtatctttcctggaaaatcctgtctctgtttttggctttttctgaaatagctgagaggatctatgattcacacccttaatatcttcaaagagtcttgtgtgtgacctgatattcagaccttttgatgtttctgaagtattagcaaaaggttatacagccatatcttcatcactttctctagagtaaaggctgtcctgacggtgaatcttagttttagtggcttttgccatttgaataggccgcgaatttcccaaatcatcaagtcctggtttctttatatttaacaggtcttccctcaatctacctctttccacattttactataatcagcaagaagacagcaggctgtaccttccacagcttgcttggaaatatcctcagctaaatattgaagtcatcacttaaaagttctgctttacacataacggcaggacacaactcagcttagcttttcgccactatgtaacaaggactcctttcctccacttctccagtaacatattcctcattttttaccaacagtctattcatgatgatttagatattctatggcaatcgaggtattctctattatgctcctttcttcaaggccgccctagcattaacattccatatttctactaacagtctgtttaaggcagtttagcttcttttctggcatgctcctcagaattcttccagcctccacctactgcccaattccagagccacttttctacttttaggtatttgttacagcagcacctcaagtacctagaaaactcttttatgcctgcttctctgccagatgacttgaatatggtactagatttggaattcacctttctccagggtcactgtttatttcaaagaggtgaatttacctgtgctagggttttcacactgggagtgctaccagaactaccacaggatgaaagtggtgagcccaccactgcagagaagttttctcagtgccgtaatatagaggaattctcaaaataagccctactccttttcacttactgaaaacaacttggataatgtgtaacagccagccccatttcaaaaagattaccaggggtaaaacaactttttcatgggtcaaaatcatcttccgaagaaaatgatttcttaaaagaattgaacattgtaaatcaaagggcattgtcctgttttggattaacaaaacaggaaaaataaccaatccttgtaaaattatttgaaattttcttgtttttatcagttgagtgcctatagatgcacatacaaaaacaactgccatttttgtatataatagtcttccaagatagagatttacattaggagagaattaaacatccaggagggatgaacagtatttcatgtgtgctatgtagtgttttgcttcattgagagtcattttcatgaattatttttactactgcagtcatcttaaatttataatcatctcaaaaaagatgtcacaatgaacagacaaccatctgtgaggtcagtcattttgcatgatgtatgtaatcaaaaagtttgaaatgtctgcttactaataaagaatgttttcactgaaactta

SEQ ID NO: 426618 - DNA, 2722 bp, Homo sapiens
taaatccaaaatcttatctgagtctcaccaactcaaaagtctcaaatctcacattgaagccatctaaattaagtttgggagaggatctgtgtgtgatttctgggacataattccaactgtgcacttgtgaacctagaaaacaagttatctgttcccaagtatgatggcatgacaggcagacaataatagttacacacgttcctgttcaaaaagcagaaacagatggaaaaaggagccatcagcaccaatcaatttacaaaaccagcgaggcacccttctttaagtttcaaggcctgggagtaatcttcagctcactgctgttctctgggcttgttgactgtctcagagtcatctttactttttcacaaaaggtagcacacgtttgcagctgagtatcaacttatcagttgttcttcttttatattctctaaagctttctgttaaaaatggtggtgcttctgctgctataacgttgtcaagaaacttgtgggtcttttacatatgtcacagggatgcactcatttagataggaggctcctcacgtatctttcctggaaaatcctgtctctgtttttggctttttctgaaatagctgagaggatctatgattcacacccttaatatcttcaaagagtcttgtgtgtgacctgatattcagaccttttgatgtttctgaagtattagcaaaaggttatacagccatatcttcatcactttctctagagtaaaggctgtcctgacggtgaatcttagttttagtggcttttgccatttgaataggccgcgaatttcccaaatcatcaagtcctggtttctttatatttaacaggtcttccctcaatctacctctttccacattttactataatcagcaagaagacagcaggctgtaccttccacagcttgcttggaaatatcctcagctaaatattgaagtcatcacttaaaagttctgctttacacataacggcaggacacaactcagcttagcttttcgccactatgtaacaaggactcctttcctccacttctccagtaacatattcctcattttttaccaacagtctattcatgatgatttagatattctatggcaatcgaggtattctctattatgctcctttcttcaaggccgccctagcattaacattccatatttctactaacagtctgtttaaggcagtttagcttcttttctggcatgctcctcagaattcttccagcctccacctactgcccaattccagagccacttttctacttttaggtatttgttacagcagcacctcaagtacctagaaaactcttttatgcctgcttctctgccagatgacttgaatatggtactagatttggaattcacctttctccagggtcactgtttatttcaaagaggtgaatttacctgtgctagggttttcacactgggagtgctaccagaactaccacaggatgaaagtggtgagcccaccactgcagagaagttttctcagtgccgtaatatagaggaattctcaaaataagccctactccttttcacttactgaaaacaacttggataatgtgtaacagccagccccatttcaaaaagattaccaggggtaaaacaactttttcatgggtcaaaatcatcttccgaagaaaatgatttcttaaaagaattgaacattgtaaatcaaagggcattgtcctgttttggattaacaaaacaggaaaaataaccaatccttgtaaaattatttgaaattttcttgtttttatcagttgagtgcctatagatgcacatacaaaaacaactgccatttttgtatataatagtcttccaagatagagatttacattaggagagaattaaacatccaggagggatgaacagtatttcatgtgtgctatgtagtgttttgcttcattgagagtcattttcatgaattatttttactactgcagtcatcttaaatttataatcatctcaaaaaagatgtcacaatgaacagacaaccatctgtgaggtcagtcattttgcatgatgtatgtaatcaaaaagtttgaaatgtctgcttactaataaagaatgttttcactgaaacttattggaaaggtttttcaaattttctttgatttgtagttttgagtcctgaatagattgttttaacatgaataacatttcctgtggtttaatttcccttggcgcacctttgtcagggacagggaaggaactggttgtagcatattatctgaatatcctgttactgtttctgtttttattctacccaaataaaaaggttcaggtgcttcttttttgccacaatggatttctgaaaaccttgtcacaactgtgaaaggaaagcaaatcttgggaccccagaatcactaagctaaagggaaaagtcaagctggaaactgcttagtgcaaacctgcctcccattcattctattcagttatctctgctcactgagataaaggcctgtctgattgcctcctttggaagggctcatcagaaactcaaaagaatgcaaccatttgtctcttacctacctgtgccctggaagtcctctcccacacttcgagttgtcctacctttccatattgatccaatgtccatcttacatatattgattgatgtcttatgtctccctaaaatgtataaaaccaagctgtgccccaaccaccttgggctcatgtcatcaggacgtcctgaggctgtgtcacacctgtgcatcc

SEQ ID NO: 426619 - DNA, 1679 bp, Homo sapiens
ctgcttctgataagggagacgtatgagctgagatctaggtcgagaagtgatgtatgattcttgagccctttaatctctacaaaggagtgtagtgatgagaccgtggacttagtgtggacgaggctggtggcatgtagctcgtacggtttaatcccggggtaatgcatggctatgtattcataaggagctctgacgaaatatgcgcgaatgatcctaggaacaggatcatcgtcgtgtactatttagtggggtatgtctgcacaaactataggagaggtagcgtggcccgagaaatctctcgcgcaaaaaaatctactcacaatcctctggagtgtactgtataatcctatatgagagcgacgagtcctctccacatcaactgttagcatctatgtgccagagtgtatgtggctatatctccagcgaaggtactcagagaggggagcgagctacgcttacccaaatgcttgcctgtgcgtgcatccttccatctgcgatagaagtattgtaaactctcttgacgtatcatagagaagttgcttgttgttacagataacggcaggacacaactcagcttagcttttcgccactatgtaacaaggactcctttcctccacttctccagtaacatattcctcattttttaccaacagtctattcatgatgatttagatattctatggcaatcgaggtattctctattatgctcctttcttcaaggccgccctagcattaacattccatatttctactaacagtctgtttaaggcagtttagcttcttttctggcatgctcctcagaattcttccagcctccacctactgcccaattccagagccacttttctacttttaggtatttgttacagcagcacctcaagtacctagaaaactcttttatgcctgcttctctgccagatgacttgaatatggtactagatttggaattcacctttctccagggtcactgtttatttcaaagaggtgaatttacctgtgctagggttttcacactgggagtgctaccagaactaccacaggatgaaagtggtgagcccaccactgcagagaagttttctcagtgccgtaatatagaggaattctcaaaataagccctactccttttcacttactgaaaacaacttggataatgtgtaacagccagccccatttcaaaaagattaccaggggtaaaacaactttttcatgggtcaaaatcatcttccgaagaaaatgatttcttaaaagaattgaacattgtaaatcaaagggcattgtcctgttttggattaacaaaacaggaaaaataaccaatccttgtaaaattatttgaaattttcttgtttttatcagttgagtgcctatagatgcacatacaaaaacaactgccatttttgtatataatagtcttccaagatagagatttacattaggagagaattaaacatccaggagggatgaacagtatttcatgtgtgctatgtagtgttttgcttcattgagagtcattttcatgaattatttttactactgcagtcatcttaaatttataatcatctcaaaaaagatgtcacaatgaacagacaaccatctgtgaggtcagtcattttgcatgatgtatgtaatcaaaaagtttgaaatgtctgcttactaataaagaatgttttcactgaaactta

SEQ ID NO: 426620 - DNA, 1042 bp, Homo sapiens
accctgggtaacagaatgagtgagactctgtctaaaaaaaacaaaagaggaagaagaaagaaacaacagactgacggtggtgctaacgtaatgactgattgactgtattacaaggcgcagatgctgacagtctaatcaggtctgacaggaagtgggccacaaattggacactacaaaaaagagtctctagtcttctgcttctggccaacaagaattaactgctcttggaatttccctcttcaagtacctagaaaactcttttatgcctgcttctctgccagatgacttgaatatggtactagatttggaattcacctttctccagggtcactgtttatttcaaagaggtgaatttacctgtgctagggttttcacactgggagtgctaccagaactaccacaggatgaaagtggtgagcccaccactgcagagaagttttctcagtgccgtaatatagaggaattctcaaaataagccctactccttttcacttactgaaaacaacttggataatgtgtaacagccagccccatttcaaaaagattaccaggggtaaaacaactttttcatgggtcaaaatcatcttccgaagaaaatgatttcttaaaagaattgaacattgtaaatcaaagggcattgtcctgttttggattaacaaaacaggaaaaataaccaatccttgtaaaattatttgaaattttcttgtttttatcagttgagtgcctatagatgcacatacaaaaacaactgccatttttgtatataatagtcttccaagatagagatttacattaggagagaattaaacatccaggagggatgaacagtatttcatgtgtgctatgtagtgttttgcttcattgagagtcattttcatgaattatttttactactgcagtcatcttaaatttataatcatctcaaaaaagatgtcacaatgaacagacaaccatctgtgaggtcagtcattttgcatgatgtatgtaatcaaaaagtttgaaatgtctgcttactaataaagaatgttttcactgaaactta

SEQ ID NO: 426621 - DNA, 3318 bp, Homo sapiens
ttttgtccacttcactccagtagccaatcttccggggcccattagttttgagctcaaggatccttaattaaattaatccccccccccccggccacttcagtggatcccgcgccggggccgcgggcggagctgcctgccggtcccgcgccgcgcgtccgcactcctcggccctcgggcggtcgatgggacggggcgccgcggagcaggaggcggcgcccgtcggggtgctcgggccgcgcgggagcccactgtggggctcgggcatggcgggccgcaggacctgagctctcctcaggggagcggggaggcagctgctggccggcgatggggacggagtggggccgtcgccgccgcgccgagccgtgagcgccgagccaccgccgccgctacctcagcccttcgcgaagcgccgggcagctcgggaacatggccctggagcggctctgctcggtcctcaaagtgttgttaataacagtactggtagtggaagggattgccgtggcccaaaaaacccaagatggacaaaatattggaatcaagcatattcctgcaacccagtgtggcatttgggttcgaaccagcaatggaggtcattttgcttcgccaaattatcctgactcatatccaccaaacaaggagtgtatctacattttggaagctgctccacgtcaaagaatagagttgacctttgatgaacattattatatagaaccatcatttgagtgtcggtttgatcacttggaagttcgagatgggccatttggtttctctcctcttatagatcgttactgtggcgtgaaaagccctccattaattagatcaacagggagattcatgtggattaagtttagttctgatgaagagcttgaaggactgggatttcgagcaaaatattcatttattccagatccagactttacttacctaggaggtattttaaatcccattccagattgtcagttcgagctctcgggagctgatggaatagtgcgctctagtcaggtagaacaagaggagaaaacaaaaccaggccaagccgttgattgcatctggaccattaaagccactccaaaagctaagatttatttgaggttcctagattatcaaatggagcactcaaatgaatgcaagagaaacttcgttgcagtctatgatggaagcagttctattgaaaacctgaaggccaagttttgcagcactgtggccaatgatgtaatgcttaaaacaggaattggagtgattcgaatgtgggcagatgaaggtagtcggcttagcaggtttcgaatgctctttacttcctttgtggagcaaaagaaaaaagcaggagtatttgaacaaatcactaagactcatggaacaattattggcattacttcagggattgtcttggtccttctcattatttctattttagtacaagtgaaacagcctcgaaaaaaggtcatggcttgcaaaaccgcttttaataaaaccgggttccaagaagtgtttgatcctcctcattatgaactgttttcactaagggacaaagagatttctgcagacctggcagacttgtcggaagaattggacaactaccagaagatgcggcgctcctccaccgcctcccgctgcatccacgaccaccactgtgggtcgcaggcctccagcgtcaaacaaagcaggaccaacctcagttccatggaacttcctttccgaaatgactttgcacaaccacagccaatgaaaacatttaatagcaccttcaagaaaagtagttacactttcaaacagggacatgagtgccctgagcaggccctggaagaccgagtaatggaggagattccctgtgaaatttatgtcagggggcgagaagattctgcacaagcatccatatccattgacttctaatcttctgctaatggtgatgtgaattcttagggtgtgtacgtacgcagcctccagggcaccatactgtttccagcagccaacccttttctcccatcacaactacgaagaccttgatttaccgttaacctattgtatggtgatgtttttattctctcaggcagtctatatatgttaaaccaatcaaggaacttactctattcagtggaaacaataatcatctctattgcttggtgtcatttataggaagcactgccagttaaagagcattagaagaggtggttggatggagccaggctcaggctgcctcttcgttttagcaacaagaagactgctcttgactgataacagctctgtcaatattttgatgccacaataaacttgatttttctttacattccttttatttttcctttctctaaatttaatttgttttataagcctatcgttttaccatttcattttcttacataagtacaagtggttaatgtaccacatacttcagtataggcatttgttcttgagtgtgtcaaaatacagctagttactgtgccaattaagacccagttgtatttcacccatctgtttcttcttggctaatctctgtacttctgccttttaattactgggcccttattccttattttctgtgagaaataatagatgatatgatttattacctttcaattatatttttctcagttatactagaaaatttcataatcctgggatatatgtaccattgtcagctatgactaaaaatttgaaaaagataaaaatttctagcaagcctttgaagtttaccaagtatagtcacattcagtgacagcccattcattccagtaaagaatcatttcattcactttgggagaggcctataattacatttatttgcaatgtttctcttcgctagattgttacatagctcccattctgttggttttgcttacagcatatggtaaccaaggttagatgccagttaaaattccttagaaattggatgagccttgagattgcttcttaactgggacatgacatttttctagctcttatcaagaataacaacttccacttttttttaaactgcacttttgactttttttatggtataaaaacaataatttataaacataaaagctcattgtgttttttagacttttgatattatttgatactgtacaaactttattaaatcaagatgaaagacctacaggacagattcctttcagtgttcacatcagtggctttgtatgcaaatatgctgtgttggacctggacgctataacttattgtaaagaccttggaaatgtggacataagctctttctttccttttgttactgtatttagtttgtgataaatttttcactgtgtgatatttatgctctaaatcactacacaaatcccatattaaaatatacattgtacctga

SEQ ID NO: 426622 - DNA, 3411 bp, Homo sapiens
ttttgtccacttcactccagtagccaatcttccggggcccattagttttgagctcaaggatccttaattaaattaatccccccccccccggccacttcagtggatcccgcgccggggccgcgggcggagctgcctgccggtcccgcgccgcgcgtccgcactcctcggccctcgggcggtcgatgggacggggcgccgcggagcaggaggcggcgcccgtcggggtgctcgggccgcgcgggagcccactgtggggctcgggcatggcgggccgcaggacctgagctctcctcaggggagcggggaggcagctgctggccggcgatggggacggagtggggccgtcgccgccgcgccgagccgtgagcgccgagccaccgccgccgctacctcagcccttcgcgaagcgccgggcagctcgggaacatggccctggagcggctctgctcggtcctcaaagtgttgttaataacagtactggtagtggaagggattgccgtggcccaaaaaacccaagatggacaaaatattggaatcaagcatattcctgcaacccagtgtggcatttgggttcgaaccagcaatggaggtcattttgcttcgccaaattatcctgactcatatccaccaaacaaggagtgtatctacattttggaagctgctccacgtcaaagaatagagttgacctttgatgaacattattatatagaaccatcatttgagtgtcggtttgatcacttggaagttcgagatgggccatttggtttctctcctcttatagatcgttactgtggcgtgaaaagccctccattaattagatcaacagggagattcatgtggattaagtttagttctgatgaagagcttgaaggactgggatttcgagcaaaatattcatttattccagatccagactttacttacctaggagattgtcagttcgagctctcgggagctgatggaatagtgcgctctagtcaggtagaacaagaggagaaaacaaaaccaggccaagccgttgattgcatctggaccattaaagccactccaaaagctaagatttatttgaggttcctagattatcaaatggagcactcaaatgaatgcaagagaaacttcgttgcagtctatgatggaagcagttctattgaaaacctgaaggccaagttttgcagcactgtggccaatgatgtaatgcttaaaacaggaattggagtgattcgaatgtgggcagatgaaggtagtcggcttagcaggtttcgaatgctctttacttcctttgtggagcctccctgcacaagcagcactttcttttgccatagcaacatgtgcatcaataattctttagtctgtaatggtgtccaaaattgtgcatacccttgggatgaaaatcattgtaaagaaaagaaaaaagcaggagtatttgaacaaatcactaagactcatggaacaattattggcattacttcagggattgtcttggtccttctcattatttctattttagtacaagtgaaacagcctcgaaaaaaggtcatggcttgcaaaaccgcttttaataaaaccgggttccaagaagtgtttgatcctcctcattatgaactgttttcactaagggacaaagagatttctgcagacctggcagacttgtcggaagaattggacaactaccagaagatgcggcgctcctccaccgcctcccgctgcatccacgaccaccactgtgggtcgcaggcctccagcgtcaaacaaagcaggaccaacctcagttccatggaacttcctttccgaaatgactttgcacaaccacagccaatgaaaacatttaatagcaccttcaagaaaagtagttacactttcaaacagggacatgagtgccctgagcaggccctggaagaccgagtaatggaggagattccctgtgaaatttatgtcagggggcgagaagattctgcacaagcatccatatccattgacttctaatcttctgctaatggtgatgtgaattcttagggtgtgtacgtacgcagcctccagggcaccatactgtttccagcagccaacccttttctcccatcacaactacgaagaccttgatttaccgttaacctattgtatggtgatgtttttattctctcaggcagtctatatatgttaaaccaatcaaggaacttactctattcagtggaaacaataatcatctctattgcttggtgtcatttataggaagcactgccagttaaagagcattagaagaggtggttggatggagccaggctcaggctgcctcttcgttttagcaacaagaagactgctcttgactgataacagctctgtcaatattttgatgccacaataaacttgatttttctttacattccttttatttttcctttctctaaatttaatttgttttataagcctatcgttttaccatttcattttcttacataagtacaagtggttaatgtaccacatacttcagtataggcatttgttcttgagtgtgtcaaaatacagctagttactgtgccaattaagacccagttgtatttcacccatctgtttcttcttggctaatctctgtacttctgccttttaattactgggcccttattccttattttctgtgagaaataatagatgatatgatttattacctttcaattatatttttctcagttatactagaaaatttcataatcctgggatatatgtaccattgtcagctatgactaaaaatttgaaaaagataaaaatttctagcaagcctttgaagtttaccaagtatagtcacattcagtgacagcccattcattccagtaaagaatcatttcattcactttgggagaggcctataattacatttatttgcaatgtttctcttcgctagattgttacatagctcccattctgttggttttgcttacagcatatggtaaccaaggttagatgccagttaaaattccttagaaattggatgagccttgagattgcttcttaactgggacatgacatttttctagctcttatcaagaataacaacttccacttttttttaaactgcacttttgactttttttatggtataaaaacaataatttataaacataaaagctcattgtgttttttagacttttgatattatttgatactgtacaaactttattaaatcaagatgaaagacctacaggacagattcctttcagtgttcacatcagtggctttgtatgcaaatatgctgtgttggacctggacgctataacttattgtaaagaccttggaaatgtggacataagctctttctttccttttgttactgtatttagtttgtgataaatttttcactgtgtgatatttatgctctaaatcactacacaaatcccatattaaaatatacattgtacctga

SEQ ID NO: 426623 - DNA, 2396 bp, Homo sapiens
ttttgtccacttcactccagtagccaatcttccggggcccattagttttgagctcaaggatccttaattaaattaatccccccccccccggccacttcagtggatcccgcgccggggccgcgggcggagctgcctgccggtcccgcgccgcgcgtccgcactcctcggccctcgggcggtcgatgggacggggcgccgcggagcaggaggcggcgcccgtcggggtgctcgggccgcgcgggagcccactgtggggctcgggcatggcgggccgcaggacctgagctctcctcaggggagcggggaggcagctgctggccggcgatggggacggagtggggccgtcgccgccgcgccgagccgtgagcgccgagccaccgccgccgctacctcagcccttcgcgaagcgccgggcagctcgggaacatggccctggagcggctctgctcggtcctcaaagtgttgttaataacagtactggtagtggaagggattgccgtggcccaaaaaacccaagatggacaaaatattggaatcaagcatattcctgcaacccagtgtggcatttgggttcgaaccagcaatggaggtcattttgcttcgccaaattatcctgactcatatccaccaaacaaggagtgtatctacattttggaagctgctccacgtcaaagaatagagttgacctttgatgaacattattatatagaaccatcatttgagtgtcggtttgatcacttggaagttcgagatgggccatttggtttctctcctcttatagatcgttactgtggcgtgaaaagccctccattaattagatcaacagggagattcatgtggattaagtttagttctgatgaagagcttgaaggactgggatttcgagcaaaatattcatttattccagatccagactttacttacctaggaggtattttaaatcccattccagattgtcagttcgagctctcgggagctgatggaatagtgcgctctagtcaggtagaacaagaggagaaaacaaaaccaggccaagccgttgattgcatctggaccattaaagccactccaaaagctaagatttatttgaggttcctagattatcaaatggagcactcaaatgaatgcaagagaaacttcgttgcagtctatgatggaagcagttctattgaaaacctgaaggccaagttttgcagcactgtggccaatgatgtaatgcttaaaacaggaattggagtgattcgaatgtgggcagatgaaggtagtcggcttagcaggtttcgaatgctctttacttcctttgtggagcctccctgcacaagcagcactttcttttgccatagcaacatgtgcatcaataattctttagtctgtaatggtgtccaaaattgtgcatacccttgggatgaaaatcattgtaaagaaaagaaaaaagcaggagtatttgaacaaatcactaagactcatggaacaattattggcattacttcagggattgtcttggtccttctcattatttctattttagtacaagtgaaacagcctcgaaaaaaggtcatggcttgcaaaaccgcttttaataaaaccgggttccaagaagtgtttgatcctcctcattatgaactgttttcactaagggacaaagagatttctgcagacctggcagacttgtcggaagaattggacaactaccagaagatgcggcgctcctccaccgcctcccgctgcatccacgaccaccactgtgggtcgcaggcctccagcgtcaaacaaagcaggaccaacctcagttccatggaacttcctttccgaaatgactttgcacaaccacagccaatgaaaacatttaatagcaccttcaagaaaagtagttacactttcaaacagggacatgagtgccctgagcaggccctggaagaccgagtaatggaggagattccctgtgaaatttatgtcagggggcgagaagattctgcacaagcatccatatccattgacttctaatcttctgctaatggtgatgtgaattcttagggtgtgtacgtacgcagcctccagggcaccatactgtttccagcagccaacccttttctcccatcacaactacgaagaccttgatttaccgttaacctattgtatggtgatgtttttattctctcaggcagtctatatatgttaaaccaatcaaggaacttactctattcagtggaaacaataatcatctctattgcttggtgtcatttataggaagcactgccagttaaagagcattagaagaggtggttggatggagccaggctcaggctgcctcttcgttttagcaacaagaagactgctcttgactgataacagctctgtcaatattttgatgccacaataaacttgatttttcttta

SEQ ID NO: 426624 - DNA, 2511 bp, Homo sapiens
  misc_feature (2402)..(2402): n is a, c, g, or t
ttttgtccacttcactccagtagccaatcttccggggcccattagttttgagctcaaggatccttaattaaattaatccccccccccccggccacttcagtggatcccgcgccggggccgcgggcggagctgcctgccggtcccgcgccgcgcgtccgcactcctcggccctcgggcggtcgatgggacggggcgccgcggagcaggaggcggcgcccgtcggggtgctcgggccgcgcgggagcccactgtggggctcgggcatggcgggccgcaggacctgagctctcctcaggggagcggggaggcagctgctggccggcgatggggacggagtggggccgtcgccgccgcgccgagccgtgagcgccgagccaccgccgccgctacctcagcccttcgcgaagcgccgggcagctcgggaacatggccctggagcggctctgctcggtcctcaaagtgttgttaataacagtactggtagtggaagggattgccgtggcccaaaaaacccaagatggacaaaatattggaatcaagcatattcctgcaacccagtgtggcatttgggttcgaaccagcaatggaggtcattttgcttcgccaaattatcctgactcatatccaccaaacaaggagtgtatctacattttggaagctgctccacgtcaaagaatagagttgacctttgatgaacattattatatagaaccatcatttgagtgtcggtttgatcacttggaagttcgagatgggccatttggtttctctcctcttatagatcgttactgtggcgtgaaaagccctccattaattagatcaacagggagattcatgtggattaagtttagttctgatgaagagcttgaaggactgggatttcgagcaaaatattcatttattccagatccagactttacttacctaggaggtattttaaatcccattccagattgtcagttcgagctctcgggagctgatggaatagtgcgctctagtcaggtagaacaagaggagaaaacaaaaccaggccaagccgttgattgcatctggaccattaaagccactccaaaagctaagatttatttgaggttcctagattatcaaatggagcactcaaatgaatgcaagagaaacttcgttgcagtctatgatggaagcagttctattgaaaacctgaaggccaagttttgcagcactgtggccaatgatgtaatgcttaaaacaggaattggagtgattcgaatgtgggcagatgaaggtagtcggcttagcaggtttcgaatgctctttacttcctttgtggagcctccctgcacaagcagcactttcttttgccatagcaacatgtgcatcaataattctttagtctgtaatggtgtccaaaattgtgcatacccttgggatgaaaatcattgtaaagaaaagaaaaaagcaggagtatttgaacaaatcactaagactcatggaacaattattggcattacttcagggattgtcttggtccttctcattatttctattttagtacaagtgaaacagcctcgaaaaaaggtcatggcttgcaaaaccgcttttaataaaaccgggttccaagaagtgtttgatcctcctcattatgaactgttttcactaagggacaaagagatttctgcagacctggcagacttgtcggaagaattggacaactaccagaagatgcggcgctcctccaccgcctcccgctgcatccacgaccaccactgtgggtcgcaggcctccagcgtcaaacaaagcaggaccaacctcagttccatggaacttcctttccgaaatgactttgcacaaccacagccaatgaaaacatttaatagcaccttcaagaaaagtagttacactttcaaacagggacatgagtgccctgagcaggccctggaagaccgagtaatggaggagattccctgtgaaatttatgtcagggggcgagaagattctgcacaagcatccatatccattgacttctaatcttctgctaatggtgatgtgaattcttagggtgtgtacgtacgcagcctccagggcaccatactgtttccagcagccaacccttttctcccatcacaactacgaagaccttgatttaccgttaacctattgtatggtgatgtttttattctctcaggcagtctatatatgttaaaccaatcaaggaacttactctattcagtggaaacaataatcatctctattgcttggtgtcatttataggaagcactgccagttaaagagcattagaagaggtggttggatggagccaggctcaggctgcctcttcgttttagcaacaagaagactgctcttgactgataacagctctgtcaatattttgatgccacaataaacttgatttttctttaaaaaancaaacaacctcccaccaatcatggcggccgcttcgcccagcgactttaagacttggaagcttatgcatgcggcccgaattgggctaatggccatcgccctggcgcggtt

SEQ ID NO: 426625 - DNA, 3432 bp, Homo sapiens
ttttgtccacttcactccagtagccaatcttccggggcccattagttttgagctcaaggatccttaattaaattaatccccccccccccggccacttcagtggatcccgcgccggggccgcgggcggagctgcctgccggtcccgcgccgcgcgtccgcactcctcggccctcgggcggtcgatgggacggggcgccgcggagcaggaggcggcgcccgtcggggtgctcgggccgcgcgggagcccactgtggggctcgggcatggcgggccgcaggacctgagctctcctcaggggagcggggaggcagctgctggccggcgatggggacggagtggggccgtcgccgccgcgccgagccgtgagcgccgagccaccgccgccgctacctcagcccttcgcgaagcgccgggcagctcgggaacatggccctggagcggctctgctcggtcctcaaagtgttgttaataacagtactggtagtggaagggattgccgtggcccaaaaaacccaagatggacaaaatattggaatcaagcatattcctgcaacccagtgtggcatttgggttcgaaccagcaatggaggtcattttgcttcgccaaattatcctgactcatatccaccaaacaaggagtgtatctacattttggaagctgctccacgtcaaagaatagagttgacctttgatgaacattattatatagaaccatcatttgagtgtcggtttgatcacttggaagttcgagatgggccatttggtttctctcctcttatagatcgttactgtggcgtgaaaagccctccattaattagatcaacagggagattcatgtggattaagtttagttctgatgaagagcttgaaggactgggatttcgagcaaaatattcatttattccagatccagactttacttacctaggaggtattttaaatcccattccagattgtcagttcgagctctcgggagctgatggaatagtgcgctctagtcaggtagaacaagaggagaaaacaaaaccaggccaagccgttgattgcatctggaccattaaagccactccaaaagctaagatttatttgaggttcctagattatcaaatggagcactcaaatgaatgcaagagaaacttcgttgcagtctatgatggaagcagttctattgaaaacctgaaggccaagttttgcagcactgtggccaatgatgtaatgcttaaaacaggaattggagtgattcgaatgtgggcagatgaaggtagtcggcttagcaggtttcgaatgctctttacttcctttgtggagcctccctgcacaagcagcactttcttttgccatagcaacatgtgcatcaataattctttagtctgtaatggtgtccaaaattgtgcatacccttgggatgaaaatcattgtaaagaaaagaaaaaagcaggagtatttgaacaaatcactaagactcatggaacaattattggcattacttcagggattgtcttggtccttctcattatttctattttagtacaagtgaaacagcctcgaaaaaaggtcatggcttgcaaaaccgcttttaataaaaccgggttccaagaagtgtttgatcctcctcattatgaactgttttcactaagggacaaagagatttctgcagacctggcagacttgtcggaagaattggacaactaccagaagatgcggcgctcctccaccgcctcccgctgcatccacgaccaccactgtgggtcgcaggcctccagcgtcaaacaaagcaggaccaacctcagttccatggaacttcctttccgaaatgactttgcacaaccacagccaatgaaaacatttaatagcaccttcaagaaaagtagttacactttcaaacagggacatgagtgccctgagcaggccctggaagaccgagtaatggaggagattccctgtgaaatttatgtcagggggcgagaagattctgcacaagcatccatatccattgacttctaatcttctgctaatggtgatgtgaattcttagggtgtgtacgtacgcagcctccagggcaccatactgtttccagcagccaacccttttctcccatcacaactacgaagaccttgatttaccgttaacctattgtatggtgatgtttttattctctcaggcagtctatatatgttaaaccaatcaaggaacttactctattcagtggaaacaataatcatctctattgcttggtgtcatttataggaagcactgccagttaaagagcattagaagaggtggttggatggagccaggctcaggctgcctcttcgttttagcaacaagaagactgctcttgactgataacagctctgtcaatattttgatgccacaataaacttgatttttctttacattccttttatttttcctttctctaaatttaatttgttttataagcctatcgttttaccatttcattttcttacataagtacaagtggttaatgtaccacatacttcagtataggcatttgttcttgagtgtgtcaaaatacagctagttactgtgccaattaagacccagttgtatttcacccatctgtttcttcttggctaatctctgtacttctgccttttaattactgggcccttattccttattttctgtgagaaataatagatgatatgatttattacctttcaattatatttttctcagttatactagaaaatttcataatcctgggatatatgtaccattgtcagctatgactaaaaatttgaaaaagataaaaatttctagcaagcctttgaagtttaccaagtatagtcacattcagtgacagcccattcattccagtaaagaatcatttcattcactttgggagaggcctataattacatttatttgcaatgtttctcttcgctagattgttacatagctcccattctgttggttttgcttacagcatatggtaaccaaggttagatgccagttaaaattccttagaaattggatgagccttgagattgcttcttaactgggacatgacatttttctagctcttatcaagaataacaacttccacttttttttaaactgcacttttgactttttttatggtataaaaacaataatttataaacataaaagctcattgtgttttttagacttttgatattatttgatactgtacaaactttattaaatcaagatgaaagacctacaggacagattcctttcagtgttcacatcagtggctttgtatgcaaatatgctgtgttggacctggacgctataacttattgtaaagaccttggaaatgtggacataagctctttctttccttttgttactgtatttagtttgtgataaatttttcactgtgtgatatttatgctctaaatcactacacaaatcccatattaaaatatacattgtacctga

SEQ ID NO: 426626 - DNA, 3580 bp, Homo sapiens
ttttgtccacttcactccagtagccaatcttccggggcccattagttttgagctcaaggatccttaattaaattaatccccccccccccggccacttcagtggatcccgcgccggggccgcgggcggagctgcctgccggtcccgcgccgcgcgtccgcactcctcggccctcgggcggtcgatgggacggggcgccgcggagcaggaggcggcgcccgtcggggtgctcgggccgcgcgggagcccactgtggggctcgggcatggcgggccgcaggacctgagctctcctcaggggagcggggaggcagctgctggccggcgatggggacggagtggggccgtcgccgccgcgccgagccgtgagcgccgagccaccgccgccgctacctcagcccttcgcgaagcgccgggcagctcgggaacatggccctggagcggctctgctcggtcctcaaagtgttgttaataacagtactggtagtggaagggattgccgtggcccaaaaaacccaagatggacaaaatattggaatcaagcatattcctgcaacccagtgtggcatttgggttcgaaccagcaatggaggtcattttgcttcgccaaattatcctgactcatatccaccaaacaaggagtgtatctacattttggaagctgctccacgtcaaagaatagagttgacctttgatgaacattattatatagaaccatcatttgagtgtcggtttgatcacttggaagttcgagatgggccatttggtttctctcctcttatagatcgttactgtggcgtgaaaagccctccattaattagatcaacagggagattcatgtggattaagtttagttctgatgaagagcttgaaggactgggatttcgagcaaaatattcatttattccagatccagactttacttacctaggaggtattttaaatcccattccagattgtcagttcgagctctcgggagctgatggaatagtgcgctctagtcaggtagaacaagaggagaaaacaaaaccaggccaagccgttgattgcatctggaccattaaagccactccaaaagctaagatttatttgaggttcctagattatcaaatggagcactcaaatgaatgcaagagaaacttcgttgcagtctatgatggaagcagttctattgaaaacctgaaggccaagttttgcagcactgtggccaatgatgtaatgcttaaaacaggaattggagtgattcgaatgtgggcagatgaaggtagtcggcttagcaggtttcgaatgctctttacttcctttgtggagcaaaagaaaaaagcaggagtatttgaacaaatcactaagactcatggaacaattattggcattacttcagggattgtcttggtccttctcattatttctattttagtacaagtgaaacagcctcgaaaaaaggtcatggcttgcaaaaccgcttttaataaaaccgggttccaagaagtgtttgatcctcctcattatgaactgttttcactaagggacaaagagatttctgcagacctggcagacttgtcggaagaattggacaactaccagaagatgcggcgctcctccaccgcctcccgctgcatccacgaccaccactgtgggtcgcaggcctccagcgtcaaacaaagcaggaccaacctcagttccatggaacttcctttccgaaatgactttgcacaaccacagccaatgaaaacatttaatagcaccttcaagaaaagtagttacactttcaaacagggacatgagtgccctgagcaggccctggaagaccgagtaatggaggagattccctgtgaaatttatgtcagggggcgagaagattctgcacaagcatccatatccattgacttctaatcttctgctaatggtgatgtgaattcttagggtgtgtacgtacgcagcctccagggcaccatactgtttccagcagccaacccttttctcccatcacaactacgaagaccttgatttaccgttaacctattgtatggtgatgtttttattctctcaggcagtctatatatgttaaaccaatcaaggaacttactctattcagtggaaacaataatcatctctattgcttggtgtcatttataggaagcactgccagttaaagagcattagaagaggtggttggatggagccaggctcaggctgcctcttcgttttagcaacaagaagactgctcttgactgataacagctctgtcaatattttgatgccacaataaacttgatttttctttacattccttttatttttcctttctctaaatttaatttgttttataagcctatcgttttaccatttcattttcttacataagtacaagtggttaatgtaccacatacttcagtataggcatttgttcttgagtgtgtcaaaatacagctagttactgtgccaattaagacccagttgtatttcacccatctgtttcttcttggctaatctctgtacttctgccttttaattactgggcccttattccttattttctgtgagaaataatagatgatatgatttattacctttcaattatatttttctcagttatactagaaaatttcataatcctgggatatatgtaccattgtcagctatgactaaaaatttgaaaaagataaaaatttctagcaagcctttgaagtttaccaagtatagtcacattcagtgacagcccattcattccagtaaagaatcatttcattcactttgggagaggcctataattacatttatttgcaatgtttctcttcgctagattgttacatagctcccattctgttggttttgcttacagcatatggtaaccaaggttagatgccagttaaaattccttagaaattggatgagccttgagattgcttcttaactgggacatgacatttttctagctcttatcaagaataacaacttccacttttttttaaactgcacttttgactttttttatggtataaaaacaataatttataaacataaaagctcattgtgttttttagacttttgatattatttgatactgtacaaactttattaaatcaagatgaaagacctacaggacagattcctttcagtgttcacatcagtggctttgtatgcaaatatgctgtgttggacctggacgctataacttattgtaaagaccttggaaatgtggacataagctctttctttccttttgttactgtatttagtttgtgataaatttttcactgtgtgatatttatgctctaaatcactacacaaatcccatattaaaatatacattgtacctgaccctttaatcatgttatttatgccaccaaggttgtggatcttaaggtatgtatggaaaggaactcatttatcaaattgtaagtaatacagacatgccatttaaaagaggtaaattcttgttttctatattttgttagtaaattctcaatgaaataagttgaagtttcactggatttcattaacttttaaatattacatatatgtgttttctcagattagtgaaaattgtgaccttaaatttaatacacatatactgcctcag

SEQ ID NO: 426627 - DNA, 3587 bp, Homo sapiens
ttttgtccacttcactccagtagccaatcttccggggcccattagttttgagctcaaggatccttaattaaattaatccccccccccccggccacttcagtggatcccgcgccggggccgcgggcggagctgcctgccggtcccgcgccgcgcgtccgcactcctcggccctcgggcggtcgatgggacggggcgccgcggagcaggaggcggcgcccgtcggggtgctcgggccgcgcgggagcccactgtggggctcgggcatggcgggccgcaggacctgagctctcctcaggggagcggggaggcagctgctggccggcgatggggacggagtggggccgtcgccgccgcgccgagccgtgagcgccgagccaccgccgccgctacctcagcccttcgcgaagcgccgggcagctcgggaacatggccctggagcggctctgctcggtcctcaaagtgttgttaataacagtactggtagtggaagggattgccgtggcccaaaaaacccaagatggacaaaatattggaatcaagcatattcctgcaacccagtgtggcatttgggttcgaaccagcaatggaggtcattttgcttcgccaaattatcctgactcatatccaccaaacaaggagtgtatctacattttggaagctgctccacgtcaaagaatagagttgacctttgatgaacattattatatagaaccatcatttgagtgtcggtttgatcacttggaagttcgagatgggccatttggtttctctcctcttatagatcgttactgtggcgtgaaaagccctccattaattagatcaacagggagattcatgtggattaagtttagttctgatgaagagcttgaaggactgggatttcgagcaaaatattcatttattccagatccagactttacttacctaggaggtattttaaatcccattccagattgtcagttcgagctctcgggagctgatggaatagtgcgctctagtcaggtagaacaagaggagaaaacaaaaccaggccaagccgttgattgcatctggaccattaaagccactccaaaagctaagatttatttgaggttcctagattatcaaatggagcactcaaatgaatgcaagagaaacttcgttgcagtctatgatggaagcagttctattgaaaacctgaaggccaagttttgcagcactgtggccaatgatgtaatgcttaaaacaggaattggagtgattcgaatgtgggcagatgaaggtagtcggcttagcaggtttcgaatgctctttacttcctttgtggagcctccctgcacaagcagcactttcttttgccatagcaacatgtgcatcaataattctttagtctgtaatggtgtccaaaattgtgcatacccttgggatgaaaatcattgtaaagaaaagaaaaaagcaggagtatttgaacaaatcactaagactcatggaacaattattggcattacttcagggattgtcttggtccttctcattatttctattttagtacaagtgaaacagcctcgaaaaaaggtcatggcttgcaaaaccgcttttaataaaaccgggttccaagaagtgtttgatcctcctcattatgaactgttttcactaagggacaaagagatttctgcagacctggcagacttgtcggaagaattggacaactaccagaagatgcggcgctcctccaccgcctcccgctgcatccacgaccaccactgtgggtcgcaggcctccagcgtcaaacaaagcaggaccaacctcagttccatggaacttcctttccgaaatgactttgcacaaccacagccaatgaaaacatttaatagcaccttcaagaaaagtagttacactttcaaacagggacatgagtgccctgagcaggccctggaagaccgagtaatggaggagattccctgtgaaatttatgtcagggggcgagaagattctgcacaagcatccatatccattgacttctaatcttctgctaatggtgatgtgaattcttagggtgtgtacgtacgcagcctccagggcaccatactgtttccagcagccaacccttttctcccatcacaactacgaagaccttgatttaccgttaacctattgtatggtgatgtttttattctctcaggcagtctatatatgttaaaccaatcaaggaacttactctattcagtggaaacaataatcatctctattgcttggtgtcatttataggaagcactgccagttaaagagcattagaagaggtggttggatggagccaggctcaggctgcctcttcgttttagcaacaagaagactgctcttgactgataacagctctgtcaatattttgatgccacaataaacttgatttttctttacattccttttatttttcctttctctaaatttaatttgttttataagcctatcgttttaccatttcattttcttacataagtacaagtggttaatgtaccacatacttcagtataggcatttgttcttgagtgtgtcaaaatacagctagttactgtgccaattaagacccagttgtatttcacccatctgtttcttcttggctaatctctgtacttctgccttttaattactgggcccttattccttattttctgtgagaaataatagatgatatgatttattacctttcaattatatttttctcagttatactagaaaatttcataatcctgggatatatgtaccattgtcagctatgactaaaaatttgaaaaagataaaaatttctagcaagcctttgaagtttaccaagtatagtcacattcagtgacagcccattcattccagtaaagaatcatttcattcactttgggagaggcctataattacatttatttgcaatgtttctcttcgctagattgttacatagctcccattctgttggttttgcttacagcatatggtaaccaaggttagatgccagttaaaattccttagaaattggatgagccttgagattgcttcttaactgggacatgacatttttctagctcttatcaagaataacaacttccacttttttttaaactgcacttttgactttttttatggtataaaaacaataatttataaacataaaagctcattgtgttttttagacttttgatattatttgatactgtacaaactttattaaatcaagatgaaagacctacaggacagattcctttcagtgttcacatcagtggctttgtatgcaaatatgctgtgttggacctggacgctataacttattgtaaagaccttggaaatgtggacataagctctttctttccttttgttactgtatttagtttgtgataaatttttcactgtgtgatatttatgctctaaatcactacacaaatcccatattaaaatatacattgtacctgaccctttaatcatgttatttatgccaccaaggttgtggatcttaaggtatgtatggaaaggaactcatttatcaaattgtaagtaatacagacatgccatttaaaagaggtaaattcttgttttctatattttgttagtaaattctcaatgaaata

SEQ ID NO: 426628 - DNA, 1622 bp, Homo sapiens
ttttgtccacttcactccagtagccaatcttccggggcccattagttttgagctcaaggatccttaattaaattaatccccccccccccggccacttcagtggatcccgcgccggggccgcgggcggagctgcctgccggtcccgcgccgcgcgtccgcactcctcggccctcgggcggtcgatgggacggggcgccgcggagcaggaggcggcgcccgtcggggtgctcgggccgcgcgggagcccactgtggggctcgggcatggcgggccgcaggacctgagctctcctcaggggagcggggaggcagctgctggccggcgatggggacggagtggggccgtcgccgccgcgccgagccgtgagcgccgagccaccgccgccgctacctcagcccttcgcgaagcgccgggcagctcgggaacatggccctggagcggctctgctcggtcctcaaagtgttgttaataacagtactggtagtggaagggattgccgtggcccaaaaaacccaagatggacaaaatattggaatcaagcatattcctgcaacccagtgtggcatttgggttcgaaccagcaatggaggtcattttgcttcgccaaattatcctgactcatatccaccaaacaaggagtgtatctacattttggaagctgctccacgtcaaagaatagagttgacctttgatgaacattattatatagaaccatcatttgagtgtcggtttgatcacttggaagttcgagatgggccatttggtttctctcctcttatagatcgttactgtggcgtgaaaagccctccattaattagatcaacagggagattcatgtggattaagtttagttctgatgaagagcttgaaggactgggatttcgagcaaaatattcatttattccagatccagactttacttacctaggaggtattttaaatcccattccagattgtcagttcgagctctcgggagctgatggaatagtgcgctctagtcaggtagaacaagaggagaaaacaaaaccaggccaagccgttgattgcatctggaccattaaagccactccaaaagctaagatttatttgaggttcctagattatcaaatggagcactcaaatgaatgcaagagaaacttcgttgcagtctatgatggaagcagttctattgaaaacctgaaggccaagttttgcagcactgtggccaatgatgtaatgcttaaaacaggaattggagtgattcgaatgtgggcagatgaaggtagtcggcttagcaggtttcgaatgctctttacttcctttgtggagcgtaagtaaataattcctatagtattgagatcttttacatatttttcactcattcacagtacactcagcatttacttttttaaaatatttattttaggatgtttttttttgttttactacagctctttttaatgcaagaatattatttaaatttaaaatattttaaattttatttaatttttagaggtggggtgttgatttgttgcacaggctggggcaggagaatggcgtgaacccgggaggcggagcttgcagtgagccaacattgcaccactgcactccagcctgggtgacagagtaagactccgtctcta

SEQ ID NO: 426629 - DNA, 5013 bp, Homo sapiens
ctcctgctcttctttccgcttggcctccaacagcctctgctgctcctcctgagcaacgtgaaatcctgcatgagattcagagaaggaaagaagagataaaagaagagaaaaaaaggaaagaaatggctaagcaggaacgtttggaaattgctagtttgtcaaaccaagatcatacctctaagaaggacccaggaggacacagaacggctgccattctacatggaggctctcctgactttgtaggaaatggtaaacatcgggcaaactcctcaggaaggtctaggcgagaacgtcagtattctgtatgtaatagtgaagattctcctggctcttgtgaaattctgtatttcaatatggggagtcctgatcagctcatggtgcacaaagggaaatgtattggcagtgatgaacaacttggaaaattagtctacaatgctttggaaacagccactggtggctttgtcttgttgtatgagtgggtccttcagtggcagaaaaaaatgggtccattccttaccagtcaagaaaaagagaagattgataagtgcaaaaagcagattcaaggaacagaaacagaattcaactcactggtaaaattgagccatccaaatgtagtacgctaccttgcaatgaatctcaaagagcaagacgactccatcgtggtggacattttagtggagcacattagtggggtctctcttgctgcacacctgagccactcaggccccatccctgtgcatcagcttcgcaggtacacagctcagctcctgtcaggccttgattatctgcacagcaattctgtggtgcataaggtcctgagtgcatctaatgtcttggtggatgcagaaggcaccgtcaagattacggactatagcatttctaagcgcctcgcagacatttgcaaggaggatgtgtttgagcaaacccgagttcgttttagtgacaatgctctgccttataaaacggggaagaaaggagatgtttggcgtcttggccttctgctgctgtccctcagccaaggacaggaatgtggagagtaccctgtgaccatccctagtgacttaccagctgactttcaagattttctaaagaaatgtgtgtgcttggatgacaaggaaagatggagtccccagcagttgttgaaacacagctttataaatccccagccaaaaatgcctctagtggaacaaagtcctgaagattctggaggacaagattatgttgagactgttattcctagcaaccggctacccagtgctgccttctttagtgagacacagagacagttttcccgatacttcattgagtttgaagaattacaacttcttggtaaaggagcttttggagctgtcatcaaggtgcagaacaagttggacggctgctgctacgcagtgaagcgcatccccatcaacccggccagccggcagttccgcaggatcaagggcgaagtgacactgctgtcacggctgcaccatgagaacattgtgcgctactacaacgcctggatcgagcggcacgagcggccggcgggaccggggacgccgcccccggactccgggcccctggccaaggatgaccgagctgcacgcgggcagccggcgagcgacacagacggcctggacagcgtagaggccgccgcgccgccacccatcctcagcagctcggtggagtggagcacttcgggcgagcgctcggccagtgcccgtttccccgccaccggcccgggctccagcgatgacgaggacgacgacgaggacgagcacggtggcgtcttctcccagtccttcctgcctgcttcagattctgaaagtgatattatctttgacaatgaagatgagaacagtaaaagtcagaatcaggatgaagattgcaatgaaaagaatggctgccatgaaagtgagccatcagtgacgactgaggctgtgcactacctatacatccagatggagtactgtgagaagagcactttacgagacaccattgaccagggactgtatcgagacaccgtcagactctggaggctttttcgagagattctggatggattagcttatatccatgagaaaggaatgattcaccgggatttgaagcctgtcaacatttttttggattctgatgaccatgtgaaaataggtgattttggtttggcgacagaccatctagccttttctgctgacagcaaacaagacgatcagacaggagacttgattaagtcagacccttcaggtcacttaactgggatggttggcactgctctctatgtaagcccagaggtccaaggaagcaccaaatctgcatacaaccagaaagtggatctcttcagcctgggaattatcttctttgagatgtcctatcaccccatggtcacggcttcagaaaggatctttgttctcaaccaactcagagatcccacttcgcctaagtttccagaagactttgacgatggagagcatgcaaagcagaaatcagtcatctcctggctgttgaaccacgatccagcaaaacggcccacagccacagaactgctcaagagtgagctgctgcccccaccccagatggaggagtcagagctgcatgaagtgctgcaccacacgctgaccaacgtggatgggaaggcctaccgcaccatgatggcccagatcttctcgcagcgcatctcccctgccatcgattacacctatgacagcgacatactgaagggcaacttctcaatccgtacagccaagatgcagcagcatgtgtgtgaaaccatcatccgcatctttaaaagacatggagctgttcagttgtgtactccactactgcttccccgaaacagacaaatatatgagcacaacgaagctgccctattcatggaccacagcgggatgctggtgatgcttccttttgacctgcggatcccttttgcaagatatgtggcaagaaataatatattgaatttaaaacgatactgcatagaacgtgtgttcaggccgcgcaagttagatcgatttcatcccaaagaacttctggagtgtgcatttgatattgtcacttctaccaccaacagctttctgcccactgctgaaattatctacactatctatgaaatcatccaagagtttccagcacttcaggaaagaaattacagtatttatttgaaccataccatgttattgaaagcaatactcttacactgtgggatcccagaagataaactcagtcaagtctacattattctgtatgatgctgtgacagagaagctgacgaggagagaagtggaagctaaattttgtaatctgtctttgtcttctaatagtctgtgtcgactctacaagtttattgaacagaagggagatttgcaagatcttatgccaacaataaattcattaataaaacagaaaacaggtattgcacagttggtgaagtatggcttaaaagacctagaggaggttgttggactgttgaagaaactcggcatcaagttacaggtcttgatcaatttgggcttggtttacaaggtgcagcagcacaatggaatcatcttccagtttgtggctttcatcaaacgaaggcaaagggctgtacctgaaatcctcgcagctggaggcagatatgacctgctgattccccagtttagagggccacaagctctggggccagttcccactgccattggggtcagcatagctatagacaagatatctgctgctgtcctcaacatggaggaatctgttacaataagctcttgtgacctcctggttgtaagtgttggtcagatgtctatgtccagggccatcaacctaacccagaaactctggacagcaggcatcacagcagaaatcatgtacgactggtcacagtcccaagaggaattacaagagtactgcagacatcatgaaatcacctatgtggcccttgtctcggataaagaaggaagccatgtcaaggttaagtctttcgagaaggaaaggcagacagagaagcgtgtgctggagactgaacttgtggaccatgtactgcagaaactgaggactaaagtcactgatgaaaggaatggcagagaagcttccgataatcttgcagtgcaaaatctgaaggggtcattttctaatgcttcaggtttgtttgaaatccatggagcaacagtggttcccattgtgagtgtgctagccccggagaagctgtcagccagcactaggaggcgctatgaaactcaggtacaaactcgacttcagacctcccttgccaacttacatcagaaaagcagtgaaattgaaattctggctgtggatctacccaaagaaacaatattacagtttttatcattagagtgggatgctgatgaacaggcatttaacacaactgtgaagcagctgctgtcacgcctgccaaagcaaagatacctcaaattagtctgtgatgaaatttataacatcaaagtagaaaaaaaggtgtctgtgctatttctgtacagctatagagatgactactacagaatcttattttaaccctaaagaactgtcgttaacctcattcaaacagacagaggcttatactggaataatggaatgttgtacattcatcataatttaaaattaaattctaagaagaggctgggtgcagtggctcacacctttaatcccagcactttgggaagccaaggcaggaagactgcttgaaaccaggagtttgagaccagcctgagcaacaaagcaagaccccatctctataaaaactaaaaaaattagttgggcatggtggcacatgcctgtagtcccagctactccagaggctgagatggatcatctgagcctcaggaggttgaggctgcagtgagctgtgactgcgccactgcactccagtctgggacaacagagcaagaccctgtcttaaaaaaaaaaagaaaaaaaaattttttttctaagaagctgtcctacaaagttgagctttgttagtttttcatgtgtaatatattataaatttatcttttgggatataataaatgctttcatatacctgcaaaattttaat

SEQ ID NO: 426630 - DNA, 320 bp, Homo sapiens
agtgcagtggtatgatattggctcactgcaacctctgcctcccgggtttaagcaattcttgtgcctcagctactccagaggctgagatggatcatctgagcctcaggaggttgaggctgcagtgagctgtgactgcgccactgcactccagtctgggacaacagagcaagaccctgtcttaaaaaaaaaaagaaaaaaaaattttttttctaagaagctgtcctacaaagttgagctttgttagtttttcatgtgtaatatattataaatttatcttttgggatataataaatgctttcatatacctgcaaaattttaat

SEQ ID NO: 426631 - DNA, 5423 bp, Homo sapiens
gagctacccgcaacgacaggaccacgagctacaggccctggaggccatttacggcgcggacttccaagacctgcggccggacgcttgcggaccggtcaaagagccccctgaaatcaatttagttttgtaccctcaaggcctaactggtgaagaagtatatgtaaaagtggatttgagggttaaatgcccacctacctatccagatgtagttcctgaaatagagttaaaaaatgccaaaggtctatcaaatgaaagtgtcaatttgttaaaatctcgcctagaagaactggccaagaaacactgtggggaggtgatgatctttgaactggcttaccacgtgcagtcatttctcagcgagcataacaagccccctcccaagtcttttcatgaagaaatgctggaaaggcgggctcaggaggagcagcagaggctgttggaggccaagcggaaagaagagcaggagcaacgtgaaatcctgcatgagattcagagaaggaaagaagagataaaagaagagaaaaaaaggaaagaaatggctaagcaggaacgtttggaaattgctagtttgtcaaaccaagatcatacctctaagaaggacccaggaggacacagaacggctgccattctacatggaggctctcctgactttgtaggaaatggtaaacatcgggcaaactcctcaggaaggtctaggcgagaacgtcagtattctgtatgtaatagtgaagattctcctggctcttgtgaaattctgtatttcaatatggggagtcctgatcagctcatggtgcacaaagggaaatgtattggcagtgatgaacaacttggaaaattagtctacaatgctttggaaacagccactggtggctttgtcttgttgtatgagtgggtccttcagtggcagaaaaaaatgggtccattccttaccagtcaagaaaaagagaagattgataagtgcaaaaagcagattcaaggaacagaaacagaattcaactcactggtaaaattgagccatccaaatgtagtacgctaccttgcaatgaatctcaaagagcaagacgactccatcgtggtggacattttagtggagcacattagtggggtctctcttgctgcacacctgagccactcaggccccatccctgtgcatcagcttcgcaggtacacagctcagctcctgtcaggccttgattatctgcacagcaattctgtggtgcataaggtcctgagtgcatctaatgtcttggtggatgcagaaggcaccgtcaagattacggactatagcatttctaagcgcctcgcagacatttgcaaggaggatgtgtttgagcaaacccgagttcgttttagtgacaatgctctgccttataaaacggggaagaaaggagatgtttggcgtcttggccttctgctgctgtccctcagccaaggacaggaatgtggagagtaccctgtgaccatccctagtgacttaccagctgactttcaagattttctaaagaaatgtgtgtgcttggatgacaaggaaagatggagtccccagcagttgttgaaacacagctttataaatccccagccaaaaatgcctctagtggaacaaagtcctgaagattctggaggacaagattatgttgagactgttattcctagcaaccggctacccagtgctgccttctttagtgagacacagagacagttttcccgatacttcattgagtttgaagaattacaacttcttggtaaaggagcttttggagctgtcatcaaggtgcagaacaagttggacggctgctgctacgcagtgaagcgcatccccatcaacccggccagccggcagttccgcaggatcaagggcgaagtgacactgctgtcacggctgcaccatgagaacattgtgcgctactacaacgcctggatcgagcggcacgagcggccggcgggaccggggacgccgcccccggactccgggcccctggccaaggatgaccgagctgcacgcgggcagccggcgagcgacacagacggcctggacagcgtagaggccgccgcgccgccacccatcctcagcagctcggtggagtggagcacttcgggcgagcgctcggccagtgcccgtttccccgccaccggcccgggctccagcgatgacgaggacgacgacgaggacgagcacggtggcgtcttctcccagtccttcctgcctgcttcagattctgaaagtgatattatctttgacaatgaagatgagaacagtaaaagtcagaatcaggatgaagattgcaatgaaaagaatggctgccatgaaagtgagccatcagtgacgactgaggctgtgcactacctatacatccagatggagtactgtgagaagagcactttacgagacaccattgaccagggactgtatcgagacaccgtcagactctggaggctttttcgagagattctggatggattagcttatatccatgagaaaggaatgattcaccgggatttgaagcctgtcaacatttttttggattctgatgaccatgtgaaaataggtgattttggtttggcgacagaccatctagccttttctgctgacagcaaacaagacgatcagacaggagacttgattaagtcagacccttcaggtcacttaactgggatggttggcactgctctctatgtaagcccagaggtccaaggaagcaccaaatctgcatacaaccagaaagtggatctcttcagcctgggaattatcttctttgagatgtcctatcaccccatggtcacggcttcagaaaggatctttgttctcaaccaactcagagatcccacttcgcctaagtttccagaagactttgacgatggagagcatgcaaagcagaaatcagtcatctcctggctgttgaaccacgatccagcaaaacggcccacagccacagaactgctcaagagtgagctgctgcccccaccccagatggaggagtcagagctgcatgaagtgctgcaccacacgctgaccaacgtggatgggaaggcctaccgcaccatgatggcccagatcttctcgcagcgcatctcccctgccatcgattacacctatgacagcgacatactgaagggcaacttctcaatccgtacagccaagatgcagcagcatgtgtgtgaaaccatcatccgcatctttaaaagacatggagctgttcagttgtgtactccactactgcttccccgaaacagacaaatatatgagcacaacgaagctgccctattcatggaccacagcgggatgctggtgatgcttccttttgacctgcggatcccttttgcaagatatgtggcaagaaataatatattgaatttaaaacgatactgcatagaacgtgtgttcaggccgcgcaagttagatcgatttcatcccaaagaacttctggagtgtgcatttgatattgtcacttctaccaccaacagctttctgcccactgctgaaattatctacactatctatgaaatcatccaagagtttccagcacttcaggaaagaaattacagtatttatttgaaccataccatgttattgaaagcaatactcttacactgtgggatcccagaagataaactcagtcaagtctacattattctgtatgatgctgtgacagagaagctgacgaggagagaagtggaagctaaattttgtaatctgtctttgtcttctaatagtctgtgtcgactctacaagtttattgaacagaagggagatttgcaagatcttatgccaacaataaattcattaataaaacagaaaacaggtattgcacagttggtgaagtatggcttaaaagacctagaggaggttgttggactgttgaagaaactcggcatcaagttacaggtcttgatcaatttgggcttggtttacaaggtgcagcagcacaatggaatcatcttccagtttgtggctttcatcaaacgaaggcaaagggctgtacctgaaatcctcgcagctggaggcagatatgacctgctgattccccagtttagagggccacaagctctggggccagttcccactgccattggggtcagcatagctatagacaagatatctgctgctgtcctcaacatggaggaatctgttacaataagctcttgtgacctcctggttgtaagtgttggtcagatgtctatgtccagggccatcaacctaacccagaaactctggacagcaggcatcacagcagaaatcatgtacgactggtcacagtcccaagaggaattacaagagtactgcagacatcatgaaatcacctatgtggcccttgtctcggataaagaaggaagccatgtcaaggttaagtctttcgagaaggaaaggcagacagagaagcgtgtgctggagactgaacttgtggaccatgtactgcagaaactgaggactaaagtcactgatgaaaggaatggcagagaagcttccgataatcttgcagtgcaaaatctgaaggggtcattttctaatgcttcaggtttgtttgaaatccatggagcaacagtggttcccattgtgagtgtgctagccccggagaagctgtcagccagcactaggaggcgctatgaaactcaggtacaaactcgacttcagacctcccttgccaacttacatcagaaaagcagtgaaattgaaattctggctgtggatctacccaaagaaacaatattacagtttttatcattagagtgggatgctgatgaacaggcatttaacacaactgtgaagcagctgctgtcacgcctgccaaagcaaagatacctcaaattagtctgtgatgaaatttataacatcaaagtagaaaaaaaggtgtctgtgctatttctgtacagctatagagatgactactacagaatcttattttaaccctaaagaactgtcgttaacctcattcaaacagacagaggcttatactggaataatggaatgttgtacattcatcataatttaaaattaaattctaagaagaggctgggtgcagtggctcacacctttaatcccagcactttgggaagccaaggcaggaagactgcttgaaaccaggagtttgagaccagcctgagcaacaaagcaagaccccatctctataaaaactaaaaaaattagttgggcatggtggcacatgcctgtagtcccagctactccagaggctgagatggatcatctgagcctcaggaggttgaggctgcagtgagctgtgactgcgccactgcactccagtctgggacaacagagcaagaccctgtcttaaaaaaaaaaagaaaaaaaaattttttttctaagaagctgtcctacaaagttgagctttgttagtttttcatgtgtaatatattataaatttatcttttgggatataataaatgctttcatatacctgcaaaattttaat

SEQ ID NO: 426632 - DNA, 4013 bp, Homo sapiens
cactgactttagaaaataatttttaatcttaaaatcaagacacttagaaatttagatagcagatacattggaaaagcagggaggtaactgtcagtaaaattaattattaaaatggagattatgttttccccagggtctcccagcaagctaaatatatctagagtcgggtgggctgttttctgaattttgtggcagtcaaagctttcttcagtttaagaatttcaggcatgtggttcttgactgtagctgtgggactcatttagaacttcacgctttccttgggaggggatggggtgcggtgcaaatgcctgtttgtgcaaggctccgagcggctgaccttcccctggctgtgccgcaggtgcagaacaagttggacggctgctgctacgcagtgaagcgcatccccatcaacccggccagccggcagttccgcaggatcaagggcgaagtgacactgctgtcacggctgcaccatgagaacattgtgcgctactacaacgcctggatcgagcggcacgagcggccggcgggaccggggacgccgcccccggactccgggcccctggccaaggatgaccgagctgcacgcgggcagccggcgagcgacacagacggcctggacagcgtagaggccgccgcgccgccacccatcctcagcagctcggtggagtggagcacttcgggcgagcgctcggccagtgcccgtttccccgccaccggcccgggctccagcgatgacgaggacgacgacgaggacgagcacggtggcgtcttctcccagtccttcctgcctgcttcagattctgaaagtgatattatctttgacaatgaagatgagaacagtaaaagtcagaatcaggatgaagattgcaatgaaaagaatggctgccatgaaagtgagccatcagtgacgactgaggctgtgcactacctatacatccagatggagtactgtgagaagagcactttacgagacaccattgaccagggactgtatcgagacaccgtcagactctggaggctttttcgagagattctggatggattagcttatatccatgagaaaggaatgattcaccgggatttgaagcctgtcaacatttttttggattctgatgaccatgtgaaaataggtgattttggtttggcgacagaccatctagccttttctgctgacagcaaacaagacgatcagacaggagacttgattaagtcagacccttcaggtcacttaactgggatggttggcactgctctctatgtaagcccagaggtccaaggaagcaccaaatctgcatacaaccagaaagtggatctcttcagcctgggaattatcttctttgagatgtcctatcaccccatggtcacggcttcagaaaggatctttgttctcaaccaactcagagatcccacttcgcctaagtttccagaagactttgacgatggagagcatgcaaagcagaaatcagtcatctcctggctgttgaaccacgatccagcaaaacggcccacagccacagaactgctcaagagtgagctgctgcccccaccccagatggaggagtcagagctgcatgaagtgctgcaccacacgctgaccaacgtggatgggaaggcctaccgcaccatgatggcccagatcttctcgcagcgcatctcccctgccatcgattacacctatgacagcgacatactgaagggcaacttctcaatccgtacagccaagatgcagcagcatgtgtgtgaaaccatcatccgcatctttaaaagacatggagctgttcagttgtgtactccactactgcttccccgaaacagacaaatatatgagcacaacgaagctgccctattcatggaccacagcgggatgctggtgatgcttccttttgacctgcggatcccttttgcaagatatgtggcaagaaataatatattgaatttaaaacgatactgcatagaacgtgtgttcaggccgcgcaagttagatcgatttcatcccaaagaacttctggagtgtgcatttgatattgtcacttctaccaccaacagctttctgcccactgctgaaattatctacactatctatgaaatcatccaagagtttccagcacttcaggaaagaaattacagtatttatttgaaccataccatgttattgaaagcaatactcttacactgtgggatcccagaagataaactcagtcaagtctacattattctgtatgatgctgtgacagagaagctgacgaggagagaagtggaagctaaattttgtaatctgtctttgtcttctaatagtctgtgtcgactctacaagtttattgaacagaagggagatttgcaagatcttatgccaacaataaattcattaataaaacagaaaacaggtattgcacagttggtgaagtatggcttaaaagacctagaggaggttgttggactgttgaagaaactcggcatcaagttacaggtcttgatcaatttgggcttggtttacaaggtgcagcagcacaatggaatcatcttccagtttgtggctttcatcaaacgaaggcaaagggctgtacctgaaatcctcgcagctggaggcagatatgacctgctgattccccagtttagagggccacaagctctggggccagttcccactgccattggggtcagcatagctatagacaagatatctgctgctgtcctcaacatggaggaatctgttacaataagctcttgtgacctcctggttgtaagtgttggtcagatgtctatgtccagggccatcaacctaacccagaaactctggacagcaggcatcacagcagaaatcatgtacgactggtcacagtcccaagaggaattacaagagtactgcagacatcatgaaatcacctatgtggcccttgtctcggataaagaaggaagccatgtcaaggttaagtctttcgagaaggaaaggcagacagagaagcgtgtgctggagactgaacttgtggaccatgtactgcagaaactgaggactaaagtcactgatgaaaggaatggcagagaagcttccgataatcttgcagtgcaaaatctgaaggggtcattttctaatgcttcaggtttgtttgaaatccatggagcaacagtggttcccattgtgagtgtgctagccccggagaagctgtcagccagcactaggaggcgctatgaaactcaggtacaaactcgacttcagacctcccttgccaacttacatcagaaaagcagtgaaattgaaattctggctgtggatctacccaaagaaacaatattacagtttttatcattagagtgggatgctgatgaacaggcatttaacacaactgtgaagcagctgctgtcacgcctgccaaagcaaagatacctcaaattagtctgtgatgaaatttataacatcaaagtagaaaaaaaggtgtctgtgctatttctgtacagctatagagatgactactacagaatcttattttaaccctaaagaactgtcgttaacctcattcaaacagacagaggcttatactggaataatggaatgttgtacattcatcataatttaaaattaaattctaagaagaggctgggtgcagtggctcacacctttaatcccagcactttgggaagccaaggcaggaagactgcttgaaaccaggagtttgagaccagcctgagcaacaaagcaagaccccatctctataaaaactaaaaaaattagttgggcatggtggcacatgcctgtagtcccagctactccagaggctgagatggatcatctgagcctcaggaggttgaggctgcagtgagctgtgactgcgccactgcactccagtctgggacaacagagcaagaccctgtcttaaaaaaaaaaagaaaaaaaaattttttttctaagaagctgtcctacaaagttgagctttgttagtttttcatgtgtaatatattataaatttatcttttgggatataataaatgctttcatatacctgcaaaattttaat

SEQ ID NO: 426633 - DNA, 2395 bp, Homo sapiens
  misc_feature (13)..(14): n is a, c, g, or t
  misc_feature (17)..(17): n is a, c, g, or t
  misc_feature (24)..(24): n is a, c, g, or t
tacagtctggtcnnccncgagtantggcatatcgtcgacccagccccgcgattacaccggaggcacagcgacatactgaagggcaacttctcaatccgtacagccaagatgcagcagcatgtgtgtgaaaccatcatccgcatctttaaaagacatggagctgttcagttgtgtactccactactgcttccccgaaacagacaaatatatgagcacaacgaagctgccctattcatggaccacagcgggatgctggtgatgcttccttttgacctgcggatcccttttgcaagatatgtggcaagaaataatatattgaatttaaaacgatactgcatagaacgtgtgttcaggccgcgcaagttagatcgatttcatcccaaagaacttctggagtgtgcatttgatattgtcacttctaccaccaacagctttctgcccactgctgaaattatctacactatctatgaaatcatccaagagtttccagcacttcaggaaagaaattacagtatttatttgaaccataccatgttattgaaagcaatactcttacactgtgggatcccagaagataaactcagtcaagtctacattattctgtatgatgctgtgacagagaagctgacgaggagagaagtggaagctaaattttgtaatctgtctttgtcttctaatagtctgtgtcgactctacaagtttattgaacagaagggagatttgcaagatcttatgccaacaataaattcattaataaaacagaaaacaggtattgcacagttggtgaagtatggcttaaaagacctagaggaggttgttggactgttgaagaaactcggcatcaagttacaggtcttgatcaatttgggcttggtttacaaggtgcagcagcacaatggaatcatcttccagtttgtggctttcatcaaacgaaggcaaagggctgtacctgaaatcctcgcagctggaggcagatatgacctgctgattccccagtttagagggccacaagctctggggccagttcccactgccattggggtcagcatagctatagacaagatatctgctgctgtcctcaacatggaggaatctgttacaataagctcttgtgacctcctggttgtaagtgttggtcagatgtctatgtccagggccatcaacctaacccagaaactctggacagcaggcatcacagcagaaatcatgtacgactggtcacagtcccaagaggaattacaagagtactgcagacatcatgaaatcacctatgtggcccttgtctcggataaagaaggaagccatgtcaaggttaagtctttcgagaaggaaaggcagacagagaagcgtgtgctggagactgaacttgtggaccatgtactgcagaaactgaggactaaagtcactgatgaaaggaatggcagagaagcttccgataatcttgcagtgcaaaatctgaaggggtcattttctaatgcttcaggtttgtttgaaatccatggagcaacagtggttcccattgtgagtgtgctagccccggagaagctgtcagccagcactaggaggcgctatgaaactcaggtacaaactcgacttcagacctcccttgccaacttacatcagaaaagcagtgaaattgaaattctggctgtggatctacccaaagaaacaatattacagtttttatcattagagtgggatgctgatgaacaggcatttaacacaactgtgaagcagctgctgtcacgcctgccaaagcaaagatacctcaaattagtctgtgatgaaatttataacatcaaagtagaaaaaaaggtgtctgtgctatttctgtacagctatagagatgactactacagaatcttattttaaccctaaagaactgtcgttaacctcattcaaacagacagaggcttatactggaataatggaatgttgtacattcatcataatttaaaattaaattctaagaagaggctgggtgcagtggctcacacctttaatcccagcactttgggaagccaaggcaggaagactgcttgaaaccaggagtttgagaccagcctgagcaacaaagcaagaccccatctctataaaaactaaaaaaattagttgggcatggtggcacatgcctgtagtcccagctactccagaggctgagatggatcatctgagcctcaggaggttgaggctgcagtgagctgtgactgcgccactgcactccagtctgggacaacagagcaagaccctgtcttaaaaaaaaaaagaaaaaaaaattttttttctaagaagctgtcctacaaagttgagctttgttagtttttcatgtgtaatatattataaatttatcttttgggatataataaatgctttcatatacctgcaaaattttaat

SEQ ID NO: 426634 - DNA, 5252 bp, Homo sapiens
gagctacccgcaacgacaggaccacgagctacaggccctggaggccatttacggcgcggacttccaagacctgcggccggacgcttgcggaccggtcaaagagccccctgaaatcaatttagttttgtaccctcaaggcctaactggtgaagaagtatatgtaaaagtggatttgagggttaaatgcccacctacctatccagatgtagttcctgaaatagagttaaaaaatgccaaaggtctatcaaatgaaagtgtcaatttgttaaaatctcgcctagaagaactggccaagaaacactgtggggaggtgatgatctttgaactggcttaccacgtgcagtcatttctcagcgagcataacaagccccctcccaagtcttttcatgaagaaatgctggaaaggcgggctcaggaggagcagcagaggctgttggaggccaagcggaaagaagagcaggagcaacgtgaaatcctgcatgagattcagagaaggaaagaagagataaaagaagagaaaaaaaggaaagaaatggctaagcaggaacgtttggaaattgctagtttgtcaaaccaagatcatacctctaagaaggacccaggaggacacagaacggctgccattctacatggaggctctcctgactttgtaggaaatggtaaacatcgggcaaactcctcaggaaggtctaggcgagaacgtcagtattctgtatgtaatagtgaagattctcctggctcttgtgaaattctgtatttcaatatggggagtcctgatcagctcatggtgcacaaagggaaatgtattggcagtgatgaacaacttggaaaattagtctacaatgctttggaaacagccactggtggctttgtcttgttgtatgagtgggtccttcagtggcagaaaaaaatgggtccattccttaccagtcaagaaaaagagaagattgataagtgcaaaaagcagattcaaggaacagaaacagaattcaactcactggtaaaattgagccatccaaatgtagtacgctaccttgcaatgaatctcaaagagcaagacgactccatcgtggtggacattttagtggagcacattagtggggtctctcttgctgcacacctgagccactcaggccccatccctgtgcatcagcttcgcaggtacacagctcagctcctgtcaggccttgattatctgcacagcaattctgtggtgcataaggtcctgagtgcatctaatgtcttggtggatgcagaaggcaccgtcaagattacggactatagcatttctaagcgcctcgcagacatttgcaaggaggatgtgtttgagcaaacccgagttcgttttagtgacaatgctctgccttataaaacggggaagaaaggagatgtttggcgtcttggccttctgctgctgtccctcagccaaggacaggaatgtggagagtaccctgtgaccatccctagtgacttaccagctgactttcaagattttctaaagaaatgtgtgtgcttggatgacaaggaaagatggagtccccagcagttgttgaaacacagctttataaatccccagccaaaaatgcctctagtggaacaaagtcctgaagattctggaggacaagattatgttgagactgttattcctagcaaccggctacccagtgctgccttctttagtgagacacagagacagttttcccgatacttcattgagtttgaagaattacaacttcttggtaaaggagcttttggagctgtcatcaaggtgcagaacaagttggacggctgctgctacgcagtgaagcgcatccccatcaacccggccagccggcagttccgcaggatcaagggcgaagtgacactgctgtcacggctgcaccatgagaacattgtgcgctactacaacgcctggatcgagcggcacgagcggccggcgggaccggggacgccgcccccggactccgggcccctggccaaggatgaccgagctgcacgcgggcagccggcgagcgacacagacggcctggacagcgtagaggccgccgcgccgccacccatcctcagcagctcggtggagtggagcacttcgggcgagcgctcggccagtgcccgtttccccgccaccggcccgggctccagcgatgacgaggacgacgacgaggacgagcacggtggcgtcttctcccagtccttcctgcctgcttcagattctgaaagtgatattatctttgacaatgaagatgagaacagtaaaagtcagaatcaggatgaagattgcaatgaaaagaatggctgccatgaaagtgagccatcagtgacgactgaggctgtgcactacctatacatccagatggagtactgtgagaagagcactttacgagacaccattgaccagggactgtatcgagacaccgtcagactctggaggctttttcgagagattctggatggattagcttatatccatgagaaaggaatgattcaccgggatttgaagcctgtcaacatttttttggattctgatgaccatgtgaaaataggtgattttggtttggcgacagaccatctagccttttctgctgacagcaaacaagacgatcagacaggagacttgattaagtcagacccttcaggtcacttaactgggatggttggcactgctctctatgtaagcccagaggtccaaggaagcaccaaatctgcatacaaccagaaagtggatctcttcagcctgggaattatcttctttgagatgtcctatcaccccatggtcacggcttcagaaaggatctttgttctcaaccaactcagagatcccacttcgcctaagtttccagaagactttgacgatggagagcatgcaaagcagaaatcagtcatctcctggctgttgaaccacgatccagcaaaacggcccacagccacagaactgctcaagagtgagctgctgcccccaccccagatggaggagtcagagctgcatgaagtgctgcaccacacgctgaccaacgtggatgggaaggcctaccgcaccatgatggcccagatcttctcgcagcgcatctcccctgccatcgattacacctatgacagcgacatactgaagggcaacttctcaatccgtacagccaagatgcagcagcatgtgtgtgaaaccatcatccgcatctttaaaagacatggagctgttcagttgtgtactccactactgcttccccgaaacagacaaatatatgagcacaacgaagctgccctattcatggaccacagcgggatgctggtgatgcttccttttgacctgcggatcccttttgcaagatatgtggcaagaaataatatattgaatttaaaacgatactgcatagaacgtgtgttcaggccgcgcaagttagatcgatttcatcccaaagaacttctggagtgtgcatttgatattgtcacttctaccaccaacagctttctgcccactgctgaaattatctacactatctatgaaatcatccaagagtttccagcacttcaggaaagaaattacagtatttatttgaaccataccatgttattgaaagcaatactcttacactgtgggatcccagaagataaactcagtcaagtctacattattctgtatgatgctgtgacagagaagctgacgaggagagaagtggaagctaaattttgtaatctgtctttgtcttctaatagtgtcttgatcaatttgggcttggtttacaaggtgcagcagcacaatggaatcatcttccagtttgtggctttcatcaaacgaaggcaaagggctgtacctgaaatcctcgcagctggaggcagatatgacctgctgattccccagtttagagggccacaagctctggggccagttcccactgccattggggtcagcatagctatagacaagatatctgctgctgtcctcaacatggaggaatctgttacaataagctcttgtgacctcctggttgtaagtgttggtcagatgtctatgtccagggccatcaacctaacccagaaactctggacagcaggcatcacagcagaaatcatgtacgactggtcacagtcccaagaggaattacaagagtactgcagacatcatgaaatcacctatgtggcccttgtctcggataaagaaggaagccatgtcaaggttaagtctttcgagaaggaaaggcagacagagaagcgtgtgctggagactgaacttgtggaccatgtactgcagaaactgaggactaaagtcactgatgaaaggaatggcagagaagcttccgataatcttgcagtgcaaaatctgaaggggtcattttctaatgcttcaggtttgtttgaaatccatggagcaacagtggttcccattgtgagtgtgctagccccggagaagctgtcagccagcactaggaggcgctatgaaactcaggtacaaactcgacttcagacctcccttgccaacttacatcagaaaagcagtgaaattgaaattctggctgtggatctacccaaagaaacaatattacagtttttatcattagagtgggatgctgatgaacaggcatttaacacaactgtgaagcagctgctgtcacgcctgccaaagcaaagatacctcaaattagtctgtgatgaaatttataacatcaaagtagaaaaaaaggtgtctgtgctatttctgtacagctatagagatgactactacagaatcttattttaaccctaaagaactgtcgttaacctcattcaaacagacagaggcttatactggaataatggaatgttgtacattcatcataatttaaaattaaattctaagaagaggctgggtgcagtggctcacacctttaatcccagcactttgggaagccaaggcaggaagactgcttgaaaccaggagtttgagaccagcctgagcaacaaagcaagaccccatctctataaaaactaaaaaaattagttgggcatggtggcacatgcctgtagtcccagctactccagaggctgagatggatcatctgagcctcaggaggttgaggctgcagtgagctgtgactgcgccactgcactccagtctgggacaacagagcaagaccctgtcttaaaaaaaaaaagaaaaaaaaattttttttctaagaagctgtcctacaaagttgagctttgttagtttttcatgtgtaatatattataaatttatcttttgggatataataaatgctttcatatacctgcaaaattttaat

SEQ ID NO: 426635 - DNA, 5241 bp, Homo sapiens
gagctacccgcaacgacaggaccacgagctacaggccctggaggccatttacggcgcggacttccaagacctgcggccggacgcttgcggaccggtcaaagagccccctgaaatcaatttagttttgtaccctcaaggcctaactggtgaagaagtatatgtaaaagtggatttgagggttaaatgcccacctacctatccagatgtagttcctgaaatagagttaaaaaatgccaaaggtctatcaaatgaaagtgtcaatttgttaaaatctcgcctagaagaactggccaagaaacactgtggggaggtgatgatctttgaactggcttaccacgtgcagtcatttctcagcgagcataacaagccccctcccaagtcttttcatgaagaaatgctggaaaggcgggctcaggaggagcagcagaggctgttggaggccaagcggaaagaagagcaggagcaacgtgaaatcctgcatgagattcagagaaggaaagaagagataaaagaagagaaaaaaaggaaagaaatggctaagcaggaacgtttggaaattgctagtttgtcaaaccaagatcatacctctaagaaggacccaggaggacacagaacggctgccattctacatggaggctctcctgactttgtaggaaatggtaaacatcgggcaaactcctcaggaaggtctaggcgagaacgtcagtattctgtatgtaatagtgaagattctcctggctcttgtgaaattctgtatttcaatatggggagtcctgatcagctcatggtgcacaaagggaaatgtattggcagtgatgaacaacttggaaaattagtctacaatgctttggaaacagccactggtggctttgtcttgttgtatgagtgggtccttcagtggcagaaaaaaatgggtccattccttaccagtcaagaaaaagagaagattgataagtgcaaaaagcagattcaaggaacagaaacagaattcaactcactggtaaaattgagccatccaaatgtagtacgctaccttgcaatgaatctcaaagagcaagacgactccatcgtggtggacattttagtggagcacattagtggggtctctcttgctgcacacctgagccactcaggccccatccctgtgcatcagcttcgcaggtacacagctcagctcctgtcaggccttgattatctgcacagcaattctgtggtgcataaggtcctgagtgcatctaatgtcttggtggatgcagaaggcaccgtcaagattacggactatagcatttctaagcgcctcgcagacatttgcaaggaggatgtgtttgagcaaacccgagttcgttttagtgacaatgctctgccttataaaacggggaagaaaggagatgtttggcgtcttggccttctgctgctgtccctcagccaaggacaggaatgtggagagtaccctgtgaccatccctagtgacttaccagctgactttcaagattttctaaagaaatgtgtgtgcttggatgacaaggaaagatggagtccccagcagttgttgaaacacagctttataaatccccagccaaaaatgcctctagtggaacaaagtcctgaagattctggaggacaagattatgttgagactgttattcctagcaaccggctacccagtgctgccttctttagtgagacacagagacagttttcccgatacttcattgagtttgaagaattacaacttcttggtaaaggagcttttggagctgtcatcaaggtgcagaacaagttggacggctgctgctacgcagtgaagcgcatccccatcaacccggccagccggcagttccgcaggatcaagggcgaagtgacactgctgtcacggctgcaccatgagaacattgtgcgctactacaacgcctggatcgagcggcacgagcggccggcgggaccggggacgccgcccccggactccgggcccctggccaaggatgaccgagctgcacgcgggcagccggcgagcgacacagacggcctggacagcgtagaggccgccgcgccgccacccatcctcagcagctcggtggagtggagcacttcgggcgagcgctcggccagtgcccgtttccccgccaccggcccgggctccagcgatgacgaggacgacgacgaggacgagcacggtggcgtcttctcccagtccttcctgcctgcttcagattctgaaagtgatattatctttgacaatgaagatgagaacagtaaaagtcagaatcaggatgaagattgcaatgaaaagaatggctgccatgaaagtgagccatcagtgacgactgaggctgtgcactacctatacatccagatggagtactgtgagaagagcactttacgagacaccattgaccagggactgtatcgagacaccgtcagactctggaggctttttcgagagattctggatggattagcttatatccatgagaaaggaatgattcaccgggatttgaagcctgtcaacatttttttggattctgatgaccatgtgaaaataggtgattttggtttggcgacagaccatctagccttttctgctgacagcaaacaagacgatcagacaggagacttgattaagtcagacccttcaggtcacttaactgggatggttggcactgctctctatgtaagcccagaggtccaaggaagcaccaaatctgcatacaaccagaaagtggatctcttcagcctgggaattatcttctttgagatgtcctatcaccccatggtcacggcttcagaaaggatctttgttctcaaccaactcagagatcccacttcgcctaagtttccagaagactttgacgatggagagcatgcaaagcagaaatcagtcatctcctggctgttgaaccacgatccagcaaaacggcccacagccacagaactgctcaagagtgagctgctgcccccaccccagatggaggagtcagagctgcatgaagtgctgcaccacacgctgaccaacgtggatgggaaggcctaccgcaccatgatggcccagatcttctcgcagcgcatctcccctgccatcgattacacctatgacagcgacatactgaagggcaacttctcaatccgtacagccaagatgcagcagcatgtgtgtgaaaccatcatccgcatctttaaaagacatggagctgttcagttgtgtactccactactgcttccccgaaacagacaaatatatgagcacaacgaagctgccctattcatggaccacagcgggatgctggtgatgcttccttttgacctgcggatcccttttgcaagatatgtggcaagaaataatatattgaatttaaaacgatactgcatagaacgtgtgttcaggccgcgcaagttagatcgatttcatcccaaagaacttctggagtgtgcatttgatattgtcacttctaccaccaacagctttctgcccactgctgaaattatctacactatctatgaaatcatccaagagtttccagcacttcaggaaagaaattacagtatttatttgaaccataccatgttattgaaagcaatactcttacactgtgggatcccagaagataaactcagtcaagtctacattattctgtatgatgctgtgacagagaagctgacgaggagagaagtggaagctaaattttgtaatctgtctttgtcttctaatagtctgtgtcgactctacaagtttattgaacagaagggagatttgcaagatcttatgccaacaataaattcattaataaaacagaaaacaggtattgcacagttggtgaagtatggcttaaaagacctagaggaggttgttggactgttgaagaaactcggcatcaagttacaggtcttgatcaatttgggcttggtttacaaggtgcagcagcacaatggaatcatcttccagtttgtggctttcatcaaacgaaggcaaagggctgtacctgaaatcctcgcagctggaggcagatatgacctgctgattccccagtttagagggccacaagctctggggccagttcccactgccattggggtcagcatagctatagacaagatatctgctgctgtcctcaacatggaggaatctgttacaataagctcttgtgacctcctggttgtaagtgttggtcagatgtctatgtccagggccatcaacctaacccagaaactctggacagcaggcatcacagcagaaatcatgtacgactggtcacagtcccaagaggaattacaagagtactgcagacatcatgaaatcacctatgtggcccttgtctcggataaagaaggaagccatgtcaagagaagcttccgataatcttgcagtgcaaaatctgaaggggtcattttctaatgcttcaggtttgtttgaaatccatggagcaacagtggttcccattgtgagtgtgctagccccggagaagctgtcagccagcactaggaggcgctatgaaactcaggtggatctacccaaagaaacaatattacagtttttatcattagagtgggatgctgatgaacaggcatttaacacaactgtgaagcagctgctgtcacgcctgccaaagcaaagatacctcaaattagtctgtgatgaaatttataacatcaaagtagaaaaaaaggtgtctgtgctatttctgtacagctatagagatgactactacagaatcttattttaaccctaaagaactgtcgttaacctcattcaaacagacagaggcttatactggaataatggaatgttgtacattcatcataatttaaaattaaattctaagaagaggctgggtgcagtggctcacacctttaatcccagcactttgggaagccaaggcaggaagactgcttgaaaccaggagtttgagaccagcctgagcaacaaagcaagaccccatctctataaaaactaaaaaaattagttgggcatggtggcacatgcctgtagtcccagctactccagaggctgagatggatcatctgagcctcaggaggttgaggctgcagtgagctgtgactgcgccactgcactccagtctgggacaacagagcaagaccctgtcttaaaaaaaaaaagaaaaaaaaattttttttctaagaagctgtcctacaaagttgagctttgttagtttttcatgtgtaatatattataaatttatcttttgggatataataaatgctttcatatacctgcaaaattttaat

SEQ ID NO: 426636 - DNA, 5309 bp, Homo sapiens
gagctacccgcaacgacaggaccacgagctacaggccctggaggccatttacggcgcggacttccaagacctgcggccggacgcttgcggaccggtcaaagagccccctgaaatcaatttagttttgtaccctcaaggcctaactggtgaagaagtatatgtaaaagtggatttgagggttaaatgcccacctacctatccagatgtagttcctgaaatagagttaaaaaatgccaaaggtctatcaaatgaaagtgtcaatttgttaaaatctcgcctagaagaactggccaagaaacactgtggggaggtgatgatctttgaactggcttaccacgtgcagtcatttctcagcgagcataacaagccccctcccaagtcttttcatgaagaaatgctggaaaggcgggctcaggaggagcagcagaggctgttggaggccaagcggaaagaagagcaggagcaacgtgaaatcctgcatgagattcagagaaggaaagaagagataaaagaagagaaaaaaaggaaagaaatggctaagcaggaacgtttggaaattgctagtttgtcaaaccaagatcatacctctaagaaggacccaggaggacacagaacggctgccattctacatggaggctctcctgactttgtaggaaatggtaaacatcgggcaaactcctcaggaaggtctaggcgagaacgtcagtattctgtatgtaatagtgaagattctcctggctcttgtgaaattctgtatttcaatatggggagtcctgatcagctcatggtgcacaaagggaaatgtattggcagtgatgaacaacttggaaaattagtctacaatgctttggaaacagccactggtggctttgtcttgttgtatgagtgggtccttcagtggcagaaaaaaatgggtccattccttaccagtcaagaaaaagagaagattgataagtgcaaaaagcagattcaaggaacagaaacagaattcaactcactggtaaaattgagccatccaaatgtagtacgctaccttgcaatgaatctcaaagagcaagacgactccatcgtggtggacattttagtggagcacattagtggggtctctcttgctgcacacctgagccactcaggccccatccctgtgcatcagcttcgcaggtacacagctcagctcctgtcaggccttgattatctgcacagcaattctgtggtgcataaggtcctgagtgcatctaatgtcttggtggatgcagaaggcaccgtcaagattacggactatagcatttctaagcgcctcgcagacatttgcaaggaggatgtgtttgagcaaacccgagttcgttttagtgacaatgctctgccttataaaacggggaagaaaggagatgtttggcgtcttggccttctgctgctgtccctcagccaaggacaggaatgtggagagtaccctgtgaccatccctagtgacttaccagctgactttcaagattttctaaagaaatgtgtgtgcttggatgacaaggaaagatggagtccccagcagttgttgaaacacagctttataaatccccagccaaaaatgcctctagtggaacaaagtcctgaagattctggaggacaagattatgttgagactgttattcctagcaaccggctacccagtgctgccttctttagtgagacacagagacagttttcccgatacttcattgagtttgaagaattacaacttcttggtaaaggagcttttggagctgtcatcaaggtgcagaacaagttggacggctgctgctacgcagtgaagcgcatccccatcaacccggccagccggcagttccgcaggatcaagggcgaagtgacactgctgtcacggctgcaccatgagaacattgtgcgctactacaacgcctggatcgagcggcacgagcggccggcgggaccggggacgccgcccccggactccgggcccctggccaaggatgaccgagctgcacgcgggcagccggcgagcgacacagacggcctggacagcgtagaggccgccgcgccgccacccatcctcagcagctcggtggagtggagcacttcgggcgagcgctcggccagtgcccgtttccccgccaccggcccgggctccagcgatgacgaggacgacgacgaggacgagcacggtggcgtcttctcccagtccttcctgcctgcttcagattctgaaagtgatattatctttgacaatgaagatgagaacagtaaaagtcagaatcaggatgaagattgcaatgaaaagaatggctgccatgaaagtgagccatcagtgacgactgaggctgtgcactacctatacatccagatggagtactgtgagaagagcactttacgagacaccattgaccagggactgtatcgagacaccgtcagactctggaggctttttcgagagattctggatggattagcttatatccatgagaaaggaatgattcaccgggatttgaagcctgtcaacatttttttggattctgatgaccatgtgaaaataggtgattttggtttggcgacagaccatctagccttttctgctgacagcaaacaagacgatcagacaggagacttgattaagtcagacccttcaggtcacttaactgggatggttggcactgctctctatgtaagcccagaggtccaaggaagcaccaaatctgcatacaaccagaaagtggatctcttcagcctgggaattatcttctttgagatgtcctatcaccccatggtcacggcttcagaaaggatctttgttctcaaccaactcagagatcccacttcgcctaagtttccagaagactttgacgatggagagcatgcaaagcagaaatcagtcatctcctggctgttgaaccacgatccagcaaaacggcccacagccacagaactgctcaagagtgagctgctgcccccaccccagatggaggagtcagagctgcatgaagtgctgcaccacacgctgaccaacgtggatgggaaggcctaccgcaccatgatggcccagatcttctcgcagcgcatctcccctgccatcgattacacctatgacagcgacatactgaagggcaacttctcaatccgtacagccaagatgcagcagcatgtgtgtgaaaccatcatccgcatctttaaaagacatggagctgttcagttgtgtactccactactgcttccccgaaacagacaaatatatgagcacaacgaagctgccctattcatggaccacagcgggatgctggtgatgcttccttttgacctgcggatcccttttgcaagatatgtggcaagaaataatatattgaatttaaaacgatactgcatagaacgtgtgttcaggccgcgcaagttagatcgatttcatcccaaagaacttctggagtgtgcatttgatattgtcacttctaccaccaacagctttctgcccactgctgaaattatctacactatctatgaaatcatccaagagtttccagcacttcaggaaagaaattacagtatttatttgaaccataccatgttattgaaagcaatactcttacactgtgggatcccagaagataaactcagtcaagtctacattattctgtatgatgctgtgacagagaagctgacgaggagagaagtggaagctaaattttgtaatctgtctttgtcttctaatagtctgtgtcgactctacaagtttattgaacagaagggagatttgcaagatcttatgccaacaataaattcattaataaaacagaaaacaggtattgcacagttggtgaagtatggcttaaaagacctagaggaggttgttggactgttgaagaaactcggcatcaagttacaggtcttgatcaatttgggcttggtttacaaggtgcagcagcacaatggaatcatcttccagtttgtggctttcatcaaacgaaggcaaagggctgtacctgaaatcctcgcagctggaggcagatatgacctgctgattccccagtttagagggccacaagctctggggccagttcccactgccattggggtcagcatagctatagacaagatatctgctgctgtcctcaacatggaggaatctgttacaataagctcttgtgacctcctggttgtaagtgttggtcagatgtctatgtccagggccatcaacctaacccagaaactctggacagcaggcatcacagcagaaatcatgtacgactggtcacagtcccaagaggaattacaagagtactgcagacatcatgaaatcacctatgtggcccttgtctcggataaagaaggaagccatgtcaaggttaagtctttcgagaaggaaaggcagacagagaagcgtgtgctggagactgaacttgtggaccatgtactgcagaaactgaggactaaagtcactgatgaaaggaatggcagagaagcttccgataatcttgcagtgcaaaatctgaaggggtcattttctaatgcttcaggtttgtttgaaatccatggagcaacagtggttcccattgtgagtgtgctagccccggagaagctgtcagccagcactaggaggcgctatgaaactcagtgggatgctgatgaacaggcatttaacacaactgtgaagcagctgctgtcacgcctgccaaagcaaagatacctcaaattagtctgtgatgaaatttataacatcaaagtagaaaaaaaggtgtctgtgctatttctgtacagctatagagatgactactacagaatcttattttaaccctaaagaactgtcgttaacctcattcaaacagacagaggcttatactggaataatggaatgttgtacattcatcataatttaaaattaaattctaagaagaggctgggtgcagtggctcacacctttaatcccagcactttgggaagccaaggcaggaagactgcttgaaaccaggagtttgagaccagcctgagcaacaaagcaagaccccatctctataaaaactaaaaaaattagttgggcatggtggcacatgcctgtagtcccagctactccagaggctgagatggatcatctgagcctcaggaggttgaggctgcagtgagctgtgactgcgccactgcactccagtctgggacaacagagcaagaccctgtcttaaaaaaaaaaagaaaaaaaaattttttttctaagaagctgtcctacaaagttgagctttgttagtttttcatgtgtaatatattataaatttatcttttgggatataataaatgctttcatatacctgcaaaattttaat

SEQ ID NO: 426637 - DNA, 5260 bp, Homo sapiens
gagctacccgcaacgacaggaccacgagctacaggccctggaggccatttacggcgcggacttccaagacctgcggccggacgcttgcggaccggtcaaagagccccctgaaatcaatttagttttgtaccctcaaggcctaactggtgaagaagtatatgtaaaagtggatttgagggttaaatgcccacctacctatccagatgtagttcctgaaatagagttaaaaaatgccaaaggtctatcaaatgaaagtgtcaatttgttaaaatctcgcctagaagaactggccaagaaacactgtggggaggtgatgatctttgaactggcttaccacgtgcagtcatttctcagcgagcataacaagccccctcccaagtcttttcatgaagaaatgctggaaaggcgggctcaggaggagcagcagaggctgttggaggccaagcggaaagaagagcaggagcaacgtgaaatcctgcatgagattcagagaaggaaagaagagataaaagaagagaaaaaaaggaaagaaatggctaagcaggaacgtttggaaattgctagtttgtcaaaccaagatcatacctctaagaaggacccaggaggacacagaacggctgccattctacatggaggctctcctgactttgtaggaaatggtaaacatcgggcaaactcctcaggaaggtctaggcgagaacgtcagtattctgtatgtaatagtgaagattctcctggctcttgtgaaattctgtatttcaatatggggagtcctgatcagctcatggtgcacaaagggaaatgtattggcagtgatgaacaacttggaaaattagtctacaatgctttggaaacagccactggtggctttgtcttgttgtatgagtgggtccttcagtggcagaaaaaaatgggtccattccttaccagtcaagaaaaagagaagattgataagtgcaaaaagcagattcaaggaacagaaacagaattcaactcactggtaaaattgagccatccaaatgtagtacgctaccttgcaatgaatctcaaagagcaagacgactccatcgtggtggacattttagtggagcacattagtggggtctctcttgctgcacacctgagccactcaggccccatccctgtgcatcagcttcgcaggtacacagctcagctcctgtcaggccttgattatctgcacagcaattctgtggtgcataaggtcctgagtgcatctaatgtcttggtggatgcagaaggcaccgtcaagattacggactatagcatttctaagcgcctcgcagacatttgcaaggaggatgtgtttgagcaaacccgagttcgttttagtgacaatgctctgccttataaaacggggaagaaaggagatgtttggcgtcttggccttctgctgctgtccctcagccaaggacaggaatgtggagagtaccctgtgaccatccctagtgacttaccagctgactttcaagattttctaaagaaatgtgtgtgcttggatgacaaggaaagatggagtccccagcagttgttgaaacacagctttataaatccccagccaaaaatgcctctagtggaacaaagtcctgaagattctggaggacaagattatgttgagactgttattcctagcaaccggctacccagtgctgccttctttagtgagacacagagacagttttcccgatacttcattgagtttgaagaattacaacttcttggtaaaggagcttttggagctgtcatcaaggtgcagaacaagttggacggctgctgctacgcagtgaagcgcatccccatcaacccggccagccggcagttccgcaggatcaagggcgaagtgacactgctgtcacggctgcaccatgagaacattgtgcgctactacaacgcctggatcgagcggcacgagcggccggcgggaccggggacgccgcccccggactccgggcccctggccaaggatgaccgagctgcacgcgggcagccggcgagcgacacagacggcctggacagcgtagaggccgccgcgccgccacccatcctcagcagctcggtggagtggagcacttcgggcgagcgctcggccagtgcccgtttccccgccaccggcccgggctccagcgatgacgaggacgacgacgaggacgagcacggtggcgtcttctcccagtccttcctgcctgcttcagattctgaaagtgatattatctttgacaatgaagatgagaacagtaaaagtcagaatcaggatgaagattgcaatgaaaagaatggctgccatgaaagtgagccatcagtgacgactgaggctgtgcactacctatacatccagatggagtactgtgagaagagcactttacgagacaccattgaccagggactgtatcgagacaccgtcagactctggaggctttttcgagagattctggatggattagcttatatccatgagaaaggaatgattcaccgggatttgaagcctgtcaacatttttttggattctgatgaccatgtgaaaataggtgattttggtttggcgacagaccatctagccttttctgctgacagcaaacaagacgatcagacaggagacttgattaagtcagacccttcaggtcacttaactgggatggttggcactgctctctatgtaagcccagaggtccaaggaagcaccaaatctgcatacaaccagaaagtggatctcttcagcctgggaattatcttctttgagatgtcctatcaccccatggtcacggcttcagaaaggatctttgttctcaaccaactcagagatcccacttcgcctaagtttccagaagactttgacgatggagagcatgcaaagcagaaatcagtcatctcctggctgttgaaccacgatccagcaaaacggcccacagccacagaactgctcaagagtgagctgctgcccccaccccagatggaggagtcagagctgcatgaagtgctgcaccacacgctgaccaacgtggatgggaaggcctaccgcaccatgatggcccagatcttctcgcagcgcatctcccctgccatcgattacacctatgacagcgacatactgaagggcaacttctcaatccgtacagccaagatgcagcagcatgtgtgtgaaaccatcatccgcatctttaaaagacatggagctgttcagttgtgtactccactactgcttccccgaaacagacaaatatatgagcacaacgaagctgccctattcatggaccacagcgggatgctggtgatgcttccttttgacctgcggatcccttttgcaagatatgtggcaagaaataatatattgaatttaaaacgatactgcatagaacgtgtgttcaggccgcgcaagttagatcgatttcatcccaaagaacttctggagtgtgcatttgatattgtcacttctaccaccaacagctttctgcccactgctgaaattatctacactatctatgaaatcatccaagagtttccagcacttcaggaaagaaattacagtatttatttgaaccataccatgttattgaaagcaatactcttacactgtgggatcccagaagataaactcagtcaagtctacattattctgtatgatgctgtgacagagaagctgacgaggagagaagtggaagctaaattttgtaatctgtctttgtcttctaatagtctgtgtcgactctacaagtttattgaacagaagggagatttgcaagatcttatgccaacaataaattcattaataaaacagaaaacaggtattgcacagttggtgaagtatggcttaaaagacctagaggaggttgttggactgttgaagaaactcggcatcaagttacaggtcttgatcaatttgggcttggtttacaaggtgcagcagcacaatggaatcatcttccagtttgtggctttcatcaaacgaaggcaaagggctgtacctgaaatcctcgcagctggaggcagatatgacctgctgattccccagtttagagggccacaagctctggggccagttcccactgccattggggtcagcatagctatagacaagatatctgctgctgtcctcaacatggaggaatctgttacaataagctcttgtgacctcctggttgtaagtgttggtcagatgtctatgtccagggccatcaacctaacccagaaactctggacagcaggcatcacagcagaaatcatgtacgactggtcacagtcccaagaggaattacaagagtactgcagacatcatgaaatcacctatgtggcccttgtctcggataaagaaggaagccatgtcaaggttaagtctttcgagaaggaaaggcagacagagaagcgtgtgctggagactgaacttgtggaccatgtactgcagaaactgaggactaaagtcactgatgaaaggaatggcagagaagcttccgataatcttgcagtgcaaaatctgaaggggtcattttctaatgcttcaggtttgtttgaaatccatggagcaacagtggttcccattgtgagtgtgctagccccggagaagctgtcagccagcactaggaggcgctatgaaactcaggtacaaactcgacttcagacctcccttgccaacttacatcagaaaagcagtgaaattgaaattctggctgtggatctacccaaagaaacaatattacagtttttatcattagagtgggatgctgatgaacaggcatttaacacaactgtgaagcagctgctgtcacgcctgccaaagcaaagatacctcaaattagtctgtgatgaaatttataacatcaaagtagaaaaaaaggtgtctgtgctatttctgtacagctatagagatgactactacagaatcttattttaaccctaaagaactgtcgttaacctcattcaaacagacagaggcttatactggaataatggaatgttgtacattcatcataatttaaaattaaattctaagaagaggctgggtgcagtggctcacacctttaatcccagcactttgggaagccaaggcaggaagactgcttgaaaccaggagtttgagaccagcctgagcaacaaaagcaagaccctgtcttaaaaaaaaaaagaaaaaaaaattttttttctaagaagctgtcctacaaagttgagctttgttagtttttcatgtgtaatatattataaatttatcttttgggatataataaatgctttcatatacctgcaaaattttaat

SEQ ID NO: 426638 - DNA, 5303 bp, Homo sapiens
gagctacccgcaacgacaggaccacgagctacaggccctggaggccatttacggcgcggacttccaagacctgcggccggacgcttgcggaccggtcaaagagccccctgaaatcaatttagttttgtaccctcaaggcctaactggtgaagaagtatatgtaaaagtggatttgagggttaaatgcccacctacctatccagatgtagttcctgaaatagagttaaaaaatgccaaaggtctatcaaatgaaagtgtcaatttgttaaaatctcgcctagaagaactggccaagaaacactgtggggaggtgatgatctttgaactggcttaccacgtgcagtcatttctcagcgagcataacaagccccctcccaagtcttttcatgaagaaatgctggaaaggcgggctcaggaggagcagcagaggctgttggaggccaagcggaaagaagagcaggagcaacgtgaaatcctgcatgagattcagagaaggaaagaagagataaaagaagagaaaaaaaggaaagaaatggctaagcaggaacgtttggaaattgctagtttgtcaaaccaagatcatacctctaagaaggacccaggaggacacagaacggctgccattctacatggaggctctcctgactttgtaggaaatggtaaacatcgggcaaactcctcaggaaggtctaggcgagaacgtcagtattctgtatgtaatagtgaagattctcctggctcttgtgaaattctgtatttcaatatggggagtcctgatcagctcatggtgcacaaagggaaatgtattggcagtgatgaacaacttggaaaattagtctacaatgctttggaaacagccactggtggctttgtcttgttgtatgagtgggtccttcagtggcagaaaaaaatgggtccattccttaccagtcaagaaaaagagaagattgataagtgcaaaaagcagattcaaggaacagaaacagaattcaactcactggtaaaattgagccatccaaatgtagtacgctaccttgcaatgaatctcaaagagcaagacgactccatcgtggtggacattttagtggagcacattagtggggtctctcttgctgcacacctgagccactcaggccccatccctgtgcatcagcttcgcaggtacacagctcagctcctgtcaggccttgattatctgcacagcaattctgtggtgcataaggtcctgagtgcatctaatgtcttggtggatgcagaaggcaccgtcaagattacggactatagcatttctaagcgcctcgcagacatttgcaaggaggatgtgtttgagcaaacccgagttcgttttagtgacaatgctctgccttataaaacggggaagaaaggagatgtttggcgtcttggccttctgctgctgtccctcagccaaggacaggaatgtggagagtaccctgtgaccatccctagtgacttaccagctgactttcaagattttctaaagaaatgtgtgtgcttggatgacaaggaaagatggagtccccagcagttgttgaaacacagctttataaatccccagccaaaaatgcctctagtggaacaaagtcctgaagattctggaggacaagattatgttgagactgttattcctagcaaccggctacccagtgctgccttctttagtgagacacagagacagttttcccgatacttcattgagtttgaagaattacaacttcttggtaaaggagcttttggagctgtcatcaaggtgcagaacaagttggacggctgctgctacgcagtgaagcgcatccccatcaacccggccagccggcagttccgcaggatcaagggcgaagtgacactgctgtcacggctgcaccatgagaacattgtgcgctactacaacgcctggatcgagcggcacgagcggccggcgggaccggggacgccgcccccggactccgggcccctggccaaggatgaccgagctgcacgcgggcagccggcgagcgacacagacggcctggacagcgtagaggccgccgcgccgccacccatcctcagcagctcggtggagtggagcacttcgggcgagcgctcggccagtgcccgtttccccgccaccggcccgggctccagcgatgacgaggacgacgacgaggacgagcacggtggcgtcttctcccagtccttcctgcctgcttcagattctgaaagtgatattatctttgacaatgaagatgagaacagtaaaagtcagaatcaggatgaagattgcaatgaaaagaatggctgccatgaaagtgagccatcagtgacgactgaggctgtgcactacctatacatccagatggagtactgtgagaagagcactttacgagacaccattgaccagggactgtatcgagacaccgtcagactctggaggctttttcgagagattctggatggattagcttatatccatgagaaaggaatgattcaccgggatttgaagcctgtcaacatttttttggattctgatgaccatgtgaaaataggtgattttggtttggcgacagaccatctagccttttctgctgacagcaaacaagacgatcagacaggagacttgattaagtcagacccttcaggtcacttaactgggatggttggcactgctctctatgtaagcccagaggtccaaggaagcaccaaatctgcatacaaccagaaagtggatctcttcagcctgggaattatcttctttgagatgtcctatcaccccatggtcacggcttcagaaaggatctttgttctcaaccaactcagagatcccacttcgcctaagtttccagaagactttgacgatggagagcatgcaaagcagaaatcagtcatctcctggctgttgaaccacgatccagcaaaacggcccacagccacagaactgctcaagagtgagctgctgcccccaccccagatggaggagtcagagctgcatgaagtgctgcaccacacgctgaccaacgtggatgggaaggcctaccgcaccatgatggcccagatcttctcgcagcgcatctcccctgccatcgattacacctatgacagcgacatactgaagggcaacttctcaatccgtacagccaagatgcagcagcatgtgtgtgaaaccatcatccgcatctttaaaagacatggagctgttcagttgtgtactccactactgcttccccgaaacagacaaatatatgagcacaacgaagctgccctattcatggaccacagcgggatgctggtgatgcttccttttgacctgcggatcccttttgcaagatatgtggcaagaaataatatattgaatttaaaacgatactgcatagaacgtgtgttcaggccgcgcaagttagatcgatttcatcccaaagaacttctggagtgtgcatttgatattgtcacttctaccaccaacagctttctgcccactgctgaaattatctacactatctatgaaatcatccaagagtttccagcacttcaggaaagaaattacagtatttatttgaaccataccatgttattgaaagcaatactcttacactgtgggatcccagaagataaactcagtcaagtctacattattctgtatgatgctgtgacagagaagctgacgaggagagaagtggaagctaaattttgtaatctgtctttgtcttctaatagtctgtgtcgactctacaagtttattgaacagaagggagatttgcaagatcttatgccaacaataaattcattaataaaacagaaaacaggtattgcacagttggtgaagtatggcttaaaagacctagaggaggttgttggactgttgaagaaactcggcatcaagttacaggtcttgatcaatttgggcttggtttacaaggtgcagcagcacaatggaatcatcttccagtttgtggctttcatcaaacgaaggcaaagggctgtacctgaaatcctcgcagctggaggcagatatgacctgctgattccccagtttagagggccacaagctctggggccagttcccactgccattggggtcagcatagctatagacaagatatctgctgctgtcctcaacatggaggaatctgttacaataagctcttgtgacctcctggttgtaagtgttggtcagatgtctatgtccagggccatcaacctaacccagaaactctggacagcaggcatcacagcagaaatcatgtacgactggtcacagtcccaagaggaattacaagagtactgcagacatcatgaaatcacctatgtggcccttgtctcggataaagaaggaagccatgtcaaggttaagtctttcgagaaggaaaggcagacagagaagcgtgtgctggagactgaacttgtggaccatgtactgcagaaactgaggactaaagtcactgatgaaaggaatggcagagaagcttccgataatcttgcagtgcaaaatctgaaggggtcattttctaatgcttcaggtttgtttgaaatccatggagcaacagtggttcccattgtgagtgtgctagccccggagaagctgtcagccagcactaggaggcgctatgaaactcaggtacaaactcgacttcagacctcccttgccaacttacatcagaaaagcagtgaaattgaaattctggctgtggatctacccaaagaaacaatattacagtttttatcattagagtgggatgctgatgaacaggcatttaacacaactgtgaagcagctgctgtcacgcctgccaaagcaaagatacctcaaattagtctgtgatgaaatttataacatcaaagtagaaaaaaaggtgtctgtgctatttctgtacagctatagagatgactactacagaatcttattttaaccctaaagaactgtcgttaacctcattcaaacagacagaggcttatactggaataatggaatgttgtacattcatcataatttaaaattaaattctaagaagaggctgggtgcagtggctcacacctaacttgccagctctttcagccgccgaggaccggaagagtccttgcaaactcaggaagatgaagacactcgtcctgagcaatctcagcgatacccgcgtctagagtatgatatcttacattacagcggttcctgttgaacaggccatgactgaatgttactgcgctgaggatgagctggatgatctgagcctctggatattgacggctgcagtgagatgtccatgcagattacactcagtctagtcatcagttgcagctccgttctctcttttctct

SEQ ID NO: 426639 - DNA, 1251 bp, Homo sapiens
acagacacctccgttgccaaaccaagacatggcattttctaaatgaatcagaggagcttttttcttggaacagggagttggtttgaaggtaaatacacttttttctttaacctgctgagcactaacaaagctggatcatcagcatattctgaccttctgaatccccaccatgtgttaccatggtgatgaggcagacagagaagcgtgtgctggagactgaacttgtggaccatgtactgcagaaactgaggactaaagtcactgatgaaaggaatggcagagaagcttccgataatcttgcagtgcaaaatctgaaggggtcattttctaatgcttcaggtttgtttgaaatccatggagcaacagtggttcccattgtgagtgtgctagccccggagaagctgtcagccagcactaggaggcgctatgaaactcaggtacaaactcgacttcagacctcccttgccaacttacatcagaaaagcagtgaaattgaaattctggctgtggatctacccaaagaaacaatattacagtttttatcattagagtgggatgctgatgaacaggcatttaacacaactgtgaagcagctgctgtcacgcctgccaaagcaaagatacctcaaattagtctgtgatgaaatttataacatcaaagtagaaaaaaaggtgtctgtgctatttctgtacagctatagagatgactactacagaatcttattttaaccctaaagaactgtcgttaacctcattcaaacagacagaggcttatactggaataatggaatgttgtacattcatcataatttaaaattaaattctaagaagaggctgggtgcagtggctcacacctttaatcccagcactttgggaagccaaggcaggaagactgcttgaaaccaggagtttgagaccagcctgagcaacaaagcaagaccccatctctataaaaactaaaaaaattagttgggcatggtggcacatgcctgtagtcccagctactccagaggctgagatggatcatctgagcctcaggaggttgaggctgcagtgagctgtgactgcgccactgcactccagtctgggacaacagagcaagaccctgtcttaaaaaaaaaaagaaaaaaaaattttttttctaagaagctgtcctacaaagttgagctttgttagtttttcatgtgtaatatattataaatttatcttttgggatataataaatgctttcatatacctgcaaaattttaat

SEQ ID NO: 426640 - DNA, 3153 bp, Homo sapiens
  misc_feature (3096)..(3096): n is a, c, g, or t
  misc_feature (3106)..(3106): n is a, c, g, or t
  misc_feature (3117)..(3117): n is a, c, g, or t
gagctacccgcaacgacaggaccacgagctacaggccctggaggccatttacggcgcggacttccaagacctgcggccggacgcttgcggaccggtcaaagagccccctgaaatcaatttagttttgtaccctcaaggcctaactggtgaagaagtatatgtaaaagtggatttgagggttaaatgcccacctacctatccagatgtagttcctgaaatagagttaaaaaatgccaaaggtctatcaaatgaaagtgtcaatttgttaaaatctcgcctagaagaactggccaagaaacactgtggggaggtgatgatctttgaactggcttaccacgtgcagtcatttctcagcgagcataacaagccccctcccaagtcttttcatgaagaaatgctggaaaggcgggctcaggaggagcagcagaggctgttggaggccaagcggaaagaagagcaggagcaacgtgaaatcctgcatgagattcagagaaggaaagaagagataaaagaagagaaaaaaaggaaagaaatggctaagcaggaacgtttggaaattgctagtttgtcaaaccaagatcatacctctaagaaggacccaggaggacacagaacggctgccattctacatggaggctctcctgactttgtaggaaatggtaaacatcgggcaaactcctcaggaaggtctaggcgagaacgtcagtattctgtatgtaatagtgaagattctcctggctcttgtgaaattctgtatttcaatatggggagtcctgatcagctcatggtgcacaaagggaaatgtattggcagtgatgaacaacttggaaaattagtctacaatgctttggaaacagccactggtggctttgtcttgttgtatgagtgggtccttcagtggcagaaaaaaatgggtccattccttaccagtcaagaaaaagagaagattgataagtgcaaaaagcagattcaaggaacagaaacagaattcaactcactggtaaaattgagccatccaaatgtagtacgctaccttgcaatgaatctcaaagagcaagacgactccatcgtggtggacattttagtggagcacattagtggggtctctcttgctgcacacctgagccactcaggccccatccctgtgcatcagcttcgcaggtacacagctcagctcctgtcaggccttgattatctgcacagcaattctgtggtgcataaggtcctgagtgcatctaatgtcttggtggatgcagaaggcaccgtcaagattacggactatagcatttctaagcgcctcgcagacatttgcaaggaggatgtgtttgagcaaacccgagttcgttttagtgacaatgctctgccttataaaacggggaagaaaggagatgtttggcgtcttggccttctgctgctgtccctcagccaaggacaggaatgtggagagtaccctgtgaccatccctagtgacttaccagctgactttcaagattttctaaagaaatgtgtgtgcttggatgacaaggaaagatggagtccccagcagttgttgaaacacagctttataaatccccagccaaaaatgcctctagtggaacaaagtcctgaagattctggaggacaagattatgttgagactgttattcctagcaaccggctacccagtgctgccttctttagtgagacacagagacagttttcccgatacttcattgagtttgaagaattacaacttcttggtaaaggagcttttggagctgtcatcaaggtgcagaacaagttggacggctgctgctacgcagtgaagcgcatccccatcaacccggccagccggcagttccgcaggatcaagggcgaagtgacactgctgtcacggctgcaccatgagaacattgtgcgctactacaacgcctggatcgagcggcacgagcggccggcgggaccggggacgccgcccccggactccgggcccctggccaaggatgaccgagctgcacgcgggcagccggcgagcgacacagacggcctggacagcgtagaggccgccgcgccgccacccatcctcagcagctcggtggagtggagcacttcgggcgagcgctcggccagtgcccgtttccccgccaccggcccgggctccagcgatgacgaggacgacgacgaggacgagcacggtggcgtcttctcccagtccttcctgcctgcttcagattctgaaagtgatattatctttgacaatgaagatgagaacagtaaaagtcagaatcaggatgaagattgcaatgaaaagaatggctgccatgaaagtgagccatcagtgacgactgaggctgtgcactacctatacatccagatggagtactgtgagaagagcactttacgagacaccattgaccagggactgtatcgagacaccgtcagactctggaggctttttcgagagattctggatggattagcttatatccatgagaaaggaatgattcaccgggatttgaagcctgtcaacatttttttggattctgatgaccatgtgaaaataggtgattttggtttggcgacagaccatctagccttttctgctgacagcaaacaagacgatcagacaggagacttgattaagtcagacccttcaggtcacttaactgggatggttggcactgctctctatgtaagcccagaggtccaaggaagcaccaaatctgcatacaaccagaaagtggatctcttcagcctgggaattatcttctttgagatgtcctatcaccccatggtcacggcttcagaaaggatctttgttctcaaccaactcagagatcccacttcgcctaagtttccagaagactttgacgatggagagcatgcaaagcagaaatcagtcatctcctggctgttgaaccacgatccagcaaaacggcccacagccacagaactgctcaagagtgagctgctgcccccaccccagatggaggagtcagagctgcatgaagtgctgcaccacacgctgaccaacgtggatgggaaggcctaccgcaccatgatggcccagatcttctcgcagcgcatctctttttacaacagggaaaaagtaaggangagacatacngaagggcgatntgtcaatccgtacagccaaatgctatgcggatgcgt

SEQ ID NO: 426641 - DNA, 860 bp, Homo sapiens
acagtggttcccattgtgagtgtgctagccccggagaagctgtcagccagcactaggaggcgctatgaaactcaggtacaaatctgaaggggtcattttctaatgcttcaggtttgtttgaaatccatggagcaacagtggttcccattgtgagtgtgctagccccggagaagctgtcagccagcactaggaggcgctatgaaactcaggtacaaactcgacttcagacctcccttgccaacttacatcagaaaagcagtgaaattgaaattctggctgtggatctacccaaagaaacaatattacagtttttatcattagagtgggatgctgatgaacaggcatttaacacaactgtgaagcagctgctgtcacgcctgccaaagcaaagatacctcaaattagtctgtgatgaaatttataacatcaaagtagaaaaaaaggtgtctgtgctatttctgtacagctatagagatgactactacagaatcttattttaaccctaaagaactgtcgttaacctcattcaaacagacagaggcttatactggaataatggaatgttgtacattcatcataatttaaaattaaattctaagaagaggctgggtgcagtggctcacacctttaatcccagcactttgggaagccaaggcaggaagactgcttgaaaccaggagtttgagaccagcctgagcaacaaaagcaagaccctgtcttaaaaaaaaaaagaaaaaaaaattttttttctaagaagctgtcctacaaagttgagctttgttagtttttcatgtgtaatatattataaatttatcttttgggatataataaatgctttcatatacctgcaaaattttaat

SEQ ID NO: 426642 - DNA, 334 bp, Homo sapiens
cccacttcgcctaagtttccagaagactttgacgatggagagcatgcaaagcaggtaattttctgatgcgtcaattactatgtcttcagtcttgcattttaattattatttttcttctttttcaattagtaatcttctgccactcattctcttgtgtcctgggaacaacgtggggaaaaaatatgaaaagatgaagcacttaaaatgtcattagacttgaactacaccataaaaatgccaagggctggcacagaaaattaacaaactgcagggttcttttgtgcaattcgttgtgcttttgaagtgctatttggacccttggcttagctgttga

SEQ ID NO: 426643 - DNA, 386 bp, Homo sapiens
gagtatatagtgaagttttgatacatataatgtatagtgatcggatcagggtaattagcacatccgtcactgcaaatatttagcatttctttgtgttggaaacattcaatatcctccttctagctattttaaacgattaaaagttaagttcaattttatttcacttgtaaacattcagcttaaaatttgcattctatactgaattaataattatgtaccatgattttcttccatgtatgacttacatctaaagtaagttttacttttcttgttctaggaacgtttggaaattgctagtttgtcaaaccaagatcatacctctaagaaggacccaggaggacacagaacggctgccattctacatggaggctctcctgactttgtag

SEQ ID NO: 426644 - DNA, 706 bp, Homo sapiens
ccaagatcatttacaaacattattagaattaatgtgagagtcagcaaggtgattccattgttgaacgttctttagttcagacataaagagttggaaaatataattttaaagatgtcatttataacatgaagaaattacaggccagccatggtggctcatgactgtaagctcagggctttgggaggattgcttaaggccagcagtttgagaccagcatgggcaacatagcaagaccttatctctataaaaataaaaaaattaatcaggtgtggaggcacagacctgtagtactagctactcaggaggctgagaagagaagatctcttgagcccaggagtttgaggcagcagtgagctgtgattacaccacagcagtccagcctgagtgacagagtgagactccatctcttaaaaaaaaaaaattacggagtatcttgcaagaaatctaataaaagatatttaaaagttttatgaagaaaattacaaaaagcggtagacttttactttgtgatccagcgcatgaggagcttggaagtcaccacctgtcctagcaacaaggaaaaactgaacaaactgaaaaatcaacaactcctcttggatctgtcagagaagcgaggtcacagggcaaattgctgtcccccaaattggtgagacagactgcgaatacagagaaccacagcttagagcagaagctccacagaaaccag

SEQ ID NO: 426645 - DNA, 764 bp, Homo sapiens
cgagcagcttggctaaaagtaagggtgtcgtgctgatggccctgtgcgcactgacccgcgctctgcgctctctgaacctggcgcccccgaccgtcgccgcccctgccccgagtctgttccccgccgcccagatgatgaacaatggcctcctccaacagccctctgccttgatgttgctcccctgccgcccagttcttacttctgtggcccttaatgccaactttgtgtcctggaagagtcgtaccaagtacaccattacaccagtgaagatgaggaagtctgggggccgagaccacacaggtgctggaaacgtgcgtagcaacagtaggccgagtatccaacgttgatcataacaaacgggtcattggcaaggcaggtcgcaaccgctggctgggcaagaggcctaacagtgggcggtggcaccgcaaggggggctgggctggccgaaagattcggccactaccccccatgaagagttacgtgaagctgccttctgcttctgcccaaagctgatatccctgtactctaataaaatgccccccccccccgttttaatctgttactgtggttttgttttgggtgttttttgttttttttgttgttgttttttttttgcgggggaggggatggtacagactaaacgtggggaaaagaagtaaaaagtgtggaagagaaagtacaggacactgggtctgtccccaccccaattcccttacaagtaatggagccggggatggaaataaatgacgtccaaggtcaaaaaa

SEQ ID NO: 426646 - DNA, 554 bp, Homo sapiens
cgagcagcttggctaaaagtaagggtgtcgtgctgatggccctgtgcgcactgacccgcgctctgcgctctctgaacctggcgcccccgaccgtcgccgcccctgccccgagtctgttccccgccgcccagatgatgaacaatggcctcctccaacagccctctgccttgatgttgctcccctgccgcccagttcttacttctgtggcccttaatgccaactttgtgtcctggaagagtcgtaccaagtacaccattacaccagtgaagatgaggaagtctgggggccgagaccacacaggtgggaacaaggacagggggatttaagcagtcaaaaggaaaaacatgttaagaccctagacttgtatattgacacacttgtaccttgtaaggcagaggaatgtaattaaaaagcacttatttggaaaaaaacaacaaaaacacaaaaaggggcggcccgcccaagagtttcccccgaggggggcccacaaagttaaacggcgtatcaccagggtgttctcattggacacagaagggtggccccctaattgggag

SEQ ID NO: 426647 - DNA, 1047 bp, Homo sapiens
acagaatctccatctgttttctctgtcaggtgctggaaacgtgcgtagcaacagtaggccgagtatccaacgttgatcataacaaacgggtcattggcaaggcaggtcgcaaccgctggctgggcaagaggcctaacagtgggcggtggcaccgcaaggggggctgggctggccgaaagattcggccactaccccccatgaagagttacgtgaagctgccttctgcttctgcccaaagctgatatccctgtactctaataaaatgccccccccccccggtaaaacaaaaaaaaaagaaaaaaaaaaaaagaaaaaaaaaaaacaaaaaaaaagaaaaaaaaaacaaaaaaaaaaacaaaaaaagcaaaaacaaacaagaaagaacaaacagacaaaagacaaacaagaaacgacaccatcaacaaaaaaaagagagaagagggggcgaaggggggacaagccgaggcacgacgggaggggcggggacgcgggcggcggccgggacccgccactagagcagagcgggagagggagcgagacgcacgagggggaggcgaagcacagagcgaggagagcggcgggggggggcgggcgcacaggcagagcacgcgaagcgggggggcagagaagcaacagagcagtcagagacagagaagagcagcaagggacaggcgagagggaggagagagcagcaccggggccgggatagcggagcagacgcacaccggcagcggagacacaaccgaccgcgatcgggcagaacaactcacgagcgaaggaccgcgaacgaaagaacaagatacaaggagtagtggaccgcgcgaacaagatctgcggacagagccggcctgcgcgacaagctagaaccgagcacgatagctcgagagactggaggtagcaggaggcgcgcgcgccagcagggcacggacgtacaggttcagagggcgaaggcgggaaaataaggcgagcaagaaagggacgacagagaagcgaccgggcgagcgaaggagcgggcagacagtgacgaacgggagggcgaggcaagag

SEQ ID NO: 426648 - DNA, 899 bp, Homo sapiens
cgagcagcttggctaaaagtaagggtgtcgtgctgatggccctgtgcgcactgacccgcgctctgcgctctctgaacctggcgcccccgaccgtcgccgcccctgccccgagtctgttccccgccgcccagatgatgaacaatggcctcctccaacagccctctgccttgatgttgctcccctgccgcccaagaaaacatgcaggctggagatacaatcttgaactctaaccacataggccgaatggcagttgctgctcgggaaggggatgcgcatcctcttggggctctgcctgtggggaccctcatcaacaacgtggaaagtgagccaggccggggtgcccaatatatccgagctgcagggacgtgtggtgtgctactgcggaaggtgaatggcacagccattatccagctgccctctaagaggcagatgcaggtgctggaaacgtgcgtagcaacagtaggccgagtatccaacgttgatcataacaaacgggtcattggcaaggcaggtcgcaaccgctggctgggcaagaggcctaacagtgggcggtggcaccgcaaggggggctgggctggccgaaagattcggccactaccccccatgaagagttacgtgaagctgccttctgcttctgcccaaagctgatatccctgtactctaataaaatgccccccccccccgttttaatctgttactgtggttttgttttgggtgttttttgttttttttgttgttgttttttttttgcgggggaggggatggtacagactaaacgtggggaaaagaagtaaaaagtgtggaagagaaagtacaggacactgggtctgtccccaccccaattcccttacaagtaatggagccggggatggaaataaatgacgtccaaggtcaaaaaa

SEQ ID NO: 426649 - DNA, 1130 bp, Homo sapiens
cgagcagcttggctaaaagtaagggtgtcgtgctgatggccctgtgcgcactgacccgcgctctgcgctctctgaacctggcgcccccgaccgtcgccgcccctgccccgagtctgttccccgccgcccagatgatgaacaatggcctcctccaacagccctctgccttgatgttgctcccctgccgcccagttcttacttctgtggcccttaatgccaactttgtgtcctggaagagtcgtaccaagtacaccattacaccagtgaagatgaggaagtctgggggccgagaccacacaggccgaatccgggtgcatggtattggcgggggccacaagcaacgttatcgaatgattgactttctgcgtttccggcctgaggagaccaagtcaggaccctttgaggagaaggttatccaagtccgctatgatccctgtaggtcagcagacatagctctggttgctgggggcagccggaaacgctggatcatcgccacagaaaacatgcaggctggagatacaatcttgaactctaaccacataggccgaatggcagttgctgctcgggaaggggatgcgcatcctcttggggctctgcctgtggggaccctcatcaacaacgtggaaagtgagccaggccggggtgcccaatatatccgagctgcaggtgctggaaacgtgcgtagcaacagtaggccgagtatccaacgttgatcataacaaacgggtcattggcaaggcaggtcgcaaccgctggctgggcaagaggcctaacagtgggcggtggcaccgcaaggggggctgggctggccgaaagattcggccactaccccccatgaagagttacgtgaagctgccttctgcttctgcccaaagctgatatccctgtactctaataaaatgccccccccccccgttttaatctgttactgtggttttgttttgggtgttttttgttttttttgttgttgttttttttttgcgggggaggggatggtacagactaaacgtggggaaaagaagtaaaaagtgtggaagagaaagtacaggacactgggtctgtccccaccccaattcccttacaagtaatggagccggggatggaaataaatgacgtccaaggtcaaaaaa

SEQ ID NO: 426650 - DNA, 424 bp, Homo sapiens
cgagcagcttggctaaaagtaagggtgtcgtgctgatggccctgtgcgcactgacccgcgctctgcgctctctgaacctggcgcccccgaccgtcgccgcccctgccccgagtctgttccccgccgcccagatgatgaacaatggcctcctccaacagccctctgccttgatgttgctcccctgccgcccagttcttacttctgtggcccttaatgccaactttgtgtcctggaagagtcgtaccaagtacaccattacaccagtgaagatgaggaagtctgggggccgagaccacacaggtgggaacaaggacagggggatttaagcagtcaaaaggaaaaacatgttaagaccctagacttgtatattgacacacttgtaccttgtaaggcagaggaatgtaattaaaaagcacttatttgg

SEQ ID NO: 426651 - DNA, 1204 bp, Homo sapiens
cgagcagcttggctaaaagtaagggtgtcgtgctgatggccctgtgcgcactgacccgcgctctgcgctctctgaacctggcgcccccgaccgtcgccgcccctgccccgagtctgttccccgccgcccagatgatgaacaatggcctcctccaacagccctctgccttgatgttgctcccctgccgcccagttcttacttctgtggcccttaatgccaactttgtgtcctggaagagtcgtaccaagtacaccattacaccagtgaagatgaggaagtctgggggccgagaccacacaggccgaatccgggtgcatggtattggcgggggccacaagcaacgttatcgaatgattgactttctgcgtttccggcctgaggagaccaagtcaggaccctttgaggagaaggttatccaagtccgctatgatccctgtaggtcagcagacatagctctggttgctgggggcagccggaaacgctggatcatcgccacagaaaacatgcaggctggagatacaatcttgaactctaaccacataggccgaatggcagttgctgctcgggaaggggatgcgcatcctcttggggctctgcctgtggggaccctcatcaacaacgtggaaagtgagccaggccggggtgcccaatatatccgagctgcagggacgtgtggtgtgctactgcggaaggtgaatggcacagccattatccagctgccctctaagaggcagatgcaggtgctggaaacgtgcgtagcaacagtaggccgagtatccaacgttgatcataacaaacgggtcattggcaaggcaggtcgcaaccgctggctgggcaagaggcctaacagtgggcggtggcaccgcaaggggggctgggctggccgaaagattcggccactaccccccatgaagagttacgtgaagctgccttctgcttctgcccaaagctgatatccctgtactctaataaaatgccccccccccccgttttaatctgttactgtggttttgttttgggtgttttttgttttttttgttgttgttttttttttgcgggggaggggatggtacagactaaacgtggggaaaagaagtaaaaagtgtggaagagaaagtacaggacactgggtctgtccccaccccaattcccttacaagtaatggagccggggatggaaataaatgacgtccaaggtcaaaaaa

SEQ ID NO: 426652 - DNA, 637 bp, Homo sapiens
aagagcaaagcaagggcagcatgtggggtatgtcccctgtgtaagtccctctgcacccccctgttttgtggagggtggcaaatcagcttctttccccagggacgtgtggtgtgctactgcggaaggtgaatggcacagccattatccagctgccctctaagaggcagatgcaggtgctggaaacgtgcgtagcaacagtaggccgagtatccaacgttgatcataacaaacgggtcattggcaaggcaggtcgcaaccgctggctgggcaagaggcctaacagtgggcggtggcaccgcaaggggggctgggctggccgaaagattcggccactaccccccatgaagagttacgtgaagctgccttctgcttctgcccaaagctgatatccctgtactctaataaaatgccccccccccccgttttaatctgttactgtggttttgttttgggtgttttttgttttttttgttgttgttttttttttgcgggggaggggatggtacagactaaacgtggggaaaagaagtaaaaagtgtggaagagaaagtacaggacactgggtctgtccccaccccaattcccttacaagtaatggagccggggatggaaataaatgacgtccaaggtcaaaaaa

SEQ ID NO: 426653 - DNA, 1411 bp, Homo sapiens
agccattagctaggtacggactggggtaatcggctagggcagtgtcgcaggccggagggaagatggcggcgccctggtggcgagccgcgctgtgcgagtgtcggagatggcggggcttcagcacctcggccgtcctgggccgccggacacccccgctggggccgatgcccaacagtgacatcgacttgagcaacctggagcggctggagaagtaccggagcttcgaccgctaccggcgccgggcagagcaggaggcgcaggccccgcactggtggcggacctaccgagagtatttcggggagaagacagatcccaaagagaagattgatattgggctgcctccacccaaagtctcccggacccaacagctactggaacggaaacaggccatccaggagcttcgggccaatgtggaagaggagcgggctgcccgcctccgcacagccagtgtcccgctggatgccgtgcgggccgagtgggagaggacctgtggcccctaccacaagcagcgtctggctgagtattacggcctctaccgagacctgttccacggtgccacctttgtgccccgagtccccctgcacgtggcctacgctgtgggtgaggatgacctgatgcctgtgtactgtggcaatgaggtgactccaaccgaggctgcccaagcgccagaggtgacctatgaggcagaagagggctccttgtggacgttgctactcactagcttggatgggcacctgctggagccagatgctgagtacctccactggctgctaaccaacatcccgggtaaccgggtggctgaaggacaggtgacgtgtccctacctcccccccttccctgcccgaggctccggcatccaccgtcttgccttcctgctcttcaagcaggaccagccgattgacttctctgaggacgcacgcccctcaccctgctatcagctggcccagcggaccttccgcacttttgatttctacaagaaacaccaagaaaccatgactccagccggcttgtccttcttccagtgccgctgggatgactccgtcacctacatcttccaccagcttctggacatgcgggagccggtgtttgagttcgtgcggccgcccccttaccaccccaagcagaagcgcttcccccaccggcagcccctgcgctacctggaccggtacagggacagtcatgagcccacctatggcatctactaaggagccagagtgtgcgcatttcagagcatgggattgatcggcagcaagagtaaagacacagctccagaggcccacactgtggggtctgggccctgccttaggcagcccccctctttggccccctcccgtcaggcccagggcttggagtgaaagtgactctcaggtggtggggtggggaatgtgaataaacatgatttcttgccggg

SEQ ID NO: 426654 - DNA, 1888 bp, Homo sapiens
gaaaatgtttcctgttatttgctggacaagtcccaaagaacaggcagatgttcttattaaaagatcagcctataagattggtcaggaccaggcgcctctggccacgtgcctctcccctccagcacctgcggtctgcggtggcacctggcagctggaccacagccaggagaagggtactattagccctgcttcaaacatgcagaaactgaggcccggggagattaaataacctgcctgaaatgacagtgagtagctgcgcctggatttgagttctgctctggccaatccccaagctccacgctgtcagccaccccgctctcctacctcccagaggagcaggctacactcctgttccttttagagagagaaatattgcggccgggcgcggtggctcacgtctgtaatcccagcattttggcaggccaagggttttgccatgttcgtggggctggtctcaaactaattacctcagatgatccgcccacctcggcctcccaaagtgctgggattacagccgtcctgggccgccggacacccccgctggggccgatgcccaacagtgacatcgacttgagcaacctggagcggctggagaagtaccggagcttcgaccgctaccggcgccgggcagagcaggaggcgcaggccccgcactggtggcggacctaccgagagtatttcggggagaagacagagttccagctcctaaaatatttgctcctaaaatcttgaccacctgactttccggattgggatgccgttctgtgcgcctcaaatactctgtagatcccaaagagaagattgatattgggctgcctccacccaaagtctcccggacccaacagctactggaacggaaacaggccatccaggagcttcgggccaatgtggaagaggagcgggctgcccgcctccgcacagccagtgtcccgctggatgccgtgcgggccgagtgggagaggacctgtggcccctaccacaagcagcgtctggctgagtattacggcctctaccgagacctgttccacggtgccacctttgtgccccgagtccccctgcacgtggcctacgctgtgggtgaggatgacctgatgcctgtgtactgtggcaatgaggtgactccaaccgaggctgcccaagcgccagaggtgacctatgaggcagaagagggctccttgtggacgttgctactcactagcttggatgggcacctgctggagccagatgctgagtacctccactggctgctaaccaacatcccgggtaaccgggtggctgaaggacaggtgacgtgtccctacctcccccccttccctgcccgaggctccggcatccaccgtcttgccttcctgctcttcaagcaggaccagccgattgacttctctgaggacgcacgcccctcaccctgctatcagctggcccagcggaccttccgcacttttgatttctacaagaaacaccaagaaaccatgactccagccggcttgtccttcttccagtgccgctgggatgactccgtcacctacatcttccaccagcttctggacatgcgggagccggtgtttgagttcgtgcggccgcccccttaccaccccaagcagaagcgcttcccccaccggcagcccctgcgctacctggaccggtacagggacagtcatgagcccacctatggcatctactaaggagccagagtgtgcgcatttcagagcatgggattgatcggcagcaagagtaaagacacagctccagaggcccacactgtggggtctgggccctgccttaggcagcccccctctttggccccctcccgtcaggcccagggcttggagtgaaagtgactctcaggtggtggggtggggaatgtgaataaacatgatttcttgccggg

SEQ ID NO: 426655 - DNA, 1867 bp, Homo sapiens
caggatggtctcgatctcctgacttcgtgatccacccgccttggcctcccaaagtgctgggattcccggcgtgagccaccgcgcccagccctcaatctgggttttaaacccaagcagagtccggaatcggagctcgcaccccttctcccaaccaggcctgcgtccctggggaaatcaggacgcagcgtccaggggttggaggagggccccggcggccgaccccggtctgtgccgccccctggtggccagccatgggcgagcatatgactgctctcggctccgccccgccgtccaacgggcacttccggagccgggcgtctacagaccgcggccaccttccacctgcgcccgaggcagacggtgcaggggcctccgggacaggcgtctgaggcctgctccgcagcgcgggcccgggggcgggcctaggggcggggcctgctgtggtgcgctcaggcaccgcgctggccacctgtgcccgggtcctagtggcggccgcagtgtcgcaggccggagggaagatggcggcgccctggtggcgagccgcgctgtgcgagtgtcggagatggcggggcttcagcacctcggccgtcctgggccgccggacacccccgctggggccgatgcccaacagtgacatcgacttgagcaacctggagcggctggagaagtaccggagcttcgaccgctaccggcgccgggcagagcaggaggcgcaggccccgcactggtggcggacctaccgagagtatttcggggagaagacagatcccaaagagaagattgatattgggctgcctccacccaaagtctcccggacccaacagctactggaacggaaacaggccatccaggagcttcgggccaatgtggaagaggagcgggctgcccgcctccgcacagccagtgtcccgctggatgccgtgcgggccgagtgggagaggacctgtggcccctaccacaagcagcgtctggctgagtattacggcctctaccgagacctgttccacggtgccacctttgtgccccgagtccccctgcacgtggcctacgctgtgggtgaggatgacctgatgcctgtgtactgtggcaatgaggtgactccaaccgaggctgcccaagcgccagaggtgacctatgaggcagaagagggctccttgtggacgttgctactcactagcttggatgggcacctgctggagccagatgctgagtacctccactggctgctaaccaacatcccgggtaaccgggtggctgaaggacaggtgacgtgtccctacctcccccccttccctgcccgaggctccggcatccaccgtcttgccttcctgctcttcaagcaggaccagccgattgacttctctgaggacgcacgcccctcaccctgctatcagctggcccagcggaccttccgcacttttgatttctacaagaaacaccaagaaaccatgactccagccggcttgtccttcttccagtgccgctgggatgactccgtcacctacatcttccaccagcttctggacatgcgggagccggtgtttgagttcgtgcggccgcccccttaccaccccaagcagaagcgcttcccccaccggcagcccctgcgctacctggaccggtacagggacagtcatgagcccacctatggcatctactaaggagccagagtgtgcgcatttcagagcatgggattgatcggcagcaagagtaaagacacagctccagaggcccacactgtggggtctgggccctgccttaggcagcccccctctttggccccctcccgtcaggcccagggcttggagtgaaagtgactctcaggtggtggggtggggaatgtgaataaacatgatttcttgccggg

SEQ ID NO: 426656 - DNA, 1477 bp, Homo sapiens
agccattagctaggtacggactggggtaatcggctagggcagtgtcgcaggccggagggaagatggcggcgccctggtggcgagccgcgctgtgcgagtgtcggagatggcggggcttcagcacctcggccgtcctgggccgccggacacccccgctggggccgatgcccaacagtgacatcgacttgagcaacctggagcggctggagaagtaccggagcttcgaccgctaccggcgccgggcagagcaggaggcgcaggccccgcactggtggcggacctaccgagagtatttcggggagaagacagatcccaaagagaagattgatattgggctgcctccacccaaagtctcccggacccaacagctactggaacggaaacaggccatccaggagcttcgggccaatgtggaagaggagcgggctgcccgcctccgcacagccagtgtcccgctggatgccgtgcgggccgagtgggagaggacctgtggcccctaccacaagcagcgtctggctgagtattacggcctctaccgagacctgttccacggtgccacctttgtgccccgagtccccctgcacgtggcctacgctgtgggtgaggatgacctgatgcctgtgtactgtggcaatgaggtgactccaaccgaggctgcccaagcgccagaggtgacctatgaggcagaagagggctccttgtggacgttgctactcactagcttggatgggcacctgctggagccagatgctgagtacctccactggctgctaaccaacatcccgggtaaccgggtggctgaaggacaggtgacgtgtccctacctcccccccttccctgcccgaggctccggcatccaccgtcttgccttcctgctcttcaagcaggaccagccgattgacttctctgaggacgcacgcccctcaccctgctatcagctggcccagcggaccttccgcacttttgatttctacaagaaacaccaagaaaccatgactccagccggcttgtccttcttccagtgccgctgggatgactccgtcacctacatcttccaccagcttctggacatgcgggagccggtgtttgagttcgtgcggccgcccccttaccaccccaagcagaagcgcttcccccaccggcagcccctgcgctacctggaccggtacagggacagtcatgagcccacctatggcatctactaaggagccagagtgtgcgcatttcagagcatgggattgatcggcagcaagagtaaagacacagctccagaggcccacactgtggggtctgggccctgccttaggcagcccccctctttggccccctcccgtcaggcccagggcttggagtgaaagtgactctcaggtggtggggtggggaatgtgaataaacatgatttcttgccgggaaaaaaaccgccttaaaaaacggcgcaccacaaagactatatcccacacctgaatcaaaagctcct

SEQ ID NO: 426657 - DNA, 1803 bp, Homo sapiens
agccattagctaggtacggactggggtaatcggctagggcagtgtcgcaggccggagggaagatggcggcgccctggtggcgagccgcgctgtgcgagtgtcggagatggcggggcttcagcacctcggccgtcctgggccgccggacacccccgctggggccgatgcccaacagtgacatcgacttgagcaacctggagcggctggagaagtaccggagcttcgaccgctaccggcgccgggcagagcaggaggcgcaggccccgcactggtggcggacctaccgagagtatttcggggagaagacagatcccaaagagaagattgatattgggctgcctccacccaaagtctcccggacccaacagctactggaacggaaacaggccatccaggagcttcgggccaatgtggaagaggagcgggctgcccgcctccgcacagccagtgtcccgctggatgccgtgcgggccgagtgggagaggacctgtggcccctaccacaagcagcgtctggctgagtattacggcctctaccgagacctgttccacggtgccacctttgtgccccgagtccccctgcacgtggcctacgctgtgggtgaggatgacctgatgcctgtgtactgtggcaatgaggtgactccaaccgaggctgcccaagcgccagaggtgacctatgaggcagaagagggctccttgtggacgttgctactcactagcttggatgggcacctgctggagccagatgctgagtacctccactggctgctaaccaacatcccgggtaaccgggtggctgaaggacaggtgacgtgtccctacctcccccccttccctgcccgaggctccggcatccaccgtcttgccttcctgctcttcaagcaggaccagccgattgacttctctgaggacgcacgcccctcaccctggtaatctacaccacccacacataacccggcctcaggccagctcccctggaacggtcactcttgctcagttctctcttgacctcagccttgagactggcagaagagcaggatagggtgctagcagactcccaggggcctctcagggttacctgttggggtggcggggtgaggggctctggtgccccactccacactctcatacgctctctatcttctcatagctatcagctggcccagcggaccttccgcacttttgatttctacaagaaacaccaagaaaccatgactccagccggcttgtccttcttccagtgccgctgggatgactccgtcacctacatcttccaccagcttctgggtaagggccatggggctggggcactgggtgggcctgagctcccaggcctcgcctgccctgccagggagaagctttgttaggggaaggctgcggcaggtccctggtgggcaggcctcagcctgagggggcgcaggccagcagaccaccccgtacccctcactcttcttgcagacatgcgggagccggtgtttgagttcgtgcggccgcccccttaccaccccaagcagaagcgcttcccccaccggcagcccctgcgctacctggaccggtacagggacagtcatgagcccacctatggcatctactaaggagccagagtgtgcgcatttcagagcatgggattgatcggcagcaagagtaaagacacagctccagaggcccacactgtggggtctgggccctgccttaggcagcccccctctttggccccctcccgtcaggcccagggcttggagtgaaagtgactctcaggtggtggggtggggaatgtgaataaacatgatttcttgccggg

SEQ ID NO: 426658 - DNA, 1071 bp, Homo sapiens
agccattagctaggtacggactggggtaatcggctagggcagtgtcgcaggccggagggaagatggcggcgccctggtggcgagccgcgctgtgcgagtgtcggagatggcggggcttcagcacctcggccgtcctgggccgccggacacccccgctggggccgatgcccaacagtgacatcgacttgagcaacctggagcggctggagaagtaccggagcttcgaccgctaccggcgccgggcagagcaggaggcgcaggccccgcactggtggcggacctaccgagagtatttcggggagaagacagatcccaaagagaagattgatattgggctgcctccacccaaagtctcccggacccaacagctactggaacggaaacaggccatccaggagcttcgggccaatgtggaagaggagcgggctgcccgcctccgcacagccagtgtcccgctggatgccgtgcgggccgagtgggagaggacctgtggcccctaccacaagcagcgtctggctgagtattacggcctctaccgagacctgttccacggtgccacctttgtgccccgagtccccctgcacgtggcctacgctgtgggtgaggatgacctgatgcctgtgtactgtggcaatgaggtgactccaaccgaggctgcccaagcgccagaggtgacctatgaggcagaagagggctccttgtggacgttgctactcactagcttggatgggcacctgctggagccagatgctgagtacctccactggctgctaaccaacatcccgggtaaccgggtggctgaaggacaggtgacgtgtccctacctcccccccttccctgcccgaggctccggcatccaccgtcttgccttcctgctcttcaagcaggaccagccgattgacttctctgaggacgcacgcccctcaccctgtattcagtggcccagggactttccgattttgatttctacagaacacagaacatgattccagcgggtgtcttttcatggcgtggatgtccgtactattttcacgtttggattcggacgtgtgattgggggccttaccaaag

SEQ ID NO: 426659 - DNA, 1335 bp, Homo sapiens
  misc_feature (2)..(2): n is a, c, g, or t
  misc_feature (9)..(9): n is a, c, g, or t
  misc_feature (11)..(11): n is a, c, g, or t
anccccccngntttggaataaccggctccgacccacgcgtccgggcagagcacccgtcctgggccgccggacacccccgctggggccgatgcccaacagtgacatcgacttgagcaacctggagcggctggagaagtaccggagcttcgaccgctaccggcgccgggcagagcaggaggcgcaggccccgcactggtggcggacctaccgagagtatttcggggagaagacagatcccaaagagaagattgatattgggctgcctccacccaaagtctcccggacccaacagctactggaacggaaacaggccatccaggagcttcgggccaatgtggaagaggagcgggctgcccgcctccgcacagccagtgtcccgctggatgccgtgcgggccgagtgggagaggacctgtggcccctaccacaagcagcgtctggctgagtattacggcctctaccgagacctgttccacggtgccacctttgtgccccgagtccccctgcacgtggcctacgctgtgggtgaggatgacctgatgcctgtgtactgtggcaatgaggtgactccaaccgaggctgcccaagcgccagaggtgacctatgaggcagaagagggctccttgtggacgttgctactcactagcttggatgggcacctgctggagccagatgctgagtacctccactggctgctaaccaacatcccgggtaaccgggtggctgaaggacaggtgacgtgtccctacctcccccccttccctgcccgaggctccggcatccaccgtcttgccttcctgctcttcaagcaggaccagccgattgacttctctgaggacgcacgcccctcaccctgctatcagctggcccagcggaccttccgcacttttgatttctacaagaaacaccaagaaaccatgactccagccggcttgtccttcttccagtgccgctgggatgactccgtcacctacatcttccaccagcttctggacatgcgggagccggtgtttgagttcgtgcggccgcccccttaccaccccaagcagaagcgcttcccccaccggcagcccctgcgctacctggaccggtacagggacagtcatgagcccacctatggcatctactaaggagccagagtgtgcgcatttcagagcatgggattgatcggcagcaagagtaaagacacagctccagaggcccacactgtggggtctgggccctgccttaggcagcccccctctttggccccctcccgtcaggcccagggcttggagtgaaagtgactctcaggtggtggggtggggaatgtgaataaacatgatttcttgccggg

SEQ ID NO: 426660 - DNA, 2306 bp, Homo sapiens
caggatggtctcgatctcctgacttcgtgatccacccgccttggcctcccaaagtgctgggattcccggcgtgagccaccgcgcccagccctcaatctgggttttaaacccaagcagagtccggaatcggagctcgcaccccttctcccaaccaggcctgcgtccctggggaaatcaggacgcagcgtccaggggttggaggagggccccggcggccgaccccggtctgtgccgccccctggtggccagccatgggcgagcatatgactgctctcggctccgccccgccgtccaacgggcacttccggagccgggcgtctacagaccgcggccaccttccacctgcgcccgaggcagacggtgcaggggcctccgggacaggcgtctgaggcctgctccgcagcgcgggcccgggggcgggcctaggggcggggcctgctgtggtgcgctcaggcaccgcgctggccacctgtgcccgggtcctagtggcggccgcagtgtcgcaggccggagggaagatggcggcgccctggtggcgagccgcgctgtgcgagtgtcggagatggcggggcttcagcacctcggccgtcctgggccgccggacacccccgctggggccgatgcccaacagtgacatcgacttgagcaacctggagcggctggagaagtaccggagcttcgaccgctaccggcgccgggcagagcaggaggcgcaggccccgcactggtggcggacctaccgagagtatttcggggagaagacagatcccaaagagaagattgatattgggctgcctccacccaaagtctcccggacccaacagctactggaacggaaacaggccatccaggagcttcgggccaatgtggaagaggagcgggctgcccgcctccgcacagccagtgtcccgctggatgccgtgcgggccgagtgggagaggacctgtggcccctaccacaagcagcgtctggctgagtattacggcctctaccgagacctgttccacggtgccacctttgtgccccgagtccccctgcacgtggcctacgctgtgggtgaggatgacctgatgcctgtgtactgtggcaatgaggtgactccaaccgaggtaaccactcacttgtgcccctcctccctgccctgtgcaaacacagacacatcccatctcagtgtcacagacactcctgggtttggaattttgttgttctctgtctctttgatttcctggaagacgacaccatgacaatttcaaagaaaatagaacaaaatgaaggaaaaagaggctctgtcttagcacattcctgtgaccagcctgctgtctgtggtgttgccctcctggcccggccttggcacatgttcgtttttgtggttgttgcctggacaggcaactctgcagggctgcttctctacgcatccctttgcctgcctgcctgtgccaggggttgtcaagggcttttgggtcagagtgggcacccctttctccaaggctccctgcaacagctggcctgtccctggtggggctgacagcttccttctcaccctgccaggctgcccaagcgccagaggtgacctatgaggcagaagagggctccttgtggacgttgctactcactagcttggatgggcacctgctggagccagatgctgagtacctccactggctgctaaccaacatcccgggtaaccgggtggctgaaggacaggtgacgtgtccctacctcccccccttccctgcccgaggctccggcatccaccgtcttgccttcctgctcttcaagcaggaccagccgattgacttctctgaggacgcacgcccctcaccctgctatcagctggcccagcggaccttccgcacttttgatttctacaagaaacaccaagaaaccatgactccagccggcttgtccttcttccagtgccgctgggatgactccgtcacctacatcttccaccagcttctggacatgcgggagccggtgtttgagttcgtgcggccgcccccttaccaccccaagcagaagcgcttcccccaccggcagcccctgcgctacctggaccggtacagggacagtcatgagcccacctatggcatctactaaggagccagagtgtgcgcatttcagagcatgggattgatcggcagcaagagtaaagacacagctccagaggcccacactgtggggtctgggccctgccttaggcagcccccctctttggccccctcccgtcaggcccagggcttggagtgaaagtgactctcaggtggtggggtggggaatgtgaataaacatgatttcttgccggg

SEQ ID NO: 426661 - DNA, 2164 bp, Homo sapiens
caggatggtctcgatctcctgacttcgtgatccacccgccttggcctcccaaagtgctgggattcccggcgtgagccaccgcgcccagccctcaatctgggttttaaacccaagcagagtccggaatcggagctcgcaccccttctcccaaccaggcctgcgtccctggggaaatcaggacgcagcgtccaggggttggaggagggccccggcggccgaccccggtctgtgccgccccctggtggccagccatgggcgagcatatgactgctctcggctccgccccgccgtccaacgggcacttccggagccgggcgtctacagaccgcggccaccttccacctgcgcccgaggcagacggtgcaggggcctccgggacaggcgtctgaggcctgctccgcagcgcgggcccgggggcgggcctaggggcggggcctgctgtggtgcgctcaggcaccgcgctggccacctgtgcccgggtcctagtggcggccgcagtgtcgcaggccggagggaagatggcggcgccctggtggcgagccgcgctgtgcgagtgtcggagatggcggggcttcagcacctcggccgtcctgggccgccggacacccccgctggggccgatgcccaacagtgacatcgacttgagcaacctggagcggctggagaagtaccggagcttcgaccgctaccggcgccgggcagagcaggaggcgcaggccccgcactggtggcggacctaccgagagtatttcggggagaagacagatcccaaagagaagattgatattgggctgcctccacccaaagtctcccggacccaacagctactggaacggaaacaggccatccaggagcttcgggccaatgtggaagaggagcgggctgcccgcctccgcacagccagtgtcccgctggatgccgtgcgggccgagtgggagaggacctgtggcccctaccacaagcagcgtctggctgagtattacggcctctaccgagacctgttccacggtgccacctttgtgccccgagtccccctgcacgtggcctacgctgtgggtgaggatgacctgatgcctgtgtactgtggcaatgaggtgactccaaccgaggctgcccaagcgccagaggtgacctatgaggcagaagagggctccttgtggacgttgctactcactagcttggatgggcacctgctggagccagatgctgagtacctccactggctgctgtgagtactggagtactgggggtagggggtgctgcccaggcgggaagaggagctgggagcctggactgagctgctcctgagtttcatggactacccatgggaccttgaattcacctgccacctctgcctcctgagggtgttaggggccctgggatccacgtgtctacttgaagacagctacaggagacaaagtttgcagtaggcctcgagacagggtttcaccatgttgcccaggctggtctcctgagctcaagcgatctgcccgcctccgcctcccaaagtgctaggattataagcaaccaacatcccgggtaaccgggtggctgaaggacaggtgacgtgtccctacctcccccccttccctgcccgaggctccggcatccaccgtcttgccttcctgctcttcaagcaggaccagccgattgacttctctgaggacgcacgcccctcaccctgctatcagctggcccagcggaccttccgcacttttgatttctacaagaaacaccaagaaaccatgactccagccggcttgtccttcttccagtgccgctgggatgactccgtcacctacatcttccaccagcttctggacatgcgggagccggtgtttgagttcgtgcggccgcccccttaccaccccaagcagaagcgcttcccccaccggcagcccctgcgctacctggaccggtacagggacagtcatgagcccacctatggcatctactaaggagccagagtgtgcgcatttcagagcatgggattgatcggcagcaagagtaaagacacagctccagaggcccacactgtggggtctgggccctgccttaggcagcccccctctttggccccctcccgtcaggcccagggcttggagtgaaagtgactctcaggtggtggggtggggaatgtgaataaacatgatttcttgccggg

SEQ ID NO: 426662 - DNA, 3013 bp, Homo sapiens
caggatggtctcgatctcctgacttcgtgatccacccgccttggcctcccaaagtgctgggattcccggcgtgagccaccgcgcccagccctcaatctgggttttaaacccaagcagagtccggaatcggagctcgcaccccttctcccaaccaggcctgcgtccctggggaaatcaggacgcagcgtccaggggttggaggagggccccggcggccgaccccggtctgtgccgccccctggtggccagccatgggcgagcatatgactgctctcggctccgccccgccgtccaacgggcacttccggagccgggcgtctacagaccgcggccaccttccacctgcgcccgaggcagacggtgcaggggcctccgggacaggcgtctgaggcctgctccgcagcgcgggcccgggggcgggcctaggggcggggcctgctgtggtgcgctcaggcaccgcgctggccacctgtgcccgggtcctagtggcggccgcagtgtcgcaggccggagggaagatggcggcgccctggtggcgagccgcgctgtgcgagtgtcggagatggcggggcttcagcacctcggccgtcctgggccgccggacacccccgctggggccgatgcccaacagtgacatcgacttgagcaacctggagcggctggagaagtaccggagcttcgaccgctaccggcgccgggcagagcaggaggcgcaggccccgcactggtggcggacctaccgagagtatttcggggagaagacagatcccaaagagaagattgatattgggctgcctccacccaaagtctcccggacccaacagctactggaacggaaacaggccatccaggagcttcgggccaatgtggaagaggagcgggctgcccgcctccgcacagccagtgtcccgctggatgccgtgcgggccgagtgggagaggacctgtggcccctaccacaagcagcgtctggctgagtattacggcctctaccgagacctgttccacggtgccacctttgtgccccgagtccccctgcacgtggcctacgctgtgggtgaggatgacctgatgcctgtgtactgtggcaatgaggtgactccaaccgaggctgcccaagcgccagaggtgacctatgaggcagaagagggctccttgtggacgttgctactcactagcttggatgggcacctgctggagccagatgctgagtacctccactggctgctgtgagtactggagtactgggggtagggggtgctgcccaggcgggaagaggagctgggagcctggactgagctgctcctgagtttcatggactacccatgggaccttgaattcacctgccacctctgcctcctgagggtgttaggggccctgggatccacgtgtctacttgaagacagctacaggagacaaagtttgcagtaggcctcgagacagggtttcaccatgttgcccaggctggtctcctgagctcaagcgatctgcccgcctccgcctcccaaagtgctaggattataagcgtgagccaccatgcctgggcccttcgtctctaaactcatttcttcacctgtaaaactgggataatggcaccacatgccttactcagcgtgaggtggactgtgacagtcacgtgggagaaggagcgggagaggcctagcagctgtggcgtcccccaggtgctccttgaaccactgggcgctccttccctgggcccagactggcggccttccatcttggtagcttttggctctgaacaccaggccagggggcagaggtcaggccagtgaccccaactttgagccttctggttaactggggacagtgactgggaggctggtttccgtcatttttattcaactgttaccagcctatgcggcaggaccctctggggatttgtgcctgaggcgttggccgcccctgtgccaggctgggcacacactccctgacgaggtcctggagacttcaggacgcagagggaaaagcagccaaaagtggcctggctttctagcctcagtgactgtggcggacccaccggctcccggggcctggaagcggctgcatggccttgctgtcaagctgatgctctctggagccctgtcccccactcggagctcctccagcccgcttcccgtatttgcagcatgtcccggcgttcacagagcttggctgcctcctctgtcccaggagagagatgcttagagctgtcctcccagggagtcatgtcagcctctagggtgtgcatggagctgaggggacactcctgctgcctccctggagtggtaattaaccgggactttcctcctcccagaaccaacatcccgggtaaccgggtggctgaaggacaggtgacgtgtccctacctcccccccttccctgcccgaggctccggcatccaccgtcttgccttcctgctcttcaagcaggaccaccggcttgtccttcttccagtgccgctgggatgactccgtcacctacatcttccaccagcttctgggtaagggccatggggctggggcactgggtgggcctgagctcccaggcctcgcctgccctgccagggagaagctttgttaggggaaggctgcggcaggtccctggtgggcaggcctcagcctgagggggcgcaggccagcagaccaccccgtacccctcactcttcttgcagacatgcgggagccggtgtttgagttcgtgcggccgcccccttaccaccccaagcagaagcgcttcccccaccggcagcccctgcgctacctggaccggtacagggacagtcatgagcccacctatggcatctactaaggagccagagtgtgcgcatttcagagcatgggattgatcggcagcaagagtaaagacacagctccagaggcccacactgtggggtctgggccctgccttaggcagcccccctctttggccccctcccgtcaggcccagggcttggagtgaaagtgactctcaggtggtggggtggggaatgtgaataaacatgatttcttgccggg

SEQ ID NO: 426663 - DNA, 2126 bp, Homo sapiens
caggatggtctcgatctcctgacttcgtgatccacccgccttggcctcccaaagtgctgggattcccggcgtgagccaccgcgcccagccctcaatctgggttttaaacccaagcagagtccggaatcggagctcgcaccccttctcccaaccaggcctgcgtccctggggaaatcaggacgcagcgtccaggggttggaggagggccccggcggccgaccccggtctgtgccgccccctggtggccagccatgggcgagcatatgactgctctcggctccgccccgccgtccaacgggcacttccggagccgggcgtctacagaccgcggccaccttccacctgcgcccgaggcagacggtgcaggggcctccgggacaggcgtctgaggcctgctccgcagcgcgggcccgggggcgggcctaggggcggggcctgctgtggtgcgctcaggcaccgcgctggccacctgtgcccgggtcctagtggcggccgcagtgtcgcaggccggagggaagatggcggcgccctggtggcgagccgcgctgtgcgagtgtcggagatggcggggcttcagcacctcggatcccaaagagaagattgatattgggctgcctccacccaaagtctcccggacccaacagctactggaacggaaacaggccatccaggagcttcgggccaatgtggaagaggagcgggctgcccgcctccgcacagccagtgtcccgctggatgccgtgcgggccgagtgggagaggacctgtggcccctaccacaagcagcgtctggctgagtattacggcctctaccgagacctgttccacggtgccacctttgtgccccgagtccccctgcacgtggcctacgctgtgggtgaggatgacctgatgcctgtgtactgtggcaatgaggtgactccaaccgaggtaaccactcacttgtgcccctcctccctgccctgtgcaaacacagacacatcccatctcagtgtcacagacactcctgggtttggaattttgttgttctctgtctctttgatttcctggaagacgacaccatgacaatttcaaagaaaatagaacaaaatgaaggaaaaagaggctctgtcttagcacattcctgtgaccagcctgctgtctgtggtgttgccctcctggcccggccttggcacatgttcgtttttgtggttgttgcctggacaggcaactctgcagggctgcttctctacgcatccctttgcctgcctgcctgtgccaggggttgtcaagggcttttgggtcagagtgggcacccctttctccaaggctccctgcaacagctggcctgtccctggtggggctgacagcttccttctcaccctgccaggctgcccaagcgccagaggtgacctatgaggcagaagagggctccttgtggacgttgctactcactagcttggatgggcacctgctggagccagatgctgagtacctccactggctgctaaccaacatcccgggtaaccgggtggctgaaggacaggtgacgtgtccctacctcccccccttccctgcccgaggctccggcatccaccgtcttgccttcctgctcttcaagcaggaccagccgattgacttctctgaggacgcacgcccctcaccctgctatcagctggcccagcggaccttccgcacttttgatttctacaagaaacaccaagaaaccatgactccagccggcttgtccttcttccagtgccgctgggatgactccgtcacctacatcttccaccagcttctggacatgcgggagccggtgtttgagttcgtgcggccgcccccttaccaccccaagcagaagcgcttcccccaccggcagcccctgcgctacctggaccggtacagggacagtcatgagcccacctatggcatctactaaggagccagagtgtgcgcatttcagagcatgggattgatcggcagcaagagtaaagacacagctccagaggcccacactgtggggtctgggccctgccttaggcagcccccctctttggccccctcccgtcaggcccagggcttggagtgaaagtgactctcaggtggtggggtggggaatgtgaataaacatgatttcttgccggg

SEQ ID NO: 426664 - DNA, 1450 bp, Homo sapiens
  misc_feature (1307)..(1307): n is a, c, g, or t
  misc_feature (1312)..(1312): n is a, c, g, or t
  misc_feature (1320)..(1320): n is a, c, g, or t
  misc_feature (1322)..(1322): n is a, c, g, or t
  misc_feature (1331)..(1332): n is a, c, g, or t
  misc_feature (1334)..(1334): n is a, c, g, or t
  misc_feature (1339)..(1339): n is a, c, g, or t
  misc_feature (1343)..(1344): n is a, c, g, or t
  misc_feature (1357)..(1357): n is a, c, g, or t
  misc_feature (1364)..(1365): n is a, c, g, or t
  misc_feature (1373)..(1373): n is a, c, g, or t
  misc_feature (1379)..(1379): n is a, c, g, or t
  misc_feature (1381)..(1382): n is a, c, g, or t
  misc_feature (1384)..(1384): n is a, c, g, or t
  misc_feature (1387)..(1387): n is a, c, g, or t
  misc_feature (1390)..(1390): n is a, c, g, or t
  misc_feature (1403)..(1404): n is a, c, g, or t
caggatggtctcgatctcctgacttcgtgatccacccgccttggcctcccaaagtgctgggattcccggcgtgagccaccgcgcccagccctcaatctgggttttaaacccaagcagagtccggaatcggagctcgcaccccttctcccaaccaggcctgcgtccctggggaaatcaggacgcagcgtccaggggttggaggagggccccggcggccgaccccggtctgtgccgccccctggtggccagccatgggcgagcatatgactgctctcggctccgccccgccgtccaacgggcacttccggagccgggcgtctacagaccgcggccaccttccacctgcgcccgaggcagacggtgcaggggcctccgggacaggcgtctgaggcctgctccgcagcgcgggcccgggggcgggcctaggggcggggcctgctgtggtgcgctcaggcaccgcgctggccacctgtgcccgggtcctagtggcggccgcagtgtcgcaggccggagggaagatggcggcgccctggtggcgagccgcgctgtgcgagtgtcggagatggcggggcttcagcacctcggccgtcctgggccgccggacacccccgctggggccgatgcccaacagtgacatcgacttgagcaacctggagcggctggagaagtaccggagcttcgaccgctaccggcgccgggcagagcaggaggcgcaggccccgcactggtggcggacctaccgagagtatttcggggagaagacagatcccaaagagaagattgatattgggctgcctccacccaaagtctcccggacccaacagctactggaacggaaacaggccatccaggagcttcgggccaatgtggaagaggagcgggctgcccgcctccgcacagccagtgtcccgctggatgccgtgcgggccgagtgggagaggacctgtggcccctaccacaagcagcgtctggctgagtattacggcctctaccgagacctgttccacggtgccacctttgtgccccgagtccccctgcacgtggcctacgctgtgggtgaggatgacctgatgcctgtgtactgtggcaatgaggtgactccaaccgaggctgcccaagcgccagaggtgacctatgaggcagaagagggctccttgtggacgttgctactcactagcttggatgggcacctgttggagccagatgctgagtacctcactggtggtaaccaatccgggtacgggtggtgaagacagtgacgtgtcctaactccccccttcctggcgaggtcggatcacgttgcttcngcctnagcggacngngatgatctnngngaggngccnncctgtttgtgccnggcttcnnttgtttcngaaccnanngnccnggngccttcgcggggnnccccattccctggaggaactgttgggaaaacacgggacgccacttg

SEQ ID NO: 426665 - DNA, 1417 bp, Homo sapiens
ctgctccgcccctctctgcccgaggctccggcatccaccgtcttgccttcctgctcttcaagcaggaccagccgattgacttctctgaggacgcacgcccctcaccctggtaatctacaccacccacacataacccggcctcaggccagctcccctggaacggtcactcttgctcagttctctcttgacctcagccttccatcttggtagcttttggctctgaacaccaggccagggggcagaggtcaggccagtgaccccaactttgagccttctggttaactggggacagtgactgggaggctggtttccgtcatttttattcaactgttaccagcctatgcggcaggaccctctggggatttgtgcctgaggcgttggccgcccctgtgccaggctgggcacacactccctgacgaggtcctggagacttcaggacgcagagggaaaagcagccaaaagtggcctggctttctagcctcagtgactgtggcggacccaccggctcccggggcctggaagcggctgcatggccttgctgtcaagctgatgctctctggagccctgtcccccactcggagctcctccagcccgcttcccgtatttgcagcatgtcccggcgttcacagagcttggctgcctcctctgtcccaggagagagatgcttagagctgtcctcccagggagtcatgtcagcctctagggtgtgcatggagctgaggggacactcctgctgcctccctggagtggtaattaaccgggactttcctcctcccagaaccaacatcccgggtaaccgggtggctgaaggacaggtgacgtgtccctacctcccccccttccctgcccgaggctccggcatccaccgtcttgccttcctgctcttcaagcaggaccagccgattgacttctctgaggacgcacgcccctcaccctgctatcagctggcccagcggaccttccgcacttttgatttctacaagaaacaccaagaaaccatgactccagccggcttgtccttcttccagtgccgctgggatgactccgtcacctacatcttccaccagcttctggacatgcgggagccggtgtttgagttcgtgcggccgcccccttaccaccccaagcagaagcgcttcccccaccggcagcccctgcgctacctggaccggtacagggacagtcatgagcccacctatggcatctactaaggagccagagtgtgcgcatttcagagcatgggattgatcggcagcaagagtaaagacacagctccagaggcccacactgtggggtctgggccctgccttaggcagcccccctctttggccccctcccgtcaggcccagggcttggagtgaaagtgactctcaggtggtggggtggggaatgtgaataaacatgatttcttgccggg

SEQ ID NO: 426666 - DNA, 1512 bp, Homo sapiens
caggatggtctcgatctcctgacttcgtgatccacccgccttggcctcccaaagtgctgggattcccggcgtgagccaccgcgcccagccctcaatctgggttttaaacccaagcagagtccggaatcggagctcgcaccccttctcccaaccaggcctgcgtccctggggaaatcaggacgcagcgtccaggggttggaggagggccccggcggccgaccccggtctgtgccgccccctggtggccagccatgggcgagcatatgactgctctcggctccgccccgccgtccaacgggcacttccggagccgggcgtctacagaccgcggccaccttccacctgcgcccgaggcagacggtgcaggggcctccgggacaggcgtctgaggcctgctccgcagcgcgggcccgggggcgggcctaggggcggggcctgctgtggtgcgctcaggcaccgcgctggccacctgtgcccgggtcctagtggcggccgcagtgtcgcaggccggagggaagatggcggcgccctggtggcgagccgcgctgtgcgagtgtcggagatggcggggcttcagcacctcggccgtcctgggccgccggacacccccgctggggccgatgcccaacagtgacatcgacttgagcaacctggagcggctggagaagtaccggagcttcgaccgctaccggcgccgggcagagcaggaggcgcaggccccgcactggtggcggacctaccgagagtatttcggggagaagacagatcccaaagagaagattgatattgggctgcctccacccaaagtctcccggacccaacagctactggaacggaaacaggccatccaggagcttcgggccaatgtggaagaggagcgggctgcccgcctccgcacagtgaaggacaggtgacgtgtccctacctcccccccttccctgcccgaggctccggcatccaccgtcttgccttcctgctcttcaagcaggaccagccgattgacttctctgaggacgcacgcccctcaccctgctatcagctggcccagcggaccttccgcacttttgatttctacaagaaacaccaagaaaccatgactccagccggcttgtccttcttccagtgccgctgggatgactccgtcacctacatcttccaccagcttctggacatgcgggagccggtgtttgagttcgtgcggccgcccccttaccaccccaagcagaagcgcttcccccaccggcagcccctgcgctacctggaccggtacagggacagtcatgagcccacctatggcatctactaaggagccagagtgtgcgcatttcagagcatgggattgatcggcagcaagagtaaagacacagctccagaggcccacactgtggggtctgggccctgccttaggcagcccccctctttggccccctcccgtcaggcccagggcttggagtgaaagtgactctcaggtggtggggtggggaatgtgaataaacatgatttcttgccggg

SEQ ID NO: 426667 - DNA, 923 bp, Homo sapiens
caggatggtctcgatctcctgacttcgtgatccacccgccttggcctcccaaagtgctgggattcccggcgtgagccaccgcgcccagccctcaatctgggttttaaacccaagcagagtccggaatcggagctcgcaccccttctcccaaccaggcctgcgtccctggggaaatcaggacgcagcgtccaggggttggaggagggccccggcggccgaccccggtctgtgccgccccctggtggccagccatgggcgagcatatgactgctctcggctccgccccgccgtccaacgggcacttccggagccgggcgtctacagaccgcggccaccttccacctgcgcccgaggcagacggtgcaggggcctccgggacaggcgtctgaggcctgctccgcagcgcgggcccgggggcgggcctaggggcggggcctgctgtggtgcgctcaggcaccgcgctggccacctgtgcccgggtcctagtggcggccgcagtgtcgcaggccggagggaagatggcggcgccctggtggcgagccgcgctgtgcgagtgtcggagatggcggggcttcagcacctcggccgtcctgggccgccggacacccccgctggggccgatgcccaacagtgacatcgacttgagcaacctggagcggctggagaagtaccggagcttcgaccgctaccggcgccgggcagagcaggaggcgcaggccccgcactggtggcggacctaccgagagtatttcggggagaagacagatcccaaagagaagattgatattgggctgcctccacccaaagtctcccggacccaacagctactggaacggaaacaggccatccaggagcttcgggccaatgtggaagaggagcgggctgcccgcctccgcacagagttacggaggcgtcgttacgga

SEQ ID NO: 426668 - DNA, 650 bp, Homo sapiens
gcctctggaccaatctgagacctccctgctctgtgagtactggatactggggtaggggttcttcccagccgggaagaggagctgggagcctggactgagctgctcctgagtttcatggactacccatgggaccttgaattcacctgccacctctgcctcctgagggtgttaggggccctgggatccacgtgtctacttgaagacagctcaggagactgagttggggaggttaaggctgcagtgagtcatgaccctgtttttcccacacatcttcccactccagatcccaaagagaagattgatattgggctgcctccacccaaagtctcccggacccaacagctactggaacggaaacaggccatccaggagcttcgggccaatgtggaagaggagcgggctgcccgcctccgcacagccagtgtcccgctggatgccgtgcgggccgagtgggagaggacctgtggcccctaccacaagcagcgtctggctgagtattacggcctctaccgagacctgttccacggtgccacctttgtgccccgagtccccctgcacgtggcctacgctgtgggtgaggatgacctgatgcctgtgtactgtggcaatgaggtgactccaaccgccatcttcgggatcctctaacgact

SEQ ID NO: 426669 - DNA, 1621 bp, Homo sapiens
agccattagctaggtacggactggggtaatcggctagggcagtgtcgcaggccggagggaagatggcggcgccctggtggcgagccgcgctgtgcgagtgtcggagatggcggggcttcagcacctcggccgtcctgggccgccggacacccccgctggggccgatgcccaacagtgacatcgacttgagcaacctggagcggctggagaagtaccggagcttcgaccgctaccggcgccgggcagagcaggaggcgcaggccccgcactggtggcggacctaccgagagtatttcggggagaagacagatcccaaagagaagattgatattgggctgcctccacccaaagtctcccggacccaacagctactggaacggaaacaggccatccaggagcttcgggccaatgtggaagaggagcgggctgcccgcctccgcacagccagtgtcccgctggatgccgtgcgggccgagtgggagaggacctgtggcccctaccacaagcagcgtctggctgagtattacggcctctaccgagacctgttccacggtgccacctttgtgccccgagtccccctgcacgtggcctacgctgtgggtgaggatgacctgatgcctgtgtactgtggcaatgaggtgactccaaccgaggctgcccaagcgccagaggtgacctatgaggcagaagagggctccttgtggacgttgctactcactagcttggatgggcacctgctggagccagatgctgagtacctccactggctgctaaccaacatcccgggtaaccgggtggctgaaggacaggtgacgtgtccctacctcccccccttccctgcccgaggctccggcatccaccgtcttgccttcctgctcttcaagcaggaccagccgattgacttctctgaggacgcacgcccctcaccctgctatcagctggcccagcggaccttccgcacttttgatttctacaagaaacaccaagaaaccatgactccagccggcttgtccttcttccagtgccgctgggatgactccgtcacctacatcttccaccagcttctggacatgcgggagccggtgtttgagttcgtgcggccgcccccttaccaccccaagcagaagcgcttcccccaccggcagcccctgcgctacctggaccggtacagggacagtcatgagcccacctatggcatctactaaggagccagagtgtgcgcatttcagagcatgggattgatcggcagcaagagtaaagacacagctccagaggcccacactgtggggtctgggccctgccttaggcagcccccctctttggccccctcccgtcaggcccagggcttggagtgaaagtgactctcaggtggtggggtggggaatgtgaataaacatgatttcttgccgggaaaaaaccacaccacacacacaacagcacaacagacacacgcgaacaacccacatgcaccgcggagcgcctcccattcaccgaccgcgggcccacaccaacgagcggctgaagaaaaacgccaccggtgccacaaccggcgctcccgcgcacccacgcgtcgtgggccacgagggggaaaaatgcgcagatcccccaaagagacgccaac

SEQ ID NO: 426670 - DNA, 1582 bp, Homo sapiens
agccattagctaggtacggactggggtaatcggctagggcagtgtcgcaggccggagggaagatggcggcgccctggtggcgagccgcgctgtgcgagtgtcggagatggcggggcttcagcacctcggccgtcctgggccgccggacacccccgctggggccgatgcccaacagtgacatcgacttgagcaacctggagcggctggagaagtaccggagcttcgaccgctaccggcgccgggcagagcaggaggcgcaggccccgcactggtggcggacctaccgagagtatttcggggagaagacagatcccaaagagaagattgatattgggctgcctccacccaaagtctcccggacccaacagctactggaacggaaacaggccatccaggagcttcgggccaatgtggaagaggagcgggctgcccgcctccgcacagccagtgtcccgctggatgccgtgcgggccgagtgggagaggacctgtggcccctaccacaagcagcgtctggctgagtattacggcctctaccgagacctgttccacggtgccacctttgtgccccgagtccccctgcacgtggcctacgctgtgggtgaggatgacctgatgcctgtgtactgtggcaatgaggtgactccaaccgaggctgcccaagcgccagaggtgacctatgaggcagaagagggctccttgtggacgttgctactcactagcttggatgggcacctgctggagccagatgctgagtacctccactggctgctaaccaacatcccgggtaaccgggtggctgaaggacaggtgacgtgtccctacctcccccccttccctgcccgaggctccggcatccaccgtcttgccttcctgctcttcaagcaggaccagccgattgacttctctgaggacgcacgcccctcaccctgctatcagctggcccagcggaccttccgcacttttgatttctacaagaaacaccaagaaaccatgactccagccggcttgtccttcttccagtgccgctgggatgactccgtcacctacatcttccaccagcttctgggtaagggccatggggctggggcactgggtgggcctgagctcccaggcctcgcctgccctgccagggagaagctttgttaggggaaggctgcggcaggtccctggtgggcaggcctcagcctgagggggcgcaggccagcagaccaccccgtacccctcactcttcttgcagacatgcgggagccggtgtttgagttcgtgcggccgcccccttaccaccccaagcagaagcgcttcccccaccggcagcccctgcgctacctggaccggtacagggacagtcatgagcccacctatggcatctactaaggagccagagtgtgcgcatttcagagcatgggattgatcggcagcaagagtaaagacacagctccagaggcccacactgtggggtctgggccctgccttaggcagcccccctctttggccccctcccgtcaggcccagggcttggagtgaaagtgactctcaggtggtggggtggggaatgtgaataaacatgatttcttgccggg

SEQ ID NO: 426671 - DNA, 1161 bp, Homo sapiens
agccattagctaggtacggactggggtaatcggctagggcagtgtcgcaggccggagggaagatggcggcgccctggtggcgagccgcgctgtgcgagtgtcggagatggcggggcttcagcacctcggccgtcctgggccgccggacacccccgctggggccgatgcccaacagtgacatcgacttgagcaacctggagcggctggagaagtaccggagcttcgaccgctaccggcgccgggcagagcaggaggcgcaggccccgcactggtggcggacctaccgagagtatttcggggagaagacagatcccaaagagaagattgatattgggctgcctccacccaaagtctcccggacccaacagctactggaacggaaacaggccatccaggagcttcgggccaatgtggaagaggagcgggctgcccgcctccgcacagccagtgtcccgctggatgccgtgcgggccgagtgggagaggacctgtggcccctaccacaagcagcgtctggctgagtattacggcctctaccgagacctgttccacggtgccacctttgtgccccgagtccccctgcacgtggcctacgctgtgggtgaggatgacctgatgcctgtgtactgtggcaatgaggtgactccaaccgaggctgcccaagcgccagaggtgacctatgaggcagaagagggctccttgtggacgttgctactcactagcttggatgggcacctgctggagccagatgctgagtacctccactggctgctaaccaacatcccgggtaaccgggtggctgaaggacaggtgacgtgtccctacctcccccccttccctgcccgaggctccggcatccaccgtcttgccttcctgctcttcaagcaggaccagccgattgacttctctgaggacgcacgcccctcaccctgtatcagtggccagcggacttcgactttggattctacagaaaaccagaaacagatccagcggttgtcttctccattgccggggatgactcggtactacatctccacagattcggaagcgggagcgaggtgagtcgtgggagccattaacacagaaagactccaagggaccgccaacgaacgtagggacaagaccacggataaaaagcaaggggaacacgctcacgcacaaa

SEQ ID NO: 426672 - DNA, 2952 bp, Homo sapiens
caggatggtctcgatctcctgacttcgtgatccacccgccttggcctcccaaagtgctgggattcccggcgtgagccaccgcgcccagccctcaatctgggttttaaacccaagcagagtccggaatcggagctcgcaccccttctcccaaccaggcctgcgtccctggggaaatcaggacgcagcgtccaggggttggaggagggccccggcggccgaccccggtctgtgccgccccctggtggccagccatgggcgagcatatgactgctctcggctccgccccgccgtccaacgggcacttccggagccgggcgtctacagaccgcggccaccttccacctgcgcccgaggcagacggtgcaggggcctccgggacaggcgtctgaggcctgctccgcagcgcgggcccgggggcgggcctaggggcggggcctgctgtggtgcgctcaggcaccgcgctggccacctgtgcccgggtcctagtggcggccgcagtgtcgcaggccggagggaagatggcggcgccctggtggcgagccgcgctgtgcgagtgtcggagatggcggggcttcagcacctcggccgtcctgggccgccggacacccccgctggggccgatgcccaacagtgacatcgacttgagcaacctggagcggctggagaagtaccggagcttcgaccgctaccggcgccgggcagagcaggaggcgcaggccccgcactggtggcggacctaccgagagtatttcggggagaagacagatcccaaagagaagattgatattgggctgcctccacccaaagtctcccggacccaacagctactggaacggaaacaggccatccaggagcttcgggccaatgtggaagaggagcgggctgcccgcctccgcacagccagtgtcccgctggatgccgtgcgggccgagtgggagaggacctgtggcccctaccacaagcagcgtctggctgagtattacggcctctaccgagacctgttccacggtgccacctttgtgccccgagtccccctgcacgtggcctacgctgtgggtgaggatgacctgatgcctgtgtactgtggcaatgaggtgactccaaccgaggctgcccaagcgccagaggtgacctatgaggcagaagagggctccttgtggacgttgctactcactagcttggatgggcacctgctggagccagatgctgagtacctccactggctgctgtgagtactggagtactgggggtagggggtgctgcccaggcgggaagaggagctgggagcctggactgagctgctcctgagtttcatggactacccatgggaccttgaattcacctgccacctctgcctcctgagggtgttaggggccctgggatccacgtgtctacttgaagacagctacaggagacaaagtttgcagtaggcctcgagacagggtttcaccatgttgcccaggctggtctcctgagctcaagcgatctgcccgcctccgcctcccaaagtgctaggattataagcgtgagccaccatgcctgggcccttcgtctctaaactcatttcttcacctgtaaaactgggataatggcaccacatgccttactcagcgtgaggtggactgtgacagtcacgtgggagaaggagcgggagaggcctagcagctgtggcgtcccccaggtgctccttgaaccactgggcgctccttccctgggcccagactggcggccttccatcttggtagcttttggctctgaacaccaggccagggggcagaggtcaggccagtgaccccaactttgagccttctggttaactggggacagtgactgggaggctggtttccgtcatttttattcaactgttaccagcctatgcggcaggaccctctggggatttgtgcctgaggcgttggccgcccctgtgccaggctgggcacacactccctgacgaggtcctggagacttcaggacgcagagggaaaagcagccaaaagtggcctggctttctagcctcagtgactgtggcggacccaccggctcccggggcctggaagcggctgcatggccttgctgtcaagctgatgctctctggagccctgtcccccactcggagctcctccagcccgcttcccgtatttgcagcatgtcccggcgttcacagagcttggctgcctcctctgtcccaggagagagatgcttagagctgtcctcccagggagtcatgtcagcctctagggtgtgcatggagctgaggggacactcctgctgcctccctggagtggtaattaaccgggactttcctcctcccagaaccaacatcccgggtaaccgggtggctgaaggacaggtgacgtgtccctacctcccccccttccctgcccgaggctccggcatccaccgtcttgccttcctgctcttcaagcaggaccagccgattgacttctctgaggacgcacgcccctcaccctgctatcagctggcccagcggaccttccgcacttttgatttctacaagaaacaccaagaaaccatgactccagccggcttgtccttcttccagtgccgctgggatgactccgtcacctacatcttccaccagcttctggacatgcgggagccggtgtttgagttcgtgcggccgcccccttaccaccccaagcagaagcgcttcccccaccggcagcccctgcgctacctggaccggtacagggacagtcatgagcccacctatggcatctactaaggagccagagtgtgcgcatttcagagcatgggattgatcggcagcaagagtaaagacacagctccagaggcccacactgtggggtctgggccctgccttaggcagcccccctctttggccccctcccgtcaggcccagggcttggagtgaaagtgactctcaggtggtggggtggggaatgtgaataaacatgatttcttgccggg

SEQ ID NO: 426673 - DNA, 2320 bp, Homo sapiens
caggatggtctcgatctcctgacttcgtgatccacccgccttggcctcccaaagtgctgggattcccggcgtgagccaccgcgcccagccctcaatctgggttttaaacccaagcagagtccggaatcggagctcgcaccccttctcccaaccaggcctgcgtccctggggaaatcaggacgcagcgtccaggggttggaggagggccccggcggccgaccccggtctgtgccgccccctggtggccagccatgggcgagcatatgactgctctcggctccgccccgccgtccaacgggcacttccggagccgggcgtctacagaccgcggccaccttccacctgcgcccgaggcagacggtgcaggggcctccgggacaggcgtctgaggcctgctccgcagcgcgggcccgggggcgggcctaggggcggggcctgctgtggtgcgctcaggcaccgcgctggccacctgtgcccgggtcctagtggcggccgcagtgtcgcaggccggagggaagatggcggcgccctggtggcgagccgcgctgtgcgagtgtcggagatggcggggcttcagcacctcggccgtcctgggccgccggacacccccgctggggccgatgcccaacagtgacatcgacttgagcaacctggagcggctggagaagtaccggagcttcgaccgctaccggcgccgggcagagcaggaggcgcaggccccgcactggtggcggacctaccgagagtatttcggggagaagacagatcccaaagagaagattgatattgggctgcctccacccaaagtctcccggacccaacagctactggaacggaaacaggccatccaggagcttcgggccaatgtggaagaggagcgggctgcccgcctccgcacagccagtgtcccgctggatgccgtgcgggccgagtgggagaggacctgtggcccctaccacaagcagcgtctggctgagtattacggcctctaccgagacctgttccacggtgccacctttgtgccccgagtccccctgcacgtggcctacgctgtgggtgaggatgacctgatgcctgtgtactgtggcaatgaggtgactccaaccgaggctgcccaagcgccagaggtgacctatgaggcagaagagggctccttgtggacgttgctactcactagcttggatgggcacctgctggagccagatgctgagtacctccactggctgctgtgagtactggagtactgggggtagggggtgctgcccaggcgggaagaggagctgggagcctggactgagctgctcctgagtttcatggactacccatgggaccttgaattcacctgccacctctgcctcctgagggtgttaggggccctgggatccacgtgtctacttgaagacagctacaggagacaaagtttgcagtaggcctcgagacagggtttcaccatgttgcccaggctggtctcctgagctcaagcgatctgcccgcctccgcctcccaaagtgctaggattataagcgtgagccaccatgcctgggcccttcgtctctaaactcatttcttcacctgtaaaactgggataatggcaccacatgccttactcagcgtgaggtggactgtgacagtcacgtgggagaaggagcgggagaggcctagcagctgtggcgtcccccagaaccaacatcccgggtaaccgggtggctgaaggacaggtgacgtgtccctacctcccccccttccctgcccgaggctccggcatccaccgtcttgccttcctgctcttcaagcaggaccagccgattgacttctctgaggacgcacgcccctcaccctgctatcagctggcccagcggaccttccgcacttttgatttctacaagaaacaccaagaaaccatgactccagccggcttgtccttcttccagtgccgctgggatgactccgtcacctacatcttccaccagcttctggacatgcgggagccggtgtttgagttcgtgcggccgcccccttaccaccccaagcagaagcgcttcccccaccggcagcccctgcgctacctggaccggtacagggacagtcatgagcccacctatggcatctactaaggagccagagtgtgcgcatttcagagcatgggattgatcggcagcaagagtaaagacacagctccagaggcccacactgtggggtctgggccctgccttaggcagcccccctctttggccccctcccgtcaggcccagggcttggagtgaaagtgactctcaggtggtggggtggggaatgtgaataaacatgatttcttgccggg

SEQ ID NO: 426674 - DNA, 2477 bp, Homo sapiens
caggatggtctcgatctcctgacttcgtgatccacccgccttggcctcccaaagtgctgggattcccggcgtgagccaccgcgcccagccctcaatctgggttttaaacccaagcagagtccggaatcggagctcgcaccccttctcccaaccaggcctgcgtccctggggaaatcaggacgcagcgtccaggggttggaggagggccccggcggccgaccccggtctgtgccgccccctggtggccagccatgggcgagcatatgactgctctcggctccgccccgccgtccaacgggcacttccggagccgggcgtctacagaccgcggccaccttccacctgcgcccgaggcagacggtgcaggggcctccgggacaggcgtctgaggcctgctccgcagcgcgggcccgggggcgggcctaggggcggggcctgctgtggtgcgctcaggcaccgcgctggccacctgtgcccgggtcctagtggcggccgcagtgtcgcaggccggagggaagatggcggcgccctggtggcgagccgcgctgtgcgagtgtcggagatggcggggcttcagcacctcggccgtcctgggccgccggacacccccgctggggccgatgcccaacagtgacatcgacttgagcaacctggagcggctggagaagtaccggagcttcgaccgctaccggcgccgggcagagcaggaggcgcaggccccgcactggtggcggacctaccgagagtatttcggggagaagacagatcccaaagagaagattgatattgggctgcctccacccaaagtctcccggacccaacagctactggaacggaaacaggccatccaggagcttcgggccaatgtggaagaggagcgggctgcccgcctccgcacagccagtgtcccgctggatgccgtgcgggccgagtgggagaggacctgtggcccctaccacaagcagcgtctggctgagtattacggcctctaccgagacctgttccacggtgccacctttgtgccccgagtccccctgcacgtggcctacgctgtgggtgaggatgacctgatgcctgtgtactgtggcaatgaggtgactccaaccgaggctgcccaagcgccagaggtgacctatgaggcagaagagggctccttgtggacgttgctactcactagcttggatgggcacctgctggagccagatgctgagtacctccactggctgctgtgagtactggagtactgggggtagggggtgctgcccaggcgggaagaggagctgggagcctggactgagctgctcctgagtttcatggactacccatgggaccttgaattcacctgccacctctgcctcctgagggtgttaggggccctgggatccacgtgtctacttgaagacagctacaggagacaaagtttgcagtaggcctcgagacagggtttcaccatgttgcccaggctggtctcctgagctcaagcgatctgcccgcctccgcctcccaaagtgctaggattataagcgtgagccaccatgcctgggcccttcgtctctaaactcatttcttcacctgtaaaactgggataatggcaccacatgccttactcagcgtgaggtggactgtgacagtcacgtgggagaaggagcgggagaggcctagcagctgtggcgtcccccaggtgctccttgaaccactgggcgctccttccctgggcccagactggcggccttccatcttggtagcttttggctctgaacaccaggccagggggcagaggtcaggccagtgaccccaactttgagccttctggttaactggggacagtgactgggaggctggtttccgtcatttttattcaactgttaccagcctatgcggcaggaccctctggggatttgtgcctgaggcgttggccgcccctgtgccaggctgggcacacactccctgacgaggtcctggagacttcaggacgcacgctctctatcttctcatagctatcagctggcccagcggaccttccgcacttttgatttctacaagaaacaccaagaaaccatgactccagccggcttgtccttcttccagtgccgctgggatgactccgtcacctacatcttccaccagcttctggacatgcgggagccggtgtttgagttcgtgcggccgcccccttaccaccccaagcagaagcgcttcccccaccggcagcccctgcgctacctggaccggtacagggacagtcatgagcccacctatggcatctactaaggagccagagtgtgcgcatttcagagcatgggattgatcggcagcaagagtaaagacacagctccagaggcccacactgtggggtctgggccctgccttaggcagcccccctctttggccccctcccgtcaggcccagggcttggagtgaaagtgactctcaggtggtggggtggggaatgtgaataaacatgatttcttgccggg

SEQ ID NO: 426675 - DNA, 783 bp, Homo sapiens
gcacgaggtgtactgtggcaatgaggctgcccaagcgccagaggtgacctatgaggcagaagagggctccttgtggacgttgctactcactagcttggatgggcacctgctggagccagatgctgagtacctccactggctgctaaccaacatcccgggtaaccgggtggctgaaggacaggtgacgtgtccctacctcccccccttccctgcccgaggctccggcatccaccgtcttgccttcctgctcttcaagcaggaccagccgattgacttctctgaggacgcacgcccctcaccctgctatcagctggcccagcggaccttccgcacttttgatttctacaagaaacaccaagaaaccatgactccagccggcttgtccttcttccagtgccgctgggatgactccgtcacctacatcttccaccagcttctggacatgcgggagccggtgtttgagttcgtgcggccgcccccttaccaccccaagcagaagcgcttcccccaccggcagcccctgcgctacctggaccggtacagggacagtcatgagcccacctatggcatctactaaggagccagagtgtgcgcatttcagagcatgggattgatcggcagcaagagtaaagacacagctccagaggcccacactgtggggtctgggccctgccttaggcagcccccctctttggccccctcccgtcaggcccagggcttggagtgaaagtgactctcaggtggtggggtggggaatgtgaataaacatgatttcttgccggg

SEQ ID NO: 426676 - DNA, 800 bp, Homo sapiens
cctggtgggctcatgactgtccctgtaccggtccaggtagcgcaggggctgccggagggggaagcgcttctgcttggggtggtaagggggcggccgcacgaactcaaacactcctgctgcctccctggagtggtaattaaccgggactttcctcctcccagaaccaacatcccgggtaaccgggtggctgaaggacaggtgacgtgtccctacctcccccccttccctgcccgaggctccggcatccaccgtcttgccttcctgctcttcaagcaggaccagccgattgacttctctgaggacgcacgcccctcaccctgctatcagctggcccagcggaccttccgcacttttgatttctacaagaaacaccaagaaaccatgactccagccggcttgtccttcttccagtgccgctgggatgactccgtcacctacatcttccaccagcttctggacatgcgggagccggtgtttgagttcgtgcggccgcccccttaccaccccaagcagaagcgcttcccccaccggcagcccctgcgctacctggaccggtacagggacagtcatgagcccacctatggcatctactaaggagccagagtgtgcgcatttcagagcatgggattgatcggcagcaagagtaaagacacagctccagaggcccacactgtggggtctgggccctgccttaggcagcccccctctttggccccctcccgtcaggcccagggcttggagtgaaagtgactctcaggtggtggggtggggaatgtgaataaacatgatttcttgccggg

SEQ ID NO: 426677 - DNA, 531 bp, Homo sapiens
ggggctcaccaggcctcctgccccgctcacctcctatgagccagggccctggggggctgggggaggggccaggtggagatctccagcgctggctcctaacaagggagggggtggcagggccgtggtcggctgggccgtggtcagcaggtgtgtttttgtgcagatgggcacctgctggagccagatgctgagtacctccactggctgctgtgagtactggagtactgggggtagggggtgctgcccaggcgggaagaggagctgggagcctggactgagctgctcctgagtttcatggactacccatgggaccttgaattcacctgccacctctgcctcctgagggtgttaggggccctgggatccacgtgtctacttgaagacagctacaggagacaaagtttgcagtaggcctcggtcagtccccacaagcctcctcatcttttcttttcttttttttttttttttttgagacagggtctcactctgtcccccaggctggagtacagtggtgcaatcatggctaattgc

SEQ ID NO: 426678 - DNA, 925 bp, Homo sapiens
  misc_feature (770)..(770): n is a, c, g, or t
  misc_feature (800)..(800): n is a, c, g, or t
ggctggagctgccgccgccgccgccgccgcgccagcaggtcctaatgcctgtcacttcccaggacgctggcagcagcagcagcccggagcccccgagccctcggcaggtttgcgtgtccttccccgcgatctgattggataaagtgggggctcgacggtggccgacgtgggacagtctggctgtggcaggggtctcggaaaccatgggttattgcagtggcaggtgcacgcttatctttatctgtggcatgcaactggtactgaagatggatggggatcattaggtttctcttattatattgtcccacaaatatcttaaccgtttgtgtgctggagaggcaaatatttgacttccttggatatcagtgggcacctatcctggcaaattttgtacatattattatcgtcattcttggtttgtttggaactattcaatatagacctcgttacataacaggatatgctgtctggctagtcctctgggttacgtggaatgtgtttgttatctgcttctatttggaggctggggacctctcaaaggaaacagaccttatcctgacttttaatatatcaatgcaccgatcttggtggatggagaatggaccaggatgtacggtgacgtcagtgacacctgccccagactgggccccagaagaccatcgctacatcacggtctcagggtgtttgctggagtaccagtacatagaagtggctcatagttccctccagattgtcctcgcactggcaggtttcatctacgcctgtatgtngtgaaatgtataactgaagaagaggacagntttgatttcataggtggtttgactcttatggctatcacgggcctcagaagacatctcatttacagcttacagcctatgtacatgtcaagataagtccggatgacttcggtatgtcaggcccatgg

SEQ ID NO: 426679 - DNA, 581 bp, Homo sapiens
  misc_feature (518)..(518): n is a, c, g, or t
ggctggagctgccgccgccgccgccgccgcgccagcaggtcctaatgcctgtcacttcccaggacgctggcagcagcagcagcccggagcccccgagccctcggcaggtttgcgtgtccttccccgcgatctgattggataaagtgggggctcgacggtggccgacgtgggacagtctggctgtggcaggggtctcggaaaccatgggttattgcagtggcaggtgcacgcttatctttatctgtggcatgcaactgagatggtgaatacttttttaaaaagaaagaggataagcagaaaaggaagaaaatgacctacatattaatgaagtctgtacattcatcaggaagaattttcatgtcccaaataaagtctgtgattgattggtcatctttaaatcctaaaacatccgaagaactggaagatcctgaagagttatttagttctaaatataaagtgctttaaagacaaattgagaaagacataggcttttaacaaaagggaaaataaacactggngatcggccggcaaaccatactctctcaaccacgttatccaccgcccccgagcgcgagcgccac

SEQ ID NO: 426680 - DNA, 573 bp, Homo sapiens
ggctggagctgccgccgccgccgccgccgcgccagcaggtcctaatgcctgtcacttcccaggacgctggcagcagcagcagcccggagcccccgagccctcggcaggtttgcgtgtccttccccgcgatctgattggataaagtgggggctcgacggtggccgacgtgggacagtctggctgtggcaggggtctcggaaaccatgggttattgcagtggcaggtgcacgcttatctttatctgtggcatgcaactgagatggtgaatacttttttaaaaagaaagaggataagcagaaaaggaagaaaatgacctacatattaatgaagtctgtacattcatcaggaagaattttcatgtcccaaataaagtctgtgattgattggtcatctttaaatcctaaaacatccgaagaactggaagatcctgaagagttatttagttctaaatataaagtgctttaaagacaaattgagaaagacataggcttttaacaaaagggaaaataaacactgggcagcggccagatggcaattagcacgtctgtgggaaaagaacgcgggtgggggaca

SEQ ID NO: 426681 - DNA, 861 bp, Homo sapiens
  misc_feature (706)..(706): n is a, c, g, or t
  misc_feature (736)..(736): n is a, c, g, or t
ggctggagctgccgccgccgccgccgccgcgccagcaggtcctaatgcctgtcacttcccaggacgctggcagcagcagcagcccggagcccccgagccctcggcaggtttgcgtgtccttccccgcgatctgattggataaagtgggggctcgacggtggccgacgtgggacagtctggctgtggcaggggtctcggaaaccatgggttattgcagtggcaggtgcacgcttatctttatctgtggcatgcaactggtttgtgtgctggagaggcaaatatttgacttccttggatatcagtgggcacctatcctggcaaattttgtacatattattatcgtcattcttggtttgtttggaactattcaatatagacctcgttacataacaggatatgctgtctggctagtcctctgggttacgtggaatgtgtttgttatctgcttctatttggaggctggggacctctcaaaggaaacagaccttatcctgacttttaatatatcaatgcaccgatcttggtggatggagaatggaccaggatgtacggtgacgtcagtgacacctgccccagactgggccccagaagaccatcgctacatcacggtctcagggtgtttgctggagtaccagtacatagaagtggctcatagttccctccagattgtcctcgcactggcaggtttcatctacgcctgtatgtngtgaaatgtataactgaagaagaggacagntttgatttcataggtggtttgactcttatggctatcacgggcctcagaagacatctcatttacagcttacagcctatgtacatgtcaagataagtccggatgacttcggtatgtcaggcccatgg

SEQ ID NO: 426682 - DNA, 853 bp, Homo sapiens
ggctggagctgccgccgccgccgccgccgcgccagcaggtcctaatgcctgtcacttcccaggacgctggcagcagcagcagcccggagcccccgagccctcggcaggtttgcgtgtccttccccgcgatctgattggataaagtgggggctcgacggtggccgacgtgggacagtctggctgtggcaggggtctcggaaaccatgggttattgcagtggcaggtgcacgcttatctttatctgtggcatgcaactggtactgaagatggatggggatcattaggtttctcttattatattgtcccacaaatatcttaaccgtttgtgtgctggagaggcaaatatttgacttccttggatatcagtgggcacctatcctggcaaattttgtacatattattatcgtcattcttggtttgtttggaactattcaatatagacctcgttacataacaggatatgctgtctggctagtcctctgggttacgtggaatgtgtttgttatctgcttctatttggaggctggggacctctcaaagcacccatctgtgaactggtggaaggagccatgtttatcaaacagagagtggaagaaagcaccagaactgcaaatccagaatttcagtctacagagtaaggaagggacaaggctggccctgcatctattcctgtagaccctgcaatgccaggggatatagcacaaggccattgtaagttccatgaggaactaggaaagagaaaaaaaaaagagaagcatctaaaaatatgttaaaagttcacatttctggtgctgttttggacattttttatgggaaagttctttgtaagtaatacaatatctttgaaagaaaa

SEQ ID NO: 426683 - DNA, 378 bp, Homo sapiens
  misc_feature (39)..(39): n is a, c, g, or t
  misc_feature (315)..(315): n is a, c, g, or t
ccagtgttccgcgcggcgagcagcacggggacagggggngggggggtcaggagtagatggtgaatacttttttaaaaagaaagaggataagcagaaaaggaagaaaatgacctacatattaatgaagtctgtacattcatcaggaagaattttcatgtcccaaataaagtctgtgattgattggtcatctttaaatcctaaaacatccgaagaactggaagatcctgaagagttatttagttctaaatataaagtgctttaaagacaaattgagaaagacataggcttttaacaaaagggaaaataaacactggngatcggccggcaaaccatactctctcaaccacgttatccaccgcccccgagcgcgagcgccac

SEQ ID NO: 426684 - DNA, 480 bp, Homo sapiens
gtttacttttgtagacactgcctaaatagaaatagaaattctggtgatttcaataacatcaaaaatgacaaattacctgtttaacttaaaaaggtcatgaatgaggccttcagagaaataatattaataatataatgaataaccatagagcagtgcctttaaattagctataggaaggaaatagtcttttcaagtttctgaacaatatatttctcttagttggcacctcacaaatactagatcatgtcagacgctgctggttaatagctgcaggaaggcatgttgtgcagtggatattgctcatggaagtgtgtgaaaatcatagtaagctttgttctccctgctaagacttgctatgtatatttccatcattgtttcatgtaaactgaaccattgtggtaaacttttggagttgatatggaatcactttaatgctgttttcacaaataaaagttttttcttataggtcaaaaaaaaaac

SEQ ID NO: 426685 - DNA, 285 bp, Homo sapiens
catacacttcgagctcgtaccgctcagccgaggtggttgctctactggggccttatcgaacagctcggtatcggctggtgccatcatctaagtatagactgtgaggagctgcatgttggcatcattcggttgtggacggtgtctagcaaggaggagaatctgcaagtattgcagaggtgggagacttgcgtgtctccttttcctatgctggactgagcggcgatgaccctgacctgggcccagctcacgtggtaacctggcttcccaggggcagacactaagtca

SEQ ID NO: 426686 - DNA, 389 bp, Homo sapiens
cgcgcgcatgcgcagaaacactgggcacagggggaggtaactgcagtaagtcccgcttggccctggagtccacgcggattttcgaagctggggctggcaagaggccgctggacaccacgctccagtcgtcagcccacttcctagctgaacagcgcgaggcggcggcagcgagccgggtcccaccatggccgcgaatctgtccaggcttcttttgtccgtgttccttggctcgcctcgtcctcggcgttcgtgcggaggcggactcggaggtgttgctcccgtactgggatctgcttgtacgcctctccgcggcccctccttgcattcccagttccctcctgtaccttggggccctgaaacttgcgcattatgagagctggacgcgacct

SEQ ID NO: 426687 - DNA, 2760 bp, Homo sapiens
cgcgcgcatgcgcagaaacactgggcacagggggaggtaactgcagtaagtcccgcttggccctggagtccacgcggattttcgaagctggggctggcaagaggccgctggacaccacgctccagtcgtcagcccacttcctagctgaacagcgcgaggcggcggcagcgagccgggtcccaccatggccgcgaattattccagtaccagtacccggagagaacatgtcaaagttaaaaccagctcccagccaggcttcctggaacggctgagcgagacctcgggtgggatgtttgtggggctcatggccttcctgctctccttctacctaattttcaccaatgagggccgcgcattgaagacggcaacctcattggctgaggggctctcgcttgtggtgtctcccgacagcatccacagtgtggctccggagaatgaaggaaggctggtgcacatcattggcgccttacggacatccaagcttttgtctgatccaaactatggggtccatcttccggctgtgaaactgcggaggcacgtggagatgtaccaatgggtagaaactgaggagtccagggagtacaccgaggatgggcaggtgaagaaggagacgaggtattcctacaacactgaatggaggtcagaaatcatcaacagcaaaaacttcgaccgagagattggccacaaaaaccccagtgccatggcagtggagtcattcatggcaacagccccctttgtccaaattggcaggtttttcctctcgtcaggcctcatcgacaaagtcgacaacttcaagtccctgagcctatccaagctggaggaccctcatgtggacatcattcgccgtggagactttttctaccacagcgaaaatcccaagtatccagaggtgggagacttgcgtgtctccttttcctatgctggactgagcggcgatgaccctgacctgggcccagctcacgtggtcactgtgattgcccggcagcggggtgaccagctagtcccattctccaccaagtctggggataccttactgctcctgcaccacggggacttctcagcagaggaggtgtttcatagagaactaaggagcaactccatgaagacctggggcctgcgggcagctggctggatggccatgttcatgggcctcaaccttatgacacggatcctctacaccttggtggactggtttcctgttttccgagacctggtcaacattggcctgaaagcctttgccttctgtgtggccacctcgctgaccctgctgaccgtggcggctggctggctcttctaccgacccctgtgggccctcctcattgccggcctggcccttgtgcccatccttgttgctcggacacgggtgccagccaaaaagttggagtgaaaagaccctggcacccgcccgacacctgcgtgagccctaggatccaggtcctctctcacctctgacccagctccatgccagagcaggagccccggtcaattttggactctgcactccctctcctcttcaggggccagacttggcagcatgtgcaccaggttggtgttcaccagctcatgtcttccccacatctcttcttgccagtaagcagctttggtgggcagcagcagctcatgaatggcaagctgacagcttctcctgctgtttccttcctctcttggactgagtgggtacggccagccactcagcccattggcagctgacaacgcagacacgctctacggaggcctgctgataaagggctcagccttgccgtgtgctgcttctcatcactgcacacaagtgccatgctttgccaccaccaccaagcacatctgtgatcctgaagggcggccgttagtcattactgctgagtcctgggtcaccagcagacacactgggcatggacccctcaaagcaggcacacccaaaacacaagtctgtggctagaacctgatgtggtgtttaaaagagaagaaacactgaagatgtcctgaggagaaaagctggacatatactgggcttcacacttatcttatggcttggcagaatctttgtagtgtgtgggatctctgaaggccctatttaagtttttcttcgttactttgctgcttcatgtgtactttcctaccccaagaggaagttttctgaaataagatttaaaaacaaaacaaaaaaaacacttaatatttcagactgttacaggaaacaccctttagtctgtcagttgaattcagagcactgaaaggtgttaaattggggtatgtggtttgattgataaaaagttacctctcagtattttgtgtcactgagaagctttacaatggatgcttttgaaacaagtatcagcaaaaggatttgttttcactctgggaggagagggtggagaaagcacttgctttcatcctctggcatcggaaactcccctatgcacttgaagatggtttaaaagattaaagaaacgattaagagaaaaggttggaagctttatactaaatgggctccttcatggtgacgccccgtcaaccacaatcaagaactgaggcctgaggctggttgtacaatgcccacgcctgcctggctgctttcacctgggagtgctttcgatgtgggcacctgggcttcctagggctgcttctgagtggttctttcacgtgttgtgtccatagctttagtcttcctaaataagatccacccacacctaagtcacagaatttctaagttccccaactactctcacacccttttaaagataaagtatgttgtaaccagga

SEQ ID NO: 426688 - DNA, 3279 bp, Homo sapiens
cgcgcgcatgcgcagaaacactgggcacagggggaggtaactgcagtaagtcccgcttggccctggagtccacgcggattttcgaagctggggctggcaagaggccgctggacaccacgctccagtcgtcagcccacttcctagctgaacagcgcgaggcggcggcagcgagccgggtcccaccatggccgcgaattattccagtaccagtacccggagagaacatgtcaaagttaaaaccagctcccagccaggcttcctggaacggctgagcgagacctcgggtgggatgtttgtggggctcatggccttcctgctctccttctacctaattttcaccaatgagggccgcgcattgaagacggcaacctcattggctgaggggctctcgcttgtggtgtctcccgacagcatccacagtgtggctccggagaatgaaggaaggctggtgcacatcattggcgccttacggacatccaagcttttgtctgatccaaactatggggtccatcttccggctgtgaaactgcggaggcacgtggagatgtaccaatgggtagaaactgaggagtccagggagtacaccgaggatgggcaggtgaagaaggagacgaggtattcctacaacactgaatggaggtcagaaatcatcaacagcaaaaacttcgaccgagagattggccacaaaaaccccagtgccatggcagtggagtcattcatggcaacagccccctttgtccaaattggcaggtttttcctctcgtcaggcctcatcgacaaagtcgacaacttcaagtccctgagcctatccaagctggaggaccctcatgtggacatcattcgccgtggagactttttctaccacagcgaaaatcccaagtatccagaggtgggagacttgcgtgtctccttttcctatgctggactgagcggcgatgaccctgacctgggcccagctcacgtggtcactgtgattgcccggcagcggggtgaccagctagtcccattctccaccaagtctggggataccttactgctcctgcaccacggggacttctcagcagaggaggtgtttcatagagaactaaggagcaactccatgaagacctggggcctgcgggcagctggctggatggccatgttcatgggcctcaaccttatgacacggatcctctacaccttggtggactggtttcctgttttccgagacctggtcaacattggcctgaaagcctttgccttctgtgtggccacctcgctgaccctgctgaccgtggcggctggctggctcttctaccgacccctgtgggccctcctcattgccggcctggcccttgtgcccatccttgttgctcggacacgggtgccagccaaaaagttggagtgaaaagaccctggcacccgcccgacacctgcgtgagccctaggatccaggtcctctctcacctctgacccagctccatgccagagcaggagccccggtcaattttggactctgcactccctctcctcttcaggggccagacttggcagcatgtgcaccaggttggtgttcaccagctcatgtcttccccacatctcttcttgccagtaagcagctttggtgggcagcagcagctcatgaatggcaagctgacagcttctcctgctgtttccttcctctcttggactgagtgggtacggccagccactcagcccattggcagctgacaacgcagacacgctctacggaggcctgctgataaagggctcagccttgccgtgtgctgcttctcatcactgcacacaagtgccatgctttgccaccaccaccaagcacatctgtgatcctgaagggcggccgttagtcattactgctgagtcctgggtcaccagcagacacactgggcatggacccctcaaagcaggcacacccaaaacacaagtctgtggctagaacctgatgtggtgtttaaaagagaagaaacactgaagatgtcctgaggagaaaagctggacatatactgggcttcacacttatcttatggcttggcagaatctttgtagtgtgtgggatctctgaaggccctatttaagtttttcttcgttactttgctgcttcatgtgtactttcctaccccaagaggaagttttctgaaataagatttaaaaacaaaacaaaaaaaacacttaatatttcagactgttacaggaaacaccctttagtctgtcagttgaattcagagcactgaaaggtgttaaattggggtatgtggtttgattgataaaaagttacctctcagtattttgtgtcactgagaagctttacaatggatgcttttgaaacaagtatcagcaaaaggatttgttttcactctgggaggagagggtggagaaagcacttgctttcatcctctggcatcggaaactcccctatgcacttgaagatggtttaaaagattaaagaaacgattaagagaaaaggttggaagctttatactaaatgggctccttcatggtgacgccccgtcaaccacaatcaagaactgaggcctgaggctggttgtacaatgcccacgcctgcctggctgctttcacctgggagtgctttcgatgtgggcacctgggcttcctagggctgcttctgagtggttctttcacgtgttgtgtccatagctttagtcttcctaaataagatccacccacacctaagtcacagaatttctaagttccccaactactctcacacccttttaaagataaagtatgttgtaaccaggatgtcttaaatgattctttgtgtaccttttctgtcatattcagaaaccgttttgtgcctgctgggagtaattcctttagcaattaagtatttggtagctgaataaggggtcagaacttctgaaaccagagatctgtaatcatctctattggcctggggtgcctgtgctataaatgagtttcttcacatgaaaaacacagccagcccaagatgacttatctgggtttaggattcaatagtattcactaactgcttattacatgagcaatttcatcaaatctccaaactcttaaaggatgctttcggaaaacacgctgtatacctagatgatgactaaatgcaaaatccttgggctttggtttttttctagtaaggattttaaataactgccgacttcaaaagtgttcttaaaacgaaagataatgttaagaaaaatttgaaagctctgtccacccaaatcaggaatatcgctgtcccttccatgaaaacatgtgtcattaatttataaaggttcatggata

SEQ ID NO: 426689 - DNA, 3218 bp, Homo sapiens
cgcgcgcatgcgcagaaacactgggcacagggggaggtaactgcagtaagtcccgcttggccctggagtccacgcggattttcgaagctggggctggcaagaggccgctggacaccacgctccagtcgtcagcccacttcctagctgaacagcgcgaggcggcggcagcgagccgggtcccaccatggccgcgaattattccagtaccagtacccggagagaacatgtcaaagttaaaaccagctcccagccaggcttcctggaacggctgagcgagacctcgggtgggatgtttgtggggctcatggccttcctgctctccttctacctaattttcaccaatgagggccgcgcattgaagacggcaacctcattggctgaggggctctcgcttgtggtgtctcccgacagcatccacagtgtggctccggagaatgaaggaaggctggtgcacatcattggcgccttacggacatccaagcttttgtctgatccaaactatggggtccatcttccggctgtgaaactgcggaggcacgtggagatgtaccaatgggtagaaactgaggagtccagggagtacaccgaggatgggcaggtgaagaaggagacgaggtattcctacaacactgaatggaggtcagaaatcatcaacagcaaaaacttcgaccgagagattggccacaaaaaccccagtgccatggcagtggagtcattcatggcaacagccccctttgtccaaattggcaggtttttcctctcgtcaggcctcatcgacaaagtcgacaacttcaagtccctgagcctatccaagctggaggaccctcatgtggacatcattcgccgtggagactttttctaccacagcgaaaatcccaagtatccagaggtgggagacttgcgtgtctccttttcctatgctggactgagcggcgatgaccctgacctgggcccagctcacgtggtcactgtgattgcccggcagcggggtgaccagctagtcccattctccaccaagtctggggataccttactgctcctgcaccacggggacttctcagcagaggaggtgtttcatagagaactaaggagcaactccatgaagacctggggcctgcgggcagctggctggatggccatgttcatgggcctcaaccttatgacacggatcctctacaccttggtggactggtttcctgttttccgagacctggtcaacattggcctgaaagcctttgccttctgtgtggccacctcgctgaccctgctgaccgtggcggctggctggctcttctaccgacccctgtgggccctcctcattgccggcctggcccttgtgcccatccttgttgctcggacacgggtgccagccaaaaagttggagtgaaaagaccctggcacccgcccgacacctgcgtgagccctaggatccaggtcctctctcacctctgacccagctccatgccagagcaggagccccggtcaattttggactctgcactccctctcctcttcaggggccagacttggcagcatgtgcaccaggttggtgttcaccagctcatgtcttccccacatctcttcttgccagtaagcagctttggtgggcagcagcagctcatgaatggcaagctgacagcttctcctgctgtttccttcctctcttggactgagtgggtacggccagccactcagcccattggcagctgacaacgcagacacgctctacggaggcctgctgataaagggctcagccttgccgtgtgctgcttctcatcactgcacacaagtgccatgctttgccaccaccaccaagcacatctgtgatcctgaagggcggccgttagtcattactgctgagtcctgggtcaccagcagacacactgggcatggacccctcaaagcaggcacacccaaaacacaagtctgtggctagaacctgatgtggtgtttaaaagagaagaaacactgaagatgtcctgaggagaaaagctggacatatactgggcttcacacttatcttatggcttggcagaatctttgtagtgtgtgggatctctgaaggccctatttaagtttttcttctaagatttaaaaacaaaacaaaaaaaacacttaatatttcagactgttacaggaaacaccctttagtctgtcagttgaattcagagcactgaaaggtgttaaattggggtatgtggtttgattgataaaaagttacctctcagtattttgtgtcactgagaagctttacaatggatgcttttgaaacaagtatcagcaaaaggatttgttttcactctgggaggagagggtggagaaagcacttgctttcatcctctggcatcggaaactcccctatgcacttgaagatggtttaaaagattaaagaaacgattaagagaaaaggttggaagctttatactaaatgggctccttcatggtgacgccccgtcaaccacaatcaagaactgaggcctgaggctggttgtacaatgcccacgcctgcctggctgctttcacctgggagtgctttcgatgtgggcacctgggcttcctagggctgcttctgagtggttctttcacgtgttgtgtccatagctttagtcttcctaaataagatccacccacacctaagtcacagaatttctaagttccccaactactctcacacccttttaaagataaagtatgttgtaaccaggatgtcttaaatgattctttgtgtaccttttctgtcatattcagaaaccgttttgtgcctgctgggagtaattcctttagcaattaagtatttggtagctgaataaggggtcagaacttctgaaaccagagatctgtaatcatctctattggcctggggtgcctgtgctataaatgagtttcttcacatgaaaaacacagccagcccaagatgacttatctgggtttaggattcaatagtattcactaactgcttattacatgagcaatttcatcaaatctccaaactcttaaaggatgctttcggaaaacacgctgtatacctagatgatgactaaatgcaaaatccttgggctttggtttttttctagtaaggattttaaataactgccgacttcaaaagtgttcttaaaacgaaagataatgttaagaaaaatttgaaagctttggaaaaccaaatttgtaatatcattgtattttttattaaaagttttgtaataaatttctaaattatc

SEQ ID NO: 426690 - DNA, 2351 bp, Homo sapiens
cgcgcgcatgcgcagaaacactgggcacagggggaggtaactgcagtaagtcccgcttggccctggagtccacgcggattttcgaagctggggctggcaagaggccgctggacaccacgctccagtcgtcagcccacttcctagctgaacagcgcgaggcggcggcagcgagccgggtcccaccatggccgcgaattattccagtaccagtacccggagagaacatgtcaaagttaaaaccagctcccagccaggcttcctggaacggctgagcgagacctcgggtgggatgtttgtggggctcatggccttcctgctctccttctacctaattttcaccaatgagggccgcgcattgaagacggcaacctcattggctgaggggctctcgcttgtggtgtctcccgacagcatccacagtgtggctccggagaatgaaggaaggctggtgcacatcattggcgccttacggacatccaagcttttgtctgatccaaactatggggtccatcttccggctgtgaaactgcggaggcacgtggagatgtaccaatgggtagaaactgaggagtccagggagtacaccgaggatgggcaggtgaagaaggagacgaggtattcctacaacactgaatggaggtcagaaatcatcaacagcaaaaacttcgaccgagagattggccacaaaaaccccagtgccatggcagtggagtcattcatggcaacagccccctttgtccaaattggcaggtttttcctctcgtcaggcctcatcgacaaagtcgacaacttcaagtccctgagcctatccaagctggaggaccctcatgtggacatcattcgccgtggagactttttctaccacagcgaaaatcccaagtatccagaggtgggagacttgcgtgtctccttttcctatgctggactgagcggcgatgaccctgacctgggcccagctcacgtggtcactgtgattgcccggcagcggggtgaccagctagtcccattctccaccaagtctggggataccttactgctcctgcaccacggggacttctcagcagaggaggtgtttcatagagaactaaggagcaactccatgaagacctggggcctgcgggcagctggctggatggccatgttcatgggcctcaaccttatgacacggatcctctacaccttggtggactggtttcctgttttccgagacctggtcaacattggcctgaaagcctttgccttctgtgtggccacctcgctgaccctgctgaccgtggcggctggctggctcttctaccgacccctgtgggccctcctcattgccggcctggcccttgtgcccatccttgttgctcggacacgggtgccagccaaaaagttggagtgaaaagaccctggcacccgcccgacacctgcgtgagccctaggatccaggtcctctctcacctctgacccagctccatgccagagcaggagccccggtcaattttggactctgcactccctctcctcttcaggggccagacttggcagcatgtgcaccaggttggtgttcaccagctcatgtcttccccacatctcttcttgccagtaagcagctttggtgggcagcagcagctcatgaatggcaagctgacagcttctcctgctgtttccttcctctcttggactgagtgggtacggccagccactcagcccattggcagctgacaacgcagacacgctctacggaggcctgctgataaagggctcagccttgccgtgtgctgcttctcatcactgcacacaagtgccatgctttgccaccaccaccaagcacatctgtgatcctgaagggcggccgttagtcattactgctgagtcctgggtcaccagcagacacactgggcatggacccctcaaagcaggcacacccaaaacacaagtctgtggctagaacctgatgtggtgtttaaaagagaagaaacactgaagatgtcctgaggagaaaagctggacatatactgggcttcacacttatcttatggcttggcagaatctttgtagtgtgtgggatctctgaaggccctatttaagtttttcttcgttactttgctgcttcatgtgtactttcctaccccaagaggaagttttctgaaataagatttaaaaacaaaacaaaaaaaacacttaatatttcagactgttacaggaaacaccctttagtctgtcagttgaattcagagcactgaaaggcgcccccccggggcatgcgctccgatccgccccccaccccccctctcccgtttttgggtcccccccaaagcctttacaatggatgccttttgaaacaaagtattatccaaaaggga

SEQ ID NO: 426691 - DNA, 630 bp, Homo sapiens
cgcgcgcatgcgcagaaacactgggcacagggggaggtaactgcagtaagtcccgcttggccctggagtccacgcggattttcgaagctggggctggcaagaggccgctggacaccacgctccagtcgtcagcccacttcctagctgaacagcgcgaggcggcggcagcgagccgggtcccaccatggccgcgaattattccagtaccagtacccggagagaacatgtcaaagttaaaaccagctcccagccaggcttcctggaacggctgagcgagacctcgggtgggatgtttgtggggctcatggccttcctgctctccttctacctaattttcaccaatgaggtaaaatgtctggggtcttcctgtgcagagtgagagtccccaccatgtcagagagcaaaggcgatgaacccggaggctggatttggtaatcaagggcctagattttaaaaagagaaaggaggatactgagttaatcacagttctttccattgtgatccatcccacagctgatgtgagcaggaaggggagtagatcagttcacacacctgaatatccaggggttagcacctgcctcaggcgtagttggatccaggtgttcatgctgggtcaccaggaatctccat

SEQ ID NO: 426692 - DNA, 389 bp, Homo sapiens
ggaatctgggttccagtccttactctccacttgctagacctcagttttccaactgtacggtggggagatgggtctcagcgctcccggaggccccatcctaccctaatactttgcaacaagcacagtcatgctgagccacccctgagctgttgaaatccccactcccctttgctcccagggccgcgcattgaagacggcaacctcattggctgaggggctctcgcttgtggtgtctcccgacagcatccacagtgtggctccggagaatgaaggaaggctggtgcacatcattggcgccttacggacatccaaggtaggtttggcaggggatgctgacctgccagtggctcggggctcatcctggatgttgtctggctgaggatttgaaa

SEQ ID NO: 426693 - DNA, 375 bp, Homo sapiens
acaggagacagagtgagggtgctcagcccaggggagggggcacagggcccctgggggtggacaggacaagatgtctgctgcgcctgggctaatctggacttgcaggaacccccgggtggggaccctgcccagcacaaacaacccaaagggacccgggcagctcccacaccggtgcccatctctgacagcttcctctctcccacagtgccatggcagtggagtcattcatggcaacagccccctttgtccaaattggcaggtttttcctctcgtcaggtaagtctcaggcctctccagaggagctcgtgccagaagcacaaggcccccctagggccggagctcccagtactcagccttcagagggctaaaggcaca

SEQ ID NO: 426694 - DNA, 3272 bp, Homo sapiens
cgcgcgcatgcgcagaaacactgggcacagggggaggtaactgcagtaagtcccgcttggccctggagtccacgcggattttcgaagctggggctggcaagaggccgctggacaccacgctccagtcgtcagcccacttcctagctgaacagcgcgaggcggcggcagcgagccgggtcccaccatggccgcgaattattccagtaccagtacccggagagaacatgtcaaagttaaaaccagctcccagccaggcttcctggaacggctgagcgagacctcgggtgggatgtttgtggggctcatggccttcctgctctccttctacctaattttcaccaatgagggccgcgcattgaagacggcaacctcattggctgaggggctctcgcttgtggtgtctcccgacagcatccacagtgtggctccggagaatgaaggaaggctggtgcacatcattggcgccttacggacatccaagcttttgtctgatccaaactatggggtccatcttccggctgtgaaactgcggaggcacgtggagatgtaccaatgggtagaaactgaggagtccagggagtacaccgaggatgggcaggtgaagaaggagacgaggtattcctacaacactgaatggaggtcagaaatcatcaacagcaaaaacttcgaccgagagattggccacaaaaaccccagtgccatggcagtggagtcattcatggcaacagccccctttgtccaaattggcaggtttttcctctcgtcaggcctcatcgacaaagtcgacaacttcaagtccctgagcctatccaagctggaggaccctcatgtggacatcattcgccgtggagactttttctaccacagcgaaaatcccaagtatccagaggtgggagacttgcgtgtctccttttcctatgctggactgagcggcgatgaccctgacctgggcccagctcacgtggtcactgtgattgcccggcagcggggtgaccagctagtcccattctccaccaagtctggggataccttactgctcctgcaccacggggacttctcagcagaggaggtgtttcatagagaactaaggagcaactccatgaagacctggggcctgcgggcagctggctggatggccatgttcatgggcctcaaccttatgacacggatcctctacaccttggtggactggtttcctgttttccgagacctggtcaacattggcctgaaagcctttgccttctgtgtggccacctcgctgaccctgctgaccgtggcggctggctggctcttctaccgacccctgtgggccctcctcattgccggcctggcccttgtgcccatccttgttgctcggacacgggtgccagccaaaaagttggagtgaaaagaccctggcacccgcccgacacctgcgtgagccctaggatccaggtcctctctcacctctgacccagctccatgccagagcaggagccccggtcaattttggactctgcactccctctcctcttcaggggccagacttggcagcatgtgcaccaggttggtgttcaccagctcatgtcttccccacatctcttcttgccagtaagcagctttggtgggcagcagcagctcatgaatggcaagctgacagcttctcctgctgtttccttcctctcttggactgagtgggtacggccagccactcagcccattggcagctgacaacgcagacacgctctacggaggcctgctgataaagggctcagccttgccgtgtgctgcttctcatcactgcacacaagtgccatgctttgccaccaccaccaagcacatctgtgatcctgaagggcggccgttagtcattactgctgagtcctgggtcaccagcagacacactgggcatggacccctcaaagcaggcacacccaaaacacaagtctgtggctagaacctgatgtggtgtttaaaagagaagaaacactgaagatgtcctgaggagaaaagctggacatatactgggcttcacacttatcttatggcttggcagaatctttgtagtgtgtgggatctctgaaggccctatttaagtttttcttcgttactttgctgcttcatgtgtactttcctaccccaagaggaagttttctgaaataagatttaaaaacaaaacaaaaaaaacacttaatatttcagactgttacaggaaacaccctttagtctgtcagttgaattcagagcactgaaaggtgttaaattggggtatgtggtttgattgataaaaagttacctctcagtattttgtgtcactgagaagctttacaatggatgcttttgaaacaagtatcagcaaaaggatttgttttcactctgggaggagagggtggagaaagcacttgctttcatcctctggcatcggaaactcccctatgcacttgaagatggtttaaaagattaaagaaacgattaagagaaaaggttggaagctttatactaaatgggctccttcatggtgacgccccgtcaaccacaatcaagaactgaggcctgaggctggttgtacaatgcccacgcctgcctggctgctttcacctgggagtgctttcgatgtgggcacctgggcttcctagggctgcttctgagtggttctttcacgtgttgtgtccatagctttagtcttcctaaataagatccacccacacctaagtcacagaatttctaagttccccaactactctcacacccttttaaagataaagtatgttgtaaccaggatgtcttaaatgattctttgtgtaccttttctgtcatattcagaaaccgttttgtgcctgctgggagtaattcctttagcaattaagtatttggtagctgaataaggggtcagaacttctgaaaccagagatctgtaatcatctctattggcctggggtgcctgtgctataaatgagtttcttcacatgaaaaacacagccagcccaagatgacttatctgggtttaggattcaatagtattcactaactgcttattacatgagcaatttcatcaaatctccaaactcttaaaggatgctttcggaaaacacgctgtatacctagatgatgactaaatgcaaaatccttgggctttggtttttttctagtaaggattttaaataactgccgacttcaaaagtgttcttaaaacgaaagataatgttaagaaaaatttgaaagctttggaaaaccaaatttgtaatatcattgtattttttattaaaagttttgtaataaatttctaaattatc

SEQ ID NO: 426695 - DNA, 265 bp, Homo sapiens
tcccctgggtttctaaccactctggtcccctcaggcctcatcgacaaagtcgacaacttcaagtccctgagcctatccaagctggaggaccctcatgtggacatcattcgccgtggagactttttctaccacagcgaaaatcccaagtatccagaggtgggagacttgcgtgtctccttttcctatgctggactgagcggcgatgaccctgacctgggcccagctcacgtggtaacctggcttcccaggggcagacactaagtca

SEQ ID NO: 426696 - DNA, 3326 bp, Homo sapiens
cgcgcgcatgcgcagaaacactgggcacagggggaggtaactgcagtaagtcccgcttggccctggagtccacgcggattttcgaagctggggctggcaagaggccgctggacaccacgctccagtcgtcagcccacttcctagctgaacagcgcgaggcggcggcagcgagccgggtcccaccatggccgcgaattattccagtaccagtacccggagagaacatgtcaaagttaaaaccagctcccagccaggcttcctggaacggctgagcgagacctcgggtgggatgtttgtggggctcatggccttcctgctctccttctacctaattttcaccaatgagggccgcgcattgaagacggcaacctcattggctgaggggctctcgcttgtggtgtctcccgacagcatccacagtgtggctccggagaatgaaggaaggctggtgcacatcattggcgccttacggacatccaagcttttgtctgatccaaactatggggtccatcttccggctgtgaaactgcggaggcacgtggagatgtaccaatgggtagaaactgaggagtccagggagtacaccgaggatgggcaggtgaagaaggagacgaggtattcctacaacactgaatggaggtcagaaatcatcaacagcaaaaacttcgaccgagagattggccacaaaaaccccagtgccatggcagtggagtcattcatggcaacagccccctttgtccaaattggcaggtttttcctctcgtcaggcctcatcgacaaagtcgacaacttcaagtccctgagcctatccaagctggaggaccctcatgtggacatcattcgccgtggagactttttctaccacagcgaaaatcccaagtatccagaggtgggagacttgcgtgtctccttttcctatgctggactgagcggcgatgaccctgacctgggcccagctcacgtggtcactgtgattgcccggcagcggggtgaccagctagtcccattctccaccaagtctggggataccttactgctcctgcaccacggggacttctcagcagaggaggtgtttcatagagaactaaggagcaactccatgaagacctggggcctgcgggcagctggctggatggccatgttcatgggcctcaaccttatgacacggatcctctacaccttggtggactggtttcctgttttccgagacctggtcaacattggcctgaaagcctttgccttctgtgtggccacctcgctgaccctgctgaccgtggcggctggctggctcttctaccgacccctgtgggccctcctcattgccggcctggcccttgtgcccatccttgttgctcggacacgggtgccagccaaaaagttggagtgaaaagaccctggcacccgcccgacacctgcgtgagccctaggatccaggtcctctctcacctctgacccagctccatgccagagcaggagccccggtcaattttggactctgcactccctctcctcttcaggggccagacttggcagcatgtgcaccaggttggtgttcaccagctcatgtcttccccacatctcttcttgccagtaagcagctttggtgggcagcagcagctcatgaatggcaagctgacagcttctcctgctgtttccttcctctcttggactgagtgggtacggccagccactcagcccattggcagctgacaacgcagacacgctctacggaggcctgctgataaagggctcagccttgccgtgtgctgcttctcatcactgcacacaagtgccatgctttgccaccaccaccaagcacatctgtgatcctgaagggcggccgttagtcattactgctgagtcctgggtcaccagcagacacactgggcatggacccctcaaagcaggcacacccaaaacacaagtctgtggctagaacctgatgtggtgtttaaaagagaagaaacactgaagatgtcctgaggagaaaagctggacatatactgggcttcacacttatcttatggcttggcagaatctttgtagtgtgtgggatctctgaaggccctatttaagtttttcttcgttactttgctgcttcatgtgtactttcctaccccaagaggaagttttctgaaataagatttaaaaacaaaacaaaaaaaacacttaatatttcagactgttacaggaaacaccctttagtctgtcagttgaattcagagcactgaaaggtgttaaattggggtatgtggtttgattgataaaaagttacctctcagtattttgtgtcactgagaagctttacaatggatgcttttgaaacaagtatcagcaaaaggatttgttttcactctgggaggagagggtggagaaagcacttgctttcatcctctggcatcggaaactcccctatgcacttgaagatggtttaaaagattaaagaaacgattaagagaaaaggttggaagctttatactaaatgggctccttcatggtgacgccccgtcaaccacaatcaagaactgaggcctgaggctggttgtacaatgcccacgcctgcctggctgctttcacctgggagtgctttcgatgtgggcacctgggcttcctagggctgcttctgagtggttctttcacgtgttgtgtccatagctttagtcttcctaaataagatccacccacacctaagtcacagaatttctaagttccccaactactctcacacccttttaaagataaagtatgttgtaaccaggatgtcttaaatgattctttgtgtaccttttctgtcatattcagaaaccgttttgtgcctgctgggagtaattcctttagcaattaagtatttggtagctgaataaggggtcagaacttctgaaaccagagatctgtaatcatctctattggcctggggtgcctgtgctataaatgagtttcttcacatgaaaaacacagccagcccaagatgacttatctgggtttaggattcaatagtattcactaactgcttattacatgagcaatttcatcaaatctccaaactcttaaaggatgctttcggaaaacacgctgtatacctagatgatgactaaatgcaaaatccttgggctttggtttttttctagtaaggattttaaataactgccgacttcaaaagtgttcttaaaacgaaagataatgttaagaaaaatttgaaagctttggaaaaccaaatttgtaatatcattgtattttttattaaaagttttgtaataaatttctaaattatcaaaaaaaaagcaacgcaacgcaaacacaccacgccacgacaaccaacacaaggg

SEQ ID NO: 426697 - DNA, 3148 bp, Homo sapiens
cgcgcgcatgcgcagaaacactgggcacagggggaggtaactgcagtaagtcccgcttggccctggagtccacgcggattttcgaagctggggctggcaagaggccgctggacaccacgctccagtcgtcagcccacttcctagctgaacagcgcgaggcggcggcagcgagccgggtcccaccatggccgcgaattattccagtaccagtacccggagagaacatgtcaaagttaaaaccagctcccagccaggcttcctggaacggctgagcgagacctcgggtgggatgtttgtggggctcatggccttcctgctctccttctacctaattttcaccaatgagggccgcgcattgaagacggcaacctcattggctgaggggctctcgcttgtggtgtctcccgacagcatccacagtgtggctccggagaatgaaggaaggctggtgcacatcattggcgccttacggacatccaagcttttgtctgatccaaactatggggtccatcttccggctgtgaaactgcggaggcacgtggagatgtaccaatgggtagaaactgaggagtccagggagtacaccgaggatgggcaggtgaagaaggagacgaggtattcctacaacactgaatggaggtcagaaatcatcaacagcaaaaacttcgaccgagagattggccacaaaaaccccagtgccatggcagtggagtcattcatggcaacagccccctttgtccaaattggcaggtttttcctctcgtcaggcctcatcgacaaagtcgacaacttcaagtccctgagcctatccaagctggaggaccctcatgtggacatcattcgccgtggagactttttctaccacagcgaaaatcccaagtatccagaggtgggagacttgcgtgtctccttttcctatgctggactgagcggcgatgaccctgacctgggcccagctcacgtggtcactgtgattgcccggcagcggggtgaccagctagtcccattctccaccaagtctggggataccttactgctcctgcaccacggggacttctcagcagaggaggtgtttcatagagaactaaggagcaactccatgaagacctggggcctgcgggcagctggctggatggccatgttcatgggcctcaaccttatgacacggatcctctacaccttggtggactggtttcctgttttccgagacctggtcaacattggcctgaaagcctttgccttctgtgtggccacctcgctgaccctgctgaccgtggcggctggctggctcttctaccgacccctgtgggccctcctcattgccggcctggcccttgtgcccatccttgttgctcggacacgggtgccagccaaaaagttggagtgaaaagaccctggcacccgcccgacacctgcgtgagccctaggatccaggtcctctctcacctctgacccagctccatgccagagcaggagccccggtcaattttggactctgcactccctctcctcttcaggggccagacttggcagcatgtgcaccaggttggtgttcaccagctcatgtcttccccacatctcttcttgccagtaagcagctttggtgggcagcagcagctcatgaatggcaagctgacagcttctcctgctgtttccttcctctcttggactgagtgggtacggccagccactcagcccattggcagctgacaacgcagacacgctctacggaggcctgctgataaagggctcagccttgccgtgtgctgcttctcatcactgcacacaaccaaaacacaagtctgtggctagaacctgatgtggtgtttaaaagagaagaaacactgaagatgtcctgaggagaaaagctggacatatactgggcttcacacttatcttatggcttggcagaatctttgtagtgtgtgggatctctgaaggccctatttaagtttttcttcgttactttgctgcttcatgtgtactttcctaccccaagaggaagttttctgaaataagatttaaaaacaaaacaaaaaaaacacttaatatttcagactgttacaggaaacaccctttagtctgtcagttgaattcagagcactgaaaggtgttaaattggggtatgtggtttgattgataaaaagttacctctcagtattttgtgtcactgagaagctttacaatggatgcttttgaaacaagtatcagcaaaaggatttgttttcactctgggaggagagggtggagaaagcacttgctttcatcctctggcatcggaaactcccctatgcacttgaagatggtttaaaagattaaagaaacgattaagagaaaaggttggaagctttatactaaatgggctccttcatggtgacgccccgtcaaccacaatcaagaactgaggcctgaggctggttgtacaatgcccacgcctgcctggctgctttcacctgggagtgctttcgatgtgggcacctgggcttcctagggctgcttctgagtggttctttcacgtgttgtgtccatagctttagtcttcctaaataagatccacccacacctaagtcacagaatttctaagttccccaactactctcacacccttttaaagataaagtatgttgtaaccaggatgtcttaaatgattctttgtgtaccttttctgtcatattcagaaaccgttttgtgcctgctgggagtaattcctttagcaattaagtatttggtagctgaataaggggtcagaacttctgaaaccagagatctgtaatcatctctattggcctggggtgcctgtgctataaatgagtttcttcacatgaaaaacacagccagcccaagatgacttatctgggtttaggattcaatagtattcactaactgcttattacatgagcaatttcatcaaatctccaaactcttaaaggatgctttcggaaaacacgctgtatacctagatgatgactaaatgcaaaatccttgggctttggtttttttctagtaaggattttaaataactgccgacttcaaaagtgttcttaaaacgaaagataatgttaagaaaaatttgaaagctttggaaaaccaaatttgtaatatcattgtattttttattaaaagttttgtaataaatttctaaattatc

SEQ ID NO: 426698 - DNA, 2082 bp, Homo sapiens
cgcgcgcatgcgcagaaacactgggcacagggggaggtaactgcagtaagtcccgcttggccctggagtccacgcggattttcgaagctggggctggcaagaggccgctggacaccacgctccagtcgtcagcccacttcctagctgaacagcgcgaggcggcggcagcgagccgggtcccaccatggccgcgaattattccagtaccagtacccggagagaacatgtcaaagttaaaaccagctcccagccaggcttcctggaacggctgagcgagacctcgggtgggatgtttgtggggctcatggccttcctgctctccttctacctaattttcaccaatgagggccgcgcattgaagacggcaacctcattggctgaggggctctcgcttgtggtgtctcccgacagcatccacagtgtggctccggagaatgaaggaaggctggtgcacatcattggcgccttacggacatccaagcttttgtctgatccaaactatggggtccatcttccggctgtgaaactgcggaggcacgtggagatgtaccaatgggtagaaactgaggagtccagggagtacaccgaggatgggcaggtgaagaaggagacgaggtattcctacaacactgaatggaggtcagaaatcatcaacagcaaaaacttcgaccgagagattggccacaaaaaccccagtgccatggcagtggagtcattcatggcaacagccccctttgtccaaattggcaggtttttcctctcgtcaggcctcatcgacaaagtcgacaacttcaagtccctgagcctatccaagctggaggaccctcatgtggacatcattcgccgtggagactttttctaccacagcgaaaatcccaagtatccagaggtgggagacttgcgtgtctccttttcctatgctggactgagcggcgatgaccctgacctgggcccagctcacgtggtcactgtgattgcccggcagcggggtgaccagctagtcccattctccaccaagtctggggataccttactgctcctgcaccacggggacttctcagcagaggaggtgtttcatagagaactaaggagcaactccatgaagacctggggcctgcgggcagctggctggatggccatgttcatgggcctcaaccttatgacacggatcctctacaccttggtggactggtttcctgttttccgagacctggtcaacattggcctgaaagcctttgccttctgtgtggccacctcgctgaccctgctgaccgtggcggctggctggctcttctaccgacccctgtgggccctcctcattgccggcctggcccttgtgcccatccttgttgctcggacacgggtgccagccaaaaagttggagtgaaaagaccctggcacccgcccgacacctgggcttcctagggctgcttctgagtggttctttcacgtgttgtgtccatagctttagtcttcctaaataagatccacccacacctaagtcacagaatttctaagttccccaactactctcacacccttttaaagataaagtatgttgtaaccaggatgtcttaaatgattctttgtgtaccttttctgtcatattcagaaaccgttttgtgcctgctgggagtaattcctttagcaattaagtatttggtagctgaataaggggtcagaacttctgaaaccagagatctgtaatcatctctattggcctggggtgcctgtgctataaatgagtttcttcacatgaaaaacacagccagcccaagatgacttatctgggtttaggattcaatagtattcactaactgcttattacatgagcaatttcatcaaatctccaaactcttaaaggatgctttcggaaaacacgctgtatacctagatgatgactaaatgcaaaatccttgggctttggtttttttctagtaaggattttaaataactgccgacttcaaaagtgttcttaaaacgaaagataatgttaagaaaaatttgaaagctttggaaaaccaaatttgtaatatcattgtattttttattaaaagttttgtaataaatttctaaattatc

SEQ ID NO: 426699 - DNA, 2270 bp, Homo sapiens
cgcgcgcatgcgcagaaacactgggcacagggggaggtaactgcagtaagtcccgcttggccctggagtccacgcggattttcgaagctggggctggcaagaggccgctggacaccacgctccagtcgtcagcccacttcctagctgaacagcgcgaggcggcggcagcgagccgggtcccaccatggccgcgaattattccagtaccagtacccggagagaacatgtcaaagttaaaaccagctcccagccaggcttcctggaacggctgagcgagacctcgggtgggatgtttgtggggctcatggccttcctgctctccttctacctaattttcaccaatgagggccgcgcattgaagacggcaacctcattggctgaggggctctcgcttgtggtgtctcccgacagcatccacagtgtggctccggagaatgaaggaaggctggtgcacatcattggcgccttacggacatccaagcttttgtctgatccaaactatggggtccatcttccggctgtgaaactgcggaggcacgtggagatgtaccaatgggtagaaactgaggagtccagggagtacaccgaggatgggcaggtgaagaaggagacgaggtattcctacaacactgaatggaggtcagaaatcatcaacagcaaaaacttcgaccgagagattggccacaaaaaccccagtgccatggcagtggagtcattcatggcaacagccccctttgtccaaattggcaggtttttcctctcgtcaggcctcatcgacaaagtcgacaacttcaagtccctgagcctatccaagctggaggaccctcatgtggacatcattcgccgtggagactttttctaccacagcgaaaatcccaagtatccagaggtgggagacttgcgtgtctccttttcctatgctggactgagcggcgatgaccctgacctgggcccagctcacgtggtcactgtgattgcccggcagcggggtgaccagctagtcccattctccaccaagtctggggataccttactgctcctgcaccacggggacttctcagcagaggaggtgtttcatagagaactaaggagcaactccatgaagacctggggcctgcgggcagctggctggatggccatgttcatgggcctcaaccttatgacacggatcctctacaccttggtggactggtttcctgttttccgagacctggtcaacattggcctgaaagcctttgccttctgtgtggccacctcgctgaccctgctgaccgtggcggctggctggctcttctaccgacccctgtgggccctcctcattgccggcctggcccttgtgcccatccttgttgctcggacacgggtgccagccaaaaagttggagtgaaaagaccctggcacccgcccgacacctgcgtgagccctaggatccaggtcctctctcacctctgacccagctccatgccagagcaggagccccggtcaattttggactctgcactccctctcctcttcaggggccagacttggcagcatgtgcaccaggttggtgttcaccagctcatgtcttccccacatctcttcttgccagtaagcagctttggtgggcagcagcagctcatgaatggcaagctgacagcttctcctgctgtttccttcctctcttggactgagtgggtacggccagccactcagcccattggcagctgacaacgcagacacgctctacggaggcctgctgataaagggctcagccttgccgtgtgctgcttctcatcactgcacacaagtgccatgctttgccaccaccaccaagcacatctgtgatcctgaagggcggccgttagtcattactgctgagtcctgggtcaccagcagacacactgggcatggacccctcaaagcaggcacacccaaaacacaagtctgtggctagaacctgatgtggtgtttaaaagagaagaaacactgaagatgtcctgaggagaaaagctggacatatactgggcttcacacttatcttatggcttggcagaatctttgtagtgtgtgggatctctgaaggccctatttaagtttttcttcgttactttgctgcttcatgtgtactttcctaccccaagaggaagttttctgaaatagatttcacacacgagaaccttacttttcgaacgtccagggaaaaccttggtggccactgattcaagcctgaagggttcaatgggcatgtggtgtgcggatccctcatgggtctgcttcaggggttggcc

SEQ ID NO: 426700 - DNA, 446 bp, Homo sapiens
ggcacagcctgggcacgggtgtggaggtgggagaagagcctgaggggcgtagccgaggcatcctggacctgggcctgggccagctactccgttcctcactctccctgcttctcttccacccccaggtgggagacttgcgtgtctccttttcctatgctggactgagcggcgatgaccctgacctgggcccagctcacgtggtaacctggcttcccaggggcagacactaagtcagagcctcacgactttcctggacacagacaccttggtcaatgtcaggagcgcttggacccccttttccctggggaaaggcacactctcgcacacactctcagccaggcacgcttctgagcagtttcagagctcccatgtccccacagccatccatggaccccacgttaagaagggcagctcaaaaggggtctcatagtcgcaccttatgacag

SEQ ID NO: 426701 - DNA, 1557 bp, Homo sapiens
cccggaccccacgccgaccccggccccggggggggctcagcgacctcggcgcctcctcaggcccccagtgaacctccggggcccataaaggctccaggccggctccccggaggcccaccagcgggcgtctgggcctccctccgcgccgcgaccgccaggaggcgccgcccgggagaggaagtccagctgggcccggccgggcttcggaggcgccgcccgggagaggaagtccagttgggcccggccgggcttcagaggcgcagggcgggagccgcctcgcgcagggtcctccccaagccggcgccaggccctgccctcgtccggccctgccctcgtctggccccgcccgggccgcgagcactggcgggttctgggtcctgtgaccggtcaggcggcgtcagcgggcgcggcggagggctggccggcctcgggggagtttccgcggccgccgggggcgcggcggcagagcgcgaggccgggcagggggccagactcggagtcgaggcgcgcccgacagccgcagcgctcatggcgggcggaggagccggggaccccggcctgggggcggccgccgccccagcgcccgagacccgcgagcacctcttcaaggtgctggtgatcggcgagcttggcgtgggcaagaccagcatcatcaagcgctacgtccaccagctcttctcccagcactaccgggccaccatcggggtggacttcgccctcaaggtcctcaactgggacagcaggactctggtgcgcctgcagctgtgggacatcgcggggcaggagcgatttggcaacatgacccgagtatactacaaggaagctgttggtgcttttgtagtctttgatatatcaagaagttccacatttgaggcagtcttaaaatggaaaagtgatctggatagtaaagttcatcttccaaatggcagccctatccctgctgtcctcttggctaacaaatgtgaccagaacaaggacagtagccagagtccttcccaggtggaccaattctgcaaagaacatggctttgccggatggtttgaaacctctgcaaaggataacataaacatagaggaagctgcccggttcctagtggagaagattcttgtaaaccaccaaagctttcctaatgaagaaaacgatgtggacaaaattaagctagatcaagagaccttgagagcagagaacaaatcccagtgttgctgatatatggcttctgcttctcttgtgtgtgcctcagctctgaagaagttcctgagaatgggttacagatgtcatgttagctgggagtcttcccacatgtggcacttcaaaaggcagcaccactgggcgcctgcacttatttgaaaatggaactttgggagaagtatccctgctagtggctctgtaacttaacagatgacaattaggcttttgtcattgttgccatcatatggaagataatgtttacatccttttaaacatttttatatgacaattcctcaggatttggtaaggcttccaagttgtagcttttagtgtaagtgctggggtggtaataaaatgttacctccagct

SEQ ID NO: 426702 - DNA, 1427 bp, Homo sapiens
cccggaccccacgccgaccccggccccggggggggctcagcgacctcggcgcctcctcaggcccccagtgaacctccggggcccataaaggctccaggccggctccccggaggcccaccagcgggcgtctgggcctccctccgcgccgcgaccgccaggaggcgccgcccgggagaggaagtccagctgggcccggccgggcttcggaggcgccgcccgggagaggaagtccagttgggcccggccgggcttcagaggcgcagggcgggagccgcctcgcgcagggtcctccccaagccggcgccaggccctgccctcgtccggccctgccctcgtctggccccgcccgggccgcgagcactggcgggttctgggtcctgtgaccggtcaggcggcgtcagcgggcgcggcggagggctggccggcctcgggggagtttccgcggccgccgggggcgcggcggcagagcgcgaggccgggcagggggccagactcggagtcgaggcgcgcccgacagccgcagcgctcatggcgggcggaggagccggggaccccggcctgggggcggccgccgccccagcgcccgagacccgcgagcacctcttcaaggtgctggtgatcggcgagcttggcgtgggcaagaccagcatcatcaagcgctacgtccaccagctcttctcccagcactaccgggccaccatcggggtggacttcgccctcaaggtcctcaactgggacagcaggactctggtgcgcctgcagctgtgggacatcgcgggtaagcgcggccgcgagtttcccactccagagccccgccgggccgcctggctcctctctgcttcttttctttttcttttctgcctgaactcgtctgcctgggtacctttaggagaagagagaggcccaatccaagggcgagatgcgatggacgcggtcggctggactcggtggggcccagaggatgggatgggcagtaggagttggagcaggtcctgcacgccagagctcgctctcctgaagggaggcgaggaggccagggggccttttccagaagtttgaactctgaataatgcaagtatatcatacatacaccaggactagttgagaaggctgctttggagcgggccggcgcctctcagcctcaactcaagttcagagggattgggtgacttaacccgaagctgcactcctagttagtgacaccaccaagaccaaaagccaggttcctttccagatcattttccaccacccgccttggctctgagactggcctttgtgagggaaactccattcctcaaatactttgctctcatcggaagccgaggacagacactccgtgaagatttgggaaagcttttctgaaaccttacactcaccccttcctctcttgctaaaccaacacctagtcccatccctggtgccctcgc

SEQ ID NO: 426703 - DNA, 1337 bp, Homo sapiens
cccggaccccacgccgaccccggccccggggggggctcagcgacctcggcgcctcctcaggcccccagtgaacctccggggcccataaaggctccaggccggctccccggaggcccaccagcgggcgtctgggcctccctccgcgccgcgaccgccaggaggcgccgcccgggagaggaagtccagctgggcccggccgggcttcggaggcgccgcccgggagaggaagtccagttgggcccggccgggcttcagaggcgcagggcgggagccgcctcgcgcagggtcctccccaagccggcgccaggccctgccctcgtccggccctgccctcgtctggccccgcccgggccgcgagcactggcgggttctgggtcctgtgaccggtcaggcggcgtcagcgggcgcggcggagggctggccggcctcgggggagtttccgcggccgccgggggcgcggcggcagagcgcgaggccgggcagggggccagactcggagtcgaggcgcgcccgacagccgcagcgctcatggcgggcggaggagccggggaccccggcctgggggcggccgccgccccagcgcccgagacccgcgagcacctcttcaaggtgctggtgatcggcgagcttggcgtgggcaagaccagcatcatcaagcgctacgtccaccagctcttctcccagcactaccgggccaccatcggggtggacttcgccctcaagtcctcttggctaacaaatgtgaccagaacaaggacagtagccagagtccttcccaggtggaccaattctgcaaagaacatggctttgccggatggtttgaaacctctgcaaaggataacataaacatagaggaagctgcccggttcctagtggagaagattcttgtaaaccaccaaagctttcctaatgaagaaaacgatgtggacaaaattaagctagatcaagagaccttgagagcagagaacaaatcccagtgttgctgatatatggcttctgcttctcttgtgtgtgcctcagctctgaagaagttcctgagaatgggttacagatgtcatgttagctgggagtcttcccacatgtggcacttcaaaaggcagcaccactgggcgcctgcacttatttgaaaatggaactttgggagaagtatccctgctagtggctctgtaacttaacagatgacaattaggcttttgtcattgttgccatcatatggaagataatgtttacatccttttaaacatttttatatgacaattcctcaggatttggtaaggcttccaagttgtagcttttagtgtaagtgctggggtggtaataaaatgttacctccagct

SEQ ID NO: 426704 - DNA, 1352 bp, Homo sapiens
cccggaccccacgccgaccccggccccggggggggctcagcgacctcggcgcctcctcaggcccccagtgaacctccggggcccataaaggctccaggccggctccccggaggcccaccagcgggcgtctgggcctccctccgcgccgcgaccgccaggaggcgccgcccgggagaggaagtccagctgggcccggccgggcttcggaggcgccgcccgggagaggaagtccagttgggcccggccgggcttcagaggcgcagggcgggagccgcctcgcgcagggtcctccccaagccggcgccaggccctgccctcgtccggccctgccctcgtctggccccgcccgggccgcgagcactggcgggttctgggtcctgtgaccggtcaggcggcgtcagcgggcgcggcggagggctggccggcctcgggggagtttccgcggccgccgggggcgcggcggcagagcgcgaggccgggcagggggccagactcggagtcgaggcgcgcccgacagccgcagcgctcatggcgggcggaggagccggggaccccggcctgggggcggccgccgccccagcgcccgagacccgcgagcacctcttcaaggtgctggtgatcggcgagcttggcgtgggcaagaccagcatcatcaagcgctacgtccaccagctcttctcccagcactaccgggccaccatcggggtggacttcgccctcaaggtcctcaactgggacagcaggactctggtgcgcctgcagctgtgggacatcgcggggcaggagcgatttggcaacatgacccgagtatactacatggctttgccggatggtttgaaacctctgcaaaggataacataaacatagaggaagctgcccggttcctagtggagaagattcttgtaaaccaccaaagctttcctaatgaagaaaacgatgtggacaaaattaagctagatcaagagaccttgagagcagagaacaaatcccagtgttgctgatatatggcttctgcttctcttgtgtgtgcctcagctctgaagaagttcctgagaatgggttacagatgtcatgttagctgggagtcttcccacatgtggcacttcaaaaggcagcaccactgggcgcctgcacttatttgaaaatggaactttgggagaagtatccctgctagtggctctgtaacttaacagatgacaattaggcttttgtcattgttgccatcatatggaagataatgtttacatccttttaaacatttttatatgacaattcctcaggatttggtaaggcttccaagttgtagcttttagtgtaagtgctggggtggtaataaaatgttacctccagct

SEQ ID NO: 426705 - DNA, 1278 bp, Homo sapiens
cccggaccccacgccgaccccggccccggggggggctcagcgacctcggcgcctcctcaggcccccagtgaacctccggggcccataaaggctccaggccggctccccggaggcccaccagcgggcgtctgggcctccctccgcgccgcgaccgccaggaggcgccgcccgggagaggaagtccagctgggcccggccgggcttcggaggcgccgcccgggagaggaagtccagttgggcccggccgggcttcagaggcgcagggcgggagccgcctcgcgcagggtcctccccaagccggcgccaggccctgccctcgtccggccctgccctcgtctggccccgcccgggccgcgagcactggcgggttctgggtcctgtgaccggtcaggcggcgtcagcgggcgcggcggagggctggccggcctcgggggagtttccgcggccgccgggggcgcggcggcagagcgcgaggccgggcagggggccagactcggagtcgaggcgcgcccgacagccgcagcgctcatggcgggcggaggagccggggaccccggcctgggggcggccgccgccccagcgcccgagacccgcgagcacctcttcaaggtgctggtgatcggcgagcttggcgtgggcaagaccagcatcatcaagcgctacgtccaccagctcttctcccagcactaccgggccaccatcggggtggacttcgccctcaaggtcctcaactgggacagcaggactctggtgcgcctgcagctgtgggacatcgcggggcaggagcgatttggcaacatgacccgagtatactacaaggaagctgttggtgcttttgtagtctttgatatatcaagaagttccacatttgaggcagtcttaaaatggaaaagtgatctggatagtaaagttcatcttccaaatggcagccctatccctgctgctcttgtgtgtgcctcagctctgaagaagttcctgagaatgggttacagatgtcatgttagctgggagtcttcccacatgtggcacttcaaaaggcagcaccactgggcgcctgcacttatttgaaaatggaactttgggagaagtatccctgctagtggctctgtaacttaacagatgacaattaggcttttgtcattgttgccatcatatggaagataatgtttacatccttttaaacatttttatatgacaattcctcaggatttggtaaggcttccaagttgtagcttttagtgtaagtgctggggtggtaataaaatgttacctccagct

SEQ ID NO: 426706 - DNA, 2923 bp, Homo sapiens
cggctcccaagatggcgtccatcatggaagggccgctgagcaaatggactaacgtgatgaagggctggcagtaccgttggttcgtgctggactacaatgcaggactgctctcctactacacgtccaaggacaaaatgatgagaggctctcgcagaggatgtgttagactcagaggagctgtgattggtatagacgatgaggacgacagcaccttcacaataactgttgatcagaaaaccttccatttccaggcccgtgatgctgatgagcgagagaagtggatccatgccttagaagaaacaattcttcgacatactctccagcttcaaggtttggattcaggatttgttcctagtgtccaagattttgataagaaacttacagaagctgatgcttacctacaaatcttgattgaacaattaaagctttttgatgacaagcttcaaaactgcaaagaagatgaacagagaaagaaaattgaaactctcaaagagacaacaaatagcatggtagaatcaattaaacactgcattgtgttgctgcagattgccaaaagtactattaatcccgtagatgcaatatatcaacctagtcctttggaacctgtgatcagcacaatgccttcccagactgtgttacctccagaacctgttcagttgtgtaagtcagagcagcgtccatcttccctaccagttggacctgtgttggctaccttgggacatcatcagactcctacaccaaatagtacaggcagtggccattcaccaccgagtagcagtctcacttctccaagccacgtgaacttgtctccaaatacagtcccagagttctcttactccagcagtgaagatgaattttatgatgctgatgaattccatcaaagtggctcatccccaaagcgcttaatagattcttctggatctgcctcagtcctgacacacagcagctcgggaaatagtctaaaacgcccagataccacagaatcacttaattcttccttgtccaatggaacaagtgatgctgacctgtttgattcacatgatgacagagatgatgatgcggaggcagggtctgtggaggagcacaagagcgttatcatgcatctcttgtcgcaggttagacttggaatggatcttactaaggtagttcttccaacgtttattcttgaaagaagatctcttttagaaatgtatgcagacttttttgcacatccggacctgtttgtgagcattagtgaccagaaggatcccaaggatcgaatggttcaggttgtgaaatggtacctctcagcctttcatgcgggaaggaaaggatcagttgccaaaaagccatacaatcccattttgggcgagatttttcagtgtcattggacattaccaaatgatactgaagagaacacagaactagtttcagaaggaccagttccctgggtttccaaaaacagtgtaacatttgtggctgagcaggtttcccatcatccacccatttcagccttttatgctgagtgttttaacaagaagatacaattcaatgctcatatctggaccaaatcaaaattccttgggatgtcaattggggtgcacaacatagggcagggctgtgtctcatgtctagactatgatgaacattacattctcacattccccaatggctatggaaggtctatcctcacagtgccctgggtggaattaggaggagaatgcaatattaattgttccaaaacaggctatagtgcaaatatcatcttccacactaaacccttctatgggggcaagaagcacagaattactgccgagattttttctccaaatgacaagaagtctttttgctcaattgaaggggaatggaatggtgtgatgtatgcaaaatatgcaacaggggaaaatacagtctttgtagataccaagaagttgcctataatcaagaagaaagtgaggaagttggaagatcagaacgagtatgaatcccgcagcctttggaaggatgtcactttcaacttaaaaatcagagacattgatgcagcaactgaagcaaagcacaggcttgaagaaagacaaagagcagaagcccgagaaaggaaggagaaggaaattcagtgggagacaaggttatttcatgaagatggagaatgctgggtttatgatgaaccattactgaaacgtcttggtgctgccaagcattaggttggaagatgcaaagtttatacctgatgatcagggcagtaggcataattcagcaacaaacaatcttcctttgggagaaacctgttcattccaatcttctaattacagtggttcctatctcagggatactggactttctgacgcagatgaacaattaaggggaaaagcttcccttttccctctgtggcagttacgattttgacttcagtcctgagaaaaacttcaggttttgaaaatcagatgatgtcttctccttttccaaacaccacacgttgaaagcatttataaatccaagtctgaaactctgcgctctagtactgctgttaagatacacaacttgtttcttagttcatataatctcgggatacacacacacacacacatatatatacacacacatacgtatacacacacatacatatatataaatatacctgatgccagatttttttcataaatattctgcctactgtaaatatgggttcctctgagttgttttagaaaattagcgcaatgtattaaaatcaagtgttaggaaatttcatggtcttacctacaataacttttattttggaattgaactattattaaattgtatctaatcctggattacagtttaattaattattcttagtgcttaaggcttcataaagtaatttttccaacctttttttaaaaagagcatcttttattatcttttatggttaaacttggaagccaattatttggcaaccttgaat

SEQ ID NO: 426707 - DNA, 2767 bp, Homo sapiens
gggtgtcccgggggacgggctgaacctcagtcaggaccgcctgcaccgcagtccggggatcgggtcgaggggagaagaaaaaggggtgctcgggagcagcccccggctacctcccctggaggcacagagggcgggggccttggcgaatggctttcttgctggccacttgcggaggtttggattcaggatttgttcctagtgtccaagattttgataagaaacttacagaagctgatgcttacctacaaatcttgattgaacaattaaagctttttgatgacaagcttcaaaactgcaaagaagatgaacagagaaagaaaattgaaactctcaaagagacaacaaatagcatggtagaatcaattaaacactgcattgtgttgctgcagattgccaaaagtactattaatcccgtagatgcaatatatcaacctagtcctttggaacctgtgatcagcacaatgccttcccagactgtgttacctccagaacctgttcagttgtgtaagtcagagcagcgtccatcttccctaccagttggacctgtgttggctaccttgggacatcatcagactcctacaccaaatagtacaggcagtggccattcaccaccgagtagcagtctcacttctccaagccacgtgaacttgtctccaaatacagtcccagagttctcttactccagcagtgaagatgaattttatgatgctgatgaattccatcaaagtggctcatccccaaagcgcttaatagattcttctggatctgcctcagtcctgacacacagcagctcgggaaatagtctaaaacgcccagataccacagaatcacttaattcttccttgtccaatggaacaagtgatgctgacctgtttgattcacatgatgacagagatgatgatgcggaggcagggtctgtggaggagcacaagagcgttatcatgcatctcttgtcgcaggttagacttggaatggatcttactaaggtagttcttccaacgtttattcttgaaagaagatctcttttagaaatgtatgcagacttttttgcacatccggacctgtttgtgagcattagtgaccagaaggatcccaaggatcgaatggttcaggttgtgaaatggtacctctcagcctttcatgcgggaaggaaaggatcagttgccaaaaagccatacaatcccattttgggcgagatttttcagtgtcattggacattaccaaatgatactgaagagaacacagaactagtttcagaaggaccagttccctgggtttccaaaaacagtgtaacatttgtggctgagcaggtttcccatcatccacccatttcagccttttatgctgagtgttttaacaagaagatacaattcaatgctcatatctggaccaaatcaaaattccttgggatgtcaattggggtgcacaacatagggcagggctgtgtctcatgtctagactatgatgaacattacattctcacattccccaatggctatggaaggtctatcctcacagtgccctgggtggaattaggaggagaatgcaatattaattgttccaaaacaggctatagtgcaaatatcatcttccacactaaacccttctatgggggcaagaagcacagaattactgccgagattttttctccaaatgacaagaagtctttttgctcaattgaaggggaatggaatggtgtgatgtatgcaaaatatgcaacaggggaaaatacagtctttgtagataccaagaagttgcctataatcaagaagaaagtgaggaagttggaagatcagaacgagtatgaatcccgcagcctttggaaggatgtcactttcaacttaaaaatcagagacattgatgcagcaactgaagcaaagcacaggcttgaagaaagacaaagagcagaagcccgagaaaggaaggagaaggaaattcagtgggagacaaggttatttcatgaagatggagaatgctgggtttatgatgaaccattactgaaacgtcttggtgctgccaagcattaggttggaagatgcaaagtttatacctgatgatcagggcagtaggcataattcagcaacaaacaatcttcctttgggagaaacctgttcattccaatcttctaattacagtggttcctatctcagggatactggactttctgacgcagatgaacaattaaggggaaaagcttcccttttccctctgtggcagttacgattttgacttcagtcctgagaaaaacttcaggttttgaaaatcagatgatgtcttctccttttccaaacaccacacgttgaaagcatttataaatccaagtctgaaactctgcgctctagtactgctgttaagatacacaacttgtttcttagttcatataatctcgggatacacacacacacacacatatatatacacacacatacgtatacacacacatacatatatataaatatacctgatgccagatttttttcataaatattctgcctactgtaaatatgggttcctctgagttgttttagaaaattagcgcaatgtattaaaatcaagtgttaggaaatttcatggtcttacctacaataacttttattttggaattgaactattattaaattgtatctaatcctggattacagtttaattaattattcttagtgcttaaggcttcataaagtaatttttccaacctttttttaaaaagagcatcttttattatcttttatggttaaacttggaagccaattatttggcaaccttgaat

SEQ ID NO: 426708 - DNA, 462 bp, Homo sapiens
atggtcccaattactttataagctgatacgaggcaccagtaagcgcttgtaacgtgcaaaagacaacagaaagcttaaataaaatcataaagactcataacctccatgaccatctcccacatacgtatacacacacatacatatatataaatatacctgatgccagatttttttcataaatattctgcctactgtaaatatgggttcctctgagttgttttagaaaattagcgcaatgtattaaaatcaagtgttaggaaatttcatggtcttacctacaataacttttattttggaattgaactattattaaattgtatctaatcctggattacagtttaattaattattcttagtgcttaaggcttcataaagtaatttttccaacctttttttaaaaagagcatcttttattatcttttatggttaaacttggaagccaattatttggcaaccttgaat

SEQ ID NO: 426709 - DNA, 2663 bp, Homo sapiens
gggtgtcccgggggacgggctgaacctcagtcaggaccgcctgcaccgcagtccggggatcgggtcgaggggagaagaaaaaggggtgctcgggagcagcccccggctacctcccctggaggcacagagggcgggggccttggcgaatggctttcttgctggccacttgcggagtgagtagaccccgagggtctgggagaggggccggcccctacccctgagtccccggggtcccggccgccaggccggagcgcgaatgtcgtgctcaccctgcctccttcccgccgccccctgggctttttgatgacaagcttcaaaactgcaaagaagatgaacagagaaagaaaattgaaactctcaaagagacaacaaatagcatggtagaatcaattaaacactgcattgtgttgctgcagattgccaaaagtactattaatcccgtagatgcaatatatcaacctagtcctttggaacctgtgatcagcacaatgccttcccagactgtgttacctccagaacctgttcagttgtgtaagtcagagcagcgtccatcttccctaccagttggacctgtgttggctaccttgggacatcatcagactcctacaccaaatagtacaggcagtggccattcaccaccgagtagcagtctcacttctccaagccacgtgaacttgtctccaaatacagtcccagagttctcttactccagcagtgaagatgaattttatgatgctgatgaattccatcaaagtggctcatccccaaagcgcttaatagattcttctggatctgcctcagtcctgacacacagcagctcgggaaatagtctaaaacgcccagataccacagaatcacttaattcttccttgtccaatggaacaagtgatgctgacctgtttgattcacatgatgacagagatgatgatgcggaggcagggtctgtggaggagcacaagagcgttatcatgcatctcttgtcgcaggttagacttggaatggatcttactaaggtagttcttccaacgtttattcttgaaagaagatctcttttagaaatgtatgcagacttttttgcacatccggacctgtttgtgagcattagtgaccagaaggatcccaaggatcgaatggttcaggttgtgaaatggtacctctcagcctttcatgcgggaaggaaaggatcagttgccaaaaagccatacaatcccattttgggcgagatttttcagtgtcattggacattaccaaatgatactgaagagaacacagaactagtttcagaaggaccagttccctgggtttccaaaaacagtgtaacatttgtggctgagcaggtttcccatcatccacccatttcagccttttatgctgagtgttttaacaagaagatacaattcaatgctcatatctggaccaaatcaaaattccttgggatgtcaattggggtgcacaacatagggcagggctgtgtctcatgtctagactatgatgaacattacattctcacattccccaatggctatggaaggtctatcctcacagtgccctgggtggaattaggaggagaatgcaatattaattgttccaaaacaggctatagtgcaaatatcatcttccacactaaacccttctatgggggcaagaagcacagaattactgccgagattttttctccaaatgacaagaagtctttttgctcaattgaaggggaatggaatggtgtgatgtatgcaaaatatgcaacaggggaaaatacagtctttgtagataccaagaagttgcctataatcaagaagaaagtgaggaagttggaagatcagaacgagtatgaatcccgcagcctttggaaggatgtcactttcaacttaaaaatcagagacattgatgcagcaactgaagcaaagcacaggcttgaagaaagacaaagagcagaagcccgagaaaggaaggagaaggaaattcagtgggagacaaggttatttcatgaagatggagaatgctgggtttatgatgaaccattactgaaacgtcttggtgctgccaagcattaggttggaagatgcaaagtttatacctgatgatcagggcagtaggcataattcagcaacaaacaatcttcctttgggagaaacctgttcattccaatcttctaattacagtggttcctatctcagggatactggactttctgacgcagatgaacaattaaggggaaaagcttcccttttccctctgtggcagttacgattttgacttcagtcctgagaaaaacttcaggttttgaaaatcagatgatgtcttctccttttccaaacaccacacgttgaaagcatttataaatccaagtctgaaactctgcgctctagtactgctgttaagatacacaacttgtttcttagttcatataatctcgggatacacacacacacacacatatatatacacacacatacgtatacacacacatacatatatataaatatacctgatgccagatttttttcataaatattctgcctactgtaaatatgggttcctctgagttgttttagaaaattagcgcaatgtattaaaatcaagtgttaggaaatttcatggtcttacctacaataacttttattttggaattgaactattattaaattgtatctaatcctgga

SEQ ID NO: 426710 - DNA, 2798 bp, Homo sapiens
gggtgtcccgggggacgggctgaacctcagtcaggaccgcctgcaccgcagtccggggatcgggtcgaggggagaagaaaaaggggtgctcgggagcagcccccggctacctcccctggaggcacagagggcgggggccttggcgaatggctttcttgctggccacttgcggagtgagtagaccccgagggtctgggagaggggccggcccctacccctgagtccccggggtcccggccgccaggccggagcgcgaatgtcgtgctcaccctgcctccttcccgccgccccctgggggtttggattcaggatttgttcctagtgtccaagattttgataagaaacttacagaagctgatgcttacctacaaatcttgattgaacaattaaagctttttgatgacaagcttcaaaactgcaaagaagatgaacagagaaagaaaattgaaactctcaaagagacaacaaatagcatggtagaatcaattaaacactgcattgtgttgctgcagattgccaaagaccagagtaatgcggagaagcacgcagatggaatgataagtactattaatcccgtagatgcaatatatcaacctagtcctttggaacctgtgatcagcacaatgccttcccagactgtgttacctccagaacctgttcagttgtgtaagtcagagcagcgtccatcttccctaccagttggacctgtgttggctaccttgggacatcatcagactcctacaccaaatagtacaggcagtggccattcaccaccgagtagcagtctcacttctccaagccacgtgaacttgtctccaaatacagtcccagagttctcttactccagcagtgaagatgaattttatgatgctgatgaattccatcaaagtggctcatccccaaagcgcttaatagattcttctggatctgcctcagtcctgacacacagcagctcgggaaatagtctaaaacgcccagataccacagaatcacttaattcttccttgtccaatggaacaagtgatgctgacctgtttgattcacatgatgacagagatgatgatgcggaggcagggtctgtggaggagcacaagagcgttatcatgcatctcttgtcgcaggttagacttggaatggatcttactaaggtagttcttccaacgtttattcttgaaagaagatctcttttagaaatgtatgcagacttttttgcacatccggacctgtttgtgagcattagtgaccagaaggatcccaaggatcgaatggttcaggttgtgaaatggtacctctcagcctttcatgcgggaaggaaaggatcagttgccaaaaagccatacaatcccattttgggcgagatttttcagtgtcattggacattaccaaatgatactgaagagaacacagaactagtttcagaaggaccagttccctgggtttccaaaaacagtgtaacatttgtggctgagcaggtttcccatcatccacccatttcagccttttatgctgagtgttttaacaagaagatacaattcaatgctcatatctggaccaaatcaaaattccttgggatgtcaattggggtgcacaacatagggcagggctgtgtctcatgtctagactatgatgaacattacattctcacattccccaatggctatggaaggtctatcctcacagtgccctgggtggaattaggaggagaatgcaatattaattgttccaaaacaggctatagtgcaaatatcatcttccacactaaacccttctatgggggcaagaagcacagaattactgccgagattttttctccaaatgacaagaagtctttttgctcaattgaaggggaatggaatggtgtgatgtatgcaaaatatgcaacaggggaaaatacagtctttgtagataccaagaagttgcctataatcaagaagaaagtgaggaagttggaagatcagaacgagtatgaatcccgcagcctttggaaggatgtcactttcaacttaaaaatcagagacattgatgcagcaactgaagcaaagcacaggcttgaagaaagacaaagagcagaagcccgagaaaggaaggagaaggaaattcagtgggagacaaggttatttcatgaagatggagaatgctgggtttatgatgaaccattactgaaacgtcttggtgctgccaagcattaggttggaagatgcaaagtttatacctgatgatcagggcagtaggcataattcagcaacaaacaatcttcctttgggagaaacctgttcattccaatcttctaattacagtggttcctatctcagggatactggactttctgacgcagatgaacaattaaggggaaaagcttcccttttccctctgtggcagttacgattttgacttcagtcctgagaaaaacttcaggttttgaaaatcagatgatgtcttctccttttccaaacaccacacgttgaaagcatttataaatccaagtctgaaactctgcgctctagtactgctgttaagatacacaacttgtttcttagttcatataatctcgggatacacacacacacacacatatatatacacacacatacgtatacacacacatacatatatataaatatacctgatgccagatttttttcataaatattctgcctactgtaaatatgggttcctctgagttgttttagaaaattagcgcaatgtattaaaatcaagtgttaggaaatttcatggtcttacctacaataacttttattttggaattgaactattattaaattgtatctaatcctgga

SEQ ID NO: 426711 - DNA, 2759 bp, Homo sapiens
gggtgtcccgggggacgggctgaacctcagtcaggaccgcctgcaccgcagtccggggatcgggtcgaggggagaagaaaaaggggtgctcgggagcagcccccggctacctcccctggaggcacagagggcgggggccttggcgaatggctttcttgctggccacttgcggagtgagtagaccccgagggtctgggagaggggccggcccctacccctgagtccccggggtcccggccgccaggccggagcgcgaatgtcgtgctcaccctgcctccttcccgccgccccctgggggtttggattcaggatttgttcctagtgtccaagattttgataagaaacttacagaagctgatgcttacctacaaatcttgattgaacaattaaagctttttgatgacaagcttcaaaactgcaaagaagatgaacagagaaagaaaattgaaactctcaaagagacaacaaatagcatggtagaatcaattaaacactgcattgtgttgctgcagattgccaaaagtactattaatcccgtagatgcaatatatcaacctagtcctttggaacctgtgatcagcacaatgccttcccagactgtgttacctccagaacctgttcagttgtgtaagtcagagcagcgtccatcttccctaccagttggacctgtgttggctaccttgggacatcatcagactcctacaccaaatagtacaggcagtggccattcaccaccgagtagcagtctcacttctccaagccacgtgaacttgtctccaaatacagtcccagagttctcttactccagcagtgaagatgaattttatgatgctgatgaattccatcaaagtggctcatccccaaagcgcttaatagattcttctggatctgcctcagtcctgacacacagcagctcgggaaatagtctaaaacgcccagataccacagaatcacttaattcttccttgtccaatggaacaagtgatgctgacctgtttgattcacatgatgacagagatgatgatgcggaggcagggtctgtggaggagcacaagagcgttatcatgcatctcttgtcgcaggttagacttggaatggatcttactaaggtagttcttccaacgtttattcttgaaagaagatctcttttagaaatgtatgcagacttttttgcacatccggacctgtttgtgagcattagtgaccagaaggatcccaaggatcgaatggttcaggttgtgaaatggtacctctcagcctttcatgcgggaaggaaaggatcagttgccaaaaagccatacaatcccattttgggcgagatttttcagtgtcattggacattaccaaatgatactgaagagaacacagaactagtttcagaaggaccagttccctgggtttccaaaaacagtgtaacatttgtggctgagcaggtttcccatcatccacccatttcagccttttatgctgagtgttttaacaagaagatacaattcaatgctcatatctggaccaaatcaaaattccttgggatgtcaattggggtgcacaacatagggcagggctgtgtctcatgtctagactatgatgaacattacattctcacattccccaatggctatggaaggtctatcctcacagtgccctgggtggaattaggaggagaatgcaatattaattgttccaaaacaggctatagtgcaaatatcatcttccacactaaacccttctatgggggcaagaagcacagaattactgccgagattttttctccaaatgacaagaagtctttttgctcaattgaaggggaatggaatggtgtgatgtatgcaaaatatgcaacaggggaaaatacagtctttgtagataccaagaagttgcctataatcaagaagaaagtgaggaagttggaagatcagaacgagtatgaatcccgcagcctttggaaggatgtcactttcaacttaaaaatcagagacattgatgcagcaactgaagcaaagcacaggcttgaagaaagacaaagagcagaagcccgagaaaggaaggagaaggaaattcagtgggagacaaggttatttcatgaagatggagaatgctgggtttatgatgaaccattactgaaacgtcttggtgctgccaagcattaggttggaagatgcaaagtttatacctgatgatcagggcagtaggcataattcagcaacaaacaatcttcctttgggagaaacctgttcattccaatcttctaattacagtggttcctatctcagggatactggactttctgacgcagatgaacaattaaggggaaaagcttcccttttccctctgtggcagttacgattttgacttcagtcctgagaaaaacttcaggttttgaaaatcagatgatgtcttctccttttccaaacaccacacgttgaaagcatttataaatccaagtctgaaactctgcgctctagtactgctgttaagatacacaacttgtttcttagttcatataatctcgggatacacacacacacacacatatatatacacacacatacgtatacacacacatacatatatataaatatacctgatgccagatttttttcataaatattctgcctactgtaaatatgggttcctctgagttgttttagaaaattagcgcaatgtattaaaatcaagtgttaggaaatttcatggtcttacctacaataacttttattttggaattgaactattattaaattgtatctaatcctgga

SEQ ID NO: 426712 - DNA, 2831 bp, Homo sapiens
cggctcccaagatggcgtccatcatggaagggccgctgagcaaatggactaacgtgatgaagggctggcagtaccgttggttcgtgctggactacaatgcaggactgctctcctactacacgtccaaggacaaaatgatgagaggctctcgcagaggatgtgttagactcagaggagctgtgattggtatagacgatgaggacgacagcaccttcacaataactgttgatcagaaaaccttccatttccaggcccgtgatgctgatgagcgagagaagtggatccatgccttagaagaaacaattcttcgacatactctccagcttcaaggtttggattcaggatttgttcctagtgtccaagattttgataagaaacttacagaagctgatgcttacctacaaatcttgattgaacaattaaagctttttgatgacaagcttcaaaactgcaaagaagatgaacagagaaagaaaattgaaactctcaaagagacaacaaatagcatggtagaatcaattaaacactgcattgtgttgctgcagattgccaaagaccagagtaatgcggagaagcacgcagatggaatgataagtactattaatcccgtagatgcaatatatcaacctagtcctttggaacctgtgatcagcacaatgccttcccagactgtgttacctccagaacctgttcagttgtgtaagtcagagcagcgtccatcttccctaccagttggacctgtgttggctaccttgggacatcatcagactcctacaccaaatagtacaggcagtggccattcaccaccgagtagcagtctcacttctccaagccacgtgaacttgtctccaaatacagtcccagagttctcttactccagcagtgaagatgaattttatgatgctgatgaattccatcaaagtggctcatccccaaagcgcttaatagattcttctggatctgcctcagtcctgacacacagcagctcgggaaatagtctaaaacgcccagataccacagaatcacttaattcttccttgtccaatggaacaagtgatgctgacctgtttgattcacatgatgacagagatgatgatgcggaggcagggtctgtggaggagcacaagagcgttatcatgcatctcttgtcgcaggttagacttggaatggatcttactaaggtagttcttccaacgtttattcttgaaagaagatctcttttagaaatgtatgcagacttttttgcacatccggacctgtttgtgagcattagtgaccagaaggatcccaaggatcgaatggttcaggttgtgaaatggtacctctcagcctttcatgcgggaaggaaaggatcagttgccaaaaagccatacaatcccattttgggcgagatttttcagtgtcattggacattaccaaatgatactgaagagaacacagaactagtttcagaaggaccagttccctgggtttccaaaaacagtgtaacatttgtggctgagcaggtttcccatcatccacccatttcagccttttatgctgagtgttttaacaagaagatacaattcaatgctcatatctggaccaaatcaaaattccttgggatgtcaattggggtgcacaacatagggcagggctgtgtctcatgtctagactatgatgaacattacattctcacattccccaatggctatggaaggtctatcctcacagtgccctgggtggaattaggaggagaatgcaatattaattgttccaaaacaggctatagtgcaaatatcatcttccacactaaacccttctatgggggcaagaagcacagaattactgccgagattttttctccaaatgacaagaagtctttttgctcaattgaaggggaatggaatggtgtgatgtatgcaaaatatgcaacaggggaaaatacagtctttgtagataccaagaagttgcctataatcaagaagaaagtgaggaagttggaagatcagaacgagtatgaatcccgcagcctttggaaggatgtcactttcaacttaaaaatcagagacattgatgcagcaactgaagcaaagcacaggcttgaagaaagacaaagagcagaagcccgagaaaggaaggagaaggaaattcagtgggagacaaggttatttcatgaagatggagaatgctgggtttatgatgaaccattactgaaacgtcttggtgctgccaagcattaggttggaagatgcaaagtttatacctgatgatcagggcagtaggcataattcagcaacaaacaatcttcctttgggagaaacctgttcattccaatcttctaattacagtggttcctatctcagggatactggactttctgacgcagatgaacaattaaggggaaaagcttcccttttccctctgtggcagttacgattttgacttcagtcctgagaaaaacttcaggttttgaaaatcagatgatgtcttctccttttccaaacaccacacgttgaaagcatttataaatccaagtctgaaactctgcgctctagtactgctgttaagatacacaacttgtttcttagttcatataatctcgggatacacacacacacacacatatatatacacacacatacgtatacacacacatacatatatataaatatacctgatgccagatttttttcataaatattctgcctactgtaaatatgggttcctctgagttgttttagaaaattagcgcaatgtattaaaatcaagtgttaggaaatttcatggtcttacctacaataacttttattttggaattgaactattattaaattgtatctaatcctgga

SEQ ID NO: 426713 - DNA, 2885 bp, Homo sapiens
gggtgtcccgggggacgggctgaacctcagtcaggaccgcctgcaccgcagtccggggatcgggtcgaggggagaagaaaaaggggtgctcgggagcagcccccggctacctcccctggaggcacagagggcgggggccttggcgaatggctttcttgctggccacttgcggagtgagtagaccccgagggtctgggagaggggccggcccctacccctgagtccccggggtcccggccgccaggccggagcgcgaatgtcgtgctcaccctgcctccttcccgccgccccctgggggtttggattcaggatttgttcctagtgtccaagattttgataagaaacttacagaagctgatgcttacctacaaatcttgattgaacaattaaagctttttgatgacaagcttcaaaactgcaaagaagatgaacagagaaagaaaattgaaactctcaaagagacaacaaatagatgggattctgctatgttgcctaggctggtctcctagcctcaagcgatcctccttccttggcctaccaaagcagtgggattacagagcatggtagaatcaattaaacactgcattgtgttgctgcagattgccaaagaccagagtaatgcggagaagcacgcagatggaatgataagtactattaatcccgtagatgcaatatatcaacctagtcctttggaacctgtgatcagcacaatgccttcccagactgtgttacctccagaacctgttcagttgtgtaagtcagagcagcgtccatcttccctaccagttggacctgtgttggctaccttgggacatcatcagactcctacaccaaatagtacaggcagtggccattcaccaccgagtagcagtctcacttctccaagccacgtgaacttgtctccaaatacagtcccagagttctcttactccagcagtgaagatgaattttatgatgctgatgaattccatcaaagtggctcatccccaaagcgcttaatagattcttctggatctgcctcagtcctgacacacagcagctcgggaaatagtctaaaacgcccagataccacagaatcacttaattcttccttgtccaatggaacaagtgatgctgacctgtttgattcacatgatgacagagatgatgatgcggaggcagggtctgtggaggagcacaagagcgttatcatgcatctcttgtcgcaggttagacttggaatggatcttactaaggtagttcttccaacgtttattcttgaaagaagatctcttttagaaatgtatgcagacttttttgcacatccggacctgtttgtgagcattagtgaccagaaggatcccaaggatcgaatggttcaggttgtgaaatggtacctctcagcctttcatgcgggaaggaaaggatcagttgccaaaaagccatacaatcccattttgggcgagatttttcagtgtcattggacattaccaaatgatactgaagagaacacagaactagtttcagaaggaccagttccctgggtttccaaaaacagtgtaacatttgtggctgagcaggtttcccatcatccacccatttcagccttttatgctgagtgttttaacaagaagatacaattcaatgctcatatctggaccaaatcaaaattccttgggatgtcaattggggtgcacaacatagggcagggctgtgtctcatgtctagactatgatgaacattacattctcacattccccaatggctatggaaggtctatcctcacagtgccctgggtggaattaggaggagaatgcaatattaattgttccaaaacaggctatagtgcaaatatcatcttccacactaaacccttctatgggggcaagaagcacagaattactgccgagattttttctccaaatgacaagaagtctttttgctcaattgaaggggaatggaatggtgtgatgtatgcaaaatatgcaacaggggaaaatacagtctttgtagataccaagaagttgcctataatcaagaagaaagtgaggaagttggaagatcagaacgagtatgaatcccgcagcctttggaaggatgtcactttcaacttaaaaatcagagacattgatgcagcaactgaagcaaagcacaggcttgaagaaagacaaagagcagaagcccgagaaaggaaggagaaggaaattcagtgggagacaaggttatttcatgaagatggagaatgctgggtttatgatgaaccattactgaaacgtcttggtgctgccaagcattaggttggaagatgcaaagtttatacctgatgatcagggcagtaggcataattcagcaacaaacaatcttcctttgggagaaacctgttcattccaatcttctaattacagtggttcctatctcagggatactggactttctgacgcagatgaacaattaaggggaaaagcttcccttttccctctgtggcagttacgattttgacttcagtcctgagaaaaacttcaggttttgaaaatcagatgatgtcttctccttttccaaacaccacacgttgaaagcatttataaatccaagtctgaaactctgcgctctagtactgctgttaagatacacaacttgtttcttagttcatataatctcgggatacacacacacacacacatatatatacacacacatacgtatacacacacatacatatatataaatatacctgatgccagatttttttcataaatattctgcctactgtaaatatgggttcctctgagttgttttagaaaattagcgcaatgtattaaaatcaagtgttaggaaatttcatggtcttacctacaataacttttattttggaattgaactattattaaattgtatctaatcctgga

SEQ ID NO: 426714 - DNA, 2787 bp, Homo sapiens
gttcgggccagatgcatcctcatggatgcgctgagcaaatggactaacgtgatgaagggctggcagtaccgttggttcgtgctggactacaatgcaggactgctctcctactacacgtccaaggacaaaatgatgagaggctctcgcagaggatgtgttagactcagaggagctgtgattggtatagacgatgaggacgacagcaccttcacaataactgttgatcagaaaaccttccatttccaggcccgtgatgctgatgagcgagagaagtggatccatgccttagaagaaacaattcttcgacatactctccagcttcaaggtttggattcaggatttgttcctagtgtccaagattttgataagaaacttacagaagctgatgcttacctacaaatcttgattgaacaattaaagctttttgatgacaagcttcaaaactgcaaagaagatgaacagagaaagaaaattgaaactctcaaagagacaacaaatagcatggtagaatcaattaaacactgcattgtgttgctgcagattgccaaaagtactattaatcccgtagatgcaatatatcaacctagtcctttggaacctgtgatcagcacaatgccttcccagactgtgttacctccagaacctgttcagttgtgtaagtcagagcagcgtccatcttccctaccagttggacctgtgttggctaccttgggacatcatcagactcctacaccaaatagtacaggcagtggccattcaccaccgagtagcagtctcacttctccaagccacgtgaacttgtctccaaatacagtcccagagttctcttactccagcagtgaagatgaattttatgatgctgatgaattccatcaaagtggctcatccccaaagcgcttaatagattcttctggatctgcctcagtcctgacacacagcagctcgggaaatagtctaaaacgcccagataccacagaatcacttaattcttccttgtccaatggaacaagtgatgctgacctgtttgattcacatgatgacagagatgatgatgcggaggcagggtctgtggaggagcacaagagcgttatcatgcatctcttgtcgcaggttagacttggaatggatcttactaaggtagttcttccaacgtttattcttgaaagaagatctcttttagaaatgtatgcagacttttttgcacatccggacctgtttgtgagcattagtgaccagaaggatcccaaggatcgaatggttcaggttgtgaaatggtacctctcagcctttcatgcgggaaggaaaggatcagttgccaaaaagccatacaatcccattttgggcgagatttttcagtgtcattggacattaccaaatgatactgaagagaacacagaactagtttcagaaggaccagttccctgggtttccaaaaacagtgtaacatttgtggctgagcaggtttcccatcatccacccatttcagccttttatgctgagtgttttaacaagaagatacaattcaatgctcatatctggaccaaatcaaaattccttgggatgtcaattggggtgcacaacatagggcagggctgtgtctcatgtctagactatgatgaacattacattctcacattccccaatggctatggaaggtctatcctcacagtgccctgggtggaattaggaggagaatgcaatattaattgttccaaaacaggctatagtgcaaatatcatcttccacactaaacccttctatgggggcaagaagcacagaattactgccgagattttttctccaaatgacaagaagtctttttgctcaattgaaggggaatggaatggtgtgatgtatgcaaaatatgcaacaggggaaaatacagtctttgtagataccaagaagttgcctataatcaagaagaaagtgaggaagttggaagatcagaacgagtatgaatcccgcagcctttggaaggatgtcactttcaacttaaaaatcagagacattgatgcagcaactgaagcaaagcacaggcttgaagaaagacaaagagcagaagcccgagaaaggaaggagaaggaaattcagtgggagacaaggttatttcatgaagatggagaatgctgggtttatgatgaaccattactgaaacgtcttggtgctgccaagcattaggttggaagatgcaaagtttatacctgatgatcagggcagtaggcataattcagcaacaaacaatcttcctttgggagaaacctgttcattccaatcttctaattacagtggttcctatctcagggatactggactttctgacgcagatgaacaattaaggggaaaagcttcccttttccctctgtggcagttacgattttgacttcagtcctgagaaaaacttcaggttttgaaaatcagatgatgtcttctccttttccaaacaccacacgttgaaagcatttataaatccaagtctgaaactctgcgctctagtactgctgttaagatacacaacttgtttcttagttcatataatctcgggatacacacacacacacacatatatatacacacacatacgtatacacacacatacatatatataaatatacctgatgccagatttttttcataaatattctgcctactgtaaatatgggttcctctgagttgttttagaaaattagcgcaatgtattaaaatcaagtgttaggaaatttcatggtcttacctacaataacttttattttggaattgaactattattaaattgtatctaatcctgga

SEQ ID NO: 426715 - DNA, 2532 bp, Homo sapiens
ccacgcgatcgtcgacccacgcgatcgcaaggtttggattcaggatttgttcctagtgtccaagattttgataagaaacttacagaagctgatgcttacctacaaatcttgattgaacaattaaagctttttgatgacaagcttcaaaactgcaaagaagatgaacagagaaagaaaattgaaactctcaaagagacaacaaatagcatggtagaatcaattaaacactgcattgtgttgctgcagattgccaaagaccagagtaatgcggagaagcacgcagatggaatgataagtactattaatcccgtagatgcaatatatcaacctagtcctttggaacctgtgatcagcacaatgccttcccagactgtgttacctccagaacctgttcagttgtgtaagtcagagcagcgtccatcttccctaccagttggacctgtgttggctaccttgggacatcatcagactcctacaccaaatagtacaggcagtggccattcaccaccgagtagcagtctcacttctccaagccacgtgaacttgtctccaaatacagtcccagagttctcttactccagcagtgaagatgaattttatgatgctgatgaattccatcaaagtggctcatccccaaagcgcttaatagattcttctggatctgcctcagtcctgacacacagcagctcgggaaatagtctaaaacgcccagataccacagaatcacttaattcttccttgtccaatggaacaagtgatgctgacctgtttgattcacatgatgacagagatgatgatgcggaggcagggtctgtggaggagcacaagagcgttatcatgcatctcttgtcgcaggttagacttggaatggatcttactaaggtagttcttccaacgtttattcttgaaagaagatctcttttagaaatgtatgcagacttttttgcacatccggacctgtttgtgagcattagtgaccagaaggatcccaaggatcgaatggttcaggttgtgaaatggtacctctcagcctttcatgcgggaaggaaaggatcagttgccaaaaagccatacaatcccattttgggcgagatttttcagtgtcattggacattaccaaatgatactgaagagaacacagaactagtttcagaaggaccagttccctgggtttccaaaaacagtgtaacatttgtggctgagcaggtttcccatcatccacccatttcagccttttatgctgagtgttttaacaagaagatacaattcaatgctcatatctggaccaaatcaaaattccttgggatgtcaattggggtgcacaacatagggcagggctgtgtctcatgtctagactatgatgaacattacattctcacattccccaatggctatggaaggtctatcctcacagtgccctgggtggaattaggaggagaatgcaatattaattgttccaaaacaggctatagtgcaaatatcatcttccacactaaacccttctatgggggcaagaagcacagaattactgccgagattttttctccaaatgacaagaagtctttttgctcaattgaaggggaatggaatggtgtgatgtatgcaaaatatgcaacaggggaaaatacagtctttgtagataccaagaagttgcctataatcaagaagaaagtgaggaagttggaagatcagaacgagtatgaatcccgcagcctttggaaggatgtcactttcaacttaaaaatcagagacattgatgcagcaactgaagcaaagcacaggcttgaagaaagacaaagagcagaagcccgagaaaggaaggagaaggaaattcagtgggagacaaggttatttcatgaagatggagaatgctgggtttatgatgaaccattactgaaacgtcttggtgctgccaagcattaggttggaagatgcaaagtttatacctgatgatcagggcagtaggcataattcagcaacaaacaatcttcctttgggagaaacctgttcattccaatcttctaattacagtggttcctatctcagggatactggactttctgacgcagatgaacaattaaggggaaaagcttcccttttccctctgtggcagttacgattttgacttcagtcctgagaaaaacttcaggttttgaaaatcagatgatgtcttctccttttccaaacaccacacgttgaaagcatttataaatccaagtctgaaactctgcgctctagtactgctgttaagatacacaacttgtttcttagttcatataatctcgggatacacacacacacacacatatatatacacacacatacgtatacacacacatacatatatataaatatacctgatgccagatttttttcataaatattctgcctactgtaaatatgggttcctctgagttgttttagaaaattagcgcaatgtattaaaatcaagtgttaggaaatttcatggtcttacctacaataacttttattttggaattgaactattattaaattgtatctaatcctgga

SEQ ID NO: 426716 - DNA, 1872 bp, Homo sapiens
tgagactccatctcaaacaaacaaacaaacaaaattgtaattctagtatcaggacagattggcccaatttagcaccattctaataagatctgctttattttagacctgtttgattcacatgatgacagagatgatgatgcggaggcagggtctgtggaggagcacaagagcgttatcatgcatctcttgtcgcaggttagacttggaatggatcttactaaggtagttcttccaacgtttattcttgaaagaagatctcttttagaaatgtatgcagacttttttgcacatccggacctgtttgtgagcattagtgaccagaaggatcccaaggatcgaatggttcaggttgtgaaatggtacctctcagcctttcatgcgggaaggaaaggatcagttgccaaaaagccatacaatcccattttgggcgagatttttcagtgtcattggacattaccaaatgatactgaagagaacacagaactagtttcagaaggaccagttccctgggtttccaaaaacagtgtaacatttgtggctgagcaggtttcccatcatccacccatttcagccttttatgctgagtgttttaacaagaagatacaattcaatgctcatatctggaccaaatcaaaattccttgggatgtcaattggggtgcacaacatagggcagggctgtgtctcatgtctagactatgatgaacattacattctcacattccccaatggctatggaaggtctatcctcacagtgccctgggtggaattaggaggagaatgcaatattaattgttccaaaacaggctatagtgcaaatatcatcttccacactaaacccttctatgggggcaagaagcacagaattactgccgagattttttctccaaatgacaagaagtctttttgctcaattgaaggggaatggaatggtgtgatgtatgcaaaatatgcaacaggggaaaatacagtctttgtagataccaagaagttgcctataatcaagaagaaagtgaggaagttggaagatcagaacgagtatgaatcccgcagcctttggaaggatgtcactttcaacttaaaaatcagagacattgatgcagcaactgaagcaaagcacaggcttgaagaaagacaaagagcagaagcccgagaaaggaaggagaaggaaattcagtgggagacaaggttatttcatgaagatggagaatgctgggtttatgatgaaccattactgaaacgtcttggtgctgccaagcattaggttggaagatgcaaagtttatacctgatgatcagggcagtaggcataattcagcaacaaacaatcttcctttgggagaaacctgttcattccaatcttctaattacagtggttcctatctcagggatactggactttctgacgcagatgaacaattaaggggaaaagcttcccttttccctctgtggcagttacgattttgacttcagtcctgagaaaaacttcaggttttgaaaatcagatgatgtcttctccttttccaaacaccacacgttgaaagcatttataaatccaagtctgaaactctgcgctctagtactgctgttaagatacacaacttgtttcttagttcatataatctcgggatacacacacacacacacatatatatacacacacatacgtatacacacacatacatatatataaatatacctgatgccagatttttttcataaatattctgcctactgtaaatatgggttcctctgagttgttttagaaaattagcgcaatgtattaaaatcaagtgttaggaaatttcatggtcttacctacaataacttttattttggaattgaactattattaaattgtatctaatcctgga

SEQ ID NO: 426717 - DNA, 3470 bp, Homo sapiens
  misc_feature (3470)..(3470): n is a, c, g, or t
gggtgtcccgggggacgggctgaacctcagtcaggaccgcctgcaccgcagtccggggatcgggtcgaggggagaagaaaaaggggtgctcgggagcagcccccggctacctcccctggaggcacagagggcgggggccttggcgaatggctttcttgctggccacttgcggagtgagtagaccccgagggtctgggagaggggccggcccctacccctgagtccccggggtcccggccgccaggccggagcgcgaatgtcgtgctcaccctgcctccttcccgccgccccctgggggtttggattcaggatttgttcctagtgtccaagattttgataagaaacttacagaagctgatgcttacctacaaatcttgattgaacaattaaagctttttgatgacaagcttcaaaactgcaaagaagatgaacagagaaagaaaattgaaactctcaaagagacaacaaatagcatggtagaatcaattaaacactgcattgtgttgctgcagattgccaaagaccagagtaatgcggagaagcacgcagatggaatgataagtactattaatcccgtagatgcaatatatcaacctagtcctttggaacctgtgatcagcacaatgccttcccagactgtgttacctccagaacctgttcagttgtgtaagtcagagcagcgtccatcttccctaccagttggacctgtgttggctaccttgggacatcatcagactcctacaccaaatagtacaggcagtggccattcaccaccgagtagcagtctcacttctccaagccacgtgaacttgtctccaaatacagtcccagagttctcttactccagcagtgaagatgaattttatgatgctgatgaattccatcaaagtggctcatccccaaagcgcttaatagattcttctggatctgcctcagtcctgacacacagcagctcgggaaatagtctaaaacgcccagataccacagaatcacttaattcttccttgtccaatggaacaagtgatgctgacctgtttgattcacatgatgacagagatgatgatgcggaggcagggtctgtggaggagcacaagagcgttatcatgcatctcttgtcgcaggttagacttggaatggatcttactaaggtagttcttccaacgtttattcttgaaagaagatctcttttagaaatgtatgcagacttttttgcacatccggacctgtttgtgagcattagtgaccagaaggatcccaaggatcgaatggttcaggttgtgaaatggtacctctcagcctttcatgcgggaaggaaaggatcagttgccaaaaagccatacaatcccattttgggcgagatttttcagtgtcattggacattaccaaatgatactgaagagaacacagaactagtttcagaaggaccagttccctgggtttccaaaaacagtgtaacatttgtggctgagcaggtttcccatcatccacccatttcagccttttatgctgagtgttttaacaagaagatacaattcaatgctcatatctggaccaaatcaaaattccttgggatgtcaattggggtgcacaacatagggcagggctgtgtctcatgtctagactatgatgaacattacattctcacattccccaatggctatggaaggtctatcctcacagtgccctgggtggaattaggaggagaatgcaatattaattgttccaaaacaggctatagtgcaaatatcatcttccacactaaacccttctatgggggcaagaagcacagaattactgccgagattttttctccaaatgacaagaagtctttttgctcaattgaaggggaatggaatggtgtgatgtatgcaaaatatgcaacaggggaaaatacagtctttgtagataccaagaagttgcctataatcaagaagaaagtgaggaagttggaagatcagaacgagtatgaatcccgcagcctttggaaggatgtcactttcaacttaaaaatcagagacattgatgcagcaactgaagcaaagcacaggcttgaagaaagacaaagagcagaagcccgagaaaggaaggagaaggaaattcagtgggagacaaggttatttcatgaagatggagaatgctgggtttatgatgaaccattactgaaacgtcttggtgctgccaagcattaggttggaagatgcaaagtttatacctgatgatcagggcagtaggcataattcagcaacaaacaatcttcctttgggagaaacctgttcattccaatcttctaattacagtggttcctatctcagggatactggactttctgacgcagatgaacaattaaggggaaaagcttcccttttccctctgtggcagttacgattttgacttcagtcctgagaaaaacttcaggttttgaaaatcagatgatgtcttctccttttccaaacaccacacgttgaaagcatttataaatccaagtctgaaactctgcgctctagtactgctgttaagatacacaacttgtttcttagttcatataatctcgggatacacacacacacacacatatatatacacacacatacgtatacacacacatacatatatataaatatacctgatgccagatttttttcataaatattctgcctactgtaaatatgggttcctctgagttgttttagaaaattagcgcaatgtattaaaatcaagtgttaggaaatttcatggtcttacctacaataacttttattttggaattgaactattattaaattgtatctaatcctggaaaaaaaaaaaaaaaaaaaaaaaaaaaaaaaacaaaaaaaagaacaaaataaaaaaaaagaaaacaacaaaaaaaaaaacaacaaaaaacaaaagagagggaggaggcgcaacaagcacaacgaagcactaccccgggagggggcacgccgcacacagaacgccggagcggcacgcccggaccccactatctagaaacgacaaagcgtgtgcccacacaaaacaaaagtaaaaagagcgcagacttatcaatcagacacacgccaagcgacgagacgcggccgcagatcctcaacaaacacagcacactgaatagcaaggtggagagaaacacaacctggtggctgacgcagcgacacacatcctgcgaaggaaaagacgagacactcacactaccatgggagagtggaggagcaaaacaacacacaggcgagaagaacaacaaaaacccagccacaccagcaaacataaacacgccaccatgacaacggcgacaacacaacaacgaccacgtctcaagcccgagtcactaactgagcacagacaacaccgcacacacaactacaatcagccgcggaacaaaggacaactaactacgaacgacaaccgactgatcagagcagagacaaacactcaactccaaccgagggagcgatcaaagaacaaataaggan

SEQ ID NO: 426718 - DNA, 2959 bp, Homo sapiens
gggtgtcccgggggacgggctgaacctcagtcaggaccgcctgcaccgcagtccggggatcgggtcgaggggagaagaaaaaggggtgctcgggagcagcccccggctacctcccctggaggcacagagggcgggggccttggcgaatggctttcttgctggccacttgcggagtgagtagaccccgagggtctgggagaggggccggcccctacccctgagtccccggggtcccggccgccaggccggagcgcgaatgtcgtgctcaccctgcctccttcccgccgccccctgggggtttggattcaggatttgttcctagtgtccaagattttgataagaaacttacagaagctgatgcttacctacaaatcttgattgaacaattaaagctttttgatgacaagcttcaaaactgcaaagaagatgaacagagaaagaaaattgaaactctcaaagagacaacaaatagcatggtagaatcaattaaacactgcattgtgttgctgcagattgccaaagaccagagtaatgcggagaagcacgcagatggaatgataagtactattaatcccgtagatgcaatatatcaacctagtcctttggaacctgtgatcagcacaatgccttcccagactgtgttacctccagaacctgttcagttgtgtaagtcagagcagcgtccatcttccctaccagttggacctgtgttggctaccttgggacatcatcagactcctacaccaaatagtacaggcagtggccattcaccaccgagtagcagtctcacttctccaagccacgtgaacttgtctccaaatacagtcccagagttctcttactccagcagtgaagatgaattttatgatgctgatgaattccatcaaagtggctcatccccaaagcgcttaatagattcttctggatctgcctcagtcctgacacacagcagctcgggaaatagtctaaaacgcccagataccacagaatcacttaattcttccttgtccaatggaacaagtgatgctgacctgtttgattcacatgatgacagagatgatgatgcggaggcagggtctgtggaggagcacaagagcgttatcatgcatctcttgtcgcaggttagacttggaatggatcttactaaggtagttcttccaacgtttattcttgaaagaagatctcttttagaaatgtatgcagacttttttgcacatccggacctgtttgtgagcattagtgaccagaaggatcccaaggatcgaatggttcaggttgtgaaatggtacctctcagcctttcatgcgggaaggaaaggatcagttgccaaaaagccatacaatcccattttgggcgagatttttcagtgtcattggacattaccaaatgatactgaagagaacacagaactagtttcagaaggaccagttccctgggtttccaaaaacagtgtaacatttgtggctgagcaggtttcccatcatccacccatttcagccttttatgctgagtgttttaacaagaagatacaattcaatgctcatatctggaccaaatcaaaattccttgggatgtcaattggggtgcacaacatagggcagggctgtgtctcatgtctagactatgatgaacattacattctcacattccccaatggctatggaaggtctatcctcacagtgccctgggtggaattaggaggagaatgcaatattaattgttccaaaacaggctatagtgcaaatatcatcttccacactaaacccttctatgggggcaagaagcacagaattactgccgagattttttctccaaatgacaagaagtctttttgctcaattgaaggggaatggaatggtgtgatgtatgcaaaatatgcaacaggggaaaatacagtctttgtagataccaagaagttgcctataatcaagaagaaagtgaggaagttggaagatcagaacgagtatgaatcccgcagcctttggaaggatgtcactttcaacttaaaaatcagagacattgatgcagcaactgaagcaaagcacaggcttgaagaaagacaaagagcagaagcccgagaaaggaaggagaaggaaattcagtgggagacaaggttatttcatgaagatggagaatgctgggtttatgatgaaccattactgaaacgtcttggtgctgccaagcattaggttggaagatgcaaagtttatacctgatgatcagggcagtaggcataattcagcaacaaacaatcttcctttgggagaaacctgttcattccaatcttctaattacagtggttcctatctcagggatactggactttctgacgcagatgaacaattaaggggaaaagcttcccttttccctctgtggcagttacgattttgacttcagtcctgagaaaaacttcaggttttgaaaatcagatgatgtcttctccttttccaaacaccacacgttgaaagcatttataaatccaagtctgaaactctgcgctctagtactgctgttaagatacacaacttgtttcttagttcatataatctcgggatacacacacacacacacatatatatacacacacatacgtatacacacacatacatatatataaatatacctgatgccagatttttttcataaatattctgcctactgtaaatatgggttcctctgagttgttttagaaaattagcgcaatgtattaaaatcaagtgttaggaaatttcatggtcttacctacaataacttttattttggaattgaactattattaaattgtatctaatcctggaaaaaaaacaaaaatgctagtaaaatgataatgtaccgaaattggagaaatattcaattgtaactcacttttaaaaataataaaaccttagggggggtcccggtacaaatttccccttatagagggcggttttaaatttaattggcggcttttaacaacgtt

SEQ ID NO: 426719 - DNA, 2488 bp, Homo sapiens
gggtgtcccgggggacgggctgaacctcagtcaggaccgcctgcaccgcagtccggggatcgggtcgaggggagaagaaaaaggggtgctcgggagcagcccccggctacctcccctggaggcacagagggcgggggccttggcgaatggctttcttgctggccacttgcggagtgagtagaccccgagggtctgggagaggggccggcccctacccctgagtccccggggtcccggccgccaggccggagcgcgaatgtcgtgctcaccctgcctccttcccgccgccccctgggggtttggattcaggatttgttcctagtgtccaagattttgataagaaacttacagaagctgatgcttacctacaaatcttgattgaacaattaaagctttttgatgacaagcttcaaaactgcaaagaagatgaacagagaaagaaaattgaaactctcaaagagacaacaaatagcatggtagaatcaattaaacactgcattgtgttgctgcagattgccaaagaccagagtaatgcggagaagcacgcagatggaatgataagtactattaatcccgtagatgcaatatatcaacctagtcctttggaacctgtgatcagcacaatgccttcccagactgtgttacctccagaacctgttcagttgtgtaagtcagagcagcgtccatcttccctaccagttggacctgtgttggctaccttgggacatcatcagactcctacaccaaatagtacaggcagtggccattcaccaccgagtagcagtctcacttctccaagccacgtgaacttgtctccaaatacagtcccagagttctcttactccagcagtgaagatgaattttatgatgctgatgaattccatcaaagtggctcatccccaaagcgcttaatagattcttctggatctgcctcagtcctgacacacagcagctcgggaaatagtctaaaacgcccagataccacagaatcacttaattcttccttgtccaatggaacaagtgatgctgacctgtttgattcacatgatgacagagatgatgatgcggaggcagggtctgtggaggagcacaagagcgttatcatgcatctcttgtcgcaggttagacttggaatggatcttactaaggtagttcttccaacgtttattcttgaaagaagatctcttttagaaatgtatgcagacttttttgcacatccggacctgtttgtgagcattagtgaccagaaggatcccaaggatcgaatggttcaggttgtgaaatggtacctctcagcctttcatgcgggaaggaaaggatcagttgccaaaaagccatacaatcccattttgggcgagatttttcagtgtcattggacattaccaaatgatactgaagagaacacagaactagtttcagaaggaccagttccctgggtttccaaaaacagtgtaacatttgtggctgagcaggtttcccatcatccacccatttcagccttttatgctgagtgttttaacaagaagatacaattcaatgctcatatctggaccaaatcaaaattccttgggatgtcaattggggtgcacaacatagggcagggctgtgtctcatgtctagactatgatgaacattacattctcacattccccaatggctatggaaggtctatcctcacagtgccctgggtggaattaggaggagaatgcaatattaattgttccaaaacaggctatagtgcaaatatcatcttccacactaaacccttctatgggggcaagaagcacagaattactgccgagattttttctccaaatgacaagaagtctttttgctcaattgaaggggaatggaatggtgtgatgtatgcaaaatatgcaacaggggaaaatacagtctttgtagataccaagaagttgcctataatcaagaagaaagtgaggaagttggaagatcagaacgagtatgaatcccgcagcctttggaaggatgtcactttcaacttaaaaatcagagacattgatgcagcaactgaagcaaagcacaggcttgaagaaagacaaagagcagaagcccgagaaaggaaggagaaggaaattcagtgggagacaaggttatttcatgaagatggagaatgctgggtttatgatgaaccattactgaaacgtcttggtgctgccaagcattaggttggaagatgcaaagtttatacctgatgatcagggcagtaggcataattcagcaacaaacaatcttcctttgggagaaacctgttcattccaatcttctaattacagtggttcctatctcagggatactggactttctgacgcagatgaacaattaaggggaaaagcttcccttttccctctgtggcagttacgattttgacttcagtcctgagaaaaacttcaggttttgaaaatcagatgatgtcttctccttttccaaacaccacacgttgaaagcatttataaatccaagtctg

SEQ ID NO: 426720 - DNA, 1254 bp, Homo sapiens
gaaagccttgtggccacttggcactactcatcagagattctgtcccttctctccacaggctgtgtctcatgtctagactatgatgaacattacattctcacattccccaatggctatggaaggtctatcctcacagtgccctgggtggaattaggaggagaatgcaatattaattgttccaaaacaggctatagtgcaaatatcatcttccacactaaacccttctatgggggcaagaagcacagaattactgccgagattttttctccaaatgacaagaagtctttttgctcaattgaaggggaatggaatggtgtgatgtatgcaaaatatgcaacaggggaaaatacagtctttgtagataccaagaagttgcctataatcaagaagaaagtgaggaagttggaagatcagaacgagtatgaatcccgcagcctttggaaggatgtcactttcaacttaaaaatcagagacattgatgcagcaactgaagcaaagcacaggcttgaagaaagacaaagagcagaagcccgagaaaggaaggagaaggaaattcagtgggagacaaggttatttcatgaagatggagaatgctgggtttatgatgaaccattactgaaacgtcttggtgctgccaagcattaggttggaagatgcaaagtttatacctgatgatcagggcagtaggcataattcagcaacaaacaatcttcctttgggagaaacctgttcattccaatcttctaattacagtggttcctatctcagggatactggactttctgacgcagatgaacaattaaggggaaaagcttcccttttccctctgtggcagttacgattttgacttcagtcctgagaaaaacttcaggttttgaaaatcagatgatgtcttctccttttccaaacaccacacgttgaaagcatttataaatccaagtctgaaactctgcgctctagtactgctgttaagatacacaacttgtttcttagttcatataatctcgggatacacacacacacacacatatatatacacacacatacgtatacacacacatacatatatataaatatacctgatgccagatttttttcataaatattctgcctactgtaaatatgggttcctctgagttgttttagaaaattagcgcaatgtattaaaatcaagtgttaggaaatttcatggtcttacctacaataacttttattttggaattgaactattattaaattgtatctaatcctgga

SEQ ID NO: 426721 - DNA, 1568 bp, Homo sapiens
gggtgtcccgggggacgggctgaacctcagtcaggaccgcctgcaccgcagtccggggatcgggtcgaggggagaagaaaaaggggtgctcgggagcagcccccggctacctcccctggaggcacagagggcgggggccttggcgaatggctttcttgctggccacttgcggagtgagtagaccccgagggtctgggagaggggccggcccctacccctgagtccccggggtcccggccgccaggccggagcgcgaatgtcgtgctcaccctgcctccttcccgccgccccctgggggtttggattcaggatttgttcctagtgtccaagattttgataagaaacttacagaagctgatgcttacctacaaatcttgattgaacaattaaagctttttgatgacaagcttcaaaactgcaaagaagatgaacagagaaagaaaattgaaactctcaaagagacaacaaatagcatggtagaatcaattaaacactgcattgtgttgctgcagattgccaaagaccagagtaatgcggagaagcacgcagatggaatgataagtactattaatcccgtagatgcaatatatcaacctagtcctttggaacctgtgatcagcacaatgccttcccagactgtgttacctccagaacctgttcagttgtgtaagtcagagcagcgtccatcttccctaccagttggacctgtgttggctaccttgggacatcatcagactcctacaccaaatagtacaggcagtggccattcaccaccgagtagcagtctcacttctccaagccacgtgaacttgtctccaaatacagtcccagagttctcttactccagcagtgaagatgaattttatgatgctgatgaattccatcaaagtggctcatccccaaagcgcttaatagattcttctggatctgcctcagtcctgacacacagcagctcgggaaatagtctaaaacgcccagataccacagaatcacttaattcttccttgtccaatggaacaagtgatgctgacctgtttgattcacatgatgacagagatgatgatgcggaggcagggtctgtggaggagcacaagagcgttatcatgcatctcttgtcgcaggttagacttggaatggatcttactaaggtagttcttccaacgtttattcttgaaagaagatctcttttagaaatgtatgcagacttttttgcacatccggacctgtttgtgagcattagtgaccagaaggatcccaaggatcgaatggttcaggttgtgaaatggtacctctcagcctttcatgcgggaaggaaaggatcagttgccaaaaagccatacaatcccattttgggcgagatttttcagtgtcattggacattaccaaatgatactgaagagaacacagaactagtttcagaaggaccagttccctgggtttccaaaaacagtgtaacatttggtccagatatgagcattgaattgtatcttcttgttaaaacactcagcataaaaggctgaaatgggtggatgatgggaaacctgctcagccacaaatgttagtcgagc

SEQ ID NO: 426722 - DNA, 947 bp, Homo sapiens
gggtgtcccgggggacgggctgaacctcagtcaggaccgcctgcaccgcagtccggggatcgggtcgaggggagaagaaaaaggggtgctcgggagcagcccccggctacctcccctggaggcacagagggcgggggccttggcgaatggctttcttgctggccacttgcggagtgagtagaccccgagggtctgggagaggggccggcccctacccctgagtccccggggtcccggccgccaggccggagcgcgaatgtcgtgctcaccctgcctccttcccgccgccccctgggggtttggattcaggatttgttcctagtgtccaagattttgataagaaacttacagaagctgatgcttacctacaaatcttgattgaacaattaaagctttttgatgacaagcttcaaaactgcaaagaagatgaacagagaaagaaaattgaaactctcaaagagacaacaaatagatgggattctgctatgttgcctaggctggtctcctagcctcaagcgatcctccttccttggcctaccaaagcagtgggattacagagcatggtagaatcaattaaacactgcattgtgttgctgcagattgccaaagaccagagtaatgcggagaagcacgcagatggaatgatagtaagtttaatgtaatctttttgtttccctttacttctgcagagcattataaccagtcatatcaggagaagcctgaattactactcatttttcaatgccaactactcactgctttttgttgttgactcttgcagtttcctttaagctcccttctttcagcaatcatttgcaggggaaatgacaatcttaaaatttttctaagtgtgggttcagattgaatcactttgcatgtattaacttgaagggttaatcatggtatgaatactcagcttttacaattaaataatgcataactcagtg

SEQ ID NO: 426723 - DNA, 888 bp, Homo sapiens
gttcgggccagatgcatcctcatggatgcgctgagcaaatggactaacgtgatgaagggctggcagtaccgttggttcgtgctggactacaatgcaggactgctctcctactacacgtccaaggacaaaatgatgagaggctctcgcagaggatgtgttagactcagaggagctgtgattggtatagacgatgaggacgacagcaccttcacaataactgttgatcagaaaaccttccatttccaggcccgtgatgctgatgagcgagagaagtggatccatgccttagaagaaacaattcttcgacatactctccagcttcaaggtttggattcaggatttgttcctagtgtccaagattttgataagaaacttacagaagctgatgcttacctacaaatcttgattgaacaattaaagctttttgatgacaagcttcaaaactgcaaagaagatgaacagagaaagaaaattgaaactctcaaagagacaacaaatagcatggtagaatcaattaaacactgcattgtgttgctgcagattgccaaagaccagagtaatgcggagaagcacgcagatggaatgatagtaagtttaatgtaatctttttgtttccctttacttctgcagagcattataaccagtcatatcaggagaagcctgaattactactcatttttcaatgccaactactcactgctttttgttgttgactcttgcagtttcctttaagctcccttctttcagcaatcatttgcaggggaaatgacaatcttaaaatttttctaagtgtgggttcagattgaatcactttgcatgtattaacttgaagggttaatcatggtatgaatactcagcttttacaattaaataatgcataactcagtg

SEQ ID NO: 426724 - DNA, 489 bp, Homo sapiens
gaaagccttgtggccacttggcactactcatcagagattctgtcccttctctccacaggctgtgtctcatgtctagactatgatgaacattacattctcacattccccaatggctatggaaggcaagtgtgtccatttcctctgatcagcagtagactctgctgttccttgagacatgccccttccccctcttcctcttaactgtcaaccttacctaaaaacttttgattttgcaggtctatcctcacagtgccctgggtggaattaggaggagaatgcaatattaattgttccaaaacaggctatagtgcaaatatcatcttccacactaaacccttctatgggggcaagaagcacagaattactgccgagattttgtaggtattttttctgccttagagctcttatgcttttctgaaataactgccttttgtcttgaactacagcttctggattaggagtgtgaaagaatggttctgtctttgtaag

SEQ ID NO: 426725 - DNA, 1702 bp, Homo sapiens
cactcacctgaatgtgtaaggacatctttcctcaagagcttctcacttcctgaggagtctgtagtcttcattcaaatgtcttgatggctcattttccagaaatctctgtaggtcttgagaagcattgtcctagctttggtttatctgaatagtcctatttaaacttgtcccacacagatagcagcctcttgcttgcccttctgtttgtacacttgtctattttctctttctttaaatgccttttgggtgttaatacttcattggtggttccatagccttgtccccctctcttttgcaacttgaaggcaattctcagttctcttcttgagcacattcatacttagcagcttctgaatatcccacccacaattaaggtacaatctggtcacataactttttccctaggaagaaatgtgctactcaagactaatagccaaggttaagaacgtgcatactcctgaatcggatgtaaatgcattagtctatttgttctgtttagaaataaagatggaacatattttatagctactgttagtgcccatgtgccttctaaatatcttttgaatagttttacttctctccatcttgacagctaccatgccaatccaagcttccatcaccttgctcctggcttactgcagtatcctcctgtctacccttcatccacttttatctctttccaatcacttgttcatacaacagccatattgggtttttttcaaaacacacatataatcagggcacttctcaacttaaaaccatttctggcattacttgcccttaggataatgacaaaactttttaacacagtccacaaggccagagatagcctgacccttgctgatctgtccagcctctgctatatgtccccttattttctctgttccaaccacattggactttgttcctcttactagtcatgctccccacctatttggttccctagttaacttctcttcatccttcgatttcaacttgtgtcacttcctccagaaagcctaccctttctttcttaaccaggccgataggctgtcaaaaccaggaatctcttcttcgtagcactacagtcatactcattgatacgtgtgattattaatgtgggttttttaaaaaattagaatgaaactcaagagcagggaccacatctattacttgtgattaatatattcctagtggttagcacagtgtctagacaaatatatgttgaatgaataaatagaaaagggagaggaaaaagggaaggattgaccctctgtgaggcagtcttgcaaacagcagaaatgcaaagcaaagctgaagaactaactattcaacacacacctagaggagcgttgtaatgtcttgtgcctgtctcaaatgggtgcattcttatgggtaagttttactagtccagctttcactgtaatagttcacattcctctcctagtgtcagtctccaacaaatccctcagtaattcgtaatcagtaatctcatgccaaggatgagagaggggcattatccaaaaagttgggtgtgtccatttttttttgagtcttgctctgttgcccaggctggagtccagtggcatggtcttggcttactgcaacctccgcctcccaggctgaggtatgagaattgcttaaaccctggagacggaggttacagtaagctgaaatcacgccactgcactccagcctggatgacagaacaatactgtctcaa

SEQ ID NO: 426726 - DNA, 3223 bp, Homo sapiens
cactcacctgaatgtgtaaggacatctttcctcaagagcttctcacttcctgaggagtctgtagtcttcattcaaatgtcttgatggctcattttccagaaatctctgtaggtcttgagaagcattgtcctagctttggtttatctgaatagtcctatttaaacttgtcccacacagatagcagcctcttgcttgcccttctgtttgtacacttgtctattttctctttctttaaatgccttttgggtgttaatacttcattggtggttccatagccttgtccccctctcttttgcaacttgaaggcaattctcagttctcttcttgagcacattcatacttagcagcttctgaatatcccacccacaattaaggtacaatctggtcacataactttttccctaggaagaaatgtgctactcaagactaatagccaaggttaagaacgtgcatactcctgaatcggatgtaaatgcattagtctatttgttctgtttagaaataaagatggaacatattttatagctactgttagtgcccatgtgccttctaaatatcttttgaatagttttacttctctccatcttgacagctaccatgccaatccaagcttccatcaccttgctcctggcttactgcagtatcctcctgtctacccttcatccacttttatctctttccaatcacttgttcatacaacagccatattgggtttttttcaaaacacacatataatcagggcacttctcaacttaaaaccatttctggcattacttgcccttaggataatgacaaaactttttaacacagtccacaaggccagagatagcctgacccttgctgatctgtccagcctctgctatatgtccccttattttctctgttccaaccacattggactttgttcctcttactagtcatgctccccacctatttggttccctagttaacttctcttcatccttcgatttcaacttgtgtcacttcctccagaaagcctaccctttctttcttaaccaggccgataggctgtcaaaaccaggaatctcttcttcgtagcactacagtcatactcattgatacgtgtgattattaatgtgggttttttaaaaaattagaatgaaactcaagagcagggaccacatctattacttgtgattaatatattcctagtggttagcacagtgtctagacaaatatatgttgaatgaataaatagaaaagggagaggaaaaagggaaggattgaccctctgtgaggcagtcttgcaaacagcagaaatgcaaagcaaagctgaagaactaactattcaacacacacctagaggagcgttgtaatgtcttgtgcctgtctcaaatgggtgcattcttatgggtaagttttactagtccagctttcactgtaatagttcacattcctctcctagtgtcagtctccaacaaatccctcagtaattcgtaatcagtaatctcatgccaaggatgagagaggggcattatccaaaaagttgggtgtgtccatttttttttgagtcttgctctgttgcccaggctggagtccagtggcatggtcttggcttactgcaacctccgcctcccaggttcaagtaattctgcctcagcctcctgagtagctgggattacaggcgcctgctacctcgcccggcttttttgttgttgttatttttagtagagacggtgtttcaccatgttggtcaggctggtcatgaacttgtgaccttgtgatccgcccgccttggccttccaaagtgctgggattacaggcgtgagccactgtgcccggctgttcatctgtttttcaatacctttaagttcagtttcccttacaaagcccacttttttcttagtgggaatctcttgtaccacttaacacctacattccttaatttttaaagttaaaacacttatatactataaaatggacacatcttaagcatacagcttgatgaagatttacaaagtaaacatgccagttgaaacaccactctgatcaggatgtggaacataaccagcactccagaaatctctctgccatcattaccaccactggttatcctagccactcttctgacttgtatcaccatagataggttttacttgttttgaagccatctataaatggaatcatggaagtttgggcttccctgagagcagatcttcagagaaaaaaaacttgagtgcagtagtttatttggcgtttggctccaggatgcaggagtgggaaagatggtagagagacagaagaaaaatcaatagaaaggtattacggaggttggatatataatgcttcccagaattgtctgactgaacaggaggctgaaatatttatccgctggctcctgtttccaattgattgagggatgcccccaaggaagttaacttcactgcaattctgagctgtaattgactttaataagctccaacagcactgaaagacgtttggattattttcagtttgggataatactactatgaacattcctgtacatgtcttttgagaacacgcatgtgtacatttgtgatgggtatgtaatggggtggaattactggttcatagaatatgtgcatattcacctttagatatagaggctgccaaccatttttctgaagtgattatactaatttatattctcactatctgtaaatgaacatttctgttgctccacatccttgctggcacttggtattgattgatttctcttttaattttaggctttttaatacgtgtgtagtgatatctcacttgctgtttgtttgctttttggtaaattttttattgaagtataatttacatacagaaaatcacacaaattgtgtacaggtgtgatttttcacaccgtgaatacatgcaaaaactagtatgaaattaagagttggaacatcaccagtactccagaagccccatgcatgttctcttccagttactataccactatcccaaggatggtctattaattcaacagcatagatttattttgcctgtttttcaacttcaaataaatgaaataatatgcactcttgtgtctggcttctttgactcaacagtatgtctatacaactcatctgtattgttgcatgttgtagttcgttcattcatactgttgtatacagtattgaattgtataaattactcattctgttactatgcatttgggctgtttccagttttggctattatgaataaagctgctatgaacattcta

SEQ ID NO: 426727 - DNA, 3169 bp, Homo sapiens
cactcacctgaatgtgtaaggacatctttcctcaagagcttctcacttcctgaggagtctgtagtcttcattcaaatgtcttgatggctcattttccagaaatctctgtaggtcttgagaagcattgtcctagctttggtttatctgaatagtcctatttaaacttgtcccacacagatagcagcctcttgcttgcccttctgtttgtacacttgtctattttctctttctttaaatgccttttgggtgttaatacttcattggtggttccatagccttgtccccctctcttttgcaacttgaaggcaattctcagttctcttcttgagcacattcatacttagcagcttctgaatatcccacccacaattaaggtacaatctggtcacataactttttccctaggaagaaatgtgctactcaagactaatagccaaggttaagaacgtgcatactcctgaatcggatgtaaatgcattagtctatttgttctgtttagaaataaagatggaacatattttatagctactgttagtgcccatgtgccttctaaatatcttttgaatagttttacttctctccatcttgacagctaccatgccaatccaagcttccatcaccttgctcctggcttactgcagtatcctcctgtctacccttcatccacttttatctctttccaatcacttgttcatacaacagccatattgggtttttttcaaaacacacatataatcagggcacttctcaacttaaaaccatttctggcattacttgcccttaggataatgacaaaactttttaacacagtccacaaggccagagatagcctgacccttgctgatctgtccagcctctgctatatgtccccttattttctctgttccaaccacattggactttgttcctcttactagtcatgctccccacctatttggttccctagttaacttctcttcatccttcgatttcaacttgtgtcacttcctccagaaagcctaccctttctttcttaaccaggccgataggctgtcaaaaccaggaatctcttcttcgtagcactacagtcatactcattgatacgtgtgattattaatgtgggttttttaaaaaattagaatgaaactcaagagcagggaccacatctattacttgtgattaatatattcctagtggttagcacagtgtctagacaaatatatgttgaatgaataaatagaaaagggagaggaaaaagggaaggattgaccctctgtgaggcagtcttgcaaacagcagaaatgcaaagcaaagctgaagaactaactattcaacacacacctagaggagcgttgtaatgtcttgtgcctgtctcaaatgggtgcattcttatgggtaagttttactagtccagctttcactgtaatagttcacattcctctcctagtgtcagtctccaacaaatccctcagtaattcgtaatcagtaatctcatgccaaggatgagagaggggcattatccaaaaagttgggtgtgtccatttttttttgagtcttgctctgttgcccaggctggagtccagtggcatggtcttggcttactgcaacctccgcctcccaggttcaagtaattctgcctcagcctcctgagtagctgggattacaggcgcctgctacctcgcccggcttttttgttgttgttatttttagtagagacggtgtttcaccatgttggtcaggctggtcatgaacttgtgaccttgtgatccgcccgccttggccttccaaagtgctgggattacaggcgtgagccactgtgcccggctgttcatctgtttttcaatacctttaagttcagtttcccttacaaagcccacttttttcttagtgggaatctcttgtaccacttaacacctacattccttaatttttaaagttaaaacacttatatactataaaatggacacatcttaagcatacagcttgatgaagatttacaaagtaaacatgccagttgaaacaccactctgatcaggatgtggaacataaccagcactccagaaatctctctgccatcattaccaccactggttatcctagccactcttctgacttgtatcaccatagataggttttacttgttttgaagccatctataaatggaatcatggaagtttgggcttccctgagagcagatcttcagagaaaaaaaacttgagtgcagtagtttatttggcgtttggctccaggatgcaggagtgggaaagatggtagagagacagaagatctgactgaacaggaggctgaaatatttatccgctggctcctgtttccaattgattgagggatgcccccaaggaagttaacttcactgcaattctgagctgtaattgactttaataagctccaacagcactgaaagacgtttggattattttcagtttgggataatactactatgaacattcctgtacatgtcttttgagaacacgcatgtgtacatttgtgatgggtatgtaatggggtggaattactggttcatagaatatgtgcatattcacctttagatatagaggctgccaaccatttttctgaagtgattatactaatttatattctcactatctgtaaatgaacatttctgttgctccacatccttgctggcacttggtattgattgatttctcttttaattttaggctttttaatacgtgtgtagtgatatctcacttgctgtttgtttgctttttggtaaattttttattgaagtataatttacatacagaaaatcacacaaattgtgtacaggtgtgatttttcacaccgtgaatacatgcaaaaactagtatgaaattaagagttggaacatcaccagtactccagaagccccatgcatgttctcttccagttactataccactatcccaaggatggtctattaattcaacagcatagatttattttgcctgtttttcaacttcaaataaatgaaataatatgcactcttgtgtctggcttctttgactcaacagtatgtctatacaactcatctgtattgttgcatgttgtagttcgttcattcatactgttgtatacagtattgaattgtataaattactcattctgttactatgcatttgggctgtttccagttttggctattatgaataaagctgctatgaacattcta

SEQ ID NO: 426728 - DNA, 3281 bp, Homo sapiens
cactcacctgaatgtgtaaggacatctttcctcaagagcttctcacttcctgaggagtctgtagtcttcattcaaatgtcttgatggctcattttccagaaatctctgtaggtcttgagaagcattgtcctagctttggtttatctgaatagtcctatttaaacttgtcccacacagatagcagcctcttgcttgcccttctgtttgtacacttgtctattttctctttctttaaatgccttttgggtgttaatacttcattggtggttccatagccttgtccccctctcttttgcaacttgaaggcaattctcagttctcttcttgagcacattcatacttagcagcttctgaatatcccacccacaattaaggtacaatctggtcacataactttttccctaggaagaaatgtgctactcaagactaatagccaaggttaagaacgtgcatactcctgaatcggatgtaaatgcattagtctatttgttctgtttagaaataaagatggaacatattttatagctactgttagtgcccatgtgccttctaaatatcttttgaatagttttacttctctccatcttgacagctaccatgccaatccaagcttccatcaccttgctcctggcttactgcagtatcctcctgtctacccttcatccacttttatctctttccaatcacttgttcatacaacagccatattgggtttttttcaaaacacacatataatcagggcacttctcaacttaaaaccatttctggcattacttgcccttaggataatgacaaaactttttaacacagtccacaaggccagagatagcctgacccttgctgatctgtccagcctctgctatatgtccccttattttctctgttccaaccacattggactttgttcctcttactagtcatgctccccacctatttggttccctagttaacttctcttcatccttcgatttcaacttgtgtcacttcctccagaaagcctaccctttctttcttaaccaggccgataggctgtcaaaaccaggaatctcttcttcgtagcactacagtcatactcattgatacgtgtgattattaatgtgggttttttaaaaaattagaatgaaactcaagagcagggaccacatctattacttgtgattaatatattcctagtggttagcacagtgtctagacaaatatatgttgaatgaataaatagaaaagggagaggaaaaagggaaggattgaccctctgtgaggcagtcttgcaaacagcagaaatgcaaagcaaagctgaagaactaactattcaacacacacctagaggagcgttgtaatgtcttgtgcctgtctcaaatgggtgcattcttatgggtaagttttactagtccagctttcactgtaatagttcacattcctctcctagtgtcagtctccaacaaatccctcagtaattcgtaatcagtaatctcatgccaaggatgagagaggggcattatccaaaaagttgggtgtgtccatttttttttgagtcttgctctgttgcccaggctggagtccagtggcatggtcttggcttactgcaacctccgcctcccaggttcaagtaattctgcctcagcctcctgagtagctgggattacaggcgcctgctacctcgcccggcttttttgttgttgttatttttagtagagacggtgtttcaccatgttggtcaggctggtcatgaacttgtgaccttgtgatccgcccgccttggccttccaaagtgctgggattacaggcgtgagccactgtgcccggctgttcatctgtttttcaatacctttaagttcagtttcccttacaaagcccacttttttcttagtgggaatctcttgtaccacttaacacctacattccttaatttttaaagttaaaacacttatatactataaaatggacacatcttaagcatacagcttgatgaagatttacaaagtaaacatgccagttgaaacaccactctgatcaggatgtggaacataaccagcactccagaaatctctctgccatcattaccaccactggttatcctagccactcttctgacttgtatcaccatagataggttttacttgttttgaagccatctataaatggaatcatggaagtttgggcttccctgagagcagatcttcagagaaaaaaaacttgagtgcagtagtttatttggcgtttggctccaggatgcaggagtgggaaagatggtagagagacagaagaaaaatcaatagaaaggtattacggaggttggatatataatgcttcccagaattgtctgactgaacaggaggctgaaatatttatccgctggctcctgtttccaattgattgagggatgcccccaaggaagttaacttcactgcaattctgagctgtaattgactttaataagctccaacagcactgaaagacgtttggattattttcagtttgggataatactactatgaacattcctgtacatgtcttttgagaacacgcatgtgtacatttgtgatgggtatgtaatggggtggaattactggttcatagaatatgtgcatattcacctttagatatagaggctgccaaccatttttctgaagtgattatactaatttatattctcactatctgtaaatgaacatttctgttgctccacatccttgctggcacttggtattgattgatttctcttttaattttaggctttttaatacgtgtgtagtgatatctcacttgctgtttgtttgctttttggtaaattttttattgaagtataatttacatacagaaaatcacacaaattgtgtacaggtgtgatttttcacaccgtgaatacatgcaaaaactagtatgaaattaagagttggaacatcaccagtactccagaagccccatgcatgttctcttccagttactataccactatcccaaggatggtctattaattcaacagcatagatttattttgcctgtttttcaacttcaaataaatgaaataatatgcactcttgtgtctggcttctttgactcaacagtatgtctatacaactcatctgtattgttgcatgttgtagttcgttcattcatactgttgtatacagtattgaattgtataaattactcattctgttactatgcatttgggctgtttccagttttggctattatgaataaagctgctatgaacattctagaattgtcttgttgaacatatgtatttctgctgggtataaagcttaaaaaggaaatta

SEQ ID NO: 426729 - DNA, 1847 bp, Homo sapiens
aggggctgggcggggtcgggctcctgctccggctcagctgcggcggccgcaggttccaaagcgggtccgagccgccgccgcgcgcgcgccgcgcactgcagccccaggccccggccccccacccacgtctgcgttgctgccccgcctgggccaggccccaaaggcaaggacaaagcagctgtcagggaacctccgccggagtcgaatttacgtgcagctgccggcaaccacaggttccaagatggtttgcgggggcttcgcgtgttccaagaactgcctgtgcgccctcaacctgctttacaccttggttagtctgctgctaattggaattgctgcgtggggcattggcttcgggctgatttccagtctccgagtggtcggcgtggtcattgcagtgggcatcttcttgttcctgattgctttagtgggtctgattggagctgtaaaacatcatcaggtgttgctatttttttatatgattattctgttacttgtatttattgttcagttttctgtatcttgcgcttgtttagccctgaaccaggagcaacagggtcagcttctggaggttggttggaacaatacggcaagtgctcgaaatgacatccagagaaatctaaactgctgtgggttccgaagtgttaacccaaatgacacctgtctggctagctgtgttaaaagtgaccactcgtgctcgccatgtgctccaatcataggagaatatgctggagaggttttgagatttgttggtggcattggcctgttcttcagttttacagagatcctgggtgtttggctgacctacagatacaggaaccagaaagacccccgcgcgaatcctagtgcattcctttgatgagaaaacaaggaagatttcctttcgtattatgatcttgttcactttctgtaattttctgttaagctccatttgccagtttaaggaaggaaacactatctggaaaagtaccttattgatagtggaattatatatttttactctatgtttctctacatgtttttttctttccgttgctgaaaaatatttgaaacttgtggtctctgaagctcggtggcacctggaatttactgtattcattgtcgggcactgtccactgtggcctttcttagcatttttacctgcagaaaaactttgtatggtaccactgtgttggttatatggtgaatctgaacgtacatctcactggtataattatatgtagcactgtgctgtgtagatagttcctactggaaaaagagtggaaatttattaaaatcagaaagtatgagatcctgttatgttaagggaaatccaaattcccaattttttttggtctttttaggaaagatgtgttgtggtaaaaagtgttagtataaaaatgataatttacttgtagtcttttatgattacaccaatgtattctagaaatagttatgtcttaggaaattgtggtttaatttttgacttttacaggtaagtgcaaaggagaagtggtttcatgaaatgttctaatgtataataacatttaccttcagcctccatcagaatggaacgagttttgagtaatcaggaagtatatctatatgatcttgatattgttttataataatttgaagtctaaaagactgcatttttaaacaagttagtattaatgcgttggcccacgtagcaaaaagatatttgattatcttaaaaattgttaaataccgttttcatgaaagttctcagtattgtaacagcaacttgtcaaacctaagcatatttgaatatgatctcccataatttgaaattgaaatcgtattgtgtggctctgtatattctgttaaaaaattaaaggacagaaaccttt

SEQ ID NO: 426730 - DNA, 2022 bp, Homo sapiens
aggggctgggcggggtcgggctcctgctccggctcagctgcggcggccgcaggttccaaagcgggtccgagccgccgccgcgcgcgcgccgcgcactgcagccccaggccccggccccccacccacgtctgcgttgctgccccgcctgggccaggccccaaaggcaaggacaaagcagctgtcagggaacctccgccggagtcgaatttacgtgcagctgccggcaaccacaggttccaagatggtttgcgggggcttcgcgtgttccaagaactgcctgtgcgccctcaacctgctttacaccttggttagtctgctgctaattggaattgctgcgtggggcattggcttcgggctgatttccagtctccgagtggtcggcgtggtcattgcagtgggcatcttcttgttcctgattgctttagtgggtctgattggagctgtaaaacatcatcaggtgttgctatttttttatatgattattctgttacttgtatttattgttcagttttctgtatcttgcgcttgtttagccctgaaccaggagcaacagggtcagcttctggaggttggttggaacaatacggcaagtgctcgaaatgacatccagagaaatctaaactgctgtgggttccgaagtgttaacccaaatgacacctgtctggctagctgtgttaaaagtgaccactcgtgctcgccatgtgctccaatcataggagaatatgctggagaggttttgagatttgttggtggcattggcctgttcttcagttttacagagatcctgggtgtttggctgacctacagatacaggaaccagaaagacccccgcgcgaatcctagtgcattcctttgatgagaaaacaaggaagatttcctttcgtattatgatcttgttcactttctgtaattttctgttaagctccatttgccagtttaaggaaggaaacactatctggaaaagtaccttattgatagtggaattatatatttttactctatgtttctctacatgtttttttctttccgttgctgaaaaatatttgaaacttgtggtctctgaagctcggtggcacctggaatttactgtattcattgtcgggcactgtccactgtggcctttcttagcatttttacctgcagaaaaactttgtatggtaccactgtgttggttatatggtgaatctgaacgtacatctcactggtataattatatgtagcactgtgctgtgtagatagttcctactggaaaaagagtggaaatttattaaaatcagaaagtatgagatcctgttatgttaagggaaatccaaattcccaattttttttggtctttttaggaaagatgtgttgtggtaaaaagtgttagtataaaaatgataatttacttgtagtcttttatgattacaccaatgtattctagaaatagttatgtcttaggaaattgtggtttaatttttgacttttacaggtaagtgcaaaggagaagtggtttcatgaaatgttctaatgtataataacatttaccttcagcctccatcagaatggaacgagttttgagtaatcaggaagtatatctatatgatcttgatattgttttataataatttgaagtctaaaagactgcatttttaaacaagttagtattaatgcgttggcccacgtagcaaaaagatatttgattatcttaaaaattgttaaataccgttttcatgaaagttctcagtattgtaacagcaacttgtcaaacctaagcatatttgaatatgatctcccataatttgaaattgaaatcgtattgtgtggctctgtatattctgttaaaaaattaaaggacagaaacctttctttgtgtatgcatgtttgaattaaaagaaagtaatggaagaattgatcgatgaattaagtgaggtggaattcttttctttctgctttagcttctctctgttggacttagagctgggtattgctattttagtgtataatcaagctgtggaaataaatttccagcattaatgtcta

SEQ ID NO: 426731 - DNA, 1894 bp, Homo sapiens
aggggctgggcggggtcgggctcctgctccggctcagctgcggcggccgcaggttccaaagcgggtccgagccgccgccgcgcgcgcgccgcgcactgcagccccaggccccggccccccacccacgtctgcgttgctgccccgcctgggccaggccccaaaggcaaggacaaagcagctgtcagggaacctccgccggagtcgaatttacgtgcagctgccggcaaccacaggttccaagatggtttgcgggggcttcgcgtgttccaagaactgcctgtgcgccctcaacctgctttacaccttggttagtctgctgctaattggaattgctgcgtggggcattggcttcgggctgatttccagtctccgagtggtcggcgtggtcattgcagtgggcatcttcttgttcctgattgctttagtgggtctgattggagctgtaaaacatcatcaggtgttgctatttttttatatgattattctgttacttgtatttattgttcagttttctgtatcttgcgcttgtttagccctgaaccaggagcaacagggtcagcttctggaggttggttggaacaatacggcaagtgctcgaaatgacatccagagaaatctaaactgctgtgggttccgaagtgttaacccaaatgacacctgtctggctagctgtgttaaaagtgaccactcgtgctcgccatgtgctccaatcataggagaatatgctggagaggttttgagatttgttggtggcattggcctgttcttcagttttacagagatcctgggtgtttggctgacctacagatacaggaaccagaaagacccccgcgcgaatcctagtgcattcctttgatgagaaaacaaggaagatttcctttcgtattatgatcttgttcactttctgtaattttctgttaagctccatttgccagtttaaggaaggaaacactatctggaaaagtaccttattgatagtggaattatatatttttactctatgtttctctacatgtttttttctttccgttgctgaaaaatatttgaaacttgtggtctctgaagctcggtggcacctggaatttactgtattcattgtcgggcactgtccactgtggcctttcttagcatttttacctgcagaaaaactttgtatggtaccactgtgttggttatatggtgaatctgaacgtacatctcactggtataattatatgtagcactgtgctgtgtagatagttcctactggaaaaagagtggaaatttattaaaatcagaaagtatgagatcctgttatgttaagggaaatccaaattcccaattttttttggtctttttaggaaagatgtgttgtggtaaaaagtgttagtataaaaatgataatttacttgtagtcttttatgattacaccaatgtattctagaaatagttatgtcttaggaaattgtggtttaatttttgacttttacaggtaagtgcaaaggagaagtggtttcatgaaatgttctaatgtataataacatttaccttcagcctccatcagaatggaacgagttttgagtaatcaggaagtatatctatatgatcttgatattgttttataataatttgaagtctaaaagactgcatttttaaacaagttagtattaatgcgttggcccacgtagcaaaaagatatttgattatcttaaaaattgttaaataccgttttcatgaaagttctcagtattgtaacagcaacttgtcaaacctaagcatatttgaatatgatctcccataatttgaaattgaaatcgtattgtgtggctctgtatattctgttaaaaaattaaaggacagaaacctttctttgtgtatgcatgtttgaattaaaagaaagtaatggaagaattga

SEQ ID NO: 426732 - DNA, 1781 bp, Homo sapiens
gcgcaggttcaagcgggtcgagcgcggcgcgcgcggcatggccagggcggcctccaccacgtctgcgttgctgccccgcctgggccaggccccaaaggcaaggacaaagcagctgtcagggaacctccgccggagtcgaatttacgtgcagctgccggcaaccacaggttccaagatggtttgcgggggcttcgcgtgttccaagaactgcctgtgcgccctcaacctgctttacaccttggttagtctgctgctaattggaattgctgcgtggggcattggcttcgggctgatttccagtctccgagtggtcggcgtggtcattgcagtgggcatcttcttgttcctgattgctttagtgggtctgattggagctgtaaaacatcatcaggtgttgctatttttttatatgattattctgttacttgtatttattgttcagttttctgtatcttgcgcttgtttagccctgaaccaggagcaacagggtcagcttctggaggttggttggaacaatacggcaagtgctcgaaatgacatccagagaaatctaaactgctgtgggttccgaagtgttaacccaaatgacacctgtctggctagctgtgttaaaagtgaccactcgtgctcgccatgtgctccaatcataggagaatatgctggagaggttttgagatttgttggtggcattggcctgttcttcagttttacagagatcctgggtgtttggctgacctacagatacaggaaccagaaagacccccgcgcgaatcctagtgcattcctttgatgagaaaacaaggaagatttcctttcgtattatgatcttgttcactttctgtaattttctgttaagctccatttgccagtttaaggaaggaaacactatctggaaaagtaccttattgatagtggaattatatatttttactctatgtttctctacatgtttttttctttccgttgctgaaaaatatttgaaacttgtggtctctgaagctcggtggcacctggaatttactgtattcattgtcgggcactgtccactgtggcctttcttagcatttttacctgcagaaaaactttgtatggtaccactgtgttggttatatggtgaatctgaacgtacatctcactggtataattatatgtagcactgtgctgtgtagatagttcctactggaaaaagagtggaaatttattaaaatcagaaagtatgagatcctgttatgttaagggaaatccaaattcccaattttttttggtctttttaggaaagatgtgttgtggtaaaaagtgttagtataaaaatgataatttacttgtagtcttttatgattacaccaatgtattctagaaatagttatgtcttaggaaattgtggtttaatttttgacttttacaggtaagtgcaaaggagaagtggtttcatgaaatgttctaatgtataataacatttaccttcagcctccatcagaatggaacgagttttgagtaatcaggaagtatatctatatgatcttgatattgttttataataatttgaagtctaaaagactgcatttttaaacaagttagtattaatgcgttggcccacgtagcaaaaagatatttgattatcttaaaaattgttaaataccgttttcatgaaagttctcagtattgtaacagcaacttgtcaaacctaagcatatttgaatatgatctcccataatttgaaattgaaatcgtattgtgtggctctgtatattctgttaaaaaattaaaggacagaaaccttt

SEQ ID NO: 426733 - DNA, 1894 bp, Homo sapiens
ggatctcctccgagccccgccctccctcctcacctgctcctggggaaactacaccaaggccgccgctctggcctggggctccctcccacacggccttggccctctccccctcgccccgggaccgctccgcccctcccggatcccggtcggcggagcgcatttatttgcatatttctacctttgttcccccgcctgggccaggccccaaaggcaaggacaaagcagctgtcagggaacctccgccggagtcgaatttacgtgcagctgccggcaaccacaggttccaagatggtttgcgggggcttcgcgtgttccaagaactgcctgtgcgccctcaacctgctttacaccttggttagtctgctgctaattggaattgctgcgtggggcattggcttcgggctgatttccagtctccgagtggtcggcgtggtcattgcagtgggcatcttcttgttcctgattgctttagtgggtctgattggagctgtaaaacatcatcaggtgttgctatttttttatatgattattctgttacttgtatttattgttcagttttctgtatcttgcgcttgtttagccctgaaccaggagcaacagggtcagcttctggaggttggttggaacaatacggcaagtgctcgaaatgacatccagagaaatctaaactgctgtgggttccgaagtgttaacccaaatgacacctgtctggctagctgtgttaaaagtgaccactcgtgctcgccatgtgctccaatcataggagaatatgctggagaggttttgagatttgttggtggcattggcctgttcttcagttttacagagatcctgggtgtttggctgacctacagatacaggaaccagaaagacccccgcgcgaatcctagtgcattcctttgatgagaaaacaaggaagatttcctttcgtattatgatcttgttcactttctgtaattttctgttaagctccatttgccagtttaaggaaggaaacactatctggaaaagtaccttattgatagtggaattatatatttttactctatgtttctctacatgtttttttctttccgttgctgaaaaatatttgaaacttgtggtctctgaagctcggtggcacctggaatttactgtattcattgtcgggcactgtccactgtggcctttcttagcatttttacctgcagaaaaactttgtatggtaccactgtgttggttatatggtgaatctgaacgtacatctcactggtataattatatgtagcactgtgctgtgtagatagttcctactggaaaaagagtggaaatttattaaaatcagaaagtatgagatcctgttatgttaagggaaatccaaattcccaattttttttggtctttttaggaaagatgtgttgtggtaaaaagtgttagtataaaaatgataatttacttgtagtcttttatgattacaccaatgtattctagaaatagttatgtcttaggaaattgtggtttaatttttgacttttacaggtaagtgcaaaggagaagtggtttcatgaaatgttctaatgtataataacatttaccttcagcctccatcagaatggaacgagttttgagtaatcaggaagtatatctatatgatcttgatattgttttataataatttgaagtctaaaagactgcatttttaaacaagttagtattaatgcgttggcccacgtagcaaaaagatatttgattatcttaaaaattgttaaataccgttttcatgaaagttctcagtattgtaacagcaacttgtcaaacctaagcatatttgaatatgatctcccataatttgaaattgaaatcgtattgtgtggctctgtatattctgttaaaaaattaaaggacagaaaccttt

SEQ ID NO: 426734 - DNA, 1401 bp, Homo sapiens
  misc_feature (2)..(2): n is a, c, g, or t
  misc_feature (27)..(27): n is a, c, g, or t
  misc_feature (44)..(44): n is a, c, g, or t
tnccaaatcccttttaaaattgattantccttgttactttgtanttaattgttcaagttttcttgtatccttgcgctttgtttaagcccttgaaccaggaccaacagggtcagcttctggaggttggttggaacaatacggcaagtgctcgaaatgacatccagagaaatctaaactgctgtgggttccgaagtgttaacccaaatgacacctgtctggctagctgtgttaaaagtgaccactcgtgctcgccatgtgctccaatcataggagaatatgctggagaggttttgagatttgttggtggcattggcctgttcttcagttttacagagatcctgggtgtttggctgacctacagatacaggaaccagaaagacccccgcgcgaatcctagtgcattcctttgatgagaaaacaaggaagatttcctttcgtattatgatcttgttcactttctgtaattttctgttaagctccatttgccagtttaaggaaggaaacactatctggaaaagtaccttattgatagtggaattatatatttttactctatgtttctctacatgtttttttctttccgttgctgaaaaatatttgaaacttgtggtctctgaagctcggtggcacctggaatttactgtattcattgtcgggcactgtccactgtggcctttcttagcatttttacctgcagaaaaactttgtatggtaccactgtgttggttatatggtgaatctgaacgtacatctcactggtataattatatgtagcactgtgctgtgtagatagttcctactggaaaaagagtggaaatttattaaaatcagaaagtatgagatcctgttatgttaagggaaatccaaattcccaattttttttggtctttttaggaaagatgtgttgtggtaaaaagtgttagtataaaaatgataatttacttgtagtcttttatgattacaccaatgtattctagaaatagttatgtcttaggaaattgtggtttaatttttgacttttacaggtaagtgcaaaggagaagtggtttcatgaaatgttctaatgtataataacatttaccttcagcctccatcagaatggaacgagttttgagtaatcaggaagtatatctatatgatcttgatattgttttataataatttgaagtctaaaagactgcatttttaaacaagttagtattaatgcgttggcccacgtagcaaaaagatatttgattatcttaaaaattgttaaataccgttttcatgaaagttctcagtattgtaacagcaacttgtcaaacctaagcatatttgaatatgatctcccataatttgaaattgaaatcgtattgtgtggctctgtatattctgttaaaaaattaaaggacagaaaccttt

SEQ ID NO: 426735 - DNA, 659 bp, Homo sapiens
gaatcgtagtattgcgattaagggtagtcccacattgctcaagggaaaaggctcattttactaaatatgtctgatggacatagtagtcgccaatatagaacacaagactagcattgaacttgaacatggtatgtcgtatgtcatgcatatacactcgattatgctatttctcagatagataagtgactgttctacaaggtaattttagagtgactaaaattaattgacttttacaggtaagtgcaaaggagaagtggtttcatgaaatgttctaatgtataataacatttaccttcagcctccatcagaatggaacgagttttgagtaatcaggaagtatatctatatgatcttgatattgttttataataatttgaagtctaaaagactgcatttttaaacaagttagtattaatgcgttggcccacgtagcaaaaagatatttgattatcttaaaaattgttaaataccgttttcatgaaagttctcagtattgtaacagcaacttgtcaaacctaagcatatttgaatatgatctcccataatttgaaattgaaatcgtattgtgtggctctgtatattctgttaaaaaattaaaggacagaaacctttctttgtgtatgcatgtttgaattaaaagaaagtaatggaagaattga

SEQ ID NO: 426736 - DNA, 307 bp, Homo sapiens
cagaaagcaggttttttcttcttcaaaaccattctacctcattagcattcaagctagctgtggctctgatgatcacgtagcaaaaagatatttgattatcttaaaaattgttaaataccgttttcatgaaagttctcagtattgtaacagcaacttgtcaaacctaagcatatttgaatatgatctcccataatttgaaattgaaatcgtattgtgtggctctgtatattctgttaaaaaattaaaggacagaaacctttctttgtgtatgcatgtttgaattaaaagaaagtaatggaagaattga

SEQ ID NO: 426737 - DNA, 336 bp, Homo sapiens
aaagatgcaaagcgattgagagggtccaaagttattttattgatcaactgaataaatatacataaatgttactttctttttctttactttatttttttttccccattccagatcctgggtgtttggctgacctacagatacaggaaccagaaagacccccgcgcgaatcctagtgcattcctttgatgagaaaacaaggaagatttcctttcgtattatgatcttgttcactttctgtaattttctgttaagctccatttgccagtttaaggaaggaaacactatctggaaaagtaccttattgatagtggaattatatatttttactctatgttt

SEQ ID NO: 426738 - DNA, 584 bp, Homo sapiens
agttgtgtatataatgctcttcaatatgctcgtgtaactcgtggcagatacccctgagattaagcttatgaggagcttttcaaccagatgaattttcctaaggacttctgctttgctcttcaagaaatctgtgcctgagaacaccagagacctcaaattactttgtgaatagaactctgaaatgaagatgggcttcatccaatggactgcataaataaccggggattctgtacatgcattgagctctctcattgtctgtgtagagtgttatacttgggaatataaaggaggtgaccaaatcagtgtgaggaggtagatttggctcctctgcttctcacgggactatttccaccacccccagttagcaccattaactcctcctgagctctgataagagaatcaacatttctcaataatttcctccacaaattattaatgaaaataagaattattttgatggctctaacaatgacatttatatcacatgttttctctggagtattctataagttttatgttaaatcaataaagaccagatgcggccagccccccttcctttggttccaacactttgtggagttgcg

SEQ ID NO: 426739 - DNA, 2905 bp, Homo sapiens
caaggtggagaagcctcttccaactgcaggcagagcacaggtggccctgctactggctgcagctccagccctgcctccttctctagcatataaacaatccaacagcctcactgaatcactgctgtgcagggcaggaaagctccatgcacatagcccagcaaagagcaacacagagctgaaaggaagactcagaggagagagataagtaaggaaagtagtgatggctctcatcccagacttggccatggaaacctggcttctcctggctgtcagcctggtgctcctctatctatatggaacccattcacatggactttttaagaagcttggaattccagggcccacacctctgccttttttgggaaatattttgtcctaccataagggcttttgtatgtttgacatggaatgtcataaaaagtatggaaaagtgtggggcttttatgatggtcaacagcctgtgctggctatcacagatcctgacatgatcaaaacagtgctagtgaaagaatgttattctgtcttcacaaaccggaggccttttggtccagtgggatttatgaaaagtgccatctctatagctgaggatgaagaatggaagagattacgatcattgctgtctccaaccttcaccagtggaaaactcaaggagatggtccctatcattgcccagtatggagatgtgttggtgagaaatctgaggcgggaagcagagacaggcaagcctgtcaccttgaaagacgtctttggggcctacagcatggatgtgatcactagcacatcatttggagtgaacatcgactctctcaacaatccacaagacccctttgtggaaaacaccaagaagcttttaagatttgattttttggatccattctttctctcaataacagtctttccattcctcatcccaattcttgaagtattaaatatctgtgtgtttccaagagaagttacaaattttttaagaaaatctgtaaaaaggatgaaagaaagtcgcctcgaagatacacaaaagcaccgagtggatttccttcagctgatgattgactctcagaattcaaaagaaactgagtcccacaaagctctgtccgatctggagctcgtggcccaatcaattatctttatttttgctggctatgaaaccacgagcagtgttctctccttcattatgtatgaactggccactcaccctgatgtccagcagaaactgcaggaggaaattgatgcagttttacccaataaggcaccacccacctatgatactgtgctacagatggagtatcttgacatggtggtgaatgaaacgctcagattattcccaattgctatgagacttgagagggtctgcaaaaaagatgttgagatcaatgggatgttcattcccaaaggggtggtggtgatgattccaagctatgctcttcaccgtgacccaaagtactggacagagcctgagaagttcctccctgaaagattcagcaagaagaacaaggacaacatagatccttacatatacacaccctttggaagtggacccagaaactgcattggcatgaggtttgctctcatgaacatgaaacttgctctaatcagagtccttcagaacttctccttcaaaccttgtaaagaaacacagatccccctgaaattaagcttaggaggacttcttcaaccagaaaaacccgttgttctaaaggttgagtcaagggatggcaccgtaagtggagcctgaattttcctaaggacttctgctttgctcttcaagaaatctgtgcctgagaacaccagagacctcaaattactttgtgaatagaactctgaaatgaagatgggcttcatccaatggactgcataaataaccggggattctgtacatgcattgagctctctcattgtctgtgtagagtgttatacttgggaatataaaggaggtgaccaaatcagtgtgaggaggtagatttggctcctctgcttctcacgggactatttccaccacccccagttagcaccattaactcctcctgagctctgataagagaatcaacatttctcaataatttcctccacaaattattaatgaaaataagaattattttgatggctctaacaatgacatttatatcacatgttttctctggagtattctataagttttatgttaaatcaataaagaccactttacaaaagtattatcagatgctttcctgcacattaaggagaaatctatagaactgaatgagaaccaacaagtaaatatttttggtcattgtaatcactgttggcgtggggcctttgtcagaactagaatttgattattaacataggtgaaagttaatccactgtgactttgcccattgtttagaaagaatattcatagtttaattatgccttttttgatcaggcacagtggctcacgcctgtaatcctagcagtttgggaggctgagccgggtggatcgcctgaggtcaggagttcaagacaagcctggcctacatggttgaaaccccatctctactaaaaatacacaaattagctaggcatggtggactcgcctgtaatctcactacacaggaggctgaggcaggagaatcacttgaacctgggaggcggatgttgaagtgagctgagattgcaccactgcactccagtctgggtgagagtgagactcagtcttaaaaaaatatgcctttttgaagcacgtacattttgtaacaaagaactgaagctcttattatattattagttttgatttaatgttttcagcccatctcctttcatatttctgggagacagaaaacatgtttccctacacctcttgcattccatcctcaacacccaactgtctcgatgcaatgaacacttaataaaaaacagtcgattggtcaattgattgagcaataagcct

SEQ ID NO: 426740 - DNA, 615 bp, Homo sapiens
atggcccacattctcgaagaccttggggaaaactggattaaaatgatttgccttattctggttctgtaagatacacatcagaatgaaaccacccccagtgtacctctgaattgcttttctattcttttcccttagggatttgagggcttcacttagatttctcttcatctaaactgtgatgccctacattgatctgatttacctaaaatgtctttcctctcctttcagctctgtccgatctggagctcgtggcccaatcaattatctttatttttgctggctatgaaaccacgagcagtgttctctccttcattatgtatgaactggccactcaccctgatgtccagcagaaactgcaggaggaaattgatgcagttttacccaataaggcaccacccacctatgatactgtgctacagatggagtatcttgacatggtggtgaatgaaacgctcagattattcccaattgctatgagacttgagagggtctgcaaaaagctatgctcttcaccgtgacccaaagtactggacagagcctgagaagttcctccctgaaaggtacaaggcccctgggaagggagccctccctgaaccagcctggttcaagcatatt

SEQ ID NO: 426741 - DNA, 701 bp, Homo sapiens
tcaattgtaaatacactccttgttccccctactctaagaagagctgaaatgactctcttattaaaaccaccagcagtgttctttccttcactttatatgaactggccactcaccctgatgtccagcagaaactgcaaaaggagattgatgcagttttgcccaataagcaccacctacctatgatgccgtggtacagatggagtaccttgacatggtggtgaatgaaacactcagattattcccagttgctattagacttgagaggacttgcaagaaagatgttgaaatcaatggggtattcattcccaaagggtcaatggtggtgattccaacttatgctcttcaccatgacccaaagtactggacagagcctgaggagttccgccctgaaaggtacaagtctccagggaaatggagctcaccctgacccaggctggttcaagcatattctgcctctcttaatctacatgacaatcgtgtggttgtacaatcatttgcttgtaagtctttttatcacaaaaaagtgataattatcaaactttacaaaccacagactagaaaaaacgaaactacattcattcacagtcccagcacaagacaaagataatcaattatgtccctgtgggcatttttctacgcctatatagatttttaaacaagaaactatccactgacctatattactataaatatacatatat

SEQ ID NO: 426742 - DNA, 1532 bp, Homo sapiens
ggctgtgcagggcagggaagctccaggcaaacagcccagcaaacagcagcactcagctaaaaggaagactcacagaacacagttgaagaaggaaagtggcgatggacctcatcccaaatttggcggtggaaacctggcttctcctggctgtcagcctggtgctcctctatctatatgggacccgtacacatggactttttaagagactgggaattccagggcccacacctctgcctttgttgggaaatgttttgtcctatcgtcagggtctctggaaatttgacacagagtgctataaaaagtatggaaaaatgtggggtatctcttccctgtttggaccacattacccttcatcatatgaagccttgggtggctcctgtgtgagactcttgctgtgtgtcacaccctaatgaactagaacctaaggttgctgtgtgtcgtacaactagggaacgtatgaaggtcaactccctgtgctggccatcacagatcccgacgtgatcagaacagtgctagtgaaagaatgttattctgtcttcacaaatcgaaggtctttaggcccagtgggatttatgaaaagtgccatctctttagctgaggatgaagaatggaagagaatacggtcattgctgtctccaaccttcaccagcggaaaactcaaggagaaaagacatcacaaaattcattacaaaatgtcacttactgctccatgctggagaaagccatatccttctgggacttgagtctgcacatttaactacagcatctttggggcctacagcatggatgtgattactggcacatcatttggagtgaacatcgactctctcaacaatccacaagacccctttgtggagagcactaagaagttcctaaaatttggtttcttagatccattatttctctcaataatactctttccattccttaccccagtttttgaagcattaaatgtctctctgtttccaaaagataccataaattttttaagtaaatctgtaaacagaatgaagaaaagtcgcctcaacgacaaacaaaagcaccgactagatttccttcagctgatgattgactcccagaattcgaaagaaactgagtcccacaaagctctgtctgatctggagctcgcagcccagtcaataatcttcatttttgctggctatgaaaccaccagcagtgttctttccttcactttatatgaactggccactcaccctgatgtccagcagaaactgcaaaaggagattgatgcagttttgcccaataaggtgaggggatgacccctggagatgaagggaagaggtgaagccttagcaaaaatgcctcctcaccactccccaggagaatttttataaaaagcataatcactgattccttcactgacataatgtaggaagcctctgaggagaaaaacaaagggagaaacatagagaacggttgctactggcagaagcataagatctttgtacaatattgctggccctggttcacctgtttactgttatcacaataatgctaagtaaaaaaaaaaa

SEQ ID NO: 426743 - DNA, 1640 bp, Homo sapiens
ggctgtgcagggcagggaagctccaggcaaacagcccagcaaacagcagcactcagctaaaaggaagactcacagaacacagttgaagaaggaaagtggcgatggacctcatcccaaatttggcggtggaaacctggcttctcctggctgtcagcctggtgctcctctatctatatgggacccgtacacatggactttttaagagactgggaattccagggcccacacctctgcctttgttgggaaatgttttgtcctatcgtcagggtctctggaaatttgacacagagtgctataaaaagtatggaaaaatgtggggtatctcttccctgtttggaccacattacccttcatcatatgaagccttgggtggctcctgtgtgagactcttgctgtgtgtcacaccctaatgaactagaacctaaggttgctgtgtgtcgtacaactagggaacgtatgaaggtcaactccctgtgctggccatcacagatcccgacgtgatcagaacagtgctagtgaaagaatgttattctgtcttcacaaatcgaaggatttgtgcaacgaccagcaccatcaagatgcagacccattccgtcaccatgtggctccctcctgctgtcctacagtcacaacatggagtttgtctttttctctgacagtctttaggcccagtgggatttatgaaaagtgccatctctttagctgaggatgaagaatggaagagaatacggtcattgctgtctccaaccttcaccagcggaaaactcaaggagaaaagacatcacaaaattcattacaaaatgtcacttactgctccatgctggagaaagccatatccttctgggacttgagtctgcacatttaactacagcatctttggggcctacagcatggatgtgattactggcacatcatttggagtgaacatcgactctctcaacaatccacaagacccctttgtggagagcactaagaagttcctaaaatttggtttcttagatccattatttctctcaataatactctttccattccttaccccagtttttgaagcattaaatgtctctctgtttccaaaagataccataaattttttaagtaaatctgtaaacagaatgaagaaaagtcgcctcaacgacaaacaaaagcaccgactagatttccttcagctgatgattgactcccagaattcgaaagaaactgagtcccacaaagctctgtctgatctggagctcgcagcccagtcaataatcttcatttttgctggctatgaaaccaccagcagtgttctttccttcactttatatgaactggccactcaccctgatgtccagcagaaactgcaaaaggagattgatgcagttttgcccaataaggtgaggggatgacccctggagatgaagggaagaggtgaagccttagcaaaaatgcctcctcaccactccccaggagaatttttataaaaagcataatcactgattccttcactgacataatgtaggaagcctctgaggagaaaaacaaagggagaaacatagagaacggttgctactggcagaagcataagatctttgtacaatattgctggccctggttcacctgtttactgttatcacaataatgctaagtaaaaaaaaaaa

SEQ ID NO: 426744 - DNA, 2826 bp, Homo sapiens
  misc_feature (2)..(2): n is a, c, g, or t
angaagaaaaggtggacaaaaaagaggcggtacggtgcggaattcccgggatcaggaaagctccatgcacatagcccagcaaagagcaacacagagctgaaaggaagactcagaggagagagataagtaaggaaagtagtgatggctctcatcccagacttggccatggaaacctggcttctcctggctgtcagcctggtgctcctctatctatatggaacccattcacatggactttttaagaagcttggaattccagggcccacacctctgccttttttgggaaatattttgtcctaccataagggcttttgtatgtttgacatggaatgtcataaaaagtatggaaaagtgtggggcttttatgatggtcaacagcctgtgctggctatcacagatcctgacatgatcaaaacagtgctagtgaaagaatgttattctgtcttcacaaaccggaggccttttggtccagtgggatttatgaaaagtgccatctctatagctgaggatgaagaatggaagagattacgatcattgctgtctccaaccttcaccagtggaaaactcaaggagatggtccctatcattgcccagtatggagatgtgttggtgagaaatctgaggcgggaagcagagacaggcaagcctgtcaccttgaaagacgtctttggggcctacagcatggatgtgatcactagcacatcatttggagtgaacatcgactctctcaacaatccacaagacccctttgtggaaaacaccaagaagcttttaagatttgattttttggatccattctttctctcaataacagtctttccattcctcatcccaattcttgaagtattaaatatctgtgtgtttccaagagaagttacaaattttttaagaaaatctgtaaaaaggatgaaagaaagtcgcctcgaagatacacaaaagcaccgagtggatttccttcagctgatgattgactctcagaattcaaaagaaactgagtcccacaaagctctgtccgatctggagctcgtggcccaatcaattatctttatttttgctggctatgaaaccacgagcagtgttctctccttcattatgtatgaactggccactcaccctgatgtccagcagaaactgcaggaggaaattgatgcagttttacccaataaggcaccacccacctatgatactgtgctacagatggagtatcttgacatggtggtgaatgaaacgctcagattattcccaattgctatgagacttgagagggtctgcaaaaaagatgttgagatcaatgggatgttcattcccaaaggggtggtggtgatgattccaagctatgctcttcaccgtgacccaaagtactggacagagcctgagaagttcctccctgaaagattcagcaagaagaacaaggacaacatagatccttacatatacacaccctttggaagtggacccagaaactgcattggcatgaggtttgctctcatgaacatgaaacttgctctaatcagagtccttcagaacttctccttcaaaccttgtaaagaaacacagatccccctgaaattaagcttaggaggacttcttcaaccagaaaaacccgttgttctaaaggttgagtcaagggatggcaccgtaagtggagcctgaattttcctaaggacttctgctttgctcttcaagaaatctgtgcctgagaacaccagagacctcaaattactttgtgaatagaactctgaaatgaagatgggcttcatccaatggactgcataaataaccggggattctgtacatgcattgagctctctcattgtctgtgtagagtgttatacttgggaatataaaggaggtgaccaaatcagtgtgaggaggtagatttggctcctctgcttctcacgggactatttccaccacccccagttagcaccattaactcctcctgagctctgataagagaatcaacatttctcaataatttcctccacaaattattaatgaaaataagaattattttgatggctctaacaatgacatttatatcacatgttttctctggagtattctataagttttatgttaaatcaataaagaccactttacaaaagtattatcagatgctttcctgcacattaaggagaaatctatagaactgaatgagaaccaacaagtaaatatttttggtcattgtaatcactgttggcgtggggcctttgtcagaactagaatttgattattaacataggtgaaagttaatccactgtgactttgcccattgtttagaaagaatattcatagtttaattatgccttttttgatcaggcacagtggctcacgcctgtaatcctagcagtttgggaggctgagccgggtggatcgcctgaggtcaggagttcaagacaagcctggcctacatggttgaaaccccatctctactaaaaatacacaaattagctaggcatggtggactcgcctgtaatctcactacacaggaggctgaggcaggagaatcacttgaacctgggaggcggatgttgaagtgagctgagattgcaccactgcactccagtctgggtgagagtgagactcagtcttaaaaaaatatgcctttttgaagcacgtacattttgtaacaaagaactgaagctcttattatattattagttttgatttaatgttttcagcccatctcctttcatatttctgggagacagaaaacatgtttccctacacctcttgcattccatcctcaacacccaactgtctcgatgcaatgaacacttaataaaaaacagtcgattggtcaattgattgagcaataagcct

SEQ ID NO: 426745 - DNA, 3026 bp, Homo sapiens
agaactatcaaactcctgagccaacaacttaatatgactagcttacacaatagcttttatagtaaagatacctctttacggactccacttatgactccctaaagcccatgtcgaagcccccatcgctgggtcaatagtacttgccgcagtactcttaaaactaggcggctaaaaaaaaaaaaaaaaaaaaaaaaaaaaaaaaaaaaaaaaaaaaaaaaaaaaaaaaaaaaaacctcgtgccgaattcggcaccaggaaagctccatgcacatagcccagcaaagagcaacacagagctgaaaggaagactcagaggagagagataagtaaggaaagtagtgatggctctcatcccagacttggccatggaaacctggcttctcctggctgtcagcctggtgctcctctatctatatggaacccattcacatggactttttaagaagcttggaattccagggcccacacctctgccttttttgggaaatattttgtcctaccataagggcttttgtatgtttgacatggaatgtcataaaaagtatggaaaagtgtggggcttttatgatggtcaacagcctgtgctggctatcacagatcctgacatgatcaaaacagtgctagtgaaagaatgttattctgtcttcacaaaccggaggccttttggtccagtgggatttatgaaaagtgccatctctatagctgaggatgaagaatggaagagattacgatcattgctgtctccaaccttcaccagtggaaaactcaaggagatggtccctatcattgcccagtatggagatgtgttggtgagaaatctgaggcgggaagcagagacaggcaagcctgtcaccttgaaagacgtctttggggcctacagcatggatgtgatcactagcacatcatttggagtgaacatcgactctctcaacaatccacaagacccctttgtggaaaacaccaagaagcttttaagatttgattttttggatccattctttctctcaataacagtctttccattcctcatcccaattcttgaagtattaaatatctgtgtgtttccaagagaagttacaaattttttaagaaaatctgtaaaaaggatgaaagaaagtcgcctcgaagatacacaaaagcaccgagtggatttccttcagctgatgattgactctcagaattcaaaagaaactgagtcccacaaagctctgtccgatctggagctcgtggcccaatcaattatctttatttttgctggctatgaaaccacgagcagtgttctctccttcattatgtatgaactggccactcaccctgatgtccagcagaaactgcaggaggaaattgatgcagttttacccaataaggcaccacccacctatgatactgtgctacagatggagtatcttgacatggtggtgaatgaaacgctcagattattcccaattgctatgagacttgagagggtctgcaaaaaagatgttgagatcaatgggatgttcattcccaaaggggtggtggtgatgattccaagctatgctcttcaccgtgacccaaagtactggacagagcctgagaagttcctccctgaaagattcagcaagaagaacaaggacaacatagatccttacatatacacaccctttggaagtggacccagaaactgcattggcatgaggtttgctctcatgaacatgaaacttgctctaatcagagtccttcagaacttctccttcaaaccttgtaaagaaacacagatccccctgaaattaagcttaggaggacttcttcaaccagaaaaacccgttgttctaaaggttgagtcaagggatggcaccgtaagtggagcctgaattttcctaaggacttctgctttgctcttcaagaaatctgtgcctgagaacaccagagacctcaaattactttgtgaatagaactctgaaatgaagatgggcttcatccaatggactgcataaataaccggggattctgtacatgcattgagctctctcattgtctgtgtagagtgttatacttgggaatataaaggaggtgaccaaatcagtgtgaggaggtagatttggctcctctgcttctcacgggactatttccaccacccccagttagcaccattaactcctcctgagctctgataagagaatcaacatttctcaataatttcctccacaaattattaatgaaaataagaattattttgatggctctaacaatgacatttatatcacatgttttctctggagtattctataagttttatgttaaatcaataaagaccactttacaaaagtattatcagatgctttcctgcacattaaggagaaatctatagaactgaatgagaaccaacaagtaaatatttttggtcattgtaatcactgttggcgtggggcctttgtcagaactagaatttgattattaacataggtgaaagttaatccactgtgactttgcccattgtttagaaagaatattcatagtttaattatgccttttttgatcaggcacagtggctcacgcctgtaatcctagcagtttgggaggctgagccgggtggatcgcctgaggtcaggagttcaagacaagcctggcctacatggttgaaaccccatctctactaaaaatacacaaattagctaggcatggtggactcgcctgtaatctcactacacaggaggctgaggcaggagaatcacttgaacctgggaggcggatgttgaagtgagctgagattgcaccactgcactccagtctgggtgagagtgagactcagtcttaaaaaaatatgcctttttgaagcacgtacattttgtaacaaagaactgaagctcttattatattattagttttgatttaatgttttcagcccatctcctttcatatttctgggagacagaaaacatgtttccctacacctcttgcattccatcctcaacacccaactgtctcgatgcaatgaacacttaataaaaaacagtcgattggtcaattgattgagcaataagcct

SEQ ID NO: 426746 - DNA, 2874 bp, Homo sapiens
  misc_feature (2)..(2): n is a, c, g, or t
angaagaaaaggtggacaaaaaagaggcggtacggtgcggaattcccgggatcaggaaagctccatgcacatagcccagcaaagagcaacacagagctgaaaggaagactcagaggagagagataagtaaggaaagtagtgatggctctcatcccagacttggccatggaaacctggcttctcctggctgtcagcctggtgctcctctatctatatggaacccattcacatggactttttaagaagcttggaattccagggcccacacctctgccttttttgggaaatattttgtcctaccataagggcttttgtatgtttgacatggaatgtcataaaaagtatggaaaagtgtggggcttttatgatggtcaacagcctgtgctggctatcacagatcctgacatgatcaaaacagtgctagtgaaagaatgttattctgtcttcacaaaccggaggccttttggtccagtgggatttatgaaaagtgccatctctatagctgaggatgaagaatggaagagattacgatcattgctgtctccaaccttcaccagtggaaaactcaaggagatggtccctatcattgcccagtatggagatgtgttggtgagaaatctgaggcgggaagcagagacaggcaagcctgtcaccttgaaagacgtctttggggcctacagcatggatgtgatcactagcacatcatttggagtgaacatcgactctctcaacaatccacaagacccctttgtggaaaacaccaagaagcttttaagatttgattttttggatccattctttctctcaataacagtctttccattcctcatcccaattcttgaagtattaaatatctgtgtgtttccaagagaagttacaaattttttaagaaaatctgtaaaaaggatgaaagaaagtcgcctcgaagatacacaaaagcaccgagtggatttccttcagctgatgattgactctcagaattcaaaagaaactgagtcccacaaagctctgtccgatctggagctcgtggcccaatcaattatctttatttttgctggctatgaaaccacgagcagtgttctctccttcattatgtatgaactggccactcaccctgatgtccagcagaaactgcaggaggaaattgatgcagttttacccaataaggcaccacccacctatgatactgtgctacagatggagtatcttgacatggtggtgaatgaaacgctcagattattcccaattgctatgagacttgagagggtctgcaaaaaagatgttgagatcaatgggatgttcattcccaaaggggtggtggtgatgattccaagctatgctcttcaccgtgacccaaagtactggacagagcctgagaagttcctccctgaaagattcagcaagaagaacaaggacaacatagatccttacatatacacaccctttggaagtggacccagaaactgcattggcatgaggtttgctctcatgaacatgaaacttgctctaatcagagtccttcagaacttctccttcaaaccttgtaaagaaacacagatccccctgaaattaagcttaggaggacttcttcaaccagaaaaacccgttgttctaaaggttgagtcaagggatggcaccgtaagtggagcctgaattttcctaaggacttctgctttgctcttcaagaaatctgtgcctgagaacaccagagacctcaaattactttgtgaatagaactctgaaatgaagatgggcttcatccaatggactgcataaataaccggggattctgtacatgcattgagctctctcattgtctgtgtagagtgttatacttgggaatataaaggaggtgaccaaatcagtgtgaggaggtagatttggctcctctgcttctcacgggactatttccaccacccccagttagcaccattaactcctcctgagctctgataagagaatcaacatttctcaataatttcctccacaaattattaatgaaaataagaattattttgatggctctaacaatgacatttatatcacatgttttctctggagtattctataagttttatgttaaatcaataaagaccactttacaaaagtattatcagatgctttcctgcacattaaggagaaatctatagaactgaatgagaaccaacaagtaaatatttttggtcattgtaatcactgttggcgtggggcctttgtcagaactagaatttgattattaacataggtgaaagttaatccactgtgactttgcccattgtttagaaagaatattcatagtttaattatgccttttttgatcaggcacagtggctcacgcctgtaatcctagcagtttgggaggctgagccgggtggatcgcctgaggtcaggagttcaagacaagcctggcctacatggttgaaaccccatctctactaaaaatacacaaattagctaggcatggtggactcgcctgtaatctcactacacaggaggctgaggcaggagaatcacttgaacctgggaggcggatgttgaagtgagctgagattgcaccactgcactccagtctgggtgagagtgagactcagtcttaaaaaaatatgcctttttgaagcacgtacattttgtaacaaagaactgaagctcttattatattattagttttgatttaattggttttctacagccccaattccttgccttttccaattaattttccttggggaaggaaccaaggaaaaaccaattggttttccccttaaccaacccttccttttggccaattttcccatccctaacacccaactgtctcgatgcaatgaacacttaataaaaaacagtcgattggtcaattgattgagcaataagcct

SEQ ID NO: 426747 - DNA, 2807 bp, Homo sapiens
  misc_feature (2)..(2): n is a, c, g, or t
angaagaaaaggtggacaaaaaagaggcggtacggtgcggaattcccgggatcaggaaagctccatgcacatagcccagcaaagagcaacacagagctgaaaggaagactcagaggagagagataagtaaggaaagtagtgatggctctcatcccagacttggccatggaaacctggcttctcctggctgtcagcctggtgctcctctatctatatggaacccattcacatggactttttaagaagcttggaattccagggcccacacctctgccttttttgggaaatattttgtcctaccataagggcttttgtatgtttgacatggaatgtcataaaaagtatggaaaagtgtggggcttttatgatggtcaacagcctgtgctggctatcacagatcctgacatgatcaaaacagtgctagtgaaagaatgttattctgtcttcacaaaccggaggccttttggtccagtgggatttatgaaaagtgccatctctatagctgaggatgaagaatggaagagattacgatcattgctgtctccaaccttcaccagtggaaaactcaaggagatggtccctatcattgcccagtatggagatgtgttggtgagaaatctgaggcgggaagcagagacaggcaagcctgtcaccttgaaagacgtctttggggcctacagcatggatgtgatcactagcacatcatttggagtgaacatcgactctctcaacaatccacaagacccctttgtggaaaacaccaagaagcttttaagatttgattttttggatccattctttctctcaataacagtctttccattcctcatcccaattcttgaagtattaaatatctgtgtgtttccaagagaagttacaaattttttaagaaaatctgtaaaaaggatgaaagaaagtcgcctcgaagatacacaaaagcaccgagtggatttccttcagctgatgattgactctcagaattcaaaagaaactgagtcccacaaagctctgtccgatctggagctcgtggcccaatcaattatctttatttttgctggctatgaaaccacgagcagtgttctctccttcattatgtatgaactggccactcaccctgatgtccagcagaaactgcaggaggaaattgatgcagttttacccaataaggcaccacccacctatgatactgtgctacagatggagtatcttgacatggtggtgaatgaaacgctcagattattcccaattgctatgagacttgagagggtctgcaaaaaagatgttgagatcaatgggatgttcattcccaaaggggtggtggtgatgattccaagctatgctcttcaccgtgacccaaagtactggacagagcctgagaagttcctccctgaaagattcagcaagaagaacaaggacaacatagatccttacatatacacaccctttggaagtggacccagaaactgcattggcatgaggtttgctctcatgaacatgaaacttgctctaatcagagtccttcagaacttctccttcaaaccttgtaaagaaacacagatccccctgaaattaagcttaggaggacttcttcaaccagaaaaacccgttgttctaaaggttgagtcaagggatggcaccgtaagtggagcctgaattttcctaaggacttctgctttgctcttcaagaaatctgtgcctgagaacaccagagacctcaaattactttgtgaatagaactctgaaatgaagatgggcttcatccaatggactgcataaataaccggggctctctcattgtctgtgtagagtgttatacttgggaatataaaggaggtgaccaaatcagtgtgaggaggtagatttggctcctctgcttctcacgggactatttccaccacccccagttagcaccattaactcctcctgagctctgataagagaatcaacatttctcaataatttcctccacaaattattaatgaaaataagaattattttgatggctctaacaatgacatttatatcacatgttttctctggagtattctataagttttatgttaaatcaataaagaccactttacaaaagtattatcagatgctttcctgcacattaaggagaaatctatagaactgaatgagaaccaacaagtaaatatttttggtcattgtaatcactgttggcgtggggcctttgtcagaactagaatttgattattaacataggtgaaagttaatccactgtgactttgcccattgtttagaaagaatattcatagtttaattatgccttttttgatcaggcacagtggctcacgcctgtaatcctagcagtttgggaggctgagccgggtggatcgcctgaggtcaggagttcaagacaagcctggcctacatggttgaaaccccatctctactaaaaatacacaaattagctaggcatggtggactcgcctgtaatctcactacacaggaggctgaggcaggagaatcacttgaacctgggaggcggatgttgaagtgagctgagattgcaccactgcactccagtctgggtgagagtgagactcagtcttaaaaaaatatgcctttttgaagcacgtacattttgtaacaaagaactgaagctcttattatattattagttttgatttaatgttttcagcccatctcctttcatatttctgggagacagaaaacatgtttccctacacctcttgcattccatcctcaacacccaactgtctcgatgcaatgaacacttaataaaaaacagtcgattggtcaattgattgagcaataagcct

SEQ ID NO: 426748 - DNA, 2146 bp, Homo sapiens
  misc_feature (2)..(2): n is a, c, g, or t
angaagaaaaggtggacaaaaaagaggcggtacggtgcggaattcccgggatcaggaaagctccatgcacatagcccagcaaagagcaacacagagctgaaaggaagactcagaggagagagataagtaaggaaagtagtgatggctctcatcccagacttggccatggaaacctggcttctcctggctgtcagcctggtgctcctctatctatatggaacccattcacatggactttttaagaagcttggaattccagggcccacacctctgccttttttgggaaatattttgtcctaccataagggcttttgtatgtttgacatggaatgtcataaaaagtatggaaaagtgtggggcttttatgatggtcaacagcctgtgctggctatcacagatcctgacatgatcaaaacagtgctagtgaaagaatgttattctgtcttcacaaaccggaggccttttggtccagtgggatttatgaaaagtgccatctctatagctgaggatgaagaatggaagagattacgatcattgctgtctccaaccttcaccagtggaaaactcaaggagatggtccctatcattgcccagtatggagatgtgttggtgagaaatctgaggcgggaagcagagacaggcaagcctgtcaccttgaaagacgtctttggggcctacagcatggatgtgatcactagcacatcatttggagtgaacatcgactctctcaacaatccacaagacccctttgtggaaaacaccaagaagcttttaagatttgattttttggatccattctttctctcaataacagtctttccattcctcatcccaattcttgaagtattaaatatctgtgtgtttccaagagaagttacaaattttttaagaaaatctgtaaaaaggatgaaagaaagtcgcctcgaagatacacaaaagcaccgagtggatttccttcagctgatgattgactctcagaattcaaaagaaactgagtcccacaaagctctgtccgatctggagctcgtggcccaatcaattatctttatttttgctggctatgaaaccacgagcagtgttctctccttcattatgtatgaactggccactcaccctgatgtccagcagaaactgcaggaggaaattgatgcagttttacccaataaggcaccacccacctatgatactgtgctacagatggagtatcttgacatggtggtgaatgaaacgctcagattattcccaattgctatgagacttgagagggtctgcaaaaaagatgttgagatcaatgggatgttcattcccaaaggggtggtggtgatgattccaagctatgctcttcaccgtgacccaaagtactggacagagcctgagaagttcctccctgaaagattcagcaagaagaacaaggacaacatagatccttacatatacacaccctttggaagtggacccagaaactgcattggcatgaggtttgctctcatgaacatgaaacttgctctaatcagagtccttcagaacttctccttcaaaccttgtaaagaaacacagatccccctgaaattaagcttaggaggacttcttcaaccagaaaaacccgttgttctaaaggttgagtcaagggatggcaccgtaagtggagcctgaattttcctaaggacttctgctttgctcttcaagaaatctgtgcctgagaacaccagagacctcaaattactttgtgaatagaactctgaaatgaagatgggcttcatccaatggactgcataaataaccggggattctgtacatgcattgagctctctcattgtctgtgtagagtgttatacttgggaatataaaggaggtgaccaaatcagtgtgaggaggtagatttggctcctctgcttctcacgggactatttccaccacccccagttagcaccattaactcctcctgagctctgataagagaatcaacatttctcaataatttcctccacaaattattaatgaaaataagaattattttgatggctctaacaatgacatttatatcacatgttttctctggagtattctataagttttatgttaaatcaataaagaccagatgcggccagccccccttcctttggttccaacactttgtggagttgcg

SEQ ID NO: 426749 - DNA, 2150 bp, Homo sapiens
  misc_feature (2)..(2): n is a, c, g, or t
angaagaaaaggtggacaaaaaagaggcggtacggtgcggaattcccgggatcaggaaagctccatgcacatagcccagcaaagagcaacacagagctgaaaggaagactcagaggagagagataagtaaggaaagtagtgatggctctcatcccagacttggccatggaaacctggcttctcctggctgtcagcctggtgctcctctatctatatggaacccattcacatggactttttaagaagcttggaattccagggcccacacctctgccttttttgggaaatattttgtcctaccataagggcttttgtatgtttgacatggaatgtcataaaaagtatggaaaagtgtggggcttttatgatggtcaacagcctgtgctggctatcacagatcctgacatgatcaaaacagtgctagtgaaagaatgttattctgtcttcacaaaccggaggccttttggtccagtgggatttatgaaaagtgccatctctatagctgaggatgaagaatggaagagattacgatcattgctgtctccaaccttcaccagtggaaaactcaaggagatggtccctatcattgcccagtatggagatgtgttggtgagaaatctgaggcgggaagcagagacaggcaagcctgtcaccttgaaagacgtctttggggcctacagcatggatgtgatcactagcacatcatttggagtgaacatcgactctctcaacaatccacaagacccctttgtggaaaacaccaagaagcttttaagatttgattttttggatccattctttctctcaataacagtctttccattcctcatcccaattcttgaagtattaaatatctgtgtgtttccaagagaagttacaaattttttaagaaaatctgtaaaaaggatgaaagaaagtcgcctcgaagatacacaaaagcaccgagtggatttccttcagctgatgattgactctcagaattcaaaagaaactgagtcccacaaagctctgtccgatctggagctcgtggcccaatcaattatctttatttttgctggctatgaaaccacgagcagtgttctctccttcattatgtatgaactggccactcaccctgatgtccagcagaaactgcaggaggaaattgatgcagttttacccaataaggcaccacccacctatgatactgtgctacagatggagtatcttgacatggtggtgaatgaaacgctcagattattcccaattgctatgagacttgagagggtctgcaaaaaagatgttgagatcaatgggatgttcattcccaaaggggtggtggtgatgattccaagctatgctcttcaccgtgacccaaagtactggacagagcctgagaagttcctccctgaaagattcagcaagaagaacaaggacaacatagatccttacatatacacaccctttggaagtggacccagaaactgcattggcatgaggtttgctctcatgaacatgaaacttgctctaatcagagtccttcagaacttctccttcaaaccttgtaaagaaacacagatccccctgaaattaagcttaggaggacttcttcaaccagaaaaacccgttgttctaaaggttgagtcaagggatggcaccgtaagtggagcctgaattttcctaaggacttctgctttgctcttcaagaaatctgtgcctgagaacaccagagacctcaaattactttgtgaatagaactctgaaatgaagatgggcttcatccaatggactgcataaataaccggggattctgtacatgcattgagctctctcattgtctgtgtagagtgttatacttgggaatataaaggaggtgaccaaatcagtgtgaggaggtagatttggctcctctgcttctcacgggactatttccaccacccccagttagcaccattaactcctcctgagctctgataagagaatcaacatttctcaataatttcctccacaaattattaatgaaaataagaattattttgatggctctaacaatgacatttatatcacatgttttctctggagtattctataagttttatgttaaatcaataaagaccagctgcggccgacgttcacgttaatgcctactccccggtcgcccacccccatac

SEQ ID NO: 426750 - DNA, 2138 bp, Homo sapiens
  misc_feature (2)..(2): n is a, c, g, or t
angaagaaaaggtggacaaaaaagaggcggtacggtgcggaattcccgggatcaggaaagctccatgcacatagcccagcaaagagcaacacagagctgaaaggaagactcagaggagagagataagtaaggaaagtagtgatggctctcatcccagacttggccatggaaacctggcttctcctggctgtcagcctggtgctcctctatctatatggaacccattcacatggactttttaagaagcttggaattccagggcccacacctctgccttttttgggaaatattttgtcctaccataagggcttttgtatgtttgacatggaatgtcataaaaagtatggaaaagtgtggggcttttatgatggtcaacagcctgtgctggctatcacagatcctgacatgatcaaaacagtgctagtgaaagaatgttattctgtcttcacaaaccggaggccttttggtccagtgggatttatgaaaagtgccatctctatagctgaggatgaagaatggaagagattacgatcattgctgtctccaaccttcaccagtggaaaactcaaggagatggtccctatcattgcccagtatggagatgtgttggtgagaaatctgaggcgggaagcagagacaggcaagcctgtcaccttgaaagacgtctttggggcctacagcatggatgtgatcactagcacatcatttggagtgaacatcgactctctcaacaatccacaagacccctttgtggaaaacaccaagaagcttttaagatttgattttttggatccattctttctctcaataacagtctttccattcctcatcccaattcttgaagtattaaatatctgtgtgtttccaagagaagttacaaattttttaagaaaatctgtaaaaaggatgaaagaaagtcgcctcgaagatacacaaaagcaccgagtggatttccttcagctgatgattgactctcagaattcaaaagaaactgagtcccacaaagctctgtccgatctggagctcgtggcccaatcaattatctttatttttgctggctatgaaaccacgagcagtgttctctccttcattatgtatgaactggccactcaccctgatgtccagcagaaactgcaggaggaaattgatgcagttttacccaataaggcaccacccacctatgatactgtgctacagatggagtatcttgacatggtggtgaatgaaacgctcagattattcccaattgctatgagacttgagagggtctgcaaaaaagatgttgagatcaatgggatgttcattcccaaaggggtggtggtgatgattccaagctatgctcttcaccgtgacccaaagtactggacagagcctgagaagttcctccctgaaagattcagcaagaagaacaaggacaacatagatccttacatatacacaccctttggaagtggacccagaaactgcattggcatgaggtttgctctcatgaacatgaaacttgctctaatcagagtccttcagaacttctccttcaaaccttgtaaagaaacacagatccccctgaaattaagcttaggaggacttcttcaaccagaaaaacccgttgttctaaaggttgagtcaagggatggcaccgtaagtggagcctgaattttcctaaggacttctgctttgctcttcaagaaatctgtgcctgagaacaccagagacctcaaattactttgtgaatagaactctgaaatgaagatgggcttcatccaatggactgcataaataaccggggctctctcattgtctgtgtagagtgttatacttgggaatataaaggaggtgaccaaatcagtgtgaggaggtagatttggctcctctgcttctcacgggactatttccaccacccccagttagcaccattaactcctcctgagctctgataagagaatcaacatttctcaataatttcctccacaaattattaatgaaaataagaattattttgatggctctaacaatgacatttatatcacatgttttctctggagtattctataagttttatgttaaatcaataaagaccaagatgcggccggcccgcaaaattaaataaatcttgacacccgccatccgcgtgccactct

SEQ ID NO: 426751 - DNA, 2151 bp, Homo sapiens
  misc_feature (2)..(2): n is a, c, g, or t
  misc_feature (2111)..(2111): n is a, c, g, or t
  misc_feature (2127)..(2128): n is a, c, g, or t
angaagaaaaggtggacaaaaaagaggcggtacggtgcggaattcccgggatcaggaaagctccatgcacatagcccagcaaagagcaacacagagctgaaaggaagactcagaggagagagataagtaaggaaagtagtgatggctctcatcccagacttggccatggaaacctggcttctcctggctgtcagcctggtgctcctctatctatatggaacccattcacatggactttttaagaagcttggaattccagggcccacacctctgccttttttgggaaatattttgtcctaccataagggcttttgtatgtttgacatggaatgtcataaaaagtatggaaaagtgtggggcttttatgatggtcaacagcctgtgctggctatcacagatcctgacatgatcaaaacagtgctagtgaaagaatgttattctgtcttcacaaaccggaggccttttggtccagtgggatttatgaaaagtgccatctctatagctgaggatgaagaatggaagagattacgatcattgctgtctccaaccttcaccagtggaaaactcaaggagatggtccctatcattgcccagtatggagatgtgttggtgagaaatctgaggcgggaagcagagacaggcaagcctgtcaccttgaaagacgtctttggggcctacagcatggatgtgatcactagcacatcatttggagtgaacatcgactctctcaacaatccacaagacccctttgtggaaaacaccaagaagcttttaagatttgattttttggatccattctttctctcaataacagtctttccattcctcatcccaattcttgaagtattaaatatctgtgtgtttccaagagaagttacaaattttttaagaaaatctgtaaaaaggatgaaagaaagtcgcctcgaagatacacaaaagcaccgagtggatttccttcagctgatgattgactctcagaattcaaaagaaactgagtcccacaaagctctgtccgatctggagctcgtggcccaatcaattatctttatttttgctggctatgaaaccacgagcagtgttctctccttcattatgtatgaactggccactcaccctgatgtccagcagaaactgcaggaggaaattgatgcagttttacccaataaggcaccacccacctatgatactgtgctacagatggagtatcttgacatggtggtgaatgaaacgctcagattattcccaattgctatgagacttgagagggtctgcaaaaaagatgttgagatcaatgggatgttcattcccaaaggggtggtggtgatgattccaagctatgctcttcaccgtgacccaaagtactggacagagcctgagaagttcctccctgaaagattcagcaagaagaacaaggacaacatagatccttacatatacacaccctttggaagtggacccagaaactgcattggcatgaggtttgctctcatgaacatgaaacttgctctaatcagagtccttcagaacttctccttcaaaccttgtaaagaaacacagatccccctgaaattaagcttaggaggacttcttcaaccagaaaaacccgttgttctaaaggttgagtcaagggatggcaccgtaagtggagcctgaattttcctaaggacttctgctttgctcttcaagaaatctgtgcctgagaacaccagagacctcaaattactttgtgaatagaactctgaaatgaagatgggcttcatccaatggactgcataaataaccggggattctgtacatgcattgagctctctcattgtctgtgtagagtgttatacttgggaatataaaggaggtgaccaaatcagtgtgaggaggtagatttggctcctctgcttctcacgggactatttccaccacccccagttagcaccattaactcctcctgagctctgataagagaatcaacatttctcaataatttcctccacaaattattaatgaaaataagaattattttgatggctctaacaatgacatttatatcacatgttttctctggagtattctataagttttatgttaaatcaataaagaccagcgtcggccgaagngcggtttttttttttnnttctcccctcccgcagggcgata

SEQ ID NO: 426752 - DNA, 1785 bp, Homo sapiens
  misc_feature (2)..(2): n is a, c, g, or t
angaagaaaaggtggacaaaaaagaggcggtacggtgcggaattcccgggatcaggaaagctccatgcacatagcccagcaaagagcaacacagagctgaaaggaagactcagaggagagagataagtaaggaaagtagtgatggctctcatcccagacttggccatggaaacctggcttctcctggctgtcagcctggtgctcctctatctatatggaacccattcacatggactttttaagaagcttggaattccagggcccacacctctgccttttttgggaaatattttgtcctaccataagggcttttgtatgtttgacatggaatgtcataaaaagtatggaaaagtgtggggcttttatgatggtcaacagcctgtgctggctatcacagatcctgacatgatcaaaacagtgctagtgaaagaatgttattctgtcttcacaaaccggaggccttttggtccagtgggatttatgaaaagtgccatctctatagctgaggatgaagaatggaagagattacgatcattgctgtctccaaccttcaccagtggaaaactcaaggagatggtccctatcattgcccagtatggagatgtgttggtgagaaatctgaggcgggaagcagagacaggcaagcctgtcaccttgaaagacgtctttggggcctacagcatggatgtgatcactagcacatcatttggagtgaacatcgactctctcaacaatccacaagacccctttgtggaaaacaccaagaagcttttaagatttgattttttggatccattctttctctcaataacagtctttccattcctcatcccaattcttgaagtattaaatatctgtgtgtttccaagagaagttacaaattttttaagaaaatctgtaaaaaggatgaaagaaagtcgcctcgaagatacacaaaagcaccgagtggatttccttcagctgatgattgactctcagaattcaaaagaaactgagtcccacaaagctctgtccgatctggagctcgtggcccaatcaattatctttatttttgctggctatgaaaccacgagcagtgttctctccttcattatgtatgaactggccactcaccctgatgtccagcagaaactgcaggaggaaattgatgcagttttacccaataaggcaccacccacctatgatactgtgctacagatggagtatcttgacatggtggtgaatgaaacgctcagattattcccaattgctatgagacttgagagggtctgcaaaaaagatgttgagatcaatgggatgttcattcccaaaggggtggtggtgatgattccaagctatgctcttcaccgtgacccaaagtactggacagagcctgagaagttcctccctgaaagattcagcaagaagaacaaggacaacatagatccttacatatacacaccctttggaagtggacccagaaactgcattggcatgaggtttgctctcatgaacatgaaacttgctctaatcagagtccttcagaacttctccttcaaaccttgtaaagaaacacagatccccctgaaattaagcttaggaggacttcttcaaccagaaaaacccgttgttctaaaggttgagtcaagggatggcaccgtaagtggagcctgaattttcctaaggacttctgctttgctcttcaagaaatctgtgcctgagaacaccagagacctcaaattactttgtgaatagaactctgaaatgaagatgggcttcatccaatggactgcataaataaccggg

SEQ ID NO: 426753 - DNA, 2987 bp, Homo sapiens
agaactatcaaactcctgagccaacaacttaatatgactagcttacacaatagcttttatagtaaagatacctctttacggactccacttatgactccctaaagcccatgtcgaagcccccatcgctgggtcaatagtacttgccgcagtactcttaaaactaggcggctaaaaaaaaaaaaaaaaaaaaaaaaaaaaaaaaaaaaaaaaaaaaaaaaaaaaaaaaaaaaaacctcgtgccgaattcggcaccaggaaagctccatgcacatagcccagcaaagagcaacacagagctgaaaggaagactcagaggagagagataagtaaggaaagtagtgatggctctcatcccagacttggccatggaaacctggcttctcctggctgtcagcctggtgctcctctatctatatggaacccattcacatggactttttaagaagcttggaattccagggcccacacctctgccttttttgggaaatattttgtcctaccataagggcttttgtatgtttgacatggaatgtcataaaaagtatggaaaagtgtggggcttttatgatggtcaacagcctgtgctggctatcacagatcctgacatgatcaaaacagtgctagtgaaagaatgttattctgtcttcacaaaccggaggccttttggtccagtgggatttatgaaaagtgccatctctatagctgaggatgaagaatggaagagattacgatcattgctgtctccaaccttcaccagtggaaaactcaaggagagaaatctgaggcgggaagcagagacaggcaagcctgtcaccttgaaagacgtctttggggcctacagcatggatgtgatcactagcacatcatttggagtgaacatcgactctctcaacaatccacaagacccctttgtggaaaacaccaagaagcttttaagatttgattttttggatccattctttctctcaataacagtctttccattcctcatcccaattcttgaagtattaaatatctgtgtgtttccaagagaagttacaaattttttaagaaaatctgtaaaaaggatgaaagaaagtcgcctcgaagatacacaaaagcaccgagtggatttccttcagctgatgattgactctcagaattcaaaagaaactgagtcccacaaagctctgtccgatctggagctcgtggcccaatcaattatctttatttttgctggctatgaaaccacgagcagtgttctctccttcattatgtatgaactggccactcaccctgatgtccagcagaaactgcaggaggaaattgatgcagttttacccaataaggcaccacccacctatgatactgtgctacagatggagtatcttgacatggtggtgaatgaaacgctcagattattcccaattgctatgagacttgagagggtctgcaaaaaagatgttgagatcaatgggatgttcattcccaaaggggtggtggtgatgattccaagctatgctcttcaccgtgacccaaagtactggacagagcctgagaagttcctccctgaaagattcagcaagaagaacaaggacaacatagatccttacatatacacaccctttggaagtggacccagaaactgcattggcatgaggtttgctctcatgaacatgaaacttgctctaatcagagtccttcagaacttctccttcaaaccttgtaaagaaacacagatccccctgaaattaagcttaggaggacttcttcaaccagaaaaacccgttgttctaaaggttgagtcaagggatggcaccgtaagtggagcctgaattttcctaaggacttctgctttgctcttcaagaaatctgtgcctgagaacaccagagacctcaaattactttgtgaatagaactctgaaatgaagatgggcttcatccaatggactgcataaataaccggggattctgtacatgcattgagctctctcattgtctgtgtagagtgttatacttgggaatataaaggaggtgaccaaatcagtgtgaggaggtagatttggctcctctgcttctcacgggactatttccaccacccccagttagcaccattaactcctcctgagctctgataagagaatcaacatttctcaataatttcctccacaaattattaatgaaaataagaattattttgatggctctaacaatgacatttatatcacatgttttctctggagtattctataagttttatgttaaatcaataaagaccactttacaaaagtattatcagatgctttcctgcacattaaggagaaatctatagaactgaatgagaaccaacaagtaaatatttttggtcattgtaatcactgttggcgtggggcctttgtcagaactagaatttgattattaacataggtgaaagttaatccactgtgactttgcccattgtttagaaagaatattcatagtttaattatgccttttttgatcaggcacagtggctcacgcctgtaatcctagcagtttgggaggctgagccgggtggatcgcctgaggtcaggagttcaagacaagcctggcctacatggttgaaaccccatctctactaaaaatacacaaattagctaggcatggtggactcgcctgtaatctcactacacaggaggctgaggcaggagaatcacttgaacctgggaggcggatgttgaagtgagctgagattgcaccactgcactccagtctgggtgagagtgagactcagtcttaaaaaaatatgcctttttgaagcacgtacattttgtaacaaagaactgaagctcttattatattattagttttgatttaatgttttcagcccatctcctttcatatttctgggagacagaaaacatgtttccctacacctcttgcattccatcctcaacacccaactgtctcgatgcaatgaacacttaataaaaaacagtcgattggtcaattgattgagcaataagcct

SEQ ID NO: 426754 - DNA, 2972 bp, Homo sapiens
agaactatcaaactcctgagccaacaacttaatatgactagcttacacaatagcttttatagtaaagatacctctttacggactccacttatgactccctaaagcccatgtcgaagcccccatcgctgggtcaatagtacttgccgcagtactcttaaaactaggcggctaaaaaaaaaaaaaaaaaaaaaaaaaaaaaaaaaaaaaaaaaaaaaaaaaaaaaaaaaaaaaacctcgtgccgaattcggcaccaggaaagctccatgcacatagcccagcaaagagcaacacagagctgaaaggaagactcagaggagagagataagtaaggaaagtagtgatggctctcatcccagacttggccatggaaacctggcttctcctggctgtcagcctggtgctcctctatctatatggaacccattcacatggactttttaagaagcttggaattccagggcccacacctctgccttttttgggaaatattttgtcctaccataagggcttttgtatgtttgacatggaatgtcataaaaagtatggaaaagtgtggggcttttatgatggtcaacagcctgtgctggctatcacagatcctgacatgatcaaaacagtgctagtgaaagaatgttattctgtcttcacaaaccggaggccttttggtccagtgggatttatgaaaagtgccatctctatagctgaggatgaagaatggaagagattacgatcattgctgtctccaaccttcaccagtggaaaactcaaggagatggtccctatcattgcccagtatggagatgtgttggtgagaaatctgaggcgggaagcagagacaggcaagcctgtcaccttgaaagacgtctttggggcctacagcatggatgtgatcactagcacatcatttggagtgaacatcgactctctcaacaatccacaagacccctttgtggaaacagtctttccattcctcatcccaattcttgaagtattaaatatctgtgtgtttccaagagaagttacaaattttttaagaaaatctgtaaaaaggatgaaagaaagtcgcctcgaagatacacaaaagcaccgagtggatttccttcagctgatgattgactctcagaattcaaaagaaactgagtcccacaaagctctgtccgatctggagctcgtggcccaatcaattatctttatttttgctggctatgaaaccacgagcagtgttctctccttcattatgtatgaactggccactcaccctgatgtccagcagaaactgcaggaggaaattgatgcagttttacccaataaggcaccacccacctatgatactgtgctacagatggagtatcttgacatggtggtgaatgaaacgctcagattattcccaattgctatgagacttgagagggtctgcaaaaaagatgttgagatcaatgggatgttcattcccaaaggggtggtggtgatgattccaagctatgctcttcaccgtgacccaaagtactggacagagcctgagaagttcctccctgaaagattcagcaagaagaacaaggacaacatagatccttacatatacacaccctttggaagtggacccagaaactgcattggcatgaggtttgctctcatgaacatgaaacttgctctaatcagagtccttcagaacttctccttcaaaccttgtaaagaaacacagatccccctgaaattaagcttaggaggacttcttcaaccagaaaaacccgttgttctaaaggttgagtcaagggatggcaccgtaagtggagcctgaattttcctaaggacttctgctttgctcttcaagaaatctgtgcctgagaacaccagagacctcaaattactttgtgaatagaactctgaaatgaagatgggcttcatccaatggactgcataaataaccggggattctgtacatgcattgagctctctcattgtctgtgtagagtgttatacttgggaatataaaggaggtgaccaaatcagtgtgaggaggtagatttggctcctctgcttctcacgggactatttccaccacccccagttagcaccattaactcctcctgagctctgataagagaatcaacatttctcaataatttcctccacaaattattaatgaaaataagaattattttgatggctctaacaatgacatttatatcacatgttttctctggagtattctataagttttatgttaaatcaataaagaccactttacaaaagtattatcagatgctttcctgcacattaaggagaaatctatagaactgaatgagaaccaacaagtaaatatttttggtcattgtaatcactgttggcgtggggcctttgtcagaactagaatttgattattaacataggtgaaagttaatccactgtgactttgcccattgtttagaaagaatattcatagtttaattatgccttttttgatcaggcacagtggctcacgcctgtaatcctagcagtttgggaggctgagccgggtggatcgcctgaggtcaggagttcaagacaagcctggcctacatggttgaaaccccatctctactaaaaatacacaaattagctaggcatggtggactcgcctgtaatctcactacacaggaggctgaggcaggagaatcacttgaacctgggaggcggatgttgaagtgagctgagattgcaccactgcactccagtctgggtgagagtgagactcagtcttaaaaaaatatgcctttttgaagcacgtacattttgtaacaaagaactgaagctcttattatattattagttttgatttaatgttttcagcccatctcctttcatatttctgggagacagaaaacatgtttccctacacctcttgcattccatcctcaacacccaactgtctcgatgcaatgaacacttaataaaaaacagtcgattggtcaattgattgagcaataagcct

SEQ ID NO: 426755 - DNA, 2087 bp, Homo sapiens
  misc_feature (42)..(43): n is a, c, g, or t
  misc_feature (48)..(48): n is a, c, g, or t
ggtctgtgaacgtttctaatgatgtggataagaggggctagnntgacngactctcttatttaccaccgctaccagtctttccattcctcatcccaattcttgaagtattaaatatctgtgtgtttccaagagaagttacaaattttttaagaaaatctgtaaaaaggatgaaagaaagtcgcctcgaagatacacaaaagcaccgagtggatttccttcagctgatgattgactctcagaattcaaaagaaactgagtcccacaaagctctgtccgatctggagctcgtggcccaatcaattatctttatttttgctggctatgaaaccacgagcagtgttctctccttcattatgtatgaactggccactcaccctgatgtccagcagaaactgcaggaggaaattgatgcagttttacccaataaggcaccacccacctatgatactgtgctacagatggagtatcttgacatggtggtgaatgaaacgctcagattattcccaattgctatgagacttgagagggtctgcaaaaaagatgttgagatcaatgggatgttcattcccaaaggggtggtggtgatgattccaagctatgctcttcaccgtgacccaaagtactggacagagcctgagaagttcctccctgaaagattcagcaagaagaacaaggacaacatagatccttacatatacacaccctttggaagtggacccagaaactgcattggcatgaggtttgctctcatgaacatgaaacttgctctaatcagagtccttcagaacttctccttcaaaccttgtaaagaaacacagatccccctgaaattaagcttaggaggacttcttcaaccagaaaaacccgttgttctaaaggttgagtcaagggatggcaccgtaagtggagcctgaattttcctaaggacttctgctttgctcttcaagaaatctgtgcctgagaacaccagagacctcaaattactttgtgaatagaactctgaaatgaagatgggcttcatccaatggactgcataaataaccggggattctgtacatgcattgagctctctcattgtctgtgtagagtgttatacttgggaatataaaggaggtgaccaaatcagtgtgaggaggtagatttggctcctctgcttctcacgggactatttccaccacccccagttagcaccattaactcctcctgagctctgataagagaatcaacatttctcaataatttcctccacaaattattaatgaaaataagaattattttgatggctctaacaatgacatttatatcacatgttttctctggagtattctataagttttatgttaaatcaataaagaccactttacaaaagtattatcagatgctttcctgcacattaaggagaaatctatagaactgaatgagaaccaacaagtaaatatttttggtcattgtaatcactgttggcgtggggcctttgtcagaactagaatttgattattaacataggtgaaagttaatccactgtgactttgcccattgtttagaaagaatattcatagtttaattatgccttttttgatcaggcacagtggctcacgcctgtaatcctagcagtttgggaggctgagccgggtggatcgcctgaggtcaggagttcaagacaagcctggcctacatggttgaaaccccatctctactaaaaatacacaaattagctaggcatggtggactcgcctgtaatctcactacacaggaggctgaggcaggagaatcacttgaacctgggaggcggatgttgaagtgagctgagattgcaccactgcactccagtctgggtgagagtgagactcagtcttaaaaaaatatgcctttttgaagcacgtacattttgtaacaaagaactgaagctcttattatattattagttttgatttaatgttttcagcccatctcctttcatatttctgggagacagaaaacatgtttccctacacctcttgcattccatcctcaacacccaactgtctcgatgcaatgaacacttaataaaaaacagtcgattggtcaattgattgagcaataagcct

SEQ ID NO: 426756 - DNA, 2772 bp, Homo sapiens
  misc_feature (2)..(2): n is a, c, g, or t
angaagaaaaggtggacaaaaaagaggcggtacggtgcggaattcccgggatcaggaaagctccatgcacatagcccagcaaagagcaacacagagctgaaaggaagactcagaggagagagataagtaaggaaagtagtgatggctctcatcccagacttggccatggaaacctggcttctcctggctgtcagcctggtgctcctctatctatatggaacccattcacatggactttttaagaagcttggaattccagggcccacacctctgccttttttgggaaatattttgtcctaccataagggcttttgtatgtttgacatggaatgtcataaaaagtatggaaaagtgtggggcttttatgatggtcaacagcctgtgctggctatcacagatcctgacatgatcaaaacagtgctagtgaaagaatgttattctgtcttcacaaaccggaggccttttggtccagtgggatttatgaaaagtgccatctctatagctgaggatgaagaatggaagagattacgatcattgctgtctccaaccttcaccagtggaaaactcaaggagatggtccctatcattgcccagtatggagatgtgttggtgagaaatctgaggcgggaagcagagacaggcaagcctgtcaccttgaaagacgtctttggggcctacagcatggatgtgatcactagcacatcatttggagtgaacatcgactctctcaacaatccacaagacccctttgtggaaaacaccaagaagcttttaagatttgattttttggatccattctttctctcaataacagtctttccattcctcatcccaattcttgaagtattaaatatctgtgtgtttccaagagaagttacaaattttttaagaaaatctgtaaaaaggatgaaagaaagtcgcctcgaagatacacaaaagcaccgagtggatttccttcagctgatgattgactctcagaattcaaaagaaactgagtcccacaaagctctgtccgatctggagctcgtggcccaatcaattatctttatttttgctggctatgaaaccacgagcagtgttctctccttcattatgtatgaactggccactcaccctgatgtccagcagaaactgcaggaggaaattgatgcagttttacccaataaggcaccacccacctatgatactgtgctacagatggagtatcttgacatggtggtgaatgaaacgctcagattattcccaattgctatgagacttgagagggtctgcaaaaaagatgttgagatcaatgggatgttcattcccaaaggggtggtggtgatgattccaagctatgctcttcaccgtgacccaaagtactggacagagcctgagaagttcctccctgaaagattcagcaagaagaacaaggacaacatagatccttacatatacacaccctttggaagtggacccagaaactgcattggcatgaggtttgctctcatgaacatgaaacttgctctaatcagagtccttcagaacttctccttcaaaccttgtaaagaaacacagatccccctgaaattaagcttaggaggacttcttcaaccagaaaaacccgttgttctaaaggttgagtcaagggatggcaccgtaagtggagcctgaattttcctaaggacttctgctttgctcttcaagaaatctgtgcctgagaacaccagagacctcaaattactttgtgaatagaactctgaaatgaagatgggcttcatccaatggactgcataaataaccggggattctgtacatgcattgagctctctcattgtctgtgtagagtgttatacttgggaatataaaggaggtgaccaaatcagtgtgaggaggtagatttggctcctctgcttctcacgggactatttccaccacccccagttagcaccattaactcctcctgagctctgataagagaatcaacatttctcaataatttcctccacaaattattaatgtctggagtattctataagttttatgttaaatcaataaagaccactttacaaaagtattatcagatgctttcctgcacattaaggagaaatctatagaactgaatgagaaccaacaagtaaatatttttggtcattgtaatcactgttggcgtggggcctttgtcagaactagaatttgattattaacataggtgaaagttaatccactgtgactttgcccattgtttagaaagaatattcatagtttaattatgccttttttgatcaggcacagtggctcacgcctgtaatcctagcagtttgggaggctgagccgggtggatcgcctgaggtcaggagttcaagacaagcctggcctacatggttgaaaccccatctctactaaaaatacacaaattagctaggcatggtggactcgcctgtaatctcactacacaggaggctgaggcaggagaatcacttgaacctgggaggcggatgttgaagtgagctgagattgcaccactgcactccagtctgggtgagagtgagactcagtcttaaaaaaatatgcctttttgaagcacgtacattttgtaacaaagaactgaagctcttattatattattagttttgatttaatgttttcagcccatctcctttcatatttctgggagacagaaaacatgtttccctacacctcttgcattccatcctcaacacccaactgtctcgatgcaatgaacacttaataaaaaacagtcgattggtcaattgattgagcaataagcct

SEQ ID NO: 426757 - DNA, 2933 bp, Homo sapiens
agaactatcaaactcctgagccaacaacttaatatgactagcttacacaatagcttttatagtaaagatacctctttacggactccacttatgactccctaaagcccatgtcgaagcccccatcgctgggtcaatagtacttgccgcagtactcttaaaactaggcggctaaaaaaaaaaaaaaaaaaaaaaaaaaaaaaaaaaaaaaaaaaaaaaaaaaaaaaaaaaaaaacctcgtgccgaattcggcaccaggaaagctccatgcacatagcccagcaaagagcaacacagagctgaaaggaagactcagaggagagagataagtaaggaaagtagtgatggctctcatcccagacttggccatggaaacctggcttctcctggctgtcagcctggtgctcctctatctatatggaacccattcacatggactttttaagaagcttggaattccagggcccacacctctgccttttttgggaaatattttgtcctaccataagggcttttgtatgtttgacatggaatgtcataaaaagtatggaaaagtgtggggcttttatgatggtcaacagcctgtgctggctatcacagatcctgacatgatcaaaacagtgctagtgaaagaatgttattctgtcttcacaaaccggaggccttttggtccagtgggatttatgaaaagtgccatctctatagctgaggatgaagaatggaagagattacgatcattgctgtctccaaccttcaccagtggaaaactcaaggagagaaatctgaggcgggaagcagagacaggcaagcctgtcaccttgaaagacgtctttggggcctacagcatggatgtgatcactagcacatcatttggagtgaacatcgactctctcaacaatccacaagacccctttgtggaaaacaccaagaagcttttaagatttgattttttggatccattctttctctcaataacagtctttccattcctcatcccaattcttgaagtattaaatatctgtgtgtttccaagagaagttacaaattttttaagaaaatctgtaaaaaggatgaaagaaagtcgcctcgaagatacacaaaagcaccgagtggatttccttcagctgatgattgactctcagaattcaaaagaaactgagtcccacaaagctctgtccgatctggagctcgtggcccaatcaattatctttatttttgctggctatgaaaccacgagcagtgttctctccttcattatgtatgaactggccactcaccctgatgtccagcagaaactgcaggaggaaattgatgcagttttacccaataaggcaccacccacctatgatactgtgctacagatggagtatcttgacatggtggtgaatgaaacgctcagattattcccaattgctatgagacttgagagggtctgcaaaaaagatgttgagatcaatgggatgttcattcccaaaggggtggtggtgatgattccaagctatgctcttcaccgtgacccaaagtactggacagagcctgagaagttcctccctgaaagattcagcaagaagaacaaggacaacatagatccttacatatacacaccctttggaagtggacccagaaactgcattggcatgaggtttgctctcatgaacatgaaacttgctctaatcagagtccttcagaacttctccttcaaaccttgtaaagaaacacagatccccctgaaattaagcttaggaggacttcttcaaccagaaattttcctaaggacttctgctttgctcttcaagaaatctgtgcctgagaacaccagagacctcaaattactttgtgaatagaactctgaaatgaagatgggcttcatccaatggactgcataaataaccggggattctgtacatgcattgagctctctcattgtctgtgtagagtgttatacttgggaatataaaggaggtgaccaaatcagtgtgaggaggtagatttggctcctctgcttctcacgggactatttccaccacccccagttagcaccattaactcctcctgagctctgataagagaatcaacatttctcaataatttcctccacaaattattaatgaaaataagaattattttgatggctctaacaatgacatttatatcacatgttttctctggagtattctataagttttatgttaaatcaataaagaccactttacaaaagtattatcagatgctttcctgcacattaaggagaaatctatagaactgaatgagaaccaacaagtaaatatttttggtcattgtaatcactgttggcgtggggcctttgtcagaactagaatttgattattaacataggtgaaagttaatccactgtgactttgcccattgtttagaaagaatattcatagtttaattatgccttttttgatcaggcacagtggctcacgcctgtaatcctagcagtttgggaggctgagccgggtggatcgcctgaggtcaggagttcaagacaagcctggcctacatggttgaaaccccatctctactaaaaatacacaaattagctaggcatggtggactcgcctgtaatctcactacacaggaggctgaggcaggagaatcacttgaacctgggaggcggatgttgaagtgagctgagattgcaccactgcactccagtctgggtgagagtgagactcagtcttaaaaaaatatgcctttttgaagcacgtacattttgtaacaaagaactgaagctcttattatattattagttttgatttaatgttttcagcccatctcctttcatatttctgggagacagaaaacatgtttccctacacctcttgcattccatcctcaacacccaactgtctcgatgcaatgaacacttaataaaaaacagtcgattggtcaattgattgagcaataagcct

SEQ ID NO: 426758 - DNA, 2931 bp, Homo sapiens
agaactatcaaactcctgagccaacaacttaatatgactagcttacacaatagcttttatagtaaagatacctctttacggactccacttatgactccctaaagcccatgtcgaagcccccatcgctgggtcaatagtacttgccgcagtactcttaaaactaggcggctaaaaaaaaaaaaaaaaaaaaaaaaaaaaaaaaaaaaaaaaaaaaaaaaaaaaaaaaaaaaaacctcgtgccgaattcggcaccaggaaagctccatgcacatagcccagcaaagagcaacacagagctgaaaggaagactcagaggagagagataagtaaggaaagtagtgatggctctcatcccagacttggccatggaaacctggcttctcctggctgtcagcctggtgctcctctatctatatggaacccattcacatggactttttaagaagcttggaattccagggcccacacctctgccttttttgggaaatattttgtcctaccataagggcttttgtatgtttgacatggaatgtcataaaaagtatggaaaagtgtggggcttttatgatggtcaacagcctgtgctggctatcacagatcctgacatgatcaaaacagtgctagtgaaagaatgttattctgtcttcacaaaccggaggccttttggtccagtgggatttatgaaaagtgccatctctatagctgaggatgaagaatggaagagattacgatcattgctgtctccaaccttcaccagtggaaaactcaaggagagaaatctgaggcgggaagcagagacaggcaagcctgtcaccttgaaagacgtctttggggcctacagcatggatgtgatcactagcacatcatttggagtgaacatcgactctctcaacaatccacaagacccctttgtggaaaacaccaagaagcttttaagatttgattttttggatccattctttctctcaataacagtctttccattcctcatcccaattcttgaagtattaaatatctgtgtgtttccaagagaagttacaaattttttaagaaaatctgtaaaaaggatgaaagaaagtcgcctcgaagatacacaaaagcaccgagtggatttccttcagctgatgattgactctcagaattcaaaagaaactgagtcccacaaagctctgtccgatctggagctcgtggcccaatcaattatctttatttttgctggctatgaaaccacgagcagtgttctctccttcattatgtatgaactggccactcaccctgatgtccagcagaaactgcaggaggaaattgatgcagttttacccaataaggcaccacccacctatgatactgtgctacagatggagtatcttgacatggtggtgaatgaaacgctcagattattcccaattgctatgagacttgagagggtctgcaaaaagctatgctcttcaccgtgacccaaagtactggacagagcctgagaagttcctccctgaaagattcagcaagaagaacaaggacaacatagatccttacatatacacaccctttggaagtggacccagaaactgcattggcatgaggtttgctctcatgaacatgaaacttgctctaatcagagtccttcagaacttctccttcaaaccttgtaaagaaacacagatccccctgaaattaagcttaggaggacttcttcaaccagaaaaacccgttgttctaaaggttgagtcaagggatggcaccgtaagtggagcctgaattttcctaaggacttctgctttgctcttcaagaaatctgtgcctgagaacaccagagacctcaaattactttgtgaatagaactctgaaatgaagatgggcttcatccaatggactgcataaataaccggggattctgtacatgcattgagctctctcattgtctgtgtagagtgttatacttgggaatataaaggaggtgaccaaatcagtgtgaggaggtagatttggctcctctgcttctcacgggactatttccaccacccccagttagcaccattaactcctcctgagctctgataagagaatcaacatttctcaataatttcctccacaaattattaatgaaaataagaattattttgatggctctaacaatgacatttatatcacatgttttctctggagtattctataagttttatgttaaatcaataaagaccactttacaaaagtattatcagatgctttcctgcacattaaggagaaatctatagaactgaatgagaaccaacaagtaaatatttttggtcattgtaatcactgttggcgtggggcctttgtcagaactagaatttgattattaacataggtgaaagttaatccactgtgactttgcccattgtttagaaagaatattcatagtttaattatgccttttttgatcaggcacagtggctcacgcctgtaatcctagcagtttgggaggctgagccgggtggatcgcctgaggtcaggagttcaagacaagcctggcctacatggttgaaaccccatctctactaaaaatacacaaattagctaggcatggtggactcgcctgtaatctcactacacaggaggctgaggcaggagaatcacttgaacctgggaggcggatgttgaagtgagctgagattgcaccactgcactccagtctgggtgagagtgagactcagtcttaaaaaaatatgcctttttgaagcacgtacattttgtaacaaagaactgaagctcttattatattattagttttgatttaatgttttcagcccatctcctttcatatttctgggagacagaaaacatgtttccctacacctcttgcattccatcctcaacacccaactgtctcgatgcaatgaacacttaataaaaaacagtcgattggtcaattgattgagcaataagcct

SEQ ID NO: 426759 - DNA, 2933 bp, Homo sapiens
agaactatcaaactcctgagccaacaacttaatatgactagcttacacaatagcttttatagtaaagatacctctttacggactccacttatgactccctaaagcccatgtcgaagcccccatcgctgggtcaatagtacttgccgcagtactcttaaaactaggcggctaaaaaaaaaaaaaaaaaaaaaaaaaaaaaaaaaaaaaaaaaaaaaaaaaaaaaaaaaaaaaacctcgtgccgaattcggcaccaggaaagctccatgcacatagcccagcaaagagcaacacagagctgaaaggaagactcagaggagagagataagtaaggaaagtagtgatggctctcatcccagacttggccatggaaacctggcttctcctggctgtcagcctggtgctcctctatctatatggaacccattcacatggactttttaagaagcttggaattccagggcccacacctctgccttttttgggaaatattttgtcctaccataagggcttttgtatgtttgacatggaatgtcataaaaagtatggaaaagtgtggggcttttatgatggtcaacagcctgtgctggctatcacagatcctgacatgatcaaaacagtgctagtgaaagaatgttattctgtcttcacaaaccggaggccttttggtccagtgggatttatgaaaagtgccatctctatagctgaggatgaagaatggaagagattacgatcattgctgtctccaaccttcaccagtggaaaactcaaggagagaaatctgaggcgggaagcagagacaggcaagcctgtcaccttgaaagacgtctttggggcctacagcatggatgtgatcactagcacatcatttggagtgaacatcgactctctcaacaatccacaagacccctttgtggaaaacaccaagaagcttttaagatttgattttttggatccattctttctctcaataacagtctttccattcctcatcccaattcttgaagtattaaatatctgtgtgtttccaagagaagttacaaattttttaagaaaatctgtaaaaaggatgaaagaaagtcgcctcgaagatacacaaaagcaccgagtggatttccttcagctgatgattgactctcagaattcaattatctttatttttgctggctatgaaaccacgagcagtgttctctccttcattatgtatgaactggccactcaccctgatgtccagcagaaactgcaggaggaaattgatgcagttttacccaataaggcaccacccacctatgatactgtgctacagatggagtatcttgacatggtggtgaatgaaacgctcagattattcccaattgctatgagacttgagagggtctgcaaaaaagatgttgagatcaatgggatgttcattcccaaaggggtggtggtgatgattccaagctatgctcttcaccgtgacccaaagtactggacagagcctgagaagttcctccctgaaagattcagcaagaagaacaaggacaacatagatccttacatatacacaccctttggaagtggacccagaaactgcattggcatgaggtttgctctcatgaacatgaaacttgctctaatcagagtccttcagaacttctccttcaaaccttgtaaagaaacacagatccccctgaaattaagcttaggaggacttcttcaaccagaaaaacccgttgttctaaaggttgagtcaagggatggcaccgtaagtggagcctgaattttcctaaggacttctgctttgctcttcaagaaatctgtgcctgagaacaccagagacctcaaattactttgtgaatagaactctgaaatgaagatgggcttcatccaatggactgcataaataaccggggattctgtacatgcattgagctctctcattgtctgtgtagagtgttatacttgggaatataaaggaggtgaccaaatcagtgtgaggaggtagatttggctcctctgcttctcacgggactatttccaccacccccagttagcaccattaactcctcctgagctctgataagagaatcaacatttctcaataatttcctccacaaattattaatgaaaataagaattattttgatggctctaacaatgacatttatatcacatgttttctctggagtattctataagttttatgttaaatcaataaagaccactttacaaaagtattatcagatgctttcctgcacattaaggagaaatctatagaactgaatgagaaccaacaagtaaatatttttggtcattgtaatcactgttggcgtggggcctttgtcagaactagaatttgattattaacataggtgaaagttaatccactgtgactttgcccattgtttagaaagaatattcatagtttaattatgccttttttgatcaggcacagtggctcacgcctgtaatcctagcagtttgggaggctgagccgggtggatcgcctgaggtcaggagttcaagacaagcctggcctacatggttgaaaccccatctctactaaaaatacacaaattagctaggcatggtggactcgcctgtaatctcactacacaggaggctgaggcaggagaatcacttgaacctgggaggcggatgttgaagtgagctgagattgcaccactgcactccagtctgggtgagagtgagactcagtcttaaaaaaatatgcctttttgaagcacgtacattttgtaacaaagaactgaagctcttattatattattagttttgatttaatgttttcagcccatctcctttcatatttctgggagacagaaaacatgtttccctacacctcttgcattccatcctcaacacccaactgtctcgatgcaatgaacacttaataaaaaacagtcgattggtcaattgattgagcaataagcct

SEQ ID NO: 426760 - DNA, 1892 bp, Homo sapiens
agaactatcaaactcctgagccaacaacttaatatgactagcttacacaatagcttttatagtaaagatacctctttacggactccacttatgactccctaaagcccatgtcgaagcccccatcgctgggtcaatagtacttgccgcagtactcttaaaactaggcggctaaaaaaaaaaaaaaaaaaaaaaaaaaaaaaaaaaaaaaaaaaaaaaaaaaaaaaaaaaaaaacctcgtgccgaattcggcaccaggaaagctccatgcacatagcccagcaaagagcaacacagagctgaaaggaagactcagaggagagagataagtaaggaaagtagtgatggctctcatcccagacttggccatggaaacctggcttctcctggctgtcagcctggtgctcctctatctatatggaacccattcacatggactttttaagaagcttggaattccagggcccacacctctgccttttttgggaaatattttgtcctaccataagggcttttgtatgtttgacatggaatgtcataaaaagtatggaaaagtgtggggcttttatgatggtcaacagcctgtgctggctatcacagatcctgacatgatcaaaacagtgctagtgaaagaatgttattctgtcttcacaaaccggaggccttttggtccagtgggatttatgaaaagtgccatctctatagctgaggatgaagaatggaagagattacgatcattgctgtctccaaccttcaccagtggaaaactcaaggagagaaatctgaggcgggaagcagagacaggcaagcctgtcaccttgaaagacgtctttggggcctacagcatggatgtgatcactagcacatcatttggagtgaacatcgactctctcaacaatccacaagacccctttgtggaaaacaccaagaagcttttaagatttgattttttggatccattctttctctcaataacagtctttccattcctcatcccaattcttgaagtattaaatatctgtgtgtttccaagagaagttacaaattttttaagaaaatctgtaaaaaggatgaaagaaagtcgcctcgaagatacacaaaagcaccgagtggatttccttcagctgatgattgactctcagaattcaaaagaaactgagtcccacaaagctctgtccgatctggagctcgtggcccaatcaattatctttatttttgctggctatgaaaccacgagcagtgttctctccttcattatgtatgaactggccactcaccctgatgtccagcagaaactgcaggaggaaattgatgcagttttacccaataaggcaccacccacctatgatactgtgctacagatggagtatcttgacatggtggtgaatgaaacgctcagattattcccaattgctatgagacttgagagggtctgcaaaaaagatgttgagatcaatgggatgttcattcccaaaggggtggtggtgatgattccaagctatgctcttcaccgtgacccaaagtactggacagagcctgagaagttcctccctgaaagattcagcaagaagaacaaggacaacatagatccttacatatacacaccctttggaagtggacccagaaactgcattggcatgaggtttgctctcatgaacatgaaacttgctctaatcagagtccttcagaacttctccttcaaaccttgtaaagaaacacagatccccctgaaattaagcttaggaggacttcttcaaccagaaattttcctaaggacttctgctttgctcttcaagaaatctgtgcctgagaacaccagagacctcaaattactttgtgaatagaactctgaaatgaagatgggcttcatccaatggactgcataaataaccggg

SEQ ID NO: 426761 - DNA, 2607 bp, Homo sapiens
agaactatcaaactcctgagccaacaacttaatatgactagcttacacaatagcttttatagtaaagatacctctttacggactccacttatgactccctaaagcccatgtcgaagcccccatcgctgggtcaatagtacttgccgcagtactcttaaaactaggcggctaaaaaaaaaaaaaaaaaaaaaaaaaaaaaaaaaaaaaaaaaaaaaaaaaaaaaaaaaaaaaacctcgtgccgaattcggcaccaggaaagctccatgcacatagcccagcaaagagcaacacagagctgaaaggaagactcagaggagagagataagtaaggaaagtagtgatggctctcatcccagacttggccatggaaacctggcttctcctggctgtcagcctggtgctcctctatctatatggaacccattcacatggactttttaagaagcttggaattccagggcccacacctctgccttttttgggaaatattttgtcctaccataagggcttttgtatgtttgacatggaatgtcataaaaagtatggaaaagtgtggggcttttatgatggtcaacagcctgtgctggctatcacagatcctgacatgatcaaaacagtgctagtgaaagaatgttattctgtcttcacaaaccggaggccttttggtccagtgggatttatgaaaagtgccatctctatagctgaggatgaagaatggaagagattacgatcattgctgtctccaaccttcaccagtggaaaactcaaggagagaaatctgaggcgggaagcagagacaggcaagcctgtcaccttgaaagacgtctttggggcctacagcatggatgtgatcactagcacatcatttggagtgaacatcgactctctcaacaatccacaagacccctttgtggaaaacaccaagaagcttttaagatttgattttttggatccattctttctctcaataacagtctttccattcctcatcccaattcttgaagtattaaatatctgtgtgtttccaagagaagttacaaattttttaagaaaatctgtaaaaaggatgaaagaaagtcgcctcgaagatacacaaaagcaccgagtggatttccttcagctgatgattgactctcagaattcaaaagaaactgagtcccacaaagctctgtccgatctggagctcgtggcccaatcaattatctttatttttgctggctatgaaaccacgagcagtgttctctccttcattatgtatgaactggccactcaccctgatgtccagcagaaactgcaggaggaaattgatgcagttttacccaataaggcaccacccacctatgatactgtgctacagatggagtatcttgacatggtggtgaatgaaacgctcagattattcccaattgctatgagacttgagagggtctgcaaaaaagatgttgagatcaatgggatgttcattcccaaaggggtggtggtgatgattccaagctatgctcttcaccgtgacccaaagtactggacagagcctgagaagttcctccctgaaagattcagcaagaagaacaaggacaacatagatccttacatatacacaccctttggaagtggacccagaaactgcattggcatgaggtttgctctcatgaacatgaaacttgctctaatcagagtccttcagaacttctccttcaaaccttgtaaagaaacacagtcctcctgagctctgataagagaatcaacatttctcaataatttcctccacaaattattaatgaaaataagaattattttgatggctctaacaatgacatttatatcacatgttttctctggagtattctataagttttatgttaaatcaataaagaccactttacaaaagtattatcagatgctttcctgcacattaaggagaaatctatagaactgaatgagaaccaacaagtaaatatttttggtcattgtaatcactgttggcgtggggcctttgtcagaactagaatttgattattaacataggtgaaagttaatccactgtgactttgcccattgtttagaaagaatattcatagtttaattatgccttttttgatcaggcacagtggctcacgcctgtaatcctagcagtttgggaggctgagccgggtggatcgcctgaggtcaggagttcaagacaagcctggcctacatggttgaaaccccatctctactaaaaatacacaaattagctaggcatggtggactcgcctgtaatctcactacacaggaggctgaggcaggagaatcacttgaacctgggaggcggatgttgaagtgagctgagattgcaccactgcactccagtctgggtgagagtgagactcagtcttaaaaaaatatgcctttttgaagcacgtacattttgtaacaaagaactgaagctcttattatattattagttttgatttaatgttttcagcccatctcctttcatatttctgggagacagaaaacatgtttccctacacctcttgcattccatcctcaacacccaactgtctcgatgcaatgaacacttaataaaaaacagtcgattggtcaattgattgagcaataagcct

SEQ ID NO: 426762 - DNA, 3012 bp, Homo sapiens
agaactatcaaactcctgagccaacaacttaatatgactagcttacacaatagcttttatagtaaagatacctctttacggactccacttatgactccctaaagcccatgtcgaagcccccatcgctgggtcaatagtacttgccgcagtactcttaaaactaggcggctaaaaaaaaaaaaaaaaaaaaaaaaaaaaaaaaaaaaaaaaaaaaaaaaaaaaaaaaaaaaaacctcgtgccgaattcggcaccaggaaagctccatgcacatagcccagcaaagagcaacacagagctgaaaggaagactcagaggagagagataagtaaggaaagtagtgatggctctcatcccagacttggccatggaaacctggcttctcctggctgtcagcctggtgctcctctatctatatggaacccattcacatggactttttaagaagcttggaattccagggcccacacctctgccttttttgggaaatattttgtcctaccataagggcttttgtatgtttgacatggaatgtcataaaaagtatggaaaagtgtggggcttttatgatggtcaacagcctgtgctggctatcacagatcctgacatgatcaaaacagtgctagtgaaagaatgttattctgtcttcacaaaccggaggccttttggtccagtgggatttatgaaaagtgccatctctatagctgaggatgaagaatggaagagattacgatcattgctgtctccaaccttcaccagtggaaaactcaaggagagaaatctgaggcgggaagcagagacaggcaagcctgtcaccttgaaagacgtctttggggcctacagcatggatgtgatcactagcacatcatttggagtgaacatcgactctctcaacaatccacaagacccctttgtggaaaacaccaagaagcttttaagatttgattttttggatccattctttctctcaataacagtctttccattcctcatcccaattcttgaagtattaaatatctgtgtgtttccaagagaagttacaaattttttaagaaaatctgtaaaaaggatgaaagaaagtcgcctcgaagatacacaaaagcaccgagtggatttccttcagctgatgattgactctcagaattcaaaagaaactgagtcccacaaagctctgtccgatctggagctcgtggcccaatcaattatctttatttttgctggctatgaaaccacgagcagtgttctctccttcattatgtatgaactggccactcaccctgatgtccagcagaaactgcaggaggaaattgatgcagttttacccaataagattattcccaattgctatgagacttgagagggtctgcaaaaaagatgttgagatcaatgggatgttcattcccaaaggggtggtggtgatgattccaagctatgctcttcaccgtgacccaaagtactggacagagcctgagaagttcctccctgaaagactagaaaaaagaaaactacagtcatccacaattccaacaacttacgatgaaggtcatcagttatgtccttatgggtcatcagtgtccaaaatattcagcaagaagaacaaggacaacatagatccttacatatacacaccctttggaagtggacccagaaactgcattggcatgaggtttgctctcatgaacatgaaacttgctctaatcagagtccttcagaacttctccttcaaaccttgtaaagaaacacagatccccctgaaattaagcttaggaggacttcttcaaccagaaaaacccgttgttctaaaggttgagtcaagggatggcaccgtaagtggagcctgaattttcctaaggacttctgctttgctcttcaagaaatctgtgcctgagaacaccagagacctcaaattactttgtgaatagaactctgaaatgaagatgggcttcatccaatggactgcataaataaccggggattctgtacatgcattgagctctctcattgtctgtgtagagtgttatacttgggaatataaaggaggtgaccaaatcagtgtgaggaggtagatttggctcctctgcttctcacgggactatttccaccacccccagttagcaccattaactcctcctgagctctgataagagaatcaacatttctcaataatttcctccacaaattattaatgaaaataagaattattttgatggctctaacaatgacatttatatcacatgttttctctggagtattctataagttttatgttaaatcaataaagaccactttacaaaagtattatcagatgctttcctgcacattaaggagaaatctatagaactgaatgagaaccaacaagtaaatatttttggtcattgtaatcactgttggcgtggggcctttgtcagaactagaatttgattattaacataggtgaaagttaatccactgtgactttgcccattgtttagaaagaatattcatagtttaattatgccttttttgatcaggcacagtggctcacgcctgtaatcctagcagtttgggaggctgagccgggtggatcgcctgaggtcaggagttcaagacaagcctggcctacatggttgaaaccccatctctactaaaaatacacaaattagctaggcatggtggactcgcctgtaatctcactacacaggaggctgaggcaggagaatcacttgaacctgggaggcggatgttgaagtgagctgagattgcaccactgcactccagtctgggtgagagtgagactcagtcttaaaaaaatatgcctttttgaagcacgtacattttgtaacaaagaactgaagctcttattatattattagttttgatttaatgttttcagcccatctcctttcatatttctgggagacagaaaacatgtttccctacacctcttgcattccatcctcaacacccaactgtctcgatgcaatgaacacttaataaaaaacagtcgattggtcaattgattgagcaataagcct

SEQ ID NO: 426763 - DNA, 1773 bp, Homo sapiens
agaactatcaaactcctgagccaacaacttaatatgactagcttacacaatagcttttatagtaaagatacctctttacggactccacttatgactccctaaagcccatgtcgaagcccccatcgctgggtcaatagtacttgccgcagtactcttaaaactaggcggctaaaaaaaaaaaaaaaaaaaaaaaaaaaaaaaaaaaaaaaaaaaaaaaaaaaaaaaaaaaaaacctcgtgccgaattcggcaccaggaaagctccatgcacatagcccagcaaagagcaacacagagctgaaaggaagactcagaggagagagataagtaaggaaagtagtgatggctctcatcccagacttggccatggaaacctggcttctcctggctgtcagcctggtgctcctctatctatatggaacccattcacatggactttttaagaagcttggaattccagggcccacacctctgccttttttgggaaatattttgtcctaccataagggcttttgtatgtttgacatggaatgtcataaaaagtatggaaaagtgtggggcttttatgatggtcaacagcctgtgctggctatcacagatcctgacatgatcaaaacagtgctagtgaaagaatgttattctgtcttcacaaaccggaggccttttggtccagtgggatttatgaaaagtgccatctctatagctgaggatgaagaatggaagagattacgatcattgctgtctccaaccttcaccagtggaaaactcaaggagagaaatctgaggcgggaagcagagacaggcaagcctgtcaccttgaaagacgtctttggggcctacagcatggatgtgatcactagcacatcatttggagtgaacatcgactctctcaacaatccacaagacccctttgtggaaaacaccaagaagcttttaagatttgattttttggatccattctttctctcaataacagtctttccattcctcatcccaattcttgaagtattaaatatctgtgtgtttccaagagaagttacaaattttttaagaaaatctgtaaaaaggatgaaagaaagtcgcctcgaagatacacaaaagcaccgagtggatttccttcagctgatgattgactctcagaattcaaaagaaactgagtcccacaaagctctgtccgatctggagctcgtggcccaatcaattatctttatttttgctggctatgaaaccacgagcagtgttctctccttcattatgtatgaactggccactcaccctgatgtccagcagaaactgcaggaggaaattgatgcagttttacccaataaggcaccacccacctatgatactgtgctacagatggatctaccaacgtggaaccagattcagcaagaagaacaaggacaacatagatccttacatatacacaccctttggaagtggacccagaaactgcattggcatgaggtttgctctcatgaacatgaaacttgctctaatcagagtccttcagaacttctccttcaaaccttgtaaagaaacacagatccccctgaaattaagcttaggaggacttcttcaaccagaaaaacccgttgttctaaaggttgagtcaagggatggcaccgtaagtggagcctgaattttcctaaggacttctgctttgctcttcaagaaatctgtgcctgagaacaccagagacctcaaattactttgtgaatagaactctgaaatgaagatgggcttcatccaatggactgcataaataaccggg

SEQ ID NO: 426764 - DNA, 1922 bp, Homo sapiens
agaactatcaaactcctgagccaacaacttaatatgactagcttacacaatagcttttatagtaaagatacctctttacggactccacttatgactccctaaagcccatgtcgaagcccccatcgctgggtcaatagtacttgccgcagtactcttaaaactaggcggctaaaaaaaaaaaaaaaaaaaaaaaaaaaaaaaaaaaaaaaaaaaaaaaaaaaaaaaaaaaaaacctcgtgccgaattcggcaccaggaaagctccatgcacatagcccagcaaagagcaacacagagctgaaaggaagactcagaggagagagataagtaaggaaagtagtgatggctctcatcccagacttggccatggaaacctggcttctcctggctgtcagcctggtgctcctctatctatatggaacccattcacatggactttttaagaagcttggaattccagggcccacacctctgccttttttgggaaatattttgtcctaccataagggcttttgtatgtttgacatggaatgtcataaaaagtatggaaaagtgtggggcttttatgatggtcaacagcctgtgctggctatcacagatcctgacatgatcaaaacagtgctagtgaaagaatgttattctgtcttcacaaaccggaggccttttggtccagtgggatttatgaaaagtgccatctctatagctgaggatgaagaatggaagagattacgatcattgctgtctccaaccttcaccagtggaaaactcaaggagagaaatctgaggcgggaagcagagacaggcaagcctgtcaccttgaaagacgtctttggggcctacagcatggatgtgatcactagcacatcatttggagtgaacatcgactctctcaacaatccacaagacccctttgtggaaaacaccaagaagcttttaagatttgattttttggatccattctttctctcaataacagtctttccattcctcatcccaattcttgaagtattaaatatctgtgtgtttccaagagaagttacaaattttttaagaaaatctgtaaaaaggatgaaagaaagtcgcctcgaagatacacaaaagcaccgagtggatttccttcagctgatgattgactctcagaattcaaaagaaactgagtcccacaaagctctgtccgatctggagctcgtggcccaatcaattatctttatttttgctggctatgaaaccacgagcagtgttctctccttcattatgtatgaactggccactcaccctgatgtccagcagaaactgcaggaggaaattgatgcagttttacccaataaggcaccacctacctatgatgccgtggtacagatggagtaccttgacatggtggtgaatgaaacactcagattattcccagttgctattagacttgagaggacttgcaagaaagatgttgaaatcaatggggtattcattcccaaagggtcaatggtggtgattccaacttatgctcttcaccatgacccaaagtactggacagagcctgaggagttccgccctgaaaggttcagtaagaagaaggacagcatagatccttacatatacacaccctttggaactggacccagaaactgcattggcatgaggtttgctctcatgaacatgaaacttgctctaatcagagtccttcagaacttctccttcaaaccttgtaaagaaacacagatccccttgaaattagacacgcaaggacttcttcaaccagaaaaacccattgttctaaaggtggattcaagagatggaaccctaagtggagaatgagttattctaaggacttctactttggtcttcaagaaagctgtgccccagaacaccagagatttcaacttagtcaataaaaccttgaaataaagatgggcttaatctaatgta

SEQ ID NO: 426765 - DNA, 2187 bp, Homo sapiens
agaactatcaaactcctgagccaacaacttaatatgactagcttacacaatagcttttatagtaaagatacctctttacggactccacttatgactccctaaagcccatgtcgaagcccccatcgctgggtcaatagtacttgccgcagtactcttaaaactaggcggctaaaaaaaaaaaaaaaaaaaaaaaaaaaaaaaaaaaaaaaaaaaaaaaaaaaaaaaaaaaaaacctcgtgccgaattcggcaccaggaaagctccatgcacatagcccagcaaagagcaacacagagctgaaaggaagactcagaggagagagataagtaaggaaagtagtgatggctctcatcccagacttggccatggaaacctggcttctcctggctgtcagcctggtgctcctctatctatatggaacccattcacatggactttttaagaagcttggaattccagggcccacacctctgccttttttgggaaatattttgtcctaccataagggcttttgtatgtttgacatggaatgtcataaaaagtatggaaaagtgtggggcttttatgatggtcaacagcctgtgctggctatcacagatcctgacatgatcaaaacagtgctagtgaaagaatgttattctgtcttcacaaaccggaggccttttggtccagtgggatttatgaaaagtgccatctctatagctgaggatgaagaatggaagagattacgatcattgctgtctccaaccttcaccagtggaaaactcaaggagagaaatctgaggcgggaagcagagacaggcaagcctgtcaccttgaaagacgtctttggggcctacagcatggatgtgatcactagcacatcatttggagtgaacatcgactctctcaacaatccacaagacccctttgtggaaaacaccaagaagcttttaagatttgattttttggatccattctttctctcaataacagtctttccattcctcatcccaattcttgaagtattaaatatctgtgtgtttccaagagaagttacaaattttttaagaaaatctgtaaaaaggatgaaagaaagtcgcctcgaagatacacaaaagcaccgagtggatttccttcagctgatgattgactctcagaattcaaaagaaactgagtcccacaaagctctgtccgatctggagctcgtggcccaatcaattatctttatttttgctggctatgaaaccacgagcagtgttctctccttcattatgtatgaactggccactcaccctgatgtccagcagaaactgcaggaggaaattgatgcagttttacccaataaggcaccacctacctatgatgccgtggtacagatggagtaccttgacatggtggtgaatgaaacactcagattattcccagttgctattagacttgagaggacttgcaagaaagatgttgaaatcaatggggtattcattcccaaagggtcaatggtggtgattccaacttatgctcttcaccatgacccaaagtactggacagagcctgaggagttccgccctgaaaggttcagtaagaagaaggacagcatagatccttacatatacacaccctttggaactggacccagaaactgcattggcatgaggtttgctctcatgaacatgaaacttgctctaatcagagtccttcagaacttctccttcaaaccttgtaaagaaacacagatccccttgaaattagacacgcaaggacttcttcaaccagaaaaacccattgttctaaaggtggattcaagagatggaaccctaagtggagaatgagttattctaaggacttctactttggtcttcaagaaagctgtgccccagaacaccagagatttcaacttagtcaataaaaccttgaaataaagatgggcttaatctaatgtaaaaaaaaaaaaaaaaaaaaaaaaaaaaaaaaaaaaaaaaaaaaaaaaaaaaaaaaaaaaaaaaaaaaaaaaaaaaaaaaaaaaaaaaaaaaaaaaaaaaaaaaaaaaaaaaaaaaaaaaaaaatcaaaaaaatataaaaacttaataagcacaaaaaccttaaaagggaattaaatttacaataaacttgctctcgggaataaaaaatggcatcccttggaaactttgtattaatcccatacggtccgttccttgtctaccttta

SEQ ID NO: 426766 - DNA, 201 bp, Homo sapiens
taagataatcaaaaatatgtatgaccattactattgtaaactaaaatgtttttgtcaatctagagccctcacacactttagctgtcaacaccccaccacaaaccccattgccctaagcatccaataatcaactttctgcctctatagatttgcctattctggacacttcatagaaataatatcattgatttttctctgttg

SEQ ID NO: 426767 - DNA, 406 bp, Homo sapiens
actgctgacatgtagtgtgtggtaaatgtgagtgtttcacagcctggagtgaacaggggtcttctctgagaattgaggttgcaaggctggctaactcagctttgccttcacgagccctagaggccagccgaaggatgtctgcaggtcagggagacaggaccaggtaacccagctgtcactgaagattatatagagtttgagaatgttggaatatttgaaaatgctcccccaaaaaagctgctgatgagttctggaaatgtcaggagattaatctatacggacactgctgaagaaaaaggtagaagaataaaagatccagtacttcttcctgggtaagcagttatgaccagagatggaaccggcaactctttggccagaaagctgtatccaaaagacagagaagatg

SEQ ID NO: 426768 - DNA, 296 bp, Homo sapiens
gagactgggaattccagggcccacacctctgcctttgttgggaaatgttttgtcctatcgtcaggtgagttgcttgagcttcctcttttgcttcttatggttgcaaacatcagcttagttccatcagtaaaaatgcccctccttgggagggagttctgaggtttcacattttcagaaatggtgggactgggtgcagtggatcatgcctgtaatctcagcctctgtgaggccaagactggcaaattgcttgagcccaggagtttgagaacagcctgggcaacacagtgagacacctg

SEQ ID NO: 426769 - DNA, 383 bp, Homo sapiens
tccactgattaaatttttattttgaaaaaaacatatattcacagaaggttacctaaaaaatgtacaggaaggttccatgtactcttcatcctgtcccgcccagtggtaacatcttgcaatcttgtatattgcaatatatatctagtatattcatattatcaggttggcacaaaagttaaaatggcaaactacaggctgggcataatggctcatgcctgtaatcccagcactttgggaggccgaggcaggtggatcacgaggtcaggagttcgagatcagcctgaccaacatggtgaaaccccatctctactaaaaatacaaaaattagctgcgtgtggtggcatgcgcctgtagtcccagctactcagtagtctgagacagga

SEQ ID NO: 426770 - DNA, 2648 bp, Homo sapiens
agaactatcaaactcctgagccaacaacttaatatgactagcttacacaatagcttttatagtaaagatacctctttacggactccacttatgactccctaaagcccatgtcgaagcccccatcgctgggtcaatagtacttgccgcagtactcttaaaactaggcggctaaaaaaaaaaaaaaaaaaaaaaaaaaaaaaaaaaaaaaaaaaaaaaaaaaaaaaaaaaaaaacctcgtgccgaattcggcaccaggaaagctccatgcacatagcccagcaaagagcaacacagagctgaaaggaagactcagaggagagagataagtaaggaaagtagtgatggctctcatcccagacttggccatggaaacctggcttctcctggctgtcagcctggtgctcctctatctatatggaacccattcacatggactttttaagaagcttggaattccagggcccacacctctgccttttttgggaaatattttgtcctaccataagggcttttgtatgtttgacatggaatgtcataaaaagtatggaaaagtgtggggcttttatgatggtcaacagcctgtgctggctatcacagatcctgacatgatcaaaacagtgctagtgaaagaatgttattctgtcttcacaaaccggaggccttttggtccagtgggatttatgaaaagtgccatctctatagctgaggatgaagaatggaagagattacgatcattgctgtctccaaccttcaccagtggaaaactcaaggagagaaatctgaggcgggaagcagagacaggcaagcctgtcaccttgaaagacgtctttggggcctacagcatggatgtgatcactagcacatcatttggagtgaacatcgactctctcaacaatccacaagacccctttgtggaaaacaccaagaagcttttaagatttgattttttggatccattctttctctcaataacagtctttccattcctcatcccaattcttgaagtattaaatatctgtgtgtttccaagagaagttacaaattttttaagaaaatctgtaaaaaggatgaaagaaagtcgcctcgaagatacacaaaagcaccgagtggatttccttcagctgatgattgactctcagaattcaaaagaaactgagtcccacaaagctctgtccgatctggagctcgtggcccaatcaattatctttatttttgctggctatgaaaccacgagcagtgttctctccttcattatgtatgaactggccactcaccctgatgtccagcagaaactgcaggaggaaattgatgcagttttacccaataaggcaccacccacctatgatactgtgctacagatggagtatcttgacatggtggtgaatgaaacgctcagattattcccaattgctatgagacttgagagggtctgcaaaaaagatgttgagatcaatgggatgttcattcccaaaggggtggtggtgatgattccaactttgctcttcaagaaatctgtgcctgagaacaccagagacctcaaattactttgtgaatagaactctgaaatgaagatgggcttcatccaatggactgcataaataaccggggattctgtacatgcattgagctctctcattgtctgtgtagagtgttatacttgggaatataaaggaggtgaccaaatcagtgtgaggaggtagatttggctcctctgcttctcacgggactatttccaccacccccagttagcaccattaactcctcctgagctctgataagagaatcaacatttctcaataatttcctccacaaattattaatgaaaataagaattattttgatggctctaacaatgacatttatatcacatgttttctctggagtattctataagttttatgttaaatcaataaagaccactttacaaaagtattatcagatgctttcctgcacattaaggagaaatctatagaactgaatgagaaccaacaagtaaatatttttggtcattgtaatcactgttggcgtggggcctttgtcagaactagaatttgattattaacataggtgaaagttaatccactgtgactttgcccattgtttagaaagaatattcatagtttaattatgccttttttgatcaggcacagtggctcacgcctgtaatcctagcagtttgggaggctgagccgggtggatcgcctgaggtcaggagttcaagacaagcctggcctacatggttgaaaccccatctctactaaaaatacacaaattagctaggcatggtggactcgcctgtaatctcactacacaggaggctgaggcaggagaatcacttgaacctgggaggcggatgttgaagtgagctgagattgcaccactgcactccagtctgggtgagagtgagactcagtcttaaaaaaatatgcctttttgaagcacgtacattttgtaacaaagaactgaagctcttattatattattagttttgatttaatgttttcagcccatctcctttcatatttctgggagacagaaaacatgtttccctacacctcttgcattccatcctcaacacccaactgtctcgatgcaatgaacacttaataaaaaacagtcgattggtcaattgattgagcaataagcct

SEQ ID NO: 426771 - DNA, 1748 bp, Homo sapiens
  misc_feature (42)..(43): n is a, c, g, or t
  misc_feature (48)..(48): n is a, c, g, or t
ggtctgtgaacgtttctaatgatgtggataagaggggctagnntgacngactctcttatttaccaccgctaccagtctttccattcctcatcccaattcttgaagtattaaatatctgtgtgtttccaagagaagttacaaattttttaagaaaatctgtaaaaaggatgaaagaaagtcgcctcgaagatacacaaaagcaccgagtggatttccttcagctgatgattgactctcagaattcaaaagaaactgagtcccacaaagctctgtccgatctggagctcgtggcccaatcaattatctttatttttgctggctatgaaaccacgagcagtgttctctccttcattatgtatgaactggccactcaccctgatgtccagcagaaactgcaggaggaaattgatgcagttttacccaataaggcaccacccacctatgatactgtgctacagatggagtatcttgacatggtggtgaatgaaacgctcagattattcccaattgctatgagacttgagagggtctgcaaaaaagatgttgagatcaatgggatgttcattcccaaaggggtggtggtgatgattccaactttgctcttcaagaaatctgtgcctgagaacaccagagacctcaaattactttgtgaatagaactctgaaatgaagatgggcttcatccaatggactgcataaataaccggggattctgtacatgcattgagctctctcattgtctgtgtagagtgttatacttgggaatataaaggaggtgaccaaatcagtgtgaggaggtagatttggctcctctgcttctcacgggactatttccaccacccccagttagcaccattaactcctcctgagctctgataagagaatcaacatttctcaataatttcctccacaaattattaatgaaaataagaattattttgatggctctaacaatgacatttatatcacatgttttctctggagtattctataagttttatgttaaatcaataaagaccactttacaaaagtattatcagatgctttcctgcacattaaggagaaatctatagaactgaatgagaaccaacaagtaaatatttttggtcattgtaatcactgttggcgtggggcctttgtcagaactagaatttgattattaacataggtgaaagttaatccactgtgactttgcccattgtttagaaagaatattcatagtttaattatgccttttttgatcaggcacagtggctcacgcctgtaatcctagcagtttgggaggctgagccgggtggatcgcctgaggtcaggagttcaagacaagcctggcctacatggttgaaaccccatctctactaaaaatacacaaattagctaggcatggtggactcgcctgtaatctcactacacaggaggctgaggcaggagaatcacttgaacctgggaggcggatgttgaagtgagctgagattgcaccactgcactccagtctgggtgagagtgagactcagtcttaaaaaaatatgcctttttgaagcacgtacattttgtaacaaagaactgaagctcttattatattattagttttgatttaatgttttcagcccatctcctttcatatttctgggagacagaaaacatgtttccctacacctcttgcattccatcctcaacacccaactgtctcgatgcaatgaacacttaataaaaaacagtcgattggtcaattgattgagcaataagcct

SEQ ID NO: 426772 - DNA, 1868 bp, Homo sapiens
agaactatcaaactcctgagccaacaacttaatatgactagcttacacaatagcttttatagtaaagatacctctttacggactccacttatgactccctaaagcccatgtcgaagcccccatcgctgggtcaatagtacttgccgcagtactcttaaaactaggcggctaaaaaaaaaaaaaaaaaaaaaaaaaaaaaaaaaaaaaaaaaaaaaaaaaaaaaaaaaaaaaacctcgtgccgaattcggcaccaggaaagctccatgcacatagcccagcaaagagcaacacagagctgaaaggaagactcagaggagagagataagtaaggaaagtagtgatggctctcatcccagacttggccatggaaacctggcttctcctggctgtcagcctggtgctcctctatctatatggaacccattcacatggactttttaagaagcttggaattccagggcccacacctctgccttttttgggaaatattttgtcctaccataagggcttttgtatgtttgacatggaatgtcataaaaagtatggaaaagtgtggggcttttatgatggtcaacagcctgtgctggctatcacagatcctgacatgatcaaaacagtgctagtgaaagaatgttattctgtcttcacaaaccggaggccttttggtccagtgggatttatgaaaagtgccatctctatagctgaggatgaagaatggaagagattacgatcattgctgtctccaaccttcaccagtggaaaactcaaggagagaaatctgaggcgggaagcagagacaggcaagcctgtcaccttgaaagacgtctttggggcctacagcatggatgtgatcactagcacatcatttggagtgaacatcgactctctcaacaatccacaagacccctttgtggaaaacaccaagaagcttttaagatttgattttttggatccattctttctctcaataacagtctttccattcctcatcccaattcttgaagtattaaatatctgtgtgtttccaagagaagttacaaattttttaagaaaatctgtaaaaaggatgaaagaaagtcgcctcgaagatacacaaaagcaccgagtggatttccttcagctgatgattgactctcagaattcaattatctttatttttgctggctatgaaaccacgagcagtgttctctccttcattatgtatgaactggccactcaccctgatgtccagcagaaactgcaggaggaaattgatgcagttttacccaataaggcaccacctacctatgatgccgtggtacagatggagtaccttgacatggtggtgaatgaaacactcagattattcccagttgctattagacttgagaggacttgcaagaaagatgttgaaatcaatggggtattcattcccaaagggtcaatggtggtgattccaacttatgctcttcaccatgacccaaagtactggacagagcctgaggagttccgccctgaaaggttcagtaagaagaaggacagcatagatccttacatatacacaccctttggaactggacccagaaactgcattggcatgaggtttgctctcatgaacatgaaacttgctctaatcagagtccttcagaacttctccttcaaaccttgtaaagaaacacagatccccttgaaattagacacgcaaggacttcttcaaccagaaaaacccattgttctaaaggtggattcaagagatggaaccctaagtggagaatgagttattctaaggacttctactttggtcttcaagaaagctgtgccccagaacaccagagatttcaacttagtcaataaaaccttgaaataaagatgggcttaatctaatgta

SEQ ID NO: 426773 - DNA, 401 bp, Homo sapiens
agaagataagataattgaagagcttgggaaaataggttgggggagggagcagaaatatttgtgatcttactagctaacagaattgctgcttggtttattactaaaagggttttatttctcaagtctttctgtttgcttttcattctccaggtaagaagcgcaattccacactctacataaccatgttactcattgttccagtcatcgtcgcaggtgcaatcatagtactcctgctttacctaaaaaggtaaggtagctgccctggcaggttttgcagtttctgatagcctgtttgctgtggttattacttttagtgcttgtgttttatgtctgcccagtgtattagaagcatgttgcctgtaagtggctttcgggagtatgacatgacaaggaagtattac

SEQ ID NO: 426774 - DNA, 4012 bp, Homo sapiens
ggggactgccaaggctccagcccggccgggctccgaggcgagaggctgcatggagtggccggcgcggctctgcgggctgtgggcgctgctgctctgcgccggcggcgggggcgggggcgggggcgccgcgcctacggaaactcagccacctgtgacaaatttgagtgtctctgttgaaaacctctgcacagtaatatggacatggaatccacccgagggagccagctcaaattgtagtctatggtattttagtcattttggcgacaaacaagataagaaaatagctccggaaactcgtcgttcaatagaagtacccctgaatgagaggatttgtctgcaagtggggtcccagtgtagcaccaatgagagtgagaagcctagcattttggttgaaaaatgcatctcacccccagaaggtgatcctgagtctgctgtgactgagcttcaatgcatttggcacaacctgagctacatgaagtgttcttggctccctggaaggaataccagtcccgacactaactatactctctactattggcacagaagcctggaaaaaattcatcaatgtgaaaacatctttagagaaggccaatactttggttgttcctttgatctgaccaaagtgaaggattccagttttgaacaacacagtgtccaaataatggtcaaggataatgcaggaaaaattaaaccatccttcaatatagtgcctttaacttcccgtgtgaaacctgatcctccacatattaaaaacctctccttccacaatgatgacctatatgtgcaatgggagaatccacagaattttattagcagatgcctattttatgaagtagaagtcaataacagccaaactgagacacataatgttttctacgtccaagaggctaaatgtgagaatccagaatttgagagaaatgtggagaatacatcttgtttcatggtccctggtgttcttcctgatactttgaacacagtcagaataagagtcaaaacaaataagttatgctatgaggatgacaaactctggagtaattggagccaagaaatgagtataggtaagaagcgcaattccacactctacataaccatgttactcattgttccagtcatcgtcgcaggtgcaatcatagtactcctgctttacctaaaaaggctcaagattattatattccctccaattcctgatcctggcaagatttttaaagaaatgtttggagaccagaatgatgatactctgcactggaagaagtacgacatctatgagaagcaaaccaaggaggaaaccgactctgtagtgctgatagaaaacctgaagaaagcctctcagtgatggagataatttatttttaccttcactgtgaccttgagaagattcttcccattctccatttgttatctgggaacttattaaatggaaactgaaactactgcaccatttaaaaacaggcagctcataagagccacaggtctttatgttgagtcgcgcaccgaaaaactaaaaataatgggcgctttggagaagagtgtggagtcattctcattgaattataaaagccagcaggcttcaaactaggggacaaagcaaaaagtgatgatagtggtggagttaatcttatcaagagttgtgacaacttcctgagggatctatacttgctttgtgttctttgtgtcaacatgaacaaattttatttgtaggggaactcatttggggtgcaaatgctaatgtcaaacttgagtcacaaagaacatgtagaaaacaaaatggataaaatctgatatgtattgtttgggatcctattgaaccatgtttgtggctattaaaactcttttaacagtctgggctgggtccggtggctcacgcctgtaatcccagcaatttgggagtccgaggcgggcggatcactcgaggtcaggagttccagaccagcctgaccaaaatggtgaaacctcctctctactaaaactacaaaaattaactgggtgtggtggcgcgtgcctgtaatcccagctactcgggaagctgaggcaggtgaattgtttgaacctgggaggtggaggttgcagtgagcagagatcacaccactgcactctagcctgggtgacagagcaagactctgtctaaaaaacaaaacaaaacaaaacaaaacaaaaaaacctcttaatattctggagtcatcattcccttcgacagcattttcctctgctttgaaagccccagaaatcagtgttggccatgatgacaactacagaaaaaccagaggcagcttctttgccaagacctttcaaagccattttaggctgttaggggcagtggaggtagaatgactccttgggtattagagtttcaaccatgaagtctctaacaatgtattttcttcacctctgctactcaagtagcatttactgtgtctttggtttgtgctaggcccccgggtgtgaagcacagaccccttccaggggtttacagtctatttgagactcctcagttcttgccacttttttttttaatctccaccagtcatttttcagaccttttaactcctcaattccaacactgatttccccttttgcattctccctccttcccttccttgtagccttttgactttcattggaaattaggatgtaaatctgctcaggagacctggaggagcagaggataattagcatctcaggttaagtgtgagtaatctgagaaacaatgactaattcttgcatattttgtaacttccatgtgagggttttcagcattgatatttgtgcattttctaaacagagatgaggtggtatcttcacgtagaacattggtattcgcttgagaaaaaaagaatagttgaacctatttctctttctttacaagatgggtccaggattcctcttttctctgccataaatgattaattaaatagcttttgtgtcttacattggtagccagccagccaaggctctgtttatgcttttggggggcatatattgggttccattctcacctatccacacaacatatccgtatatatcccctctactcttacttcccccaaatttaaagaagtatgggaaatgagaggcatttcccccaccccatttctctcctcacacacagactcatattactggtaggaacttgagaactttatttccaagttgttcaaacatttaccaatcatattaatacaatgatgctatttgcaattcctgctcctaggggaggggagataagaaaccctcactctctacaggtttgggtacaagtggcaacctgcttccatggccgtgtagaagcatggtgccctggcttctctgaggaagctggggttcatgacaatggcagatgtaaagttattcttgaagtcagattgaggctgggagacagccgtagtagatgttctactttgttctgctgttctctagaaagaatatttggttttcctgtataggaatgagattaattcctttccaggtattttataattctgggaagcaaaacccatgcctccccctagccatttttactgttatcctatttagatggccatgaagaggatgctgtgaaattcccaacaaacattgatgctgacagtcatgcagtctgggagtggggaagtgatcttttgttcccatcctcttcttttagcagtaaaatagctgagggaaaagggagggaaaaggaagttatgggaatacctgtggtggttgtgatccctaggtcttgggagctcttggaggtgtctgtatcagtggatttcccatcccctgtgggaaattagtaggctcatttactgttttaggtctagcctatgtggattttttcctaacatacctaagcaaacccagtgtcaggatggtaattcttattctttcgttcagttaagtttttcccttcatctgggcactgaagggatatgtgaaacaatgttaacatttttggtagtcttcaaccagggattgtttctgtttaacttcttataggaaagcttgagtaaaataaatattgtctttttgtatgtca

SEQ ID NO: 426775 - DNA, 4045 bp, Homo sapiens
ggggactgccaaggctccagcccggccgggctccgaggcgagaggctgcatggagtggccggcgcggctctgcgggctgtgggcgctgctgctctgcgccggcggcgggggcgggggcgggggcgccgcgcctacggaaactcagccacctgtgacaaatttgagtgtctctgttgaaaacctctgcacagtaatatggacatggaatccacccgagggagccagctcaaattgtagtctatggtattttagtcattttggcgacaaacaagataagaaaatagctccggaaactcgtcgttcaatagaagtacccctgaatgagaggatttgtctgcaagtggggtcccagtgtagcaccaatgagagtgagaagcctagcattttggttgaaaaatgcatctcacccccagaaggtgatcctgagtctgctgtgactgagcttcaatgcatttggcacaacctgagctacatgaagtgttcttggctccctggaaggaataccagtcccgacactaactatactctctactattggcacagaagcctggaaaaaattcatcaatgtgaaaacatctttagagaaggccaatactttggttgttcctttgatctgaccaaagtgaaggattccagttttgaacaacacagtgtccaaataatggtcaaggataatgcaggaaaaattaaaccatccttcaatatagtgcctttaacttcccgtgtgaaacctgatcctccacatattaaaaacctctccttccacaatgatgacctatatgtgcaatgggagaatccacagaattttattagcagatgcctattttatgaagtagaagtcaataacagccaaactgagacacataatgttttctacgtccaagaggctaaatgtgagaatccagaatttgagagaaatgtggagaatacatcttgtttcatggtccctggtgttcttcctgatactttgaacacagtcagaataagagtcaaaacaaataagttatgctatgaggatgacaaactctggagtaattggagccaagaaatgagtataggtaagaagcgcaattccacactctacataaccatgttactcattgttccagtcatcgtcgcaggtgcaatcatagtactcctgctttacctaaaaaggctcaagattattatattccctccaattcctgatcctggcaagatttttaaagaaatgtttggagaccagaatgatgatactctgcactggaagaagtacgacatctatgagaagcaaaccaaggaggaaaccgactctgtagtgctgatagaaaacctgaagaaagcctctcagtgatggagataatttatttttaccttcactgtgaccttgagaagattcttcccattctccatttgttatctgggaacttattaaatggaaactgaaactactgcaccatttaaaaacaggcagctcataagagccacaggtctttatgttgagtcgcgcaccgaaaaactaaaaataatgggcgctttggagaagagtgtggagtcattctcattgaattataaaagccagcaggcttcaaactaggggacaaagcaaaaagtgatgatagtggtggagttaatcttatcaagagttgtgacaacttcctgagggatctatacttgctttgtgttctttgtgtcaacatgaacaaattttatttgtaggggaactcatttggggtgcaaatgctaatgtcaaacttgagtcacaaagaacatgtagaaaacaaaatggataaaatctgatatgtattgtttgggatcctattgaaccatgtttgtggctattaaaactcttttaacagtctgggctgggtccggtggctcacgcctgtaatcccagcaatttgggagtccgaggcgggcggatcactcgaggtcaggagttccagaccagcctgaccaaaatggtgaaacctcctctctactaaaactacaaaaattaactgggtgtggtggcgcgtgcctgtaatcccagctactcgggaagctgaggcaggtgaattgtttgaacctgggaggtggaggttgcagtgagcagagatcacaccactgcactctagcctgggtgacagagcaagactctgtctaaaaaacaaaacaaaacaaaacaaaacaaaaaaacctcttaatattctggagtcatcattcccttcgacagcattttcctctgctttgaaagccccagaaatcagtgttggccatgatgacaactacagaaaaaccagaggcagcttctttgccaagacctttcaaagccattttaggctgttaggggcagtggaggtagaatgactccttgggtattagagtttcaaccatgaagtctctaacaatgtattttcttcacctctgctactcaagtagcatttactgtgtctttggtttgtgctaggcccccgggtgtgaagcacagaccccttccaggggtttacagtctatttgagactcctcagttcttgccacttttttttttaatctccaccagtcatttttcagaccttttaactcctcaattccaacactgatttccccttttgcattctccctccttcccttccttgtagccttttgactttcattggaaattaggatgtaaatctgctcaggagacctggaggagcagaggataattagcatctcaggttaagtgtgagtaatctgagaaacaatgactaattcttgcatattttgtaacttccatgtgagggttttcagcattgatatttgtgcattttctaaacagagatgaggtggtatcttcacgtagaacattggtattcgcttgagaaaaaaagaatagttgaacctatttctctttctttacaagatgggtccaggattcctcttttctctgccataaatgattaattaaatagcttttgtgtcttacattggtagccagccagccaaggctctgtttatgcttttggggggcatatattgggttccattctcacctatccacacaacatatccgtatatatcccctctactcttacttcccccaaatttaaagaagtatgggaaatgagaggcatttcccccaccccatttctctcctcacacacagactcatattactggtaggaacttgagaactttatttccaagttgttcaaacatttaccaatcatattaatacaatgatgctatttgcaattcctgctcctaggggaggggagataagaaaccctcactctctacaggtttgggtacaagtggcaacctgcttccatggccgtgtagaagcatggtgccctggcttctctgaggaagctggggttcatgacaatggcagatgtaaagttattcttgaagtcagattgaggctgggagacagccgtagtagatgttctactttgttctgctgttctctagaaagaatatttggttttcctgtataggaatgagattaattcctttccaggtattttataattctgggaagcaaaacccatgcctccccctagccatttttactgttatcctatttagatggccatgaagaggatgctgtgaaattcccaacaaacattgatgctgacagtcatgcagtctgggagtggggaagtgatcttttgttcccatcctcttcttttagcagtaaaatagctgagggaaaagggagggaaaaggaagttatgggaatacctgtggtggttgtgatccctaggtcttgggagctcttggaggtgtctgtatcagtggatttcccatcccctgtgggaaattagtaggctcatttactgttttaggtctagcctatgtggattttttcctaacatacctaagcaaacccagtgtcaggatggtaattcttattctttcgttcagttaagtttttcccttcatctgggcactgaagggatatgtgaaacaatgttaacatttttggtagtcttcaaccagggattgtttctgtttaacttcttataggaaagcttgagtaaaataaatattgtctttttgtatgtcaagcgggccgccaccgcggtggaaactccagctt

SEQ ID NO: 426776 - DNA, 1109 bp, Homo sapiens
  misc_feature (1108)..(1109): n is a, c, g, or t
ggggactgccaaggctccagcccggccgggctccgaggcgagaggctgcatggagtggccggcgcggctctgcgggctgtgggcgctgctgctctgcgccggcggcgggggcgggggcgggggcgccgcgcctacggaaactcagccacctgtgacaaatttgagtgtctctgttgaaaacctctgcacagtaatatggacatggaatccacccgagggagccagctcaaattgtagtctatggtattttagtcattttggcgacaaacaagataagaaaatagctccggaaactcgtcgttcaatagaagtacccctgaatgagaggatttgtctgcaagtggggtcccagtgtagcaccaatgagagtgagaagcctagcattttggttgaaaaatgcatctcacccccagaaggtgatcctgagtctgctgtgactgagcttcaatgcatttggcacaacctgagctacatgaagtgttcttggctccctggaaggaataccagtcccgacactaactatactctctactattggcacagaagcctggaaaaaattcatcaatgtgaaaacatctttagagaaggccaatactttggttgttcctttgatctgaccaaagtgaaggattccagttttgaacaacacagtgtccaaataatggtcaaggataatgcaggaaaaattaaaccatccttcaatatagtgcctttaacttcccgtgtgaaacctgatcctccacatattaaaaacctctccttccacaatgatgacctatatgtgcaatgggagaatccacagaattttattagcagatgcctattttatgaagtagaagtcaataacagccaaactgagacacataatgttttctacgtaaggttttaaaattattgtttttatttggctatttttcttttacttgaatttcttacattgaaatatcaatgaaacatagctcttacatttgtcaccttatgatgatgatggtaatgaaacttcttgtctaaaataaggcatggtggaagatttgaagatttatggtatgatagtatcagctgcaagtttcaagccatttattcatctgtaagcttcttagaaaggccnn

SEQ ID NO: 426777 - DNA, 667 bp, Homo sapiens
ctgattacggggagtgtggcgacgtcagctaaatactttgacgccggtggggatagcgatgattatggtagcggagaatgtttggagaccagaatgatgatactctggaaacaaaccatcaggcctcccagaaagtatccgggatctgaaaatcaccaaatcaccacatccggacagtgagaagccagatccctcacccttcttgattggctgacaaaccaactgcttcctgttgaccaactcctcttccttatccctccctaattcctgttttcccacacatggtttcacttcttccctgctatacaaacacctaattttagttggtcagggagatggaattgagactgatctcttgtctccttggctgctgcacctgattaaagccttcttccttggcaatactcattgtctcagtgtttgcctttctgtgcagtgagaaaacaggacctagatggaactcctgctgttttggtaacattactacagacctctcagaatggctaaaataaaaataatgacaacacctcaataatagtaaggatgcaaagaaatcatatcactcatatatttcttgtgggtacataaaatggtacagctactctgagaaagagtggcagtttgtttaaaaacgaaacatgcaactatcacatggtccagcaattgt

SEQ ID NO: 426778 - DNA, 3958 bp, Homo sapiens
ggggactgccaaggctccagcccggccgggctccgaggcgagaggctgcatggagtggccggcgcggctctgcgggctgtgggcgctgctgctctgcgccggcggcgggggcgggggcgggggcgccgcgcctacggaaactcagccacctgtgacaaatttgagtgtctctgttgaaaacctctgcacagtaatatggacatggaatccacccgagggagccagctcaaattgtagtctatggtattttagtcattttggcgacaaacaagataagaaaatagctccggaaactcgtcgttcaatagaagtacccctgaatgagaggatttgtctgcaagtggggtcccagtgtagcaccaatgagagtgagaagcctagcattttggttgaaaaatgcatctcacccccagaaggtgatcctgagtctgctgtgactgagcttcaatgcatttggcacaacctgagctacatgaagtgttcttggctccctggaaggaataccagtcccgacactaactatactctctactattggcacagaagcctggaaaaaattcatcaatgtgaaaacatctttagagaaggccaatactttggttgttcctttgatctgaccaaagtgaaggattccagttttgaacaacacagtgtccaaataatggtcaaggataatgcaggaaaaattaaaccatccttcaatatagtgcctttaacttcccgtgtgaaacctgatcctccacatattaaaaacctctccttccacaatgatgacctatatgtgcaatgggagaatccacagaattttattagcagatgcctattttatgaagtagaagtcaataacagccaaactgagacacataatgttttctacgtccaagaggctaaatgtgagaatccagaatttgagagaaatgtggagaatacatcttgtttcatggtccctggtgttcttcctgatactttgaacacagtcagaataagagtcaaaacaaataagttatgctatgaggatgacaaactctggagtaattggagccaagaaatgagtataggtaagaagcgcaattccacactctacataaccatgttactcattgttccagtcatcgtcgcaggtgcaatcatagtactcctgctttacctaaaaaggctcaagattattatattccctccaattcctgatcctggcaagatttttaaagaaatgtttggagaccagaatgatgatactctgcactggaagaagtacgacatctatgagaagcaaaccaaggaggaaaccgactctgtagtgctgatagaaaacctgaagaaagcctctcagtgatggagataatttatttttaccttcactgtgaccttgagaagattcttcccattctccatttgttatctgggaacttattaaatggaaactgaaactactgcaccatttaaaaacaggcagctcataagagccacaggtctttatgttgagtcgcgcaccgaaaaactaaaaataatgggcgctttggagaagagtgtggagtcattctcattgaattataaaagccagcaggcttcaaactaggggacaaagcaaaaagtgatgatagtggtggagttaatcttatcaagagttgtgacaacttcctgagggatctatacttgctttgtgttctttgtgtcaacatgaacaaattttatttgtaggggaactcatttggggtgcaaatgctaatgtcaaacttgagtcacaaagaacatgtagaaaacaaaatggataaaatctgatatgtattgtttgggatcctattgaaccatgtttgtggctattaaaactcttttaacagtctgggctgggtccggtggctcacgcctgtaatcccagcaatttgggagtccgaggcgggcggatcactcgaggtcaggagttccagaccagcctgaccaaaatggtgaaacctcctctctactaaaactacaaaaattaactgggtgtggtggcgcgtgcctgtaatcccagctactcgggaagctgaggcaggtgaattgtttgaacctgggaggtggaggttgcagtgagcagagatcacaccactgcactctagcctgggtgacagagcaagactctgtctaaaaaacaaaacaaaacaaaacaaaacaaaaaaacctcttaatattctggagtcatcattcccttcgacagcattttcctctgctttgaaagccccagaaatcagtgttggccatgatgacaactacagaaaaaccagaggcagcttctttgccaagacctttcaaagccattttaggctgttaggggcagtggaggtagaatgactccttgggtattagagtttcaaccatgaagtctctaacaatgtattttcttcacctctgctactcaagtagcatttactgtgtctttggtttgtgctaggcccccgggtgtgaagcacagaccccttccaggggtttacagtctatttgagactcctcagttcttgccacttttttttttaatctccaccagtcatttttcagaccttttaactcctcaattccaacactgatttccccttttgcattctccctccttcccttccttgtagccttttgactttcattggaaattaggatgtaaatctgctcaggagacctggaggagcagaggataattagcatctcaggttaagtgtgagtaatctgagaaacaatgactaattcttgcatattttgtaacttccatgtgagggttttcagcattgatatttgtgcattttctaaacagagatgaggtggtatcttcacgtagaacattggtattcgcttgagaaacttttctctgccataaatgattaattaaatagcttttgtgtcttacattggtagccagccagccaaggctctgtttatgcttttggggggcatatattgggttccattctcacctatccacacaacatatccgtatatatcccctctactcttacttcccccaaatttaaagaagtatgggaaatgagaggcatttcccccaccccatttctctcctcacacacagactcatattactggtaggaacttgagaactttatttccaagttgttcaaacatttaccaatcatattaatacaatgatgctatttgcaattcctgctcctaggggaggggagataagaaaccctcactctctacaggtttgggtacaagtggcaacctgcttccatggccgtgtagaagcatggtgccctggcttctctgaggaagctggggttcatgacaatggcagatgtaaagttattcttgaagtcagattgaggctgggagacagccgtagtagatgttctactttgttctgctgttctctagaaagaatatttggttttcctgtataggaatgagattaattcctttccaggtattttataattctgggaagcaaaacccatgcctccccctagccatttttactgttatcctatttagatggccatgaagaggatgctgtgaaattcccaacaaacattgatgctgacagtcatgcagtctgggagtggggaagtgatcttttgttcccatcctcttcttttagcagtaaaatagctgagggaaaagggagggaaaaggaagttatgggaatacctgtggtggttgtgatccctaggtcttgggagctcttggaggtgtctgtatcagtggatttcccatcccctgtgggaaattagtaggctcatttactgttttaggtctagcctatgtggattttttcctaacatacctaagcaaacccagtgtcaggatggtaattcttattctttcgttcagttaagtttttcccttcatctgggcactgaagggatatgtgaaacaatgttaacatttttggtagtcttcaaccagggattgtttctgtttaacttcttataggaaagcttgagtaaaataaatattgtctttttgtatgtca

SEQ ID NO: 426779 - DNA, 4691 bp, Homo sapiens
ggggactgccaaggctccagcccggccgggctccgaggcgagaggctgcatggagtggccggcgcggctctgcgggctgtgggcgctgctgctctgcgccggcggcgggggcgggggcgggggcgccgcgcctacggaaactcagccacctgtgacaaatttgagtgtctctgttgaaaacctctgcacagtaatatggacatggaatccacccgagggagccagctcaaattgtagtctatggtattttagtcattttggcgacaaacaagataagaaaatagctccggaaactcgtcgttcaatagaagtacccctgaatgagaggatttgtctgcaagtggggtcccagtgtagcaccaatgagagtgagaagcctagcattttggttgaaaaatgcatctcacccccagaaggtgatcctgagtctgctgtgactgagcttcaatgcatttggcacaacctgagctacatgaagtgttcttggctccctggaaggaataccagtcccgacactaactatactctctactattggcacagaagcctggaaaaaattcatcaatgtgaaaacatctttagagaaggccaatactttggttgttcctttgatctgaccaaagtgaaggattccagttttgaacaacacagtgtccaaataatggtcaaggataatgcaggaaaaattaaaccatccttcaatatagtgcctttaacttcccgtgtgaaacctgatcctccacatattaaaaacctctccttccacaatgatgacctatatgtgcaatgggagaatccacagaattttattagcagatgcctattttatgaagtagaagtcaataacagccaaactgagacacataatgttttctacgtccaagaggctaaatgtgagaatccagaatttgagagaaatgtggagaatacatcttgtttcatggtccctggtgttcttcctgatactttgaacacagtcagaataagagtcaaaacaaataagttatgctatgaggatgacaaactctggagtaattggagccaagaaatgagtataggtaagaagcgcaattccacactctacataaccatgttactcattgttccagtcatcgtcgcaggtgcaatcatagtactcctgctttacctaaaaaggctcaagattattatattccctccaattcctgatcctggcaagatttttaaagaaatgtttggagaccagaatgatgatactctgcactggaagaagtacgacatctatgagaagcaaaccaaggaggaaaccgactctgtagtgctgatagaaaacctgaagaaagcctctcagtgatggagataatttatttttaccttcactgtgaccttgagaagattcttcccattctccatttgttatctgggaacttattaaatggaaactgaaactactgcaccatttaaaaacaggcagctcataagagccacaggtctttatgttgagtcgcgcaccgaaaaactaaaaataatgggcgctttggagaagagtgtggagtcattctcattgaattataaaagccagcaggcttcaaactaggggacaaagcaaaaagtgatgatagtggtggagttaatcttatcaagagttgtgacaacttcctgagggatctatacttgctttgtgttctttgtgtcaacatgaacaaattttatttgtaggggaactcatttggggtgcaaatgctaatgtcaaacttgagtcacaaagaacatgtagaaaacaaaatggataaaatctgatatgtattgtttgggatcctattgaaccatgtttgtggctattaaaactcttttaacagtctgggctgggtccggtggctcacgcctgtaatcccagcaatttgggagtccgaggcgggcggatcactcgaggtcaggagttccagaccagcctgaccaaaatggtgaaacctcctctctactaaaactacaaaaattaactgggtgtggtggcgcgtgcctgtaatcccagctactcgggaagctgaggcaggtgaattgtttgaacctgggaggtggaggttgcagtgagcagagatcacaccactgcactctagcctgggtgacagagcaagactctgtctaaaaaacaaaacaaaacaaaacaaaacaaaaaaacctcttaatattctggagtcatcattcccttcgacagcattttcctctgctttgaaagccccagaaatcagtgttggccatgatgacaactacagaaaaaccagaggcagcttctttgccaagacctttcaaagccattttaggctgttaggggcagtggaggtagaatgactccttgggtattagagtttcaaccatgaagtctctaacaatgtattttcttcacctctgctactcaagtagcatttactgtgtctttggtttgtgctaggcccccgggtgtgaagcacagaccccttccaggggtttacagtctatttgagactcctcagttcttgccacttttttttttaatctccaccagtcatttttcagaccttttaactcctcaattccaacactgatttccccttttgcattctccctccttcccttccttgtagccttttgactttcattggaaattaggatgtaaatctgctcaggagacctggaggagcagaggataattagcatctcaggttaagtgtgagtaatctgagaaacaatgactaattcttgcatattttgtaacttccatgtgagggttttcagcattgatatttgtgcattttctaaacagagatgaggtggtatcttcacgtagaacattggtattcgcttgagaaaaaaagaatagttgaacctatttctctttctttacaagatgggtccaggattcctcttttctctgccataaatgattaattaaatagcttttgtgtcttacattggtagccagccagccaaggctctgtttatgcttttggggggcatatattgggttccattctcacctatccacacaacatatccgtatatatcccctctactcttacttcccccaaatttaaagaagtatgggaaatgagaggcatttcccccaccccatttctctcctcacacacagactcatattactggtaggaacttgagaactttatttccaagttgttcaaacatttaccaatcatattaatacaatgatgctatttgcaattcctgctcctaggggaggggagataagaaaccctcactctctacaggtttgggtacaagtggcaacctgcttccatggccgtgtagaagcatggtgccctggcttctctgaggaagctggggttcatgacaatggcagatgtaaagttattcttgaagtcagattgaggctgggagacagccgtagtagatgttctactttgttctgctgttctctagaaagaatatttggttttcctgtataggaatgagattaattcctttccaggtattttataattctgggaagcaaaacccatgcctccccctagccatttttactgttatcctatttagatggccatgaagaggatgctgtgaaattcccaacaaacattgatgctgacagtcatgcagtctgggagtggggaagtgatcttttgttcccatcctcttcttttagcagtaaaatagctgagggaaaagggagggaaaaggaagttatgggaatacctgtggtggttgtgatccctaggtcttgggagctcttggaggtgtctgtatcagtggatttcccatcccctgtgggaaattagtaggctcatttactgttttaggtctagcctatgtggattttttcctaacatacctaagcaaacccagtgtcaggatggtaattcttattctttcgttcagttaagtttttcccttcatctgggcactgaagggatatgtgaaacaatgttaacatttttggtagtcttcaaccagggattgtttctgtttaacttcttataggaaagcttgagtaaaataaatattgtctttttgtatgtcacccaaatgttttcctttggtcttattttggggaaatggtgggaggtagagaaaattggagttaaaagaagaaacattatgaaaaaattccaagccagctattttatcttataatcattcatcatgagtttctttgatgttctggctgttccggtgtgcctatgttttctgataagggcataaatacacttagtttaatattaatttagcctttgtaagcagcacttgaagggacttaagtattcaataaattgtagttatgataattaatggaaatggagggttggtcctttctaatattaagctaaagtggaatgcaatatgattaatgatatacatgatgtgcaatgtctagtcacaagggaatatattagcaggttagattagagaccaagaaagtcagtttttgactggacgcagtggctcacgcctgtaatcccagcactttggaaggctgaagcgggctgatcatgaggtcaggagatccagaccatcctggctaacacggtgaaaccccagctgtactaaaaatacaaaaaaattagctgggtgtagtggcgggcgactgtggtcccagctactcaggaggctgaggcaggagaatggcgtgaacccgggaggtggagcttgcagcatgccactgcactccagcctgggcaacagagcgagactccgtctca

SEQ ID NO: 426780 - DNA, 3958 bp, Homo sapiens
ggggactgccaaggctccagcccggccgggctccgaggcgagaggctgcatggagtggccggcgcggctctgcgggctgtgggcgctgctgctctgcgccggcggcgggggcgggggcgggggcgccgcgcctacggaaactcagccacctgtgacaaatttgagtgtctctgttgaaaacctctgcacagtaatatggacatggaatccacccgagggagccagctcaaattgtagtctatggtattttagtcattttggcgacaaacaagataagaaaatagctccggaaactcgtcgttcaatagaagtacccctgaatgagaggatttgtctgcaagtggggtcccagtgtagcaccaatgagagtgagaagcctagcattttggttgaaaaatgcatctcacccccagaaggtgatcctgagtctgctgtgactgagcttcaatgcatttggcacaacctgagctacatgaagtgttcttggctccctggaaggaataccagtcccgacactaactatactctctactattggcacagaagcctggaaaaaattcatcaatgtgaaaacatctttagagaaggccaatactttggttgttcctttgatctgaccaaagtgaaggattccagttttgaacaacacagtgtccaaataatggtcaaggataatgcaggaaaaattaaaccatccttcaatatagtgcctttaacttcccgtgtgaaacctgatcctccacatattaaaaacctctccttccacaatgatgacctatatgtgcaatgggagaatccacagaattttattagcagatgcctattttatgaagtagaagtcaataacagccaaactgagacacataatgttttctacgtccaagaggctaaatgtgagaatccagaatttgagagaaatgtggagaatacatcttgtttcatggtccctggtgttcttcctgatactttgaacacagtcagaataagagtcaaaacaaataagttatgctatgaggatgacaaactctggagtaattggagccaagaaatgagtataggtaagaagcgcaattccacactctacataaccatgttactcattgttccagtcatcgtcgcaggtgcaatcatagtactcctgctttacctaaaaaggctcaagattattatattccctccaattcctgatcctggcaagatttttaaagaaatgtttggagaccagaatgatgatactctgcactggaagaagtacgacatctatgagaagcaaaccaaggaggaaaccgactctgtagtgctgatagaaaacctgaagaaagcctctcagtgatggagataatttatttttaccttcactgtgaccttgagaagattcttcccattctccatttgttatctgggaacttattaaatggaaactgaaactactgcaccatttaaaaacaggcagctcataagagccacaggtctttatgttgagtcgcgcaccgaaaaactaaaaataatgggcgctttggagaagagtgtggagtcattctcattgaattataaaagccagcaggcttcaaactaggggacaaagcaaaaagtgatgatagtggtggagttaatcttatcaagagttgtgacaacttcctgagggatctatacttgctttgtgttctttgtgtcaacatgaacaaattttatttgtaggggaactcatttggggtgcaaatgctaatgtcaaacttgagtcacaaagaacatgtagaaaacaaaatggataaaatctgatatgtattgtttgggatcctattgaaccatgtttgtggctattaaaactcttttaacagtctgggctgggtccggtggctcacgcctgtaatcccagcaatttgggagtccgaggcgggcggatcactcgaggtcaggagttccagaccagcctgaccaaaatggtgaaacctcctctctactaaaactacaaaaattaactgggtgtggtggcgcgtgcctgtaatcccagctactcgggaagctgaggcaggtgaattgtttgaacctgggaggtggaggttgcagtgagcagagatcacaccactgcactctagcctgggtgacagagcaagactctgtctaaaaaacaaaacaaaacaaaacaaaacaaaaaaacctcttaatattctggagtcatcattcccttcgacagcattttcctctgctttgaaagccccagaaatcagtgttggccatgatgacaactacagaaaaaccagaggcagcttctttgccaagacctttcaaagccattttaggctgttaggggcagtggaggtagaatgactccttgggtattagagtttcaaccatgaagtctctaacaatgtattttcttcacctctgctactcaagtagcatttactgtgtctttggtttgtgctaggcccccgggtgtgaagcacagaccccttccaggggtttacagtctatttgagactcctcagttcttgccacttttttttttaatctccaccagtcatttttcagaccttttaactcctcaattccaacactgatttccccttttgcattctccctccttcccttccttgtagccttttgactttcattggaaattaggatgtaaatctgctcaggagacctggaggagcagaggataattagcatctcaggttaagtgtgagtaatctgagaaacaatgactaattcttgcatattttgtaacttccatgtgagggttttcagcattgatatttgtgcattttctaaacagagatgaggtggtatcttcacgtagaacattggtattcgcttgagaaaaaaagaatagttgaacctatttctctttctttacaagatgggtccaggattcctcttttctctgccataaatgattaattaaatagcttttgtgtcttacattggtagccagccagccaaggctctgtttatgcttttggggggcatatattgggttccattctcacctatccacacaacatatccgtatatatcccctctactcttacttcccccaaatttaaagaagtatgggaaatgagaggcatttcccccaccccatttctctcctcacacacagactcatattactggtaggaacttgagaactttatttccaagttgttcaaacatttaccaatcatattaatacaatgatgctatttgcaattcctgctcctaggggaggggagataagaaaccctcactctctacaggtttgggtacaagtggcaacctgcttccatggccgtgtagaagcatggtgccctggcttctctgaggaagctggggttcatgacaatggcagatgtaaagttattcttgaagtcagattgaggctgggagacagccgtagtagatgttctactttgttctgctgttctctagaaagaatatttggttttcctgtataggaatgagattaattcctttccaggtattttataattctgggaagcaaaacccatgcctccccctagccatttttactgttatcctatttagatggccatgaagaggatgctgtgaaattcccaacaaacattgatgctgacagtcatgcagtctgggagtggggaagtgatcttttgttcccatcctcttcttttagcagtaaaatagctgagggaaaagggagggaaaaggaagttatgggaatacctgtggtggttgtgatccctaggtcttgggagctcttggaggtgtctgtatcagtggatttcccatcccctgtgggaaattagtaggctcatttactgttttaggtctagcctatgtggattttttcctaacatactttcccttcatctgggcactgaagggatatgtgaaacaatgttaacatttttggtagtcttcaaccagggattgtttctgtttaacttcttataggaaagcttgagtaaaataaatattgtctttttgtatgtca

SEQ ID NO: 426781 - DNA, 3673 bp, Homo sapiens
  misc_feature (3590)..(3590): n is a, c, g, or t
  misc_feature (3595)..(3595): n is a, c, g, or t
  misc_feature (3665)..(3665): n is a, c, g, or t
ggggactgccaaggctccagcccggccgggctccgaggcgagaggctgcatggagtggccggcgcggctctgcgggctgtgggcgctgctgctctgcgccggcggcgggggcgggggcgggggcgccgcgcctacggaaactcagccacctgtgacaaatttgagtgtctctgttgaaaacctctgcacagtaatatggacatggaatccacccgagggagccagctcaaattgtagtctatggtattttagtcattttggcgacaaacaagataagaaaatagctccggaaactcgtcgttcaatagaagtacccctgaatgagaggatttgtctgcaagtggggtcccagtgtagcaccaatgagagtgagaagcctagcattttggttgaaaaatgcatctcacccccagaaggtgatcctgagtctgctgtgactgagcttcaatgcatttggcacaacctgagctacatgaagtgttcttggctccctggaaggaataccagtcccgacactaactatactctctactattggcacagaagcctggaaaaaattcatcaatgtgaaaacatctttagagaaggccaatactttggttgttcctttgatctgaccaaagtgaaggattccagttttgaacaacacagtgtccaaataatggtcaaggataatgcaggaaaaattaaaccatccttcaatatagtgcctttaacttcccgtgtgaaacctgatcctccacatattaaaaacctctccttccacaatgatgacctatatgtgcaatgggagaatccacagaattttattagcagatgcctattttatgaagtagaagtcaataacagccaaactgagacacataatgttttctacgtccaagaggctaaatgtgagaatccagaatttgagagaaatgtggagaatacatcttgtttcatggtccctggtgttcttcctgatactttgaacacagtcagaataagagtcaaaacaaataagttatgctatgaggatgacaaactctggagtaattggagccaagaaatgagtataggtaagaagcgcaattccacactctacataaccatgttactcattgttccagtcatcgtcgcaggtgcaatcatagtactcctgctttacctaaaaaggctcaagattattatattccctccaattcctgatcctggcaagatttttaaagaaatgtttggagaccagaatgatgatactctgcactggaagaagtacgacatctatgagaagcaaaccaaggaggaaaccgactctgtagtgctgatagaaaacctgaagaaagcctctcagtgatggagataatttatttttaccttcactgtgaccttgagaagattcttcccattctccatttgttatctgggaacttattaaatggaaactgaaactactgcaccatttaaaaacaggcagctcataagagccacaggtctttatgttgagtcgcgcaccgaaaaactaaaaataatgggcgctttggagaagagtgtggagtcattctcattgaattataaaagccagcaggcttcaaactaggggacaaagcaaaaagtgatgatagtggtggagttaatcttatcaagagttgtgacaacttcctgagggatctatacttgctttgtgttctttgtgtcaacatgaacaaattttatttgtaggggaactcatttggggtgcaaatgctaatgtcaaacttgagtcacaaagaacatgtagaaaacaaaatggataaaatctgatatgtattgtttgggatcctattgaaccatgtttgtggctattaaaactcttttaacagtctgggctgggtccggtggctcacgcctgtaatcccagcaatttgggagtccgaggcgggcggatcactcgaggtcaggagttccagaccagcctgaccaaaatggtgaaacctcctctctactaaaactacaaaaattaactgggtgtggtggcgcgtgcctgtaatcccagctactcgggaagctgaggcaggtgaattgtttgaacctgggaggtggaggttgcagtgagcagagatcacaccactgcactctagcctgggtgacagagcaagactctgtctaaaaaacaaaacaaaacaaaacaaaacaaaaaaacctcttaatattctggagtcatcattcccttcgacagcattttcctctgctttgaaagccccagaaatcagtgttggccatgatgacaactacagaaaaaccagaggcagcttctttgccaagacctttcaaagccattttaggctgttaggggcagtggaggtagaatgactccttgggtattagagtttcaaccatgaagtctctaacaatgtattttcttcacctctgctactcaagtagcatttactgtgtctttggtttgtgctaggcccccgggtgtgaagcacagaccccttccaggggtttacagtctatttgagactcctcagttcttgccacttttttttttaatctccaccagtcatttttcagaccttttaactcctcaattccaacactgatttccccttttgcattctccctccttcccttccttgtagccttttgactttcattggaaattaggatgtaaatctgctcaggagacctggaggagcagaggataattagcatctcaggttaagtgtgagtaatctgagaaacaatgactaattcttgcatattttgtaacttccatgtgagggttttcagcattgatatttgtgcattttctaaacagagatgaggtggtatcttcacgtagaacattggtattcgcttgagaaaaaaagaatagttgaacctatttctctttctttacaagatgggtccaggattcctcttttctctgccataaatgattaattaaatagcttttgtgtcttacattggtagccagccagccaaggctctgtttatgcttttggggggcatatattgggttccattctcacctatccacacaacatatccgtatatatcccctctactcttacttcccccaaatttaaagaagtatgggaaatgagaggcatttcccccaccccatttctctcctcacacacagactcatattactggtaggaacttgagaactttatttccaagttgttcaaacatttaccaatcatattaatacaatgatgctatttgcaattcctgctcctaggggaggggagataagaaaccctcactctctacaggtttgggtacaagtggcaacctgcttccatggccgtgtagaagcatggtgccctggcttctctgaggaagctggggttcatgacaatggcagatgtaaagttattcttgaagtcagattgaggctgggagacagccgtagtagatgttctactttgttctgctgttctctagaaagaatatttggttttcctgtataggaatgagattaattcctttccaggtattttataattctgggaagcaaaacccatgcctccccctagccatttttactgttatcctatttagatggccatgaagaggatgctgtgaaattcccaacaaacatttggaatgctgaacaagtncatgncaagtcttgggggaattggggggaaattgaatcttttttggtttccccaattccctccttcctttttaanccaagtta

SEQ ID NO: 426782 - DNA, 4117 bp, Homo sapiens
ggggactgccaaggctccagcccggccgggctccgaggcgagaggctgcatggagtggccggcgcggctctgcgggctgtgggcgctgctgctctgcgccggcggcgggggcgggggcgggggcgccgcgcctacggaaactcagccacctgtgacaaatttgagtgtctctgttgaaaacctctgcacagtaatatggacatggaatccacccgagggagccagctcaaattgtagtctatggtattttagtcattttggcgacaaacaagataagaaaatagctccggaaactcgtcgttcaatagaagtacccctgaatgagaggatttgtctgcaagtggggtcccagtgtagcaccaatgagagtgagaagcctagcattttggttgaaaaatgcatctcacccccagaaggtgatcctgagtctgctgtgactgagcttcaatgcatttggcacaacctgagctacatgaagtgttcttggctccctggaaggaataccagtcccgacactaactatactctctactattggcacagaagcctggaaaaaattcatcaatgtgaaaacatctttagagaaggccaatactttggttgttcctttgatctgaccaaagtgaaggattccagttttgaacaacacagtgtccaaataatggtcaaggataatgcaggaaaaattaaaccatccttcaatatagtgcctttaacttcccgtggtccaacctctccatactgccacattggggatgaagtttcaacatgagtttgggagaagataaacattcaaatcatagcaggaacccaggccatctgactctaagtgaaacctgatcctccacatattaaaaacctctccttccacaatgatgacctatatgtgcaatgggagaatccacagaattttattagcagatgcctattttatgaagtagaagtcaataacagccaaactgagacacataatgttttctacgtccaagaggctaaatgtgagaatccagaatttgagagaaatgtggagaatacatcttgtttcatggtccctggtgttcttcctgatactttgaacacagtcagaataagagtcaaaacaaataagttatgctatgaggatgacaaactctggagtaattggagccaagaaatgagtataggtaagaagcgcaattccacactctacataaccatgttactcattgttccagtcatcgtcgcaggtgcaatcatagtactcctgctttacctaaaaaggctcaagattattatattccctccaattcctgatcctggcaagatttttaaagaaatgtttggagaccagaatgatgatactctgcactggaagaagtacgacatctatgagaagcaaaccaaggaggaaaccgactctgtagtgctgatagaaaacctgaagaaagcctctcagtgatggagataatttatttttaccttcactgtgaccttgagaagattcttcccattctccatttgttatctgggaacttattaaatggaaactgaaactactgcaccatttaaaaacaggcagctcataagagccacaggtctttatgttgagtcgcgcaccgaaaaactaaaaataatgggcgctttggagaagagtgtggagtcattctcattgaattataaaagccagcaggcttcaaactaggggacaaagcaaaaagtgatgatagtggtggagttaatcttatcaagagttgtgacaacttcctgagggatctatacttgctttgtgttctttgtgtcaacatgaacaaattttatttgtaggggaactcatttggggtgcaaatgctaatgtcaaacttgagtcacaaagaacatgtagaaaacaaaatggataaaatctgatatgtattgtttgggatcctattgaaccatgtttgtggctattaaaactcttttaacagtctgggctgggtccggtggctcacgcctgtaatcccagcaatttgggagtccgaggcgggcggatcactcgaggtcaggagttccagaccagcctgaccaaaatggtgaaacctcctctctactaaaactacaaaaattaactgggtgtggtggcgcgtgcctgtaatcccagctactcgggaagctgaggcaggtgaattgtttgaacctgggaggtggaggttgcagtgagcagagatcacaccactgcactctagcctgggtgacagagcaagactctgtctaaaaaacaaaacaaaacaaaacaaaacaaaaaaacctcttaatattctggagtcatcattcccttcgacagcattttcctctgctttgaaagccccagaaatcagtgttggccatgatgacaactacagaaaaaccagaggcagcttctttgccaagacctttcaaagccattttaggctgttaggggcagtggaggtagaatgactccttgggtattagagtttcaaccatgaagtctctaacaatgtattttcttcacctctgctactcaagtagcatttactgtgtctttggtttgtgctaggcccccgggtgtgaagcacagaccccttccaggggtttacagtctatttgagactcctcagttcttgccacttttttttttaatctccaccagtcatttttcagaccttttaactcctcaattccaacactgatttccccttttgcattctccctccttcccttccttgtagccttttgactttcattggaaattaggatgtaaatctgctcaggagacctggaggagcagaggataattagcatctcaggttaagtgtgagtaatctgagaaacaatgactaattcttgcatattttgtaacttccatgtgagggttttcagcattgatatttgtgcattttctaaacagagatgaggtggtatcttcacgtagaacattggtattcgcttgagaaaaaaagaatagttgaacctatttctctttctttacaagatgggtccaggattcctcttttctctgccataaatgattaattaaatagcttttgtgtcttacattggtagccagccagccaaggctctgtttatgcttttggggggcatatattgggttccattctcacctatccacacaacatatccgtatatatcccctctactcttacttcccccaaatttaaagaagtatgggaaatgagaggcatttcccccaccccatttctctcctcacacacagactcatattactggtaggaacttgagaactttatttccaagttgttcaaacatttaccaatcatattaatacaatgatgctatttgcaattcctgctcctaggggaggggagataagaaaccctcactctctacaggtttgggtacaagtggcaacctgcttccatggccgtgtagaagcatggtgccctggcttctctgaggaagctggggttcatgacaatggcagatgtaaagttattcttgaagtcagattgaggctgggagacagccgtagtagatgttctactttgttctgctgttctctagaaagaatatttggttttcctgtataggaatgagattaattcctttccaggtattttataattctgggaagcaaaacccatgcctccccctagccatttttactgttatcctatttagatggccatgaagaggatgctgtgaaattcccaacaaacattgatgctgacagtcatgcagtctgggagtggggaagtgatcttttgttcccatcctcttcttttagcagtaaaatagctgagggaaaagggagggaaaaggaagttatgggaatacctgtggtggttgtgatccctaggtcttgggagctcttggaggtgtctgtatcagtggatttcccatcccctgtgggaaattagtaggctcatttactgttttaggtctagcctatgtggattttttcctaacatacctaagcaaacccagtgtcaggatggtaattcttattctttcgttcagttaagtttttcccttcatctgggcactgaagggatatgtgaaacaatgttaacatttttggtagtcttcaaccagggattgtttctgtttaacttcttataggaaagcttgagtaaaataaatattgtctttttgtatgtca

SEQ ID NO: 426783 - DNA, 2383 bp, Homo sapiens
ggggactgccaaggctccagcccggccgggctccgaggcgagaggctgcatggagtggccggcgcggctctgcgggctgtgggcgctgctgctctgcgccggcggcgggggcgggggcgggggcgccgcgcctacggaaactcagccacctgtgacaaatttgagtgtctctgttgaaaacctctgcacagtaatatggacatggaatccacccgagggagccagctcaaattgtagtctatggtattttagtcattttggcgacaaacaagataagaaaatagctccggaaactcgtcgttcaatagaagtacccctgaatgagaggatttgtctgcaagtggggtcccagtgtagcaccaatgagagtgagaagcctagcattttggttgaaaaatgcatctcacccccagaaggtgatcctgagtctgctgtgactgagcttcaatgcatttggcacaacctgagctacatgaagtgttcttggctccctggaaggaataccagtcccgacactaactatactctctactattggcacagaagcctggaaaaaattcatcaatgtgaaaacatctttagagaaggccaatactttggttgttcctttgatctgaccaaagtgaaggattccagttttgaacaacacagtgtccaaataatggtcaaggataatgcaggaaaaattaaaccatccttcaatatagtgcctttaacttcccgtgtgaaacctgatcctccacatattaaaaacctctccttccacaatgatgacctatatgtgcaatgggagaatccacagaattttattagcagatgcctattttatgaagtagaagtcaataacagccaaactgagacacataatgttttctacgtccaagaggctaaatgtgagaatccagaatttgagagaaatgtggagaatacatcttgtttcatggtccctggtgttcttcctgatactttgaacacagtcagaataagagtcaaaacaaataagttatgctatgaggatgacaaactctggagtaattggagccaagaaatgagtataggtaagaagcgcaattccacactctacataaccatgttactcattgttccagtcatcgtcgcaggtgcaatcatagtactcctgctttacctaaaaaggctcaagattattatattccctccaattcctgatcctggcaagatttttaaagaaatgtttggagaccagaatgatgatactctgcactggaagaagtacgacatctatgagaagcaaaccaaggaggaaaccgactctgtagtgctgatagaaaacctgaagaaagcctctcagtgatggagataatttatttttaccttcactgtgaccttgagaagattcttcccattctccatttgttatctgggaacttattaaatggaaactgaaactactgcaccatttaaaaacaggcagctcataagagccacaggtctttatgttgagtcgcgcaccgaaaaactaaaaataatgggcgctttggagaagagtgtggagtcattctcattgaattataaaagccagcaggcttcaaactaggggacaaagcaaaaagtgatgatagtggtggagttaatcttatcaagagttgtgacaacttcctgagggatctatacttgctttgtgttctttgtgtcaacatgaacaaattttatttgtaggggaactcatttggggtgcaaatgctaatgtcaaacttgagtcacaaagaacatgtagaaaacaaaatggataaaatctgatatgtattgtttgggatcctattgaaccatgtttgtggctattaaaactcttttaacagtcaaaaaaaaaaaaaaaaaaaaaaaaaaaaaaaaaaaaaaaaaaaaaaaaaaaaaaaaaaaaaaaaaaaaaaaaaaaaaaaaaaaaaaaaaaaaagaaaaaaaaaaaaaagaaaagaaaaaaaaagaagaagaggggggggggcctagaatcaaatattctatacgaaggcgggggggagtagtaaaatgatgcacgacctcttatttgttagtagaaagatgaggaggcactgtagattgtggatgaagagtgatttataaatatagaataagggcagacgggggtgtaatttataaataagaacgtgagtgggggaggaaacaagatgacctaagtgtaggtgtacgtttgtgtaataagaagaaacatacaaatgttggagggggggaataatgatataaggaataagacactatcgaaagaatataaatactagtggagggagagtaataatacagggtgatgtgatgtagtgagaaaaagcactatttatggcggaggaagatggtggtataggaagataatataaaaaaatataaggga

SEQ ID NO: 426784 - DNA, 2060 bp, Homo sapiens
ggggactgccaaggctccagcccggccgggctccgaggcgagaggctgcatggagtggccggcgcggctctgcgggctgtgggcgctgctgctctgcgccggcggcgggggcgggggcgggggcgccgcgcctacggaaactcagccacctgtgacaaatttgagtgtctctgttgaaaacctctgcacagtaatatggacatggaatccacccgagggagccagctcaaattgtagtctatggtattttagtcattttggcgacaaacaagataagaaaatagctccggaaactcgtcgttcaatagaagtacccctgaatgagaggatttgtctgcaagtggggtcccagtgtagcaccaatgagagtgagaagcctagcattttggttgaaaaatgcatctcacccccagaaggtgatcctgagtctgctgtgactgagcttcaatgcatttggcacaacctgagctacatgaagtgttcttggctccctggaaggaataccagtcccgacactaactatactctctactattggcacagaagcctggaaaaaattcatcaatgtgaaaacatctttagagaaggccaatactttggttgttcctttgatctgaccaaagtgaaggattccagttttgaacaacacagtgtccaaataatggtcaaggataatgcaggaaaaattaaaccatccttcaatatagtgcctttaacttcccgtgtgaaacctgatcctccacatattaaaaacctctccttccacaatgatgacctatatgtgcaatgggagaatccacagaattttattagcagatgcctattttatgaagtagaagtcaataacagccaaactgagacacataatgttttctacgtccaagaggctaaatgtgagaatccagaatttgagagaaatgtggagaatacatcttgtttcatggtccctggtgttcttcctgatactttgaacacagtcagaataagagtcaaaacaaataagttatgctatgaggatgacaaactctggagtaattggagccaagaaatgagtataggtaagaagcgcaattccacactctacataaccatgttactcattgttccagtcatcgtcgcaggtgcaatcatagtactcctgctttacctaaaaaggctcaagattattatattccctccaattcctgatcctggcaagatttttaaagaaatgtttggagaccagaatgatgatactctgcactggaagaagtacgacatctatgagaagcaaaccaaggaggaaaccgactctgtagtgctgatagaaaacctgaagaaagcctctcagtgatggagataatttatttttaccttcactgtgaccttgagaagattcttcccattctccatttgttatctgggaacttattaaatggaaactgaaactactgcaccatttaaaaacaggcagctcataagagccacaggtctttatgttgagtcgcgcaccgaaaaactaaaaataatgggcgctttggagaagagtgtggagtcattctcattgaattataaaagccagcaggcttcaaactaggggacaaagcaaaaagtgatgatagtggtggagttaatcttatcaagagttgtgacaacttcctgagggatctatacttgctttgtgttctttgtgtcaacatgaacaaattttatttgtaggggaactcatttggggtgcaaatgctaatgtcaaacttgagtcacaaagaacatgtagaaaacaaaatggataaaatctgatatgtattgtttgggatcctattgaaccatgtttgtggctattaaaactcttttaacagtctgggctgggtccggtggctcacgcctgtaatcccagcaatttgggagtccgaggcgggcggatcactcgaggtcaggagttccagaccagcctgaccaaaatggtgaaacctcctccccaactcatcgccttaccacgctaatcctactatctccccttttatactaataatcttataagagaaaaaccagcacacccgacacaacgacaacacaacaga

SEQ ID NO: 426785 - DNA, 1800 bp, Homo sapiens
ggggactgccaaggctccagcccggccgggctccgaggcgagaggctgcatggagtggccggcgcggctctgcgggctgtgggcgctgctgctctgcgccggcggcgggggcgggggcgggggcgccgcgcctacggaaactcagccacctgtgacaaatttgagtgtctctgttgaaaacctctgcacagtaatatggacatggaatccacccgagggagccagctcaaattgtagtctatggtattttagtcattttggcgacaaacaagataagaaaatagctccggaaactcgtcgttcaatagaagtacccctgaatgagaggatttgtctgcaagtggggtcccagtgtagcaccaatgagagtgagaagcctagcattttggttgaaaaatgcatctcacccccagaaggtgatcctgagtctgctgtgactgagcttcaatgcatttggcacaacctgagctacatgaagtgttcttggctccctggaaggaataccagtcccgacactaactatactctctactattggcacagaagcctggaaaaaattcatcaatgtgaaaacatctttagagaaggccaatactttggttgttcctttgatctgaccaaagtgaaggattccagttttgaacaacacagtgtccaaataatggtcaaggataatgcaggaaaaattaaaccatccttcaatatagtgcctttaacttcccgtgtgaaacctgatcctccacatattaaaaacctctccttccacaatgatgacctatatgtgcaatgggagaatccacagaattttattagcagatgcctattttatgaagtagaagtcaataacagccaaactgagacacataatgttttctacgtccaagaggctaaatgtgagaatccagaatttgagagaaatgtggagaatacatcttgtttcatggtccctggtgttcttcctgatactttgaacacagtcagaataagagtcaaaacaaataagttatgctatgaggatgacaaactctggagtaattggagccaagaaatgagtataggtaagaagcgcaattccacactctacataaccatgttactcattgttccagtcatcgtcgcaggtgcaatcatagtactcctgctttacctaaaaaggctcaagattattatattccctccaattcctgatcctggcaagatttttaaagaaatgtttggagaccagaatgatgatactctggaaacaaaccatcaggcctcccagaaagtatccgggatctgaaaatcaccaaatcaccacatccggacagtgagaagccagatccctcacccttcttgattggctgacaaaccaactgcttcctgttgaccaactcctcttccttatccctccctaattcctgttttcccacacatggtttcacttcttccctgctatacaaacacctaattttagttggtcagggagatggaattgagactgatctcttgtctccttggctgctgcacctgattaaagccttcttccttggcaatactcattgtctcagtgtttgcctttctgtgcagtgagaaaacaggacctagatggaactcctgctgttttggtaacattactacagacctctcagaatggctaaaataaaaataatgacaacacctcaataatagtaaggatgcaaagaaatcatatcactcatatatttcttgtgggtacataaaatggtacagctactctgagaaagagtggcagtttgtttaaaaacgaaacatgcaactatcacatggtccagcaattgt

SEQ ID NO: 426786 - DNA, 1474 bp, Homo sapiens
ggggactgccaaggctccagcccggccgggctccgaggcgagaggctgcatggagtggccggcgcggctctgcgggctgtgggcgctgctgctctgcgccggcggcgggggcgggggcgggggcgccgcgcctacggaaactcagccacctgtgacaaatttgagtgtctctgttgaaaacctctgcacagtaatatggacatggaatccacccgagggagccagctcaaattgtagtctatggtattttagtcattttggcgacaaacaagataagaaaatagctccggaaactcgtcgttcaatagaagtacccctgaatgagaggatttgtctgcaagtggggtcccagtgtagcaccaatgagagtgagaagcctagcattttggttgaaaaatgcatctcacccccagaaggtgatcctgagtctgctgtgactgagcttcaatgcatttggcacaacctgagctacatgaagtgttcttggctccctggaaggaataccagtcccgacactaactatactctctactattggcacagaagcctggaaaaaattcatcaatgtgaaaacatctttagagaaggccaatactttggttgttcctttgatctgaccaaagtgaaggattccagttttgaacaacacagtgtccaaataatggtcaaggataatgcaggaaaaattaaaccatccttcaatatagtgcctttaacttcccgtgtgaaacctgatcctccacatattaaaaacctctccttccacaatgatgacctatatgtgcaatgggagaatccacagaattttattagcagatgcctattttatgaagtagaagtcaataacagccaaactgagacacataatgttttctacgtccaagaggctaaatgtgagaatccagaatttgagagaaatgtggagaatacatcttgtttcatggtccctggtgttcttcctgatactttgaacacagtcagaataagagtcaaaacaaataagttatgctatgaggatgacaaactctggagtaattggagccaagaaatgagtataggtaagaagcgcaattccacactctacataaccatgttactcattgttccagtcatcgtcgcaggtgcaatcatagtactcctgctttacctaaaaaggctcaagattattatattccctccaattcctgatcctggcaagatttttaaagaaatgtttggagaccagaatgatgatactctgccctggaagaaaataagcttaattaggctcagagaggtgaagctacttgttcaaggtcacacaatccattcatttttctccttgattctaccttagtccaagaaaccatcataccttgtccagactgctgctaacagctgcctaaatagtcaccatgccttcagtttggtgtctactttaatccattgtccaccttacacttccagaaacatctatttaaaacaccatcttcca

SEQ ID NO: 426787 - DNA, 614 bp, Homo sapiens
aaccattaaaaatactgttgataaattcatttttttttgtccttgatttgaacagaaactcagccacctgtgacaaatttgagtgtctctgttgaaaacctctgcacagtaatatggacatggaatccacccgagggagccagctcaaattgtagtctatggtattttagtcattttggcgacaaacaagataaggtaagttttctgcaacatgttacattgatgaggtaaagtgaacactatgaattggagccaagaataagccaaattctagtcttacgtcaaagtggaaattgtattttagggtgtgtttaaatttcagttggggaaattatagaagcaactattgacacaagtgaacacttaaaaatatttgctaattatttgacaattaaatgcaattgagattgctctgacaggaaatactagatatctttttctctaaggtactcaataaataattatgttattgttaaaatttgttcctatgttcctgcctgtagctgtattgccttgtatctatataacacttaattttggggaatttttacatttaccatcttgctaatcacatggacaaatagatgtacaggcactatgtggtgtaaaagtaa

SEQ ID NO: 426788 - DNA, 1503 bp, Homo sapiens
ggggactgccaaggctccagcccggccgggctccgaggcgagaggctgcatggagtggccggcgcggctctgcgggctgtgggcgctgctgctctgcgccggcggcgggggcgggggcgggggcgccgcgcctacggaaactcagccacctgtgacaaatttgagtgtctctgttgaaaacctctgcacagtaatatggacatggaatccacccgagggagccagctcaaattgtagtctatggtattttagtcattttggcgacaaacaagataagaaaatagctccggaaactcgtcgttcaatagaagtacccctgaatgagaggatttgtctgcaagtggggtcccagtgtagcaccaatgagagtgagaagcctagcattttggttgaaaaatgcatctcacccccagaaggtgatcctgagtctgctgtgactgagcttcaatgcatttggcacaacctgagctacatgaagtgttcttggctccctggaaggaataccagtcccgacactaactatactctctactattggcacagaagcctggaaaaaattcatcaatgtgaaaacatctttagagaaggccaatactttggttgttcctttgatctgaccaaagtgaaggattccagttttgaacaacacagtgtccaaataatggtcaaggataatgcaggaaaaattaaaccatccttcaatatagtgcctttaacttcccgtgtgaaacctgatcctccacatattaaaaacctctccttccacaatgatgacctatatgtgcaatgggagaatccacagaattttattagcagatgcctattttatgaagtagaagtcaataacagccaaactgagacacataatgttttctacgtccaagaggctaaatgtgagaatccagaatttgagagaaatgtggagaatacatcttgtttcatggtccctggtgttcttcctgatactttgaacacagtcagaataagagtcaaaacaaataagttatgctatgaggatgacaaactctggagtaattggagccaagaaatgagtataggtaagagaacagaatttttattaaaatttaaaacactgatgtataaaaactaagctgaagcagaaaatagactggggaaagggactgtcatgctctcttgatgtcaggaaaagagtacttacaattgaaatttattttcttcttaatcactttcaaaccacccagggttaattgacagtatacagttatttagaaaaccataatccaaatggttttatgttcttttctatctcatttccatttttattaacaaactgaacaaaaatatagaaagcaggcataggctgcacacagtgactcacgcctgtgatcccagcactttgagaggctgaggcaggaggatcgcttgagcccaggagttggagaccagcctgagcaacatggtgaaaccccatctctacaaaaaatacaaaaattaaccagatatggtggtgcacgcttgtgg

SEQ ID NO: 426789 - DNA, 846 bp, Homo sapiens
ggcctcccaaagtgataggattacaggtgtgagccaccatgcccagtcactttttacatttttaaaacctgagcacaggccttgaaattataccaaggtttaaattctaggtctgatgtatgacatggccaagttagttattgtgaattttagttttcttatttatgaaatggggattgtaatactgagttggtaggattgtgaggattaaatcagaatatataaaagtgtcttgcataatgtgacacatgaataaatggtcgtttatttttctaggtggctggtcggaaaggatttcctcatgtgatctatgcccgtctctggaggtggcctgatcttcacaaaaatgaactaaaacatgttaaatattgtcagtatgcgtttgacttaaaatgtgatagtgtctgtgtgaatccatatcactacgaacgagttgtatcacctggaattggtaagtagactttgctttcatcctaagaaacataaagggaaaaggatctcaatagtgtttcaatttttgtaagttaaattataaatttggaagatagcccgcgactttaaataaggttaaagaatcagacatttttaatatacgtatttaaatttgaatttaggaacaaacttatattttgactgctaaaaccgagtattgtagttgatattttgcccctttagaacattgtttttgagaaataagatggaaagcattataaatttgaatacttagttatgtattgttagatagcgtttatgctacttctgaattgaaatggttcatgaacttttgtaatctttggtttaaatttacattctctgtttttaaatggaaaatactttcattgtaat

SEQ ID NO: 426790 - DNA, 3729 bp, Homo sapiens
gcgaccactccctcaaacaggccttcgcctccgcccgcgctgaggcccaggcccaggtccagattcagagccgcccgccggctggcgctgccctgtaggcgcctgcgcagagcgaccctccccgtcactcggagcgggaggcgggggcagccgggagaaaggaaagctgcgggggaaaagggccaaaccctgaaattacccggatgtggtccccgcgcgcgcatgctcagtggcttctcgacaagttggcagcaacaacacggccctggtcgtcgtcgccgctgcggtaacggagcggtttgggtggcggagcctgcgttcgcgccttcccgctctcctcgggaggcccttcctgctctcccctaggctccgcggccgcccagggggtgggagcgggtgaggggagccaggcgcccagcgagagaggccccccgccgcagggcggcccgggagctcgaggcggtccggcccgcgcgggcagcggcgcggcgctgaggaggggcggcctggccgggacgcctcggggcgggggccgaggagctctccgggccgccggggaaagctacgggcccggtgcgtccgcggaccagcagcgcgggagagcggactcccctcgccaccgcccgagcccaggttatcctgaatacatgtctaacaattttccttgcaacgttagctgttgtttttcactgtttccaaaggatcaaaattgcttcagaaattggagacatatttgatttaaaaggaaaaacttgaacaaatggacaatatgtctattacgaatacaccaacaagtaatgatgcctgtctgagcattgtgcatagtttgatgtgccatagacaaggtggagagagtgaaacatttgcaaaaagagcaattgaaagtttggtaaagaagctgaaggagaaaaaagatgaattggattctttaataacagctataactacaaatggagctcatcctagtaaatgtgttaccatacagagaacattggatgggaggcttcaggtggctggtcggaaaggatttcctcatgtgatctatgcccgtctctggaggtggcctgatcttcacaaaaatgaactaaaacatgttaaatattgtcagtatgcgtttgacttaaaatgtgatagtgtctgtgtgaatccatatcactacgaacgagttgtatcacctggaattgatctctcaggattaacactgcagagtaatgctccatcaagtatgatggtgaaggatgaatatgtgcatgactttgagggacagccatcgttgtccactgaaggacattcaattcaaaccatccagcatccaccaagtaatcgtgcatcgacagagacatacagcaccccagctctgttagccccatctgagtctaatgctaccagcactgccaactttcccaacattcctgtggcttccacaagtcagcctgccagtatactggggggcagccatagtgaaggactgttgcagatagcatcagggcctcagccaggacagcagcagaatggatttactggtcagccagctacttaccatcataacagcactaccacctggactggaagtaggactgcaccatacacacctaatttgcctcaccaccaaaacggccatcttcagcaccacccgcctatgccgccccatcccggacattactggcctgttcacaatgagcttgcattccagcctcccatttccaatcatcctgctcctgagtattggtgttccattgcttactttgaaatggatgttcaggtaggagagacatttaaggttccttcaagctgccctattgttactgttgatggatacgtggacccttctggaggagatcgcttttgtttgggtcaactctccaatgtccacaggacagaagccattgagagagcaaggttgcacataggcaaaggtgtgcagttggaatgtaaaggtgaaggtgatgtttgggtcaggtgccttagtgaccacgcggtctttgtacagagttactacttagacagagaagctgggcgtgcacctggagatgctgttcataagatctacccaagtgcatatataaaggtctttgatttgcgtcagtgtcatcgacagatgcagcagcaggcggctactgcacaagctgcagcagctgcccaggcagcagccgtggcaggaaacatccctggcccaggatcagtaggtggaatagctccagctatcagtctgtcagctgctgctggaattggtgttgatgaccttcgtcgcttatgcatactcaggatgagttttgtgaaaggctggggaccggattacccaagacagagcatcaaagaaacaccttgctggattgaaattcacttacaccgggccctccagctcctagacgaagtacttcataccatgccgattgcagacccacaacctttagactgaggtcttttaccgttggggcccttaaccttatcaggatggtggactacaaaatacaatcctgtttataatctgaagatatatttcacttttgttctgctttatcttttcataaagggttgaaaatgtgtttgctgccttgctcctagcagacagaaactggattaaaacaattttttttttcctcttcagaacttgtcaggcatggctcagagcttgaagattaggagaaacacattcttattaattcttcacctgttatgtatgaaggaatcattccagtgctagaaaatttagccctttaaaacgtcttagagccttttatctgcagaacatcgatatgtatatcattctacagaataatccagtattgctgattttaaaggcagagaagttctcaaagttaattcacctatgttattttgtgtacaagttgttattgttgaacatacttcaaaaataatgtgccatgtgggtgagttaattttaccaagagtaactttactctgtgtttaaaaagtaagttaataatgtattgtaatctttcatccaaaatattttttgcaagttatattagtgaagatggtttcaattcagattgtcttgcaacttcagttttatttttgccaaggcaaaaaactcttaatctgtgtgtatattgagaatcccttaaaattaccagacaaaaaaatttaaaattacgtttgttattcctagtggatgactgttgatgaagtatacttttcccctgttaaacagtagttgtattcttctgtatttctaggcacaaggttggttgctaagaagcctataagaggaatttcttttccttcattcatagggaaaggttttgtattttttaaaacactaaaagcagcgtcactctacctaatgtctcactgttctgcaaaggtggcaatgcttaaactaaataatgaataaactgaatattttggaaactgctaaattctatgttaaatactgtgcagaataatggaaacattacagttcataataggtagtttggatatttttgtacttgatttgatgtgactttttttggtataatgtttaaatcatgtatgttatgatattgtttaaaattcagtttttgtatcttggggcaagactgcaaacttttttatatcttttggttattctaagccctttgccatcaatgatcatatcaattggcagtgactttgtatagagaatttaagtagaaaagttgcagatgtattgactgtaccacagacacaatatgtatgctttttacctagctggtagcataaataaaactgaatctcaacata

SEQ ID NO: 426791 - DNA, 4888 bp, Homo sapiens
gcgaccactccctcaaacaggccttcgcctccgcccgcgctgaggcccaggcccaggtccagattcagagccgcccgccggctggcgctgccctgtaggcgcctgcgcagagcgaccctccccgtcactcggagcgggaggcgggggcagccgggagaaaggaaagctgcgggggaaaagggccaaaccctgaaattacccggatgtggtccccgcgcgcgcatgctcagtggcttctcgacaagttggcagcaacaacacggccctggtcgtcgtcgccgctgcggtaacggagcggtttgggtggcggagcctgcgttcgcgccttcccgctctcctcgggaggcccttcctgctctcccctaggctccgcggccgcccagggggtgggagcgggtgaggggagccaggcgcccagcgagagaggccccccgccgcagggcggcccgggagctcgaggcggtccggcccgcgcgggcagcggcgcggcgctgaggaggggcggcctggccgggacgcctcggggcgggggccgaggagctctccgggccgccggggaaagctacgggcccggtgcgtccgcggaccagcagcgcgggagagcggactcccctcgccaccgcccgagcccaggttatcctgaatacatgtctaacaattttccttgcaacgttagctgttgtttttcactgtttccaaaggatcaaaattgcttcagaaattggagacatatttgatttaaaaggaaaaacttgaacaaatggacaatatgtctattacgaatacaccaacaagtaatgatgcctgtctgagcattgtgcatagtttgatgtgccatagacaaggtggagagagtgaaacatttgcaaaaagagcaattgaaagtttggtaaagaagctgaaggagaaaaaagatgaattggattctttaataacagctataactacaaatggagctcatcctagtaaatgtgttaccatacagagaacattggatgggaggcttcaggtggctggtcggaaaggatttcctcatgtgatctatgcccgtctctggaggtggcctgatcttcacaaaaatgaactaaaacatgttaaatattgtcagtatgcgtttgacttaaaatgtgatagtgtctgtgtgaatccatatcactacgaacgagttgtatcacctggaattgatctctcaggattaacactgcagagtaatgctccatcaagtatgatggtgaaggatgaatatgtgcatgactttgagggacagccatcgttgtccactgaaggacattcaattcaaaccatccagcatccaccaagtaatcgtgcatcgacagagacatacagcaccccagctctgttagccccatctgagtctaatgctaccagcactgccaactttcccaacattcctgtggcttccacaagtcagcctgccagtatactggggggcagccatagtgaaggactgttgcagatagcatcagggcctcagccaggacagcagcagaatggatttactggtcagccagctacttaccatcataacagcactaccacctggactggaagtaggactgcaccatacacacctaatttgcctcaccaccaaaacggccatcttcagcaccacccgcctatgccgccccatcccggacattactggcctgttcacaatgagcttgcattccagcctcccatttccaatcatcctgctcctgagtattggtgttccattgcttactttgaaatggatgttcaggtaggagagacatttaaggttccttcaagctgccctattgttactgttgatggatacgtggacccttctggaggagatcgcttttgtttgggtcaactctccaatgtccacaggacagaagccattgagagagcaaggttgcacataggcaaaggtgtgcagttggaatgtaaaggtgaaggtgatgtttgggtcaggtgccttagtgaccacgcggtctttgtacagagttactacttagacagagaagctgggcgtgcacctggagatgctgttcataagatctacccaagtgcatatataaaggtctttgatttgcgtcagtgtcatcgacagatgcagcagcaggcggctactgcacaagctgcagcagctgcccaggcagcagccgtggcaggaaacatccctggcccaggatcagtaggtggaatagctccagctatcagtctgtcagctgctgctggaattggtgttgatgaccttcgtcgcttatgcatactcaggatgagttttgtgaaaggctggggaccggattacccaagacagagcatcaaagaaacaccttgctggattgaaattcacttacaccgggccctccagctcctagacgaagtacttcataccatgccgattgcagacccacaacctttagactgaggtcttttaccgttggggcccttaaccttatcaggatggtggactacaaaatacaatcctgtttataatctgaagatatatttcacttttgttctgctttatcttttcataaagggttgaaaatgtgtttgctgccttgctcctagcagacagaaactggattaaaacaattttttttttcctcttcagaacttgtcaggcatggctcagagcttgaagattaggagaaacacattcttattaattcttcacctgttatgtatgaaggaatcattccagtgctagaaaatttagccctttaaaacgtcttagagccttttatctgcagaacatcgatatgtatatcattctacagaataatccagtattgctgattttaaaggcagagaagttctcaaagttaattcacctatgttattttgtgtacaagttgttattgttgaacatacttcaaaaataatgtgccatgtgggtgagttaattttaccaagagtaactttactctgtgtttaaaaagtaagttaataatgtattgtaatctttcatccaaaatattttttgcaagttatattagtgaagatggtttcaattcagattgtcttgcaacttcagttttatttttgccaaggcaaaaaactcttaatctgtgtgtatattgagaatcccttaaaattaccagacaaaaaaatttaaaattacgtttgttattcctagtggatgactgttgatgaagtatacttttcccctgttaaacagtagttgtattcttctgtatttctaggcacaaggttggttgctaagaagcctataagaggaatttcttttccttcattcatagggaaaggttttgtattttttaaaacactaaaagcagcgtcactctacctaatgtctcactgttctgcaaaggtggcaatgcttaaactaaataatgaataaactgaatattttggaaactgctaaattctatgttaaatactgtgcagaataatggaaacattacagttcataataggtagtttggatatttttgtacttgatttgatgtgactttttttggtataatgtttaaatcatgtatgttatgatattgtttaaaattcagtttttgtatcttggggcaagactgcaaacttttttatatcttttggttattctaagccctttgccatcaatgatcatatcaattggcagtgactttgtatagagaatttaagtagaaaagttgcagatgtattgactgtaccacagacacaatatgtatgctttttacctagctggtagcataaataaaactgaatctcaacataaaaagttgaattctaggtttgatttttaagattttttttttcttttgcacttttgagtccaatctcagtgatgaggtaccttctactaaatgacaggcaacagccagttctattgggcagctttgtttttttccctcacactctaccgggacttccccatggacattgtgtatcatgtgtagagttggttttttttttttttaatttttattttactatagcagaaatagacctgattatctacaagatgataaatagattgtctacaggataaatagtatgaaataaaatcaaggattatctttcagatgtgtttacttttgcctggagaacttttagctatagaaacacttgtgtgatgatagtcctccttatatcacctggaatgaacacagcttctactgccttgctcagaaggtcttttaaatagaccatcctagaaaccactgagtttgcttatttctgtgatttaaacatagatcttgatccaagctacatgacttttgtctttaaataacttatctaccacctcatttgtactcttgattacttacaaattctttcagtaaacacctaattttcttctgtaaaagtttggtgatttaagttttattggcagttttataaaaagacatcttctctagaaattgctaactttaggtccattttactgtgaatgaggaataggagtgagttttagaataacagatttttaaaaatccagatgatttgattaaaaccttaatcatacattgacataattcattgcttcttttttttgagatatggagtcttgctgtgttgcccaggcaggagtgcagtggtatgatctcagctcactgcaacctctgcctcccgggttcaactgattctcctgcctcagcctccctggtagctaggattacaggtgcccgccaccatgcctggctaacttttgtagttttagtagagacggggttttgcctgttggccaggctggtcttgaactcctgacctcaagtgatccatccaccttggcctcccaaagtgctgggattacgggcgtgagccactgtccctggcctcattgttcccttttctactttaaggaaagttttcatgtttaatcatctggggaaagtatgtgaaaaatatttgttaagaagtatctctttggagc

SEQ ID NO: 426792 - DNA, 3189 bp, Homo sapiens
aaaaactgcttctctgcatggggtttatgagttgagacagacatttatgtgaaagagataacaacagagggaggagcaagtcttcaatatcaggttatcctgaatacatgtctaacaattttccttgcaacgttagctgttgtttttcactgtttccaaaggatcaaaattgcttcagaaattggagacatatttgatttaaaaggaaaaacttgaacaaatggacaatatgtctattacgaatacaccaacaagtaatgatgcctgtctgagcattgtgcatagtttgatgtgccatagacaaggtggagagagtgaaacatttgcaaaaagagcaattgaaagtttggtaaagaagctgaaggagaaaaaagatgaattggattctttaataacagctataactacaaatggagctcatcctagtaaatgtgttaccatacagagaacattggatgggaggcttcaggtggctggtcggaaaggatttcctcatgtgatctatgcccgtctctggaggtggcctgatcttcacaaaaatgaactaaaacatgttaaatattgtcagtatgcgtttgacttaaaatgtgatagtgtctgtgtgaatccatatcactacgaacgagttgtatcacctggaattgatctctcaggattaacactgcagagtaatgctccatcaagtatgatggtgaaggatgaatatgtgcatgactttgagggacagccatcgttgtccactgaaggacattcaattcaaaccatccagcatccaccaagtaatcgtgcatcgacagagacatacagcaccccagctctgttagccccatctgagtctaatgctaccagcactgccaactttcccaacattcctgtggcttccacaagtcagcctgccagtatactggggggcagccatagtgaaggactgttgcagatagcatcagggcctcagccaggacagcagcagaatggatttactggtcagccagctacttaccatcataacagcactaccacctggactggaagtaggactgcaccatacacacctaatttgcctcaccaccaaaacggccatcttcagcaccacccgcctatgccgccccatcccggacattactggcctgttcacaatgagcttgcattccagcctcccatttccaatcatcctgctcctgagtattggtgttccattgcttactttgaaatggatgttcaggtaggagagacatttaaggttccttcaagctgccctattgttactgttgatggatacgtggacccttctggaggagatcgcttttgtttgggtcaactctccaatgtccacaggacagaagccattgagagagcaaggttgcacataggcaaaggtgtgcagttggaatgtaaaggtgaaggtgatgtttgggtcaggtgccttagtgaccacgcggtctttgtacagagttactacttagacagagaagctgggcgtgcacctggagatgctgttcataagatctacccaagtgcatatataaaggtctttgatttgcgtcagtgtcatcgacagatgcagcagcaggcggctactgcacaagctgcagcagctgcccaggcagcagccgtggcaggaaacatccctggcccaggatcagtaggtggaatagctccagctatcagtctgtcagctgctgctggaattggtgttgatgaccttcgtcgcttatgcatactcaggatgagttttgtgaaaggctggggaccggattacccaagacagagcatcaaagaaacaccttgctggattgaaattcacttacaccgggccctccagctcctagacgaagtacttcataccatgccgattgcagacccacaacctttagactgaggtcttttaccgttggggcccttaaccttatcaggatggtggactacaaaatacaatcctgtttataatctgaagatatatttcacttttgttctgctttatcttttcataaagggttgaaaatgtgtttgctgccttgctcctagcagacagaaactggattaaaacaattttttttttcctcttcagaacttgtcaggcatggctcagagcttgaagattaggagaaacacattcttattaattcttcacctgttatgtatgaaggaatcattccagtgctagaaaatttagccctttaaaacgtcttagagccttttatctgcagaacatcgatatgtatatcattctacagaataatccagtattgctgattttaaaggcagagaagttctcaaagttaattcacctatgttattttgtgtacaagttgttattgttgaacatacttcaaaaataatgtgccatgtgggtgagttaattttaccaagagtaactttactctgtgtttaaaaagtaagttaataatgtattgtaatctttcatccaaaatattttttgcaagttatattagtgaagatggtttcaattcagattgtcttgcaacttcagttttatttttgccaaggcaaaaaactcttaatctgtgtgtatattgagaatcccttaaaattaccagacaaaaaaatttaaaattacgtttgttattcctagtggatgactgttgatgaagtatacttttcccctgttaaacagtagttgtattcttctgtatttctaggcacaaggttggttgctaagaagcctataagaggaatttcttttccttcattcatagggaaaggttttgtattttttaaaacactaaaagcagcgtcactctacctaatgtctcactgttctgcaaaggtggcaatgcttaaactaaataatgaataaactgaatattttggaaactgctaaattctatgttaaatactgtgcagaataatggaaacattacagttcataataggtagtttggatatttttgtacttgatttgatgtgactttttttggtataatgtttaaatcatgtatgttatgatattgtttaaaattcagtttttgtatcttggggcaagactgcaaacttttttatatcttttggttattctaagccctttgccatcaatgatcatatcaattggcagtgactttgtatagagaatttaagtagaaaagttgcagatgtattgactgtaccacagacacaatatgtatgctttttacctagctggtagcataaataaaactgaatctcaacata

SEQ ID NO: 426793 - DNA, 2996 bp, Homo sapiens
ggcctcccaaagtgataggattacaggtgtgagccaccatgcccagtcactttttacatttttaaaacctgagcacaggccttgaaattataccaaggtttaaattctaggtctgatgtatgacatggccaagttagttattgtgaattttagttttcttatttatgaaatggggattgtaatactgagttggtaggattgtgaggattaaatcagaatatataaaagtgtcttgcataatgtgacacatgaataaatggtcgtttatttttctaggtggctggtcggaaaggatttcctcatgtgatctatgcccgtctctggaggtggcctgatcttcacaaaaatgaactaaaacatgttaaatattgtcagtatgcgtttgacttaaaatgtgatagtgtctgtgtgaatccatatcactacgaacgagttgtatcacctggaattgatctctcaggattaacactgcagagtaatgctccatcaagtatgatggtgaaggatgaatatgtgcatgactttgagggacagccatcgttgtccactgaaggacattcaattcaaaccatccagcatccaccaagtaatcgtgcatcgacagagacatacagcaccccagctctgttagccccatctgagtctaatgctaccagcactgccaactttcccaacattcctgtggcttccacaagtcagcctgccagtatactggggggcagccatagtgaaggactgttgcagatagcatcagggcctcagccaggacagcagcagaatggatttactggtcagccagctacttaccatcataacagcactaccacctggactggaagtaggactgcaccatacacacctaatttgcctcaccaccaaaacggccatcttcagcaccacccgcctatgccgccccatcccggacattactggcctgttcacaatgagcttgcattccagcctcccatttccaatcatcctgctcctgagtattggtgttccattgcttactttgaaatggatgttcaggtaggagagacatttaaggttccttcaagctgccctattgttactgttgatggatacgtggacccttctggaggagatcgcttttgtttgggtcaactctccaatgtccacaggacagaagccattgagagagcaaggttgcacataggcaaaggtgtgcagttggaatgtaaaggtgaaggtgatgtttgggtcaggtgccttagtgaccacgcggtctttgtacagagttactacttagacagagaagctgggcgtgcacctggagatgctgttcataagatctacccaagtgcatatataaaggtctttgatttgcgtcagtgtcatcgacagatgcagcagcaggcggctactgcacaagctgcagcagctgcccaggcagcagccgtggcaggaaacatccctggcccaggatcagtaggtggaatagctccagctatcagtctgtcagctgctgctggaattggtgttgatgaccttcgtcgcttatgcatactcaggatgagttttgtgaaaggctggggaccggattacccaagacagagcatcaaagaaacaccttgctggattgaaattcacttacaccgggccctccagctcctagacgaagtacttcataccatgccgattgcagacccacaacctttagactgaggtcttttaccgttggggcccttaaccttatcaggatggtggactacaaaatacaatcctgtttataatctgaagatatatttcacttttgttctgctttatcttttcataaagggttgaaaatgtgtttgctgccttgctcctagcagacagaaactggattaaaacaattttttttttcctcttcagaacttgtcaggcatggctcagagcttgaagattaggagaaacacattcttattaattcttcacctgttatgtatgaaggaatcattccagtgctagaaaatttagccctttaaaacgtcttagagccttttatctgcagaacatcgatatgtatatcattctacagaataatccagtattgctgattttaaaggcagagaagttctcaaagttaattcacctatgttattttgtgtacaagttgttattgttgaacatacttcaaaaataatgtgccatgtgggtgagttaattttaccaagagtaactttactctgtgtttaaaaagtaagttaataatgtattgtaatctttcatccaaaatattttttgcaagttatattagtgaagatggtttcaattcagattgtcttgcaacttcagttttatttttgccaaggcaaaaaactcttaatctgtgtgtatattgagaatcccttaaaattaccagacaaaaaaatttaaaattacgtttgttattcctagtggatgactgttgatgaagtatacttttcccctgttaaacagtagttgtattcttctgtatttctaggcacaaggttggttgctaagaagcctataagaggaatttcttttccttcattcatagggaaaggttttgtattttttaaaacactaaaagcagcgtcactctacctaatgtctcactgttctgcaaaggtggcaatgcttaaactaaataatgaataaactgaatattttggaaactgctaaattctatgttaaatactgtgcagaataatggaaacattacagttcataataggtagtttggatatttttgtacttgatttgatgtgactttttttggtataatgtttaaatcatgtatgttatgatattgtttaaaattcagtttttgtatcttggggcaagactgcaaacttttttatatcttttggttattctaagccctttgccatcaatgatcatatcaattggcagtgactttgtatagagaatttaagtagaaaagttgcagatgtattgactgtaccacagacacaatatgtatgctttttacctagctggtagcataaataaaactgaatctcaacata

SEQ ID NO: 426794 - DNA, 2964 bp, Homo sapiens
taacataatacctccagttctatccatgttgtctcaagtgactgaatcgcattttttttatggctgaatagtactccactgtgtataagtcaagcataaagaattttaagcataccggaataatacaggaagttcccccattgtactcattcctcagtttcagccattatcaagtaatgaccaatcttgtttcattcatactcactctctttttcaaatttgagagtcagattgattgataaaatatatctcatgctgttaccgctgaataaatgacttttgctggtaaagtagtatgcttttaaaataatatgaaaaaattctgaattaaggttagtaatttacactgtaattgattttaggtgttattatattacttgctaataagatttttttttctgggaatagaagcttataaaaatttaaaatatgtttaattttctatatagctccatcaagtatgatggtgaaggatgaatatgtgcatgactttgagggacagccatcgttgtccactgaaggacattcaattcaaaccatccagcatccaccaagtaatcgtgcatcgacagagacatacagcaccccagctctgttagccccatctgagtctaatgctaccagcactgccaactttcccaacattcctgtggcttccacaagtcagcctgccagtatactggggggcagccatagtgaaggactgttgcagatagcatcagggcctcagccaggacagcagcagaatggatttactggtcagccagctacttaccatcataacagcactaccacctggactggaagtaggactgcaccatacacacctaatttgcctcaccaccaaaacggccatcttcagcaccacccgcctatgccgccccatcccggacattactggcctgttcacaatgagcttgcattccagcctcccatttccaatcatcctgctcctgagtattggtgttccattgcttactttgaaatggatgttcaggtaggagagacatttaaggttccttcaagctgccctattgttactgttgatggatacgtggacccttctggaggagatcgcttttgtttgggtcaactctccaatgtccacaggacagaagccattgagagagcaaggttgcacataggcaaaggtgtgcagttggaatgtaaaggtgaaggtgatgtttgggtcaggtgccttagtgaccacgcggtctttgtacagagttactacttagacagagaagctgggcgtgcacctggagatgctgttcataagatctacccaagtgcatatataaaggtctttgatttgcgtcagtgtcatcgacagatgcagcagcaggcggctactgcacaagctgcagcagctgcccaggcagcagccgtggcaggaaacatccctggcccaggatcagtaggtggaatagctccagctatcagtctgtcagctgctgctggaattggtgttgatgaccttcgtcgcttatgcatactcaggatgagttttgtgaaaggctggggaccggattacccaagacagagcatcaaagaaacaccttgctggattgaaattcacttacaccgggccctccagctcctagacgaagtacttcataccatgccgattgcagacccacaacctttagactgaggtcttttaccgttggggcccttaaccttatcaggatggtggactacaaaatacaatcctgtttataatctgaagatatatttcacttttgttctgctttatcttttcataaagggttgaaaatgtgtttgctgccttgctcctagcagacagaaactggattaaaacaattttttttttcctcttcagaacttgtcaggcatggctcagagcttgaagattaggagaaacacattcttattaattcttcacctgttatgtatgaaggaatcattccagtgctagaaaatttagccctttaaaacgtcttagagccttttatctgcagaacatcgatatgtatatcattctacagaataatccagtattgctgattttaaaggcagagaagttctcaaagttaattcacctatgttattttgtgtacaagttgttattgttgaacatacttcaaaaataatgtgccatgtgggtgagttaattttaccaagagtaactttactctgtgtttaaaaagtaagttaataatgtattgtaatctttcatccaaaatattttttgcaagttatattagtgaagatggtttcaattcagattgtcttgcaacttcagttttatttttgccaaggcaaaaaactcttaatctgtgtgtatattgagaatcccttaaaattaccagacaaaaaaatttaaaattacgtttgttattcctagtggatgactgttgatgaagtatacttttcccctgttaaacagtagttgtattcttctgtatttctaggcacaaggttggttgctaagaagcctataagaggaatttcttttccttcattcatagggaaaggttttgtattttttaaaacactaaaagcagcgtcactctacctaatgtctcactgttctgcaaaggtggcaatgcttaaactaaataatgaataaactgaatattttggaaactgctaaattctatgttaaatactgtgcagaataatggaaacattacagttcataataggtagtttggatatttttgtacttgatttgatgtgactttttttggtataatgtttaaatcatgtatgttatgatattgtttaaaattcagtttttgtatcttggggcaagactgcaaacttttttatatcttttggttattctaagccctttgccatcaatgatcatatcaattggcagtgactttgtatagagaatttaagtagaaaagttgcagatgtattgactgtaccacagacacaatatgtatgctttttacctagctggtagcataaataaaactgaatctcaacata

SEQ ID NO: 426795 - DNA, 2838 bp, Homo sapiens
gtttgtctcagtgggtattaaaggttgggagactgcaatgataagtgtgtctgaatctctctatggggctgtttgtgagggggttcaaattctgagtgctcatcacacacctcccctattctaaaattattgatgcactgttattgatgggattgtacgggttgatagcctttctatagtgactgtagggctgtattcagccttgtagatccccctagtggtggttttgtaaaggctgtcttcagtgtcttatttcctcagaaaacaactggtatttctcacagctccttctagatttggacaaaggaatgatacaagagcagctccatcaagtatgatggtgaaggatgaatatgtgcatgactttgagggacagccatcgttgtccactgaaggacattcaattcaaaccatccagcatccaccaagtaatcgtgcatcgacagagacatacagcaccccagctctgttagccccatctgagtctaatgctaccagcactgccaactttcccaacattcctgtggcttccacaagtcagcctgccagtatactggggggcagccatagtgaaggactgttgcagatagcatcagggcctcagccaggacagcagcagaatggatttactggtcagccagctacttaccatcataacagcactaccacctggactggaagtaggactgcaccatacacacctaatttgcctcaccaccaaaacggccatcttcagcaccacccgcctatgccgccccatcccggacattactggcctgttcacaatgagcttgcattccagcctcccatttccaatcatcctgctcctgagtattggtgttccattgcttactttgaaatggatgttcaggtaggagagacatttaaggttccttcaagctgccctattgttactgttgatggatacgtggacccttctggaggagatcgcttttgtttgggtcaactctccaatgtccacaggacagaagccattgagagagcaaggttgcacataggcaaaggtgtgcagttggaatgtaaaggtgaaggtgatgtttgggtcaggtgccttagtgaccacgcggtctttgtacagagttactacttagacagagaagctgggcgtgcacctggagatgctgttcataagatctacccaagtgcatatataaaggtctttgatttgcgtcagtgtcatcgacagatgcagcagcaggcggctactgcacaagctgcagcagctgcccaggcagcagccgtggcaggaaacatccctggcccaggatcagtaggtggaatagctccagctatcagtctgtcagctgctgctggaattggtgttgatgaccttcgtcgcttatgcatactcaggatgagttttgtgaaaggctggggaccggattacccaagacagagcatcaaagaaacaccttgctggattgaaattcacttacaccgggccctccagctcctagacgaagtacttcataccatgccgattgcagacccacaacctttagactgaggtcttttaccgttggggcccttaaccttatcaggatggtggactacaaaatacaatcctgtttataatctgaagatatatttcacttttgttctgctttatcttttcataaagggttgaaaatgtgtttgctgccttgctcctagcagacagaaactggattaaaacaattttttttttcctcttcagaacttgtcaggcatggctcagagcttgaagattaggagaaacacattcttattaattcttcacctgttatgtatgaaggaatcattccagtgctagaaaatttagccctttaaaacgtcttagagccttttatctgcagaacatcgatatgtatatcattctacagaataatccagtattgctgattttaaaggcagagaagttctcaaagttaattcacctatgttattttgtgtacaagttgttattgttgaacatacttcaaaaataatgtgccatgtgggtgagttaattttaccaagagtaactttactctgtgtttaaaaagtaagttaataatgtattgtaatctttcatccaaaatattttttgcaagttatattagtgaagatggtttcaattcagattgtcttgcaacttcagttttatttttgccaaggcaaaaaactcttaatctgtgtgtatattgagaatcccttaaaattaccagacaaaaaaatttaaaattacgtttgttattcctagtggatgactgttgatgaagtatacttttcccctgttaaacagtagttgtattcttctgtatttctaggcacaaggttggttgctaagaagcctataagaggaatttcttttccttcattcatagggaaaggttttgtattttttaaaacactaaaagcagcgtcactctacctaatgtctcactgttctgcaaaggtggcaatgcttaaactaaataatgaataaactgaatattttggaaactgctaaattctatgttaaatactgtgcagaataatggaaacattacagttcataataggtagtttggatatttttgtacttgatttgatgtgactttttttggtataatgtttaaatcatgtatgttatgatattgtttaaaattcagtttttgtatcttggggcaagactgcaaacttttttatatcttttggttattctaagccctttgccatcaatgatcatatcaattggcagtgactttgtatagagaatttaagtagaaaagttgcagatgtattgactgtaccacagacacaatatgtatgctttttacctagctggtagcataaataaaactgaatctcaacata

SEQ ID NO: 426796 - DNA, 3217 bp, Homo sapiens
gcgaccactccctcaaacaggccttcgcctccgcccgcgctgaggcccaggcccaggtccagattcagagccgcccgccggctggcgctgccctgtaggcgcctgcgcagagcgaccctccccgtcactcggagcgggaggcgggggcagccgggagaaaggaaagctgcgggggaaaagggccaaaccctgaaattacccggatgtggtccccgcgcgcgcatgctcagtggcttctcgacaagttggcagcaacaacacggccctggtcgtcgtcgccgctgcggtaacggagcggtttgggtggcggagcctgcgttcgcgccttcccgctctcctcgggaggcccttcctgctctcccctaggctccgcggccgcccagggggtgggagcgggtgaggggagccaggcgcccagcgagagaggccccccgccgcagggcggcccgggagctcgaggcggtccggcccgcgcgggcagcggcgcggcgctgaggaggggcggcctggccgggacgcctcggggcgggggccgaggagctctccgggccgccggggaaagctacgggcccggtgcgtccgcggaccagcagcgcgggagagcggactcccctcgccaccgcccgagcccaggttatcctgaatacatgtctaacaattttccttgcaacgttagctgttgtttttcactgtttccaaaggatcaaaattgcttcagaaattggagacatatttgatttaaaaggaaaaacttgaacaaatggacaatatgtctattacgaatacaccaacaagtaatgatgcctgtctgagcattgtgcatagtttgatgtgccatagacaaggtggagagagtgaaacatttgcaaaaagagcaattgaaagtttggtaaagaagctgaaggagaaaaaagatgaattggattctttaataacagctataactacaaatggagctcatcctagtaaatgtgttaccatacagagaacattggatgggaggcttcaggtggctggtcggaaaggatttcctcatgtgatctatgcccgtctctggaggtggcctgatcttcacaaaaatgaactaaaacatgttaaatattgtcagtatgcgtttgacttaaaatgtgatagtgtctgtgtgaatccatatcactacgaacgagttgtatcacctggaattgatctctcaggattaacactgcagagtaatgctccatcaagtatgatggtgaaggatgaatatgtgcatgactttgagggacagccatcgttgtccactgaaggacattcaattcaaaccatccagcatccaccaagtaatcgtgcatcgacagagacatacagcaccccagctctgttagccccatctgagtctaatgctaccagcactgccaactttcccaacattcctgtggcttccacaagtcagcctgccagtatactggggggcagccatagtgaaggactgttgcagatagcatcagggcctcagccaggacagcagcagaatggatttactggtcagccagctacttaccatcataacagcactaccacctggactggaagtaggactgcaccatacacacctaatttgcctcaccaccaaaacggccatcttcagcaccacccgcctatgccgccccatcccggacattactggcctgttcacaatgagcttgcattccagcctcccatttccaatcatcctgctcctgagtattggtgttccattgcttactttgaaatggatgttcaggtaggagagacatttaaggttccttcaagctgccctattgttactgttgatggatacgtggacccttctggaggagatcgcttttgtttgggtcaactctccaatgtccacaggacagaagccattgagagagcaaggttgcacataggcaaaggtgtgcagttggaatgtaaaggtgaaggtgatgtttgggtcaggtgccttagtgaccacgcggtctttgtacagagttactacttagacagagaagctgggcgtgcacctggagatgctgttcataagatctacccaagtgcatatataaaggtctttgatttgcgtcagtgtcatcgacagatgcagcagcaggcggctactgcacaagctgcagcagctgcccaggcagcagccgtggcaggaaacatccctggcccaggatcagtaggtggaatagctccagctatcagtctgtcagctgctgctggaattggtgttgatgaccttcgtcgcttatgcatactcaggatgagttttgtgaaaggctggggaccggattacccaagacagagcatcaaagaaacaccttgctggattgaaattcacttacaccgggccctccagctcctagacgaagtacttcataccatgccgattgcagacccacaacctttagactgaggtcttttaccgttggggcccttaaccttatcaggatggtggactacaaaatacaatcctgtttataatctgaagatatatttcacttttgttctgctttatcttttcataaagggttgaaaatgtgtttgctgccttgctcctagcagacagaaactggattaaaacaattttttttttcctcttcagaacttgtcaggcatggctcagagcttgaagattaggagaaacacattcttattaattcttcacctgttatgtatgaaggaatcattccagtgctagaaaatttagccctttaaaacgtcttagagccttttatctgcagaacatcgatatgtatatcattctacagaataatccagtattgctgattttaaaggcagagaagttctcaaagttaattcacctatgttattttgtgtacaagttgttattgttgaacatacttcaaaaataatgtgccatgtgggtgagttaattttaccaagagtaactttactctgtgtttaaaaagtaagttaataatgtattgtaatctttcatccaaaatattttttgcaagttatattagtgaagatggtttcaattcagattgtcttgcaacttcagttttatttttgccaaggcaaaaaactcttaatctgtgtgtatattgagaatcccttaaaattaccagacaaaaaaatttaaaattacgtttgttattcctagtgtcgaacttgatgaaatcagtaatcttgccagtcactaaatcaatctgaatggtatcattcaccttgtttgtccaaaggtcag

SEQ ID NO: 426797 - DNA, 1044 bp, Homo sapiens
gttaattcacctatgttattttgagaacttctctgcctttaaaatcagcaatactggattattctgtagaatgatatacatatcgatgttctgcagataaaaggctctaagacgaggcagagaagttctcaaagttaattcacctatgttattttgtgtacaagttgttattgttgaacatacttcaaaaataatgtgccatgtgggtgagttaattttaccaagagtaactttactctgtgtttaaaaagtaagttaataatgtattgtaatctttcatccaaaatattttttgcaagttatattagtgaagatggtttcaattcagattgtcttgcaacttcagttttatttttgccaaggcaaaaaactcttaatctgtgtgtatattgagaatcccttaaaattaccagacaaaaaaatttaaaattacgtttgttattcctagtggatgactgttgatgaagtatacttttcccctgttaaacagtagttgtattcttctgtatttctaggcacaaggttggttgctaagaagcctataagaggaatttcttttccttcattcatagggaaaggttttgtattttttaaaacactaaaagcagcgtcactctacctaatgtctcactgttctgcaaaggtggcaatgcttaaactaaataatgaataaactgaatattttggaaactgctaaattctatgttaaatactgtgcagaataatggaaacattacagttcataataggtagtttggatatttttgtacttgatttgatgtgactttttttggtataatgtttaaatcatgtatgttatgatattgtttaaaattcagtttttgtatcttggggcaagactgcaaacttttttatatcttttggttattctaagccctttgccatcaatgatcatatcaattggcagtgactttgtatagagaatttaagtagaaaagttgcagatgtattgactgtaccacagacacaatatgtatgctttttacctagctggtagcataaataaaactgaatctcaacata

SEQ ID NO: 426798 - DNA, 2272 bp, Homo sapiens
gcgaccactccctcaaacaggccttcgcctccgcccgcgctgaggcccaggcccaggtccagattcagagccgcccgccggctggcgctgccctgtaggcgcctgcgcagagcgaccctccccgtcactcggagcgggaggcgggggcagccgggagaaaggaaagctgcgggggaaaagggccaaaccctgaaattacccggatgtggtccccgcgcgcgcatgctcagtggcttctcgacaagttggcagcaacaacacggccctggtcgtcgtcgccgctgcggtaacggagcggtttgggtggcggagcctgcgttcgcgccttcccgctctcctcgggaggcccttcctgctctcccctaggctccgcggccgcccagggggtgggagcgggtgaggggagccaggcgcccagcgagagaggccccccgccgcagggcggcccgggagctcgaggcggtccggcccgcgcgggcagcggcgcggcgctgaggaggggcggcctggccgggacgcctcggggcgggggccgaggagctctccgggccgccggggaaagctacgggcccggtgcgtccgcggaccagcagcgcgggagagcggactcccctcgccaccgcccgagcccaggttatcctgaatacatgtctaacaattttccttgcaacgttagctgttgtttttcactgtttccaaaggatcaaaattgcttcagaaattggagacatatttgatttaaaaggaaaaacttgaacaaatggacaatatgtctattacgaatacaccaacaagtaatgatgcctgtctgagcattgtgcatagtttgatgtgccatagacaaggtggagagagtgaaacatttgcaaaaagagcaattgaaagtttggtaaagaagctgaaggagaaaaaagatgaattggattctttaataacagctataactacaaatggagctcatcctagtaaatgtgttaccatacagagaacattggatgggaggcttcaggtggctggtcggaaaggatttcctcatgtgatctatgcccgtctctggaggtggcctgatcttcacaaaaatgaactaaaacatgttaaatattgtcagtatgcgtttgacttaaaatgtgatagtgtctgtgtgaatccatatcactacgaacgagttgtatcacctggaattgatctctcaggattaacactgcagagtaatgctccatcaagtatgatggtgaaggatgaatatgtgcatgactttgagggacagccatcgttgtccactgaaggacattcaattcaaaccatccagcatccaccaagtaatcgtgcatcgacagagacatacagcaccccagctctgttagccccatctgagtctaatgctaccagcactgccaactttcccaacattcctgtggcttccacaagtcagcctgccagtatactggggggcagccatagtgaaggactgttgcagatagcatcagggcctcagccaggacagcagcagaatggatttactggtcagccagctacttaccatcataacagcactaccacctggactggaagtaggactgcaccatacacacctaatttgcctcaccaccaaaacggccatcttcagcaccacccgcctatgccgccccatcccggacattactggcctgttcacaatgagcttgcattccagcctcccatttccaatcatcctgctcctgagtattggtgttccattgcttactttgaaatggatgttcaggtaggagagacatttaaggttccttcaagctgccctattgttactgttgatggatacgtggacccttctggaggagatcgcttttgtttgggtcaactctccaatgtccacaggacagaagccattgagagagcaaggttgcacataggcaaaggtgtgcagttggaatgtaaaggtgaaggtgatgtttgggtcaggtgccttagtgaccacgcggtctttgtacagagttactacttagacagagaagctgggcgtgcacctggagatgctgttcataagatctacccaagtgcatatataaaggttagttacaattttatttgaatattttagacttaaagctctatttgttgtcaaaagaattgaaatctgggtggaaggaatggaaaaatgttttatatattaaataataagaaattgtgtttaagtataaaaaacacattttctgagggcatttattgacattatcagtaatctagttttatcgttgccaatttgttacatttt

SEQ ID NO: 426799 - DNA, 1802 bp, Homo sapiens
gcgaccactccctcaaacaggccttcgcctccgcccgcgctgaggcccaggcccaggtccagattcagagccgcccgccggctggcgctgccctgtaggcgcctgcgcagagcgaccctccccgtcactcggagcgggaggcgggggcagccgggagaaaggaaagctgcgggggaaaagggccaaaccctgaaattacccggatgtggtccccgcgcgcgcatgctcagtggcttctcgacaagttggcagcaacaacacggccctggtcgtcgtcgccgctgcggtaacggagcggtttgggtggcggagcctgcgttcgcgccttcccgctctcctcgggaggcccttcctgctctcccctaggctccgcggccgcccagggggtgggagcgggtgaggggagccaggcgcccagcgagagaggccccccgccgcagggcggcccgggagctcgaggcggtccggcccgcgcgggcagcggcgcggcgctgaggaggggcggcctggccgggacgcctcggggcgggggccgaggagctctccgggccgccggggaaagctacgggcccggtgcgtccgcggaccagcagcgcgggagagcggactcccctcgccaccgcccgagcccaggttatcctgaatacatgtctaacaattttccttgcaacgttagctgttgtttttcactgtttccaaaggatcaaaattgcttcagaaattggagacatatttgatttaaaaggaaaaacttgaacaaatggacaatatgtctattacgaatacaccaacaagtaatgatgcctgtctgagcattgtgcatagtttgatgtgccatagacaaggtggagagagtgaaacatttgcaaaaagagcaattgaaagtttggtaaagaagctgaaggagaaaaaagatgaattggattctttaataacagctataactacaaatggagctcatcctagtaaatgtgttaccatacagagaacattggatgggaggcttcaggtggctggtcggaaaggatttcctcatgtgatctatgcccgtctctggaggtggcctgatcttcacaaaaatgaactaaaacatgttaaatattgtcagtatgcgtttgacttaaaatgtgatagtgtctgtgtgaatccatatcactacgaacgagttgtatcacctggaattgatctctcaggattaacactgcagagtaatgctccatcaagtatgatggtgaaggatgaatatgtgcatgactttgagggacagccatcgttgtccactgaaggacattcaattcaaaccatccagcatccaccaagtaatcgtgcatcgacagagacatacagcaccccagctctgttagccccatctgagtctaatgctaccagcactgccaactttcccaacattcctgtggcttccacaagtcagcctgccagtatactggggggcagccatagtgaaggactgttgcagatagcatcagggcctcagccaggacagcagcagaatggatttactggtcagccagctacttaccatcataacagcactaccacctggactggaagtaggactgcaccatacacacctaatttgcctcagatggggctaacagagctggggtgctgcccacgcgtccgtctaaatgtccttttatgctattatcttctgcatgcaaactttacatacatcagcatgaatatccaacattcactgaacacagtgccaccagcacttgtaattgcttttcagaaataatgcttctcataattgtttataacgagcatcaaactatccc

SEQ ID NO: 426800 - DNA, 1564 bp, Homo sapiens
gcgaccactccctcaaacaggccttcgcctccgcccgcgctgaggcccaggcccaggtccagattcagagccgcccgccggctggcgctgccctgtaggcgcctgcgcagagcgaccctccccgtcactcggagcgggaggcgggggcagccgggagaaaggaaagctgcgggggaaaagggccaaaccctgaaattacccggatgtggtccccgcgcgcgcatgctcagtggcttctcgacaagttggcagcaacaacacggccctggtcgtcgtcgccgctgcggtaacggagcggtttgggtggcggagcctgcgttcgcgccttcccgctctcctcgggaggcccttcctgctctcccctaggctccgcggccgcccagggggtgggagcgggtgaggggagccaggcgcccagcgagagaggccccccgccgcagggcggcccgggagctcgaggcggtccggcccgcgcgggcagcggcgcggcgctgaggaggggcggcctggccgggacgcctcggggcgggggccgaggagctctccgggccgccggggaaagctacgggcccggtgcgtccgcggaccagcagcgcgggagagcggactcccctcgccaccgcccgagcccaggttatcctgaatacatgtctaacaattttccttgcaacgttagctgttgtttttcactgtttccaaaggatcaaaattgcttcagaaattggagacatatttgatttaaaaggaaaaacttgaacaaatggacaatatgtctattacgaatacaccaacaagtaatgatgcctgtctgagcattgtgcatagtttgatgtgccatagacaaggtggagagagtgaaacatttgcaaaaagagcaattgaaagtttggtaaagaagctgaaggagaaaaaagatgaattggattctttaataacagctataactacaaatggagctcatcctagtaaatgtgttaccatacagagaacattggatgggaggcttcaggtggctggtcggaaaggatttcctcatgtgatctatgcccgtctctggaggtggcctgatcttcacaaaaatgaactaaaacatgttaaatattgtcagtatgcgtttgacttaaaatgtgatagtgtctgtgtgaatccatatcactacgaacgagttgtatcacctggaattgatctctcaggattaacactgcagagtaatgctccatcaagtatgatggtgaaggatgaatatgtgcatgactttgagggacagccatcgttgtccactgaaggacattcaattcaaaccatccagcatccaccaagtaatcgtgcatcgacagagacatacagcaccccagctctgttagccccatctgagtctaatgctaccagcactgccaactttcccaacattcctgtggcttccacaagtcagcctgccagtatactggggggcagccatagtgaaggactgttgcagatagcatcagggcctcagccaggacagcaccccagctctgttagccccatctgagtctaatgctaccagcactgccaacttttccgg

SEQ ID NO: 426801 - DNA, 1091 bp, Homo sapiens
gcgaccactccctcaaacaggccttcgcctccgcccgcgctgaggcccaggcccaggtccagattcagagccgcccgccggctggcgctgccctgtaggcgcctgcgcagagcgaccctccccgtcactcggagcgggaggcgggggcagccgggagaaaggaaagctgcgggggaaaagggccaaaccctgaaattacccggatgtggtccccgcgcgcgcatgctcagtggcttctcgacaagttggcagcaacaacacggccctggtcgtcgtcgccgctgcggtaacggagcggtttgggtggcggagcctgcgttcgcgccttcccgctctcctcgggaggcccttcctgctctcccctaggctccgcggccgcccagggggtgggagcgggtgaggggagccaggcgcccagcgagagaggccccccgccgcagggcggcccgggagctcgaggcggtccggcccgcgcgggcagcggcgcggcgctgaggaggggcggcctggccgggacgcctcggggcgggggccgaggagctctccgggccgccggggaaagctacgggcccggtgcgtccgcggaccagcagcgcgggagagcggactcccctcgccaccgcccgagcccaggttatcctgaatacatgtctaacaattttccttgcaacgttagctgttgtttttcactgtttccaaaggatcaaaattgcttcagaaattggagacatatttgatttaaaaggaaaaacttgaacaaatggacaatatgtctattacgaatacaccaacaagtaatgatgcctgtctgagcattgtgcatagtttgatgtgccatagacaaggtggagagagtgaaacatttgcaaaaagagcaattgaaagtttggtaaagaagctgaaggagaaaaaagatgaattggattctttaataacagctataactacaaatggagctcatcctagtaaatgtgttaccatacagagaacattggatgggaggcttcaggttagtcttataagagtttttccttcctccctccctgcctccctcccttacttcagcctgggccacagtgaaactctgtctc

SEQ ID NO: 426802 - DNA, 850 bp, Homo sapiens
gcgaccactccctcaaacaggccttcgcctccgcccgcgctgaggcccaggcccaggtccagattcagagccgcccgccggctggcgctgccctgtaggcgcctgcgcagagcgaccctccccgtcactcggagcgggaggcgggggcagccgggagaaaggaaagctgcgggggaaaagggccaaaccctgaaattacccggatgtggtccccgcgcgcgcatgctcagtggcttctcgacaagttggcagcaacaacacggccctggtcgtcgtcgccgctgcggtaacggagcggtttgggtggcggagcctgcgttcgcgccttcccgctctcctcgggaggcccttcctgctctcccctaggctccgcggccgcccagggggtgggagcgggtgaggggagccaggcgcccagcgagagaggccccccgccgcagggcggcctggcatgtctagtccgacctgaccgagcagatactggactgcggccccagagggtcggtgcgggagctacacgagctgccctcggacaacgactatttcaaggtgggggcgcccggttagaaagggaggccgcaggggtcgccggctgtcacagtcccgcgggcctgaggcaccagccggccctacttcctactgaacaatccggagaaaggggcccaagccctctggggaccactctgaggtggatctggggctccctcattccccccgccccctctcaactttatttgggaagcgcgctcctgaaaaagaccttggaactggctacagggccctaacctgggagcggggacttgagaaagctttggagcgttctgggaggcgttgctgaggtgggggtggg

SEQ ID NO: 426803 - DNA, 3451 bp, Homo sapiens
gcgaccactccctcaaacaggccttcgcctccgcccgcgctgaggcccaggcccaggtccagattcagagccgcccgccggctggcgctgccctgtaggcgcctgcgcagagcgaccctccccgtcactcggagcgggaggcgggggcagccgggagaaaggaaagctgcgggggaaaagggccaaaccctgaaattacccggatgtggtccccgcgcgcgcatgctcagtggcttctcgacaagttggcagcaacaacacggccctggtcgtcgtcgccgctgcggtaacggagcggtttgggtggcggagcctgcgttcgcgccttcccgctctcctcgggaggcccttcctggttatcctgaatacatgtctaacaattttccttgcaacgttagctgttgtttttcactgtttccaaaggatcaaaattgcttcagaaattggagacatatttgatttaaaaggaaaaacttgaacaaatggacaatatgtctattacgaatacaccaacaagtaatgatgcctgtctgagcattgtgcatagtttgatgtgccatagacaaggtggagagagtgaaacatttgcaaaaagagcaattgaaagtttggtaaagaagctgaaggagaaaaaagatgaattggattctttaataacagctataactacaaatggagctcatcctagtaaatgtgttaccatacagagaacattggatgggaggcttcaggtggctggtcggaaaggatttcctcatgtgatctatgcccgtctctggaggtggcctgatcttcacaaaaatgaactaaaacatgttaaatattgtcagtatgcgtttgacttaaaatgtgatagtgtctgtgtgaatccatatcactacgaacgagttgtatcacctggaattgatctctcaggattaacactgcagagtaatgctccatcaagtatgatggtgaaggatgaatatgtgcatgactttgagggacagccatcgttgtccactgaaggacattcaattcaaaccatccagcatccaccaagtaatcgtgcatcgacagagacatacagcaccccagctctgttagccccatctgagtctaatgctaccagcactgccaactttcccaacattcctgtggcttccacaagtcagcctgccagtatactggggggcagccatagtgaaggactgttgcagatagcatcagggcctcagccaggacagcagcagaatggatttactggtcagccagctacttaccatcataacagcactaccacctggactggaagtaggactgcaccatacacacctaatttgcctcaccaccaaaacggccatcttcagcaccacccgcctatgccgccccatcccggacattactggcctgttcacaatgagcttgcattccagcctcccatttccaatcatcctgctcctgagtattggtgttccattgcttactttgaaatggatgttcaggtaggagagacatttaaggttccttcaagctgccctattgttactgttgatggatacgtggacccttctggaggagatcgcttttgtttgggtcaactctccaatgtccacaggacagaagccattgagagagcaaggttgcacataggcaaaggtgtgcagttggaatgtaaaggtgaaggtgatgtttgggtcaggtgccttagtgaccacgcggtctttgtacagagttactacttagacagagaagctgggcgtgcacctggagatgctgttcataagatctacccaagtgcatatataaaggtctttgatttgcgtcagtgtcatcgacagatgcagcagcaggcggctactgcacaagctgcagcagctgcccaggcagcagccgtggcaggaaacatccctggcccaggatcagtaggtggaatagctccagctatcagtctgtcagctgctgctggaattggtgttgatgaccttcgtcgcttatgcatactcaggatgagttttgtgaaaggctggggaccggattacccaagacagagcatcaaagaaacaccttgctggattgaaattcacttacaccgggccctccagctcctagacgaagtacttcataccatgccgattgcagacccacaacctttagactgaggtcttttaccgttggggcccttaaccttatcaggatggtggactacaaaatacaatcctgtttataatctgaagatatatttcacttttgttctgctttatcttttcataaagggttgaaaatgtgtttgctgccttgctcctagcagacagaaactggattaaaacaattttttttttcctcttcagaacttgtcaggcatggctcagagcttgaagattaggagaaacacattcttattaattcttcacctgttatgtatgaaggaatcattccagtgctagaaaatttagccctttaaaacgtcttagagccttttatctgcagaacatcgatatgtatatcattctacagaataatccagtattgctgattttaaaggcagagaagttctcaaagttaattcacctatgttattttgtgtacaagttgttattgttgaacatacttcaaaaataatgtgccatgtgggtgagttaattttaccaagagtaactttactctgtgtttaaaaagtaagttaataatgtattgtaatctttcatccaaaatattttttgcaagttatattagtgaagatggtttcaattcagattgtcttgcaacttcagttttatttttgccaaggcaaaaaactcttaatctgtgtgtatattgagaatcccttaaaattaccagacaaaaaaatttaaaattacgtttgttattcctagtggatgactgttgatgaagtatacttttcccctgttaaacagtagttgtattcttctgtatttctaggcacaaggttggttgctaagaagcctataagaggaatttcttttccttcattcatagggaaaggttttgtattttttaaaacactaaaagcagcgtcactctacctaatgtctcactgttctgcaaaggtggcaatgcttaaactaaataatgaataaactgaatattttggaaactgctaaattctatgttaaatactgtgcagaataatggaaacattacagttcataataggtagtttggatatttttgtacttgatttgatgtgactttttttggtataatgtttaaatcatgtatgttatgatattgtttaaaattcagtttttgtatcttggggcaagactgcaaacttttttatatcttttggttattctaagccctttgccatcaatgatcatatcaattggcagtgactttgtatagagaatttaagtagaaaagttgcagatgtattgactgtaccacagacacaatatgtatgctttttacctagctggtagcataaataaaactgaatctcaacata

SEQ ID NO: 426804 - DNA, 3675 bp, Homo sapiens
gcgaccactccctcaaacaggccttcgcctccgcccgcgctgaggcccaggcccaggtccagattcagagccgcccgccggctggcgctgccctgtaggcgcctgcgcagagcgaccctccccgtcactcggagcgggaggcgggggcagccgggagaaaggaaagctgcgggggaaaagggccaaaccctgaaattacccggatgtggtccccgcgcgcgcatgctcagtggcttctcgacaagttggcagcaacaacacggccctggtcgtcgtcgccgctgcggtaacggagcggtttgggtggcggagcctgcgttcgcgccttcccgctctcctcgggaggcccttcctgctctcccctaggctccgcggccgcccagggggtgggagcgggtgaggggagccaggcgcccagcgagagaggccccccgccgcagggcggcccgggagctcgaggcggtccggcccgcgcgggcagcggcgcggcgctgaggaggggcggcctggccgggacgcctcggggcgggggccgaggagctctccgggccgccggggaaagctacgggcccggtgcgtccgcggaccagcagcgcgggagagcggactcccctcgccaccgcccgagcccaggttatcctgaatacatgtctaacaattttccttgcaacgttagctgttgtttttcactgtttccaaaggatcaaaattgcttcagaaattggagacatatttgatttaaaaggaaaaacttgaacaaatggacaatatgtctattacgaatacaccaacaagtaatgatgcctgtctgagcattgtgcatagtttgatgtgccatagacaaggtggagagagtgaaacatttgcaaaaagagcaattgaaagtttggtaaagaagctgaaggagaaaaaagatgaattggattctttaataacagctataactacaaatggagctcatcctagtaaatgtgttaccatacagagaacattggatgggaggcttcaggtggctggtcggaaaggatttcctcatgtgatctatgcccgtctctggaggtggcctgatcttcacaaaaatgaactaaaacatgttaaatattgtcagtatgcgtttgacttaaaatgtgatctctcaggattaacactgcagagtaatgctccatcaagtatgatggtgaaggatgaatatgtgcatgactttgagggacagccatcgttgtccactgaaggacattcaattcaaaccatccagcatccaccaagtaatcgtgcatcgacagagacatacagcaccccagctctgttagccccatctgagtctaatgctaccagcactgccaactttcccaacattcctgtggcttccacaagtcagcctgccagtatactggggggcagccatagtgaaggactgttgcagatagcatcagggcctcagccaggacagcagcagaatggatttactggtcagccagctacttaccatcataacagcactaccacctggactggaagtaggactgcaccatacacacctaatttgcctcaccaccaaaacggccatcttcagcaccacccgcctatgccgccccatcccggacattactggcctgttcacaatgagcttgcattccagcctcccatttccaatcatcctgctcctgagtattggtgttccattgcttactttgaaatggatgttcaggtaggagagacatttaaggttccttcaagctgccctattgttactgttgatggatacgtggacccttctggaggagatcgcttttgtttgggtcaactctccaatgtccacaggacagaagccattgagagagcaaggttgcacataggcaaaggtgtgcagttggaatgtaaaggtgaaggtgatgtttgggtcaggtgccttagtgaccacgcggtctttgtacagagttactacttagacagagaagctgggcgtgcacctggagatgctgttcataagatctacccaagtgcatatataaaggtctttgatttgcgtcagtgtcatcgacagatgcagcagcaggcggctactgcacaagctgcagcagctgcccaggcagcagccgtggcaggaaacatccctggcccaggatcagtaggtggaatagctccagctatcagtctgtcagctgctgctggaattggtgttgatgaccttcgtcgcttatgcatactcaggatgagttttgtgaaaggctggggaccggattacccaagacagagcatcaaagaaacaccttgctggattgaaattcacttacaccgggccctccagctcctagacgaagtacttcataccatgccgattgcagacccacaacctttagactgaggtcttttaccgttggggcccttaaccttatcaggatggtggactacaaaatacaatcctgtttataatctgaagatatatttcacttttgttctgctttatcttttcataaagggttgaaaatgtgtttgctgccttgctcctagcagacagaaactggattaaaacaattttttttttcctcttcagaacttgtcaggcatggctcagagcttgaagattaggagaaacacattcttattaattcttcacctgttatgtatgaaggaatcattccagtgctagaaaatttagccctttaaaacgtcttagagccttttatctgcagaacatcgatatgtatatcattctacagaataatccagtattgctgattttaaaggcagagaagttctcaaagttaattcacctatgttattttgtgtacaagttgttattgttgaacatacttcaaaaataatgtgccatgtgggtgagttaattttaccaagagtaactttactctgtgtttaaaaagtaagttaataatgtattgtaatctttcatccaaaatattttttgcaagttatattagtgaagatggtttcaattcagattgtcttgcaacttcagttttatttttgccaaggcaaaaaactcttaatctgtgtgtatattgagaatcccttaaaattaccagacaaaaaaatttaaaattacgtttgttattcctagtggatgactgttgatgaagtatacttttcccctgttaaacagtagttgtattcttctgtatttctaggcacaaggttggttgctaagaagcctataagaggaatttcttttccttcattcatagggaaaggttttgtattttttaaaacactaaaagcagcgtcactctacctaatgtctcactgttctgcaaaggtggcaatgcttaaactaaataatgaataaactgaatattttggaaactgctaaattctatgttaaatactgtgcagaataatggaaacattacagttcataataggtagtttggatatttttgtacttgatttgatgtgactttttttggtataatgtttaaatcatgtatgttatgatattgtttaaaattcagtttttgtatcttggggcaagactgcaaacttttttatatcttttggttattctaagccctttgccatcaatgatcatatcaattggcagtgactttgtatagagaatttaagtagaaaagttgcagatgtattgactgtaccacagacacaatatgtatgctttttacctagctggtagcataaataaaactgaatctcaacata

SEQ ID NO: 426805 - DNA, 2885 bp, Homo sapiens
gctggacacattttccagccattcggtttttgcctgccttatgtatttaggtgattattcttctaggtttatcaagaaactgaggagtacctttttaggattgttgctggaggctgttgaaacatagactagcttcaaatttgagagtcagattgattgataaaatatatctcatgctgttaccgctgaataaatgacttttgctggtaaagtagtatgcttttaaaataatatgaaaaaattctgaattaaggttagtaatttacactgtaattgattttaggtgttattatattacttgctaataagatttttttttctgggaatagaagcttataaaaatttaaaatatgtttaattttctatatagctccatcaagtatgatggtgaaggatgaatatgtgcatgactttgagggacagccatcgttgtccactgaaggacattcaattcaaaccatccagcatccaccaagtaatcgtgcatcgacagagacatacagcaccccagctctgttagccccatctgagtctaatgctaccagcactgccaactttcccaacattcctgtggcttccacaagtcagcctgccagtatactggggggcagccatagtgaaggactgttgcagatagcatcagggcctcagccaggacagcagcagaatggatttactggtcagccagctacttaccatcataacagcactaccacctggactggaagtaggactgcaccatacacacctaatttgcctcaccaccaaaacggccatcttcagcaccacccgcctatgccgccccatcccggacattactggcctgttcacaatgagcttgcattccagcctcccatttccaatcatcctgctcctgagtattggtgttccattgcttactttgaaatggatgttcaggtaggagagacatttaaggttccttcaagctgccctattgttactgttgatggatacgtggacccttctggaggagatcgcttttgtttgggtcaactctccaatgtccacaggacagaagccattgagagagcaaggttgcacataggcaaaggtgtgcagttggaatgtaaaggtgaaggtgatgtttgggtcaggtgccttagtgaccacgcggtctttgtacagagttactacttagacagagaagctgggcgtgcacctggagatgctgttcataagatctacccaagtgcatatataaaggtctttgatttgcgtcagtgtcatcgacagatgcagcagcaggcggctactgcacaagctgcagcagctgcccaggcagcagccgtggcaggaaacatccctggcccaggatcagtaggtggaatagctccagctatcagtctgtcagctgctgctggaattggtgttgatgaccttcgtcgcttatgcatactcaggatgagttttgtgaaaggctggggaccggattacccaagacagagcatcaaagaaacaccttgctggattgaaattcacttacaccgggccctccagctcctagacgaagtacttcataccatgccgattgcagacccacaacctttagactgaggtcttttaccgttggggcccttaaccttatcaggatggtggactacaaaatacaatcctgtttataatctgaagatatatttcacttttgttctgctttatcttttcataaagggttgaaaatgtgtttgctgccttgctcctagcagacagaaactggattaaaacaattttttttttcctcttcagaacttgtcaggcatggctcagagcttgaagattaggagaaacacattcttattaattcttcacctgttatgtatgaaggaatcattccagtgctagaaaatttagccctttaaaacgtcttagagccttttatctgcagaacatcgatatgtatatcattctacagaataatccagtattgctgattttaaaggcagagaagttctcaaagttaattcacctatgttattttgtgtacaagttgttattgttgaacatacttcaaaaataatgtgccatgtgggtgagttaattttaccaagagtaactttactctgtgtttaaaaagtaagttaataatgtattgtaatctttcatccaaaatattttttgcaagttatattagtgaagatggtttcaattcagattgtcttgcaacttcagttttatttttgccaaggcaaaaaactcttaatctgtgtgtatattgagaatcccttaaaattaccagacaaaaaaatttaaaattacgtttgttattcctagtggatgactgttgatgaagtatacttttcccctgttaaacagtagttgtattcttctgtatttctaggcacaaggttggttgctaagaagcctataagaggaatttcttttccttcattcatagggaaaggttttgtattttttaaaacactaaaagcagcgtcactctacctaatgtctcactgttctgcaaaggtggcaatgcttaaactaaataatgaataaactgaatattttggaaactgctaaattctatgttaaatactgtgcagaataatggaaacattacagttcataataggtagtttggatatttttgtacttgatttgatgtgactttttttggtataatgtttaaatcatgtatgttatgatattgtttaaaattcagtttttgtatcttggggcaagactgcaaacttttttatatcttttggttattctaagccctttgccatcaatgatcatatcaattggcagtgactttgtatagagaatttaagtagaaaagttgcagatgtattgactgtaccacagacacaatatgtatgctttttacctagctggtagcataaataaaactgaatctcaacata

SEQ ID NO: 426806 - DNA, 2281 bp, Homo sapiens
acacctatcctgtacaaagacgcaaaatatcacagagagctcagccaggacagcagcagaatggaataaactagagtacaacaactacttaccatcataacagcactaccacctggactggaagtaggactgcaccatacacacctaatttgcctcaccaccaaaacggccatcttcagcaccacccgcctatgccgccccatcccggacattactggcctgttcacaatgagcttgcattccagcctcccatttccaatcatcctgctcctgagtattggtgttccattgcttactttgaaatggatgttcaggtaggagagacatttaaggttccttcaagctgccctattgttactgttgatggatacgtggacccttctggaggagatcgcttttgtttgggtcaactctccaatgtccacaggacagaagccattgagagagcaaggttgcacataggcaaaggtgtgcagttggaatgtaaaggtgaaggtgatgtttgggtcaggtgccttagtgaccacgcggtctttgtacagagttactacttagacagagaagctgggcgtgcacctggagatgctgttcataagatctacccaagtgcatatataaaggtctttgatttgcgtcagtgtcatcgacagatgcagcagcaggcggctactgcacaagctgcagcagctgcccaggcagcagccgtggcaggaaacatccctggcccaggatcagtaggtggaatagctccagctatcagtctgtcagctgctgctggaattggtgttgatgaccttcgtcgcttatgcatactcaggatgagttttgtgaaaggctggggaccggattacccaagacagagcatcaaagaaacaccttgctggattgaaattcacttacaccgggccctccagctcctagacgaagtacttcataccatgccgattgcagacccacaacctttagactgaggtcttttaccgttggggcccttaaccttatcaggatggtggactacaaaatacaatcctgtttataatctgaagatatatttcacttttgttctgctttatcttttcataaagggttgaaaatgtgtttgctgccttgctcctagcagacagaaactggattaaaacaattttttttttcctcttcagaacttgtcaggcatggctcagagcttgaagattaggagaaacacattcttattaattcttcacctgttatgtatgaaggaatcattccagtgctagaaaatttagccctttaaaacgtcttagagccttttatctgcagaacatcgatatgtatatcattctacagaataatccagtattgctgattttaaaggcagagaagttctcaaagttaattcacctatgttattttgtgtacaagttgttattgttgaacatacttcaaaaataatgtgccatgtgggtgagttaattttaccaagagtaactttactctgtgtttaaaaagtaagttaataatgtattgtaatctttcatccaaaatattttttgcaagttatattagtgaagatggtttcaattcagattgtcttgcaacttcagttttatttttgccaaggcaaaaaactcttaatctgtgtgtatattgagaatcccttaaaattaccagacaaaaaaatttaaaattacgtttgttattcctagtggatgactgttgatgaagtatacttttcccctgttaaacagtagttgtattcttctgtatttctaggcacaaggttggttgctaagaagcctataagaggaatttcttttccttcattcatagggaaaggttttgtattttttaaaacactaaaagcagcgtcactctacctaatgtctcactgttctgcaaaggtggcaatgcttaaactaaataatgaataaactgaatattttggaaactgctaaattctatgttaaatactgtgcagaataatggaaacattacagttcataataggtagtttggatatttttgtacttgatttgatgtgactttttttggtataatgtttaaatcatgtatgttatgatattgtttaaaattcagtttttgtatcttggggcaagactgcaaacttttttatatcttttggttattctaagccctttgccatcaatgatcatatcaattggcagtgactttgtatagagaatttaagtagaaaagttgcagatgtattgactgtaccacagacacaatatgtatgctttttacctagctggtagcataaataaaactgaatctcaacata

SEQ ID NO: 426807 - DNA, 2835 bp, Homo sapiens
gcgaccactccctcaaacaggccttcgcctccgcccgcgctgaggcccaggcccaggtccagattcagagccgcccgccggctggcgctgccctgtaggcgcctgcgcagagcgaccctccccgtcactcggagcgggaggcgggggcagccgggagaaaggaaagctgcgggggaaaagggccaaaccctgaaattacccggatgtggtccccgcgcgcgcatgctcagtggcttctcgacaagttggcagcaacaacacggccctggtcgtcgtcgccgctgcggtaacggagcggtttgggtggcggagcctgcgttcgcgccttcccgctctcctcgggaggcccttcctgctctcccctaggctccgcggccgcccagggggtgggagcgggtgaggggagccaggcgcccagcgagagaggccccccgccgcagggcggcccgggagctcgaggcggtccggcccgcgcgggcagcggcgcggcgctgaggaggggcggcctggccgggacgcctcggggcgggggccgaggagctctccgggccgccggggaaagctacgggcccggtgcgtccgcggaccagcagcgcgggagagcggactcccctcgccaccgcccgagcccaggttatcctgaatacatgtctaacaattttccttgcaacgttagctgttgtttttcactgtttccaaaggatcaaaattgcttcagaaattggagacatatttgatttaaaaggaaaaacttgaacaaatggacaatatgtctattacgaatacaccaacaagtaatgatgcctgtctgagcattgtgcatagtttgatgtgccatagacaaggtggagagagtgaaacatttgcaaaaagagcaattgaaagtttggtaaagaagctgaaggagaaaaaagatgaattggattctttaataacagctataactacaaatggagctcatcctagtaaatgtgttaccatacagagaacattggatgggaggcttcaggtggctggtcggaaaggatttcctcatgtgatctatgcccgtctctggaggtggcctgatcttcacaaaaatgaactaaaacatgttaaatattgtcagtatgcgtttgacttaaaatgtgatagtgtctgtgtgaatccatatcactacgaacgagttgtatcacctggaattgatctctcaggattaacactgcagagtaatgctccatcaagtatgatggtgaaggatgaatatgtgcatgactttgagggacagccatcgttgtccactgaaggacattcaattcaaaccatccagcatccaccaagtaatcgtgcatcgacagagacatacagcaccccagctctgttagccccatctgagtctaatgctaccagcactgccaactttcccaacattcctgtggcttccacaagtcagcctgccagtatactggggggcagccatagtgaaggactgttgcagatagcatcagggcctcagccaggacagcagcagaatggatttactggtcagccagctacttaccatcataacagcactaccacctggactggaagtaggactgcaccatacacacctaatttgcctcaccaccaaaacggccatcttcagcaccacccgcctatgccgccccatcccggacattactggcctgttcacaatgagcttgcattccagcctcccatttccaatcatcctgctcctgagtattggtgttccattgcttactttgaaatggatgttcaggtaggagagacatttaaggttccttcaagctgccctattgttactgttgatggatacgtggacccttctggaggagatcgcttttgtttgggtcaactctccaatgtccacaggacagaagccattgagagagcaaggttgcacataggcaaaggtgtgcagttggaatgtaaaggtgaaggtgatgtttgggtcaggtgccttagtgaccacgcggtctttgtacagagttactacttagacagagaagctgggcgtgcacctggagatgctgttcataagatctacccaagtgcatatataaaggtctttgatttgcgtcagtgtcatcgacagatgcagcagcaggcggctactgcacaagctgcagcagctgcccaggcagcagccgtggcaggaaacatccctggcccaggatcagtaggtggaatagctccagctatcagtctgtcagctgctgctggaattggtgttgatgaccttcgtcgcttatgcatactcaggatgagttttgtgaaaggctggggaccggattacccaagacagagcatcaaagaaacaccttgctggattgaaattcacttacaccgggccctccagctcctagacgaagtacttcataccatgccgattgcagacccacaacctttagactgaggtcttttaccgttggggcccttaaccttatcaggatggtggactacaaaatacaatcctgtttataatctgaagatatatttcacttttgttctgctttatcttttcataaagggttgaaaatgtgtttgctgccttgctcctagcagacagaaactggattaaaacaattttttttttcctcttcagaacttgtcaggcatggctcagagcttgaagattaggagaaacacattcttattaattcttcacctgttatgtatgaaggaatcattccagtgctagaaaatttagccctttaaaacgtcttagagccttttatctgcagaacatcgatatgtatatcattctacagaataatccagtattgctgattttaaacatcgatatgtatatcattctacagaataatatac

SEQ ID NO: 426808 - DNA, 1699 bp, Homo sapiens
  misc_feature (1696)..(1696): n is a, c, g, or t
gcgaccactccctcaaacaggccttcgcctccgcccgcgctgaggcccaggcccaggtccagattcagagccgcccgccggctggcgctgccctgtaggcgcctgcgcagagcgaccctccccgtcactcggagcgggaggcgggggcagccgggagaaaggaaagctgcgggggaaaagggccaaaccctgaaattacccggatgtggtccccgcgcgcgcatgctcagtggcttctcgacaagttggcagcaacaacacggccctggtcgtcgtcgccgctgcggtaacggagcggtttgggtggcggagcctgcgttcgcgccttcccgctctcctcgggaggcccttcctgctctcccctaggctccgcggccgcccagggggtgggagcgggtgaggggagccaggcgcccagcgagagaggccccccgccgcagggcggcccgggagctcgaggcggtccggcccgcgcgggcagcggcgcggcgctgaggaggggcggcctggccgggacgcctcggggcgggggccgaggagctctccgggccgccggggaaagctacgggcccggtgcgtccgcggaccagcagcgcgggagagcggactcccctcgccaccgcccgagcccaggttatcctgaatacatgtctaacaattttccttgcaacgttagctgttgtttttcactgtttccaaaggatcaaaattgcttcagaaattggagacatatttgatttaaaaggaaaaacttgaacaaatggacaatatgtctattacgaatacaccaacaagtaatgatgcctgtctgagcattgtgcatagtttgatgtgccatagacaaggtggagagagtgaaacatttgcaaaaagagcaattgaaagtttggtaaagaagctgaaggagaaaaaagatgaattggattctttaataacagctataactacaaatggagctcatcctagtaaatgtgttaccatacagagaacattggatgggaggcttcaggtggctggtcggaaaggatttcctcatgtgatctatgcccgtctctggaggtggcctgatcttcacaaaaatgaactaaaacatgttaaatattgtcagtatgcgtttgacttaaaatgtgatagtgtctgtgtgaatccatatcactacgaacgagttgtatcacctggaattgatctctcaggattaacactgcagagtaatgctccatcaagtatgatggtgaaggatgaatatgtgcatgactttgagggacagccatcgttgtccactgaaggacattcaattcaaaccatccagcatccaccaagtaatcgtgcatcgacagagacatacagcaccccagctctgttagccccatctgagtctaatgctaccagcactgccaactttcccaacattcctgtggcttccacaagtcagcctgccagtatactggggggcagccatagtgaaggactgttgcagatagcatcagggcctcagccaggacagcagcagaatggatttactggtcagccagctacttaccatcataacagcactaccacctggactggaagtaggactgcaccatacacacctaatttgcctcaccaccaaaacggccatcttcagcaccacccgtctttcgccagaactcgggaccgagctcggaatccgaaccatccaaaagctgttccgggngga

SEQ ID NO: 426809 - DNA, 1579 bp, Homo sapiens
gcgaccactccctcaaacaggccttcgcctccgcccgcgctgaggcccaggcccaggtccagattcagagccgcccgccggctggcgctgccctgtaggcgcctgcgcagagcgaccctccccgtcactcggagcgggaggcgggggcagccgggagaaaggaaagctgcgggggaaaagggccaaaccctgaaattacccggatgtggtccccgcgcgcgcatgctcagtggcttctcgacaagttggcagcaacaacacggccctggtcgtcgtcgccgctgcggtaacggagcggtttgggtggcggagcctgcgttcgcgccttcccgctctcctcgggaggcccttcctgctctcccctaggctccgcggccgcccagggggtgggagcgggtgaggggagccaggcgcccagcgagagaggccccccgccgcagggcggcccgggagctcgaggcggtccggcccgcgcgggcagcggcgcggcgctgaggaggggcggcctggccgggacgcctcggggcgggggccgaggagctctccgggccgccggggaaagctacgggcccggtgcgtccgcggaccagcagcgcgggagagcggactcccctcgccaccgcccgagcccaggttatcctgaatacatgtctaacaattttccttgcaacgttagctgttgtttttcactgtttccaaaggatcaaaattgcttcagaaattggagacatatttgatttaaaaggaaaaacttgaacaaatggacaatatgtctattacgaatacaccaacaagtaatgatgcctgtctgagcattgtgcatagtttgatgtgccatagacaaggtggagagagtgaaacatttgcaaaaagagcaattgaaagtttggtaaagaagctgaaggagaaaaaagatgaattggattctttaataacagctataactacaaatggagctcatcctagtaaatgtgttaccatacagagaacattggatgggaggcttcaggtggctggtcggaaaggatttcctcatgtgatctatgcccgtctctggaggtggcctgatcttcacaaaaatgaactaaaacatgttaaatattgtcagtatgcgtttgacttaaaatgtgatagtgtctgtgtgaatccatatcactacgaacgagttgtatcacctggaattggtaagtagactttgctttcatcctaagaaacataaagggaaaaggatctcaatagtgtttcaatttttgtaagttaaattataaatttggaagatagcccgcgactttaaataaggttaaagaatcagacatttttaatatacgtatttaaatttgaatttaggaacaaacttatattttgactgctaaaaccgagtattgtagttgatattttgcccctttagaacattgtttttgagaaataagatggaaagcattataaatttgaatacttagttatgtattgttagatagcgtttatgctacttctgaattgaaatggttcatgaacttttgtaatctttggtttaaatttacattctctgtttttaaatggaaaatactttcattgtaat

SEQ ID NO: 426810 - DNA, 1248 bp, Homo sapiens
gcgaccactccctcaaacaggccttcgcctccgcccgcgctgaggcccaggcccaggtccagattcagagccgcccgccggctggcgctgccctgtaggcgcctgcgcagagcgaccctccccgtcactcggagcgggaggcgggggcagccgggagaaaggaaagctgcgggggaaaagggccaaaccctgaaattacccggatgtggtccccgcgcgcgcatgctcagtggcttctcgacaagttggcagcaacaacacggccctggtcgtcgtcgccgctgcggtaacggagcggtttgggtggcggagcctgcgttcgcgccttcccgctctcctcgggaggcccttcctgctctcccctaggctccgcggccgcccagggggtgggagcgggtgaggggagccaggcgcccagcgagagaggccccccgccgcagggcggcccgggagctcgaggcggtccggcccgcgcgggcagcggcgcggcgctgaggaggggcggcctggccgggacgcctcggggcgggggccgaggagctctccgggccgccggggaaagctacgggcccggtgcgtccgcggaccagcagcgcgggagagcggactcccctcgccaccgcccgagcccaggttatcctgaatacatgtctaacaattttccttgcaacgttagctgttgtttttcactgtttccaaaggatcaaaattgcttcagaaattggagacatatttgatttaaaaggaaaaacttgaacaaatggacaatatgtctattacgaatacaccaacaagtaatgatgcctgtctgagcattgtgcatagtttgatgtgccatagacaaggtggagagagtgaaacatttgcaaaaagagcaattgaaagtttggtaaagaagctgaaggagaaaaaagatgaattggattctttaataacagctataactacaaatggagctcatcctagtaaatgtgttaccatacagagaacattggatgggaggcttcaggttagtcttataagagtttttctataccctctatggtggcagatttaaaaacttgctacgtttcctttcaagctactacagggtaatttaatttgtgctccatctcttcagatactgtgcatcctgtacaaatatgcattatgggaatttctggaagaatatgcaaaagataaaatcttaaagttttttaatgttctactcagaaaaatgttcaatggagaaaatttggaaaataaaaa

SEQ ID NO: 426811 - DNA, 746 bp, Homo sapiens
gaacatttgcagttcctcgtatttattcacaatcccacgaaatcaatggctcttcggtgcactgcaccggagactttcagctcagccgagctgctgttgagggtgataaattataggcgaaagcccggggacatgaaggcaagtcgctgggtttcagactgcctgattgcaaagaggtgacagtgtccttgccccgccgggcgacctaatgcgtacaagaccggggctggcctggtaagtggtgactcttagcctgttctctttgcttcttcctcctccccctgggagaggccgctgaggatccggaagcaggaatgtctgctgtgggtgagcctctgttctcttttgaacaagagaggctaggccctctgagcagccgcactttctcaatggcaggtaagtgcctcctcttggcgttccctgcccctcgcatgttctgcctccgaggtacttgatgttcctggtgaaatgccattttccccaagttgagagtgacctttcattccacagcctcatttccattccagccctccctatcccggctctggatgagaagttcctgttgatttgcagagattctttataagcacagttcaggccagtgcagtcctctggaggagaggctcagcccggcagctctggcaggcccaagtcagccagggtgcagaccggtcctcgagtttctgtgggtctaagagacggtcagcgttggaggaaataatcatttgctaatgcgagcggttttc

SEQ ID NO: 426812 - DNA, 726 bp, Homo sapiens
attcggcacagtgtgaatctgctccgtgcgggccgatctttgtgttcgagccaccgccagggtgaaggccaacacgcagaggacgtttgagtctgggatgaagcatgtacgtattatttatatgatggaatttcacgtttttatgtaagcatgaaacacaggcagtatgagagaaagcaaggcccgtcatgctgtccgtacactacgtatgctgtagagccattttgtatgttgtgtaaaacaaaaagcattgatgaaaaagcaaaaggtgatgtatgtatatgagaaaattaattgtacgatatcattccagtacgttttgttgtacattttagtcttgtttactttctcttcattgttaagaggatgcgaactgtacagtttccagctagttacccatattagagaagaaataagagagtattagaagaaaacaggagagaaagaacatttgtgaattgcagttgtcaaaaaaaaaaatagcctagctggccttatttgtgaagcataattgcttttagcatatggaagtattttttcacattttctttgtataaaatttgtattaaacttaaatatctttttgatggtggtgtttctttgtgactgagccagtagactcacactatatgcttttttgggtttgcccgttccttcccccacccccccagttttttcagatttctttacctttttttaattaaactgttttggaaaaatgccgtg

SEQ ID NO: 426813 - DNA, 4339 bp, Homo sapiens
gaacatttgcagttcctcgtatttattcacaatcccacgaaatcaatggctcttcggtgcactgcaccggagactttcagctcagccgagctgctgttgagggtgataaattataggcgaaagcccggggacatgaaggcaagtcgctgggtttcagactgcctgattgcaaagaggtgacagtgtccttgccccgccgggcgacctaatgcgtacaagaccggggctggcctggtaagtggtgactcttagcctgttctctttgcttcttcctcctccccctgggagaggccgctgaggatccggaagcaggaatgtctgctgtgggtgagcctctgttctcttttgaacaagagaggctaggccctctgagcagccgcactttctcaatggcagatcctggctctgcagagagaacagcccagaaaagaaagttccccagccctccacattcttccaatggccactcgccgcaggacacatcaacaagccccattaaaaagaaaaagaaacctggcttactgaacagtaacaataaggagcaggatggacggaatgatttctactgctgggtttgtcaccgggaaggccaagtcctttgctgtgagctctgtccccgggtttatcacgctaagtgtctgagactgacatcggaaccagagggggactggttttgtcctgaatgtgagaaaattacagtagcagaatgcatcgagacccagagtaaagccatgacaatgctcaccattgaacagttatcctacctgctcaagtttgccattcagaaaatgaaacagccagggacagatgcattccagaagcccgttccattggaacagcaccctgactatgcggaatacatcttccatccaatggacctttgtacattggaaaagaatgcgaaaaagaaaatgtatggctgcacagaagccttcctggctgatgcaaagtggattttgcacaactgcatcatttataatgggggaaatcacaaattgacgcaaatagcgaaagtagtcatcaaaatctgtgaacatgagatgaatgaaatcgaagtatgtccagaatgttatctagctgcttgccaaaaacgagataactggttttgtgagccttgtagcaatccacatcctttggtctgggccaaactgaaggggtttccattctggcctgcaaaagctctaagggataaagacgggcaggtcgatgcccgattctttggacaacatgacagggcctgggttccaataaataattgctacctcatgtctaaagaaattcctttttctgtgaaaaagactaagagcatcttcaacagtgccatgcaagagatggaggtttacgtggagaacatccgcaggaagtttggggtttttaattactctccatttaggacaccctacacacccaacagccagtatcaaatgctgctcgatcccaccaaccccagcgccggcactgccaagatagacaagcaggagaaggtcaagctcaactttgacatgacggcatcccccaagatcctgatgagcaagcctgtgctgagtgggggcacaggccgccggatttccttgtcggatatgccgcgctcccccatgagcacaaactcttctgtgcacacgggctccgacgtggagcaggatgctgagaagaaggccacgtcgagccacttcagtgcgagcgaggagtccatggacttcctggataagagcacagcttcaccagcctccaccaagacgggacaagcagggagtttatccggcagcccaaagcccttctctcctcaactgtcagctcctatcacgacgaaaacggacaaaacctccaccaccggcagcatcctgaatcttaacctggatcgaagcaaagctgagatggatttgaaggagctgagcgagtcggtccagcaacagtccacccctgttcctctcatctctcccaagcgccagattcgtagcaggttccagctgaatcttgacaagaccatagagagttgcaaagcacaattaggcataaatgaaatctcggaagatgtctatacggccgtagagcacagcgattcggaggattctgagaagtcagatagtagcgatagtgagtatatcagtgatgatgagcagaagtctaagaacgagccagaagacacagaggacaaagaaggttgtcagatggacaaagagccatctgctgttaaaaaaaagcccaagcctacaaacccagtggagattaaagaggagctgaaaagcacgtcaccagccagcgagaaggcagaccctggagcagtcaaggacaaggccagccctgagcctgagaaggacttttccgaaaaggcaaaaccttcacctcaccccataaaggataaactgaagggaaaagatgagacggattccccaacagtccatttgggcctggactctgattcagagagcgaacttgtcatagatttaggagaagaccattctgggcgggagggtcgaaaaaataagaaggaacccaaagaaccatctcccaaacaggatgttgtaggtaaaactccaccatccacgacggtgggcagccattctcccccggaaacaccggtgctcacccgctcttccgcccaaacttccgcggctggcgccacagccaccaccagcacgtcctccacggtcaccgtcacggccccggcccccgccgccacaggaagcccagtgaaaaagcagaggccgcttttaccgaaggagactgccccggccgtgcagcgggtcgtgtggaactcatcaagtaagtttcaaacgtcctcccaaaagtggcacatgcagaagatgcagcgtcagcagcagcagcagcagcagcaaaaccagcagcagcagcctcagtcttcccaggggacgagatatcagaccagacaggctgtgaaaggtaccgagcctccccttctgttctccgtggcgcccgctcccattttgccacatcgacaggagaaagtcattgctcttttattttttttttttagttctcgtttgtttccgggccattgtatcttgaaggccttgcacattccatttggcattatttttaaaaattgttttgctacttgcttttttactttcaaaaagttttttttgttcattttataaatgatacatgcatatattctccttaaaaagggggcagaaagttttacataaaagtctgttatcccgtttaccttccatttcattctcttcccttccacagtggccagtatcaaccgttgtaaaagcttttctatgcatgtatgcatgtatatgtatatatacatatctgtatgtatatatgtgcgcatcatgtatatgatgccataaaattagtcctttttcccccctttttttcttttttaaaacataaaaatggtaccatacttgcttttttcccccacccatcagcatgttttggaggtccatccacatcagcacatacagccctgccttgttcttttggactgctgcatagtatttcatagtttatttaaagcattcctctactaatgggcatttaggttgctttcagttttttttctactgtgagcagtgctgcaatgaatatctttgtataaatttccttgtgcacatgagggaacctcttggagttattttggaaaaagtacagtgcgagaagttgatagcgaaggttaccttagtaactggagattcgtcacacacacaagatgagccagcctcaagaaccacttgctgaagttgcagaatcagaactcccaccagtcctgcaggaggctccatctggagctgaaattaggccaaacacagtgctgatctgactggttggtaccagtttgcctggcttttgtgagcattgatgtagatctttctaccaggaaacctgcatctagatcctcaaaggctgggttcttcaactgaaactcatagtgaatgcgcccctgtgaggggggctcatgagcagcagaatgtgaggttgaaaggtggccaggtcttgaattggcccccagtgaaacccttcacagatggcgagggagtgggtcctgaagaattggccaggcaaaattgagagtacagttggattaatcttgctatttaaaaagttggtggggcaaagccgagtctaggatatttgagattgggattgcggcttcctgtcttctgtcttcatatctcataagcaggagacttccccaggggagtttaattgctaccaagaagagggtcgggcgtggtggctcacacctgtaatcccagcactttgggaggccaaggcaggcagatcacttgaggccaggagttcaagaccagcccagtcaacatggtgaaaccccatctctactaaaatggaaaaaaaaaaa

SEQ ID NO: 426814 - DNA, 153 bp, Homo sapiens
tcaaagagtgcatttttatagggttatagatctcaaaaataaaagcattctttagtcggggtgttgtaggttaaaaagaagcatcttgggaaatgaatagaagaacactaattgatttggcaaatgactgctacaaaaattatgtggggacac

SEQ ID NO: 426815 - DNA, 5177 bp, Homo sapiens
gatggctcttgctcacccgagcctcacaaagataatcgctcaggaagtgtttcagccaatccggggcggctttacactccgatttgccggggcagccaatcggggatgagcttttattaggcggccagatcatcagccgaagtgccaaaccctttttctgtgagaactaggagcctgtcctccatgttttataagtattgacattacacagtgttaacaatgcatccacagagcttggctgaagaggaaataaaaacagaacaggaggtggtagagggcatggatatctctactcgctccaaagatcctggctctgcagagagaacagcccagaaaagaaagttccccagccctccacattcttccaatggccactcgccgcaggacacatcaacaagccccattaaaaagaaaaagaaacctggcttactgaacagtaacaataaggagcaggatggacggaatgatttctactgctgggtttgtcaccgggaaggccaagtcctttgctgtgagctctgtccccgggtttatcacgctaagtgtctgagactgacatcggaaccagagggggactggttttgtcctgaatgtgagaaaattacagtagcagaatgcatcgagacccagagtaaagccatgacaatgctcaccattgaacagttatcctacctgctcaagtttgccattcagaaaatgaaacagccagggacagatgcattccagaagcccgttccattggaacagcaccctgactatgcggaatacatcttccatccaatggacctttgtacattggaaaagaatgcgaaaaagaaaatgtatggctgcacagaagccttcctggctgatgcaaagtggattttgcacaactgcatcatttataatgggggaaatcacaaattgacgcaaatagcgaaagtagtcatcaaaatctgtgaacatgagatgaatgaaatcgaagtatgtccagaatgttatctagctgcttgccaaaaacgagataactggttttgtgagccttgtagcaatccacatcctttggtctgggccaaactgaaggggtttccattctggcctgcaaaagctctaagggataaagacgggcaggtcgatgcccgattctttggacaacatgacagggcctgggttccaataaataattgctacctcatgtctaaagaaattcctttttctgtgaaaaagactaagagcatcttcaacagtgccatgcaagagatggaggtttacgtggagaacatccgcaggaagtttggggtttttaattactctccatttaggacaccctacacacccaacagccagtatcaaatgctgctcgatcccaccaaccccagcgccggcactgccaagatagacaagcaggagaaggtcaagctcaactttgacatgacggcatcccccaagatcctgatgagcaagcctgtgctgagtgggggcacaggccgccggatttccttgtcggatatgccgcgctcccccatgagcacaaactcttctgtgcacacgggctccgacgtggagcaggatgctgagaagaaggccacgtcgagccacttcagtgcgagcgaggagtccatggacttcctggataagagcacagcttcaccagcctccaccaagacgggacaagcagggagtttatccggcagcccaaagcccttctctcctcaactgtcagctcctatcacgacgaaaacggacaaaacctccaccaccggcagcatcctgaatcttaacctggatcgaagcaaagctgagatggatttgaaggagctgagcgagtcggtccagcaacagtccacccctgttcctctcatctctcccaagcgccagattcgtagcaggttccagctgaatcttgacaagaccatagagagttgcaaagcacaattaggcataaatgaaatctcggaagatgtctatacggccgtagagcacagcgattcggaggattctgagaagtcagatagtagcgatagtgagtatatcagtgatgatgagcagaagtctaagaacgagccagaagacacagaggacaaagaaggttgtcagatggacaaagagccatctgctgttaaaaaaaagcccaagcctacaaacccagtggagattaaagaggagctgaaaagcacgtcaccagccagcgagaaggcagaccctggagcagtcaaggacaaggccagccctgagcctgagaaggacttttccgaaaaggcaaaaccttcacctcaccccataaaggataaactgaagggaaaagatgagacggattccccaacagtccatttgggcctggactctgattcagagagcgaacttgtcatagatttaggagaagaccattctgggcgggagggtcgaaaaaataagaaggaacccaaagaaccatctcccaaacaggatgttgtaggtaaaactccaccatccacgacggtgggcagccattctcccccggaaacaccggtgctcacccgctcttccgcccaaacttccgcggctggcgccacagccaccaccagcacgtcctccacggtcaccgtcacggccccggcccccgccgccacaggaagcccagtgaaaaagcagaggccgcttttaccgaaggagactgccccggccgtgcagcgggtcgtgtggaactcatcaactgtccagcagaaggagatcacacagagcccatccacgtccaccatcaccctggtgaccagcacacagtcatcgcccctggtcaccagctcggggtccatgagcacccttgtgtcctcagtcaacgctgacctgcccatcgccactgcctcagctgatgtcgccgctgatattgccaagtacactagcaaaatgatggatgcaataaaaggaacaatgacagaaatatacaacgatctttctaaaaacactactggaagcacaatagctgagattcgcaggctgaggatcgagatagagaagctccagtggctgcaccagcaagagctctccgaaatgaaacacaacttagagctgaccatggcggagatgcggcagagcctggagcaggagcgggaccggctcatcgccgaggtgaagaagcagctggagttggagaagcagcaggcggtggatgagaccaagaagaagcagtggtgcgccaactgcaagaaggaggccatcttttactgctgttggaacaccagctactgtgactacccctgccagcaagcccactggcctgagcacatgaagtcctgcacccagtcagctactgctcctcagcaggaagcggatgctgaggtgaacacagaaacactaaataagtcctcccaggggagctcctcgagcacacaatcagcaccttcagaaacggccagcgcctccaaagagaaggagacgtcagctgagaaaagcaaggagagtggctcgacccttgacctttctggctccagagagacgccctcctccattctcttaggctccaaccaaggctctgaccattcccggagtaataaatccagttggagcagcagtgatgagaagaggggatcgacacgttccgatcacaacaccagtaccagcacgaagagcctcctcccgaaagagtctcggctggacaccttctgggactagcagtgaatcgggacacaaaccacccaccccattgggagaaaaacccagacgccaggaaaagaagaaacaacaaaggcaggagaacagccactttcagacttgaaaatgacaaaaccctcagttgagcctgagcccccggcgcgggggctgctacactacaggacacccagcatcggctttgactgcagactgttcacccacacgagccctgtgcttttggtgtaaataatgtacaatttgtggatgtcattgaatctagaggactttcccctttttatatttgtattaactttaacttattaaaaaaaaaaaaagaaaaagaaaaacaatttaaaaaaaaaaaaaaaagcaaccaaccccaacaacaaaaaagaatgttttggtattggagaagggatggtcagttagcctgtctgtcacacgacggaatggatactgggcccggggaccactttcatactcacgtcctcatccttggatacccaggggagggcgaaccgttttcgctcgtgtgtctgtacgcagcatgttgggatcgggagtttcggcacagactatcccatcaagccgttggctcctttcagctactacgttaccacgttcctaaaacgcaagctctccggaccagacggacacagggagaagctagtttctttcatgtgattgaaatgatgactctactcctaaaagggaaaaaacaatatccttgtttacagaagagaaacaaacaagccccactcagctcagtcacaggagagaacacagaaagtcttaggatcatgaactctgaaaaaaagagaaaccttatctttgctttgtggttcctttaaacacactcacacacacttggtcagagatgctgtgcttcttggaagcaaggactcaaaggcaaggtgcacgcagaggacgtttgagtctgggatgaagcatgtacgtattatttatatgatggaatttcacgtttttatgtaagcatgaaacacaggcagtatgagagaaagcaaggcccgtcatgctgtccgtacactacgtatgctgtagagccattttgtatgttgtgtaaaacaaaaagcattgatgaaaaagcaaaaggtgatgtatgtatatgagaaaattaattgtacgatatcattccagtacgttttgttgtacattttagtcttgtttactttctcttcattgttaagaggatgcgaactgtacagtttccagctagttacccatattagagaagaaataagagagtattagaagaaaacaggagagaaagaacatttgtgaattgcagttgtcaaaaaaaaaaatagcctagctggccttatttgtgaagcataattgcttttagcatatggaagtattttttcacattttctttgtataaaatttgtattaaacttaaatatctttttgatggtggtgtttctttgtgactgagccagtagactcacactatatgcttttttgggtttgcccgttccttcccccacccccccagttttttcagatttctttacctttttttaattaaactgttttggaaaaatgccgtg

SEQ ID NO: 426816 - DNA, 5541 bp, Homo sapiens
gccccgaacacgtcgtggctgtgtagaaagaggtagacatgggagacttttcatttggtctttgtgaaagagattttatgaggcttcccaaaatgaagcagttattcacttttaccttcagggtgctttcacaaatgagctactggagtatttttcgtatctttggttgatgaaaaggctcatctccaaacttaatggttgtaccaaggtgttttcattccttcaacaagtcactgagtgctttcttggaacacacagccttgcactgggggttatggggagggaggaagaggctggacagggttactgcatactgccggaaggagattctcatttggctgcagagtgtcgcacaaagtgactccctaaaggcgtctgaaaccaaaagcattttgaggattgttacaagacaccgtgcctggccctcctaatctgtttttttaagaaaagtgaaaaatctaggttattacatgaaatttcctgatttttgtatcttggcaacaagttaagattttacaaaaatgttacataggtcaaagaaatacttgtctgactgttgaagcagacagtgaagaagggggcacgtatattctgggaggaggaacactgaagtggcttcgggagttgggggacagaatgcactctgttcccacacttggttcctccacacctcctccctgtggggcccaggcctccctgactgctttaaaacctgtggtcctgtatctctttcagatcctggctctgcagagagaacagcccagaaaagaaagttccccagccctccacattcttccaatggccactcgccgcaggacacatcaacaagccccattaaaaagaaaaagaaacctggcttactgaacagtaacaataaggagcagtcagaactaagacatggtccgttttactatatgaagcagccactcaccacagaccctgttgatgttgtaccgcaggatggacggaatgatttctactgctgggtttgtcaccgggaaggccaagtcctttgctgtgagctctgtccccgggtttatcacgctaagtgtctgagactgacatcggaaccagagggggactggttttgtcctgaatgtgagaaaattacagtagcagaatgcatcgagacccagagtaaagccatgacaatgctcaccattgaacagttatcctacctgctcaagtttgccattcagaaaatgaaacagccagggacagatgcattccagaagcccgttccattggaacagcaccctgactatgcggaatacatcttccatccaatggacctttgtacattggaaaagaatgcgaaaaagaaaatgtatggctgcacagaagccttcctggctgatgcaaagtggattttgcacaactgcatcatttataatgggggaaatcacaaattgacgcaaatagcgaaagtagtcatcaaaatctgtgaacatgagatgaatgaaatcgaagtatgtccagaatgttatctagctgcttgccaaaaacgagataactggttttgtgagccttgtagcaatccacatcctttggtctgggccaaactgaaggggtttccattctggcctgcaaaagctctaagggataaagacgggcaggtcgatgcccgattctttggacaacatgacagggcctgggttccaataaataattgctacctcatgtctaaagaaattcctttttctgtgaaaaagactaagagcatcttcaacagtgccatgcaagagatggaggtttacgtggagaacatccgcaggaagtttggggtttttaattactctccatttaggacaccctacacacccaacagccagtatcaaatgctgctcgatcccaccaaccccagcgccggcactgccaagatagacaagcaggagaaggtcaagctcaactttgacatgacggcatcccccaagatcctgatgagcaagcctgtgctgagtgggggcacaggccgccggatttccttgtcggatatgccgcgctcccccatgagcacaaactcttctgtgcacacgggctccgacgtggagcaggatgctgagaagaaggccacgtcgagccacttcagtgcgagcgaggagtccatggacttcctggataagagcacagcttcaccagcctccaccaagacgggacaagcagggagtttatccggcagcccaaagcccttctctcctcaactgtcagctcctatcacgacgaaaacggacaaaacctccaccaccggcagcatcctgaatcttaacctggatcgaagcaaagctgagatggatttgaaggagctgagcgagtcggtccagcaacagtccacccctgttcctctcatctctcccaagcgccagattcgtagcaggttccagctgaatcttgacaagaccatagagagttgcaaagcacaattaggcataaatgaaatctcggaagatgtctatacggccgtagagcacagcgattcggaggattctgagaagtcagatagtagcgatagtgagtatatcagtgatgatgagcagaagtctaagaacgagccagaagacacagaggacaaagaaggttgtcagatggacaaagagccatctgctgttaaaaaaaagcccaagcctacaaacccagtggagattaaagaggagctgaaaagcacgtcaccagccagcgagaaggcagaccctggagcagtcaaggacaaggccagccctgagcctgagaaggacttttccgaaaaggcaaaaccttcacctcaccccataaaggataaactgaagggaaaagatgagacggattccccaacagtccatttgggcctggactctgattcagagagcgaacttgtcatagatttaggagaagaccattctgggcgggagggtcgaaaaaataagaaggaacccaaagaaccatctcccaaacaggatgttgtaggtaaaactccaccatccacgacggtgggcagccattctcccccggaaacaccggtgctcacccgctcttccgcccaaacttccgcggctggcgccacagccaccaccagcacgtcctccacggtcaccgtcacggccccggcccccgccgccacaggaagcccagtgaaaaagcagaggccgcttttaccgaaggagactgccccggccgtgcagcgggtcgtgtggaactcatcaactgtccagcagaaggagatcacacagagcccatccacgtccaccatcaccctggtgaccagcacacagtcatcgcccctggtcaccagctcggggtccatgagcacccttgtgtcctcagtcaacgctgacctgcccatcgccactgcctcagctgatgtcgccgctgatattgccaagtacactagcaaaatgatggatgcaataaaaggaacaatgacagaaatatacaacgatctttctaaaaacactactggaagcacaatagctgagattcgcaggctgaggatcgagatagagaagctccagtggctgcaccagcaagagctctccgaaatgaaacacaacttagagctgaccatggcggagatgcggcagagcctggagcaggagcgggaccggctcatcgccgaggtgaagaagcagctggagttggagaagcagcaggcggtggatgagaccaagaagaagcagtggtgcgccaactgcaagaaggaggccatcttttactgctgttggaacaccagctactgtgactacccctgccagcaagcccactggcctgagcacatgaagtcctgcacccagtcagctactgctcctcagcaggaagcggatgctgaggtgaacacagaaacactaaataagtcctcccaggggagctcctcgagcacacaatcagcaccttcagaaacggccagcgcctccaaagagaaggagacgtcagctgagaaaagcaaggagagtggctcgacccttgacctttctggctccagagagacgccctcctccattctcttaggctccaaccaaggctctgaccattcccggagtaataaatccagttggagcagcagtgatgagaagaggggatcgacacgttccgatcacaacaccagtaccagcacgaagagcctcctcccgaaagagtctcggctggacaccttctgggactagcagtgaatcgggacacaaaccacccaccccattgggagaaaaacccagacgccaggaaaagaagaaacaacaaaggcaggagaacagccactttcagacttgaaaatgacaaaaccctcagttgagcctgagcccccggcgcgggggctgctacactacaggacacccagcatcggctttgactgcagactgttcacccacacgagccctgtgcttttggtgtaaataatgtacaatttgtggatgtcattgaatctagaggactttcccctttttatatttgtattaactttaacttattaaaaaaaaaaaaagaaaaagaaaaacaatttaaaaaaaaaaaaaaaagcaaccaaccccaacaacaaaaaagaatgttttggtattggagaagggatggtcagttagcctgtctgtcacacgacggaatggatactgggcccggggaccactttcatactcacgtcctcatccttggatacccaggggagggcgaaccgttttcgctcgtgtgtctgtacgcagcatgttgggatcgggagtttcggcacagactatcccatcaagccgttggctcctttcagctactacgttaccacgttcctaaaacgcaagctctccggaccagacggacacagggagaagctagtttctttcatgtgattgaaatgatgactctactcctaaaagggaaaaaacaatatccttgtttacagaagagaaacaaacaagccccactcagctcagtcacaggagagaacacagaaagtcttaggatcatgaactctgaaaaaaagagaaaccttatctttgctttgtggttcctttaaacacactcacacacacttggtcagagatgctgtgcttcttggaagcaaggactcaaaggcaaggtgcacgcagaggacgtttgagtctgggatgaagcatgtacgtattatttatatgatggaatttcacgtttttatgtaagcatgaaacacaggcagtatgagagaaagcaaggcccgtcatgctgtccgtacactacgtatgctgtagagccattttgtatgttgtgtaaaacaaaaagcattgatgaaaaagcaaaaggtgatgtatgtatatgagaaaattaattgtacgatatcattccagtacgttttgttgtacattttagtcttgtttactttctcttcattgttaagaggatgcgaactgtacagtttccagctagttacccatattagagaagaaataagagagtattagaagaaaacaggagagaaagaacatttgtgaattgcagttgtcaaaaaaaaaaatagcctagctggccttatttgtgaagcataattgcttttagcatatggaagtattttttcacattttctttgtataaaatttgtattaaacttaaatatctttt

SEQ ID NO: 426817 - DNA, 5000 bp, Homo sapiens
tcgaatcgtaaccgttcgtacgagaatcgctgtcctctccttgctcgagatccattgtgctctaaagatcaggtgtgggtttcctcccccagccctggataaggatgagggaatgtctttaagcttggctgaagaggaaataaaaacagaacaggaggtggtagagggcatggatatctctactcgctccaaagatcctggctctgcagagagaacagcccagaaaagaaagttccccagccctccacattcttccaatggccactcgccgcaggacacatcaacaagccccattaaaaagaaaaagaaacctggcttactgaacagtaacaataaggagcagtcagaactaagacatggtccgttttactatatgaagcagccactcaccacagaccctgttgatgttgtaccgcaggatggacggaatgatttctactgctgggtttgtcaccgggaaggccaagtcctttgctgtgagctctgtccccgggtttatcacgctaagtgtctgagactgacatcggaaccagagggggactggttttgtcctgaatgtgagaaaattacagtagcagaatgcatcgagacccagagtaaagccatgacaatgctcaccattgaacagttatcctacctgctcaagtttgccattcagaaaatgaaacagccagggacagatgcattccagaagcccgttccattggaacagcaccctgactatgcggaatacatcttccatccaatggacctttgtacattggaaaagaatgcgaaaaagaaaatgtatggctgcacagaagccttcctggctgatgcaaagtggattttgcacaactgcatcatttataatgggggaaatcacaaattgacgcaaatagcgaaagtagtcatcaaaatctgtgaacatgagatgaatgaaatcgaagtatgtccagaatgttatctagctgcttgccaaaaacgagataactggttttgtgagccttgtagcaatccacatcctttggtctgggccaaactgaaggggtttccattctggcctgcaaaagctctaagggataaagacgggcaggtcgatgcccgattctttggacaacatgacagggcctgggttccaataaataattgctacctcatgtctaaagaaattcctttttctgtgaaaaagactaagagcatcttcaacagtgccatgcaagagatggaggtttacgtggagaacatccgcaggaagtttggggtttttaattactctccatttaggacaccctacacacccaacagccagtatcaaatgctgctcgatcccaccaaccccagcgccggcactgccaagatagacaagcaggagaaggtcaagctcaactttgacatgacggcatcccccaagatcctgatgagcaagcctgtgctgagtgggggcacaggccgccggatttccttgtcggatatgccgcgctcccccatgagcacaaactcttctgtgcacacgggctccgacgtggagcaggatgctgagaagaaggccacgtcgagccacttcagtgcgagcgaggagtccatggacttcctggataagagcacagcttcaccagcctccaccaagacgggacaagcagggagtttatccggcagcccaaagcccttctctcctcaactgtcagctcctatcacgacgaaaacggacaaaacctccaccaccggcagcatcctgaatcttaacctggatcgaagcaaagctgagatggatttgaaggagctgagcgagtcggtccagcaacagtccacccctgttcctctcatctctcccaagcgccagattcgtagcaggttccagctgaatcttgacaagaccatagagagttgcaaagcacaattaggcataaatgaaatctcggaagatgtctatacggccgtagagcacagcgattcggaggattctgagaagtcagatagtagcgatagtgagtatatcagtgatgatgagcagaagtctaagaacgagccagaagacacagaggacaaagaaggttgtcagatggacaaagagccatctgctgttaaaaaaaagcccaagcctacaaacccagtggagattaaagaggagctgaaaagcacgtcaccagccagcgagaaggcagaccctggagcagtcaaggacaaggccagccctgagcctgagaaggacttttccgaaaaggcaaaaccttcacctcaccccataaaggataaactgaagggaaaagatgagacggattccccaacagtccatttgggcctggactctgattcagagagcgaacttgtcatagatttaggagaagaccattctgggcgggagggtcgaaaaaataagaaggaacccaaagaaccatctcccaaacaggatgttgtaggtaaaactccaccatccacgacggtgggcagccattctcccccggaaacaccggtgctcacccgctcttccgcccaaacttccgcggctggcgccacagccaccaccagcacgtcctccacggtcaccgtcacggccccggcccccgccgccacaggaagcccagtgaaaaagcagaggccgcttttaccgaaggagactgccccggccgtgcagcgggtcgtgtggaactcatcaactgtccagcagaaggagatcacacagagcccatccacgtccaccatcaccctggtgaccagcacacagtcatcgcccctggtcaccagctcggggtccatgagcacccttgtgtcctcagtcaacgctgacctgcccatcgccactgcctcagctgatgtcgccgctgatattgccaagtacactagcaaaatgatggatgcaataaaaggaacaatgacagaaatatacaacgatctttctaaaaacactactggaagcacaatagctgagattcgcaggctgaggatcgagatagagaagctccagtggctgcaccagcaagagctctccgaaatgaaacacaacttagagctgaccatggcggagatgcggcagagcctggagcaggagcgggaccggctcatcgccgaggtgaagaagcagctggagttggagaagcagcaggcggtggatgagaccaagaagaagcagtggtgcgccaactgcaagaaggaggccatcttttactgctgttggaacaccagctactgtgactacccctgccagcaagcccactggcctgagcacatgaagtcctgcacccagtcagctactgctcctcagcaggaagcggatgctgaggtgaacacagaaacactaaataagtcctcccaggggagctcctcgagcacacaatcagcaccttcagaaacggccagcgcctccaaagagaaggagacgtcagctgagaaaagcaaggagagtggctcgacccttgacctttctggctccagagagacgccctcctccattctcttaggctccaaccaaggctctgaccattcccggagtaataaatccagttggagcagcagtgatgagaagaggggatcgacacgttccgatcacaacaccagtaccagcacgaagagcctcctcccgaaagagtctcggctggacaccttctgggactagcagtgaatcgggacacaaaccacccaccccattgggagaaaaacccagacgccaggaaaagaagaaacaacaaaggcaggagaacagccactttcagacttgaaaatgacaaaaccctcagttgagcctgagcccccggcgcgggggctgctacactacaggacacccagcatcggctttgactgcagactgttcacccacacgagccctgtgcttttggtgtaaataatgtacaatttgtggatgtcattgaatctagaggactttcccctttttatatttgtattaactttaacttattaaaaaaaaaaaaagaaaaagaaaaacaatttaaaaaaaaaaaaaaaagcaaccaaccccaacaacaaaaaagaatgttttggtattggagaagggatggtcagttagcctgtctgtcacacgacggaatggatactgggcccggggaccactttcatactcacgtcctcatccttggatacccaggggagggcgaaccgttttcgctcgtgtgtctgtacgcagcatgttgggatcgggagtttcggcacagactatcccatcaagccgttggctcctttcagctactacgttaccacgttcctaaaacgcaagctctccggaccagacggacacagggagaagctagtttctttcatgtgattgaaatgatgactctactcctaaaagggaaaaaacaatatccttgtttacagaagagaaacaaacaagccccactcagctcagtcacaggagagaacacagaaagtcttaggatcatgaactctgaaaaaaagagaaaccttatctttgctttgtggttcctttaaacacactcacacacacttggtcagagatgctgtgcttcttggaagcaaggactcaaaggcaaggtgcacgcagaggacgtttgagtctgggatgaagcatgtacgtattatttatatgatggaatttcacgtttttatgtaagcatgaaacacaggcagtatgagagaaagcaaggcccgtcatgctgtccgtacactacgtatgctgtagagccattttgtatgttgtgtaaaacaaaaagcattgatgaaaaagcaaaaggtgatgtatgtatatgagaaaattaattgtacgatatcattccagtacgttttgttgtacattttagtcttgtttactttctcttcattgttaagaggatgcgaactgtacagtttccagctagttacccatattagagaagaaataagagagtattagaagaaaacaggagagaaagaacatttgtgaattgcagttgtcaaaaaaaaaaatagcctagctggccttatttgtgaagcataattgcttttagcatatggaagtattttttcacattttctttgtataaaatttgtattaaacttaaatatctttt

SEQ ID NO: 426818 - DNA, 5202 bp, Homo sapiens
gaacatttgcagttcctcgtatttattcacaatcccacgaaatcaatggctcttcggtgcactgcaccggagactttcagctcagccgagctgctgttgagggtgataaattataggcgaaagcccggggacatgaaggcaagtcgctgggtttcagactgcctgattgcaaagaggtgacagtgtccttgccccgccgggcgacctaatgcgtacaagaccggggctggcctggtaagtggtgactcttagcctgttctctttgcttcttcctcctccccctgggagaggccgctgaggatccggaagcaggaatgtctgctgtgggtgagcctctgttctcttttgaacaagagaggctaggccctctgagcagccgcactttctcaatggcagatcctggctctgcagagagaacagcccagaaaagaaagttccccagccctccacattcttccaatggccactcgccgcaggacacatcaacaagccccattaaaaagaaaaagaaacctggcttactgaacagtaacaataaggagcagtcagaactaagacatggtccgttttactatatgaagcagccactcaccacagaccctgttgatgttgtaccgcaggatggacggaatgatttctactgctgggtttgtcaccgggaaggccaagtcctttgctgtgagctctgtccccgggtttatcacgctaagtgtctgagactgacatcggaaccagagggggactggttttgtcctgaatgtgagaaaattacagtagcagaatgcatcgagacccagagtaaagccatgacaatgctcaccattgaacagttatcctacctgctcaagtttgccattcagaaaatgaaacagccagggacagatgcattccagaagcccgttccattggaacagcaccctgactatgcggaatacatcttccatccaatggacctttgtacattggaaaagaatgcgaaaaagaaaatgtatggctgcacagaagccttcctggctgatgcaaagtggattttgcacaactgcatcatttataatgggggaaatcacaaattgacgcaaatagcgaaagtagtcatcaaaatctgtgaacatgagatgaatgaaatcgaagtatgtccagaatgttatctagctgcttgccaaaaacgagataactggttttgtgagccttgtagcaatccacatcctttggtctgggccaaactgaaggggtttccattctggcctgcaaaagctctaagggataaagacgggcaggtcgatgcccgattctttggacaacatgacagggcctgggttccaataaataattgctacctcatgtctaaagaaattcctttttctgtgaaaaagactaagagcatcttcaacagtgccatgcaagagatggaggtttacgtggagaacatccgcaggaagtttggggtttttaattactctccatttaggacaccctacacacccaacagccagtatcaaatgctgctcgatcccaccaaccccagcgccggcactgccaagatagacaagcaggagaaggtcaagctcaactttgacatgacggcatcccccaagatcctgatgagcaagcctgtgctgagtgggggcacaggccgccggatttccttgtcggatatgccgcgctcccccatgagcacaaactcttctgtgcacacgggctccgacgtggagcaggatgctgagaagaaggccacgtcgagccacttcagtgcgagcgaggagtccatggacttcctggataagagcacagcttcaccagcctccaccaagacgggacaagcagggagtttatccggcagcccaaagcccttctctcctcaactgtcagctcctatcacgacgaaaacggacaaaacctccaccaccggcagcatcctgaatcttaacctggatcgaagcaaagctgagatggatttgaaggagctgagcgagtcggtccagcaacagtccacccctgttcctctcatctctcccaagcgccagattcgtagcaggttccagctgaatcttgacaagaccatagagagttgcaaagcacaattaggcataaatgaaatctcggaagatgtctatacggccgtagagcacagcgattcggaggattctgagaagtcagatagtagcgatagtgagtatatcagtgatgatgagcagaagtctaagaacgagccagaagacacagaggacaaagaaggttgtcagatggacaaagagccatctgctgttaaaaaaaagcccaagcctacaaacccagtggagattaaagaggagctgaaaagcacgtcaccagccagcgagaaggcagaccctggagcagtcaaggacaaggccagccctgagcctgagaaggacttttccgaaaaggcaaaaccttcacctcaccccataaaggataaactgaagggaaaagatgagacggattccccaacagtccatttgggcctggactctgattcagagagcgaacttgtcatagatttaggagaagaccattctgggcgggagggtcgaaaaaataagaaggaacccaaagaaccatctcccaaacaggatgttgtaggtaaaactccaccatccacgacggtgggcagccattctcccccggaaacaccggtgctcacccgctcttccgcccaaacttccgcggctggcgccacagccaccaccagcacgtcctccacggtcaccgtcacggccccggcccccgccgccacaggaagcccagtgaaaaagcagaggccgcttttaccgaaggagactgccccggccgtgcagcgggtcgtgtggaactcatcaactgtccagcagaaggagatcacacagagcccatccacgtccaccatcaccctggtgaccagcacacagtcatcgcccctggtcaccagctcggggtccatgagcacccttgtgtcctcagtcaacgctgacctgcccatcgccactgcctcagctgatgtcgccgctgatattgccaagtacactagcaaaatgatggatgcaataaaaggaacaatgacagaaatatacaacgatctttctaaaaacactactggaagcacaatagctgagattcgcaggctgaggatcgagatagagaagctccagtggctgcaccagcaagagctctccgaaatgaaacacaacttagagctgaccatggcggagatgcggcagagcctggagcaggagcgggaccggctcatcgccgaggtgaagaagcagctggagttggagaagcagcaggcggtggatgagaccaagaagaagcagtggtgcgccaactgcaagaaggaggccatcttttactgctgttggaacaccagctactgtgactacccctgccagcaagcccactggcctgagcacatgaagtcctgcacccagtcagctactgctcctcagcaggaagcggatgctgaggtgaacacagaaacactaaataagtcctcccaggggagctcctcgagcacacaatcagcaccttcagaaacggccagcgcctccaaagagaaggagacgtcagctgagaaaagcaaggagagtggctcgacccttgacctttctggctccagagagacgccctcctccattctcttaggctccaaccaaggctctgaccattcccggagtaataaatccagttggagcagcagtgatgagaagaggggatcgacacgttccgatcacaacaccagtaccagcacgaagagcctcctcccgaaagagtctcggctggacaccttctgggactagcagtgaatcgggacacaaaccacccaccccattgggagaaaaacccagacgccaggaaaagaagaaacaacaaaggcaggagaacagccactttcagacttgaaaatgacaaaaccctcagttgagcctgagcccccggcgcgggggctgctacactacaggacacccagcatcggctttgactgcagactgttcacccacacgagccctgtgcttttggtgtaaataatgtacaatttgtggatgtcattgaatctagaggactttcccctttttatatttgtattaactttaacttattaaaaaaaaaaaaagaaaaagaaaaacaatttaaaaaaaaaaaaaaaagcaaccaaccccaacaacaaaaaagaatgttttggtattggagaagggatggtcagttagcctgtctgtcacacgacggaatggatactgggcccggggaccactttcatactcacgtcctcatccttggatacccaggggagggcgaaccgttttcgctcgtgtgtctgtacgcagcatgttgggatcgggagtttcggcacagactatcccatcaagccgttggctcctttcagctactacgttaccacgttcctaaaacgcaagctctccggaccagacggacacagggagaagctagtttctttcatgtgattgaaatgatgactctactcctaaaagggaaaaaacaatatccttgtttacagaagagaaacaaacaagccccactcagctcagtcacaggagagaacacagaaagtcttaggatcatgaactctgaaaaaaagagaaaccttatctttgctttgtggttcctttaaacacactcacacacacttggtcagagatgctgtgcttcttggaagcaaggactcaaaggcaaggtgcacgcagaggacgtttgagtctgggatgaagcatgtacgtattatttatatgatggaatttcacgtttttatgtaagcatgaaacacaggcagtatgagagaaagcaaggcccgtcatgctgtccgtacactacgtatgctgtagagccattttgtatgttgtgtaaaacaaaaagcattgatgaaaaagcaaaaggtgatgtatgtatatgagaaaattaattgtacgatatcattccagtacgttttgttgtacattttagtcttgtttactttctcttcattgttaagaggatgcgaactgtacagtttccagctagttacccatattagagaagaaataagagagtattagaagaaaacaggagagaaagaacatttgtgaattgcagttgtcaaaaaaaaaaatagcctagctggccttatttgtgaagcataattgcttttagcatatggaagtattttttcacattttctttgtataaaatttgtattaaacttaaatatctttt

SEQ ID NO: 426819 - DNA, 5166 bp, Homo sapiens
gaactaatgttaccttttatccttgttttcattttcctgtcccttttatacattgtatcctcctctcttctcctgtgtcatggagtgtagaggaaataaaatcatgtctgtggctcatgacagcattccatattcagttgttgggttgtgttgttgttgttgtgtgtgtttttaataataccatgtaactgtttaaaaaaatttcctttttgatcaagtcccaaatctgccagcctgttctctcttcctaactgtggaaaaatgagacggttgcttgaacatttgttggcttggctgaagaggaaataaaaacagaacaggaggtggtagagggcatggatatctctactcgctccaaagatcctggctctgcagagagaacagcccagaaaagaaagttccccagccctccacattcttccaatggccactcgccgcaggacacatcaacaagccccattaaaaagaaaaagaaacctggcttactgaacagtaacaataaggagcagtcagaactaagacatggtccgttttactatatgaagcagccactcaccacagaccctgttgatgttgtaccgcaggatggacggaatgatttctactgctgggtttgtcaccgggaaggccaagtcctttgctgtgagctctgtccccgggtttatcacgctaagtgtctgagactgacatcggaaccagagggggactggttttgtcctgaatgtgagaaaattacagtagcagaatgcatcgagacccagagtaaagccatgacaatgctcaccattgaacagttatcctacctgctcaagtttgccattcagaaaatgaaacagccagggacagatgcattccagaagcccgttccattggaacagcaccctgactatgcggaatacatcttccatccaatggacctttgtacattggaaaagaatgcgaaaaagaaaatgtatggctgcacagaagccttcctggctgatgcaaagtggattttgcacaactgcatcatttataatgggggaaatcacaaattgacgcaaatagcgaaagtagtcatcaaaatctgtgaacatgagatgaatgaaatcgaagtatgtccagaatgttatctagctgcttgccaaaaacgagataactggttttgtgagccttgtagcaatccacatcctttggtctgggccaaactgaaggggtttccattctggcctgcaaaagctctaagggataaagacgggcaggtcgatgcccgattctttggacaacatgacagggcctgggttccaataaataattgctacctcatgtctaaagaaattcctttttctgtgaaaaagactaagagcatcttcaacagtgccatgcaagagatggaggtttacgtggagaacatccgcaggaagtttggggtttttaattactctccatttaggacaccctacacacccaacagccagtatcaaatgctgctcgatcccaccaaccccagcgccggcactgccaagatagacaagcaggagaaggtcaagctcaactttgacatgacggcatcccccaagatcctgatgagcaagcctgtgctgagtgggggcacaggccgccggatttccttgtcggatatgccgcgctcccccatgagcacaaactcttctgtgcacacgggctccgacgtggagcaggatgctgagaagaaggccacgtcgagccacttcagtgcgagcgaggagtccatggacttcctggataagagcacagcttcaccagcctccaccaagacgggacaagcagggagtttatccggcagcccaaagcccttctctcctcaactgtcagctcctatcacgacgaaaacggacaaaacctccaccaccggcagcatcctgaatcttaacctggatcgaagcaaagctgagatggatttgaaggagctgagcgagtcggtccagcaacagtccacccctgttcctctcatctctcccaagcgccagattcgtagcaggttccagctgaatcttgacaagaccatagagagttgcaaagcacaattaggcataaatgaaatctcggaagatgtctatacggccgtagagcacagcgattcggaggattctgagaagtcagatagtagcgatagtgagtatatcagtgatgatgagcagaagtctaagaacgagccagaagacacagaggacaaagaaggttgtcagatggacaaagagccatctgctgttaaaaaaaagcccaagcctacaaacccagtggagattaaagaggagctgaaaagcacgtcaccagccagcgagaaggcagaccctggagcagtcaaggacaaggccagccctgagcctgagaaggacttttccgaaaaggcaaaaccttcacctcaccccataaaggataaactgaagggaaaagatgagacggattccccaacagtccatttgggcctggactctgattcagagagcgaacttgtcatagatttaggagaagaccattctgggcgggagggtcgaaaaaataagaaggaacccaaagaaccatctcccaaacaggatgttgtaggtaaaactccaccatccacgacggtgggcagccattctcccccggaaacaccggtgctcacccgctcttccgcccaaacttccgcggctggcgccacagccaccaccagcacgtcctccacggtcaccgtcacggccccggcccccgccgccacaggaagcccagtgaaaaagcagaggccgcttttaccgaaggagactgccccggccgtgcagcgggtcgtgtggaactcatcaactgtccagcagaaggagatcacacagagcccatccacgtccaccatcaccctggtgaccagcacacagtcatcgcccctggtcaccagctcggggtccatgagcacccttgtgtcctcagtcaacgctgacctgcccatcgccactgcctcagctgatgtcgccgctgatattgccaagtacactagcaaaatgatggatgcaataaaaggaacaatgacagaaatatacaacgatctttctaaaaacactactggaagcacaatagctgagattcgcaggctgaggatcgagatagagaagctccagtggctgcaccagcaagagctctccgaaatgaaacacaacttagagctgaccatggcggagatgcggcagagcctggagcaggagcgggaccggctcatcgccgaggtgaagaagcagctggagttggagaagcagcaggcggtggatgagaccaagaagaagcagtggtgcgccaactgcaagaaggaggccatcttttactgctgttggaacaccagctactgtgactacccctgccagcaagcccactggcctgagcacatgaagtcctgcacccagtcagctactgctcctcagcaggaagcggatgctgaggtgaacacagaaacactaaataagtcctcccaggggagctcctcgagcacacaatcagcaccttcagaaacggccagcgcctccaaagagaaggagacgtcagctgagaaaagcaaggagagtggctcgacccttgacctttctggctccagagagacgccctcctccattctcttaggctccaaccaaggctctgaccattcccggagtaataaatccagttggagcagcagtgatgagaagaggggatcgacacgttccgatcacaacaccagtaccagcacgaagagcctcctcccgaaagagtctcggctggacaccttctgggactagcagtgaatcgggacacaaaccacccaccccattgggagaaaaacccagacgccaggaaaagaagaaacaacaaaggcaggagaacagccactttcagacttgaaaatgacaaaaccctcagttgagcctgagcccccggcgcgggggctgctacactacaggacacccagcatcggctttgactgcagactgttcacccacacgagccctgtgcttttggtgtaaataatgtacaatttgtggatgtcattgaatctagaggactttcccctttttatatttgtattaactttaacttattaaaaaaaaaaaaagaaaaagaaaaacaatttaaaaaaaaaaaaaaaagcaaccaaccccaacaacaaaaaagaatgttttggtattggagaagggatggtcagttagcctgtctgtcacacgacggaatggatactgggcccggggaccactttcatactcacgtcctcatccttggatacccaggggagggcgaaccgttttcgctcgtgtgtctgtacgcagcatgttgggatcgggagtttcggcacagactatcccatcaagccgttggctcctttcagctactacgttaccacgttcctaaaacgcaagctctccggaccagacggacacagggagaagctagtttctttcatgtgattgaaatgatgactctactcctaaaagggaaaaaacaatatccttgtttacagaagagaaacaaacaagccccactcagctcagtcacaggagagaacacagaaagtcttaggatcatgaactctgaaaaaaagagaaaccttatctttgctttgtggttcctttaaacacactcacacacacttggtcagagatgctgtgcttcttggaagcaaggactcaaaggcaaggtgcacgcagaggacgtttgagtctgggatgaagcatgtacgtattatttatatgatggaatttcacgtttttatgtaagcatgaaacacaggcagtatgagagaaagcaaggcccgtcatgctgtccgtacactacgtatgctgtagagccattttgtatgttgtgtaaaacaaaaagcattgatgaaaaagcaaaaggtgatgtatgtatatgagaaaattaattgtacgatatcattccagtacgttttgttgtacattttagtcttgtttactttctcttcattgttaagaggatgcgaactgtacagtttccagctagttacccatattagagaagaaataagagagtattagaagaaaacaggagagaaagaacatttgtgaattgcagttgtcaaaaaaaaaaatagcctagctggccttatttgtgaagcataattgcttttagcatatggaagtattttttcacattttctttgtataaaatttgtattaaacttaaatatctttt

SEQ ID NO: 426820 - DNA, 3354 bp, Homo sapiens
tcatagatttaggggaagaccattctgggcgggagggtcgaaaaaataagaaggaacccaaagaaccatctcccaaacaggatgatcgaagcaaagctgagatggatttgaaggagctgagcgagtcggtccagcaacagtccacccctgttcctctcatctctcccaagcgccagattcgtagcaggttccagctgaatcttgacaagaccatagagagttgcaaagcacaattaggcataaatgaaatctcggaagatgtctatacggccgtagagcacagcgattcggaggattctgagaagtcagatagtagcgatagtgagtatatcagtgatgatgagcagaagtctaagaacgagccagaagacacagaggacaaagaaggttgtcagatggacaaagagccatctgctgttaaaaaaaagcccaagcctacaaacccagtggagattaaagaggagctgaaaagcacgtcaccagccagcgagaaggcagaccctggagcagtcaaggacaaggccagccctgagcctgagaaggacttttccgaaaaggcaaaaccttcacctcaccccataaaggataaactgaagggaaaagatgagacggattccccaacagtccatttgggcctggactctgattcagagagcgaacttgtcatagatttaggagaagaccattctgggcgggagggtcgaaaaaataagaaggaacccaaagaaccatctcccaaacaggatgttgtaggtaaaactccaccatccacgacggtgggcagccattctcccccggaaacaccggtgctcacccgctcttccgcccaaacttccgcggctggcgccacagccaccaccagcacgtcctccacggtcaccgtcacggccccggcccccgccgccacaggaagcccagtgaaaaagcagaggccgcttttaccgaaggagactgccccggccgtgcagcgggtcgtgtggaactcatcaactgtccagcagaaggagatcacacagagcccatccacgtccaccatcaccctggtgaccagcacacagtcatcgcccctggtcaccagctcggggtccatgagcacccttgtgtcctcagtcaacgctgacctgcccatcgccactgcctcagctgatgtcgccgctgatattgccaagtacactagcaaaatgatggatgcaataaaaggaacaatgacagaaatatacaacgatctttctaaaaacactactggaagcacaatagctgagattcgcaggctgaggatcgagatagagaagctccagtggctgcaccagcaagagctctccgaaatgaaacacaacttagagctgaccatggcggagatgcggcagagcctggagcaggagcgggaccggctcatcgccgaggtgaagaagcagctggagttggagaagcagcaggcggtggatgagaccaagaagaagcagtggtgcgccaactgcaagaaggaggccatcttttactgctgttggaacaccagctactgtgactacccctgccagcaagcccactggcctgagcacatgaagtcctgcacccagtcagctactgctcctcagcaggaagcggatgctgaggtgaacacagaaacactaaataagtcctcccaggggagctcctcgagcacacaatcagcaccttcagaaacggccagcgcctccaaagagaaggagacgtcagctgagaaaagcaaggagagtggctcgacccttgacctttctggctccagagagacgccctcctccattctcttaggctccaaccaaggctctgaccattcccggagtaataaatccagttggagcagcagtgatgagaagaggggatcgacacgttccgatcacaacaccagtaccagcacgaagagcctcctcccgaaagagtctcggctggacaccttctgggactagcagtgaatcgggacacaaaccacccaccccattgggagaaaaacccagacgccaggaaaagaagaaacaacaaaggcaggagaacagccactttcagacttgaaaatgacaaaaccctcagttgagcctgagcccccggcgcgggggctgctacactacaggacacccagcatcggctttgactgcagactgttcacccacacgagccctgtgcttttggtgtaaataatgtacaatttgtggatgtcattgaatctagaggactttcccctttttatatttgtattaactttaacttattaaaaaaaaaaaaagaaaaagaaaaacaatttaaaaaaaaaaaaaaaagcaaccaaccccaacaacaaaaaagaatgttttggtattggagaagggatggtcagttagcctgtctgtcacacgacggaatggatactgggcccggggaccactttcatactcacgtcctcatccttggatacccaggggagggcgaaccgttttcgctcgtgtgtctgtacgcagcatgttgggatcgggagtttcggcacagactatcccatcaagccgttggctcctttcagctactacgttaccacgttcctaaaacgcaagctctccggaccagacggacacagggagaagctagtttctttcatgtgattgaaatgatgactctactcctaaaagggaaaaaacaatatccttgtttacagaagagaaacaaacaagccccactcagctcagtcacaggagagaacacagaaagtcttaggatcatgaactctgaaaaaaagagaaaccttatctttgctttgtggttcctttaaacacactcacacacacttggtcagagatgctgtgcttcttggaagcaaggactcaaaggcaaggtgcacgcagaggacgtttgagtctgggatgaagcatgtacgtattatttatatgatggaatttcacgtttttatgtaagcatgaaacacaggcagtatgagagaaagcaaggcccgtcatgctgtccgtacactacgtatgctgtagagccattttgtatgttgtgtaaaacaaaaagcattgatgaaaaagcaaaaggtgatgtatgtatatgagaaaattaattgtacgatatcattccagtacgttttgttgtacattttagtcttgtttactttctcttcattgttaagaggatgcgaactgtacagtttccagctagttacccatattagagaagaaataagagagtattagaagaaaacaggagagaaagaacatttgtgaattgcagttgtcaaaaaaaaaaatagcctagctggccttatttgtgaagcataattgcttttagcatatggaagtattttttcacattttctttgtataaaatttgtattaaacttaaatatctttt

SEQ ID NO: 426821 - DNA, 5304 bp, Homo sapiens
gaactaatgttaccttttatccttgttttcattttcctgtcccttttatacattgtatcctcctctcttctcctgtgtcatggagtgtagaggaaataaaatcatgtctgtggctcatgacagcattccatattcagttgttgggttgtgttgttgttgttgtgtgtgtttttaataataccatgtaactgtttaaaaaaatttcctttttgatcaagtcccaaatctgccagcctgttctctcttcctaactgtggaaaaatgagacggttgcttgaacatttgttggcttggctgaagaggaaataaaaacagaacaggaggtggtagagggcatggatatctctactcgctccaaagatcctggctctgcagagagaacagcccagaaaagaaagttccccagccctccacattcttccaatggccactcgccgcaggacacatcaacaagccccattaaaaagaaaaagaaacctggcttactgaacagtaacaataaggagcagtcagaactaagacatggtccgttttactatatgaagcagccactcaccacagaccctgttgatgttgtaccgcaggatggacggaatgatttctactgctgggtttgtcaccgggaaggccaagtcctttgctgtgagctctgtccccgggtttatcacgctaagtgtctgagactgacatcggaaccagagggggactggttttgtcctgaatgtgagaaaattacagtagcagaatgcatcgagacccagagtaaagccatgacaatgctcaccattgaacagttatcctacctgctcaagtttgccattcagaaaatgaaacagccagggacagatgcattccagaagcccgttccattggaacagcaccctgactatgcggaatacatcttccatccaatggacctttgtacattggaaaagaatgcgaaaaagaaaatgtatggctgcacagaagccttcctggctgatgcaaagtggattttgcacaactgcatcatttataatgggggaaatcacaaattgacgcaaatagcgaaagtagtcatcaaaatctgtgaacatgagatgaatgaaatcgaagtatgtccagaatgttatctagctgcttgccaaaaacgagataactggttttgtgagccttgtagcaatccacatcctttggtctgggccaaactgaaggggtttccattctggcctgcaaaagctctaagggataaagacgggcaggtcgatgcccgattctttggacaacatgacagggcctgggttccaataaataattgctacctcatgtctaaagaaattcctttttctgtgaaaaagactaagagcatcttcaacagtgccatgcaagagatggaggtttacgtggagaacatccgcaggaagtttggggtttttaattactctccatttaggacaccctacacacccaacagccagtatcaaatgctgctcgatcccaccaaccccagcgccggcactgccaagatagacaagcaggagaaggtcaagctcaactttgacatgacggcatcccccaagatcctgatgagcaagcctgtgctgagtgggggcacaggccgccggatttccttgtcggatatgccgcgctcccccatgagcacaaactcttctgtgcacacgggctccgacgtggagcaggatgctgagaagaaggccacgtcgagccacttcagtgcgagcgaggagtccatggacttcctggataagagcacagcttcaccagcctccaccaagacgggacaagcagggagtttatccggcagcccaaagcccttctctcctcaactgtcagctcctatcacgacgaaaacggacaaaacctccaccaccggcagcatcctgaatcttaacctggatcgaagcaaagctgagatggatttgaaggagctgagcgagtcggtccagcaacagtccacccctgttcctctcatctctcccaagcgccagattcgtagcaggttccagctgaatcttgacaagaccatagagagttgcaaagcacaattaggcataaatgaaatctcggaagatgtctatacggccgtagagcacagcgattcggaggattctgagaagtcagatagtagcgatagtgagtatatcagtgatgatgagcagaagtctaagaacgagccagaagacacagaggacaaagaaggttgtcagatggacaaagagccatctgctgttaaaaaaaagcccaagcctacaaacccagtggagattaaagaggagctgaaaagcacgtcaccagccagcgagaaggcagaccctggagcagtcaaggacaaggccagccctgagcctgagaaggacttttccgaaaaggcaaaaccttcacctcaccccataaaggataaactgaagggaaaagatgagacggattccccaacagtccatttgggcctggactctgattcagagagcgaacttgtcatagatttaggagaagaccattctgggcgggagggtcgaaaaaataagaaggaacccaaagaaccatctcccaaacaggatgttgtaggtaaaactccaccatccacgacggtgggcagccattctcccccggaaacaccggtgctcacccgctcttccgcccaaacttccgcggctggcgccacagccaccaccagcacgtcctccacggtcaccgtcacggccccggcccccgccgccacaggaagcccagtgaaaaagcagaggccgcttttaccgaaggagactgccccggccgtgcagcgggtcgtgtggaactcatcaagtaagtttcaaacgtcctcccaaaagtggcacatgcagaagatgcagcgtcagcagcagcagcagcagcagcaaaaccagcagcagcagcctcagtcttcccaggggacgagatatcagaccagacaggctgtgaaagctgtccagcagaaggagatcacacagagcccatccacgtccaccatcaccctggtgaccagcacacagtcatcgcccctggtcaccagctcggggtccatgagcacccttgtgtcctcagtcaacgctgacctgcccatcgccactgcctcagctgatgtcgccgctgatattgccaagtacactagcaaaatgatggatgcaataaaaggaacaatgacagaaatatacaacgatctttctaaaaacactactggaagcacaatagctgagattcgcaggctgaggatcgagatagagaagctccagtggctgcaccagcaagagctctccgaaatgaaacacaacttagagctgaccatggcggagatgcggcagagcctggagcaggagcgggaccggctcatcgccgaggtgaagaagcagctggagttggagaagcagcaggcggtggatgagaccaagaagaagcagtggtgcgccaactgcaagaaggaggccatcttttactgctgttggaacaccagctactgtgactacccctgccagcaagcccactggcctgagcacatgaagtcctgcacccagtcagctactgctcctcagcaggaagcggatgctgaggtgaacacagaaacactaaataagtcctcccaggggagctcctcgagcacacaatcagcaccttcagaaacggccagcgcctccaaagagaaggagacgtcagctgagaaaagcaaggagagtggctcgacccttgacctttctggctccagagagacgccctcctccattctcttaggctccaaccaaggctctgaccattcccggagtaataaatccagttggagcagcagtgatgagaagaggggatcgacacgttccgatcacaacaccagtaccagcacgaagagcctcctcccgaaagagtctcggctggacaccttctgggactagcagtgaatcgggacacaaaccacccaccccattgggagaaaaacccagacgccaggaaaagaagaaacaacaaaggcaggagaacagccactttcagacttgaaaatgacaaaaccctcagttgagcctgagcccccggcgcgggggctgctacactacaggacacccagcatcggctttgactgcagactgttcacccacacgagccctgtgcttttggtgtaaataatgtacaatttgtggatgtcattgaatctagaggactttcccctttttatatttgtattaactttaacttattaaaaaaaaaaaaagaaaaagaaaaacaatttaaaaaaaaaaaaaaaagcaaccaaccccaacaacaaaaaagaatgttttggtattggagaagggatggtcagttagcctgtctgtcacacgacggaatggatactgggcccggggaccactttcatactcacgtcctcatccttggatacccaggggagggcgaaccgttttcgctcgtgtgtctgtacgcagcatgttgggatcgggagtttcggcacagactatcccatcaagccgttggctcctttcagctactacgttaccacgttcctaaaacgcaagctctccggaccagacggacacagggagaagctagtttctttcatgtgattgaaatgatgactctactcctaaaagggaaaaaacaatatccttgtttacagaagagaaacaaacaagccccactcagctcagtcacaggagagaacacagaaagtcttaggatcatgaactctgaaaaaaagagaaaccttatctttgctttgtggttcctttaaacacactcacacacacttggtcagagatgctgtgcttcttggaagcaaggactcaaaggcaaggtgcacgcagaggacgtttgagtctgggatgaagcatgtacgtattatttatatgatggaatttcacgtttttatgtaagcatgaaacacaggcagtatgagagaaagcaaggcccgtcatgctgtccgtacactacgtatgctgtagagccattttgtatgttgtgtaaaacaaaaagcattgatgaaaaagcaaaaggtgatgtatgtatatgagaaaattaattgtacgatatcattccagtacgttttgttgtacattttagtcttgtttactttctcttcattgttaagaggatgcgaactgtacagtttccagctagttacccatattagagaagaaataagagagtattagaagaaaacaggagagaaagaacatttgtgaattgcagttgtcaaaaaaaaaaatagcctagctggccttatttgtgaagcataattgcttttagcatatggaagtattttttcacattttctttgtataaaatttgtattaaacttaaatatctttt

SEQ ID NO: 426822 - DNA, 6233 bp, Homo sapiens
gatggctcttgctcacccgagcctcacaaagataatcgctcaggaagtgtttcagccaatccggggcggctttacactccgatttgccggggcagccaatcggggatgagcttttattaggcggccagatcatcagccgaagtgccaaaccctttttctgtgagaactaggagcctgtcctccatgttttataagtattgacattacacagtgttaacaatgcatccacagagcttggctgaagaggaaataaaaacagaacaggaggtggtagagggcatggatatctctactcgctccaaagatcctggctctgcagagagaacagcccagaaaagaaagttccccagccctccacattcttccaatggccactcgccgcaggacacatcaacaagccccattaaaaagaaaaagaaacctggcttactgaacagtaacaataaggagcagtcagaactaagacatggtccgttttactatatgaagcagccactcaccacagaccctgttgatgttgtaccgcaggatggacggaatgatttctactgctgggtttgtcaccgggaaggccaagtcctttgctgtgagctctgtccccgggtttatcacgctaagtgtctgagactgacatcggaaccagagggggactggttttgtcctgaatgtgagaaaattacagtagcagaatgcatcgagacccagagtaaagccatgacaatgctcaccattgaacagttatcctacctgctcaagtttgccattcagaaaatgaaacagccagggacagatgcattccagaagcccgttccattggaacagcaccctgactatgcggaatacatcttccatccaatggacctttgtacattggaaaagaatgcgaaaaagaaaatgtatggctgcacagaagccttcctggctgatgcaaagtggattttgcacaactgcatcatttataatgggggaaatcacaaattgacgcaaatagcgaaagtagtcatcaaaatctgtgaacatgagatgaatgaaatcgaagtatgtccagaatgttatctagctgcttgccaaaaacgagataactggttttgtgagccttgtagcaatccacatcctttggtctgggccaaactgaaggggtttccattctggcctgcaaaagctctaagggataaagacgggcaggtcgatgcccgattctttggacaacatgacagggcctgggttccaataaataattgctacctcatgtctaaagaaattcctttttctgtgaaaaagactaagagcatcttcaacagtgccatgcaagagatggaggtttacgtggagaacatccgcaggaagtttggggtttttaattactctccatttaggacaccctacacacccaacagccagtatcaaatgctgctcgatcccaccaaccccagcgccggcactgccaagatagacaagcaggagaaggtcaagctcaactttgacatgacggcatcccccaagatcctgatgagcaagcctgtgctgagtgggggcacaggccgccggatttccttgtcggatatgccgcgctcccccatgagcacaaactcttctgtgcacacgggctccgacgtggagcaggatgctgagaagaaggccacgtcgagccacttcagtgcgagcgaggagtccatggacttcctggataagagcacagcttcaccagcctccaccaagacgggacaagcagggagtttatccggcagcccaaagcccttctctcctcaactgtcagctcctatcacgacgaaaacggacaaaacctccaccaccggcagcatcctgaatcttaacctggatcgaagcaaagctgagatggatttgaaggagctgagcgagtcggtccagcaacagtccacccctgttcctctcatctctcccaagcgccagattcgtagcaggttccagctgaatcttgacaagaccatagagagttgcaaagcacaattaggcataaatgaaatctcggaagatgtctatacggccgtagagcacagcgattcggaggattctgagaagtcagatagtagcgatagtgagtatatcagtgatgatgagcagaagtctaagaacgagccagaagacacagaggacaaagaaggttgtcagatggacaaagagccatctgctgttaaaaaaaagcccaagcctacaaacccagtggagattaaagaggagctgaaaagcacgtcaccagccagcgagaaggcagaccctggagcagtcaaggacaaggccagccctgagcctgagaaggacttttccgaaaaggcaaaaccttcacctcaccccataaaggataaactgaagggaaaagatgagacggattccccaacagtccatttgggcctggactctgattcagagagcgaacttgtcatagatttaggagaagaccattctgggcgggagggtcgaaaaaataagaaggaacccaaagaaccatctcccaaacaggatgttgtaggtaaaactccaccatccacgacggtgggcagccattctcccccggaaacaccggtgctcacccgctcttccgcccaaacttccgcggctggcgccacagccaccaccagcacgtcctccacggtcaccgtcacggccccggcccccgccgccacaggaagcccagtgaaaaagcagaggccgcttttaccgaaggagactgccccggccgtgcagcgggtcgtgtggaactcatcaagtaagtttcaaacgtcctcccaaaagtggcacatgcagaagatgcagcgtcagcagcagcagcagcagcagcaaaaccagcagcagcagcctcagtcttcccaggggacgagatatcagaccagacaggctgtgaaaggtaccgagcctccccttctgttctccgtggcgcccgctcccattttgccacatcgacaggagaaagtcattgctcttttattttttttttttagttctcgtttgtttccgggccattgtatcttgaaggccttgcacattccatttggcattatttttaaaaattgttttgctacttgcttttttactttcaaaaagttttttttgttcattttataaatgatacatgcatatattctccttaaaaagggggcagaaagttttacataaaagtctgttatcccgtttaccttccatttcattctcttcccttccacagtggccagtatcaaccgttgtaaaagcttttctatgcatgtatgcatgtatatgtatatatacatatctgtatgtatatatgtgcgcatcatgtatatgatgccataaaattagtcctttttcccccctttttttcttttttaaaacataaaaatggtaccatacttgcttttttcccccacccatcagcatgttttggaggtccatccacatcagcacatacagccctgccttgttcttttggactgctgcatagtatttcatagtttatttaaagcattcctctactaatgggcatttaggttgctttcagttttttttctactgtgagcagtgctgcaatgaatatctttgtataaatttccttgtgcacatgagggaacctcttggagttattttggaaaaagtacagtgcgagaagttgatagcgaaggttaccttagtaactggagattcgtcacacacacaagatgagccagcctcaagaaccacttgctgaagttgcagaatcagaactcccaccagtcctgcaggaggctccatctggagctgaaattaggccaaacacagtgctgatctgactgctgtccagcagaaggagatcacacagagcccatccacgtccaccatcaccctggtgaccagcacacagtcatcgcccctggtcaccagctcggggtccatgagcacccttgtgtcctcagtcaacgctgacctgcccatcgccactgcctcagctgatgtcgccgctgatattgccaagtacactagcaaaatgatggatgcaataaaaggaacaatgacagaaatatacaacgatctttctaaaaacactactggaagcacaatagctgagattcgcaggctgaggatcgagatagagaagctccagtggctgcaccagcaagagctctccgaaatgaaacacaacttagagctgaccatggcggagatgcggcagagcctggagcaggagcgggaccggctcatcgccgaggtgaagaagcagctggagttggagaagcagcaggcggtggatgagaccaagaagaagcagtggtgcgccaactgcaagaaggaggccatcttttactgctgttggaacaccagctactgtgactacccctgccagcaagcccactggcctgagcacatgaagtcctgcacccagtcagctactgctcctcagcaggaagcggatgctgaggtgaacacagaaacactaaataagtcctcccaggggagctcctcgagcacacaatcagcaccttcagaaacggccagcgcctccaaagagaaggagacgtcagctgagaaaagcaaggagagtggctcgacccttgacctttctggctccagagagacgccctcctccattctcttaggctccaaccaaggctctgttagcaaaaggtgtgacaagcaacctgcctatgccccaaccaccacagaccaccagccgcaccccaactaccccgcccagaagtaccattcccggagtaataaatccagttggagcagcagtgatgagaagaggggatcgacacgttccgatcacaacaccagtaccagcacgaagagcctcctcccgaaagagtctcggctggacaccttctgggactagcagtgaatcgggacacaaaccacccaccccattgggagaaaaacccagacgccaggaaaagaagaaacaacaaaggcaggagaacagccactttcagacttgaaaatgacaaaaccctcagttgagcctgagcccccggcgcgggggctgctacactacaggacacccagcatcggctttgactgcagactgttcacccacacgagccctgtgcttttggtgtaaataatgtacaatttgtggatgtcattgaatctagaggactttcccctttttatatttgtattaactttaacttattaaaaaaaaaaaaagaaaaagaaaaacaatttaaaaaaaaaaaaaaaagcaaccaaccccaacaacaaaaaagaatgttttggtattggagaagggatggtcagttagcctgtctgtcacacgacggaatggatactgggcccggggaccactttcatactcacgtcctcatccttggatacccaggggagggcgaaccgttttcgctcgtgtgtctgtacgcagcatgttgggatcgggagtttcggcacagactatcccatcaagccgttggctcctttcagctactacgttaccacgttcctaaaacgcaagctctccggaccagacggacacagggagaagctagtttctttcatgtgattgaaatgatgactctactcctaaaagggaaaaaacaatatccttgtttacagaagagaaacaaacaagccccactcagctcagtcacaggagagaacacagaaagtcttaggatcatgaactctgaaaaaaagagaaaccttatctttgctttgtggttcctttaaacacactcacacacacttggtcagagatgctgtgcttcttggaagcaaggactcaaaggcaaggtgcacgcagaggacgtttgagtctgggatgaagcatgtacgtattatttatatgatggaatttcacgtttttatgtaagcatgaaacacaggcagtatgagagaaagcaaggcccgtcatgctgtccgtacactacgtatgctgtagagccattttgtatgttgtgtaaaacaaaaagcattgatgaaaaagcaaaaggtgatgtatgtatatgagaaaattaattgtacgatatcattccagtacgttttgttgtacattttagtcttgtttactttctcttcattgttaagaggatgcgaactgtacagtttccagctagttacccatattagagaagaaataagagagtattagaagaaaacaggagagaaagaacatttgtgaattgcagttgtcaaaaaaaaaaatagcctagctggccttatttgtgaagcataattgcttttagcatatggaagtattttttcacattttctttgtataaaatttgtattaaacttaaatatctttt

SEQ ID NO: 426823 - DNA, 5056 bp, Homo sapiens
gatggctcttgctcacccgagcctcacaaagataatcgctcaggaagtgtttcagccaatccggggcggctttacactccgatttgccggggcagccaatcggggatgagcttttattaggcggccagatcatcagccgaagtgccaaaccctttttctgtgagaactaggagcctgtcctccatgttttataagtattgacattacacagtgttaacaatgcatccacagagcttggctgaagaggaaataaaaacagaacaggaggtggtagagggcatggatatctctactcgctccaaagatcctggctctgcagagagaacagcccagaaaagaaagttccccagccctccacattcttccaatggccactcgccgcaggacacatcaacaagccccattaaaaagaaaaagaaacctggcttactgaacagtaacaataaggagcagtcagaactaagacatggtccgttttactatatgaagcagccactcaccacagaccctgttgatgttgtaccgcaggatggacggaatgatttctactgctgggtttgtcaccgggaaggccaagtcctttgctgtgagctctgtccccgggtttatcacgctaagtgtctgagactgacatcggaaccagagggggactggttttgtcctgaatgtgagaaaattacagtagcagaatgcatcgagacccagagtaaagccatgacaatgctcaccattgaacagttatcctacctgctcaagtttgccattcagaaaatgaaacagccagggacagatgcattccagaagcccgttccattggaacagcaccctgactatgcggaatacatcttccatccaatggacctttgtacattggaaaagaatgcgaaaaagaaaatgtatggctgcacagaagccttcctggctgatgcaaagtggattttgcacaactgcatcatttataatgggggaaatcacaaattgacgcaaatagcgaaagtagtcatcaaaatctgtgaacatgagatgaatgaaatcgaagtatgtccagaatgttatctagctgcttgccaaaaacgagataactggttttgtgagccttgtagcaatccacatcctttggtctgggccaaactgaaggggtttccattctggcctgcaaaagctctaagggataaagacgggcaggtcgatgcccgattctttggacaacatgacagggcctgggttccaataaataattgctacctcatgtctaaagaaattcctttttctgtgaaaaagactaagagcatcttcaacagtgccatgcaagagatggaggtttacgtggagaacatccgcaggaagtttggggtttttaattactctccatttaggacaccctacacacccaacagccagtatcaaatgctgctcgatcccaccaaccccagcgccggcactgccaagatagacaagcaggagaaggtcaagctcaactttgacatgacggcatcccccaagatcctgatgagcaagcctgtgctgagtgggggcacaggccgccggatttccttgtcggatatgccgcgctcccccatgagcacaaactcttctgtgcacacgggctccgacgtggagcaggatgctgagaagaaggccacgtcgagccacttcagtgcgagcgaggagtccatggacttcctggataagagcacagcttcaccagcctccaccaagacgggacaagcagggagtttatccggcagcccaaagcccttctctcctcaactgtcagctcctatcacgacgaaaacggacaaaacctccaccaccggcagcatcctgaatcttaacctggatcgaagcaaagctgagatggatttgaaggagctgagcgagtcggtccagcaacagtccacccctgttcctctcatctctcccaagcgccagattcgtagcaggttccagctgaatcttgacaagaccatagagagttgcaaagcacaattaggcataaatgaaatctcggaagatgtctatacggccgtagagcacagcgattcggaggattctgagaagtcagatagtagcgatagtgagtatatcagtgatgatgagcagaagtctaagaacgagccagaagacacagaggacaaagaaggttgtcagatggacaaagagccatctgctgttaaaaaaaagcccaagcctacaaacccagtggagattaaagaggagctgaaaagcacgtcaccagccagcgagaaggcagaccctggagcagtcaaggacaaggccagccctgagcctgagaaggacttttccgaaaaggcaaaaccttcacctcaccccataaaggataaactgaagggaaaagatgagacggattccccaacagtccatttgggcctggactctgattcagagagcgaacttgtcatagatttaggagaagaccattctgggcgggagggtcgaaaaaataagaaggaacccaaagaaccatctcccaaacaggatgttgtaggtaaaactccaccatccacgacggtgggcagccattctcccccggaaacaccggtgctcacccgctcttccgcccaaacttccgcggctggcgccacagccaccaccagcacgtcctccacggtcaccgtcacggccccggcccccgccgccacaggaagcccagtgaaaaagcagaggccgcttttaccgaaggagactgccccggccgtgcagcgggtcgtgtggaactcatcaactgtccagcagaaggagatcacacagagcccatccacgtccaccatcaccctggtgaccagcacacagtcatcgcccctggtcaccagctcggggtccatgagcacccttgtgtcctcagtcaacgctgacctgcccatcgccactgcctcagctgatgtcgccgctgatattgccaagtacactagcaaaatgatggatgcaataaaaggaacaatgacagaaatatacaacgatctttctaaaaacactactggaagcacaatagctgagattcgcaggctgaggatcgagatagagaagctccagtggctgcaccagcaagagctctccgaaatgaaacacaacttagagctgaccatggcggagatgcggcagagcctggagcaggagcgggaccggctcatcgccgaggtgaagaagcagctggagttggagaagcagcaggcggtggatgagaccaagaagaagcagtggtgcgccaactgcaagaaggaggccatcttttactgctgttggaacaccagctactgtgactacccctgccagcaagcccactggcctgagcacatgaagtcctgcacccagtcagctactgctcctcagcaggaagcggatgctgaggtgaacacagaaacactaaataagtcctcccaggggagctcctcgagcacacaatcagcaccttcagaaacggccagcgcctccaaagagaaggagacgtcagctgagtcctccattctcttaggctccaaccaaggctctgaccattcccggagtaataaatccagttggagcagcagtgatgagaagaggggatcgacacgttccgatcacaacaccagtaccagcacgaagagcctcctcccgaaagagtctcggctggacaccttctgggactagcagtgaatcgggacacaaaccacccaccccattgggagaaaaacccagacgccaggaaaagaagaaacaacaaaggcaggagaacagccactttcagacttgaaaatgacaaaaccctcagttgagcctgagcccccggcgcgggggctgctacactacaggacacccagcatcggctttgactgcagactgttcacccacacgagccctgtgcttttggtgtaaataatgtacaatttgtggatgtcattgaatctagaggactttcccctttttatatttgtattaactttaacttattaaaaaaaaaaaaagaaaaagaaaaacaatttaaaaaaaaaaaaaaaagcaaccaaccccaacaacaaaaaagaatgttttggtattggagaagggatggtcagttagcctgtctgtcacacgacggaatggatactgggcccggggaccactttcatactcacgtcctcatccttggatacccaggggagggcgaaccgttttcgctcgtgtgtctgtacgcagcatgttgggatcgggagtttcggcacagactatcccatcaagccgttggctcctttcagctactacgttaccacgttcctaaaacgcaagctctccggaccagacggacacagggagaagctagtttctttcatgtgattgaaatgatgactctactcctaaaagggaaaaaacaatatccttgtttacagaagagaaacaaacaagccccactcagctcagtcacaggagagaacacagaaagtcttaggatcatgaactctgaaaaaaagagaaaccttatctttgctttgtggttcctttaaacacactcacacacacttggtcagagatgctgtgcttcttggaagcaaggactcaaaggcaaggtgcacgcagaggacgtttgagtctgggatgaagcatgtacgtattatttatatgatggaatttcacgtttttatgtaagcatgaaacacaggcagtatgagagaaagcaaggcccgtcatgctgtccgtacactacgtatgctgtagagccattttgtatgttgtgtaaaacaaaaagcattgatgaaaaagcaaaaggtgatgtatgtatatgagaaaattaattgtacgatatcattccagtacgttttgttgtacattttagtcttgtttactttctcttcattgttaagaggatgcgaactgtacagtttccagctagttacccatattagagaagaaataagagagtattagaagaaaacaggagagaaagaacatttgtgaattgcagttgtcaaaaaaaaaaatagcctagctggccttatttgtgaagcataattgcttttagcatatggaagtattttttcacattttctttgtataaaatttgtattaaacttaaatatctttt

SEQ ID NO: 426824 - DNA, 3889 bp, Homo sapiens
gagaatgtactcctccagcgcggtgtgcttggcacgtcgaattggttcggcattcctggctttcataggttttacccagaacttggtggcgtcaagaccgtgcaggtgaacctgagtgaaatccggtttttgtttgttttttcttcatgcattggctagttgtaggtaaaactccaccatccacgacggtgggcagccattctcccccggaaacaccggtgctcacccgctcttccgcccaaacttccgcggctggcgccacagccaccaccagcacgtcctccacggtcaccgtcacggccccggcccccgccgccacaggaagcccagtgaaaaagcagaggccgcttttaccgaaggagactgccccggccgtgcagcgggtcgtgtggaactcatcaagtaagtttcaaacgtcctcccaaaagtggcacatgcagaagatgcagcgtcagcagcagcagcagcagcagcaaaaccagcagcagcagcctcagtcttcccaggggacgagatatcagaccagacaggctgtgaaaggtaccgagcctccccttctgttctccgtggcgcccgctcccattttgccacatcgacaggagaaagtcattgctcttttattttttttttttagttctcgtttgtttccgggccattgtatcttgaaggccttgcacattccatttggcattatttttaaaaattgttttgctacttgcttttttactttcaaaaagttttttttgttcattttataaatgatacatgcatatattctccttaaaaagggggcagaaagttttacataaaagtctgttatcccgtttaccttccatttcattctcttcccttccacagtggccagtatcaaccgttgtaaaagcttttctatgcatgtatgcatgtatatgtatatatacatatctgtatgtatatatgtgcgcatcatgtatatgatgccataaaattagtcctttttcccccctttttttcttttttaaaacataaaaatggtaccatacttgcttttttcccccacccatcagcatgttttggaggtccatccacatcagcacatacagccctgccttgttcttttggactgctgcatagtatttcatagtttatttaaagcattcctctactaatgggcatttaggttgctttcagttttttttctactgtgagcagtgctgcaatgaatatctttgtataaatttccttgtgcacatgagggaacctcttggagttattttggaaaaagtacagtgcgagaagttgatagcgaaggttaccttagtaactggagattcgtcacacacacaagatgagccagcctcaagaaccacttgctgaagttgcagaatcagaactcccaccagtcctgcaggaggctccatctggagctgaaattaggccaaacacagtgctgatctgactgctgtccagcagaaggagatcacacagagcccatccacgtccaccatcaccctggtgaccagcacacagtcatcgcccctggtcaccagctcggggtccatgagcacccttgtgtcctcagtcaacgctgacctgcccatcgccactgcctcagctgatgtcgccgctgatattgccaagtacactagcaaaatgatggatgcaataaaaggaacaatgacagaaatatacaacgatctttctaaaaacactactggaagcacaatagctgagattcgcaggctgaggatcgagatagagaagctccagtggctgcaccagcaagagctctccgaaatgaaacacaacttagagctgaccatggcggagatgcggcagagcctggagcaggagcgggaccggctcatcgccgaggtgaagaagcagctggagttggagaagcagcaggcggtggatgagaccaagaagaagcagtggtgcgccaactgcaagaaggaggccatcttttactgctgttggaacaccagctactgtgactacccctgccagcaagcccactggcctgagcacatgaagtcctgcacccagtcagctactgctcctcagcaggaagcggatgctgaggtgaacacagaaacactaaataagtcctcccaggggagctcctcgagcacacaatcagcaccttcagaaacggccagcgcctccaaagagaaggagacgtcagctgagaaaagcaaggagagtggctcgacccttgacctttctggctccagagagacgccctcctccattctcttaggctccaaccaaggctctgttagcaaaaggtgtgacaagcaacctgcctatgccccaaccaccacagaccaccagccgcaccccaactaccccgcccagaagtaccattcccggagtaataaatccagttggagcagcagtgatgagaagaggggatcgacacgttccgatcacaacaccagtaccagcacgaagagcctcctcccgaaagagtctcggctggacaccttctgggactagcagtgaatcgggacacaaaccacccaccccattgggagaaaaacccagacgccaggaaaagaagaaacaacaaaggcaggagaacagccactttcagacttgaaaatgacaaaaccctcagttgagcctgagcccccggcgcgggggctgctacactacaggacacccagcatcggctttgactgcagactgttcacccacacgagccctgtgcttttggtgtaaataatgtacaatttgtggatgtcattgaatctagaggactttcccctttttatatttgtattaactttaacttattaaaaaaaaaaaaagaaaaagaaaaacaatttaaaaaaaaaaaaaaaagcaaccaaccccaacaacaaaaaagaatgttttggtattggagaagggatggtcagttagcctgtctgtcacacgacggaatggatactgggcccggggaccactttcatactcacgtcctcatccttggatacccaggggagggcgaaccgttttcgctcgtgtgtctgtacgcagcatgttgggatcgggagtttcggcacagactatcccatcaagccgttggctcctttcagctactacgttaccacgttcctaaaacgcaagctctccggaccagacggacacagggagaagctagtttctttcatgtgattgaaatgatgactctactcctaaaagggaaaaaacaatatccttgtttacagaagagaaacaaacaagccccactcagctcagtcacaggagagaacacagaaagtcttaggatcatgaactctgaaaaaaagagaaaccttatctttgctttgtggttcctttaaacacactcacacacacttggtcagagatgctgtgcttcttggaagcaaggactcaaaggcaaggtgcacgcagaggacgtttgagtctgggatgaagcatgtacgtattatttatatgatggaatttcacgtttttatgtaagcatgaaacacaggcagtatgagagaaagcaaggcccgtcatgctgtccgtacactacgtatgctgtagagccattttgtatgttgtgtaaaacaaaaagcattgatgaaaaagcaaaaggtgatgtatgtatatgagaaaattaattgtacgatatcattccagtacgttttgttgtacattttagtcttgtttactttctcttcattgttaagaggatgcgaactgtacagtttccagctagttacccatattagagaagaaataagagagtattagaagaaaacaggagagaaagaacatttgtgaattgcagttgtcaaaaaaaaaaatagcctagctggccttatttgtgaagcataattgcttttagcatatggaagtattttttcacattttctttgtataaaatttgtattaaacttaaatatctttt

SEQ ID NO: 426825 - DNA, 2654 bp, Homo sapiens
ctgtcaatgtttgctcaagtctttccaggccaaggttagggcctagttgagaaacctggatagagtttggtcaaggggagcatctttgtcatttaaaagtagaaaagctctcaggatgtctattaggggctttgcttctacaccacagctttgtgctgggatgggtccttcccacgtggggtaatcaggatgctttgccttcctagctgtccagcagaaggagatcacacagagcccatccacgtccaccatcaccctggtgaccagcacacagtcatcgcccctggtcaccagctcggggtccatgagcacccttgtgtcctcagtcaacgctgacctgcccatcgccactgcctcagctgatgtcgccgctgatattgccaagtacactagcaaaatgatggatgcaataaaaggaacaatgacagaaatatacaacgatctttctaaaaacactactggaagcacaatagctgagattcgcaggctgaggatcgagatagagaagctccagtggctgcaccagcaagagctctccgaaatgaaacacaacttagagctgaccatggcggagatgcggcagagcctggagcaggagcgggaccggctcatcgccgaggtgaagaagcagctggagttggagaagcagcaggcggtggatgagaccaagaagaagcagtggtgcgccaactgcaagaaggaggccatcttttactgctgttggaacaccagctactgtgactacccctgccagcaagcccactggcctgagcacatgaagtcctgcacccagtcagctactgctcctcagcaggaagcggatgctgaggtgaacacagaaacactaaataagtcctcccaggggagctcctcgagcacacaatcagcaccttcagaaacggccagcgcctccaaagagaaggagacgtcagctgagaaaagcaaggagagtggctcgacccttgacctttctggctccagagagacgccctcctccattctcttaggctccaaccaaggctctgttagcaaaaggtgtgacaagcaacctgcctatgccccaaccaccacagaccaccagccgcaccccaactaccccgcccagaagtaccattcccggagtaataaatccagttggagcagcagtgatgagaagaggggatcgacacgttccgatcacaacaccagtaccagcacgaagagcctcctcccgaaagagtctcggctggacaccttctgggactagcagtgaatcgggacacaaaccacccaccccattgggagaaaaacccagacgccaggaaaagaagaaacaacaaaggcaggagaacagccactttcagacttgaaaatgacaaaaccctcagttgagcctgagcccccggcgcgggggctgctacactacaggacacccagcatcggctttgactgcagactgttcacccacacgagccctgtgcttttggtgtaaataatgtacaatttgtggatgtcattgaatctagaggactttcccctttttatatttgtattaactttaacttattaaaaaaaaaaaaagaaaaagaaaaacaatttaaaaaaaaaaaaaaaagcaaccaaccccaacaacaaaaaagaatgttttggtattggagaagggatggtcagttagcctgtctgtcacacgacggaatggatactgggcccggggaccactttcatactcacgtcctcatccttggatacccaggggagggcgaaccgttttcgctcgtgtgtctgtacgcagcatgttgggatcgggagtttcggcacagactatcccatcaagccgttggctcctttcagctactacgttaccacgttcctaaaacgcaagctctccggaccagacggacacagggagaagctagtttctttcatgtgattgaaatgatgactctactcctaaaagggaaaaaacaatatccttgtttacagaagagaaacaaacaagccccactcagctcagtcacaggagagaacacagaaagtcttaggatcatgaactctgaaaaaaagagaaaccttatctttgctttgtggttcctttaaacacactcacacacacttggtcagagatgctgtgcttcttggaagcaaggactcaaaggcaaggtgcacgcagaggacgtttgagtctgggatgaagcatgtacgtattatttatatgatggaatttcacgtttttatgtaagcatgaaacacaggcagtatgagagaaagcaaggcccgtcatgctgtccgtacactacgtatgctgtagagccattttgtatgttgtgtaaaacaaaaagcattgatgaaaaagcaaaaggtgatgtatgtatatgagaaaattaattgtacgatatcattccagtacgttttgttgtacattttagtcttgtttactttctcttcattgttaagaggatgcgaactgtacagtttccagctagttacccatattagagaagaaataagagagtattagaagaaaacaggagagaaagaacatttgtgaattgcagttgtcaaaaaaaaaaatagcctagctggccttatttgtgaagcataattgcttttagcatatggaagtattttttcacattttctttgtataaaatttgtattaaacttaaatatctttt

SEQ ID NO: 426826 - DNA, 2195 bp, Homo sapiens
accatgatgaatgccctatttacagatgaagactcgggctaggttattgcccatgggcacacagccagggcttctcccagccaggtcttgcatccacgtctgcctgaatctgggggcaggaataaccccacaccccaggctggggtcaggtgatgagcggtgttcttcccctcctccaccagagctgaccatggcggagatgcggcagagcctggagcaggagcgggaccggctcatcgccgaggtgaagaagcagctggagttggagaagcagcaggcggtggatgagaccaagaagaagcagtggtgcgccaactgcaagaaggaggccatcttttactgctgttggaacaccagctactgtgactacccctgccagcaagcccactggcctgagcacatgaagtcctgcacccagtcagctactgctcctcagcaggaagcggatgctgaggtgaacacagaaacactaaataagtcctcccaggggagctcctcgagcacacaatcagcaccttcagaaacggccagcgcctccaaagagaaggagacgtcagctgagaaaagcaaggagagtggctcgacccttgacctttctggctccagagagacgccctcctccattctcttaggctccaaccaaggctctgaccattcccggagtaataaatccagttggagcagcagtgatgagaagaggggatcgacacgttccgatcacaacaccagtaccagcacgaagagcctcctcccgaaagagtctcggctggacaccttctgggactagcagtgaatcgggacacaaaccacccaccccattgggagaaaaacccagacgccaggaaaagaagaaacaacaaaggcaggagaacagccactttcagacttgaaaatgacaaaaccctcagttgagcctgagcccccggcgcgggggctgctacactacaggacacccagcatcggctttgactgcagactgttcacccacacgagccctgtgcttttggtgtaaataatgtacaatttgtggatgtcattgaatctagaggactttcccctttttatatttgtattaactttaacttattaaaaaaaaaaaaagaaaaagaaaaacaatttaaaaaaaaaaaaaaaagcaaccaaccccaacaacaaaaaagaatgttttggtattggagaagggatggtcagttagcctgtctgtcacacgacggaatggatactgggcccggggaccactttcatactcacgtcctcatccttggatacccaggggagggcgaaccgttttcgctcgtgtgtctgtacgcagcatgttgggatcgggagtttcggcacagactatcccatcaagccgttggctcctttcagctactacgttaccacgttcctaaaacgcaagctctccggaccagacggacacagggagaagctagtttctttcatgtgattgaaatgatgactctactcctaaaagggaaaaaacaatatccttgtttacagaagagaaacaaacaagccccactcagctcagtcacaggagagaacacagaaagtcttaggatcatgaactctgaaaaaaagagaaaccttatctttgctttgtggttcctttaaacacactcacacacacttggtcagagatgctgtgcttcttggaagcaaggactcaaaggcaaggtgcacgcagaggacgtttgagtctgggatgaagcatgtacgtattatttatatgatggaatttcacgtttttatgtaagcatgaaacacaggcagtatgagagaaagcaaggcccgtcatgctgtccgtacactacgtatgctgtagagccattttgtatgttgtgtaaaacaaaaagcattgatgaaaaagcaaaaggtgatgtatgtatatgagaaaattaattgtacgatatcattccagtacgttttgttgtacattttagtcttgtttactttctcttcattgttaagaggatgcgaactgtacagtttccagctagttacccatattagagaagaaataagagagtattagaagaaaacaggagagaaagaacatttgtgaattgcagttgtcaaaaaaaaaaatagcctagctggccttatttgtgaagcataattgcttttagcatatggaagtattttttcacattttctttgtataaaatttgtattaaacttaaatatctttt

SEQ ID NO: 426827 - DNA, 2187 bp, Homo sapiens
  misc_feature (25)..(25): n is a, c, g, or t
acccggtgtttatcgatgcaccacngacatcctaggtcttattctgattctgaattcttcagtcacccataagcttgtccttaccgggagtcagtgggtgtgtgttcccaggtggacttaaccattcttctcctttatgatcctttcccttgggtggacaagtgtgatttggttgtaaggccatttttcaagttgcctatacattgataaaagaaatcccactaacggaagtagactgcatgccaaatttcagtgtctttctccaggggccaaggttggacccagaagtgcatggggtgcttggtgtcgttcagtgatgtagtaaggatacacggttccagacacggcacaagaaatgccttccttggcagttcagcaccttttctacaaatctttattctctgtgagcatgacaccctaccgttttttcaaccggttgtcgttaaatcctaaaaaataagttgttctacctttctgttctacagacccacagatgcagggcagtcagcggtggcagtgtttgaaccatcaattgggaggggaaggtggtttcctgtgcaggaggggcaggtcagattgcaggatagttgtgctcaggcgcaggtgggcaggcacgctaaacacattggttttccccctcagaccattcccggagtaataaatccagttggagcagcagtgatgagaagaggggatcgacacgttccgatcacaacaccagtaccagcacgaagagcctcctcccgaaagagtctcggctggacaccttctgggactagcagtgaatcgggacacaaaccacccaccccattgggagaaaaacccagacgccaggaaaagaagaaacaacaaaggcaggagaacagccactttcagacttgaaaatgacaaaaccctcagttgagcctgagcccccggcgcgggggctgctacactacaggacacccagcatcggctttgactgcagactgttcacccacacgagccctgtgcttttggtgtaaataatgtacaatttgtggatgtcattgaatctagaggactttcccctttttatatttgtattaactttaacttattaaaaaaaaaaaaagaaaaagaaaaacaatttaaaaaaaaaaaaaaaagcaaccaaccccaacaacaaaaaagaatgttttggtattggagaagggatggtcagttagcctgtctgtcacacgacggaatggatactgggcccggggaccactttcatactcacgtcctcatccttggatacccaggggagggcgaaccgttttcgctcgtgtgtctgtacgcagcatgttgggatcgggagtttcggcacagactatcccatcaagccgttggctcctttcagctactacgttaccacgttcctaaaacgcaagctctccggaccagacggacacagggagaagctagtttctttcatgtgattgaaatgatgactctactcctaaaagggaaaaaacaatatccttgtttacagaagagaaacaaacaagccccactcagctcagtcacaggagagaacacagaaagtcttaggatcatgaactctgaaaaaaagagaaaccttatctttgctttgtggttcctttaaacacactcacacacacttggtcagagatgctgtgcttcttggaagcaaggactcaaaggcaaggtgcacgcagaggacgtttgagtctgggatgaagcatgtacgtattatttatatgatggaatttcacgtttttatgtaagcatgaaacacaggcagtatgagagaaagcaaggcccgtcatgctgtccgtacactacgtatgctgtagagccattttgtatgttgtgtaaaacaaaaagcattgatgaaaaagcaaaaggtgatgtatgtatatgagaaaattaattgtacgatatcattccagtacgttttgttgtacattttagtcttgtttactttctcttcattgttaagaggatgcgaactgtacagtttccagctagttacccatattagagaagaaataagagagtattagaagaaaacaggagagaaagaacatttgtgaattgcagttgtcaaaaaaaaaaatagcctagctggccttatttgtgaagcataattgcttttagcatatggaagtattttttcacattttctttgtataaaatttgtattaaacttaaatatctttt

SEQ ID NO: 426828 - DNA, 3770 bp, Homo sapiens
  misc_feature (3572)..(3573): n is a, c, g, or t
gatggctcttgctcacccgagcctcacaaagataatcgctcaggaagtgtttcagccaatccggggcggctttacactccgatttgccggggcagccaatcggggatgagcttttattaggcggccagatcatcagccgaagtgccaaaccctttttctgtgagaactaggagcctgtcctccatgttttataagtattgacattacacagtgttaacaatgcatccacagagcttggctgaagaggaaataaaaacagaacaggaggtggtagagggcatggatatctctactcgctccaaagatcctggctctgcagagagaacagcccagaaaagaaagttccccagccctccacattcttccaatggccactcgccgcaggacacatcaacaagccccattaaaaagaaaaagaaacctggcttactgaacagtaacaataaggagcagtcagaactaagacatggtccgttttactatatgaagcagccactcaccacagaccctgttgatgttgtaccgcaggatggacggaatgatttctactgctgggtttgtcaccgggaaggccaagtcctttgctgtgagctctgtccccgggtttatcacgctaagtgtctgagactgacatcggaaccagagggggactggttttgtcctgaatgtgagaaaattacagtagcagaatgcatcgagacccagagtaaagccatgacaatgctcaccattgaacagttatcctacctgctcaagtttgccattcagaaaatgaaacagccagggacagatgcattccagaagcccgttccattggaacagcaccctgactatgcggaatacatcttccatccaatggacctttgtacattggaaaagaatgcgaaaaagaaaatgtatggctgcacagaagccttcctggctgatgcaaagtggattttgcacaactgcatcatttataatgggggaaatcacaaattgacgcaaatagcgaaagtagtcatcaaaatctgtgaacatgagatgaatgaaatcgaagtatgtccagaatgttatctagctgcttgccaaaaacgagataactggttttgtgagccttgtagcaatccacatcctttggtctgggccaaactgaaggggtttccattctggcctgcaaaagctctaagggataaagacgggcaggtcgatgcccgattctttggacaacatgacagggcctgggttccaataaataattgctacctcatgtctaaagaaattcctttttctgtgaaaaagactaagagcatcttcaacagtgccatgcaagagatggaggtttacgtggagaacatccgcaggaagtttggggtttttaattactctccatttaggacaccctacacacccaacagccagtatcaaatgctgctcgatcccaccaaccccagcgccggcactgccaagatagacaagcaggagaaggtcaagctcaactttgacatgacggcatcccccaagatcctgatgagcaagcctgtgctgagtgggggcacaggccgccggatttccttgtcggatatgccgcgctcccccatgagcacaaactcttctgtgcacacgggctccgacgtggagcaggatgctgagaagaaggccacgtcgagccacttcagtgcgagcgaggagtccatggacttcctggataagagcacagcttcaccagcctccaccaagacgggacaagcagggagtttatccggcagcccaaagcccttctctcctcaactgtcagctcctatcacgacgaaaacggacaaaacctccaccaccggcagcatcctgaatcttaacctggatcgaagcaaagctgagatggatttgaaggagctgagcgagtcggtccagcaacagtccacccctgttcctctcatctctcccaagcgccagattcgtagcaggttccagctgaatcttgacaagaccatagagagttgcaaagcacaattaggcataaatgaaatctcggaagatgtctatacggccgtagagcacagcgattcggaggattctgagaagtcagatagtagcgatagtgagtatatcagtgatgatgagcagaagtctaagaacgagccagaagacacagaggacaaagaaggttgtcagatggacaaagagccatctgctgttaaaaaaaagcccaagcctacaaacccagtggagattaaagaggagctgaaaagcacgtcaccagccagcgagaaggcagaccctggagcagtcaaggacaaggccagccctgagcctgagaaggacttttccgaaaaggcaaaaccttcacctcaccccataaaggataaactgaagggaaaagatgagacggattccccaacagtccatttgggcctggactctgattcagagagcgaacttgtcatagatttaggagaagaccattctgggcgggagggtcgaaaaaataagaaggaacccaaagaaccatctcccaaacaggatgttgtaggtaaaactccaccatccacgacggtgggcagccattctcccccggaaacaccggtgctcacccgctcttccgcccaaacttccgcggctggcgccacagccaccaccagcacgtcctccacggtcaccgtcacggccccggcccccgccgccacaggaagcccagtgaaaaagcagaggccgcttttaccgaaggagactgccccggccgtgcagcgggtcgtgtggaactcatcaactgtccagcagaaggagatcacacagagcccatccacgtccaccatcaccctggtgaccagcacacagtcatcgcccctggtcaccagctcggggtccatgagcacccttgtgtcctcagtcaacgctgacctgcccatcgccactgcctcagctgatgtcgccgctgatattgccaagtacactagcaaaatgatggatgcaataaaaggaacaatgacagaaatatacaacgatctttctaaaaacactactggaagcacaatagctgagattcgcaggctgaggatcgagatagagaagctccagtggctgcaccagcaagagctctccgaaatgaaacacaacttagagctgaccatggcggagatgcggcagagcctggagcaggagcgggaccggctcatcgccgaggtgaagaagcagctggagttggagaagcagcaggcggtggatgagaccaagaagaagcagtggtgcgccaactgcaagaaggaggccatcttttactgctgttggaacaccagctactgtgactacccctgccagcaagcccactggcctgagcacatgaagtcctgcacccagtcagctactgctcctcagcaggaagcggatgctgaggtgaacacagaaacactaaataagtcctcccaggggagctcctcgagcacacaatcagcaccttcagaaacggccagcgcctccaaagagaaggagacgtcagctgagaaaagcaaggagagtggctcgacccttgacctttctggctccagagagacgccctcctccattctcttaggctccaaccaaggctctgttagcannaggtgtgcaaggcactgggtttggccaacaacaggacacagaggagccattaaaccggcggaatacctccgggtataacccgtgggaccggttgaaagggtcacttcctacaacaatgaaaaacccgaaaatgggggaccttggctcagttgggaaaacccccgggaacccgggaaaaaaaggagacttcaaaacgg

SEQ ID NO: 426829 - DNA, 2836 bp, Homo sapiens
gatggctcttgctcacccgagcctcacaaagataatcgctcaggaagtgtttcagccaatccggggcggctttacactccgatttgccggggcagccaatcggggatgagcttttattaggcggccagatcatcagccgaagtgccaaaccctttttctgtgagaactaggagcctgtcctccatgttttataagtattgacattacacagtgttaacaatgcatccacagagcttggctgaagaggaaataaaaacagaacaggaggtggtagagggcatggatatctctactcgctccaaagatcctggctctgcagagagaacagcccagaaaagaaagttccccagccctccacattcttccaatggccactcgccgcaggacacatcaacaagccccattaaaaagaaaaagaaacctggcttactgaacagtaacaataaggagcagtcagaactaagacatggtccgttttactatatgaagcagccactcaccacagaccctgttgatgttgtaccgcaggatggacggaatgatttctactgctgggtttgtcaccgggaaggccaagtcctttgctgtgagctctgtccccgggtttatcacgctaagtgtctgagactgacatcggaaccagagggggactggttttgtcctgaatgtgagaaaattacagtagcagaatgcatcgagacccagagtaaagccatgacaatgctcaccattgaacagttatcctacctgctcaagtttgccattcagaaaatgaaacagccagggacagatgcattccagaagcccgttccattggaacagcaccctgactatgcggaatacatcttccatccaatggacctttgtacattggaaaagaatgcgaaaaagaaaatgtatggctgcacagaagccttcctggctgatgcaaagtggattttgcacaactgcatcatttataatgggggaaatcacaaattgacgcaaatagcgaaagtagtcatcaaaatctgtgaacatgagatgaatgaaatcgaagtatgtccagaatgttatctagctgcttgccaaaaacgagataactggttttgtgagccttgtagcaatccacatcctttggtctgggccaaactgaaggggtttccattctggcctgcaaaagctctaagggataaagacgggcaggtcgatgcccgattctttggacaacatgacagggcctgggttccaataaataattgctacctcatgtctaaagaaattcctttttctgtgaaaaagactaagagcatcttcaacagtgccatgcaagagatggaggtttacgtggagaacatccgcaggaagtttggggtttttaattactctccatttaggacaccctacacacccaacagccagtatcaaatgctgctcgatcccaccaaccccagcgccggcactgccaagatagacaagcaggagaaggtcaagctcaactttgacatgacggcatcccccaagatcctgatgagcaagcctgtgctgagtgggggcacaggccgccggatttccttgtcggatatgccgcgctcccccatgagcacaaactcttctgtgcacacgggctccgacgtggagcaggatgctgagaagaaggccacgtcgagccacttcagtgcgagcgaggagtccatggacttcctggataagagcacagcttcaccagcctccaccaagacgggacaagcagggagtttatccggcagcccaaagcccttctctcctcaactgtcagctcctatcacgacgaaaacggacaaaacctccaccaccggcagcatcctgaatcttaacctggatcgaagcaaagctgagatggatttgaaggagctgagcgagtcggtccagcaacagtccacccctgttcctctcatctctcccaagcgccagattcgtagcaggttccagctgaatcttgacaagaccatagagagttgcaaagcacaattaggcataaatgaaatctcggaagatgtctatacggccgtagagcacagcgattcggaggattctgagaagtcagatagtagcgatagtgagtatatcagtgatgatgagcagaagtctaagaacgagccagaagacacagaggacaaagaaggttgtcagatggacaaagagccatctgctgttaaaaaaaagcccaagcctacaaacccagtggagattaaagaggagctgaaaagcacgtcaccagccagcgagaaggcagaccctggagcagtcaaggacaaggccagccctgagcctgagaaggacttttccgaaaaggcaaaaccttcacctcaccccataaaggataaactgaagggaaaagatgagacggattccccaacagtccatttgggcctggactctgattcagagagcgaacttgtcatagatttaggagaagaccattctgggcgggagggtcgaaaaaataagaaggaacccaaagaaccatctcccaaacaggatggtaagtgattgtatctgtttccagttttcttaatttggtttagaatcctacctcgtacacttactatcaaaagttatgtgacccttaaagaaacaaatcagaagttatgtgaccctctaacacactgagagagaggcacagtgaagctgtgtttggtttaaggttgcctagctagtcatagaacaggacctggactcaaacatgggcctgcctacctttaacctgctcggtatccagtatgattgattttgagtacagaaagagaagtctgttagaaaatgatggttacttttagtgaccaagtcatttttagtctgagcagcttcttttcca

SEQ ID NO: 426830 - DNA, 1715 bp, Homo sapiens
gccccgaacacgtcgtggctgtgtagaaagaggtagacatgggagacttttcatttggtctttgtgaaagagattttatgaggcttcccaaaatgaagcagttattcacttttaccttcagggtgctttcacaaatgagctactggagtatttttcgtatctttggttgatgaaaaggctcatctccaaacttaatggttgtaccaaggtgttttcattccttcaacaagtcactgagtgctttcttggaacacacagccttgcactgggggttatggggagggaggaagaggctggacagggttactgcatactgccggaaggagattctcatttggctgcagagtgtcgcacaaagtgactccctaaaggcgtctgaaaccaaaagcattttgaggattgttacaagacaccgtgcctggccctcctaatctgtttttttaagaaaagtgaaaaatctaggttattacatgaaatttcctgatttttgtatcttggcaacaagttaagattttacaaaaatgttacataggtcaaagaaatacttgtctgactgttgaagcagacagtgaagaagggggcacgtatattctgggaggaggaacactgaagtggcttcgggagttgggggacagaatgcactctgttcccacacttggttcctccacacctcctccctgtggggcccaggcctccctgactgctttaaaacctgtggtcctgtatctctttcagatcctggctctgcagagagaacagcccagaaaagaaagttccccagccctccacattcttccaatggccactcgccgcaggacacatcaacaagccccattaaaaagaaaaagaaacctggcttactgaacagtaacaataaggagcagtcagaactaagacatggtccgttttactatatgaagcagccactcaccacagaccctgttgatgttgtaccgcaggatggacggaatgatttctactgctgggtttgtcaccgggaaggccaagtcctttgctgtgagctctgtccccgggtttatcacgctaagtgtctgagactgacatcggaaccagagggggactggttttgtcctgaatgtgaggttagttcctgatgaatgaatgcattacctgcctcgtttcctctcctttctctttcttccttttatttttaaatttacaaataatccagatagatggaaaagagaaatttcttgctttccacctgttctatcctggtcacccccttcttgaccaacaccggcagtggctgcagtactgcagctcttggaaagacaattgcacggaatattatttctgatttctcatgagtccttggattccttggagatctgtagtcgtcatctctgcatcttctatgatgaactttttgaaagttaactcccaaatcatgaacggctcacacattttgaaaagatctcattctgttttctccgtcttggatgttgttgcctgccgcatcattgaatcatcagcagtagccaagctgagaagaccacgtttggttgcatgttccctgtagtggccgtctggtgctttcttttgtgcaacaagtatttcttgagtgcctattaggtgctgggaattcgacagtgcacaaaaacaggcatggatcatttttttttttccagcagaaaaggacaaaaaccaaaataaataaagttccatataatgaattaaaagaaaaatgctgt

SEQ ID NO: 426831 - DNA, 410 bp, Homo sapiens
tcgaatcgtaaccgttcgtacgagaatcgctgtcctctccttgctcgagatccattgtgctctaaagatcagtttgaaactcgcagggctgcttaaacaagagctacagctattgaacaaactgctaccattttagcttcaacacaggaatgaggcagtgttgccagacgccattttaagaatcctgcataaatagcttagctaccgatgactctgcctgttttagcttggctgaagaggaaataaaaacagaacaggaggtggtagagggcatggatatctctactcgctccaaagatcctggctctgcagagagaacagcccagaaaagaaagttccccagccaattccaccacactggcggccgcaaggaaaggacagcgattctcgtacgaacggttacaattcga

SEQ ID NO: 426832 - DNA, 419 bp, Homo sapiens
aaaaggaaatgtagagcttgctgggatgccggggccagtgtttgcatttagttcaaaatttagcaaattaggacaaacacaatttatgcgtttattcacaagcctggagtagactcctgaatatcttctaattgagggattggtacttttcatttggtctttgtgaaagagattttatgaggcttcccaaaatgaagcagttattcacttttaccttcagggtgctttcacaaatgagctactggagtatttttcgtatctttggttgatgaaaaggctcatctccaaacttaatggttgtaccaaggtgttttcattccttcaacaagtcactgagtgctttcttggaacacacagccttgcactgggggttatggggagggaggaagaggctggacagggttactgcatactgccgg

SEQ ID NO: 426833 - DNA, 483 bp, Homo sapiens
tctagcagagctgcagatctgggctgggctgttggctaaagtgctcttcacagacacctcattcggctcttccttcagcttcttcacttatttcttactcagtcactactcagctccttgtccatgtgtccttgaagccatcctaggtcttattctgattctgaattcttcagtcacccataagcttgtccttaccgggagtcagtgggtgtgtgttcccaggtggacttaaccattcttctcctttatgatcctttcccttgggtggacaagtgtgatttggttgtaaggccatttttcaagttgcctatacattgataaaagaaatcccactaacggaagtagactgcatgccaaatttcagtgtctttctccaggggccaaggttggacccagaagtgcatggggtgcttggtgtcgttcagtgatgtagtaaggatacacggttccagacacggcacaagaaatgccttccttggcagt

SEQ ID NO: 426834 - DNA, 413 bp, Homo sapiens
gtttattggaagaagctacatgataaatgacagctactataagatgagaaaattccagttattgtgttaaattcaaagagtgcatttttatagggttatagatctcaaaaataaaagcattctttagtcggggtgttgtaggttaaaaagaagcatcttgggaaatgaatagaagaacactaattgatttggcaaatgactgctacaaaaattatgtggggacacaagagtcactgactgtggcttgtctagactcactgtgattatgctccatcgcttttcttcccagaatgcgaaaaagaaaatgtatggctgcacagaagccttcctggctgatgcaaagtggattttgcacaactgcatcatttataatgggggtgagtggcttagatgactcctaagaaagagtatgc

SEQ ID NO: 426835 - DNA, 577 bp, Homo sapiens
gcatttagggcccccaattatcagggtgttttcgagggggtcgccatctttcttggatacaagtcctcttcaatctggacctgaagttacaagtacaccttgaccaggctcagtgttgctttgttcactgaaattgagattgaatatctgcccataacctttgtctttggagggtccctaatgatgttgacttccacacactgagccatctggctgggattgtccattttaaatattgaaagtcacccagacgattgttcagtggactgtttaaacctgccaaacgtgttcacgtgggccattatcttcatgtcaccccatttggttgagcagatgatattgttgggatgaatgacaaaaaaagtatctccccctcccccatgttctaaaatgtgtgttttgctctgactttgcaaggacgaagctccgtgatgaggatggtgtgtgcctgatcttacgagggtgtgatggtttctttcagatcgaagcaaagctgagatggatttgaaggagctgagcgagtcggtccagcaacagtccacccctgttcctctcatctctcccaagcgccagattc

SEQ ID NO: 426836 - DNA, 5035 bp, Homo sapiens
gatggctcttgctcacccgagcctcacaaagataatcgctcaggaagtgtttcagccaatccggggcggctttacactccgatttgccggggcagccaatcggggatgagcttttattaggcggccagatcatcagccgaagtgccaaaccctttttctgtgagaactaggagcctgtcctccatgttttataagtattgacattacacagtgttaacaatgcatccacagagcttggctgaagaggaaataaaaacagaacaggaggtggtagagggcatggatatctctactcgctccaaagatcctggctctgcagagagaacagcccagaaaagaaagttccccagccctccacattcttccaatggccactcgccgcaggacacatcaacaagccccattaaaaagaaaaagaaacctggcttactgaacagtaacaataaggagcaggatggacggaatgatttctactgctgggtttgtcaccgggaaggccaagtcctttgctgtgagctctgtccccgggtttatcacgctaagtgtctgagactgacatcggaaccagagggggactggttttgtcctgaatgtgagaaaattacagtagcagaatgcatcgagacccagagtaaagccatgacaatgctcaccattgaacagttatcctacctgctcaagtttgccattcagaaaatgaaacagccagggacagatgcattccagaagcccgttccattggaacagcaccctgactatgcggaatacatcttccatccaatggacctttgtacattggaaaagaatgcgaaaaagaaaatgtatggctgcacagaagccttcctggctgatgcaaagtggattttgcacaactgcatcatttataatgggggaaatcacaaattgacgcaaatagcgaaagtagtcatcaaaatctgtgaacatgagatgaatgaaatcgaagtatgtccagaatgttatctagctgcttgccaaaaacgagataactggttttgtgagccttgtagcaatccacatcctttggtctgggccaaactgaaggggtttccattctggcctgcaaaagctctaagggataaagacgggcaggtcgatgcccgattctttggacaacatgacagggcctgggttccaataaataattgctacctcatgtctaaagaaattcctttttctgtgaaaaagactaagagcatcttcaacagtgccatgcaagagatggaggtttacgtggagaacatccgcaggaagtttggggtttttaattactctccatttaggacaccctacacacccaacagccagtatcaaatgctgctcgatcccaccaaccccagcgccggcactgccaagatagacaagcaggagaaggtcaagctcaactttgacatgacggcatcccccaagatcctgatgagcaagcctgtgctgagtgggggcacaggccgccggatttccttgtcggatatgccgcgctcccccatgagcacaaactcttctgtgcacacgggctccgacgtggagcaggatgctgagaagaaggccacgtcgagccacttcagtgcgagcgaggagtccatggacttcctggataagagcacagcttcaccagcctccaccaagacgggacaagcagggagtttatccggcagcccaaagcccttctctcctcaactgtcagctcctatcacgacgaaaacggacaaaacctccaccaccggcagcatcctgaatcttaacctggatcgaagcaaagctgagatggatttgaaggagctgagcgagtcggtccagcaacagtccacccctgttcctctcatctctcccaagcgccagattcgtagcaggttccagctgaatcttgacaagaccatagagagttgcaaagcacaattaggcataaatgaaatctcggaagatgtctatacggccgtagagcacagcgattcggaggattctgagaagtcagatagtagcgatagtgagtatatcagtgatgatgagcagaagtctaagaacgagccagaagacacagaggacaaagaaggttgtcagatggacaaagagccatctgctgttaaaaaaaagcccaagcctacaaacccagtggagattaaagaggagctgaaaagcacgtcaccagccagcgagaaggcagaccctggagcagtcaaggacaaggccagccctgagcctgagaaggacttttccgaaaaggcaaaaccttcacctcaccccataaaggataaactgaagggaaaagatgagacggattccccaacagtccatttgggcctggactctgattcagagagcgaacttgtcatagatttaggagaagaccattctgggcgggagggtcgaaaaaataagaaggaacccaaagaaccatctcccaaacaggatgttgtaggtaaaactccaccatccacgacggtgggcagccattctcccccggaaacaccggtgctcacccgctcttccgcccaaacttccgcggctggcgccacagccaccaccagcacgtcctccacggtcaccgtcacggccccggcccccgccgccacaggaagcccagtgaaaaagcagaggccgcttttaccgaaggagactgccccggccgtgcagcgggtcgtgtggaactcatcaactgtccagcagaaggagatcacacagagcccatccacgtccaccatcaccctggtgaccagcacacagtcatcgcccctggtcaccagctcggggtccatgagcacccttgtgtcctcagtcaacgctgacctgcccatcgccactgcctcagctgatgtcgccgctgatattgccaagtacactagcaaaatgatggatgcaataaaaggaacaatgacagaaatatacaacgatctttctaaaaacactactggaagcacaatagctgagattcgcaggctgaggatcgagatagagaagctccagtggctgcaccagcaagagctctccgaaatgaaacacaacttagagctgaccatggcggagatgcggcagagcctggagcaggagcgggaccggctcatcgccgaggtgaagaagcagctggagttggagaagcagcaggcggtggatgagaccaagaagaagcagtggtgcgccaactgcaagaaggaggccatcttttactgctgttggaacaccagctactgtgactacccctgccagcaagcccactggcctgagcacatgaagtcctgcacccagtcagctactgctcctcagcaggaagcggatgctgaggtgaacacagaaacactaaataagtcctcccaggggagctcctcgagcacacaatcagcaccttcagaaacggccagcgcctccaaagagaaggagacgtcagctgagaaaagcaaggagagtggctcgacccttgacctttctggctccagagagacgccctcctccattctcttaggctccaaccaaggctctgaccattcccggagtaataaatccagttggagcagcagtgatgagaagaggggatcgacacgttccgatcacaacaccagtaccagcacgaagagcctcctcccgaaagagtctcggctggacaccttctgggactagcagtgaatcgggacacaaaccacccaccccattgggagaaaaacccagacgccaggaaaagaagaaacaacaaaggcaggagaacagccactttcagacttgaaaatgacaaaaccctcagttgagcctgagcccccggcgcgggggctgctacactacaggacacccagcatcggctttgactgcagactgttcacccacacgagccctgtgcttttggtgtaaataatgtacaatttgtggatgtcattgaatctagaggactttcccctttttatatttgtattaactttaacttattaaaaaaaaaaaaagaaaaagaaaaacaatttaaaaaaaaaaaaaaaagcaaccaaccccaacaacaaaaaagaatgttttggtattggagaagggatggtcagttagcctgtctgtcacacgacggaatggatactgggcccggggaccactttcatactcacgtcctcatccttggatacccaggggagggcgaaccgttttcgctcgtgtgtctgtacgcagcatgttgggatcgggagtttcggcacagactatcccatcaagccgttggctcctttcagctactacgttaccacgttcctaaaacgcaagctctccggaccagacggacacagggagaagctagtttctttcatgtgattgaaatgatgactctactcctaaaagggaaaaaacaatatccttgtttacagaagagaaacaaacaagccccactcagctcagtcacaggagagaacacagaaagtcttaggatcatgaactctgaaaaaaagagaaaccttatctttgctttgtggttcctttaaacacactcacacacacttggtcagagatgctgtgcttcttggaagcaaggactcaaaggcaaggtgcacgcagaggacgtttgagtctgggatgaagcatgtacgtattatttatatgatggaatttcacgtttttatgtaagcatgaaacacaggcagtatgagagaaagcaaggcccgtcatgctgtccgtacactacgtatgctgtagagccattttgtatgttgtgtaaaacaaaaagcattgatgaaaaagcaaaaggtgatgtatgtatatgagaaaattaattgtacgatatcattccagtacgttttgttgtacattttagtcttgtttactttctcttcattgttaagaggatgcgaactgtacagtttccagctagttacccatattagagaagaaataagagagtattagaagaaaacaggagagaaagaacatttgtgaattgcagttgtcaaaaaaaaaaatagcctagctggccttatttgtgaagcataattgcttttagcatatggaagtattttttcacattttctttgtataaaatttgtattaaacttaaatatctttt

SEQ ID NO: 426837 - DNA, 5110 bp, Homo sapiens
gatggctcttgctcacccgagcctcacaaagataatcgctcaggaagtgtttcagccaatccggggcggctttacactccgatttgccggggcagccaatcggggatgagcttttattaggcggccagatcatcagccgaagtgccaaaccctttttctgtgagaactaggagcctgtcctccatgttttataagtattgacattacacagtgttaacaatgcatccacagagcttggctgaagaggaaataaaaacagaacaggaggtggtagagggcatggatatctctactcgctccaaagatcctggctctgcagagagaacagcccagaaaagaaagttccccagccctccacattcttccaatggccactcgccgcaggacacatcaacaagccccattaaaaagaaaaagaaacctggcttactgaacagtaacaataaggagcagtcagaactaagacatggtccgttttactatatgaagcagccactcaccacagaccctgttgatgttgtaccgcaggatggacggaatgatttctactgctgggtttgtcaccgggaaggccaagtcctttgctgtgagctctgtccccgggtttatcacgctaagtgtctgagactgacatcggaaccagagggggactggttttgtcctgaatgtgagaaaattacagtagcagaatgcatcgagacccagagtaaagccatgacaatgctcaccattgaacagttatcctacctgctcaagtttgccattcagaaaatgaaacagccagggacagatgcattccagaagcccgttccattggaacagcaccctgactatgcggaatacatcttccatccaatggacctttgtacattggaaaagaatgcgaaaaagaaaatgtatggctgcacagaagccttcctggctgatgcaaagtggattttgcacaactgcatcatttataatgggggaaatcacaaattgacgcaaatagcgaaagtagtcatcaaaatctgtgaacatgagatgaatgaaatcgaagtatgtccagaatgttatctagctgcttgccaaaaacgagataactggttttgtgagccttgtagcaatccacatcctttggtctgggccaaactgaaggggtttccattctggcctgcaaaagctctaagggataaagacgggcaggtcgatgcccgattctttggacaacatgacagggcctgggttccaataaataattgctacctcatgtctaaagaaattcctttttctgtgaaaaagactaagagcatcttcaacagtgccatgcaagagatggaggtttacgtggagaacatccgcaggaagtttggggtttttaattactctccatttaggacaccctacacacccaacagccagtatcaaatgctgctcgatcccaccaaccccagcgccggcactgccaagatagacaagcaggagaaggtcaagctcaactttgacatgacggcatcccccaagatcctgatgagcaagcctgtgctgagtgggggcacaggccgccggatttccttgtcggatatgccgcgctcccccatgagcacaaactcttctgtgcacacgggctccgacgtggagcaggatgctgagaagaaggccacgtcgagccacttcagtgcgagcgaggagtccatggacttcctggataagagcacagcttcaccagcctccaccaagacgggacaagcagggagtttatccggcagcccaaagcccttctctcctcaactgtcagctcctatcacgacgaaaacggacaaaacctccaccaccggcagcatcctgaatcttaacctggatcgaagcaaagctgagatggatttgaaggagctgagcgagtcggtccagcaacagtccacccctgttcctctcatctctcccaagcgccagattcgtagcaggttccagctgaatcttgacaagaccatagagagttgcaaagcacaattaggcataaatgaaatctcggaagatgtctatacggccgtagagcacagcgattcggaggattctgagaagtcagatagtagcgatagtgagtatatcagtgatgatgagcagaagtctaagaacgagccagaagacacagaggacaaagaaggttgtcagatggacaaagagccatctgctgttaaaaaaaagcccaagcctacaaacccagtggagattaaagaggagctgaaaagcacgtcaccagccagcgagaaggcagaccctggagcagtcaaggacaaggccagccctgagcctgagaaggacttttccgaaaaggcaaaaccttcacctcaccccataaaggataaactgaagggaaaagatgagacggattccccaacagtccatttgggcctggactctgattcagagagcgaacttgtcatagatttaggagaagaccattctgggcgggagggtcgaaaaaataagaaggaacccaaagaaccatctcccaaacaggatgttgtaggtaaaactccaccatccacgacggtgggcagccattctcccccggaaacaccggtgctcacccgctcttccgcccaaacttccgcggctggcgccacagccaccaccagcacgtcctccacggtcaccgtcacggccccggcccccgccgccacaggaagcccagtgaaaaagcagaggccgcttttaccgaaggagactgccccggccgtgcagcgggtcgtgtggaactcatcaactgtccagcagaaggagatcacacagagcccatccacgtccaccatcaccctggtgaccagcacacagtcatcgcccctggtcaccagctcggggtccatgagcacccttgtgtcctcagtcaacgctgacctgcccatcgccactgcctcagctgatgtcgccgctgatattgccaagtacactagcaaaatgatggatgcaataaaaggaacaatgacagaaatatacaacgatctttctaaaaacactactggaagcacaatagctgagattcgcaggctgaggatcgagatagagaagctccagtggctgcaccagcaagagctctccgaaatgaaacacaacttagagctgaccatggcggagatgcggcagagcctggagcaggagcgggaccggctcatcgccgaggtgaagaagcagctggagttggagaagcagcaggcggtggatgagaccaagaagaagcagtggtgcgccaactgcaagaaggaggccatcttttactgctgttggaacaccagctactgtgactacccctgccagcaagcccactggcctgagcacatgaagtcctgcacccagtcagctactgctcctcagcaggaagcggatgctgaggtgaacacagaaacactaaataagtcctcccaggggagctcctcgagcacacaatcagcaccttcagaaacggccagcgcctccaaagagaaggagacgtcagctgagaaaagcaaggagagtggctcgacccttgacctttctggctccagagagacgccctcctccattctcttaggctccaaccaaggctctgaccattcccggagtaataaatccagttggagcagcagtgatgagaagaggggatcgacacgttccgatcacaacaccagtaccagcacgaagagcctcctcccgaaagagtctcggctggacaccttctgggactagcagtgaatcgggacacaaaccacccaccccattgggagaaaaacccagacgccaggaaaagaagaaacaacaaaggcaggagaacagccactttcagacttgaaaatgacaaaaccctcagttgagcctgagcccccggcgcgggggctgctacactacaggacacccagcatcggctttgactgcagactgttcacccacacgagccctgtgcttttggtgtaaataatgtacaatttgtggatgtcattgaatctagaggactttcccctttttatatttgtattaactttaacttattaaaaaaaaaaaaagaaaaagaaaaacaatttaaaaaaaaaaaaaaaagcaaccaaccccaacaacaaaaaagaatgttttggtattggagaagggatggtcagttagcctgtctgtcacacgacggaatggatactgggcccggggaccactttcatactcacgtcctcatccttggatacccaggggagggcgaaccgttttcgctcgtgtgtctgtacgcagcatgttgggatcgggagtttcggcacagactatcccatcaagccgttggctcctttcagctactacgttaccacgttcctaaaacgcaagctctccggaccagacggacacagggagaagctagtttctttcatgtgattgaaatgatgactctactcctaaaagggaaaaaacaatatccttgtttacagaagagaaacaaacaagccccactcagctcagtcacaggagagaacacagaaagtcttaggatcatgaactctgaaaaaaagagaaaccttatctttgctttgtggttcctttaaacacactcacacacacttggtcagagatgctgtgcttcttggaagcaaggactcaaaggcaaggtgcacgcagaggacgtttgagtctgggatgaagcatgtacgtattatttatatgatggaatttcacgtttttatgtaagcatgaaacacaggcagtatgagagaaagcaaggcccgtcatgctgtccgtacactacgtatgctgtagagccattttgtatgttgtgtaaaacaaaaagcattgatgaaaaagcaaaaggtgatgtatgtatatgagaaaattaattgtacgatatcattccagtacgttttgttgtacattttagtcttgtttactttctcttcattgttaagaggatgcgaactgtacagtttccagctagttacccatattagagaagaaataagagagtattagaagaaaacaggagagaaagaacatttgtgaattgcagttgtcaaaaaaaaaaatagcctagctggccttatttgtgaagcataattgcttttagcatatggaagtattttttcacattttctttgtataaaatttgtattaaacttaaatatctttt

SEQ ID NO: 426838 - DNA, 5103 bp, Homo sapiens
tcgaatcgtaaccgttcgtacgagaatcgctgtcctctccttgctcgagatccattgtgctctaaagatcagtttgaaactcgcagggctgcttaaacaagagctacagctattgaacaaactgctaccattttagcttcaacacaggaatgaggcagtgttgccagacgccattttaagaatcctgcataaatagcttagctaccgatgactctgcctgttttagcttggctgaagaggaaataaaaacagaacaggaggtggtagagggcatggatatctctactcgctccaaagatcctggctctgcagagagaacagcccagaaaagaaagttccccagccctccacattcttccaatggccactcgccgcaggacacatcaacaagccccattaaaaagaaaaagaaacctggcttactgaacagtaacaataaggagcagtcagaactaagacatggtccgttttactatatgaagcagccactcaccacagaccctgttgatgttgtaccgcaggatggacggaatgatttctactgctgggtttgtcaccgggaaggccaagtcctttgctgtgagctctgtccccgggtttatcacgctaagtgtctgagactgacatcggaaccagagggggactggttttgtcctgaatgtgagaaaattacagtagcagaatgcatcgagacccagagtaaagccatgacaatgctcaccattgaacagttatcctacctgctcaagtttgccattcagaaaatgaaacagccagggacagatgcattccagaagcccgttccattggaacagcaccctgactatgcggaatacatcttccatccaatggacctttgtacattggaaaagaatgcgaaaaagaaaatgtatggctgcacagaagccttcctggctgatgcaaagtggattttgcacaactgcatcatttataatgggggaaatcacaaattgacgcaaatagcgaaagtagtcatcaaaatctgtgaacatgagatgaatgaaatcgaagtatgtccagaatgttatctagctgcttgccaaaaacgagataactggttttgtgagccttgtagcaatccacatcctttggtctgggccaaactgaaggggtttccattctggcctgcaaaagctctaagggataaagacgggcaggtcgatgcccgattctttggacaacatgacagggcctgggttccaataaataattgctacctcatgtctaaagaaattcctttttctgtgaaaaagactaagagcatcttcaacagtgccatgcaagagatggaggtttacgtggagaacatccgcaggaagtttggggtttttaattactctccatttaggacaccctacacacccaacagccagtatcaaatgctgctcgatcccaccaaccccagcgccggcactgccaagatagacaagcaggagaaggtcaagctcaactttgacatgacggcatcccccaagatcctgatgagcaagcctgtgctgagtgggggcacaggccgccggatttccttgtcggatatgccgcgctcccccatgagcacaaactcttctgtgcacacgggctccgacgtggagcaggatgctgagaagaaggccacgtcgagccacttcagtgcgagcgaggagtccatggacttcctggataagagcacagcttcaccagcctccaccaagacgggacaagcagggagtttatccggcagcccaaagcccttctctcctcaactgtcagctcctatcacgacgaaaacggacaaaacctccaccaccggcagcatcctgaatcttaacctggatcgaagcaaagctgagatggatttgaaggagctgagcgagtcggtccagcaacagtccacccctgttcctctcatctctcccaagcgccagattcgtagcaggttccagctgaatcttgacaagaccatagagagttgcaaagcacaattaggcataaatgaaatctcggaagatgtctatacggccgtagagcacagcgattcggaggattctgagaagtcagatagtagcgatagtgagtatatcagtgatgatgagcagaagtctaagaacgagccagaagacacagaggacaaagaaggttgtcagatggacaaagagccatctgctgttaaaaaaaagcccaagcctacaaacccagtggagattaaagaggagctgaaaagcacgtcaccagccagcgagaaggcagaccctggagcagtcaaggacaaggccagccctgagcctgagaaggacttttccgaaaaggcaaaaccttcacctcaccccataaaggataaactgaagggaaaagatgagacggattccccaacagtccatttgggcctggactctgattcagagagcgaacttgtcatagatttaggagaagaccattctgggcgggagggtcgaaaaaataagaaggaacccaaagaaccatctcccaaacaggatgttgtaggtaaaactccaccatccacgacggtgggcagccattctcccccggaaacaccggtgctcacccgctcttccgcccaaacttccgcggctggcgccacagccaccaccagcacgtcctccacggtcaccgtcacggccccggcccccgccgccacaggaagcccagtgaaaaagcagaggccgcttttaccgaaggagactgccccggccgtgcagcgggtcgtgtggaactcatcaactgtccagcagaaggagatcacacagagcccatccacgtccaccatcaccctggtgaccagcacacagtcatcgcccctggtcaccagctcggggtccatgagcacccttgtgtcctcagtcaacgctgacctgcccatcgccactgcctcagctgatgtcgccgctgatattgccaagtacactagcaaaatgatggatgcaataaaaggaacaatgacagaaatatacaacgatctttctaaaaacactactggaagcacaatagctgagattcgcaggctgaggatcgagatagagaagctccagtggctgcaccagcaagagctctccgaaatgaaacacaacttagagctgaccatggcggagatgcggcagagcctggagcaggagcgggaccggctcatcgccgaggtgaagaagcagctggagttggagaagcagcaggcggtggatgagaccaagaagaagcagtggtgcgccaactgcaagaaggaggccatcttttactgctgttggaacaccagctactgtgactacccctgccagcaagcccactggcctgagcacatgaagtcctgcacccagtcagctactgctcctcagcaggaagcggatgctgaggtgaacacagaaacactaaataagtcctcccaggggagctcctcgagcacacaatcagcaccttcagaaacggccagcgcctccaaagagaaggagacgtcagctgagaaaagcaaggagagtggctcgacccttgacctttctggctccagagagacgccctcctccattctcttaggctccaaccaaggctctgaccattcccggagtaataaatccagttggagcagcagtgatgagaagaggggatcgacacgttccgatcacaacaccagtaccagcacgaagagcctcctcccgaaagagtctcggctggacaccttctgggactagcagtgaatcgggacacaaaccacccaccccattgggagaaaaacccagacgccaggaaaagaagaaacaacaaaggcaggagaacagccactttcagacttgaaaatgacaaaaccctcagttgagcctgagcccccggcgcgggggctgctacactacaggacacccagcatcggctttgactgcagactgttcacccacacgagccctgtgcttttggtgtaaataatgtacaatttgtggatgtcattgaatctagaggactttcccctttttatatttgtattaactttaacttattaaaaaaaaaaaaagaaaaagaaaaacaatttaaaaaaaaaaaaaaaagcaaccaaccccaacaacaaaaaagaatgttttggtattggagaagggatggtcagttagcctgtctgtcacacgacggaatggatactgggcccggggaccactttcatactcacgtcctcatccttggatacccaggggagggcgaaccgttttcgctcgtgtgtctgtacgcagcatgttgggatcgggagtttcggcacagactatcccatcaagccgttggctcctttcagctactacgttaccacgttcctaaaacgcaagctctccggaccagacggacacagggagaagctagtttctttcatgtgattgaaatgatgactctactcctaaaagggaaaaaacaatatccttgtttacagaagagaaacaaacaagccccactcagctcagtcacaggagagaacacagaaagtcttaggatcatgaactctgaaaaaaagagaaaccttatctttgctttgtggttcctttaaacacactcacacacacttggtcagagatgctgtgcttcttggaagcaaggactcaaaggcaaggtgcacgcagaggacgtttgagtctgggatgaagcatgtacgtattatttatatgatggaatttcacgtttttatgtaagcatgaaacacaggcagtatgagagaaagcaaggcccgtcatgctgtccgtacactacgtatgctgtagagccattttgtatgttgtgtaaaacaaaaagcattgatgaaaaagcaaaaggtgatgtatgtatatgagaaaattaattgtacgatatcattccagtacgttttgttgtacattttagtcttgtttactttctcttcattgttaagaggatgcgaactgtacagtttccagctagttacccatattagagaagaaataagagagtattagaagaaaacaggagagaaagaacatttgtgaattgcagttgtcaaaaaaaaaaatagcctagctggccttatttgtgaagcataattgcttttagcatatggaagtattttttcacattttctttgtataaaatttgtattaaacttaaatatctttt

SEQ ID NO: 426839 - DNA, 5232 bp, Homo sapiens
gatggctcttgctcacccgagcctcacaaagataatcgctcaggaagtgtttcagccaatccggggcggctttacactccgatttgccggggcagccaatcggggatgagcttttattaggcggccagatcatcagccgaagtgccaaaccctttttctgtgagaactaggagcctgtcctccatgttttataagtattgacattacacagtgttaacaatgcatccacagagcttggctgaagaggaaataaaaacagaacaggaggtggtagagggcatggatatctctactcgctccaaagatggagtctcactttgtcacccaggctggagtgcagtggcactatctcagctcactgcacccctctgcttcctggttcaagcgattctcctgcctcagcctcctgagtagctgggactagagatcctggctctgcagagagaacagcccagaaaagaaagttccccagccctccacattcttccaatggccactcgccgcaggacacatcaacaagccccattaaaaagaaaaagaaacctggcttactgaacagtaacaataaggagcagtcagaactaagacatggtccgttttactatatgaagcagccactcaccacagaccctgttgatgttgtaccgcaggatggacggaatgatttctactgctgggtttgtcaccgggaaggccaagtcctttgctgtgagctctgtccccgggtttatcacgctaagtgtctgagactgacatcggaaccagagggggactggttttgtcctgaatgtgagaaaattacagtagcagaatgcatcgagacccagagtaaagccatgacaatgctcaccattgaacagttatcctacctgctcaagtttgccattcagaaaatgaaacagccagggacagatgcattccagaagcccgttccattggaacagcaccctgactatgcggaatacatcttccatccaatggacctttgtacattggaaaagaatgcgaaaaagaaaatgtatggctgcacagaagccttcctggctgatgcaaagtggattttgcacaactgcatcatttataatgggggaaatcacaaattgacgcaaatagcgaaagtagtcatcaaaatctgtgaacatgagatgaatgaaatcgaagtatgtccagaatgttatctagctgcttgccaaaaacgagataactggttttgtgagccttgtagcaatccacatcctttggtctgggccaaactgaaggggtttccattctggcctgcaaaagctctaagggataaagacgggcaggtcgatgcccgattctttggacaacatgacagggcctgggttccaataaataattgctacctcatgtctaaagaaattcctttttctgtgaaaaagactaagagcatcttcaacagtgccatgcaagagatggaggtttacgtggagaacatccgcaggaagtttggggtttttaattactctccatttaggacaccctacacacccaacagccagtatcaaatgctgctcgatcccaccaaccccagcgccggcactgccaagatagacaagcaggagaaggtcaagctcaactttgacatgacggcatcccccaagatcctgatgagcaagcctgtgctgagtgggggcacaggccgccggatttccttgtcggatatgccgcgctcccccatgagcacaaactcttctgtgcacacgggctccgacgtggagcaggatgctgagaagaaggccacgtcgagccacttcagtgcgagcgaggagtccatggacttcctggataagagcacagcttcaccagcctccaccaagacgggacaagcagggagtttatccggcagcccaaagcccttctctcctcaactgtcagctcctatcacgacgaaaacggacaaaacctccaccaccggcagcatcctgaatcttaacctggatcgaagcaaagctgagatggatttgaaggagctgagcgagtcggtccagcaacagtccacccctgttcctctcatctctcccaagcgccagattcgtagcaggttccagctgaatcttgacaagaccatagagagttgcaaagcacaattaggcataaatgaaatctcggaagatgtctatacggccgtagagcacagcgattcggaggattctgagaagtcagatagtagcgatagtgagtatatcagtgatgatgagcagaagtctaagaacgagccagaagacacagaggacaaagaaggttgtcagatggacaaagagccatctgctgttaaaaaaaagcccaagcctacaaacccagtggagattaaagaggagctgaaaagcacgtcaccagccagcgagaaggcagaccctggagcagtcaaggacaaggccagccctgagcctgagaaggacttttccgaaaaggcaaaaccttcacctcaccccataaaggataaactgaagggaaaagatgagacggattccccaacagtccatttgggcctggactctgattcagagagcgaacttgtcatagatttaggagaagaccattctgggcgggagggtcgaaaaaataagaaggaacccaaagaaccatctcccaaacaggatgttgtaggtaaaactccaccatccacgacggtgggcagccattctcccccggaaacaccggtgctcacccgctcttccgcccaaacttccgcggctggcgccacagccaccaccagcacgtcctccacggtcaccgtcacggccccggcccccgccgccacaggaagcccagtgaaaaagcagaggccgcttttaccgaaggagactgccccggccgtgcagcgggtcgtgtggaactcatcaactgtccagcagaaggagatcacacagagcccatccacgtccaccatcaccctggtgaccagcacacagtcatcgcccctggtcaccagctcggggtccatgagcacccttgtgtcctcagtcaacgctgacctgcccatcgccactgcctcagctgatgtcgccgctgatattgccaagtacactagcaaaatgatggatgcaataaaaggaacaatgacagaaatatacaacgatctttctaaaaacactactggaagcacaatagctgagattcgcaggctgaggatcgagatagagaagctccagtggctgcaccagcaagagctctccgaaatgaaacacaacttagagctgaccatggcggagatgcggcagagcctggagcaggagcgggaccggctcatcgccgaggtgaagaagcagctggagttggagaagcagcaggcggtggatgagaccaagaagaagcagtggtgcgccaactgcaagaaggaggccatcttttactgctgttggaacaccagctactgtgactacccctgccagcaagcccactggcctgagcacatgaagtcctgcacccagtcagctactgctcctcagcaggaagcggatgctgaggtgaacacagaaacactaaataagtcctcccaggggagctcctcgagcacacaatcagcaccttcagaaacggccagcgcctccaaagagaaggagacgtcagctgagaaaagcaaggagagtggctcgacccttgacctttctggctccagagagacgccctcctccattctcttaggctccaaccaaggctctgaccattcccggagtaataaatccagttggagcagcagtgatgagaagaggggatcgacacgttccgatcacaacaccagtaccagcacgaagagcctcctcccgaaagagtctcggctggacaccttctgggactagcagtgaatcgggacacaaaccacccaccccattgggagaaaaacccagacgccaggaaaagaagaaacaacaaaggcaggagaacagccactttcagacttgaaaatgacaaaaccctcagttgagcctgagcccccggcgcgggggctgctacactacaggacacccagcatcggctttgactgcagactgttcacccacacgagccctgtgcttttggtgtaaataatgtacaatttgtggatgtcattgaatctagaggactttcccctttttatatttgtattaactttaacttattaaaaaaaaaaaaagaaaaagaaaaacaatttaaaaaaaaaaaaaaaagcaaccaaccccaacaacaaaaaagaatgttttggtattggagaagggatggtcagttagcctgtctgtcacacgacggaatggatactgggcccggggaccactttcatactcacgtcctcatccttggatacccaggggagggcgaaccgttttcgctcgtgtgtctgtacgcagcatgttgggatcgggagtttcggcacagactatcccatcaagccgttggctcctttcagctactacgttaccacgttcctaaaacgcaagctctccggaccagacggacacagggagaagctagtttctttcatgtgattgaaatgatgactctactcctaaaagggaaaaaacaatatccttgtttacagaagagaaacaaacaagccccactcagctcagtcacaggagagaacacagaaagtcttaggatcatgaactctgaaaaaaagagaaaccttatctttgctttgtggttcctttaaacacactcacacacacttggtcagagatgctgtgcttcttggaagcaaggactcaaaggcaaggtgcacgcagaggacgtttgagtctgggatgaagcatgtacgtattatttatatgatggaatttcacgtttttatgtaagcatgaaacacaggcagtatgagagaaagcaaggcccgtcatgctgtccgtacactacgtatgctgtagagccattttgtatgttgtgtaaaacaaaaagcattgatgaaaaagcaaaaggtgatgtatgtatatgagaaaattaattgtacgatatcattccagtacgttttgttgtacattttagtcttgtttactttctcttcattgttaagaggatgcgaactgtacagtttccagctagttacccatattagagaagaaataagagagtattagaagaaaacaggagagaaagaacatttgtgaattgcagttgtcaaaaaaaaaaatagcctagctggccttatttgtgaagcataattgcttttagcatatggaagtattttttcacattttctttgtataaaatttgtattaaacttaaatatctttt

SEQ ID NO: 426840 - DNA, 5106 bp, Homo sapiens
gatggctcttgctcacccgagcctcacaaagataatcgctcaggaagtgtttcagccaatccggggcggctttacactccgatttgccggggcagccaatcggggatgagcttttattaggcggccagatcatcagccgaagtgccaaaccctttttctgtgagaactaggagcctgtcctccatgttttataagtattgacattacacagtgttaacaatgcatccacagagtcccaaatctgccagcctgttctctcttcctaactgtggaaaaatgagacggttgcttgaacatttgttggcttggctgaagaggaaataaaaacagaacaggaggtggtagagggcatggatatctctactcgctccaaagatcctggctctgcagagagaacagcccagaaaagaaagttccccagccctccacattcttccaatggccactcgccgcaggacacatcaacaagccccattaaaaagaaaaagaaacctggcttactgaacagtaacaataaggagcaggatggacggaatgatttctactgctgggtttgtcaccgggaaggccaagtcctttgctgtgagctctgtccccgggtttatcacgctaagtgtctgagactgacatcggaaccagagggggactggttttgtcctgaatgtgagaaaattacagtagcagaatgcatcgagacccagagtaaagccatgacaatgctcaccattgaacagttatcctacctgctcaagtttgccattcagaaaatgaaacagccagggacagatgcattccagaagcccgttccattggaacagcaccctgactatgcggaatacatcttccatccaatggacctttgtacattggaaaagaatgcgaaaaagaaaatgtatggctgcacagaagccttcctggctgatgcaaagtggattttgcacaactgcatcatttataatgggggaaatcacaaattgacgcaaatagcgaaagtagtcatcaaaatctgtgaacatgagatgaatgaaatcgaagtatgtccagaatgttatctagctgcttgccaaaaacgagataactggttttgtgagccttgtagcaatccacatcctttggtctgggccaaactgaaggggtttccattctggcctgcaaaagctctaagggataaagacgggcaggtcgatgcccgattctttggacaacatgacagggcctgggttccaataaataattgctacctcatgtctaaagaaattcctttttctgtgaaaaagactaagagcatcttcaacagtgccatgcaagagatggaggtttacgtggagaacatccgcaggaagtttggggtttttaattactctccatttaggacaccctacacacccaacagccagtatcaaatgctgctcgatcccaccaaccccagcgccggcactgccaagatagacaagcaggagaaggtcaagctcaactttgacatgacggcatcccccaagatcctgatgagcaagcctgtgctgagtgggggcacaggccgccggatttccttgtcggatatgccgcgctcccccatgagcacaaactcttctgtgcacacgggctccgacgtggagcaggatgctgagaagaaggccacgtcgagccacttcagtgcgagcgaggagtccatggacttcctggataagagcacagcttcaccagcctccaccaagacgggacaagcagggagtttatccggcagcccaaagcccttctctcctcaactgtcagctcctatcacgacgaaaacggacaaaacctccaccaccggcagcatcctgaatcttaacctggatcgaagcaaagctgagatggatttgaaggagctgagcgagtcggtccagcaacagtccacccctgttcctctcatctctcccaagcgccagattcgtagcaggttccagctgaatcttgacaagaccatagagagttgcaaagcacaattaggcataaatgaaatctcggaagatgtctatacggccgtagagcacagcgattcggaggattctgagaagtcagatagtagcgatagtgagtatatcagtgatgatgagcagaagtctaagaacgagccagaagacacagaggacaaagaaggttgtcagatggacaaagagccatctgctgttaaaaaaaagcccaagcctacaaacccagtggagattaaagaggagctgaaaagcacgtcaccagccagcgagaaggcagaccctggagcagtcaaggacaaggccagccctgagcctgagaaggacttttccgaaaaggcaaaaccttcacctcaccccataaaggataaactgaagggaaaagatgagacggattccccaacagtccatttgggcctggactctgattcagagagcgaacttgtcatagatttaggagaagaccattctgggcgggagggtcgaaaaaataagaaggaacccaaagaaccatctcccaaacaggatgttgtaggtaaaactccaccatccacgacggtgggcagccattctcccccggaaacaccggtgctcacccgctcttccgcccaaacttccgcggctggcgccacagccaccaccagcacgtcctccacggtcaccgtcacggccccggcccccgccgccacaggaagcccagtgaaaaagcagaggccgcttttaccgaaggagactgccccggccgtgcagcgggtcgtgtggaactcatcaactgtccagcagaaggagatcacacagagcccatccacgtccaccatcaccctggtgaccagcacacagtcatcgcccctggtcaccagctcggggtccatgagcacccttgtgtcctcagtcaacgctgacctgcccatcgccactgcctcagctgatgtcgccgctgatattgccaagtacactagcaaaatgatggatgcaataaaaggaacaatgacagaaatatacaacgatctttctaaaaacactactggaagcacaatagctgagattcgcaggctgaggatcgagatagagaagctccagtggctgcaccagcaagagctctccgaaatgaaacacaacttagagctgaccatggcggagatgcggcagagcctggagcaggagcgggaccggctcatcgccgaggtgaagaagcagctggagttggagaagcagcaggcggtggatgagaccaagaagaagcagtggtgcgccaactgcaagaaggaggccatcttttactgctgttggaacaccagctactgtgactacccctgccagcaagcccactggcctgagcacatgaagtcctgcacccagtcagctactgctcctcagcaggaagcggatgctgaggtgaacacagaaacactaaataagtcctcccaggggagctcctcgagcacacaatcagcaccttcagaaacggccagcgcctccaaagagaaggagacgtcagctgagaaaagcaaggagagtggctcgacccttgacctttctggctccagagagacgccctcctccattctcttaggctccaaccaaggctctgaccattcccggagtaataaatccagttggagcagcagtgatgagaagaggggatcgacacgttccgatcacaacaccagtaccagcacgaagagcctcctcccgaaagagtctcggctggacaccttctgggactagcagtgaatcgggacacaaaccacccaccccattgggagaaaaacccagacgccaggaaaagaagaaacaacaaaggcaggagaacagccactttcagacttgaaaatgacaaaaccctcagttgagcctgagcccccggcgcgggggctgctacactacaggacacccagcatcggctttgactgcagactgttcacccacacgagccctgtgcttttggtgtaaataatgtacaatttgtggatgtcattgaatctagaggactttcccctttttatatttgtattaactttaacttattaaaaaaaaaaaaagaaaaagaaaaacaatttaaaaaaaaaaaaaaaagcaaccaaccccaacaacaaaaaagaatgttttggtattggagaagggatggtcagttagcctgtctgtcacacgacggaatggatactgggcccggggaccactttcatactcacgtcctcatccttggatacccaggggagggcgaaccgttttcgctcgtgtgtctgtacgcagcatgttgggatcgggagtttcggcacagactatcccatcaagccgttggctcctttcagctactacgttaccacgttcctaaaacgcaagctctccggaccagacggacacagggagaagctagtttctttcatgtgattgaaatgatgactctactcctaaaagggaaaaaacaatatccttgtttacagaagagaaacaaacaagccccactcagctcagtcacaggagagaacacagaaagtcttaggatcatgaactctgaaaaaaagagaaaccttatctttgctttgtggttcctttaaacacactcacacacacttggtcagagatgctgtgcttcttggaagcaaggactcaaaggcaaggtgcacgcagaggacgtttgagtctgggatgaagcatgtacgtattatttatatgatggaatttcacgtttttatgtaagcatgaaacacaggcagtatgagagaaagcaaggcccgtcatgctgtccgtacactacgtatgctgtagagccattttgtatgttgtgtaaaacaaaaagcattgatgaaaaagcaaaaggtgatgtatgtatatgagaaaattaattgtacgatatcattccagtacgttttgttgtacattttagtcttgtttactttctcttcattgttaagaggatgcgaactgtacagtttccagctagttacccatattagagaagaaataagagagtattagaagaaaacaggagagaaagaacatttgtgaattgcagttgtcaaaaaaaaaaatagcctagctggccttatttgtgaagcataattgcttttagcatatggaagtattttttcacattttctttgtataaaatttgtattaaacttaaatatctttt

SEQ ID NO: 426841 - DNA, 5194 bp, Homo sapiens
gatggctcttgctcacccgagcctcacaaagataatcgctcaggaagtgtttcagccaatccggggcggctttacactccgatttgccggggcagccaatcggggatgagcttttattaggcggccagatcatcagccgaagtgccaaaccctttttctgtgagaactaggagcctgtcctccatgttttataagtattgacattacacagtgttaacaatgcatccacagagcttggctgaagaggaaataaaaacagaacaggaggtggtagagggcatggatatctctactcgctccaaagatcctggctctgcagagagaacagcccagaaaagaaagttccccagccctccacattcttccaatggccactcgccgcaggacacatcaacaagccccattaaaaagaaaaagaaacctggcttactgaacagtaacaataaggagcagtcagaactaagacatggtccgttttactatatgaagcagccactcaccacagaccctgttgatgttgtaccgcaggatggacggaatgatttctactgctgggtttgtcaccgggaaggccaagtcctttgctgtgagctctgtccccgggtttatcacgctaagtgtctgagactgacatcggaaccagagggggactggttttgtcctgaatgtgagaaaattacagtagcagaatgcatcgagacccagagtaaagccatgacaatgctcaccattgaacagttatcctacctgctcaagtttgccattcagaaaatgaaacagccagggacagatgcattccagaagcccgttccattggaacagcaccctgactatgcggaatacatcttccatccaatggacctttgtacattggaaaagaatgcgaaaaagaaaatgtatggctgcacagaagccttcctggctgatgcaaagtggattttgcacaactgcatcatttataatgggggaaatcacaaattgacgcaaatagcgaaagtagtcatcaaaatctgtgaacatgagatgaatgaaatcgaagtatgtccagaatgttatctagctgcttgccaaaaacgagataactggttttgtgagccttgtagcaatccacatcctttggtctgggccaaactgaaggggtttccattctggcctgcaaaagctctaagggataaagacgggcaggtcgatgcccgattctttggacaacatgacagggcctgggttccaataaataattgctacctcatgtctaaagaaattcctttttctgtgaaaaagactaagagcatcttcaacagtgccatgcaagagatggaggtttacgtggagaacatccgcaggaagtttggggtttttaattactctccatttaggacaccctacacacccaacagccagtatcaaatgctgctcgatcccaccaaccccagcgccggcactgccaagatagacaagcaggagaaggtcaagctcaactttgacatgacggcatcccccaagatcctgatgagcaagcctgtgctgagtgggggcacaggccgccggatttccttgtcggatatgccgcgctcccccatgagcacaaactcttctgtgcacacgggctccgacgtggagcaggatgctgagaagaaggccacgtcgagccacttcagtgcgagcgaggagtccatggacttcctggataagagcacagcttcaccagcctccaccaagacgggacaagcagggagtttatccggcagcccaaagcccttctctcctcaactgtcagctcctatcacgacgaaaacggacaaaacctccaccaccggcagcatcctgaatcttaacctggatcgaagcaaagctgagatggatttgaaggagctgagcgagtcggtccagcaacagtccacccctgttcctctcatctctcccaagcgccagattcgtagcaggttccagctgaatcttgacaagaccatagagagttgcaaagcacaattaggcataaatgaaatctcggaagatgtctatacggccgtagagcacagcgattcggaggattctgagaagtcagatagtagcgatagtgagtatatcagtgatgatgagcagaagtctaagaacgagccagaagacacagaggacaaagaaggttgtcagatggacaaagagccatctgctgttaaaaaaaagcccaagcctacaaacccagtggagattaaagaggagctgaaaagcacgtcaccagccagcgagaaggcagaccctggagcagtcaaggacaaggccagccctgagcctgagaaggacttttccgaaaaggcaaaaccttcacctcaccccataaaggataaactgaagggaaaagatgagacggattccccaacagtccatttgggcctggactctgattcagagagcgaacttgtcatagatttaggagaagaccattctgggcgggagggtcgaaaaaataagaaggaacccaaagaaccatctcccaaacaggatgttgtaggtaaaactccaccatccacgacggtgggcagccattctcccccggaaacaccggtgctcacccgctcttccgcccaaacttccgcggctggcgccacagccaccaccagcacgtcctccacggtcaccgtcacggccccggcccccgccgccacaggaagcccagtgaaaaagcagaggccgcttttaccgaaggagactgccccggccgtgcagcgggtcgtgtggaactcatcaactgtccagcagaaggagatcacacagagcccatccacgtccaccatcaccctggtgaccagcacacagtcatcgcccctggtcaccagctcggggtccatgagcacccttgtgtcctcagtcaacgctgacctgcccatcgccactgcctcagctgatgtcgccgctgatattgccaagtacactagcaaaatgatggatgcaataaaaggaacaatgacagaaatatacaacgatctttctaaaaacactactggaagcacaatagctgagattcgcaggctgaggatcgagatagagaagctccagtggctgcaccagcaagagctctccgaaatgaaacacaacttagagctgaccatggcggagatgcggcagagcctggagcaggagcgggaccggctcatcgccgaggtgaagaagcagctggagttggagaagcagcaggcggtggatgagaccaagaagaagcagtggtgcgccaactgcaagaaggaggccatcttttactgctgttggaacaccagctactgtgactacccctgccagcaagcccactggcctgagcacatgaagtcctgcacccagtcagctactgctcctcagcaggaagcggatgctgaggtgaacacagaaacactaaataagtcctcccaggggagctcctcgagcacacaatcagcaccttcagaaacggccagcgcctccaaagagaaggagacgtcagctgagaaaagcaaggagagtggctcgacccttgacctttctggctccagagagacgccctcctccattctcttaggctccaaccaaggctctgttagcaaaaggtgtgacaagcaacctgcctatgccccaaccaccacagaccaccagccgcaccccaactaccccgcccagaagtaccattcccggagtaataaatccagttggagcagcagtgatgagaagaggggatcgacacgttccgatcacaacaccagtaccagcacgaagagcctcctcccgaaagagtctcggctggacaccttctgggactagcagtgaatcgggacacaaaccacccaccccattgggagaaaaacccagacgccaggaaaagaagaaacaacaaaggcaggagaacagccactttcagacttgaaaatgacaaaaccctcagttgagcctgagcccccggcgcgggggctgctacactacaggacacccagcatcggctttgactgcagactgttcacccacacgagccctgtgcttttggtgtaaataatgtacaatttgtggatgtcattgaatctagaggactttcccctttttatatttgtattaactttaacttattaaaaaaaaaaaaagaaaaagaaaaacaatttaaaaaaaaaaaaaaaagcaaccaaccccaacaacaaaaaagaatgttttggtattggagaagggatggtcagttagcctgtctgtcacacgacggaatggatactgggcccggggaccactttcatactcacgtcctcatccttggatacccaggggagggcgaaccgttttcgctcgtgtgtctgtacgcagcatgttgggatcgggagtttcggcacagactatcccatcaagccgttggctcctttcagctactacgttaccacgttcctaaaacgcaagctctccggaccagacggacacagggagaagctagtttctttcatgtgattgaaatgatgactctactcctaaaagggaaaaaacaatatccttgtttacagaagagaaacaaacaagccccactcagctcagtcacaggagagaacacagaaagtcttaggatcatgaactctgaaaaaaagagaaaccttatctttgctttgtggttcctttaaacacactcacacacacttggtcagagatgctgtgcttcttggaagcaaggactcaaaggcaaggtgcacgcagaggacgtttgagtctgggatgaagcatgtacgtattatttatatgatggaatttcacgtttttatgtaagcatgaaacacaggcagtatgagagaaagcaaggcccgtcatgctgtccgtacactacgtatgctgtagagccattttgtatgttgtgtaaaacaaaaagcattgatgaaaaagcaaaaggtgatgtatgtatatgagaaaattaattgtacgatatcattccagtacgttttgttgtacattttagtcttgtttactttctcttcattgttaagaggatgcgaactgtacagtttccagctagttacccatattagagaagaaataagagagtattagaagaaaacaggagagaaagaacatttgtgaattgcagttgtcaaaaaaaaaaatagcctagctggccttatttgtgaagcataattgcttttagcatatggaagtattttttcacattttctttgtataaaatttgtattaaacttaaatatctttt

SEQ ID NO: 426842 - DNA, 5141 bp, Homo sapiens
gatggctcttgctcacccgagcctcacaaagataatcgctcaggaagtgtttcagccaatccggggcggctttacactccgatttgccggggcagccaatcggggatgagcttttattaggcggccagatcatcagccgaagtgccaaaccctttttctgtgagaactaggagcctgtcctccatgttttataagtattgacattacacagtgttaacaatgcatccacagagcttggctgaagaggaaataaaaacagaacaggaggtggtagagggcatggatatctctactcgctccaaagatcctggctctgcagagagaacagcccagaaaagaaagttccccagccctccacattcttccaatggccactcgccgcaggacacatcaacaagccccattaaaaagaaaaagaaacctggcttactgaacagtaacaataaggagcagtcagaactaagacatggtccgttttactatatgaagcagccactcaccacagaccctgttgatgttgtaccgcaggatggacggaatgatttctactgctgggtttgtcaccgggaaggccaagtcctttgctgtgagctctgtccccgggtttatcacgctaagtgtctgagactgacatcggaaccagagggggactggttttgtcctgaatgtgagaaaattacagtagcagaatgcatcgagacccagagtaaagccatgacaatgctcaccattgaacagttatcctacctgctcaagtttgccattcagaaaatgaaacagccagggacagatgcattccagaagcccgttccattggaacagcaccctgactatgcggaatacatcttccatccaatggacctttgtacattggaaaagaatgcgaaaaagaaaatgtatggctgcacagaagccttcctggctgatgcaaagtggattttgcacaactgcatcatttataatgggggaaatcacaaattgacgcaaatagcgaaagtagtcatcaaaatctgtgaacatgagatgaatgaaatcgaagtatgtccagaatgttatctagctgcttgccaaaaacgagataactggttttgtgagccttgtagcaatccacatcctttggtctgggccaaactgaaggggtttccattctggcctgcaaaagctctaagggataaagacgggcaggtcgatgcccgattctttggacaacatgacagggcctgggttccaataaataattgctacctcatgtctaaagaaattcctttttctgtgaaaaagactaagagcatcttcaacagtgccatgcaagagatggaggtttacgtggagaacatccgcaggaagtttggggtttttaattactctccatttaggacaccctacacacccaacagccagtatcaaatgctgctcgatcccaccaaccccagcgccggcactgccaagatagacaagcaggagaaggtcaagctcaactttgacatgacggcatcccccaagatcctgatgagcaagcctgtgctgagtgggggcacaggccgccggatttccttgtcggatatgccgcgctcccccatgagcacaaactcttctgtgcacacgggctccgacgtggagcaggatgctgagaagaaggccacgtcgagccacttcagtgcgagcgaggagtccatggacttcctggataagagcacagcttcaccagcctccaccaagacgggacaagcagggagtttatccggcagcccaaagcccttctctcctcaactgtcagctcctatcacgacgaaaacggacaaaacctccaccaccggcagcatcctgaatcttaacctggatcgaagcaaagctgagatggatttgaaggagctgagcgagtcggtccagcaacagtccacccctgttcctctcatctctcccaagcgccagattcgtagcaggttccagctgaatcttgacaagaccatagagagttgcaaagcacaattaggcataaatgaaatctcggaagatgtctatacggccgtagagcacagcgattcggaggattctgagaagtcagatagtagcgatagtgagtatatcagtgatgatgagcagaagtctaagaacgagccagaagacacagaggacaaagaaggttgtcagatggacaaagagccatctgctgttaaaaaaaagcccaagcctacaaacccagtggagattaaagaggagctgaaaagcacgtcaccagccagcgagaaggcagaccctggagcagtcaaggacaaggccagccctgagcctgagaaggacttttccgaaaaggcaaaaccttcacctcaccccataaaggataaactgaagggaaaagatgagacggattccccaacagtccatttgggcctggactctgattcagagagcgaacttgtcatagatttaggagaagaccattctgggcgggagggtcgaaaaaataagaaggaacccaaagaaccatctcccaaacaggatgttgtaggtaaaactccaccatccacgacggtgggcagccattctcccccggaaacaccggtgctcacccgctcttccgcccaaacttccgcggctggcgccacagccaccaccagcacgtcctccacggtcaccgtcacggccccggcccccgccgccacaggaagcccagtgaaaaagcagaggccgcttttaccgaaggagactgccccggccgtgcagcgggtcgtgtggaactcatcaagtaagtttcaaacgtcctcccaaaagtggcacatgcagaagatgcagcgtcagcagcagcagcagcagcagcaaaaccagcagcagcagcctcagtcttcccaggggacgagatatcagaccagacaggctgtgaaagatgatggatgcaataaaaggaacaatgacagaaatatacaacgatctttctaaaaacactactggaagcacaatagctgagattcgcaggctgaggatcgagatagagaagctccagtggctgcaccagcaagagctctccgaaatgaaacacaacttagagctgaccatggcggagatgcggcagagcctggagcaggagcgggaccggctcatcgccgaggtgaagaagcagctggagttggagaagcagcaggcggtggatgagaccaagaagaagcagtggtgcgccaactgcaagaaggaggccatcttttactgctgttggaacaccagctactgtgactacccctgccagcaagcccactggcctgagcacatgaagtcctgcacccagtcagctactgctcctcagcaggaagcggatgctgaggtgaacacagaaacactaaataagtcctcccaggggagctcctcgagcacacaatcagcaccttcagaaacggccagcgcctccaaagagaaggagacgtcagctgagaaaagcaaggagagtggctcgacccttgacctttctggctccagagagacgccctcctccattctcttaggctccaaccaaggctctgttagcaaaaggtgtgacaagcaacctgcctatgccccaaccaccacagaccaccagccgcaccccaactaccccgcccagaagtaccattcccggagtaataaatccagttggagcagcagtgatgagaagaggggatcgacacgttccgatcacaacaccagtaccagcacgaagagcctcctcccgaaagagtctcggctggacaccttctgggactagcagtgaatcgggacacaaaccacccaccccattgggagaaaaacccagacgccaggaaaagaagaaacaacaaaggcaggagaacagccactttcagacttgaaaatgacaaaaccctcagttgagcctgagcccccggcgcgggggctgctacactacaggacacccagcatcggctttgactgcagactgttcacccacacgagccctgtgcttttggtgtaaataatgtacaatttgtggatgtcattgaatctagaggactttcccctttttatatttgtattaactttaacttattaaaaaaaaaaaaagaaaaagaaaaacaatttaaaaaaaaaaaaaaaagcaaccaaccccaacaacaaaaaagaatgttttggtattggagaagggatggtcagttagcctgtctgtcacacgacggaatggatactgggcccggggaccactttcatactcacgtcctcatccttggatacccaggggagggcgaaccgttttcgctcgtgtgtctgtacgcagcatgttgggatcgggagtttcggcacagactatcccatcaagccgttggctcctttcagctactacgttaccacgttcctaaaacgcaagctctccggaccagacggacacagggagaagctagtttctttcatgtgattgaaatgatgactctactcctaaaagggaaaaaacaatatccttgtttacagaagagaaacaaacaagccccactcagctcagtcacaggagagaacacagaaagtcttaggatcatgaactctgaaaaaaagagaaaccttatctttgctttgtggttcctttaaacacactcacacacacttggtcagagatgctgtgcttcttggaagcaaggactcaaaggcaaggtgcacgcagaggacgtttgagtctgggatgaagcatgtacgtattatttatatgatggaatttcacgtttttatgtaagcatgaaacacaggcagtatgagagaaagcaaggcccgtcatgctgtccgtacactacgtatgctgtagagccattttgtatgttgtgtaaaacaaaaagcattgatgaaaaagcaaaaggtgatgtatgtatatgagaaaattaattgtacgatatcattccagtacgttttgttgtacattttagtcttgtttactttctcttcattgttaagaggatgcgaactgtacagtttccagctagttacccatattagagaagaaataagagagtattagaagaaaacaggagagaaagaacatttgtgaattgcagttgtcaaaaaaaaaaatagcctagctggccttatttgtgaagcataattgcttttagcatatggaagtattttttcacattttctttgtataaaatttgtattaaacttaaatatctttt

SEQ ID NO: 426843 - DNA, 4951 bp, Homo sapiens
gatggctcttgctcacccgagcctcacaaagataatcgctcaggaagtgtttcagccaatccggggcggctttacactccgatttgccggggcagccaatcggggatgagcttttattaggcggccagatcatcagccgaagtgccaaaccctttttctgtgagaactaggagcctgtcctccatgttttataagtattgacattacacagtgttaacaatgcatccacagagcttggctgaagaggaaataaaaacagaacaggaggtggtagagggcatggatatctctactcgctccaaagatcctggctctgcagagagaacagcccagaaaagaaagttccccagccctccacattcttccaatggccactcgccgcaggacacatcaacaagccccattaaaaagaaaaagaaacctggcttactgaacagtaacaataaggagcagtcagaactaagacatggtccgttttactatatgaagcagccactcaccacagaccctgttgatgttgtaccgcaggatggacggaatgatttctactgctgggtttgtcaccgggaaggccaagtcctttgctgtgagctctgtccccgggtttatcacgctaagtgtctgagactgacatcggaaccagagggggactggttttgtcctgaatgtgagaaaattacagtagcagaatgcatcgagacccagagtaaagccatgacaatgctcaccattgaacagttatcctacctgctcaagtttgccattcagaaaatgaaacagccagggacagatgcattccagaagcccgttccattggaacagcaccctgactatgcggaatacatcttccatccaatggacctttgtacattggaaaagaatgcgaaaaagaaaatgtatggctgcacagaagccttcctggctgatgcaaagtggattttgcacaactgcatcatttataatgggggaaatcacaaattgacgcaaatagcgaaagtagtcatcaaaatctgtgaacatgagatgaatgaaatcgaagtatgtccagaatgttatctagctgcttgccaaaaacgagataactggttttgtgagccttgtagcaatccacatcctttggtctgggccaaactgaaggggtttccattctggcctgcaaaagctctaagggataaagacgggcaggtcgatgcccgattctttggacaacatgacagggcctgggttccaataaataattgctacctcatgtctaaagaaattcctttttctgtgaaaaagactaagagcatcttcaacagtgccatgcaagagatggaggtttacgtggagaacatccgcaggaagtttggggtttttaattactctccatttaggacaccctacacacccaacagccagtatcaaatgctgctcgatcccaccaaccccagcgccggcactgccaagatagacaagcaggagaaggtcaagctcaactttgacatgacggcatcccccaagatcctgatgagcaagcctgtgctgagtgggggcacaggccgccggatttccttgtcggatatgccgcgctcccccatgagcacaaactcttctgtgcacacgggctccgacgtggagcaggatgctgagaagaaggccacgtcgagccacttcagtgcgagcgaggagtccatggacttcctggataagagcacagcttcaccagcctccaccaagacgggacaagcagggagtttatccggcagcccaaagcccttctctcctcaactgtcagctcctatcacgacgaaaacggacaaaacctccaccaccggcagcatcctgaatcttaacctggatcgaagcaaagctgagatggatttgaaggagctgagcgagtcggtccagcaacagtccacccctgttcctctcatctctcccaagcgccagattcgtagcaggttccagctgaatcttgacaagaccatagagagttgcaaagcacaattaggcataaatgaaatctcggaagatgtctatacggccgtagagcacagcgattcggaggattctgagaagtcagatagtagcgatagtgagtatatcagtgatgatgagcagaagtctaagaacgagccagaagacacagaggacaaagaaggttgtcagatggacaaagagccatctgctgttaaaaaaaagcccaagcctacaaacccagtggagattaaagaggagctgaaaagcacgtcaccagccagcgagaaggcagaccctggagcagtcaaggacaaggccagccctgagcctgagaaggacttttccgaaaaggcaaaaccttcacctcaccccataaaggataaactgaagggaaaagatgagacggattccccaacagtccatttgggcctggactctgattcagagagcgaacttgtcatagatttaggagaagaccattctgggcgggagggtcgaaaaaataagaaggaacccaaagaaccatctcccaaacaggatgctgtccagcagaaggagatcacacagagcccatccacgtccaccatcaccctggtgaccagcacacagtcatcgcccctggtcaccagctcggggtccatgagcacccttgtgtcctcagtcaacgctgacctgcccatcgccactgcctcagctgatgtcgccgctgatattgccaagtacactagcaaaatgatggatgcaataaaaggaacaatgacagaaatatacaacgatctttctaaaaacactactggaagcacaatagctgagattcgcaggctgaggatcgagatagagaagctccagtggctgcaccagcaagagctctccgaaatgaaacacaacttagagctgaccatggcggagatgcggcagagcctggagcaggagcgggaccggctcatcgccgaggtgaagaagcagctggagttggagaagcagcaggcggtggatgagaccaagaagaagcagtggtgcgccaactgcaagaaggaggccatcttttactgctgttggaacaccagctactgtgactacccctgccagcaagcccactggcctgagcacatgaagtcctgcacccagtcagctactgctcctcagcaggaagcggatgctgaggtgaacacagaaacactaaataagtcctcccaggggagctcctcgagcacacaatcagcaccttcagaaacggccagcgcctccaaagagaaggagacgtcagctgagaaaagcaaggagagtggctcgacccttgacctttctggctccagagagacgccctcctccattctcttaggctccaaccaaggctctgttagcaaaaggtgtgacaagcaacctgcctatgccccaaccaccacagaccaccagccgcaccccaactaccccgcccagaagtaccattcccggagtaataaatccagttggagcagcagtgatgagaagaggggatcgacacgttccgatcacaacaccagtaccagcacgaagagcctcctcccgaaagagtctcggctggacaccttctgggactagcagtgaatcgggacacaaaccacccaccccattgggagaaaaacccagacgccaggaaaagaagaaacaacaaaggcaggagaacagccactttcagacttgaaaatgacaaaaccctcagttgagcctgagcccccggcgcgggggctgctacactacaggacacccagcatcggctttgactgcagactgttcacccacacgagccctgtgcttttggtgtaaataatgtacaatttgtggatgtcattgaatctagaggactttcccctttttatatttgtattaactttaacttattaaaaaaaaaaaaagaaaaagaaaaacaatttaaaaaaaaaaaaaaaagcaaccaaccccaacaacaaaaaagaatgttttggtattggagaagggatggtcagttagcctgtctgtcacacgacggaatggatactgggcccggggaccactttcatactcacgtcctcatccttggatacccaggggagggcgaaccgttttcgctcgtgtgtctgtacgcagcatgttgggatcgggagtttcggcacagactatcccatcaagccgttggctcctttcagctactacgttaccacgttcctaaaacgcaagctctccggaccagacggacacagggagaagctagtttctttcatgtgattgaaatgatgactctactcctaaaagggaaaaaacaatatccttgtttacagaagagaaacaaacaagccccactcagctcagtcacaggagagaacacagaaagtcttaggatcatgaactctgaaaaaaagagaaaccttatctttgctttgtggttcctttaaacacactcacacacacttggtcagagatgctgtgcttcttggaagcaaggactcaaaggcaaggtgcacgcagaggacgtttgagtctgggatgaagcatgtacgtattatttatatgatggaatttcacgtttttatgtaagcatgaaacacaggcagtatgagagaaagcaaggcccgtcatgctgtccgtacactacgtatgctgtagagccattttgtatgttgtgtaaaacaaaaagcattgatgaaaaagcaaaaggtgatgtatgtatatgagaaaattaattgtacgatatcattccagtacgttttgttgtacattttagtcttgtttactttctcttcattgttaagaggatgcgaactgtacagtttccagctagttacccatattagagaagaaataagagagtattagaagaaaacaggagagaaagaacatttgtgaattgcagttgtcaaaaaaaaaaatagcctagctggccttatttgtgaagcataattgcttttagcatatggaagtattttttcacattttctttgtataaaatttgtattaaacttaaatatctttt

SEQ ID NO: 426844 - DNA, 2181 bp, Homo sapiens
accatgatgaatgccctatttacagatgaagactcgggctaggttattgcccatgggcacacagccagggcttctcccagccagagctgaccatggcggagatgcggcagagcctggagcaggagcgggaccggctcatcgccgaggtgaagaagcagctggagttggagaagcagcaggcggtggatgagaccaagaagaagcagtggtgcgccaactgcaagaaggaggccatcttttactgctgttggaacaccagctactgtgactacccctgccagcaagcccactggcctgagcacatgaagtcctgcacccagtcagctactgctcctcagcaggaagcggatgctgaggtgaacacagaaacactaaataagtcctcccaggggagctcctcgagcacacaatcagcaccttcagaaacggccagcgcctccaaagagaaggagacgtcagctgagaaaagcaaggagagtggctcgacccttgacctttctggctccagagagacgccctcctccattctcttaggctccaaccaaggctctgttagcaaaaggtgtgacaagcaacctgcctatgccccaaccaccacagaccaccagccgcaccccaactaccccgcccagaagtaccattcccggagtaataaatccagttggagcagcagtgatgagaagaggggatcgacacgttccgatcacaacaccagtaccagcacgaagagcctcctcccgaaagagtctcggctggacaccttctgggactagcagtgaatcgggacacaaaccacccaccccattgggagaaaaacccagacgccaggaaaagaagaaacaacaaaggcaggagaacagccactttcagacttgaaaatgacaaaaccctcagttgagcctgagcccccggcgcgggggctgctacactacaggacacccagcatcggctttgactgcagactgttcacccacacgagccctgtgcttttggtgtaaataatgtacaatttgtggatgtcattgaatctagaggactttcccctttttatatttgtattaactttaacttattaaaaaaaaaaaaagaaaaagaaaaacaatttaaaaaaaaaaaaaaaagcaaccaaccccaacaacaaaaaagaatgttttggtattggagaagggatggtcagttagcctgtctgtcacacgacggaatggatactgggcccggggaccactttcatactcacgtcctcatccttggatacccaggggagggcgaaccgttttcgctcgtgtgtctgtacgcagcatgttgggatcgggagtttcggcacagactatcccatcaagccgttggctcctttcagctactacgttaccacgttcctaaaacgcaagctctccggaccagacggacacagggagaagctagtttctttcatgtgattgaaatgatgactctactcctaaaagggaaaaaacaatatccttgtttacagaagagaaacaaacaagccccactcagctcagtcacaggagagaacacagaaagtcttaggatcatgaactctgaaaaaaagagaaaccttatctttgctttgtggttcctttaaacacactcacacacacttggtcagagatgctgtgcttcttggaagcaaggactcaaaggcaaggtgcacgcagaggacgtttgagtctgggatgaagcatgtacgtattatttatatgatggaatttcacgtttttatgtaagcatgaaacacaggcagtatgagagaaagcaaggcccgtcatgctgtccgtacactacgtatgctgtagagccattttgtatgttgtgtaaaacaaaaagcattgatgaaaaagcaaaaggtgatgtatgtatatgagaaaattaattgtacgatatcattccagtacgttttgttgtacattttagtcttgtttactttctcttcattgttaagaggatgcgaactgtacagtttccagctagttacccatattagagaagaaataagagagtattagaagaaaacaggagagaaagaacatttgtgaattgcagttgtcaaaaaaaaaaatagcctagctggccttatttgtgaagcataattgcttttagcatatggaagtattttttcacattttctttgtataaaatttgtattaaacttaaatatctttt

SEQ ID NO: 426845 - DNA, 1550 bp, Homo sapiens
atctgcggcctggtctctctctcctatcctccccatggagcgccaaggtcctctgtcagagctctccctgtcctgccatccttctaccagcacgaagagcctcctcccgaaagagtctcggctggacaccttctgggactagcagtgaatcgggacacaaaccacccaccccattgggagaaaaacccagacgccaggaaaagaagaaacaacaaaggcaggagaacagccactttcagacttgaaaatgacaaaaccctcagttgagcctgagcccccggcgcgggggctgctacactacaggacacccagcatcggctttgactgcagactgttcacccacacgagccctgtgcttttggtgtaaataatgtacaatttgtggatgtcattgaatctagaggactttcccctttttatatttgtattaactttaacttattaaaaaaaaaaaaagaaaaagaaaaacaatttaaaaaaaaaaaaaaaagcaaccaaccccaacaacaaaaaagaatgttttggtattggagaagggatggtcagttagcctgtctgtcacacgacggaatggatactgggcccggggaccactttcatactcacgtcctcatccttggatacccaggggagggcgaaccgttttcgctcgtgtgtctgtacgcagcatgttgggatcgggagtttcggcacagactatcccatcaagccgttggctcctttcagctactacgttaccacgttcctaaaacgcaagctctccggaccagacggacacagggagaagctagtttctttcatgtgattgaaatgatgactctactcctaaaagggaaaaaacaatatccttgtttacagaagagaaacaaacaagccccactcagctcagtcacaggagagaacacagaaagtcttaggatcatgaactctgaaaaaaagagaaaccttatctttgctttgtggttcctttaaacacactcacacacacttggtcagagatgctgtgcttcttggaagcaaggactcaaaggcaaggtgcacgcagaggacgtttgagtctgggatgaagcatgtacgtattatttatatgatggaatttcacgtttttatgtaagcatgaaacacaggcagtatgagagaaagcaaggcccgtcatgctgtccgtacactacgtatgctgtagagccattttgtatgttgtgtaaaacaaaaagcattgatgaaaaagcaaaaggtgatgtatgtatatgagaaaattaattgtacgatatcattccagtacgttttgttgtacattttagtcttgtttactttctcttcattgttaagaggatgcgaactgtacagtttccagctagttacccatattagagaagaaataagagagtattagaagaaaacaggagagaaagaacatttgtgaattgcagttgtcaaaaaaaaaaatagcctagctggccttatttgtgaagcataattgcttttagcatatggaagtattttttcacattttctttgtataaaatttgtattaaacttaaatatctttt

SEQ ID NO: 426846 - DNA, 3594 bp, Homo sapiens
gatggctcttgctcacccgagcctcacaaagataatcgctcaggaagtgtttcagccaatccggggcggctttacactccgatttgccggggcagccaatcggggatgagcttttattaggcggccagatcatcagccgaagtgccaaaccctttttctgtgagaactaggagcctgtcctccatgttttataagtattgacattacacagtgttaacaatgcatccacagagcttggctgaagaggaaataaaaacagaacaggaggtggtagagggcatggatatctctactcgctccaaagatcctggctctgcagagagaacagcccagaaaagaaagttccccagccctccacattcttccaatggccactcgccgcaggacacatcaacaagccccattaaaaagaaaaagaaacctggcttactgaacagtaacaataaggagcagtcagaactaagacatggtccgttttactatatgaagcagccactcaccacagaccctgttgatgttgtaccgcaggatggacggaatgatttctactgctgggtttgtcaccgggaaggccaagtcctttgctgtgagctctgtccccgggtttatcacgctaagtgtctgagactgacatcggaaccagagggggactggttttgtcctgaatgtgagaaaattacagtagcagaatgcatcgagacccagagtaaagccatgacaatgctcaccattgaacagttatcctacctgctcaagtttgccattcagaaaatgaaacagccagggacagatgcattccagaagcccgttccattggaacagcaccctgactatgcggaatacatcttccatccaatggacctttgtacattggaaaagaatgcgaaaaagaaaatgtatggctgcacagaagccttcctggctgatgcaaagtggattttgcacaactgcatcatttataatgggggaaatcacaaattgacgcaaatagcgaaagtagtcatcaaaatctgtgaacatgagatgaatgaaatcgaagtatgtccagaatgttatctagctgcttgccaaaaacgagataactggttttgtgagccttgtagcaatccacatcctttggtctgggccaaactgaaggggtttccattctggcctgcaaaagctctaagggataaagacgggcaggtcgatgcccgattctttggacaacatgacagggcctgggttccaataaataattgctacctcatgtctaaagaaattcctttttctgtgaaaaagactaagagcatcttcaacagtgccatgcaagagatggaggtttacgtggagaacatccgcaggaagtttggggtttttaattactctccatttaggacaccctacacacccaacagccagtatcaaatgctgctcgatcccaccaaccccagcgccggcactgccaagatagacaagcaggagaaggtcaagctcaactttgacatgacggcatcccccaagatcctgatgagcaagcctgtgctgagtgggggcacaggccgccggatttccttgtcggatatgccgcgctcccccatgagcacaaactcttctgtgcacacgggctccgacgtggagcaggatgctgagaagaaggccacgtcgagccacttcagtgcgagcgaggagtccatggacttcctggataagagcacagcttcaccagcctccaccaagacgggacaagcagggagtttatccggcagcccaaagcccttctctcctcaactgtcagctcctatcacgacgaaaacggacaaaacctccaccaccggcagcatcctgaatcttaacctggatcgaagcaaagctgagatggatttgaaggagctgagcgagtcggtccagcaacagtccacccctgttcctctcatctctcccaagcgccagattcgtagcaggttccagctgaatcttgacaagaccatagagagttgcaaagcacaattaggcataaatgaaatctcggaagatgtctatacggccgtagagcacagcgattcggaggattctgagaagtcagatagtagcgatagtgagtatatcagtgatgatgagcagaagtctaagaacgagccagaagacacagaggacaaagaaggttgtcagatggacaaagagccatctgctgttaaaaaaaagcccaagcctacaaacccagtggagattaaagaggagctgaaaagcacgtcaccagccagcgagaaggcagaccctggagcagtcaaggacaaggccagccctgagcctgagaaggacttttccgaaaaggcaaaaccttcacctcaccccataaaggataaactgaagggaaaagatgagacggattccccaacagtccatttgggcctggactctgattcagagagcgaacttgtcatagatttaggagaagaccattctgggcgggagggtcgaaaaaataagaaggaacccaaagaaccatctcccaaacaggatgttgtaggtaaaactccaccatccacgacggtgggcagccattctcccccggaaacaccggtgctcacccgctcttccgcccaaacttccgcggctggcgccacagccaccaccagcacgtcctccacggtcaccgtcacggccccggcccccgccgccacaggaagcccagtgaaaaagcagaggccgcttttaccgaaggagactgccccggccgtgcagcgggtcgtgtggaactcatcaactgtccagcagaaggagatcacacagagcccatccacgtccaccatcaccctggtgaccagcacacagtcatcgcccctggtcaccagctcggggtccatgagcacccttgtgtcctcagtcaacgctgacctgcccatcgccactgcctcagctgatgtcgccgctgatattgccaagtacactagcaaaatgatggatgcaataaaaggaacaatgacagaaatatacaacgatctttctaaaaacactactggaagcacaatagctgagattcgcaggctgaggatcgagatagagaagctccagtggctgcaccagcaagagctctccgaaatgaaacacaacttagagctgaccatggcggagatgcggcagagcctggagcaggagcgggaccggctcatcgccgaggtgaagaagcagctggagttggagaagcagcaggcggtggatgagaccaagaagaagcagtggtgcgccaactgcaagaaggaggccatcttttactgctgttggaacaccagctactgtgactacccctgccagcaagcccactggcctgagcacatgaagtcctgcacccagtcagctactgctcctcagcaggaagcggatgctgaggtgaacacagaaacactaaataagtcctcccaggggagctcctcgagcacacaatcagcaccttcagaaacggccagcgcctccaaagagaaggagacgtcagctgagaaaagcaaggagagtggctcgacccttgacctttctggctccagagagacgccctcctccattctcttaggctccaaccaaggctctgttagcaccaggtgtgacagagcaacctgc

SEQ ID NO: 426847 - DNA, 672 bp, Homo sapiens
agcggagaagccagctgagagcgcctgcgcggctgtcggttgatggggaggtcaggtctgggaaactaggccctggggttttccctgagcaggagcggtgcccgagggcctcaggctgaacctcctcagaagagcaactggagatagaagcatgaatcttttatccatacgttccgccaggctcgagaggtccagcaggtaactgccaaaggtggaaactgttcacacttgcctcccatcctgcctgcagaaaacccagactgcattcagtgtcctcagtgtagccaccactttgctcccaaggtggctgagcaacacattcccaagtgtaagaccatcaagaactgtcttccacctctaaggaagcattatagttgagcagacaacaatggaaacttttggatagttcagaaagctctgcttctcttcagcagtaaatgggagtagaatttgatgcaaagcagaaagaaatcaaacagctcccagatctgcctgcagagctaaaatctgtgaggagagagccactgctaagcagcaggaggcagaaggaagccccagcttcccactaaattacaaccttgggctggtatgctttatgttattgccctcagaattgatgggtgaagacactgaagagtcatgagcaggctccattaaagctcttttcttgca

SEQ ID NO: 426848 - DNA, 2029 bp, Homo sapiens
agcggagaagccagctgagagcgcctgcgcggctgtcggttgatggggaggtcaggtctgggaaactaggccctggggttttccctgagcaggagcggtgcccgagggcctcaggcgtcagtccaggccctgaatggctggtctccagcggttggcgtcacatctgcctgtgggcgttatgctcccacataatacaacggaagctccagggccccactcagccaagcaagactcttacgaacaaggtgactcttcccagcagtccttgaaggggcacctgaggaacaatttccagaagcagcttttgagcaacaaagagttgattctggataaagtctatactcaccccaaatggaacacccaaacaaaagcccggagctactcctatccccactgtactggaatcagccagcaagatccagaaagtgattcccagggccaaggaaatggtttgttttactcgtcaggccctcaatcctggtatcccaaagccaataaccaggactttatcccctttacaaagaaacgagttggagtggaccgggcgttcccattgaaacccatggtccacaggaagtcgtgcagtacaggtgaggctggcactgatggggaccataatgtctacccaaggccccctgagccgagagagttttcatctaggaactttggtgtgaggaaccagggcaacttttctgtggttggtactgttcttgctgccacgcaggcggagaaggccgtggcaaactttgacaggacggagtgggtgcagatccgaagactagaagctgcaggggagagcttagaggaggaaatccgaagaaagcagattctcctgaggggaaagctgaagaagacagaggaggaactcagaaggatccagacgcaaaaggaacaggccaaggaaaatgaaaacggagagctacagaaaattatactccccaggagcagagttaaaggtaataaaagcaacaccatgtacaaacctatcttctccccagaatttgagtttgaggaagaatttagtagagacaggagagaggatgaaacttggggacggtctcaacaaaattcagttccattccagttctctgattatagaatccagaggctcaaaagggaaaggctggtagcaagcaataataaaattcgagacccagtctcagagccatcggtggagaaattctccccgccttcagaaacaccagtcggtgctttgcagggatctgccagaaattccagcctgtccatggcaccagactcctcaggttccagcggctccattgaagagccacagctgggtgagtgcagccactgtgggcgcaaattcctctcgttcaggctggagagacactccaacatctgcagcaggatgcggggttccaagaggaaagtgtttgactcctccagggcccgggctaagggcacagaactagagcagtacttgaactggaaggggccagcttcagccaaggctgaacctcctcagaagagcaactggagatagaagcatgaatcttttatccatacgttccgccaggctcgagaggtccagcaggtaactgccaaaggtggaaactgttcacacttgcctcccatcctgcctgcagaaaacccagactgcattcagtgtcctcagtgtagccaccactttgctcccaaggtggctgagcaacacattcccaagtgtaagaccatcaagaactgtcttccacctctaaggaagcattatagttgagcagacaacaatggaaacttttggatagttcagaaagctctgcttctcttcagcagtaaatgggagtagaatttgatgcaaagcagaaagaaatcaaacagctcccagatctgcctgcagagctaaaatctgtgaggagagagccactgctaagcagcaggaggcagaaggaagccccagcttcccactaaattacaaccttgggctggtatgctttatgttattgccctcagaattgatgggtgaagacactgaagagtcatgagcaggctccattaaagctcttttcttgca

SEQ ID NO: 426849 - DNA, 1579 bp, Homo sapiens
agcggagaagccagctgagagcgcctgcgcggctgtcggttgatggggaggtcaggtctgggaaactaggccctggggttttccctgagcaggagcggtgcccgagggcctcaggcgtcagtccaggccctgaatggctggtctccagcggttggcgtcacatctgcctgtgggcgttatgctcccacataatacaacggaagctccagggccccactcagccaagcaagactcttacgaacaaggtgactcttcccagcagtccttgaaggggcacctgaggaacaatttccagaagcagcttttgagcaacaaagagttgattctggataaagtctatactcaccccaaatggaacacccaaacaaaagcccggagctactcctatccccactgtactggaatcagccagcaagatccagaaagtgattcccagggccaaggaaatggtttgttttactcgtcaggccctcaatcctggtatcccaaagccaataaccaggactttatcccctttacaaagaaacgagttggagtggaccgggcgttcccattgaaacccatggtccacaggaagtcgtgcagtacaggtgaggctggcactgatggggaccataatgtctacccaaggccccctgagccgagagagttttcatctaggaactttggtgtgaggaaccagggcaacttttctgtggttggtactgttcttgctgccacgcaggcggagaaggccgtggcaaactttgacaggacggagtgggtgcagatccgaagactagaagctgcaggggagagcttagaggaggaaatccgaagaaagcagattctcctgaggggaaagctgaagaagacagaggaggaactcagaaggatccagacgcaaaaggaacaggccaaggaaaatgaaaacggagagctacagaaaattatactccccaggagcagagttaaagtgctgtgcctttggaagctgagtggttgtaccttcctgtcattcctctagagtactcaagaacaggctgaacctcctcagaagagcaactggagatagaagcatgaatcttttatccatacgttccgccaggctcgagaggtccagcaggtaactgccaaaggtggaaactgttcacacttgcctcccatcctgcctgcagaaaacccagactgcattcagtgtcctcagtgtagccaccactttgctcccaaggtggctgagcaacacattcccaagtgtaagaccatcaagaactgtcttccacctctaaggaagcattatagttgagcagacaacaatggaaacttttggatagttcagaaagctctgcttctcttcagcagtaaatgggagtagaatttgatgcaaagcagaaagaaatcaaacagctcccagatctgcctgcagagctaaaatctgtgaggagagagccactgctaagcagcaggaggcagaaggaagccccagcttcccactaaattacaaccttgggctggtatgctttatgttattgccctcagaattgatgggtgaagacactgaagagtcatgagcaggctccattaaagctcttttcttgca

SEQ ID NO: 426850 - DNA, 1778 bp, Homo sapiens
agcggagaagccagctgagagcgcctgcgcggctgtcggttgatggggaggtcaggtctgggaaactaggccctggggttttccctgagcaggagcggtgcccgagggcctcaggtacgcagaagggcggggagacatgggatcagcacctccacctcctaagggaccgaagggcaggagagcgagaggacttgtccccagaggtggagtccgaagtgggggcgccccagttgacccttcgggacaaaacgtgacttcagccttaaggatctaaaaccggccgcggtcaggtcaggtggccctcaacgctcaggcgtcagtccaggccctgaatggctggtctccagcggttggcgtcacatctgcctgtgggcgttatgctcccacataatacaacggaagctccagggccccactcagccaagcaagactcttacgaacaaggtgactcttcccagcagtccttgaaggggcacctgaggaacaatttccagaagcagcttttgagcaacaaagagttgattctggataaagtctatactcaccccaaatggaacacccaaacaaaagcccggagctactcctatccccactgtactggaatcagccagcaagatccagaaagtgattcccagggccaaggaaatggtttgttttactcgtcaggccctcaatcctggtatcccaaagccaataaccaggactttatcccctttacaaagaaacgagttggagtggaccgggcgttcccattgaaacccatggtccacaggaagtcgtgcagtacaggtgaggctggcactgatggggaccataatgtctacccaaggccccctgagccgagagagttttcatctaggaactttggtgtgaggaaccagggcaacttttctgtggttggtactgttcttgctgccacgcaggcggagaaggccgtggcaaactttgacaggacggagtgggtgcagatccgaagactagaagctgcaggggagagcttagaggaggaaatccgaagaaagcagattctcctgaggggaaagctgaagaagacagaggaggaactcagaaggatccagacgcaaaaggaacaggccaaggaaaatgaaaacggagagctacagaaaattatactccccaggagcagagttaaagtgctgtgcctttggaagctgagtggttgtaccttcctgtcattcctctagagtactcaagaacaggctgaacctcctcagaagagcaactggagatagaagcatgaatcttttatccatacgttccgccaggctcgagaggtccagcaggtaactgccaaaggtggaaactgttcacacttgcctcccatcctgcctgcagaaaacccagactgcattcagtgtcctcagtgtagccaccactttgctcccaaggtggctgagcaacacattcccaagtgtaagaccatcaagaactgtcttccacctctaaggaagcattatagttgagcagacaacaatggaaacttttggatagttcagaaagctctgcttctcttcagcagtaaatgggagtagaatttgatgcaaagcagaaagaaatcaaacagctcccagatctgcctgcagagctaaaatctgtgaggagagagccactgctaagcagcaggaggcagaaggaagccccagcttcccactaaattacaaccttgggctggtatgctttatgttattgccctcagaattgatgggtgaagacactgaagagtcatgagcaggctccattaaagctcttttcttgca

SEQ ID NO: 426851 - DNA, 589 bp, Homo sapiens
tcaggaaggagataggtgccaacttgaatgatcagtctcccttttacattacaggctgaacctcctcagaagagcaactggagatagaagcatgaatcttttatccatacgttccgccaggctcgagaggtccagcaggtaactgccaaaggtggaaactgttcacacttgcctcccatcctgcctgcagaaaacccagactgcattcagtgtcctcagtgtagccaccactttgctcccaaggtggctgagcaacacattcccaagtgtaagaccatcaagaactgtcttccacctctaaggaagcattatagttgagcagacaacaatggaaacttttggatagttcagaaagctctgcttctcttcagcagtaaatgggagtagaatttgatgcaaagcagaaagaaatcaaacagctcccagatctgcctgcagagctaaaatctgtgaggagagagccactgctaagcagcaggaggcagaaggaagccccagcttcccactaaattacaaccttgggctggtatgctttatgttattgccctcagaattgatgggtgaagacactgaagagtcatgagcaggc

SEQ ID NO: 426852 - DNA, 1514 bp, Homo sapiens
agcggagaagccagctgagagcgcctgcgcggctgtcggttgatggggaggtcaggtctgggaaactaggccctggggttttccctgagcaggagcggtgcccgagggcctcaggcgtcagtccaggccctgaatggctggtctccagcggttggcgtcacatctgcctgtgggcgttatgctcccacataatacaacggaagctccagggccccactcagccaagcaagactcttacgaacaaggtgactcttcccagcagtccttgaaggggcacctgaggaacaatttccagaagcagcttttgagcaacaaagagttgattctggataaagtctatactcaccccaaatggaacacccaaacaaaagcccggagctactcctatccccactgtactggaatcagccagcaagatccagaaagtgattcccagggccaaggaaatggtttgttttactcgtcaggccctcaatcctggtatcccaaagccaataaccaggactttatcccctttacaaagaaacgagttggagtggaccgggcgttcccattgaaacccatggtccacaggaagtcgtgcagtacaggtgaggctggcactgatggggaccataatgtctacccaaggccccctgagccgagagagttttcatctaggaactttggtgtgaggaaccagggcaacttttctgtggttggtactgttcttgctgccacgcaggcggagaaggccgtggcaaactttgacaggacggagtgggtgcagatccgaagactagaagctgcaggggagagcttagaggaggaaatccgaagaaagcagattctcctgaggggaaagctgaagaagacagaggaggaactcagaaggatccagacgcaaaaggaacaggccaaggaaaatgaaaacggagagctacagaaaattatactccccaggagcagagttaaaggctgaacctcctcagaagagcaactggagatagaagcatgaatcttttatccatacgttccgccaggctcgagaggtccagcaggtaactgccaaaggtggaaactgttcacacttgcctcccatcctgcctgcagaaaacccagactgcattcagtgtcctcagtgtagccaccactttgctcccaaggtggctgagcaacacattcccaagtgtaagaccatcaagaactgtcttccacctctaaggaagcattatagttgagcagacaacaatggaaacttttggatagttcagaaagctctgcttctcttcagcagtaaatgggagtagaatttgatgcaaagcagaaagaaatcaaacagctcccagatctgcctgcagagctaaaatctgtgaggagagagccactgctaagcagcaggaggcagaaggaagccccagcttcccactaaattacaaccttgggctggtatgctttatgttattgccctcagaattgatgggtgaagacactgaagagtcatgagcaggctccattaaagctcttttcttgca

SEQ ID NO: 426853 - DNA, 2820 bp, Homo sapiens
  misc_feature (2815)..(2819): n is a, c, g, or t
agaaaaggggtttacaaatctctgtgggatgttggagcaggcttcctggaggaagcaggattcagtcaccaaaattttccagaagaagaagatcttggtgacgtacagtttccgtcagtctttccccctcgtggaaatgcacatgcagctcttccagaattcatattaccagtttgggatcaagttgctgtctgcagtacctggtggggagcgaaaagtcctcatcatcttcaatgcccccagcctccaggaccggctgcgctttacatccgacctgcgcgagtccattgcggaggtgcaggagatggagaaataccgtgtggagtcggagctggagaagcagaaaggtatgatgcggcctaacgcctcacagcctggaggggccaaggactcagtgaatgggacgatggcccgcagtagcctggaggacacttacggggcaggcgatgggctcaaacggggcgcactcagcagttccctgcgagacctctctgatgcaggggtctgttattagcagtccacgccctcaccagaggatgccacctccgcccccacccccgccgccagaggagtacaagagccagaggcccgtctccaactcctcatccttcctgggctccctatttggaagcaagcggggcaaggggcccttccagatgccaccaccgccaacaggccaggcctctgcctcctcttcatctgcttcttccacgcaccaccaccaccaccaccaccatcatggccatagccacggtggcctgggggtgctgcctgatgggcagtccaagctccaggccctgcatgcccagtattgccaaggaccgggccctgccccgccaccctacctcccaccccagcagccctctcttcccccacctccccagcagcccccacccttgccccagctgggctccattccaccgcctcccgcctcagccccacctgtggggccacatcgccacttccacgcccatggcccagtcccagggccccaacactataccttgggccggccaggcagggcacccagacggggggctggaggacaccctcagtttgctccacatggccgccaccccctgcaccagcccacatccccactgcccctgtacagtcctgccccccagcaccctccagcccacaaacagggccctaagcacttcatcttcagccaccacccacagatgatgccagcagcaggcgcggctgggggccctggatcccggccaccagggggctcctactcccacccccaccacccccagtcaccattgtcaccacactcacccatcccaccccacccctcctatccacccctccccccaccctcccctcacaccccgcactcaccccttccacccacctccccccatggcccgctgcacgcctctgggccccctggcacagccaacccccccagtgcaaaccccaaggccaagccaagccggatcagcaccgtggtctgatgaatggagagagtgagctggggaacaggaaagtctggggagccacaggagagggaccttgcaccctctttgcttcctcggttttttcaaaaatatatatacacatagcaatgtcctcctccccatgtcctccctgccttgggacccgtcctctcacccccagcagttgccatggggtttccttccagattcgaggatccttgccacttgaagcctggactcagggtgctccagcgctggggagtggtgagggccttccagagatcctcgtactctttctcccgtcttcttcttccccacttttccctggaggtctagctctgtggcctcagacctctgggcctgtgtgagctctctgtgagctctggctggcggagaagggcaggtgtccggagctgtcggggtgaaggcttccctggggctcctctggccgtgtggggctaggagagcgctctgtagagttgtggccaaacttcagctggcttggccctctctctgacctcagggcctggccacacacttccatgtgtctttttgcctgctggaggacacggaccattgatgcacttggtgggtgggaccctgcttgtgttggccccacgtggggcagtgcttcctctctcgagccagtctatgccctttctccagtaggccccagcccagacctcttcggcttcaggaacttgcctcgccctgcaacgttcttatcctgatcaaagtccagacaggttttggggggggctcaggtctgggatgagaagggcactgccctccctcacccatattgcatgcccccccgccattcccttacacctaccccacctacaactgaagacaatgcactttacagatatcacccacacacacctcgctggggcaggggcacccagcatcagccctggggagagaggctcccaaagggccaccatgagcccaagatatccttcctgaggcagagattgaagccatcagagctggggttgggagccagaatgcctgagtccttctgtccgtcagaatctccgctgcctctccagcccttttgcagccctgtttatttattataaatatattttttacaagccccagctcctcttcttgccccgcatatccagctcctcactcagctcctgcctccctctcccctctccaccatgggctgcagtatagacagacagatggaccctggctgtacgaagggccagggccactggggcttgggggcgggggagggtggcagtgggaggggctgtatggagaggagctggggttcaggcattgtcttttttcctccttgtatataagaatgtatatttgatgcctcataaaagaccttgtgctcaaaaaannnnnc

SEQ ID NO: 426854 - DNA, 3995 bp, Homo sapiens
cggcagcctcagctcctgctccccgtgccgccggccccagcgctgtctcccgggccccctagggcccccgggccctcaagcccggtgcgcgccctcgcgtcccgccggccccctcccccggctgggcccgggggagggtggcgccgtgagagagcggggacagggctctcctgcccgttcccctgcccctgggccgccaggatggaggcggggtcggggcccccgggcggcccgggatccgagagcccaaatcgggccgtggagtacctgctggagctgaacaacatcatcgagagccagcagcagctgctggaaacccagcggcggcgcatcgaggagctggagggccagctggaccagctcacccaggagaaccgcgacctgcgagaggagagccagctgcaccgcggggagctgcaccgggacccccacggcgcgcgggatagcccgggccgcgagagccagtaccagaacctgcgcgagacccagttccaccaccgcgagctgcgggagagccagttccaccaggcggcccgggacgtgggctacccgaaccgggaaggcgcctaccagaatcgggaggctgtgtatcgggacaaggagcgggacgcctcctacccgctccaggacactaccggttacacagcccgcgagcgtgacgtggcccagtgccacctgcaccacgagaacccagccctgggtcgcgagcgtggcgggcgggaggccgggccggcgcacccgggccgcgagaaggaagcgggctattcggcggcggtgggcgtggggccgcggccaccgcgggagcggggccagctgagccgtggcgcatccaggagctccagtcccggcgccggcggaggccacagcaccagtaccagcaccagcccggccacgaccctccagagaaaatctgatggtgagaattccagaacagtcagtgtggagggtgatgccccaggcagtgacctgagcacagcggttgatagtcctgggagccaacccccctaccggctgagccagctgcccccctccagcagccacatggggggcccccctgctggagtgggccttccctgggctcagcgggcacgcctccagccagccagtgtcgccctgaggaagcaggaggaggaggagataaagcgctccaaggccctatcggacagctatgaactctccacagacctgcaggacaagaaggtggaaatgctggagaggaagtatgggggctccttcctgagccgcagggctgccaggaccatccagacagccttccgccagtaccgcatgaacaagaactttgagcggctacgcagctcagcctcagagagccgcatgtcccgccgcatcatcctttccaacatgcggatgcagttctcctttgaggagtatgagaaggcacagaaccccgcgtacttcgagggcaagcctgcctcgctggacgagggtgccatggctggtgcccggagccaccggcttgaacgggggctcccatatggaggctcctgtggtgggggcatcgatggtggtggaagctccgtcaccacatctggagagttttctaatgacatcacagaacttgaggactccttctccaaacaggtaaagtctctggctgaatccatcgacgaagccctgaactgccacccgtcagggcccatgtctgaggagccagggtcagcccagctggagaagcgggagtcaaaggaacagcaagaggacagctcagccacatccttcagtgatcttcccctctacctggatgacacagttccccaacaatcccctgagcgactgcccagcacagaacccccaccccagggccggcccgagttctgggcgccagcccctctcccgccagttcctccaccagtgccatcaggaacccgggaagacggtagccgtgaggaaggcactcgcaggggtcccgggtgcttggagtgccgggatttccggctgcgggctgcccaccttcccctgcttaccattgagcctcctagtgacagctccgtggacctgagtgaccgctcagatcgcggctctgtccaccgccagctggtgtatgaggctgatggctgcagcccccatgggaccctgaagcacaaggggccaccaggcagggccccgatcccacaccgccactacccagcccctgaaggcccagccccagccccaccagggcccctgccaccagcccccaacagtggcactgggcccagtggtgtggctgggggtcggaggttggggaagtgcgaggcagcaggcgagaactctgatggtggagataacgagagccttgagagctccagcaattccaatgagaccatcaactgcagctccggctcctcttctcgggacagtctaagggagcctccggctaccggcctgtgcaagcagacttaccagcgggagacaaggcatagctgggactcgccagctttcaacaatgatgtggtccagaggcggcactaccgaatcggcctcaacctcttcaacaagaagccagagaagggtatccagtatctgatcgagcggggcttcctgtcagacacaccggtgggagtggctcacttcatcctggagcggaaaggcctcagccggcagatgataggggaattcctagggaaccggcagaagcagttcaacagagacgtgttggactgtgtggtggatgagatggacttctcctccatggatctggatgatgcgctccggaagttccagtcccatatccgggttcagggtgaggcccagaaagtggagcgactcatcgaagccttcagccagcggtactgtgtctgtaacccagccctcgtgcgccagttccggaacccagacaccatcttcatccttgcttttgccatcatcctcctcaataccgacatgtacagtcccagcgtcaaagctgaacgaaagatgaaactagatgacttcatcaagaacctgagaggggttgacaatggtgaagacatcccccgagacctcctggtgggcatctaccagcgcatccaggggcgtgaactgcggaccaacgatgaccatgtgtcccaggtgcaggctgtggagcgcatgattgttggaaagaaaccagtcctgtctctccctcaccgtcgactggtttgctgctgccagctctacgaggtgccagatccaaaccgcccccagaggctagggttgcatcagcgggaggtcttcctcttcaatgatctccttgtggtcaccaaaattttccagaagaagaagatcttggtgacgtacagtttccgtcagtctttccccctcgtggaaatgcacatgcagctcttccagaattcatattaccagtttgggatcaagttgctgtctgcagtacctggtggggagcgaaaagtcctcatcatcttcaatgcccccagcctccaggaccggctgcgctttacatccgacctgcgcgagtccattgcggaggtgcaggagatggagaaataccgtgtggagtgtgagtagcccagccatgtctcctccctgctctcctgaaacagtaccctgcagaaaccaagaatcctatcctcagagaatctcagagttgagggttagcttgtccaaccttcccatcctcatttcaagaattcttcagcctctgcttgaataccttcagtgacaaggggctcattacctcccaaccccattattatcctgaactctaattatgagccaactattccttctagtgaaaggtatcagggagaagaatcagagtattggaggtaggactatagttttagatcccaggtatactactcattatctgggtgaactgcagcaaattgcctaacctgccaagccccagtttcttcctatacgaaattggggtaatgaagtctccttcacagagtcatggagatgaaatgagacaaggtagccgaaatgtcccaacacatcttaggcattcaaaaaatccgtatttcctgtcccaccctctctcctcctctgcccacatatcatttccctgagct

SEQ ID NO: 426855 - DNA, 6022 bp, Homo sapiens
  misc_feature (6017)..(6021): n is a, c, g, or t
cggcagcctcagctcctgctccccgtgccgccggccccagcgctgtctcccgggccccctagggcccccgggccctcaagcccggtgcgcgccctcgcgtcccgccggccccctcccccggctgggcccgggggagggtggcgccgtgagagagcggggacagggctctcctgcccgttcccctgcccctgggccgccaggatggaggcggggtcggggcccccgggcggcccgggatccgagagcccaaatcgggccgtggagtacctgctggagctgaacaacatcatcgagagccagcagcagctgctggaaacccagcggcggcgcatcgaggagctggagggccagctggaccagctcacccaggagaaccgcgacctgcgagaggagagccagctgcaccgcggggagctgcaccgggacccccacggcgcgcgggatagcccgggccgcgagagccagtaccagaacctgcgcgagacccagttccaccaccgcgagctgcgggagagccagttccaccaggcggcccgggacgtgggctacccgaaccgggaaggcgcctaccagaatcgggaggctgtgtatcgggacaaggagcgggacgcctcctacccgctccaggacactaccggttacacagcccgcgagcgtgacgtggcccagtgccacctgcaccacgagaacccagccctgggtcgcgagcgtggcgggcgggaggccgggccggcgcacccgggccgcgagaaggaagcgggctattcggcggcggtgggcgtggggccgcggccaccgcgggagcggggccagctgagccgtggcgcatccaggagctccagtcccggcgccggcggaggccacagcaccagtaccagcaccagcccggccacgaccctccagagaaaatctgatggtgagaattccagaacagtcagtgtggagggtgatgccccaggcagtgacctgagcacagcggttgatagtcctgggagccaacccccctaccggctgagccagctgcccccctccagcagccacatggggggcccccctgctggagtgggccttccctgggctcagcgggcacgcctccagccagccagtgtcgccctgaggaagcaggaggaggaggagataaagcgctccaaggccctatcggacagctatgaactctccacagacctgcaggacaagaaggtggaaatgctggagaggaagtatgggggctccttcctgagccgcagggctgccaggaccatccagacagccttccgccagtaccgcatgaacaagaactttgagcggctacgcagctcagcctcagagagccgcatgtcccgccgcatcatcctttccaacatgcggatgcagttctcctttgaggagtatgagaaggcacagaaccccgcgtacttcgagggcaagcctgcctcgctggacgagggtgccatggctggtgcccggagccaccggcttgaacgggggctcccatatggaggctcctgtggtgggggcatcgatggtggtggaagctccgtcaccacatctggagagttttctaatgacatcacagaacttgaggactccttctccaaacaggtaaagtctctggctgaatccatcgacgaagccctgaactgccacccgtcagggcccatgtctgaggagccagggtcagcccagctggagaagcgggagtcaaaggaacagcaagaggacagctcagccacatccttcagtgatcttcccctctacctggatgacacagttccccaacaatcccctgagcgactgcccagcacagaacccccaccccagggccggcccgagttctgggcgccagcccctctcccgccagttcctccaccagtgccatcaggaacccgggaagacggtagccgtgaggaaggcactcgcaggggtcccgggtgcttggagtgccgggatttccggctgcgggctgcccaccttcccctgcttaccattgagcctcctagtgacagctccgtggacctgagtgaccgctcagatcgcggctctgtccaccgccagctggtgtatgaggctgatggctgcagcccccatgggaccctgaagcacaaggggccaccaggcagggccccgatcccacaccgccactacccagcccctgaaggcccagccccagccccaccagggcccctgccaccagcccccaacagtggcactgggcccagtggtgtggctgggggtcggaggttggggaagtgcgaggcagcaggcgagaactctgatggtggagataacgagagccttgagagctccagcaattccaatgagaccatcaactgcagctccggctcctcttctcgggacagtctaagggagcctccggctaccggcctgtgcaagcagacttaccagcgggagacaaggcatagctgggactcgccagctttcaacaatgatgtggtccagaggcggcactaccgaatcggcctcaacctcttcaacaagaagccagagaagggtatccagtatctgatcgagcggggcttcctgtcagacacaccggtgggagtggctcacttcatcctggagcggaaaggcctcagccggcagatgataggggaattcctagggaaccggcagaagcagttcaacagagacgtgttggactgtgtggtggatgagatggacttctcctccatggatctggatgatgcgctccggaagttccagtcccatatccgggttcagggtgaggcccagaaagtggagcgactcatcgaagccttcagccagcggtactgtgtctgtaacccagccctcgtgcgccagttccggaacccagacaccatcttcatccttgcttttgccatcatcctcctcaataccgacatgtacagtcccagcgtcaaagctgaacgaaagatgaaactagatgacttcatcaagaacctgagaggggttgacaatggtgaagacatcccccgagacctcctggtgggcatctaccagcgcatccaggggcgtgaactgcggaccaacgatgaccatgtgtcccaggtgcaggctgtggagcgcatgattgttggaaagaaaccagtcctgtctctccctcaccgtcgactggtttgctgctgccagctctacgaggtgccagatccaaaccgcccccagaggctagggttgcatcagcgggaggtcttcctcttcaatgatctccttgtggtcaccaaaattttccagaagaagaagatcttggtgacgtacagtttccgtcagtctttccccctcgtggaaatgcacatgcagctcttccagaattcatattaccagtttgggatcaagttgctgtctgcagtacctggtggggagcgaaaagtcctcatcatcttcaatgcccccagcctccaggaccggctgcgctttacatccgacctgcgcgagtccattgcggaggtgcaggagatggagaaataccgtgtggagtcggagctggagaagcagaaaggtatgatgcggcctaacgcctcacagcctggaggggccaaggactcagtgaatgggacgatggcccgcagtagcctggaggacacttacggggcaggcgatgggctcaaacggggcgcactcagcagttccctgcgagacctctctgatgcagggaagcgggggcggcgtaacagcgtgggatcgctggacagcaccatcgaagggtctgttattagcagtccacgccctcaccagaggatgccacctccgcccccacccccgccgccagaggagtacaagagccagaggcccgtctccaactcctcatccttcctgggctccctatttggaagcaagcggggcaaggggcccttccagatgccaccaccgccaacaggccaggcctctgcctcctcttcatctgcttcttccacgcaccaccaccaccaccaccaccatcatggccatagccacggtggcctgggggtgctgcctgatgggcagtccaagctccaggccctgcatgcccagtattgccaaggaccgggccctgccccgccaccctacctcccaccccagcagccctctcttcccccacctccccagcagcccccacccttgccccagctgggctccattccaccgcctcccgcctcagccccacctgtggggccacatcgccacttccacgcccatggcccagtcccagggccccaacactataccttgggccggccaggcagggcacccagacggggggctggaggacaccctcagtttgctccacatggccgccaccccctgcaccagcccacatccccactgcccctgtacagtcctgccccccagcaccctccagcccacaaacagggccctaagcacttcatcttcagccaccacccacagatgatgccagcagcaggcgcggctgggggccctggatcccggccaccagggggctcctactcccacccccaccacccccagtcaccattgtcaccacactcacccatcccaccccacccctcctatccacccctccccccaccctcccctcacaccccgcactcaccccttccacccacctccccccatggcccgctgcacgcctctgggccccctggcacagccaacccccccagtgcaaaccccaaggccaagccaagccggatcagcaccgtggtctgatgaatggagagagtgagctggggaacaggaaagtctggggagccacaggagagggaccttgcaccctctttgcttcctcggttttttcaaaaatatatatacacatagcaatgtcctcctccccatgtcctccctgccttgggacccgtcctctcacccccagcagttgccatggggtttccttccagattcgaggatccttgccacttgaagcctggactcagggtgctccagcgctggggagtggtgagggccttccagagatcctcgtactctttctcccgtcttcttcttccccacttttccctggaggtctagctctgtggcctcagacctctgggcctgtgtgagctctctgtgagctctggctggcggagaagggcaggtgtccggagctgtcggggtgaaggcttccctggggctcctctggccgtgtggggctaggagagcgctctgtagagttgtggccaaacttcagctggcttggccctctctctgacctcagggcctggccacacacttccatgtgtctttttgcctgctggaggacacggaccattgatgcacttggtgggtgggaccctgcttgtgttggccccacgtggggcagtgcttcctctctcgagccagtctatgccctttctccagtaggccccagcccagacctcttcggcttcaggaacttgcctcgccctgcaacgttcttatcctgatcaaagtccagacaggttttggggggggctcaggtctgggatgagaagggcactgccctccctcacccatattgcatgcccccccgccattcccttacacctaccccacctacaactgaagacaatgcactttacagatatcacccacacacacctcgctggggcaggggcacccagcatcagccctggggagagaggctcccaaagggccaccatgagcccaagatatccttcctgaggcagagattgaagccatcagagctggggttgggagccagaatgcctgagtccttctgtccgtcagaatctccgctgcctctccagcccttttgcagccctgtttatttattataaatatattttttacaagccccagctcctcttcttgccccgcatatccagctcctcactcagctcctgcctccctctcccctctccaccatgggctgcagtatagacagacagatggaccctggctgtacgaagggccagggccactggggcttgggggcgggggagggtggcagtgggaggggctgtatggagaggagctggggttcaggcattgtcttttttcctccttgtatataagaatgtatatttgatgcctcataaaagaccttgtgctcaaaaaannnnnc

SEQ ID NO: 426856 - DNA, 2713 bp, Homo sapiens
  misc_feature (2708)..(2712): n is a, c, g, or t
ttgggggagacaagggctggtcgtccaaggggcaaaacacgaagcctggggacagagggagggaggagggaggaggaaggagaatggcccatggagggctagggtcagtcagatgggctctcactcctgttcctgacctttgctccctgtctccccgactgccacccagcggagctggagaagcagaaaggtatgatgcggcctaacgcctcacagcctggaggggccaaggactcagtgaatgggacgatggcccgcagtagcctggaggacacttacggggcaggcgatgggctcaaacggggcgcactcagcagttccctgcgagacctctctgatgcagggaagcgggggcggcgtaacagcgtgggatcgctggacagcaccatcgaagggtctgttattagcagtccacgccctcaccagaggatgccacctccgcccccacccccgccgccagaggagtacaagagccagaggcccgtctccaactcctcatccttcctgggctccctatttggaagcaagcggggcaaggggcccttccagatgccaccaccgccaacaggccaggcctctgcctcctcttcatctgcttcttccacgcaccaccaccaccaccaccaccatcatggccatagccacggtggcctgggggtgctgcctgatgggcagtccaagctccaggccctgcatgcccagtattgccaaggaccgggccctgccccgccaccctacctcccaccccagcagccctctcttcccccacctccccagcagcccccacccttgccccagctgggctccattccaccgcctcccgcctcagccccacctgtggggccacatcgccacttccacgcccatggcccagtcccagggccccaacactataccttgggccggccaggcagggcacccagacggggggctggaggacaccctcagtttgctccacatggccgccaccccctgcaccagcccacatccccactgcccctgtacagtcctgccccccagcaccctccagcccacaaacagggccctaagcacttcatcttcagccaccacccacagatgatgccagcagcaggcgcggctgggggccctggatcccggccaccagggggctcctactcccacccccaccacccccagtcaccattgtcaccacactcacccatcccaccccacccctcctatccacccctccccccaccctcccctcacaccccgcactcaccccttccacccacctccccccatggcccgctgcacgcctctgggccccctggcacagccaacccccccagtgcaaaccccaaggccaagccaagccggatcagcaccgtggtctgatgaatggagagagtgagctggggaacaggaaagtctggggagccacaggagagggaccttgcaccctctttgcttcctcggttttttcaaaaatatatatacacatagcaatgtcctcctccccatgtcctccctgccttgggacccgtcctctcacccccagcagttgccatggggtttccttccagattcgaggatccttgccacttgaagcctggactcagggtgctccagcgctggggagtggtgagggccttccagagatcctcgtactctttctcccgtcttcttcttccccacttttccctggaggtctagctctgtggcctcagacctctgggcctgtgtgagctctctgtgagctctggctggcggagaagggcaggtgtccggagctgtcggggtgaaggcttccctggggctcctctggccgtgtggggctaggagagcgctctgtagagttgtggccaaacttcagctggcttggccctctctctgacctcagggcctggccacacacttccatgtgtctttttgcctgctggaggacacggaccattgatgcacttggtgggtgggaccctgcttgtgttggccccacgtggggcagtgcttcctctctcgagccagtctatgccctttctccagtaggccccagcccagacctcttcggcttcaggaacttgcctcgccctgcaacgttcttatcctgatcaaagtccagacaggttttggggggggctcaggtctgggatgagaagggcactgccctccctcacccatattgcatgcccccccgccattcccttacacctaccccacctacaactgaagacaatgcactttacagatatcacccacacacacctcgctggggcaggggcacccagcatcagccctggggagagaggctcccaaagggccaccatgagcccaagatatccttcctgaggcagagattgaagccatcagagctggggttgggagccagaatgcctgagtccttctgtccgtcagaatctccgctgcctctccagcccttttgcagccctgtttatttattataaatatattttttacaagccccagctcctcttcttgccccgcatatccagctcctcactcagctcctgcctccctctcccctctccaccatgggctgcagtatagacagacagatggaccctggctgtacgaagggccagggccactggggcttgggggcgggggagggtggcagtgggaggggctgtatggagaggagctggggttcaggcattgtcttttttcctccttgtatataagaatgtatatttgatgcctcataaaagaccttgtgctcaaaaaannnnnc

SEQ ID NO: 426857 - DNA, 3603 bp, Homo sapiens
cggcagcctcagctcctgctccccgtgccgccggccccagcgctgtctcccgggccccctagggcccccgggccctcaagcccggtgcgcgccctcgcgtcccgccggccccctcccccggctgggcccgggggagggtggcgccgtgagagagcggggacagggctctcctgcccgttcccctgcccctgggccgccaggatggaggcggggtcggggcccccgggcggcccgggatccgagagcccaaatcgggccgtggagtacctgctggagctgaacaacatcatcgagagccagcagcagctgctggaaacccagcggcggcgcatcgaggagctggagggccagctggaccagctcacccaggagaaccgcgacctgcgagaggagagccagctgcaccgcggggagctgcaccgggacccccacggcgcgcgggatagcccgggccgcgagagccagtaccagaacctgcgcgagacccagttccaccaccgcgagctgcgggagagccagttccaccaggcggcccgggacgtgggctacccgaaccgggaaggcgcctaccagaatcgggaggctgtgtatcgggacaaggagcgggacgcctcctacccgctccaggacactaccggttacacagcccgcgagcgtgacgtggcccagtgccacctgcaccacgagaacccagccctgggtcgcgagcgtggcgggcgggaggccgggccggcgcacccgggccgcgagaaggaagcgggctattcggcggcggtgggcgtggggccgcggccaccgcgggagcggggccagctgagccgtggcgcatccaggagctccagtcccggcgccggcggaggccacagcaccagtaccagcaccagcccggccacgaccctccagagaaaatctgatggtgagaattccagaacagtcagtgtggagggtgatgccccaggcagtgacctgagcacagcggttgatagtcctgggagccaacccccctaccggctgagccagctgcccccctccagcagccacatggggggcccccctgctggagtgggccttccctgggctcagcgggcacgcctccagccagccagtgtcgccctgaggaagcaggaggaggaggagataaagcgctccaaggccctatcggacagctatgaactctccacagacctgcaggacaagaaggtggaaatgctggagaggaagtatgggggctccttcctgagccgcagggctgccaggaccatccagacagccttccgccagtaccgcatgaacaagaactttgagcggctacgcagctcagcctcagagagccgcatgtcccgccgcatcatcctttccaacatgcggatgcagttctcctttgaggagtatgagaaggcacagaaccccgcgtacttcgagggcaagcctgcctcgctggacgagggtgccatggctggtgcccggagccaccggcttgaacgggggctcccatatggaggctcctgtggtgggggcatcgatggtggtggaagctccgtcaccacatctggagagttttctaatgacatcacagaacttgaggactccttctccaaacaggtaaagtctctggctgaatccatcgacgaagccctgaactgccacccgtcagggcccatgtctgaggagccagggtcagcccagctggagaagcgggagtcaaaggaacagcaagaggacagctcagccacatccttcagtgatcttcccctctacctggatgacacagttccccaacaatcccctgagcgactgcccagcacagaacccccaccccagggccggcccgagttctgggcgccagcccctctcccgccagttcctccaccagtgccatcaggaacccgggaagacggtagccgtgaggaaggcactcgcaggggtcccgggtgcttggagtgccgggatttccggctgcgggctgcccaccttcccctgcttaccattgagcctcctagtgacagctccgtggacctgagtgaccgctcagatcgcggctctgtccaccgccagctggtgtatgaggctgatggctgcagcccccatgggaccctgaagcacaaggggccaccaggcagggccccgatcccacaccgccactacccagcccctgaaggcccagccccagccccaccagggcccctgccaccagcccccaacagtggcactgggcccagtggtgtggctgggggtcggaggttggggaagtgcgaggcagcaggcgagaactctgatggtggagataacgagagccttgagagctccagcaattccaatgagaccatcaactgcagctccggctcctcttctcgggacagtctaagggagcctccggctaccggcctgtgcaagcagacttaccagcgggagacaaggcatagctgggactcgccagctttcaacaatgatgtggtccagaggcggcactaccgaatcggcctcaacctcttcaacaagaagccagagaagggtatccagtatctgatcgagcggggcttcctgtcagacacaccggtgggagtggctcacttcatcctggagcggaaaggcctcagccggcagatgataggggaattcctagggaaccggcagaagcagttcaacagagacgtgttggactgtgtggtggatgagatggacttctcctccatggatctggatgatgcgctccggaagttccagtcccatatccgggttcagggtgaggcccagaaagtggagcgactcatcgaagccttcagccagcggtactgtgtctgtaacccagccctcgtgcgccagttccggaacccagacaccatcttcatccttgcttttgccatcatcctcctcaataccgacatgtacagtcccagcgtcaaagctgaacgaaagatgaaactagatgacttcatcaagaacctgagaggggttgacaatggtgaagacatcccccgagacctcctggtgggcatctaccagcgcatccaggggcgtgaactgcggaccaacgatgaccatgtgtcccaggtgcaggctgtggagcgcatgattgttggaaagaaaccagtcctgtctctccctcaccgtcgactggtttgctgctgccagctctacgaggtgccagatccaaaccgcccccagaggctagggttgcatcagcgggaggtcttcctcttcaatgatctccttgtggtcaccaaaattttccagaagaagaagatcttggtgacgtacagtttccgtcagtctttccccctcgtggaaatgcacatagttcagcgtctgacgtcagacgctgaactatgtgactttgtcacagcccaagatagttaagtgggatcgagacatgtaagcagcatcatggaggtttgaagatgccgcatttggattggatgaattccaaattctgcttgcttgctttttaatattgatatgcttatacacttacactttatgcacaaaatgtagggttataataatgttaacatggacatgatcttctttataattctactttgagtgctgtctccatgtttgatgtatctgcagcaggtgctccacatagttcagcgctgacgg

SEQ ID NO: 426858 - DNA, 3381 bp, Homo sapiens
ggggaaaccgttatagggcatgaaaggggaaaccgttatagggcatggaaggggaattaggacaaggtgtgagtggaaagagaaacatcccaccgcacacgcttaaaaaagccgtttaatttaaaaataggtaatacagccatacagagaagacattaaaagatctacacagaaaattttcgctcccaatccattccctactcacagtcctacatacgttacttttattttccttttttttggaaatgcactggccccctactctctcacgaaggctgaactctctctacattcttctgcacctgttttttgtgcatactctttcgttgtcaaatatttccctccaactgttgttgtgtatgaaataaatacacacatataagctaaccagccccacttgcccgcaccacctacacgcccgtccccgccctccctcaggcccacgtgctccgagggccgccttcgcaggttgtttctggcgatgcctgtctgaaggcctcagactgaggccccgcccactctccctctcctctgccctttggacgcgcgcctcggttccgaacgcagcggacggcgcctcaggcagcgcggcggacagcccgtcctccggcgcgccgcgagcctcggaggaccctagcgacggtcgtggcgtaagaccggggggacgcggcggtagcggcggccgttgcgattgattgcgctggttgcctgcggcgtccacttccttggccgcccttgctacactggctgattgttgtgcagccggcgccatgtctgtgagcgagatcttcgtggagctgcagggctttttggctgccgagcaggacatccgagaggaaatcagaaaagttgtacagagtttagaacaaacagctcgagagattttaactctactgcaaggggtccatcagggtgctgggtttcaggacattccaaagaggtgtttgaaagctcgagaacattttggtacagtaaaaacacatctaacatctttgaagaccaaatttcctgctgaacagtattacagatttcatgagcactggaggtttgtgttgcagcgcttggtcttcttggcagcatttgttgtgtatttggaaacagaaacactagtgactcgagaagcagttacagaaattcttggcattgagccagatcgggagaaaggatttcatctggatgtagaagattatctctcaggagttctaattcttgccagtgaactgtcgaggctgtctgtcaacagcgtgactgctggagactactcccgacccctccacatctccaccttcatcaatgagctggattccggttttcgccttctcaacctgaaaaatgactccctgaggaagcgctacgacggattgaaatatgacgtgaagaaagtagaggaagtggtctatgatctctccatccggggctttaataaggagacggcagcagcttgtgttgaaaaataggaggctctccttgctcctggccttgctgacctcagcggttgccaggaaggggtgagcacagagtgcctcttacggtagttaggatgctcagttgctaaacactgcgctttattttcttaaccagttgtggtgtgagtatcagaattgaaacacttttttgggggtaaaaaatatagcctttacatggacagaattttttttgttgtttcagtgaatatgcctgtaattcagtgtatttcagttccgtcagaaagtgtaaatgttagtttcttggtaaagtccttttcttgcttaccttgactgttgatgtactgattgagaagttcattgtctcgtttgtgattcttccagatgtgatgcttgatattttctatatgcgagttagccatccacacccaggcatagcctggatacagtataaaaatagataattaaaaagatggttgccaagcaaggaaaacttattttatattttcccttccttattttaagcattgtgagtaaatcagatgttgaattcttttgccaagggaattatagctgcaggttctctctcactgccatcaaactgtaaaagattaaactgcgaagtcaagctcaacagattattttggaaagtttttgtattaagggatttagtaacatcattttgttttccaccaggcagggagtagggcttagtgttttaaaacacctctgctttctgatgttgccttaatattctgctattgcagcaattaaaaattgtcttcatgtacatttggaactaacacgtgatgtgatatattcctaaactatgaaacctttttcctagtagtcagctagatcatttgttctgggagtataaagccacccacgtaagttaataagcaaaatcctgactattatgttgttagagaaaaatgctttgctttgtctggaagaaagataaaatagtgaattataaataagtcaggccgggcgtggtggctcacacctgtaatcccagcacactgggaggccgaggcagggggactgcttgagctcaggagttcgagaccagcctgggcaacaaagtgagactccatctctatataaaaacaaaaaccacgaaagcacacacaaaataaatcagtgggatttggtaatgtgttttagagtaagaaatttcaggttgttggtgactatcccaacagtcatgttttaaatgtacagtttggggcaagtcatgtaaatactgttggtggtcttccccacacgccccaattttcaggtagtactaagagtatgtgccaggaaactcttgctattgaattgagatgattaaaatggtgacttaatccgtagttattttgcacccactgaaaggaaagtgctttccagaataatatgaagtatctaaaagtgtcaccttttcttgcctgatcaacaatttgggcttcctgtttgtacaaggggccatttggcatacctttcacagcttttatcaggccaagttaaaggctgactacattttttcatcatgaggaaagcagttgaaatgaggcatgagttactgtgcattgggattttagaacaattttcttgtgacagctctttttgtgaagttaggttcttaaaagtgcccatgatggtcacttaaaatgtgcagtaatagcactgccaggatcaagcatgaaaggcttttaaattagatcatcccacagacaatacgtttgataatagttttttcttttaacctctttaagtattgattctgcttgagaatattgaagtacttgccagaagttgtggatttcagttttaacaaatgctattaaagtggagaagcacactctggtcttggaattccatttgaggatttagaagtgtcatgtttataactattcagttgtgtttgttgctggcttgttgtaaagcaataaaatttttttggtctttttgt

SEQ ID NO: 426859 - DNA, 1002 bp, Homo sapiens
ggggaaaccgttatagggcatgaaaggggaaaccgttatagggcatggaaggggaattaggacaaggtgtgagtggaaagagaaacatcccaccgcacacgcttaaaaaagccgtttaatttaaaaataggtaatacagccatacagagaagacattaaaagatctacacagaaaattttcgctcccaatccattccctactcacagtcctacatacgttacttttattttccttttttttggaaatgcactggccccctactctctcacgaaggctgaactctctctacattcttctgcacctgttttttgtgcatactctttcgttgtcaaatatttccctccaactgttgttgtgtatgaaataaatacacacatataagctaaccagccccacttgcccgcaccacctacacgcccgtccccgccctccctcaggcccacgtgctccgagggccgccttcgcaggttgtttctggcgatgcctgtctgaaggcctcagactgaggccccgcccactctccctctcctctgccctttggacgcgcgcctcggttccgaacgcagcggacggcgcctcaggcagcgcggcggacagcccgtcctccggcgcgccgcgagcctcggaggaccctagcgacggtcgtggcgtaagaccggggggacgcggcggtagcggcggccgttgcgattgattgcgctggttgcctgcggcgtccacttccttggccgcccttgctacactggctgattgttgtgcagccggcgccatgtctgtgagcgagatcttcgtggagctgcagggctttttggctgccgagcaggacatccgagaggcgagccccctcccttccccattccctttgcctttccatgcctagttgggccacttcgcccggccctcctctgtcgctcagtctcgggcggtggggacgcctccgagggtgggttgcttcccctctagctttaggttaggcactccccgcccccgcccaaaatttt

SEQ ID NO: 426860 - DNA, 3949 bp, Homo sapiens
ggggaaaccgttatagggcatgaaaggggaaaccgttatagggcatggaaggggaattaggacaaggtgtgagtggaaagagaaacatcccaccgcacacgcttaaaaaagccgtttaatttaaaaataggtaatacagccatacagagaagacattaaaagatctacacagaaaattttcgctcccaatccattccctactcacagtcctacatacgttacttttattttccttttttttggaaatgcactggccccctactctctcacgaaggctgaactctctctacattcttctgcacctgttttttgtgcatactctttcgttgtcaaatatttccctccaactgttgttgtgtatgaaataaatacacacatataagctaaccagccccacttgcccgcaccacctacacgcccgtccccgccctccctcaggcccacgtgctccgagggccgccttcgcaggttgtttctggcgatgcctgtctgaaggcctcagactgaggccccgcccactctccctctcctctgccctttggacgcgcgcctcggttccgaacgcagcggacggcgcctcaggcagcgcggcggacagcccgtcctccggcgcgccgcgagcctcggaggaccctagcgacggtcgtggcgtaagaccggggggacgcggcggtagcggcggccgttgcgattgattgcgctggttgcctgcggcgtccacttccttggccgcccttgctacactggctgattgttgtgcagccggcgccatgtctgtgagcgagatcttcgtggagctgcagggctttttggctgccgagcaggacatccgagaggaaatcagaaaagttgtacagagtttagaacaaacagctcgagagattttaactctactgcaaggggtccatcagggtgctgggtttcaggacattccaaagaggtgtttgaaagctcgagaacattttggtacagtaaaaacacatctaacatctttgaagaccaaatttcctgctgaacagtattacagatttcatgagcactggaggtttgtgttgcagcgcttggtcttcttggcagcatttgttgtgtatttggaaacagaaacactagtgactcgagaagcagttacagaaattcttggcattgagccagatcgggagaaaggatttcatctggatgtagaagattatctctcaggagttctaattcttgccagtgaactgtcgaggctgtctgtcaacagcgtgactgctggagactactcccgacccctccacatctccaccttcatcaatgagctggattccggttttcgccttctcaacctgaaaaatgactccctgaggaagcgctacgacggattgaaatatgacgtgaagaaagtagaggaagtggtctatgatctctccatccggggctttaataaggagacggcagcagcttgtgttgaaaaataggaggctctccttgctcctggccttgctgacctcagcggttgccaggaaggggtgagcacagagtgcctcttacggtagttaggatgctcagttgctaaacactgcgctttattttcttaaccagttgtggtgtgagtatcagaattgaaacacttttttgggggtaaaaaatatagcctttacatggacagaattttttttgttgtttcagtgaatatgcctgtaattcagtgtatttcagttccgtcagaaagtgtaaatgttagtttcttggtaaagtccttttcttgcttaccttgactgttgatgtactgattgagaagttcattgtctcgtttgtgattcttccagatgtgatgcttgatattttctatatgcgagttagccatccacacccaggcatagcctggatacagtataaaaatagataattaaaaagatggttgccaagcaaggaaaacttattttatattttcccttccttattttaagcattgtgagtaaatcagatgttgaattcttttgccaagggaattatagctgcaggttctctctcactgccatcaaactgtaaaagattaaactgcgaagtcaagctcaacagattattttggaaagtttttgtattaagggatttagtaacatcattttgttttccaccaggcagggagtagggcttagtgttttaaaacacctctgctttctgatgttgccttaatattctgctattgcagcaattaaaaattgtcttcatgtacatttggaactaacacgtgatgtgatatattcctaaactatgaaacctttttcctagtagtcagctagatcatttgttctgggagtataaagccacccacgtaagttaataagcaaaatcctgactattatgttgttagagaaaaatgctttgctttgtctggaagaaagataaaatagtgaattataaataagtcaggccgggcgtggtggctcacacctgtaatcccagcacactgggaggccgaggcagggggactgcttgagctcaggagttcgagaccagcctgggcaacaaagtgagactccatctctatataaaaacaaaaaccacgaaagcacacacaaaataaatcagtgggatttggtaatgtgttttagagtaagaaatttcaggttgttggtgactatcccaacagtcatgttttaaatgtacagtttggggcaagtcatgtaaatactgttggtggtcttccccacacgccccaattttcaggtagtactaagagtatgtgccaggaaactcttgctattgaattgagatgattaaaatggtgacttaatccgtagttattttgcacccactgaaaggaaagtgctttccagaataatatgaagtatctaaaagtgtcaccttttcttgcctgatcaacaatttgggcttcctgtttgtacaaggggccatttggcatacctttcacagcttttatcaggccaagttaaaggctgactacattttttcatcatgaggaaagcagttgaaatgaggcatgagttactgtgcattgggattttagaacaattttcttgtgacagctctttttgtgaagttaggttcttaaaagtgcccatgatggtcacttaaaatgtgcagtaatagcactgccaggatcaagcatgaaaggcttttaaattagatcatcccacagacaatacgtttgataatagttttttcttttaacctctttaagtattgattctgcttgagaatattgaagtacttgccagaagttgtggatttcagttttaacaaatgctattaaagtggagaagcacactctggtcttggaattccatttgaggatttagaagtgtcatgtttataactattcagttgtgtttgttgctggcttgttgtaaagcaataaaatttttttggtctttttgtaagtgagtgtgctgctgtaagaaatctcccatgtgcataacaaattctgaatattttttgaggctaaagaagaccggggtgacaagcagatactgctgtgtaatggttacactaaccaaaagacaccagccactcagagttctatactgtaaagcgcagataacatttgtgtgttataccttgattggggaattaaaagtcatttaactgaagatgttgagaaacctgggctctggttttagtataccggaattacttttttccaattttagaaaatcaagcaggttagagaaaatagagatgaattaggggacactgtcttatggattcatttataagaagagaaccagccatatacacttggggagatttgccacatcttaaacttgaataatagtatgagtaatgcttaagggagtttaatagagaaggaaagctttggcagtgttttgagaacttaagtggctaaagagatgagacaaacatgcaggtcgctactggcatagtttcataattgtgtactcggaaattaaagtttgcttgtttcttggtctggaaaaaaaaaaaa

SEQ ID NO: 426861 - DNA, 3170 bp, Homo sapiens
tgacttttatttggccctttgtgtgtgtgtgtgtgtatgtgtgtatgtgtgtatatgcacctgtgtgtatttgaatccagcactgtcaatgcgatggggacccatgaccaacagccccagagaaaccacaacacgatcagaatacatgaagaagagaacgccccgccaagaatcatagcacacatctcaagttgtgacatggaaccttcattgtaaggtattgccagcacagctaaaggagctgaagtatattttcagatacaagaatgatataataatgcatttacacgtgccagaggcaagtgatttttcttaatgatacggagttggtcatcctgattgtgaatacttggtaaaggcttttttctgccaaatatgggaggaagaagcaatccaattttaggcatcctctgaggagtgaacaggaatagcagctggtgtgcatctccttaaggatgacgttatttatgacaaccaaaccaattaccagtgtgtctcctaatatattcccttttagcaagttgtttatttttcagtatagctaattagtagggaaactggggatgatattttgaaagccaggttgaaaagcacagatgtgtacgttagttgtgaggtttttttgttgattaatttccagatagattacttagattattaagcaagaactgtatttgaaatttggttaagtttttcatttggttatcttttgtgactagttccaaagaggtgtttgaaagctcgagaacattttggtacagtaaaaacacatctaacatctttgaagaccaaatttcctgctgaacagtattacagatttcatgagcactggaggtttgtgttgcagcgcttggtcttcttggcagcatttgttgtgtatttggaaacagaaacactagtgactcgagaagcagttacagaaattcttggcattgagccagatcgggagaaaggatttcatctggatgtagaagattatctctcaggagttctaattcttgccagtgaactgtcgaggctgtctgtcaacagcgtgactgctggagactactcccgacccctccacatctccaccttcatcaatgagctggattccggttttcgccttctcaacctgaaaaatgactccctgaggaagcgctacgacggattgaaatatgacgtgaagaaagtagaggaagtggtctatgatctctccatccggggctttaataaggagacggcagcagcttgtgttgaaaaataggaggctctccttgctcctggccttgctgacctcagcggttgccaggaaggggtgagcacagagtgcctcttacggtagttaggatgctcagttgctaaacactgcgctttattttcttaaccagttgtggtgtgagtatcagaattgaaacacttttttgggggtaaaaaatatagcctttacatggacagaattttttttgttgtttcagtgaatatgcctgtaattcagtgtatttcagttccgtcagaaagtgtaaatgttagtttcttggtaaagtccttttcttgcttaccttgactgttgatgtactgattgagaagttcattgtctcgtttgtgattcttccagatgtgatgcttgatattttctatatgcgagttagccatccacacccaggcatagcctggatacagtataaaaatagataattaaaaagatggttgccaagcaaggaaaacttattttatattttcccttccttattttaagcattgtgagtaaatcagatgttgaattcttttgccaagggaattatagctgcaggttctctctcactgccatcaaactgtaaaagattaaactgcgaagtcaagctcaacagattattttggaaagtttttgtattaagggatttagtaacatcattttgttttccaccaggcagggagtagggcttagtgttttaaaacacctctgctttctgatgttgccttaatattctgctattgcagcaattaaaaattgtcttcatgtacatttggaactaacacgtgatgtgatatattcctaaactatgaaacctttttcctagtagtcagctagatcatttgttctgggagtataaagccacccacgtaagttaataagcaaaatcctgactattatgttgttagagaaaaatgctttgctttgtctggaagaaagataaaatagtgaattataaataagtcaggccgggcgtggtggctcacacctgtaatcccagcacactgggaggccgaggcagggggactgcttgagctcaggagttcgagaccagcctgggcaacaaagtgagactccatctctatataaaaacaaaaaccacgaaagcacacacaaaataaatcagtgggatttggtaatgtgttttagagtaagaaatttcaggttgttggtgactatcccaacagtcatgttttaaatgtacagtttggggcaagtcatgtaaatactgttggtggtcttccccacacgccccaattttcaggtagtactaagagtatgtgccaggaaactcttgctattgaattgagatgattaaaatggtgacttaatccgtagttattttgcacccactgaaaggaaagtgctttccagaataatatgaagtatctaaaagtgtcaccttttcttgcctgatcaacaatttgggcttcctgtttgtacaaggggccatttggcatacctttcacagcttttatcaggccaagttaaaggctgactacattttttcatcatgaggaaagcagttgaaatgaggcatgagttactgtgcattgggattttagaacaattttcttgtgacagctctttttgtgaagttaggttcttaaaagtgcccatgatggtcacttaaaatgtgcagtaatagcactgccaggatcaagcatgaaaggcttttaaattagatcatcccacagacaatacgtttgataatagttttttcttttaacctctttaagtattgattctgcttgagaatattgaagtacttgccagaagttgtggatttcagttttaacaaatgctattaaagtggagaagcacactctggtcttggaattccatttgaggatttagaagtgtcatgtttataactattcagttgtgtttgttgctggcttgttgtaaagcaataaaatttttttggtctttttgt

SEQ ID NO: 426862 - DNA, 3325 bp, Homo sapiens
ggggaaaccgttatagggcatgaaaggggaaaccgttatagggcatggaaggggaattaggacaaggtgtgagtggaaagagaaacatcccaccgcacacgcttaaaaaagccgtttaatttaaaaataggtaatacagccatacagagaagacattaaaagatctacacagaaaattttcgctcccaatccattccctactcacagtcctacatacgttacttttattttccttttttttggaaatgcactggccccctactctctcacgaaggctgaactctctctacattcttctgcacctgttttttgtgcatactctttcgttgtcaaatatttccctccaactgttgttgtgtatgaaataaatacacacatataagctaaccagccccacttgcccgcaccacctacacgcccgtccccgccctccctcaggcccacgtgctccgagggccgccttcgcaggttgtttctggcgatgcctgtctgaaggcctcagactgaggccccgcccactctccctctcctctgccctttggacgcgcgcctcggttccgaacgcagcggacggcgcctcaggcagcgcggcggacagcccgtcctccggcgcgccgcgagcctcggaggaccctagcgacggtcgtggcgtaagaccggggggacgcggcggtagcggcggccgttgcgattgattgcgctggttgcctgcggcgtccacttccttggccgcccttgctacactggctgattgttgtgcagccggcgccatgtctgtgagcgagatcttcgtggagctgcagggctttttggctgccgagcaggacatccgagaggaaatcagaaaagttgtacagagtttagaacaaacagctcgagagattttaactctactgcaaggggtccatcagggtgctgggtttcaggacattccaaagaggtgtttgaaagctcgagaacattttggtacaatttcatgagcactggaggtttgtgttgcagcgcttggtcttcttggcagcatttgttgtgtatttggaaacagaaacactagtgactcgagaagcagttacagaaattcttggcattgagccagatcgggagaaaggatttcatctggatgtagaagattatctctcaggagttctaattcttgccagtgaactgtcgaggctgtctgtcaacagcgtgactgctggagactactcccgacccctccacatctccaccttcatcaatgagctggattccggttttcgccttctcaacctgaaaaatgactccctgaggaagcgctacgacggattgaaatatgacgtgaagaaagtagaggaagtggtctatgatctctccatccggggctttaataaggagacggcagcagcttgtgttgaaaaataggaggctctccttgctcctggccttgctgacctcagcggttgccaggaaggggtgagcacagagtgcctcttacggtagttaggatgctcagttgctaaacactgcgctttattttcttaaccagttgtggtgtgagtatcagaattgaaacacttttttgggggtaaaaaatatagcctttacatggacagaattttttttgttgtttcagtgaatatgcctgtaattcagtgtatttcagttccgtcagaaagtgtaaatgttagtttcttggtaaagtccttttcttgcttaccttgactgttgatgtactgattgagaagttcattgtctcgtttgtgattcttccagatgtgatgcttgatattttctatatgcgagttagccatccacacccaggcatagcctggatacagtataaaaatagataattaaaaagatggttgccaagcaaggaaaacttattttatattttcccttccttattttaagcattgtgagtaaatcagatgttgaattcttttgccaagggaattatagctgcaggttctctctcactgccatcaaactgtaaaagattaaactgcgaagtcaagctcaacagattattttggaaagtttttgtattaagggatttagtaacatcattttgttttccaccaggcagggagtagggcttagtgttttaaaacacctctgctttctgatgttgccttaatattctgctattgcagcaattaaaaattgtcttcatgtacatttggaactaacacgtgatgtgatatattcctaaactatgaaacctttttcctagtagtcagctagatcatttgttctgggagtataaagccacccacgtaagttaataagcaaaatcctgactattatgttgttagagaaaaatgctttgctttgtctggaagaaagataaaatagtgaattataaataagtcaggccgggcgtggtggctcacacctgtaatcccagcacactgggaggccgaggcagggggactgcttgagctcaggagttcgagaccagcctgggcaacaaagtgagactccatctctatataaaaacaaaaaccacgaaagcacacacaaaataaatcagtgggatttggtaatgtgttttagagtaagaaatttcaggttgttggtgactatcccaacagtcatgttttaaatgtacagtttggggcaagtcatgtaaatactgttggtggtcttccccacacgccccaattttcaggtagtactaagagtatgtgccaggaaactcttgctattgaattgagatgattaaaatggtgacttaatccgtagttattttgcacccactgaaaggaaagtgctttccagaataatatgaagtatctaaaagtgtcaccttttcttgcctgatcaacaatttgggcttcctgtttgtacaaggggccatttggcatacctttcacagcttttatcaggccaagttaaaggctgactacattttttcatcatgaggaaagcagttgaaatgaggcatgagttactgtgcattgggattttagaacaattttcttgtgacagctctttttgtgaagttaggttcttaaaagtgcccatgatggtcacttaaaatgtgcagtaatagcactgccaggatcaagcatgaaaggcttttaaattagatcatcccacagacaatacgtttgataatagttttttcttttaacctctttaagtattgattctgcttgagaatattgaagtacttgccagaagttgtggatttcagttttaacaaatgctattaaagtggagaagcacactctggtcttggaattccatttgaggatttagaagtgtcatgtttataactattcagttgtgtttgttgctggcttgttgtaaagcaataaaatttttttggtctttttgt

SEQ ID NO: 426863 - DNA, 3190 bp, Homo sapiens
ggggaaaccgttatagggcatgaaaggggaaaccgttatagggcatggaaggggaattaggacaaggtgtgagtggaaagagaaacatcccaccgcacacgcttaaaaaagccgtttaatttaaaaataggtaatacagccatacagagaagacattaaaagatctacacagaaaattttcgctcccaatccattccctactcacagtcctacatacgttacttttattttccttttttttggaaatgcactggccccctactctctcacgaaggctgaactctctctacattcttctgcacctgttttttgtgcatactctttcgttgtcaaatatttccctccaactgttgttgtgtatgaaataaatacacacatataagctaaccagccccacttgcccgcaccacctacacgcccgtccccgccctccctcaggcccacgtgctccgagggccgccttcgcaggttgtttctggcgatgcctgtctgaaggcctcagactgaggccccgcccactctccctctcctctgccctttggacgcgcgcctcggttccgaacgcagcggacggcgcctcaggcagcgcggcggacagcccgtcctccggcgcgccgcgagcctcggaggaccctagcgacggtcgtggcgtaagaccggggggacgcggcggtagcggcggccgttgcgattgattgcgctggttgcctgcggcgtccacttccttggccgcccttgctacactggctgattgttgtgcagccggcgccatgtctgtgagcgagatcttcgtggagctgcagggctttttggctgccgagcaggacatccgagagatttcatgagcactggaggtttgtgttgcagcgcttggtcttcttggcagcatttgttgtgtatttggaaacagaaacactagtgactcgagaagcagttacagaaattcttggcattgagccagatcgggagaaaggatttcatctggatgtagaagattatctctcaggagttctaattcttgccagtgaactgtcgaggctgtctgtcaacagcgtgactgctggagactactcccgacccctccacatctccaccttcatcaatgagctggattccggttttcgccttctcaacctgaaaaatgactccctgaggaagcgctacgacggattgaaatatgacgtgaagaaagtagaggaagtggtctatgatctctccatccggggctttaataaggagacggcagcagcttgtgttgaaaaataggaggctctccttgctcctggccttgctgacctcagcggttgccaggaaggggtgagcacagagtgcctcttacggtagttaggatgctcagttgctaaacactgcgctttattttcttaaccagttgtggtgtgagtatcagaattgaaacacttttttgggggtaaaaaatatagcctttacatggacagaattttttttgttgtttcagtgaatatgcctgtaattcagtgtatttcagttccgtcagaaagtgtaaatgttagtttcttggtaaagtccttttcttgcttaccttgactgttgatgtactgattgagaagttcattgtctcgtttgtgattcttccagatgtgatgcttgatattttctatatgcgagttagccatccacacccaggcatagcctggatacagtataaaaatagataattaaaaagatggttgccaagcaaggaaaacttattttatattttcccttccttattttaagcattgtgagtaaatcagatgttgaattcttttgccaagggaattatagctgcaggttctctctcactgccatcaaactgtaaaagattaaactgcgaagtcaagctcaacagattattttggaaagtttttgtattaagggatttagtaacatcattttgttttccaccaggcagggagtagggcttagtgttttaaaacacctctgctttctgatgttgccttaatattctgctattgcagcaattaaaaattgtcttcatgtacatttggaactaacacgtgatgtgatatattcctaaactatgaaacctttttcctagtagtcagctagatcatttgttctgggagtataaagccacccacgtaagttaataagcaaaatcctgactattatgttgttagagaaaaatgctttgctttgtctggaagaaagataaaatagtgaattataaataagtcaggccgggcgtggtggctcacacctgtaatcccagcacactgggaggccgaggcagggggactgcttgagctcaggagttcgagaccagcctgggcaacaaagtgagactccatctctatataaaaacaaaaaccacgaaagcacacacaaaataaatcagtgggatttggtaatgtgttttagagtaagaaatttcaggttgttggtgactatcccaacagtcatgttttaaatgtacagtttggggcaagtcatgtaaatactgttggtggtcttccccacacgccccaattttcaggtagtactaagagtatgtgccaggaaactcttgctattgaattgagatgattaaaatggtgacttaatccgtagttattttgcacccactgaaaggaaagtgctttccagaataatatgaagtatctaaaagtgtcaccttttcttgcctgatcaacaatttgggcttcctgtttgtacaaggggccatttggcatacctttcacagcttttatcaggccaagttaaaggctgactacattttttcatcatgaggaaagcagttgaaatgaggcatgagttactgtgcattgggattttagaacaattttcttgtgacagctctttttgtgaagttaggttcttaaaagtgcccatgatggtcacttaaaatgtgcagtaatagcactgccaggatcaagcatgaaaggcttttaaattagatcatcccacagacaatacgtttgataatagttttttcttttaacctctttaagtattgattctgcttgagaatattgaagtacttgccagaagttgtggatttcagttttaacaaatgctattaaagtggagaagcacactctggtcttggaattccatttgaggatttagaagtgtcatgtttataactattcagttgtgtttgttgctggcttgttgtaaagcaataaaatttttttggtctttttgt

SEQ ID NO: 426864 - DNA, 3265 bp, Homo sapiens
ggggaaaccgttatagggcatgaaaggggaaaccgttatagggcatggaaggggaattaggacaaggtgtgagtggaaagagaaacatcccaccgcacacgcttaaaaaagccgtttaatttaaaaataggtaatacagccatacagagaagacattaaaagatctacacagaaaattttcgctcccaatccattccctactcacagtcctacatacgttacttttattttccttttttttggaaatgcactggccccctactctctcacgaaggctgaactctctctacattcttctgcacctgttttttgtgcatactctttcgttgtcaaatatttccctccaactgttgttgtgtatgaaataaatacacacatataagctaaccagccccacttgcccgcaccacctacacgcccgtccccgccctccctcaggcccacgtgctccgagggccgccttcgcaggttgtttctggcgatgcctgtctgaaggcctcagactgaggccccgcccactctccctctcctctgccctttggacgcgcgcctcggttccgaacgcagcggacggcgcctcaggcagcgcggcggacagcccgtcctccggcgcgccgcgagcctcggaggaccctagcgacggtcgtggcgtaagaccggggggacgcggcggtagcggcggccgttgcgattgattgcgctggttgcctgcggcgtccacttccttggccgcccttgctacactggctgattgttgtgcagccggcgccatgtctgtgagcgagatcttcgtggagctgcagggctttttggctgccgagcaggacatccgagaggaaatcagaaaagttgtacagagtttagaacaaacagctcgagagattttaactctactgcaaggggtccatcagggtgctgggtttcaggacattccaaagaggtgtttgaaagctcgagaacattttggtacagtaaaaacacatctaacatctttgaagaccaaatttcctgctgaacagtattacagttgagccagatcgggagaaaggatttcatctggatgtagaagattatctctcaggagttctaattcttgccagtgaactgtcgaggctgtctgtcaacagcgtgactgctggagactactcccgacccctccacatctccaccttcatcaatgagctggattccggttttcgccttctcaacctgaaaaatgactccctgaggaagcgctacgacggattgaaatatgacgtgaagaaagtagaggaagtggtctatgatctctccatccggggctttaataaggagacggcagcagcttgtgttgaaaaataggaggctctccttgctcctggccttgctgacctcagcggttgccaggaaggggtgagcacagagtgcctcttacggtagttaggatgctcagttgctaaacactgcgctttattttcttaaccagttgtggtgtgagtatcagaattgaaacacttttttgggggtaaaaaatatagcctttacatggacagaattttttttgttgtttcagtgaatatgcctgtaattcagtgtatttcagttccgtcagaaagtgtaaatgttagtttcttggtaaagtccttttcttgcttaccttgactgttgatgtactgattgagaagttcattgtctcgtttgtgattcttccagatgtgatgcttgatattttctatatgcgagttagccatccacacccaggcatagcctggatacagtataaaaatagataattaaaaagatggttgccaagcaaggaaaacttattttatattttcccttccttattttaagcattgtgagtaaatcagatgttgaattcttttgccaagggaattatagctgcaggttctctctcactgccatcaaactgtaaaagattaaactgcgaagtcaagctcaacagattattttggaaagtttttgtattaagggatttagtaacatcattttgttttccaccaggcagggagtagggcttagtgttttaaaacacctctgctttctgatgttgccttaatattctgctattgcagcaattaaaaattgtcttcatgtacatttggaactaacacgtgatgtgatatattcctaaactatgaaacctttttcctagtagtcagctagatcatttgttctgggagtataaagccacccacgtaagttaataagcaaaatcctgactattatgttgttagagaaaaatgctttgctttgtctggaagaaagataaaatagtgaattataaataagtcaggccgggcgtggtggctcacacctgtaatcccagcacactgggaggccgaggcagggggactgcttgagctcaggagttcgagaccagcctgggcaacaaagtgagactccatctctatataaaaacaaaaaccacgaaagcacacacaaaataaatcagtgggatttggtaatgtgttttagagtaagaaatttcaggttgttggtgactatcccaacagtcatgttttaaatgtacagtttggggcaagtcatgtaaatactgttggtggtcttccccacacgccccaattttcaggtagtactaagagtatgtgccaggaaactcttgctattgaattgagatgattaaaatggtgacttaatccgtagttattttgcacccactgaaaggaaagtgctttccagaataatatgaagtatctaaaagtgtcaccttttcttgcctgatcaacaatttgggcttcctgtttgtacaaggggccatttggcatacctttcacagcttttatcaggccaagttaaaggctgactacattttttcatcatgaggaaagcagttgaaatgaggcatgagttactgtgcattgggattttagaacaattttcttgtgacagctctttttgtgaagttaggttcttaaaagtgcccatgatggtcacttaaaatgtgcagtaatagcactgccaggatcaagcatgaaaggcttttaaattagatcatcccacagacaatacgtttgataatagttttttcttttaacctctttaagtattgattctgcttgagaatattgaagtacttgccagaagttgtggatttcagttttaacaaatgctattaaagtggagaagcacactctggtcttggaattccatttgaggatttagaagtgtcatgtttataactattcagttgtgtttgttgctggcttgttgtaaagcaataaaatttttttggtctttttgt

SEQ ID NO: 426865 - DNA, 3301 bp, Homo sapiens
ggggaaaccgttatagggcatgaaaggggaaaccgttatagggcatggaaggggaattaggacaaggtgtgagtggaaagagaaacatcccaccgcacacgcttaaaaaagccgtttaatttaaaaataggtaatacagccatacagagaagacattaaaagatctacacagaaaattttcgctcccaatccattccctactcacagtcctacatacgttacttttattttccttttttttggaaatgcactggccccctactctctcacgaaggctgaactctctctacattcttctgcacctgttttttgtgcatactctttcgttgtcaaatatttccctccaactgttgttgtgtatgaaataaatacacacatataagctaaccagccccacttgcccgcaccacctacacgcccgtccccgccctccctcaggcccacgtgctccgagggccgccttcgcaggttgtttctggcgatgcctgtctgaaggcctcagactgaggccccgcccactctccctctcctctgccctttggacgcgcgcctcggttccgaacgcagcggacggcgcctcaggcagcgcggcggacagcccgtcctccggcgcgccgcgagcctcggaggaccctagcgacggtcgtggcgtaagaccggggggacgcggcggtagcggcggccgttgcgattgattgcgctggttgcctgcggcgtccacttccttggccgcccttgctacactggctgattgttgtgcagccggcgccatgtctgtgagcgagatcttcgtggagctgcagggctttttggctgccgagcaggacatccgagaggaaatcagaaaagttgtacagagtttagaacaaacagctcgagagattttaactctactgcaaggggtccatcagggtgctgggtttcaggacattccaaagaggtgtttgaaagctcgagaacattttggtacagtaaaaacacatctaacatctttgaagaccaaatttcctgctgaacagtattacagatttcatgagcactggaggtttgtgttgcagcgcttggtcttcttggcagcatttgttgtgtatttggaaacagaaacactagtgactcgagaagcagttacagaaattcttggcatcgaggctgtctgtcaacagcgtgactgctggagactactcccgacccctccacatctccaccttcatcaatgagctggattccggttttcgccttctcaacctgaaaaatgactccctgaggaagcgctacgacggattgaaatatgacgtgaagaaagtagaggaagtggtctatgatctctccatccggggctttaataaggagacggcagcagcttgtgttgaaaaataggaggctctccttgctcctggccttgctgacctcagcggttgccaggaaggggtgagcacagagtgcctcttacggtagttaggatgctcagttgctaaacactgcgctttattttcttaaccagttgtggtgtgagtatcagaattgaaacacttttttgggggtaaaaaatatagcctttacatggacagaattttttttgttgtttcagtgaatatgcctgtaattcagtgtatttcagttccgtcagaaagtgtaaatgttagtttcttggtaaagtccttttcttgcttaccttgactgttgatgtactgattgagaagttcattgtctcgtttgtgattcttccagatgtgatgcttgatattttctatatgcgagttagccatccacacccaggcatagcctggatacagtataaaaatagataattaaaaagatggttgccaagcaaggaaaacttattttatattttcccttccttattttaagcattgtgagtaaatcagatgttgaattcttttgccaagggaattatagctgcaggttctctctcactgccatcaaactgtaaaagattaaactgcgaagtcaagctcaacagattattttggaaagtttttgtattaagggatttagtaacatcattttgttttccaccaggcagggagtagggcttagtgttttaaaacacctctgctttctgatgttgccttaatattctgctattgcagcaattaaaaattgtcttcatgtacatttggaactaacacgtgatgtgatatattcctaaactatgaaacctttttcctagtagtcagctagatcatttgttctgggagtataaagccacccacgtaagttaataagcaaaatcctgactattatgttgttagagaaaaatgctttgctttgtctggaagaaagataaaatagtgaattataaataagtcaggccgggcgtggtggctcacacctgtaatcccagcacactgggaggccgaggcagggggactgcttgagctcaggagttcgagaccagcctgggcaacaaagtgagactccatctctatataaaaacaaaaaccacgaaagcacacacaaaataaatcagtgggatttggtaatgtgttttagagtaagaaatttcaggttgttggtgactatcccaacagtcatgttttaaatgtacagtttggggcaagtcatgtaaatactgttggtggtcttccccacacgccccaattttcaggtagtactaagagtatgtgccaggaaactcttgctattgaattgagatgattaaaatggtgacttaatccgtagttattttgcacccactgaaaggaaagtgctttccagaataatatgaagtatctaaaagtgtcaccttttcttgcctgatcaacaatttgggcttcctgtttgtacaaggggccatttggcatacctttcacagcttttatcaggccaagttaaaggctgactacattttttcatcatgaggaaagcagttgaaatgaggcatgagttactgtgcattgggattttagaacaattttcttgtgacagctctttttgtgaagttaggttcttaaaagtgcccatgatggtcacttaaaatgtgcagtaatagcactgccaggatcaagcatgaaaggcttttaaattagatcatcccacagacaatacgtttgataatagttttttcttttaacctctttaagtattgattctgcttgagaatattgaagtacttgccagaagttgtggatttcagttttaacaaatgctattaaagtggagaagcacactctggtcttggaattccatttgaggatttagaagtgtcatgtttataactattcagttgtgtttgttgctggcttgttgtaaagcaataaaatttttttggtctttttgt

SEQ ID NO: 426866 - DNA, 1325 bp, Homo sapiens
gcatcccccggtctgcaggaattcggttcgagggatttagtaacatcattttgttttccaccaggcagggagtagggcttagtgttttaaaacacctctgctttctgatgttgccttaatattctgctattgcagcaattaaaaattgtcttcatgtacatttggaactaacacgtgatgtgatatattcctaaactatgaaacctttttcctagtagtcagctagatcatttgttctgggagtataaagccacccacgtaagttaataagcaaaatcctgactattatgttgttagagaaaaatgctttgctttgtctggaagaaagataaaatagtgaattataaataagtcaggccgggcgtggtggctcacacctgtaatcccagcacactgggaggccgaggcagggggactgcttgagctcaggagttcgagaccagcctgggcaacaaagtgagactccatctctatataaaaacaaaaaccacgaaagcacacacaaaataaatcagtgggatttggtaatgtgttttagagtaagaaatttcaggttgttggtgactatcccaacagtcatgttttaaatgtacagtttggggcaagtcatgtaaatactgttggtggtcttccccacacgccccaattttcaggtagtactaagagtatgtgccaggaaactcttgctattgaattgagatgattaaaatggtgacttaatccgtagttattttgcacccactgaaaggaaagtgctttccagaataatatgaagtatctaaaagtgtcaccttttcttgcctgatcaacaatttgggcttcctgtttgtacaaggggccatttggcatacctttcacagcttttatcaggccaagttaaaggctgactacattttttcatcatgaggaaagcagttgaaatgaggcatgagttactgtgcattgggattttagaacaattttcttgtgacagctctttttgtgaagttaggttcttaaaagtgcccatgatggtcacttaaaatgtgcagtaatagcactgccaggatcaagcatgaaaggcttttaaattagatcatcccacagacaatacgtttgataatagttttttcttttaacctctttaagtattgattctgcttgagaatattgaagtacttgccagaagttgtggatttcagttttaacaaatgctattaaagtggagaagcacactctggtcttggaattccatttgaggatttagaagtgtcatgtttataactattcagttgtgtttgttgctggcttgttgtaaagcaataaaatttttttggtctttttgt

SEQ ID NO: 426867 - DNA, 1038 bp, Homo sapiens
taacatgatcaatcagctcggtaccctcgatagggccaaagataaaatagtgaattataaataagtcaggccgggcgtggtggctcacacctgtaatcccagcacactgggaggccgaggcagggggactgcttgagctcaggagttcgagaccagcctgggcaacaaagtgagactccatctctatataaaaacaaaaaccacgaaagcacacacaaaataaatcagtgggatttggtaatgtgttttagagtaagaaatttcaggttgttggtgactatcccaacagtcatgttttaaatgtacagtttggggcaagtcatgtaaatactgttggtggtcttccccacacgccccaattttcaggtagtactaagagtatgtgccaggaaactcttgctattgaattgagatgattaaaatggtgacttaatccgtagttattttgcacccactgaaaggaaagtgctttccagaataatatgaagtatctaaaagtgtcaccttttcttgcctgatcaacaatttgggcttcctgtttgtacaaggggccatttggcatacctttcacagcttttatcaggccaagttaaaggctgactacattttttcatcatgaggaaagcagttgaaatgaggcatgagttactgtgcattgggattttagaacaattttcttgtgacagctctttttgtgaagttaggttcttaaaagtgcccatgatggtcacttaaaatgtgcagtaatagcactgccaggatcaagcatgaaaggcttttaaattagatcatcccacagacaatacgtttgataatagttttttcttttaacctctttaagtattgattctgcttgagaatattgaagtacttgccagaagttgtggatttcagttttaacaaatgctattaaagtggagaagcacactctggtcttggaattccatttgaggatttagaagtgtcatgtttataactattcagttgtgtttgttgctggcttgttgtaaagcaataaaatttttttggtctttttgt

SEQ ID NO: 426868 - DNA, 853 bp, Homo sapiens
catgctgctcttgaggtaaccgacgccactgaaaataaatcagtgggatttggtaatgtgttttagagtaagaaatttcaggttgttggtgactatcccaacagtcatgttttaaatgtacagtttggggcaagtcatgtaaatactgttggtggtcttccccacacgccccaattttcaggtagtactaagagtatgtgccaggaaactcttgctattgaattgagatgattaaaatggtgacttaatccgtagttattttgcacccactgaaaggaaagtgctttccagaataatatgaagtatctaaaagtgtcaccttttcttgcctgatcaacaatttgggcttcctgtttgtacaaggggccatttggcatacctttcacagcttttatcaggccaagttaaaggctgactacattttttcatcatgaggaaagcagttgaaatgaggcatgagttactgtgcattgggattttagaacaattttcttgtgacagctctttttgtgaagttaggttcttaaaagtgcccatgatggtcacttaaaatgtgcagtaatagcactgccaggatcaagcatgaaaggcttttaaattagatcatcccacagacaatacgtttgataatagttttttcttttaacctctttaagtattgattctgcttgagaatattgaagtacttgccagaagttgtggatttcagttttaacaaatgctattaaagtggagaagcacactctggtcttggaattccatttgaggatttagaagtgtcatgtttataactattcagttgtgtttgttgctggcttgttgtaaagcaataaaatttttttggtctttttgt

SEQ ID NO: 426869 - DNA, 436 bp, Homo sapiens
cagtgtgtctcctaatatattcccttttagcaagttgtttatttttcagtatagctaattagtagggaaactggggatgatattttgaaagccaggttgaaaagcacagatgtgtacgttagttgtgaggtttttttgttgattaatttccagatagattacttagattattaagcaagaactgtatttgaaatttggttaagtttttcatttggttatcttttgtgactagttccaaagaggtgtttgaaagctcgagaacattttggtacagtaaaaacacatctaacatctttgaagaccaaatttcctgctgaacagtattacaggtttgtaagaaaaatagcattattttataatgttaagtaaaaaaaaggagaaaaattatgtgtaccaaatgattgcttacaactaggcaaacatcctgtgtagaagt

SEQ ID NO: 426870 - DNA, 1913 bp, Homo sapiens
ggggaaaccgttatagggcatgaaaggggaaaccgttatagggcatggaaggggaattaggacaaggtgtgagtggaaagagaaacatcccaccgcacacgcttaaaaaagccgtttaatttaaaaataggtaatacagccatacagagaagacattaaaagatctacacagaaaattttcgctcccaatccattccctactcacagtcctacatacgttacttttattttccttttttttggaaatgcactggccccctactctctcacgaaggctgaactctctctacattcttctgcacctgttttttgtgcatactctttcgttgtcaaatatttccctccaactgttgttgtgtatgaaataaatacacacatataagctaaccagccccacttgcccgcaccacctacacgcccgtccccgccctccctcaggcccacgtgctccgagggccgccttcgcaggttgtttctggcgatgcctgtctgaaggcctcagactgaggccccgcccactctccctctcctctgccctttggacgcgcgcctcggttccgaacgcagcggacggcgcctcaggcagcgcggcggacagcccgtcctccggcgcgccgcgagcctcggaggaccctagcgacggtcgtggcgtaagaccggggggacgcggcggtagcggcggccgttgcgattgattgcgctggttgcctgcggcgtccacttccttggccgcccttgctacactggctgattgttgtgcagccggcgccatgtctgtgagcgagatcttcgtggagctgcagggctttttggctgccgagcaggacatccgagaggaaatcagaaaagttgtacagagtttagaacaaacagctcgagagattttaactctactgcaaggggtccatcagggtgctgggtttcaggacattccaaagaggtgtttgaaagctcgagaacattttggtacagtaaaaacacatctaacatctttgaagaccaaatttcctgctgaacagtattacagatttcatgagcactggaggtttgtgttgcagcgcttggtcttcttggcagcatttgttgtgtatttggaaacagaaacactagtgactcgagaagcagttacagaaattcttggcattgagccagatcgggagaaaggatttcatctggatgtagaagattatctctcaggagttctaattcttgccagtgaactgtcgaggctgtctgtcaacagcgtgactgctggagactactcccgacccctccacatctccaccttcatcaatgagctggattccggttttcgccttctcaacctgaaaaatgactccctgaggaagcgctacgacggattgaaatatgacgtgaagaaagtagaggaagtggtctatgatctctccatccggggctttaataaggagacggcagcagcttgtgttgaaaaataggaggctctccttgctcctggccttgctgacctcagcggttgccaggaaggggtgagcacagagtgcctcttacggtagttaggatgctcagttgctaaacactgcgctttattttcttaaccagttgtggtgtgagtatcagaattgaaacacttttttgggggtaaaaaatatagcctttacatggacagaattttttttgttgtttcagtgaatatgcctgtaattcagtgtatttcagttccgtcagaaagtgtaaatgttagtttcttggtaaagtccttttcttgcttaccttgactgttgatgtactgattgagaagttcattgtctcgtttgtgattcttccagatgtgatgcttgatattttctatatgcgagttagccatccacacccaggcatagcctggatacagtataaaaatagataattaaaaagatggttgccaagcaagg

SEQ ID NO: 426871 - DNA, 2450 bp, Homo sapiens
ttacaacagctcctacaacagctccagttacaacagctacgtaaaaacacatctaacatctttgaagaccaaatttcctgctgaacagtattacagatttcatgagcactggaggtttgtgttgcagcgcttggtcttcttggcagcatttgttgtgtatttggaaacagaaacactagtgactcgagaagcagttacagaaattcttggcattgagccagatcgggagaaaggatttcatctggatgtagaagattatctctcaggagttctaattcttgccagtgaactgtcgaggctgtctgtcaacagcgtgactgctggagactactcccgacccctccacatctccaccttcatcaatgagctggattccggttttcgccttctcaacctgaaaaatgactccctgaggaagcgctacgacggattgaaatatgacgtgaagaaagtagaggaagtggtctatgatctctccatccggggctttaataaggagacggcagcagcttgtgttgaaaaataggaggctctccttgctcctggccttgctgacctcagcggttgccaggaaggggtgagcacagagtgcctcttacggtagttaggatgctcagttgctaaacactgcgctttattttcttaaccagttgtggtgtgagtatcagaattgaaacacttttttgggggtaaaaaatatagcctttacatggacagaattttttttgttgtttcagtgaatatgcctgtaattcagtgtatttcagttccgtcagaaagtgtaaatgttagtttcttggtaaagtccttttcttgcttaccttgactgttgatgtactgattgagaagttcattgtctcgtttgtgattcttccagatgtgatgcttgatattttctatatgcgagttagccatccacacccaggcatagcctggatacagtataaaaatagataattaaaaagatggttgccaagcaaggaaaacttattttatattttcccttccttattttaagcattgtgagtaaatcagatgttgaattcttttgccaagggaattatagctgcaggttctctctcactgccatcaaactgtaaaagattaaactgcgaagtcaagctcaacagattattttggaaagtttttgtattaagggatttagtaacatcattttgttttccaccaggcagggagtagggcttagtgttttaaaacacctctgctttctgatgttgccttaatattctgctattgcagcaattaaaaattgtcttcatgtacatttggaactaacacgtgatgtgatatattcctaaactatgaaacctttttcctagtagtcagctagatcatttgttctgggagtataaagccacccacgtaagttaataagcaaaatcctgactattatgttgttagagaaaaatgctttgctttgtctggaagaaagataaaatagtgaattataaataagtcaggccgggcgtggtggctcacacctgtaatcccagcacactgggaggccgaggcagggggactgcttgagctcaggagttcgagaccagcctgggcaacaaagtgagactccatctctatataaaaacaaaaaccacgaaagcacacacaaaataaatcagtgggatttggtaatgtgttttagagtaagaaatttcaggttgttggtgactatcccaacagtcatgttttaaatgtacagtttggggcaagtcatgtaaatactgttggtggtcttccccacacgccccaattttcaggtagtactaagagtatgtgccaggaaactcttgctattgaattgagatgattaaaatggtgacttaatccgtagttattttgcacccactgaaaggaaagtgctttccagaataatatgaagtatctaaaagtgtcaccttttcttgcctgatcaacaatttgggcttcctgtttgtacaaggggccatttggcatacctttcacagcttttatcaggccaagttaaaggctgactacattttttcatcatgaggaaagcagttgaaatgaggcatgagttactgtgcattgggattttagaacaattttcttgtgacagctctttttgtgaagttaggttcttaaaagtgcccatgatggtcacttaaaatgtgcagtaatagcactgccaggatcaagcatgaaaggcttttaaattagatcatcccacagacaatacgtttgataatagttttttcttttaacctctttaagtattgattctgcttgagaatattgaagtacttgccagaagttgtggatttcagttttaacaaatgctattaaagtggagaagcacactctggtcttggaattccatttgaggatttagaagtgtcatgtttataactattcagttgtgtttgttgctggcttgttgtaaagcaataaaatttttttggtctttttgt

SEQ ID NO: 426872 - DNA, 2288 bp, Homo sapiens
ctcgctactcaatacagtttaccaagaagcattcgagaaaattcttggcattgagccagatcgggagaaaggatttcatctggatgtagaagattatctctcaggagttctaattcttgccagtgaactgtcgaggctgtctgtcaacagcgtgactgctggagactactcccgacccctccacatctccaccttcatcaatgagctggattccggttttcgccttctcaacctgaaaaatgactccctgaggaagcgctacgacggattgaaatatgacgtgaagaaagtagaggaagtggtctatgatctctccatccggggctttaataaggagacggcagcagcttgtgttgaaaaataggaggctctccttgctcctggccttgctgacctcagcggttgccaggaaggggtgagcacagagtgcctcttacggtagttaggatgctcagttgctaaacactgcgctttattttcttaaccagttgtggtgtgagtatcagaattgaaacacttttttgggggtaaaaaatatagcctttacatggacagaattttttttgttgtttcagtgaatatgcctgtaattcagtgtatttcagttccgtcagaaagtgtaaatgttagtttcttggtaaagtccttttcttgcttaccttgactgttgatgtactgattgagaagttcattgtctcgtttgtgattcttccagatgtgatgcttgatattttctatatgcgagttagccatccacacccaggcatagcctggatacagtataaaaatagataattaaaaagatggttgccaagcaaggaaaacttattttatattttcccttccttattttaagcattgtgagtaaatcagatgttgaattcttttgccaagggaattatagctgcaggttctctctcactgccatcaaactgtaaaagattaaactgcgaagtcaagctcaacagattattttggaaagtttttgtattaagggatttagtaacatcattttgttttccaccaggcagggagtagggcttagtgttttaaaacacctctgctttctgatgttgccttaatattctgctattgcagcaattaaaaattgtcttcatgtacatttggaactaacacgtgatgtgatatattcctaaactatgaaacctttttcctagtagtcagctagatcatttgttctgggagtataaagccacccacgtaagttaataagcaaaatcctgactattatgttgttagagaaaaatgctttgctttgtctggaagaaagataaaatagtgaattataaataagtcaggccgggcgtggtggctcacacctgtaatcccagcacactgggaggccgaggcagggggactgcttgagctcaggagttcgagaccagcctgggcaacaaagtgagactccatctctatataaaaacaaaaaccacgaaagcacacacaaaataaatcagtgggatttggtaatgtgttttagagtaagaaatttcaggttgttggtgactatcccaacagtcatgttttaaatgtacagtttggggcaagtcatgtaaatactgttggtggtcttccccacacgccccaattttcaggtagtactaagagtatgtgccaggaaactcttgctattgaattgagatgattaaaatggtgacttaatccgtagttattttgcacccactgaaaggaaagtgctttccagaataatatgaagtatctaaaagtgtcaccttttcttgcctgatcaacaatttgggcttcctgtttgtacaaggggccatttggcatacctttcacagcttttatcaggccaagttaaaggctgactacattttttcatcatgaggaaagcagttgaaatgaggcatgagttactgtgcattgggattttagaacaattttcttgtgacagctctttttgtgaagttaggttcttaaaagtgcccatgatggtcacttaaaatgtgcagtaatagcactgccaggatcaagcatgaaaggcttttaaattagatcatcccacagacaatacgtttgataatagttttttcttttaacctctttaagtattgattctgcttgagaatattgaagtacttgccagaagttgtggatttcagttttaacaaatgctattaaagtggagaagcacactctggtcttggaattccatttgaggatttagaagtgtcatgtttataactattcagttgtgtttgttgctggcttgttgtaaagcaataaaatttttttggtctttttgt

SEQ ID NO: 426873 - DNA, 869 bp, Homo sapiens
caagaatttccatagaattgacgcttccttaaaaaaatgaagttaatccggatgggtaaacccttccccccacagggtatccaggaataccggaccccgtaaagagatcccccttggaaaattaaggccaataatagggtttcaagatgtttcacccctattttgaagaggaagaagatgaagattaaagaagaactgccagatatggaaggatatgaaagaagtggattgtgtgaaccagataggcctcccctagatccaaggaaatagttagaagcttgtaaagccaaaactgatgctgccggtgaagatgctattttcaaaccagaccttatgacctttacatcacttatgataaatattacaagactccacgattatggttgtttggctatgatgagcaacggcagcctttaacagttgagcacatgtatgaagacatcagtcaggatcatgtgaagaaaacagtgaccattgaaaatcaccctcatctgccaccacctcccatgtgttcagttcacccatgcaggcatgctgaggtgatgaagaaaatcattgagactgttgcagaaggagggggagaacttggagttcatatgtatcttcttattttcttgaaatttgtacaagctgtcattccaacaatagaatatgactacacaagacacttcacaatgtaatgaagagagcataaaatctatcctaattattggttctgatttttaaagaattaacccatagatgtgaccattgaccatattcatcaatatatacagtttctctaataagggacttatatgtttatgcattaaataaaaatatgttccactaccagccttacttgtttaataaaaatcagtgcaaagaga

SEQ ID NO: 426874 - DNA, 1626 bp, Homo sapiens
caagaatttccatagaattgacgcttccttaaaaaaatgaagttaatccggatgggtaaacccttccccccacagggtatccaggaataccggaccccgtaaagagatcccccttggaaaattaaggccaataatagggtttcaagatgtttcacccctattttgaagaggaagaagatgaagattaaagaagaactgccagatatggaaggatatgaaagaagtggattgtgtgaaccagataggcctcccctagatccaaggaaatagttagaagcttgtaaagccaaaactgatgctgccggtgaagatgctattttcaaaccagaccttatgacctttacatcacttatgataaatattacaagactccacgattatggttgtttggctatgatgagcaacggcagcctttaacagttgagcacatgtatgaagacatcagtcaggatcatgtgaagaaaacagtgaccattgaaaatcaccctcatctgccaccacctcccatgtgttcagttcacccatgcaggcatgctgaggtgatgaagaaaatcattgagactgttgcagaaggagggggagaacttggagttcatatgtatcttcttattttcttgaaatttgtacaagctgtcattccaacaatagaatatgactacacaagacacttcacaatgtaatgaagagagcataaaatctatcctaattattggttctgatttttaaagaattaacccatagatgtgaccattgaccatattcatcaatatatacagtttctctaataagggacttatatgtttatgcattaaataaaaatatgttccactaccagccttacttgtttaataaaaatcagtgcaaagagaaaaaaaaaaaaaaaaaacaacacaaaaaacacaaacacacacacaaaacacaaaaaacaaaaaaaacaaaaacaaacacaccacaccacaacaacaaacaaaacacacacaaaaacaacaaaaaaaacaaaaaaaaaaaggaggcgggcgcccatccaaaaaaaactcccgcggagaggccaaacagaacacgacaaccaccacaatagccaaaaagaggcgcacaaaagagacgacaacatataaaacaaggagagagacaacaataaagagaaagggagagaagcagacaacacaagaaaagaaacaacaggagaaaacacaaaaaaggcgagaacacacaagagacacaccacgacaaagaagaacacgacgagcgggagacagaacacgccaggccgcacggcgggccacacacccacagaacgcgcggagagaacgaagcgcgcgacaagagagcaacagaacaatatgcgggagagagacaacacacggacgaccacacgaaacgagacgccggagcgggaggcacgaagacggccggcagcgagcgaacggcccccgaaagcgggcgagagggacgaggaggcgcagcaggcagacgcgagggcaaggacgccccgcagccccgcacgccggcggaggcgagcaagacaggaggcacgacgcgggagcgagcgcagcgagcgacgcagcagcggcgcgcgcgccacgggcggacagcgagccacgggcgcggggcgaaataaacgcacgc

SEQ ID NO: 426875 - DNA, 397 bp, Homo sapiens
agccagaccccaaccaaaacaaaaaaaatataatataaaaatcttcagcgtgactgggcatgctgaggtgatgaagaaaatcattgagactgttgcagaaggagggggagaacttggagttcatatgtatcttcttattttcttgaaatttgtacaagctgtcattccaacaatagaatatgactacacaagacacttcacaatgtaatgaagagagcataaaatctatcctaattattggttctgatttttaaagaattaacccatagatgtgaccattgaccatattcatcaatatatacagtttctctaataagggacttatatgtttatgcattaaataaaaatatgttccactaccagccttacttgtttaataaaaatcagtgcaaagaga

SEQ ID NO: 426876 - DNA, 881 bp, Homo sapiens
ggatgctaggtagcaacttggaagactgtctatatataattcataatagtaattggtttcccccaatgaaaagtaagctcctaatgtttttaagtgcaatgaacataaaaaaatttcagaatttaattaaagacagtccagtagagctcagtctttggcaaatacatacactaacctagaatcagtctactatacaggatttttatttaatttttttctcttttgctatagtacttcattatagtctattctgcctcattttctgacataactctagcaaacttaaaggagtctagtaaatgagtacattttgtactcatttaaacatgtatagctttgtcctttttatgtcaaagtaattgtgcttatatgaacacctactcattaagaagtttcaaattcaataatcgaatgagtggtcaggtagtcttaaagagcctcatgttaaatagacacaaatttgcatagttgaattctttaatagacttaatttaagattttgtggggtttttttgagaaattaatggcttaataaaatggataattacaacatgggcttaaaacatagaactatttacaaatcttattttccttagctaaaaacctttaggtatcttcttattttcttgaaatttgtacaagctgtcattccaacaatagaatatgactacacaagacacttcacaatgtaatgaagagagcataaaatctatcctaattattggttctgatttttaaagaattaacccatagatgtgaccattgaccatattcatcaatatatacagtttctctaataagggacttatatgtttatgcattaaataaaaatatgttccactaccagccttacttgtttaataaaaatcagtgcaaagaga

SEQ ID NO: 426877 - DNA, 833 bp, Homo sapiens
caagaatttccatagaattgacgcttccttaaaaaaatgaagttaatccggatgggtaaacccttccccccacagggtatccaggaataccggaccccgtaaagagatcccccttggaaaattaaggccaataatagggtttcaagatgtttcacccctattttgaagaggaagaagatgaagattaaagaagaactgccagatatggaaggatatgaaagaagtggattgtgtgaaccagataggcctcccctagatccaaggaaatagttagaagcttgtaaagccaaaactgatgctgccggtgaagatgctattttcaaaccagaccttatgacctttacatcacttatgataaatattacaagactccacgattatggttgtttggctatgatgagcaacggcagcctttaacagttgagcacatgtatgaagacatcagtcaggatcatgtgaagaaaacagtgaccattgaaaatcaccctcatctgccaccacctcccatgtgttcagttcacccatgcaggcatgctgaggtgatgaagaaaatcattgagactgttgcagaaggagggggagaacttggagttcatatgtatcttcttattttcttgaaatttgtacaagctgtcattccaacaatagaatatgactacacaagacacttcacaatgtaatgaagagagcataaaatctatcctaattattggttctgatttttaaagaattaacccatagatgtgaccattgaccatattcatcaatatatacagtttctctaataagggacttatatgtttatgcattaaataaaaatatgttccactacc

SEQ ID NO: 426878 - DNA, 399 bp, Homo sapiens
cgagcgtggccgaaagacaaacaaataataattataaatttattccttagcgtgacgcagcatgctgaggtgatgaagaaaatcattgagactgttgcagaaggagggggagaacttggagttcatatgtatcttcttattttcttgaaatttgtacaagctgtcattccaacaatagaatatgactacacaagacacttcacaatgtaatgaagagagcataaaatctatcctaattattggttctgatttttaaagaattaacccatagatgtgaccattgaccatattcatcaatatatacagtttctctaataagggacttatatgtttatgcattaaataaaaatatgttccactaccagccttacttgtttaataaaaatcagtgcaaagaga

SEQ ID NO: 426879 - DNA, 392 bp, Homo sapiens
tttatatattttatcgcattatattggtctcccaaattctttcccctcttcagcatgctgaggtgatgaagaaaatcattgagactgttgcagaaggagggggagaacttggagttcatatgtatcttcttattttcttgaaatttgtacaagctgtcattccaacaatagaatatgactacacaagacacttcacaatgtaatgaagagagcataaaatctatcctaattattggttctgatttttaaagaattaacccatagatgtgaccattgaccatattcatcaatatatacagtttctctaataagggacttatatgtttatgcattaaataaaaatatgttccactaccagccttacttgtttaataaaaatcagtgcaaagaga

SEQ ID NO: 426880 - DNA, 1582 bp, Homo sapiens
gaaaagaggctgaggcaacctgaaggaggagctctcattaccttctgcccatcacttaataaatagccagccaattcatcaacattctggtacactgttggagagatgagacagtcacaccagctgcccctagtggggctcttactgttttcttttattccaagccaactatgcgagatttgtgaggtaagtgaagaaaactacatccgcctaaaacctctgttgaatacaatgatccagtcaaactataacaggggaaccagcgctgtcaatgttgtgttgtccctcaaacttgttggaatccagatccaaaccctgatgcaaaagatgatccaacaaatcaaatacaatgtgaaaagcagattgtcagatgtaagctcgggagagcttgccttgattatactggctttgggagtatgtcgtaacgctgaggaaaacttaatatatgattaccacctgatcgacaagctagaaaataaattccaagcagaaattgaaaatatggaagcacacaatggcactcccctgactaactactaccagctcagcctggacgttttggccttgtgtctgttcaatgggaactactcaaccgccgaagttgtcaaccacttcactcctgaaaataaaaactattattttggtagccagttctcagtagatactggtgcaatggctgtcctggctctgacctgtgtgaagaagagtctaataaatgggcagatcaaagcagatgaaggcagtttaaagaacatcagtatttatacaaagtcactggtagaaaagattctgtctgagaaaaaagaaaatggtctcattggaaacacatttagcacaggagaagccatgcaggccctctttgtatcatcagactattataatgaaaatgactggaattgccaacaaactctgaatacagtgctcacggaaatttctcaaggagcattcagcaatccaaacgctgcagcccaggtcttacctgccctgatgggaaagaccttcttggatattaacaaagactcttcttgcgtctctgcttcaggtaacttcaacatctccgctgatgagcctataactgtgacacctcctgactcacaatcatatatctccgtcaattactctgtgagaatcaatgaaacatatttcaccaatgtcactgtgctaaatggttctgtcttcctcagtgtgatggagaaagcccagaaaatgaatgatactatatttggtttcacaatggaggagcgctcatgggggccctatatcacctgtattcagggcctatgtgccaacaataatgacagaacctactgggaacttctgagtggaggcgaaccactgagccaaggagctggtagttacgttgtccgcaatggagaaaacttggaggttcgctggagcaaatactaataagcccaaactttcctcagctgcataaaatccatttgcagtggagttccatgtttattgtccttatgccttcttcttcatttatcccagtacgagcaggagagttaataacctccccttctctctctacatgttcaataaaagttgttgaaagattaacaactatacaaaaaga

SEQ ID NO: 426881 - DNA, 1201 bp, Homo sapiens
gaaaagaggctgaggcaacctgaaggaggagctctcattaccttctgcccatcacttaataaatagccagccaattcatcaacattctggtacactgttggagagatgagacagtcacaccagctgcccctagtggggctcttactgttttcttttattccaagccaactatgcgagatttgtgaggtaagtgaagaaaactacatccgcctaaaacctctgttgaatacaatgatccagtcaaactataacaggggaaccagcgctgtcaatgttgtgttgtccctcaaacttgttggaatccagatccaaaccctgatgcaaaagatgatccaacaaatcaaatacaatgtgaaaagcagattgtcagatgtaagctcgggagagcttgccttgattatactggctttgggagtatgtcgtaacgctgaggaaaacttaatatatgattaccacctgatcgacaagctagaaaataaattccaagcagaaattgaaaatatggaagcacacaatggcactcccctgactaactactaccagctcagcctggacgttttggccttgtgtctgttcaatgggaactactcaaccgccgaagttgtcaaccacttcactcctgaaaataaaaactattattttggtagccagttctcagtaggtaacttcaacatctccgctgatgagcctataactgtgacacctcctgactcacaatcatatatctccgtcaattactctgtgagaatcaatgaaacatatttcaccaatgtcactgtgctaaatggttctgtcttcctcagtgtgatggagaaagcccagaaaatgaatgatactatatttggtttcacaatggaggagcgctcatgggggccctatatcacctgtattcagggcctatgtgccaacaataatgacagaacctactgggaacttctgagtggaggcgaaccactgagccaaggagctggtagttacgttgtccgcaatggagaaaacttggaggttcgctggagcaaatactaataagcccaaactttcctcagctgcataaaatccatttgcagtggagttccatgtttattgtccttatgccttcttcttcatttatcccagtacgagcaggagagttaataacctccccttctctctctacatgttcaataaaagttgttgaaagattaacaactatacaaaaaga

SEQ ID NO: 426882 - DNA, 387 bp, Homo sapiens
gtcatcaagtgattctcaggtacattaaagtttgagaaatgcctattgttggtttcctttgacaattctaagttccagtaacctacttgctgtcacccacagtttcacaatggaggagcgctcatgggggccctatatcacctgtattcagggcctatgtgccaacaataatgacagaacctactgggaacttctgagtggaggcgaaccactgagccaaggtaagggagagacatgccaaaaagacccatgctaaaaatgcccaaatggagaggggtgtgagcctctgtggggattgggccaaggggttagtagagatgacatccattatttggtgatttagtggccaaatcatttgacccagttctctttcttcttccttttcag

SEQ ID NO: 426883 - DNA, 1402 bp, Homo sapiens
gaaaagaggctgaggcaacctgaaggaggagctctcattaccttctgcccatcacttaataaatagccagccaattcatcaacattctggtacactgttggagagatgagacagtcacaccagctgcccctagtggggctcttactgttttcttttattccaagccaactatgcgagatttgtgtgtcagatgtaagctcgggagagcttgccttgattatactggctttgggagtatgtcgtaacgctgaggaaaacttaatatatgattaccacctgatcgacaagctagaaaataaattccaagcagaaattgaaaatatggaagcacacaatggcactcccctgactaactactaccagctcagcctggacgttttggccttgtgtctgttcaatgggaactactcaaccgccgaagttgtcaaccacttcactcctgaaaataaaaactattattttggtagccagttctcagtagatactggtgcaatggctgtcctggctctgacctgtgtgaagaagagtctaataaatgggcagatcaaagcagatgaaggcagtttaaagaacatcagtatttatacaaagtcactggtagaaaagattctgtctgagaaaaaagaaaatggtctcattggaaacacatttagcacaggagaagccatgcaggccctctttgtatcatcagactattataatgaaaatgactggaattgccaacaaactctgaatacagtgctcacggaaatttctcaaggagcattcagcaatccaaacgctgcagcccaggtcttacctgccctgatgggaaagaccttcttggatattaacaaagactcttcttgcgtctctgcttcaggtaacttcaacatctccgctgatgagcctataactgtgacacctcctgactcacaatcatatatctccgtcaattactctgtgagaatcaatgaaacatatttcaccaatgtcactgtgctaaatggttctgtcttcctcagtgtgatggagaaagcccagaaaatgaatgatactatatttggtttcacaatggaggagcgctcatgggggccctatatcacctgtattcagggcctatgtgccaacaataatgacagaacctactgggaacttctgagtggaggcgaaccactgagccaaggagctggtagttacgttgtccgcaatggagaaaacttggaggttcgctggagcaaatactaataagcccaaactttcctcagctgcataaaatccatttgcagtggagttccatgtttattgtccttatgccttcttcttcatttatcccagtacgagcaggagagttaataacctccccttctctctctacatgttcaataaaagttgttgaaagattaacaactatacaaaaaga

SEQ ID NO: 426884 - DNA, 5163 bp, Homo sapiens
aagtacagacatttctttgaagcctgccgcctgctgcagcagatgattgacatcgccatcgacgggttcctgctcacaccagtgcagaagatctgcaaatacccgctgcagctggccgagctgctcaagtataccacacaggaacacggtgattacagcaacataaaggcagcatatgaggccatgaagaatgtggcctgtctgatcaacgagcgcaagcgcaagctggagagcatcgacaagatagctcgctggcaggtgtctatcgtgggctgggagggactggatatcttagaccgaagctcagaattgattcattctggggagctgaccaaaatcactaagcaaggcaaaagccagcagcggacgttcttcctgtttgaccaccagctggtgtcctgcaagaaggacctgctgcgcagggacatgctgtactacaagggccggctggacatggatgagatggagcttgtggacctgggggatgggcgcgacaaggactgcaacctcagcgtgaaaaatgccttcaagctcgtcagtaggaccacagacgaggtttatttgttttgtgccaaaaaacaagaagacaaggcgaggtggctgcaggcctgtgcagatgaaaggaggcgggtgcaagaggacaaggagatgggaatggaaatttcagaaaaccagaagaaacttgccatgttaaatgctcaaaaggcaggacatggaaagtcaaaagtcaggctacaacaggtgccctgtggccccaccgcaccagggcctgcaccccatccaccagcgccacatcactatgcccacaagcgtcccccagcagcaggtctttggcctggcggaacccaagaggaagtcctcgctcttctggcacaccttcaacaggctcacccccttccggaaatgaaaacaggaggctgtgcttccatggagctgggtgtcaagagaagaactgtctttgtttcttgtgtgcttcaatccagggaaagtttcttggacccagtgatatctttggagacccagctgcctttgtggaagggaggagacggtcatgacacaaagctttatcctacacagaaacacccgtgacccactatgagatggcccagatgtgggacccggtaccatgctctaaagcgagtgattaggcagcagctgaagccacccctgctgatgatgagcaagtgcctgctgcaggtccaaacacagcatccagggctttgcagttcctaaggagtgatgaggttagaggatcacttctgcatttgattttcaaggatgccgtcaagacggggttgacacaatgctgcacgtgtctggtcacacttagaaattgagctcttactctcttctgtaatactgggggacctacagctgccgtggggctgaccacggtgttccctggcatcgtctgtgtccacacagatgctaactggtagtgcaaatgtcatcctgcaaggttcctcttcctgcaagcaaagtggagagaaagaagatgcatctgtcaccttcatcagggtcctcagtgcagagcaacttacgcatcctcaagaatccactgcttttcaggcaaggagggagaaatcctgctgcacactggctttgtcccggagtcggattccctcctgcctgcacgccttcagtaactccgagcagaaatcacatcttgcccacatgctgtaacctaagaaactgctatgcaaggctgggtgctgtggctcatgcctgtaatcccagcactttgggaggccaaggcaggtggatcacctgaggtcaggagttcgagacaagcgtggccaatatggcaaagcccagtctctactaataatacaaaaattagctgggcatggtggcgcatgcctgtaatcccagctactgggaaggctgaggtaggagaatcttttgaatctgggaagcggaggttgcagtgagctgagatcgcaccactgcactccagcctgggagatacagcgagactgtctccaaaaacaaaaacaaaaacaaaaaacattcaaacaactgtttgcaatataaaaagctcatttactgtaatatttatgatacagtgaatatgaaaatgcactggtcagaaggcactctcaaagagccgcactgctcctgacatcgtccttagcaatgaaatcacaaagacagccaaagcagtcctgcttcttggaaatcagaagctgcctttatcacatataaagccaaacagggcataaccatgtcacgtgagcatgtcatcaggcttctgaggacttgttctttataaaaaaagaccttcacaaaatatcttggcttagagatagcagtctttattaacaaaggccacctaggctgacacctgcagataatcatctccttttctttgtctatgttgtacattttcatgatataacttttaactatgtctagagaaggcaggctctgcaagagaggtgccctttcaacccgctcagtgccctggacaggagatgctgtgttaaactgttaatggatatctatatgagaagctcatttttgtatgctatccctgcagtttttttttttctaacaggcccatgtttgagaataaacaagtctgtgatgtcagagaccaaggtgtatacttcagtctgcaggtgtgtggacactcccttctccctgcatgaccccaaatacagagcggatcctgagagtgacatcatgcatcaagaaaacataaccttggtcctcaggtgaacccttggaacattctgtgaccgcctgatgtccattctgagccaccttggcacacatgcttacaggcagcactgctaagggttcaggtgccccatggctgacagcccgagttgcttctgtggaccatcatgccgctcggcacgtcctgagacagaagttgctgcaggaaggagcttctggagaggtcctgtggcatgtgtgggggtgtgtgtgtgtatgtttccttcttgaacagacattccaactttagatgtgtttatagaactgacctttttactaacaaaatacaatgatatatgttggaaactacttaatatgcttttcctgcacaccttagcaataactgtaggggtctctgctagagttgtttgtatgtacagcaattttgaacaaattgttttaaatgtaatataagagaattagtttaaggaagtaaagagaatcatttgcttgtgttacattttcagtgaggattcagtttaagagtcattcttaggacttccatttcctaatatttattcatgggtaatgaagaaatggtttgcattttgtggccagtcctaatttattttccagctgagccctaacttccggctcccacctacctccacggacttcctaacagagacttatgaataccaggatgtgtttttgttaagtcaggttcaattcgttgcccctgtcagttttatagagtgtgagggtcactccattaaagatctctcctgggtggatcctacttggatgttcaggtgattttgaaaactgctaacatttttaaaaggctagaacatcctttgacttcttgaaaatctgcatgtctggcttgggttttattaccacatgcctgagttcttcaagaatggaaggctcaagtattctcatcttccatttgccaaacttccttcctgatttgagtcacgtgttccacttggaaagaaagggaacagagagcctcctccatggacagtgtatgaatttcattgggaatcttgctctctcccgcctctatgcctttctctctttttaaccttactttacataatattatagatgggccaagaaaagaaaagatgacataacattttgatgaatttcacctattccattcttcacgtttcagaattggtcgactttgttagaagataattgaagtagccttgggtcaaaagcaaccttttcaattgtgatcatacctaaaacatataaaaaccctgccgtagattaaaagcaattataaaatcataaaattgaatgtttgcagaatcctggagcagtagatttctttgtctttggcctgcggactagaaagagggcagcagtagtatgctggagcttccctgggataccagccacatggtttcttttcattagatctgatttttgtttcccactgtagatctgattttgtagttgaaaacatttcaccaccatcaaacactatttctgaatattgtgcctttttatacctagcctagatgaaaaccgatgccattcttattcagaaaatccccccatcctacatgactgttatctagacataaagcaaagtgcatttaattcaaaatttggttcacaatataagtattttgtaaaagccagctgaaccagcattttatcaggtggaaatctctgcaagccaaattgctgatactccttcatgcagatcaacttggtgtcccagtcagaatagaacagcataattacctggagttagggggagtatttctgcactattacttgtcagggagagaagaaacttagaattgtccctcaaaggagtgtcaagaagtatgaataaatgtcctttcaccagctcacaggccagaaatggaggacccaagtcaactaggtgaaactactagcagacccagctttcccataataacctaatctgcaaattgttctattaaagtctcattgttttcaggatgcaatgaaagtggatttcaaaaggctttggaaaaataagtggaacatgactgatcttgaaaaaaaaagcaaaagcttaaatatttgatacaagtttacttagctacaacatactttacattgttgcctttagttatctcacaggcactgacattttatatttagaaaatacttttaatctttctaatctttttttgtaaatattagtgtccattctgtatgactcgctaacctactttgcaaggctttgggcaacattttagctcattaacttcaagatgatgtgtcatctgtataggtcaaagaatgggacttctgaactgaggaatttgctgttgacagccaaagtatagtgtacaagattgatgtaacttgatatgtatttttgttgaagttttttgtaaaaaaaaattatttacaatgttatttgaatgatttttttaaatgctgtgaatctatatttgttgttttatatattaaaattcatttgccaaactcaaaatgatgatg

SEQ ID NO: 426885 - DNA, 5128 bp, Homo sapiens
aagtacagacatttctttgaagcctgccgcctgctgcagcagatgattgacatcgccatcgacgggttcctgctcacaccagtgcagaagatctgcaaatacccgctgcagctggccgagctgctcaagtataccacacaggaacacggtgattacagcaacataaaggcagcatatgaggccatgaagaatgtggcctgtctgatcaacgagcgcaagcgcaagctggagagcatcgacaagatagctcgctggcaggtgtctatcgtgggctgggagggactggatatcttagaccgaagctcagaattgattcattctggggagctgaccaaaatcactaagcaaggcaaaagccagcagcggacgttcttcctgtttgaccaccagctggtgtcctgcaagaaggacctgctgcgcagggacatgctgtactacaagggccggctggacatggatgagatggagcttgtggacctgggggatgggcgcgacaaggactgcaacctcagcgtgaaaaatgccttcaagctcgtcagtaggaccacagacgaggtttatttgttttgtgccaaaaaacaagaagacaaggcgaggtggctgcaggcctgtgcagatgaaaggaggcgggtgcaagaggacaaggagatgggaatggaaatttcagaaaaccagaagaaacttgccatgttaaatgctcaaaaggcaggacatggaaagtcaaaagtcaggctacaacaggtgccctgtggccccaccgcaccagggcctgcaccccatccaccagcgccacatcactatgcccacaagcgtcccccagcagcaggtctttggcctggcggaacccaagaggaagtcctcgctcttctggcacaccttcaacaggctcacccccttccggaaatgaaaacaggaggctgtgcttccatggagctgggtgtcaagagaagaactgtctttgtttcttgtgtgcttcaatccagggaaagtttcttggacccagtgatatctttggagacccagctgcctttgtggaagggaggagacggtcatgacacaaagctttatcctacacagaaacacccgtgacccactatgagatggcccagatgtgggacccggtaccatgctctaaagcgagtgattaggcagcagctgaagccacccctgctgatgatgagcaagtgcctgctgcaggtccaaacacagcatccagggctttgcagttcctaaggagtgatgaggttagaggatcacttctgcatttgattttcaaggatgccgtcaagacggggttgacacaatgctgcacgtgtctggtcacacttagaaattgagctcttactctcttctgtaatactgggggacctacagctgccgtggggctgaccacggtgttccctggcatcgtctgtgtccacacagatgctaactggtagtgcaaatgtcatcctgcaaggttcctcttcctgcaagcaaagtggagagaaagaagatgcatctgtcaccttcatcagggtcctcagtgcagagcaacttacgcatcctcaagaatccactgcttttcaggcaaggagggagaaatcctgctgcacactggctttgtcccggagtcggattccctcctgcctgcacgccttcagtaactccgagcagaaatcacatcttgcccacatgctgtaacctaagaaactgctatgcaaggctgggtgctgtggctcatgcctgtaatcccagcactttgggaggccaaggcaggtggatcacctgaggtcaggagttcgagacaagcgtggccaatatggcaaagcccagtctctactaataatacaaaaattagctgggcatggtggcgcatgcctgtaatcccagctactgggaaggctgaggtaggagaatcttttgaatctgggaagcggaggttgcagtgagctgagatcgcaccactgcactccagcctgggagatacagcgagactgtctccaaaaacaaaaacaaaaacaaaaaacattcaaacaactgtttgcaatataaaaagctcatttactgtaatatttatgatacagtgaatatgaaaatgcactggtcagaaggcactctcaaagagccgcactgctcctgacatcgtccttagcaatgaaatcacaaagacagccaaagcagtcctgcttcttggaaatcagaagctgcctttatcacatataaagccaaacagggcataaccatgtcacgtgagcatgtcatcaggcttctgaggacttgttctttataaaaaaagaccttcacaaaatatcttggcttagagatagcagtctttattaacaaaggccacctaggctgacacctgcagataatcatctccttttctttgtctatgttgtacattttcatgatataacttttaactatgtctagagaaggcaggctctgcaagagaggtgccctttcaacccgctcagtgccctggacaggagatgctgtgttaaactgttaatggatatctatatgagaagctcatttttgtatgctatccctgcagtttttttttttctaacaggcccatgtttgagaataaacaagtctgtgatgtcagagaccaaggtgtatacttcagtctgcaggtgtgtggacactcccttctccctgcatgaccccaaatacagagcggatcctgagagtgacatcatgcatcaagaaaacataaccttggtcctcaggtgaacccttggaacattctgtgaccgcctgatgtccattctgagccaccttggcacacatgcttacaggcagcactgctaagggttcaggtgccccatggctgacagcccgagttgcttctgtggaccatcatgccgctcggcacgtcctgagacagaagttgctgcaggaaggagcttctggagaggtcctgtggcatgtgtgggggtgtgtgtgtgtatgtttccttcttgaacagacattccaactttagatgtgtttatagaactgacctttttactaacaaaatacaatgatatatgttggaaactacttaatatgcttttcctgcacaccttagcaataactgtaggggtctctgctagagttgtttgtatgtacagcaattttgaacaaattgttttaaatgtaatataagagaattagtttaaggaagtaaagagaatcatttgcttgtgttacattttcagtgaggattcagtttaagagtcattcttaggacttccatttcctaatatttattcatgggtaatgaagaaatggtttgcattttgtggccagtcctaatttattttccagctgagccctaacttccggctcccacctacctccacggacttcctaacagagacttatgaataccaggatgtgtttttgttaagtcaggttcaattcgttgcccctgtcagttttatagagtgtgagggtcactccattaaagatctctcctgggtggatcctacttggatgttcaggtgattttgaaaactgctaacatttttaaaaggctagaacatcctttgacttcttgaaaatctgcatgtctggcttgggttttattaccacatgcctgagttcttcaagaatggaaggctcaagtattctcatcttccatttgccaaacttccttcctgatttgagtcacgtgttccacttggaaagaaagggaacagagagcctcctccatggacagtgtatgaatttcattgggaatcttgctctctcccgcctctatgcctttctctctttttaaccttactttacataatattatagatgggccaagaaaagaaaagatgacataacattttgatgaatttcacctattccattcttcacgtttcagaattggtcgactttgttagaagataattgaagtagccttgggtcaaaagcaaccttttcaattgtgatcatacctaaaacatataaaaaccctgccgtagattaaaagcaattataaaatcataaaattgaatgtttgcagaatcctggagcagtagatttctttgtctttggcctgcggactagaaagagggcagcagtagtatgctggagcttccctgggataccagccacatggtttcttttcattagatctgatttttgtttcccactgtagatctgattttgtagttgaaaacatttcaccaccatcaaacactatttctgaatattgtgcctttttatacctagcctagatgaaaaccgatgccattcttattcagaaaatccccccatcctacatgactgttatctagacataaagcaaagtgcatttaattcaaaatttggttcacaatataagtattttgtaaaagccagctgaaccagcattttatcaggtggaaatctctgcaagccaaattgctgatactccttcatgcagatcaacttggtgtcccagtcagaatagaacagcataattacctggagttagggggagtatttctgcactattacttgtcagggagagaagaaacttagaattgtccctcaaaggagtgtcaagaagtatgaataaatgtcctttcaccagctcacaggccagaaatggaggacccaagtcaactaggtgaaactactagcagacccagctttcccataataacctaatctgcaaattgttctattaaagtctcattgttttcaggatgcaatgaaagtggatttcaaaaggctttggaaaaataagtggaacatgactgatcttgaaaaaaaaagcaaaagcttaaatatttgatacaagtttacttagctacaacatactttacattgttgcctttagttatctcacaggcactgacattttatatttagaaaatacttttaatctttctaatctttttttgtaaatattagtgtccattctgtatgactcgctaacctactttgcaaggctttgggcaacattttagctcattaacttcaagatgatgtgtcatctgtataggtcaaagaatgggacttctgaactgaggaatttgctgtggctttggtctgcgtttcttacttgcagcttggataacatgtttttaaaatgggaaatactggtttttatgtttcctaagaatcgatgtgggaaatgtgtatcagtttccttgtctcttttcctgtgtagaaatggaac

SEQ ID NO: 426886 - DNA, 1644 bp, Homo sapiens
aagtacagacatttctttgaagcctgccgcctgctgcagcagatgattgacatcgccatcgacgggttcctgctcacaccagtgcagaagatctgcaaatacccgctgcagctggccgagctgctcaagtataccacacaggaacacggtgattacagcaacataaaggcagcatatgaggccatgaagaatgtggcctgtctgatcaacgagcgcaagcgcaagctggagagcatcgacaagatagctcgctggcaggtgtctatcgtgggctgggagggactggatatcttagaccgaagctcagaattgattcattctggggagctgaccaaaatcactaagcaaggcaaaagccagcagcggacgttcttcctgtttgaccaccagctggtgtcctgcaagaaggacctgctgcgcagggacatgctgtactacaagggccggctggacatggatgagatggagcttgtggacctgggggatgggcgcgacaaggactgcaacctcagcgtgaaaaatgccttcaagctcgtcagtaggaccacagacgaggtttatttgttttgtgccaaaaaacaagaagacaaggcgaggtggctgcaggcctgtgcagatgaaaggaggcgggtgcaagaggacaaggagatgggaatggaaatttcagaaaaccagaagaaacttgccatgttaaatgctcaaaaggcaggacatggaaagtcaaaaggtaagttatggagaaggctttgtccccttaatgcttatcagtattctcctgaaaatgggagcataccccaagttgtcagcctgtgaccagcttggagcaaggagaacagtagaagttagaactcaagggcaggtccagaacaggggccaggtgaaggtggcctgtgtttggttttgaatgtgcgtcagtgtttgcttccattggaatgtgggcataggaaaccttcagaggggctgctggagggtggtggacctccttgcctgcctggggcccctctgctcccctcccccaagtgctgatggtgttagccacaaggtcacgcacatccccagtctgaggcaaaccaaggactcttgcatcttttaggcatgagaggacaaaatctcaaaccccaaactgcttgtcagctgtaggctggatatagtctagtttaagtaagaaaaagatgtaaaggttcggtacatcaggcaaggagttagacaaaaaaagacacgtgagctgatttagggcggtgattccctaatctccatgcacattagaattccctggggaagctgttcaaaaatgctgatgcccaggccgcatacccaggggctctgatgcactaagatttgtccacacaaatctggcccaacaggatgcagataatctggcccaacaggaattcagtaataaggatttttccccaaaaaatatgcactgtattcttagaaactttattcccgtcatctttctactttaaaaggcatttaccccatgaaatgtatctcttttggtattttcctgactgcaaatgcaaaaacaaggaccaacgaatcccaggactgcaatagaccactgacctttagtcagtgaagaactgattccccaaaccacacttaacactcccctgctttctccatgcaaatgcagaattt

SEQ ID NO: 426887 - DNA, 411 bp, Homo sapiens
ttttgccagtcctcatttgtaaggtgcatgttatgtgattaaaattaacctcccatcttgcagtgattacagcaacataaaggcagcatatgaggccatgaagaatgtggcctgtctgatcaacgagcgcaagcgcaagctggagagcatcgacaagatagctcgctggcaggtgtctatcgtgggctgggaggtaagtggaaagcaccccacatgatcccatgccactcgcccttcccgcacctttgatctggtgcagatgcactttaatatcctgtggtcaatatcttatattcttggctttaatggtacatataccattaatggtaaatgtatttcgaggcatactgttgaatttaacagtcgactactttataccccactcccataagaaataaaatctgaagagta

SEQ ID NO: 426888 - DNA, 5217 bp, Homo sapiens
aagtacagacatttctttgaagcctgccgcctgctgcagcagatgattgacatcgccatcgacgggttcctgctcacaccagtgcagaagatctgcaaatacccgctgcagctggccgagctgctcaagtataccacacaggaacacggtgattacagcaacataaaggcagcatatgaggccatgaagaatgtggcctgtctgatcaacgagcgcaagcgcaagctggagagcatcgacaagatagctcgctggcaggtgtctatcgtgggctgggagggactggatatcttagaccgaagctcagaattgattcattctggggagctgaccaaaatcactaagcaaggcaaaagccagcagcggacgttcttcctgtttgaccaccagctggtgtcctgcaagaaggacctgctgcgcagggacatgctgtactacaagggccggctggacatggatgagatggagcttgtggacctgggggatgggcgcgacaaggactgcaacctcagcgtgaaaaatgccttcaagctcgtcagtaggaccacagacgaggtttatttgttttgtgccaaaaaacaagaagacaaggcgaggtggctgcaggcctgtgcagatgaaaggaggcgggtgcaagaggacaaggagatgggaatggaaatttcagaaaaccagaagaaacttgccatgttaaatgctcaaaaggcaggacatggaaagtcaaaagtcaggctacaacaggtgccctgtggccccaccgcaccagggcctgcaccccatccaccagcgccacatcactatgcccacaagcgtcccccagcagcaggtctttggcctggcggaacccaagaggaagtcctcgctcttctggcacaccttcaacaggctcacccccttccggaaatgaaaacaggaggctgtgcttccatggagctgggtgtcaagagaagaactgtctttgtttcttgtgtgcttcaatccagggaaagtttcttggacccagtgataaaaacttccttttagggatcaatgaaggagagaaggtcttggaatcaccttcagtctttggagacccagctgcctttgtggaagggaggagacggtcatgacacaaagctttatcctacacagaaacacccgtgacccactatgagatggcccagatgtgggacccggtaccatgctctaaagcgagtgattaggcagcagctgaagccacccctgctgatgatgagcaagtgcctgctgcaggtccaaacacagcatccagggctttgcagttcctaaggagtgatgaggttagaggatcacttctgcatttgattttcaaggatgccgtcaagacggggttgacacaatgctgcacgtgtctggtcacacttagaaattgagctcttactctcttctgtaatactgggggacctacagctgccgtggggctgaccacggtgttccctggcatcgtctgtgtccacacagatgctaactggtagtgcaaatgtcatcctgcaaggttcctcttcctgcaagcaaagtggagagaaagaagatgcatctgtcaccttcatcagggtcctcagtgcagagcaacttacgcatcctcaagaatccactgcttttcaggcaaggagggagaaatcctgctgcacactggctttgtcccggagtcggattccctcctgcctgcacgccttcagtaactccgagcagaaatcacatcttgcccacatgctgtaacctaagaaactgctatgcaaggctgggtgctgtggctcatgcctgtaatcccagcactttgggaggccaaggcaggtggatcacctgaggtcaggagttcgagacaagcgtggccaatatggcaaagcccagtctctactaataatacaaaaattagctgggcatggtggcgcatgcctgtaatcccagctactgggaaggctgaggtaggagaatcttttgaatctgggaagcggaggttgcagtgagctgagatcgcaccactgcactccagcctgggagatacagcgagactgtctccaaaaacaaaaacaaaaacaaaaaacattcaaacaactgtttgcaatataaaaagctcatttactgtaatatttatgatacagtgaatatgaaaatgcactggtcagaaggcactctcaaagagccgcactgctcctgacatcgtccttagcaatgaaatcacaaagacagccaaagcagtcctgcttcttggaaatcagaagctgcctttatcacatataaagccaaacagggcataaccatgtcacgtgagcatgtcatcaggcttctgaggacttgttctttataaaaaaagaccttcacaaaatatcttggcttagagatagcagtctttattaacaaaggccacctaggctgacacctgcagataatcatctccttttctttgtctatgttgtacattttcatgatataacttttaactatgtctagagaaggcaggctctgcaagagaggtgccctttcaacccgctcagtgccctggacaggagatgctgtgttaaactgttaatggatatctatatgagaagctcatttttgtatgctatccctgcagtttttttttttctaacaggcccatgtttgagaataaacaagtctgtgatgtcagagaccaaggtgtatacttcagtctgcaggtgtgtggacactcccttctccctgcatgaccccaaatacagagcggatcctgagagtgacatcatgcatcaagaaaacataaccttggtcctcaggtgaacccttggaacattctgtgaccgcctgatgtccattctgagccaccttggcacacatgcttacaggcagcactgctaagggttcaggtgccccatggctgacagcccgagttgcttctgtggaccatcatgccgctcggcacgtcctgagacagaagttgctgcaggaaggagcttctggagaggtcctgtggcatgtgtgggggtgtgtgtgtgtatgtttccttcttgaacagacattccaactttagatgtgtttatagaactgacctttttactaacaaaatacaatgatatatgttggaaactacttaatatgcttttcctgcacaccttagcaataactgtaggggtctctgctagagttgtttgtatgtacagcaattttgaacaaattgttttaaatgtaatataagagaattagtttaaggaagtaaagagaatcatttgcttgtgttacattttcagtgaggattcagtttaagagtcattcttaggacttccatttcctaatatttattcatgggtaatgaagaaatggtttgcattttgtggccagtcctaatttattttccagctgagccctaacttccggctcccacctacctccacggacttcctaacagagacttatgaataccaggatgtgtttttgttaagtcaggttcaattcgttgcccctgtcagttttatagagtgtgagggtcactccattaaagatctctcctgggtggatcctacttggatgttcaggtgattttgaaaactgctaacatttttaaaaggctagaacatcctttgacttcttgaaaatctgcatgtctggcttgggttttattaccacatgcctgagttcttcaagaatggaaggctcaagtattctcatcttccatttgccaaacttccttcctgatttgagtcacgtgttccacttggaaagaaagggaacagagagcctcctccatggacagtgtatgaatttcattgggaatcttgctctctcccgcctctatgcctttctctctttttaaccttactttacataatattatagatgggccaagaaaagaaaagatgacataacattttgatgaatttcacctattccattcttcacgtttcagaattggtcgactttgttagaagataattgaagtagccttgggtcaaaagcaaccttttcaattgtgatcatacctaaaacatataaaaaccctgccgtagattaaaagcaattataaaatcataaaattgaatgtttgcagaatcctggagcagtagatttctttgtctttggcctgcggactagaaagagggcagcagtagtatgctggagcttccctgggataccagccacatggtttcttttcattagatctgatttttgtttcccactgtagatctgattttgtagttgaaaacatttcaccaccatcaaacactatttctgaatattgtgcctttttatacctagcctagatgaaaaccgatgccattcttattcagaaaatccccccatcctacatgactgttatctagacataaagcaaagtgcatttaattcaaaatttggttcacaatataagtattttgtaaaagccagctgaaccagcattttatcaggtggaaatctctgcaagccaaattgctgatactccttcatgcagatcaacttggtgtcccagtcagaatagaacagcataattacctggagttagggggagtatttctgcactattacttgtcagggagagaagaaacttagaattgtccctcaaaggagtgtcaagaagtatgaataaatgtcctttcaccagctcacaggccagaaatggaggacccaagtcaactaggtgaaactactagcagacccagctttcccataataacctaatctgcaaattgttctattaaagtctcattgttttcaggatgcaatgaaagtggatttcaaaaggctttggaaaaataagtggaacatgactgatcttgaaaaaaaaagcaaaagcttaaatatttgatacaagtttacttagctacaacatactttacattgttgcctttagttatctcacaggcactgacattttatatttagaaaatacttttaatctttctaatctttttttgtaaatattagtgtccattctgtatgactcgctaacctactttgcaaggctttgggcaacattttagctcattaacttcaagatgatgtgtcatctgtataggtcaaagaatgggacttctgaactgaggaatttgctgttgacagccaaagtatagtgtacaagattgatgtaacttgatatgtatttttgttgaagttttttgtaaaaaaaaattatttacaatgttatttgaatgatttttttaaatgctgtgaatctatatttgttgttttatatattaaaattcatttgccaaactcaaaatgatgatg

SEQ ID NO: 426889 - DNA, 3674 bp, Homo sapiens
aagtacagacatttctttgaagcctgccgcctgctgcagcagatgattgacatcgccatcgacgggttcctgctcacaccagtgcagaagatctgcaaatacccgctgcagctggccgagctgctcaagtataccacacaggaacacggtgattacagcaacataaaggcagcatatgaggccatgaagaatgtggcctgtctgatcaacgagcgcaagcgcaagctggagagcatcgacaagatagctcgctggcaggtgtctatcgtgggctgggagggactggatatcttagaccgaagctcagaattgattcattctggggagctgaccaaaatcactaagcaaggcaaaagccagcagcggacgttcttcctgtttgaccaccagctggtgtcctgcaagaaggacctgctgcgcagggacatgctgtactacaagggccggctggacatggatgagatggagcttgtggacctgggggatgggcgcgacaaggactgcaacctcagcgtgaaaaatgccttcaagctcgtcagtaggaccacagacgaggtttatttgttttgtgccaaaaaacaagaagacaaggcgaggtggctgcaggcctgtgcagatgaaaggaggcgggtgcaagaggacaaggagatgggaatggaaatttcagaaaaccagaagaaacttgccatgttaaatgctcaaaaggcaggacatggaaagtcaaaagtcaggctacaacaggtgccctgtggccccaccgcaccagggcctgcaccccatccaccagcgccacatcactatgcccacaagcgtcccccagcagcaggtctttggcctggcggaacccaagaggaagtcctcgctcttctggcacaccttcaacaggctcacccccttccggaaatgaaaacaggaggctgtgcttccatggagctgggtgtcaagagaagaactgtctttgtttcttgtgtgcttcaatccagggaaagtttcttggacccagtgatatctttggagacccagctgcctttgtggaagggaggagacggtcatgacacaaagctttatcctacacagaaacacccgtgacccactatgagatggcccagatgtgggacccggtaccatgctctaaagcgagtgattaggcagcagctgaagccacccctgctgatgatgagcaagtgcctgctgcaggtccaaacacagcatccagggctttgcagttcctaaggagtgatgaggttagaggatcacttctgcatttgattttcaaggatgccgtcaagacggggttgacacaatgctgcacgtgtctggtcacacttagaaattgagctcttactctcttctgtaatactgggggacctacagctgccgtggggctgaccacggtgttccctggcatcgtctgtgtccacacagatgctaactggtagtgcaaatgtcatcctgcaaggttcctcttcctgcaagcaaagtggagagaaagaagatgcatctgtcaccttcatcagggtcctcagtgcagagcaacttacgcatcctcaagaatccactgcttttcaggcaaggagggagaaatcctgctgcacactggctttgtcccggagtcggattccctcctgcctgcacgccttcagtaactccgagcagaaatcacatcttgcccacatgctgtaacctaagaaactgctatgcaaggctgggtgctgtggctcatgcctgtaatcccagcactttgggaggccaaggcaggtggatcacctgaggtcaggagttcgagacaagcgtggccaatatggcaaagcccagtctctactaataatacaaaaattagctgggcatggtggcgcatgcctgtaatcccagctactgggaaggctgaggtaggagaatcttttgaatctgggaagcggaggttgcagtgagctgagatcgcaccactgcactccagcctgggagatacagcgagactgtctccaaaaacaaaaacaaaaacaaaaaacattcaaacaactgtttgcaatataaaaagctcatttactgtaatatttatgatacagtgaatatgaaaatgcactggtcagaaggcactctcaaagagccgcactgctcctgacatcgtccttagcaatgaaatcacaaagacagccaaagcagtcctgcttcttggaaatcagaagctgcctttatcacatataaagccaaacagggcataaccatgtcacgtgagcatgtcatcaggcttctgaggacttgttctttataaaaaaagaccttcacaaaatatcttggcttagagatagcagtctttattaacaaaggccacctaggctgacacctgcagataatcatctccttttctttgtctatgttgtacattttcatgatataacttttaactatgtctagagaaggcaggctctgcaagagaggtgccctttcaacccgctcagtgccctggacaggagatgctgtgttaaactgttaatggatatctatatgagaagctcatttttgtatgctatccctgcagtttttttttttctaacaggcccatgtttgagaataaacaagtctgtgatgtcagagaccaaggtgtatacttcagtctgcaggtgtgtggacactcccttctccctgcatgaccccaaatacagagcggatcctgagagtgacatcatgcatcaagaaaacataaccttggtcctcaggtgaacccttggaacattctgtgaccgcctgatgtccattctgagccaccttggcacacatgcttacaggcagcactgctaagggttcaggtgccccatggctgacagcccgagttgcttctgtggaccatcatgccgctcggcacgtcctgagacagaagttgctgcaggaaggagcttctggagaggtcctgtggcatgtgtgggggtgtgtgtgtgtatgtttccttcttgaacagacattccaactttagatgtgtttatagaactgacctttttactaacaaaatacaatgatatatgttggaaactacttaatatgcttttcctgcacaccttagcaataactgtaggggtctctgctagagttgtttgtatgtacagcaattttgaacaaattgttttaaatgtaatataagagaattagtttaaggaagtaaagagaatcatttgcttgtgttacattttcagtgaggattcagtttaagagtcattcttaggacttccatttcctaatatttattcatgggtaatgaagaaatggtttgcattttgtggccagtcctaatttattttccagctgagccctaacttccggctcccacctacctccacggacttcctaacagagacttatgaataccaggatgtgtttttgttaagtcaggttcaattcgttgcccctgtcagttttatagagtgtgagggtcactccattaaagatctctcctgggtggatcctacttggatgttcaggtgattttgaaaactgctaacatttttaaaaggctagaacatcctttgacttcttgaaaatctgcatgtctggcttgggttttattaccacatgcctgagttcttcaagaatggaaggctcaagtacttcgtatctccaccccgcaaacttcactccctctcccacgtctcgtcttccacttcggccggaaatggaaaccg

SEQ ID NO: 426890 - DNA, 549 bp, Homo sapiens
gctggacatggatgagatggagcttgtggacctgggggatgggcgcgacaaggactgcaacctcagcgtgaaaaatgccttcaagctcgtcagtaggaccacagacgaggtttatttgttttgtgccaaaaaacaagaagacaaggcgaggtggctgcaggcctgtgcagatgaaaggaggcgggtgcaagaggacaaggagatgggtgagcagcccttggctctgcaggcacctgtgcctctgcttgctgtaatagcttcattctccactcccatgggcctgctctgcccagccttctccctcagagctgaatcccaccatggggaaaggacaagggatctgcaaaccctaaatacttctgaatgcacttacaagacagaccatgtcagatgtagttactaccggcaacatttattcagtatttaccttgtgccagacattctgtggcccatttatagagattgtctcattgaatccctatgaagtggttgctgttattatacccaatttacagatgagaaaattgaggcttatggaactggcccact

SEQ ID NO: 426891 - DNA, 866 bp, Homo sapiens
gcatcctcccagcatgttccatgtagttgttataactgggtggggggtggggggcggcgggagggggaaaccataccctgaagtccagtcattgacaaatcttcccgctgatggtgatgtcaatttccaaagcagcttctccagccaaaatcgcaggtctcaaaactccccatgtgtctcccagtaacctggacggaagggagtcctctctgctcagaaccacacccctcgtaccaatgctgccatctcgttcaggccccacgtcgctccttgctctaggattaacaccagatagcatgaatagcagtctcaatacaactggatgaggccctagacttcccgaggaaatggagtcacaaacaccaagccacgtcgactcttgccgaccactggcccagcatccactgaaagtcgggaacacaaaaatgtcacttttcctctttaagctgcctaacggtcactacaagcttacattgagatgctctaagtctgtataccttgtgataattagtaccacactgtagaattaggaaatcaataaccaagtgtttttattgcatatactgtagtcctgtctaaatgccttctagcaggaatatagtaatgtagtgcttattctgtgaatattaccatgtattttttacactgtacagtatagaaaacacaggttaactccgaagtggcaggcatgctccactacaacagacagacaacttttgctgtaagcaatacctagtggtatgagaattctatttcaagtcctaaaatatttcaacttacagcttgtttggaaaaaaatttccatttttgtaaaaatatatgtttcctgattacctcttgctaataaatctattctatctcagggt

SEQ ID NO: 426892 - DNA, 1837 bp, Homo sapiens
gcatcctcccagcatgttccatgtagttgttataactgggtggggggtggggggcggcgggagggggaaaccataccctgaagtccagtcattgacaaatcttcccgctgatggtgatgtcaatttccaaagcagcttctccagccaaaatcgcaggtctcaaaactccccatgtgtctcccagtaacctggacggaagggagtcctctctgctcagaaccacacccctcgtaccaatgctgccatctcgttcaggccccacgtcgctccttgctctaggattaacaccagatagcatgaatagcagtctcaatacaactggatgaggccctagacttcccgaggaaatggagtcacaaacaccaagccacgtcgactcttgccgaccactggcccagcatccactgaaagtcgggaacacaaaaatgtcacttttcctctttaagctgcctaacggtcactacaagcttacattgagatgctctaagtctgtataccttgtgataattagtaccacactgtagaattaggaaatcaataaccaagtgtttttattgcatatactgtagtcctgtctaaatgccttctagcaggaatatagtaatgtagtgcttattctgtgaatattaccatgtattttttacactgtacagtatagaaaacacaggttaactccgaagtggcaggcatgctccactacaacagacagacaacttttgctgtaagcaatacctagtggtatgagaattctatttcaagtcctaaaatatttcaacttacagcttgtttggaaaaaaatttccatttttgtaaaaatatatgtttcctgattacctcttgctaataaatctattctatctcagggtgaacagcgagttttgatgggtttcattcgttcagtcaaggaatatttgatgagcacttgctccttacccagcccagcctgggaccggagatccagagtgtcaaggacaccatacctgctttttaggcaccaacagtttggtggggaagactgtttcagttgcctattgcaccaagaacaagccactccaaaacataatggcttaaaaccatttttgttacctttcacagttctatgggttgactgggtccagctgtcagttcttatttggagtctctcatgaagtttcagtcactcagcaactgggactggagtcatctgaaggctcaactggaccgggtggtgctctagttggtgcaccaagatggcgctgtcacatggctggatgttgatgtctgctgggctgcactggggctgttcatgggagcatccacacgtggcctctctgtgtggcttgggctcctcacagtccggaagctgggttccaagagcgactgttccagcagcctcaggcagaagctacaaggctgcccagatgcgatcctgcccagatgtgtcctcactgtcacccaggaagggaagccccggaacaccaccctcagtcacaggcatggggcccactgcaaggcacaacccactccagagctcccaaggccgcctcccctgggacctgcagccagctggctccataactgcttttccgtttcctccaggcattttcatcctagccctactttgtgctgggatctgagggggatagcaagcggagaaagaagggatctagagggagaagattctagatccttcttttgactgccagctgattttgattgccagctttacctgcttcatgagctcagccaagtcacttaacctctcagagcttcactgttctcatctgaaaaatggggatgaaaatggtatctcattacagagtagaattaaatgaattattataattaatggtattaa

SEQ ID NO: 426893 - DNA, 552 bp, Homo sapiens
gctacaactgatgagaaagattctgtttcgaacatagccacagaaataaaggatggagaaaaatctgggacagtgtcttctcagaaaccaccagccttgacgtgtcttctcggaaaaaaccagccttgaaggctacaagtgatgagaaggattctttttcgaatataaccagaggaaaaaaggatggagaaatatctaggaaagtgtcttctcagaaaccaccaaccttgaagggtacaagtgacgaggaagattctgttttgggtatagccagagaaaacaaggatggagaaaaatctaggacagtgtcttctgagaaaccaccaggcttgaaggcttcaagtgatgagaaagattctgttttgaatatagccagaggaaaaaagtatggagaaaaaactaagagagtgtcttctcgaaaaaaaccatccttggaggccacaagtgatgagaaggattctttttcgaatataaccagagaaaaaaaggatggagaaatatctaggaaagtgtcttctcagaaaccaccagccttgaagggtacaagtgacg

SEQ ID NO: 426894 - DNA, 595 bp, Homo sapiens
ctcagttattgggcaagttaaagagcatgatgaatgtttgcagtataatggtgtaaatcctcttaatttgttgcatgaaagacatgtgggatcatgtagcacctgttttgacattgattctcacgtatatgagttgctcctctgattttagatcacatttgttctcatcactcggcatatccacattgagattgacacggttttattttagttttcgacacatgacaaatcttaccatgtttgaaatcgtaagggtgtatttcacagagcctgtgttcccttttttcagtgtatttctgtcatgttctgatccccagacacaaagtagaagccatcaaagcctccactaatacaagcaggaggacagaggttgatgctaacactgtgtgaatctatggataattttatcatgtttacatgtgagtgattatgtatcccttttgcttttcagtgtcttctcgaaaaaaaccatccttggaggccacaagtgatgagaaggattctttttcgaatataaccagagaaaaaaaggatggagaaatatctaggaaagtgtcttctcagaaaccaccagccttgaagggtacaagtgacg

SEQ ID NO: 426895 - DNA, 2540 bp, Homo sapiens
acatcaccaggatacctacagacagattcacattgacattccaaggacgaatcctctcattccgttgttccagcaaccacttgtacaggagatctttgaaagaattctatttatttgggccatccgccaccctgccagtgggtatgtccagggaattaatgacctggtcactccattctttgtcgtcttcctctcagaatatgtggaagaggatgtggagaactttgacgtgaccaacttgtctcaagacatgctgcgaagcattgaggctgacagcttttggtgcatgagcaagctgctggatggaatccaggataactacacctttgcacaaccaggaatccagaagaaggtgaaggcactggaagagcttgtcagccggattgatgagcaggtacataatcacttcaggaggtacgaggtagaatacctgcagtttgccttccgctggatgaacaacctgcttatgcgggagcttcctcttcgctgcaccatccgcctgtgggacacatatcagtctgaaccagaagggttctcccactttcatctctacgtgtgtgcagccttcttgatcaagtggaggaaagagatcttggatgaggaggattttcagggtctcctcatgctgctacagaacctacctacaatacactggggcaacgaagaaattgggctgcttctcgccgaggcatacagactcaagtacatgtttgccgatgccccaaatcactaccgccgataggtgctgtctcctccggggacccagactgccttcatctctgatggcagtctgatcactgtggccactgtgcgagccgtggaccccggccaggaaccactcctgttgtacaaagctcacacccaccgcccaggtcttaactttctggcatccaccactccatgtctctggatgtgtcacttggaccactgtcagtattccatgccgcgtggatgggcccagttctgggagaggacagaaaaggtggtacagggttgtctgcccctttaaaagaaactggacaaagaaggggaaggctcagggtctcacctcacattgtccctacaaggacaggccccaactgataaccgttgcttttttttttttgtgaacatagtttgatttgatcacaggtcaaaaacgccttatattttcgaaagactcctggcccctcttccctcttcctggtttcctagccgttccccttctgccccagtctgagccagtgaggggtagctttttaaaaccattattctagatggaggaggcactgatgcttgtaactctggaaagaggcctacacccaagggctaggaattttatttttccttttctcaccaggtgtctgcatgtgtgtgtgggtgtgaatgtgtatacatgcccatcagcatttagtcacatgtctgaatttctgtgtccagacgagccccatcaaactagttgggaagggccccagtgaccaagtgtataagcatcccttgaagagggattggggcaggggaggcagaaggggctctccagaccccttttccatgatgacccactccaagatattatgtgtaaattgtgttattatgtatatgggtaaagatgtacaaatatatgtcctctttgtagcagatatgattttatatttataatgtgcatcaacatgtgaaagcaatctaggtcactagcacagaggaagttgccaggaaggtggcttcagcacctccaggttggttctgggtgtcctgctgtgaggggtagaacgggaggctgctgaagtgagtagctgagcagctggagccatcccaagcatcagtgtctcagagtcctcctcgcccctttcttcaccccgccccccaacccccagactttcctggagcatctgccctttgctcctagcagcctccccaggaagggactgcagaggcgggcaagccctctctatgtgtttttatctccaccttccccggaatctggggagggcttttgtttttacgttttcaagttcagcattgtattcggacagaagctgtgactgaagactcagtgccaaggaaaggggcttcttgtgtgtccctcgggtttggggctcttctcagagagcagcactccatatcccttactgtcaccttcactccccacacagctcatgagatgtgtgacccctgtttgagttttggtatttggtagtggagggtggggggatgggggccagcagctgtcatcctcctgggaagccgagcagtgtccctggtgggtaacaccctcaagtctctttgccagtgaggccccaccacatcggtgtgagttaggtttctcatctggagctgtttctcaggcattcttcccaaccctcttccttttccccttcggtgtgcctcagtggtctccttcatagagtgagagggcttgagaccctccctcaaccggactaattaaagaaagacacttgtgttcccaagtggtggttttatttttttagtttttatgtttgtatgggaaattgtggataaagtgaaaagaattgtaaataaatggtgtatttcctcctcca

SEQ ID NO: 426896 - DNA, 1249 bp, Homo sapiens
acatcaccaggatacctacagacagattcacattgacattccaaggacgaatcctctcattccgttgttccagcaaccacttgtacaggagatctttgaaagaattctatttatttgggccatccgccaccctgccagtgggtatgtccagggaattaatgacctggtcactccattctttgtcgtcttcctctcagaatatgtggaagaggatgtggagaactttgacgtgaccaacttgtctcaagacatgctgcgaagcattgaggctgacagcttttggtgcatgagcaagctgctggatggaatccaggataactacacctttgcacaaccaggaatccagaagaaggtgaaggcactggaagagcttgtcagccggattgatgagcaggtacataatcacttcaggaggtacgaggtagaatacctgcagtttgccttccgctggatgaacaacctgcttatgcgggagcttcctcttcgctgcaccatccgcctgtgggacacatatcagtctgaaccagaagggttctcccactttcatctctacgtgtgtgcagccttcttgatcaagtggaggaaagagatcttggatgaggaggattttcagggtctcctcatgctgctacagaacctacctacaatacactggggcaacgaagaaattgggctgcttctcgccgaggcatacagactcaagtacatgtttgccgatgccccaaatcactaccgccgataggtgctgtctcctccggggacccagactgccttcatctctgatggcagtctgatcactgtggccactgtgcgagccgtggaccccggccaggaaccactcctgttgtacaaagctcacacccaccgcccaggtcttaactttctggcatccaccactccatgtctctggatgtgtcacttggaccactgtcagtattccatgccgggcagagctaaatgggaacccatcaccagagaagccaccaccaaagccaagattacagagagaatgttttaggagtagggtggaatttaacttctaaacgtaaataattaacattttgaaatgaagtgacagtgtcaccttataatgcaaaatcatgccatattatacaagaaactccacaccatgaagaattctgcctatacagttttaattgcccaaagagacaaatttattgaaataaacagctactgaacatctattacatactgcaaattatatgccttggggtgccgagctcgaaag

SEQ ID NO: 426897 - DNA, 245 bp, Homo sapiens
agataagacctctggactttcttcaccttttgttttacagaagaggatgtggagaactttgacgtgaccaacttgtctcaagacatgctgcgaagcattgaggctgacagcttttggtgcatgagcaagctgctggatggaatccaggtgagctgcttctgcccttgtgggaacaaacgtctaggtccagaggctcccagcagggctttggtttctttcttgctcttctgtatcaggcaggacca

SEQ ID NO: 426898 - DNA, 2191 bp, Homo sapiens
acatcaccaggatacctacagacagattcacattgacattccaaggacgaatcctctcattccgttgttccagcaaccacttgtacaggagatctttgaaagaattctatttatttgggccatccgccaccctgccagtgggtatgtccagggaattaatgacctggtcactccattctttgtcgtcttcctctcagaatatgtggaagaggatgtggagaactttgacgtgaccaacttgtctcaagacatgctgcgaagcattgaggctgacagcttttggtgcatgagcaagctgctggatggaatccaggataactacacctttgcacaaccaggaatccagaagaaggtgaaggcactggaagagcttgtcagccggattgatgagcaggtacataatcacttcaggaggtacgaggtagaatacctgcagtttgccttccgctggatgaacaacctgcttatgcgggagcttcctcttcgctgcaccatccgcctgtgggacacatatcagtctgaaccagaagggttctcccactttcatctctacgtgtgtgcagccttcttgatcaagtggaggaaagagatcttggatgaggaggattttcagggtctcctcatgctgctacagaacctacctacaatacactggggcaacgaagaaattgggctgcttctcgccgaggcatacagactcaagtacatgtttgccgatgccccaaatcactaccgccgataggtgctgtctcctccggggacccagactgccttcatctctgatggcagtctgatcactgtggccactgtgcgagccgtggaccccggccaggaaccactcctgttgtacaaagctcacacccaccgcccaggtcttaactttctggcatccaccactccatgtctctggatgtgtcacttggaccactgtcagtattccatgccgcgtggatgggcccagttctgggagaggacagaaaaggtggtacagggttgtctgcccctttaaaagaaactggacaaagaaggggaaggctcagggtctcacctcacattgtccctacaaggacaggccccaactgataaccgttgcttttttttttttgtgaacatagtttgatttgatcacaggtcaaaaacgccttatattttcgaaagactcctggcccctcttccctcttcctggtttcctagccgttccccttctgccccagtctgagccagtgaggggtagctttttaaaaccattattctagatggaggaggcactgatgcttgtaactctggaaagaggcctacacccaagggctaggaattttatttttccttttctcaccaggtgtctgcatgtgtgtgtgggtgtgaatgtgtatacatgcccatcagcatttagtcacatgtctgaatttctgtgtccagacgagccccatcaaactagttgggaagggccccagtgaccaagtgtataagcatccctttcttcaccccgccccccaacccccagactttcctggagcatctgccctttgctcctagcagcctccccaggaagggactgcagaggcgggcaagccctctctatgtgtttttatctccaccttccccggaatctggggagggcttttgtttttacgttttcaagttcagcattgtattcggacagaagctgtgactgaagactcagtgccaaggaaaggggcttcttgtgtgtccctcgggtttggggctcttctcagagagcagcactccatatcccttactgtcaccttcactccccacacagctcatgagatgtgtgacccctgtttgagttttggtatttggtagtggagggtggggggatgggggccagcagctgtcatcctcctgggaagccgagcagtgtccctggtgggtaacaccctcaagtctctttgccagtgaggccccaccacatcggtgtgagttaggtttctcatctggagctgtttctcaggcattcttcccaaccctcttccttttccccttcggtgtgcctcagtggtctccttcatagagtgagagggcttgagaccctccctcaaccggactaattaaagaaagacacttgtgttcccaagtggtggttttatttttttagtttttatgtttgtatgggaaattgtggataaagtgaaaagaattgtaaataaatggtgtatttcctcctcca

SEQ ID NO: 426899 - DNA, 839 bp, Homo sapiens
acatcaccaggatacctacagacagattcacattgacattccaaggacgaatcctctcattccgttgttccagcaaccacttgtacaggagatctttgaaagaattctatttatttgggccatccgccaccctgccagtgggtatgtccagggaattaatgacctggtcactccattctttgtcgtcttcctctcagaatatgtggaagaggatgtggagaactttgacgtgaccaacttgtctcaagacatgctgcgaagcattgaggctgacagcttttggtgcatgagcaagctgctggatggaatccaggataactacacctttgcacaaccaggaatccagaagaaggtgaaggcactggaagagcttgtcagccggattgatgagcaggtacataatcacttcaggaggtacgaggtagaatacctgcagtttgccttccgctggatgaacaacctgcttatgcgggagcttcctcttcgctgcaccatccgcctgtgggacacatatcagtctgaaccagaagggttctcccactttcatctctacgtgtgtgcagccttcttgatcaagtggaggaaagagatcttggatgaggaggattttcagtgtttctcaggcattcttcccaaccctcttccttttccccttcggtgtgcctcagtggtctccttcatagagtgagagggcttgagaccctccctcaaccggactaattaaagaaagacacttgtgttcccaagtggtggttttatttttttagtttttatgtttgtatgggaaattgtggataaagtgaaaagaattgtaaataaatggtgtatttcctcctcca

SEQ ID NO: 426900 - DNA, 1185 bp, Homo sapiens
  misc_feature (1)..(4): n is a, c, g, or t
nnnngtttgctctgagataccagtctcgctcctgcccagcccgggcggctgcccttgggtgctcccttccctgcccgacacccagaccgaccttgaccgcccacctggcaggagcaggacaggacggccggacgcggccatggccgagctcccggggccctttctctgcggggccctgctaggcttcctgtgcctgagtgggctggccgtggaggtgaaggtacccacagagccgctgagcacgcccctggggaagacagccgagctgacctgcacctacagcacgtcggtgggagacagcttcgccctggagtggagctttgtgcagcctgggaaacccatctctgagtcccatccaatcctgtacttcaccaatggccatctgtatccaactggttctaagtcaaagcgggtcagcctgcttcagaacccccccacagtgggggtggccacactgaaactgactgacgtccacccctcagatactggaacctacctctgccaagtcaacaacccaccagatttctacaccaatgggttggggctaatcaaccttactgtgctggttccccccagtaatcccttatgcagtcagagtggacaaacctctgtgggaggctctactgcactgagatgcagctcttccgagggggctcctaagccagtgtacaactgggtgcgtcttggaacttttcctacaccttctcctggcagcatggttcaagatgaggtgtctggccagctcattctcaccaacctctccctgacctcctcgggcacctaccgctgtgtggccaccaaccagatgggcagtgcatcctgtgagctgaccctctctgtgaccgaaccctcccaaggccgagtggccggagctctgattggggtgctcctgggcgtgctgttgctgtcagttgctgcgttctgcctggtcaggttccagaaagagagggggaagaagcccaaggagacatatgggggtagtgaccttcgggaggatgccatcgctcctgggatctctgagcacacttgtatgagggctgattctagcaaggggttcctggaaagaccctcgtctgccagcaccgtgacgaccaccaagtccaagctccctatggtcgtgtgacttctcccgatccctgagggcggtgagggggaatatcaataattaaagtctgtgggtaccat

SEQ ID NO: 426901 - DNA, 1123 bp, Homo sapiens
  misc_feature (1)..(4): n is a, c, g, or t
nnnngtttgctctgagataccagtctcgctcctgcccagcccgggcggctgcccttgggtgctcccttccctgcccgacacccagaccgaccttgaccgcccacctggcaggagcaggacaggacggccggacgcggccatggccgagctcccggggccctttctctgcggggccctgctaggcttcctgtgcctgagtgggctggccgtggaggtgaaggtacccacagagccgctgagcacgcccctggggaagacagccgagctgacctgcacccatctctgagtcccatccaatcctgtacttcaccaatggccatctgtatccaactggttctaagtcaaagcgggtcagcctgcttcagaacccccccacagtgggggtggccacactgaaactgactgacgtccacccctcagatactggaacctacctctgccaagtcaacaacccaccagatttctacaccaatgggttggggctaatcaaccttactgtgctggttccccccagtaatcccttatgcagtcagagtggacaaacctctgtgggaggctctactgcactgagatgcagctcttccgagggggctcctaagccagtgtacaactgggtgcgtcttggaacttttcctacaccttctcctggcagcatggttcaagatgaggtgtctggccagctcattctcaccaacctctccctgacctcctcgggcacctaccgctgtgtggccaccaaccagatgggcagtgcatcctgtgagctgaccctctctgtgaccgaaccctcccaaggccgagtggccggagctctgattggggtgctcctgggcgtgctgttgctgtcagttgctgcgttctgcctggtcaggttccagaaagagagggggaagaagcccaaggagacatatgggggtagtgaccttcgggaggatgccatcgctcctgggatctctgagcacacttgtatgagggctgattctagcaaggggttcctggaaagaccctcgtctgccagcaccgtgacgaccaccaagtccaagctccctatggtcgtgtgacttctcccgatccctgagggcggtgagggggaatatcaataattaaagtctgtgggtaccat

SEQ ID NO: 426902 - DNA, 775 bp, Homo sapiens
cggatgggtgtattactgctggattcaactatccaaagggctgtcatgtggaggagagattttaatttctctttgtgggcccaaagggcaggaactgaaaccaatgggtggaggttatgttaacacacattttggctcaacatgaagaagaattttctctaacaatcagaatttccaatagtggaaatccctcagttcctggggatgcagtggtgtgtggacccaagaggaccactgtttgataggggtattgaagtagagaatgtagcacctaatggagttgggagtggggctggaagattgctgaggaactttctgttttttttttgttttttttttgttttgcagttccccccagtaatcccttatgcagtcagagtggacaaacctctgtgggaggctctactgcactgagatgcagctcttccgagggggctcctaagccagtgtacaactgggtgcgtcttggaacttttcctacaccttctcctggcagcatggttcaaggtaagggcccagggcatcaggaagagggtactggagacctgggcaaatctggtctctaaatcccacacacccgtattatccgttccatgactaggggtatgacacaaaccactatacctttccctgtctcttccttggcttcctgtattgttccctcctgcctgtctttctgcagtctgtggctgcatgatcctggaggtatttctcaagctgaatatactgctgatatcctggaagagagtagagggcagggagcaatctgatgatg

SEQ ID NO: 426903 - DNA, 496 bp, Homo sapiens
cagtttctagcaatcaagccttttaccccaaaccaggaacctgacatcagccagtaagcaccccaccccgactccattgccagtttctgaatccttcatgagtgtgcagtcctcctcctcccaaaaaggcagctatgtagggtggaaagaacaggtaagttgtagcagctttggaattcctctctgggtcacctcagacacactacttccttcttctgaaccggtttcctccccagtgaaaaaaaattagttgctccctgacaggattgttataaggatgacatgaaatgtgctgtcctcgtagagctgctcactgagttgaatgagtcgtggaacacttcctcttcatcctctagatgaggtgtctggccagctcattctcaccaacctctccctgacctcctcgggcacctaccgctgtgtggccaccaaccagatgggcagtgcatcctgtgagctgaccctctctgtgaccggtagggatgctgggtggagg

SEQ ID NO: 426904 - DNA, 593 bp, Homo sapiens
gaggaaatcaggaaaggggaggggaaactgcctctgtcatccactttagctgccagtcagggtctaggatagggatcagagcaacatttctccaggtggagtcctcagattacctggacagaaatcaccgggaactagttatacattcagattcaggccacttctagccaaagttccgcagattattctcaagcacagtgaaatttaagagtccccaggttagaggacggccctcctccgcaggaggcttctactgttcactcagaacttgcctatacccatcagggaggatgccatcgctcctgggatctctgagcacacttgtatgagggctgattctagcaaggggttcctggaaagaccctcgtctgccagcaccgtgacgaccaccaagtccaagctccctatggtcgtgtgacttctcccgatccctgagggcggtgagggggaatatcaataattaaagtctgtgggtaccataaaaactccttcttctttctgctggtatggcgaattcctctaggcggctcagagtattaacagtaagagaaggaatgggcttgaagtccgagaaaaggtaggcaggaagtttg

SEQ ID NO: 426905 - DNA, 1680 bp, Homo sapiens
  misc_feature (1)..(4): n is a, c, g, or t
nnnngtttgctctgagataccagtctcgctcctgcccagcccgggcggctgcccttgggtgctcccttccctgcccgacacccagaccgaccttgaccgcccacctggcaggagcaggacaggacggccggacgcggccatggccgagctcccggggccctttctctgcggggccctgctaggcttcctgtgcctgagtggtgaggaggggccgggcgggaccacggcgagggctggggggcataggcctggcttccccggctcctcggacccactctgtccccgccaggccagatgaggctgccgtgggcgccagggccctaaggcgcctgaggtgaggccggagagggggtgtccaaggcccggagggcgtaggagagagacccccaagccggcgagcgagttgggcctctccgcggcacaggcctgaaccaccccaccgcagggctagtgttttcctttctctgctaaacacacacaccctcttacctggcccggttccggctcttttacccacaaagacccggcccctcccggaaacctcaggttttgggaagggaggggttggattgaggggagagggttgtgctctggggagggagcccccagcttccaatatagatgcccgggggtgggcccgaccctccagatcactggaatttgggttcccacctccctctggtccccggccccagggctggccgtggaggtgaaggtacccacagagccgctgagcacgcccctggggaagacagccgagctgacctgcacctacagcacgtcggtgggagacagcttcgccctggagtggagctttgtgcagcctgggaaacccatctctgagtcccatccaatcctgtacttcaccaatggccatctgtatccaactggttctaagtcaaagcgggtcagcctgcttcagaacccccccacagtgggggtggccacactgaaactgactgacgtccacccctcagatactggaacctacctctgccaagtcaacaacccaccagatttctacaccaatgggttggggctaatcaaccttactgtgctggttccccccagtaatcccttatgcagtcagagtggacaaacctctgtgggaggctctactgcactgagatgcagctcttccgagggggctcctaagccagtgtacaactgggtgcgtcttggaacttttcctacaccttctcctggcagcatggttcaagatgaggtgtctggccagctcattctcaccaacctctccctgacctcctcgggcacctaccgctgtgtggccaccaaccagatgggcagtgcatcctgtgagctgaccctctctgtgaccgaaccctcccaaggccgagtggccggagctctgattggggtgctcctgggcgtgctgttgctgtcagttgctgcgttctgcctggtcaggttccagaaagagagggggaagaagcccaaggagacatatgggggtagtgaccttcgggaggatgccatcgctcctgggatctctgagcacacttgtatgagggctgattctagcaaggggttcctggaaagaccctcgtctgccagcaccgtgacgaccaccaagtccaagctccctatggtcgtgtgacttctcccgatccctgagggcggtgagggggaatatcaataattaaagtctgtgggtaccat

SEQ ID NO: 426906 - DNA, 1237 bp, Homo sapiens
  misc_feature (1)..(4): n is a, c, g, or t
nnnngtttgctctgagataccagtctcgctcctgcccagcccgggcggctgcccttgggtgctcccttccctgcccgacacccagaccgaccttgaccgcccacctggcaggagcaggacaggacggccggacgcggccatggccgagctcccggggccctttctctgcggggccctgctaggcttcctgtgcctgagtgggctggccgtggaggtgaaggtacccacagagccgctgagcacgcccctggggaagacagccgagctgacctgcacctacagcacgtcggtgggagacagcttcgccctggagtggagctttgtgcagcctgggaaacccatctctgagtcccatccaatcctgtacttcaccaatggccatctgtatccaactggttctaagtcaaagcgggtcagcctgcttcagaacccccccacagtgggggtggccacactgaaactgactgacgtccacccctcagatactggaacctacctctgccaagtcaacaacccaccagatttctacaccaatgggttggggctaatcaaccttactgtgctggttccccccagtaatcccttatgcagtcagagtggacaaacctctgtgggaggctctactgcactgagatgcagctcttccgagggggctcctaagccagtgtacaactgggtgcgtcttggaacttttcctacaccttctcctggcagcatggttcaagagctgctcactgagttgaatgagtcgtggaacacttcctcttcatcctctagatgaggtgtctggccagctcattctcaccaacctctccctgacctcctcgggcacctaccgctgtgtggccaccaaccagatgggcagtgcatcctgtgagctgaccctctctgtgaccgaaccctcccaaggccgagtggccggagctctgattggggtgctcctgggcgtgctgttgctgtcagttgctgcgttctgcctggtcaggttccagaaagagagggggaagaagcccaaggagacatatgggggtagtgaccttcgggaggatgccatcgctcctgggatctctgagcacacttgtatgagggctgattctagcaaggggttcctggaaagaccctcgtctgccagcaccgtgacgaccaccaagtccaagctccctatggtcgtgtgacttctcccgatccctgagggcggtgagggggaatatcaataattaaagtctgtgggtaccat

SEQ ID NO: 426907 - DNA, 967 bp, Homo sapiens
cggatgggtgtattactgctggattcaactatccaaagggctgtcatgtggaggagagattttaatttctctttgtgggcccaaagggcaggaactgaaaccaatgggtggaggttatgttaacacacattttggctcaacatgaagaagaattttctctaacaatcagaatttccaatagtggaaatccctcagttcctggggatgcagtggtgtgtggacccaagaggaccactgtttgataggggtattgaagtagagaatgtagcacctaatggagttgggagtggggctggaagattgctgaggaactttctgttttttttttgttttttttttgttttgcagttccccccagtaatcccttatgcagtcagagtggacaaacctctgtgggaggctctactgcactgagatgcagctcttccgagggggctcctaagccagtgtacaactgggtgcgtcttggaacttttcctacaccttctcctggcagcatggttcaagatgaggtgtctggccagctcattctcaccaacctctccctgacctcctcgggcacctaccgctgtgtggccaccaaccagatgggcagtgcatcctgtgagctgaccctctctgtgaccgaaccctcccaaggccgagtggccggagctctgattggggtgctcctgggcgtgctgttgctgtcagttgctgcgttctgcctggtcaggttccagaaagagagggggaagaagcccaaggagacatatgggggtagtgaccttcgggaggatgccatcgctcctgggatctctgagcacacttgtatgagggctgattctagcaaggggttcctggaaagaccctcgtctgccagcaccgtgacgaccaccaagtccaagctccctatggtcgtgtgacttctcccgatccctgagggcggtgagggggaatatcaataattaaagtctgtgggtaccat

SEQ ID NO: 426908 - DNA, 288 bp, Homo sapiens
ggtacccacagactttaattattgatattccccctcaccgccctcagggatggggaagaagcccaaggagacatatgggggtagtgaccttcgggaggatgccatcgctcctgggatctctgagcacacttgtatgagggctgattctagcaaggggttcctggaaagaccctcgtctgccagcaccgtgacgaccaccaagtccaagctccctatggtcgtgtgacttctcccgatccctgagggcggtgagggggaatatcaataattaaagtctgtgggtaccat

SEQ ID NO: 426909 - DNA, 480 bp, Homo sapiens
gaggaaatcaggaaaggggaggggaaactgcctctgtcatccactttagctgccagtcagggtctaggatagggatcagagcaacatttctccaggtggagtcctcagattacctggacagaaatcaccgggaactagttatacattcagattcaggccacttctagccaaagttccgcagattattctcaagcacagtgaaatttaagagtccccaggttagaggacggccctcctccgcaggaggcttctactgttcactcagaacttgcctatacccatcagggaggatgccatcgctcctgggatctctgagcacacttgtatgagggctgattctagcaaggggttcctggaaagaccctcgtctgccagcaccgtgacgaccaccaagtccaagctccctatggtcgtgtgacttctcccgatccctgagggcggtgagggggaatatcaataattaaagtctgtgggtaccat

SEQ ID NO: 426910 - DNA, 1281 bp, Homo sapiens
  misc_feature (1)..(4): n is a, c, g, or t
nnnngtttgctctgagataccagtctcgctcctgcccagcccgggcggctgcccttgggtgctcccttccctgcccgacacccagaccgaccttgaccgcccacctggcaggagcaggacaggacggccggacgcggccatggccgagctcccggggccctttctctgcggggccctgctaggcttcctgtgcctgagtgggctggccgtggaggtgaaggtacccacagagccgctgagcacgcccctggggaagacagccgagctgacctgcacctacagcacgtcggtgggagacagcttcgccctggagtggagctttgtgcagcctgggaaacccatctctgagtcccatccaatcctgtacttcaccaatggccatctgtatccaactggttctaagtcaaagcgggtcagcctgcttcagaacccccccacagtgggggtggccacactgaaactgactgacgtccacccctcagatactggaacctacctctgccaagtcaacaacccaccagatttctacaccaatgggttggggctaatcaaccttactgtgctggttccccccagtaatcccttatgcagtcagagtggacaaacctctgtgggaggctctactgcactgagatgcagctcttccgagggggctcctaagccagtgtacaactgggtgcgtcttggaacttttcctacaccttctcctggcagcatggttcaagatgaggtgtctggccagctcattctcaccaacctctccctgacctcctcgggcacctaccgctgtgtggccaccaaccagatgggcagtgcatcctgtgagctgaccctctctgtgaccgaaccctcccaaggccgagtggccggagctctgattggggtgctcctgggcgtgctgttgctgtcagttgctgcgttctgcctggtcaggttccagaaagagagggggaagaagcccaaggagacatatgggggtagtgaccttcggtgagcaggagggctggggggtggcgcaaggagggaggaaagggcttgagttaaaagcgggtgcctgcaaccctcaaactccgacatcattcagtgtgtttaggggcaggaggtgttgttcagccgtggaatttgctggtggcagcagtgtaacctgtgtatttgagggtacaggcaagcggtacagggtggagtggctggtccacaagctgtggcagggaagctgtttgcaggactgccctgcccctcctcatatttaataaagtttacttttctgttcaaaaaaaattt

SEQ ID NO: 426911 - DNA, 1298 bp, Homo sapiens
  misc_feature (1)..(4): n is a, c, g, or t
nnnngtttgctctgagataccagtctcgctcctgcccagcccgggcggctgcccttgggtgctcccttccctgcccgacacccagaccgaccttgaccgcccacctggcaggagcaggacaggacggccggacgcggccatggccgagctcccggggccctttctctgcggggccctgctaggcttcctgtgcctgagtgggctggccgtggaggtgaaggtacccacagagccgctgagcacgcccctggggaagacagccgagctgacctgcacctacagcacgtcggtgggagacagcttcgccctggagtggagctttgtgcagcctgggaaacccatctctgagtcccatccaatcctgtacttcaccaatggccatctgtatccaactggttctaagtcaaagcgggtcagcctgcttcagaacccccccacagtgggggtggccacactgaaactgactgacgtccacccctcagatactggaacctacctctgccaagtcaacaacccaccagatttctacaccaatgggttggggctaatcaaccttactgtgctggttccccccagtaatcccttatgcagtcagagtggacaaacctctgtgggaggctctactgcactgagatgcagctcttccgagggggctcctaagccagtgtacaactgggtgcgtcttggaacttttcctacaccttctcctggcagcatggttcaagatgaggtgtctggccagctcattctcaccaacctctccctgacctcctcgggcacctaccgctgtgtggccaccaaccagatgggcagtgcatcctgtgagctgaccctctctgtgaccgaaccctcccaaggccgagtggccggagctctgattggggtgctcctgggcgtgctgttgctgtcagttgctgcgttctgcctggtcaggttccagaaagagagggggaagaagcccaaggagacatatgggggtagtgaccttcgggaggatgccatcgctcctgggatctctgagcacacttgtatgagggctgattctagcaaggggttcctggaaagaccctcgtctgccagcaccgtgacgaccaccaagtccaagctccctatggtcgtgtgacttctcccgatccctgagggcggtgagggggaatatcaataattaaagtctgtgggtaccataaaaactccttcttctttctgctggtatggcgaattcctctaggcggctcagagtattaacagtaagagaaggaatgggcttgaagtccgagaaaaggtaggcaggaagtttg

SEQ ID NO: 426912 - DNA, 1027 bp, Homo sapiens
  misc_feature (1)..(4): n is a, c, g, or t
nnnngtttgctctgagataccagtctcgctcctgcccagcccgggcggctgcccttgggtgctcccttccctgcccgacacccagaccgaccttgaccgcccacctggcaggagcaggacaggacggccggacgcggccatggccgagctcccggggccctttctctgcggggccctgctaggcttcctgtgcctgagtgatcctgtacttcaccaatggccatctgtatccaactggttctaagtcaaagcgggtcagcctgcttcagaacccccccacagtgggggtggccacactgaaactgactgacgtccacccctcagatactggaacctacctctgccaagtcaacaacccaccagatttctacaccaatgggttggggctaatcaaccttactgtgctggttccccccagtaatcccttatgcagtcagagtggacaaacctctgtgggaggctctactgcactgagatgcagctcttccgagggggctcctaagccagtgtacaactgggtgcgtcttggaacttttcctacaccttctcctggcagcatggttcaagatgaggtgtctggccagctcattctcaccaacctctccctgacctcctcgggcacctaccgctgtgtggccaccaaccagatgggcagtgcatcctgtgagctgaccctctctgtgaccgaaccctcccaaggccgagtggccggagctctgattggggtgctcctgggcgtgctgttgctgtcagttgctgcgttctgcctggtcaggttccagaaagagagggggaagaagcccaaggagacatatgggggtagtgaccttcgggaggatgccatcgctcctgggatctctgagcacacttgtatgagggctgattctagcaaggggttcctggaaagaccctcgtctgccagcaccgtgacgaccaccaagtccaagctccctatggtcgtgtgacttctcccgatccctgagggcggtgagggggaatatcaataattaaagtctgtgggtaccat

SEQ ID NO: 426913 - DNA, 1488 bp, Homo sapiens
  misc_feature (1)..(4): n is a, c, g, or t
nnnngtttgctctgagataccagtctcgctcctgcccagcccgggcggctgcccttgggtgctcccttccctgcccgacacccagaccgaccttgaccgcccacctggcaggagcaggacaggacggccggacgcggccatggccgagctcccggggccctttctctgcggggccctgctaggcttcctgtgcctgagtggtgaggaggggccgggcgggaccacggcgagggctggggggcataggcctggcttccccggctcctcggacccactctgtccccgccaggccagatgaggctgccgtgggcgccagggccctaaggcgcctgaggtgaggccggagagggggtgtccaaggcccggagggcgtaggagagagacccccaagccggcgagcgagttgggcctctccgcggcacaggcctgaaccaccccaccgcagggctagtgttttcctttctctgctaaacacacacaccctcttacctggcccggttccggctcttttacccacaaagacccggcccctcccggaaacctcaggttttgggaagggaggggttggattgaggggagagggttgtgctctggggagggagcccccagcttccaatatagatgcccgggggtgggcccgaccctccagatcactggaatttgggttcccacctccctctggtccccggccccagggctggccgtggaggtgaaggtacccacagagccgctgagcacgcccctggggaagacagccgagctgacctgcacctacagcacgtcggtgggagacagcttcgccctggagtggagctttgtgcagcctgggaaacccatctctgagtcccatccaatcctgtacttcaccaatggccatctgtatccaactggttctaagtcaaagcgggtcagcctgcttcagaacccccccacagtgggggtggccacactgaaactgactgacgtccacccctcagatactggaacctacctctgccaagtcaacaacccaccagatttctacaccaatgggttggggctaatcaaccttactgtgctggttccccccagtaatcccttatgcagtcagagtggacaaacctctgtgggaggctctactgcactgagatgcagctcttccgagggggctcctaagccagtgtacaactgggtgcgtcttggaacttttcctacaccttctcctggcagcatggttcaaggtaagggcccagggcatcaggaagagggtactggagacctgggcaaatctggtctctaaatcccacacacccgtattatccgttccatgactaggggtatgacacaaaccactatacctttccctgtctcttccttggcttcctgtattgttccctcctgcctgtctttctgcagtctgtggctgcatgatcctggaggtatttctcaagctgaatatactgctgatatcctggaagagagtagagggcagggagcaatctgatgatg

SEQ ID NO: 426914 - DNA, 760 bp, Homo sapiens
cttagacgccgccactgtctccacttctctattaccctccagggagaagtagccagagagggtgtcttcaagatgaccagcttttccttctacttgcagggtcaccaaagtgaaaattgagtgttcatttttttcttatttgcgatacctgtagcctgagaatgttacttctagcagttgtcttcattttgtttatttttattaatgtagaaaattatcaaacccatagaaaaattgagagtagagtgaatacccatatgcccctgtccttggttctccagctattaacaccttgtcatatttcttatccctccttccctctcttactctttcctttctctctctctttcttcttctgtctcttctcttttgtcagaccatgtgacacttcaccaacatataacacttcactcctagaccctttggggcatactaatgctccttacaaggaaggtgttcttcccacagctagagtacccttaccctttcataaaatgatcagcattaattccatgacatcccatcctcccaaaaaagtctaggtaactctgttttcaacacatgatttaattgtttcatgcattattcttagtctagaacagtcttgcccttcctctcttctttaagacattcagtactttgcaatgtacagatcagttgtttcacagagtggttcacattgtggattcctccagtgagttctttctgatgagatgtagcttgcacgtttctaacacgaccactacagattcctgaagac

SEQ ID NO: 426915 - DNA, 706 bp, Homo sapiens
cttagacgccgccactgtctccacttctctattaccctccagggagaagtagccagagagggtgtcttcaagatgaccagcttttccttctacttgcagggtcaccaaagtgaaaattgagtgttcatttttttcttatttgcgatacctgtagcctgagaatgttacttctagcagttgtcttcattttgtttatttttattaatgtagaaaattatcaaacccatagaaaaattgagagtagagtgaatacccatatgcccctgtccttggttctccagctattaacaccttgtcatatttcttatccctccttccctctcttactctttcctttctctctctctttcttcttctgtctcttctcttttgtcagaccatgtgacacttcaccaacatataacacttcactcctagaccctttggggcatactaatgctccttacaaggaaggtgttcttcccacagctagagtacccttaccctttcataatctgttttcaacacatgatttaattgtttcatgcattattcttagtctagaacagtcttgcccttcctctcttctttaagacattcagtactttgcaatgtacagatcagttgtttcacagagtggttcacattgtggattcctccagtgagttctttctgatgagatgtagcttgcacgtttctaacacgaccactacagattcctgaagac

SEQ ID NO: 426916 - DNA, 463 bp, Homo sapiens
atgatcagcattaattccatgacatcccatcctcccaaaaaagtctaggtaactctgttttcaacacatgatttaattgtttcatgcattattcttagtctagaacagtcttgcccttcctctcttctttaagacattcagtactttgcaatgtacagatcagttgtttcacagagtggttcacattgtggattcctccagtgagttctttctgatgagatgtagcttgcacgtttctaacacgaccactacagattcctgaagacggtgcagaagtagctgggactacaggtgcccgccaccacgcccggctaatttttttgtatttttagtagagacagggttttaccatgttagccaggatggccatccttgtttcccagcagccttcccccagtggttcagcactcacttctgtcagttatcatactggaggttataaaatggtaattttctaaatttg

SEQ ID NO: 426917 - DNA, 794 bp, Homo sapiens
cttagacgccgccactgtctccacttctctattaccctccagggagaagtagccagagagggtgtcttcaagatgaccagcttttccttctacttgcagggtcaccaaagtgaaaattgagtgttcatttttttcttatttgcgatacctgtagcctgagaatgttacttctagcagttgtcttcattttgtttatttttattaatgtagaaaattatcaaacccatagaaaaattgagagtagagtgaatacccatatgcccctgtccttggttctccagctattaacaccttgtcatatttcttatccctccttccctctcttactctttcctttctctctctctttcttcttctgtctcttctcttttgtcagaccatgtgacacttcaccaacatataacacttcactcctagaccctttggggcatactaatgctccttacaaggaaggtgttcttcccacagctagagtacccttaccctttcataaaatgatcagcattaattccatgacatcccatcctcccaaaaaagtctaggtaactctgttttcaacacatgatttaattgtttcatgcattattcttagtctagaacagtcttgcccttcctctcttctttaagacattcagtactttgcaatgtacagatcagttgtttcacagagtggttcacattgtggattcctccagtgagttctttctgatgagatgcgccaggcttcgtcccagtcacgaccatttacagattctggcagaccctcggtatactctagcgtctacactctagag

SEQ ID NO: 426918 - DNA, 2819 bp, Homo sapiens
gcgcggcgctgctgggttctccgaggcgacctggccgccggccgctcctccgcgcgctgttccgcacttgctgccctcgcccggcccggagcgccgctgccatgcggctggcgctgctctgggccctggggctcctgggcgcgggcagccctctgccttcctggccgctcccaaatataggtggcactgaggagcagcaggcagagtcagagaaggccccgagggagcccttggagccccaggtccttcaggacgatctcccaattagcctcaaaaaggtgcttcagaccagtctgcctgagcccctgaggatcaagttggagctggacggtgacagtcatatcctggagctgctacagaatagggagttggtcccaggccgcccaaccctggtgtggtaccagcccgatggcactcgggtggtcagtgagggacacactttggagaactgctgctaccagggaagagtgcggggatatgcaggctcctgggtgtccatctgcacctgctctgggctcagaggcttggtggtcctgaccccagagagaagctataccctggagcaggggcctggggaccttcagggtcctcccattatttcgcgaatccaagatctccacctgccaggccacacctgtgccctgagctggcgggaatctgtacacactcagacgccaccagagcaccccctgggacagcgccacattcgccggaggcgggatgtggtaacagagaccaagactgtggagttggtgattgtggctgatcactcggaggcccagaaataccgggacttccagcacctgctaaaccgcacactggaagtggccctcttgctggacacattcttccggcccctgaatgtacgagtggcactagtgggcctggaggcctggacccagcgtgacctggtggagatcagcccaaacccagctgtcaccctcgaaaacttcctccactggcgcagggcacatttgctgcctcgattgccccatgacagtgcccagctggtgactggtacttcattctctgggcctacggtgggcatggccattcagaactccatctgttctcctgacttctcaggaggtgtgaacatggaccactccaccagcatcctgggagtcgcctcctccatagcccatgagttgggccacagcctgggcctggaccatgatttgcctgggaatagctgcccctgtccaggtccagccccagccaagacctgcatcatggaggcctccacagacttcctaccaggcctgaacttcagcaactgcagccgacgggccctggagaaagccctcctggatggaatgggcagctgcctcttcgaacggctgcctagcctaccccctatggctgctttctgcggaaatatgtttgtggagccgggcgagcagtgtgactgtggcttcctggatgactgcgtcgatccctgctgtgattctttgacctgccagctgaggccaggtgcacagtgtgcatctgacggaccctgttgtcaaaattgccagctgcgcccgtctggctggcagtgtcgtcctaccagaggggattgtgacttgcctgaattctgcccaggagacagctcccagtgtccccctgatgtcagcctaggggatggcgagccctgcgctggcgggcaagctgtgtgcatgcacgggcgttgtgcctcctatgcccagcagtgccagtcactttggggacctggagcccagcccgctgcgccactttgcctccagacagctaatactcggggaaatgcttttgggagctgtgggcgcaaccccagtggcagttatgtgtcctgcacccctagagatgccatttgtgggcagctccagtgccagacaggtaggacccagcctctgctgggctccatccgggatctactctgggagacaatagatgtgaatgggactgagctgaactgcagctgggtgcacctggacctgggcagtgatgtggcccagcccctcctgactctgcctggcacagcctgtggccctggcctggtgtgtatagaccatcgatgccagcgtgtggatctcctgggggcacaggaatgtcgaagcaaatgccatggacatggggtctgtgacagcaacaggcactgctactgtgaggagggctgggcaccccctgactgcaccactcagctcaaagcaaccagctccctgaccacagggctgctcctcagcctcctggtcttattggtcctggtgatgcttggtgccagctactggtaccgtgcccgcctgcaccagcgactctgccagctcaagggacccacctgccagtacagggcagcccaatctggtccctctgaacggccaggacctccgcagagggccctgctggcacgaggcactaagtctcaggggccagccaagcccccacccccaaggaagccactgcctgccgacccccagggccggtgcccatcgggtgacctgcccggcccaggggctggaatcccgcccctagtggtaccctccagaccagcgccaccgcctccgacagtgtcctcgctctacctctgacctctccggaggttccgctgcctccaagccggacttagggcttcaagaggcgggcgtgccctctggagtcccctaccatgactgaaggcgccagagactggcggtgtcttaagactccgggcaccgccacgcgctgtcaagcaacactctgcggacctgccggcgtagttgcagcgggggcttggggaggggctgggggttggacgggattgaggaaggtccgcacagcctgtctctgctcagttgcaataaacgtgacatcttgggagcgtt

SEQ ID NO: 426919 - DNA, 1528 bp, Homo sapiens
gcgcggcgctgctgggttctccgaggcgacctggccgccggccgctcctccgcgcgctgttccgcacttgctgccctcgcccggcccggagcgccgctgccatgcggctggcgctgctctgggccctggggctcctgggcgcgggcagccctctgccttcctggccgctcccaaatataggtggcactgaggagcagcaggcagagtcagagaaggccccgagggagcccttggagccccaggtccttcaggacgatctcccaattagcctcaaaaaggtgcttcagaccagtctgcctgagcccctgaggatcaagttggagctggacggtgacagtcatatcctggagctgctacagaatagggagttggtcccaggccgcccaaccctggtgtggtaccagcccgatggcactcgggtggtcagtgagggacacactttggagaactgctgctaccagggaagagtgcggggatatgcaggctcctgggtgtccatctgcacctgctctgggctcagaggcttggtggtcctgaccccagagagaagctataccctggagcaggggcctggggaccttcagggtcctcccattatttcgcgaatccaagatctccacctgccaggccacacctgtgccctgagctggcgggaatctgtacacactcagacgccaccagagcaccccctgggacagcgccacattcgccggaggcgggatgtggtaacagagaccaagactgtggagttggtgattgtggctgatcactcggaggcccagaaataccgggacttccagcacctgctaaaccgcacactggaagtggccctcttgctggacacattcttccggcccctgaatgtacgagtggcactagtgggcctggaggcctggacccagcgtgacctggtggagatcagcccaaacccagctgtcaccctcgaaaacttcctccactggcgcagggcacatttgctgcctcgattgccccatgacagtgcccagctggtgactggtacttcattctctgggcctacggtgggcatggccattcagaactccatctgttctcctgacttctcaggaggtgtgaacatggaccactccaccagcatcctgggagtcgcctcctccatagcccatgagttgggccacagcctgggcctggaccatgatttgctggaatcccgcccctagtggtaccctccagaccagcgccaccgcctccgacagtgtcctcgctctacctctgacctctccggaggttccgctgcctccaagccggacttagggcttcaagaggcgggcgtgccctctggagtcccctaccatgactgaaggcgccagagactggcggtgtcttaagactccgggcaccgccacgcgctgtcaagcaacactctgcggacctgccggcgtagttgcagcgggggcttggggaggggctgggggttggacgggattgaggaaggtccgcacagcctgtctctgctcagttgcaataaacgtgacatcttgggagcgtt

SEQ ID NO: 426920 - DNA, 510 bp, Homo sapiens
cgccacccgctggcggatatcctgcaccgcggctgcccgctcctgcgccgctggctgtgccggcgctgcgtggtgtgccaggcacccgagacgcccgagtcctacgtgtgccggacgctggactgcgaggccgtgtactgctggtcgtgctgggacgacatgcggcagcggtgcccggtctgcacgccccgcgaagagctctcttcctccgcctttagtgacagcaacgacgacactgcctacgcggggtgaagaggcgtcctgctcgctcttccgcaccgtccttcccggttaataaaatgccctgtacgcttcacgtgggtcggggactggggtgagccgcgcactgcctcgcctgcagtcgggaaagcctgcccgcccgacctctccgagccaggccgcgcacaggaggcagggaggccgcgaagctactagggaggggtccggacctggcgccgggtgaaggcgcgccgcccaagccggtcggaccgggcaccggctcccactccg

SEQ ID NO: 426921 - DNA, 2749 bp, Homo sapiens
gcgcggcgctgctgggttctccgaggcgacctggccgccggccgctcctccgcgcgctgttccgcacttgctgccctcgcccggcccggagcgccgctgccatgcggctggcgctgctctgggccctggggctcctgggcgcgggcagccctctgccttcctggccgctcccaaatataggtggcactgaggagcagcaggcagagtcagagaaggccccgagggagcccttggagccccaggtccttcaggacgatctcccaattagcctcaaaaaggtgcttcagaccagtctgcctgagcccctgaggatcaagttggagctggacggtgacagtcatatcctggagctgctacagaatagggagttggtcccaggccgcccaaccctggtgtggtaccagcccgatggcactcgggtggtcagtgagggacacactttggagaactgctgctaccagggaagagtgcggggatatgcaggctcctgggtgtccatctgcacctgctctgggctcagaggcttggtggtcctgaccccagagagaagctataccctggagcaggggcctggggaccttcagggtcctcccattatttcgcgaatccaagatctccacctgccaggccacacctgtgccctgagctggcgggaatctgtacacactcagacgccaccagagcaccccctgggacagcgccacattcgccggaggcgggatgtggtaacagagaccaagactgtggagttggtgattgtggctgatcactcggaggcccagaaataccgggacttccagcacctgctaaaccgcacactggaagtggccctcttgctggacacattcttccggcccctgaatgtacgagtggcactagtgggcctggaggcctggacccagcgtgacctggtggagatcagcccaaacccagctgtcaccctcgaaaacttcctccactggcgcagggcacatttgctgcctcgattgccccatgacagtgcccagctggtgactggtacttcattctctgggcctacggtgggcatggccattcagaactccatctgttctcctgacttctcaggaggtgtgaacatggaccactccaccagcatcctgggagtcgcctcctccatagcccatgagttgggccacagcctgggcctggaccatgatttgcctgggaatagctgcccctgtccaggtccagccccagccaagacctgcatcatggaggcctccacagacttcctaccaggcctgaacttcagcaactgcagccgacgggccctggagaaagccctcctggatggaatgggcagctgcctcttcgaacggctgcctagcctaccccctatggctgctttctgcggaaatatgtttgtggagccgggcgagcagtgtgactgtggcttcctggatgactgcgtcgatccctgctgtgattctttgacctgccagctgaggccaggtgcacagtgtgcatctgacggaccctgttgtcaaaattgccagctgcgcccgtctggctggcagtgtcgtcctaccagaggggattgtgacttgcctgaattctgcccaggagacagctcccagtgtccccctgatgtcagcctaggggatggcgagccctgcgctggcgggcaagctgtgtgcatgcacgggcgttgtgcctcctatgcccagcagtgccagtcactttggggacctggagcccagcccgctgcgccactttgcctccagacagctaatactcggggaaatgcttttgggagctgtgggcgcaaccccagtggcagttatgtgtcctgcacccctagagatgccatttgtgggcagctccagtgccagacaggtaggacccagcctctgctgggctccatccgggatctactctgggagacaatagatgtgaatgggactgagctgaactgcagctgggtgcacctggacctgggcagtgatgtggcccagcccctcctgactctgcctggcacagcctgtggccctggcctggtgtgtatagaccatcgatgccagcgtgtggatctcctgggggcacaggaatgtcgaagcaaatgccatggacatggggtctgtgacagcaacaggcactgctactgtgaggagggctgggcaccccctgactgcaccactcagctcaaagcaaccagctccctgaccacagggctgctcctcagcctcctggtcttattggtcctggtgatgcttggtgccagctactggtaccgtgcccgcctgcaccagcgactctgccagctcaagggacccacctgccagtacagtctcaggggccagccaagcccccacccccaaggaagccactgcctgccgacccccagggccggtgcccatcgggtgacctgcccggcccaggggctggaatcccgcccctagtggtaccctccagaccagcgccaccgcctccgacagtgtcctcgctctacctctgacctctccggaggttccgctgcctccaagccggacttagggcttcaagaggcgggcgtgccctctggagtcccctaccatgactgaaggcgccagagactggcggtgtcttaagactccgggcaccgccacgcgctgtcaagcaacactctgcggacctgccggcgtagttgcagcgggggcttggggaggggctgggggttggacgggattgaggaaggtccgcacagcctgtctctgctcagttgcaataaacgtgacatcttgggagcgtt

SEQ ID NO: 426922 - DNA, 2962 bp, Homo sapiens
gcgcggcgctgctgggttctccgaggcgacctggccgccggccgctcctccgcgcgctgttccgcacttgctgccctcgcccggcccggagcgccgctgccatgcggctggcgctgctctgggccctggggctcctgggcgcgggcagccctctgccttcctggccgctcccaaatataggtggcactgaggagcagcaggcagagtcagagaaggccccgagggagcccttggagccccaggtccttcaggacgatctcccaattagcctcaaaaaggtgcttcagaccagtctgcctgagcccctgaggatcaagttggagctggacggtgacagtcatatcctggagctgctacagaatagggagttggtcccaggccgcccaaccctggtgtggtaccagcccgatggcactcgggtggtcagtgagggacacactttggagaactgctgctaccagggaagagtgcggggatatgcaggctcctgggtgtccatctgcacctgctctgggctcagaggcttggtggtcctgaccccagagagaagctataccctggagcaggggcctggggaccttcagggtcctcccattatttcgcgaatccaagatctccacctgccaggccacacctgtgccctgagctggcgggaatctgtacacactcagacgccaccagagcaccccctgggacagcgccacattcgccggaggcgggatgtggtaacagagaccaagactgtggagttggtgattgtggctgatcactcggaggcccagaaataccgggacttccagcacctgctaaaccgcacactggaagtggccctcttgctggacacattcttccggcccctgaatgtacgagtggcactagtgggcctggaggcctggacccagcgtgacctggtggagatcagcccaaacccagctgtcaccctcgaaaacttcctccactggcgcagggcacatttgctgcctcgattgccccatgacagtgcccagctggtgactggtacttcattctctgggcctacggtgggcatggccattcagaactccatctgttctcctgacttctcaggaggtgtgaacatggaccactccaccagcatcctgggagtcgcctcctccatagcccatgagttgggccacagcctgggcctggaccatgatttgcctgggaatagctgcccctgtccaggtccagccccagccaagacctgcatcatggaggcctccacagacttcctaccaggcctgaacttcagcaactgcagccgacgggccctggagaaagccctcctggatggaatgggcagctgcctcttcgaacggctgcctagcctaccccctatggctgctttctgcggaaatatgtttgtggagccgggcgagcagtgtgactgtggcttcctggatgactgcgtcgatccctgctgtgattctttgacctgccagctgaggccaggtgcacagtgtgcatctgacggaccctgttgtcaaaattgccagctgcgcccgtctggctggcagtgtcgtcctaccagaggggattgtgacttgcctgaattctgcccaggagacagctcccagtgtccccctgatgtcagcctaggggatggcgagccctgcgctggcgggcaagctgtgtgcatgcacgggcgttgtgcctcctatgcccagcagtgccagtcactttggggacctggagcccagcccgctgcgccactttgcctccagacagctaatactcggggaaatgcttttgggagctgtgggcgcaaccccagtggcagttatgtgtcctgcacccctagagatgccatttgtgggcagctccagtgccagacaggtaggacccagcctctgctgggctccatccgggatctactctgggagacaatagatgtgaatgggactgagctgaactgcagctgggtgcacctggacctgggcagtgatgtggcccagcccctcctgactctgcctggcacagcctgtggccctggcctggtgtgtatagaccatcgatgccagcgtgtggatctcctgggggcacaggaatgtcgaagcaaatgccatggacatggggtctgtgacagcaacaggcactgctactgtgaggagggctgggcaccccctgactgcaccactcagctcaaagcaaccagctccctgaccacagggctgctcctcagcctcctggtcttattggtcctggtgatgcttggtgccagctactggtaccgtgcccgcctgcaccagcgactctgccagctcaagggacccacctgccagtacagggcagcccaatctggtccctctgaacggccaggacctccgcagagggccctgctggcacgaggcactaaggctagtgctctcagcttcccggcccccccttccaggccgtgccgcctgaccctgtgtccaagagactccaggctgagctggctgaccgacccaatccccctacccgccctctgcccgctgacccggtggtgagaagcccgaagtctcaggggccagccaagcccccacccccaaggaagccactgcctgccgacccccagggccggtgcccatcgggtgacctgcccggcccaggggctggaatcccgcccctagtggtaccctccagaccagcgccaccgcctccgacagtgtcctcgctctacctctgacctctccggaggttccgctgcctccaagccggacttagggcttcaagaggcgggcgtgccctctggagtcccctaccatgactgaaggcgccagagactggcggtgtcttaagactccgggcaccgccacgcgctgtcaagcaacactctgcggacctgccggcgtagttgcagcgggggcttggggaggggctgggggttggacgggattgaggaaggtccgcacagcctgtctctgctcagttgcaataaacgtgacatcttgggagcgtt

SEQ ID NO: 426923 - DNA, 2978 bp, Homo sapiens
cgccacccgctggcggatatcctgcaccgcggctgcccgctcctgcgccgctggctgtgccggcgctgcgtggtgtgccaggcacccgagacgcccgagtcctacgtgtgccggacgctggactgcgaggccgtgtactgctggtcgtgctgggacgacatgcggcagcggtgcccggtctgcacgccccgcgaagagctctcttcctccgcctttagtgacagcaacgacgacactgcctacgcggggtgaagaggcgtcctgctcgctcttccgcaccgtccttcccggttaataaaatgccctgtggcactgaggagcagcaggcagagtcagagaaggccccgagggagcccttggagccccaggtccttcaggacgatctcccaattagcctcaaaaaggtgcttcagaccagtctgcctgagcccctgaggatcaagttggagctggacggtgacagtcatatcctggagctgctacagaatagggagttggtcccaggccgcccaaccctggtgtggtaccagcccgatggcactcgggtggtcagtgagggacacactttggagaactgctgctaccagggaagagtgcggggatatgcaggctcctgggtgtccatctgcacctgctctgggctcagaggcttggtggtcctgaccccagagagaagctataccctggagcaggggcctggggaccttcagggtcctcccattatttcgcgaatccaagatctccacctgccaggccacacctgtgccctgagctggcgggaatctgtacacactcagacgccaccagagcaccccctgggacagcgccacattcgccggaggcgggatgtggtaacagagaccaagactgtggagttggtgattgtggctgatcactcggaggcccagaaataccgggacttccagcacctgctaaaccgcacactggaagtggccctcttgctggacacattcttccggcccctgaatgtacgagtggcactagtgggcctggaggcctggacccagcgtgacctggtggagatcagcccaaacccagctgtcaccctcgaaaacttcctccactggcgcagggcacatttgctgcctcgattgccccatgacagtgcccagctggtgactggtacttcattctctgggcctacggtgggcatggccattcagaactccatctgttctcctgacttctcaggaggtgtgaacatggaccactccaccagcatcctgggagtcgcctcctccatagcccatgagttgggccacagcctgggcctggaccatgatttgcctgggaatagctgcccctgtccaggtccagccccagccaagacctgcatcatggaggcctccacagacttcctaccaggcctgaacttcagcaactgcagccgacgggccctggagaaagccctcctggatggaatgggcagctgcctcttcgaacggctgcctagcctaccccctatggctgctttctgcggaaatatgtttgtggagccgggcgagcagtgtgactgtggcttcctggatgactgcgtcgatccctgctgtgattctttgacctgccagctgaggccaggtgcacagtgtgcatctgacggaccctgttgtcaaaattgccagctgcgcccgtctggctggcagtgtcgtcctaccagaggggattgtgacttgcctgaattctgcccaggagacagctcccagtgtccccctgatgtcagcctaggggatggcgagccctgcgctggcgggcaagctgtgtgcatgcacgggcgttgtgcctcctatgcccagcagtgccagtcactttggggacctggagcccagcccgctgcgccactttgcctccagacagctaatactcggggaaatgcttttgggagctgtgggcgcaaccccagtggcagttatgtgtcctgcacccctagagatgccatttgtgggcagctccagtgccagacaggtaggacccagcctctgctgggctccatccgggatctactctgggagacaatagatgtgaatgggactgagctgaactgcagctgggtgcacctggacctgggcagtgatgtggcccagcccctcctgactctgcctggcacagcctgtggccctggcctggtgtgtatagaccatcgatgccagcgtgtggatctcctgggggcacaggaatgtcgaagcaaatgccatggacatggggtctgtgacagcaacaggcactgctactgtgaggagggctgggcaccccctgactgcaccactcagctcaaagcaaccagctccctgaccacagggctgctcctcagcctcctggtcttattggtcctggtgatgcttggtgccagctactggtaccgtgcccgcctgcaccagcgactctgccagctcaagggacccacctgccagtacagggcagcccaatctggtccctctgaacggccaggacctccgcagagggccctgctggcacgaggcactaagtctcaggggccagccaagcccccacccccaaggaagccactgcctgccgacccccagggccggtgcccatcgggtgacctgcccggcccaggggctggaatcccgcccctagtggtaccctccagaccagcgccaccgcctccgacagtgtcctcgctctacctctgacctctccggaggttccgctgcctccaagccggacttagggcttcaagaggcgggcgtgccctctggagtcccctaccatgactgaaggcgccagagactggcggtgtcttaagactccgggcaccgccacgcgctgtcaagcaacactctgcggacctgccggcgtagttgcagcgggggcttggggaggggctgggggttggacgggattgaggaaggtccgcacagcctgtctctgctcagttgcaataaacgtgacatcttgggagcgttaaaaacacaaacacaacaacacaaaaaaacaag

SEQ ID NO: 426924 - DNA, 2789 bp, Homo sapiens
gcgcggcgctgctgggttctccgaggcgacctggccgccggccgctcctccgcgcgctgttccgcacttgctgccctcgcccggcccggagcgccgctgccatgcggctggcgctgctctgggccctggggctcctgggcgcgggcagccctctgccttcctggccgctcccaaatataggtggcactgaggagcagcaggcagagtcagagaaggccccgagggagcccttggagccccaggtccttcaggacgatctcccaattagcctcaaaaaggtgcttcagaccagtctgcctgagcccctgaggatcaagttggagctggacggtgacagtcatatcctggagctgctacagaatagggagttggtcccaggccgcccaaccctggtgtggtaccagcccgatggcactcgggtggtcagtgagggacacactttggagaactgctgctaccagggaagagtgcggggatatgcaggctcctgggtgtccatctgcacctgctctgggctcagaggcttggtggtcctgaccccagagagaagctataccctggagcaggggcctggggaccttcagggtcctcccattatttcgcgaatccaagatctccacctgccaggccacacctgtgccctgagctggcgggaatctgtacacactcagacgccaccagagcaccccctgggacagcgccacattcgccgggcccagaaataccgggacttccagcacctgctaaaccgcacactggaagtggccctcttgctggacacattcttccggcccctgaatgtacgagtggcactagtgggcctggaggcctggacccagcgtgacctggtggagatcagcccaaacccagctgtcaccctcgaaaacttcctccactggcgcagggcacatttgctgcctcgattgccccatgacagtgcccagctggtgactggtacttcattctctgggcctacggtgggcatggccattcagaactccatctgttctcctgacttctcaggaggtgtgaacatggaccactccaccagcatcctgggagtcgcctcctccatagcccatgagttgggccacagcctgggcctggaccatgatttgcctgggaatagctgcccctgtccaggtccagccccagccaagacctgcatcatggaggcctccacagacttcctaccaggcctgaacttcagcaactgcagccgacgggccctggagaaagccctcctggatggaatgggcagctgcctcttcgaacggctgcctagcctaccccctatggctgctttctgcggaaatatgtttgtggagccgggcgagcagtgtgactgtggcttcctggatgactgcgtcgatccctgctgtgattctttgacctgccagctgaggccaggtgcacagtgtgcatctgacggaccctgttgtcaaaattgccagctgcgcccgtctggctggcagtgtcgtcctaccagaggggattgtgacttgcctgaattctgcccaggagacagctcccagtgtccccctgatgtcagcctaggggatggcgagccctgcgctggcgggcaagctgtgtgcatgcacgggcgttgtgcctcctatgcccagcagtgccagtcactttggggacctggagcccagcccgctgcgccactttgcctccagacagctaatactcggggaaatgcttttgggagctgtgggcgcaaccccagtggcagttatgtgtcctgcacccctagagatgccatttgtgggcagctccagtgccagacaggtaggacccagcctctgctgggctccatccgggatctactctgggagacaatagatgtgaatgggactgagctgaactgcagctgggtgcacctggacctgggcagtgatgtggcccagcccctcctgactctgcctggcacagcctgtggccctggcctggtgtgtatagaccatcgatgccagcgtgtggatctcctgggggcacaggaatgtcgaagcaaatgccatggacatggggtctgtgacagcaacaggcactgctactgtgaggagggctgggcaccccctgactgcaccactcagctcaaagcaaccagctccctgaccacagggctgctcctcagcctcctggtcttattggtcctggtgatgcttggtgccagctactggtaccgtgcccgcctgcaccagcgactctgccagctcaagggacccacctgccagtacagggcagcccaatctggtccctctgaacggccaggacctccgcagagggccctgctggcacgaggcactaagtctcaggggccagccaagcccccacccccaaggaagccactgcctgccgacccccagggccggtgcccatcgggtgacctgcccggcccaggggctggaatcccgcccctagtggtaccctccagaccagcgccaccgcctccgacagtgtcctcgctctacctctgacctctccggaggttccgctgcctccaagccggacttagggcttcaagaggcgggcgtgccctctggagtcccctaccatgactgaaggcgccagagactggcggtgtcttaagactccgggcaccgccacgcgctgtcaagcaacactctgcggacctgccggcgtagttgcagcgggggcttggggaggggctgggggttggacgggattgaggaaggtccgcacagcctgtctctgctcagttgcaataaacgtgacatcttgggagcgttaaaaacacaaacacaacaacacaaaaaaacaag

SEQ ID NO: 426925 - DNA, 3066 bp, Homo sapiens
cgccacccgctggcggatatcctgcaccgcggctgcccgctcctgcgccgctggctgtgccggcgctgcgtggtgtgccaggcacccgagacgcccgagtcctacgtgtgccggacgctggactgcgaggccgtgtactgctggtcgtgctgggacgacatgcggcagcggtgcccggtctgcacgccccgcgaagagctctcttcctccgcctttagtgacagcaacgacgacactgcctacgcggggtgaagaggcgtcctgctcgctcttccgcaccgtccttcccggttaataaaatgccctgtggcactgaggagcagcaggcagagtcagagaaggccccgagggagcccttggagccccaggtccttcaggacgatctcccaattagcctcaaaaaggtgcttcagaccagtctgcctgagcccctgaggatcaagttggagctggacggtgacagtcatatcctggagctgctacagaatagggagttggtcccaggccgcccaaccctggtgtggtaccagcccgatggcactcgggtggtcagtgagggacacactttggagaactgctgctaccagggaagagtgcggggatatgcaggctcctgggtgtccatctgcacctgctctgggctcagaggcttggtggtcctgaccccagagagaagctataccctggagcaggggcctggggaccttcagggtcctcccattatttcgcgaatccaagatctccacctgccaggccacacctgtgccctgagctggcgggaatctgtacacactcagacgccaccagagcaccccctgggacagcgccacattcgccggagtaggagtggctgcctcttggtcagcccggcacagctgctggctgcgagcggcaggtttgcctgataattcttcttgtccatagtagaggcgggatgtggtaacagagaccaagactgtggagttggtgattgtggctgatcactcggaggcccagaaataccgggacttccagcacctgctaaaccgcacactggaagtggccctcttgctggacacattcttccggcccctgaatgtacgagtggcactagtgggcctggaggcctggacccagcgtgacctggtggagatcagcccaaacccagctgtcaccctcgaaaacttcctccactggcgcagggcacatttgctgcctcgattgccccatgacagtgcccagctggtgactggtacttcattctctgggcctacggtgggcatggccattcagaactccatctgttctcctgacttctcaggaggtgtgaacatggaccactccaccagcatcctgggagtcgcctcctccatagcccatgagttgggccacagcctgggcctggaccatgatttgcctgggaatagctgcccctgtccaggtccagccccagccaagacctgcatcatggaggcctccacagacttcctaccaggcctgaacttcagcaactgcagccgacgggccctggagaaagccctcctggatggaatgggcagctgcctcttcgaacggctgcctagcctaccccctatggctgctttctgcggaaatatgtttgtggagccgggcgagcagtgtgactgtggcttcctggatgactgcgtcgatccctgctgtgattctttgacctgccagctgaggccaggtgcacagtgtgcatctgacggaccctgttgtcaaaattgccagctgcgcccgtctggctggcagtgtcgtcctaccagaggggattgtgacttgcctgaattctgcccaggagacagctcccagtgtccccctgatgtcagcctaggggatggcgagccctgcgctggcgggcaagctgtgtgcatgcacgggcgttgtgcctcctatgcccagcagtgccagtcactttggggacctggagcccagcccgctgcgccactttgcctccagacagctaatactcggggaaatgcttttgggagctgtgggcgcaaccccagtggcagttatgtgtcctgcacccctagagatgccatttgtgggcagctccagtgccagacaggtaggacccagcctctgctgggctccatccgggatctactctgggagacaatagatgtgaatgggactgagctgaactgcagctgggtgcacctggacctgggcagtgatgtggcccagcccctcctgactctgcctggcacagcctgtggccctggcctggtgtgtatagaccatcgatgccagcgtgtggatctcctgggggcacaggaatgtcgaagcaaatgccatggacatggggtctgtgacagcaacaggcactgctactgtgaggagggctgggcaccccctgactgcaccactcagctcaaagcaaccagctccctgaccacagggctgctcctcagcctcctggtcttattggtcctggtgatgcttggtgccagctactggtaccgtgcccgcctgcaccagcgactctgccagctcaagggacccacctgccagtacagggcagcccaatctggtccctctgaacggccaggacctccgcagagggccctgctggcacgaggcactaagtctcaggggccagccaagcccccacccccaaggaagccactgcctgccgacccccagggccggtgcccatcgggtgacctgcccggcccaggggctggaatcccgcccctagtggtaccctccagaccagcgccaccgcctccgacagtgtcctcgctctacctctgacctctccggaggttccgctgcctccaagccggacttagggcttcaagaggcgggcgtgccctctggagtcccctaccatgactgaaggcgccagagactggcggtgtcttaagactccgggcaccgccacgcgctgtcaagcaacactctgcggacctgccggcgtagttgcagcgggggcttggggaggggctgggggttggacgggattgaggaaggtccgcacagcctgtctctgctcagttgcaataaacgtgacatcttgggagcgttaaaaacacaaacacaacaacacaaaaaaacaag

SEQ ID NO: 426926 - DNA, 1078 bp, Homo sapiens
gcgcggcgctgctgggttctccgaggcgacctggccgccggccgctcctccgcgcgctgttccgcacttgctgccctcgcccggcccggagcgccgctgccatgcggctggcgctgctctgggccctggggctcctgggcgcgggcagccctctgccttcctggccgctcccaaatataggtggcactgaggagcagcaggcagagtcagagaaggccccgagggagcccttggagccccaggtccttcaggacgatctcccaattagcctcaaaaaggtgcttcagaccagtctgcctgagcccctgaggatcaagttggagctggacggtgacagtcatatcctggagctgctacagaatagggagttggtcccaggccgcccaaccctggtgtggtaccagcccgatggcactcgggtggtcagtgagggacacactttggagaactgctgctaccagggaagagtgcggggatatgcaggctcctgggtgtccatctgcacctgctctgggctcagaggcttggtggtcctgaccccagagagaagctataccctggagcaggggcctggggaccttcagggtcctcccattatttcgcgaatccaagatctccacctgccaggccacacctgtgccctgagctggcgggaatctgtacacactcagacgccaccagagcaccccctgggacagcgccacattcgccgggtgaggatgaatggcagggggggtgggctttggttgtcttgagggctgatccccagacacttagagctatgtgtgcacagtaacaacagctcctgcgaatggagcactttccacatgctgggcactttgtgaacattagctcgtgtactcctcccatacctaggaggtaggtgctatcaatagctctattttaaaatgacgaaaccttacaaaaagtatctgggcatggtggcgtgcacccgtagttccagccactcaggaggccgaagtggaagaatcgcttgagcccaggaggcagaggtttcagtgggccgagatcgagccactacacaccagcctgggtgaaagagtgagacctcgtctca

SEQ ID NO: 426927 - DNA, 2852 bp, Homo sapiens
gcgcggcgctgctgggttctccgaggcgacctggccgccggccgctcctccgcgcgctgttccgcacttgctgccctcgcccggcccggagcgccgctgccatgcggctggcgctgctctgggccctggggctcctgggcgcgggcagccctctgccttcctggccgctcccaaatataggtggcactgaggagcagcaggcagagtcagagaaggccccgagggagcccttggagccccaggtccttcaggacgatctcccaattagcctcaaaaaggtgcttcagaccagtctgcctgagcccctgaggatcaagttggagctggacggtgacagtcatatcctggagctgctacagaatagggagttggtcccaggccgcccaaccctggtgtggtaccagcccgatggcactcgggtggtcagtgagggacacactttggagaactgctgctaccagggaagagtgcggggatatgcaggctcctgggtgtccatctgcacctgctctgggctcagaggcttggtggtcctgaccccagagagaagctataccctggagcaggggcctggggaccttcagggtcctcccattatttcgcgaatccaagatctccacctgccaggccacacctgtgccctgagctggcgggaatctgtacacactcagacgccaccagagcaccccctgggacagcgccacattcgccggaggcgggatgtggtaacagagaccaagactgtggagttggtgattgtggctgatcactcggaggcccagaaataccgggacttccagcacctgctaaaccgcacactggaagtggccctcttgctggacacattcttccggcccctgaatgtacgagtggcactagtgggcctggaggcctggacccagcgtgacctggtggagatcagcccaaacccagctgtcaccctcgaaaacttcctccactggcgcagggcacatttgctgcctcgattgccccatgacagtgcccagctggtgactggtacttcattctctgggcctacggtgggcatggccattcagaactccatctgttctcctgacttctcaggaggtgtgaacatggaccactccaccagcatcctgggagtcgcctcctccatagcccatgagttgggccacagcctgggcctggaccatgatttgcctgggaatagctgcccctgtccaggtccagccccagccaagacctgcatcatggaggcctccacagacttcctaccaggcctgaacttcagcaactgcagccgacgggccctggagaaagccctcctggatggaatgggcagctgcctcttcgaacggctgcctagcctaccccctatggctgctttctgcggaaatatgtttgtggagccgggcgagcagtgtgactgtggcttcctggatgactgcgtcgatccctgctgtgattctttgacctgccagctgaggccaggtgcacagtgtgcatctgacggaccctgttgtcaaaattgccagctgcgcccgtctggctggcagtgtcgtcctaccagaggggattgtgacttgcctgaattctgcccaggagacagctcccagtgtccccctgatgtcagcctaggggatggcgagccctgcgctggcgggcaagctgtgtgcatgcacgggcgttgtgcctcctatgcccagcagtgccagtcactttggggacctggagcccagcccgctgcgccactttgcctccagacagctaatactcggggaaatgcttttgggagctgtgggcgcaaccccagtggcagttatgtgtcctgcacccctagagatgccatttgtgggcagctccagtgccagacaggtaggacccagcctctgctgggctccatccgggatctactctgggagacaatagatgtgaatgggactgagctgaactgcagctgggtgcacctggacctgggcagtgatgtggcccagcccctcctgactctgcctggcacagcctgtggccctggcctggtgtgtatagaccatcgatgccagcgtgtggatctcctgggggcacaggaatgtcgaagcaaatgccatggacatggggtctgtgacagcaacaggcactgctactgtgaggagggctgggcaccccctgactgcaccactcagctcaaagcaaccagctccctgaccacagggctgctcctcagcctcctggtcttattggtcctggtgatgcttggtgccagctactggtaccgtgcccgcctgcaccagcgactctgccagctcaagggacccacctgccagtacagggcagcccaatctggtccctctgaacggccaggacctccgcagagggccctgctggcacgaggcactaagtctcaggggccagccaagcccccacccccaaggaagccactgcctgccgacccccagggccggtgcccatcgggtgacctgcccggcccaggggctggaatcccgcccctagtggtaccctccagaccagcgccaccgcctccgacagtgtcctcgctctacctctgacctctccggaggttccgctgcctccaagccggacttagggcttcaagaggcgggcgtgccctctggagtcccctaccatgactgaaggcgccagagactggcggtgtcttaagactccgggcaccgccacgcgctgtcaagcaacactctgcggacctgccggcgtagttgcagcgggggcttggggaggggctgggggttggacgggattgaggaaggtccgcacagcctgtctctgctcagttgcaataaacgtgacatcttgggagcgttaaaaacacaaacacaacaacacaaaaaaacaag

SEQ ID NO: 426928 - DNA, 1131 bp, Homo sapiens
gacactctgagcctcagaagcagcaaagtgtctcaggggccagccaagcccccacccccaaggaagccactgcctgccgacccccagggccggtgcccatcgggtgacctgcccggcccaggggctggaatcccgcccctagtggtaccctccagaccagcgccaccgcctccgacagtgtcctcgctctacctctgacctctccggaggttccgctgcctccaagccggacttagggcttcaagaggcgggcgtgccctctggagtcccctaccatgactgaaggcgccagagactggcggtgtcttaagactccgggcaccgccacgcgctgtcaagcaacactctgcggacctgccggcgtagttgcagcgggggcttggggaggggctgggggttggacgggattgaggaaggtccgcacagcctgtctctgctcagttgcaataaacgtgacatcttgggagcgttaaaaaaaaaaaaaaaaaaacaagaaaacaagaatatctccaaaaggggcacaggacaccttccaaacgcgaccaccaaagcgagagccccaggagatgaggccccccaaacaaccacggacaataagcaacgccacatccaggcaacacgcaaaccacaaacacaacgccacggcgacacacgacgacccccgaaacccaaagaaccaacgcacgtcgcgacacacccgaagccctacaacagacaagaagaaaataagcggcaaaacacacgcagacaaaaaaactcacgacaccacgaatacacacagcgagggaaaacagatgcacacattcaggcaacggcattgcgtgccaaaaacgcccgagagaaaagcggacaacagttggaagaaccacaaccgccccaggctagccgggaccaggtagacacgcctcccccgcagctgtcgtactccccacagggaaggctcctgaccccctcacactgcactaagacccagagctacgcgaagaccgcggcgcgcacagacaaacaaaacccgcggcacctcataacaccgggcaggagatagagaaaacaccagacaacagcacagcagcctcccgaataaacaaagacacacacaaaaacacaaagacaacaccactctgcagccat

SEQ ID NO: 426929 - DNA, 3104 bp, Homo sapiens
gcgcggcgctgctgggttctccgaggcgacctggccgccggccgctcctccgcgcgctgttccgcacttgctgccctcgcccggcccggagcgccgctgccatgcggctggcgctgctctgggccctggggctcctgggcgcgggcagccctctgccttcctggccgctcccaaatataggtggcactgaggagcagcaggcagagtcagagaaggccccgagggagcccttggagccccaggtccttcaggacgatctcccaattagcctcaaaaaggtgcttcagaccagtctgcctgagcccctgaggatcaagttggagctggacggtgacagtcatatcctggagctgctacagaatagggagttggtcccaggccgcccaaccctggtgtggtaccagcccgatggcactcgggtggtcagtgagggacacactttggagaactgctgctaccagggaagagtgcggggatatgcaggctcctgggtgtccatctgcacctgctctgggctcagaggcttggtggtcctgaccccagagagaagctataccctggagcaggggcctggggaccttcagggtcctcccattatttcgcgaatccaagatctccacctgccaggccacacctgtgccctgagctggcgggaatctgtacacactcagacgccaccagagcaccccctgggacagcgccacattcgccggaggcgggatgtggtaacagagaccaagactgtggagttggtgattgtggctgatcactcggaggcccagaaataccgggacttccagcacctgctaaaccgcacactggaagtggccctcttgctggacacattcttccggcccctgaatgtacgagtggcactagtgggcctggaggcctggacccagcgtgacctggtggagatcagcccaaacccagctgtcaccctcgaaaacttcctccactggcgcagggcacatttgctgcctcgattgccccatgacagtgcccagctggtgactggtacttcattctctgggcctacggtgggcatggccattcagaactccatctgttctcctgacttctcaggaggtgtgaacatggaccactccaccagcatcctgggagtcgcctcctccatagcccatgagttgggccacagcctgggcctggaccatgatttgcctgggaatagctgcccctgtccaggtccagccccagccaagacctgcatcatggaggcctccacagacttcctaccaggcctgaacttcagcaactgcagccgacgggccctggagaaagccctcctggatggaatgggcagctgcctcttcgaacggctgcctagcctaccccctatggctgctttctgcggaaatatgtttgtggagccgggcgagcagtgtgactgtggcttcctggatgactgcgtcgatccctgctgtgattctttgacctgccagctgaggccaggtgcacagtgtgcatctgacggaccctgttgtcaaaattgccagctgcgcccgtctggctggcagtgtcgtcctaccagaggggattgtgacttgcctgaattctgcccaggagacagctcccagtgtccccctgatgtcagcctaggggatggcgagccctgcgctggcgggcaagctgtgtgcatgcacgggcgttgtgcctcctatgcccagcagtgccagtcactttggggacctggagcccagcccgctgcgccactttgcctccagacagctaatactcggggaaatgcttttgggagctgtgggcgcaaccccagtggcagttatgtgtcctgcacccctagagatgccatttgtgggcagctccagtgccagacaggtaggacccagcctctgctgggctccatccgggatctactctgggagacaatagatgtgaatgggactgagctgaactgcagctgggtgcacctggacctgggcagtgatgtggcccagcccctcctgactctgcctggcacagcctgtggccctggcctggtgtgtatagaccatcgatgccagcgtgtggatctcctgggggcacaggaatgtcgaagcaaatgccatggacatggggtctgtgacagcaacaggcactgctactgtgaggagggctgggcaccccctgactgcaccactcagctcaaagcaaccagctccctgaccacagggctgctcctcagcctcctggtcttattggtcctggtgatgcttggtgccagctactggtaccgtgcccgcctgcaccagcgactctgccagctcaagggacccacctgccagtacagggcagcccaatctggtccctctgaacggccaggacctccgcagagggccctgctggcacgaggcactaaggctagtgctctcagcttcccggcccccccttccaggccgtgccgcctgaccctgtgtccaagagactccaggctgagctggctgaccgacccaatccccctacccgccctctgcccgctgacccggtggtgagaagcccgaaggtaacggtggggggagagaagggcacggcctctccccccacctagggctgtggtgctggtagccatgacggtggtggccgtggcgagatgccccctcagtgcatgagggcacatatcccggtggtgcctttaatggtgacagtctcaggggccagccaagcccccacccccaaggaagccactgcctgccgacccccagggccggtgcccatcgggtgacctgcccggcccaggggctggaatcccgcccctagtggtaccctccagaccagcgccaccgcctccgacagtgtcctcgctctacctctgacctctccggaggttccgctgcctccaagccggacttagggcttcaagaggcgggcgtgccctctggagtcccctaccatgactgaaggcgccagagactggcggtgtcttaagactccgggcaccgccacgcgctgtcaagcaacactctgcggacctgccggcgtagttgcagcgggggcttggggaggggctgggggttggacgggattgaggaaggtccgcacagcctgtctctgctcagttgcaataaacgtgacatcttgggagcgtt

SEQ ID NO: 426930 - DNA, 2893 bp, Homo sapiens
gcgcggcgctgctgggttctccgaggcgacctggccgccggccgctcctccgcgcgctgttccgcacttgctgccctcgcccggcccggagcgccgctgccatgcggctggcgctgctctgggccctggggctcctgggcgcgggcagccctctgccttcctggccgctcccaaatataggtggcactgaggagcagcaggcagagtcagagaaggccccgagggagcccttggagccccaggtccttcaggacgatctcccaattagcctcaaaaaggtgcttcagaccagtctgcctgagcccctgaggatcaagttggagctggacggtgacagtcatatcctggagctgctacagaatagggagttggtcccaggccgcccaaccctggtgtggtaccagcccgatggcactcgggtggtcagtgagggacacactttggagaactgctgctaccagggaagagtgcggggatatgcaggctcctgggtgtccatctgcacctgctctgggctcagaggcttggtggtcctgaccccagagagaagctataccctggagcaggggcctggggaccttcagggtcctcccattatttcgcgaatccaagatctccacctgccaggccacacctgtgccctgagctggcgggaatctgtacacactcagacgccaccagagcaccccctgggacagcgccacattcgccggaggcgggatgtggtaacagagaccaagactgtggagttggtgattgtggctgatcactcggaggcccagaaataccgggacttccagcacctgctaaaccgcacactggaagtggccctcttgctggacacattcttccggcccctgaatgtacgagtggcactagtgggcctggaggcctggacccagcgtgacctggtggagatcagcccaaacccagctgtcaccctcgaaaacttcctccactggcgcagggcacatttgctgcctcgattgccccatgacagtgcccagctggtgactggtacttcattctctgggcctacggtgggcatggccattcagaactccatctgttctcctgacttctcaggaggtgtgaacatggaccactccaccagcatcctgggagtcgcctcctccatagcccatgagttgggccacagcctgggcctggaccatgatttgcctgggaatagctgcccctgtccaggtccagccccagccaagacctgcatcatggaggcctccacagacttcctaccaggcctgaacttcagcaactgcagccgacgggccctggagaaagccctcctggatggaatgggcagctgcctcttcgaacggctgcctagcctaccccctatggctgctttctgcggaaatatgtttgtggagccgggcgagcagtgtgactgtggcttcctggatgactgcgtcgatccctgctgtgattctttgacctgccagctgaggccaggtgcacagtgtgcatctgacggaccctgttgtcaaaattgccagctgcgcccgtctggctggcagtgtcgtcctaccagaggggattgtgacttgcctgaattctgcccaggagacagctcccagtgtccccctgatgtcagcctaggggatggcgagccctgcgctggcgggcaagctgtgtgcatgcacgggcgttgtgcctcctatgcccagcagtgccagtcactttggggacctggagcccagcccgctgcgccactttgcctccagacagctaatactcggggaaatgcttttgggagctgtgggcgcaaccccagtggcagttatgtgtcctgcacccctagagatgccatttgtgggcagctccagtgccagacaggtaggacccagcctctgctgggctccatccgggatctactctgggagacaatagatgtgaatgggactgagctgaactgcagctgggtgcacctggacctgggcagtgatgtggcccagcccctcctgactctgcctggcacagcctgtggccctggcctggtgtgtatagaccatcgatgccagcgtgtggatctcctgggggcacaggaatgtcgaagcaaatgccatggacatggggtctgtgacagcaacaggcactgctactgtgaggagggctgggcaccccctgactgcaccactcagctcaaagcaaccagctccctgaccacagggctgctcctcagcctcctggtcttattggtcctggtgatgcttggtgccagctactggtaccgtgcccgcctgcaccagcgactctgccagctcaagggacccacctgccagtacagggcagcccaatctggtccctctgaacggccaggacctccgcagagggccctgctggcacgaggcactaagaggctgagctggctgaccgacccaatccccctacccgccctctgcccgctgacccggtggtgagaagcccgaagtctcaggggccagccaagcccccacccccaaggaagccactgcctgccgacccccagggccggtgcccatcgggtgacctgcccggcccaggggctggaatcccgcccctagtggtaccctccagaccagcgccaccgcctccgacagtgtcctcgctctacctctgacctctccggaggttccgctgcctccaagccggacttagggcttcaagaggcgggcgtgccctctggagtcccctaccatgactgaaggcgccagagactggcggtgtcttaagactccgggcaccgccacgcgctgtcaagcaacactctgcggacctgccggcgtagttgcagcgggggcttggggaggggctgggggttggacgggattgaggaaggtccgcacagcctgtctctgctcagttgcaataaacgtgacatcttgggagcgtt

SEQ ID NO: 426931 - DNA, 2931 bp, Homo sapiens
gcgcggcgctgctgggttctccgaggcgacctggccgccggccgctcctccgcgcgctgttccgcacttgctgccctcgcccggcccggagcgccgctgccatgcggctggcgctgctctgggccctggggctcctgggcgcgggcagccctctgccttcctggccgctcccaaatataggtggcactgaggagcagcaggcagagtcagagaaggccccgagggagcccttggagccccaggtccttcaggacgatctcccaattagcctcaaaaaggtgcttcagaccagtctgcctgagcccctgaggatcaagttggagctggacggtgacagtcatatcctggagctgctacagaatagggagttggtcccaggccgcccaaccctggtgtggtaccagcccgatggcactcgggtggtcagtgagggacacactttggagaactgctgctaccagggaagagtgcggggatatgcaggctcctgggtgtccatctgcacctgctctgggctcagaggcttggtggtcctgaccccagagagaagctataccctggagcaggggcctggggaccttcagggtcctcccattatttcgcgaatccaagatctccacctgccaggccacacctgtgccctgagctggcgggaatctgtacacactcagacgccaccagagcaccccctgggacagcgccacattcgccggaggcgggatgtggtaacagagaccaagactgtggagttggtgattgtggctgatcactcggaggcccagaaataccgggacttccagcacctgctaaaccgcacactggaagtggccctcttgctggacacagtgagtgctggacagggcaacccccaccccaggcccctgaccatggcaacccctcttctgagccccagctgtctttcagttcttccggcccctgaatgtacgagtggcactagtgggcctggaggcctggacccagcgtgacctggtggagatcagcccaaacccagctgtcaccctcgaaaacttcctccactggcgcagggcacatttgctgcctcgattgccccatgacagtgcccagctggtgactggtacttcattctctgggcctacggtgggcatggccattcagaactccatctgttctcctgacttctcaggaggtgtgaacatggaccactccaccagcatcctgggagtcgcctcctccatagcccatgagttgggccacagcctgggcctggaccatgatttgcctgggaatagctgcccctgtccaggtccagccccagccaagacctgcatcatggaggcctccacagacttcctaccaggcctgaacttcagcaactgcagccgacgggccctggagaaagccctcctggatggaatgggcagctgcctcttcgaacggctgcctagcctaccccctatggctgctttctgcggaaatatgtttgtggagccgggcgagcagtgtgactgtggcttcctggatgactgcgtcgatccctgctgtgattctttgacctgccagctgaggccaggtgcacagtgtgcatctgacggaccctgttgtcaaaattgccagctgcgcccgtctggctggcagtgtcgtcctaccagaggggattgtgacttgcctgaattctgcccaggagacagctcccagtgtccccctgatgtcagcctaggggatggcgagccctgcgctggcgggcaagctgtgtgcatgcacgggcgttgtgcctcctatgcccagcagtgccagtcactttggggacctggagcccagcccgctgcgccactttgcctccagacagctaatactcggggaaatgcttttgggagctgtgggcgcaaccccagtggcagttatgtgtcctgcacccctagagatgccatttgtgggcagctccagtgccagacaggtaggacccagcctctgctgggctccatccgggatctactctgggagacaatagatgtgaatgggactgagctgaactgcagctgggtgcacctggacctgggcagtgatgtggcccagcccctcctgactctgcctggcacagcctgtggccctggcctggtgtgtatagaccatcgatgccagcgtgtggatctcctgggggcacaggaatgtcgaagcaaatgccatggacatggggtctgtgacagcaacaggcactgctactgtgaggagggctgggcaccccctgactgcaccactcagctcaaagcaaccagctccctgaccacagggctgctcctcagcctcctggtcttattggtcctggtgatgcttggtgccagctactggtaccgtgcccgcctgcaccagcgactctgccagctcaagggacccacctgccagtacagggcagcccaatctggtccctctgaacggccaggacctccgcagagggccctgctggcacgaggcactaagtctcaggggccagccaagcccccacccccaaggaagccactgcctgccgacccccagggccggtgcccatcgggtgacctgcccggcccaggggctggaatcccgcccctagtggtaccctccagaccagcgccaccgcctccgacagtgtcctcgctctacctctgacctctccggaggttccgctgcctccaagccggacttagggcttcaagaggcgggcgtgccctctggagtcccctaccatgactgaaggcgccagagactggcggtgtcttaagactccgggcaccgccacgcgctgtcaagcaacactctgcggacctgccggcgtagttgcagcgggggcttggggaggggctgggggttggacgggattgaggaaggtccgcacagcctgtctctgctcagttgcaataaacgtgacatcttgggagcgttaaaaacacaaacacaacaacacaaaaaaacaag

SEQ ID NO: 426932 - DNA, 1171 bp, Homo sapiens
gcgcggcgctgctgggttctccgaggcgacctggccgccggccgctcctccgcgcgctgttccgcacttgctgccctcgcccggcccggagcgccgctgccatgcggctggcgctgctctgggccctggggctcctgggcgcgggcagccctctgccttcctggccgctcccaaatataggtggcactgaggagcagcaggcagagtcagagaaggccccgagggagcccttggagccccaggtccttcaggacgatctcccaattagcctcaaaaaggtgcttcagaccagtctgcctgagcccctgaggatcaagttggagctggacggtgacagtcatatcctggagctgctacagaatagggagttggtcccaggccgcccaaccctggtgtggtaccagcccgatggcactcgggtggtcagtgagggacacactttggagaactgctgctaccagggaagagtgcggggatatgcaggctcctgggtgtccatctgcacctgctctgggctcagaggcttggtggtcctgaccccagagagaagctataccctggagcaggggcctggggaccttcagggtcctcccattatttcgcgaatccaagatctccacctgccaggccacacctgtgccctgagctggcgggaatctgtacacactcagacgccaccagagcaccccctgggacagcgccacattcgccggaggcgggatgtggtaacagagaccaagactgtggagttggtgattgtggctgatcactcggaggcccagaaataccgggacttccagcacctgctaaaccgcacactggaagtggccctcttgctggacacagtgagtgctggacagggcaacccccaccccaggcccctgaccatggcaacccctcttctgagccccagctgtctttcagttcttccggcccctgaatgtacgagtggcactagtgggcctggaggcctggacccagcgtgacctggtggagatcagcccaaacccagctgtcaccctcgaaaacttcctccactggcgcagggcacatttgctgcctcgattgccccatgacagtgcccagctggtgactggtacttcattaatctgggcctacggagggaatggccattcaacgcgctccgaccgctaacatactgcaggctcat

SEQ ID NO: 426933 - DNA, 655 bp, Homo sapiens
gcgcggcgctgctgggttctccgaggcgacctggccgccggccgctcctccgcgcgctgttccgcacttgctgccctcgcccggcccggagcgccgctgccatgcggctggcgctgctctgggccctggggctcctgggcgcgggcagccctctgccttcctggccgctcccaaatataggtggcactgaggagcagcaggcagagtcagagaaggccccgagggagcccttggagccccaggtccttcaggacgatctcccaattagcctcaaaaaggtgcttcagaccagtctgcctgagcccctgaggatcaagttggagctggacggtgacagtcatatcctggagctgctacagaatagggagttggtcccaggccgcccaaccctggtgtggtaccagcccgatggcactcgggtggtcagtgagggacacactttggagaactgctgctaccagggaagagtgcggggatatgcaggctcctgggtgtccatctgcacctgctctgggctcagaggcttggtggtcctgaccccagagagaagctatacccggggagggggaggcagacagattactagaccccaggagtttgagaccagcctgggcaacacggtgagatcccgtctctgctaaaaatacaaaattag

SEQ ID NO: 426934 - DNA, 3082 bp, Homo sapiens
aactaaggctaggtacgaggctgggttgtgcgggccggccgacatggcggcagcggtggcggctgcgctggcgcggcttttggcggcctttctgctcctcgcggcccaggtggcctgtgagtacggcatggtgcacgtggtctcccaggccgggggccccgaaggcaaagactactgcatcctctacaacccgcagtgggcccatcttccgcacgacctcagcaaggcatctttcctgcagctgcgcaactggacggcctccctgctctgctccgcagccgacctccccgcccgtggcttcagcaaccagatcccgctggtggcgcgggggaactgcaccttctatgagaaagtgaggctggcccagggcagcggagcacgcgggctgctcatcgtcagcagggagaggctggtccccccggggggtaataagacgcagtatgatgagattggcattcccgtggccctgctcagctacaaagacatgctggacatcttcacgcgtttcggccgcacggtgagggcggcgctgtatgcgcctaaggagccggtgctggactacaacatggtcatcatcttcatcatggctgtgggcaccgtcgccatcggcggctactgggccgggagtcgggacgtgaagaaaaggtacatgaagcacaagcgcgacgatgggcccgagaagcaggaggacgaggcggtggacgtgacgccggtgatgacctgcgtgtttgtggtgatgtgctgctccatgctggtgctgctctactatttctacgacctcctcgtgtacgtggtcatcgggatcttctgcctggcctccgccaccggcctctacagctgcctggcgccctgtgtgcggcggctgcccttcggcaagtgcaggatccccaacaacagcctgccctacttccacaagcgcccgcaggcccgtatgctgctcctggcgctcttctgcgtggccgtcagcgtggtgtggggcgtcttccgcaacgaggaccagtaagtgctgcttcccccgggccccggcgggcagcggagtcctcgggcgcaccagggctcctggggccctgactccctgccctccctggaggccgccccagcctggagctgcttcagcaccgcgtgatgaagagccctggccccgggctgctctgacagggctgcgagggcgtttcacctggggtttgtccgggtgtcatgggaaccctgactggaatccgggaggagaggccggagcccctgtggccaggagccacgtcctccagcctggatgggactcctttgtggggcatcgctgcccagggccacagtctgtcccccgctgtccctttcctggcacccacgtgcacgccgcaggttcgaggcccagggtgtgggcaccagggcacccggtcctcttggtcatgactgctgcggcttctgagcagtggtggaggtggggcaggcactgctccccccacgctcacctcccacgtggcctggacttgtggctgcctcccgctggccgggcctcccccatgaggccgagtgcctggtgccgtgttgggaggacagagctggcccgtccccgcccggtccccaccgctgtcgctgataccatctggcacttcctcccagccttcctgaggcagccaagtacgcttggctttggtgtgtattggagccacggcacgtttaactggcagaaggaagatgtgaaaatattttgaatcctttgtacacaaagagaaaatgaatcttttcagttatttccaagccaggaaactcgctccgtcacatgaagttagagcaggcctcagtcagctgggcgcaggggctcacgcctgggatcccagcatttggtaggccaaggcaggacgatcactttgcccaggagttcaagaccagcctgggcaacaagcgagacgccctatttaagaaataatataaaatcagaaaaaataactggccgcagttctctgggtgcttgaagtacgtggcgcctggaattggctgtaccagcgtctcccatggaggcctctgctgttagcagccgccccgccctggagatgtttttatcccattttcaaatgaagcctttgatgtttgagacgctgaggaacgctggggaactcgtccagcaagtgacaggcagagcctgcattgggggcaggggccagcggggaggggactctggggcttcgtggggccaggagagagccgaagttgcggctggctgcaggggccgtggccttgtgcaggaggcagttctgtgctttgccccagggcaccaaccgcatggcagccccacccactgtggacccagaggttctttgaggaaacctggtgtggcacaagttttaatttaataaacagtttgggcacgggggctcatgcctgtaatcccagcactttgggaggtgaggcgggcagatcacttgaggtcaggagtttgagaccagcctggccaacatgacaaaaccccatctctactaaaaatacaaaaaaatttgcctggcattgtggtgtgtgcctgtaatcccagctacttgggaggctgaggcaggagaattgcttgaacctgggaggtggaggttgcagcgagtcaagatcgtgccaccaaactccagcctgggtgacagagtgagactccatctcaaaaacaaaataaaaacagtttggaggggtcagtgcccaagccctcctgcgcacgcaccctctgcctggcccctgcctacagcctgtgacccctgcctacagcgtgacgcccaccatccggggacagtgactgaggggacgcagccggccaggcccgtgtccaccatcctggccccaccatccggggacagcgactgaggggacgcagccggccaggcccgtgtccaccgtcctggccccaccatctggggacagcgaccgaggagacgcagccggccaggcctgtgtccactgtcctggctgccgagtggtgggctcctctacctgcttccgcagggtgggccctggggtggggcctgtgccgccagccctgctggagttgtaacagcaggggtcctcccacaggtctggggtcctcagagtcatcccctgggcaggtggaagg

SEQ ID NO: 426935 - DNA, 2552 bp, Homo sapiens
cggggcggttccttgcgcttcagtcccccccgggtcccctcctgctcccgggttttctgccccgttcccccgggtggctgtgggctcccgagccccgtgtcggccagccggccccagggccccacgaccccatggtgtctcccaagaaggtacatgaagcacaagcgcgacgatgggcccgagaagcaggaggacgaggcggtggacgtgacgccggtgatgacctgcgtgtttgtggtgatgtgctgctccatgctggtgctgctctactatttctacgacctcctcgtgtacgtggtcatcgggatcttctgcctggcctccgccaccggcctctacagctgcctggcgccctgtgtgcggcggctgcccttcggcaagtgcagcgcccgcaggcccgtatgctgctcctggcgctcttctgcgtggccgtcagcgtggtgtggggcgtcttccgcaacgaggaccagtaagtgctgcttcccccgggccccggcgggcagcggagtcctcgggcgcaccagggctcctggggccctgactccctgccctccctggaggccgccccagcctggagctgcttcagcaccgcgtgatgaagagccctggccccgggctgctctgacagggctgcgagggcgtttcacctggggtttgtccgggtgtcatgggaaccctgactggaatccgggaggagaggccggagcccctgtggccaggagccacgtcctccagcctggatgggactcctttgtggggcatcgctgcccagggccacagtctgtcccccgctgtccctttcctggcacccacgtgcacgccgcaggttcgaggcccagggtgtgggcaccagggcacccggtcctcttggtcatgactgctgcggcttctgagcagtggtggaggtggggcaggcactgctccccccacgctcacctcccacgtggcctggacttgtggctgcctcccgctggccgggcctcccccatgaggccgagtgcctggtgccgtgttgggaggacagagctggcccgtccccgcccggtccccaccgctgtcgctgataccatctggcacttcctcccagccttcctgaggcagccaagtacgcttggctttggtgtgtattggagccacggcacgtttaactggcagaaggaagatgtgaaaatattttgaatcctttgtacacaaagagaaaatgaatcttttcagttatttccaagccaggaaactcgctccgtcacatgaagttagagcaggcctcagtcagctgggcgcaggggctcacgcctgggatcccagcatttggtaggccaaggcaggacgatcactttgcccaggagttcaagaccagcctgggcaacaagcgagacgccctatttaagaaataatataaaatcagaaaaaataactggccgcagttctctgggtgcttgaagtacgtggcgcctggaattggctgtaccagcgtctcccatggaggcctctgctgttagcagccgccccgccctggagatgtttttatcccattttcaaatgaagcctttgatgtttgagacgctgaggaacgctggggaactcgtccagcaagtgacaggcagagcctgcattgggggcaggggccagcggggaggggactctggggcttcgtggggccaggagagagccgaagttgcggctggctgcaggggccgtggccttgtgcaggaggcagttctgtgctttgccccagggcaccaaccgcatggcagccccacccactgtggacccagaggttctttgaggaaacctggtgtggcacaagttttaatttaataaacagtttgggcacgggggctcatgcctgtaatcccagcactttgggaggtgaggcgggcagatcacttgaggtcaggagtttgagaccagcctggccaacatgacaaaaccccatctctactaaaaatacaaaaaaatttgcctggcattgtggtgtgtgcctgtaatcccagctacttgggaggctgaggcaggagaattgcttgaacctgggaggtggaggttgcagcgagtcaagatcgtgccaccaaactccagcctgggtgacagagtgagactccatctcaaaaacaaaataaaaacagtttggaggggtcagtgcccaagccctcctgcgcacgcaccctctgcctggcccctgcctacagcctgtgacccctgcctacagcgtgacgcccaccatccggggacagtgactgaggggacgcagccggccaggcccgtgtccaccatcctggccccaccatccggggacagcgactgaggggacgcagccggccaggcccgtgtccaccgtcctggccccaccatctggggacagcgaccgaggagacgcagccggccaggcctgtgtccactgtcctggctgccgagtggtgggctcctctacctgcttccgcagggtgggccctggggtggggcctgtgccgccagccctgctggagttgtaacagcaggggtcctcccacaggtctggggtcctcagagtcatcccctgggcaggtggaagg

SEQ ID NO: 426936 - DNA, 1413 bp, Homo sapiens
gtacgccttggaaataactgaaaagattcattttctgttcgtgtacaaaggattcaaaatattttcacatcttccttctgccagttaaacgtgccgtcgctccgtcacatgaagttagagcaggcctcagtcagctgggcgcaggggctcacgcctgggatcccagcatttggtaggccaaggcaggacgatcactttgcccaggagttcaagaccagcctgggcaacaagcgagacgccctatttaagaaataatataaaatcagaaaaaataactggccgcagttctctgggtgcttgaagtacgtggcgcctggaattggctgtaccagcgtctcccatggaggcctctgctgttagcagccgccccgccctggagatgtttttatcccattttcaaatgaagcctttgatgtttgagacgctgaggaacgctggggaactcgtccagcaagtgacaggcagagcctgcattgggggcaggggccagcggggaggggactctggggcttcgtggggccaggagagagccgaagttgcggctggctgcaggggccgtggccttgtgcaggaggcagttctgtgctttgccccagggcaccaaccgcatggcagccccacccactgtggacccagaggttctttgaggaaacctggtgtggcacaagttttaatttaataaacagtttgggcacgggggctcatgcctgtaatcccagcactttgggaggtgaggcgggcagatcacttgaggtcaggagtttgagaccagcctggccaacatgacaaaaccccatctctactaaaaatacaaaaaaatttgcctggcattgtggtgtgtgcctgtaatcccagctacttgggaggctgaggcaggagaattgcttgaacctgggaggtggaggttgcagcgagtcaagatcgtgccaccaaactccagcctgggtgacagagtgagactccatctcaaaaacaaaataaaaacagtttggaggggtcagtgcccaagccctcctgcgcacgcaccctctgcctggcccctgcctacagcctgtgacccctgcctacagcgtgacgcccaccatccggggacagtgactgaggggacgcagccggccaggcccgtgtccaccatcctggccccaccatccggggacagcgactgaggggacgcagccggccaggcccgtgtccaccgtcctggccccaccatctggggacagcgaccgaggagacgcagccggccaggcctgtgtccactgtcctggctgccgagtggtgggctcctctacctgcttccgcagggtgggccctggggtggggcctgtgccgccagccctgctggagttgtaacagcaggggtcctcccacaggtctggggtcctcagagtcatcccctgggcaggtggaagg

SEQ ID NO: 426937 - DNA, 733 bp, Homo sapiens
cggggcgttgctgggaaacatctgccgttggttgcggcgggcaccggccgacatggcggcagcggtggcggctgcgctggcgcggcttttggcggcctttctgctcctcgcggcccaggtggcctgtgagtacggcatggtgcacgtggtctcccaggccgggggccccgaaggcaaagactactgcatcctctacaacccgcagtgggcccatcttccgcacgacctcagcaaggcatactttccgtgcaagctcgcgcaatctgggactggccctcctctagctcgtgctaccgcaagcgcgacctaccccgcgccgtgcgcttcaagcaaccaagatccctgctgtgtggctgcggcgggaacttgcaccgttctactgagaacagtgatggcttggcccatggagcatgcggtgagacacgctgggcttgctcagtcgtacagcatgtggatgatgtgcttggtctccccctgggggtggtacatacagaccgcatgtagtgactgacgacttggacctatcactgttgcgccgctgctcaggctatcagaagacattagctggaccatcattcactgctgtttcgtgccggcacggttgaggtgctggcagctgatattgcgccataatggacgccgtgtgcctggagctaacaagcataggtccatcatacttcagtcagtggtctgtgcggcaccctgtcgccaatcggcaggctacttgggccgg

SEQ ID NO: 426938 - DNA, 3574 bp, Homo sapiens
cggggcgttgctgggaaacatctgccgttggttgcggcgggcaccggccgacatggcggcagcggtggcggctgcgctggcgcggcttttggcggcctttctgctcctcgcggcccaggtggcctgtgagtacggcatggtgcacgtggtctcccaggccgggggccccgaaggcaaagactactgcatcctctacaacccgcagtgggcccatcttccgcacgacctcagcaaggcatctttcctgcagctgcgcaactggacggcctccctgctctgctccgcagccgacctccccgcccgtggcttcagcaaccagatcccgctggtggcgcgggggaactgcaccttctatgagaaagtgaggctggcccagggcagcggagcacgcgggctgctcatcgtcagcagggagaggctggtccccccggggggtaataagacgcagtatgatgagattggcattcccgtggccctgctcagctacaaagacatgctggacatcttcacgcgtttcggccgcacggtgagggcggcgctgtatgcgcctaaggagccggtgctggactacaacatggtcatcatcttcatcatggctgtgggcaccgtcgccatcggcggctactgggccgggagtcgggacgtgaagaaaaggtacatgaagcacaagcgcgacgatgggcccgagaagcaggaggacgaggcggtggacgtgacgccggtgatgacctgcgtgtttgtggtgatgtgctgctccatgctggtgctgctctactatttctacgacctcctcgtgtacgtggtcatcgggatcttctgcctggcctccgccaccggcctctacagctgcctggcgccctgtgtgcggcggctgcccttcggcaagtgcaggatccccaacaacagcctgccctacttccacaagcgcccgcaggcccgtatgctgctcctggcgctcttctgcgtggccgtcagcgtggtgtggggcgtcttccgcaacgaggaccagtgggcctgggtcctccaggatgccctgggcatcgccttctgcctctacatgctgaagaccatccgtctgcccaccttcaaggcctgcacgctgctgctgctggtgctgttcctctacgacatcttcttcgtgttcatcacgcccttcctgaccaagagtgggagcagcatcatggtggaggtggccactgggccctcggactcagccacccgtgagaagctgcccatggtcctgaaggtgcccaggctgaactcctcacctctggccctgtgtgaccggcccttctccctcctgggtttcggagacattttggtgccagggctgctggtggcctactgccacaggtttgacatccaggtacagtcctccagggtatacttcgtggcctgcaccatcgcctatggcgttggcctccttgtgacattcgtggcactggccctgatgcagcgtggccagcccgctctcctctacctggtgccctgcacgctggtgacgagctgcgctgtggcgctctggcgccgggagctgggcgtgttctggacgggcagcggctttgcgaaagtcctacctccatctccgtgggccccagcaccagccgacggcccgcagcctcccaaagactctgccacgccactctccccgcagccgcccagcgaagaaccagccacatccccctggcctgctgagcagtccccaaaatcacgcacgtccgaggagatgggggctggagcccccatgcgggagcctgggagcccagctgaatccgagggccgggaccaggcccagccgtccccggtaacccagcctggcgcctcggcctaggggaggggtgagacgctcgctgccgtgcccgccacaccaagatgttggggctgcctggcgcccactggagacagacagacagacgcctgtcccccgggaccgaggcctgtgccgtccccacccgccccaacatggtgctcatccttgccgagacccctgcggtctgtgcccgcgcccagcccagctgccccggctgcacgcctgctgctcccagctcgcccggctgccacaagctctctgcgggtccatcctccccaccggggtccgtcctcgcaggccctgcccggcctctctgcagaccctcaagcgtcgtctgcatgagtgagcaggcgtgggtggactctggccgcggccacacttggtgctcaccagctgcttcggccttcaggtgacctccctccccacggcatcctgctctccgggtggaagagcagctttctgtctcccagaaggcatcgcttttccctcttgagcagatcggagcccctgggaggtttggaagctgcctccaagcctaggacacggaccggtggccggggcggcctctggcccctgacgctggctgagacaggcccgtggggcggggttttggggcgtgaacaaggctggcagtaagtggacaagctgctcccctggctaaggccctgccctgccctcagccagaggtgcctggccatgcctgcacactcctccccattttaataaatggtcgcaacttctagaagtcctgctggtgccacctggtggggtggacgtctctcagactgcccttctgacaagcaggggtgggcgccaggcaggctgggtcaggccctcaggggtccctggagccctgggagggagggactgggtcgtgggaggtcctggtagctcccggcacccaacctcgcttcccgtgtgggccccgtgttgcttttctgctgagaggggcttgggcctcggttctccctgtggcagcggcattggtgcctgggttcttaaccctctggacccagcagctaggagcttctggaacccacgaggacatctgccactggcatggtctactcactgatggggtcctcctgactccagggcagagacgtccgtgcgggaactgaccgaggcgtggccccaggccccggcatcctcccctcgctgcacgtggtcacttccgaagcagcgctccctgtggccgcagagacagagcccgcaccctggctgtctgtggtgcctgggccccagctcccgcccgccacccgccctgttgagtgcggcctccagactcgagtccagaatctgtttctgtcaagtcagtcgtccccagctgcacacggggactgctgagcgctgcgctctcacgggtctgttccggacagagggtggcaggggtgagccctgatcccttacaaaaaataccagcttcccagggagtaatggcgccttcactgaagccattttgtacatggggacggggtggggacgtctcttttttggtgttggacgtttgaccagtggggaggggttcagaggcggcggtcctgtccttggctccgtctgtccgtgtggccttgctgccattccgtctgatcattaaacacagcttttgattaaaaaaaaaggggggcgctaaaaacctgagggcagtacgtccacatttggaaaggcaagagaggaaaaaagggggcgggaaacgcgcggacggacgggctggaagaaccctggggggggaccaaaacggaaaagtgggacctcgcagggtaa

SEQ ID NO: 426939 - DNA, 3870 bp, Homo sapiens
cggggcgttgctgggaaacatctgccgttggttgcggcgggcaccggccgacatggcggcagcggtggcggctgcgctggcgcggcttttggcggcctttctgctcctcgcggcccaggtggcctgtgagtacggcatggtgcacgtggtctcccaggccgggggccccgaaggcaaagactactgcatcctctacaacccgcagtgggcccatcttccgcacgacctcagcaaggcatctttcctgcagctgcgcaactggacggcctccctgctctgctccgcagccgacctccccgcccgtggcttcagcaaccagatcccgctggtggcgcgggggaactgcaccttctatgagaaagtgaggctggcccagggcagcggagcacgcgggctgctcatcgtcagcagggagaggctggtccccccggggggtaataagacgcagtatgatgagattggcattcccgtggccctgctcagctacaaagacatgctggacatcttcacgcgtttcggccgcacggtgagggcggcgctgtatgcgcctaaggagccggtgctggactacaacatggtcatcatcttcatcatggctgtgggcaccgtcgccatcggcggctactgggccgggagtcgggacgtgaagaaaaggtacatgaagcacaagcgcgacgatgggcccgagaagcaggaggacgaggcggtggacgtgacgccggtgatgacctgcgtgtttgtggtgatgtgctgctccatgctggtgctgctctactatttctacgacctcctcgtgtacgtggtcatcgggatcttctgcctggcctccgccaccggcctctacagctgcctggcgccctgtgtgcggcggctgcccttcggcaagtgcaggatccccaacaacagcctgccctacttccacaagcgcccgcaggcccgtatgctgctcctggcgctcttctgcgtggccgtcagcgtggtgtggggcgtcttccgcaacgaggaccagtgggcctgggtcctccaggatgccctgggcatcgccttctgcctctacatgctgaagaccatccgtctgcccaccttcaaggcctgcacgctgctgctgctggtgctgttcctctacgacatcttcttcgtgttcatcacgcccttcctgaccaagagtgggagcagcatcatggtggaggtggccactgggccctcggactcagccacccgtgagaagctgcccatggtcctgaaggtgcccaggctgaactcctcacctctggccctgtgtgaccggcccttctccctcctgggtttcggagacattttggtgccagggctgctggtggcctactgccacaggtttgacatccaggtacagtcctccagggtatacttcgtggcctgcaccatcgcctatggcgttggcctccttgtgacattcgtggcactggccctgatgcagcgtggccagcccgctctcctctacctggtgccctgcacgctggtgacgagctgcgctgtggcgctctggcgccgggagctgggcgtgttctggacgggcagcggctttgcgaaagtcctacctccatctccgtgggccccagcaccagccgacggcccgcagcctcccaaagactctgccacgccactctccccgcagccgcccagcgaagaaccagccacatccccctggcctgctgagcagtccccaaaatcacgcacgtccgaggagatgggggctggagcccccatgcgggagcctgggagcccagctgaatccgagggccgggaccaggcccagccgtccccggtaacccagcctggcgcctcggcctaggggaggggtgagacgctcgctgccgtgcccgccacaccaagatgttggggctgcctggcgcccactggagacagacagacagacgcctgtcccccgggaccgaggcctgtgccgtccccacccgccccaacatggtgctcatccttgccgagacccctgcggtctgtgcccgcgcccagcccagctgccccggctgcacgcctgctgctcccagctcgcccggctgccacaagctctctgcgggtccatcctccccaccggggtccgtcctcgcaggccctgcccggcctctctgcagaccctcaagcgtcgtctgcatgagtgagcaggcgtgggtggactctggccgcggccacacttggtgctcaccagctgcttcggccttcaggtgacctccctccccacggcatcctgctctccgggtggaagagcagctttctgtctcccagaaggcatcgcttttccctcttgagcagatcggagcccctgggaggtttggaagctgcctccaagcctaggacacggaccggtggccggggcggcctctggcccctgacgctggctgagacaggcccgtggggcggggttttggggcgtgaacaaggctggcagtaagtggacaagctgctcccctggctaaggccctgccctgccctcagccagaggtgcctggccatgcctgcacactcctccccattttaataaatggtcgcaacttctagaagtcctgctggtgccacctggtggggtggacgtctctcagactgcccttctgacaagcaggggtgggcgccaggcaggctgggtcaggccctcaggggtccctggagccctgggagggagggactgggtcgtgggaggtcctggtagctcccggcacccaacctcgcttcccgtgtgggccccgtgttgcttttctgctgagaggggcttgggcctcggttctccctgtggcagcggcattggtgcctgggttcttaaccctctggacccagcagctaggagcttctggaacccacgaggacatctgccactggcatggtctactcactgatggggtcctcctgactccagggcagagacgtccgtgcgggaactgaccgaggcgtggccccaggccccggcatcctcccctcgctgcacgtggtcacttccgaagcagcgctccctgtggccgcagagacagagcccgcaccctggctgtctgtggtgcctgggccccagctcccgcccgccacccgccctgttgagtgcggcctccagactcgagtccagaatctgtttctgtcaagtcagtcgtccccagctgcacacggggactgctgagcgctgcgctctcacgggtctgttccggacagagggtggcaggggtgagccctgatcccttacaaaaaataccagcttcccagggagtaatggcgccttcactgaagccattttgtacatggggacggggtggggacgtctcttttttggtgttggacgtttgaccagtggggaggggttcagaggcggcggtcctgtccttggctccgtctgtccgtgtggccttgctgccattccgtctgatcattaaacacagcttttgatacatatggcccggcctctgcctccgcagtgcacggcttggggcatctgctctgtgcaggtcccggtgagcagaactgagagctggcaggccgcctggctgtcctgcagaggacggattggaattgccaccgcagggccggccagtgctgtgaggtgcccagcgtcactcccatgggctctgtgggccatgtggtccctgtcacgcttctcagctctgccactgttgctggaaagcatcacagaccatgtgtaaaatgggccaaaataccttttacaaaattaaaatagagatggggtcttgcagtgttgctgaggctgatctcgaactgctgagctcagacaatcctcctgtctcggcctcccaaagcgctgcaattacaggcacgagccaccacgcccatccctcaagtaattttctcgccagaccctgaaattggaattgtatagca
